(19) United States
(12) Patent Application Publication
(10) Pub. No.: US 2024/0124889 A1
(43) Pub. Date: Apr. 18, 2024

(54) COMPOSITIONS AND METHODS FOR THE VECTORED AUGMENTATION OF PROTEIN DESTRUCTION, EXPRESSION AND/OR REGULATION

(71) Applicant: Voyager Therapeutics, Inc., Cambridge, MA (US)

(72) Inventors: Xiao-Qin Ren, Cambridge, MA (US); Jinzhao Hou, Cambridge, MA (US); Steven Paul, Cambridge, MA (US); Kelly Bales

(21) Appl. No.: 17/609,170

(22) PCT Filed: May 7, 2020
(86) PCT No.: PCT/US2020/031853

§ 371 Date: Nov. 5, 2021

Related U.S. Application Data
(60) Provisional application No. 62/844,433, filed on May 7, 2019.
(60) Provisional application No. 62/984,875, filed on Mar. 4, 2020.

(51) Int. Cl. C12N 15/86; A61K 48/00; C07K 16/00; C12N 9/10

(52) U.S. Cl. CPC C12N 15/86; A61K 48/005; C07K 16/00; C12N 9/104; C12Y 203/02; C12N 2750/14143

(57) ABSTRACT

The disclosure provides compositions and methods for the Vectored Augmentation of the Destruction, Expression and/or Regulation of proteins, e.g., VA-DER systems and methods.

### CROSS REFERENCE TO RELATED APPLICATIONS

[0001] This application claims the benefit of U.S. Provisional Patent Application No. 62/844,433, filed May 7, 2019, entitled “Compositions and methods for vectored augmentation No. 62/984,875, filed Mar. 4, 2020, entitled “Compositions and methods for vectored augmentation of protein destruction, expression and/or regulation”, the contents of each of which are incorporated herein by reference in their entirety.

### REFERENCE TO THE SEQUENCE LISTING

[0002] The present application is being filed along with a Sequence Listing in electronic format. The Sequence Listing file, entitled 20571080PCTSL.txt, was created on May 7, 2020, and is 47,075,659 bytes in size. The information in electronic format of the Sequence Listing is incorporated herein by reference in its entirety.

### FIELD OF THE DISCLOSURE

[0003] The disclosure relates to compositions and methods for Vectored Augmentation of the Destruction, Expression and/or Regulation of proteins, i.e., VA-DER.

### BACKGROUND

[0004] Methods for targeting the destruction of proteins are known in the art. These include, inter cilia, those involving altering the DNA or RNA encoding the protein or interfering with the translation process by knocking out a gene or mRNA which encodes the protein. Recently, a method termed “Trim-Away” was reported by Clift, et al, (Cell, Volume 172, Issue 7, p 1692-1706.e18, 14 Dec. 2017, the contents of which are incorporated herein by reference in their entirety) whereby endogenous proteins are degraded by utilizing antibodies targeted to the protein to be degraded and the TRIM21 protein, which, as an E3 ubiquitin ligase binds with high affinity to a particular domain of Fc region of antibodies. Once the TRIM21 protein binds an antibody, it facilitates the transfer of the bound antibody and its bound antigen to the ubiquitin-proteasome system where the antibody and its bound antigen are degraded. Clift, et at. demonstrated that this research tool could be used in cell culture and primary human and mouse cells.

[0005] The present disclosure goes beyond the benchtop use or application of the Trim-Away tool, Tunable protein expression, degradation and regulation in vivo offers an array of applications in diagnosing, preventing and treating disease. The present disclosure embraces methods for the vectored augmentation of protein destruction, expression and/or regulation, also known herein as VA-DER, which is useful in therapeutics and diagnostics.

### SUMMARY

[0006] Described herein are systems and methods for the vectored augmentation of the destruction, expression and/or regulation of proteins, or VA-DER Systems or Vectored Augmentation (VA) methods. VA-DER systems and VA methods as the name implies, exploit vectored delivery, eg., delivery of nucleic acid-based. vector(s), of one or more components of the VA-DER system. VA-DER system components may be vectorized (encoded by a vector or vector genome) or non vectorized (be amino acid based or nucleic acid based). Vectorized (i.e., encoded in a vector) components may include (i) an antibody or fragment or variant thereof, (ii) a payload protein such as the protein TRIM21 or functional equivalent or variant thereof, and/or (iii) a companion or corollary molecule which may be nucleic acid based (e.g., microRNA, aptamer, siRNA, dsRNA, etc.) or which encodes a peptide or protein or which is a peptide or protein. Any of the vectorized components may also be delivered as non-vectorized components, e.g., a protein along with an AAV encoding an antibody, or an antigen along with a lentivirus encoding an antibody, etc.

[0007] VA-DER systems and/or methods may comprise one or more vectorized or non-vectorized components.

[0008] In some embodiments the vectorized component is an AAV particle comprising a viral genome, wherein the viral genome encodes one or more antibodies.

[0009] In some embodiments the vectorized component is an AAV particle comprising a viral genome, wherein the viral genome encodes TRIM21.

[0010] In some embodiments the vectorized component is an AAV particle comprising a viral genome, wherein the viral genome encodes one or more companion molecules.

[0011] In some embodiments the VA-DER System comprises an AAV vectorized antibody and a protein encoding TRIM21.

[0012] In some embodiments the VA-DER System comprises an AAV vectorized antibody and an AAV vectorized TRIM21.

[0013] VA-DER system may be vectorized (encoded by a vector or vector genome), and the vectorized (i.e., encoded in a vector) component may include a payload comprising a nucleic acid sequence encoding (i) at least one TRIM2.I protein or TRIM21 protein fragment, (ii) at least one antibody or antibody fragment, and/or (iii) at least one target binding protein or fragment thereof. The vector may be an AAV or variant thereof such as, but not limited to, any of the serotypes listed herein including Table 1. The antibody or antibody fragment may be any of the antibodies listed herein including, but not limited to, those listed in Tables 3-53, an Fe, scFV, nanobody, intrabody, and Fab fragment or combinations thereof. As a non-limiting example, the antibody fragment is used in combination with at least one other different antibody fragment. As a non-limiting example, the antibody fragment is an Fc fragment and the Fe fragment is used in combination with at least one other different antibody fragment. As a non-limiting example, the target binding protein is a tau or tau binding protein.

[0014] VA-DER system may be vectorized (encoded by a vector or vector genome), and the vectorized (i.e., encoded in a vector) component may include a chimeric antigen receptor payload comprising a nucleic acid sequence encoding (i) at least one TRIM21 protein or TRIM21 protein fragment, (ii) at least one antibody or antibody fragment, and/or (iii) at least one target binding protein or fragment thereof. The vector may be an AAV or variant thereof such as, but not limited to, any of the serotypes listed herein including Table 1. The antibody or antibody fragment may be any of the antibodies listed herein including, but not limited to, those listed in Tables 3-53, an Fe, scFV, nanobody, intrabody, and Fab fragment or combinations thereof. As a non-limiting example, the antibody fragment is used in combination with at least one other different antibody fragment. As a non-limiting example, the antibody fragment is an Fe fragment and the Fe fragment is used in combination with at least one other different antibody fragment. As a non-limiting example, the target binding protein is a tau or tau binding protein.

### BRIEF DESCRIPTION OF TIM DRAWINGS

[0015] The foregoing and other objects, features, and advantages will be apparent from the following description of particular embodiments of the disclosure, as illustrated in the accompanying drawings. The drawings are not necessarily to scale, emphasis instead being placed upon illustrating the principles of various embodiments of the disclosure.

[0016] FIG. 1 is a schematic of vectored antibody delivery.

[0017] FIG. 2 is a schematic of a viral genome.

[0018] FIG. 3 is a schematic of payload regions. Figure discloses “5xG4S” as SEQ ID NO: 32689 or SEQ ID NO: 1728.

### DETAILED DESCRIPTION

### I. Compositions

### VA-DER Systems and Methods

[0019] The present disclosure involves the exploitation of the TRIM21 protein and the TRIM21-associated pathway for the Vectored Augmentation (VA) of protein Destruction, Expression and/or Regulation (DER), i.e., VA-DER systems and methods.

[0020] TRIM21 also known as Sjogren Syndrome Antigen A1; SSA1; SICCA Syndrome Antigen A; SSA; Autoantigen Ro/SSA, 52-KD; and 8052, encodes a 52 kDa protein of 475-amino acids. It has multiple N-terminal zinc finger motifs, a central leucine zipper, and a potential N-glycosylation site. It contains an N-terminal RING finger that has E3 ligase activity, followed by a B box, 2 coiled-coil regions, and a long C-terminal PRYSPRY domain that binds IgCB Fc fragments.

[0021] The present disclosure provides a means by which the level or amount of any protein (peptide, antigen, polypeptide, antibody, fusion protein, conjugate, chimeric antigen receptor, or any biomolecule which may be bound by an antibody, including the antibody itself) in a cell may be augmented by taking advantage of the properties of the TREM21 protein.

[0022] The vector augmented systems of the present disclosure comprise one or more components, one of which is TRIM21 (either as a protein or encoded in a nucleic acid). This TRIM21 effector may be delivered in vectored form alone or in combination with other molecules such as antibodies, other proteins, or nucleic acid-based molecules. In doing so, TRIM21 allows for augmentation of the level of an antibody to which it binds, thereby facilitating its trafficking to the proteasome and ultimate destruction; or the augmentation of the level of the antigen to which the targeted antibody is bound.

[0023] The VA-DER TRIM21 systems may be utilized in the area of regulating the immune system by binding to one or more antibodies or antibody-bound receptors such as chimeric antigen receptors (CARs).

[0024] As a component of the VA-DER systems and or methods of the disclosure, TRIM21 may be delivered as a protein or as an encoded nucleic acid by any vector or plasmid-based delivery system. Such systems include retroviral vehicles, retroviral particles, lentiviral vehicles, lentiviral particles, adenoviruses, adeno-associated viruses (AAV), nanoparticles, liposomes and the like. These delivery vehicles are described in more detail here.

### Retroviral Vehicles and Retroviral Particles (γ-Retroviral Vectors)

[0025] In some embodiments, retroviral vehicles and retroviral particles may be used to deliver the VA-DER compositions or components for delivering functional proteins, nucleic acids, antibodies and/or antibody-based compositions of the present disclosure. Retroviral vectors (RVs) allow the permanent integration of a transgene in target cells. In addition to lentiviral vectors based on complex HIV-1/2, retroviral vectors based on simple gamma-retroviruses have been widely used to deliver therapeutic genes and demonstrated clinically as one of the most efficient and powerful gene delivery systems capable of transducing a broad range of cell types. Example species of Gamma retroviruses include the murine leukemia viruses (MLVs) and the feline leukemia viruses (FeLV).

[0026] In some embodiments, gamma-retroviral vectors derived from a mammalian gamma-retrovirus such as murine leukemia viruses (MLVs), are recombinant. The MLA/families of gamma retroviruses include the ecotropic, amphotropic, xenotropic and polytropic subfamilies. Ecotropic viruses are able to infect only murine cells using mCAT-1 receptor. Examples of ecotropic viruses are Moloney MIN and AKV. Amphotropic viruses infect murine, human and other species through the Pit-2 receptor. One example of an amphotropic virus is the 4070A virus. Xenotropic and polytropic viruses utilize the same (Xpr1) receptor but differ in their species tropism. Xenotropic viruses such as NZB-9-1 infect human and other species but not murine species, whereas polytropic viruses such as focus-forming viruses (MCF) infect murine, human and other species.

[0027] Gamma-retroviral vectors may be produced in packaging cells by co-transfecting the cells with several plasmids including one encoding the retroviral structural and enzymatic (gag-poi) polyprotein, one encoding the envelope (env) protein, and one encoding the vector mRNA comprising polynucleotide encoding the compositions of the present disclosure that is to be packaged in newly formed viral particles.

[0028] In some aspects, the recombinant gamma-retroviral vectors are pseudotyped with envelope proteins from other viruses. Envelope glycoproteins are incorporated in the outer lipid layer of the viral particles which can increase/alter the cell tropism. Exemplary envelop proteins include the gibbon ape leukemia virus envelope protein (GAIN) or vesicular stomatitis virus G protein (VSV-G), or Simian endogenous retrovirus envelop protein, or Measles Virus H and F proteins, or Human immunodeficiency virus gp120 envelop protein, or coral vesiculovirus envelop protein (See, e.g., U.S. application publication NO.: 2012/164118; the contents of which are incorporated herein by reference in its entirety). In other aspects, envelope glycoproteins may be genetically modified to incorporate targeting/binding ligands into gamma-retroviral vectors, binding ligands including, but not limited to, peptide ligands, single chain antibodies and growth factors (Wackier et al., Nat. Rev. Genet. 2007, 8(8):573-587; the contents of which are incorporated herein by reference in its entirety). These engineered glycoproteins can retarget vectors to cells expressing their corresponding target moieties. In other aspects, a “molecular bridge” may be introduced to direct vectors to specific cells. The molecular bridge has dual specificities: one end can recognize viral glycoproteins, and the other end can bind to the molecular determinant on the target cell. Such molecular bridges, for example ligand-receptor, avidin-biotin, and chemical conjugations, monoclonal antibodies and engineered fusogenic proteins, can direct the attachment of viral vectors to target cells for transduction (Yang et al., Biotechnol. Bioeng., 2008, 101(2): 357-368; and Maetzig et al., Viruses, 2011, 3, 677-713; the contents of each of which are incorporated herein by reference in their entirety).

[0029] In some embodiments, the recombinant gammaretroviral vectors are self-inactivating (SIN) gammaretroviral vectors. The vectors are replication incompetent. SIN vectors may harbor a deletion within the 3′ U3 region initially comprising enhancer/promoter activity. Furthermore, the 5′ U3 region may be replaced with strong promoters (needed in the packaging cell line) derived from Cytomegalovirus or RSV, or an internal promotor of choice, and/or an enhancer element. The choice of the internal promotors may be made according to specific requirements of gene expression needed for a particular purpose.

[0030] In some embodiments, polynucleotides encoding the bio functional antibodies and/or antibody-based compositions are inserted within the recombinant viral genome. The other components of the viral mRNA of a recombinant gammaretroviral vector may be modified by insertion or removal of naturally occurring sequences (e.g., insertion of an IRES, insertion of a heterologous polynucleotide encoding a polypeptide or inhibitory nucleic acid of interest, shuffling of a more effective promoter from a different retrovirus or virus in place of the wild-type promoter and the like). In some examples, the recombinant gammaretroviral vectors may comprise modified packaging signal, and/or primer binding site (PBS), and/or 5′-enhancer/promoter elements in the U3-region of the 5′-long terminal repeat (LTR), and/or 3′-SIN elements modified in the U3-region of the 3′-LTR. These modifications may increase the titers and the ability of infection.

[0031] Gamma-retroviral vectors suitable for delivering functional antibodies and/or antibody-based compositions of the present disclosure may be selected from those disclosed in U.S. Pat. Nos. 8,828,718; 7,585,676; 7,351,585; U.S. application publication NO.: 2007/048285; PCT application publication NOs.: WO2010/113037; WO2014/121005; WO2015/056014; and EP Pat. NOs; EP1757702; EP1757703 (the contents of each of which are incorporated herein by reference in their entirety).

### Lentiviral Vehicles and Lentiviral Particles

[0032] In some embodiments, lentiviral vehicles and lentiviral particles may be used as delivery modalities. In some embodiments, lentiviral vehicles and lentiviral particles may be used to deliver the VA-DER compositions or components for delivering functional proteins, nucleic acids, antibodies and/or antibody-based compositions of the present disclosure.

[0033] Lentiviruses are subgroup of the Retroviridae family of viruses, named because reverse transcription of viral RNA genomes to DNA is required before integration into the host genome. As such, the most important features of lentiviral vehicles and lentiviral particles are the integration of their genetic material into the genome of a target/host cell. Some examples of lentivirus include the Human Immunodeficiency Viruses: HIV-1 and HIV-2, the Simian Immunodeficiency Virus (SIV), feline immunodeficiency virus (FPV), bovine immunodeficiency virus (BIN), Jembrana Disease Virus (JDV), equine infectious anemia virus (E V), equine infectious anemia virus, visna maedi and caprine arthritis encephalitis virus (CAEV).

[0034] Typically, lentiviral particles making up the gene delivery vehicle are replication defective on their own (also referred to as “self-inactivating”). Lentiviruses are able to infect both dividing and non-dividing cells by virtue of the entry mechanism through the intact host nuclear envelope (Naldini L et al., Cure. Opin. Biotechnol, 1998, 9: 457-463). Recombinant lentiviral vehicles and lentiviral particles have been generated by multiply attenuating the HIV virulence genes, for example, the genes Env, Vif, Vpr, Vpu, Nef and Tat are deleted making the vector biologically safe. Correspondingly, lentiviral vehicles, for example, derived from HIV-1/HIV-2 can mediate the efficient delivery, integration and long-term expression of transgenes into non-dividing cells.

[0035] Lentiviral particles may be generated by co-expressing the virus packaging elements and the vector genome itself in a producer cell such as human HEK293T cells. These elements are usually provided in three or four separate plasmids. The producer cells are co-transfected with plasmids that encode lentiviral components including the core (i.e. structural proteins) and enzymatic components of the virus, and the envelope protein(s) (referred to as the packaging systems), and a plasmid that encodes the genome including a foreign transgene, to be transferred to the target cell, the vehicle itself (also referred to as the transfer vector). In general, the plasmids or vectors are included in a producer cell line. The plasmids/vectors are introduced via transfection, transduction or infection into the producer cell line. Methods for transfection, transduction or infection are well known by those of skill in the art. As non-limiting example, the packaging and transfer constructs can be introduced into producer cell lines by calcium phosphate transfection, lipofection or electroporation, generally together with a dominant selectable marker, such as neo, DHFR, Gin synthetase or ADA, followed by selection in the presence of the appropriate drug and isolation of clones.

[0036] The producer cell produces recombinant viral particles that contain the foreign gene, for example, the payload of the present disclosure. The recombinant viral particles are recovered from the culture media and titrated by standard methods used by those of skill in the art. The recombinant lentiviral vehicles can be used to infect target cells.

[0037] Cells that can be used to produce high-titer lentiviral particles may include, but are not limited to, HEK293T cells, 293G cells, STAR cells (Relander et al., Mol Ther., 2005, 11: 452-459), FreeStyle™ 293 Expression System (ThermoFisher, Waltham, MA), and other HEK293T-based producer cell lines (e.g., Stewart et al., Hum Gene Ther. 2011, 22 (3):357369; Lee et al., Biotechnol Bioeng, 2012, 10996): 1551-1560; Throm et al., Blood. 2009, 113(21): 5104-5110; the contents of each of which are incorporated herein by reference in their entirety).

[0038] In some aspects, the envelope proteins may be heterologous envelop proteins from other viruses, such as the G protein of vesicular stomatitis virus (VSV G) or baculoviral gp64 envelop proteins. The VSV-G glycoprotein may especially be chosen among species classified in the vesiculovirus genus: Carajas virus (MY), Chandipura virus (CHPV), Cocal virus (COCV), Isfahan virus (ISFV), Maraba virus (MALAY), Pity virus (PIRYV), Vesicular stomatitis Alagoas virus (VSAV), Vesicular stomatitis Indiana virus (VSTV) and Vesicular stomatitis New Jersey virus (VSNJV) and/or stains provisionally classified in the vesiculovirus genus as Grass carp rhabdovirus, BeAn 157575 virus (BeAn 157575), Boteke virus (BTKV), Calchaqui virus (CQIV); Eel virus American (EVA), Gray Lodge virus (GLOV), Jurona virus (JURY), Klamath virus (KLAV), Kwatta virus (KWAV), La Jaya virus (LJV), Malpais Spring virus (MSPV), Mount Elgon bat virus (MEBV), Perinet virus (PERV), Pike fry rhabdovirus (PERV), Porton virus (PORV), Radi virus (RADIV), Spring viremia of carp virus (SVCV), Tupaia virus (TUPV), Ulcerative disease rhabdovirus (UDRV) and Yug Bogdanovac virus (YBV). The gp64 or other baculoviral env protein can be derived from Autographa californica nucleopolyhedrovirus (AcMNPV), Anagrapha falcifera nuclear polyhedrosis virus, Bombyx more nuclear polyhedrosis virus, Choristoneura fumiferana nucleopolyhedrovirus, Orgyia pseudotsugata single capsid nuclear polyhedrosis virus, Epiphyas postvittana nucleopolyhedrovinis, Hyphantria cunea nucleopolyhedrovirus, Galleria mellonella nuclear polyhedrosis virus, Dhori virus, Thogoto virus, Antheraea pemyi nucleopolyhedrovirus or Batken virus.

[0039] Other elements provided in lentiviral particles may comprise retroviral LTR (long-terminal repeat) at either 5′ or 3′ terminus, a retroviral export element, optionally a lentiviral reverse response element (RRE), a promoter or active portion thereof, and a locus control region (LCR) or active portion thereof.

[0040] Methods for generating recombinant lentiviral particles are discussed in the art, for example, U.S. Pat. Nos. 8,846,385; 7,745,179; 7,629,153; 7,575,924; 7,179,903; and 6,808,905; the contents of each of which are incorporated herein by reference in their entirety.

[0041] Lentivirus vectors used may be selected from, but are not limited to pLVX, pLenti, pLenti6, pLJM1, FUGW, pWPXL, pWPI, pLenti CMV euro REST, pLJM1-EGFP, pULTRA, pInducer20, pHIV-EGFP, pCW57.1, pTRPE, pELPS, pRRL, and pLionII.

[0042] Lentiviral vehicles are plasmid-based or virus-based and are known in the art (See, U.S. Pat. Nos. 9,260,725; 9,068,199; 9,023,646; 8,900,858; 8,748,169; 8,709,799; 8,420,104; 8,329,462; 8,076,106; 6,013,516; and 5,994,136; the contents of each of which are incorporated herein by reference in their entirety).

### Adeno-Associated Viruses (AAVs) and AAV Particles

[0043] In some embodiments, AAV and AAV particles may be used to deliver the VA-DER compositions or components for delivering functional proteins, nucleic acids, antibodies and/or antibody-based compositions of the present disclosure.

[0044] According to the present disclosure, compositions for delivering functional antibodies and/or antibody-based compositions by adeno-associated viruses (AAVs) as components of VA-DER systems are provided.

[0045] AAV particles of the disclosure may be provided via any of several routes of administration, to a cell, tissue, organ, or organism, in vivo, ex vivo, or in vitro.

[0046] As used herein, an “AAV particle” is an AAV which comprises a viral genome with at least one payload region and at least one inverted terminal repeat (ITR) region.

[0047] As used herein, “viral genome” or “vector genome” refers to the nucleic acid sequence(s) encapsulated in an AAV particle. Viral genomes comprise at least one payload region encoding polypeptides of the disclosure, e.g., antibodies, antibody-based compositions or fragments thereof.

[0048] As used herein, a “payload” or “payload region” is any nucleic acid molecule which encodes one or more polypeptides of the disclosure. In some embodiments, the payload may encode TRIM21 or a variant thereof. At a minimum, a payload region comprises nucleic acid sequences that encode a protein, polypeptide, antibody, an antibody-based composition, or a fragment thereof but may also optionally comprise one or more functional or regulatory elements to facilitate transcriptional expression and/or polypeptide translation. Payloads may also be nucleic acid based and not encode a protein, e.g., miRNA, siRNA, aptamers, etc.

[0049] In some embodiments, AAV particles, viral genomes and/or payloads of the disclosure, and the methods of their use may be as described in WO2017189963, the contents of which are herein incorporated by reference in their entirety.

[0050] The nucleic acid sequences and polypeptides disclosed herein may be engineered to contain modular elements and/or sequence motifs assembled to enable expression of the antibodies or antibody-based compositions of the VA-Milk systems of the disclosure. In some embodiments, the nucleic acid sequence comprising the payload region may comprise one or more of a promoter region, an intron, a Kozak sequence, an enhancer, or a polyadenylation sequence. Payload regions of the disclosure typically encode antibodies or antibody-based compositions, which may include an antibody heavy chain domain, an antibody light chain domain, both antibody heavy and light chain domains, or fragments of the foregoing in combination with each other or in combination with other polypeptide moieties. In some cases, payload regions may also encode one or more linkers or joining regions between antibody heavy and light chain domains or fragments. The order of expression, structural position, or concatemer count (heavy chain, light chain, or linker) may be different within or among different payload regions. The identity, position and number of linkers expressed by payload regions may also vary.

[0051] The payload regions of the disclosure may be delivered to one or more target cells, tissues, organs, or organisms within the viral genome of an AAV particle.

[0052] Viruses of the Parvoviridae family are small non-enveloped icosahedral capsid viruses characterized by a single stranded DNA genome. Parvoviridae family viruses consist of two subfamilies: Parvovirinae, which infect vertebrates, and Densovirinae, which infect invertebrates. Due to its relatively simple structure, easily manipulated using standard molecular biology techniques, this virus family is useful as a biological tool. The genome of the virus may be modified to contain a minimum of components for the assembly of a functional recombinant virus, or viral particle, which is loaded with or engineered to express or deliver a desired payload, which may be delivered to a target cell, tissue, organ, or organism.

[0053] The parvoviruses and other members of the Parvoviridae family are generally described in Kenneth I. Berns, “Parvoviridae: The Viruses and Their Replication,” Chapter 69 in FIELDS VIROLOGY (3d Ed. 1996), the contents of which are incorporated by reference in their entirety.

[0054] The Parvoviridae family comprises the Dependovirus genus which includes adeno associated viruses (AAV) capable of replication in vertebrate hosts including, but not limited to, human, primate, bovine, canine, equine, and ovine species.

[0055] The AAV vector genome is a linear, single-stranded DNA (ssDNA) molecule approximately 5,000 nucleotides (nt) in length. The AAV viral genome can comprise a payload region and at least one inverted terminal repeat (ITR) or ITR region. ITRs traditionally flank the coding nucleotide sequences for the non-structural proteins (encoded by Rep genes) and the structural proteins (encoded by capsid genes or Cap genes). While not wishing to be bound by theory, an AAV viral genome typically comprises two ITR sequences. The AAV vector genome comprises a characteristic T-shaped hairpin structure defined by the self-complementary terminal 145 nt of the 5′ and 3′ ends of the ssDNA which form an energetically stable double stranded region. The double stranded hairpin structures comprise multiple functions including, but not limited to, acting as an origin for DNA replication by functioning as primers for the endogenous DNA polymerase complex of the host viral replication cell.

[0056] In addition to the encoded heterologous payload, AAV vectors may comprise the viral genome, in whole or in part, of any naturally occurring and/or recombinant AAV serotype nucleotide sequence or variant. AAV variants may have sequences of significant homology at the nucleic acid (genome or capsid) and amino acid levels (capsids), to produce constructs which are generally physical and functional equivalents, replicate by similar mechanisms, and assemble by similar mechanisms. Chiorini et al., J. Vir. 71: 6823-33(1997); Srivastava et al. J. Vir. 45:555-64 (1983); Chiorini et al., J. Vir. 73:1309-1319 (1999); Rutledge et al., J. Vir. 72:309-319 (1998); and Wu et al., J. Vir. 74: 8635-47 (2000), the contents of each of which are incorporated herein by reference in their entirety.

[0057] In some embodiments, AAV particles of the present disclosure are recombinant AAV viral vectors which are replication defective and lacking sequences encoding functional Rep and Cap proteins within their viral genome. These defective AAV vectors may lack most or all parental coding sequences and essentially carry only one or two AAV ITR sequences and the nucleic acid of interest for delivery to a cell, a tissue, an organ, or an organism.

[0058] In some embodiments, the viral genome of the AAV particles of the present disclosure comprise at least one control element which provides for the replication, transcription, and translation of a coding sequence encoded therein. Not all of the control elements need always be present as long as the coding sequence is capable of being replicated, transcribed, and/or translated in an appropriate host cell. Non-limiting examples of expression control elements include sequences for transcription initiation and/or termination, promoter and/or enhancer sequences, efficient RNA processing signals such as splicing and polyadenylation signals, sequences that stabilize cytoplasmic mRNA, sequences that enhance translation efficacy (e.g., Kozak consensus sequence), sequences that enhance protein stability, and/or sequences that enhance protein processing and/or secretion.

[0059] According to the present disclosure, AAV particles for use in therapeutics and/or diagnostics comprise a virus that has been distilled or reduced to the minimum components necessary for transduction of a nucleic acid payload or cargo of interest. In this manner, AAV particles are engineered as vehicles for specific delivery while lacking the deleterious replication and/or integration features found in wild-type viruses.

[0060] AAV vectors of the present disclosure may be produced recombinantly and may be based on adeno-associated virus (AAV) parent or reference sequences. As used herein, a “vector” is any molecule or moiety which transports, transduces, or otherwise acts as a carrier of a heterologous molecule such as the nucleic acids described herein.

[0061] In addition to single stranded AAV viral genomes (e.g., ssAAVs), the present disclosure also provides for self-complementary AAV (scAAVs) viral genomes. scAAV vector genomes contain DNA strands which anneal together to form double stranded DNA. By skipping second strand synthesis, scAAVs allow for rapid expression in the cell.

[0062] In some embodiments, the AAV particle of the present disclosure is an scAAV.

[0063] In some embodiments, the AAV particle of the present disclosure is an ssAAV,

[0064] Methods for producing and/or modifying AAV particles are disclosed in the art such as pseudotyped AAV vectors (PCT Patent Publication Nos. WO200028004; WO200123001; WO2004112727; WO2005005610; and WO2005072364, the content of each of which is incorporated herein by reference in its entirety).

[0065] AAV particles may be modified to enhance the efficiency of delivery. Such modified AAV particles can be packaged efficiently and be used to successfully infect the target cells at high frequency and with minimal toxicity. In some embodiments, the capsids of the AAV particles are engineered according to the methods described in US Publication Number US20130195801, the contents of which are incorporated herein by reference in their entirety.

[0066] In some embodiments, the AAV particles comprising a payload region encoding the polypeptides of the disclosure may be introduced into mammalian cells.

### AAV Serotypes

[0067] AAV particles of the present disclosure may comprise or be derived from any natural or recombinant AAV serotype. According to the present disclosure, the AAV particles may utilize or be based on a serotype or include a peptide selected from any of the following VOY101, VOY201, AAVPHP.B (PHP.B), AAVPHP.A. (PHP.A), AAVG2B-26, AAVG2B-13, AAVTH1.1-32, AAVTH1.1-35, AAVPHP.B2 (PHP.B2), AAVPHP.B3 (PHP.B3), AAVPHP.N/PHRB-DGT, AAVPHP,B-EST, AAVPHP,B-GGT,AAVPHP.B-ATP, AAVPHP.B-ATT-T, AAVPHP.B-DGT-T, AAVPHP.B-GGT-T, AAVPHP.B-SGS, AAVPHP.B-AQP, AAVPHP.B-QQP, AAVPHP.B-SNP(3), AAVPHP.B-SNP, AAVPHP.B-QGT, AAVPHP.B-NOT, AAVPHP.B-EGS, AAVPHP.B-SGN, AAVPHP.B-EGT, AAVPHP.B-DST, AAVPHP.B-DST, AAVPHP.B-STP, AAVPHP.B-PQP, AAVPHP.B-SQP, AAVPHP.B-QLP, AAVPHP.B-TMP, AAVPHP,B-TTP, AAVPHP.S/G2 A12, AAVG2A15/G2A3 (G2A3), AAVG2B4 (G2B4), AAVG2B5 (G2B5), PHP.S, AAV1, AAV2, AAV2G9, AAV3, AAV3a, AAV3b, AAV3-3, AAV4, AAV4-4, AAV5, AAV6, AAV6.1, AAV6.2, AAV6.1.2, AAV7, AAV7.2, AAV8, AAV9, AAV9.11, AAV9.13, AAV9.16, AAV9.24, AAV9.45, AAV9.47, AAV9.61., AAV9.68, AAV9.84, AAV9.9, AAV10, AAV11, AAV12, AAV16.3, AAV24.1, AAV27.3, AAV42.12, AAV42-11), AAV42-2, AAV42-3a, AAV42-3b, AAV42-4, AAV42-5a, AAV42-5b, AAV42-6b, AAV42-8, AAV42-10, AAV42-11, AAV42-12, AAV42-13, AAV42-15, AAV42-aa, AAV43-1, AAV43-12, AAV43-20, AAV43-21, AAV43-23, AAV43-25, AAV43-5, AAV44.1, AAV44.2, AAV44.5, AAV223.1, AAV223.2, AAV223.4, AAV223.5, AAV223.6, AAV223.7, AAA/1-7/rh.48, AAV1-8/rh.49, AAV2-15/rh.62, AAV2-3/rh.61., AAV2-4/rh.50, AAV2-5/rh.51, AAV3.1/hu.6, AAV3.1/hu.9, AAV3-9/rh.52, AAV3-11/rh.53, AAV4-8/r11.64, AAV4-9/rh.54, AAV4-19/rh.55, AAV5-3/rh.57, AAV5-22/rh.58, AAV7.3/hu.7, AAV16.8/hu.10, AAV16.12/hu.11, AAV29.3/bb. 1, AAV29.5/bb 0.2, AAV106.1/hu.37, AAV114.3/hu.40, AAV127.2/hu.41, AAV127.5/hu.42, AAV128.3/hu.44, AAV130.4/hu.48, AAV145.1/hu.53, AAV145.5/hu.54, AAV145.6/hu.55, AAV1611.10/hu.60, AAV161.6/hu.61, AAV33.12/hu.17, AAV33.4/hu.15, AAV33.8/hu.16, AAV52/hu.19, AAV52.1/hu.20, AAV58.2/hu.25, AAVA3.3, AAVA3.4, AAVA3.5, AAVA3.7, AAVC1, AAVC2, AAVC5, AAV-DJ, AAV-DJ8, AAVF3, AAVF5, AAVH2, AAVrh.72, AAVhu.8, AAVrh.68, AAVrh.70, AAVpi.1, AAVpi.3, AAVpi 0.2, AAVrh.60, AAVrh.44, AAVrh.65, AAVrh.55, AAVrh.47, AAVrh.69, AAVrh.45, AAVrh.59, AAVhu.12, AAVH6, AAVLK.03, AAVH-1/hu.1, AAVH-5/hu.3, AAVLG-10/rh.40, AAVLG-4/rh. 38, AAVLG-9/hu. 39, AAVN721-8/rh.43, AAVCh.5, AAVCh.5R1, AAVcy.2, AAVcy.3, AAVcy.4, AAVcy.5, AAVCy.5R1, AAVCy.5R2, AAVCy.5R3, AAVCy.5R4, AAVcy.6, AAVhu.1, AAVhu.2, AAVhu.3, AAVhu.4, AAVhu.5, AAVhu.6, AAVhu.7, AAVhu.9, AAVhu.10, AAA/hu.11, AAV hu.13, AAVhu.15, AAVhu.16, AAVhu.17, AAVhu.18, AAVhu.20, AAVhu.21, AAVhu.22, AAVhu.23,2, AAVhu.24, AAVhu.25, AAVhu.27, AAVhu.28, AAVhu.29, AAVhu.29R, AAVhu.31, AAVhu.32, AAVhu.34, AAVhu.35, AAVhu.37, AAVhu.39, AAVhu.40, AAVhu.41, AAVhu.42, AAVhu.43, AAVhu.44, AAVhu.44R1, AAVhu.4413.2, AAVhu.4413.3, AAVhu.45, AAVhu.46, AAVhu.47, AAVhu.48, AAVhu.48R1, AAVhu.48R2, AAVhu.48R3, AAVhu.49, AAVhu.51, AAVhu.52, AAVhu.54, AAVhu.55, AAVhu.56, AAVhu.57, AAVhu.58, AAVhu.60, AAVhu.61, AAVhu.63, AAVhu.64, AAVhu.66, AAVhu.67, AAVhu.14/9, AAVhu.19, AAVrh.2, AAVrh.2R, AAVrh.8, AAVrh.8R, AAVrh.10, AAVrh.12, AAVrh.13, AAVrh.13R, AAVrh.14, AAVrh.17, AAVrh.18, AAVrh.19, AAVrh.20, AAVrh.21, AAVrh.22, AAVrh.23, AAVrh.24, AAVrh.25, AAVrh.31, AAVrh.32, AAVrh.33, AAVrh.34, AAVrh.35, AAVrh 36, AAVrh.37, AAVrh.37R2, AAVrh.38, AAVrh.39, AAVrh 40, AAVrh.46, AAVrh.48, AAVrh.48.1, AAVrh.48.1.2, AAVrh.48.2, AAVrh.49, AAVrh.51, AAVrh.52, AAVrh.53, AAVrh.54, AAVrh.56, AAVrh.57, AAVrh.58, AAVrh.61, AAVrh.64, AAVrh.64R1, AAVrh.64R2, AAVrh.67, AAVrh.73, AAVrh.74, AAVrh8R, AAVrh8R A586R mutant, AAVrh8R R533A mutant, AAAV, BAAV, caprine AAV, bovine AAV, AAVhE1.1, AAVhEr1.5, AAVhER1.14, AAVhEr1.8, AAVhEr1.16, AAVhEr1.18, AAVhEr1.35, AAVhEr1.7, AAVhEr1.36, AAVhEr2.29, AAVhEr2.4, AAVhEr2.16, AAVhEr2.30, AAVhEr2.31, AAVhEr2.36, AAVhER1.23, AAVhEr3.1, AAV2,5T, AAV-PAEC, AAV-LK01, AAV-LK02, AAV-LK03, AAV-LK04, AAV-LK05, AAV-LK06, AAV-LK07, AAV-LK08, AAV-LK09, AAV-LK10, AAV-LK11, AAV-LK12, AAV-LK13, AAV-LK14, AAV-LK15, AAV-LK16, AAV-LK17, AAV-LK18, AAV-LK19, AAV-PAEC2, AAV-PAEC4, AAV-PAEC6, AAV-PAEC7, AAV-PAEC8, AAV-PAEC11, AAV-PAEC12, AAV-2-pre-miRNA-101, AAV-8h, AAV-8b, AAV-h, AAV-b, AAV SM 10-2, AAV Shuffle 100-1, AAV Shuffle 100-3, AAV Shuffle 100-7, AAV Shuffle 10-2, AAV Shuffle 10-6, AAV Shuffle 10-8, AAV Shuffle 100-2, AAV SM 10-1, AAV SM 10-8, AAV SM 100-3, AAV SM 100-10, BNP61 AAV, BNP62, AAV, BNP63, AAV, AAVrh.50, AAVrh.43, AAVrh.62, AAVrh.48, AAVhu.19, AAVhu.11, AAVhu.53, AAV4-8/rh.64, AAVLG-9/hu.39, AAV54.5/hu.23, AAV54.2/hu.22, AAV54.7/hu.24, AAV54.1/1111.21, AAV54.4R/hu.27, AAV46.2/1111,28, AAV46.6/hu.29, AAV128.1/huA3, true type AAV (ttAAV), UPENN AAV 10, Japanese AAV 10 serotypes, AAV CBr-7.1, AAV CBr-7.10, AAV CBr-7.2, AAV CBr-7.3, AAV CBr-7.4, AAV CBr-7.5, AAV CBr-7.7, AAV CBr-7.8,AAV CBr-B7.3, AAV CBr-B7.4, AAV CBr-E1,AAV CBr-E2, AAV CBr-E3, AAV CBr-E4, AAV CBr-E5, AAV CBr-e5, AAV CBr-E6, AAV CBr-E7, AAV CBr-E8, AAV CHt-1, AAV AAV CHt-3, AAV CHt-6.1, AAV CHt-6.10, AAV CHt-6.5, AAV CHI-6.6, AAV CHt-6.7, AAV CHt-6.8, AAV CHt-P1, AAV CHt-P2, AAV CHt-P5, AAV CHt-P6, AAV CHt-P8, AAV CHt-P9, AAV AAV CKd-10, AAV CKd-2, AAV CKd-3, AAV CKd-4, AAV CKd-6, AAV CKd-7, AAV CKd-8, AAV CKd-B1, AAV CKd-B2, AAV CKd-B3, AAV CKd-B4, AAV CKd-B5, AAV CKd-B6, AAV CKd-B7, AAV CKd-B8, AAV CKd-111, AAV CKd-H2, AAV CKd-H3, AAV CKd-414, AAV CKd-115, AAV CKd-H6, AAV CKd-N3, AAV CKd-N4, AAV CKd-N9, AAV CLg-F1, AAV CLg-F2, AAV CLg-F3, AAV CLg-F4, AAV CLg-F5, AAV CLg-F6, AAV CLg-F7, AAV CLg-F8, AAV CLv-1, AAV CLA1-1, AAV Clv1-10, AAV CLv1-2, AAV CLv-12, AAV CLv1-3, AAV CLv-13, AAV CLv1-4, AAV Clv1-7, AAV Clv1-8, AAV AAV CLv-2, AAV CLv-3, AAV CLv-4,AAV AAV CLv-8, AAV CLv-D1, AAV CLv-D2, AAV CLv-D3, AAV CLv-D4, AAV CLv-D5, AAV CLv-D6, AAV CLv-D7, AAV AAV CLv-E1, AAV CLv-K1, AAV CLv-K3, AAV CLv-K6, AAV CLv-L4, AAV CLv-L5, AAV CLv-L6, AAV CLv-M11, AAV CLv-M2, AAV CLv-M5, AAV CLv-M6, AAV CLv-M7, AAV CLv-M8, AAV CLv-M9, AAV CLv-R1, AAV CLv-R2, AAV CLv-R3, AAV CLv-R4, AAV AAV AAV AAV CLv-R8, AAV CLv-R9, AAV CSp-1, AAV CSp-10, AAV CSp-11, AAV CSp-2, AAV CSp-3, AAV CSp-4,AAV CSp-6, AAV CSp-7, AAV CSp-8, AAV CSp-8.10, AAV CSp-8.2, AAV CSp-8.4, AAV CSp-8.5, AAV CSp-8.6, AAV CSp-8.7, AAV CSp-8.8, AAV CSp-8.9, AAV CSp-9, AAVhu.48R3, AAV.VR-355, AAV3B, AAV4, AAV5, AAVF1/HSC1, AAVF1.1/HSC11, AAVF12/HSC12, AAVF13/HSC13, AAVF14/HSC14, AAVF15/HSC15 AAVF16/HSC16, AAVF17/HSC17, AAVF2/HSC2, AAVF3/HSC3, AAVF4/HSC4, AAVF5/HSC5, AAVF6/HSC6, AAVF7/HSC7, AAVF8/HSC8, and/or AAVF9/HSC9 and variants thereof.

[0068] In some embodiments, the AAV serotype may be, or have, a sequence as described in United States Publication No. US20030138772, the contents of which are herein incorporated by reference in their entirety, such as, but not limited to, AAV1 (SEQ ID NO: 6 and 64 of US20030138772), AAV2 (SEQ ID NO: 7 and 70 of US20030138772), AAV3 (SEQ ID NO: 8 and 71 of US20030138772), AAV4 (SEQ ID NO: 63 of US20030138772), AAV5 (SEQ ID NO: 114 of US20030138772), AAV6 (SEQ ID NO: 65 of US20030138772), AAV7 (SEQ ID NO: 1-3 of US20030138772), AAV8 (SEQ ID NO: 4 and 95 of US20030138772), AAV9 (SEQ ID NO: 5 and 100 of US20030138772), AAV10 (SEQ ID NO: 117 of US20030138772), AAV11 (SEQ ID NO: 118 of US20030138772), AAV12 (SEQ ID NO: 119 of US20030138772), AAVrh10 (amino acids 1 to 738 of SEQ ID NO: 81 of US20030138772), AAV16.3 (US20030138772 SEQ. ID NO: 10), AAV29.3/bb.1 (US20030138772 SEQ ID NO: 11), AAV29.4 (US20030138772 SEQ ID NO: 12), AAV29.5/bb.2 (US20030138772 SEQ ID NO: 13), AAV1.3 (US20030138772 SEQ ID NO: 14), AAV13.3 (US20030138772 SEQ ID NO: 15), AAV24.1 (US20030138772 SEQ ID NO: 16), AAV27.3 (US20030138772 SEQ ID NO: 17), AAV7.2 (US20030138772 SEQ ID NO: 18), AAVC1 (0520030138772 SEQ ID NO: 19), AAVC3 (US20030138772 SEQ ID NO: 20), AAS' C5 (US20030138772 SEQ ID NO: 21), AAVF1 (US20030138772 SEQ ID NO: 22), AAVF3 (US20030138772 SEQ ID NO: 23), AAVF5 (US20030138772 SEQ ID NO: 24), AAVH6 (US20030138772 SEQ ID NO: 25), AAVH2 (US20030138772 SEQ ID NO: 26), AAV42-8 (US20030138772 SEQ ID NO: 27), AAV42-15 (US20030138772 SEQ ID NO: 28), AAV42-5b (US20030138772 SEQ ID NO: 29), AAV42-1b (US20030138772 SEQ ID NO: 30), AAV42-13 (US20030138772 SEQ ID NO: 31), AAV42-3a. (US20030138772 SEQ ID NO: 32), AAV42-4 (US20030138772 SEQ ID NO: 33), AAV42-5a (US20030138772 SEQ ID NO: 34), AAV42-10 (US20030138772 SEQ ID NO: 35), AAV42-3b (US20030138772 SEQ ID NO: 36), AAV42-11 (US20030138772 SEQ ID NO: 37), AVV42-6b (US20030138772 SEQ ID NO: 38), AAV43-1 (US20030138772 SEQ ID NO: 39), AAV43-5 (US20030138772 SEQ ID NO: 40), AAV43-12 (US20030138772 SEQ ID NO: 41), AAV43-20 (US20030138772 SEQ ID NO: 42), AAV43-21 (US20030138772 SEQ ID NO: 43), AAV43-23 (US20030138772 SEQ ID NO: 44), AAV43-25 (11520030138772 SEQ ID NO: 45), AAV44.1 (US20030138772 SEQ ID NO: 46), AAV44.5 (US20030138772 SEQ ID NO: 47), AAV223.1 (US20030138772 SEQ ID NO: 48), AAV223.2 (US20030138772 SEQ ID NO: 49), AAV223.4 (US20030138772 SEQ ID NO: 50), AAV223.5 (US20030138772 SEQ ID NO: 51), AVV223.6 (US20030138772 SEQ ID NO: 52), AAV223.7 (US20030138772 SEQ ID NO: 53), AAVA3.4 (US20030138772 SEQ ID NO: 54), AAVA3.5 (US20030138772 SEQ ID NO: 55), AAVA3.7 (US20030138772 SEQ ID NO: 56), AAVA3.3 (US20030138772 SEQ ID NO: 57), AAV42.12 (US20030138772 SEQ ID NO: 58), AAV44.2 (US20030138772 SEQ ID NO: 59), AAV42-2 (US20030138772 SEQ ID NO: 9), or variants thereof.

[0069] In some embodiments, the AAV serotype may be, or have, a sequence as described in U.S. Publication Ser. No. 05/201,50159173, the contents of which are herein incorporated by reference in their entirety, such as, but not limited to, AAV2 (SEQ ID NO: 7 and 23 of US20150159173), rh20 (SEQ ID NO: 1 of US20150159173), rh32/33 (SEQ ID NO: 2 of US20150159173), rh39 (SEQ ID NO: 3, 20 and 36 of US20150159173), rh46 (SEQ ID NO: 4 and 22 of US20150159173), rh73 (SEQ NO: 5 of US20150159173), rh74 (SEQ NO: 6 of US20150159173), AAV6.1 (SEQ ID NO: 29 of US20150159173), rh.8 (SEQ ID NO: 41 of US20150159173), rh.48.1 (SEQ ID NO: 44 of US20150159173), hu.44 (SEQ ID NO: 45 of US20150159173), hu.29 (SEQ ID NO: 42 of US20150159173), hu.48 (SEQ ID NO: 38 of US20150159173), rh54 (SEQ ID NO: 49 of US20150159173), AAV2 (SEQ ID NO: 7 of US20150159173), cy.5 (SEQ ID NO: 8 and 24 of US20150159173), rh.10 (SEQ ID NO: 9 and 25 of US20150159173), rh.13 (SEQ ID NO: 10 and 26 of US20150159173), AAV1 (SEQ ID NO: 11 and 27 of US20150159173), AAV3 (SEQ ID NO: 12 and 28 of US20150159173), AAV6 (SEQ ID NO: 13 and 29 of US20150159173), AAV7 (SEQ ID NO: 14 and 30 of US20150159173), AAV8 (SEQ ID NO: 15 and 31 of US20150159173), hu.13 (SEQ ID NO: 16 and 32 of US20150159173), hu.26 (SEQ ID NO: 17 and 33 of US20150159173), hu.37 (SEQ ID NO: 18 and 34 of US20150159173), hu.53 (SEQ ID NO: 19 and 35 of US20150159173), rh.43 (SEQ ID NO: 21 and 37 of US20150159173), rh2 (SEQ ID NO: 39 of US20150159173), rh.37 (SEQ ID NO: 40 of US20150159173), rh.64 (SEQ ID NO: 43 of US20150159173), rh.48 (SEQ ID NO: 44 of US20150159173), ch.5 (SEQ ID NO 46 of US20150159173), rh.67 (SW 1D NO: 47 of US20150159173), rh.58 (SEQ ID NO: 48 of US20150159173), or variants thereof including, but not limited to Cy5R1, Cy5R2, Cy5R3, Cy5R4, rh.13R, rh.37R2, rh.2R, rh.8R, rh.48.1, rh.48.2, rh.48.1.2, hu.44R1, hu.44R2, hu.44R3, hu.29R, ch.5R1, rh64R1, rh64R2, AAV6.2, AAV6.1, AAV6.12, hu.48R1, hu.48R2, and hu.48R3.

[0070] In some embodiments, the AAV serotype may be, or have, a sequence as described in U.S. Pat. No. 7,198,951, the contents of which are herein incorporated by reference in their entirety, such as, but not limited to, AAV9 (SEQ ID NO: 1-3 of U.S. Pat. No. 7,198,951), AAV2 (SEQ ID NO: 4 of U.S. Pat. No. 7,198,951), AAV1 (SEQ ID NO: 5 of U.S. Pat. No. 7,198,951), AAV3 (SEQ ID NO: 6 of U.S. Pat. No. 7,198,951), and AAV8 (SEQ ID NO: 7 of U.S. Pat. No. 7,198,951).

[0071] In some embodiments, the AAV serotype may be, or have, a mutation in the AAV9 sequence as described by N Pulicherla et al. (Molecular Therapy 19(6):1070-1078 (2011), herein incorporated by reference in its entirety), such as but not limited to, AAV9.9, AAV9.11, AAV9.13, AAV9,16, AAV9.24, AAV9.45, AAV9.47, AAV9.61, AAV9,68, AAV9.84.

[0072] In some embodiments, the AAV serotype may be, or have, a sequence as described in U.S. Pat. No. 6,156,303, the contents of which are herein incorporated by reference in their entirety, such as, but not limited to, AAV3B (SEQ ID NO: 1 and 10 of U.S. Pat. No. 6,156,303), AAV6 (SEQ ID NO: 2, 7 and 11 of U.S. Pat. No. 6,156,303), AAV2 (SEQ ID NO: 3 and 8 of U.S. Pat. No. 6,156,303), AAV3A (SEQ ID NO: 4 and 9, of U.S. Pat. No. 6,156,303), or derivatives thereof.

[0073] In some embodiments, the AAV serotype may be, or have, a sequence as described in United States Publication No. US20140359799, the contents of which are herein incorporated by reference in their entirety, such as, but not limited to, AAV8 (SEQ ID NO: 1 of US20140359799), AAVDJ (SEQ ID NO: 2 and 3 of US20140359799), or variants thereof

[0074] In some embodiments, the serotype may be AAVDJ or a variant thereof, such as AAVDJ8 (or AAV-DJ8), as described by Grimm et al. (Journal of Virology 82(12): 5887-5911 (2008), herein incorporated by reference in its entirety). The amino acid sequence of AAVDJ8 may comprise two or more mutations in order to remove the heparin binding domain (HBD). As a non-limiting example, the AAV DJ sequence described as SEQ ID NO: 1 in U.S. Pat. No. 7,588,772, the contents of which are herein incorporated by reference in their entirety, may comprise two mutations: (1) R587Q where arginine (R; Arg) at amino acid 587 is changed to glutamine (Q; Gln) and (2) 85901 where arginine (R; Arg) at amino acid 590 is changed to threonine (T; Thr). As another non-limiting example, may comprise three mutations: (1) K406R where lysine (K; Lys) at amino acid 406 is changed to arginine (R; Arg), (2) R587Q where arginine (R; Arg) at amino acid 587 is changed to glutamine (Q; Gin) and (3) R590T where arginine (R; Arg) at amino acid 590 is changed to threonine (T; Thr).

[0075] In some embodiments, the AAV serotype may be, or have, a sequence of AAV4 as described in International Publication No. WO1998011244, the contents of which are herein incorporated by reference in their entirety, such as, but not limited to AAV4 (SEQ ID NO: 1-20 of WO1998011244).

[0076] In some embodiments, the AAV serotype may be, or have, a mutation in the AAV2 sequence to generate AAV2G9 as described in International Publication No. WO2014144229 and herein incorporated by reference in its entirety.

[0077] In some embodiments, the AAV serotype may be, or have, a sequence as described in International Publication No. WO2005033321, the contents of which are herein incorporated by reference in their entirety, such as, but not limited to AAV3-3 (SEQ ID NO: 217 of WO2005033321), AAV1 (SEQ ID NO: 219 and 202 of WO2005033321), AAV106.1/hu.37 (SEQ ID NO: 10 of WO2005033321), AAV114.3/hu.40 (SEQ ID NO: 11 of WO2005033321), AAV127.2/hu.41 (SEQ ID NO:6 and 8 of WO2005033321), AAV128.3/hu.44 (SEQ ID NO: 81 of WO2005033321), AAV130.4/hu.48 (SEQ ID NO: 78 of WO2005033321), AAV145.1/hu.53 (SEQ ID NO: 176 and 177 of WO2005033321), AAV145.6/hu.56 (SEQ ID NO: 168 and 192 of WO2005033321), AAV16.12/hu.11 (SEQ ID NO: 153 and 57 of WO2005033321), AAV16.8/hu.10 (SEQ ID NO: 156 and 56 of WO2005033321), AAV161.10/hu.60 (SEQ ID NO: 170 of WO2005033321), AAV161.6/hu.61 (SEQ ID NO: 174 of WO2005033321), AAV1-7/rh.48 (SEQ ID NO: 32 of WO2005033321), AAV1-8/rh.49 (SEQ ID NOs: 103 and 25 of WO2005033321), AAV2 (SEQ ID NO: 211 and 221 of WO2005033321), AAV2-15/rh.62 (SEQ ID No: 33 and 114 of W(0D2005033321), AAV2-3/rh.61 (SEQ ID NO: 21 of WO2005033321), AAV2-4/rh.50 (SEQ ID NO: 23 and 108 of WO2005033321), AAV2-5/rh.51 (SEQ ID NO: 104 and 22 of WO2005033321), AAV3J/hu.6 (SEQ ID NO: 5 and 84 of WO2005033321), AAV3.1/hu.9 (SEQ ID NO: 155 and 58 of WO2005033321), AAV3-11/rh.53 (SEQ ID NO: 186 and 176 of WO2005033321), AAV3-3 (SEQ ID NO: 200 of WO2005033321), AAV33.12/hu.17 (SEQ ID NO:4 of WO2005033321), AAV 33.4/hu.15 (SEQ ID NO: 50 of WO2005033321), AAV33.8/hu.16 (SEQ ID NO: 51 of WO2005033321), AAV3-9/rh.52 (SEQ ID NO: 96 and 18 of WO2005033321), AAV4-191rh.55 (SEQ ID NO: 117 of WO2005033321), AAV4-4 (SEQ ID NO: 201 and 218 of WO2005033321), AAV4-9/rh.54 (SEQ ID NO: 116 of WO2005033321), AAV5 (SEQ ID NO: 199 and 216 of WO2005033321), AAV52.1/hu.20 (SEQ ID NO: 63 of WO2005033321), AAV52/hu.19 (SEQ ID NO: 133 of WO2005033321), AAV5-22/rh.58 (SEQ ID No: 27 of WO2005033321), AAV5-3/rh.57 (SEQ ID NO: 105 of WO2005033321), AAV5-3/rh.57 (SEQ ID NO: 26 of WO2005033321), AAV58.2/hu.25 (SEQ ID NO: 49 of WO2005033321), AAV6 (SEQ ID NO: 203 and 220 of WO2005033321), AAV7 (SEQ ID NO: 222 and 213 of WO2005033321), AAV7,3/hu.7 (SEQ ID No: 55 of WO2005033321), AAV8 (SEQ ID NO: 223 and 214 of WO2005033321), AAVH-1/hu.1 (SEQ ID NO: 46 of WO2005033321), AAVH-5/hu.3 (SEQ ID NO: 44 of WO2005033321), AAVhu. (SEQ ID NO: 144 of WO2005033321), AAVhu.1.0 (SEQ ID NO: 156 of WO2005033321), AAVhu.11 (SEQ ID NO: 153 of WO2005033321), AAVhu.12 (WO2005033321 SEQ ID NO: 59), AAVhu.13 (SEQ ID NO: 129 of WO2005033321), AAVhu.14/AAV9 (SEQ ID NO: 123 and 3 of WO2005033321), AAVhu.15 (SEQ ID NO: 147 of WO2005033321), AAVhu.16 (SEQ ID NO: 148 of WO2005033321), AAVhu.17 (SEQ ID NO: 83 of WO2005033321), AAVhu.18 (SEQ NO: 149 of WO2005033321), AAVhu.19 (SEQ ID NO: 133 of WO2005033321), AAVhu.2 (SEQ ID NO: 143 of WO2005033321), AAVhu.20 (SEQ ID NO: 134 of WO2005033321), AAVhu.21 (SEQ ID NO: 135 of WO2005033321), AAVhu.22 (SEQ ID NO: 138 of WO2005033321), AAVhu.23.2 (SEQ ID NO: 137 of WO2005033321), AAVhu.24 (SEQ ID NO: 136 of WO2005033321), AAVhu.25 (SEQ ID NO: 146 of WO2005033321), AAVhu.27 (SEQ ID NO: 140 of WO2005033321), AAVhu.29 (SEQ ID NO: 132 of WO2005033321), AAVhu.3 (SEQ ID NO: 145 of WO2005033321), AAVhu.31 (SEQ ID NO: 121 of WO2005033321), AAVhu.32 (SEQ ID NO: 122 of WO2005033321), AAVhu.34 (SEQ ID NO: 125 of WO2005033321), AAVhu.35 (SEQ ID NO: 164 of WO2005033321), AAVhu.37 (SEQ ID NO: 88 of WO2005033321), AAVhu; 39 (SEQ ID NO: 102 of WO2005033321), AAVhu.4 (SEQ ID NO: 141 of WO2005033321), AAVhu.40 (SEQ ID NO: 87 of WO2005033321), AAVhu.41 (SEQ ID NO: 91 of WO2005033321), AAVhu.42 (SEQ ID NO: 85 of WO2005033321), AAVhu.43 (SEQ NO: 160 of WO2005033321), AAVhu.44 (SEQ ID NO: 144 of X/1102005033321), AAVhu.45 (SEQ ID NO: 127 of WO2005033321), AAVhu.46 (SEQ ID NO: 159 of WO2005033321), AAVhu.47 (SEQ ID NO: 128 of WO2005033321), AAVhu.48 (SEQ ID NO: 157 of WO2005033321), AAVhu.49 (SEQ ID NO: 189 of WO2005033321), AAVhu.51 (SEQ ID NO: 190 of WO2005033321), AAVhu.52 (SEQ ID NO: 191 of WO2005033321), AAVhu.53 (SEQ ID NO: 186 of WO2005033321), AAVhu.54 (SEQ ID NO: 188 of WO2005033321), AAVhu.55 (SEQ ID NO: 187 of WO2005033321), AAVhu.56 (SEQ ID NO: 192 of WO2005033321), AAVhu.57 (SEQ ID NO: 193 of WO2005033321), AAVhu.58 (SEQ ID NO: 194 of WO2005033321), AAVhu.6 (SEQ ID NO: 84 of WO2005033321), AAVhu.60 (SEQ ID NO: 184 of WO2005033321), AAVhu.61 (SEQ ID NO: 185 of WO2005033321), AAVhu.63 (SEQ ID NO: 195 of WO2005033321), AAVhu.64 (SEQ ID NO: 196 of WO2005033321), AAVhu.66 (SEQ ID NO: 197 of WO2005033321), AAVhu.67 (SEQ ID NO: 198 of WO2005033321), AAVhu.7 (SEQ ID NO: 150 of WO2005033321), AAVhu.8 (WO2005033321 SEQ ID NO: 12), AAVhu.9 (SEQ ID NO: 155 of WO2005033321), AAVLG-10/rh.40 (SEQ ID NO: 14 of WO2005033321), AAVLG-4/rh.38 (SEQ ID NO: 86 of WO2005033321), AAVLG-4/rh.38 (SEQ ID NO: 7 of WO2005033321), AAVN721-8/rh.43 (SEQ ID NO: 163 of WO2005033321), AAVN721-8/rh.43 (SEQ ID NO: 43 of WO2005033321), AAVpi.1 (WO2005033321 SEQ ID NO: 28), AAVpi.2 (WO2005033321 SEQ ID NO: 30), AAVpi.3 (WO2005033321 SEQ ID NO: 29), AAVrh.38 (SEQ ID NO: 86 of WO2005033321), AAVrh.40 (SEQ ID NO: 92 of WO2005033321), AAVrh.43 (SEQ ID NO: 163 of WO2005033321), AAVrh.44 (WO2005033321 SEQ ID NO: 34), AAVrh.45 (WO2005033321 SEQ ID NO: 41), AAVrh.47 (WO2005033321 SEQ ID NO: 38), AAVrh.48 (SEQ ID NO: 115 of WO2005033321), AAVrh.49 (SEQ ID NO: 103 of WO2005033321), AAVrh.50 (SEQ ID NO: 108 of WO2005033321), AAVrh.51 (SEQ ID NO: 104 of WO2005033321), AAVrh.52 (SEQ ID NO: 96 of WO2005033321), AAVrh.53 (SEQ ID NO: 97 of WO2005033321), AAVrh.55 (WO2005033321 SEQ ID NO: 37), AAVrh.56 (SEQ ID NO: 152 of WO2005033321), AAVrh.57 (SEQ ID NO: 105 of WO2005033321), AAVrh.58 (SEQ ID NO: 106 of WO2005033321), AAVrh.59 (WO2005033321 SEQ ID NO: 42), AAVrh.60 (WO2005033321 SEQ ID NO: 31), AAVrh.61 (SEQ ID NO: 107 of WO2005033321), AAVrh.62 (SEQ ID NO: 114 of WO2005033321), AAVrh.64 (SEQ ID NO: 99 of WO2005033321), AAVrh.65 (WO2005033321 SEQ ID NO: 35), AAVrh.68 (WO2005033321 SEQ ID NO: 16), AAVrh.69 (WO2005033321 SEQ ID NO: 39), AAVrh.70 (WO2005033321 SEQ ID NO: 20), AAVrh.72 (WO2005033321 SEQ ID NO: 9), or variants thereof including, but not limited to, AAVcy.2, AAVcy.3, AAVcy.4, AAVcy.5, AAVcy.6, AAVrh.12, AAVrh.17, AAVrh.18, AAVrh.19, AAVrh.21, AAVrh.22, AAVrh.23, AAVrh.24, AAVrh.25, AAVrh.25/42 15, AAVrh.31, AAVrh.32, AAVrh.33, AAVrh.34, AAVrh.35, AAVrh.36, AAVrh.37, AAVrh14. Non limiting examples of variants include SEQ ID NO: 13, 15, 17, 19, 24, 36, 40, 45, 47, 48, 51-54, 60-62, 64-77, 79, 80, 82, 89, 90, 93-95, 98, 100, 101, 109-113, 118-120, 124, 126, 131, 139, 142, 151,154, 158, 161, 162, 165-183, 202, 204-212, 215, 219, 224-236, of WO2005033321, the contents of which are herein incorporated by reference in their entirety.

[0078] In some embodiments, the AAV serotype may be, or have, a sequence as described in International Publication No. WO2015168666, the contents of which are herein incorporated by reference in their entirety, such as, but not limited to, AAVrh8R (SEQ ID NO: 9 of WO2015168666), AAVrh8R A586R mutant (SEQ ID NO: 10 of WO2015168666), AAVrh8R R533A mutant (SEQ ID NO: 11 of WO2015168666), or variants thereof.

[0079] In some embodiments, the AAV serotype may be, or have, a sequence as described in U.S. Pat. No. 9,233,131, the contents of which are herein incorporated by reference in their entirety, such as, but not limited to, AAVhE1.1 (SEQ ID NO:44 of U.S. Pat. No. 9,233,131), AAVhEr1.5 (SEQ. ID NO:45 of US9233131), AAVhER1,14 (SEQ NO:46 of US9233131), AAVhEr1.8 (SEQ ID NO:47 of U.S. Pat. No. 9,233,131), AAVhEr1.16 (SEQ ID NO:48 of U.S. Pat. No. 9,233,131), AAVhEr1.18 (SEQ ID NO:49 of U.S. Pat. No. 9,233,131), AAVhEr1.35 (SEQ ID NO:50 of U.S. Pat. No. 9,233,131), AAVhEr1.7 (SEQ ID NO:51 of U.S. Pat. No. 9,233,131), AAVhEr1.36 (SEQ ID NO:52 of US9233131), AAVhEr2,29 (SEQ ID NO:53 of US9233131), AAVhEr2,4 (SEQ ID NO:54 of US9233131), AAVhEr2.16 (SEQ ID NO:55 of U.S. Pat. No. 9,233,131), AAVhEr2.30 (SEQ ID NO:56 of U.S. Pat. No. 9,233,131), AAVhEr2.31 (SEQ ID NO:58 of U.S. Pat. No. 9,233,131), AAVhEr2.36 (SEQ ID NO:57 of US9233131), AAVhER1.23 (SEQ NO:53 of US9233131), AAVhEr3.1 (SEQ NO:59 of U.S. Pat. No. 9,233,131), AAV2.5T (SEQ ID NO:42 of US9233131), or variants thereof. 1:00801 In some embodiments, the AAV serotype may be, or have, a sequence as described in United States Patent Publication No. US20150376607, the contents of which are herein incorporated by reference in their entirety, such as, but not limited to, AAV-PAEC (SEQ ID NO:1 of US20150376607), AAV-LK01 (SEQ NO:2 of US20150376607), AAV-LK02 (SEQ ID NO:3 of US20150376607), AAV-LK03 (SEQ NO:4 of US20150376607), AAV-LK04 (SEQ ID NO:5 of US20150376607), AAV-LK05 (SEQ ID NO:6 of US20150376607), AAV-LK06 (SEQ ID NO:7 of US20150376607), AAV-LK07 (SEQ ID NO:8 of US20150376607), AAV-1,108 (SEQ 11) NO:9 of US20150376607), AAV-LK09 (SEQ ID NO:10 of US20150376607), AAV-LK10 (SEQ ID NO:11 of US20150376607), AAV-LK11 (SEQ ID NO:12 of US20150376607), AAV-LK 12 (SEQ ID NO:13 of US20150376607), AAV-LK13 (SEQ ID NO:14 of US20150376607), AAV-LK14 (SEQ ID NO:15 of US20150376607), AAV-LK 15 (SEQ NO:16 of US20150376607), AAV-LK16 (SEQ ID NO:17 of US20150376607), AAV-LK17 (SEQ ID NO:18 of US20150376607), AAV-LK18 (SEQ ID NO:19 of US20150376607), AAV-LK19 (SEQ ID NO:20 of US20150376607), AAV-PAEC2 (SEQ ID NO:21 of US20150376607), AAV-PAEC24 (SEQ ID NO:22 of US20150376607), AAV-PAEC6 (SEQ NO:23 of US20150376607), AAV-PAEC7 (SEQ ID NO:24 of US20150376607), AAV-PAEC8 (SEQ ID NO:25 of US20150376607), AAV-PAEC11 (SEQ NO:26 of US20150376607), AAV-PAEC12 (SEQ ID NO:27, of US20150376607), or variants thereof.

[0080] In some embodiments, the AAV serotype may be, or have, a sequence as described in U.S. Pat. No. 9,163,261, the contents of which are herein incorporated by reference in their entirety, such as, but not limited to, AAV-2-pre-miRNA-101 (SEQ NO: 1 U.S. Pat. No. 9,163,261), or variants thereof.

[0081] In some embodiments, the AAV serotype may be, or have, a sequence as described in United States Patent Publication No. 20150376240, the contents of which are herein incorporated by reference in their entirety, such as, but not limited to, AAV-8h (SEQ ID NO: 6 of US20150376240), AAV-8b (SEQ ID NO: 5 of US20150376240), AAV-h (SEQ ID NO: 2 of US20150376240), AAV-b (SEQ ID NO: 1 of US20150376240), or variants thereof

[0082] In some embodiments, the AAV serotype may be, or have, a sequence as described in United States Patent Publication No. US20160017295, the contents of which are herein incorporated by reference in their entirety, such as, but not limited to, AAV SM 10-2 (SEQ ID NO: 22 of US20160017295), AAV Shuffle 1001 (SEQ ID NO: 23 of US20160017295), AAV Shuffle 100-3 (SEQ ID NO: 24 of US20160017295), AAV Shuffle 100-7 (SEQ ID NO: 25 of US20160017295), AAV Shuffle 10-2 (SEQ ID NO: 34 of US20160017295), AAV Shuffle 10-6 (SEQ ID NO: 35 of US20160017295), AAV Shuffle 10-8 (SEQ ID NO: 36 of US20160017295), AAV Shuffle 100-2 (SEQ ID NO: 37 of US20160017295), AAV SM 10-1 (SEQ ID NO: 38 of US20160017295), AAV SM 10-8 (SEQ ID NO: 39 of US20160017295), AAV SM 100-3 (SEQ ID NO: 40 of US20160017295) AAV SM 100-10 (SEQ ID NO: 41 of US20160017295), or variants thereof.

[0083] In some embodiments, the AAV serotype may be, or have, a sequence as described in United States Patent Publication No. US20150238550, the contents of which are herein incorporated by reference in their entirety, such as, but not limited to, BNP61, AAV (SEQ ID NO: 1 of US20150238550), BNP62, AAV (SEQ ID NO: 3 of US20150238550), BNP63, AAV (SEQ ID NO: 4 of US20150238550), or variants thereof.

[0084] In some embodiments, the AAV serotype may be or may have a sequence as described in United States Patent Publication No. US20150315612, the contents of which are herein incorporated by reference in their entirety, such as, but not limited to, AAVrh.50 (SEQ ID NO: 108 of US20150315612), AAVrh.43 (SEQ ID NO: 163 of US20150315612), AAVrh.62 (SEQ ID NO: 114 of US20150315612), AAVrh.48 (SEQ ID NO: 115 of US20150315612), AAVhu.19 (SEQ ID NO: 133 of U.S. Pat. No. 2,015,031.5612), AAVhu.11 (SEQ ID NO: 153 of US20150315612), AAVhu.53 (SEQ ID NO: 186 of US20150315612), AAV4-8/rh.64 (SEQ ID NO: 15 of US20150315612), AAVLG-9/hu.39 (SEQ ID NO: 24 of US20150315612), AAV54.5/hu.23 (SEQ ID NO: 60 of US20150315612), AAV54.2/hu.22 (SEQ ID NO: 67 of US20150315612), AAV54,7/hu.24 (SEQ ID NO: 66 of US20150315612), AAV54.1/hu.21 (SEQ ID No: 65 of US20150315612), AAV54.4R/hu.27 (SEQ ID NO: 64 of US20150315612), AAV46.2/hu.28 (SEQ ID NO: 68 of US20150315612), AAV46.6/hu.29 (SEQ ID No: 69 of US20150315612), AAV128.1/hu.43 (SEQ ID NO: 80 of US20150315612), or variants thereof.

[0085] In some embodiments, the AAV serotype may be, or have, a sequence as described in International Publication No. WO2015121501, the contents of which are herein incorporated by reference in their entirety, such as, but not limited to, true type AAV (ttAAV) (SEQ ID NO: 2 of WO2015121501), “UPenn AAV10” (SEQ ID NO: 8 of WO2015121501), “Japanese AAV10” (SEQ ID NO: 9 of WO2015121501), or variants thereof.

[0086] According to the present disclosure, AAT capsid serotype selection or use may be from a variety of species. In some embodiments, the AAV may be an avian AAV (AAAV). The AAAV serotype may be, or have, a sequence as described in U.S. Pat. No. 9,238,800, the contents of which are herein incorporated by reference in their entirety, such as, but not limited to, AAAV (SEQ ID NO: 1, 2, 4, 6, 8, 10, 12, and 14 of U.S. Pat. No. 9,238,800), or variants thereof.

[0087] In some embodiments, the AAV may be a bovine AAV (BAAV). The BAAV serotype may be, or have, a sequence as described in U.S. Pat. No. 9,193,769, the contents of which are herein incorporated by reference in their entirety, such as, but not limited to, BAAV (SEQ ID NO: 1 and 6 of U.S. Pat. No. 9,193,769), or variants thereof. The BAAV serotype may be or have a sequence as described in U.S. Pat. No. 7,427,396, the contents of which are herein incorporated by reference in their entirety, such as, but not limited to, BAAV (SEQ ID NO: 5 and 6 of US7427396), or variants thereof.

[0088] In some embodiments, the AAV may be a caprine AAV. The caprine AAV serotype may be, or have, a sequence as described in U.S. Pat. No. 7,427,396, the contents of which are herein incorporated by reference in their entirety, such as, but not limited to, caprine AAV (SEQ ID NO: 3 of US7427396), or variants thereof.

[0089] In other embodiments the AAV may be engineered as a hybrid AAV from two or more parental serotypes. In some embodiments, the AAV may be AAV2G9 which comprises sequences from AAV2 and AAV9. The AAV2G9, AAV serotype may be, or have, a sequence as described in United States Patent Publication No. US20160017005, the contents of which are herein incorporated by reference in its entirety.

[0090] In some embodiments, the AAV may be a serotype generated by the AAV9 capsid library with mutations in amino acids 390-627 (VP1 numbering) as described by Pulicherla et al. (Molecular Therapy 19(6):1070-1078 (2011), the contents of which are herein incorporated by reference in their entirety. The serotype and corresponding nucleotide and amino acid substitutions may be, but is not limited to, AAV9.1 (G1594C; D53211), AAV6.2 (T1418A and T1436X; V4731) and 1479K), AAV9.3 (T1238A; F413Y), AAV9.4 (T1250C and A1617T; F4175), AAV9.5 (A1235G, A1314T, A1642G, C1760T; Q4121T, T548A, A587V), AAV9.6 (T1231A; F411I), AAV9.9 (G1203A, G1785T; W595C), AAV9.10 (A1.500G, T1.676C; M559T), AAV9.11. (A1425T, A1702C, A1769I; T5681), Q590 L), AAV9.13 (A1369C, A1720T; N457H, T574S), AAV9.14 (T1340A, T1362C, T1560C, G1713A; 11,447E1) AAV9.16 (A1775T; Q5921), AVV9.24 (T1507c, T1521G; W503R), AAV9.26 (A1337G, A1769C; Y446C, Q590P), AAV9.33 (A1667C; D556A), AAV9.34 (A1534G, C17941; N512D), AAV9.35 (A12891, 11450A, C14941, A15151, C1794A, G1816A; 04301, Y484N, N98K, V6061), AAV9,40 (A16941, E565V), AAA/9.41 (A13481, 11362C, 1450S), AAV9.44 (A1684C, A1701T, A1737G; N56211, K567N), AAV9.45 (A14921, C18041; N498Y, L602F), AVV9.46 (G1441C, T1525C, T1549G; G481R, W509R, L517V), 9.47 (G1241A, G1358A, A1669G, C17451; 5414N, G453D, K557E, T5821), AAV9.48 (C14451, A17361; P482L, Q579L), AAV9.50 (A16381, C16831, 171805A; 054613, L60211), AAV9.53 (s1301A, A1405C, C16641, G1811T, R134Q, S469R, A555V, G6041/), AAV9.54 (C1531A, T1609A; L5111, L537M), AAV9.55 (T1605A; F535L), AAV9.58 (C1475T, C1579A, T4921, H527N), AAV59 (11336C; Y446H), AAV9.61 (A14931; N4981), AAV9.64 (C1531A, A16171; L5111), AAV9.65 (C1335T, T1530C, C568A; A523D), AAV9.68 (C1510A; P5041), AAV9.80 (G1441A; G481R), AAV9.83 (C1402A, A1500T; P4681, E500D), AAV9.87 (T1464C; T1468C; 5490P), AAV9.90 (A1196T, Y399F), AAV9.91 (T1316G, A1583T, C1782G, T1806C; L439R, K528I), AAV9.93 (A1273G, A1421G, A1638C, C1712T, G1732A, A17441, A18321; S425G, Q4748, Q546H, P571L, G578R, 1582S D611V), AAV9.94 (A16751; M559L) and AAV995 (11605A; F535L).

[0091] In some embodiments, the AAV serotype may be, or have, a sequence as described in International Publication No. WO2016049230, the contents of which are herein incorporated by reference in their entirety, such as, but not limited to AAVF1/HSC1 (SEQ ID NO: 2 and 20 of WO2016049230), AAVF2/HSC2 (SEQ ID NO: 3 and 21 of WO2016049230), AAVF3/HSC3 (SEQ ID NO: 5 and 22 of WO2016049230), AAVF4/HSC4 (SEQ ID NO: 6 and 23 of WO2016049230), AAVF5/HSC5 (SEQ ID NO: 11 and 25 of WO2016049230), AAVF6/HSC6 (SEQ ID NO: 7 and 24 of WO2016049230), AAVF7/HSC7 (SEQ ID NO: 8 and 27 of WO2016049230), AAVF8/HSC8 (SEQ ID NO: 9 and 28 of WO2016049230), AAVF9/HSC9 (SEQ ID NO: 10 and 29 of WO2016049230), AAVF11/HSC11 (SEQ ID NO: 4 and 26 of WO2016049230), AAVF12/HSC12 (SEQ ID NO: 12 and 30 of WO2016049230), AAVF13/HSC13 (SEQ ID NO: 14 and 31 of WO2016049230), AAVF14/HSC14 (SEQ ID NO: 15 and 32 of WO2016049230), AAVF15/HSC15 (SEQ ID NO: 16 and 33 of W(012016049230), AAVF16/HSC16 (SEQ ID NO: 17 and 34 of WO2016049230), AAVF17/HSC17 (SEQ ID NO: 13 and 35 of WO2016049230), or variants or derivatives thereof.

[0092] In some embodiments, the AAV serotype may be, or have, a sequence as described in U.S. Pat. No. 8,734,809, the contents of which are herein incorporated by reference in their entirety, such as, but not limited to, AAV CBr-E1 (SEQ ID NO: 13 and 87 of U.S. Pat. No. 8,734,809), AAV CBr-E2 (SEQ ID NO: 14 and 88 of US8734809), AAV CBr-E3 (SEQ ID NO: 15 and 89 of U.S. Pat. No. 8,734,809), AAV CBr-E4 (SEQ ID NO: 16 and 90 of U.S. Pat. No. 8,734,809), AAV CBr-E5 (SEQ ID NO: 17 and 91 of U.S. Pat. No. 8,734,809), AAV CBr-e5 (SEQ ID NO: 18 and 92 of US8734809), AAV CBr-E6 (SEQ ID NO: 19 and 93 of U.S. Pat. No. 8,734,809), AAV CBr-E7 (SEQ ID NO: 20 and 94 of U.S. Pat. No. 8,734,809), AAV CBr-E8 (SEQ ID NO: 21 and 95 of U.S. Pat. No. 8,734,809), AAV (SEQ ID NO: 22 and 96 of US8734809), AAV CIA-D2 (SEQ ID NO: 23 and 97 of U.S. Pat. No. 8,734,809), AAV CLv-D3 (SEQ ID NO: 24 and 98 of U.S. Pat. No. 8,734,809), AAV CLv-D4 (SEQ ID NO: 25 and 99 of U.S. Pat. No. 8,734,809), AAV CIA-D5 (SEQ ID NO: 26 and 100 of US8734809), AAV CIA-D6 (SEQ ID NO: 27 and 101 of U.S. Pat. No. 8,734,809), AAV CLv-D7 (SEQ ID NO: 28 and 102 of US8734809), AAV CIA-D8 (SEQ ID NO: 29 and 103 of U.S. Pat. No. 8,734,809), AAV CLv-E1 (SEQ ID NO: 13 and 87 of U.S. Pat. No. 8,734,809), AAV CIA-R1 (SEQ ID NO: 30 and 104 of U.S. Pat. No. 8,734,809), AAV CLv-R2 (SEQ ID NO: 31 and 105 of U.S. Pat. No. 8,734,809), AAV CIA-R3 (SEQ ID NO: 32 and 106 of US8734809), AAV CLv-R4 (SEQ ID NO: 33 and 107 of U.S. Pat. No. 8,734,809), AAV CLv-R5 (SEQ ID NO: 34 and 108 of U.S. Pat. No. 8,734,809), AAV CLv-R6 (SEQ ID NO: 35 and 109 of U.S. Pat. No. 8,734,809), AAV CLv-R7 (SEQ ID NO: 36 and 110 of U.S. Pat. No. 8,734,809), AAV CLv-R8 (SEQ ID NO: X and X of U.S. Pat. No. 8,734,809), AAV CLv-R9 (SEQ ID NO: X and X of US8734809), AAV CLg-F1 (SEQ ID NO: 39 and 113 of U.S. Pat. No. 8,734,809), AAV CLg-F2 (SEQ ID NO: 40 and 114 of U.S. Pat. No. 8,734,809), AAV CLg-F3 (SEQ ID NO: 41 and 115 of US8734809), AAV CLg-F4 (SEQ ID NO: 42 and 116 of U.S. Pat. No. 8,734,809), AAV CLg-F5 (SEQ ID NO: 43 and 117 of US8734809), AAV CLg-F6 (SEQ ID NO: 43 and 117 of US8734809), AAS CLg-F7 (SEQ ID NO: 44 and 118 of U.S. Pat. No. 8,734,809), AAV CLg-F8 (SEQ ID NO: 43 and 117 of U.S. Pat. No. 8,734,809), AAV CSp-1 (SEQ ID NO: 45 and 119 of US8734809), AAV CSp-10 (SEQ ID NO: 46 and 120 of U.S. Pat. No. 8,734,809), AAS CSp-11 (SEQ ID NO: 47 and 121 of U.S. Pat. No. 8,734,809), AAV CSp-2 (SEQ ID NO: 48 and 122 of US8734809), AAV CSp-3 (SEQ ID NO: 49 and 123 of U.S. Pat. No. 8,734,809), AAV CSp-4 (SEQ ID NO: 50 and 124 of U.S. Pat. No. 8,734,809), AAV CSp-6 (SEQ ID NO: 51 and 125 of US8734809), AAV CSp-7 (SEQ ID NO: 52 and 126 of U.S. Pat. No. 8,734,809), AAV CSp-8 (SEQ ID NO: 53 and 127 of US8734809), AAT CSp-9 (SEQ ID NO: 54 and 128 of U.S. Pat. No. 8,734,809), AAV CHt-2 (SEQ ID NO: 55 and 129 of U.S. Pat. No. 8,734,809), AAV CHt-3 (SEQ ID NO: 56 and 130 of U.S. Pat. No. 8,734,809), AAV CKd-1 (SEQ ID NO: 57 and 131 of U.S. Pat. No. 8,734,809), AAV CKd-10 (SEQ ID NO: 58 and 132 of U.S. Pat. No. 8,734,809), AAV CKd-2 (SEQ ID NO: 59 and 133 of US8734809), AAV CKd-3 (SEQ ID NO: 60 and 134 of US8734809), AAV CKd-4 (SEQ ID NO: 61 and 135 of U.S. Pat. No. 8,734,809), AAV CKd-6 (SEQ ID NO: 62 and 136 of U.S. Pat. No. 8,734,809), AAV CKd-7 (SEQ ID NO: 63 and 137 of US8734809), AAV CKd-8 (SEQ ID NO: 64 and 138 of U.S. Pat. No. 8,734,809), AAV CLv-1 (SEQ ID NO: 35 and 139 of U.S. Pat. No. 8,734,809), AAV CLv-12 (SEQ ID NO: 66 and 140 of U.S. Pat. No. 8,734,809), AAV CLv-13 (SEQ ID NO: 67 and 141 of U.S. Pat. No. 8,734,809), AAV CLv-2 (SEQ ID NO: 68 and 142 of U.S. Pat. No. 8,734,809). AAV CLv-3 (SEQ ID NO: 69 and 143 of U.S. Pat. No. 8,734,809), AAV (SEQ ID NO: 70 and 144 of U.S. Pat. No. 8,734,809), AAV CLv-6 (SEQ ID NO: 71 and 145 of U.S. Pat. No. 8,734,809), AAV CLv-8 (SEQ ID NO: 72 and 146 of U.S. Pat. No. 8,734,809), AAV CI(d-B1 (SEQ ID NO: 73 and 147 of U.S. Pat. No. 8,734,809), AAV CM-B2 (SEQ ID NO: 74 and 148 of U.S. Pat. No. 8,734,809), AAV C1(d-B3 (SEQ ID NO: 75 and 149 of U.S. Pat. No. 8,734,809), AAV CKd-B4 (SEQ ID NO: 76 and 150 of US8734809), AAV CKd-135 (SEQ ID NO: 77 and 151 of U.S. Pat. No. 8,734,809), AAV CM-Bo (SEQ ID NO: 78 and 152 of U.S. Pat. No. 8,734,809), AAV CKd-B7 (SEQ ID NO: 79 and 153 of U.S. Pat. No. 8,734,809), AAV CKd-B8 (SEQ ID NO: 80 and 154 of U.S. Pat. No. 8,734,809), AAV CKd-H1 (SEQ ID NO: 81 and 155 of US8734809), AAV CKd-H2 (SEQ ID NO: 82 and 156 of U.S. Pat. No. 8,734,809), AAV CKd-H3 (SEQ ID NO: 83 and 157 of U.S. Pat. No. 8,734,809), AAV CKd-H4 (SEQ ID NO: 84 and 158 of U.S. Pat. No. 8,734,809), AAV CKd-H5 (SEQ ID NO: 85 and 159 of U.S. Pat. No. 8,734,809), AAV CKd-H6 (SEQ ID NO: 77 and 151 of U.S. Pat. No. 8,734,809), AAV CHt-1 (SEQ ID NO: 86 and 160 of US8734809), AAV (SEQ ID NO: 171 of U.S. Pat. No. 8,734,809), AAV CLv1-2 (SEQ ID NO: 172 of U.S. Pat. No. 8,734,809), AAV CLv1-3 (SEQ ID NO: 173 of U.S. Pat. No. 8,734,809), AAV CLv1-4 (SEQ ID NO: 174 of U.S. Pat. No. 8,734,809), AAV Clv1-7 (SEQ ID NO: 175 of U.S. Pat. No. 8,734,809), AAV Clv1-8 (SEQ ID NO: 176 of US8734809), AAV Clv1-9 (SEQ ID NO: 177 of US8734809), AAV Clv1-10 (SEQ ID NO: 178 of U.S. Pat. No. 8,734,809), AAV.VR-355 (SEQ ID NO: 181 of U.S. Pat. No. 8,734,809), AAV.hu.48R3 (SEQ ID NO: 183 of U.S. Pat. No. 8,734,809), or variants or derivatives thereof.

[0093] In some embodiments, the AAV serotype may be, or have, a sequence as described in International Publication No. WO2016065001, the contents of which are herein incorporated by reference in their entirety, such as, but not limited to AAV CHt-P2 (SEQ ID NO: 1 and 51 of WO2016065001), AAV CHt-P5 (SEQ ID NO: 2 and 52 of WO2016065001), AAV CHt-P9 (SEQ ID NO: 3 and 53 of WO2016065001), AAV CBr-7.1 (SEQ ID NO: 4 and 54 of WO2016065001), AAV CBr-7.2 (SEQ ID NO: 5 and 55 of WO2016065001), AAV CBr-7.3 (SEQ ID NO: 6 and 56 of WO2016065001), AAV CBr-7.4 (SEQ ID NO: 7 and 57 of WO2016065001), AAV CBr-7.5 (SEQ ID NO: 8 and 58 of WO2016065001), AAV CBr-7.7 (SEQ ID NO: 9 and 59 of WO2016065001), AAV CBr-7.8 (SEQ ID NO: 10 and 60 of WO2016065001), AAV CBr-7,10 (SEQ ID NO: 11 and 61 of WO2016065001), AAV CKd-N3 (SEQ ID NO: 12 and 62 of WO2016065001), AAV CKd-N4 (SEQ ID NO: 13 and 63 of WO2016065001), AAV CKd-N9 (SEQ ID NO: 14 and 64 of WO2016065001), AAV CLv-L4 (SEQ ID NO: 15 and 65 of WO2016065001), AAV CLv-L5 (SEQ ID NO: 16 and 66 of WO2016065001), AAV CLv-L6 (SEQ ID NO: 17 and 67 of WO2016065001), AAV CLv-K1 (SEQ ID NO: 18 and 68 of WO2016065001), AAV CLv-K3 (SEQ ID NO: 19 and 69 of WO2016065001), AAV CLv-K6 (SEQ ID NO: 20 and 70 of WO2016065001), AAV CLv-M1 (SEQ ID NO: 21 and 71 of WO2016065001), AAV CLv-M11 (SEQ ID NO: 22 and 72 of WO2016065001), AAV CLv-M2 (SEQ ID NO: 23 and 73 of WO2016065001), AAV CLv-M5 (SEQ ID NO: 24 and 74 of WO2016065001), AAV CLv-M6 (SEQ ID NO: 25 and 75 of WO2016065001), AAV CLv-M7 (SEQ ID NO: 26 and 76 of WO2016065001), AAV CLv-M8 (SEQ ID NO: 27 and 77 of WO2016065001), AAV CLv-M9 (SEQ ID NO: 28 and 78 of WO2016065001), AAV Mt-Pi (SEQ ID NO: 29 and 79 of WO2016065001), AAV CHt-P6 (SEQ ID NO: 30 and 80 of WO2016065001), AAV CHt-P8 (SEQ ID NO: 31 and 81 of WO2016065001), AAV CHt-6.1 (SEQ ID NO: 32 and 82 of WO2016065001), AAV CHI-6.10 (SEQ ID NO: 33 and 83 of WO2016065001), AAV CHt-6.5 (SEQ ID NO: 34 and 84 of WO2016065001), AAV CHt-6.6 (SEQ ID NO: 35 and 85 of WO2016065001), AAV CHt-6.7 (SEQ ID NO: 36 and 86 of WO2016065001), AAV CHt-6.8 (SEQ ID NO: 37 and 87 of WO2016065001), AAV CSp-8.10 (SEQ ID NO: 38 and 88 of WO2016065001), AAV CSp-8,2 (SEQ ID NO: 39 and 89 of WO2016065001), AAV CSp-8.4 (SEQ ID NO: 40 and 90 of WO2016065001), AAV CSp-8.5 (SEQ ID NO: 41 and 91 of WO2016065001), AAV CSp-8.6 (SEQ ID NO: 42 and 92 of WO2016065001), AAV CSp-8.7 (SEQ ID NO: 43 and 93 of WO2016065001), AAV CSp-8.8 (SEQ ID NO: 44 and 94 of WO2016065001), AAV CSp-8.9 (SEQ ID NO: 45 and 95 of WO2016065001), AAV CBr-B7.3 (SEQ ID NO: 46 and 96 of WO2016065001), AAV CBr-B7,4 (SEQ ID NO: 47 and 97 of WO2016065001), AAV3B (SEQ ID NO: 48 and 98 of WO2016065001), AAV4 (SEQ ID NO: 49 and 99 of WO2016065001), AAV5 (SEQ ID NO: 50 and 100 of WO2016065001), or variants or derivatives thereof.

[0094] In some embodiments, the AAV may be a serotype selected from any of those found in Table 1.

[0095] In some embodiments, the AAV serotype may comprise a sequence, fragment or variant thereof, of the sequences in Table 1.

[0096] In some embodiments, the AAV serotype may be encoded by a sequence, fragment or variant as described in Table 1.

[0097] In some embodiments, the AAV serotype may comprise a sequence given by any of SEQ ID NO: 1-1723.

[0098] In some embodiments, the AAV serotype may be encoded by a sequence given by any of SEQ ID NO: 1-1723.

TABLE 1
AAV Serotypes

| Serotype | SEQ ID NO | Reference Information |
|---|---|---|
| VOY101 | 1 and 1722 | — |
| VOY201 | 1723 | — |
| PHP.N/PHP.B-DGT | 2 | WO2017100671 SEQ ID NO: 46 |
| AAVPHP.B or G2B-26 | 3 | WO2015038958 SEQ ID NO: 8 and 13 |
| AAVPHP.B | 4 | WO2015038958 SEQ ID NO: 9 |
| AAVG2B-13 | 5 | WO2015038958 SEQ ID NO: 12 |
| AAVTH1.1-32 | 6 | WO2015038958 SEQ ID NO: 14 |
| AAVTH1.1-35 | 7 | WO2015038958 SEQ ID NO: 15 |
| PHP.S/G2A12 | 8 | WO2017100671 SEQ ID NO: 47 |
| AAV9/hu.14 K449R | 9 | WO2017100671 SEQ ID NO: 45 |
| AAV1 | 10 | US20150159173 SEQ ID NO: 11, US20150315612 SEQ |
| | | ID NO: 202 |
| AAV1 | 11 | US20160017295 SEQ ID NO: 1, US20030138772 SEQ |
| | | ID NO: 64, US20150159173 SEQ ID NO: 27, |
| | | US20150315612 SEQ ID NO: 219, U.S. Pat. No. 7,198,951 |
| | | SEQ ID NO: 5 |
| AAV1 | 12 | US20030138772 SEQ ID NO: 6 |
| AAV1.3 | 13 | US20030138772 SEQ ID NO: 14 |
| AAV10 | 14 | US20030138772 SEQ ID NO: 117 |
| AAV10 | 15 | WO2015121501 SEQ ID NO: 9 |
| AAV10 | 16 | WO2015121501 SEQ ID NO: 8 |
| AAV11 | 17 | US20030138772 SEQ ID NO: 118 |
| AAV12 | 18 | US20030138772 SEQ ID NO: 119 |
| AAV2 | 19 | US20150159173 SEQ ID NO: 7, US20150315612 SEQ |
| | | ID NO: 211 |
| AAV2 | 20 | US20030138772 SEQ ID NO: 70, US20150159173 SEQ |
| | | ID NO: 23, US20150315612 SEQ ID NO: 221, |
| | | US20160017295 SEQ ID NO: 2, U.S. Pat. No. 6,156,303 |
| | | SEQ ID NO: 4, U.S. Pat. No. 7,198,951 SEQ ID NO: 4, |
| | | WO2015121501 SEQ ID NO: 1 |
| AAV2 | 21 | U.S. Pat. No. 6,156,303 SEQ ID NO: 8 |
| AAV2 | 22 | US20030138772 SEQ ID NO: 7 |
| AAV2 | 23 | U.S. Pat. No. 6,156,303 SEQ ID NO: 3 |
| AAV2.5T | 24 | U.S. Pat. No. 9,233,131 SEQ ID NO: 42 |
| AAV223.10 | 25 | US20030138772 SEQ ID NO: 75 |
| AAV223.2 | 26 | US20030138772 SEQ ID NO: 49 |
| AAV223.2 | 27 | US20030138772 SEQ ID NO: 76 |
| AAV223.4 | 28 | US20030138772 SEQ ID NO: 50 |
| AAV223.4 | 29 | US20030138772 SEQ ID NO: 73 |
| AAV223.5 | 30 | US20030138772 SEQ ID NO: 51 |
| AAV223.5 | 31 | US20030138772 SEQ ID NO: 74 |
| AAV223.6 | 32 | US20030138772 SEQ ID NO: 52 |
| AAV223.6 | 33 | US20030138772 SEQ ID NO: 78 |
| AAV223.7 | 34 | US20030138772 SEQ ID NO: 53 |
| AAV223.7 | 35 | US20030138772 SEQ ID NO: 77 |
| AAV29.3 | 36 | US20030138772 SEQ ID NO: 82 |
| AAV29.4 | 37 | US20030138772 SEQ ID NO: 12 |
| AAV29.5 | 38 | US20030138772 SEQ ID NO: 83 |
| AAV29.5 (AAVbb.2) | 39 | US20030138772 SEQ ID NO: 13 |
| AAV3 | 40 | US20150159173 SEQ ID NO: 12 |
| AAV3 | 41 | US20030138772 SEQ ID NO: 71, US20150159173 SEQ |
| | | ID NO: 28, US20160017295 SEQ ID NO: 3, |
| | | U.S. Pat. No. 7,198,951 SEQ ID NO: 6 |
| AAV3 | 42 | US20030138772 SEQ ID NO: 8 |
| AAV3.3b | 43 | US20030138772 SEQ ID NO: 72 |
| AAV3-3 | 44 | US20150315612 SEQ ID NO: 200 |
| AAV3-3 | 45 | US20150315612 SEQ ID NO: 217 |
| AAV3a | 46 | U.S. Pat. No. 6,156,303 SEQ ID NO: 5 |
| AAV3a | 47 | U.S. Pat. No. 6,156,303 SEQ ID NO: 9 |
| AAV3b | 48 | U.S. Pat. No. 6,156,303 SEQ ID NO: 6 |
| AAV3b | 49 | U.S. Pat. No. 6,156,303 SEQ ID NO: 10 |
| AAV3b | 50 | U.S. Pat. No. 6,156,303 SEQ ID NO: 1 |
| AAV4 | 51 | US20140348794 SEQ ID NO: 17 |
| AAV4 | 52 | US20140348794 SEQ ID NO: 5 |
| AAV4 | 53 | US20140348794 SEQ ID NO: 3 |
| AAV4 | 54 | US20140348794 SEQ ID NO: 14 |
| AAV4 | 55 | US20140348794 SEQ ID NO: 15 |
| AAV4 | 56 | US20140348794 SEQ ID NO: 19 |
| AAV4 | 57 | US20140348794 SEQ ID NO: 12 |
| AAV4 | 58 | US20140348794 SEQ ID NO: 13 |
| AAV4 | 59 | US20140348794 SEQ ID NO: 7 |
| AAV4 | 60 | US20140348794 SEQ ID NO: 8 |
| AAV4 | 61 | US20140348794 SEQ ID NO: 9 |
| AAV4 | 62 | US20140348794 SEQ ID NO: 2 |
| AAV4 | 63 | US20140348794 SEQ ID NO: 10 |
| AAV4 | 64 | US20140348794 SEQ ID NO: 11 |
| AAV4 | 65 | US20140348794 SEQ ID NO: 18 |
| AAV4 | 66 | US20030138772 SEQ ID NO: 63, US20160017295 SEQ |
| | | ID NO: 4, US20140348794 SEQ ID NO: 4 |
| AAV4 | 67 | US20140348794 SEQ ID NO: 16 |
| AAV4 | 68 | US20140348794 SEQ ID NO: 20 |
| AAV4 | 69 | US20140348794 SEQ ID NO: 6 |
| AAV4 | 70 | US20140348794 SEQ ID NO: 1 |
| AAV42.2 | 71 | US20030138772 SEQ ID NO: 9 |
| AAV42.2 | 72 | US20030138772 SEQ ID NO: 102 |
| AAV42.3b | 73 | US20030138772 SEQ ID NO: 36 |
| AAV42.3B | 74 | US20030138772 SEQ ID NO: 107 |
| AAV42.4 | 75 | US20030138772 SEQ ID NO: 33 |
| AAV42.4 | 76 | US20030138772 SEQ ID NO: 88 |
| AAV42.8 | 77 | US20030138772 SEQ ID NO: 27 |
| AAV42.8 | 78 | US20030138772 SEQ ID NO: 85 |
| AAV43.1 | 79 | US20030138772 SEQ ID NO: 39 |
| AAV43.1 | 80 | US20030138772 SEQ ID NO: 92 |
| AAV43.12 | 81 | US20030138772 SEQ ID NO: 41 |
| AAV43.12 | 82 | US20030138772 SEQ ID NO: 93 |
| AAV43.20 | 83 | US20030138772 SEQ ID NO: 42 |
| AAV43.20 | 84 | US20030138772 SEQ ID NO: 99 |
| AAV43.21 | 85 | US20030138772 SEQ ID NO: 43 |
| AAV43.21 | 86 | US20030138772 SEQ ID NO: 96 |
| AAV43.23 | 87 | US20030138772 SEQ ID NO: 44 |
| AAV43.23 | 88 | US20030138772 SEQ ID NO: 98 |
| AAV43.25 | 89 | US20030138772 SEQ ID NO: 45 |
| AAV43.25 | 90 | US20030138772 SEQ ID NO: 97 |
| AAV43.5 | 91 | US20030138772 SEQ ID NO: 40 |
| AAV43.5 | 92 | US20030138772 SEQ ID NO: 94 |
| AAV4-4 | 93 | US20150315612 SEQ ID NO: 201 |
| AAV4-4 | 94 | US20150315612 SEQ ID NO: 218 |
| AAV44.1 | 95 | US20030138772 SEQ ID NO: 46 |
| AAV44.1 | 96 | US20030138772 SEQ ID NO: 79 |
| AAV44.5 | 97 | US20030138772 SEQ ID NO: 47 |
| AAV44.5 | 98 | US20030138772 SEQ ID NO: 80 |
| AAV4407 | 99 | US20150315612 SEQ ID NO: 90 |
| AAV5 | 100 | U.S. Pat. No. 7,427,396 SEQ ID NO: 1 |
| AAV5 | 101 | US20030138772 SEQ ID NO: 114 |
| AAV5 | 102 | US20160017295 SEQ ID NO: 5, U.S. Pat. No. 7,427,396 |
| | | SEQ ID NO: 2. US20150315612 SEQ ID NO: 216 |
| AAV5 | 103 | US20150315612 SEQ ID NO: 199 |
| AAV6 | 104 | US20150159173 SEQ ID NO: 13 |
| AAV6 | 105 | US20030138772 SEQ ID NO: 65, US20150159173 SEQ |
| | | ID NO: 29, US20160017295 SEQ ID NO: 6, |
| | | U.S. Pat. No. 6,156,303 SEQ ID NO: 7 |
| AAV6 | 106 | U.S. Pat. No. 6,156,303 SEQ ID NO: 11 |
| AAV6 | 107 | U.S. Pat. No. 6,156,303 SEQ ID NO: 2 |
| AAV6 | 108 | US20150315612 SEQ ID NO: 203 |
| AAV6 | 109 | US20150315612 SEQ ID NO: 220 |
| AAV6.1 | 110 | US20150159173 |
| AAV6.12 | 111 | US20150159173 |
| AAV6.2 | 112 | US20150159173 |
| AAV7 | 113 | US20150159173 SEQ ID NO: 14 |
| AAV7 | 114 | US20150315612 SEQ ID NO: 183 |
| AAV7 | 115 | US20030138772 SEQ ID NO: 2, US20150159173 SEQ |
| | | ID NO: 30, US20150315612 SEQ ID NO: 181, |
| | | US20160017295 SEQ ID NO: 7 |
| AAV7 | 116 | US20030138772 SEQ ID NO: 3 |
| AAV7 | 117 | US20030138772 SEQ ID NO: 1, US20150315612 SEQ |
| | | ID NO: 180 |
| AAV7 | 118 | US20150315612 SEQ ID NO: 213 |
| AAV7 | 119 | US20150315612 SEQ ID NO: 222 |
| AAV8 | 120 | US20150159173 SEQ ID NO: 15 |
| AAV8 | 121 | US20150376240 SEQ ID NO: 7 |
| AAV8 | 122 | US20030138772 SEQ ID NO: 4, US20150315612 SEQ |
| | | ID NO: 182 |
| AAV8 | 123 | US20030138772 SEQ ID NO: 95, US20140359799 SEQ |
| | | ID NO: 1, US20150159173 SEQ ID NO: 31, |
| | | US20160017295 SEQ ID NO: 8, U.S. Pat. No. 7,198,951 |
| | | SEQ ID NO: 7, US20150315612 SEQ ID NO: 223 |
| AAV8 | 124 | US20150376240 SEQ ID NO: 8 |
| AAV8 | 125 | US20150315612 SEQ ID NO: 214 |
| AAV-8b | 126 | US20150376240 SEQ ID NO: 5 |
| AAV-8b | 127 | US20150376240 SEQ ID NO: 3 |
| AAV-8h | 128 | US20150376240 SEQ ID NO: 6 |
| AAV-8h | 129 | US20150376240 SEQ ID NO: 4 |
| AAV9 | 130 | US20030138772 SEQ ID NO: 5 |
| AAV9 | 131 | U.S. Pat. No. 7,198,951 SEQ ID NO: 1 |
| AAV9 | 132 | US20160017295 SEQ ID NO: 9 |
| AAV9 | 133 | US20030138772 SEQ ID NO: 100, U.S. Pat. No. |
| | | 7,198,951 SEQ ID NO: 2 |
| AAV9 | 134 | U.S. Pat. No. 7,198,951 SEQ ID NO: 3 |
| AAV9 (AAVhu.14) | 135 | U.S. Pat. No. 7,906,111 SEQ ID NO: 3; WO2015038958 SEQ ID |
| | | NO: 11 |
| AAV9 (AAVhu.14) | 136 | U.S. Pat. No. 7,906,111 SEQ ID NO: 123; WO2015038958 SEQ ID |
| | | NO: 2 |
| AAVA3.1 | 137 | US20030138772 SEQ ID NO: 120 |
| AAVA3.3 | 138 | US20030138772 SEQ ID NO: 57 |
| AAVA3.3 | 139 | US20030138772 SEQ ID NO: 66 |
| AAVA3.4 | 140 | US20030138772 SEQ ID NO: 54 |
| AAVA3.4 | 141 | US20030138772 SEQ ID NO: 68 |
| AAVA3.5 | 142 | US20030138772 SEQ ID NO: 55 |
| AAVA3.5 | 143 | US20030138772 SEQ ID NO: 69 |
| AAVA3.7 | 144 | US20030138772 SEQ ID NO: 56 |
| AAVA3.7 | 145 | US20030138772 SEQ ID NO: 67 |
| AAV29.3 (AAVbb.1) | 146 | US20030138772 SEQ ID NO: 11 |
| AAVC2 | 147 | US20030138772 SEQ ID NO: 61 |
| AAVCh.5 | 148 | US20150159173 SEQ ID NO: 46, US20150315612 SEQ |
| | | ID NO: 234 |
| AAVcy.2 (AAV13.3) | 149 | US20030138772 SEQ ID NO: 15 |
| AAV24.1 | 150 | US20030138772 SEQ ID NO: 101 |
| AAVcy.3 (AAV24.1) | 151 | US20030138772 SEQ ID NO: 16 |
| AAV27.3 | 152 | US20030138772 SEQ ID NO: 104 |
| AAVcy.4 (AAV27.3) | 153 | US20030138772 SEQ ID NO: 17 |
| AAVcy.5 | 154 | US20150315612 SEQ ID NO: 227 |
| AAV7.2 | 155 | US20030138772 SEQ ID NO: 103 |
| AAVcy.5 (AAV7.2) | 156 | US20030138772 SEQ ID NO: 18 |
| AAV16.3 | 157 | US20030138772 SEQ ID NO: 105 |
| AAVcy.6 (AAV16.3) | 158 | US20030138772 SEQ ID NO: 10 |
| AAVcy.5 | 159 | US20150159173 SEQ ID NO: 8 |
| AAVcy.5 | 160 | US20150159173 SEQ ID NO: 24 |
| AAVCy.5R1 | 161 | US20150159173 |
| AAVCy.5R2 | 162 | US20150159173 |
| AAVCy.5R3 | 163 | US20150159173 |
| AAVCy.5R4 | 164 | US20150159173 |
| AAVDJ | 165 | US20140359799 SEQ ID NO: 3, U.S. Pat. No. 7,588,772 |
| | | SEQ ID NO: 2 |
| AAVDJ | 166 | US20140359799 SEQ ID NO: 2, U.S. Pat. No. 7,588,772 |
| | | SEQ ID NO: 1 |
| AAVDJ-8 | 167 | U.S. Pat. No. 7,588,772; Grimm et al 2008 |
| AAVDJ-8 | 168 | U.S. Pat. No. 7,588,772; Grimm et al 2008 |
| AAVF5 | 169 | US20030138772 SEQ ID NO: 110 |
| AAVH2 | 170 | US20030138772 SEQ ID NO: 26 |
| AAVH6 | 171 | US20030138772 SEQ ID NO: 25 |
| AAVhE1.1 | 172 | U.S. Pat. No. 9,233,131 SEQ ID NO: 44 |
| AAVhEr1.14 | 173 | U.S. Pat. No. 9,233,131 SEQ ID NO: 46 |
| AAVhEr1.16 | 174 | U.S. Pat. No. 9,233,131 SEQ ID NO: 48 |
| AAVhEr1.18 | 175 | U.S. Pat. No. 9,233,131 SEQ ID NO: 49 |
| AAVhEr1.23 (AAVhEr2.29) | 176 | U.S. Pat. No. 9,233,131 SEQ ID NO: 53 |
| AAVhEr1.35 | 177 | U.S. Pat. No. 9,233,131 SEQ ID NO: 50 |
| AAVhEr1.36 | 178 | U.S. Pat. No. 9,233,131 SEQ ID NO: 52 |
| AAVhEr1.5 | 179 | U.S. Pat. No. 9,233,131 SEQ ID NO: 45 |
| AAVhEr1.7 | 180 | U.S. Pat. No. 9,233,131 SEQ ID NO: 51 |
| AAVhEr1.8 | 181 | U.S. Pat. No. 9,233,131 SEQ ID NO: 47 |
| AAVhEr2.16 | 182 | U.S. Pat. No. 9,233,131 SEQ ID NO: 55 |
| AAVhEr2.30 | 183 | U.S. Pat. No. 9,233,131 SEQ ID NO: 56 |
| AAVhEr2.31 | 184 | U.S. Pat. No. 9,233,131 SEQ ID NO: 58 |
| AAVhEr2.36 | 185 | U.S. Pat. No. 9,233,131 SEQ ID NO: 57 |
| AAVhEr2.4 | 186 | U.S. Pat. No. 9,233,131 SEQ ID NO: 54 |
| AAVhEr3.1 | 187 | U.S. Pat. No. 9,233,131 SEQ ID NO: 59 |
| AAVhu.1 | 188 | US20150315612 SEQ ID NO: 46 |
| AAVhu.1 | 189 | US20150315612 SEQ ID NO: 144 |
| AAVhu.10 (AAV16.8) | 190 | US20150315612 SEQ ID NO: 56 |
| AAVhu.10 (AAV16.8) | 191 | US20150315612 SEQ ID NO: 156 |
| AAVhu.11 (AAV16.12) | 192 | US20150315612 SEQ ID NO: 57 |
| AAVhu.11 (AAV16.12) | 193 | US20150315612 SEQ ID NO: 153 |
| AAVhu.12 | 194 | US20150315612 SEQ ID NO: 59 |
| AAVhu.12 | 195 | US20150315612 SEQ ID NO: 154 |
| AAVhu.13 | 196 | US20150159173 SEQ ID NO: 16, US20150315612 SEQ |
| | | ID NO: 71 |
| AAVhu.13 | 197 | US20150159173 SEQ ID NO: 32, US20150315612 SEQ |
| | | ID NO: 129 |
| AAVhu.136.1 | 198 | US20150315612 SEQ ID NO: 165 |
| AAVhu.140.1 | 199 | US20150315612 SEQ ID NO: 166 |
| AAVhu.140.2 | 200 | US20150315612 SEQ ID NO: 167 |
| AAVhu.145.6 | 201 | US20150315612 SEQ ID No: 178 |
| AAVhu.15 | 202 | US20150315612 SEQ ID NO: 147 |
| AAVhu.15 (AAV33.4) | 203 | US20150315612 SEQ ID NO: 50 |
| AAVhu.156.1 | 204 | US20150315612 SEQ ID No: 179 |
| AAVhu.16 | 205 | US20150315612 SEQ ID NO: 148 |
| AAVhu.16 (AAV33.8) | 206 | US20150315612 SEQ ID NO: 51 |
| AAVhu.17 | 207 | US20150315612 SEQ ID NO: 83 |
| AAVhu.17 (AAV33.12) | 208 | US20150315612 SEQ ID NO: 4 |
| AAVhu.172.1 | 209 | US20150315612 SEQ ID NO: 171 |
| AAVhu.172.2 | 210 | US20150315612 SEQ ID NO: 172 |
| AAVhu.173.4 | 211 | US20150315612 SEQ ID NO: 173 |
| AAVhu.173.8 | 212 | US20150315612 SEQ ID NO: 175 |
| AAVhu.18 | 213 | US20150315612 SEQ ID NO: 52 |
| AAVhu.18 | 214 | US20150315612 SEQ ID NO: 149 |
| AAVhu.19 | 215 | US20150315612 SEQ ID NO: 62 |
| AAVhu.19 | 216 | US20150315612 SEQ ID NO: 133 |
| AAVhu.2 | 217 | US20150315612 SEQ ID NO: 48 |
| AAVhu.2 | 218 | US20150315612 SEQ ID NO: 143 |
| AAVhu.20 | 219 | US20150315612 SEQ ID NO: 63 |
| AAVhu.20 | 220 | US20150315612 SEQ ID NO: 134 |
| AAVhu.21 | 221 | US20150315612 SEQ ID NO: 65 |
| AAVhu.21 | 222 | US20150315612 SEQ ID NO: 135 |
| AAVhu.22 | 223 | US20150315612 SEQ ID NO: 67 |
| AAVhu.22 | 224 | US20150315612 SEQ ID NO: 138 |
| AAVhu.23 | 225 | US20150315612 SEQ ID NO: 60 |
| AAVhu.23.2 | 226 | US20150315612 SEQ ID NO: 137 |
| AAVhu.24 | 227 | US20150315612 SEQ ID NO: 66 |
| AAVhu.24 | 228 | US20150315612 SEQ ID NO: 136 |
| AAVhu.25 | 229 | US20150315612 SEQ ID NO: 49 |
| AAVhu.25 | 230 | US20150315612 SEQ ID NO: 146 |
| AAVhu.26 | 231 | US20150159173 SEQ ID NO: 17, US20150315612 SEQ |
| | | ID NO: 61 |
| AAVhu.26 | 232 | US20150159173 SEQ ID NO: 33, US20150315612 SEQ |
| | | ID NO: 139 |
| AAVhu.27 | 233 | US20150315612 SEQ ID NO: 64 |
| AAVhu.27 | 234 | US20150315612 SEQ ID NO: 140 |
| AAVhu.28 | 235 | US20150315612 SEQ ID NO: 68 |
| AAVhu.28 | 236 | US20150315612 SEQ ID NO: 130 |
| AAVhu.29 | 237 | US20150315612 SEQ ID NO: 69 |
| AAVhu.29 | 238 | US20150159173 SEQ ID NO: 42, US20150315612 SEQ |
| | | ID NO: 132 |
| AAVhu.29 | 239 | US20150315612 SEQ ID NO: 225 |
| AAVhu.29R | 240 | US20150159173 |
| AAVhu.3 | 241 | US20150315612 SEQ ID NO: 44 |
| AAVhu.3 | 242 | US20150315612 SEQ ID NO: 145 |
| AAVhu.30 | 243 | US20150315612 SEQ ID NO: 70 |
| AAVhu.30 | 244 | US20150315612 SEQ ID NO: 131 |
| AAVhu.31 | 245 | US20150315612 SEQ ID NO: 1 |
| AAVhu.31 | 246 | US20150315612 SEQ ID NO: 121 |
| AAVhu.32 | 247 | US20150315612 SEQ ID NO: 2 |
| AAVhu.32 | 248 | US20150315612 SEQ ID NO: 122 |
| AAVhu.33 | 249 | US20150315612 SEQ ID NO: 75 |
| AAVhu.33 | 250 | US20150315612 SEQ ID NO: 124 |
| AAVhu.34 | 251 | US20150315612 SEQ ID NO: 72 |
| AAVhu.34 | 252 | US20150315612 SEQ ID NO: 125 |
| AAVhu.35 | 253 | US20150315612 SEQ ID NO: 73 |
| AAVhu.35 | 254 | US20150315612 SEQ ID NO: 164 |
| AAVhu.36 | 255 | US20150315612 SEQ ID NO: 74 |
| AAVhu.36 | 256 | US20150315612 SEQ ID NO: 126 |
| AAVhu.37 | 257 | US20150159173 SEQ ID NO: 34, US20150315612 SEQ |
| | | ID NO: 88 |
| AAVhu.37 (AAV106.1) | 258 | US20150315612 SEQ ID NO: 10, US20150159173 SEQ |
| | | ID NO: 18 |
| AAVhu.38 | 259 | US20150315612 SEQ ID NO: 161 |
| AAVhu.39 | 260 | US20150315612 SEQ ID NO: 102 |
| AAVhu.39 (AAVLG-9) | 261 | US20150315612 SEQ ID NO: 24 |
| AAVhu.4 | 262 | US20150315612 SEQ ID NO: 47 |
| AAVhu.4 | 263 | US20150315612 SEQ ID NO: 141 |
| AAVhu.40 | 264 | US20150315612 SEQ ID NO: 87 |
| AAVhu.40 (AAV114.3) | 265 | US20150315612 SEQ ID No: 11 |
| AAVhu.41 | 266 | US20150315612 SEQ ID NO: 91 |
| AAVhu.41 (AAV127.2) | 267 | US20150315612 SEQ ID NO: 6 |
| AAVhu.42 | 268 | US20150315612 SEQ ID NO: 85 |
| AAVhu.42 (AAV127.5) | 269 | US20150315612 SEQ ID NO: 8 |
| AAVhu.43 | 270 | US20150315612 SEQ ID NO: 160 |
| AAVhu.43 | 271 | US20150315612 SEQ ID NO: 236 |
| AAVhu.43 (AAV128.1) | 272 | US20150315612 SEQ ID NO: 80 |
| AAVhu.44 | 273 | US20150159173 SEQ ID NO: 45, US20150315612 SEQ |
| | | ID NO: 158 |
| AAVhu.44 (AAV128.3) | 274 | US20150315612 SEQ ID NO: 81 |
| AAVhu.44R1 | 275 | US20150159173 |
| AAVhu.44R2 | 276 | US20150159173 |
| AAVhu.44R3 | 277 | US20150159173 |
| AAVhu.45 | 278 | US20150315612 SEQ ID NO: 76 |
| AAVhu.45 | 279 | US20150315612 SEQ ID NO: 127 |
| AAVhu.46 | 280 | US20150315612 SEQ ID NO: 82 |
| AAVhu.46 | 281 | US20150315612 SEQ ID NO: 159 |
| AAVhu.46 | 282 | US20150315612 SEQ ID NO: 224 |
| AAVhu.47 | 283 | US20150315612 SEQ ID NO: 77 |
| AAVhu.47 | 284 | US20150315612 SEQ ID NO: 128 |
| AAVhu.48 | 285 | US20150159173 SEQ ID NO: 38 |
| AAVhu.48 | 286 | US20150315612 SEQ ID NO: 157 |
| AAVhu.48 (AAV130.4) | 287 | US20150315612 SEQ ID NO: 78 |
| AAVhu.48R1 | 288 | US20150159173 |
| AAVhu.48R2 | 289 | US20150159173 |
| AAVhu.48R3 | 290 | US20150159173 |
| AAVhu.49 | 291 | US20150315612 SEQ ID NO: 209 |
| AAVhu.49 | 292 | US20150315612 SEQ ID NO: 189 |
| AAVhu.5 | 293 | US20150315612 SEQ ID NO: 45 |
| AAVhu.5 | 294 | US20150315612 SEQ ID NO: 142 |
| AAVhu.51 | 295 | US20150315612 SEQ ID NO: 208 |
| AAVhu.51 | 296 | US20150315612 SEQ ID NO: 190 |
| AAVhu.52 | 297 | US20150315612 SEQ ID NO: 210 |
| AAVhu.52 | 298 | US20150315612 SEQ ID NO: 191 |
| AAVhu.53 | 299 | US20150159173 SEQ ID NO: 19 |
| AAVhu.53 | 300 | US20150159173 SEQ ID NO: 35 |
| AAVhu.53 (AAV145.1) | 301 | US20150315612 SEQ ID NO: 176 |
| AAVhu.54 | 302 | US20150315612 SEQ ID NO: 188 |
| AAVhu.54 (AAV145.5) | 303 | US20150315612 SEQ ID No: 177 |
| AAVhu.55 | 304 | US20150315612 SEQ ID NO: 187 |
| AAVhu.56 | 305 | US20150315612 SEQ ID NO: 205 |
| AAVhu.56 (AAV145.6) | 306 | US20150315612 SEQ ID NO: 168 |
| AAVhu.56 (AAV145.6) | 307 | US20150315612 SEQ ID NO: 192 |
| AAVhu.57 | 308 | US20150315612 SEQ ID NO: 206 |
| AAVhu.57 | 309 | US20150315612 SEQ ID NO: 169 |
| AAVhu.57 | 310 | US20150315612 SEQ ID NO: 193 |
| AAVhu.58 | 311 | US20150315612 SEQ ID NO: 207 |
| AAVhu.58 | 312 | US20150315612 SEQ ID NO: 194 |
| AAVhu.6 (AAV3.1) | 313 | US20150315612 SEQ ID NO: 5 |
| AAVhu.6 (AAV3.1) | 314 | US20150315612 SEQ ID NO: 84 |
| AAVhu.60 | 315 | US20150315612 SEQ ID NO: 184 |
| AAVhu.60 (AAV161.10) | 316 | US20150315612 SEQ ID NO: 170 |
| AAVhu.61 | 317 | US20150315612 SEQ ID NO: 185 |
| AAVhu.61 (AAV161.6) | 318 | US20150315612 SEQ ID NO: 174 |
| AAVhu.63 | 319 | US20150315612 SEQ ID NO: 204 |
| AAVhu.63 | 320 | US20150315612 SEQ ID NO: 195 |
| AAVhu.64 | 321 | US20150315612 SEQ ID NO: 212 |
| AAVhu.64 | 322 | US20150315612 SEQ ID NO: 196 |
| AAVhu.66 | 323 | US20150315612 SEQ ID NO: 197 |
| AAVhu.67 | 324 | US20150315612 SEQ ID NO: 215 |
| AAVhu.67 | 325 | US20150315612 SEQ ID NO: 198 |
| AAVhu.7 | 326 | US20150315612 SEQ ID NO: 226 |
| AAVhu.7 | 327 | US20150315612 SEQ ID NO: 150 |
| AAVhu.7 (AAV7.3) | 328 | US20150315612 SEQ ID NO: 55 |
| AAVhu.71 | 329 | US20150315612 SEQ ID NO: 79 |
| AAVhu.8 | 330 | US20150315612 SEQ ID NO: 53 |
| AAVhu.8 | 331 | US20150315612 SEQ ID NO: 12 |
| AAVhu.8 | 332 | US20150315612 SEQ ID NO: 151 |
| AAVhu.9 (AAV3.1) | 333 | US20150315612 SEQ ID NO: 58 |
| AAVhu.9 (AAV3.1) | 334 | US20150315612 SEQ ID NO: 155 |
| AAV-LK01 | 335 | US20150376607 SEQ ID NO: 2 |
| AAV-LK01 | 336 | US20150376607 SEQ ID NO: 29 |
| AAV-LK02 | 337 | US20150376607 SEQ ID NO: 3 |
| AAV-LK02 | 338 | US20150376607 SEQ ID NO: 30 |
| AAV-LK03 | 339 | US20150376607 SEQ ID NO: 4 |
| AAV-LK03 | 340 | WO2015121501 SEQ ID NO: 12, US20150376607 SEQ |
| | | ID NO: 31 |
| AAV-LK04 | 341 | US20150376607 SEQ ID NO: 5 |
| AAV-LK04 | 342 | US20150376607 SEQ ID NO: 32 |
| AAV-LK05 | 343 | US20150376607 SEQ ID NO: 6 |
| AAV-LK05 | 344 | US20150376607 SEQ ID NO: 33 |
| AAV-LK06 | 345 | US20150376607 SEQ ID NO: 7 |
| AAV-LK06 | 346 | US20150376607 SEQ ID NO: 34 |
| AAV-LK07 | 347 | US20150376607 SEQ ID NO: 8 |
| AAV-LK07 | 348 | US20150376607 SEQ ID NO: 35 |
| AAV-LK08 | 349 | US20150376607 SEQ ID NO: 9 |
| AAV-LK08 | 350 | US20150376607 SEQ ID NO: 36 |
| AAV-LK09 | 351 | US20150376607 SEQ ID NO: 10 |
| AAV-LK09 | 352 | US20150376607 SEQ ID NO: 37 |
| AAV-LK10 | 353 | US20150376607 SEQ ID NO: 11 |
| AAV-LK10 | 354 | US20150376607 SEQ ID NO: 38 |
| AAV-LK11 | 355 | US20150376607 SEQ ID NO: 12 |
| AAV-LK11 | 356 | US20150376607 SEQ ID NO: 39 |
| AAV-LK12 | 357 | US20150376607 SEQ ID NO: 13 |
| AAV-LK12 | 358 | US20150376607 SEQ ID NO: 40 |
| AAV-LK13 | 359 | US20150376607 SEQ ID NO: 14 |
| AAV-LK13 | 360 | US20150376607 SEQ ID NO: 41 |
| AAV-LK14 | 361 | US20150376607 SEQ ID NO: 15 |
| AAV-LK14 | 362 | US20150376607 SEQ ID NO: 42 |
| AAV-LK15 | 363 | US20150376607 SEQ ID NO: 16 |
| AAV-LK15 | 364 | US20150376607 SEQ ID NO: 43 |
| AAV-LK16 | 365 | US20150376607 SEQ ID NO: 17 |
| AAV-LK16 | 366 | US20150376607 SEQ ID NO: 44 |
| AAV-LK17 | 367 | US20150376607 SEQ ID NO: 18 |
| AAV-LK17 | 368 | US20150376607 SEQ ID NO: 45 |
| AAV-LK18 | 369 | US20150376607 SEQ ID NO: 19 |
| AAV-LK18 | 370 | US20150376607 SEQ ID NO: 46 |
| AAV-LK19 | 371 | US20150376607 SEQ ID NO: 20 |
| AAV-LK19 | 372 | US20150376607 SEQ ID NO: 47 |
| AAV-PAEC | 373 | US20150376607 SEQ ID NO: 1 |
| AAV-PAEC | 374 | US20150376607 SEQ ID NO: 48 |
| AAV-PAEC11 | 375 | US20150376607 SEQ ID NO: 26 |
| AAV-PAEC11 | 376 | US20150376607 SEQ ID NO: 54 |
| AAV-PAEC12 | 377 | US20150376607 SEQ ID NO: 27 |
| AAV-PAEC12 | 378 | US20150376607 SEQ ID NO: 51 |
| AAV-PAEC13 | 379 | US20150376607 SEQ ID NO: 28 |
| AAV-PAEC13 | 380 | US20150376607 SEQ ID NO: 49 |
| AAV-PAEC2 | 381 | US20150376607 SEQ ID NO: 21 |
| AAV-PAEC2 | 382 | US20150376607 SEQ ID NO: 56 |
| AAV-PAEC4 | 383 | US20150376607 SEQ ID NO: 22 |
| AAV-PAEC4 | 384 | US20150376607 SEQ ID NO: 55 |
| AAV-PAEC6 | 385 | US20150376607 SEQ ID NO: 23 |
| AAV-PAEC6 | 386 | US20150376607 SEQ ID NO: 52 |
| AAV-PAEC7 | 387 | US20150376607 SEQ ID NO: 24 |
| AAV-PAEC7 | 388 | US20150376607 SEQ ID NO: 53 |
| AAV-PAEC8 | 389 | US20150376607 SEQ ID NO: 25 |
| AAV-PAEC8 | 390 | US20150376607 SEQ ID NO: 50 |
| AAVpi.1 | 391 | US20150315612 SEQ ID NO: 28 |
| AAVpi.1 | 392 | US20150315612 SEQ ID NO: 93 |
| AAVpi.2 | 393 | US20150315612 SEQ ID NO: 30 |
| AAVpi.2 | 394 | US20150315612 SEQ ID NO: 95 |
| AAVpi.3 | 395 | US20150315612 SEQ ID NO: 29 |
| AAVpi.3 | 396 | US20150315612 SEQ ID NO: 94 |
| AAVrh.10 | 397 | US20150159173 SEQ ID NO: 9 |
| AAVrh.10 | 398 | US20150159173 SEQ ID NO: 25 |
| AAV44.2 | 399 | US20030138772 SEQ ID NO: 59 |
| AAVrh.10 (AAV44.2) | 400 | US20030138772 SEQ ID NO: 81 |
| AAV42.1B | 401 | US20030138772 SEQ ID NO: 90 |
| AAVrh.12 (AAV42.1b) | 402 | US20030138772 SEQ ID NO: 30 |
| AAVrh.13 | 403 | US20150159173 SEQ ID NO: 10 |
| AAVrh.13 | 404 | US20150159173 SEQ ID NO: 26 |
| AAVrh.13 | 405 | US20150315612 SEQ ID NO: 228 |
| AAVrh.13R | 406 | US20150159173 |
| AAV42.3A | 407 | US20030138772 SEQ ID NO: 87 |
| AAVrh.14 (AAV42.3a) | 408 | US20030138772 SEQ ID NO: 32 |
| AAV42.5A | 409 | US20030138772 SEQ ID NO: 89 |
| AAVrh.17 (AAV42.5a) | 410 | US20030138772 SEQ ID NO: 34 |
| AAV42.5B | 411 | US20030138772 SEQ ID NO: 91 |
| AAVrh.18 (AAV42.5b) | 412 | US20030138772 SEQ ID NO: 29 |
| AAV42.6B | 413 | US20030138772 SEQ ID NO: 112 |
| AAVrh.19 (AAV42.6b) | 414 | US20030138772 SEQ ID NO: 38 |
| AAVrh.2 | 415 | US20150159173 SEQ ID NO: 39 |
| AAVrh.2 | 416 | US20150315612 SEQ ID NO: 231 |
| AAVrh.20 | 417 | US20150159173 SEQ ID NO: 1 |
| AAV42.10 | 418 | US20030138772 SEQ ID NO: 106 |
| AAVrh.21 (AAV42.10) | 419 | US20030138772 SEQ ID NO: 35 |
| AAV42.11 | 420 | US20030138772 SEQ ID NO: 108 |
| AAVrh.22 (AAV42.11) | 421 | US20030138772 SEQ ID NO: 37 |
| AAV42.12 | 422 | US20030138772 SEQ ID NO: 113 |
| AAVrh.23 (AAV42.12) | 423 | US20030138772 SEQ ID NO: 58 |
| AAV42.13 | 424 | US20030138772 SEQ ID NO: 86 |
| AAVrh.24 (AAV42.13) | 425 | US20030138772 SEQ ID NO: 31 |
| AAV42.15 | 426 | US20030138772 SEQ ID NO: 84 |
| AAVrh.25 (AAV42.15) | 427 | US20030138772 SEQ ID NO: 28 |
| AAVrh.2R | 428 | US20150159173 |
| AAVrh.31 (AAV223.1) | 429 | US20030138772 SEQ ID NO: 48 |
| AAVC1 | 430 | US20030138772 SEQ ID NO: 60 |
| AAVrh.32 (AAVC1) | 431 | US20030138772 SEQ ID NO: 19 |
| AAVrh.32/33 | 432 | US20150159173 SEQ ID NO: 2 |
| AAVrh.33 (AAVC3) | 433 | US20030138772 SEQ ID NO: 20 |
| AAVC5 | 434 | US20030138772 SEQ ID NO: 62 |
| AAVrh.34 (AAVC5) | 435 | US20030138772 SEQ ID NO: 21 |
| AAVF1 | 436 | US20030138772 SEQ ID NO: 109 |
| AAVrh.35 (AAVF1) | 437 | US20030138772 SEQ ID NO: 22 |
| AAVF3 | 438 | US20030138772 SEQ ID NO: 111 |
| AAVrh.36 (AAVF3) | 439 | US20030138772 SEQ ID NO: 23 |
| AAVrh.37 | 440 | US20030138772 SEQ ID NO: 24 |
| AAVrh.37 | 441 | US20150159173 SEQ ID NO: 40 |
| AAVrh.37 | 442 | US20150315612 SEQ ID NO: 229 |
| AAVrh.37R2 | 443 | US20150159173 |
| AAVrh.38 (AAVLG-4) | 444 | US20150315612 SEQ ID NO: 7 |
| AAVrh.38 (AAVLG-4) | 445 | US20150315612 SEQ ID NO: 86 |
| AAVrh.39 | 446 | US20150159173 SEQ ID NO: 20, US20150315612 SEQ |
| | | ID NO: 13 |
| AAVrh.39 | 447 | US20150159173 SEQ ID NO: 3, US20150159173 SEQ |
| | | ID NO: 36, US20150315612 SEQ ID NO: 89 |
| AAVrh.40 | 448 | US20150315612 SEQ ID NO: 92 |
| AAVrh.40 (AAVLG-10) | 449 | US20150315612 SEQ ID No: 14 |
| AAVrh.43 (AAVN721-8) | 450 | US20150315612 SEQ ID NO: 43, US20150159173 SEQ |
| | | ID NO: 21 |
| AAVrh.43 (AAVN721-8) | 451 | US20150315612 SEQ ID NO: 163, US20150159173 |
| | | SEQ ID NO: 37 |
| AAVrh.44 | 452 | US20150315612 SEQ ID NO: 34 |
| AAVrh.44 | 453 | US20150315612 SEQ ID NO: 111 |
| AAVrh.45 | 454 | US20150315612 SEQ ID NO: 41 |
| AAVrh.45 | 455 | US20150315612 SEQ ID NO: 109 |
| AAVrh.46 | 456 | US20150159173 SEQ ID NO: 22, US20150315612 SEQ |
| | | ID NO: 19 |
| AAVrh.46 | 457 | US20150159173 SEQ ID NO: 4, US20150315612 SEQ |
| | | ID NO: 101 |
| AAVrh.47 | 458 | US20150315612 SEQ ID NO: 38 |
| AAVrh.47 | 459 | US20150315612 SEQ ID NO: 118 |
| AAVrh.48 | 460 | US20150159173 SEQ ID NO: 44, US20150315612 SEQ |
| | | ID NO: 115 |
| AAVrh.48.1 | 461 | US20150159173 |
| AAVrh.48.1.2 | 462 | US20150159173 |
| AAVrh.48.2 | 463 | US20150159173 |
| AAVrh.48 (AAV1-7) | 464 | US20150315612 SEQ ID NO: 32 |
| AAVrh.49 (AAV1-8) | 465 | US20150315612 SEQ ID NO: 25 |
| AAVrh.49 (AAV1-8) | 466 | US20150315612 SEQ ID NO: 103 |
| AAVrh.50 (AAV2-4) | 467 | US20150315612 SEQ ID NO: 23 |
| AAVrh.50 (AAV2-4) | 468 | US20150315612 SEQ ID NO: 108 |
| AAVrh.51 (AAV2-5) | 469 | US20150315612 SEQ ID No: 22 |
| AAVrh.51 (AAV2-5) | 470 | US20150315612 SEQ ID NO: 104 |
| AAVrh.52 (AAV3-9) | 471 | US20150315612 SEQ ID NO: 18 |
| AAVrh.52 (AAV3-9) | 472 | US20150315612 SEQ ID NO: 96 |
| AAVrh.53 | 473 | US20150315612 SEQ ID NO: 97 |
| AAVrh.53 (AAV3-11) | 474 | US20150315612 SEQ ID NO: 17 |
| AAVrh.53 (AAV3-11) | 475 | US20150315612 SEQ ID NO: 186 |
| AAVrh.54 | 476 | US20150315612 SEQ ID NO: 40 |
| AAVrh.54 | 477 | US20150159173 SEQ ID NO: 49, US20150315612 SEQ |
| | | ID NO: 116 |
| AAVrh.55 | 478 | US20150315612 SEQ ID NO: 37 |
| AAVrh.55 (AAV4-19) | 479 | US20150315612 SEQ ID NO: 117 |
| AAVrh.56 | 480 | US20150315612 SEQ ID NO: 54 |
| AAVrh.56 | 481 | US20150315612 SEQ ID NO: 152 |
| AAVrh.57 | 482 | US20150315612 SEQ ID NO: 26 |
| AAVrh.57 | 483 | US20150315612 SEQ ID NO: 105 |
| AAVrh.58 | 484 | US20150315612 SEQ ID NO: 27 |
| AAVrh.58 | 485 | US20150159173 SEQ ID NO: 48, US20150315612 SEQ |
| | | ID NO: 106 |
| AAVrh.58 | 486 | US20150315612 SEQ ID NO: 232 |
| AAVrh.59 | 487 | US20150315612 SEQ ID NO: 42 |
| AAVrh.59 | 488 | US20150315612 SEQ ID NO: 110 |
| AAVrh.60 | 489 | US20150315612 SEQ ID NO: 31 |
| AAVrh.60 | 490 | US20150315612 SEQ ID NO: 120 |
| AAVrh.61 | 491 | US20150315612 SEQ ID NO: 107 |
| AAVrh.61 (AAV2-3) | 492 | US20150315612 SEQ ID NO: 21 |
| AAVrh.62 (AAV2-15) | 493 | US20150315612 SEQ ID No: 33 |
| AAVrh.62 (AAV2-15) | 494 | US20150315612 SEQ ID NO: 114 |
| AAVrh.64 | 495 | US20150315612 SEQ ID No: 15 |
| AAVrh.64 | 496 | US20150159173 SEQ ID NO: 43, US20150315612 SEQ |
| | | ID NO: 99 |
| AAVrh.64 | 497 | US20150315612 SEQ ID NO: 233 |
| AAVRh.64R1 | 498 | US20150159173 |
| AAVRh.64R2 | 499 | US20150159173 |
| AAVrh.65 | 500 | US20150315612 SEQ ID NO: 35 |
| AAVrh.65 | 501 | US20150315612 SEQ ID NO: 112 |
| AAVrh.67 | 502 | US20150315612 SEQ ID NO: 36 |
| AAVrh.67 | 503 | US20150315612 SEQ ID NO: 230 |
| AAVrh.67 | 504 | US20150159173 SEQ ID NO: 47, US20150315612 SEQ |
| | | ID NO: 113 |
| AAVrh.68 | 505 | US20150315612 SEQ ID NO: 16 |
| AAVrh.68 | 506 | US20150315612 SEQ ID NO: 100 |
| AAVrh.69 | 507 | US20150315612 SEQ ID NO: 39 |
| AAVrh.69 | 508 | US20150315612 SEQ ID NO: 119 |
| AAVrh.70 | 509 | US20150315612 SEQ ID NO: 20 |
| AAVrh.70 | 510 | US20150315612 SEQ ID NO: 98 |
| AAVrh.71 | 511 | US20150315612 SEQ ID NO: 162 |
| AAVrh.72 | 512 | US20150315612 SEQ ID NO: 9 |
| AAVrh.73 | 513 | US20150159173 SEQ ID NO: 5 |
| AAVrh.74 | 514 | US20150159173 SEQ ID NO: 6 |
| AAVrh.8 | 515 | US20150159173 SEQ ID NO: 41 |
| AAVrh.8 | 516 | US20150315612 SEQ ID NO: 235 |
| AAVrh.8R | 517 | US20150159173, WO2015168666 SEQ ID NO: 9 |
| AAVrh.8R A586R mutant | 518 | WO2015168666 SEQ ID NO: 10 |
| AAVrh.8R R533A mutant | 519 | WO2015168666 SEQ ID NO: 11 |
| BAAV (bovine AAV) | 520 | U.S. Pat. No. 9,193,769 SEQ ID NO: 8 |
| BAAV (bovine AAV) | 521 | U.S. Pat. No. 9,193,769 SEQ ID NO: 10 |
| BAAV (bovine AAV) | 522 | U.S. Pat. No. 9,193,769 SEQ ID NO: 4 |
| BAAV (bovine AAV) | 523 | U.S. Pat. No. 9,193,769 SEQ ID NO: 2 |
| BAAV (bovine AAV) | 524 | U.S. Pat. No. 9,193,769 SEQ ID NO: 6 |
| BAAV (bovine AAV) | 525 | U.S. Pat. No. 9,193,769 SEQ ID NO: 1 |
| BAAV (bovine AAV) | 526 | U.S. Pat. No. 9,193,769 SEQ ID NO: 5 |
| BAAV (bovine AAV) | 527 | U.S. Pat. No. 9,193,769 SEQ ID NO: 3 |
| BAAV (bovine AAV) | 528 | U.S. Pat. No. 9,193,769 SEQ ID NO: 11 |
| BAAV (bovine AAV) | 529 | U.S. Pat. No. 7,427,396 SEQ ID NO: 5 |
| BAAV (bovine AAV) | 530 | U.S. Pat. No. 7,427,396 SEQ ID NO: 6 |
| BAAV (bovine AAV) | 531 | U.S. Pat. No. 9,193,769 SEQ ID NO: 7 |
| BAAV (bovine AAV) | 532 | U.S. Pat. No. 9,193,769 SEQ ID NO: 9 |
| BNP61 AAV | 533 | US20150238550 SEQ ID NO: 1 |
| BNP61 AAV | 534 | US20150238550 SEQ ID NO: 2 |
| BNP62 AAV | 535 | US20150238550 SEQ ID NO: 3 |
| BNP63 AAV | 536 | US20150238550 SEQ ID NO: 4 |
| caprine AAV | 537 | U.S. Pat. No. 7,427,396 SEQ ID NO: 3 |
| caprine AAV | 538 | U.S. Pat. No. 7,427,396 SEQ ID NO: 4 |
| true type AAV (ttAAV) | 539 | WO2015121501 SEQ ID NO: 2 |
| AAAV (Avian AAV) | 540 | U.S. Pat. No. 9,238,800 SEQ ID NO: 12 |
| AAAV (Avian AAV) | 541 | U.S. Pat. No. 9,238,800 SEQ ID NO: 2 |
| AAAV (Avian AAV) | 542 | U.S. Pat. No. 9,238,800 SEQ ID NO: 6 |
| AAAV (Avian AAV) | 543 | U.S. Pat. No. 9,238,800 SEQ ID NO: 4 |
| AAAV (Avian AAV) | 544 | U.S. Pat. No. 9,238,800 SEQ ID NO: 8 |
| AAAV (Avian AAV) | 545 | U.S. Pat. No. 9,238,800 SEQ ID NO: 14 |
| AAAV (Avian AAV) | 546 | U.S. Pat. No. 9,238,800 SEQ ID NO: 10 |
| AAAV (Avian AAV) | 547 | U.S. Pat. No. 9,238,800 SEQ ID NO: 15 |
| AAAV (Avian AAV) | 548 | U.S. Pat. No. 9,238,800 SEQ ID NO: 5 |
| AAAV (Avian AAV) | 549 | U.S. Pat. No. 9,238,800 SEQ ID NO: 9 |
| AAAV (Avian AAV) | 550 | U.S. Pat. No. 9,238,800 SEQ ID NO: 3 |
| AAAV (Avian AAV) | 551 | U.S. Pat. No. 9,238,800 SEQ ID NO: 7 |
| AAAV (Avian AAV) | 552 | U.S. Pat. No. 9,238,800 SEQ ID NO: 11 |
| AAAV (Avian AAV) | 553 | U.S. Pat. No. 9,238,800 SEQ ID NO: 13 |
| AAAV (Avian AAV) | 554 | U.S. Pat. No. 9,238,800 SEQ ID NO: 1 |
| AAV Shuffle 100-1 | 555 | US20160017295 SEQ ID NO: 23 |
| AAV Shuffle 100-1 | 556 | US20160017295 SEQ ID NO: 11 |
| AAV Shuffle 100-2 | 557 | US20160017295 SEQ ID NO: 37 |
| AAV Shuffle 100-2 | 558 | US20160017295 SEQ ID NO: 29 |
| AAV Shuffle 100-3 | 559 | US20160017295 SEQ ID NO: 24 |
| AAV Shuffle 100-3 | 560 | US20160017295 SEQ ID NO: 12 |
| AAV Shuffle 100-7 | 561 | US20160017295 SEQ ID NO: 25 |
| AAV Shuffle 100-7 | 562 | US20160017295 SEQ ID NO: 13 |
| AAV Shuffle 10-2 | 563 | US20160017295 SEQ ID NO: 34 |
| AAV Shuffle 10-2 | 564 | US20160017295 SEQ ID NO: 26 |
| AAV Shuffle 10-6 | 565 | US20160017295 SEQ ID NO: 35 |
| AAV Shuffle 10-6 | 566 | US20160017295 SEQ ID NO: 27 |
| AAV Shuffle 10-8 | 567 | US20160017295 SEQ ID NO: 36 |
| AAV Shuffle 10-8 | 568 | US20160017295 SEQ ID NO: 28 |
| AAV SM 100-10 | 569 | US20160017295 SEQ ID NO: 41 |
| AAV SM 100-10 | 570 | US20160017295 SEQ ID NO: 33 |
| AAV SM 100-3 | 571 | US20160017295 SEQ ID NO: 40 |
| AAV SM 100-3 | 572 | US20160017295 SEQ ID NO: 32 |
| AAV SM 10-1 | 573 | US20160017295 SEQ ID NO: 38 |
| AAV SM 10-1 | 574 | US20160017295 SEQ ID NO: 30 |
| AAV SM 10-2 | 575 | US20160017295 SEQ ID NO: 10 |
| AAV SM 10-2 | 576 | US20160017295 SEQ ID NO: 22 |
| AAV SM 10-8 | 577 | US20160017295 SEQ ID NO: 39 |
| AAV SM 10-8 | 578 | US20160017295 SEQ ID NO: 31 |
| AAVF1/HSC1 | 579 | WO2016049230 SEQ ID NO: 20 |
| AAVF2/HSC2 | 580 | WO2016049230 SEQ ID NO: 21 |
| AAVF3/HSC3 | 581 | WO2016049230 SEQ ID NO: 22 |
| AAVF4/HSC4 | 582 | WO2016049230 SEQ ID NO: 23 |
| AAVF5/HSC5 | 583 | WO2016049230 SEQ ID NO: 25 |
| AAVF6/HSC6 | 584 | WO2016049230 SEQ ID NO: 24 |
| AAVF7/HSC7 | 585 | WO2016049230 SEQ ID NO: 27 |
| AAVF8/HSC8 | 586 | WO2016049230 SEQ ID NO: 28 |
| AAVF9/HSC9 | 587 | WO2016049230 SEQ ID NO: 29 |
| AAVF11/HSC11 | 588 | WO2016049230 SEQ ID NO: 26 |
| AAVF12/HSC12 | 589 | WO2016049230 SEQ ID NO: 30 |
| AAVF13/HSC13 | 590 | WO2016049230 SEQ ID NO: 31 |
| AAVF14/HSC14 | 591 | WO2016049230 SEQ ID NO: 32 |
| AAVF15/HSC15 | 592 | WO2016049230 SEQ ID NO: 33 |
| AAVF16/HSC16 | 593 | WO2016049230 SEQ ID NO: 34 |
| AAVF17/HSC17 | 594 | WO2016049230 SEQ ID NO: 35 |
| AAVF1/HSC1 | 595 | WO2016049230 SEQ ID NO: 2 |
| AAVF2/HSC2 | 596 | WO2016049230 SEQ ID NO: 3 |
| AAVF3/HSC3 | 597 | WO2016049230 SEQ ID NO: 5 |
| AAVF4/HSC4 | 598 | WO2016049230 SEQ ID NO: 6 |
| AAVF5/HSC5 | 599 | WO2016049230 SEQ ID NO: 11 |
| AAVF6/HSC6 | 600 | WO2016049230 SEQ ID NO: 7 |
| AAVF7/HSC7 | 601 | WO2016049230 SEQ ID NO: 8 |
| AAVF8/HSC8 | 602 | WO2016049230 SEQ ID NO: 9 |
| AAVF9/HSC9 | 603 | WO2016049230 SEQ ID NO: 10 |
| AAVF11/HSC11 | 604 | WO2016049230 SEQ ID NO: 4 |
| AAVF12/HSC12 | 605 | WO2016049230 SEQ ID NO: 12 |
| AAVF13/HSC13 | 606 | WO2016049230 SEQ ID NO: 14 |
| AAVF14/HSC14 | 607 | WO2016049230 SEQ ID NO: 15 |
| AAVF15/HSC15 | 608 | WO2016049230 SEQ ID NO: 16 |
| AAVF16/HSC16 | 609 | WO2016049230 SEQ ID NO: 17 |
| AAVF17/HSC17 | 610 | WO2016049230 SEQ ID NO: 13 |
| AAV CBr-E1 | 611 | U.S. Pat. No. 8,734,809 SEQ ID NO: 13 |
| AAV CBr-E2 | 612 | U.S. Pat. No. 8,734,809 SEQ ID NO: 14 |
| AAV CBr-E3 | 613 | U.S. Pat. No. 8,734,809 SEQ ID NO: 15 |
| AAV CBr-E4 | 614 | U.S. Pat. No. 8,734,809 SEQ ID NO: 16 |
| AAV CBr-E5 | 615 | U.S. Pat. No. 8,734,809 SEQ ID NO: 17 |
| AAV CBr-e5 | 616 | U.S. Pat. No. 8,734,809 SEQ ID NO: 18 |
| AAV CBr-E6 | 617 | U.S. Pat. No. 8,734,809 SEQ ID NO: 19 |
| AAV CBr-E7 | 618 | U.S. Pat. No. 8,734,809 SEQ ID NO: 20 |
| AAV CBr-E8 | 619 | U.S. Pat. No. 8,734,809 SEQ ID NO: 21 |
| AAV CLv-D1 | 620 | U.S. Pat. No. 8,734,809 SEQ ID NO: 22 |
| AAV CLv-D2 | 621 | U.S. Pat. No. 8,734,809 SEQ ID NO: 23 |
| AAV CLv-D3 | 622 | U.S. Pat. No. 8,734,809 SEQ ID NO: 24 |
| AAV CLv-D4 | 623 | U.S. Pat. No. 8,734,809 SEQ ID NO: 25 |
| AAV CLv-D5 | 624 | U.S. Pat. No. 8,734,809 SEQ ID NO: 26 |
| AAV CLv-D6 | 625 | U.S. Pat. No. 8,734,809 SEQ ID NO: 27 |
| AAV CLv-D7 | 626 | U.S. Pat. No. 8,734,809 SEQ ID NO: 28 |
| AAV CLv-D8 | 627 | U.S. Pat. No. 8,734,809 SEQ ID NO: 29 |
| AAV CLv-E1 | 628 | U.S. Pat. No. 8,734,809 SEQ ID NO: 13 |
| AAV CLv-R1 | 629 | U.S. Pat. No. 8,734,809 SEQ ID NO: 30 |
| AAV CLv-R2 | 630 | U.S. Pat. No. 8,734,809 SEQ ID NO: 31 |
| AAV CLv-R3 | 631 | U.S. Pat. No. 8,734,809 SEQ ID NO: 32 |
| AAV CLv-R4 | 632 | U.S. Pat. No. 8,734,809 SEQ ID NO: 33 |
| AAV CLv-R5 | 633 | U.S. Pat. No. 8,734,809 SEQ ID NO: 34 |
| AAV CLv-R6 | 634 | U.S. Pat. No. 8,734,809 SEQ ID NO: 35 |
| AAV CLv-R7 | 635 | U.S. Pat. No. 8,734,809 SEQ ID NO: 36 |
| AAV CLv-R8 | 636 | U.S. Pat. No. 8,734,809 SEQ ID NO: 37 |
| AAV CLv-R9 | 637 | U.S. Pat. No. 8,734,809 SEQ ID NO: 38 |
| AAV CLg-F1 | 638 | U.S. Pat. No. 8,734,809 SEQ ID NO: 39 |
| AAV CLg-F2 | 639 | U.S. Pat. No. 8,734,809 SEQ ID NO: 40 |
| AAV CLg-F3 | 640 | U.S. Pat. No. 8,734,809 SEQ ID NO: 41 |
| AAV CLg-F4 | 641 | U.S. Pat. No. 8,734,809 SEQ ID NO: 42 |
| AAV CLg-F5 | 642 | U.S. Pat. No. 8,734,809 SEQ ID NO: 43 |
| AAV CLg-F6 | 643 | U.S. Pat. No. 8,734,809 SEQ ID NO: 43 |
| AAV CLg-F7 | 644 | U.S. Pat. No. 8,734,809 SEQ ID NO: 44 |
| AAV CLg-F8 | 645 | U.S. Pat. No. 8,734,809 SEQ ID NO: 43 |
| AAV CSp-1 | 646 | U.S. Pat. No. 8,734,809 SEQ ID NO: 45 |
| AAV CSp-10 | 647 | U.S. Pat. No. 8,734,809 SEQ ID NO: 46 |
| AAV CSp-11 | 648 | U.S. Pat. No. 8,734,809 SEQ ID NO: 47 |
| AAV CSp-2 | 649 | U.S. Pat. No. 8,734,809 SEQ ID NO: 48 |
| AAV CSp-3 | 650 | U.S. Pat. No. 8,734,809 SEQ ID NO: 49 |
| AAV CSp-4 | 651 | U.S. Pat. No. 8,734,809 SEQ ID NO: 50 |
| AAV CSp-6 | 652 | U.S. Pat. No. 8,734,809 SEQ ID NO: 51 |
| AAV CSp-7 | 653 | U.S. Pat. No. 8,734,809 SEQ ID NO: 52 |
| AAV CSp-8 | 654 | U.S. Pat. No. 8,734,809 SEQ ID NO: 53 |
| AAV CSp-9 | 655 | U.S. Pat. No. 8,734,809 SEQ ID NO: 54 |
| AAV CHt-2 | 656 | U.S. Pat. No. 8,734,809 SEQ ID NO: 55 |
| AAV CHt-3 | 657 | U.S. Pat. No. 8,734,809 SEQ ID NO: 56 |
| AAV CKd-1 | 658 | U.S. Pat. No. 8,734,809 SEQ ID NO: 57 |
| AAV CKd-10 | 659 | U.S. Pat. No. 8,734,809 SEQ ID NO: 58 |
| AAV CKd-2 | 660 | U.S. Pat. No. 8,734,809 SEQ ID NO: 59 |
| AAV CKd-3 | 661 | U.S. Pat. No. 8,734,809 SEQ ID NO: 60 |
| AAV CKd-4 | 662 | U.S. Pat. No. 8,734,809 SEQ ID NO: 61 |
| AAV CKd-6 | 663 | U.S. Pat. No. 8,734,809 SEQ ID NO: 62 |
| AAV CKd-7 | 664 | U.S. Pat. No. 8,734,809 SEQ ID NO: 63 |
| AAV CKd-8 | 665 | U.S. Pat. No. 8,734,809 SEQ ID NO: 64 |
| AAV CLv-1 | 666 | U.S. Pat. No. 8,734,809 SEQ ID NO: 65 |
| AAV CLv-12 | 667 | U.S. Pat. No. 8,734,809 SEQ ID NO: 66 |
| AAV CLv-13 | 668 | U.S. Pat. No. 8,734,809 SEQ ID NO: 67 |
| AAV CLv-2 | 669 | U.S. Pat. No. 8,734,809 SEQ ID NO: 68 |
| AAV CLv-3 | 670 | U.S. Pat. No. 8,734,809 SEQ ID NO: 69 |
| AAV CLv-4 | 671 | U.S. Pat. No. 8,734,809 SEQ ID NO: 70 |
| AAV CLv-6 | 672 | U.S. Pat. No. 8,734,809 SEQ ID NO: 71 |
| AAV CLv-8 | 673 | U.S. Pat. No. 8,734,809 SEQ ID NO: 72 |
| AAV CKd-B1 | 674 | U.S. Pat. No. 8,734,809 SEQ ID NO: 73 |
| AAV CKd-B2 | 675 | U.S. Pat. No. 8,734,809 SEQ ID NO: 74 |
| AAV CKd-B3 | 676 | U.S. Pat. No. 8,734,809 SEQ ID NO: 75 |
| AAV CKd-B4 | 677 | U.S. Pat. No. 8,734,809 SEQ ID NO: 76 |
| AAV CKd-B5 | 678 | U.S. Pat. No. 8,734,809 SEQ ID NO: 77 |
| AAV CKd-B6 | 679 | U.S. Pat. No. 8,734,809 SEQ ID NO: 78 |
| AAV CKd-B7 | 680 | U.S. Pat. No. 8,734,809 SEQ ID NO: 79 |
| AAV CKd-B8 | 681 | U.S. Pat. No. 8,734,809 SEQ ID NO: 80 |
| AAV CKd-H1 | 682 | U.S. Pat. No. 8,734,809 SEQ ID NO: 81 |
| AAV CKd-H2 | 683 | U.S. Pat. No. 8,734,809 SEQ ID NO: 82 |
| AAV CKd-H3 | 684 | U.S. Pat. No. 8,734,809 SEQ ID NO: 83 |
| AAV CKd-H4 | 685 | U.S. Pat. No. 8,734,809 SEQ ID NO: 84 |
| AAV CKd-H5 | 686 | U.S. Pat. No. 8,734,809 SEQ ID NO: 85 |
| AAV CKd-H6 | 687 | U.S. Pat. No. 8,734,809 SEQ ID NO: 77 |
| AAV CHt-1 | 688 | U.S. Pat. No. 8,734,809 SEQ ID NO: 86 |
| AAV CLv1-1 | 689 | U.S. Pat. No. 8,734,809 SEQ ID NO: 171 |
| AAV CLv1-2 | 690 | U.S. Pat. No. 8,734,809 SEQ ID NO: 172 |
| AAV CLv1-3 | 691 | U.S. Pat. No. 8,734,809 SEQ ID NO: 173 |
| AAV CLv1-4 | 692 | U.S. Pat. No. 8,734,809 SEQ ID NO: 174 |
| AAV Clv1-7 | 693 | U.S. Pat. No. 8,734,809 SEQ ID NO: 175 |
| AAV Clv1-8 | 694 | U.S. Pat. No. 8,734,809 SEQ ID NO: 176 |
| AAV Clv1-9 | 695 | U.S. Pat. No. 8,734,809 SEQ ID NO: 177 |
| AAV Clv1-10 | 696 | U.S. Pat. No. 8,734,809 SEQ ID NO: 178 |
| AAV.VR-355 | 697 | U.S. Pat. No. 8,734,809 SEQ ID NO: 181 |
| AAV.hu.48R3 | 698 | U.S. Pat. No. 8,734,809 SEQ ID NO: 183 |
| AAV CBr-E1 | 699 | U.S. Pat. No. 8,734,809 SEQ ID NO: 87 |
| AAV CBr-E2 | 700 | U.S. Pat. No. 8,734,809 SEQ ID NO: 88 |
| AAV CBr-E3 | 701 | U.S. Pat. No. 8,734,809 SEQ ID NO: 89 |
| AAV CBr-E4 | 702 | U.S. Pat. No. 8,734,809 SEQ ID NO: 90 |
| AAV CBr-E5 | 703 | U.S. Pat. No. 8,734,809 SEQ ID NO: 91 |
| AAV CBr-e5 | 704 | U.S. Pat. No. 8,734,809 SEQ ID NO: 92 |
| AAV CBr-E6 | 705 | U.S. Pat. No. 8,734,809 SEQ ID NO: 93 |
| AAV CBr-E7 | 706 | U.S. Pat. No. 8,734,809 SEQ ID NO: 94 |
| AAV CBr-E8 | 707 | U.S. Pat. No. 8,734,809 SEQ ID NO: 95 |
| AAV CLv-D1 | 708 | U.S. Pat. No. 8,734,809 SEQ ID NO: 96 |
| AAV CLv-D2 | 709 | U.S. Pat. No. 8,734,809 SEQ ID NO: 97 |
| AAV CLv-D3 | 710 | U.S. Pat. No. 8,734,809 SEQ ID NO: 98 |
| AAV CLv-D4 | 711 | U.S. Pat. No. 8,734,809 SEQ ID NO: 99 |
| AAV CLv-D5 | 712 | U.S. Pat. No. 8,734,809 SEQ ID NO: 100 |
| AAV CLv-D6 | 713 | U.S. Pat. No. 8,734,809 SEQ ID NO: 101 |
| AAV CLv-D7 | 714 | U.S. Pat. No. 8,734,809 SEQ ID NO: 102 |
| AAV CLv-D8 | 715 | U.S. Pat. No. 8,734,809 SEQ ID NO: 103 |
| AAV CLv-E1 | 716 | U.S. Pat. No. 8,734,809 SEQ ID NO: 87 |
| AAV CLv-R1 | 717 | U.S. Pat. No. 8,734,809 SEQ ID NO: 104 |
| AAV CLv-R2 | 718 | U.S. Pat. No. 8,734,809 SEQ ID NO: 105 |
| AAV CLv-R3 | 719 | U.S. Pat. No. 8,734,809 SEQ ID NO: 106 |
| AAV CLv-R4 | 720 | U.S. Pat. No. 8,734,809 SEQ ID NO: 107 |
| AAV CLv-R5 | 721 | U.S. Pat. No. 8,734,809 SEQ ID NO: 108 |
| AAV CLv-R6 | 722 | U.S. Pat. No. 8,734,809 SEQ ID NO: 109 |
| AAV CLv-R7 | 723 | U.S. Pat. No. 8,734,809 SEQ ID NO: 110 |
| AAV CLv-R8 | 724 | U.S. Pat. No. 8,734,809 SEQ ID NO: 111 |
| AAV CLv-R9 | 725 | U.S. Pat. No. 8,734,809 SEQ ID NO: 112 |
| AAV CLg-F1 | 726 | U.S. Pat. No. 8,734,809 SEQ ID NO: 113 |
| AAV CLg-F2 | 727 | U.S. Pat. No. 8,734,809 SEQ ID NO: 114 |
| AAV CLg-F3 | 728 | U.S. Pat. No. 8,734,809 SEQ ID NO: 115 |
| AAV CLg-F4 | 729 | U.S. Pat. No. 8,734,809 SEQ ID NO: 116 |
| AAV CLg-F5 | 730 | U.S. Pat. No. 8,734,809 SEQ ID NO: 117 |
| AAV CLg-F6 | 731 | U.S. Pat. No. 8,734,809 SEQ ID NO: 117 |
| AAV CLg-F7 | 732 | U.S. Pat. No. 8,734,809 SEQ ID NO: 118 |
| AAV CLg-F8 | 733 | U.S. Pat. No. 8,734,809 SEQ ID NO: 117 |
| AAV CSp-1 | 734 | U.S. Pat. No. 8,734,809 SEQ ID NO: 119 |
| AAV CSp-10 | 735 | U.S. Pat. No. 8,734,809 SEQ ID NO: 120 |
| AAV CSp-11 | 736 | U.S. Pat. No. 8,734,809 SEQ ID NO: 121 |
| AAV CSp-2 | 737 | U.S. Pat. No. 8,734,809 SEQ ID NO: 122 |
| AAV CSp-3 | 738 | U.S. Pat. No. 8,734,809 SEQ ID NO: 123 |
| AAV CSp-4 | 739 | U.S. Pat. No. 8,734,809 SEQ ID NO: 124 |
| AAV CSp-6 | 740 | U.S. Pat. No. 8,734,809 SEQ ID NO: 125 |
| AAV CSp-7 | 741 | U.S. Pat. No. 8,734,809 SEQ ID NO: 126 |
| AAV CSp-8 | 742 | U.S. Pat. No. 8,734,809 SEQ ID NO: 127 |
| AAV CSp-9 | 743 | U.S. Pat. No. 8,734,809 SEQ ID NO: 128 |
| AAV CHt-2 | 744 | U.S. Pat. No. 8,734,809 SEQ ID NO: 129 |
| AAV CHt-3 | 745 | U.S. Pat. No. 8,734,809 SEQ ID NO: 130 |
| AAV CKd-1 | 746 | U.S. Pat. No. 8,734,809 SEQ ID NO: 131 |
| AAV CKd-10 | 747 | U.S. Pat. No. 8,734,809 SEQ ID NO: 132 |
| AAV CKd-2 | 748 | U.S. Pat. No. 8,734,809 SEQ ID NO: 133 |
| AAV CKd-3 | 749 | U.S. Pat. No. 8,734,809 SEQ ID NO: 134 |
| AAV CKd-4 | 750 | U.S. Pat. No. 8,734,809 SEQ ID NO: 135 |
| AAV CKd-6 | 751 | U.S. Pat. No. 8,734,809 SEQ ID NO: 136 |
| AAV CKd-7 | 752 | U.S. Pat. No. 8,734,809 SEQ ID NO: 137 |
| AAV CKd-8 | 753 | U.S. Pat. No. 8,734,809 SEQ ID NO: 138 |
| AAV CLv-1 | 754 | U.S. Pat. No. 8,734,809 SEQ ID NO: 139 |
| AAV CLv-12 | 755 | U.S. Pat. No. 8,734,809 SEQ ID NO: 140 |
| AAV CLv-13 | 756 | U.S. Pat. No. 8,734,809 SEQ ID NO: 141 |
| AAV CLv-2 | 757 | U.S. Pat. No. 8,734,809 SEQ ID NO: 142 |
| AAV CLv-3 | 758 | U.S. Pat. No. 8,734,809 SEQ ID NO: 143 |
| AAV CLv-4 | 759 | U.S. Pat. No. 8,734,809 SEQ ID NO: 144 |
| AAV CLv-6 | 760 | U.S. Pat. No. 8,734,809 SEQ ID NO: 145 |
| AAV CLv-8 | 761 | U.S. Pat. No. 8,734,809 SEQ ID NO: 146 |
| AAV CKd-B1 | 762 | U.S. Pat. No. 8,734,809 SEQ ID NO: 147 |
| AAV CKd-B2 | 763 | U.S. Pat. No. 8,734,809 SEQ ID NO: 148 |
| AAV CKd-B3 | 764 | U.S. Pat. No. 8,734,809 SEQ ID NO: 149 |
| AAV CKd-B4 | 765 | U.S. Pat. No. 8,734,809 SEQ ID NO: 150 |
| AAV CKd-B5 | 766 | U.S. Pat. No. 8,734,809 SEQ ID NO: 151 |
| AAV CKd-B6 | 767 | U.S. Pat. No. 8,734,809 SEQ ID NO: 152 |
| AAV CKd-B7 | 768 | U.S. Pat. No. 8,734,809 SEQ ID NO: 153 |
| AAV CKd-B8 | 769 | U.S. Pat. No. 8,734,809 SEQ ID NO: 154 |
| AAV CKd-H1 | 770 | U.S. Pat. No. 8,734,809 SEQ ID NO: 155 |
| AAV CKd-H2 | 771 | U.S. Pat. No. 8,734,809 SEQ ID NO: 156 |
| AAV CKd-H3 | 772 | U.S. Pat. No. 8,734,809 SEQ ID NO: 157 |
| AAV CKd-H4 | 773 | U.S. Pat. No. 8,734,809 SEQ ID NO: 158 |
| AAV CKd-H5 | 774 | U.S. Pat. No. 8,734,809 SEQ ID NO: 159 |
| AAV CKd-H6 | 775 | U.S. Pat. No. 8,734,809 SEQ ID NO: 151 |
| AAV CHt-1 | 776 | U.S. Pat. No. 8,734,809 SEQ ID NO: 160 |
| AAV CHt-P2 | 777 | WO2016065001 SEQ ID NO: 1 |
| AAV CHt-P5 | 778 | WO2016065001 SEQ ID NO: 2 |
| AAV CHt-P9 | 779 | WO2016065001 SEQ ID NO: 3 |
| AAV CBr-7.1 | 780 | WO2016065001 SEQ ID NO: 4 |
| AAV CBr-7.2 | 781 | WO2016065001 SEQ ID NO: 5 |
| AAV CBr-7.3 | 782 | WO2016065001 SEQ ID NO: 6 |
| AAV CBr-7.4 | 783 | WO2016065001 SEQ ID NO: 7 |
| AAV CBr-7.5 | 784 | WO2016065001 SEQ ID NO: 8 |
| AAV CBr-7.7 | 785 | WO2016065001 SEQ ID NO: 9 |
| AAV CBr-7.8 | 786 | WO2016065001 SEQ ID NO: 10 |
| AAV CBr-7.10 | 787 | WO2016065001 SEQ ID NO: 11 |
| AAV CKd-N3 | 788 | WO2016065001 SEQ ID NO: 12 |
| AAV CKd-N4 | 789 | WO2016065001 SEQ ID NO: 13 |
| AAV CKd-N9 | 790 | WO2016065001 SEQ ID NO: 14 |
| AAV CLv-L4 | 791 | WO2016065001 SEQ ID NO: 15 |
| AAV CLv-L5 | 792 | WO2016065001 SEQ ID NO: 16 |
| AAV CLv-L6 | 793 | WO2016065001 SEQ ID NO: 17 |
| AAV CLv-K1 | 794 | WO2016065001 SEQ ID NO: 18 |
| AAV CLv-K3 | 795 | WO2016065001 SEQ ID NO: 19 |
| AAV CLv-K6 | 796 | WO2016065001 SEQ ID NO: 20 |
| AAV CLv-M1 | 797 | WO2016065001 SEQ ID NO: 21 |
| AAV CLV-M11 | 798 | WO2016065001 SEQ ID NO: 22 |
| AAV CLv-M2 | 799 | WO2016065001 SEQ ID NO: 23 |
| AAV CLv-M5 | 800 | WO2016065001 SEQ ID NO: 24 |
| AAV CLv-M6 | 801 | WO2016065001 SEQ ID NO: 25 |
| AAV CLv-M7 | 802 | WO2016065001 SEQ ID NO: 26 |
| AAV CLv-M8 | 803 | WO2016065001 SEQ ID NO: 27 |
| AAV CLv-M9 | 804 | WO2016065001 SEQ ID NO: 28 |
| AAV CHt-P1 | 805 | WO2016065001 SEQ ID NO: 29 |
| AAV CHt-P6 | 806 | WO2016065001 SEQ ID NO: 30 |
| AAV CHt-P8 | 807 | WO2016065001 SEQ ID NO: 31 |
| AAV CHt-6.1 | 808 | WO2016065001 SEQ ID NO: 32 |
| AAV CHt-6.10 | 809 | WO2016065001 SEQ ID NO: 33 |
| AAV CHt-6.5 | 810 | WO2016065001 SEQ ID NO: 34 |
| AAV CHt-6.6 | 811 | WO2016065001 SEQ ID NO: 35 |
| AAV CHt-6.7 | 812 | WO2016065001 SEQ ID NO: 36 |
| AAV CHt-6.8 | 813 | WO2016065001 SEQ ID NO: 37 |
| AAV CSp-8.10 | 814 | WO2016065001 SEQ ID NO: 38 |
| AAV CSp-8.2 | 815 | WO2016065001 SEQ ID NO: 39 |
| AAV CSp-8.4 | 816 | WO2016065001 SEQ ID NO: 40 |
| AAV CSp-8.5 | 817 | WO2016065001 SEQ ID NO: 41 |
| AAV CSp-8.6 | 818 | WO2016065001 SEQ ID NO: 42 |
| AAV CSp-8.7 | 819 | WO2016065001 SEQ ID NO: 43 |
| AAV CSp-8.8 | 820 | WO2016065001 SEQ ID NO: 44 |
| AAV CSp-8.9 | 821 | WO2016065001 SEQ ID NO: 45 |
| AAV CBr-B7.3 | 822 | WO2016065001 SEQ ID NO: 46 |
| AAV CBr-B7.4 | 823 | WO2016065001 SEQ ID NO: 47 |
| AAV3B | 824 | WO2016065001 SEQ ID NO: 48 |
| AAV4 | 825 | WO2016065001 SEQ ID NO: 49 |
| AAV5 | 826 | WO2016065001 SEQ ID NO: 50 |
| AAV CHt-P2 | 827 | WO2016065001 SEQ ID NO: 51 |
| AAV CHt-P5 | 828 | WO2016065001 SEQ ID NO: 52 |
| AAV CHt-P9 | 829 | WO2016065001 SEQ ID NO: 53 |
| AAV CBr-7.1 | 830 | WO2016065001 SEQ ID NO: 54 |
| AAV CBr-7.2 | 831 | WO2016065001 SEQ ID NO: 55 |
| AAV CBr-7.3 | 832 | WO2016065001 SEQ ID NO: 56 |
| AAV CBr-7.4 | 833 | WO2016065001 SEQ ID NO: 57 |
| AAV CBr-7.5 | 834 | WO2016065001 SEQ ID NO: 58 |
| AAV CBr-7.7 | 835 | WO2016065001 SEQ ID NO: 59 |
| AAV CBr-7.8 | 836 | WO2016065001 SEQ ID NO: 60 |
| AAV CBr-7.10 | 837 | WO2016065001 SEQ ID NO: 61 |
| AAV CKd-N3 | 838 | WO2016065001 SEQ ID NO: 62 |
| AAV CKd-N4 | 839 | WO2016065001 SEQ ID NO: 63 |
| AAV CKd-N9 | 840 | WO2016065001 SEQ ID NO: 64 |
| AAV CLv-L4 | 841 | WO2016065001 SEQ ID NO: 65 |
| AAV CLv-L5 | 842 | WO2016065001 SEQ ID NO: 66 |
| AAV CLv-L6 | 843 | WO2016065001 SEQ ID NO: 67 |
| AAV CLv-K1 | 844 | WO2016065001 SEQ ID NO: 68 |
| AAV CLv-K3 | 845 | WO2016065001 SEQ ID NO: 69 |
| AAV CLv-K6 | 846 | WO2016065001 SEQ ID NO: 70 |
| AAV CLv-M1 | 847 | WO2016065001 SEQ ID NO: 71 |
| AAV CLv-M11 | 848 | WO2016065001 SEQ ID NO: 72 |
| AAV CLv-M2 | 849 | WO2016065001 SEQ ID NO: 73 |
| AAV CLv-M5 | 850 | WO2016065001 SEQ ID NO: 74 |
| AAV CLv-M6 | 851 | WO2016065001 SEQ ID NO: 75 |
| AAV CLv-M7 | 852 | WO2016065001 SEQ ID NO: 76 |
| AAV CLv-M8 | 853 | WO2016065001 SEQ ID NO: 77 |
| AAV CLv-M9 | 854 | WO2016065001 SEQ ID NO: 78 |
| AAV CHt-P1 | 855 | WO2016065001 SEQ ID NO: 79 |
| AAV CHt-P6 | 856 | WO2016065001 SEQ ID NO: 80 |
| AAV CHt-P8 | 857 | WO2016065001 SEQ ID NO: 81 |
| AAV CHt-6.1 | 858 | WO2016065001 SEQ ID NO: 82 |
| AAV CHt-6.10 | 859 | WO2016065001 SEQ ID NO: 83 |
| AAV CHt-6.5 | 860 | WO2016065001 SEQ ID NO: 84 |
| AAV CHt-6.6 | 861 | WO2016065001 SEQ ID NO: 85 |
| AAV CHt-6.7 | 862 | WO2016065001 SEQ ID NO: 86 |
| AAV CHt-6.8 | 863 | WO2016065001 SEQ ID NO: 87 |
| AAV CSp-8.10 | 864 | WO2016065001 SEQ ID NO: 88 |
| AAV CSp-8.2 | 865 | WO2016065001 SEQ ID NO: 89 |
| AAV CSp-8.4 | 866 | WO2016065001 SEQ ID NO: 90 |
| AAV CSp-8.5 | 867 | WO2016065001 SEQ ID NO: 91 |
| AAV CSp-8.6 | 868 | WO2016065001 SEQ ID NO: 92 |
| AAV CSp-8.7 | 869 | WO2016065001 SEQ ID NO: 93 |
| AAV CSp-8.8 | 870 | WO2016065001 SEQ ID NO: 94 |
| AAV CSp-8.9 | 871 | WO2016065001 SEQ ID NO: 95 |
| AAV CBr-B7.3 | 872 | WO2016065001 SEQ ID NO: 96 |
| AAV CBr-B7.4 | 873 | WO2016065001 SEQ ID NO: 97 |
| AAV3B | 874 | WO2016065001 SEQ ID NO: 98 |
| AAV4 | 875 | WO2016065001 SEQ ID NO: 99 |
| AAV5 | 876 | WO2016065001 SEQ ID NO: 100 |
| GPV | 877 | U.S. Pat. No. 9,624,274B2 SEQ ID NO: 192 |
| B19 | 878 | U.S. Pat. No. 9,624,274B2 SEQ ID NO: 193 |
| MVM | 879 | U.S. Pat. No. 9,624,274B2 SEQ ID NO: 194 |
| FPV | 880 | U.S. Pat. No. 9,624,274B2 SEQ ID NO: 195 |
| CPV | 881 | U.S. Pat. No. 9,624,274B2 SEQ ID NO: 196 |
| AAV6 | 882 | U.S. Pat. No. 9,546,112B2 SEQ ID NO: 5 |
| AAV6 | 883 | U.S. Pat. No. 9,457,103B2 SEQ ID NO: 1 |
| AAV2 | 884 | U.S. Pat. No. 9,457,103B2 SEQ ID NO: 2 |
| ShH10 | 885 | U.S. Pat. No. 9,457,103B2 SEQ ID NO: 3 |
| ShH13 | 886 | U.S. Pat. No. 9,457,103B2 SEQ ID NO: 4 |
| ShH10 | 887 | U.S. Pat. No. 9,457,103B2 SEQ ID NO: 5 |
| ShH10 | 888 | U.S. Pat. No. 9,457,103B2 SEQ ID NO: 6 |
| ShH10 | 889 | U.S. Pat. No. 9,457,103B2 SEQ ID NO: 7 |
| ShH10 | 890 | U.S. Pat. No. 9,457,103B2 SEQ ID NO: 8 |
| ShH10 | 891 | U.S. Pat. No. 9,457,103B2 SEQ ID NO: 9 |
| rh74 | 892 | U.S. Pat. No. 9,434,928B2 SEQ ID NO: 1, US2015023924A1 SEQ |
| | | ID NO: 2 |
| rh74 | 893 | U.S. Pat. No. 9,434,928B2 SEQ ID NO: 2, US2015023924A1 SEQ |
| | | ID NO: 1 |
| AAV8 | 894 | U.S. Pat. No. 9,434,928B2 SEQ ID NO: 4 |
| rh74 | 895 | U.S. Pat. No. 9,434,928B2 SEQ ID NO: 5 |
| rh74 (RHM4-1) | 896 | US2015023924A1 SEQ ID NO: 5, US20160375110A1 |
| | | SEQ ID NO: 4 |
| rh74 (RHM15-1) | 897 | US2015023924A1 SEQ ID NO: 6, US20160375110A1 |
| | | SEQ ID NO: 5 |
| rh74 (RHM15-2) | 898 | US2015023924A1 SEQ ID NO: 7, US20160375110A1 |
| | | SEQ ID NO: 6 |
| rh74 (RHM15-3/RHM15-5) | 899 | US2015023924A1 SEQ ID NO: 8, US20160375110A1 |
| | | SEQ ID NO: 7 |
| rh74 (RHM15-4) | 900 | US2015023924A1 SEQ ID NO: 9, US20160375110A1 |
| | | SEQ ID NO: 8 |
| rh74 (RHM15-6) | 901 | US2015023924A1 SEQ ID NO: 10, US20160375110A1 |
| | | SEQ ID NO: 9 |
| rh74 (RHM4-1) | 902 | US2015023924A1 SEQ ID NO: 11 |
| rh74 (RHM15-1) | 903 | US2015023924A1 SEQ ID NO: 12 |
| rh74 (RHM15-2) | 904 | US2015023924A1 SEQ ID NO: 13 |
| rh74 (RHM15-3/RHM15-5) | 905 | US2015023924A1 SEQ ID NO: 14 |
| rh74 (RHM15-4) | 906 | US2015023924A1 SEQ ID NO: 15 |
| rh74 (RHM15-6) | 907 | US2015023924A1 SEQ ID NO: 16 |
| AAV2 (comprising lung | 908 | US20160175389A1 SEQ ID NO: 9 |
| specific polypeptide) | | |
| AAV2 (comprising lung | 909 | US20160175389A1 SEQ ID NO: 10 |
| specific polypeptide) | | |
| Anc80 | 910 | US20170051257A1 SEQ ID NO: 1 |
| Anc80 | 911 | US20170051257A1 SEQ ID NO: 2 |
| Anc81 | 912 | US20170051257A1 SEQ ID NO: 3 |
| Anc80 | 913 | US20170051257A1 SEQ ID NO: 4 |
| Anc82 | 914 | US20170051257A1 SEQ ID NO: 5 |
| Anc82 | 915 | US20170051257A1 SEQ ID NO: 6 |
| Anc83 | 916 | US20170051257A1 SEQ ID NO: 7 |
| Anc83 | 917 | US20170051257A1 SEQ ID NO: 8 |
| Anc84 | 918 | US20170051257A1 SEQ ID NO: 9 |
| Anc84 | 919 | US20170051257A1 SEQ ID NO: 10 |
| Anc94 | 920 | US20170051257A1 SEQ ID NO: 11 |
| Anc94 | 921 | US20170051257A1 SEQ ID NO: 12 |
| Anc113 | 922 | US20170051257A1 SEQ ID NO: 13 |
| Anc113 | 923 | US20170051257AI SEQ ID NO: 14 |
| Anc126 | 924 | US20170051257A1 SEQ ID NO: 15 |
| Anc126 | 925 | US20170051257A1 SEQ ID NO: 16 |
| Anc127 | 926 | US20170051257A1 SEQ ID NO: 17 |
| Anc127 | 927 | US20170051257A1 SEQ ID NO: 18 |
| Anc80L27 | 928 | US20170051257A1 SEQ ID NO: 19 |
| Anc80L59 | 929 | US20170051257A1 SEQ ID NO: 20 |
| Anc80L60 | 930 | US20170051257A1 SEQ ID NO: 21 |
| Anc80L62 | 931 | US20170051257A1 SEQ ID NO: 22 |
| Anc80L65 | 932 | US20170051257A1 SEQ ID NO: 23 |
| Anc80L33 | 933 | US20170051257A1 SEQ ID NO: 24 |
| Anc80L36 | 934 | US20170051257A1 SEQ ID NO: 25 |
| Anc80L44 | 935 | US20170051257A1 SEQ ID NO: 26 |
| Anc80L1 | 936 | US20170051257A1 SEQ ID NO: 35 |
| Anc80L1 | 937 | US20170051257A1 SEQ ID NO: 36 |
| AAV-X1 | 938 | U.S. Pat. No. 8,283,151B2 SEQ ID NO: 11 |
| AAV-X1b | 939 | U.S. Pat. No. 8,283,151B2 SEQ ID NO: 12 |
| AAV-X5 | 940 | U.S. Pat. No. 8,283,151B2 SEQ ID NO: 13 |
| AAV-XI9 | 941 | U.S. Pat. No. 8,283,151B2 SEQ ID NO: 14 |
| AAV-X21 | 942 | U.S. Pat. No. 8,283,151B2 SEQ ID NO: 15 |
| AAV-X22 | 943 | U.S. Pat. No. 8,283,151B2 SEQ ID NO: 16 |
| AAV-X23 | 944 | U.S. Pat. No. 8,283,151B2 SEQ ID NO: 17 |
| AAV-X24 | 945 | U.S. Pat. No. 8,283,151B2 SEQ ID NO: 18 |
| AAV-X25 | 946 | U.S. Pat. No. 8,283,151B2 SEQ ID NO: 19 |
| AAV-X26 | 947 | U.S. Pat. No. 8,283,151B2 SEQ ID NO: 20 |
| AAV-X1 | 948 | U.S. Pat. No. 8,283,151B2 SEQ ID NO: 21 |
| AAV-X1b | 949 | U.S. Pat. No. 8,283,151B2 SEQ ID NO: 22 |
| AAV-X5 | 950 | U.S. Pat. No. 8,283,151B2 SEQ ID NO: 23 |
| AAV-X19 | 951 | U.S. Pat. No. 8,283,151B2 SEQ ID NO: 24 |
| AAV-X21 | 952 | U.S. Pat. No. 8,283,151B2 SEQ ID NO: 25 |
| AAV-X22 | 953 | U.S. Pat. No. 8,283,151B2 SEQ ID NO: 26 |
| AAV-X23 | 954 | U.S. Pat. No. 8,283,151B2 SEQ ID NO: 27 |
| AAV-X24 | 955 | U.S. Pat. No. 8,283,151B2 SEQ ID NO: 28 |
| AAV-X25 | 956 | U.S. Pat. No. 8,283,151B2 SEQ ID NO: 29 |
| AAV-X26 | 957 | U.S. Pat. No. 8,283,151B2 SEQ ID NO: 30 |
| AAVrh8 | 958 | WO2016054554A1 SEQ ID NO: 8 |
| AAVrh8VP2FC5 | 959 | WO2016054554A1 SEQ ID NO: 9 |
| AAVrh8VP2FC44 | 960 | WO2016054554A1 SEQ ID NO: 10 |
| AAVrh8VP2ApoB100 | 961 | WO2016054554A1 SEQ ID NO: 11 |
| AAVrh8VP2RVG | 962 | WO2016054554A1 SEQ ID NO: 12 |
| AAVrh8VP2Angiopep-2 | 963 | WO2016054554A1 SEQ ID NO: 13 |
| VP2 | | |
| AAV9.47VP1.3 | 964 | WO2016054554A1 SEQ ID NO: 14 |
| AAV9.47VP2ICAMg3 | 965 | WO2016054554A1 SEQ ID NO: 15 |
| AAV9.47VP2RVG | 966 | WO2016054554A1 SEQ ID NO: 16 |
| AAV9.47VP2Angiopep-2 | 967 | WO2016054554A1 SEQ ID NO: 17 |
| AAV9.47VP2A-string | 968 | WO2016054554A1 SEQ ID NO: 18 |
| AAVrh8VP2FC5 VP2 | 969 | WO2016054554A1 SEQ ID NO: 19 |
| AAVrh8VP2FC44 VP2 | 970 | WO2016054554A1 SEQ ID NO: 20 |
| AAVrh8VP2ApoB100 VP2 | 971 | WO2016054554A1 SEQ ID NO: 21 |
| AAVrh8VP2RVG VP2 | 972 | WO2016054554A1 SEQ ID NO: 22 |
| AAVrh8VP2Angiopep-2 | 973 | WO2016054554A1 SEQ ID NO: 23 |
| VP2 | | |
| AAV9.47VP2ICAMg3 VP2 | 974 | WO2016054554A1 SEQ ID NO: 24 |
| AAV9.47VP2RVG VP2 | 975 | WO2016054554A1 SEQ ID NO: 25 |
| AAV9.47VP2 Angiopep-2 | 976 | WO2016054554A1 SEQ ID NO: 26 |
| VP2 | | |
| AAV9.47VP2A-string VP2 | 977 | WO2016054554A1 SEQ ID NO: 27 |
| rAAV-B1 | 978 | WO2016054557A1 SEQ ID NO: 1 |
| rAAV-B2 | 979 | WO2016054557A1 SEQ ID NO: 2 |
| rAAV-B3 | 980 | WO2016054557A1 SEQ ID NO: 3 |
| rAAV-B4 | 981 | WO2016054557A1 SEQ ID NO: 4 |
| rAAV-B1 | 982 | WO2016054557A1 SEQ ID NO: 5 |
| rAAV-B2 | 983 | WO2016054557A1 SEQ ID NO: 6 |
| rAAV-B3 | 984 | WO2016054557A1 SEQ ID NO: 7 |
| rAAV-B4 | 985 | WO2016054557A1 SEQ ID NO: 8 |
| rAAV-L1 | 986 | WO2016054557A1 SEQ ID NO: 9 |
| rAAV-L2 | 987 | WO2016054557A1 SEQ ID NO: 10 |
| rAAV-L3 | 988 | WO2016054557A1 SEQ ID NO: 11 |
| rAAV-L4 | 989 | WO2016054557A1 SEQ ID NO: 12 |
| rAAV-L1 | 990 | WO2016054557A1 SEQ ID NO: 13 |
| rAAV-L2 | 991 | WO2016054557A1 SEQ ID NO: 14 |
| rAAV-L3 | 992 | WO2016054557A1 SEQ ID NO: 15 |
| rAAV-L4 | 993 | WO2016054557A1 SEQ ID NO: 16 |
| AAV9 | 994 | WO2016073739A1 SEQ ID NO: 3 |
| rAAV | 995 | WO2016081811A1 SEQ ID NO: 1 |
| rAAV | 996 | WO2016081811A1 SEQ ID NO: 2 |
| rAAV | 997 | WO2016081811A1 SEQ ID NO: 3 |
| rAAV | 998 | WO2016081811A1 SEQ ID NO: 4 |
| rAAV | 999 | WO2016081811A1 SEQ ID NO: 5 |
| rAAV | 1000 | WO2016081811A1 SEQ ID NO: 6 |
| rAAV | 1001 | WO2016081811A1 SEQ ID NO: 7 |
| rAAV | 1002 | WO2016081811A1 SEQ ID NO: 8 |
| rAAV | 1003 | WO2016081811A1 SEQ ID NO: 9 |
| rAAV | 1004 | WO2016081811A1 SEQ ID NO: 10 |
| rAAV | 1005 | WO2016081811A1 SEQ ID NO: 11 |
| rAAV | 1006 | WO2016081811A1 SEQ ID NO: 12 |
| rAAV | 1007 | WO2016081811A1 SEQ ID NO: 13 |
| rAAV | 1008 | WO2016081811A1 SEQ ID NO: 14 |
| rAAV | 1009 | WO2016081811A1 SEQ ID NO: 15 |
| rAAV | 1010 | WO2016081811A1 SEQ ID NO: 16 |
| rAAV | 1011 | WO2016081811A1 SEQ ID NO: 17 |
| rAAV | 1012 | WO2016081811A1 SEQ ID NO: 18 |
| rAAV | 1013 | WO2016081811A1 SEQ ID NO: 19 |
| rAAV | 1014 | WO2016081811A1 SEQ ID NO: 20 |
| rAAV | 1015 | WO2016081811A1 SEQ ID NO: 21 |
| rAAV | 1016 | WO2016081811A1 SEQ ID NO: 22 |
| rAAV | 1017 | WO2016081811A1 SEQ ID NO: 23 |
| rAAV | 1018 | WO2016081811A1 SEQ ID NO: 24 |
| rAAV | 1019 | WO2016081811A1 SEQ ID NO: 25 |
| rAAV | 1020 | WO2016081811A1 SEQ ID NO: 26 |
| rAAV | 1021 | WO2016081811A1 SEQ ID NO: 27 |
| rAAV | 1022 | WO2016081811A1 SEQ ID NO: 28 |
| rAAV | 1023 | WO2016081811A1 SEQ ID NO: 29 |
| rAAV | 1024 | WO2016081811A1 SEQ ID NO: 30 |
| rAAV | 1025 | WO2016081811A1 SEQ ID NO: 31 |
| rAAV | 1026 | WO2016081811A1 SEQ ID NO: 32 |
| rAAV | 1027 | WO2016081811A1 SEQ ID NO: 33 |
| rAAV | 1028 | WO2016081811A1 SEQ ID NO: 34 |
| rAAV | 1029 | WO2016081811A1 SEQ ID NO: 35 |
| rAAV | 1030 | WO2016081811A1 SEQ ID NO: 36 |
| rAAV | 1031 | WO2016081811A1 SEQ ID NO: 37 |
| rAAV | 1032 | WO2016081811A1 SEQ ID NO: 38 |
| rAAV | 1033 | WO2016081811A1 SEQ ID NO: 39 |
| rAAV | 1034 | WO2016081811A1 SEQ ID NO: 40 |
| rAAV | 1035 | WO2016081811A1 SEQ ID NO: 41 |
| rAAV | 1036 | WO2016081811A1 SEQ ID NO: 42 |
| rAAV | 1037 | WO2016081811A1 SEQ ID NO: 43 |
| rAAV | 1038 | WO2016081811A1 SEQ ID NO: 44 |
| rAAV | 1039 | WO2016081811A1 SEQ ID NO: 45 |
| rAAV | 1040 | WO2016081811A1 SEQ ID NO: 46 |
| rAAV | 1041 | WO2016081811A1 SEQ ID NO: 47 |
| rAAV | 1042 | WO2016081811A1 SEQ ID NO: 48 |
| rAAV | 1043 | WO2016081811A1 SEQ ID NO: 49 |
| rAAV | 1044 | WO2016081811A1 SEQ ID NO: 50 |
| rAAV | 1045 | WO2016081811A1 SEQ ID NO: 51 |
| rAAV | 1046 | WO2016081811A1 SEQ ID NO: 52 |
| rAAV | 1047 | WO2016081811A1 SEQ ID NO: 53 |
| rAAV | 1048 | WO2016081811A1 SEQ ID NO: 54 |
| rAAV | 1049 | WO2016081811A1 SEQ ID NO: 55 |
| rAAV | 1050 | WO2016081811A1 SEQ ID NO: 56 |
| rAAV | 1051 | WO2016081811A1 SEQ ID NO: 57 |
| rAAV | 1052 | WO2016081811A1 SEQ ID NO: 58 |
| rAAV | 1053 | WO2016081811A1 SEQ ID NO: 59 |
| rAAV | 1054 | WO2016081811A1 SEQ ID NO: 60 |
| rAAV | 1055 | WO2016081811A1 SEQ ID NO: 61 |
| rAAV | 1056 | WO2016081811A1 SEQ ID NO: 62 |
| rAAV | 1057 | WO2016081811A1 SEQ ID NO: 63 |
| rAAV | 1058 | WO2016081811A1 SEQ ID NO: 64 |
| rAAV | 1059 | WO2016081811A1 SEQ ID NO: 65 |
| rAAV | 1060 | WO2016081811A1 SEQ ID NO: 66 |
| rAAV | 1061 | WO2016081811A1 SEQ ID NO: 67 |
| rAAV | 1062 | WO2016081811A1 SEQ ID NO: 68 |
| rAAV | 1063 | WO2016081811A1 SEQ ID NO: 69 |
| rAAV | 1064 | WO2016081811A1 SEQ ID NO: 70 |
| rAAV | 1065 | WO2016081811A1 SEQ ID NO: 71 |
| rAAV | 1066 | WO2016081811A1 SEQ ID NO: 72 |
| rAAV | 1067 | WO2016081811A1 SEQ ID NO: 73 |
| rAAV | 1068 | WO2016081811A1 SEQ ID NO: 74 |
| rAAV | 1069 | WO2016081811A1 SEQ ID NO: 75 |
| rAAV | 1070 | WO2016081811A1 SEQ ID NO: 76 |
| rAAV | 1071 | WO2016081811A1 SEQ ID NO: 77 |
| rAAV | 1072 | WO2016081811A1 SEQ ID NO: 78 |
| rAAV | 1073 | WO2016081811A1 SEQ ID NO: 79 |
| rAAV | 1074 | WO2016081811A1 SEQ ID NO: 80 |
| rAAV | 1075 | WO2016081811A1 SEQ ID NO: 81 |
| rAAV | 1076 | WO2016081811A1 SEQ ID NO: 82 |
| rAAV | 1077 | WO2016081811A1 SEQ ID NO: 83 |
| rAAV | 1078 | WO2016081811A1 SEQ ID NO: 84 |
| rAAV | 1079 | WO2016081811A1 SEQ ID NO: 85 |
| rAAV | 1080 | WO2016081811A1 SEQ ID NO: 86 |
| rAAV | 1081 | WO2016081811A1 SEQ ID NO: 87 |
| rAAV | 1082 | WO2016081811A1 SEQ ID NO: 88 |
| rAAV | 1083 | WO2016081811A1 SEQ ID NO: 89 |
| rAAV | 1084 | WO2016081811A1 SEQ ID NO: 90 |
| rAAV | 1085 | WO2016081811A1 SEQ ID NO: 91 |
| rAAV | 1086 | WO2016081811A1 SEQ ID NO: 92 |
| rAAV | 1087 | WO2016081811A1 SEQ ID NO: 93 |
| rAAV | 1088 | WO2016081811A1 SEQ ID NO: 94 |
| rAAV | 1089 | WO2016081811A1 SEQ ID NO: 95 |
| rAAV | 1090 | WO2016081811A1 SEQ ID NO: 96 |
| rAAV | 1091 | WO2016081811A1 SEQ ID NO: 97 |
| rAAV | 1092 | WO2016081811A1 SEQ ID NO: 98 |
| rAAV | 1093 | WO2016081811A1 SEQ ID NO: 99 |
| rAAV | 1094 | WO2016081811A1 SEQ ID NO: 100 |
| rAAV | 1095 | WO2016081811A1 SEQ ID NO: 101 |
| rAAV | 1096 | WO2016081811A1 SEQ ID NO: 102 |
| rAAV | 1097 | WO2016081811A1 SEQ ID NO: 103 |
| rAAV | 1098 | WO2016081811A1 SEQ ID NO: 104 |
| rAAV | 1099 | WO2016081811A1 SEQ ID NO: 105 |
| rAAV | 1100 | WO2016081811A1 SEQ ID NO: 106 |
| rAAV | 1101 | WO2016081811A1 SEQ ID NO: 107 |
| rAAV | 1102 | WO2016081811A1 SEQ ID NO: 108 |
| rAAV | 1103 | WO2016081811A1 SEQ ID NO: 109 |
| rAAV | 1104 | WO2016081811A1 SEQ ID NO: 110 |
| rAAV | 1105 | WO2016081811A1 SEQ ID NO: 111 |
| rAAV | 1106 | WO2016081811A1 SEQ ID NO: 112 |
| rAAV | 1107 | WO2016081811A1 SEQ ID NO: 113 |
| rAAV | 1108 | WO2016081811A1 SEQ ID NO: 114 |
| rAAV | 1109 | WO2016081811A1 SEQ ID NO: 115 |
| rAAV | 1110 | WO2016081811A1 SEQ ID NO: 116 |
| rAAV | 1111 | WO2016081811A1 SEQ ID NO: 117 |
| rAAV | 1112 | WO2016081811A1 SEQ ID NO: 118 |
| rAAV | 1113 | WO2016081811A1 SEQ ID NO: 119 |
| rAAV | 1114 | WO2016081811A1 SEQ ID NO: 120 |
| rAAV | 1115 | WO2016081811A1 SEQ ID NO: 121 |
| rAAV | 1116 | WO2016081811A1 SEQ ID NO: 122 |
| rAAV | 1117 | WO2016081811A1 SEQ ID NO: 123 |
| rAAV | 1118 | WO2016081811A1 SEQ ID NO: 124 |
| rAAV | 1119 | WO2016081811A1 SEQ ID NO: 125 |
| rAAV | 1120 | WO2016081811A1 SEQ ID NO: 126 |
| rAAV | 1121 | WO2016081811A1 SEQ ID NO: 127 |
| rAAV | 1122 | WO2016081811A1 SEQ ID NO: 128 |
| AAV8 E532K | 1123 | WO2016081811A1 SEQ ID NO: 133 |
| AAV8 E532K | 1124 | WO2016081811A1 SEQ ID NO: 134 |
| rAAV | 1125 | WO2016115382A1 SEQ ID NO: 2 |
| rAAV | 1126 | WO2016115382A1 SEQ ID NO: 3 |
| rAAV | 1127 | WO2016115382A1 SEQ ID NO: 4 |
| rAAV | 1128 | WO2016115382A1 SEQ ID NO: 5 |
| rAAV | 1129 | WO2016115382A1 SEQ ID NO: 6 |
| rAAV | 1130 | WO2016115382A1 SEQ ID NO: 7 |
| rAAV | 1131 | WO2016115382A1 SEQ ID NO: 8 |
| rAAV | 1132 | WO2016115382A1 SEQ ID NO: 9 |
| rAAV | 1133 | WO2016115382A1 SEQ ID NO: 10 |
| rAAV | 1134 | WO2016115382A1 SEQ ID NO: 11 |
| rAAV | 1135 | WO2016115382A1 SEQ ID NO: 12 |
| rAAV | 1136 | WO2016115382A1 SEQ ID NO: 13 |
| rAAV | 1137 | WO2016115382A1 SEQ ID NO: 14 |
| rAAV4 | 1138 | WO2016115382A1 SEQ ID NO: 15 |
| rAAV4 | 1139 | WO2016115382A1 SEQ ID NO: 16 |
| rAAV4 | 1140 | WO2016115382A1 SEQ ID NO: 17 |
| rAAV4 | 1141 | WO2016115382A1 SEQ ID NO: 18 |
| rAAV4 | 1142 | WO2016115382A1 SEQ ID NO: 19 |
| rAAV4 | 1143 | WO2016115382A1 SEQ ID NO: 20 |
| rAAV4 | 1144 | WO2016115382A1 SEQ ID NO: 21 |
| AAV11 | 1145 | WO2016115382A1 SEQ ID NO: 22 |
| AAV12 | 1146 | WO2016115382A1 SEQ ID NO: 23 |
| rh32 | 1147 | WO2016115382A1 SEQ ID NO: 25 |
| rh33 | 1148 | WO2016115382A1 SEQ ID NO: 26 |
| rh34 | 1149 | WO2016115382A1 SEQ ID NO: 27 |
| rAAV4 | 1150 | WO2016115382A1 SEQ ID NO: 28 |
| rAAV4 | 1151 | WO2016115382A1 SEQ ID NO: 29 |
| rAAV4 | 1152 | WO2016115382A1 SEQ ID NO: 30 |
| rAAV4 | 1153 | WO2016115382A1 SEQ ID NO: 31 |
| rAAV4 | 1154 | WO2016115382A1 SEQ ID NO: 32 |
| rAAV4 | 1155 | WO2016115382A1 SEQ ID NO: 33 |
| AAV2/8 | 1156 | WO2016131981A1 SEQ ID NO: 47 |
| AAV2/8 | 1157 | WO2016131981A1 SEQ ID NO: 48 |
| ancestral AAV | 1158 | WO2016154344A1 SEQ ID NO: 7 |
| ancestral AAV variant C4 | 1159 | WO2016154344A1 SEQ ID NO: 13 |
| ancestral AAV variant C7 | 1160 | WO2016154344A1 SEQ ID NO: 14 |
| ancestral AAV variant G4 | 1161 | WO2016154344A1 SEQ ID NO: 15 |
| consensus amino acid | 1162 | WO2016154344A1 SEQ ID NO: 16 |
| sequence of ancestral AAV | | |
| variants, C4, C7 and G4 | | |
| consensus amino acid | 1163 | WO2016154344A1 SEQ ID NO: 17 |
| sequence of ancestral AAV | | |
| variants, C4 and C7 | | |
| AAV8 (with a AAV2 | 1164 | WO2016150403A1 SEQ ID NO: 13 |
| phospholipase domain) | | |
| AAV VR-942n | 1165 | US20160289275A1 SEQ ID NO: 10 |
| AAV5-A (M569V) | 1166 | US20160289275A1 SEQ ID NO: 13 |
| AAV5-A (M569V) | 1167 | US20160289275A1 SEQ ID NO: 14 |
| AAV5-A (Y585V) | 1168 | US20160289275A1 SEQ ID NO: 16 |
| AAV5-A (Y585V) | 1169 | US20160289275A1 SEQ ID NO: 17 |
| AAV5-A (L587T) | 1170 | US20160289275A1 SEQ ID NO: 19 |
| AAV5-A (L587T) | 1171 | US20160289275A1 SEQ ID NO: 20 |
| AAV5-A (Y585V/L587T) | 1172 | US20160289275A1 SEQ ID NO: 22 |
| AAV5-A (Y585V/L587T) | 1173 | US20160289275A1 SEQ ID NO: 23 |
| AAV5-B (D652A) | 1174 | US20160289275A1 SEQ ID NO: 25 |
| AAV5-B (D652A) | 1175 | US20160289275A1 SEQ ID NO: 26 |
| AAV5-B (T362M) | 1176 | US20160289275A1 SEQ ID NO: 28 |
| AAV5-B (T362M) | 1177 | US20160289275A1 SEQ ID NO: 29 |
| AAV5-B (Q359D) | 1178 | US20160289275A1 SEQ ID NO: 31 |
| AAV5-B (Q359D) | 1179 | US20160289275A1 SEQ ID NO: 32 |
| AAV5-B (E350Q) | 1180 | US20160289275A1 SEQ ID NO: 34 |
| AAV5-B (E350Q) | 1181 | US20160289275A1 SEQ ID NO: 35 |
| AAV5-B (P533S) | 1182 | US20160289275A1 SEQ ID NO: 37 |
| AAV5-B (P533S) | 1183 | US20160289275A1 SEQ ID NO: 38 |
| AAV5-B (P533G) | 1184 | US20160289275A1 SEQ ID NO: 40 |
| AAV5-B (P533G) | 1185 | US20160289275A1 SEQ ID NO: 41 |
| AAV5-mutation in loop VII | 1186 | US20160289275A1 SEQ ID NO: 43 |
| AAVS-mutation in loop VII | 1187 | US20160289275A1 SEQ ID NO: 44 |
| AAV8 | 1188 | US20160289275A1 SEQ ID NO: 47 |
| Mut A (LK03/AAV8) | 1189 | WO2016181123A1 SEQ ID NO: 1 |
| Mut B (LK03/AAV5) | 1190 | WO2016181123A1 SEQ ID NO: 2 |
| Mut C (AAV8/AAV3B) | 1191 | WO2016181123A1 SEQ ID NO: 3 |
| Mut D (AAV5/AAV3B) | 1192 | WO2016181123A1 SEQ ID NO: 4 |
| Mut E (AAV8/AAV3B) | 1193 | WO2016181123A1 SEQ ID NO: 5 |
| Mut F (AAV3B/AAV8) | 1194 | WO2016181123A1 SEQ ID NO: 6 |
| AAV44.9 | 1195 | WO2016183297A1 SEQ ID NO: 4 |
| AAV44.9 | 1196 | WO2016183297A1 SEQ ID NO: 5 |
| AAVrh8 | 1197 | WO2016183297A1 SEQ ID NO: 6 |
| AAV44.9 (S470N) | 1198 | WO2016183297A1 SEQ ID NO: 9 |
| rh74 VP1 | 1199 | US20160375110A1 SEQ ID NO: 1 |
| AAV-LK03 (L125I) | 1200 | WO2017015102A1 SEQ ID NO: 5 |
| AAV3B (S663V + T492V) | 1201 | WO2017015102A1 SEQ ID NO: 6 |
| Anc80 | 1202 | WO2017019994A2 SEQ ID NO: 1 |
| Anc80 | 1203 | WO2017019994A2 SEQ ID NO: 2 |
| Anc81 | 1204 | WO2017019994A2 SEQ ID NO: 3 |
| Anc81 | 1205 | WO2017019994A2 SEQ ID NO: 4 |
| Anc82 | 1206 | WO2017019994A2 SEQ ID NO: 5 |
| Anc82 | 1207 | WO2017019994A2 SEQ ID NO: 6 |
| Anc83 | 1208 | WO2017019994A2 SEQ ID NO: 7 |
| Anc83 | 1209 | WO2017019994A2 SEQ ID NO: 8 |
| Anc84 | 1210 | WO2017019994A2 SEQ ID NO: 9 |
| Anc84 | 1211 | WO2017019994A2 SEQ ID NO: 10 |
| Anc94 | 1212 | WO2017019994A2 SEQ ID NO: 11 |
| Anc94 | 1213 | WO2017019994A2 SEQ ID NO: 12 |
| Anc113 | 1214 | WO2017019994A2 SEQ ID NO: 13 |
| Anc113 | 1215 | WO2017019994A2 SEQ ID NO: 14 |
| Anc126 | 1216 | WO2017019994A2 SEQ ID NO: 15 |
| Anc126 | 1217 | WO2017019994A2 SEQ ID NO: 16 |
| Anc127 | 1218 | WO2017019994A2 SEQ ID NO: 17 |
| Anc127 | 1219 | WO2017019994A2 SEQ ID NO: 18 |
| Anc80L27 | 1220 | WO2017019994A2 SEQ ID NO: 19 |
| Anc80L59 | 1221 | WO2017019994A2 SEQ ID NO: 20 |
| Anc80L60 | 1222 | WO2017019994A2 SEQ ID NO: 21 |
| Anc80L62 | 1223 | WO2017019994A2 SEQ ID NO: 22 |
| Anc80L65 | 1224 | WO2017019994A2 SEQ ID NO: 23 |
| Anc80L33 | 1225 | WO2017019994A2 SEQ ID NO: 24 |
| Anc80L36 | 1226 | WO2017019994A2 SEQ ID NO: 25 |
| Anc80L44 | 1227 | WO2017019994A2 SEQ ID NO: 26 |
| Anc80L1 | 1228 | WO2017019994A2 SEQ ID NO: 35 |
| Anc80L1 | 1229 | WO2017019994A2 SEQ ID NO: 36 |
| AAVrh10 | 1230 | WO2017019994A2 SEQ ID NO: 41 |
| Anc110 | 1231 | WO2017019994A2 SEQ ID NO: 42 |
| Anc110 | 1232 | WO2017019994A2 SEQ ID NO: 43 |
| AAVrh32.33 | 1233 | WO2017019994A2 SEQ ID NO: 45 |
| AAVrh74 | 1234 | WO2017049031A1 SEQ ID NO: 1 |
| AAV2 | 1235 | WO2017053629A2 SEQ ID NO: 49 |
| AAV2 | 1236 | WO2017053629A2 SEQ ID NO: 50 |
| AAV2 | 1237 | WO2017053629A2 SEQ ID NO: 82 |
| Parvo-like virus | 1238 | WO2017070476A2 SEQ ID NO: 1 |
| Parvo-like virus | 1239 | WO2017070476A2 SEQ ID NO: 2 |
| Parvo-like virus | 1240 | WO2017070476A2 SEQ ID NO: 3 |
| Parvo-like virus | 1241 | WO2017070476A2 SEQ ID NO: 4 |
| Parvo-like virus | 1242 | WO2017070476A2 SEQ ID NO: 5 |
| Parvo-like virus | 1243 | WO2017070476A2 SEQ ID NO: 6 |
| AAVrh.10 | 1244 | WO2017070516A1 SEQ ID NO: 7 |
| AAVrh.10 | 1245 | WO2017070516A1 SEQ ID NO: 14 |
| AAV2tYF | 1246 | WO2017070491A1 SEQ ID NO: 1 |
| AAV-SPK | 1247 | WO2017075619A1 SEQ ID NO: 28 |
| AAV2.5 | 1248 | US20170128528A1 SEQ ID NO: 13 |
| AAV1.1 | 1249 | US20170128528A1 SEQ ID NO: 15 |
| AAV6.1 | 1250 | US20170128528A1 SEQ ID NO: 17 |
| AAV6.3.1 | 1251 | US20170128528A1 SEQ ID NO: 18 |
| AAV218 | 1252 | US20170128528A1 SEQ ID NO: 28 |
| AAV218 | 1253 | US20170128528A1 SEQ ID NO: 29 |
| ttAAV | 1254 | US20170128528A1 SEQ ID NO: 30 |
| ttAAV-S312N | 1255 | US20170128528A1 SEQ ID NO: 32 |
| ttAAV-S312N | 1256 | US20170128528A1 SEQ ID NO: 33 |
| AAV6 (Y705, Y731, and | 1257 | WO2016134337A1 SEQ ID NO: 24 |
| T492) | | |
| AAV2 | 1258 | WO2016134375A1 SEQ ID NO: 9 |
| AAV2 | 1259 | WO2016134375A1 SEQ ID NO: 10 |

[0099] In some embodiments, the AAV serotype may be, or may have a sequence as described in International Patent Publication WO2015038958, the contents of which are herein incorporated by reference in their entirety, such as, but not limited to, AAV9 (SEQ ID NO: 2 and 11 of WO2015038958 or SEQ ID NO: 135 and 136 respectively herein), PHP.B (SEQ ID NO: 8 and 9 of WO2015038958, herein SEQ ID NO: 3 and 4), G2B-13 (SEQ ID NO: 12 of WO2015038958, herein SEQ ID NO: 5), G2B-26 (SEQ ID NO: 13 of WO2015038958, herein SEQ TD NO: 3), TH1.1-32 (SEQ ID NO: 14 of WO2015038958 herein SEQ ID NO: 6), TH1.1-35 (SEQ ID NO: 15 of WO2015038958, herein SEQ ID NO: 7) or variants thereof. Further, any of the targeting peptides or amino acid inserts described in WO2015038958, may be inserted into any parent AAV serotype, such as, but not limited to, AAV9 (SEQ ID NO: 135 for the DNA sequence and SEQ ID NO: 136 for the amino acid sequence). In some embodiments, the amino acid insert is inserted between amino acids 586-592 of the parent AAV (e.g., AAV9). Ln another embodiment, the amino acid insert is inserted between amino acids 588-589 of the parent AAV sequence. The amino acid insert may be, but is not limited to, any of the following amino acid sequences, TLAVPFK (SEQ ID NO: 1 of WO2015038958; herein SEQ ID NO: 1260), KFPVALT (SEQ ID NO: 3 of WO2015038958; herein SEQ ID NO: 1261), LAVPFK (SEQ ID NO: 31 of WO2015038958; herein SEQ ID NO: 1262), AVPFK (SEQ ID NO: 32 of WO2015038958; herein SEQ ID NO: 1263), VPFK (SEQ ID NO: 33 of WO2015038958; herein SEQ ID NO: 1264), TLAVPF (SEQ ID NO: 34 of WO2015038958; herein SEQ ID NO: 1265), TLAVP (SEQ ID NO: 35 of WO2015038958; herein SEQ ID NO: 1266), TLAV (SEQ ID NO: 36 of WO2015038958; herein SEQ ID NO: 1267), SVSKPFL (SEQ ID NO: 28 of WO2015038958; herein SEQ ID NO: 1268), FTLTTPK (SEQ ID NO: 29 of WO2015038958; herein SEQ ID NO: 1269), MNATKNV (SEQ ID NO: 30 of WO2015038958; herein SEQ ID NO: 1270), QSSQTPR. (SEQ ID NO: 54 of WO2015038958; herein SEQ ID NO: 1271), ILGTGTS (SEQ ID NO: 55 of WO2015038958; herein SEQ ID NO: 1272), TRTNPEA (SEQ ID NO: 56 of WO2015038958; herein SEQ ID NO: 1273), NGGTSSS (SEQ ID NO: 58 of WO2015038958; herein SEQ ID NO: 1274), or YTLSQGW (SEQ ID NO: 60 of WO2015038958; herein SEQ NO: 1275). Non-limiting examples of nucleotide sequences that may encode the amino acid inserts include the following, AAGTTTCCTGTGGCGTTGACT (for SEQ ID NO: 3 of WO2015038958; herein SEQ ID NO: 1276), ACTTTGGCGGTGCCTTTTAAG (SEQ ID NO: 24 and 49 of WO2015038958; herein SEQ ID NO: 1277), AGTGTGAGTAAGCCTTTTTTG (SEQ ID NO: 25 of WO2015038958; herein SEQ ID NO: 1278), TTTACGTTGACGACGCCTAAG (SEQ ID NO: 26 of WO2015038958; herein SEQ ID NO: 1279), ATGAATGCTACGAAGAATGTG (SEQ ID NO: 27 of WO2015038958; herein SEQ ID NO: 1280), CAGTCGTCGCAGACGCCTAGG (SEQ NO: 48 of WO2015038958; herein SEQ ID NO: 1281), ATTCTGGGGACTGGTACTTCG (SEQ ID NO: 50 and 52 of WO2015038958; herein SEQ ID NO: 1282), ACGCGGACTAATCCTGAGGCT (SEQ ID NO: 51 of WO2015038958; herein SEQ ID NO: 1283), AATGGGGGGACTAGTAGTTCT (SEQ ID NO: 53 of WO201.5038958; herein SEQ ID NO: 1284), or TATACTITGTCGCAGGGTTGG (SEQ ID NO: 59 of WO2015038958; herein SEQ ID NO: 1285).

[0100] In some embodiments, the AAV serotype may be, or may have a sequence as described in International Patent Publication WO2017100671, the contents of which are herein incorporated by reference in their entirety, such as, but not limited to, AAV9 (SEQ ID NO: 45 of WO2017100671, herein SEQ ID NO: 9), PHP.N (SEQ ID NO: 46 of WO2017100671, herein SEQ ID NO: 2), PHP.S (SEQ ID NO: 47 of WO201.7100671, herein SEQ ID NO: 8), or variants thereof. Further, any of the targeting peptides or amino acid inserts described in WO2017100671 may be inserted into any parent AAV serotype, such as, but not limited to, AAV9 (SEQ ID NO: 9 or SEQ ID NO: 131). In some embodiments, the amino acid insert is inserted between amino acids 586-592 of the parent AAV (e.g., AAV9). In another embodiment, the amino acid insert is inserted between amino acids 588589 of the parent AAV sequence. The amino acid insert may be, but is not limited to, any of the following amino acid sequences, AQTLAVPFKAQ (SEQ ID NO: 1 of WO20171.00671; herein SEQ ID NO: 1286), AQSVSKPFLAQ (SEQ ID NO: 2 of WO2017100671; herein SEQ ID NO: 1287), AQFTLTTPKAQ (SEQ ID NO: 3 in the sequence listing of WO2017100671; herein SEQ ID NO: 1288), DGTLAVPFKAQ (SEQ ID NO: 4 in the sequence listing of WO2017100671; herein SEQ ID NO: 1289), ESTLAVPFKAQ (SEQ ID NO: 5 of WO20171.00671; herein SEQ ID NO: 1290), GGTLAVPFKAQ (SEQ ID NO: 6 of WO2017100671, herein SEQ ID NO: 1291), AQTLATPFKAQ (SEQ ID NO: 7 and 33 of WO2017100671; herein SEQ ID NO: 1292), ATTLATPFKAQ (SEQ ID NO: 8 of WO2017100671; herein SEQ ID NO: 1293), DGTLATPFKAQ (SEQ ID NO: 9 of WO2017100671; herein SEQ ID NO: 1294), GGTLATPFKAQ (SEQ NO: 10 of 902017100671; herein SEQ ID NO: 1295), SGSLAVPFKAQ (SEQ ID NO: 11 of WO2017100671; herein SEQ ID NO: 1296), AQTLAQPFKAQ (SEQ ID NO: 12 of WO2017100671; herein SEQ ID NO: 1297), AQTLQQPFKAQ (SEQ ID NO: 13 of WO2017100671; herein SEQ ID NO: 1298), AQTLSNPFKAQ (SEQ ID NO: 14 of WO201.7100671; herein SEQ ID NO: 1299), AQTLAVPFSNP (SEQ ID NO: 15 of WO2017100671; herein SEQ ID NO: 1300), QGTLAVPFKAQ (SEQ ID NO: 16 of WO2017100671; herein SEQ ID NO: 1301), NQTLAVPFKAQ (SEQ ID NO: 17 of 902017100671; herein SEQ ID NO: 1302), EGSLAVPFKAQ (SEQ ID NO: 18 of WO2017100671; herein SEQ ID NO: 1303), SGNLAVPFKAQ (SEQ ID NO: 19 of WO2017100671; herein SEQ ID NO: 1304), EGTLAVPFKAQ (SEQ ID NO: 20 of WO2017100671; herein SEQ ID NO: 1305), DSTLAVPFKAQ (SEQ ID NO: 21 in Table 1 of WO2017100671; herein SEQ ID NO: 1306), AVTLAVPFKAQ (SEQ ID NO: 22 of WO2017100671; herein SEQ ID NO: 1307), AQILSTRFKAQ (SEQ NO: 23 of WO2017100671; herein SEQ ID NO: 1308), AQTLPQPFKAQ (SEQ ID NO: 24 and 32 of WO2017100671; herein SEQ ID NO: 1309), AQTLSQPFKAQ (SEQ ID NO: 25 of WO2017100671; herein SEQ ID NO: 1310), AQTLQLPFKAQ (SEQ ID NO: 26 of WO2017100671; herein SEQ ID NO: 1311), AQTLTMPFKAQ (SEQ ID NO: 27, and 34 of WO2017100671 and SEQ ID NO: 35 in the sequence listing of WO20171.00671; herein SEQ TD NO: 1312), AQTLTTPFKAQ (SEQ TD NO: 28 of WO2017100671; herein SEQ ID NO: 1313), AQYTLSQGWAQ (SEQ ID NO: 29 of WO2017100671; herein SEQ ID NO: 1314), AQMNATKNVAQ (SEQ ID NO: 30 of WO2017100671; herein SEQ ID NO: 1315), AQVSGGEIIISAQ (SEQ ID NO: 31 of WO2017100671; herein SEQ ID NO: 1316), AQTLTAPFKAQ (SEQ ID NO: 35 in Table 1 of WO2017100671; herein SEQ ID NO: 1317), AQTLSKPFKAQ (SEQ ID NO: 36 of WO2017100671; herein SEQ ID NO: 1318), QAVRTSL (SEQ ID NO: 37 of WO2017100671; herein SEQ ID NO: 1319), YTLSQGW (SEQ ID NO: 38 of WO2017100671; herein SEQ ID NO: 1275), LAKERLS (SEQ ID NO: 39 of WO2017100671; herein SEQ ID NO: 1320), TLAVPFK (SEQ ID NO: 40 in the sequence listing of WO2017100671; herein SEQ ID NO: 1260), SVSKPFL (SEQ ID NO: 41 of WO2017100671; herein SEQ ID NO: 1268), FTLTTPK (SEQ ID NO: 42 of WO2017100671; herein SEQ ID NO: 1269), MNSTKNV (SEQ ID NO: 43 of WO2017100671; herein SEQ ID NO: 1321), VSGGHHS (SEQ ID NO: 44 of WO2017100671; herein SEQ ID NO: 1322), SAQTLAVPFKAQAQ (SEQ ID NO: 48 of WO2017100671; herein SEQ ID NO: 1323), SXXXLAVPIFKAQAQ (SEQ ID NO: 49 of WO2017100671 wherein X may be any amino acid; herein SEQ ID NO: 1324), SAQXXXVPFKAQAQ (SEQ ID NO: 50 of WO2017100671 wherein X may be any amino acid; herein SEQ ID NO: 1325), SAQTLXXXTKAQAQ (SEQ ID NO: 51 of WO2017100671 wherein X may be any amino acid; herein SEQ ID NO: 1326), SAQTLAVXXXAQAQ (SEQ ID NO: 52 of WO2017100671 wherein X may be any amino acid; herein SEQ ID NO: 1327), SAQTLAVPFXXXAQ (SEQ ID NO: 53 of WO2017100671 wherein X may be any amino acid; herein SEQ ID NO: 1328), TNHQSAQ (SEQ ID NO: 65 of WO2017100671; herein SEQ ID NO: 1329), AQAQTGW (SEQ ID NO: 66 of WO2017100671; herein SEQ ID NO: 1330), DGTLATPFK (SEQ ID NO: 67 of WO2017100671; herein SEQ ID NO: 1331), DGTLATPFKXX (SEQ ID NO: 68 of WO2017100671 wherein X may be any amino acid; herein SEQ ID NO: 1332), LAVPFKAQ (SEQ ID NO: 80 of WO2017100671; herein SEQ NO: 1333), VPFKAQ (SEQ ID NO: 81 of WO2017100671; herein SEQ ID NO: 1334), FKAQ (SEQ ID NO: 82 of WO20171.00671; herein SEQ ID NO: 1335), AQTLAV (SEQ TD NO: 83 of WO2017100671; herein SEQ ID NO: 1336), AQTLAVPF (SEQ ID NO: 84 of WO2017100671; herein SEQ ID NO: 1337), QAVR (SEQ ID NO: 85 of WO2017100671; herein SEQ ID NO: 1338), AVRT (SEQ ID NO: 86 of WO2017100671; herein SEQ ID NO: 1339), VRTS (SEQ ID NO: 87 of WO2017100671; herein SEQ ID NO: 1340), RTSL (SEQ ID NO: 88 of WO2017100671; herein SEQ ID NO: 1341), QAVRT (SEQ ID NO: 89 of WO2017100671; herein SEQ ID NO: 1342), AVRTS (SEQ ID NO: 90 of WO2017100671; herein SEQ ID NO: 1343), VRTSL (SEQ ID NO: 91 of WO2017100671; herein SEQ ID NO: 1344), QAVRTS (SEQ ID NO: 92 of WO2017100671; herein SEQ ID NO: 1345), or AVRTSL (SEQ ID NO: 93 of WO2017100671; herein SEQ ID NO: 1346).

[0101] Non-limiting examples of nucleotide sequences that may encode the amino acid inserts include the following, GATGGGACTTTGGCGGTGCCTTTTAAGGCACAG (SEQ ID NO: 54 of WO2017100671; herein SEQ ID NO: 1347), GATGGGACGTTGGCGGTGCCTTTTAAGGCACAG (SEQ ID NO: 55 of WO2017100671; herein SEQ ID NO: 1348), CAGGCGGTTAGGACGICTFTG (SEQ ID NO: 56 of WO2017100671; herein SEQ ID NO: 1349), CAGGTCTTCACGGACTCAGACTATCAG (SEQ ID NO: 57 and 78 of WO2017100671; herein SEE ID NO: 1350), CAAGTAAAACCTCTACAAATGTGGTAAAATCG (SEQ ID NO: 58 of WO2017100671; herein SEQ ID NO: 1351), ACTCATCGACCAATACTTGTACTATCTCTCTAGAAC (SEQ ID NO: 59 of WO2017100671; herein SEQ ID NO: 1352), GGAAGTATTCCTTGGTTTTGAACCCA (SEQ ID NO: 60 of WO20171.00671; herein SEQ Ili NO: 1353), GGTCGCGGTTCTTGTTTGTGGAT (SEQ ID NO: 61 of WO2017100671; herein SEQ ID NO: 1354), CGACCTTGAAGCGCATGAACTCCT (SEQ ID NO: 62 of WO2017100671; herein SEQ ID NO: 1355), GTATTCCTTGGTTITGAACCCAACCGGTCTGCGCCTGTGCMNNMNNMNNMNNMNN MNNMNNTTGGGCACTCTGGTGGTTTGTC (SEQ ID NO: 63 of WO2017100671 wherein N may be A, C, T, or G; herein SEQ ID NO: 1356), GTATTCCTTGGTTTTGAACCCAACCGGTCTGCGCNINNIVFNMYINNAAAAGGCACCGCC AAAGTTTG (SEQ ID NO: 69 of WO2017100671 wherein N may be A, C, T, or G; herein SEQ ID NO: 1357), GTATTCCTTGGTTTTGAACCCAACCGGTCTGCGCCTGTGCMNNMNNMNNAAAAGGCACCGCC AAAGTTTGGGCACT (SEQ ID NO: 70 of WO2017100671 wherein N may be A, C, T, or G; herein SEQ ID NO: 1358), GTATTCCTTGGTTTTGAACCCAACCGGTCTGCGCCTGTGCCTTAAAMNNMNNMNNC AAAGTTTGGGCACTCTGGTGG (SEQ ID NO: 71 of WO2017100671 wherein N may be A, C, T, or G; herein SEQ ID NO: 1359), GTATTCCTTGGTTTTGAACCCAACCGGTCTGCGCCTGTGCCTTAAAAGGCACMNNM NNMNNTTGGGCACTCTGGTGGTTTGTG (SEQ ID NO: 72 of W(0D2017100671 wherein N may be A, C, T, or G; herein SEQ ID NO: 1360), ACTTTGGCGGTGCCTTTTAAG (SEQ ID NO: 74 of WO2017100671; herein SEQ ID NO: 1277), AGTGTGAGTAAGCCTTTTTTG (SEQ ID NO: 75 of WO2017100671; herein SEQ ID NO: 1278), TTTACGTTGACGACGCCTAAG (SEQ ID NO: 76 of WO2017100671; herein SEQ ID NO: 1279), TATACTTTGTCGCAGTGTTGG (SEQ ID NO: 77 of WO2017100671; herein SEQ ID NO: 1285), or CTTGCGAAGGAGCGGCTTTCG (SEQ ID NO: 79 of WO2017100671; herein SEQ ID NO: 1361).

[0102] In some embodiments, the AAV serotype may be, or may have a sequence as described in U.S. Pat. No. 9,624,274, the contents of which are herein incorporated by reference in their entirety, such as, but not limited to, AAV1 (SEQ ID NO: 181 of US9624274), AAV6 (SEQ ID NO: 182 of US9624274), AAV2 (SEQ ID NO: 183 of US9624274), AAV3b (SEQ ID NO: 184 of US9624274), AAV7 (SEQ ID NO: 185 of US9624274), AAV8 (SEQ ID NO: 186 of US9624274), AAV10 (SEQ ID NO: 187 of U.S. Pat. No. 9,624,274), AAV4 (SEQ ID NO: 188 of U.S. Pat. No. 9,624,274), AAV11 (SEQ ID NO: 189 of U.S. Pat. No. 9,624,274), bAAV (SEQ ID NO: 190 of US9624274), AAV5 (SEQ ID NO: 191 of U.S. Pat. No. 9,624,274), GPV (SEQ ID NO: 192 of US9624274; herein SEQ ID NO: 992), 1319 (SEQ ID NO: 193 of 059624274; herein SEQ ID NO: 993), MVM (SEQ ID NO: 194 of U.S. Pat. No. 9,624,274; herein SEQ ID NO: 994), FPV (SEQ ID NO: 195 of U.S. Pat. No. 9,624,274; herein SEQ ID NO: 995), CPV (SEQ ID NO: 196 of US9624274; herein SEQ ID NO: 996) or variants thereof. Further, any of the structural protein inserts described in U.S. Pat. No. 9,624,274, may be inserted into, but not limited to, 1-453 and 1-587 of any parent AAV serotype, such as, but not limited to, AAV2 (SEQ ID NO: 183 of US9624274), The amino acid insert may be, but is not limited to, any of the following amino acid sequences, VNLTWSRASG (SEQ ID NO: 50 of U.S. Pat. No. 9,624,274; herein SEQ ID NO: 1362), EFCINIERGYWVCGD (SEQ ID NO:55 of 059624274; herein SEQ ID NO: 1363), EDGQVMDVDLS (SEQ ID NO: 85 of 1159624274; herein SEQ ID NO: 1364), EKQRNGTLT (SEQ ID NO: 86 of U.S. Pat. No. 9,624,274; herein SEQ ID NO: 1365), TYQCRVTEIPEILPRALMR (SEQ ID NO: 87 of 059624274; herein SEQ ID NO: 1366), RHSTTQPRKTKGSG (SEQ ID NO: 88 of U.S. Pat. No. 9,624,274; herein SEQ ID NO: 1367), DSNPRGVSAYLSR (SEQ ID NO: 89 of U.S. Pat. No. 9,624,274; herein SEQ ID NO: 1368), TITCLWDLAPSK (SEQ ID NO: 90 of U.S. Pat. No. 9,624,274; herein SEQ ID NO: 1369), KTKGSGFFVF (SEQ ID NO: 91 of US9624274; herein SEQ ID NO: 1370), THPHLPRALMRS (SEQ ID NO: 92 of 059624274; herein SEQ ID NO: 1371), GETYQCRVTHPHLPRALMRSTTK (SEQ ID NO: 93 of U.S. Pat. No. 9,624,274; herein SEQ ID NO: 1372), LPRALMRS (SEQ ID NO: 94 of U.S. Pat. No. 9,624,274; herein SEQ ID NO: 1373), INFIRGYWV (SEQ ID NO: 95 of US9624274; herein SEQ ID NO: 1374), CDAGSVRTNAPD (SEQ ID NO: 60 of U.S. Pat. No. 9,624,274; herein SEQ ID NO: 1375), AKAVSNLTESRSESLQS (SEQ ID NO: 96 of U.S. Pat. No. 9,624,274; herein SEQ ID NO: 1376), SLTGDEFKKVLET (SEQ ID NO: 97 of U.S. Pat. No. 9,624,274; herein SEQ ID NO: 1377), REAVAYRFEED (SEQ ID NO: 98 of U.S. Pat. No. 9,624,274; herein SEQ ID NO: 1378), INPETITLDG (SEQ ID NO: 99 of U.S. Pat. No. 9,624,274; herein SEQ ID NO: 1379), DISVTGAPVITATYL (SEQ ID NO: 100 of U.S. Pat. No. 9,624,274; herein SEQ ID NO: 1380), DISVTGAPVITA (SEQ ID NO: 101 of US9624274; herein SEQ ID NO: 1381), PKIVSNLIESSSESVQS (SEQ ID NO: 102 of U.S. Pat. No. 9,624,274; herein SEQ ID NO: 1382), SLMGDEFKAVLET (SEQ ID NO: 103 of U.S. Pat. No. 9,624,274; herein SEQ ID NO: 1383), QHSVAYTFEED (SEQ ID NO: 104 of U.S. Pat. No. 9,624,274; herein SEQ ID NO: 1384), INPEIITRDG (SEQ ID NO: 105 of U.S. Pat. No. 9,624,274; herein SEQ ID NO: 1385), DISLTGDPVITASYL (SEQ ID NO: 106 of US9624274; herein SEQ ID NO: 1386), DISLIGDPVITA (SEQ ID NO: 107 of US9624274; herein SEQ ID NO: 1387), DQSIDFEIDSA (SEQ ID NO: 108 of U.S. Pat. No. 9,624,274; herein SEQ ID NO: 1388), KNVSEDLPLPTFSPTLLGDS (SEQ ID NO: 109 of U.S. Pat. No. 9,624,274; herein SEQ ID NO: 1389), KNVSEDLPLPT (SEQ ID NO: 110 of U.S. Pat. No. 9,624,274; herein SEQ ID NO: 1390), CDSGRVRTDAPD (SEQ ID NO: 111 of U.S. Pat. No. 9,624,274; herein SEQ ID NO: 1391), FPEFILLVDFLQSLS (SEQ ID NO: 112 of U.S. Pat. No. 9,624,274; herein SEQ ID NO: 1392), DAEFREIDSG (SEQ ID NO: 65 of US9624274; herein SEQ ID NO: 1393), HYAAAQWDFGNTMCQL (SEQ ID NO: 113 of U.S. Pat. No. 9,624,274; herein SEQ ID NO: 1394), YAAQWDFGNIMCQ (SEQ ID NO: 114 of U.S. Pat. No. 9,624,274; herein SEQ ID NO: 1395), RSQKEGLHYT (SEQ ID NO: 115 of U.S. Pat. No. 9,624,274; herein SEQ ID NO: 1396), SSRTPSDKPVAHWANPQAE (SEQ ID NO: 116 of US9624274; herein SEQ ID NO: 1397), SRTPSDKPVAIIWANP (SEQ ID NO: 117 of 059624274; herein SEQ ID NO: 1398), SSRIPSDKP (SEQ ID NO: 118 of U.S. Pat. No. 9,624,274; herein SEQ ID NO: 1399), NADGNVDYHMNSVP (SEQ ID NO: 119 of 059624274; herein SEQ ID NO: 1400), DGNVDYIEMNSV (SEQ ID NO: 120 of U.S. Pat. No. 9,624,274; herein SEQ ID NO: 1401), RSFKEFLQSSLRALRQ (SEQ ID NO: 121 of US9624274; herein SEQ ID NO: 1402); FKEFLQSSLRA (SEQ ID NO: 122 of US9624274; herein SEQ ID NO: 1403), or QTYPWAPQWGPD (SEQ ID NO: 123 of U.S. Pat. No. 9,624,274; herein SEQ ID NO: 1404).

[0103] In some embodiments, the AAV serotype may be, or may have a sequence as described in U.S. Pat. No. 9,475,845, the contents of which are herein incorporated by reference in their entirety, such as, but not limited to, AAV capsid proteins comprising modification of one or more amino acids at amino acid positions 585 to 590 of the native AAV2 capsid protein. Further the modification may result in, but not limited to, the amino acid sequence RGNRQA. (SEQ ID NO: 3 of U.S. Pat. No. 9,475,845; herein SEQ ID NO: 1405), SSSTDP (SEQ ID NO: 4 of U.S. Pat. No. 9,475,845; herein SEQ ID NO: 1406), SSNTAP (SEQ ID NO: 5 of U.S. Pat. No. 9,475,845; herein SEQ ID NO: 1407), SNSNLP (SEQ ID NO: 6 of 059475845; herein SEQ ID NO: 1408), SSTTAP (SEQ ID NO: 7 of U.S. Pat. No. 9,475,845; herein SEQ ID NO: 1409), AANTAA (SEQ ID NO: 8 of US9475845; herein SEQ ID NO: 1410), QQNTAP (SEQ ID NO: 9 of 059475845; herein SEQ ID NO: 1411); SAQAQA (SEQ ID NO: 10 of U.S. Pat. No. 9,475,845; herein SEQ ID NO: 1412), QANTGP (SEQ ID NO: 11 of 059475845; herein SEQ ID NO: 1413), NATTAP (SEQ ID NO: 12 of US9475845; herein SEQ ID NO: 1414), SSTAGP (SEQ ID NO: 13 and 20 of US9475845; herein SEQ ID NO: 1415), QQNTAA (SEQ ID NO: 14 of US9475845; herein SEQ ID NO: 1416), PSTAGP (SEQ ID NO: 15 of U.S. Pat. No. 9,475,845; herein SEQ ID NO: 1417), NQNTAP (SEQ ID NO: 16 of U.S. Pat. No. 9,475,845; herein SEQ ID NO: 1418), QAANAP (SEQ ID NO: 17 of U.S. Pat. No. 9,475,845; herein SEQ ID NO: 1419), SIVGLP (SEQ ID NO: 18 of U.S. Pat. No. 9,475,845; herein SEQ ID NO: 1420), AASTAA (SEQ ID NO: 19, and 27 of U.S. Pat. No. 9,475,845; herein SEQ ID NO: 1421), SQNTTA (SEQ ID NO: 21 of U.S. Pat. No. 9,475,845; herein SEQ ID NO: 1422), QQDTAP (SEQ ID NO: 22 of US9475845; herein SEQ ID NO: 1423), QTNTGP (SEQ ID NO: 23 of U.S. Pat. No. 9,475,845; herein SEQ ID NO: 1424), QTNGAP (SEQ ID NO: 24 of US9475845; herein SEQ ID NO: 1425), QQNAAP (SEQ ID NO: 25 of U.S. Pat. No. 9,475,845; herein SEQ ID NO: 1426), or AANTQA (SEQ ID NO: 26 of 059475845; herein SEQ ID NO: 1427). In some embodiments, the amino acid modification is a substitution at amino acid positions 262 through 265 in the native AAV2 capsid protein or the corresponding position in the capsid protein of another AAV with a targeting sequence. The targeting sequence may be, but is not limited to, any of the amino acid sequences, NGRAHA (SEQ ID NO: 38 of U.S. Pat. No. 9,475,845; herein SEQ ID NO: 1428), QPEHSST (SEQ ID NO: 39 and 50 of US9475845, herein SEQ ID NO: 1429), VNTANST (SEQ ID NO: 40 of 059475845; herein SEQ ID NO: 1430), HGPMQKS (SEQ ID NO: 41 of U.S. Pat. No. 9,475,845; herein SEQ ID NO: 1431), PITKPPLA (SEQ ID NO: 42 of 059475845; herein SEQ ID NO: 1432), IKNNEMW (SEQ ID NO: 43 of U.S. Pat. No. 9,475,845; herein SEQ ID NO: 1433), RNLDTPM (SEQ ID NO: 44 of U.S. Pat. No. 9,475,845; herein SEQ ID NO: 1434), VDSHRQS (SEQ ID NO: 45 of US9475845; herein SEQ ID NO: 1435), YDSKTKT (SEQ ID NO: 46 of 0S9475845; herein SEQ ID NO: 1436), SQLPHQK (SEQ ID NO: 47 of US9475845; herein SEQ ID NO: 1437), STMQQNT (SEQ ID NO: 48 of 0S9475845; herein SEQ ID NO: 1438), TERYMTQ (SEQ ID NO: 49 of US9475845; herein SEQ ID NO: 1439), DASLSTS (SEQ ID NO: 51 of U.S. Pat. No. 9,475,845; herein SEQ ID NO: 1440), DLPNKKT (SEQ ID NO: 52 of 059475845; herein SEQ ID NO: 1441), DLTAARL (SEQ ID NO: 53 of U.S. Pat. No. 9,475,845; herein SEQ ID NO: 1442), EPHQFNY (SEQ ID NO: 54 of 059475845; herein SEQ ID NO: 1443), EPQSNHT (SEQ ID NO: 55 of US9475845; herein SEQ ID NO: 1444), MSSWPSQ (SEQ ID NO: 56 of U.S. Pat. No. 9,475,845; herein SEQ ID NO: 1445), NPKHNAT (SEQ ID NO: 57 of U.S. Pat. No. 9,475,845; herein SEQ ID NO: 1446), PDGIVIRTT (SEQ ED NO: 58 of US9475845; herein SEQ ID NO: 1447), PNNNKTT (SEQ ID NO: 59 of U.S. Pat. No. 9,475,845; herein SEQ ID NO: 1448), QSTTHDS (SEQ ID NO: 60 of U.S. Pat. No. 9,475,845; herein SEQ ID NO: 1449), TGSKQKQ (SEQ ID NO: 61 of U.S. Pat. No. 9,475,845; herein SEQ ID NO: 1450), SLKHQAL (SEQ ID NO: 62 of U.S. Pat. No. 9,475,845; herein SEQ ID NO: 1451), SPIDGEQ (SEQ ID NO: 63 of US9475845; herein SEQ ID NO: 1452), WIFPWIQL (SEQ ID NO: 64 and 112 of U.S. Pat. No. 9,475,845; herein SEQ ID NO: 1453), CDCRGDCFC (SEQ ID NO: 65 of U.S. Pat. No. 9,475,845; herein SEQ ID NO: 1454), CNGRC (SEQ ID NO: 66 of U.S. Pat. No. 9,475,845; herein SEQ ID NO: 1455), CPRECES (SEQ ID NO: 67 of U.S. Pat. No. 9,475,845; herein SEQ ID NO: 1456), CTTHWGFTLC (SEQ ID NO: 68 and 123 of U.S. Pat. No. 9,475,845; herein SEQ ID NO: 1457), CGRRAGGSC (SEQ ID NO: 69 of U.S. Pat. No. 9,475,845; herein SEQ ID NO: 1458), CKGGRAKDC (SEQ ID NO: 70 of US9475845; herein SEQ ID NO: 1459), CVPELGHEC (SEQ ID NO: 71 and 115 of U.S. Pat. No. 9,475,845; herein SEQ ID NO: 1460), CRRETAWAK (SEQ ID NO: 72 of US9475845; herein SEQ ID NO: 1461), VSWFSHRYSPFAVS (SEQ ID NO: 73 of U.S. Pat. No. 9,475,845; herein SEQ ID NO: 1462), GYRDGYAGPILYN (SEQ ID NO: 74 of U.S. Pat. No. 9,475,845; herein SEQ ID NO: 1463), XXXYXXX (SEQ ID NO: 75 of U.S. Pat. No. 9,475,845; herein SEQ 11) NO: 1464), YXNW (SEQ ID NO: 76 of U.S. Pat. No. 9,475,845; herein SEQ ID NO: 1465), RPLPPLP (SEQ ID NO: 77 of U.S. Pat. No. 9,475,845; herein SEQ ID NO: 1466), APPLPPR (SEQ ID NO: 78 of U.S. Pat. No. 9,475,845; herein SEQ ID NO: 1467), DWYPYPYASGS (SEQ ID NO: 79 of U.S. Pat. No. 9,475,845; herein SEQ ID NO: 1468), MYWYPY (SEQ 1D NO: 80 of U.S. Pat. No. 9,475,845; herein SEQ ID NO: 1469), DITWDQLWDLMK (SEQ ID NO: 81 of U.S. Pat. No. 9,475,845; herein SEQ ID NO: 1470), CWDDXWLC (SEQ ID NO: 82 of US9475845; herein SEQ ID NO: 1471), EWCEYLGGYLRCYA (SEQ ID NO: 83 of US9475845; herein SEQ ID NO: 1472), YXCXXGPXTWXCXP (SEQ ID NO: 84 of US9475845; herein SEQ NO: 1473), IEGPTLRQWLAARA (SEQ ID NO: 85 of U.S. Pat. No. 9,475,845; herein SEQ ID NO: 1474), LWXXX (SEQ ID NO: 86 of U.S. Pat. No. 9,475,845; herein SEQ ID NO: 1475), XFXXYDAT (SEQ ID NO: 87 of U.S. Pat. No. 9,475,845; herein SEQ ID NO: 1476), SSIISHFRWGLCD (SEQ ID NO: 88 of U.S. Pat. No. 9,475,845; herein SEQ ID NO: 1477), MSRPACPPNDKYE (SEQ ID NO: 89 of US9475845; herein SEQ ID NO: 1478), CLRSGRGC (SEQ ID NO: 90 of U.S. Pat. No. 9,475,845; herein SEQ ID NO: 1479), CHWMFSPWC (SEQ ID NO: 91 of US9475845; herein SEQ ID NO: 1480), WXXF (SEQ ID NO: 92 of U.S. Pat. No. 9,475,845; herein SEQ ID NO: 1481), CSSRLDAC (SEQ ID NO: 93 of U.S. Pat. No. 9,475,845; herein SEQ ID NO: 1482), CLPVASC (SEQ ID NO: 94 of US9475845; herein. SEQ ID NO: 1483); CGFECVRQCPERC (SEQ ID NO: 95 of US9475845; herein SEQ ID NO: 1484), CVALCREACGEGC (SEQ ID NO: 96 of US9475845; herein SEQ ID NO: 1485), SWCEPGWCR (SEQ ID NO: 97 of US9475845; herein SEQ ID NO: 1486), YSGKWGW (SEQ ID NO: 98 of U.S. Pat. No. 9,475,845, herein SEQ ID NO: 1487), GLSGGRS (SEQ ID NO: 99 of U.S. Pat. No. 9,475,845; herein SEQ ID NO: 1488), LMLPRAD (SEQ ID NO: 100 of U.S. Pat. No. 9,475,845; herein SEQ ID NO: 1489), CSCFRDVCC (SEQ ID NO: 101 of U.S. Pat. No. 9,475,845; herein SEQ ID NO: 1490), CRDVVSVIC (SEQ ID NO: 102 of U.S. Pat. No. 9,475,845; herein SEQ ID NO: 1491), MARSGL (SEQ ID NO: 103 of US9475845; herein SEQ ID NO: 1492), MARAKE (SEQ ID NO: 104 of U.S. Pat. No. 9,475,845, herein SEQ ID NO: 1493), MSRTMS (SEQ ID NO: 105 of U.S. Pat. No. 9,475,845; herein SEQ ID NO: 1494), KCCYSL (SEQ ID NO: 106 of U.S. Pat. No. 9,475,845; herein SEQ ID NO: 1495), MYWGDSHWLQYWYE (SEQ ID NO: 107 of U.S. Pat. No. 9,475,845; herein SEQ ID NO: 1496), MQLPLAT (SEQ ID NO: 108 of US9475845; herein SEQ ID NO: 1497), EWLS (SEQ ID NO: 109 of U.S. Pat. No. 9,475,845; herein SEQ ID NO: 1498), SKEW (SEQ ID NO: 110 of U.S. Pat. No. 9,475,845, herein SEQ ID NO: 1499), 71NYL (SEQ ID NO: 111 of U.S. Pat. No. 9,475,845; herein SEQ ID NO: 1500), WDLAWMFRLPVG (SEQ ID NO: 113 of 059475845; herein SEQ ID NO: 1501), CTVALPGGYVRVC (SEQ ID NO: 114 of U.S. Pat. No. 9,475,845; herein SEQ ID NO: 1502), CVAYCIEHHCWTC (SEQ ID NO: 116 of U.S. Pat. No. 9,475,845; herein SEQ ID NO: 1503), CVFAHNYDYLVC (SEQ ID NO: 117 of 059475845; herein SEQ ID NO: 1504), CVFTSNYAFC (SEQ ID NO: 118 of U.S. Pat. No. 9,475,845; herein SEQ ID NO: 1505), VHSPNKK (SEQ ID NO: 119 of U.S. Pat. No. 9,475,845; herein SEQ ID NO: 1506), CRGDGWC (SEQ ID NO: 120 of U.S. Pat. No. 9,475,845; herein SEQ ID NO: 1507), XRGCDX (SEQ ID NO: 121 of U.S. Pat. No. 9,475,845; herein SEQ ID NO: 1508), PXXX (SEQ ID NO: 122 of U.S. Pat. No. 9,475,845; herein SEQ ID NO: 1509), SGKGPRQITAL (SEQ ID NO: 124 of U.S. Pat. No. 9,475,845; herein SEQ ID NO: 1510), AAAAAAAAAXXXXX (SEQ ID NO: 125 of 059475845; herein SEQ ID NO: 1511), VYMSPF (SEQ ID NO: 126 of U.S. Pat. No. 9,475,845, herein SEQ ID NO: 1512), ATWLPPR (SEQ ID NO: 127 of U.S. Pat. No. 9,475,845; herein SEQ ID NO: 1513), HTMYYHHVQHHL (SEQ ID NO: 128 of U.S. Pat. No. 9,475,845; herein SEQ ID NO: 1514), SEVGCRAGPLQWLCEKYFG (SEQ ID NO: 129 of U.S. Pat. No. 9,475,845, herein SEQ ID NO: 1515), CGLLPVGRPDRNVWRWLC (SEQ ID NO: 130 of U.S. Pat. No. 9,475,845, herein SEQ ID NO: 1516), CKGQCDRFKGLPWEC (SEQ ID NO: 131 of U.S. Pat. No. 9,475,845; herein SEQ ID NO: 1517), SGRSA (SEQ ID NO: 132 of 059475845; herein SEQ ID NO: 1518), WGFP (SEQ ID NO: 133 of U.S. Pat. No. 9,475,845; herein SEQ ID NO: 1519), AEPMPHSLNFSQYLWYT (SEQ ID NO: 134 of U.S. Pat. No. 9,475,845; herein SEQ ID NO: 1520), WAYXSP (SEQ ID NO: 135 of U.S. Pat. No. 9,475,845, herein SEQ ID NO: 1521), IELLQAR (SEQ ID NO: 136 of U.S. Pat. No. 9,475,845; herein SEQ ID NO: 1522), AYTKCSRQWRTCNITTIL (SEQ ID NO: 137 of US9475845; herein SEQ ID NO: 1523), PQNSKIPGPTELDPH (SEQ ID NO: 138 of U.S. Pat. No. 9,475,845; herein SEQ ID NO: 1524), SMEPALPDWWWKMFK (SEQ ID NO: 139 of US9475845; herein SEQ ID NO: 1525), ANTPCGPYTHDCPVKR (SEQ ID NO: 140 of U.S. Pat. No. 9,475,845; herein SEQ ID NO: 1526), TACHQEIVRIVIVRP (SEQ ID NO: 141 of 059475845; herein SEQ ID NO: 1527), VPWMEPAYQRFL (SEQ ID NO: 142 of 059475845; herein SEQ ID NO: 1528), DPRATPGS (SEQ ID NO: 143 of U.S. Pat. No. 9,475,845; herein SEQ ID NO: 1529), FRPNRAQDYNTN (SEQ ID NO: 144 of 059475845; herein SEQ ID NO: 1530), CIKNSYLMC (SEQ ID NO: 145 of 059475845; herein SEQ ID NO: 1531), CXXTXXXGXGC (SEQ ID NO: 146 of U.S. Pat. No. 9,475,845; herein SEQ ID NO: 1532), CPIEDRPMC (SEQ ID NO: 147 of US9475845; herein SEQ ID NO: 1533), HEWSYLAPYPWF (SEQ ID NO: 148 of U.S. Pat. No. 9,475,845; herein SEQ ID NO: 1534), MCPKHPLGC (SEQ ID NO: 149 of U.S. Pat. No. 9,475,845; herein SEQ ID NO: 1535), RMWPSSTVNLSAGRR (SEQ ID NO: 150 of U.S. Pat. No. 9,475,845; herein SEQ ID NO: 1536), SAKTAVSQRVWLPSHRGGEP (SEQ ID NO: 151 of U.S. Pat. No. 9,475,845; herein SEQ ID NO: 1537), KSREFIVNNSACPSKRITAAL (SEQ ID NO: 152 of U.S. Pat. No. 9,475,845; herein SEQ ID NO: 1538), EGFR (SEQ ID NO: 153 of U.S. Pat. No. 9,475,845; herein SEQ ID NO. 1539), AGLGVR (SEQ ID NO: 154 of 059475845; herein SEQ ID NO: 1540), GTRQGHTMRLGVSDG (SEQ ID NO: 155 of U.S. Pat. No. 9,475,845; herein SEQ ID NO: 1541), IAGLATPGWSHWLAL (SEQ ID NO: 156 of 059475845; herein SEQ ID NO: 1542), SMSIARL (SEQ ID NO: 157 of 059475845; herein SEQ ID NO: 1543), HTFEPGV (SEQ ID NO: 158 of 059475845; herein SEQ ID NO: 1544), NTSLKRISNKRIRRK (SEQ TD NO: 159 of U.S. Pat. No. 9,475,845; herein SEQ ID NO: 1545), LRIKRKRRKRKKTRK (SEQ ID NO: 160 of U.S. Pat. No. 9,475,845; herein SEQ ID NO: 1546), GGG, GFS, LWS, EGG, LIN, LSP, LBS, AGG, GRR, GGH and GIV.

[0104] In some embodiments, the AAV serotype may be, or may have a sequence as described in United States Publication No. US 20160369298, the contents of which are herein incorporated by reference in their entirety, such as, but not limited to, site-specific mutated capsid protein of AAV2 (SEQ ID NO: 97 of US 20160369298; herein SEQ ID NO: 1547) or variants thereof, wherein the specific site is at least one site selected from sites R447, 6453, S578, N587, N587+1, 5662 of VP1 or fragment thereof.

[0105] Further, any of the mutated sequences described in US 20160369298, may be or may have, but not limited to, any of the following sequences SDSGASN (SEQ ID NO: 1 and SEQ TD NO: 231 of 0520160369298; herein SEQ ID NO: 1548), SDSGASN (SEQ ID NO: 2 of US20160369298; herein SEQ ID NO: 1549), SDSGASN (SEQ ID NO: 3 of US20160369298; herein SEQ ID NO: 1550), SRSGASN (SEQ ID NO: 4 of US20160369298; herein SEQ ID NO: 1551), SKSGASN (SEQ ID NO: 5 of 0520160369298; herein SEQ ID NO: 1552), SDSGASN (SEQ ID NO: 6 of US20160369298; herein SEQ ID NO: 1553), SDSGASN (SEQ ID NO: 7 of US20160369298; herein SEQ ID NO: 1554), SASGASN (SEQ ID NO: 8, 175, and 221 of US20160369298; herein SEQ ID NO: 1555), SESGTSN (SEQ ID NO: 9 of US20160369298; herein SEQ ID NO: 1556), STTGGSN (SEQ ID NO: 10 of 0520160369298; herein SEQ TD NO: 1557), SSAGSTN (SEQ ID NO: 11 of US20160369298; herein SEC) ID NO: 1558), NNDSQA (SEQ ID NO: 12 of US20160369298; herein SEQ ID NO: 1559), NNRNQA (SEQ ID NO: 13 of US20160369298; herein SEQ 1D NO: 1560), NNNKQA (SEQ ID NO: 14 of US20160369298; herein SEQ ID NO: 1561), NAKRQA (SEQ ID NO: 15 of US20160369298; herein SEQ ID NO: 1562), NDEHQA (SEQ ID NO: 16 of US20160369298; herein SEQ ID NO: 1563), NTSQKA (SEQ ID NO: 17 of US20160369298; herein SEQ ID NO: 1564), YYLSRTNTPSGTDTQSRLVFSQAGA (SEC) ID NO: 18 of US20160369298; herein SEQ ID NO: 1565), YYLSRTNTDSGTETQSGLDFSQAGA (SEQ ID NO: 19 of US20160369298; herein SEQ ID NO: 1566), YYLSRTNTESGIPTQSALEFSQAGA. (SEQ ID NO: 20 of US20160369298; herein SEQ ID NO: 1567), YYLSRTNTHSGTHTQSPLHFSQAGA (SEQ ID NO: 21 of US20160369298; herein SEQ ID NO: 1568), YYLSRINTSSGTITISHUTSQAGA (SEQ ID NO: 22 of US20160369298; herein SEC) ID NO: 1569), YYLSRTNTRSGIMTKSSINIFSQAGA (SEQ ID NO: 23 of US20160369298; herein SEQ TD NO: 1570), YYLSRTNTKSGRKTLSNLSFSQACiA (SEQ ID NO: 24 of US20160369298; herein SEQ ID NO: 1571), YYLSRTNDGSGPVTPSKLRFSQRGA (SEQ ID NO: 25 of US20160369298; herein SEQ ID NO: 1572), YYLSRTNAASGHATHSDLKFSQPGA (SEQ ID NO: 26 of US20160369298; herein SEQ ID NO: 1573), YYLSWINGQAGSLIMSELGFSQVGA (SEQ ID NO: 27 of US20160369298; herein SEQ ID NO: 1574), YYLSRTNSTGGNQTTSQLLFSQLSA (SEQ ID NO: 28 of US20160369298; herein SEQ ID NO: 1575), YFLSRTNNNTGLNTNSTLNFSQGRA (SEQ ID NO: 29 of US20160369298; herein SEQ ID NO: 1576), SKTGADNNNSEYSWIG (SEQ ID NO: 30 of US20160369298; herein SEQ ID NO: 1577), SKTDADNNNSEYSWTG (SEQ ID NO: 31 of US20160369298; herein SEC) ID NO: 1578), SKTEADNNNSEYSWTG (SEC) ID NO: 32 of US20160369298; herein SEQ ID NO: 1579), SKTPADNNNSEYSWTG (SEQ ID NO: 33 of US20160369298; herein SEQ ID NO: 1580), SKTHADNNNSEYSNITIG (SEQ ID NO: 34 of US20160369298; herein SEQ ID NO: 1581), SKTQADNNNSEYSWTG (SEQ ID NO: 35 of US20160369298; herein SEQ ID NO: 1582), SKTIADNNNSEYSWTG (SEQ ID NO: 36 of US20160369298; herein SEC) ID NO: 1583), SKTMADNNNSEYSWTG (SEQ ID NO: 37 of US20160369298; herein SEQ ID NO: 1584), SKTRADNNNSEYSWTG (SEQ ID NO: 38 of US20160369298; herein SEQ ID NO: 1585), SKTNADNNNSEYSWIG (SEQ ID NO: 39 of US20160369298; herein SEQ ID NO: 1586), SKTVGRNNNSEYSWTG (SEQ ID NO: 40 of US20160369298; herein SEQ ID NO: 1587), SKTADRNNNSEYSWTG (SEQ ID NO: 41 of US20160369298; herein SEQ ID NO: 1588), SKKLSQNNNSKYSWQG (SEQ ID NO: 42 of US20160369298; herein SEQ ID NO: 1589), SKPTTGNNNSDYSWPG (SEQ TD NO: 43 of US20160369298; herein SEQ ID NO: 1590), STQKNENNNSNYSWPG (SEQ ID NO: 44 of US20160369298; herein SEQ ID NO: 1591), IIKDDEGKF (SEQ ID NO: 45 of US20160369298; herein SEQ ID NO: 1592), fiKDDNRKF (SEQ ID NO: 46 of US20160369298; herein SEQ ID NO: 1593), LIKDDTNKF (SEQ ID NO: 47 of US20160369298; herein SEQ ID NO: 1594), HEDSDKNF (SEQ ID NO: 48 of US20160369298; herein SEQ ID NO: 1595), EIRDGADSF (SEQ ID NO: 49 of US20160369298; herein SEQ ID NO: 1596), HGDNKSRF (SEQ ID NO: 50 of US20160369298; herein SEQ ID NO: 1597), KQGSEKTNVDFEEV (SEQ ID NO: 51 of US20160369298; herein SEQ ID NO: 1598), KQGSEKTNVDSEEV (SEQ ID NO: 52 of US20160369298; herein SEQ ID NO: 1599), KQGSEKTNVDVEEV (SEQ ID NO: 53 of US20160369298; herein SEQ ID NO: 1600), KQGSDKTNVDDAGV (SEQ ID NO: 54 of US20160369298; herein SEQ ID NO: 1601), KQGSSKTNVDPREV (SEQ ID NO: 55 of US20160369298; herein SEQ ID NO: 1602), KQGSRKTNVIDIIKQV (SEQ ID NO: 56 of US20160369298; herein SEQ ID NO: 1603), KQGSKGGNVDTNRV (SEQ ID NO: 57 of US20160369298; herein SEQ ID NO: 1604), KQGSGEANVDNGDV (SEQ ID NO: 58 of US20160369298; herein SEQ ID NO: 1605), KQDAAADNIDYINIV (SEQ ID NO: 59 of US20160369298; herein SEQ ID NO: 1606), KQSGTRSNAAASSV (SEQ ID NO: 60 of US20160369298; herein SEQ ID NO: 1607), KENTNTNDTELTNV (SEQ ID NO: 61 of US20160369298; herein SEQ ID NO: 1608), QRGNNVAATADVNT (SEQ ID NO: 62 of US20160369298; herein SEQ ID NO: 1609), QRGNNEAATADVNT (SEQ ID NO: 63 of US20160369298; herein SEQ ID NO: 1610), QRGNNPAATADVNT (SEQ ID NO: 64 of US20160369298; herein SEQ ID NO: 1611), QRGNNEIAATADVNT (SEQ ID NO: 65 of US20160369298; herein SEQ ID NO: 1612), QEENNIAATPGVNT (SEQ ID NO: 66 of US20160369298; herein SEQ ID NO: 1613), QPPNNMAATHEVNT (SEQ ID NO: 67 of US20160369298; herein SEQ ID NO: 1614), QIIHNNSAATTIVNT (SEQ ID NO: 68 of US20160369298; herein SEQ ID NO: 1615), QTTNNRAAFNMVET (SEQ ID NO: 69 of US20160369298; herein SEQ ID NO: 1616), QKKNNNAASKKVAT (SEQ ID NO: 70 of US20160369298; herein SEQ ID NO: 1617), QGGNNKAADDAVKT (SEQ ID NO: 71 of US20160369298; herein SEQ ID NO: 1618), QAAKGGAADDAVKT (SEQ ID NO: 72 of US20160369298; herein SEQ ID NO: 1619), QDDRAAAANESVDT (SEQ ID NO: 73 of US20160369298; herein SEQ ID NO: 1620), QQQIIDDAAYQRVIIT (SEQ ID NO: 74 of US20160369298; herein SEQ ID NO: 1621), QSSSSLAAVSTVQT (SEQ ID NO: 75 of US20160369298; herein SEQ ID NO: 1622), QNNQTTAAIRNVTT (SEQ ID NO: 76 of US20160369298; herein SEQ ID NO: 1623), NYNKKSDNVDFT (SEQ ID NO: 77 of US20160369298; herein SEQ ID NO: 1624), NYNKKSENVDFT (SEQ ID NO: 78 of US20160369298; herein SEQ ID NO: 1625), NYNKKSLNVDFT (SEQ ID NO: 79 of US20160369298; herein SEQ ID NO: 1626), NYNKKSPNVDFT (SEQ ID NO: 80 of US20160369298; herein SEQ ID NO: 1627), NYSKKSEICVDFT (SEQ ID NO: 81 of US20160369298; herein SEQ ID NO: 1628), NYRKTIYVDFT (SEQ ID NO: 82 of US20160369298; herein SEQ ID NO: 1629), NYKEKKDVHFT (SEQ ID NO: 83 of US20160369298; herein SEQ ID NO: 1630), NYGHRAIVQFT (SEQ ID NO: 84 of US20160369298; herein SEQ ID NO: 1631), NYANEIQFVVCT (SEQ ID NO: 85 of US20160369298; herein SEQ ID NO: 1632), NYDDDITIGVULT (SEQ ID NO: 86 of US20160369298; herein SEQ ID NO: 1633), NYDDPTGVLLT (SEQ ID NO: 87 of US20160369298; herein SEQ ID NO: 1634), NFEQQNSVEWI (SEQ ID NO: 88 of US20160369298; herein SEQ ID NO: 1635), SQSGASN (SEQ ID NO: 89 and SEQ ID NO: 241 of US20160369298; herein SEQ ID NO: 1636), NNGSQA (SEQ ID NO: 90 of US20160369298; herein SEQ ID NO: 1637), YYLSRTNTPSGYTWSRLQFSQAGA (SEQ ID NO: 91 of US20160369298; herein SEQ ID NO: 1638), SKTSADNNNSEYSWTG (SEQ ID NO: 92 of US20160369298; herein SEQ ID NO: 1639), HKDDEEKF (SEQ ID NO: 93, 209, 214, 219, 224, 234, 239, and 244 of US20160369298; herein SEQ ID NO: 1640), KQGSEKTNVDIEEV (SEQ ID NO: 94 of US20160369298; herein SEQ ID NO: 1641), QRGNNQAATADVNT (SEQ ID NO: 95 of US20160369298; herein SEQ ID NO: 1642), NYNKKSVNVDFT (SEQ ID NO: 96 of US20160369298; herein SEQ ID NO: 1643), SQSGASNYNTPSGTTTQSRLQFSTSADNNNSEYSWTGATKYH (SEQ ID NO: 0.06 of US20160369298; herein SEQ ID NO: 1644), SASGASNFNSEGGSLTQSSLGFSTDGENNNSDFSWTGATKYH (SEQ ID NO: 107 of US20160369298; herein SEQ ID NO: 1645), SQSGASNYNTPSGTTTQSRLQFSTDGENNNSDFSWTGATKYH (SEQ ID NO: 108 of US20160369298; herein SEQ ID NO: 1646), SASGASNYNTPSGTTTQSRLQFSTSADNNNSEFSWPGATFVE (SEQ ID NO: 109 of US20160369298; herein SEQ ID NO: 1647), SQSGASNFNSEGGSLTQSSLGFSTDGENNNSDFSWTGATKYIT (SEQ TD NO: 110 of US20160369298; herein SEQ ID NO: 1648), SASGASNYNTPSGSLTQSSLGFSTDGENNNSDFSWTGATKYH (SEQ ID NO: 111 of US20160369298; herein SEQ ID NO: 1649), SQSGASNYNTPSGTTTQSRLQFSTSADNNNSDFSWTGATKYH (SEQ ID NO: 112 of US20160369298; herein SEQ ID NO: 1650), SGAGASNYNSEGGSLTQSSLGFSTDGENNNSDFSWTGATKYH (SEQ ID NO: 113 of US20160369298; herein SEQ ID NO: 1651), SGAGASN (SEQ ID NO: 176 of US20160369298; herein SEQ ID NO: 1652), NSEGGSLTQSSLGFS (SEQ ID NO: 177, 185, 193 and 202 of US20160369298; herein SEQ ID NO: 1653), TDGENNNSDFS (SEQ ID NO: 178 of US20160369298; herein SEQ ID NO: 1654), SEFSWPGATT (SEQ ID NO: 179 of US20160369298; herein SEQ ID NO: 1655), TSADNNNSDFSWT (SEQ ID NO: 180 of US20160369298, herein SEQ ID NO: 1656), SQSGASNY (SEQ ID NO: 181, 187, and 198 of US20160369298; herein SEQ ID NO: 1657), NTPSGTTTQSRLQFS (SEQ ID NO: 182, 188, 191, and 199 of US20160369298; herein SEQ ID NO: 1658), TSADNNNSEYSWTGATKYH (SEQ ID NO: 183 of US20160369298; herein SEQ ID NO: 1659), SASGASNF (SEQ ID NO: 184 of US20160369298; herein SEQ ID NO: 1660), TDGENNNSDFSWEGATKYH (SEQ ID NO: 186, 189, 194, 197, and 203 of US20160369298; herein SEQ ID NO: 1661), SASGASNY (SEQ ID NO: 190 and SEQ ID NO: 195 of US20160369298; herein SEQ ID NO: 1662), TSADNNNSEFSWPGATTYH (SEQ ID NO: 192 of 0520160369298, herein SEQ ID NO: 1663), NTPSGSLTQSSLGFS (SEQ ID NO: 196 of US20160369298; herein SEQ ID NO: 1664), TSADNNNSDFSWIGATICYFI (SEQ ID NO: 200 of US20160369298; herein SEQ ID NO: 1665), SGAGASNF (SEQ ID NO: 201 of US20160369298; herein SEQ ID NO: 1666), CTCCAGVVSVVSMRSRVCVNSGCAGCTDHCVNTSRNSGTCVMSACACAA (SEQ ID NO: 204 of US20160369298; herein SEQ ID NO: 1667), CTCCAGAGAGGCAACAGACAAGCAGCTACCGCAGATGTCAACACACAA (SEQ ID NO: 205 of US20160369298, herein SEQ ID NO: 1668), SAAGASN (SEQ ID NO: 206 of US20160369298; herein SEQ ID NO: 1669), YFLSRTNTESGSTTQSTLRFSQAG (SEQ ID NO: 207 of US20160369298; herein SEQ ID NO: 1670), SKTSADNNNSDFS (SEQ ID NO: 208, 228, and 253 of US20160369298; herein SEQ ID NO: 1671), KQGSEKTDVDIDKV (SEQ ID NO: 210 of US20160369298; herein SEQ ID NO: 1672), STAGASN (SEQ ID NO: 211 of US20160369298; herein SEQ ID NO: 1673), V_{L}SRTNTTSGIETQSTLRFSQAG (SEQ ID NO: 212 and SEQ ID NO: 247 of US20160369298, herein SEQ ID NO: 1674), SKIDGENNNSDFS (SEQ ID NO: 213 and SEQ ID NO: 248 of US20160369298; herein SEQ ID NO: 1675), KQGAAADDVEIDGV (SEQ ID NO: 215 and SEQ ID NO: 250 of US20160369298, herein SEQ ID NO: 1676), SEAGASN (SEQ ID NO: 216 of US20160369298; herein SEQ ID NO: 1677), YYILSRTNTPSGTTTQSRISQFSQAG (SEQ ID NO: 217, 232 and 242 of US20160369298; herein SEQ ID NO: 1678), SKTSADNNNSEYS (SEQ ID NO: 218, 233, 238, and 243 of US20160369298; herein SEQ ID NO: 1679), KQGSEKTNVDIEKV (SEQ ID NO: 220, 225 and 245 of US20160369298; herein SEQ TD NO: 1680), YFLSRTNDASGSDIKSTLLFSQAG (SEQ ID NO: 222 of US20160369298; herein SEQ ID NO: 1681), STTPSENNNSEYS (SEQ ID NO: 223 of US20160369298; herein SEQ ID NO: 1682), SAAGATN (SEQ ID NO: 226 and SEQ ID NO: 251 of US20160369298; herein SEQ ID NO: 1683), YFLSRTNGEAGSATLSELRFSQAG (SEQ ID NO: 227 of US20160369298; herein SEQ ID NO: 1684), HGDDADRF (SEQ ID NO: 229 and SEQ ID NO: 254 of US20160369298; herein SEQ ID NO: 1685), KQGAFKSDVEVDRV (SEQ ID NO: 230 and SEQ ID NO: 255 of US20160369298; herein SEQ ID NO: 1686), KQDSGGDNIDIDQV (SEQ ID NO: 235 of US20160369298; herein SEQ ID NO: 1687), SDAGASN (SEQ ID NO: 236 of US20160369298; herein SEQ ID NO: 1688), YFLSRTNTEGGHDTQSTLRFSQAG(SEQ ID NO: 237 of US20160369298, herein SEQ ID NO: 1689), KEDGGGSDVAIDEV (SEQ ID NO: 240 of US20160369298; herein SEQ ID NO: 1690), SDAGASN (SEQ ID NO: 246 of 0S20160369298; herein SEQ ID NO: 1691), and YFLSRTNGEAGSATLSELRFSQPG (SEQ ID NO: 252 of US20160369298; herein SEQ ID NO: 1692), Non-limiting examples of nucleotide sequences that may encode the amino acid mutated sites include the following, AGCVVMDCAGGARSCASCAAC (SEQ ID NO: 97 of US20160369298; herein SEQ ID NO: 1693), AACRACRRSMRSMAGGCA (SEQ ID NO: 98 of US20160369298; herein SEQ ID NO: 1694), CACRRGGACRRCRMSRRSARSTTT (SEQ ID NO: 99 of US20160369298; herein SEQ ID NO: 1695), TATTTCTTGAGCAGAACAAACRVCVVSRSCGGAMNCVHSACGMHSTCAVVSCTTVDS TTTTCTCAGSBCRGSGCG (SEQ ID NO: 100 of US20160369298; herein SEQ ID NO: 1696), TCAAMANLMAVNSRVCSRSAACAACAACAGTRASTTCTCGTGGMMAGGA (SEQ ID NO: 101 of US20160369298; herein SEQ ID NO: 1697), AAGSAARRERSCRVSRVARVCRATRYCGMSNFICRVMVRSGTC (SEQ ID NO: 102 of US20160369298, herein SEQ ID NO: 1698), CAGVVSVVSMRSRVCVNSGCAGCTDHCVVSRNSGTCVMSACA (SEQ ID NO: 103 of US20160369298; herein SEQ ID NO: 1699), AACTWCRVSVASMVSVHSDDTGTGSWSTKSACT (SEQ ID NO: 104 of US20160369298; herein SEQ ID NO: 1700), TTGTTGAACATCACCACGTGACGCACGTTC (SEQ ID NO: 256 of US20160369298; herein SEQ ID NO: 1701), TCCCCGTGGTTCTACTACATAATGTGGCCG (SEQ ID NO: 257 of US20160369298; herein SEQ TD NO: 1702). TTCCACACTCCGTTTTGGATAATGTTGAAC (SEQ ID NO: 258 of US20160369298; herein SEQ ID NO: 1703), AGGGACATCCCCAGCTCCATGCTGTGGTCG (SEQ ID NO: 259 of US20160369298; herein SEQ ID NO: 1704), AGGGACAACCCCTCCGACTCGCCCTAATCC (SEQ ID NO: 260 of US20160369298; herein SEQ ID NO: 1705), TCCTAGTAGAAGACACCCTCTCACTGCCCG (SEQ ID NO: 261 of US20160369298; herein SEQ ID NO: 1706), AGTACCATGTACACCCACTCTCCCAGTGCC (SEQ ID NO: 262 of US20160369298; herein SEQ ID NO: 1707), ATATGGACGTTCATGCTGATCACCATACCG (SEQ ID NO: 263 of US20160369298; herein SEQ ID NO: 1708), AGCAGGAGCTCCTTGGCCTCAGCGTGCGAG (SEQ ID NO: 264 of US20160369298; herein SEQ ID NO: 1709), ACAAGCAGCTTCACTATGACAACCACTGAC (SEQ ID NO: 265 of US20160369298; herein SEQ ID NO: 1710), CAGCCTAGGAACTGGCTICCTGGACCCTGITACCGCCAGCAGAGAGTCTCAAMAMM AVNSRVCSRSAACAACAACAGTRASTTCTCCTGGMMAGGAGCTACCAAGTACCACC TCAATGGCAGAGACTCTCTGGTGAATCCCGGACCAGCTATGGCAAGCCACRRGGAC RRCRIVISRRSARSTTITTTCCTCAGAGCGGGGTTCTCATCTITGGGAAGSAARRCRSCR VSRVARVCRATRYCGMSNHCRVMVRSGTCATGATTACAGACGAAGAGGAQATCTGG AC (SEQ ID NO: 266 of 11520160369298; herein SEQ ID NO: 1711), TGGGACAATGGCGGTCGTCTCTCAGAGTTKTKKT (SEQ ID NO: 267 of US20160369298; herein SEQ ID NO: 1712), AGAGGACCKKTCCTCGATGGTTCATGGTGGAGTTA (SEQ ID NO: 268 of US20160369298; herein SEQ ID NO: 1713), CCACTTAGGGCCTGGTCGATACCGTTCGGTG (SEQ ID NO: 269 of US20160369298; herein SEQ ID NO: 1714), and TCTCGCCCCAAGAGTAGAAACCCTTCSTTYYG (SEQ ID NO: 270 of US20160369298; herein SEQ ID NO: 1715).

[0106] In some embodiments, the AAV serotype may comprise an ocular cell targeting peptide as described in International Patent Publication WO2016134375, the contents of which are herein incorporated by reference in their entirety, such as, but not limited to SEQ ID NO: 9, and SEQ ID N0:10 of WO2016134375. Further, any of the ocular cell targeting peptides or amino acids described in WO2016134375, may be inserted into any parent AAV serotype, such as, but not limited to, AAV2 (SEQ ID NO:8 of WO2016134375; herein SEQ ID NO: 1716), or AAV9 (SEQ ID NO: 11 of WO2016134375; herein SEQ ID NO: 1717). In some embodiments, modifications, such as insertions are made in AAV2 proteins at P34-A35, T138-A1.39, A139-P140, G453-1454, N587-R588, and/or R588-Q589. In certain embodiments, insertions are made at D384, G385, 1560, T561, N562, E563, E564, E565, N704, and/or Y705 of AAV9. The ocular cell targeting peptide may be, but is not limited to, any of the following amino acid sequences, GSTPPPM (SEQ ID NO: 1 of WO2016134375; herein SEQ ID NO: 1718), or GETRAPL (SEQ ID NO: 4 of WO20161.34375; herein SEQ ID NO: 1719).

[0107] In some embodiments, the AAV serotype may be modified as described in the United States Publication US 20170145405 the contents of which are herein incorporated by reference in their entirety. AAV serotypes may include, modified AAV2 (e.g., modifications at Y444F, Y500F, Y730F and/or 5662V), modified AAV3 (e.g., modifications at Y705F, Y731F and/or T492V), and modified AAV6 (e.g., modifications at 5663V and/or T492V).

[0108] In some embodiments, the AAV serotype may be modified as described in the International Publication WO2017083722 the contents of which are herein incorporated by reference in their entirety. AAV serotypes may include, AAV1 (Y705+731F+T492V); AAV2 (Y444+500+730F+T491V), AAV3 (Y705+731F), AAV5, AAV 5(Y436+693+719F), AAV6 (VP3 variant Y705F/Y731F/T492V), AAV8 (Y733F), AAV9, AAV9 (VP3 variant Y731F), and AAV10 (Y733F).

[0109] In some embodiments, the AAV serotype may comprise, as described in International Patent Publication WO2017015102, the contents of which are herein incorporated by reference in their entirety, an engineered epitope comprising the amino acids SPAKFA (SEQ ID NO: 24 of WO2017015102; herein SEQ ID NO: 1720) or NKDKLN (SEQ ID NO:2 of WO2017015102; herein SEQ ID NO: 1721). The epitope may be inserted in the region of amino acids 665 to 670 based on the numbering of the VP1 capsid of AAV8 (SEQ ID NO: 3 of WO2017015102) and/or residues 664 to 668 of AAV 313 (SEQ ID NO: 3).

[0110] In some embodiments, the AAV serotype may be, or may have a sequence as described in international Patent Publication WO2017058892, the contents of which are herein incorporated by reference in their entirety, such as, but not limited to, AAV variants with capsid proteins that may comprise a substitution at one or more (e.g., 2, 3, 4, 5, 6, or 7) of amino acid residues 262-268, 370-379, 451-459, 472-473, 493-500, 528-534, 547-552, 588-597, 709-710, 716-722 of AAV1, in any combination, or the equivalent amino acid residues in AAV2, AAV3, AAV4, AAV5, AAV6, AAV7, AAV8, AAV9, AAV10, AAV11, AAV12, AAVrh8, AAVrh10, AAVrh32.33, bovine AAV or avian AAV. The amino acid substitution may be, but is not limited to, any of the amino acid sequences described in WO2017058892. In some embodiments, the AAV may comprise an amino acid substitution at residues 256L, 258K, 259Q, 2615, 263A, 264S, 265T, 266G, 2721-I, 385S, 386Q, 5472R, V473D, N500E 547S, 709A, 710N, 716D, 717N, 718N, 720L, A456T, Q457T, N458Q, K4595, T4925, K493A, 55868, 5587G, 5588N, T589R and/or 722T of AAV1 (SEQ ID NO: 1 of WO2017058892) in any combination, 244N, 246Q, 248R, 249E, 2501, 251K, 252S, 253G, 254S, 255V, 2561, 263Y, 377E, 378N, 453L, 456R, 532Q, 533P, 535N, 536P, 537G, 538T, 539T, 540A, 541T, 542Y, 543L, 546N, 653V, 654P, 656S, 697Q, 698F, 704D, 705S, 706T, 707G, 708E, 709Y and; or 710R of AAV5 (SEQ ID NO:5 of WO2017058892) in any combination, 248R, 316V, 317Q, 318D, 319S, 443N, 530N, 5315, 532Q 533P, 534A, 535N, 540A, 541 T, 542Y, 5431, 545G, 546N, 697Q, 704D, 706T, 708E, 709Y and/or 710R of AAV5 (SEQ ID NO: 5 of WO2017058892) in any combination, 264S, 266G, 269N, 272H, 457Q, 588S and/or 5891 of AAV6 (SEQ ID NO:6 WO2017058892) in any combination, 457T, 459N, 496G, 499N, 500N, 589Q, 590N and/or 592A of AAV8 (SEQ ID NO: 8 WO2017058892) in any combination, 4511, 452N, 453G, 454S, 455G, 456Q, 457N and/or 458Q of AAV9 (SEQ ID NO: 9 WO2017058892) in any combination.

[0111] In some embodiments, the AAV may include a sequence of amino acids at positions 155, 156 and 157 of VP1 or at positions 17, 18, 19 and 20 of VP2, as described in International Publication No. WO 2017066764, the contents of which are herein incorporated by reference in their entirety. The sequences of amino acid may be, but not limited to, N-S-S, S-X-S, S-S-Y, N-X-S, N-S-Y, S-X-Y and N-X-Y, where N, X and Y are, but not limited to, independently non-serine, or non-threonine amino acids, wherein the AAV may be, but not limited to AAV1, AAV2, AAV3, AAV4, AAV5. AAV6, AAV7, AAV8, AAV9, AAV1.0, AAT 11 and AAV12. In some embodiments, the AAV may include a deletion of at least one amino acid at positions 156, 157 or 158 of VP1 or at positions 19, 20 or 21 of VP2, wherein the AAV may be, but not limited to AAV1, AAV2, AAV3, AAV4, AAV5, AAV6, AAV7, AAV8, AAV9, AAV10, AAV11 and AAV12.

[0112] In some embodiments, the AAV may be a serotype generated by Cre-recombination-based AAV targeted evolution (CREATE) as described by Deverman et al., (Nature Biotechnology 34(2):204209 (2016)), the contents of which are herein incorporated by reference in their entirety. In some embodiments, AAV serotypes generated in this manner have improved CNS transduction and/or neuronal and astrocytic tropism, as compared to other AAV serotypes. As non-limiting examples, the AAV serotype may include a peptide such as, but not limited to, PHP.B, PHP.B2, PHP.B3, PHP.A, G2A.12, G2A15, G2A3, 02134, and G2135, In some embodiments, these AAV serotypes may be AAV9 (SEQ ID NO: 9 or 136) derivatives with a 7-amino acid insert, between amino acids 588-589. Non-limiting examples of these 7-amino acid inserts include TLAVPFK (PHP.B; SEQ ID NO: 1260), SVSKPFL (PHP.B2; SEQ ID NO: 1268), FTLTTPK (PHP.B3; SEQ ID NO: 1269), YTLSQGW (PHP.A; SEQ ID NO: 1275), QAVRTSL (PHP.S; SEQ ID NO: 1319), LAKERLS G2A3; SEQ ID NO: 1320), MNSTKNV (G2B4; SEQ ID NO: 1321), and/or VSGGHHS (G2B5; SEQ ID NO: 1322).

[0113] In some embodiments, the AAV serotype may be as described in Jackson et al (Frontiers in Molecular Neuroscience 9:154 (2016)), the contents of which are herein incorporated by reference in their entirety. In some embodiments, the AAV serotype is PHP.B or AAV9. In some embodiments, the AAV serotype is paired with a synapsin promoter to enhance neuronal transduction, as compared to when more ubiquitous promoters are used (i.e., CBA or CMV).

[0114] In some embodiments, the AAV serotype is a serotype comprising the AAVPHP.N (PHP.N) peptide, or a variant thereof.

[0115] In some embodiments the AAV serotype is a serotype comprising the AAVPHP.B (PHP.B) peptide, or a variant thereof.

[0116] In some embodiments, the AAV serotype is a serotype comprising the AAVPHP.A (PHP.A) peptide, or a variant thereof.

[0117] In some embodiments, the AAV serotype is a serotype comprising the PHP.S peptide, or a variant thereof.

[0118] In some embodiments, the AAV serotype is a serotype comprising the PHP.B2 peptide, or a variant thereof.

[0119] In some embodiments, the AAV serotype is a serotype comprising the PHP.B3 peptide, or a variant thereof.

[0120] In some embodiments, the AAV serotype is a serotype comprising the G2B4 peptide, or a variant thereof.

[0121] In some embodiments, the AAV serotype is a serotype comprising the G2135 peptide, or a variant thereof.

[0122] In some embodiments the AAV serotype is VOY1.01, or a variant thereof.

[0123] In some embodiments, the AAV serotype is VOY201, or a variant thereof.

### Viral Genome Component: Inverted Terminal Repeats (ITRs)

[0124] The AAV particles of the present disclosure comprise a viral genome with at least one ITR region and a payload region. In some embodiments, the viral genome has two ITRs. These two Wits flank the payload region at the 5′ and 3′ ends. The ITRs function as origins of replication comprising recognition sites for replication. ITRs comprise sequence regions which can be complementary and symmetrically arranged. ITRs incorporated into viral genomes of the disclosure may be comprised of naturally occurring polynucleotide sequences or recombinantly derived polynucleotide sequences.

[0125] The ITRs may be derived from the same serotype as the capsid, selected from any of the serotypes listed in Table 1, or a derivative thereof. The ITR may be of a different serotype than the capsid. In some embodiments, the AAV particle has more than one ITR. In a non-limiting example, the AAV particle has a viral genome comprising two ITRs. In some embodiments, the ITRs are of the same serotype as one another. In another embodiment, the ITRs are of different serotypes. Non-limiting examples include zero, one or both of the ITRs having the same serotype as the capsid. In some embodiments both ITRs of the viral genome of the AAV particle are AAV2 ITRs.

[0126] Independently, each ITR may be about 100 to about 150 nucleotides in length. An ITR may be about 100-105 nucleotides in length, 106-110 nucleotides in length, 111-415 nucleotides in length, 116-120 nucleotides in length, 121-125 nucleotides in length, 126-130 nucleotides in length, 131-435 nucleotides in length, 136140 nucleotides in length, 141-445 nucleotides in length or 146-150 nucleotides in length. In some embodiments, the ITRs are 140-142 nucleotides in length. Non-limiting examples of ITR length are 102, 130, 140, 141, 142, 145 nucleotides in length, and those having at least 95% identity thereto.

[0127] In some embodiments, each ITR may be 141 nucleotides in length.

[0128] In some embodiments, each ITR may be 130 nucleotides in length.

[0129] In some embodiments, the AAV particles comprise two ITRs and one ITR is 141 nucleotides in length and the other ITR is 130 nucleotides in length.

### Viral Genome Component: Promoters

[0130] In some embodiments, the payload region of the viral genome comprises at least one element to enhance the transgene target specificity and expression (See e.g., Powell et al. Viral Expression Cassette Elements to Enhance Transgene Target Specificity and Expression in Gene Therapy, 2015; the contents of which are herein incorporated by reference in its entirety). Non-limiting examples of elements to enhance the transgene target specificity and expression include promoters, endogenous miRNAs, post-transcriptional regulatory elements (PREs), polyadenylation (PolyA) signal sequences and upstream enhancers (USEs), CMV enhancers and introns.

[0131] A person skilled in the art may recognize that expression of the polypeptides of the disclosure in a target cell may require a specific promoter, including but not limited to, a promoter that is species specific, inducible, tissue-specific, or cell cycle-specific (Parr et al., Nat. Med 3:1145-9 (1997); the contents of which are herein incorporated by reference in their entirety).

[0132] In some embodiments, the promoter is deemed to be efficient when it drives expression of the polypeptide(s) encoded in the payload region of the viral genome of the AAV particle.

[0133] In some embodiments, the promoter is a promoter deemed to be efficient when it drives expression in the cell being targeted.

[0134] In some embodiments, the promoter drives expression of the polypeptides of the disclosure (e.g., a functional antibody) for a period of time in targeted tissues. Expression driven by a promoter may be for a period of 1 hour, 2, hours, 3 hours, 4 hours, 5 hours, 6 hours, 7 hours, 8 hours, 9 hours, 10 hours, 11 hours, 12 hours, 13 hours, 14 hours, 15 hours, 16 hours, 17 hours, 18 hours, 19 hours, 20 hours, 21 hours, 22 hours, 23 hours, 1 day, 2 days, 3 days, 4 days, 5 days, 6 days, 1 week, 8 days, 9 days, 10 days, 11 days, 12 days, 13 days, 2 weeks, 15 days, 16 days, 17 days, 18 days, 19 days, 20 days, 3 weeks, 22 days, 23 days, 24 days, 25 days, 26 days, 27 days, 28 days, 29 days, 30 days, 31 days, 1 month, 2 months, 3 months, 4 months, 5 months, 6 months, 7 months, 8 months, 9 months, 10 months, 11 months, 1 year, 13 months, 14 months, 15 months, 16 months, 17 months, 18 months, 19 months, 20 months, 21 months, 22 months, 23 months, 2 years, 3 years, 4 years, 5 years, 6 years, 7 years, 8 years, 9 years, 10 years or more than 10 years. Expression may be for 1-5 hours, 1-12 hours, 1-2 days, 1-5 days, 1-2 weeks, 1-3 weeks, 1-4 weeks, 1-2 months, 1-4 months, 1-6 months, 2-6 months, 3-6 months, 3-9 months, 4-8 months, 6-12 months, 1-2 years, 1-5 years, 2-5 years, 3-6 years, 3-8 years, 4-8 years, or 5-10 years.

[0135] In some embodiments, the promoter drives expression of the polypeptides of the disclosure (e.g., a functional antibody) for at least 1 month, 2 months, 3 months, 4 months, 5 months, 6 months, 7 months, 8 months, 9 months, 10 months, 11 months, 1 year, 2 years, 3 years 4 years, 5 years, 6 years, 7 years, 8 years, 9 years, 10 years, 11 years, 12 years, 13 years, 14 years, 15 years, 16 years, 17 years, 18 years, 19 years, 20 years, 21 years, 22 years, 23 years, 24 years, 25 years, 26 years, 27 years, 28 years, 29 years, 30 years, 31 years, 32 years, 33 years, 34 years, 35 years, 36 years, 37 years, 38 years, 39 years, 40 years, 41 years, 42 years, 43 years, 44 years, 45 years, 46 years, 47 years, 48 years, 49 years, 50 years, 55 years, 60 years, 65 years, or more than 65 years.

[0136] Promoters may be naturally occurring or non-naturally occurring. Non-limiting examples of promoters include viral promoters, plant promoters and mammalian promoters. In some embodiments, the promoters may be human promoters. In some embodiments, the promoter may be truncated.

[0137] Promoters which drive or promote expression in most tissues include, but are not limited to, human elongation factor 1α-subunit (EF1α), cytomegalovirus (CMV) immediate-early enhancer and/or promoter, chicken β-actin (CBA) and its derivative CAG, β glucuronidase (GUSB), or ubiquitin C(UBC). Tissue-specific expression elements can be used to restrict expression to certain cell types such as, but not limited to, muscle specific promoters, B cell promoters, monocyte promoters, leukocyte promoters, macrophage promoters, pancreatic acinar cell promoters, endothelial cell promoters, lung tissue promoters, astrocyte promoters, or nervous system promoters which can be used to restrict expression to neurons, astrocytes, or oligodendrocytes.

[0138] Non-limiting examples of muscle-specific promoters include mammalian muscle creatine kinase (NICK) promoter, mammalian desmin (DES) promoter, mammalian troponin I (TNNI2) promoter, and mammalian skeletal alpha-actin (ASKA) promoter (see, e.g. U.S. Patent Publication US20110212529 the contents of which are herein incorporated by reference in their entirety)

[0139] Non-limiting examples of tissue-specific expression elements for neurons include neuron-specific enolase (NSE), platelet-derived growth factor (PDGF), platelet-derived growth factor B-chain (PDGF-β), synapsin (Syn), methyl-CpG binding protein 2 (MeCP2), Ca²⁺/calmodulin-dependent protein kinase II (CaMKII), metabotropic glutamate receptor 2 (mGluR2), neurofilament light (NFL) or heavy (NFH), β-globin minigene nβ2, preproenkephalin (PPE), enkephalin (Enk) and excitatory amino acid transporter 2 (EAAT2) promoters. Non-limiting examples of tissue-specific expression elements for astrocytes include glial fibrillary acidic protein (GFAP) and EAAT2 promoters. A non-limiting example of a tissue-specific expression element for oligodendrocytes includes the myelin basic protein (MBP) promoter.

[0140] In some embodiments, the promoter may be less than 1 kb. The promoter may have a length of 200, 210, 220, 230, 240, 250, 260, 270, 280, 290, 300, 310, 320, 330, 340, 350, 360, 370, 380, 390, 400, 410, 420, 430, 440, 450, 460, 470, 480, 490, 500, 510, 520, 530, 540, 550, 560, 570, 580, 590, 600, 610, 620, 630, 640, 650, 660, 670, 680, 690, 700, 710, 720, 730, 740, 750, 760, 770, 780, 790, 800, or more than 800 nucleotides. The promoter may have a length between 200-300, 200-400, 200-500, 200-600, 200-700, 200-800, 300-400, 300-500, 300-600, 300-700, 300-800, 400-500, 400-600, 400-700, 400-800, 500-600-500-700, 500-800, 600-700, 600-800, or 700-800.

[0141] In some embodiments, the promoter may be a combination of two or more components of the same or different starting or parental promoters such as, but not limited to, CMV and CBA. Each component may have a length of 200, 210, 220, 230, 240, 250, 260, 270, 280, 290, 300, 310, 320, 330, 340, 350, 360, 370, 380, 381, 382, 383, 384, 385, 386, 387, 388, 389, 390, 400, 410, 420, 430, 440, 450, 460, 470, 480, 490, 500, 510, 520, 530, 540, 550, 560, 570, 580, 590, 600, 610, 620, 630, 640, 650, 660, 670, 680, 690, 700, 710, 720, 730, 740, 750, 760, 770, 780, 790, 800, or more than 800. Each component may have a length between 200-300, 200-400, 200-500, 200-600, 200-700, 200-800, 300-400, 300-500, 300-600, 300-700, 300-800, 400-500, 400-600, 400-700, 400-800, 500-600, 500-700, 500-800, 600-700, 600-800 or 700-800. In some embodiments, the promoter is a combination of a 382 nucleotide CMV-enhancer sequence and a 260 nucleotide CBA-promoter sequence.

[0142] In some embodiments, the viral genome comprises a ubiquitous promoter. Non-limiting examples of ubiquitous promoters include CMV, CBA (including derivatives CAG, CBh, etc.), EF-1α, PGK, UBC, GUSB (hGBp), and UCOE (promoter of HNRPA2B1-CBX3).

[0143] Yu et al. (Molecular Pain 2011, 7:63; the contents of which are herein incorporated by reference in their entirety) evaluated the expression of eGFP under the CAG, and UBC promoters in rat DRG cells and primary DRG cells using lentiviral vectors and found that UBC showed weaker expression than the other 3 promoters and only 1012% glial expression was seen for all promoters. Soderblom et al. (E. Neuro 2015; the contents of which are herein incorporated by reference in its entirety) evaluated the expression of eGFP in AAV8 with CMV and UBC promoters and AAV2 with the CMV promoter after injection in the motor cortex. Intranasal administration of a plasmid containing a UBC or EFIα promoter showed a sustained airway expression greater than the expression with the CMV promoter (See e.g., Gill et al., Gene Therapy 2001, Vol. 8, 1539-1546; the contents of which are herein incorporated by reference in their entirety). Husain et al. (Gene Therapy 2009; the contents of which are herein incorporated by reference in its entirety) evaluated an HβH construct with a hGUSB promoter, a HSV-1LAT promoter and an NSE promoter and found that the HβH construct showed weaker expression than NSE in mouse brain. Passini and Wolfe (J. Virol. 2001, 12382-12392, the contents of which are herein incorporated by reference in its entirety) evaluated the long-term effects of the HβH vector following an intraventricular injection in neonatal mice and found that there was sustained expression for at least 1 year. Low expression in all brain regions was found by Xu et al. (Gene Therapy 2001, 8, 1323-1332; the contents of which are herein incorporated by reference in their entirety) when NFL and NFH promoters were used as compared to the CMV-lacZ, CMV-luc, EF, GFAP, hENK, nAChR, PPE, PPE+wpre, NSE (0.3 kb), NSE (1.8 kb) and NSE (1.8 kb+wpre). Xu et al. found that the promoter activity in descending order was NSE (1.8 kb), EF, NSE (0.3 kb), GFAP, CMV, hENK, PPE, NFL and NFH. NFL is a 650nucleotide promoter and NFH is a 920 nucleotide promoter which are both absent in the liver but NFH is abundant in the sensory proprioceptive neurons, brain and spinal cord and MIT is present in the heart. Scn8a is a 470 nucleotide promoter which expresses throughout the DRG, spinal cord and brain with particularly high expression seen in the hippocampal neurons and cerebellar Purkinje cells, cortex, thalamus, and hypothalamus (See e.g., Drews et al. Identification of evolutionary conserved functional noncoding elements in the promoter region of the sodium channel gene SCN8A, Mamm Genome (2007) 18:723-731; and Raymond et al. Expression of Alternatively Spliced Sodium Channel α-subunit genes, Journal of Biological Chemistry (2004) 279(44) 46234-46241; the contents of each of which are herein incorporated by reference in their entireties).

[0144] Any of promoters taught by the aforementioned Yu, Soderblom, Gill, Husain, Passini, Xu, Drews, or Raymond may be used.

[0145] In some embodiments, the promoter is not cell specific.

[0146] In some embodiments, the promoter is a ubiquitin c (UBC) promoter. The UBC promoter may have a size of 300-350 nucleotides. As a non-limiting example, the UBC promoter is 332 nucleotides.

[0147] In some embodiments, the promoter is a P-glucuronidase (GUSB) promoter. The GUS:13 promoter may have a size of 350-400 nucleotides. As a non-limiting example, the GUSB promoter is 378 nucleotides.

[0148] In some embodiments, the promoter is a neurofilament light (NFL) promoter. The NFL promoter may have a size of 600700 nucleotides. As a non-limiting example, the NFL, promoter is 650 nucleotides.

[0149] In some embodiments, the promoter is a neurofilament heavy (NFH) promoter. The NFH promoter may have a size of 900-950 nucleotides. As a non-limiting example, the NFL promoter is 920 nucleotides.

[0150] In some embodiments, the promoter is a scn8a promoter. The scn8a promoter may have a size of 450-500 nucleotides. As a non-limiting example, the scn8a promoter is 470 nucleotides.

[0151] In some embodiments, the promoter is a phosphoglycerate kinase 1 (PGK) promoter.

[0152] In some embodiments, the promoter is a chicken β-actin (CBA) promoter.

[0153] In some embodiments, the promoter is a CB6 promoter.

[0154] In some embodiments, the promoter is a minimal CB promoter.

[0155] In some embodiments, the promoter is a cytomegalovirus (CMV) promoter.

[0156] In some embodiments, the promoter i s a CAG promoter.

[0157] In some embodiments, the promoter is a GFAP promoter.

[0158] In some embodiments, the promoter is a synapsin promoter.

[0159] In some embodiments, the promoter is a liver or a skeletal muscle promoter. Non-limiting examples of liver promoters include human α-1-antitrypsin (hAAT) and thyroxine binding globulin (TBG). Non-limiting examples of skeletal muscle promoters include Desmin, MCK or synthetic C5-12.

[0160] In some embodiments, the promoter is a RNA pol III promoter. As a non-limiting example, the RNA pol III promoter is U6. As a non-limiting example, the RNA pol III promoter is H1.

[0161] In some embodiments, the viral genome comprises two promoters. As a non-limiting example, the promoters are an EF1α promoter and a CMV promoter.

[0162] In some embodiments, the viral genome comprises an enhancer element, a promoter and/or a 5′UTR intron. The enhancer element, also referred to herein as an “enhancer,” may be, but is not limited to, a CMV enhancer, the promoter may be, but is not limited to, a CMV, CBA, UBC, GUSB, NSE, Synapsin, MeCP2, and GFAP promoter and the 5′UTR/intron may be, but is not limited to, SV40, and CBA-MVM. As a non-limiting example, the enhancer, promoter and/or intron used in combination may be: (1) CMV enhancer, CMV promoter, SA/40 5′UTR intron; (2) CMV enhancer, CBA promoter, SV 40 5′ UTR intron; (3) CMV enhancer, CBA promoter, CBA-MVM 5′UTR intron; (4) UBC promoter; (5) GUSB promoter; (6) NSE promoter; (7) Synapsin promoter; (8) MeCP2 promoter; and (9) GFAP promoter.

[0163] In some embodiments, the viral genome comprises an engineered promoter.

[0164] In another embodiment, the viral genome comprises a promoter from a naturally expressed protein.

### Viral Genome Component: Untranslated Regions (UTRs)

[0165] By definition, wild type untranslated regions (UTRs) of a gene are transcribed but not translated. Generally, the 5′ UTR starts at the transcription start site and ends at the start codon and the 3′ UTR starts immediately following the stop codon and continues until the termination signal for transcription.

[0166] Features typically found in abundantly expressed genes of specific target organs may be engineered into UTRs to enhance the stability and protein production. As a non-limiting example, a 5′ UTR from mRNA normally expressed in the liver (e.g., albumin, serum amyloid A, Apolipoprotein A/B/E, transferrin, alpha fetoprotein, erythropoietin, or Factor VIII) may be used in the viral genomes of the AAV particles of the disclosure to enhance expression in hepatic cell lines or liver.

[0167] While not wishing to be bound by theory, wild-type 5′ untranslated regions (UTRs) include features which play roles in translation initiation. Kozak sequences, which are commonly known to be involved in the process by which the ribosome initiates translation of many genes, are usually included in 5′ UTRs. Kozak sequences have the consensus CCR(A/G)CCAUGG, where R is a purine (adenine or guanine) three bases upstream of the start codon (ATG), which is followed by another ‘G’.

[0168] In some embodiments, the 5′UTR in the viral genome includes a Kozak sequence.

[0169] In some embodiments, the 5′UTR in the viral genome does not include a Kozak sequence.

[0170] While not wishing to be bound by theory, wild-type 3′ UTRs are known to have stretches of Adenosines and Uridines embedded therein. These AU rich signatures are particularly prevalent in genes with high rates of turnover. Based on their sequence features and functional properties, the AU rich elements (AREs) can be separated into three classes (Chen et al, 1995, the contents of which are herein incorporated by reference in its entirety): Class I AREs, such as, but not limited to, c-Myc and MyoD, contain several dispersed copies of an AUUUA motif within U-rich regions. Class II AREs, such as, but not limited to, GM-CSF and TNF-α, possess two or more overlapping UUAUUUA(U/A)(U/A) nonamers. Class III ARES, such as, but not limited to, c-Jun and Myogenin, are less well defined. These U rich regions do not contain an AUUUA motif. Most proteins binding to the AREs are known to destabilize the messenger, whereas members of the ELAV family, most notably HuR, have been documented to increase the stability of mRNA. HuR binds to AREs of all the three classes. Engineering the HuR specific binding sites into the 3′ UTR of nucleic acid molecules will lead to HuR binding and thus, stabilization of the message in vivo.

[0171] Introduction, removal or modification of 3′ UTR AU rich elements (AREs) can be used to modulate the stability of polynucleotides. When engineering specific polynucleotides, e.g., payload regions of viral genomes, one or more copies of an ARE can be introduced to make polynucleotides less stable and thereby curtail translation and decrease production of the resultant protein. Likewise, AREs can be identified and removed or mutated to increase the intracellular stability and thus increase translation and production of the resultant protein.

[0172] In some embodiments, the 3′ UTR of the viral genome may include an oligo(dT) sequence for templated addition of a poly-A tail.

[0173] In some embodiments, the viral genome may include at least one miRNA seed, binding site or full sequence microRNAs (or miRNA or miR) are 19-25 nucleotide noncoding RNAs that bind to the sites of nucleic acid targets and down-regulate gene expression either by reducing nucleic acid molecule stability or by inhibiting translation. A microRNA sequence comprises a “seed” region, i.e., a sequence in the region of positions 2-8 of the mature microRNA, which sequence has perfect Watson-Crick complementarity to the miRNA target sequence of the nucleic acid.

[0174] In some embodiments, the viral genome may be engineered to include, alter or remove at least one miRNA binding site, sequence, or seed region.

[0175] Any UTR from any gene known in the art may be incorporated into the viral genome of the AAV particle. These UTRs, or portions thereof, may be placed in the same orientation as in the gene from which they were selected or they may be altered in orientation or location. In some embodiments, the UTR used in the viral genome of the AAV particle may be inverted, shortened, lengthened, made with one or more other 5′ UTRs or 3′ UTRs known in the art. As used herein, the term “altered” as it relates to a UTR, means that the UTR has been changed in some way in relation to a reference sequence. For example, a 3′ or 5′ UTR may be altered relative to a wild type or native UTR by the change in orientation or location as taught above or may be altered by the inclusion of additional nucleotides, deletion of nucleotides, swapping or transposition of nucleotides.

[0176] In some embodiments, the viral genome of the AAV particle comprises at least one artificial UTRs which is not a variant of a wild type UTR.

[0177] In some embodiments, the viral genome of the AAV particle comprises UTRs which have been selected from a family of transcripts whose proteins share a common function, structure, feature or property.

### Viral Genome Component: Polyadenylation Sequence

[0178] In some embodiments, the viral genome of the AAV particles of the present disclosure comprise at least one polyadenylation sequence. The viral genome of the AAV particle may comprise a polyadenylation sequence between the 3′ end of the payload coding sequence and the 5′ end of the 3′ITR.

[0179] In some embodiments, the polyadenylation sequence or “polyA sequence” may range from absent to about 500 nucleotides in length. The polyadenylation sequence may be, but is not limited to, 1, 2, 3, 4, 5, 6, 7, 8, 9, 10, 11, 12, 13, 14, 15, 16, 17, 18, 19, 20, 21, 22, 23, 24, 25, 26, 27, 28, 29, 30, 31, 32, 33, 34, 35, 36, 37, 38, 39, 40, 41, 42, 43, 44, 45, 46, 47, 48, 49, 50, 51, 52, 53, 54, 55, 56, 57, 58, 59, 60, 61, 62, 63, 64, 65, 66, 67, 68, 69, 70, 71, 72, 73, 74, 75, 76, 77, 78, 79, 80, 81, 82, 83, 84, 85, 86, 87, 88, 89, 90, 91, 92, 93, 94, 95, 96, 97, 98, 99, 100, 101, 102, 103, 104, 105, 106, 107, 108, 109, 110, 111, 112, 113, 114, 115, 116, 117, 118, 119, 120, 121, 122, 123, 124, 125, 126, 127, 128, 129, 130, 131, 132, 133, 134, 135, 136, 137, 138, 139, 140, 141, 142, 143, 144, 145, 146, 147, 148, 149, 150, 151, 152, 153, 154, 155, 156, 157, 158, 159, 160, 161, 162, 163, 164, 165, 166, 167, 168, 169, 170, 171, 172, 173, 174, 175, 176, 177, 178, 179, 180, 181, 182, 183, 184, 185, 186, 187, 188, 189, 190, 191, 192, 193, 194, 195, 196, 197, 198, 199, 200, 201, 202, 203, 204, 205, 206, 207, 208, 209, 210, 211, 212, 213, 214, 215, 216, 217, 218, 219, 220, 221, 222, 223, 224, 225, 226, 227, 228, 229, 230, 231, 232, 233, 234, 235, 236, 237, 238, 239, 240, 241, 242, 243, 244, 245, 246, 247, 248, 249, 250, 251, 252, 253, 254, 255, 256, 257, 258, 259, 260, 261, 262, 263, 264, 265, 266, 267, 268, 269, 270, 271, 272, 273, 274, 275, 276, 277, 278, 279, 280, 281, 282, 283, 284, 285, 286, 287, 288, 289, 290, 291, 292, 293, 294, 295, 296, 297, 298, 299, 300, 301, 302, 303, 304, 305, 306, 307, 308, 309, 310, 311, 312, 313, 314, 315, 316, 317, 318, 319, 320, 321, 322, 323, 324, 325, 326, 327, 328, 329, 330, 331, 332, 333, 334, 335, 336, 337, 338, 339, 340, 341, 342, 343, 344, 345, 346, 347, 348, 349, 350, 351, 352, 353, 354, 355, 356, 357, 358, 359, 360, 361, 362, 363, 364, 365, 366, 367, 368, 369, 370, 371, 372, 373, 374, 375, 376, 377, 378, 379, 380, 381, 382, 383, 384, 385, 386, 387, 388, 389, 390, 391, 392, 393, 394, 395, 396, 397, 398, 399, 400, 401, 402, 403, 404, 405, 406, 407, 408, 409, 410, 411, 412, 413, 414, 415, 416, 417, 418, 419, 420, 421, 422, 423, 424, 425, 426, 427, 428, 429, 430, 431, 432, 433, 434, 435, 436, 437, 438, 439, 440, 441, 442, 443, 444, 445, 446, 447, 448, 449, 450, 451, 452, 453, 454, 455, 456, 457, 458, 459, 460, 461, 462, 463, 464, 465, 466, 467, 468, 469, 470, 471, 472, 473, 474, 475, 476, 477, 478, 479, 480, 481, 482, 483, 484, 485, 486, 487, 488, 489, 490, 491, 492, 493, 494, 495, 496, 497, 498, 499, 500, 501, 502, 503, 504, 505, 506, 507, 508, 509, 510, 511, 512, 513, 514, 515, 516, 517, 518, 519, 520, 521, 522, 523, 524, 525, 526, 527, 528, 529, 530, 531, 532, 533, 534, 535, 536, 537, 538, 539, 540, 541, 542, 543, 544, 545, 546, 547, 548, 549, 550, 551, 552, 553, 554, 555, 556, 557, 558, 559, 560, 561, 562, 563, 564, 565, 566, 567, 568, 569, 570, 571, 572, 573, 574, 575, 576, 577, 578, 579, 580, 581, 582, 583, 584, 585, 586, 587, 588, 589, 590, 591, 592, 593, 594, 595, 596, 597, 598, 599, and 600 nucleotides in length.

[0180] In some embodiments, the polyadenylation sequence is 50-100 nucleotides in length.

[0181] In some embodiments, the polyadenylation sequence is 50-150 nucleotides in length.

[0182] In some embodiments, the polyadenylation sequence is 50-160 nucleotides in length.

[0183] In some embodiments, the polyadenylation sequence is 50-200 nucleotides in length.

[0184] In some embodiments, the polyadenylation sequence is 60-100 nucleotides in length.

[0185] In some embodiments, the polyadenylation sequence is 60-150 nucleotides in length.

[0186] In some embodiments, the polyadenylation sequence is 60-160 nucleotides in length.

[0187] In some embodiments, the polyadenylation sequence is 60-200 nucleotides in length.

[0188] In some embodiments, the polyadenylation sequence is 70-100 nucleotides in length.

[0189] In some embodiments, the polyadenylation sequence is 70-150 nucleotides in length.

[0190] In some embodiments, the polyadenylation sequence is 70-160 nucleotides in length.

[0191] In some embodiments, the polyadenylation sequence is 70-200 nucleotides in length.

[0192] In some embodiments, the polyadenylation sequence is 80-100 nucleotides in length.

[0193] In some embodiments, the polyadenylation sequence is 80-150 nucleotides in length.

[0194] In some embodiments, the polyadenylation sequence is 80-160 nucleotides in length.

[0195] In some embodiments, the polyadenylation sequence is 80-200 nucleotides in length.

[0196] In some embodiments, the polyadenylation sequence is 90-100 nucleotides in length.

[0197] In some embodiments, the polyadenylation sequence is 90-150 nucleotides in length.

[0198] In some embodiments, the polyadenylation sequence is 90-160 nucleotides in length.

[0199] In some embodiments, the polyadenylation sequence is 90-200 nucleotides in length.

[0200] In some embodiments, the polyadenylation sequence is 127 nucleotides in length.

[0201] In some embodiments, the polyadenylation sequence is 477 nucleotides in length.

[0202] In some embodiments, the polyadenylation sequence is 552 nucleotides in length.

### Viral Genome Component: Linkers

[0203] Viral genomes of the disclosure may be engineered with one or more spacer or linker regions to separate coding or non-coding regions.

[0204] In some embodiments, the payload region of the AAV particle may optionally encode one or more linker sequences. In some cases, the linker may be a peptide linker that may be used to connect the polypeptides encoded by the payload region (i.e., light and heavy antibody chains during expression). Some peptide linkers may be cleaved after expression to separate heavy and light chain domains, allowing assembly of mature antibodies or antibody fragments. Linker cleavage may be enzymatic. In some cases, linkers comprise an enzymatic cleavage site to facilitate intracellular or extracellular cleavage. Some payload regions encode linkers that interrupt polypeptide synthesis during translation of the linker sequence from an mRNA transcript. Such linkers may facilitate the translation of separate protein domains (e.g., heavy and light chain antibody domains) from a single transcript. In some cases, two or more linkers are encoded by a payload region of the viral genome. Non-limiting examples of linkers that may be encoded by the payload region of an AAV particle viral genome are given in Table 2.

TABLE 2
Linkers

| | | SEQ ID |
|---|---|---|
| Lin- | | NO or |
| ker | | SE- |
| No. | Description | QUENCE |
| L1 | Internal ribosome entry site (IRES) | 1724 |
| L2 | Foot and mouth disease virus 2A (F2A) | 1725 |
| L3 | Porcine teschovirus-1 virus 2A (P2A) | 1726 |
| L4 | Furin cleavage site (F) | 1727 |
| L5 | 5xG4S (“5xG4S” amino acid sequence | 1728 |
| | disclosed as SEQ ID NO: 32689) | |
| L6 | Furin-foot and mouth disease virus 2A (F.F2A) | 1729 |
| L7 | Furin-porcine teschovirus-1 virus 2A (F.P2A) | 1730 |
| L8 | Furin cleavage site variant (F1) | 1731 |
| L9 | Furin Thoseaasigna virus 2A (Furin2A) | 1732 |
| L10 | G4S (“G4S” amino acid sequence | 1733 |
| | disclosed as SEQ ID NO: 2443) | |
| L11 | G4S3 (“G4S3” amino acid sequence | 1734 |
| | disclosed as SEQ ID NO: 2449) | |
| L12 | hIgG2 hinge | 1735 |
| L13 | hIgG3 hinge | 1736 |
| L14 | hIgG3-2 hinge | 1737 |
| L15 | hIgG3-3 hinge | 1738 |
| L16 | IRES-2 | 1739 |
| L17 | msiGG-1 hinge | 1740 |
| L18 | msiGG1 hinge | 1741 |
| L19 | Thoseaasigna virus 2A (T2A) | 1742 |
| L20 | 1,4-alpha-glucan-branching enzyme | CHP |
| L21 | 1,4-alpha-glucan-branching enzyme | 1743 |
| L22 | 1,4-beta-N-acetylmuramidase | FKK |
| L23 | 1,4-beta-N-acetylmuramidase | 1744 |
| L24 | 1,4-beta-N-acetylmuramidase | 1745 |
| L25 | 1,4-beta-N-acetylmuramidase | 1746 |
| L26 | 1.4-beta-N-acetylmuramidase | 1747 |
| L27 | 1,4-beta-N-acetylmuramidase | 1748 |
| L28 | 1,4-beta-N-acetylmuramidase | 1749 |
| L29 | 1,4-beta-N-acetylmuramidase | 1750 |
| L30 | 1,4-beta-N-acetylmuramidase | 1751 |
| L31 | 1,4-beta-N-acetylmuramidase | 1752 |
| L32 | 1,4-beta-N-acetylmuramidase | 1753 |
| L33 | 150aa long hypothetical transcriptional regulator | 1754 |
| L34 | 150aa long hypothetical transcriptional regulator | 1755 |
| L35 | 1-deoxy-D-xylulose 5-phosphate reductoisomerase | 1756 |
| L36 | 1-deoxy-D-xylulose 5-phosphate reductoisomerase | 1757 |
| L37 | 1-deoxy-D-xylulose 5-phosphate reductoisomerase | 1758 |
| L38 | 1-deoxy-D-xylulose 5-phosphate reductoisomerase | 1759 |
| L39 | 235aa long hypothetical biotin- | 1760 |
| | [acetyl-CoA-carboxylase] ligase | |
| L40 | 235aa long hypothetical biotin- | 1761 |
| | [acetyl-CoA-carboxylase] ligase | |
| L41 | 235aa long hypothetical biotin- | 1762 |
| | [acetyl-CoA-carboxylase] ligase | |
| L42 | 2-dehydropantoate 2-reductase | 1763 |
| L43 | 2-dehydropantoate 2-reductase | 1764 |
| L44 | 2-dehydropantoate 2-reductase | 1765 |
| L45 | 2-dehydropantoate 2-reductase | 1766 |
| L46 | 2-dehydropantoate 2-reductase | 1767 |
| L47 | 2-dehydropantoate 2-reductase | 1768 |
| L48 | 2-dehydropantoate 2-reductase, putative | 1769 |
| L49 | 2-dehydropantoate 2-reductase, putative | 1770 |
| L50 | 4-alpha-glucanotransferase | 1771 |
| L51 | 4-alpha-glucanotransferase | 1772 |
| L52 | 4-alpha-glucanotransferase | 1773 |
| L53 | 4-diphosphocytidyl-2C-methyl-D-erythritol kinase | HAA |
| L54 | 4-diphosphocytidyl-2C-methyl-D-erythritol kinase | 1774 |
| L55 | 4-diphosphocytidyl-2C-methyl-D-erythritol kinase | 1775 |
| L56 | 4-diphosphocytidyl-2C-methyl-D-erythritol kinase | 1776 |
| L57 | 4-diphosphocytidyl-2C-methyl-D-erythritol kinase | 1777 |
| L58 | 4-hydroxyphenylpyruvate dioxygenase | 1778 |
| L59 | 5-13 amino acids from the N termini | 1779 |
| | of human Ck and CH1 domains linker | |
| L60 | 5-13 amino acids from the N termini | ERK |
| | of human Ck and CH1 domains linker | |
| L61 | 5-13 amino acids from the N termini | 1780 |
| | of human Ck and CH1 domains linker | |
| L62 | 5-13 amino acids from the N termini | 1781 |
| | of human Ck and CH1 domains linker | |
| L63 | 5-13 amino acids from the N termini | 1782 |
| | of human Ck and CH1 domains linker | |
| L64 | 5-13 amino acids from the N termini | 1783 |
| | of human Ck and CH1 domains linker | |
| L65 | 5′-exonuclease | 1784 |
| L66 | 5-methyltetrahydropteroyltriglutamate— | ARL |
| | homocysteinemethyltransferase | |
| L67 | 5-methyltetrahydropteroyltriglutamate | 1785 |
| | homocysteinemethyltransferase | |
| L68 | 5-methyltetrahydropteroyltriglutamate | 1786 |
| | homocysteinemethyltransferase | |
| L69 | 5-methyltetrahydropteroyltriglutamate | 1787 |
| | homocysteinemethyltransferase | |
| L70 | 5-methyltetrahydropteroyltriglutamate | 1788 |
| | homocysteinemethyltransferase | |
| L71 | 5′-nucleotidase | 1789 |
| L72 | 5′-nucleotidase | 1790 |
| L73 | 5′-nucleotidase | 1791 |
| L74 | 5′-nucleotidase | 1792 |
| L75 | 704aa long hypothetical glycosyltransferase | 1793 |
| L76 | 704aa long hypothetical glycosyltransferase | 1794 |
| L77 | 80 kDa nuclear cap binding protein | 1795 |
| L78 | 80 kDa nuclear cap binding protein | 1796 |
| L79 | 80 kDa nuclear cap binding protein | 1797 |
| L80 | 80 kDa nuclear cap binding protein | 1798 |
| L81 | Acetaldehyde dehydrogenase (acylating) | 1799 |
| L82 | Acetaldehyde dehydrogenase (acylating) | 1800 |
| L83 | Acetolactate synthase isozyme III small subunit | 1801 |
| L84 | Acetylcholine receptor protein, alpha chain | 1802 |
| L85 | Acetylcholine receptor protein, beta chain | 1803 |
| L86 | Aconitate hydratase 2 | 1804 |
| L87 | Aconitate hydratase 2 | 1805 |
| L88 | Aconitate hydratase 2 | 1806 |
| L89 | Aconitate hydratase 2 | 1807 |
| L90 | Aconitate hydratase 2 | 1808 |
| L91 | Acriflavine resistance protein B | DWY |
| L92 | Acriflavine resistance protein B | GGS |
| L93 | Acriflavine resistance protein B | IDQ |
| L94 | Acriflavine resistance protein B | NKV |
| L95 | Acriflavine resistance protein B | SEA |
| L96 | Acriflavine resistance protein B | 1809 |
| L97 | Acriflavine resistance protein B | 1810 |
| L98 | Acriflavine resistance protein B | 1811 |
| L99 | Acriflavine resistance protein B | 1812 |
| L100 | Acriflavine resistance protein B | 1813 |
| L101 | Acriflavine resistance protein B | 1814 |
| L102 | Acriflavine resistance protein B | 1815 |
| L103 | Acriflavine resistance protein B | 1816 |
| L104 | Acriflavine resistance protein B | 1817 |
| L105 | Acriflavine resistance protein B | 1818 |
| L106 | Acriflavine resistance protein B | 1819 |
| L107 | Acriflavine resistance protein B | 1820 |
| L108 | Acriflavine resistance protein B | 1821 |
| L109 | Acriflavine resistance protein B | 1822 |
| L110 | Acriflavine resistance protein B | 1823 |
| L111 | Acriflavine resistance protein B | 1824 |
| L112 | Acriflavine resistance protein B | 1825 |
| L113 | Acriflavine resistance protein B | 1826 |
| L114 | Acriflavine resistance protein B | 1827 |
| L115 | Acriflavine resistance protein B | 1828 |
| L116 | Acriflavine resistance protein B | 1829 |
| L117 | Acriflavine resistance protein B | 1830 |
| L118 | Acriflavine resistance protein B | 1831 |
| L119 | Acriflavine resistance protein B | 1832 |
| L120 | Acyl-CoA thioesterase II | 1833 |
| L121 | Acyl-CoA thioesterase II | 1834 |
| L122 | Acvl-CoA thioesterase II | 1835 |
| L123 | Acvl-CoA thioesterase II | 1836 |
| L124 | Acyl-CoA thioesterase II | 1837 |
| L125 | Acyl-coenzyme A thioesterase 4 | 1838 |
| L126 | Acyl-coenzyme A thioesterase 4 | 1839 |
| L127 | Acvl-coenzyme A thioesterase 4 | 1840 |
| L128 | Acyl-coenzyme A thioesterase 4 | 1841 |
| L129 | Acyl-coenzyme A thioesterase 4 | 1842 |
| L130 | Adenine glycosylase | 1843 |
| L131 | Adenylate cyclase | 1844 |
| L132 | Aerolysin | 1845 |
| L133 | Aerolysin | 1846 |
| L134 | Agglutinin | DWK |
| L135 | Agglutinin isolectin 1 | 1847 |
| L136 | Agglutinin isolectin 1 | 1848 |
| L137 | Aldehyde ferredoxin oxidoreductase | 1849 |
| L138 | Aldehyde oxidoreductase | 1850 |
| L139 | Aldehyde oxidoreductase | 1851 |
| L140 | Aldehyde oxidoreductase | 1852 |
| L141 | Aldehyde oxidoreductase | 1853 |
| L142 | Aldehyde oxidoreductase | 1854 |
| L143 | Alkyl hydroperoxide reductase subunit F | 1855 |
| L144 | Alkyl hydroperoxide reductase subunit F | 1856 |
| L145 | Alkyl hydroperoxide reductase subunit F | 1857 |
| L146 | Alkyl hydroperoxide reductase subunit F | 1858 |
| L147 | Alkyl hydroperoxide reductase subunit F | 1859 |
| L148 | Alkyl hydroperoxide reductase subunit F | 1860 |
| L149 | Alkyl hydroperoxide reductase subunit F | 1861 |
| L150 | Alkyl hydroperoxide reductase subunit F | 1862 |
| L151 | Alkyl hydroperoxide reductase subunit F | 1863 |
| L152 | Alkyl hydroperoxide reductase subunit F | 1864 |
| L153 | Allantoicase | 1865 |
| L154 | Allantoicase | 1866 |
| L155 | Alliin lyase 1 | SAV |
| L156 | Alliin lyase 1 | 1867 |
| L157 | Alliin lyase 1 | 1868 |
| L158 | Alliin lyase 1 | 186 |
| L159 | Alliin lyase 1 | 1870 |
| L160 | Alpha amylase | 1871 |
| L161 | Alpha amylase | 1872 |
| L162 | Alpha-actinin 1 | 1873 |
| L163 | Alpha-actinin 1 | 187 |
| L164 | Alpha-adaptin C | 1875 |
| L165 | Alpha-amylase | 1876 |
| L166 | Alpha-glucuronidase | LSD |
| L167 | Alpha-glucuronidase | 1877 |
| L168 | Alpha-glucuronidase | 1878 |
| L169 | Alpha-glucuronidase | 1879 |
| L170 | Alpha-glucuronidase | 1880 |
| L171 | Alpha-glucuronidase | 1881 |
| L172 | Alpha-glucuronidase | 1882 |
| L173 | Alpha-glucuronidase | 1883 |
| L174 | Alpha-glucuronidase | 1884 |
| L175 | Alpha-glucuronidase | 1885 |
| L176 | Alpha-glucuronidase | 1886 |
| L177 | Alpha-glucuronidase | 1887 |
| L178 | Alpha-glucuronidase | 1888 |
| L179 | Alpha-glucuronidase | 1889 |
| L180 | Alpha-glucuronidase | 1890 |
| L181 | Alpha-glucuronidase | 1891 |
| L182 | Alpha-glucuronidase | 1892 |
| L183 | Alpha-glucuronidase | 1893 |
| L184 | Alpha-glucuronidase | 1894 |
| L185 | Alpha-glucuronidase | 1895 |
| L186 | Alpha-glucuronidase | 1896 |
| L187 | Alpha-glucuronidase | 1897 |
| L188 | Alpha-L-arabinofuranosidase B | 1898 |
| L189 | Alpha-mannosidase | 1899 |
| L190 | Alr2269 protein | 1900 |
| L191 | AMP nucleosidase | 1901 |
| L192 | AMP nucleosidase | 1902 |
| L193 | AMP nucleosidase | 1903 |
| L194 | Angiopoietin-1 receptor | DAG |
| L195 | Angiopoietin-1 receptor | NSG |
| L196 | Angiopoietin-1 receptor | TSA |
| L197 | Angiopoietin-1 receptor | VPR |
| L198 | Angiopoietin-1 receptor | 1904 |
| L199 | Angiopoietin-1 receptor | 1905 |
| L200 | Angiopoietin-1 receptor | 1906 |
| L201 | Angiopoietin-1 receptor | 1907 |
| L202 | Angiopoietin-1 receptor | 1908 |
| L203 | Angiopoietin-1 receptor | 1909 |
| L204 | Angiopoietin-1 receptor | 1910 |
| L205 | Angiopoietin-1 receptor | 1911 |
| L206 | Angiopoietin-1 receptor | 1912 |
| L207 | Angiopoietin-1 receptor | 1913 |
| L208 | Angiopoietin-1 receptor | 1914 |
| L209 | Angiopoietin-1 receptor | 1915 |
| L210 | Angiopoietin-1 receptor | 1916 |
| L211 | Angiopoietin-1 receptor | 1917 |
| L212 | Angiopoietin-1 receptor | 1918 |
| L213 | Angiopoietin-1 receptor | 1919 |
| L214 | Angiopoietin-1 receptor | 1920 |
| L215 | Angiopoietin-1 receptor | 1921 |
| L216 | Angiopoietin-1 receptor | 1922 |
| L217 | Angiopoietin-1 receptor | 1923 |
| L218 | Angiopoietin-1 receptor | 1924 |
| L219 | Annexin A2 | QNK |
| L220 | Annexin A2 | 1925 |
| L221 | Annexin A2 | 1926 |
| L222 | Anthranilate phosphoribosyltransferase | 1927 |
| L223 | AP-2 complex subunit beta-2 | 1928 |
| L224 | Archaeosine tRNA-guanine transglycosylase | LGI |
| L225 | Archaeosine tRNA-guanine transglycosylase | 1929 |
| L226 | Archaeosine tRNA-guanine transglycosylase | 1930 |
| L227 | Archaeosine tRNA-guanine transglycosylase | 1931 |
| L228 | Archaeosine tRNA-guanine transglycosylase | 1932 |
| L229 | Archaeosine tRNA-guanine transglycosylase | 1933 |
| L230 | Archaeosine tRNA-guanine transglycosylase | 1934 |
| L231 | Archaeosine tRNA-guanine transglycosylase | 1935 |
| L232 | Archeal exosome RNA binding protein rrp4 | 1936 |
| L233 | Archeal exosome RNA binding protein rrp4 | 1937 |
| L234 | Archeal exosome RNA binding protein rrp4 | 1938 |
| L235 | Arginyl-tRNA synthetase | IDY |
| L236 | Arginyl-tRNA synthetase | 1939 |
| L237 | Arginyl-tRNA synthetase | 1940 |
| L238 | Arginyl-tRNA synthetase | 1941 |
| L239 | Arrestin | 1942 |
| L240 | Arrestin | 1943 |
| L241 | Arsenite oxidase | 1944 |
| L242 | Artificial linker | PGS |
| L243 | Artificial linker | ATK |
| L24 | Artificial linker | ASK |
| L245 | Artificial linker | 1945 |
| L246 | Artificial linker | 1946 |
| L247 | Artificial linker | 1947 |
| L248 | Artificial linker | 1948 |
| L249 | Artificial linker | 1949 |
| L250 | Artificial linker | 1950 |
| L251 | ATP phosphoribosyltransferase | ANR |
| L252 | ATP-dependent DNA helicase | YDP |
| L253 | ATP-dependent DNA helicase | 1951 |
| L254 | ATP-dependent DNA helicase | 1952 |
| L255 | ATP-dependent DNA helicase | 1953 |
| L256 | ATP-dependent DNA helicase | 1954 |
| L257 | ATP-dependent DNA helicase | 1955 |
| L258 | ATP-dependent DNA helicase | 1956 |
| L259 | ATP-dependent DNA helicase | 1957 |
| L260 | ATP-dependent DNA helicase | 1958 |
| L261 | AT-rich DNA-binding protein | 1959 |
| L262 | AT-rich DNA-binding protein | 1960 |
| L263 | Axonin-1 | DEG |
| L264 | Axonin-1 | ECF |
| L265 | Axonin-1 | 1961 |
| L266 | Axonin-1 | 1962 |
| L267 | Axonin-1 | 1963 |
| L268 | Axonin-1 | 1964 |
| L269 | Axonin-1 | 1965 |
| L270 | Axonin-1 | 1966 |
| L271 | Axonin-1 | 1967 |
| L272 | Bacilysin biosynthesis protein BacB | 1968 |
| L273 | Bacilysin biosynthesis protein BacB | 1969 |
| L274 | Bacilysin biosynthesis protein BacB | 1970 |
| L275 | Bacilysin biosynthesis protein BacB | 1971 |
| L276 | Bacilysin biosynthesis protein BacB | 1972 |
| L277 | Bacteriophage Mu transposase | 1973 |
| L278 | Bacteriophage Mu transposase | 1974 |
| L279 | Benzoyl-CoA-dihydrodiol lyase | 1975 |
| L280 | Benzoyl-CoA-dihydrodiol lyase | 1976 |
| L281 | Benzoyl-CoA-dihydrodiol lyase | 1977 |
| L282 | Benzoyl-CoA-dihydrodiol lyase | 1978 |
| L283 | Benzoyl-CoA-dihydrodiol lyase | 1979 |
| L284 | Benzoylformate decarboxylase | 1980 |
| L285 | Benzoylformate decarboxylase | 1981 |
| L286 | Benzoylformate decarboxylase | 1982 |
| L287 | Beta-amylase | 1983 |
| L288 | Beta-galactosidase | AIS |
| L289 | Beta-galactosidase | 1984 |
| L290 | Beta-galactosidase | 1985 |
| L291 | Beta-galactosidase | 1986 |
| L292 | Beta-galactosidase | 1987 |
| L293 | Beta-galactosidase | 1988 |
| L294 | Beta-galactosidase | 1989 |
| L295 | Beta-galactosidase | 1990 |
| L296 | Beta-galactosidase | 1991 |
| L297 | Beta-galactosidase | 1992 |
| L298 | Beta-galactosidase | 1993 |
| L299 | Beta-galactosidase | 1994 |
| L300 | Beta-galactosidase | 1995 |
| L301 | Beta-galactosidase | 1996 |
| L302 | Beta-galactosidase | 1997 |
| L303 | Beta-galactosidase | 1998 |
| L304 | Beta-galactosidase | 1999 |
| L305 | Beta-galactosidase | 2000 |
| L306 | Beta-galactosidase | 2001 |
| L307 | Beta-galactosidase | 2002 |
| L308 | Beta-galactosidase | 2003 |
| L309 | Beta-galactosidase | 2004 |
| L310 | Beta-galactosidase | 2005 |
| L311 | Beta-N-acetylhexosaminidase | QRE |
| L312 | Beta-N-acetylhexosaminidase | 2006 |
| L313 | Beta-N-acetylhexosaminidase | 2007 |
| L314 | Beta-N-acetylhexosaminidase | 2008 |
| L315 | Bifunctional NMN | 2009 |
| | adenylyltransferase/Nudix hydrolase | |
| L316 | Bifunctional purine biosynthesis | 2010 |
| | protein PURH | |
| L317 | Biliverdin reductase A | EHV |
| L318 | Biliverdin reductase A | LME |
| L319 | Biliverdin reductase A | 2011 |
| L320 | Biliverdin reductase A | 2012 |
| L321 | Biodegradative arginine decarboxylase | TVQ |
| L322 | Biodegradative arginine decarboxylase | 2013 |
| L323 | Biodegradative arginine decarboxylase | 2014 |
| L324 | Biodegradative arginine decarboxylase | 2015 |
| L325 | Biodegradative arginine decarboxylase | 2016 |
| L326 | Biodegradative arginine decarboxylase | 2017 |
| L327 | Biodegradative arginine decarboxylase | 2018 |
| L328 | Biodegradative arginine decarboxylase | 2019 |
| L329 | Biodegradative arginine decarboxylase | 2020 |
| L330 | Biodegradative arginine decarboxylase | 2021 |
| L331 | Biodegradative arginine decarboxylase | 2022 |
| L332 | Biodegradative arginine decarboxylase | 2023 |
| L333 | Biodegradative arginine decarboxylase | 2024 |
| L334 | Biotin carboxylase | 2025 |
| L335 | Bowman-Birk trypsin inhibitor | 2026 |
| L336 | Bpt4 gene 59 helicase assembly protein | KQI |
| L337 | BRCA1-associated RING domain protein 1 | 2027 |
| L338 | BRCA1-associated RING domain protein 1 | 2028 |
| L339 | BRCA1-associated RING domain protein 1 | 2029 |
| L340 | Breast cancer 2 | 2030 |
| L341 | Breast cancer 2 | 2031 |
| L342 | Breast cancer 2 | 2032 |
| L343 | Breast cancer 2 | 2033 |
| L344 | Breast cancer 2 | 2034 |
| L345 | Breast cancer 2 | 2035 |
| L346 | Butyrate response factor 2 | 2036 |
| L347 | C4b-binding protein | YKR |
| L348 | C4b-binding protein | 2037 |
| L349 | C5a peptidase | 2038 |
| L350 | C5a peptidase | 2039 |
| L351 | C5a peptidase | 2040 |
| L352 | C5a peptidase | 2041 |
| L353 | C5a peptidase | 2042 |
| L354 | C5a peptidase | 2043 |
| L355 | C5a peptidase | 2044 |
| L356 | C5a peptidase | 2045 |
| L357 | C5a peptidase | 2046 |
| L358 | C5a peptidase | 2047 |
| L359 | C5a peptidase | 2048 |
| L360 | C5a peptidase | 2049 |
| L361 | C5a peptidase | 2050 |
| L362 | Calcium-binding protein | 2051 |
| L363 | CarA | 2052 |
| L364 | CarA | 2053 |
| L365 | Carbamoyl phosphate synthetase (small chain) | 2054 |
| L366 | Carbamoyl phosphate synthetase (small chain) | 2055 |
| L367 | Carbamoyl phosphate synthetase (small chain) | 2056 |
| L368 | Carbamoyl phosphate synthetase (small chain) | 2057 |
| L369 | Carbamovl phosphate synthetase (small chain) | 2058 |
| L370 | Carbon monoxide dehydrogenase/ | 2059 |
| | acetyl-CoA synthase subunitalpha | |
| L371 | Carboxypeptidase Gp180 residues 503-882 | HRG |
| L372 | Catabolite activation-like protein | 2060 |
| L373 | Catabolite activation-like protein | 2061 |
| L374 | Catechol 2,3-dioxygenase | 2062 |
| L375 | Cation-independent mannose | 2063 |
| | 6-phosphate receptor | |
| L376 | CD3 epsilon and gamma ectodomain | 2064 |
| | fragment complex | |
| L377 | CD3 epsilon and gamma ectodomain | 2065 |
| | fragment complex | |
| L378 | Cell filamentation protein | SNP |
| L379 | Cell filamentation protein | 2066 |
| L380 | Cell filamentation protein | 2067 |
| L381 | Cellular coagulation factor XIII zymogen | DIT |
| L382 | Cellular coagulation factor XIII zymogen | NSD |
| L383 | Cellular coagulation factor XIII zymogen | TDT |
| L384 | Cellular coagulation factor XIII zymogen | 2068 |
| L385 | Cellular coagulation factor XIII zymogen | 2069 |
| L386 | Cellular coagulation factor XIII zymogen | 2070 |
| L387 | Cellular coagulation factor XIII zymogen | 2071 |
| L388 | Cellular coagulation factor XIII zymogen | 2072 |
| L389 | Cellular coagulation factor XIII zymogen | 2073 |
| L390 | Cellular coagulation factor XIII zymogen | 2074 |
| L391 | Cellular coagulation factor XIII zymogen | 2075 |
| L392 | Cellular coagulation factor XIII zymogen | 2076 |
| L393 | Cellular coagulation factor XIII zymogen | 2077 |
| L394 | Cellular coagulation factor XIII zymogen | 2078 |
| L395 | Cellular coagulation factor XIII zymogen | 2079 |
| L396 | Cellular coagulation factor XIII zymogen | 2080 |
| L397 | Cellular coagulation factor XIII zymogen | 2081 |
| L398 | Cellular coagulation factor XIII zymogen | 2082 |
| L399 | Cellular coagulation factor XIII zymogen | 2083 |
| L400 | Cellular coagulation factor XIII zymogen | 2084 |
| L401 | Cellular coagulation factor XIII zymogen | 2085 |
| L402 | Cellular coagulation factor XIII zymogen | 2086 |
| L403 | Cellulase | 2087 |
| L404 | Cellulase | 2088 |
| L405 | Cellulase | 2089 |
| L406 | Cellulase | 2090 |
| L407 | Cellulase | 2091 |
| L408 | Cellulase | 2092 |
| L409 | Cellulase | 2093 |
| L410 | Cellulase | 2094 |
| L411 | Cellulase | 2095 |
| L412 | Cellulase linker | 2096 |
| L413 | Cellulase linker | 2097 |
| L414 | Cellulase linker | 2098 |
| L415 | Cellulase linker | 2099 |
| L416 | Chaperone protein FimC | KLR |
| L417 | Chaperone protein FimC | QAA |
| L418 | Chaperone protein FimC | 2100 |
| L419 | Chaperone protein FimC | 2101 |
| L420 | Chaperone protein HscB | RHP |
| L421 | Chaperone protein HscB | 2102 |
| L422 | CheB methylesterase | 2103 |
| L423 | CheB methylesterase | 2104 |
| L424 | CheB methylesterase | 2105 |
| L425 | Chelatase, putative | 2106 |
| L426 | Chemotaxis receptor methyltransferase cheR | 2107 |
| L427 | Chemotaxis receptor methyltransferase cheR | 2108 |
| L428 | Chemotaxis receptor methyltransferase cheR | 2109 |
| L429 | Cholesterol oxidase | 2110 |
| L430 | Cholesterol oxidase | 2111 |
| L431 | Cholesterol oxidase | 2112 |
| L432 | Cholesterol oxidase | 2113 |
| L433 | Cholesterol oxidase | 2114 |
| L434 | Cholesterol oxidase | 2115 |
| L435 | Cholesterol oxidase | 2116 |
| L436 | Cholesterol oxidase | 2117 |
| L437 | Cholesterol oxidase | 2118 |
| L438 | Cholesterol oxidase | 2119 |
| L439 | Cholesterol oxidase | 2120 |
| L440 | Cholesterol oxidase | 2121 |
| L441 | Chromatin structure-remodeling | KNL |
| | complex protein RSC4 | |
| L442 | Chromatin structure-remodeling | 2122 |
| | complex protein RSC4 | |
| L443 | Chromatin structure-remodeling | 2123 |
| | complex protein RSC4 | |
| L444 | Chromatin structure-remodeling | 2124 |
| | complex protein RSC4 | |
| L445 | Chromodomain-helicase-DNA-binding protein 1 | 2125 |
| L446 | Chromodomain-helicase-DNA-binding protein 1 | 2126 |
| L447 | Cleavable disulfide | 2127 |
| L448 | Cleavable disulfide | 2128 |
| L449 | Cleavable disulfide | 2129 |
| L450 | Cleavable disulfide | 2130 |
| L451 | Cleavable disulfide | 2131 |
| L452 | Cleavable disulfide | 2132 |
| L453 | Cleavable disulfide | 2133 |
| L454 | Cleavable disulfide | 2134 |
| L455 | Cleavable disulfide | 2135 |
| L456 | Cleavable disulfide | 2136 |
| L457 | Cleavable disulfide | 2137 |
| L458 | Colicin Ia | 2138 |
| L459 | Collagen adhesin | 2139 |
| L460 | Complement C3 beta chain | 2140 |
| L461 | Complement C3 beta chain | 2141 |
| L462 | Complement C3 beta chain | 2142 |
| L463 | Complement C3 beta chain | 2143 |
| L464 | Complement decay-accelerating factor | EIY |
| L465 | Complement factor H | KRP |
| L466 | Complement receptor type 2 | 2144 |
| L467 | Conserved hypothetical protein | 2145 |
| L468 | Conserved hypothetical protein MTH1747 | DIR |
| L469 | Conserved hypothetical protein MTH1747 | 2146 |
| L470 | Conserved hypothetical protein MTH1747 | 2147 |
| L471 | Conserved hypothetical protein MTH1747 | 2148 |
| L472 | Conserved hypothetical protein MTH1747 | 2149 |
| L473 | Conserved hypothetical protein MTH1747 | 2150 |
| L474 | Conserved hypothetical protein MTH1747 | 2151 |
| L475 | Conserved hypothetical protein MTH1747 | 2152 |
| L476 | Conserved protein (MTH177) | 2153 |
| L477 | Creatine amidinohydrolase | 2154 |
| L478 | Cruciferin | 2155 |
| L479 | Cruciferin | 2156 |
| L480 | Cruciferin | 2157 |
| L481 | Cruciferin | 2158 |
| L482 | Cruciferin | 2159 |
| L483 | Cruciferin | 2160 |
| L484 | Cruciferin | 2161 |
| L485 | CSL3 | 2162 |
| L486 | CSL3 | 2163 |
| L487 | CTP synthase | 2164 |
| L488 | CTP synthase | 2165 |
| L489 | Cullin homolog | HKN |
| L490 | Cullin homolog | 2166 |
| L491 | Cullin homolog | 2167 |
| L492 | Cullin homolog | 2168 |
| L493 | Cullin homolog | 2169 |
| L494 | Cullin homolog | 2170 |
| L495 | Cyclin A2 | 2171 |
| L496 | Cysteine-rich secretory protein | 2172 |
| L497 | Cytidine deaminase | 2173 |
| L498 | Cytidine deaminase | 2174 |
| L499 | Cytidine deaminase | 2175 |
| L500 | Cytochrome b-c1 complex subunit | 2176 |
| | Rieske, mitochondrial | |
| L501 | Cytochrome c oxidase subunit 2 | QAV |
| L502 | Cytochrome c oxidase subunit 2 | 2177 |
| L503 | Cytochrome c oxidase subunit 2 | 2178 |
| L504 | Cytochrome c oxidase subunit 2 | 2179 |
| L505 | Cytochrome c oxidase subunit 2 | 2180 |
| L506 | Cytochrome c4 | GGK |
| L507 | Cytochrome c4 | QGM |
| L508 | D-aminopeptidase | 2181 |
| L509 | DDMC | 2182 |
| L510 | DDMC | 2183 |
| L511 | Deltex protein | 2184 |
| L512 | Deoxyuridine 5′-triphosphate nucleotidohydrolase | 2185 |
| L513 | Diaminopimelate epimerase | 2186 |
| L514 | Diaminopimelate epimerase | 2187 |
| L515 | Diaminopimelate epimerase | 2188 |
| L516 | Di-heme peroxidase | SGC |
| L517 | Di-heme peroxidase | 2189 |
| L518 | Dihydropyrimidine dehydrogenase | 2190 |
| L519 | Dihydropyrimidine dehydrogenase | 2191 |
| L520 | Dihydropyrimidine dehydrogenase | 2192 |
| L521 | Dihydropyrimidine dehydrogenase | 2193 |
| L522 | Dihydropyrimidine dehydrogenase | 2194 |
| L523 | Dihydropyrimidine dehydrogenase | 2195 |
| L524 | Dihydropyrimidine dehydrogenase | 2196 |
| L525 | Dihydropyrimidine dehydrogenase | 2197 |
| L526 | Dihydropyrimidine dehydrogenase | 2198 |
| L527 | Dihydropyrimidine dehydrogenase | 2199 |
| L528 | Dihydropyrimidine dehydrogenase | 2200 |
| L529 | Dihydropyrimidine dehydrogenase | 2201 |
| L530 | Dihydropyrimidine dehydrogenase | 2202 |
| L531 | Dihydropyrimidine dehydrogenase | 2203 |
| L532 | Dihydropyrimidine dehydrogenase | 2204 |
| L533 | Dihydropyrimidine dehydrogenase | 2205 |
| L534 | Dihydropyrimidine dehydrogenase | 2206 |
| L535 | Dihydropyrimidine dehydrogenase | 2207 |
| L536 | Dihydropyrimidine dehydrogenase | 2208 |
| L537 | Dihydropyrimidine dehydrogenase | 2209 |
| L538 | Dihydropyrimidine dehydrogenase | 2210 |
| L539 | Dihydropyrimidine dehydrogenase | 2211 |
| L540 | Dihydropyrimidine dehydrogenase | 2212 |
| L541 | Dihydropyrimidine dehydrogenase | 2213 |
| L542 | Dihydropyrimidine dehydrogenase | 2214 |
| L543 | Dihydropyrimidine dehydrogenase | 2215 |
| L544 | Dihydropyrimidine dehydrogenase | 2216 |
| L545 | Dihydropyrimidine dehydrogenase | 2217 |
| L546 | Dihydropyrimidine dehydrogenase | 2218 |
| L547 | Dihydropyrimidine dehydrogenase | 2219 |
| L548 | Dihydropyrimidine dehydrogenase | 2220 |
| L549 | Discoidin-1 subunit A | 2221 |
| L550 | Discoidin-1 subunit A | 2222 |
| L551 | Discoidin-1 subunit A | 2223 |
| L552 | Dissimilatory copper-containing nitritereductase | 2224 |
| L553 | D-lactate dehydrogenase | DTF |
| L554 | D-lactate dehydrogenase | 2225 |
| L555 | D-lactate dehydrogenase | 2226 |
| L556 | D-lactate dehydrogenase | 2227 |
| L557 | D-lactate dehydrogenase | 2228 |
| L558 | D-lactate dehydrogenase | 2229 |
| L559 | D-lactate dehydrogenase | 2230 |
| L560 | DNA damage-binding protein 1 | LCA |
| L561 | DNA damage-binding protein 1 | 2231 |
| L562 | DNA damage-binding protein 1 | 2232 |
| L563 | DNA damage-binding protein 1 | 2233 |
| L564 | DNA damage-binding protein 1 | 2234 |
| L565 | DNA damage-binding protein 1 | 2235 |
| L566 | DNA damage-binding protein 1 | 2236 |
| L567 | DNA damage-binding protein 1 | 2237 |
| L568 | DNA damage-binding protein 1 | 2238 |
| L569 | DNA damage-binding protein 1 | 2239 |
| L570 | DNA damage-binding protein 1 | 2240 |
| L571 | DNA damage-binding protein 1 | 2241 |
| L572 | DNA damage-binding protein 1 | 2242 |
| L573 | DNA damage-binding protein 1 | 2243 |
| L574 | DNA damage-binding protein 1 | 2244 |
| L575 | DNA damage-binding protein 1 | 2245 |
| L576 | DNA damage-binding protein 1 | 2246 |
| L577 | DNA damage-binding protein 1 | 2247 |
| L578 | DNA damage-binding protein 1 | 2248 |
| L579 | DNA damage-binding protein 1 | 2249 |
| L580 | DNA damage-binding protein 1 | 2250 |
| L581 | DNA damage-binding protein 1 | 2251 |
| L582 | DNA damage-binding protein 1 | 2252 |
| L583 | DNA gyrase B | ALS |
| L584 | DNA gyrase B | 2253 |
| L585 | DNA gyrase B | 2254 |
| L586 | DNA gyrase B | 2255 |
| L587 | DNA gyrase B | 2256 |
| L588 | DNA gyrase B | 2257 |
| L589 | DNA gyrase B | 2258 |
| L590 | DNA gyrase B | 2259 |
| L591 | DNA gyrase B | 2260 |
| L592 | DNA gyrase B | 2261 |
| L593 | DNA gyrase B | 2262 |
| L594 | DNA gyrase B | 2263 |
| L595 | DNA ligase | 2264 |
| L596 | DNA ligase | 2265 |
| L597 | DNA ligase | 2266 |
| L598 | DNA ligase | 2267 |
| L599 | DNA ligase | 2268 |
| L600 | DNA mismatch repair protein MutS | MDA |
| L601 | DNA mismatch repair protein MutS | SII |
| L602 | DNA mismatch repair protein MutS | 2269 |
| L603 | DNA mismatch repair protein MutS | 2270 |
| L604 | DNA mismatch repair protein MutS | 2271 |
| L605 | DNA mismatch repair protein MutS | 2272 |
| L606 | DNA mismatch repair protein MutS | 2273 |
| L607 | DNA polymerase | FSP |
| L608 | DNA polymerase | RQF |
| L609 | DNA polymerase | 2274 |
| L610 | DNA polymerase | 2275 |
| L611 | DNA polymerase | 2276 |
| L612 | DNA polymerase | 2277 |
| L613 | DNA polymerase | 2278 |
| L614 | DNA polymerase | 2279 |
| L615 | DNA polymerase | 2280 |
| L616 | DNA polymerase | 2281 |
| L617 | DNA polymerase alpha subunit B | 2282 |
| L618 | DNA polymerase alpha subunit B | 2283 |
| L619 | DNA polymerase alpha subunit B | 2284 |
| L620 | DNA polymerase alpha subunit B | 2285 |
| L621 | DNA polymerase alpha subunit B | 2286 |
| L622 | DNA polymerase alpha subunit B | 2287 |
| L623 | DNA polymerase alpha subunit B | 2288 |
| L624 | DNA polymerase alpha subunit B | 2289 |
| L625 | DNA polymerase alpha subunit B | 2290 |
| L626 | DNA polymerase alpha subunit B | 2291 |
| L627 | DNA polymerase eta | ALS |
| L628 | DNA polymerase eta | 2292 |
| L629 | DNA polymerase eta | 2293 |
| L630 | DNA polymerase eta | 2294 |
| L631 | DNA polymerase eta | 2295 |
| L632 | DNA polymerase eta | 2296 |
| L633 | DNA polymerase I | AGV |
| L634 | DNA polymerase I | ELE |
| L635 | DNA polymerase I | 2297 |
| L636 | DNA primase | DHK |
| L637 | DNA primase | 2298 |
| L638 | DNA primase | 2299 |
| L639 | DNA primase | 2300 |
| L640 | DNA primase | 2301 |
| L641 | DNA primase | 2302 |
| L642 | DNA primase | 2303 |
| L643 | DNA primase | 2304 |
| L644 | DNA primase/helicase | AGY |
| L645 | DNA primase/helicase | 2305 |
| L646 | DNA primase/helicase | 2306 |
| L647 | DNA primase/helicase | 2307 |
| L648 | DNA primase/helicase | 2308 |
| L649 | DNA primase/helicase | 2309 |
| L650 | DNA primase/helicase | 2310 |
| L651 | DNA primase/helicase | 2311 |
| L652 | DNA primase/helicase | 2312 |
| L653 | DNA primase/helicase | 2313 |
| L654 | DNA primase/helicase | 2314 |
| L655 | DNA topoisomerase 2 | EES |
| L656 | DNA topoisomerase 2 | IPI |
| L657 | DNA topoisomerase 2 | KEL |
| L658 | DNA topoisomerase 2 | 2315 |
| L659 | DNA topoisomerase 2 | 2316 |
| L660 | DNA topoisomerase 2 | 2317 |
| L661 | DNA topoisomerase 2 | 2318 |
| L662 | DNA topoisomerase 2 | 2319 |
| L663 | DNA topoisomerase 2 | 2320 |
| L664 | DNA topoisomerase 2 | 2321 |
| L665 | DNA topoisomerase 2 | 2322 |
| L666 | DNA topoisomerase 2 | 2323 |
| L667 | DNA topoisomerase I | 2324 |
| L668 | DNA topoisomerase I | 2325 |
| L669 | DNA topoisomerase I | 2326 |
| L670 | DNA topoisomerase II, alpha isozyme | PDL |
| L671 | DNA topoisomerase II, alpha isozyme | 2327 |
| L672 | DNA topoisomerase II, alpha isozyme | 2328 |
| L673 | DNA topoisomerase II, alpha isozyme | 2329 |
| L674 | DNA topoisomerase II, alpha isozyme | 2330 |
| L675 | DNA topoisomerase II, alpha isozyme | 2331 |
| L676 | DNA topoisomerase II, alpha isozyme | 2332 |
| L677 | DNA topoisomerase II, alpha isozyme | 2333 |
| L678 | DNA topoisomerase II, alpha isozyme | 2334 |
| L679 | DNA topoisomerase VI A subunit | 2335 |
| L680 | DNA topoisomerase VI A subunit | 2336 |
| L681 | DNA topoisomerase VI A subunit | 2337 |
| L682 | DNA topoisomerase VI A subunit | 2338 |
| L683 | DNA topoisomerase VI A subunit | 2339 |
| L684 | DNA topoisomerase VI A subunit | 2340 |
| L685 | DNA-3-methyladenine glycosylase 2 | 2341 |
| L686 | DNA-binding response regulator MtrA | 2342 |
| L687 | DNA-directed RNA polymerase beta chain | 2343 |
| L688 | DNA-directed RNA polymerase beta chain | 2344 |
| L689 | DNA-directed RNA polymerase beta chain | 2345 |
| L690 | DNA-directed RNA polymerase beta chain | 2346 |
| L691 | DNA-directed RNA polymerase beta chain | 2347 |
| L692 | DNA-directed RNA polymerase beta chain | 2348 |
| L693 | DNA-directed RNA polymerase beta chain | 2349 |
| L694 | DNA-directed RNA polymerase beta chain | 2350 |
| L695 | DNA-directed RNA polymerase | 2351 |
| | II 14.2 kDa polypeptide | |
| L696 | DNA-directed RNA polymerase | 2352 |
| | II 14.2 kDa polypeptide | |
| L697 | DNA-directed RNA polymerase, | 2353 |
| | subunit E′ (rpoe1) | |
| L698 | DNA-directed RNA polymerase, | 2354 |
| | subunit E′ (rpoe1) | |
| L699 | DNA-directed RNA polymerases | ITP |
| | I, II, and III 27 kDa polypeptide | |
| L700 | DNA-directed RNA polymerases | 2355 |
| | I, II, and III 27 kDa polypeptide | |
| L701 | DNA-directed RNA polymerases | 2356 |
| | I, II, and III 27 kDa polypeptide | |
| L702 | DNA-directed RNA polymerases | 2357 |
| | I, II, and III 27 kDa polypeptide | |
| L703 | DNA-directed RNA polymerases | 2358 |
| | I, II, and III 27 kDa polypeptide | |
| L704 | Drosophila neuroglian | 2359 |
| L705 | Dystroglycan | 2360 |
| L706 | Dystrophin | 2361 |
| L707 | Dystrophin | 2362 |
| L708 | Dystrophin | 2363 |
| L709 | Dystrophin | 2364 |
| L710 | Dystrophin | 2365 |
| L711 | Dystrophin | 2366 |
| L712 | Dystrophin | 2367 |
| L713 | E2A DNA-binding protein | 2368 |
| L714 | E2A DNA-binding protein | 2369 |
| L715 | E3 sumo-protein ligase SIZ1 | 2370 |
| L716 | E3 sumo-protein ligase SIZ1 | 2371 |
| L717 | E3 sumo-protein ligase SIZ1 | 2372 |
| L718 | Early switch protein xol-1 2.2 k splice form | 2373 |
| L719 | EGF-like module containing mucin-like | 2374 |
| | hormonereceptor-like 2 precursor | |
| L720 | EGF-like module containing mucin-like | 2375 |
| | hormonereceptor-like 2 precursor | |
| L721 | Elongation factor 1-gamma 1 | 2376 |
| L722 | Elongation factor 1-gamma l | 2377 |
| L723 | Elongation factor g | 2378 |
| L724 | Elongation factor G | 2379 |
| L725 | Elongation factor G | 2380 |
| L726 | Elongation factor G | 2381 |
| L727 | Elongation factor G | 2382 |
| L728 | Elongation factor G | 2383 |
| L729 | Elongation factor G | 2384 |
| L730 | Elongation factor G | 2385 |
| L731 | Elongation factor G | 2386 |
| L732 | Elongation factor G | 2387 |
| L733 | Elongation factor P | 2388 |
| L734 | Elongation factor Ts | 2389 |
| L735 | Elongation factor Ts | 2390 |
| L736 | Elongation factor Ts | 2391 |
| L737 | Elongation factor Tu (ef-Tu) | 2392 |
| L738 | Endoglucanase | 2393 |
| L739 | Endonuclease PI-SceI | 2394 |
| L740 | Endonuclease PI-SceI | 2395 |
| L741 | Endonuclease PI-SceI | 2396 |
| L742 | Endonuclease PI-SceI | 2397 |
| L743 | Endonuclease PI-SceI | 2398 |
| L744 | Endonuclease PI-SceI | 2399 |
| L745 | Endonuclease PI-SceI | 2400 |
| L746 | Endonuclease PI-SceI | 2401 |
| L747 | Endonuclease PI-SceI | 2402 |
| L748 | Enterobactin synthetase component F | 2403 |
| L749 | Enterobactin synthetase component F | 2404 |
| L750 | Enterobactin synthetase component F | 2405 |
| L751 | Enterobactin synthetase component F | 2406 |
| L752 | Enterobactin synthetase component F | 2407 |
| L753 | Enterobactin synthetase component F | 2408 |
| L754 | Enterobactin synthetase component F | 2409 |
| L755 | Enterobactin synthetase component F | 2410 |
| L756 | Enterobactin synthetase component F | 2411 |
| L757 | Enterochelin esterase | 2412 |
| L758 | Epo receptor | EVV |
| L759 | Epo receptor | 2413 |
| L760 | Erythrocyte binding antigen region II | 2414 |
| L761 | Erythrocyte binding antigen region II | 2415 |
| L762 | Erythrocyte binding antigen region II | 2416 |
| L763 | Erythrocyte binding antigen region II | 2417 |
| L764 | Erythrocyte binding antigen region II | 2418 |
| L765 | E-selectin | 2419 |
| L766 | Esterase EstA | SAP |
| L767 | Esterase EstA | 2420 |
| L768 | Esterase EstA | 2421 |
| L769 | Eukaryotic peptide chain release | 2422 |
| | factor GTP-binding subunit | |
| L770 | Exonuclease I | RQP |
| L771 | Exonuclease I | 2423 |
| L772 | FascIclIn I | SDP |
| L773 | FascIclIn I | 2424 |
| L774 | Fibrillin-1 | 2425 |
| L775 | Fibrillin-1 | 2426 |
| L776 | Fibrillin-1 | 2427 |
| L777 | Fibrillin-1 | 2428 |
| L778 | Fibrillin-1 | 2429 |
| L779 | Fibronectin | 2430 |
| L780 | Fibronectin | 2431 |
| L781 | Fibronectin | 2432 |
| L782 | Flagellar hook protein FlgE | 2433 |
| L783 | Flagellar hook protein FlgE | 2434 |
| L784 | Flagellar hook protein FlgE | 2435 |
| L785 | Flagellar hook protein FlgE | 2436 |
| L786 | Flagellar hook protein FlgE | 2437 |
| L787 | Flagellar hook protein FlgE | 2438 |
| L788 | Flagellar hook protein FlgE | 2439 |
| L789 | Flavohemoprotein | 2440 |
| L790 | Flexible G/S rich linker | G |
| L791 | Flexible G/S rich linker | S |
| L792 | Flexible G/S rich linker | GG |
| L793 | Flexible G/S rich linker | GS |
| L794 | Flexible G/S rich linker | GGS |
| L795 | Flexible G/S rich linker | GGG |
| L796 | Flexible G/S rich linker | 2441 |
| L797 | Flexible G/S rich linker | 2442 |
| L798 | Flexible G/S rich linker | 2443 |
| L799 | Flexible G/S rich linker | 2444 |
| L800 | Flexible G/S rich linker | 2445 |
| L801 | Flexible G/S rich linker | 2446 |
| L802 | Flexible G/S rich linker | 2447 |
| L803 | Flexible G/S rich linker | 2448 |
| L804 | Flexible G/S rich linker | 2449 |
| L805 | Flexible G/S rich linker | 2450 |
| L806 | Flexible G/S rich linker | 2451 |
| L807 | Flexible G/S rich linker | 2452 |
| L808 | Flexible G/S rich linker | 2453 |
| L809 | Flexible G/S rich linker | 2454 |
| L810 | Focal adhesion kinase 1 | 2455 |
| L811 | FolC bifunctional protein | 2456 |
| L812 | FolC bifunctional protein | 2457 |
| L813 | FolC bifunctional protein | 2458 |
| L814 | FolC bifunctional protein | 2459 |
| L815 | FolC bifunctional protein | 2460 |
| L816 | FolC bifunctional protein | 2461 |
| L817 | FolC bifunctional protein | 2462 |
| L818 | FolC bifunctional protein | 2463 |
| L819 | Follistatin | 2464 |
| L820 | Formate dehydrogenase (large subunit) | YDK |
| L821 | Formate dehydrogenase (large subunit) | 2465 |
| L822 | Formate dehydrogenase (large subunit) | 2466 |
| L823 | Formate dehydrogenase (large subunit) | 2467 |
| L824 | Formate dehydrogenase (large subunit) | 2468 |
| L825 | Formate dehydrogenase (large subunit) | 2469 |
| L826 | Formate dehydrogenase (large subunit) | 2470 |
| L827 | Formate dehydrogenase (large subunit) | 2471 |
| L828 | Formate dehydrogenase (large subunit) | 2472 |
| L829 | Formate dehydrogenase (large subunit) | 2473 |
| L830 | Formate dehydrogenase (large subunit) | 2474 |
| L831 | Formate dehydrogenase (large subunit) | 2475 |
| L832 | Formate dehydrogenase (large subunit) | 2476 |
| L833 | Formate dehydrogenase, | 2477 |
| | nitrate-inducible major subunit | |
| L834 | Formate dehydrogenase, | 2478 |
| | nitrate-inducible, major subunit | |
| L835 | Formate dehydrogenase, | 2479 |
| | nitrate-inducible, major subunit | |
| L836 | Formate dehydrogenase, | 2480 |
| | nitrate-inducible, major subunit | |
| L837 | Formate dehydrogenase, | 2481 |
| | nitrate-inducible, major subunit | |
| L838 | Formate dehydrogenase, | 2482 |
| | nitrate-inducible, major subunit | |
| L839 | Formate dehydrogenase, | 2483 |
| | nitrate-inducible, major subunit | |
| L840 | Formate dehydrogenase, | 2484 |
| | nitrate-inducible, major subunit | |
| L841 | Formate dehydrogenase, | 2485 |
| | nitrate-inducible, major subunit | |
| L842 | Formate dehydrogenase, | 2486 |
| | nitrate-inducible, major subunit | |
| L843 | Formate dehydrogenase, | 2487 |
| | nitrate-inducible, major subunit | |
| L844 | Formate dehydrogenase, | 2488 |
| | nitrate-inducible, major subunit | |
| L845 | Formate dehydrogenase, | 2489 |
| | nitrate-inducible, major subunit | |
| L846 | Formate dehydrogenase, | 2490 |
| | nitrate-inducible, major subunit | |
| L847 | Fumarylacetoacetate hydrolase | 2491 |
| L848 | Galactose oxidase | GSV |
| L849 | Galactose oxidase | GWK |
| L850 | Galactose oxidase | IAE |
| L851 | Galactose oxidase | KRQ |
| L852 | Galactose oxidase | QDT |
| L853 | Galactose oxidase | TPN |
| L854 | Galactose oxidase | 2492 |
| L855 | Galactose oxidase | 2493 |
| L856 | Galactose oxidase | 2494 |
| L857 | Galactose oxidase | 2495 |
| L858 | Galactose oxidase | 2496 |
| L859 | Galactose oxidase | 2497 |
| L860 | Galactose oxidase | 2498 |
| L861 | Galactose oxidase | 2499 |
| L862 | Galactose oxidase | 2500 |
| L863 | Galactose oxidase | 2501 |
| L864 | Galactose oxidase | 2502 |
| L865 | Galactose oxidase | 2503 |
| L866 | Galactose oxidase | 2504 |
| L867 | Galactose oxidase | 2505 |
| L868 | Galactose oxidase | 2506 |
| L869 | Galactose oxidase | 2507 |
| L870 | Galactose oxidase | 2508 |
| L871 | Galactose oxidase | 2509 |
| L872 | Galactose oxidase | 2510 |
| L873 | Galactose oxidase | 2511 |
| L874 | Galactose oxidase | 2512 |
| L875 | Galactose oxidase | 2513 |
| L876 | Galactose oxidase | 2514 |
| L877 | Galactose oxidase | 2515 |
| L878 | Gamma B-crystallin | 2516 |
| L879 | Gamma-delta T-cell receptor | 2517 |
| L880 | Gelation factor | DSS |
| L881 | Gelation factor | 2518 |
| L882 | Gelation factor | 2519 |
| L883 | Gelation factor | 2520 |
| L884 | Gene activator alpha | 2521 |
| L885 | Gingipain R | 2522 |
| L886 | Glucodextranase | 2523 |
| L887 | Glucodextranase | 2524 |
| L888 | Glucodextranase | 2525 |
| L889 | Glucosamine-fructose-6-phosphate aminotransferase | YEQ |
| L890 | Glucosamine-fructose-6-phosphate aminotransferase | 2526 |
| L891 | Glucosamine-fructose-6-phosphate aminotransferase | 2527 |
| L892 | Glucosamine-fructose-6-phosphate aminotransferase | 2528 |
| L893 | Glucosamine-fructose-6-phosphate aminotransferase | 2529 |
| L894 | Glucosamine-fructose-6-phosphate aminotransferase | 2530 |
| L895 | Glucosamine-fructose-6-phosphate aminotransferase | 2531 |
| L896 | Glucosamine-fructose-6-phosphate aminotransferase | 2532 |
| L897 | Glucosamine-fructose-6-phosphate aminotransferase | 2533 |
| L898 | Glucosamine-fructose-6-phosphate aminotransferase | 2534 |
| L899 | Glucosamine-fructose-6-phosphate aminotransferase | 2535 |
| L900 | Glucose-1-phosphate adenylyltransferase small subunit | 2536 |
| L901 | Glucose-1-phosphate adenylyltransferase small subunit | 2537 |
| L902 | Glucose-6-phosphate isomerase | KNA |
| L903 | Glucose-6-phosphate isomerase | VGF |
| L904 | Glucose-6-phosphate isomerase | 2538 |
| L905 | Glucose-6-phosphate isomerase | 2539 |
| L906 | Glucose-6-phosphate isomerase, conjectural | 2540 |
| L907 | Glutamate dehydrogenase | 2541 |
| L908 | Glutamate dehydrogenase | 2542 |
| L909 | Glutamate receptor interacting protein | 2543 |
| L910 | Glutamate synthase [NADPH] large chain | 2544 |
| L911 | Glutamate synthase [NADPH] large chain | 2545 |
| L912 | Glutamate synthase [NADPH] large chain | 2546 |
| L913 | Glutamate synthase [NADPH] large chain | 2547 |
| L914 | Glutamate synthase [NADPH] large chain | 2548 |
| L915 | Glutamate synthase [NADPH] large chain | 2549 |
| L916 | Glutamate synthase [NADPH] large chain | 2550 |
| L917 | Glutamine synthetase | 2551 |
| L918 | Glutamine synthetase | 2552 |
| L919 | Glutamyl-tRNA synthetase | 2553 |
| L920 | Glutamyl-tRNA synthetase | 2554 |
| L921 | Glutamyl-tRNA synthetase | 2555 |
| L922 | Glutamyl-tRNA synthetase | 2556 |
| L923 | Glutamyl-tRNA synthetase | 2557 |
| L924 | Glutamyl-tRNA synthetase | 2558 |
| L925 | Glutamyl-tRNA synthetase | 2559 |
| L926 | Glutamyl-tRNA synthetase | 2560 |
| L927 | Glutaredoxin 2 | 2561 |
| L928 | Glutathione S-transferase | 2562 |
| L929 | Glutathione S-transferase | 2563 |
| L930 | Glutathione S-transferase | 2564 |
| L931 | Glutathione S-transferase 1-6 | 2565 |
| L932 | Glutathione S-transferase A1 | 2566 |
| L933 | Glutathlone S-transferase I | NKP |
| L934 | GlutathIone S-transferase I | 2567 |
| L935 | Glutathione synthetase | 2568 |
| L936 | Glutathione transferase GST1-4 | 2569 |
| L937 | Glutathione transferase GST1-4 | 2570 |
| L938 | Glutathione transferase sigma class | 2571 |
| L939 | Glycerol-3-phosphate dehydrogenase [NAD(P)+] | 2572 |
| L940 | Glycine cleavage system | 2573 |
| | transcriptionalrepressor, putative | |
| L941 | Glycolipid-anchored surface protein 2 | 2574 |
| L942 | Glycolipid-anchored surface protein 2 | 2575 |
| L943 | Glycyl-tRNA synthetase | KFA |
| L944 | Glycyl-tRNA synthetase | 2576 |
| L945 | Glycyl-tRNA synthetase | 2577 |
| L946 | Glycyl-tRNA synthetase | 2578 |
| L947 | Glycyl-tRNA synthetase | 2579 |
| L948 | Glycyl-tRNA synthetase | 2580 |
| L949 | Glycyl-tRNA synthetase | 2581 |
| L950 | Glycyl-tRNA synthetase | 2582 |
| L951 | Glycyl-tRNA synthetase | 2583 |
| L952 | Glycyl-tRNA synthetase | 2584 |
| L953 | Growth hormone receptor | 2585 |
| L954 | Growth hormone receptor | 2586 |
| L955 | Harmonin | 2587 |
| L956 | HasR protein | 2588 |
| L957 | HasR protein | 2589 |
| L958 | Hemin transport protein HemS | 2590 |
| L959 | Hemin transport protein HemS | 2591 |
| L960 | Hemin transport protein HemS | 2592 |
| L961 | Hemoglobin | 2593 |
| L962 | Hemolytic lectin CEL-iii | 2594 |
| L963 | Hepatocyte nuclear factor 6 | 2595 |
| L964 | Histidyl-tRNA synthetase | 2596 |
| L965 | HNH homing endonuclease | 2597 |
| L966 | HNH homing endonuclease | 2598 |
| L967 | HNH homing endonuclease | 2599 |
| L968 | Homoserine dehydrogenase | 2600 |
| L969 | Homoserine kinase | 2601 |
| L970 | Homoserine kinase | 2602 |
| L971 | Homoserine kinase | 2603 |
| L972 | Homoserine kinase | 2604 |
| L973 | HTH-type transcriptional | 2605 |
| | regulator MqsA (Ygit/B3021) | |
| L974 | HTH-type transcriptional repressor YvoA | 2606 |
| L975 | HTH-type transcriptional repressor YvoA | 2607 |
| L976 | Human IgGI middle hinge linker | 2608 |
| L977 | Human IgG1 upper hinge linker | 2609 |
| L978 | Human IgG3 middle hinge linker | 2610 |
| L979 | Human IgG3m15 middle hinge linker | 2611 |
| L980 | Human IgG4 lower hinge linker | 2612 |
| L981 | Human IgG4 middle hinge linker | 2613 |
| L982 | Human IgG4 upper hinge linker | 2614 |
| L983 | Hybrid cluster protein | 2615 |
| L984 | Hybrid cluster protein | 2616 |
| L985 | Hybrid cluster protein | 2617 |
| L986 | Hybrid cluster protein | 2618 |
| L987 | Hybrid cluster protein | 2619 |
| L988 | Hypothetical conserved protein, GK1056 | 2620 |
| L989 | Hypothetical membrane spanning protein | 2621 |
| L990 | Hypothetical methylmalonyl-CoA | 2622 |
| | decarboxylase alpha subunit | |
| L991 | Hypothetical methylmalonyl-CoA | 2623 |
| | decarboxylase alpha subunit | |
| L992 | Hypothetical methylmalonyl-CoA | 2624 |
| | decarboxylase alpha subunit | |
| L993 | Hypothetical methylmalonyl-CoA | 2625 |
| | decarboxylase alpha subunit | |
| L994 | Hypothetical methylmalonyl-CoA | 2626 |
| | decarboxylase alpha subunit | |
| L995 | Hypothetical methylmalonyl-CoA | 2627 |
| | decarboxylase alpha subunit | |
| L996 | Hypothetical methylmalonyl-CoA | 2628 |
| | decarboxylase alpha subunit | |
| L997 | Hypothetical protein | AEP |
| L998 | Hypothetical protein | 2629 |
| L999 | Hypothetical protein APE0525 | PTL |
| L1000 | Hypothetical protein APE0525 | 2630 |
| L1001 | Hypothetical protein LOC449832 | 2631 |
| L1002 | Hypothetical protein LOC449832 | 2632 |
| L1003 | Hypothetical protein PA4388 | 2633 |
| L1004 | Hypothetical protein PA5201 | ASE |
| L1005 | Hypothetical protein PA5201 | QDP |
| L1006 | Hypothetical protein PA5201 | VKL |
| L1007 | Hypothetical protein PA5201 | 2634 |
| L1008 | Hypothetical protein PA5201 | 2635 |
| L1009 | Hypothetical protein PA5201 | 2636 |
| L1010 | Hypothetical protein PA5201 | 2637 |
| L1011 | Hypothetical protein PA5201 | 2638 |
| L1012 | Hypothetical protein PA5201 | 2639 |
| L1013 | Hypothetical protein PA5201 | 2640 |
| L1014 | Hypothetical protein PA5201 | 2641 |
| L1015 | Hypothetical protein PA5201 | 2642 |
| L1016 | Hypothetical protein PA5201 | 2643 |
| L1017 | Hypothetical protein PA5201 | 2644 |
| L1018 | Hypothetical protein PA5201 | 2645 |
| L1019 | Hypothetical protein PA5201 | 2646 |
| L1020 | Hypothetical protein PA5201 | 2647 |
| L1021 | Hypothetical protein PA5201 | 2648 |
| L1022 | Hypothetical protein PA5201 | 2649 |
| L1023 | Hypothetical protein PA5201 | 2650 |
| L1024 | Hypothetical protein PA5201 | 2651 |
| L1025 | Hypothetical protein PA5201 | 2652 |
| L1026 | Hypothetical protein PA5201 | 2653 |
| L1027 | Hypothetical protein PH0495 | ASN |
| L1028 | Hypothetical protein PH0495 | 2654 |
| L1029 | Hypothetical protein PH0495 | 2655 |
| L1030 | Hypothetical protein PH0495 | 2656 |
| L1031 | Hypothetical protein PH0495 | 2657 |
| L1032 | Hypothetical protein PH0510 | 2658 |
| L1033 | Hypothetical protein PH0510 | 2659 |
| L1034 | Hypothetical protein PH1313 | 2660 |
| L1035 | Hypothetical protein PH1313 | 2661 |
| L1036 | Hypothetical protein SLR0953 | 2662 |
| L1037 | Hypothetical protein SLR0953 | 2663 |
| L1038 | Hypothetical protein SLR0953 | 2664 |
| L1039 | Hypothetical protein SLR0953 | 2665 |
| L1040 | Hypothetical protein SLR0953 | 2666 |
| L1041 | Hypothetical protein YIGZ | 2667 |
| L1042 | Hypothetical protein YIGZ | 2668 |
| L1043 | Hypothetical protein YJIA | 2669 |
| L1044 | Hypothetical protein YJIA | 2670 |
| L1045 | Hypothetical protein YJIA | 2671 |
| L1046 | Hypothetical protein YJIA | 2672 |
| L1047 | Hypothetical protein YJIA | 2673 |
| L1048 | Hypothetical tRNA/rRNA methyltransferase YJFH | 2674 |
| L1049 | Hypothetical tRNA/rRNA methyltransferase YJFH | 2675 |
| L1050 | IcIR transcriptional regulator | 2676 |
| L1051 | IcIR transcriptional regulator | 2677 |
| L1052 | IcIR transcriptional regulator | 2678 |
| L1053 | IcIR transcriptional regulator | 2679 |
| L1054 | Integrase | 2680 |
| L1055 | Interferon, alpha-inducible protein (clone IFI-15k) | 2681 |
| L1056 | Interleukin-1 receptor, type I | AIF |
| L1057 | Interleukin-1 receptor, type I | 2682 |
| L1058 | Interleukin-1 receptor, type I | 2683 |
| L1059 | Interleukin-1 receptor, type I | 2684 |
| L1060 | Interleukin-12 subunit p40 | FFI |
| L1061 | Interleukin-12 subunit p40 | 2685 |
| L1062 | Interleukin-12 subunit p40 | 2686 |
| L1063 | Interleukin-12 subunit p40 | 2687 |
| L1064 | Interleukin-12 subunit p40 | 2688 |
| L1065 | Interleukin-12 subunit p40 | 2689 |
| L1066 | Interleukin-12 subunit p40 | 2690 |
| L1067 | Interleukin-12 subunit p40 | 2691 |
| L1068 | Interleukin-2 receptor alpha chain | 2692 |
| L1069 | Interleukin-2 receptor alpha chain | 2693 |
| L1070 | Internalin B | VTQ |
| L1071 | Internalin B | 2694 |
| L1072 | Internalin B | 2695 |
| L1073 | Internalin B | 2696 |
| L1074 | Internalin B | 2697 |
| L1075 | Internalin B | 2698 |
| L1076 | Internalin B | 2699 |
| L1077 | Internalin B | 2700 |
| L1078 | Internalin B | 2701 |
| L1079 | Internalin B | 2702 |
| L1080 | Internalin B | 2703 |
| L1081 | Internalin B | 2704 |
| L1082 | Internalin B | 2705 |
| L1083 | Intimin | SLV |
| L1084 | Intimin | 2706 |
| L1085 | Intimin | 2707 |
| L1086 | Intimin | 2708 |
| L1087 | Intron-encoded DNA endonuclease I-anil | 2709 |
| L1088 | Intron-encoded DNA endonuclease I-anil | 2710 |
| L1089 | Invasin | KST |
| L1090 | Invasin | 2711 |
| L1091 | Invasin | 2712 |
| L1092 | Invasin | 2713 |
| L1093 | Invasin | 2714 |
| L1094 | Invasin | 2715 |
| L1095 | Invasin | 2716 |
| L1096 | Invasin | 2717 |
| L1097 | Invasin | 2718 |
| L1098 | Invasin | 2719 |
| L1099 | Invasin | 2720 |
| L1100 | Invasin | 2721 |
| L1101 | Invasin | 2722 |
| L1102 | Iron hydrogenase 1 | GAE |
| L1103 | Iron hydrogenase 1 | 2723 |
| L1104 | Iron hydrogenase 1 | 2724 |
| L1105 | Iron hydrogenase 1 | 2725 |
| L1106 | Iron hydrogenase 1 | 2726 |
| L1107 | Iron hydrogenase 1 | 2727 |
| L1108 | Iron hydrogenase 1 | 2728 |
| L1109 | Iron hydrogenase 1 | 2729 |
| L1110 | Iron hydrogenase 1 | 2730 |
| L1111 | Iron hydrogenase 1 | 2731 |
| L1112 | Iron hydrogenase 1 | 2732 |
| L1113 | Iron hydrogenase 1 | 2733 |
| L1114 | Iron hydrogenase 1 | 2734 |
| L1115 | Iron hydrogenase 1 | 2735 |
| L1116 | Iron transport protein | 2736 |
| L1117 | Isoflavanone 4′-O-methyltransferase | 2737 |
| L1118 | Isoflavanone 4′-O-methyltransferase | 2738 |
| L1119 | Junctional adhesion molecule 1 | 2739 |
| L1120 | Junctional adhesion molecule 1 | 2740 |
| L1121 | Junctional adhesion molecule 1 | 2741 |
| L1122 | Kanamycin nucleotidyltransferase | 2742 |
| L1123 | Kanamycin nucleotidyltransferase | 2743 |
| L1124 | Kanamycin nucleotidyltransferase | 2744 |
| L1125 | Kanamycin nucleotidyltransferase | 2745 |
| L1126 | Kelch-like protein 11 | 2746 |
| L1127 | Kexin | ISE |
| L1128 | Kexin | 2747 |
| L1129 | Kexin | 2748 |
| L1130 | Kexin | 2749 |
| L1131 | Kexin | 2750 |
| L1132 | Kexin | 2751 |
| L1133 | Kexin | 2752 |
| L1134 | Kexin | 2753 |
| L1135 | Ku70 | 2754 |
| L1136 | Ku70 | 2755 |
| L1137 | Ku70 | 2756 |
| L1138 | Ku70 | 2757 |
| L1139 | Ku80 | 2758 |
| L1140 | Laccase-1 | 2759 |
| L1141 | Laccase-1 | 2760 |
| L1142 | Laccase-1 | 2761 |
| L1143 | Laccase-1 | 2762 |
| L1144 | Laminin | DKC |
| L1145 | L-aspartate dehydrogenase | SAS |
| L1146 | L-aspartate dehydrogenase | 2763 |
| L1147 | L-aspartate dehydrogenase | 2764 |
| L1148 | Leucine dehydrogenase | 2765 |
| L1149 | Leucine dehydrogenase | 2766 |
| L1150 | Light chain of HyHel10 antibody fragment (fab) | 2767 |
| L1151 | Lin2111 protein | 2768 |
| L1152 | Lin2111 protein | 2769 |
| L1153 | Lipopolysaccharide-responsive | 2770 |
| | and beige-like anchor protein | |
| L1154 | Lipopolysaccharide-responsive | 2771 |
| | and beige-like anchor protein | |
| L1155 | Lipovitellin (LV-1N, LV-1C) | 2772 |
| L1156 | Lipovitellin (LV-1N, LV-1C) | 2773 |
| L1157 | Lipovitellin (LV-1N, LV-1C) | 2774 |
| L1158 | Lipovitellin (LV-1N, LV-1C) | 2775 |
| L1159 | Lipovitellin (LV-1N, LV-1C) | 2776 |
| L1160 | Lipoxygenase-1 | 2777 |
| L1161 | Lipoxygenase-1 | 2778 |
| L1162 | Low affinity immunoglobulin | 2779 |
| | gamma Fc region receptor II-A | |
| L1163 | Luciferase | 2780 |
| L1164 | LysR-type regulatory protein | 2781 |
| L1165 | Macrolide-specific efflux protein MacA | ATE |
| L1166 | Macrolide-specific efflux protein MacA | 2782 |
| L1167 | Macrolide-specific efflux protein MacA | 2783 |
| L1168 | Magnesium transporter, putative | 2784 |
| L1169 | Main hemagglutinin component | 2785 |
| L1170 | Major centromere autoantigen B | 2786 |
| L1171 | Major surface antigen p30 | 2787 |
| L1172 | Major surface antigen p30 | 2788 |
| L1173 | Major vault protein | 2789 |
| L1174 | Major vault protein | 2790 |
| L1175 | Maltose phosphorylase | 2791 |
| L1176 | Maltose phosphorylase | 2792 |
| L1177 | Maltose phosphorylase | 2793 |
| L1178 | Maltose phosphorylase | 2794 |
| L1179 | Maltose phosphorylase | 2795 |
| L1180 | Manganese-dependent inorganic pyrophosphatase | 2796 |
| L1181 | Manganese-dependent inorganic pyrophosphatase | 2797 |
| L1182 | Mannan-binding lectin | 2798 |
| L1183 | Mannan-binding lectin | 2799 |
| L1184 | Mannan-binding lectin | 2800 |
| L1185 | Mannitol dehydrogenase | HNA |
| L1186 | Mannitol dehydrogenase | 2801 |
| L1187 | Membrane cofactor protein | RET |
| L1188 | Membrane cofactor protein | 2802 |
| L1189 | Membrane-associated prostaglandin E synthase-2 | 2803 |
| L1190 | Membrane-associated prostaglandin E synthase-2 | 2804 |
| L1191 | Membrane-associated prostaglandin E synthase-2 | 2805 |
| L1192 | Membrane-associated prostaglandin E synthase-2 | 2806 |
| L1193 | Membrane-associated prostaglandin E synthase-2 | 2807 |
| L1194 | Membrane-bound lytic murein transglycosylase A | 2808 |
| L1195 | Methionyl-tRNA synthetase | 2809 |
| L1196 | Methyl-accepting chemotaxis protein | VRP |
| L1197 | Methyl-accepting chemotaxis protein | 2810 |
| L1198 | Methyl-accepting chemotaxis protein | 2811 |
| L1199 | Methyl-accepting chemotaxis protein | 2812 |
| L1200 | Methyl-coenzyme M reductase | 2813 |
| L1201 | Methyl-coenzyme M reductase | 2814 |
| L1202 | Methyl-coenzyme M reductase | 2815 |
| L1203 | Methyl-coenzyme M reductase | 2816 |
| L1204 | Methylene tetrahydromethanopterin dehydrogenase | 2817 |
| L1205 | Methylene tetrahydromethanopterin dehydrogenase | 2818 |
| L1206 | Mg2+ transporter MgtE | 2819 |
| L1207 | Mg2+ transporter MgtE | 2820 |
| L1208 | Mg2+ transporter MgtE | 2821 |
| L1209 | Mitochondrial aconitase | 2822 |
| L1210 | Mitochondrial aconitase | 2823 |
| L1211 | Modification methylase TaqI | EGK |
| L1212 | Modification methylase TaqI | PAT |
| L1213 | Modification methylase TagI | 2824 |
| L1214 | Modification methylase TaqI | 2825 |
| L1215 | Modification methylase TaqI | 2826 |
| L1216 | Modification methylase TaqI | 2827 |
| L1217 | Modification methylase TagI | 2828 |
| L1218 | Modification methylase TagI | 2829 |
| L1219 | Modification methylase TaqI | 2830 |
| L1220 | Modification methylase TaqI | 2831 |
| L1221 | Multidrug-efflux transporter 1 regulator | 2832 |
| L1222 | Muramoyl-pentapeptide carboxypeptidase | 2833 |
| L1223 | MutL | 2834 |
| L1224 | MutL | 2835 |
| L1225 | MutL | 2836 |
| L1226 | MutL | 2837 |
| L1227 | MutL | 2838 |
| L1228 | MutL | 2839 |
| L1229 | MutL | 2840 |
| L1230 | MutL | 2841 |
| L1231 | MutL | 2842 |
| L1232 | MutM (Fpg) protein | 2843 |
| L1233 | MutM (Fpg) protein | 2844 |
| L1234 | MutM (Fpg) protein | 2845 |
| L1235 | MutM (Fpg) protein | 2846 |
| L1236 | Myotubularin-related protein 2 | THW |
| L1237 | Myotubularin-related protein 2 | 2847 |
| L1238 | Myotubularin-related protein 2 | 2848 |
| L1239 | Myotubularin-related protein 2 | 2849 |
| L1240 | Myotubularin-related protein 2 | 2850 |
| L1241 | Myotubularin-related protein 2 | 2851 |
| L1242 | N utilization substance protein A | EIP |
| L1243 | N utilization substance protein A | 2852 |
| L1244 | N utilization substance protein A | 2853 |
| L1245 | N utilization substance protein A | 2854 |
| L1246 | N-acetylglucosamine kinase | CAY |
| L1247 | N-acetylglucosamine kinase | ISP |
| L1248 | N-acetylglucosamine kinase | 2855 |
| L1249 | N-acyl-D-glutamate deacylase | 2856 |
| L1250 | N-acyl-D-glutamate deacylase | 2857 |
| L1251 | N-acyl-D-glutamate deacylase | 2858 |
| L1252 | N-acyl-D-glutamate deacylase | 2859 |
| L1253 | N-acyl-D-glutamate deacylase | 2860 |
| L1254 | N-acyl-D-glutamate deacylase | 2861 |
| L1255 | N-acyl-D-glutamate deacylase | 2862 |
| L1256 | NAD-dependent malic enzyme | 2863 |
| L1257 | NAD-dependent malic enzyme | 2864 |
| L1258 | NADH peroxidase | ADT |
| L1259 | NADH peroxidase | AVG |
| L1260 | NADH peroxidase | TLI |
| L1261 | NADH peroxidase | 2865 |
| L1262 | NADH peroxidase | 2866 |
| L1263 | NADH peroxidase | 2867 |
| L1264 | NADH peroxidase | 2868 |
| L1265 | NADH peroxidase | 2869 |
| L1266 | NADH peroxidase | 2870 |
| L1267 | NADH pyrophosphatase | 2871 |
| L1268 | Naphthalene 1,2-dioxygenase alpha subunit | 2872 |
| L1269 | Naphthalene 1,2-dioxygenase alpha subunit | 2873 |
| L1270 | NEDD8-activating enzyme E1 catalytic subunit | 2874 |
| L1271 | NEDD8-activating enzyme E1 regulatory subunit | 2875 |
| L1272 | NEDD8-activating enzyme E1 regulatory subunit | 2876 |
| L1273 | NEDD8-activating enzyme E1 regulatory subunit | 2877 |
| L1274 | Nei endonuclease VIII-Like 1 | 2878 |
| L1275 | Nei endonuclease VIII-Like 1 | 2879 |
| L1276 | Nei endonuclease VIII-Like 1 | 2880 |
| L1277 | Nei endonuclease VIII-Like 1 | 2881 |
| L1278 | Neural cell adhesion molecule 2 | 2882 |
| L1279 | Neural cell adhesion molecule 2 | 2883 |
| L1280 | Neural cell adhesion molecule 2 | 2884 |
| L1281 | Neural cell adhesion molecule 2 | 2885 |
| L1282 | Neural cell adhesion molecule 2 | 2886 |
| L1283 | Neuroplastin | 2887 |
| L1284 | Neuroplastin | 2888 |
| L1285 | Neuroplastin | 2889 |
| L1286 | Neutrophil cytosol factor 1 | 2890 |
| L1287 | Nickel responsive regulator | 2891 |
| L1288 | NifU-like protein 2, chloroplast | 2892 |
| L1289 | Nitric oxide reductase | ILM |
| L1290 | Nitric oxide reductase | 2893 |
| L1291 | Nitric oxide reductase | 2894 |
| L1292 | Nitric oxide reductase | 2895 |
| L1293 | Nitric oxide reductase | 2896 |
| L1294 | Nitric oxide reductase | 2897 |
| L1295 | NK receptor | 2898 |
| L1296 | Nuclear factor of activated t-cells, cytoplasmic2 | 2899 |
| L1297 | Nucleolin RBD 12 | 2900 |
| L1298 | O-GlcNAcase NagJ | 2901 |
| L1299 | Orange carotenoid protein | EGV |
| L1300 | Orange carotenoid protein | 2902 |
| L1301 | Orange carotenoid protein | 2903 |
| L1302 | Om/Lys/Arg decarboxylase family protein | LEL |
| L1303 | Orn/Lys/Arg decarboxylase family protein | 2904 |
| L1304 | Orn/Lys/Arg decarboxylase family protein | 2905 |
| L1305 | Om/Lys/Arg decarboxylase family protein | 2906 |
| L1306 | Om/Lys/Arg decarboxylase family protein | 2907 |
| L1307 | Om/Lys/Arg decarboxylase family protein | 2908 |
| L1308 | Orn/Lys/Arg decarboxylase family protein | 2909 |
| L1309 | Orn/Lys/Arg decarboxylase family protein | 2910 |
| L1310 | Osteoclast-stimulating factor 1 | 2911 |
| L1311 | Oxygen-independent coproporphyrinogen III oxidase | 2912 |
| L1312 | Oxygen-independent coproporphyrinogen III oxidase | 2913 |
| L1313 | Oxygen-independent coproporphyrinogen III oxidase | 2914 |
| L1314 | Oxygen-independent coproporphyrinogen III oxidase | 2915 |
| L1315 | Oxygen-independent coproporphyrinogen III oxidase | 2916 |
| L1316 | Oxygen-independent coproporphyrinogen III oxidase | 2917 |
| L1317 | Oxygen-independent coproporphyrinogen III oxidase | 2918 |
| L1318 | Oxygen-independent coproporphyrinogen III oxidase | 2919 |
| L1319 | Oxygen-independent coproporphyrinogen III oxidase | 2920 |
| L1320 | Oxygen-independent coproporphyrinogen III oxidase | 2921 |
| L1321 | Paraneoplastic encephalomyelitis antigen HuD | 2922 |
| L1322 | Paraneoplastic encephalomyelitis antigen HuD | 2923 |
| L1323 | Penicillin binding protein 4 | 2924 |
| L1324 | Penicillin binding protein 4 | 2925 |
| L1325 | Penicillin binding protein 4 | 2926 |
| L1326 | Penicillin binding protein 4 | 2927 |
| L1327 | Penicillin binding protein 4 | 2928 |
| L1328 | Penicillin binding protein 4 | 2929 |
| L1329 | Penicillin binding protein 4 | 2930 |
| L1330 | Peptide-N(4)-(N-acetyl-beta-D- | DGV |
| | glucosaminyl)asparagine amidase F | |
| L1331 | Peptide-N(4)-(N-acetyl-beta-D- | 2931 |
| | glucosaminyl)asparagine amidase F | |
| L1332 | Peptide-N(4)-(N-acetyl-beta-D- | 2932 |
| | glucosaminyl)asparagine amidase F | |
| L1333 | Peptide-N(4)-(N-acetyl-beta-D- | 2933 |
| | glucosaminyl)asparagine amidase F | |
| L1334 | Peroxisomal primary amine oxidase | 2934 |
| L1335 | Peroxisomal primary amine oxidase | 2935 |
| L1336 | Peroxisome biogenesis factor 1 | 2936 |
| L1337 | Pesticidial crystal protein Cry2Aa | 2937 |
| L1338 | Pesticidial crystal protein Cry2Aa | 2938 |
| L1339 | Pesticidial crystal protein Cry2Aa | 2939 |
| L1340 | Phase 1 flagellin | DLT |
| L1341 | Phase 1 flagellin | 2940 |
| L1342 | Phase 1 flagellin | 2941 |
| L1343 | Phase 1 flagellin | 2942 |
| L1344 | Phase 1 flagellin | 2943 |
| L1345 | Phase 1 flagellin | 2944 |
| L1346 | Phase 1 flagellin | 2945 |
| L1347 | Phase 1 flagellin | 2946 |
| L1348 | Phase 1 flagellin | 2947 |
| L1349 | Phase 1 flagellin | 2948 |
| L1350 | Phase 1 flagellin | 2949 |
| L1351 | Phase 1 flagellin | 2950 |
| L1352 | Phase 1 flagellin | 2951 |
| L1353 | Phenylalanyl-tRNA synthetase beta chain | LGL |
| L1354 | Phenylalanyl-tRNA synthetase beta chain | 2952 |
| L1355 | Phenylalanyl-tRNA synthetase beta chain | 2953 |
| L1356 | Phenylalanyl-tRNA synthetase beta chain | 2954 |
| L1357 | Phenylalanyl-tRNA synthetase beta chain | 2955 |
| L1358 | Phenylalanyl-tRNA synthetase beta chain | 2956 |
| L1359 | Phenylalanyl-tRNA synthetase beta chain | 2957 |
| L1360 | Phenylalanyl-tRNA synthetase beta chain | 2958 |
| L1361 | Phenylalanyl-tRNA synthetase beta chain | 2959 |
| L1362 | Phenylalanyl-tRNA synthetase beta chain | 2960 |
| L1363 | Phenylalanyl-tRNA synthetase beta chain | 2961 |
| L1364 | Phenylalanyl-tRNA synthetase beta chain | 2962 |
| L1365 | Phenylalanyl-tRNA synthetase beta chain | 2963 |
| L1366 | Phenylalanyl-tRNA synthetase beta chain | 2964 |
| L1367 | Phosphatase | 2965 |
| L1368 | Phosphatase | 2966 |
| L1369 | Phosphatase | 2967 |
| L1370 | Phosphatidylinositol transfer protein Sec14p | YGT |
| L1371 | Phosphatidylinositol transfer protein Sec14p | 2968 |
| L1372 | Phosphatidylinositol transfer protein Sec14p | 2969 |
| L1373 | Phosphatidylserine synthase | 2970 |
| L1374 | Phosphatidylserine synthase | 2971 |
| L1375 | Phosphatidylserine synthase | 2972 |
| L1376 | Phosphoglycolate phosphatase | 2973 |
| L1377 | Phosphoglycolate phosphatase | 2974 |
| L1378 | Phosphoglycolate phosphatase | 2975 |
| L1379 | Phosphoglycolate phosphatase | 2976 |
| L1380 | Phospholipase D | 2977 |
| L1381 | Phospholipase D | 2978 |
| L1382 | Phospholipase D | 2979 |
| L1383 | Phosphoribosylamine—glycine ligase | 2980 |
| L1384 | Phosphoribosylamine—glycine ligase | 2981 |
| L1385 | Phosphotransferase system, enzyme I | 2982 |
| L1386 | Photosystem II d1 protease | 2983 |
| L1387 | Photosystem II d1 protease | 2984 |
| L1388 | Photosystem II d1 protease | 2985 |
| L1389 | Photosystem II d1 protease | 2986 |
| L1390 | Photosystem II d1 protease | 2987 |
| L1391 | Phthalate dioxygenase reductase | 2988 |
| L1392 | P-hydroxybenzoate hydroxylase | DGL |
| L1393 | P-hydroxybenzoate hydroxylase | IDL |
| L1394 | P-hydroxybenzoate hydroxylase | RLK |
| L1395 | P-hydroxybenzoate hydroxylase | 2989 |
| L1396 | P-hydroxybenzoate hydroxylase | 2990 |
| L1397 | P-hydroxybenzoate hydroxylase | 2991 |
| L1398 | P-hydroxybenzoate hydroxylase | 2992 |
| L1399 | P-hydroxybenzoate hydroxylase | 2993 |
| L1400 | P-hydroxybenzoate hydroxylase | 2994 |
| L1401 | P-hydroxybenzoate hydroxylase | 2995 |
| L1402 | P-hydroxybenzoate hydroxylase | 2996 |
| L1403 | P-hydroxybenzoate hydroxylase | 2997 |
| L1404 | P-hydroxybenzoate hydroxylase | 2998 |
| L1405 | P-hydroxybenzoate hydroxylase | 2999 |
| L1406 | P-hydroxybenzoate hydroxylase | 3000 |
| L1407 | P-hydroxybenzoate hydroxylase | 3001 |
| L1408 | P-hydroxybenzoate hydroxylase | 3002 |
| L1409 | P-hydroxybenzoate hydroxylase | 3003 |
| L1410 | P-hydroxybenzoate hydroxylase | 3004 |
| L1411 | P-hydroxybenzoate hydroxylase | 3005 |
| L1412 | Phytase | LNF |
| L1413 | Phytase | QSN |
| L1414 | Phytase | 3006 |
| L1415 | Phytase | 3007 |
| L1416 | Phytase | 3008 |
| L1417 | Phytase | 3009 |
| L1418 | Phytase | 3010 |
| L1419 | Phytase | 3011 |
| L1420 | Phytase | 3012 |
| L1421 | Phytase | 3013 |
| L1422 | Pirin | LKS |
| L1423 | Pirin | SGE |
| L1424 | Pirin | 3014 |
| L1425 | Pirin | 3015 |
| L1426 | Pirin | 3016 |
| L1427 | Pirin | 3017 |
| L1428 | Pirin | 3018 |
| L1429 | Pirin | 3019 |
| L1430 | Poly(A) polymerase | 3020 |
| L1431 | Poly(A) polymerase | 3021 |
| L1432 | Poly(A) polymerase | 3022 |
| L1433 | Poly(A) polymerase | 3023 |
| L1434 | Poly(A) polymerase | 3024 |
| L1435 | Poly(A) polymerase | 3025 |
| L1436 | Poly(A) polymerase | 3026 |
| L1437 | Poly(A) polymerase | 3027 |
| L1438 | Poly(A) polymerase | 3028 |
| L1439 | Poly(A) polymerase | 3029 |
| L1440 | Poly(A) polymerase | 3030 |
| L1441 | Poly(A) polymerase | 3031 |
| L1442 | Poly(rC)-binding protein 2 | 3032 |
| L1443 | Polymerase x | 3033 |
| L1444 | Polymerase x | 3034 |
| L1445 | Polypeptide N-acetylgalactosaminyltransferase 2 | 3035 |
| L1446 | Polypeptide N-acetylgalactosaminyltransferase 2 | 3036 |
| L1447 | Polyphosphate kinase | 3037 |
| L1448 | Polyphosphate kinase | 3038 |
| L1449 | Polyphosphate kinase | 3039 |
| L1450 | Polypyrimidine tract-binding protein | 3040 |
| L1451 | Porcine pancreatic spasmolytic polypeptide | 3041 |
| L1452 | Possible 3-mercaptopyruvate sulfurtransferase | LFR |
| L1453 | Possible 3-mercaptopyruvate sulfurtransferase | YGM |
| L1454 | Possible 3-mercaptopyruvate sulfurtransferase | 3042 |
| L1455 | Possible 3-mercaptopyruvate sulfurtransferase | 3043 |
| L1456 | Possible 3-mercaptopyruvate sulfurtransferase | 3044 |
| L1457 | Postsynaptic density protein 95 | 3045 |
| L1458 | Postsynaptic density protein 95 | 3046 |
| L1459 | Predicted sugar phosphatases of the HAD superfamily | IAI |
| L1460 | Predicted sugar phosphatases of the HAD superfamily | 3047 |
| L1461 | Predicted sugar phosphatases of the HAD superfamily | 3048 |
| L1462 | Predicted sugar phosphatases of the HAD superfamily | 3049 |
| L1463 | Predicted sugar phosphatases of the HAD superfamily | 3050 |
| L1464 | Predicted sugar phosphatases of the HAD superfamily | 3051 |
| L1465 | Predicted sugar phosphatases of the HAD superfamily | 3052 |
| L1466 | Predicted sugar phosphatases of the HAD superfamily | 3053 |
| L1467 | Predicted sugar phosphatases of the HAD superfamily | 3054 |
| L1468 | Preprotein translocase SecA | ITF |
| L1469 | Preprotein translocase SecA | LID |
| L1470 | Preprotein translocase SecA | 3055 |
| L1471 | Preprotein translocase SecA | 3056 |
| L1472 | Preprotein translocase SecA | 3057 |
| L1473 | Preprotein translocase SecA | 3058 |
| L1474 | Preprotein translocase SecA | 3059 |
| L1475 | Preprotein translocase SecA | 3060 |
| L1476 | Preprotein translocase SecA | 3061 |
| L1477 | Preprotein translocase SecA | 3062 |
| L1478 | Preprotein translocase SecA | 3063 |
| L1479 | Preprotein translocase SecA | 3064 |
| L1480 | Preprotein translocase SecA | 3065 |
| L1481 | Preprotein translocase SecA | 3066 |
| L1482 | Preprotein translocase SecA | 3067 |
| L1483 | Preprotein translocase SecA | 3068 |
| L1484 | Preprotein translocase SecA | 3069 |
| L1485 | Preprotein translocase SecA | 3070 |
| L1486 | Preprotein translocase SecA | 3071 |
| L1487 | PrfA | ING |
| L1488 | Probable 16s rRNA-processing protein RimM | 3072 |
| L1489 | Probable biphenyl-2,3-diol 1,2-dioxygenase BphC | 3073 |
| L1490 | Probable chorismate mutase | LLA |
| L1491 | Probable chorismate mutase | 3074 |
| L1492 | Probable chorismate mutase | 3075 |
| L1493 | Probable ferredoxin-dependent nitrite reductase NirA | VPL |
| L1494 | Probable ferredoxin-dependent nitrite reductase NirA | WGI |
| L1495 | Probable ferredoxin-dependent nitrite reductase NirA | 3076 |
| L1496 | Probable ferredoxin-dependent nitrite reductase NirA | 3077 |
| L1497 | Probable ferredoxin-dependent nitrite reductase NirA | 3078 |
| L1498 | Probable ferredoxin-dependent nitrite reductase NirA | 3079 |
| L1499 | Probable ferredoxin-dependent nitrite reductase NirA | 3080 |
| L1500 | Probable ferredoxin-dependent nitrite reductase NirA | 3081 |
| L1501 | Probable ferredoxin-dependent nitrite reductase NirA | 3082 |
| L1502 | Probable ferredoxin-dependent nitrite reductase NirA | 3083 |
| L1503 | Probable ferredoxin-dependent nitrite reductase NirA | 3084 |
| L1504 | Probable ferredoxin-dependent nitrite reductase NirA | 3085 |
| L1505 | Probable ferredoxin-dependent nitrite reductase NirA | 3086 |
| L1506 | Probable ferredoxin-dependent nitrite reductase NirA | 3087 |
| L1507 | Probable galactokinase | 3088 |
| L1508 | Probable galactokinase | 3089 |
| L1509 | Probable galactokinase | 3090 |
| L1510 | Probable galactokinase | 3091 |
| L1511 | Probable galactokinase | 3092 |
| L1512 | Probable galactokinase | 3093 |
| L1513 | Probable galactokinase | 3094 |
| L1514 | Probable galactokinase | 3095 |
| L1515 | Probable galactokinase | 3096 |
| L1516 | Probable galactokinase | 3097 |
| L1517 | Probable galactokinase | 3098 |
| L1518 | Probable galactokinase | 3099 |
| L1519 | Probable glutathione S-transferase | 3100 |
| L1520 | Probable GST-related protein | 3101 |
| L1521 | Probable HPr(Ser) kinase/phosphatase | 3102 |
| L1522 | Probable thiosulfate sulfur transferase | 3103 |
| L1523 | Probable thiosulfate sulfur transferase | 3104 |
| L1524 | Probable thiosulfate sulfur transferase | 3105 |
| L1525 | Probable thiosulfate sulfur transferase | 3106 |
| L1526 | Probable thiosulfate sulfur transferase | 3107 |
| L1527 | Probable thiosulfate sulfur transferase | 3108 |
| L1528 | Probable thiosulfate sulfur transferase | 3109 |
| L1529 | Probable thiosulfate sulfur transferase | 3110 |
| L1530 | Probable tRNA pseudouridine synthase D | 3111 |
| L1531 | Probable tRNA pseudouridine synthase D | 3112 |
| L1532 | Probable tRNA pseudouridine synthase D | 3113 |
| L1533 | Probable tRNA pseudouridine synthase D | 3114 |
| L1534 | Probable tRNA pseudouridine synthase D | 3115 |
| L1535 | Probable tRNA pseudouridine synthase D | 3116 |
| L1536 | Programed cell death protein 8 | SKE |
| L1537 | Programed cell death protein 8 | TLQ |
| L1538 | Programed cell death protein 8 | 3117 |
| L1539 | Programed cell death protein 8 | 3118 |
| L1540 | Programed cell death protein 8 | 3119 |
| L1541 | Programed cell death protein 8 | 3120 |
| L1542 | Programed cell death protein 8 | 3121 |
| L1543 | Programed cell death protein 8 | 3122 |
| L1544 | Programed cell death protein 8 | 3123 |
| L1545 | Programed cell death protein 8 | 3124 |
| L1546 | Programed cell death protein 8 | 3125 |
| L1547 | Programed cell death protein 8 | 3126 |
| L1548 | Programed cell death protein 8 | 3127 |
| L1549 | Programed cell death protein 8 | 3128 |
| L1550 | Programed cell death protein 8 | 3129 |
| L1551 | Programed cell death protein 8 | 3130 |
| L1552 | Programed cell death protein 8 | 3131 |
| L1553 | Programed cell death protein 8 | 3132 |
| L1554 | Programed cell death protein 8 | 3133 |
| L1555 | Programed cell death protein 8 | 3134 |
| L1556 | Proline oxidase | 3135 |
| L1557 | Prolyl-tRNA synthetase | 3136 |
| L1558 | Prostaglandin G/H synthase 1 | PEI |
| L1559 | Prostaglandin G/H synthase 1 | 3137 |
| L1560 | Protease | 3138 |
| L1561 | Protease | 3139 |
| L1562 | Protease | 3140 |
| L1563 | Protease DegS | 3141 |
| L1564 | Protease DegS | 3142 |
| L1565 | Protease DegS | 3143 |
| L1566 | Protease DegS | 3144 |
| L1567 | Protease III | NAR |
| L1568 | Protease III | RNP |
| L1569 | Protease III | 3145 |
| L1570 | Protease III | 3146 |
| L1571 | Protease III | 3147 |
| L1572 | Protease III | 3148 |
| L1573 | Protease III | 3149 |
| L1574 | Protease III | 3150 |
| L1575 | Protease III | 3151 |
| L1576 | Protease III | 3152 |
| L1577 | Protease III | 3153 |
| L1578 | Protease III | 3154 |
| L1579 | Protease III | 3155 |
| L1580 | Protease III | 3156 |
| L1581 | Protease III | 3157 |
| L1582 | Protease III | 3158 |
| L1583 | Protease III | 3159 |
| L1584 | Protease III | 3160 |
| L1585 | Protease III | 3161 |
| L1586 | Protease III | 3162 |
| L1587 | Protease III | 3163 |
| L1588 | Protease III | 3164 |
| L1589 | Protection of telomeres 1 | 3165 |
| L1590 | Protection of telomeres 1 | 3166 |
| L1591 | Protein (CD58) | 3167 |
| L1592 | Protein (CRP1) | 3168 |
| L1593 | Protein (DNA polymerase) | 3169 |
| L1594 | Protein (DNA polymerase) | 3170 |
| L1595 | Protein (DNA polymerase) | 3171 |
| L1596 | Protein (electron transfer flavoprotein) | 3172 |
| L1597 | Protein (electron transfer flavoprotein) | 3173 |
| L1598 | Protein (Ffh) | 3174 |
| L1599 | Protein (Ffh) | 3175 |
| L1600 | Protein (Ffh) | 3176 |
| L1601 | Protein (Ffh) | 3177 |
| L1602 | Protein (Ffh) | 3178 |
| L1603 | Protein (FokI restriction endonuclease) | 3179 |
| L1604 | Protein (FokI restriction endonuclease) | 3180 |
| L1605 | Protein (FokI restriction endonuclease) | 3181 |
| L1606 | Protein (FokI restriction endonuclease) | 3182 |
| L1607 | Protein (FokI restriction endonuclease) | 3183 |
| L1608 | Protein (FokI restriction endonuclease) | 3184 |
| L1609 | Protein (FokI restriction endonuclease) | 3185 |
| L1610 | Protein (FokI restriction endonuclease) | 3186 |
| L1611 | Protein (FokI restriction endonuclease) | 3187 |
| L1612 | Protein (neural cell adhesion molecule) | 3188 |
| L1613 | Protein (neural cell adhesion molecule) | 3189 |
| L1614 | Protein (neural cell adhesion molecule) | 3190 |
| L1615 | Protein (nine-haem cytochrome c) | FTH |
| L1616 | Protein (nine-haem cytochrome c) | 3191 |
| L1617 | Protein (nine-haem cytochrome c) | 3192 |
| L1618 | Protein (nine-haem cytochrome c) | 3193 |
| L1619 | Protein (nine-haem cytochrome c) | 3194 |
| L1620 | Protein (nine-haem cytochrome c) | 3195 |
| L1621 | Protein (nine-haem cytochrome c) | 3196 |
| L1622 | Protein (nine-haem cytochrome c) | 3197 |
| L1623 | Protein (nine-haem cytochrome c) | 3198 |
| L1624 | Protein (protease/helicase NS3) | 3199 |
| L1625 | Protein (protease/helicase NS3) | 3200 |
| L1626 | Protein (protease/helicase NS3) | 3201 |
| L1627 | Protein (protease/helicase NS3) | 3202 |
| L1628 | Protein disulfide oxidoreductase | 3203 |
| L1629 | Protein disulfide oxidoreductase | 3204 |
| L1630 | Protein disulfide-isomerase A4 | 3205 |
| L1631 | Protein kinase PKR | 3206 |
| L1632 | Protein kinase PKR | 3207 |
| L1633 | Protein TolB | VNK |
| L1634 | Protein TolB | 3208 |
| L1635 | Protein TolB | 3209 |
| L1636 | Protein TolB | 3210 |
| L1637 | Protein TolB | 3211 |
| L1638 | Protein TolB | 3212 |
| L1639 | Protein TolB | 3213 |
| L1640 | Protein translation elongation factor 1A | 3214 |
| L1641 | Protein transport protein Sec24 | DRN |
| L1642 | Protein transport protein Sec24 | 3215 |
| L1643 | Protein transport protein Sec24 | 3216 |
| L1644 | Protein transport protein Sec24 | 3217 |
| L1645 | Protein transport protein Sec24 | 3218 |
| L1646 | Protein transport protein Sec24 | 3219 |
| L1647 | Protein transport protein Sec24 | 3220 |
| L1648 | Protein transport protein Sec24 | 3221 |
| L1649 | Protein transport protein Sec24 | 3222 |
| L1650 | Pseudouridine synthase CBF5 | AIQ |
| L1651 | Pseudouridine synthase CBF5 | 3223 |
| L1652 | Pseudouridine synthase CBF5 | 3224 |
| L1653 | Putative acetylglutamate synthase | 3225 |
| L1654 | Putative acetylglutamate synthase | 3226 |
| L1655 | Putative acetylglutamate synthase | 3227 |
| L1656 | Putative family 31 glucosidase Yicl | 3228 |
| L1657 | Putative family 31 glucosidase Yicl | 3229 |
| L1658 | Putative family 31 glucosidase Yicl | 3230 |
| L1659 | Putative glutathione transferase | 3231 |
| L1660 | Putative glutathione transferase | 3232 |
| L1661 | Putative glutathione transferase | 3233 |
| L1662 | Putative GNTR-family transcriptional regulator | 3234 |
| L1663 | Putative GNTR-family transcriptional regulator | 3235 |
| L1664 | Putative GNTR-family transcriptional regulator | 3236 |
| L1665 | Putative HTH-type transcriptional regulator PH0061 | 3237 |
| L1666 | Putative HTH-type transcriptional regulator PH1519 | 3238 |
| L1667 | Putative HTH-type transcriptional regulator PH1519 | 3239 |
| L1668 | Putative metallopeptidase | 3240 |
| L1669 | Putative N-acetylmannosamine kinase | 3241 |
| L1670 | Putative N-acetylmannosamine kinase | 3242 |
| L1671 | Putative N-acetylmannosamine kinase | 3243 |
| L1672 | Putative NADP oxidoreductase BF3122 | 3244 |
| L1673 | Putative NADP oxidoreductase BF3122 | 3245 |
| L1674 | Putative NADP oxidoreductase BF3122 | 3246 |
| L1675 | Putative NADP oxidoreductase BF3122 | 3247 |
| L1676 | Putative oxidoreductase | 3248 |
| L1677 | Putative secreted alpha-galactosidase | PLP |
| L1678 | Putative secreted alpha-galactosidase | TNG |
| L1679 | Putative secreted alpha-galactosidase | 3249 |
| L1680 | Putative secreted alpha-galactosidase | 3250 |
| L1681 | Putative secreted alpha-galactosidase | 3251 |
| L1682 | Putative tagatose-6-phosphate ketose/aldose isomerase | DKA |
| L1683 | Putative tagatose-6-phosphate ketose/aldose isomerase | 3252 |
| L1684 | Putative tagatose-6-phosphate ketose/aldose isomerase | 3253 |
| L1685 | Putative tagatose-6-phosphate ketose/aldose isomerase | 3254 |
| L1686 | Putative transcriptional regulator GntR | 3255 |
| L1687 | Putative transcriptional repressor (TetR/AcrR family) | KFR |
| L1688 | Putative transcriptional repressor (TetR/AcrR family) | 3256 |
| L1689 | Putative uncharacterized protein | 3257 |
| L1690 | Putative uncharacterized protein | 3258 |
| L1691 | Putative uncharacterized protein | 3259 |
| L1692 | Putative uncharacterized protein | 3260 |
| L1693 | Putative uncharacterized protein | 3261 |
| L1694 | Putative uncharacterized protein | 3262 |
| L1695 | Putative uncharacterized protein | 3263 |
| L1696 | Putative uncharacterized protein | 3264 |
| L1697 | Putative uncharacterized protein | 3265 |
| L1698 | Pyruvate decarboxylase | CAA |
| L1699 | Pyruvate decarboxylase | 3266 |
| L1700 | Pyruvate decarboxylase | 3267 |
| L1701 | Pyruvate decarboxylase | 3268 |
| L1702 | Pyruvate decarboxylase | 3269 |
| L1703 | Pyruvate decarboxylase | 3270 |
| L1704 | Pyruvate dehydrogenase [lipoamide] | YVP |
| | kinase isozyme 2, mitochondrial | |
| L1705 | Pyruvate dehydrogenase [lipoamide] | 3271 |
| | kinase isozyme 2, mitochondrial | |
| L1706 | Pyruvate dehydrogenase [lipoamide] | 3272 |
| | kinase isozyme 2, mitochondrial | |
| L1707 | Pyruvate dehydrogenase E1 | 3273 |
| | component subunit beta, mitochondrial | |
| L1708 | Pyruvate dehydrogenase E1 | 3274 |
| | component subunit beta, mitochondrial | |
| L1709 | Pyruvate dehydrogenase E1 | 3275 |
| | component subunit beta, mitochondrial | |
| L1710 | Pyruvate phosphate dikinase | FNP |
| L1711 | Pyruvate phosphate dikinase | SAL |
| L1712 | Pyruvate phosphate dikinase | 3276 |
| L1713 | Pyruvate phosphate dikinase | 3277 |
| L1714 | Pyruvate phosphate dikinase | 3278 |
| L1715 | Pyruvate phosphate dikinase | 3279 |
| L1716 | Pyruvate phosphate dikinase | 3280 |
| L1717 | Pyruvate phosphate dikinase | 3281 |
| L1718 | Pyruvate phosphate dikinase | 3282 |
| L1719 | Pyruvate phosphate dikinase | 3283 |
| L1720 | Pyruvate phosphate dikinase | 3284 |
| L1721 | Pyruvate phosphate dikinase | 3285 |
| L1722 | Pyruvate-ferredoxin oxidoreductase | VRL |
| L1723 | Pyruvate-ferredoxin oxidoreductase | 3286 |
| L1724 | Pyruvate-ferredoxin oxidoreductase | 3287 |
| L1725 | Pyruvate-ferredoxin oxidoreductase | 3288 |
| L1726 | Pyruvate-ferredoxin oxidoreductase | 3289 |
| L1727 | Pyruvate-ferredoxin oxidoreductase | 3290 |
| L1728 | Pyruvate-ferredoxin oxidoreductase | 3291 |
| L1729 | Pyruvate-ferredoxin oxidoreductase | 3292 |
| L1730 | Pyruvate-ferredoxin oxidoreductase | 3293 |
| L1731 | Pyruvate-ferredoxin oxidoreductase | 3294 |
| L1732 | Pyruvate-ferredoxin oxidoreductase | 3295 |
| L1733 | Pyruvate-ferredoxin oxidoreductase | 3296 |
| L1734 | Pyruvate-ferredoxin oxidoreductase | 3297 |
| L1735 | Pyruvate-ferredoxin oxidoreductase | 3298 |
| L1736 | Pyruvate-ferredoxin oxidoreductase | 3299 |
| L1737 | Pyruvate-ferredoxin oxidoreductase | 3300 |
| L1738 | Pyruvate-ferredoxin oxidoreductase | 3301 |
| L1739 | Pyruvate-ferredoxin oxidoreductase | 3302 |
| L1740 | Pyruvate-ferredoxin oxidoreductase | 3303 |
| L1741 | Pyruvate-ferredoxin oxidoreductase | 3304 |
| L1742 | Quinohemoprotein amine dehydrogenase 60 kDa subunit | 3305 |
| L1743 | Quinohemoprotein amine dehydrogenase 60 kDa subunit | 3306 |
| L1744 | Quinohemoprotein amine dehydrogenase 60 kDa subunit | 330 |
| L1745 | Quinohemoprotein amine dehydrogenase 60 kDa subunit | 3308 |
| L1746 | Quinohemoprotein amine dehydrogenase 60 kDa subunit | 3309 |
| L1747 | Quinohemoprotein amine dehydrogenase 60 kDa subunit | 3310 |
| L1748 | Quinohemoprotein amine dehydrogenase 60 kDa subunit | 3311 |
| L1749 | Quinohemoprotein amine dehydrogenase 60 kDa subunit | 3312 |
| L1750 | Quinohemoprotein amine dehydrogenase 60 kDa subunit | 3313 |
| L1751 | Quinohemoprotein amine dehydrogenase 60 kDa subunit | 3314 |
| L1752 | Rag1 | 3315 |
| L1753 | Rag1 | 3316 |
| L1754 | Receptor-type tyrosine-protein phosphatase Mu | 3317 |
| L1755 | Receptor-type tyrosine-protein phosphatase Mu | 3318 |
| L1756 | RecG | 3319 |
| L1757 | RecG | 3320 |
| L1758 | RecG | 3321 |
| L1759 | RecG | 3322 |
| L1760 | RecG | 3323 |
| L1761 | RecG | 3324 |
| L1762 | RecG | 3325 |
| L1763 | RecG | 3326 |
| L1764 | RecG | 3327 |
| L1765 | RecG | 3328 |
| L1766 | RecG | 3329 |
| L1767 | RecG | 3330 |
| L1768 | Recombination endonuclease VII | 3331 |
| L1769 | Recombining binding protein suppressor of hairless | 3332 |
| L1770 | Restriction endonuclease | ERV |
| L1771 | Restriction endonuclease | 3333 |
| L1772 | Restriction endonuclease | 3334 |
| L1773 | Restriction endonuclease | 3335 |
| L1774 | Retinaldehyde-binding protein 1 | QYP |
| L1775 | Retinaldehyde-binding protein 1 | 3336 |
| L1776 | Retinaldehyde-binding protein 1 | 3337 |
| L1777 | Retinoblastoma pocket | 3338 |
| L1778 | RfcS | ITD |
| L1779 | RfcS | LTE |
| L1780 | RfcS | 3339 |
| L1781 | RfcS | 3340 |
| L1782 | RfcS | 3341 |
| L1783 | RfcS | 3342 |
| L1784 | RfcS | 3343 |
| L1785 | Rhamnogalacturonase B | 3344 |
| L1786 | Rhamnogalacturonase B | 3345 |
| L1787 | Rhamnogalacturonase B | 3346 |
| L1788 | Rhamnogalacturonase B | 3347 |
| L1789 | Rhamnogalacturonase B | 3348 |
| L1790 | Rhodniin | 3349 |
| L1791 | Rhodniin | 3350 |
| L1792 | Riboflavin synthase | 3351 |
| L1793 | Ribonuclease D | 3352 |
| L1794 | Ribonuclease D | 3353 |
| L1795 | Ribonuclease D | 3354 |
| L1796 | Ribonuclease TTHA0252 | 3355 |
| L1797 | Ribonuclease TTHA0252 | 3356 |
| L1798 | Ribonuclease TTHA0252 | 3357 |
| L1799 | Ribonuclease TTHA0252 | 3358 |
| L1800 | Ribonuclease TTHA0252 | 3359 |
| L1801 | Ribonuclease TTHA0252 | 3360 |
| L1802 | Ribonucleotide reductase r1 protein | 3361 |
| L1803 | Ribonucleotide reductase r1 protein | 3362 |
| L1804 | Ribonucleotide reductase r1 protein | 3363 |
| L1805 | Ribonucleotide reductase r1 protein | 3364 |
| L1806 | Ribonucleotide reductase r1 protein | 3365 |
| L1807 | Ribonucleotide reductase r1 protein | 3366 |
| L1808 | Ribosome maturation factor RimM | 3367 |
| L1809 | Ribulose-1,5 bisphosphate | RHA |
| | carboxylase/oxygenase large subunit N- | |
| | methyltransferase | |
| L1810 | Ribulose-1,5 bisphosphate | 3368 |
| | carboxylase/oxygenase large subunit N- | |
| | methyltransferase | |
| L1811 | Rigid extended P-rich | 3369 |
| L1812 | Rigid extended P-rich | 3370 |
| L1813 | Rigid extended P-rich | 3371 |
| L1814 | Rigid extended P-rich | 3372 |
| L1815 | Rigid extended P-rich | 3373 |
| L1816 | Rigid extended P-rich | 3374 |
| L1817 | Rigid extended P-rich | 3375 |
| L1818 | Rigid extended P-rich | 3376 |
| L1819 | Rigid extended P-rich | 3377 |
| L1820 | Rigid extended P-rich | 3378 |
| L1821 | Rigid extended P-rich | 3379 |
| L1822 | Rigid extended P-rich | 3380 |
| L1823 | Rigid extended P-rich | 3381 |
| L1824 | Rigid extended P-rich | 3382 |
| L1825 | Rigid extended P-rich | 3383 |
| L1826 | Rigid helical | 3384 |
| L1827 | Rigid helical | 3385 |
| L1828 | Rigid helical | 3386 |
| L1829 | Rigid helical | 3387 |
| L1830 | Rigid helical | 3388 |
| L1831 | Rigid helical | 3389 |
| L1832 | Rigid helical | 3390 |
| L1833 | Rigid helical | 3391 |
| L1834 | RNA binding domain of rho | 3392 |
| | transcription termination factor | |
| L1835 | RNA binding protein ZFa | 3393 |
| L1836 | Rob transcription factor | 3394 |
| L1837 | Rob transcription factor | 3395 |
| L1838 | RP2 lipase | 3396 |
| L1839 | Rubrerythrin | 3397 |
| L1840 | S-adenosylmethionine synthetase | 3398 |
| L1841 | Sarcoplasmic/endoplasmic reticulum calcium ATPase 1 | QFD |
| L1842 | Sarcoplasmic/endoplasmic reticulum calcium ATPase 1 | 3399 |
| L1843 | Sarcoplasmic/endoplasmic reticulum calcium ATPase 1 | 3400 |
| L1844 | Sarcoplasmic/endoplasmic reticulum calcium ATPase 1 | 3401 |
| L1845 | Sarcoplasmic/endoplasmic reticulum calcium ATPase 1 | 3402 |
| L1846 | Sarcoplasmic/endoplasmic reticulum calcium ATPase 1 | 3403 |
| L1847 | Sarcoplasmic/endoplasmic reticulum calcium ATPase 1 | 3404 |
| L1848 | Sarcoplasmic/endoplasmic reticulum calcium ATPase 1 | 3405 |
| L1849 | Sarcoplasmic/endoplasmic reticulum calcium ATPase 1 | 3406 |
| L1850 | Sarcoplasmic/endoplasmic reticulum calcium ATPase 1 | 3407 |
| L1851 | Sarcoplasmic/endoplasmic reticulum calcium ATPase 1 | 3408 |
| L1852 | Sarcoplasmic/endoplasmic reticulum calcium ATPase 1 | 3409 |
| L1853 | Sarcoplasmic/endoplasmic reticulum calcium ATPase 1 | 3410 |
| L1854 | Sarcoplasmic/endoplasmic reticulum calcium ATPase 1 | 3411 |
| L1855 | Sarcoplasmic/endoplasmic reticulum calcium ATPase 1 | 3412 |
| L1856 | Sarcoplasmic/endoplasmic reticulum calcium ATPase 1 | 3413 |
| L1857 | Sarcoplasmic/endoplasmic reticulum calcium ATPase 1 | 3414 |
| L1858 | Sarcoplasmic/endoplasmic reticulum calcium ATPase 1 | 3415 |
| L1859 | Sarcoplasmic/endoplasmic reticulum calcium ATPase 1 | 3416 |
| L1860 | Sarcoplasmic/endoplasmic reticulum calcium ATPase 1 | 3417 |
| L1861 | Sarcoplasmic/endoplasmic reticulum calcium ATPase 1 | 3418 |
| L1862 | Sarcoplasmic/endoplasmic reticulum calcium ATPase 1 | 3419 |
| L1863 | Sarcoplasmic/endoplasmic reticulum calcium ATPase 1 | 3420 |
| L1864 | Sarcoplasmic/endoplasmic reticulum calcium ATPase 1 | 3421 |
| L1865 | Sarcoplasmic/endoplasmic reticulum calcium ATPase 1 | 3422 |
| L1866 | Sarcoplasmic/endoplasmic reticulum calcium ATPase 1 | 3423 |
| L1867 | Scavenger mRNA-decapping enzyme DcpS | ETG |
| L1868 | Scavenger mRNA-decapping enzyme DcpS | NIT |
| L1869 | Scavenger mRNA-decapping enzyme DcpS | 3424 |
| L1870 | Scavenger mRNA-decapping enzyme DcpS | 3425 |
| L1871 | Sec18p (residues 22-210) | 3426 |
| L1872 | Sec18p (residues 22-210) | 3427 |
| L1873 | Sensor protein | 3428 |
| L1874 | Sensor protein | 3429 |
| L1875 | Septum site-determining protein MinC | 3430 |
| L1876 | Serine acetyltransferase | 3431 |
| L1877 | Serine protease/NTPase/helicase NS3 | 3432 |
| L1878 | Serine protease/NTPase/helicase NS3 | 3433 |
| L1879 | Serine protease/NTPase/helicase NS3 | 3434 |
| L1880 | Serine rich linker | 3435 |
| L1881 | Serine rich linker | 3436 |
| L1882 | Serine rich linker | 3437 |
| L1883 | Serine rich linker | 3438 |
| L1884 | Serine rich linker | 3439 |
| L1885 | Serine rich linker | 3440 |
| L1886 | Serine rich linker | 3441 |
| L1887 | Seryl-tRNA synthetase | 3442 |
| L1888 | Sialidase | 3443 |
| L1889 | Sialidase B | SLT |
| L1890 | Sialidase B | VRE |
| L1891 | Sialidase B | 3444 |
| L1892 | Sialidase B | 3445 |
| L1893 | Sialidase B | 3446 |
| L1894 | Sialidase B | 3447 |
| L1895 | Sialidase B | 3448 |
| L1896 | Sialidase B | 3449 |
| L1897 | SIgnal peptIdase I | SRR |
| L1898 | SIgnal peptIdase I | 3450 |
| L1899 | SIgnal peptIdase I | 3451 |
| L1900 | SIgnal peptIdase I | 3452 |
| L1901 | SIgnal peptIdase I | 3453 |
| L1902 | SIgnal peptIdase I | 3454 |
| L1903 | SIgnal peptIdase I | 3455 |
| L1904 | SIgnal peptIdase I | 3456 |
| L1905 | SIgnal peptIdase I | 3457 |
| L1906 | SIgnal peptIdase I | 3458 |
| L1907 | SIgnal peptIdase I | 3459 |
| L1908 | Signal recognition particle protein | 3460 |
| L1909 | Signal transducer and activator | NDE |
| | of transcription1-alpha/beta | |
| L1910 | Signal transducer and activator | SSF |
| | of transcription1-alpha/beta | |
| L1911 | Signal transducer and activator | 3461 |
| | of transcription1-alpha/beta | |
| L1912 | Signal transducer and activator | 3462 |
| | of transcription1-alpha/beta | |
| L1913 | Signal transducer and activator | 3463 |
| | of transcription1-alpha/beta | |
| L1914 | Signal transducer and activator | 3464 |
| | of transcription1-alpha/beta | |
| L1915 | Signal transduction protein CBL | 3465 |
| L1916 | Signal transduction protein CBL | 3466 |
| L1917 | Similar to RAD54-like | AKP |
| L1918 | Similar to RAD54-like | EYF |
| L1919 | Similar to RAD54-like | RFE |
| L1920 | Similar to RAD54-like | 3467 |
| L1921 | Similar to RAD54-like | 3468 |
| L1922 | Similar to RAD54-like | 3469 |
| L1923 | Similar to RAD54-like | 3470 |
| L1924 | Similar to RAD54-like | 3471 |
| L1925 | Similar to RAD54-like | 3472 |
| L1926 | Similar to RAD54-like | 3473 |
| L1927 | Similar to RAD54-like | 3474 |
| L1928 | Similar to RAD54-like | 3475 |
| L1929 | Similar to RAD54-like | 3476 |
| L1930 | SKD1 protein | LMQ |
| L1931 | SKD1 protein | 3477 |
| L1932 | SKD1 protein | 3478 |
| L1933 | SKDI protein | 3479 |
| L1934 | SKD1 protein | 3480 |
| L1935 | SKD1 protein | 3481 |
| L1936 | Sll1358 protein | 3482 |
| L1937 | Sll1358 protein | 3483 |
| L1938 | Sll1358 protein | 3484 |
| L1939 | Sll1358 protein | 3485 |
| L1940 | Soluble IFN alpha/beta receptor | 3486 |
| L1941 | Soluble IFN alpha/beta receptor | 3487 |
| L1942 | Sporozoite-specific SAG protein | 3488 |
| L1943 | Staphylococcal accessory regulator a homologue | 3489 |
| L1944 | Staphylococcal nuclease domain-containing protein 1 | 3490 |
| L1945 | Staphylococcal nuclease domain-containing protein 1 | 3491 |
| L1946 | Staphylococcal nuclease domain-containing protein 1 | 3492 |
| L1947 | Staphylococcal nuclease domain-containing protein 1 | 3493 |
| L1948 | Staphylococcal nuclease domain-containing protein 1 | 3494 |
| L1949 | Staphylococcal nuclease domain-containing protein 1 | 3495 |
| L1950 | Stat protein | 3496 |
| L1951 | Stat protein | 3497 |
| L1952 | Stat protein | 3498 |
| L1953 | Stat protein | 3499 |
| L1954 | Stat protein | 3500 |
| L1955 | Stat protein | 3501 |
| L1956 | Stat protein | 3502 |
| L1957 | Stat protein | 3503 |
| L1958 | Stat protein | 3504 |
| L1959 | Stat protein | 3505 |
| L1960 | Stat protein | 3506 |
| L1961 | Stat protein | 3507 |
| L1962 | Stat protein | 3508 |
| L1963 | Stat protein | 3509 |
| L1964 | Stat protein | 3510 |
| L1965 | Subtilisin-like protease | 3511 |
| L1966 | Succinyl-CoA ligase [GDP-forming] | 3512 |
| | alpha-chain, mitochondrial | |
| L1967 | Succinyl-CoA ligase [GDP-forming] | 3513 |
| | alpha-chain, mitochondrial | |
| L1968 | Succinyl-CoA ligase [GDP-forming] | 3514 |
| | alpha-chain, mitochondrial | |
| L1969 | Succinyl-CoA ligase [GDP-forming] | 3515 |
| | alpha-chain, mitochondrial | |
| L1970 | Succinyl-CoA ligase [GDP-forming] | 3516 |
| | alpha-chain, mitochondrial | |
| L1971 | Succinyl-CoA ligase [GDP-forming] | 3517 |
| | alpha-chain, mitochondrial | |
| L1972 | Succinyl-CoA synthetase beta chain | ADG |
| L1973 | Succinyl-CoA synthetase beta chain | RQP |
| L1974 | Succinyl-CoA synthetase beta chain | 3518 |
| L1975 | Succinyl-CoA synthetase beta chain | 3519 |
| L1976 | Succinyl-CoA synthetase beta chain | 3520 |
| L1977 | Succinyl-CoA synthetase beta chain | 3521 |
| L1978 | Succinyl-CoA synthetase beta chain | 3522 |
| L1979 | Succinyl-CoA synthetase beta chain | 3523 |
| L1980 | Succinyl-CoA:3-ketoacid-coenzyme A transferase | 3524 |
| L1981 | Sulfurtransferase | 3525 |
| L1982 | Superantigen SMEZ-2 | 3526 |
| L1983 | Superoxide dismutase 1 copper chaperone | 3527 |
| L1984 | Surface layer protein | 3528 |
| L1985 | Surface layer protein | 3529 |
| L1986 | Surface layer protein | 3530 |
| L1987 | Surface layer protein | 3531 |
| L1988 | Surface layer protein | 3532 |
| L1989 | Surface layer protein | 3533 |
| L1990 | Surface layer protein | 3534 |
| L1991 | Surface layer protein | 3535 |
| L1992 | T lymphocyte activation antigen | 3536 |
| L1993 | T lymphocyte activation antigen | 3537 |
| L1994 | T-cell receptor alpha chain C region | 3538 |
| L1995 | Terminal oxygenase component of carbazole | 3539 |
| L1996 | Tetanus neurotoxin | 3540 |
| L1997 | Tetracycline repressor protein class D | 3541 |
| L1998 | The GTP-binding protein Obg | 3542 |
| L1999 | The GTP-binding protein Obg | 3543 |
| L2000 | The GTP-binding protein Obg | 3544 |
| L2001 | The GTP-binding protein Obg | 3545 |
| L2002 | Thioredoxin domain-containing protein 4 | 3546 |
| L2003 | Thioredoxin domain-containing protein 4 | 3547 |
| L2004 | Thiosulfate sulfurtransferase | IDP |
| L2005 | Thiosulfate sulfurtransferase | 3548 |
| L2006 | Thiosulfate sulfurtransferase | 3549 |
| L2007 | Thiosulfate sulfurtransferase | 3550 |
| L2008 | Thiosulfate sulfurtransferase | 3551 |
| L2009 | Threonyl-tRNA synthetase | 3552 |
| L2010 | Threonyl-tRNA synthetase | 3553 |
| L2011 | Threonyl-tRNA synthetase | 3554 |
| L2012 | Threonyl-tRNA synthetase | 3555 |
| L2013 | Threonyl-tRNA synthetase | 3556 |
| L2014 | Threonyl-tRNA synthetase | 3557 |
| L2015 | Threonyl-tRNA synthetase | 3558 |
| L2016 | Threonyl-tRNA synthetase | 3559 |
| L2017 | Threonyl-tRNA synthetase | 3560 |
| L2018 | Threonyl-tRNA synthetase 1 | 3561 |
| L2019 | Threonyl-tRNA synthetase 1 | 3562 |
| L2020 | Threonyl-tRNA synthetase 1 | 3563 |
| L2021 | Threonyl-tRNA synthetase 1 | 3564 |
| L2022 | Threonyl-tRNA synthetase 1 | 3565 |
| L2023 | Threonyl-tRNA synthetase 1 | 3566 |
| L2024 | Threonyl-tRNA synthetase 1 | 3567 |
| L2025 | Threonyl-tRNA synthetase 1 | 3568 |
| L2026 | Thrombospondin 1 | 3569 |
| L2027 | Tick-borne encephalitis virus glycoprotein | 3570 |
| L2028 | Titin | 3571 |
| L2029 | Titin | 3572 |
| L2030 | TLR1789 protein | 3573 |
| L2031 | TLR1789 protein | 3574 |
| L2032 | Topoisomerase I | 3575 |
| L2033 | Topoisomerase 1 | 3576 |
| L2034 | Toxic shock syndrome toxin-1 | 3577 |
| L2035 | Toxic shock syndrome toxin-1 | 3578 |
| L2036 | Toxic shock syndrome toxin-1 | 3579 |
| L2037 | Toxic shock syndrome toxin-1 | 3580 |
| L2038 | T-plasminogen activator F1-G | VPV |
| L2039 | T-plasminogen activator F1-G | 3581 |
| L2040 | TpsB transporter FhaC | 3582 |
| L2041 | TpsB transporter FhaC | 3583 |
| L2042 | TpsB transporter FhaC | 3584 |
| L2043 | Transcarbamylase | 3585 |
| L2044 | Transcarbamylase | 3586 |
| L2045 | Transcription antiterminator LicT | 3587 |
| L2046 | Transcription elongation factor GreB | 3588 |
| L2047 | Transcription initiation factor IIa gamma chain | 3589 |
| L2048 | Transcription initiation factor IIb | 3590 |
| L2049 | Transcription initiation factor IIb | 3591 |
| L2050 | Transcriptional regulator (NtrC family) | 3592 |
| L2051 | Transcriptional regulator AefR | 3593 |
| L2052 | Transcriptional regulator AefR | 3594 |
| L2053 | Transcriptional regulator AefR | 3595 |
| L2054 | Transcriptional regulator AefR | 3596 |
| L2055 | Transcriptional regulator AefR | 3597 |
| L2056 | Transcriptional regulator, AsnC family | 3598 |
| L2057 | Transcriptional regulator, AsnC family | 3599 |
| L2058 | Transcriptional regulator, AsnC family | 3600 |
| L2059 | Transcriptional regulator, biotin repressor family | 3601 |
| L2060 | Transcriptional regulator, Crp/Fnr family | 3602 |
| L2061 | Transcriptional regulator, GntR family | 3603 |
| L2062 | Transcriptional regulator, HTH_3 family | 3604 |
| L2063 | Transcriptional regulator, HTH_3 family | 3605 |
| L2064 | Transcriptional regulator, HTH_3 family | 3606 |
| L2065 | Transcriptional regulator, HTH_3 family | 3607 |
| L2066 | Transcriptional regulator, HTH_3 family | 3608 |
| L2067 | Transcriptional regulator, laci family | 3609 |
| L2068 | Transcriptional regulatory protein ZraR | 3610 |
| L2069 | Transcriptional regulatory protein ZraR | 3611 |
| L2070 | Transcriptional regulatory protein ZraR | 3612 |
| L2071 | Transcriptional regulatory protein ZraR | 3613 |
| L2072 | Transcriptional regulatory protein ZraR | 3614 |
| L2073 | Transcriptional regulatory protein ZraR | 3615 |
| L2074 | Transcriptional regulatory protein ZraR | 3616 |
| L2075 | Transferrin receptor protein | VSN |
| L2076 | Transferrin receptor protein | 3617 |
| L2077 | Transferrin receptor protein | 3618 |
| L2078 | Transferrin receptor protein | 3619 |
| L2079 | Transferrin receptor protein | 3620 |
| L2080 | Translation initiation factor 5A | 3621 |
| L2081 | Translation initiation factor 5A | 3622 |
| L2082 | Translation initiation factor 5A | 3623 |
| L2083 | Translation initiation factor IF2/eIF5b | 3624 |
| L2084 | Translation initiation factor IF2/eIF5b | 3625 |
| L2085 | Transposable element mariner, complete CDS | 3626 |
| L2086 | Tricorn protease | 3627 |
| L2087 | Tricorn protease | 3628 |
| L2088 | Tricom protease | 3629 |
| L2089 | Trigger factor | 3630 |
| L2090 | Trigger factor | 3631 |
| L2091 | Trigger factor | 3632 |
| L2092 | TRNA CCA-adding enzyme | RRI |
| L2093 | TRNA CCA-adding enzyme | 3633 |
| L2094 | TRNA CCA-adding enzyme | 3634 |
| L2095 | TRNA CCA-adding enzyme | 3635 |
| L2096 | TRNA CCA-adding enzyme | 3636 |
| L2097 | TRNA nucleotidyltransferase | 3637 |
| L2098 | TRNA-splicing endonuclease | 3638 |
| L2099 | Tt1467 protein | LEA |
| L2100 | Tt1467 protein | 3639 |
| L2101 | Tumor suppressor p53-binding protein 1 | 3640 |
| L2102 | Tumor suppressor p53-binding protein 1 | 3641 |
| L2103 | Tumor suppressor p53-binding protein 1 | 3642 |
| L2104 | Tumor suppressor p53-binding protein 1 | 3643 |
| L2105 | Type A flavoprotein FprA | 3644 |
| L2106 | Type A flavoprotein FprA | 3645 |
| L2107 | Type A flavoprotein FprA | 3646 |
| L2108 | Type A flavoprotein FprA | 3647 |
| L2109 | Type A flavoprotein FprA | 3648 |
| L2110 | Type I restriction enzyme specificity protein MG438 | QMH |
| L2111 | Type I restriction enzyme specificity protein MG438 | 3649 |
| L2112 | Type I restriction enzyme specificity protein MG438 | 3650 |
| L2113 | Type I restriction-modification enzyme, S subunit | 3651 |
| L2114 | Type I restriction-modification enzyme, S subunit | 3652 |
| L2115 | Type I site-specific restriction- | 3653 |
| | modification system, R (restriction) subunit | |
| L2116 | Type I site-specific restriction- | 3654 |
| | modification system, R (restriction) subunit | |
| L2117 | Type I site-specific restriction- | 3655 |
| | modification system, R (restriction) subunit | |
| L2118 | Type II DNA topoisomerase VI subunit B | 3656 |
| L2119 | Type II DNA topoisomerase VI subunit B | 3657 |
| L2120 | Type II DNA topoisomerase VI subunit B | 3658 |
| L2121 | Type II DNA topoisomerase VI subunit B | 3659 |
| L2122 | Type II DNA topoisomerase VI subunit B | 3660 |
| L2123 | Type II DNA topoisomerase VI subunit B | 3661 |
| L2124 | Type II DNA topoisomerase VI subunit B | 3662 |
| L2125 | Type II DNA topoisomerase VI subunit B | 3663 |
| L2126 | Type II DNA topoisomerase VI subunit B | 3664 |
| L2127 | Type II DNA topoisomerase VI subunit B | 3665 |
| L2128 | Type II DNA topoisomerase VI subunit B | 3666 |
| L2129 | Type VI secretion system component | 3667 |
| L2130 | Type VI secretion system component | 3668 |
| L2131 | Type VI secretion system component | 3669 |
| L2132 | Tyrosine-protein kinase receptor UFO | 3670 |
| L2133 | Tyrosine-protein kinase receptor UFO | 3671 |
| L2134 | Tyrosine-protein kinase ZAP-70 | 3672 |
| L2135 | Tyrosine-protein kinase ZAP-70 | 3673 |
| L2136 | Tyrosyl-DNA phosphodiesterase | 3674 |
| L2137 | Tyrosyl-DNA phosphodiesterase | 3675 |
| L2138 | Ubiquitin carboxyl-terminal hydrolase 7 | 3676 |
| L2139 | UDP-galactopyranose mutase | 3677 |
| L2140 | UDP-galactopyranose mutase | 3678 |
| L2141 | UDP-galactopyranose mutase | 3679 |
| L2142 | UDP-galactopyranose mutase | 3680 |
| L2143 | UDP-galactopyranose mutase | 3681 |
| L2144 | UDP-glucose dehydrogenase | 3682 |
| L2145 | UDP-N-acetylmuramate-L-alanine ligase | 3683 |
| L2146 | UDP-N-acetylmuramate-L-alanine ligase | 3684 |
| L2147 | UDP-N-acetylmuramoylalanine—D-glutamate ligase | 3685 |
| L2148 | UDP-N-acetylmuramoylalanine—D-glutamate ligase | 3686 |
| L2149 | UDP-N-acetylmuramoylalanine- | 3687 |
| | D-glutamyl-lysine-D-alanyl-D-alanine | |
| | ligase, MurF protein | |
| L2150 | UDP-N-acetylmuramoylalanyl- | 3688 |
| | D-glutamate—2,6-diaminopimelate ligase | |
| L2151 | UDP-N-acetylmuramoylalanyl- | 3689 |
| | D-glutamate—2,6-diaminopimelate ligase | |
| L2152 | UDP-N-acetylmuramoylalanyl- | 3690 |
| | D-glutamate—2,6-diaminopimelate ligase | |
| L2153 | UDP-N-acetylmuramoylalanyl- | 3691 |
| | D-glutamate—2,6-diaminopimelate ligase | |
| L2154 | UDP-N-acetylmuramoylalanyl- | 3692 |
| | D-glutamate—2,6-diaminopimelate ligase | |
| L2155 | UDP-N-acetylmuramoylalanyl- | 3693 |
| | D-glutamate—2,6-diaminopimelate ligase | |
| L2156 | UDP-N-acetylmuramoylalanyl- | 3694 |
| | D-glutamate—2,6-diaminopimelate ligase | |
| L2157 | Uncharacterized conserved protein | 3695 |
| L2158 | Uncharacterized conserved protein | 3696 |
| L2159 | Uncharacterized GST-like protein yfcF | 3697 |
| L2160 | Uncharacterized GST-like proteinprotein | 3698 |
| L2161 | Uncharacterized GST-like proteinprotein | 3699 |
| L2162 | Uncharacterized GST-like proteinprotein | 3700 |
| L2163 | Uncharacterized protein | 3701 |
| L2164 | Uncharacterized protein | 3702 |
| L2165 | Uncharacterized protein BT 1490 | 3703 |
| L2166 | Uncharacterized protein ypfl | TLR |
| L2167 | Uncharacterized protein ypfl | VHP |
| L2168 | Uncharacterized protein ypfl | 3704 |
| L2169 | Uncharacterized protein ypfl | 3705 |
| L2170 | Uncharacterized protein ypfl | 3706 |
| L2171 | Uncharacterized protein ypfl | 3707 |
| L2172 | Uncharacterized protein ypfl | 3708 |
| L2173 | Uncharacterized protein ypfl | 3709 |
| L2174 | Uncharacterized protein ypfl | 3710 |
| L2175 | Uncharacterized protein ypfl | 3711 |
| L2176 | Uncharacterized protein ypfl | 3712 |
| L2177 | Uncharacterized protein ypfl | 3713 |
| L2178 | Uncharacterized protein ypfl | 3714 |
| L2179 | Uncharacterized protein ypfl | 3715 |
| L2180 | Uncharacterized protein ypfl | 3716 |
| L2181 | Uncharacterized protein ypfl | 3717 |
| L2182 | Uncharacterized protein ypfl | 3718 |
| L2183 | Unknown protein | 3719 |
| L2184 | Unknown protein | 3720 |
| L2185 | UPF0131 protein ykqA | 3721 |
| L2186 | UPF0131 protein ykqA | 3722 |
| L2187 | UPF0131 protein ykqA | 3723 |
| L2188 | UPF0348 protein MJ0951 | 3724 |
| L2189 | UPF0348 protein MJ0951 | 3725 |
| L2190 | UPF0348 protein MJ0951 | 3726 |
| L2191 | UPF0348 protein MJ0951 | 3727 |
| L2192 | UPF0348 protein MJ0951 | 3728 |
| L2193 | UPF0348 protein MJ0951 | 3729 |
| L2194 | UPF0348 protein MJ0951 | 3730 |
| L2195 | UPF0348 protein MJ0951 | 3731 |
| L2196 | URE2 protein | 3732 |
| L2197 | Uridine diphospho-N- | TAK |
| | acetylenolpyruvylglucosaminereductase | |
| L2198 | Uridine diphospho-N- | 3733 |
| | acetylenolpyruvylglucosaminereductase | |
| L2199 | Uridine diphospho-N- | 3734 |
| | acetylenolpyruvylglucosaminereductase | |
| L2200 | Uridine diphospho-N- | 3735 |
| | acetylenolpyruvylglucosaminereductase | |
| L2201 | Uridine diphospho-N- | 3736 |
| | acetylenolpyruvylglucosaminereductase | |
| L2202 | Urokinase plasminogen activator surface receptor | 3737 |
| L2203 | Urokinase plasminogen activator surface receptor | 3738 |
| L2204 | Vascular cell adhesion molecule-1 | 3739 |
| L2205 | VCP-like ATPase | 3740 |
| L2206 | VCP-like ATPase | 3741 |
| L2207 | Viral CASP8 and FADD-like apoptosis regulator | 3742 |
| L2208 | Vitamin K-dependent protein Z | 3743 |
| L2209 | VP1 protein | 3744 |
| L2210 | V-type ATP synthase alpha chain | 3745 |
| L2211 | Xaa-Pro aminopeptidase | 3746 |
| L2212 | Xaa-Pro aminopeptidase | 3747 |
| L2213 | Xaa-Pro aminopeptidase | 3748 |
| L2214 | Xaa-Pro aminopeptidase | 3749 |
| L2215 | Xanthine dehydrogenase | 3750 |
| L2216 | Xanthine dehydrogenase | 3751 |
| L2217 | Xanthine dehydrogenase | 3752 |
| L2218 | Xanthine dehydrogenase | 3753 |
| L2219 | X-prolyl dipeptidyl aminopeptidase | KSY |
| L2220 | X-prolyl dipeptidyl aminopeptidase | LDG |
| L2221 | X-prolyl dipeptidyl aminopeptidase | LLE |
| L2222 | X-prolyl dipeptidyl aminopeptidase | TYS |
| L2223 | X-prolyl dipeptidyl aminopeptidase | 3754 |
| L2224 | X-prolyl dipeptidyl aminopeptidase | 3755 |
| L2225 | X-prolyl dipeptidyl aminopeptidase | 3756 |
| L2226 | X-prolyl dipeptidyl aminopeptidase | 3757 |
| L2227 | X-prolyl dipeptidyl aminopeptidase | 3758 |
| L2228 | X-prolyl dipeptidyl aminopeptidase | 3759 |
| L2229 | X-prolyl dipeptidyl aminopeptidase | 3760 |
| L2230 | X-prolyl dipeptidyl aminopeptidase | 3761 |
| L2231 | X-prolyl dipeptidyl aminopeptidase | 3762 |
| L2232 | X-prolyl dipeptidyl aminopeptidase | 3763 |
| L2233 | X-prolyl dipeptidyl aminopeptidase | 3764 |
| L2234 | X-prolyl dipeptidyl aminopeptidase | 3765 |
| L2235 | X-prolyl dipeptidyl aminopeptidase | 3766 |
| L2236 | X-prolyl dipeptidyl aminopeptidase | 3767 |
| L2237 | X-prolyl dipeptidyl aminopeptidase | 3768 |
| L2238 | X-prolyl dipeptidyl aminopeptidase | 3769 |
| L2239 | X-prolyl dipeptidyl aminopeptidase | 3770 |
| L2240 | X-prolyl dipeptidyl aminopeptidase | 3771 |
| L2241 | X-prolyl dipeptidyl aminopeptidase | 3772 |
| L2242 | X-prolyl dipeptidyl aminopeptidase | 3773 |
| L2243 | X-prolyl dipeptidyl aminopeptidase | 3774 |
| L2244 | X-prolyl dipeptidyl aminopeptidase | 3775 |
| L2245 | X-prolyl dipeptidyl aminopeptidase | 3776 |
| L2246 | X-prolyl dipeptidyl aminopeptidase | 3777 |
| L2247 | Xylosidase/arabinosidase | 3778 |
| L2248 | Xylosidase/arabinosidase | 3779 |
| L2249 | Xylosidase/arabinosidase | 3780 |
| L2250 | Xylosidase/arabinosidase | 3781 |
| L2251 | Xylosidase/arabinosidase | 3782 |
| L2252 | Xylosidase/arabinosidase | 3783 |
| L2253 | Xylosidase/arabinosidase | 3784 |
| L2254 | YkoF | 3785 |
| L2255 | YkuI protein | 3786 |

[0205] Internal ribosomal entry site (IRES) is a nucleotide sequence (>500 nucleotides) that allows for initiation of translation in the middle of an mRNA sequence (Kim, J. H. et al., 2011. PLoS One 6(4): e18556; the contents of which are herein incorporated by reference in its entirety). Use of an IRES sequence ensures co-expression of genes before and after the IRES, though the sequence following the IRES may be transcribed and translated at lower levels than the sequence preceding the RES sequence.

[0206] 2A peptides are small “self-cleaving” peptides (18-22 amino acids) derived from viruses such as foot-and-mouth disease virus (F2A), porcine teschovirus-1 (P2A), Thoseaasigna virus (T2A), or equine rhinitis A virus (E2A). The 2A designation refers specifically to a region of picornavirus polyproteins that lead to a ribosomal skip at the glycyl-prolyl bond in the C-terminus of the 2A peptide (Kim, J. H. et al., 2011. PLoS One 6(4): el 8556; the contents of which are herein incorporated by reference in its entirety). This skip results in a cleavage between the 2A peptide and its immediate downstream peptide. As opposed to IRES linkers, 2A peptides generate stoichiometric expression of proteins flanking the 2A peptide and their shorter length can be advantageous in generating viral expression vectors.

[0207] Some payload regions encode linkers comprising furin cleavage sites. Furin is a calcium dependent serine endoprotease that cleaves proteins just downstream of a basic amino acid target sequence (Arg-X-(Arg/Lys)-Arg) (Thomas, G., 2002. Nature Reviews Molecular Cell Biology 3(10): 753-66; the contents of which are herein incorporated by reference in its entirety). Furin is enriched in the trans-golgi network where it is involved in processing cellular precursor proteins. Furin also plays a role in activating a number of pathogens. This activity can be taken advantage of for expression of polypeptides of the disclosure.

[0208] In some embodiments, the payload region may encode one or more linkers comprising cathepsin, matrix metalloproteinases or legumain cleavage sites. Such linkers are described e.g. by Cizeau and Macdonald in International Publication No. WO2008052322, the contents of which are herein incorporated in their entirety. Cathepsins are a family of proteases with unique mechanisms to cleave specific proteins. Cathepsin B is a cysteine protease and cathepsin D is an aspartyl protease. Matrix metalloproteinases are a family of calcium-dependent and zinc-containing endopeptidases. Legumain is an enzyme catalyzing the hydrolysis of (-Asn-Xaa-) bonds of proteins and small molecule substrates.

[0209] In some embodiments, payload regions may encode linkers that are not cleaved. Such linkers may include a simple amino acid sequence, such as a glycine rich sequence. In some cases, linkers may comprise flexible peptide linkers comprising glycine and serine residues. The linker may comprise flexible peptide linkers of different lengths, e.g. nxG4S, where n=1-10 (SEQ ID NO: 32690) and the length of the encoded linker varies between 5 and 50 amino acids. In a non-limiting example, the linker may be 5xG4S (SEQ ID NO: 32689). These flexible linkers are small and without side chains so they tend not to influence secondary protein structure while providing a flexible linker between antibody segments (George, R. A., et al., 2002. Protein Engineering 15(11): 871-9; Huston, J. S. et al., 1988. PNAS 85:5879-83; and Shan, D. et al., 1999. Journal of Immunology. 162(11):6589-95; the contents of each of which are herein incorporated by reference in their entirety). Furthermore, the polarity of the serine residues improves solubility and prevents aggregation problems.

[0210] In some embodiments, payload regions of the disclosure may encode small and unbranched serine-rich peptide linkers, such as those described by Huston et al. in U.S. Pat. No. 5,525,491, the contents of which are herein incorporated in their entirety. Polypeptides encoded by the payload region of the disclosure, linked by serine-rich linkers, have increased solubility.

[0211] In some embodiments, payload regions of the disclosure may encode artificial linkers, such as those described by Whitlow and Filpula in U.S. Pat. No. 5,856,456 and Ladner et al. in U.S. Pat. No. 4,946,778, the contents of each of which are herein incorporated by their entirety.

[0212] In some embodiments, the payload region encodes at least one G-453 linker (e.g., SEQ ID NO: 1734 or SEQ ID NO: 2449).

[0213] In some embodiments, the payload region encodes at least one G4S linker (e.g., SEQ ID NO: 1733 or SEQ ID NO: 2443).

[0214] In some embodiments, the payload region encodes at least one furin site.

[0215] In some embodiments, the payload region encodes at least one T2A linker.

[0216] In some embodiments, the payload region encodes at least one F2A linker.

[0217] In some embodiments, the payload region encodes at least one P2A linker.

[0218] In some embodiments, the payload region encodes at least one IDES sequence.

[0219] In some embodiments, the payload region encodes at least one G4S5 linker (e.g., SEQ ID NO: 1728 or SEQ ID NO: 32689).

[0220] In some embodiments, the payload region encodes at least one furin and one 2A linker.

[0221] In some embodiments, the payload region encodes at least one hinge region. As a non-limiting example, the hinge is a IgG hinge.

[0222] In some embodiments, the linker region may be 1-50, 1-100, 50-100, 50-150, 100-150, 100-200, 150-200, 150-250, 200-250, 200-300, 250-300, 250-350, 300-350, 300-400, 350-400, 350-450, 400-450, 400-500, 450-500, 450-550, 500-550, 500-600, 550-600, 550-650, or 600-650 nucleotides in length. The linker region may have a length of 1, 2, 3, 4, 5, 6, 7, 8, 9, 10, 11, 12, 13, 14, 15, 16, 17, 18, 19, 20, 21, 22, 23, 24, 25, 26, 27, 28, 29, 30, 31, 32, 33, 34, 35, 36, 37, 38, 39, 40, 41, 42, 43, 44, 45, 46, 47, 48, 49, 50, 51, 52, 53, 54, 55, 56, 57, 58, 59, 60, 61, 62, 63, 64, 65, 66, 67, 68, 69, 70, 71, 72, 73,74, 75, 76, 77, 78, 79, 80, 81, 82, 83, 84, 85, 86, 87, 88, 89, 90, 91, 92, 93, 94, 95, 96, 97, 98, 99, 100, 101, 102, 103, 104, 105, 106, 107, 108, 109, 110, 115, 120, 125, 130, 135, 140, 145, 150, 151, 152, 153, 154, 155, 156, 157, 158, 159, 160, 165, 170, 171, 172, 173, 174, 175, 176, 177, 178, 179, 180, 185, 190, 191, 192, 193, 194, 195, 196, 197, 198, 199, 200, 210, 220, 230, 240, 250, 260, 270, 280, 290, 300, 310, 320, 330, 340, 350, 360, 370, 380, 390, 400, 410, 420, 430, 440, 450, 460, 470, 480, 490, 500, 510, 520, 530, 540, 550, 560, 570, 580, 590, 600, 601, 602, 603, 604, 605, 606, 607, 608, 609, 610, 611, 612, 613, 614, 615, 616, 617, 618, 619, 620, 621, 622, 623, 624, 625, 626, 627, 628, 629, 630, 631, 632, 633, 634, 635, 640, 650 or greater than 650. In some embodiments, the linker region may be 12 nucleotides in length. In some embodiments, the linker region may be 18 nucleotides in length. In some embodiments, the linker region may be 45 nucleotides in length. In some embodiments, the linker region may be 54 nucleotides in length. In some embodiments, the linker region may be 66 nucleotides in length. In some embodiments, the linker region may be 75 nucleotides in length. In some embodiments, the linker region may be 78 nucleotides in length. In some embodiments, the linker region may be 87 nucleotides in length. In some embodiments, the linker region may be 108 nucleotides in length. In some embodiments, the linker region may be 153 nucleotides in length. In some embodiments, the linker region may be 198 nucleotides in length. In some embodiments, the linker region may be 623 nucleotides in length.

### Viral Genome Component: Introns

[0223] In some embodiments, the payload region comprises at least one element to enhance the expression such as one or more introns or portions thereof. Non-limiting examples of introns include, MVM (67-97 bps), HX truncated intron 1 (300 bps), ii-globin SIS/immunoglobulin heavy chain splice acceptor (250 bps), adenovirus splice donor/immunoglobin splice acceptor (500 bps), SV40 late splice donor/splice acceptor (19S/16S) (180 bps) and hybrid adenovirus splice donor/IgG splice acceptor (230 bps).

[0224] In some embodiments, the intron or intron portion may be 1-100, 100-500, 500-1000, or 1000-1500 nucleotides in length. The intron may have a length of 10, 15, 20, 30, 40, 50, 60, 70, 80, 90, 100, 110, 120, 130, 140, 150, 160, 170, 171, 172, 173, 174, 175, 176, 177, 178, 179, 180, 190, 200, 210, 220, 230, 240, 250, 260, 270, 280, 290, 300, 310, 320, 330, 340, 350, 360, 370, 380, 390, 400, 410, 420, 430, 440, 450, 460, 470, 480, 490, 500, or greater than 500. The intron may have a length between 80-100, 80-120, 80-140, 80-160, 80-180, 80-200, 80-250, 80-300, 80-350, 80-400, 80-450, 80-500, 200-300, 200-400, 200-500, 300-400, 300-500, or 400-500. In some embodiments, the intron may be 15 nucleotides in length. In some embodiments, the intron may be 32 nucleotides in length. In some embodiments, the intron may be 41 nucleotides in length. In some embodiments, the intron may be 53 nucleotides in length. In some embodiments, the intron may be 54 nucleotides in length. In some embodiments, the intron may be 59 nucleotides in length. In some embodiments, the intron may be 73 nucleotides in length. In some embodiments, the intron may be 102 nucleotides in length. In some embodiments, the intron may be 134 nucleotides in length. In some embodiments, the intron may be 168 nucleotides in length. In some embodiments, the intron may be 172 nucleotides in length. In some embodiments, the intron may be 347 nucleotides in length. In some embodiments, the intron may be 1074 nucleotides in length.

### AAV Production

[0225] The present disclosure provides methods for the generation of parvoviral particles, e.g. AAV particles, by viral genome replication in a viral replication cell for use in VA-DER systems and/or methods.

[0226] In accordance with the disclosure, the viral genome comprising a payload region encoding an antibody, an antibody-based composition or fragment thereof, will be incorporated into the AAV particle produced in the viral replication cell. Methods of making AAV particles are well known in the art and are described in e.g., U.S. Pat. Nos. 6,204,059, 5,756,283, 6,258,595, 6,261,551, 6,270,996, 6,281,010, 6,365,394, 6,475,769, 6,482,634, 6,485,966, 6,943,019, 6,953,690, 7,022,519, 7,238,526, 7,291,498 and 7,491,508, 5,064,764, 6,194,191, 6,566,118, 8,137,948; or International Publication Nos. WO1996039530, WO1998010088, WO1999014354, WO1999015685, WO1999047691, WO2000055342, WO2000075353, and WO2001023597; Methods In Molecular Biology, ed. Richard, Humana. Press, NJ (1995); O'Reilly et al., Baculovirus Expression Vectors, k Laboratory Manual. Oxford Univ. Press (1994); Samulski et al., J. Vir. 63:3822-8 (1989); Kajigaya et al., Proc. Nat′l Acad. Sci. USA 88: 4646-50 (1991); Ruffing et al., J. Vir. 66:6922-30 (1992); Kimbauer et al., Vir., 219:37-44 (1996); Zhao et al., Vir. 272:382-93 (2000); the contents of each of which are herein incorporated by reference in their entirety. In some embodiments, the AAV particles are made using the methods described in WO2015191508, the contents of which are herein incorporated by reference in their entirety.

[0227] Viral replication cells commonly used for production of recombinant AV viral vectors include but are not limited to 293 cells, COS cells, HeLa cells, KB cells, and other mammalian cell lines as described in U.S. Pat. Nos. 6,156,303, 5,387,484, 5,741,683, 5,691,176, and 5,688,676; U.S. patent publication No. 2002/0081721, and International Patent Publication Nos. WO 00/47757; WO 00/24916, and WO 96/17947; the contents of each of which are herein incorporated by reference in their entireties.

[0228] In some embodiments, the present disclosure provides a method for producing an AAV particle having enhanced (increased, improved) transduction efficiency comprising the steps of: 1) co-transfecting competent bacterial cells with a bacmid vector and either a viral construct vector and/or AAV payload construct vector, 2) isolating the resultant viral construct expression vector and AAV payload construct expression vector and separately transfecting viral replication cells, 3) isolating and purifying resultant payload and viral construct particles comprising viral construct expression vector or AAV payload construct expression vector, 4) co-infecting a viral replication cell with both the AAV payload and viral construct particles comprising viral construct expression vector or AAV payload construct expression vector, and 5) harvesting and purifying the AAV particle comprising a viral genome.

[0229] In some embodiments, the present disclosure provides a method for producing an AAV particle comprising the steps of 1) simultaneously co-transfecting mammalian cells, such as, but not limited to HEK293 cells, with a payload region, a construct expressing rep and cap genes and a helper construct, and 2) harvesting and purifying the AAV particle comprising a viral genome.

[0230] In some embodiments, the viral genome of the AAV particle of the disclosure optionally encodes a selectable marker. The selectable marker may comprise a cell-surface marker, such as any protein expressed on the surface of the cell including, but not limited to receptors, CD markers, lectins, integrins, or truncated versions thereof.

[0231] In some embodiments, selectable marker reporter genes are selected from those described in International Application No. WO 96/23810; Heim et al., Current Biology 2:178-182 (1996); Heim et al., Proc. Natl. Acad. Sci. USA (1995); or Heim et al., Science 373:663-664 (1995); WO 96/30540, the contents of each of which are incorporated herein by reference in their entireties).

### Payloads of the Disclosure

[0232] Any of the delivery vehicles, e.g., retroviral. lentiviral. AAV, plasmid, etc of the present disclosure may comprise at least one payload region. As used herein, “payload” or “payload region” refers to one or more polynucleotides or polynucleotide regions encoded by or within a viral genome or an expression product of such polynucleotide or polynucleotide region, e.g., a transgene, a polynucleotide encoding a polypeptide or multi polypeptide or a modulatory nucleic acid or regulatory nucleic acid. Payloads of the present disclosure, when they encode amino acid based molecules, typically encode polypeptides (e.g., peptides, polypeptides, antibodies or antibody based compositions) or fragments or variants thereof.

[0233] The payload region may be constructed in such a way as to reflect a region similar to or mirroring the natural organization of an mRNA.

[0234] The payload region may comprise a combination of coding and non-coding nucleic acid sequences. Payloads may also be non-coding nucleic acid based molecules such as miRNA, siRNA, aptamers, ribozymes, etc.

[0235] In some embodiments, the payload region may encode a coding or non-coding RNA.

[0236] In some embodiments, where the delivery vehicle is an AAV, the AAV particle comprises a viral genome with a payload region comprising nucleic acid sequences encoding more than one polypeptide of interest (e.g., a protein such as TRIM21 and/or an antibody). In such an embodiment, a viral genome encoding more than one polypeptide may be replicated and packaged into a viral particle. A target cell transduced with a viral particle comprising more than one polypeptide may express each of the polypeptides in a single cell.

[0237] In some embodiments, as shown in FIG. 1, an AAV particle comprises a viral genome with a payload region comprising a nucleic acid sequence encoding a heavy chain and a light chain of an antibody. The heavy chain and light chain are expressed and assembled to form the antibody which is secreted.

[0238] In some embodiments, the payload region may comprise the components as shown in FIG. 2. The payload region 110 is located within the viral genome 100. At the 5′ and/or the 3′ end of the payload region 110 there may be at least one inverted terminal repeat (ITR) 120. Within the payload region, there is a promoter region 130, an intron region 140 and a coding region 150. When the coding region 150 comprises a heavy chain region 151 and light chain region 152 of an antibody, the two chains may be separated by a linker region 155.

[0239] In some embodiments, the coding region may comprise a heavy and light chain sequence and a linker. As shown in FIG. 3, the payload region may comprise a heavy chain and light chain sequence separated by a linker and/or a cleavage site. In some embodiments, the heavy and light chain sequence is separated by an IRES sequence (1 and 2). In some embodiments, the heavy and light chain sequence is separated by a foot and mouth virus sequence (3 and 4). In some embodiments, the heavy and light chain sequence is separated by a foot and mouth virus sequence and a furin cleavage site (5 and 6). In some embodiments, the heavy and light chain sequence is separated by a porcine teschovirus-.1 virus sequence (7 and 8). In some embodiments, the heavy and light chain sequence is separated by a porcine teschovirus-1 virus and a furin cleavage site (9 and 10). In some embodiments, the heavy and light chain sequence is separated by a 5xG4S sequence (SEQ ID NO: 1728 or SEQ ID NO: 32689) (11).

[0240] Where the AAV particle payload region encodes a polypeptide, the polypeptide may be a peptide or protein. A protein encoded by the AAV particle payload region may comprise an antibody, an antibody related composition, a secreted protein, an intracellular protein, an extracellular protein, and/or a membrane protein. The encoded proteins may be structural or functional. In addition to the antibodies or antibody-based composition, proteins encoded by the payload region may include, in combination, certain mammalian proteins involved in immune system regulation. The AAV viral genomes encoding polypeptides described herein may be useful in the fields of human disease, viruses, infections veterinary applications and a variety of in vivo and in vitro settings.

[0241] In some embodiments, the AAV particles are useful in the field of medicine for the treatment, prophylaxis, palliation, or amelioration of neurological diseases and/or disorders.

### Antibodies and Antibody-Based Compositions

[0242] Payload regions of the viral particles of the disclosure may encode polypeptides that form one or more functional antibodies or antibody-based compositions. The phrase “viral particles” is used to refer to an AAV particle, lentiviral particle and/or a retroviral particle. As used herein, the term “antibody” is referred to in the broadest sense and specifically covers various embodiments including, but not limited to monoclonal antibodies, polyclonal antibodies, multispecific antibodies (e.g. bispecific antibodies formed from at least two intact antibodies), and antibody fragments (e.g., diabodies) so long as they exhibit a desired biological activity (e.g., “functional”). Antibodies are primarily amino-acid based molecules but may also comprise one or more modifications (including, but not limited to the addition of sugar moieties, fluorescent moieties, chemical tags, etc.).

[0243] As used herein, “antibody-based” or “antibody-derived” compositions are monomeric or multi-merit polypeptides which comprise at least one amino-acid region derived from a known or parental antibody sequence and at least one amino acid region derived from a non-antibody sequence, e.g., mammalian protein.

[0244] Payload regions may encode polypeptides that form or function as any antibody, including antibodies that are known in the art and/or antibodies that are commercially available. The encoded antibodies may be therapeutic, diagnostic, or for research purposes. Further, polypeptides of the disclosure may include fragments of such antibodies or antibodies that have been developed to comprise one or more of such fragments (e.g., variable domains or complementarity determining regions (Mils)).

[0245] In some embodiments, the viral genome of the viral particles may comprise nucleic acids which have been engineered to enable expression of antibodies, antibody fragments, or components of any of those described in U.S. Pat. No. 7,041,807 related to VYX epitope; US20090175884, US20110305630; US20130330275 related to misfolded proteins in cancer; US20040175775 related to PrP in eye fluid; US20030114360 related to copolymers and methods of treating prion-related diseases; WO2009121176 related to insulin-induced gene peptide compositions; US20030022243, WO2003000853 related to protein aggregation assays; WO200078344 related to prion protein peptides and uses thereof. Each of these publications are incorporated by reference in their entireties.

### Antibody Generation

[0246] In some embodiments, viral genomes of the viral particles of the disclosure may encode antibodies or antibody-based compositions produced using methods known in the art. Such methods may include but are not limited to immunization and display technologies (e.g., phage display, yeast display, and ribosomal display). Antibodies may be developed, for example, using any naturally occurring or synthetic antigen. As used herein, an “antigen” is an entity which induces or evokes an immune response in an organism. An immune response is characterized by the reaction of the cells, tissues and/or organs of an organism to the presence of a foreign entity. Such an immune response typically leads to the production by the organism of one or more antibodies against the foreign entity, e.g., antigen or a portion of the antigen. As used herein, “antigens” also refer to binding partners for specific antibodies or binding agents in a display library.

[0247] In some embodiments, the sequences of the polypeptides to be encoded in the viral genomes of the disclosure may be derived from antibodies produced using hybridoma technology. Host animals (e.g. mice, rabbits, goats, and llamas) may be immunized by an injection with an antigenic protein to elicit lymphocytes that specifically bind to the antigen. Lymphocytes may be collected and fused with immortalized cell lines to generate hybridomas which can be cultured in a suitable culture medium to promote growth. The antibodies produced by the cultured hybridomas may be subjected to analysis to determine binding specificity of the antibodies for the target antigen. Once antibodies with desirable characteristics are identified, corresponding hybridomas may be subcloned through limiting dilution procedures and grown by standard methods. The antibodies produced by these cells may be isolated and purified using standard immunoglobulin purification procedures.

[0248] In some embodiments, the sequences of the polypeptides to be encoded in the viral genomes of the disclosure may be produced using heavy and light chain variable region cDNA sequences selected from hybridomas or from other sources. Sequences encoding antibody variable domains expressed by hybridomas may be determined by extracting RNA molecules from antibody-producing hybridoma cells and producing cDNA by reverse transcriptase polymerase chain reaction (PCR). PCR may be used to amplify cDNA using primers specific for heavy and light chain sequences. PCR products may then be subcloned into plasmids for sequence analysis. Antibodies may be produced by insertion of resulting variable domain sequences into expression vectors.

[0249] In some embodiments, the sequences of the polypeptides to be encoded in the viral genomes of the disclosure may be generated using display technologies. Display technologies used to generate polypeptides of the disclosure may include any of the display techniques (e.g. display library screening techniques) disclosed in International Patent Application No. WO2014074532 the contents of which are herein incorporated by reference in their entirety. In some embodiments, synthetic antibodies may be designed, selected, or optimized by screening target antigens using display technologies (e.g. phage display technologies). Phage display libraries may comprise millions to billions of phage particles, each expressing unique antibody fragments on their viral coats. Such libraries may provide richly diverse resources that may be used to select potentially hundreds of antibody fragments with diverse levels of affinity for one or more antigens of interest (McCafferty, et al., 1990. Nature. 348:552-4; Edwards, B. M. et al., 2003. 1 MB. 334: 103.18; Schofield, D. et al., 2007. Genome Biol. 8, 8254 and Pershad, K. et al., 2010. Protein Engineering Design and Selection. 23:279-88; the contents of each of which are herein incorporated by reference in their entirety). Often, the antibody fragments present in such libraries comprise scFv antibody fragments, comprising a fusion protein of V_{H} and V_{L} antibody domains joined by a flexible linker. In some cases, scFvs may contain the same sequence with the exception of unique sequences encoding variable loops of the CDRs. In some cases, scFvs are expressed as fusion proteins, linked to viral coat proteins (e.g. the N-terminus of the viral pill coat protein). V_{L} chains may be expressed separately for assembly with V_{H} chains in the periplasm prior to complex incorporation into viral coats. Precipitated library members may be sequenced from the bound phage to obtain cDNA encoding desired says. Antibody variable domains or CDRs from such sequences may be directly incorporated into antibody sequences for recombinant antibody production or mutated and utilized for further optimization through in vitro affinity maturation.

[0250] In some embodiments, the sequences of the polypeptides to be encoded in the viral genomes of the disclosure may be produced using yeast surface display technology, wherein antibody variable domain sequences may be expressed on the cell surface of Saccharomyces cerevisiae. Recombinant antibodies may be developed by displaying the antibody fragment of interest as a fusion to e.g. Aga2p protein on the surface of the yeast, where the protein interacts with proteins and small molecules in a solution says with affinity toward desired receptors may be isolated from the yeast surface using magnetic separation and flow cytometry. Several cycles of yeast surface display and isolation may be done to attain says with desired properties through directed evolution.

[0251] In some embodiments, the sequence of the polypeptides to be encoded in the viral genomes of the disclosure (e.g., antibodies) may be designed by VERSITOPE™ Antibody Generation and other methods used by BIOATLA® and described in United States Patent Publication No, US20130281303, the contents of which are herein incorporated by reference in their entirety. In brief recombinant monoclonal antibodies are derived from B-cells of a host immuno-challenged with one or more target antigens. These methods of antibody generation do not rely on immortalized cell lines, such as hybridoma, thereby avoiding some of the associated challenges i.e., genetic instability and low production capacity, producing high affinity and high diversity recombinant monoclonal antibodies. In some embodiments, the method is a natural diversity approach. In another embodiment, the method is a high diversity approach.

[0252] In some embodiments, the sequences of the polypeptides to be encoded in the viral genomes of the disclosure may be generated using the BIOATLA® natural diversity approach. In the natural diversity approach of generating recombinant monoclonal antibodies described in United States Patent Publication No. US20130281303, the original pairings of variable heavy (V_{H}) and variable light (V_{L}) domains are retained from the host, yielding recombinant monoclonal antibodies that are naturally paired. These may be advantageous due to a higher likelihood of functionality as compared to non-natural pairings of V_{H} and VL. To produce the recombinant monoclonal antibodies, first a non-human host (i.e., rabbit, mouse, hamster, guinea pig, camel or goat) is immuno-challenged with an antigen of interest. In some embodiments, the host may be a previously challenged human patient. In other embodiments, the host may not have been immuno-challenged, B-cells are harvested from the host and screened by fluorescence activated cell sorting (FACS), or other method, to create a library of B-cells enriched in B-cells capable of binding the target antigen. The cDNA obtained from the mRNA of a single B-cell is then amplified to generate an immunoglobulin library of V_{H} and VT, domains. This library of immunoglobulins is then cloned into expression vectors capable of expressing the V_{H} and V_{L}, domains, wherein the V_{H} and V_{L}, domains remain naturally paired. The library of expression vectors is then used in an expression system to express the V_{H} and V_{L} domains in order to create an antibody library. Screening of the antibody library yields antibodies able to bind the target antigen, and these antibodies can be further characterized. Characterization may include one or more of the following: isoelectric point, thermal stability, sedimentation rate, folding rate, neutralization or antigen activity, antagonist or agonistic activity, expression level, specific and non-specific binding, inhibition of enzymatic activity, rigidity/flexibility, shape, charge, stability across pH, in solvents, under UV radiation, in mechanical stress conditions, or in sonic conditions, half-life, and glycosylation.

[0253] In some embodiments, the sequences of the polypeptides to be encoded in the viral genomes of the disclosure may be generated using the BIOATLA® high diversity approach. In the high diversity approach of generating recombinant monoclonal antibodies described in United States Patent Publication No. US20130281303, additional pairings of variable heavy (NTH) and variable light (V_{L}) domains are attained. To produce the recombinant monoclonal antibodies, B-cells harvested from the host are screened by fluorescence activated cell sorting (FACS), panning, or other method, to create a library of B-cells enriched in B-cells capable of binding the target antigen. The cDNA obtained from the mRNA of the pooled B-cells is then amplified to generate an immunoglobulin library of V_{H} and AIL domains. This library of immunoglobulins is then used in a biological display system (mammalian, yeast or bacterial cell surface display systems) to generate a population of cells displaying antibodies, fragments or derivatives comprising the V_{H} and V_{L} domains wherein, the antibodies, fragments or derivatives comprise V_{H} and V_{L}, domain combinations that were not present in the B-cells in vivo. Screening of the cell population by FACS, with the target antigen, yields a subset of cells capable of binding the target antigen and the antibodies displayed on these cells can be further characterized. In an alternate embodiment of the high diversity approach, the immunoglobulin library comprises only V_{H} domains obtained from the B-cells of the immuno-challenged host, while the V_{L} domain(s) are obtained from another source.

[0254] In some embodiments, the sequences of the polypeptides to be encoded in the viral genomes of the disclosure may be evolved using BIOATLA® comprehensive approaches. The methods of generating recombinant monoclonal antibodies as described in United States Patent Publication No, US20130281303, further comprises evolving the recombinant antibody by comprehensive positional evolution (CPE™) CPE™ followed by comprehensive protein synthesis (CPS™), PCR shuffling, or other method.

[0255] In some embodiments, the sequence of the polypeptides to be encoded in the viral genomes of the disclosure (e.g., antibodies) may be derived from any of the BIOATLA® protein evolution methods described in International Publication WO2012009026, the contents of which are herein incorporated by reference in their entirety. In this method, mutations are systematically performed throughout the polypeptide or molecule of interest, a map is created providing useful informatics to guide the subsequent evolutionary steps. Not wishing to be bound by theory, these evolutionary methods typically start with a template polypeptide and a mutant is derived therefrom, which has desirable properties or characteristics. Non-limiting examples of evolutionary techniques include polymerase chain reaction (PCR), error prone PCR, oligonucleotide-directed mutagenesis, cassette mutagenesis, shuffling, assembly PCR, sexual PCR mutagenesis, in vivo mutagenesis, site-specific mutagenesis, gene reassembly, gene site saturated mutagenesis, in vitro mutagenesis, ligase chain reaction, oligonucleotide synthesis or any combination thereof.

[0256] In some embodiments, the BIOATLA® evolution method is Comprehensive Positional Evolution (CPE™). In CPE, naturally occurring amino acid variants are generated for each of the codons of the template polypeptide, wherein 63 different codon options exist for each amino acid variant. A set of polypeptides with single amino acid mutations are generated and the mutations are then confirmed by sequencing or other method known in the art and each amino acid change screened for improved function, neutral mutations, inhibitory mutations, expression, and compatibility with the host system. An EvoMap™ is created that describes in detail the effects of each amino acid mutation on the properties and characteristics of that polypeptide. The data from the EvoMap™ may be utilized to produce polypeptides with more than one amino acid mutation, wherein the resultant multi-site mutant polypeptides can be screened for desirable characteristics.

[0257] In some embodiments, the BIOATLA® evolution method is Synergy Evolution, wherein an EvoMap™ is used to identify amino acid positions to introduce 2-20 mutations simultaneously to produce a combinatorial effect. The resulting multi-site mutant polypeptides may be screened on one or more pre-determined characteristics to identify “upmutants” wherein the function of the mutant is improved as compared to the parent polypeptide. In some embodiments, Synergy Evolution is used to enhance binding affinity of an antibody.

[0258] In some embodiments, the BIOATLA® evolution method is Flex Evolution, wherein an EvoMap™ is used to identify fully mutable sites within a polypeptide that may then be targeted for alteration, such as introduction of glycosylation sites or chemical conjugation.

[0259] In some embodiments, the BIOATLA® evolution method is Comprehensive Positional Insertion Evolution (CPI™), wherein an amino acid is inserted after each amino acid of a template polypeptide to generate a set of lengthened polypeptides. CPI may be used to insert 1, 2, 3, 4, or 5 amino acids at each new position. The resultant lengthened polypeptides are sequenced and assayed for one or more pre-determined properties and evaluated in comparison to its template or parent molecule. In some embodiments, the binding affinity and immunogenicity of the resultant polypeptides are assayed. In some embodiments, the lengthened polypeptides are further mutated and mapped to identify polypeptides with desirable characteristics.

[0260] In some embodiments, the BIOATLA® evolution approach is Comprehensive Positional Deletion Evolution (CPD™), wherein each amino acid of the template polypeptide is individually and systematically deleted one at a time. The resultant shortened polypeptides are then sequenced and evaluated by assay for at least one predetermined feature. In some embodiments, the shortened polypeptides are further mutated and mapped to identify polypeptides with desirable characteristics.

[0261] In some embodiments, the BIOATLA® evolution approach is Combinatorial Protein Synthesis (CPS™), wherein mutants identified in CPE, CPI, CPD, or other evolutionary techniques are combined for polypeptide synthesis. These combined mutant polypeptides are then screened for enhanced properties and characteristics. In some embodiments CPS is combined with any of the aforementioned evolutionary or polypeptide synthesis methods.

[0262] In some embodiments, the sequence of the polypeptides to be encoded in the viral genomes of the disclosure (e.g., antibodies) may be derived from the BIOATLA® Comprehensive Integrated Antibody Optimization (CIAO!™) described in U.S. Pat. No. 8,859,467, the contents of which are herein incorporated by reference in their entirety. The CIAO!™ method allows for simultaneous evolution of polypeptide performance and expression optimization, within a eukaryotic cell host (i.e., mammalian or yeast cell host). First, an antibody library is generated in a mammalian cell production host by antibody cell surface display, wherein the generated antibody library targets a particular antigen of interest. The antibody library is then screened by any method known in the art, for one or more properties or characteristics. One or more antibodies of the library, with desirable properties or characteristics are chosen for further polypeptide evolution by any of the methods known in the art, to produce a library of mutant antibodies by antibody cell surface display in a mammalian cell production host. The generated mutant antibodies are screened for one or more predetermined properties or characteristics, whereby an upmutant is selected, wherein the upmutant has enhanced or improved characteristics as compared to the parent template polypeptide.

[0263] In some embodiments, the sequences of the polypeptides to be encoded in the viral genomes of the disclosure may be humanized by the methods of BIOATLA® as described in United States Patent Publication US20130303399, the contents of which are herein incorporated by reference in their entirety. In this method, for generating enhanced full length humanized antibodies in mammalian cells, no back-mutations are required to retain affinity to the antigen and no CDR grafting or phage-display is necessary. The generated humanized antibody has reduced immunogenicity and equal or greater affinity for the target antigen as compared to the parent antibody. The variable regions or CDRs of the generated humanized antibody are derived from the parent or template, whereas the framework and constant regions are derived from one or more human antibodies. To start, the parent, or template antibody is selected, cloned and each CDR sequence identified and synthesized into a CDR fragment library. Double stranded DNA fragment libraries for V_{H} and V_{L} are synthesized from the CDR fragment encoding libraries, wherein at least one CDR fragment library is derived from the template antibody and framework (FW) fragment encoding libraries, wherein the FW fragment library is derived from a pool of human frameworks obtained from natively expressed and functional human antibodies. Stepwise liquid phase ligation of FW and CDR encoding fragments is then used to generate both V_{H} and V_{L} fragment libraries. The V_{H} and V_{L} fragment libraries are then cloned into expression vectors to create a humanization library, which is further transfected into cells for expression of full length humanized antibodies, and used to create a humanized antibody library. The humanized antibody library is then screened to determine expression level of the humanized antibodies, affinity or binding ability for the antigen, and additional improved or enhanced characteristics, as compared to the template or parent antibody. Non-limiting examples of characteristics that may be screened include equilibrium dissociation constant (K_{D}), stability, melting temperature (Tₘ), pI, solubility, expression level, reduced immunogenicity, and improved effector function.

[0264] In some embodiments, the sequences of the polypeptides to be encoded in the viral genomes of the disclosure may be generated by the BIOATLA® method for preparing conditionally active antibodies as described in International Publications WO2016033331 and WO2016036916, the contents of which are herein incorporated by reference in their entirety. As used herein, the term “conditionally active” refers to a molecule that is active at an aberrant condition. Further, the conditionally active molecule may be virtually inactive at normal physiological conditions. Aberrant conditions may result from changes in pH, temperature, osmotic pressure, osmolality, oxidative stress, electrolyte concentration, and/or chemical or proteolytic resistance, as non-limiting examples.

[0265] The method of preparing a conditionally active antibody is described in International Publications WO2016033331 and WO2016036916 and summarized herein. Briefly, a wild-type polypeptide is selected and the DNA is evolved to create mutant DNAs. Non-limiting examples of evolutionary techniques that may be used to evolve the DNA include polymerase chain reaction (PCR), error prone PCR, shuffling, oligonucleotide-directed mutagenesis, assembly PCR, sexual PCR mutagenesis, in vivo mutagenesis, site-specific mutagenesis, gene reassembly, gene site saturated mutagenesis, in vitro mutagenesis, ligase chain reaction, oligonucleotide synthesis or any combination thereof. Once mutant DNAs are created, they are expressed in a eukaryotic cell production host (i.e., fungal. insect, mammalian, adenoviral. plant), wherein a mutant polypeptide is produced. The mutant polypeptide and the corresponding wild-type polypeptide are then subjected to assays under both normal physiological conditions and aberrant conditions in order to identify mutants that exhibit a decrease in activity in the assay at normal physiological conditions as compared to the wild-type polypeptide and/or an increase in activity in the assay under aberrant conditions, as compared to the corresponding wild-type polypeptide. The desired conditionally active mutant may then be produced in the aforementioned eukaryotic cell production host.

[0266] In some embodiments, the conditionally active antibody is a “mirac protein” as described by BIOATLA® in U.S. Pat. No. 8,709,755, the contents of which are herein incorporated by reference in their entirety. As used herein “mirac protein” refers to a conditionally active antibody that is virtually inactive at body temperature but active at lower temperatures.

[0267] In some embodiments, the sequence of the polypeptides to be encoded in the viral genomes of the disclosure (e.g., antibodies) may be derived based on any of the BIOATLA™ methods including, but not limited to, VERSITOPE™ Antibody Generation, natural diversity approaches, and high diversity approaches for generating monoclonal antibodies, methods for generation of conditionally active polypeptides, humanized antibodies, mirac proteins, multi-specific antibodies or cross-species active mutant polypeptides, Comprehensive Integrated Antibody Optimization (CIAO!™), Comprehensive Positional Evolution (CPE™), Synergy Evolution, Flex Evolution, Comprehensive Positional Insertion Evolution (CPI™), Comprehensive Positional Deletion Evolution (CPD™) Combinatorial Protein Synthesis (CPS™), or any combination thereof. These methods are described in U.S. Pat. Nos. 8,859,467 and 8,709,755 and United States Publication Nos. US20130281303, US20130303399, US20150065690, US20150252119, US20150086562 and US20100138945, and International Publication Nos. WO2015105888; WO2012009026, WO2011109726, WO2016036916, and WO2016033331, the contents of each of which are herein incorporated by reference in their entirety.

[0268] In some embodiments, antibodies of the present disclosure are generated by any of the aforementioned means to target one or more of the following epitopes of the tau protein; phosphorylated tau peptides, pS396, pS396-pS404, pS404, pS396-pS404-pS422, pS422, pS199, pS199-pS202, pS202, pT181, 07231, cis-pT231, any of the following acetylated sites acK174, acK274, acK280, acK281 and/or any combination thereof.

[0269] Antibody Fragments and Variants

[0270] In some embodiments, antibody fragments encoded by payloads of the disclosure comprise antigen binding regions from intact antibodies. Examples of antibody fragments may include, but are not limited to Fab, Fab′, F(ab)₂, and Fv fragments; diabodies; linear antibodies; single-chain antibody molecules; and multispecific antibodies formed from antibody fragments. Papain digestion of antibodies produces two identical antigen-binding fragments, called “Fab” fragments, each with a single antigen-binding site. Also produced is a residual “Fc” fragment, whose name reflects its ability to crystallize readily. Pepsin treatment yields an F(ab)₂ fragment that has two antigen-binding sites and is still capable of cross-linking antigen. Compounds and/or compositions of the present disclosure may comprise one or more of these fragments. For the purposes herein, an “antibody” may comprise a heavy and light variable domain as well as an Fc region.

[0271] In some embodiments, the Fc region may be a modified Fe region, as described in US Patent Publication US20150065690, wherein the Fc region may have a single amino acid substitution as compared to the corresponding sequence for the wild-type Fc region, wherein the single amino acid substitution yields an Fc region with preferred properties to those of the wild-type Fc region. Non-limiting examples of Fe properties that may be altered by the single amino acid substitution include bind properties or response to pH conditions

[0272] As used herein, the term “native antibody” refers to an usually heterotetrameric glycoprotein of about 150,000 Daltons, composed of two identical light (L) chains and two identical heavy (H) chains. Genes encoding antibody heavy and light chains are known and segments making up each have been well characterized and described Matsuda, F. et al., 1998. The journal of Experimental Medicine. 188(11); 2151-62 and Li, A. et al., 2004. Blood. 103(12: 4602-9, the content of each of which are herein incorporated by reference in their entirety). Each light chain is linked to a heavy chain by one covalent disulfide bond, while the number of disulfide linkages varies among the heavy chains of different immunoglobulin isotypes. Each heavy and light chain also has regularly spaced intrachain disulfide bridges. Each heavy chain has at one end a variable domain (V_{H}) followed by a number of constant domains. Each light chain has a variable domain at one end (V_{L}) and a constant domain at its other end; the constant domain of the light chain is aligned with the first constant domain of the heavy chain, and the light chain variable domain is aligned with the variable domain of the heavy chain.

[0273] As used herein, the term “variable domain” refers to specific antibody domains found on both the antibody heavy and light chains that differ extensively in sequence among antibodies and are used in the binding and specificity of each particular antibody for its particular antigen. Variable domains comprise hypervariable regions. As used herein, the term “hypervariable region” refers to a region within a variable domain comprising amino acid residues responsible for antigen binding. The amino acids present within the hypervariable regions determine the structure of the complementarity determining regions (CDRs) that become part of the antigen-binding site of the antibody. As used herein, the term “CDR” refers to a region of an antibody comprising a structure that is complimentary to its target antigen or epitope. Other portions of the variable domain, not interacting with the antigen, are referred to as framework (FW) regions. The antigen-binding site (also known as the antigen combining site or paratope) comprises the amino acid residues necessary to interact with a particular antigen. The exact residues making up the antigen-binding site are typically elucidated by co-crystallography with bound antigen, however computational assessments can also be used based on comparisons with other antibodies (Strohl, W.R. Therapeutic Antibody Engineering. Woodhead Publishing, Philadelphia PA. 2012. Ch. 3, p 47-54, the contents of which are herein incorporated by reference in their entirety). Determining residues making up CDRs may include the use of numbering schemes including, but not limited to, those taught by Kabat (Wu, T. T. et al., 1970, JEM, 132(2):211-50 and Johnson, G. et al., 2000, Nucleic Acids Res. 28(1): 214-8, the contents of each of which are herein incorporated by reference in their entirety), Chothia (Chothia and Lesk, J. Mol, Biol, 196, 901 (1987), Chothia et al., Nature 342, 877 (1989) and A1-Lazikani, B. et al., 1997, J. Mol. Biol. 273(4):927-48, the contents of each of which are herein incorporated by reference in their entirety), Lefranc (Lefranc, M. P. et al., 2005, Immunome Res. 1:3) and Honegger (Honegger, A. and Pluckthun, A. 2001, J. Mol, Biol. 309(3):657-70, the contents of which are herein incorporated by reference in their entirety).

[0274] V_{H} and V_{L} domains have three CDRs each. V_{L} CDRs are referred to herein as CDR-Li, and CDR-L3, in order of occurrence when moving from N- to C-terminus along the variable domain polypeptide. V_{H} CDRs are referred to herein as CDR-H1, CDR-H2, and CDR-F13, in order of occurrence when moving from N- to C-terminus along the variable domain polypeptide. Each of CDRs have favored canonical structures with the exception of the CDR-H3, which comprises amino acid sequences that may be highly variable in sequence and length between antibodies resulting in a variety of three-dimensional structures in antigen-binding domains (Nikoloudis, D. et al., 2014. Peer J. 2:0,456, the contents of which are herein incorporated by reference in their entirety). In some cases, CDR-H3s may be analyzed among a panel of related antibodies to assess antibody diversity. Various methods of determining CDR sequences are known in the art and may be applied to known antibody sequences (Strohl, W. R. Therapeutic Antibody Engineering. Woodhead Publishing, Philadelphia PA. 2012. Ch. 3, p47-54, the contents of which are herein incorporated by reference in their entirety).

[0275] As used herein, the term “Fry” refers to an antibody fragment comprising the minimum fragment on an antibody needed to form a complete antigen-binding site. These regions consist of a dimer of one heavy chain and one light chain variable domain in tight, non-covalent association. Fv fragments can be generated by proteolytic cleavage, but are largely unstable. Recombinant methods are known in the art for generating stable Fv fragments, typically through insertion of a flexible linker between the light chain variable domain and the heavy chain variable domain [to form a single chain Fv (scFv)] or through the introduction of a disulfide bridge between heavy and light chain variable domains (Strohl, W. R. Therapeutic Antibody Engineering. Woodhead Publishing, Philadelphia PA. 2012. Ch. 3, p46-47, the contents of which are herein incorporated by reference in their entirety).

[0276] As used herein, the term “light chain” refers to a component of an antibody from any vertebrate species assigned to one of two clearly distinct types, called kappa and lambda based on amino acid sequences of constant domains. Depending on the amino acid sequence of the constant domain of their heavy chains, antibodies can be assigned to different classes. There are five major classes of intact antibodies: IgA, IgD, IgE, IgG, and IgM, and several of these may be further divided into subclasses (isotypes), e.g., IgG1, IgG2, IgG3, IgG4, IgA, and IgA2.

[0277] As used herein, the term “single chain Fv” or “scFv” refers to a fusion protein of V_{H} and V_{L}, antibody domains, wherein these domains are linked together into a single polypeptide chain by a flexible peptide linker. In some embodiments, the Fv polypeptide linker enables the scFv to form the desired structure for antigen binding. In some embodiments, scFvs are utilized in conjunction with phage display, yeast display or other display methods where they may be expressed in association with a surface member (e.g. phage coat protein) and used in the identification of high affinity peptides for a given antigen.

[0278] As used herein, the term “bispecific antibody” refers to an antibody capable of binding two different antigens. Such antibodies typically comprise regions from at least two different antibodies. Bispecific antibodies may include any of those described in Riethmuller, G. 2012. Cancer Immunity. 12:12-18, Marvin, J. S. et al., 2005. Acta Pharmacologica Sini ca. 26(6):649-58 and Schaefer, W. et al., 2011 PNAS. 108(27):11187-92, the contents of each of which are herein incorporated by reference in their entirety.

[0279] As used herein, the term “diabody” refers to a small antibody fragment with two antigen-binding sites. Diabodies comprise a heavy chain variable domain V_{H} connected to a light chain variable domain V_{L} in the same polypeptide chain. By using a linker that is too short to allow pairing between the two domains on the same chain, the domains are forced to pair with the complementary domains of another chain and create two antigen-binding sites. Diabodies are described more fully in, for example, EP 404097; WO 9311161; and Hollinger et al. (Hollinger, P. et al., “Diabodies”: Small bivalent and bispecific antibody fragments. PNAS. 1993. 90:6444-8) the contents of each of which are incorporated herein by reference in their entirety.

[0280] The term “intrabody” refers to a form of antibody that is not secreted from a cell in which it is produced, but instead targets one or more intracellular proteins. Intrabodies may be used to affect a multitude of cellular processes including, but not limited to intracellular trafficking, transcription, translation, metabolic processes, proliferative signaling, and cell division. In some embodiments, methods of the present disclosure may include intrabody-based therapies. In some such embodiments, variable domain sequences and/or CDR sequences disclosed herein may be incorporated into one or more constructs for intrabody-based therapy.

[0281] As used herein, the term “monoclonal antibody” refers to an antibody obtained from a population of substantially homogeneous cells (or clones), i.e., the individual antibodies comprising the population are identical and/or bind the same epitope, except for possible variants that may arise during production of the monoclonal antibodies, such variants generally being present in minor amounts. In contrast to polyclonal antibody preparations that typically include different antibodies directed against different determinants (epitopes), each monoclonal antibody is directed against a single determinant on the antigen

[0282] The modifier “monoclonal” indicates the character of the antibody as being obtained from a substantially homogeneous population of antibodies, and is not to be construed as requiring production of the antibody by any particular method. The monoclonal antibodies herein include “chimeric” antibodies (immunoglobulins) in which a portion of the heavy and/or light chain is identical with or homologous to corresponding sequences in antibodies derived from a particular species or belonging to a particular antibody class or subclass, while the remainder of the chain(s) is identical with or homologous to corresponding sequences in antibodies derived from another species or belonging to another antibody class or subclass, as well as fragments of such antibodies.

[0283] As used herein, the term “humanized antibody” refers to a chimeric antibody comprising a minimal portion from one or more non-human (e.g., murine) antibody source(s) with the remainder derived from one or more human immunoglobulin sources. For the most part, humanized antibodies are human immunoglobulins (recipient antibody) in which residues from the hypervariable region from an antibody of the recipient are replaced by residues from the hypervariable region from an antibody of a nonhuman species (donor antibody) such as mouse, rat, rabbit or nonhuman primate having the desired specificity, affinity, and/or capacity.

[0284] In some embodiments, viral genomes of the present disclosure may encode antibody mimetics. As used herein, the term “antibody mimetic” refers to any molecule which mimics the function or effect of an antibody and which binds specifically and with high affinity to their molecular targets. In some embodiments, antibody mimetics may be monobodies, designed to incorporate the fibronectin type III domain (Fn3) as a protein scaffold (U.S. Pat. Nos. 6,673,901; 6,348,584). In some embodiments, antibody mimetics may be those known in the art including, but are not limited to affibody molecules, affilins, affirms, anticalins, avimers, Centyrins, DARPINS™, fynomers, Kunitz domains, and domain peptides. In other embodiments, antibody mimetics may include one or more non-peptide regions.

[0285] As used herein, the term “antibody variant” refers to a modified antibody (in relation to a native or starting antibody) or a biomolecule resembling a native or starting antibody in structure and/or function (e.g., an antibody mimetic). Antibody variants may be altered in their amino acid sequence, composition, or structure as compared to a native antibody. Antibody variants may include, but are not limited to, antibodies with altered isotypes (e.g., IgA, IgD, IgC₁, IgG₂, IgG₃, IgG₄, or IgM); humanized variants, optimized variants, multispecific antibody variants (e.g., bispecific variants), and antibody fragments.

[0286] The preparation of antibodies, whether monoclonal or polyclonal. is known in the art. Techniques for the production of antibodies are well known in the art and described, e.g. in Harlow and Lane “Antibodies, A Laboratory Manual”, Cold Spring Harbor Laboratory Press, 1988; Harlow and Lane “Using Antibodies: A Laboratory Manual” Cold Spring Harbor Laboratory Press, 1999 and “Therapeutic Antibody Engineering: Current and Future Advances Driving the Strongest Growth Area in the Pharmaceutical Industry” Woodhead Publishing, 2012.

### Multispecific Antibodies

[0287] In some embodiments, payloads of the disclosure may encode antibodies that bind more than one epitope. As used herein, the terms “multibody” or “multispecific antibody” refer to an antibody wherein two or more variable regions bind to different epitopes. The epitopes may be on the same or different targets. In certain embodiments, a multi-specific antibody is a “bispecific antibody,” which recognizes two different epitopes on the same or different antigens.

[0288] In some embodiments, multi-specific antibodies may be prepared by the methods used by BIOATLA® and described in International Patent publication WO201109726; the contents of which are herein incorporated by reference in their entirety. First a library of homologous, naturally occurring antibodies is generated by any method known in the art (i.e., mammalian cell surface display), then screened by FACSAria or another screening method, for multi-specific antibodies that specifically bind to two or more target antigens. In some embodiments, the identified multi-specific antibodies are further evolved by any method known in the art, to produce a set of modified multi-specific antibodies. These modified multi-specific antibodies are screened for binding to the target antigens. In some embodiments, the multi-specific antibody may be further optimized by screening the evolved modified multi-specific antibodies for optimized or desired characteristics.

[0289] In some embodiments, multi-specific antibodies may be prepared by the methods used by BIOATLA® and described in Unites States Publication No. US20150252119, the contents of which are herein incorporated by reference in their entirety. In one approach, the variable domains of two parent antibodies, wherein the parent antibodies are monoclonal antibodies are evolved using any method known in the art in a manner that allows a single light chain to functionally complement heavy chains of two different parent antibodies. Another approach requires evolving the heavy chain of a single parent antibody to recognize a second target antigen. A third approach involves evolving the light chain of a parent antibody so as to recognize a second target antigen. Methods for polypeptide evolution are described in International Publication WO2012009026, the contents of which are herein incorporated by reference in their entirety, and include as non-limiting examples, Comprehensive Positional Evolution (CPE), Combinatorial Protein Synthesis (CPS), Comprehensive Positional Insertion (CH), Comprehensive Positional Deletion (CPD), or any combination thereof. The Fc region of the multi-specific antibodies described in United States Publication No. US20150252119 may be created using a knob-in-hole approach, or any other method that allows the Fc domain to form heterodimers. The resultant multi-specific antibodies may be further evolved for improved characteristics or properties such as binding affinity for the target antigen.

### Bispecific Antibodies

[0290] In some embodiments, payloads of the disclosure may encode bispecific antibodies. Bispecific antibodies are capable of binding two different antigens. Such antibodies typically comprise antigen-binding regions from at least two different antibodies. For example, a bispecific monoclonal antibody (BsMAb, BsAb) is an artificial protein composed of fragments of two different monoclonal antibodies, thus allowing the BsAb to bind to two different types of antigen.

[0291] In some cases, payloads encode bispecific antibodies comprising antigen-binding regions from two different antibodies. For example, such bi specific antibodies may comprise binding regions from two different antibodies selected from Tables 3-53.

[0292] Bispecific antibody frameworks may include any of those described in Riethmuller, G., 2012. Cancer Immunity. 12:12-18; Marvin, J. S. et al., 2005. Acta Pharmacologica Sinica. 26(6):649-58; and Schaefer, W. et at, 2011. PNAS. 108(27):11187-92, the contents of each of which are herein incorporated by reference in their entirety.

[0293] New generations of BsMAb, called “trifunctional bispecific” antibodies, have been developed. These consist of two heavy and two light chains, one each from two different antibodies, where the two Fab regions (the arms) are directed against two antigens, and the Fe region (the foot) comprises the two heavy chains and forms the third binding site.

[0294] Of the two paratopes that form the tops of the variable domains of a bispecific antibody, one can be directed against a target antigen and the other against a T-lymphocyte antigen like CD3. In the case of trifunctional antibodies, the Fc region may additionally bind to a cell that expresses Fc receptors, like a macrophage, a natural killer (NK) cell or a dendritic cell. In sum, the targeted cell is connected to one or two cells of the immune system, which subsequently destroy it.

[0295] Other types of bispecific antibodies have been designed to overcome certain problems, such as short half-life, immunogenicity and side-effects caused by cytokine liberation. They include chemically linked Fabs, consisting only of the Fab regions, and various types of bivalent and trivalent single-chain variable fragments (scFvs), fusion proteins mimicking the variable domains of two antibodies. The furthest developed of these newer formats are the bi-specific T-cell engagers (BiTEs) and mAb2′s, antibodies engineered to contain an Fcab antigen-binding fragment instead of the Fc constant region.

[0296] Using molecular genetics, two scFvs can be engineered in tandem into a single polypeptide, separated by a linker domain, called a “tandem scFv” (tascFv). TascFvs have been found to be poorly soluble and require refolding when produced in bacteria, or they may be manufactured in mammalian cell culture systems, which avoids refolding requirements but may result in poor yields. Construction of a tascFv with genes for two different scFvs yields a “bispecific single-chain variable fragments” (bis-scFvs). Only two tascFvs have been developed clinically by commercial firms; both are bispecific agents in active early phase development by Micromet for oncologic indications, and are described as “Bispecific T-cell Engagers (BiTE).” Blinatumomab is an anti-CD19/anti-CD3 bispecific tascFv that potentiates T-cell responses to B-cell non-Hodgkin lymphoma in Phase 2. MT110 is an anti-EP-CAM/anti-CD3 bispecific tascFv that potentiates T-cell responses to solid tumors in Phase 1. Bispecific, tetravalent “TandAbs” are also being researched by Affimed (Nelson, A. L., MAbs.2010. January-February; 2(1):77-83).

[0297] In some embodiments, payloads may encode antibodies comprising a single antigen-binding domain. These molecules are extremely small, with molecular weights approximately one-tenth of those observed for full-sized mAbs. Further antibodies may include “nanobodies” derived from the antigen-binding variable heavy chain regions (V_{HH}s) of heavy chain antibodies found in camels and llamas, which lack light chains (Nelson, A. L., MAbs.2010. January-February; 2(1):77-83).

[0298] Disclosed and claimed in PCT Publication WO2014144573 to Memorial Sloan-Kettering Cancer Center are multimerization technologies for making dimeric multi specific binding agents (e.g., fusion proteins comprising antibody components) with improved properties over multi specific binding agents without the capability of dimerization.

[0299] In some cases, payloads of the disclosure may encode tetravalent bispecific antibodies (TetBiAbs as disclosed and claimed in PCT Publication WO2014144357). TetBiAbs feature a second pair of Fab fragments with a second antigen specificity attached to the C-terminus of an antibody, thus providing a molecule that is bivalent for each of the two antigen specificities. The tetravalent antibody is produced by genetic engineering methods, by linking an antibody heavy chain covalently to a Fab light chain, which associates with its cognate, co-expressed Fab heavy chain.

[0300] In some aspects, payloads of the disclosure may encode biosynthetic antibodies as described in U.S. Pat. No. 5,091,513, the contents of which are herein incorporated by reference in their entirety. Such antibody may include one or more sequences of amino acids constituting a region which behaves as a biosynthetic antibody binding site (BABS). The sites comprise 1) non-covalently associated or disulfide bonded synthetic V_{H} and V_{L} dimers, 2) V_{H}-V_{L} or V_{L}-V_{H} single chains wherein the V_{H} and V_{L} are attached by a polypeptide linker, or 3) individuals V_{H} or V_{L} domains. The binding domains comprise linked CDR and FR regions, which may be derived from separate immunoglobulins. The biosynthetic antibodies may also include other polypeptide sequences which function, e.g., as an enzyme, toxin, binding site, or site of attachment to an immobilization media or radioactive atom. Methods are disclosed for producing the biosynthetic antibodies, for designing BAGS having any specificity that can be elicited by in vivo generation of antibody, and for producing analogs thereof.

[0301] In some embodiments, payloads may encode antibodies with antibody acceptor frameworks taught in U.S. Pat. No. 8,399,625. Such antibody acceptor frameworks may be particularly well suited accepting CDRs from an antibody of interest. In some cases, CDRs from anti-tau antibodies known in the art or developed according to the methods presented herein may be used.

### Miniaturized Antibody

[0302] In some embodiments, the antibody encoded by the payloads of the disclosure may be a “miniaturized” antibody. Among the best examples of mAb miniaturization are the small modular immunopharmaceuticals (SMIPs) from Trubion Pharmaceuticals. These molecules, which can be monovalent or bivalent, are recombinant single-chain molecules containing one V_{L}, one V_{H} antigen-binding domain, and one or two constant “effector” domains, all connected by linker domains. Presumably, such a molecule might offer the advantages of increased tissue or tumor penetration claimed by fragments while retaining the immune effector functions conferred by constant domains. At least three “miniaturized” SMIPs have entered clinical development. TRU-015, an anti-CD20 SMIP developed in collaboration with Wyeth, is the most advanced project, having progressed to Phase 2 for rheumatoid arthritis (RA). Earlier attempts in systemic lupus erythrematosus (SLE) and B cell lymphomas were ultimately discontinued. Trubion and Facet Biotechnology are collaborating in the development of TRU-016, an anti-CD37 SMIP, for the treatment of CLL and other lymphoid neoplasias, a project that has reached Phase 2. Wyeth has licensed the anti-CD20 SMTP SBI-087 for the treatment of autoimmune diseases, including RA, SLE, and possibly multiple sclerosis, although these projects remain in the earliest stages of clinical testing. (Nelson, A. L., MAbs.2010. January-February; 2(1):77-83).

### Diabodies

[0303] In some embodiments, payloads of the disclosure may encode diabodies. Diabodies are functional bispecific single-chain antibodies (bscAb). These bivalent antigen-binding molecules are composed of non-covalent dimers of scFvs, and can be produced in mammalian cells using recombinant methods. (See, e.g., Mack et al. Proc. Natl. Acad. Sci., 92: 7021-7025, 1995). Few diabodies have entered clinical development. An iodine-123-labeled diabody version of the anti-CEA chimeric antibody cT84.66 has been evaluated for pre-surgical immunoscintigraphic detection of colorectal cancer in a study sponsored by the Beckman Research Institute of the City of Hope (Clinicaltrials.gov NCT00647153) (Nelson, A. L., MAbs., 2010. January-February; 2(1):77-83),

### Unibody

[0304] In some embodiments, payloads may encode a “unibody,” in which the hinge region has been removed from IgG4 molecules. While IgG4 molecules are unstable and can exchange light-heavy chain heterodimers with one another, deletion of the hinge region prevents heavy chain-heavy chain pairing entirely, leaving highly specific monovalent light/heavy heterodimers, while retaining the Fe region to ensure stability and half-life in vivo. This configuration may minimize the risk of immune activation or oncogenic growth, as IgG4 interacts poorly with FcRs and monovalent unibodies fail to promote intracellular signaling complex formation. These contentions are, however, largely supported by laboratory, rather than clinical. evidence. Other antibodies may be “miniaturized” antibodies, which are compacted 100 kDa antibodies (see, e.g., Nelson, A. L., MAbs., 2010. January-February; 2(1):77-83).

### Intrabodies

[0305] In some embodiments, payloads of the disclosure may encode intrabodies. Intrabodies are a form of antibody that is not secreted from a cell in which it is produced, but instead targets one or more intracellular proteins. Intrabodies are expressed and function intracellularly and may be used to affect a multitude of cellular processes including, but not limited to intracellular trafficking, transcription, translation, metabolic processes, proliferative signaling and cell division. In some embodiments, methods described herein include intrabody-based therapies. In some such embodiments, variable domain sequences and/or CDR sequences disclosed herein are incorporated into one or more constructs for intrabody based therapy. For example, intrabodies may target one or more glycated intracellular proteins or may modulate the interaction between one or more glycated intracellular proteins and an alternative protein.

[0306] More than two decades ago, intracellular antibodies against intracellular targets were first described (Biocca, Neuberger and Cattaneo EMBO J. 9: 101-108, 1990). The intracellular expression of intrabodies in different compartments of mammalian cells allows blocking or modulation of the function of endogenous molecules (Biocca, et al., EMBO J. 9: 101-108, 1990; Colby et al., Proc. Natl. Acad. Sci. U.S.A. 101: 17616-21, 2004). Intrabodies can alter protein folding, protein-protein, protein-DNA, protein-RNA interactions and protein modification. They can induce a phenotypic knockout and work as neutralizing agents by direct binding to the target antigen, by diverting its intracellular trafficking or by inhibiting its association with binding partners. They have been largely employed as research tools and are emerging as therapeutic molecules for the treatment of human diseases such as viral pathologies, cancer and misfolding diseases. The fast-growing bio-market of recombinant antibodies provides intrabodies with enhanced binding specificity, stability, and solubility, together with lower immunogenicity, for their use in therapy (Biocca, abstract in Antibody Expression and Production Cell Engineering Volume 7, 2011, pp. 179-195).

[0307] In some embodiments, intrabodies have advantages over interfering RNA (iRNA); for example, iRNA has been shown to exert multiple nonspecific effects, whereas intrabodies have been shown to have high specificity and affinity to target antigens. Furthermore, as proteins, intrabodies possess a much longer active half-life than iRNA. Thus, when the active half-life of the intracellular target molecule is long, gene silencing through iRNA may be slow to yield an effect, whereas the effects of intrabody expression can be almost instantaneous. Lastly, it is possible to design intrabodies to block certain binding interactions of a particular target molecule, while sparing others.

[0308] Intrabodies are often single chain variable fragments (scFvs) expressed from a recombinant nucleic acid molecule and engineered to be retained intracellularly (e.g., retained in the cytoplasm, endoplasmic reticulum, or periplasm). Intrabodies may be used, for example, to ablate the function of a protein to which the intrabody binds. The expression of intrabodies may also be regulated through the use of inducible promoters in the nucleic acid expression vector comprising the intrabody. Intrabodies may be produced for use in the viral genomes of the disclosure using methods known in the art, such as those disclosed and reviewed in: (Marasco et al. 1993 Proc. Natl. Acad. Sci. USA, 90: 7889-7893; Chen et al., 1994, Hum. Gene Tiler. 5:595-601; Chen et al., 1994, Proc. Natl. Acad. Sci. USA, 91: 5932-5936; Maciejewski et at, 1995, Nature Med., 1: 667-673; Marasco, 1995, Immunotech, 1: 1-19; Mhashilkar, et al., 1995, EMBO J. 14: 1542-51; Chen et al., 1996, Hum. Gene Therap., 7: 1515-1525; Marasco, Gene They 4:11-15, 1997; Rondon and Marasco, 1997, Annu. Rev. Microbial. 51:257-283; Cohen, et al., 1998, Oncogene 17:2445-56; Proba et a., 1998, Mol. Biol. 275:245-253; Cohen et a., 1998, Oncogene 17:2445-2456; Hassanzadeh, et al., 1998, FEBS Lett. 437:81-6; Richardson et al., 1998, Gene Ther. 5:635-44; Ohage and Steipe, 1999, J. Mol. Biol. 291:1119-1128; Ohage et al., 1999, 1. Mot. Biol. 291:1129-1134; Wirtz and Steipe, 1999, Protein Sci. 8:2245-2250; Zhu et al., 1999, J. Immunol. Methods 231:207-222; Arafat et al., 2000, Cancer Gene Ther. 7:1250-6; der Maur et al., 2002, J Biol. Chem. 277:45075-85; Mhashilkar et al., 2002, Gene They 9:307-19; and Wheeler et al., 2003, FASEB J. 17: 1733-5; and references cited therein). In particular, a CCR5 intrabody has been produced by Steinberger et al., 2000, Proc. Natl. Acad. Sci. USA 97:805-810). See generally Marasco, W A, 1998, “Intrabodies: Basic Research and Clinical Gene Therapy Applications” Springer: New York; and for a review of scFvs, see Pluckthun in “The Pharmacology of Monoclonal Antibodies,” 1994, vol. 113, Rosenburg and Moore eds. Springer-Verlag, New York, pp. 269-315.

[0309] Sequences from donor antibodies may be used to develop intrabodies. Intrabodies are often recombinantly expressed as single domain fragments such as isolated V_{H} and V_{L} domains or as a single chain variable fragment (scFv) antibody within the cell. For example, intrabodies are often expressed as a single polypeptide to form a single chain antibody comprising the variable domains of the heavy and light chains joined by a flexible linker polypeptide. Intrabodies typically lack disulfide bonds and are capable of modulating the expression or activity of target genes through their specific binding activity. Single chain antibodies can also be expressed as a single chain variable region fragment joined to the light chain constant region.

[0310] As is known in the art, an intrabody can be engineered into recombinant polynucleotide vectors to encode sub-cellular trafficking signals at its N or C terminus to allow expression at high concentrations in the sub-cellular compartments where a target protein is located. For example, intrabodies targeted to the endoplasmic reticulum (ER) are engineered to incorporate a leader peptide and, optionally, a C-terminal ER retention signal. such as the KDEL amino acid motif (SEQ ID NO: 32691). Intrabodies intended to exert activity in the nucleus are engineered to include a nuclear localization signal. Lipid moieties are joined to intrabodies in order to tether the intrabody to the cytosolic side of the plasma membrane. Intrabodies can also be targeted to exert function in the cytosol. For example, cytosolic intrabodies are used to sequester factors within the cytosol, thereby preventing them from being transported to their natural cellular destination.

[0311] There are certain technical challenges with intrabody expression. In particular, protein conformational folding and structural stability of the newly-synthesized intrabody within the cell is affected by reducing conditions of the intracellular environment.

[0312] Intrabodies of the disclosure may be promising therapeutic agents for the treatment of misfolding diseases, including Tauopathies, prion diseases, Alzheimer's, Parkinson's, and Huntington's, because of their virtually infinite ability to specifically recognize the different conformations of a protein, including pathological isoforms, and because they can be targeted to the potential sites of aggregation (both intra and extracellular sites). These molecules can work as neutralizing agents against amyloidogenic proteins by preventing their aggregation, and/or as molecular shunters of intracellular traffic by rerouting the protein from its potential aggregation site (Cardinale, and Biocca, Curr. Mol. Med. 2008, 8:2-11).

### Maxibodies

[0313] In some embodiments, the payloads of the disclosure encode a maxibody (bivalent scFV fused to the amino terminus of the Fc (CH2-CH3 domains) of IgG.

### Chimeric Antigen Receptors

[0314] In some embodiments, the polypeptides encoded by the viral genomes of the disclosure (e.g., antibodies) may be used to generate chimeric antigen receptors (CARS) as described by BIOATLA® in International Publications WO2016033331 and WO2016036916, the contents of which are herein incorporated by reference in their entirety. As used herein, a “chimeric antigen receptor (CAR)” refers to an artificial chimeric protein comprising at least one antigen specific targeting region (ASTR), wherein the antigen specific targeting region comprises a full-length antibody or a fragment thereof that specifically binds to a target antigen. The ASTR may comprise any of the following; a full length heavy or light chain, an Fab fragment, a single chain Fv fragment, a divalent single chain antibody, or a diabody. As a non-limiting example the ASTR of a CAR may be any of the antibodies listed in Tables 3-53, antibody-based compositions or fragments thereof. Any molecule that is capable of binding a target antigen with high affinity can be used in the ASTR of a CAR. In some embodiments, the CAR may have more than one ASTR. These ASTRs may target two or more antigens or two or more epitopes of the same antigen. In some embodiments, the CAR is conditionally active. In some embodiments, the CAR is used to produce a genetically engineered cytotoxic cell carrying the CAR and capable of targeting the antigen bound by the ASTR.

[0315] Chimeric antigen receptors (CARO are particularly useful in the treatment of cancers, though also therapeutically effective in treatment of a wide variety of other diseases and disorders. Non-limiting examples of disease categories that may be treated with CARs or CAR-based therapeutics include autoimmune disorders, B-cell mediated diseases, inflammatory diseases, neuronal disorders, cardiovascular disease and circulatory disorders, or infectious diseases. Not wishing to be bound by theory, CARs traditionally work by targeting antigens presented on the surface of or on the inside of cells to be destroyed e.g., cancer tumor cells, by the cytotoxic cell of the CAR.

### Senescent Cell Surface Protein Antibodies

[0316] In some embodiments, the viral particles may comprise nucleic acids which have been engineered to express of antibodies that selectively bind to surface marker proteins of senescent cells. For example, the antibodies may selectively bind to proteins that are in misfolded conformation. The binding antibodies may reduce the number of senescent cells and be used to treat age-related conditions, such as, but not limited to, Alzheimer's disease, cardiovascular disease, emphysema, sarcopenia, and tumorigenesis as well as conditions more cosmetic in nature such as signs of skin aging including wrinkling, sagging, discoloration, age-related tissue dysfunction, tumor formation, and other age-related conditions.

[0317] In some embodiments, the expressed antibodies binding to epitopes of senescent cell surface proteins may be, but are not limited to, such as prion epitopes presented by SEQ ID NO: 1-14 of International Publication No. WO02014186878; CD44 epitopes presented by SEQ ID NO: 47-51 of International Publication No. WO2014186878; TNFR epitopes presented by SEQ ID NO: 52-56 of International Publication No. WO2014186878; NOTCH1 epitope presented by SEQ ID NO: 57-61 of International Publication No. WO2014186878; FasR epitopes presented by SEQ ID NO: 62-66 of International Publication No. WO2014186878; epidermal growth factor epitopes presented by SEQ ID NO: 67-81 of International Publication No. WO2014186878; CD38 epitopes presented by SEQ ID NO: 82-86 of International Publication No. WO2014186878, the contents of each of which are herein incorporated by reference in their entirety.

[0318] In some embodiments, the expressed antibodies may comprise peptides binding to senescent cell surface prion proteins, such as, but not limited to, those presented by SEQ ID NO: 15-36 of International Publication No. WO2014186878, the contents of which are herein incorporated by reference in their entirety.

[0319] In some embodiments, the expressed antibody may be AMF-3a-118 or AIF 3d-19 (SEQ ID NO: 8992 and 103106 of International publication WO2014186878, respectively, the contents of which are herein incorporated by reference in their entirety) targeting senescent cell surface protein FasR. In some embodiments, the expressed antibody may be Ab c-120 (SEQ NO: 37-40 of International publication WO2014186878, the contents of which are herein incorporated by reference in their entirety) targeting senescent cell surface protein PrP.

### Payload Antibodies of the Disclosure

[0320] In some embodiments, the payload region of the viral particle comprises one or more nucleic acid sequences encoding antibodies, variants or fragments thereof.

[0321] In some embodiments, the payload region of the viral particle comprises one or more nucleic acid sequences encoding TRIM21, variants or fragments thereof.

[0322] In some embodiments, the payload region of the viral particle comprises one or more nucleic acid sequences encoding antibody and TRIM21, variants or fragments thereof.

[0323] In some embodiments, the payload region of the viral particle comprises one or more nucleic acid sequences encoding one or more of the payload antibody polypeptides listed in any of International Publications, WO2017191559, WO2017191561 or WO2017191560 all to Prothena Biosciences, Limited, the contents of each of which are incorporated by reference herein in their entirety.

[0324] In some embodiments, the payload region of the viral particle comprises one or more nucleic acid sequences encoding one or more of the payload antibody polypeptides listed in Tables 3-53, or variants or fragments thereof. As used herein, “antibody polynucleotide” refers to a nucleic acid sequence encoding an antibody polypeptide.

[0325] In some embodiments, the payload region of the viral particle comprises one or more nucleic acid sequences listed in Tables 3-53, or variants or fragments thereof.

[0326] In some embodiments, the payload region of the viral particle comprises one or more nucleic acid sequences listed in Tables 3-53, or variants or fragments thereof, which result in production of a bispecific antibody. In some embodiments, the payload may be a bispecific antibody. The bispecific antibody may comprise one or more antibody components described herein or otherwise known in the art.

[0327] In some embodiments, the payload region of the viral particle comprises an Fe swap component, wherein said Fc swap may mediate direct cell killing. In some embodiments, the Fe swap component is introduced into a bispecific antibody payload.

[0328] In some embodiments, the payload region of the viral particle comprises a nucleic acid sequence encoding a payload antibody with at least 50% identity to one or more payload antibody polypeptides listed in Tables 3-53. The encoded antibody polypeptide may have 50%, 51%, 52%, 53%, 54%, 55%, 56%, 57%, 58%, 59%, 60%, 61%, 62%, 63%, 64%, 65%, 66%, 67% 68% 69%, 70%, 71%, 72%, 73%, 74%, 75%, 76%, 77%, 78%, 79%, 80%, 81%, 82%, 83%, 84%, 85%, 86%, 87%, 88%, 89%, 90%, 91%, 92%, 9398O, 94%, 95%, 96%, 97%, 98%, 99%, or 100% identity to one or more of the payload antibody polypeptides listed in Tables 3-53, or variants or fragments thereof.

[0329] In some embodiments, the full sequence of the encoded antibody polypeptide may have 50%, 51%, 52%, 53%, 54%, 55%, 56%, 57%, 58%, 59%, 60%, 61%, 62%, 63%, 64%, 65%, 66%, 67%, 68%, 69%, 70%, 71%, 77%, 73%, 74%, 75%, 76%, 77%, 78%. 79%, 80%, 81%, 82%, 83%, 84%, 85%, 86%, 87%, 88%, 89%, 90%, 91%, 92%, 93%, 94%, 95%, 96%, 97%, 98%, 99%, or 100% identity to one or more of the payload antibody polypeptides listed in Tables 3-53, or variants or fragments thereof.

[0330] In some embodiments, the variable region sequence(s) of the encoded antibody polypeptide may have 50%, 51%, 52%, 53%, 54%, 55%, 56%, s7%, 58%, 59%, 60%, 61%, 62%, 63%, 64%, 65%, 66%, 67%, 68%, 69%, 70%, 71%, 72%, 73%, 74%, 75%, 76%, 77%, 78%, 79%, 80%, 81%, 82%, 83%, 84%, 85%, 86%, 87%, 88%, 89%, 90%, 91%, 92%, 93%, 94%, 95%, 96%, 97%, 98%, 999/O, or 100% identity to one or more of the payload antibody polypeptides listed in Tables 3-53, or variants or fragments thereof.

[0331] In some embodiments, the heavy chain of the encoded antibody polypeptide may have 50%, 51%, 52%, 53%, 54%, 55%, 56%, 57%, 58%, 59%, 60%, 61%, 62%, 63%, 64%, 65%, 66%, 67%, 68%, 69%, 70%, 71%, 72%, 73%, 74%, 75%, 76%, 77%, 78%, 79%, 80%, 811%, 82%, 83%, 84%, 85%, 86%, 87%, 88%, 89%, 90%, 91%, 92%, 93%, 94%, 95%, 96%, 97%, 98%, 99%, or 100% identity to one or more of the payload heavy chain antibody polypeptides listed in Tables 3-53, or variants or fragments thereof.

[0332] In some embodiments, the light chain of the encoded antibody polypeptide may have 50%, 51%, 52%, 53%, 54%, 55%, 56%, 57%, 58%, 59%, 60%, 61%, 62%, 63%, 64%, 65%, 66%, 67%, 68%, 69%, 70%, 71%, 72%, 73%, 74%, 75%, 76%, 77%, 78%, 79%, 80%, 81%, 82%, 83%, 84%, 85%, 86%, 87% 88%, 89%. 90%, 911%, 92%, 93%, 94%, 95%, 96%, 97%, 98%, 99%, or 100% identity to one or more of the payload light chain antibody polypeptides listed in Tables 3-53, or variants or fragments thereof.

[0333] In some embodiments, the CDR region of the encoded antibody polypeptide may have 50%, 51%, 52%, 53%, 54%, 55%, 56%, 57%, 58%, 59%, 60%, 61%, 62%, 63%, 64%, 65%, 66%, 67%, 68%, 69%, 70%, 71%, 72%, 73%, 74%, 75%, 76%, 77%, 78%, 79%, 80%, 81%, 82%, 83%, 84%, 85%, 86%, 87%, 88%, 89%. 90%, 91%, 92%, 93%, 94%, 95%, 96%, 97%, 98%, 99%, or 100% identity to the CDRs of one or more of the payload antibody polypeptides listed in Tables 3-53, or variants or fragments thereof.

[0334] In some embodiments, the payload antibody has 90% identity to one or more of the antibody polypeptides listed in Tables 3-53, or variants or fragments thereof.

[0335] In some embodiments, the payload antibody has 91% identity to one or more of the antibody polypeptides listed in Tables 3-53, or variants or fragments thereof.

[0336] In some embodiments, the payload antibody has 92% identity to one or more of the antibody polypeptides listed in Tables 3-53, or variants or fragments thereof.

[0337] In some embodiments, the payload antibody has 93% identity to one or more of the antibody polypeptides listed in Tables 3-53, or variants or fragments thereof.

[0338] In some embodiments, the payload antibody has 94% identity to one or more of the antibody polypeptides listed in Tables 3-53, or variants or fragments thereof.

[0339] In some embodiments, the payload antibody has 95% identity to one or more of the antibody polypeptides listed in Tables 3-53, or variants or fragments thereof.

[0340] In some embodiments, the payload antibody has 96% identity to one or more of the antibody polypeptides listed in Tables 3-53, or variants or fragments thereof.

[0341] In some embodiments, the payload antibody has 97% identity to one or more of the antibody polypeptides listed in Tables 3-53, or variants or fragments thereof.

[0342] In some embodiments, the payload antibody has 98% identity to one or more of the antibody polypeptides listed in Tables 3-53, or variants or fragments thereof.

[0343] In some embodiments, the payload antibody has 99% identity to one or more of the antibody polypeptides listed in Tables 3-53, or variants or fragments thereof.

[0344] In some embodiments, the payload antibody has 100% identity to one or more of the antibody polypeptides listed in Tables 3-53, or variants or fragments thereof.

[0345] In some embodiments, the payload region of the viral particle comprises a nucleic acid sequence with at least 50% identity to one or more nucleic acid sequences listed in Tables 3-53, or variants or fragments thereof. The payload nucleic acid sequence may have 50%, 51%, 52%, 53%, 54%, 55%, 56%, 57%, 58%, 59%, 60%, 61%, 62%, 63%, 64%, 65%, 66%, 67%, 68%, 69%, 70%, 71%, 72%, 73%, 74%, 75%, 76%, 7700, 78%, 79%, 80%, 81%, 82′,O, 83%, 84%, 85%, 8600, 8700, 8800, 89%, 90%, 9100, 9200, 9300, 94% 9500, 9600, 97%, 9800, 9900 or 10000 identity to one or more nucleic acid sequences listed in Tables 3-53, or variants or fragments thereof.

[0346] In some embodiments, the payload nucleic acid sequence has 9000 identity to one or more of the nucleic acid sequences listed in Tables 3-53, or variants or fragments thereof.

[0347] In some embodiments, the payload nucleic acid sequence has 91% identity to one or more of the nucleic acid sequences listed in Tables 3-53, or variants or fragments thereof.

[0348] In some embodiments, the payload nucleic acid sequence has 92% identity to one or more of the nucleic acid sequences listed in Tables 3-53, or variants or fragments thereof.

[0349] In some embodiments, the payload nucleic acid sequence has 93% identity to one or more of the nucleic acid sequences listed in Tables 3-53, or variants or fragments thereof.

[0350] In some embodiments, the payload nucleic acid sequence has 94% identity to one or more of the nucleic acid sequences listed in Tables 3-53, or variants or fragments thereof.

[0351] In some embodiments, the payload nucleic acid sequence has 95% identity to one or more of the nucleic acid sequences listed in Tables 3-53, or variants or fragments thereof.

[0352] In some embodiments, the payload nucleic acid sequence has 96% identity to one or more of the nucleic acid sequences listed in Tables 3-53, or variants or fragments thereof.

[0353] In some embodiments, the payload nucleic acid sequence has 97% identity to one or more of the nucleic acid sequences listed in Tables 3-53, or variants or fragments thereof.

[0354] In some embodiments, the payload nucleic acid sequence has 98% identity to one or more of the nucleic acid sequences listed in Tables 3-53, or variants or fragments thereof.

[0355] In some embodiments, the payload nucleic acid sequence has 99% identity to one or more of the nucleic acid sequences listed in Tables 3-53, or variants or fragments thereof.

[0356] In some embodiments, the payload nucleic acid sequence has 100% identity to one or more of the nucleic acid sequences listed in Tables 3-53, or variants or fragments thereof.

[0357] In some embodiments, the payload region of the viral particle comprises a nucleic acid sequence encoding a polypeptide which is an antibody, an antibody-based composition, or a fragment thereof. As a non-limiting example, the antibody may be one or more of the polypeptides listed in Tables 3-53, or variants or fragments thereof. As another non-limiting example, the antibody may be one or more of the heavy chain sequences listed in Tables 3-53. As a non-limiting example, the antibody may be one or more of the light chain sequences listed in Tables 3-53, or variants or fragments thereof.

[0358] In some embodiments, the payload region of the viral particle comprises a nucleic acid sequence encoding a polypeptide comprising a heavy chain and a light chain sequence listed in Tables 3-53, or variants or fragments thereof. The payload region may also comprise a linker between the heavy and light chain sequences. The linker may be a sequence known in the art or described in Table 2.

[0359] In some embodiments, the payload region of the viral particle comprises a nucleic acid sequence encoding a polypeptide comprising a heavy chain and a light chain sequence listed in Tables 3-53, or variants or fragments thereof, where the heavy chain sequence is from a different antibody than the light chain sequence. The payload region may also comprise a linker between the heavy and light chain sequences. The linker may be a sequence known in the art or described in Table 2.

[0360] In some embodiments, the payload region comprises, in the 5′ to 3′ direction, an antibody light chain sequence, a linker and a heavy chain sequence.

[0361] In some embodiments, the payload region comprises a nucleic acid sequence encoding, in the 5′ to 3′ direction, an antibody light chain sequence from Tables 3-53, a linker from Table 2 and a heavy chain sequence from Tables 3-53.

[0362] In some embodiments, the payload region comprises, in the 5′ to 3′ direction, an antibody heavy chain sequence, a linker and a light chain sequence.

[0363] In some embodiments, the payload region comprises a nucleic acid sequence encoding, in the 5′ to 3′ direction, an antibody heavy chain sequence from Tables 3-53, a linker from Table 2, and a light chain sequence from Tables 3-53.

[0364] In some embodiments, the payload region comprises a nucleic acid sequence encoding a single heavy chain. As a non-limiting example, the heavy chain is an amino acid sequence or fragment thereof described in Tables 3-53.

[0365] Tables 3-53 provide a listing of antibodies and their polynucleotides and/or polypeptides sequences. These sequences may be encoded by or included in the viral particles of the present disclosure. Variants or fragments of the antibody sequences described in Tables 3-53 may be utilized in the viral particles of the present disclosure.

[0366] In some embodiments, the viral particles may comprise codon-optimized versions of the nucleic acids encoding the polypeptides listed in Tables 3-53. In some cases, the payload region of the viral particles of the disclosure may encode one or more isoforms or variants of these heavy and light chain antibody domains. Such variants may be humanized or optimized antibody domains comprising one or more complementarity determining regions (CDRs) from the heavy and light chains listed in Tables 3-53. CDRs of the antibodies encoded by the viral genomes of the present disclosure may be 50%, 60%, 70%, 80%, 90%, 95% identical to CDRs listed in or incorporated in the sequences of Tables 3-53. Methods of determining CDRs are well known in the art and are described herein. Payload regions may encode antibody variants with one or more heavy chain variable domain (V_{H}) or light chain variable domain (V_{L}) derived from the antibody sequences in Tables 3-53. In some cases, such variants may include bispecific antibodies. Bispecific antibodies encoded by payload regions of the disclosure may comprise variable domain pairs from two different antibodies.

[0367] In some embodiments, the viral particles may comprise a heavy and a light chain of an antibody described herein and two promoters. As a non-limiting example, the viral particles may comprise a nucleic acid sequence of a genome as described in FIG. 1 or FIG. 2 of US Patent Publication No. US20030219733, the contents of which are herein incorporated by reference in its entirety. As another non-limiting example, the viral particles may be a dual-promoter viral particle for antibody expression as described by Lewis et al. (J. of. Virology, September 2002, Vol. 76(17), p 8769-8775; the contents of which are herein incorporated by reference in its entirety).

Parkinson's Disease and Dementia with Lewy Bodies Antibodies

[0368] In some embodiments, the payload region of the viral particle comprises one or more nucleic acid sequences encoding one or more of the Parkinson's Disease and dementia with Lewy Bodies payload antibody polypeptides listed in Table 3 (PDLB1-PDLB437; SEQ ID NO: 3787-4223).

TABLE 3
Parkinson's Disease and Dementia with Lewy Bodies Antibodies

| Antibody No. | Target | Description | Antibody Name | Reference Information | SEQ ID NO |
|---|---|---|---|---|---|
| PDLB1 | amyloid proteins | consensus sequence | M13 g3p, fd g3p, fl g3p | US20150376239 | 3787 |
| | | | | SEQ ID NO: 4 | |
| PDLB2 | amyloid proteins | consensus sequence | I2-2 g3p, Ike g3p | US20150376239 | 3788 |
| | | | | SEQ ID NO: 7 | |
| PDLB3 | 118-126 of α- | constant region | IgG1 | US20150259404 | 3789 |
| | synuclein | | | SEQ ID NO: 38 | |
| PDLB4 | amyloid proteins | Fusion protein | M13 g3p | US20150376239 | 3790 |
| | | | | SEQ ID NO: 1 | |
| PDLB5 | amyloid proteins | Fusion protein | Construct 5 | US20150376239 | 3791 |
| | | | | SEQ ID NO: 11 | |
| PDLB6 | amyloid proteins | Fusion protein | Construct 6 | US20150376239 | 3792 |
| | | | | SEQ ID NO: 13 | |
| PDLB7 | amyloid proteins | Fusion protein | fd N2 | US20150376239 | 3793 |
| | | | | SEQ ID NO: 14 | |
| PDLB8 | amyloid proteins | Fusion protein | fl N2 | US20150376239 | 3794 |
| | | | | SEQ ID NO: 15 | |
| PDLB9 | amyloid proteins | Fusion protein | M13 N2 | US20150376239 | 3795 |
| | | | | SEQ ID NO: 16 | |
| PDLB10 | amyloid proteins | Fusion protein | Ike N2 | US20150376239 | 3796 |
| | | | | SEQ ID NO: 17 | |
| PDLB11 | amyloid proteins | Fusion protein | 12-2 N2 | US20150376239 | 3797 |
| | | | | SEQ ID NO: 18 | |
| PDLB12 | amyloid proteins | Fusion protein | If1 N2 | US20150376239 | 3798 |
| | | | | SEQ ID NO: 19 | |
| PDLB13 | amyloid proteins | Fusion protein | fd g3p | US20150376239 | 3799 |
| | | | | SEQ ID NO: 2 | |
| PDLB14 | amyloid proteins | Fusion protein | Construct 3 | US20150376239 | 3800 |
| | | | | SEQ ID NO: 20 | |
| PDLB15 | amyloid proteins | Fusion protein | Construct 3m g3p portion | US20150376239 | 3801 |
| | | | | SEQ ID NO: 24 | |
| PDLB16 | amyloid proteins | Fusion protein | If1 g3p | US20150376239 | 3802 |
| | | | | SEQ ID NO: 29 | |
| PDLB17 | amyloid proteins | Fusion protein | fl g3p | US20150376239 | 3803 |
| | | | | SEQ ID NO: 3 | |
| PDLB18 | amyloid proteins | Fusion protein | fd g3p | US20150376239 | 3804 |
| | | | | SEQ ID NO: 30 | |
| PDLB19 | amyloid proteins | Fusion protein | Construct 8, rs-g3p (If1- | US20150376239 | 3805 |
| | | | N1N2)-hlgG1-Fc | SEQ ID NO: 31 | |
| PDLB20 | amyloid proteins | Fusion protein | I2-2 g3p | US20150376239 | 3806 |
| | | | | SEQ ID NO: 5 | |
| PDLB21 | amyloid proteins | Fusion protein | Ike g3p | US20150376239 | 3807 |
| | | | | SEQ ID NO: 6 | |
| PDLB22 | amyloid proteins | Fusion protein | If1 g3p | US20150376239 | 3808 |
| | | | | SEQ ID NO: 8 | |
| PDLB23 | amyloid proteins | Fusion protein | Construct 4 | US20150376239 | 3809 |
| | | | | SEQ ID NO: 9 | |
| PDLB24 | 118-126 of α- | Heavy chain | 5ClH1 | US20150259404 | 3810 |
| | synuclein | | | SEQ ID NO: 14 | |
| PDLB25 | 118-126 of α- | Heavy chain | 5ClH2 | US20150259404 | 3811 |
| | synuclein | | | SEQ ID NO: 15 | |
| PDLB26 | 118-126 of α- | Heavy chain | 5ClH3 | US20150259404 | 3812 |
| | synuclein | | | SEQ ID NO: 16 | |
| PDLB27 | 118-126 of α- | Heavy chain | 5ClH4 | US20150259404 | 3813 |
| | synuclein | | | SEQ ID NO: 17 | |
| PDLB28 | 118-126 of α- | Heavy chain | 5ClH5 | US20150259404 | 3814 |
| | synuclein | | | SEQ ID NO: 18 | |
| PDLB29 | 118-126 of α- | Heavy chain | 5Cl | US20150259404 | 3815 |
| | synuclein | | | SEQ ID NO: 6 | |
| PDLB30 | ACTH | Heavy chain | Ab7 | WO2015127288 | 3816 |
| | | | | SEQ ID NO: 241 | |
| PDLB31 | ACTH | Heavy chain | Ab9 | WO2015127288 | 3817 |
| | | | | SEQ ID NO: 281 | |
| PDLB32 | ACTH | Heavy chain | Ab10 | WO2015127288 | 3818 |
| | | | | SEQ ID NO: 321 | |
| PDLB33 | ACTH | Heavy chain | Ab11 | WO2015127288 | 3819 |
| | | | | SEQ ID NO: 361 | |
| PDLB34 | ACTH | Heavy chain | Ab12 | WO2015127288 | 3820 |
| | | | | SEQ ID NO: 401 | |
| PDLB35 | ACTH | Heavy chain | Ab2 | WO2015127288 | 3821 |
| | | | | SEQ ID NO: 41 | |
| PDLB36 | ACTH | Heavy chain | Ab1.H | WO2015127288 | 3822 |
| | | | | SEQ ID NO: 441 | |
| PDLB37 | ACTH | Heavy chain | Ab2.H | WO2015127288 | 3823 |
| | | | | SEQ ID NO: 481 | |
| PDLB38 | ACTH | Heavy chain | Ab3.H | WO2015127288 | 3824 |
| | | | | SEQ ID NO: 521 | |
| PDLB39 | ACTH | Heavy chain | Ab4.H | WO2015127288 | 3825 |
| | | | | SEQ ID NO: 561 | |
| PDLB40 | ACTH | Heavy chain | Ab6.H | WO2015127288 | 3826 |
| | | | | SEQ ID NO: 601 | |
| PDLB41 | ACTH | Heavy chain | Ab7.H | WO2015127288 | 3827 |
| | | | | SEQ ID NO: 641 | |
| PDLB42 | ACTH | Heavy chain | Ab7A.H | WO2015127288 | 3828 |
| | | | | SEQ ID NO: 681 | |
| PDLB43 | ACTH | Heavy chain | Ab10.H | WO2015127288 | 3829 |
| | | | | SEQ ID NO: 721 | |
| PDLB44 | ACTH | Heavy chain | Ab11.H | WO2015127288 | 3830 |
| | | | | SEQ ID NO: 761 | |
| PDLB45 | ACTH | Heavy chain | Ab11A.H | WO2015127288 | 3831 |
| | | | | SEQ ID NO: 801 | |
| PDLB46 | ACTH | Heavy chain | Ab3 | WO2015127288 | 3832 |
| | | | | SEQ ID NO: 81 | |
| PDLB47 | ACTH | Heavy chain | Ab12.H | WO2015127288 | 3833 |
| | | | | SEQ ID NO: 841 | |
| PDLB48 | ACTH | Heavy chain | Ab4 | WO2015127288 | 3834 |
| | | | | SEQ ID NO: 121 | |
| PDLB49 | ACTH | Heavy chain | Ab5 | WO2015127288 | 3835 |
| | | | | SEQ ID NO: 161 | |
| PDLB50 | ACTH | Heavy chain | Ab6 | WO2015127288 | 3836 |
| | | | | SEQ ID NO: 201 | |
| PDLB51 | ACTH (Cushing's, | Heavy chain | Ab1 | WO2015127288 | 3837 |
| | PD, AD, anxiety | | | SEQ ID NO: 1 | |
| | disorders) | | | | |
| PDLB52 | alpha synuclein | Heavy chain | Hu1H7VHv1 | U.S. Pat. No. 8,790,644 | 3838 |
| | | | | SEQ ID NO: 19 | |
| PDLB53 | alpha synuclein | Heavy chain | Hu1H7VHv2 | U.S. Pat. No. 8,790,644 | 3839 |
| | | | | SEQ ID NO: 21 | |
| PDLB54 | alpha synuclein | Heavy chain | Hu1H7VHv3 | U.S. Pat. No. 8,790,644 | 3840 |
| | | | | SEQ ID NO: 23 | |
| PDLB55 | alpha synuclein | Heavy chain | Hu1H7VHv4 | U.S. Pat. No. 8,790,644 | 3841 |
| | | | | SEQ ID NO: 25 | |
| PDLB56 | alpha synuclein | Heavy chain | Hu1H7VHv5 | U.S. Pat. No. 8,790,644 | 3842 |
| | | | | SEQ ID NO: 27 | |
| PDLB57 | alpha synuclein | Heavy chain | Hu1H7VHv alternative | U.S. Pat. No. 8,790,644 | 3843 |
| | | | | SEQ ID NO: 44 | |
| PDLB58 | alpha synuclein | Heavy chain | Hu1H7VHv alternatives | U.S. Pat. No. 8,790,644 | 3844 |
| | | | | SEQ ID NO: 46 | |
| PDLB59 | alpha synuclein | Heavy chain | Humanized 5C 1H2 | WO2015075635 | 3845 |
| | | | | SEQ ID NO: 59 | |
| PDLB60 | alpha synuclein | Heavy chain | Humanized 5C 1H5 | WO2015075635 | 3846 |
| | | | | SEQ ID NO: 62 | |
| PDLB61 | alpha synuclein | Heavy chain | Hu1H7VH alternative | WO2015075635 | 3847 |
| | | | | SEQ ID NO: 121 | |
| PDLB62 | alpha synuclein | Heavy chain | Humanized 1 H7 heavy | WO2015075635 | 3848 |
| | | | chain version 3 (variable | SEQ ID NO: 126 | |
| | | | region + constant region) | | |
| PDLB63 | alpha synuclein | Heavy chain | Humanized 1H7 heavy | WO2015075635 | 3849 |
| | | | chain version 3 (variable | SEQ ID NO: 127 | |
| | | | region + constant region | | |
| | | | Gl m3 allotype) | | |
| PDLB64 | alpha synuclein | Heavy chain | Hu9E4VH alternative | WO2015075635 | 3850 |
| | | | | SEQ ID NO: 29 | |
| PDLB65 | alpha synuclein | Heavy chain | Humanized 9E4 heavy | WO2015075635 | 3851 |
| | | | chain version 3 (variable | SEQ ID NO: 34 | |
| | | | region + constant region) | | |
| PDLB66 | alpha synuclein | Heavy chain | Humanized 9E4 heavy | WO2015075635 | 3852 |
| | | | chain version 3 (variable | SEQ ID NO: 36 | |
| | | | region + constant region) | | |
| PDLB67 | alpha synuclein | Heavy chain | Humanized 9E4 heavy | WO2015075635 | 3853 |
| | | | chain version 3 (variable | SEQ ID NO: 37 | |
| | | | region + alternative | | |
| | | | constant region Glm3 | | |
| | | | allotype) | | |
| PDLB68 | alpha synuclein | Heavy chain | Humanized 5C 1 H1 | WO2015075635 | 3854 |
| | | | | SEQ ID NO: 58 | |
| PDLB69 | alpha synuclein | Heavy chain | Humanized 5C 1H3 | WO2015075635 | 3855 |
| | | | | SEQ ID NO: 60 | |
| PDLB70 | alpha synuclein | Heavy chain | Humanized 5C 1H4 | WO2015075635 | 3856 |
| | | | | SEQ ID NO: 61 | |
| PDLB71 | amyloids | Heavy chain | #118 | WO2010012004 | 3857 |
| | | | | SEQ ID NO: 11 | |
| PDLB72 | amyloids | Heavy chain | #121 | WO2010012004 | 3858 |
| | | | | SEQ ID NO: 13 | |
| PDLB73 | amyloids | Heavy chain | #204 | WO2010012004 | 3859 |
| | | | | SEQ ID NO: 16 | |
| PDLB74 | amyloids | Heavy chain | #205 | WO2010012004 | 3860 |
| | | | | SEQ ID NO: 18 | |
| PDLB75 | EAG1 | Heavy chain | chimeric ImAb3 | WO2006037604 | 3861 |
| | | | | SEQ ID NO: 12 | |
| PDLB76 | EAG1 | Heavy chain | chimeric ImAb4 | WO2006037604 | 3862 |
| | | | | SEQ ID NO: 16 | |
| PDLB77 | EAG1 | Heavy chain | HC-lmAb3-humVH3-72 | WO2006037604 | 3863 |
| | | | | SEQ ID NO: 20 | |
| PDLB78 | EAG1 | Heavy chain | HC-lmAb4-humVH4-59 | WO2006037604 | 3864 |
| | | | | SEQ ID NO: 24 | |
| PDLB79 | EAG1 | Heavy chain | HC-lmAb3-humVH3 23 | WO2006037604 | 3865 |
| | | | | SEQ ID NO: 28 | |
| PDLB80 | EAG1 | Heavy chain | HC-lmAb3-humVH2 26 | WO2006037604 | 3866 |
| | | | | SEQ ID NO: 32 | |
| PDLB81 | EAG1 | Heavy chain | HC-lmAb4-humVH1-3 | WO2006037604 | 3867 |
| | | | | SEQ ID NO: 36 | |
| PDLB82 | EAG1 | Heavy chain | ImAb4 | WO2006037604 | 3868 |
| | | | | SEQ ID NO: 4 | |
| PDLB83 | EAG1 | Heavy chain | ImAb3 | WO2006037604 | 3869 |
| | | | | SEQ ID NO: 8 | |
| PDLB84 | NOGO | Heavy chain | H6L13 FL | US20140147435 | 3870 |
| | | | | SEQ ID NO: 27 | |
| PDLB85 | NOGO | Heavy chain | H16L16 FL, H16L18 FL | US20140147435 | 387 |
| | | | | SEQ ID NO: 31 | |
| PDLB86 | NOGO | Heavy chain | H18L16 FL | US20140147435 | 3872 |
| | | | | SEQ ID NO: 33 | |
| PDLB87 | NOGO | Heavy chain | H19L13 FL, H19L16 FL, | US20140147435 | 3873 |
| | | | H19L18 FL | SEQ ID NO: 92 | |
| PDLB88 | NOGO | Heavy chain | H20L13 FL, H20L16 FL, | US20140147435 | 3874 |
| | | | H20L18 FL | SEQ ID NO: 93 | |
| PDLB89 | NOGO | Heavy chain | H21L13 FL, H21L16 FL, | US20140147435 | 3875 |
| | | | H21L18 FL | SEQ ID NO: 94 | |
| PDLB90 | NOGO | Heavy chain | H25L13 FL, H25L16 FL, | US20140147435 | 3876 |
| | | | H25L18 FL | SEQ ID NO: 98 | |
| PDLB91 | Nogo receptor-1 | Heavy chain | 5B10 | US20090215691 | 3877 |
| | | | | SEQ ID NO: 16 | |
| PDLB92 | Nogo receptor-1 | Heavy chain | 5B10 | US20090215691 | 3878 |
| | | | | SEQ ID NO: 18 | |
| PDLB93 | trk-C (NT-3 trkC | Heavy chain | 2250 | U.S. Pat. No. 7,615,383 | 3879 |
| | ligand) | | | SEQ ID NO: 42 | |
| PDLB94 | trk-C (NT-3 trkC | Heavy chain | 2253 | U.S. Pat. No. 7,615,383 | 3880 |
| | ligand) | | | SEQ ID NO: 43 | |
| PDLB95 | trk-C (NT-3 trkC | Heavy chain | 2256 | U.S. Pat. No. 7,615,383 | 3881 |
| | ligand) | | | SEQ ID NO: 44 | |
| PDLB96 | trk-C (NT-3 trkC | Heavy chain | 6.1.2 | U.S. Pat. No. 7,615,383 | 3882 |
| | ligand) | | | SEQ ID NO: 45 | |
| PDLB97 | trk-C (NT-3 trkC | Heavy chain | 6.4.1 | U.S. Pat. No. 7,615,383 | 3883 |
| | ligand) | | | SEQ ID NO: 46 | |
| PDLB98 | trk-C (NT-3 trkC | Heavy chain | 2345 | U.S. Pat. No. 7,615,383 | 3884 |
| | ligand) | | | SEQ ID NO: 47 | |
| PDLB99 | trk-C (NT-3 trkC | Heavy chain | 2349 | U.S. Pat. No. 7,615,383 | 3885 |
| | ligand) | | | SEQ ID NO: 48 | |
| PDLB100 | alpha synuclein | Heavy chain | Hu9E4VH consensus | U.S. Pat. No. 8,609,820 | 3886 |
| | | consensus chain | amino acid sequence | SEQ ID NO: 27 | |
| PDLB101 | alpha synuclein | Heavy chain | m9E4VH | WO2015075635 | 3887 |
| | | consensus chain | | SEQ ID NO: 6 | |
| PDLB102 | alpha synuclein | Heavy chain | Humanized 1H7 heavy | WO2015075635 | 3888 |
| | | constant region | chain constant region | SEQ ID NO: 128 | |
| | | | (IgG2) | | |
| PDLB103 | alpha synuclein | Heavy chain | Humanized 1H7 heavy | WO2015075635 | 3889 |
| | | constant region | chain constant region | SEQ ID NO: 129 | |
| | | | (Glm1 allotype) | | |
| PDLB104 | alpha synuclein | Heavy chain | Humanized 9E4 heavy | WO2015075635 | 3890 |
| | | constant region | chain constant region | SEQ ID NO: 35 | |
| | | | (Glm3 allotype: BIP | | |
| | | | version) | | |
| PDLB105 | alpha synuclein | Heavy chain | Hu1H7 | U.S. Pat. No. 8,790,644 | 3891 |
| | | constant region | | SEQ ID NO: 58 | |
| | | (G1m1 allotype) | | | |
| PDLB106 | alpha syrinclein | Heavy chain | Hu1H7 | U.S. Pat. No. 8,790,644 | 3892 |
| | | constant region | | SEQ ID NO: 52 | |
| | | G1m3 allotype) | | | |
| PDLB107 | alpha synuclein | Heavy chain | Hu1H7 | U.S. Pat. No. 8,790,644 | 3893 |
| | | constant region | | SEQ ID NO: 50 | |
| | | (IgG1; common for | | | |
| | | v1-v5) | | | |
| PDLB108 | alpha synuclein | Heavy chain | Hu1H7 | U.S. Pat. No. 8,790,644 | 3894 |
| | | constant region | | SEQ ID NO: 57 | |
| | | (IgG2) | | | |
| PDLB109 | many - growth | Heavy chain fusion | H19L13, H19L16, | U.S. Pat. No. 8,053,569 | 3895 |
| | factors (to | protein | H19L18, H19L14, | SEQ ID NO: 25 | |
| | increase transport | | H19L15, H19L17, H19L6, | | |
| | across BBB) | | H19L11 | | |
| PDLB110 | many - growth | Heavy chain fusion | H20L13, H20L16, | U.S. Pat. No. 8,053,569 | 3896 |
| | factors (to | protein | H20L18, H20L14, | SEQ ID NO: 28 | |
| | increase transport | | H20L15, H20L17, H2016, | | |
| | across BBB) | | H20L11 | | |
| PDLB111 | many - growth | Heavy chain fusion | H22L13, H22L16, | U.S. Pat. No. 8,053,569 | 3897 |
| | factors (to | protein | H22L18, H22L14, | SEQ ID NO: 34 | |
| | increase transport | | H22L15, H22L17, H22L6, | | |
| | across BBB) | | H22L11 | | |
| PDLB112 | many - growth | Heavy chain fusion | H5L11, H6L11, H14L11, | U.S. Pat. No. 8,053,569 | 3898 |
| | factors (to | protein | H15L11, H16L11, | SEQ ID NO: 24 | |
| | increase transport | | H17L11, H18L11, | | |
| | across BRB) | | H19L11, H20L11, | | |
| | | | H21L11, H22L11, | | |
| | | | H23L11, H24L11, | | |
| | | | H25L11, H700L11 | | |
| PDLB113 | NOGO | Heavy chain | 2A10 construct | WO2007003421 | 3899 |
| | | humanized construct | | SEQ ID NO: 79 | |
| | | H1 | | | |
| PDLB114 | NOGO | Heavy chain | 2A10 construct | WO2007003421 | 3900 |
| | | humanized construct | | SEQ ID NO: 29 | |
| | | H14 | | | |
| PDLB115 | NOGO | Heavy chain | 2A10 construct | WO2007003421 | 3901 |
| | | humanized construct | | SEQ ID NO: 30 | |
| | | H15 | | | |
| PDLB116 | NOGO | Heavy chain | 2A10 construct | WO2007003421 | 3902 |
| | | humanized construct | | SEQ ID NO: 31 | |
| | | H16 | | | |
| PDLB117 | NOGO | Heavy chain | 2A10 construct | WO2007003421 | 3903 |
| | | humanized construct | | SEQ ID NO: 32 | |
| | | H17 | | | |
| PDLB118 | NOGO | Heavy chain | 2A10 construct | WO2007003421 | 3904 |
| | | humanized construct | | SEQ ID NO: 33 | |
| | | H18 | | | |
| PDLB119 | NOGO | Heavy chain | 2A10 construct | WO2007003421 | 3905 |
| | | humanized construct | | SEQ ID NO: 92 | |
| | | H19 | | | |
| PDLB120 | NOGO | Heavy chain | 2A10 construct | WO2007003421 | 3906 |
| | | humanized construct | | SEQ ID NO: 93 | |
| | | H20 | | | |
| PDLB121 | NOGO | Heavy chain | 2A10 construct | WO2007003421 | 3907 |
| | | humanized construct | | SEQ ID NO: 94 | |
| | | H21 | | | |
| PDLB122 | NOGO | Heavy chain | 2A10 construct | WO2007003421 | 3908 |
| | | humanized construct | | SEQ ID NO: 95 | |
| | | H22 | | | |
| PDLB123 | NOGO | Heavy chain | 2A10 construct | WO2007003421 | 3909 |
| | | humanized construct | | SEQ ID NO: 96 | |
| | | H23 | | | |
| PDLB124 | NOGO | Heavy chain | 2A10 construct | WO2007003421 | 3910 |
| | | humanized construct | | SEQ ID NO: 97 | |
| | | H24 | | | |
| PDLB125 | NOGO | Heavy chain | 2A10 construct | WO2007003421 | 3911 |
| | | humanized construct | | SEQ ID NO: 98 | |
| | | H25 | | | |
| PDLB126 | NOGO | Heavy chain | 2A10 construct | WO2007003421 | 3912 |
| | | humanized construct | | SEQ ID NO: 26 | |
| | | H5 | | | |
| PDLB127 | NOGO | Heavy chain | 2A10 construct | WO2007003421 | 3913 |
| | | humanized construct | | SEQ ID NO: 27 | |
| | | H6 | | | |
| PDLB128 | NOGO | Heavy chain | 2A10 construct | WO2007003421 | 3914 |
| | | humanized construct | | SEQ ID NO: 28 | |
| | | H700 | | | |
| PDLB129 | RTN4 (NOGO) | Heavy chain IgG4, | Atinumab | U.S. Pat. No. 8,163,285 | 3915 |
| | | immunomodulator | | SEQ ID NO: 24 | |
| PDLB130 | alpha synuclein | Heavy chain | NI-202.12F4-VHA1b-GL | US20150232542 | 3916 |
| | | variable region | | SEQ ID NO: 10 | |
| PDLB131 | alpha synuclein | Heavy chain | NI-202.3D8-VHE1 | US20150232542 | 3917 |
| | | variable region | | SEQ ID NO: 15 | |
| PDLB132 | alpha synuclein | Heavy chain | NI-202.3D8-VHE1-GL | US20150232542 | 3918 |
| | | variable region | | SEQ ID NO: 16 | |
| PDLB133 | alpha synuclein | Heavy chain | NI-202.3G12-VHB1 | US20150232542 | 3919 |
| | | variable region | | SEQ ID NO: 3 | |
| PDLB134 | alpha synuclein | Heavy chain | NI-202.3G12-VHB1-GL | US20150232542 | 3920 |
| | | variable region | | SEQ ID NO: 4 | |
| PDLB135 | alpha synuclein | Heavy chain | NI-202.12F4-VHA1b | US20150232542 | 3921 |
| | | variable region | | SEQ ID NO: 9 | |
| PDLB136 | alpha synuclein | Heavy chain | Hu9E4VHv3 variable | U.S. Pat. No. 8,609,820 | 3922 |
| | | variable region | region | SEQ ID NO: 10 | |
| PDLB137 | alpha synuclein | Heavy chain | Hu9E4VHv4 variable | U.S. Pat. No. 8,609,820 | 3923 |
| | | variable region | region | SEQ ID NO: 11 | |
| PDLB138 | alpha synuclein | Heavy chain | Hu9E4VLv3 variable | U.S. Pat. No. 8,609,820 | 3924 |
| | | variable region | region | SEQ ID NO: 5 | |
| PDLB139 | alpha synuclein | Heavy chain | m9E4VH variable region | U.S. Pat. No. 8,609,820 | 3925 |
| | | variable region | | SEQ ID NO: 6 | |
| PDLB140 | alpha synuclein | Heavy chain | 1791009Hu9E4VHFr | U.S. Pat. No. 8,609,820 | 3926 |
| | | variable region | variable region | SEQ ID NO: 7 | |
| PDLB141 | alpha synuclein | Heavy chain | Hu9E4VHv1 variable | U.S. Pat. No. 8,609,820 | 3927 |
| | | variable region | region | SEQ ID NO: 8 | |
| PDLB142 | alpha synuclein | Heavy chain | Hu9E4VHv2 variable | U.S. Pat. No. 8,609,820 | 3928 |
| | | variable region | region | SEQ ID NO: 9 | |
| PDLB143 | alpha synuclein | Heavy chain | m1H7 | U.S. Pat. No. 8,790,644 | 3929 |
| | | variable region | | SEQ ID NO: 5 | |
| PDLB144 | alpha synuclein | Heavy chain | mature m1H7 | U.S. Pat. No. 8,790,644 | 3930 |
| | | variable region | | SEQ ID NO: 9 | |
| PDLB145 | alpha synuclein | Heavy chain | Hu9E4VHv 3 | WO2015075635 | 3931 |
| | | variable region | | SEQ ID NO: 10 | |
| PDLB146 | alpha synuclein | Heavy chain | Hu1H7VHv4 | WO2015075635 | 3932 |
| | | variable region | | SEQ ID NO: 101 | |
| PDLB147 | alpha synuclein | Heavy chain | Hu9E4VHv4 (no back | WO2015075635 | 3933 |
| | | variable region | mutation) | SEQ ID NO: 11 | |
| PDLB148 | alpha synuclein | Heavy chain | Hu1H7VHv5 | WO2015075635 | 3934 |
| | | variable region | | SEQ ID NO: 103 | |
| PDLB149 | alpha synuclein | Heavy chain | 63 102889Hu9E4VLFr | WO2015075635 | 3935 |
| | | variable region | | SEQ ID NO: 2 | |
| PDLB150 | alpha synuclein | Heavy chain | m5C1 antibody heavy | WO2015075635 | 3936 |
| | | variable region | chain variable region | SEQ ID NO: 39 | |
| | | | amino acid sequence | | |
| PDLB151 | alpha synuclein | Heavy chain | i 791009Hu9E4VHFr | WO2015075635 | 3937 |
| | | variable region | | SEQ ID NO: 7 | |
| PDLB152 | alpha synuclein | Heavy chain | Hu9E4VHv 1 | WO2015075635 | 3938 |
| | | variable region | | SEQ ID NO: 8 | |
| PDLB153 | alpha synuclein | Heavy chain | mlH7 | WO2015075635 | 3939 |
| | | variable region | | SEQ ID NO: 81 | |
| PDLB154 | alpha synuclein | Heavy chain | mature mlH7 | WO2015075635 | 3940 |
| | | variable region | | SEQ ID NO: 85 | |
| PDLB155 | alpha synuclein | Heavy chain | Hu9E4VHv 2 | WO2015075635 | 3941 |
| | | variable region | | SEQ ID NO: 9 | |
| PDLB156 | alpha synuclein | Heavy chain | Hu lH7VHv1 | WO2015075635 | 3942 |
| | | variable region | | SEQ ID NO: 95 | |
| PDLB157 | alpha synuclein | Heavy chain | Hu1H7VHv2 | WO2015075635 | 3943 |
| | | variable region | | SEQ ID NO: 97 | |
| PDLB158 | alpha synuclein | Heavy chain | Hu1H7VHv3 | WO2015075635 | 3944 |
| | | variable region | | SEQ ID NO: 99 | |
| PDLB159 | alpha synuclein | Heavy chain | BA1: 49/G | WO2011104696 | 3945 |
| | protofibrils | variable region | | SEQ ID NO: 56 | |
| PDLB160 | alpha synuclein | Heavy chain | BA1: 49/G | WO2011104696 | 3946 |
| | protofibrils | variable region | | SEQ ID NO: 57 | |
| PDLB161 | alpha synuclein | Heavy chain | BA2: 38E2/7 | WO2011104696 | 3947 |
| | protofibrils | variable region | | SEQ ID NO: 58 | |
| PDLB162 | alpha synuclein | Heavy chain | BA2: 38E2/7 | WO2011104696 | 3948 |
| | protofibrils | variable region | | SEQ ID NO: 59 | |
| PDLB163 | amyloid | Heavy chain | F11G3 | U.S. Pat. No. 9,125,846 | 3949 |
| | oligomers | variable region | | SEQ ID NO: 11 | |
| PDLB164 | DR6 and P75 | Heavy chain | M66-B03 | WO2010062904 | 3950 |
| | | variable region | | SEQ ID NO: 67 | |
| PDLB165 | DR6 and P75 | Heavy chain | M50-H01 | WO2010062904 | 3951 |
| | | variable region | | SEQ ID NO: 7 | |
| PDLB166 | DR6 and P75 | Heavy chain | M67-G02 | WO2010062904 | 3952 |
| | | variable region | | SEQ ID NO: 77 | |
| PDLB167 | DR6 and P75 | Heavy chain | M72-F03 | WO2010062904 | 3953 |
| | | variable region | | SEQ ID NO: 87 | |
| PDLB168 | DR6 and P75 | Heavy chain | M73-C04 | WO2010062904 | 3954 |
| | | variable region | | SEQ ID NO: 97 | |
| PDLB169 | DR6 and P75 | Heavy chain | 1P1D6.3 | WO2010062904 | 3955 |
| | | variable region | | SEQ ID NO: 107 | |
| PDLB170 | DR6 and P75 | Heavy chain | 1P2F2.1 | WO2010062904 | 3956 |
| | | variable region | | SEQ ID NO: 117 | |
| PDLB171 | DR6 and P75 | Heavy chain | 1P5D10.2 | WO2010062904 | 3957 |
| | | variable region | | SEQ ID NO: 127 | |
| PDLB172 | DR6 and P75 | Heavy chain | M51-H09 | WO2010062904 | 3958 |
| | | variable region | | SEQ ID NO: 17 | |
| PDLB173 | DR6 and P75 | Heavy chain | M53-E04 | WO2010062904 | 3959 |
| | | variable region | | SEQ ID NO: 27 | |
| PDLB174 | DR6 and P75 | Heavy chain | M53-F04 | WO2010062904 | 3960 |
| | | variable region | | SEQ ID NO: 37 | |
| PDLB175 | DR6 and P75 | Heavy chain | M62-B02 | WO2010062904 | 3961 |
| | | variable region | | SEQ ID NO: 47 | |
| PDLB176 | DR6 and P75 | Heavy chain | M63-E10 | WO2010062904 | 3962 |
| | | variable region | | SEQ ID NO: 57 | |
| PDLB177 | LPG | Heavy chain | #7 | U.S. Pat. No. 8,591,902 | 3963 |
| | (lysophosphatidyl | variable region | | SEQ ID NO: 18 | |
| | glucoside) | | | | |
| PDLB178 | LPG | Heavy chain | #15 | U.S. Pat. No. 8,591,902 | 3964 |
| | (lysophosphatidyl | variable region | | SEQ ID NO: 8 | |
| | glucoside) | | | | |
| PDLB179 | MAG | Heavy chain | | U.S. Pat. No. 8,071,731 | 3965 |
| | | variable region | | SEQ ID NO: 13 | |
| PDLB180 | MAG | Heavy chain | | U.S. Pat. No. 8,071,731 | 3966 |
| | | variable region | | SEQ ID NO: 14 | |
| PDLB181 | MAG | Heavy chain | | U.S. Pat. No. 8,071,731 | 3967 |
| | | variable region | | SEQ ID NO: 15 | |
| PDLB182 | MAI (myelin | Heavy chain | | WO2013158748 | 3968 |
| | associated | variable region | | SEQ ID NO: 1 | |
| | inhibitor) | | | | |
| PDLB183 | MAI (myelin | Heavy chain | | WO2013158748 | 3969 |
| | associated | variable region | | SEQ ID NO: 17 | |
| | inhibitor) | | | | |
| PDLB184 | NMDA | Heavy chain | | EP2805972 | 3970 |
| | | variable region | | SEQ ID NO: 43 | |
| PDLB185 | NOGO | Heavy chain | H5L13, H5L16, H5L18, | US20140147435 | 3971 |
| | | variable region | H5L14, H5L15, H5L17, | SEQ ID NO: 11 | |
| | | | H5L6, H5L11 | | |
| PDLB186 | NOGO | Heavy chain | H6L13, H6L16, H6L18, | US20140147435 | 3972 |
| | | variable region | H6L14, H6L15, H6L17, | SEQ ID NO: 12 | |
| | | | H6L6 | | |
| PDLB187 | NOGO | Heavy chain | H700L13, H700L16, | US20140147435 | 3973 |
| | | variable region | H700L18, H700L14, | SEQ ID NO: 13 | |
| | | | H700L15, H700L17, | | |
| | | | H700L6, H700L11 | | |
| PDLB188 | NOGO | Heavy chain | H14L13, H14L16, | US20140147435 | 3974 |
| | | variable region | H14L18, H14L14, | SEQ ID NO: 14 | |
| | | | H14L15, H14L17, H14L6, | | |
| | | | H14L11 | | |
| PDLB189 | NOGO | Heavy chain | H15L13, H15L16, | US20140147435 | 3975 |
| | | variable region | H15L18, H15L14, | SEQ ID NO: 15 | |
| | | | H15L15, H15L17, H15L6, | | |
| | | | H15L11 | | |
| PDLB190 | NOGO | Heavy chain | H16L13, H16L16, | US20140147435 | 3976 |
| | | variable region | H16L18, H16L14, | SEQ ID NO: 16 | |
| | | | H16L15, H16L17, H16L6, | | |
| | | | H16L11 | | |
| PDLB191 | NOGO | Heavy chain | H17L13, H17L16, | US20140147435 | 3977 |
| | | variable region | H17L18, H17L14, | SEQ ID NO: 17 | |
| | | | H17L15, H17L17, H17L6, | | |
| | | | H17L11 | | |
| PDLB192 | NOGO | Heavy chain | H18L13, H18L16, | US20140147435 | 3978 |
| | | variable region | H18L18, H18L14, | SEQ ID NO: 18 | |
| | | | H18L15, H18L17, H18L6, | | |
| | | | H18L11 | | |
| PDLB193 | NOGO | Heavy chain | H1L13, H1L16, H1L18, | US20140147435 | 3979 |
| | | variable region | H1L14, H1L15, H1L17, | SEQ ID NO: 77 | |
| | | | H1L6 | | |
| PDLB194 | NOGO | Heavy chain | H19L13, H19L16, | US20140147435 | 3980 |
| | | variable region | H19L18, H19L4, | SEQ ID NO: 85 | |
| | | | H19L15, H19L17, H19L6, | | |
| | | | H19L11 | | |
| PDLB195 | NOGO | Heavy chain | H20L13, H20L16, | US20140147435 | 3981 |
| | | variable region | H20L18, H20L14, | SEQ ID NO: 86 | |
| | | | H20L15, H20L17, H20L6, | | |
| | | | H20L11 | | |
| PDLB196 | NOGO | Heavy chain | H21L13, H21L16, | US20140147435 | 3982 |
| | | variable region | H21L18, H21L14, | SEQ ID NO: 87 | |
| | | | H21L15, H21L17, H21L6, | | |
| | | | H21L11 | | |
| PDLB197 | NOGO | Heavy chain | H22L13, H22L16, | US20140147435 | 3983 |
| | | variable region | H22L18, H22L14, | SEQ ID NO: 88 | |
| | | | H22L15, H22L17, H22L6, | | |
| | | | H22L11 | | |
| PDLB198 | NOGO | Heavy chain | H23L13, H23L16, | US20140147435 | 3984 |
| | | variable region | H23L18, H23L14, | SEQ ID NO: 89 | |
| | | | H23L15, H23L17, H23L6, | | |
| | | | H23L11 | | |
| PDLB199 | NOGO | Heavy chain | H24L13, H24L16, | US20140147435 | 3985 |
| | | variable region | H24L18, H24L14, | SEQ ID NO: 90 | |
| | | | H24L15, H24L17, H24L6, | | |
| | | | H24L11 | | |
| PDLB200 | NOGO | Heavy chain | H25L13, H25L16, | US20140147435 | 3986 |
| | | variable region | H25L18, H25L14, | SEQ ID NO: 91 | |
| | | | H25L15, H25L17, H25L6, | | |
| | | | H25L11 | | |
| PDLB201 | Nogo-66 | Heavy chain | Antibody clone 50 | US20140065155 | 3987 |
| | | variable region | | SEQ ID NO: 3 | |
| PDLB202 | Nogo-66 | Heavy chain | Antibody clone 51 | US20140065155 | 3988 |
| | | variable region | | SEQ ID NO: 5 | |
| PDLB203 | NogoA/NiG | Heavy chain | 6A3-Ig4 | WO2009056509 | 3989 |
| | | variable region | | SEQ ID NO: 24 | |
| PDLB204 | NogoA/NiG | Heavy chain | 6A3-IgG1 | WO2009056509 | 3990 |
| | | variable region | | SEQ ID NO: 4 | |
| PDLB205 | RGM A | Heavy chain | 5F9.1-GL | US20150183871 | 3991 |
| | | variable region | | SEQ ID NO: 35 | |
| PDLB206 | RGM A | Heavy chain | 5F9.2-GL | US20150183871 | 3992 |
| | | variable region | | SEQ ID NO: 36 | |
| PDLB207 | RGM A | Heavy chain | 5F9.3-GL | US20150183871 | 3993 |
| | | variable region | | SEQ ID NO: 37 | |
| PDLB208 | RGM A | Heavy chain | 5F9.4-GL | US20150183871 | 3994 |
| | | variable region | | SEQ ID NO: 38 | |
| PDLB209 | RGM A | Heavy chain | 5F9.5-GL | US20150183871 | 3995 |
| | | variable region | | SEQ ID NO: 39 | |
| PDLB210 | RGM A | Heavy chain | 5F9.6-GL | US20150183871 | 3996 |
| | | variable region | | SEQ ID NO: 40 | |
| PDLB211 | RGM A | Heavy chain | 5F9.7-GL | US20150183871 | 3997 |
| | | variable region | | SEQ ID NO: 41 | |
| PDLB212 | RGM A | Heavy chain | 5F9.8-GL | US20150183871 | 3998 |
| | | variable region | | SEQ ID NO: 42 | |
| PDLB213 | RGM A | Heavy chain | 5F9.9-GL | US20150183871 | 3999 |
| | | variable region | | SEQ ID NO: 43 | |
| PDLB214 | RGM A | Heavy chain | h5F9.1, h5F9.1, h5F9.1, | US20150183871 | 4000 |
| | | variable region | h5F9.1, h5F9.1, h5F9.2, | SEQ ID NO: 47 | |
| | | | h5F9.3 | | |
| PDLB215 | RGM A | Heavy chain | h5F9.3, h5F9.9, h5F9.25 | US20150183871 | 4001 |
| | | variable region | | SEQ ID NO: 53 | |
| PDLB216 | RGM A | Heavy chain | h5F9.4, h5F9.10, h5F9.26 | US20150183871 | 4002 |
| | | variable region | | SEQ ID NO: 54 | |
| PDLB217 | RGMa | Heavy chain | AE12-1 | US20140023659 | 4003 |
| | | variable region | | SEQ ID NO: 1 | |
| PDLB218 | RGMa | Heavy chain | AE12-20 | US20140023659 | 4004 |
| | | variable region | | SEQ ID NO: 107 | |
| PDLB219 | RGMa | Heavy chain | AE12-21 | US20140023659 | 4005 |
| | | variable region | | SEQ ID NO: 115 | |
| PDLB220 | RGMa | Heavy chain | AE12-23 | US20140023659 | 4006 |
| | | variable region | | SEQ ID NO: 123 | |
| PDLB221 | RGMa | Heavy chain | AE12-24 | US20140023659 | 4007 |
| | | variable region | | SEQ ID NO: 131 | |
| PDLB222 | RGMa | Heavy chain | AE12-3 | US20140023659 | 4008 |
| | | variable region | | SEQ ID NO: 17 | |
| PDLB223 | RGMa | Heavy chain | AE12-4 | US20140023659 | 4009 |
| | | variable region | | SEQ ID NO: 25 | |
| PDLB224 | RGMa | Heavy chain | AE12-5 | US20140023659 | 4010 |
| | | variable region | | SEQ ID NO: 33 | |
| PDLB225 | RGMa | Heavy chain | AE12-6 | US20140023659 | 4011 |
| | | variable region | | SEQ ID NO: 41 | |
| PDLB226 | RGMa | Heavy chain | AE12-7 | US20140023659 | 4012 |
| | | variable region | | SEQ ID NO: 49 | |
| PDLB227 | RGMa | Heavy chain | AE12-8 | US20140023659 | 4013 |
| | | variable region | | SEQ ID NO: 57 | |
| PDLB228 | RGMa | Heavy chain | AE12-2 | US20140023659 | 4014 |
| | | variable region | | SEQ ID NO: 9 | |
| PDLB229 | RGMa | Heavy chain | AE12-13 | US20140023659 | 4015 |
| | | variable region | | SEQ ID NO: 91 | |
| PDLB230 | RGMa | Heavy chain | AE12-15 | US20140023659 | 4016 |
| | | variable region | | SEQ ID NO: 99 | |
| PDLB231 | α-synuclein | Heavy chain | Syn-01 | WO2014132210 | 4017 |
| | aggregates | variable region | | SEQ ID NO: 10 | |
| PDLB232 | α-synuclein | Heavy chain | Syn-F1 | WO2014132210 | 4018 |
| | aggregates | variable region | | SEQ ID NO: 2 | |
| PDLB233 | α-synuclein | Heavy chain | Syn-F2 | WO2014132210 | 4019 |
| | aggregates | variable region | | SEQ ID NO: 6 | |
| PDLB234 | NOGO | Heavy chain | 2A10 construct | WO2007003421 | 4020 |
| | | variable region | | SEQ ID NO: 77 | |
| | | humanized construct | | | |
| | | H1 | | | |
| PDLB235 | NOGO | Heavy chain | 2A10 construct | WO2007003421 | 4021 |
| | | variable region | | SEQ ID NO: 14 | |
| | | humanized construct | | | |
| | | H14 | | | |
| PDLB236 | NOGO | Heavy chain | 2A10 construct | WO2007003421 | 4022 |
| | | variable region | | SEQ ID NO: 15 | |
| | | humanized construct | | | |
| | | H15 | | | |
| PDLB237 | NOGO | Heavy chain | 2A10 construct | WO2007003421 | 4023 |
| | | variable region | | SEQ ID NO: 16 | |
| | | humanized construct | | | |
| | | H16 | | | |
| PDLB238 | NOGO | Heavy chain | 2A10 construct | WO2007003421 | 4024 |
| | | variable region | | SEQ ID NO: 17 | |
| | | humanized construct | | | |
| | | H17 | | | |
| PDLB239 | NOGO | Heavy chain | 2A10 construct | WO2007003421 | 4025 |
| | | variable region | | SEQ ID NO: 18 | |
| | | humanized construct | | | |
| | | H18 | | | |
| PDLB240 | NOGO | Heavy chain | 2A10 construct | WO2007003421 | 4026 |
| | | variable region | | SEQ ID NO: 85 | |
| | | humanized construct | | | |
| | | H19 | | | |
| PDLB241 | NOGO | Heavy chain | 2A10 construct | WO2007003421 | 4027 |
| | | variable region | | SEQ ID NO: 86 | |
| | | humanized construct | | | |
| | | H20 | | | |
| PDLB242 | NOGO | Heavy chain | 2A10 construct | WO2007003421 | 4028 |
| | | variable region | | SEQ ID NO: 87 | |
| | | humanized construct | | | |
| | | H21 | | | |
| PDLB243 | NOGO | Heavy chain | 2A10 construct | WO2007003421 | 4029 |
| | | variable region | | SEQ ID NO: 88 | |
| | | humanized construct | | | |
| | | H22 | | | |
| PDLB244 | NOGO | Heavy chain | 2A10 construct | WO2007003421 | 4030 |
| | | variable region | | SEQ ID NO: 89 | |
| | | humanized construct | | | |
| | | H23 | | | |
| PDLB245 | NOGO | Heavy chain | 2A10 construct | WO2007003421 | 4031 |
| | | variable region | | SEQ ID NO: 90 | |
| | | humanized construct | | | |
| | | H24 | | | |
| PDLB246 | NOGO | Heavy chain | 2A10 construct | WO2007003421 | 4032 |
| | | variable region | | SEQ ID NO: 91 | |
| | | humanized construct | | | |
| | | H25 | | | |
| PDLB247 | NOGO | Heavy chain | 2A10 construct | WO2007003421 | 4033 |
| | | variable region | | SEQ ID NO: 11 | |
| | | humanized construct | | | |
| | | H5 | | | |
| PDLB248 | NOGO | Heavy chain | 2A10 construct | WO2007003421 | 4034 |
| | | variable region | | SEQ ID NO: 12 | |
| | | humanized construct | | | |
| | | H6 | | | |
| PDLB249 | NOGO | Heavy chain | 2A10 construct | WO2007003421 | 4035 |
| | | variable region | | SEQ ID NO: 13 | |
| | | humanized construct | | | |
| | | H700 | | | |
| PDLB250 | alpha synuclein | Heavy chain version | Hu1H7 | U.S. Pat. No. 8,790,644 | 4036 |
| | | 3 (variable | | SEQ ID NO: 55 | |
| | | region + constant | | | |
| | | region) | | | |
| PDLB251 | alpha synuclein | Heavy chain version | Hu1H7 | U.S. Pat. No. 8,790,644 | 4037 |
| | | 3 (variable | | SEQ ID NO: 56 | |
| | | region + constant | | | |
| | | region; G1m3 | | | |
| | | allotype) | | | |
| PDLB252 | 118-126 of α- | Light chain | 5ClL1 | US20150259404 | 4038 |
| | synuclein | | | SEQ ID NO: 29 | |
| PDLB253 | 118-126 of α- | Light chain | 5ClL2 | US20150259404 | 4039 |
| | synuclein | | | SEQ ID NO: 30 | |
| PDLB254 | 118-126 of α- | Light chain | 5ClL3 | US20150259404 | 4040 |
| | synuclein | | | SEQ ID NO: 31 | |
| PDLB255 | 118-126 of α- | Light chain | 5ClL4 | US20150259404 | 4041 |
| | synuclein | | | SEQ ID NO: 32 | |
| PDLB256 | 118-126 of α- | Light chain | IgG1 | US20150259404 | 4042 |
| | synuclein | | | SEQ ID NO: 40 | |
| PDLB257 | 118-126 of α- | Light chain | 5Cl | US20150259404 | 4043 |
| | synuclein | | | SEQ ID NO: 8 | |
| PDLB258 | ACTH | Light chain | Ab3 | WO2015127288 | 4044 |
| | | | | SEQ ID NO: 101 | |
| PDLB259 | ACTH | Light chain | Ab4 | WO2015127288 | 4045 |
| | | | | SEQ ID NO: 141 | |
| PDLB260 | ACTH | Light chain | Ab5 | WO2015127288 | 4046 |
| | | | | SEQ ID NO: 181 | |
| PDLB261 | ACTH | Light chain | Ab1 | WO2015127288 | 4047 |
| | | | | SEQ ID NO: 21 | |
| PDLB262 | ACTH | Light chain | Ab6 | WO2015127288 | 4048 |
| | | | | SEQ ID NO: 221 | |
| PDLB263 | ACTH | Light chain | Ab7 | WO2015127288 | 4049 |
| | | | | SEQ ID NO: 261 | |
| PDLB264 | ACTH | Light chain | Ab9 | WO2015127288 | 4050 |
| | | | | SEQ ID NO: 301 | |
| PDLB265 | ACTH | Light chain | Ab10 | WO2015127288 | 4051 |
| | | | | SEQ ID NO: 341 | |
| PDLB266 | ACTH | Light chain | Ab11 | WO2015127288 | 4052 |
| | | | | SEQ ID NO: 381 | |
| PDLB267 | ACTH | Light chain | Ab12 | WO2015127288 | 4053 |
| | | | | SEQ ID NO: 421 | |
| PDLB268 | ACTH | Light chain | Ab1.H | WO2015127288 | 4054 |
| | | | | SEQ ID NO: 461 | |
| PDLB269 | ACTH | Light chain | Ab2.H | WO2015127288 | 4055 |
| | | | | SEQ ID NO: 501 | |
| PDLB270 | ACTH | Light chain | Ab3.H | WO2015127288 | 4056 |
| | | | | SEQ ID NO: 541 | |
| PDLB271 | ACTH | Light chain | Ab4.H | WO2015127288 | 4057 |
| | | | | SEQ ID NO: 581 | |
| PDLB272 | ACTH | Light chain | Ab2 | WO2015127288 | 4058 |
| | | | | SEQ ID NO: 61 | |
| PDLB273 | ACTH | Light chain | Ab6.H | WO2015127288 | 4059 |
| | | | | SEQ ID NO: 621 | |
| PDLB274 | ACTH | Light chain | Ab7.H | WO2015127288 | 4060 |
| | | | | SEQ ID NO: 661 | |
| PDLB275 | ACTH | Light chain | Ab7A.H | WO2015127288 | 4061 |
| | | | | SEQ ID NO: 701 | |
| PDLB276 | ACTH | Light chain | Ab10.H | WO2015127288 | 4062 |
| | | | | SEQ ID NO: 741 | |
| PDLB277 | ACTH | Light chain | Ab11.H | WO2015127288 | 4063 |
| | | | | SEQ ID NO: 781 | |
| PDLB278 | ACTH | Light chain | Ab11A.H | WO2015127288 | 4064 |
| | | | | SEQ ID NO: 821 | |
| PDLB279 | ACTH | Light chain | Ab12.H | WO2015127288 | 4065 |
| | | | | SEQ ID NO: 861 | |
| PDLB280 | alpha synuclein | Light chain | Hu1H7VLv1 | U.S. Pat. No. 8,790,644 | 4066 |
| | | | | SEQ ID NO: 33 | |
| PDLB281 | alpha synuclein | Light chain | Hu1H7VLv2 | U.S. Pat. No. 8,790,644 | 4067 |
| | | | | SEQ ID NO: 35 | |
| PDLB282 | alpha synuclein | Light chain | Hu1H7VLv3 | U.S. Pat. No. 8,790,644 | 4068 |
| | | | | SEQ ID NO: 37 | |
| PDLB283 | alpha synuclein | Light chain | Hu1H7VLv4 | U.S. Pat. No. 8,790,644 | 4069 |
| | | | | SEQ ID NO: 39 | |
| PDLB284 | alpha synuclein | Light chain | Hu1H7VL alternative | U.S. Pat. No. 8,790,644 | 4070 |
| | | | | SEQ ID NO: 45 | |
| PDLB285 | alpha synuclein | Light chain | sequence for Hu1H7VL | U.S. Pat. No. 8,790,644 | 4071 |
| | | | alternatives | SEQ ID NO: 47 | |
| PDLB286 | alpha synuclein | Light chain | humanized 5C 1L1 | WO2015075635 | 4072 |
| | | | | SEQ ID NO: 69 | |
| PDLB287 | alpha synuclein | Light chain | humanized 5C 1L2 | WO2015075635 | 4073 |
| | | | | SEQ ID NO: 70 | |
| PDLB288 | alpha synuclein | Light chain | Hu1H7VL alternative | WO2015075635 | 4074 |
| | | | | SEQ ID NO: 122 | |
| PDLB289 | alpha synuclein | Light chain | humanized 1H7 light chain | WO2015075635 | 4075 |
| | | | version 3 (variable region + | SEQ ID NO: 124 | |
| | | | constant region with | | |
| | | | Arginine) | | |
| PDLB290 | alpha synuclein | Light chain | humanized 1H7 light chain | WO2015075635 | 4076 |
| | | | version 3 (variable region + | SEQ ID NO: 125 | |
| | | | constant region without | | |
| | | | Arginine) | | |
| PDLB291 | alpha synuclein | Light chain | Hu9E4VL alternative | WO2015075635 | 4077 |
| | | | | SEQ ID NO: 28 | |
| PDLB292 | alpha synuclein | Light chain | humanized 9E4 light chain | WO2015075635 | 4078 |
| | | | version 3 (variable region + | SEQ ID NO: 32 | |
| | | | constant region with | | |
| | | | Arginine) | | |
| PDLB293 | alpha synuclein | Light chain | humanized 9E4 light chain | WO2015075635 | 4079 |
| | | | version 3 (variable region + | SEQ ID NO: 33 | |
| | | | constant region without | | |
| | | | Arginine) | | |
| PDLB294 | alpha synuclein | Light chain | humanized 5C L3 | WO2015075635 | 4080 |
| | | | | SEQ ID NO: 71 | |
| PDLB295 | amyloids | Light chain | #118 | WO2010012004 | 4081 |
| | | | | SEQ ID NO: 10 | |
| PDLB296 | amyloids | Light chain | #121 | WO2010012004 | 4082 |
| | | | | SEQ ID NO: 12 | |
| PDLB297 | amyloids | Light chain | #201 | WO2010012004 | 4083 |
| | | | | SEQ ID NO: 14 | |
| PDLB298 | amyloids | Light chain | #204 | WO2010012004 | 4084 |
| | | | | SEQ ID NO: 15 | |
| PDLB299 | amyloids | Light chain | #205 | WO2010012004 | 4085 |
| | | | | SEQ ID NO: 17 | |
| PDLB300 | EAG1 | Light chain | chimeric ImAb3 | WO2006037604 | 4086 |
| | | | | SEQ ID NO: 10 | |
| PDLB301 | EAG1 | Light chain | chimeric ImAb4 | WO2006037604 | 4087 |
| | | | | SEQ ID NO: 14 | |
| PDLB302 | EAG1 | Light chain | LC-lmAb3-humB3 | WO2006037604 | 4088 |
| | | | | SEQ ID NO: 18 | |
| PDLB303 | EAG1 | Light chain | ImAb4 | WO2006037604 | 4089 |
| | | | | SEQ ID NO: 2 | |
| PDLB304 | EAG1 | Light chain | LC-lmAb4-humA17 | WO2006037604 | 4090 |
| | | | | SEQ ID NO: 22 | |
| PDLB305 | EAG1 | Light chain | LC-lmAb3-humA3 | WO2006037604 | 4091 |
| | | | | SEQ ID NO: 26 | |
| PDLB306 | EAG1 | Light chain | LC-lmAb3-humA17 | WO2006037604 | 4092 |
| | | | | SEQ ID NO: 30 | |
| PDLB307 | EAG1 | Light chain | LC-lmAb4-humA5-1 | WO2006037604 | 4093 |
| | | | | SEQ ID NO: 34 | |
| PDLB308 | EAG1 | Light chain | LC-lmAh4-humO1 | WO2006037604 | 4094 |
| | | | | SEQ ID NO: 38 | |
| PDLB309 | EAG1 | Light chain | ImAb3 | WO2006037604 | 4095 |
| | | | | SEQ ID NO: 6 | |
| PDLB310 | NOGO | Light chain | H6L13 FL, H19L13 FL, | US20140147435 | 4096 |
| | | | H20L13 FL, H21L13 FL, | SEQ ID NO: 35 | |
| | | | H25L13 FL | | |
| PDLB311 | NOGO | Light chain | H16L16 FL, H19L16 FL, | US20140147435 | 4097 |
| | | | H20L16 FL, H21L16 FL, | SEQ ID NO: 38 | |
| | | | H25L16 FL, H18L16 FL | | |
| PDLB312 | NOGO | Light chain | H16L18 FL, H19L18 FL, | US20140147435 | 4098 |
| | | | H20L18 FL, H21L18 FL, | SEQ ID NO: 40 | |
| | | | H25L18 FL | | |
| PDLB313 | Nogo receptor-1 | Light chain | 7E11 | US20090215691 | 4099 |
| | | | | SEQ ID NO: 15 | |
| PDLB314 | Nogo receptor-1 | Light chain | 7E11 | US20090215691 | 4100 |
| | | | | SEQ ID NO: 17 | |
| PDLB315 | trk-C (NT-3 trkC | Light chain | 2250 | U.S. Pat. No. 7,615,383 | 4101 |
| | ligand) | | | SEQ ID NO: 49 | |
| PDLB316 | trk-C (NT-3 trkC | Light chain | 2253 | U.S. Pat. No. 7,615,383 | 4102 |
| | ligand) | | | SEQ ID NO: 50 | |
| PDLB317 | trk-C (NT-3 trkC | Light chain | 2256 | U.S. Pat. No. 7,615,383 | 4103 |
| | ligand) | | | SEQ ID NO: 51 | |
| PDLB318 | trk-C (NT-3 trkC | Light chain | 6.1.2 | U.S. Pat. No. 7,615,383 | 4104 |
| | ligand) | | | SEQ ID NO: 52 | |
| PDLB319 | trk-C (NT-3 trkC | Light chain | 6.4.1 | U.S. Pat. No. 7,615,383 | 4105 |
| | ligand) | | | SEQ ID NO: 53 | |
| PDLB320 | trk-C (NT-3 trkC | Light chain | 2345 | U.S. Pat. No. 7,615,383 | 4106 |
| | ligand) | | | SEQ ID NO: 54 | |
| PDLB321 | trk-C (NT-3 trkC | Light chain | 2349 | U.S. Pat. No. 7,615,383 | 4107 |
| | ligand) | | | SEQ ID NO: 55 | |
| PDLB322 | alpha synuclein | Light chain | Hu9E4VL consensus | U.S. Pat. No. 8,609,820 | 4108 |
| | | consensus chain | amino acid sequence | SEQ ID NO: 26 | |
| PDLB323 | alpha synuclein | Light chain constant | humanized 9E4 light chain | U.S. Pat. No. 8,609,820 | 4109 |
| | | region | constant region | SEQ ID NO: 13 | |
| PDLB324 | alpha synuclein | Light chain constant | humanized 9E4 heavy | U.S. Pat. No. 8,609,820 | 4110 |
| | | region | chain constant region | SEQ ID NO: 14 | |
| PDLB325 | alpha synuclein | Light chain constant | humanized 9E4 | WO2015075635 | 4111 |
| | | region | | SEQ ID NO: 13 | |
| PDLB326 | alpha synuclein | Light chain constant | Hu1H7 | U.S. Pat. No. 8,790,644 | 4112 |
| | | region (with | | SEQ ID NO: 49 | |
| | | arginine) (common | | | |
| | | for v1-v4) | | | |
| PDLB327 | alpha synuclein | Light chain constant | Hu1H7 | U.S. Pat. No. 8,790,644 | 4113 |
| | | region (without | | SEQ ID NO: 51 | |
| | | arginine) (common | | | |
| | | for v1-v4) | | | |
| PDLB328 | many - growth | Light chain fusion | H21L13, H21L16, | U.S. Pat. No. 8,053,569 | 4114 |
| | factors (to | protein | H21L18, H21L14, | SEQ ID NO: 31 | |
| | increase transport | | H21L15, H21L17, H21L6, | | |
| | across BBB) | | H21L11 | | |
| PDLB329 | many - growth | Light chain fusion | H23L13, H23L16, | U.S. Pat. No. 8,053,569 | 4115 |
| | factors (to | protein | H23L18, H23L14, | SEQ ID NO: 36 | |
| | increase transport | | H23L15, H23L17, H23L6, | | |
| | across BBB) | | H23L11 | | |
| PDLB330 | NOGO | Light chain | 2A10 construct | WO2007003421 | 4116 |
| | | humanized construct | | SEQ ID NO: 80 | |
| | | L11 | | | |
| PDLB331 | NOGO | Light chain | 2A10 construct | WO2007003421 | 4117 |
| | | humanized construct | | SEQ ID NO: 35 | |
| | | L13 | | | |
| PDLB332 | NOGO | Light chain | 2A10 construct | WO2007003421 | 4118 |
| | | humanized construct | | SEQ ID NO: 36 | |
| | | L14 | | | |
| PDLB333 | NOGO | Light chain | 2A10 construct | WO2007003421 | 4119 |
| | | humanized construct | | SEQ ID NO: 37 | |
| | | L15 | | | |
| PDLB334 | NOGO | Light chain | 2A10 construct | WO2007003421 | 4120 |
| | | humanized construct | | SEQ ID NO: 38 | |
| | | L16 | | | |
| PDLB335 | NOGO | Light chain | 2A10 construct | WO2007003421 | 4121 |
| | | humanized construct | | SEQ ID NO: 39 | |
| | | L17 | | | |
| PDLB336 | NOGO | Light chain | 2A10 construct | WO2007003421 | 4122 |
| | | humanized construct | | SEQ ID NO: 40 | |
| | | L18 | | | |
| PDLB337 | NOGO | Light chain | 2A10 construct | WO2007003421 | 4123 |
| | | humanized construct | | SEQ ID NO: 34 | |
| | | L6 | | | |
| PDLB338 | RTN4 | Light chain IgG4, | Atinumab | U.S. Pat. No. 8,163,285 | 4124 |
| | | immunomodulator | | SEQ ID NO: 25 | |
| PDLB339 | alpha synuclein | Light chain variable | NI-202.12F4-VLa1 | US20150232542 | 4125 |
| | | region | | SEQ ID NO: 12 | |
| PDLB340 | alpha synuclein | Light chain variable | NI-202.12F4-VLa1-GL | US20150232542 | 4126 |
| | | region | | SEQ ID NO: 13 | |
| PDLB341 | alpha synuclein | Light chain variable | NI-202.3D8-VKa1 | US20150232542 | 4127 |
| | | region | | SEQ ID NO: 18 | |
| PDLB342 | alpha synuclein | Light chain variable | NI-202.3D8-VKa1-GL | US20150232542 | 4128 |
| | | region | | SEQ ID NO: 19 | |
| PDLB343 | alpha synuclein | Light chain variable | NI-202.3D8-VKc1 | US20150232542 | 4129 |
| | | region | | SEQ ID NO: 21 | |
| PDLB344 | alpha synuclein | Light chain variable | NI-202.3D8-VKc1-GL | US20150232542 | 4130 |
| | | region | | SEQ ID NO: 22 | |
| PDLB345 | alpha synuclein | Light chain variable | NI-202.3G12-VLc1 | US20150232542 | 4131 |
| | | region | | SEQ ID NO: 6 | |
| PDLB346 | alpha synuclein | Light chain variable | NI-202.3G12-VLc1-GL | US20150232542 | 4132 |
| | | region | | SEQ ID NO: 7 | |
| PDLB347 | alpha synuclein | Light chain variable | m9E4VL variable region | U.S. Pat. No. 8,609,820 | 4133 |
| | | region | | SEQ ID NO: 1 | |
| PDLB348 | alpha synuclein | Light chain variable | 63102889Hu9E4VLFr | U.S. Pat. No. 8,609,820 | 4134 |
| | | region | region variable | SEQ ID NO: 2 | |
| PDLB349 | alpha synuclein | Light chain variable | Hu9E4VLv1 variable | U.S. Pat. No. 8,609,820 | 4135 |
| | | region | region | SEQ ID NO: 3 | |
| PDLB350 | alpha synuclein | Light chain variable | Hu9E4VLv2 variable | U.S. Pat. No. 8,609,820 | 4136 |
| | | region | region | SEQ ID NO: 4 | |
| PDLB351 | alpha synuclein | Light chain variable | mature m1H7 light chain | U.S. Pat. No. 8,790,644 | 4137 |
| | | region | variable | SEQ ID NO: 11 | |
| PDLB352 | alpha synuclein | Light chain variable | m1H7 light chain variable | U.S. Pat. No. 8,790,644 | 4138 |
| | | region | | SEQ ID NO: 7 | |
| PDLB353 | alpha synuclein | Light chain variable | m9E4VL | WO2015075635 | 4139 |
| | | region | | SEQ ID NO: 1 | |
| PDLB354 | alpha synuclein | Light chain variable | Hu1H7VLv2 | WO2015075635 | 4140 |
| | | region | | SEQ ID NO: 111 | |
| PDLB355 | alpha synuclein | Light chain variable | Hu1H7VLv3 | WO2015075635 | 4141 |
| | | region | | SEQ ID NO: 113 | |
| PDLB356 | alpha synuclein | Light chain variable | Hu1H7VLv1 | WO2015075635 | 4142 |
| | | region | | SEQ ID NO: 109 | |
| PDLB357 | alpha synuclein | Light chain variable | Hu1H7VLv4 | WO2015075635 | 4143 |
| | | region | | SEQ ID NO: 115 | |
| PDLB358 | alpha synuclein | Light chain variable | Hu9E4VLv1 | WO2015075635 | 4144 |
| | | region | | SEQ ID NO: 3 | |
| PDLB359 | alpha synuclein | Light chain variable | Hu9E4VLv2 (No back | WO2015075635 | 4145 |
| | | region | mutation) | SEQ ID NO: 4 | |
| PDLB360 | alpha synuclein | Light chain variable | m5C 1 antibody light chain | WO2015075635 | 4146 |
| | | region | variable region amino acid | SEQ ID NO: 43 | |
| | | | sequence | | |
| PDLB361 | alpha synuclein | Light chain variable | Hu9E4VLv3 | WO2015075635 | 4147 |
| | | region | | SEQ ID NO: 5 | |
| PDLB362 | alpha synuclein | Light chain variable | mlH7 | WO2015075635 | 4148 |
| | | region | | SEQ ID NO: 83 | |
| PDLB363 | alpha synuclein | Light chain variable | mature mlH7 | WO2015075635 | 4149 |
| | | region | | SEQ ID NO: 87 | |
| PDLB364 | alpha synuclein | Light chain variable | BA3: 38Fl1/2_8 | WO2011104696 | 4150 |
| | protofibrils | region | | SEQ ID NO: 60 | |
| PDLB365 | alpha synuclein | Light chain variable | BA3: 38fl1/2_8 | WO2011104696 | 4151 |
| | protofibrils | region | | SEQ ID NO: 61 | |
| PDLB366 | alpha synuclein | Light chain variable | BA4: 48B11/8 | WO2011104696 | 4152 |
| | protofibrils | region | | SEQ ID NO: 62 | |
| PDLB367 | alpha synuclein | Light chain variable | BA4: 48B11/8 | WO2011104696 | 4153 |
| | protofibrils | region | | SEQ ID NO: 63 | |
| PDLB368 | amyloid | Light chain variable | F11G3 | U.S. Pat. No. 9,125,846 | 4154 |
| | oligomers | region | | SEQ ID NO: 12 | |
| PDLB369 | DR6 and P75 | Light chain variable | M73-C04 | WO2010062904 | 4155 |
| | | region | | SEQ ID NO: 102 | |
| PDLB370 | DR6 and P75 | Light chain variable | 1P1D6.3 | WO2010062904 | 4156 |
| | | region | | SEQ ID NO: 112 | |
| PDLB371 | DR6 and P75 | Light chain variable | M50-H02 | WO2010062904 | 4157 |
| | | region | | SEQ ID NO: 12 | |
| PDLB372 | DR6 and P75 | Light chain variable | 1P2F2.1 | WO2010062904 | 4158 |
| | | region | | SEQ ID NO: 122 | |
| PDLB373 | DR6 and P75 | Light chain variable | 1P5D10.2 | WO2010062904 | 4159 |
| | | region | | SEQ ID NO: 132 | |
| PDLB374 | DR6 and P75 | Light chain variable | M51-H09 | WO2010062904 | 4160 |
| | | region | | SEQ ID NO: 22 | |
| PDLB375 | DR6 and P75 | Light chain variable | M53-E04 | WO2010062904 | 4161 |
| | | region | | SEQ ID NO: 32 | |
| PDLB376 | DR6 and P75 | Light chain variable | M53-F04 | WO2010062904 | 4162 |
| | | region | | SEQ ID NO: 42 | |
| PDLB377 | DR6 and P75 | Light chain variable | M62-B02 | WO2010062904 | 4163 |
| | | region | | SEQ ID NO: 52 | |
| PDLB378 | DR6 and P75 | Light chain variable | M63-E10 | WO2010062904 | 4164 |
| | | region | | SEQ ID NO: 62 | |
| PDLB379 | DR6 and P75 | Light chain variable | M66-B03 | WO2010062904 | 4165 |
| | | region | | SEQ ID NO: 72 | |
| PDLB380 | DR6 and P75 | Light chain variable | M67-G02 | WO2010062904 | 4166 |
| | | region | | SEQ ID NO: 82 | |
| PDLB381 | DR6 and P75 | Light chain variable | M72-F03 | WO2010062904 | 4167 |
| | | region | | SEQ ID NO: 92 | |
| PDLB382 | LPG | Light chain variable | #7 | U.S. Pat. No. 8,591,902 | 4168 |
| | (lysophosphatidyl | region | | SEQ ID NO: 17 | |
| | glucoside) | | | | |
| PDLB383 | LPG | Light chain variable | #15 | U.S. Pat. No. 8,591,902 | 4169 |
| | (lysophosphatidyl | region | | SEQ ID NO: 7 | |
| | glucoside) | | | | |
| PDLB384 | MAG | Light chain variable | | U.S. Pat. No. 8,071,731 | 4170 |
| | | region | | SEQ ID NO: 16 | |
| PDLB385 | MAG | Light chain variable | | U.S. Pat. No. 8,071,731 | 4171 |
| | | region | | SEQ ID NO: 17 | |
| PDLB386 | MAG | Light chain variable | | U.S. Pat. No. 8,071,731 | 4172 |
| | | region | | SEQ ID NO: 18 | |
| PDLB387 | MAG | Light chain variable | | U.S. Pat. No. 8,071,731 | 4173 |
| | | region | | SEQ ID NO: 19 | |
| PDLB388 | MAI (myelin | Light chain variable | | WO2013158748 | 4174 |
| | associated | region | | SEQ ID NO: 11 | |
| | inhibitor) | | | | |
| PDLB389 | MAI (myelin | Light chain variable | | WO2013158748 | 4175 |
| | associated | region | | SEQ ID NO: 27 | |
| | inhibitor) | | | | |
| PDLB390 | NMDA | Light chain variable | | EP2805972 SEQ | 4176 |
| | | region | | ID NO: 44 | |
| PDLB391 | NOGO | Light chain variable | H1L6, H5L6, H6L6, | US20140147435 | 4177 |
| | | region | H14L6, H15L6, H16L6, | SEQ ID NO: 19 | |
| | | | H17L6, H18L6, H19L6, | | |
| | | | H20L6, H21L6, H22L6, | | |
| | | | H23L6, H24L6, H25L6, | | |
| | | | H700L6 | | |
| PDLB392 | NOGO | Light chain variable | H1L13, H5L13, H6L13, | US20140147435 | 4178 |
| | | region | H14L13, H15L13, | SEQ ID NO: 20 | |
| | | | H16L13, H17L13, | | |
| | | | H18L13, H19L13, | | |
| | | | H20L13, H21L13, | | |
| | | | H22L13, H23L13, | | |
| | | | H24L13, H25L13, | | |
| | | | H700L13 | | |
| PDLB393 | NOGO | Light chain variable | H1L14, H5L14, H6L14, | US20140147435 | 4179 |
| | | region | H14L14, H15L14, | SEQ ID NO: 21 | |
| | | | H16L14, H17L14, | | |
| | | | H18L14, H19L14, | | |
| | | | H20L14, H21L14, | | |
| | | | H22L14, H23L14, | | |
| | | | H24L14, H25L14, | | |
| | | | H700L14 | | |
| PDLB394 | NOGO | Light chain variable | H1L15, H5L15, H6L15, | US20140147435 | 4180 |
| | | region | H14L15, H15L15, | SEQ ID NO: 22 | |
| | | | H16L15, H17L15, | | |
| | | | H18L15, H19L15, | | |
| | | | H20L15, H21L15, | | |
| | | | H22L15, H23L15, | | |
| | | | H24L15, H25L15, | | |
| | | | H700L15 | | |
| PDLB395 | NOGO | Light chain variable | H1L16, H5L16, H6L16, | US20140147435 | 4181 |
| | | region | H14L16, H15L16, | SEQ ID NO: 23 | |
| | | | H16L16, H17L16, | | |
| | | | H18L16, H19L16, | | |
| | | | H20L16, H21L16, | | |
| | | | H22L16, H23L16, | | |
| | | | H24L16, H25L16, | | |
| | | | H700L16 | | |
| PDLB396 | NOGO | Light chain variable | H1L17, H5L17, H6L17, | US20140147435 | 4182 |
| | | region | H14L17, H15L17, | SEQ ID NO: 24 | |
| | | | H16L17, H17L17, | | |
| | | | H18L17, H19L17, | | |
| | | | H20L17, H21L17, | | |
| | | | H22L17, H23L17, | | |
| | | | H24L17, H25L17, | | |
| | | | H700L17 | | |
| PDLB397 | NOGO | Light chain variable | H1L18, H5L18, H6L18, | US20140147435 | 4183 |
| | | region | H14L18, H15L18, | SEQ ID NO: 25 | |
| | | | H16L18, H17L18, | | |
| | | | H18L18, H19L18, | | |
| | | | H20L18, H21L18, | | |
| | | | H22L18, H23L18, | | |
| | | | H24L18, H25L18, | | |
| | | | H700L18 | | |
| PDLB398 | NOGO | Light chain variable | H5L11, H6L11, H14L11, | US20140147435 | 4184 |
| | | region | H15L11, H16L11, | SEQ ID NO: 78 | |
| | | | H17L11, H18L11, | | |
| | | | H19L11, H20L11, | | |
| | | | H21L11, H22L11, | | |
| | | | H23L11, H24L11, | | |
| | | | H25L11, H700L11 | | |
| PDLB399 | Nogo-66 | Light chain variable | Antibody clone 50 | US20140065155 | 4185 |
| | | region | | SEQ ID NO: 4 | |
| PDLB400 | Nogo-66 | Light chain variable | Antibody clone 51 | US20140065155 | 4186 |
| | | region | | SEQ ID NO: 6 | |
| PDLB401 | NogoA/NiG | Light chain variable | 6A3-Ig4 | WO2009056509 | 4187 |
| | | region | | SEQ ID NO: 25 | |
| PDLB402 | NogoA/NiG | Light chain variable | 6A3-IgG1 | WO2009056509 | 4188 |
| | | region | | SEQ ID NO: 5 | |
| PDLB403 | RGM A | Light chain variable | 5F9.1-GL, 5F9.1-GL, | US20150183871 | 4189 |
| | | region | 5F9.1-GL, 5F9.1-GL, | SEQ ID NO: 44 | |
| | | | 5F9.1-GL, 5F9.1-GL, | | |
| | | | 5F9.1-GL, 5F9.1-GL, | | |
| | | | 5F9.1-GL, 5F9.1-GL, | | |
| | | | h5F9.4, h5F9.11, h5F9.12 | | |
| PDLB404 | RGM A | Light chain variable | 5F9.2-GL, 5F9.2-GL, | US20150183871 | 4190 |
| | | region | 5F9.2-GL, 5F9.2-GL, | SEQ ID NO: 45 | |
| | | | 5F9.2-GL, 5F9.2-GL, | | |
| | | | 5F9.2-GL, 5F9.2-GL, | | |
| | | | 5F9.2-GL, 5F9.2-GL, | | |
| | | | h5F9.5, h5F9.19, h5F9.20 | | |
| PDLB405 | RGM A | Light chain variable | 5F9.3-GL, 5F9.3-GL, | US20150183871 | 4191 |
| | | region | 5F9.3-GL, 5F9.3-GL, | SEQ ID NO: 46 | |
| | | | 5F9.3-GL, 5F9.3-GL, | | |
| | | | 5F9.3-GL, 5F9.3-GL, | | |
| | | | 5F9.3-GL, 5F9.3-GL, | | |
| | | | h5F9.6, h5F9.21, h5F9.22 | | |
| PDLB406 | RGM A | Light chain variable | h5F9.5, h5F9.6, h5F9.7, | US20150183871 | 4192 |
| | | region | h5F9.8, h5F9.9, h5F9.10 | SEQ ID NO: 48 | |
| PDLB407 | RGM A | Light chain variable | h5F9.11, h5F9.19, h5F9.21 | US20150183871 | 4193 |
| | | region | | SEQ ID NO: 49 | |
| PDLB408 | RGM A | Light chain variable | h5F9.12, h5F9.20, | US20150183871 | 4194 |
| | | region | h5F9.22, h5F9.23, | SEQ ID NO: 50 | |
| | | | h5F9.25, h5F9.25, h5F9.26 | | |
| PDLB409 | RGM A | Light chain variable | h5F9.1, h5F9.7, h5F9.23 | US20150183871 | 4195 |
| | | region | | SEQ ID NO: 51 | |
| PDLB410 | RGM A | Light chain variable | h5F9.2, h5F9.8, h5F9.25 | US20150183871 | 4196 |
| | | region | | SEQ ID NO: 52 | |
| PDLB411 | RGMa | Light chain variable | AE12-15 | US20140023659 | 4197 |
| | | region | | SEQ ID NO: 103 | |
| PDLB412 | RGMa | Light chain variable | AE12-20 | US20140023659 | 4198 |
| | | region | | SEQ ID NO: 111 | |
| PDLB413 | RGMa | Light chain variable | AE12-21 | US20140023659 | 4199 |
| | | region | | SEQ ID NO: 119 | |
| PDLB414 | RGMa | Light chain variable | AE12-23 | US20140023659 | 4200 |
| | | region | | SEQ ID NO: 127 | |
| PDLB415 | RGMa | Light chain variable | AE12-2 | US20140023659 | 4201 |
| | | region | | SEQ ID NO: 13 | |
| PDLB416 | RGMa | Light chain variable | AE12-24 | US20140023659 | 4202 |
| | | region | | SEQ ID NO: 135 | |
| PDLB417 | RGMa | Light chain variable | AE12-3 | US20140023659 | 4203 |
| | | region | | SEQ ID NO: 21 | |
| PDLB418 | RGMa | Light chain variable | AE12-4 | US20140023659 | 4204 |
| | | region | | SEQ ID NO: 29 | |
| PDLB419 | RGMa | Light chain variable | AE12-5 | US20140023659 | 4205 |
| | | region | | SEQ ID NO: 37 | |
| PDLB420 | RGMa | Light chain variable | AE12-6 | US20140023659 | 4206 |
| | | region | | SEQ ID NO: 45 | |
| PDLB421 | RGMa | Light chain variable | AE12-1 | US20140023659 | 4207 |
| | | region | | SEQ ID NO: 5 | |
| PDLB422 | RGMa | Light chain variable | AE12-7 | US20140023659 | 4208 |
| | | region | | SEQ ID NO: 53 | |
| PDLB423 | RGMa | Light chain variable | AE12-8 | US20140023659 | 4209 |
| | | region | | SEQ ID NO: 61 | |
| PDLB424 | RGMa | Light chain variable | AE12-13 | US20140023659 | 4210 |
| | | region | | SEQ ID NO: 95 | |
| PDLB425 | α-synuclein | Light chain variable | Syn-01 | WO2014132210 | 4211 |
| | aggregates | region | | SEQ ID NO: 12 | |
| PDLB426 | α-synuclein | Light chain variable | Syn-F1 | WO2014132210 | 4212 |
| | aggregates | region | | SEQ ID NO: 4 | |
| PDLB427 | α-synuclein | Light chain variable | Syn-F2 | WO2014132210 | 4213 |
| | aggregates | region | | SEQ ID NO: 8 | |
| PDLB428 | NOGO | Light chain variable | 2A10 construct | WO2007003421 | 4214 |
| | | region humanized | | SEQ ID NO: 78 | |
| | | construct L11 | | | |
| PDLB429 | NOGO | Light chain variable | 2A10 construct | WO2007003421 | 4215 |
| | | region humanized | | SEQ ID NO: 20 | |
| | | construct L13 | | | |
| PDLB430 | NOGO | Light chain variable | 2A10 construct | WO2007003421 | 4216 |
| | | region humanized | | SEQ ID NO: 21 | |
| | | construct L14 | | | |
| PDLB431 | NOGO | Light chain variable | 2A10 construct | WO2007003421 | 4217 |
| | | region humanized | | SEQ ID NO: 22 | |
| | | construct L15 | | | |
| PDLB432 | NOGO | Light chain variable | 2A10 construct | WO2007003421 | 4218 |
| | | region humanized | | SEQ ID NO: 23 | |
| | | construct L16 | | | |
| PDLB433 | NOGO | Light chain variable | 2A10 construct | WO2007003421 | 4219 |
| | | region humanized | | SEQ ID NO: 24 | |
| | | construct L17 | | | |
| PDLB434 | NOGO | Light chain variable | 2A10 construct | WO2007003421 | 4220 |
| | | region humanized | | SEQ ID NO: 25 | |
| | | construct L18 | | | |
| PDLB435 | NOGO | Light chain variable | 2A10 construct | WO2007003421 | 4221 |
| | | region humanized | | SEQ ID NO: 19 | |
| | | construct L16 | | | |
| PDLB436 | alpha synuclein | Light chain version | Hu1H7 | U.S. Pat. No. 8,790,644 | 4222 |
| | | 3 (variable | | SEQ ID NO: 53 | |
| | | region + constant | | | |
| | | region with | | | |
| | | arginine) | | | |
| PDLB437 | alpha synuclein | Light chain version | Hu1H7 | U.S. Pat. No. 8,790,644 | 4223 |
| | | 3 (variable | | SEQ ID NO: 54 | |
| | | region + constant | | | |
| | | region without | | | |
| | | arginine) | | | |

[0369] In some embodiments, the payload region of the viral particle comprises one or more nucleic acid sequences encoding one or more of the polypeptides that comprise a portion of filamentous bacteriophage gene 3 protein (g3p) sufficient to bind to and/or disaggregate amyloid described in International Publication No. WO2014193935, the contents of which are herein incorporated by reference in their entirety. As a non-limiting example, the payload region of the viral particle comprises one or more nucleic acid sequences encoding one or more of the polypeptides described in WO2014193935 may be used to treat, prevent and/or reduce the effects of Parkinson's Disease and/or dementia. As another non-limiting example, the payload region of the viral particle comprises one or more nucleic acid sequences encoding one or more of the polypeptides described in WO2014193935 may be used to treat, prevent and/or reduce the effects of Alzheimer's Disease. As another non-limiting example, the payload region of the viral particle comprises one or more nucleic acid sequences encoding one or more of the polypeptides described in WO2014193935 may be used to treat, prevent and/or reduce the effects of Huntington's Disease. As another non-limiting example, the payload region of the viral particle comprises one or more nucleic acid sequences encoding one or more of the polypeptides described in WO2014193935 may be used to treat, prevent and/or reduce the effects of muscle disease such as, but not limited to, Multiple System Atrophy (MSA), Amyotrophic Lateral Sclerosis (ALS) and Duchenne Muscular Dystrophy (DMD).

### Alzheimer's Disease Antibodies

[0370] In some embodiments, the payload region of the viral particle comprises one or more nucleic acid sequences encoding one or more of the Alzheimer's Disease payload antibody polypeptides listed in Table 4 (AD1-AD1178; SEQ ID NO: 4224-5401).

TABLE 4
Alzheimer's Disease Antibodies

| Antibody No. | Target | Description | Antibody Name | Reference Information | SEQ ID NO |
|---|---|---|---|---|---|
| AD1 | amyloid | consensus | M13 g3p, fd g3p, fl | US20150376239 | 4224 |
| | proteins | sequence | g3p | SEQ ID NO: 4 | |
| AD2 | amyloid | consensus | 12-2 g3p, Ike g3p | US20150376239 | 4225 |
| | proteins | sequence | | SEQ ID NO: 7 | |
| AD3 | Aβ amyloid | Consensus | | WO2006066049 | 4226 |
| | | sequence for kappa | | SEQ ID NO: 14 | |
| | | chain | | | |
| AD4 | Aβ amyloid | Consensus | | WO2006066049 | 4227 |
| | | sequence for kappa | | SEQ ID NO: 15 | |
| | | chain | | | |
| AD5 | Aβ amyloid | Consensus | | WO2006066049 | 4228 |
| | | sequence for kappa | | SEQ ID NO: 16 | |
| | | chain | | | |
| AD6 | Aβ amyloid | Consensus | | WO2006066049 | 4229 |
| | | sequence for kappa | | SEQ ID NO: 17 | |
| | | chain | | | |
| AD7 | Aβ amyloid | Consensus | | WO2006066049 | 4230 |
| | | sequence for | | SEQ ID NO: 18 | |
| | | lambda chain | | | |
| AD8 | Aβ amyloid | Consensus | | WO2006066049 | 4231 |
| | | sequence for | | SEQ ID NO: 19 | |
| | | lambda chain | | | |
| AD9 | Aβ amyloid | Consensus | | WO2006066049 | 4232 |
| | | sequence for | | SEQ ID NO: 20 | |
| | | lambda chain | | | |
| AD10 | 118-126 of α- | constant region | IgG1 | US20150259404 | 4233 |
| | synuclein | | | SEQ ID NO: 38 | |
| AD11 | beta A4 | Fc region | Antibody A | WO2007068429 | 4234 |
| | peptide/Alpha | | | SEQ ID NO: 6 | |
| | beta 5 | | | | |
| AD12 | amyloid | Fusion protein | M13 g3p | US20150376239 | 4235 |
| | proteins | | | SEQ ID NO: 1 | |
| AD13 | amyloid | Fusion protein | Construct 5 | US20150376239 | 4236 |
| | proteins | | | SEQ ID NO: 11 | |
| AD14 | amyloid | Fusion protein | Construct 6 | US20150376239 | 4237 |
| | proteins | | | SEQ ID NO: 13 | |
| AD15 | amyloid | Fusion protein | fd N2 | US20150376239 | 4238 |
| | proteins | | | SEQ ID NO: 14 | |
| AD16 | amyloid | Fusion protein | f1 N2 | US20150376239 | 4239 |
| | proteins | | | SEQ ID NO: 15 | |
| AD17 | amyloid | Fusion protein | M13 N2 | US20150376239 | 4240 |
| | proteins | | | SEQ ID NO: 16 | |
| AD18 | amyloid | Fusion protein | Ike N2 | US20150376239 | 4241 |
| | proteins | | | SEQ ID NO: 17 | |
| AD19 | amyloid | Fusion protein | 12-2 N2 | US20150376239 | 4242 |
| | proteins | | | SEQ ID NO: 18 | |
| AD20 | amyloid | Fusion protein | If1 N2 | US20150376239 | 4243 |
| | proteins | | | SEQ ID NO: 19 | |
| AD21 | amyloid | Fusion protein | fd g3p | US20150376239 | 4244 |
| | proteins | | | SEQ ID NO: 2 | |
| AD22 | amyloid | Fusion protein | Construct 3 | US20150376239 | 4245 |
| | proteins | | | SEQ ID NO: 20 | |
| AD23 | amyloid | Fusion protein | Construct 3m g3p | US20150376239 | 4246 |
| | proteins | | portion | SEQ ID NO: 24 | |
| AD24 | amyloid | Fusion protein | If1 g3p | US20150376239 | 4247 |
| | proteins | | | SEQ ID NO: 29 | |
| AD25 | amyloid | Fusion protein | f1 g3p | US20150376239 | 4248 |
| | proteins | | | SEQ ID NO: 3 | |
| AD26 | amyloid | Fusion protein | fd g3p | US20150376239 | 4249 |
| | proteins | | | SEQ ID NO: 30 | |
| AD27 | amyloid | Fusion protein | Construct 8, rs-g3p | US20150376239 | 4250 |
| | proteins | | (If1-N1N2)-hlgG1-Fc | SEQ ID NO: 31 | |
| AD28 | amyloid | Fusion protein | I2-2 g3p | US20150376239 | 4251 |
| | proteins | | | SEQ ID NO: 5 | |
| AD29 | amyloid | Fusion protein | Ike g3p | US20150376239 | 4252 |
| | proteins | | | SEQ ID NO: 6 | |
| AD30 | amyloid | Fusion protein | If1 g3p | US20150376239 | 4253 |
| | proteins | | | SEQ ID NO: 8 | |
| AD31 | amyloid | Fusion protein | Construct 4 | US20150376239 | 4254 |
| | proteins | | | SEQ ID NO: 9 | |
| AD32 | ACTH | Heavy chain | Ab4 | WO2015127288 | 4255 |
| | | | | SEQ ID NO: 121 | |
| AD33 | ACTH | Heavy chain | Ab5 | WO2015127288 | 4256 |
| | | | | SEQ ID NO: 161 | |
| AD34 | ACTH | Heavy chain | Ab6 | WO2015127288 | 4257 |
| | | | | SEQ ID NO: 201 | |
| AD35 | ACTH | Heavy chain | Ab7 | WO2015127288 | 4258 |
| | | | | SEQ ID NO: 241 | |
| AD36 | ACTH | Heavy chain | Ab9 | WO2015127288 | 4259 |
| | | | | SEQ ID NO: 281 | |
| AD37 | ACTH | Heavy chain | Ab10 | WO2015127288 | 4260 |
| | | | | SEQ ID NO: 321 | |
| AD38 | ACTH | Heavy chain | Ab11 | WO2015127288 | 4261 |
| | | | | SEQ ID NO: 361 | |
| AD39 | ACTH | Heavy chain | Ab12 | WO2015127288 | 4262 |
| | | | | SEQ ID NO: 401 | |
| AD40 | ACTH | Heavy chain | Ab2 | WO2015127288 | 4263 |
| | | | | SEQ ID NO: 41 | |
| AD41 | ACTH | Heavy chain | Ab1.H | WO2015127288 | 4264 |
| | | | | SEQ ID NO: 441 | |
| AD42 | ACTH | Heavy chain | Ab2.H | WO2015127288 | 4265 |
| | | | | SEQ ID NO: 481 | |
| AD43 | ACTH | Heavy chain | Ab3.H | WO2015127288 | 4266 |
| | | | | SEQ ID NO: 521 | |
| AD44 | ACTH | Heavy chain | Ab4.H | WO2015127288 | 4267 |
| | | | | SEQ ID NO: 561 | |
| AD45 | ACTH | Heavy chain | Ab6.H | WO2015127288 | 4268 |
| | | | | SEQ ID NO: 601 | |
| AD46 | ACTH | Heavy chain | Ab7.H | WO2015127288 | 4269 |
| | | | | SEQ ID NO: 641 | |
| AD47 | ACTH | Heavy chain | Ab7A.H | WO2015127288 | 4270 |
| | | | | SEQ ID NO: 681 | |
| AD48 | ACTH | Heavy chain | Ab10.H | WO2015127288 | 4271 |
| | | | | SEQ ID NO: 721 | |
| AD49 | ACTH | Heavy chain | Ab11.H | WO2015127288 | 4272 |
| | | | | SEQ ID NO: 761 | |
| AD50 | ACTH | Heavy chain | Ab11A.H | WO2015127288 | 4273 |
| | | | | SEQ ID NO: 801 | |
| AD51 | ACTH | Heavy chain | Ab3 | WO2015127288 | 4274 |
| | | | | SEQ ID NO: 81 | |
| AD52 | ACTH | Heavy chain | Ab12.H | WO2015127288 | 4275 |
| | | | | SEQ ID NO: 841 | |
| AD53 | ACTH | Heavy chain | Ab1 | WO2015127288 | 4276 |
| | | | | SEQ ID NO: 1 | |
| AD54 | Alpha beta | Heavy chain | Gantenerumab | Immunogenetics | 4277 |
| | fibril | | | Information | |
| | | | | System; CHAIN | |
| | | | | ID NO: 8894_H. | |
| AD55 | amyloid beta | Heavy chain | | U.S. Pat. No. 719,576 | 4278 |
| | peptide Aβ | | | SEQ ID NO: 12 | |
| AD56 | Amyloid | Heavy chain | 2 Fab of Yw412.8.31 | Wang, W. et al “A | 4279 |
| | beta/BACE1 | | | Therapeutic | |
| | | | | Antibody Targeting | |
| | | | | BACE1 Inhibits | |
| | | | | Amyloid. NO:- | |
| | | | | {beta}Production | |
| | | | | in Vivo” Sci Transl | |
| | | | | Med 3 (84), | |
| | | | | 84RA43 (2011), | |
| | | | | NCBI Accession # | |
| | | | | 3RIG_H (222aa) | |
| AD57 | amyloid or | Heavy chain | Humanized C2 | WO2008061796 | 4280 |
| | amyloid-like | | | SEQ ID NO: 4 | |
| | proteins | | | | |
| AD58 | amyloid protein | Heavy chain | C2 | US20100150906 | 4281 |
| | | | | SEQ ID NO: 16 | |
| AD59 | amyloids | Heavy chain | #118 | WO2010012004 | 4282 |
| | | | | SEQ ID NO: 11 | |
| AD60 | amyloids | Heavy chain | #121 | WO2010012004 | 4283 |
| | | | | SEQ ID NO: 13 | |
| AD61 | amyloids | Heavy chain | #204 | WO2010012004 | 4284 |
| | | | | SEQ ID NO: 16 | |
| AD62 | amyloids | Heavy chain | #205 | WO2010012004 | 4285 |
| | | | | SEQ ID NO: 18 | |
| AD63 | APP | Heavy chain | F5.100 | WO2014151747 | 4286 |
| | | | | SEQ ID NO: 2 | |
| AD64 | APP | Heavy chain | BBSl MAb | WO2014151747 | 4287 |
| | | | | SEQ ID NO: 24 | |
| AD65 | APP | Heavy chain | F5.87 | WO2014151747 | 4288 |
| | | | | SEQ ID NO: 26 | |
| AD66 | APP | Heavy chain | F5.87 | WO2014151747 | 4289 |
| | | | | SEQ ID NO: 52 | |
| AD67 | Aβ amyloids | Heavy chain | Humanized 12A11, | U.S. Pat. No. 8,784,810 | 4290 |
| | | | version 3 | SEQ ID NO: 11 | |
| AD68 | Aβ amyloids | Heavy chain | Humanized 12A11, | U.S. Pat. No. 8,784,810 | 4291 |
| | | | version 4.1 | SEQ ID NO: 12 | |
| AD69 | Aβ amyloids | Heavy chain | Humanized 12A11, | U.S. Pat. No. 8,784,810 | 4292 |
| | | | version 4.2 | SEQ ID NO: 13 | |
| AD70 | Aβ amyloids | Heavy chain | Humanized 12A11, | U.S. Pat. No. 8,784,810 | 4293 |
| | | | version 4.3 | SEQ ID NO: 14 | |
| AD71 | Aβ amyloids | Heavy chain | Humanized 12A11, | U.S. Pat. No. 8,784,810 | 4294 |
| | | | version 4.4 | SEQ ID NO: 15 | |
| AD72 | Aβ amyloids | Heavy chain | Humanized 12A11, | U.S. Pat. No. 8,784,810 | 4295 |
| | | | version 5.1 | SEQ ID NO: 16 | |
| AD73 | Aβ amyloids | Heavy chain | Humanized 12A11, | U.S. Pat. No. 8,784,810 | 4296 |
| | | | version 5.2 | SEQ ID NO: 17 | |
| AD74 | Aβ amyloids | Heavy chain | Humanized 12A11, | U.S. Pat. No. 8,784,810 | 4297 |
| | | | version 5.3 | SEQ ID NO: 18 | |
| AD75 | Aβ amyloids | Heavy chain | Humanized 12A11, | U.S. Pat. No. 8,784,810 | 4298 |
| | | | version 5.4 | SEQ ID NO: 19 | |
| AD76 | Aβ amyloids | Heavy chain | Humanized 12A11, | U.S. Pat. No. 8,784,810 | 4299 |
| | | | version 5.5 | SEQ ID NO: 20 | |
| AD77 | Aβ amyloids | Heavy chain | Humanized 12A11, | U.S. Pat. No. 8,784,810 | 4300 |
| | | | version 5.6 | SEQ ID NO: 21 | |
| AD78 | Aβ amyloids | Heavy chain | Humanized 12A11, | U.S. Pat. No. 8,784,810 | 4301 |
| | | | version 6.1 | SEQ ID NO: 22 | |
| AD79 | Aβ amyloids | Heavy chain | Humanized 12A11, | U.S. Pat. No. 8,784,810 | 4302 |
| | | | version 6.2 | SEQ ID NO: 23 | |
| AD80 | Aβ amyloids | Heavy chain | Humanized 12A11, | U.S. Pat. No. 8,784,810 | 4303 |
| | | | version 6.3 | SEQ ID NO: 24 | |
| AD81 | Aβ amyloids | Heavy chain | Humanized 12A11, | U.S. Pat. No. 8,784,810 | 4304 |
| | | | version 6.4 | SEQ ID NO: 25 | |
| AD82 | Aβ amyloids | Heavy chain | Humanized 12A11, | U.S. Pat. No. 8,784,810 | 4305 |
| | | | version 7 | SEQ ID NO: 26 | |
| AD83 | Aβ amyloids | Heavy chain | Humanized 12A11, | U.S. Pat. No. 8,784,810 | 4306 |
| | | | version 8 | SEQ ID NO: 27 | |
| AD84 | Aβ amyloids | Heavy chain | Humanized 3D6 | U.S. Pat. No. 8,784,810 | 4307 |
| | | | (Bapineuzumab), | SEQ ID NO: 5 | |
| | | | version 3 | | |
| AD85 | Aβ amyloids | Heavy chain | Humanized 12A11, | U.S. Pat. No. 8,784,810 | 4308 |
| | | | version 2 | SEQ ID NO: 9 | |
| AD86 | beta amyloid | Heavy chain | | US10476265 | 4309 |
| | | | | SEQ ID NO: 20 | |
| AD87 | beta amyloid | Heavy chain | (13C3) | US13319710 | 4310 |
| | | | | SEQ ID NO: 2 | |
| AD88 | beta amyloid | Heavy chain | | US13319710 | 4311 |
| | | | | SEQ ID NO: 26 | |
| AD89 | beta amyloid | Heavy chain | C2 | US20070166311 | 4312 |
| | | | | SEQ ID NO: 22 | |
| AD90 | beta amyloid | Heavy chain | Solanezumab | Immunogenetics | 4313 |
| | peptide | | | Information | |
| | | | | System; CHAIN | |
| | | | | ID NO: 9097_H. | |
| AD91 | beta amyloid | Heavy chain | Mature H1 | WO2007113172 | 4314 |
| | peptide | | | SEQ ID NO: 34 | |
| AD92 | beta amyloid | Heavy chain | Mature H3 | WO2007113172 | 4315 |
| | peptide | | | SEQ ID NO: 38 | |
| AD93 | beta-amyloid | Heavy chain | Aducanumab, | | 4316 |
| | | | BIIB0307 | | |
| AD94 | EAG1 | Heavy chain | chimeric ImAb3 | WO2006037604 | 4317 |
| | | | | SEQ ID NO: 12 | |
| AD95 | EAG1 | Heavy chain | chimeric ImAb4 | WO2006037604 | 4318 |
| | | | | SEQ ID NO: 16 | |
| AD96 | EAG1 | Heavy chain | HC-lmAb3-humVH3- | WO2006037604 | 4319 |
| | | | 72 | SEQ ID NO: 20 | |
| AD97 | EAG1 | Heavy chain | HC-lmAb4-humVH4- | WO2006037604 | 4320 |
| | | | 59 | SEQ ID NO: 24 | |
| AD98 | EAG1 | Heavy chain | HC-lmAb3-humVH3 | WO2006037604 | 4321 |
| | | | 23 | SEQ ID NO: 28 | |
| AD99 | EAG1 | Heavy chain | HC-lmAb3-humVH2 | WO2006037604 | 4322 |
| | | | 26 | SEQ ID NO: 32 | |
| AD100 | EAG1 | Heavy chain | HC-lmAb4-humVH1-3 | WO2006037604 | 4323 |
| | | | | SEQ ID NO: 36 | |
| AD101 | EAG1 | Heavy chain | ImAb4 | WO2006037604 | 4324 |
| | | | | SEQ ID NO: 4 | |
| AD102 | EAG1 | Heavy chain | ImAb3 | WO2006037604 | 4325 |
| | | | | SEQ ID NO: 8 | |
| AD103 | human beta- | Heavy chain | Ponezumab, PF- | U.S. Pat. No. 7,807,165 | 4326 |
| | amyloid | | 04360365, RN-1219, | SEQ ID NO: 11 | |
| | | | clone 9TL | | |
| AD104 | IGG1 Abeta | Heavy chain | Humanized C2 | US20090155249 | 4327 |
| | | | | SEQ ID NO: 16 | |
| AD105 | NOGO | Heavy chain | H6L13 FL | US20140147435 | 4328 |
| | | | | SEQ ID NO: 27 | |
| AD106 | NOGO | Heavy chain | H16L16 FL, H16L18 | US20140147435 | 4329 |
| | | | FL | SEQ ID NO: 31 | |
| AD107 | NOGO | Heavy chain | H18L16 FL | US20140147435 | 4330 |
| | | | | SEQ ID NO: 33 | |
| AD108 | NOGO | Heavy chain | H19L13 FL, H19L16 | US20140147435 | 4331 |
| | | | FL, H19L18 FL | SEQ ID NO: 92 | |
| AD109 | NOGO | Heavy chain | H20L13 FL, H20L16 | US20140147435 | 4332 |
| | | | FL, H20L18 FL | SEQ ID NO: 93 | |
| AD110 | NOGO | Heavy chain | H21L13 EL, H21L16 | US20140147435 | 4333 |
| | | | FL, H21L18 FL | SEQ ID NO: 94 | |
| AD111 | NOGO | Heavy chain | H25L13 FL, H25L16 | US20140147435 | 4334 |
| | | | FL, H25L18 FL | SEQ ID NO: 98 | |
| AD112 | Nogo receptor-1 | Heavy chain | 5B10 | US20090215691 | 4335 |
| | | | | SEQ ID NO: 16 | |
| AD113 | Nogo receptor-1 | Heavy chain | 5B10 | US20090215691 | 4336 |
| | | | | SEQ ID NO: 18 | |
| AD114 | PrPC and/or | Heavy chain | | US20150166668 | 4337 |
| | PrPSc | | | SEQ ID NO: 10 | |
| AD115 | PrPC and/or | Heavy chain | | U.S. Pat. No. 8,852,587 | 4338 |
| | PrPSc | | | SEQ ID NO: 4 | |
| AD116 | tau | Heavy chain | VH antibody | US20150252102 | 4339 |
| | | | | SEQ ID NO: 93 | |
| AD117 | tau | Heavy chain | hACl-36-3A8 Ab1 | WO2013151762 | 4340 |
| | | | | SEQ ID NO: 24 | |
| AD118 | tau | Heavy chain | hACl-36-3B8 Ab1 | WO2013151762 | 4341 |
| | | | | SEQ ID NO: 25 | |
| AD119 | tau | Heavy chain | hACl-36-3A8 Ab1.v2 | WO2013151762 | 4342 |
| | | | | SEQ ID NO: 26 | |
| AD120 | tau | Heavy chain | hACl-36-3A8 Ab1.v3 | WO2013151762 | 4343 |
| | | | | SEQ ID NO: 27 | |
| AD121 | tau | Heavy chain | hACl-36-3A8 Ab1.v4 | WO2013151762 | 4344 |
| | | | | SEQ ID NO: 28 | |
| AD122 | tau | Heavy chain | hACl-36-3B8 Ab1.v2 | WO2013151762 | 4345 |
| | | | | SEQ ID NO: 29 | |
| AD123 | tau | Heavy chain | hACl-36-3B8 Ab1.v3 | WO2013151762 | 4346 |
| | | | | SEQ ID NO: 30 | |
| AD124 | tau | Heavy chain | hACl-36-3B8 Ab1.v4 | WO2013151762 | 4347 |
| | | | | SEQ ID NO: 31 | |
| AD125 | tau | Heavy chain | IPN001 | U.S. Pat. No. 8,980,271 | 4348 |
| | | | | SEQ ID NO: 14 | |
| AD126 | tau | Heavy chain | IPN002 | U.S. Pat. No. 8,980,271 | 4349 |
| | | | | SEQ ID NO: 16 | |
| AD127 | tau | Heavy chain | ACl-36-3A8-Ab1 and | US20150175682 | 4350 |
| | | | hACl-36-2B6-Ab1 | SEQ ID NO: 16 | |
| AD128 | tau | Heavy chain | hACl-36-3A8-Ab1 | US20150175682 | 4351 |
| | | | and hACl-36-2B6-Ab1 | SEQ ID NO: 17 | |
| AD129 | tau | Heavy chain | hACl-36-2B6-Ab1 | US20150175682 | 4352 |
| | | | (IgG4) | SEQ ID NO: 25 | |
| AD130 | tau | Heavy chain | hACl-36-3A8-Ab1.v2 | US20150175682 | 4353 |
| | | | (IgG4) | SEQ ID NO: 26 | |
| AD131 | tau | Heavy chain | hACl-36-3A8-Ab1.v3 | US20150175682 | 4354 |
| | | | (IgG1) | SEQ ID NO: 27 | |
| AD132 | tau | Heavy chain | hACl-36-3A8-Ab1.v4 | US20150175682 | 4355 |
| | | | (IgG1 N297G) | SEQ ID NO: 28 | |
| AD133 | tau | Heavy chain | hACl-36-2B6-Ab1.v2 | US20150175682 | 4356 |
| | | | (IgG4) | SEQ ID NO: 29 | |
| AD134 | tau | Heavy chain | hACl-36-2B6-Ab1.v3 | US20150175682 | 4357 |
| | | | (IgG1) | SEQ ID NO: 30 | |
| AD135 | tau | Heavy chain | hACl-36-2B6-Ab1.v4 | US20150175682 | 4358 |
| | | | (IgG1 N297G) | SEQ ID NO: 31 | |
| AD136 | TrkA | Heavy chain | BXhVH1 | WO2009098238 | 4359 |
| | | | | SEQ ID NO: 1 | |
| AD137 | TrkA | Heavy chain | mVHEP | WO2009098238 | 4360 |
| | | | | SEQ ID NO: 15 | |
| AD138 | TrkA | Heavy chain | BXhVH2 | WO2009098238 | 4361 |
| | | | | SEQ ID NO: 2 | |
| AD139 | TrkA | Heavy chain | BXhVH3 | WO2009098238 | 4362 |
| | | | | SEQ ID NO: 3 | |
| AD140 | TrkA | Heavy chain | BXhVH4 | WO2009098238 | 4363 |
| | | | | SEQ ID NO: 4 | |
| AD141 | TrkA | Heavy chain | BXhVH5 | WO2009098238 | 4364 |
| | | | | SEQ ID NO: 5 | |
| AD142 | TrkA | Heavy chain | HUVHWOV | WO2009098238 | 4365 |
| | | | | SEQ ID NO: 6 | |
| AD143 | trk-C (NT-3 | Heavy chain | 2250 | U.S. Pat. No. 7,615,383 | 4366 |
| | trkC ligand) | | | SEQ ID NO: 42 | |
| AD144 | trk-C (NT-3 | Heavy chain | 2253 | U.S. Pat. No. 7,615,383 | 4367 |
| | trkC ligand) | | | SEQ ID NO: 43 | |
| AD145 | trk-C (NT-3 | Heavy chain | 2256 | U.S. Pat. No. 7,615,383 | 4368 |
| | trkC ligand) | | | SEQ ID NO: 44 | |
| AD146 | trk-C (NT-3 | Heavy chain | 6.1.2 | U.S. Pat. No. 7,615,383 | 4369 |
| | trkC ligand) | | | SEQ ID NO: 45 | |
| AD147 | trk-C (NT-3 | Heavy chain | 6.4.1 | U.S. Pat. No. 7,615,383 | 4370 |
| | trkC ligand) | | | SEQ ID NO: 46 | |
| AD148 | trk-C (NT-3 | Heavy chain | 2345 | U.S. Pat. No. 7,615,383 | 4371 |
| | trkC ligand) | | | SEQ ID NO: 47 | |
| AD149 | trk-C (NT-3 | Heavy chain | 2349 | U.S. Pat. No. 7,615,383 | 4372 |
| | trkC ligand) | | | SEQ ID NO: 48 | |
| AD150 | | Heavy chain | Crenezuma heavy | | 4373 |
| | | | CHAIN | | |
| AD151 | | Heavy chain | Gantenerumab heavy | | 4374 |
| | | | chain | | |
| AD152 | | Heavy chain | Ponezumab heavy | | 4375 |
| | | | CHAIN | | |
| AD153 | | Heavy chain | Solanezumab heavy | | 4376 |
| | | | CHAIN | | |
| AD154 | Aβ amyloid | Heavy chain | | WO2006066049 | 4377 |
| | | consensus | | SEQ ID NO: 21 | |
| | | sequence | | | |
| AD155 | Aβ amyloid | Heavy chain | | WO2006066049 | 4378 |
| | | consensus | | SEQ ID NO: 22 | |
| | | sequence | | | |
| AD156 | Aβ amyloid | Heavy chain | | WO2006066049 | 4379 |
| | | consensus | | SEQ ID NO: 23 | |
| | | sequence | | | |
| AD157 | Aβ amyloid | Heavy chain | | WO2006066049 | 4380 |
| | | consensus | | SEQ ID NO: 24 | |
| | | sequence | | | |
| AD158 | Aβ amyloid | Heavy chain | | WO2006066049 | 4381 |
| | | consensus | | SEQ ID NO: 25 | |
| | | sequence | | | |
| AD159 | Aβ amyloid | Heavy chain | | WO2006066049 | 4382 |
| | | consensus | | SEQ ID NO: 26 | |
| | | sequence | | | |
| AD160 | Aβ amyloid | Heavy chain | | WO2006066049 | 4383 |
| | | consensus | | SEQ ID NO: 27 | |
| | | sequence | | | |
| AD161 | BACE1 | Heavy chain | Nanobody B1 | WO2009121948 | 4384 |
| | | variable | | SEQ ID NO: 1 | |
| | | (nanobody) | | | |
| AD162 | BACE10 | Heavy chain | Nanobody B15 | WO2009121948 | 4385 |
| | | variable | | SEQ ID NO: 10 | |
| | | (nanobody) | | | |
| AD163 | BACE11 | Heavy chain | Nanobody B16 | WO2009121948 | 4386 |
| | | variable | | SEQ ID NO: 11 | |
| | | (nanobody) | | | |
| AD164 | BACE12 | Heavy chain | Nanobody B21 | WO2009121948 | 4387 |
| | | variable | | SEQ ID NO: 12 | |
| | | (nanobody) | | | |
| AD165 | BACE13 | Heavy chain | Nanobody B25 | WO2009121948 | 4388 |
| | | variable | | SEQ ID NO: 13 | |
| | | (nanobody) | | | |
| AD166 | BACE14 | Heavy chain | Nanobody B26 | WO2009121948 | 4389 |
| | | variable | | SEQ ID NO: 14 | |
| | | (nanobody) | | | |
| AD167 | BACE15 | Heavy chain | Nanobody 1B3 | WO2009121948 | 4390 |
| | | variable | | SEQ ID NO: 15 | |
| | | (nanobody) | | | |
| AD168 | BACE16 | Heavy chain | Nanobody 10C2 | WO2009121948 | 4391 |
| | | variable | | SEQ ID NO: 16 | |
| | | (nanobody) | | | |
| AD169 | BACE17 | Heavy chain | Nanobody 12B6 | WO2009121948 | 4392 |
| | | variable | | SEQ ID NO: 17 | |
| | | (nanobody) | | | |
| AD170 | BACE18 | Heavy chain | Nanobody 10B5 | WO2009121948 | 4393 |
| | | variable | | SEQ ID NO: 18 | |
| | | (nanobody) | | | |
| AD171 | BACE19 | Heavy chain | Nanobody 13A5 | WO2009121948 | 4394 |
| | | variable | | SEQ ID NO: 19 | |
| | | (nanobody) | | | |
| AD172 | BACE2 | Heavy chain | Nanobody B2 | WO2009121948 | 4395 |
| | | variable | | SEQ ID NO: 2 | |
| | | (nanobody) | | | |
| AD173 | BACE20 | Heavy chain | Nanobody 2C6 | WO2009121948 | 4396 |
| | | variable | | SEQ ID NO: 20 | |
| | | (nanobody) | | | |
| AD174 | BACE21 | Heavy chain | Nanobody 6A4 | WO2009121948 | 4397 |
| | | variable | | SEQ ID NO: 21 | |
| | | (nanobody) | | | |
| AD175 | BACE22 | Heavy chain | Nanobody 10C4 | WO2009121948 | 4398 |
| | | variable | | SEQ ID NO: 22 | |
| | | (nanobody) | | | |
| AD176 | BACE23 | Heavy chain | Nanobody 13B6 | WO2009121948 | 4399 |
| | | variable | | SEQ ID NO: 23 | |
| | | (nanobody) | | | |
| AD177 | BACE24 | Heavy chain | Nanobody 1A4 | WO2009121948 | 4400 |
| | | variable | | SEQ ID NO: 24 | |
| | | (nanobody) | | | |
| AD178 | BACE25 | Heavy chain | Nanobody 2B6 | WO2009121948 | 4401 |
| | | variable | | SEQ ID NO: 25 | |
| | | (nanobody) | | | |
| AD179 | BACE26 | Heavy chain | Nanobody 4A2 | WO2009121948 | 4402 |
| | | variable | | SEQ ID NO: 26 | |
| | | (nanobody) | | | |
| AD180 | BACE27 | Heavy chain | Nanobody 1 D4 | WO2009121948 | 4403 |
| | | variable | | SEQ ID NO: 27 | |
| | | (nanobody) | | | |
| AD181 | BACE28 | Heavy chain | Nanobody 9D3 | WO2009121948 | 4404 |
| | | variable | | SEQ ID NO: 28 | |
| | | (nanobody) | | | |
| AD182 | BACE3 | Heavy chain | Nanobody B3 | WO2009121948 | 4405 |
| | | variable | | SEQ ID NO: 3 | |
| | | (nanobody) | | | |
| AD183 | BACE4 | Heavy chain | Nanobody B5 | WO2009121948 | 4406 |
| | | variable | | SEQ ID NO: 4 | |
| | | (nanobody) | | | |
| AD184 | BACE5 | Heavy chain | Nanobody B8 | WO2009121948 | 4407 |
| | | variable | | SEQ ID NO: 5 | |
| | | (nanobody) | | | |
| AD185 | BACE6 | Heavy chain | Nanobody B9 | WO2009121948 | 4408 |
| | | variable | | SEQ ID NO: 6 | |
| | | (nanobody) | | | |
| AD186 | BACE7 | Heavy chain | Nanobody B10 | WO2009121948 | 4409 |
| | | variable | | SEQ ID NO: 7 | |
| | | (nanobody) | | | |
| AD187 | BACE8 | Heavy chain | Nanobody B11 | WO2009121948 | 4410 |
| | | variable | | SEQ ID NO: 8 | |
| | | (nanobody) | | | |
| AD188 | BACE9 | Heavy chain | Nanobody B12 | WO2009121948 | 4411 |
| | | variable | | SEQ ID NO: 9 | |
| | | (nanobody) | | | |
| AD189 | amyloid protein | Heavy chain | IG GAMMA-4 | US20100150906 | 4412 |
| | | constant region | CHAIN C REGION | SEQ ID NO: 17 | |
| | | | modified | | |
| AD190 | tau | Heavy chain | hACl-36-3A8-Ab1 | US20150175682 | 4413 |
| | | constant region | and hACl-36-2B6-Ab1 | SEQ ID NO: 14 | |
| AD191 | ApoE | Heavy chain | 2e8 Fab | Trakhanov, S. et al. | 4414 |
| | | fragment | | “Structure of a | |
| | | | | monoclonal 2E8 | |
| | | | | Fab antibody | |
| | | | | fragment specific | |
| | | | | for the low-density | |
| | | | | lipoprotein- | |
| | | | | receptor binding | |
| | | | | region of | |
| | | | | apolipoprotein E | |
| | | | | refined at 1.9 A”, | |
| | | | | Acta Crystallogr. D | |
| | | | | Biol. Crystallogr. | |
| | | | | 55 (PT 1), 122-128 | |
| | | | | (1999), NCBI | |
| | | | | Accession # | |
| | | | | 12E8 P | |
| AD192 | many-growth | Heavy chain fusion | H19L13, H19L16, | U.S. Pat. No. 8,053,569 | 4415 |
| | factors | protein | H19L18, H19L14, | SEQ ID NO: 25 | |
| | | | H19L15, H19L17, | | |
| | | | H19L6, H19L11 | | |
| AD193 | many-growth | Heavy chain fusion | H20L13, H20L16, | U.S. Pat. No. 8,053,569 | 4416 |
| | factors | protein | H20L18, H20L14, | SEQ ID NO: 28 | |
| | | | H20L15, H20L17, | | |
| | | | H20L6, H20L11 | | |
| AD194 | many-growth | Heavy chain fusion | H22L13, H22L16, | U.S. Pat. No. 8,053,569 | 4417 |
| | factors | protein | H22L18, H22L14, | SEQ ID NO: 34 | |
| | | | H22L15, H22L17, | | |
| | | | H22L6, H22L11 | | |
| AD195 | many-growth | Heavy chain fusion | H5L11, H6L11, | U.S. Pat. No. 8,053,569 | 4418 |
| | factors | protein | H14L11, H15L11, | SEQ ID NO: 24 | |
| | | | H16L11, H17L11, | | |
| | | | H18L11, H19L11, | | |
| | | | H20L11, H21L11, | | |
| | | | H22L11, H23L11, | | |
| | | | H24L11, H25L11, | | |
| | | | H700L11 | | |
| AD196 | NOGO | Heavy chain | 2A10 construct | WO2007003421 | 4419 |
| | | humanized | | SEQ ID NO: 79 | |
| | | construct H1 | | | |
| AD197 | NOGO | Heavy chain | 2A10 construct | WO2007003421 | 4420 |
| | | humanized | | SEQ ID NO: 29 | |
| | | construct H14 | | | |
| AD198 | NOGO | Heavy chain | 2A10 construct | WO2007003421 | 4421 |
| | | humanized | | SEQ ID NO: 30 | |
| | | construct H15 | | | |
| AD199 | NOGO | Heavy chain | 2A10 construct | WO2007003421 | 4422 |
| | | humanized | | SEQ ID NO: 31 | |
| | | construct H16 | | | |
| AD200 | NOGO | Heavy chain | 2A10 construct | WO2007003421 | 4423 |
| | | humanized | | SEQ ID NO: 32 | |
| | | construct H17 | | | |
| AD201 | NOGO | Heavy chain | 2A10 construct | WO2007003421 | 4424 |
| | | humanized | | SEQ ID NO: 33 | |
| | | construct H18 | | | |
| AD202 | NOGO | Heavy chain | 2A10 construct | WO2007003421 | 4425 |
| | | humanized | | SEQ ID NO: 92 | |
| | | construct H19 | | | |
| AD203 | NOGO | Heavy chain | 2A10 construct | WO2007003421 | 4426 |
| | | humanized | | SEQ ID NO: 93 | |
| | | construct H20 | | | |
| AD204 | NOGO | Heavy chain | 2A10 construct | WO2007003421 | 4427 |
| | | humanized | | SEQ ID NO: 94 | |
| | | construct H21 | | | |
| AD205 | NOGO | Heavy chain | 2A10 construct | WO2007003421 | 4428 |
| | | humanized | | SEQ ID NO: 95 | |
| | | construct H22 | | | |
| AD206 | NOGO | Heavy chain | 2A10 construct | WO2007003421 | 4429 |
| | | humanized | | SEQ ID NO: 96 | |
| | | construct H23 | | | |
| AD207 | NOGO | Heavy chain | 2A10 construct | WO2007003421 | 4430 |
| | | humanized | | SEQ ID NO: 97 | |
| | | construct H24 | | | |
| AD208 | NOGO | Heavy chain | 2A10 construct | WO2007003421 | 4431 |
| | | humanized | | SEQ ID NO: 98 | |
| | | construct H25 | | | |
| AD209 | NOGO | Heavy chain | 2A10 construct | WO2007003421 | 4432 |
| | | humanized | | SEQ ID NO: 26 | |
| | | construct H5 | | | |
| AD210 | NOGO | Heavy chain | 2A10 construct | WO2007003421 | 4433 |
| | | humanized | | SEQ ID NO: 27 | |
| | | construct H6 | | | |
| AD211 | NOGO | Heavy chain | 2A10 construct | WO2007003421 | 4434 |
| | | humanized | | SEQ ID NO: 28 | |
| | | construct H700 | | | |
| AD212 | RTN4 (NOGO) | Heavy chain IgG4, | Atinumab | U.S. Pat. No. 8,163,285 | 4435 |
| | | immunomodultator | | SEQ ID NO: 24 | |
| AD213 | tau | Heavy chain | ch4E4 | US20150252102 | 4436 |
| | | mature | | SEQ ID NO: 20 | |
| AD214 | tau | Heavy chain | ch4E4(N30Q) | US20150252102 | 4437 |
| | | mature | | SEQ ID NO: 22 | |
| AD215 | A beta | Heavy chain | IR-072 | U.S. Pat. No. 8,858,949 | 4438 |
| | oligomers | variable region | | SEQ ID NO: 1010 | |
| AD216 | A beta | Heavy chain | IR-011 | U.S. Pat. No. 8,858,949 | 4439 |
| | oligomers | variable region | | SEQ ID NO: 114 | |
| AD217 | A beta | Heavy chain | IR-030 | U.S. Pat. No. 8,858,949 | 4440 |
| | oligomers | variable region | | SEQ ID NO: 370 | |
| AD218 | A beta | Heavy chain | IR-031 | U.S. Pat. No. 8,858,949 | 4441 |
| | oligomers | variable region | | SEQ ID NO: 386 | |
| AD219 | A beta | Heavy chain | IR-032 | U.S. Pat. No. 8,858,949 | 4442 |
| | oligomers | variable region | | SEQ ID NO: 402 | |
| AD220 | A beta | Heavy chain | IR-033 | U.S. Pat. No. 8,858,949 | 4443 |
| | oligomers | variable region | | SEQ ID NO: 418 | |
| AD221 | A beta | Heavy chain | IR-034 | U.S. Pat. No. 8,858,949 | 4444 |
| | oligomers | variable region | | SEQ ID NO: 434 | |
| AD222 | A beta | Heavy chain | IR-035 | U.S. Pat. No. 8,858,949 | 4445 |
| | oligomers | variable region | | SEQ ID NO: 450 | |
| AD223 | A beta | Heavy chain | IR-036 | U.S. Pat. No. 8,858,949 | 4446 |
| | oligomers | variable region | | SEQ ID NO: 466 | |
| AD224 | A beta | Heavy chain | IR-037 | U.S. Pat. No. 8,858,949 | 4447 |
| | oligomers | variable region | | SEQ ID NO: 482 | |
| AD225 | A beta | Heavy chain | IR-038 | U.S. Pat. No. 8,858,949 | 4448 |
| | oligomers | variable region | | SEQ ID NO: 498 | |
| AD226 | A beta | Heavy chain | IR-005 | U.S. Pat. No. 8,858,949 | 4449 |
| | oligomers | variable region | | SEQ ID NO: 50 | |
| AD227 | A beta | Heavy chain | IR-081 | U.S. Pat. No. 8,858,949 | 4450 |
| | oligomers | variable region | | SEQ ID NO: 1154 | |
| AD228 | A beta | Heavy chain | IR-039 | U.S. Pat. No. 8,858,949 | 4451 |
| | oligomers | variable region | | SEQ ID NO: 514 | |
| AD229 | A beta | Heavy chain | IR-040 | U.S. Pat. No. 8,858,949 | 4452 |
| | oligomers | variable region | | SEQ ID NO: 530 | |
| AD230 | A beta | Heavy chain | IR-041 | U.S. Pat. No. 8,858,949 | 4453 |
| | oligomers | variable region | | SEQ ID NO: 546 | |
| AD231 | A beta | Heavy chain | IR-043 | U.S. Pat. No. 8,858,949 | 4454 |
| | oligomers | variable region | | SEQ ID NO: 562 | |
| AD232 | A beta | Heavy chain | IR-044 | U.S. Pat. No. 8,858,949 | 4455 |
| | oligomers | variable region | | SEQ ID NO: 578 | |
| AD233 | A beta | Heavy chain | IR-045 | U.S. Pat. No. 8,858,949 | 4456 |
| | oligomers | variable region | | SEQ ID NO: 594 | |
| AD234 | A beta | Heavy chain | IR-046 | U.S. Pat. No. 8,858,949 | 4457 |
| | oligomers | variable region | | SEQ ID NO: 610 | |
| AD235 | A beta | Heavy chain | IR-048 | U.S. Pat. No. 8,858,949 | 4458 |
| | oligomers | variable region | | SEQ ID NO: 626 | |
| AD236 | A beta | Heavy chain | IR-049 | U.S. Pat. No. 8,858,949 | 4459 |
| | oligomers | variable region | | SEQ ID NO: 642 | |
| AD237 | A beta | Heavy chain | IR-050 | U.S. Pat. No. 8,858,949 | 4460 |
| | oligomers | variable region | | SEQ ID NO: 658 | |
| AD238 | A beta | Heavy chain | IR-082 | U.S. Pat. No. 8,858,949 | 4461 |
| | oligomers | variable region | | SEQ ID NO: 1170 | |
| AD239 | A beta | Heavy chain | IR-006 | U.S. Pat. No. 8,858,949 | 4462 |
| | oligomers | variable region | | SEQ ID NO: 66 | |
| AD240 | A beta | Heavy chain | IR-051 | U.S. Pat. No. 8,858,949 | 4463 |
| | oligomers | variable region | | SEQ ID NO: 674 | |
| AD241 | A beta | Heavy chain | IR-052 | U.S. Pat. No. 8,858,949 | 4464 |
| | oligomers | variable region | | SEQ ID NO: 690 | |
| AD242 | A beta | Heavy chain | IR-053 | U.S. Pat. No. 8,858,949 | 4465 |
| | oligomers | variable region | | SEQ ID NO: 706 | |
| AD243 | A beta | Heavy chain | IR-054 | U.S. Pat. No. 8,858,949 | 4466 |
| | oligomers | variable region | | SEQ ID NO: 722 | |
| AD244 | A beta | Heavy chain | IR-055 | U.S. Pat. No. 8,858,949 | 4467 |
| | oligomers | variable region | | SEQ ID NO: 738 | |
| AD245 | A beta | Heavy chain | IR-056 | U.S. Pat. No. 8,858,949 | 4468 |
| | oligomers | variable region | | SEQ ID NO: 754 | |
| AD246 | A beta | Heavy chain | IR-057 | U.S. Pat. No. 8,858,949 | 4469 |
| | oligomers | variable region | | SEQ ID NO: 770 | |
| AD247 | A beta | Heavy chain | IR-058 | U.S. Pat. No. 8,858,949 | 4470 |
| | oligomers | variable region | | SEQ ID NO: 786 | |
| AD248 | A beta | Heavy chain | IR-059 | U.S. Pat. No. 8,858,949 | 4471 |
| | oligomers | variable region | | SEQ ID NO: 802 | |
| AD249 | A beta | Heavy chain | IR-083 | U.S. Pat. No. 8,858,949 | 4472 |
| | oligomers | variable region | | SEQ ID NO: 1186 | |
| AD250 | A beta | Heavy chain | IR-060 | U.S. Pat. No. 8,858,949 | 4473 |
| | oligomers | variable region | | SEQ ID NO: 818 | |
| AD251 | A beta | Heavy chain | IR-007 | U.S. Pat. No. 8,858,949 | 4474 |
| | oligomers | variable region | | SEQ ID NO: 82 | |
| AD252 | A beta | Heavy chain | IR-061 | U.S. Pat. No. 8,858,949 | 4475 |
| | oligomers | variable region | | SEQ ID NO: 834 | |
| AD253 | A beta | Heavy chain | IR-062 | U.S. Pat. No. 8,858,949 | 4476 |
| | oligomers | variable region | | SEQ ID NO: 850 | |
| AD254 | A beta | Heavy chain | IR-063 | U.S. Pat. No. 8,858,949 | 4477 |
| | oligomers | variable region | | SEQ ID NO: 866 | |
| AD255 | A beta | Heavy chain | IR-064 | U.S. Pat. No. 8,858,949 | 4478 |
| | oligomers | variable region | | SEQ ID NO: 882 | |
| AD256 | A beta | Heavy chain | IR-065 | U.S. Pat. No. 8,858,949 | 4479 |
| | oligomers | variable region | | SEQ ID NO: 898 | |
| AD257 | A beta | Heavy chain | IR-066 | U.S. Pat. No. 8,858,949 | 4480 |
| | oligomers | variable region | | SEQ ID NO: 914 | |
| AD258 | A beta | Heavy chain | IR-067 | U.S. Pat. No. 8,858,949 | 4481 |
| | oligomers | variable region | | SEQ ID NO: 930 | |
| AD259 | A beta | Heavy chain | IR-068 | U.S. Pat. No. 8,858,949 | 4482 |
| | oligomers | variable region | | SEQ ID NO: 946 | |
| AD260 | A beta | Heavy chain | IR-084 | U.S. Pat. No. 8,858,949 | 4483 |
| | oligomers | variable region | | SEQ ID NO: 1202 | |
| AD261 | A beta | Heavy chain | IR-069 | U.S. Pat. No. 8,858,949 | 4484 |
| | oligomers | variable region | | SEQ ID NO: 962 | |
| AD262 | A beta | Heavy chain | IR-070 | U.S. Pat. No. 8,858,949 | 4485 |
| | oligomers | variable region | | SEQ ID NO: 978 | |
| AD263 | A beta | Heavy chain | IR-008 | U.S. Pat. No. 8,858,949 | 4486 |
| | oligomers | variable region | | SEQ ID NO: 98 | |
| AD264 | A beta | Heavy chain | IR-071 | U.S. Pat. No. 8,858,949 | 4487 |
| | oligomers | variable region | | SEQ ID NO: 994 | |
| AD265 | A beta | Heavy chain | IR-001 | U.S. Pat. No. 8,858,949 | 4488 |
| | oligomers | variable region | | SEQ ID NO: 2 | |
| AD266 | A beta | Heavy chain | IR-161 | U.S. Pat. No. 8,858,949 | 4489 |
| | oligomers | variable region | | SEQ ID NO: 2878 | |
| AD267 | A beta | Heavy chain | IR-085 | U.S. Pat. No. 8,858,949 | 4490 |
| | oligomers | variable region | | SEQ ID NO: 1218 | |
| AD268 | A beta | Heavy chain | IR-086 | U.S. Pat. No. 8,858,949 | 4491 |
| | oligomers | variable region | | SEQ ID NO: 1234 | |
| AD269 | A beta | Heavy chain | IR-087 | U.S. Pat. No. 8,858,949 | 4492 |
| | oligomers | variable region | | SEQ ID NO: 1250 | |
| AD270 | A beta | Heavy chain | IR-088 | U.S. Pat. No. 8,858,949 | 4493 |
| | oligomers | variable region | | SEQ ID NO: 1266 | |
| AD271 | A beta | Heavy chain | IR-089 | U.S. Pat. No. 8,858,949 | 4494 |
| | oligomers | variable region | | SEQ ID NO: 1282 | |
| AD272 | A beta | Heavy chain | IR-073 | U.S. Pat. No. 8,858,949 | 4495 |
| | oligomers | variable region | | SEQ ID NO: 1026 | |
| AD273 | A beta | Heavy chain | IR-090 | U.S. Pat. No. 8,858,949 | 4496 |
| | oligomers | variable region | | SEQ ID NO: 1298 | |
| AD274 | A beta | Heavy chain | IR-012 | U.S. Pat. No. 8,858,949 | 4497 |
| | oligomers | variable region | | SEQ ID NO: 130 | |
| AD275 | A beta | Heavy chain | IR-092 | U.S. Pat. No. 8,858,949 | 4498 |
| | oligomers | variable region | | SEQ ID NO: 1314 | |
| AD276 | A beta | Heavy chain | IR-093 | U.S. Pat. No. 8,858,949 | 4499 |
| | oligomers | variable region | | SEQ ID NO: 1330 | |
| AD277 | A beta | Heavy chain | IR-094 | U.S. Pat. No. 8,858,949 | 4500 |
| | oligomers | variable region | | SEQ ID NO: 1346 | |
| AD278 | A beta | Heavy chain | IR-095 | U.S. Pat. No. 8,858,949 | 4501 |
| | oligomers | variable region | | SEQ ID NO: 1362 | |
| AD279 | A beta | Heavy chain | IR-097 | U.S. Pat. No. 8,858,949 | 4502 |
| | oligomers | variable region | | SEQ ID NO: 1378 | |
| AD280 | A beta | Heavy chain | IR-098 | U.S. Pat. No. 8,858,949 | 4503 |
| | oligomers | variable region | | SEQ ID NO: 1394 | |
| AD281 | A beta | Heavy chain | IR-100 | U.S. Pat. No. 8,858,949 | 4504 |
| | oligomers | variable region | | SEQ ID NO: 1410 | |
| AD282 | A beta | Heavy chain | IR-101 | U.S. Pat. No. 8,858,949 | 4505 |
| | oligomers | variable region | | SEQ ID NO: 1426 | |
| AD283 | A beta | Heavy chain | IR-074 | U.S. Pat. No. 8,858,949 | 4506 |
| | oligomers | variable region | | SEQ ID NO: 1042 | |
| AD284 | A beta | Heavy chain | IR-102 | U.S. Pat. No. 8,858,949 | 4507 |
| | oligomers | variable region | | SEQ ID NO: 1442 | |
| AD285 | A beta | Heavy chain | IR-104 | U.S. Pat. No. 8,858,949 | 4508 |
| | oligomers | variable region | | SEQ ID NO: 1458 | |
| AD286 | A beta | Heavy chain | IR-013 | U.S. Pat. No. 8,858,949 | 4509 |
| | oligomers | variable region | | SEQ ID NO: 146 | |
| AD287 | A beta | Heavy chain | IR-105 | U.S. Pat. No. 8,858,949 | 4510 |
| | oligomers | variable region | | SEQ ID NO: 1474 | |
| AD288 | A beta | Heavy chain | IR-106 | U.S. Pat. No. 8,858,949 | 4511 |
| | oligomers | variable region | | SEQ ID NO: 1490 | |
| AD289 | A beta | Heavy chain | IR-107 | U.S. Pat. No. 8,858,949 | 4512 |
| | oligomers | variable region | | SEQ ID NO: 1506 | |
| AD290 | A beta | Heavy chain | IR-108 | U.S. Pat. No. 8,858,949 | 4513 |
| | oligomers | variable region | | SEQ ID NO: 1522 | |
| AD291 | A beta | Heavy chain | IR-109 | U.S. Pat. No. 8,858,949 | 4514 |
| | oligomers | variable region | | SEQ ID NO: 1538 | |
| AD292 | A beta | Heavy chain | IR-110 | U.S. Pat. No. 8,858,949 | 4515 |
| | oligomers | variable region | | SEQ ID NO: 1554 | |
| AD293 | A beta | Heavy chain | IR-112 | U.S. Pat. No. 8,858,949 | 4516 |
| | oligomers | variable region | | SEQ ID NO: 1570 | |
| AD294 | A beta | Heavy chain | IR-075 | U.S. Pat. No. 8,858,949 | 4517 |
| | oligomers | variable region | | SEQ ID NO: 1058 | |
| AD295 | A beta | Heavy chain | IR-114 | U.S. Pat. No. 8,858,949 | 4518 |
| | oligomers | variable region | | SEQ ID NO: 1586 | |
| AD296 | A beta | Heavy chain | IR-115 | U.S. Pat. No. 8,858,949 | 4519 |
| | oligomers | variable region | | SEQ ID NO: 1602 | |
| AD297 | A beta | Heavy chain | IR-116 | U.S. Pat. No. 8,858,949 | 4520 |
| | oligomers | variable region | | SEQ ID NO: 1618 | |
| AD298 | A beta | Heavy chain | IR-014 | U.S. Pat. No. 8,858,949 | 4521 |
| | oligomers | variable region | | SEQ ID NO: 162 | |
| AD299 | A beta | Heavy chain | IR-117 | U.S. Pat. No. 8,858,949 | 4522 |
| | oligomers | variable region | | SEQ ID NO: 1634 | |
| AD300 | A beta | Heavy chain | IR-118 | U.S. Pat. No. 8,858,949 | 4523 |
| | oligomers | variable region | | SEQ ID NO: 1650 | |
| AD301 | A beta | Heavy chain | IR-119 | U.S. Pat. No. 8,858,949 | 4524 |
| | oligomers | variable region | | SEQ ID NO: 1666 | |
| AD302 | A beta | Heavy chain | IR-120 | U.S. Pat. No. 8,858,949 | 4525 |
| | oligomers | variable region | | SEQ ID NO: 1682 | |
| AD303 | A beta | Heavy chain | IR-121 | U.S. Pat. No. 8,858,949 | 4526 |
| | oligomers | variable region | | SEQ ID NO: 1698 | |
| AD304 | A beta | Heavy chain | IR-122 | U.S. Pat. No. 8,858,949 | 4527 |
| | oligomers | variable region | | SEQ ID NO: 1714 | |
| AD305 | A beta | Heavy chain | IR-076 | U.S. Pat. No. 8,858,949 | 4528 |
| | oligomers | variable region | | SEQ ID NO: 1074 | |
| AD306 | A beta | Heavy chain | IR-123 | U.S. Pat. No. 8,858,949 | 4529 |
| | oligomers | variable region | | SEQ ID NO: 1730 | |
| AD307 | A beta | Heavy chain | IR-124 | U.S. Pat. No. 8,858,949 | 4530 |
| | oligomers | variable region | | SEQ ID NO: 1746 | |
| AD308 | A beta | Heavy chain | IR-125 | U.S. Pat. No. 8,858,949 | 4531 |
| | oligomers | variable region | | SEQ ID NO: 1762 | |
| AD309 | A beta | Heavy chain | IR-126 | U.S. Pat. No. 8,858,949 | 4532 |
| | oligomers | variable region | | SEQ ID NO: 1778 | |
| AD310 | A beta | Heavy chain | IR-015 | U.S. Pat. No. 8,858,949 | 4533 |
| | oligomers | variable region | | SEQ ID NO: 178 | |
| AD311 | A beta | Heavy chain | IR-127 | U.S. Pat. No. 8,858,949 | 4534 |
| | oligomers | variable region | | SEQ ID NO: 1794 | |
| AD312 | A beta | Heavy chain | IR-002 | U.S. Pat. No. 8,858,949 | 4535 |
| | oligomers | variable region | | SEQ ID NO: 18 | |
| AD313 | A beta | Heavy chain | IR-128 | U.S. Pat. No. 8,858,949 | 4536 |
| | oligomers | variable region | | SEQ ID NO: 1810 | |
| AD314 | A beta | Heavy chain | IR-129 | U.S. Pat. No. 8,858,949 | 4537 |
| | oligomers | variable region | | SEQ ID NO: 1826 | |
| AD315 | A beta | Heavy chain | IR-131 | U.S. Pat. No. 8,858,949 | 4538 |
| | oligomers | variable region | | SEQ ID NO: 1842 | |
| AD316 | A beta | Heavy chain | IR-077 | U.S. Pat. No. 8,858,949 | 4539 |
| | oligomers | variable region | | SEQ ID NO: 1090 | |
| AD317 | A beta | Heavy chain | IR-132 | U.S. Pat. No. 8,858,949 | 4540 |
| | oligomers | variable region | | SEQ ID NO: 1858 | |
| AD318 | A beta | Heavy chain | IR-133 | U.S. Pat. No. 8,858,949 | 4541 |
| | oligomers | variable region | | SEQ ID NO: 1874 | |
| AD319 | A beta | Heavy chain | IR-134 | U.S. Pat. No. 8,858,949 | 4542 |
| | oligomers | variable region | | SEQ ID NO: 1890 | |
| AD320 | A beta | Heavy chain | IR-135 | U.S. Pat. No. 8,858,949 | 4543 |
| | oligomers | variable region | | SEQ ID NO: 1906 | |
| AD321 | A beta | Heavy chain | IR-136 | U.S. Pat. No. 8,858,949 | 4544 |
| | oligomers | variable region | | SEQ ID NO: 1922 | |
| AD322 | A beta | Heavy chain | IR-137 | U.S. Pat. No. 8,858,949 | 4545 |
| | oligomers | variable region | | SEQ ID NO: 1938 | |
| AD323 | A beta | Heavy chain | IR-017 | U.S. Pat. No. 8,858,949 | 4546 |
| | oligomers | variable region | | SEQ ID NO: 194 | |
| AD324 | A beta | Heavy chain | IR-138 | U.S. Pat. No. 8,858,949 | 4547 |
| | oligomers | variable region | | SEQ ID NO: 1954 | |
| AD325 | A beta | Heavy chain | IR-139 | U.S. Pat. No. 8,858,949 | 4548 |
| | oligomers | variable region | | SEQ ID NO: 1970 | |
| AD326 | A beta | Heavy chain | IR-140 | U.S. Pat. No. 8,858,949 | 4549 |
| | oligomers | variable region | | SEQ ID NO: 1986 | |
| AD327 | A beta | Heavy chain | IR-078 | U.S. Pat. No. 8,858,949 | 4550 |
| | oligomers | variable region | | SEQ ID NO: 1106 | |
| AD328 | A beta | Heavy chain | IR-141 | U.S. Pat. No. 8,858,949 | 4551 |
| | oligomers | variable region | | SEQ ID NO: 2002 | |
| AD329 | A beta | Heavy chain | IR-142 | U.S. Pat. No. 8,858,949 | 4552 |
| | oligomers | variable region | | SEQ ID NO: 2018 | |
| AD330 | A beta | Heavy chain | IR-143 | U.S. Pat. No. 8,858,949 | 4553 |
| | oligomers | variable region | | SEQ ID NO: 2034 | |
| AD331 | A beta | Heavy chain | IR-144 | U.S. Pat. No. 8,858,949 | 4554 |
| | oligomers | variable region | | SEQ ID NO: 2050 | |
| AD332 | A beta | Heavy chain | IR-145 | U.S. Pat. No. 8,858,949 | 4555 |
| | oligomers | variable region | | SEQ ID NO: 2066 | |
| AD333 | A beta | Heavy chain | IR-146 | U.S. Pat. No. 8,858,949 | 4556 |
| | oligomers | variable region | | SEQ ID NO: 2082 | |
| AD334 | A beta | Heavy chain | IR-147 | U.S. Pat. No. 8,858,949 | 4557 |
| | oligomers | variable region | | SEQ ID NO: 2098 | |
| AD335 | A beta | Heavy chain | IR-020 | U.S. Pat. No. 8,858,949 | 4558 |
| | oligomers | variable region | | SEQ ID NO: 210 | |
| AD336 | A beta | Heavy chain | IR-149 | U.S. Pat. No. 8,858,949 | 4559 |
| | oligomers | variable region | | SEQ ID NO: 2114 | |
| AD337 | A beta | Heavy chain | IR-150 | U.S. Pat. No. 8,858,949 | 4560 |
| | oligomers | variable region | | SEQ ID NO: 2130 | |
| AD338 | A beta | Heavy chain | IR-079 | U.S. Pat. No. 8,858,949 | 4561 |
| | oligomers | variable region | | SEQ ID NO: 1122 | |
| AD339 | A beta | Heavy chain | IR-151 | U.S. Pat. No. 8,858,949 | 4562 |
| | oligomers | variable region | | SEQ ID NO: 2146 | |
| AD340 | A beta | Heavy chain | IR-152 | U.S. Pat. No. 8,858,949 | 4563 |
| | oligomers | variable region | | SEQ ID NO: 2162 | |
| AD341 | A beta | Heavy chain | IR-153 | U.S. Pat. No. 8,858,949 | 4564 |
| | oligomers | variable region | | SEQ ID NO: 2178 | |
| AD342 | A beta | Heavy chain | IR-154 | U.S. Pat. No. 8,858,949 | 4565 |
| | oligomers | variable region | | SEQ ID NO: 2194 | |
| AD343 | A beta | Heavy chain | IR-155 | U.S. Pat. No. 8,858,949 | 4566 |
| | oligomers | variable region | | SEQ ID NO: 2210 | |
| AD344 | A beta | Heavy chain | IR-156 | U.S. Pat. No. 8,858,949 | 4567 |
| | oligomers | variable region | | SEQ ID NO: 2226 | |
| AD345 | A beta | Heavy chain | IR-157 | U.S. Pat. No. 8,858,949 | 4568 |
| | oligomers | variable region | | SEQ ID NO: 2242 | |
| AD346 | A beta | Heavy chain | IR-158 | U.S. Pat. No. 8,858,949 | 4569 |
| | oligomers | variable region | | SEQ ID NO: 2258 | |
| AD347 | A beta | Heavy chain | IR-021 | U.S. Pat. No. 8,858,949 | 4570 |
| | oligomers | variable region | | SEQ ID NO: 226 | |
| AD348 | A beta | Heavy chain | IR-159 | U.S. Pat. No. 8,858,949 | 4571 |
| | oligomers | variable region | | SEQ ID NO: 2274 | |
| AD349 | A beta | Heavy chain | IR-080 | U.S. Pat. No. 8,858,949 | 4572 |
| | oligomers | variable region | | SEQ ID NO: 1138 | |
| AD350 | A beta | Heavy chain | IR-022 | U.S. Pat. No. 8,858,949 | 4573 |
| | oligomers | variable region | | SEQ ID NO: 242 | |
| AD351 | A beta | Heavy chain | IR-023 | U.S. Pat. No. 8,858,949 | 4574 |
| | oligomers | variable region | | SEQ ID NO: 258 | |
| AD352 | A beta | Heavy chain | IR-024 | U.S. Pat. No. 8,858,949 | 4575 |
| | oligomers | variable region | | SEQ ID NO: 274 | |
| AD353 | A beta | Heavy chain | IR-160 | U.S. Pat. No. 8,858,949 | 4576 |
| | oligomers | variable region | | SEQ ID NO: 2862 | |
| AD354 | A beta | Heavy chain | IR-025 | U.S. Pat. No. 8,858,949 | 4577 |
| | oligomers | variable region | | SEQ ID NO: 290 | |
| AD355 | A beta | Heavy chain | IR-026 | U.S. Pat. No. 8,858,949 | 4578 |
| | oligomers | variable region | | SEQ ID NO: 306 | |
| AD356 | A beta | Heavy chain | IR-027 | U.S. Pat. No. 8,858,949 | 4579 |
| | oligomers | variable region | | SEQ ID NO: 322 | |
| AD357 | A beta | Heavy chain | IR-028 | U.S. Pat. No. 8,858,949 | 4580 |
| | oligomers | variable region | | SEQ ID NO: 338 | |
| AD358 | A beta | Heavy chain | IR-004 | U.S. Pat. No. 8,858,949 | 4581 |
| | oligomers | variable region | | SEQ ID NO: 34 | |
| AD359 | A beta | Heavy chain | IR-029 | U.S. Pat. No. 8,858,949 | 4582 |
| | oligomers | variable region | | SEQ ID NO: 354 | |
| AD360 | AB (1-42) | Heavy chain | 8F5 hum8 VL | US20090232801 | 4583 |
| | Globulomer | variable region | | SEQ ID NO: 1 | |
| AD361 | AB (1-42) | Heavy chain | Hu8F5VHv1 | US20090232801 | 4584 |
| | Globulomer | variable region | | SEQ ID NO: 101 | |
| AD362 | AB (1-42) | Heavy chain | Hu8F5VHv2 | US20090232801 | 4585 |
| | Globulomer | variable region | | SEQ ID NO: 102 | |
| AD363 | AB (1-42) | Heavy chain | Hu8F5VHv1 | US20090232801 | 4586 |
| | Globulomer | variable region | | SEQ ID NO: 108 | |
| AD364 | AB (1-42) | Heavy chain | Hu8F5VHv2 | US20090232801 | 4587 |
| | Globulomer | variable region | | SEQ ID NO: 110 | |
| AD365 | AB (20-42) | Heavy chain | VH 5F7hum8 | US20090175847 | 4588 |
| | Globulomer | variable region | | SEQ ID NO: 1 | |
| AD366 | AB (20-42) | Heavy chain | VH 7C6hum7 | US20090175847 | 4589 |
| | Globulomer | variable region | | SEQ ID NO: 3 | |
| AD367 | ADDL | Heavy chain | | WO2007050359 | 4590 |
| | | variable region | | SEQ ID NO: 108 | |
| AD368 | ADDL | Heavy chain | | WO2007050359 | 4591 |
| | | variable region | | SEQ ID NO: 138 | |
| AD369 | amyloid beta | Heavy chain | | US719576 | 4592 |
| | peptide Aβ | variable region | | SEQ ID NO: 10 | |
| AD370 | amyloid beta | Heavy chain | | US719576 | 4593 |
| | peptide Aβ | variable region | | SEQ ID NO: 8 | |
| AD371 | amyloid | Heavy chain | fl1G3 | U.S. Pat. No. 9,125,846 | 4594 |
| | oligomers | variable region | | SEQ ID NO: 11 | |
| AD372 | amyloid or | Heavy chain | Humanized C2 HIV | WO2008061796 | 4595 |
| | amyloid-like | variable region | AF 4 | SEQ ID NO: 3 | |
| | proteins | | | | |
| AD373 | amyloid protein | Heavy chain | C2 HIV AF 4 | US20100150906 | 4596 |
| | (IGG1 Abeta) | variable region | | SEQ ID NO: 15 | |
| AD374 | amyloid β | Heavy chain | Fv1E1 | U.S. Pat. No. 8,222,002 | 4597 |
| | peptide | variable region | | SEQ ID NO: 1 | |
| AD375 | amyloid β | Heavy chain | VLA2 | U.S. Pat. No. 8,222,002 | 4598 |
| | peptide | variable region | | SEQ ID NO: 101 | |
| AD376 | amyloid β | Heavy chain | Fv1E4 | U.S. Pat. No. 8,222,002 | 4599 |
| | peptide | variable region | | SEQ ID NO: 11 | |
| AD377 | amyloid β | Heavy chain | Fv1E7 | U.S. Pat. No. 8,222,002 | 4600 |
| | peptide | variable region | | SEQ ID NO: 21 | |
| AD378 | amyloid β | Heavy chain | Fv2A7 | U.S. Pat. No. 8,222,002 | 4601 |
| | peptide | variable region | | SEQ ID NO: 31 | |
| AD379 | amyloid β | Heavy chain | Fv2A8 | U.S. Pat. No. 8,222,002 | 4602 |
| | peptide | variable region | | SEQ ID NO: 41 | |
| AD380 | amyloid β | Heavy chain | Fv2B6 | U.S. Pat. No. 8,222,002 | 4603 |
| | peptide | variable region | | SEQ ID NO: 51 | |
| AD381 | amyloid β | Heavy chain | B7 | U.S. Pat. No. 8,222,002 | 4604 |
| | peptide | variable region | | SEQ ID NO: 61 | |
| AD382 | amyloid β | Heavy chain | B6 | U.S. Pat. No. 8,222,002 | 4605 |
| | peptide | variable region | | SEQ ID NO: 71 | |
| AD383 | amyloid β | Heavy chain | F10 | U.S. Pat. No. 8,222,002 | 4606 |
| | peptide | variable region | | SEQ ID NO: 81 | |
| AD384 | amyloid β | Heavy chain | D1 | U.S. Pat. No. 8,222,002 | 4607 |
| | peptide | variable region | | SEQ ID NO: 91 | |
| AD385 | ApoE-CTD | Heavy chain | 807B-M0001-B07 | WO2005051998 | 4608 |
| | | variable region | | SEQ ID NO: 135 | |
| AD386 | ApoE-CTD | Heavy chain | 807B-M0004-A03 | WO2005051998 | 4609 |
| | | variable region | | SEQ ID NO: 136 | |
| AD387 | ApoE-CTD | Heavy chain | 807B-M0004-A05 | WO2005051998 | 4610 |
| | | variable region | | SEQ ID NO: 137 | |
| AD388 | ApoE-CTD | Heavy chain | 807B-M0004-C04 | WO2005051998 | 4611 |
| | | variable region | | SEQ ID NO: 138 | |
| AD389 | ApoE-CTD | Heavy chain | 807B-M0004-C05 | WO2005051998 | 4612 |
| | | variable region | | SEQ ID NO: 139 | |
| AD390 | ApoE-CTD | Heavy chain | 807B-M0004-F06 | WO2005051998 | 4613 |
| | | variable region | | SEQ ID NO: 140 | |
| AD391 | ApoE-CTD | Heavy chain | 807B-M0004-F10 | WO2005051998 | 4614 |
| | | variable region | | SEQ ID NO: 141 | |
| AD392 | ApoE-CTD | Heavy chain | 807B-M0004-H03 | WO2005051998 | 4615 |
| | | variable region | | SEQ ID NO: 142 | |
| AD393 | ApoE-CTD | Heavy chain | 807B-M0009-C03 | WO2005051998 | 4616 |
| | | variable region | | SEQ ID NO: 143 | |
| AD394 | ApoE-CTD | Heavy chain | 807B-M0009-F06 | WO2005051998 | 4617 |
| | | variable region | | SEQ ID NO: 144 | |
| AD395 | ApoE-CTD | Heavy chain | 807B-M0013-A12 | WO2005051998 | 4618 |
| | | variable region | | SEQ ID NO: 145 | |
| AD396 | ApoE-CTD | Heavy chain | 807B-M0079-D10 | WO2005051998 | 4619 |
| | | variable region | | SEQ ID NO: 146 | |
| AD397 | ApoE-CTD | Heavy chain | 807B-M0081-F12 | WO2005051998 | 4620 |
| | | variable region | | SEQ ID NO: 147 | |
| AD398 | ApoE-CTD | Heavy chain | 807B-M0081-H03 | WO2005051998 | 4621 |
| | | variable region | | SEQ ID NO: 148 | |
| AD399 | ApoE-CTD | Heavy chain | 807B-M0083-E11 | WO2005051998 | 4622 |
| | | variable region | | SEQ ID NO: 149 | |
| AD400 | ApoE-CTD | Heavy chain | 807A-M0027-E11 | WO2005051998 | 4623 |
| | | variable region | | SEQ ID NO: 39 | |
| AD401 | ApoE-CTD | Heavy chain | 807A-M0028-B02 | WO2005051998 | 4624 |
| | | variable region | | SEQ ID NO: 40 | |
| AD402 | ApoE-CTD | Heavy chain | 807A-M0026-F05 | WO2005051998 | 4625 |
| | | variable region | | SEQ ID NO: 41 | |
| AD403 | APP | Heavy chain | | WO2014151747 | 4626 |
| | | variable region | | SEQ NO 35 | |
| AD404 | App | Heavy chain | | WO2014151747 | 4627 |
| | | variable region | | SEQ NO 37 | |
| AD405 | APP | Heavy chain | | WO2014151747 | 4628 |
| | | variable region | | SEQ NO 39 | |
| AD406 | APP | Heavy chain | | WO2014151747 | 4629 |
| | | variable region | | SEQ NO 41 | |
| AD407 | APP | Heavy chain | | WO2014151747 | 4630 |
| | | variable region | | SEQ NO 43 | |
| AD408 | Aβ amyloid | Heavy chain | 15C11 | WO2006066049 | 4631 |
| | | variable region | | SEQ ID NO: 4 | |
| AD409 | Aβ amyloid | Heavy chain | 9G8 | WO2006066049 | 4632 |
| | | variable region | | SEQ ID NO: 5 | |
| AD410 | Aβ amyloid | Heavy chain | 266 | WO2006066049 | 4633 |
| | | variable region | | SEQ ID NO: 6 | |
| AD411 | Aβ amyloid | Heavy chain | 12Al 1 vl | WO2006066089 | 4634 |
| | | variable region | | SEQ ID NO: 10 | |
| AD412 | Aβ amyloid | Heavy chain | v2 | WO2006066089 | 4635 |
| | | variable region | | SEQ ID NO: 13 | |
| AD413 | Aβ amyloid | Heavy chain | v2.1 | WO2006066089 | 4636 |
| | | variable region | | SEQ ID NO: 14 | |
| AD414 | Aβ amyloid | Heavy chain | v3 | WO2006066089 | 4637 |
| | | variable region | | SEQ ID NO: 15 | |
| AD415 | Aβ amyloid | Heavy chain | v4.1 | WO2006066089 | 4638 |
| | | variable region | | SEQ ID NO: 16 | |
| AD416 | Aβ amyloid | Heavy chain | v4.2 | WO2006066089 | 4639 |
| | | variable region | | SEQ ID NO: 17 | |
| AD417 | Aβ amyloid | Heavy chain | v4.3 | WO2006066089 | 4640 |
| | | variable region | | SEQ ID NO: 18 | |
| AD418 | Aβ amyloid | Heavy chain | v4.4 | WO2006066089 | 4641 |
| | | variable region | | SEQ ID NO: 19 | |
| AD419 | Aβ amyloid | Heavy chain | v5.1 | WO2006066089 | 4642 |
| | | variable region | | SEQ ID NO: 20 | |
| AD420 | Aβ amyloid | Heavy chain | v5.2 | WO2006066089 | 4643 |
| | | variable region | | SEQ ID NO: 21 | |
| AD421 | Aβ amyloid | Heavy chain | v5.3 | WO2006066089 | 4644 |
| | | variable region | | SEQ ID NO: 22 | |
| AD422 | Aβ amyloid | Heavy chain | v5.4 | WO2006066089 | 4645 |
| | | variable region | | SEQ ID NO: 23 | |
| AD423 | Aβ amyloid | Heavy chain | v5.5 | WO2006066089 | 4646 |
| | | variable region | | SEQ ID NO: 24 | |
| AD424 | Aβ amyloid | Heavy chain | v5.5 | WO2006066089 | 4647 |
| | | variable region | | SEQ ID NO: 25 | |
| AD425 | Aβ amyloid | Heavy chain | v6.1 | WO2006066089 | 4648 |
| | | variable region | | SEQ ID NO: 26 | |
| AD426 | Aβ amyloid | Heavy chain | v6.2 | WO2006066089 | 4649 |
| | | variable region | | SEQ ID NO: 27 | |
| AD427 | Aβ amyloid | Heavy chain | v6.1 | WO2006066089 | 4650 |
| | | variable region | | SEQ ID NO: 28 | |
| AD428 | Aβ amyloid | Heavy chain | v6.2 | WO2006066089 | 4651 |
| | | variable region | | SEQ ID NO: 29 | |
| AD429 | Aβ amyloid | Heavy chain | v7 | WO2006066089 | 4652 |
| | | variable region | | SEQ ID NO: 30 | |
| AD430 | Aβ amyloid | Heavy chain | v8 | WO2006066089 | 4653 |
| | | variable region | | SEQ ID NO: 31 | |
| AD431 | Aβ amyloid | Heavy chain | v3.1 | WO2006066089 | 4654 |
| | | variable region | | SEQ ID NO: 36 | |
| AD432 | Aβ amyloid | Heavy chain | GenBank BAC01733 | WO2006066089 | 4655 |
| | | variable region | | SEQ ID NO: 8 | |
| AD433 | Aβ amyloid | Heavy chain | A19 | WO2006066089 | 4656 |
| | | variable region | | SEQ ID NO: 9 | |
| AD434 | Aβ amyloids | Heavy chain | Humanized 3D6 | U.S. Pat. No. 8,784,810 | 4657 |
| | | variable region | (Bapineuzumab) | SEQ ID NO: 2 | |
| AD435 | Aβ amyloids | Heavy chain | Humanized 10D5 | U.S. Pat. No. 8,784,810 | 4658 |
| | | variable region | | SEQ ID NO: 29 | |
| AD436 | Aβ amyloids | Heavy chain | Humanized 3D6 | U.S. Pat. No. 8,784,810 | 4659 |
| | | variable region | (Bapineuzumab), | SEQ ID NO: 4 | |
| | | | version 2 | | |
| AD437 | Aβ amyloids | Heavy chain | Humanized 12A11 | U.S. Pat. No. 8,784,810 | 4660 |
| | | variable region | | SEQ ID NO: 8 | |
| AD438 | Aβ peptide | Heavy chain | | U.S. Pat. No. 8,066,999 | 4661 |
| | | variable region | | SEQ ID NO: 2 | |
| AD439 | Aβ peptide | Heavy chain | | U.S. Pat. No. 8,066,999 | 4662 |
| | | variable region | | SEQ ID NO: 3 | |
| AD440 | Aβ polypeptide | Heavy chain | preferred embodiment | WO2008084402 | 4663 |
| | | variable region | 6, 11, 12 | SEQ ID NO: 148 | |
| AD441 | Aβ polypeptide | Heavy chain | | WO2008084402 | 4664 |
| | | variable region | | SEQ ID NO: 57 | |
| AD442 | Aβ polypeptide | Heavy chain | | WO2008084402 | 4665 |
| | | variable region | | SEQ ID NO: 58 | |
| AD443 | Aβ polypeptide | Heavy chain | | WO2008084402 | 4666 |
| | | variable region | | SEQ ID NO: 59 | |
| AD444 | Aβ polypeptide | Heavy chain | preferred embodiment | WO2008084402 | 4667 |
| | | variable region | 1, 2, 3, 4, 5, 9 | SEQ ID NO: 60 | |
| AD445 | Aβ polypeptide | Heavy chain | preferred embodiment | WO2008084402 | 4668 |
| | | variable region | 7, 10, 13 | SEQ ID NO: 61 | |
| AD446 | Aβ polypeptide | Heavy chain | preferred embodiment 8 | WO2008084402 | 4669 |
| | | variable region | | SEQ ID NO: 62 | |
| AD447 | Aβ polypeptide | Heavy chain | | WO2008084402 | 4670 |
| | | variable region | | SEQ ID NO: 63 | |
| AD448 | Aβ polypeptide | Heavy chain | | WO2008084402 | 4671 |
| | | variable region | | SEQ ID NO: 64 | |
| AD449 | Aβ polypeptide | Heavy chain | | WO2008084402 | 4672 |
| | | variable region | | SEQ ID NO: 65 | |
| AD450 | Aβ polypeptide | Heavy chain | | WO2008084402 | 4673 |
| | | variable region | | SEQ ID NO: 66 | |
| AD451 | Aβ polypeptide | Heavy chain | | WO2008084402 | 4674 |
| | | variable region | | SEQ ID NO: 67 | |
| AD452 | Aβ polypeptide | Heavy chain | | WO2008084402 | 4675 |
| | | variable region | | SEQ ID NO: 68 | |
| AD453 | Aβ polypeptide | Heavy chain | | WO2008084402 | 4676 |
| | | variable region | | SEQ ID NO: 69 | |
| AD454 | Aβ polypeptide | Heavy chain | | WO2008084402 | 4677 |
| | | variable region | | SEQ ID NO: 70 | |
| AD455 | Aβ polypeptide | Heavy chain | | WO2008084402 | 4678 |
| | | variable region | | SEQ ID NO: 71 | |
| AD456 | beta A4 | Heavy chain | Antibody A | WO2007068429 | 4679 |
| | peptide/Alpha | variable region | | SEQ ID NO: 2 | |
| | beta 4 | | | | |
| AD457 | beta amyloid | Heavy chain | Kabat ID 000333 | U.S. Pat. No. 7,256,273 | 4680 |
| | | variable region | | SEQ ID NO: 34 | |
| AD458 | beta amyloid | Heavy chain | Germline VH4-6 | U.S. Pat. No. 7,256,273 | 4681 |
| | | variable region | | SEQ ID NO: 36 | |
| AD459 | beta amyloid | Heavy chain | Germline VH4-6 | U.S. Pat. No. 7,256,273 | 4682 |
| | | variable region | | SEQ ID NO: 38 | |
| AD460 | beta amyloid | Heavy chain | 12B4 | U.S. Pat. No. 7,256,273 | 4683 |
| | | variable region | | SEQ ID NO: 4 | |
| AD461 | beta amyloid | Heavy chain | humanized 12B4 | U.S. Pat. No. 7,256,273 | 4684 |
| | | variable region | | SEQ ID NO: 8 | |
| AD462 | beta amyloid | Heavy chain | ESBA212 | U.S. Pat. No. 8,323,647 | 4685 |
| | | variable region | | SEQ ID NO: 17 | |
| AD463 | beta amyloid | Heavy chain | Framework 2.3 | U.S. Pat. No. 8,323,647 | 4686 |
| | | variable region | | SEQ ID NO: 18 | |
| AD464 | beta amyloid | Heavy chain | 22C4 | U.S. Pat. No. 8,323,647 | 4687 |
| | | variable region | | SEQ ID NO: 19 | |
| AD465 | beta amyloid | Heavy chain | VH H | U.S. Pat. No. 8,323,647 | 4688 |
| | | variable region | | SEQ ID NO: 20 | |
| AD466 | beta amyloid | Heavy chain | VH I | U.S. Pat. No. 8,323,647 | 4689 |
| | | variable region | | SEQ ID NO: 21 | |
| AD467 | beta amyloid | Heavy chain | VH J | U.S. Pat. No. 8,323,647 | 4690 |
| | | variable region | | SEQ ID NO: 22 | |
| AD468 | beta amyloid | Heavy chain | VH K | U.S. Pat. No. 8,323,647 | 4691 |
| | | variable region | | SEQ ID NO: 23 | |
| AD469 | beta amyloid | Heavy chain | | US10476265 | 4692 |
| | | variable region | | SEQ ID NO: 10 | |
| AD470 | beta amyloid | Heavy chain | | US10476265 | 4693 |
| | | variable region | | SEQ ID NO: 11 | |
| AD471 | beta amyloid | Heavy chain | | US10476265 | 4694 |
| | | variable region | | SEQ ID NO: 12 | |
| AD472 | beta amyloid | Heavy chain | ACI-12-Ab-11 | US20140199323 | 4695 |
| | | variable region | | SEQ ID NO: 10 | |
| AD473 | beta amyloid | Heavy chain | ACI-11-Ab-9 | US20140199323 | 4696 |
| | | variable region | | SEQ ID NO: 8 | |
| AD474 | beta amyloid | Heavy chain | 8C5 | US20150071915 | 4697 |
| | | variable region | | SEQ ID NO: 19 | |
| AD475 | beta amyloid | Heavy chain | 8F5 | US20150071915 | 4698 |
| | | variable region | | SEQ ID NO: 3 | |
| AD476 | beta amyloid | Heavy chain | germline VH3-23 | U.S. Pat. No. 7,189,819 | 4699 |
| | | variable region | | SEQ ID NO: 10 | |
| AD477 | beta amyloid | Heavy chain | | U.S. Pat. No. 7,189,819 | 4700 |
| | | variable region | | SEQ ID NO: 12 | |
| AD478 | beta amyloid | Heavy chain | 10D5 | U.S. Pat. No. 7,189,819 | 4701 |
| | | variable region | | SEQ ID NO: 16 | |
| AD479 | beta amyloid | Heavy chain | m3D6 | U.S. Pat. No. 7,189,819 | 4702 |
| | | variable region | | SEQ ID NO: 4 | |
| AD480 | beta amyloid | Heavy chain | humanized 3D6 | U.S. Pat. No. 7,189,819 | 4703 |
| | | variable region | | SEQ ID NO: 8 | |
| AD481 | beta amyloid | Heavy chain | Kabat ID 109230 | U.S. Pat. No. 7,189,819 | 4704 |
| | | variable region | | SEQ ID NO: 9 | |
| AD482 | beta amyloid | Heavy chain | Bapineuzumab, AAB- | U.S. Pat. No. 8,613,920 | 4705 |
| | | variable region | 001 | SEQ ID NO: 2 | |
| AD483 | beta amyloid | Heavy chain | M99675 | WO2007113172 | 4706 |
| | peptide | variable region | | SEQ ID NO: 21 | |
| AD484 | beta amyloid | Heavy chain | Humanized H1 | WO2007113172 | 4707 |
| | peptide | variable region | | SEQ ID NO: 26 | |
| AD485 | beta amyloid | Heavy chain | Humanized H2 | WO2007113172 | 4708 |
| | peptide | variable region | | SEQ ID NO: 28 | |
| AD486 | beta amyloid | Heavy chain | Humanized H3 | WO2007113172 | 4709 |
| | peptide | variable region | | SEQ ID NO: 30 | |
| AD487 | BETA- | Heavy chain | NI-101.12 | WO2008081008 | 4710 |
| | AMYLOID | variable region | | SEQ ID NO: 10 | |
| AD488 | BETA- | Heavy chain | NI-101.13 | WO2008081008 | 4711 |
| | AMYLOID | variable region | | SEQ ID NO: 14 | |
| AD489 | BETA- | Heavy chain | NI-101.12F6A | WO2008081008 | 4712 |
| | AMYLOID | variable region | | SEQ ID NO: 39 | |
| AD490 | BETA- | Heavy chain | NI-101.10 | WO2008081008 | 4713 |
| | AMYLOID | variable region | | SEQ ID NO: 4 | |
| AD491 | BETA- | Heavy chain | NI-101.13A | WO2008081008 | 4714 |
| | AMYLOID | variable region | | SEQ ID NO: 42 | |
| AD492 | BETA- | Heavy chain | NI-101.13A | WO2008081008 | 4715 |
| | AMYLOID | variable region | | SEQ ID NO: 44 | |
| AD493 | BETA- | Heavy chain | NI-101.11 | WO2008081008 | 4716 |
| | AMYLOID | variable region | | SEQ ID NO: 6 | |
| AD494 | DR6 and P75 | Heavy chain | IP1D6.3 | WO2010062904 | 4717 |
| | | variable region | | SEQ ID NO: 107 | |
| AD495 | DR6 and P75 | Heavy chain | IP2F2.1 | WO2010062904 | 4718 |
| | | variable region | | SEQ ID NO: 117 | |
| AD496 | DR6 and P75 | Heavy chain | IP5D10.2 | WO2010062904 | 4719 |
| | | variable region | | SEQ ID NO: 127 | |
| AD497 | DR6 and P75 | Heavy chain | M51-H09 | WO2010062904 | 4720 |
| | | variable region | | SEQ ID NO: 17 | |
| AD498 | DR6 and P75 | Heavy chain | M53-E04 | WO2010062904 | 4721 |
| | | variable region | | SEQ ID NO: 27 | |
| AD499 | DR6 and P75 | Heavy chain | M53-F04 | WO2010062904 | 4722 |
| | | variable region | | SEQ ID NO: 37 | |
| AD500 | DR6 and P75 | Heavy chain | M62-B02 | WO2010062904 | 4723 |
| | | variable region | | SEQ ID NO: 47 | |
| AD501 | DR6 and P75 | Heavy chain | M63-E10 | WO2010062904 | 4724 |
| | | variable region | | SEQ ID NO: 57 | |
| AD502 | DR6 and P75 | Heavy chain | M66-B03 | WO2010062904 | 4725 |
| | | variable region | | SEQ ID NO: 67 | |
| AD503 | DR6 and P75 | Heavy chain | M50-H01 | WO2010062904 | 4726 |
| | | variable region | | SEQ ID NO: 7 | |
| AD504 | DR6 and P75 | Heavy chain | M67-G02 | WO2010062904 | 4727 |
| | | variable region | | SEQ ID NO: 77 | |
| AD505 | DR6 and P75 | Heavy chain | M77-F03 | WO2010062904 | 4728 |
| | | variable region | | SEQ ID NO: 87 | |
| AD506 | DR6 and P75 | Heavy chain | M73-C04 | WO2010062904 | 4729 |
| | | variable region | | SEQ ID NO: 97 | |
| AD507 | IOD5 | Heavy chain | | WO2002088307 | 4730 |
| | | variable region | | SEQ ID NO: 10 | |
| AD508 | IOD5 | Heavy chain | | WO2002088307 | 4731 |
| | | variable region | | SEQ ID NO: 12 | |
| AD509 | IOD5 | Heavy chain | | WO2002088307 | 4732 |
| | | variable region | | SEQ ID NO: 8 | |
| AD510 | LPG | Heavy chain | #7 | U.S. Pat. No. 8,591,902 | 4733 |
| | (lysophosphatidylglucoside) | variable region | | SEQ ID NO: 18 | |
| AD511 | LPG | Heavy chain | #15 | U.S. Pat. No. 8,591,902 | 4734 |
| | (lysophosphatidylglucoside) | variable region | | SEQ ID NO: 8 | |
| AD512 | MAG | Heavy chain | | U.S. Pat. No. 8,071,731 | 4735 |
| | | variable region | | SEQ ID NO: 13 | |
| AD513 | MAG | Heavy chain | | U.S. Pat. No. 8,071,731 | 4736 |
| | | variable region | | SEQ ID NO: 14 | |
| AD514 | MAG | Heavy chain | | U.S. Pat. No. 8,071,731 | 4737 |
| | | variable region | | SEQ ID NO: 15 | |
| AD515 | MAI (myelin | Heavy chain | | WO2013158748 | 4738 |
| | associated | variable region | | SEQ ID NO: 1 | |
| | inhibitor) | | | | |
| AD516 | MAI (myelin | Heavy chain | | WO2013158748 | 4739 |
| | associated | variable region | | SEQ ID NO: 17 | |
| | inhibitor) | | | | |
| AD517 | NMDA | Heavy chain | | EP2805972 SEQ | 4740 |
| | | variable region | | ID NO: 43 | |
| AD518 | NOGO | Heavy chain | H5L13, H5L16, | US20140147435 | 4741 |
| | | variable region | H5L18, H5L14, | SEQ ID NO: 11 | |
| | | | H5L15, H5L17, H5L6, | | |
| | | | H5L11 | | |
| AD519 | NOGO | Heavy chain | H6L13, H6L16, | US20140147435 | 4742 |
| | | variable region | H6L18, H6L14, | SEQ ID NO: 12 | |
| | | | H6L15, H6L17, H6L6 | | |
| AD520 | NOGO | Heavy chain | H700L13, H700L16, | US20140147435 | 4743 |
| | | variable region | H700L18, H700L14, | SEQ ID NO: 13 | |
| | | | H700L15, H700L17, | | |
| | | | H700L6, H700L11 | | |
| AD521 | NOGO | Heavy chain | H14L13, H14L16, | US20140147435 | 4744 |
| | | variable region | H14L18, H14L14, | SEQ ID NO: 14 | |
| | | | H14L15, H14L17, | | |
| | | | H14L6, H14L11 | | |
| AD522 | NOGO | Heavy chain | H15L13, H15L16, | US20140147435 | 4745 |
| | | variable region | H15L18, H15L14, | SEQ ID NO: 15 | |
| | | | H15L15, H15L17, | | |
| | | | H15L6, H15L11 | | |
| AD523 | NOGO | Heavy chain | H16L13, H16L16, | US20140147435 | 4746 |
| | | variable region | H16L18, H16L14, | SEQ ID NO: 16 | |
| | | | H16L15, H16L17, | | |
| | | | H16L6, H16L11 | | |
| AD524 | NOGO | Heavy chain | H17L13, H17L16, | US20140147435 | 4747 |
| | | variable region | H17L18, H17L14, | SEQ ID NO: 17 | |
| | | | H17L15, H17L17, | | |
| | | | H17L6, H17L11 | | |
| AD525 | NOGO | Heavy chain | H18L13, H18L16, | US20140147435 | 4748 |
| | | variable region | H18L18, H18L14, | SEQ ID NO: 18 | |
| | | | H18L15, H18L17, | | |
| | | | H18L6, H18L11 | | |
| AD526 | NOGO | Heavy chain | H1L13, H1L16, | US20140147435 | 4749 |
| | | variable region | H1L18, H1L14, | SEQ ID NO: 77 | |
| | | | H1L15, H1L17, H1L6 | | |
| AD527 | NOGO | Heavy chain | H19L13, H19L16, | US20140147435 | 4750 |
| | | variable region | H19L18, H19L14, | SEQ ID NO: 85 | |
| | | | H19L15, H19L17, | | |
| | | | H19L6, H19L11 | | |
| AD528 | NOGO | Heavy chain | H20L13, H20L16, | US20140147435 | 4751 |
| | | variable region | H20L18, H20L14, | SEQ ID NO: 86 | |
| | | | H20L15, H20L17, | | |
| | | | H20L6, H20L11 | | |
| AD529 | NOGO | Heavy chain | H21L13, H21L16, | US20140147435 | 4752 |
| | | variable region | H21L18, H21L14, | SEQ ID NO: 87 | |
| | | | H21L15, H21L17, | | |
| | | | H21L6, H21L11 | | |
| AD530 | NOGO | Heavy chain | H22L13, H22L16, | US20140147435 | 4753 |
| | | variable region | H22L18, H22L14, | SEQ ID NO: 88 | |
| | | | H22L15, H22L17, | | |
| | | | H22L6, H22L11 | | |
| AD531 | NOGO | Heavy chain | H23L13, H23L16, | US20140147435 | 4754 |
| | | variable region | H23L18, H23L14, | SEQ ID NO: 89 | |
| | | | H23L15, H23L17, | | |
| | | | H23L6, H23L11 | | |
| AD532 | NOGO | Heavy chain | H24L13, H24L16, | US20140147435 | 4755 |
| | | variable region | H24L18, H24L14, | SEQ ID NO: 90 | |
| | | | H24L15, H24L17, | | |
| | | | H24L6, H24L11 | | |
| AD533 | NOGO | Heavy chain | H25L13, H25L16, | US20140147435 | 4756 |
| | | variable region | H25L18, H25L14, | SEQ ID NO: 91 | |
| | | | H25L15, H25L17, | | |
| | | | H25L6, H25L11 | | |
| AD534 | Nogo-66 | Heavy chain | Antibody clone 50 | US20140065155 | 4757 |
| | | variable region | | SEQ ID NO: 3 | |
| AD535 | Nogo-66 | Heavy chain | Antibody clone 51 | US20140065155 | 4758 |
| | | variable region | | SEQ ID NO: 5 | |
| AD536 | NogoA/NiG | Heavy chain | 6A3-Ig4 | WO2009056509 | 4759 |
| | | variable region | | SEQ ID NO: 24 | |
| AD537 | NogoA/NiG | Heavy chain | 6A3-IgG1 | WO2009056509 | 4760 |
| | | variable region | | SEQ ID NO: 4 | |
| AD538 | N-terminal | Heavy chain | Antibody Tea 1.1 | US20110059092 | 4761 |
| | region of Aβ8- | variable region | (Secreted by | SEQ ID NO: 10 | |
| | x peptide | | Hybridoma IGH525) | | |
| AD539 | N-terminal | Heavy chain | Antibody TeiA 1.6 | US20110059092 | 4762 |
| | region of Aβ8- | variable region | (Secreted by | SEQ ID NO: 2 | |
| | x peptide | | Hybridoma IGH521) | | |
| AD540 | N-terminal | Heavy chain | Antibody TeiA 1.7 | US20110059092 | 4763 |
| | region of Aβ8- | variable region | (Secreted by | SEQ ID NO: 4 | |
| | x peptide | | Hybridoma IGH522) | | |
| AD541 | N-terminal | Heavy chain | Antibody TeiA 1.8 | US20110059092 | 4764 |
| | region of Aβ8- | variable region | (Secreted by | SEQ ID NO: 6 | |
| | x peptide | | Hybridoma IGH523) | | |
| AD542 | N-terminal | Heavy chain | Antibody TeiA 2b.6 | US20110059092 | 4765 |
| | region of Aβ8- | variable region | (Secreted by | SEQ ID NO: 8 | |
| | x peptide | | Hybridoma IGH524) | | |
| AD543 | oligomers of N- | Heavy chain | 9D5 | U.S. Pat. No. 8,795,664 | 4766 |
| | terminal | variable region | | SEQ ID NO: 26 | |
| | truncated Aβ | | | | |
| AD544 | oligomers of N- | Heavy chain | 8C4 | U.S. Pat. No. 8,795,664 | 4767 |
| | terminal | variable region | | SEQ ID NO: 30 | |
| | truncated Aβ | | | | |
| AD545 | PrP | Heavy chain | ICSM18VH | US20140294844 | 4768 |
| | | variable region | | SEQ ID NO: 4 | |
| AD546 | PrPC and/or | Heavy chain | | US20150166668 | 4769 |
| | PrPSc | variable region | | SEQ ID NO: 8 | |
| AD547 | pyroglutamated | Heavy chain | | WO2012136552 | 4770 |
| | A β | variable region | | SEQ ID NO: 25 | |
| AD548 | pyroglutamated | Heavy chain | | WO2012136552 | 4771 |
| | A β | variable region | | SEQ ID NO: 29 | |
| AD549 | pyroglutamated | Heavy chain | | WO2012136552 | 4772 |
| | A β | variable region | | SEQ ID NO: 5 | |
| AD550 | pyroglutamated | Heavy chain | | WO2012136552 | 4773 |
| | A β | variable region | | SEQ ID NO: 9 | |
| AD551 | RGM A | Heavy chain | 5F9.1-GL | US20150183871 | 4774 |
| | | variable region | | SEQ ID NO: 35 | |
| AD552 | RGM A | Heavy chain | 5F9.2-GL | US20150183871 | 4775 |
| | | variable region | | SEQ ID NO: 36 | |
| AD553 | RGM A | Heavy chain | 5F9.3-GL | US20150183871 | 4776 |
| | | variable region | | SEQ ID NO: 37 | |
| AD554 | RGM A | Heavy chain | 5F9.4-GL | US20150183871 | 4777 |
| | | variable region | | SEQ ID NO: 38 | |
| AD555 | RGM A | Heavy chain | 5F9.5-GL | US20150183871 | 4778 |
| | | variable region | | SEQ ID NO: 39 | |
| AD556 | RGM A | Heavy chain | 5F9.6-GL | US20150183871 | 4779 |
| | | variable region | | SEQ ID NO: 40 | |
| AD557 | RGM A | Heavy chain | 5F9.7-GL | US20150183871 | 4780 |
| | | variable region | | SEQ ID NO: 41 | |
| AD558 | RGM A | Heavy chain | 5F9.8-GL | US20150183871 | 4781 |
| | | variable region | | SEQ ID NO: 42 | |
| AD559 | RGM A | Heavy chain | 5F9.9-GL | US20150183871 | 4782 |
| | | variable region | | SEQ ID NO: 43 | |
| AD560 | RGM A | Heavy chain | h5F9.1, h5F9.1, | US20150183871 | 4783 |
| | | variable region | h5F9.1, h5F9.1, | SEQ ID NO: 47 | |
| | | | h5F9.1, h5F9.2, | | |
| | | | h5F9.3 | | |
| AD561 | RGM A | Heavy chain | h5F9.3, h5F9.9, | US20150183871 | 4784 |
| | | variable region | h5F9.25 | SEQ ID NO: 53 | |
| AD562 | RGM A | Heavy chain | h5F9.4, h5F9.10, | US20150183871 | 4785 |
| | | variable region | h5F9.26 | SEQ ID NO: 54 | |
| AD563 | RGMa | Heavy chain | AE12-1 | US20140023659 | 4786 |
| | | variable region | | SEQ ID NO: 1 | |
| AD564 | RGMa | Heavy chain | AE12-20 | US20140023659 | 4787 |
| | | variable region | | SEQ ID NO: 107 | |
| AD565 | RGMa | Heavy chain | AE12-21 | US20140023659 | 4788 |
| | | variable region | | SEQ ID NO: 115 | |
| AD566 | RGMa | Heavy chain | AE12-23 | US20140023659 | 4789 |
| | | variable region | | SEQ ID NO: 123 | |
| AD567 | RGMa | Heavy chain | AE12-24 | US20140023659 | 4790 |
| | | variable region | | SEQ ID NO: 131 | |
| AD568 | RGMa | Heavy chain | AE12-3 | US20140023659 | 4791 |
| | | variable region | | SEQ ID NO: 17 | |
| AD569 | RGMa | Heavy chain | AE12-4 | US20140023659 | 4792 |
| | | variable region | | SEQ ID NO: 25 | |
| AD570 | RGMa | Heavy chain | AE12-5 | US20140023659 | 4793 |
| | | variable region | | SEQ ID NO: 33 | |
| AD571 | RGMa | Heavy chain | AE12-6 | US20140023659 | 4794 |
| | | variable region | | SEQ ID NO: 41 | |
| AD572 | RGMa | Heavy chain | AE12-7 | US20140023659 | 4795 |
| | | variable region | | SEQ ID NO: 49 | |
| AD573 | RGMa | Heavy chain | AE12-8 | US20140023659 | 4796 |
| | | variable region | | SEQ ID NO: 57 | |
| AD574 | RGMa | Heavy chain | AE12-2 | US20140023659 | 4797 |
| | | variable region | | SEQ ID NO: 9 | |
| AD575 | RGMa | Heavy chain | AE12-13 | US20140023659 | 4798 |
| | | variable region | | SEQ ID NO: 91 | |
| AD576 | RGMa | Heavy chain | AE12-15 | US20140023659 | 4799 |
| | | variable region | | SEQ ID NO: 99 | |
| AD577 | tau | Heavy chain | | WO2014100600 | 4800 |
| | | variable region | | SEQ ID NO: 45 | |
| AD578 | tau | Heavy chain | NI-105.24B2 | US20150252102 | 4801 |
| | | variable region | | SEQ ID NO: 13 | |
| AD579 | tau | Heavy chain | NI-105.4A3 | US20150252102 | 4802 |
| | | variable region | | SEQ ID NO: 17 | |
| AD580 | tau | Heavy chain | NI-105.4E4 | US20150252102 | 4803 |
| | | variable region | | SEQ ID NO: 9 | |
| AD581 | tau | Heavy chain | | WO2013041962 | 4804 |
| | | variable region | | SEQ ID NO: 138 | |
| AD582 | tau | Heavy chain | | WO2013041962 | 4805 |
| | | variable region | | SEQ ID NO: 139 | |
| AD583 | tau | Heavy chain | | WO2013041962 | 4806 |
| | | variable region | | SEQ ID NO: 140 | |
| AD584 | tau | Heavy chain | | WO2013041962 | 4807 |
| | | variable region | | SEQ ID NO: 145 | |
| AD585 | tau | Heavy chain | | WO2013041962 | 4808 |
| | | variable region | | SEQ ID NO: 147 | |
| AD586 | tau | Heavy chain | | WO2013041962 | 4809 |
| | | variable region | | SEQ ID NO: 148 | |
| AD587 | tau | Heavy chain | | WO2014100600 | 4810 |
| | | variable region | | SEQ ID NO: 220 | |
| AD588 | tau | Heavy chain | NI-105.17C1 | WO2014100600 | 4811 |
| | | variable region | | SEQ ID NO: 44 | |
| AD589 | tau | Heavy chain | | WO2014100600 | 4812 |
| | | variable region | | SEQ ID NO: 47 | |
| AD590 | tau | Heavy chain | NI-105.6C5 | WO2014100600 | 4813 |
| | | variable region | | SEQ ID NO: 48 | |
| AD591 | tau | Heavy chain | NI-105.29G10 | WO2014100600 | 4814 |
| | | variable region | | SEQ ID NO: 50 | |
| AD592 | tau | Heavy chain | NI-105.6L9 | WO2014100600 | 4815 |
| | | variable region | | SEQ ID NO: 52 | |
| AD593 | tau | Heavy chain | NI-105.40E8 | WO2014100600 | 4816 |
| | | variable region | | SEQ ID NO: 54 | |
| AD594 | tau | Heavy chain | NI-105.48E5 | WO2014100600 | 4817 |
| | | variable region | | SEQ ID NO: 56 | |
| AD595 | tau | Heavy chain | NI-105.6E3 | WO2014100600 | 4818 |
| | | variable region | | SEQ ID NO: 58 | |
| AD596 | tau | Heavy chain | NI-105.22E1 | WO2014100600 | 4819 |
| | | variable region | | SEQ ID NO: 60 | |
| AD597 | tau | Heavy chain | NI-105.26B12 | WO2014100600 | 4820 |
| | | variable region | | SEQ ID NO: 62 | |
| AD598 | tau | Heavy chain | NI-105.12E12 | WO2014100600 | 4821 |
| | | variable region | | SEQ ID NO: 65 | |
| AD599 | tau | Heavy chain | NI-105.60E7 | WO2014100600 | 4822 |
| | | variable region | | SEQ ID NO: 67 | |
| AD600 | tau | Heavy chain | NI-105.14E2 | WO2014100600 | 4823 |
| | | variable region | | SEQ ID NO: 69 | |
| AD601 | tau | Heavy chain | NI-105.39E2 | WO2014100600 | 4824 |
| | | variable region | | SEQ ID NO: 71 | |
| AD602 | tau | Heavy chain | NI-105.19C6 | WO2014100600 | 4825 |
| | | variable region | | SEQ ID NO: 73 | |
| AD603 | tau | Heavy chain | | WO2014100600 | 4826 |
| | | variable region | | SEQ ID NO: 75 | |
| AD604 | tau | Heavy chain | NI-105.9C4 | WO2014100600 | 4827 |
| | | variable region | | SEQ ID NO: 76 | |
| AD605 | tau | Heavy chain | IPN002 variant 1 | U.S. Pat. No. 8,926,974 | 4828 |
| | | variable region | | SEQ ID NO: 36 | |
| AD606 | tau | Heavy chain | IPN002 variant 2 | U.S. Pat. No. 8,926,974 | 4829 |
| | | variable region | | SEQ ID NO: 37 | |
| AD607 | tau | Heavy chain | IPN002 variant 3 | U.S. Pat. No. 8,926,974 | 4830 |
| | | variable region | | SEQ ID NO: 38 | |
| AD608 | tau | Heavy chain | IPN002 variant 4 | U.S. Pat. No. 8,926,974 | 4831 |
| | | variable region | | SEQ ID NO: 39 | |
| AD609 | tau | Heavy chain | PT1 | US20150307600 | 4832 |
| | | variable region | | SEQ ID NO: 35 | |
| AD610 | tau | Heavy chain | PT3 | US20150307600 | 4833 |
| | | variable region | | SEQ ID NO: 37 | |
| AD611 | tau | Heavy chain | | U.S. Pat. No. 9,304,138 | 4834 |
| | | variable region | | SEQ ID NO: 1 | |
| AD612 | tau | Heavy chain | | U.S. Pat. No. 9,304,138 | 4835 |
| | | variable region | | SEQ ID NO: 2 | |
| AD613 | tau | Heavy chain | | U.S. Pat. No. 9,304,138 | 4836 |
| | | variable region | | SEQ ID NO: 3 | |
| AD614 | tau | Heavy chain | | U.S. Pat. No. 9,304,138 | 4837 |
| | | variable region | | SEQ ID NO: 4 | |
| AD615 | tau | Heavy chain | | U.S. Pat. No. 9,304,138 | 4838 |
| | | variable region | | SEQ ID NO: 5 | |
| AD616 | tau | Heavy chain | | U.S. Pat. No. 9,304,138 | 4839 |
| | | variable region | | SEQ ID NO: 68 | |
| AD617 | tau | Heavy chain | | U.S. Pat. No. 9,304,138 | 4840 |
| | | variable region | | SEQ ID NO: 76 | |
| AD618 | tau | Heavy chain | | U.S. Pat. No. 9,304,138 | 4841 |
| | | variable region | | SEQ ID NO: 88 | |
| AD619 | tau | Heavy chain | | U.S. Pat. No. 9,304,138 | 4842 |
| | | variable region | | SEQ ID NO: 96 | |
| AD620 | tau | Heavy chain | | U.S. Pat. No. 9,304,138 | 4843 |
| | | variable region | | SEQ ID NO: 104 | |
| AD621 | tau | Heavy chain | hACl-36-3A8-Ab1 | US20150175682 | 4844 |
| | | variable region | and hACl-36-2B6-Ab1 | SEQ ID NO: 7 | |
| AD622 | tau | Heavy chain | hACl-36-3A8-Ab1.v2. | US20150175682 | 4845 |
| | | variable region | | SEQ ID NO: 20 | |
| AD623 | tau | Heavy chain | hACl-36-2B6-Ab1.v2 | US20150175682 | 4846 |
| | | variable region | | SEQ ID NO: 21 | |
| AD624 | tau | Heavy chain | ADx210 | US20140161875 | 4847 |
| | | variable region | | SEQ ID NO: 15 | |
| AD625 | tau | Heavy chain | ADx210 subpart | US20140161875 | 4848 |
| | | variable region | | SEQ ID NO: 17 | |
| AD626 | tau | Heavy chain | ADx215 | US20140161875 | 4849 |
| | | variable region | | SEQ ID NO: 25 | |
| AD627 | tau antigen | Heavy chain | ADx202 | WO2015004163 | 4850 |
| | | variable region | | SEQ ID NO: 14 | |
| AD628 | tau ps 422 | Heavy chain | antibody Mab2.10.3 | US20110059093 | 4851 |
| | | variable region | | SEQ ID NO: 2 | |
| AD629 | tau ps 422 | Heavy chain | Mab 005 | US20110059093 | 4852 |
| | | variable region | | SEQ ID NO: 22 | |
| AD630 | tau ps 422 | Heavy chain | Mab 019 | US20110059093 | 4853 |
| | | variable region | | SEQ ID NO: 30 | |
| AD631 | tau ps 422 | Heavy chain | Mab 020 | US20110059093 | 4854 |
| | | variable region | | SEQ ID NO: 38 | |
| AD632 | tau ps 422 | Heavy chain | Mab 085 | US20110059093 | 4855 |
| | | variable region | | SEQ ID NO: 46 | |
| AD633 | tau ps 422 | Heavy chain | Mab 086 | US20110059093 | 4856 |
| | | variable region | | SEQ ID NO: 54 | |
| AD634 | tau ps 422 | Heavy chain | Mab 097 | US20110059093 | 4857 |
| | | variable region | | SEQ ID NO: 62 | |
| AD635 | TrkA | Heavy chain | HuVHWO | WO2009098238 | 4858 |
| | | variable region | | SEQ ID NO: 17 | |
| AD636 | NOGO | Heavy chain | 2A10 construct | WO2007003421 | 4859 |
| | | variable region | | SEQ ID NO: 77 | |
| | | humanized | | | |
| | | construct H1 | | | |
| AD637 | NOGO | Heavy chain | 2A10 construct | WO2007003421 | 4860 |
| | | variable region | | SEQ ID NO: 14 | |
| | | humanized | | | |
| | | construct H14 | | | |
| AD638 | NOGO | Heavy chain | 2A10 construct | WO2007003421 | 4861 |
| | | variable region | | SEQ ID NO: 15 | |
| | | humanized | | | |
| | | construct H15 | | | |
| AD639 | NOGO | Heavy chain | 2A10 construct | WO2007003421 | 4862 |
| | | variable region | | SEQ ID NO: 16 | |
| | | humanized | | | |
| | | construct H16 | | | |
| AD640 | NOGO | Heavy chain | 2A10 construct | WO2007003421 | 4863 |
| | | variable region | | SEQ ID NO: 17 | |
| | | humanized | | | |
| | | construct H17 | | | |
| AD641 | NOGO | Heavy chain | 2A10 construct | WO2007003421 | 4864 |
| | | variable region | | SEQ ID NO: 18 | |
| | | humanized | | | |
| | | construct H18 | | | |
| AD642 | NOGO | Heavy chain | 2A10 construct | WO2007003421 | 4865 |
| | | variable region | | SEQ ID NO: 85 | |
| | | humanized | | | |
| | | construct H19 | | | |
| AD643 | NOGO | Heavy chain | 2A10 construct | WO2007003421 | 4866 |
| | | variable region | | SEQ ID NO: 86 | |
| | | humanized | | | |
| | | construct H20 | | | |
| AD644 | NOGO | Heavy chain | 2A10 construct | WO2007003421 | 4867 |
| | | variable region | | SEQ ID NO: 87 | |
| | | humanized | | | |
| | | construct H21 | | | |
| AD645 | NOGO | Heavy chain | 2A10 construct | WO2007003421 | 4868 |
| | | variable region | | SEQ ID NO: 88 | |
| | | humanized | | | |
| | | construct H22 | | | |
| AD646 | NOGO | Heavy chain | 2A10 construct | WO2007003421 | 4869 |
| | | variable region | | SEQ ID NO: 89 | |
| | | humanized | | | |
| | | construct H23 | | | |
| AD647 | NOGO | Heavy chain | 2A10 construct | WO2007003421 | 4870 |
| | | variable region | | SEQ ID NO: 90 | |
| | | humanized | | | |
| | | construct H24 | | | |
| AD648 | NOGO | Heavy chain | 2A10 construct | WO2007003421 | 4871 |
| | | variable region | | SEQ ID NO: 91 | |
| | | humanized | | | |
| | | construct H25 | | | |
| AD649 | NOGO | Heavy chain | 2A10 construct | WO2007003421 | 4872 |
| | | variable region | | SEQ ID NO: 11 | |
| | | humanized | | | |
| | | construct H5 | | | |
| AD650 | NOGO | Heavy chain | 2A10 construct | WO2007003421 | 4873 |
| | | variable region | | SEQ ID NO: 12 | |
| | | humanized | | | |
| | | construct H6 | | | |
| AD651 | NOGO | Heavy chain | 2A10 construct | WO2007003421 | 4874 |
| | | variable region | | SEQ ID NO: 13 | |
| | | humanized | | | |
| | | construct H700 | | | |
| AD652 | beta A4 | Heavy chain with | Antibody A | WO2007068429 | 4875 |
| | peptide/Alpha | Fc region | | SEQ ID NO: 26 | |
| | beta 8 | | | | |
| AD653 | ACTH | Light chain | Ab3 | WO2015127288 | 4876 |
| | | | | SEQ ID NO: 101 | |
| AD654 | ACTH | Light chain | Ab4 | WO2015127288 | 4877 |
| | | | | SEQ ID NO: 141 | |
| AD655 | ACTH | Light chain | Ab5 | WO2015127288 | 4878 |
| | | | | SEQ ID NO: 181 | |
| AD656 | ACTH | Light chain | Ab1 | WO2015127288 | 4879 |
| | | | | SEQ ID NO: 21 | |
| AD657 | ACTH | Light chain | Ab6 | WO2015127288 | 4880 |
| | | | | SEQ ID NO: 221 | |
| AD658 | ACTH | Light chain | Ab7 | WO2015127288 | 4881 |
| | | | | SEQ ID NO: 261 | |
| AD659 | ACTH | Light chain | Ab9 | WO2015127288 | 4882 |
| | | | | SEQ ID NO: 301 | |
| AD660 | ACTH | Light chain | Ab10 | WO2015127288 | 4883 |
| | | | | SEQ ID NO: 341 | |
| AD661 | ACTH | Light chain | Ab11 | WO2015127288 | 4884 |
| | | | | SEQ ID NO: 381 | |
| AD662 | ACTH | Light chain | Ab12 | WO2015127288 | 4885 |
| | | | | SEQ ID NO: 421 | |
| AD663 | ACTH | Light chain | Ab1.H | WO2015127288 | 4886 |
| | | | | SEQ ID NO: 461 | |
| AD664 | ACTH | Light chain | Ab2.H | WO2015127288 | 4887 |
| | | | | SEQ ID NO: 501 | |
| AD665 | ACTH | Light chain | Ab3.H | WO2015127288 | 4888 |
| | | | | SEQ ID NO: 541 | |
| AD666 | ACTH | Light chain | Ab4.H | WO2015127288 | 4889 |
| | | | | SEQ ID NO: 581 | |
| AD667 | ACTH | Light chain | Ab2 | WO2015127288 | 4890 |
| | | | | SEQ ID NO: 61 | |
| AD668 | ACTH | Light chain | Ab6.H | WO2015127288 | 4891 |
| | | | | SEQ ID NO: 621 | |
| AD669 | ACTH | Light chain | Ab7.H | WO2015127288 | 4892 |
| | | | | SEQ ID NO: 661 | |
| AD670 | ACTH | Light chain | Ab7A.H | WO2015127288 | 4893 |
| | | | | SEQ ID NO: 701 | |
| AD671 | ACTH | Light chain | Ab10.H | WO2015127288 | 4894 |
| | | | | SEQ ID NO: 741 | |
| AD672 | ACTH | Light chain | Ab11.H | WO2015127288 | 4895 |
| | | | | SEQ ID NO: 781 | |
| AD673 | ACTH | Light chain | Ab11A.H | WO2015127288 | 4896 |
| | | | | SEQ ID NO: 821 | |
| AD674 | ACTH | Light chain | Ab12.H | WO20151.27288 | 4897 |
| | | | | SEQ ID NO: 861 | |
| AD675 | Alpha beta | Light chain | Gantenerumab | Immunogenetics | 4898 |
| | fibril | | | Informition | |
| | | | | System; CHAIN | |
| | | | | ID NO: 8894_L. | |
| AD676 | amyloid beta | Light chain | | US719,576 | 4899 |
| | peptide Aβ | | | SEQ ID NO: 11 | |
| AD677 | Amyloid | Light chain | 3 Fab of Yw412.8.31 | Wang, W. et al. “A | 4900 |
| | beta/BACE1 | | | Therapeutic | |
| | | | | Antibody Targeting | |
| | | | | BACE1 Inhibits | |
| | | | | Amyloid NO: - | |
| | | | | {beta}Production | |
| | | | | in Vivo” Sci Transl | |
| | | | | Med 3 (84), | |
| | | | | 84RA43 (2011), | |
| | | | | NCBI Accession # | |
| | | | | 3RIG_L (222aa) | |
| AD678 | amyloid or | Light chain | Humanized C2 | WO2008061796 | 4901 |
| | amyloid-like | | | SEQ ID NO: 2 | |
| | proteins | | | | |
| AD679 | amyloid protein | Light chain | C2 | US20100150906 | 4902 |
| | | | | SEQ ID NO: 13 | |
| AD680 | amyloids | Light chain | #118 | WO2010012004 | 4903 |
| | | | | SEQ ID NO: 10 | |
| AD681 | amyloids | Light chain | #121 | WO2010012004 | 4904 |
| | | | | SEQ ID NO: 12 | |
| AD682 | amyloids | Light chain | #201 | WO2010012004 | 4905 |
| | | | | SEQ ID NO: 14 | |
| AD683 | amyloids | Light chain | #204 | WO2010012004 | 4906 |
| | | | | SEQ ID NO: 15 | |
| AD684 | amyloids | Light chain | #205 | WO2010012004 | 4907 |
| | | | | SEQ ID NO: 17 | |
| AD685 | APP | Light chain | F5.100 | WO2014151747 | 4908 |
| | | | | SEQ ID NO: | |
| AD686 | APP | Light chain | BBS1 MAb | WO2014151747 | 4909 |
| | | | | SEQ ID NO: 25 | |
| AD687 | APP | Light chain | F5.87 | WO2014151747 | 4910 |
| | | | | SEQ ID NO: 27 | |
| AD688 | APP | Light chain | F5.87 | WO2014151747 | 4911 |
| | | | | SEQ ID NO: 54 | |
| AD689 | Aβ amyloids | Light chain | Humanized 12A11, | U.S. Pat. No. 8,784,810 | 4912 |
| | | | version 2 | SEQ ID NO: 10 | |
| AD690 | Aβ amyloids | Light chain | Humanized 3D6 | U.S. Pat. No. 8,784,810 | 4913 |
| | | | (Bapineuzumab), | SEQ ID NO: 6 | |
| | | | version 3 | | |
| AD691 | beta A4 | Light chain | Antibody A | WO2007068429 | 4914 |
| | peptide/Alpha | | | SEQ ID NO: 8 | |
| | beta 6 | | | | |
| AD692 | beta A4 | Light chain | Antibody A | WO2007068429 | 4915 |
| | peptide/Alpha | | | SEQ ID NO: 22 | |
| | beta 7 | | | | |
| AD693 | beta amyloid | Light chain | | U.S. Pat. No. 10,476,265 | 4916 |
| | | | | SEQ ID NO: 19 | |
| AD694 | beta amyloid | Light chain | | U.S. Pat. No. 13,319,710 | 4917 |
| | | | | SEQ ID NO: 22 | |
| AD695 | beta amyloid | Light chain | | U.S. Pat. No. 13,319,710 | 4918 |
| | | | | SEQ ID NO: 28 | |
| AD696 | beta amyloid | Light chain | (13C3) | U.S. Pat. No. 13,319,710 | 4919 |
| | | | | SEQ ID NO: 4 | |
| AD697 | beta amyloid | Light chain | C2 | US20070166311 | 4920 |
| | | | | SEQ ID NO: 21 | |
| AD698 | beta amyloid | Light chain | Solanezumab | Immunogenetics | 4921 |
| | peptide | | | Information | |
| | | | | System; CHAIN | |
| | | | | ID NO: 9097_L. | |
| AD699 | beta amyloid | Light chain | Mature L1 | WO2007113172 | 4922 |
| | peptide | | | SEQ ID NO: 40 | |
| AD700 | beta-amyloid | Light chain | Aducanumab, | | 4923 |
| | | | BIIB0307 | | |
| AD701 | EAG1 | Light chain | chimeric ImAb3 | WO2006037604 | 4924 |
| | | | | SEQ ID NO: 10 | |
| AD702 | EAG1 | Light chain | chimeric ImAb4 | WO2006037604 | 4925 |
| | | | | SEQ ID NO: 14 | |
| AD703 | EAG1 | Light chain | LC-lmAb3-humB3 | WO2006037604 | 4926 |
| | | | | SEQ ID NO: 18 | |
| AD704 | EAG1 | Light chain | ImAb4 | WO2006037604 | 4927 |
| | | | | SEQ ID NO: 2 | |
| AD705 | EAG1 | Light chain | LC-lmAb4-humA17 | WO2006037604 | 4928 |
| | | | | SEQ ID NO: 22 | |
| AD706 | EAG1 | Light chain | LC-lmAb3-humA3 | WO2006037604 | 4929 |
| | | | | SEQ ID NO: 26 | |
| AD707 | EAG1 | Light chain | LC-lmAb3-humA17 | WO2006037604 | 4930 |
| | | | | SEQ ID NO: 30 | |
| AD708 | EAG1 | Light chain | LC-lmAb4-humA5-1 | WO2006037604 | 4931 |
| | | | | SEQ ID NO: 34 | |
| AD709 | EAG1 | Light chain | LC-lmAb4-humO1 | WO2006037604 | 4932 |
| | | | | SEQ ID NO: 38 | |
| AD710 | EAG1 | Light chain | ImAb3 | WO2006037604 | 4933 |
| | | | | SEQ ID NO: 6 | |
| AD711 | IGG1 Abeta | Light chain | Humanized C2 | US20090155249 | 4934 |
| | | | | SEQ ID NO: 13 | |
| AD712 | NOGO | Light chain | H6L13 FL, H19L13 | US20140147435 | 4935 |
| | | | FL, H20L13 FL, | SEQ ID NO: 35 | |
| | | | H21L13 FL, H25L13 | | |
| | | | FL | | |
| AD713 | NOGO | Light chain | H16L16 FL, H19L16 | US20140147435 | 4936 |
| | | | FL, H20L16 FL, | SEQ ID NO: 38 | |
| | | | H21L16 FL, H25L16 | | |
| | | | FL, H18L16 FL | | |
| AD714 | NOGO | Light chain | H16L18 FL, H19L18 | US20140147435 | 4937 |
| | | | FL, H20L18 FL, | SEQ ID NO: 40 | |
| | | | H21L18 FL, H25L18 | | |
| | | | FL | | |
| AD715 | Nogo receptor-1 | Light chain | 7E11 | US20090215691 | 4938 |
| | | | | SEQ ID NO: 15 | |
| AD716 | Nogo receptor-2 | Light chain | 7E11 | US20090215691 | 4939 |
| | | | | SEQ ID NO: 17 | |
| AD717 | PrPC and/or | Light chain | | US20150166668 | 4940 |
| | PrPSc | | | SEQ ID NO: 9 | |
| AD718 | PrPC and/or | Light chain | | U.S. Pat. No. 8,852,587 | 4941 |
| | PrPSc | | | SEQ ID NO: 5 | |
| AD719 | tau | Light chain | hACl-36-3A8 Ab1, | WO2013151762 | 4942 |
| | | | hACl-36-3A8 Ab1.v2, | SEQ ID NO: 22 | |
| | | | hACl-36-3A8 Ab1.v3, | | |
| | | | hACl-36-3A8 Ab1.v4 | | |
| AD720 | tau | Light chain | hACl-36-3B8 Ab1, | WO2013151762 | 4943 |
| | | | hACl-36-3B8 Ab1.v2, | SEQ ID NO: 23 | |
| | | | hACl-36-3B8 Ab1.v3, | | |
| | | | hACl-36-3B8 Ab1.v4 | | |
| AD721 | tau | Light chain | IPN001 | U.S. Pat. No. 8,980,271 | 4944 |
| | | | | SEQ ID NO: 13 | |
| AD722 | tau | Light chain | IPN002 | U.S. Pat. No. 8,980,271 | 4945 |
| | | | | SEQ ID NO: 15 | |
| AD723 | tau | Light chain | hACl-36-3A8- | US20150175682 | 4946 |
| | | | Ab1 and hACl-36- | SEQ ID NO: 18 | |
| | | | 2B6-Ab1 | | |
| AD724 | tau | Light chain | hACl-36-3A8-Ab1 | US20150175682 | 4947 |
| | | | (IgG4), hACl-36-3A8- | SEQ ID NO: 22 | |
| | | | Ab1.v2 (IgG4), hACl- | | |
| | | | 36-3A8-Ab1.v3 | | |
| | | | (IgG1), and hACl-36- | | |
| | | | 3A8-Ab1.v4 (IgG1 | | |
| | | | N297G) | | |
| AD725 | tau | Light chain | hACl-36-2B6-Ab1 | US20150175682 | 4948 |
| | | | (IgG4), hACl-36-2B6- | SEQ ID NO: 23 | |
| | | | Ab1.v2 (IgG4), hACl- | | |
| | | | 36-2B6-Ab1.v3 | | |
| | | | (IgG1), and hACl-36- | | |
| | | | 2B6-Ab1.v4 (IgG1 | | |
| | | | N297G) | | |
| AD726 | tau | Light chain | hACl-36-3A8-Ab1 | US20150175682 | 4949 |
| | | | (IgG4) | SEQ ID NO: 24 | |
| AD727 | TrkA | Light chain | BXhVL4 | WO2009098238 | 4950 |
| | | | | SEQ ID NO: 10 | |
| AD728 | TrkA | Light chain | BXhVL5 | WO2009098238 | 4951 |
| | | | | SEQ ID NO: 11 | |
| AD729 | TrkA | Light chain | BXhVLβ | WO2009098238 | 4952 |
| | | | | SEQ ID NO: 12 | |
| AD730 | TrkA | Light chain | BXhVL7 | WO2009098238 | 4953 |
| | | | | SEQ ID NO: 13 | |
| AD731 | TrkA | Light chain | BXhVL8 | WO2009098238 | 4954 |
| | | | | SEQ ID NO: 14 | |
| AD732 | TrkA | Light chain | mVLEP | WO2009098238 | 4955 |
| | | | | SEQ ID NO: 16 | |
| AD733 | TrkA | Light chain | BXhVL1 | WO2009098238 | 4956 |
| | | | | SEQ ID NO: 7 | |
| AD734 | TrkA | Light chain | BXhVL2 | WO2009098238 | 4957 |
| | | | | SEQ ID NO: 8 | |
| AD735 | TrkA | Light chain | BXhVL3 | WO2009098238 | 4958 |
| | | | | SEQ ID NO: 9 | |
| AD736 | trk-C (NT-3 | Light chain | 2250 | U.S. Pat. No. 7,615,383 | 4959 |
| | trkC ligand) | | | SEQ ID NO: 49 | |
| AD737 | trk-C (NT-3 | Light chain | 2253 | U.S. Pat. No. 7,615,383 | 4960 |
| | trkC ligand) | | | SEQ ID NO: 50 | |
| AD738 | trk-C (NT-3 | Light chain | 2256 | U.S. Pat. No. 7,615,383 | 4961 |
| | trkC ligand) | | | SEQ ID NO: 51 | |
| AD739 | trk-C (NT-3 | Light chain | 6.1.2 | U.S. Pat. No. 7,615,383 | 4962 |
| | trkC ligand) | | | SEQ ID NO: 52 | |
| AD740 | trk-C (NT-3 | Light chain | 6.4.1 | U.S. Pat. No. 7,615,383 | 4963 |
| | trkC ligand) | | | SEQ ID NO: 53 | |
| AD741 | trk-C (NT-3 | Light chain | 2345 | U.S. Pat. No. 7,615,383 | 4964 |
| | trkC ligand) | | | SEQ ID NO: 54 | |
| AD742 | trk-C (NT-3 | Light chain | 2349 | U.S. Pat. No. 7,615,383 | 4965 |
| | trkC ligand) | | | SEQ ID NO: 55 | |
| AD743 | | Light chain | Crenezumab light | | 4966 |
| | | | CHAIN | | |
| AD744 | | Light chain | Gantenerumab light | | 4967 |
| | | | chain | | |
| AD745 | | Light chain | Ponezumab light | | 4968 |
| | | | CHAIN | | |
| AD746 | | Light chain | Solanezumab light | | 4969 |
| | | | CHAIN | | |
| AD747 | amyloid protein | Light chain | C2 | US20100150906 | 4970 |
| | | constant region | | SEQ ID NO: 14 | |
| AD748 | IGG1 Abeta | Light Chain | Humanized C2 | US20090155249 | 4971 |
| | | constant region | | SEQ ID NO: 14 | |
| AD749 | ApoE | Light chain | 2e8 Fab | Trakhanov, S. et al. | 4972 |
| | | fragment | | “Structure of a | |
| | | | | monoclonal 2E8 | |
| | | | | Fab antibody | |
| | | | | fragment specific | |
| | | | | for the low-density | |
| | | | | lipoprotein- | |
| | | | | receptor binding | |
| | | | | region of | |
| | | | | apolipoprotein E | |
| | | | | refined at 1.9 A”, | |
| | | | | Acta Crystallogr. D | |
| | | | | Biol. Crystallogr. | |
| | | | | 55 (PT 1), 122-128 | |
| | | | | (1999), NCBI | |
| | | | | Accession # | |
| | | | | 12E8 M | |
| AD750 | many - growth | Light chain fusion | H21L13, H21L16, | U.S. Pat. No. 8,053,569 | 4973 |
| | factors | protein | H21L18, H21L14, | SEQ ID NO: 31 | |
| | | | H21L15, H21L17, | | |
| | | | H21L6, H21L11 | | |
| AD751 | many - growth | Light chain fusion | H23L13, H23L16, | U.S. Pat. No. 8,053,569 | 4974 |
| | factors | protein | H23L18, H23L14, | SEQ ID NO: 36 | |
| | | | H23L15, H23L17, | | |
| | | | H23L6, H23L11 | | |
| AD752 | NOGO | Light chain | 2A10 construct | WO2007003421 | 4975 |
| | | humanized | | SEQ ID NO: 80 | |
| | | construct L11 | | | |
| AD753 | NOGO | Light chain | 2A10 construct | WO2007003421 | 4976 |
| | | humanized | | SEQ ID NO: 35 | |
| | | construct L13 | | | |
| AD754 | NOGO | Light chain | 2A10 construct | WO2007003421 | 4977 |
| | | humanized | | SEQ ID NO: 36 | |
| | | construct L14 | | | |
| AD755 | NOGO | Light chain | 2A10 construct | WO2007003421 | 4978 |
| | | humanized | | SEQ ID NO: 37 | |
| | | construct L15 | | | |
| AD756 | NOGO | Light chain | 2A10 construct | WO2007003421 | 4979 |
| | | humanized | | SEQ ID NO: 38 | |
| | | construct L16 | | | |
| AD757 | NOGO | Light chain | 2A10 construct | WO2007003421 | 4980 |
| | | humanized | | SEQ ID NO: 39 | |
| | | construct L17 | | | |
| AD758 | NOGO | Light chain | 2A10 construct | WO2007003421 | 4981 |
| | | humanized | | SEQ ID NO: 40 | |
| | | construct L18 | | | |
| AD759 | NOGO | Light chain | 2A10 construct | WO2007003421 | 4982 |
| | | humanized | | SEQ ID NO: 34 | |
| | | construct L6 | | | |
| AD760 | RTN4 | Light chain IgG4, | Atinumab | U.S. Pat. No. 8,163,285 | 4983 |
| | | immunomodulator | | SEQ ID NO: 25 | |
| AD761 | tau | Light chain mature | ch4E4 | US20150252102 | 4984 |
| | | | | SEQ ID NO: 21 | |
| AD762 | A beta | Light chain | IR-008 | U.S. Pat. No. 8,858,949 | 4985 |
| | oligomers | variable region | | SEQ ID NO: 100 | |
| AD763 | A beta | Light chain | IR-072 | U.S. Pat. No. 8,858,949 | 4986 |
| | oligomers | variable region | | SEQ ID NO: 1012 | |
| AD764 | A beta | Light chain | IR-073 | U.S. Pat. No. 8,858,949 | 4987 |
| | oligomers | variable region | | SEQ ID NO: 1028 | |
| AD765 | A beta | Light chain | IR-074 | U.S. Pat. No. 8,858,949 | 4988 |
| | oligomers | variable region | | SEQ ID NO: 1044 | |
| AD766 | A beta | Light chain | IR-075 | U.S. Pat. No. 8,858,949 | 4989 |
| | oligomers | variable region | | SEQ ID NO: 1060 | |
| AD767 | A beta | Light chain | IR-076 | U.S. Pat. No. 8,858,949 | 4990 |
| | oligomers | variable region | | SEQ ID NO: 1076 | |
| AD768 | A beta | Light chain | IR-077 | U.S. Pat. No. 8,858,949 | 4991 |
| | oligomers | variable region | | SEQ ID NO: 1092 | |
| AD769 | A beta | Light chain | IR-078 | U.S. Pat. No. 8,858,949 | 4992 |
| | oligomers | variable region | | SEQ ID NO: 1108 | |
| AD770 | A beta | Light chain | IR-079 | U.S. Pat. No. 8,858,949 | 4993 |
| | oligomers | variable region | | SEQ ID NO: 1124 | |
| AD771 | A beta | Light chain | IR-080 | U.S. Pat. No. 8,858,949 | 4994 |
| | oligomers | variable region | | SEQ ID NO: 1140 | |
| AD772 | A beta | Light chain | IR-081 | U.S. Pat. No. 8,858,949 | 4995 |
| | oligomers | variable region | | SEQ ID NO: 1156 | |
| AD773 | A beta | Light chain | IR-011 | U.S. Pat. No. 8,858,949 | 4996 |
| | oligomers | variable region | | SEQ ID NO: 116 | |
| AD774 | A beta | Light chain | IR-082 | U.S. Pat. No. 8,858,949 | 4997 |
| | oligomers | variable region | | SEQ ID NO: 1172 | |
| AD775 | A beta | Light chain | IR-083 | U.S. Pat. No. 8,858,949 | 4998 |
| | oligomers | variable region | | SEQ ID NO: 1188 | |
| AD776 | A beta | Light chain | IR-084 | U.S. Pat. No. 8,858,949 | 4999 |
| | oligomers | variable region | | SEQ ID NO: 1204 | |
| AD777 | A beta | Light chain | IR-085 | U.S. Pat. No. 8,858,949 | 5000 |
| | oligomers | variable region | | SEQ ID NO: 1220 | |
| AD778 | A beta | Light chain | IR-086 | U.S. Pat. No. 8,858,949 | 5001 |
| | oligomers | variable region | | SEQ ID NO: 1236 | |
| AD779 | A beta | Light chain | IR-087 | U.S. Pat. No. 8,858,949 | 5002 |
| | oligomers | variable region | | SEQ ID NO: 1252 | |
| AD780 | A beta | Light chain | IR-088 | U.S. Pat. No. 8,858,949 | 5003 |
| | oligomers | variable region | | SEQ ID NO: 1268 | |
| AD781 | A beta | Light chain | IR-089 | U.S. Pat. No. 8,858,949 | 5004 |
| | oligomers | variable region | | SEQ ID NO: 1284 | |
| AD782 | A beta | Light chain | IR-090 | U.S. Pat. No. 8,858,949 | 5005 |
| | oligomers | variable region | | SEQ ID NO: 1300 | |
| AD783 | A beta | Light chain | IR-092 | U.S. Pat. No. 8,858,949 | 5006 |
| | oligomers | variable region | | SEQ ID NO: 1316 | |
| AD784 | A beta | Light chain | IR-012 | U.S. Pat. No. 8,858,949 | 5007 |
| | oligomers | variable region | | SEQ ID NO: 132 | |
| AD785 | A beta | Light chain | IR-093 | U.S. Pat. No. 8,858,949 | 5008 |
| | oligomers | variable region | | SEQ ID NO: 1332 | |
| AD786 | A beta | Light chain | IR-094 | U.S. Pat. No. 8,858,949 | 5009 |
| | oligomers | variable region | | SEQ ID NO: 1348 | |
| AD787 | A beta | Light chain | IR-095 | U.S. Pat. No. 8,858,949 | 5010 |
| | oligomers | variable region | | SEQ ID NO: 1364 | |
| AD788 | A beta | Light chain | IR-097 | U.S. Pat. No. 8,858,949 | 5011 |
| | oligomers | variable region | | SEQ ID NO: 1380 | |
| AD789 | A beta | Light chain | IR-098 | U.S. Pat. No. 8,858,949 | 5012 |
| | oligomers | variable region | | SEQ ID NO: 1396 | |
| AD790 | A beta | Light chain | IR-100 | U.S. Pat. No. 8,858,949 | 5013 |
| | oligomers | variable region | | SEQ ID NO: 1412 | |
| AD791 | A beta | Light chain | IR-101 | U.S. Pat. No. 8,858,949 | 5014 |
| | oligomers | variable region | | SEQ ID NO: 1428 | |
| AD792 | A beta | Light chain | IR-102 | U.S. Pat. No. 8,858,949 | 5015 |
| | oligomers | variable region | | SEQ ID NO: 1444 | |
| AD793 | A beta | Light chain | IR-104 | U.S. Pat. No. 8,858,949 | 5016 |
| | oligomers | variable region | | SEQ ID NO: 1460 | |
| AD794 | A beta | Light chain | IR-105 | U.S. Pat. No. 8,858,949 | 5017 |
| | oligomers | variable region | | SEQ ID NO: 1476 | |
| AD795 | A beta | Light chain | IR-013 | U.S. Pat. No. 8,858,949 | 5018 |
| | oligomers | variable region | | SEQ ID NO: 148 | |
| AD796 | A beta | Light chain | IR-106 | U.S. Pat. No. 8,858,949 | 5019 |
| | oligomers | variable region | | SEQ ID NO: 1492 | |
| AD797 | A beta | Light chain | IR-107 | U.S. Pat. No. 8,858,949 | 5020 |
| | oligomers | variable region | | SEQ ID NO: 1508 | |
| AD798 | A beta | Light chain | IR-108 | U.S. Pat. No. 8,858,949 | 5021 |
| | oligomers | variable region | | SEQ ID NO: 1524 | |
| AD799 | A beta | Light chain | IR-109 | U.S. Pat. No. 8,858,949 | 5022 |
| | oligomers | variable region | | SEQ ID NO: 1540 | |
| AD800 | A beta | Light chain | IR-110 | U.S. Pat. No. 8,858,949 | 5023 |
| | oligomers | variable region | | SEQ ID NO: 1556 | |
| AD801 | A beta | Light chain | IR-112 | U.S. Pat. No. 8,858,949 | 5024 |
| | oligomers | variable region | | SEQ ID NO: 1572 | |
| AD802 | A beta | Light chain | IR-114 | U.S. Pat. No. 8,858,949 | 5025 |
| | oligomers | variable region | | SEQ ID NO: 1588 | |
| AD803 | A beta | Light chain | IR-115 | U.S. Pat. No. 8,858,949 | 5026 |
| | oligomers | variable region | | SEQ ID NO: 1604 | |
| AD804 | A beta | Light chain | IR-116 | U.S. Pat. No. 8,858,949 | 5027 |
| | oligomers | variable region | | SEQ ID NO: 1620 | |
| AD805 | A beta | Light chain | IR-117 | U.S. Pat. No. 8,858,949 | 5028 |
| | oligomers | variable region | | SEQ ID NO: 1636 | |
| AD806 | A beta | Light chain | IR-014 | U.S. Pat. No. 8,858,949 | 5029 |
| | oligomers | variable region | | SEQ ID NO: 164 | |
| AD807 | A beta | Light chain | IR-118 | U.S. Pat. No. 8,858,949 | 5030 |
| | oligomers | variable region | | SEQ ID NO: 1652 | |
| AD808 | A beta | Light chain | IR-119 | U.S. Pat. No. 8,858,949 | 5031 |
| | oligomers | variable region | | SEQ ID NO: 1668 | |
| AD809 | A beta | Light chain | IR-120 | U.S. Pat. No. 8,858,949 | 5032 |
| | oligomers | variable region | | SEQ ID NO: 1684 | |
| AD810 | A beta | Light chain | IR-121 | U.S. Pat. No. 8,858,949 | 5033 |
| | oligomers | variable region | | SEQ ID NO: 1700 | |
| AD811 | A beta | Light chain | IR-122 | U.S. Pat. No. 8,858,949 | 5034 |
| | oligomers | variable region | | SEQ ID NO: 1716 | |
| AD812 | A beta | Light chain | IR-123 | U.S. Pat. No. 8,858,949 | 5035 |
| | oligomers | variable region | | SEQ ID NO: 1732 | |
| AD813 | A beta | Light chain | IR-124 | U.S. Pat. No. 8,858,949 | 5036 |
| | oligomers | variable region | | SEQ ID NO: 1748 | |
| AD814 | A beta | Light chain | IR-125 | U.S. Pat. No. 8,858,949 | 5037 |
| | oligomers | variable region | | SEQ ID NO: 1764 | |
| AD815 | A beta | Light chain | IR-126 | U.S. Pat. No. 8,858,949 | 5038 |
| | oligomers | variable region | | SEQ ID NO: 1780 | |
| AD816 | A beta | Light chain | IR-127 | U.S. Pat. No. 8,858,949 | 5039 |
| | oligomers | variable region | | SEQ ID NO: 1796 | |
| AD817 | A beta | Light chain | IR-015 | U.S. Pat. No. 8,858,949 | 5040 |
| | oligomers | variable region | | SEQ ID NO: 180 | |
| AD818 | A beta | Light chain | IR-128 | U.S. Pat. No. 8,858,949 | 5041 |
| | oligomers | variable region | | SEQ ID NO: 1812 | |
| AD819 | A beta | Light chain | IR-129 | U.S. Pat. No. 8,858,949 | 5042 |
| | oligomers | variable region | | SEQ ID NO: 1828 | |
| AD820 | A beta | Light chain | IR-131 | U.S. Pat. No. 8,858,949 | 5043 |
| | oligomers | variable region | | SEQ ID NO: 1844 | |
| AD821 | A beta | Light chain | IR-132 | U.S. Pat. No. 8,858,949 | 5044 |
| | oligomers | variable region | | SEQ ID NO: 1860 | |
| AD822 | A beta | Light chain | IR-133 | U.S. Pat. No. 8,858,949 | 5045 |
| | oligomers | variable region | | SEQ ID NO: 1876 | |
| AD823 | A beta | Light chain | IR-134 | U.S. Pat. No. 8,858,949 | 5046 |
| | oligomers | variable region | | SEQ ID NO: 1892 | |
| AD824 | A beta | Light chain | IR-135 | U.S. Pat. No. 8,858,949 | 5047 |
| | oligomers | variable region | | SEQ ID NO: 1908 | |
| AD825 | A beta | Light chain | IR-136 | U.S. Pat. No. 8,858,949 | 5048 |
| | oligomers | variable region | | SEQ ID NO: 1924 | |
| AD826 | A beta | Light chain | IR-137 | U.S. Pat. No. 8,858,949 | 5049 |
| | oligomers | variable region | | SEQ ID NO: 1940 | |
| AD827 | A beta | Light chain | IR-138 | U.S. Pat. No. 8,858,949 | 5050 |
| | oligomers | variable region | | SEQ ID NO: 1956 | |
| AD828 | A beta | Light chain | IR-017 | U.S. Pat. No. 8,858,949 | 5051 |
| | oligomers | variable region | | SEQ ID NO: 196 | |
| AD829 | A beta | Light chain | IR-139 | U.S. Pat. No. 8,858,949 | 5052 |
| | oligomers | variable region | | SEQ ID NO: 1972 | |
| AD830 | A beta | Light chain | IR-140 | U.S. Pat. No. 8,858,949 | 5053 |
| | oligomers | variable region | | SEQ ID NO: 1988 | |
| AD831 | A beta | Light chain | IR-002 | U.S. Pat. No. 8,858,949 | 5054 |
| | oligomers | variable region | | SEQ ID NO: 20 | |
| AD832 | A beta | Light chain | IR-141 | U.S. Pat. No. 8,858,949 | 5055 |
| | oligomers | variable region | | SEQ ID NO: 2004 | |
| AD833 | A beta | Light chain | IR-142 | U.S. Pat. No. 8,858,949 | 5056 |
| | oligomers | variable region | | SEQ ID NO: 2020 | |
| AD834 | A beta | Light chain | IR-143 | U.S. Pat. No. 8,858,949 | 5057 |
| | oligomers | variable region | | SEQ ID NO: 2036 | |
| AD835 | A beta | Light chain | IR-144 | U.S. Pat. No. 8,858,949 | 5058 |
| | oligomers | variable region | | SEQ ID NO: 2052 | |
| AD836 | A beta | Light chain | IR-145 | U.S. Pat. No. 8,858,949 | 5059 |
| | oligomers | variable region | | SEQ ID NO: 2068 | |
| AD837 | A beta | Light chain | IR-146 | U.S. Pat. No. 8,858,949 | 5060 |
| | oligomers | variable region | | SEQ ID NO: 2084 | |
| AD838 | A beta | Light chain | IR-147 | U.S. Pat. No. 8,858,949 | 5061 |
| | oligomers | variable region | | SEQ ID NO: 2100 | |
| AD839 | A beta | Light chain | IR-149 | U.S. Pat. No. 8,858,949 | 5062 |
| | oligomers | variable region | | SEQ ID NO: 2116 | |
| AD840 | A beta | Light chain | IR-020 | U.S. Pat. No. 8,858,949 | 5063 |
| | oligomers | variable region | | SEQ ID NO: 212 | |
| AD841 | A beta | Light chain | IR-150 | U.S. Pat. No. 8,858,949 | 5064 |
| | oligomers | variable region | | SEQ ID NO: 2132 | |
| AD842 | A beta | Light chain | IR-151 | U.S. Pat. No. 8,858,949 | 5065 |
| | oligomers | variable region | | SEQ ID NO: 2148 | |
| AD843 | A beta | Light chain | IR-152 | U.S. Pat. No. 8,858,949 | 5066 |
| | oligomers | variable region | | SEQ ID NO: 2164 | |
| AD844 | A beta | Light chain | IR-153 | U.S. Pat. No. 8,858,949 | 5067 |
| | oligomers | variable region | | SEQ ID NO: 2180 | |
| AD845 | A beta | Light chain | IR-154 | U.S. Pat. No. 8,858,949 | 5068 |
| | oligomers | variable region | | SEQ ID NO: 2196 | |
| AD846 | A beta | Light chain | IR-155 | U.S. Pat. No. 8,858,949 | 5069 |
| | oligomers | variable region | | SEQ ID NO: 2212 | |
| AD847 | A beta | Light chain | IR-156 | U.S. Pat. No. 8,858,949 | 5070 |
| | oligomers | variable region | | SEQ ID NO: 2228 | |
| AD848 | A beta | Light chain | IR-157 | U.S. Pat. No. 8,858,949 | 5071 |
| | oligomers | variable region | | SEQ ID NO: 2244 | |
| AD849 | A beta | Light chain | IR-158 | U.S. Pat. No. 8,858,949 | 5072 |
| | oligomers | variable region | | SEQ ID NO: 2260 | |
| AD850 | A beta | Light chain | IR-159 | U.S. Pat. No. 8,858,949 | 5073 |
| | oligomers | variable region | | SEQ ID NO: 2276 | |
| AD851 | A beta | Light chain | IR-021 | U.S. Pat. No. 8,858,949 | 5074 |
| | oligomers | variable region | | SEQ ID NO: 228 | |
| AD852 | A beta | Light chain | IR-022 | U.S. Pat. No. 8,858,949 | 5075 |
| | oligomers | variable region | | SEQ ID NO: 244 | |
| AD853 | A beta | Light chain | IR-023 | U.S. Pat. No. 8,858,949 | 5076 |
| | oligomers | variable region | | SEQ ID NO: 260 | |
| AD854 | A beta | Light chain | IR-024 | U.S. Pat. No. 8,858,949 | 5077 |
| | oligomers | variable region | | SEQ ID NO: 276 | |
| AD855 | A beta | Light chain | IR-160 | U.S. Pat. No. 8,858,949 | 5078 |
| | oligomers | variable region | | SEQ ID NO: 2864 | |
| AD856 | A beta | Light chain | IR-161 | U.S. Pat. No. 8,858,949 | 5079 |
| | oligomers | variable region | | SEQ ID NO: 2880 | |
| AD857 | A beta | Light chain | IR-025 | U.S. Pat. No. 8,858,949 | 5080 |
| | oligomers | variable region | | SEQ ID NO: 292 | |
| AD858 | A beta | Light chain | IR-026 | U.S. Pat. No. 8,858,949 | 5081 |
| | oligomers | variable region | | SEQ ID NO: 308 | |
| AD859 | A beta | Light chain | IR-027 | U.S. Pat. No. 8,858,949 | 5082 |
| | oligomers | variable region | | SEQ ID NO: 324 | |
| AD860 | A beta | Light chain | IR-028 | U.S. Pat. No. 8,858,949 | 5083 |
| | oligomers | variable region | | SEQ ID NO: 340 | |
| AD861 | A beta | Light chain | IR-029 | U.S. Pat. No. 8.858,949 | 5084 |
| | oligomers | variable region | | SEQ ID NO: 356 | |
| AD862 | A beta | Light chain | IR-004 | U.S. Pat. No. 8,858,949 | 5085 |
| | oligomers | variable region | | SEQ ID NO: 36 | |
| AD863 | A beta | Light chain | IR-030 | U.S. Pat. No. 8,858,949 | 5086 |
| | oligomers | variable region | | SEQ ID NO: 372 | |
| AD864 | A beta | Light chain | IR-031 | U.S. Pat. No. 8,858,949 | 5087 |
| | oligomers | variable region | | SEQ ID NO: 388 | |
| AD865 | A beta | Light chain | IR-001 | U.S. Pat. No. 8,858,949 | 5088 |
| | oligomers | variable region | | SEQ ID NO: 4 | |
| AD866 | A beta | Light chain | IR-032 | U.S. Pat. No. 8,858,949 | 5089 |
| | oligomers | variable region | | SEQ ID NO: 404 | |
| AD867 | A beta | Light chain | IR-033 | U.S. Pat. No. 8,858,949 | 5090 |
| | oligomers | variable region | | SEQ ID NO: 420 | |
| AD868 | A beta | Light chain | IR-034 | U.S. Pat. No. 8,858,949 | 5091 |
| | oligomers | variable region | | SEQ ID NO: 436 | |
| AD869 | A beta | Light chain | IR-035 | U.S. Pat. No. 8,858,949 | 5092 |
| | oligomers | variable region | | SEQ ID NO: 452 | |
| AD870 | A beta | Light chain | IR-036 | U.S. Pat. No. 8,858,949 | 5093 |
| | oligomers | variable region | | SEQ ID NO: 468 | |
| AD871 | A beta | Light chain | IR-037 | U.S. Pat. No. 8,858,949 | 5094 |
| | oligomers | variable region | | SEQ ID NO: 484 | |
| AD872 | A beta | Light chain | IR-038 | U.S. Pat. No. 8,858,949 | 5095 |
| | oligomers | variable region | | SEQ ID NO: 500 | |
| AD873 | A beta | Light chain | IR-039 | U.S. Pat. No. 8,858,949 | 5096 |
| | oligomers | variable region | | SEQ ID NO: 516 | |
| AD874 | A beta | Light chain | IR-005 | U.S. Pat. No. 8,858,949 | 5097 |
| | oligomers | variable region | | SEQ ID NO: 52 | |
| AD875 | A beta | Light chain | IR-040 | U.S. Pat. No. 8,858,949 | 5098 |
| | oligomers | variable region | | SEQ ID NO: 532 | |
| AD876 | A beta | Light chain | IR-041 | U.S. Pat. No. 8,858,949 | 5099 |
| | oligomers | variable region | | SEQ ID NO: 548 | |
| AD877 | A beta | Light chain | IR-043 | U.S. Pat. No. 8,858,949 | 5100 |
| | oligomers | variable region | | SEQ ID NO: 564 | |
| AD878 | A beta | Light chain | IR-044 | U.S. Pat. No. 8,858,949 | 5101 |
| | oligomers | variable region | | SEQ ID NO: 580 | |
| AD879 | A beta | Light chain | IR-045 | U.S. Pat. No. 8,858,949 | 5102 |
| | oligomers | variable region | | SEQ ID NO: 596 | |
| AD880 | A beta | Light chain | IR-046 | U.S. Pat. No. 8,858,949 | 5103 |
| | oligomers | variable region | | SEQ ID NO: 612 | |
| AD881 | A beta | Light chain | IR-048 | U.S. Pat. No. 8,858,949 | 5104 |
| | oligomers | variable region | | SEQ ID NO: 628 | |
| AD882 | A beta | Light chain | IR-049 | U.S. Pat. No. 8,858,949 | 5105 |
| | oligomers | variable region | | SEQ ID NO: 644 | |
| AD883 | A beta | Light chain | IR-050 | U.S. Pat. No. 8,858,949 | 5106 |
| | oligomers | variable region | | SEQ ID NO: 660 | |
| AD884 | A beta | Light chain | IR-051 | U.S. Pat. No. 8,858,949 | 5107 |
| | oligomers | variable region | | SEQ ID NO: 676 | |
| AD885 | A beta | Light chain | IR-006 | U.S. Pat. No. 8,858,949 | 5108 |
| | oligomers | variable region | | SEQ ID NO: 68 | |
| AD886 | A beta | Light chain | IR-052 | U.S. Pat. No. 8,858,949 | 5109 |
| | oligomers | variable region | | SEQ ID NO: 692 | |
| AD887 | A beta | Light chain | IR-053 | U.S. Pat. No. 8,858,949 | 5110 |
| | oligomers | variable region | | SEQ ID NO: 708 | |
| AD888 | A beta | Light chain | IR-054 | U.S. Pat. No. 8,858,949 | 5111 |
| | oligomers | variable region | | SEQ ID NO: 724 | |
| AD889 | A beta | Light chain | IR-055 | U.S. Pat. No. 8,858,949 | 5112 |
| | oligomers | variable region | | SEQ ID NO: 740 | |
| AD890 | A beta | Light chain | IR-056 | U.S. Pat. No. 8,858,949 | 5113 |
| | oligomers | variable region | | SEQ ID NO: 756 | |
| AD891 | A beta | Light chain | IR-057 | U.S. Pat. No. 8,858,949 | 5114 |
| | oligomers | variable region | | SEQ ID NO: 772 | |
| AD892 | A beta | Light chain | IR-058 | U.S. Pat. No. 8,858,949 | 5115 |
| | oligomers | variable region | | SEQ ID NO: 788 | |
| AD893 | A beta | Light chain | IR-059 | U.S. Pat. No. 8,858,949 | 5116 |
| | oligomers | variable region | | SEQ ID NO: 804 | |
| AD894 | A beta | Light chain | IR-060 | U.S. Pat. No. 8,858,949 | 5117 |
| | oligomers | variable region | | SEQ ID NO: 820 | |
| AD895 | A beta | Light chain | IR-061 | U.S. Pat. No. 8,858,949 | 5118 |
| | oligomers | variable region | | SEQ ID NO: 836 | |
| AD896 | A beta | Light chain | IR-007 | U.S. Pat. No. 8,858,949 | 5119 |
| | oligomers | variable region | | SEQ ID NO: 84 | |
| AD897 | A beta | Light chain | IR-062 | U.S. Pat. No. 8,858,949 | 5120 |
| | oligomers | variable region | | SEQ ID NO: 852 | |
| AD898 | A beta | Light chain | IR-063 | U.S. Pat. No. 8,858,949 | 5121 |
| | oligomers | variable region | | SEQ ID NO: 868 | |
| AD899 | A beta | Light chain | IR-064 | U.S. Pat. No. 8,858,949 | 5122 |
| | oligomers | variable region | | SEQ ID NO: 884 | |
| AD900 | A beta | Light chain | IR-065 | U.S. Pat. No. 8,858,949 | 5123 |
| | oligomers | variable region | | SEQ ID NO: 900 | |
| AD901 | A beta | Light chain | IR-066 | U.S. Pat. No. 8,858,949 | 5124 |
| | oligomers | variable region | | SEQ ID NO: 916 | |
| AD902 | A beta | Light chain | IR-067 | U.S. Pat. No. 8,858,949 | 5125 |
| | oligomers | variable region | | SEQ ID NO: 932 | |
| AD903 | A beta | Light chain | IR-068 | U.S. Pat. No. 8,858,949 | 5126 |
| | oligomers | variable region | | SEQ ID NO: 948 | |
| AD904 | A beta | Light chain | IR-069 | U.S. Pat. No. 8,858,949 | 5127 |
| | oligomers | variable region | | SEQ ID NO: 964 | |
| AD905 | A beta | Light chain | IR-070 | U.S. Pat. No. 8,858,949 | 5128 |
| | oligomers | variable region | | SEQ ID NO: 980 | |
| AD906 | A beta | Light chain | IR-071 | U.S. Pat. No. 8,858,949 | 5129 |
| | oligomers | variable region | | SEQ ID NO: 996 | |
| AD907 | AB (1-42) | Light chain | Hu8F5VL | US20090232801 | 5130 |
| | Globulomer | variable region | | SEQ ID NO: 105 | |
| AD908 | AB (1-42) | Light chain | TR1.37′CL | US20090232801 | 5131 |
| | Globulomer | variable region | | SEQ ID NO: 106 | |
| AD909 | AB (1-42) | Light chain | Hu8F5VL | US20090232801 | 5132 |
| | Globulomer | variable region | | SEQ ID NO: 112 | |
| AD910 | AB (1-42) | Light chain | 8F5 hum7 VH | US20090232801 | 5133 |
| | Globulomer | variable region | | SEQ ID NO: 2 | |
| AD911 | AB (20-42) | Light chain | VL 5F7hum8 | US20090175847 | 5134 |
| | Globulomer | variable region | | SEQ ID NO: 2 | |
| AD912 | AB (20-42) | Light chain | VL 7C6hum7 | US20090175847 | 5135 |
| | Globulomer | variable region | | SEQ ID NO: 4 | |
| AD913 | ADDL | Light chain | | WO2007050359 | 5136 |
| | | variable region | | SEQ ID NO: 112 | |
| AD914 | ADDL | Light chain | | WO2007050359 | 5137 |
| | | variable region | | SEQ ID NO: 140 | |
| AD915 | amyloid beta | Light chain | | US719576 | 5138 |
| | peptide Aβ | variable region | | SEQ ID NO: 7 | |
| AD916 | amyloid beta | Light chain | | US719576 | 5139 |
| | peptide Aβ | variable region | | SEQ ID NO: 9 | |
| AD917 | amyloid | Light chain | F11G3 | U.S. Pat. No. 9,125,846 | 5140 |
| | oligomers | variable region | | SEQ ID NO: 12 | |
| AD918 | amyloid or | Light chain | Humanized C2 HIV 1 | WO2008061796 | 5141 |
| | amyloid-like | variable region | | SEQ ID NO: 1 | |
| | proteins | | | | |
| AD919 | amyloid protein | Light chain | C2 HuVK | US20100150906 | 5142 |
| | (IGG1 Abeta) | variable region | | SEQ ID NO: 12 | |
| AD920 | amyloid β | Light chain | Fv1E4 | U.S. Pat. No. 8,222,002 | 5143 |
| | peptide | variable region | | SEQ ID NO: 16 | |
| AD921 | amyloid β | Light chain | Fv1E7 | U.S. Pat. No. 8,222,002 | 5144 |
| | peptide | variable region | | SEQ ID NO: 26 | |
| AD922 | amyloid β | Light chain | Fv2A7 | U.S. Pat. No. 8,222,002 | 5145 |
| | peptide | variable region | | SEQ ID NO: 36 | |
| AD923 | amyloid β | Light chain | Fv2A8 | U.S. Pat. No. 8,222,002 | 5146 |
| | peptide | variable region | | SEQ ID NO: 46 | |
| AD924 | amyloid β | Light chain | Fv2B6 | U.S. Pat. No. 8,222,002 | 5147 |
| | peptide | variable region | | SEQ ID NO: 56 | |
| AD925 | amyloid β | Light chain | Fv1E1 | U.S. Pat. No. 8,222,002 | 5148 |
| | peptide | variable region | | SEQ ID NO: 6 | |
| AD926 | amyloid β | Light chain | B7 | U.S. Pat. No. 8,222,002 | 5149 |
| | peptide | variable region | | SEQ ID NO: 66 | |
| AD927 | amyloid β | Light chain | B6 | U.S. Pat. No. 8,222,002 | 5150 |
| | peptide | variable region | | SEQ ID NO: 76 | |
| AD928 | amyloid β | Light chain | F10 | U.S. Pat. No. 8,222,002 | 5151 |
| | peptide | variable region | | SEQ ID NO: 86 | |
| AD929 | amyloid β | Light chain | D1 | U.S. Pat. No. 8,222,002 | 5152 |
| | peptide | variable region | | SEQ ID NO: 96 | |
| AD930 | ApoE-CTD | Light chain | 807B-M0001-B07 | WO2005051998 | 5153 |
| | | variable region | | SEQ ID NO: 150 | |
| AD931 | ApoE-CTD | Light chain | 807B-M0004-A03 | WO2005051998 | 5154 |
| | | variable region | | SEQ ID NO: 151 | |
| AD932 | ApoE-CTD | Light chain | 807B-M0004-A05 | WO2005051998 | 5155 |
| | | variable region | | SEQ ID NO: 152 | |
| AD933 | ApoE-CTD | Light chain | 807B-M0004-C04 | WO2005051998 | 5156 |
| | | variable region | | SEQ ID NO: 153 | |
| AD934 | ApoE-CTD | Light chain | 807B-M0004-C05 | WO2005051998 | 5157 |
| | | variable region | | SEQ ID NO: 154 | |
| AD935 | ApoE-CTD | Light chain | 807B-M0004-F06 | WO2005051998 | 5158 |
| | | variable region | | SEQ ID NO: 155 | |
| AD936 | ApoE-CTD | Light chain | 807B-M0004-F10 | WO2005051998 | 5159 |
| | | variable region | | SEQ ID NO: 156 | |
| AD937 | ApoE-CTD | Light chain | 807B-M0004-H03 | WO2005051998 | 5160 |
| | | variable region | | SEQ ID NO: 157 | |
| AD938 | ApoE-CTD | Light chain | 807B-M0009-C03 | WO2005051998 | 5161 |
| | | variable region | | SEQ ID NO: 158 | |
| AD939 | ApoE-CTD | Light chain | 807B-M0009-F06 | WO2005051998 | 5162 |
| | | variable region | | SEQ ID NO: 159 | |
| AD940 | ApoE-CTD | Light chain | 807B-M0013-A12 | WO2005051998 | 5163 |
| | | variable region | | SEQ ID NO: 160 | |
| AD941 | ApoE-CTD | Light chain | 807B-M0079-D10 | WO2005051998 | 5164 |
| | | variable region | | SEQ ID NO: 161 | |
| AD942 | ApoE-CTD | Light chain | 807B-M0081-F12 | WO2005051998 | 5165 |
| | | variable region | | SEQ ID NO: 162 | |
| AD943 | ApoE-CTD | Light chain | 807B-M0081-H03 | WO2005051998 | 5166 |
| | | variable region | | SEQ ID NO: 163 | |
| AD944 | ApoE-CTD | Light chain | 807B-M0083-E11 | WO2005051998 | 5167 |
| | | variable region | | SEQ ID NO: 164 | |
| AD945 | ApoE-CTD | Light chain | 807A-M0027-E11 | WO2005051998 | 5168 |
| | | variable region | | SEQ ID NO: 42 | |
| AD946 | ApoE-CTD | Light chain | 807A-M0028-B02 | WO2005051998 | 5169 |
| | | variable region | | SEQ ID NO: 43 | |
| AD947 | ApoE-CTD | Light chain | 807A-M0026-F05 | WO2005051998 | 5170 |
| | | variable region | | SEQ ID NO: 44 | |
| AD948 | APP | Light chain | | WO2014151747 | 5171 |
| | | variable region | | SEQ NO 47 | |
| AD949 | APP | Light chain | | WO2014151747 | 5172 |
| | | variable region | | SEQ NO 45 | |
| AD950 | APP | Light chain | | WO2014151747 | 5173 |
| | | variable region | | SEQ NO 49 | |
| AD951 | APP | Light chain | | WO2014151747 | 5174 |
| | | variable region | | SEQ NO 51 | |
| AD952 | Aβ amyloid | Light chain | 15C11 | WO2006066049 | 5175 |
| | | variable region | | SEQ ID NO: 2 | |
| AD953 | Aβ amyloid | Light chain | 9G8 | WO2006066049 | 5176 |
| | | variable region | | SEQ ID NO: 8 | |
| AD954 | Aβ amyloid | Light chain | 266 | WO2006066049 | 5177 |
| | | variable region | | SEQ ID NO: 9 | |
| AD955 | Aβ amyloid | Light chain | 12A1 | WO2006066089 | 5178 |
| | | variable region | | SEQ ID NO: 2 | |
| AD956 | Aβ amyloid | Light chain | 12A1 | WO2006066089 | 5179 |
| | | variable region | | SEQ ID NO: 4 | |
| AD957 | Aβ amyloid | Light chain | humanized 12Al 1 | WO2006066089 | 5180 |
| | | variable region | | SEQ ID NO: 7 | |
| AD958 | Aβ amyloids | Light chain | Humanized 3D6 | U.S. Pat. No. 8,784,810 | 5181 |
| | | variable region | (Bapineuzumb) | SEQ ID NO: 1 | |
| AD959 | Aβ amyloids | Light chain | Humanized 10D5 | U.S. Pat. No. 8,784,810 | 5182 |
| | | variable region | | SEQ ID NO: 28 | |
| AD960 | Aβ amyloids | Light chain | Humanized 3D6 | U.S. Pat. No. 8,784,810 | 5183 |
| | | variable region | (Bapineuzumb), | SEQ ID NO: 3 | |
| | | | version 2 | | |
| AD961 | Aβ amyloids | Light chain | Humanized 12A11 | U.S. Pat. No. 8,784,810 | 5184 |
| | | variable region | | SEQ ID NO: 7 | |
| AD962 | Aβ peptide | Light chain | | U.S. Pat. No. 8,066,999 | 5185 |
| | | variable region | | SEQ ID NO: 1 | |
| AD963 | Aβ polypeptide | Light chain | preferred embodiment | WO2008084402 | 5186 |
| | | variable region | 1, 8, 12 | SEQ ID NO: 145 | |
| AD964 | Aβ polypeptide | Light chain | preferred embodiment | WO2008084402 | 5187 |
| | | variable region | 5, 13 | SEQ ID NO: 146 | |
| AD965 | Aβ polypeptide | Light chain | | WO2008084402 | 5188 |
| | | variable region | | SEQ ID NO: 147 | |
| AD966 | Aβ polypeptide | Light chain | | WO2008084402 | 5189 |
| | | variable region | | SEQ ID NO: 47 | |
| AD967 | Aβ polypeptide | Light chain | | WO2008084402 | 5190 |
| | | variable region | | SEQ ID NO: 48 | |
| AD968 | Aβ polypeptide | Light chain | | WO2008084402 | 5191 |
| | | variable region | | SEQ ID NO: 49 | |
| AD969 | Aβ polypeptide | Light chain | | WO2008084402 | 5192 |
| | | variable region | | SEQ ID NO: 50 | |
| AD970 | Aβ polypeptide | Light chain | preferred embodiment 3 | WO2008084402 | 5193 |
| | | variable region | | SEQ ID NO: 51 | |
| AD971 | Aβ polypeptide | Light chain | preferred embodiment 4 | WO2008084402 | 5194 |
| | | variable region | | SEQ ID NO: 52 | |
| AD972 | Aβ polypeptide | Light chain | preferred embodiment | WO2008084402 | 5195 |
| | | variable region | 2, 6 | SEQ ID NO: 53 | |
| AD973 | Aβ polypeptide | Light chain | preferred embodiment | WO2008084402 | 5196 |
| | | variable region | 9, 10, 11 | SEQ ID NO: 54 | |
| AD974 | Aβ polypeptide | Light chain | preferred embodiment 7 | WO2008084402 | 5197 |
| | | variable region | | SEQ ID NO: 55 | |
| AD975 | Aβ polypeptide | Light chain | | WO2008084402 | 5198 |
| | | variable region | | SEQ ID NO: 56 | |
| AD976 | beta amyloid | Light chain | 12B4 | U.S. Pat. No. 7,256,273 | 5199 |
| | | variable region | | SEQ ID NO: 2 | |
| AD977 | beta amyloid | Light chain | Germline A19 | U.S. Pat. No. 7,256,273 | 5200 |
| | | variable region | | SEQ ID NO: 30 | |
| AD978 | beta amyloid | Light chain | Kabat ID 000333 | U.S. Pat. No. 7,256,273 | 5201 |
| | | variable region | | SEQ ID NO: 32 | |
| AD979 | beta amyloid | Light chain | humanized 12B4 | U.S. Pat. No. 7,256,273 | 5202 |
| | | variable region | | SEQ ID NO: 6 | |
| AD980 | beta amyloid | Light chain | VL A | U.S. Pat. No. 8,323,647 | 5203 |
| | | variable region | | SEQ ID NO: 10 | |
| AD981 | beta amyloid | Light chain | VL B | U.S. Pat. No. 8,323,647 | 5204 |
| | | variable region | | SEQ ID NO: 11 | |
| AD982 | beta amyloid | Light chain | VL C | U.S. Pat. No. 8,323,647 | 5205 |
| | | variable region | | SEQ ID NO: 12 | |
| AD983 | beta amyloid | Light chain | VL D | U.S. Pat. No. 8,323,647 | 5206 |
| | | variable region | | SEQ ID NO: 13 | |
| AD984 | beta amyloid | Light chain | VL E | U.S. Pat. No. 8,323,647 | 5207 |
| | | variable region | | SEQ ID NO: 14 | |
| AD985 | beta amyloid | Light chain | VL F | U.S. Pat. No. 8,323,647 | 5208 |
| | | variable region | | SEQ ID NO: 15 | |
| AD986 | beta amyloid | Light chain | VL G | U.S. Pat. No. 8,323,647 | 5209 |
| | | variable region | | SEQ ID NO: 16 | |
| AD987 | beta amyloid | Light chain | ESBA212 | U.S. Pat. No. 8,323,647 | 5210 |
| | | variable region | | SEQ ID NO: 7 | |
| AD988 | beta amyloid | Light chain | Framework 2.3 | U.S. Pat. No. 8,323,647 | 5211 |
| | | variable region | | SEQ ID NO: 8 | |
| AD989 | beta amyloid | Light chain | 22C4 | U.S. Pat. No. 8,323,647 | 5212 |
| | | variable region | | SEQ ID NO: 9 | |
| AD990 | beta amyloid | Light chain | | US10476265 | 5213 |
| | | variable region | | SEQ ID NO: 7 | |
| AD991 | beta amyloid | Light chain | | US10476265 | 5214 |
| | | variable region | | SEQ ID NO: 8 | |
| AD992 | beta amyloid | Light chain | | US10476265 | 5215 |
| | | variable region | | SEQ ID NO: 9 | |
| AD993 | beta amyloid | Light chain | ACI-11-Ab-9 | US20140199323 | 5216 |
| | | variable region | | SEQ ID NO: 7 | |
| AD994 | beta amyloid | Light chain | ACI-12-Ab-11 | US20140199323 | 5217 |
| | | variable region | | SEQ ID NO: 9 | |
| AD995 | beta amyloid | Light chain | 8C5 | US20150071915 | 5218 |
| | | variable region | | SEQ ID NO: 20 | |
| AD996 | beta amyloid | Light chain | 8F5 | US20150071915 | 5219 |
| | | variable region | | SEQ ID NO: 4 | |
| AD997 | beta amyloid | Light chain | | U.S. Pat. No. 7,189,819 | 5220 |
| | | variable region | | SEQ ID NO: 11 | |
| AD998 | beta amyloid | Light chain | 10D5 | U.S. Pat. No. 7,189,819 | 5221 |
| | | variable region | | SEQ ID NO: 14 | |
| AD999 | beta amyloid | Light chain | m3D6 | U.S. Pat. No. 7,189,819 | 5222 |
| | | variable region | | SEQ ID NO: 2 | |
| AD1000 | beta amyloid | Light chain | humanized 3D6 | U.S. Pat. No. 7,189,819 | 5223 |
| | | variable region | | SEQ ID NO: 5 | |
| AD1001 | beta amyloid | Light chain | Kabal ID 109230 | U.S. Pat. No. 7,189,819 | 5224 |
| | | variable region | | SEQ ID NO: 6 | |
| AD1002 | beta amyloid | Light chain | germline A19 | U.S. Pat. No. 7,189,819 | 5225 |
| | | variable region | antibody | SEQ ID NO: 7 | |
| AD1003 | beta amyloid | Light chain | Bapineuzumab, AAB- | U.S. Pat. No. 8,613,920 | 5226 |
| | | variable region | 001 | SEQ ID NO: 1 | |
| AD1004 | beta amyloid | Light chain | CAA51135 | WO2007113172 | 5227 |
| | peptide | variable region | | SEQ ID NO: 24 | |
| AD1005 | beta amyloid | Light chain | Humanized L1 | WO2007113172 | 5228 |
| | peptide | variable region | | SEQ ID NO: 32 | |
| AD1006 | beta amyloid | Light chain | Mature H2 | WO2007113172 | 5229 |
| | peptide | variable region | | SEQ ID NO: 36 | |
| AD1007 | BETA- | Light chain | NI-101.12 | WO2008081008 | 5230 |
| | AMYLOID | variable region | | SEQ ID NO: 12 | |
| AD1008 | BETA- | Light Chain | NI-101.13 | WO2008081008 | 5231 |
| | AMYLOID | variable region | | SEQ ID NO: 16 | |
| AD1009 | BETA- | Light chain | NI-101.12F6A | WO2008081008 | 5232 |
| | AMYLOID | variable region | | SEQ ID NO: 41 | |
| AD1010 | BETA- | Light chain | NI-101.13A | WO2008081008 | 5233 |
| | AMYLOID | variable region | | SEQ ID NO: 43 | |
| AD1011 | BETA- | Light chain | NI-101.13B | WO2008081008 | 5234 |
| | AMYLOID | variable region | | SEQ ID NO: 45 | |
| AD1012 | BETA- | Light chain | NI-101.10, NI-101.11 | WO2008081008 | 5235 |
| | AMYLOID | variable region | | SEQ ID NO: 8 | |
| AD1013 | DR6 and P75 | Light chain | M73-C04 | WO2010062904 | 5236 |
| | | variable region | | SEQ ID NO: 102 | |
| AD1014 | DR6 and P75 | Light chain | 1P1D6.3 | WO2010062904 | 5237 |
| | | variable region | | SEQ ID NO: 112 | |
| AD1015 | DR6 and P75 | Light chain | M50-H02 | WO2010062904 | 5238 |
| | | variable region | | SEQ ID NO: 12 | |
| AD1016 | DR6 and P75 | Light chain | 1P2F2.1 | WO2010062904 | 5239 |
| | | variable region | | SEQ ID NO: 122 | |
| AD1017 | DR6 and P75 | Light chain | 1P5D10.2 | WO2010062904 | 5240 |
| | | variable region | | SEQ ID NO: 132 | |
| AD1018 | DR6 and P75 | Light chain | M51-H09 | WO2010062904 | 5241 |
| | | variable region | | SEQ ID NO: 22 | |
| AD1019 | DR6 and P75 | Light chain | M53-E04 | WO2010062904 | 5242 |
| | | variable region | | SEQ ID NO: 32 | |
| AD1020 | DR6 and P75 | Light chain | M53-F04 | WO2010062904 | 5243 |
| | | variable region | | SEQ ID NO: 42 | |
| AD1021 | DR6 and P75 | Light chain | M62-B02 | WO2010062904 | 5244 |
| | | variable region | | SEQ ID NO: 52 | |
| AD1022 | DR6 and P75 | Light chain | M63-E10 | WO2010062904 | 5245 |
| | | variable region | | SEQ ID NO: 62 | |
| AD1023 | DR6 and P75 | Light chain | M66-B03 | WO2010062904 | 5246 |
| | | variable region | | SEQ ID NO: 72 | |
| AD1024 | DR6 and P75 | Light chain | M67-G02 | WO2010062904 | 5247 |
| | | variable region | | SEQ ID NO: 82 | |
| AD1025 | DR6 and P75 | Light chain | M72-F03 | WO2010062904 | 5248 |
| | | variable region | | SEQ ID NO: 92 | |
| AD1026 | IOD5 | Light chain | | WO2002088307 | 5249 |
| | | variable region | | SEQ ID NO: 11 | |
| AD1027 | IOD5 | Light chain | | WO2002088307 | 5250 |
| | | variable region | | SEQ ID NO: 7 | |
| AD1028 | IOD5 | Light chain | | WO2002088307 | 5251 |
| | | variable region | | SEQ ID NO: 9 | |
| AD1029 | LPG | Light chain | #7 | U.S. Pat. No. 8,591,902 | 5252 |
| | (lysophosphatidylglucoside) | variable region | | SEQ ID NO: 17 | |
| AD1030 | LPG | Light chain | #15 | U.S. Pat. No. 8,591,902 | 5253 |
| | (lysophosphatidylglucoside) | variable region | | SEQ ID NO: 7 | |
| AD1031 | MAG | Light chain | | U.S. Pat. No. 8,071,731 | 5254 |
| | | variable region | | SEQ ID NO: 16 | |
| AD1032 | MAG | Light chain | | U.S. Pat. No. 8,071,731 | 5255 |
| | | variable region | | SEQ ID NO: 17 | |
| AD1033 | MAG | Light chain | | U.S. Pat. No. 8,071,731 | 5256 |
| | | variable region | | SEQ ID NO: 18 | |
| AD1034 | MAG | Light chain | | U.S. Pat. No. 8,071,731 | 5257 |
| | | variable region | | SEQ ID NO: 19 | |
| AD1035 | MAI (myelin | Light chain | | WO2013158748 | 5258 |
| | associated | variable region | | SEQ ID NO: 11 | |
| | inhibitor) | | | | |
| AD1036 | MAI (myelin | Light chain | | WO2013158748 | 5259 |
| | associated | variable region | | SEQ ID NO: 27 | |
| | inhibitor) | | | | |
| AD1037 | NMDA | Light chain | | EP2805972 SEQ | 5260 |
| | | variable region | | ID NO: 44 | |
| AD1038 | NOGO | Light chain | H1L6, H5L6, H6L6, | US20140147435 | 5261 |
| | | variable region | H14L6, H15L6, | SEQ ID NO: 19 | |
| | | | H16L6, H17L6, | | |
| | | | H18L6, H19L6, | | |
| | | | H20L6, H21L6, | | |
| | | | H22L6, H23L6, | | |
| | | | H24L6, H25L6, | | |
| | | | H700L6 | | |
| AD1039 | NOGO | Light chain | H1L13, H5L13, | US20140147435 | 5262 |
| | | variable region | H6L13, H14L13, | SEQ ID NO: 20 | |
| | | | H15L13, H16L13, | | |
| | | | H17L13, H18L13, | | |
| | | | H19L13, H20L13, | | |
| | | | H21L13, H22L13, | | |
| | | | H23L13, H24L13, | | |
| | | | H25L13, H700L13 | | |
| AD1040 | NOGO | Light chain | H1L14, H5L14, | US20140147435 | 5263 |
| | | variable region | H6L14, H14L14, | SEQ ID NO: 21 | |
| | | | H15L14, H16L14, | | |
| | | | H17L14, H18L14, | | |
| | | | H19L14, H20L14, | | |
| | | | H21L14, H22L14, | | |
| | | | H23L14, H24L14, | | |
| | | | H25L14, H700L14 | | |
| AD1041 | NOGO | Light chain | H1L15, H5L15, | US20140147435 | 5264 |
| | | variable region | H6L15, H14L15, | SEQ ID NO: 22 | |
| | | | H15L15, H16115, | | |
| | | | H17L15, H18L15, | | |
| | | | H19L15, H20L15, | | |
| | | | H21L15, H22L15, | | |
| | | | H23L15, H24L15, | | |
| | | | H25L15, H700L15 | | |
| AD1042 | NOGO | Light chain | H1L16, H5L16, | US20140147435 | 5265 |
| | | variable region | H6L16, H14L16, | SEQ ID NO: 23 | |
| | | | H15L16, H16L16, | | |
| | | | H17L16, H18L16, | | |
| | | | H19L16, H20L16, | | |
| | | | H21L16, H22L16, | | |
| | | | H23L16, H24L16, | | |
| | | | H25L16, H700L16 | | |
| AD1043 | NOGO | Light chain | H1L17, H5L17, | US20140147435 | 5266 |
| | | variable region | H6L17, H14L17, | SEQ ID NO: 24 | |
| | | | H15L17, H16L17, | | |
| | | | H17L17, H18L17, | | |
| | | | H19L17, H20L17, | | |
| | | | H21L17, H22L17, | | |
| | | | H23L17, H24L17, | | |
| | | | H25L17, H700L17 | | |
| AD1044 | NOGO | Light chain | H1L18, H5L18, | US20140147435 | 5267 |
| | | variable region | H6L18, H14L18, | SEQ ID NO: 25 | |
| | | | H15L18, H16L18, | | |
| | | | H17L18, H18L18, | | |
| | | | H19L18, H20L18, | | |
| | | | H21L18, H22L18, | | |
| | | | H23L18, H24L18, | | |
| | | | H25L18, H700L18 | | |
| AD1045 | NOGO | Light chain | H5L11, H6L11, | US20140147435 | 5268 |
| | | variable region | H14L11, H15L11, | SEQ ID NO: 78 | |
| | | | H16L11, H17L11, | | |
| | | | H18L11, H19L11, | | |
| | | | H20L11, H21L11, | | |
| | | | H22L11, H23L11, | | |
| | | | H24L11, H25L11, | | |
| | | | H700L11 | | |
| AD1046 | Nogo-66 | Light chain | Antibody clone 50 | US20140065155 | 5269 |
| | | variable region | | SEQ ID NO: 4 | |
| AD1047 | Nogo-66 | Light chain | Antibody clone 51 | US20140065155 | 5270 |
| | | variable region | | SEQ ID NO: 6 | |
| AD1048 | NogoA/NiG | Light chain | 6A3-Ig4 | WO2009056509 | 5271 |
| | | variable region | | SEQ ID NO: 25 | |
| AD1049 | NogoA/NiG | Light chain | 6A3-IgG1 | WO2009056509 | 5272 |
| | | variable region | | SEQ ID NO: 5 | |
| AD1050 | N-terminal | Light chain | Antibody TeiA 1.6 | US20110059092 | 5273 |
| | region of Aβ8- | variable region | (Secreted by | SEQ ID NO: 1 | |
| | x peptide | | Hybridoma IGH521) | | |
| AD1051 | N-terminal | Light chain | Antibody TeiA 1.7 | US20110059092 | 5274 |
| | region of Aβ8- | variable region | (Secreted by | SEQ ID NO: 3 | |
| | x peptide | | Hybridoma IGH522) | | |
| AD1052 | N-terminal | Light chain | Antibody TeiA 1.8 | US20110059092 | 5275 |
| | region of Aβ8- | variable region | (Secreted by | SEQ ID NO: 5 | |
| | x peptide | | Hybridoma IGH523) | | |
| AD1053 | N-terminal | Light chain | Antibody TeiA 2b.6 | US20110059092 | 5276 |
| | region of Aβ8- | variable region | (Secreted by | SEQ ID NO: 7 | |
| | x peptide | | Hybridoma IGH524) | | |
| AD1054 | N-terminal | Light chain | Antibody TeiA 1.1 | US20110059092 | 5277 |
| | region of Aβ8- | variable region | (Secreted by | SEQ ID NO: 9 | |
| | x peptide | | Hybridoma IGH525) | | |
| AD1055 | oligomers of N- | Light chain | 9D5 | U.S. Pat. No. 8,795,664 | 5278 |
| | terminal | variable region | | SEQ ID NO: 28 | |
| | truncated Aβ | | | | |
| AD1056 | oligomers of N- | Light chain | 8C4 | U.S. Pat. No. 8,795,664 | 5279 |
| | terminal | variable region | | SEQ ID NO: 32 | |
| | truncated Aβ | | | | |
| AD1057 | PrPC and/or | Light chain | | US20150166668 | 5280 |
| | PrPSc | variable region | | SEQ ID NO: 7 | |
| AD1058 | pyroglutamated | Light chain | | WO2012136552 | 5281 |
| | A β | variable region | | SEQ ID NO: 11 | |
| AD1059 | pyroglutamated | Light chain | | WO2012136552 | 5282 |
| | A β | variable region | | SEQ ID NO: 27 | |
| AD1060 | pyroglutamated | Light chain | | WO2012136552 | 5283 |
| | A β | variable region | | SEQ ID NO: 31 | |
| AD1061 | pyroglutamated | Light chain | | WO2012136552 | 5284 |
| | A β | variable region | | SEQ ID NO: 7 | |
| AD1062 | RGM A | Light chain | 5F9.1-GL, 5F9.1-GL, | US20150183871 | 5285 |
| | | variable region | 5F9.1-GL, 5F9.1-GL, | SEQ ID NO: 44 | |
| | | | 5F9.1-GL, 5F9.1-GL, | | |
| | | | 5F9.1-GL, 5F9.1-GL, | | |
| | | | 5F9.1-GL, 5F9.1-GL, | | |
| | | | h5F9.4, h5F9.11, | | |
| | | | h5F9.12 | | |
| AD1063 | RGM A | Light chain | 5F9.2-GL, 5F9.2-GL, | US20150183871 | 5286 |
| | | variable region | 5F9.2-GL, 5F9.2-GL, | SEQ ID NO: 45 | |
| | | | 5F9.2-GL, 5F9.2-GL, | | |
| | | | 5F9.2-GL, 5F9.2-GL, | | |
| | | | 5F9.2-GL, 5F9.2-GL, | | |
| | | | h5F9.5, h5F9.19, | | |
| | | | h5F9.20 | | |
| AD1064 | RGM A | Light chain | 5F9.3-GL, 5F9.3-GL, | US20150183871 | 5287 |
| | | variable region | 5F9.3-GL, 5F9.3-GL, | SEQ ID NO: 46 | |
| | | | 5F9.3-GL, 5F9.3-GL, | | |
| | | | 5F9.3-GL, 5F9.3-GL, | | |
| | | | 5F9.3-GL, 5F9.3-GL, | | |
| | | | h5F9.6, h5F9.21, | | |
| | | | h5F9.22 | | |
| AD1065 | RGM A | Light chain | h5F9.5, h5F9.6, | US20150183871 | 5288 |
| | | variable region | h5F9,7, h5F9,8, | SEQ ID NO: 48 | |
| | | | h5F9.9, h5F9.10 | | |
| AD1066 | RGM A | Light chain | h5F9.11, | US20150183871 | 5289 |
| | | variable region | h5F9.19, h5F9.21 | SEQ ID NO: 49 | |
| AD1067 | RGM A | Light chain | h5F9.1.2, h5F9.20, | US20150183871 | 5290 |
| | | variable region | h5F9.22, h5F9.23, | SEQ ID NO:. 50 | |
| | | | h5F9.25, h5F9.25, | | |
| | | | h5F9.26 | | |
| AD1068 | RGM A | Light chain | h5F9.1, h5F9.7, | US20150183871 | 5291 |
| | | variable region | h5F9.23 | SEQ ID NO: 51 | |
| AD1069 | RGM A | Light chain | h5F9.2, h5F9.8, | US20150183871 | 5292 |
| | | variable region | h5F9.25 | SEQ ID NO: 52 | |
| AD1070 | RGMa | Light chain | AE12-1 | US20140023659 | 5293 |
| | | variable region | | SEQ ID NO: 5 | |
| AD1071 | RGMa | Light chain | AE12-7 | US20140023659 | 5294 |
| | | variable region | | SEQ ID NO: 53 | |
| AD1072 | RGMa | Light chain | AE12-8 | US20140023659 | 5295 |
| | | variable region | | SEQ ID NO: 61 | |
| AD1073 | RGMa | Light chain | AE12-13 | US20140023659 | 5296 |
| | | variable region | | SEQ ID NO: 95 | |
| AD1074 | RGMa | Light chain | AE12-15 | US20140023659 | 5297 |
| | | variable region | | SEQ ID NO: 103 | |
| AD1075 | RGMa | Light chain | AE12-20 | US20140023659 | 5298 |
| | | variable region | | SEQ ID NO: 111 | |
| AD1076 | RGMa | Light chain | AE12-21 | US20140023659 | 5299 |
| | | variable region | | SEQ ID NO: 119 | |
| AD1077 | RGMa | Light chain | AE12-23 | US20140023659 | 5300 |
| | | variable region | | SEQ ID NO: 127 | |
| AD1078 | RGMa | Light chain | AE12-2 | US20140023659 | 5301 |
| | | variable region | | SEQ ID ID: 13 | |
| AD1079 | RGMa | Light chain | AE12-24 | US20140023659 | 5302 |
| | | variable region | | SEQ ID NO: 135 | |
| AD1080 | RGMa | Light chain | AE12-3 | US20140023659 | 5303 |
| | | variable region | | SEQ ID NO: 21 | |
| AD1081 | RGMa | Light chain | AE12-4 | US20140023659 | 5304 |
| | | variable region | | SEQ ID NO: 29 | |
| AD1082 | RGMa | Light chain | AE12-5 | US20140023659 | 5305 |
| | | variable region | | SEQ ID NO: 37 | |
| AD1083 | RGMa | Light chain | AE12-6 | US20140023659 | 5306 |
| | | variable region | | SEQ ID NO: 45 | |
| AD1084 | tau | Light chain | NI-105.4E4 | US20150252102 | 5307 |
| | | variable region | | SEQ ID NO: 11 | |
| AD1085 | tau | Light chain | NI-105.4B2 | US20150252102 | 5308 |
| | | variable region | | SEQ ID NO: 15 | |
| AD1086 | tau | Light chain | NI-105.4A3 | US20150252102 | 5309 |
| | | variable region | | SEQ ID NO: 19 | |
| AD1087 | tau | Light chain | | WO2013041962 | 5310 |
| | | variable region | | SEQ ID NO: 141 | |
| AD1088 | tau | Light chain | | WO2013041962 | 5311 |
| | | variable region | | SEQ ID NO: 142 | |
| AD1089 | tau | Light chain | | WO2013041962 | 5312 |
| | | variable region | | SEQ ID NO: 143 | |
| AD1090 | tau | Light chain | | WO2013041962 | 5313 |
| | | variable region | | SEQ ID NO: 150 | |
| AD1091 | tau | Light chain | | WO2013041962 | 5314 |
| | | variable region | | SEQ ID NO: 152 | |
| AD1092 | tau | Light chain | | WO2013041962 | 5315 |
| | | variable region | | SEQ ID NO: 153 | |
| AD1093 | tau | Light chain | | WO2014100600 | 5316 |
| | | variable region | | SEQID NO: 221 | |
| AD1094 | tau | Light chain | | WO2014100600 | 5317 |
| | | variable region | | SEQID NO: 222 | |
| AD1095 | tau | Light chain | NI-105.17C1 | WO2014100600 | 5318 |
| | | variable region | | SEQID NO: 46 | |
| AD1096 | tau | Light chain | NI-105.6C5 | WO2014100600 | 5319 |
| | | variable region | | SEQID NO: 49 | |
| AD1097 | tau | Light chain | NI-105.29G10 | WO2014100600 | 5320 |
| | | variable region | | SEQID NO: 51 | |
| AD1098 | tau | Light chain | NI-105.6L9 | WO2014100600 | 5321 |
| | | variable region | | SEQID NO: 53 | |
| AD1099 | tau | Light chain | NI-105.40E8 | WO2014100600 | 5322 |
| | | variable region | | SEQID NO: 55 | |
| AD1100 | tau | Light chain | NI-105.48E5 | WO2014100600 | 5323 |
| | | variable region | | SEQID NO: 57 | |
| AD1101 | tau | Light chain | NI-105.6E3 | WO2014100600 | 5324 |
| | | variable region | | SEQID NO: 59 | |
| AD1102 | tau | Light chain | NI-105.22E1 | WO2014100600 | 5325 |
| | | variable region | | SEQID NO: 61 | |
| AD1103 | tau | Light chain | | WO2014100600 | 5326 |
| | | variable region | | SEQID NO: 63 | |
| AD1104 | tau | Light chain | NI-105.26B12 | WO2014100600 | 5327 |
| | | variable region | | SEQID NO: 64 | |
| AD1105 | tau | Light chain | NI-105.12E12 | WO2014100600 | 5328 |
| | | variable region | | SEQID NO: 66 | |
| AD1106 | tau | Light chain | NI-105.60E7 | WO2014100600 | 5329 |
| | | variable region | | SEQID NO: 68 | |
| AD1107 | tau | Light chain | NI-105,14E2 | WO2014100600 | 5330 |
| | | variable region | | SEQID NO: 70 | |
| AD1108 | tau | Light chain | NI-105.39E2 | WO2014100600 | 5331 |
| | | variable region | | SEQID NO: 72 | |
| AD1109 | tau | Light chain | NI-105.19C6 | WO2014100600 | 5332 |
| | | variable region | | SEQID NO: 74 | |
| AD1110 | tau | Light chain | | WO2014100600 | 5333 |
| | | variable region | | SEQID NO: 77 | |
| AD1111 | tau | Light chain | NI-105.9C4 | WO2014100600 | 5334 |
| | | variable region | | SEQID NO: 78 | |
| AD1112 | tau | Light chain | IPN002 variant 1 | U.S. Pat. No. 8,926,974 | 5335 |
| | | variable region | | SEQ ID NO: 40 | |
| AD1113 | tau | Light chain | IPN002 variant 2 | U.S. Pat. No. 8,926,974 | 5336 |
| | | variable region | | SEQ ID NO: 41 | |
| AD1114 | tau | Light chain | IPN002 variant 3 | U.S. Pat. No. 8,926,974 | 5337 |
| | | variable region | | SEQ ID NO: 42 | |
| AD1115 | tau | Light chain | IPIN002 variant 4 | U.S. Pat. No. 8,926,974 | 5338 |
| | | variable region | | SEQ ID NO: 43 | |
| AD1116 | tau | Light chain | PT1 | US20150307600 | 5339 |
| | | variable region | | SEQ ID NO: 36 | |
| AD1117 | tau | Light chain | PT3 | US20150307600 | 5340 |
| | | variable region | | SEQ ID NO: 38 | |
| AD1118 | tau | Light chain | | U.S. Pat. No. 9,304,138 | 5341 |
| | | variable region | | SEQ ID NO: 6 | |
| AD1119 | tau | Light chain | | U.S. Pat. No. 9,304,138 | 5342 |
| | | variable region | | SEQ ID NO: 7 | |
| AD1120 | tau | Light chain | | U.S. Pat. No. 9,304,138 | 5343 |
| | | variable region | | SEQ ID NO: 8 | |
| AD1121 | tau | Light chain | | U.S. Pat. No. 9,304,138 | 5344 |
| | | variable region | | SEQ ID NO: 9 | |
| AD1122 | tau | Light chain | | U.S. Pat. No. 9,304,138 | 5345 |
| | | variable region | | SEQ ID NO: 10 | |
| AD1123 | tau | Light chain | | U.S. Pat. No. 9,304,138 | 5346 |
| | | variable region | | SEQ ID NO: 11 | |
| AD1124 | tau | Light chain | | U.S. Pat. No. 9,304,138 | 5347 |
| | | variable region | | SEQ ID NO: 69 | |
| AD1125 | tau | Light chain | | U.S. Pat. No. 9,304,138 | 5348 |
| | | variable region | | SEQ ID NO: 77 | |
| AD1126 | tau | Light chain | | U.S. Pat. No. 9,304,138 | 5349 |
| | | variable region | | SEQ ID NO: 92 | |
| AD1127 | tau | Light chain | | U.S. Pat. No. 9,304,138 | 5350 |
| | | variable region | | SEQ ID NO: 97 | |
| AD1128 | tau | Light chain | | U.S. Pat. No. 9,304,138 | 5351 |
| | | variable region | | SEQ ID NO: 105 | |
| AD1129 | tau | Light chain | | U.S. Pat. No. 9,304,138 | 5352 |
| | | variable region | | SEQ ID NO: 116 | |
| AD1130 | tau | Light chain | | U.S. Pat. No. 9,304,138 | 5353 |
| | | variable region | | SEQ ID NO: 118 | |
| AD1131 | tau | Light chain | hACl-36-3A8-Ab1 | US20150175682 | 5354 |
| | | variable region | | SEQ ID NO: 8 | |
| AD1132 | tau | Light chain | hACl-36-2B6-Ab1 | US20150175682 | 5355 |
| | | variable region | | SEQ ID NO: 9 | |
| AD1133 | tau | Light chain | ADx210 | US20140161875 | 5356 |
| | | variable region | | SEQ ID NO: 16 | |
| AD1134 | tau | Light chain | ADx210 isoform | US20140161875 | 5357 |
| | | variable region | | SEQ ID NO: 18 | |
| AD1135 | tau | Light chain | ADx215 | US20140161875 | 5358 |
| | | variable region | | SEQ ID NO: 26 | |
| AD1136 | tau antigen | Light chain | ADx202 | WO2015004163 | 5359 |
| | | variable region | | SEQ ID NO: 9 | |
| AD1137 | tau ps 422 | Light chain | antibody Mab2.10.3 | US20110059093 | 5360 |
| | | variable region | | SEQ ID NO: 1 | |
| AD1138 | tau ps 422 | Light chain | Mab 005 | US20110059093 | 5361 |
| | | variable region | | SEQ ID NO: 26 | |
| AD1139 | tau ps 422 | Light chain | Mab 019 | US20110059093 | 5362 |
| | | variable region | | SEQ ID NO: 34 | |
| AD1140 | tau ps 422 | Light chain | Mab 020 | US20110059093 | 5363 |
| | | variable region | | SEQ ID NO: 42 | |
| AD1141 | tau ps 422 | Light chain | Mab 085 | US20110059093 | 5364 |
| | | variable region | | SEQ ID NO: 50 | |
| AD1142 | tau ps 422 | Light chain | Mab 086 | US20110059093 | 5365 |
| | | variable region | | SEQ ID NO: 58 | |
| AD1143 | tau ps 422 | Light chain | Mab 097 | US20110059093 | 5366 |
| | | variable region | | SEQ ID NO: 66 | |
| AD1144 | TrkA | Light chain | Hu1lo | WO2009098238 | 5367 |
| | | variable region | | SEQ ID NO: 18 | |
| AD1145 | TrkA | Light chain | 3-23*01 | WO2009098238 | 5368 |
| | | variable region | | SEQ ID NO: 19 | |
| AD1146 | TrkA | Light chain | JH4 | WO2009098238 | 5369 |
| | | variable region | | SEQ ID NO: 20 | |
| AD1147 | TrkA | Light chain | L6*01 | WO2009098238 | 5370 |
| | | variable region | | SEQ ID NO: 21 | |
| AD1148 | TrkA | Light chain | JK1 | WO2009098238 | 5371 |
| | | variable region | | SEQ ID NO: 22 | |
| AD1149 | TrkA | Light chain | BXhVH5VLl N297A i | WO2009098238 | 5372 |
| | | variable region | | SEQ ID NO: 23 | |
| AD1150 | NOGO | Light chain | 2A10 construct | WO2007003421 | 5373 |
| | | variable region | | SEQ ID NO: 78 | |
| | | humanized | | | |
| | | construct L11 | | | |
| AD1151 | NOGO | Light chain | 2A10 construct | WO2007003421 | 5374 |
| | | variable region | | SEQ ID NO: 20 | |
| | | humanized | | | |
| | | construct L13 | | | |
| AD1152 | NOGO | Light chain | 2A10 construct | WO2007003421 | 5375 |
| | | variable region | | SEQ ID NO: 21 | |
| | | humanized | | | |
| | | construct L14 | | | |
| AD1153 | NOGO | Light chain | 2A10 construct | WO2007003421 | 5376 |
| | | variable region | | SEQ ID NO: 22 | |
| | | humanized | | | |
| | | construct L15 | | | |
| AD1154 | NOGO | Light chain | 2A10 construct | WO2007003421 | 5377 |
| | | variable region | | SEQ ID NO: 23 | |
| | | humanized | | | |
| | | construct L16 | | | |
| AD1155 | NOGO | Light chain | 2A10 construct | WO2007003421 | 5378 |
| | | variable region | | SEQ ID NO: 24 | |
| | | humanized | | | |
| | | construct L17 | | | |
| AD1156 | NOGO | Light chain | 2A10 construct | WO2007003421 | 5379 |
| | | variable region | | SEQ ID NO: 25 | |
| | | humanized | | | |
| | | construct L18 | | | |
| AD1157 | NOGO | Light chain | 2A10 construct | WO2007003421 | 5380 |
| | | variable region | | SEQ ID NO: 19 | |
| | | humanized | | | |
| | | construct L6 | | | |
| AD1158 | beta A4 | Light chain with | Antibody A | WO2007068429 | 5381 |
| | peptide/Alpha | leader sequence | | SEQ ID NO: 28 | |
| | beta 9 | | | | |
| AD1159 | Aβ amyloid | Light chain, | | WO2006066089 | 5382 |
| | | consensus | | SEQ ID NO: 38 | |
| AD1160 | Aβ amyloid | Light chain, | | WO2006066089 | 5383 |
| | | consensus | | SEQ ID NO: 39 | |
| AD1161 | Aβ amyloid | Light chain, | | WO2006066089 | 5384 |
| | | consensus | | SEQ ID NO: 40 | |
| AD1162 | Aβ amyloid | Light chain, | | WO2006066089 | 5385 |
| | | consensus | | SEQ ID NO: 41 | |
| AD1163 | Aβ amyloid | Light chain, | | WO2006066089 | 5386 |
| | | consensus | | SEQ ID NO: 42 | |
| AD1164 | Aβ amyloid | Light chain, | | WO2006066089 | 5387 |
| | | consensus | | SEQ ID NO: 43 | |
| AD1165 | Aβ amyloid | Light chain, | | WO2006066089 | 5388 |
| | | consensus | | SEQ ID NO: 44 | |
| AD1166 | Aβ amyloid | Light chain, | | WO2006066089 | 5389 |
| | | consensus | | SEQ ID NO: 45 | |
| AD1167 | Aβ amyloid | Light chain, | | WO2006066089 | 5390 |
| | | consensus | | SEQ ID NO: 46 | |
| AD1168 | Aβ amyloid | Light chain, | | WO2006066089 | 5391 |
| | | consensus | | SEQ ID NO: 47 | |
| AD1169 | Aβ amyloid | Light chain, | | WO2006066089 | 5392 |
| | | consensus | | SEQ ID NO: 48 | |
| AD1170 | Aβ amyloid | Light chain, | | WO2006066089 | 5393 |
| | | consensus | | SEQ ID NO: 49 | |
| AD1171 | Aβ amyloid | Light chain, | | WO2006066089 | 5394 |
| | | consensus | | SEQ ID NO: 50 | |
| AD1172 | Aβ amyloid | Light chain, | | WO2006066089 | 5395 |
| | | consensus | | SEQ ID NO: 51 | |
| AD1173 | PrPC and/or | scFv | | U.S. Pat. No. 8,852,587 | 5396 |
| | PrPSc | | | SEQ ID NO: 6 | |
| AD1174 | beta amyloid | scFv | RCK37 | U.S. Pat. No. 8,221,750 | 5397 |
| | | | | SEQ ID NO: 6 | |
| AD1175 | beta amyloid | scFv | RCK22 | U.S. Pat. No. 8,221,750 | 5398 |
| | | | | SEQ ID NO: 8 | |
| AD1176 | PrP | | ICSM181c | US20140294844 | 5399 |
| | | | | SEQ ID NO: 6 | |
| AD1177 | PrPC and/or | | | U.S. Pat. No. 8,852,587 | 5400 |
| | PrPSc | | | SEQ ID NO: 3 | |
| AD1178 | tau | | | US20140302046 | 5401 |
| | | | | SEQ ID NO: 103 | |

### Huntington's Disease Antibodies

[0371] In some embodiments, the payload region of the viral particle comprises one or more nucleic acid sequences encoding one or more of the Huntington's Disease payload antibody polypeptides listed in Table 5 (HD1-HD245; SEQ ID NO: 5402-5646).

TABLE 5
Huntington's Disease Antibodies

| Antibody | | | | Reference | SEQ ID |
|---|---|---|---|---|---|
| No. | Target | Description | Antibody Name | Information | NO |
| HD1 | amyloid | consensus | M13 g3p, fd g3p, f1 | US20150376239 | 5402 |
| | proteins | sequence | g3p | SEQ ID NO: 4 | |
| HD2 | amyloid | consensus | 12-2 g3p, Ike g3p | US20150376239 | 5403 |
| | proteins | sequence | | SEQ ID NO: 7 | |
| HD3 | 118-126 of α- | constant region | IgG1 | US20150259404 | 5404 |
| | synuclein | | | SEQ ID NO: 38 | |
| HD4 | amyloid | Fusion protein | M13 g3p | US20150376239 | 5405 |
| | proteins | | | SEQ ID NO: 1 | |
| HD5 | amyloid | Fusion protein | Construct 5 | US20150376239 | 5406 |
| | proteins | | | SEQ ID NO: 11 | |
| HD6 | amyloid | Fusion protein | Construct 6 | US20150376239 | 5407 |
| | proteins | | | SEQ ID NO: 13 | |
| HD7 | amyloid | Fusion protein | fd N2 | US20150376239 | 5408 |
| | proteins | | | SEQ ID NO: 14 | |
| HD8 | amyloid | Fusion protein | f1 N2 | US20150376239 | 5409 |
| | proteins | | | SEQ ID NO: 15 | |
| HD9 | amyloid | Fusion protein | M13 N2 | US20150376239 | 5410 |
| | proteins | | | SEQ ID NO: 16 | |
| HD10 | amyloid | Fusion protein | Ike N2 | US20150376239 | 5411 |
| | proteins | | | SEQ ID NO: 17 | |
| HD11 | amyloid | Fusion protein | 12-2 N2 | US20150376239 | 5412 |
| | proteins | | | SEQ ID NO: 18 | |
| HD12 | amyloid | Fusion protein | If1 N2 | US20150376239 | 5413 |
| | proteins | | | SEQ ID NO: 19 | |
| HD13 | amyloid | Fusion protein | fd g3p | US20150376239 | 5414 |
| | proteins | | | SEQ ID NO: 2 | |
| HD14 | amyloid | Fusion protein | Construct 3 | US20150376239 | 5415 |
| | proteins | | | SEQ ID NO: 20 | |
| HD15 | amyloid | Fusion protein | Construct 3m g3p | US20150376239 | 5416 |
| | proteins | | portion | SEQ ID NO: 24 | |
| HD16 | amyloid | Fusion protein | If1 g3p | US20150376239 | 5417 |
| | proteins | | | SEQ ID NO: 29 | |
| HD17 | amyloid | Fusion protein | f1 g3p | US20150376239 | 5418 |
| | proteins | | | SEQ ID NO: 3 | |
| HD18 | amyloid | Fusion protein | fd g3p | US20150376239 | 5419 |
| | proteins | | | SEQ ID NO: 30 | |
| HD19 | amyloid | Fusion protein | Construct 8, rs-g3p | US20150376239 | 5420 |
| | proteins | | (If1-N1N2)-hlgG1- | SEQ ID NO: 31 | |
| | | | Fc | | |
| HD20 | amyloid | Fusion protein | I2-2 g3p | US20150376239 | 5421 |
| | proteins | | | SEQ ID NO: 5 | |
| HD21 | amyloid | Fusion protein | Ike g3p | US20150376239 | 5422 |
| | proteins | | | SEQ ID NO: 6 | |
| HD22 | amyloid | Fusion protein | If1 g3p | US20150376239 | 5423 |
| | proteins | | | SEQ ID NO: 8 | |
| HD23 | amyloid | Fusion protein | Construct 4 | US20150376239 | 5424 |
| | proteins | | | SEQ ID NO: 9 | |
| HD24 | amyloids | Heavy chain | #118 | WO2010012004 | 5425 |
| | | | | SEQ ID NO: 11 | |
| HD25 | amyloids | Heavy chain | #121 | WO2010012004 | 5426 |
| | | | | SEQ ID NO: 13 | |
| HD26 | amyloids | Heavy chain | #204 | WO2010012004 | 5427 |
| | | | | SEQ ID NO: 16 | |
| HD27 | amyloids | Heavy chain | #205 | WO20100I2004 | 5428 |
| | | | | SEQ ID NO: 18 | |
| HD28 | NOGO | Heavy chain | H6L13 FL | US20140147435 | 5429 |
| | | | | SEQ ID NO: 27 | |
| HD29 | NOGO | Heavy chain | H16L16 FL, H16L18 | US20140147435 | 5430 |
| | | | FL | SEQ ID NO: 31 | |
| HD30 | NOGO | Heavy chain | H18L16 FL | US20140147435 | 5431 |
| | | | | SEQ ID NO: 33 | |
| HD31 | NOGO | Heavy chain | H19L13 FL, H19L16 | US20140147435 | 5432 |
| | | | FL, H19L18 FL | SEQ ID NO: 92 | |
| HD32 | NOGO | Heavy chain | H20L13 FL, H20L16 | US20140147435 | 5433 |
| | | | FL, H20L18 FL | SEQ ID NO: 93 | |
| HD33 | NOGO | Heavy chain | H21L13 FL, H21L16 | US20140147435 | 5434 |
| | | | FL, H21L 18 FL | SEQ ID NO: 94 | |
| HD34 | NOGO | Heavy chain | H25L13 FL, H25L16 | US20140147435 | 5435 |
| | | | FL, H25L 18 FL | SEQ ID NO: 98 | |
| HD35 | Nogo receptor- | Heavy chain | 5B10 | US20090215691 | 5436 |
| | 1 | | | SEQ ID NO: 16 | |
| HD36 | Nogo receptor- | Heavy chain | 5B10 | US20090215691 | 5437 |
| | 1 | | | SEQ ID NO: 18 | |
| HD37 | trk-C (NT-3 | Heavy chain | 2250 | U.S. Pat. No. | 5438 |
| | trkC ligand) | | | 7,615,383 | |
| | | | | SEQ ID NO: 42 | |
| HD38 | trk-C (NT-3 | Heavy chain | 2253 | U.S. Pat. No. | 5439 |
| | trkC ligand) | | | 7,615,383 | |
| | | | | SEQ ID NO: 43 | |
| HD39 | trk-C (NT-3 | Heavy chain | 2256 | U.S. Pat. No. | 5440 |
| | trkC ligand) | | | 7,615,383 | |
| | | | | SEQ ID NO: 44 | |
| HD40 | trk-C (NT-3 | Heavy chain | 6.1.2 | U.S. Pat. No. | 5441 |
| | trkC ligand) | | | 7,615,383 | |
| | | | | SEQ ID NO: 45 | |
| HD41 | trk-C (NT-3 | Heavy chain | 6.4.1 | U.S. Pat. No. | 5442 |
| | tkC ligand) | | | 7,615,383 | |
| | | | | SEQ ID NO: 46 | |
| HD42 | trk-C (NT-3 | Heavy chain | 2345 | U.S. Pat. No. | 5443 |
| | trkC ligand) | | | 7,615,383 | |
| | | | | SEQ ID NO: 47 | |
| HD43 | trk-C (NT-3 | Heavy chain | 2349 | U.S. Pat. No. | 5444 |
| | trkC ligand) | | | 7,615,383 | |
| | | | | SEQ ID NO: 48 | |
| HD44 | many | Heavy chain fusion | H19L13, H19L16, | U.S. Pat. No. | 5445 |
| | | protein | H19L18, H19L14, | 8,053,569 | |
| | | | H19L15, H19L17, | SEQ ID NO: 25 | |
| | | | H19L6, H19L11 | | |
| HD45 | many | Heavy chain fusion | H20L13, H20L16, | U.S. Pat. No. | 5446 |
| | | protein | H20L18, H20L14, | 8,053,569 | |
| | | | H20L15, H20L17, | SEQ ID NO: 28 | |
| | | | H20L6, H20L11 | | |
| HD46 | many | Heavy chain fusion | H22L13, H22L16, | U.S. Pat. No. | 5447 |
| | | protein | H22L18, H22L14, | 8,053,569 | |
| | | | H22L15, H22L17, | SEQ ID NO: 34 | |
| | | | H22L6, H22L11 | | |
| HD47 | many - growth | Heavy chain fusion | H5L11, H6L11, | U.S. Pat. No. | 5448 |
| | factors | protein | H14L11, H15L11, | 8,053,569 | |
| | | | H16L11, H17L11, | SEQ ID NO: 24 | |
| | | | H18L11, H19L11, | | |
| | | | H20L11, H21L11, | | |
| | | | H22L11, H23L11, | | |
| | | | H24L11, H25L11, | | |
| | | | H700L11 | | |
| HD48 | NOGO | Heavy chain | 2A10 construct | WO2007003421 | 5449 |
| | | humanized | | SEQ ID NO: 79 | |
| | | construct H1 | | | |
| HD49 | NOGO | Heavy chain | 2A10 construct | WO2007003421 | 5450 |
| | | humanized | | SEQ ID NO: 29 | |
| | | construct H14 | | | |
| HD50 | NOGO | Heavy chain | 2A10 construct | WO2007003421 | 5451 |
| | | humanized | | SEQ ID NO: 30 | |
| | | construct H15 | | | |
| HD51 | NOGO | Heavy chain | 2A10 construct | WO2007003421 | 5452 |
| | | humanized | | SEQ ID NO: 31 | |
| | | construct H16 | | | |
| HD52 | NOGO | Heavy chain | 2A10 construct | WO2007003421 | 5453 |
| | | humanized | | SEQ ID NO: 32 | |
| | | construct H17 | | | |
| HD53 | NOGO | Heavy chain | 2A10 construct | WO2007003421 | 5454 |
| | | humanized | | SEQ ID NO: 33 | |
| | | construct H18 | | | |
| HD54 | NOGO | Heavy chain | 2A10 construct | WO2007003421 | 5455 |
| | | humanized | | SEQ ID NO: 92 | |
| | | construct H19 | | | |
| HD55 | NOGO | Heavy chain | 2A10 construct | WO2007003421 | 5456 |
| | | humanized | | SEQ ID NO: 93 | |
| | | construct H20 | | | |
| HD56 | NOGO | Heavy chain | 2A10 construct | WO2007003421 | 5457 |
| | | humanized | | SEQ ID NO: 94 | |
| | | construct H21 | | | |
| HD57 | NOGO | Heavy chain | 2A10 construct | WO2007003421 | 5458 |
| | | humanized | | SEQ ID NO: 95 | |
| | | construct H22 | | | |
| HD58 | NOGO | Heavy chain | 2A10 construct | WO2007003421 | 5459 |
| | | humanized | | SEQ ID NO: 96 | |
| | | construct H23 | | | |
| HD59 | NOGO | Heavy chain | 2A10 construct | WO2007003421 | 5460 |
| | | humanized | | SEQ ID NO: 97 | |
| | | construct H24 | | | |
| HD60 | NOGO | Heavy chain | 2A10 construct | WO2007003421 | 5461 |
| | | humanized | | SEQ ID NO: 98 | |
| | | construct H25 | | | |
| HD61 | NOGO | Heavy chain | 2A10 construct | WO2007003421 | 5462 |
| | | humanized | | SEQ ID NO: 26 | |
| | | construct H5 | | | |
| HD62 | NOGO | Heavy chain | 2A10 construct | WO2007003421 | 5463 |
| | | humanized | | SEQ ID NO: 27 | |
| | | construct H6 | | | |
| HD63 | NOGO | Heavy chain | 2A10 construct | WO2007003421 | 5464 |
| | | humanized | | SEQ ID NO: 28 | |
| | | construct H700 | | | |
| HD64 | RTN4 (NOGO) | Heavy chain IgG4, | Atinumab | U.S. Pat. No. | 5465 |
| | | immunomodulator | | 8,163,285 | |
| | | | | SEQ ID NO: 24 | |
| HD65 | amyloid | Heavy chain | F11G3 | U.S. Pat. No. | 5466 |
| | oligomers | variable region | | 9,125,846 | |
| | | | | SEQ ID NO: 11 | |
| HD66 | DR6 and P75 | Heavy chain | 1P1D6.3 | WO2010062904 | 5467 |
| | | variable region | | SEQ ID NO: 107 | |
| HD67 | DR6 and P75 | Heavy chain | M50-H01 | WO2010062904 | 5468 |
| | | variable region | | SEQ ID NO: 7 | |
| HD68 | DR6 and P75 | Heavy chain | M67-G02 | WO2010062904 | 5469 |
| | | variable region | | SEQ ID NO: 77 | |
| HD69 | DR6 and P75 | Heavy chain | M72-F03 | WO2010062904 | 5470 |
| | | variable region | | SEQ ID NO: 87 | |
| HD70 | DR6 and P75 | Heavy chain | M73-C04 | WO2010062904 | 5471 |
| | | variable region | | SEQ ID NO: 97 | |
| HD71 | DR6 and P75 | Heavy chain | 1P2F2.1 | WO2010062904 | 5472 |
| | | variable region | | SEQ ID NO: 117 | |
| HD72 | DR6 and P75 | Heavy chain | 1P5D10.2 | WO2010062904 | 5473 |
| | | variable region | | SEQ ID NO: 127 | |
| HD73 | DR6 and P75 | Heavy chain | M51-H09 | WO2010062904 | 5474 |
| | | variable region | | SEQ ID NO: 17 | |
| HD74 | DR6 and P75 | Heavy chain | M53-E04 | WO2010062904 | 5475 |
| | | variable region | | SEQ ID NO: 27 | |
| HD75 | DR6 and P75 | Heavy chain | M53-F04 | WO2010062904 | 5476 |
| | | variable region | | SEQ ID NO: 37 | |
| HD76 | DR6 and P75 | Heavy chain | M62-B02 | WO2010062904 | 5477 |
| | | variable region | | SEQ ID NO: 47 | |
| HD77 | DR6 and P75 | Heavy chain | M63-E10 | WO2010062904 | 5478 |
| | | variable region | | SEQ ID NO: 57 | |
| HD78 | DR6 and P75 | Heavy chain | M66-B03 | WO2010062904 | 5479 |
| | | variable region | | SEQ ID NO: 67 | |
| HD79 | LPG | Heavy chain | #7 | U.S. Pat. No. | 5480 |
| | (lysophos- | variable region | | 8,591,902 | |
| | phatidyl- | | | SEQ ID NO: 18 | |
| | glucoside) | | | | |
| HD80 | LPG | Heavy chain | #15 | U.S. Pat. No. | 5481 |
| | (lysophos- | variable region | | 8,591,902 | |
| | phatidyl- | | | SEQ ID NO: 8 | |
| | glucoside) | | | | |
| HD81 | MAG | Heavy chain | | U.S. Pat. No. | 5482 |
| | | variable region | | 8,071,731 | |
| | | | | SEQ ID NO: 13 | |
| HD82 | MAG | Heavy chain | | U.S. Pat. No. | 5483 |
| | | variable region | | 8,071,731 | |
| | | | | SEQ ID NO: 14 | |
| HD83 | MAG | Heavy chain | | U.S. Pat. No. | 5484 |
| | | variable region | | 8,071,731 | |
| | | | | SEQ ID NO: 15 | |
| HD84 | MAI (myelin | Heavy chain | | WO2013158748 | 5485 |
| | associated | variable region | | SEQ ID NO: 1 | |
| | inhibitor) | | | | |
| HD85 | MAI (myelin | Heavy chain | | WO2013158748 | 5486 |
| | associated | variable region | | SEQ ID NO: 17 | |
| | inhibitor) | | | | |
| HD86 | NOGO | Heavy chain | H5L13, H5L16, | US20140147435 | 5487 |
| | | variable region | H5L18, H5L14, | SEQ ID NO: 11 | |
| | | | H5L15, H5L17, H5L6, | | |
| | | | H5L11 | | |
| HD87 | NOGO | Heavy chain | H6L 13, H6L16, | US20140147435 | 5488 |
| | | variable region | H6L18, H6L14, | SEQ ID NO: 12 | |
| | | | H6L15, H6L17, H6L6 | | |
| HD88 | NOGO | Heavy chain | H700L13, H700L 16, | US20140147435 | 5489 |
| | | variable region | H700L18, H700L 14, | SEQ ID NO: 13 | |
| | | | H700L15, H700L 17, | | |
| | | | H700L6, H700L11 | | |
| HD89 | NOGO | Heavy chain | H14L13, H14L16, | US20140147435 | 5490 |
| | | variable region | H14L18, H14L14, | SEQ ID NO: 14 | |
| | | | H14L15, H14L17, | | |
| | | | H14L6, H14L11 | | |
| HD90 | NOGO | Heavy chain | H15L13, H15L16, | US20140147435 | 5491 |
| | | variable region | H15L18, H15L14, | SEQ ID NO: 15 | |
| | | | H15L15, H15L17, | | |
| | | | H15L6, H15L11 | | |
| HD91 | NOGO | Heavy chain | H16L13, H16L16, | US20140147435 | 5492 |
| | | variable region | H16L18, H16L14, | SEQ ID NO: 16 | |
| | | | H16L15, H16L17, | | |
| | | | H16L6, H16L11 | | |
| HD92 | NOGO | Heavy chain | H17L13, H17L16, | US20140147435 | 5493 |
| | | variable region | H17L18, H17L14, | SEQ ID NO: 17 | |
| | | | H17L15, H17L17, | | |
| | | | H17L6, H17L11 | | |
| HD93 | NOGO | Heavy chain | H18L13, H18L16, | US20140147435 | 5494 |
| | | variable region | H18L18, H18L14, | SEQ ID NO: 18 | |
| | | | H18L15, H18L17, | | |
| | | | H18L6, H18L11 | | |
| HD94 | NOGO | Heavy chain | H1L13, H1L16, | US20140147435 | 5495 |
| | | variable region | H1L18, H1L14, | SEQ ID NO: 77 | |
| | | | H1L15, H1L17, H1L6 | | |
| HD95 | NOGO | Heavy chain | H19L13, H19L16, | US20140147435 | 5496 |
| | | variable region | H19L18, H19L14, | SEQ ID NO: 85 | |
| | | | H19L15, H19L17, | | |
| | | | H19L6. H19L11 | | |
| HD96 | NOGO | Heavy chain | H20L13, H20L16, | US20140147435 | 5497 |
| | | variable region | H20L18, H20L14, | SEQ ID NO: 86 | |
| | | | H20L15, H20L17, | | |
| | | | H20L6, H20L11 | | |
| HD97 | NOGO | Heavy chain | H21L13, H21L16, | US20140147435 | 5498 |
| | | variable region | H21L18, H21L14, | SEQ ID NO: 87 | |
| | | | H21L15, H21L17, | | |
| | | | H21L6, H21L11 | | |
| HD98 | NOGO | Heavy chain | H22L13, H22L16, | US20140147435 | 5499 |
| | | variable region | H22L18, H22L14, | SEQ ID NO: 88 | |
| | | | H22L15, H22L17, | | |
| | | | H22L6, H22L11 | | |
| HD99 | NOGO | Heavy chain | H23L13, H23L16, | US20140147435 | 5500 |
| | | variable region | H23L18, H23L14, | SEQ ID NO: 89 | |
| | | | H23L15, H23L17, | | |
| | | | H23L6. H23L11 | | |
| HD100 | NOGO | Heavy chain | H24L13, H24L16, | US20140147435 | 5501 |
| | | variable region | H24L18, H24L14, | SEQ ID NO: 90 | |
| | | | H24L15, H24L17, | | |
| | | | H24L6, H24L11 | | |
| HD101 | NOGO | Heavy chain | H25L13, H25L16, | US20140147435 | 5502 |
| | | variable region | H25L18, H25L14, | SEQ ID NO: 91 | |
| | | | H25L15, H25L17, | | |
| | | | H25L6, H25L11 | | |
| HD102 | Nogo-66 | Heavy chain | Antibody clone 50 | US20140065155 | 5503 |
| | | variable region | | SEQ ID NO: 3 | |
| HD103 | Nogo-66 | Heavy chain | Antibody clone 51 | US20140065155 | 5504 |
| | | variable region | | SEQ ID NO: 5 | |
| HD104 | NogoA/NIG | Heavy chain | 6A3-Ig4 | WO2009056509 | 5505 |
| | | variable region | | SEQ ID NO: 24 | |
| HD105 | NogoA/NiG | Heavy chain | 6A3-IgG1 | WO2009056509 | 5506 |
| | | variable region | | SEQ ID NO: 4 | |
| HD106 | RGM A | Heavy chain | 5F9.1-GL | US20150183871 | 5507 |
| | | variable region | | SEQ ID NO: 35 | |
| HD107 | RGM A | Heavy chain | 5F9.2-GL | US20150183871 | 5508 |
| | | variable region | | SEQ ID NO: 36 | |
| HD108 | RGM A | Heavy chain | 5F9.3-GL | US20150183871 | 5509 |
| | | variable region | | SEQ ID NO: 37 | |
| HD109 | RGM A | Heavy chain | 5F9.4-GL | US20150183871 | 5510 |
| | | variable region | | SEQ ID NO: 38 | |
| HD110 | RGM A | Heavy chain | 5F9.5-GL | US20150183871 | 5511 |
| | | variable region | | SEQ ID NO: 39 | |
| HD111 | RGM A | Heavy chain | 5F9.6-GL | US20150183871 | 5512 |
| | | variable region | | SEQ ID NO: 40 | |
| HD112 | RGM A | Heavy chain | 5F9.7-GL | US20150183871 | 5513 |
| | | variable region | | SEQ ID NO: 41 | |
| HD113 | RGM A | Heavy chain | 5F9.8-GL | US20150183871 | 5514 |
| | | variable region | | SEQ ID NO: 42 | |
| HD114 | RGM A | Heavy chain | 5F9.9-GL | US20150183871 | 5515 |
| | | variable region | | SEQ ID NO: 43 | |
| HD115 | RGM A | Heavy chain | hSF9.1, h5F9.1, | US2015/0183871 | 5516 |
| | | variable region | h5F9.1, h5F9.1, | SEQ ID NO: 47 | |
| | | | h5F9.1, h5F9.2, | | |
| | | | h5F9.3 | | |
| HD116 | RGM A | Heavy chain | h5F9.3, h5F9.9, | US2015/0183871 | 5517 |
| | | variable region | h5F9.25 | SEQ ID NO: 53 | |
| HD117 | RGM A | Heavy chain | h5F9.4, h5F9.10, | US2015/0183871 | 5518 |
| | | variable region | h5F9.26 | SEQ ID NO: 54 | |
| HD118 | RGMa | Heavy chain | AE12-21 | US20140023659 | 5519 |
| | | variable region | | SEQ ID NO: 115 | |
| HD119 | RGMa | Heavy chain | AE12-23 | US20140023659 | 5520 |
| | | variable region | | SEQ ID NO: 123 | |
| HD120 | RGMa | Heavy chain | AE12-24 | US20140023659 | 5521 |
| | | variable region | | SEQ ID NO: 131 | |
| HD121 | RGMa | Heavy chain | AE12-3 | US20140023659 | 5522 |
| | | variable region | | SEQ ID NO: 17 | |
| HD122 | RGMa | Heavy chain | AE12-4 | US20140023659 | 5523 |
| | | variable region | | SEQ ID NO: 25 | |
| HD123 | RGMa | Heavy chain | AE12-5 | US20140023659 | 5524 |
| | | variable region | | SEQ ID NO: 33 | |
| HD124 | RGMa | Heavy chain | AE12-6 | US20140023659 | 5525 |
| | | variable region | | SEQ ID NO: 41 | |
| HD125 | RGMa | Heavy chain | AE12-7 | US20140023659 | 5526 |
| | | variable region | | SEQ ID NO: 49 | |
| HD126 | RGMa | Heavy chain | AE12-8 | US20140023659 | 5527 |
| | | variable region | | SEQ ID NO: 57 | |
| HD127 | RGMa | Heavy chain | AE12-2 | US20140023659 | 5528 |
| | | variable region | | SEQ ID NO: 9 | |
| HD128 | RGMa | Heavy chain | AE12-13 | US20140023659 | 5529 |
| | | variable region | | SEQ ID NO: 91 | |
| HD129 | RGMa | Heavy chain | AE12-15 | US20140023659 | 5530 |
| | | variable region | | SEQ ID NO: 99 | |
| HD130 | RGMa | Heavy chain | AE12-1 | US20140023659 | 5531 |
| | | variable region | | SEQ ID NO: 1 | |
| HD131 | RGMa | Heavy chain | AE12-20 | US20140023659 | 5532 |
| | | variable region | | SEQ ID NO: 107 | |
| HD132 | NOGO | Heavy chain | 2A10 construct | WO2007003421 | 5533 |
| | | variable region | | SEQ ID NO: 77 | |
| | | humanized | | | |
| | | construct H1 | | | |
| HD133 | NOGO | Heavy chain | 2A10 construct | WO2007003421 | 5534 |
| | | variable region | | SEQ ID NO: 14 | |
| | | humanized | | | |
| | | construct H14 | | | |
| HD134 | NOGO | Heavy chain | 2A10 construct | WO2007003421 | 5535 |
| | | variable region | | SEQ ID NO: 15 | |
| | | humanized | | | |
| | | construct H15 | | | |
| HD135 | NOGO | Heavy chain | 2A10 construct | WO2007003421 | 5536 |
| | | variable region | | SEQ ID NO: 16 | |
| | | humanized | | | |
| | | construct H16 | | | |
| HD136 | NOGO | Heavy chain | 2A10 construct | WO2007003421 | 5537 |
| | | variable region | | SEQ ID NO: 17 | |
| | | humanized | | | |
| | | construct H17 | | | |
| HD137 | NOGO | Heavy chain | 2A10 construct | WO2007003421 | 5538 |
| | | variable region | | SEQ ID NO: 18 | |
| | | humanized | | | |
| | | construct H18 | | | |
| HD138 | NOGO | Heavy chain | 2A10 construct | WO2007003421 | 5539 |
| | | variable region | | SEQ ID NO: 85 | |
| | | humanized | | | |
| | | construct H19 | | | |
| HD139 | NOGO | Heavy chain | 2A10 construct | WO2007003421 | 5540 |
| | | variable region | | SEQ ID NO: 86 | |
| | | humanized | | | |
| | | construct H20 | | | |
| HD140 | NOGO | Heavy chain | 2A10 construct | WO2007003421 | 5541 |
| | | variable region | | SEQ ID NO: 87 | |
| | | humanized | | | |
| | | construct H21 | | | |
| HD141 | NOGO | Heavy chain | 2A10 construct | WO2007003421 | 5542 |
| | | variable region | | SEQ ID NO: 88 | |
| | | humanized | | | |
| | | construct H22 | | | |
| HD142 | NOGO | Heavy chain | 2A10 construct | WO2007003421 | 5543 |
| | | variable region | | SEQ ID NO: 89 | |
| | | humanized | | | |
| | | construct H23 | | | |
| HD143 | NOGO | Heavy chain | 2A10 construct | WO2007003421 | 5544 |
| | | variable region | | SEQ ID NO: 90 | |
| | | humanized | | | |
| | | construct H24 | | | |
| HD144 | NOGO | Heavy chain | 2A10 construct | WO2007003421 | 5545 |
| | | variable region | | SEQ ID NO: 91 | |
| | | humanized | | | |
| | | construct H25 | | | |
| HD145 | NOGO | Heavy chain | 2A10 construct | WO2007003421 | 5546 |
| | | variable region | | SEQ ID NO: 11 | |
| | | humanized | | | |
| | | construct H5 | | | |
| HD146 | NOGO | Heavy chain | 2A10 construct | WO2007003421 | 5547 |
| | | variable region | | SEQ ID NO: 12 | |
| | | humanized | | | |
| | | construct H6 | | | |
| HD147 | NOGO | Heavy chain | 2A10 construct | WO2007003421 | 5548 |
| | | variable region | | SEQ ID NO: 13 | |
| | | humanized | | | |
| | | construct H700 | | | |
| HD 148 | amy loids | Light chain | #118 | WO2010012004 | 5549 |
| | | | | SEQ ID NO: 10 | |
| HD 149 | amyloids | Light chain | #121 | WO2010012004 | 5550 |
| | | | | SEQ ID NO: 12 | |
| HD 150 | amyloids | Light chain | #201 | WO2010012004 | 5551 |
| | | | | SEQ ID NO: 14 | |
| HD151 | amyloids | Light chain | #204 | WO2010012004 | 5552 |
| | | | | SEQ ID NO: 15 | |
| HD 152 | amyloids | Light chain | #205 | WO2010012004 | 5553 |
| | | | | SEQ ID NO: 17 | |
| HD153 | NOGO | Light chain | H6L13 FL, H19L13 | US20140147435 | 5554 |
| | | | FL, H20L13 FL, | SEQ ID NO: 35 | |
| | | | H21L13 FL, H25L13 | | |
| | | | FL | | |
| HD154 | NOGO | Light chain | H16L16 FL, H19L16 | US20140147435 | 5555 |
| | | | FL, H20L16 FL, | SEQ ID NO: 38 | |
| | | | H21L16 FL, H25L16 | | |
| | | | FL, H18L16 FL | | |
| HD155 | NOGO | Light chain | H16L18 FL, H19L18 | US20140147435 | 5556 |
| | | | FL, H20L18 FL, | SEQ ID NO: 40 | |
| | | | H21L18 FL, H25L18 | | |
| | | | FL | | |
| HD156 | Nogo receptor- | Light chain | 7E11 | US20090215691 | 5557 |
| | 1 | | | SEQ ID NO: 15 | |
| HD157 | Nogo receptor- | Light chain | 7E11 | US20090215691 | 5558 |
| | 1 | | | SEQ ID NO: 17 | |
| HD158 | trk-C (NT-3 | Light chain | 2250 | U.S. Pat. No. | 5559 |
| | trkC ligand) | | | 7,615,383 | |
| | | | | SEQ ID NO: 49 | |
| HD159 | trk-C (NT-3 | Light chain | 2253 | U.S. Pat. No. | 5560 |
| | trkC ligand) | | | 7,615,383 | |
| | | | | SEQ ID NO: 50 | |
| HD160 | trk-C (NT-3 | Light chain | 2256 | U.S. Pat. No. | 5561 |
| | trkC ligand) | | | 7,615,383 | |
| | | | | SEQ ID NO: 51 | |
| HD161 | trk-C (NT-3 | Light chain | 6.1.2 | U.S. Pat. No. | 5562 |
| | trkC ligand) | | | 7,615,383 | |
| | | | | SEQ ID NO: 52 | |
| HD162 | trk-C (NT-3 | Light chain | 6.4.1 | U.S. Pat. No. | 5563 |
| | trkC ligand) | | | 7,615,383 | |
| | | | | SEQ ID NO: 53 | |
| HD163 | trk-C (NT-3 | Light chain | 2345 | U.S. Pat. No. | 5564 |
| | trkC ligand) | | | 7,615,383 | |
| | | | | SEQ ID NO: 54 | |
| HD164 | trk-C (NT-3 | Light chain | 2349 | U.S. Pat. No. | 5565 |
| | trkC ligand) | | | 7,615,383 | |
| | | | | SEQ ID NO: 55 | |
| HD165 | many | Light chain fusion | H21L13, H21L16, | U.S. Pat. No. | 5566 |
| | | protein | H21L18, H21L14, | 8,053,569 | |
| | | | H21L15, H21L17, | SEQ ID NO: 31 | |
| | | | H21L6, H21L11 | | |
| HD166 | many | Light chain fusion | H23L13, H23L16, | U.S. Pat. No. | 5567 |
| | | protein | H23L18, H23L14, | 8,053,569 | |
| | | | H23L15, H23L17, | SEQ ID NO: 36 | |
| | | | H23L6, H23L11 | | |
| HD167 | NOGO | Light chain | 2A10 construct | WO2007003421 | 5568 |
| | | humanized | | SEQ ID NO: 80 | |
| | | construct L11 | | | |
| HD168 | NOGO | Light chain | 2A10 construct | WO2007003421 | 5569 |
| | | humanized | | SEQ ID NO: 35 | |
| | | construct L13 | | | |
| HD169 | NOGO | Light chain | 2A10 construct | WO2007003421 | 5570 |
| | | humanized | | SEQ ID NO: 36 | |
| | | construct L 14 | | | |
| HD170 | NOGO | Light chain | 2A10 construct | WO2007003421 | 5571 |
| | | humanized | | SEQ ID NO: 37 | |
| | | construct L15 | | | |
| HD171 | NOGO | Light chain | 2A10 construct | WO2007003421 | 5572 |
| | | humanized | | SEQ ID NO: 38 | |
| | | construct L16 | | | |
| HD172 | NOGO | Light chain | 2A10 construct | WO2007003421 | 5573 |
| | | humanized | | SEQ ID NO: 39 | |
| | | construct L17 | | | |
| HD173 | NOGO | Light chain | 2A10 construct | WO2007003421 | 5574 |
| | | humanized | | SEQ ID NO: 40 | |
| | | construct L18 | | | |
| HD174 | NOGO | Light chain | 2A10 construct | WO2007003421 | 5575 |
| | | humanized | | SEQ ID NO: 34 | |
| | | construct L6 | | | |
| HD175 | RTN4 | Light chain IgG4, | Atinumab | U.S. Pat. No. | 5576 |
| | | immunomodulator | | 8,163,285 | |
| | | | | SEQ ID NO: 25 | |
| HD176 | huntingtin | Light chain single | | US20050226863 | 5577 |
| | protein | domain | | SEQ ID NO: 1 | |
| HD177 | huntingtin | Light chain single | VL12.3 | US20050226863 | 5578 |
| | protein | domain | | SEQ ID NO: 10 | |
| HD178 | huntingtin | Light chain single | | US20050226863 | 5579 |
| | protein | domain | | SEQ ID NO: 2 | |
| HD179 | huntingtin | Light chain single | | US20050226863 | 5580 |
| | protein | domain | | SEQ ID NO: 3 | |
| HD180 | huntingtin | Light chain single | | US20050226863 | 5581 |
| | protein | domain | | SEQ ID NO: 4 | |
| HD181 | amyloid | Light chain | F11G3 | U.S. Pat. No. | 5582 |
| | oligomers | variable region | | 9,125,846 | |
| | | | | SEQ ID NO: 12 | |
| HD182 | DR6 and P75 | Light chain | M73-C04 | WO2010062904 | 5583 |
| | | variable region | | SEQ ID NO: 102 | |
| HD183 | DR6 and P75 | Light chain | IP1D6.3 | WO2010062904 | 5584 |
| | | variable region | | SEQ ID NO: 112 | |
| HD184 | DR6 and P75 | Light chain | M50-H02 | WO2010062904 | 5585 |
| | | variable region | | SEQ ID NO: 12 | |
| HD185 | DR6 and P75 | Light chain | 1P2F2.1 | WO2010062904 | 5586 |
| | | variable region | | SEQ ID NO: 122 | |
| HD186 | DR6 and P75 | Light chain | 1P5D10.2 | WO2010062904 | 5587 |
| | | variable region | | SEQ ID NO: 132 | |
| HD187 | DR6 and P75 | Light chain | M51-H09 | WO2010062904 | 5588 |
| | | variable region | | SEQ ID NO: 22 | |
| HD188 | DR6 and P75 | Light chain | M53-E04 | WO2010062904 | 5589 |
| | | variable region | | SEQ ID NO: 32 | |
| HD189 | DR6 and P75 | Light chain | M53-F04 | WO2010062904 | 5590 |
| | | variable region | | SEQ ID NO: 42 | |
| HD190 | DR6 and P75 | Light chain | M62-B02 | WO2010062904 | 5591 |
| | | variable region | | SEQ ID NO: 52 | |
| HD191 | DR6 and P75 | Light chain | M63-E10 | WO2010062904 | 5592 |
| | | variable region | | SEQ ID NO: 62 | |
| HD192 | DR6 and P75 | Light chain | M66-B03 | WO2010062904 | 5593 |
| | | variable region | | SEQ ID NO: 72 | |
| HD193 | DR6 and P75 | Light chain | M67-G02 | WO2010062904 | 5594 |
| | | variable region | | SEQ ID NO: 82 | |
| HD194 | DR6 and P75 | Light chain | M72-F03 | WO2010062904 | 5595 |
| | | variable region | | SEQ ID NO: 92 | |
| HD195 | LPG | Light chain | #7 | U.S. Pat. No. | 5596 |
| | (lysophos- | variable region | | 8,591,902 | |
| | phatidyl- | | | SEQ ID NO: 17 | |
| | glucoside) | | | | |
| HD196 | LPG | Light chain | #15 | U.S. Pat. No. | 5597 |
| | (lysophos- | variable region | | 8,591,902 | |
| | phatidyl- | | | SEQ ID NO: 7 | |
| | glucoside) | | | | |
| HD197 | MAG | Light chain | | U.S. Pat. No. | 5598 |
| | | variable region | | 8,071,731 | |
| | | | | SEQ ID NO: 16 | |
| HD198 | MAG | Light chain | | U.S. Pat. No. | 5599 |
| | | variable region | | 8,071,731 | |
| | | | | SEQ ID NO: 17 | |
| HD199 | MAG | Light chain | | U.S. Pat. No. | 5600 |
| | | variable region | | 8,071,731 | |
| | | | | SEQ ID NO: 18 | |
| HD200 | MAG | Light chain | | U.S. Pat. No. | 5601 |
| | | variable region | | 8,071,731 | |
| | | | | SEQ ID NO: 19 | |
| HD201 | MAI (myelin | Light chain | | WO2013158748 | 5602 |
| | associated | variable region | | SEQ ID NO: 11 | |
| | inhibitor) | | | | |
| HD202 | MAI (myelin | Light chain | | WO2013158748 | 5603 |
| | associated | variable region | | SEQ ID NO: 27 | |
| | inhibitor) | | | | |
| HD203 | NOGO | Light chain | H1L6, H5L6, H6L6, | US20140147435 | 5604 |
| | | variable region | H14L6, H15L6, | SEQ ID NO: 19 | |
| | | | H16L6, H17L6, | | |
| | | | H18L6, H19L6, | | |
| | | | H20L6, H21L6, | | |
| | | | H22L6, H23L6, | | |
| | | | H24L6, H25L6, | | |
| | | | H700L6 | | |
| HD204 | NOGO | Light chain | H1L13, H5L13, | US20140147435 | 5605 |
| | | variable region | H6L13, H14L13, | SEQ ID NO: 20 | |
| | | | H15L13, H16L13, | | |
| | | | H17L13, H18L13, | | |
| | | | H19L13, H20L13, | | |
| | | | H21L13, H22L13, | | |
| | | | H23L13, H24L13 | | |
| | | | H25L13, H700L13 | | |
| HD205 | NOGO | Light chain | H1L14, H5L14, | US20140147435 | 5606 |
| | | variable region | H6L14, H14L14, | SEQ ID NO: 21 | |
| | | | H15L14, H16L14, | | |
| | | | H17L14, H18L14, | | |
| | | | H19L14, H20L14, | | |
| | | | H21L14, H22L14, | | |
| | | | H23L14, H24L14, | | |
| | | | H25L14, H700L14 | | |
| HD206 | NOGO | Light chain | H1L15, H5L15, | US20140147435 | 5607 |
| | | variable region | H6L15, H14L15, | SEQ ID NO: 22 | |
| | | | H15L15, H16L15, | | |
| | | | H17L15, H18L15, | | |
| | | | H19L15, H20L15, | | |
| | | | H21L15, H22L15, | | |
| | | | H23L15, H24L15, | | |
| | | | H25L15, H700L15 | | |
| HD207 | NOGO | Light chain | H1L 16, H5L 16, | US20140147435 | 5608 |
| | | variable region | H6L 16, H14L16, | SEQ ID NO: 23 | |
| | | | H15L16, H16L16, | | |
| | | | H17L16, H18L16, | | |
| | | | H19L16, H20L16, | | |
| | | | H21L16, H22L16, | | |
| | | | H23L16, H24L16, | | |
| | | | H25L16, H700L16 | | |
| HD208 | NOGO | Light chain | H1L17, H5L17, | US20140147435 | 5609 |
| | | variable region | H6L17, H14L17, | SEQ ID NO: 24 | |
| | | | H15L17, H16L17, | | |
| | | | H17L17, H18L17, | | |
| | | | H19L17, H20L17, | | |
| | | | H21L17, H22L17, | | |
| | | | H23L17, H24L17, | | |
| | | | H25L17, H700L17 | | |
| HD209 | NOGO | Light chain | H1L18, H5L18, | US20140147435 | 5610 |
| | | variable region | H6L18, H14L18, | SEQ ID NO: 25 | |
| | | | H15L18, H16L18, | | |
| | | | H17L18, H18L18, | | |
| | | | H19L18, H20L18, | | |
| | | | H21L18, H22L18, | | |
| | | | H23L18, H24L18, | | |
| | | | H25L18, H700L18 | | |
| HD210 | NOGO | Light chain | H5L11, H6L11, | US20140147435 | 5611 |
| | | variable region | H14L11, H15L11, | SEQ ID NO: 78 | |
| | | | H16L11, H17L11, | | |
| | | | H18L11, H19L11 | | |
| | | | H20L11, H21L11, | | |
| | | | H22L11, H23L11, | | |
| | | | H24L11, H25L11, | | |
| | | | H700L11 | | |
| HD211 | Nogo-66 | Light chain | Antibody clone 50 | US20140065155 | 5612 |
| | | variable region | | SEQ ID NO: 4 | |
| HD212 | Nogo-66 | Light chain | Antibody clone 51 | US20140065155 | 5613 |
| | | variable region | | SEQ ID NO: 6 | |
| HD213 | NogoA/NiG | Light chain | 6A3-Ig4 | WO2009056509 | 5614 |
| | | variable region | | SEQ ID NO: 25 | |
| HD214 | NogoA/NIG | Light chain | 6A3-IgG1 | WO2009056509 | 5615 |
| | | variable region | | SEQ ID NO: 5 | |
| HD215 | RGM A | Light chain | 5F9.1-GL, 5F9.1-GL, | US20150183871 | 5616 |
| | | variable region | 5F9.1-GL, 5F9.1-GL, | SEQ ID NO: 44 | |
| | | | 5F9.1-GL, 5F9.1-GL, | | |
| | | | 5F9.1-GL, 5F9.1-GL, | | |
| | | | 5F9.1-GL, 5F9.1-GL, | | |
| | | | h5F9.4, h5F9.11, | | |
| | | | h5F9.12 | | |
| HD216 | RGM A | Light chain | 5F9.2-GL, 5F9.2-GL, | US20150183871 | 5617 |
| | | variable region | 5F9.2-GL, 5F9.2-GL, | SEQ ID NO: 45 | |
| | | | 5F9.2-GL, 5F9.2-GL, | | |
| | | | 5F9.2-GL, 5F9.2-GL, | | |
| | | | 5F9.2-GL, 5F9.2-GL, | | |
| | | | h5F9.5, h5F9.19, | | |
| | | | h5F9.20 | | |
| HD217 | RGM A | Light chain | 5F9.3-GL, 5F9.3-GL, | US20150183871 | 5618 |
| | | variable region | 5F9.3~GL, 5F9.3-GL, | SEQ ID NO: 46 | |
| | | | 5F9.3-GL, 5F9.3-GL, | | |
| | | | 5F9.3-GL, 5F9.3-GL, | | |
| | | | 5F9.3-GL, 5F9.3-GL, | | |
| | | | h5F9.6, h5F9.21, | | |
| | | | h5F9.22 | | |
| HD218 | RGM A | Light chain | h5F9.5, 15F9.6, | US20150183871 | 5619 |
| | | variable region | h5F9.7, h5F9.8, | SEQ ID NO: 48 | |
| | | | h5F9.9, h5F9.10 | | |
| HD219 | RGM A | Light chain | h5F9.11, | US20150183871 | 5620 |
| | | variable region | h5F9.19, h5F9.21 | SEQ ID NO: 49 | |
| HD220 | RGM A | Light chain | h5F9.12, h5F9.20, | US20150183871 | 5621 |
| | | variable region | h5F9.22, h5F9.23, | SEQ ID NO: 50 | |
| | | | h5F9.25, h5F9.25, | | |
| | | | h5F9.26 | | |
| HD221 | RGM A | Light chain | h5F9.1, h5F9.7, | US20150183871 | 5622 |
| | | variable region | h5F9.23 | SEQ ID NO: 51 | |
| HD222 | RGM A | Light chain | h5F9.2, h5F9.8, | US20150183871 | 5623 |
| | | variable region | h5F9.25 | SEQ ID NO: 52 | |
| HD223 | RGMa | Light chain | AE12-15 | US20140023659 | 5624 |
| | | variable region | | SEQ ID NO: 103 | |
| HD224 | RGMa | Light chain | AE12-20 | US20140023659 | 5625 |
| | | variable region | | SEQ ID NO: 111 | |
| HD225 | RGMa | Light chain | AE12-21 | US20140023659 | 5626 |
| | | variable region | | SEQ ID NO: 119 | |
| HD226 | RGMa | Light chain | AE12-23 | US20140023659 | 5627 |
| | | variable region | | SEQ ID NO: 127 | |
| HD227 | RGMa | Light chain | AE12-2 | US20140023659 | 5628 |
| | | variable region | | SEQ ID NO: 13 | |
| HD228 | RGM | Light chain | AE12-24 | US20140023659 | 5629 |
| | | variable region | | SEQ ID NO: 135 | |
| HD229 | RGMa | Light chain | AE12-3 | US20140023659 | 5630 |
| | | variable region | | SEQ ID NO: 21 | |
| HD230 | RGMa | Light chain | AE12-4 | US20140023659 | 5631 |
| | | variable region | | SEQ ID NO: 29 | |
| HD231 | RGMa | Light chain | AE12-5 | US20140023659 | 5632 |
| | | variable region | | SEQ ID NO: 37 | |
| HD232 | RGMa | Light chain | AE12-6 | US20140023659 | 5633 |
| | | variable region | | SEQ ID NO: 45 | |
| HD233 | RGMa | Light chain | AE12-1 | US20140023659 | 5634 |
| | | variable region | | SEQ ID NO: 5 | |
| HD234 | RGMa | Light chain | AE12-7 | US20140023659 | 5635 |
| | | variable region | | SEQ ID NO: 53 | |
| HD235 | RGMa | Light chain | AE12-8 | US20140023659 | 5636 |
| | | variable region | | SEQ ID NO: 61 | |
| HD236 | RGMa | Light chain | AE12-13 | US20140023659 | 5637 |
| | | variable region | | SEQ ID NO: 95 | |
| HD237 | NOGO | Light chain | 2A10 construct | WO2007003421 | 5638 |
| | | variable region | | SEQ ID NO: 78 | |
| | | humanized | | | |
| | | construct L11 | | | |
| HD238 | NOGO | Light chain | 2A10 construct | WO2007003421 | 5639 |
| | | variable region | | SEQ ID NO: 20 | |
| | | humanized | | | |
| | | construct L13 | | | |
| HD239 | NOGO | Light chain | 2A10 construct | WO2007003421 | 5640 |
| | | variable region | | SEQ ID NO: 21 | |
| | | humanized | | | |
| | | construct L14 | | | |
| HD240 | NOGO | Light chain | 2A10 construct | WO2007003421 | 5641 |
| | | variable region | | SEQ ID NO: 22 | |
| | | humanized | | | |
| | | construct L15 | | | |
| HD241 | NOGO | Light chain | 2A10 construct | WO2007003421 | 5642 |
| | | variable region | | SEQ ID NO: 23 | |
| | | humanized | | | |
| | | construct L16 | | | |
| HD242 | NOGO | Light chain | 2A10 construct | WO2007003421 | 5643 |
| | | variable region | | SEQ ID NO: 24 | |
| | | humanized | | | |
| | | construct L 17 | | | |
| HD243 | NOGO | Light chain | 2A10 construct | WO2007003421 | 5644 |
| | | variable region | | SEQ ID NO: 25 | |
| | | humanized | | | |
| | | construct L18 | | | |
| HD244 | NOGO | Light chain | 2A10 construct | WO2007003421 | 5645 |
| | | variable region | | SEQ ID NO: 19 | |
| | | humanized | | | |
| | | construct L6 | | | |
| HD245 | HTT | | | Lecerf, J.M. et al., | 5646 |
| | | | | Human single- | |
| | | | | chain Fv | |
| | | | | intrabodies | |
| | | | | counteract in situ | |
| | | | | huntingtin | |
| | | | | aggregation in | |
| | | | | cellular models of | |
| | | | | Huntington's | |
| | | | | disease, Proc. Natl. | |
| | | | | Acad. Sci. U.S.A. | |
| | | | | 98 (8). 4764-4769 | |
| | | | | (2001), NCBI | |
| | | | | Accession # | |
| | | | | ACA53373.1 | |

### Muscle Disease Antibodies

[0372] In some embodiments, the payload region of the viral particle comprises one or more nucleic acid sequences encoding one or more of the muscle disease payload antibody polypeptides listed in Table 6 (MUS1-MUS485; SEQ ID NO: 5647-6131). A non-exhaustive listing of muscle diseases includes Multiple System Atrophy (MSA), Amyotrophic Lateral Sclerosis (ALS) and Duchenne Muscular Dystrophy (DMD).

TABLE 6
Muscle Disease Antibodies

| Antibody | | | | Reference | SEQ ID |
|---|---|---|---|---|---|
| No. | Target | Description | Antibody Name | Information | NO |
| MUS1 | amyloid | consensus sequence | M13 g3p, fd g3p, f1 | US20150376239 | 5647 |
| | proteins | | g3p | SEQ ID NO: 4 | |
| MUS2 | amyloid | consensus sequence | 12-2 g3p, Ike g3p | US20150376239 | 5648 |
| | proteins | | | SEQ ID NO: 7 | |
| MUS3 | 118-126 of α- | constant region | IgG1 | US20150259404 | 5649 |
| | synuclein | | | SEQ ID NO: 38 | |
| MUS4 | amyloid | Fusion protein | M13 g3p | US20150376239 | 5650 |
| | proteins | | | SEQ ID NO: 1 | |
| MUS5 | amyloid | Fusion protein | Construct 5 | US20150376239 | 5651 |
| | proteins | | | SEQ ID NO: 11 | |
| MUS6 | amyloid | Fusion protein | Construct 6 | US20150376239 | 5652 |
| | proteins | | | SEQ ID NO: 13 | |
| MUS7 | amyloid | Fusion protein | fd N2 | US20150376239 | 5653 |
| | proteins | | | SEQ ID NO: 14 | |
| MUS8 | amyloid | Fusion protein | f1 N2 | US20150376239 | 5654 |
| | proteins | | | SEQ ID NO: 15 | |
| MUS9 | amyloid | Fusion protein | M13 N2 | US20150376239 | 5655 |
| | proteins | | | SEQ ID NO: 16 | |
| MUS10 | amyloid | Fusion protein | Ike N2 | US20150376239 | 5656 |
| | proteins | | | SEQ ID NO: 17 | |
| MUS11 | amyloid | Fusion protein | 12-2 N2 | US20150376239 | 5657 |
| | proteins | | | SEQ ID NO: 18 | |
| MUS12 | amyloid | Fusion protein | If1 N2 | US20150376239 | 5658 |
| | proteins | | | SEQ ID NO: 19 | |
| MUS13 | amyloid | Fusion protein | fd g3p | US20150376239 | 5659 |
| | proteins | | | SEQ ID NO: 2 | |
| MUS14 | amyloid | Fusion protein | Construct 3 | US20150376239 | 5660 |
| | proteins | | | SEQ ID NO: 20 | |
| MUS15 | amyloid | Fusion protein | Construct 3m g3p | US20150376239 | 5661 |
| | proteins | | portion | SEQ ID NO: 24 | |
| MUS16 | amyloid | Fusion protein | If1 g3p | US20150376239 | 5662 |
| | proteins | | | SEQ ID NO: 29 | |
| MUS17 | amyloid | Fusion protein | f1 g3p | US20150376239 | 5663 |
| | proteins | | | SEQ ID NO: 3 | |
| MUS18 | amyloid | Fusion protein | fd g3p | US20150376239 | 5664 |
| | proteins | | | SEQ ID NO: 30 | |
| MUS19 | amyloid | Fusion protein | Construct 8, rs-g3p | US20150376239 | 5665 |
| | proteins | | (If1-NIN2)-hlgG1-Fc | SEQ ID NO: 31 | |
| MUS20 | amyloid | Fusion protein | 12-2 g3p | US20150376239 | 5666 |
| | proteins | | | SEQ ID NO: 5 | |
| MUS21 | amyloid | Fusion protein | Ike g3p | US20150376239 | 5667 |
| | proteins | | | SEQ ID NO: 6 | |
| MUS22 | amyloid | Fusion protein | If1 g3p | US20150376239 | 5668 |
| | proteins | | | SEQ ID NO: 8 | |
| MUS23 | amyloid | Fusion protein | Construct 4 | US20150376239 | 5669 |
| | proteins | | | SEQ ID NO: 9 | |
| MUS24 | ACVR2B | Heavy chain | H6L4. H6L5, H6L6 | U.S. Pat. No. | 5670 |
| | (SMA - muscle | | | 8,388,968 | |
| | growth) | | | SEQ ID NO: 146 | |
| MUS25 | ACVR2B | Heavy chain | | U.S. Pat. No. | 5671 |
| | (SMA - muscle | | | 8,388,968 | |
| | growth) | | | SEQ ID NO: 146 | |
| MUS26 | amyloids | Heavy chain | #118 | WO2010012004 | 5672 |
| | | | | SEQ ID NO: 11 | |
| MUS27 | amyloids | Heavy chain | #121 | WO2010012004 | 5673 |
| | | | | SEQ ID NO: 13 | |
| MUS28 | amyloids | Heavy chain | #204 | WO2010012004 | 5674 |
| | | | | SEQ ID NO: 16 | |
| MUS29 | amyloids | Heavy chain | #205 | WO2010012004 | 5675 |
| | | | | SEQ ID NO: 18 | |
| MUS30 | EAG1 | Heavy chain | chimeric ImAb3 | WO2006037604 | 5676 |
| | | | | SEQ ID NO: 12 | |
| MUS31 | EAG1 | Heavy chain | chimeric ImAb4 | WO2006037604 | 5677 |
| | | | | SEQ ID NO: 16 | |
| MUS32 | EAG1 | Heavy chain | HC-lmAb3-hum VH3- | WO2006037604 | 5678 |
| | | | 72 | SEQ ID NO: 20 | |
| MUS33 | EAG1 | Heavy chain | HC-lmAb4-hum VH4- | WO2006037604 | 5679 |
| | | | 59 | SEQ ID NO: 24 | |
| MUS34 | EAG1 | Heavy chain | HC-lmAb3-humVH3 | WO2006037604 | 5680 |
| | | | 23 | SEQ ID NO: 28 | |
| MUS35 | EAG1 | Heavy chain | HC-lmAb3-hum VH2 | WO2006037604 | 5681 |
| | | | 26 | SEQ ID NO: 32 | |
| MUS36 | EAG1 | Heavy chain | HC-lmAb4-hum VH1- | WO2006037604 | 5682 |
| | | | 3 | SEQ ID NO: 36 | |
| MUS37 | EAG1 | Heavy chain | ImAb4 | WO2006037604 | 5683 |
| | | | | SEQ ID NO: 4 | |
| MUS38 | EAG1 | Heavy chain | ImAb3 | WO2006037604 | 5684 |
| | | | | SEQ ID NO: 8 | |
| MUS39 | GDF-8 | Heavy chain | 358-22 | US20130287762 | 5685 |
| | | | | SEQ ID NO: 10 | |
| MUS40 | GDF-8 | Heavy chain | 358-11-M1 | US20130287762 | 5686 |
| | | | | SEQ ID NO: 16 | |
| MUS41 | GDF-8 | Heavy chain | 358-22-M1 | US20130287762 | 5687 |
| | | | | SEQ ID NO: 4 | |
| MUS42 | growth | Heavy chain | | | 5688 |
| | differentiation | | | | |
| | factor 8 | | | | |
| MUS43 | growth | Heavy chain | Domagrozumab | | 5689 |
| | differentiation | | | | |
| | factor 8 | | | | |
| MUS44 | MAG | Heavy chain | | | 5690 |
| MUS45 | MSTN | Heavy chain | H24L13, H24L16, | | 5691 |
| | | | H24L18, H24L14, | | |
| | | | H24L15, H24L17, | | |
| | | | H24L6, H24L11 | | |
| MUS46 | myostatin | Heavy chain | NI-204.11F11 | US20110256132 | 5692 |
| | | | | SEQ ID NO: 26 | |
| MUS47 | myostatin | Heavy chain | NI-204.67E12 | US20110256132 | 5693 |
| | | | | SEQ ID NO: 28 | |
| MUS48 | myostatin | Heavy chain | NI-204.6H1 | US20110256132 | 5694 |
| | | | | SEQ ID NO: 29 | |
| MUS49 | myostatin | Heavy chain | NI-204.6H1 | US20110256132 | 5695 |
| | | | | SEQ ID NO: 30 | |
| MUS50 | Myostatin | Heavy chain | 312-19, 312-19-MI | US20130142788 | 5696 |
| | | | | SEQ ID NO: 123 | |
| MUS51 | Myostatin | Heavy chain | 591-33. 591-33-M1 | US20130142788 | 5697 |
| | | | | SEQ ID NO: 125 | |
| MUS52 | Myostatin | Heavy chain | 114-41, 114-41-M1 | US20130142788 | 5698 |
| | | | | SEQ ID NO: 127 | |
| MUS53 | Myostatin | Heavy chain | 595-16, 595-16- M1 | US20130142788 | 5699 |
| | | | | SEQ ID NO: 138 | |
| MUS54 | Myostatin | Heavy chain | 591-37, 591-37-MI | US20130142788 | 5700 |
| | | | | SEQ ID NO: 139 | |
| MUS55 | Myostatin | Heavy chain | 358-11, 358-11-M1 | US20130142788 | 5701 |
| | | | | SEQ ID NO: 140 | |
| MUS56 | Myostatin | Heavy chain | 358-22, 358-22-M1 | US20130142788 | 5702 |
| | | | | SEQ ID NO: 141 | |
| MUS57 | Myostatin | Heavy chain | 597-120, 597-120-M1 | US20130142788 | 5703 |
| | | | | SEQ ID NO: 142 | |
| MUS58 | Myostatin | Heavy chain | 311-3 | US20130142788 | 5704 |
| | | | | SEQ ID NO: 143 | |
| MUS59 | Myostatin | Heavy chain | 311-3-MI | US20130142788 | 5705 |
| | | | | SEQ ID NO: 144 | |
| MUS60 | Myostatin | Heavy chain | 312-19-M1 | US20130142788 | 5706 |
| | | | | SEQ ID NO: 26 | |
| MUS61 | Myostatin | Heavy chain | 114-41 | US20130142788 | 5707 |
| | | | | SEQ ID NO: 30 | |
| MUS62 | Myostatin | Heavy chain | 311-3-M1 | US20130142788 | 5708 |
| | | | | SEQ ID NO: 35 | |
| MUS63 | Myostatin | Heavy chain | 312-19 | US20130142788 | 5709 |
| | | | | SEQ ID NO: 36 | |
| MUS64 | Myostatin | Heavy chain | 591-33 | US20130142788 | 5710 |
| | | | | SEQ ID NO: 38 | |
| MUS65 | Myostatin | Heavy chain | 591-33-M1 | US20130142788 | 5711 |
| | | | | SEQ ID NO: 39 | |
| MUS66 | Myostatin | Heavy chain | 312-56 | US20130142788 | 5712 |
| | | | | SEQ ID NO: 98 | |
| MUS67 | myostatin | Heavy chain | NJ-205.21G2 | US20130209489 | 5713 |
| | antagonists | | | SEQ ID NO: 11 | |
| MUS68 | myostatin | Heavy chain | NI-205.8A2 | US20130209489 | 5714 |
| | antagonists | | | SEQ ID NO: 12 | |
| MUS69 | myostatin | Heavy chain | NI-205.8A2 | US20130209489 | 5715 |
| | antagonists | | | SEQ ID NO: 13 | |
| MUS70 | myostatin | Heavy chain | NI-205.15F12 | US20130209489 | 5716 |
| | antagonists | | | SEQ ID NO: 14 | |
| MUS71 | myostatin | Heavy chain | NI-205.15F12 | US20130209489 | 5717 |
| | antagonists | | | SEQ ID NO: 15 | |
| MUS72 | myostatin | Heavy chain | NI-205.113C4 | US20130209489 | 5718 |
| | antagonists | | | SEQ ID NO: 16 | |
| MUS73 | myostatin | Heavy chain | NI-205.113C4 | US20130209489 | 5719 |
| | antagonists | | | SEQ ID NO: 17 | |
| MUS74 | myostatin | Heavy chain | NI-205.25F3 | US20130209489 | 5720 |
| | antagonists | | | SEQ ID NO: 18 | |
| MUS75 | myostatin | Heavy chain | NI-205.25F3 | US20130209489 | 5721 |
| | antagonists | | | SEQ ID NO: 19 | |
| MUS76 | NOGO | Heavy chain | H19L13 FL, H19L16 | US20140147435 | 5722 |
| | | | FL, H19L18 FL | SEQ ID NO: 92 | |
| MUS77 | NOGO | Heavy chain | H20L13 FL, H20L16 | US20140147435 | 5723 |
| | | | FL, H20L18 FL | SEQ ID NO: 93 | |
| MUS78 | NOGO | Heavy chain | H21L13 FL, H21L16 | US20140147435 | 5724 |
| | | | FL, H21L18 FL | SEQ ID NO: 94 | |
| MUS79 | NOGO | Heavy chain | H25L13 FL, H25L16 | US20140147435 | 5725 |
| | | | FL, H25L18 FL | SEQ ID NO: 98 | |
| MUS80 | NOGO | Heavy chain | H6L13 FL | US20140147435 | 5726 |
| | | | | SEQ ID NO: 27 | |
| MUS81 | NOGO | Heavy chain | H16L16 FL, H16L18 | US20140147435 | 5727 |
| | | | FL | SEQ ID NO: 31 | |
| MUS82 | NOGO | Heavy chain | H18L16 FL | US20140147435 | 5728 |
| | | | | SEQ ID NO: 33 | |
| MUS83 | Nogo receptor- | Heavy chain | 5B10 | US20090215691 | 5729 |
| | 1 | | | SEQ ID NO: 16 | |
| MUS84 | Nogo receptor- | Heavy chain | 5B10 | US20090215691 | 5730 |
| | 1 | | | SEQ ID NO: 18 | |
| MUS85 | RTN4 | Heavy chain | | SEQ ID NO: 38 | 5731 |
| | | | | U.S. Pat. No. | |
| | | | | 7,780,964 | |
| MUS86 | S1P4 | Heavy chain | | WO2015057939 | 5732 |
| | | | | SEQ ID NO: 39 | |
| MUS87 | trk-C (NT-3 | Heavy chain | 2250 | U.S. Pat. No. | 5733 |
| | trkC ligand) | | | 7,615,383 | |
| | | | | SEQ ID NO: 42 | |
| MUS88 | trk-C (NT-3 | Heavy chain | 2253 | U.S. Pat. No. | 5734 |
| | trkC ligand) | | | 7,615,383 | |
| | | | | SEQ ID NO: 43 | |
| MUS89 | trk-C (NT-3 | Heavy chain | 2256 | U.S. Pat. No. | 5735 |
| | trkC ligand) | | | 7,615,383 | |
| | | | | SEQ ID NO: 44 | |
| MUS90 | trk-C (NT-3 | Heavy chain | 6.1.2 | U.S. Pat. No. | 5736 |
| | trkC ligand) | | | 7,615,383 | |
| | | | | SEQ ID NO: 45 | |
| MUS91 | trk-C (NT-3 | Heavy chain | 6.4.1 | U.S. Pat. No. | 5737 |
| | trk(C ligand) | | | 7,615,383 | |
| | | | | SEQ ID NO: 46 | |
| MUS92 | trk-C (NT-3 | Heavy chain | 2345 | U.S. Pat. No. | 5738 |
| | trkC ligand) | | | 7,615,383 | |
| | | | | SEQ ID NO: 47 | |
| MUS93 | trk-C (NT-3 | Heavy chain | 2349 | U.S. Pat. No. | 5739 |
| | trkC ligand) | | | 7,615,383 | |
| | | | | ISEQ D NO: 48 | |
| MUS94 | myostatin | Heavy chain | NI-205.87E7 | US20130209489 | 5740 |
| | antagonists | consensus | | SEQ ID NO: 20 | |
| MUS95 | GDF-8 | Heavy chain | | U.S. Pat. No. | 5741 |
| | | constant region | | 8,956,608 | |
| | | | | SEQ ID NO: 19 | |
| MUS96 | many - growth | Heavy chain fusion | H19L13, H19L16, | U.S. Pat. No. | 5742 |
| | factors (to | protein | H19L18, H19L14, | 8,053,569 | |
| | increase | | H19L15, H19L17, | SEQ ID NO: 25 | |
| | transport across | | H19L6, H19L11 | | |
| | BBB) | | | | |
| MUS97 | many - growth | Heavy chain fusion | H20L13, H20L16, | U.S. Pat. No. | 5743 |
| | factors (to | protein | H20L18, H20L14, | 8,053,569 | |
| | increase | | H20L15, H20L17, | SEQ ID NO: 28 | |
| | transport across | | H20L6, H20L11 | | |
| | BBB) | | | | |
| MUS98 | many - growth | Heavy chain fusion | H22L13, H22L16, | U.S. Pat. No. | 5744 |
| | factors (to | protein | H22L18, H22L14, | 8,053,569 | |
| | increase | | H22L15, H22L17, | SEQ ID NO: 34 | |
| | transport across | | H22L6, H22L11 | | |
| | BBB) | | | | |
| MUS99 | many - growth | Heavy chain fusion | H5L11, H6L11, | U.S. Pat. No. | 5745 |
| | factors (to | protein | H14L11, H15L11, | 8,053,569 | |
| | increase | | H16L11, H17L11, | SEQ ID NO: 24 | |
| | transport across | | H18L11, H19L11, | | |
| | BBB) | | H20L11, H21L11, | | |
| | | | H22L11, H23L11, | | |
| | | | H24L11, H25L11, | | |
| | | | H700L11 | | |
| MUS100 | NOGO | Heavy chain | 2A10 construct | WO2007003421 | 5746 |
| | | humanized | | SEQ ID NO: 79 | |
| | | construct H1 | | | |
| MUS101 | NOGO | Heavy chain | 2A10 construct | WO2007003421 | 5747 |
| | | humanized | | SEQ ID NO: 29 | |
| | | construct H14 | | | |
| MUS102 | NOGO | Heavy chain | 2A10 construct | WO2007003421 | 5748 |
| | | humanized | | SEQ ID NO: 30 | |
| | | construct H15 | | | |
| MUS103 | NOGO | Heavy chain | 2A10 construct | WO2007003421 | 5749 |
| | | humanized | | SEQ ID NO: 31 | |
| | | construct H16 | | | |
| MUS104 | NOGO | Heavy chain | 2A10 construct | WO2007003421 | 5750 |
| | | humanized | | SEQ ID NO: 32 | |
| | | construct H17 | | | |
| MUS105 | NOGO | Heavy chain | 2A10 construct | WO2007003421 | 5751 |
| | | humanized | | SEQ ID NO: 33 | |
| | | construct H18 | | | |
| MUS106 | NOGO | Heavy chain | 2A10 construct | WO2007003421 | 5752 |
| | | humanized | | SEQ ID NO: 92 | |
| | | construct H19 | | | |
| MUS107 | NOGO | Heavy chain | 2A10 construct | WO2007003421 | 5753 |
| | | humanized | | SEQ ID NO: 93 | |
| | | construct H20 | | | |
| MUS108 | NOGO | Heavy chain | 2A10 construct | WO2007003421 | 5754 |
| | | humanized | | SEQ ID NO: 94 | |
| | | construct H21 | | | |
| MUS109 | NOGO | Heavy chain | 2A10 construct | WO2007003421 | 5755 |
| | | humanized | | SEQ ID NO: 95 | |
| | | construct H22 | | | |
| MUS110 | NOGO | Heavy chain | 2A10 construct | WO2007003421 | 5756 |
| | | humanized | | SEQ ID NO: 96 | |
| | | construct H23 | | | |
| MUS111 | NOGO | Heavy chain | 2A10 construct | WO2007003421 | 5757 |
| | | humanized | | SEQ ID NO: 97 | |
| | | construct H24 | | | |
| MUS112 | NOGO | Heavy chain | 2A10 construct | WO2007003421 | 5758 |
| | | humanized | | SEQ ID NO: 98 | |
| | | construct H25 | | | |
| MUS113 | NOGO | Heavy chain | 2A10 construct | WO2007003421 | 5759 |
| | | humanized | | SEQ ID NO: 26 | |
| | | construct H5 | | | |
| MUS114 | NOGO | Heavy chain | 2A10 construct | WO2007003421 | 5760 |
| | | humanized | | SEQ ID NO: 27 | |
| | | construct H6 | | | |
| MUS115 | NOGO | Heavy chain | 2A10 construct | WO2007003421 | 5761 |
| | | humanized | | SEQ ID NO: 28 | |
| | | construct H700 | | | |
| MUS116 | RTN4 (NOGO) | Heavy chain IgG4, | Atinumab | U.S. Pat. No. | 5762 |
| | | immunomodulator | | 8,163,285 | |
| | | | | SEQ ID NO: 24 | |
| MUS117 | amyloid | Heavy chain | F11G3 | U.S. Pat. No. | 5763 |
| | oligomers | variable region | | 9,125,846 | |
| | | | | SEQ ID NO: 11 | |
| MUS118 | differentiation | Heavy chain | H8L4. H8L5, H8L6 | US20140023638 | 5764 |
| | factor 8 | variable region | | SEQ ID NO: 17 | |
| | (GDF8) | | | | |
| MUS119 | DR6 and P75 | Heavy chain | M62-B02 | WO2010062904 | 5765 |
| | | variable region | | SEQ ID NO: 47 | |
| MUS120 | DR6 and P75 | Heavy chain | M63-E10 | WO2010062904 | 5766 |
| | | variable region | | SEQ ID NO: 57 | |
| MUS121 | DR6 and P75 | Heavy chain | M66-B03 | WO2010062904 | 5767 |
| | | variable region | | SEQ ID NO: 67 | |
| MUS122 | DR6 and P75 | Heavy chain | M50-H01 | WO2010062904 | 5768 |
| | | variable region | | SEQ ID NO: 7 | |
| MUS123 | DR6 and P75 | Heavy chain | M67-G02 | WO2010062904 | 5769 |
| | | variable region | | SEQ ID NO: 77 | |
| MUS124 | DR6 and P75 | Heavy chain | M72-F03 | WO2010062904 | 5770 |
| | | variable region | | SEQ ID NO: 87 | |
| MUS125 | DR6 and P75 | Heavy chain | M73-C04 | WO2010062904 | 5771 |
| | | variable region | | SEQ ID NO: 97 | |
| MUS126 | DR6 and P75 | Heavy chain | 1P1D6.3 | WO2010062904 | 5772 |
| | | variable region | | SEQ ID NO: 107 | |
| MUS127 | DR6 and P75 | Heavy chain | 1P2F2.1 | WO2010062904 | 5773 |
| | | variable region | | SEQ ID NO: 117 | |
| MUS128 | DR6 and P75 | Heavy chain | IP5D10.2 | WO2010062904 | 5774 |
| | | variable region | | SEQ ID NO: 127 | |
| MUS129 | DR6 and P75 | Heavy chain | M51-H09 | WO2010062904 | 5775 |
| | | variable region | | SEQ ID NO: 17 | |
| MUS130 | DR6 and P75 | Heavy chain | M53-E04 | WO2010062904 | 5776 |
| | | variable region | | SEQ ID NO: 27 | |
| MUS131 | DR6 and P75 | Heavy chain | M53-F04 | WO2010062904 | 5777 |
| | | variable region | | SEQ ID NO: 37 | |
| MUS132 | GDF-8 | Heavy chain | 595-16 | U.S. Pat. No. | 5778 |
| | | variable region | | 8,956,608 | |
| | | | | SEQ ID NO: 26 | |
| MUS133 | GDF-8 | Heavy chain | 12A5-10HC | U.S. Pat. No. | 5779 |
| | | variable region | | 8,956,608 | |
| | | | | SEQ ID NO: 7 | |
| MUS134 | growth | Heavy chain | | U.S. Pat. No. | 5780 |
| | differentiation | variable region | | 8,840,894 | |
| | factor 8 | | | SEQ ID NO: 360 | |
| MUS135 | LPG | Heavy chain | #7 | U.S. Pat. No. | 5781 |
| | (lysophos- | variable region | | 8,591,902 | |
| | phatidyl- | | | SEQ ID NO: 18 | |
| | glucoside) | | | | |
| MUS136 | LPG | Heavy chain | #15 | U.S. Pat. No. | 5782 |
| | (lysophos- | variable region | | 8,591,902 | |
| | phatidyl- | | | SEQ ID NO: 8 | |
| | glucoside) | | | | |
| MUS137 | MAG | Heavy chain | | U.S. Pat. No. | 5783 |
| | | variable region | | 8,071,731 | |
| | | | | SEQ ID NO: 13 | |
| MUS138 | MAG | Heavy chain | | U.S. Pat. No. | 5784 |
| | | variable region | | 8,071,731 | |
| | | | | SEQ ID NO: 14 | |
| MUS139 | MAG | Heavy chain | | U.S. Pat. No. | 5785 |
| | | variable region | | 8,071,731 | |
| | | | | SEQ ID NO: 15 | |
| MUS140 | MAI (myelin | Heavy chain | | WO2013158748 | 5786 |
| | associated | variable region | | SEQ ID NO: 1 | |
| | inhibitor) | | | | |
| MUS141 | MAI (myelin | Heavy chain | | WO2013158748 | 5787 |
| | associated | variable region | | SEQ ID NO: 17 | |
| | inhibitor) | | | | |
| MUS142 | myostatin | Heavy chain | NI-204.7B3 | SEQ ID 6 WO | 5788 |
| | | variable region | | 2006107611 | |
| MUS143 | myostatin | Heavy chain | NI-204.10A8 | US20110256132 | 5789 |
| | | variable region | | SEQ ID NO: 14 | |
| MUS144 | myostatin | Heavy chain | NI-204.10D12 | US20110256132 | 5790 |
| | | variable region | | SEQ ID NO: 19 | |
| MUS145 | myostatin | Heavy chain | NI-204.10D12 | US20110256132 | 5791 |
| | | variable region | | SEQ ID NO: 20 | |
| MUS146 | myostatin | Heavy chain | NI-104.12G7 | US20110256132 | 5792 |
| | | variable region | | SEQ ID NO: 22 | |
| MUS147 | Inyostatin | Heavy chain | NI-204.10A8 | US20110256132 | 5793 |
| | | variable region | | SEQ ID NO: 23 | |
| MUS148 | myostatin | Heavy chain | NI-104.12G7 | US20110256132 | 5794 |
| | | variable region | | SEQ ID NO: 25 | |
| MUS149 | myostatin | Heavy chain | 312-56 | US20110256132 | 5795 |
| | | variable region | | SEQ ID NO: 8 | |
| MUS150 | NOGO | Heavy chain | H20L13, H20L16, | US20140147435 | 5796 |
| | | variable region | H20L18, H20L14, | SEQ ID NO: 86 | |
| | | | H20L15, H20L17, | | |
| | | | H20L6, H20L11 | | |
| MUS151 | NOGO | Heavy chain | H21L13, H21L16, | US20140147435 | 5797 |
| | | variable region | H21L18, H21L14, | SEQ ID NO: 87 | |
| | | | H21L15, H21L17, | | |
| | | | H21L6, H21L11 | | |
| MUS152 | NOGO | Heavy chain | H22L13, H22L16, | US20140147435 | 5798 |
| | | variable region | H22L18, H22L14, | SEQ ID NO: 88 | |
| | | | H22L15, H22L17, | | |
| | | | H22L6, H22L11 | | |
| MUS153 | NOGO | Heavy chain | H23L13, H23L16, | US20140147435 | 5799 |
| | | variable region | H23L18, H23L14, | SEQ ID NO: 89 | |
| | | | H23L15, H23L17, | | |
| | | | H23L6, H23L11 | | |
| MUS154 | NOGO | Heavy chain | H24L13, H24L16, | US20140147435 | 5800 |
| | | variable region | H24L18, H24L14, | SEQ ID NO: 90 | |
| | | | H24L15, H24L17, | | |
| | | | H24L6, H24L11 | | |
| MUS155 | NOGO | Heavy chain | H25L13, H25L16, | US20140147435 | 5801 |
| | | variable region | H25L18, H25L14, | SEQ ID NO: 91 | |
| | | | H25L15, H25L17, | | |
| | | | H25L6, H25L11 | | |
| MUS156 | NOGO | Heavy chain | H5L13, H5L16, | US20140147435 | 5802 |
| | | variable region | H5L18, H5L14, | SEQ ID NO: 11 | |
| | | | H5L15, H5L 17, H5L6, | | |
| | | | H5L11 | | |
| MUS157 | NOGO | Heavy chain | H6L13, H6L16, | US20140147435 | 5803 |
| | | variable region | H6L18, H6L14, | SEQ ID NO: 12 | |
| | | | H6L15, H6L17, H6L6 | | |
| MUS158 | NOGO | Heavy chain | H700L13, H700L16, | US20140147435 | 5804 |
| | | variable region | H700L18, H700L14, | SEQ ID NO: 13 | |
| | | | H700L15, H700L17, | | |
| | | | H700L6, H700L11 | | |
| MUS159 | NOGO | Heavy chain | H14L13, H14L16, | US20140147435 | 5805 |
| | | variable region | H14L18, H14L14, | SEQ ID NO: 14 | |
| | | | H14L15, H14L17, | | |
| | | | H14L6, H14L11 | | |
| MUS160 | NOGO | Heavy chain | H15L13, H15L16, | US20140147435 | 5806 |
| | | variable region | H15L18, H15L14, | SEQ ID NO: 15 | |
| | | | H15L15, H15L17, | | |
| | | | H15L6, H15L11 | | |
| MUS161 | NOGO | Heavy chain | H16L13, H16L16, | US20140147435 | 5807 |
| | | variable region | H16L18, H16L14, | SEQ ID NO: 16 | |
| | | | H16L15, H16L17, | | |
| | | | H16L6, H16L11 | | |
| MUS162 | NOGO | Heavy chain | H17L13, H17L16, | US20140147435 | 5808 |
| | | variable region | H17L18, H17L14, | SEQ ID NO: 17 | |
| | | | H17L15, H17L17, | | |
| | | | H17L6, H17L11 | | |
| MUS163 | NOGO | Heavy chain | H18L13, H18L16, | US20140147435 | 5809 |
| | | variable region | H18L18, H18L14, | SEQ ID NO: 18 | |
| | | | H18L15, H18L17, | | |
| | | | H18L6, H18L11 | | |
| MUS164 | NOGO | Heavy chain | H1L13, H1L16, | US20140147435 | 5810 |
| | | variable region | H1L18, H1L14, | SEQ ID NO: 77 | |
| | | | H1L15, H1L17, H1L6 | | |
| MUS165 | NOGO | Heavy chain | H19L13, H19L16, | US20140147435 | 5811 |
| | | variable region | H19L18, H19L14, | SEQ ID NO: 85 | |
| | | | H19L15, H19L17, | | |
| | | | H19L6, H19L11 | | |
| MUS166 | Nogo-66 | Heavy chain | Antibody clone 50 | US20140065155 | 5812 |
| | | variable region | | SEQ ID NO: 3 | |
| MUS167 | Nogo-66 | Heavy chain | Antibody clone 51 | US20140065155 | 5813 |
| | | variable region | | SEQ ID NO: 5 | |
| MUS168 | NogoA/NiG | Heavy chain | 6A3-Ig4 | WO2009056509 | 5814 |
| | | variable region | | SEQ ID NO: 24 | |
| MUS169 | NogoA/NiG | Heavy chain | 6A3-IgG1 | WO2009056509 | 5815 |
| | | variable region | | SEQ ID NO: 4 | |
| MUS170 | RGM A | Heavy chain | 5F9.1-GL | US20150183871 | 5816 |
| | | variable region | | SEQ ID NO: 35 | |
| MUS171 | RGM A | Heavy chain | 5F9.2-GL | US20150183871 | 5817 |
| | | variable region | | SEQ ID NO: 36 | |
| MUS172 | RGM A | Heavy chain | 5F9.3-GL | US20150183871 | 5818 |
| | | variable region | | SEQ ID NO: 37 | |
| MUS173 | RGM A | Heavy chain | 5F9.4-GL | US20150183871 | 5819 |
| | | variable region | | SEQ ID NO: 38 | |
| MUS174 | RGM A | Heavy chain | 5F9.5-GL | US20150183871 | 5820 |
| | | variable region | | SEQ ID NO: 39 | |
| MUS175 | RGM A | Heavy chain | 5F9.6-GL | US20150183871 | 5821 |
| | | variable region | | SEQ ID NO: 40 | |
| MUS176 | RGM A | Heavy chain | 5F9.7-GL | US20150183871 | 5822 |
| | | variable region | | SEQ ID NO: 41 | |
| MUS177 | RGM A | Heavy chain | 5F9.8-GL | US20150183871 | 5823 |
| | | variable region | | SEQ ID NO: 42 | |
| MUS178 | RGM A | Heavy chain | 5F9.9-GL | US20150183871 | 5824 |
| | | variable region | | SEQ ID NO: 43 | |
| MUS179 | RGM A | Heavy chain | h5F9.1, h5F9.1, | US20150183871 | 5825 |
| | | variable region | h5F9.1, h5F9.1, | SEQ ID NO: 47 | |
| | | | h5F9.1, h5F9.2, | | |
| | | | h5F9.3 | | |
| MUS180 | RGM A | Heavy chain | h5F9.3, h5F9.9, | US20150183871 | 5826 |
| | | variable region | h5F9.25 | SEQ ID NO: 53 | |
| MUS181 | RGM A | Heavy chain | h5F9.4, h5F9.10, | US20150183871 | 5827 |
| | | variable region | h5F9.26 | SEQ ID NO: 54 | |
| MUS182 | RGMa | Heavy chain | AE12-1 | US20140023659 | 5828 |
| | | variable region | | SEQ ID NO: 1 | |
| MUS183 | R.GMa | Heavy chain | AE12-20 | US20140023659 | 5829 |
| | | variable region | | SEQ ID NO: 107 | |
| MUS184 | RGMa | Heavy chain | AE12-21 | US20140023659 | 5830 |
| | | variable region | | SEQ ID NO: 115 | |
| MUS185 | RGMa | Heavy chain | AE12-23 | US20140023659 | 5831 |
| | | variable region | | SEQ ID NO: 123 | |
| MUS186 | RGMa | Heavy chain | AE12-24 | US20140023659 | 5832 |
| | | variable region | | SEQ ID NO: 131 | |
| MUS187 | R.GMa | Heavy chain | AE12-3 | US20140023659 | 5833 |
| | | variable region | | SEQ ID NO: 17 | |
| MUS188 | RGMa | Heavy chain | AE12-4 | US20140023659 | 5834 |
| | | variable region | | SEQ ID NO: 25 | |
| MUS189 | RGMa | Heavy chain | AE12-5 | US20140023659 | 5835 |
| | | variable region | | SEQ ID NO: 33 | |
| MUS190 | RGMa | Heavy chain | AE12-6 | US20140023659 | 5836 |
| | | variable region | | SEQ ID NO: 41 | |
| MUS191 | RGMa | Heavy chain | AE12-7 | US20140023659 | 5837 |
| | | variable region | | SEQ ID NO: 49 | |
| MUS192 | RGMa | Heavy chain | AE12-8 | US20140023659 | 5838 |
| | | variable region | | SEQ ID NO: 57 | |
| MUS193 | RGMa | Heavy chain | AE12-2 | US20140023659 | 5839 |
| | | variable region | | SEQ ID NO: 9 | |
| MUS194 | RGMa | Heavy chain | AE12-13 | US20140023659 | 5840 |
| | | variable region | | SEQ ID NO: 91 | |
| MUS195 | RGMa | Heavy chain | AE12-15 | US20140023659 | 5841 |
| | | variable region | | SEQ ID NO: 99 | |
| MUS196 | SIP4 | Heavy chain | | WO2015057939 | 5842 |
| | | variable region | | SEQ ID NO: 7 | |
| MUS197 | SOD1 | Heavy chain | NI205.19G5 | US20140301945 | 5843 |
| | | variable region | | SEQ ID NO: 12 | |
| MUS198 | SOD1 | Heavy chain | | US20140301945 | 5844 |
| | | variable region | | SEQ ID NO: 16 | |
| MUS199 | SOD1 | Heavy chain | | US20140301945 | 5845 |
| | | variable region | | SEQ ID NO: 20 | |
| MUS200 | SOD1 | Heavy chain | | US20140301945 | 5846 |
| | | variable region | | SEQ ID NO: 24 | |
| MUS201 | SOD1 | Heavy chain | Landogrozumab, | US20140301945 | 5847 |
| | | variable region | LY2495655, LY- | SEQ ID NO: 28 | |
| | | | 2495655 | | |
| MUS202 | SOD1 | Heavy chain | 2A10 construct | US20140301945 | 5848 |
| | | variable region | | SEQ ID NO: 32 | |
| MUS203 | SOD1 | Heavy chain | 2A10 construct | US20140301945 | 5849 |
| | | variable region | | SEQ ID NO: 36 | |
| MUS204 | SOD1 | Heavy chain | NI205.1A9 | US20140301945 | 5850 |
| | | variable region | | SEQ ID NO: 4 | |
| MUS205 | SOD1 | Heavy chain | 2A10 construct | US20140301945 | 5851 |
| | | variable region | | SEQ ID NO: 40 | |
| MUS206 | SOD1 | Heavy chain | 2A10 construct | US20140301945 | 5852 |
| | | variable region | | SEQ ID NO: 44 | |
| MUS207 | SOD1 | Heavy chain | 2A10 construct | US20140301945 | 5853 |
| | | variable region | | SEQ ID NO: 48 | |
| MUS208 | SOD1 | Heavy chain | NI205.14W3 | US20140301945 | 5854 |
| | | variable region | | SEQ ID NO: 8 | |
| MUS209 | SOD1 | Heavy chain | NI-205.87E7 | U.S. Pat. No. | 5855 |
| | | variable region | | 9,109,037 | |
| | | | | SEQ ID NO: 1 | |
| MUS210 | SOD1 | Heavy chain | NI205.9E12 | U.S. Pat. No. | 5856 |
| | | variable region | | 9,109,037 | |
| | | | | SEQ ID NO: 107 | |
| MUS211 | SOD1 | Heavy chain | NI205.9E12 | U.S. Pat. No. | 5857 |
| | | variable region | | 9,109,037 | |
| | | | | SEQ ID NO: 113 | |
| MUS212 | SOD1 | Heavy chain | NI205.98H6 | U.S. Pat. No. | 5858 |
| | | variable region | | 9,109,037 | |
| | | | | SEQ ID NO: 129 | |
| MUS213 | SOD1 | Heavy chain | NI205.98H6 | U.S. Pat. No. | 5859 |
| | | variable region | | 9,109,037 | |
| | | | | SEQ ID NO: 131 | |
| MUS214 | SOD1 | Heavy chain | NI205.10D3 | U.S. Pat. No. | 5860 |
| | | variable region | | 9,109,037 | |
| | | | | SEQ ID NO: 147 | |
| MUS215 | SOD1 | Heavy chain | NI205.10D3 | U.S. Pat. No. | 5861 |
| | | variable region | | 9,109,037 | |
| | | | | SEQ ID NO: 149 | |
| MUS216 | SOD1 | Heavy chain | NI205.44B22 | U.S. Pat. No. | 5862 |
| | | variable region | | 9,109,037 | |
| | | | | SEQ ID NO: 165 | |
| MUS217 | SOD1 | Heavy chain | NI205.44B22 | U.S. Pat. No. | 5863 |
| | | variable region | | 9,109,037 | |
| | | | | SEQ ID NO: 167 | |
| MUS218 | SOD1 | Heavy chain | NI-205.21G1 | U.S. Pat. No. | 5864 |
| | | variable region | | 9,109,037 | |
| | | | | SEQ ID NO: 17 | |
| MUS219 | SOD1 | Heavy chain | NI205.38H2 | U.S. Pat. No. | 5865 |
| | | variable region | | 9,109,037 | |
| | | | | SEQ ID NO: 183 | |
| MUS220 | SOD1 | Heavy chain | NI-205.21G1 | U.S. Pat. No. | 5866 |
| | | variable region | | 9,109,037 | |
| | | | | SEQ ID NO: 19 | |
| MUS221 | SOD1 | Heavy chain | NI205.38H2 | U.S. Pat. No. | 5867 |
| | | variable region | | 9,109,037 | |
| | | | | SEQ ID NO: 201 | |
| MUS222 | SOD1 | Heavy chain | NI205.36D5 | U.S. Pat. No. | 5868 |
| | | variable region | | 9,109,037 | |
| | | | | SEQ ID NO: 217 | |
| MUS223 | SOD1 | Heavy chain | NI-205.68G5 | U.S. Pat. No. | 5869 |
| | | variable region | | 9,109,037 | |
| | | | | SEQ ID NO: 35 | |
| MUS224 | SOD1 | Heavy chain | NI-205.68G5 | U.S. Pat. No. | 5870 |
| | | variable region | | 9,109,037 | |
| | | | | SEQ ID NO: 37 | |
| MUS225 | SOD1 | Heavy chain | NI-205.20A1 | U.S. Pat. No. | 5871 |
| | | variable region | | 9,109,037 | |
| | | | | SEQ ID NO: 53 | |
| MUS226 | SOD1 | Heavy chain | NI-205.20A1 | U.S. Pat. No. | 5872 |
| | | variable region | | 9,109,037 | |
| | | | | SEQ ID NO: 55 | |
| MUS227 | SOD1 | Heavy chain | NI205.41D1 | U.S. Pat. No. | 5873 |
| | | variable region | | 9,109,037 | |
| | | | | SEQ ID NO: 71 | |
| MUS228 | SOD1 | Heavy chain | NI205.41D1 | U.S. Pat. No. | 5874 |
| | | variable region | | 9,109,037 | |
| | | | | SEQ ID NO: 73 | |
| MUS229 | SOD1 | Heavy chain | NI205.29E11 | U.S. Pat. No. | 5875 |
| | | variable region | | 9,109,037 | |
| | | | | SEQ ID NO: 89 | |
| MUS230 | SOD1 | Heavy chain | NI205.29E11 | U.S. Pat. No. | 5876 |
| | | variable region | | 9,109,037 | |
| | | | | SEQ ID NO: 91 | |
| MUS231 | TDP-43 | Heavy chain | 2A10 construct | US20140255304 | 5877 |
| | | variable region | | SEQ ID NO: 1 | |
| MUS232 | TDP-43 | Heavy chain | 2A10 construct | US20140255304 | 5878 |
| | | variable region | | SEQ ID NO: 10 | |
| MUS233 | TDP-43 | Heavy chain | 2A10 construct | US20140255304 | 5879 |
| | | variable region | | SEQ ID NO: 130 | |
| MUS234 | TDP-43 | Heavy chain | 2A10 construct | US20140255304 | 5880 |
| | | variable region | | SEQ ID NO: 138 | |
| MUS235 | TDP-43 | Heavy chain | 2A10 construct | US20140255304 | 5881 |
| | | variable region | | SEQ ID NO: 146 | |
| MUS236 | TDP-43 | Heavy chain | 2A10 construct | US20140255304 | 5882 |
| | | variable region | | SEQ ID NO: 151 | |
| MUS237 | TDP-43 | Heavy chain | 2A10 construct | US20140255304 | 5883 |
| | | variable region | | SEQ ID NO: 159 | |
| MUS238 | TDP-43 | Heavy chain | 2A10 construct | US20140255304 | 5884 |
| | | variable region | | SEQ ID NO: 167 | |
| MUS239 | TDP-43 | Heavy chain | 2A10 construct | US20140255304 | 5885 |
| | | variable region | | SEQ ID NO: 175 | |
| MUS240 | TDP-43 | Heavy chain | 2A10 construct | US20140255304 | 5886 |
| | | variable region | | SEQ ID NO: 18 | |
| MUS241 | TDP-43 | Heavy chain | H6L13 FL, H19L13 | US20140255304 | 5887 |
| | | variable region | FL, H20L13 FL, | SEQ ID NO: 183 | |
| | | | H21L13 FL, H25L13 | | |
| | | | FL | | |
| MUS242 | TDP-43 | Heavy chain | H16L18 FL, H19L18 | US20140255304 | 5888 |
| | | variable region | FL, H20L 18 FL, | SEQ ID NO: 191 | |
| | | | H21L18 FL, H25L18 | | |
| | | | FL | | |
| MUS243 | TDP-43 | Heavy chain | H18L16 FL | US20140255304 | 5889 |
| | | variable region | | SEQ ID NO: 199 | |
| MUS244 | TDP-43 | Heavy chain | H6L13, H6L16, | US20140255304 | 5890 |
| | | variable region | H6L18, H6L14, | SEQ ID NO: 207 | |
| | | | H6L15, H6L17, H6L6 | | |
| MUS245 | TDP-43 | Heavy chain | H14L13, H14L16, | US20140255304 | 5891 |
| | | variable region | H14L18, H14L14, | SEQ ID NO: 215 | |
| | | | H14L15, H14L17, | | |
| | | | H1416, H14L11 | | |
| MUS246 | TDP-43 | Heavy chain | H16L13, H16L16, | US20140255304 | 5892 |
| | | variable region | H16L18, H16L14, | SEQ ID NO: 223 | |
| | | | H16L15, H16L17, | | |
| | | | H16L6, H16L11 | | |
| MUS247 | TDP-43 | Heavy chain | H18L13, H18L16, | US20140255304 | 5893 |
| | | variable region | H18L.18, H18L14, | SEQ ID NO: 231 | |
| | | | H18L15, H18L17, | | |
| | | | H18L6, H18L11 | | |
| MUS248 | TDP-43 | Heavy chain | H1L13, H5L13, | US20140255304 | 5894 |
| | | variable region | H6L13. H14L13, | SEQ ID NO: 239 | |
| | | | H15L13, H16L13, | | |
| | | | H17L13, H18L13, | | |
| | | | H19L13, H20L13, | | |
| | | | H21L13, H22L13, | | |
| | | | H23L.13, H24L13, | | |
| | | | H25L13, H700L13 | | |
| MUS249 | TDP-43 | Heavy chain | H1L15, H5L15, | US20140255304 | 5895 |
| | | variable region | H6L15, H14L15, | SEQ ID NO: 247 | |
| | | | H15L15, H16L15, | | |
| | | | H17L15, H18L15, | | |
| | | | H19L15, H20L15, | | |
| | | | H21L15, H22L15, | | |
| | | | H23L15, H24L15, | | |
| | | | H25L15, H700L15 | | |
| MUS250 | TDP-43 | Heavy chain | H1L17, H5L17, | US20140255304 | 5896 |
| | | variable region | H6L17, H14L17, | SEQ ID NO: 255 | |
| | | | H15L17, H16L17, | | |
| | | | H17L17, H18L17, | | |
| | | | H19L17, H20L17, | | |
| | | | H21L17, H22L17, | | |
| | | | H23L17, H24L17, | | |
| | | | H25L17, H700L17 | | |
| MUS251 | TDP-43 | Heavy chain | 2A10 construct | US20140255304 | 5897 |
| | | variable region | | SEQ ID NO: 26 | |
| MUS252 | TDP-43 | Heavy chain | H16L16 FL, H16L18 | US20140255304 | 5898 |
| | | variable region | FL | SEQ ID NO: 263 | |
| MUS253 | TDP-43 | Heavy chain | 2A10 construct | US20140255304 | 5899 |
| | | variable region | | SEQ ID NO: 35 | |
| MUS254 | TDP-43 | Heavy chain | 2A10 construct | US20140255304 | 5900 |
| | | variable region | | SEQ ID NO: 45 | |
| MUS255 | TDP-43 | Heavy chain | 2A10 construct | US20140255304 | 5901 |
| | | variable region | | SEQ ID NO: 53 | |
| MUS256 | TDP-43 | Heavy chain | 2A10 construct | US20140255304 | 5902 |
| | | variable region | | SEQ ID NO: 61 | |
| MUS257 | TDP-43 | Heavy chain | 2A10 construct | US20140255304 | 5903 |
| | | variable region | | SEQ ID NO: 69 | |
| MUS258 | TDP-43 | Heavy chain | 2A10 construct | US20140255304 | 5904 |
| | | variable region | | SEQ ID NO: 77 | |
| MUS259 | TDP-43 | Heavy chain | 2A10 construct | US20140255304 | 5905 |
| | | variable region | | SEQ ID NO: 87 | |
| MUS260 | trkC | Heavy chain | | US20070031418 | 5906 |
| | | variable region | | SEQ ID NO: 1 | |
| MUS261 | NOGO | Heavy chain | 2A10 construct | WO2007003421 | 5907 |
| | | variable region | | SEQ ID NO: 77 | |
| | | humanized | | | |
| | | construct H1 | | | |
| MUS262 | NOGO | Heavy chain | 2A10 construct | WO2007003421 | 5908 |
| | | variable region | | SEQ ID NO: 14 | |
| | | humanized | | | |
| | | construct H14 | | | |
| MUS263 | NOGO | Heavy chain | 2A10 construct | WO2007003421 | 5909 |
| | | variable region | | SEQ ID NO: 15 | |
| | | humanized | | | |
| | | construct H15 | | | |
| MUS264 | NOGO | Heavy chain | 2A10 construct | WO2007003421 | 5910 |
| | | variable region | | SEQ ID NO: 16 | |
| | | humanized | | | |
| | | construct H16 | | | |
| MUS265 | NOGO | Heavy chain | 2A10 construct | WO2007003421 | 5911 |
| | | variable region | | SEQ ID NO: 17 | |
| | | humanized | | | |
| | | construct H17 | | | |
| MUS266 | NOGO | Heavy chain | 2A10 construct | WO2007003421 | 5912 |
| | | variable region | | SEQ ID NO: 18 | |
| | | humanized | | | |
| | | construct H18 | | | |
| MUS267 | NOGO | Heavy chain | 2A10 construct | WO2007003421 | 5913 |
| | | variable region | | SEQ ID NO: 85 | |
| | | humanized | | | |
| | | construct H19 | | | |
| MUS268 | NOGO | Heavy chain | 2A10 construct | WO2007003421 | 5914 |
| | | variable region | | SEQ ID NO: 86 | |
| | | humanized | | | |
| | | construct H20 | | | |
| MUS269 | NOGO | Heavy chain | 2A10 construct | WO2007003421 | 5915 |
| | | variable region | | SEQ ID NO: 87 | |
| | | humanized | | | |
| | | construct H21 | | | |
| MUS270 | NOGO | Heavy chain | 2A10 construct | WO2007003421 | 5916 |
| | | variable region | | SEQ ID NO: 88 | |
| | | humanized | | | |
| | | construct H22 | | | |
| MUS271 | NOGO | Heavy chain | 2A10 construct | WO2007003421 | 5917 |
| | | variable region | | SEQ ID NO: 89 | |
| | | humanized | | | |
| | | construct H23 | | | |
| MUS272 | NOGO | Heavy chain | 2A10 construct | WO2007003421 | 5918 |
| | | variable region | | SEQ ID NO: 90 | |
| | | humanized | | | |
| | | construct H24 | | | |
| MUS273 | NOGO | Heavy chain | 2A10 construct | WO2007003421 | 5919 |
| | | variable region | | SEQ ID NO: 91 | |
| | | humanized | | | |
| | | construct I-25 | | | |
| MUS274 | NOGO | Heavy chain | 2A10 construct | WO2007003421 | 5920 |
| | | variable region | | SEQ ID NO: 11 | |
| | | humanized | | | |
| | | construct H5 | | | |
| MUS275 | NOGO | Heavy chain | 2A10 construct | WO2007003421 | 5921 |
| | | variable region | | SEQ ID NO: 12 | |
| | | humanized | | | |
| | | construct H6 | | | |
| MUS276 | NOGO | Heavy chain | 2A10 construct | WO2007003421 | 5922 |
| | | variable region | | SEQ ID NO: 13 | |
| | | humanized | | | |
| | | construct H700 | | | |
| MUS277 | ACVR2B | Light chain | H7L4, H7L5, H7L6 | U.S. Pat. No. | 5923 |
| | (SMA - muscle | | | 8,388,968 | |
| | growth) | | | SEQ ID NO: 141 | |
| MUS278 | ACVR2B | Light chain | | U.S. Pat. No. | 5924 |
| | | | | 8,388,968 | |
| | | | | SEQ ID NO: 141 | |
| MUS279 | amyloids | Light chain | #118 | WO2010012004 | 5925 |
| | | | | SEQ ID NO: 10 | |
| MUS280 | amyloids | Light chain | #121 | WO2010012004 | 5926 |
| | | | | SEQ ID NO: 12 | |
| MUS281 | amyloids | Light chain | #201 | WO2010012004 | 5927 |
| | | | | SEQ ID NO: 14 | |
| MUS282 | amyloids | Light chain | #204 | WO2010012004 | 5928 |
| | | | | SEQ ID NO: 15 | |
| MUS283 | amyloids | Light chain | #205 | WO2010012004 | 5929 |
| | | | | SEQ ID NO: 17 | |
| MUS284 | EAG1 | Light chain | chimeric ImAb3 | WO2006037604 | 5930 |
| | | | | SEQ ID NO: 10 | |
| MUS285 | EAG1 | Light chain | chimeric ImAb4 | WO2006037604 | 5931 |
| | | | | SEQ ID NO: 14 | |
| MUS286 | EAG1 | Light chain | LC-ImAb3-humB3 | WO2006037604 | 5932 |
| | | | | SEQ ID NO: 18 | |
| MUS287 | EAG1 | Light chain | ImAb4 | WO2006037604 | 5933 |
| | | | | SEQ ID NO: 2 | |
| MUS288 | EAG1 | Light chain | LC-lmAb4-humA17 | WO2006037604 | 5934 |
| | | | | SEQ ID NO: 22 | |
| MUS289 | EAG1 | Light chain | LC-lmAb3-humA3 | WO2006037604 | 5935 |
| | | | | SEQ ID NO: 26 | |
| MUS290 | EAG1 | Light chain | LC-lmAb3-humA17 | WO2006037604 | 5936 |
| | | | | SEQ ID NO: 30 | |
| MUS291 | EAG1 | Light chain | LC-lmAb4-humA5-1 | WO2006037604 | 5937 |
| | | | | SEQ ID NO: 34 | |
| MUS292 | EAG1 | Light chain | LC-lmAb4-humO1 | WO2006037604 | 5938 |
| | | | | SEQ ID NO: 38 | |
| MUS293 | EAG1 | Light chain | ImAb3 | WO2006037604 | 5939 |
| | | | | SEQ ID NO: 6 | |
| MUS294 | GDF-8 | Light chain | 597-120-M1 | US20130287762 | 5940 |
| | | | | SEQ ID NO: 12 | |
| MUS295 | GDF-8 | Light chain | 597-120 | US20130287762 | 5941 |
| | | | | SEQ ID NO: 18 | |
| MUS296 | GDF-8 | Light chain | 311-3 | US20130287762 | 5942 |
| | | | | SEQ ID NO: 6 | |
| MUS297 | growth | Light chain | | | 5943 |
| | differentiation | | | | |
| | factor 8 | | | | |
| MUS298 | growth | Light chain | Domagrozumab | | 5944 |
| | differentiation | | | | |
| | factor 8 | | | | |
| MUS299 | MAG | Light chain | | | 5945 |
| MUS300 | MSTN | Light chain | H25L13, H25L16, | | 5946 |
| | | | H25L18, H25L14, | | |
| | | | H25L15, H25L17, | | |
| | | | H25L6, H25L11 | | |
| MUS301 | Myostatin | Light chain | 306-155 | US20130142788 | 5947 |
| | | | | SEQ ID NO: 145 | |
| MUS302 | Myostatin | Light chain | 14-173 | US20130142788 | 5948 |
| | | | | SEQ ID NO: 146 | |
| MUS303 | Myostatin | Light chain | 14-173-M1 | US20130142788 | 5949 |
| | | | | SEQ ID NO: 147 | |
| MUS304 | myostatin | Light chain | NI-204.67E12 | US20110256132 | 5950 |
| | | | | SEQ ID NO: 27 | |
| MUS305 | myostatin | Light chain | NI-204.12G3 | US20110256132 | 5951 |
| | | | | SEQ ID NO: 31 | |
| MUS306 | myostatin | Light chain | NI-204.12G3 | US20110256132 | 5952 |
| | | | | SEQ ID NO: 32 | |
| MUS307 | myostatin | Light chain | NI-204.7G5 | US20110256132 | 5953 |
| | | | | SEQ ID NO: 33 | |
| MUS308 | myostatin | Light chain | NI-204.7G5 | US20110256132 | 5954 |
| | | | | SEQ ID NO: 34 | |
| MUS309 | Myostatin | Light chain | 114-41-M1 | US20130142788 | 5955 |
| | | | | SEQ ID NO: 27 | |
| MUS310 | Myostatin | Light chain | 14-173, 14-173-M1 | US20130142788 | 5956 |
| | | | | SEQ ID NO: 33 | |
| MUS311 | Myostatin | Light chain | 306-155 | US20130142788 | 5957 |
| | | | | SEQ ID NO: 37 | |
| MUS312 | Myostatin | Light chain | 303-8 | US20130142788 | 5958 |
| | | | | SEQ ID NO: 40 | |
| MUS313 | myostatin | Light chain | N1-204.34A3 | US20130209489 | 5959 |
| | antagonists | | | SEQ ID NO: 1 | |
| MUS314 | myostatin | Light chain | NI-205.21G2 | US20130209489 | 5960 |
| | antagonists | | | SEQ ID NO: 10 | |
| MUS315 | myostatin | Light chain | NI-204.25H3 | US20130209489 | 5961 |
| | antagonists | | | SEQ ID NO: 2 | |
| MUS316 | myostatin | Light chain | NI-204.25H3 | US20130209489 | 5962 |
| | antagonists | | | SEQ ID NO: 3 | |
| MUS317 | myostatin | Light chain | B12 | US20130209489 | 5963 |
| | antagonists | | | SEQ ID NO: 4 | |
| MUS318 | myostatin | Light chain | B1 | US20130209489 | 5964 |
| | antagonists | | | SEQ ID NO: 5 | |
| MUS319 | myostatin | Light chain | NI-205.3F10 | US20130209489 | 5965 |
| | antagonists | | | SEQ ID NO: 6 | |
| MUS320 | myostatin | Light chain | NI-205.3F10 | US20130209489 | 5966 |
| | antagonists | | | SEQ ID NO: 7 | |
| MUS321 | myostatin | Light chain | NI-205.51C1 | US20130209489 | 5967 |
| | antagonists | | | SEQ ID NO: 8 | |
| MUS322 | myostatin | Light chain | NI-205.51C1 | US20130209489 | 5968 |
| | antagonists | | | SEQ ID NO: 9 | |
| MUS323 | NOGO | Light chain | H6L13 FL, H19L13 | US20140147435 | 5969 |
| | | | FL, H20L 13 FL, | SEQ ID NO: 35 | |
| | | | H21L13 FL, H25L13 | | |
| | | | FL | | |
| MUS324 | NOGO | Light chain | H16L16 FL, H19L16 | US20140147435 | 5970 |
| | | | FL, H20L16 FL, | SEQ ID NO: 38 | |
| | | | H21L16 FL, H25L16 | | |
| | | | FL, H18L16 FL | | |
| MUS325 | NOGO | Light chain | H16L18 FL, H19L18 | US20140147435 | 5971 |
| | | | FL, H20L18 FL, | SEQ ID NO: 40 | |
| | | | H21L18 FL, H25L18 | | |
| | | | FL | | |
| MUS326 | Nogo receptor- | Light chain | 7E11 | US20090215691 | 5972 |
| | 1 | | | SEQ ID NO: 15 | |
| MUS327 | Nogo receptor- | Light chain | 7E11 | US20090215691 | 5973 |
| | 1 | | | SEQ ID NO: 17 | |
| MUS328 | RTN4 | Light chain | | | 5974 |
| MUS329 | SIP4 | Light chain | | WO2015057939 | 5975 |
| | | | | SEQ ID NO: 41 | |
| MUS330 | trk-C (NT-3 | Light chain | 2250 | U.S. Pat. No. | 5976 |
| | trkC ligand) | | | 7,615,383 | |
| | | | | SEQ ID NO: 49 | |
| MUS331 | trk-C (NT-3 | Light chain | 2253 | U.S. Pat. No. | 5977 |
| | trkC ligand) | | | 7,615,383 | |
| | | | | SEQ ID NO: 50 | |
| MUS332 | trk-C (NT-3 | Light chain | 2256 | U.S. Pat. No. | 5978 |
| | trkC ligand) | | | 7,615,383 | |
| | | | | SEQ ID NO: 51 | |
| MUS333 | trkc-C (NT-3 | Light chain | 6.1.2 | U.S. Pat. No. | 5979 |
| | trkC ligand) | | | 7,615,383 | |
| | | | | SEQ ID NO: 52 | |
| MUS334 | trk-C (NT-3 | Light chain | 6.4.1 | U.S. Pat. No. | 5980 |
| | trkC ligand) | | | 7,615,383 | |
| | | | | SEQ ID NO: 53 | |
| MUS335 | trk-C (NT-3 | Light chain | 2345 | U.S. Pat. No. | 5981 |
| | turkC ligand) | | | 7,615,383 | |
| | | | | SEQ ID NO: 54 | |
| MUS336 | trk-C (NT-3 | Light chain | 2349 | U.S. Pat. No. | 5982 |
| | trkC ligand) | | | 7,615,383 | |
| | | | | SEQ ID NO: 55 | |
| MUS337 | GDF-8 | Light chain | 12A5-18HC | U.S. Pat. No. | 5983 |
| | | constant region | | 8,956,608 | |
| | | | | SEQ ID NO: 17 | |
| MUS338 | many - growth | Light chain fusion | H21L.13, H21L16, | U.S. Pat. No. | 5984 |
| | factors (to | protein | H21L18, H21L14, | 8,053,569 | |
| | increase | | H21L15, H21L17, | SEQ ID NO: 31 | |
| | transport across | | H21L6, H21L11 | | |
| | BBB) | | | | |
| MUS339 | many - growth | Light chain fusion | H23L13, H23L16, | U.S. Pat. No. | 5985 |
| | factors (to | protein | H23L.18, H23L14, | 8,053,569 | |
| | increase | | H23L15, H23L17, | SEQ ID NO: 36 | |
| | transport across | | H23L6, H23L11 | | |
| | BBB) | | | | |
| MUS340 | NOGO | Light chain | 2A10 construct | WO2007003421 | 5986 |
| | | humanized | | SEQ ID NO: 80 | |
| | | construct L11 | | | |
| MUS341 | NOGO | Light chain | 2A10 construct | WO2007003421 | 5987 |
| | | humanized | | SEQ ID NO: 35 | |
| | | construct L 13 | | | |
| MUS342 | NOGO | Light chain | 2A10 construct | WO2007003421 | 5988 |
| | | humanized | | SEQ ID NO: 36 | |
| | | construct L14 | | | |
| MUS343 | NOGO | Light chain | 2A10 construct | WO2007003421 | 5989 |
| | | humanized | | SEQ ID NO: 37 | |
| | | construct L15 | | | |
| MUS344 | NOGO | Light chain | 2.A10 construct | WO2007003421 | 5990 |
| | | humanized | | SEQ ID NO: 38 | |
| | | construct L 16 | | | |
| MUS345 | NOGO | Light chain | 2A10 construct | WO2007003421 | 5991 |
| | | humanized | | SEQ ID NO: 39 | |
| | | construct L17 | | | |
| MUS346 | NOGO | Light chain | 2A10 construct | WO2007003421 | 5992 |
| | | humanized | | SEQ ID NO: 40 | |
| | | construct L18 | | | |
| MUS347 | NOGO | Light chain | 2A10 construct | WO2007003421 | 5993 |
| | | humanized | | SEQ ID NO: 34 | |
| | | construct L6 | | | |
| MUS348 | RTN4 | Light chain IgG4, | Atinumab | U.S. Pat. No. | 5994 |
| | | immunomodulator | | 8,163,285 | |
| | | | | SEQ ID NO: 25 | |
| MUS349 | amyloid | Light chain | F11G3 | U.S. Pat. No. | 5995 |
| | oligomers | variable region | | 9,125,846 | |
| | | | | SEQ ID NO: 12 | |
| MUS350 | differentiation | Light chain | H9L4, H9L5, H8L6 | US20140023638 | 5996 |
| | factor 8 | variable region | | SEQ ID NO: 18 | |
| | (GDF8) | | | | |
| MUS351 | DR6 and P75 | Light chain | M73-C04 | WO2010062904 | 5997 |
| | | variable region | | SEQ ID NO: 102 | |
| MUS352 | DR6 and P75 | Light chain | 1PID6.3 | WO2010062904 | 5998 |
| | | variable region | | SEQ ID NO: 112 | |
| MUS353 | DR6 and P75 | Light chain | M50-H02 | WO2010062904 | 5999 |
| | | variable region | | SEQ ID NO: 12 | |
| MUS354 | DR6 and P75 | Light chain | 1P2F2.1 | WO2010062904 | 6000 |
| | | variable region | | SEQ ID NO: 122 | |
| MUS355 | DR6 and P75 | Light chain | 1P5D10.2 | WO2010062904 | 6001 |
| | | variable region | | SEQ ID NO: 132 | |
| MUS356 | DR6 and P75 | Light chain | M51-H09 | WO2010062904 | 6002 |
| | | variable region | | SEQ ID NO: 22 | |
| MUS357 | DR6 and P75 | Light chain | M53-E04 | WO2010062904 | 6003 |
| | | variable region | | SEQ ID NO: 32 | |
| MUS358 | DR6 and P75 | Light chain | M53-F04 | WO2010062904 | 6004 |
| | | variable region | | SEQ ID NO: 42 | |
| MUS359 | DR6 and P75 | Light chain | M62-B02 | WO2010062904 | 6005 |
| | | variable region | | SEQ ID NO: 52 | |
| MUS360 | DR6 and P75 | Light chain | M63-E10 | WO2010062904 | 6006 |
| | | variable region | | SEQ ID NO: 62 | |
| MUS361 | DR6 and P75 | Light chain | M66-B03 | WO2010062904 | 6007 |
| | | variable region | | SEQ ID NO: 72 | |
| MUS362 | DR6 and P75 | Light chain | M67-G02 | WO2010062904 | 6008 |
| | | variable region | | SEQ ID NO: 82 | |
| MUS363 | DR6 and P75 | Light chain | M72-F03 | WO2010062904 | 6009 |
| | | variable region | | SEQ ID NO: 92 | |
| MUS364 | GDF-8 | Light chain | 595-16- M1 | U.S. Pat. No. | 6010 |
| | | variable region | | 8,956,608 | |
| | | | | SEQ ID NO: 27 | |
| MUS365 | GDF-8 | Light chain | A12A5-12HC | U.S. Pat. No. | 6011 |
| | | variable region | | 8,956,608 | |
| | | | | SEQ ID NO: 9 | |
| MUS366 | growth | Light chain | | U.S. Pat. No. | 6012 |
| | differentiation | variable region | | 8,840,894 | |
| | factor 8 | | | SEQ ID NO: 368 | |
| MUS367 | LPG | Light chain | #7 | U.S. Pat. No. | 6013 |
| | (lysophosphatid | variable region | | 8,591,902 | |
| | ylglucoside) | | | SEQ ID NO: 17 | |
| MUS368 | LPG | Light chain | #15 | U.S. Pat. No. | 6014 |
| | (lysophosphatid | variable region | | 8,591,902 | |
| | ylglucoside) | | | SEQ ID NO: 7 | |
| MUS369 | MAG | Light chain | | U.S. Pat. No. | 6015 |
| | | variable region | | 8,071,731 | |
| | | | | SEQ ID NO: 16 | |
| MUS370 | MAG | Light chain | | U.S. Pat. No. | 6016 |
| | | variable region | | 8,071,731 | |
| | | | | SEQ ID NO: 17 | |
| MUS371 | MAG | Light chain | | U.S. Pat. No. | 6017 |
| | | variable region | | 8,071,731 | |
| | | | | SEQ ID NO: 18 | |
| MUS372 | MAG | Light chain | | U.S. Pat. No. | 6018 |
| | | variable region | | 8,071,731 | |
| | | | | SEQ ID NO: 19 | |
| MUS373 | MAI (myelin | Light chain | | WO2013158748 | 6019 |
| | associated | variable region | | SEQ ID NO: 11 | |
| | inhibitor) | | | | |
| MUS374 | MAI (myelin | Light chain | | WO2013158748 | 6020 |
| | associated | variable region | | SEQ ID NO: 27 | |
| | inhibitor) | | | | |
| MUS375 | myostatin | Light chain | NI-204.34A3 | SEQ ID 8 WO | 6021 |
| | | variable region | | 2006107611 | |
| MUS376 | myostatin | Light chain | NI-204.9F6 | US20110256132 | 6022 |
| | | variable region | | SEQ ID NO: 17 | |
| MUS377 | myostatin | Light chain | NI-204.9F6 | US20110256132 | 6023 |
| | | variable region | | SEQ ID NO: 21 | |
| MUS378 | myostatin | Light chain | NI-204.11F11 | US20110256132 | 6024 |
| | | variable region | | SEQ ID NO: 24 | |
| MUS379 | myostatin | Light chain | 303-8 | US20110256132 | 6025 |
| | | variable region | | SEQ ID NO: 7 | |
| MUS380 | NOGO | Light chain | H1L6, H5L6, H6L6, | US20140147435 | 6026 |
| | | variable region | H14L6, H15L6, | SEQ ID NO: 19 | |
| | | | H16L6, H17L6, | | |
| | | | H18L6, H19L6, | | |
| | | | H20L6, H21L6, | | |
| | | | H22L6, H23L6, | | |
| | | | H24L6, H25L6, | | |
| | | | H700L6 | | |
| MUS381 | NOGO | Light chain | H1L13, H5L13, | US20140147435 | 6027 |
| | | variable region | H6L13, H14L13, | SEQ ID NO: 20 | |
| | | | H15L13, H16L13, | | |
| | | | H17L.13, H18L.13, | | |
| | | | H19L13, H20L.13, | | |
| | | | H21L13, H22L.13, | | |
| | | | H23L13, H24L13, | | |
| | | | H25L13, H700L13 | | |
| MUS382 | NOGO | Light chain | H1L 14, H5L14, | US20140147435 | 6028 |
| | | variable region | H6L 14, H14L14, | SEQ ID NO: 21 | |
| | | | H15L.14, H16L14, | | |
| | | | H17L.14, H18L14, | | |
| | | | H19L14, H20L14, | | |
| | | | H21L14, H22L14, | | |
| | | | H23L.14, H24L14, | | |
| | | | H25L14, H700L14 | | |
| MUS383 | NOGO | Light chain | H1L15, H5L15, | US20140147435 | 6029 |
| | | variable region | H6L15. H14L15, | SEQ ID NO: 22 | |
| | | | H15L15, H16L15, | | |
| | | | H17L15, H18L15, | | |
| | | | H19L15, H20L15, | | |
| | | | H21L15, H22L15, | | |
| | | | H23L15, H24L15, | | |
| | | | H25L15, H700L15 | | |
| MUS384 | NOGO | Light chain | H1L16, H5L16, | US20140147435 | 6030 |
| | | variable region | H6L16, H14L16 | SEQ ID NO: 23 | |
| | | | H15L16, H16L16, | | |
| | | | H17L16, H18L16, | | |
| | | | H19L16, H20L16, | | |
| | | | H21L16, H22L16, | | |
| | | | H23L16, H24L16, | | |
| | | | H25L16, H700L16 | | |
| MUS385 | NOGO | Light chain | H1L. 17, HSL17, | US20140147435 | 6031 |
| | | variable region | H6L.17, H14L.17, | SEQ ID NO: 24 | |
| | | | H15L17, H16L17, | | |
| | | | H17L17, H18L17, | | |
| | | | H19L17, H20L17, | | |
| | | | H21L17, H22L17, | | |
| | | | H23L17, H24L17, | | |
| | | | H25L17, H700L.17 | | |
| MUS386 | NOGO | Light chain | H1L18, H5L18, | US20140147435 | 6032 |
| | | variable region | H6L 18, H14L18, | SEQ ID NO: 25 | |
| | | | H15L18, H16L18, | | |
| | | | H17L18, H18L18, | | |
| | | | H19L18, H20L18, | | |
| | | | H21L18, H22L18, | | |
| | | | H23L18, H24L18, | | |
| | | | H25L18. H700L18 | | |
| MUS387 | NOGO | Light chain | H5L11, H6L11, | US20140147435 | 6033 |
| | | variable region | H14L11, H15L11, | SEQ ID NO: 78 | |
| | | | H16L11, H17L11, | | |
| | | | H18L11, H19L11, | | |
| | | | H20L11, H21L11, | | |
| | | | H22L11, H23L11, | | |
| | | | H24L11, H25L11, | | |
| | | | H700L11 | | |
| MUS388 | Nogo-66 | Light chain | Antibody clone 50 | US20140065155 | 6034 |
| | | variable region | | SEQ ID NO: 4 | |
| MUS389 | Nogo-66 | Light chain | Antibody clone 51 | US20140065155 | 6035 |
| | | variable region | | SEQ ID NO: 6 | |
| MUS390 | NogoA/NIG | Light chain | 6A3-Ig4 | WO2009056509 | 6036 |
| | | variable region | | SEQ ID NO: 25 | |
| MUS391 | NogoA/NIG | Light chain | 6A3-IgGI | WO2009056509 | 6037 |
| | | variable region | | SEQ ID NO: 5 | |
| MUS392 | RGM A | Light chain | 5F9.1-GL, 5F9.1-GL, | US20150183871 | 6038 |
| | | variable region | 5F9.1-GL, SF9.1-GL, | SEQ ID NO: 44 | |
| | | | 5F9.1-GL, 5F9.1-GL, | | |
| | | | 5F9.1-GL, 5F9.1-GL, | | |
| | | | 5F9.1-GL, 5F9.1-GL, | | |
| | | | h5F9.4, h5F9.11, | | |
| | | | h5F9.12 | | |
| MUS393 | RGM A | Light chain | 5F9.2-GL, 5F9.2-GL, | US20150183871 | 6039 |
| | | variable region | 5F9.2-GL, 5F9.2-GL, | SEQ ID NO: 45 | |
| | | | 5F9.2-GL, 5F9.2-GL, | | |
| | | | 5F9.2-GL, 5F9.2-GL, | | |
| | | | 5F9.2-GL, 5F9.2-GL, | | |
| | | | h5F9.5, h5F9.19, | | |
| | | | h5F9.20 | | |
| MUS394 | RGM A | Light chain | 5F9.3-GL, 5F9.3-GL, | US20150183871 | 6040 |
| | | variable region | 5F9.3-GL, 5F9.3-GL, | SEQ ID NO: 46 | |
| | | | 5F9.3-GL, 5F9.3-GL, | | |
| | | | 5F9.3-GL, 5F9.3-GL, | | |
| | | | 5F9.3-GL, 5F9.3-GL, | | |
| | | | h5F9.6, h5F9.21, | | |
| | | | h5F9.22 | | |
| MUS395 | RGM A | Light chain | h5F9.5, h5F9.6, | US20150183871 | 6041 |
| | | variable region | hSF9.7, h5F9.8, | SEQ ID NO: 48 | |
| | | | h5F9.9. h5F9.10 | | |
| MUS396 | RGM A | Light chain | h5F9.11, | US20150183871 | 6042 |
| | | variable region | h5F9.19, h5F9.21 | SEQ ID NO: 49 | |
| MUS397 | RGM A | Light chain | h5F9.12, h5F9.20, | US20150183871 | 6043 |
| | | variable region | h5F9.22, h5F9.23, | SEQ ID NO: 50 | |
| | | | h5F9.25, h5F9.25, | | |
| | | | h5F9.26 | | |
| MUS398 | RGM A | Light chain | h5F9.1, h5F9.7, | US20150183871 | 6044 |
| | | variable region | h5F9.23 | SEQ ID NO: 51 | |
| MUS399 | RGM A | Light chain | hSF9.2, h5F9.8, | US20150183871 | 6045 |
| | | variable region | h5F9.25 | SEQ ID NO: 52 | |
| MUS400 | RGMa | Light chain | AE12-15 | US20140023659 | 6046 |
| | | variable region | | SEQ ID NO: 103 | |
| MUS401 | RGMa | Light chain | AE12-20 | US20140023659 | 6047 |
| | | variable region | | SEQ ID NO: 111 | |
| MUS402 | RGMa | Light chain | AE12-21 | US20140023659 | 6048 |
| | | variable region | | SEQ ID NO: 119 | |
| MUS403 | RGMa | Light chain | AE12-23 | US20140023659 | 6049 |
| | | variable region | | SEQ ID NO: 127 | |
| MUS404 | RGMa | Light chain | AE12-2 | US20140023659 | 6050 |
| | | variable region | | SEQ ID NO: 13 | |
| MUS405 | RGMa | Light chain | AE12-24 | US20140023659 | 6051 |
| | | variable region | | SEQ ID NO: 135 | |
| MUS406 | RGMa | Light chain | AE12-3 | US20140023659 | 6052 |
| | | variable region | | SEQ ID NO: 21 | |
| MUS407 | RGMa | Light chain | AE12-4 | US20140023659 | 6053 |
| | | variable region | | SEQ ID NO: 29 | |
| MUS408 | RGMa | Light chain | AE12-5 | US20140023659 | 6054 |
| | | variable region | | SEQ ID NO: 37 | |
| MUS409 | RGMa | Light chain | AE12-6 | US20140023659 | 6055 |
| | | variable region | | SEQ ID NO: 45 | |
| MUS410 | RGMa | Light chain | AE12-1 | US20140023659 | 6056 |
| | | variable region | | SEQ ID NO: 5 | |
| MUS411 | RGMa | Light chain | AE12-7 | US20140023659 | 6057 |
| | | variable region | | SEQ ID NO: 53 | |
| MUS412 | RGMa | Light chain | AE12-8 | US20140023659 | 6058 |
| | | variable region | | SEQ ID NO: 61 | |
| MUS413 | RGMa | Light chain | AE12-13 | US20140023659 | 6059 |
| | | variable region | | SEQ ID NO: 95 | |
| MUS414 | SIP4 | Light chain | | WO2015057939 | 6060 |
| | | variable region | | SEQ ID NO: 9 | |
| MUS415 | SOD1 | Light chain | NI205.14W3 | US20140301945 | 6061 |
| | | variable region | | SEQ ID NO: 10 | |
| MUS416 | SODI | Light chain | NI205.19G5 | US20140301945 | 6062 |
| | | variable region | | SEQ ID NO: 14 | |
| MUS417 | SOD1 | Light chain | | US20140301945 | 6063 |
| | | variable region | | SEQ ID NO: 18 | |
| MUS418 | SOD1 | Light chain | | US20140301945 | 6064 |
| | | variable region | | SEQ ID NO: 22 | |
| MUS419 | SOD1 | Light chain | | US20140301945 | 6065 |
| | | variable region | | SEQ ID NO: 26 | |
| MUS420 | SOD1 | Light chain | Landogrozumab, | US20140301945 | 6066 |
| | | variable region | LY2495655, LY- | SEQ ID NO: 30 | |
| | | | 2495656 | | |
| MUS421 | SOD1 | Light chain | 2A10 construct | US20140301945 | 6067 |
| | | variable region | | SEQ ID NO: 34 | |
| MUS422 | SOD1 | Light chain | 2A10 construct | US20140301945 | 6068 |
| | | variable region | | SEQ ID NO: 38 | |
| MUS423 | SOD1 | Light chain | 2A10 construct | US20140301945 | 6069 |
| | | variable region | | SEQ ID NO: 42 | |
| MUS424 | SOD1 | Light chain | 2A10 construct | US20140301945 | 6070 |
| | | variable region | | SEQ ID NO: 46 | |
| MUS425 | SODI | Light chain | 2A10 construct | US20140301945 | 6071 |
| | | variable region | | SEQ ID NO: 50 | |
| MUS426 | SOD1 | Light chain | NI205.1A9 | US20140301945 | 6072 |
| | | variable region | | SEQ ID NO: 6 | |
| MUS427 | SOD1 | Light chain | NI205.31D2 | US9109037 SEQ | 6073 |
| | | variable region | | ID NO: 109 | |
| MUS428 | SODI | Light chain | NI205.8F8 | US9109037 SEQ | 6074 |
| | | variable region | | ID NO: 121 | |
| MUS429 | SODI | Light chain | NI205.8F8 | US9109037 SEQ | 6075 |
| | | variable region | | ID NO: 139 | |
| MUS430 | SOD1 | Light chain | NI205.31C11 | US9109037 SEQ | 6076 |
| | | variable region | | ID NO: 157 | |
| MUS431 | SOD1 | Light chain | NI205.31C11 | US9109037 SEQ | 6077 |
| | | variable region | | ID NO: 175 | |
| MUS432 | SODI | Light chain | NI205.8C10 | US9109037 SEQ | 6078 |
| | | variable region | | ID NO: 191 | |
| MUS433 | SODI | Light chain | NI205,8C10 | US9109037 SEQ | 6079 |
| | | variable region | | ID NO: 199 | |
| MUS434 | SOD1 | Light chain | NI205.10H7 | US9109037 SEQ | 6080 |
| | | variable region | | ID NO: 209 | |
| MUS435 | SOD1 | Light chain | NI205.10H7 | US9109037 SEQ | 6081 |
| | | variable region | | ID NO: 225 | |
| MUS436 | SODI | Light chain | NI205.58E11 | US9109037 SEQ | 6082 |
| | | variable region | | ID NO: 27 | |
| MUS437 | SOD1 | Light chain | NI205.58E11 | US9109037 SEQ | 6083 |
| | | variable region | | ID NO: 45 | |
| MUS438 | SOD1 | Light chain | NI205.14H5 | US9109037 SEQ | 6084 |
| | | variable region | | ID NO: 63 | |
| MUS439 | SOD1 | Light chain | NI205.14H5 | US9109037 SEQ | 6085 |
| | | variable region | | ID NO: 81 | |
| MUS440 | SOD1 | Light chain | NI205.36D5 | US9109037 SEQ | 6086 |
| | | variable region | | ID NO: 9 | |
| MUS441 | SOD1 | Light chain | NI205.31D2 | US9109037 SEQ | 6087 |
| | | variable region | | ID NO: 99 | |
| MUS442 | TDP-43 | Light chain | 2A10 construct | US20140255304 | 6088 |
| | | variable region | | SEQ ID NO: 122 | |
| MUS443 | TDP-43 | Light chain | 2A10 construct | US20140255304 | 6089 |
| | | variable region | | SEQ ID NO: 134 | |
| MUS444 | TDP-43 | Light chain | 2A10 construct | US20140255304 | 6090 |
| | | variable region | | SEQ ID NO: 14 | |
| MUS445 | TDP-43 | Light chain | 2A10 construct | US20140255304 | 6091 |
| | | variable region | | SEQ ID NO: 142 | |
| MUS446 | TDP-43 | Light chain | 2A10 construct | US20140255304 | 6092 |
| | | variable region | | SEQ ID NO: 150 | |
| MUS447 | TDP-43 | Light chain | 2A10 construct | US20140255304 | 6093 |
| | | variable region | | SEQ ID NO: 155 | |
| MUS448 | TDP-43 | Light chain | 2A10 construct | US20140255304 | 6094 |
| | | variable region | | SEQ ID NO: 163 | |
| MUS449 | TDP-43 | Light chain | 2A10 construct | US20140255304 | 6095 |
| | | variable region | | SEQ ID NO: 171 | |
| MUS450 | TDP-43 | Light chain | 2A10 construct | US20140255304 | 6096 |
| | | variable region | | SEQ ID NO: 179 | |
| MUS451 | TDP-43 | Light chain | H16L16 FL, H19L16 | US20140255304 | 6097 |
| | | variable region | FL, H20L16 FL, | SEQ ID NO: 187 | |
| | | | H21L16 FL, H25L16 | | |
| | | | FL, H18L16 FL | | |
| MUS452 | TDP-43 | Light chain | H6L13 FL | US20140255304 | 6098 |
| | | variable region | | SEQ ID NO: 195 | |
| MUS453 | TDP-43 | Light chain | H5L13, H5L16, | US20140255304 | 6099 |
| | | variable region | H5L18, H5L14, | SEQ ID NO: 203 | |
| | | | H5L15, H5L17, H5L6, | | |
| | | | H5L11 | | |
| MUS454 | TDP-43 | Light chain | H700L13, H700L16, | US20140255304 | 6100 |
| | | variable region | H700L18, H700L14, | SEQ ID NO: 211 | |
| | | | H700L15, H700L17, | | |
| | | | H700L6, H700L11 | | |
| MUS455 | TDP-43 | Light chain | H15L13, H15L16, | US20140255304 | 6101 |
| | | variable region | H15L18, H15L14, | SEQ ID NO: 219 | |
| | | | H15L15, H15L17, | | |
| | | | H15L6, H15L11 | | |
| MUS456 | TDP-43 | Light chain | 2A10 construct | US20140255304 | 6102 |
| | | variable region | | SEQ ID NO: 22 | |
| MUS457 | TDP-43 | Light chain | H17L13, H17L16, | US20140255304 | 6103 |
| | | variable region | H17L18, H17L14, | SEQ ID NO: 227 | |
| | | | H17L15, H17L17, | | |
| | | | H17L6. H17L11 | | |
| MUS458 | TDP-43 | Light chain | H1L6, H5L6, H6L6, | US20140255304 | 6104 |
| | | variable region | H14L6, H15L6, | SEQ ID NO: 235 | |
| | | | H16L6, H17L6, | | |
| | | | H18L6, H19L6, | | |
| | | | H20L6, H21L6, | | |
| | | | H22L6, H23L6, | | |
| | | | H24L6, H25L6, | | |
| | | | H700L6 | | |
| MUS459 | TDP-43 | Light chain | H1L14, H5L14, | US20140255304 | 6105 |
| | | variable region | H6114, H14L14, | SEQ ID NO: 243 | |
| | | | H15L14, H16L14, | | |
| | | | H17L14, H18L14, | | |
| | | | H19L14, H20L14, | | |
| | | | H21L14, H22L14, | | |
| | | | H23L14, H24L14, | | |
| | | | H25L14, H700114 | | |
| MUS460 | TDP-43 | Light chain | H1L16, H5L16, | US20140255304 | 6106 |
| | | variable region | H6L16, H14L16, | SEQ ID NO: 251 | |
| | | | H15L16, H16L16, | | |
| | | | H17L16, H18L16, | | |
| | | | H19L16, H20L16, | | |
| | | | H21L16, H22L16, | | |
| | | | H23L16, H24L16, | | |
| | | | H25L16, H700L16 | | |
| MUS461 | TDP-43 | Light chain | H1L18, H5L18, | US20140255304 | 6107 |
| | | variable region | H6L18. H14L18, | SEQ ID NO: 259 | |
| | | | H15L18, H16L18, | | |
| | | | H17L18, H18L18, | | |
| | | | H19L18, H20L18, | | |
| | | | H21L18, H22L18, | | |
| | | | H23L18, H24L18, | | |
| | | | H25L18, H700L18 | | |
| MUS462 | TDP-43 | Light chain | H1L13, H1L16, | US20140255304 | 6108 |
| | | variable region | H1L18, H1L14, | SEQ ID NO: 267 | |
| | | | H1L15, H1L17, H1L6 | | |
| MUS463 | TDP-43 | Light chain | 2A10 construct | US20140255304 | 6109 |
| | | variable region | | SEQ ID NO: 31 | |
| MUS464 | TDP-43 | Light chain | 2A10 construct | US20140255304 | 6110 |
| | | variable region | | SEQ ID NO: 40 | |
| MUS465 | TDP-43 | Light chain | 2.A10 construct | US20140255304 | 6111 |
| | | variable region | | SEQ ID NO: 49 | |
| MUS466 | TDP-43 | Light chain | 2A10 construct | US20140255304 | 6112 |
| | | variable region | | SEQ ID NO: 57 | |
| MUS467 | TDP-43 | Light chain | 2A10 construct | US20140255304 | 6113 |
| | | variable region | | SEQ ID NO: 6 | |
| MUS468 | TDP-43 | Light chain | 2A10 construct | US20140255304 | 6114 |
| | | variable region | | SEQ ID NO: 65 | |
| MUS469 | TDP-43 | Light chain | 2A10 construct | US20140255304 | 6115 |
| | | variable region | | SEQ ID NO: 73 | |
| MUS470 | TDP-43 | Light chain | 2A10 construct | US20140255304 | 6116 |
| | | variable region | | SEQ ID NO: 82 | |
| MUS471 | trkC | Light chain | | US20070031418 | 6117 |
| | | variable region | | SEQ ID NO: 2 | |
| MUS472 | NOGO | Light chain | 2A10 construct | WO2007003421 | 6118 |
| | | variable region | | SEQ ID NO: 78 | |
| | | humanized | | | |
| | | construct L11 | | | |
| MUS473 | NOGO | Light chain | 2A10 construct | WO2007003421 | 6119 |
| | | variable region | | SEQ ID NO: 20 | |
| | | humanized | | | |
| | | construct L.13 | | | |
| MUS474 | NOGO | Light chain | 2A10 construct | WO2007003421 | 6120 |
| | | variable region | | SEQ ID NO: 21 | |
| | | humanized | | | |
| | | construct L14 | | | |
| MUS475 | NOGO | Light chain | 2A10 construct | WO2007003421 | 6121 |
| | | variable region | | SEQ ID NO: 22 | |
| | | humanized | | | |
| | | construct L15 | | | |
| MUS476 | NOGO | Light chain | 2A10 construct | WO2007003421 | 6122 |
| | | variable region | | SEQ ID NO: 23 | |
| | | humanized | | | |
| | | construct L16 | | | |
| MUS477 | NOGO | Light chain | 2A10 construct | WO2007003421 | 6123 |
| | | variable region | | SEQ ID NO: 24 | |
| | | humanized | | | |
| | | construct L17 | | | |
| MUS478 | NOGO | Light chain | 2A10 construct | WO2007003421 | 6124 |
| | | variable region | | SEQ ID NO: 25 | |
| | | humanized | | | |
| | | construct L18 | | | |
| MUS479 | NOGO | Light chain | 2A10 construct | WO2007003421 | 6125 |
| | | variable region | | SEQ ID NO: 19 | |
| | | humanized | | | |
| | | construct L6 | | | |
| MUS480 | GDF-8 | scFy | 591-37 | US20130287762 | 6126 |
| | | | | SEQ ID NO: 14 | |
| MUS481 | GDF-8 | scFv | 358-11 | US20130287762 | 6127 |
| | | | | SEQ ID NO: 2 | |
| MUS482 | GDF-8 | scFv | 591-37-MI | US20130287762 | 6128 |
| | | | | SEQ ID NO: 8 | |
| MUS483 | myostatin | scFv | NI-204.7B3 | SEQ ID 4 WO | 6129 |
| | | | | 2006107611 | |
| MUS484 | SOD1 | scFv | 2A10 construct | Ghadge, G.D. et | 6130 |
| | | | | al., Single chain | |
| | | | | variable fragment | |
| | | | | antibodies block | |
| | | | | aggregation and | |
| | | | | toxicity induced by | |
| | | | | familial ALS- | |
| | | | | linked mutant | |
| | | | | forms of SOD1, | |
| | | | | Neurobiol. Dis. | |
| | | | | (2013), NCBI | |
| | | | | Accession # | |
| | | | | AGK37119.1 | |
| MUS485 | SOD1 | scFv | 2A10 construct | Ghadge, G.D. et | 6131 |
| | | | | al., Single chain | |
| | | | | variable fragment | |
| | | | | antibodies block | |
| | | | | aggregation and | |
| | | | | toxicity induced by | |
| | | | | familial ALS- | |
| | | | | linked mutant | |
| | | | | forms of SOD1, | |
| | | | | Neurobiol. Dis. | |
| | | | | (2013), NCBI | |
| | | | | Accession # | |
| | | | | AGK37120.1 | |

### Neuropathy Antibodies

[0373] In some embodiments, the payload region of the viral particle comprises one or more nucleic acid sequences encoding one or more of the neuropathy payload antibody polypeptides listed in Table 7 (NEURO1-NEURO65; SEQ ID NO:6132-6196).

TABLE 7
Neuropathy Antibodies

| Antibody No. | Target | Description | Antibody Name | Reference Information | SEQ ID NO |
|---|---|---|---|---|---|
| NEURO1 | trk-C (NT-3 | Heavy chain | 2250 | U.S. Pat. No. 7,615,383 | 6132 |
| | trkC ligand) | | | SEQ ID NO: 42 | |
| NEURO2 | trk-C (NT-3 | Heavy chain | 2253 | U.S. Pat. No. 7,615,383 | 6133 |
| | trkC ligand) | | | SEQ ID NO: 43 | |
| NEURO3 | trk-C (NT-3 | Heavy chain | 2256 | U.S. Pat. No. 7,615,383 | 6134 |
| | trkC ligand) | | | SEQ ID NO: 44 | |
| NEURO4 | trk-C (NT-3 | Heavy chain | 6.1.2 | U.S. Pat. No. 7,615,383 | 6135 |
| | trkC ligand) | | | SEQ ID NO: 45 | |
| NEURO5 | trk-C (NT-3 | Heavy chain | 6.4.1 | U.S. Pat. No. 7,615,383 | 6136 |
| | trkC ligand) | | | SEQ ID NO: 46 | |
| NEURO6 | trk-C (NT-3 | Heavy chain | 2345 | U.S. Pat. No. 7,615,383 | 6137 |
| | trkC ligand) | | | SEQ ID NO: 47 | |
| NEURO7 | trk-C (NT-3 | Heavy chain | 2349 | U.S. Pat. No. 7,615,383 | 6138 |
| | trkC ligand) | | | SEQ ID NO: 48 | |
| NEURO8 | RTN4 (NOGO) | Heavy chain IgG4, | Atinumab | U.S. Pat. No. 8,163,285 | 6139 |
| | | immunomodulator | | SEQ ID NO: 24 | |
| NEURO9 | LPG | Heavy chain | #7 | U.S. Pat. No. 8,591,902 | 6140 |
| | (lysophosphatidyl- | variable region | | SEQ ID NO: 18 | |
| | glucoside) | | | | |
| NEURO10 | LPG | Heavy chain | #15 | U.S. Pat. No. 8,591,902 | 6141 |
| | (lysophosphatidyl- | variable region | | SEQ ID NO: 8 | |
| | glucoside) | | | | |
| NEURO11 | MAG | Heavy chain | | U.S. Pat. No. 8,071,731 | 6142 |
| | | variable region | | SEQ ID NO: 13 | |
| NEURO12 | MAG | Heavy chain | | U.S. Pat. No. 8,071,731 | 6143 |
| | | variable region | | SEQ ID NO: 14 | |
| NEURO13 | MAG | Heavy chain | | U.S. Pat. No. 8,071,731 | 6144 |
| | | variable region | | SEQ ID NO: 15 | |
| NEURO14 | MAI (myelin | Heavy chain | | WO2013158748 | 6145 |
| | associated | variable region | | SEQ ID NO: 1 | |
| | inhibitor) | | | | |
| NEURO15 | MAI (myelin | Heavy chain | | WO2013158748 | 6146 |
| | associated | variable region | | SEQ ID NO: 17 | |
| | inhibitor) | | | | |
| NEURO16 | RAGE protein | Heavy chain | Mab 7F9 | US20130149313 | 6147 |
| | | variable region | | SEQ ID NO: 1 | |
| NEURO17 | RAGE protein | Heavy chain | Mab 4E5 | US20130149313 | 6148 |
| | | variable region | | SEQ ID NO: 17 | |
| NEURO18 | RAGE protein | Heavy chain | Mab 11E6 | US20130149313 | 6149 |
| | | variable region | | SEQ ID NO: 9 | |
| NEURO19 | RGMa | Heavy chain | AE12-1 | US20140023659 | 6150 |
| | | variable region | | SEQ ID NO: 1 | |
| NEURO20 | RGMa | Heavy chain | AE12-20 | US20140023659 | 6151 |
| | | variable region | | SEQ ID NO: 107 | |
| NEURO21 | RGMa | Heavy chain | AE12-21 | US20140023659 | 6152 |
| | | variable region | | SEQ ID NO: 115 | |
| NEURO22 | RGMa | Heavy chain | AE12-23 | US20140023659 | 6153 |
| | | variable region | | SEQ ID NO: 123 | |
| NEURO23 | RGMa | Heavy chain | AE12-24 | US20140023659 | 6154 |
| | | variable region | | SEQ ID NO: 131 | |
| NEURO24 | RGMa | Heavy chain | AE12-3 | US20140023659 | 6155 |
| | | variable region | | SEQ ID NO: 17 | |
| NEURO25 | RGMa | Heavy chain | AE12-4 | US20140023659 | 6156 |
| | | variable region | | SEQ ID NO: 25 | |
| NEURO26 | RGMa | Heavy chain | AE12-5 | US20140023659 | 6157 |
| | | variable region | | SEQ ID NO: 33 | |
| NEURO27 | RGMa | Heavy chain | AE12-6 | US20140023659 | 6158 |
| | | variable region | | SEQ ID NO: 41 | |
| NEURO28 | RGMa | Heavy chain | AE12-7 | US20140023659 | 6159 |
| | | variable region | | SEQ ID NO: 49 | |
| NEURO29 | RGMa | Heavy chain | AE12-8 | US20140023659 | 6160 |
| | | variable region | | SEQ ID NO: 57 | |
| NEURO30 | RGMa | Heavy chain | AE12-2 | US20140023659 | 6161 |
| | | variable region | | SEQ ID NO: 9 | |
| NEURO31 | RGMa | Heavy chain | AE12-13 | US20140023659 | 6162 |
| | | variable region | | SEQ ID NO: 91 | |
| NEURO32 | RGMa | Heavy chain | AE12-15 | US20140023659 | 6163 |
| | | variable region | | SEQ ID NO: 99 | |
| NEURO33 | trk-C (NT-3 | Light chain | 2250 | U.S. Pat. No. 7,615,383 | 6164 |
| | trkC ligand) | | | SEQ ID NO: 49 | |
| NEURO34 | trk-C (NT-3 | Light chain | 2253 | U.S. Pat. No. 7,615,383 | 6165 |
| | trkC ligand) | | | SEQ ID NO: 50 | |
| NEURO35 | trk-C (NT-3 | Light chain | 2256 | U.S. Pat. No. 7,615,383 | 6166 |
| | trkC ligand) | | | SEQ ID NO: 51 | |
| NEURO36 | trk-C (NT-3 | Light chain | 6.1.2 | U.S. Pat. No. 7,615,383 | 6167 |
| | trkC ligand) | | | SEQ ID NO: 52 | |
| NEURO37 | trk-C (NT-3 | Light chain | 6.4.1 | U.S. Pat. No. 7,615,383 | 6168 |
| | trkC ligand) | | | SEQ ID NO: 53 | |
| NEURO38 | trk-C (NT-3 | Light chain | 2345 | U.S. Pat. No. 7,615,383 | 6169 |
| | trkC ligand) | | | SEQ ID NO: 54 | |
| NEURO39 | trk-C (NT-3 | Light chain | 2349 | U.S. Pat. No. 7,615,383 | 6170 |
| | trkC ligand) | | | SEQ ID NO: 55 | |
| NEURO40 | RTN4 | Light chain IgG4, | Atinumab | U.S. Pat. No. 8,163,285 | 6171 |
| | | immunomodulator | | SEQ ID NO: 25 | |
| NEURO41 | LPG | Light chain | #7 | U.S. Pat. No. 8,591,902 | 6172 |
| | (lysophosphatidyl- | variable region | | SEQ ID NO: 17 | |
| | glucoside) | | | | |
| NEURO42 | LPG | Light chain | #15 | U.S. Pat. No. 8,591,902 | 6173 |
| | (lysophosphatidyl- | variable region | | SEQ ID NO: 7 | |
| | glucoside) | | | | |
| NEURO43 | MAG | Light chain | | U.S. Pat. No. 8,071,731 | 6174 |
| | | variable region. | | SEQ ID NO: 16 | |
| NEURO44 | MAG | Light chain | | U.S. Pat. No. 8,071,731 | 6175 |
| | | variable region | | SEQ ID NO: 17 | |
| NEURO45 | MAG | Light chain | | U.S. Pat. No. 8,071,731 | 6176 |
| | | variable region | | SEQ ID NO: 18 | |
| NEURO46 | MAG | Light chain | | U.S. Pat. No. 8,071,731 | 6177 |
| | | variable region | | SEQ ID NO: 19 | |
| NEURO47 | MAI (myelin | Light chain | | WO2013158748 | 6178 |
| | associated | variable region | | SEQ ID NO: 11 | |
| | inhibitor) | | | | |
| NEURO48 | MAI (myelin | Light chain | | WO2013158748 | 6179 |
| | associated | variable region | | SEQ ID NO: 27 | |
| | inhibitor) | | | | |
| NEURO49 | RAGE protein | Light chain | Mab 11E6 | US20130149313 | 6180 |
| | | variable region | | SEQ ID NO: 13 | |
| NEURO50 | RAGE protein | Light chain | Mab 4E5 | US20130149313 | 6181 |
| | | variable region | | SEQ ID NO: 21 | |
| NEURO51 | RAGE protein | Light chain | Mab 7F9 | US20130149313 | 6182 |
| | | variable region | | SEQ ID NO: 5 | |
| NEURO52 | RGMa | Light chain | AE12-15 | US20140023659 | 6183 |
| | | variable region | | SEQ ID NO: 103 | |
| NEURO53 | RGMa | Light chain | AE12-20 | US20140023659 | 6184 |
| | | variable region | | SEQ ID NO: 111 | |
| NEURO54 | RGMa | Light chain | AE12-21 | US20140023659 | 6185 |
| | | variable region | | SEQ ID NO: 119 | |
| NEURO55 | RGMa | Light chain | AE12-23 | US20140023659 | 6186 |
| | | variable region | | SEQ ID NO: 127 | |
| NEURO56 | RGMa | Light chain | AE12-2 | US20140023659 | 6187 |
| | | variable region | | SEQ ID NO: 13 | |
| NEURO57 | RGMa | Light chain | AE12-24 | US20140023659 | 6188 |
| | | variable region | | SEQ ID NO: 135 | |
| NEURO58 | RGMa | Light chain | AE12-3 | US20140023659 | 6189 |
| | | variable region | | SEQ ID NO: 21 | |
| NEURO59 | RGMa | Light chain | AE12-4 | US20140023659 | 6190 |
| | | variable region | | SEQ ID NO: 29 | |
| NEURO60 | RGMa | Light chain | AE12-5 | US20140023659 | 6191 |
| | | variable region | | SEQ ID NO: 37 | |
| NEURO61 | RGMa | Light chain | AE12-6 | US20140023659 | 6192 |
| | | variable region | | SEQ ID NO: 45 | |
| NEURO62 | RGMa | Light chain | AE12-1 | US20140023659 | 6193 |
| | | variable region | | SEQ ID NO: 5 | |
| NEURO63 | RGMa | Light chain | AE12-7 | US20140023659 | 6194 |
| | | variable region | | SEQ ID NO: 53 | |
| NEURO64 | RGMa | Light chain | AE12-8 | US20140023659 | 6195 |
| | | variable region | | SEQ ID NO: 61 | |
| NEURO65 | RGMa | Light chain | AE12-13 | US20140023659 | 6196 |
| | | variable region | | SEQ ID NO: 95 | |

### Psychiatric Disorder Antibodies

[0374] In some embodiments, the payload region of the viral particle comprises one or more nucleic acid sequences encoding one or more of the psychiatric disorder payload antibody polypeptides listed in Table 8 (PSYCH1-PSYCH160; SECS ID NO: 6197-6356),

TABLE 8
Psychiatric Disorder Antibodies

| Antibody No. | Target | Description | Antibody Name | Reference Information | SEQ ID NO |
|---|---|---|---|---|---|
| PSYCH1 | ACTH | Heavy chain | Ab4 | WO2015127288 | 6197 |
| | | | | SEQ ID NO: 121 | |
| PSYCH2 | ACTH | Heavy chain | Ab1.H | WO2015127288 | 6198 |
| | | | | SEQ ID NO: 441 | |
| PSYCH3 | ACTH | Heavy chain | Ab2.H | WO2015127288 | 6199 |
| | | | | SEQ ID NO: 481 | |
| PSYCH4 | ACTH | Heavy chain | Ab3.H | WO2015127288 | 6200 |
| | | | | SEQ ID NO: 521 | |
| PSYCH5 | ACTH | Heavy chain | Ab4.H | WO2015127288 | 6201 |
| | | | | SEQ ID NO: 561 | |
| PSYCH6 | ACTH | Heavy chain | Ab6.H | WO2015127288 | 6202 |
| | | | | SEQ ID NO: 601 | |
| PSYCH7 | ACTH | Heavy chain | Ab7.H | WO2015127288 | 6203 |
| | | | | SEQ ID NO: 641 | |
| PSYCH8 | ACTH | Heavy chain | Ab7A.H | WO2015127288 | 6204 |
| | | | | SEQ ID NO: 681 | |
| PSYCH9 | ACTH | Heavy chain | Ab10.H | WO2015127288 | 6205 |
| | | | | SEQ ID NO: 721 | |
| PSYCH10 | ACTH | Heavy chain | Ab11.H | WO2015127288 | 6206 |
| | | | | SEQ ID NO: 761 | |
| PSYCH11 | ACTH | Heavy chain | Ab11A.H | WO2015127288 | 6207 |
| | | | | SEQ ID NO: 801 | |
| PSYCH12 | ACTH | Heavy chain | Ab5 | WO2015127288 | 6208 |
| | | | | SEQ ID NO: 161 | |
| PSYCH13 | ACTH | Heavy chain | Ab3 | WO2015127288 | 6209 |
| | | | | SEQ ID NO: 81 | |
| PSYCH14 | ACTH | Heavy chain | Ab12.H | WO2015127288 | 6210 |
| | | | | SEQ ID NO: 841 | |
| PSYCH15 | ACTH | Heavy chain | Ab6 | WO2015127288 | 6211 |
| | | | | SEQ ID NO: 201 | |
| PSYCH16 | ACTH | Heavy chain | Ab7 | WO2015127288 | 6212 |
| | | | | SEQ ID NO: 241 | |
| PSYCH17 | ACTH | Heavy chain | Ab9 | WO2015127288 | 6213 |
| | | | | SEQ ID NO: 281 | |
| PSYCH18 | ACTH | Heavy chain | Ab10 | WO2015127288 | 6214 |
| | | | | SEQ ID NO: 321 | |
| PSYCH19 | ACTH | Heavy chain | Ab11 | WO2015127288 | 6215 |
| | | | | SEQ ID NO: 361 | |
| PSYCH20 | ACTH | Heavy chain | Ab12 | WO2015127288 | 6216 |
| | | | | SEQ ID NO: 401 | |
| PSYCH21 | ACTH | Heavy chain | Ab2 | WO2015127288 | 6217 |
| | | | | SEQ ID NO: 41 | |
| PSYCH22 | ACTH | Heavy chain | Ab1 | WO2015127288 | 6218 |
| | | | | SEQ ID NO: 1 | |
| PSYCH23 | neuregulin | Heavy chain | | US20140363438 | 6219 |
| | (NRG) | | | SEQ ID NO: 72 | |
| PSYCH24 | neuregulin | Heavy chain | | US20140363438 | 6220 |
| | (NRG) | | | SEQ ID NO: 74 | |
| PSYCH25 | Anx-A1 | Heavy chain | VJ-4B6 | US20150004164 | 6221 |
| | | variable region | | SEQ ID NO: 16 | |
| PSYCH26 | Anx-A1 | Heavy chain | VJ-4B6 | US20150004164 | 6222 |
| | | variable region | | SEQ ID NO: 20 | |
| PSYCH27 | RGM A | Heavy chain | 5F9.1-GL | US20150183871 | 6223 |
| | | variable region | | SEQ ID NO: 35 | |
| PSYCH28 | RGM A | Heavy chain | 5F9.2-GL | US20150183871 | 6224 |
| | | variable region | | SEQ ID NO: 36 | |
| PSYCH29 | RGM A | Heavy chain | 5F9.3-GL | US20150183871 | 6225 |
| | | variable region | | SEQ ID NO: 37 | |
| PSYCH30 | RGM A | Heavy chain | 5F9.4-GL | US20150183871 | 6226 |
| | | variable region | | SEQ ID NO: 38 | |
| PSYCH31 | RGM A | Heavy chain | 5F9.5-GL | US20150183871 | 6227 |
| | | variable region | | SEQ ID NO: 39 | |
| PSYCH32 | RGM A | Heavy chain | 5F9.6-GL | US20150183871 | 6228 |
| | | variable region | | SEQ ID NO: 40 | |
| PSYCH33 | RGM A | Heavy chain | 5F9.7-GL | US20150183871 | 6229 |
| | | variable region | | SEQ ID NO: 41 | |
| PSYCH34 | RGM A | Heavy chain | 5F9.8-GL | US20150183871 | 6230 |
| | | variable region | | SEQ ID NO: 42 | |
| PSYCH35 | RGM A | Heavy chain | 5F9.9-G.L | US20150183871 | 6231 |
| | | variable region | | SEQ ID NO: 43 | |
| PSYCH36 | RGM A | Heavy chain | h5F9.1, h5F9.1, h5F9.1, | US20150183871 | 6232 |
| | | variable region | h5F9.1, h5F9.1, h5F9.2, | SEQ ID NO: 47 | |
| | | | h5F9.3 | | |
| PSYCH37 | RGM A | Heavy chain | h5F9.3, h5F9.9, | US20150183871 | 6233 |
| | | variable region | h5F9.25 | SEQ ID NO: 53 | |
| PSYCH38 | RGM A | Heavy chain | h5F9.4, h5F9.10, | US20150183871 | 6234 |
| | | variable region | h5F9.26 | SEQ ID NO: 54 | |
| PSYCH39 | RGMa | Heavy chain | AE12-1 | US20140023659 | 6235 |
| | | variable region | | SEQ ID NO: 1 | |
| PSYCH40 | RGMa | Heavy chain | AE12-20 | US20140023659 | 6236 |
| | | variable region | | SEQ ID NO: 107 | |
| PSYCH41 | RGMa | Heavy chain | AE12-21 | US20140023659 | 6237 |
| | | variable region | | SEQ ID NO: 115 | |
| PSYCH42 | RGMa | Heavy chain | AE12-23 | US20140023659 | 6238 |
| | | variable region | | SEQ ID NO: 123 | |
| PSYCH43 | RGMa | Heavy chain | AE12-24 | US20140023659 | 6239 |
| | | variable region | | SEQ ID NO: 131 | |
| PSYCH44 | RGMa | Heavy chain | AE12-3 | US20140023659 | 6240 |
| | | variable region | | SEQ ID NO: 17 | |
| PSYCH45 | RGMa | Heavy chain | AE12-4 | US20140023659 | 6241 |
| | | variable region | | SEQ ID NO: 25 | |
| PSYCH46 | RGMa | Heavy chain | AE12-5 | US20140023659 | 6242 |
| | | variable region | | SEQ ID NO: 33 | |
| PSYCH47 | RGMa | Heavy chain | AE12-6 | US20140023659 | 6243 |
| | | variable region | | SEQ ID NO: 41 | |
| PSYCH48 | RGMa | Heavy chain | AE12-7 | US20140023659 | 6244 |
| | | variable region | | SEQ ID NO: 49 | |
| PSYCH49 | RGMa | Heavy chain | AE12-8 | US20140023659 | 6245 |
| | | variable region | | SEQ ID NO: 57 | |
| PSYCH50 | RGMa | Heavy chain | AE12-2 | US20140023659 | 6246 |
| | | variable region | | SEQ ID NO: 9 | |
| PSYCH51 | RGMa | Heavy chain | AE12-13 | US20140023659 | 6247 |
| | | variable region | | SEQ ID NO: 91 | |
| PSYCH52 | RGMa | Heavy chain | AE12-15 | US20140023659 | 6248 |
| | | variable region | | SEQ ID NO: 99 | |
| PSYCH53 | TMEFE2 | Heavy chain | PQ01 | US20150030602 | 6249 |
| | | variable region | | SEQ ID NO: 10 | |
| PSYCH54 | TNFa | Heavy chain | 2SD4 | US20140296493 | 6250 |
| | | variable region | | SEQ ID NO: 10 | |
| PSYCH55 | TNFa | Heavy chain | D2E7 | US20140296493 | 6251 |
| | | variable region | | SEQ ID NO: 2 | |
| PSYCH56 | ghrelin | Heavy chain | | US20060233788 | 6252 |
| | | variable region | | SEQ ID NO: 12 | |
| PSYCH57 | ghrelin | Heavy chain | | US20060233788 | 6253 |
| | | variable region | | SEQ ID NO: 13 | |
| PSYCH58 | ghrelin | Heavy chain | | US20060233788 | 6254 |
| | | variable region | | SEQ ID NO: 32 | |
| PSYCH59 | ghrelin | Heavy chain | | US20060233788 | 6255 |
| | | variable region | | SEQ ID NO: 33 | |
| PSYCH60 | neuregulin | Heavy chain | | US20140363438 | 6256 |
| | (NRG) | variable region | | SEQ ID NO: 21 | |
| PSYCH61 | neuregulin | Heavy chain | | US20140363438 | 6257 |
| | (NRG) | variable region | | SEQ ID NO: 52 | |
| PSYCH62 | neuregulin | Heavy chain | | US20140363438 | 6258 |
| | (NRG) | variable region | | SEQ ID NO: 54 | |
| PSYCH63 | neuregulin | Heavy chain | | US20140363438 | 6259 |
| | (NRG) | variable region | | SEQ ID NO: 56 | |
| PSYCH64 | neuregulin | Heavy chain | | US20140363438 | 6260 |
| | (NRG) | variable region | | SEQ ID NO: 58 | |
| PSYCH65 | neuregulin | Heavy chain | | US20140363438 | 6261 |
| | (NRG) | variable region | | SEQ ID NO: 60 | |
| PSYCH66 | neuregulin | Heavy chain | | US20140363438 | 6262 |
| | (NRG) | variable region | | SEQ ID NO: 62 | |
| PSYCH67 | neuregulin | Heavy chain | | US20140363438 | 6263 |
| | (NRG) | variable region | | SEQ ID NO: 63 | |
| PSYCH68 | neuregulin | Heavy chain | | US20140363438 | 6264 |
| | (NRG) | variable region | | SEQ ID NO: 64 | |
| PSYCH69 | neuregulin | Heavy chain | | US20140363438 | 6265 |
| | (NRG) | variable region | | SEQ ID NO: 66 | |
| PSYCH70 | neuregulin | Heavy chain | | US20140363438 | 6266 |
| | (NRG) | variable region | | SEQ ID NO: 68 | |
| PSYCH71 | neuregulin | Heavy chain | | US20140363438 | 6267 |
| | (NRG) | variable region | | SEQ ID NO: 70 | |
| PSYCH72 | ACTH | Light chain | Ab3 | WO2015127288 | 6268 |
| | | | | SEQ ID NO: 101 | |
| PSYCH73 | ACTH | Light chain | Ab4 | WO2015127288 | 6269 |
| | | | | SEQ ID NO: 141 | |
| PSYCH74 | ACTH | Light chain | Ab5 | WO2015127288 | 6270 |
| | | | | SEQ ID NO: 181 | |
| PSYCH75 | ACTH | Light chain | Ab1 | WO2015127288 | 6271 |
| | | | | SEQ ID NO: 21 | |
| PSYCH76 | ACTH | Light chain | Ab6 | WO2015127288 | 6272 |
| | | | | SEQ ID NO: 221 | |
| PSYCH77 | ACTH | Light chain | Ab7 | WO2015127288 | 6273 |
| | | | | SEQ ID NO: 261 | |
| PSYCH78 | ACTH | Light chain | Ab9 | WO2015127288 | 6274 |
| | | | | SEQ ID NO: 301 | |
| PSYCH79 | ACTH | Light chain | Ab10 | WO2015127288 | 6275 |
| | | | | SEQ ID NO: 341 | |
| PSYCH80 | ACTH | Light chain | Ab11 | WO2015127288 | 6276 |
| | | | | SEQ ID NO: 381 | |
| PSYCH81 | ACTH | Light chain | Ab12 | WO2015127288 | 6277 |
| | | | | SEQ ID NO: 421 | |
| PSYCH82 | ACTH | Light chain | Ab1.H | WO2015127288 | 6278 |
| | | | | SEQ ID NO: 461 | |
| PSYCH83 | ACTH | Light chain | Ab2.H | WO2015127288 | 6279 |
| | | | | SEQ ID NO: 501 | |
| PSYCH84 | ACTH | Light chain | Ab3.H | WO2015127288 | 6280 |
| | | | | SEQ ID NO: 541 | |
| PSYCH85 | ACTH | Light chain | Ab4.H | WO2015127288 | 6281 |
| | | | | SEQ ID NO: 581 | |
| PSYCH86 | ACTH | Light chain | Ab2 | WO2015127288 | 6282 |
| | | | | SEQ ID NO: 61 | |
| PSYCH87 | ACTH | Light chain | Ab6.H | WO2015127288 | 6283 |
| | | | | SEQ ID NO: 621 | |
| PSYCH88 | ACTH | Light chain | Ab7.H | WO2015127288 | 6284 |
| | | | | SEQ ID NO: 661 | |
| PSYCH89 | ACTH | Light chain | Ab7A.H | WO2015127288 | 6285 |
| | | | | SEQ ID NO: 701 | |
| PSYCH90 | ACTH | Light chain | Ab10.H | WO2015127288 | 6286 |
| | | | | SEQ ID NO: 741 | |
| PSYCH91 | ACTH | Light chain | Ab11.H | WO2015127288 | 6287 |
| | | | | SEQ ID NO: 781 | |
| PSYCH92 | ACTH | Light chain | Ab11A.H | WO2015127288 | 6288 |
| | | | | SEQ ID NO: 821 | |
| PSYCH93 | ACTH | Light chain | Ab12.H | WO2015127288 | 6289 |
| | | | | SEQ ID NO: 861 | |
| PSYCH94 | neuregulin | Light chain | | US20140363438 | 6290 |
| | (NRG) | | | SEQ ID NO: 73 | |
| PSYCH95 | neuregulin | Light chain | | US20140363438 | 6291 |
| | (NRG) | | | SEQ ID NO: 75 | |
| PSYCH96 | Anx-A1 | Light chain | VJ-4B6 | US20150004164 | 6292 |
| | | variable region | | SEQ ID NO: 15 | |
| PSYCH97 | Anx-A1 | Light chain | VJ-4B6 | US20150004164 | 6293 |
| | | variable region | | SEQ ID NO: 19 | |
| PSYCH98 | RGM A | Light chain | 5F9.1-GL, 5F9.1-GL, | US20150183871 | 6294 |
| | | variable region | 5F9.1-GL, 5F9.1-GL, | SEQ ID NO: 44 | |
| | | | 5F9.1-GL, 5F9.1-GL, | | |
| | | | 5F9.1-GL, 5F9.1-GL, | | |
| | | | 5F9.1-GL, 5F9.1-GL, | | |
| | | | h5F9.4, h5F9.11, | | |
| | | | h5F9.12 | | |
| PSYCH99 | RGM A | Light chain | 5F9.2-GL, 5F9.2-GL, | US20150183871 | 6295 |
| | | variable region | 5F9.2-GL, 5F9.2-GL, | SEQ ID NO: 45 | |
| | | | 5F9.2-GL, 5F9.2-GL, | | |
| | | | 5F9.2-GL, 5F9.2-GL, | | |
| | | | 5F9.2-GL, 5F9.2-GL, | | |
| | | | h5F9.5, h5F9.19, | | |
| | | | h5F9.20 | | |
| PSYCH100 | RGM A | Light chain | 5F9.3-GL, 5F9.3-GL, | US20150183871 | 6296 |
| | | variable region | 5F9.3-GL, 5F9.3-GL, | SEQ ID NO: 46 | |
| | | | 5F9.3-GL, 5F9.3-GL, | | |
| | | | 5F9.3-GL, 5F9.3-GL, | | |
| | | | 5F9.3-GL, 5F9.3-GL, | | |
| | | | h5F9.6, h5F9.21, | | |
| | | | h5F9.22 | | |
| PSYCH101 | RGM A | Light chain | h5F9.5, h5F9.6, h5F9.7, | US20150183871 | 6297 |
| | | variable region | h5F9.8, h5F9.9, | SEQ ID NO: 48 | |
| | | | h5F9.10 | | |
| PSYCH102 | RGM A | Light chain | h5F9.11, | US20150183871 | 6298 |
| | | variable region | h5F9.19, h5F9.21 | SEQ ID NO: 49 | |
| PSYCH103 | RGM A | Light chain | h5F9.12, h5F9.20, | US20150183871 | 6299 |
| | | variable region | h5F9.22, h5F9.23, | SEQ ID NO: 50 | |
| | | | h5F9.25, h5F9.25, | | |
| | | | h5F9.26 | | |
| PSYCH104 | RGM A | Light chain | h5F9.1, h5F9.7, | US20150183871 | 6300 |
| | | variable region | h5F9.23 | SEQ ID NO: 51 | |
| PSYCH105 | RGM A | Light chain | h5F9.2, h5F9.8, | US20150183871 | 6301 |
| | | variable region | h5F9.25 | SEQ ID NO: 52 | |
| PSYCH106 | RGMa | Light chain | AE12-15 | US20140023659 | 6302 |
| | | variable region | | SEQ ID NO: 103 | |
| PSYCH107 | RGMa | Light chain | AE12-20 | US20140023659 | 6303 |
| | | variable region | | SEQ ID NO: 111 | |
| PSYCH108 | RGMa | Light chain | AE12-21 | US20140023659 | 6304 |
| | | variable region | | SEQ ID NO: 119 | |
| PSYCH109 | RGMa | Light chain | AE12-23 | US20140023659 | 6305 |
| | | variable region | | SEQ ID NO: 127 | |
| PSYCH110 | RGMa | Light chain | AE12-2 | US20140023659 | 6306 |
| | | variable region | | SEQ ID NO: 13 | |
| PSYCH111 | RGMa | Light chain | AE12-24 | US20140023659 | 6307 |
| | | variable region | | SEQ ID NO: 135 | |
| PSYCH112 | RGMa | Light chain | AE12-3 | US20140023659 | 6308 |
| | | variable region | | SEQ ID NO: 21 | |
| PSYCH113 | RGMa | Light chain | AE12-4 | US20140023659 | 6309 |
| | | variable region | | SEQ ID NO: 29 | |
| PSYCH114 | RGMa | Light chain | AE12-5 | US20140023659 | 6310 |
| | | variable region | | SEQ ID NO: 37 | |
| PSYCH115 | RGMa | Light chain | AE12-6 | US20140023659 | 6311 |
| | | variable region | | SEQ ID NO: 45 | |
| PSYCH116 | RGMa | Light chain | AE12-1 | US20140023659 | 6312 |
| | | variable region | | SEQ ID NO: 5 | |
| PSYCH117 | RGMa | Light chain | AE12-7 | US20140023659 | 6313 |
| | | variable region | | SEQ ID NO: 53 | |
| PSYCH118 | RGMa | Light chain | AE12-8 | US20140023659 | 6314 |
| | | variable region | | SEQ ID NO: 61 | |
| PSYCH119 | RGMa | Light chain | AE12-13 | US20140023659 | 6315 |
| | | variable region | | SEQ ID NO: 95 | |
| PSYCH120 | TMEFE3 | Light chain | PQ01 | US20150030602 | 6316 |
| | | variable region | | SEQ ID NO: 12 | |
| PSYCH121 | TNFa | Light chain | D2E7 | US20140296493 | 6317 |
| | | variable region | | SEQ ID NO: 1 | |
| PSYCH122 | TNFa | Light chain | 2SD4 | US20140296493 | 6318 |
| | | variable region | | SEQ ID NO: 9 | |
| PSYCH123 | ghrelin | Light chain | | US20060233788 | 6319 |
| | | variable region | | SEQ ID NO: 3 | |
| PSYCH124 | ghrelin | Light chain | | US20060233788 | 6320 |
| | | variable region | | SEQ ID NO: 30 | |
| PSYCH125 | ghrelin | Light chain | | US20060233788 | 6321 |
| | | variable region | | SEQ ID NO: 31 | |
| PSYCH126 | ghrelin | Light chain | | US20060233788 | 6322 |
| | | variable region | | SEQ ID NO: 4 | |
| PSYCH127 | neuregulin | Light chain | | US20140363438 | 6323 |
| | (NRG) | variable region | | SEQ ID NO: 22 | |
| PSYCH128 | neuregulin | Light chain | | US20140363438 | 6324 |
| | (NRG) | variable region | | SEQ ID NO: 23 | |
| PSYCH129 | neuregulin | Light chain | | US20140363438 | 6325 |
| | (NRG) | variable region | | SEQ ID NO: 24 | |
| PSYCH130 | neuregulin | Light chain | | US20140363438 | 6326 |
| | (NRG) | variable region | | SEQ ID NO: 25 | |
| PSYCH131 | neuregulin | Light chain | | US20140363438 | 6327 |
| | (NRG) | variable region | | SEQ ID NO: 26 | |
| PSYCH132 | neuregulin | Light chain | | US20140363438 | 6328 |
| | (NRG) | variable region | | SEQ ID NO: 27 | |
| PSYCH133 | neuregulin | Light chain | | US20140363438 | 6329 |
| | (NRG) | variable region | | SEQ ID NO: 53 | |
| PSYCH134 | neuregulin | Light chain | | US20140363438 | 6330 |
| | (NRG) | variable region | | SEQ ID NO: 55 | |
| PSYCH135 | neuregulin | Light chain | | US20140363438 | 6331 |
| | (NRG) | variable region | | SEQ ID NO: 57 | |
| PSYCH136 | neuregulin | Light chain | | US20140363438 | 6332 |
| | (NRG) | variable region | | SEQ ID NO: 59 | |
| PSYCH137 | neuregulin | Light chain | | US20140363438 | 6333 |
| | (NRG) | variable region | | SEQ ID NO: 61 | |
| PSYCH138 | neuregulin | Light chain | | US20140363438 | 6334 |
| | (NRG) | variable region | | SEQ ID NO: 65 | |
| PSYCH139 | neuregulin | Light chain | | US20140363438 | 6335 |
| | (NRG) | variable region | | SEQ ID NO: 67 | |
| PSYCH140 | neuregulin | Light chain | | US20140363438 | 6336 |
| | (NRG) | variable region | | SEQ ID NO: 69 | |
| PSYCH141 | neuregulin | Light chain | | US20140363438 | 6337 |
| | (NRG) | variable region | | SEQ ID NO: 71 | |
| PSYCH142 | neurokinin B | Single chain scFv | N024C01 | U.S. Pat. No. 7,514,079 | 6338 |
| | | | | SEQ ID NO: 22 | |
| PSYCH143 | neurokinin B | Single chain scFv | N025B07 | U.S. Pat. No. 7,514,079 | 6339 |
| | | | | SEQ ID NO: 23 | |
| PSYCH144 | neurokinin B | Single chain scFv | N015E08 | U.S. Pat. No. 7,514,079 | 6340 |
| | | | | SEQ ID NO: 24 | |
| PSYCH145 | neurokinin B | Single chain scFv | N015F10 | U.S. Pat. No. 7,514,079 | 6341 |
| | | | | SEQ ID NO: 25 | |
| PSYCH146 | neurokinin B | Single chain scFv | N024D01 | U.S. Pat. No. 7,514,079 | 6342 |
| | | | | SEQ ID NO: 26 | |
| PSYCH147 | neurokinin B | Single chain scFv | N015D08 | U.S. Pat. No. 7,514,079 | 6343 |
| | | | | SEQ ID NO: 27 | |
| PSYCH148 | neurokinin B | Single chain scFv | N024B07 | U.S. Pat. No. 7,514,079 | 6344 |
| | | | | SEQ ID NO: 28 | |
| PSYCH149 | neurokinin B | Single chain scFv | N024E07 | U.S. Pat. No. 7,514,079 | 6345 |
| | | | | SEQ ID NO: 29 | |
| PSYCH150 | neurokinin B | Single chain scFv | N023F05 | U.S. Pat. No. 7,514,079 | 6346 |
| | | | | SEQ ID NO: 30 | |
| PSYCH151 | neurokinin B | Single chain scFv | N024D08 | U.S. Pat. No. 7,514,079 | 6347 |
| | | | | SEQ ID NO: 31 | |
| PSYCH152 | neurokinin B | Single chain scFv | N023B03 | U.S. Pat. No. 7,514,079 | 6348 |
| | | | | SEQ ID NO: 32 | |
| PSYCH153 | neurokinin B | Single chain scFv | N023E01 | U.S. Pat. No. 7,514,079 | 6349 |
| | | | | SEQ ID NO: 33 | |
| PSYCH154 | neurokinin B | Single chain scFv | N024C05 | U.S. Pat. No. 7,514,079 | 6350 |
| | | | | SEQ ID NO: 34 | |
| PSYCH155 | neurokinin B | Single chain scFv | N025E05 | U.S. Pat. No. 7,514,079 | 6351 |
| | | | | SEQ ID NO: 35 | |
| PSYCH156 | neurokinin B | Single chain scFv | N025C01 | U.S. Pat. No. 7,514,079 | 6352 |
| | | | | SEQ ID NO: 36 | |
| PSYCH157 | neurokinin B | Single drain scFv | N024F09 | U.S. Pat. No. 7,514,079 | 6353 |
| | | | | SEQ ID NO: 37 | |
| PSYCH158 | neurokinin B | Single chain scFv | N024B01 | U.S. Pat. No. 7,514,079 | 6354 |
| | | | | SEQ ID NO: 38 | |
| PSYCH159 | neurokinin B | Single chain scFv | N024F07 | U.S. Pat. No. 7,514,079 | 6355 |
| | | | | SEQ ID NO: 39 | |
| PSYCH160 | neurokinin B | Single chain scFv | N015D10 | U.S. Pat. No. 7,514,079 | 6356 |
| | | | | SEQ ID NO: 40 | |

### Cancer, Inflammation and Immune System Antibodies

[0375] In some embodiments, the payload region of the viral particle comprises one or more nucleic acid sequences encoding one or more of the cancer, inflammation and immune system payload antibody polypeptides listed in Table 9 (CII1-CII3310; SEQ ID NO: 6357-19665).

Lengthy table referenced here
US20240124889A1-20240418-T00001
Please refer to the end of the specification for access instructions.

[0376] In Table 9, the target number (Target No.) code is described in the following semi-colon delimited list where the target number is followed by the target (e.g., Target No. 1 with target AC133 is shown as Target No. 1-Target AC133). The targets represented by the codes in Table 9 include, but are not limited to, Target No. 1-Target AC133; Target No. 2-Target ACTH; Target No. 3-Target activin receptor-like kinase 1 (ALK-1); Target No. 4-Target ADAMTS4; Target No. 5-Target AFP; Target No. 6-Target Albumin; Target No. 7-Target ALCM; Target No. 8-Target alpha-4 integrin; Target No. 9-Target angiopoietin 2 (ANGPT2; ANG-2); Target No. 10-Target angiopoietin 2 (ANGPT2; ANG-2) (ANGPT2; ANG-2); Target No. 11-Target Annexin IV or a phospholipid; and (b) a complement inhibitor; Target No. 12-Target Anti-CD-3; Target No. 13-Target antiHER2; Target No. 14-Target anti-Her2 and anti-Her3; Target No. 15-Target antiHER3; Target No. 16-Target anti-idiotype (Id); Target No. 17-Target Anx-A1; Target No, 18-Target A0C3 (VAP-1); Target No. 19-Target Alpha-V integrin; Target No. 20-Target AXT; Target No. 21-Target B and T human lymphocytes; Target No. 22-Target b7 subunit of a4b7, aEb7 integrins, humanized IgG1; Target No. 23-Target B7-H1; Target No. 24-Target B7-H3; Target No. 25-Target B7-H4; Target No. 26-Target B7-H5; Target No. 27-Target B7-H6; Target No. 28-Target B7-H7; Target No. 29-Target B7-H8; Target No, 30-Target BMP9; Target No. 31-Target BSG; Target No. 32-Target C3b; Target No. 33-Target C3b, Properdin (factor P), Factors Ba and Bb, C5, C6, C7, C8, C9; Target No, 34-Target C5; Target No. 35-Target C5a; Target No. 36-Target Cyd polypeptide; Target No, 37-Target CA 125 (MUC16); Target No, 38-Target CA-125 (imitation); Target No. 39-Target C-antigen; Target No. 40-Target Carbohydrate Antigen 242 (CA242); Target No. 41-Target carbonic anhydrase 9(CA-IX); Target No. 42-Target CC chemokines; Target No. 43-Target CCL11 (eotaxin-1); Target No. 44-Target CCL2, MCP-1, MCAF; Target No. 45-Target CCR2; Target No. 46-Target CCR4; Target No. 47-Target CD100; Target No. 48-Target CD11; Target No. 49-Target CD11a; Target No. 50-Target CD123; Target No. 51-Target CD147 (basigin); Target No. 52-Target CD154 (CD40LG); Target No. 53-Target CD19; Target No. 54-Target CD19; Target No. 55-Target CD2; Target No. 56-Target CD20; Target No. 57-Target CD20/CD40; Target No. 58-Target CD20/EGFR; Target No. 59-Target CD200; Target No. 60-Target CD22; Target No. 61-Target CD221; Target No. 62-Target CD248 (TEM-1); Target No. 63-Target CD27; Target No. 64-Target CD274 (PD-L1); Target No. 65-Target CD28; Target No. 66-Target CD3; Target No. 67-Target CD3; Target No. 68-Target CD3 epsilon; Target No. 69-Target CD3 epsilon, anti-IL1-Ri; Target No. 70-Target CD3, CD19; Target No. 71-Target CD3, EpCAM; Target No. 72-Target CD3, MSCP; Target No. 73-Target CD3/CD19 or CD3/CD20; Target No. 74-Target CD3; CD19; Target No. 75-Target CD30; Target No. 76-Target CD31; Target No. 77-Target CD32; Target No. 78-Target CD324/E-cadherin; Target No. 79-Target CD32b; Target No. 80-Target CD33; Target No. 81-Target CD34; Target No. 82-Target CD35; Target No. 83-Target CD37; Target No. 84-Target CD37 and CD20; Target No. 85-Target CD38; Target No. 86-Target CD38, human IgG1; Target No. 87-Target CD38, human IgG2; Target No. 88-Target CD3E; Target No. 89-Target CD3E, EPCAM; Target No. 90-Target CD3E, EPCAM (IL-beta); Target No. 91-Target CD4; Target No. 92-Target CD40; Target No. 93-Target CD40LG; Target No, 94-Target CD44 v6; Target No. 95-Target CD-49d, CD11a; Target No. 96-Target CD51; Target No. 97-Target CD52; Target No. 98-Target CD55/CD59 and CD20; Target No. 99-Target CD6; Target No. 100-Target CD64; Target No. 101 Target CD70; Target No. 102-Target CD74; Target No. 103-Target CD79B; Target No. 104-Target CD89; Target No. 105-Target CEA; Target No. 106-Target CEACAM5; Target No. 107-Target Cell surface targets; Target No. 108-Target CH region of an immunoglobulin; Target No. 109-Target c-MET; Target No, 110-Target c-MET/EGFR; Target No, 111-Target c-MET/EGER; c-MET; Target No. 112-Target c-MET/EGER; EGFR; HGF; Target No. 113-Target c-MET/FGFR; Target No. 114-Target c-MET/EGER; Target No. 115-Target c-MET/EGER; ErbB2; Target No. 116-Target c-MET; EGFR; VEGF; c-MET/EGFR; Target No. 117-Target CSAp; Target No. 118-Target CSF1R; Target No. 119-Target CSF2; Target No. 120-Target CSF2RA; Target No, 121-Target CSPG4; Target No, 122-Target CTGF; Target No. 123-Target CTLA4; Target No. 124-Target CTLA4, human IgG2; Target No. 125-Target CTLA4, human IgG3; Target No. 126-Target C-X-C chemokine receptor type 4; Target No. 127-Target CXCL10; Target No. 128-Target CXCL13; Target No. 129-Target CXCR4; Target No. 130-Target difucosyl Lewis blood group antigens Y-6 and B-7-2; Target No. 131-Target DKK1; Target No. 132-Target DLL3; Target No. 133-Target DLL4; Target No. 134-Target DNA/histone complex; Target No. 135-Target DPP4, CD26; Target No. 136-Target DR5; Target No. 137Target ETNA 1; Target No, 138-Target EGF; Target No, 139-Target EGFL7; Target No. 140-Target EGFR; Target No. 141-Target EGFR (EGERvIII); Target No. 142-Target EGFR (HERD; Target No. 143-Target EGFR and IGF1R; Target No. 144-Target EGFR family; Target No. 145-Target EGFR, ERBB1, HER1; Target No. 146-Target EGFR, ERBB1, HER2; Target No. 147-Target EGFR, HER2, or HER3; Target No. 148-Target EGFR/cMet; Target No. 149-Target EGFR/HER3; Target No. 150-Target EGFR/VEGFR/HER; Target No. 151-Target EGFR; c-Met; Target No. 152-Target EGFR; VEGF; Target No. 153-Target EGFRvIII; Target No. 154-Target EGP-1 (TROP2); Target No. 155-Target EMP2; Target No. 156-Target endoglin; Target No. 157-Target EPCAM; Target No. 158-Target EpCAM, CD3; Target No. 159-Target EphA2 receptor; Target No. 160-Target EPHA3; Target No. 161-Target EphA3; EGFR BER2; PD-L1; HGF; Target No. 162-Target episialin; Target No. 163-Target ERB2; Target No. 164-Target ERBB; Target No. 165-Target ERBB1; Target No. 166-Target ERBB2; Target No. 167-Target ERBB3; Target No. 168-Target ErbB3/IGF1R; Target No. 169-Target ErbB4; Target No. 170-Target ErbB5; Target No. 171-Target ErbB6; Target No. 172-Target ErbB7; Target No. 173-Target ErbB8; Target No. 174-Target euGc, NGNA; Target No. 175-Target F3; Target No. 176-Target FAP; Target No. 177-Target FAN; Target No. 178-Target FasR; Target No. 179-Target FcRn; Target No. 180-Target FcγRIIB (FcγR); Target No, 181-Target FcγRIIB; Target No. 182-Target FcγRIIIA; Target No. 183-Target FGF-8; Target No. 184-Target FGFR2; Target No. 185-Target fibronectin ED-A; Target No. 186-Target fibronectin IIIC isoforms Target No. 187-Target fibronectin extra domain-B; Target No. 188-Target FL Ti; Target No. 189-Target FLT3; Target No. 190-Target folate receptor alpha; Target No. 191-Target FOLR1; Target No. 192-Target Frizzled receptor; Target No. 193-Target ganglioside; Target No. 194-Target GD2; Target No. 195-Target GD2/DOTA; Target No. 196-Target GD2/huOKT3; Target No. 197-Target GD3; Target No. 198-Target GD3 ganglioside; Target No. 199-Target GFRα3; Target No. 200-Target glycan antigen; Target No. 201-Target glypican 3; Target No. 202-Target GM2; Target No. 203-Target GPNMB; Target No. 204-Target Growth factor 7; Target No. 205-Target GUCY2C, anti-GCC; Target No. 206-Target HB-EGF; Target No, 207-Target HB-EGF/EGFR; Target No. 208-Target hen egg lysozyme; Target No. 209-Target HER/EGFR; Target No. 210-Target HER1, HER3, CD80, CD86, PD-1, CTLA4, B7-H4, RON, CD200, CD4, BAF R, EGFR, IGFR VEGFR, a member of the TNF family of receptors, a Tie receptor, MET, IGF1, IGF2, TNF, a TNT ligand, IL-6, TWEAK, Fn14, CD20, CD23, CRIPTO, HGF, alpha4beta1 integrin, alpha5beta1 integrin, alpha6beta4 integrin, and alphaVbeta6 integrin; Target No. 211-Target HER2; Target No. 212-Target HER2/CD3; Target No. 213-Target HER2/Dig; Target No. 214-Target HER2/neu; Target No. 215-Target HER3; Target No. 216-Target HER3, human IgG1; Target No. 217-Target HGF; Target No. 218-Target hIL-12; Target No. 219-Target hIL13; Target No. 220-Target HIV gp120; Target No. 221-Target HLA-DR; Target No. 222-Target hNav1.7; Target No. 223-Target hPG; Target No. 224-Target human TNF; Target No. 225-Target huTNFR; Target No. 226-Target huTNFR1; Target No. 227-Target ICAM-1; Target No. 228-Target IFNAR1; Target No. 229-Target IFN-α; Target No. 230-Target IGF; Target No. 231-Target IGF; IGT1R; Target No. 232-Target IGF1; Target No, 233-Target IGF IR; Target No. 234-Target IGF1R1Dig; Target No. 235-Target IGF-1R/ErbB3; Target No. 236-Target IGF1R; EGFR; Target No. 237-Target IgG4 (CD40); Target No. 238-Target IGHE; Target No. 239-Target IL1; Target No. 240-Target IL10; Target No. 241 Target IL11; Target No. 242-Target IL12; Target No. 243-Target IL12B, IL12 p40, NKSF2, CMLF p40; Target No. 244-Target IL12B, IL12 p40, NKSF2, CMLF p41; Target No. 245-Target 11_12 p40; Target No. 246-Target IL13; Target No. 247-Target IL13, Human IgG4; Target No. 248-Target IL13, Human IgG5; Target No, 249-Target IL17; Target No. 250-Target IL17A; Target No. 251-Target 11,17A and IL17F; Target No. 252-Target IL17RA; Target No. 253-Target IL18; Target No. 254-Target IL18BP; Target No. 255-Target ILIA; Target No. 256-Target LIB; Target No. 257-Target IL20; Target No. 258-Target IL20, NGF; Target No. 259-Target 1122; Target No. 260-Target IL23 A; Target No. 261-Target IL23p19 subunit, humanized IgG1; Target No. 262-Target IL23p19 subunit, humanized IgG2; Target No. 263-Target IL2RA; Target No. 264-Target 11-31RA; Target No, 265-Target IL4; Target No. 266-Target IL4R; Target No. 267-Target IL5; Target No. 268-Target IL5RA; Target No. 269-Target IL6; Target No. 270-Target IL6R; Target No. 271-Target IL6R, humanized IgG2; Target No, 272-Target IL7; Target No. 273-Target IL7R; Target No. 274-Target IL8; Target No. 275-Target IL9; Target No. 276-Target ILGF2; Target No, 277-Target Integrin 2; Target No. 278-Target integrin a4137; Target No, 279-Target integrin (108; Target No, 280-Target IP-10; Target No, 281-Target IS12B; Target No. 282-Target ITGA2; Target No. 283-Target ITGA4_ITGB7; Target No. 284-Target ITGAL; Target No. 285-Target ITGAV_ITGB3; Target No, 286-Target ITGAV_ITGB3; Target No. 287-Target IDR; Target No. 288-Target KIR2; Target No. 289-Target KIR2D; Target No. 290-Target KLRC1; Target No. 291-Target LAG-3; Target No. 292-Target LecLe.sup.x, Le.sup.aLe.sup.x, Di-Le.sup.a, Le.sup.x containing glycans and Le.sup.a containing glycans; Target No. 293-Target Lewis b (LeB); Target No, 294-Target Lewis Y (LeY); Target No. 295-Target LIGHT/HER2/CD23; Target No. 296-Target LIGHT/HER2/CD24; Target No. 297-Target LIGHT/HER2/CD25; Target No. 298-Target LIGHT/HER2/CD26; Target No. 299-Target LIGHT/HER2/CD27; Target No. 300-Target LIGHT/HER2/CD28; Target No. 301-Target LIGHT/HER2/CD29; Target No. 302-Target LIGHT/HER2/CD30; Target No. 303-Target LIGHT/HER2/CD31; Target No. 304-Target LIGHT/HER2/CD32; Target No. 305-Target LINGO-1; Target No. 306-Target LOXL2; Target No. 307-Target LTA; Target No. 308-Target MAGE-A3; Target No. 309-Target MAI (myelin associated inhibitor); Target No. 310-Target many targets; Target No. 311-Target MCP-1; Target No. 312-Target MCP-2; Target No. 313-Target MCP-3; Target No. 314-Target MCP-4; Target No, 315-Target MCP-5; Target No. 316-Target MCP-6; Target No. 317-Target MC SP; Target No. 318-Target MEK; Target No, 319-Target mesothelin; Target No. 320-Target MET; Target No. 321-Target MET Receptor; Target No. 322-Target MHC; Target No. 323-Target MHC class 11; Target No. 324-Target MIF; Target No. 325-Target MMP3; Target No. 326-Target molecules on brain microvascular endothelial cells; Target No. 327-Target monosialo-GM2; Target No. 328-Target MS4A1; Target No. 329-Target MSLN; Target No. 330-Target MST1R; Target No. 331-Target MT4-MMR/EGFR; Target No. 332-Target MTX and EGFR; Target No. 333-Target MTX and hCD-20; Target No, 334-Target MIX and hCD-3; Target No. 335-Target MTX and mCD-3; Target No. 336-Target MUC1; Target No. 337-Target MUC1/MUC5ac; Target No. 338-Target MUC5AC; Target No. 339-Target mucin CanAg; Target No. 340-Target N terminus end of properdin; Target No. 341-Target NCAM1; Target No. 342-Target NeuGc, NGNA; Target No. 343-Target neuregulin (NRG); Target No. 344-Target neurokinin B; Target No. 345-Target neurotensin; Target No. 346-Target NGF; Target No. 347-Target NGF; c-MET; Target No. 348-Target N-glycolyl-GM3; Target No. 349-Target NMDA; Target No. 350-Target NOGO; Target No. 351-Target Nogo receptor-i; Target No. 352-Target Notch receptor; Target No. 353-Target NOTCH1; Target No. 354-Target NRP1; Target No. 355-Target 0-acetylated-GD2; Target No. 356-Target 01′GL; Target No. 357-Target OX-40; Target No. 358-Target oxLDL; Target No. 359-Target PAM4 antigens; Target No. 360-Target PD-1; Target No. 361-Target PD1, human IgG4; Target No. 362-Target PDGFRA; Target No, 363-Target PDGFR-beta; Target No. 364-Target PDGFRβ/VEGFA; Target No. 365-Target PD-L1; Target No. 366-Target PD-Li, human IgG1; Target No. 367-Target PD-L2; Target No. 368-Target periostin; Target No. 369-Target PERP; Target No. 370-Target PhosphatidyL-serine, chimeric IgG1; Target No. 371-Target PhosphatidyL-serine, Chimeric IgG2; Target No. 372-Target polyubiquitin; Target No. 373-Target PSMA; Target No. 374-Target PVRL4; Target No. 375-Target PVRL5; Target No. 376-Target RANKL; Target No, 377-Target RANKL/PTH; Target No. 378-Target RFB4; Target No. 379-Target RON; Target No. 380-Target RTN4 (NOGO); Target No. 381-Target S1P4; Target No. 382-Target SDC1; Target No. 383-Target selectin; Target No. 384-Target Serum albumin (mouse); Target No. 385-Target Serum albumin or neonatal Fc receptor; Target No. 386-Target sialic acid (Neu5Gc or Neu5Ac); Target No. 387-Target sialyl Tn (sTn); Target No. 388-Target Sialyl-Lewis A (sLeA); Target No. 389-Target siaiyltetraosyl carbohydrate (Colo205); Target No. 390-Target SI Pa; Target No. 391-Target SLAMF7; Target No. 392-Target SLC34A2; Target No. 393-Target SOST; Target No. 394-Target STEAP1; Target No. 395-Target sTn; Target No. 396-Target TAC; Target No. 397-Target TAG-72; Target No. 398-Target Tenascin (INC-A1 or TNC-A4); Target No. 399-Target Tenascin (INC-A2); Target No. 400-Target tenascin C; Target No. 401-Target tenascin W; Target No. 402-Target tenascin; Target No. 403-Target Ten-M2; Target No. 404-Target TGF beta 1; Target No. 405-Target TGFbeta; Target No. 406-Target TGF-α; Target No, 407-Target TIGIT; Target No. 408-Target TIM-3; Target No. 409-Target TLR3; Target No. 410-Target Tn antigen; Target No. 411-Target Tn-(ML1C21); Target No. 412-Target TNF; Target No. 413-Target TNFalpha; Target No. 414-Target TNFRSF10B Target No. 415-Target TNFRSF12A; Target No. 416-Target TINFRSF8; Target No. 417-Target TNFRSF9; Target No. 418-Target TNT SF11; Target No. 419-Target TNFSF13B; Target No. 420-Target TPBG; Target No. 421-Target TRAIL-R2; Target No. 422-Target TrkA; Target No. 423-Target TSLP; Target No. 424-Target tumor associated carbohydrate antigen (TACH); Target No. 425-Target tumor specific glycosylation of MUC1, Target No. 426-Target tumor-associated calcium signal transducer 2; Target No. 427-Target TYRP1(glycoprotein 75); Target No. 428-Target VEGF; Target No. 429-Target VEGF, c-Met, CD20; CD38, IL-8, CD25, CD74, FcalphaR1, FcepsilonR1, acetyl choline receptor, fas, fast, TRAIL, hepatitis virus, hepatitis C virus, envelope E2 of hepatitis C virus, tissue factor, a complex of tissue factor and Factor VII, EGFr, CD4, and CD28; Target No. 430-Target VEGFA; Target No. 431-Target VEGFA, ANGT2; Target No, 432-Target VEGFR2; Target No. 433-Target vimentin; Target No. 434-Target VRGF; Target No. 435-Target VSTM5; Target No. 436-Target VWF; Target No. 437-Target a6134 integrin; Target No. 438-Target a-folate receptor, αvβ6integrin, BCMA, B7-E13, B7-H6, CALX, CD19, CD20, CD22, CD30, CD33, CD37, CD44, CD44v6, CD44v7/8, CD70; CD123, CD138, CD171, CEA, DLL4, EGP-2, EGP-40, CSPG4, EGFR, EGER family including ErbB2 (HER2), EGFRvIII, EPCAM, EphA2, EpCAM, RAP, FBP, fetal acetylcholine receptor, Fzd7, GD2, GD3, Glypican-3 (GPC3), h5T4, IL-11Ra, IL13R-α2, KDR, κ light chain, 2 light chain, LeY, L1CAM, MAGE-A1, mesothelin, MHC presented peptides, MUC1, MUC16, NKG2D ligands, Notch1, Notch2/3, NY-ESO-1, PRAME, PSCA, PSMA, Survivin; TAG-72, TEMs, TERT, VEGFR2, and ROR1; and Target No. 439-Target αβv6 integrin.

[0377] In Table 9, the description number (Description No.) code is described in the following semi-colon delimited list where the description number is followed by the description (e.g., Description No. 1 with description aglycosylated antibody is shown as Description No. 1-Description aglycosylated antibody). The targets represented by the codes in Table 9 include, but are not limited to, Description No. 1-Descriptionaglycosylated antibody; Description No. 2-DescriptionAmplified variable region; Description No, 3-DescriptionAntibody; Description No. 4-DescriptionAntibody for Pulmonary Fibrosis; Description No. 5-DescriptionBinding peptide; Description No. 6-DescriptionBispecific; Description No. 7-Descriptionbispecific antibody; Description No. 8-DescdptionBR96 say; Description No. 9-DescriptionChain A, Human Igg1 Fc Fragment; Description No. 10-DescriptionChain B, Human Igg1 Fc Fragment; Description No. 11-DescriptionChimeric antigen receptor with cd19 Binding domain; Description No. 12-DescriptionConsensus sequence; Description No. 13-DescriptionConstant region; Description No. 14-DescriptionConstant region IgG1; Description No. 15-DescriptionConstant region IgG2; Description No. 16-DescriptionConstant region IgG3; Description No. 17-DescriptionConstruct; Description No. 18-DescriptionDiabody; Description No. 19-DescriptionDomain antibody; Description No. 20-DescriptiondsFv; Description No. 21-DescdptionDVD heavy chain; Description No. 22-DescriptionDVD light chain; Description No. 23-DescriptionEGFR-specific variable region and CH2 region; Description No. 24-DescriptionFab Heavy chain; Description No. 25-Description Fab heavy chain-Fc; Description No. 26-Description Fc; Description No. 27-Description Fc domain; Description No. 28-Description Fc polypeptide; Description No. 29-Description fc region Igg1; Description No. 30-Description fibronectin type III (FN3) domain; Description No. 31-Description first Fe domain, isoleucine zipper, IgG2 hinge, and second Fc domain; Description No. 32-Description fragment crystallizable region; Description No. 33-Description full sequence; Description No. 34-Description fusion construct; Description No. 35-Description fusion protein; Description No. 36-Description Fusion protein, bispecific; Description No. 37-Description Fusion protein, tumor suppressor protein epha7ecd; Description No, 38-Description Germline Heavy Chain—variable region; Description No. 39-Description Heavy chain variable region; Description No. 40-Description Heavy chain; Description No. 41-Description Heavy chain-constant region; Description No. 42-Description Heavy Chain-variable region; Description No. 43-Description Heavy Chain (Genetic Recombination), Antibody for paroxysmal nocturnal hemoglobinuria; Description No. 44-Description Heavy chain 1; Description No. 45-Description Heavy Chain 1, Antibody for immunosuppressant; Description No. 46-Description Heavy chain 2; Description No, 47-Description Heavy chain A; Description No. 48-Description Heavy chain amino acid sequence humanized; Description No. 49-Description Heavy chain antigen binding region; Description No. 50-Description Heavy chain B; Description No. 51-Description Heavy chain amino acid antibodies; Description No. 52-Description Heavy chain CDR; Description No. 53-Description Heavy Chain CDR 1, immunosuppressant; Description No. 54-Description Heavy Chain CDR 2, immunosuppressant; Description No. 55-Description Heavy Chain CDR 3, immunosuppressant; Description No. 56-Description Heavy chain CDR grafted anti-IL-5; Description No. 57-Description Heavy Chain CDR1; Description No. 58-Description Heavy Chain CDR1, Antibody for paroxysmal nocturnal hemoglobinuria; Description No, 59-Description Heavy chain CDR1, Antibody for rheumatoid arthritis; Description No. 60-Description Heavy Chain CDR 1, immunosuppressant; Description No. 61-Description Heavy Chain CDR2; Description No. 62-Description Heavy Chain CDR2, Antibody for paroxysmal nocturnal hemoglobinuria; Description No, 63-Description Heavy chain CDR2, Antibody for rheumatoid arthritis; Description No. 64-Description Heavy Chain CDR2, immunosuppressant; Description No, 65-Description Heavy Chain CDR3; Description No. 66-Description Heavy Chain CDR3, Antibody for paroxysmal nocturnal hemoglobinuria; Description No. 67-Description Heavy chain CDR3, Antibody for rheumatoid arthritis; Description No. 68-Description Heavy Chain CDR3, immunosuppressant; Description No. 69-Description Heavy chain chimeric; Description No. 70-Description Heavy chain Consensus sequence; Description No. 71-Description Heavy chain constant; Description No. 72-Description heavy chain constant domain; Description No. 73-Description Heavy chain constant gamma-1; Description No. 74-Description Heavy chain constant Ig gamma 1; Description No. 75-Description Heavy chain constant of polypeptide; Description No. 76-Description Heavy chain-constant region Hu1D10-IgG2M3; Description No, 77-Description Heavy chain constant region, human IgG4; Description No. 78-Description Heavy chain constant region, wildtype; Description No. 79-Description Heavy chain constant, CH1; Description No. 80-Description Heavy chain constant, CH2; Description No. 81-Description Heavy chain constant, CH3; Description No. 82-Description Heavy chain constant, human IgG; Description No. 83-Description Heavy chain constant, human IgG4; Description No, 84-Description Heavy chain constant, human IgG4 hingeless; Description No. 85-Description Heavy chain Fab; Description No. 86-Description Heavy chain Fab fragment, Chimeric (anti-alpha2-V_{H}-IGHG1-CH1); Description No. 87-Description Heavy chain gamma consensus sequence; Description No. 88-Description Heavy chain gamma sequence; Description No. 89-Description Heavy chain humanized construct H1; Description No. 90-Description Heavy chain humanized construct H14; Description No. 91-Description Heavy chain humanized construct H15; Description No. 92-Description Heavy chain humanized construct H16; Description No. 93-Description Heavy chain humanized construct H17; Description No. 94-Description Heavy chain humanized construct F118; Description No. 95-Description Heavy chain humanized construct H19; Description No. 96-Description Heavy chain humanized construct H20; Description No. 97-Description Heavy chain humanized construct 1-121; Description No. 98-Description Heavy chain humanized construct H22; Description No. 99-Description Heavy chain humanized construct 1-123; Description No. 100-Description Heavy chain humanized construct H24; Description No. 101-Description Heavy chain humanized construct H25; Description No. 102-Description Heavy chain humanized construct H5; Description No. 103-Description Heavy chain humanized construct H6; Description No, 104-Description Heavy chain humanized construct H700; Description No. 105-Description Heavy chain IgG4, immunomodulator; Description No. 106-Description Heavy chain immunoglobulin variable region; Description No, 107-Description Heavy chain immunoglobulin; Description No. 108 Description Heavy chain leader and variable region of the murine anti-IGF-I receptor antibody; Description No. 109-Description Heavy chain mature; Description No. 110-Description Heavy chain mature fragment; Description No. 111-Description Heavy chain mature immunoglobulin; Description No. 112-Description Heavy chain mature variable region; Description No. 113-Description Heavy chain mature, Antibody for rheumatic diseases; Description No. 114-Description Heavy chain of huAbF46-H4-A1, human IgG2 hinge and constant region of human IgG1; Description No. 115-Description Heavy chain of huAbF464H4-A1, human IgG2 hinge and constant region of human IgG2; Description No. 116-Description Heavy chain of huAbF46-H4-A1, U6-HC7 hinge and constant region of human IgG1; Description No. 117-Description Heavy chain polypeptide; Description No. 118-Description Heavy chain protein; Description No. 119-Description Heavy chain sequence; Description No. 120-Description Heavy chain used in humanization; Description No. 121-Description Heavy chain variable and constant chain; Description No. 122-Description Heavy chain variable domain; Description No. 123-Description heavy chain variable domain H1 AC10; Description No. 124-Description heavy chain variable domain 112 AC11; Description No. 125-Description heavy chain variable domain H3 AC12; Description No. 126-Description heavy chain variable domain L1 AC11; Description No. 127-Description heavy chain variable domain L2 AC12; Description No. 128-Description heavy chain variable domain L3 AC13; Description No. 129-Description Heavy chain variable domain of anti-alpha2-integrin; Description No. 130-Description Heavy chain variable domain of anti-alpha2-integrin mAb; Description No, 131-Description Heavy Chain Variable Domain, Antibody for rheumatoid arthritis, psoriatic arthritis, ankylosing spondylitis, Crohn's disease, ulcerative colitis, moderate to severe chronic psoriasis and juvenile idiopathic arthritis, D2E7; Description No. 132-Description Heavy Chain Variable domain, immunosuppressant for lupus; Description No. 133-Description Heavy chain variable domain, murine; Description No. 134-Description Heavy chain variable of scFv, immunosuppressant for lupus; Description No. 135-Description heavy chain variable region (excludes the heavy chain variable region of the ErbB3 binding site of 160; Description No. 136-Description heavy chain variable region (V_{H}); Description No. 137-Description Heavy chain variable region (with signal sequence removed); Description No. 138-Description Heavy chain variable region 1; Description No. 139-Description Heavy chain variable region 2; Description No. 140-Description heavy chain variable region and heavy chain; Description No. 141-Description Heavy chain variable region and IgG-1 constant region; Description No. 142-Description Heavy chain variable region chain, Antibody for rheumatoid arthritis; Description No. 143-Description Heavy chain variable region consensus framework; Description No, 144-Description Heavy chain variable region domain (as translated) listed in USS 736137; Description No. 145-Description Heavy chain variable region domain chain 1, Anti-IgE antibody; Description No. 146-Description Heavy chain variable region domain, Antibody for Fibrotic diseases, scarring, diffuse scleroderma; Description No. 147-Description heavy chain variable region dual variable domain; Description No. 148-Description Heavy chain variable region humanized construct H1; Description No. 149-Description Heavy chain variable region humanized construct H14; Description No. 150-Description Heavy chain variable region humanized construct H15; Description No. 151-Description Heavy chain variable region humanized construct H16; Description No. 152-Description Heavy chain variable regi on humanized construct H17; Description No. 153-Description Heavy chain variable region humanized construct H18; Description No. 154-Description Heavy chain variable region humanized construct H19; Description No. 155-Description Heavy chain variable region humanized construct H20; Description No. 156-Description Heavy chain variable region humanized construct H21; Description No. 157-Description Heavy chain variable region humanized construct H22; Description No. 158-Description Heavy chain variable region humanized construct H23; Description No. 159-Description Heavy chain variable region humanized construct H24; Description No. 160-Description Heavy chain variable region humanized construct H25; Description No. 161-Description Heavy chain variable region humanized construct H5; Description No. 162-Description Heavy chain variable region humanized construct H6; Description No, 163-Description Heavy chain variable region humanized construct H700; Description No. 164-Description Heavy chain variable region variant; Description No. 165-Description Heavy chain variable region with CDRs and human CR1-hinge-aglycosylCH2CH3; Description No. 166-Description Heavy chain variable region with predicted signal; Description No. 167-Description Heavy chain variable region without predicted signal; Description No. 168-Description Heavy chain variable region without signal; Description No. 169-Description Heavy chain variable region without signal sequence; Description No. 170-Description Heavy chain variable region, Amino acid sequence encoded by the 4-61 gene; Description No. 171-Description Heavy chain variable region, Antibody for acute coronary syndrome, atherosclerosis; Description No. 172-Description Heavy chain variable region, Antibody for allograft rejection; Description No. 173-Description Heavy Chain Variable Region, Antibody for chronic plaque psoriasis; Description No, 174-Description Heavy chain variable region, Antibody for Neuromyelitis optica and NMO Spectrum Disorder; Description No. 175-Description Heavy chain variable region, Antibody for osteoporosis; Description No. 176-Description Heavy chain variable region, Antibody for psoriasis (blocks T-cell migration); Description No. 177-Description Heavy chain variable region, Antibody for Pulmonary Fibrosis; Description No. 178-Description Heavy chain variable region, Antibody for rheumatoid arthritis; Description No. 179-Description Heavy chain variable region, camelid derived; Description No. 180-Description Heavy chain variable region, chimeric; Description No. 181-Description Heavy chain variable region, E26 variants; Description No. 182:Description Heavy chain variable region, human IgG1 subgroup III; Description No. 183-Description Heavy chain variable region, humanized, immunoglobulin; Description No. 184-Description Heavy Chain Variable Region, immunosuppressant; Description No. 185-Description Heavy chain variable region, immunoglobulin; Description No. 186-Description Heavy chain variable region, or mature/immunoglobulin; Description No. 187-Description heavy chain variable region, variant; Description No. 188-Description Heavy chain variable region, with peptide signal; Description No. 189-Description Heavy chain variable region-CDR1; Description No. 190-Description Heavy chain variable region-CDR2; Description No. 191-Description Heavy chain variable region-CDR3; Description No. 192-Description Heavy chain variable region-CH1; Description No. 193-Description Heavy chain variable, Antibody for allergic reaction peanuts; Description No. 194-Description Heavy chain variable, Antibody for psoriasis, graft-versus-host disease (prevention), acute kidney transplant rejection; Description No. 195-Description Heavy chain variable, Antibody for rheumatoid arthritis; Description No. 196-Description Heavy chain variable, Antibody for rheumatoid arthritis, lupus nephritis etc, multiple sclerosis; Description No. 197-Description Heavy chain variant; Description No. 198-Description Heavy chain V-D-J assignment; Description No. 199-Description Heavy chain wild-type; Description No. 200-Description Heavy Chain with Flag Tag; Description No. 201-Description Heavy chain with signal peptide; Description No. 202-Description Heavy chain, ANGPT2; Description No. 203-Description Heavy chain, Antibody for acute coronary syndrome, atherosclerosis; Description No. 204-Description Heavy chain, Antibody for allergic diseases; Description No. 205-Description Heavy chain, Antibody for allergic disorders; Description No. 206-Description Heavy chain, Antibody for Allograft rejection, intravenous steroid-refractory ulcerative colitis, kidney transplantation, psoriasis; Description No. 207-Description Heavy chain, Antibody for Allograft rejection, graft-versus-host disease; Description No. 208-Description Heavy chain, Antibody for asthma, rheumatoid arthritis, leukemia, inflammatory diseases; Description No. 209-Description Heavy Chain, Antibody for Crohn's disease and rheumatoid arthritis; Description No. 210-Description Heavy chain, Antibody for Crohn's disease, psoriasis, ankylosing spondylitis; Description No. 211-Description Heavy chain, Antibody for Crohn's disease, Psoriasis, Transplantation, Type 1 diabetes, Ulcerative colitis, Multiple sclerosis, Atherosclerosis; Description No. 212-Description Heavy chain, Antibody for diabetes mellitus type 1; Description No. 213-Description Heavy chain, Antibody for diabetes mellitus type 1, psoriasis; Description No. 214-Description Heavy chain, Antibody for diabetes, vascular disease, acne, cancer and psoriasis; Description No. 215-Description Heavy chain, Antibody for Idiopathic pulmonary fibrosis; Description No. 216-Description Heavy chain, Antibody for idiopathic pulmonary fibrosis, focal segmental glomerulosclerosis, cancer; Description No. 217-Description Heavy chain, Antibody for osteoporosis; Description No. 218-Description Heavy chain, Antibody for osteoporosis, Denosumab αOPGL-1; Description No. 219-Description Heavy Chain, Antibody for paroxysmal nocturnal hemoglobinuria; Description No. 220-Description Heavy Chain, Antibody for Plaque-type psoriasis; Description No. 221-Description Heavy chain, Antibody for prevention of organ transplant rejections; Description No. 222-Description Heavy chain, Antibody for psoriasis; Description No. 223-Description Heavy chain, Antibody for psoriasis, organ transplant immunological rejection suppression; Description No. 224-Description Heavy chain, Antibody for Psoriasis, rheumatoid arthritis; Description No. 225-Description Heavy chain, Antibody for Psoriasis, rheumatoid arthritis, sciatica, lumbar radicular pain; Description No. 226-Description Heavy chain, Antibody for psoriasis, Crohn's disease, multiple sclerosis; Description No. 227-Description Heavy chain, Antibody for Psoriatic arthritis; Description No, 228-Description Heavy chain, Antibody for rheumatic diseases; Description No. 229-Description Heavy chain, Antibody for rheumatoid arthritis; Description No, 230-Description Heavy chain, Antibody for Rheumatoid arthritis, disease-modifying anti-rheumatic drug; Description No. 231-Description Heavy chain, Antibody for Rheumatoid arthritis, Multiple sclerosis; Description No. 232-Description Heavy Chain, Antibody for rheumatoid arthritis, psoriatic arthritis, ankylosing spondylitis, Crohn's disease, ulcerative colitis, moderate to severe chronic psoriasis and juvenile idiopathic arthritis, D2E7; Description No. 233-Description Heavy chain, Antibody for Systemic lupus erythematosus; Description No. 234-Description Heavy Chain, Antibody for ulcerative colitis and Crohn's disease; Description No. 235-Description Heavy chain, Anti-EGFr; Description No. 236-Description Heavy chain, anti-IGFR Fab-hLIGHT; Description No. 237-Description Heavy chain, chimeric; Description No. 238-Description Heavy chain, fusion; Description No. 239-Description Heavy chain, human subgroup II; Description No. 240-Description Heavy chain, immunoglobulin; Description No. 241-Description Heavy Chain, immunosuppressant; Description No. 242-Description Heavy chain, immunosuppressive drug; Description No. 243-Description Heavy chain, Mus musculus; Description No. 244-Description Heavy chain, VEGFA; Description No. 245-Description Heavy chain-constant and variable region; Description No. 246-Description Heavy chain-constant region; Description No. 247-Description Heavy chain-constant region of Hu1D10-IgG1; Description No. 248-Description Heavy chain-variable region; Description No. 249-Description Heavy chain-variable region of Hu1d10-IgG2M3 or Hu1D10-IgG1; Description No. 250-Description Heavy CHIMERIC chain 1, immunosuppressant, Anti-CD25 antibody; Description No. 251-Description Heavy-chain-CDR1; Description No. 252-Description Heavy-chain-CDR2; Description No. 253-Description Heavy-chain-CDR3; Description No. 254-Description Herceptin Heavy chain variable region-CH1 (Heavy chain variable region(1-120)+CH1(121-218)); Description No. 255-Description H-GAMMA-1 (Heavy chain variable region(1-118)+CH1(119-216) HINGE-REGION(217-231)+CH2(232-341)+CH3(342-448)); Description No. 256-Description H-GAMMA-1 (Heavy chain variable region(1-120)+CH1(121-218)+HINGE-REGION(219-233) CH2(234-343) CH3(344-450); Description No. 257-Description H-GAMMA-1 (Heavy chain variable region(1-121)+CHI(122-219)+HINGE-REGION(220-220)1012(221-330)+CH3(331-437); Description No. 258-Description Hinge, CH2 and CH3 domain of IgG1; Description No. 259-Description huHMFG1-scFv; Description No. 260-Description HuLuc-63 Heavy chain variable CDR1; Description No. 261-Description HuLuc-63 Heavy chain variable CDR2; Description No. 262-Description HuLuc-63 Heavy chain variable CDR3; Description No. 263-Description HuLuc-63 Light chain variable CDR1; Description No. 264-Description HuLuc-63 Light chain variable CDR2; Description No. 265-Description HuLuc-63 Light chain variable CDR3; Description No. 266-Description human Heavy chain—constant region; Description No. 267-Description Human IgG2 hinge region; Description No. 268-Description Humanized Heavy chain variable region-CHI (Heavy chain variable region(1-121) CH1(122-219)); Description No. 269-Description Humanized Heavy chain variable region-CH1(Heavy chain variable region(1-121)+CH1(122-201); Description No. 270-Description Humanized Light chain-KAPPA (V-KAPPA(1-107)+C-KAPPA(108-211)); Description No. 271-Description Humanized Light chain-KAPPA (V-KAPPA(1-107)+C-KAPPA(108-214)); Description No. 272-Description Humanized L-KAPPA; Description No. 273-Description Human-mouse chimeric anti-CD20 Heavy chain 1; Description No. 274-Description Human-mouse chimeric anti-CD20 Light chain 1; Description No. 275-Description Ig gamma-1 chain C region; Description No. 276-Description Ig kappa constant region; Description No. 277-Description IGHG1 constant region; Description No. 278-Description immunosuppressive drug; Description No. 279-Description Isoleucine zipper; Description No. 280-Description Kappa constant region; Description No. 281-Description kappa light chain; Description No. 282-Description Kappa Light Chain—variable region; Description No. 283-Description Lambda light chain; Description No. 284-Description Light chain; Description No. 285-Description Light Chain—variable region; Description No. 286-Description Light Chain (Genetic Recombination), Antibody for paroxysmal nocturnal hemoglobinuria; Description No. 287-Description Light chain (L-KAPPA (V-KAPPA(1-107)+C4KAPPA(108-214)); Description No. 288-Description Light chain 1; Description No. 289-Description Light Chain 1, Antibody for immunosuppressant; Description No. 290-Description Light chain 1, Anti-HER2; Description No. 291-Description Light chain 2; Description No. 292-Description Light chain 3; Description No. 293-Description Light chain 4; Description No. 294-Description Light chain amino acid sequence humanized; Description No. 295-Description Light chain and lambda constant region; Description No. 296-Description Light chain antigen binding region; Description No, 297-Description Light chain CDR; Description No. 298-Description Light Chain CDR 1, immunosuppressant; Description No, 299-Description Light Chain CDR 2, immunosuppressant; Description No. 300-Description Light Chain CDR 3, immunosuppressant; Description No. 301-Description Light chain CDR grafted anti-IL-5; Description No. 302-Description Light chain CDR1; Description No. 303-Description Light Chain CDR1, Antibody for paroxysmal nocturnal hemoglobinuria; Description No. 304-Description Light chain CDR1, Antibody for rheumatoid arthritis; Description No. 305-Description Light Chain CDR1, immunosuppressant; Description No. 306-Description Light chain CDR2; Description No. 307-Description Light Chain CDR2, Antibody for paroxysmal nocturnal hemoglobinuria; Description No, 308-Description Light chain CDR2, Antibody for rheumatoid arthritis; Description No. 309-Description Light Chain CDR2, immunosuppressant; Description No, 310-Description Light chain CDR3; Description No. 311-Description Light Chain CDR3, Antibody for paroxysmal nocturnal hemoglobinuria; Description No. 312-Description Light chain CDR3, Antibody for rheumatoid arthritis; Description No. 313-Description Light Chain CDR3, immunosuppressant; Description No. 314-Description Light chain chimeric; Description No. 315-Description Light chain Ck; Description No, 316-Description Light chain consensus, hum KI, light kappa subgroup I; Description No. 317-Description Light chain constant region; Description No. 318-Description Light chain constant region kappa; Description No. 319-Description Light chain constant region of Hu1D10-IgG2M3 or Hu1D10-IgG1; Description No. 320-Description Light chain constant region, kappa; Description No. 321-Description Light chain constant region, lambda, human; Description No. 322-Description Light chain D; Description No. 323-Description Light chain E; Description No. 324-Description Light chain F; Description No. 325-Description Light chain humanized construct LI I; Description No. 326-Description Light chain humanized construct L13; Description No. 327-Description Light chain humanized construct L14; Description No. 328-Description Light chain humanized construct L15; Description No, 329-Description Light chain humanized construct L16; Description No. 330-Description Light chain humanized construct L17; Description No, 331-Description Light chain humanized construct L18; Description No. 332-Description Light chain humanized construct LG; Description No. 333-Description Light chain IgG4, immunomodulator; Description No. 334-Description Light chain immunoglobulin variable region; Description No. 335-Description Light chain immunoglobulin; Description No, 336-Description Light chain kappa; Description No. 337-Description Light chain Kappa, Antibody for allergic reaction peanuts; Description No. 338-Description Light chain kappa consensus framework, human; Description No. 339-Description Light chain kappa consensus sequence; Description No. 340-Description Light chain kappa constant; Description No. 341-Description Light chain kappa constant region; Description No. 342-Description Light chain kappa sequence; Description No. 343-Description Light chain kappa variable region; Description No. 344-Description Light chain leader and variable region of the murine anti4G1F-I receptor antibody; Description No. 345-Description Light chain mature; Description No. 346-Description Light chain mature fragment; Description No. 347-Description Light chain mature immunoglobulin; Description No. 348-Description Light chain mature protein, Antibody for rheumatic diseases; Description No, 349-Description Light chain mature variable region; Description No. 350-Description Light chain of huAbF46414-A1(H36Y) and human kappa constant region; Description No. 351:Description Light chain polypeptide; Description No. 352-Description Light chain protein; Description No. 353-Description Light chain sequence; Description No. 354-Description Light chain used in humanization; Description No. 355-Description Light chain variable and constant chain; Description No. 356-Description Light chain variable domain of anti-alpha2-integrin; Description No, 357-Description Light chain variable domain of anti-alpha2-integrin mAb; Description No. 358-Description Light Chain Variable Domain, Antibody for rheumatoid arthritis, psoriatic arthritis, ankylosing spondylitis, Crohn's disease, ulcerative colitis, moderate to severe chronic psoriasis and juvenile idiopathic arthritis, D2E7; Description No. 359-Description Light chain variable domain, immunosuppressant for lupus; Description No. 360-Description Light chain variable kappa; Description No. 361-Description Light chain variable kappa, Amino acid sequence encoded by the VK gene; Description No. 362-Description Light chain variable of scFv, immunosuppressant for lupus; Description No. 363-Description Light chain variable region; Description No. 364-Description Light chain variable region; Description No, 365-Description light chain variable region (excludes the light chain variable region sequence of the ErbB3 binding site of 16F); Description No. 366-Description light chain variable region (excludes the light chain variable region sequence of the IGF-1R binding site of 16F); Description No. 367-Description light chain variable region (V_{L}); Description No. 368-Description Light chain variable region 1; Description No. 369-Description Light chain variable region 2; Description No. 370-Description Light chain variable region and human IgG1 constant region; Description No. 371-Description light chain variable region and light chain; Description No. 372-Description Light chain variable region consensus framework; Description No. 373-Description Light chain variable region domain (as translated) listed in U.S. Pat. No. 5,736,137; Description No. 374-Description Light chain variable region domain chain 1, Anti-IgE antibody; Description No. 375-Description Light chain variable region domain listed in U.S. Pat. No. 5,736,137 (with signal sequence removed); Description No. 376-Description Light chain variable region domain, Antibody for Fibrotic diseases, scarring, diffuse scleroderma; Description No. 377-Description light chain variable region dual variable domain; Description No. 378-Description Light chain variable region humanized construct L11; Description No. 379-Description Light chain variable region humanized construct L13; Description No. 380-Description Light chain variable region humanized construct L14; Description No. 381-Description Light chain variable region humanized construct L15; Description No. 382-Description Light chain variable region humanized construct L16; Description No. 383-Description Light chain variable region humanized construct LI 7; Description No. 384-Description Light chain variable region humanized construct L18; Description No. 385-Description Light chain variable region humanized construct L6; Description No. 386-Description Light chain variable region kappa; Description No. 387-Description Light chain variable region of Hu1D10-IgG2M3 or Hu1D10-IgG1; Description No. 388-Description Light chain variable region variant; Description No. 389-Description Light chain variable region with predicted signal; Description No. 390-Description Light chain variable region without predicted signal; Description No. 391-Description Light chain variable region without signal sequence; Description No. 392-Description Light chain variable region, Antibody for acute coronary syndrome, atherosclerosis; Description No. 393-Description Light chain variable region, Antibody for allograft rejection; Description No. 394-Description Light Chain Variable Region, Antibody for chronic plaque psoriasis; Description No. 395-Description Light chain variable region, Antibody for idiopathic pulmonary fibrosis, focal segmental glomerulosclerosis, cancer; Description No. 396-Description Light chain variable region, Antibody for Neuromyelitis optica and NMO Spectrum Disorder; Description No. 397-Description Light Chain Variable Region, Antibody for osteoporosis; Description No. 398-Description Light chain variable region, Antibody for psoriasis (blocks T-cell migration); Description No. 399-Description Light chain variable region, Antibody for Pulmonary Fibrosis; Description No. 400-Description Light chain variable region, Antibody for rheumatoid arthritis; Description No. 401-Description Light chain variable region, camelid derived; Description No. 402-Description Light chain variable region, chimeric; Description No. 403-Description Light chain variable region, Chimeric antigen receptor with cd19Binding domain; Description No. 404-Description Light chain variable region, E26 variants; Description No. 405-Description Light chain variable region, Human kappa; Description No. 406-Description Light chain variable region, humanized; Description No. 407-Description Light chain variable region, humanized, immunoglobulin; Description No. 408-Description Light Chain Variable Region, immunosuppressant; Description No. 409-Description Light chain variable region, immunoglobulin; Description No. 410-Description Light chain variable region, or mature/immunoglobulin; Description No. 411-Description light chain variable region, variant; Description No. 412-Description Light chain variable region; Light chain C; Description No. 413-Description Light chain variable region; Light chain D; Description No. 414-Description Light chain variable region; Light chain E; Description No. 415-Description Light chain variable region; Light chain F; Description No. 416-Description Light chain variable region-CDR1 From U.S. Pat. No. 8,557,243; Description No. 417-Description Light chain variable region-CDR2 From U.S. Pat. No. 8,557,243; Description No. 418-Description Light chain variable region-CDR3 From U.S. Pat. No. 8,557,243; Description No. 419-Description Light chain variable, Antibody for psoriasis, graft-versus-host disease (prevention), acute kidney transplant rejection; Description No. 420-Description Light chain variable, Antibody for rheumatoid arthritis; Description No. 421-Description Light chain variable, Antibody for rheumatoid arthritis, lupus nephritis etc, multiple sclerosis; Description No. 422-Description Light chain variant; Description No. 423-Description Light chain V-J assignment; Description No. 424-Description Light chain wild-type; Description No. 425-Description Light chain with signal peptide; Description No. 426-Description Light chain, 71F10Fab-hLIGHT fusion; Description No. 427-Description Light chain, ANGPT2; Description No. 428-Description Light chain, Antibody for acute coronary syndrome, atherosclerosis; Description No. 429-Description Light chain, Antibody for allergic diseases; Description No. 430-Description Light chain, Antibody for allergic disorders; Description No. 431-Description Light chain, Antibody for Allograft rejection, intravenous steroid-refractory ulcerative colitis, kidney transplantation, psoriasis; Description No. 432-Description Light chain, Antibody for Allograft rejection, graft-versus-host disease; Description No. 433-Description Light chain, Antibody for asthma, rheumatoid arthritis, leukemia, inflammatory diseases; Description No. 434-Description Light Chain, Antibody for Crohn's disease and rheumatoid arthritis; Description No. 435-Description Light chain, Antibody for Crohn's disease, psoriasis, ankylosing spondylitis; Description No. 436-Description Light chain, Antibody for Crohn's disease, Psoriasis, Transplantation, Type I diabetes, Ulcerative colitis, Multiple sclerosis, Atherosclerosis; Description No. 437-Description Light chain, Antibody for diabetes mellitus type 1, psoriasis; Description No. 438-Description Light chain, Antibody for diabetes mellitus type 2; Description No. 439-Description Light chain, Antibody for diabetes, vascular disease, acne, cancer and psoriasis; Description No. 440-Description Light chain, Antibody for Idiopathic pulmonary fibrosis; Description No. 441-Description Light chain, Antibody for idiopathic pulmonary fibrosis, focal segmental glomerulosclerosis, cancer; Description No. 442-Description Light chain, Antibody for osteoporosis; Description No. 443-Description Light chain, Antibody for osteoporosis, Denosumab αOPGL-1; Description No, 444-Description Light Chain, Antibody for paroxysmal nocturnal hemoglobinuria; Description No. 445-Description Light Chain, Antibody for Plaque-type psoriasis; Description No. 446-Description Light chain, Antibody for prevention of organ transplant rejections; Description No. 447-Description Light chain, Antibody for psoriasis; Description No. 448-Description Light chain, Antibody for psoriasis, organ transplant immunological rejection suppression; Description No. 449-Description Light chain, Antibody for Psoriasis, rheumatoid arthritis; Description No. 450-Description Light chain, Antibody for Psoriatic arthritis; Description No. 451-Description Light chain, Antibody for rheumatic diseases; Description No. 452-Description Light chain, Antibody for rheumatoid arthritis; Description No, 453-Description Light chain, Antibody for Rheumatoid arthritis, disease-modifying anti-rheumatic drug; Description No. 454-Description Light chain, Antibody for Rheumatoid arthritis, Multiple sclerosis; Description No, 455-Description Light Chain, Antibody for rheumatoid arthritis, psoriatic arthritis, ankylosing spondylitis, Crohn's disease, ulcerative colitis, moderate to severe chronic psoriasis and juvenile idiopathic arthritis, D2E7; Description No. 456-Description Light chain, Antibody for Systemic lupus erythematosus; Description No. 457-Description Light Chain, Antibody for ulcerative colitis and Crohn's disease; Description No. 458-Description Light chain, anti-CD23 Fab-hLIGHT fusion; Description No. 459-Description Light chain, chimeric; Description No. 460-Description Light chain, Chimeric (anti-alpha2-VL-IGKC-CL); Description No. 461-Description Light chain, human subgroup; Description No. 462-Description Light Chain, immunosuppressant; Description No. 463-Description Light chain, immunosuppressive drug; Description No. 464-Description Light chain, kappa constant; Lambda chain constant region; Description No. 465-Description Light chain, lambda constant; Description No. 466-Description Light chain, lambda human Ig; Description No. 467:Description Light chain, Mus musculus; Description No, 468-Description Light chain, VEGFA; Description No. 469-Description Light chain-variable region; Description No. 470-Description Light CHIMERIC chain 1, immunosuppressant, Anti-CD25 antibody; Description No. 471-Description L-KAPPA (V-KAPPA(1-107)+C-KAPPA(108-214)); Description No. 472-Description MAb17-1A gamma; Description No. 473-Description MAb17-1A kappa; Description No. 474-Description Mouse Anti-CD20 Heavy chain; Description No. 475-Description Mouse Anti-CD20 Light chain; Description No. 476-Description Nanobody; Description No. 477-Description Polypeptide; Description No. 478-Description polypeptide, Antibody for thrombotic thrombocytopenic purpura, acute coronary syndrome; Description No. 479-Description Scf Light chain variable region-Heavy; Description No. 480-Description ScFv; Description No. 481-Description scFv fusion protein; Description No. 482-Description Scfv Heavy-Light; Description No. 483-Description scFv immunosuppressant for lupus; Description No. 484-Description scFv, Antibody for allergic reaction peanuts; Description No. 485-Description ScFv, BHA10 ScFvs with S46L(V_{L}) stabilizing mutation; Description No. 486-Description ScFv, BHA10 ScFvs with V55G(V_{L}) stabilizing mutation; Description No. 487-Description Scfv, Chimeric antigen receptor with cd19Binding domain; Description No. 488-Description scFv-CH chain; Description No. 489-Description SEA/E-120; Description No. 490-Description secretory signal sequence of Heavy chain; Description No. 491-Description Single chain; Description No. 492-Description Single chain antibody; Description No. 493-Description Single chain scFv; Description No. 494-Description single chain variable fragment; Description No. 495-Description single chain variable fragment (scFv); Description No. 496-Description single chain variable region; Description No. 497-Description Single heavy chain variable domain; Description No. 498-Description Single variable domain antibody; Description No. 499-Description Single-chain fusion peptide; Description No. 500-Description single-domain; Description No. 501-Description single-domain antibody (dAb); Description No. 502-Description single-domain antibody (sdAb); Description No. 503-Description Small modular immunopharmaceutical (smip) polypeptide; Description No. 504-Description Variable domain antibody; Description No. 505-Description Variable region; Description No. 506-Description variant Fc region; Description No. 507-Description VH-VL; and Description No. 508-Description VL-VH.

[0378] In some embodiments, the payload region of the viral particle comprises one or more nucleic acid sequences encoding Pfiliximab, a fragment or variant thereof. As a non-limiting example, the payload region of the viral particle comprises one or more nucleic acid sequences encoding Pfiliximab may be used to treat, prevent and/or reduce the effects of multiple sclerosis. As another non-limiting example, the payload region of the viral particle comprises one or more nucleic acid sequences encoding Priliximab, a fragment or variant thereof may be used to treat, prevent and/or reduce the effects of Crohns Disease,

[0379] In some embodiments, the payload region of the viral particle comprises one or more nucleic acid sequences encoding Rovelizumab, a fragment or variant thereof. As a non-limiting example, the payload region of the viral particle comprises one or more nucleic acid sequences encoding Rovelizumab, a fragment or variant thereof may be used to treat, prevent and/or reduce the effects of multiple sclerosis.

[0380] In some embodiments, the payload region of the viral particle comprises one or more nucleic acid sequences encoding Nerelimomab, a fragment or variant thereof. As a non-limiting example, the payload region of the viral particle comprises one or more nucleic acid sequences encoding Nerelimomab, a fragment or variant thereof may be used as an immunosuppressant.

[0381] In some embodiments, the payload region of the viral particle comprises one or more nucleic acid sequences encoding BAYX1351, a fragment or variant thereof. As a non-limiting example, the payload region of the viral particle comprises one or more nucleic acid sequences encoding BAYX1351, a fragment or variant thereof may be used as an immunosuppressant.

[0382] In some embodiments, the payload region of the viral particle comprises one or more nucleic acid sequences encoding Clenoliximab (also known as CE9γ4PE, MEC-151 and PRIMATIZED®), a fragment or variant thereof. As a non-limiting example, the payload region of the viral particle comprises one or more nucleic acid sequences encoding Clenoliximab (also known as CE9γ4PE, IDEC-151 and PRIMATIZED®), a fragment or variant thereof may be used to treat, prevent or reduce the effects of rheumatoid arthritis and/or asthma. As a non-limiting example, the payload region of the viral particle comprises one or more nucleic acid sequences encoding the heavy chain of Clenoliximab (also known as CE9γ4PE, IDEC-151 and PRIMATIZED®), a fragment or variant thereof may be used to treat, prevent or reduce the effects of rheumatoid arthritis and/or asthma. As a non-limiting example, the payload region of the viral particle comprises one or more nucleic acid sequences encoding the light chain of Clenoliximab (also known as CE9γ4PE, IDEC-151 and PRIMATIZED®), a fragment or variant thereof may be used to treat, prevent or reduce the effects of rheumatoid arthritis and/or asthma. As a non-limiting example, the payload region of the viral particle comprises one or more nucleic acid sequences encoding the heavy chain of Clenoliximab (also known as CE9γ4PE, IDEC-151 and PRIMATIZED®) as described in U.S. Pat. No. 6,136,310 as SEQ ID NO: 11 (the contents of which are herein incorporated by reference in its entirety), a fragment or variant thereof may be used to treat, prevent or reduce the effects of rheumatoid arthritis and/or asthma. As a non-limiting example, the payload region of the viral particle comprises one or more nucleic acid sequences encoding the light chain of Clenoliximab (also known as CE974PE, IDEC-151 and PRIMATIZED®) as described in U.S. Pat. No. 6,136,310 as SEC) ID NO: 5 (the contents of which are herein incorporated by reference in its entirety), a fragment or variant thereof may be used to treat, prevent or reduce the effects of rheumatoid arthritis and/or asthma.

[0383] In some embodiments, the payload region of the viral particle comprises one or more nucleic acid sequences encoding Maslimomab, a fragment or variant thereof. As a non-limiting example, the payload region of the viral particle comprises one or more nucleic acid sequences encoding Maslimomab, a fragment or variant thereof may be used as an immunosuppressant.

[0384] In some embodiments, the payload region of the viral particle comprises one or more nucleic acid sequences encoding Atorolimumab (also known as P3x22914G4), a fragment or variant thereof. As a non-limiting example, the payload region of the viral particle comprises one or more nucleic acid sequences encoding Atorolimumab (also known as P3x22914G4), a fragment or variant thereof may be used as an immunosuppressant.

[0385] In some embodiments, the payload region of the viral particle comprises one or more nucleic acid sequences encoding Vapaliximab (also known as 2D10), a fragment or variant thereof. As a non-limiting example, the payload region of the viral particle comprises one or more nucleic acid sequences encoding Vapaliximab (also known as 2D10), a fragment or valiant thereof may be used as an immunosuppressant.

[0386] In some embodiments, the payload region of the viral particle comprises one or more nucleic acid sequences encoding Ziralimumab (also known as ABX-RB2, cem2.6), a fragment or variant thereof. As a non-limiting example, the payload region of the viral particle comprises one or more nucleic acid sequences encoding Ziralimumab (also known as ABX-RB2, cem2.6), a fragment or variant thereof may be used to treat, prevent and/or reduce the effects of cancer, inflammation and/or immune system disorders.

[0387] In some embodiments, the payload region of the viral particle comprises one or more nucleic acid sequences encoding Zolimomab aritox (also known as H65-ricin A chain immunotoxin and H65-RTA), a fragment or variant thereof. As a non-limiting example, the payload region of the viral particle comprises one or more nucleic acid sequences encoding Zolimomab aritox (also known as H65-ricin A chain immunotoxin and E165-RTA), a fragment or variant thereof may be used to treat, prevent or reduce the effects of systemic lupus erythematosus, graft-versus-host disease and/or cutaneous T cell lymphoma.

[0388] In some embodiments, the payload region of the viral particle comprises one or more nucleic acid sequences encoding Zanolimumab (also known as HuMax-CD4), a fragment or variant thereof. As a non-limiting example, the payload region of the viral particle comprises one or more nucleic acid sequences encoding Zanolimumab (also known as HuMax-CD4), a fragment or variant thereof may be used to treat, prevent or reduce the effects of rheumatoid arthritis, psoriasis and/or T-cell lymphoma.

[0389] In some embodiments, the payload region of the viral particle comprises one or more nucleic acid sequences encoding Bertilimumab (also known as CA17-213), a fragment or variant thereof. As a non-limiting example, the payload region of the viral particle comprises one or more nucleic acid sequences encoding Bertilimumab (also known as CA717-213), a fragment or variant thereof may be used to treat, prevent or reduce the effects of allergies.

[0390] In some embodiments, the payload region of the viral particle comprises one or more nucleic acid sequences encoding Pascolizumab (also known as SB-240683), a fragment or variant thereof. As a non-limiting example, the payload region of the viral particle comprises one or more nucleic acid sequences encoding Pascolizumab (also known as SB-240683), a fragment or variant thereof may be used to treat, prevent or reduce the effects of allergies.

[0391] In some embodiments, the payload region of the viral particle comprises one or more nucleic acid sequences encoding Odulimomab (also known as afolimomab, anti-LF A1 and ANTILFA), a fragment or variant thereof. As a non-limiting example, the payload region of the viral particle comprises one or more nucleic acid sequences encoding Odulimomab (also known as afolimomab, anti-LFA1 and ANTILFA), a fragment or variant thereof may be used to treat, prevent or reduce the effects of allograft rejection.

[0392] In some embodiments, the payload region of the viral particle comprises one or more nucleic acid sequences encoding Enlimomab pegol, a fragment or variant thereof. As a non-limiting example, the payload region of the viral particle comprises one or more nucleic acid sequences encoding Enlimomab pegol, a fragment or variant thereof may be used to treat, prevent or reduce the effects of renal transplant rejection.

[0393] In some embodiments, the payload region of the viral particle comprises a nucleic acid sequence encoding an antibody or a fragment thereof as described in United States Publication Nos. US20130122003, US20150056211, US20160069US20150056211, US20160069894 or U.S. Pat. No. 7,524,496. In a non-limiting example, the antibody targets IL-6. In another non-limiting example, the antibody targets EGF.

### Migraine and Pain Antibodies

[0394] In some embodiments, the payload region of the viral particle comprises one or more nucleic acid sequences encoding one or more of the migraine and pain payload antibody polypeptides listed in Table 10 (MP1-MP564; SEQ ID NO: 19666-20229).

TABLE 10
Migraine and Pain Antibodies

| Antibody No. | Target | Description | Antibody Name | Reference Information | SEQ ID NO |
|---|---|---|---|---|---|
| MP1 | CGRP | Heavy chain | G1, cluster | U.S. Pat. No. 9,115,194 | 19666 |
| | | | headache | SEQ ID NO: 11 | |
| MP2 | CGRP | Heavy chain | 10E4 | U.S. Pat. No. 9,102,731 | 19667 |
| | | | | SEQ ID NO: 36 | |
| MP3 | CGRP | Heavy chain | 11H9 | U.S. Pat. No. 9,102,731 | 19668 |
| | | | | SEQ ID NO: 38 | |
| MP4 | CGRP | Heavy chain | 12G8 HIL | U.S. Pat. No. 9,102,731 | 19669 |
| | | | | SEQ ID NO: 39 | |
| MP5 | CGRP | Heavy chain | 13H2 | U.S. Pat. No. 9,102,731 | 19670 |
| | | | | SEQ ID NO: 40 | |
| MP6 | CGRP | Heavy chain | 32H7 | U.S. Pat. No. 9,102,731 | 19671 |
| | | | | SEQ ID NO: 41 | |
| MP7 | CGRP | Heavy chain | A | US20120294802 | 19672 |
| | | | | SEQ ID NO: 3 | |
| MP8 | CGRP | Heavy chain | Ab1 | US20120294802 | 19673 |
| | | | | SEQ ID NO: 4 | |
| MP9 | CGRP | Heavy chain | Ab10 | US20120294802 | 19674 |
| | | | | SEQ ID NO: 94 | |
| MP10 | CGRP | Heavy chain | Ab11 | US20120294802 | 19675 |
| | | | | SEQ ID NO: 104 | |
| MP11 | CGRP | Heavy chain | Ab12 | US20120294802 | 19676 |
| | | | | SEQ ID NO: 114 | |
| MP12 | CGRP | Heavy chain | Ab13 | US20120294802 | 19677 |
| | | | | SEQ ID NO: 124 | |
| MP13 | CGRP | Heavy chain | 02E7 | U.S. Pat. No. 9,102,731 | 19678 |
| | | | | SEQ ID NO: 31 | |
| MP14 | CGRP | Heavy chain | Ab14 | US20120294802 | 19679 |
| | | | | SEQ ID NO: 134 | |
| MP15 | CGRP | Heavy chain | Ab2 | US20120294802 | 19680 |
| | | | | SEQ ID NO: 14 | |
| MP16 | CGRP | Heavy chain | Ab3 | US20120294802 | 19681 |
| | | | | SEQ ID NO: 24 | |
| MP17 | CGRP | Heavy chain | Ab4 | US20120294802 | 19682 |
| | | | | SEQ ID NO: 34 | |
| MP18 | CGRP | Heavy chain | Ab5 | US20120294802 | 19683 |
| | | | | SEQ ID NO: 44 | |
| MP19 | CGRP | Heavy chain | Ab6 | US20120294802 | 19684 |
| | | | | SEQ ID NO: 54 | |
| MP20 | CGRP | Heavy chain | Ab7 | US20120294802 | 19685 |
| | | | | SEQ ID NO: 64 | |
| MP21 | CGRP | Heavy chain | Ab8 | US20120294802 | 19686 |
| | | | | SEQ ID NO: 74 | |
| MP22 | CGRP | Heavy chain | Ab9 | US20120294802 | 19687 |
| | | | | SEQ ID NO: 84 | |
| MP23 | CGRP | Heavy chain | B | US20120294802 | 19688 |
| | | | | SEQ ID NO: 13 | |
| MP24 | CGRP | Heavy chain | 01E11/04E4/09D4 | U.S. Pat. No. 9,102,731 | 19689 |
| | | | | SEQ ID NO: 29 | |
| MP25 | CGRP | Heavy chain | C | US20120294802 | 19690 |
| | | | | SEQ ID NO: 23 | |
| MP26 | CGRP | Heavy chain | D | US20120294802 | 19691 |
| | | | | SEQ ID NO: 33 | |
| MP27 | CGRP | Heavy chain | E | US20120294802 | 19692 |
| | | | | SEQ ID NO: 43 | |
| MP28 | CGRP | Heavy chain | F | US20120294802 | 19693 |
| | | | | SEQ ID NO: 53 | |
| MP29 | CGRP | Heavy chain | G | US20120294802 | 19694 |
| | | | | SEQ ID NO: 63 | |
| MP30 | CGRP | Heavy chain | H | US20120294802 | 19695 |
| | | | | SEQ ID NO: 73 | |
| MP31 | CGRP | Heavy chain | I | US20120294802 | 19696 |
| | | | | SEQ ID NO: 83 | |
| MP32 | CGRP | Heavy chain | J | US20120294802 | 19697 |
| | | | | SEQ ID NO: 93 | |
| MP33 | CGRP | Heavy chain | K | US20120294802 | 19698 |
| | | | | SEQ ID NO: 103 | |
| MP34 | CGRP | Heavy chain | L | US20120294802 | 19699 |
| | | | | SEQ ID NO: 113 | |
| MP35 | CGRP | Heavy chain | 01H7 | U.S. Pat. No. 9,102,731 | 19700 |
| | | | | SEQ ID NO: 30 | |
| MP36 | CGRP | Heavy chain | M | US20120294802 | 19701 |
| | | | | SEQ ID NO: 123 | |
| MP37 | CGRP | Heavy chain | N | US20120294802 | 19702 |
| | | | | SEQ ID NO: 133 | |
| MP38 | CGRP | Heavy chain | 03B6 | U.S. Pat. No. 9,102,731 | 19703 |
| | | | | SEQ ID NO: 32 | |
| MP39 | CGRP | Heavy chain | 03C8/05F5/12E8 | U.S. Pat. No. 9,102,731 | 19704 |
| | | | | SEQ ID NO: 33 | |
| MP40 | CGRP | Heavy chain | 04H6 | U.S. Pat. No. 9,102,731 | 19705 |
| | | | | SEQ ID NO: 34 | |
| MP41 | CGRP | Heavy chain | 09F5 | U.S. Pat. No. 9,102,731 | 19706 |
| | | | | SEQ ID NO: 35 | |
| MP42 | CGRP | Heavy chain | 11D11 | U.S. Pat. No. 9,102,731 | 19707 |
| | | | | SEQ ID NO: 37 | |
| MP43 | TrkA | Heavy chain | BXhVH1 | WO2009098238 | 19708 |
| | | | | SEQ ID NO: 1 | |
| MP44 | TrkA | Heavy chain | BXhVH2 | WO2009098238 | 19709 |
| | | | | SEQ ID NO: 2 | |
| MP45 | TrkA | Heavy chain | BXhVH3 | WO2009098238 | 19710 |
| | | | | SEQ ID NO: 3 | |
| MP46 | TrkA | Heavy chain | BXhVH4 | WO2009098238 | 19711 |
| | | | | SEQ ID NO: 4 | |
| MP47 | TrkA | Heavy chain | BXhVH5 | WO2009098238 | 19712 |
| | | | | SEQ ID NO: 5 | |
| MP48 | TrkA | Heavy chain | BXhVH5VL1 | US20150183885 | 19713 |
| | | | | SEQ ID NO: 28 | |
| MP49 | TrkA | Heavy chain | GBR | US20150183885 | 19714 |
| | | | VH5(G42E)VL1 | SEQ ID NO: 53 | |
| MP50 | TrkA | Heavy chain | GBR | US20150183885 | 19715 |
| | | | VH5(K3Q)VL1 | SEQ ID NO: 50 | |
| MP51 | TrkA | Heavy chain | GBR | US20150183885 | 19716 |
| | | | VH5(K3Q, | SEQ ID NO: 61 | |
| | | | A49S, | | |
| | | | Y50A)VL1 | | |
| MP52 | TrkA | Heavy chain | GBR | US20150183885 | 19717 |
| | | | VH5(K3Q, | SEQ ID NO: 66 | |
| | | | A49S, | | |
| | | | Y50A, P60A, | | |
| | | | T62S)VL1 | | |
| MP53 | TrkA | Heavy chain | GBR | US20150183885 | 19718 |
| | | | VH5(K3Q, | SEQ ID NO: 62 | |
| | | | P60A, | | |
| | | | T62S)VL1 | | |
| MP54 | TrkA | Heavy chain | GBR | US20150183885 | 19719 |
| | | | VH5(K3Q, | SEQ ID NO: 58 | |
| | | | T40A)VL1 | | |
| MP55 | TrkA | Heavy chain | GBR | US20150183885 | 19720 |
| | | | VH5(K3Q, | SEQ ID NO: 63 | |
| | | | T40A, | | |
| | | | P60A, T62S)VL1 | | |
| MP56 | TrkA | Heavy chain | GBR | US20150183885 | 19721 |
| | | | VH5(K3Q, | SEQ ID NO: 67 | |
| | | | T40A, R44G, | | |
| | | | A49S, Y50A, | | |
| | | | P60A, | | |
| | | | T62S)VL1 | | |
| MP57 | TrkA | Heavy chain | GBR | US20150183885 | 19722 |
| | | | VH5(K3Q, | SEQ ID NO: 68 | |
| | | | T40A, R44G, | | |
| | | | A49S, Y50A, | | |
| | | | P60A, T62S, | | |
| | | | R94K)VL1 | | |
| MP58 | TrkA | Heavy chain | GBR | US20150183885 | 19723 |
| | | | VH5(K3Q, | SEQ ID NO: 65 | |
| | | | T40A, | | |
| | | | R44G, A49S, | | |
| | | | Y50A)VL1 | | |
| MP59 | TrkA | Heavy chain | GBR | US20150183885 | 19724 |
| | | | VH5(K3Q, | SEQ ID NO: 56 | |
| | | | V37A(VL1 | | |
| MP60 | TrkA | Heavy chain | GBR | US20150183885 | 19725 |
| | | | VH5(K3Q, | SEQ ID NO: 57 | |
| | | | V37A)VL1(*) | | |
| MP61 | TrkA | Heavy chain | GBR | US20150183885 | 19726 |
| | | | VH5(K3Q, | SEQ ID NO: 60 | |
| | | | V37A, | | |
| | | | R44G)VL1 | | |
| MP62 | TrkA | Heavy chain | GBR | US20150183885 | 19727 |
| | | | VH5(K3Q, | SEQ ID NO: 64 | |
| | | | V37A, | | |
| | | | T40A, P60A, | | |
| | | | T62S)VL1 | | |
| MP63 | TrkA | Heavy chain | GBR | US20150183885 | 19728 |
| | | | VH5(P60A, | SEQ ID NO: 59 | |
| | | | T62S)VL1 | | |
| MP64 | TrkA | Heavy chain | GBR | US20150183885 | 19729 |
| | | | VH5(R94K)VL1 | SEQ ID NO: 55 | |
| MP65 | TrkA | Heavy chain | GBR | US20150183885 | 19730 |
| | | | VH5(V37A)VL1 | SEQ ID NO: 51 | |
| MP66 | TrkA | Heavy chain | GBR | US20150183885 | 19731 |
| | | | VH5(V37A)VL1(*) | SEQ ID NO: 52 | |
| MP67 | TrkA | Heavy chain | GBR | US20150183885 | 19732 |
| | | | VH5(V89L)VL1 | SEQ ID NO: 54 | |
| MP68 | TrkA | Heavy chain | HUVHWOV | WO2009098238 | 19733 |
| | | | | SEQ ID NO: 6 | |
| MP69 | TrkA | Heavy chain | mVHEP | WO2009098238 | 19734 |
| | | | | SEQ ID NO: 15 | |
| MP70 | GFRα3 | Heavy chain | H1M2236N | U.S. Pat. No. 8,968,736 | 19735 |
| | | variable region | | SEQ ID NO: 397 | |
| MP71 | GFRα3 | Heavy chain | H1M2243N | U.S. Pat. No. 8,968,736 | 19736 |
| | | variable region | | SEQ ID NO: 381 | |
| MP72 | GFRα3 | Heavy chain | H4H2207N | U.S. Pat. No. 8,968,736 | 19737 |
| | | variable region | | SEQ ID NO: 2 | |
| MP73 | GFRα3 | Heavy chain | H4H2210N | U.S. Pat. No. 8,968,736 | 19738 |
| | | variable region | | SEQ ID NO: 66 | |
| MP74 | GFRα3 | Heavy chain | H4H2212N | U.S. Pat. No. 8,968,736 | 19739 |
| | | variable region | | SEQ ID NO: 18 | |
| MP75 | GFRα3 | Heavy chain | H4H2234N | U.S. Pat. No. 8,968,736 | 19740 |
| | | variable region | | SEQ ID NO: 82 | |
| MP76 | GFRα3 | Heavy chain | H4H2236N3 | U.S. Pat. No. 8,968,736 | 19741 |
| | | variable region | | SEQ ID NO: 34 | |
| MP77 | GFRα3 | Heavy chain | H4H2243N2 | U.S. Pat. No. 8,968,736 | 19742 |
| | | variable region | | SEQ ID NO: 50 | |
| MP78 | GFRα3 | Heavy chain | H4H2291S | U.S. Pat. No. 8,968,736 | 19743 |
| | | variable region | | SEQ ID NO: 98 | |
| MP79 | GFRα3 | Heavy chain | H4H2292S | U.S. Pat. No. 8,968,736 | 19744 |
| | | variable region | | SEQ ID NO: 114 | |
| MP80 | GFRα3 | Heavy chain | H4H2293P | U.S. Pat. No. 8,968,736 | 19745 |
| | | variable region | | SEQ ID NO: 130 | |
| MP81 | GFRα3 | Heavy chain | H4H2294S | U.S. Pat. No. 8,968,736 | 19746 |
| | | variable region | | SEQ ID NO: 146 | |
| MP82 | GFRα3 | Heavy chain | H4H2295S | U.S. Pat. No. 8,968,736 | 19747 |
| | | variable region | | SEQ ID NO: 162 | |
| MP83 | GFRα3 | Heavy chain | H4H2296S | U.S. Pat. No. 8,968,736 | 19748 |
| | | variable region | | SEQ ID NO: 178 | |
| MP84 | GFRα3 | Heavy chain | H4H2341S | U.S. Pat. No. 8,968,736 | 19749 |
| | | variable region | | SEQ ID NO: 194 | |
| MP85 | GFRα3 | Heavy chain | H4H2342P | U.S. Pat. No. 8,968,736 | 19750 |
| | | variable region | | SEQ ID NO: 210 | |
| MP86 | GFRα3 | Heavy chain | H4H2344S | U.S. Pat. No. 8,968,736 | 19751 |
| | | variable region | | SEQ ID NO: 226 | |
| MP87 | GFRα3 | Heavy chain | H4H2345S | U.S. Pat. No. 8,968,736 | 19752 |
| | | variable region | | SEQ ID NO: 242 | |
| MP88 | GFRα3 | Heavy chain | H4H2346S | U.S. Pat. No. 8,968,736 | 19753 |
| | | variable region | | SEQ ID NO: 258 | |
| MP89 | GFRα3 | Heavy chain | H4H2352S | U.S. Pat. No. 8,968,736 | 19754 |
| | | variable region | | SEQ ID NO: 290 | |
| MP90 | GFRα3 | Heavy chain | H4H2354S | U.S. Pat. No. 8,968,736 | 19755 |
| | | variable region | | SEQ ID NO: 306 | |
| MP91 | GFRα3 | Heavy chain | H4H2355S | U.S. Pat. No. 8,968,736 | 19756 |
| | | variable region | | SEQ ID NO: 322 | |
| MP92 | GFRα3 | Heavy chain | H4H2357S | U.S. Pat. No. 8,968,736 | 19757 |
| | | variable region | | SEQ ID NO: 338 | |
| MP93 | GFRα3 | Heavy chain | H4H2364S | U.S. Pat. No. 8,968,736 | 19758 |
| | | variable region | | SEQ ID NO: 354 | |
| MP94 | hNav1.7 | Heavy chain | H1H1015B | WO2014159595 | 19759 |
| | | variable region | | SEQ ID NO: 126 | |
| MP95 | hNav1.7 | Heavy chain | H1H1019B | WO2014159595 | 19760 |
| | | variable region | | SEQ ID NO: 110 | |
| MP96 | hNav1.7 | Heavy chain | H1H1021B | WO2014159595 | 19761 |
| | | variable region | | SEQ ID NO: 428 | |
| MP97 | hNav1.7 | Heavy chain | H1H1022B | WO2014159595 | 19762 |
| | | variable region | | SEQ ID NO: 130 | |
| MP98 | hNav1.7 | Heavy chain | H1H1023B | WO2014159595 | 19763 |
| | | variable region | | SEQ ID NO: 134 | |
| MP99 | hNav1.7 | Heavy chain | H1H1026B | WO2014159595 | 19764 |
| | | variable region | | SEQ ID NO: 138 | |
| MP100 | hNav1.7 | Heavy chain | H1H1028B | WO2014159595 | 19765 |
| | | variable region | | SEQ ID NO: 430 | |
| MP101 | hNav1.7 | Heavy chain | H1H1029B | WO2014159595 | 19766 |
| | | variable region | | SEQ ID NO: 432 | |
| MP102 | hNav1.7 | Heavy chain | H1H1030B | WO2014159595 | 19767 |
| | | variable region | | SEQ ID NO: 142 | |
| MP103 | hNav1.7 | Heavy chain | H1H1032B | WO2014159595 | 19768 |
| | | variable region | | SEQ ID NO: 146 | |
| MP104 | hNav1.7 | Heavy chain | H1H1036B | WO2014159595 | 19769 |
| | | variable region | | SEQ ID NO: 434 | |
| MP105 | hNav1.7 | Heavy chain | H1H1038B | WO2014159595 | 19770 |
| | | variable region | | SEQ ID NO: 150 | |
| MP106 | hNav1.7 | Heavy chain | H1H1039B | WO2014159595 | 19771 |
| | | variable region | | SEQ ID NO: 436 | |
| MP107 | hNav1.7 | Heavy chain | H1H1040B | WO2014159595 | 19772 |
| | | variable region | | SEQ ID NO: 438 | |
| MP108 | hNav1.7 | Heavy chain | H1H1041B | WO2014159595 | 19773 |
| | | variable region | | SEQ ID NO: 154 | |
| MP109 | hNav1.7 | Heavy chain | H1H1042B | WO2014159595 | 19774 |
| | | variable region | | SEQ ID NO: 440 | |
| MP110 | hNav1.7 | Heavy chain | H1H1044B | WO2014159595 | 19775 |
| | | variable region | | SEQ ID NO: 158 | |
| MP111 | hNav1.7 | Heavy chain | H1H1045B | WO2014159595 | 19776 |
| | | variable region | | SEQ ID NO: 162 | |
| MP112 | hNav1.7 | Heavy chain | H1H1050B | WO2014159595 | 19777 |
| | | variable region | | SEQ ID NO: 166 | |
| MP113 | hNav1.7 | Heavy chain | H1H1052B | WO2014159595 | 19778 |
| | | variable region | | SEQ ID NO: 442 | |
| MP114 | hNav1.7 | Heavy chain | H1H1055B | WO2014159595 | 19779 |
| | | variable region | | SEQ ID NO: 170 | |
| MP115 | hNav1.7 | Heavy chain | H1H1056B | WO2014159595 | 19780 |
| | | variable region | | SEQ ID NO: 174 | |
| MP116 | hNav1.7 | Heavy chain | H1H1058B | WO2014159595 | 19781 |
| | | variable region | | SEQ ID NO: 444 | |
| MP117 | hNav1.7 | Heavy chain | H1H1059B | WO2014159595 | 19782 |
| | | variable region | | SEQ ID NO: 178 | |
| MP118 | hNav1.7 | Heavy chain | H1H1060B | WO2014159595 | 19783 |
| | | variable region | | SEQ ID NO: 182 | |
| MP119 | hNav1.7 | Heavy chain | H1H1061B | WO2014159595 | 19784 |
| | | variable region | | SEQ ID NO: 446 | |
| MP120 | hNav1.7 | Heavy chain | H1H1065B | WO2014159595 | 19785 |
| | | variable region | | SEQ ID NO: 448 | |
| MP121 | hNav1.7 | Heavy chain | H1H1066B | WO2014159595 | 19786 |
| | | variable region | | SEQ ID NO: 450 | |
| MP122 | hNav1.7 | Heavy chain | H1H1067B | WO2014159595 | 19787 |
| | | variable region | | SEQ ID NO: 452 | |
| MP123 | hNav1.7 | Heavy chain | H1H1068B | WO2014159595 | 19788 |
| | | variable region | | SEQ ID NO: 454 | |
| MP124 | hNav1.7 | Heavy chain | H1H1076B | WO2014159595 | 19789 |
| | | variable region | | SEQ ID NO: 456 | |
| MP125 | hNav1.7 | Heavy chain | H1H1089B | WO2014159595 | 19790 |
| | | variable region | | SEQ ID NO: 458 | |
| MP126 | hNav1.7 | Heavy chain | H1H1090B | WO2014159595 | 19791 |
| | | variable region | | SEQ ID NO: 460 | |
| MP127 | hNav1.7 | Heavy chain | H1H1097B | WO2014159595 | 19792 |
| | | variable region | | SEQ ID NO: 462 | |
| MP128 | hNav1.7 | Heavy chain | H1H1100B | WO2014159595 | 19793 |
| | | variable region | | SEQ ID NO: 464 | |
| MP129 | hNav1.7 | Heavy chain | H1H1102B | WO2014159595 | 19794 |
| | | variable region | | SEQ ID NO: 466 | |
| MP130 | hNav1.7 | Heavy chain | H1H1106B | WO2014159595 | 19795 |
| | | variable region | | SEQ ID NO: 468 | |
| MP131 | hNav1.7 | Heavy chain | H1H1107B | WO2014159595 | 19796 |
| | | variable region | | SEQ ID NO: 470 | |
| MP132 | hNav1.7 | Heavy chain | H1H1108B | WO2014159595 | 19797 |
| | | variable region | | SEQ ID NO: 472 | |
| MP133 | hNav1.7 | Heavy chain | H1H1109B | WO2014159595 | 19798 |
| | | variable region | | SEQ ID NO: 474 | |
| MP134 | hNav1.7 | Heavy chain | H1H1111B | WO2014159595 | 19799 |
| | | variable region | | SEQ ID NO: 476 | |
| MP135 | hNav1.7 | Heavy chain | H1H1114B | WO2014159595 | 19800 |
| | | variable region | | SEQ ID NO: 426 | |
| MP136 | hNav1.7 | Heavy chain | H1H1117B | WO2014159595 | 19801 |
| | | variable region | | SEQ ID NO: 478 | |
| MP137 | hNav1.7 | Heavy chain | H1H1118B | WO2014159595 | 19802 |
| | | variable region | | SEQ ID NO: 480 | |
| MP138 | hNav1.7 | Heavy chain | H1H1119B | WO2014159595 | 19803 |
| | | variable region | | SEQ ID NO: 482 | |
| MP139 | hNav1.7 | Heavy chain | H1H1121B | WO2014159595 | 19804 |
| | | variable region | | SEQ ID NO: 484 | |
| MP140 | hNav1.7 | Heavy chain | H1H1126B | WO2014159595 | 19805 |
| | | variable region | | SEQ ID NO: 486 | |
| MP141 | hNav1.7 | Heavy chain | H1H1130B | WO2014159595 | 19806 |
| | | variable region | | SEQ ID NO: 488 | |
| MP142 | hNav1.7 | Heavy chain | H1H1131B | WO2014159595 | 19807 |
| | | variable region | | SEQ ID NO: 490 | |
| MP143 | hNav1.7 | Heavy chain | H1H1133B | WO2014159595 | 19808 |
| | | variable region | | SEQ ID NO: 492 | |
| MP144 | hNav1.7 | Heavy chain | H1H1134B | WO2014159595 | 19809 |
| | | variable region | | SEQ ID NO: 494 | |
| MP145 | hNav1.7 | Heavy chain | H1H1135B | WO2014159595 | 19810 |
| | | variable region | | SEQ ID NO: 496 | |
| MP146 | hNav1.7 | Heavy chain | H1H1137B | WO2014159595 | 19811 |
| | | variable region | | SEQ ID NO: 498 | |
| MP147 | hNav1.7 | Heavy chain | H1H1139B | WO2014159595 | 19812 |
| | | variable region | | SEQ ID NO: 500 | |
| MP148 | hNav1.7 | Heavy chain | H1H1141B | WO2014159595 | 19813 |
| | | variable region | | SEQ ID NO: 502 | |
| MP149 | hNav1.7 | Heavy chain | H1H1149B | WO2014159595 | 19814 |
| | | variable region | | SEQ ID NO: 504 | |
| MP150 | hNav1.7 | Heavy chain | H1H1153B | WO2014159595 | 19815 |
| | | variable region | | SEQ ID NO: 506 | |
| MP151 | hNav1.7 | Heavy chain | H1H1156B | WO2014159595 | 19816 |
| | | variable region | | SEQ ID NO: 508 | |
| MP152 | hNav1.7 | Heavy chain | H1H1157B | WO2014159595 | 19817 |
| | | variable region | | SEQ ID NO: 510 | |
| MP153 | hNav1.7 | Heavy chain | H1H1158B | WO2014159595 | 19818 |
| | | variable region | | SEQ ID NO: 512 | |
| MP154 | hNav1.7 | Heavy chain | H1H1162B | WO2014159595 | 19819 |
| | | variable region | | SEQ ID NO: 514 | |
| MP155 | hNav1.7 | Heavy chain | H1H1172B | WO2014159595 | 19820 |
| | | variable region | | SEQ ID NO: 516 | |
| MP156 | hNav1.7 | Heavy chain | H2M799N | WO2014159595 | 19821 |
| | | variable region | | SEQ ID NO: 823 | |
| MP157 | hNav1.7 | Heavy chain | H4H1003P | WO2014159595 | 19822 |
| | | variable region | | SEQ ID NO: 860 | |
| MP158 | hNav1.7 | Heavy chain | H4H1025P | WO2014159595 | 19823 |
| | | variable region | | SEQ ID NO: 872 | |
| MP159 | hNav1.7 | Heavy chain | H4H361 B | WO2014159595 | 19824 |
| | | variable region | | SEQ ID NO: 234 | |
| MP160 | hNav1.7 | Heavy chain | H4H362B | WO2014159595 | 19825 |
| | | variable region | | SEQ ID NO: 30 | |
| MP161 | hNav1.7 | Heavy chain | H4H362P | WO2014159595 | 19826 |
| | | variable region | | SEQ ID NO: 868 | |
| MP162 | hNav1.7 | Heavy chain | H4H365B | WO2014159595 | 19827 |
| | | variable region | | SEQ ID NO: 238 | |
| MP163 | hNav1.7 | Heavy chain | H4H367B | WO2014159595 | 19828 |
| | | variable region | | SEQ ID NO: 34 | |
| MP164 | hNav1.7 | Heavy chain | H4H368B | WO2014159595 | 19829 |
| | | variable region | | SEQ ID NO: 38 | |
| MP165 | hNav1.7 | Heavy chain | H4H370B | WO2014159595 | 19830 |
| | | variable region | | SEQ ID NO: 518 | |
| MP166 | hNav1.7 | Heavy chain | H4H371 B | WO2014159595 | 19831 |
| | | variable region | | SEQ ID NO: 242 | |
| MP167 | hNav1.7 | Heavy chain | H4H372B | WO2014159595 | 19832 |
| | | variable region | | SEQ ID NO: 246 | |
| MP168 | hNav1.7 | Heavy chain | H4H373B | WO2014159595 | 19833 |
| | | variable region | | SEQ ID NO: 250 | |
| MP169 | hNav1.7 | Heavy chain | H4H378B | WO2014159595 | 19834 |
| | | variable region | | SEQ ID NO: 520 | |
| MP170 | hNav1.7 | Heavy chain | H4H379B | WO2014159595 | 19835 |
| | | variable region | | SEQ ID NO: 254 | |
| MP171 | hNav1.7 | Heavy chain | H4H381 B | WO2014159595 | 19836 |
| | | variable region | | SEQ ID NO: 258 | |
| MP172 | hNav1.7 | Heavy chain | H4H382B | WO2014159595 | 19837 |
| | | variable region | | SEQ ID NO: 42 | |
| MP173 | hNav1.7 | Heavy chain | H4H383B | WO2014159595 | 19838 |
| | | variable region | | SEQ ID NO: 522 | |
| MP174 | hNav1.7 | Heavy chain | H4H385B | WO2014159595 | 19839 |
| | | variable region | | SEQ ID NO: 262 | |
| MP175 | hNav1.7 | Heavy chain | H4H385B | WO2014159595 | 19840 |
| | | variable region | | SEQ ID NO: 681 | |
| MP176 | hNav1.7 | Heavy chain | H4H388B | WO2014159595 | 19841 |
| | | variable region | | SEQ ID NO: 266 | |
| MP177 | hNav1.7 | Heavy chain | H4H389B | WO2014159595 | 19842 |
| | | variable region | | SEQ ID NO: 524 | |
| MP178 | hNav1.7 | Heavy chain | H4H391B | WO2014159595 | 19843 |
| | | variable region | | SEQ ID NO: 46 | |
| MP179 | hNav1.7 | Heavy chain | H4H391P | WO2014159595 | 19844 |
| | | variable region | | SEQ ID NO: 50 | |
| MP180 | hNav1.7 | Heavy chain | H4H395B | WO2014159595 | 19845 |
| | | variable region | | SEQ ID NO: 685 | |
| MP181 | hNav1.7 | Heavy chain | H4H396B | WO2014159595 | 19846 |
| | | variable region | | SEQ ID NO: 270 | |
| MP182 | hNav1.7 | Heavy chain | H4H397B | WO2014159595 | 19847 |
| | | variable region | | SEQ ID NO: 54 | |
| MP183 | hNav1.7 | Heavy chain | H4H398B | WO2014159595 | 19848 |
| | | variable region | | SEQ ID NO: 274 | |
| MP184 | hNav1.7 | Heavy chain | H4H399B | WO2014159595 | 19849 |
| | | variable region | | SEQ ID NO: 278 | |
| MP185 | hNav1.7 | Heavy chain | H4H400B | WO2014159595 | 19850 |
| | | variable region | | SEQ ID NO: 282 | |
| MP186 | hNav1.7 | Heavy chain | H4H402B | WO2014159595 | 19851 |
| | | variable region | | SEQ ID NO: 286 | |
| MP187 | hNav1.7 | Heavy chain | H4H405B | WO2014159595 | 19852 |
| | | variable region | | SEQ ID NO: 526 | |
| MP188 | hNav1.7 | Heavy chain | H4H407B | WO2014159595 | 19853 |
| | | variable region | | SEQ ID NO: 528 | |
| MP189 | hNav1.7 | Heavy chain | H4H408B | WO2014159595 | 19854 |
| | | variable region | | SEQ ID NO: 58 | |
| MP190 | hNav1.7 | Heavy chain | H4H409B | WO2014159595 | 19855 |
| | | variable region | | SEQ ID NO: 290 | |
| MP191 | hNav1.7 | Heavy chain | H4H413B | WO2014159595 | 19856 |
| | | variable region | | SEQ ID NO: 530 | |
| MP192 | hNav1.7 | Heavy chain | H4H415B | WO2014159595 | 19857 |
| | | variable region | | SEQ ID NO: 294 | |
| MP193 | hNav1.7 | Heavy chain | H4H416B | WO2014159595 | 19858 |
| | | variable region | | SEQ ID NO: 298 | |
| MP194 | hNav1.7 | Heavy chain | H4H419B | WO2014159595 | 19859 |
| | | variable region | | SEQ ID NO: 302 | |
| MP195 | hNav1.7 | Heavy chain | H4H422B | WO2014159595 | 19860 |
| | | variable region | | SEQ ID NO: 306 | |
| MP196 | hNav1.7 | Heavy chain | H4H426B | WO2014159595 | 19861 |
| | | variable region | | SEQ ID NO: 62 | |
| MP197 | hNav1.7 | Heavy chain | H4H427B | WO2014159595 | 19862 |
| | | variable region | | SEQ ID NO: 532 | |
| MP198 | hNav1.7 | Heavy chain | H4H432B | WO2014159595 | 19863 |
| | | variable region | | SEQ ID NO: 534 | |
| MP199 | hNav1.7 | Heavy chain | H4H434B | WO2014159595 | 19864 |
| | | variable region | | SEQ ID NO: 310 | |
| MP200 | hNav1.7 | Heavy chain | H4H434B | WO2014159595 | 19865 |
| | | variable region | | SEQ ID NO: 689 | |
| MP201 | hNav1.7 | Heavy chain | H4H434P | WO2014159595 | 19866 |
| | | variable region | | SEQ ID NO: 693 | |
| MP202 | hNav1.7 | Heavy chain | H4H436B | WO2014159595 | 19867 |
| | | variable region | | SEQ ID NO: 536 | |
| MP203 | hNav1.7 | Heavy chain | H4H437B | WO2014159595 | 19868 |
| | | variable region | | SEQ ID NO: 538 | |
| MP204 | hNav1.7 | Heavy chain | H4H438B | WO2014159595 | 19869 |
| | | variable region | | SEQ ID NO: 314 | |
| MP205 | hNav1.7 | Heavy chain | H4H438B | WO2014159595 | 19870 |
| | | variable region | | SEQ ID NO: 697 | |
| MP206 | hNav1.7 | Heavy chain | H4H439B | WO2014159595 | 19871 |
| | | variable region | | SEQ ID NO: 66 | |
| MP207 | hNav1.7 | Heavy chain | H4H439P | WO2014159595 | 19872 |
| | | variable region | | SEQ ID NO: 70 | |
| MP208 | hNav1.7 | Heavy chain | H4H441 B | WO2014159595 | 19873 |
| | | variable region | | SEQ ID NO: 701 | |
| MP209 | hNav1.7 | Heavy chain | H4H441 P | WO2014159595 | 19874 |
| | | variable region | | SEQ ID NO: 864 | |
| MP210 | hNav1.7 | Heavy chain | H4H442B | WO2014159595 | 19875 |
| | | variable region | | SEQ ID NO: 318 | |
| MP211 | hNav1.7 | Heavy chain | H4H443B | WO2014159595 | 19876 |
| | | variable region | | SEQ ID NO: 74 | |
| MP212 | hNav1.7 | Heavy chain | H4H444B | WO2014159595 | 19877 |
| | | variable region | | SEQ ID NO: 322 | |
| MP213 | hNav1.7 | Heavy chain | H4H445B | WO2014159595 | 19878 |
| | | variable region | | SEQ ID NO: 540 | |
| MP214 | hNav1.7 | Heavy chain | H4H446B | WO2014159595 | 19879 |
| | | variable region | | SEQ ID NO: 326 | |
| MP215 | hNav1.7 | Heavy chain | H4H448B | WO2014159595 | 19880 |
| | | variable region | | SEQ ID NO: 78 | |
| MP216 | hNav1.7 | Heavy chain | H4H453B | WO2014159595 | 19881 |
| | | variable region | | SEQ ID NO: 542 | |
| MP217 | hNav1.7 | Heavy chain | H4H456B | WO2014159595 | 19882 |
| | | variable region | | SEQ ID NO: 330 | |
| MP218 | hNav1.7 | Heavy chain | H4H457B | WO2014159595 | 19883 |
| | | variable region | | SEQ ID NO: 334 | |
| MP219 | hNav1.7 | Heavy chain | H4H458B | WO2014159595 | 19884 |
| | | variable region | | SEQ ID NO: 338 | |
| MP220 | hNav1.7 | Heavy chain | H4H460B | WO2014159595 | 19885 |
| | | variable region | | SEQ ID NO: 342 | |
| MP221 | hNav1.7 | Heavy chain | H4H461 B | WO2014159595 | 19886 |
| | | variable region | | SEQ ID NO: 346 | |
| MP222 | hNav1.7 | Heavy chain | H4H462B | WO2014159595 | 19887 |
| | | variable region | | SEQ ID NO: 350 | |
| MP223 | hNav1.7 | Heavy chain | H4H463B | WO2014159595 | 19888 |
| | | variable region | | SEQ ID NO: 354 | |
| MP224 | hNav1.7 | Heavy chain | H4H464B | WO2014159595 | 19889 |
| | | variable region | | SEQ ID NO: 358 | |
| MP225 | hNav1.7 | Heavy chain | H4H465B | WO2014159595 | 19890 |
| | | variable region | | SEQ ID NO: 362 | |
| MP226 | hNav1.7 | Heavy chain | H4H466B | WO2014159595 | 19891 |
| | | variable region | | SEQ ID NO: 366 | |
| MP227 | hNav1.7 | Heavy chain | H4H467B | WO2014159595 | 19892 |
| | | variable region | | SEQ ID NO: 370 | |
| MP228 | hNav1.7 | Heavy chain | H4H468B | WO2014159595 | 19893 |
| | | variable region | | SEQ ID NO: 82 | |
| MP229 | hNav1.7 | Heavy chain | H4H468P | WO2014159595 | 19894 |
| | | variable region | | SEQ ID NO: 86 | |
| MP230 | hNav1.7 | Heavy chain | H4H471B | WO2014159595 | 19895 |
| | | variable region | | SEQ ID NO: 90 | |
| MP231 | hNav1.7 | Heavy chain | H4H471P | WO2014159595 | 19896 |
| | | variable region | | SEQ ID NO: 94 | |
| MP232 | hNav1.7 | Heavy chain | H4H472B | WO2014159595 | 19897 |
| | | variable region | | SEQ ID NO: 374 | |
| MP233 | hNav1.7 | Heavy chain | H4H473B | WO2014159595 | 19898 |
| | | variable region | | SEQ ID NO: 378 | |
| MP234 | hNav1.7 | Heavy chain | H4H475B | WO2014159595 | 19899 |
| | | variable region | | SEQ ID NO: 382 | |
| MP235 | hNav1.7 | Heavy chain | H4H477B | WO2014159595 | 19900 |
| | | variable region | | SEQ ID NO: 386 | |
| MP236 | hNav1.7 | Heavy chain | H4H478B | WO2014159595 | 19901 |
| | | variable region | | SEQ ID NO: 544 | |
| MP237 | hNav1.7 | Heavy chain | H4H480B | WO2014159595 | 19902 |
| | | variable region | | SEQ ID NO: 390 | |
| MP238 | hNav1.7 | Heavy chain | H4H481 B | WO2014159595 | 19903 |
| | | variable region | | SEQ ID NO: 394 | |
| MP239 | hNav1.7 | Heavy chain | H4H482B | WO2014159595 | 19904 |
| | | variable region | | SEQ ID NO: 398 | |
| MP240 | hNav1.7 | Heavy chain | H4H483B | WO2014159595 | 19905 |
| | | variable region | | SEQ ID NO: 402 | |
| MP241 | hNav1.7 | Heavy chain | H4H484B | WO2014159595 | 19906 |
| | | variable region | | SEQ ID NO: 406 | |
| MP242 | hNav1.7 | Heavy chain | H4H486B | WO2014159595 | 19907 |
| | | variable region | | SEQ ID NO: 410 | |
| MP243 | hNav1.7 | Heavy chain | H4H488B | WO2014159595 | 19908 |
| | | variable region | | SEQ ID NO: 414 | |
| MP244 | hNav1.7 | Heavy chain | H4H489B | WO2014159595 | 19909 |
| | | variable region | | SEQ ID NO: 418 | |
| MP245 | hNav1.7 | Heavy chain | H4H490B | WO2014159595 | 19910 |
| | | variable region | | SEQ ID NO: 546 | |
| MP246 | hNav1.7 | Heavy chain | H4H491B | WO2014159595 | 19911 |
| | | variable region | | SEQ ID NO: 422 | |
| MP247 | hNav1.7 | Heavy chain | H1 H1 105B | WO2014159595 | 19912 |
| | | variable region | | SEQ ID NO: 198 | |
| MP248 | hNav1.7 | Heavy chain | H1 H1 123B | WO2014159595 | 19913 |
| | | variable region | | SEQ ID NO: 202 | |
| MP249 | hNav1.7 | Heavy chain | H1 H1 138B | WO2014159595 | 19914 |
| | | variable region | | SEQ ID NO: 206 | |
| MP250 | hNav1.7 | Heavy chain | H1 H1 144B | WO2014159595 | 19915 |
| | | variable region | | SEQ ID NO: 210 | |
| MP251 | hNav1.7 | Heavy chain | H1 H1 147B | WO2014159595 | 19916 |
| | | variable region | | SEQ ID NO: 214 | |
| MP252 | hNav1.7 | Heavy chain | H1 H1 155B | WO2014159595 | 19917 |
| | | variable region | | SEQ ID NO: 218 | |
| MP253 | hNav1.7 | Heavy chain | H1 H1 164B | WO2014159595 | 19918 |
| | | variable region | | SEQ ID NO: 222 | |
| MP254 | hNav1.7 | Heavy chain | H1 H1 166B | WO2014159595 | 19919 |
| | | variable region | | SEQ ID NO: 226 | |
| MP255 | hNav1.7 | Heavy chain | H1 H1 169B | WO2014159595 | 19920 |
| | | variable region | | SEQ ID NO: 230 | |
| MP256 | hNav1.7 | Heavy chain | H1 H1006P | WO2014159595 | 19921 |
| | | variable region | | SEQ ID NO: 705 | |
| MP257 | hNav1.7 | Heavy chain | H1 H1025B | WO2014159595 | 19922 |
| | | variable region | | SEQ ID NO: 722 | |
| MP258 | hNav1.7 | Heavy chain | H1 H1068B | WO2014159595 | 19923 |
| | | variable region | | SEQ ID NO: 709 | |
| MP259 | hNav1.7 | Heavy chain | H1 H1069B | WO2014159595 | 19924 |
| | | variable region | | SEQ ID NO: 186 | |
| MP260 | hNav1.7 | Heavy chain | H1 H1082B | WO2014159595 | 19925 |
| | | variable region | | SEQ ID NO: 190 | |
| MP261 | hNav1.7 | Heavy chain | H1 H1098B | WO2014159595 | 19926 |
| | | variable region | | SEQ ID NO: 194 | |
| MP262 | hNav1.7 | Heavy chain | H1 M683N | WO2014159595 | 19927 |
| | | variable region | | SEQ ID NO: 2 | |
| MP263 | hNav1.7 | Heavy chain | H1 M797N | WO2014159595 | 19928 |
| | | variable region | | SEQ ID NO: 6 | |
| MP264 | hNav1.7 | Heavy chain | H1 M799N | WO2014159595 | 19929 |
| | | variable region | | SEQ ID NO: 26 | |
| MP265 | hNav1.7 | Heavy chain | H1 M801 N | WO2014159595 | 19930 |
| | | variable region | | SEQ ID NO: 727 | |
| MP266 | hNav1.7 | Heavy chain | H1 M826N | WO2014159595 | 19931 |
| | | variable region | | SEQ ID NO: 743 | |
| MP267 | hNav1.7 | Heavy chain | H1 M834N | WO2014159595 | 19932 |
| | | variable region | | SEQ ID NO: 10 | |
| MP268 | hNav1.7 | Heavy chain | H1 M836N | WO2014159595 | 19933 |
| | | variable region | | SEQ ID NO: 759 | |
| MP269 | hNav1.7 | Heavy chain | H1 M839N | WO2014159595 | 19934 |
| | | variable region | | SEQ ID NO: 14 | |
| MP270 | hNav1.7 | Heavy chain | H1 M852N | WO2014159595 | 19935 |
| | | variable region | | SEQ ID NO: 18 | |
| MP271 | hNav1.7 | Heavy chain | H1 M875N | WO2014159595 | 19936 |
| | | variable region | | SEQ ID NO: 22 | |
| MP272 | hNav1.7 | Heavy chain | H1 M879N | WO2014159595 | 19937 |
| | | variable region | | SEQ ID NO: 791 | |
| MP273 | hNav1.7 | Heavy chain | H1 M994N | WO2014159595 | 19938 |
| | | variable region | | SEQ ID NO: 807 | |
| MP274 | hNav1.7 | Heavy chain | H1H1003B | WO2014159595 | 19939 |
| | | variable region | | SEQ ID NO: 98 | |
| MP275 | hNav1.7 | Heavy chain | H1H1006B | WO2014159595 | 19940 |
| | | variable region | | SEQ ID NO: 102 | |
| MP276 | hNav1.7 | Heavy chain | H1H1008B | WO2014159595 | 19941 |
| | | variable region | | SEQ ID NO: 106 | |
| MP277 | hNav1.7 | Heavy chain | H1H1010B | WO2014159595 | 19942 |
| | | variable region | | SEQ ID NO: 114 | |
| MP278 | hNav1.7 | Heavy chain | H1H1011B | WO2014159595 | 19943 |
| | | variable region | | SEQ ID NO: 118 | |
| MP279 | hNav1.7 | Heavy chain | H1H1013B | WO2014159595 | 19944 |
| | | variable region | | SEQ ID NO: 122 | |
| MP280 | TNF | Heavy chain | | US20030157061 | 19945 |
| | | variable region | | SEQ ID NO: 2 | |
| MP281 | TNF | Heavy chain | | US20030157061 | 19946 |
| | | variable region | | SEQ ID NO: 6 | |
| MP282 | TrkA | Heavy chain | HuVHWO | WO2009098238 | 19947 |
| | | variable region | | SEQ ID NO: 17 | |
| MP283 | NGF | Heavy chain, | Fulranumab, | U.S. Pat. No. 7,601,818 | 19948 |
| | | Antibody for | 4D4, AMG- | SEQ ID NO: 40 | |
| | | chronic pain | 403, JNJ- | | |
| | | | 42160443 | | |
| MP284 | NGF | Heavy chain, | Fasinumab, | | 19949 |
| | | Antibody for | REGN475, | | |
| | | chronic pain | SAR164877 | | |
| MP285 | NGF | Heavy chain, | Tanezumab, | US20040237124 | 19950 |
| | | Antibody for | PF- | SEQ ID NO: 1 | |
| | | pain, chronic | 04383119, | | |
| | | and acute, | RN624, E3 | | |
| | | osteoarthritis | | | |
| MP286 | CGRP | Light chain | G1, cluster | U.S. Pat. No. 9,115,194 | 19951 |
| | | | headache | SEQ ID NO: 12 | |
| MP287 | CGRP | Light chain | 04E4 | U.S. Pat. No. 9,102,731 | 19952 |
| | | | | SEQ ID NO: 17 | |
| MP288 | CGRP | Light chain | 10E4 | U.S. Pat. No. 9,102,731 | 19953 |
| | | | | SEQ ID NO: 22 | |
| MP289 | CGRP | Light chain | 02E7 | U.S. Pat. No. 9,102,731 | 19954 |
| | | | | SEQ ID NO: 14 | |
| MP290 | CGRP | Light chain | 12E8 | U.S. Pat. No. 9,102,731 | 19955 |
| | | | | SEQ ID NO: 25 | |
| MP291 | CGRP | Light chain | 01E11 | U.S. Pat. No. 9,102,731 | 19956 |
| | | | | SEQ ID NO: 12 | |
| MP292 | CGRP | Light chain | 01H7 | U.S. Pat. No. 9,102,731 | 19957 |
| | | | | SEQ ID NO: 13 | |
| MP293 | CGRP | Light chain | 03B6 | U.S. Pat. No. 9,102,731 | 19958 |
| | | | | SEQ ID NO: 15 | |
| MP294 | CGRP | Light chain | 03C8 | U.S. Pat. No. 9,102,731 | 19959 |
| | | | | SEQ ID NO: 16 | |
| MP295 | CGRP | Light chain | 04H6 | U.S. Pat. No. 9,102,731 | 19960 |
| | | | | SEQ ID NO: 18 | |
| MP296 | CGRP | Light chain | 05F5 | U.S. Pat. No. 9,102,731 | 19961 |
| | | | | SEQ ID NO: 19 | |
| MP297 | CGRP | Light chain | 09D4 | U.S. Pat. No. 9,102,731 | 19962 |
| | | | | SEQ ID NO: 20 | |
| MP298 | CGRP | Light chain | 09F5 | U.S. Pat. No. 9,102,731 | 19963 |
| | | | | SEQ ID NO: 21 | |
| MP299 | CGRP | Light chain | 11D11 HL | U.S. Pat. No. 9,102,731 | 19964 |
| | | | | SEQ ID NO: 23 | |
| MP300 | CGRP | Light chain | 11H9 | U.S. Pat. No. 9,102,731 | 19965 |
| | | | | SEQ ID NO: 24 | |
| MP301 | CGRP | Light chain | 12G8 HL | U.S. Pat. No. 9,102,731 | 19966 |
| | | | | SEQ ID NO: 26 | |
| MP302 | CGRP | Light chain | 13H2 | U.S. Pat. No. 9,102,731 | 19967 |
| | | | | SEQ ID NO: 27 | |
| MP303 | CGRP | Light chain | 32H7 | U.S. Pat. No. 9,102,731 | 19968 |
| | | | | SEQ ID NO: 28 | |
| MP304 | CGRP | Light chain | A | US20120294802 | 19969 |
| | | | | SEQ ID NO: 1 | |
| MP305 | CGRP | Light chain | Ab1 | US20120294802 | 19970 |
| | | | | SEQ ID NO: 2 | |
| MP306 | CGRP | Light chain | Ab10 | US20120294802 | 19971 |
| | | | | SEQ ID NO: 92 | |
| MP307 | CGRP | Light chain | Ab11 | US20120294802 | 19972 |
| | | | | SEQ ID NO: 102 | |
| MP308 | CGRP | Light chain | Ab12 | US20120294802 | 19973 |
| | | | | SEQ ID NO: 112 | |
| MP309 | CGRP | Light chain | Ab13 | US20120294802 | 19974 |
| | | | | SEQ ID NO: 122 | |
| MP310 | CGRP | Light chain | Ab14 | US20120294802 | 19975 |
| | | | | SEQ ID NO: 132 | |
| MP311 | CGRP | Light chain | Ab2 | US20120294802 | 19976 |
| | | | | SEQ ID NO: 12 | |
| MP312 | CGRP | Light chain | Ab3 | US20120294802 | 19977 |
| | | | | SEQ ID NO: 22 | |
| MP313 | CGRP | Light chain | Ab4 | US20120294802 | 19978 |
| | | | | SEQ ID NO: 32 | |
| MP314 | CGRP | Light chain | Ab5 | US20120294802 | 19979 |
| | | | | SEQ ID NO: 42 | |
| MP315 | CGRP | Light chain | Ab6 | US20120294802 | 19980 |
| | | | | SEQ ID NO: 52 | |
| MP316 | CGRP | Light chain | Ab7 | US20120294802 | 19981 |
| | | | | SEQ ID NO: 62 | |
| MP317 | CGRP | Light chain | Ab8 | US20120294802 | 19982 |
| | | | | SEQ ID NO: 72 | |
| MP318 | CGRP | Light chain | Ab9 | US20120294802 | 19983 |
| | | | | SEQ ID NO: 82 | |
| MP319 | CGRP | Light chain | B | US20120294802 | 19984 |
| | | | | SEQ ID NO: 11 | |
| MP320 | CGRP | Light chain | C | US20120294802 | 19985 |
| | | | | SEQ ID NO: 21 | |
| MP321 | CGRP | Light chain | D | US20120294802 | 19986 |
| | | | | SEQ ID NO: 31 | |
| MP322 | CGRP | Light chain | E | US20120294802 | 19987 |
| | | | | SEQ ID NO: 41 | |
| MP323 | CGRP | Light chain | F | US20120294802 | 19988 |
| | | | | SEQ ID NO: 51 | |
| MP324 | CGRP | Light chain | G | US20120294802 | 19989 |
| | | | | SEQ ID NO: 61 | |
| MP325 | CGRP | Light chain | H | US20120294802 | 19990 |
| | | | | SEQ ID NO: 71 | |
| MP326 | CGRP | Light chain | I | US20120294802 | 19991 |
| | | | | SEQ ID NO: 81 | |
| MP327 | CGRP | Light chain | J | US20120294802 | 19992 |
| | | | | SEQ ID NO: 91 | |
| MP328 | CGRP | Light chain | K | US20120294802 | 19993 |
| | | | | SEQ ID NO: 101 | |
| MP329 | CGRP | Light chain | L | US20120294802 | 19994 |
| | | | | SEQ ID NO: 111 | |
| MP330 | CGRP | Light chain | M | US20120294802 | 19995 |
| | | | | SEQ ID NO: 121 | |
| MP331 | CGRP | Light chain | N | US20120294802 | 19996 |
| | | | | SEQ ID NO: 131 | |
| MP332 | TrkA | Light chain | BXhVH5VL1, | US20150183885 | 19997 |
| | | | GBR | SEQ ID NO: 29 | |
| | | | VH5(K3Q)VL1, | | |
| | | | GBR | | |
| | | | VH5(V37A)VL1, | | |
| | | | GBR | | |
| | | | VH5(V37A)VL1(*), | | |
| | | | GBR | | |
| | | | VH5(G42E)VL1, | | |
| | | | GBR | | |
| | | | VH5(V89L)VL1, | | |
| | | | GBR | | |
| | | | VH5(R94K)VL1, | | |
| | | | GBR | | |
| | | | VH5(K3Q, | | |
| | | | V37A)VL1, | | |
| | | | GBR | | |
| | | | VH5(K3Q, | | |
| | | | V37A)VL1(*), | | |
| | | | GBR | | |
| | | | VH5(K3Q, | | |
| | | | T40A)VL1, | | |
| | | | GBR | | |
| | | | VH5(P60A, | | |
| | | | T62S)VL1, | | |
| | | | GBR | | |
| | | | VH5(K3Q, | | |
| | | | V37A, | | |
| | | | R44G)VL1, | | |
| | | | GBR | | |
| | | | VH5(K3Q, | | |
| | | | A49S, | | |
| | | | Y50A)VL1, | | |
| | | | GBR | | |
| | | | VH5(K3Q, | | |
| | | | P60A, | | |
| | | | T62S)VL1, | | |
| | | | GBR | | |
| | | | VH5(K3Q, | | |
| | | | T40A, | | |
| | | | P60A, T62S)VL1, | | |
| | | | GBR | | |
| | | | VH5(K3Q, | | |
| | | | V37A, | | |
| | | | T40A, P60A, | | |
| | | | T62S)VL1, | | |
| | | | GBR | | |
| | | | VH5(K3Q, | | |
| | | | T40A, | | |
| | | | R44G, A49S, | | |
| | | | Y50A)VL1, | | |
| | | | GBR | | |
| | | | VH5(K3Q, | | |
| | | | A49S, | | |
| | | | Y50A, P60A, | | |
| | | | T62S)VL1, | | |
| | | | GBR | | |
| | | | VH5(K3Q, | | |
| | | | T40A, R44G, | | |
| | | | A49S, Y50A, | | |
| | | | P60A, | | |
| | | | T62S)VL1, | | |
| | | | GBR | | |
| | | | VH5(K3Q, | | |
| | | | T40A, R44G, | | |
| | | | A49S, Y50A, | | |
| | | | P60A, T62S, | | |
| | | | R94K)VL1 | | |
| MP333 | TrkA | Light chain | BXhVL2 | WO2009098238 | 19998 |
| | | | | SEQ ID NO: 8 | |
| MP334 | TrkA | Light chain | BXhVL3 | WO2009098238 | 19999 |
| | | | | SEQ ID NO: 9 | |
| MP335 | TrkA | Light chain | BXhVL4 | WO2009098238 | 20000 |
| | | | | SEQ ID NO: 10 | |
| MP336 | TrkA | Light chain | BXhVL5 | WO2009098238 | 20001 |
| | | | | SEQ ID NO: 11 | |
| MP337 | TrkA | Light chain | BXhVL7 | WO2009098238 | 20002 |
| | | | | SEQ ID NO: 13 | |
| MP338 | TrkA | Light chain | BXhVL8 | WO2009098238 | 20003 |
| | | | | SEQ ID NO: 14 | |
| MP339 | TrkA | Light chain | BXhVL1 | WO2009098238 | 20004 |
| | | | | SEQ ID NO: 7 | |
| MP340 | TrkA | Light chain | BXhVLβ | WO2009098238 | 20005 |
| | | | | SEQ ID NO: 12 | |
| MP341 | TrkA | Light chain | mVLEP | WO2009098238 | 20006 |
| | | | | SEQ ID NO: 16 | |
| MP342 | GFRα3 | Light chain | H1M2236N | U.S. Pat. No. 8,968,736 | 20007 |
| | | variable region | | SEQ ID NO: 405 | |
| MP343 | GFRα3 | Light chain | H1M2243N | U.S. Pat. No. 8,968,736 | 20008 |
| | | variable region | | SEQ ID NO: 389 | |
| MP344 | GFRα3 | Light chain | H4H2207N | U.S. Pat. No. 8,968,736 | 20009 |
| | | variable region | | SEQ ID NO: 10 | |
| MP345 | GFRα3 | Light chain | H4H2210N | U.S. Pat. No. 8,968,736 | 20010 |
| | | variable region | | SEQ ID NO: 74 | |
| MP346 | GFRα3 | Light chain | H4H2212N | U.S. Pat. No. 8,968,736 | 20011 |
| | | variable region | | SEQ ID NO: 26 | |
| MP347 | GFRα3 | Light chain | H4H2234N | U.S. Pat. No. 8,968,736 | 20012 |
| | | variable region | | SEQ ID NO: 90 | |
| MP348 | GFRα3 | Light chain | H4H2236N3 | U.S. Pat. No. 8,968,736 | 20013 |
| | | variable region | | SEQ ID NO: 42 | |
| MP349 | GFRα3 | Light chain | H4H2243N2 | U.S. Pat. No. 8,968,736 | 20014 |
| | | variable region | | SEQ ID NO: 58 | |
| MP350 | GFRα3 | Light chain | H4H2291S | U.S. Pat. No. 8,968,736 | 20015 |
| | | variable region | | SEQ ID NO: 106 | |
| MP351 | GFRα3 | Light chain | H4H2292S | U.S. Pat. No. 8,968,736 | 20016 |
| | | variable region | | SEQ ID NO: 122 | |
| MP352 | GFRα3 | Light chain | H4H2293P | U.S. Pat. No. 8,968,736 | 20017 |
| | | variable region | | SEQ ID NO: 138 | |
| MP353 | GFRα3 | Light chain | H4H2294S | U.S. Pat. No. 8,968,736 | 20018 |
| | | variable region | | SEQ ID NO: 154 | |
| MP354 | GFRα3 | Light chain | H4H2295S | U.S. Pat. No. 8,968,736 | 20019 |
| | | variable region | | SEQ ID NO: 170 | |
| MP355 | GFRα3 | Light chain | H4H2296S | U.S. Pat. No. 8,968,736 | 20020 |
| | | variable region | | SEQ ID NO: 186 | |
| MP356 | GFRα3 | Light chain | H4H2341S | U.S. Pat. No. 8,968,736 | 20021 |
| | | variable region | | SEQ ID NO: 202 | |
| MP357 | GFRα3 | Light chain | H4H2342P | U.S. Pat. No. 8,968,736 | 20022 |
| | | variable region | | SEQ ID NO: 218 | |
| MP358 | GFRα3 | Light chain | H4H2344S | U.S. Pat. No. 8,968,736 | 20023 |
| | | variable region | | SEQ ID NO: 234 | |
| MP359 | GFRα3 | Light chain | H4H2345S | U.S. Pat. No. 8,968,736 | 20024 |
| | | variable region | | SEQ ID NO: 250 | |
| MP360 | GFRα3 | Light chain | H4H2346S | U.S. Pat. No. 8,968,736 | 20025 |
| | | variable region | | SEQ ID NO: 266 | |
| MP361 | GFRα3 | Light chain | H4H2350P | U.S. Pat. No. 8,968,736 | 20026 |
| | | variable region | | SEQ ID NO: 282 | |
| MP362 | GFRα3 | Light chain | H4H2352S | U.S. Pat. No. 8,968,736 | 20027 |
| | | variable region | | SEQ ID NO: 298 | |
| MP363 | GFRα3 | Light chain | H4H2354S | U.S. Pat. No. 8,968,736 | 20028 |
| | | variable region | | SEQ ID NO: 314 | |
| MP364 | GFRα3 | Light chain | H4H2355S | U.S. Pat. No. 8,968,736 | 20029 |
| | | variable region | | SEQ ID NO: 330 | |
| MP365 | GFRα3 | Light chain | H4H2357S | U.S. Pat. No. 8,968,736 | 20030 |
| | | variable region | | SEQ ID NO: 346 | |
| MP366 | GFRα3 | Light chain | H4H2364S | U.S. Pat. No. 8,968,736 | 20031 |
| | | variable region | | SEQ ID NO: 362 | |
| MP367 | hNav1.7 | Light chain | H1 H1 105B | WO2014159595 | 20032 |
| | | variable region | | SEQ ID NO: 200 | |
| MP368 | hNav1.7 | Light chain | H1 H1 138B | WO2014159595 | 20033 |
| | | variable region | | SEQ ID NO: 208 | |
| MP369 | hNav1.7 | Light chain | H1 H1 144B | WO2014159595 | 20034 |
| | | variable region | | SEQ ID NO: 212 | |
| MP370 | hNav1.7 | Light chain | H1 H1 147B | WO2014159595 | 20035 |
| | | variable region | | SEQ ID NO: 216 | |
| MP371 | hNav1.7 | Light chain | H1 H1 155B | WO2014159595 | 20036 |
| | | variable region | | SEQ ID NO: 220 | |
| MP372 | hNav1.7 | Light chain | H1 H1 164B | WO2014159595 | 20037 |
| | | variable region | | SEQ ID NO: 224 | |
| MP373 | hNav1.7 | Light chain | H1 H1 166B | WO2014159595 | 20038 |
| | | variable region | | SEQ ID NO: 228 | |
| MP374 | hNav1.7 | Light chain | H1 H1 169B | WO2014159595 | 20039 |
| | | variable region | | SEQ ID NO: 232 | |
| MP375 | hNav1.7 | Light chain | H1 H1006P | WO2014159595 | 20040 |
| | | variable region | | SEQ ID NO: 707 | |
| MP376 | hNav1.7 | Light chain | H1 H1025B | WO2014159595 | 20041 |
| | | variable region | | SEQ ID NO: 724 | |
| MP377 | hNav1.7 | Light chain | H1 H1068B | WO2014159595 | 20042 |
| | | variable region | | SEQ ID NO: 711 | |
| MP378 | hNav1.7 | Light chain | H1 H1069B | WO2014159595 | 20043 |
| | | variable region | | SEQ ID NO: 188 | |
| MP379 | hNav1.7 | Light chain | H1 H1082B | WO2014159595 | 20044 |
| | | variable region | | SEQ ID NO: 192 | |
| MP380 | hNav1.7 | Light chain | H1 H1098B | WO2014159595 | 20045 |
| | | variable region | | SEQ ID NO: 196 | |
| MP381 | hNav1.7 | Light chain | H1 M683N | WO2014159595 | 20046 |
| | | variable region | | SEQ ID NO: 4 | |
| MP382 | hNav1.7 | Light chain | H1 M797N | WO2014159595 | 20047 |
| | | variable region | | SEQ ID NO: 8 | |
| MP383 | hNav1.7 | Light chain | H1 M799N | WO2014159595 | 20048 |
| | | variable region | | SEQ ID NO: 28 | |
| MP384 | hNav1.7 | Light chain | H1 M801 N | WO2014159595 | 20049 |
| | | variable region | | SEQ ID NO: 735 | |
| MP385 | hNav1.7 | Light chain | H1 M826N | WO2014159595 | 20050 |
| | | variable region | | SEQ ID NO: 751 | |
| MP386 | hNav1.7 | Light chain | H1 M834N | WO2014159595 | 20051 |
| | | variable region | | SEQ ID NO: 12 | |
| MP387 | hNav1.7 | Light chain | H1 M836N | WO2014159595 | 20052 |
| | | variable region | | SEQ ID NO: 767 | |
| MP388 | hNav1.7 | Light chain | H1 M839N | WO2014159595 | 20053 |
| | | variable region | | SEQ ID NO: 16 | |
| MP389 | hNav1.7 | Light chain | H1 M852N | WO2014159595 | 20054 |
| | | variable region | | SEQ ID NO: 20 | |
| MP390 | hNav1.7 | Light chain | H1 M875N | WO2014159595 | 20055 |
| | | variable region | | SEQ ID NO: 24 | |
| MP391 | hNav1.7 | Light chain | H1 M879N | WO2014159595 | 20056 |
| | | variable region | | SEQ ID NO: 799 | |
| MP392 | hNav1.7 | Light chain | H1 M994N | WO2014159595 | 20057 |
| | | variable region | | SEQ ID NO: 815 | |
| MP393 | hNav1.7 | Light chain | H1H1002B | WO2014159595 | 20058 |
| | | variable region | | SEQ ID NO: 548 | |
| MP394 | hNav1.7 | Light chain | H1H1003B | WO2014159595 | 20059 |
| | | variable region | | SEQ ID NO: 100 | |
| MP395 | hNav1.7 | Light chain | H1H1005B | WO2014159595 | 20060 |
| | | variable region | | SEQ ID NO: 550 | |
| MP396 | hNav1.7 | Light chain | H1H1006B | WO2014159595 | 20061 |
| | | variable region | | SEQ ID NO: 104 | |
| MP397 | hNav1.7 | Light chain | H1H1008B | WO2014159595 | 20062 |
| | | variable region | | SEQ ID NO: 108 | |
| MP398 | hNav1.7 | Light chain | H1H1009B | WO2014159595 | 20063 |
| | | variable region | | SEQ ID NO: 552 | |
| MP399 | hNav1.7 | Light chain | H1H1010B | WO2014159595 | 20064 |
| | | variable region | | SEQ ID NO: 116 | |
| MP400 | hNav1.7 | Light chain | H1H1011B | WO2014159595 | 20065 |
| | | variable region | | SEQ ID NO: 120 | |
| MP401 | hNav1.7 | Light chain | H1H1013B | WO2014159595 | 20066 |
| | | variable region | | SEQ ID NO: 124 | |
| MP402 | hNav1.7 | Light chain | H1H1015B | WO2014159595 | 20067 |
| | | variable region | | SEQ ID NO: 128 | |
| MP403 | hNav1.7 | Light chain | H1H1016B | WO2014159595 | 20068 |
| | | variable region | | SEQ ID NO: 554 | |
| MP404 | hNav1.7 | Light chain | H1H1019B | WO2014159595 | 20069 |
| | | variable region | | SEQ ID NO: 112 | |
| MP405 | hNav1.7 | Light chain | H1H1020B | WO2014159595 | 20070 |
| | | variable region | | SEQ ID NO: 556 | |
| MP406 | hNav1.7 | Light chain | H1H1022B | WO2014159595 | 20071 |
| | | variable region | | SEQ ID NO: 132 | |
| MP407 | hNav1.7 | Light chain | H1H1023B | WO2014159595 | 20072 |
| | | variable region | | SEQ ID NO: 136 | |
| MP408 | hNav1.7 | Light chain | H1H1024B | WO2014159595 | 20073 |
| | | variable region | | SEQ ID NO: 558 | |
| MP409 | hNav1.7 | Light chain | H1H1025B | WO2014159595 | 20074 |
| | | variable region | | SEQ ID NO: 560 | |
| MP410 | hNav1.7 | Light chain | H1H1026B | WO2014159595 | 20075 |
| | | variable region | | SEQ ID NO: 140 | |
| MP411 | hNav1.7 | Light chain | H1H1030B | WO2014159595 | 20076 |
| | | variable region | | SEQ ID NO: 144 | |
| MP412 | hNav1.7 | Light chain | H1H1032B | WO2014159595 | 20077 |
| | | variable region | | SEQ ID NO: 148 | |
| MP413 | hNav1.7 | Light chain | H1H1034B | WO2014159595 | 20078 |
| | | variable region | | SEQ ID NO: 562 | |
| MP414 | hNav1.7 | Light chain | H1H1035B | WO2014159595 | 20079 |
| | | variable region | | SEQ ID NO: 564 | |
| MP415 | hNav1.7 | Light chain | H1H1038B | WO2014159595 | 20080 |
| | | variable region | | SEQ ID NO: 152 | |
| MP416 | hNav1.7 | Light chain | H1H1041B | WO2014159595 | 20081 |
| | | variable region | | SEQ ID NO: 156 | |
| MP417 | hNav1.7 | Light chain | H1H1044B | WO2014159595 | 20082 |
| | | variable region | | SEQ ID NO: 160 | |
| MP418 | hNav1.7 | Light chain | H1H1045B | WO2014159595 | 20083 |
| | | variable region | | SEQ ID NO: 164 | |
| MP419 | hNav1.7 | Light chain | H1H1048B | WO2014159595 | 20084 |
| | | variable region | | SEQ ID NO: 566 | |
| MP420 | hNav1.7 | Light chain | H1H1049B | WO2014159595 | 20085 |
| | | variable region | | SEQ ID NO: 568 | |
| MP421 | hNav1.7 | Light chain | H1H1050B | WO2014159595 | 20086 |
| | | variable region | | SEQ ID NO: 168 | |
| MP422 | hNav1.7 | Light chain | H1H1051B | WO2014159595 | 20087 |
| | | variable region | | SEQ ID NO: 570 | |
| MP423 | hNav1.7 | Light chain | H1H1055B | WO2014159595 | 20088 |
| | | variable region | | SEQ ID NO: 172 | |
| MP424 | hNav1.7 | Light chain | H1H1056B | WO2014159595 | 20089 |
| | | variable region | | SEQ ID NO: 176 | |
| MP425 | hNav1.7 | Light chain | H1H1059B | WO2014159595 | 20090 |
| | | variable region | | SEQ ID NO: 180 | |
| MP426 | hNav1.7 | Light chain | H1H1060B | WO2014159595 | 20091 |
| | | variable region | | SEQ ID NO: 184 | |
| MP427 | hNav1.7 | Light chain | H1H1064B | WO2014159595 | 20092 |
| | | variable region | | SEQ ID NO: 572 | |
| MP428 | hNav1.7 | Light chain | H1H1071B | WO2014159595 | 20093 |
| | | variable region | | SEQ ID NO: 574 | |
| MP429 | hNav1.7 | Light chain | H1H1072B | WO2014159595 | 20094 |
| | | variable region | | SEQ ID NO: 576 | |
| MP430 | hNav1.7 | Light chain | H1H1077B | WO2014159595 | 20095 |
| | | variable region | | SEQ ID NO: 578 | |
| MP431 | hNav1.7 | Light chain | H1H1086B | WO2014159595 | 20096 |
| | | variable region | | SEQ ID NO: 580 | |
| MP432 | hNav1.7 | Light chain | H1H1096B | WO2014159595 | 20097 |
| | | variable region | | SEQ ID NO: 582 | |
| MP433 | hNav1.7 | Light chain | H1H1120B | WO2014159595 | 20098 |
| | | variable region | | SEQ ID NO: 584 | |
| MP434 | hNav1.7 | Light chain | H1H1128B | WO2014159595 | 20099 |
| | | variable region | | SEQ ID NO: 586 | |
| MP435 | hNav1.7 | Light chain | H1H1132B | WO2014159595 | 20100 |
| | | variable region | | SEQ ID NO: 588 | |
| MP436 | hNav1.7 | Light chain | H1H1142B | WO2014159595 | 20101 |
| | | variable region | | SEQ ID NO: 590 | |
| MP437 | hNav1.7 | Light chain | H1H1171B | WO2014159595 | 20102 |
| | | variable region | | SEQ ID NO: 592 | |
| MP438 | hNav1.7 | Light chain | H2M799N | WO2014159595 | 20103 |
| | | variable region | | SEQ ID NO: 831 | |
| MP439 | hNav1.7 | Light chain | H4H1003P | WO2014159595 | 20104 |
| | | variable region | | SEQ ID NO: 862 | |
| MP440 | hNav1.7 | Light chain | H4H1025P | WO2014159595 | 20105 |
| | | variable region | | SEQ ID NO: 874 | |
| MP441 | hNav1.7 | Light chain | H4H361 B | WO2014159595 | 20106 |
| | | variable region | | SEQ ID NO: 236 | |
| MP442 | hNav1.7 | Light chain | H4H362B | WO2014159595 | 20107 |
| | | variable region | | SEQ ID NO: 32 | |
| MP443 | hNav1.7 | Light chain | H4H362P | WO2014159595 | 20108 |
| | | variable region | | SEQ ID NO: 870 | |
| MP444 | hNav1.7 | Light chain | H4H363B | WO2014159595 | 20109 |
| | | variable region | | SEQ ID NO: 594 | |
| MP445 | hNav1.7 | Light chain | H4H364B | WO2014159595 | 20110 |
| | | variable region | | SEQ ID NO: 596 | |
| MP446 | hNav1.7 | Light chain | H4H365B | WO2014159595 | 20111 |
| | | variable region | | SEQ ID NO: 240 | |
| MP447 | hNav1.7 | Light chain | H4H366B | WO2014159595 | 20112 |
| | | variable region | | SEQ ID NO: 598 | |
| MP448 | hNav1.7 | Light chain | H4H367B | WO2014159595 | 20113 |
| | | variable region | | SEQ ID NO: 36 | |
| MP449 | hNav1.7 | Light chain | H4H368B | WO2014159595 | 20114 |
| | | variable region | | SEQ ID NO: 40 | |
| MP450 | hNav1.7 | Light chain | H4H369B | WO2014159595 | 20115 |
| | | variable region | | SEQ ID NO: 600 | |
| MP451 | hNav1.7 | Light chain | H4H371 B | WO2014159595 | 20116 |
| | | variable region | | SEQ ID NO: 244 | |
| MP452 | hNav1.7 | Light chain | H4H372B | WO2014159595 | 20117 |
| | | variable region | | SEQ ID NO: 248 | |
| MP453 | hNav1.7 | Light chain | H4H373B | WO2014159595 | 20118 |
| | | variable region | | SEQ ID NO: 252 | |
| MP454 | hNav1.7 | Light chain | H4H374B | WO2014159595 | 20119 |
| | | variable region | | SEQ ID NO: 602 | |
| MP455 | hNav1.7 | Light chain | H4H375B | WO2014159595 | 20120 |
| | | variable region | | SEQ ID NO: 604 | |
| MP456 | hNav1.7 | Light chain | H4H376B | WO2014159595 | 20121 |
| | | variable region | | SEQ ID NO: 606 | |
| MP457 | hNav1.7 | Light chain | H4H377B | WO2014159595 | 20122 |
| | | variable region | | SEQ ID NO: 608 | |
| MP458 | hNav1.7 | Light chain | H4H379B | WO2014159595 | 20123 |
| | | variable region | | SEQ ID NO: 256 | |
| MP459 | hNav1.7 | Light chain | H4H380B | WO2014159595 | 20124 |
| | | variable region | | SEQ ID NO: 610 | |
| MP460 | hNav1.7 | Light chain | H4H381 B | WO2014159595 | 20125 |
| | | variable region | | SEQ ID NO: 260 | |
| MP461 | hNav1.7 | Light chain | H4H382B | WO2014159595 | 20126 |
| | | variable region | | SEQ ID NO: 44 | |
| MP462 | hNav1.7 | Light chain | H4H384B | WO2014159595 | 20127 |
| | | variable region | | SEQ ID NO: 612 | |
| MP463 | hNav1.7 | Light chain | H4H385B | WO2014159595 | 20128 |
| | | variable region | | SEQ ID NO: 264 | |
| MP464 | hNav1.7 | Light chain | H4H385B | WO2014159595 | 20129 |
| | | variable region | | SEQ ID NO: 683 | |
| MP465 | hNav1.7 | Light chain | H4H387B | WO2014159595 | 20130 |
| | | variable region | | SEQ ID NO: 614 | |
| MP466 | hNav1.7 | Light chain | H4H388B | WO2014159595 | 20131 |
| | | variable region | | SEQ ID NO: 268 | |
| MP467 | hNav1.7 | Light chain | H4H391B | WO2014159595 | 20132 |
| | | variable region | | SEQ ID NO: 48 | |
| MP468 | hNav1.7 | Light chain | H4H391P | WO2014159595 | 20133 |
| | | variable region | | SEQ ID NO: 52 | |
| MP469 | hNav1.7 | Light chain | H4H392B | WO2014159595 | 20134 |
| | | variable region | | SEQ ID NO: 616 | |
| MP470 | hNav1.7 | Light chain | H4H394B | WO2014159595 | 20135 |
| | | variable region | | SEQ ID NO: 618 | |
| MP471 | hNav1.7 | Light chain | H4H395B | WO2014159595 | 20136 |
| | | variable region | | SEQ ID NO: 620 | |
| MP472 | hNav1.7 | Light chain | H4H395B | WO2014159595 | 20137 |
| | | variable region | | SEQ ID NO: 687 | |
| MP473 | hNav1.7 | Light chain | H4H396B | WO2014159595 | 20138 |
| | | variable region | | SEQ ID NO: 272 | |
| MP474 | hNav1.7 | Light chain | H4H397B | WO2014159595 | 20139 |
| | | variable region | | SEQ ID NO: 56 | |
| MP475 | hNav1.7 | Light chain | H4H398B | WO2014159595 | 20140 |
| | | variable region | | SEQ ID NO: 276 | |
| MP476 | hNav1.7 | Light chain | H4H399B | WO2014159595 | 20141 |
| | | variable region | | SEQ ID NO: 280 | |
| MP477 | hNav1.7 | Light chain | H4H400B | WO2014159595 | 20142 |
| | | variable region | | SEQ ID NO: 284 | |
| MP478 | hNav1.7 | Light chain | H4H402B | WO2014159595 | 20143 |
| | | variable region | | SEQ ID NO: 288 | |
| MP479 | hNav1.7 | Light chain | H4H404B | WO2014159595 | 20144 |
| | | variable region | | SEQ ID NO: 622 | |
| MP480 | hNav1.7 | Light chain | H4H408B | WO2014159595 | 20145 |
| | | variable region | | SEQ ID NO: 60 | |
| MP481 | hNav1.7 | Light chain | H4H409B | WO2014159595 | 20146 |
| | | variable region | | SEQ ID NO: 292 | |
| MP482 | hNav1.7 | Light chain | H4H411B | WO2014159595 | 20147 |
| | | variable region | | SEQ ID NO: 626 | |
| MP483 | hNav1.7 | Light chain | H4H410B | WO2014159595 | 20148 |
| | | variable region | | SEQ ID NO: 624 | |
| MP484 | hNav1.7 | Light chain | H4H412B | WO2014159595 | 20149 |
| | | variable region | | SEQ ID NO: 628 | |
| MP485 | hNav1.7 | Light chain | H4H414B | WO2014159595 | 20150 |
| | | variable region | | SEQ ID NO: 630 | |
| MP486 | hNav1.7 | Light chain | H4H415B | WO2014159595 | 20151 |
| | | variable region | | SEQ ID NO: 296 | |
| MP487 | hNav1.7 | Light chain | H4H416B | WO2014159595 | 20152 |
| | | variable region | | SEQ ID NO: 300 | |
| MP488 | hNav1.7 | Light chain | H4H419B | WO2014159595 | 20153 |
| | | variable region | | SEQ ID NO: 304 | |
| MP489 | hNav1.7 | Light chain | H4H421B | WO2014159595 | 20154 |
| | | variable region | | SEQ ID NO: 632 | |
| MP490 | hNav1.7 | Light chain | H4H422B | WO2014159595 | 20155 |
| | | variable region | | SEQ ID NO: 308 | |
| MP491 | hNav1.7 | Light chain | H4H426B | WO2014159595 | 20156 |
| | | variable region | | SEQ ID NO: 64 | |
| MP492 | hNav1.7 | Light chain | H4H428B | WO2014159595 | 20157 |
| | | variable region | | SEQ ID NO: 634 | |
| MP493 | hNav1.7 | Light chain | H4H430B | WO2014159595 | 20158 |
| | | variable region | | SEQ ID NO: 636 | |
| MP494 | hNav1.7 | Light chain | H4H431B | WO2014159595 | 20159 |
| | | variable region | | SEQ ID NO: 638 | |
| MP495 | hNav1.7 | Light chain | H4H433B | WO2014159595 | 20160 |
| | | variable region | | SEQ ID NO: 640 | |
| MP496 | hNav1.7 | Light chain | H4H434B | WO2014159595 | 20161 |
| | | variable region | | SEQ ID NO: 312 | |
| MP497 | hNav1.7 | Light chain | H4H434B | WO2014159595 | 20162 |
| | | variable region | | SEQ ID NO: 691 | |
| MP498 | hNav1.7 | Light chain | H4H434P | WO2014159595 | 20163 |
| | | variable region | | SEQ ID NO: 695 | |
| MP499 | hNav1.7 | Light chain | H4H435B | WO2014159595 | 20164 |
| | | variable region | | SEQ ID NO: 642 | |
| MP500 | hNav1.7 | Light chain | H4H438B | WO2014159595 | 20165 |
| | | variable region | | SEQ ID NO: 316 | |
| MP501 | hNav1.7 | Light chain | H4H438B | WO2014159595 | 20166 |
| | | variable region | | SEQ ID NO: 699 | |
| MP502 | hNav1.7 | Light chain | H4H439B | WO2014159595 | 20167 |
| | | variable region | | SEQ ID NO: 68 | |
| MP503 | hNav1.7 | Light chain | H4H439P | WO2014159595 | 20168 |
| | | variable region | | SEQ ID NO: 72 | |
| MP504 | hNav1.7 | Light chain | H4H440B | WO2014159595 | 20169 |
| | | variable region | | SEQ ID NO: 644 | |
| MP505 | hNav1.7 | Light chain | H4H441B | WO2014159595 | 20170 |
| | | variable region | | SEQ ID NO: 646 | |
| MP506 | hNav1.7 | Light chain | H4H441 B | WO2014159595 | 20171 |
| | | variable region | | SEQ ID NO: 703 | |
| MP507 | hNav1.7 | Light chain | H4H441 P | WO2014159595 | 20172 |
| | | variable region | | SEQ ID NO: 866 | |
| MP508 | hNav1.7 | Light chain | H4H442B | WO2014159595 | 20173 |
| | | variable region | | SEQ ID NO: 320 | |
| MP509 | hNav1.7 | Light chain | H4H443B | WO2014159595 | 20174 |
| | | variable region | | SEQ ID NO: 76 | |
| MP510 | hNav1.7 | Light chain | H4H444B | WO2014159595 | 20175 |
| | | variable region | | SEQ ID NO: 324 | |
| MP511 | hNav1.7 | Light chain | H4H446B | WO2014159595 | 20176 |
| | | variable region | | SEQ ID NO: 328 | |
| MP512 | hNav1.7 | Light chain | H4H448B | WO2014159595 | 20177 |
| | | variable region | | SEQ ID NO: 80 | |
| MP513 | hNav1.7 | Light chain | H4H450B | WO2014159595 | 20178 |
| | | variable region | | SEQ ID NO: 648 | |
| MP514 | hNav1.7 | Light chain | H4H451B | WO2014159595 | 20179 |
| | | variable region | | SEQ ID NO: 650 | |
| MP515 | hNav1.7 | Light chain | H4H452B | WO2014159595 | 20180 |
| | | variable region | | SEQ ID NO: 652 | |
| MP516 | hNav1.7 | Light chain | H4H455B | WO2014159595 | 20181 |
| | | variable region | | SEQ ID NO: 654 | |
| MP517 | hNav1.7 | Light chain | H4H456B | WO2014159595 | 20182 |
| | | variable region | | SEQ ID NO: 332 | |
| MP518 | hNav1.7 | Light chain | H4H457B | WO2014159595 | 20183 |
| | | variable region | | SEQ ID NO: 336 | |
| MP519 | hNav1.7 | Light chain | H4H458B | WO2014159595 | 20184 |
| | | variable region | | SEQ ID NO: 340 | |
| MP520 | hNav1.7 | Light chain | H4H459B | WO2014159595 | 20185 |
| | | variable region | | SEQ ID NO: 656 | |
| MP521 | hNav1.7 | Light chain | H4H460B | WO2014159595 | 20186 |
| | | variable region | | SEQ ID NO: 344 | |
| MP522 | hNav1.7 | Light chain | H4H461 B | WO2014159595 | 20187 |
| | | variable region | | SEQ ID NO: 348 | |
| MP523 | hNav1.7 | Light chain | H4H462B | WO2014159595 | 20188 |
| | | variable region | | SEQ ID NO: 352 | |
| MP524 | hNav1.7 | Light chain | H4H463B | WO2014159595 | 20189 |
| | | variable region | | SEQ ID NO: 356 | |
| MP525 | hNav1.7 | Light chain | H4H464B | WO2014159595 | 20190 |
| | | variable region | | SEQ ID NO: 360 | |
| MP526 | hNav1.7 | Light chain | H4H465B | WO2014159595 | 20191 |
| | | variable region | | SEQ ID NO: 364 | |
| MP527 | hNav1.7 | Light chain | H4H466B | WO2014159595 | 20192 |
| | | variable region | | SEQ ID NO: 368 | |
| MP528 | hNav1.7 | Light chain | H4H467B | WO2014159595 | 20193 |
| | | variable region | | SEQ ID NO: 372 | |
| MP529 | hNav1.7 | Light chain | H4H468B | WO2014159595 | 20194 |
| | | variable region | | SEQ ID NO: 84 | |
| MP530 | hNav1.7 | Light chain | H4H468P | WO2014159595 | 20195 |
| | | variable region | | SEQ ID NO: 88 | |
| MP531 | hNav1.7 | Light chain | H4H469B | WO2014159595 | 20196 |
| | | variable region | | SEQ ID NO: 658 | |
| MP532 | hNav1.7 | Light chain | H4H470B | WO2014159595 | 20197 |
| | | variable region | | SEQ ID NO: 660 | |
| MP533 | hNav1.7 | Light chain | H4H471B | WO2014159595 | 20198 |
| | | variable region | | SEQ ID NO: 92 | |
| MP534 | hNav1.7 | Light chain | H4H471P | WO2014159595 | 20199 |
| | | variable region | | SEQ ID NO: 96 | |
| MP535 | hNav1.7 | Light chain | H4H472B | WO2014159595 | 20200 |
| | | variable region | | SEQ ID NO: 376 | |
| MP536 | hNav1.7 | Light chain | H4H473B | WO2014159595 | 20201 |
| | | variable region | | SEQ ID NO: 380 | |
| MP537 | hNav1.7 | Light chain | H4H474B | WO2014159595 | 20202 |
| | | variable region | | SEQ ID NO: 662 | |
| MP538 | hNav1.7 | Light chain | H4H475B | WO2014159595 | 20203 |
| | | variable region | | SEQ ID NO: 384 | |
| MP539 | hNav1.7 | Light chain | H4H476B | WO2014159595 | 20204 |
| | | variable region | | SEQ ID NO: 664 | |
| MP540 | hNav1.7 | Light chain | H4H477B | WO2014159595 | 20205 |
| | | variable region | | SEQ ID NO: 388 | |
| MP541 | hNav1.7 | Light chain | H4H479B | WO2014159595 | 20206 |
| | | variable region | | SEQ ID NO: 666 | |
| MP542 | hNav1.7 | Light chain | H4H480B | WO2014159595 | 20207 |
| | | variable region | | SEQ ID NO: 392 | |
| MP543 | hNav1.7 | Light chain | H4H481 B | WO2014159595 | 20208 |
| | | variable region | | SEQ ID NO: 396 | |
| MP544 | hNav1.7 | Light chain | H4H482B | WO2014159595 | 20209 |
| | | variable region | | SEQ ID NO: 400 | |
| MP545 | hNav1.7 | Light chain | H4H483B | WO2014159595 | 20210 |
| | | variable region | | SEQ ID NO: 404 | |
| MP546 | hNav1.7 | Light chain | H4H484B | WO2014159595 | 20211 |
| | | variable region | | SEQ ID NO: 408 | |
| MP547 | hNav1.7 | Light chain | H4H486B | WO2014159595 | 20212 |
| | | variable region | | SEQ ID NO: 412 | |
| MP548 | hNav1.7 | Light chain | H4H487B | WO2014159595 | 20213 |
| | | variable region | | SEQ ID NO: 668 | |
| MP549 | hNav1.7 | Light chain | H4H488B | WO2014159595 | 20214 |
| | | variable region | | SEQ ID NO: 416 | |
| MP550 | hNav1.7 | Light chain | H4H489B | WO2014159595 | 20215 |
| | | variable region | | SEQ ID NO: 420 | |
| MP551 | hNav1.7 | Light chain | H4H491B | WO2014159595 | 20216 |
| | | variable region | | SEQ ID NO: 424 | |
| MP552 | TNF | Light chain | | US20030157061 | 20217 |
| | | variable region | | SEQ ID NO: 4 | |
| MP553 | TrkA | Light chain | 3-23*01 | WO2009098238 | 20218 |
| | | variable region | | SEQ ID NO: 19 | |
| MP554 | TrkA | Light chain | BXhVH5VL1 | WO2009098238 | 20219 |
| | | variable region | N297A i | SEQ ID NO: 23 | |
| MP555 | TrkA | Light chain | HuVLWO | WQ2009098238 | 20220 |
| | | variable region | | SEQ ID NO: 18 | |
| MP556 | TrkA | Light chain | JH4 | WO2009098238 | 20221 |
| | | variable region | | SEQ ID NO: 20 | |
| MP557 | TrkA | Light chain | JK1 | WO2009098238 | 20222 |
| | | variable region | | SEQ ID NO: 22 | |
| MP558 | TrkA | Light chain | L6*01 | WO2009098238 | 20223 |
| | | variable region | | SEQ ID NO: 21 | |
| MP559 | NGF | Light chain | Fasinumab, | U.S. Pat. No. 7,988,967 | 20224 |
| | | variable region, | REGN475, | SEQ ID NO: 110; | |
| | | Antibody for | SAR164877 | U.S. Pat. No. 7,988,967 | |
| | | chronic pain | | SEQ ID NO: 92 | |
| MP560 | NGF | Light chain, | Fulranumab, | U.S. Pat. No. 7,601,818 | 20225 |
| | | Antibody for | 4D4, AMG- | SEQ ID NO: 44; | |
| | | chronic pain | 403, JNJ- | U.S. Pat. No. 8,552,157 | |
| | | | 42160443 | SEQ ID NO: 17; | |
| | | | | U.S. Pat. No. 8,048,421 | |
| | | | | SEQ ID NO: 84 | |
| MP561 | NGF | Light chain, | Fasinumab, | | 20226 |
| | | Antibody for | REGN475, | | |
| | | chronic pain | SAR164877 | | |
| MP562 | NGF | Light chain, | Tanezumab, | US20040237124 | 20227 |
| | | Antibody for | PF-04383119, | SEQ ID NO: 2 | |
| | | pain, chronic | RN624, E3 | | |
| | | and acute, | | | |
| | | osteoarthritis | | | |
| MP563 | CGRP | Variable Heavy | G1, cluster | U.S. Pat. No. 9,115,194 | 20228 |
| | | Domain | headache | SEQ ID NO: 1 | |
| MP564 | CGRP | Variable Light | G1, cluster | U.S. Pat. No. 9,115,194 | 20229 |
| | | Domain | headache | SEQ ID NO: 2 | |

### Ocular Disease Antibodies

[0395] In some embodiments, the payload region of the viral particle comprises one or more nucleic acid sequences encoding one or more of the ocular disease payload antibody polypeptides listed in Table 11 (0C1-00676; SEQ ID NO: 20230-20905).

TABLE 11
Ocular Disease Antibodies

| Antibody No. | Target | Description | Antibody Name | Reference Information | SEQ ID NO |
|---|---|---|---|---|---|
| OC1 | VEGF-A | Fab-12 1cz8_L, | Ranibizumab, | Lien and Lowman, In: | 20230 |
| | | Fab-12 variant | Lucentis | Chemajovsky, 2008, Therapeutic | |
| | | Y0317/L- | | Antibodies. Handbook of | |
| | | KAPPA (V- | | Experimental Pharmacology 181, | |
| | | KAPPA(1- | | Springer-Verlag, Berlin | |
| | | 107) + C- | | Heidelberg 131-150 | |
| | | KAPPA(108- | | | |
| | | 213) | | | |
| OC2 | VEGF-A | Fab-12 variant | Ranibizumab, | Lien and Lowman, In: | 20231 |
| | | Y031/Fab-12 | Lucentis | Chemajovsky, 2008, Therapeutic | |
| | | variant Y0317 | | Antibodies. Handbook of | |
| | | and VH-CH1 | | Experimental Pharmacology 181, | |
| | | (VH(1- | | Springer-Verlag, Berlin | |
| | | 123) + CH1(124- | | Heidelberg 131-150 | |
| | | 215) | | | |
| OC3 | VEGF-A | Fab-12 variant | Ranibizumab, | Lien and Lowman, In: | 20232 |
| | | Y0317/L- | Lucentis | Chemajovsky, 2008, Therapeutic | |
| | | K APPA (V- | | Antibodies. Handbook of | |
| | | KAPPA(1- | | Experimental Pharmacology 181, | |
| | | 107) + C- | | Springer-Verlag, Berlin | |
| | | KAPPA(108- | | Heidelberg 131-150 | |
| | | 213) | | | |
| OC4 | VEGF-A | Fab-12 variant | Ranibizumab, | Lien and Lowman, In: | 20233 |
| | | Y0317/VH- | Lucentis | Chemajovsky, 2008, Therapeutic | |
| | | CH1 (VH(1- | | Antibodies. Handbook of | |
| | | 123) + CH1(124- | | Experimental Pharmacology 181, | |
| | | 215) | | Springer-Verlag, Berlin | |
| | | | | Heidelberg 131-150 | |
| OC5 | | Fusion protein | Aflibercept | | 20234 |
| | | | fusion protein | | |
| OC6 | | Fusion protein | Conbercept | | 20235 |
| | | | fusion protein | | |
| OC7 | Annexin IV or a | Heavy chain | B4 | WO2014116880 | 20236 |
| | phospholipid; | | | SEQ ID NO: 15 | |
| | and (b) a | | | | |
| | complement | | | | |
| | inhibitor | | | | |
| OC8 | Annexin IV or a | Heavy chain | B4 | WO2014116880 | 20237 |
| | phospholipid; | | | SEQ ID NO: 16 | |
| | and (b) a | | | | |
| | complement | | | | |
| | inhibitor | | | | |
| OC9 | Annexin IV or a | Heavy chain | C2 | WO2014116880 | 20238 |
| | phospholipid; | | | SEQ ID NO: 36 | |
| | and (b) a | | | | |
| | complement | | | | |
| | inhibitor | | | | |
| OC10 | C3b | Heavy chain | rhuMAB 4D5- | U.S. Pat. No. 8,377,437 | 20239 |
| | | | 8 | SEQ ID NO: 14 | |
| OC11 | C3b, Properdin | Heavy chain | H-6 | WO2015099838 | 20240 |
| | (factor P), | | | SEQ ID NO: 49 | |
| | Factors Ba and | | | | |
| | Bb, C5, C6, C7, | | | | |
| | C8, C9 | | | | |
| OC12 | C3b, Properdin | Heavy chain | H-7 | WO2015099838 | 20241 |
| | (factor P), | | | SEQ ID NO: 50 | |
| | Factors Ba and | | | | |
| | Bb, C5, C6, C7, | | | | |
| | C8, C9 | | | | |
| OC13 | C3b, Properdin | Heavy chain | H-8 | WO2015099838 | 20242 |
| | (factor P), | | | SEQ ID NO: 51 | |
| | Factors Ba and | | | | |
| | Bb, C5, C6, C7, | | | | |
| | C8. C9 | | | | |
| OC14 | C3b, Properdin | Heavy chain | H-9 | WO2015099838 | 20243 |
| | (factor P), | | | SEQ ID NO: 52 | |
| | Factors Ba and | | | | |
| | Bb, C5, C6, C7, | | | | |
| | C8, C9 | | | | |
| OC15 | C3b, Properdin | Heavy chain | H-10 | WO2015099838 | 20244 |
| | (factor P), | | | SEQ ID NO: 53 | |
| | Factors Ba and | | | | |
| | Bb, C5, C6, C7, | | | | |
| | C8, C9 | | | | |
| OC16 | C3b, Properdin | Heavy chain | H-11 | WO2015099838 | 20245 |
| | (factor P), | | | SEQ ID NO: 54 | |
| | Factors Ba and | | | | |
| | Bb, C5, C6, C7, | | | | |
| | C8, C9 | | | | |
| OC17 | C3b, Properdin | Heavy chain | H-12 | WO2015099838 | 20246 |
| | (factor P), | | | SEQ ID NO: 55 | |
| | Factors Ba and | | | | |
| | Bb, C5, C6, C7, | | | | |
| | C8, C9 | | | | |
| OC18 | C3b, Properdin | Heavy chain | H-13 | WO2015099838 | 20247 |
| | (factor P), | | | SEQ ID NO: 56 | |
| | Factors Ba and | | | | |
| | Bb, C5, C6, C7, | | | | |
| | C8, C9 | | | | |
| OC19 | C3b, Properdin | Heavy chain | H-14 | WO2015099838 | 20248 |
| | (factor P), | | | SEQ ID NO: 57 | |
| | Factors Ba and | | | | |
| | Bb, C5, C6, C7, | | | | |
| | C8, C9 | | | | |
| OC20 | C3b, Properdin | Heavy chain | H-15 | WO2015099838 | 20249 |
| | (factor P), | | | SEQ ID NO: 58 | |
| | Factors Ba and | | | | |
| | Bb, C5, C6, C7, | | | | |
| | C8, C9 | | | | |
| OC21 | C3b, Properdin | Heavy chain | H-16 | WO2015099838 | 20250 |
| | (factor P), | | | SEQ ID NO: 59 | |
| | Factors Ba and | | | | |
| | Bb, C5, C6, C7, | | | | |
| | C8, C9 | | | | |
| OC22 | C3b, Properdin | Heavy chain | H-17 | WO2015099838 | 20251 |
| | (factor P), | | | SEQ ID NO: 60 | |
| | Factors Ba and | | | | |
| | Bb, C5, C6, C7, | | | | |
| | C8, C9 | | | | |
| OC23 | C3b, Properdin | Heavy chain | H-18 | WO2015099838 | 20252 |
| | (factor P), | | | SEQ ID NO: 61 | |
| | Factors Ba and | | | | |
| | Bb, C5, C6, C7, | | | | |
| | C8, C9 | | | | |
| OC24 | C3b, Properdin | Heavy chain | H-19 | WO2015099838 | 20253 |
| | (factor P), | | | SEQ ID NO: 62 | |
| | Factors Ba and | | | | |
| | Bb, C5, C6, C7, | | | | |
| | C8, C9 | | | | |
| OC25 | C3b, Properdin | Heavy chain | H-20 | WO2015099838 | 20254 |
| | (factor P), | | | SEQ ID NO: 63 | |
| | Factors Ba and | | | | |
| | Bb, C5, C6, C7, | | | | |
| | C8, C9 | | | | |
| OC26 | C3b, Properdin | Heavy chain | H-21 | WO2015099838 | 20255 |
| | (factor P), | | | SEQ ID NO: 64 | |
| | Factors Ba and | | | | |
| | Bb, C5, C6, C7, | | | | |
| | C8, C9 | | | | |
| OC27 | C3b, Properdin | Heavy chain | H-22 | WO2015099838 | 20256 |
| | (factor P), | | | SEQ ID NO: 65 | |
| | Factors Ba and | | | | |
| | Bb, C5, C6, C7, | | | | |
| | C8, C9 | | | | |
| OC28 | C3b, Properdin | Heavy chain | H-23 | WO2015099838 | 20257 |
| | (factor P), | | | SEQ ID NO: 66 | |
| | Factors Ba and | | | | |
| | Bb, C5, C6, C7, | | | | |
| | C8, C9 | | | | |
| OC29 | C3b, Properdin | Heavy chain | H-24 | WO2015099838 | 20258 |
| | (factor P), | | | SEQ ID NO: 67 | |
| | Factors Ba and | | | | |
| | Bb, C5, C6, C7, | | | | |
| | C8, C9 | | | | |
| OC30 | C3b, Properdin | Heavy chain | H-25 | WO2015099838 | 20259 |
| | (factor P), | | | SEQ ID NO: 68 | |
| | Factors Ba and | | | | |
| | Bb, C5, C6, C7, | | | | |
| | C8, C9 | | | | |
| OC31 | C3b, Properdin | Heavy chain | H-26 | WO2015099838 | 20260 |
| | (factor P), | | | SEQ ID NO: 69 | |
| | Factors Ba and | | | | |
| | Bb, C5, C6, C7, | | | | |
| | C8, C9 | | | | |
| OC32 | C3b, Properdin | Heavy chain | H-27 | WO2015099838 | 20261 |
| | (factor P), | | | SEQ ID NO: 70 | |
| | Factors Ba and | | | | |
| | Bb, C5, C6, C7, | | | | |
| | C8, C9 | | | | |
| OC33 | C3b, Properdin | Heavy chain | H-28 | WO2015099838 | 20262 |
| | (factor P), | | | SEQ ID NO: 71 | |
| | Factors Ba and | | | | |
| | Bb, C5, C6, C7, | | | | |
| | C8, C9 | | | | |
| OC34 | C3b, Properdin | Heavy chain | H-29 | WO2015099838 | 20263 |
| | (factor P), | | | SEQ ID NO: 72 | |
| | Factors Ba and | | | | |
| | Bb, C5, C6, C7, | | | | |
| | C8, C9 | | | | |
| OC35 | C3b, Properdin | Heavy chain | H-30 | WO2015099838 | 20264 |
| | (factor P), | | | SEQ ID NO: 73 | |
| | Factors Ba and | | | | |
| | Bb, C5, C6, C7, | | | | |
| | C8, C9 | | | | |
| OC36 | C3b, Properdin | Heavy chain | H-31 | WO2015099838 | 20265 |
| | (factor P), | | | SEQ ID NO: 74 | |
| | Factors Ba and | | | | |
| | Bb, C5, C6, C7, | | | | |
| | C8, C9 | | | | |
| OC37 | C3b, Properdin | Heavy chain | H-32 | WO2015099838 | 20266 |
| | (factor P), | | | SEQ ID NO: 75 | |
| | Factors Ba and | | | | |
| | Bb, C5, C6, C7, | | | | |
| | C8, C9 | | | | |
| OC38 | C3b, Properdin | Heavy chain | H-33 | WO2015099838 | 20267 |
| | (factor P), | | | SEQ ID NO: 76 | |
| | Factors Ba and | | | | |
| | Bb, C5, C6, C7, | | | | |
| | C8, C9 | | | | |
| OC39 | C3b, Properdin | Heavy chain | H-34 | WO2015099838 | 20268 |
| | (factor P), | | | SEQ ID NO: 77 | |
| | Factors Ba and | | | | |
| | Bb, C5, C6, C7, | | | | |
| | C8, C9 | | | | |
| OC40 | C3b, Properdin | Heavy chain | H-35 | WO2015099838 | 20269 |
| | (factor P), | | | SEQ ID NO: 78 | |
| | Factors Ba and | | | | |
| | Bb, C5, C6, C7, | | | | |
| | C8, C9 | | | | |
| OC41 | C3b, Properdin | Heavy chain | H-36 | WO2015099838 | 20270 |
| | (factor P), | | | SEQ ID NO: 79 | |
| | Factors Ba and | | | | |
| | Bb, C5, C6, C7, | | | | |
| | C8, C9 | | | | |
| OC42 | C3b, Properdin | Heavy chain | H-37 | WO2015099838 | 20271 |
| | (factor P), | | | SEQ ID NO: 80 | |
| | Factors Ba and | | | | |
| | Bb, C5, C6, C7, | | | | |
| | C8, C9 | | | | |
| OC43 | C3b, Properdin | Heavy chain | H-38 | WO2015099838 | 20272 |
| | (factor P), | | | SEQ ID NO: 81 | |
| | Factors Ba and | | | | |
| | Bb, C5, C6, C7, | | | | |
| | C8, C9 | | | | |
| OC44 | C3b, Properdin | Heavy chain | H-39 | WO2015099838 | 20273 |
| | (factor P), | | | SEQ ID NO: 82 | |
| | Factors Ba and | | | | |
| | Bb, C5, C6, C7, | | | | |
| | C8, C9 | | | | |
| OC45 | C3b, Properdin | Heavy chain | H-40 | WO2015099838 | 20274 |
| | (factor P), | | | SEQ ID NO: 83 | |
| | Factors Ba and | | | | |
| | Bb, C5, C6, C7, | | | | |
| | C8, C9 | | | | |
| OC46 | C3b, Properdin | Heavy chain | H-41 | WO2015099838 | 20275 |
| | (factor P), | | | SEQ ID NO: 84 | |
| | Factors Ba and | | | | |
| | Bb, C5, C6, C7, | | | | |
| | C8, C9 | | | | |
| OC47 | C3b, Properdin | Heavy chain | H-42 | WO2015099838 | 20276 |
| | (factor P), | | | SEQ ID NO: 85 | |
| | Factors Ba and | | | | |
| | Bb, C5, C6, C7, | | | | |
| | C8, C9 | | | | |
| OC48 | C3b, Properdin | Heavy chain | H-43 | WO2015099838 | 20277 |
| | (factor P), | | | SEQ ID NO: 86 | |
| | Factors Ba and | | | | |
| | Bb, C5, C6, C7, | | | | |
| | C8, C9 | | | | |
| OC49 | C3b, Properdin | Heavy chain | H-1 | WO2015099838 | 20278 |
| | (factor P), | | | SEQ ID NO: 44 | |
| | Factors Ba and | | | | |
| | Bb, C5, C6, C7, | | | | |
| | C8, C9 | | | | |
| OC50 | C3b, Properdin | Heavy chain | H-2 | WO2015099838 | 20279 |
| | (factor P), | | | SEQ ID NO: 45 | |
| | Factors Ba and | | | | |
| | Bb, C5, C6, C7, | | | | |
| | C8, C9 | | | | |
| OC51 | C3b, Properdin | Heavy chain | H-3 | WO2015099838 | 20280 |
| | (factor P), | | | SEQ ID NO: 46 | |
| | Factors Ba and | | | | |
| | Bb, C5, C6, C7, | | | | |
| | C8, C9 | | | | |
| OC52 | C3b, Properdin | Heavy chain | H-4 | WO2015099838 | 20281 |
| | (factor P), | | | SEQ ID NO: 47 | |
| | Factors Ba and | | | | |
| | Bb, C5, C6, C7, | | | | |
| | C8, C9 | | | | |
| OC53 | C3b, Properdin | Heavy chain | H-5 | WO2015099838 | 20282 |
| | (factor P), | | | SEQ ID NO: 48 | |
| | Factors Ba and | | | | |
| | Bb, C5, C6, C7, | | | | |
| | C8, C9 | | | | |
| OC54 | C5 | Heavy chain | NVS808 | US20150158936 | 20283 |
| | | | | SEQ ID NO: 107 | |
| OC55 | C5 | Heavy chain | NVS806 | US20150158936 | 20284 |
| | | | | SEQ ID NO: 121 | |
| OC56 | C5 | Heavy chain | NVS804 | US20150158936 | 20285 |
| | | | | SEQ ID NO: 135 | |
| OC57 | C5 | Heavy chain | NVS809 | US20150158936 | 20286 |
| | | | | SEQ ID NO: 149 | |
| OC58 | C5 | Heavy chain | NVS805 | US20150158936 | 20287 |
| | | | | SEQ ID NO: 163 | |
| OC59 | C5 | Heavy chain | NVS962-S | US20150158936 | 20288 |
| | | | | SEQ ID NO: 177 | |
| OC60 | C5 | Heavy chain | NVS962-Q | US20150158936 | 20289 |
| | | | | SEQ ID NO: 191 | |
| OC61 | C5 | Heavy chain | NVS962-S31A | US20150158936 | 20290 |
| | | | | SEQ ID NO: 205 | |
| OC62 | C5 | Heavy chain | NVS962-G | US20150158936 | 20291 |
| | | | | SEQ ID NO: 219 | |
| OC63 | C5 | Heavy chain | NVS963 | US20150158936 | 20292 |
| | | | | SEQ ID NO: 23 | |
| OC64 | C5 | Heavy chain | NVS962-T | US20150158936 | 20293 |
| | | | | SEQ ID NO: 233 | |
| OC65 | C5 | Heavy chain | NVS965-T | US20150158936 | 20294 |
| | | | | SEQ ID NO: 247 | |
| OC66 | C5 | Heavy chain | NVS965-Q | US20150158936 | 20295 |
| | | | | SEQ ID NO: 261 | |
| OC67 | C5 | Heavy chain | NVS965-S | US20150158936 | 20296 |
| | | | | SEQ ID NO: 275 | |
| OC68 | C5 | Heavy chain | NVS964 | US20150158936 | 20297 |
| | | | | SEQ ID NO: 37 | |
| OC69 | C5 | Heavy chain | Antibody 8109 | US20150158936 | 20298 |
| | | | | SEQ ID NO: 418 | |
| OC70 | C5 | Heavy chain | Antibody 8110 | US20150158936 | 20299 |
| | | | | SEQ ID NO: 434 | |
| OC71 | C5 | Heavy chain | Antibody 8111 | US20150158936 | 20300 |
| | | | | SEQ ID NO: 449 | |
| OC72 | C5 | Heavy chain | Antibody 8113 | US20150158936 | 20301 |
| | | | | SEQ ID NO: 462 | |
| OC73 | C5 | Heavy chain | Antibody 8114 | US20150158936 | 20302 |
| | | | | SEQ ID NO: 478 | |
| OC74 | C5 | Heavy chain | NVS966 | US20150158936 | 20303 |
| | | | | SEQ ID NO: 51 | |
| OC75 | C5 | Heavy chain | NVS965 | US20150158936 | 20304 |
| | | | | SEQ ID NO: 65 | |
| OC76 | C5 | Heavy chain | NVS967 | US20150158936 | 20305 |
| | | | | SEQ ID NO: 79 | |
| OC77 | C5 | Heavy chain | NVS962 | US20150158936 | 20306 |
| | | | | SEQ ID NO: 9 | |
| OC78 | C5 | Heavy chain | NVS807 | US20150158936 | 20307 |
| | | | | SEQ ID NO: 93 | |
| OC79 | C5 | Heavy chain | H5 | US20150239966 | 20308 |
| | | | | SEQ ID NO: 10 | |
| OC80 | C5 | Heavy chain | H6 | US20150239966 | 20309 |
| | | | | SEQ ID NO: 12 | |
| OC81 | C5 | Heavy chain | H1 | US20150239966 | 20310 |
| | | | | SEQ ID NO: 2 | |
| OC82 | C5 | Heavy chain | H2 | US20150239966 | 20311 |
| | | | | SEQ ID NO: 4 | |
| OC83 | C5 | Heavy chain | H3 | US20150239966 | 20312 |
| | | | | SEQ ID NO: 6 | |
| OC84 | C5 | Heavy chain | H4 | US20150239966 | 20313 |
| | | | | SEQ ID NO: 8 | |
| OC85 | C5 | Heavy chain | Tesidolumab, | U.S. Pat. No. 8,241,628 | 20314 |
| | | | “LFG 316, | SEQ ID NO: 9 | |
| | | | LFG-316, | | |
| | | | LFG316” | | |
| OC86 | C5 | Heavy chain | | U.S. Pat. No. 9,133,269 | 20315 |
| | | | | SEQ ID NO: 1 | |
| OC87 | C5 | Heavy chain | | U.S. Pat. No. 9,133,269 | 20316 |
| | | | | SEQ ID NO: 2 | |
| OC88 | C5 | Heavy chain | | U.S. Pat. No. 9,133,269 | 20317 |
| | | | | SEQ ID NO: 27 | |
| OC89 | C5 | Heavy chain | | U.S. Pat. No. 9,133,269 | 20318 |
| | | | | SEQ ID NO: 3 | |
| OC90 | C5 | Heavy chain | | U.S. Pat. No. 9,133,269 | 20319 |
| | | | | SEQ ID NO: 4 | |
| OC91 | C5 | Heavy chain | | U.S. Pat. No. 9,133,269 | 20320 |
| | | | | SEQ ID NO: 5 | |
| OC92 | C5a | Heavy chain | BNJ364 | US20130224187 | 20321 |
| | | | | SEQ ID NO: 25 | |
| OC93 | C5a | Heavy chain | BNJ367, | US20130224187 | 20322 |
| | | | BNJ371, | SEQ ID NO: 33 | |
| | | | BNJ378 | | |
| OC94 | C5a | Heavy chain | BNJ366 | US20130224187 | 20323 |
| | | | | SEQ ID NO: 44 | |
| OC95 | CA 125 | Heavy chain | Sofituzumab | U.S. Pat. No. 7,723,485 | 20324 |
| | (MUC16) | | vedotin, | SEQ ID NO: 1 | |
| | | | DMUC5754A | | |
| | | | (conjugate), | | |
| | | | MMUC1206A | | |
| | | | (nonconjugate) | | |
| OC96 | CGRP | Heavy chain | Ab4 | US20120294802 | 20325 |
| | | | | SEQ ID NO: 34 | |
| OC97 | CGRP | Heavy chain | Ab1 | US20120294802 | 20326 |
| | | | | SEQ ID NO: 4 | |
| OC98 | CGRP | Heavy chain | Ab5 | US20120294802 | 20327 |
| | | | | SEQ ID NO: 44 | |
| OC99 | CGRP | Heavy chain | Ab6 | US20120294802 | 20328 |
| | | | | SEQ ID NO: 54 | |
| OC100 | CGRP | Heavy chain | Ab7 | US20120294802 | 20329 |
| | | | | SEQ ID NO: 64 | |
| OC101 | CGRP | Heavy chain | Ab8 | US20120294802 | 20330 |
| | | | | SEQ ID NO: 74 | |
| OC102 | CGRP | Heavy chain | Ab9 | US20120294802 | 20331 |
| | | | | SEQ ID NO: 84 | |
| OC103 | CGRP | Heavy chain | Ab10 | US20120294802 | 20332 |
| | | | | SEQ ID NO: 94 | |
| OC104 | CGRP | Heavy chain | Ab11 | US20120294802 | 20333 |
| | | | | SEQ ID NO: 104 | |
| OC105 | CGRP | Heavy chain | Ab12 | US20120294802 | 20334 |
| | | | | SEQ ID NO: 114 | |
| OC106 | CGRP | Heavy chain | Ab13 | US20120294802 | 20335 |
| | | | | SEQ ID NO: 124 | |
| OC107 | CGRP | Heavy chain | Ab14 | US20120294802 | 20336 |
| | | | | SEQ ID NO: 134 | |
| OC108 | CGRP | Heavy chain | Ab2 | US20120294802 | 20337 |
| | | | | SEQ ID NO: 14 | |
| OC109 | CGRP | Heavy chain | Ab3 | US20120294802 | 20338 |
| | | | | SEQ ID NO: 24 | |
| OC110 | Factor D | Heavy chain | Fab 238 | WO2009134711 | 20339 |
| | | | | SEQ ID NO: 52 | |
| OC111 | Factor D, | Heavy Chain | Lampalizumab, | U.S. Pat. No. 8,273,352 | 20340 |
| | humanized | | | SEQ ID NO: 62 | |
| | IgG1 | | | | |
| OC112 | platelet-derived | Heavy chain | Rinucumab, | | 20341 |
| | growth factor | | REGN2176 | | |
| | receptor beta | | | | |
| | PDGFRB | | | | |
| OC113 | S1P4 | Heavy chain | | WO2015057939 | 20342 |
| | | | | SEQ ID NO: 39 | |
| OC114 | VEGF, C5, | Heavy chain | NVS73 | US20140186350 | 20343 |
| | Factor P, Factor | | | SEQ ID 113 | |
| | D, EPO, EPOR, | | | | |
| | IL-1β, IL-17A, | | | | |
| | Il-10, TNFα, or | | | | |
| | FGFR2 | | | | |
| OC115 | VEGF, C5, | Heavy chain | NVS73T | US20140186350 | 20344 |
| | Factor P, Factor | | | SEQ ID 115 | |
| | D, EPO, EPOR, | | | | |
| | IL-1β, IL-17A, | | | | |
| | Il-10, TNFα, or | | | | |
| | FGFR2 | | | | |
| OC116 | VEGF, C5, | Heavy chain | NVS75 | US20140186350 | 20345 |
| | Factor P, Factor | | | SEQ ID 194 | |
| | D, EPO, EPOR, | | | | |
| | IL-1β, IL-17A, | | | | |
| | Il-10, TNFα, or | | | | |
| | FGFR2 | | | | |
| OC117 | VEGF, C5, | Heavy chain | NVS74T, | US20140186350 | 20346 |
| | Factor P, Factor | | NCS75T | SEQ ID 196 | |
| | D, EPO, EPOR, | | | | |
| | IL-1β, IL-17A, | | | | |
| | Il-10, TNFα, or | | | | |
| | FGFR2 | | | | |
| OC118 | VEGF, C5, | Heavy chain | NVS1 | US20140186350 | 20347 |
| | Factor P, Factor | | | SEQ ID 21 | |
| | D, EPO, EPOR, | | | | |
| | IL-1β, IL-17A, | | | | |
| | Il-10, TNFα, or | | | | |
| | FGFR2 | | | | |
| OC119 | VEGF, C5, | Heavy chain | NVS2 | US20140186350 | 20348 |
| | Factor P, Factor | | | SEQ ID 23 | |
| | D, EPO, EPOR, | | | | |
| | IL-1β, IL-17A, | | | | |
| | Il-10, TNFα, or | | | | |
| | FGFR2 | | | | |
| OC120 | VEGF, C5, | Heavy chain | NVS3 | US20140186350 | 20349 |
| | Factor P, Factor | | | SEQ ID 25 | |
| | D, EPO, EPOR, | | | | |
| | IL-1β, IL-17A, | | | | |
| | Il-10, TNFα, or | | | | |
| | FGFR2 | | | | |
| OC121 | VEGF, C5, | Heavy chain | NVS36 | US20140186350 | 20350 |
| | Factor P, Factor | | | SEQ ID 27 | |
| | D, EPO, EPOR, | | | | |
| | IL-1β, IL-17A, | | | | |
| | Il-10, TNFα, or | | | | |
| | FGFR2 | | | | |
| OC122 | VEGF, C5, | Heavy chain | NVS37 | US20140186350 | 20351 |
| | Factor P, Factor | | | SEQ ID 29 | |
| | D, EPO, EPOR, | | | | |
| | IL-1β, IL-17A, | | | | |
| | Il-10, TNFα, or | | | | |
| | FGFR2 | | | | |
| OC123 | VEGF, C5, | Heavy chain | NVS70 | US20140186350 | 20352 |
| | Factor P, Factor | | | SEQ ID 42 | |
| | D, EPO, EPOR, | | | | |
| | IL-1β, IL-17A, | | | | |
| | Il-10, TNFα, or | | | | |
| | FGFR2 | | | | |
| OC124 | VEGF, C5, | Heavy chain | NVS70T | US20140186350 | 20353 |
| | Factor P, Factor | | | SEQ ID 44 | |
| | D, EPO, EPOR, | | | | |
| | IL-1β, IL-17A, | | | | |
| | Il-10, TNFα, or | | | | |
| | FGFR2 | | | | |
| OC125 | VEGF, C5, | Heavy chain | NVS71 | US20140186350 | 20354 |
| | Factor P, Factor | | | SEQ ID 61 | |
| | D, EPO, EPOR, | | | | |
| | IL-1β, IL-17A, | | | | |
| | Il-10, TNFα, or | | | | |
| | FGFR2 | | | | |
| OC126 | VEGF, C5, | Heavy chain | NVS71T | US20140186350 | 20355 |
| | Factor P, Factor | | | SEQ ID 63 | |
| | D, EPO, EPOR, | | | | |
| | IL-1β, IL-17A, | | | | |
| | Il-10, TNFα, or | | | | |
| | FGFR2 | | | | |
| OC127 | VEGF, C5, | Heavy chain | NVS72 | US20140186350 | 20356 |
| | Factor P, Factor | | | SEQ ID 83 | |
| | D, EPO, EPOR, | | | | |
| | IL-1β, IL-17A, | | | | |
| | Il-10, TNFα, or | | | | |
| | FGFR2 | | | | |
| OC128 | VEGF, C5, | Heavy chain | NVS72T | US20140186350 | 20357 |
| | Factor P, Factor | | | SEQ ID 85 | |
| | D, EPO, EPOR, | | | | |
| | IL-1β, IL-17A, | | | | |
| | Il-10, TNFα, or | | | | |
| | FGFR2 | | | | |
| OC129 | VEGF, C5, | Heavy chain | NVS4, NVS1j | US20140186350 | 20358 |
| | Factor P, Factor | | | SEQ ID 9 | |
| | D, EPO, EPOR, | | | | |
| | IL-1β, IL-17A, | | | | |
| | Il-10, TNFα, or | | | | |
| | FGFR2 | | | | |
| OC130 | VEGF, C5, | Heavy chain | NVS81 | US20140186350 | 20359 |
| | Factor P, Factor | | | SEQ ID 157 | |
| | D, EPO, EPOR, | | | | |
| | IL-1β, IL-17A, | | | | |
| | Il-10, TNFα, or | | | | |
| | FGFR2 | | | | |
| OC131 | VEGF, C5, | Heavy chain | NVS81T | US20140186350 | 20360 |
| | Factor P, Factor | | | SEQ ID 159 | |
| | D, EPO, EPOR, | | | | |
| | IL-1β, IL-17A, | | | | |
| | Il-10, TNFα, or | | | | |
| | FGFR2 | | | | |
| OC132 | VEGF, C5. | Heavy chain | NVS82 | US20140186350 | 20361 |
| | Factor P, Factor | | | SEQ ID 161 | |
| | D, EPO, EPOR, | | | | |
| | IL-1β, IL-17A, | | | | |
| | Il-10, TNFα, or | | | | |
| | FGFR2 | | | | |
| OC133 | VEGF, C5, | Heavy chain | NVS82T | US20140186350 | 20362 |
| | Factor P, Factor | | | SEQ ID 163 | |
| | D, EPO, EPOR, | | | | |
| | IL-1β, IL-17A, | | | | |
| | Il-10, TNFα, or | | | | |
| | FGFR2 | | | | |
| OC134 | VECF, C5, | Heavy chain | NVS1b | US20140186350 | 20363 |
| | Factor P, Factor | | | SEQ ID 171 | |
| | D, EPO, EPOR, | | | | |
| | IL-1β, IL-17A, | | | | |
| | Il-10, TNFα, or | | | | |
| | FGFR2 | | | | |
| OC135 | VEGF, C5, | Heavy chain | NVS1c | US20140186350 | 20364 |
| | Factor P, Factor | | | SEQ ID 173 | |
| | D, EPO, EPOR, | | | | |
| | IL-1β, IL-17A, | | | | |
| | Il-10, TNFα, or | | | | |
| | FGFR2 | | | | |
| OC136 | VEGF, C5, | Heavy chain | NVS1d | US20140186350 | 20365 |
| | Factor P, Factor | | | SEQ ID 175 | |
| | D, EPO, EPOR, | | | | |
| | IL-1β, IL-17A, | | | | |
| | Il-10, TNFα, or | | | | |
| | FGFR2 | | | | |
| OC137 | VEGF, C5, | Heavy chain | NVS1e | US20140186350 | 20366 |
| | Factor P, Factor | | | SEQ ID 177 | |
| | D, EPO, EPOR, | | | | |
| | IL-1β, IL-17A, | | | | |
| | Il-10, TNFα, or | | | | |
| | FGFR2 | | | | |
| OC138 | VEGF, C5, | Heavy chain | NVS1f | US20140186350 | 20367 |
| | Factor P, Factor | | | SEQ ID 179 | |
| | D, EPO, EPOR, | | | | |
| | IL-1β, IL-17A, | | | | |
| | Il-10, TNFα, or | | | | |
| | FGFR2 | | | | |
| OC139 | VEGF, C5, | Heavy chain | NVS1g | US20140186350 | 20368 |
| | Factor P, Factor | | | SEQ ID 181 | |
| | D, EPO, EPOR, | | | | |
| | IL-1β, IL-17A, | | | | |
| | Il-10, TNFα, or | | | | |
| | FGFR2 | | | | |
| OC140 | VEGF, C5, | Heavy chain | NVS1h | US20140186350 | 20369 |
| | Factor P, Factor | | | SEQ ID 183 | |
| | D, EPO, EPOR, | | | | |
| | IL-1β, IL-17A, | | | | |
| | Il-10, TNFα, or | | | | |
| | FGFR2 | | | | |
| OC141 | sphingosine-1- | Heavy chain | Sonepcizumab, | | 20370 |
| | phosphate | full | S1P-LT1011 | | |
| OC142 | sphingosine-1- | Heavy chain | Sonepcizumab, | | 20371 |
| | phosphate | variable | S1P-LT1009 | | |
| OC143 | Factor D | Heavy chain | Fab 238 | WO2009134711 | 20372 |
| | | variable region | | SEQ ID NO: 18 | |
| OC144 | Factor D | Heavy chain | Fab 238-1 | WO2009134711 | 20373 |
| | | variable region | | SEQ ID NO: 19 | |
| OC145 | Factor D | Heavy chain | Humanized | WO2009134711 | 20374 |
| | | variable region | Clone #111 | SEQ ID NO: 2 | |
| OC146 | Factor D | Heavy chain | Fab 238-2 | WO2009134711 | 20375 |
| | | variable region | | SEQ ID NO: 20 | |
| OC147 | Factor D | Heavy chain | Fab 238-3 | WO2009134711 | 20376 |
| | | variable region | | SEQ ID NO: 21 | |
| OC148 | Factor D | Heavy chain | Fab 238-4 | WO2009134711 | 20377 |
| | | variable region | | SEQ ID NO: 22 | |
| OC149 | Factor D | Heavy chain | Fab 238-5 | WO2009134711 | 20378 |
| | | variable region | | SEQ ID NO: 23 | |
| OC150 | Factor D | Heavy chain | Fab 238-6 | WO2009134711 | 20379 |
| | | variable region | | SEQ ID NO: 24 | |
| OC151 | Factor D | Heavy chain | Fab 238-7 | WO2009134711 | 20380 |
| | | variable region | | SEQ ID NO: 25 | |
| OC152 | Factor D | Heavy chain | Fab 238-8 | WO2009134711 | 20381 |
| | | variable region | | SEQ ID NO: 26 | |
| OC153 | Factor D | Heavy chain | Fab 238-9 | WO2009134711 | 20382 |
| | | variable region | | SEQ ID NO: 27 | |
| OC154 | Factor D | Heavy chain | Fab 238-10 | WO2009134711 | 20383 |
| | | variable region | | SEQ ID NO: 28 | |
| OC155 | Factor D | Heavy chain | Fab 238-11 | WO2009134711 | 20384 |
| | | variable region | | SEQ ID NO: 29 | |
| OC156 | Factor D | Heavy chain | L243 | WO2009134711 | 20385 |
| | | variable region | | SEQ ID NO: 34 | |
| OC157 | Factor D | Heavy chain | humanized | WO2009134711 | 20386 |
| | | variable region | L243 | SEQ ID NO: 38 | |
| OC158 | LPG | Heavy chain | #7 | U.S. Pat. No. 8,591,902 | 20387 |
| | (lysophosphati- | variable region | | SEQ ID NO: 18 | |
| | dylglucoside) | | | | |
| OC159 | LPG | Heavy chain | #15 | U.S. Pat. No. 8,591,902 | 20388 |
| | (lysophosphati- | variable region | | SEQ ID NO: 8 | |
| | dylglucoside) | | | | |
| OC160 | PDGFR-beta | Heavy chain | 3373N | US20140193402 | 20389 |
| | | variable region | | SEQ ID 114 | |
| OC161 | PDGFR-beta | Heavy chain | 3374N | US20140193402 | 20390 |
| | | variable region | | SEQ ID 130 | |
| OC162 | PDGFR-beta | Heavy chain | 3094P | US20140193402 | 20391 |
| | | variable region | | SEQ ID 146 | |
| OC163 | PDGFR-beta | Heavy chain | 3095S | US20140193402 | 20392 |
| | | variable region | | SEQ ID 162 | |
| OC164 | PDGFR-beta | Heavy chain | 3096S | US20140193402 | 20393 |
| | | variable region | | SEQ ID 178 | |
| OC165 | PDGFR-beta | Heavy chain | 3305N | US20140193402 | 20394 |
| | | variable region | | SEQ ID 18 | |
| OC166 | PDGFR-beta | Heavy chain | 3097S | US20140193402 | 20395 |
| | | variable region | | SEQ ID 194 | |
| OC167 | PDGFR-beta | Heavy chain | 3299N | US20140193402 | 20396 |
| | | variable region | | SEQ ID 2 | |
| OC168 | PDGFR-beta | Heavy chain | 3098S | US20140193402 | 20397 |
| | | variable region | | SEQ ID 210 | |
| OC169 | PDGFR-beta | Heavy chain | 3099S | US20140193402 | 20398 |
| | | variable region | | SEQ ID 226 | |
| OC170 | PDGFR-beta | Heavy chain | 3102S | US20140193402 | 20399 |
| | | variable region | | SEQ ID 242 | |
| OC171 | PDGFR-beta | Heavy chain | 3103S | US20140193402 | 20400 |
| | | variable region | | SEQ ID 258 | |
| OC172 | PDGFR-beta | Heavy chain | 3104S | US20140193402 | 20401 |
| | | variable region | | SEQ ID 274 | |
| OC173 | PDGFR-beta | Heavy chain | 3105S | US20140193402 | 20402 |
| | | variable region | | SEQ ID 290 | |
| OC174 | PDGFR-beta | Heavy chain | 3106S | US20140193402 | 20403 |
| | | variable region | | SEQ ID 306 | |
| OC175 | PDGFR-beta | Heavy chain | 3107S | US20140193402 | 20404 |
| | | variable region | | SEQ ID 322 | |
| OC176 | PDGFR-beta | Heavy chain | 3310N | US20140193402 | 20405 |
| | | variable region | | SEQ ID 34 | |
| OC177 | PDGFR-beta | Heavy chain | 3361N | US20140193402 | 20406 |
| | | variable region | | SEQ ID 50 | |
| OC178 | PDGFR-beta | Heavy chain | 3363N | US20140193402 | 20407 |
| | | variable region | | SEQ ID 66 | |
| OC179 | PDGFR-beta | Heavy chain | 3365N | US20140193402 | 20408 |
| | | variable region | | SEQ ID 82 | |
| OC180 | PDGFR-beta | Heavy chain | 3368N | US20140193402 | 20409 |
| | | variable region | | SEQ ID 98 | |
| OC181 | PDGFRβ/VEGF-A | Heavy chain | Cluster # 1322 | US20110177074 | 20410 |
| | | variable region | | SEQ ID NO: 100 | |
| OC182 | PDGFRβ/VEGF-A | Heavy chain | Cluster # 1323 | US20110177074 | 20411 |
| | | variable region | | SEQ ID NO: 104 | |
| OC183 | PDGFRβ/VEGF-A | Heavy chain | Cluster # 1330 | US20110177074 | 20412 |
| | | variable region | | SEQ ID NO: 108 | |
| OC184 | PDGFRβ/VEGF-A | Heavy chain | Cluster # 1334 | US20110177074 | 20413 |
| | | variable region | | SEQ ID NO: 112 | |
| OC185 | PDGFRβ/VEGF-A | Heavy chain | Cluster # 1345 | US20110177074 | 20414 |
| | | variable region | | SEQ ID NO: 116 | |
| OC186 | PDGFRβ/VEGF-A | Heavy chain | Cluster # 600 | US20110177074 | 20415 |
| | | variable region | | SEQ ID NO: 12 | |
| OC187 | PDGFRβ/VEGF-A | Heavy chain | Cluster # 1346 | US20110177074 | 20416 |
| | | variable region | | SEQ ID NO: 120 | |
| OC188 | PDGFRβ/VEGF-A | Heavy chain | Cluster # 1359 | US20110177074 | 20417 |
| | | variable region | | SEQ ID NO: 124 | |
| OC189 | PDGFRβ/VEGF-A | Heavy chain | Cluster # 1365 | US20110177074 | 20418 |
| | | variable region | | SEQ ID NO: 128 | |
| OC190 | PDGFRβ/VEGF-A | Heavy chain | Cluster # 1402 | US20110177074 | 20419 |
| | | variable region | | SEQ ID NO: 132 | |
| OC191 | PDGFRβ/VEGF-A | Heavy chain | Cluster # 1515 | US20110177074 | 20420 |
| | | variable region | | SEQ ID NO: 136 | |
| OC192 | PDGFRβ/VEGF-A | Heavy chain | Cluster # 1531 | US20110177074 | 20421 |
| | | variable region | | SEQ ID NO: 140 | |
| OC193 | PDGFRβ/VEGF-A | Heavy chain | Cluster # 1535 | US20110177074 | 20422 |
| | | variable region | | SEQ ID NO: 144 | |
| OC194 | PDGFRβ/VEGF-A | Heavy chain | Cluster # 1541 | US20110177074 | 20423 |
| | | variable region | | SEQ ID NO: 148 | |
| OC195 | PDGFRβ/VEGF-A | Heavy chain | Cluster # 1550 | US20110177074 | 20424 |
| | | variable region | | SEQ ID NO: 152 | |
| OC196 | PDGFRβ/VEGF-A | Heavy chain | Cluster # 1564 | US20110177074 | 20425 |
| | | variable region | | SEQ ID NO: 156 | |
| OC197 | PDGFRβ/VEGF-A | Heavy chain | Cluster # 607 | US20110177074 | 20426 |
| | | variable region | | SEQ ID NO: 16 | |
| OC198 | PDGFRβ/VEGF-A | Heavy chain | Cluster # 1601 | US20110177074 | 20427 |
| | | variable region | | SEQ ID NO: 160 | |
| OC199 | PDGFRβ/VEGF-A | Heavy chain | Cluster # 1629 | US20110177074 | 20428 |
| | | variable region | | SEQ ID NO: 164 | |
| OC200 | PDGFRβ/VEGF-A | Heavy chain | Cluster # 635 | US20110177074 | 20429 |
| | | variable region | | SEQ ID NO: 168 | |
| OC201 | PDGFRβ/VEGF-A | Heavy chain | Cluster # 636 | US20110177074 | 20430 |
| | | variable region | | SEQ ID NO: 172 | |
| OC202 | PDGFRβ/VEGF-A | Heavy chain | Cluster # 638 | US20110177074 | 20431 |
| | | variable region | | SEQ ID NO: 176 | |
| OC203 | PDGFRβ/VEGF-A | Heavy chain | Cluster # 656 | US20110177074 | 20432 |
| | | variable region | | SEQ ID NO: 180 | |
| OC204 | PDGFRβ/VEGF-A | Heavy chain | Cluster # 665 | US20110177074 | 20433 |
| | | variable region | | SEQ ID NO: 184 | |
| OC205 | PDGFRβ/VEGF-A | Heavy chain | Cluster # 668 | US20110177074 | 20434 |
| | | variable region | | SEQ ID NO: 188 | |
| OC206 | PDGFRβ/VEGF-A | Heavy drain | Cluster # 669 | US20110177074 | 20435 |
| | | variable region | | SEQ ID NO: 192 | |
| OC207 | PDGFRβ/VEGF-A | Heavy chain | Cluster # 679 | US20110177074 | 20436 |
| | | variable region | | SEQ ID NO: 196 | |
| OC208 | PDGFRβ/VEGF-A | Heavy chain | Cluster # 613 | US20110177074 | 20437 |
| | | variable region | | SEQ ID NO: 20 | |
| OC209 | PDGFRβ/VEGF-A | Heavy chain | Cluster # 695 | US20110177074 | 20438 |
| | | variable region | | SEQ ID NO: 200 | |
| OC210 | PDGFRβ/VEGF-A | Heavy chain | Cluster # 709 | US20110177074 | 20439 |
| | | variable region | | SEQ ID NO: 204 | |
| OC211 | PDGFRβ/VEGF-A | Heavy chain | Cluster # 710 | US20110177074 | 20440 |
| | | variable region | | SEQ ID NO: 208 | |
| OC212 | PDGFRβ/VEGF-A | Heavy chain | Cluster # 741 | US20110177074 | 20441 |
| | | variable region | | SEQ ID NO: 212 | |
| OC213 | PDGFRβ/VEGF-A | Heavy chain | Cluster # 752 | US20110177074 | 20442 |
| | | variable region | | SEQ ID NO: 216 | |
| OC214 | PDGFRβ/VEGF-A | Heavy chain | Cluster # 772 | US20110177074 | 20443 |
| | | variable region | | SEQ ID NO: 220 | |
| OC215 | PDGFRβ/VEGF-A | Heavy chain | Cluster # 779 | US20110177074 | 20444 |
| | | variable region | | SEQ ID NO: 224 | |
| OC216 | PDGFRβ/VEGF-A | Heavy chain | Cluster # 799 | US20110177074 | 20445 |
| | | variable region | | SEQ ID NO: 228 | |
| OC217 | PDGFRβ/VEGF-A | Heavy chain | Cluster # 830 | US20110177074 | 20446 |
| | | variable region | | SEQ ID NO: 232 | |
| OC218 | PDGFRβ/VEGF-A | Heavy chain | Cluster # 844 | US20110177074 | 20447 |
| | | variable region | | SEQ ID NO: 236 | |
| OC219 | PDGFRβ/VEGF-A | Heavy chain | Cluster # 941 | US20110177074 | 20448 |
| | | variable region | | SEQ ID NO: 24 | |
| OC220 | PDGFRβ/VEGF-A | Heavy chain | Cluster # 847 | US20110177074 | 20449 |
| | | variable region | | SEQ ID NO: 240 | |
| OC221 | PDGFRβ/VEGF-A | Heavy chain | Cluster # 868 | US20110177074 | 20450 |
| | | variable region | | SEQ ID NO: 244 | |
| OC222 | PDGFRβ/VEGF-A | Heavy chain | Cluster # 870 | US20110177074 | 20451 |
| | | variable region | | SEQ ID NO: 248 | |
| OC223 | PDGFRβ/VEGF-A | Heavy chain | Cluster # 883 | US20110177074 | 20452 |
| | | variable region | | SEQ ID NO: 252 | |
| OC224 | PDGFRβ/VEGF-A | Heavy chain | Cluster # 887 | US20110177074 | 20453 |
| | | variable region | | SEQ ID NO: 256 | |
| OC225 | PDGFRβ/VEGF-A | Heavy chain | Cluster # 901 | US20110177074 | 20454 |
| | | variable region | | SEQ ID NO: 260 | |
| OC226 | PDGFRβ/VEGF-A | Heavy chain | Cluster # 905 | US20110177074 | 20455 |
| | | variable region | | SEQ ID NO: 264 | |
| OC227 | PDGFRβ/VEGF-A | Heavy chain | Cluster # 909 | US20110177074 | 20456 |
| | | variable region | | SEQ ID NO: 268 | |
| OC228 | PDGFRβ/VEGF-A | Heavy chain | Cluster # 928 | US20110177074 | 20457 |
| | | variable region | | SEQ ID NO: 272 | |
| OC229 | PDGFRβ/VEGF-A | Heavy chain | Cluster # 1036 | US20110177074 | 20458 |
| | | variable region | | SEQ ID NO: 276 | |
| OC230 | PDGFRβ/VEGF-A | Heavy chain | Cluster # 946 | US20110177074 | 20459 |
| | | variable region | | SEQ ID NO: 28 | |
| OC231 | PDGFRβ/VEGF-A | Heavy chain | Cluster # 1039 | US20110177074 | 20460 |
| | | variable region | | SEQ ID NO: 280 | |
| OC232 | PDGFRβ/VEGF-A | Heavy chain | Cluster # 1040 | US20110177074 | 20461 |
| | | variable region | | SEQ ID NO: 284 | |
| OC233 | PDGFRβ/VEGF-A | Heavy chain | Cluster # 1044 | US20110177074 | 20462 |
| | | variable region | | SEQ ID NO: 288 | |
| OC234 | PDGFRβ/VEGF-A | Heavy chain | Cluster # 1048 | US20110177074 | 20463 |
| | | variable region | | SEQ ID NO: 292 | |
| OC235 | PDGFRβ/VEGF-A | Heavy chain | Cluster # 1056 | US20110177074 | 20464 |
| | | variable region | | SEQ ID NO: 296 | |
| OC236 | PDGFRβ/VEGF-A | Heavy chain | Cluster # 1064 | US20110177074 | 20465 |
| | | variable region | | SEQ ID NO: 300 | |
| OC237 | PDGFRβ/VEGF-A | Heavy chain | Cluster # 1080 | US20110177074 | 20466 |
| | | variable region | | SEQ ID NO: 304 | |
| OC238 | PDGFRβ/VEGF-A | Heavy chain | Cluster # 1092 | US20110177074 | 20467 |
| | | variable region | | SEQ ID NO: 308 | |
| OC239 | PDGFRβ/VEGF-A | Heavy chain | Cluster # 1094 | US20110177074 | 20468 |
| | | variable region | | SEQ ID NO: 312 | |
| OC240 | PDGFRβ/VEGF-A | Heavy chain | Cluster # 1096 | US20110177074 | 20469 |
| | | variable region | | SEQ ID NO: 316 | |
| OC241 | PDGFRβ/VEGF-A | Heavy chain | Cluster # 947 | US20110177074 | 20470 |
| | | variable region | | SEQ ID NO: 32 | |
| OC242 | PDGFRβ/VEGF-A | Heavy chain | Cluster # 1107 | US20110177074 | 20471 |
| | | variable region | | SEQ ID NO: 320 | |
| OC243 | PDGFRβ/VEGF-A | Heavy chain | Cluster # 1111 | US20110177074 | 20472 |
| | | variable region | | SEQ ID NO: 324 | |
| OC244 | PDGFRβ/VEGF-A | Heavy chain | Cluster # 1123 | US20110177074 | 20473 |
| | | variable region | | SEQ ID NO: 328 | |
| OC245 | PDGFRβ/VEGF-A | Heavy chain | Cluster # 1135 | US20110177074 | 20474 |
| | | variable region | | SEQ ID NO: 332 | |
| OC246 | PDGFRβ/VEGF-A | Heavy chain | Cluster # 1142 | US20110177074 | 20475 |
| | | variable region | | SEQ ID NO: 336 | |
| OC247 | PDGFRβ/VEGF-A | Heavy chain | Cluster # 1155 | US20110177074 | 20476 |
| | | variable region | | SEQ ID NO: 340 | |
| OC248 | PDGFRβ/VEGF-A | Heavy chain | Cluster # 1250 | US20110177074 | 20477 |
| | | variable region | | SEQ ID NO: 344 | |
| OC249 | PDGFRβ/VEGF-A | Heavy chain | Cluster # 1252 | US20110177074 | 20478 |
| | | variable region | | SEQ ID NO: 348 | |
| OC250 | PDGFRβ/VEGF-A | Heavy chain | Cluster # 1254 | US20110177074 | 20479 |
| | | variable region | | SEQ ID NO: 352 | |
| OC251 | PDGFRβ/VEGF-A | Heavy chain | Cluster # 1257 | US20110177074 | 20480 |
| | | variable region | | SEQ ID NO: 356 | |
| OC252 | PDGFRβ/VEGF-A | Heavy chain | Cluster # 949 | US20110177074 | 20481 |
| | | variable region | | SEQ ID NO: 36 | |
| OC253 | PDGFRβ/VEGF-A | Heavy chain | Cluster # 1264 | US20110177074 | 20482 |
| | | variable region | | SEQ ID NO: 360 | |
| OC254 | PDGFRβ/VEGF-A | Heavy chain | Cluster # 1266 | US20110177074 | 20483 |
| | | variable region | | SEQ ID NO: 364 | |
| OC255 | PDGFRβ/VEGF-A | Heavy chain | Cluster # 1268 | US20110177074 | 20484 |
| | | variable region | | SEQ ID NO: 368 | |
| OC256 | PDGFRβ/VEGF-A | Heavy chain | Cluster # 1269 | US20110177074 | 20485 |
| | | variable region | | SEQ ID NO: 372 | |
| OC257 | PDGFRβ/VEGF-A | Heavy chain | Cluster # 1270 | US20110177074 | 20486 |
| | | variable region | | SEQ ID NO: 376 | |
| OC258 | PDGFRβ/VEGF-A | Heavy chain | Cluster # 1281 | US20110177074 | 20487 |
| | | variable region | | SEQ ID NO: 380 | |
| OC259 | PDGFRβ/VEGF-A | Heavy chain | Cluster # 1283 | US20110177074 | 20488 |
| | | variable region | | SEQ ID NO: 384 | |
| OC260 | PDGFRβ/VEGF-A | Heavy chain | Cluster # 1285 | US20110177074 | 20489 |
| | | variable region | | SEQ ID NO: 388 | |
| OC261 | PDGFRβ/VEGF-A | Heavy chain | Cluster # 1409 | US20110177074 | 20490 |
| | | variable region | | SEQ ID NO: 392 | |
| OC262 | PDGFRβ/VEGF-A | Heavy chain | Cluster # 1410 | US20110177074 | 20491 |
| | | variable region | | SEQ ID NO: 396 | |
| OC263 | PDGFRβ/VEGF-A | Heavy chain | Cluster # 975 | US20110177074 | 20492 |
| | | variable region | | SEQ ID NO: 40 | |
| OC264 | PDGFRβ/VEGF-A | Heavy chain | Cluster # 1413 | US20110177074 | 20493 |
| | | variable region | | SEQ ID NO: 400 | |
| OC265 | PDGFRβ/VEGF-A | Heavy chain | Cluster # 1416 | US20110177074 | 20494 |
| | | variable region | | SEQ ID NO: 404 | |
| OC266 | PDGFRβ/VEGF-A | Heavy chain | Cluster # 1420 | US20110177074 | 20495 |
| | | variable region | | SEQ ID NO: 408 | |
| OC267 | PDGFRβ/VEGF-A | Heavy chain | Cluster # 1428 | US20110177074 | 20496 |
| | | variable region | | SEQ ID NO: 412 | |
| OC268 | PDGFRβ/VEGF-A | Heavy chain | Cluster # 1437 | US20110177074 | 20497 |
| | | variable region | | SEQ ID NO: 416 | |
| OC269 | PDGFRβ/VEGF-A | Heavy chain | Cluster # 1449 | US20110177074 | 20498 |
| | | variable region | | SEQ ID NO: 420 | |
| OC270 | PDGFRβ/VEGF-A | Heavy chain | Cluster # 1458 | US20110177074 | 20499 |
| | | variable region | | SEQ ID NO: 424 | |
| OC271 | PDGFRβ/VEGF-A | Heavy chain | Cluster # 1476 | US20110177074 | 20500 |
| | | variable region | | SEQ ID NO: 428 | |
| OC272 | PDGFRβ/VEGF-A | Heavy chain | Cluster # 1479 | US20110177074 | 20501 |
| | | variable region | | SEQ ID NO: 432 | |
| OC273 | PDGFRβ/VEGF-A | Heavy chain | Cluster # 997 | US20110177074 | 20502 |
| | | variable region | | SEQ ID NO: 44 | |
| OC274 | PDGFRβ/VEGF-A | Heavy chain | Cluster # 1035 | US20110177074 | 20503 |
| | | variable region | | SEQ ID NO: 48 | |
| OC275 | PDGFRβ/VEGF-A | Heavy chain | Cluster # 1223 | US20110177074 | 20504 |
| | | variable region | | SEQ ID NO: 52 | |
| OC276 | PDGFRβ/VEGF-A | Heavy chain | Cluster # 1228 | US20110177074 | 20505 |
| | | variable region | | SEQ ID NO: 56 | |
| OC277 | PDGFRβ/VEGF-A | Heavy chain | Cluster # 1230 | US20110177074 | 20506 |
| | | variable region | | SEQ ID NO: 60 | |
| OC278 | PDGFRβ/VEGF-A | Heavy chain | Cluster # 1231 | US20110177074 | 20507 |
| | | variable region | | SEQ ID NO: 64 | |
| OC279 | PDGFRβ/VEGF-A | Heavy chain | Cluster # 1236 | US20110177074 | 20508 |
| | | variable region | | SEQ ID NO: 68 | |
| OC280 | PDGFRβ/VEGF-A | Heavy chain | Cluster # 1238 | US20110177074 | 20509 |
| | | variable region | | SEQ ID NO: 72 | |
| OC281 | PDGFRβ/VEGF-A | Heavy chain | Cluster # 1244 | US20110177074 | 20510 |
| | | variable region | | SEQ ID NO: 76 | |
| OC282 | PDGFRβ/VEGF-A | Heavy chain | Cluster # 1245 | US20110177074 | 20511 |
| | | variable region | | SEQ ID NO: 80 | |
| OC283 | PDGFRβ/VEGF-A | Heavy chain | Cluster # 1299 | US20110177074 | 20512 |
| | | variable region | | SEQ ID NO: 84 | |
| OC284 | PDGFRβ/VEGF-A | Heavy chain | Cluster # 1312 | US20110177074 | 20513 |
| | | variable region | | SEQ ID NO: 88 | |
| OC285 | PDGFRβ/VEGF-A | Heavy chain | Cluster # 1314 | US20110177074 | 20514 |
| | | variable region | | SEQ ID NO: 92 | |
| OC286 | PDGFRβ/VEGF-A | Heavy chain | Cluster # 1317 | US20110177074 | 20515 |
| | | variable region | | SEQ ID NO: 96 | |
| OC287 | PDGFRβ/VEGF-A | Heavy chain | Cluster # 597 | US20110177074 | 20516 |
| | | variable region | | SEQ ID NO: 8 | |
| OC288 | RGMa | Heavy chain | AE12-1 | US20140023659 | 20517 |
| | | variable region | | SEQ ID NO: 1 | |
| OC289 | RGMa | Heavy chain | AE12-20 | US20140023659 | 20518 |
| | | variable region | | SEQ ID NO: 107 | |
| OC290 | RGMa | Heavy chain | AE12-21 | US20140023659 | 20519 |
| | | variable region | | SEQ ID NO: 115 | |
| OC291 | RGMa | Heavy chain | AE12-23 | US20140023659 | 20520 |
| | | variable region | | SEQ ID NO: 123 | |
| OC292 | RGMa | Heavy chain | AE12-24 | US20140023659 | 20521 |
| | | variable region | | SEQ ID NO: 131 | |
| OC293 | RGMa | Heavy chain | AE12-3 | US20140023659 | 20522 |
| | | variable region | | SEQ ID NO: 17 | |
| OC294 | RGMa | Heavy chain | AE12-4 | US20140023659 | 20523 |
| | | variable region | | SEQ ID NO: 25 | |
| OC295 | RGMa | Heavy chain | AE12-5 | US20140023659 | 20524 |
| | | variable region | | SEQ ID NO: 33 | |
| OC296 | RGMa | Heavy chain | AE12-6 | US20140023659 | 20525 |
| | | variable region | | SEQ ID NO: 41 | |
| OC297 | RGMa | Heavy chain | AE12-7 | US20140023659 | 20526 |
| | | variable region | | SEQ ID NO: 49 | |
| OC298 | RGMa | Heavy chain | AE12-8 | US20140023659 | 20527 |
| | | variable region | | SEQ ID NO: 57 | |
| OC299 | RGMa | Heavy chain | AE12-2 | US20140023659 | 20528 |
| | | variable region | | SEQ ID NO: 9 | |
| OC300 | RGMa | Heavy chain | AE12-13 | US20140023659 | 20529 |
| | | variable region | | SEQ ID NO: 91 | |
| OC301 | RGMa | Heavy chain | AE12-15 | US20140023659 | 20530 |
| | | variable region | | SEQ ID NO: 99 | |
| OC302 | S1P4 | Heavy chain | | WO2015057939 | 20531 |
| | | variable region | | SEQ ID NO: 7 | |
| OC303 | VEGF, C5, | Heavy chain | NVS73 | US20140186350 | 20532 |
| | Factor P, Factor | variable region | | SEQ ID 111 | |
| | D, EPO, EPOR, | | | | |
| | IL-1β, IL-17A, | | | | |
| | Il-10, TNFα, or | | | | |
| | FGFR2 | | | | |
| OC304 | VEGF, C5, | Heavy chain | NVS75 | US20140186350 | 20533 |
| | Factor P, Factor | variable region | | SEQ ID 193 | |
| | D, EPO, EPOR, | | | | |
| | IL-1β, IL-17A, | | | | |
| | Il-10, TNFα, or | | | | |
| | FGFR2 | | | | |
| OC305 | VEGF, C5, | Heavy chain | NVS70 | US20140186350 | 20534 |
| | Factor P, Factor | variable region | | SEQ ID 40 | |
| | D, EPO, EPOR, | | | | |
| | IL-1β, IL-17A, | | | | |
| | Il-10, TNFα, or | | | | |
| | FGFR2 | | | | |
| OC306 | VEGF, C5, | Heavy chain | NVS71 | US20140186350 | 20535 |
| | Factor P, Factor | variable region | | SEQ ID 59 | |
| | D, EPO, EPOR, | | | | |
| | IL-1β, IL-17A, | | | | |
| | Il-10, TNFα, or | | | | |
| | FGFR2 | | | | |
| OC307 | VEGF, C5, | Heavy chain | NVS4 | US20140186350 | 20536 |
| | Factor P, Factor | variable region | | SEQ ID 7 | |
| | D, EPO, EPOR, | | | | |
| | IL-1β, IL-17A, | | | | |
| | Il-10, TNFα, or | | | | |
| | FGFR2 | | | | |
| OC308 | VEGF, C5, | Heavy chain | NVS72 | US20140186350 | 20537 |
| | Factor P, Factor | variable region | | SEQ ID 81 | |
| | D, EPO, EPOR, | | | | |
| | IL-1β, IL-17A, | | | | |
| | Il-10, TNFα, or | | | | |
| | FGFR2 | | | | |
| OC309 | VEGF-A | Heavy chain | H6 | US20140086829 | 20538 |
| | | variable region | | SEQ ID 4 | |
| OC310 | VEGF-A | Heavy chain | H5 | US20140086829 | 20539 |
| | | variable region | | SEQ ID 5 | |
| OC311 | VEGF-A | Heavy chain | H7 | US20140086829 | 20540 |
| | | variable region | | SEQ ID 6 | |
| OC312 | C5a | Heavy chain | BNJ364 | US20130224187 | 20541 |
| | | with signal | | SEQ ID 24 | |
| | | peptide | | | |
| OC313 | C5a | Heavy chain | BNJ367, | US20130224187 | 20542 |
| | | with signal | BNJ371, | SEQ ID 32 | |
| | | peptide | BNJ378 | | |
| OC314 | C5a | Heavy chain | BNJ366 | US20130224187 | 20543 |
| | | with signal | | SEQ ID 43 | |
| | | peptide | | | |
| OC315 | C5a | Heavy chain | BNJ369, | US20130224187 | 20544 |
| | | with signal | BNJ381, | SEQ ID 48 | |
| | | peptide | BNJ383 | | |
| OC316 | Annexin IV or a | Light chain | B4 | WO2014116880 | 20545 |
| | phospholipid; | | | SEQ ID 13 | |
| | and (b) a | | | | |
| | complement | | | | |
| | inhibitor | | | | |
| OC317 | Annexin IV or a | Light chain | B4 | WO2014116880 | 20546 |
| | phospholipid; | | | SEQ ID 14 | |
| | and (b) a | | | | |
| | complement | | | | |
| | inhibitor | | | | |
| OC318 | Annexin IV or a | Light chain | C2 | WO2014116880 | 20547 |
| | phospholipid; | | | SEQ ID 34 | |
| | and (b) a | | | | |
| | complement | | | | |
| | inhibitor | | | | |
| OC319 | Annexin IV or a | Light chain | C2 | WO2014116880 | 20548 |
| | phospholipid; | | | SEQ ID 35 | |
| | and (b) a | | | | |
| | complement | | | | |
| | inhibitor | | | | |
| OC320 | C3b | Light chain | rhuMAB 4D5- | U.S. Pat. No. 8,377,437 | 20549 |
| | | | 8 | SEQ ID 13 | |
| OC321 | C3b, Properdin | Light chain | L-1 | WO2015099838 | 20550 |
| | (factor P), | | | SEQ ID 1 | |
| | Factors Ba and | | | | |
| | Bb, C5, C6, C7, | | | | |
| | C8, C9 | | | | |
| OC322 | C3b, Properdin | Light chain | L-10 | WO2015099838 | 20551 |
| | (factor P), | | | SEQ ID 10 | |
| | Factors Ba and | | | | |
| | Bb, C5, C6, C7, | | | | |
| | C8, C9 | | | | |
| OC323 | C3b, Properdin | Light chain | L-11 | WO2015099838 | 20552 |
| | (factor P), | | | SEQ ID 11 | |
| | Factors Ba and | | | | |
| | Bb, C5, C6, C7, | | | | |
| | C8, C9 | | | | |
| OC324 | C3b, Properdin | Light chain | L-12 | WO2015099838 | 20553 |
| | (factor P), | | | SEQ ID 12 | |
| | Factors Ba and | | | | |
| | Bb, C5, C6, C7, | | | | |
| | C8, C9 | | | | |
| OC325 | C3b, Properdin | Light chain | L-13 | WO2015099838 | 20554 |
| | (factor P), | | | SEQ ID 13 | |
| | Factors Ba and | | | | |
| | Bb, C5, C6, C7, | | | | |
| | C8, C9 | | | | |
| OC326 | C3b, Properdin | Light chain | L-14 | WO2015099838 | 20555 |
| | (factor P), | | | SEQ ID 14 | |
| | Factors Ba and | | | | |
| | Bb, C5, C6, C7, | | | | |
| | C8, C9 | | | | |
| OC327 | C3b, Properdin | Light chain | L-15 | WO2015099838 | 20556 |
| | (factor P), | | | SEQ ID 15 | |
| | Factors Ba and | | | | |
| | Bb, C5, C6, C7, | | | | |
| | C8, C9 | | | | |
| OC328 | C3b, Properdin | Light chain | L-16 | WO2015099838 | 20557 |
| | (factor P), | | | SEQ ID 16 | |
| | Factors Ba and | | | | |
| | Bb, C5, C6, C7, | | | | |
| | C8, C9 | | | | |
| OC329 | C3b, Properdin | Light chain | L-17 | WO2015099838 | 20558 |
| | (factor P), | | | SEQ ID 17 | |
| | Factors Ba and | | | | |
| | Bb, C5, C6, C7, | | | | |
| | C8, C9 | | | | |
| OC330 | C3b, Properdin | Light chain | L-18 | WO2015099838 | 20559 |
| | (factor P), | | | SEQ ID 18 | |
| | Factors Ba and | | | | |
| | Bb, C5, C6, C7, | | | | |
| | C8, C9 | | | | |
| OC331 | C3b, Properdin | Light chain | L-19 | WO2015099838 | 20560 |
| | (factor P), | | | SEQ ID 19 | |
| | Factors Ba and | | | | |
| | Bb, C5, C6, C7, | | | | |
| | C8, C9 | | | | |
| OC332 | C3b, Properdin | Light chain | L-2 | WO2015099838 | 20561 |
| | (factor P), | | | SEQ ID 2 | |
| | Factors Ba and | | | | |
| | Bb, C5, C6, C7, | | | | |
| | C8, C9 | | | | |
| OC333 | C3b, Properdin | Light chain | L-20 | WO2015099838 | 20562 |
| | (factor P), | | | SEQ ID 20 | |
| | Factors Ba and | | | | |
| | Bb, C5, C6, C7, | | | | |
| | C8. C9 | | | | |
| OC334 | C3b, Properdin | Light chain | L-21 | WO2015099838 | 20563 |
| | (factor P), | | | SEQ ID 21 | |
| | Factors Ba and | | | | |
| | Bb, C5, C6, C7, | | | | |
| | C8, C9 | | | | |
| OC335 | C3b, Properdin | Light chain | L-22 | WO2015099838 | 20564 |
| | (factor P), | | | SEQ ID 22 | |
| | Factors Ba and | | | | |
| | Bb, C5, C6, C7, | | | | |
| | C8, C9 | | | | |
| OC336 | C3b, Properdin | Light chain | L-23 | WO2015099838 | 20565 |
| | (factor P), | | | SEQ ID 23 | |
| | Factors Ba and | | | | |
| | Bb, C5, C6, C7, | | | | |
| | C8, C9 | | | | |
| OC337 | C3b, Properdin | Light chain | L-24 | WO2015099838 | 20566 |
| | (factor P), | | | SEQ ID 24 | |
| | Factors Ba and | | | | |
| | Bb, C5, C6, C7, | | | | |
| | C8, C9 | | | | |
| OC338 | C3b, Properdin | Light chain | L-25 | WO2015099838 | 20567 |
| | (factor P), | | | SEQ ID NO: 25 | |
| | Factors Ba and | | | | |
| | Bb, C5, C6, C7, | | | | |
| | C8, C9 | | | | |
| OC339 | C3b, Properdin | Light chain | L-26 | WO2015099838 | 20568 |
| | (factor P), | | | SEQ ID NO: 26 | |
| | Factors Ba and | | | | |
| | Bb, C5, C6, C7, | | | | |
| | C8, C9 | | | | |
| OC340 | C3b, Properdin | Light chain | L-27 | WO2015099838 | 20569 |
| | (factor P), | | | SEQ ID NO: 27 | |
| | Factors Ba and | | | | |
| | Bb, C5, C6, C7, | | | | |
| | C8, C9 | | | | |
| OC341 | C3b, Properdin | Light chain | L-28 | WO2015099838 | 20570 |
| | (factor P), | | | SEQ ID NO: 28 | |
| | Factors Ba and | | | | |
| | Bb, C5, C6, C7, | | | | |
| | C8, C9 | | | | |
| OC342 | C3b, Properdin | Light chain | L-29 | WO2015099838 | 20571 |
| | (factor P), | | | SEQ ID NO: 29 | |
| | Factors Ba and | | | | |
| | Bb, C5, C6, C7, | | | | |
| | C8, C9 | | | | |
| OC343 | C3b, Properdin | Light chain | L-3 | WO2015099838 | 20572 |
| | (factor P), | | | SEQ ID NO: 3 | |
| | Factors Ba and | | | | |
| | Bb, C5, C6, C7, | | | | |
| | C8, C9 | | | | |
| OC344 | C3b, Properdin | Light chain | L-30 | WO2015099838 | 20573 |
| | (factor P), | | | SEQ ID NO: 30 | |
| | Factors Ba and | | | | |
| | Bb, C5, C6, C7, | | | | |
| | C8, C9 | | | | |
| OC345 | C3b, Properdin | Light chain | L-31 | WO2015099838 | 20574 |
| | (factor P), | | | SEQ ID NO: 31 | |
| | Factors Ba and | | | | |
| | Bb, C5, C6, C7, | | | | |
| | C8, C9 | | | | |
| OC346 | C3b, Properdin | Light chain | L-32 | WO2015099838 | 20575 |
| | (factor P), | | | SEQ ID NO: 32 | |
| | Factors Ba and | | | | |
| | Bb, C5, C6, C7, | | | | |
| | C8, C9 | | | | |
| OC347 | C3b, Properdin | Light chain | L-33 | WO2015099838 | 20576 |
| | (factor P), | | | SEQ ID NO: 33 | |
| | Factors Ba and | | | | |
| | Bb, C5, C6, C7, | | | | |
| | C8, C9 | | | | |
| OC348 | C3b, Properdin | Light chain | L-34 | WO2015099838 | 20577 |
| | (factor P), | | | SEQ ID NO: 34 | |
| | Factors Ba and | | | | |
| | Bb, C5, C6, C7, | | | | |
| | C8, C9 | | | | |
| OC349 | C3b, Properdin | Light chain | L-35 | WO2015099838 | 20578 |
| | (factor P), | | | SEQ ID NO: 35 | |
| | Factors Ba and | | | | |
| | Bb, C5, C6, C7, | | | | |
| | C8, C9 | | | | |
| OC350 | C3b, Properdin | Light chain | L-36 | WO2015099838 | 20579 |
| | (factor P), | | | SEQ ID NO: 36 | |
| | Factors Ba and | | | | |
| | Bb, C5, C6, C7, | | | | |
| | C8, C9 | | | | |
| OC351 | C3b, Properdin | Light chain | L-37 | WO2015099838 | 20580 |
| | (factor P), | | | SEQ ID NO: 37 | |
| | Factors Ba and | | | | |
| | Bb, C5, C6, C7, | | | | |
| | C8, C9 | | | | |
| OC352 | C3b, Properdin | Light chain | L-38 | WO2015099838 | 20581 |
| | (factor P), | | | SEQ ID NO: 38 | |
| | Factors Ba and | | | | |
| | Bb, C5, C6, C7, | | | | |
| | C8, C9 | | | | |
| OC353 | C3b, Properdin | Light chain | L-39 | WO2015099838 | 20582 |
| | (factor P), | | | SEQ ID NO: 39 | |
| | Factors Ba and | | | | |
| | Bb, C5, C6, C7, | | | | |
| | C8, C9 | | | | |
| OC354 | C3b, Properdin | Light chain | L-4 | WO2015099838 | 20583 |
| | (factor P), | | | SEQ ID NO: 4 | |
| | Factors Ba and | | | | |
| | Bb, C5, C6, C7, | | | | |
| | C8, C9 | | | | |
| OC355 | C3b, Properdin | Light chain | L-40 | WO2015099838 | 20584 |
| | (factor P), | | | SEQ ID NO: 40 | |
| | Factors Ba and | | | | |
| | Bb, C5, C6, C7, | | | | |
| | C8, C9 | | | | |
| OC356 | C3b, Properdin | Light chain | L-41 | WO2015099838 | 20585 |
| | (factor P), | | | SEQ ID NO: 41 | |
| | Factors Ba and | | | | |
| | Bb, C5, C6, C7, | | | | |
| | C8, C9 | | | | |
| OC357 | C3b, Properdin | Light chain | L-42 | WO2015099838 | 20586 |
| | (factor P), | | | SEQ ID NO: 42 | |
| | Factors Ba and | | | | |
| | Bb, C5, C6, C7, | | | | |
| | C8, C9 | | | | |
| OC358 | C3b, Properdin | Light chain | L-43 | WO2015099838 | 20587 |
| | (factor P), | | | SEQ ID NO: 43 | |
| | Factors Ba and | | | | |
| | Bb, C5, C6, C7, | | | | |
| | C8, C9 | | | | |
| OC359 | C3b, Properdin | Light chain | L-5 | WO2015099838 | 20588 |
| | (factor P), | | | SEQ ID NO: 5 | |
| | Factors Ba and | | | | |
| | Bb, C5, C6, C7, | | | | |
| | C8, C9 | | | | |
| OC360 | C3b, Properdin | Light chain | L-6 | WO2015099838 | 20589 |
| | (factor P), | | | SEQ ID NO: 6 | |
| | Factors Ba and | | | | |
| | Bb, C5, C6, C7, | | | | |
| | C8, C9 | | | | |
| OC361 | C3b, Properdin | Light chain | L-7 | WO2015099838 | 20590 |
| | (factor P), | | | SEQ ID NO: 7 | |
| | Factors Ba and | | | | |
| | Bb, C5, C6, C7, | | | | |
| | C8, C9 | | | | |
| OC362 | C3b, Properdin | Light chain | L-8 | WO2015099838 | 20591 |
| | (factor P), | | | SEQ ID NO: 8 | |
| | Factors Ba and | | | | |
| | Bb, C5, C6, C7, | | | | |
| | C8, C9 | | | | |
| OC363 | C3b, Properdin | Light chain | L-9 | WO2015099838 | 20592 |
| | (factor P), | | | SEQ ID NO: 9 | |
| | Factors Ba and | | | | |
| | Bb, C5, C6, C7, | | | | |
| | C8, C9 | | | | |
| OC364 | C5 | Light chain | NVS962 | US20150158936 | 20593 |
| | | | | SEQ ID 10 | |
| OC365 | C5 | Light chain | NVS808 | US20150158936 | 20594 |
| | | | | SEQ ID 108 | |
| OC366 | C5 | Light chain | NVS806 | US20150158936 | 20595 |
| | | | | SEQ ID 122 | |
| OC367 | C5 | Light chain | NVS804 | US20150158936 | 20596 |
| | | | | SEQ ID 136 | |
| OC368 | C5 | Light chain | NVS809 | US20150158936 | 20597 |
| | | | | SEQ ID 150 | |
| OC369 | C5 | Light chain | NVS805 | US20150158936 | 20598 |
| | | | | SEQ ID 164 | |
| OC370 | C5 | Light chain | NVS962-S | US20150158936 | 20599 |
| | | | | SEQ ID 178 | |
| OC371 | C5 | Light chain | NVS962-Q | US20150158936 | 20600 |
| | | | | SEQ ID 192 | |
| OC372 | C5 | Light chain | NVS962-S31A | US20150158936 | 20601 |
| | | | | SEQ ID 206 | |
| OC373 | C5 | Light chain | NVS962-G | US20150158936 | 20602 |
| | | | | SEQ ID 220 | |
| OC374 | C5 | Light chain | NVS962-T | US20150158936 | 20603 |
| | | | | SEQ ID 234 | |
| OC375 | C5 | Light chain | NVS963 | US20150158936 | 20604 |
| | | | | SEQ ID 24 | |
| OC376 | C5 | Light chain | NVS965-T | US20150158936 | 20605 |
| | | | | SEQ ID 248 | |
| OC377 | C5 | Light chain | NVS965-Q | US20150158936 | 20606 |
| | | | | SEQ ID 262 | |
| OC378 | C5 | Light chain | NVS965-S | US20150158936 | 20607 |
| | | | | SEQ ID 276 | |
| OC379 | C5 | Light chain | NVS964 | US20150158936 | 20608 |
| | | | | SEQ ID 38 | |
| OC380 | C5 | Light chain | Antibody 8109 | US20150158936 | 20609 |
| | | | | SEQ ID 419 | |
| OC381 | C5 | Light chain | Antibody 8110 | US20150158936 | 20610 |
| | | | | SEQ ID 435 | |
| OC382 | C5 | Light chain | Antibody 8111 | US20150158936 | 20611 |
| | | | | SEQ ID 450 | |
| OC383 | C5 | Light chain | Antibody 8113 | US20150158936 | 20612 |
| | | | | SEQ ID 463 | |
| OC384 | C5 | Light chain | Antibody 8114 | US20150158936 | 20613 |
| | | | | SEQ ID 479 | |
| OC385 | C5 | Light chain | NVS966 | US20150158936 | 20614 |
| | | | | SEQ ID 52 | |
| OC386 | C5 | Light chain | NVS965 | US20150158936 | 20615 |
| | | | | SEQ ID 66 | |
| OC387 | C5 | Light chain | NVS967 | US20150158936 | 20616 |
| | | | | SEQ ID 80 | |
| OC388 | C5 | Light chain | NVS807 | US20150158936 | 20617 |
| | | | | SEQ ID 94 | |
| OC389 | C5 | Light chain | L1 | US20150239966 | 20618 |
| | | | | SEQ ID 1 | |
| OC390 | C5 | Light chain | L6 | US20150239966 | 20619 |
| | | | | SEQ ID NO: 11 | |
| OC391 | C5 | Light chain | L2 | US20150239966 | 20620 |
| | | | | SEQ ID 3 | |
| OC392 | C5 | Light chain | L3 | US20150239966 | 20621 |
| | | | | SEQ ID NO: 5 | |
| OC393 | C5 | Light chain | L4 | US20150239966 | 20622 |
| | | | | SEQ ID NO: 7 | |
| OC394 | C5 | Light chain | L5 | US20150239966 | 20623 |
| | | | | SEQ ID NO: 9 | |
| OC395 | C5 | Light chain | Tesidolumab, | U.S. Pat. No. 8,241,628 | 20624 |
| | | | “LFG 316, | SEQ ID 10 | |
| | | | LFG-316, | | |
| | | | LFG316” | | |
| OC396 | C5 | Light chain | | U.S. Pat. No. 9,133,269 | 20625 |
| | | | | SEQ ID 10 | |
| OC397 | C5 | Light chain | | U.S. Pat. No. 9,133,269 | 20626 |
| | | | | SEQ ID 11 | |
| OC398 | C5 | Light chain | | U.S. Pat. No. 9,133,269 | 20627 |
| | | | | SEQ ID 12 | |
| OC399 | C5 | Light chain | | U.S. Pat. No. 9,133,269 | 20628 |
| | | | | SEQ ID 13 | |
| OC400 | C5 | Light chain | | U.S. Pat. No. 9,133,269 | 20629 |
| | | | | SEQ ID 14 | |
| OC401 | C5 | Light chain | | U.S. Pat. No. 9,133,269 | 20630 |
| | | | | SEQ ID 15 | |
| OC402 | C5 | Light chain | | U.S. Pat. No. 9,133,269 | 20631 |
| | | | | SEQ ID 16 | |
| OC403 | C5 | Light chain | | U.S. Pat. No. 9,133,269 | 20632 |
| | | | | SEQ ID 17 | |
| OC404 | C5 | Light chain | | U.S. Pat. No. 9,133,269 | 20633 |
| | | | | SEQ ID 18 | |
| OC405 | C5 | Light chain | | U.S. Pat. No. 9,133,269 | 20634 |
| | | | | SEQ ID 19 | |
| OC406 | C5 | Light chain | | U.S. Pat. No. 9,133,269 | 20635 |
| | | | | SEQ ID 20 | |
| OC407 | C5 | Light chain | | U.S. Pat. No. 9,133,269 | 20636 |
| | | | | SEQ ID 21 | |
| OC408 | C5 | Light chain | | U.S. Pat. No. 9,133,269 | 20637 |
| | | | | SEQ ID 22 | |
| OC409 | C5 | Light chain | | U.S. Pat. No. 9,133,269 | 20638 |
| | | | | SEQ ID 23 | |
| OC410 | C5 | Light chain | | U.S. Pat. No. 9,133,269 | 20639 |
| | | | | SEQ ID 24 | |
| OC411 | C5 | Light chain | | U.S. Pat. No. 9,133,269 | 20640 |
| | | | | SEQ ID 6 | |
| OC412 | C5 | Light chain | | U.S. Pat. No. 9,133,269 | 20641 |
| | | | | SEQ ID 7 | |
| OC413 | C5 | Light chain | | U.S. Pat. No. 9,133,269 | 20642 |
| | | | | SEQ ID 8 | |
| OC414 | C5 | Light chain | | U.S. Pat. No. 9,133,269 | 20643 |
| | | | | SEQ ID 9 | |
| OC415 | C5a | Light chain | BNJ364, | US20130224187 | 20644 |
| | | | BNJ367, | SEQ ID 17 | |
| | | | BNJ366, | | |
| | | | BNJ369 | | |
| OC416 | C5a | Light chain | BNJ371, | US20130224187 | 20645 |
| | | | BNJ381 | SEQ ID 36 | |
| OC417 | C5a | Light chain | BNJ378, | US20130224187 | 20646 |
| | | | BNJ383 | SEQ ID 40 | |
| OC418 | CGRP | Light chain | Ab11 | US20120294802 | 20647 |
| | | | | SEQ ID NO: 102 | |
| OC419 | CGRP | Light chain | Ab12 | US20120294802 | 20648 |
| | | | | SEQ ID NO: 112 | |
| OC420 | CGRP | Light chain | Ab2 | US20120294802 | 20649 |
| | | | | SEQ ID NO: 12 | |
| OC421 | CGRP | Light chain | Ab13 | US20120294802 | 20650 |
| | | | | SEQ ID NO: 122 | |
| OC422 | CGRP | Light chain | Ab14 | US20120294802 | 20651 |
| | | | | SEQ ID NO: 132 | |
| OC423 | CGRP | Light chain | Ab1 | US20120294802 | 20652 |
| | | | | SEQ ID NO: 2 | |
| OC424 | CGRP | Light chain | Ab3 | US20120294802 | 20653 |
| | | | | SEQ ID NO: 22 | |
| OC425 | CGRP | Light chain | Ab4 | US20120294802 | 20654 |
| | | | | SEQ ID NO: 32 | |
| OC426 | CGRP | Light chain | Ab5 | US20120294802 | 20655 |
| | | | | SEQ ID NO: 42 | |
| OC427 | CGRP | Light chain | Ab6 | US20120294802 | 20656 |
| | | | | SEQ ID NO: 52 | |
| OC428 | CGRP | Light chain | Ab7 | US20120294802 | 20657 |
| | | | | SEQ ID NO: 62 | |
| OC429 | CGRP | Light chain | Ab8 | US20120294802 | 20658 |
| | | | | SEQ ID NO: 72 | |
| OC430 | CGRP | Light chain | Ab9 | US20120294802 | 20659 |
| | | | | SEQ ID NO: 82 | |
| OC431 | CGRP | Light chain | Ab10 | US20120294802 | 20660 |
| | | | | SEQ ID NO: 92 | |
| OC432 | Factor D | Light chain | Fab 238 | WO2009134711 | 20661 |
| | | | | SEQ ID NO: 47 | |
| OC433 | Factor D, | Light Chain | Lampalizumab, | U.S. Pat. No. 8,273,352 | 20662 |
| | humanized | | | SEQ ID NO: 47 | |
| | IgG2 | | | | |
| OC434 | platelet-derived | Light chain | Rinucumab, | | 20663 |
| | growth factor | | REGN2176 | | |
| | receptor beta | | | | |
| | PDGFRB | | | | |
| OC435 | S1P4 | Light chain | | WO2015057939 | 20664 |
| | | | | SEQ ID NO: 41 | |
| OC436 | VEGF, C5, | Light chain | NVS73, | US20140186350 | 20665 |
| | Factor P, Factor | | | SEQ ID 122 | |
| | D, EPO, EPOR, | | | | |
| | IL-1β, IL-17A, | | | | |
| | Il-10, INFα, or | | | | |
| | FGFR2 | | | | |
| OC437 | VEGF, C5, | Light chain | NVS81 | US20140186350 | 20666 |
| | Factor P, Factor | | | SEQ ID 158 | |
| | D, EPO, EPOR, | | | | |
| | IL-1β, IL-17A, | | | | |
| | Il-10, INFα, or | | | | |
| | FGFR2 | | | | |
| OC438 | VEGF, C5, | Light chain | NVS81T | US20140186350 | 20667 |
| | Factor P, Factor | | | SEQ ID 160 | |
| | D, EPO, EPOR, | | | | |
| | IL-1β, IL-17A, | | | | |
| | Il-10, TNFα, or | | | | |
| | FGFR2 | | | | |
| OC439 | VEGF, C5, | Light chain | NVS82 | US20140186350 | 20668 |
| | Factor P, Factor | | | SEQ ID 162 | |
| | D, EPO, EPOR, | | | | |
| | IL-1β, IL-17A, | | | | |
| | Il-10, TNFα, or | | | | |
| | FGFR2 | | | | |
| OC440 | VEGF, C5, | Light chain | NVS82T | US20140186350 | 20669 |
| | Factor P, Factor | | | SEQ ID 164 | |
| | D, EPO, EPOR, | | | | |
| | IL-1β, IL-17A, | | | | |
| | Il-10, TNFα, or | | | | |
| | FGFR2 | | | | |
| OC441 | VEGF, C5, | Light chain | NVS1b | US20140186350 | 20670 |
| | Factor P, Factor | | | SEQ ID 172 | |
| | D, EPO, EPOR, | | | | |
| | IL-1β, IL-17A, | | | | |
| | Il-10, TNFα, or | | | | |
| | FGFR2 | | | | |
| OC442 | VEGF, C5, | Light chain | NVS1c | US20140186350 | 20671 |
| | Factor P, Factor | | | SEQ ID 174 | |
| | D, EPO, EPOR, | | | | |
| | IL-1β, IL-17A, | | | | |
| | Il-10, TNFα, or | | | | |
| | FGFR2 | | | | |
| OC443 | VEGF, C5, | Light chain | NVS1d | US20140186350 | 20672 |
| | Factor P, Factor | | | SEQ ID 176 | |
| | D, EPO, EPOR, | | | | |
| | IL-1β, IL-17A, | | | | |
| | Il-10, TNFα, or | | | | |
| | FGFR2 | | | | |
| OC444 | VEGF, C5, | Light chain | NVS1e | US20140186350 | 20673 |
| | Factor P, Factor | | | SEQ ID 178 | |
| | D, EPO, EPOR, | | | | |
| | IL-1β, IL-17A, | | | | |
| | Il-10, TNFα, or | | | | |
| | FGFR2 | | | | |
| OC445 | VEGF, C5, | Light chain | NVS1f | US20140186350 | 20674 |
| | Factor P, Factor | | | SEQ ID 180 | |
| | D, EPO, EPOR, | | | | |
| | IL-1β, IL-17A, | | | | |
| | Il-10, TNFα, or | | | | |
| | FGFR2 | | | | |
| OC446 | VEGF, C5, | Light chain | NVS1g | US20140186350 | 20675 |
| | Factor P, Factor | | | SEQ ID 182 | |
| | D, EPO, EPOR, | | | | |
| | IL-1β, IL-17A, | | | | |
| | Il-10, TNFα, or | | | | |
| | FGFR2 | | | | |
| OC447 | VEGF, C5, | Light chain | NVS1h | US20140186350 | 20676 |
| | Factor P, Factor | | | SEQ ID 184 | |
| | D, EPO, EPOR, | | | | |
| | IL-1β, IL-17A, | | | | |
| | Il-10, TNFα, or | | | | |
| | FGFR2 | | | | |
| OC448 | VEGF, C5, | Light chain | NVS1j | US20140186350 | 20677 |
| | Factor P, Factor | | | SEQ ID 185 | |
| | D, EPO, EPOR, | | | | |
| | IL-1β, IL-17A, | | | | |
| | Il-10, TNFα, or | | | | |
| | FGFR2 | | | | |
| OC449 | VEGF, C5, | Light chain | NVS4, NVS1, | US20140186350 | 20678 |
| | Factor P, Factor | | NVS2, NVS3, | SEQ ID 19 | |
| | D, EPO, EPOR, | | NVS36, | | |
| | IL-1β, IL-17A, | | NVS37 | | |
| | Il-10, TNFα, or | | | | |
| | FGFR2 | | | | |
| OC450 | VEGF, C5, | Light chain | NVS75, | US20140186350 | 20679 |
| | Factor P, Factor | | NVS74T, | SEQ ID 202 | |
| | D, EPO, EPOR, | | NCS75T | | |
| | IL-1β, IL-17A, | | | | |
| | Il-10, TNFα, or | | | | |
| | FGFR2 | | | | |
| OC451 | VEGF, C5, | Light chain | NVS70, | US20140186350 | 20680 |
| | Factor P, Factor | | NVS70T | SEQ ID 51 | |
| | D, EPO, EPOR, | | | | |
| | IL-1β, IL-17A, | | | | |
| | Il-10, TNFα, or | | | | |
| | FGFR2 | | | | |
| OC452 | VEGF, C5, | Light chain | NVS71, | US20140186350 | 20681 |
| | Factor P, Factor | | NVS71T | SEQ ID 73 | |
| | D, EPO, EPOR, | | | | |
| | IL-1β, IL-17A, | | | | |
| | Il-10, TNFα, or | | | | |
| | FGFR2 | | | | |
| OC453 | VEGF, C5, | Light chain | NVS72, | US20140186350 | 20682 |
| | Factor P, Factor | | NVS72T | SEQ ID 95 | |
| | D, EPO, EPOR, | | | | |
| | IL-1β, IL-17A, | | | | |
| | Il-10, TNFα, or | | | | |
| | FGFR2 | | | | |
| OC454 | sphingosine-1- | Light chain | Sonepcizumab, | | 20683 |
| | phosphate | full | S1P-LT1012 | | |
| OC455 | sphingosine-1- | Light chain | Sonepcizumab, | | 20684 |
| | phosphate | variable | S1P-LT1010 | | |
| OC456 | Factor D | Light chain | Humanized | WO2009134711 | 20685 |
| | | variable region | Clone #111 | SEQ ID NO: 1 | |
| OC457 | Factor D | Light chain | Fab 238-4 | WO2009134711 | 20686 |
| | | variable region | | SEQ ID NO: 10 | |
| OC458 | Factor D | Light chain | Fab 238-5 | WO2009134711 | 20687 |
| | | variable region | | SEQ ID NO: 11 | |
| OC459 | Factor D | Light chain | Fab 238-6 | WO2009134711 | 20688 |
| | | variable region | | SEQ ID NO: 12 | |
| OC460 | Factor D | Light chain | Fab 238-7 | WO2009134711 | 20689 |
| | | variable region | | SEQ ID NO: 13 | |
| OC461 | Factor D | Light chain | Fab 238-8 | WO2009134711 | 20690 |
| | | variable region | | SEQ ID NO: 14 | |
| OC462 | Factor D | Light chain | Fab 238-9 | WO2009134711 | 20691 |
| | | variable region | | SEQ ID NO: 15 | |
| OC463 | Factor D | Light chain | Fab 238-10 | WO2009134711 | 20692 |
| | | variable region | | SEQ ID NO: 16 | |
| OC464 | Factor D | Light chain | Fab 238-11 | WO2009134711 | 20693 |
| | | variable region | | SEQ ID NO: 17 | |
| OC465 | Factor D | Light chain | L243 | WO2009134711 | 20694 |
| | | variable region | | SEQ ID NO: 32 | |
| OC466 | Factor D | Light chain | humanized | WO2009134711 | 20695 |
| | | variable region | L243 | SEQ ID NO: 36 | |
| OC467 | Factor D | Light chain | Fab 238 | WO2009134711 | 20696 |
| | | variable region | | SEQ ID NO: 6 | |
| OC468 | Factor D | Light chain | Fab 238-1 | WO2009134711 | 20697 |
| | | variable region | | SEQ ID NO: 7 | |
| OC469 | Factor D | Light chain | Fab 238-2 | WO2009134711 | 20698 |
| | | variable region | | SEQ ID NO: 8 | |
| OC470 | Factor D | Light chain | Fab 238-3 | WO2009134711 | 20699 |
| | | variable region | | SEQ ID NO: 9 | |
| OC471 | LPG | Light chain | #7 | U.S. Pat. No. 8,591,902 | 20700 |
| | (lysophosphati- | variable region | | SEQ ID NO: 17 | |
| | dylglucoside) | | | | |
| OC472 | LPG | Light chain | #15 | U.S. Pat. No. 8,591,902 | 20701 |
| | (lysophosphati- | variable region | | SEQ ID NO: 7 | |
| | dylglucoside) | | | | |
| OC473 | PDGFR-beta | Light chain | 3299N | US20140193402 | 20702 |
| | | variable region | | SEQ ID 10 | |
| OC474 | PDGFR-beta | Light chain | 3368N | US20140193402 | 20703 |
| | | variable region | | SEQ ID 106 | |
| OC475 | PDGFR-beta | Light chain | 3373N | US20140193402 | 20704 |
| | | variable region | | SEQ ID 122 | |
| OC476 | PDGFR-beta | Light chain | 3374N | US20140193402 | 20705 |
| | | variable region | | SEQ ID 138 | |
| OC477 | PDGFR-beta | Light chain | 3094P | US20140191402 | 20706 |
| | | variable region | | SEQ ID 154 | |
| OC478 | PDGFR-beta | Light chain | 3095S | US20140193402 | 20707 |
| | | variable region | | SEQ ID 170 | |
| OC479 | PDGFR-beta | Light chain | 3096S | US20140193402 | 20708 |
| | | variable region | | SEQ ID 186 | |
| OC480 | PDGFR-beta | Light chain | 3097S | US20140193402 | 20709 |
| | | variable region | | SEQ ID 202 | |
| OC481 | PDGFR-beta | Light chain | 3098S | US20140193402 | 20710 |
| | | variable region | | SEQ ID 218 | |
| OC482 | PDGFR-beta | Light chain | 3099S | US20140193402 | 20711 |
| | | variable region | | SEQ ID 234 | |
| OC483 | PDGFR-beta | Light chain | 3102S | US20140193402 | 20712 |
| | | variable region | | SEQ ID 250 | |
| OC484 | PDGFR-beta | Light chain | 3305N | US20140193402 | 20713 |
| | | variable region | | SEQ ID 26 | |
| OC485 | PDGFR-beta | Light chain | 3103S | US20140193402 | 20714 |
| | | variable region | | SEQ ID 266 | |
| OC486 | PDGFR-beta | Light chain | 3104S | US20140193402 | 20715 |
| | | variable region | | SEQ ID 282 | |
| OC487 | PDGFR-beta | Light chain | 3105S | US20140193402 | 20716 |
| | | variable region | | SEQ ID 298 | |
| OC488 | PDGFR-beta | Light chain | 3106S | US20140193402 | 20717 |
| | | variable region | | SEQ ID 314 | |
| OC489 | PDGFR-beta | Light chain | 3107S | US20140193402 | 20718 |
| | | variable region | | SEQ ID 330 | |
| OC490 | PDGFR-beta | Light chain | 3310N | US20140193402 | 20719 |
| | | variable region | | SEQ ID 42 | |
| OC491 | PDGFR-beta | Light chain | 3361N | US20140193402 | 20720 |
| | | variable region | | SEQ ID 58 | |
| OC492 | PDGFR-beta | Light chain | 3363N | US20140193402 | 20721 |
| | | variable region | | SEQ ID 74 | |
| OC493 | PDGFR-beta | Light chain | 3365N | US20140193402 | 20722 |
| | | variable region | | SEQ ID 90 | |
| OC494 | PDGFRβ/VEGF-A | Light chain | Cluster # 600 | US20110177074 | 20723 |
| | | variable region | | SEQ ID NO: 10 | |
| OC495 | PDGFRβ/VEGF-A | Light chain | Cluster # 1323 | US20110177074 | 20724 |
| | | variable region | | SEQ ID NO: 102 | |
| OC496 | PDGFRβ/VEGF-A | Light chain | Cluster # 1330 | US20110177074 | 20725 |
| | | variable region | | SEQ ID NO: 106 | |
| OC497 | PDGFRβ/VEGF-A | Light chain | Cluster # 1334 | US20110177074 | 20726 |
| | | variable region | | SEQ ID NO: 110 | |
| OC498 | PDGFRβ/VEGF-A | Light chain | Cluster # 1345 | US20110177074 | 20727 |
| | | variable region | | SEQ ID NO: 114 | |
| OC499 | PDGFRβ/VEGF-A | Light chain | Cluster # 1346 | US20110177074 | 20728 |
| | | variable region | | SEQ ID NO: 118 | |
| OC500 | PDGFRβ/VEGF-A | Light chain | Cluster # 1359 | US20110177074 | 20729 |
| | | variable region | | SEQ ID NO: 122 | |
| OC501 | PDGFRβ/VEGF-A | Light chain | Cluster # 1365 | US20110177074 | 20730 |
| | | variable region | | SEQ ID NO: 126 | |
| OC502 | PDGFRβ/VEGF-A | Light chain | Cluster # 1402 | US20110177074 | 20731 |
| | | variable region | | SEQ ID NO: 130 | |
| OC503 | PDGFRβ/VEGF-A | Light chain | Cluster # 1515 | US20110177074 | 20732 |
| | | variable region | | SEQ ID NO: 134 | |
| OC504 | PDGFRβ/VEGF-A | Light chain | Cluster # 1531 | US20110177074 | 20733 |
| | | variable region | | SEQ ID NO: 138 | |
| OC505 | PDGFRβ/VEGF-A | Light chain | Cluster # 607 | US20110177074 | 20734 |
| | | variable region | | SEQ ID NO: 14 | |
| OC506 | PDGFRβ/VEGF-A | Light chain | Cluster # 1535 | US20110177074 | 20735 |
| | | variable region | | SEQ ID NO: 142 | |
| OC507 | PDGFRβ/VEGF-A | Light chain | Cluster # 1541 | US20110177074 | 20736 |
| | | variable region | | SEQ ID NO: 146 | |
| OC508 | PDGFRβ/VEGF-A | Light chain | Cluster # 1550 | US20110177074 | 20737 |
| | | variable region | | SEQ ID NO: 150 | |
| OC509 | PDGFRβ/VEGF-A | Light chain | Cluster # 1564 | US20110177074 | 20738 |
| | | variable region | | SEQ ID NO: 154 | |
| OC510 | PDGFRβ/VEGF-A | Light chain | Cluster # 1601 | US20110177074 | 20739 |
| | | variable region | | SEQ ID NO: 158 | |
| OC511 | PDGFRβ/VEGF-A | Light chain | Cluster # 1629 | US20110177074 | 20740 |
| | | variable region | | SEQ ID NO: 162 | |
| OC512 | PDGFRβ/VEGF-A | Light chain | Cluster # 635 | US20110177074 | 20741 |
| | | variable region | | SEQ ID NO: 166 | |
| OC513 | PDGFRβ/VEGF-A | Light chain | Cluster # 636 | US20110177074 | 20742 |
| | | variable region | | SEQ ID NO: 170 | |
| OC514 | PDGFRβ/VEGF-A | Light chain | Cluster # 638 | US20110177074 | 20743 |
| | | variable region | | SEQ ID NO: 174 | |
| OC515 | PDGFRβ/VEGF-A | Light chain | Cluster # 656 | US20110177074 | 20744 |
| | | variable region | | SEQ ID NO: 178 | |
| OC516 | PDGFRβ/VEGF-A | Light chain | Cluster # 613 | US20110177074 | 20745 |
| | | variable region | | SEQ ID NO: 18 | |
| OC517 | PDGFRβ/VEGF-A | Light chain | Cluster # 665 | US20110177074 | 20746 |
| | | variable region | | SEQ ID NO: 182 | |
| OC518 | PDGFRβ/VEGF-A | Light chain | Cluster # 668 | US20110177074 | 20747 |
| | | variable region | | SEQ ID NO: 186 | |
| OC519 | PDGFRβ/VEGF-A | Light chain | Cluster # 669 | US20110177074 | 20748 |
| | | variable region | | SEQ ID NO: 190 | |
| OC520 | PDGFRβ/VEGF-A | Light chain | Cluster # 679 | US20110177074 | 20749 |
| | | variable region | | SEQ ID NO: 194 | |
| OC521 | PDGFRβ/VEGF-A | Light chain | Cluster # 695 | US20110177074 | 20750 |
| | | variable region | | SEQ ID NO: 198 | |
| OC522 | PDGFRβ/VEGF-A | Light chain | Cluster # 709 | US20110177074 | 20751 |
| | | variable region | | SEQ ID NO: 202 | |
| OC523 | PDGFRβ/VEGF-A | Light chain | Cluster # 710 | US20110177074 | 20752 |
| | | variable region | | SEQ ID NO: 206 | |
| OC524 | PDGFRβ/VEGF-A | Light chain | Cluster # 741 | US20110177074 | 20753 |
| | | variable region | | SEQ ID NO: 210 | |
| OC525 | PDGFRβ/VEGF-A | Light chain | Cluster # 752 | US20110177074 | 20754 |
| | | variable region | | SEQ ID NO: 214 | |
| OC526 | PDGFRβ/VEGF-A | Light chain | Cluster # 772 | US20110177074 | 20755 |
| | | variable region | | SEQ ID NO: 218 | |
| OC527 | PDGFRβ/VEGF-A | Light chain | Cluster # 941 | US20110177074 | 20756 |
| | | variable region | | SEQ ID NO: 22 | |
| OC528 | PDGFRβ/VEGF-A | Light chain | Cluster # 779 | US20110177074 | 20757 |
| | | variable region | | SEQ ID NO: 222 | |
| OC529 | PDGFRβ/VEGF-A | Light chain | Cluster # 799 | US20110177074 | 20758 |
| | | variable region | | SEQ ID NO: 226 | |
| OC530 | PDGFRβ/VEGF-A | Light chain | Cluster # 830 | US20110177074 | 20759 |
| | | variable region | | SEQ ID NO: 230 | |
| OC531 | PDGFRβ/VEGF-A | Light chain | Cluster # 844 | US20110177074 | 20760 |
| | | variable region | | SEQ ID NO: 234 | |
| OC532 | PDGFRβ/VEGF-A | Light chain | Cluster # 847 | US20110177074 | 20761 |
| | | variable region | | SEQ ID NO: 238 | |
| OC533 | PDGFRβ/VEGF-A | Light chain | Cluster # 868 | US20110177074 | 20762 |
| | | variable region | | SEQ ID NO: 242 | |
| OC534 | PDGFRβ/VEGF-A | Light chain | Cluster # 870 | US20110177074 | 20763 |
| | | variable region | | SEQ ID NO: 246 | |
| OC535 | PDGFRβ/VEGF-A | Light chain | Cluster # 883 | US20110177074 | 20764 |
| | | variable region | | SEQ ID NO: 250 | |
| OC536 | PDGFRβ/VEGF-A | Light chain | Cluster # 887 | US20110177074 | 20765 |
| | | variable region | | SEQ ID NO: 254 | |
| OC537 | PDGFRβ/VEGF-A | Light chain | Cluster # 901 | US20110177074 | 20766 |
| | | variable region | | SEQ ID NO: 258 | |
| OC538 | PDGFRβ/VEGF-A | Light chain | Cluster # 946 | US20110177074 | 20767 |
| | | variable region | | SEQ ID NO: 26 | |
| OC539 | PDGFRβ/VEGF-A | Light chain | Cluster # 905 | US20110177074 | 20768 |
| | | variable region | | SEQ ID NO: 262 | |
| OC540 | PDGFRβ/VEGF-A | Light chain | Cluster # 909 | US20110177074 | 20769 |
| | | variable region | | SEQ ID NO: 266 | |
| OC541 | PDGFRβ/VEGF-A | Light chain | Cluster # 928 | US20110177074 | 20770 |
| | | variable region | | SEQ ID NO: 270 | |
| OC542 | PDGFRβ/VEGF-A | Light chain | Cluster # 1036 | US20110177074 | 20771 |
| | | variable region | | SEQ ID NO: 274 | |
| OC543 | PDGFRβ/VEGF-A | Light chain | Cluster # 1039 | US20110177074 | 20772 |
| | | variable region | | SEQ ID NO: 278 | |
| OC544 | PDGFRβ/VEGF-A | Light chain | Cluster # 1040 | US20110177074 | 20773 |
| | | variable region | | SEQ ID NO: 282 | |
| OC545 | PDGFRβ/VEGF-A | Light chain | Cluster # 1044 | US20110177074 | 20774 |
| | | variable region | | SEQ ID NO: 286 | |
| OC546 | PDGFRβ/VEGF-A | Light chain | Cluster # 1048 | US20110177074 | 20775 |
| | | variable region | | SEQ ID NO: 290 | |
| OC547 | PDGFRβ/VEGF-A | Light chain | Cluster # 1056 | US20110177074 | 20776 |
| | | variable region | | SEQ ID NO: 294 | |
| OC548 | PDGFRβ/VEGF-A | Light chain | Cluster # 1064 | US20110177074 | 20777 |
| | | variable region | | SEQ ID NO: 298 | |
| OC549 | PDGFRβ/VEGF-A | Light chain | Cluster # 947 | US20110177074 | 20778 |
| | | variable region | | SEQ ID NO: 30 | |
| OC550 | PDGFRβ/VEGF-A | Light chain | Cluster # 1080 | US20110177074 | 20779 |
| | | variable region | | SEQ ID NO: 302 | |
| OC551 | PDGFRβ/VEGF-A | Light chain | Cluster # 1092 | US20110177074 | 20780 |
| | | variable region | | SEQ ID NO: 306 | |
| OC552 | PDGFRβ/VEGF-A | Light chain | Cluster # 1094 | US20110177074 | 20781 |
| | | variable region | | SEQ ID NO: 310 | |
| OC553 | PDGFRβ/VEGF-A | Light chain | Cluster # 1096 | US20110177074 | 20782 |
| | | variable region | | SEQ ID NO: 314 | |
| OC554 | PDGFRβ/VEGF-A | Light chain | Cluster # 1107 | US20110177074 | 20783 |
| | | variable region | | SEQ ID NO: 318 | |
| OC555 | PDGFRβ/VEGF-A | Light chain | Cluster # 1111 | US20110177074 | 20784 |
| | | variable region | | SEQ ID NO: 322 | |
| OC556 | PDGFRβ/VEGF-A | Light chain | Cluster # 1123 | US20110177074 | 20785 |
| | | variable region | | SEQ ID NO: 326 | |
| OC557 | PDGFRβ/VEGF-A | Light chain | Cluster # 1135 | US20110177074 | 20786 |
| | | variable region | | SEQ ID NO: 330 | |
| OC558 | PDGFRβ/VEGF-A | Light chain | Cluster # 1142 | US20110177074 | 20787 |
| | | variable region | | SEQ ID NO: 334 | |
| OC559 | PDGFRβ/VEGF-A | Light chain | Cluster # 1155 | US20110177074 | 20788 |
| | | variable region | | SEQ ID NO: 338 | |
| OC560 | PDGFRβ/VEGF-A | Light chain | Cluster # 949 | US20110177074 | 20789 |
| | | variable region | | SEQ ID NO: 34 | |
| OC561 | PDGFRβ/VEGF-A | Light chain | Cluster # 1250 | US20110177074 | 20790 |
| | | variable region | | SEQ ID NO: 342 | |
| OC562 | PDGFRβ/VEGF-A | Light chain | Cluster # 1252 | US20110177074 | 20791 |
| | | variable region | | SEQ ID NO: 346 | |
| OC563 | PDGFRβ/VEGF-A | Light chain | Cluster # 1254 | US20110177074 | 20792 |
| | | variable region | | SEQ ID NO: 350 | |
| OC564 | PDGFRβ/VEGF-A | Light chain | Cluster # 1257 | US20110177074 | 20793 |
| | | variable region | | SEQ ID NO: 354 | |
| OC565 | PDGFRβ/VEGF-A | Light chain | Cluster # 1264 | US20110177074 | 20794 |
| | | variable region | | SEQ ID NO: 358 | |
| OC566 | PDGFRβ/VEGF-A | Light chain | Cluster # 1266 | US20110177074 | 20795 |
| | | variable region | | SEQ ID NO: 362 | |
| OC567 | PDGFRβ/VEGF-A | Light chain | Cluster # 1268 | US20110177074 | 20796 |
| | | variable region | | SEQ ID NO: 366 | |
| OC568 | PDGFRβ/VEGF-A | Light chain | Cluster # 1269 | US20110177074 | 20797 |
| | | variable region | | SEQ ID NO: 370 | |
| OC569 | PDGFRβ/VEGF-A | Light chain | Cluster #1270 | US20110177074 | 20798 |
| | | variable region | | SEQ ID NO: 374 | |
| OC570 | PDGFRβ/VEGF-A | Light chain | Cluster # 1281 | US20110177074 | 20799 |
| | | variable region | | SEQ ID NO: 378 | |
| OC571 | PDGFRβ/VEGF-A | Light chain | Cluster # 975 | US20110177074 | 20800 |
| | | variable region | | SEQ ID NO: 38 | |
| OC572 | PDGFRβ/VEGF-A | Light chain | Cluster # 1283 | US20110177074 | 20801 |
| | | variable region | | SEQ ID NO: 382 | |
| OC573 | PDGFRβ/VEGF-A | Light chain | Cluster # 1285 | US20110177074 | 20802 |
| | | variable region | | SEQ ID NO: 386 | |
| OC574 | PDGFRβ/VEGF-A | Light chain | Cluster # 1409 | US20110177074 | 20803 |
| | | variable region | | SEQ ID NO: 390 | |
| OC575 | PDGFRβ/VEGF-A | Light chain | Cluster # 1410 | US20110177074 | 20804 |
| | | variable region | | SEQ ID NO: 394 | |
| OC576 | PDGFRβ/VEGF-A | Light chain | Cluster # 1413 | US20110177074 | 20805 |
| | | variable region | | SEQ ID NO: 398 | |
| OC577 | PDGFRβ/VEGF-A | Light chain | Cluster # 1416 | US20110177074 | 20806 |
| | | variable region | | SEQ ID NO: 402 | |
| OC578 | PDGFRβ/VEGF-A | Light chain | Cluster # 1420 | US20110177074 | 20807 |
| | | variable region | | SEQ ID NO: 406 | |
| OC579 | PDGFRβ/VEGF-A | Light chain | Cluster # 1428 | US20110177074 | 20808 |
| | | variable region | | SEQ ID NO: 410 | |
| OC580 | PDGFRβ/VEGF-A | Light chain | Cluster # 1437 | US20110177074 | 20809 |
| | | variable region | | SEQ ID NO: 414 | |
| OC581 | PDGFRβ/VEGF-A | Light chain | Cluster # 1449 | US20110177074 | 20810 |
| | | variable region | | SEQ ID NO: 418 | |
| OC582 | PDGFRβ/VEGF-A | Light chain | Cluster # 997 | US20110177074 | 20811 |
| | | variable region | | SEQ ID NO: 42 | |
| OC583 | PDGFRβ/VEGF-A | Light chain | Cluster # 1458 | US20110177074 | 20812 |
| | | variable region | | SEQ ID NO: 422 | |
| OC584 | PDGFRβ/VEGF-A | Light chain | Cluster # 1476 | US20110177074 | 20813 |
| | | variable region | | SEQ ID NO: 426 | |
| OC585 | PDGFRβ/VEGF-A | Light chain | Cluster # 1479 | US20110177074 | 20814 |
| | | variable region | | SEQ ID NO: 430 | |
| OC586 | PDGFRβ/VEGF-A | Light chain | Cluster # 1035 | US20110177074 | 20815 |
| | | variable region | | SEQ ID NO: 46 | |
| OC587 | PDGFRβ/VEGF-A | Light chain | Cluster # 1228 | US20110177074 | 20816 |
| | | variable region | | SEQ ID NO: 54 | |
| OC588 | PDGFRβ/VEGF-A | Light chain | Cluster # 1230 | US20110177074 | 20817 |
| | | variable region | | SEQ ID NO: 58 | |
| OC589 | PDGFRβ/VEGF-A | Light chain | Cluster # 1231 | US20110177074 | 20818 |
| | | variable region | | SEQ ID NO: 62 | |
| OC590 | PDGFRβ/VEGF-A | Light chain | Cluster # 1236 | US20110177074 | 20819 |
| | | variable region | | SEQ ID NO: 66 | |
| OC591 | PDGFRβ/VEGF-A | Light chain | Cluster # 1238 | US20110177074 | 20820 |
| | | variable region | | SEQ ID NO: 70 | |
| OC592 | PDGFRβ/VEGF-A | Light chain | Cluster # 1244 | US20110177074 | 20821 |
| | | variable region | | SEQ ID NO: 74 | |
| OC593 | PDGFRβ/VEGF-A | Light chain | Cluster # 1245 | US20110177074 | 20822 |
| | | variable region | | SEQ ID NO: 78 | |
| OC594 | PDGFRβ/VEGF-A | Light chain | Cluster # 1299 | US20110177074 | 20823 |
| | | variable region | | SEQ ID NO: 82 | |
| OC595 | PDGFRβ/VEGF-A | Light chain | Cluster # 1312 | US20110177074 | 20824 |
| | | variable region | | SEQ ID NO: 86 | |
| OC596 | PDGFRβ/VEGF-A | Light chain | Cluster # 1314 | US20110177074 | 20825 |
| | | variable region | | SEQ ID NO: 90 | |
| OC597 | PDGFRβ/VEGF-A | Light chain | Cluster # 1317 | US20110177074 | 20826 |
| | | variable region | | SEQ ID NO: 94 | |
| OC598 | PDGFRβ/VEGF-A | Light chain | Cluster # 1322 | US20110177074 | 20827 |
| | | variable region | | SEQ ID NO: 98 | |
| OC599 | PDGFRβ/VEGF-A | Light chain | Cluster # 597 | US20110177074 | 20828 |
| | | variable region | | SEQ ID NO: 6 | |
| OC600 | RGMa | Light chain | AE12-15 | US20140023659 | 20829 |
| | | variable region | | SEQ ID NO: 103 | |
| OC601 | RGMa | Light chain | AE12-20 | US20140023659 | 20830 |
| | | variable region | | SEQ ID NO: 111 | |
| OC602 | RGMa | Light chain | AE12-21 | US20140023659 | 20831 |
| | | variable region | | SEQ ID NO: 119 | |
| OC603 | RGMa | Light chain | AE12-23 | US20140023659 | 20832 |
| | | variable region | | SEQ ID NO: 127 | |
| OC604 | RGMa | Light chain | AE12-2 | US20140023659 | 20833 |
| | | variable region | | SEQ ID NO: 13 | |
| OC605 | RGMa | Light chain | AE12-24 | US20140023659 | 20834 |
| | | variable region | | SEQ ID NO: 135 | |
| OC606 | RGMa | Light chain | AE12-3 | US20140023659 | 20835 |
| | | variable region | | SEQ ID NO: 21 | |
| OC607 | RGMa | Light chain | AE12-4 | US20140023659 | 20836 |
| | | variable region | | SEQ ID NO: 29 | |
| OC608 | RGMa | Light chain | AE12-5 | US20140023659 | 20837 |
| | | variable region | | SEQ ID NO: 37 | |
| OC609 | RGMa | Light chain | AE12-6 | US20140023659 | 20838 |
| | | variable region | | SEQ ID NO: 45 | |
| OC610 | RGMa | Light chain | AE12-1 | US20140023659 | 20839 |
| | | variable region | | SEQ ID NO: 5 | |
| OC611 | RGMa | Light chain | AE12-7 | US20140023659 | 20840 |
| | | variable region | | SEQ ID NO: 53 | |
| OC612 | RGMa | Light chain | AE12-8 | US20140023659 | 20841 |
| | | variable region | | SEQ ID NO: 61 | |
| OC613 | RGMa | Light chain | AE12-13 | US20140023659 | 20842 |
| | | variable region | | SEQ ID NO: 95 | |
| OC614 | S1P4 | Light chain | | WO2015057939 | 20843 |
| | | variable region | | SEQ ID NO: 9 | |
| OC615 | VEGF, C5, | Light chain | NVS73 | US20140186350 | 20844 |
| | Factor P, Factor | variable region | | SEQ ID 120 | |
| | D, EPO, EPOR, | | | | |
| | IL-1β, IL-17A, | | | | |
| | Il-10, TNFα, or | | | | |
| | FGFR2 | | | | |
| OC616 | VEGF, C5, | Light chain | NVS4 | US20140186350 | 20845 |
| | Factor P, Factor | variable region | | SEQ ID 17 | |
| | D, EPO, EPOR, | | | | |
| | IL-1β, IL-17A, | | | | |
| | Il-10, TNFα, or | | | | |
| | FGFR2 | | | | |
| OC617 | VEGF, C5, | Light chain | NVS75 | US20140186350 | 20846 |
| | Factor P, Factor | variable region | | SEQ ID 201 | |
| | D, EPO, EPOR, | | | | |
| | IL-1β, IL-17A, | | | | |
| | Il-10, TNFα, or | | | | |
| | FGFR2 | | | | |
| OC618 | VEGF, C5, | Light chain | NVS70 | US20140186350 | 20847 |
| | Factor P, Factor | variable region | | SEQ ID 49 | |
| | D, EPO, EPOR, | | | | |
| | IL-1β, IL-17A, | | | | |
| | Il-10, TNFα, or | | | | |
| | FGFR2 | | | | |
| OC619 | VEGF, C5, | Light chain | NVS71 | US20140186350 | 20848 |
| | Factor P, Factor | variable region | | SEQ ID 71 | |
| | D, EPO, EPOR, | | | | |
| | IL-1β, IL-17A, | | | | |
| | Il-10, TNFα, or | | | | |
| | FGFR2 | | | | |
| OC620 | VEGF, C5, | Light chain | NVS72 | US20140186350 | 20849 |
| | Factor P, Factor | variable region | | SEQ ID 93 | |
| | D, EPO, EPOR, | | | | |
| | IL-1β, IL-17A, | | | | |
| | Il-10, TNFα, or | | | | |
| | FGFR2 | | | | |
| OC621 | VEGF-A | Light chain | L3 | US20140086829 | 20850 |
| | | variable region | | SEQ ID NO: 8 | |
| OC622 | C5a | Light chain | BNJ364, | US20130224187 | 20851 |
| | | with signal | BNJ367, | SEQ ID 16 | |
| | | peptide | BNJ366, | | |
| | | | BNJ369 | | |
| OC623 | C5a | Light chain | BNJ371, | US20130224187 | 20852 |
| | | with signal | BNJ381 | SEQ ID 35 | |
| | | peptide | | | |
| OC624 | C5a | Light chain | BNJ378, | US20130224187 | 20853 |
| | | with signal | BNJ383 | SEQ ID 39 | |
| | | peptide | | | |
| OC625 | VEGF-A | scFv | L3H6 | US20140086829 | 20854 |
| | | | | SEQ ID NO: 10 | |
| OC626 | VEGF-A | scFv | L3H5 | US20140086829 | 20855 |
| | | | | SEQ ID NO: 12 | |
| OC627 | VEGF-A | scFv | L3H7 | US20140086829 | 20856 |
| | | | | SEQ ID NO: 14 | |
| OC628 | VEGF-A | scFv | Fab L3H6 | US20140086829 | 20857 |
| | | | | SEQ ID 17 | |
| OC629 | VEGF-A | scFv | Fab L3H6 | US20140086829 | 20858 |
| | | | | SEQ ID 18 | |
| OC630 | VEGF-A | scFv | Fab L3H5 | US20140086829 | 20859 |
| | | | | SEQ ID 21 | |
| OC631 | VEGF-A | scFv | Fab L3H5 | US20140086829 | 20860 |
| | | | | SEQ ID 22 | |
| OC632 | VEGF-A | scFv | Fab L3H7 | US20140086829 | 20861 |
| | | | | SEQ ID 25 | |
| OC633 | Annexin IV or a | scoff | B4 | WO2014116880 | 20862 |
| | phospholipid; | | | SEQ ID 17 | |
| | and (b) a | | | | |
| | complement | | | | |
| | inhibitor | | | | |
| OC634 | Annexin IV or a | scFV | B4 | WO2014116880 | 20863 |
| | phospholipid; | | | SEQ ID 18 | |
| | and (b) a | | | | |
| | complement | | | | |
| | inhibitor | | | | |
| OC635 | Annexin IV or a | scFV | C2 | WO2014116880 | 20864 |
| | phospholipid; | | | SEQ ID 37 | |
| | and (b) a | | | | |
| | complement | | | | |
| | inhibitor | | | | |
| OC636 | Annexin IV or a | scFV | C2 | WO2014116880 | 20865 |
| | phospholipid; | | | SEQ ID 38 | |
| | and (b) a | | | | |
| | complement | | | | |
| | inhibitor | | | | |
| OC637 | VEGF, C5, | single chain | NVS78 | US20140186350 | 20866 |
| | Factor P, Factor | | | SEQ ID 146 | |
| | D, EPO, EPOR, | | | | |
| | IL-1β, IL-17A, | | | | |
| | Il-10, TNFα, or | | | | |
| | FGFR2 | | | | |
| OC638 | VEGF, C5, | single chain | NVS78T | US20140186350 | 20867 |
| | Factor P, Factor | | | SEQ ID 147 | |
| | D, EPO, EPOR, | | | | |
| | IL-1β, IL-17A, | | | | |
| | Il-10, TNFα, or | | | | |
| | FGFR2 | | | | |
| OC639 | VEGF, C5, | single chain | NVS90 | US20140186350 | 20868 |
| | Factor P, Factor | | | SEQ ID 148 | |
| | D, EPO, EPOR, | | | | |
| | IL-1β, IL-17A, | | | | |
| | Il-10, TNFα, or | | | | |
| | FGFR2 | | | | |
| OC640 | VEGF, C5, | single chain | NVS90T | US20140186350 | 20869 |
| | Factor P, Factor | | | SEQ ID 149 | |
| | D, EPO, EPOR, | | | | |
| | IL-1β, IL-17A, | | | | |
| | Il-10, TNFα, or | | | | |
| | FGFR2 | | | | |
| OC641 | VEGF, C5, | single chain | NVS79 | US20140186350 | 20870 |
| | Factor P, Factor | | | SEQ ID 150 | |
| | D, EPO, EPOR, | | | | |
| | IL-1β, IL-17A, | | | | |
| | Il-10, TNFα, or | | | | |
| | FGFR2 | | | | |
| OC642 | VEGF, C5, | single chain | NVS79T | US20140186350 | 20871 |
| | Factor P, Factor | | | SEQ ID 151 | |
| | D, EPO, EPOR, | | | | |
| | IL-1β, IL-17A, | | | | |
| | Il-10, TNFα, or | | | | |
| | FGFR2 | | | | |
| OC643 | VEGF, C5, | single chain | NVS91 | US20140186350 | 20872 |
| | Factor P, Factor | | | SEQ ID 152 | |
| | D, EPO, EPOR, | | | | |
| | IL-1β, IL-17A, | | | | |
| | Il-10, TNFα, or | | | | |
| | FGFR2 | | | | |
| OC644 | VEGF, C5, | single chain | NVS91T | US20140186350 | 20873 |
| | Factor P, Factor | | | SEQ ID 153 | |
| | D, EPO, EPOR, | | | | |
| | IL-1β, IL-17A, | | | | |
| | Il-10, TNFα, or | | | | |
| | FGFR2 | | | | |
| OC645 | VEGF, C5, | single chain | NVS80 | US20140186350 | 20874 |
| | Factor P, Factor | | | SEQ ID 154 | |
| | D, EPO, EPOR, | | | | |
| | IL-1β, IL-17A, | | | | |
| | Il-10, TNFα, or | | | | |
| | FGFR2 | | | | |
| OC646 | VEGF, C5, | single chain | NVS80T | US20140186350 | 20875 |
| | Factor P, Factor | | | SEQ ID 156 | |
| | D, EPO, EPOR, | | | | |
| | IL-1β, IL-17A, | | | | |
| | Il-10, TNFα, or | | | | |
| | FGFR2 | | | | |
| OC647 | VEGF, C5, | single chain | NVS83 | US20140186350 | 20876 |
| | Factor P, Factor | | | SEQ ID 165 | |
| | D, EPO, EPOR, | | | | |
| | IL-1β, IL-17A, | | | | |
| | Il-10, TNFα, or | | | | |
| | FGFR2 | | | | |
| OC648 | VEGF, C5, | single chain | NVS83T | US20140186350 | 20877 |
| | Factor P, Factor | | | SEQ ID 166 | |
| | D, EPO, EPOR, | | | | |
| | IL-1β, IL-17A, | | | | |
| | Il-10, TNFα, or | | | | |
| | FGFR2 | | | | |
| OC649 | VEGF, C5, | single chain | NVS84 | US20140186350 | 20878 |
| | Factor P, Factor | | | SEQ ID 167 | |
| | D, EPO, EPOR, | | | | |
| | IL-1β, IL-17A, | | | | |
| | Il-10, TNFα, or | | | | |
| | FGFR2 | | | | |
| OC650 | VEGF, C5, | single chain | NVS84T | US20140186350 | 20879 |
| | Factor P, Factor | | | SEQ ID 168 | |
| | D, EPO, EPOR, | | | | |
| | IL-1β, IL-17A, | | | | |
| | Il-10, TNFα, or | | | | |
| | FGFR2 | | | | |
| OC651 | VEGF, C5, | single chain | NVS85 | US20140186350 | 20880 |
| | Factor P, Factor | | | SEQ ID 169 | |
| | D, EPO, EPOR, | | | | |
| | IL-1β, IL-17A, | | | | |
| | Il-10, TNFα, or | | | | |
| | FGFR2 | | | | |
| OC652 | VEGF, C5, | single chain | NVS85T | US20140186350 | 20881 |
| | Factor P, Factor | | | SEQ ID 170 | |
| | D, EPO, EPOR, | | | | |
| | IL-1β, IL-17A, | | | | |
| | Il-10, TNFα, or | | | | |
| | FGFR2 | | | | |
| OC653 | TGFbeta | single-domain | DOM23h-33 | WO2011012609 | 20882 |
| | | | | SEQ ID 1 | |
| OC654 | TGFbeta | single-domain | DOM23h-439 | WO2011012609 | 20883 |
| | | | | SEQ ID 10 | |
| OC655 | TGFbeta | single-domain | DOM23h-440 | WO2011012609 | 20884 |
| | | | | SEQ ID 11 | |
| OC656 | TGFbeta | single-domain | DOM23h-262- | WO2011012609 | 20885 |
| | | | 6 | SEQ ID 12 | |
| OC657 | TGFbeta | single-domain | DOM23h-262- | WO2011012609 | 20886 |
| | | | 10 | SEQ ID 13 | |
| OC658 | TGFbeta | single-domain | DOM23h-271- | WO2011012609 | 20887 |
| | | | 3 | SEQ ID 14 | |
| OC659 | TGFbeta | single-domain | DOM23h-271- | WO2011012609 | 20888 |
| | | | 7 | SEQ ID 15 | |
| OC660 | TGFbeta | single-domain | DOM23h-271- | WO2011012609 | 20889 |
| | | | 12 | SEQ ID 16 | |
| OC661 | TGFbeta | single-domain | DOM23h-271- | WO2011012609 | 20890 |
| | | | 13 | SEQ ID 17 | |
| OC662 | TGFbeta | single-domain | DOM23h-437- | WO2011012609 | 20891 |
| | | | 4 | SEQ ID 18 | |
| OC663 | TGFbeta | single-domain | DOM23h-437- | WO2011012609 | 20892 |
| | | | 6 | SEQ ID 19 | |
| OC664 | TGFbeta | single-domain | DOM23h-251 | WO2011012609 | 20893 |
| | | | | SEQ ID 2 | |
| OC665 | TGFbeta | single-domain | DOM23h-437- | WO2011012609 | 20894 |
| | | | 8 | SEQ ID 20 | |
| OC666 | TGFbeta | single-domain | DOM23h-437- | WO2011012609 | 20895 |
| | | | 9 | SEQ ID 21 | |
| OC667 | TGFbeta | single-domain | DOM23h-439- | WO2011012609 | 20896 |
| | | | 6 | SEQ ID 22 | |
| OC668 | TGFbeta | single-domain | DOM23h-439- | WO2011012609 | 20897 |
| | | | 8 | SEQ ID 23 | |
| OC669 | TGFbeta | single-domain | DOM23h-262 | WO2011012609 | 20898 |
| | | | | SEQ ID 3 | |
| OC670 | TGFbeta | single-domain | DOM23h-271 | WO2011012609 | 20899 |
| | | | | SEQ ID 4 | |
| OC671 | TGFbeta | single-domain | DOM23h-348 | WO2011012609 | 20900 |
| | | | | SEQ ID 5 | |
| OC672 | TGFbeta | single-domain | DOM23h-435 | WO2011012609 | 20901 |
| | | | | SEQ ID 6 | |
| OC673 | TGFbeta | single-domain | DOM23h-436 | WO2011012609 | 20902 |
| | | | | SEQ ID 7 | |
| OC674 | TGFbeta | single-domain | DOM23h-437 | WO2011012609 | 20903 |
| | | | | SEQ ID 8 | |
| OC675 | TGFbeta | single-domain | DOM23h-438 | WO2011012609 | 20904 |
| | | | | SEQ ID 9 | |
| OC676 | VEGFA | | Brolucizumab, | | 20905 |
| | | | ESBA-1008, | | |
| | | | ESBA1008, | | |

### Systemic Disease Antibodies

[0396] In some embodiments, the payload region of the viral particle comprises one or more nucleic acid sequences encoding one or more of the systemic disease payload antibody polypeptides listed in Table 12 (SYS1-SYS73; SEQ ID NO: 20906-20978).

TABLE 12
Systemic Disease Antibodies

| Antibody | | | | Reference | SEQ ID |
|---|---|---|---|---|---|
| No. | Target | Description | Antibody Name | Information | NO |
| SYS1 | integrin αIIbß3, | Chain A, Antibody | Tadocizumab, C4G1, | U.S. Pat. No. 5,777,085 SEQ | 20906 |
| | GPIIb/IIIa | for platelet | YM-337 | ID NO: 23 | |
| | | aggregation | | | |
| SYS2 | integrin αIIbß3, | Chain B, Antibody | Tadocizumab, C4G1, | U.S. Pat. No. 5,777,085 SEQ | 20907 |
| | GPIIb/IIIa | for platelet | YM-337 | ID NO: 12 | |
| | | aggregation | | | |
| SYS3 | | Fab fragment | Tadocizumab | | 20908 |
| SYS4 | | Fab fragment | Tadocizumab | | 20909 |
| SYS5 | | Fusion protein | Sotatercept | | 20910 |
| SYS6 | selectin P | Heavy chain | Inclacumab, LC1004- | | 20911 |
| | | | 002, RO4905417 | | |
| SYS7 | | Heavy chain | Alirocumab | | 20912 |
| SYS8 | | Heavy chain | Abciximab | | 20913 |
| SYS9 | | Heavy chain | Bococizumab | | 20914 |
| SYS10 | | Heavy chain | Evinacumab | | 20915 |
| SYS11 | | Heavy chain | Inclacumab | | 20916 |
| SYS12 | | Heavy chain | Lanadelumab | | 20917 |
| SYS13 | | Heavy chain | Ralpancizumab | | 20918 |
| SYS14 | | Heavy chain | Roledumab | | 20919 |
| SYS15 | CD20 | Heavy Chain, | Idarucizumab | U.S. Pat. No. 8,486,398 SEQ | 20920 |
| | | Antibody for | | ID NO: 35; | |
| | | reversing | | U.S. Pat. No. 8,486,398 SEQ | |
| | | anticoagulation of | | ID NO: 39 | |
| | | dabigatran | | | |
| SYS16 | oxLDL | Heavy chain | Orticumab, BI-204, | | 20921 |
| | | Antibody for acute | MLDL-1278A, R7418, | | |
| | | coronary | RG-7418 | | |
| | | syndrome, | | | |
| | | atherosclerosis | | | |
| SYS17 | | Heavy chain Fab | Idarucizumab | | 20922 |
| | | fragment | | | |
| SYS18 | selectin P | Heavy chain | Inclacumab, LC1004- | U.S. Pat. No. 7,563,441 SEQ | 20923 |
| | | variable region | 002, RO4905417 | ID NO: 4 | |
| SYS19 | oxLDL | Heavy chain | Orticumab, Bi-204, | U.S. Pat. No. 8,318,161 SEQ | 20924 |
| | | variable region, | MLDL-1278A, R7418, | ID NO: 3 | |
| | | Antibody for acute | RG-7418 | | |
| | | coronary | | | |
| | | syndrome, | | | |
| | | atherosclerosis | | | |
| SYS20 | C5 | Heavy Chain | Pexelizumab, 5G1.1-SC | | 20925 |
| | | Variable Region, | | | |
| | | Antibody for | | | |
| | | cardiopulmonary | | | |
| | | bypass, myocardial | | | |
| | | infection, | | | |
| | | h5g1.1VHC + F | | | |
| SYS21 | PCSK9 | Heavy chain | Alirocumab | U.S. Pat. No. 8,062,640 SEQ | 20926 |
| | | variable region, | | ID NO: 90 | |
| | | Antibody for | | | |
| | | cholesterol | | | |
| SYS22 | TNFSF11 | Heavy Chain | Denosumab, Prolia | U.S. Pat. No. 7,364,736; | 20927 |
| | | Variable Region, | | U.S. Pat. No. 8,058,418, | |
| | | Antibody for | | U.S. Pat. No. 8,409,578 | |
| | | osteoporosis | | | |
| SYS23 | TFPI | Heavy chain, | Concizumab, Anti- | U.S. Pat. No. 8,361,469 SEQ | 20928 |
| | | Antibody for | TFPI, NN7415, | ID NO: 24 | |
| | | bleeding, | mab2021 | | |
| SYS24 | PCSK9 | Heavy chain, | Bococizumab | U.S. Pat, No. 8,399,646 SEQ | 20929 |
| | | Antibody for | | ID NO: 15 | |
| | | cardiovascular | | | |
| | | disease | | | |
| SYS25 | PCSK9 | Heavy chain, | Alirocumab | | 20930 |
| | | Antibody for | | | |
| | | cholesterol | | | |
| SYS26 | PCSK9 | Heavy chain, | Ralpancizumab, PF- | | 20931 |
| | | Antibody for | 05335810, RN317 | | |
| | | dyslipidemia, | | | |
| | | Hypercholester- | | | |
| | | olemia | | | |
| SYS27 | F9, F10 | Heavy chain, | Emicizumab, ACE910, | | 20932 |
| | | Antibody for | hBS910 | | |
| | | hematology | | | |
| | | (hemophilia), anti | | | |
| | | 10 | | | |
| SYS28 | F9, F10 | Heavy chain, | Emicizumab, ACE910, | | 20933 |
| | | Antibody for | hBS910 | | |
| | | hematology | | | |
| | | (hemophilia), anti | | | |
| | | F-91 | | | |
| SYS29 | PCSK9 | Heavy chain, | Lodelcizumab, | | 20934 |
| | | Antibody for | LGT209, NVP- | | |
| | | hypercholesterole- | LGT209 | | |
| | | mia | | | |
| SYS30 | PCSK9 | Heavy chain, | Evolocumab | U.S. Pat. No. 8,030,457 | 20935 |
| | | Antibody for | | | |
| | | hyperlipidemia | | | |
| SYS31 | ANGPTL3 | Heavy chain, | Evinacumab, REGN | | 20936 |
| | | Antibody for | 1500 | | |
| | | Hypertriglyceride- | | | |
| | | mia | | | |
| SYS32 | TNFSF11 | Heavy Chain, | Denosumab, Prolia | U.S. Pat. No. 7,364,736; | 20937 |
| | | Antibody for | | U.S. Pat. No. 8,058,418; | |
| | | osteoporosis | | U.S. Pat. No. 8,409,578; | |
| SYS33 | SOST | Heavy chain, | Romosozumab | U.S. Pat. No. 7,592,429 | 20938 |
| | | Antibody for | | U.S. Pat. No. 7,872,106; | |
| | | osteoporosis, | | U.S. Pat. No. 8,003,108; | |
| | | | | U.S. Pat. No. 8,017,120 SEQ | |
| | | | | ID NOs: 147, 145 | |
| SYS34 | SOST | Heavy chain, | Blosozumab | U.S. Pat. No. 7,744,874 SEQ | 20939 |
| | | Antibody for | | ID NO: 3 | |
| | | osteoporosis. | | | |
| SYS35 | TNFSF11 | Heavy chain, | Denosumab, Prolia | U.S. Pat. No. 8,962,807 SEQ | 20940 |
| | | Antibody for | | ID NO: 177; | |
| | | osteoporosis, | | U.S. Pat. No. 7,528,236 SEQ | |
| | | Denosumab | | ID NO: 28 | |
| | | αOPGL-1 | | | |
| SYS36 | RHD | Heavy chain, | Roledumab, LFB-R593, | WO 2010100383 | 20941 |
| | | Antibody for | DMATRIA ™ | | |
| | | prevention of | | | |
| | | fetomaternal | | | |
| | | alloimmunization | | | |
| | | in RhD women | | | |
| SYS37 | CD20 | Heavy Chain, | Idarucizumab | U.S. Pat. No. 8,486,398 SEQ | 20942 |
| | | Antibody for | | ID No: 38; | |
| | | reversing | | U.S. Pat. No. 8,486,398 SEQ | |
| | | anticoagulation of | | ID No: 41; | |
| | | dabigatran | | U.S. Pat. No. 8,486,398 SEQ | |
| | | | | ID No: 36 | |
| SYS38 | | hemophilia | Factor IX-Fc antibody | US20050147618 | 20943 |
| | | | | SEQ ID NO: 23 | |
| SYS39 | | hemophilia | Factor VIII-Fc antibody | WO2011069164 | 20944 |
| | | | | SEQ ID NO: 2 | |
| SYS40 | selectin P | Light chain | Inclacumab, LC1004- | U.S. Pat. No. 8,039,596 SEQ | 20945 |
| | (a5b1) | | 002, RO4905418 | ID NO: 10; | |
| | | | | U.S. Pat. No. 7,432,359 SEQ | |
| | | | | ID NO: 89 | |
| SYS41 | | Light chain | Alirocumab | | 20946 |
| SYS42 | | Light chain | Abciximab | | 20947 |
| SYS43 | | Light chain | Bococizumab | | 20948 |
| SYS44 | | Light chain | Evinacumab | | 20949 |
| SYS45 | | Light chain | Idarucizumab | | 20950 |
| SYS46 | | Light chain | Inclacumab | | 20951 |
| SYS47 | | Light chain | Lanadelumab | | 20952 |
| SYS48 | | Light chain | Ralpancizumab | | 20953 |
| SYS49 | | Light chain | Roledumab | | 20954 |
| SYS50 | ANGPTL3 | Light chain, | Evinacumab, REGN | | 20955 |
| | | Antibody for | 1500 | | |
| | | Hypertriglyceri- | | | |
| | | demia | | | |
| SYS51 | CD41 7E3 | Light chain 1, | Abciximab, c7E3 Fab, | U.S. Pat. No. 5,275,812; | 20956 |
| | | Antibody for | ReoPro | U.S. Pat. No. 5,770,198; | |
| | | preventing blood | | U.S. Pat. No. 5,440,020 | |
| | | clot, ReoPro-Like | | | |
| SYS52 | CD41 7E3 | Light chain 1, | Abciximab, c7E3 Fab, | U.S. Pat. No. 5,275,812; | 20957 |
| | | Antibody for | ReoPro | U.S. Pat. No. 5,770,198; | |
| | | preventing blood | | U.S. Pat. No. 5,440,020 | |
| | | clot, ReoPro-Like | | | |
| SYS53 | selectin P | Light chain | Inclacumab, LC1004- | U.S. Pat. No. 7,563,441 SEQ | 20958 |
| | | variable region | 002, RO4905417 | ID NO: 3 | |
| SYS54 | oxLDL | Light chain | Orticumab, Bi-204, | U.S. Pat. No. 8,318,161 SEQ | 20959 |
| | | variable region, | MLDL-1278A, R7418, | ID NO: 4 | |
| | | Antibody for acute | RG-7418 | | |
| | | coronary | | | |
| | | syndrome, | | | |
| | | atherosclerosis | | | |
| SYS55 | C5 | Light Chain | Pexelizumab, 5G1.1-SC | | 20960 |
| | | Variable Region, | | | |
| | | Antibody for | | | |
| | | cardiopulmonary | | | |
| | | bypass, myocardial | | | |
| | | infection, | | | |
| | | h5g1.1VHC + F | | | |
| SYS56 | PCSK9 | Light chain | Alirocumab | U.S. Pat. No. 8,062,640 SEQ | 20961 |
| | | variable region, | | ID NO: 92 | |
| | | Antibody for | | | |
| | | cholesterol | | | |
| SYS57 | TNFSF11 | Light Chain | Denosumab, Prolia | U.S. Pat. No. 7,364,736; | 20962 |
| | | Variable Region, | | U.S. Pat. No. 8,058,418; | |
| | | Antibody for | | U.S. Pat. No. 8,409,578 | |
| | | osteoporosis | | | |
| SYS58 | oxLDL | Light chain, | Orticumab, BI-204, | | 20963 |
| | | Antibody for acute | MLDL-1278A, R7418, | | |
| | | coronary | RG-7418 | | |
| | | syndrome, | | | |
| | | atherosclerosis | | | |
| SYS59 | PCSK9 | Light chain, | Lodelcizumab, | U.S. Pat. No. 8,710,192 SEQ | 20964 |
| | | Antibody for | LGT209, NVP- | ID NO: 17 | |
| | | blood, | LGT209 | | |
| | | hypercholesterole- | | | |
| | | mia | | | |
| SYS60 | PCSK9 | Light chain, | Bococizumab | U.S. Pat. No. 8,399,646 SEQ | 20965 |
| | | Antibody for | | ID NO: 14 | |
| | | cardiovascular | | | |
| | | disease | | | |
| SYS61 | PCSK9 | Light chain, | Alirocumab | | 20966 |
| | | Antibody for | | | |
| | | cholesterol | | | |
| SYS62 | PCSK9 | Light chain, | Ralpancizumab, PF- | | 20967 |
| | | Antibody for | 05335810, RN317 | | |
| | | dyslipidemia, | | | |
| | | Hypercholesterole- | | | |
| | | mia | | | |
| SYS63 | F9, F10 | Light chain, | Emicizumab, ACE910, | | 20968 |
| | | Antibody for | hBS910 | | |
| | | hematology | | | |
| | | (hemophilia) | | | |
| SYS64 | TFPI | Light chain, | Concizumab, Anti- | U.S. Pat. No. 8,361,469 SEQ | 20969 |
| | | Antibody for | TFPI, NN7415, | ID NO: 21 | |
| | | hemophilia, | mab2021 | | |
| SYS65 | PCSK9 | Light chain, | Evolocumab | U.S. Pat. No. 8,030,457 SEQ | 20970 |
| | | Antibody for | | ID NO: 297 | |
| | | hyperlipidemia | | | |
| SYS66 | TNFSF11 | Light Chain, | Denosumab, Prolia | U.S. Pat. No. 7,364,736; | 20971 |
| | | Antibody for | | U.S. Pat. No. 8,058,418; | |
| | | osteoporosis | | U.S. Pat. No. 8,409,578 | |
| SYS67 | SOST | Light chain, | Romosozumab | U.S. Pat. No. 7,592,429; | 20972 |
| | | Antibody for | | U.S. Pat. No. 7,872,106; | |
| | | osteoporosis, | | U.S. Pat. No. 8,003,108; | |
| | | | | U.S. Pat. No. 8,017,120 SEQ | |
| | | | | ID NOs: 141, 143 | |
| SYS68 | SOST | Light chain, | Blosozumab | U.S. Pat. No. 7,744,874 SEQ | 20973 |
| | | Antibody for | | ID NO: 6 | |
| | | osteoporosis, | | | |
| SYS69 | TNFSF11 | Light chain, | Denosumab, Prolia | U.S. Pat. No. 8,992,925 SEQ | 20974 |
| | | Antibody for | | ID NO: 8; | |
| | | osteoporosis, | | U.S. Pat. No. 7,364,736 SEQ | |
| | | Denosumab | | ID NO: 4 | |
| | | αOPGL-1 | | | |
| SYS70 | RHD | Light chain, | Roledumab, LFB-R593, | WO 2010100383 | 20975 |
| | | Antibody for | DMATRIA ™ | | |
| | | prevention of | | | |
| | | fetomaternal | | | |
| | | alloimmunization | | | |
| | | in RhD women | | | |
| SYS71 | | Peptide | Ecallantide | | 20976 |
| SYS72 | C5 | scFv, Antibody for | Pexelizumab, 5G1.1-SC | | 20977 |
| | | cardiopulmonary | | | |
| | | bypass, myocardial | | | |
| | | infection, h5g1.1 | | | |
| SYS73 | | | Abaloparatide | | 20978 |

### Tau

[0397] In some embodiments, the payload region of the viral particle comprises one or more nucleic acid sequences encoding one or more of the payload antibody polypeptides listed in Table 13 (TAU1-TAU1322; SEQ ID NO: 20979-22300).

TABLE 13
Tau Associated Disease Antibodies

| Antibody | | | | | SEQ |
|---|---|---|---|---|---|
| No. | Target | Description | Antibody Name | Reference | ID NO |
| TAU1 | tau | Heavy chain | MC-1 | | 20979 |
| TAU2 | tau | Heavy chain | PHF-1 | | 20980 |
| TAU3 | tau | Heavy chain | IPN002 | | 20981 |
| TAU4 | amyloids | Heavy chain | #118 | WO2010012004 SEQ ID NO: 11 | 20982 |
| TAU5 | amyloids | Heavy chain | #121 | WO2010012004 SEQ ID NO: 13 | 20983 |
| TAU6 | amyloids | Heavy chain | #204 | WO2010012004 SEQ ID NO: 17 | 20984 |
| TAU7 | amyloids | Heavy chain | #205 | WO2010012004 SEQ ID NO: 19 | 20985 |
| TAU8 | NOGO | Heavy chain | H6L13 FL | US20140147435 SEQ ID NO: 27 | 20986 |
| TAU9 | NOGO | Heavy chain | H16L16 FL, | US20140147435 SEQ ID NO: 31 | 20987 |
| | | | H16L18 FL | | |
| TAU10 | NOGO | Heavy chain | H18L16 FL | US20140147435 SEQ ID NO: 33 | 20988 |
| TAU11 | NOGO | Heavy chain | H19L13 FL, | US20140147435 SEQ ID NO: 92 | 20989 |
| | | | H19L16 FL, | | |
| | | | H19L18 FL | | |
| TAU12 | NOGO | Heavy chain | H20L13 FL, | US20140147435 SEQ ID NO: 93 | 20990 |
| | | | H20L16 FL, | | |
| | | | H20L18 FL | | |
| TAU13 | NOGO | Heavy chain | H21L13 FL, | US20140147435 SEQ ID NO: 94 | 20991 |
| | | | H21L16 FL, | | |
| | | | H21L18 FL | | |
| TAU14 | NOGO | Heavy chain | H25L13 FL, | US20140147435 SEQ ID NO: 98 | 20992 |
| | | | H25L16 FL, | | |
| | | | H25L18 FL | | |
| TAU15 | Nogo receptor- | Heavy chain | 5B10 | US20090215691 SEQ ID NO: 16 | 20993 |
| | 1 | | | | |
| TAU16 | Nogo receptor- | Heavy chain | 5B10 | US20090215691 SEQ ID NO: 18 | 20994 |
| | 1 | | | | |
| TAU17 | PrP | Heavy chain | Ab c-120 | WO2014186878 SEQ ID NO: 38 | 20995 |
| TAU18 | PrPC and/or | Heavy chain | | US20150166668 SEQ ID NO: 10 | 20996 |
| | PrPSc | | | | |
| TAU19 | PrPC and/or | Heavy chain | | U.S. Pat. No. 8,852,587 SEQ ID NO: 4 | 20997 |
| | PrPSc | | | | |
| TAU20 | tau | Heavy chain | VH antibody | US20150252102 SEQ ID NO: 93 | 20998 |
| TAU21 | tau | Heavy chain | hAC1-36-3A8 | WO2013151762 SEQ ID NO: 24 | 20999 |
| | | | Ab1 | | |
| TAU22 | tau | Heavy chain | hACI-36-3B8 | WO2013151762 SEQ ID NO: 25 | 21000 |
| | | | Ab1 | | |
| TAU23 | tau | Heavy chain | hACI-36-3A8 | WO2013151762 SEQ ID NO: 26 | 21001 |
| | | | Abl.v2 | | |
| TAU24 | tau | Heavy chain | hACI-36-3A8 | WO2013151762 SEQ ID NO: 27 | 21002 |
| | | | Abl.v3 | | |
| TAU25 | tau | Heavy chain | hAC1-36-3A8 | WO2013151762 SEQ ID NO: 28 | 21003 |
| | | | Ab1.v4 | | |
| TAU26 | tau | Heavy chain | hAC1-36-3B8 | WO2013151762 SEQ ID NO: 29 | 21004 |
| | | | Abl.v2 | | |
| TAU27 | tau | Heavy chain | hACl-36-3B8 | WO2013151762 SEQ ID NO: 30 | 21005 |
| | | | Abl.v3 | | |
| TAU28 | tau | Heavy chain | hACI-36-3B8 | WO2013151762 SEQ ID NO: 31 | 21006 |
| | | | Abl.v4 | | |
| TAU29 | tau | Heavy chain | IPN001 | U.S. Pat. No. 8,980,271 SEQ ID NO: 14 | 21007 |
| TAU30 | tau | Heavy chain | IPN002 | U.S. Pat. No. 8,98,0271 SEQ ID NO: 16 | 21008 |
| TAU31 | tau | Heavy chain | ACI-36-3A8- | US20150175682 SEQ ID NO: 16 | 21009 |
| | | | Ab1 and hACl- | | |
| | | | 36-2B6-Ab1 | | |
| TAU32 | tau | Heavy chain | hACI-36-3A8- | US20150175682 SEQ ID NO: 17 | 21010 |
| | | | Abl and hACl- | | |
| | | | 36-2B6-Ab1 | | |
| TAU33 | tau | Heavy chain | hAC1-36-2B6- | US20150175682 SEQ ID NO: 25 | 21011 |
| | | | Abl (IgG4) | | |
| TAU34 | tau | Heavy chain | hAC1-36-3A8- | US20150175682 SEQ ID NO: 26 | 21012 |
| | | | Abl.v2 (IgG4) | | |
| TAU35 | tau | Heavy chain | hACI-36-3A8- | US20150175682 SEQ ID NO: 27 | 21013 |
| | | | Abl.v3 (IgG1) | | |
| TAU36 | tau | Heavy chain | hACl-36-3A8- | US20150175682 SEQ ID NO: 28 | 21014 |
| | | | Abl.v4 (IgG1 | | |
| | | | N297G) | | |
| TAU37 | tau | Heavy chain | hAC1-36-2B6- | US20150175682 SEQ ID NO: 29 | 21015 |
| | | | Abl.v2 (IgG4) | | |
| TAU38 | tau | Heavy chain | hAC1-36-2B6 | US20150175682 SEQ ID NO: 30 | 21016 |
| | | | Abl.v3 (IgG1) | | |
| TAU39 | tau | Heavy chain | hAC1-36-2B6- | US20150175682 SEQ ID NO: 31 | 21017 |
| | | | Ab1.v4 (IgG1 | | |
| | | | N297G) | | |
| TAU40 | trk-C | Heavy chain | 2250 | U.S. Pat. No. 7,615,383 SEQ ID NO: 42 | 21018 |
| TAU41 | trk-C | Heavy chain | 2253 | U.S. Pat. No. 7,615,383 SEQ ID NO: 43 | 21019 |
| TAU42 | trk-C | Heavy chain | 2256 | U.S. Pat. No. 7,615,383 SEQ ID NO: 44 | 21020 |
| TAU43 | trk-C | Heavy chain | 6.1.2 | U.S. Pat. No. 7,615,383 SEQ ID NO: 45 | 21021 |
| TAU44 | trk-C | Heavy chain | 6.4.1 | U.S. Pat. No. 7,615,383 SEQ ID NO: 46 | 21022 |
| TAU45 | trk-C | Heavy chain | 2345 | U.S. Pat. No. 7,615,383 SEQ ID NO: 47 | 21023 |
| TAU46 | trk-C | Heavy chain | 2349 | U.S. Pat. No. 7,615,383 SEQ ID NO: 48 | 21024 |
| TAU47 | tau | Heavy chain | hAC1-36-3A8- | US20150175682 SEQ ID NO: 14 | 21025 |
| | | constant | Ab1 and hACl- | | |
| | | region | 36-2B6-Abl | | |
| TAU48 | many | Heavy chain | | U.S. Pat. No. 8,053,569 SEQ ID NO: 25 | 21026 |
| | | fusion protein | | | |
| TAU49 | many | Heavy chain | | U.S. Pat. No. 8,053,569 SEQ ID NO: 28 | 21027 |
| | | fusion protein | | | |
| TAU50 | many | Heavy chain | | U.S. Pat. No. 8,053,569 SEQ ID NO: 34 | 21028 |
| | | fusion protein | | | |
| TAU51 | many - growth | Heavy chain | | U.S. Pat. No. 8,053,569 SEQ ID NO: 24 | 21029 |
| | factors (to | fusion protein | | | |
| | increase | | | | |
| | transport | | | | |
| | across BBB) | | | | |
| TAU52 | NOGO | Heavy chain | 2A10 construct | WO2007003421 SEQ ID NO: 79 | 21030 |
| | | humanized | | | |
| | | construct H1 | | | |
| TAU53 | NOGO | Heavy chain | 2A10 construct | WO2007003421 SEQ ID NO: 29 | 21031 |
| | | humanized | | | |
| | | construct H14 | | | |
| TAU54 | NOGO | Heavy chain | 2A10 construct | WO2007003421 SEQ ID NO: 30 | 21032 |
| | | humanized | | | |
| | | construct H15 | | | |
| TAU55 | NOGO | Heavy chain | 2A10 construct | WO2007003421 SEQ ID NO: 31 | 21033 |
| | | humanized | | | |
| | | construct H16 | | | |
| TAU56 | NOGO | Heavy chain | 2A10 construct | WO2007003421 SEQ ID NO: 32 | 21034 |
| | | humanized | | | |
| | | construct H17 | | | |
| TAU57 | NOGO | Heavy chain | 2A10 construct | WO2007003421 SEQ ID NO: 33 | 21035 |
| | | humanized | | | |
| | | construct H18 | | | |
| TAU58 | NOGO | Heavy chain | 2A10 construct | WO2007003421 SEQ ID NO: 92 | 21036 |
| | | humanized | | | |
| | | construct H19 | | | |
| TAU59 | NOGO | Heavy chain | 2A10 construct | WO2007003421 SEQ ID NO: 93 | 21037 |
| | | humanized | | | |
| | | construct H20 | | | |
| TAU60 | NOGO | Heavy chain | 2A10 construct | WO2007003421 SEQ ID NO: 94 | 21038 |
| | | humanized | | | |
| | | construct H21 | | | |
| TAU61 | NOGO | Heavy chain | 2A10 construct | WO2007003421 SEQ ID NO: 95 | 21039 |
| | | humanized | | | |
| | | construct H22 | | | |
| TAU62 | NOGO | Heavy chain | 2A10 construct | WO2007003421 SEQ ID NO: 96 | 21040 |
| | | humanized | | | |
| | | construct H23 | | | |
| TAU63 | NOGO | Heavy chain | 2A10 construct | WO2007003421 SEQ ID NO: 97 | 21041 |
| | | humanized | | | |
| | | construct H24 | | | |
| TAU64 | NOGO | Heavy chain | 2A10 construct | WO2007003421 SEQ ID NO: 98 | 21042 |
| | | humanized | | | |
| | | construct H25 | | | |
| TAU65 | NOGO | Heavy chain | 2A10 construct | WO2007003421 SEQ ID NO: 26 | 21043 |
| | | humanized | | | |
| | | construct H5 | | | |
| TAU66 | NOGO | Heavy chain | 2A10 construct | WO2007003421 SEQ ID NO: 27 | 21044 |
| | | humanized | | | |
| | | construct H6 | | | |
| TAU67 | NOGO | Heavy chain | 2A10 construct | WO2007003421 SEQ ID NO: 28 | 21045 |
| | | humanized | | | |
| | | construct | | | |
| | | H700 | | | |
| TAU68 | RTN4 | Heavy chain | Atinumab | U.S. Pat. No. 8,163,285 SEQ ID NO: 24 | 21046 |
| | (NOGO) | IgG4, | | | |
| | | immunomodu- | | | |
| | | lator | | | |
| TAU69 | tau | Heavy chain | ch4E4 | US20150252102 SEQ ID NO: 20 | 21047 |
| | | mature | | | |
| TAU70 | tau | Heavy chain | ch4E4(N30Q) | US20150252102 SEQ ID NO: 22 | 21048 |
| | | mature | | | |
| TAU71 | NOGO | Heavy chain | 2A10 construct | WO2007003421 SEQ ID NO: 77 | 21049 |
| | | variable | | | |
| | | humanized | | | |
| | | construct H1 | | | |
| TAU72 | NOGO | Heavy chain | 2A10 construct | WO2007003421 SEQ ID NO: 14 | 21050 |
| | | variable | | | |
| | | humanized | | | |
| | | construct H14 | | | |
| TAU73 | NOGO | Heavy chain | 2A10 construct | WO2007003421 SEQ ID NO: 15 | 21051 |
| | | variable | | | |
| | | humanized | | | |
| | | construct H15 | | | |
| TAU74 | NOGO | Heavy chain | 2A10 construct | WO2007003421 SEQ ID NO: 16 | 21052 |
| | | variable | | | |
| | | humanized | | | |
| | | construct H16 | | | |
| TAU75 | NOGO | Heavy chain | 2A10 construct | WO2007003421 SEQ ID NO: 17 | 21053 |
| | | variable | | | |
| | | humanized | | | |
| | | construct H17 | | | |
| TAU76 | NOGO | Heavy chain | 2A10 construct | WO2007003421 SEQ ID NO: 18 | 21054 |
| | | variable | | | |
| | | humanized | | | |
| | | construct H18 | | | |
| TAU77 | NOGO | Heavy chain | 2A10 construct | WO2007003421 SEQ ID NO: 85 | 21055 |
| | | variable | | | |
| | | humanized | | | |
| | | construct H19 | | | |
| TAU78 | NOGO | Heavy chain | 2A10 construct | WO2007003421 SEQ ID NO: 86 | 21056 |
| | | variable | | | |
| | | humanized | | | |
| | | construct H20 | | | |
| TAU79 | NOGO | Heavy chain | 2A10 construct | WO2007003421 SEQ ID NO: 87 | 21057 |
| | | variable | | | |
| | | humanized | | | |
| | | construct H21 | | | |
| TAU80 | NOGO | Heavy chain | 2A10 construct | WO2007003421 SEQ ID NO: 88 | 21058 |
| | | variable | | | |
| | | humanized | | | |
| | | construct H22 | | | |
| TAU81 | NOGO | Heavy chain | 2A10 construct | WO2007003421 SEQ ID NO: 89 | 21059 |
| | | variable | | | |
| | | humanized | | | |
| | | construct H23 | | | |
| TAU82 | NOGO | Heavy chain | 2A10 construct | WO2007003421 SEQ ID NO: 90 | 21060 |
| | | variable | | | |
| | | humanized | | | |
| | | construct H24 | | | |
| TAU83 | NOGO | Heavy chain | 2A10 construct | WO2007003421 SEQ ID NO: 91 | 21061 |
| | | variable | | | |
| | | humanized | | | |
| | | construct H25 | | | |
| TAU84 | NOGO | Heavy chain | 2A10 construct | WO2007003421 SEQ ID NO: 11 | 21062 |
| | | variable | | | |
| | | humanized | | | |
| | | construct H5 | | | |
| TAU85 | NOGO | Heavy chain | 2A10 construct | WO2007003421 SEQ ID NO: 12 | 21063 |
| | | variable | | | |
| | | humanized | | | |
| | | construct H6 | | | |
| TAU86 | NOGO | Heavy chain | 2A10 construct | WO2007003421 SEQ ID NO: 13 | 21064 |
| | | variable | | | |
| | | humanized | | | |
| | | construct | | | |
| | | H700 | | | |
| TAU87 | amyloid | Heavy chain | F11G3 | U.S. Pat. No. 9,125,846 SEQ ID NO: 11 | 21065 |
| | oligomers | variable | | | |
| | | region | | | |
| TAU88 | LPG(lysophos- | Heavy chain | #7 | U.S. Pat. No. 8,591,902 SEQ ID NO: 18 | 21066 |
| | phatidylgluco- | variable | | | |
| | side) | region | | | |
| TAU89 | LPG(lysophos- | Heavy chain | #15 | U.S. Pat. No. 8,591,902 SEQ ID NO: 8 | 21067 |
| | phatidylgluco- | variable | | | |
| | side) | region | | | |
| TAU90 | MAG | Heavy chain | | U.S. Pat. No. 8,071,731 SEQ ID NO: 13 | 21068 |
| | | variable | | | |
| | | region | | | |
| TAU91 | MAG | Heavy chain | | U.S. Pat. No. 8,071,731 SEQ ID NO: 14 | 21069 |
| | | variable | | | |
| | | region | | | |
| TAU92 | MAG | Heavy chain | | U.S. Pat. No. 8,071,731 SEQ ID NO: 15 | 21070 |
| | | variable | | | |
| | | region | | | |
| TAU93 | MAI (myelin | Heavy chain | | WO2013158748 SEQ ID NO: 1 | 21071 |
| | associated | variable | | | |
| | inhibitor) | region | | | |
| TAU94 | MAI (myelin | Heavy chain | | WO2013158748 SEQ ID NO: 17 | 21072 |
| | associated | variable | | | |
| | inhibitor) | region | | | |
| TAU95 | NMDA | Heavy chain | | EP2805972 SEQ ID NO: 43 | 21073 |
| | | variable | | | |
| | | region | | | |
| TAU96 | NOGO | Heavy chain | H5L13, H5L16, | US20140147435 SEQ ID NO: 11 | 21074 |
| | | variable | H5L18, H5L14, | | |
| | | region | H5L15, H5L17 | | |
| | | | H5L6, H5L11 | | |
| TAU97 | NOGO | Heavy chain | H6L13, H6L16, | US20140147435 SEQ ID NO: 12 | 21075 |
| | | variable | H6L18, H6L14, | | |
| | | region | H6L15, H6L17, | | |
| | | | H6L6 | | |
| TAU98 | NOGO | Heavy chain | H700L13, | US20140147435 SEQ ID NO: 13 | 21076 |
| | | variable | H700L16, | | |
| | | region | H700L18, | | |
| | | | H700L14, | | |
| | | | H700L15, | | |
| | | | H700L17, | | |
| | | | H700L6, | | |
| | | | H700L11 | | |
| TAU99 | NOGO | Heavy chain | H14L13, | US20140147435 SEQ ID NO: 14 | 21077 |
| | | variable | H14L16, | | |
| | | region | H14L18, | | |
| | | | H14L14, | | |
| | | | H14L15, | | |
| | | | H14L17, H14L6, | | |
| | | | H14L11 | | |
| TAU100 | NOGO | Heavy chain | H15L13, | US20140147435 SEQ ID NO: 15 | 21078 |
| | | variable | HI5L16, | | |
| | | region | HI5L18, | | |
| | | | HI5L14, | | |
| | | | HI5L15, | | |
| | | | H15L17, H15L6, | | |
| | | | H15L11 | | |
| TAU101 | NOGO | Heavy chain | H16L13, | US20140147435 SEQ ID NO: 16 | 21079 |
| | | variable | H16L16, | | |
| | | region | H16L18, | | |
| | | | H16L14, | | |
| | | | H16L15, | | |
| | | | H16L17, H16L6, | | |
| | | | H16L11 | | |
| TAU102 | NOGO | Heavy chain | H17L13, | US20140147435 SEQ ID NO: 17 | 21080 |
| | | variable | H17L16, | | |
| | | region | H17L18, | | |
| | | | H17L14, | | |
| | | | H17L15, | | |
| | | | H17L17, H17L6, | | |
| | | | H17L11 | | |
| TAU103 | NOGO | Heavy chain | H18L13, | US20140147435 SEQ ID NO: 18 | 21081 |
| | | variable | H18L16, | | |
| | | region | H18L18, | | |
| | | | H18L14, | | |
| | | | H18L15, | | |
| | | | H18L17, H18L6, | | |
| | | | H18L11 | | |
| TAU104 | NOGO | Heavy chain | HIL13, H1L16, | US20140147435 SEQ ID NO: 77 | 21082 |
| | | variable | HIL18, HIL14, | | |
| | | region | HIL15, HIL17, | | |
| | | | H1L6 | | |
| TAU105 | NOGO | Heavy chain | H19L13, | US20140147435 SEQ ID NO: 85 | 21083 |
| | | variable | H19L16, | | |
| | | region | H19L18, | | |
| | | | H19L14, | | |
| | | | H19L15, | | |
| | | | H19L17, H19L6, | | |
| | | | H19L11 | | |
| TAU106 | NOGO | Heavy chain | H20L13, | US20140147435 SEQ ID NO: 86 | 21084 |
| | | variable | H20L16, | | |
| | | region | H20L18, | | |
| | | | H20L14, | | |
| | | | H20L15, | | |
| | | | H20L17, H20L6, | | |
| | | | H20L11 | | |
| TAU107 | NOGO | Heavy chain | H21L13, | US20140147435 SEQ ID NO: 87 | 21085 |
| | | variable | H21L16, | | |
| | | region | H21L18, | | |
| | | | H21L14, | | |
| | | | H21L15, | | |
| | | | H21L17, H21L6, | | |
| | | | H21L11 | | |
| TAU108 | NOGO | Heavy chain | H22L13, | US20140147435 SEQ ID NO: 88 | 21086 |
| | | variable | H22L16, | | |
| | | region | H22L18, | | |
| | | | H22L14, | | |
| | | | H22L15, | | |
| | | | H22L17, H22L6, | | |
| | | | H22L11 | | |
| TAU109 | NOGO | Heavy chain | H23L13, | US20140147435 SEQ ID NO: 89 | 21087 |
| | | variable | H23L16, | | |
| | | region | H23L18, | | |
| | | | H23L14, | | |
| | | | H23L15, | | |
| | | | H23L17, H23L6, | | |
| | | | H23L11 | | |
| TAU110 | NOGO | Heavy chain | H24L13, | US20140147435 SEQ ID NO: 90 | 21088 |
| | | variable | H24L16, | | |
| | | region | H24L18, | | |
| | | | H24L14, | | |
| | | | H24L15, | | |
| | | | H24L17, H24L6, | | |
| | | | H24L11 | | |
| TAU111 | NOGO | Heavy chain | H25L13, | US20140147435 SEQ ID NO: 91 | 21089 |
| | | variable | H25L16, | | |
| | | region | H25L18, | | |
| | | | H25L14, | | |
| | | | H25L15, | | |
| | | | H25L17, H25L6, | | |
| | | | H25L11 | | |
| TAU112 | NOGO | Heavy chain | 2A10 | U.S. Pat. No. 7,988,964 SEQ ID NO: 37 | 21090 |
| | | variable | | | |
| | | region | | | |
| TAU113 | NOGO | Heavy chain | 2C4 | U.S. Pat. No. 7,988,964 SEQ ID NO: 38 | 21091 |
| | | variable | | | |
| | | region | | | |
| TAU114 | NOGO | Heavy chain | 15C3 | U.S. Pat. No. 7,988,964 SEQ ID NO: 39 | 21092 |
| | | variable | | | |
| | | region | | | |
| TAU115 | Nogo-66 | Heavy chain | Antibody clone | US20140065155 SEQ ID NO: 3 | 21093 |
| | | variable | 50 | | |
| | | region | | | |
| TAU116 | Nogo-66 | Heavy chain | Antibody clone | US20140065155 SEQ ID NO: 5 | 21094 |
| | | variable | 51 | | |
| | | region | | | |
| TAU117 | NogoA/NiG | Heavy chain | 6A3-Ig4 | WO2009056509 SEQ ID NO: 24 | 21095 |
| | | variable | | | |
| | | region | | | |
| TAU118 | NogoA/NiG | Heavy chain | 6A3-IgGI | WO2009056509 SEQ ID NO: 4 | 21096 |
| | | variable | | | |
| | | region | | | |
| TAU119 | PrP | Heavy chain | ICSM18VH | US20140294844 SEQ ID NO: 4 | 21097 |
| | | variable | | | |
| | | region | | | |
| TAU120 | PrP | Heavy chain | Ab c-120 | WO2014186878 SEQ ID NO: 40 | 21098 |
| | | variable | | | |
| | | region | | | |
| TAU121 | PrPC and/or | Heavy chain | | US20150166668 SEQ ID NO: 8 | 21099 |
| | PrPSc | variable | | | |
| | | region | | | |
| TAU122 | RGM A | Heavy chain | 5F9.1-GL | US20150183871 SEQ ID NO: 35 | 21100 |
| | | variable | | | |
| | | region | | | |
| TAU123 | RGM A | Heavy chain | 5F9.2-GL | US20150183871 SEQ ID NO: 36 | 21101 |
| | | variable | | | |
| | | region | | | |
| TAU124 | RGM A | Heavy chain | 5F9.3-GL | US20150183871 SEQ ID NO: 37 | 21102 |
| | | variable | | | |
| | | region | | | |
| TAU125 | RGM A | Heavy chain | 5F9.4-GL | US20150183871 SEQ ID NO: 38 | 21103 |
| | | variable | | | |
| | | egion | | | |
| TAU126 | RGM A | Heavy chain | 5F9.5-GL | US20150183871 SEQ ID NO: 39 | 21104 |
| | | variable | | | |
| | | region | | | |
| TAU127 | RGM A | Heavy chain | 5F9.6-GL | US20150183871 SEQ ID NO: 40 | 21105 |
| | | variable | | | |
| | | region | | | |
| TAU128 | RGM A | Heavy chain | 5F9.7-GL | US20150183871 SEQ ID NO: 41 | 21106 |
| | | variable | | | |
| | | region | | | |
| TAU129 | RGM A | Heavy chain | 5F9.8-GL | US20150183871 SEQ ID NO: 42 | 21107 |
| | | variable | | | |
| | | region | | | |
| TAU130 | RGM A | Heavy chain | 5F9.9-GL | US20150183871 SEQ ID NO: 43 | 21108 |
| | | variable | | | |
| | | region | | | |
| TAU131 | RGM A | Heavy chain | h5F9.1, h5F9.1, | US20150183871 SEQ ID NO: 47 | 21109 |
| | | variable | h5F9.1, hF9.1, | | |
| | | region | h5F9.1, hF9.2, | | |
| | | | h5F9.3 | | |
| TAU132 | RGM A | Heavy chain | h5F9.3, h5F9.9, | US20150183871 SEQ ID NO: 53 | 21110 |
| | | variable | h5F9.25 | | |
| | | region | | | |
| TAU133 | RGM A | Heavy chain | h5F9.4, h5F9.10, | US20150183871 SEQ ID NO: 54 | 21111 |
| | | variable | h5F9.26 | | |
| | | region | | | |
| TAU134 | RGMa | Heavy chain | AE12-1 | US20140023659 SEQ ID NO: 1 | 21112 |
| | | variable | | | |
| | | region | | | |
| TAU135 | RGMa | Heavy chain | AE12-20 | US20140023659 SEQ ID NO: 107 | 21113 |
| | | variable | | | |
| | | region | | | |
| TAU136 | RGMa | Heavy chain | AE12-21 | US20140023659 SEQ ID NO: 115 | 21114 |
| | | variable | | | |
| | | region | | | |
| TAU137 | RGMa | Heavy chain | AE12-23 | US20140023659 SEQ ID NO: 123 | 21115 |
| | | variable | | | |
| | | region | | | |
| TAU138 | RGMa | Heavy chain | AE12-24 | US20140023659 SEQ ID NO: 131 | 21116 |
| | | variable | | | |
| | | region | | | |
| TAU139 | RGMa | Heavy chain | AE12-3 | US20140023659 SEQ ID NO: 17 | 21117 |
| | | variable | | | |
| | | region | | | |
| TAU140 | RGMa | Heavy chain | AE12-4 | US20140023659 SEQ ID NO: 25 | 21118 |
| | | variable | | | |
| | | region | | | |
| TAU141 | RGMa | Heavy chain | AE12-5 | US20140023659 SEQ ID NO: 33 | 21119 |
| | | variable | | | |
| | | region | | | |
| TAU142 | RGMa | Heavy chain | AE12-6 | US20140023659 SEQ ID NO: 41 | 21120 |
| | | variable | | | |
| | | region | | | |
| TAU143 | RGMa | Heavy chain | AE12-7 | US20140023659 SEQ ID NO: 49 | 21121 |
| | | variable | | | |
| | | region | | | |
| TAU144 | RGMa | Heavy chain | AE12-8 | US20140023659 SEQ ID NO: 57 | 21122 |
| | | variable | | | |
| | | region | | | |
| TAU145 | RGMa | Heavy chain | AE12-2 | US20140023659 SEQ ID NO: 9 | 21123 |
| | | variable | | | |
| | | region | | | |
| TAU146 | RGMa | Heavy chain | AE12-13 | US20140023659 SEQ ID NO: 91 | 21124 |
| | | variable | | | |
| | | region | | | |
| TAU147 | RGMa | Heavy chain | AE12-15 | US20140023659 SEQ ID NO: 99 | 21125 |
| | | variable | | | |
| | | region | | | |
| TAU148 | tau | Heavy chain | | WO2014100600 SEQ ID NO: 45 | 21126 |
| | | variable | | | |
| | | region | | | |
| TAU149 | tau | Heavy chain | NI-105.24B2 | US20150252102 SEQ ID NO: 13 | 21127 |
| | | variable | | | |
| | | region | | | |
| TAU150 | tau | Heavy chain | NI-105.4A3 | US20150252102 SEQ ID NO: 17 | 21128 |
| | | variable | | | |
| | | region | | | |
| TAU151 | tau | Heavy chain | NI-105.4E4 | US20150252102 SEQ ID NO: 9 | 21129 |
| | | variable | | | |
| | | region | | | |
| TAU152 | tau | Heavy chain | | WO2013041962 SEQ ID NO: 138 | 21130 |
| | | variable | | | |
| | | region | | | |
| TAU153 | tau | Heavy chain | | WO2013041962 SEQ ID NO: 139 | 21131 |
| | | variable | | | |
| | | region | | | |
| TAU154 | tau | Heavy chain | | WO2013041962 SEQ ID NO: 140 | 21132 |
| | | variable | | | |
| | | region | | | |
| TAU155 | tau | Heavy chain | | WO2013041962 SEQ ID NO: 145 | 21133 |
| | | variable | | | |
| | | region | | | |
| TAU156 | tau | Heavy chain | | WO2013041962 SEQ ID NO: 147 | 21134 |
| | | variable | | | |
| | | region | | | |
| TAU157 | tau | Heavy chain | | WO2013041962 SEQ ID NO: 148 | 21135 |
| | | variable | | | |
| | | region | | | |
| TAU158 | tau | Heavy chain | | WO2014100600 SEQ ID NO: 220 | 21136 |
| | | variable | | | |
| | | region | | | |
| TAU159 | tau | Heavy chain | NI-105.17C1 | WO2014100600 SEQ ID NO: 44 | 21137 |
| | | variable | | | |
| | | region | | | |
| TAU160 | tau | Heavy chain | | WO2014100600 SEQ ID NO: 47 | 21138 |
| | | variable | | | |
| | | region | | | |
| TAU161 | tau | Heavy chain | NI-105.6C5 | WO2014100600 SEQ ID NO: 48 | 21139 |
| | | variable | | | |
| | | region | | | |
| TAU162 | tau | Heavy chain | NI-105.29G10 | WO2014100600 SEQ ID NO: 50 | 21140 |
| | | variable | | | |
| | | region | | | |
| TAU163 | tau | Heavy chain | NI-105.6L9 | WO2014100600 SEQ ID NO: 52 | 21141 |
| | | variable | | | |
| | | region | | | |
| TAU164 | tau | Heavy chain | NI-105.40E8 | WO2014100600 SEQ ID NO: 54 | 21142 |
| | | variable | | | |
| | | region | | | |
| TAU165 | tau | Heavy chain | NI-105.48E5 | WO2014100600 SEQ ID NO: 56 | 21143 |
| | | variable | | | |
| | | region | | | |
| TAU166 | tau | Heavy chain | NI-105.6E3 | WO2014100600 SEQ ID NO: 58 | 21144 |
| | | variable | | | |
| | | region | | | |
| TAU167 | tau | Heavy chain | NI-105.22E1 | WO2014100600 SEQ ID NO: 60 | 21145 |
| | | variable | | | |
| | | region | | | |
| TAU168 | tau | Heavy chain | NI-105.26B12 | WO2014100600 SEQ ID NO: 62 | 21146 |
| | | variable | | | |
| | | region | | | |
| TAU169 | tau | Heavy chain | NI-105.12E12 | WO2014100600 SEQ ID NO: 65 | 21147 |
| | | variable | | | |
| | | region | | | |
| TAU170 | tau | Heavy chain | NI-105.60E7 | WO2014100600 SEQ ID NO: 67 | 21148 |
| | | variable | | | |
| | | region | | | |
| TAU171 | tau | Heavy chain | NI-105.14E2 | WO2014100600 SEQ ID NO: 69 | 21149 |
| | | variable | | | |
| | | region | | | |
| TAU172 | tau | Heavy chain | NI-105.39E2 | WO2014100600 SEQ ID NO: 71 | 21150 |
| | | variable | | | |
| | | region | | | |
| TAU173 | tau | Heavy chain | NI-105.19C6 | WO2014100600 SEQ ID NO: 73 | 21151 |
| | | variable | | | |
| | | region | | | |
| TAU174 | tau | Heavy chain | | WO2014100600 SEQ ID NO: 75 | 21152 |
| | | variable | | | |
| | | region | | | |
| TAU175 | tau | Heavy chain | NI-105.9C4 | WO2014100600 SEQ ID NO: 76 | 21153 |
| | | variable | | | |
| | | region | | | |
| TAU176 | tau | Heavy chain | | U.S. Pat. No. 9,304,138 SEQ ID NO: 1 | 21154 |
| | | variable | | | |
| | | region | | | |
| TAU177 | tau | Heavy chain | | U.S. Pat. No. 9,304,138 SEQ ID NO: 2 | 21155 |
| | | variable | | | |
| | | region | | | |
| TAU178 | tau | Heavy chain | | U.S. Pat. No. 9,304,138 SEQ ID NO: 3 | 21156 |
| | | variable | | | |
| | | region | | | |
| TAU179 | tau | Heavy chain | | U.S. Pat. No. 9,304,138 SEQ ID NO: 4 | 21157 |
| | | variable | | | |
| | | region | | | |
| TAU180 | tau | Heavy chain | | U.S. Pat. No. 9,304,138 SEQ ID NO: 5 | 21158 |
| | | variable | | | |
| | | region | | | |
| TAU181 | tau | Heavy chain | | U.S. Pat. No. 9,304,138 SEQ ID NO: 68 | 21159 |
| | | variable | | | |
| | | region | | | |
| TAU182 | tau | Heavy chain | | U.S. Pat. No. 9,304,138 SEQ ID NO: 76 | 21160 |
| | | variable | | | |
| | | region | | | |
| TAU183 | tau | Heavy chain | | U.S. Pat. No. 9,304,138 SEQ ID NO: 88 | 21161 |
| | | variable | | | |
| | | region | | | |
| TAU184 | tau | Heavy chain | | U.S. Pat. No. 9,304,138 SEQ ID NO: 96 | 21162 |
| | | variable | | | |
| | | region | | | |
| TAU185 | tau | Heavy chain | | U.S. Pat. No. 9,304,138 SEQ ID NO: 104 | 21163 |
| | | variable | | | |
| | | region | | | |
| TAU186 | tau | Heavy chain | hAC1-36-3A8- | US20150175682 SEQ ID NO: 7 | 21164 |
| | | variable | Abl and hACl- | | |
| | | region | 36-2B6-Ab1 | | |
| TAU187 | tau | Heavy chain | hACl-36-3A8- | US20150175682 SEQ ID NO: 20 | 21165 |
| | | variable | Ab1.v2. | | |
| | | region | | | |
| TAU188 | tau | Heavy chain | hAC1-36-2B6- | US20150175682 SEQ ID NO: 21 | 21166 |
| | | variable | Ab1.v2 | | |
| | | region | | | |
| TAU189 | tau | Heavy chain | ADx210 | US20140161875 SEQ ID NO: 15 | 21167 |
| | | variable | | | |
| | | region | | | |
| TAU190 | tau | Heavy chain | ADx210 subpart | US20140161875 SEQ ID NO: 17 | 21168 |
| | | variable | | | |
| | | region | | | |
| TAU191 | tau | Heavy chain | ADx215 | US20140161875 SEQ ID NO: 25 | 21169 |
| | | variable | | | |
| | | region | | | |
| TAU192 | tau | Heavy chain | IPN002 variant 1 | U.S. Pat. No. 8,926,974 SEQ ID NO: 36 | 21170 |
| | | variable | | | |
| | | region | | | |
| TAU193 | tau | Heavy chain | IPN002 variant 2 | U.S. Pat. No. 8,926,974 SEQ ID NO: 37 | 21171 |
| | | variable | | | |
| | | region | | | |
| TAU194 | tau | Heavy chain | IPN002 variant 3 | U.S. Pat. No. 8,926,974 SEQ ID NO: 38 | 21172 |
| | | variable | | | |
| | | region | | | |
| TAU195 | tau | Heavy chain | IPN002 variant 4 | U.S. Pat. No. 8,926,974 SEQ ID NO: 39 | 21173 |
| | | variable | | | |
| | | region | | | |
| TAU196 | tau | Heavy chain | PT1 | US20150307600 SEQ ID NO: 35 | 21174 |
| | | variable | | | |
| | | region | | | |
| TAU197 | tau | Heavy chain | PT3 | US20150307600 SEQ ID NO: 37 | 21175 |
| | | variable | | | |
| | | region | | | |
| TAU198 | tau antigen | Heavy chain | ADx202 | WO2015004163 SEQ ID NO: 14 | 21176 |
| | | variable | | | |
| | | region | | | |
| TAU199 | tau pS422 | Heavy chain | antibody | US20110059093 SEQ ID NO: 2 | 21177 |
| | | variable | Mab2.10.3 | | |
| | | region | | | |
| TAU200 | tau pS422 | Heavy chain | Mab 005 | US20110059093 SEQ ID NO: 22 | 21178 |
| | | variable | | | |
| | | region | | | |
| TAU201 | tau pS422 | Heavy chain | Mab 019 | US20110059093 SEQ ID NO: 30 | 21179 |
| | | variable | | | |
| | | region | | | |
| TAU202 | tau pS422 | Heavy chain | Mab 020 | US20110059093 SEQ ID NO: 38 | 21180 |
| | | variable | | | |
| | | region | | | |
| TAU203 | tau pS422 | Heavy chain | Mab 085 | US20110059093 SEQ ID NO: 46 | 21181 |
| | | variable | | | |
| | | region | | | |
| TAU204 | tau pS422 | Heavy chain | Mab 086 | US20110059093 SEQ ID NO: 54 | 21182 |
| | | variable | | | |
| | | region | | | |
| TAU205 | tau pS422 | Heavy chain | Mab 097 | US20110059093 SEQ ID NO: 62 | 21183 |
| | | variable | | | |
| | | region | | | |
| TAU206 | tau | Light chain | MC-1 | | 21184 |
| TAU207 | tau | Light chain | PHF-1 | | 21185 |
| TAU208 | tau | Light chain | IPN002 | | 21186 |
| TAU209 | amyloids | Light chain | #118 | WO2010012004 SEQ ID NO: 12 | 21187 |
| TAU210 | amyloids | Light chain | #121 | WO2010012004 SEQ ID NO: 14 | 21188 |
| TAU211 | amyloids | Light chain | #201 | WO2010012004 SEQ ID NO: 15 | 21189 |
| TAU212 | amyloids | Light chain | #204 | WO2010012004 SEQ ID NO: 16 | 21190 |
| TAU213 | amyloids | Light chain | #205 | WO2010012004 SEQ ID NO: 18 | 21191 |
| TAU214 | NOGO | Light chain | H6L13 FL, | US20140147435 SEQ ID NO: 35 | 21192 |
| | | | H19L13 FL, | | |
| | | | H20L13 FL, | | |
| | | | H21L13 FL, | | |
| | | | H25L13 FL | | |
| TAU215 | NOGO | Light chain | H16L16 FL, | US20140147435 SEQ ID NO: 38 | 21193 |
| | | | H19L16 FL, | | |
| | | | H20L16 FL, | | |
| | | | H21L16 FL, | | |
| | | | H25L16 FL, | | |
| | | | H18L16 FL | | |
| TAU216 | NOGO | Light chain | H16L18 FL, | US20140147435 SEQ ID NO: 40 | 21194 |
| | | | H19L18 FL, | | |
| | | | H20L18 FL, | | |
| | | | H21L18 FL, | | |
| | | | H25L18 FL | | |
| TAU217 | Nogo receptor- | Light chain | 7.00E+11 | US20090215691 SEQ ID NO: 15 | 21195 |
| | 1 | | | | |
| TAU218 | Nogo receptor- | Light chain | 7.00E+11 | US20090215691 SEQ ID NO: 17 | 21196 |
| | 1 | | | | |
| TAU219 | PrP | Light chain | Ab c-120 | WO2014186878 SEQ ID NO: 37 | 21197 |
| TAU220 | PrPC and/or | Light chain | | US20150166668 SEQ ID NO: 9 | 21198 |
| | PrPSc | | | | |
| TAU221 | PrPC and/or | Light chain | | U.S. Pat. No. 8,852,587 SEQ ID NO: 5 | 21199 |
| | PrPSc | | | | |
| TAU222 | tau | Light chain | hAC1-36-3A8 | WO2013151762 SEQ ID NO: 22 | 21200 |
| | | | Abl, hACl-36- | | |
| | | | 3A8 Abl.v2, | | |
| | | | hAC1-36-3A8 | | |
| | | | Abl.v3, hACl- | | |
| | | | 36-3A8 Ab1.v4 | | |
| TAU223 | tau | Light chain | hACl-36-3B8 | WO2013151762 SEQ ID NO: 23 | 21201 |
| | | | Abl, hACl-36- | | |
| | | | 3B8 Abl.v2, | | |
| | | | hAC1-36-3B8 | | |
| | | | Abl.v3, hACl- | | |
| | | | 36-3B8 Abl.v4 | | |
| TAU224 | tau | Light chain | IPN001 | U.S. Pat. No. 8,98,0271 SEQ ID NO: 13 | 21202 |
| TAU225 | tau | Light chain | IPN002 | U.S. Pat. No. 8,980,271 SEQ ID NO: 15 | 21203 |
| TAU226 | tau | Light chain | hAC1-36-3A8- | US20150175682 SEQ ID NO: 18 | 21204 |
| | | | Abl and hACl- | | |
| | | | 36-2B6-Ab | | |
| TAU227 | tau | Light chain | hACl-36-3A8- | US20150175682 SEQ ID NO: 22 | 21205 |
| | | | Ab1 (IgG4), | | |
| | | | hACl-36-3A8- | | |
| | | | Ab1.v2 (IgG4), | | |
| | | | hAC1-36-3A8- | | |
| | | | Ab1.v3 (IgGl), | | |
| | | | and hACl-36- | | |
| | | | 3A8-Abl.v4 | | |
| | | | (IgGl N297G) | | |
| TAU228 | tau | Light chain | hACl-36-2B6- | US20150175682 SEQ ID NO: 23 | 21206 |
| | | | Abl (IgG4), | | |
| | | | hACl-36-2B6- | | |
| | | | Abl.v2 (IgG4), | | |
| | | | hACl-36-2B6- | | |
| | | | Abl.v3 (IgG1), | | |
| | | | and hACl-36- | | |
| | | | 2B6-Ab1.v4 | | |
| | | | (IgG1 N297G) | | |
| TAU229 | tau | Light chain | hAC1-36-3A8- | US20150175682 SEQ ID NO: 24 | 21207 |
| | | | Abl (IgG4) | | |
| TAU230 | trk-C | Light chain | 2250 | U.S. Pat. No. 7,615,383 SEQ ID NO: 49 | 21208 |
| TAU231 | trk-C | Light chain | 2253 | U.S. Pat. No. 7,615,383 SEQ ID NO: 50 | 21209 |
| TAU232 | trk-C | Light chain | 2256 | U.S. Pat. No. 7,615,383 SEQ ID NO: 51 | 21210 |
| TAU233 | trk-C | Light chain | 6.1.2 | U.S. Pat. No. 7,615,383 SEQ ID NO: 52 | 21211 |
| TAU234 | trk-C | Light chain | 6.4.1 | U.S. Pat. No. 7,615,383 SEQ ID NO: 53 | 21212 |
| TAU235 | trk-C | Light chain | 2345 | U.S. Pat. No. 7,615,383 SEQ ID NO: 54 | 21213 |
| TAU236 | trk-C | Light chain | 2349 | U.S. Pat. No. 7,615,383 SEQ ID NO: 55 | 21214 |
| TAU237 | many | Light chain | | U.S. Pat. No. 8,053,569 SEQ ID NO: 31 | 21215 |
| | | fusion protein | | | |
| TAU238 | many | Light chain | | U.S. Pat. No. 8,053,569 SEQ ID NO: 36 | 21216 |
| | | fusion protein | | | |
| TAU239 | NOGO | Light chain | 2A10 construct | WO2007003421 SEQ ID NO: 80 | 21217 |
| | | humanized | | | |
| | | construct L11 | | | |
| TAU240 | NOGO | Light chain | 2A10 construct | WO2007003421 SEQ ID NO: 35 | 21218 |
| | | humanized | | | |
| | | construct L13 | | | |
| TAU241 | NOGO | Light chain | 2A10 construct | WO2007003421 SEQ ID NO: 36 | 21219 |
| | | humanized | | | |
| | | construct L14 | | | |
| TAU242 | NOGO | Light chain | 2A10 construct | WO2007003421 SEQ ID NO: 37 | 21220 |
| | | humanized | | | |
| | | construct L 15 | | | |
| TAU243 | NOGO | Light chain | 2A10 construct | WO2007003421 SEQ ID NO: 38 | 21221 |
| | | humanized | | | |
| | | construct L16 | | | |
| TAU244 | NOGO | Light chain | 2A10 construct | WO2007003421 SEQ ID NO: 39 | 21222 |
| | | humanized | | | |
| | | construct L17 | | | |
| TAU245 | NOGO | Light chain | 2A10 construct | WO2007003421 SEQ ID NO: 40 | 21223 |
| | | humanized | | | |
| | | construct L18 | | | |
| TAU246 | NOGO | Light chain | 2A10 construct | WO2007003421 SEQ ID NO: 34 | 21224 |
| | | humanized | | | |
| | | construct L6 | | | |
| TAU247 | RTN4 | Light chain | Atinumab | U.S. Pat. No. 8,163,285 SEQ ID NO: 25 | 21225 |
| | | IgG4, | | | |
| | | immunomodu- | | | |
| | | lator | | | |
| TAU248 | tau | Light chain | ch4E4 | US20150252102 SEQ ID NO: 21 | 21226 |
| | | mature | | | |
| TAU249 | NOGO | Light chain | 2A10 construct | WO2007003421 SEQ ID NO: 78 | 21227 |
| | | variable | | | |
| | | humanized | | | |
| | | construct L11 | | | |
| TAU250 | NOGO | Light chain | 2A10 construct | WO2007003421 SEQ ID NO: 20 | 21228 |
| | | variable | | | |
| | | humanized | | | |
| | | construct L13 | | | |
| TAU251 | NOGO | Light chain | 2A10 construct | WO2007003421 SEQ ID NO: 21 | 21229 |
| | | variable | | | |
| | | humanized | | | |
| | | construct L 14 | | | |
| TAU252 | NOGO | Light chain | 2A10 construct | WO2007003421 SEQ ID NO: 22 | 21230 |
| | | variable | | | |
| | | humanized | | | |
| | | construct L15 | | | |
| TAU253 | NOGO | Light chain | 2A10 construct | WO2007003421 SEQ ID NO: 23 | 21231 |
| | | variable | | | |
| | | humanized | | | |
| | | construct L16 | | | |
| TAU254 | NOGO | Light chain | 2A10 construct | WO2007003421 SEQ ID NO: 24 | 21232 |
| | | variable | | | |
| | | humanized | | | |
| | | construct L17 | | | |
| TAU255 | NOGO | Light chain | 2A10 construct | WO2007003421 SEQ ID NO: 25 | 21233 |
| | | variable | | | |
| | | humanized | | | |
| | | construct L18 | | | |
| TAU256 | NOGO | Light chain | 2A10 construct | WO2007003421 SEQ ID NO: 19 | 21234 |
| | | variable | | | |
| | | humanized | | | |
| | | construct L6 | | | |
| TAU257 | amyloid | Light chain | F11G3 | U.S. Pat. No. 9,125,846 SEQ ID NO: 12 | 21235 |
| | oligomers | variable | | | |
| | | region | | | |
| TAU258 | LPG(lysophos- | Light chain | #7 | U.S. Pat. No. 8,591,902 SEQ ID NO: 17 | 21236 |
| | phatidylgluco- | variable | | | |
| | side) | region | | | |
| TAU259 | LPG(lysophos- | Light chain | #15 | U.S. Pat. No. 8,591,902 SEQ ID NO: 7 | 21237 |
| | phatidylgluco- | variable | | | |
| | side) | region | | | |
| TAU260 | MAG | Light chain | | U.S. Pat. No. 8,071,731 SEQ ID NO: 16 | 21238 |
| | | variable | | | |
| | | region | | | |
| TAU261 | MAG | Light chain | | U.S. Pat. No. 8,071,731 SEQ ID NO: 17 | 21239 |
| | | variable | | | |
| | | region | | | |
| TAU262 | MAG | Light chain | | U.S. Pat. No. 8,071,731 SEQ ID NO: 18 | 21240 |
| | | variable | | | |
| | | region | | | |
| TAU263 | MAG | Light chain | | U.S. Pat. No. 8,071,731 SEQ ID NO: 19 | 21241 |
| | | variable | | | |
| | | region | | | |
| TAU264 | MAI (myelin | Light chain | | WO2013158748 SEQ ID NO: 11 | 21242 |
| | associated | variable | | | |
| | inhibitor) | region | | | |
| TAU265 | MAI (myelin | Light chain | | WO2013158748 SEQ ID NO: 27 | 21243 |
| | associated | variable | | | |
| | inhibitor) | region | | | |
| TAU266 | NMDA | Light chain | | EP2805972 SEQ ID NO: 44 | 21244 |
| | | variable | | | |
| | | region | | | |
| TAU267 | NOGO | Light chain | HIL6, H5L6, | US20140147435 SEQ ID NO: 19 | 21245 |
| | | variable | H6L6, H14L6, | | |
| | | region | H15L6, H16L6, | | |
| | | | H17L6, H18L6, | | |
| | | | H19L6, H20L6, | | |
| | | | H21L6, H22L6, | | |
| | | | H23L6, H24L6, | | |
| | | | H25L6, H700L6 | | |
| TAU268 | NOGO | Light chain | HIL13, H5L13, | US20140147435 SEQ ID NO: 20 | 21246 |
| | | variable | H6L13, H14L13, | | |
| | | region | H15L13, | | |
| | | | H16L13, | | |
| | | | H17L13, | | |
| | | | H18L13, | | |
| | | | H19L13, | | |
| | | | H20L13, | | |
| | | | H21L13, | | |
| | | | H22L13, | | |
| | | | H23L13, | | |
| | | | H24L13, | | |
| | | | H25L13, | | |
| | | | H700L13 | | |
| TAU269 | NOGO | Light chain | HIL14, H5L14, | US20140147435 SEQ ID NO: 21 | 21247 |
| | | variable | H6L14, H14L14, | | |
| | | region | H15L14, | | |
| | | | H16L14, | | |
| | | | H17L14, | | |
| | | | H18L14, | | |
| | | | H19L14, | | |
| | | | H20L14, | | |
| | | | H21L14, | | |
| | | | H22L14, | | |
| | | | H23L14, | | |
| | | | H24L14, | | |
| | | | H25L14, | | |
| | | | H700L14 | | |
| TAU270 | NOGO | Light chain | HIL15, H5L15, | US20140147435 SEQ ID NO: 22 | 21248 |
| | | variable | H6L15, H14L15, | | |
| | | region | H15L15, | | |
| | | | H16L15, | | |
| | | | H17L15, | | |
| | | | H18L15, | | |
| | | | H19L15, | | |
| | | | H20L15, | | |
| | | | H21L15, | | |
| | | | H22L15, | | |
| | | | H23L15, | | |
| | | | H24L15, | | |
| | | | H25L15, | | |
| | | | H700L15 | | |
| TAU271 | NOGO | Light chain | H1L16, H5L16, | US20140147435 SEQ ID NO: 23 | 21249 |
| | | variable | H6L16, H14L16, | | |
| | | region | H15L16, | | |
| | | | H16L16, | | |
| | | | H17L16, | | |
| | | | H18L16, | | |
| | | | H19L16, | | |
| | | | H20L16, | | |
| | | | H21L16, | | |
| | | | H22L16, | | |
| | | | H23L16, | | |
| | | | H24L16, | | |
| | | | H25L16, | | |
| | | | H700L16 | | |
| TAU272 | NOGO | Light chain | HIL17, H5L17, | US20140147435 SEQ ID NO: 24 | 21250 |
| | | variable | H6L17, H14L17, | | |
| | | region | H15L17, | | |
| | | | H16L17, | | |
| | | | H17L17, | | |
| | | | H18L17, | | |
| | | | H19L17, | | |
| | | | H20L17, | | |
| | | | H21L17, | | |
| | | | H22L17, | | |
| | | | H23L17, | | |
| | | | H24L17, | | |
| | | | H25L17, | | |
| | | | H700L17 | | |
| TAU273 | NOGO | Light chain | H1L18, H5L18, | US20140147435 SEQ ID NO: 25 | 21251 |
| | | variable | H6L18, H14L18, | | |
| | | region | H15L18, | | |
| | | | H16L18, | | |
| | | | H17L18, | | |
| | | | H18L18, | | |
| | | | H19L18, | | |
| | | | H20L18, | | |
| | | | H21L18, | | |
| | | | H22L18, | | |
| | | | H23L18, | | |
| | | | H24L18, | | |
| | | | H25L18, | | |
| | | | H700L18 | | |
| TAU274 | NOGO | Light chain | H5L11, H6L11, | US20140147435 SEQ ID NO: 78 | 21252 |
| | | variable | H14L11, | | |
| | | region | H15L11, | | |
| | | | H16L11, | | |
| | | | H17L11, | | |
| | | | H18L11, | | |
| | | | H19L11, | | |
| | | | H20L11, | | |
| | | | H21L11, | | |
| | | | H22L11, | | |
| | | | H23L11, | | |
| | | | H24L11, | | |
| | | | H25L11, | | |
| | | | H700L11 | | |
| TAU275 | NOGO | Light chain | 2A10 | U.S. Pat. No. 7,988,964 SEQ ID NO: 40 | 21253 |
| | | variable | | | |
| | | region | | | |
| TAU276 | NOGO | Light chain | 2C4 | U.S. Pat. No. 7,988,964 SEQ ID NO: 41 | 21254 |
| | | variable | | | |
| | | region | | | |
| TAU277 | Nogo-66 | Light chain | Antibody clone | U.S. 20140065155 SEQ ID NO: 4 | 21255 |
| | | variable | 50 | | |
| | | region | | | |
| TAU278 | Nogo-66 | Light chain | Antibody clone | US20140065155 SEQ ID NO: 6 | 21256 |
| | | variable | 51 | | |
| | | region | | | |
| TAU279 | NogoA/NiG | Light chain | 6A3-Ig4 | WO2009056509 SEQ ID NO: 25 | 21257 |
| | | variable | | | |
| | | region | | | |
| TAU280 | NogoA/NiG | Light chain | 6A3-IgGI | WO2009056509 SEQ ID NO: 5 | 21258 |
| | | variable | | | |
| | | region | | | |
| TAU281 | PrP | Light chain | Ab c-120 | WO2014186878 SEQ ID NO: 39 | 21259 |
| | | variable | | | |
| | | region | | | |
| TAU282 | PrPC and/or | Light chain | | US20150166668 SEQ ID NO: 7 | 21260 |
| | PrPSc | variable | | | |
| | | region | | | |
| TAU283 | RGM A | Light chain | 5F9.1-GL, | US20150183871 SEQ ID NO: 44 | 21261 |
| | | variable | 5F9.1-GL, | | |
| | | region | 5F9.1-GL, | | |
| | | | 5F9.1-GL, | | |
| | | | 5F9.1-GL, | | |
| | | | 5F9.1-GL, | | |
| | | | 5F9.1-GL, | | |
| | | | 5F9.1-GL, | | |
| | | | 5F9.1-GL, | | |
| | | | 5F9.1-GL, | | |
| | | | h5F9.4, h5F9.11, | | |
| | | | h5F9.12 | | |
| TAU284 | RGM A | Light chain | 5F9.2-GL, | US20150183871 SEQ ID NO: 45 | 21262 |
| | | variable | 5F9.2-GL, | | |
| | | region | 5F9.2-GL, | | |
| | | | 5F9.2-GL, | | |
| | | | 5F9.2-GL, | | |
| | | | 5F9.2-GL, | | |
| | | | 5F9.2-GL, | | |
| | | | 5F9.2-GL, | | |
| | | | 5F9.2-GL, | | |
| | | | 5F9.2-GL, | | |
| | | | h5F9.5, h5F9.19, | | |
| | | | h5F9.20 | | |
| TAU285 | RGM A | Light chain | 5F9.3-GL, | US20150183871 SEQ ID NO: 46 | 21263 |
| | | variable | 5F9.3-GL, | | |
| | | region | 5F9.3-GL, | | |
| | | | 5F9.3-GL, | | |
| | | | 5F9.3-GL, | | |
| | | | 5F9.3-GL, | | |
| | | | 5F9.3-GL, | | |
| | | | 5F9.3-GL, | | |
| | | | 5F9.3-GL, | | |
| | | | 5F9.3-GL, | | |
| | | | hSF9.6. h5F9.21, | | |
| | | | h5F9.22 | | |
| TAU286 | RGM A | Light chain | h5F9.5, h5F9,6, | US20150183871 SEQ ID NO: 48 | 21264 |
| | | variable | h5F9.7, h5F9.8, | | |
| | | region | h5F9.9, h5F9.10 | | |
| TAU287 | RGM A | Light chain | h5F9.11, | US20150183871 SEQ ID NO: 49 | 21265 |
| | | variable | h5F9.19, h5F9.2 | | |
| | | region | 1 | | |
| TAU288 | RGM A | Light chain | h5F9.12, | US20150183871 SEQ ID NO: 50 | 21266 |
| | | variable | h5F9.20, | | |
| | | region | h5F9.22, | | |
| | | | h5F9.23, | | |
| | | | h5F9.25, | | |
| | | | h5F9.25, | | |
| | | | h5F9.26 | | |
| TAU289 | RGM A | Light chain | h5F9.1, h5F9.7, | US20150183871 SEQ ID NO: 51 | 21267 |
| | | variable | h5F9.23 | | |
| | | region | | | |
| TAU290 | RGM A | Light chain | h5F9.2, h5F9.8, | US20150183871 SEQ ID NO: 52 | 21268 |
| | | variable | h5F9.25 | | |
| | | region | | | |
| TAU291 | RGMa | Light chain | AE12-15 | US20140023659 SEQ ID NO: 103 | 21269 |
| | | variable | | | |
| | | region | | | |
| TAU292 | RGMa | Light chain | AE12-20 | US20140023659 SEQ ID NO: 111 | 21270 |
| | | variable | | | |
| | | region | | | |
| TAU293 | RGMa | Light chain | AE12-21 | US20140023659 SEQ ID NO: 119 | 21271 |
| | | variable | | | |
| | | region | | | |
| TAU294 | RGMa | Light chain | AE12-23 | US20140023659 SEQ ID NO: 127 | 21272 |
| | | variable | | | |
| | | region | | | |
| TAU295 | RGMa | Light chain | AE12-2 | US20140023659 SEQ ID NO: 13 | 21273 |
| | | variable | | | |
| | | region | | | |
| TAU296 | RGMa | Light chain | AE12-24 | US20140023659 SEQ ID NO: 135 | 21274 |
| | | variable | | | |
| | | region | | | |
| TAU297 | RGMa | Light chain | AE12-3 | US20140023659 SEQ ID NO: 21 | 21275 |
| | | variable | | | |
| | | region | | | |
| TAU298 | RGMa | Light chain | AE12-4 | US20140023659 SEQ ID NO: 29 | 21276 |
| | | variable | | | |
| | | region | | | |
| TAU299 | RGMa | Light chain | AE12-5 | US20140023659 SEQ ID NO: 37 | 21277 |
| | | variable | | | |
| | | region | | | |
| TAU300 | RGMa | Light chain | AE12-6 | US20140023659 SEQ ID NO: 45 | 21278 |
| | | variable | | | |
| | | region | | | |
| TAU301 | RGMa | Light chain | AE12-1 | US20140023659 SEQ ID NO: 5 | 21279 |
| | | variable | | | |
| | | region | | | |
| TAU302 | RGMa | Light chain | AE12-7 | US20140023659 SEQ ID NO: 53 | 21280 |
| | | variable | | | |
| | | region | | | |
| TAU303 | RGMa | Light chain | AE12-8 | US20140023659 SEQ ID NO: 61 | 21281 |
| | | variable | | | |
| | | region | | | |
| TAU304 | RGMa | Light chain | AE12-13 | US20140023659 SEQ ID NO: 95 | 21282 |
| | | variable | | | |
| | | region | | | |
| TAU305 | tau | Light chain | NI-105.4E4 | US20150252102 SEQ ID NO: 11 | 21283 |
| | | variable | | | |
| | | region | | | |
| TAU306 | tau | Light chain | NI-105.24B2 | US20150252102 SEQ ID NO: 15 | 21284 |
| | | variable | | | |
| | | region | | | |
| TAU307 | tau | Light chain | NI-105.4A3 | US20150252102 SEQ ID NO: 19 | 21285 |
| | | variable | | | |
| | | region | | | |
| TAU308 | tau | Light chain | | WO2013041962 SEQ ID NO: 141 | 21286 |
| | | variable | | | |
| | | region | | | |
| TAU309 | tau | Light chain | | WO2013041962 SEQ ID NO: 142 | 21287 |
| | | variable | | | |
| | | region | | | |
| TAU310 | tau | Light chain | | WO2013041962 SEQ ID NO: 143 | 21288 |
| | | variable | | | |
| | | region | | | |
| TAU311 | tau | Light chain | | WO2013041962 SEQ ID NO: 150 | 21289 |
| | | variable | | | |
| | | region | | | |
| TAU312 | tau | Light chain | | WO2013041962 SEQ ID NO: 152 | 21290 |
| | | variable | | | |
| | | region | | | |
| TAU313 | tau | Light chain | | WO2013041962 SEQ ID NO: 153 | 21291 |
| | | variable | | | |
| | | region | | | |
| TAU314 | tau | Light chain | | WO2014100600 SEQ ID NO: 221 | 21292 |
| | | variable | | | |
| | | region | | | |
| TAU315 | tau | Light chain | | WO2014100600 SEQ ID NO: 222 | 21293 |
| | | variable | | | |
| | | region | | | |
| TAU316 | tau | Light chain | NI-105.17C1 | WO2014100600 SEQ ID NO: 46 | 21294 |
| | | variable | | | |
| | | region | | | |
| TAU317 | tau | Light chain | NI-105.6C5 | WO2014100600 SEQ ID NO: 49 | 21295 |
| | | variable | | | |
| | | region | | | |
| TAU318 | tau | Light chain | NI-105.29G10 | WO2014100600 SEQ ID NO: 51 | 21296 |
| | | variable | | | |
| | | region | | | |
| TAU319 | tau | Light chain | NI-105.6L9 | WO2014100600 SEQ ID NO: 53 | 21297 |
| | | variable | | | |
| | | region | | | |
| TAU320 | tau | Light chain | NI-105.40E8 | WO2014100600 SEQ ID NO: 55 | 21298 |
| | | variable | | | |
| | | region | | | |
| TAU321 | tau | Light chain | NI-105.48E5 | WO2014100600 SEQ ID NO: 57 | 21299 |
| | | variable | | | |
| | | region | | | |
| TAU322 | tau | Light chain | NI-105.6E3 | WO2014100600 SEQ ID NO: 59 | 21300 |
| | | variable | | | |
| | | region | | | |
| TAU323 | tau | Light chain | NI-105.22E1 | WO2014100600 SEQ ID NO: 61 | 21301 |
| | | variable | | | |
| | | region | | | |
| TAU324 | tau | Light chain | | WO2014100600 SEQ ID NO: 63 | 21302 |
| | | variable | | | |
| | | region | | | |
| TAU325 | tau | Light chain | NI-105.26B12 | WO2014100600 SEQ ID NO: 64 | 21303 |
| | | variable | | | |
| | | region | | | |
| TAU326 | tau | Light chain | NI-105.12E12 | WO2014100600 SEQ ID NO: 66 | 21304 |
| | | variable | | | |
| | | region | | | |
| TAU327 | tau | Light chain | NI-105.60E7 | WO2014100600 SEQ ID NO: 68 | 21305 |
| | | variable | | | |
| | | region | | | |
| TAU328 | tau | Light chain | NI-105.14E2 | WO2014100600 SEQ ID NO: 70 | 21306 |
| | | variable | | | |
| | | region | | | |
| TAU329 | tau | Light chain | NI-105.39E2 | WO2014100600 SEQ ID NO: 72 | 21307 |
| | | variable | | | |
| | | region | | | |
| TAU330 | tau | Light chain | NI-105.19C6 | WO2014100600 SEQ ID NO: 74 | 21308 |
| | | variable | | | |
| | | region | | | |
| TAU331 | tau | Light chain | | WO2014100600 SEQ ID NO: 77 | 21309 |
| | | variable | | | |
| | | region | | | |
| TAU332 | tau | Light chain | NI-105.9C4 | WO2014100600 SEQ ID NO: 78 | 21310 |
| | | variable | | | |
| | | region | | | |
| TAU333 | tau | Light chain | IPN002 variant 1 | U.S. Pat. No. 8,926,974 SEQ ID NO: 40 | 21311 |
| | | variable | | | |
| | | region | | | |
| TAU334 | tau | Light chain | IPN002 variant 2 | U.S. Pat. No. 8,926,974 SEQ ID NO: 41 | 21312 |
| | | variable | | | |
| | | region | | | |
| TAU335 | tau | Light chain | IPN002 variant 3 | U.S. Pat. No. 8,926,974 SEQ ID NO: 42 | 21313 |
| | | variable | | | |
| | | region | | | |
| TAU336 | tau | Light chain | IPN002 variant 4 | U.S. Pat. No. 8,926,974 SEQ ID NO: 43 | 21314 |
| | | variable | | | |
| | | region | | | |
| TAU337 | tau | Light chain | PT1 | US20150307600 SEQ ID NO: 36 | 21315 |
| | | variable | | | |
| | | region | | | |
| TAU338 | tau | Light chain | PT3 | US20150307600 SEQ ID NO: 38 | 21316 |
| | | variable | | | |
| | | region | | | |
| TAU339 | tau | Light chain | | U.S. Pat. No. 9,304,138 SEQ ID NO: 6 | 21317 |
| | | variable | | | |
| | | region | | | |
| TAU340 | tau | Light chain | | U.S. Pat. No. 9,304,138 SEQ ID NO: 7 | 21318 |
| | | variable | | | |
| | | region | | | |
| TAU341 | tau | Light chain | | U.S. Pat. No. 9,304,138 SEQ ID NO: 8 | 21319 |
| | | variable | | | |
| | | region | | | |
| TAU342 | tau | Light chain | | U.S. Pat. No. 9,304,138 SEQ ID NO: 9 | 21320 |
| | | variable | | | |
| | | region | | | |
| TAU343 | tau | Light chain | | U.S. Pat. No. 9,304,138 SEQ ID NO: 10 | 21321 |
| | | variable | | | |
| | | region | | | |
| TAU344 | tau | Light chain | | U.S. Pat. No. 9,304,138 SEQ ID NO: 11 | 21322 |
| | | variable | | | |
| | | region | | | |
| TAU345 | tau | Light chain | | U.S. Pat. No. 9,304,138 SEQ ID NO: 69 | 21323 |
| | | variable | | | |
| | | region | | | |
| TAU346 | tau | Light chain | | U.S. Pat. No. 9,304,138 SEQ ID NO: 77 | 21324 |
| | | variable | | | |
| | | region | | | |
| TAU347 | tau | Light chain | | U.S. Pat. No. 9,304,138 SEQ ID NO: 92 | 21325 |
| | | variable | | | |
| | | region | | | |
| TAU348 | tau | Light chain | | U.S. Pat. No. 9,304,138 SEQ ID NO: 97 | 21326 |
| | | variable | | | |
| | | region | | | |
| TAU349 | tau | Light chain | | U.S. Pat. No. 9,304,138 SEQ ID NO: 105 | 21327 |
| | | variable | | | |
| | | region | | | |
| TAU350 | tau | Light chain | | U.S. Pat. No. 9,304,138 SEQ ID NO: 116 | 21328 |
| | | variable | | | |
| | | region | | | |
| TAU351 | tau | Light chain | | U.S. Pat. No. 9,304,138 SEQ ID NO: 118 | 21329 |
| | | variable | | | |
| | | region | | | |
| TAU352 | tau | Light chain | hACl-36-3A8- | US20150175682 SEQ ID NO: 8 | 21330 |
| | | variable | Ab1 | | |
| | | region | | | |
| TAU353 | tau | Light chain | hACl-36-2B6- | US20150175682 SEQ ID NO: 9 | 21331 |
| | | variable | Ab1 | | |
| | | region | | | |
| TAU354 | tau | Light chain | ADx210 | US20140161875 SEQ ID NO: 16 | 21332 |
| | | variable | | | |
| | | region | | | |
| TAU355 | tau | Light chain | ADx210 isoform | US20140161875 SEQ ID NO: 18 | 21333 |
| | | variable | | | |
| | | region | | | |
| TAU356 | tau | Light chain | ADx215 | US20140161875 SEQ ID NO: 26 | 21334 |
| | | variable | | | |
| | | region | | | |
| TAU357 | tau antigen | Light chain | ADx202 | WO2015004163 SEQ ID NO: 9 | 21335 |
| | | variable | | | |
| | | region | | | |
| TAU358 | tau pS422 | Light chain | antibody | US20110059093 SEQ ID NO: 1 | 21336 |
| | | variable | Mab2.10.3 | | |
| | | region | | | |
| TAU359 | tau pS422 | Light chain | Mab 005 | US20110059093 SEQ ID NO: 26 | 21337 |
| | | variable | | | |
| | | region | | | |
| TAU360 | tau pS422 | Light chain | Mab 019 | US20110059093 SEQ ID NO: 34 | 21338 |
| | | variable | | | |
| | | region | | | |
| TAU361 | tau pS422 | Light chain | Mab 020 | US20110059093 SEQ ID NO: 42 | 21339 |
| | | variable | | | |
| | | region | | | |
| TAU362 | tau pS422 | Light chain | Mab 085 | US20110059093 SEQ ID NO: 50 | 21340 |
| | | variable | | | |
| | | region | | | |
| TAU363 | tau pS422 | Light chain | Mab 086 | US20110059093 SEQ ID NO: 58 | 21341 |
| | | variable | | | |
| | | region | | | |
| TAU364 | tau pS422 | Light chain | Mab 097 | US20110059093 SEQ ID NO: 66 | 21342 |
| | | variable | | | |
| | | region | | | |
| TAU365 | PrPC and/or | scFv | | U.S. Pat. No. 8,852,587 SEQ ID NO: 6 | 21343 |
| | PrPSc | | | | |
| TAU366 | amyloid | | M13 g3p | US20150376239 SEQ ID NO: 1 | 21344 |
| | proteins | | | | |
| TAU367 | amyloid | | Construct 5 | US20150376239 SEQ ID NO: 11 | 21345 |
| | proteins | | | | |
| TAU368 | amyloid | | Construct 6 | US20150376239 SEQ ID NO: 13 | 21346 |
| | proteins | | | | |
| TAU369 | amyloid | | fd N2 | US20150376239 SEQ ID NO: 14 | 21347 |
| | proteins | | | | |
| TAU370 | amyloid | | fl N2 | US20150376239 SEQ ID NO: 15 | 21348 |
| | proteins | | | | |
| TAU371 | amyloid | | M13 N2 | US20150376239 SEQ ID NO: 16 | 21349 |
| | proteins | | | | |
| TAU372 | amyloid | | Ike N2 | US20150376239 SEQ ID NO: 17 | 21350 |
| | proteins | | | | |
| TAU373 | amyloid | | 12-2 N2 | US20150376239 SEQ ID NO: 18 | 21351 |
| | proteins | | | | |
| TAU374 | amyloid | | If1 N2 | US20150376239 SEQ ID NO: 19 | 21352 |
| | proteins | | | | |
| TAU375 | amyloid | | fd g3p | US20150376239 SEQ ID NO: 2 | 21353 |
| | proteins | | | | |
| TAU376 | amyloid | | Construct 3 | US20150376239 SEQ ID NO: 20 | 21354 |
| | proteins | | | | |
| TAU377 | amyloid | | Construct 3m | US20150376239 SEQ ID NO: 24 | 21355 |
| | proteins | | g3p portion | | |
| TAU378 | amyloid | | If1 g3p | US20150376239 SEQ ID NO: 29 | 21356 |
| | proteins | | | | |
| TAU379 | amyloid | | fl g3p | US20150376239 SEQ ID NO: 3 | 21357 |
| | proteins | | | | |
| TAU380 | amyloid | | fd g3p | US20150376239 SEQ ID NO: 30 | 21358 |
| | proteins | | | | |
| TAU381 | amyloid | | Construct 8, rs- | US20150376239 SEQ ID NO: 31 | 21359 |
| | proteins | | g3p (If1-NIN2)- | | |
| | | | hlgG1-Fc | | |
| TAU382 | amyloid | | consensus | US20150376239 SEQ ID NO: 4 | 21360 |
| | proteins | | sequence of M13 | | |
| | | | g3p, fd g3p, fl | | |
| | | | g3p | | |
| TAU383 | amyloid | | 12-2 g3p | US20150376239 SEQ ID NO: 5 | 21361 |
| | proteins | | | | |
| TAU384 | amyloid | | Ike g3p | US20150376239 SEQ ID NO: 6 | 21362 |
| | proteins | | | | |
| TAU385 | amyloid | | consensus | US20150376239 SEQ ID NO: 7 | 21363 |
| | proteins | | sequence of 12-2 | | |
| | | | g3p, Ike g3p | | |
| TAU386 | amyloid | | If1 g3p | US20150376239 SEQ ID NO: 8 | 21364 |
| | proteins | | | | |
| TAU387 | amyloid | | Construct 4 | US20150376239 SEQ ID NO: 9 | 21365 |
| | proteins | | | | |
| TAU388 | PrP | | ICSM181c | US20140294844 SEQ ID NO: 6 | 21366 |
| TAU389 | PrPC and/or | | | U.S. Pat. No. 8,852,587 SEQ ID NO: 3 | 21367 |
| | PrPSc | | | | |
| TAU390 | tau | | | US20140302046 SEQ ID NO: 103 | 21368 |
| TAU391 | B-amyloid | Heavy chain | 1B 1-40 | US20100323905 SEQ ID NO: 92 | 21369 |
| | | variable | | | |
| | | region | | | |
| | | antibody | | | |
| TAU392 | B-amyloid | Heavy chain | 3A 1-42 | US20100323905 SEQ ID NO: 94 | 21370 |
| | | variable | | | |
| | | region | | | |
| | | antibody | | | |
| TAU393 | B-amyloid | Heavy chain | FC5 | US20100323905 SEQ ID NO: 96 | 21371 |
| | | variable | | | |
| | | region | | | |
| | | antibody | | | |
| TAU394 | Tau | Chain A, | | Cehlar, O. et al., ″Structure Of Tau | 21372 |
| | | Structure Of | | Peptide In Complex With Tau5 | |
| | | Tau Peptide | | Antib Fragment″, unpublished, | |
| | | In Complex | | 4TQE_A | |
| | | With Tau5 | | | |
| | | Antibody Fab | | | |
| | | Fragment | | | |
| TAU395 | Tau | Chain A and | | Shih, H. H., et al., An ultra-specific | 21373 |
| | | B, Structure | | avian antibody to phosphorylated | |
| | | Of The Anti- | | tau protein reveals a unique | |
| | | ptau Fab | | mechanism for phosphoepitope | |
| | | (pt231/ | | recognition″, J. Biol. Chem. 287 | |
| | | ps235_1) In | | (53), 44425-44434 (2012), | |
| | | Complex | | Accession number 4GLR_A and | |
| | | With | | 4GLR_B | |
| | | Phosphoepi- | | | |
| | | tope | | | |
| | | Pt231/ps235 | | | |
| TAU396 | Tau | Chain P | At8 Fab | Malia, T. J. et al, ″Epitope mapping | 21374 |
| | | Anti-tau At8 | | and structural basis for the | |
| | | Fab With | | recognition of phosphorylated tau | |
| | | Doubly | | by the anti-tau antibody AT8″, | |
| | | Phosphorylat- | | Proteins 84 (4), 427-434 (2016), | |
| | | ed Tau | | Accession number 5E2V_P | |
| | | Peptide | | | |
| TAU397 | Tau | Chain P, | At8 Fab | Malia, T. J. et al, ″Epitope mapping | 21375 |
| | | Anti-tau At8 | | and structural basis for the | |
| | | Fab With | | recognition of phosphorylated tau | |
| | | Triply | | by the anti-tau antibody AT8″, | |
| | | Phosphorylat- | | Proteins 84 (4), 427-434 (2016), | |
| | | ed Tau | | Accession number 5E2W_P | |
| | | Peptide | | | |
| TAU398 | Tau | Chain P, X- | Rb86 | Bujotzek, A. et al, ″VH-VL | 21376 |
| | | ray Structure | | orientation prediction for antibody | |
| | | Of The Fab | | humanization candidate selection: | |
| | | Fragment Of | | A case study″, MAbs 8 (2), 288- | |
| | | The Anti Tau | | 305 (2016), Accession number | |
| | | Antibody | | 5DMG_P, 5DMG_X, 5DMG_Z | |
| | | Rb86 In | | | |
| | | Complex | | | |
| | | With The | | | |
| | | Phosphorylat- | | | |
| | | ed Tau | | | |
| | | Peptide (416- | | | |
| | | 430) | | | |
| TAU399 | Tau | Heavy chain | CDC8E8 VH | WO2016079597 SEQ ID NO: 9; | 21377 |
| | | | | US20150050215 SEQ ID NO: 138 | |
| TAU400 | Tau | Heavy chain | RHA - IgG1 | WO2016079597 SEQ ID NO: 28 | 21378 |
| TAU401 | Tau | Heavy chain | RHB - IgG1 | WO2016079597 SEQ ID NO: 29 | 21379 |
| TAU402 | Tau | Heavy chain | RHC - IgGI | WO2016079597 SEQ ID NO: 30 | 21380 |
| TAU403 | Tau | Heavy chain | RHD - IgG1 | WO2016079597 SEQ ID NO: 31 | 21381 |
| TAU404 | Tau | Heavy chain | RHE - IgG1 | WO2016079597 SEQ ID NO: 32 | 21382 |
| TAU405 | Tau | Heavy chain | RHF - IgG1 | WO2016079597 SEQ ID NO: 33 | 21383 |
| TAU406 | Tau | Heavy chain | RHG - IgG1 | WO2016079597 SEQ ID NO: 34 | 21384 |
| TAU407 | Tau | Heavy chain | RHH - IgG1 | WO2016079597 SEQ ID NO: 35 | 21385 |
| TAU408 | Tau | Heavy chain | RHI ~ IgG1 | WO2016079597 SEQ ID NO: 36 | 21386 |
| TAU409 | Tau | Heavy chain | RHJ - IgG1 | WO2016079597 SEQ ID NO: 37 | 21387 |
| TAU410 | Tau | Heavy chain | RHK - IgG1 | WO2016079597 SEQ ID NO: 38 | 21388 |
| TAU411 | Tau | Heavy chain | RHL - IgG1 | WO2016079597 SEQ ID NO: 39 | 21389 |
| TAU412 | Tau | Heavy chain | RHM - IgG1 | WO2016079597 SEQ ID NO: 40 | 21390 |
| TAU413 | Tau | Heavy chain | CDC8E8 - IgG1 | WO2016079597 SEQ ID NO: 41 | 21391 |
| TAU414 | Tau | Heavy chain | mouse DC8E8 - | WO2016079597 SEQ ID NO: 42 | 21392 |
| | | | IgG1 | | |
| TAU415 | Tau | Heavy chain | RHA - IgG4 | WO2016079597 SEQ ID NO: 43 | 21393 |
| TAU416 | Tau | Heavy chain | RHB - IgG4 | WO2016079597 SEQ ID NO: 44 | 21394 |
| TAU417 | Tau | Heavy chain | RHC - IgG4 | WO2016079597 SEQ ID NO: 45 | 21395 |
| TAU418 | Tau | Heavy chain | RHD - IgG4 | WO2016079597 SEQ ID NO: 46 | 21396 |
| TAU419 | Tau | Heavy chain | RHE - IgG4 | WO2016079597 SEQ ID NO: 47 | 21397 |
| TAU420 | Tau | Heavy chain | RHF - 1gG4 | WO2016079597 SEQ ID NO: 48 | 21398 |
| TAU421 | Tau | Heavy chain | RHG - IgG4 | WO2016079597 SEQ ID NO: 49 | 21399 |
| TAU422 | Tau | Heavy chain | RHH - IgG4 | WO2016079597 SEQ ID NO: 50 | 21400 |
| TAU423 | Tau | Heavy chain | RHI - IgG4 | WO2016079597 SEQ ID NO: 51 | 21401 |
| TAU424 | Tau | Heavy chain | RHJ - IgG4 | WO2016079597 SEQ ID NO: 52 | 21402 |
| TAU425 | Tau | Heavy chain | RHK ~ IgG4 | WO2016079597 SEQ ID NO: 53 | 21403 |
| TAU426 | Tau | Heavy chain | RHL - IgG4 | WO2016079597 SEQ ID NO: 54 | 21404 |
| TAU427 | Tau | Heavy chain | RHM - IgG4 | WO2016079597 SEQ ID NO: 55 | 21405 |
| TAU428 | Tau | Heavy chain | cDC8E8 - IgG4 | WO2016079597 SEQ ID NO: 56 | 21406 |
| TAU429 | Tau | Heavy chain | DC8E8 | WO2016079597 SEQ ID NO: 90 | 21407 |
| TAU430 | Tau | Heavy chain | cDC8E8 | WO2016079597 SEQ ID NO: 92 | 21408 |
| TAU431 | Tau | Heavy chain | OptiDC8E8 | WO2016079597 SEQ ID NO: 94 | 21409 |
| TAU432 | Tau | Heavy chain | RHA | WO2016079597 SEQ ID NO: 96 | 21410 |
| TAU433 | Tau | Heavy chain | RHB | WO2016079597 SEQ ID NO: 97 | 21411 |
| TAU434 | Tau | Heavy chain | RHC | WO2016079597 SEQ ID NO: 98 | 21412 |
| TAU435 | Tau | Heavy chain | RHD | WO2016079597 SEQ ID NO: 99 | 21413 |
| TAU436 | Tau | Heavy chain | RHE | WO2016079597 SEQ ID NO: 100 | 21414 |
| TAU437 | Tau | Heavy chain | RHF | WO2016079597 SEQ ID NO: 101 | 21415 |
| TAU438 | Tau | Heavy chain | RHG | WO2016079597 SEQ ID NO: 102 | 21416 |
| TAU439 | Tau | Heavy chain | RHH | WO2016079597 SEQ ID NO: 103 | 21417 |
| TAU440 | Tau | Heavy chain | RHI | WO2016079597 SEQ ID NO: 104 | 21418 |
| TAU441 | Tau | Heavy chain | RHJ | WO2016079597 SEQ ID NO: 105 | 21419 |
| TAU442 | Tau | Heavy chain | RHK | WO2016079597 SEQ ID NO: 106 | 21420 |
| TAU443 | Tau | Heavy chain | RHL | WO2016079597 SEQ ID NO: 107 | 21421 |
| TAU444 | Tau | Heavy chain | RHM | WO2016079597 SEQ ID NO: 108 | 21422 |
| TAU445 | Tau | Heavy chain | RHA - IgG1 | WO2016079597 SEQ ID NO: 111 | 21423 |
| TAU446 | Tau | Heavy chain | RHB - IgG1 | WO2016079597 SEQ ID NO: 112 | 21424 |
| TAU447 | Tau | Heavy chain | RHC - IgG1 | WO2016079597 SEQ ID NO: 113 | 21425 |
| TAU448 | Tau | Heavy chain | RHD - IgG1 | WO2016079597 SEQ ID NO: 114 | 21426 |
| TAU449 | Tau | Heavy chain | RHE - IgG1 | WO2016079597 SEQ ID NO: 115 | 21427 |
| TAU450 | Tau | Heavy chain | RHF - IgG1 | WO2016079597 SEQ ID NO: 116 | 21428 |
| TAU451 | Tau | Heavy chain | RHG - IgG1 | WO2016079597 SEQ ID NO: 117 | 21429 |
| TAU452 | Tau | Heavy chain | RHH - IgG1 | WO2016079597 SEQ ID NO: 118 | 21430 |
| TAU453 | Tau | Heavy chain | RHI - IgGI | WO2016079597 SEQ ID NO: 119 | 21431 |
| TAU454 | Tau | Heavy chain | RHJ - IgGI | WO2016079597 SEQ ID NO: 120 | 21432 |
| TAU455 | Tau | Heavy chain | RHK - IgG1 | WO2016079597 SEQ ID NO: 121 | 21433 |
| TAU456 | Tau | Heavy chain | RHL - IgG1 | WO2016079597 SEQ ID NO: 122 | 21434 |
| TAU457 | Tau | Heavy chain | RHM - IgG1 | WO2016079597 SEQ ID NO: 123 | 21435 |
| TAU458 | Tau | Heavy chain | cDC8E8 - IgG1 | WO2016079597 SEQ ID NO: 124 | 21436 |
| TAU459 | Tau | Heavy chain | mouse DC8E8 - | WO2016079597 SEQ ID NO: 125 | 21437 |
| | | | IgG1 | | |
| TAU460 | Tau | Heavy chain | codon opt mouse | WO2016079597 SEQ ID NO: 126 | 21438 |
| | | | DC8E8 | | |
| TAU461 | Tau | Heavy chain | RHA - IgG4 | WO2016079597 SEQ ID NO: 127 | 21439 |
| TAU462 | Tau | Heavy chain | RHB - IgG4 | WO2016079597 SEQ ID NO: 128 | 21440 |
| TAU463 | Tau | Heavy chain | RHC - IgG4 | WO2016079597 SEQ ID NO: 129 | 21441 |
| TAU464 | Tau | Heavy chain | RHD - IgG4 | WO2016079597 SEQ ID NO: 130 | 21442 |
| TAU465 | Tau | Heavy chain | RHE - IgG4 | WO2016079597 SEQ ID NO: 131 | 21443 |
| TAU466 | Tau | Heavy chain | RHF - IgG4 | WO2016079597 SEQ ID NO: 132 | 21444 |
| TAU467 | Tau | Heavy chain | RHG - IgG4 | WO2016079597 SEQ ID NO: 133 | 21445 |
| TAU468 | Tau | Heavy chain | RHH - IgG4 | WO2016079597 SEQ ID NO: 134 | 21446 |
| TAU469 | Tau | Heavy chain | RHI - IgG4 | WO2016079597 SEQ ID NO: 135 | 21447 |
| TAU470 | Tau | Heavy chain | RHJ - 1gG4 | WO2016079597 SEQ ID NO: 136 | 21448 |
| TAU471 | Tau | Heavy chain | RHK - IgG4 | WO2016079597 SEQ ID NO: 137 | 21449 |
| TAU472 | Tau | Heavy chain | RHL - IgG4 | WO2016079597 SEQ ID NO: 138 | 21450 |
| TAU473 | Tau | Heavy chain | RHM - IgG4 | WO2016079597 SEQ ID NO: 139 | 21451 |
| TAU474 | Tau | Heavy chain | cDC8E8 - IgG4 | WO2016079597 SEQ ID NO: 140 | 21452 |
| TAU475 | Tau | Heavy chain | | U.S. Pat. No. 8,697,076 SEQ ID NO: 12 | 21453 |
| TAU476 | Tau | Heavy chain | 5202.4 | US20160024193 SEQ ID NO: 63 | 21454 |
| TAU477 | Tau | Heavy chain | | US20160031977 SEQ ID NO: 22 | 21455 |
| TAU478 | Tau | Heavy chain | | US20160031977 SEQ ID NO: 24 | 21456 |
| TAU479 | Tau | Heavy chain | | US20160031977 SEQ ID NO: 26 | 21457 |
| TAU480 | Tau | heavy chain | ch4A3-mlgGl- | US20150344553 SEQ ID NO: 213 | 21458 |
| | | | Agly | | |
| TAU481 | Tau | heavy chain | ch4E4(N30Q)- | US20150344553 SEQ ID NO: 214 | 21459 |
| | | | mIgG1-Agly | | |
| TAU482 | Tau | heavy chain | ch6C5-mIgG1- | US20150344553 SEQ ID NO: 215 | 21460 |
| | | | Agly | | |
| TAU483 | Tau | heavy chain | ch17C1-mlgG1- | US20150344553 SEQ ID NO: 216 | 21461 |
| | | | Agly | | |
| TAU484 | Tau | Heavy chain | human NI- | US20150344553 SEQ ID NO: 218 | 21462 |
| | | | 105.40E8 | | |
| | | | (R104W)-hIgG1 | | |
| TAU485 | Tau | Heavy chain | NI- | US20150344553 SEQ ID NO: 43; | 21463 |
| | | | 105.4E4(N30Q) | U.S. Pat. No. 8,940,272 SEQ ID NO: 93 | |
| TAU486 | Tau | Heavy chain | | US20150050215 SEQ ID NO: 140 | 21464 |
| TAU487 | Tau | Heavy chain | | US20150050215 SEQ ID NO: 142 | 21465 |
| TAU488 | Tau | Heavy chain | pT231/pS235 | WO2014016737 SEQ ID NO: 70 | 21466 |
| TAU489 | Tau | heavy chain | ch40E8(R104W) | US20150344553 SEQ ID NO: 208 | 21467 |
| | | (mouse | | | |
| | | IgG2a) | | | |
| TAU490 | Tau | heavy chain | ch17C1 | US20150344553 SEQ ID NO: 203 | 21468 |
| | | (mouse | | | |
| | | IgG2a) | | | |
| TAU491 | Tau | heavy chain | ch6C5 | US20150344553 SEQ ID NO: 205 | 21469 |
| | | (mouse | | | |
| | | IgG2a) | | | |
| TAU492 | Tau | heavy chain | ch40E8 | US20150344553 SEQ ID NO: 207 | 21470 |
| | | (mouse | | | |
| | | IgG2a) | | | |
| TAU493 | Tau | heavy chain | ch6E3 | US20150344553 SEQ ID NO: 210 | 21471 |
| | | (mouse | | | |
| | | IgG2a) | | | |
| TAU494 | Tau | heavy chain | | WO2016079597 SEQ ID NO: 172 | 21472 |
| | | constant | | | |
| | | region | | | |
| TAU495 | Tau | heavy chain | | WO2016079597 SEQ ID NO: 173 | 21473 |
| | | constant | | | |
| | | region | | | |
| TAU496 | Tau | Heavy chain | | WO2015197823 SEQ ID NO: 83 | 21474 |
| | | constant | | | |
| | | region, IgGl | | | |
| TAU497 | Tau | Heavy chain | ch4E4(N30Q) | U.S. Pat. No. 8,940,272 SEQ ID NO: 22 | 21475 |
| | | mature | | | |
| | | (mouse | | | |
| | | IgG2a) | | | |
| TAU498 | Tau | Heavy chain | ch4E4 | U.S. Pat. No. 8,940,272 SEQ ID NO: 20 | 21476 |
| | | mature | | | |
| | | (mouse | | | |
| | | IgG2a) | | | |
| TAU499 | Tau | Heavy chain | ch4E4 | US20150344553 SEQ ID NO: 20 | 21477 |
| | | mature | | | |
| | | (mouse | | | |
| | | IgG2a) | | | |
| TAU500 | Tau | Heavy chain | ch4E4(N30Q) | US20150344553 SEQ ID NO: 22 | 21478 |
| | | mature | | | |
| | | (mouse | | | |
| | | IgG2a) | | | |
| TAU501 | Tau | Heavy chain | NI-105.4A3-VH | US20150344553 SEQ ID NO: 17; | 21479 |
| | | variable | | U.S. Pat. No. 8,940,272 SEQ ID NO: 17 | |
| TAU502 | Tau | Heavy chain | NI-105.24B2- | US20150344553 SEQ ID NO: 13; | 21480 |
| | | variable | VH | U.S. Pat. No. 8,940,272 SEQ ID NO: 13 | |
| TAU503 | Tau | Heavy chain | NI-105.4E4-VH | US20150344553 SEQ ID NO: 9; | 21481 |
| | | variable | | U.S. Pat. No. 8,940,272 SEQ ID NO: 9 | |
| TAU504 | Tau | Heavy chain | | US20150307600 SEQ ID NO: 35 | 21482 |
| | | variable | | | |
| TAU505 | Tau | Heavy chain | | US20150307600 SEQ ID NO: 37 | 21483 |
| | | variable | | | |
| TAU506 | Tau | Heavy chain | RHA | WO2016079597 SEQ ID NO: 13 | 21484 |
| | | variable | | | |
| | | region | | | |
| TAU507 | Tau | Heavy chain | RHB | WO2016079597 SEQ ID NO: 14 | 21485 |
| | | variable | | | |
| | | region | | | |
| TAU508 | Tau | Heavy chain | RHC | WO2016079597 SEQ ID NO: 15 | 21486 |
| | | variable | | | |
| | | region | | | |
| TAU509 | Tau | Heavy chain | RHD | WO2016079597 SEQ ID NO: 16 | 21487 |
| | | variable | | | |
| | | region | | | |
| TAU510 | Tau | Heavy chain | RHE | WO2016079597 SEQ ID NO: 17 | 21488 |
| | | variable | | | |
| | | region | | | |
| TAU511 | Tau | Heavy chain | RHF | WO2016079597 SEQ ID NO: 18 | 21489 |
| | | variable | | | |
| | | region | | | |
| TAU512 | Tau | Heavy chain | RHG | WO2016079597 SEQ ID NO: 19 | 21490 |
| | | variable | | | |
| | | region | | | |
| TAU513 | Tau | Heavy chain | RHH | WO2016079597 SEQ ID NO: 20 | 21491 |
| | | variable | | | |
| | | region | | | |
| TAU514 | Tau | Heavy chain | RHI | WO2016079597 SEQ ID NO: 21 | 21492 |
| | | variable | | | |
| | | region | | | |
| TAU515 | Tau | Heavy chain | RHJ | WO2016079597 SEQ ID NO: 22 | 21493 |
| | | variable | | | |
| | | region | | | |
| TAU516 | Tau | Heavy chain | RHK | WO2016079597 SEQ ID NO: 23 | 21494 |
| | | variable | | | |
| | | region | | | |
| TAU517 | Tau | Heavy chain | RHL | WO2016079597 SEQ ID NO: 24 | 21495 |
| | | variable | | | |
| | | region | | | |
| TAU518 | Tau | Heavy chain | RHM | WO2016079597 SEQ ID NO: 25 | 21496 |
| | | variable | | | |
| | | region | | | |
| TAU519 | Tau | Heavy chain | | U.S. Pat. No. 8,697,076 SEQ ID NO: 7 | 21497 |
| | | variable | | | |
| | | region | | | |
| TAU520 | Tau | Heavy chain | | US20160024193 SEQ ID NO: 58 | 21498 |
| | | variable | | and 62 | |
| | | region | | | |
| TAUS21 | Tau | Heavy chain | 16B5 | US20160031976 SEQ ID NO: 10 | 21499 |
| | | variable | | | |
| | | region | | | |
| TAU522 | Tau | Heavy chain | NI-105.17C1 | US20150344553 SEQ ID NO: 45 | 21500 |
| | | variable | | | |
| | | region | | | |
| TAU523 | Tau | Heavy chain | NI-105.6C5 | US20150344553 SEQ ID NO: 48 | 21501 |
| | | variable | | | |
| | | region | | | |
| TAU524 | Tau | Heavy chain | M-105.29G10 | US20150344553 SEQ ID NO: 50 | 21502 |
| | | variable | | | |
| | | region | | | |
| TAU525 | Tau | Heavy chain | NI-105.6L9 | US20150344553 SEQ ID NO: 52 | 21503 |
| | | variable | | | |
| | | region | | | |
| TAU526 | Tau | Heavy chain | NI-105.40E8 | US20150344553 SEQ ID NO: 54 | 21504 |
| | | variable | | | |
| | | region | | | |
| TAU527 | Tau | Heavy chain | NI-105.40E8 | US20150344553 SEQ ID NO: 220 | 21505 |
| | | variable | R104W | | |
| | | region | | | |
| TAU528 | Tau | Heavy chain | NI-105.48E5 | US20150344553 SEQ ID NO: 56 | 21506 |
| | | variable | | | |
| | | region | | | |
| TAU529 | Tau | Heavy chain | NI-105.6E3 | US20150344553 SEQ ID NO: 58 | 21507 |
| | | variable | | | |
| | | region | | | |
| TAU530 | Tau | Heavy chain | N1-105.22E1 | US20150344553 SEQ ID NO: 60 | 21508 |
| | | variable | | | |
| | | region | | | |
| TAU531 | Tau | Heavy chain | NI-105.26B12 | US20150344553 SEQ ID NO: 62 | 21509 |
| | | variable | | | |
| | | region | | | |
| TAU532 | Tau | Heavy chain | NI-105.12E12 | US20150344553 SEQ ID NO: 65 | 21510 |
| | | variable | | | |
| | | region | | | |
| TAU533 | Tau | Heavy chain | NI-105.60E7 | US20150344553 SEQ ID NO: 67 | 21511 |
| | | variable | | | |
| | | region | | | |
| TAU534 | Tau | Heavy chain | NI-105.14E2 | US20150344553 SEQ ID NO: 69 | 21512 |
| | | variable | | | |
| | | region | | | |
| TAU535 | Tau | Heavy chain | NI-105.39E2 | US20150344553 SEQ ID NO: 71 | 21513 |
| | | variable | | | |
| | | region | | | |
| TAU536 | Tau | Heavy chain | NI-105.19C6 | US20150344553 SEQ ID NO: 73 | 21514 |
| | | variable | | | |
| | | region | | | |
| TAU537 | Tau | Heavy chain | NI-105.9C4 | US20150344553 SEQ ID NO: 76 | 21515 |
| | | variable | | | |
| | | region | | | |
| TAU538 | Tau | Heavy chain | 19.3 | US20150320860 SEQ ID NO: 7 | 21516 |
| | | variable | | | |
| | | region | | | |
| TAU539 | Tau | Heavy chain | 3-66 | US20150320860 SEQ ID NO: 8 | 21517 |
| | | variable | | | |
| | | region | | | |
| TAU540 | Tau | Heavy chain | | US20150253341 SEQ ID NO: 37 | 21518 |
| | | variable | | | |
| | | region | | | |
| TAU541 | Tau | Heavy chain | NI-101.10 | US20150147343 SEQ ID NO: 4 | 21519 |
| | | variable | | | |
| | | region | | | |
| TAU542 | Tau | Heavy chain | NI-101.11 | US20150147343 SEQ ID NO: 6 | 21520 |
| | | variable | | | |
| | | region | | | |
| TAU543 | Tau | Heavy chain | NI-101.12 | US20150147343 SEQ ID NO: 10 | 21521 |
| | | variable | | | |
| | | region | | | |
| TAU544 | Tau | Heavy chain | NI-101.13; NI- | US20150147343 SEQ ID NO: 14, | 21522 |
| | | variable | 101.13A; NI- | 42, 43 | |
| | | region | 101.13B | | |
| TAU545 | Tau | Heavy chain | NI-101.12F6A | US20150147343 SEQ ID NO: 39 | 21523 |
| | | variable | | | |
| | | region | | | |
| TAU546 | Tau | Heavy chain | Ta1501 | US20150183854 SEQ ID NO: 18 | 21524 |
| | | variable | | | |
| | | region | | | |
| TAU547 | Tau | Heavy chain | Ta1502 | US20150183854 SEQ ID NO: 19 | 21525 |
| | | variable | | | |
| | | region | | | |
| TAU548 | Tau | Heavy chain | Ta1505 | US20150183854 SEQ ID NO: 20 | 21526 |
| | | variable | | | |
| | | region | | | |
| TAU549 | Tau | Heavy chain | Ta1506 | US20150183854 SEQ ID NO: 21 | 21527 |
| | | variable | | | |
| | | region | | | |
| TAU550 | Tau | Heavy chain | Ta1507 | US20150183854 SEQ ID NO: 22 | 21528 |
| | | variable | | | |
| | | region | | | |
| TAU551 | Tau | Heavy chain | Ta1508 | US20150183854 SEQ ID NO: 23 | 21529 |
| | | variable | | | |
| | | region | | | |
| TAU552 | Tau | Heavy chain | Ta1509 | US20150183854 SEQ ID NO: 24 | 21530 |
| | | variable | | | |
| | | region | | | |
| TAU553 | Tau | Heavy chain | | US20150050215 SEQ ID NO: 145 | 21531 |
| | | variable | | | |
| | | region | | | |
| TAU554 | Tau | Heavy chain | | US20150050215 SEQ ID NO: 147 | 21532 |
| | | variable | | | |
| | | region | | | |
| TAU555 | Tau | Heavy chain | | US20150050215 SEQ ID NO: 148 | 21533 |
| | | variable | | | |
| | | region | | | |
| TAU556 | Tau | Heavy chain | | U.S. Pat. No. 8,980,270 SEQ ID NO: 14 | 21534 |
| | | variable | | | |
| | | region | | | |
| TAU557 | Tau | Heavy chain | | U.S. Pat. No. 8,98,0270 SEQ ID NO: 16 | 21535 |
| | | variable | | | |
| | | region | | | |
| TAU558 | Tau | Heavy chain | | US20150183855 SEQ ID NO: 15; | 21536 |
| | | variable | | WO2016126993 SEQ ID NO: 15 | |
| | | region | | | |
| TAU559 | Tau | Heavy chain | CBTAU-7.1 | WO2015197823 SEQ ID NO: 87 | 21537 |
| | | variable | | | |
| | | region | | | |
| TAU560 | Tau | Heavy chain | CBTAU-8.1 | WO2015197823 SEQ ID NO: 91 | 21538 |
| | | variable | | | |
| | | region | | | |
| TAU561 | Tau | Heavy chain | CBTAU- 16.1 | WO2015197823 SEQ ID NO: 95 | 21539 |
| | | variable | | | |
| | | region | | | |
| TAU562 | Tau | Heavy chain | CBTAU-18.1 | WO2015197823 SEQ ID NO: 99 | 21540 |
| | | variable | | | |
| | | region | | | |
| TAU563 | Tau | Heavy chain | CBTAU-20.1 | WO2015197823 SEQ ID NO: 103 | 21541 |
| | | variable | | | |
| | | region | | | |
| TAU564 | Tau | Heavy chain | CBTAU-22.1 | WO2015197823 SEQ ID NO: 107 | 21542 |
| | | variable | | | |
| | | region | | | |
| TAU565 | Tau | Heavy chain | CBTAU-24.1 | WO2015197823 SEQ ID NO: 111 | 21543 |
| | | variable | | | |
| | | region | | | |
| TAU566 | Tau | Heavy chain | CBTAU-27.1 | WO2015197823 SEQ ID NO: 115 | 21544 |
| | | variable | | | |
| | | region | | | |
| TAU567 | Tau | Heavy chain | CBTAU 28.1 | WO2015197823 SEQ ID NO: 119 | 21545 |
| | | variable | | | |
| | | region | | | |
| TAU568 | Tau | Heavy chain | CBTAU -41.1 | WO2015197823 SEQ ID NO: 123 | 21546 |
| | | variable | | | |
| | | region | | | |
| TAU569 | Tau | Heavy chain | CBTAU -41.2 | WO2015197823 SEQ ID NO: 127 | 21547 |
| | | variable | | | |
| | | region | | | |
| TAU570 | Tau | Heavy chain | CBTAU -42.1 | WO2015197823 SEQ ID NO: 131 | 21548 |
| | | variable | | | |
| | | region | | | |
| TAU571 | Tau | Heavy chain | CBTAU 43.1 | WO2015197823 SEQ ID NO: 135 | 21549 |
| | | variable | | | |
| | | region | | | |
| TAU572 | Tau | Heavy chain | CBTAU 44.1 | WO2015197823 SEQ ID NO: 139 | 21550 |
| | | variable | | | |
| | | region | | | |
| TAU573 | Tau | Heavy chain | CBTAU 45.1 | WO2015197823 SEQ ID NO: 143 | 21551 |
| | | variable | | | |
| | | region | | | |
| TAU574 | Tau | Heavy chain | CBTAU 46.1 | WO2015197823 SEQ ID NO: 147 | 21552 |
| | | variable | | | |
| | | region | | | |
| TAU575 | Tau | Heavy chain | CBTAU 47.1 | WO2015197823 SEQ ID NO: 151 | 21553 |
| | | variable | | | |
| | | region | | | |
| TAU576 | Tau | Heavy chain | CBTAU 47.2 | WO2015197823 SEQ ID NO: 155 | 21554 |
| | | variable | | | |
| | | region | | | |
| TAU577 | Tau | Heavy chain | CBTAU 49.1 | WO2015197823 SEQ ID NO: 159 | 21555 |
| | | variable | | | |
| | | region | | | |
| TAU578 | Tau | Heavy chain | Native 7.1 | WO2015197823 SEQ ID NO: 257 | 21556 |
| | | variable | | | |
| | | region | | | |
| TAU579 | Tau | Heavy chain | Native 8.1 | WO2015197823 SEQ ID NO: 261 | 21557 |
| | | variable | | | |
| | | region | | | |
| TAU580 | Tau | Heavy chain | Native 16.1 | WO2015197823 SEQ ID NO: 265 | 21558 |
| | | variable | | | |
| | | region | | | |
| TAU581 | Tau | Heavy chain | Native 18.1 | WO2015197823 SEQ ID NO: 269 | 21559 |
| | | variable | | | |
| | | region | | | |
| TAU582 | Tau | Heavy chain | Native 20.1 | WO2015197823 SEQ ID NO: 272 | 21560 |
| | | variable | | | |
| | | region | | | |
| TAU583 | Tau | Heavy chain | Native 22.1 | WO2015197823 SEQ ID NO: 275 | 21561 |
| | | variable | | | |
| | | region | | | |
| TAU584 | Tau | Heavy chain | Native 24.1 | WO2015197823 SEQ ID NO: 279 | 21562 |
| | | variable | | | |
| | | region | | | |
| TAU585 | Tau | Heavy chain | Native 27.1 | WO2015197823 SEQ ID NO: 282 | 21563 |
| | | variable | | | |
| | | region | | | |
| TAU586 | Tau | Heavy chain | Native 28.1 | WO2015197823 SEQ ID NO: 284 | 21564 |
| | | variable | | | |
| | | region | | | |
| TAU587 | Tau | Heavy chain | Native 41.1; | WO2015197823 SEQ ID NO: 287, | 21565 |
| | | variable | Native 41.2 | 289 | |
| | | region | | | |
| TAU588 | Tau | Heavy chain | Native 42.1 | WO2015197823 SEQ ID NO: 292 | 21566 |
| | | variable | | | |
| | | region | | | |
| TAU589 | Tau | Heavy chain | Native 43.1 | WO2015197823 SEQ ID NO: 295 | 21567 |
| | | variable | | | |
| | | region | | | |
| TAU590 | Tau | Heavy chain | Native 44.1 | WO2015197823 SEQ ID NO: 298 | 21568 |
| | | variable | | | |
| | | region | | | |
| TAU591 | Tau | Heavy chain | Native 45.1 | WO2015197823 SEQ ID NO: 302 | 21569 |
| | | variable | | | |
| | | region | | | |
| TAU592 | Tau | Heavy chain | Native 46.1 | WO2015197823 SEQ ID NO: 306 | 21570 |
| | | variable | | | |
| | | region | | | |
| TAU593 | Tau | Heavy chain | Native 47.1 | WO2015197823 SEQ ID NO: 309 | 21571 |
| | | variable | | | |
| | | region | | | |
| TAU594 | Tau | Heavy chain | Native 47.2 | WO2015197823 SEQ ID NO: 311 | 21572 |
| | | variable | | | |
| | | region | | | |
| TAU595 | Tau | Heavy chain | Native 49.1 | WO2015197823 SEQ ID NO: 313 | 21573 |
| | | variable | | | |
| | | region | | | |
| TAU596 | Tau | Heavy chain | 6B2G12; | WO2016007414 SEQ ID NO: 9 | 21574 |
| | | variable | scFv235 | and 11 | |
| | | region | | | |
| TAU597 | Tau | Heavy chain | | WO2015120364 SEQ ID NO: 30 | 21575 |
| | | variable | | | |
| | | region | | | |
| TAU598 | Tau | Heavy chain | | WO2015120364 SEQ ID NO: 42 | 21576 |
| | | variable | | | |
| | | region | | | |
| TAU599 | Tau | Heavy chain | pT231/pS235_1; | WO2014016737 SEQ ID NO: 15 | 21577 |
| | | variable | pT231/pS235_2 | and 17 | |
| | | region | | | |
| TAU600 | Tau | Heavy chain | pT212/pS214_1 | WO2014016737 SEQ ID NO: 19 | 21578 |
| | | variable | | | |
| | | region | | | |
| TAU601 | Tau | Heavy chain | pT212/pS214_2 | WO2014016737 SEQ ID NO: 21 | 21579 |
| | | variable | | | |
| | | region | | | |
| TAU602 | Tau | Heavy chain | pS396/pS404_1 | WO2014016737 SEQ ID NO: 23 | 21580 |
| | | variable | | | |
| | | region | | | |
| TAU603 | Tau | Heavy chain | pS396/pS404_2 | WO2014016737 SEQ ID NO: 25 | 21581 |
| | | variable | | | |
| | | region | | | |
| TAU604 | Tau | Heavy chain | 2H9 | WO2014096321 SEQ ID NO: 11 | 21582 |
| | | variable | | | |
| | | region | | | |
| TAU605 | Tau | Heavy chain | | WO2015122922 SEQ ID NO: 16 | 21583 |
| | | variable | | and 24 | |
| | | region | | | |
| TAU606 | Tau | Heavy chain | | WO2015122922 SEQ ID NO: 32 | 21584 |
| | | variable | | | |
| | | region | | | |
| TAU607 | Tau | Heavy chain | | WO2015122922 SEQ ID NO: 40 | 21585 |
| | | variable | | | |
| | | region | | | |
| TAU608 | Tau | Heavy chain | | WO2015122922 SEQ ID NO: 48 | 21586 |
| | | variable | | | |
| | | region | | | |
| TAU609 | Tau | Heavy chain | | WO2015122922 SEQ ID NO: 56 | 21587 |
| | | variable | | | |
| | | region | | | |
| TAU610 | Tau | Heavy chain | | WO2015122922 SEQ ID NO: 64 | 21588 |
| | | variable | | | |
| | | region | | | |
| TAU611 | Tau | Heavy chain | | WO2015122922 SEQ ID NO: 72 | 21589 |
| | | variable | | | |
| | | region | | | |
| TAU612 | Tau | Heavy chain | | US20150320860 SEQ ID NO: 34 | 21590 |
| | | variable | | | |
| | | region fused | | | |
| | | with a human | | | |
| | | IgG2 heavy | | | |
| | | chain | | | |
| | | constant | | | |
| | | region | | | |
| TAU613 | Tau | Heavy chain | NI-105.17C1 | US20150344553 SEQ ID NO: 44 | 21591 |
| | | variable | | | |
| | | region, before | | | |
| | | germlining | | | |
| TAU614 | Tau | Heavy chain | NI-105.6C5 | US20150344553 SEQ ID NO: 47 | 21592 |
| | | variable | | | |
| | | region, before | | | |
| | | germlining | | | |
| TAU615 | Tau | Heavy chain | NI-105.26B12 | US20150344553 SEQ ID NO: 63 | 21593 |
| | | variable | | | |
| | | region, before | | | |
| | | germlining | | | |
| TAU616 | Tau | Heavy chain | NI-105.9C4 | US20150344553 SEQ ID NO: 75 | 21594 |
| | | variable | | | |
| | | region, before | | | |
| | | germlining | | | |
| TAU617 | Tau | Heavy chain | variant 1-VH32 | US20150175685 SEQ ID NO: 19; | 21595 |
| | | variable | | WO2015197735 SEQ ID NO: 19 | |
| | | region, | | | |
| | | humanized | | | |
| TAU618 | Tau | Heavy chain | variant 2-VH20 | US20150175685 SEQ ID NO: 20; | 21596 |
| | | variable | | WO2015197735 SEQ ID NO: 20 | |
| | | region. | | | |
| | | humanized | | | |
| TAU619 | Tau | Heavy chain | IPN002 VH | U.S. Pat. No. 8,980,270 SEQ ID NO: 36 | 21597 |
| | | variable | variant 1 | | |
| | | region, | | | |
| | | humanized | | | |
| TAU620 | Tau | Heavy chain | IPN002 VH | U.S. Pat. No. 8,980,270 SEQ ID NO: 37 | 21598 |
| | | variable | variant 2 | | |
| | | region, | | | |
| | | humanized | | | |
| TAU621 | Tau | Heavy chain | IPN002 VH | U.S. Pat. No. 8,980,270 SEQ ID NO: 38 | 21599 |
| | | variable | variant 3 | | |
| | | region, | | | |
| | | humanized | | | |
| TAU622 | Tau | Heavy chain | IPN002 VHI | U.S. Pat. No. 8,980,270 SEQ ID NO: 39 | 21600 |
| | | variable | variant 4 | | |
| | | region, | | | |
| | | humanized | | | |
| TAU623 | Tau | Heavy chain, | BACO2002.1 | US20160031976 SEQ ID NO: 14 | 21601 |
| | | human Ig | | | |
| TAU624 | Tau | Heavy chain, | | US20160031976 SEQ ID NO: 29 | 21602 |
| | | human IgG1 | | | |
| | | constant | | | |
| | | region | | | |
| TAU625 | Tau | Heavy chain, | TAM_1, | US20160024193 SEQ ID NO: 87 | 21603 |
| | | IgG1 | TAM_2, | | |
| | | | TAM_3, | | |
| | | | TAM_4, | | |
| | | | TAM_5, | | |
| | | | TAM_6, | | |
| | | | TAM_7, | | |
| | | | TAM_8, | | |
| | | | TAM_9, | | |
| | | | TAM_10, | | |
| | | | TAM_11, | | |
| | | | TAM_12, | | |
| | | | TAM_13, | | |
| | | | TAM_14, | | |
| | | | TAM_15, | | |
| | | | TAM_16, | | |
| | | | TAM_17, | | |
| | | | TAM_18, | | |
| | | | TAM_19, | | |
| | | | TAM_20, | | |
| | | | TAM_21, | | |
| | | | TAM_22, | | |
| | | | TAM_23 | | |
| TAU626 | Tau | Heavy chain, | TAM_1, | US20160024193 SEQ ID NO: 88 | 21604 |
| | | IgG1 N297G | TAM_2, | | |
| | | | TAM_3, | | |
| | | | TAM_4, | | |
| | | | TAM_5, | | |
| | | | TAM_6, | | |
| | | | TAM_7, | | |
| | | | TAM_8, | | |
| | | | TAM_9, | | |
| | | | TAM_10, | | |
| | | | TAM_11, | | |
| | | | TAM_12. | | |
| | | | TAM_13, | | |
| | | | TAM_14, | | |
| | | | TAM_15, | | |
| | | | TAM_16, | | |
| | | | TAM_17, | | |
| | | | TAM_18, | | |
| | | | TAM_19, | | |
| | | | TAM_20, | | |
| | | | TAM_21, | | |
| | | | TAM_22, | | |
| | | | TAM_23 | | |
| TAU627 | Tau | Heavy chain, | TAM_1, | US20160024193 SEQ ID NO: 86 | 21605 |
| | | IgG4 isotypes | TAM_2, | | |
| | | | TAM_3, | | |
| | | | TAM_4, | | |
| | | | TAM_5, | | |
| | | | TAM_6, | | |
| | | | TAM_7, | | |
| | | | TAM_8, | | |
| | | | TAM_9, | | |
| | | | TAM_10, | | |
| | | | TAM_11, | | |
| | | | TAM_12, | | |
| | | | TAM_13, | | |
| | | | TAM_14, | | |
| | | | TAM_15, | | |
| | | | TAM_16, | | |
| | | | TAM_17, | | |
| | | | TAM_18, | | |
| | | | TAM_19, | | |
| | | | TAM_20, | | |
| | | | TAM_21, | | |
| | | | TAM_22, | | |
| | | | TAM_23 | | |
| TAU628 | Tau | Heavy chain, | | US20160031976 SEQ ID NO: 15 | 21606 |
| | | mature | | | |
| TAU629 | Tau | heavy-chain | Tau-A2-SH | WO2015114538 SEQ ID NO: 14 | 21607 |
| | | antibody; | | | |
| | | camelid | | | |
| TAU630 | Tau | heavy-chain | TauA2var-SH | WO2015114538 SEQ ID NO: 17 | 21608 |
| | | antibody; | | | |
| | | Camelid | | | |
| TAU631 | Tau | heavy-chain | Tau-A2 variant | WO2015114538 SEQ ID NO: 15 | 21609 |
| | | antibody; | | | |
| | | Camelid | | | |
| TAU632 | Tau | heavy-chain | Tau-A2 variant | WO2015114538 SEQ ID NO: 16 | 21610 |
| | | antibody; | | | |
| | | Camelid | | | |
| TAU633 | Tau | Light chain | cDC8E8 VK | US20150050215 SEQ ID NO: | 21611 |
| | | | | 141; WO2016079597 SEQ ID NO: | |
| | | | | 10 | |
| TAU634 | Tau | Light chain | RKA | WO2016079597 SEQ ID NO: 57 | 21612 |
| TAU635 | Tau | Light chain | cDC8E8 | WO2016079597 SEQ ID NO: 59 | 21613 |
| TAU636 | Tau | Light chain | OptiDC8E8 | WO2016079597 SEQ ID NO: 95 | 21614 |
| TAU637 | Tau | Light chain | RKA | WO2016079597 SEQ ID NO: 109 | 21615 |
| TAU638 | Tau | Light chain | RKB | WO2016079597 SEQ ID NO: 110 | 21616 |
| TAU639 | Tau | Light chain | RKA | WO2016079597 SEQ ID NO: 141 | 21617 |
| TAU640 | Tau | Light chain | RKB | WO2016079597 SEQ ID NO: 142 | 21618 |
| TAU641 | Tau | Light chain | cDC8E8 | WO2016079597 SEQ ID NO: 143 | 21619 |
| TAU642 | Tau | Light chain | | U.S. Pat. No. 8,697,076 SEQ ID NO: 14 | 21620 |
| TAU643 | Tau | Light chain | 5202.4 | US20160024193 SEQ ID NO: 61 | 21621 |
| TAU644 | Tau | Light chain | TAM_1 | US20160024193 SEQ ID NO: 64 | 21622 |
| TAU645 | Tau | Light chain | TAM_2 | US20160024193 SEQ ID NO: 65 | 21623 |
| TAU646 | Tau | Light chain | TAM_3 | US20160024193 SEQ ID NO: 66 | 21624 |
| TAU647 | Tau | Light chain | TAM_4 | US20160024193 SEQ ID NO: 67 | 21625 |
| TAU648 | Tau | Light chain | TAM_5 | US20160024193 SEQ ID NO: 68 | 21626 |
| TAU649 | Tau | Light chain | TAM_6 | US20160024193 SEQ ID NO: 69 | 21627 |
| TAU650 | Tau | Light chain | TAM_7 | US20160024193 SEQ ID NO: 70 | 21628 |
| TAU651 | Tau | Light chain | TAM_8 | US20160024193 SEQ ID NO: 71 | 21629 |
| TAU652 | Tau | Light chain | TAM_9 | US20160024193 SEQ ID NO: 72 | 21630 |
| TAU653 | Tau | Light chain | TAM_10 | US20160024193 SEQ ID NO: 73 | 21631 |
| TAU654 | Tau | Light chain | TAM_11 | US20160024193 SEQ ID NO: 74 | 21632 |
| TAU655 | Tau | Light chain | TAM_12 | US20160024193 SEQ ID NO: 75 | 21633 |
| TAU656 | Tau | Light chain | TAM_13 | US20160024193 SEQ ID NO: 76 | 21634 |
| TAU657 | Tau | Light chain | TAM_14 | US20160024193 SEQ ID NO: 77 | 21635 |
| TAU658 | Tau | Light chain | TAM_15 | US20160024193 SEQ ID NO: 78 | 21636 |
| TAU659 | Tau | Light chain | TAM_16 | US20160024193 SEQ ID NO: 79 | 21637 |
| TAU660 | Tau | Light chain | TAM_17 | US20160024193 SEQ ID NO: 80 | 21638 |
| TAU661 | Tau | Light chain | TAM_18 | US20160024193 SEQ ID NO: 81 | 21639 |
| TAU662 | Tau | Light chain | TAM_19 | US20160024193 SEQ ID NO: 82 | 21640 |
| TAU663 | Tau | Light chain | TAM_20; | US20160024193 SEQ ID NO: 83 | 21641 |
| | | | TAM_22 | and 85 | |
| TAU664 | Tau | Light chain | TAM_21 | US20160024193 SEQ ID NO: 84 | 21642 |
| TAU665 | Tau | Light chain | | US20160031977 SEQ ID NO: 23 | 21643 |
| TAU666 | Tau | Light chain | | US20160031977 SEQ ID NO: 25 | 21644 |
| TAU667 | Tau | Light chain | | US20160031977 SEQ ID NO: 27 | 21645 |
| TAU668 | Tau | Light chain | | US20160031977 SEQ ID NO: 28 | 21646 |
| TAU669 | Tau | Light chain | | US20150050215 SEQ ID NO: 139 | 21647 |
| TAU670 | Tau | Light chain | | US20150050215 SEQ ID NO: 143 | 21648 |
| TAU671 | Tau | Light Chain | pT231/pS235 | WO2014016737 SEQ ID NO: 71 | 21649 |
| TAU672 | Tau | Light chain | RKB | WO2016079597 SEQ ID NO: 58 | 21650 |
| TAU673 | Tau | Light chain | cDC8E8 | WO2016079597 SEQ ID NO: 93 | 21651 |
| TAU674 | Tau | light chain | ch40E8 | US20150344553 SEQ ID NO: 209 | 21652 |
| | | (lambda) | | | |
| TAU675 | Tau | light chain | ch6E3 | US20150344553 SEQ ID NO: 211 | 21653 |
| | | (mouse | | | |
| | | kappa) | | | |
| TAU676 | Tau | light chain | ch17C1 | US20150344553 SEQ ID NO: 204 | 21654 |
| | | (mouse | | | |
| | | lambda) | | | |
| TAU677 | Tau | light chain | ch6C5 | US20150344553 SEQ ID NO: 206 | 21655 |
| | | (mouse | | | |
| | | lambda) | | | |
| TAU678 | Tau | light chain | ch17C1(N31Q) | US20150344553 SEQ ID NO: 212 | 21656 |
| | | (mouse | | | |
| | | lambda) | | | |
| TAU679 | Tau | light chain | | WO2016079597 SEQ ID NO: 170; | 21657 |
| | | constant | | WO2015197823 SEQ ID NO: 84; | |
| | | region | | US20150320860 SEQ ID NO: 36; | |
| | | | | WO2015197735 SEQ ID NO: 59; | |
| | | | | U.S. Pat. No. 9,290,567 SEQ ID NO: 11 | |
| TAU680 | Tau | light chain | | WO2016079597 SEQ ID NO: 171; | 21658 |
| | | constant | | US20160031976 SEQ ID NO: 32 | |
| | | region | | | |
| TAU681 | Tau | Light chain | human NI- | US20150344553 SEQ ID NO: 219 | 21659 |
| | | lambda | 105.40E8 light | | |
| | | | chain | | |
| TAU682 | Tau | Light chain | ch17C1(N31Q, | US20150344553 SEQ ID NO: 217 | 21660 |
| | | lambda | 148V) | | |
| | | mouse | | | |
| TAU683 | Tau | Light chain | ch4E4 | US20150344553 SEQ ID NO: 21; | 21661 |
| | | mature | | U.S. Pat. No. 8,940,272 SEQ ID NO: 21 | |
| | | (mouse | | | |
| | | lambda) | | | |
| TAU684 | Tau | Light chain | NI-105.4A3-VL | US20150344553 SEQ ID NO: 19; | 21662 |
| | | variable | | U.S. Pat. No. 8,940,272 SEQ ID NO: 19 | |
| TAU685 | Tau | Light chain | | US20150344553 SEQ ID NO: 15 | 21663 |
| | | variable | | | |
| TAU686 | Tau | Light chain | NI-105.4E4-VL; | US20150344553 SEQ ID NO: 11, | 21664 |
| | | variable | NI-105.24B2-VL | 15 | |
| TAU687 | Tau | Light chain | | US20150307600 SEQ ID NO: 36 | 21665 |
| | | variable | | | |
| TAU688 | Tau | Light chain | | US20150307600 SEQ ID NO: 38 | 21666 |
| | | variable | | | |
| TAU689 | Tau | Light chain | RKA | WO2016079597 SEQ ID NO: 26 | 21667 |
| | | variable | | | |
| | | region | | | |
| TAU690 | Tau | Light chain | RKB | WO2016079597 SEQ ID NO: 27 | 21668 |
| | | variable | | | |
| | | region | | | |
| TAU691 | Tau | Light chain | DC8E8 | WO2016079597 SEQ ID NO: 91 | 21669 |
| | | variable | | | |
| | | region | | | |
| TAU692 | Tau | Light chain | | U.S. Pat. No. 8,940,272 SEQ ID NO: 15 | 21670 |
| | | variable | | | |
| | | region | | | |
| TAU693 | Tau | Light chain | | U.S. Pat. No. 8,697,076 SEQ ID NO: 8 | 21671 |
| | | variable | | | |
| | | region | | | |
| TAU694 | Tau | Light chain | | US20160024193 SEQ ID NO: 36 | 21672 |
| | | variable | | | |
| | | region | | | |
| TAU695 | Tau | Light chain | | US20160024193 SEQ ID NO: 37 | 21673 |
| | | variable | | | |
| | | region | | | |
| TAU696 | Tau | Light chain | | US20160024193 SEQ ID NO: 38 | 21674 |
| | | variable | | | |
| | | region | | | |
| TAU697 | Tau | Light chain | | US20160024193 SEQ ID NO: 39 | 21675 |
| | | variable | | | |
| | | region | | | |
| TAU698 | Tau | Light chain | | US20160024193 SEQ ID NO: 40 | 21676 |
| | | variable | | | |
| | | region | | | |
| TAU699 | Tau | Light chain | | US20160024193 SEQ ID NO: 41 | 21677 |
| | | variable | | | |
| | | region | | | |
| TAU700 | Tau | Light chain | | US20160024193 SEQ ID NO: 42 | 21678 |
| | | variable | | | |
| | | region | | | |
| TAU701 | Tau | Light chain | | US20160024193 SEQ ID NO: 43 | 21679 |
| | | variable | | | |
| | | region | | | |
| TAU702 | Tau | Light chain | | US20160024193 SEQ ID NO: 44 | 21680 |
| | | variable | | | |
| | | region | | | |
| TAU703 | Tau | Light chain | | US20160024193 SEQ ID NO: 45 | 21681 |
| | | variable | | | |
| | | region | | | |
| TAU704 | Tau | Light chain | | US20160024193 SEQ ID NO: 46 | 21682 |
| | | variable | | | |
| | | region | | | |
| TAU705 | Tau | Light chain | | US20160024193 SEQ ID NO: 47 | 21683 |
| | | variable | | | |
| | | region | | | |
| TAU706 | Tau | Light chain | | US20160024193 SEQ ID NO: 48 | 21684 |
| | | variable | | | |
| | | region | | | |
| TAU707 | Tau | Light chain | | US20160024193 SEQ ID NO: 49 | 21685 |
| | | variable | | | |
| | | region | | | |
| TAU708 | Tau | Light chain | | US20160024193 SEQ ID NO: 50 | 21686 |
| | | variable | | | |
| | | region | | | |
| TAU709 | Tau | Light chain | | US20160024193 SEQ ID NO: 51 | 21687 |
| | | variable | | | |
| | | region | | | |
| TAU710 | Tau | Light chain | | US20160024193 SEQ ID NO: 52 | 21688 |
| | | variable | | | |
| | | region | | | |
| TAU711 | Tau | Light chain | | US20160024193 SEQ ID NO: 53 | 21689 |
| | | variable | | | |
| | | region | | | |
| TAU712 | Tau | Light chain | | US20160024193 SEQ ID NO: 54 | 21690 |
| | | variable | | | |
| | | region | | | |
| TAU713 | Tau | Light chain | | US20160024193 SEQ ID NO: 55 | 21691 |
| | | variable | | and 57 | |
| | | region | | | |
| TAU714 | Tau | Light chain | | US20160024193 SEQ ID NO: 56 | 21692 |
| | | variable | | | |
| | | region | | | |
| TAU715 | Tau | Light chain | 5202.4 | US20160024193 SEQ ID NO: 60 | 21693 |
| | | variable | | | |
| | | region | | | |
| TAU716 | Tau | Light chain | NI-105.17C1 | US20150344553 SEQ ID NO: 46 | 21694 |
| | | variable | | | |
| | | region | | | |
| TAU717 | Tau | Light chain | NI-105.17C1 | US20150344553 SEQ ID NO: 221 | 21695 |
| | | variable | N31Q | | |
| | | region | | | |
| TAU718 | Tau | Light chain | NI-105,17C1 | US20150344553 SEQ ID NO: 222 | 21696 |
| | | variable | N31Q, 148V | | |
| | | region | | | |
| TAU719 | Tau | Light chain | NI-105.6C5 | US20150344553 SEQ ID NO: 49 | 21697 |
| | | variable | | | |
| | | region | | | |
| TAU720 | Tau | Light chain | M-105.29G10 | US20150344553 SEQ ID NO: 51 | 21698 |
| | | variable | | | |
| | | region | | | |
| TAU721 | Tau | Light chain | NI-105.6L9 | US20150344553 SEQ ID NO: 53 | 21699 |
| | | variable | | | |
| | | region | | | |
| TAU722 | Tau | Light chain | NI-105.40E8 | US20150344553 SEQ ID NO: 55 | 21700 |
| | | variable | | | |
| | | region | | | |
| TAU723 | Tau | Light chain | NI-105,48E5 | US20150344553 SEQ ID NO: 57 | 21701 |
| | | variable | | | |
| | | region | | | |
| TAU724 | Tau | Light chain | NI-105.6E3 | US20150344553 SEQ ID NO: 59 | 21702 |
| | | variable | | | |
| | | region | | | |
| TAU725 | Tau | Light chain | NI-105.22E1 | US20150344553 SEQ ID NO: 61 | 21703 |
| | | variable | | | |
| | | region | | | |
| TAU726 | Tau | Light chain | NI-105.26B13 | US20150344553 SEQ ID NO: 64 | 21704 |
| | | variable | | | |
| | | region | | | |
| TAU727 | Tau | Light chain | NI-105.12E12 | US20150344553 SEQ ID NO: 66 | 21705 |
| | | variable | | | |
| | | region | | | |
| TAU728 | Tau | Light chain | NI-105,60E7 | US20150344553 SEQ ID NO: 68 | 21706 |
| | | variable | | | |
| | | region | | | |
| TAU729 | Tau | Light chain | NI-105.14E2 | US20150344553 SEQ ID NO: 70 | 21707 |
| | | variable | | | |
| | | region | | | |
| TAU730 | Tau | Light chain | NI-105.39E2 | US20150344553 SEQ ID NO: 72 | 21708 |
| | | variable | | | |
| | | region | | | |
| TAU731 | Tau | Light chain | NI-105.19C6 | US20150344553 SEQ ID NO: 74 | 21709 |
| | | variable | | | |
| | | region | | | |
| TAU732 | Tau | Light chain | N1-105.9C4 | US20150344553 SEQ ID NO: 78 | 21710 |
| | | variable | | | |
| | | region | | | |
| TAU733 | Tau | Light chain | 19.3 | US20150320860 SEQ ID NO: 9 | 21711 |
| | | variable | | | |
| | | region | | | |
| TAU734 | Tau | Light chain | 3-66 | US20150320860 SEQ ID NO: 10 | 21712 |
| | | variable | | | |
| | | region | | | |
| TAU735 | Tau | Light chain | h3B3 | US20150320860 SEQ ID NO: 25 | 21713 |
| | | variable | | | |
| | | region | | | |
| TAU736 | Tau | Light chain | 19.3 | US20150320860 SEQ ID NO: 26 | 21714 |
| | | variable | | | |
| | | region | | | |
| TAU737 | Tau | Light chain | 17.1 | US20150320860 SEQ ID NO: 27 | 21715 |
| | | variable | | | |
| | | region | | | |
| TAU738 | Tau | Light chain | 14.2 | US20150320860 SEQ ID NO: 28 | 21716 |
| | | variable | | | |
| | | region | | | |
| TAU739 | Tau | Light chain | 13.1 | US20150320860 SEQ ID NO: 29 | 21717 |
| | | variable | | | |
| | | region | | | |
| TAU740 | Tau | Light chain | 7.2 | US20150320860 SEQ ID NO: 30 | 21718 |
| | | variable | | | |
| | | region | | | |
| TAU741 | Tau | Light chain | 9.2 | US20150320860 SEQ ID NO: 31 | 21719 |
| | | variable | | | |
| | | region | | | |
| TAU742 | Tau | Light chain | 11.4 | US20150320860 SEQ ID NO: 32 | 21720 |
| | | variable | | | |
| | | region | | | |
| TAU743 | Tau | Light chain | | US20150253341 SEQ ID NO: 39 | 21721 |
| | | variable | | | |
| | | region | | | |
| TAU744 | Tau | Light chain | NI-101.10; NI- | US20150147343 SEQ ID NO: 8 | 21722 |
| | | variable | 101.11 | | |
| | | region | | | |
| TAU745 | Tau | Light chain | NI-101.12 | US20150147343 SEQ ID NO: 12 | 21723 |
| | | variable | | | |
| | | region | | | |
| TAU746 | Tau | Light chain | NI-101.13 | US20150147343 SEQ ID NO: 16 | 21724 |
| | | variable | | | |
| | | region | | | |
| TAU747 | Tau | Light chain | NI-101,12F6A | US20150147343 SEQ ID NO: 41 | 21725 |
| | | variable | | | |
| | | region | | | |
| TAU748 | Tau | Light chain | NI-101.13A | US20150147343 SEQ ID NO: 44 | 21726 |
| | | variable | | | |
| | | region | | | |
| TAU749 | Tau | Light chain | NI-101.13B | US20150147343 SEQ ID NO: 45 | 21727 |
| | | variable | | | |
| | | region | | | |
| TAU750 | Tau | Light chain | Tal501 | US20150183854 SEQ ID NO: 25 | 21728 |
| | | variable | | | |
| | | region | | | |
| TAU751 | Tau | Light chain | Tal502; Ta1505 | US20150183854 SEQ ID NO: 26 | 21729 |
| | | variable | | | |
| | | region | | | |
| TAU752 | Tau | Light chain | Ta1506 | US20150183854 SEQ ID NO: 27 | 21730 |
| | | variable | | | |
| | | region | | | |
| TAU753 | Tau | Light chain | Ta1507 | US20150183854 SEQ ID NO: 28 | 21731 |
| | | variable | | | |
| | | region | | | |
| TAU754 | Tau | Light chain | Tal508 | US20150183854 SEQ ID NO: 29 | 21732 |
| | | variable | | | |
| | | region | | | |
| TAU755 | Tau | Light chain | Tal509 | US20150183854 SEQ ID NO: 30 | 21733 |
| | | variable | | | |
| | | region | | | |
| TAU756 | Tau | Light chain | | US20150050215 SEQ ID NO: 150 | 21734 |
| | | variable | | | |
| | | region | | | |
| TAU757 | Tau | Light chain | | US20150050215 SEQ ID NO: 152 | 21735 |
| | | variable | | | |
| | | region | | | |
| TAU758 | Tau | Light chain | | US20150050215 SEQ ID NO: 153 | 21736 |
| | | variable | | | |
| | | region | | | |
| TAU759 | Tau | Light chain | | U.S. Pat. No. 8,980,270 SEQ ID NO: 13 | 21737 |
| | | variable | | | |
| | | region | | | |
| TAU760 | Tau | Light chain | | U.S. Pat. No. 8,980,270 SEQ ID NO: 15 | 21738 |
| | | variable | | | |
| | | region | | | |
| TAU761 | Tau | Light chain | CBTAU-7.1 | WO2015197823 SEQ ID NO: 88 | 21739 |
| | | variable | | | |
| | | region | | | |
| TAU762 | Tau | Light chain | CBTAU-8.1 | WO2015197823 SEQ ID NO: 92 | 21740 |
| | | variable | | | |
| | | region | | | |
| TAU763 | Tau | Light chain | CBTAU- 16.1 | WO2015197823 SEQ ID NO: 96 | 21741 |
| | | variable | | | |
| | | region | | | |
| TAU764 | Tau | Light chain | CBTAU- 18.1 | WO2015197823 SEQ ID NO: 100 | 21742 |
| | | variable | | | |
| | | region | | | |
| TAU765 | Tau | Light chain | CBTAU-20.1 | WO2015197823 SEQ ID NO: 104 | 21743 |
| | | variable | | | |
| | | region | | | |
| TAU766 | Tau | Light chain | CBTAU-22.1 | WO2015197823 SEQ ID NO: 108 | 21744 |
| | | variable | | | |
| | | region | | | |
| TAU767 | Tau | Light chain | CBTAU-24.1 | WO2015197823 SEQ ID NO: 112 | 21745 |
| | | variable | | | |
| | | region | | | |
| TAU768 | Tau | Light chain | CBTAU-27.1 | WO2015197823 SEQ ID NO: 116 | 21746 |
| | | variable | | | |
| | | region | | | |
| TAU769 | Tau | Light chain | CBTAU 28.1 | WO2015197823 SEQ ID NO: 120 | 21747 |
| | | variable | | | |
| | | region | | | |
| TAU770 | Tau | Light chain | CBTAU ~41.1 | WO2015197823 SEQ ID NO: 124 | 21748 |
| | | variable | | | |
| | | region | | | |
| TAU771 | Tau | Light chain | CBTAU -41.2 | WO2015197823 SEQ ID NO: 128 | 21749 |
| | | variable | | | |
| | | region | | | |
| TAU772 | Tau | Light chain | CBTAU -42.1 | WO2015197823 SEQ ID NO: 132 | 21750 |
| | | variable | | | |
| | | region | | | |
| TAU773 | Tau | Light chain | CBTAU 43.1 | WO2015197823 SEQ ID NO: 136 | 21751 |
| | | variable | | | |
| | | region | | | |
| TAU774 | Tau | Light chain | CBTAU 44.1 | WO2015197823 SEQ ID NO: 140 | 21752 |
| | | variable | | | |
| | | region | | | |
| TAU775 | Tau | Light chain | CBTAU 45.1 | WO2015197823 SEQ ID NO: 144 | 21753 |
| | | variable | | | |
| | | region | | | |
| TAU776 | Tau | Light chain | CBTAU 46.1 | WO2015197823 SEQ ID NO: 148 | 21754 |
| | | variable | | | |
| | | region | | | |
| TAU777 | Tau | Light chain | CBTAU 47.1 | WO2015197823 SEQ ID NO: 152 | 21755 |
| | | variable | | | |
| | | region | | | |
| TAU778 | Tau | Light chain | CBTAU 47.2 | WO2015197823 SEQ ID NO: 156 | 21756 |
| | | variable | | | |
| | | region | | | |
| TAU779 | Tau | Light chain | CBTAU 49.1 | WO2015197823 SEQ ID NO: 160 | 21757 |
| | | variable | | | |
| | | region | | | |
| TAU780 | Tau | Light chain | Native 7.1 | WO2015197823 SEQ ID NO: 259 | 21758 |
| | | variable | | | |
| | | region | | | |
| TAU781 | Tau | Light chain | Native 8.1 | WO2015197823 SEQ ID NO: 263 | 21759 |
| | | variable | | | |
| | | region | | | |
| TAU782 | Tau | Light chain | Native 16.1 | WO2015197823 SEQ ID NO: 267 | 21760 |
| | | variable | | | |
| | | region | | | |
| TAU783 | Tau | Light chain | Native 18.1 | WO2015197823 SEQ ID NO: 270 | 21761 |
| | | variable | | | |
| | | region | | | |
| TAU784 | Tau | Light chain | Native 20.1 | WO2015197823 SEQ ID NO: 273 | 21762 |
| | | variable | | | |
| | | region | | | |
| TAU785 | Tau | Light chain | Native 22.1 | WO2015197823 SEQ ID NO: 277 | 21763 |
| | | variable | | | |
| | | region | | | |
| TAU786 | Tau | Light chain | Native 24.1 | WO2015197823 SEQ ID NO: 280 | 21764 |
| | | variable | | | |
| | | region | | | |
| TAU787 | Tau | Light chain | Native 27.1 | WO2015197823 SEQ ID NO: 283 | 21765 |
| | | variable | | | |
| | | region | | | |
| TAU788 | Tau | Light chain | Native 28.1 | WO2015197823 SEQ ID NO: 285 | 21766 |
| | | variable | | | |
| | | region | | | |
| TAU789 | Tau | Light chain | Native 41.1 | WO2015197823 SEQ ID NO: 288 | 21767 |
| | | variable | | | |
| | | region | | | |
| TAU790 | Tau | Light chain | Native 41.2; | WO2015197823 SEQ ID NO: 290; | 21768 |
| | | variable | Native 42.1 | WO2015197823 SEQ ID NO: 293 | |
| | | region | | | |
| TAU791 | Tau | Light chain | Native 43.1 | WO2015197823 SEQ ID NO: 296 | 21769 |
| | | variable | | | |
| | | region | | | |
| TAU792 | Tau | Light chain | Native 44.1 | WO2015197823 SEQ ID NO: 300 | 21770 |
| | | variable | | | |
| | | region | | | |
| TAU793 | Tau | Light chain | Native 45.1 | WO2015197823 SEQ ID NO: 304 | 21771 |
| | | variable | | | |
| | | region | | | |
| TAU794 | Tau | Light chain | Native 46.1 | WO2015197823 SEQ ID NO: 307 | 21772 |
| | | variable | | | |
| | | region | | | |
| TAU795 | Tau | Light chain | Native 47.1 | WO2015197823 SEQ ID NO: 310 | 21773 |
| | | variable | | | |
| | | region | | | |
| TAU796 | Tau | Light chain | Native 47.2 | WO2015197823 SEQ ID NO: 312 | 21774 |
| | | variable | | | |
| | | region | | | |
| TAU797 | Tau | Light chain | Native 49.1 | WO2015197823 SEQ ID NO: 314 | 21775 |
| | | variable | | | |
| | | region | | | |
| TAU798 | Tau | Light chain | 6B2G12 | WO2016007414 SEQ ID NO: 8 | 21776 |
| | | variable | | | |
| | | region | | | |
| TAU799 | Tau | Light chain | scFv235 | WO2016007414 SEQ ID NO: 10 | 21777 |
| | | variable | | | |
| | | region | | | |
| TAU800 | Tau | Light chain | | WO2015120364 SEQ ID NO: 24 | 21778 |
| | | variable | | | |
| | | region | | | |
| TAU801 | Tau | Light chain | | WO2015120364 SEQ ID NO: 36 | 21779 |
| | | variable | | | |
| | | region | | | |
| TAU802 | Tau | Light chain | pT231/pS235_1 | WO2014016737 SEQ ID NO: 14 | 21780 |
| | | variable | | | |
| | | region | | | |
| TAU803 | Tau | Light chain | pT231/pS235_2 | WO2014016737 SEQ ID NO: 16 | 21781 |
| | | variable | | | |
| | | region | | | |
| TAU804 | Tau | Light chain | pT212/pS214_1 | WO2014016737 SEQ ID NO: 18 | 21782 |
| | | variable | | | |
| | | region | | | |
| TAU805 | Tau | Light chain | pT212/pS214_2 | WO2014016737 SEQ ID NO: 20 | 21783 |
| | | variable | | | |
| | | region | | | |
| TAU806 | Tau | Light chain | pS396/pS404_1 | WO2014016737 SEQ ID NO: 22 | 21784 |
| | | variable | | | |
| | | region | | | |
| TAU807 | Tau | Light chain | pS396/pS404_2 | WO2014016737 SEQ ID NO: 24 | 21785 |
| | | variable | | | |
| | | region | | | |
| TAU808 | Tau | Light chain | 2H9 | WO2014096321 SEQ ID NO: 15 | 21786 |
| | | variable | | | |
| | | region | | | |
| TAU809 | Tau | Light chain | | WO2015122922 SEQ ID NO: 15 | 21787 |
| | | variable | | and 23 | |
| | | region | | | |
| TAU810 | Tau | Light chain | | WO2015122922 SEQ ID NO: 31 | 21788 |
| | | variable | | and 39 | |
| | | region | | | |
| TAU811 | Tau | Light chain | | WO2015122922 SEQ ID NO: 47 | 21789 |
| | | variable | | | |
| | | region | | | |
| TAU812 | Tau | Light chain | | WO2015122922 SEQ ID NO: 55 | 21790 |
| | | variable | | | |
| | | region | | | |
| TAU813 | Tau | Light chain | | WO2015122922 SEQ ID NO: 63 | 21791 |
| | | variable | | | |
| | | region | | | |
| TAU814 | Tau | Light chain | | WO2015122922 SEQ ID NO: 71 | 21792 |
| | | variable | | | |
| | | region | | | |
| TAU815 | Tau | light chain | 16B5 | US20160031976 SEQ ID NO: 16 | 21793 |
| | | variable | | | |
| | | region kappa | | | |
| TAU816 | Tau | light chain | | US20160031976 SEQ ID NO: 20 | 21794 |
| | | variable | | | |
| | | region kappa | | | |
| TAU817 | Tau | Light chain | NI-105.9C4 | US20150344553 SEQ ID NO: 77 | 21795 |
| | | variable | | | |
| | | region, before | | | |
| | | germlining | | | |
| TAU818 | Tau | Light chain | variant 1-VL21 | US20150175685 SEQ ID NO: 16; | 21796 |
| | | variable | | WO2015197735 SEQ ID NO: 16 | |
| | | region, | | | |
| | | humanized | | | |
| TAU819 | Tau | Light chain | variant 2-VL22 | US20150175685 SEQ ID NO: 17; | 21797 |
| | | variable | | WO2015197735 SEQ ID NO: 17 | |
| | | region, | | | |
| | | humanized | | | |
| TAU820 | Tau | Light chain | variant 4-VL01 | US20150175685 SEQ ID NO: 32 | 21798 |
| | | variable | | | |
| | | region, | | | |
| | | humanized | | | |
| TAU821 | Tau | Light chain | variant 5-VL09 | US20150175685 SEQ ID NO: 33 | 21799 |
| | | variable | | | |
| | | region, | | | |
| | | humanized | | | |
| TAU822 | Tau | Light chain | variant 6-VL12 | US20150175685 SEQ ID NO: 34 | 21800 |
| | | variable | | | |
| | | region, | | | |
| | | humanized | | | |
| TAU823 | Tau | Light chain | variant 7-VL15 | US20150175685 SEQ ID NO: 35 | 21801 |
| | | variable | | | |
| | | region, | | | |
| | | humanized | | | |
| TAU824 | Tau | Light chain | variant 8-VL16 | US20150175685 SEQ ID NO: 36 | 21802 |
| | | variable | | | |
| | | region, | | | |
| | | humanized | | | |
| TAU825 | Tau | Light chain | variant 9-VL17 | US20150175685 SEQ ID NO: 37 | 21803 |
| | | variable | | | |
| | | region, | | | |
| | | humanized | | | |
| TAU826 | Tau | Light chain | variant 10-VL19 | US20150175685 SEQ ID NO: 38 | 21804 |
| | | variable | | | |
| | | region, | | | |
| | | humanized | | | |
| TAU827 | Tau | Light chain | variant 11-VL28 | US20150175685 SEQ ID NO: 39 | 21805 |
| | | variable | | | |
| | | region, | | | |
| | | humanized | | | |
| TAU828 | Tau (pS422) | Light chain | variant 12-VL33 | US20150175685 SEQ ID NO: 40 | 21806 |
| | | variable | | | |
| | | region, | | | |
| | | humanized | | | |
| TAU829 | Tau | Light chain | variant 13-VL35 | US20150175685 SEQ ID NO: 41 | 21807 |
| | | variable | | | |
| | | region, | | | |
| | | humanized | | | |
| TAU830 | Tau | Light chain | variant 14-VL39 | US20150175685 SEQ ID NO: 42 | 21808 |
| | | variable | | | |
| | | region, | | | |
| | | humanized | | | |
| TAU831 | Tau | Light chain | variant 15-VL40 | US20150175685 SEQ ID NO: 43 | 21809 |
| | | variable | | | |
| | | region, | | | |
| | | humanized | | | |
| TAU832 | Tau | Light chain | variant 16-VL41 | US20150175685 SEQ ID NO: 44 | 21810 |
| | | variable | | | |
| | | region, | | | |
| | | humanized | | | |
| TAU833 | Tau | Light chain | variant 17-VL42 | US20150175685 SEQ ID NO: 45 | 21811 |
| | | variable | | | |
| | | region, | | | |
| | | humanized | | | |
| TAU834 | Tau | Light chain | variant 4-VH01 | US20150175685 SEQ ID NO: 46 | 21812 |
| | | variable | | | |
| | | region, | | | |
| | | humanized | | | |
| TAU835 | Tau | Light chain | variant 5-VH02 | US20150175685 SEQ ID NO: 47 | 21813 |
| | | variable | | | |
| | | region, | | | |
| | | humanized | | | |
| TAU836 | Tau | Light chain | variant 6-VH03 | US20150175685 SEQ ID NO: 48 | 21814 |
| | | variable | | | |
| | | region, | | | |
| | | humanized | | | |
| TAU837 | Tau | Light chain | variant 7-VH04 | US20150175685 SEQ ID NO: 49 | 21815 |
| | | variable | | | |
| | | region, | | | |
| | | humanized | | | |
| TAU838 | Tau | Light chain | variant 8-VH14 | US20150175685 SEQ ID NO: 50 | 21816 |
| | | variable | | | |
| | | region, | | | |
| | | humanized | | | |
| TAU839 | Tau | Light chain | variant 9-VH15 | US20150175685 SEQ ID NO: 51 | 21817 |
| | | variable | | | |
| | | region, | | | |
| | | humanized | | | |
| TAU840 | Tau | Light chain | variant 10-VH18 | US20150175685 SEQ ID NO: 52 | 21818 |
| | | variable | | | |
| | | region, | | | |
| | | humanized | | | |
| TAU841 | Tau | Light chain | variant 11-VH19 | US20150175685 SEQ ID NO: 53 | 21819 |
| | | variable | | | |
| | | region, | | | |
| | | humanized | | | |
| TAU842 | Tau | Light chain | variant 12-VH22 | US20150175685 SEQ ID NO: 54 | 21820 |
| | | variable | | | |
| | | region, | | | |
| | | humanized | | | |
| TAU843 | Tau | Light chain | variant 13-VH23 | US20150175685 SEQ ID NO: 55 | 21821 |
| | | variable | | | |
| | | region, | | | |
| | | humanized | | | |
| TAU844 | Tau | Light chain | variant 14-VH24 | US20150175685 SEQ ID NO: 56 | 21822 |
| | | variable | | | |
| | | region, | | | |
| | | humanized | | | |
| TAU845 | Tau | Light chain | variant 15-VH31 | US20150175685 SEQ ID NO: 57 | 21823 |
| | | variable | | | |
| | | region, | | | |
| | | humanized | | | |
| TAU846 | Tau | Light chain | IPN002 Vk | U.S. Pat. No. 8,980,270 SEQ ID NO: 40 | 21824 |
| | | variable | variant 1 | | |
| | | region, | | | |
| | | humanized | | | |
| TAU847 | Tau | Light chain | IPN002 Vk | U.S. Pat. No. 8,980,270 SEQ ID NO: 41 | 21825 |
| | | variable | variant 2 | | |
| | | region, | | | |
| | | humanized | | | |
| TAU848 | Tau | Light chain | IPN002 Vk | U.S. 8,980,270 SEQ ID NO: 42 | 21826 |
| | | variable | variant 3 | | |
| | | region, | | | |
| | | humanized | | | |
| TAU849 | Tau | Light chain | IPN002 VK | U.S. 8,980,270 SEQ ID NO: 43 | 21827 |
| | | variable | variant 4 | | |
| | | region, | | | |
| | | humanized | | | |
| TAU850 | Tau | Light chain | | US20160031976 SEQ ID NO: 21 | 21828 |
| | | variable | | | |
| | | region, | | | |
| | | mature | | | |
| TAU851 | Tau | Light chain | | US20160031976 SEQ ID NO: 22 | 21829 |
| | | variable | | | |
| | | region, | | | |
| | | mature | | | |
| TAU852 | Tau | Light chain | | US20160031976 SEQ ID NO: 23 | 21830 |
| | | variable | | | |
| | | region, | | | |
| | | mature | | | |
| TAU853 | Tau | ScFv | scFv235 | WO2016007414 SEQ ID NO: 18 | 21831 |
| TAU854 | Tau | scFv235 | | WO2016007414 SEQ ID NO: 22 | 21832 |
| | | Fusion | | | |
| | | Protein | | | |
| TAU855 | Tau | scFv235 | | WO2016007414 SEQ ID NO: 23 | 21833 |
| | | Fusion | | | |
| | | Protein | | | |
| TAU856 | Tau | scFv235 | | WO2016007414 SEQ ID NO: 24 | 21834 |
| | | Fusion | | | |
| | | Protein | | | |
| TAU857 | Tau | scFv235 | | WO2016007414 SEQ ID NO: 25 | 21835 |
| | | Fusion | | | |
| | | Protein | | | |
| TAU858 | Tau | scFv235 | | WO2016007414 SEQ ID NO: 26 | 21836 |
| | | Fusion | | | |
| | | Protein | | | |
| TAU859 | Tau | | Y15982 Igkv8- | WO2016079597 SEQ ID NO: 60 | 21837 |
| | | | 21*01 | | |
| TAU860 | Tau | | L17135 Igkv8- | WO2016079597 SEQ ID NO: 61 | 21838 |
| | | | 28*02 | | |
| TAU861 | Tau | | Y15980 IGKV8- | WO2016079597 SEQ ID NO: 62 | 21839 |
| | | | 19*01 | | |
| TAU862 | Tau | | AJ235948 | WO2016079597 SEQ ID NO: 63 | 21840 |
| | | | IGKV8-30*01 | | |
| TAU863 | Tau | | AJ235947 | WO2016079597 SEQ ID NO: 64 | 21841 |
| | | | IGKV8-28*01 | | |
| TAU864 | Tau | | X72449 | WO2016079597 SEQ ID NO: 65 | 21842 |
| TAU865 | Tau | | AC160990 | WO2016079597 SEQ ID NO: 66 | 21843 |
| | | | Musmus IGHV1- | | |
| | | | 81*01 | | |
| TAU866 | Tau | | AC160473 | WO2016079597 SEQ ID NO: 67 | 21844 |
| | | | Musmus IGHVI- | | |
| | | | 83*01 | | |
| TAU867 | Tau | | AC160990 | WO2016079597 SEQ ID NO: 68 | 21845 |
| | | | Musmus IGHV1- | | |
| | | | 83*01 | | |
| TAU868 | Tau | | AC160473 | WO2016079597 SEQ ID NO: 69 | 21846 |
| | | | Musmus IGHV1- | | |
| | | | 75*01 | | |
| TAU869 | Tau | | X02064 Musmus | WO2016079597 SEQ ID NO: 70 | 21847 |
| | | | IGHV1-54*02 | | |
| TAU870 | Tau | | M65092 | WO2016079597 SEQ ID NO: 71 | 21848 |
| TAU871 | Tau | | | US20150320860 SEQ ID NO: 56 | 21849 |
| TAU872 | Tau | | | US20150320860 SEQ ID NO: 57 | 21850 |
| TAU873 | Tau | | | US20150320860 SEQ ID NO: 58 | 21851 |
| TAU874 | Tau | | | US20150320860 SEQ ID NO: 59 | 21852 |
| TAU875 | Tau | Light chain | | US20150183855 SEQ ID NO: 14; | 21853 |
| | | variable | | WO2016126993 SEQ ID NO: 14 | |
| | | region | | | |
| TAU876 | Tau (O- | Heavy chain | | WO2014159244 SEQ ID NO: 1 | 21854 |
| | GlcNAc) | variable | | | |
| | | region | | | |
| TAU877 | Tau (O- | Light chain | | WO2014159244 SEQ ID NO: 2 | 21855 |
| | GlcNAc) | variable | | | |
| | | region | | | |
| TAU878 | Tau (pS422) | Heavy chain | | WO2015197735 SEQ ID NO: 58 | 21856 |
| | | constant | | | |
| | | region | | | |
| TAU879 | Tau (pS422) | Heavy chain | | WO2015197735 SEQ ID NO: 139 | 21857 |
| | | HC anti-TfR2 | | | |
| | | antibody | | | |
| | | conjugated to | | | |
| | | scFv anti- | | | |
| | | biotin | | | |
| | | antibody | | | |
| | | fragment | | | |
| TAU880 | Tau (pS422) | Heavy chain | | WO2015197735 SEQ ID NO: 138 | 21858 |
| | | HC anti-TfR2 | | | |
| | | antibody | | | |
| | | conjugated to | | | |
| | | scFv anti- | | | |
| | | digoxigenin | | | |
| | | antibody | | | |
| | | fragment | | | |
| TAU881 | Tau (pS422) | Heavy chain | | WO2015197735 SEQ ID NO: 135 | 21859 |
| | | HC anti-TfRI | | | |
| | | antibody | | | |
| | | conjugated to | | | |
| | | scFv anti- | | | |
| | | digoxigenin | | | |
| | | antibody | | | |
| | | fragment | | | |
| TAU882 | Tau (pS422) | Heavy chain | VH00 | WO2015197735 SEQ ID NO: 11; | 21860 |
| | | variable | | U.S. Pat. No. 9,290,567 SEQ ID NO: 54 | |
| | | region | | | |
| TAU883 | Tau (pS422) | Heavy chain | | WO2015197735 SEQ ID NO: 68 | 21861 |
| | | variable | | | |
| | | region | | | |
| TAU884 | Tau (pS422) | Heavy chain | | WO2015197735 SEQ ID NO: 76 | 21862 |
| | | variable | | | |
| | | region | | | |
| TAU885 | Tau (pS422) | Heavy chain | | WO2015197735 SEQ ID NO: 84 | 21863 |
| | | variable | | | |
| | | region | | | |
| TAU886 | Tau (pS422) | Heavy chain | | WO2015197735 SEQ ID NO: 92 | 21864 |
| | | variable | | | |
| | | region | | | |
| TAU887 | Tau (pS422) | Heavy chain | | WO2015197735 SEQ ID NO: 100 | 21865 |
| | | variable | | | |
| | | region | | | |
| TAU888 | Tau (pS422) | Heavy chain | | WO2015197735 SEQ ID NO: 108 | 21866 |
| | | variable | | | |
| | | region | | | |
| TAU889 | Tau (pS422) | Heavy chain | | WO2015197735 SEQ ID NO: 116 | 21867 |
| | | variable | | | |
| | | region | | | |
| TAU890 | Tau (pS422) | Heavy chain | | WO2015197735 SEQ ID NO: 129 | 21868 |
| | | variable | | | |
| | | region | | | |
| TAU891 | Tau (pS422) | Heavy chain | | WO2015197735 SEQ ID NO: 131 | 21869 |
| | | variable | | | |
| | | region | | | |
| TAU892 | Tau (pS422) | Heavy chain | | WO2015197735 SEQ ID NO: 148 | 21870 |
| | | variable | | | |
| | | region of the | | | |
| | | anti-HeliCar | | | |
| | | motif | | | |
| TAU893 | Tau (pS422) | Heavy | | WO2015197735 SEQ ID NO: 136 | 21871 |
| | | chainHC anti- | | | |
| | | TfRI antibody | | | |
| | | conjugated to | | | |
| | | scFv anti- | | | |
| | | biotin | | | |
| | | antibody | | | |
| | | fragment | | | |
| TAU894 | Tau (pS422) | Helicar motif | | WO2015197735 SEQ ID NO: 152 | 21872 |
| | | amino acid | | | |
| | | sequence | | | |
| | | cystein | | | |
| | | variant 1 | | | |
| | | fused to | | | |
| | | pseudomonas | | | |
| | | exotoxin | | | |
| | | LR8M with a | | | |
| | | GGG- | | | |
| | | peptidic | | | |
| | | linker and the | | | |
| | | C-terminal K | | | |
| | | deleted | | | |
| TAU895 | Tau (pS422) | human Ig- | | WO2015197735 SEQ ID NO: 60 | 21873 |
| | | lambda | | | |
| | | constant | | | |
| | | region | | | |
| TAU896 | Tau (pS422) | Light chain | | WO2015197735 SEQ ID NO: 137 | 21874 |
| | | LC anti-TIR2 | | | |
| | | antibody | | | |
| TAU897 | Tau (pS422) | Light chain | LC anti-TfR1 | WO2015197735 SEQ ID NO: 134 | 21875 |
| | | LC anti-TfRI | antibody | | |
| | | antibody | | | |
| TAU898 | Tau (pS422) | Light chain | VL00 | WO2015197735 SEQ ID NO: 7 | 21876 |
| | | variable | | | |
| | | region | | | |
| TAU899 | Tau (pS422) | Light chain | | WO2015197735 SEQ ID NO: 72 | 21877 |
| | | variable | | | |
| | | region | | | |
| TAU900 | Tau (pS422) | Light chain | | WO2015197735 SEQ ID NO: 80 | 21878 |
| | | variable | | | |
| | | region | | | |
| TAU901 | Tau (pS422) | Light chain | | WO2015197735 SEQ ID NO: 88 | 21879 |
| | | variable | | | |
| | | region | | | |
| TAU902 | Tau (pS422) | Light chain | | WO2015197735 SEQ ID NO: 96 | 21880 |
| | | variable | | | |
| | | region | | | |
| TAU903 | Tau (pS422) | Light chain | | WO2015197735 SEQ ID NO: 104 | 21881 |
| | | variable | | | |
| | | region | | | |
| TAU904 | Tau (pS422) | Light chain | | WO2015197735 SEQ ID NO: 112 | 21882 |
| | | variable | | | |
| | | region | | | |
| TAU905 | Tau (pS422) | Light chain | | WO2015197735 SEQ ID NO: 120 | 21883 |
| | | variable | | | |
| | | region | | | |
| TAU906 | Tau (pS422) | Light chain | | WO2015197735 SEQ ID NO: 130 | 21884 |
| | | variable | | | |
| | | region | | | |
| TAU907 | Tau (pS422) | Light chain | | WO2015197735 SEQ ID NO: 132 | 21885 |
| | | variable | | | |
| | | region | | | |
| TAU908 | Tau (pS422) | Light chain | | WO2015197735 SEQ ID NO: 151 | 21886 |
| | | variable | | | |
| | | region N51C | | | |
| | | variant of the | | | |
| | | anti-HeliCar | | | |
| | | motif | | | |
| TAU909 | Tau (pS422) | Light chain | | WO2015197735 SEQ ID NO: 150 | 21887 |
| | | variable | | | |
| | | region N55C | | | |
| | | variant of the | | | |
| | | anti-HeliCar | | | |
| | | motif | | | |
| TAU910 | Tau (pS422) | Light chain | | WO2015197735 SEQ ID NO: 149 | 21888 |
| | | variable | | | |
| | | region of the | | | |
| | | anti-HeliCar | | | |
| | | motif | | | |
| TAU911 | Tau pS422 | Heavy chain | | U.S. Pat. No. 9,290,567 SEQ ID NO: 13 | 21889 |
| | | constant | | | |
| | | region | | | |
| TAU912 | Tau pS422 | Heavy chain | | U.S. Pat. No. 9,290,567 SEQ ID NO: 14 | 21890 |
| | | constant | | | |
| | | region | | | |
| TAU913 | Tau pS422 | Heavy chain | | U.S. Pat. No. 9,290,567 SEQ ID NO: 15 | 21891 |
| | | constant | | | |
| | | region | | | |
| TAU914 | Tau pS422 | Heavy chain | | U.S. Pat. No. 9,290,567 SEQ ID NO: 16 | 21892 |
| | | constant | | | |
| | | region | | | |
| TAU915 | Tau pS422 | Heavy chain | Mab2.10.3 | U.S. Pat. No. 9,290,567 SEQ ID NO: 2 | 21893 |
| | | variable | | | |
| | | region | | | |
| TAU916 | Tau pS422 | Heavy chain | Mab 005 | U.S. Pat. No. 9,290,567 SEQ ID NO: 22 | 21894 |
| | | variable | | | |
| | | region | | | |
| TAU917 | Tau pS422 | Heavy chain | Mab 019 | U.S. Pat. No. 9,290,567 SEQ ID NO: 30 | 21895 |
| | | variable | | | |
| | | region | | | |
| TAU918 | Tau pS422 | Heavy chain | Mab 020 | U.S. Pat. No. 9,290,567 SEQ ID NO: 38 | 21896 |
| | | variable | | | |
| | | region | | | |
| TAU919 | Tau pS422 | Heavy chain | Mab 085 | U.S. Pat. No. 9,290,567 SEQ ID NO: 46 | 21897 |
| | | variable | | | |
| | | region | | | |
| TAU920 | Tau pS422 | Heavy chain | Mab 097 | U.S. Pat. No. 9,290,567 SEQ ID NO: 62 | 21898 |
| | | variable | | | |
| | | region | | | |
| TAU921 | Tau pS422 | Light chain | Mab2.10.3 | U.S. Pat. No. 9,290,567 SEQ ID NO: 1 | 21899 |
| | | variable | | | |
| | | region | | | |
| TAU922 | Tau pS422 | Light chain | Mab 005 | U.S. Pat. No. 9,290,567 SEQ ID NO: 26 | 21900 |
| | | variable | | | |
| | | region | | | |
| TAU923 | Tau pS422 | Light chain | Mab 019 | U.S. Pat. No. 9,290,567 SEQ ID NO: 34 | 21901 |
| | | variable | | | |
| | | region | | | |
| TAU924 | Tau pS422 | Light chain | Mab 020 | U.S. Pat. No. 9,290,567 SEQ ID NO: 42 | 21902 |
| | | variable | | | |
| | | region | | | |
| TAU925 | Tau pS422 | Light chain | Mab 085 | U.S. Pat. No. 9,290,567 SEQ ID NO: 50 | 21903 |
| | | variable | | | |
| | | region | | | |
| TAU926 | Tau pS422 | Light chain | Mab 086 | U.S. Pat. No. 9,290,567 SEQ ID NO: 58 | 21904 |
| | | variable | | | |
| | | region | | | |
| TAU927 | Tau pS422 | Light chain | Mab 097 | U.S. Pat. No. 9,290,567 SEQ ID NO: 66 | 21905 |
| | | variable | | | |
| | | region | | | |
| TAU928 | Tau/Amyloid | Heavy chain | 3.F5 | US20100323905 SEQ ID NO: 13 | 21906 |
| | beta/Alpha | variable | | and 119 | |
| | synuclein | region | | | |
| | | antibody | | | |
| TAU929 | Tau/Amyloid | Heavy chain | 3.A9 | US20100323905 SEQ ID NO: 14 | 21907 |
| | beta/Alpha | variable | | and 120 | |
| | synuclein | region | | | |
| | | antibody | | | |
| TAU930 | Tau/Amyloid | Heavy chain | 3.00E+09 | US20100323905 SEQ ID NO: 15, | 21908 |
| | beta/Alpha | variable | | 110 | |
| | synuclein | region | | | |
| | | antibody | | | |
| TAU931 | Tau/Amyloid | Heavy chain | #08 | US20100323905 SEQ ID NO: 16 | 21909 |
| | beta/Alpha | variable | | and 111 | |
| | synuclein | region | | | |
| | | antibody | | | |
| TAU932 | Tau/Amyloid | Heavy chain | VHH29 | US20100323905 SEQ ID NO: 18, | 21910 |
| | beta/Alpha | variable | | 118 | |
| | synuclein | region | | | |
| | | antibody | | | |
| TAU933 | Tau/Amyloid | Heavy chain | VHH07 | US20100323905 SEQ ID NO: 97, | 21911 |
| | beta/Alpha | variable | | 98 | |
| | synuclein | region | | | |
| | | antibody | | | |
| TAU934 | Tau/Amyloid | Heavy chain | VHH15 | US20100323905 SEQ ID NO: 99- | 21912 |
| | beta/Alpha | variable | | 101 | |
| | synuclein | region | | | |
| | | antibody | | | |
| TAU935 | Tau/Amyloid | Heavy chain | VHH01 | US20100323905 SEQ ID NO: 102 | 21913 |
| | beta/Alpha | variable | | | |
| | synuclein | region | | | |
| | | antibody | | | |
| TAU936 | Tau/Amyloid | Heavy chain | VHH04 | US20100323905 SEQ ID NO: 103 | 21914 |
| | beta/Alpha | variable | | | |
| | synuclein | region | | | |
| | | antibody | | | |
| TAU937 | Tau/Amyloid | Heavy chain | VHH19 | US20100323905 SEQ ID NO: 104 | 21915 |
| | beta/Alpha | variable | | | |
| | synuclein | region | | | |
| | | antibody | | | |
| TAU938 | Tau/Amyloid | Heavy chain | VHH21 | US20100323905 SEQ ID NO: 105 | 21916 |
| | beta/Alpha | variable | | | |
| | synuclein | region | | | |
| | | antibody | | | |
| TAU939 | Tau/Amyloid | Heavy chain | VHH05 | US20100323905 SEQ ID NO: 106 | 21917 |
| | beta/Alpha | variable | | | |
| | synuclein | region | | | |
| | | antibody | | | |
| TAU940 | Tau/Amyloid | Heavy chain | VHH23 | US20100323905 SEQ ID NO: 107 | 21918 |
| | beta/Alpha | variable | | | |
| | synuclein | region | | | |
| | | antibody | | | |
| TAU941 | Tau/Amyloid | Heavy chain | VHH34 | US20100323905 SEQ ID NO: 108 | 21919 |
| | beta/Alpha | variable | | | |
| | sy nuclein | region | | | |
| | | antibody | | | |
| TAU942 | Tau/Amyloid | Heavy chain | VHH26 | US20100323905 SEQ ID NO: 109 | 21920 |
| | beta/Alpha | variable | | | |
| | sy nuclein | region | | | |
| | | antibody | | | |
| TAU943 | Tau/Amyloid | Heavy chain | VHH18 | US20100323905 SEQ ID NO: 17 | 21921 |
| | beta/Alpha | variable | | and 112 | |
| | synuclein | region | | | |
| | | antibody | | | |
| TAU944 | Tau/Amyloid | Heavy chain | VHH09 | US20100323905 SEQ ID NO: 113 | 21922 |
| | beta/Alpha | variable | | | |
| | synuclein | region | | | |
| | | antibody | | | |
| TAU945 | Tau/Amyloid | Heavy chain | VHH20 | US20100323905 SEQ ID NO: 114 | 21923 |
| | beta/Alpha | variable | | | |
| | synuclein | region | | | |
| | | antibody | | | |
| TAU946 | Tau/Amyloid | Heavy chain | VHH32 | US20100323905 SEQ ID NO: 115 | 21924 |
| | beta/Alpha | variable | | | |
| | synuclein | region | | | |
| | | antibody | | | |
| TAU947 | Tau/Amyloid | Heavy chain | VHH30 | US20100323905 SEQ ID NO: 116 | 21925 |
| | beta/Alpha | variable | | | |
| | synuclein | region | | | |
| | | antibody | | | |
| TAU948 | Tau/Amyloid | Heavy chain | VHH28 | US20100323905 SEQ ID NO: 117 | 21926 |
| | beta/Alpha | variable | | | |
| | synuclein | region | | | |
| | | antibody | | | |
| TAU949 | Tau/Amyloid | Heavy chain | VHH14 | US20100323905 SEQ ID NO: 121 | 21927 |
| | beta/Alpha | variable | | | |
| | synuclein | region | | | |
| | | antibody | | | |
| TAU950 | Tau/Amyloid | Heavy chain | VHH12 | US20100323905 SEQ ID NO: 122 | 21928 |
| | beta/Alpha | variable | | | |
| | synuclein | region | | | |
| | | antibody | | | |
| TAU951 | Tau/Amyloid | Heavy chain | 1B | US20100323905 SEQ ID NO: 52 | 21929 |
| | beta/Alpha | variable | | | |
| | synuclein | region | | | |
| | | antibody, | | | |
| | | amyloid 42 | | | |
| | | VHH | | | |
| TAU952 | Tau/Amyloid | Heavy chain | 1D | US20100323905 SEQ ID NO: 53 | 21930 |
| | beta/Alpha | variable | | | |
| | synuclein | region | | | |
| | | antibody, | | | |
| | | amyloid 42 | | | |
| | | VHH | | | |
| TAU953 | Tau/Amyloid | Heavy chain | 2A | US20100323905 SEQ ID NO: 54 | 21931 |
| | beta/Alpha | variable | | | |
| | synuclein | region | | | |
| | | antibody, | | | |
| | | amyloid 42 | | | |
| | | VHH | | | |
| TAU954 | Tau/Amyloid | Heavy chain | 2B | US20100323905 SEQ ID NO: 55 | 21932 |
| | beta/Alpha | variable | | | |
| | synuclein | region | | | |
| | | antibody, | | | |
| | | amyloid 42 | | | |
| | | VHH | | | |
| TAU955 | Tau/Amyloid | Heavy chain | 2F | US20100323905 SEQ ID NO: 56 | 21933 |
| | beta/Alpha | variable | | | |
| | synuclein | region | | | |
| | | antibody, | | | |
| | | amyloid 42 | | | |
| | | VHH | | | |
| TAU956 | Tau/Amyloid | Heavy chain | 3A | US20100323905 SEQ ID NO: 57 | 21934 |
| | beta/Alpha | variable | | | |
| | synuclein | region | | | |
| | | antibody, | | | |
| | | amyloid 42 | | | |
| | | VHH | | | |
| TAU957 | Tau/Amyloid | Heavy chain | 3H | US20100323905 SEQ ID NO: 58 | 21935 |
| | beta/Alpha | variable | | | |
| | sy nuclein | region | | | |
| | | antibody, | | | |
| | | amyloid 42 | | | |
| | | VHH | | | |
| TAU958 | Tau/Amyloid | Heavy chain | 4C | US20100323905 SEQ ID NO: 59 | 21936 |
| | beta/Alpha | variable | | | |
| | synuclein | region | | | |
| | | antibody, | | | |
| | | amyloid 42 | | | |
| | | VHH | | | |
| TAU959 | Tau/Amyloid | Heavy chain | 8F | US20100323905 SEQ ID NO: 60 | 21937 |
| | beta/Alpha | variable | | | |
| | synuclein | region | | | |
| | | antibody, | | | |
| | | amyloid 42 | | | |
| | | VHH | | | |
| TAU960 | Tau/Amyloid | Heavy chain | 11D | US20100323905 SEQ ID NO: 61 | 21938 |
| | beta/Alpha | variable | | | |
| | synuclein | region | | | |
| | | antibody, | | | |
| | | amyloid 42 | | | |
| | | VHH | | | |
| TAU961 | Tau/Amyloid | Heavy chain | EME7E | US20100323905 SEQ ID NO: 62 | 21939 |
| | beta/Alpha | variable | | | |
| | synuclein | region | | | |
| | | antibody, | | | |
| | | VHH for | | | |
| | | emerin | | | |
| TAU962 | Tau/Amyloid | Heavy chain | EME1C | US20100323905 SEQ ID NO: 63 | 21940 |
| | beta/Alpha | variable | | | |
| | synuclein | region | | | |
| | | antibody, | | | |
| | | VHH for | | | |
| | | emerin | | | |
| TAU963 | Tau/Amyloid | Heavy chain | VHH01 | US20100323905 SEQ ID NO: 64 | 21941 |
| | beta/Alpha | variable | | | |
| | synuclein | region | | | |
| | | antibody, | | | |
| | | VHH for | | | |
| | | emerin | | | |
| TAU964 | Tau/Amyloid | Heavy chain | VHH03 / | US20100323905 SEQ ID NO: 65 | 21942 |
| | beta/Alpha | variable | VHH23 | | |
| | synuclein | region | | | |
| | | antibody, | | | |
| | | VHH for | | | |
| | | emerin | | | |
| TAU965 | Tau/Amyloid | Heavy chain | EME3H | US20100323905 SEQ ID NO: 66 | 21943 |
| | beta/Alpha | variable | | | |
| | synuclein | region | | | |
| | | antibody, | | | |
| | | VHH for | | | |
| | | emerin | | | |
| TAU966 | Tau/Amyloid | Heavy chain | VHH09 | US20100323905 SEQ ID NO: 67 | 21944 |
| | beta/Alpha | variable | | | |
| | synuclein | region | | | |
| | | antibody, | | | |
| | | VHH for | | | |
| | | emerin | | | |
| TAU967 | Tau/Amyloid | Heavy chain | VHH12 | US20100323905 SEQ ID NO: 68 | 21945 |
| | beta/Alpha | variable | | | |
| | synuclein | region | | | |
| | | antibody | | | |
| | | VHH for | | | |
| | | emerin | | | |
| TAU968 | Tau/Amyloid | Heavy chain | VHH05 | US20100323905 SEQ ID NO: 69 | 21946 |
| | beta/Alpha | variable | | | |
| | synuclein | region | | | |
| | | antibody, | | | |
| | | VHH for | | | |
| | | emerin | | | |
| TAU969 | Tau/Amyloid | Heavy chain | VHH11 | US20100323905 SEQ ID NO: 70 | 21947 |
| | beta/Alpha | variable | | | |
| | synuclein | region | | | |
| | | antibody, | | | |
| | | VHH for | | | |
| | | emerin | | | |
| TAU970 | Tau/Amyloid | Heavy chain | EME8A | US20100323905 SEQ ID NO: 71 | 21948 |
| | beta/Alpha | variable | | | |
| | synuclein | region | | | |
| | | antibody, | | | |
| | | VHH for | | | |
| | | emerin | | | |
| TAU971 | Tau/Amyloid | Heavy chain | VHH02 | US20100323905 SEQ ID NO: 72 | 21949 |
| | beta/Alpha | variable | | | |
| | synuclein | region | | | |
| | | antibody, | | | |
| | | VHH for | | | |
| | | emerin | | | |
| TAU972 | Tau/Amyloid | Heavy chain | VHH15 | US20100323905 SEQ ID NO: 73 | 21950 |
| | beta/Alpha | variable | | | |
| | synuclein | region | | | |
| | | antibody, | | | |
| | | VHH for | | | |
| | | emerin | | | |
| TAU973 | Tau/Amyloid | Heavy chain | VHH10 | US20100323905 SEQ ID NO: 74 | 21951 |
| | beta/Alpha | variable | | | |
| | synuclein | region | | | |
| | | antibody, | | | |
| | | VHH for | | | |
| | | emerin | | | |
| TAU974 | Tau/Amyloid | Heavy chain | EME4B | US20100323905 SEQ ID NO: 75 | 21952 |
| | beta/Alpha | variable | | | |
| | synuclein | region | | | |
| | | antibody, | | | |
| | | VHH for | | | |
| | | emerin | | | |
| TAU975 | Tau/Amyloid | Heavy chain | VHH13 | US20100323905 SEQ ID NO: 76 | 21953 |
| | beta/Alpha | variable | | | |
| | synuclein | region | | | |
| | | antibody, | | | |
| | | VHH for | | | |
| | | emerin | | | |
| TAU976 | Tau/Amyloid | Heavy chain | EME7F | US20100323905 SEQ ID NO: 77 | 21954 |
| | beta/Alpha | variable | | | |
| | synuclein | region | | | |
| | | antibody, | | | |
| | | VHH for | | | |
| | | emerin | | | |
| TAU977 | Tau/Amyloid | Heavy chain | VHH14 | US20100323905 SEQ ID NO: 78 | 21955 |
| | beta/Alpha | variable | | | |
| | synuclein | region | | | |
| | | antibody, | | | |
| | | VHH for | | | |
| | | emerin | | | |
| TAU978 | Tau/Amyloid | Heavy chain | EME2G | US20100323905 SEQ ID NO: 79 | 21956 |
| | beta/Alpha | variable | | | |
| | synuclein | region | | | |
| | | antibody, | | | |
| | | VHH for | | | |
| | | emerin | | | |
| TAU979 | Tau/Amyloid | Heavy chain | EME8D | US20100323905 SEQ ID NO: 80 | 21957 |
| | beta/Alpha | variable | | | |
| | synuclein | region | | | |
| | | antibody, | | | |
| | | VHH for | | | |
| | | emerin | | | |
| TAU980 | Tau/Amyloid | Heavy chain | VHH04 | US20100323905 SEQ ID NO: 81 | 21958 |
| | beta/Alpha | variable | | | |
| | synuclein | region | | | |
| | | antibody, | | | |
| | | VHH for | | | |
| | | emerin | | | |
| TAU981 | Tau/Amyloid | Heavy chain | VHH07 / | US20100323905 SEQ ID NO: 82 | 21959 |
| | beta/Alpha | variable | VHH08 | | |
| | synuclein | region | | | |
| | | antibody, | | | |
| | | VHH for | | | |
| | | emerin | | | |
| TAU982 | Tau/Amyloid | Heavy chain | VHH16 | US20100323905 SEQ ID NO: 83 | 21960 |
| | beta/Alpha | variable | | | |
| | synuclein | region | | | |
| | | antibody, | | | |
| | | VHH for | | | |
| | | emerin | | | |
| TAU983 | Tau/Amyloid | Heavy chain | 3.6B | US20100323905 SEQ ID NO: 84 | 21961 |
| | beta/Alpha | variable | | | |
| | synuclein | region | | | |
| | | antibody, | | | |
| | | VHH for | | | |
| | | emerin | | | |
| TAU984 | Tau/Amyloid | Heavy chain | 3.8B | US20100323905 SEQ ID NO: 85 | 21962 |
| | beta/Alpha | variable | | | |
| | synuclein | region | | | |
| | | antibody, | | | |
| | | VHH for | | | |
| | | emerin | | | |
| TAU985 | Tau/Amyloid | Heavy chain | VHH24 | US20100323905 SEQ ID NO: 86 | 21963 |
| | beta/Alpha | variable | | | |
| | synuclein | region | | | |
| | | antibody, | | | |
| | | VHH for | | | |
| | | emerin | | | |
| TAU986 | Tau/Amyloid | Heavy chain | VHH21 | US20100323905 SEQ ID NO: 87 | 21964 |
| | beta/Alpha | variable | | | |
| | synuclein | region | | | |
| | | antibody, | | | |
| | | VHH for | | | |
| | | emerin | | | |
| TAU987 | Tau/Amyloid | Heavy chain | 3.8E | US20100323905 SEQ ID NO: 88 | 21965 |
| | beta/Alpha | variable | | | |
| | synuclein | region | | | |
| | | antibody. | | | |
| | | VHH for | | | |
| | | emerin | | | |
| TAU988 | Tau/Amyloid | Heavy chain | | US20100323905 SEQ ID NO: 89 | 21966 |
| | beta/Alpha | variable | | | |
| | synuclein | region | | | |
| | | antibody, | | | |
| | | VHH which | | | |
| | | can | | | |
| | | translocate | | | |
| | | via blood | | | |
| | | brain barrier | | | |
| TAU989 | Tau/Amyloid | Heavy chain | | US20100323905 SEQ ID NO: 90 | 21967 |
| | beta/Alpha | variable | | | |
| | synuclein | region | | | |
| | | antibody, | | | |
| | | VHH which | | | |
| | | can | | | |
| | | translocate | | | |
| | | via blood | | | |
| | | brain barrier | | | |
| TAU990 | Tau/Aß | | | US20110002945 SEQ ID NO: 2 | 21968 |
| | peptides | | | | |
| TAU991 | Tau/Aß | | | US20110002945 SEQ ID NO: 3 | 21969 |
| | peptides | | | | |
| TAU992 | Tau | CDR | | WO2016137811 SEQ ID NO: 3 | 21970 |
| TAU993 | Tau | CDR | | WO2016137811 SEQ ID NO: 4 | 21971 |
| TAU994 | Tau | CDR | | WO2016137811 SEQ ID NO: 5 | 21972 |
| TAU995 | Tau | CDR | | WO2016137811 SEQ ID NO: 6 | 21973 |
| TAU996 | Tau | CDR | | WO2016137811 SEQ ID NO: 7 | 21974 |
| TAU997 | Tau | CDR | | WO2016137811 SEQ ID NO: 8 | 21975 |
| TAU998 | Tau | CDR | | WO2015122922 SEQ ID NO: 41 | 21976 |
| TAU999 | Tau | CDR | | WO2015122922 SEQ ID NO: 49 | 21977 |
| | | | | and 57 | |
| TAU1000 | Tau | CDR | | WO2016126993 SEQ ID NO: 16 | 21978 |
| TAU1001 | Tau | CDR | | WO2016126993 SEQ ID NO: 17 | 21979 |
| TAU1002 | Tau | CDR | | WO2016126993 SEQ ID NO: 18 | 21980 |
| TAU1003 | Tau | CDR | | WO2016126993 SEQ ID NO: 19 | 21981 |
| TAU1004 | Tau | CDR | | WO2016126993 SEQ ID NO: 20 | 21982 |
| TAU1005 | Tau | CDR | | WO2016126993 SEQ ID NO: 21 | 21983 |
| TAU1006 | Tau | dimeric | DH-Tau15 | WO2016055941 SEQ ID NO: 20 | 21984 |
| | | antibody | | | |
| TAU1007 | Tau | Fc | Fc-Tau15 | WO2016055941 SEQ ID NO: 23 | 21985 |
| TAU1008 | Tau | full antibody | MC-1 Furin 2A | WO2015035190 SEQ ID NO: 2 | 21986 |
| TAU1009 | Tau | full antibody | MC-1 Furin 2A | WO2015035190 SEQ ID NO: 4 | 21987 |
| TAU1010 | Tau | full antibody | MC-1 optimized | WO2015035190 SEQ ID NO: 6 | 21988 |
| | | | seq | | |
| TAU1011 | Tau | full antibody | PHF-1 Furin 2A | WO2015035190 SEQ ID NO: 1 | 21989 |
| TAU1012 | Tau | full antibody | PHF-1 Furin 2A | WO2015035190 SEQ ID NO: 3 | 21990 |
| TAU1013 | Tau | full antibody | PHF-1 optimized | WO2015035190 SEQ ID NO: 5 | 21991 |
| | | | seq | | |
| TAU1014 | Tau | Heavy chain | 1 A6 | WO2016137950 SEQ ID NO: 46 | 21992 |
| TAU1015 | Tau | heavy chain | 113F5-F7 | WO2016196726 SEQ ID NO: 90 | 21993 |
| TAU1016 | Tau | heavy chain | 11E10-B8 | WO2016196726 SEQ ID NO: 30 | 21994 |
| TAU1017 | Tau | heavy chain | 123E9-A1 | WO2016196726 SEQ ID NO: 140 | 21995 |
| TAU1018 | Tau | heavy chain | 125B11-H3 | WO2016196726 SEQ ID NO: 80 | 21996 |
| TAU1019 | Tau | heavy chain | 126F11-G11 | WO2016196726 SEQ ID NO: 180 | 21997 |
| TAU1020 | Tau | heavy chain | 12A10-E8 | WO2016196726 SEQ ID NO: 250 | 21998 |
| TAU1021 | Tau | heavy chain | 14F5-D9 | WO2016196726 SEQ ID NO: 210 | 21999 |
| TAU1022 | Tau | heavy chain | 15C6-A7 | WO2016196726 SEQ ID NO: 150 | 22000 |
| TAU1023 | Tau | Heavy chain | 17H3.2 | WO2016112078 SEQ ID NO: 20 | 22001 |
| TAU1024 | Tau | heavy chain | 19F8-B1 | WO2016196726 SEQ ID NO: 160 | 22002 |
| TAU1025 | Tau | heavy chain | 19H6-F7 | WO2016196726 SEQ ID NO: 60 | 22003 |
| TAU1026 | Tau | heavy chain | 22G7-C9 | WO2016196726 SEQ ID NO: 230 | 22004 |
| TAU1027 | Tau | heavy chain | 24A11-D5 | WO2016196726 SEQ ID NO: 170 | 22005 |
| TAU1028 | Tau | heavy chain | 26C1-B11 and | WO2016196726 SEQ ID NO: 100 | 22006 |
| | | | 26C1-C8 | and 110 | |
| TAU1029 | Tau | Heavy chain | 29H2.10 | WO2016112078 SEQ ID NO: 22 | 22007 |
| TAU1030 | Tau | Heavy chain | 29H2.10N31S | WO2016112078 SEQ ID NO: 23 | 22008 |
| | | | (Mutant) | | |
| TAU1031 | Tau | heavy chain | 30G1-B2 | WO2016196726 SEQ ID NO: 120 | 22009 |
| TAU1032 | Tau | heavy chain | 37D3-H9 and | WO2016196726 SEQ ID NO: 10 | 22010 |
| | | | 37D3-H9b | and 20 | |
| TAU1033 | Tau | heavy chain | 3A4-H4 | WO2016196726 SEQ ID NO: 50 | 22011 |
| TAU1034 | Tau | Heavy chain | 4G11 | WO2016137950 SEQ ID NO: 42 | 22012 |
| TAU1035 | Tau | heavy chain | 52F6-F11 | WO2016196726 SEQ ID NO: 270 | 22013 |
| TAU1036 | Tau | heavy chain | 54C1-H11 and | WO2016196726 SEQ ID NO: 40 | 22014 |
| | | | 61E7-C4 | | |
| TAU1037 | Tau | heavy chain | 55E7-F11 | WO2016196726 SEQ ID NO: 260 | 22015 |
| TAU1038 | Tau | heavy chain | 66F5-A1 | WO2016196726 SEQ ID NO: 130 | 22016 |
| TAU1039 | Tau | heavy chain | 73H6-B8 | WO2016196726 SEQ ID NO: 220 | 22017 |
| TAU1040 | Tau | heavy chain | 7A11-C12 | WO2016196726 SEQ ID NO: 240 | 22018 |
| TAU1041 | Tau | heavy chain | 89F4-A1 | WO2016196726 SEQ ID NO: 190 | 22019 |
| TAU1042 | Tau | heavy chain | 93A8-D2 | WO2016196726 SEQ ID NO: 200 | 22020 |
| TAU1043 | Tau | heavy chain | 94B2-C1 | WO2016196726 SEQ ID NO: 70 | 22021 |
| TAU1044 | Tau ps409 | heavy chain | hAC1-36-3A8- | US20150175682 SEQ ID NO: 11 | 22022 |
| | | | Ab1 | | |
| TAU1045 | Tau | heavy chain | hu125B11.v17 | WO2016196726 SEQ ID NO: 310 | 22023 |
| | | | and hu125B11- | and 448 | |
| | | | H3.HC3 | | |
| TAU1046 | Tau | heavy chain | hu 125B11.v17 | WO2016196726 SEQ ID NO: 311 | 22024 |
| TAU1047 | Tau | heavy chain | hu125B11.v26 | WO2016196726 SEQ ID NO: 320 | 22025 |
| TAU1048 | Tau | heavy chain | hu125B11.v26 | WO2016196726 SEQ ID NO: 321 | 22026 |
| TAU1049 | Tau | heavy chain | hu125B11.v28 | WO2016196726 SEQ ID NO: 330 | 22027 |
| TAU1050 | Tau | heavy chain | hu125B11.v28 | WO2016196726 SEQ ID NO: 331 | 22028 |
| TAU1051 | Tau | heavy chain | hu125B11- | WO2016196726 SEQ ID NO: 446 | 22029 |
| | | | H3.HC1 | | |
| TAU1052 | Tau | heavy chain | hu 125B11- | WO2016196726 SEQ ID NO: 447 | 22030 |
| | | | H3.HC2 | | |
| TAU1053 | Tau | heavy chain | hu 125B11- | WO2016196726 SEQ ID NO: 449 | 22031 |
| | | | H3.HC4 | | |
| TAU1054 | Tau | heavy chain | hu125B11- | WO2016196726 SEQ ID NO: 450 | 22032 |
| | | | H3.HC5 | | |
| TAU1055 | Tau | heavy chain | hu125B11- | WO2016196726 SEQ ID NO: 451 | 22033 |
| | | | H3.HC6 | | |
| TAU1056 | Tau | heavy chain | Hu37D3.v39 | WO2016196726 SEQ ID NO: 560, | 22034 |
| | | | | 570, 580 | |
| TAU1057 | Tau | heavy chain | Hu37D3-H9.v1 | WO2016196726 SEQ ID NO: 280 | 22035 |
| TAU1058 | Tau | heavy chain | Hu37D3- | WO2016196726 SEQ ID NO: 340 | 22036 |
| | | | H9.v28.A4 | | |
| TAU1059 | Tau | heavy chain | Hu37D3- | WO2016196726 SEQ ID NO: 348 | 22037 |
| | | | H9.v28.A4 | | |
| | | | IgG4- | | |
| | | | S228P.YTE | | |
| TAU1060 | Tau | heavy chain | Hu37D3- | WO2016196726 SEQ ID NO: 602 | 22038 |
| | | | H9.v28.A4 | | |
| | | | lgG4- | | |
| | | | S228P.YTE des- | | |
| | | | K | | |
| TAU1061 | Tau | heavy chain | Hu37D3-H9.v5 | WO2016196726 SEQ ID NO: 290 | 22039 |
| TAU1062 | Tau | heavy chain | Hu94B2.HC1 | WO2016196726 SEQ ID NO: 452 | 22040 |
| TAU1063 | Tau | heavy chain | Hu94B2.HC2 | WO2016196726 SEQ ID NO: 453 | 22041 |
| TAU1064 | Tau | heavy chain | Hu94B2.HC3 | WO2016196726 SEQ ID NO: 454 | 22042 |
| TAU1065 | Tau | heavy chain | Hu94B2.HC4 | WO2016196726 SEQ ID NO: 455 | 22043 |
| TAU1066 | Tau | heavy chain | Hu94B2.HC5 | WO2016196726 SEQ ID NO: 456 | 22044 |
| TAU1067 | Tau | heavy chain | Hu94B2.HC6 | WO2016196726 SEQ ID NO: 457 | 22045 |
| TAU1068 | Tau | heavy chain | Hu94B2.HC7 | WO2016196726 SEQ ID NO: 458 | 22046 |
| TAU1069 | Tau | heavy chain | Hu94B2.HC8 | WO2016196726 SEQ ID NO: 459 | 22047 |
| TAU1070 | Tau | heavy chain | Hu94B2.v105 | WO2016196726 SEQ ID NO: 300 | 22048 |
| TAU1071 | Tau(pS422) | heavy chain | MAb086 | WO2015197735 SEQ ID NO: 11 | 22049 |
| TAU1072 | Tau | heavy chain | | WO2016137811 SEQ ID NO: 2 | 22050 |
| TAU1073 | Tau | heavy chain | | WO2016137811 SEQ ID NO: 12 | 22051 |
| TAU1074 | Tau (pS422) | heavy chain | | WO2015197735 SEQ ID NO: 58 | 22052 |
| | | constant | | | |
| | | regions | | | |
| TAU1075 | Tau | heavy chain | DC8E8 | WO2016079597 SEQ ID NO: 7 | 22053 |
| | | variable | | | |
| | | domain | | | |
| TAU1076 | Tau(pS422) | heavy chain | | WO2015197735 SEQ ID NO: 21 | 22054 |
| | | variable | | | |
| | | domain | | | |
| TAU1077 | Tau | heavy chain | | WO2016137811 SEQ ID NO: 10 | 22055 |
| | | variable | | | |
| | | domain | | | |
| TAU1078 | Tau & | intrabody | A2 | WO2014193632 SEQ ID NO: 2 | 22056 |
| | huntingtin | | | | |
| TAU1079 | Tau & | intrabody | E10 | WO2014193632 SEQ ID NO: 3 | 22057 |
| | huntingtin | | | | |
| TAU1080 | Tau & | intrabody | H8 | WO2014193632 SEQ ID NO: 4 | 22058 |
| | huntingtin | | | | |
| TAU1081 | Tau & | intrabody | TNT41 | WO2014193632 SEQ ID NO: 1 | 22059 |
| | huntingtin | | | | |
| TAU1082 | Tau & | intrabody | | WO2014193632 SEQ ID NO: 5 | 22060 |
| | huntingtin | | | | |
| TAU1083 | Tau(pS422) | lg-kappa light | | WO2015197735 SEQ ID NO: 59 | 22061 |
| | | chain | | | |
| | | constant | | | |
| | | region | | | |
| TAU1084 | Tau(pS422) | 1g-kappa light | | WO2015197735 SEQ ID NO: 60 | 22062 |
| | | chain | | | |
| | | constant | | | |
| | | region | | | |
| TAU1085 | Tau | light chain | 1 A6 | WO2016137950 SEQ ID NO: 48 | 22063 |
| TAU1086 | Tau | light chain | 113F5-F7 | WO2016196726 SEQ ID NO: 91 | 22064 |
| TAU1087 | Tau | light chain | 11E10-B8 | WO2016196726 SEQ ID NO: 31 | 22065 |
| TAU1088 | Tau | light chain | 123E9-A1 | WO2016196726 SEQ ID NO: 141 | 22066 |
| TAU1089 | Tau | light chain | 125B11-H3 | WO2016196726 SEQ ID NO: 81 | 22067 |
| TAU1090 | Tau | light chain | 126F11-G11 | WO2016196726 SEQ ID NO: 181 | 22068 |
| TAU1091 | Tau | light chain | 12A10-E8 | WO2016196726 SEQ ID NO: 251 | 22069 |
| TAU1092 | Tau | light chain | 14F5-D9 | WO2016196726 SEQ ID NO: 211 | 22070 |
| TAU1093 | Tau | light chain | 15C6-A7 | WO2016196726 SEQ ID NO: 151 | 22071 |
| TAU1094 | Tau | light chain | 17H3.2 | WO2016112078 SEQ ID NO: 21 | 22072 |
| TAU1095 | Tau | light chain | 19F8-B1 | WO2016196726 SEQ ID NO: 161 | 22073 |
| TAU1096 | Tau | light chain | 19H6-F7 | WO2016196726 SEQ ID NO: 61 | 22074 |
| TAU1097 | Tau | light chain | 22G7-C9 | WO2016196726 SEQ ID NO: 231 | 22075 |
| TAU1098 | Tau | light chain | 24A11-D5 | WO2016196726 SEQ ID NO: 171 | 22076 |
| TAU1099 | Tau | light chain | 26C1-B11 | WO2016196726 SEQ ID NO: 101 | 22077 |
| TAU1100 | Tau | light chain | 26C1-C8 | WO2016196726 SEQ ID NO: 111 | 22078 |
| TAU1101 | Tau | Light chain | 29H2.10 | WO2016112078 SEQ ID NO: 24 | 22079 |
| TAU1102 | Tau | light chain | 30G1-B2 | WO2016196726 SEQ ID NO: 121 | 22080 |
| TAU1103 | Tau | light chain | 37D3-H9 | WO2016196726 SEQ ID NO: 11 | 22081 |
| TAU1104 | Tau | light chain | 37D3-H9b | WO2016196726 SEQ ID NO: 21 | 22082 |
| TAU1105 | Tau | light chain | 3A4-H4 | WO2016196726 SEQ ID NO: 51 | 22083 |
| TAU1106 | Tau | Light chain | 4G11 | WO2016137950 SEQ ID NO: 44 | 22084 |
| TAU1107 | Tau | light chain | 52F6-F11 | WO2016196726 SEQ ID NO: 271 | 22085 |
| TAU1108 | Tau | light chain | 54C1-H11 and | WO2016196726 SEQ ID NO: 41 | 22086 |
| | | | 61E7-C4 | | |
| TAU1109 | Tau | light chain | 55E7-F11 | WO2016196726 SEQ ID NO: 261 | 22087 |
| TAU1110 | Tau | light chain | 66F5-A1 | WO2016196726 SEQ ID NO: 131 | 22088 |
| TAU1111 | Tau | light chain | 73H6-B8 | WO2016196726 SEQ ID NO: 221 | 22089 |
| TAU1112 | Tau | light chain | 7A11-C12 | WO2016196726 SEQ ID NO: 241 | 22090 |
| TAU1113 | Tau | light chain | 89F4-A1 | WO2016196726 SEQ ID NO: 191 | 22091 |
| TAU1114 | Tau | light chain | 93A8-D2 | WO2016196726 SEQ ID NO: 201 | 22092 |
| TAU1115 | Tau | light chain | 94B2-C1 | WO2016196726 SEQ ID NO: 71 | 22093 |
| TAU1116 | Tau ps410 | light chain | hACl-36-3A8- | US20150175682 SEQ ID NO: 12 | 22094 |
| | | | Ab1 | | |
| TAU1117 | Tau | light chain | hu125B11- | WO2016196726 SEQ ID NO: 442 | 22095 |
| | | | H3.LC1 | | |
| TAU1118 | Tau | light chain | hu125B11- | WO2016196726 SEQ ID NO: 443 | 22096 |
| | | | H3.LC2 | | |
| TAU1119 | Tau | light chain | hu125B11- | WO2016196726 SEQ ID NO: 444 | 22097 |
| | | | H3.LC3 | | |
| TAU1120 | Tau | light chain | hu125B11- | WO2016196726 SEQ ID NO: 445 | 22098 |
| | | | H3.LC4 | | |
| TAU1121 | Tau | light chain | Hu37D3.v39 | WO2016196726 SEQ ID NO: 561 | 22099 |
| TAU1122 | Tau | light chain | Hu37D3.v40 | WO2016196726 SEQ ID NO: 571 | 22100 |
| TAU1123 | Tau | light chain | Hu37D3.v41 | WO2016196726 SEQ ID NO: 581 | 22101 |
| TAU1124 | Tau | light chain | Hu37D3-H9.v1 | WO2016196726 SEQ ID NO: 281 | 22102 |
| TAU1125 | Tau | light chain | Hu37D3- | WO2016196726 SEQ ID NO: 341 | 22103 |
| | | | H9.v28,A4 | | |
| TAU1126 | Tau | light chain | Hu37D3- | WO2016196726 SEQ ID NO: 349 | 22104 |
| | | | H9.v28.A4 | | |
| | | | IgG4- | | |
| | | | S228P.YTE | | |
| TAU1127 | Tau | light chain | Hu37D3-H9.v5 | WO2016196726 SEQ ID NO: 291 | 22105 |
| TAU1128 | Tau | light chain | Hu94B2.LC10 | WO2016196726 SEQ ID NO: 461 | 22106 |
| TAU1129 | Tau | light chain | Hu94B2.LC11 | WO2016196726 SEQ ID NO: 462 | 22107 |
| TAU1130 | Tau | light chain | Hu94B2.LC12 | WO2016196726 SEQ ID NO: 463 | 22108 |
| TAU1131 | Tau | light chain | Hu94B2.LC13 | WO2016196726 SEQ ID NO: 464 | 22109 |
| TAU1132 | Tau | light chain | Hu94B2.LC14 | WO2016196726 SEQ ID NO: 465 | 22110 |
| TAU1133 | Tau | light chain | Hu94B2.LC15 | WO2016196726 SEQ ID NO: 466 | 22111 |
| TAU1134 | Tau | light chain | Hu94B2.LC16 | WO2016196726 SEQ ID NO: 467 | 22112 |
| TAU1135 | Tau | light chain | Hu94B2.LC9 | WO2016196726 SEQ ID NO: 460 | 22113 |
| TAU1136 | Tau | light chain | Hu94B2.v105 | WO2016196726 SEQ ID NO: 301 | 22114 |
| TAU1137 | Tau(pS422) | light chain | MAb086 | WO2015197735 SEQ ID NO: 07 | 22115 |
| TAU1138 | Tau | light chain | | WO2016137811 SEQ ID NO: 1 | 22116 |
| TAU1139 | Tau | light chain | | WO2016137811 SEQ ID NO: 11 | 22117 |
| TAU1140 | Tau | light chain | | US8940272B2 SEQ ID NO: 11 | 22118 |
| TAU1141 | Tau ps411 | light chain | hACl-36-2B6- | US20150175682 SEQ ID NO: 13 | 22119 |
| | | | Abl | | |
| TAU1142 | Tau | light chain | DC8E8 | WO2016079597 SEQ ID NO: 8 | 22120 |
| | | variable | | | |
| | | domain | | | |
| TAU1143 | Tau | light chain | | WO2016137811 SEQ ID NO: 9 | 22121 |
| | | variable | | | |
| | | domain | | | |
| TAU1144 | Tau | single domain | Tau15 | WO2016055941 SEQ ID NO: 7 | 22122 |
| | | antibody | | | |
| TAU1145 | Tau | single domain | Tau81 | WO2016055941 SEQ ID NO: 8 | 22123 |
| | | antibody | | | |
| TAU1146 | pTau | Heavy chain | AB1 | WO2017005732A1 SEQ ID NO: 8 | 22124 |
| | (pS198/pS199/ | | | | |
| | pS202/pT205) | | | | |
| TAU1147 | pTau | Heavy chain | AB1 | WO2017005732A1 SEQ ID NO: | 22125 |
| | (pS198/pS199/ | | | 10 | |
| | pS202/pT205) | | | | |
| TAU1148 | pTau | Heavy chain | AB1 | WO2017005732A1 SEQ ID NO: | 22126 |
| | (pS198/pS199/ | | | 14 | |
| | pS202/pT205) | | | | |
| TAU1149 | pTau | Heavy chain | ABI | WO2017005732A1 SEQ ID NO: | 22127 |
| | (pS198/pS199/ | | | 15 | |
| | pS202/pT205) | | | | |
| TAU1150 | pTau | Heavy chain | AB1 | WO2017005732A1 SEQ ID NO: | 22128 |
| | (pS198/pS199/ | | | 16 | |
| | pS202/pT205) | | | | |
| TAU1151 | pTau | Heavy chain | AB1 | WO2017005732A1 SEQ ID NO: | 22129 |
| | (pS198/pS199/ | | | 20 | |
| | pS202/pT205) | | | | |
| TAU1152 | pTau | Heavy chain | AB1 | WO2017005732A1 SEQ ID NO: | 22130 |
| | (pS198/pS199/ | | | 21 | |
| | pS202/pT205) | | | | |
| TAU1153 | pTau | Heavy chain | AB1 | WO2017005732A1 SEQ ID NO: | 22131 |
| | (pS198/pS199/ | | | 22 | |
| | pS202/pT205) | | | | |
| TAU1154 | pTau | Heavy chain | AB1 | WO2017005732A1 SEQ ID NO: | 22132 |
| | (pS198/pS199/ | | | 23 | |
| | pS202/pT205) | | | | |
| TAU1155 | pTau | Heavy chain | AB1 | WO2017005732AI SEQ ID NO: | 22133 |
| | (pS198/pS199/ | | | 24 | |
| | pS202/pT205) | | | | |
| TAU1156 | pTau | Heavy chain | AB1 | WO2017005732A1 SEQ ID NO: | 22134 |
| | (pS198/pS199/ | | | 25 | |
| | pS202/pT205) | | | | |
| TAU1157 | Tau | Heavy chain | AB1 | WO2017005732A1 SEQ ID NO: | 22135 |
| | | | | 27 | |
| TAU1158 | pTAU (pS396) | Heavy Chain | C10.2 | US20170015738A1 SEQ ID NO: | 22136 |
| | | | | 16 | |
| TAU1159 | Tau | heavy chain | C2N-8E12 | WO2016201434A2 SEQ ID NO: | 22137 |
| | | | | 14 | |
| TAU1160 | pTAU (pS396) | Heavy Chain | C5.2 | US20170015738A1 SEQ ID NO: | 22138 |
| | | | | 24 | |
| TAU1161 | pTAU (pS396) | Heavy Chain | C8.3 | US20170015738A1 SEQ ID NO: | 22139 |
| | | | | 32 | |
| TAU1162 | pTAU (pS396) | Heavy Chain | D1.2 | US20170015738A1 SEQ ID NO: | 22140 |
| | | | | 8 | |
| TAU1163 | pTAU (pS396) | Heavy Chain | humanized C10.2 | US20170015738A1 SEQ ID NO: | 22141 |
| | | | | 35 | |
| TAU1164 | Tau | Heavy chain | mFab AB | WO2017005734A1 SEQ ID NO: | 22142 |
| | | | | 20 | |
| TAU1165 | Tau | Heavy chain | mFab AB1 | WO2017005734A1 SEQ ID NO: 8 | 22143 |
| TAU1166 | Tau | Heavy chain | | WO2017005734A1 SEQ ID NO: | 22144 |
| | | | | 10 | |
| TAU1167 | Tau | Heavy chain | | WO2017005734A1 SEQ ID NO: | 22145 |
| | | | | 11 | |
| TAU1168 | Tau | Heavy chain | | WO2017005734A1 SEQ ID NO: | 22146 |
| | | | | 12 | |
| TAU1169 | Tau | Heavy chain | | WO2017005734A1 SEQ ID NO: | 22147 |
| | | | | 13 | |
| TAU1170 | Tau | Heavy chain | | WO2017005734A1 SEQ ID NO: | 22148 |
| | | | | 22 | |
| TAU1171 | Tau | Heavy chain | | WO2017005734A1 SEQ ID NO: | 22149 |
| | | | | 23 | |
| TAU1172 | Tau | Heavy chain | | WO2017005734A1 SEQ ID NO: | 22150 |
| | | | | 54 | |
| TAU1173 | Tau | Heavy chain | | WO2017005734AI SEQ ID NO: | 22151 |
| | | | | 55 | |
| TAU1174 | Tau | Heavy chain | | WO2017005734A1 SEQ ID NO: | 22152 |
| | | | | 15 | |
| TAU1175 | Tau | Heavy chain | | WO2017005734A1 SEQ ID NO: | 22153 |
| | | | | 16 | |
| TAU1176 | Tau | Heavy chain | | WO2017005734A1 SEQ ID NO: | 22154 |
| | | | | 17 | |
| TAU1177 | Tau | Heavy chain | | WO2017005734AI SEQ ID NO: | 22155 |
| | | | | 18 | |
| TAU1178 | Tau | Heavy chain | C2N-8E12 | WO2016201434A2 SEQ ID NO: | 22156 |
| | | (VH1) | | 15 | |
| TAU1179 | Tau | Heavy chain | C2N-8E12 | WO2016201434A2 SEQ ID NO: | 22157 |
| | | (VH2) | | 16 | |
| TAU1180 | Tau | Heavy chain | C2N-8E12 | WO2016201434A2 SEQ ID NO: | 22158 |
| | | (VH3) | | 17 | |
| TAU1181 | Tau | Heavy chain | C2N-8E12 | WO2016201434A2 SEQ ID NO: | 22159 |
| | | (VH4) | | 18 | |
| TAU1182 | Tau (421) | Heavy chain | 1G10D2 | WO2017027685A2 SEQ ID NO: | 22160 |
| | | variable | | 12 | |
| | | domain | | | |
| TAU1183 | Tau (421) | Heavy chain | 1G11A10 | WO2017027685A2 SEQ ID NO: | 22161 |
| | | variable | | 20 | |
| | | domain | | | |
| TAU1184 | Tau pS404 | Heavy chain | 4E6G7 | WO2017027691A1 SEQ ID NO: | 22162 |
| | | variable | | 13 | |
| | | domain | | | |
| TAU1185 | Tau (421) | Heavy chain | 5G2A3 | WO2017027685A2 SEQ ID NO: | 22163 |
| | | variable | | 40 | |
| | | domain | | | |
| TAU1186 | Tau | Heavy chain | IPN001 VH | U.S. Pat. No. 9,567,395 SEQ ID NO: 18 | 22164 |
| | | variable | | | |
| | | region | | | |
| TAU1187 | Tau | Heavy chain | IPN002 VH | U.S. Pat. No. 9,56,7395 SEQ ID NO: 20 | 22165 |
| | | variable | | | |
| | | region | | | |
| TAU1188 | Tau | Heavy chain | AC1-35-1D2- | U.S. Pat. No. 9,540,434 SEQ ID NO: 86 | 22166 |
| | | variable | Ab1 | | |
| | | region (VH) | | | |
| TAU1189 | Tau | Heavy chain | AC1-35-2A1- | U.S. Pat. No. 9,540,434 SEQ ID NO: 109 | 22167 |
| | | variable | Abl, ACI-35~ | | |
| | | region (VH) | 2A1-Ab2, and | | |
| | | | ACI-35-4A6- | | |
| | | | Ab2 | | |
| TAU1190 | Tau | Heavy chain | ACI-35-2G5- | U.S. Pat. No. 9,540,434 SEQ ID NO: 111 | 22168 |
| | | variable | ABI | | |
| | | region (VH) | | | |
| TAU1191 | Tau | Heavy chain | ACI-35-2G5- | U.S. Pat. No. 9,540,434 SEQ ID NO: 113 | 22169 |
| | | variable | AB2 and ACI- | | |
| | | region (VH) | 35-2G5-AB3 | | |
| TAU1192 | Tau | Heavy chain | ACI-35-4A6- | U.S. Pat. No. 9,540,434 SEQ ID NO: 84 | 22170 |
| | | variable | Ab1 | | |
| | | region (VH) | | | |
| TAU1193 | Tau | Heavy chain | IPN002 VH | U.S. Pat. No. 9,567,395 SEQ ID NO: 28 | 22171 |
| | | variable | variant 1 | | |
| | | region, | | | |
| | | humanized | | | |
| TAU1194 | Tau | Heavy chain | IPN002 VH | U.S. Pat. No. 9,567,395 SEQ ID NO: 29 | 22172 |
| | | variable | variant 2 | | |
| | | region, | | | |
| | | humanized | | | |
| TAU1195 | Tau | Heavy chain | IPN002 VH | U.S. Pat. No. 9,567,395 SEQ ID NO: 30 | 22173 |
| | | variable | variant 3 | | |
| | | region, | | | |
| | | humanized | | | |
| TAU1196 | Tau | Heavy chain | IPN002 VH | U.S. Pat. No. 9,567,395 SEQ ID NO: 31 | 22174 |
| | | variable | variant 4 | | |
| | | region, | | | |
| | | humanized | | | |
| TAU1197 | Tau (pS422) | Heavy chain | VH35H5 | US20160376352A1 SEQ ID NO: | 22175 |
| | | variant 16 | | 65 | |
| TAU1198 | Tau | Heavy chain | C2N-8E12 | WO2016201434A2 SEQ ID NO: 1 | 22176 |
| | | variant gVH1 | | | |
| TAU1199 | Tau | Heavy chain | C2N-8E12 | WO2016201434A2 SEQ ID NO: 2 | 22177 |
| | | variant gVH2 | | | |
| TAU1200 | Tau | Heavy chain | C2N-8E12 | WO2016201434A2 SEQ ID NO: 3 | 22178 |
| | | variant gVH3 | | | |
| TAU1201 | Tau | Heavy chain | C2N-8E12 | WO2016201434A2 SEQ ID NO: 4 | 22179 |
| | | variant g VH4 | | | |
| TAU1202 | Tau (421) | Heavy Chain | 5B3C11 | WO2017027685A2 SEQ ID NO: | 22180 |
| | | VL2 Variable | | 32 | |
| | | Domain | | | |
| TAU1203 | Tau | Heavy chain; | | WO2017005734A1 SEQ ID NO: | 22181 |
| | | humanized | | 25 | |
| TAU1204 | Tau | Heavy chain; | | WO2017005734A1 SEQ ID NO: | 22182 |
| | | humanized | | 26 | |
| TAU1205 | Tau | Heavy chain; | | WO2017005734A1 SEQ ID NO: | 22183 |
| | | humanized | | 56 | |
| TAU1206 | Tau | Heavy chain; | | WO2017005734A1 SEQ ID NO: | 22184 |
| | | humanized | | 57 | |
| TAU1207 | Tau | Heavy chain; | | WO2017005732A1 SEQ ID NO: | 22185 |
| | | humanized | | 32 | |
| TAU1208 | Tau | Heavy chain; | | WO2017005732A1 SEQ ID NO: | 22186 |
| | | humanized | | 33 | |
| TAU1209 | Tau | Heavy chain; | | WO2017005732A1 SEQ ID NO: | 22187 |
| | | humanized | | 36 | |
| TAU1210 | Tau | Heavy chain; | | WO2017005732A1 SEQ ID NO: | 22188 |
| | | humanized | | 37 | |
| TAU1211 | Tau | Heavy chain; | | WO2017005732A1 SEQ ID NO: | 22189 |
| | | humanized | | 38 | |
| TAU1212 | Tau | Heavy chain; | | WO2017005732A1 SEQ ID NO: | 22190 |
| | | humanized | | 39 | |
| TAU1213 | pTau | Light chain | AB1 | WO2017005732A1 SEQ ID NO: 7 | 22191 |
| | (pS198/pS199/ | | | | |
| | pS202/pT205) | | | | |
| TAU1214 | pTau | Light chain | AB1 | WO2017005732A1 SEQ ID NO: 9 | 22192 |
| | (pS198/pS199/ | | | | |
| | pS202/pT205) | | | | |
| TAU1215 | pTau | Light chain | AB1 | WO2017005732A1 SEQ ID NO: | 22193 |
| | (pS198/pS199/ | | | 11 | |
| | pS202/pT205) | | | | |
| TAU1216 | pTau | Light chain | AB1 | WO2017005732A1 SEQ ID NO: | 22194 |
| | (pS198/pS199/ | | | 12 | |
| | S202/pT205) | | | | |
| TAU1217 | pTau | Light chain | AB1 | WO2017005732A1 SEQ ID NO: | 22195 |
| | (pS198/pS199/ | | | 13 | |
| | pS202/pT205) | | | | |
| TAU1218 | pTau | Light chain | AB1 | WO2017005732A1 SEQ ID NO: | 22196 |
| | (pS198/p$199/ | | | 17 | |
| | pS202/pT205) | | | | |
| TAU1219 | pTau | Light chain | AB1 | WO2017005732AI SEQ ID NO: | 22197 |
| | (pS198/pS199/ | | | 18 | |
| | pS202/pT205) | | | | |
| TAU1220 | pTau | Light chain | AB1 | WO2017005732A1 SEQ ID NO: | 22198 |
| | (pS198/pS199/ | | | 19 | |
| | pS202/pT205) | | | | |
| TAU1221 | Tau | Light chain | AB1 | WO2017005732A1 SEQ ID NO: | 22199 |
| | | | | 26 | |
| TAU1222 | pTAU (pS396) | Light Chain | C10.2 | US20170015738A1 SEQ ID NO: | 22200 |
| | | | | 15 | |
| TAU1223 | Tau | light chain | C2N-8E12 | WO2016201434A2 SEQ ID NO: 9 | 22201 |
| TAU1224 | pTAU (pS396) | Light Chain | C5.2 | US20170015738A1 SEQ ID NO: | 22202 |
| | | | | 23 | |
| TAU1225 | pTAU (pS396) | Light Chain | C8.3 | US20170015738A1 SEQ ID NO: | 22203 |
| | | | | 31 | |
| TAU1226 | pTAU (pS396) | Light Chain | D1.2 | US20170015738A1 SEQ ID NO: | 22204 |
| | | | | 7 | |
| TAU1227 | pTAU (pS396) | Light Chain | D1.2* | US20170015738A1 SEQ ID NO: | 22205 |
| | | | | 34 | |
| TAU1228 | pTAU (pS396) | Light Chain | humanized C10.2 | US20170015738A1 SEQ ID NO: | 22206 |
| | | | | 36 | |
| TAU1229 | Tau | Light chain | mFab AB 1 | WO2017005734A1 SEQ ID NO: | 22207 |
| | | | | 19 | |
| TAU1230 | Tau | Light chain | mFab AB1 | WO2017005734A1 SEQ ID NO: 7 | 22208 |
| TAU1231 | Tau | Light chain | | WO2017005734A1 SEQ ID NO: 9 | 22209 |
| TAU1232 | Tau | Light chain | | WO2017005734A1 SEQ ID NO: | 22210 |
| | | | | 14 | |
| TAU1233 | Tau | Light chain | | WO2017005734A1 SEQ ID NO: | 22211 |
| | | | | 21 | |
| TAU1234 | Tau | Light chain | C2N-8E12 | WO2016201434A2 SEQ ID NO: | 22212 |
| | | (VK1) | | 10 | |
| TAU1235 | Tau | Light chain | C2N-8E12 | WO2016201434A2 SEQ ID NO: | 22213 |
| | | (VK2) | | 11 | |
| TAU1236 | Tau | Light chain | C2N-8E12 | WO2016201434A2 SEQ ID NO: | 22214 |
| | | (VK3) | | 12 | |
| TAU1237 | Tau | Light chain | C2N-8E12 | WO2016201434A2 SEQ ID NO: | 22215 |
| | | (VK4) | | 13 | |
| TAU1238 | Tau (421) | Light Chain | 1G10D2 | WO2017027685A2 SEQ ID NO: 8 | 22216 |
| | | Variable | | | |
| | | Domain | | | |
| TAU1239 | Tau (421) | Light Chain | 1G11A10 | WO2017027685A2 SEQ ID NO: | 22217 |
| | | Variable | | 16 | |
| | | Domain | | | |
| TAU1240 | Tau pS404 | Light chain | 4E6G7 | WO2017027691A1 SEQ ID NO: 9 | 22218 |
| | | variable | | | |
| | | domain | | | |
| TAU1241 | Tau (421) | Light Chain | 5G2A3 | WO2017027685A2 SEQ ID NO: | 22219 |
| | | Variable | | 36 | |
| | | Domain | | | |
| TAU1242 | Tau | Light chain | IPN001 VL | U.S. Pat. No. 9,567,395 SEQ ID NO: 17 | 22220 |
| | | variable | | | |
| | | region | | | |
| TAU1243 | Tau | Light chain | IPN002 VL | U.S. Pat. No. 9,567,395 SEQ ID NO: 19 | 22221 |
| | | variable | | | |
| | | region | | | |
| TAU1244 | Tau | Light chain | ACI-35-1D2- | U.S. Pat. No. 9,540,434 SEQ ID NO: 87 | 22222 |
| | | variable | Ab1 | | |
| | | region (VK) | | | |
| TAU1245 | Tau | Light chain | ACI-35-2A1- | U.S. Pat. No. 9,540,434 SEQ ID NO: 117 | 22223 |
| | | variable | Ab1 | | |
| | | region (VK) | | | |
| TAU1246 | Tau | Light chain | ACI-35-2A1- | U.S. Pat. No. 9,540,434 SEQ ID NO: 110 | 22224 |
| | | variable | Ab2 | | |
| | | region (VK) | | | |
| TAU1247 | Tau | Light chain | ACI-35-2G5- | U.S. Pat. No. 9,540,434 SEQ ID NO: 112 | 22225 |
| | | variable | AB1 | | |
| | | region (VK) | | | |
| TAU1248 | Tau | Light chain | ACI-35-2G5- | U.S. Pat. No. 9,540,434 SEQ ID NO: 114 | 22226 |
| | | variable | AB2 and ACI- | | |
| | | region (VK) | 35-2G5-AB3 | | |
| TAU1249 | Tau | Light chain | ACI-35-4A6- | U.S. Pat. No. 9,540,434 SEQ ID NO: 85 | 22227 |
| | | variable | Abl | | |
| | | region (VK) | | | |
| TAU1250 | Tau | Light chain | ACI-35-4A6- | U.S. Pat. No. 9,540,434 SEQ ID NO: 119 | 22228 |
| | | variable | Ab2 | | |
| | | region (VK) | | | |
| TAU1251 | Tau | Light chain | IPN002 Vk | U.S. Pat. No. 9,567,395 SEQ ID NO: 32 | 22229 |
| | | variable | variant 1 | | |
| | | region, | | | |
| | | humanized | | | |
| TAU1252 | Tau | Light chain | IPN002 Vk | U.S. Pat. No. 9,567,395 SEQ ID NO: 33 | 22230 |
| | | variable | variant 2 | | |
| | | region, | | | |
| | | humanized | | | |
| TAU1253 | Tau | Light chain | IPN002 Vk | U.S. Pat. No. 9,567,395 SEQ ID NO: 34 | 22231 |
| | | variable | variant 3 | | |
| | | region, | | | |
| | | humanized | | | |
| TAU1254 | Tau | Light chain | IPN002 Vk | U.S. Pat. No. 9,567,395 SEQ ID NO: 35 | 22232 |
| | | variable | variant 4 | | |
| | | region, | | | |
| | | humanized | | | |
| TAU1255 | Tau (pS422) | Light chain | VL31A1 | US20160376352A1 SEQ ID NO: | 22233 |
| | | variant 18 | | 66 | |
| TAU1256 | Tau (pS422) | Light chain | VL49G1 | US20160376352A1 SEQ ID NO: | 22234 |
| | | variant 19 | | 67 | |
| TAU1257 | Tau (pS422) | Light chain | VL35F2 | US20160376352A1 SEQ ID NO: | 22235 |
| | | variant 20 | | 68 | |
| TAU1258 | Tau (pS422) | Light chain | VL53A2 | US20160376352A1 SEQ ID NO: | 22236 |
| | | variant 21 | | 69 | |
| TAU1259 | Tau (pS422) | Light chain | VL35G4 | US20160376352A1 SEQ ID NO: | 22237 |
| | | variant 22 | | 78 | |
| TAU1260 | Tau (p$422) | Light chain | VL4G1 | US20160376352A1 SEQ ID NO: | 22238 |
| | | variant 24 | | 86 | |
| TAU1261 | Tau | Light chain | C2N-8E12 | WO2016201434A2 SEQ ID NO: 5 | 22239 |
| | | variant gVL1 | | | |
| TAU1262 | Tau | Light chain | C2N-8E12 | WO2016201434A2 SEQ ID NO: 6 | 22240 |
| | | variant gVL2 | | | |
| TAU1263 | Tau | Light chain | C2N-8E12 | WO2016201434A2 SEQ ID NO: 7 | 22241 |
| | | variant gVL3 | | | |
| TAU1264 | Tau | Light chain | C2N-8E12 | WO2016201434A2 SEQ ID NO: 8 | 22242 |
| | | variant gVL4 | | | |
| TAU1265 | Tau (421) | Light chain | 5B3C11 | WO2017027685A2 SEQ ID NO: | 22243 |
| | | VL1 variable | | 24 | |
| | | domain | | | |
| TAU1266 | Tau (421) | Light chain | 5B3C11 | WO2017027685A2 SEQ ID NO: | 22244 |
| | | VL2 variable | | 28 | |
| | | domain | | | |
| TAU1267 | Tau | Light chain; | | WO2017005734A1 SEQ ID NO: | 22245 |
| | | humanized | | 24 | |
| TAU1268 | Tau | Light chain; | | WO2017005732A1 SEQ ID NO: | 22246 |
| | | humanized | | 30 | |
| TAU1269 | Tau | Light chain; | | WO2017005732A1 SEQ ID NO: | 22247 |
| | | humanized | | 31 | |
| TAU1270 | Tau | Light chain; | | WO2017005732A1 SEQ ID NO: | 22248 |
| | | humanized | | 34 | |
| TAU1271 | Tau | Light chain; | | WO2017005732A1 SEQ ID NO: | 22249 |
| | | humanized | | 35 | |
| TAU1272 | Tau (421) | scFv | 1G10D2 | WO2017027685A2 SEQ ID NO: | 22250 |
| | | | | 47 | |
| TAU1273 | Tau (421) | scFv | 1G10D2 | WO2017027685A2 SEQ ID NO: | 22251 |
| | | | | 48 | |
| TAU1274 | Tau (421) | scFv | 1G10D2 | WO2017027685A2 SEQ ID NO: | 22252 |
| | | | | 49 | |
| TAU1275 | Tau (421) | scFv | 1G10D2 | WO2017027685A2 SEQ ID NO: | 22253 |
| | | | | 50 | |
| TAU1276 | Tau (421) | scFv | 1G10D2 | WO2017027685A2 SEQ ID NO: | 22254 |
| | | | | 51 | |
| TAU1277 | Tau (421) | scFv | 1G10D2 | WO2017027685A2 SEQ ID NO: | 22255 |
| | | | | 52 | |
| TAU1278 | Tau (421) | scFv | 1G10D2 | WO2017027685A2 SEQ ID NO: | 22256 |
| | | | | 53 | |
| TAU1279 | Tau (421) | scFv | 1G10D2 | WO2017027685A2 SEQ ID NO: | 22257 |
| | | | | 54 | |
| TAU1280 | Tau (421) | scFv | 1G10D2 | WO2017027685A2 SEQ ID NO: | 22258 |
| | | | | 55 | |
| TAU1281 | Tau (421) | scFv | 1G10D2 | WO2017027685A2 SEQ ID NO: | 22259 |
| | | | | 56 | |
| TAU1282 | Tau (421) | scFv | 1G11A10 | WO2017027685A2 SEQ ID NO: | 22260 |
| | | | | 57 | |
| TAU1283 | Tau (421) | scFv | 1G11A10 | WO2017027685A2 SEQ ID NO: | 22261 |
| | | | | 58 | |
| TAU1284 | Tau (421) | scFv | 1G11A10 | WO2017027685A2 SEQ ID NO: | 22262 |
| | | | | 59 | |
| TAU1285 | Tau (421) | scFv | 1G11A10 | WO2017027685A2 SEQ ID NO: | 22263 |
| | | | | 60 | |
| TAU1286 | Tau (421) | scFv | 1G11A10 | WO2017027685A2 SEQ ID NO: | 22264 |
| | | | | 61 | |
| TAU1287 | Tau (421) | scFv | 1G11A10 | WO2017027685A2 SEQ ID NO: | 22265 |
| | | | | 62 | |
| TAU1288 | Tau (421) | scFv | 1G11A10 | WO2017027685A2 SEQ ID NO: | 22266 |
| | | | | 63 | |
| TAU1289 | Tau (421) | scFv | 1G11A10 | WO2017027685A2 SEQ ID NO: | 22267 |
| | | | | 64 | |
| TAU1290 | Tau (421) | scFv | 1G11A10 | WO2017027685A2 SEQ ID NO: | 22268 |
| | | | | 65 | |
| TAU1291 | Tau (421) | scFv | 1G11A10 | WO2017027685A2 SEQ ID NO: | 22269 |
| | | | | 66 | |
| TAU1292 | Tau pS404 | scFv | 4E6G7 | WO2017027691A1 SEQ ID NO: | 22270 |
| | | | | 17 | |
| TAU1293 | Tau (421) | scFv | 5B3C11 (VL1) | WO2017027685A2 SEQ ID NO: | 22271 |
| | | | | 67 | |
| TAU1294 | Tau (421) | scFv | 5B3C11 (VL1) | WO2017027685A2 SEQ ID NO: | 22272 |
| | | | | 68 | |
| TAU1295 | Tau (421) | scFv | 5B3C11 (VL1) | WO2017027685A2 SEQ ID NO: | 22273 |
| | | | | 59 | |
| TAU1296 | Tau (421) | scFv | 5B3C11 (VL1) | WO2017027685A2 SEQ ID NO: | 22274 |
| | | | | 70 | |
| TAU1297 | Tau (421) | scFv | 5B3C11 (VL1) | WO2017027685A2 SEQ ID NO: | 22275 |
| | | | | 71 | |
| TAU1298 | Tau (421) | scFv | 5B3C11 (VL1) | WO2017027685A2 SEQ ID NO: | 22276 |
| | | | | 72 | |
| TAU1299 | Tau (421) | scFv | 5B3C11 (VL1) | WO2017027685A2 SEQ ID NO: | 22277 |
| | | | | 73 | |
| TAU1300 | Tau (421) | scFv | 5B3C11 (VL1) | WO2017027685A2 SEQ ID NO: | 22278 |
| | | | | 74 | |
| TAU1301 | Tau (421) | scFv | 5B3C11 (VL1) | WO2017027685A2 SEQ ID NO: | 22279 |
| | | | | 75 | |
| TAU1302 | Tau (421) | scFv | 5B3C11 (VL1) | WO2017027685A2 SEQ ID NO: | 22280 |
| | | | | 76 | |
| TAU1303 | Tau (421) | scFy | 5B3C11 (VL2) | WO2017027685A2 SEQ ID NO: | 22281 |
| | | | | 77 | |
| TAU1304 | Tau (421) | scFv | 5B3C11 (VL2) | WO2017027685A2 SEQ ID NO: | 22282 |
| | | | | 78 | |
| TAU1305 | Tau (421) | scFv | 5B3C11 (VL2) | WO2017027685A2 SEQ ID NO: | 22283 |
| | | | | 79 | |
| TAU1306 | Tau (421) | scFv | 5B3C11 (VL2) | WO2017027685A2 SEQ ID NO: | 22284 |
| | | | | 80 | |
| TAU1307 | Tau (421) | scFv | 5B3C11 (VL2) | WO2017027685A2 SEQ ID NO: | 22285 |
| | | | | 81 | |
| TAU1308 | Tau (421) | scFv | 5B3C11 (VL2) | WO2017027685A2 SEQ ID NO: | 22286 |
| | | | | 82 | |
| TAU1309 | Tau (421) | scFv | 5B3C11 (VL2) | WO2017027685A2 SEQ ID NO: | 22287 |
| | | | | 83 | |
| TAU1310 | Tau (421) | scFv | 5B3C11 (VL2) | WO2017027685A2 SEQ ID NO: | 22288 |
| | | | | 84 | |
| TAU1311 | Tau (421) | scFv | 5B3C11 (VL2) | WO2017027685A2 SEQ ID NO: | 22289 |
| | | | | 85 | |
| TAU1312 | Tau (421) | sc.Fv | 5B3C11 (VL2) | WO2017027685A2 SEQ ID NO: | 22290 |
| | | | | 86 | |
| TAU1313 | Tau (421) | scFv | 5G2A3 | WO2017027685A2 SEQ ID NO: | 22291 |
| | | | | 87 | |
| TAU1314 | Tau (421) | scFv | 5G2A3 | WO2017027685A2 SEQ ID NO: | 22292 |
| | | | | 88 | |
| TAU1315 | Tau (421) | scFv | 5G2A3 | WO2017027685A2 SEQ ID NO: | 22293 |
| | | | | 89 | |
| TAU1316 | Tau (421) | sc.Fv | 5G2A3 | WO2017027685A2 SEQ ID NO: | 22294 |
| | | | | 90 | |
| TAU1317 | Tau (421) | scFv | 5G2A3 | WO2017027685A2 SEQ ID NO: | 22295 |
| | | | | 91 | |
| TAU1318 | Tau (421) | scFv | 5G2A3 | WO2017027685A2 SEQ ID NO: | 22296 |
| | | | | 92 | |
| TAU1319 | Tau (421) | scFv | 5G2A3 | WO2017027685A2 SEQ ID NO: | 22297 |
| | | | | 93 | |
| TAU1320 | Tau (421) | scFv | 5G2A3 | WO2017027685A2 SEQ ID NO: | 22298 |
| | | | | 94 | |
| TAU1321 | Tau (421) | scFv | 5G2A3 | WO2017027685A2 SEQ ID NO: | 22299 |
| | | | | 95 | |
| TAU1322 | Tau (421) | scFv | 5G2A3 | WO2017027685A2 SEQ ID NO: | 22300 |
| | | | | 96 | |

[0398] Payload regions of the viral genomes of the disclosure may encode any anti-tau antibodies, or tau-associated antibodies, not limited to those described in Table 13, including antibodies that are known in the art and/or antibodies that are commercially available. This may include fragments of such antibodies or antibodies that have been developed to comprise one or more of such fragments (e.g., variable domains or complementarity determining regions (CDRs)). Anti-tau antibodies that may be encoded by payloads of the disclosure include, but are not limited to, AT8 (pSer²⁰²/pThr²⁰²: ThermoFisher, Waltham, MA; described in International Publication No, WO1995017429, the contents of which are herein incorporated in their entirety), AT100 (pSer²¹²/pSer²¹⁴; ThermoFisher, Waltham, MA; described in U.S. Pat. No. 6,121,003, the contents of which are herein incorporated in their entirety), AT180 (pThr²³¹; ThermoFisher, Waltham, MA; described in International Publication No. WO1995017429, the contents of which are herein incorporated by reference in their entirety), MC-1 (Tau^{2-18/31 2-342} conformational antibody; as described in international Publication WO199620218, the contents of which are herein incorporated by reference in their entirety), MC-6 (pSer²³⁵; described in U.S. Pat. No. 5,811,310, the contents of which are herein incorporated in their entirety), TG-3 (pThr²³¹; described in Jicha, G A et al., 1997 J Neurochem 69(5):2087-95, the contents of which are herein incorporated by reference in their entirety), CP13 (pSer²⁰²), CP27 (human Tau¹³⁰⁻¹⁵⁰), Tau12 (human Tau⁹⁻¹⁸; Abcam, Cambridge, MA), TG5 (Tau²⁰²; described in U.S. Pat. No. 5,811,310), described in U.S. Pat. No. 5,811,310), PHF-1 (pSer³⁹⁶/pSer⁴⁰⁴ described in International Publication WO199620218), Alz50 (Tau⁷⁻⁹ and Tau³¹²⁻³⁴² conformational epitope; described in U.S. Pat. No. 5,811,310 and Carmel, G et. al. 1996 J Biol Chem 271(51):32780-32795 and Jicha, G A et al. 1997 J Neurosci Res 48(2):128-132, the contents of each of which are herein incorporated by reference in their entirety), Tau-1 (de-phosphorylated Ser¹⁹⁵/Ser¹⁹⁸/Ser¹⁹⁹/Ser²⁰²; ThermoFisher Waltham, MA), Tau46 Abcam, Cambridge, MA), pS199 (ThermoFisher, Waltham, MA), pT205, pS396 (ThermoFisher, Waltham, MA; described in U.S. Pat. No. 8,647,631, the contents of which are herein incorporated by reference in their entirety), pS404 (ThermoFisher, Waltham, MA; described in U.S. Pat. No. 8,647,631, the contents of which are herein incorporated by reference in their entirety), pS422 (ThermoFisher, Waltham, MA), A0024 (hTau²⁴³⁻⁴⁴¹ Dako, Glostrup, Denmark), HT7 (hTau¹⁵⁹⁻¹⁶³; ThermoFisher, Waltham, MA), Tau2 (hTau⁵²⁻⁶⁸, Abcam, Cambridge, MA), AD2 (pSer³⁹⁶/pSer⁴⁰⁴, Bio-Rad Laboratories, Hercules, CA), AT120 (hTau²¹⁶⁻²²⁴; described in U.S. Pat. No. 5,843,779, the contents of which are herein incorporated by reference in their entirety), AT270 (pThr¹⁸¹; ThermoFisher, Waltham, MA), 12E8 (pSer²⁶² and/or Ser 356); K9JA (hTau 243-441; Dako, Caprinteria, CA), TauC3 (hTau Asp441; Santa Cruz Biotechnology, Dallas, TX; described in United States Patent Publication US20120244174 and Gamblin, T C et al 2003 PNAS 100(17):10032-7, the contents of each of which are herein incorporated by reference in their entirety), 4E6G7 (pSer³⁹⁶/pSer⁴⁰⁴; described in United States Patent Publication No. US2010316564 and Congdon, E. E. et al., 2016. Molecular Neurodegeneration August 30; 11(1):62, the contents of which are herein incorporated by reference in their entirety), 6B2 and variants thereof, described in International Patent Publication WO2016007414, the contents of which are herein incorporated by reference in their entirety, RZ3 (pThr²³¹), PG5 (pSer⁴⁰⁹), BT2 (pS^{199/202}), DA31 (Tau 150190), CP9 (pThr²³¹) Ta1505 (phospho site between Tau^{410/421}, particularly pSer⁴¹³ as described in United States Patent Publication US20150183854 and Umeda, T. et al., 2015. Ann Clin Trans Neurol 2(3): 241-255, the contents of each of which are herein incorporated by reference in their entirety), PHF-6 (pThr²³⁷, as described in Hoffman R et. al., 1997, Biochemistry 36; 8114-8124, the contents of which are herein incorporated by reference in their entirety), PHF-13 (pSer³⁹⁶, as described in Hoffman R et. al., 1997. Biochemistry 36; 8114-8124); 16B5 (Tau 25-46, as described in United States Publication US20160031976, the contents of which are herein incorporated by reference in their entirety), DC8E8 (as described in United States Patent Publication US20150050215, the contents of which are herein incorporated by reference in their entirety), PT1 or PT3 (as described in U.S. Pat. No. 9,371,376, the contents of which are herein incorporated by reference in their entirety), 4G11 (Tau⁵⁷⁻⁶⁴, as described in International Publication WO2016137950, the contents of which are herein incorporated by reference in their entirety), 1A6 (Tau⁷⁻¹⁷ and Tau²¹⁵⁻²²⁰, as described in International Publication WO2016137950), Tau15 or Tau81 (as described in International Publication WO2016055941, the contents of which are herein incorporated by reference in their entirety), TOC-1 (dimerized or aggregated tau, as described in International Publication WO2012149365, the contents of which are herein incorporated by reference in their entirety), pS404IgG2a/k (Neotope Biosciences, South San Francisco, CA; as described in Ittner et al., 2015. Neurochemistry 132:135145, the contents of which are herein incorporated by reference in their entirety), TOMA. (tau oligomer monoclonal antibody; as described in U.S. Pat. Nos. 8,778,343 and 9,125,846; International Publications WO2012051498 and WO2011026031, or United States Publication Nos. US20150004169 and US20150322143, and Castillo-Carranza, D L et al., 2014 J Neurosci 34(12)426072, the contents of each of which are herein incorporated by reference in their entirety), TTC-99 (oligomeric tau), BMS-986168 (as described in United States Patent Publication US2014294831, international Publication WO2015081085 and U.S. Pat. No. 8,980,271, the contents of which are herein incorporated by reference in their entirety), 3H3 (pan-amyloid epitope; described in Levites, et al 2015 J Neurosci 35(16)6265-76, the contents of which are herein incorporated by reference in their entirety), cis-pT231 (described in International Publications WO2012149334 and WO2011056561, the contents of which are herein incorporated by reference in their entirety), CP-3 (pSer²¹⁴; described in Jicha et al 1999 J Neurosci 19(17):7486-94, the contents of which are herein incorporated by reference in their entirety), INT1 (Tau²⁻¹⁸; as described in United States Patent Publication 20160031978, the contents of which are herein incorporated by reference in their entirety), Tau-nY29 (nTyr²⁹; described in Reynolds M R, et al., 2006 J Neurosci 26(42):10636-45, the contents of which are herein incorporated by reference in their entirety), Tau-nY197 (nTyr¹⁹⁷; described in Reyes, J F et al., 2012 Acta Neuropathol 123(1):119-32, the contents of which are herein incorporated by reference in their entirety), Tau-nY394 (nTyr³⁹⁴; described in Reyes, J F et al 2012), 4E4 (Tau³³⁷⁻³⁴³ Tau 387-397; described in International Publication WO2012049570 and United States Patent Publication US20150252102, the contents of each of which are herein incorporated by reference in their entirety), ADx210 (described in United States Patent Publication US20140161875, the contents of which are herein incorporated by reference in their entirety), ADx215 (described in United States Patent Publication US20140161875), ADx202 (as described in International Publication WO2015004163, the contents of which are herein incorporated by reference in their entirety), AP422 (pSer⁴²² described in Hasegawa, M et al 1996 FEBS Lett 384:25-30, the contents of which are herein incorporated by reference in their entirety), Tau5 (Tau²¹⁰⁻²⁴¹), RTA2 (Tau²⁷³⁻²⁸³), RTAC (Tau⁴²⁶⁻⁴⁴¹), RTA1 (Tau²⁵⁷⁻²⁷⁴), T46 (Tau³⁹⁵⁻⁴³²), T49, MIGT4, O.BG.15, 525, 3-39, 4F1, MapTau (Tau⁹⁵⁻¹⁰⁸; SMI Covance), T1, HYB33801 (Tau 5-12), Tau13 (Tau t-r8), B11E8, 5J20 (14-3-3 tau), DC25 (71Tau 347-353), DC39N11 (Tau⁴⁵⁻⁷³), DC-11 (Tau³²¹⁻³⁹¹; described in U.S. Pat. No. 7,746,180, the contents of which are herein incorporated by reference in their entirety), DC39 (Tau⁴⁰¹⁻⁴¹¹), DC4R, n847 (nitrated tau), SPM452, T14, 1E1/A6 (Tau²⁷⁵⁻²⁹¹), 5E2, 8E6/C11 (Tau²⁰⁹⁻²²⁴), 2E12 (pT231), NFT200, 248E5 (Tau 3-14), IG2 (Thr¹⁷⁵, Thr¹⁸¹, Thr²³¹; as described in International Publication WO2016041553, the contents of which are herein incorporated by reference in their entirety), YP3 (as described in WO2007019273, the contents of which are herein incorporated by reference in their entirety), YP4 (as described in WO2007019273) and 14-3-3 Tau (pSer14-3-3 binding motif; Abcam, Cambridge, MA). Further, anti-tau antibodies may be any of those listed in the antibody section of Alzforum.org or at the Antibody Resource Page.com, the contents of each of which are herein incorporated by reference in their entirety. Further, anti-tau antibodies may be any commercially available anti-tau antibody. Additional antibodies may include any of those taught in Petry, F. R. et al., 2014. PLoS One 9(5): e94251, the contents of which are herein incorporated by reference in their entirety. In one example, such antibodies may include any of those described in Jicha, G. A. et 1997. Journal of Neuroscience Research 48:128-132, the contents of which are herein incorporated by reference in their entirety. One such antibody, MC-1, recognizes distinct conformations of tau that are associated with neurological disease.

[0399] In some embodiments, the viral particles may have a payload region comprising any of the anti-tau antibodies as described in international Publication WO2017189963, the contents of which are herein incorporated by reference in their entirety. As a non-limiting example, the payload region may comprise one or more of the anti-tau antibodies as described in Table 13 of International Publication WO2017189963. In some embodiments, the payload region encodes one or more anti-tau antibodies selected from SEC) ID NO: 2948-4269 as described in WO2017189963.

[0400] In some embodiments, payloads may encode anti-tau antibodies (or fragments thereof) taught in United States Publication No. US2014294831, the contents of which are herein incorporated by reference in their entirety. Such antibodies may include IPN001 and/or IPN002 antibodies or fragments of such antibodies. In some cases, variable domains of IPN002 as presented in FIGS. 2A and 2B of US2014294831 may be used (e.g., incorporated into another antibody). In some cases, CDR regions of IPN002 as underlined in FIGS. 2A and 2B may be used (e.g., incorporated into another antibody or used to prepare humanized versions of IPN002). In some cases, anti-tau antibodies may include any of the IPN001 or IPN002 antibody variants taught in US2014294831 (e.g., in FIGS. 9-16 of that publication). In some embodiments, this antibody is also referred to as BMS-986168.

[0401] In some cases, payloads may encode anti-tau antibodies (or fragments thereof) taught in Otvos, L. et al., 1994, J Neurosci. Res 39(6):669-73, the contents of which are herein incorporated by reference in their entirety. Such antibodies may include monoclonal antibody PHF-1 or fragments thereof. The PIF-1 antibody binds to tau paired helical filaments, a pathological conformation of tau, found in certain neurological disorders, including Alzheimer's disease. Further, antibody affinity is increased when either serine 396 or serine 404 of tau is phosphorylated and even further increased when both are phosphorylated.

[0402] In some embodiments, payloads may encode anti-tau antibodies (or fragments thereof) taught in U.S. Pat. No. 5,811,310, the contents of which are herein incorporated by reference in their entirety. Such embodiments may include monoclonal antibodies PHF-1 or MC-1 or fragments thereof. MC-1 is a conformational antibody binding to the epitopes presented in Jicha, CI. A., et al., 1997. J Neurosci Res 48(128-132).

[0403] In some embodiments, payloads may encode anti-tau antibodies (or fragments thereof) taught in International Publication Number WO2015035190, the contents of which are herein incorporated by reference in their entirety. Such embodiments may include, but are not limited to, antibodies PHF-1 or MC-1 or fragments thereof. Viral genomes of the viral particles of the present disclosure may comprise or encode any of SEQ ID NO: 1-6 of WO2015035190.

[0404] Anti-tau antibodies (or fragments thereof) encoded by viral genomes of the disclosure may include antibodies that bind to one or more of the epitopes presented in Otvos, L. et al., 1994. J Neurosci, Res 39(6):669-73 (e.g., any of those presented in Table 1 of that publication).

[0405] In some embodiments, payloads may encode anti-tau antibodies (or fragments thereof) taught in U.S. Pat. No. 7,746,180, the contents of which are herein incorporated by reference in their entirety. Such embodiments may include antibody DC-11 or fragments thereof.

[0406] In some embodiments, the antibodies encoded by the viral genomes of the present disclosure may target any of the antigenic regions or epitopes described in United States Patent Publication No US2008050383 or US20100316564, the contents of which are herein incorporated by reference in their entirety. In some embodiments, the antibody targets pS396/pS404. Such embodiments may include antibody 4E6 and/or variants or fragments thereof. The affinity of antibody 4E6 for soluble PHF and its ability to reduce soluble phospho tau has been described in Congdon, E. E. et al., 2016. Molecular Neurodegeneration August 30; 11(1):62, the contents of which are herein incorporated by reference in their entirety.

[0407] In some embodiments, the antibodies encoded by the viral genomes of the present disclosure may target any of the antigenic regions or epitopes described in International Patent Publication WO1998022120, the contents of which are herein incorporated by reference in their entirety. In some embodiments, the antibody may be PHF-6 (pT231), or fragments or variants thereof. In another embodiment, the antibody may be PHF-13 (pS396), or a fragment of variant thereof. These antibodies are further described in Hoffman et al., 1997. Biochemistry 36: 8114-8124, the contents of which are herein incorporated by reference in their entirety.

[0408] In some embodiments, the antibodies encoded by the viral genomes of the present disclosure may target any of the antigenic regions or epitopes described in International Publication WO2016126993, the contents of which are herein incorporated by reference in their entirety. The antibodies may be derived from any of the tau epitopes described in Table A of WO2016126993. In some embodiments, the antibody of the present disclosure may comprise any of the sequences listed in Table B or Table 1 of WO2016126993.

[0409] In some embodiments, the antibodies encoded by the viral genomes of the present disclosure may target any of the antigenic regions or epitopes described in United States Patent Publication US20120244174, the contents of which are herein incorporated by reference in their entirety. In some embodiments, the antibody may bind to caspase-cleaved tau. In some embodiments, the epitope for antibodies targeting caspase cleaved tau is aspartic acid 421. In another embodiment, the epitope for antibodies targeting caspase cleaved tau may be the C-terminus after glutamic residue Glu391. In yet another embodiment, the epitope for antibodies targeting caspase cleaved tau may be at the N-terminus at aspartic acid residue 13. In another embodiment, the antibody may be TauC3.

[0410] In some embodiments, the antibodies encoded by the viral genomes of the present disclosure may target any of the antigenic regions or epitopes described in United States Patent Publication US20160031978, the contents of which are herein incorporated by reference in their entirety. In some embodiments, the antibody may bind to tau N-terminal residues associated with the PP1/GSK3 signaling cascade. In some embodiments, the antibody may be TNT1.

[0411] In some embodiments, the antibodies encoded by the viral genomes of the present disclosure may be any of those described in d'Abramo, C et al., 2015. PLOS One 10(8):e0135774, the contents of which are herein incorporated by reference in their entirety. In some embodiments, the antibody may be CP13 (pS202), or a fragment or variant thereof. In another embodiment, the antibody may be RZ3 (pT231), or a fragment or variant thereof. In another embodiment, the antibody may be PG-5 (pS409), or a fragment or variant thereof.

[0412] Anti-tau antibodies or fragments thereof encoded by the viral genomes of the present disclosure may target tau in any antigenic form. As non-limiting examples, antigenic tau may be an unphosphorylated or unmodified tau protein, a phosphorylated or otherwise post-translationally modified tau protein (O-GlnAcylated, or nitrosylated), an oligomeric species of tau protein, a soluble species of tau protein, an insoluble species of tau protein, a conformationally abnormal species of tau protein, a neuropathological form of tau protein and/or a neurofibrillary tangle or a precursor thereof.

[0413] Anti-tau antibodies or fragments thereof encoded by the viral genomes of the disclosure, may target any antigenic region or epitope along the full length of any of the six human tau protein isoforms. As non-limiting examples, the targeted antigenic peptides of the tau protein may be any of the following phosphorylated sites pT50, pS396, pS396-pS404, pS404, pS396-pS404-pS422, pS409, pS413, pS422, pS198, pS199, P5199-0202,0202, pT205, p717212, pS214, pT212-pS214, p717181, pT231, cis-pT231, pS235, pS238, pT245, 135262, pY310, pY394, pY324, pY356, pTau¹⁷⁷⁻¹⁸⁷, pY610, pS622, nitrosylated tau (nY18, nY29), methylated tau (di-meK281, dimeK311), O-GlnAcylated tau at 5400, any of the following acetylated sites acK174, acK274, acK280, acK281 and/or any combination thereof. Acetylated tau proteins and associated antigenic peptides are described in Min et al., 2010, Neuron., 67, 953-966, Min et al., 2015, Nature Medicine., 10, 1154-1162, Cohen et al., 2011, Nature Communications., 2, 252, Gorsky et al., 2016, Scientific Report., 6, 22685, Tracy et al. 2016, Neuron., 90, 245-260, the contents of each of which are herein incorporated by reference in their entirety. Phosphorylated tau proteins and associated antigenic peptides are described in Asuni et al., 2007, Jr Neurosci., 27, 9115-9129, Boutajangout et al., 2010, 0.1 Neurosci., 30, 16559-16566, Boutajangout et al., 2011, J Neurochem., 118, 658-667, Chai et al., 2011, Jr Biol Chem., 286, 34457-34467, Gu et al., 2011, J Bio Chem., 288, 33081-33095, Sankaranarayanan et al., 2015, PloS One, 10, e0125614, Ittner et al., 2015, J Neurochem., 132, 135-145, D'Abramo et al., 2016, Neurobiol Aging., 37, 58-65, Collin et al. 2014, Brain., 137, 2834-2846, Kondo et al., 2015, Nature., 523, 431-436, the contents of each of which are herein incorporated by reference in their entirety.

[0414] In some embodiments, the antibody encoded by the viral genomes of the present disclosure may be a pS409 targeting antibody as described in Lee et al., 2016, Cell Reports, 16, 1690-1700, or International Patent Publication WO2013151762, the contents of each of which are herein incorporated by reference in their entirety. In some embodiments, this antibody may be RG6100 or 8071057 or variants or fragments thereof.

[0415] In some embodiments, the antibody encoded by the viral genomes of the present disclosure may be a pS413 targeting antibody as described in Umeda et al., 2015, Ann Clin Trans Neurol., 2(3), 241-255 or International Patent Publication WO2013180238, the contents of each of which are herein incorporated by reference in their entirety. In some embodiments, the antibody is Ta1505 or variants or fragments thereof.

[0416] In some embodiments, the antibody encoded by the viral genomes of the present disclosure may target a tau epitope with amino acid residues 210-275, more specifically pS238 and/or pT245, as described in International Publication WO2011053565, the contents of which are herein incorporated by reference in their entirety.

[0417] In some embodiments, the CDRs of an antibody encoded by the viral genomes of the present disclosure may be any of those listed in or incorporated in the antibody sequences of Table 13. In some embodiments, the CDRs may be any of those described in International Publication WO2015122922, the contents of which are herein incorporated by reference in their entirety. In some embodiments, a CDR may be any of those chosen from the group of SEQ 11 NO: 41, 49, or 57 of WO2015122922. Further a CDR of an antibody encoded by the viral genomes of the present disclosure may have 50%, 60%, 70%, 80%, 90%, or 95% identity to SEQ. ID NO: 41, 49, or 57 of WO2015122922.

[0418] In some embodiments, the antibodies encoded by the viral genomes of the present disclosure may be any of those described in International Publication WO2016097315, the contents of which are herein incorporated by reference in their entirety. In some embodiments, the antibody may have an amino acid sequence as shown by SEQ ID NO: 2, 11, 20, 29, 38, 47, 56, 65, 74, 83, 92, 101, 110, 119, 128, 137, 146, 155, 164, 173, 182, 191, 209, 218, 226, or 227 of WO2016097315.

[0419] In some embodiments, the antibodies encoded by the viral genomes of the present disclosure may be a multispecific blood brain barrier receptor antibody that also targets tau, as described in International Publication WO2016094566, the contents of which are herein incorporated by reference in their entirety. In some embodiments, the antibody may have a sequence as shown by SEQ ID NO: 1, 2, 17, 18, 33, 34, 49, 50, 65, 66, 81, 82, 916, 25-32, 41-48, 57-64, 73-80, 8996 of WO2016094566.

[0420] In some embodiments, the antibodies (or fragments thereof) encoded by the viral genomes of the present disclosure may be any of those taught in U.S. Pat. Nos. 8,778,343 and 9,125,846, International Publications WO2012051498 and WO2011026031, or United States Publication Nos. US20150004169 and US20150322143, the contents of each of which are herein incorporated by reference in their entirety. Such antibodies may include those that bind to oligomeric species of tau. Further, such an antibody may be referred to as TOMA (tau oligomer monoclonal antibody), as described in Castillo-Carranza et at (Castillo-Carranza, D L et al., 2014 J Neurosci 34(12)4260-72) the contents of which are herein incorporated by reference in their entirety. In some embodiments, the antibody that binds oligomeric tau may be TTC-99.

[0421] In some embodiments, the antibodies (or fragments thereof) encoded by the viral genomes of the present disclosure may be any of those taught in international Publications WO2014059442, the contents of which are herein incorporated by reference in their entirety. Such antibodies may include those that bind to oligomeric species of tau.

[0422] In some embodiments, the antibodies (or fragments thereof) encoded by the viral genomes of the present disclosure may be any of those taught in the International Publications WO2014008404 and WO2016126993, United States Patent Publication 0520150183855, Yanamandra, K et al., 2013 Neuron 80(2):402-14 and Yanamandra, K et al 2015 Ann Clin Transl Neurol 2(3):278-88, the contents of each of which are herein incorporated by reference in their entirety. Such antibodies may block tau seeding. Non-limiting examples of antibodies described in these publications include HJ8.1.1, HJ8.1.2, HJ8.2, HJ8.3, HJ8.4, HJ8.5, HJ8.7, R18.8, HJ9.1, HJ9.2, HJ9,3, HJ9.4, HJ9.5, and variants thereof. Non-limiting examples of targeted epitopes of tau may include amino acids 2234, 385-391, 405-411, 3-6, 118-122, 386-401, 7-13, and/or 272-281 of human tau.

[0423] In some embodiments, the antibodies (or fragments thereof) encoded by the viral genomes of the present disclosure may be any of those taught in the international Publications WO2002062851, the contents of which are herein incorporated by reference in their entirety.

[0424] In some embodiments, the antibodies (or fragments thereof) encoded by the viral genomes of the present disclosure may be as described in Bright, J et al., 2015 Neurobiol of Aging 36:693-709; Pedersen, J T and Sigurdsson E M, 2015 Trends Mol Med 21(6):394-402; Levites, Y et al 2015 J Neurosci 35(16)6265-76; Jicha et al 1999 J Neurosci 19(17):7486-94; Reyes J F et al., 2012 Acta Neuropathol 123(1):119-32; Reynolds MIR, et al., 2006 J Neurosci. 26(42):10636-45; Gamblin, T C et al 2003 PNAS 100(17):10032-7; Castillo-Carranza, D L et al., 2014 J Neurosci 34(12)4260-72; Walls, K C et al., 2014 Neurosci Lett 575:96-100; Yanamandra, K. et al., 2013 Neuron 80(2):402-14; Yanamandra, K. et al 2015 Ann Clin Transl Neurol 2(3):278-88; Allen B, et al., 2002 J Neurosci 22(21):9340-51; Gotz, J et. al., 2010 Biochem Biophys Acta 1802(10):860-71; Hasegawa, M et al 1996 FEBS Lett 384:25-30; Carmel, G et. al. 1996 J Biol Chem 271(50:32780-32795; Jicha, G A et al. 1997 J Neurosci Res 48(2):128-132; Jicha, G A et al., 1997 J Neurochem 69(5):2087-95; the contents of each of which are herein incorporated by reference in their entirety.

[0425] Antibodies or fragments thereof encoded by the viral genomes of the present disclosure may be any commercially available anti-tau antibody known in the art or developed by a person with skill in the art. Non-limiting examples of commercially available anti-tau antibodies include EPR2396(2) (pThr⁵⁰; Abcam, Cambridge, MA), 5H911 (pThr¹⁸¹; ThermoFisher, Waltham, MA), M7004D06 (pThr¹⁸¹; BioLegend, San Diego, CA), 1E7 (pThr¹⁸¹; EMI) Millipore, Billerica, MA), EPR2400 (pSer¹⁹; Abcam, Cambridge, MA), EPR2401Y (pSer¹⁹⁹; Abcam, Cambridge, MA), 2H23L4 (pSer¹⁹⁹; ThermoFisher, Waltham, MA), EPR2402 (pSer²⁰²; Abcam, Cambridge, MA), 10F8 (pSer²⁰²; Abcam, Cambridge, MA), EPR2403(2) (pThr²⁰⁵; Abcam, Cambridge, MA), EPR1884(2) (pSer²¹⁴; Abcam, Cambridge, MA), EPR2488 (pThr²³¹; Abcam, Cambridge, MA), 1H6L6 (pThr²³¹; ThermoFisher, Waltham, MA), 3G3 (pThr²³¹, pSer²³⁵; Abcam, Cambridge, MA), EPR2452 (pSer²³⁵; Abcam, Cambridge, MA), 12610 (pSer²³⁸; Abcam, Cambridge, MA), EPR2454 (pSer²⁶²; Abcam, Cambridge, MA), EPR2457(2) (pSer³²⁴; Abcam, Cambridge, MA), EPR2603 (pSer³⁵⁶; Abcam, Cambridge, MA), EPR2731 (pSer³⁹⁶; Abcam, Cambridge, MA), EPR2605 (pSer⁴⁰⁴; Abcam, Cambridge, MA), EPR2866 (pSer⁴²²; Abcam, Cambridge, MA), 1A4 (pTau¹¹⁷; Origene, Rockville, MD), 7G9 (pTau¹⁷⁷⁻¹⁸⁷; Origene, Rockville, MD), 9B4 (pTau¹⁷⁷⁻¹⁸⁷; Origene, Rockville, MD), 2A4 (pTau¹⁷⁷⁻¹⁸⁷. Origene, Rockville, MD), 9G3 (pTyr¹⁸; NovusBio, Littleton, CO), EPR2455(2) (pSer⁶¹⁰; Abcam, Cambridge, MA), EP2456Y (pSer⁶²²; Abcam, Cambridge, MA; EMD Millipore, Billerica, MA), Slip 151 (PHF Tau⁹⁵⁻¹⁰⁸; BioLegend, San Diego, CA), TOMA-1 (Oligomeric Tau; ENID Millipore, Billerica, MA), Tau-nY18 (nTyr¹⁸; Origene, Rockville, MD; BioLegend, San Diego, CA; EMD Millipore, Billerica, MA), Tau-nY29 (nTyr²⁹; BioLegend, San Diego, CA; EMD Millipore, Billerica, MA; Abcam, Cambridge, MA), 1C9.G6 (di-methyl-Lys²⁸¹; BioLegend, San Diego, CA), 7G5.F4 (di-methyl-Lys³¹¹; BioLegend, San Diego, CA), TNT-1 (Taut-18; EMD Millipore, Billerica, MA), TNT-2 (Tau²⁻¹⁸; EMD Millipore, Billerica, MA), 7B8 (Tate-12; Abcam, Cambridge, MA), Tau-13 (Tau²⁰⁻³⁵; BioLegend, San Diego, CA), 1-100 (Tau¹⁻¹⁰⁰, BioLegend, San Diego, CA), 2G9.F10 (Tau¹⁵⁷⁻¹⁶⁸; BioLegend, San Diego, CA; Origene, Rockville, MD), 39E10 (Tau¹⁸⁹⁻¹⁹⁵; BioLegend, San Diego, CA; Origene, Rockville, MD), 77E9 (Tau 185-195; BioLegend, San Diego, CA; Origene; Rockville, MD), AT8 (pSer²⁰⁵, pSer²⁰⁵; ThermoFisher, Waltham, MA), A.717100 (pSer²¹², pSer²¹⁴; ThermoFisher, Waltham, MA), PHF-6 (pThr²³¹; NovusBio, Littleton, CO; EMD Millipore, Billerica, MA; BioLegend, San Diego, CA; ThermoFisher, Waltham; MA), AT180 (pThr²³¹; ThermoFisher, Waltham, MA), AT270 (pThr¹⁸¹; ThermoFisher, Waltham, MA), PHF-13 (pSer³⁹⁶; ThermoFisher, Waltham, MA; BioLegend, San Diego, CA), Tau³¹⁶⁻⁴²¹ BioLegend, San Diego, CA; EMD Millipore, Billerica, MA; ThermoFisher, Waltham, MA), Tau12 (Tau⁶⁻¹⁸; BioLegend, San Diego, CA; EMD Millipore, Billerica, MA), Tau5 (Tau²¹⁰⁻²⁴¹; BioLegend, San Diego, CA; EMD Millipore, Billerica, MA; Abcam, Cambridge MA; ThermoFisher, Waltham, MA), HT7 (Tau 159-163; ThermoFisher, Waltham, MA), 77G7 (Tau 316-355; BioLegend, San Diego, CA), Tau46 (Tau404-441; BioLegend, San Diego, CA; NovusBio, Littleton, CO; Abcam, Cambridge, MA), UMAB239; Origene, Rockville, MD), UMAB239 (Tau 623-758; Origene, Rockville, MD), OTI13B5 (Tau 623-758; Origene, Rockville, MD) (Tau⁶²³⁻⁷⁵⁸; Origene, Rockville, MD), OTI13B5 (Tau⁶²³⁻⁷⁵⁸; Origene, Rockville, MD), E178 (Tau⁷⁰⁰⁻⁸⁰⁰; Abcam, Cambridge, MA), SP70 (N-terminal Tau; Origene, Rockville, MD; NovusBio, Littleton, CO; ThermoFisher, Waltham, MA; Abcam, Cambridge, MA), C45 (N-terminal Tau; Origene, Rockville, MD), Tau7 (C-terminal Tau; EMD Millipore, Billerica, MA), S.125.0 (C-terminal Tau; ThermoFisher, Waltham, MA), 8E6/C11 (Three-repeat Tau²⁰⁹⁻²²⁴; EMD Millipore, Billerica, MA), 1E1/A6 (Four-repeat Tau²⁷⁵⁻²⁹¹; EMD Millipore, Billerica, MA), 7D12.1 (Four-repeat Tau²⁷⁵⁻²⁹¹; EMD Millipore, Billerica, MA), 5C7 (Four-repeat Tau²⁶⁷⁻²⁷⁸; BioLegend, San Diego, CA; Origene, Rockville, MD), 5F9 (Four-repeat Tau²⁷⁵⁻²⁹¹; BioLegend, San Diego, CA; Origene, Rockville, MD), 3H6.H7 (0N Tau³⁹⁻⁵⁰; BioLegend, San Diego, CA; Origene, Rockville, MD), 4H5.B9 (1N Tau⁶⁸⁻⁷⁹; BioLegend, San Diego, CA; Origene, Rockville, MD), 71C11 (2N Tau; BioLegend, San Diego, CA), PC1C6 (unphosphorylated tau; EMD Millipore, Billerica., MA), Tau2 (BioLegend, San Diego, CA; Origene, Rockville, MD; EMI) Millipore, Billerica, MA), 2E9 (Origene, Rockville, MD; NovusBio, Littleton, CO), 4F1 (Origene, Rockville, MD; NovusBio, Littleton, CO), 5B10 (NovusBio, Littleton, CO); 5E2 (EMD Millipore, Billerica, MA), Tau-93 (Origene, Rockville, MD), T14 (ThermoFisher, Waltham, MA), T46 (ThermoFisher, Waltham, MA), 13172 (ThermoFisher, Waltham, MA) and/or variants or derivates thereof.

[0426] In some embodiments, the antibodies encoded by the viral genomes of the present disclosure may be multispecific antibodies for transferrin receptor and a brain antigen, wherein the brain antigen may be tau, as described in International Publication WO2016081643, the contents of which are herein incorporated by reference in their entirety. In some embodiments, the antibody may have a sequence as given by SEQ ID NO: 160 or 161 of WO2016081643.

[0427] In some embodiments, the antibodies encoded by the viral genomes of the present disclosure are any of those described in U.S. Pat. Nos. 8,871,447, 8,420,613, International Publication No. WO2014193935, WO2010011999, or in United States Publication Nos. US20110250217, US20110020237, US20100316590, or US20120225864, the contents of each of which are herein incorporated by reference in their entirety. In some embodiments, the antibody recognizes an amyloidogenic or aggregating protein.

### Foodborne Illness and Gastroenteritis Related Antibodies

[0428] In some embodiments, the payload region of the viral particle comprises one or more nucleic acid sequences encoding one or more of the gastrointestinal and food illness related payload antibody polypeptides listed in Tables 14-20.

[0429] In some embodiments, the payload region of the viral particle comprises one or more nucleic acid sequences encoding one or more of the payload antibody polypeptides listed in Table 14 against Clostridium Difficile toxins (CD1-CD141; SEQ ID NO: 22301-22441).

TABLE 14
Antibodies against Clostridium Difficile toxins

| Antibody | | Antibody | | |
|---|---|---|---|---|
| No. | Description | Name | Reference Information | SEQ ID NO |
| CD1 | Camelid heavy chain only, Toxin | | WO2015100409 SEQ ID | 22301 |
| | A and B, | | NO: 164 | |
| CD2 | Camelid heavy chain only, Toxin | | WO2015100409 SEQ ID | 22302 |
| | A and B, | | NO: 165 | |
| CD3 | Camelid heavy chain only, Toxin | | WO2015100409 SEQ ID | 22303 |
| | A and B, | | NO: 166 | |
| CD4 | Camelid heavy chain only, Toxin | | WO2015100409 SEQ ID | 22304 |
| | A and B, | | NO: 167 | |
| CD5 | Heavy chain variable region, | PA-39 | U.S. Pat. No. 8,986,697 | 22305 |
| | toxin A | | SEQ ID NO: 1 | |
| CD6 | Heavy chain variable region, | PA-39 | U.S. Pat. No. 8,986,697 | 22306 |
| | toxin A | | SEQ ID NO: 2 | |
| CD7 | Heavy chain variable region, | PA-50 | U.S. Pat. No. 8,986,697 | 22307 |
| | toxin A | | SEQ ID NO: 5 | |
| CD8 | Heavy chain variable region, | PA-50 | U.S. Pat. No. 8,986,697 | 22308 |
| | toxin A | | SEQ ID NO: 6 | |
| CD9 | Heavy chain variable region, | | US20130202618 SEQ ID | 22309 |
| | toxin A | | NO: 1 | |
| CD10 | Heavy chain variable region, | | US20130202618 SEQ ID | 22310 |
| | toxin A | | NO: 2 | |
| CD11 | Heavy chain variable region, | | US20130202618 SEQ ID | 22311 |
| | toxin A | | NO: 5 | |
| CD12 | Heavy chain variable region, | | US20130202618 SEQ ID | 22312 |
| | toxin A | | NO: 6 | |
| CD13 | Heavy chain variable region, | H1H3067N | US20130230531 SEQ ID | 22313 |
| | toxin A and/or toxin B | | NO: 34 | |
| CD14 | Heavy chain variable region, | H1H3134N | US20130230531 SEQ ID | 22314 |
| | toxin A and/or toxin B | | NO: 18 | |
| CD15 | Heavy chain variable region, | H1H3117N | US20130230531 SEQ ID | 22315 |
| | toxin A and/or toxin B | | NO: 2 | |
| CD16 | Heavy chain variable region, | H1H3123N | US20130230531 SEQ ID | 22316 |
| | toxin A and/or toxin B | | NO: 66 | |
| CD17 | Heavy chain variable region, | H1H3121N | US20130230531 SEQ ID | 22317 |
| | toxin A and/or toxin B | | NO: 50 | |
| CD18 | Heavy chain variable region, | H1H3124N | US20130230531 SEQ ID | 22318 |
| | toxin A and/or toxin B | | NO: 82 | |
| CD19 | Heavy chain variable region, | H1H3328P | US20130230531 SEQ ID | 22319 |
| | toxin A and/or toxin B | | NO: 130 | |
| CD20 | Heavy chain variable region, | H1H3324P | US20130230531 SEQ ID | 22320 |
| | toxin A and/or toxin B | | NO: 98 | |
| CD21 | Heavy chain variable region, | H1H3325P | US20130230531 SEQ ID | 22321 |
| | toxin A and/or toxin B | | NO: 114 | |
| CD22 | Heavy chain variable region, | H1H3330P | US20130230531 SEQ ID | 22322 |
| | toxin A and/or toxin B | | NO: 146 | |
| CD23 | Heavy chain variable region, | H1H3350P | US20130230531 SEQ ID | 22323 |
| | toxin A and/or toxin B | | NO: 162 | |
| CD24 | Heavy chain variable region, | H1H3347P | US20130230531 SEQ ID | 22324 |
| | toxin A and/or toxin B | | NO: 274 | |
| CD25 | Heavy chain variable region, | H1H3335P | US20130230531 SEQ ID | 22325 |
| | toxin A and/or toxin B | | NO: 194 | |
| CD26 | Heavy chain variable region, | H1H3344P | US20130230531 SEQ ID | 22326 |
| | toxin A and/or toxin B | | NO: 258 | |
| CD27 | Heavy chain variable region, | H1H3339P | US20130230531 SEQ ID | 22327 |
| | toxin A and/or toxin B | | NO: 226 | |
| CD28 | Heavy chain variable region, | H1H3337P | US20130230531 SEQ ID | 22328 |
| | toxin A and/or toxin B | | NO: 210 | |
| CD29 | Heavy chain variable region, | H1H3343P | US20130230531 SEQ ID | 22329 |
| | toxin A and/or toxin B | | NO: 242 | |
| CD30 | Heavy chain variable region, | H1H3411P | US20130230531 SEQ ID | 22330 |
| | toxin A and/or toxin B | | NO: 354 | |
| CD31 | Heavy chain variable region, | H1H3354P | US20130230531 SEQ ID | 22331 |
| | toxin A and/or toxin B | | NO: 290 | |
| CD32 | Heavy chain variable region, | H1H3317P | US20130230531 SEQ ID | 22332 |
| | toxin A and/or toxin B | | NO: 178 | |
| CD33 | Heavy chain variable region, | H1H3355P | US20130230531 SEQ ID | 22333 |
| | toxin A and/or toxin B | | NO: 306 | |
| CD34 | Heavy chain variable region, | H1H3394P | US20130230531 SEQ ID | 22334 |
| | toxin A and/or toxin B | | NO: 322 | |
| CD35 | Heavy chain variable region, | H1H3401P | US20130230531 SEQ ID | 22335 |
| | toxin A and/or toxin B | | NO: 338 | |
| CD36 | Heavy chain variable region, | PA-41 | U.S. Pat. No. 8,986,697 | 22336 |
| | toxin B | | SEQ ID NO: 8 | |
| CD37 | Heavy chain variable region, | PA-41 | U.S. Pat. No. 8,986,697 | 22337 |
| | toxin B | | SEQ ID NO: 9 | |
| CD38 | Heavy chain variable region, | | US20130202618 SEQ ID | 22338 |
| | toxin B | | NO: 8 | |
| CD39 | Heavy chain variable region, | | US20130202618 SEQ ID | 22339 |
| | toxin B | | NO: 9 | |
| CD40 | Heavy chain, toxin A | 3D8 | U.S. Pat. No. 8,609,111 | 22340 |
| | | | SEQ ID NO: 1 | |
| CD41 | Heavy chain, toxin A | 1B11 | U.S. Pat. No. 8,609,111 | 22341 |
| | | | SEQ ID NO: 2 | |
| CD42 | Heavy chain, toxin A | 33.3H2 | U.S. Pat. No. 8,609,111 | 22342 |
| | | | SEQ ID NO: 3 | |
| CD43 | Heavy chain, toxin A | | US20140004118 SEQ ID | 22343 |
| | | | NO: 89 | |
| CD44 | Heavy chain, toxin A | | US20140004118 SEQ ID | 22344 |
| | | | NO: 93 | |
| CD45 | Heavy chain, toxin B | | US20130058962 SEQ ID | 22345 |
| | | | NO: 65 | |
| CD46 | Heavy chain, toxin B | Bezlotoxumab | | 22346 |
| CD47 | Heavy-chain-only, toxin A | | US20130058962 SEQ ID | 22347 |
| | | | NO: 59 | |
| CD48 | Heavy-chain-only, toxin A | | US20130058962 SEQ ID | 22348 |
| | | | NO: 60 | |
| CD49 | Heavy-chain-only, toxin A | | US20130058962 SEQ ID | 22349 |
| | | | NO: 61 | |
| CD50 | Heavy-chain-only, toxin A | | US20130058962 SEQ ID | 22350 |
| | | | NO: 62 | |
| CD51 | Heavy-chain-only, toxin A | | US20130058962 SEQ ID | 22351 |
| | | | NO: 63 | |
| CD52 | Heavy-chain-only, toxin A | | US20130058962 SEQ ID | 22352 |
| | | | NO: 64 | |
| CD53 | Heavy-chain-only, toxin A | | US20130058962 SEQ ID | 22353 |
| | | | NO: 87 | |
| CD54 | Heavy-chain-only, toxin A | | US20130058962 SEQ ID | 22354 |
| | | | NO: 95 | |
| CD55 | Heavy-chain-only, toxin B | 124-152 | U.S. Pat. No. | 22355 |
| | | | 8,609,111 | |
| | | | SEQ ID NO: 54 | |
| CD56 | Heavy-chain-only, toxin B | | US20130058962 SEQ ID | 22356 |
| | | | NO: 66 | |
| CD57 | Heavy-chain-only, toxin B | | US20130058962 SEQ ID | 22357 |
| | | | NO: 67 | |
| CD58 | Heavy-chain-only, toxin B | | US20130058962 SEQ ID | 22358 |
| | | | NO: 68 | |
| CD59 | Heavy-chain-only, toxin B | | US20130058962 SEQ ID | 22359 |
| | | | NO: 69 | |
| CD60 | Heavy-chain-only, toxin B | | US20130058962 SEQ ID | 22360 |
| | | | NO: 70 | |
| CD61 | Heavy-chain-only, toxin B | | US20130058962 SEQ ID | 22361 |
| | | | NO: 71 | |
| CD62 | Heavy-chain-only, toxin B | | US20130058962 SEQ ID | 22362 |
| | | | NO: 72 | |
| CD63 | Heavy-chain-only, toxin B | | US20130058962 SEQ ID | 22363 |
| | | | NO: 73 | |
| CD64 | Heavy-chain-only, toxin B | | US20130058962 SEQ ID | 22364 |
| | | | NO: 74 | |
| CD65 | Heavy-chain-only, toxin B | | US20130058962 SEQ ID | 22365 |
| | | | NO: 75 | |
| CD66 | Heavy-chain-only, toxin B | | US20130058962 SEQ ID | 22366 |
| | | | NO: 76; SEQ ID NO: 87; | |
| | | | SEQ ID NO: 95 | |
| CD67 | Light chain variable region, toxin | PA-39 | U.S. Pat. No. 8,986,697 | 22367 |
| | A | | SEQ ID NO: 3 | |
| CD68 | Light chain variable region, toxin | PA-39 | U.S. Pat. No. 8,986,697 | 22368 |
| | A | | SEQ ID NO: 4 | |
| CD69 | Light chain variable region, toxin | PA-50 | U.S. Pat. No. 8,986,697 | 22369 |
| | A | | SEQ ID NO: 7 | |
| CD70 | Light chain variable region, toxin | | US20130202618 SEQ ID | 22370 |
| | A | | NO: 3 | |
| CD71 | Light chain variable region, toxin | | US20130202618 SEQ ID | 22371 |
| | A | | NO: 4 | |
| CD72 | Light chain variable region, toxin | | US20130202618 SEQ ID | 22372 |
| | A | | NO: 7 | |
| CD73 | Light chain variable region, toxin | H1H3067N | US20130230531 SEQ ID | 22373 |
| | A and/or toxin B | | NO: 42 | |
| CD74 | Light chain variable region, toxin | H1H3134N | US20130230531 SEQ ID | 22374 |
| | A and/or toxin B | | NO: 26 | |
| CD75 | Light chain variable region, toxin | H1H3117N | US20130230531 SEQ ID | 22375 |
| | A and/or toxin B | | NO: 10 | |
| CD76 | Light chain variable region, toxin | H1H3123N | US20130230531 SEQ ID | 22376 |
| | A and/or toxin B | | NO: 74 | |
| CD77 | Light chain variable region, toxin | H1H3121N | US20130230531 SEQ ID | 22377 |
| | A and/or toxin B | | NO: 58 | |
| CD78 | Light chain variable region, toxin | H1H3124N | US20130230531 SEQ ID | 22378 |
| | A and/or toxin B | | NO: 90 | |
| CD79 | Light chain variable region, toxin | H1H3328P | US20130230531 SEQ ID | 22379 |
| | A and/or toxin B | | NO: 138 | |
| CD80 | Light chain variable region, toxin | H1H3324P | US20130230531 SEQ ID | 22380 |
| | A and/or toxin B | | NO: 106 | |
| CD81 | Light chain variable region, toxin | H1H3325P | US20130230531 SEQ ID | 22381 |
| | A and/or toxin B | | NO: 122 | |
| CD82 | Light chain variable region, toxin | H1H3330P | US20130230531 SEQ ID | 22382 |
| | A and/or toxin B | | NO: 154 | |
| CD83 | Light chain variable region, toxin | H1H3350P | US20130230531 SEQ ID | 22383 |
| | A and/or toxin B | | NO: 170 | |
| CD84 | Light chain variable region, toxin | H1H3347P | US20130230531 SEQ ID | 22384 |
| | A and/or toxin B | | NO: 282 | |
| CD85 | Light chain variable region, toxin | H1H3335P | US20130230531 SEQ ID | 22385 |
| | A and/or toxin B | | NO: 202 | |
| CD86 | Light chain variable region, toxin | H1H3344P | US20130230531 SEQ ID | 22386 |
| | A and/or toxin B | | NO: 266 | |
| CD87 | Light chain variable region, toxin | H1H3339P | US20130230531 SEQ ID | 22387 |
| | A and/or toxin B | | NO: 234 | |
| CD88 | Light chain variable region, toxin | H1H3337P | US20130230531 SEQ ID | 22388 |
| | A and/or toxin B | | NO: 218 | |
| CD89 | Light chain variable region, toxin | H1H3343P | US20130230531 SEQ ID | 22389 |
| | A and/or toxin B | | NO: 250 | |
| CD90 | Light chain variable region, toxin | H1H3411P | US20130230531 SEQ ID | 22390 |
| | A and/or toxin B | | NO: 362 | |
| CD91 | Light chain variable region, toxin | H1H3354P | US20130230531 SEQ ID | 22391 |
| | A and/or toxin B | | NO: 298 | |
| CD92 | Light chain variable region, toxin | H1H3317P | US20130230531 SEQ ID | 22392 |
| | A and/or toxin B | | NO: 186 | |
| CD93 | Light chain variable region, toxin | H1H3355P | US20130230531 SEQ ID | 22393 |
| | A and/or toxin B | | NO: 314 | |
| CD94 | Light chain variable region, toxin | H1H3394P | US20130230531 SEQ ID | 22394 |
| | A and/or toxin B | | NO: 330 | |
| CD95 | Light chain variable region, toxin | H1H3401P | US20130230531 SEQ ID | 22395 |
| | A and/or toxin B | | NO: 346 | |
| CD96 | Light chain variable region, toxin | PA-41 | U.S. Pat. No. 8,986,697 | 22396 |
| | B | | SEQ ID NO: 10 | |
| CD97 | Light chain variable region, toxin | | US20130202618 SEQ ID | 22397 |
| | B | | NO: 10 | |
| CD98 | Light chain, toxin A | 3D8 | U.S. Pat. No. 8,609,111 | 22398 |
| | | | SEQ ID NO: 4 | |
| CD99 | Light chain, toxin A | 1B11 | U.S. Pat. No. 8,609,111 | 22399 |
| | | | SEQ ID NO: 5 | |
| CD100 | Light chain, toxin A | 33.3H2 | U.S. Pat. No. 8,609,111 | 22400 |
| | | | SEQ ID NO: 6 | |
| CD101 | Light chain, toxin A | | US20140004118 SEQ ID | 22401 |
| | | | NO: 91 | |
| CD102 | Light chain, toxin A | | US20140004118 SEQ ID | 22402 |
| | | | NO: 95 | |
| CD103 | Light chain, toxin B | 124-152 | U.S. Pat. No. 8,609,111 | 22403 |
| | | | SEQ ID NO: 58 | |
| CD104 | Light chain, toxin B | Bezlotoxumab | | 22404 |
| CD105 | Recombinant camelid heavy | | WO2015100409 SEQ ID | 22405 |
| | chain only, Toxin A and B | | NO: 87 | |
| CD106 | Recombinant camelid heavy | | WO2015100409 SEQ ID | 22406 |
| | chain only, Toxin A and B | | NO: 95 | |
| CD107 | Recombinant camelid heavy- | | WO2015100409 SEQ ID | 22407 |
| | chain-only, toxin A | | NO: 59 | |
| CD108 | Recombinant camelid heavy- | | WO2015100409 SEQ ID | 22408 |
| | chain-only, toxin A | | NO: 60 | |
| CD109 | Recombinant camelid heavy - | | WO2015100409 SEQ ID | 22409 |
| | chain-only, toxin A | | NO: 61 | |
| CD110 | Recombinant camelid heavy- | | WO2015100409 SEQ ID | 22410 |
| | chain-only, toxin A | | NO: 62 | |
| CD111 | Recombinant camelid heavy- | | WO2015100409 SEQ ID | 22411 |
| | chain-only, toxin A | | NO: 63 | |
| CD112 | Recombinant camelid heavy- | | WO2015100409 SEQ ID | 22412 |
| | chain-only, toxin A | | NO: 64 | |
| CD113 | Recombinant camelid heavy- | | WO2015100409 SEQ ID | 22413 |
| | chain-only, toxin B | | NO: 65 | |
| CD114 | Recombinant camelid heavy- | | WO2015100409 SEQ ID | 22414 |
| | chain-only, toxin B | | NO: 66 | |
| CD115 | Recombinant camelid heavy- | | WO2015100409 SEQ ID | 22415 |
| | chain-only, toxin B | | NO: 67 | |
| CD116 | Recombinant camelid heavy- | | WO2015100409 SEQ ID | 22416 |
| | chain-only, toxin B | | NO: 68 | |
| CD117 | Recombinant camelid heavy- | | WO2015100409 SEQ ID | 22417 |
| | chain-only, toxin B | | NO: 69 | |
| CD118 | Recombinant camelid heavy - | | WO2015100409 SEQ ID | 22418 |
| | chain-only, toxin B | | NO: 70 | |
| CD119 | Recombinant camelid heavy- | | WO2015100409 SEQ ID | 22419 |
| | chain-only, toxin B | | NO: 71 | |
| CD120 | Recombinant camelid heavy- | | WO2015100409 SEQ ID | 22420 |
| | chain-only, toxin B | | NO: 72 | |
| CD121 | Recombinant camelid heavy- | | WO2015100409 SEQ ID | 22421 |
| | chain-only, toxin B | | NO: 73 | |
| CD122 | Recombinant camelid heavy- | | WO2015100409 SEQ ID | 22422 |
| | chain-only, toxin B | | NO: 74 | |
| CD123 | Recombinant camelid heavy- | | WO2015100409 SEQ ID | 22423 |
| | chain-only, toxin B | | NO: 75 | |
| CD124 | Recombinant camelid heavy- | | WO2015100409 SEQ ID | 22424 |
| | chain-only, toxin B | | NO: 76 | |
| CD125 | Toxin A | Actoxumab | | 22425 |
| CD126 | Toxin A | Actoxumab | | 22426 |
| CD127 | Toxin A | MK3415A | U.S. Pat. No. 7,625,559 | 22427 |
| | | (Actoxumab + | SEQ ID NO: 1 | |
| | | bezlo- | | |
| | | toxumab) | | |
| CD128 | Toxin A | MK3415A | U.S. Pat. No. 7,625,559 | 22428 |
| | | (Actoxumab + | SEQ ID NO: 4 | |
| | | bezlo- | | |
| | | toxumab) | | |
| CD129 | Toxin A | MK3415A | U.S. Pat. No. 7,625,559 | 22429 |
| | | (Actoxumab + | SEQ ID NO: 54 | |
| | | bezlo- | | |
| | | toxumab) | | |
| CD130 | Toxin A | MK3415A | U.S. Pat. No. 7,625,559 | 22430 |
| | | (Actoxumab + | SEQ ID NO: 58 | |
| | | bezlo | | |
| | | toxumab) | | |
| CD131 | Toxin A | A4.2 | US20130230537 SEQ ID | 22431 |
| | | | NO: 34 | |
| CD132 | Toxin A | A5.1 | US20130230537 SEQ ID | 22432 |
| | | | NO: 35 | |
| CD133 | Toxin A | A19.2 | US20130230537 SEQ ID | 22433 |
| | | | NO: 36 | |
| CD134 | Toxin A | A20.1 | US20130230537 SEQ ID | 22434 |
| | | | NO: 37 | |
| CD135 | Toxin A | A24.1 | US20130230537 SEQ ID | 22435 |
| | | | NO: 38 | |
| CD136 | Toxin A | A26.8 | US20130230537 SEQ ID | 22436 |
| | | | NO: 39 | |
| CD137 | Toxin B | B5.2 | US20130230537 SEQ ID | 22437 |
| | | | NO: 40 | |
| CD138 | Toxin B | B7.3 | US20130230537 SEQ ID | 22438 |
| | | | NO: 41 | |
| CD139 | Toxin B | B13.6 | US20130230537 SEQ ID | 22439 |
| | | | NO: 42 | |
| CD140 | Toxin B | B15.3 | US20130230537 SEQ ID | 22440 |
| | | | NO: 43 | |
| CD141 | Toxin B | B15.5 | US20130230537 SEQ ID | 22441 |
| | | | NO: 44 | |

[0430] In some embodiments, the payload region of the viral particle comprises one or more nucleic acid sequences encoding one or more of the payload antibody polypeptides listed in Table 15 against Campylobacter jejuni (CAMP 1-CAMP10, SEQ ID NO: 22442-22451).

TABLE 15
Antibodies against Campylobacter jejuni

| Antibody | | | | |
|---|---|---|---|---|
| No. | Description | Antibody Name | Reference Information | SEQ ID NO |
| CAMP1 | Consensus | FlagV1 | WO2014063253 SEQ ID NO: 7 | 22442 |
| CAMP2 | — | FlagV1M | WO2014063253 SEQ ID NO: 8 | 22443 |
| CAMP3 | — | FlagV1F23M | WO2014063253 SEQ ID NO: 9 | 22444 |
| CAMP4 | — | Flag V1MDSB | WO2014063253 SEQ ID NO: 10 | 22445 |
| CAMP5 | — | FlagV1MDSB | WO2014063253 SEQ ID NO: 11 | 22446 |
| CAMP6 | Consensus | FlagV6 | WO2014063253 SEQ ID NO: 12 | 22447 |
| CAMP7 | — | FlagV6M | WO2014063253 SEQ ID NO: 13 | 22448 |
| CAMP8 | — | FlagV6F23M | WO2014063253 SEQ ID NO: 14 | 22449 |
| CAMP9 | — | FlagV6MDSB | WO2014063253 SEQ ID NO: 15 | 22450 |
| CAMP10 | — | FlagV6F23MDSB | WO2014063253 SEQ ID NO: 16 | 22451 |

[0431] In some embodiments, the payload region of the viral particle comprises one or more nucleic acid sequences encoding one or more of the payload antibody polypeptides listed in Table 16 against bacterial infections of the intestine (BACG1-BACG98; SEQ ID NO: 22452-22549).

TABLE 16
Antibodies against bacterial infections of the intestine

| Antibody | | Antibody | Reference | SEQ |
|---|---|---|---|---|
| No. | Description | Name | Information | ID NO |
| BACG1 | Antibody against Listeria monocytogenes | Antibody | CN103497252 | 22452 |
| | | from | SEQ ID NO: 1 | |
| | | CN10349 | | |
| | | 7252 | | |
| BACG2 | Bivalent monovalent antibody against Pseudomonas, | anti- | U.S. Pat. No. | 22453 |
| | Clostridium, Staphylococcus, Pasteurella, Yersinia, | LYS3- | 7,655,759 | |
| | Bacillus anthracis, Neisseria, Vibrio, enterotoxic E. coli. | long | SEQ ID NO: | |
| | Salmonella, Shigella, and Listeria, Clostridium, | hinge/ | 22 | |
| | Staphylococcus, Pseudomonas, Pasteurella, Yersinia, | Cys-Tag. | | |
| | Bacillus anthracis, Neisseria, Vibrio, enterotoxic E. coli., | | | |
| | Salmonella, Shigella, and Listeria bacteria | | | |
| BACG3 | Heavy chain only, Antibody against Pseudomonas, | LYS2 | U.S. Pat. No. | 22454 |
| | Clostridium, Staphylococcus, Pasteurella, Yersinia, | VHH | 7,655,759 | |
| | Bacillus anthracis, Neisseria, Vibrio, enterotoxic E. coli., | | SEQ ID NO: | |
| | Salmonella, Shigella, and Listeria, Clostridium, | | 18 | |
| | Staphylococcus, Pseudomonas, Pasteurella, Yersinia, | | | |
| | Bacillus anthracis, Neisseria, Vibrio, enterotoxic E. coli., | | | |
| | Salmonella, Shigella, and Listeria bacteria | | | |
| BACG4 | Heavy chain only, Antibody against Pseudomonas, | LYS3 | U.S. Pat. No. | 22455 |
| | Clostridium, Staphylococcus, Pasteurella, Yersinia, | VHH | 7,655,759 | |
| | Bacillus anthracis, Neisseria, Vibrio, enterotoxic E. coli. | | SEQ ID NO: | |
| | Salmonella, Shigella, and Listeria, Clostridium, | | 24 | |
| | Staphylococcus, Pseudomonas, Pasteurella, Yersinia, | | | |
| | Bacillus anthracis, Neisseria, Vibrio, enterotoxic E. coli., | | | |
| | Salmonella, Shigella, and Listeria bacteria | | | |
| BACG5 | Heavy chain segment including variable region, | F10 | U.S. Pat. No. | 22456 |
| | Starhylococcus enterotoxin B | | 8,895,704 | |
| | | | SEQ ID NO: | |
| | | | 30 | |
| BACG6 | Heavy chain variable region, Antibody against, P. | mAb 741 | U.S. Pat. No. | 22457 |
| | aeruginosa, Proteus Vulgaris, non-pathogenic E. coli., | | 8,263,078 | |
| | Citrobacter freundii, Serratia marcenscens, Enterobacter | | SEQ ID NO: 1 | |
| | cloacae, Campylobacter jejuni, Helicobacter pylori, | | | |
| | Salmonella typhimurium, Salmonella muenchen, Proteus | | | |
| | mirabilis and Enteropathogenic E. coli. | | | |
| BACG7 | Heavy chain variable region, Antibody against, P. | mAb 763 | U.S. Pat. No. | 22458 |
| | aeruginosa, Proteus Vulgaris, non-pathogenic E. coli., | | 8,263,078 | |
| | Citrobacter freundii, Serratia marcenscens, Enterobacter | | SEQ ID NO: 2 | |
| | cloacae, Campylobacter jejuni, Helicobacter pylori, | | | |
| | Salmonella typhimurium, Salmonella muenchen, Proteus | | | |
| | mirabilis and Enteropathogenic E. coli.., | | | |
| BACG8 | Heavy chain variable region, antibody against flagellin | | U.S. Pat. No. | 22459 |
| | from Salmonella or Pseudomonas | | 8,173,130 | |
| | | | SEQ ID NO: 1 | |
| BACG9 | Heavy chain variable region, Antibody against Gram | INO 743 | US20100239583 | 22460 |
| | negative (E. coli., Salmonella, Serratia, Proteus, | | SEQ ID | |
| | Enterobacter, Citrobacter, Campylobacter | | NO: 1 | |
| | and Pseudomonas) | | | |
| BACG10 | Heavy chain variable region, Antibody against | Abba3 | U.S. Pat. No. | 22461 |
| | Helicobacter pyroli | | 8,025,880 | |
| | | | SEQ ID NO: | |
| | | | 18 | |
| BACG11 | Heavy chain variable region, Antibody against | IgHV3- | U.S. Pat. No. | 22462 |
| | Helicobacter pyroli | 48*3 | 8,025,880 | |
| | | | SEQ ID NO: | |
| | | | 20 | |
| BACG12 | Heavy chain variable region, Antibody against | clone 5 | U.S. Pat. No. | 22463 |
| | Helicobacter pyroli | | 8,025,880 | |
| | | | SEQ ID NO: | |
| | | | 21 | |
| BACG13 | Heavy chain variable region, Antibody against | C4 | U.S. Pat. No. | 22464 |
| | Helicobacter pyroli | | 8,025,880 | |
| | | | SEQ ID NO: | |
| | | | 22 | |
| BACG14 | Heavy chain variable region, Antibody against | IgHV1- | U.S. Pat. No. | 22465 |
| | Helicobacter pyroli | 18*01 | 8,025,880 | |
| | | | SEQ ID NO: | |
| | | | 23 | |
| BACG15 | Heavy chain variable region, Antibody against | C5 | U.S. Pat. No. | 22466 |
| | Helicobacter pyroli | | 8,025,880 | |
| | | | SEQ ID NO: | |
| | | | 24 | |
| BACG16 | Heavy chain variable region, antibody against many | SWLA3 | WO20030079 | 22467 |
| | pathogens, | | 89 SEQ ID | |
| | | | NO: 4 | |
| BACG17 | Heavy chain variable region, antibody against | SWLA3 | US20040052814 | 22468 |
| | Streptococcus mutans, Escherichia coli, Shigella | | SEQ ID | |
| | dysenteriae, Salmonella typhimurium, Streptococcus | | NO: 4 | |
| | pneumoniae, Staphylococcus aureus, and Pseudomonas | | | |
| | aeruginosa | | | |
| BACG18 | Heavy chain variable region, antibody against | SWLA3 | US20040052814 | 22469 |
| | Staphylococcus mutans, Escherichia coli, Shigella | | SEQ ID | |
| | dysenteriae, Salmonella typhimurium, Streptococcus | | NO: 8 | |
| | pneumoniae, Staphylococcus aureus, and Pseudomonas | | | |
| | aeruginosa | | | |
| BACG19 | Heavy chain, antibody against E coli, Shigella, | Ab1 | WO2012162253 | 22470 |
| | Entaamoeba histolytica, Salmonella, Campylobacter, or | | SEQ ID | |
| | Clostridium difficile, rotavirus, RSV, HIV, norvovirus, | | NO: 4 | |
| | adenovirus, and astrovirus, other diseases causing | | | |
| | diarrhea, | | | |
| BACG20 | Heavy chain, antibody against E coli, Shigella, | Ab2 | WO2012162253 | 22471 |
| | Entaamoeba histolytica, Salmonella, Campylobacter, or | | SEQ ID | |
| | Clostridium difficile, rotavirus, RSV, HIV, norvovirus, | | NO: 14 | |
| | adenovirus, and astrovirus, other diseases causing | | | |
| | diarrhea, | | | |
| BACG21 | Heavy chain, antibody against E coli, Shigella, | Ab3 | WO2012162253 | 22472 |
| | Entaamoeba histolytica, Salmonella, Campylobacter, or | | SEQ ID | |
| | Clostridium difficile, rotavirus, RSV, HIV, norvovirus, | | NO: 24 | |
| | adenovirus, and astrovirus, other diseases causing | | | |
| | diarrhea, | | | |
| BACG22 | Heavy chain, antibody against E coli, Shigella, | Ab4 | WO2012162253 | 22473 |
| | Entaamoeba histolytica, Salmonella, Campylobacter, or | | SEQ ID | |
| | Clostridium difficile, rotavirus, RSV, HIV, norvovirus, | | NO: 34 | |
| | adenovirus, and astrovirus, other diseases causing | | | |
| | diarrhea, | | | |
| BACG23 | Heavy chain, antibody against E coli, Shigella, | Ab5 | WO2012162253 | 22474 |
| | Entaamoeba histolytica, Salmonella, Campylobacter, or | | SEQ ID | |
| | Clostridium difficile, rotavirus, RSV, HIV, norvovirus, | | NO: 44 | |
| | adenovirus, and astrovirus, other diseases causing | | | |
| | diarrhea, | | | |
| BACG24 | Heavy chain, antibody against E coli, Shigella, | Ab6 | WO2012162253 | 22475 |
| | Entaamoeba histolytica, Salmonella, Campylobacter, or | | SEQ ID | |
| | Clostridium difficile, rotavirus, RSV, HIV, norvovirus, | | NO: 54 | |
| | adenovirus, and astrovirus, other diseases causing | | | |
| | diarrhea | | | |
| BACG25 | Heavy chain, antibody against E coli, Shigella, | Ab7 | WO2012162253 | 22476 |
| | Entaamoeba histolytica, Salmonella, Campylobacter, or | | SEQ ID | |
| | Clostridium difficile, rotavirus, RSV, HIV, norvovirus, | | NO: 64 | |
| | adenovirus, and astrovirus, other diseases causing | | | |
| | diarrhea, | | | |
| BACG26 | Heavy chain, antibody against E coli, Shigella, | Ab8 | WO2012162253 | 22477 |
| | Entaamoeba histolytica, Salmonella, Campylobacter, or | | SEQ ID | |
| | Clostridium difficile, rotavirus, RSV, HIV, norvovirus, | | NO: 74 | |
| | adenovirus, and astrovirus, other diseases causing | | | |
| | diarrhea, | | | |
| BACG27 | Heavy chain, antibody against E coli, Shigella, | Ab9 | WO2012162253 | 22478 |
| | Entaamoeba histolytica, Salmonella, Campylobacter, or | | SEQ ID | |
| | Clostridium difficile, rotavirus, RSV, HIV, norvovirus, | | NO: 84 | |
| | adenovirus, and astrovirus, other diseases causing | | | |
| | diarrhea, | | | |
| BACG28 | Heavy chain, antibody against E coli, Shigella, | Ab10 | WO2012162253 | 22479 |
| | Entaamoeba histolytica, Salmonella, Campylobacter, or | | SEQ ID | |
| | Clostridium difficile, rotavirus, RSV, HIV, norvovirus, | | NO: 94 | |
| | adenovirus, and astrovirus, other diseases causing | | | |
| | diarrhea, | | | |
| BACG29 | Heavy chain, antibody against E coli, Shigella, | Ab11 | WO2012162253 | 22480 |
| | Entaamoeba histolytica, Salmonella, Campylobacter, or | | SEQ ID | |
| | Clostridium difficile, rotavirus, RSV, HIV, norvovirus, | | NO: 104 | |
| | adenovirus, and astrovirus, other diseases causing | | | |
| | diarrhea, | | | |
| BACG30 | Heavy chain, antibody against E coli, Shigella, | Ab12 | WO2012162253 | 22481 |
| | Entaamoeba histolytica, Salmonella, Campylobacter, or | | SEQ ID | |
| | Clostridium difficile, rotavirus, RSV, HIV, norvovirus, | | NO: 114 | |
| | adenovirus, and astrovirus, other diseases causing | | | |
| | diarrhea, | | | |
| BACG31 | Heavy chain, antibody against E coli, Shigella, | Ab13 | WO2012162253 | 22482 |
| | Entaamoeba histolytica, Salmonella, Campylobacter, or | | SEQ ID | |
| | Clostridium difficile, rotavirus, RSV, HIV, norvovirus, | | NO: 124 | |
| | adenovirus, and astrovirus, other diseases causing | | | |
| | diarrhea, | | | |
| BACG32 | Heavy chain, antibody against E coli, Shigella, | Ab14 | WO2012162253 | 22483 |
| | Entaamoeba histolytica, Salmonella, Campylobacter, or | | SEQ ID | |
| | Clostridium difficile, rotavirus, RSV, HIV, norvovirus, | | NO: 134 | |
| | adenovirus, and astrovirus, other diseases causing | | | |
| | diarrhea, | | | |
| BACG33 | Heavy chain, Antibody against Escherichia coli | | WO2014070117 | 22484 |
| | infection, Staphylococcus infection | | SEQ ID | |
| | | | NO: 3 | |
| BACG34 | Heavy chain, Antibody against Listeria | 6H8 | U.S. Pat. No. | 22485 |
| | monocytogenes or WR-tubercle bacillus | | 8,445,643 | |
| | | | SEQ ID NO: 5 | |
| BACG35 | Heavy chain, Antibody against Pseudomonas, | | U.S. Pat. No. | 22486 |
| | Clostridium, Staphylococcus, Pasteurella, Yersinia, | | 7,655,759 | |
| | Bacillus anthracis, Neisseria, Vibrio, enterotoxic E. coli, | | SEQ ID NO: | |
| | Salmonella, Shigella, and Listeria, Clostridium, | | 25 | |
| | Staphylococcus, Pseudomonas, Pasteurella, Yersinia, | | | |
| | Bacillus anthracis, Neisseria, Vibrio, enterotoxic E. coli, | | | |
| | Salmonella, Shigella, and Listeria bacteria | | | |
| BACG36 | Heavy chain, Antibody against Pseudomonas, | | U.S. Pat. No. | 22487 |
| | Clostridium, Staphylococcus, Pasteurella, Yersinia, | | 7,655,759 | |
| | Bacillus anthracis, Neisseria, Vibrio, enterotoxic E. coli, | | SEQ ID NO: | |
| | Salmonella, Shigella, and Listeria, Clostridium, | | 26 | |
| | Staphylococcus, Pseudomonas, Pasteurella, Yersinia, | | | |
| | Bacillus anthracis, Neisseria, Vibrio, enterotoxic E. coli, | | | |
| | Salmonella, Shigella, and Listeria bacteria | | | |
| BACG37 | Heavy chain, Starhylococcus enterotoxin B | 100C9 | U.S. Pat. No. | 22488 |
| | | | 8,895,704 | |
| | | | SEQ ID NO: | |
| | | | 34 | |
| BACG38 | Heavy chain, Starhylococcus enterotoxin B | 79G9+ | U.S. Pat. No. | 22489 |
| | | | 8,895,704 | |
| | | | SEQ ID NO: 38 | |
| BACG39 | Heavy chain, Starhylococcus enterotoxin B | 79G9 | U.S. Pat. No. | 22490 |
| | | | 8,895,704 | |
| | | | SEQ ID NO: 126 | |
| BACG40 | Heavy chain, Starhylococcus enterotoxin B | 154G12 | U.S. Pat. No. | 22491 |
| | | | 8,895,704 | |
| | | | SEQ ID NO: 142 | |
| BACG41 | Light chain variable region, Antibody against, P. | mAb 741 | U.S. Pat. No. | 22492 |
| | aeruginosa, Proteus Vulgaris, non-pathogenic E. Coli, | | 8,263,078 | |
| | Citrobacter freundii, Serratia marcenscens, Enterobacter | | SEQ ID NO: 3 | |
| | cloacae, Campylobacter jejuni, Helicobacter pylori, | | | |
| | Salmonella typhimurium, Salmonella muenchen, Proteus | | | |
| | mirabilis and Enteropathogenic E. Coli. | | | |
| BACG42 | Light chain variable region, Antibody against, P. | mAb 763 | U.S. Pat. No. | 22493 |
| | aeruginosa, Proteus Vulgaris, non-pathogenic E. Coli, | | 8,263,078 | |
| | Citrobacter freundii, Serratia marcenscens, Enterobacter | | SEQ ID NO: 4 | |
| | cloacae, Campylobacter jejuni, Helicobacter pylori, | | | |
| | Salmonella typhimurium, Salmonella muenchen, Proteus | | | |
| | mirabilis and Enteropathogenic E. Coli | | | |
| BACG43 | Light chain variable region, Antibody against E coli, | Ab1 | WO2012162253 | 22494 |
| | Shigella, Entaamoeba histolytica, Salmonella, | | SEQ ID | |
| | Campylobacter, or Clostridium difficile, rotavirus, RSV, | | NO: 1 | |
| | HIV, norvovirus, adenovirus, and astrovirus, other | | | |
| | diseases causing diarrhea | | | |
| BACG44 | Light chain variable region, antibody against flagellin | | U.S. Pat. No. | 22495 |
| | from Salmonella or Pseudomonas | | 8,173,130 | |
| | | | SEQ ID NO: 3 | |
| BACG45 | Light chain variable region, Antibody against Gram | INO 743 | US20100239583 | 22496 |
| | negative (E. coli, Salmonella, Serratia, Proteus, | | SEQ ID | |
| | Enterobacter, Citrobacter, Campylobacter | | NO: 2 | |
| | and Pseudomonas) | | | |
| BACG46 | Light chain variable region, Antibody against | Abba3 | U.S. Pat. No. | 22497 |
| | Helicobacter pyroli | | 8,025,880 | |
| | | | SEQ ID NO: 19 | |
| BACG47 | Light chain variable region, Antibody against many | SWLA3 | WO2003007989 | 22498 |
| | pathogens | | SEQ ID | |
| | | | NO: 7 | |
| BACG48 | Light chain, Antibody against E. coli, Shigaella, | Ab 1 | US201200294822 | 22499 |
| | Entaamoeba histolvtica, Salmonella, Campylobacter, | | SEQ ID | |
| | or Clostridium difficile or a virus selected from rotavirus, | | NO: 2 | |
| | RSV, HIV, norvovirus, adenovirus, and astrovirus | | | |
| BACG49 | Light chain, Antibody against E. coli, Shigaella, | Ab 1 | US201200294822 | 22500 |
| | Entaamoeba histolvtica, Salmonella, Campylobacter, | | SEQ ID | |
| | or Clostridium difficile or a virus selected from rotavirus, | | NO: 4 | |
| | RSV, HIV, norvovirus, adenovirus, and astrovirus | | | |
| BACG50 | Light chain, Antibody against E. coli, Shigaella, | Ab 2 | US201200294 | 22501 |
| | Entaamoeba histolvtica, Salmonella, Campylobacter, | | 822 SEQ ID | |
| | or Clostridium difficile or a virus selected from rotavirus, | | NO: 12 | |
| | RSV, HIV, norvovirus, adenovirus, and astrovirus | | | |
| BACG51 | Light chain, Antibody against E. coli, Shigaella, | Ab 2 | US201200294822 | 22502 |
| | Entaamoeba histolvtica, Salmonella, Campylobacter, | | SEQ ID | |
| | or Clostridium difficile or a virus selected from rotavirus, | | NO: 14 | |
| | RSV, HIV, norvovirus, adenovirus, and astrovirus | | | |
| BACG52 | Light chain, Antibody against E. coli, Shigaella, | Ab 3 | US201200294822 | 22503 |
| | Entaamoeba histolvtica, Salmonella, Campylobacter, | | SEQ ID | |
| | or Clostridium difficile or a virus selected from rotavirus, | | NO: 22 | |
| | RSV, HIV, norvovirus, adenovirus, and astrovirus | | | |
| BACG53 | Light chain, Antibody against E. coli, Shigaella, | Ab 3 | US201200294822 | 22504 |
| | Entaamoeba histolvtica, Salmonella, Campylobacter, | | SEQ ID | |
| | or Clostridium difficile or a virus selected from rotavirus, | | NO: 24 | |
| | RSV, HIV, norvovirus, adenovirus, and astrovirus | | | |
| BACG54 | Light chain, Antibody against E. coli, Shigaella, | Ab 4 | US201200294822 | 22505 |
| | Entaamoeba histolvtica, Salmonella, Campylobacter, | | SEQ ID | |
| | or Clostridium difficile or a virus selected from rotavirus, | | NO: 32 | |
| | RSV, HIV, novovirus, adenovirus, and astrovirus | | | |
| BACG55 | Light chain, Antibody against E. coli, Shigaella, | Ab 4 | US201200294 | 22506 |
| | Entaamoeba histolvtica, Salmonella, Campylobacter, | | 822 SEQ ID | |
| | or Clostridium difficile or a virus selected from rotavirus, | | NO: 34 | |
| | RSV, HIV, norvovirus, adenovirus, and astrovirus | | | |
| BACG56 | Light chain, Antibody against E. coli, Shigaella, | Ab 5 | US201200294822 | 22507 |
| | Entaamoeba histolvtica, Salmonella, Campylobacter, | | SEQ ID | |
| | or Clostridium difficile or a virus selected from rotavirus, | | NO: 42 | |
| | RSV, HIV, norvovirus, adenovirus, and astrovirus | | | |
| BACG57 | Light chain, Antibody against E. coli, Shigaella, | Ab 5 | US201200294822 | 22508 |
| | Entaamoeba histolvtica, Salmonella, Campylobacter, | | SEQ ID | |
| | or Clostridium difficile or a virus selected from rotavirus, | | NO: 44 | |
| | RSV, HIV, norvovirus, adenovirus, and astrovirus | | | |
| BACG58 | Light chain, Antibody against E. coli, Shigaella, | Ab 6 | US201200294822 | 22509 |
| | Entaamoeba histolvtica, Salmonella, Campylobacter, | | SEQ ID | |
| | or Clostridium difficile or a virus selected from rotavirus, | | NO: 52 | |
| | RSV, HIV, norvovirus, adenovirus, and astrovirus | | | |
| BACG59 | Light chain, Antibody against E. coli, Shigaella, | Ab 6 | US201200294822 | 22510 |
| | Entaamoeba histolvtica, Salmonella, Campylobacter, | | SEQ ID | |
| | or Clostridium difficile or a virus selected from rotavirus, | | NO: 54 | |
| | RSV, HIV, norvovirus, adenovirus, and astrovirus | | | |
| BACG60 | Light chain, Antibody against E. coli, Shigaella, | Ab 7 | US201200294822 | 22511 |
| | Entaamoeba histolvtica, Salmonella, Campylobacter, | | SEQ ID | |
| | or Clostridium difficile or a virus selected from rotavirus, | | NO: 62 | |
| | RSV, HIV, norvovirus, adenovirus, and astrovirus | | | |
| BACG61 | Light chain, Antibody against E. coli, Shigaella, | Ab 7 | US201200294822 | 22512 |
| | Entaamoeba histolvtica, Salmonella, Campylobacter, | | SEQ ID | |
| | or Clostridium difficile or a virus selected from rotavirus, | | NO: 64 | |
| | RSV, HIV, norvovirus, adenovirus, and astrovirus | | | |
| BACG62 | Light chain, Antibody against E. coli, Shigaella, | Ab 8 | US201200294822 | 22513 |
| | Entaamoeba histolvtica, Salmonella, Campylobacter, | | SEQ ID | |
| | or Clostridium difficile or a virus selected from rotavirus, | | NO: 72 | |
| | RSV, HIV, norvovirus, adenovirus, and astrovirus | | | |
| BACG63 | Light chain, Antibody against E. coli, Shigaella, | Ab 8 | US201200294822 | 22514 |
| | Entaamoeba histolvtica, Salmonella, Campylobacter, | | SEQ ID | |
| | or Clostridium difficile or a virus selected from rotavirus, | | NO: 74 | |
| | RSV, HIV, norvovirus, adenovirus, and astrovirus | | | |
| BACG64 | Light chain, Antibody against E. coli, Shigaella, | Ab 9 | US201200294822 | 22515 |
| | Entaamoeba histolvtica, Salmonella, Campylobacter, | | SEQ ID | |
| | or Clostridium difficile or a virus selected from rotavirus, | | NO: 82 | |
| | RSV, HIV, norvovirus, adenovirus, and astrovirus | | | |
| BACG65 | Light chain, Antibody against E. coli, Shigaella, | Ab 9 | US201200294822 | 22516 |
| | Entaamoeba histolvtica, Salmonella, Campylobacter, | | SEQ ID | |
| | or Clostridium difficile or a virus selected from rotavirus, | | NO: 84 | |
| | RSV, HIV, norvovirus, adenovirus, and astrovirus | | | |
| BACG66 | Light chain, Antibody against E. coli, Shigaella, | Ab 10 | US201200294822 | 22517 |
| | Entaamoeba histolvtica, Salmonella, Campylobacter, | | SEQ ID | |
| | or Clostridium difficile or a virus selected from rotavirus, | | NO: 92 | |
| | RSV, HIV, norvovirus, adenovirus, and astrovirus | | | |
| BACG67 | Light chain, Antibody against E. coli, Shigaella, | Ab 10 | US201200294822 | 22518 |
| | Entaamoeba histolvtica, Salmonella, Campylobacter, | | SEQ ID | |
| | or Clostridium difficile or a virus selected from rotavirus, | | NO: 94 | |
| | RSV, HIV, norvovirus, adenovirus, and astrovirus | | | |
| BACG68 | Light chain, Antibody against E. coli, Shigaella, | Ab 11 | US201200294822 | 22519 |
| | Entaamoeba histolvtica, Salmonella, Campylobacter, | | SEQ ID | |
| | or Clostridium difficile or a virus selected from rotavirus, | | NO: 102 | |
| | RSV, HIV, norvovirus, adenovirus, and astrovirus | | | |
| BACG69 | Light chain, Antibody against E. coli, Shigaella, | Ab 11 | US201200294822 | 22520 |
| | Entaamoeba histolvtica, Salmonella, Campylobacter, | | SEQ ID | |
| | or Clostridium difficile or a virus selected from rotavirus, | | NO: 104 | |
| | RSV, HIV, norvovirus, adenovirus, and astrovirus | | | |
| BACG70 | Light chain, Antibody against E. coli, Shigaella, | Ab 12 | US201200294822 | 22521 |
| | Entaamoeba histolvtica, Salmonella, Campylobacter, | | SEQ ID | |
| | or Clostridium difficile or a virus selected from rotavirus, | | NO: 112 | |
| | RSV, HIV, norvovirus, adenovirus, and astrovirus | | | |
| BACG71 | Light chain, Antibody against E. coli, Shigaella, | Ab 12 | US201200294822 | 22522 |
| | Entaamoeba histolvtica, Salmonella, Campylobacter, | | SEQ ID | |
| | or Clostridium difficile or a virus selected from rotavirus, | | NO: 114 | |
| | RSV, HIV, norvovirus, adenovirus, and astrovirus | | | |
| BACG72 | Light chain, Antibody against E. coli, Shigaella, | Ab 13 | US201200294822 | 22523 |
| | Entaamoeba histolvtica, Salmonella, Campylobacter, | | SEQ ID | |
| | or Clostridium difficile or a virus selected from rotavirus, | | NO: 122 | |
| | RSV, HIV, norvovirus, adenovirus, and astrovirus | | | |
| BACG73 | Light chain, Antibody against E. coli, Shigaella, | Ab 13 | US201200294822 | 22524 |
| | Entaamoeba histolvtica, Salmonella, Campylobacter, | | SEQ ID | |
| | or Clostridium difficile or a virus selected from rotavirus, | | NO: 124 | |
| | RSV, HIV, norvovirus, adenovirus, and astrovirus | | | |
| BACG74 | Light chain, Antibody against E. coli, Shigaella, | Ab 14 | US201200294822 | 22525 |
| | Entaamoeba histolvtica, Salmonella, Campylobacter, | | SEQ ID | |
| | or Clostridium difficile or a virus selected from rotavirus, | | NO: 132 | |
| | RSV, HIV, norvovirus, adenovirus, and astrovirus | | | |
| BACG75 | Light chain, Antibody against E. coli, Shigaella, | Ab 14 | US201200294822 | 22526 |
| | Entaamoeba histolvtica, Salmonella, Campylobacter, | | SEQ ID | |
| | or Clostridium difficile or a virus selected from rotavirus, | | NO: 134 | |
| | RSV, HIV, norvovirus, adenovirus, and astrovirus | | | |
| BACG76 | Light chain, Antibody against E coli, Shigella, | Ab2 | WO2012162253 | 22527 |
| | Entaamoeba histolytica, Salmonella, Campylobacter, or | | SEQ ID | |
| | Clostridium difficile, rotavirus, RSV, HIV, norvovirus, | | NO: 11 | |
| | adenovirus, and astrovirus, other diseases causing | | | |
| | diarrhea | | | |
| BACG77 | Light chain, Antibody against E coli, Shigella, | Ab3 | WO2012162253 | 22528 |
| | Entaamoeba histolytica, Salmonella, Campylobacter, or | | SEQ ID | |
| | Clostridium difficile, rotavirus, RSV, HIV, norvovirus, | | NO: 22 | |
| | adenovirus, and astrovirus, other diseases causing | | | |
| | diarrhea | | | |
| BACG78 | Light chain, Antibody against E coli, Shigella, | Ab4 | WO2012162253 | 22529 |
| | Entaamoeba histolytica, Salmonella, Campylobacter, or | | SEQ ID | |
| | Clostridium difficile, rotavirus, RSV, HIV, norvovirus, | | NO: 31 | |
| | adenovirus, and astrovirus, other diseases causing | | | |
| | diarrhea | | | |
| BACG79 | Light chain, Antibody against E coli, Shigella, | Ab5 | WO2012162253 | 22530 |
| | Entaamoeba histolytica, Salmonella, Campylobacter, or | | SEQ ID | |
| | Clostridium difficile, rotavirus, RSV, HIV, norvovirus, | | NO: 42 | |
| | adenovirus, and astrovirus, other diseases causing | | | |
| | diarrhea | | | |
| BACG80 | Light chain, Antibody against E coli, Shigella, | Ab6 | WO2012162253 | 22531 |
| | Entaamoeba histolytica, Salmonella, Campylobacter, or | | SEQ ID | |
| | Clostridium difficile, rotavirus, RSV, HIV, norvovirus, | | NO: 52 | |
| | adenovirus, and astrovirus, other diseases causing | | | |
| | diarrhea | | | |
| BACG81 | Light chain, Antibody against E coli, Shigella, | Ab7 | WO2012162253 | 22532 |
| | Entaamoeba histolytica, Salmonella, Campylobacter, or | | SEQ ID | |
| | Clostridium difficile, rotavirus, RSV, HIV, norvovirus, | | NO: 61 | |
| | adenovirus, and astrovirus, other diseases causing | | | |
| | diarrhea | | | |
| BACG82 | Light chain, Antibody against E coli, Shigella, | Ab8 | WO2012162253 | 22533 |
| | Entaamoeba histolytica, Salmonella, Campylobacter, or | | SEQ ID | |
| | Clostridium difficile, rotavirus, RSV, HIV, norvovirus, | | NO: 71 | |
| | adenovirus, and astrovirus, other diseases causing | | | |
| | diarrhea | | | |
| BACG83 | Light chain, Antibody against E coli, Shigella, | Ab9 | WO2012162253 | 22534 |
| | Entaamoeba histolytica, Salmonella, Campylobacter, or | | SEQ ID | |
| | Clostridium difficile, rotavirus, RSV, HIV, norvovirus, | | NO: 82 | |
| | adenovirus, and astrovirus, other diseases causing | | | |
| | diarrhea | | | |
| BACG84 | Light chain, Antibody against E coli, Shigella, | Ab10 | WO2012162253 | 22535 |
| | Entaamoeba histolytica, Salmonella, Campylobacter, or | | SEQ ID | |
| | Clostridium difficile, rotavirus, RSV, HIV, norvovirus, | | NO: 91 | |
| | adenovirus, and astrovirus, other diseases causing | | | |
| | diarrhea | | | |
| BACG85 | Light chain, Antibody against E coli, Shigella, | Ab11 | WO2012162253 | 22536 |
| | Entaamoeba histolytica, Salmonella, Campylobacter, or | | SEQ ID | |
| | Clostridium difficile, rotavirus, RSV, HIV, norvovirus, | | NO: 102 | |
| | adenovirus, and astrovirus, other diseases causing | | | |
| | diarrhea | | | |
| BACG86 | Light chain, Antibody against E coli, Shigella, | Ab12 | WO2012162253 | 22537 |
| | Entaamoeba histolytica, Salmonella, Campylobacter, or | | SEQ ID | |
| | Clostridium difficile, rotavirus, RSV, HIV, norvovirus, | | NO: 112 | |
| | adenovirus, and astrovirus, other diseases causing | | | |
| | diarrhea | | | |
| BACG87 | Light chain, Antibody against E coli, Shigella, | Ab13 | WO2012162253 | 22538 |
| | Entaamoeba histolytica, Salmonella, Campylobacter, or | | SEQ ID | |
| | Clostridium difficile, rotavirus, RSV, HIV, norvovirus, | | NO: 122 | |
| | adenovirus, and astrovirus, other diseases causing | | | |
| | diarrhea | | | |
| BACG88 | Light chain, Antibody against E coli, Shigella, | Ab14 | WO2012162253 | 22539 |
| | Entaamoeba histolytica, Salmonella, Campylobacter, or | | SEQ ID | |
| | Clostridium difficile, rotavirus, RSV, HIV, norvovirus, | | NO: 132 | |
| | adenovirus, and astrovirus, other diseases causing | | | |
| | diarrhea | | | |
| BACG89 | Light chain, Antibody against Escherichia coli infection, | | WO2014070117 | 22540 |
| | Staphylococcus infection | | SEQ ID | |
| | | | NO: 4 | |
| BACG90 | Light chain, Antibody against Listeria monocytogenes or | 6H8 | U.S. Pat. No. | 22541 |
| | WR-tubercle bacillus | | 8,445,643 | |
| | | | SEQ ID NO: 6 | |
| BACG91 | Light chain, Staphylococcus enterotoxin B | F10 | U.S. Pat. No. | 22542 |
| | | | 8,895,704 | |
| | | | SEQ ID NO: 28 | |
| BACG92 | Light chain, Staphylococcus enterotoxin B | 100C9 | U.S. Pat. No. | 22543 |
| | | | 8,895,704 | |
| | | | SEQ ID NO: 32 | |
| BACG93 | Light chain, Staphylococcus enterotoxin B | 79G9 | U.S. Pat. No. | 22544 |
| | | | 8895704 | |
| | | | SEQ ID NO: 36 | |
| BACG94 | Light chain, Staphylococcus enterotoxin B | 154G12 | U.S. Pat. No. | 22545 |
| | | | 8,895,704 | |
| | | | SEQ ID NO: 134 | |
| BACG95 | ScFv, Antibody against Clostridium perfringens, anti- | ScFv-1A8 | Zhao, B. and | 22546 |
| | alpha toxin 1A8 | | Xu, C. | |
| | | | “Cloning and | |
| | | | sequencing of | |
| | | | the ScFv-2.E3 | |
| | | | gene anti- | |
| | | | alpha toxin of | |
| | | | clostridium | |
| | | | perfringens | |
| | | | type A”, Chin. | |
| | | | J. Vet. Sci. 20, | |
| | | | 246-248 | |
| | | | (2000), CNBI | |
| | | | Accession # | |
| | | | AAU11282 | |
| BACG96 | ScFv, Antibody against Clostridium perfringens, anti- | ScFv-2E3 | Zhao, B. and | 22547 |
| | alpha toxin 2E3 | | Xu, C. | |
| | | | “Cloning and | |
| | | | sequencing of | |
| | | | the ScFv-2E3 | |
| | | | gene anti- | |
| | | | alpha toxin of | |
| | | | clostridium | |
| | | | perfringens | |
| | | | type A”, Chin. | |
| | | | J. Vet. Sci. 20, | |
| | | | 246-248 | |
| | | | (2000), NCBI | |
| | | | Accession # | |
| | | | AAU11283 | |
| BACG97 | Variable fragment, Antibody against Pseudomonas, | αTT2 | U.S. Pat. No. | 22548 |
| | Clostridium, Staphylococcus, Pasteurella, Yersinia, | | 7,655,759 | |
| | Bacillus anthracis, Neisseria, Vibrio, enterotoxic E. coli, | | SEQ ID NO: 8 | |
| | Salmonella, Shigella, and Listeria, Clostridium, | | | |
| | Staphylococcus, Pseudomonas, Pasteurella, Yersinia, | | | |
| | Bacillus anthracis, Neisseria, Vibrio, enterotoxic E. coli, | | | |
| | Salmonella, Shigella, and Listeria bacteria | | | |
| BACG98 | Variable fragment, antibody against Pseudomonas, | αTT1 | U.S. Pat. No. | 22549 |
| | Clostridium, Staphylococcus, Pasteurella, Yersinia, | | 7,655,759 | |
| | Bacillus anthracis, Neisseria, Vibrio, enterotoxic E. coli, | | SEQ ID NO: 7 | |
| | Salmonella, Shigella, and Listeria, Clostridium, | | | |
| | Staphylococcus, Pseudomonas,Pasteurella, Yersinia, | | | |
| | Bacillus anthracis, Neisseria, Vibrio, enterotoxic E. coli, | | | |
| | Salmonella, Shigella, and Listeria bacteria, | | | |

[0432] In some embodiments, the payload region of the viral particle comprises one or more nucleic acid sequences encoding one or more of the payload antibody polypeptides listed in Table 17 against Hepatitis A and/or Hepatitis E (HEPAE1-HEPAE41; SEQ ID NO: 22550-22590).

TABLE 17
Antibodies against Hepatitis A and Hepatitis E

| Antibody | | | | SEQ |
|---|---|---|---|---|
| No. | Description | Antibody Name | Reference Information | ID NO |
| HEPAE1 | Heavy chain variable region, | HEV-Fab-216 | CN1486990A; CN100497391C | 22550 |
| | HEV Ab, a humanized | | | |
| | neutralizing genetically | | | |
| | engineered antibody | | | |
| HEPAE2 | Heavy chain variable region, | HEV-Fab-315 | CN1486990A; CN100497391C | 22551 |
| | HEV Ab, a humanized | | | |
| | neutralizing genetically | | | |
| | engineered antibody | | | |
| HEPAE3 | Heavy chain variable region, | HEV-Fab-319 | CN1486990A; CN100497391C | 22552 |
| | HEV Ab, a humanized | | | |
| | neutralizing genetically | | | |
| | engineered antibody | | | |
| HEPAE4 | Heavy chain variable region, | HEV-Fab-328 | CN1486990A; CN100497391C | 22553 |
| | HEV Ab, a humanized | | | |
| | neutralizing genetically | | | |
| | engineered antibody | | | |
| HEPAE5 | Heavy chain variable region, | HEV-Fab-404 | CN1486990A; CN100497391C | 22554 |
| | HEV Ab, a humanized | | | |
| | neutralizing genetically | | | |
| | engineered antibody | | | |
| HEPAE6 | Heavy chain variable region, | 13D8 | U.S. Pat. No. 7,786,264 SEQ ID NO. 8; | 22555 |
| | HEV monoclonal antibody | | US20060233822; US20100003281; | |
| | | | EP1452541; EP2322625 | |
| HEPAE7 | Heavy chain variable region, | 16D7 | U.S. Pat. No. 7,786,264 SEQ ID NO. 20; | 22556 |
| | HEV monoclonal antibody | | US20060233822; US20100003281; | |
| | | | EP1452541; EP2322625 | |
| HEPAE8 | Heavy chain variable region, | 8C11 | U.S. Pat. No. 7,786,264 SEQ ID NO. 12; | 22557 |
| | HEV monoclonal antibody | | US20060233822; US20100003281; | |
| | | | EP1452541; EP2322625 | |
| HEPAE9 | Heavy chain variable region, | 8H3 | U.S. Pat. No. 7,786,264 SEQ ID NO. 16; | 22558 |
| | HEV monoclonal antibody | | US20060233822; US20100003281; | |
| | | | EP1452541; EP2322625 | |
| HEPAE10 | Heavy chain variable region, | HEV#31 | U.S. Pat. No. 7,148,323 SEQ ID NO: 3; | 22559 |
| | HEV neutralizing antibody | | US20050233316; U.S. Pat. No. 6,930,176; | |
| | | | WO2001040270 | |
| HEPAE11 | Heavy chain variable region, | HEV#4 | U.S. Pat. No. 7,786,264 SEQ ID NO: 1; | 22560 |
| | HEV neutralizing antibody | | US20050233316; U.S. Pat. No. 6,930,176; | |
| | | | WO2001040270 | |
| HEPAE12 | Heavy chain variable region, | anti-HAV | Kim S. J., et al., Neutralizing | 22561 |
| | partial, HAV | capsid | human monoclonal antibodies to | |
| | | | hepatitis A virus recovered by | |
| | | | phage display; Virology 318 (2), | |
| | | | 598-607 (2004), NCBI Accession | |
| | | | # AAO86899.1(124aa) | |
| HEPAE13 | Heavy chain variable region, | anti-HAV | Kim S. J., et al., Neutralizing | 22562 |
| | partial, HAV | capsid | human monoclonal antibodies to | |
| | | | hepatitis A virus recovered by | |
| | | | phage display; Virology 318 (2), | |
| | | | 598-607 (2004), NCBI Accession | |
| | | | # AAO86898.1(129aa) | |
| HEPAE14 | Heavy chain variable region, | anti-HAV | Kim S. J., et al., Neutralizing | 22563 |
| | partial, HAV | capsid | human monoclonal antibodies to | |
| | | | hepatitis A virus recovered by | |
| | | | phage display; Virology 318 (2), | |
| | | | 598-607 (2004), NCBI Accession | |
| | | | # AAO86897.1(123aa) | |
| HEPAE15 | Heavy chain variable region, | anti-HA V | Kim S. J., et al., Neutralizing | 22564 |
| | partial, HAV | capsid | human monoclonal antibodies to | |
| | | | hepatitis A virus recovered by | |
| | | | phage display; Virology 318 (2), | |
| | | | 598-607 (2004), NCBI Accession | |
| | | | # AAO86896.1(129aa) | |
| HEPAE16 | Heavy chain, HEV antibody | 8g12 | Gu Y., et al., Structural basis for | 22565 |
| | (mouse monoclonal antibody), | | the neutralization of hepatitis E | |
| | E2 glycoprotein | | virus by a cross-genotype | |
| | | | antibody; Cell Res. 25 (5), | |
| | | | 604-620 (2015); NCBI Accession | |
| | | | # 4PLJ_H (229aa) | |
| HEPAE17 | Heavy chain, HEV antibody | | Tang X., et al., Proc. Natl. Acad. | 22566 |
| | (mouse monoclonal antibody), E2 | | Sci. U.S.A. 108 (25), 10266- | |
| | glycoprotein | | 10271 (2011); NCBI Accession # | |
| | | | 3RKD_H(230aa) | |
| HEPAE18 | Light chain variable region, | HAV#14 | U.S. Pat. No. 7,635,476 SEQ ID NO: 4; | 22567 |
| | gamma1, HAV, | | U.S. Pat. No. 7,282,205; US20040260067; | |
| | | | US20070287667; WO2003040341 | |
| HEPAE19 | Light chain variable region, | HAV#4 | U.S. Pat. No. 7,635,476 SEQ ID NO: 1; | 22568 |
| | gamma1, HAV, | | U.S. Pat. No. 7,282,205; US20040260067; | |
| | | | US20070287667; WO2003040341 | |
| HEPAE20 | Light chain variable region, | HAV#5 | U.S. Pat. No. 7,635,476 SEQ ID NO: 2; | 22569 |
| | gamma1, HAV, | | U.S. Pat. No. 7,282,205; US20040260067; | |
| | | | US20070287667; WO2003040341 | |
| HEPAE21 | Light chain variable region, | HAV#6 | U.S. Pat. No. 7,635,476 SEQ ID NO: 3; | 22570 |
| | gamma1, HAV, | | U.S. Pat. No. 7,282,205; US20040260067; | |
| | | | US20070287667; WO2003040341 | |
| HEPAE22 | Light chain variable region, HEV | HEV-Fab-216 | CN1486990A; CN100497391C | 22571 |
| | Ab, a humanized neutralizing | | | |
| | genetically engineered antibody | | | |
| HEPAE23 | Light chain variable region, HEV | HEV-Fab-315 | CN1486990A; CN100497391C | 22572 |
| | Ab, a humanized neutralizing | | | |
| | genetically engineered antibody | | | |
| HEPAE24 | Light chain variable region, HEV | HEV-Fab-319 | CN1486990A; CN100497391C | 22573 |
| | Ab, a humanized neutralizing | | | |
| | genetically engineered antibody | | | |
| HEPAE25 | Light chain variable region, HEV | HEV-Fab-328 | CN1486990A; CN100497391C | 22574 |
| | Ab, a humanized neutralizing | | | |
| | genetically engineered antibody | | | |
| HEPAE26 | Light chain variable region, HEV | HEV-Fab-404 | CN1486990A; CN100497391C | 22575 |
| | Ab, a humanized neutralizing | | | |
| | genetically engineered antibody | | | |
| HEPAE27 | Light chain variable region, | | WO2011114353 SEQ ID NO: 25 | 22576 |
| | monovalent, HAV | | | |
| HEPAE28 | Light chain variable region, | anti-HAV | Kim S. J., et al., Neutralizing | 22577 |
| | partial, HAV | capsid | human monoclonal antibodies to | |
| | | | hepatitis A virus recovered by | |
| | | | phage display; Virology 318 (2), | |
| | | | 598-607 (2004), NCBI Accession | |
| | | | # AAO86903.1(107aa) | |
| HEPAE29 | Light chain variable region, | anti-HAV | Kim S. J., el al., Neutralizing | 22578 |
| | partial, HAV | capsid | human monoclonal antibodies to | |
| | | | hepatitis A virus recovered by | |
| | | | phage display; Virology 318 (2), | |
| | | | 598-607 (2004), NCBI Accession | |
| | | | # AAO86902.1(107aa) | |
| HEPAE30 | Light chain variable region, | anti-HAV | Kim S. J., el al., Neutralizing | 22579 |
| | partial, HAV | capsid | human monoclonal antibodies to | |
| | | | hepatitis A virus recovered by | |
| | | | phage display; Virology 318 (2), | |
| | | | 598-607 (2004), NCBI Accession | |
| | | | # AAO86901.1(107aa) | 22580 |
| HEPAE31 | Light chain variable region, | anti-HAV | Kim S. J., et al., Neutralizing | |
| | partial, HAV | capsid | human monoclonal antibodies to | |
| | | | hepatitis A virus recovered by | |
| | | | phage display; Virology 318 (2), | |
| | | | 598-607 (2004). NCBI Accession | |
| | | | # AAO86900.1(107aa) | |
| HEPAE32 | Light chain variable, HEV | 13D8 | U.S. Pat. No. 7,786,264 SEQ ID NO. 6; | 22581 |
| | monoclonal antibody | | US20060233822; US20100003281; | |
| | | | EP1452541; EP2322625 | |
| HEPAE33 | Light chain variable, HEV | 16D7 | U.S. Pat. No. 7,786,264 SEQ ID NO. 18; | 22582 |
| | monoclonal antibody | | US20060233822; US20100003281; | |
| | | | EP1452541; EP2322625 | |
| HEPAE34 | Light chain variable, HEV | 8C11 | U.S. Pat. No. 7,786,264 SEQ ID NO: 10; | 22583 |
| | monoclonal antibody | | US20060233822; US20100003281; | |
| | | | EP1452541; EP2322625 | |
| HEPAE35 | Light chain variable, HEV | 8H3 | U.S. Pat. No. 7,786,264 SEQ ID NO. 14; | 22584 |
| | monoclonal antibody | | US20060233822; US20100003281; | |
| | | | EP1452541; EP2322625 | |
| HEPAE36 | Light chain variable, HEV | HEV#31 | U.S. Pat. No. 7,148,323 SEQ ID NO: 4; | 22585 |
| | monoclonal antibody | | US20050233316; U.S. Pat. No. 6,930,176; | |
| | | | WO2001040270 | |
| HEPAE37 | Light chain variable, HEV | HEV#4 | U.S. Pat. No. 7,148,323 SEQ ID NO: 2; | 22586 |
| | monoclonal antibody | | US20050233316; U.S. Pat. No. 6,930,176; | |
| | | | WO2001040270 | |
| HEPAE38 | Light chain, E2 glycoprotein, | 8g12 | Gu Y., et al., Structural basis for | 22587 |
| | HEV antibody (mouse | | the neutralization of hepatitis E | |
| | monoclonal antibody) | | virus by a cross-genotype | |
| | | | antibody; Cell Res. 25 (5), 604- | |
| | | | 620 (2015); NCBI Accession # | |
| | | | 4PLJ_L (212aa) | |
| HEPAE39 | Light chain, E2 glycoprotein, | | Tang X., et al., Proc. Natl. Acad. | 22588 |
| | HEV antibody (mouse | | Sci. U.S.A. 108 (25), 10266- | |
| | monoclonal antibody) | | 10271 (2011), NCBI Accession # | |
| | | | 3RKD_C (214aa) | |
| HEPAE40 | Monovalent Heavy chain variable | | WO2011114353 SEQ ID NO: 24 | 22589 |
| | region, HAV | | | |
| HEPAE41 | ScFv, HAV, Monovalent human | | WO2011114353 SEQ ID NO: 27 | 22590 |
| | antibody | | | |

[0433] In some embodiments, the payload region of the viral particle comprises one or more nucleic acid sequences, fragment or variants thereof or encodes one or more polypeptides, fragments or variants thereof described in Chinese Pub. No. CN103923881, CN103923882, CN1605628, CN1318565, CN1163512, the contents of each of which are herein incorporated by reference in their entirety, against HAV.

[0434] In some embodiments, the payload region of the viral particle comprises one or more nucleic acid sequences encoding one or more of the payload antibody polypeptides listed in Table 18 against Norwalk virus (NORV1-NORV48; SEQ ID NO: 22591-22638).

TABLE 18
Antibodies against Norwalk virus

| Antibody | | Antibody | | SEQ |
|---|---|---|---|---|
| No. | Description | Name | Reference Information | ID NO |
| NORV1 | Heavy chain variable region, | B7 | WO2014126921 SEQ ID NO: 8 | 22591 |
| | Norwalk virus | | | |
| NORV2 | Light chain variable region, | B7 | WO2014126921 SEQ ID NO: 16 | 22592 |
| | Norwalk virus | | | |
| NORV3 | Heavy chain variable region, | B72 | WO2014126921 SEQ ID NO: 120 | 22593 |
| | Norwalk virus | | | |
| NORV4 | Light chain variable region, | B72 | WO2014126921 SEQ ID NO: 128 | 22594 |
| | Norwalk virus | | | |
| NORV5 | Heavy chain variable region, | C9 | WO2014126921 SEQ ID NO: 88 | 22595 |
| | Norwalk virus | | | |
| NORV6 | Light chain variable region, | C9 | WO2014126921 SEQ ID NO: 96 | 22596 |
| | Norwalk virus | | | |
| NORV7 | Heavy chain variable region, | D4 | WO2014126921 SEQ ID NO: 136 | 22597 |
| | Norwalk virus | | | |
| NORV8 | Light chain variable region, | D4 | WO2014126921 SEQ ID NO: 144 | 22598 |
| | Norwalk virus | | | |
| NORV9 | Heavy chain variable region, | D8 | WO2014126921 SEQ ID NO: 24 | 22599 |
| | Norwalk virus | | | |
| NORV10 | Light chain variable region, | D8 | WO2014126921 SEQ ID NO: 32 | 22600 |
| | Norwalk virus | | | |
| NORV11 | Heavy chain variable region, | E5 | WO2014126921 SEQ ID NO: 40 | 22601 |
| | Norwalk virus | | | |
| NORV12 | Light chain variable region, | E5 | WO2014126921 SEQ ID NO: 48 | 22602 |
| | Norwalk virus | | | |
| NORV13 | Heavy chain variable region, | FI1 | WO2014126921 SEQ ID NO: 72 | 22603 |
| | Norwalk virus | | | |
| NORV14 | Light chain variable region, | FI1 | WO2014126921 SEQ ID NO: 80 | 22604 |
| | Norwalk virus | | | |
| NORV15 | Heavy chain variable region, | G3 | WO2014126921 SEQ ID NO: 104 | 22605 |
| | Norwalk virus | | | |
| NORV16 | Light chain variable region, | G3 | WO2014126921 SEQ ID NO: 112 | 22606 |
| | Norwalk virus | | | |
| NORV17 | Heavy chain variable region, | G4 | WO2014126921 SEQ ID NO: 56 | 22607 |
| | Norwalk virus | | | |
| NORV18 | Light chain variable region, | G4 | WO2014126921 SEQ ID NO: 64 | 22608 |
| | Norwalk virus | | | |
| NORV19 | Heavy chain variable region, | | WO2014183052 SEQ ID NO: 1 | 22609 |
| | Norwalk or MD2004 virus | | | |
| NORV20 | Heavy chain variable region, | | WO2014183052 SEQ ID NO: 2 | 22610 |
| | Norwalk or MD2004 virus | | | |
| NORV21 | Heavy chain variable region, | | WO2014183052 SEQ ID NO: 3 | 22611 |
| | Norwalk or MD2004 virus | | | |
| NORV22 | Heavy chain variable region, | | WO2014183052 SEQ ID NO: 4 | 22612 |
| | Norwalk or MD2004 virus | | | |
| NORV23 | Heavy chain variable region, | | WO2014183052 SEQ ID NO: 5 | 22613 |
| | Norwalk or MD2004 virus | | | |
| NORV24 | Heavy chain variable region, | | WO2014183052 SEQ ID NO: 6 | 22614 |
| | Norwalk or MD2004 virus | | | |
| NORV25 | Heavy chain variable region, | | WO2014183052 SEQ ID NO: 7 | 22615 |
| | Norwalk or MD2004 virus | | | |
| NORV26 | Heavy chain variable region, | | WO2014183052 SEQ ID NO: 8 | 22616 |
| | Norwalk or MD2004 virus | | | |
| NORV27 | Heavy chain variable region, | | WO2014183052 SEQ ID NO: 9 | 22617 |
| | Norwalk or MD2004 virus | | | |
| NORV28 | Heavy chain variable region, | | WO2014183052 SEQ ID NO: 10 | 22618 |
| | Norwalk or MD2004 virus | | | |
| NORV29 | Heavy chain variable region, | | WO2014183052 SEQ ID NO: 11 | 22619 |
| | Norwalk or MD2004 virus | | | |
| NORV30 | Heavy chain variable region, | | WO2014183052 SEQ ID NO: 12 | 22620 |
| | Norwalk or MD2004 virus | | | |
| NORV31 | Heavy chain variable region, | | WO2014183052 SEQ ID NO: 13 | 22621 |
| | Norwalk or MD2004 virus | | | |
| NORV32 | Heavy chain variable region, | | WO2014183052 SEQ ID NO: 14 | 22622 |
| | Norwalk or MD2004 virus | | | |
| NORV33 | Heavy chain variable region, | | WO2014183052 SEQ ID NO: 15 | 22623 |
| | Norwalk or MD2004 virus | | | |
| NORV34 | Heavy chain variable region, | | WO2014183052 SEQ ID NO: 16 | 22624 |
| | Norwalk or MD2004 virus | | | |
| NORV35 | Heavy chain variable region, | | WO2014183052 SEQ ID NO: 17 | 22625 |
| | Norwalk or MD2004 virus | | | |
| NORV36 | Heavy chain variable region, | | WO2014183052 SEQ ID NO: 18 | 22626 |
| | Norwalk or MD2004 virus | | | |
| NORV37 | Heavy chain variable region, | | WO2014183052 SEQ ID NO: 19 | 22627 |
| | Norwalk or MD2004 virus | | | |
| NORV38 | Heavy chain variable region, | | WO2014183052 SEQ ID NO: 20 | 22628 |
| | Norwalk or MD2004 virus | | | |
| NORV39 | Heavy chain variable region, | | WO2014183052 SEQ ID NO: 21 | 22629 |
| | Norwalk or MD2004 virus | | | |
| NORV40 | Heavy chain variable region, | | WO2014183052 SEQ ID NO: 22 | 22630 |
| | Norwalk or MD2004 virus | | | |
| NORV41 | Heavy chain variable region, | | WO2014183052 SEQ ID NO: 23 | 22631 |
| | Norwalk or MD2004 virus | | | |
| NORV42 | Heavy chain variable region, | | WO2014183052 SEQ ID NO: 24 | 22632 |
| | Norwalk or MD2004 virus | | | |
| NORV43 | Heavy chain variable region, | | WO2014183052 SEQ ID NO: 25 | 22633 |
| | Norwalk or MD2004 virus | | | |
| NORV44 | Heavy chain variable region, | | WO2014183052 SEQ ID NO: 26 | 22634 |
| | Norwalk or MD2004 virus | | | |
| NORV45 | Heavy chain variable region, | | WO2014183052 SEQ ID NO: 27 | 22635 |
| | Norwalk or MD2004 virus | | | |
| NORV46 | Heavy chain variable region, | | WO2014183052 SEQ ID NO: 28 | 22636 |
| | Norwalk or MD2004 virus | | | |
| NORV47 | Heavy chain variable region, | | WO2014183052 SEQ ID NO: 29 | 22637 |
| | Norwalk or MD2004 virus | | | |
| NORV48 | Heavy chain variable region, | | WO2014183052 SEQ ID NO: 30 | 22638 |
| | Norwalk or MD2004 virus | | | |

[0435] In some embodiments, the payload region of the viral particle comprises one or more nucleic acid sequences encoding one or more of the payload antibody polypeptides listed in Table 19 against Rotavirus (ROTV1-ROTV25; SEQ ID NO: 22639-22663).

TABLE 19
Antibodies against rotavirus

| Antibody | | | SEQ |
|---|---|---|---|
| No. | Description | Reference Information | ID NO |
| ROTV1 | Heavy chain single domain | U.S. Pat. No. 8,105,592; US20090226418 SEQ ID NO: 1 | 22639 |
| ROTV2 | Heavy chain single domain | U.S. Pat. No. 8,105,592; US20090226418 SEQ ID NO: 2 | 22640 |
| ROTV3 | Heavy chain single domain | U.S. Pat. No. 8,105,592; US20090226418 SEQ ID NO: 3 | 22641 |
| ROTV4 | Heavy chain single domain | U.S. Pat. No. 8,105,592; US20090226418 SEQ ID NO: 4 | 22642 |
| ROTV5 | Heavy chain single domain | U.S. Pat. No. 8,105,592; US20090226418 SEQ ID NO: 5 | 22643 |
| ROTV6 | Heavy chain single domain | U.S. Pat. No. 8,105,592; US20090226418 SEQ ID NO: 6 | 22644 |
| ROTV7 | Heavy chain single domain | U.S. Pat. No. 8,105,592; US20090226418 SEQ ID NO: 7 | 22645 |
| ROTV8 | Heavy chain single domain | U.S. Pat. No. 8,105,592; US20090226418 SEQ ID NO: 8 | 22646 |
| ROTV9 | Heavy chain single domain | U.S. Pat. No. 8,105,592; US20090226418 SEQ ID NO: 9 | 22647 |
| ROTV10 | Heavy chain single domain | U.S. Pat. No. 8,105,592; US20090226418 SEQ ID NO: 10 | 22648 |
| ROTV11 | Heavy chain single domain | U.S. Pat. No. 8,105,592; US20090226418 SEQ ID NO: 11 | 22649 |
| ROTV12 | Heavy chain single domain | U.S. Pat. No. 8,105,592; US20090226418 SEQ ID NO: 12 | 22650 |
| ROTV13 | Heavy chain single domain | U.S. Pat. No. 8,105,592; US20090226418 SEQ ID NO: 13 | 22651 |
| ROTV14 | Heavy chain single domain | U.S. Pat. No. 8,105,592; US20090226418 SEQ ID NO: 14 | 22652 |
| ROTV15 | Heavy chain single domain | U.S. Pat. No. 8,105,592; US20090226418 SEQ ID NO: 15 | 22653 |
| ROTV16 | Heavy chain single domain | U.S. Pat. No. 8,105,592; US20090226418 SEQ ID NO: 16 | 22654 |
| ROTV17 | Heavy chain single domain | U.S. Pat. No. 8,105,592; US20090226418 SEQ ID NO: 17 | 22655 |
| ROTV18 | Heavy chain single domain | U.S. Pat. No. 8,105,592; US20090226418 SEQ ID NO: 18 | 22656 |
| ROTV19 | Heavy chain single domain | U.S. Pat. No. 8,105,592; US20090226418 SEQ ID NO: 19 | 22657 |
| ROTV20 | Heavy chain single domain | U.S. Pat. No. 8,105,592; US20090226418 SEQ ID NO: 20 | 22658 |
| ROTV21 | Heavy chain single domain | U.S. Pat. No. 8,105,592; US20090226418 SEQ ID NO: 21 | 22659 |
| ROTV22 | Human VP6 polypeptide | US20030166139 SEQ ID NO: 2 | 22660 |
| ROTV23 | Human VP6 polypeptide | US20030166139 SEQ ID NO: 4 | 22661 |
| ROTV24 | | Aiyegbo, M. S., et al “Human RotavirUSVp6- | 22662 |
| | | Specific Antibodies Mediate intracellular | |
| | | Neutralization By Binding To A Quater | |
| | | Structure in The Transcriptional Pore”, Plos One | |
| | | 8, 61101 (2013), NCBI Accession # 4HFW_B | |
| ROTV25 | | Aiyegbo, M. S., et al “Human RotavirUSVp6- | 22663 |
| | | Specific Antibodies Mediate intracellular | |
| | | Neutralization By Binding To A Quater | |
| | | Structure in The Transcriptional Pore”, Plos One | |
| | | 8, 61101 (2013), NCBI Accession # 4HFW_A | |

[0436] In some embodiments, the payload region of the viral particle comprises one or more nucleic acid sequences encoding one or more of the payload antibody polypeptides listed in Table 20 against Entamoeba Histolytica (ENTH1-ENTH16; SEQ ID NO: 22664-22679).

TABLE 20
Antibodies against Entamoeba Histolytica

| Antibody No./ | | | SEQ |
|---|---|---|---|
| Antibody Name | Description | Reference Information | ID NO |
| ENTH1 | Heavy chain (partial sequence) gamma, | Cheng, X. J. et al., Exp. Parasitol. 96 | 22664 |
| | Entamoeba histolytica antibody | (1), 52-56 (2000), NCBI Accession # | |
| | | BAA97670.1 (220aa) | |
| ENTH2 | Heavy chain (partial sequence) gamma, | Tachibana, H. et al., Clin. Diagn. Lab. | 22665 |
| | Entamoeba histolytica Antibody | Immunol. 6 (3), 383-387 (1999), NCBI | |
| | | Accession # BAA82104.1 (222aa) | |
| ENTH3 | Heavy chain (partial sequence) gamma, | Tachibana, H. et al., Clin. Diagn. Lab. | 22666 |
| | Entamoeba histolytica Antibody | Immunol. 6 (3), 383-387 (1999), NCBI | |
| | | Accession # BAA82101.1 (226aa) | |
| ENTH4 | Heavy chain (partial sequence) IgG, | Tachibana, H., et al., Infect. Immun. 77 | 22667 |
| | Entamoeba histolytica Intermediate | (1), 549-556 (2009), NCBI Accession # | |
| | Subunit Lectin-Specific Human | BAH03695.1 (220aa) | |
| | Monoclonal Antibodies | | |
| ENTH5 | Heavy chain (partial sequence) IgG, | Tachibana, H., el al., Infect. Immun. 77 | 22668 |
| | Entamoeba histolytica Intermediate | (1), 549-556 (2009), NCBI Accession # | |
| | Subunit Lectin-Specific Human | BAH03694.1 (226aa) | |
| | Monoclonal Antibodies | | |
| ENTH6 | Heavy chain (partial sequence) IgG, | Tachibana, H., et al., Infect. Immun. 77 | 22669 |
| | Entamoeba histolytica Intermediate | (1), 549-556(2009), NCBI Accession # | |
| | Subunit Lectin-Specific Human | BAH03693.1 (221aa) | |
| | Monoclonal Antibodies | | |
| ENTH7 | Heavy chain (partial sequence) IgG, | Tachibana. H., et al., Infect. Immun. 77 | 22670 |
| | Entamoeba histolytica Intermediate | (1), 549-556 (2009), NCBI Accession # | |
| | Subunit Lectin-Specific Human | BAH03692.1 (223aa) | |
| | Monoclonal Anybodies | | |
| ENTH8 | Light chain (partial sequence) IgG, | Tachibana, H., et al., Infect. Immun. 77 | 22671 |
| | Entamoeba histolytica intermediate | (1), 549-556 (2009), NCBI Accession # | |
| | Subunit Lectin-Specific Human | BAH03699.1 (219aa) | |
| | Monoclonal Antibodies | | |
| ENTH9 | Light chain (partial sequence) IgG, | Tachibana. H., et al., Infect. Immun. 77 | 22672 |
| | Entamoeba histolytica Intermediate | (1), 549-556 (2009), NCBI Accession # | |
| | Subunit Lectin-Specific Human | BAH03698.1 (220aa) | |
| | Monoclonal Antibodies | | |
| ENTH10 | Light chain (partial sequence) IgG, | Tachibana, H., et al., Infect. Immun. 77 | 22673 |
| | Entamoeba histolytica Intermediate | (1), 549-556 (2009), NCBI Accession # | |
| | Subunit Lectin-Specific Human | BAH03697.1 (214aa) | |
| | Monoclonal Antibodies | | |
| ENTH11 | Light chain (partial sequence) IgG, | Tachibana, H., et al., Infect. Immun. 77 | 22674 |
| | Entamoeba histolytica Intermediate | (1), 549-556 (2009), NCBI Accession # | |
| | Subunit Lectin-Specific Human | BAH03696.1 (214aa) | |
| | Monoclonal Antibodies | | |
| ENTH12 | Light chain (partial sequence) kappa, | Cheng, X. J. et al., Exp. Parasitol. 96 (1), | 22675 |
| | Entamoeba histolytica antibody | 52-56 (2000), NCBI Accession # | |
| | | BAA97671.1 (214aa) | |
| ENTH13 | Light chain (partial sequence) kappa, | Tachibana, H. et al., Clin. Diagn. Lab. | 22676 |
| | Entamoeba histolytica antibody | Immunol. 6 (3), 383-387 (1999), NCBI | |
| | | Accession # BAA821051 (215aa) | |
| ENTH14 | Light chain (partial sequence) kappa, | Tachibana, H. et al., Clin. Diagn. Lab. | 22677 |
| | Entamoeba histolytica antibody | Immunol. 6 (3), 383-387 (1999), NCBI | |
| | | Accession # BAA82100.1 (214aa) | |
| ENTH15/ | Single chain Fv Antibody 350-E2 | NCBI Accession # AEY80059.1 (274aa) | 22678 |
| 350-E2 | against Entamoeba histolytica | | |
| ENTH16/ | Single chain Fv Antibody JR4A11 | NCBI Accession # AEY80058.1 (287aa) | 22679 |
| JR4A11 | Entamoeba histolytica | | |

[0437] In some embodiments, the payload region of the viral particle comprises one or more nucleic acid sequences encoding one or more of the payload antibody polypeptides, fragments or variants thereof described in International Pub. No. WO2001012646, the contents of which are herein incorporated by reference in their entirety, against Listeria monocytogenes, salmonella and/or leishmania.

### Neglected Tropical Diseases

[0438] In some embodiments, the payload region of the viral particle comprises one or more nucleic acid sequences encoding one or more of the neglected tropical disease related payload antibody polypeptides listed in Tables 21-24.

[0439] In some embodiments, the payload region of the viral particle comprises one or more nucleic acid sequences encoding one or more of the payload antibody polypeptides listed in Table 21 against Dengue Fever Virus (DENG1-DENG123; SEQ ID NO: 22680422802).

TABLE 21
Antibodies against Dengue Fever Virus

| Antibody | | Antibody | | SEQ |
|---|---|---|---|---|
| No. | Description | Name | Reference Information | ID NO |
| DENG1 | Bispecific, DENV serotype 1, | m3666 | US20150218255 SEQ ID NO: 96 | 22680 |
| | DENV serotype 2, DENV | | | |
| | serotype 3, and DENV serotype 4 | | | |
| DENG2 | Fab Fragment | Fab 14c10 | Teoh, E. P., el al., Sci Transl Med 4 | 22681 |
| | | | (139), 139RA83 (2012), NCBI | |
| | | | Accession # 4CAU_E(230 aa) | |
| DENG3 | Heavy chain | 5j7 Fab | Fibriansah, G., el al., A highly | 22682 |
| | | | potent human antibody neutralizes | |
| | | | dengue virus serotype 3 by binding | |
| | | | across three surface proteins; Nat | |
| | | | Commun 6, 6341 (2015), NCBI | |
| | | | Accession # 3J6U_H (135aa) | |
| DENG4 | Heavy Chain | Ede1 C8 | Dejnirattisai, W., et al., A new | 22683 |
| | | | class of highly potent, broadly | |
| | | | neutralizing antibodies isolated | |
| | | | from viremic patients infected with | |
| | | | dengue virus; Nat. Immunol. 16 | |
| | | | (2), 170-177 (2015), NCBI | |
| | | | Accession # 4UTA_H (272 aa) | |
| DENG5 | Heavy Chain | Fab 2h12 | Midgley, C. M., et al., J, Immunol. | 22684 |
| | | | 188 (10), 4971-4979 (2012), NCBI | |
| | | | Accession # 4AL8_H (217 aa) | |
| DENG6 | Heavy Chain Fab Fragment Of | 1f4 Fab | Fibriansah, G., et al., A potent anti- | 22685 |
| | Antibodv 1f4 | | dengue human antibody | |
| | | | preferentially recognizes the | |
| | | | conformation of E protein | |
| | | | monomers assembled on the virus | |
| | | | surface; EMBO Mol Med 6 (3), | |
| | | | 358-371 (2014), NCBI Accession | |
| | | | # 4C2I_H (232 aa) | |
| DENG7 | Heavy chain variable region | 9Fl 2 | WO2010093335 SEQ ID NO: 4 | 22686 |
| DENG8 | Heavy chain variable region, | 9F12 | US20150218255 SEQ ID NO: 83 | 22687 |
| | DENV serotype 1, DENV | | | |
| | serotype 2, DENV serotype 3, and | | | |
| | DENV serotype 4 | | | |
| DENG9 | Heavy chain variable region, | m366 | US20150218255 SEQ ID NO: 4 | 22688 |
| | DENV serotype 1, DENV | | | |
| | serotype 2, DENV serotype 3, and | | | |
| | DENV serotype 4 | | | |
| DENG10 | Heavy chain variable region, | m366.6 | US20150218255 SEQ ID NO: 24 | 22689 |
| | DENV serotype 1, DENV | | | |
| | serotype 2, DENV serotype 3, and | | | |
| | DENV serotype 4 | | | |
| DENG11 | Heavy chain variable region, | m360.6 | US20150218255 SEQ ID NO: 44 | 22690 |
| | DENV serotype 1, DENV | | | |
| | serotype 2, DENV serotype 3, and | | | |
| | DENV serotype 4 | | | |
| DENG12 | Heavy chain variable region, | HMB-DV-1 | U.S. Pat. No. 9,073,981 SEQ ID NO: 13 | 22691 |
| | DENV-I, DENV-2, DENV-3, | | | |
| | DENV-4 | | | |
| DENG13 | Heavy chain variable region, | HMB-DV-2 | U.S. Pat. No. 9,073,981 SEQ ID NO: 29 | 22692 |
| | DENV-I, DENV-2, DENV-3, | | | |
| | DENV-4 | | | |
| DENG14 | Heavy chain variable region, | HMB-DV-3 | U.S. Pat. No. 9,073,981 SEQ ID NO: 45 | 22693 |
| | DENV-I, DENV-2, DENV-3, | | | |
| | DENV-4 | | | |
| DENG15 | Heavy chain variable region, | HMB-DV-4 | U.S. Pat. No. 9,073,981 SEQ ID NO: 61 | 22694 |
| | DENV-I, DENV-2, DENV-3, | | | |
| | DENV-4 | | | |
| DENG16 | Heavy chain variable region, | HMB-DV-4 | U.S. Pat. No. 9,073,981 SEQ ID NO: 65 | 22695 |
| | DENV-I, DENV-2, DENV-3, | | | |
| | DENV-4 | | | |
| DENG17 | Heavy chain variable region, | HMB-DV-5 | U.S. Pat. No. 9,073,981 SEQ ID NO: 79 | 22696 |
| | DENV-I, DENV-2, DEN V-3, | | | |
| | DENV-4 | | | |
| DENG18 | Heavy chain variable region, | HMB-DV-6, | U.S. Pat. No. 9,073,981 SEQ ID NO: 95 | 22697 |
| | DENV-I, DENV-2, DENV-3, | HMB-DV-7 | | |
| | DENV-4 | | | |
| DENG19 | Heavy chain variable region, | HMB-DV-8 | U.S. Pat. No. 9,073,981 SEQ ID NO: 117 | 22698 |
| | DENV-I, DENV-2, DENV-3, | | | |
| | DENV-4 | | | |
| DENG20 | Heavy chain variable region, | HMB-DV-9 | U.S. Pat. No. 9,073,981 SEQ ID NO: 131 | 22699 |
| | DENV-I, DENV-2, DENV-3, | | | |
| | DENV-4 | | | |
| DENG21 | Heavy chain variable region, | HMB-DV-10 | U.S. Pat. No. 9,073,981 SEQ ID NO: 145 | 22700 |
| | DENV-I, DENV-2, DENV-3, | | | |
| | DENV-4 | | | |
| DENG22 | Heavy chain variable region, | HMB-DV-11 | U.S. Pat. No. 9,073,981 SEQ ID NO: 151 | 22701 |
| | DENV-I, DENV-2, DENV-3, | | | |
| | DENV-4 | | | |
| DENG23 | Heavy chain variable region, | HMB-DV-12 | U.S. Pat. No. 9,073,981 SEQ ID NO: 165 | 22702 |
| | DENV-I, DENV-2, DENV-3, | | | |
| | DENV-4 | | | |
| DENG24 | Heavy chain variable region, | HMB-DV-13 | U.S. Pat. No. 9,073,981 SEQ ID NO: 181 | 22703 |
| | DENV-I, DENV-2, DENV-3, | | | |
| | DENV-4 | | | |
| DENG25 | Heavy chain variable region, | HMB-DV-14 | U.S. Pat. No. 9,073,981 SEQ ID NO: 195 | 22704 |
| | DENV-I, DENV-2, DENV-3, | | | |
| | DENV-4 | | | |
| DENG26 | Heavy chain variable region, DV- | A68 | US20150225474 SEQ ID NO: 19 | 22705 |
| | 1, DV-2, DV-3, and DV-10 | | | |
| DENG27 | Heavy chain variable region, DV- | A100 | US20150225474 SEQ ID NO: 20 | 22706 |
| | 1, DV-2, DV-3, and DV-11 | | | |
| DENG28 | Heavy chain variable region, DV- | C58 | US20150225474 SEQ ID NO: 21 | 22707 |
| | 1, DV-2, DV-3, and DV-12 | | | |
| DENG29 | Heavy chain variable region, DV- | C98 | US20150225474 SEQ ID NO: 32 | 22708 |
| | 1, DV-2, DV-3, and DV-13 | | | |
| DENG30 | Heavy chain variable region, DV- | A11 | US20150225474 SEQ ID NO: 33 | 22709 |
| | 1, DV-2, DV-3, and DV-14 | | | |
| DENG31 | Heavy chain variable region, DV- | B11 | US20150225474 SEQ ID NO: 36 | 22710 |
| | 1, DV-2, DV-3, and DV-15 | | | |
| DENG32 | Heavy chain variable region, DV- | D88 | US20150225474 SEQ ID NO: 1 | 22711 |
| | 1, DV-2, DV-3, and DV-4 | | | |
| DENG33 | Heavy chain variable region, DV- | mAb11 | WO2014144061 SEQ ID NO: 1 | 22712 |
| | 1, DV-2, DV-3, and DV-1 | | | |
| DENG34 | Heavy chain variable region, DV- | F38 | US20150225474 SEQ ID NO: 80 | 22713 |
| | 1, DV-2, DV-3, and DV-5 | | | |
| DENG35 | Heavy chain variable region, DV- | A48 | US20150225474 SEQ ID NO: 16 | 22714 |
| | 1, DV-2, DV-3, and DV-6 | | | |
| DENG36 | Heavy drain variable region, DV- | C88 | US20150225474 SEQ ID NO: 17 | 22715 |
| | 1, DV-2, DV-3, and DV-7 | | | |
| DENG37 | Heavy chain variable region, DV- | F108 | US20150225474 SEQ ID NO: 18 | 22716 |
| | 1, DV-2, DV-3, and DV-8 | | | |
| DENG38 | Heavy chain variable region, DV- | B48 | US20150225474 SEQ ID NO: 18 | 22717 |
| | 1, DV-2, DV-3, and DV-9 | | | |
| DENG39 | Heavy chain, Antigen-binding | 2d22 | Fibriansah, G., et al., DENGUE | 22718 |
| | Fragment Of Human Antibody | | VIRUS. Cryo-EM structure of an | |
| | 2d22 | | antibody that neutralizes dengue | |
| | | | virus type 2 by locking E protein | |
| | | | dimers; Science 349 (6243), 88-91 | |
| | | | (2015), NCBI Accession # | |
| | | | 5A1Z_K (128 aa) | |
| DENG40 | Heavy chain, Dengue virus NS-1 | | U.S. Pat. No. 7,473,424; US20040209244; | 22719 |
| | protein | | WO2004067567; EP1592712 SEQ ID NO: 3 | |
| DENG41 | Heavy chain, Dengue virus | DB32-6 | U.S. Pat. No. 8,637,035 SEQ ID NO: 1 | 22720 |
| | serotype 2 | | | |
| DENG42 | Heavy chain, Dengue virus | DB2-3 | U.S. Pat. No. 8,637,035 SEQ ID NO: 13 | 22721 |
| | serotype 2 | | | |
| DENG43 | Heavy chain, Dengue virus | DB13-19 | U.S. Pat. No. 8,637,035 SEQ ID NO: 14 | 22722 |
| | serotype 2 | | | |
| DENG44 | Heavy chain, Dengue virus | DB23-3 | U.S. Pat. No. 8,637,035 SEQ ID NO: 15 | 22723 |
| | serotype 2 | | | |
| DENG45 | Heavy chain, Dengue virus | DB25-2 | U.S. Pat. No. 8,637,035 SEQ ID NO: 16 | 22724 |
| | serotype 2 | | | |
| DENG46 | Heavy chain, Dengue virus | DB42-3 | U.S. Pat. No. 8,637,035 SEQ ID NO: 17 | 22725 |
| | serotype 2 | | | |
| DENG47 | Heavy chain, Dengue virus type | 1A5 | U.S. Pat. No. 8,337,853 SEQ ID NO: 97 | 22726 |
| | 10 | | | |
| DENG48 | Heavy chain, Dengue virus type | 2H7 | U.S. Pat. No. 8,337,853 SEQ ID NO: 113 | 22727 |
| | 11 | | | |
| DENG49 | Heavy chain, Dengue virus type | 2H5 | U.S. Pat. No. 8,337,853 SEQ ID NO: 129 | 22728 |
| | 12 | | | |
| DENG50 | Heavy chain, Dengue virus type | 3A2 | US20130089543 SEQ ID NO: 145 | 22729 |
| | 13 | | | |
| DENG51 | Heavy chain, Dengue virus type | 1B2 | US20130089543 SEQ ID NO: 161 | 22730 |
| | 14 | | | |
| DENG52 | Heavy chain, Dengue virus type | 1A10 | US20130089543 SEQ ID NO: 177 | 22731 |
| | 15 | | | |
| DENG53 | Heavy chain, Dengue virus type 4 | 5H2 | U.S. Pat. No. 7,622,113 SEQ ID NO: 1 | 22732 |
| DENG54 | Heavy chain, Dengue virus type 5 | 5A7 | U.S. Pat. No. 7,622,113 SEQ ID NO: 17 | 22733 |
| DENG55 | Heavy chain, Dengue vires type 6 | 3C1 | U.S. Pat. No. 7,622,113 SEQ ID NO: 33 | 22734 |
| DENG56 | Heavy chain, Dengue virus type 7 | 3E4 | U.S. Pat. No. 7,622,113 SEQ ID NO: 49 | 22735 |
| DENG57 | Heavy chain, Dengue virus type 8 | 7G4 | U.S. Pat. No. 7,622,113 SEQ ID NO: 65 | 22736 |
| DENG58 | Heavy chain, Dengue virus type 9 | 5D9 | U.S. Pat. No. 7,622,113 SEQ ID NO: 81 | 22737 |
| DENG59 | Heavy chain, DV 1 | 14c10 clone | US20130259871 FIG. 4b | 22738 |
| | | 8 | | |
| DENG60 | Heavy chain, DV-1, DV-2, DV-3, | Antibody | US20140056913 SEQ ID NO: 1 | 22739 |
| | and DV-4 | 4e11 | | |
| DENG61 | Heavy chain, DV-1, DV-2, DV-3, | Variant of | US20140056913 SEQ ID NO: 21 | 22740 |
| | and DV-4 | 4E11 | | |
| DENG62 | Heavy chain, DV-1, DV-2, DV-3, | 4E5A | WO20155123362 SEQ ID NO: 29 | 22741 |
| | and DV-4 | | | |
| DENG63 | Light Chain | 5j7 Fab | Fibriansah, G., et al., A highly | 22742 |
| | | | potent human antibody neutralizes | |
| | | | dengue virus serotype 3 by binding | |
| | | | across three surface proteins; Nat | |
| | | | Commun 6, 6341 (2015), NCBI | |
| | | | Accession # 3J6U_L (118aa) | |
| DENG64 | Light Chain | Ede1 C8 | Dejnirattisai, W., et al., A new | 22743 |
| | | | class of highly potent, broadly | |
| | | | neutralizing antibodies isolated | |
| | | | from viremic patients infected with | |
| | | | dengue virus; Nat. Immunol. 16 | |
| | | | (2), 170-177 (2015), NCBI | |
| | | | Accession # 4UTA_L (217 aa) | |
| DENG65 | Light Chain | Fab 2h12 | Midgley, C. M., et al., J, Immunol. | 22744 |
| | | | 188 (10), 4971-4979 (2012), NCBI | |
| | | | Accession # 4AL8_L (213 aa) | |
| DENG66 | Light Chain Fab Fragment Of | 1f4 Fab | Fibriansah, G., et al., A potent anti- | 22745 |
| | Antibody 1f4 | | dengue human antibody | |
| | | | preferentially recognizes the | |
| | | | conformation of E protein | |
| | | | monomers assembled on the virus | |
| | | | surface; EMBO Mol Med 6 (3), | |
| | | | 358-371 (2014), NCBI Accession | |
| | | | # 4C2I_N (239 aa) | |
| DENG67 | Light chain variable region | 9Fl 2 | WO2010093335 SEQ ID NO: 6 | 22746 |
| DENG68 | Light chain variable region, | 9F12 | US20150218255 SEQ ID NO: 84 | 22747 |
| | DENV serotype 1, DENV | | | |
| | serotype 2, DENV serotype 3, and | | | |
| | DENV serotype 4 | | | |
| DENG69 | Light chain variable region, | m366 | US20150218255 SEQ ID NO: 6 | 22748 |
| | DENV serotype 1, DENV | | | |
| | serotype 2, DENV serotype 3, and | | | |
| | DENV serotype 4 | | | |
| DENG70 | Light chain variable region, | m366.6 | US20150218255 SEQ ID NO: 26 | 22749 |
| | DENV serotype 1, DENV | | | |
| | serotype 2, DENV serotype 3, and | | | |
| | DENV serotype 4 | | | |
| DENG71 | Light chain variable region, | m360.6 | US20150218255 SEQ ID NO: 46 | 22750 |
| | DENV serotype 1, DENV | | | |
| | serotype 2, DENV serotype 3, and | | | |
| | DENV serotype 4 | | | |
| DENG72 | Light chain variable region, | HMB-DV-1 | U.S. Pat. No. 9,073,981 SEQ ID NO: 14 | 22751 |
| | DENV-I, DENV-2, DENV-3, | | | |
| | DENV-4 | | | |
| DENG73 | Light chain variable region, | HMB-DV-2 | U.S. Pat. No. 9,073,981 SEQ ID NO: 30 | 22752 |
| | DENV-I, DENV-2, DENV-3, | | | |
| | DENV-4 | | | |
| DENG74 | Light chain variable region, | HMB-DV-3 | U.S. Pat. No. 9,073,981 SEQ ID NO: 46 | 22753 |
| | DENV-I, DENV-2, DENV-3, | | | |
| | DENV-4 | | | |
| DENG75 | Light chain variable region, | HMB-DV-4 | U.S. Pat. No. 9,073,981 SEQ ID NO: 62 | 22754 |
| | DENV-I, DENV-2, DENV-3, | | | |
| | DENV-4 | | | |
| DENG76 | Light chain variable region, | HMB-DV-5 | U.S. Pat. No. 9,073,981 SEQ ID NO: 80 | 22755 |
| | DENV-I, DENV-2, DENV-3, | | | |
| | DENV-4 | | | |
| DENG77 | Light chain variable region, | HMB-DV-6 | U.S. Pat. No. 9,073,981 SEQ ID NO: 96 | 22756 |
| | DENV-I, DENV-2, DENV-3, | | | |
| | DENV-4 | | | |
| DENG78 | Light chain variable region, | HMB-DV-7 | U.S. Pat. No. 9,073,981 SEQ ID NO: 103 | 22757 |
| | DENV-I, DENV-2, DENV-3, | | | |
| | DENV-4 | | | |
| DENG79 | Light chain variable region, | HMB-DV-8 | U.S. Pat. No. 9,073,981 SEQ ID NO: 118 | 22758 |
| | DENV-I, DENV-2, DENV-3, | | | |
| | DENV-4 | | | |
| DENG80 | Light chain variable region, | HMB-DV-9 | U.S. Pat. No. 9,073,981 SEQ ID NO: 132 | 22759 |
| | DENV-I, DENV-2, DENV-3, | | | |
| | DENV-4 | | | |
| DENG81 | Light chain variable region, | HMB-DV-10, | U.S. Pat. No. 9,073,981 SEQ ID NO: 146 | 22760 |
| | DENV-I, DENV-2, DENV-3, | HMB-DV-11 | | |
| | DENV-4 | | | |
| DENG82 | Light chain variable region, | HMB-DV-12 | U.S. Pat. No. 9,073,981 SEQ ID NO: 166 | 22761 |
| | DENV-I, DENV-2, DENV-3, | | | |
| | DENV-4 | | | |
| DENG83 | Light chain variable region, | HMB-DV-13 | U.S. Pat. No. 9,073,981 SEQ ID NO: 182 | 22762 |
| | DENV-I, DENV-2, DENV-3, | | | |
| | DENV-4 | | | |
| DENG84 | Light chain variable region, | HMB-DV-14 | U.S. Pat. No. 9,073,981 SEQ ID NO: 196 | 22763 |
| | DENV-I, DENV-2, DENV-3, | | | |
| | DENV-4 | | | |
| DENG85 | Light chain variable region, DV-1, | D88, F38, | US20150225474 SEQ ID NO: 2 | 22764 |
| | DV-2, DV-3, and DV-4 | A48, C88, | | |
| | | F108, B48, | | |
| | | A68, A100, | | |
| | | C58, C78, | | |
| | | C68, D98, | | |
| | | D188, C128, | | |
| | | C98 | | |
| DENG86 | Light chain variable region, DV-1, | C78 | US20S50225474 SEQ ID NO: 23 | 22765 |
| | DV-2, DV-3, and DV-4 | | | |
| DENG87 | Light chain variable region, DV-1, | C68 | US20150225474 SEQ ID NO: 25 | 22766 |
| | DV-2, DV-3, and DV-4 | | | |
| DENG88 | Light chain variable region, DV-1, | D98 | US20150225474 SEQ ID NO: 27 | 22767 |
| | DV-2, DV-3, and DV-4 | | | |
| DENG89 | Light chain variable region, DV-1, | D188 | US20150225474 SEQ ID NO: 29 | 22768 |
| | DV-2, DV-3, and DV-4 | | | |
| DENG90 | Light chain variable region, DV-1, | C128 | US20150225474 SEQ ID NO: 31 | 22769 |
| | DV-2, DV-3, and DV-4 | | | |
| DENG91 | Light chain variable region, DV-1, | A11, B11 | US20150225474 SEQ ID NO: 34 | 22770 |
| | DV-2, DV-3, and DV-4 | | | |
| DENG92 | Light chain variable region, DV-1, | mAb11 | WO2014144061 SEQ ID NO: 3 | 22771 |
| | DV-2, DV-3, and DV-4 | | | |
| DENG93 | Light chain, Antigen-binding | 2d22 | Fibriansah, G., el al., DENGUE | 22772 |
| | Fragment Of Human Antibody | | VIRUS. Cryo-EM structure of an | |
| | 2d22 | | antibody that neutralizes dengue | |
| | | | virus type 2 by locking E protein | |
| | | | dimers; Science 349 (6243), 88-91 | |
| | | | (2015), NCBI Accession # | |
| | | | 5A1Z_L (115 aa) | |
| DENG94 | Light chain, Dengue virus NS-1 | | U.S. Pat. No. 7,473,424; US20040209244; | 22773 |
| | protein | | WO2004067567; EP1592712 SEQ ID NO: 4 | |
| DENG95 | Light chain, Dengue virus | DB32-6 | U.S. Pat. No. 8,637,035 SEQ ID NO: 5 | 22774 |
| | serotype 2 | | | |
| DENG96 | Light chain, Dengue virus | DB2-3, | U.S. Pat. No. 8,637,035 SEQ ID NO: 19 | 22775 |
| | serotype 2 | DB-19 | | |
| DENG97 | Light chain, Dengue virus | DB23-3 | U.S. Pat. No. 8,637,035 SEQ ID NO: 20 | 22776 |
| | serotype 2 | | | |
| DENG98 | Light chain, Dengue virus | DB25-2 | U.S. Pat. No. 8,637,035 SEQ ID NO: 21 | 22777 |
| | serotype 2 | | | |
| DENG99 | Light chain, Dengue virus | DB42-3 | U.S. Pat. No. 8,637,035 SEQ ID NO: 22 | 22778 |
| | serotype 2 | | | |
| DENG100 | Light chain, Dengue virus | 5H2 | U.S. Pat. No. 7,622,113 SEQ ID NO: 9 | 22779 |
| | serotype 4 | | | |
| DENG101 | Light chain, Dengue virus | 5A7 | U.S. Pat. No. 7,622,113 SEQ ID NO: 25 | 22780 |
| | serotype 4 | | | |
| DENG102 | Light chain, Dengue virus | 3C1 | U.S. Pat. No. 7,622,113 SEQ ID NO: 41 | 22781 |
| | serotype 4 | | | |
| DENG103 | Light chain, Dengue virus | 3E4 | U.S. Pat. No. 7,622,113 SEQ ID NO: 57 | 22782 |
| | serotype 4 | | | |
| DENG104 | Light chain, Dengue virus | 7G4 | U.S. Pat. No. 7,622,113 SEQ ID NO: 73 | 22783 |
| | serotype 4 | | | |
| DENG105 | Light chain, Dengue virus | 5D9 | U.S. Pat. No. 7,622,153 SEQ ID NO: 89 | 22784 |
| | serotype 4 | | | |
| DENG106 | Light chain, Dengue virus | 1A5 | U.S. Pat. No. 8,337,853 SEQ ID NO: 105 | 22785 |
| | serotype 4 | | | |
| DENG107 | Light chain, Dengue virus | 2H7 | U.S. Pat. No. 8,337,853 SEQ ID NO: 121 | 22786 |
| | serotype 4 | | | |
| DENG108 | Light chain, Dengue virus | 2H5 | U.S. Pat. No. 8,337,853 SEQ ID NO: 137 | 22787 |
| | serotype 4 | | | |
| DENG109 | Light chain, Dengue virus | 3A2 | US20130089543 SEQ ID NO: 153 | 22788 |
| | serotype 4 | | | |
| DENG110 | Light chain, Dengue virus | 1B2 | US20130089543 SEQ ID NO: 169 | 22789 |
| | serotype 4 | | | |
| DENG111 | Light chain, Dengue virus | 1A10 | US20130089543 SEQ ID NO: 185 | 22790 |
| | serotype 4 | | | |
| DENG112 | Light chain, DV 1 | 14c10 clone | US20130259871 FIG. 4b | 22791 |
| | | 8 | | |
| DENG113 | Light chain, DV-1, DV-2, DV-3, | Antibody | US20140056913 SEQ ID NO: 2 | 22792 |
| | and DV-4 | 4e11 | | |
| DENG114 | Light chain, DV-1, DV-2, DV-3, | Variant of | US20140056913 SEQ ID NO: 22 | 22793 |
| | and DV-4 | 4E11 | | |
| DENG115 | Light chain, DV-l, DV-2, DV-3, | 4E5A | WO20155123362 SEQ ID NO: 30 | 22794 |
| | and DV-4 | | | |
| DENG116 | scFv | 9Fl 2 | WO2010093335 SEQ ID NO: 8 | 22795 |
| DENG117 | Scfv Fragment | Ede2 A11 | Dejnirattisai, W., et al., A new | 22796 |
| | | | class of highly potent, broadly | |
| | | | neutralizing antibodies isolated | |
| | | | from viremic patients infected with | |
| | | | dengue virus; Nat. Immunol. 16 | |
| | | | (2), 170-177 (2015), NCBI | |
| | | | Accession # 4UT7_L(153 aa) | |
| DENG118 | Scfv Fragment | Ede2 A11 | Dejnirattisai, W., et al, A new | 22797 |
| | | | class of highly potent, broadly | |
| | | | neutralizing antibodies isolated | |
| | | | from viremic patients infected with | |
| | | | dengue virus; Nat. Immunol. 16 | |
| | | | (2), 170-177 (2015), NCBI | |
| | | | Accession # 4UT7_H (150 aa) | |
| DENG119 | | Ede2 A11 | Dejnirattisai, W., et al., A new | 22798 |
| | | | class of lightly potent, broadly | |
| | | | neutralizing antibodies isolated | |
| | | | from viremic patients infected with | |
| | | | dengue virus; Nat. Immunol. 16 | |
| | | | (2), 170-177 (2015), NCBI | |
| | | | Accession # 4UTB_L (218 aa) | |
| DENG120 | | Ede1 C10 | Dejnirattisai, W., et al., A new | 22799 |
| | | | class of highly potent, broadly | |
| | | | neutralizing antibodies isolated | |
| | | | from viremic patients infected with | |
| | | | dengue virus; Nat. Immunol. 16 | |
| | | | (2), 170-177 (2015), NCBI | |
| | | | Accession # 4UT9_L (154aa) | |
| DENG121 | | Ede1 C10 | Dejnirattisai, W., et al., A new | 22800 |
| | | | class of highly potent, broadly | |
| | | | neutralizing antibodies isolated | |
| | | | from viremic patients infected with | |
| | | | dengue virus; Nat. Immunol. 16 | |
| | | | (2), 170-177 (2015), NCBI | |
| | | | Accession # 4UT9_H (144 aa) | |
| DENG122 | | Ede2 B7 | Dejnirattisai, W., et al., A new | 22801 |
| | | | class of highly potent, broadly | |
| | | | neutralizing antibodies isolated | |
| | | | from viremic patients infected with | |
| | | | dengue virus; Nat. Immunol. 16 | |
| | | | (2), 170-177 (2015), NCBI | |
| | | | Accession # 4UT6_L (218 aa) | |
| DENG123 | | Ede2 B7 | Dejnirattisai, W., et al., A new | 22802 |
| | | | class of highly potent, broadly | |
| | | | neutralizing antibodies isolated | |
| | | | from viremic patients injected with | |
| | | | dengue virus; Nat. Immunol. 16 | |
| | | | (2), 170-177 (2015), NCBI | |
| | | | Accession # 4UT6_H (283 aa) | |

[0440] In some embodiments, the payload region of the viral particle comprises one or more nucleic acid sequences encoding one or more of the payload antibody polypeptides, fragments or variants thereof described in International Pub. No. WO2013089647 and WO2013035345, U.S. Pat. No. 8,637,035 and US887187, US Publication No. US20050123900, and Chinese Patent Publication No, CN102757480, the contents of which are herein incorporated by reference in their entirety, against Listeria monocytogenes, salmonella and/or leishmania.

[0441] In some embodiments, the payload region of the viral particle comprises one or more nucleic acid sequences encoding one or more of the payload antibody polypeptides listed in Table 22 against Rabies Virus (RABV1-RABV91; SECS ID NO: 22803-22893).

TABLE 22
Antibodies against Rabies Virus

| Antibody | | | | SEQ |
|---|---|---|---|---|
| No. | Description | Antibody Name | Reference Information | ID NO |
| RABV1 | Fab Heavy Chain Fd region | | CN101696242 SEQ ID NO: 9 | 22803 |
| RABV2 | Fab Light chain | | CN101696242 SEQ ID NO: 10 | 22804 |
| RABV3 | Heavy chain | | U.S. Pat. No. 6,890,532 SEQ ID NO: 3 | 22805 |
| RABV4 | Heavy chain | Mab JB.1 | U.S. Pat. No. 7,071,319 SEQ ID NO: 10 | 22806 |
| RABV5 | Heavy chain | Mab 57 | U.S. Pat. No. 7,071,319 SEQ ID NO: 14 | 22807 |
| RABV6 | Heavy chain | CR04-098 | U.S. Pat. No. 9,005,624 SEQ ID NO: 335 | 22808 |
| RABV7 | Heavy chain | CR57, | U.S. Pat. No. 9,005,624 SEQ ID NO: 123 | 22809 |
| | | Rafivirumab | | |
| RABV8 | Heavy chain | CR57, | | 22810 |
| | | Rafivirumab | | |
| RABV9 | Heavy chain | CRJB | U.S. Pat. No. 9,005,624 SEQ ID NO: 127 | 22811 |
| RABV10 | Heavy chain | Foravirumab | | 22812 |
| RABV11 | Heavy chain, Anti-rabies SOJB | | Presniak, M. et al. | 22813 |
| | immunoglobulin | | “Development of a cocktail of | |
| | | | recombinant-expressed human | |
| | | | rabies virus-neutralizing | |
| | | | monoclonal antibodies for | |
| | | | postexposure prophylaxis of | |
| | | | rabies”, J. Infect. Dis. 188 (1), | |
| | | | 53-56 (2003), NCBI | |
| | | | Accession # AAO17822.1 | |
| RABV12 | Heavy chain variable region | | CN101696242 SEQ ID NO: 4 | 22814 |
| RABV13 | Heavy chain variable region | SC04-001 | U.S. Pat. No. 9,005,624 SEQ ID NO: 26 | 22815 |
| RABV14 | Heavy chain variable region | SC04-004 | U.S. Pat. No. 9,005,624 SEQ ID NO: 27 | 22816 |
| RABV15 | Heavy chain variable region | SC04-008 | U.S. Pat. No. 9,005,624 SEQ ID NO: 28 | 22817 |
| RABV16 | Heavy chain variable region | SC04-010 | U.S. Pat. No. 9,003,624 SEQ ID NO: 29 | 22818 |
| RABV17 | Heavy chain variable region | SC04-018 | U.S. Pat. No. 9,005,624 SEQ ID NO: 30 | 22819 |
| RABV18 | Heavy chain variable region | SC04-021 | U.S. Pat. No. 9,005,624 SEQ ID NO: 31 | 22820 |
| RABV19 | Heavy chain variable region | SC04-026 | U.S. Pat. No. 9,005,624 SEQ ID NO: 32 | 22821 |
| RABV20 | Heavy chain variable region | SC04-031 | U.S. Pat. No. 9,005,624 SEQ ID NO: 33 | 22822 |
| RABV21 | Heavy chain variable region | SC04-038 | U.S. Pat. No. 9,005,624 SEQ ID NO: 44 | 22823 |
| RABV22 | Heavy chain variable region | SC04-040 | U.S. Pat. No. 9,005,624 SEQ ID NO: 35 | 22824 |
| RABV23 | Heavy chain variable region | SC04-060 | U.S. Pat. No. 9,005,624 SEQ ID NO: 36 | 22825 |
| RABV24 | Heavy chain variable region | SC04-073 | U.S. Pat. No. 9,005,624 SEQ ID NO: 37 | 22826 |
| RABV25 | Heavy chain variable region | SC04-097 | U.S. Pat. No. 9,005,624 SEQ ID NO: 38 | 22827 |
| RABV26 | Heavy chain variable region | SC04-098 | U.S. Pat. No. 9,005,624 SEQ ID NO: 39 | 22828 |
| RABV27 | Heavy chain variable region | SC04-103 | U.S. Pat. No. 9,005,624 SEQ ID NO: 40 | 22829 |
| RABV28 | Heavy chain variable region | SC04-104 | U.S. Pat. No. 9,005,624 SEQ ID NO: 41 | 22830 |
| RABV29 | Heavy chain variable region | SC04-108 | U.S. Pat. No. 9,005,624 SEQ ID NO: 42 | 22831 |
| RABV30 | Heavy chain variable region | SC04-120 | U.S. Pat. No. 9,005,624 SEQ ID NO: 43 | 22832 |
| RABV31 | Heavy chain variable region | SC04-125 | U.S. Pat. No. 9,005,624 SEQ ID NO: 44 | 22833 |
| RABV32 | Heavy chain variable region | SC04-126 | U.S. Pat. No. 9,005,624 SEQ ID NO: 45 | 22834 |
| RABV33 | Heavy chain variable region | SC04-140 | U.S. Pat. No. 9,005,624 SEQ ID NO: 46 | 22835 |
| RABV34 | Heavy chain variable region | SC04-144 | U.S. Pat. No. 9,005,624 SEQ ID NO: 47 | 22836 |
| RABV35 | Heavy chain variable region | SC04-146 | U.S. Pat. No. 9,005,624 SEQ ID NO: 48 | 22837 |
| RABV36 | Heavy chain variable region | SC04-164 | U.S. Pat. No. 9,005,624 SEQ ID NO: 49 | 22838 |
| RABV37 | Heavy chain variable region | RVFab5 | WO201113757 SEQ ID NO: 2 | 22839 |
| RABV38 | Heavy chain variable region | RVFab8 | WO2011137570 SEQ ID NO: 2 | 22840 |
| RABV39 | Heavy chain variable region | | CN101337990 SEQ ID NO: 2 | 22841 |
| RABV40 | Heavy chain variable region | | CN101337990 SEQ ID NO: 8 | 22842 |
| RABV41 | Heavy chain variable region | R8 VH | CN104193823 SEQ ID NO: 1 | 22843 |
| RABV42 | Heavy chain variable region | R5 VH | CN104193823 SEQ ID NO: 2 | 22844 |
| RABV43 | Heavy chain variable region | R7 VH, R9 VH | CN104193823 SEQ ID NO: 3 | 22845 |
| RABV44 | Heavy chain variable region | | CN101235086 SEQ ID NO: 38 | 22846 |
| RABV45 | Heavy chain, Anti-rabies | | Prosniak, M. et al. | 22847 |
| | SOJA immunoglobulin | | “Development of a cocktail of | |
| | | | recombinant-expressed human | |
| | | | rabies virus-neutralizing | |
| | | | monoclonal antibodies for | |
| | | | postexposure prophylaxis of | |
| | | | rabies”, J. Infect. Dis. 188 (1), | |
| | | | 53-56 (2003), NCBI | |
| | | | Accession # AAO17823.1 | |
| RABV46 | Light chain | | U.S. Pat. No. 6,890,532 SEQ ID NO: 4 | 22848 |
| RABV47 | Light chain | Mab JB.1 | U.S. Pat. No. 7,071,319 SEQ ID NO: 12 | 22849 |
| RABV48 | Light chain | Mab 57 | U.S. Pat. No. 7,071,319 SEQ ID NO: 16 | 22850 |
| RABV49 | Light chain | CR04-098 | U.S. Pat. No. 9,005,624 SEQ ID NO: 337 | 22851 |
| RABV50 | Light chain | CR57, | U.S. Pat. No. 9,005,624 SEQ ID NO: 125 | 22852 |
| | | Rafivirumab | | |
| RABV51 | Light chain | CR57, | | 22853 |
| | | Rafivirumab | | |
| RABV52 | Light chain | CRJB | U.S. Pat. No. 9,005,624 SEQ ID NO: 129 | 22854 |
| RABV53 | Light chain | Foravirumab | | 22855 |
| RABV54 | Light chain Kappa, Anti-rabies | | Prosniak, M. et al. | 22856 |
| | SOJA immunoglobulin | | “Development of a cocktail of | |
| | | | recombinant-expressed human | |
| | | | rabies virus-neutralizing | |
| | | | monoclonal antibodies for | |
| | | | postexposure prophylaxis of | |
| | | | rabies”, J. Infect. Dis. 188 (1), | |
| | | | 53-56 (2003), NCBI | |
| | | | Accession # AAO17825.1 | |
| RABV55 | Light chain kappa, Anti-rabies | | Prosniak, M. et al. | 22857 |
| | SOJA immunoglobulin | | “Development of a cocktail of | |
| | [Homo sapiens] | | recombinant-expressed human | |
| | | | rabies virus-neutralizing | |
| | | | monoclonal antibodies for | |
| | | | postexposure prophylaxis of | |
| | | | rabies”, J. Infect. Dis. 188 (1), | |
| | | | 53-56 (2003), NCBI | |
| | | | Accession # AAO17821.1 | |
| RABV56 | Light chain Lambda, Anti-rabies | | Prosniak, M. et al. | 22858 |
| | S057 immunoglobulin | | “Development of a cocktail of | |
| | | | recombinant-expressed human | |
| | | | rabies virus-neutralizing | |
| | | | monoclonal antibodies for | |
| | | | postexposure prophylaxis of | |
| | | | rabies”, J. Infect. Dis. 188 (1), | |
| | | | 53-56 (2003), NCBI | |
| | | | Accession # AAO17824.1 | |
| RABV57 | Light chain lambda, Anti-rabies | | Prosniak, M. et al. | 22859 |
| | SOJB immunoglobulin | | “Development of a cocktail of | |
| | | | recombinant-expressed human | |
| | | | rabies virus-neutralizing | |
| | | | monoclonal antibodies for | |
| | | | postexposure prophylaxis of | |
| | | | rabies”, J. Infect. Dis. 188 (1), | |
| | | | 53-56 (2003), NCBI | |
| | | | Accession # AAO17826.1 | |
| RABV58 | Light chain variable region | SC04-001 | U.S. Pat. No. 9,005,624 SEQ ID NO: 50 | 22860 |
| RABV59 | Light chain variable region | SC04-004 | U.S. Pat. No. 9,005,624 SEQ ID NO: 51 | 22861 |
| RABV60 | Light chain variable region | SC04-008 | U.S. Pat. No. 9,005,624 SEQ ID NO: 52 | 22862 |
| RABV61 | Light chain variable region | SC04-010 | U.S. Pat. No. 9,005,624 SEQ ID NO: 55 | 22863 |
| RABV62 | Light chain variable region | SC04-018 | U.S. Pat. No. 9,005,624 SEQ ID NO: 54 | 22864 |
| RABV63 | Light chain variable region | SC04-021 | U.S. Pat. No. 9,005,624 SEQ ID NO: 55 | 22865 |
| RABV64 | Light chain variable region | SC04-026 | U.S. Pat. No. 9,005,624 SEQ ID NO: 56 | 22866 |
| RABV65 | Light chain variable region | SC04-031 | U.S. Pat. No. 9,005,624 SEQ ID NO: 57 | 22867 |
| RABV66 | Light chain variable region | SC04-038 | U.S. Pat. No. 9,005,624 SEQ ID NO: 58 | 22868 |
| RABV67 | Light chain variable region | SC04-040 | U.S. Pat. No. 9,005,624 SEQ ID NO: 59 | 22869 |
| RABV68 | Light chain variable region | SC04-060 | U.S. Pat. No. 9,005,624 SEQ ID NO: 60 | 22870 |
| RABV69 | Light chain variable region | SC04-073 | U.S. Pat. No. 9,005,624 SEQ ID NO: 61 | 22871 |
| RABV70 | Light chain variable region | SC04-097 | U.S. Pat. No. 9,005,624 SEQ ID NO: 62 | 22872 |
| RABV71 | Light chain variable region | SC04-098 | U.S. Pat. No. 9,005,624 SEQ ID NO: 63 | 22873 |
| RABV72 | Light chain variable region | SC04-103 | U.S. Pat. No. 9,005,624 SEQ ID NO: 64 | 22874 |
| RABV73 | Light chain variable region | SC04-104 | U.S. Pat. No. 9,005,624 SEQ ID NO: 65 | 22875 |
| RABV74 | Light chain variable region | SC04-108 | U.S. Pat. No. 9,005,624 SEQ ID NO: 66 | 22876 |
| RABV75 | Light chain variable region | SC04-120 | U.S. Pat. No. 9,005,624 SEQ ID NO: 67 | 22877 |
| RABV76 | Light chain variable region | SC04-125 | U.S. Pat. No. 9,005,624 SEQ ID NO: 68 | 22878 |
| RABV77 | Light chain variable region | SC04-126 | U.S. Pat. No. 9,005,624 SEQ ID NO: 69 | 22879 |
| RABV78 | Light chain variable region | SC04-140 | U.S. Pat. No. 9,005,624 SEQ ID NO: 70 | 22880 |
| RABV79 | Light chain variable region | SC04-144 | U.S. Pat. No. 9,005,624 SEQ ID NO: 71 | 22881 |
| RABV80 | Light chain variable region | SC04-146 | U.S. Pat. No. 9,005,624 SEQ ID NO: 72 | 22882 |
| RABV81 | Light chain variable region | SC04-164 | U.S. Pat. No. 9,005,624 SEQ ID NO: 73 | 22883 |
| RABV82 | Light chain variable region | RVFab5 | WO201113757 SEQ ID NO: 1 | 22884 |
| RABV83 | Light chain variable region | RVFab8 | WO2011137570 SEQ ID NO: 1 | 22885 |
| RABV84 | Light chain variable region | | CN101337990 SEQ ID NO: 4 | 22886 |
| RABV85 | Light chain variable region | | CN101337990 SEQ I DNO: 10 | 22887 |
| RABV86 | Light chain variable region | R8VL | CN104193823 SEQ ID NO: 4 | 22888 |
| RABV87 | Light chain variable region | R5 VL | CN104193823 SEQ ID NO: 5 | 22889 |
| RABV88 | Light chain variable region | R7 VL | CN104193823 SEQ ID NO: 6 | 22890 |
| RABV89 | Light chain variable region | R9 VL | CN104193823 SEQ ID NO: 7 | 22891 |
| RABV90 | Light chain variable region | | CN101696242 SEQ ID NO: 8 | 22892 |
| RABV91 | Light chain variable region | | CN101235086 SEQ ID NO: 39 | 22893 |

[0442] In some embodiments, the payload region of the viral particle comprises one or more nucleic acid sequences encoding one or more of the payload antibody polypeptides listed in Table 23 against Chagas Virus (CHAG1-CHAG2; SEQ ID NO: 22894-22895).

TABLE 23
Antibodies against Chagas Virus

| Antibody | | | SEQ |
|---|---|---|---|
| No. | Description | Reference Information | ID NO |
| CHAG1 | Heavy Chain Of The Fab Fragment, | Buschiazzo et al., PLoS Pathol. 8 (1), E1002474 | 22894 |
| | Trypanosoma cruzi trans-sialidase | (2012), NCBI Accession # 3OPZ_J (222aa) | |
| CHAG2 | Light chain of Fab fragment, | Buschiazzo et al., PLoS Pathog. 8 (1), E1002474 | 22895 |
| | Trypanosoma cmzi trans-sialidase | (2012), NCBI Accession # 3OPZ_N (213aa) | |

[0443] In some embodiments, the payload region of the viral particle comprises one or more nucleic acid sequences encoding one or more of the payload antibody polypeptides listed in Table 24 against Chikungunya Virus (CHIK1-CHIK6; SEQ ID NO: 22896-22901).

TABLE 24
Antibodies against Chikungunya Virus

| Antibody | | Antibody | | SEQ |
|---|---|---|---|---|
| No. | Description | Name | Reference Information | ID NO |
| CHIK1 | Heavy chain Fab | 9.8b | Sun, S. et al., Structural analyses at pseudo | 22896 |
| | fragment | | atomic resolution of Chikungunya virus and | |
| | | | antibodies show mechanisms of | |
| | | | neutralization, Elife 2, E00435 (2013), NCBI | |
| | | | Accession # 4GQ9_H (218 aa) | |
| CHIK2 | Heavy chain | 5F10F17E2 | US20130189279 SEQ ID NO: 6 | 22897 |
| | variable | | | |
| CHIK3 | Heavy chain | 8B10F8 | US20130189279 SEQ ID NO: 26 | 22898 |
| | variable | | | |
| CHIK4 | Light chain Fab | 9.8b | Sun, S. et al., Structural analyses at pseudo | 22899 |
| | fragment | | atomic resolution of Chikungunya virus and | |
| | | | antibodies show mechanisms of | |
| | | | neutralization, Elife 2, E00435 (2013), NCBI | |
| | | | Accession # 4GQ9_L (212 aa) | |
| CHIK5 | Light chain | 5F10F175E2 | US20130189279 SEQ ID NO: 8 | 22900 |
| | variable | | | |
| CHIK6 | Light chain | 8B10F8 | US20130189279 SEQ ID NO: 28 | 22901 |
| | variable | | | |

[0444] In some embodiments, the payload region of the viral particle comprises one or more nucleic acid sequences, fragment or variants thereof or encodes one or more polypeptides, fragments or variants thereof encoding antibodies described International Pub No. WO1983001785 and U.S. Pat. No. 5,827,671, the contents of each of which are herein incorporated by reference in their entirety, against the protozoan parasite Leishmania.

[0445] In some embodiments, the payload region of the viral particle comprises one or more nucleic acid sequences, fragment or variants thereof or encodes one or more polypeptides, fragments or variants thereof encoding antibodies against the Buruli ulcer Mycobacterium ulcerans), Leprosy/Hansen's disease (Mycobacterium leprae), Leishmaniasis, Cysticercosis, Dracunculiasis (Guinea Worm Disease), Echinococcosis, Fascioliasis, Human African Trypanosomiasis (African Sleeping Sickness), Lymphatic filariasis, Onchocerciasis, Schistosomiasis, Soil-transmitted Helminths (STH).

### Toxins

[0446] In some embodiments, the payload region of the viral particle comprises one or more nucleic acid sequences encoding one or more of the toxin related payload antibody polypeptides listed in Tables 2528.

[0447] In some embodiments, the payload region of the viral particle comprises one or more nucleic acid sequences encoding one or more of the payload antibody polypeptides listed in Table 25 against Ricin Toxin (RICN1-RICN20; SEQ ID NO: 22902-22921).

TABLE 25
Antibodies against Ricin Toxin

| Antibody | | Antibody | | SEQ |
|---|---|---|---|---|
| No. | Description | Name | Reference Information | ID NO |
| RICN1 | Camelid heavy-chain only | RTA: JIV-F5 | WO2015100409 SEQ ID NO: 124 | 22902 |
| RICN2 | Camelid heavy-chain only | JIV-F6 | WO2015100409 SEQ ID NO: 126 | 22903 |
| RICN3 | Camelid heavy-chain only | JIV-G 12 | WO2015100409 SEQ ID NO: 128 | 22904 |
| RICN4 | Camelid heavy-chain only | JIY-A7 | WO2015100409 SEQ ID NO: 130 | 22905 |
| RICN5 | Camelid heavy-chain only | JIY-D9 | WO2015100409 SEQ ID NO: 132 | 22906 |
| RICN6 | Camelid heavy-chain only | JIY-D10 | WO2015100409 SEQ ID NO: 134 | 22907 |
| RICN7 | Camelid heavy-chain only | JIY-El | WO2015100409 SEQ ID NO: 136 | 22908 |
| RICN8 | Camelid heavy-chain only | JIY-E3 | WO2015100409 SEQ ID NO: 138 | 22909 |
| RICN9 | Camelid heavy-chain only | JIY-E5 | WO2015100409 SEQ ID NO: 140 | 22910 |
| RICN10 | Camelid heavy-chain only | JIY-F10 | WO2015100409 SEQ ID NO: 142 | 22911 |
| RICN11 | Camelid heavy-chain only | JIY-G11 | WO2015100409 SEQ ID NO: 144 | 22912 |
| RICN12 | Camelid heavy-chain only | RTB: JIW-B1 | WO2015100409 SEQ ID NO: 146 | 22913 |
| RICN13 | Camelid heavy-chain only | JIW-C12 | WO2015100409 SEQ ID NO: 148 | 22914 |
| RICN14 | Camelid heavy-chain only | JIW-D12 | WO2015100409 SEQ ID NO: 150 | 22915 |
| RICN15 | Camelid heavy-chain only | JIW-G5 | WO2015100409 SEQ ID NO: 152 | 22916 |
| RICN16 | Camelid heavy-chain only | JIW-G 10 | WO2015100409 SEQ ID NO: 154 | 22917 |
| RICN17 | Camelid heavy-chain only | JIZ-B7 | WO2015100409 SEQ ID NO: 156 | 22918 |
| RICN18 | Camelid heavy-chain only | JIZ- B9 | WO2015100409 SEQ ID NO: 158 | 22919 |
| RICN19 | Camelid heavy-chain only | JIZ-D8 | WO2015100409 SEQ ID NO: 160 | 22920 |
| RICN20 | Camelid heavy-chain only | JIZ-G4 | WO2015100409 SEQ ID NO: 162 | 22921 |

[0448] In some embodiments, the payload region of the viral particle comprises one or more nucleic acid sequences encoding one or more of the payload antibody polypeptides listed in Table 26 against Anthrax (ANTH1-ANTH245; SEQ ID NO: 22922-23166).

TABLE 26
Antibodies against Anthrax

| Antibody | | Antibody | | SEQ |
|---|---|---|---|---|
| No. | Description | Name | Reference Information | ID NO |
| ANTH1 | Camelid heavy-chain only | JHD-B6 | WO2015100409 SEQ ID NO: 100 | 22922 |
| ANTH2 | Camelid heavy-chain only | JHE-D9 | WO2015100409 SEQ ID NO: 102 | 22923 |
| ANTH3 | Camelid heavy-chain only | JIJ-A12 | WO2015100409 SEQ ID NO: 104 | 22924 |
| ANTH4 | Camelid heavy-chain only | JIJ-B8 | WO2015100409 SEQ ID NO: 106 | 22925 |
| ANTH5 | Camelid heavy-chain only | JIJ-C11 | WO2015100409 SEQ ID NO: 108 | 22926 |
| ANTH6 | Camelid heavy-chain only | JIJ-D3 | WO2015100409 SEQ ID NO: 110 | 22927 |
| ANTH7 | Camelid heavy-chain only | JIJ-E9 | WO2015100409 SEQ ID NO: 112 | 22928 |
| ANTH8 | Camelid heavy-chain only | JIJ-F11 | WO2015100409 SEQ ID NO: 114 | 22929 |
| ANTH9 | Camelid heavy-chain only | JIK-B8 | WO2015100409 SEQ ID NO: 116 | 22930 |
| ANTH10 | Camelid heavy-chain only | JI -B 10 | WO2015100409 SEQ ID NO: 118 | 22931 |
| ANTH11 | Camelid heavy-chain only | JIK-B 12 | WO2015100409 SEQ ID NO: 120 | 22932 |
| ANTH12 | Camelid heavy-chain only | JIK-F4 | WO2015100409 SEQ ID NO: 122 | 22933 |
| ANTH13 | CDR | | WO2003063768 SEQ ID NO: 1 | 22934 |
| ANTH14 | CDR | | WO2003063768 SEQ ID NO: 2 | 22935 |
| ANTH15 | CDR | | WO2003063768 SEQ ID NO: 3 | 22936 |
| ANTH16 | Heavy chain | | U.S. Pat. No. 8,617,548 SEC ID NO: 2 | 22937 |
| ANTH17 | Heavy chain | IQNPA Lambda | U.S. Pat. No. 7,658,925 SEQ ID NO: 2 | 22938 |
| ANTH18 | Heavy chain | IQNLF Lambda | U.S. Pat. No. 7,658,925 SEQ ID NO: 6 | 22939 |
| ANTH19 | Heavy chain | 1A5 | US20090022736 SEQ ID NO: 1 | 22940 |
| ANTH20 | Heavy chain | 4A12 | US20090022736 SEQ ID NO: 3 | 22941 |
| ANTH21 | Heavy chain | 24B1 | US20090022736 SEQ ID NO: 5 | 22942 |
| ANTH22 | Heavy chain | 24G4 | US20090022736 SEQ ID NO: 7 | 22943 |
| ANTH23 | Heavy chain | 32E12 | US20090022736 SEQ ID NO: 9 | 22944 |
| ANTH24 | Heavy chain | 33F4 | US20090022736 SEQ ID NO: 11 | 22945 |
| ANTH25 | Heavy chain | scfv 2LF | EP2778173 SEQ ID NO: 9 | 22946 |
| ANTH26 | Heavy chain | | US20040258699 SEQ ID NO: 78 | 22947 |
| ANTH27 | Heavy chain | | US20040258699 SEQ ID NO: 79 | 22948 |
| ANTH28 | Heavy chain | | US20040258699 SEQ ID NO: 80 | 22949 |
| ANTH29 | Heavy chain | | US20040258699 SEQ ID NO: 81 | 22950 |
| ANTH30 | Heavy chain | | US20040258699 SEQ ID NO: 82 | 22951 |
| ANTH31 | Heavy chain | | US20040258699 SEQ ID NO: 83 | 22952 |
| ANTH32 | Heavy chain | | US20040258699 SEQ ID NO: 84 | 22953 |
| ANTH33 | Heavy chain | | US20040258699 SEQ ID NO: 85 | 22954 |
| ANTH34 | Heavy chain | | US20040258699 SEQ ID NO: 86 | 22955 |
| ANTH35 | Heavy chain | | US20040258699 SEQ ID NO: 87 | 22956 |
| ANTH36 | Heavy chain | | US20040258699 SEQ ID NO: 88 | 22957 |
| ANTH37 | Heavy chain | | US20040258699 SEQ ID NO: 89 | 22958 |
| ANTH38 | Heavy chain | | US20040258699 SEQ ID NO: 90 | 22959 |
| ANTH39 | Heavy chain | | US20040258699 SEQ ID NO: 91 | 22960 |
| ANTH40 | Heavy chain | | US20040258699 SEQ ID NO: 92 | 22961 |
| ANTH41 | Heavy chain | | US20040258699 SEQ ID NO: 93 | 22962 |
| ANTH42 | Heavy chain | | US20040258699 SEQ ID NO: 94 | 22963 |
| ANTH43 | Heavy chain | | US20040258699 SEQ ID NO: 95 | 22964 |
| ANTH44 | Heavy chain | | US20040258699 SEQ ID NO: 96 | 22965 |
| ANTH45 | Heavy chain | | US20040258699 SEQ ID NO: 97 | 22966 |
| ANTH46 | Heavy chain | | US20040258699 SEQ ID NO: 98 | 22967 |
| ANTH47 | Heavy chain | | US20040258699 SEQ ID NO: 99 | 22968 |
| ANTH48 | Heavy chain | | US20040258699 SEQ ID NO: 100 | 22969 |
| ANTH49 | Heavy chain | | US20040258699 SEQ ID NO: 101 | 22970 |
| ANTH50 | Heavy chain | | US20040258699 SEQ ID NO: 102 | 22971 |
| ANTH51 | Heavy chain | | US20040258699 SEQ ID NO: 103 | 22972 |
| ANTH52 | Heavy chain | | US20040258699 SEQ ID NO: 104 | 22973 |
| ANTH53 | Heavy chain | | US20040258699 SEQ ID NO: 105 | 22974 |
| ANTH54 | Heavy chain | | US20040258699 SEQ ID NO: 106 | 22975 |
| ANTH55 | Heavy chain | | US20040258699 SEQ ID NO: 107 | 22976 |
| ANTH56 | Heavy chain | | US20040258699 SEQ ID NO: 108 | 22977 |
| ANTH57 | Heavy chain | | US20040258699 SEQ ID NO: 109 | 22978 |
| ANTH58 | Heavy chain | | US20040258699 SEQ ID NO: 110 | 22979 |
| ANTH59 | Heavy chain | | US20040258699 SEQ ID NO: 111 | 22980 |
| ANTH60 | Heavy chain | | US20040258699 SEQ ID NO: 112 | 22981 |
| ANTH61 | Heavy chain | | US20040258699 SEQ ID NO: 113 | 22982 |
| ANTH62 | Heavy chain | | US20040258699 SEQ ID NO: 114 | 22983 |
| ANTH63 | Heavy chain | | US20040258699 SEQ ID NO: 115 | 22984 |
| ANTH64 | Heavy chain | | US20040258699 SEQ ID NO: 116 | 22985 |
| ANTH65 | Heavy chain | | US20040258699 SEQ ID NO: 117 | 22986 |
| ANTH66 | Heavy chain | | US20040258699 SEQ ID NO: 118 | 22987 |
| ANTH67 | Heavy chain and light chain | 14B7 scFV | U.S. Pat. No. 7,902,344; | 22988 |
| | variable region | | U.S. Pat. No. 6,916,474 SEQ ID NO: 21 | |
| ANTH68 | Heavy chain fd region | W1 | U.S. Pat. No. 8,685,396 SEQ ID NO: 1 | 22989 |
| ANTH69 | Heavy chain fd region | W2 | U.S. Pat. No. 8,685,396 SEQ ID NO: 17 | 22990 |
| ANTH70 | Heavy chain | W5 | U.S. Pat. No. 8,685,396 SEQ ID NO: 33 | 22991 |
| ANTH71 | Heavy chain | A63-6 | U.S. Pat. No. 8,685,396 SEQ ID NO: 34 | 22992 |
| ANTH72 | Heavy chain | F3-6 | U.S. Pat. No. 8,685,396 SEQ ID NO: 35 | 22993 |
| ANTH73 | Heavy chain | F5-1 | U.S. Pat. No. 8,685,396 SEQ ID NO: 36 | 22994 |
| ANTH74 | Heavy chain variable region | ETI-204 | US2010156196 SEQ ID NO: 1 | 22995 |
| ANTH75 | Heavy chain variable region | 6.20 | WO2015107307 SEQ ID NO: 1 | 22996 |
| ANTH76 | Heavy chain variable region | 33PA83 | WO2009071860 SEQ ID NO: 1 | 22997 |
| ANTH77 | Heavy chain variable region | anti-γDPGA | U.S. Pat. No. 8,501,182 SEQ ID NO: 1 | 22998 |
| | | antibody | | |
| ANTH78 | Heavy chain variable region | 4C | U.S. Pat. No. 8,501,182 SEQ ID NO: 3 | 22999 |
| ANTH79 | Heavy chain variable region | 11D | U.S. Pat. No. 8,501,182 SEQ ID NO: 5 | 23000 |
| ANTH80 | Heavy chain variable region | F20G75 | WO2007131363 SEQ ID NO: 16 | 23001 |
| ANTH81 | Heavy chain variable region | F20G76 | WO2007131363 SEQ ID NO: 18 | 23002 |
| ANTH82 | Heavy chain variable region | F20G77 | WO2007131363 SEQ ID NO: 20 | 23003 |
| ANTH83 | Heavy chain variable region | V2 variant | U.S. Pat. No. 8,507,655 SEQ ID NO: 7 | 23004 |
| ANTH84 | Heavy chain variable region | 6.20 variant | U.S. Pat. No. 8,507,655 SEQ ID NO: 9 | 23005 |
| ANTH85 | Heavy chain variable region | J24.15 variant | U.S. Pat. No. 8,507,653 SEQ ID NO: 11 | 23006 |
| ANTH86 | Heavy chain variable region | J24.7 variant | U.S. Pat. No. 8,507,655 SEQ ID NO: 13 | 23007 |
| ANTH87 | Heavy chain variable region | V2 variant human | U.S. Pat. No. 8,507,655 SEQ ID NO: 15 | 23008 |
| ANTH88 | Heavy chain variable region | 6.20 variant | U.S. Pat. No. 8,507,655 SEQ ID NO: 17 | 23009 |
| | | human | | |
| ANTH89 | Heavy chain variable region | J24.15 variant | U.S. Pat. No. 8,507,655 SEQ ID NO: 19 | 23010 |
| | | human | | |
| ANTH90 | Heavy chain variable region | J24.7 variant | U.S. Pat. No. 8,507,655 SEQ ID NO: 21 | 23011 |
| | | human | | |
| ANTH91 | Heavy chain variable region | HuMab 5E8 | U.S. Pat. No. 8,404,820 SEQ ID NO: 2 | 23012 |
| ANTH92 | Heavy chain variable region | HnMab 2D5 | U.S. Pat. No. 8,404,820 SEQ ID NO: 8 | 23013 |
| ANTH93 | Heavy chain variable region | HuMab 2H4 | U.S. Pat. No. 8,404,820 SEQ ID NO: 12 | 23014 |
| ANTH94 | Heavy chain variable region | HuMab 5D5- | U.S. Pat. No. 8,404,820 SEQ ID NO: 16 | 23015 |
| | | 2E10 | | |
| ANTH95 | Heavy chain variable region | 13E3 | U.S. Pat. No. 8,309,090 SEQ ID NO: 2 | 23016 |
| ANTH96 | Heavy chain variable region | 3E1 | U.S. Pat. No. 8,309,090 SEQ ID NO: 6 | 23017 |
| ANTH97 | Heavy chain variable region | KCTC 10756BP | U.S. Pat. No. 8,268,316 SEQ ID NO: 2 | 23018 |
| ANTH98 | Heavy chain variable region | M18 scFv | U.S. Pat. No. 7,902,344; | 23019 |
| | | | U.S. Pat. No. 6,916,474 SEQ ID NO: 23 | |
| ANTH99 | Heavy chain variable region | 21D9 MAb | U.S. Pat. No. 7,442,373 SEQ ID NO: 2 | 23020 |
| ANTH100 | Heavy chain variable region | 1C6 Mab | U.S. Pat. No. 7,442,373 SEQ ID NO: 6 | 23021 |
| ANTH101 | Heavy chain variable region | 4H7 Mab | U.S. Pat. No. 7,442,373 SEQ ID NO: 10 | 23022 |
| ANTH102 | Heavy chain variable region | 22G12 Mab | U.S. Pat. No. 7,442,373 SEQ ID NO: 14 | 23023 |
| ANTH103 | Heavy chain variable region | monoclonal | WO1999055842 SEQ ID NO: 20 | 23024 |
| | | antibody 9-1 | | |
| ANTH104 | Heavy chain variable region | monoclonal | WO1999055842 SEQ ID NO: 21 | 23025 |
| | | antibody 7-1 | | |
| ANTH105 | Heavy chain variable region | monoclonal | WO1999055842 SEQ ID NO: 22 | 23026 |
| | | antibody 24-2 | | |
| ANTH106 | Heavy chain variable region | monoclonal | WO1999055842 SEQ ID NO: 23 | 23027 |
| | | antibody 21-4 | | |
| ANTH107 | Heavy chain variable region | monoclonal | WO1999055842 SEQ ID NO: 24 | 23028 |
| | | antibody 10-2 | | |
| ANTH108 | Heavy chain variable region | monoclonal | WO1999055842 SEQ ID NO: 25 | 23029 |
| | | antibody 22-1 | | |
| ANTH109 | Heavy chain variable region | monoclonal | WO1999055842 SEQ ID NO: 26 | 23030 |
| | | antibody 13-3 | | |
| ANTH110 | Heavy chain variable region | monoclonal | WO1999055842 SEQ ID NO: 27 | 23031 |
| | | antibody 8-3 | | |
| ANTH111 | Heavy chain variable region | monoclonal | WO1999055842 SEQ ID NO: 29 | 23032 |
| | | antibody 6-1 | | |
| ANTH112 | Heavy chain variable region | monoclonal | WO1999055842 SEQ ID NO: 30 | 23033 |
| | | antibody 3-1 | | |
| ANTH113 | Heavy chain variable region, | EF12A | U.S. Pat. No. 8,961,975 SEQ ID NO: 51 | 23034 |
| | Edema factor binding | | | |
| ANTH114 | Heavy chain variable region, | EF13D | U.S. Pat. No. 8,961,975 SEQ ID NO: 33 | 23035 |
| | Edema factor binding | | | |
| ANTH115 | Heavy chain variable region, | EF14H | U.S. Pat. No. 8,961,975 SEQ ID NO: 52 | 23036 |
| | Edema factor binding | | | |
| ANTH116 | Heavy chain variable region, | EF15A | U.S. Pat. No. 8,961,975 SEQ ID NO: 53 | 23037 |
| | Edema factor binding | | | |
| ANTH117 | Heavy chain variable region, | LF9D | U.S. Pat. No. 8,961,975 SEQ ID NO: 49 | 23038 |
| | Lethal factor | | | |
| ANTH118 | Heavy chain variable region, | LF10E | U.S. Pat. No. 8,961,975 SEQ ID NO: 1 | 23039 |
| | Lethal factor | | | |
| ANTH119 | Heavy chain, Antibody | Obiltoxaximab | | 23040 |
| | against inhalational anthrax | | | |
| ANTH120 | Kappa light chain | | US20040258699 SEQ ID NO: 19 | 23041 |
| ANTH121 | Kappa light chain | | US20040258699 SEQ ID NO: 20 | 23042 |
| ANTH122 | Kappa light chain | | US20040258699 SEQ ID NO: 21 | 23043 |
| ANTH123 | Kappa tight chain | | US20040258699 SEQ ID NO: 22 | 23044 |
| ANTH124 | Kappa light chain | | US20040258699 SEQ ID NO: 23 | 23045 |
| ANTH125 | Kappa light chain | | US20040258699 SEQ ID NO: 24 | 23046 |
| ANTH126 | Kappa light chain | | US20040258699 SEQ ID NO: 25 | 23047 |
| ANTH127 | Kappa light chain | | US20040258699 SEQ ID NO: 26 | 23048 |
| ANTH128 | Kappa tight chain | | US20040258699 SEQ ID NO: 39 | 23049 |
| ANTH129 | Kappa light chain | | US20040258699 SEQ ID NO: 40 | 23050 |
| ANTH130 | Kappa light chain | | US20040258699 SEQ ID NO: 41 | 23051 |
| ANTH131 | Kappa light chain | | US20040258699 SEQ ID NO: 42 | 23052 |
| ANTH132 | Kappa light chain | | US20040258699 SEQ ID NO: 43 | 23053 |
| ANTH133 | Kappa light chain | | US20040258699 SEQ ID NO: 44 | 23054 |
| ANTH134 | Kappa light chain | | US20040258699 SEQ ID NO: 45 | 23055 |
| ANTH135 | Kappa light chain | | US20040258699 SEQ ID NO: 46 | 23056 |
| ANTH136 | Kappa light chain | | US20040258699 SEQ ID NO: 47 | 23057 |
| ANTH137 | Kappa light chain | | US20040258699 SEQ ID NO: 48 | 23058 |
| ANTH138 | Kappa light chain | | US20040258699 SEQ ID NO: 49 | 23059 |
| ANTH139 | Kappa light chain | | US20040258699 SEQ ID NO: 50 | 23060 |
| ANTH140 | Kappa light chain | | US20040258699 SEQ ID NO: 51 | 23061 |
| ANTH141 | Kappa light chain | | US20040258699 SEQ ID NO: 52 | 23062 |
| ANTH142 | Kappa light chain | | US20040258699 SEQ ID NO: 53 | 23063 |
| ANTH143 | Kappa light chain | | US20040258699 SEQ ID NO: 54 | 23064 |
| ANTH144 | Kappa light chain | | US20040258699 SEQ ID NO: 55 | 23065 |
| ANTH145 | Kappa light chain | | US20040258699 SEQ ID NO: 56 | 23066 |
| ANTH146 | Kappa light chain | | US20040258699 SEQ ID NO: 57 | 23067 |
| ANTH147 | Kappa light chain | | US20040258699 SEQ ID NO: 58 | 23068 |
| ANTH148 | Kappa light chain | | US20040258699 SEQ ID NO: 59 | 23069 |
| ANTH149 | Kappa light chain | | US20040258699 SEQ ID NO: 60 | 23070 |
| ANTH150 | Kappa light chain | | US20040258699 SEQ ID NO: 61 | 23071 |
| ANTH151 | Lambda light chain | | US20040258699 SEQ ID NO: 27 | 23072 |
| ANTH152 | Lambda light chain | | US20040258699 SEQ ID NO: 28 | 23073 |
| ANTH153 | Lambda light chain | | US20040258699 SEQ ID NO: 29 | 23074 |
| ANTH154 | Lambda light chain | | US20040258699 SEQ ID NO: 30 | 23075 |
| ANTH155 | Lambda light chain | | US20040258699 SEQ ID NO: 31 | 23076 |
| ANTH156 | Lambda light chain | | US20040258699 SEQ ID NO: 32 | 23077 |
| ANTH157 | Lambda light chain | | US20040258699 SEQ ID NO: 33 | 23078 |
| ANTH158 | Lambda light chain | | US20040258699 SEQ ID NO: 34 | 23079 |
| ANTH159 | Lambda light chain | | US20040258699 SEQ ID NO: 35 | 23080 |
| ANTH160 | Lambda tight chain | | US20040258699 SEQ ID NO: 36 | 23081 |
| ANTH161 | Lambda light chain | | US20040258699 SEQ ID NO: 37 | 23082 |
| ANTH162 | Lambda light chain | | US20040258699 SEQ ID NO: 38 | 23083 |
| ANTH163 | Lambda light chain | | US20040258699 SEQ ID NO: 62 | 23084 |
| ANTH164 | Lambda light chain | | US20040258699 SEQ ID NO: 63 | 23085 |
| ANTH165 | Lambda light chain | | US20040258699 SEQ ID NO: 64 | 23086 |
| ANTH166 | Lambda light chain | | US20040258699 SEQ ID NO: 65 | 23087 |
| ANTH167 | Lambda light chain | | US20040258699 SEQ ID NO: 66 | 23088 |
| ANTH168 | Lambda light chain | | US20040258699 SEQ ID NO: 67 | 23089 |
| ANTH169 | Lambda light chain | | US20040258699 SEQ ID NO: 68 | 23090 |
| ANTH170 | Lambda light chain | | US20040258699 SEQ ID NO: 69 | 23091 |
| ANTH171 | Lambda light chain | | US20040258699 SEQ ID NO: 70 | 23092 |
| ANTH172 | Lambda light chain | | US20040258699 SEQ ID NO: 71 | 23093 |
| ANTH173 | Lambda light chain | | US20040258699 SEQ ID NO: 72 | 23094 |
| ANTH174 | Lambda light chain | | US20040258699 SEQ ID NO: 73 | 23095 |
| ANTH175 | Lambda light chain | | US20040258699 SEQ ID NO: 74 | 23096 |
| ANTH178 | Lambda light chain | | US20040258699 SEQ ID NO: 75 | 23097 |
| ANTH177 | Lambda light chain | | US20040258699 SEQ ID NO: 76 | 23098 |
| ANTH178 | Lambda light chain | | US20040258699 SEQ ID NO: 77 | 23099 |
| ANTH179 | Light chain | | U.S. Pat. No. 8,617,548 SEQ ID NO: 1 | 23100 |
| ANTH180 | Light chain | IQNPA Lkappa | U.S. Pat. No. 7,658,925 SEQ ID NO: 4 | 23101 |
| ANTH181 | Light chain | IQNLF Lkappa | U.S. Pat. No. 7,658,925 SEQ ID NO: 8 | 23102 |
| ANTH182 | Light chain | 1A5 | US20090022736 SEQ ID NO: 2 | 23103 |
| ANTH183 | Light chain | 4A12 | US20090022736 SEQ ID NO: 4 | 23104 |
| ANTH184 | Light chain | 24B1 | US20090022736 SEQ ID NO: 6 | 23105 |
| ANTH185 | Light chain | 24G4 | US20090022736 SEQ ID NO: 8 | 23106 |
| ANTH186 | Light chain | ′32E12 | US20090022736 SEQ ID NO: 10 | 23107 |
| ANTH187 | Light chain | 33F4 | US20090022736 SEQ ID NO: 12 | 23108 |
| ANTH188 | Light chain | scFv 2LF | EP2778173 SEQ ID NO: 6 | 23109 |
| ANTH189 | Light chain | Obiltoxaximab | | 23110 |
| ANTH190 | Light chain region | W1 | U.S. Pat. No. 8,685,396 SEQ ID NO: 9 | 23111 |
| ANTH191 | Light chain region | W2 | U.S. Pat. No. 8,685,396 SEQ ID NO: 25 | 23112 |
| ANTH192 | Light chain region | W5 | U.S. Pat. No. 8,685,396 SEQ ID NO: 37 | 23113 |
| ANTH193 | Light chain region | A63-6 | U.S. Pat. No. 8,685,396 SEQ ID NO: 38 | 23114 |
| ANTH194 | Light chain region | F3-6 | U.S. Pat. No. 8,685,396 SEQ ID NO: 39 | 23115 |
| ANTH195 | Light chain region | F5-1 | U.S. Pat. No. 8,685,396 SEQ ID NO: 40 | 23116 |
| ANTH196 | Light chain variable region | LF11H | U.S. Pat. No. 8,961,975 SEQ ID NO: 25 | 23117 |
| ANTH197 | Light chain variable region | LF9D | U.S. Pat. No. 8,961,975 SEQ ID NO: 17 | 23118 |
| ANTH198 | Light chain variable region | LF10E | U.S. Pat. No. 8,961,975 SEQ ID NO: 9 | 23119 |
| ANTH199 | Light chain variable region | 6.20 | WO2015107307 SEQ ID NO: 2 | 23120 |
| ANTH200 | Light chain variable region | 35PA83 | WO2009071860 SEQ ID NO: 2 | 23121 |
| ANTH201 | Light chain variable region | anti-γDPGA | U.S. Pat. No. 8,501,182 SEQ ID NO: 2 | 23122 |
| | | antibody | | |
| ANTH202 | Light chain variable region | 4C | U.S. Pat. No. 8,501,182 SEQ ID NO: 4 | 23123 |
| ANTH203 | Light chain variable region | 11D | U.S. Pat. No. 8,501,182 SEQ ID NO: 6 | 23124 |
| ANTH204 | Light chain variable region | F20G75 | WO2007131363 SEQ ID NO: 10 | 23125 |
| ANTH205 | Light chain variable region | F20G76 | WO2007131363 SEQ ID NO: 12 | 23126 |
| ANTH206 | Light chain variable region | F20G77 | WO2007131363 SEQ ID NO: 14 | 23127 |
| ANTH207 | Light chain variable region | V2 variant | U.S. Pat. No. 8,507,655 SEQ ID NO: 8 | 23128 |
| ANTH208 | Light chain variable region | 6.20 variant | U.S. Pat. No. 8,507,655 SEQ ID NO: 10 | 23129 |
| ANTH209 | Light chain variable region | J24.15 variant | U.S. Pat. No. 8,507,655 SEQ ID NO: 12 | 23130 |
| ANTH210 | Light chain variable region | J24.7 variant | U.S. Pat. No. 8,507,655 SEQ ID NO: 14 | 23131 |
| ANTH211 | Light chain variable region | V2 variant human | U.S. Pat. No. 8,507,655 SEQ ID NO: 16 | 23132 |
| ANTH212 | Light chain variable region | 6.20 variant | U.S. Pat. No. 8,507,655 SEQ ID NO: 18 | 23133 |
| | | human | | |
| ANTH213 | Light chain variable region | J24.15 variant | U.S. Pat. No. 8,507,655 SEQ ID NO: 20 | 23134 |
| | | human | | |
| ANTH214 | Light chain variable region | J24.7 variant | U.S. Pat. No. 8,507,655 SEQ ID NO: 22 | 23135 |
| | | human | | |
| ANTH215 | Light chain variable region | HuMab 5E8 | U.S. Pat. No. 8,401,820 SEQ ID NO: 4 | 23136 |
| | | (Major) | | |
| ANTH216 | Light chain variable region | HuMab 5E8 | U.S. Pat. No. 8,404,820 SEQ ID NO: 6 | 23137 |
| | | (Minor) | | |
| ANTH217 | Light chain variable region | HuMab 2P5 | U.S. Pat. No. 8,404,820 SEQ ID NO: 10 | 23138 |
| ANTH218 | Light chain variable region | HuMab 2H4 | U.S. Pat. No. 8,404,820 SEQ ID NO: 14 | 23139 |
| ANTH219 | Light chain variable region | HuMab 5D5- | U.S. Pat. No. 8,404,820 SEQ ID NO: 18 | 23140 |
| | | 2E10 | | |
| ANTH220 | Light chain variable region | 13E3 | U.S. Pat. No. 8,309,090 SEQ ID NO: 4 | 23141 |
| ANTH221 | Light chain variable region | 3E1 | U.S. Pat. No. 8,309,090 SEQ ID NO: 8 | 23142 |
| ANTH222 | Light chain variable region | KCTC 10756BP | U.S. Pat. No. 8,268,316 SEQ ID NO: 7 | 23143 |
| ANTH223 | Light chain variable region | modified M18 | U.S. Pat. No. 7,902,344; | 23144 |
| | | sequence | U.S. Pat. No. 6,916,474 SEQ ID NO: 25 | |
| ANTH224 | Light chain variable region | 21D9 MAb | U.S. Pat. No. 7,442,373 SEQ ID NO: 4 | 23145 |
| ANTH225 | Light chain variable region | 1C6 Mab | U.S. Pat. No. 7,442,373 SEQ ID NO: 8 | 23146 |
| ANTH226 | Light chain variable region | 4H7 Mab | U.S. Pat. No. 7,442,373 SEQ ID NO: 12 | 23147 |
| ANTH227 | Light chain variable region | 22G12 Mab | U.S. Pat. No. 7,442,373 SEQ ID NO: 16 | 23148 |
| ANTH228 | Light chain variable region | ETI-204 | US20120156196 SEQ ID NO: 2 | 23149 |
| | antibody against anthrax toxin, | | | |
| ANTH229 | Light chain variable region, | EF12A | U.S. Pat. No. 8,961,975 SEQ ID NO: 54 | 23150 |
| | Edema factor | | | |
| ANTH230 | Light chain variable region, | EF13D | U.S. Pat. No. 8,961,975 SEQ ID NO: 41 | 23151 |
| | Edema factor | | | |
| ANTH231 | Light chain variable region, | EF14H | U.S. Pat. No. 8,961,973 SEQ ID NO: 55 | 23152 |
| | Edema factor | | | |
| ANTH232 | Light chain variable region, | EP15A | U.S. Pat. No. 8,961,975 SEQ ID NO: 56 | 23153 |
| | Edema factor | | | |
| ANTH233 | Scfv | PWB2447 scFv | U.S. Pat. No. 7,601,351; | 23154 |
| | | | U.S. Pat. No. 7,906,119; | |
| | | | US20110189197 SEQ ID NO: 48 | |
| ANTH234 | Scfv | PWC2004 scFv | U.S. Pat. No. 7,601,351; | 23155 |
| | | | U.S. Pat. No. 7,906,119; | |
| | | | US20110189197 SEQ ID NO: 49 | |
| ANTH235 | Scfv | PWD0283 scFv | U.S. Pat. No. 7,601,351; | 23156 |
| | | | U.S. Pat. No. 7,906,119; | |
| | | | US20110189197 SEQ ID NO: 50 | |
| ANTH236 | Scfv | PWP0323 scFv | U.S. Pat. No. 7,601,351; | 23157 |
| | | | U.S. Pat. No. 7,906,119; | |
| | | | US20110189197 SEQ ID NO: 51 | |
| ANTH237 | Scfv | PWD0422 scFv | U.S. Pat. No. 7,601,351; | 23158 |
| | | | U.S. Pat. No. 7,906,119; | |
| | | | US20110189197 SEQ ID NO: 52 | |
| ANTH238 | Scfv | PWD0587 scFv | U.S. Pat. No. 7,601,351; | 23159 |
| | | | U.S. Pat. No. 7,906,119; | |
| | | | US20110189197 SEQ ID NO: 53 | |
| ANTH239 | Scfv | PWD0791 scFv | U.S. Pat. No. 7,601,351; | 23160 |
| | | | U.S. Pat. No. 7,906,119; | |
| | | | US20110189197 SEQ ID NO: 54 | |
| ANTH240 | Scfv | PHP2222 scFv | U.S. Pat. No. 7,601,351; | 23161 |
| | | | U.S. Pat. No. 7,906,119; | |
| | | | US20110189197 SEQ ID NO: 55 | |
| ANTH241 | Scfv | PHD2581 scFv | U.S. Pat. No. 7,601,351; | 23162 |
| | | | U.S. Pat. No. 7,906,119; | |
| | | | US20110189197 SEQ ID NO: 56 | |
| ANTH242 | | Abthrax | US20120136196 SEQ ID NO: 48 | 23163 |
| ANTH243 | | Abthrax | US20120156196 SEQ ID NO: 49 | 23164 |
| ANTH244 | | | WO2003063768 SEQ ID NO: 4 | 23165 |
| ANTH245 | | | WO2003063768 SEQ ID NO: 5 | 23166 |

[0449] In some embodiments, the payload region of the viral particle comprises one or more nucleic acid sequences encoding one or more of the payload antibody polypeptides listed in Table 27 against Botulinum Toxin (BOTT1-BOTT30; SU) ID NO: 23167-23196).

TABLE 27
Antibodies against Botulinum Toxin

| | | | | SEQ |
|---|---|---|---|---|
| Antibody | | Antibody | | ID |
| No. | Description | Name | Reference Information | NO |
| BOTT1 | Heavy-chain-only | | US20130058962 SEQ ID NO: 56 | 23167 |
| BOTT2 | Heavy-chain-only | | US20130058962 SEQ ID NO: 57 | 23168 |
| BOTT3 | Heavy-chain-only | | US20130058962 SEQ ID NO: 58 | 23169 |
| BOTT4 | Heavy-chain only binding | JDA-D12 | WO2015100409 SEQ ID NO: 20 | 23170 |
| | agents specific to BoNT/A | | | |
| | holotoxin | | | |
| BOTT5 | Heavy-chain only binding | JDQ-A5 | WO2015100409 SEQ ID NO: 22 | 23171 |
| | agents specific to BoNT/A | | | |
| | holotoxin | | | |
| BOTT6 | Heavy-chain only binding | JDQ-B5 | WO2015100409 SEQ ID NO: 24 | 23172 |
| | agents specific to BoNT/A | | | |
| | holotoxin | | | |
| BOTT7 | Heavy-chain only binding | JDQ-C2 | WO2015100409 SEQ ID NO: 26 | 23173 |
| | agents specific to BoNT/A | | | |
| | holotoxin | | | |
| BOTT8 | Heavy-chain only binding | JDQ-F 12 | WO2015100409 SEQ ID NO: 28 | 23174 |
| | agents specific to BoNT/A | | | |
| | holotoxin | | | |
| BOTT9 | Heavy-chain only binding | JDQ-G5 | WO2015100409 SEQ ID NO: 30 | 23175 |
| | agents specific to BoNT/A | | | |
| | holotoxin | | | |
| BOTT10 | Heavy-chain only binding | JDQ-H7 | WO2015100409 SEQ ID NO: 32 | 23176 |
| | agents specific to BoNT/A | | | |
| | holotoxin | | | |
| BOTT11 | Heavy-chain only binding | JEQ-A5 | WO2015100409 SEQ ID NO: 34 | 23177 |
| | agents specific to BoNT/A | | | |
| | holotoxin | | | |
| BOTT12 | Heavy-chain only binding | JEQ-H11 | WO2015100409 SEQ ID NO: 36 | 23178 |
| | agents specific to BoNT/A | | | |
| | holotoxin | | | |
| BOTT13 | Heavy-chain only binding agent | E-9 | WO2015100409 SEQ ID NO: 38 | 23179 |
| BOTT14 | Heavy-chain only binding agent | B2 | WO2015100409 SEQ ID NO: 40 | 23180 |
| BOTT15 | Heavy-chain only binding agent | C5 | WO2015100409 SEQ ID NO: 42 | 23181 |
| BOTT16 | Heavy-chain only binding agent | F9 | WO2015100409 SEQ ID NO: 44 | 23182 |
| BOTT17 | Heavy-chain only binding agent | heavy-chain only | WO2015100409 SEQ ID NO: 46 | 23183 |
| | | binding agent | | |
| BOTT18 | Heavy-chain only binding agent | heavy-chain only | WO2015100409 SEQ ID NO: 48 | 23184 |
| | with tag | binding agent | | |
| | | with tag | | |
| BOTT19 | Heavy-chain only binding agent | heavy-chain only | WO2015100409 SEQ ID NO: 50 | 23185 |
| | with tag | binding agent | | |
| | | with tag | | |
| BOTT20 | Heavy-chain only dimer | heavy-chain only | WO2015100409 SEQ ID NO: 52 | 23186 |
| | binding agent with two tags | dimer binding | | |
| | | agent with two | | |
| | | tags | | |
| BOTT21 | Recombinant camelid heavy- | H7 | WO2015100409 SEQ ID NO: 56 | 23187 |
| | chain-only antibody | | | |
| BOTT22 | Recombinant camelid heavy- | B5 | WO2015100409 SEQ ID NO: 57 | 23188 |
| | chain-only antibody | | | |
| BOTT23 | Recombinant camelid heavy- | | WO2015100409 SEQ ID NO: 58 | 23189 |
| | chain-only antibody | | | |
| BOTT24 | Scfv | scFv#2 | WO2015100409 SEQ ID NO: 2 | 23190 |
| BOTT25 | Scfv | scFv#3 | WO2015100409 SEQ ID NO: 4 | 23191 |
| BOTT26 | Scfv | scFv#7 | WO2015100409 SEQ ID NO: 6 | 23192 |
| BOTT27 | Scfv | scFv#8 | WO2015100409 SEQ ID NO: 8 | 23193 |
| BOTT28 | Scfv | scFv#21 | WO2015100409 SEQ ID NO: 10 | 23194 |
| BOTT29 | Scfv | scFv#E | WO2015100409 SEQ ID NO: 12 | 23195 |
| BOTT30 | Scfv | scFv#7-2E | WO2015100409 SEQ ID NO: 14 | 23196 |

[0450] In some embodiments, the payload region of the viral particle comprises one or more nucleic acid sequences encoding one or more of the payload antibody polypeptides listed in Table 28 against Shiga Toxin (SHIG1-SHIG71; SEQ ID NO: 23197-23267).

TABLE 28
Antibodies against Shiga Toxin

| | | | | SEQ |
|---|---|---|---|---|
| Antibody | | Antibody | | ID |
| No. | Description | Name | Reference Information | NO |
| SHIG1 | Camelid heavy-chain only | JET-H12 | WO2015100409 SEQ ID NO: 96 | 23197 |
| SHIG2 | Camelid heavy-chain only | JFG-H6 | WO2015100409 SEQ ID NO: 98 | 23198 |
| SHIG3 | Heavy chain | | US2014013548 SEQ ID NO: 44 | 23199 |
| SHIG4 | Heavy chain | | US2014013548 SEQ ID NO: 21 | 23200 |
| SHIG5 | Heavy chain of cαstx1 | Shigamab | US20120195891 SEQ ID NO: 1 | 23201 |
| SHIG6 | Heavy chain of cαstx1 | Shigamab | US20120195891 SEQ ID NO: 2 | 23202 |
| SHIG7 | Heavy chain of cαstx2 | Shigamab | US20120195891 SEQ ID NO: 3 | 23203 |
| SHIG8 | Heavy chain of cαstx2 | Shigamab | US20120195891 SEQ ID NO: 4 | 23204 |
| SHIG9 | Heavy chain single domain | | WO2014191904 SEQ ID NO: 7 | 23205 |
| SHIG10 | Heavy chain single domain | | WO2014191904 SEQ ID NO: 8 | 23206 |
| SHIG11 | Heavy chain single domain | | WO2014191904 SEQ ID NO: 9 | 23207 |
| SHIG12 | Heavy chain single domain | | WO2014191904 SEQ ID NO: 10 | 23208 |
| SHIG13 | Heavy chain single domain | | WO2014191904 SEQ ID NO: 11 | 23209 |
| SHIG14 | Heavy chain single domain | | WO2014191904 SEQ ID NO: 12 | 23210 |
| SHIG15 | Heavy chain single domain | | WO2014191904 SEQ ID NO: 13 | 23211 |
| SHIG16 | Heavy chain single domain | | WO2014191904 SEQ ID NO: 14 | 23212 |
| SHIG17 | Heavy chain single domain | | WO2014191904 SEQ ID NO: 15 | 23213 |
| SHIG18 | Heavy chain single domain | | WO2014191904 SEQ ID NO: 16 | 23214 |
| SHIG19 | Heavy chain single domain | | WO2014191904 SEQ ID NO: 17 | 23215 |
| SHIG20 | Heavy chain single domain | | WO2014191904 SEQ ID NO: 18 | 23216 |
| SHIG21 | Heavy chain single domain | | WO2014191904 SEQ ID NO: 19 | 23217 |
| SHIG22 | Heavy chain single domain | | WO2014191904 SEQ ID NO: 20 | 23218 |
| SHIG23 | Heavy chain single domain | | WO2014191904 SEQ ID NO: 21 | 23219 |
| SHIG24 | Heavy chain single domain | | WO2014191904 SEQ ID NO: 22 | 23220 |
| SHIG25 | Heavy chain single domain | | WO2014191904 SEQ ID NO: 23 | 23221 |
| SHIG26 | Heavy chain single domain | | WO2014191904 SEQ ID NO: 24 | 23222 |
| SHIG27 | Heavy chain single domain | | WO2014191904 SEQ ID NO: 25 | 23223 |
| SHIG28 | Heavy chain single domain | | WO2014191904 SEQ ID NO: 26 | 23224 |
| SHIG29 | Heavy chain single domain | | WO2014191904 SEQ ID NO: 27 | 23225 |
| SHIG30 | Heavy chain single domain | | WO2014191904 SEQ ID NO: 28 | 23226 |
| SHIG31 | Heavy chain single domain | | WO2014191904 SEQ ID NO: 29 | 23227 |
| SHIG32 | Heavy chain single domain | | WO2014191904 SEQ ID NO: 30 | 23228 |
| SHIG33 | Heavy chain single domain | | WO2014191904 SEQ ID NO: 31 | 23229 |
| SHIG34 | Heavy chain single domain | | WO2014191904 SEQ ID NO: 32 | 23230 |
| SHIG35 | Heavy chain single domain | | WO2014191904 SEQ ID NO: 33 | 23231 |
| SHIG36 | Heavy chain single domain | | WO2014191904 SEQ ID NO: 34 | 23232 |
| SHIG37 | Heavy chain single domain | | WO2014191904 SEQ ID NO: 35 | 23233 |
| SHIG38 | Heavy chain single domain | | WO2014191904 SEQ ID NO: 36 | 23234 |
| SHIG39 | Heavy chain single domain | | WO2014191904 SEQ ID NO: 37 | 23235 |
| SHIG40 | Heavy chain single domain | | WO2014191904 SEQ ID NO: 38 | 23236 |
| SHIG41 | Heavy chain single domain | | WO2014191904 SEQ ID NO: 39 | 23237 |
| SHIG42 | Heavy chain single domain | | WO2014191904 SEQ ID NO: 40 | 23238 |
| SHIG43 | Heavy chain single domain | | WO2014191904 SEQ ID NO: 41 | 23239 |
| SHIG44 | Heavy chain single domain | | WO2014191904 SEQ ID NO: 42 | 23240 |
| SHIG45 | Heavy chain single domain | | WO2014191904 SEQ ID NO: 43 | 23241 |
| SHIG46 | Heavy chain single domain | | WO2014191904 SEQ ID NO: 44 | 23242 |
| SHIG47 | Heavy chain single domain | | WO2014191904 SEQ ID NO: 45 | 23243 |
| SHIG48 | Heavy chain single domain | | WO2014191904 SEQ ID NO: 46 | 23244 |
| SHIG49 | Heavy chain single domain | | WO2014191904 SEQ ID NO: 47 | 23245 |
| SHIG50 | Heavy-chain-only | | US20130058962 SEQ ID NO: 77 | 23246 |
| SHIG51 | Heavy-chain-only | | US20130058962 SEQ ID NO: 78 | 23247 |
| SHIG52 | Heavy-chain-only | | US20130058962 SEQ ID NO: 79 | 23248 |
| SHIG53 | Heavy-chain-only | | US20130058962 SEQ ID NO: 80 | 23249 |
| SHIG54 | Heavy-chain-only | | US20130058962 SEQ ID NO: 81 | 23250 |
| SHIG55 | Heavy-chain-only | | US20130058962 SEQ ID NO: 82 | 23251 |
| SHIG56 | Heavy-chain-only | | US20130058962 SEQ ID NO: 83 | 23252 |
| SHIG57 | Heavy-chain-only | | US20130058962 SEQ ID NO: 84 | 23253 |
| SHIG58 | Heavy-chain-only | | US20130058962 SEQ ID NO: 85 | 23254 |
| SHIG59 | Heavy-chain-only | | US20130058962 SEQ ID NO: 86 | 23255 |
| SHIG60 | Light chain | | US2014013548 SEQ ID NO: 42 | 23256 |
| SHIG61 | Light chain | | US2014013548 SEQ ID NO: 19 | 23257 |
| SHIG62 | Recombinant camelid heavy- | JET-A9 | WO2015100409 SEQ ID NO: 77 | 23258 |
| | chain-only antibody, STX1 | | | |
| SHIG63 | Recombinant camelid heavy- | JGG-D4 | WO2015100409 SEQ ID NO: 78 | 23259 |
| | chain-only antibody, STX1 | | | |
| SHIG64 | Recombinant camelid heavy- | JFD-A4 | WO2015100409 SEQ ID NO: 84 | 23260 |
| | chain-only antibody, STX1, | | | |
| | STX2 | | | |
| SHIG65 | Recombinant camelid heavy- | JFD-A5 | WO2015100409 SEQ ID NO: 85 | 23261 |
| | chain-only antibody, STX1, | | | |
| | STX2 | | | |
| SHIG66 | Recombinant camelid heavy- | JGG-G6 | WO2015100409 SEQ ID NO: 86 | 23262 |
| | chain-only antibody, STX1, | | | |
| | STX2 | | | |
| SHIG67 | Recombinant camelid heavy- | JEN-D10 | WO2015100409 SEQ ID NO: 79 | 23263 |
| | chain-only antibody, STX2 | | | |
| SHIG68 | Recombinant camelid heavy- | JGH-G1 | WO2015100409 SEQ ID NO: 80 | 23264 |
| | chain-only antibody, STX2 | | | |
| SHIG69 | Recombinant camelid heavy- | JEU-A6 | WO2015100409 SEQ ID NO: 81 | 23265 |
| | chain-only antibody, STX2 | | | |
| SHIG70 | Recombinant camelid heavy- | JEU-D2 | WO2015100409 SEQ ID NO: 82 | 23266 |
| | chain-only antibody, STX2 | | | |
| SHIG71 | Recombinant camelid heavy- | JGH-G9 | WO2015100409 SEQ ID NO: 83 | 23267 |
| | chain-only antibody, STX2 | | | |

[0451] In some embodiments, the payload region of the viral particle comprises one or more nucleic acid sequences, fragments or variants thereof or encodes one or more polypeptides, fragments or variants thereof described in US Pub. No. US20090280104, the contents of each of which are herein incorporated by reference in their entirety, against Shiga toxin.

### Tropical Diseases

[0452] In some embodiments, the payload region of the viral particle comprises one or more nucleic acid sequences encoding one or more of the tropical disease related payload antibody polypeptides listed in Tables 2931.

[0453] In some embodiments, the payload region of the viral particle comprises one or more nucleic acid sequences encoding one or more of the payload antibody polypeptides listed in Table 29 against Plasmodium Falciparum causing Malaria (MALA1-MALA57; SEQ ID NO: 23268-23324).

TABLE 29
Antibodies against Plasmodium Falciparum causing Malaria

| | | | | SEQ |
|---|---|---|---|---|
| Antibody | | Antibody | | ID |
| No. | Description | Name | Reference Information | NO |
| MALA1 | Heavy chain | immunoglobulin | Wajanarogana, S. et al., Construction of a | 23268 |
| | | heavy chain | human functional single-chain variable fragment | |
| | | variable region, | (scFv) antibody recognizing the malaria parasite | |
| | | partial | Plasmodium falciparum, Biotechnol. Appl. | |
| | | | Biochem. 44 (PT 1), 55-61 (2006), NCBI | |
| | | | Accession # AAX76832.1 (129aa) | |
| MALA2 | Heavy chain | anti-MSP1 | Sowa, K. M. et al., Isolation of a monoclonal | 23269 |
| | | MAD20 block2 | antibody from a malaria patient-derived phage | |
| | | ScFv Ig heavy | display library recognizing the Block 2 region | |
| | | chain variable | of Plasmodium falciparum merozoite surface | |
| | | region, partial | protein-1, Mol. Biochem. Parasitol. 112 (1), | |
| | | | 143-147 (2001), NCBI Accession #AAK08696.1 | |
| | | | (119aa) | |
| MALA3 | Heavy chain | immunoglobulin | Lundquist, R. et al., Human recombinant | 23270 |
| | | heavy chain | antibodies against Plasmodium falciparum | |
| | | variable region, | merozoite surface protein 3 cloned from | |
| | | partial | peripheral blood leukocytes of individuals with | |
| | | | immunity to malaria demonstrate antiparasitic | |
| | | | properties, Infect. Immun. 74 (6), 3222-3231, | |
| | | | (2006), NCBI Accession # AAT09786.1 | |
| | | | (113aa) | |
| MALA4 | Heavy chain | 2A10 anti- | NCBI Accession # BAK41504.1 (118aa) | 23271 |
| | variable region | malaria | | |
| | | antibody | | |
| MALA5 | Heavy chain | | U.S. Pat. No. 7,811,569 to Dziegiel; SEQ ID NO: 1 | 23272 |
| MALA6 | Heavy chain, | | U.S. Pat. No. 7,811,569 to Dziegiel; SEQ ID NO: 3 | 23273 |
| | Anti-ang-2 | | | |
| | antibody | | | |
| MALA7 | Heavy chain | | U.S. Pat. No. 7,811,569 to Dziegiel; SEQ ID NO: 5 | 23274 |
| MALA8 | Heavy chain | | US20150197562 SEQ ID NO: 14 | 23275 |
| | variable region | | | |
| MALA9 | Heavy chain | mAh 5D5 | US20150158941 SEQ ID NO: 16 | 23276 |
| | variable region | | | |
| MALA10 | Heavy chain | | US20140112930 SEQ ID NO: 18 | 23277 |
| | variable region | | | |
| MALA11 | Heavy chain | M071Xi0199 | WO2014087007; SEQ ID NO: 182 | 23278 |
| | variable region | | | |
| MALA12 | Heavy chain | M071Xi2204 | WO2014087007; SEQ ID NO: 186 | 23279 |
| | variable region | | | |
| MALA13 | Heavy chain | M071Xi0237 | WO2014087007; SEQ ID NO: 190 | 23280 |
| | variable region | | | |
| MALA14 | Heavy chain | M071Xi2127 | WO2014087007; SEQ ID NO: 194 | 23281 |
| | variable region | | | |
| MALA15 | Heavy chain | M071Xi0092 | WO2014087007; SEQ ID NO: 198 | 23282 |
| | variable region | | | |
| MALA16 | Heavy chain | M071Xi2057 | WO2014087007; SEQ ID NO: 202 | 23283 |
| | variable region | | | |
| MALA17 | Heavy chain | M070Xi3010 | WO2014087007; SEQ ID NO: 206 | 23284 |
| | variable region | | | |
| MALA18 | Heavy chain | M071Xi0227 | WO2014087007; SEQ ID NO: 210 | 23285 |
| | variable region | | | |
| MALA19 | Heavy chain | M071Xi0081 | WO2014087007; SEQ ID NO: 214 | 23286 |
| | variable region | | | |
| MALA20 | Heavy chain | M071Xi0124 | WO2014087007; SEQ ID NO: 218 | 23287 |
| | variable region | | | |
| MALA21 | Heavy chain | M036Xi0326 | WO2014087007; SEQ ID NO: 222 | 23288 |
| | variable region | | | |
| MALA22 | Heavy chain | M070Xi3195 | WO2014087007; SEQ ID NO: 226 | 23289 |
| | variable region | | | |
| MALA23 | Heavy chain | M070Xi3062 | WO2014087007; SEQ ID NO: 230 | 23290 |
| | variable region | | | |
| MALA24 | Heavy chain | M071Xi2217 | WO2014087007; SEQ ID NO: 234 | 23291 |
| | variable region | | | |
| MALA25 | Heavy chain | M036Xi0003 | WO2014087007; SEQ ID NO: 238 | 23292 |
| | variable region | | | |
| MALA26 | Heavy chain, Eba- | R217 | Chen et al., PLoS Pathol. 9 (5), E1003390 | 23293 |
| | 175 | | (2013), NCBI Accession # 4QEX_I (215aa) | |
| MALA27 | Heavy chain, Eba- | R218 | Chen et al., PLoS Pathol. 9 (5), E1003390 | 23294 |
| | 175 | | (2013), NCBI Accession # 4K2U_I (233aa) | |
| MALA28 | Light chain | anti-MSP1 | Sowa, K. M. et al., Isolation of a monoclonal | 23295 |
| | | MAD20 block2 | antibody from a malaria patient-derived phage | |
| | | ScFv Ig heavy | display library recognizing the Block 2 region | |
| | | chain variable | of Plasmodium falciparum merozoite surface | |
| | | region, partial | protein-1, Mol. Biochem. Parasitol. 112 (1), | |
| | | | 143-147 (2001), NCBI Accession | |
| | | | #AAK08697.1 (119aa) | |
| MALA29 | Light chain | anti-MSP1 | Sowa, K. M. et al., Isolation of a monoclonal | 23296 |
| | | MAD20 block2 | antibody from a malaria patient-derived phage | |
| | | ScFv Ig light | display library recognizing the Block 2 region | |
| | | chain variable | of Plasmodium falciparum merozoite surface | |
| | | region, partial | protein-1, Mol. Biochem. Parasitol. 112 (1), | |
| | | | 143-147 (2001), NCBI Accession | |
| | | | #AAK08698.1 (110aa) | |
| MALA30 | Light chain | immunoglobulin | Wajanarogana, S. et al., Construction of a | 23297 |
| | | light chain | human functional single-chain variable fragment | |
| | | variable region, | (scFv) antibody recognizing the malaria parasite | |
| | | partial | Plasmodium falciparum, Biotechnol. Appl. | |
| | | | Biochem. 44 (PT 1), 55-61 (2006) AAX76833.1 | |
| | | | (107aa) | |
| MALA31 | Kappa light chain | immunoglobulin | Lundquist, R. et al., Human recombinant | 23298 |
| | | kappa light | antibodies against Plasmodium falciparum | |
| | | chain variable | merozoite surface protein 3 cloned from | |
| | | region, partial | peripheral blood leukocytes of individuals with | |
| | | | immunity to malaria demonstrate antiparasitic | |
| | | | properties, Infect. Immun. 74 (6), 3222-3231, | |
| | | | (2006), NCBI Accession # AAT09787.1 | |
| | | | (113aa) | |
| MALA32 | Light chain | 2A10 anti- | NCBI Accession # BAK41503.1 (108aa) | 23299 |
| | variable region | malaria | | |
| | | antibody | | |
| MALA33 | Light chain | | U.S. Pat. No. 7,811,569 to Dziegiel; SEQ ID NO: 2 | 23300 |
| MALA34 | Light chain, Anti- | | U.S. Pat. No. 7,811,569 to Dziegiel; SEQ ID NO: 4 | 23301 |
| | ang-2 antibody | | | |
| MALA35 | Light chain | | U.S. Pat. No. 7,811,569 to Dziegiel; SEQ ID NO: 6 | 23302 |
| MALA36 | Light chain | | US20150197562 SEQ ID NO: 15 | 23303 |
| | variable region | | | |
| MALA37 | Light chain | | US20150197562 SEQ ID NO: 19 | 23304 |
| | variable region | | | |
| MALA38 | Light chain | mAb 5D5 | US20150158941 SEQ ID NO: 14 | 23305 |
| | variable region | | | |
| MALA39 | Light chain | | US20140112930 SEQ ID NO: 20 | 23306 |
| | variable region | | | |
| MALA40 | Light chain | M071Xi0199 | WO2014087007; SEQ ID NO: 184 | 23307 |
| | variable region | | | |
| MALA41 | Light chain | M071Xi2204 | WO2014087007; SEQ ID NO: 188 | 23308 |
| | variable region | | | |
| MALA42 | Light chain | M071Xi0237 | WO2014087007; SEQ ID NO: 192 | 23309 |
| | variable region | | | |
| MALA43 | Light chain | M071Xi2127 | WO2014087007; SEQ ID NO: 196 | 23310 |
| | variable region | | | |
| MALA44 | Light chain | M071Xi0092 | WO2014087007; SEQ ID NO: 200 | 23311 |
| | variable region | | | |
| MALA45 | Light chain | M071Xi2057 | WO2014087007; SEQ ID NO: 204 | 23312 |
| | variable region | | | |
| MALA46 | Light chain | M070Xi3010 | WO2014087007; SEQ ID NO: 208 | 23313 |
| | variable region | | | |
| MALA47 | Light chain | M071Xi0227 | WO2014087007; SEQ ID NO: 212 | 23314 |
| | variable region | | | |
| MALA48 | Light chain | M071Xi0081 | WO2014087007; SEQ ID NO: 216 | 23315 |
| | variable region | | | |
| MALA49 | Light chain | M071Xi0124 | WO2014087007; SEQ ID NO: 220 | 23316 |
| | variable region | | | |
| MALA50 | Light chain | M036Xi0326 | WO2014087007; SEQ ID NO: 224 | 23317 |
| | variable region | | | |
| MALA51 | Light chain | M070Xi3195 | WO2014087007; SEQ ID NO: 228 | 23318 |
| | variable region | | | |
| MALA52 | Light chain | M070Xi3062 | WO2014087007; SEQ ID NO: 232 | 23319 |
| | variable region | | | |
| MALA53 | Light chain | M071Xi2217 | WO2014087007; SEQ ID NO: 236 | 23320 |
| | variable region | | | |
| MALA54 | Light chain | M036Xi0003 | WO2014087007; SEQ ID NO: 240 | 23321 |
| | variable region | | | |
| MALA55 | Light chain, Eba- | R217 | Chen et al., PLoS Pathol. 9 (5), E1003390 | 23322 |
| | 175 | | (2013), NCBI Accession # 4QEX_M (214aa) | |
| MALA56 | Light chain, Eba- | R218 | Chen et al., PLoS Pathol. 9 (5), E1003390 | 23323 |
| | 175 | | (2013), NCBI Accession # 4K2U_M (234aa) | |
| MALA57 | Vivax apical | F8.12.19 | NCBI Accession # 2J4W_L (213aa) | 23324 |
| | membrane antigen | | | |
| | 1 monoclonal | | | |
| | antibody, seqres | | | |

[0454] In some embodiments, the payload region of the viral particle comprises one or more nucleic acid sequences encoding one or more of the payload antibody polypeptides listed in Table 30 against Ebola and/or Margburg Viruses (EBOL1-EBOL53; SEQ ID NO: 23325-23377),

TABLE 30
Antibodies against Ebola and Marburg viruses

| | | | | SEQ |
|---|---|---|---|---|
| Antibody | | Antibody | | ID |
| No. | Description | Name | Reference Information | NO |
| EBOL1 | Chain A, Sudan Ebolavirus | 16f6 | Bale et al., Structural basis for | 23325 |
| | Glycoprotein (Strain Boniface) | | differential neutralization of | |
| | | | ebolaviruses; Viruses 4 (4), 447-470 | |
| | | | (2012), NCBI Accession # 3VE0_B | |
| | | | (212aa) | |
| EBOL2 | Chain B, Sudan Ebolavirus | 16f6 | Bale et al., Structural basis for | 23326 |
| | Glycoprotein (Strain Boniface) | | differential neutralization of | |
| | | | ebolaviruses; Viruses 4 (4), 447-470 | |
| | | | (2012), NCBI Accession # 3VE0_A | |
| | | | (220aa) | |
| EBOL3 | Ebola Virus Glycoprotein | 13f6-1-2 | Lee J. E. et al., Complex of a protective | 23327 |
| | | Fab | antibody with its Ebola virus GP | |
| | | | peptide epitope: unusual features of a V | |
| | | | lambda x light chain; J. Mol. Biol. 375 | |
| | | | (1), 202-216 (2008), NCBI Accession # | |
| | | | 2QHR_L (218aa) | |
| EBOL4 | Ebola Virus Glycoprotein | 13f6-1-2 | Lee J. E. et al., Complex of a protective | 23328 |
| | | Fab | antibody with its Ebola virus GP | |
| | | | peptide epitope: unusual features of a V | |
| | | | lambda x light chain; J. Mol. Biol. 375 | |
| | | | (1), 202-216 (2008), NCBI Accession # | |
| | | | 2QHR_H (222aa) | |
| EBOL5 | Fab heavy chain Envelope | Mr78 | Hashiguchi, T., et al., Cell 160 (5), | 23329 |
| | Glycoprotein Gp1 | | 904-912 (2015), NCBI Accession # | |
| | | | 3X2D_P (226aa) | |
| EBOL6 | Fab light chain, Envelope | Mr78 | Hashiguchi, T., et al., Cell 160 (5), | 23330 |
| | Glycoprotein Gp1 | | 904-912 (2015), NCBI Accession # | |
| | | | 3X2D_O (213aa) | |
| EBOL7 | Fusion protein, Zaire Ebola virus, | | US20140356354 SEQ ID NO: 2 | 23331 |
| | Mayinga strain glycoprotein | | | |
| EBOL8 | Heavy chain Ebolavirus-Protective | | Olal, D., et al., Structure of an | 23332 |
| | Antibody | | Antibody in Complex with Its Mucin | |
| | | | Domain Linear Epitope That Is | |
| | | | Protective against Ebola Virus; J. Virol. | |
| | | | 86 (5), 2809-2816 (2012), NCBI | |
| | | | Accession # 2Y6S_H (213aa) | |
| EBOL9 | Heavy chain Filovirus (Ebola or | | US20140356354 SEQ ID NO: 6 | 23333 |
| | Marburg) | | | |
| EBOL10 | Heavy chain Filovirus (Ebola or | | US20140356354 SEQ ID NO: 7 | 23334 |
| | Marburg) | | | |
| EBOL11 | Heavy chain Filovirus (Ebola or | | US20140356354 SEQ ID NO: 8 | 23335 |
| | Marburg) | | | |
| EBOL12 | Heavy chain Filovirus (Ebola or | | US20140356354 SEQ ID NO: 9 | 23336 |
| | Marburg) | | | |
| EBOL13 | Heavy chain Filovirus (Ebola or | | US20140356354 SEQ ID NO: 10 | 23337 |
| | Marburg) | | | |
| EBOL14 | Heavy chain Filovirus (Ebola or | | US20140356354 SEQ ID NO: 11 | 23338 |
| | Marburg) | | | |
| EBOL15 | Heavy chain variable region, Zaire | | WO2015127136 SEQ ID NO: 71 | 23339 |
| | ebolavirus (ZEBOV) glycoprotein | | | |
| EBOL16 | Heavy chain variable region, Zaire | | WO2015127136 SEQ ID NO: 47 | 23340 |
| | ebolavirus (ZEBOV) glycoprotein | | | |
| EBOL17 | Heavy chain variable region, Zaire | | WO2015127136 SEQ ID NO: 23 | 23341 |
| | ebolavirus (ZEBOV) glycoprotein | | | |
| EBOL18 | Heavy chain variable region, Ebola | 16H11 | U.S. Pat. No. 9,097,713 SEQ ID NO: 2 | 23342 |
| | Sudan Boniface virus (ESB) | | | |
| | glycoprotein (GP) | | | |
| EBOL19 | Heavy chain variable region, Ebola | 19B3 | U.S. Pat. No. 9,097,713 SEQ ID NO: 4 | 23343 |
| | Sudan Boniface virus (ESB) | | | |
| | glycoprotein (GP) | | | |
| EBOL20 | Heavy chain variable region, Ebola | 17F6 | U.S. Pat. No. 9,097,713 SEQ ID NO: 6 | 23344 |
| | Sudan Boniface virus (ESB) | | | |
| | glycoprotein (GP) | | | |
| EBOL21 | Heavy chain variable region, Ebola | 16F6 | U.S. Pat. No. 9,097,713 SEQ ID NO: 8 | 23345 |
| | Sudan Boniface virus (ESB) | | | |
| | glycoprotein (GP) | | | |
| EBOL22 | Heavy chain variable region, Ebola | EGP 6D8 | U.S. Pat. No. 7,335,356 SEQ ID NO: 22 | 23346 |
| | virus GP | 1-2 | | |
| EBOL23 | Heavy chain variable region, Ebola | EGP13F6-1-2 | U.S. Pat. No. 7,335,356 SEQ ID NO: 32 | 23347 |
| | virus GP | | | |
| EBOL24 | Heavy chain variable region, Ebola | EGP13C6-1-1 | U.S. Pat. No. 7,335,356 SEQ ID NO: 12 | 23348 |
| | virus GP | | | |
| EBOL25 | Heavy chain variable region, | | WO2015127140 SEQ ID NO: 14 | 23349 |
| | Marburg virus, Ebola virus, Sudan | | | |
| | virus, Bundibugyo virus, Tai | | | |
| | Forest virus or Reston virus | | | |
| | glycoprotein | | | |
| EBOL26 | Heavy chain variable region, | | WO2015127140 SEQ ID NO: 38 | 23350 |
| | Marburg virus, Ebola virus, Sudan | | | |
| | virus, Bundibugyo virus, Tai | | | |
| | Forest virus or Reston virus | | | |
| | glycoprotein | | | |
| EBOL27 | Heavy chain variable region, | | WO2015127140 SEQ ID NO: 62 | 23351 |
| | Marburg virus, Ebola virus, Sudan | | | |
| | virus, Bundibugyo virus, Tai | | | |
| | Forest virus or Reston virus | | | |
| | glycoprotein | | | |
| EBOL28 | Heavy chain variable region, | | WO2015127140 SEQ ID NO: 86 | 23352 |
| | Marburg virus, Ebola virus, Sudan | | | |
| | virus, Bundibugyo virus, Tai | | | |
| | Forest virus or Reston virus | | | |
| | glycoprotein | | | |
| EBOL29 | Heavy chain variable region, | | WO2015127140 SEQ ID NO: 110 | 23353 |
| | Marburg virus, Ebola virus, Sudan | | | |
| | virus, Bundibugyo virus, Tai | | | |
| | Forest virus or Reston virus | | | |
| | glycoprotein | | | |
| EBOL30 | Heavy chain variable region, | | WO2015127140 SEQ ID NO: 134 | 23354 |
| | Marburg virus, Ebola virus, Sudan | | | |
| | virus, Bundibugyo virus, Tai | | | |
| | Forest virus or Reston virus | | | |
| | glycoprotein | | | |
| EBOL31 | Heavy chain variable region, | | WO2015127140 SEQ ID NO: 158 | 23355 |
| | Marburg virus, Ebola virus, Sudan | | | |
| | virus, Bundibugyo virus, Tai | | | |
| | Forest virus or Reston virus | | | |
| | glycoprotein | | | |
| EBOL32 | Heavy chain, Ebola virus | Fab Kz52 | Lee J. E. et al., Structure of the Ebola | 23356 |
| | glycoprotein, | | virus glycoprotein bound to an | |
| | | | antibody from a human survivor; | |
| | | | Nature 454 (7201), 177-182 (2008), | |
| | | | NCBI Accession # 3CSY_G (226aa) | |
| EBOL33 | Light chain variable region, Ebola | 16F6 | U.S. Pat. No. 9,097,713 SEQ ID NO: 10 | 23357 |
| | Sudan Boniface virus (ESB) | | | |
| | glycoprotein (GP) | | | |
| EBOL34 | Light chain variable region, Ebola | EGP 6D8 | U.S. Pat. No. 7,335,356 SEQ ID NO: 27 | 23358 |
| | virus GP | 1-2 | | |
| EBOL35 | Light chain variable region, Ebola | EGP13F6-1-2 | U.S. Pat. No. 7,335,356 SEQ ID NO: 37 | 23359 |
| | virus GP | | | |
| EBOL36 | Light chain variable region, Ebola | EGP13C6-1-1 | U.S. Pat. No. 7,335,356 SEQ ID NO: 16 | 23360 |
| | virus GP | | | |
| EBOL37 | Light chain variable region, | | WO2015127140 SEQ ID NO: 2 | 23361 |
| | Marburg virus, Ebola virus, Sudan | | | |
| | virus, Bundibugyo virus, Tai | | | |
| | Forest virus or Reston virus | | | |
| | glycoprotein | | | |
| EBOL38 | Light chain variable region, | | WO2015127140 SEQ ID NO: 26 | 23362 |
| | Marburg virus, Ebola virus, Sudan | | | |
| | virus, Bundibugyo virus, Tai | | | |
| | Forest virus or Reston virus | | | |
| | glycoprotein | | | |
| EBOL39 | Light chain variable region, | | WO2015127140 SEQ ID NO: 50 | 23363 |
| | Marburg virus, Ebola virus, Sudan | | | |
| | virus, Bundibugyo virus, Tai | | | |
| | Forest vires or Reston virus | | | |
| | glycoprotein | | | |
| EBOL40 | Light chain variable region, | | WO2015127140 SEQ ID NO: 74 | 23364 |
| | Marburg virus, Ebola virus, Sudan | | | |
| | virus, Bundibugyo virus, Tai | | | |
| | Forest virus or Reston virus | | | |
| | glycoprotein | | | |
| EBOL41 | Light chain variable region, | | WO2015127140 SEQ ID NO: 98 | 23365 |
| | Marburg virus, Ebola virus, Sudan | | | |
| | virus, Bundibugyo virus, Tai | | | |
| | Forest virus or Reston virus | | | |
| | glycoprotein | | | |
| EBOL42 | Light chain variable region, | | WO2015127140 SEQ ID NO: 122 | 23366 |
| | Marburg virus, Ebola virus, Sudan | | | |
| | virus, Bundibugyo virus, Tai | | | |
| | Forest virus or Reston virus | | | |
| | glycoprotein | | | |
| EBOL43 | Light chain variable region, | | WO2015127140 SEQ ID NO: 146 | 23367 |
| | Marburg virus, Ebola virus, Sudan | | | |
| | virus, Bundibugyo virus, Tai | | | |
| | Forest virus or Reston virus | | | |
| | glycoprotein | | | |
| EBOL44 | Light chain variable region, Zaire | | WO2015127136 SEQ ID NO: 59 | 23368 |
| | ebolavirus (ZEBOV) glycoprotein | | | |
| EBOL45 | Light chain variable region, Zaire | | WO2015127136 SEQ ID NO: 35 | 23369 |
| | ebolavirus (ZEBOV) glycoprotein | | | |
| EBOL46 | Light chain variable region, Zaire | | WO2015127136 SEQ ID NO: 11 | 23370 |
| | ebolavirus (ZEBOV) glycoprotein | | | |
| EBOL47 | light chain, Ebola virus | Fab Kz52 | Lee J. E. et al., Structure of the Ebola | 23371 |
| | glycoprotein | | virus glycoprotein bound to an | |
| | | | antibody from a human survivor; | |
| | | | Nature 454 (7201), 177-182 (2008), | |
| | | | NCBI Accession # 3CSY_H (217aa) | |
| EBOL48 | Light chain, Ebolavirus-Protective | | Olal, D., et al., Structure of an | 23372 |
| | Antibody | | Antibody in Complex with Its Mucin | |
| | | | Domain Linear Epitope That Is | |
| | | | Protective against Ebola Virus; J. Virol. | |
| | | | 86 (5), 2809-2816 (2012), NCBI | 23373 |
| | | | Accession # 2Y6S_L (217aa) | |
| EBOL49 | Light chain, Filovirus (Ebola or | | US20140356354 SEQ ID NO: 12 | 23374 |
| | Marburg) | | | |
| EBOL50 | Light chain, Filovirus (Ebola or | | US20140356354 SEQ ID NO: 13 | 23375 |
| | Marburg) | | | |
| EBOL51 | Light chain, Filovirus (Ebola or | | US20140356354 SEQ ID NO: 14 | 23376 |
| | Marburg) | | | |
| EBOL52 | Light chain, Filovirus (Ebola or | | US20140356354 SEQ ID NO: 15 | 23377 |
| | Marburg) | | | |
| EBOL53 | Light chain, Filovirus (Ebola or | | US20140356354 SEQ ID NO: 16 | 23378 |
| | Marburg) | | | |

[0455] In some embodiments, the payload region of the viral particle comprises one or more nucleic acid sequences, fragment or variants thereof or encodes one or more polypeptides, fragments or variants thereof described in U.S. Pat. No. 7,335,356 and EP Pub. No. EP1539238, the contents of each of which are herein incorporated by reference in their entirety, against Ebola.

[0456] In some embodiments, the payload region of the viral particle comprises one or more nucleic acid sequences encoding one or more of the payload antibody polypeptides listed in Table 31 against Mosquito-borne disease (MOSQ1-MOSQ118; SEQ ID NO: 23378-23495).

TABLE 31
Antibodies against Mosquito-borne diseases

| | | | | SEQ |
|---|---|---|---|---|
| Antibody | | Antibody | | ID |
| No. | Description | Name | Reference Information | NO |
| MOSQ1 | Gamma heavy chain, | | Thibodeaux, B. A. “Development of a human- | 23378 |
| | partial, anti-Saint Louis | | murine chimeric immunoglobulin M antibody | |
| | encephalitis virus | | for use in the serological detection of human | |
| | envelope glycoprotein | | flavivirus antibodies”, Clin. Vaccine | |
| | immunoglobulin | | Immunol. 16 (5), 679-685, 2009), NCBI | |
| | | | Accession # ACI62179 | |
| MOSQ2 | Gamma heavy chain, | | Thibodeaux, B. A. “Development of a human- | 23379 |
| | partial, anti-Saint Louis | | murine chimeric immunoglobulin M antibody | |
| | encephalitis virus | | for use in the serological detection of human | |
| | envelope glycoprotein | | flavivirus antibodies”, Clin. Vaccine | |
| | immunoglobulin | | Immunol. 16 (5), 679-685, 2009), NCBI | |
| | | | Accession # ACI62180 | |
| MOSQ3 | Heavy chain variable | anti- | US20080292644 SEQ ID NO: 69 | 23380 |
| | region, Japanese | DLVR1/CLEC5A | | |
| | encephalitis virus | | | |
| MOSQ4 | Heavy chain variable | anti- | US20080292644 SEQ ID NO: 70 | 23381 |
| | region, Japanese | DLVR1/CLEC5A | | |
| | encephalitis virus | | | |
| MOSQ5 | Heavy chain variable | anti- | US20080292644 SEQ ID NO: 71 | 23382 |
| | region, Japanese | DLVR1/CLEC5A | | |
| | encephalitis virus | | | |
| MOSQ6 | Heavy chain variable | | CN103864925 SEQ ID NO: 2 | 23383 |
| | region, Japanese | | | |
| | encephalitis virus | | | |
| MOSQ7 | Heavy chain variable | | Throsby, M. “Isolation and characterization | 23384 |
| | region, partial sequence, | | of human monoclonal antibodies from | |
| | WNV | | individuals infected with west nile virus” J. | |
| | | | Virol. 80 (14), 6982-6992 (2006), NCBI | |
| | | | Accession # ABF20480.1 | |
| MOSQ8 | Heavy chain variable | | Throsby, M. “Isolation and characterization | 23385 |
| | region, partial sequence, | | of human monoclonal antibodies from | |
| | WNV | | individuals infected with west nile virus” J. | |
| | | | Virol. 80 (14), 6982-6992 (2006), NCBI | |
| | | | Accession # ABF20479.1 | |
| MOSQ9 | Heavy chain variable | | Throsby, M. “Isolation and characterization | 23386 |
| | region, partial sequence, | | of human monoclonal antibodies from | |
| | WNV | | individuals infected with west nile virus” J. | |
| | | | Virol. 80 (14), 6982-6992 (2006), NCBI | |
| | | | Accession # ABF20478.1 | |
| MOSQ10 | Heavy chain variable | | Throsby, M. “Isolation and characterization | 23387 |
| | region, partial sequence, | | of human monoclonal antibodies from | |
| | WNV | | individuals infected with west nile virus” J. | |
| | | | Virol. 80 (14), 6982-6992 (2006), NCBI | |
| | | | Accession # ABF20477.1 | |
| MOSQ11 | Heavy chain variable | | Throsby, M. “Isolation and characterization | 23388 |
| | region, partial sequence, | | of human monoclonal antibodies from | |
| | WNV | | individuals infected with west nile virus” J. | |
| | | | Virol. 80 (14), 6982-6992 (2006), NCBI | |
| | | | Accession # ABF20476.1 | |
| MOSQ12 | Heavy chain variable | | Throsby, M. “Isolation and characterization | 23389 |
| | region, partial sequence, | | of human monoclonal antibodies from | |
| | WNV | | individuals infected with west nile virus” J. | |
| | | | Virol. 80 (14), 6982-6992 (2006), NCBI | |
| | | | Accession # ABF20475.1 | |
| MOSQ13 | Heavy chain variable | | Throsby, M. “Isolation and characterization | 23390 |
| | region, partial sequence, | | of human monoclonal antibodies from | |
| | WNV | | individuals infected with west nile virus” J. | |
| | | | Virol. 80 (14), 6982-6992 (2006), NCBI | |
| | | | Accession # ABF20474.1 | |
| MOSQ14 | Heavy chain variable | | Throsby, M. “Isolation and characterization | 23391 |
| | region, partial sequence, | | of human monoclonal antibodies from | |
| | WNV | | individuals infected with west nile virus” J. | |
| | | | Virol. 80 (14), 6982-6992 (2006), NCBI | |
| | | | Accession # ABF20473.1 | |
| MOSQ15 | Heavy chain variable | | Throsby, M. “Isolation and characterization | 23392 |
| | region, partial sequence, | | of human monoclonal antibodies from | |
| | WNV | | individuals infected with west nile virus” J. | |
| | | | Virol. 80 (14), 6982-6992 (2006), NCBI | |
| | | | Accession # ABF20472.1 | |
| MOSQ16 | Heavy chain variable | | Throsby, M. “Isolation and characterization | 23393 |
| | region, partial sequence, | | of human monoclonal antibodies from | |
| | WNV | | individuals infected with west nile virus” J. | |
| | | | Virol. 80 (14), 6982-6992 (2006). NCBI | |
| | | | Accession # ABF20471.1 | |
| MOSQ17 | Heavy chain variable | mAbl 1 | WO2014144061 SEQ ID NO: 1 | 23394 |
| | region, WNV, Dengue, | | | |
| | St. Louis encephalitis, | | | |
| | yellow fever virus, | | | |
| | Japanese encephalitis | | | |
| | virus, Murray Valley | | | |
| | encephalitis virus | | | |
| MOSQ18 | Heavy chain, WNV | CR4348 | U.S. Pat. No. 8,911,738 SEQ ID NO: 30 | 23395 |
| MOSQ19 | Heavy chain, WNV | CR4354 | U.S. Pat. No. 8,911,738 SEQ ID NO: 32 | 23396 |
| MOSQ20 | Heavy chain, WNV | CR4261 | U.S. Pat. No. 8,911,738 SEQ ID NO: 60 | 23397 |
| MOSQ21 | Heavy chain, WNV | CR4267 | U.S. Pat. No. 8,911,738 SEQ ID NO: 62 | 23398 |
| MOSQ22 | Heavy chain, WNV | CR4328 | U.S. Pat. No. 8,911,738 SEQ ID NO: 64 | 23399 |
| MOSQ23 | Heavy chain, WNV | CR4335 | U.S. Pat. No. 8,911,738 SEQ ID NO: 66 | 23400 |
| MOSQ24 | Heavy chain, WNV | CR4383 | U.S. Pat. No. 8,911,738 SEQ ID NO: 68 | 23401 |
| MOSQ25 | Heavy chain, WNV | CRM4354 | U.S. Pat. No. 8,911,738 SEQ ID NO: 148 | 23402 |
| MOSQ26 | Heavy chain variable | Antibody from | U.S. Pat. No. 8,911,738 SEQ ID NO: 20 | 23403 |
| | region, WNV | U.S. Pat. No. 8,911,738 | | |
| MOSQ27 | Heavy chain variable | E16 heavy chain | U.S. Pat. No. 7,572,456 SEQ ID NO: 21 | 23404 |
| | region, WNV | version 1 | | |
| MOSQ28 | Heavy chain variable | E16 heavy chain | U.S. Pat. No. 7,572,456 SEQ ID NO: 22 | 23405 |
| | region, WNV | version 2 | | |
| MOSQ29 | Heavy chain variable | E16 heavy chain | U.S. Pat. No. 7,572,456 SEQ ID NO: 23 | 23406 |
| | region, WNV | version 3 | | |
| MOSQ30 | Heavy chain variable | Antibody from | U.S. Pat. No. 8,911,738 SEQ ID NO: 18 | 23407 |
| | region, WNV | U.S. Pat. No. 8,911,738 | | |
| MOSQ31 | Heavy chain variable | hu-E16/E16p | U.S. Pat. No. 8,663,950 SEQ ID NO: 2 | 23408 |
| | region, WNV | | | |
| MOSQ32 | Heavy chain variable | hu-E16/E16p | U.S. Pat. No. 8,663,950 SEQ ID NO: 3 | 23409 |
| | region, WNV | | | |
| MOSQ33 | Heavy chain variable | E16 | U.S. Pat. No. 7,527,973 SEQ ID NO: 4 | 23410 |
| | region, WNV | | | |
| MOSQ34 | Heavy chain variable | E24 | U.S. Pat. No. 7,527,973 SEQ ID NO: 8 | 23411 |
| | region, WNV | | | |
| MOSQ35 | Heavy chain variable | E34 | U.S. Pat. No. 7,527,973 SEQ ID NO: 12 | 23412 |
| | region, WNV | | | |
| MOSQ36 | Heavy chain variable | 11 | US20090130123 SEQ ID NO: 23 | 23413 |
| | region, WNV | | | |
| MOSQ37 | Heavy chain variable | 71 | US20090130123 SEQ ID NO: 24 | 23414 |
| | region, WNV | | | |
| MOSQ38 | Heavy chain variable | 73 | US20090130123 SEQ ID NO: 25 | 23415 |
| | region, WNV | | | |
| MOSQ39 | Heavy chain variable | 85 | US20090130123 SEQ ID NO: 26 | 23416 |
| | region, WNV | | | |
| MOSQ40 | Heavy chain variable | 15 | US20090130123 SEQ ID NO: 27 | 23417 |
| | region, WNV | | | |
| MOSQ41 | Heavy chain variable | 95 | US20090130123 SEQ ID NO: 28 | 23418 |
| | region, WNV | | | |
| MOSQ42 | Heavy chain variable | 84 | US20090130123 SEQ ID NO: 29 | 23419 |
| | region, WNV | | | |
| MOSQ43 | Heavy chain variable | 10 | US20090130123 SEQ ID NO: 30 | 23420 |
| | region, WNV | | | |
| MOSQ44 | Heavy chain variable | 69 | US20090130123 SEQ ID NO: 31 | 23421 |
| | region, WNV | | | |
| MOSQ45 | Heavy chain variable | 79 | US20090130123 SEQ ID NO: 32 | 23422 |
| | region, WNV | | | |
| MOSQ46 | Heavy chain variable | 94 | US20090130123 SEQ ID NO: 33 | 23423 |
| | region, WNV | | | |
| MOSQ47 | Heavy chain variable | 9FI2 | WO2010093335 SEQ ID NO: 4 | 23424 |
| | region, WNV | | | |
| MOSQ48 | Heavy chain variable | | Throsby, M. “Isolation and characterization | 23425 |
| | region, partial sequence, | | of human monoclonal antibodies from | |
| | WMV | | individuals infected with west nile virus” J. | |
| | | | Virol. 80 (14), 6982-6992 (2006), NCBI | |
| | | | Accession # ABF20481.1 | |
| MOSQ49 | Heavy chain translation, | hu-E16/E16p | U.S. Pat. No. 8,663,950 SEQ ID NO: 5 | 23426 |
| | WNV | | | |
| MOSQ50 | Heavy chain variable | anti-yellow fever | Thibodeaux, B. A. “A humanized IgG but not | 23427 |
| | region, Yellow fever | virus vaccine | IgM antibody is effective in prophylaxis and | |
| | virus | strain 17D E | therapy of yellow fever infection in an | |
| | | glycoprotein | AG129/17D-204 peripheral challenge mouse | |
| | | | model” Antiviral Res. 94 (1), 1-8 (2012), | |
| | | | NCBI Accession # ADO17683 | |
| MOSQ51 | Light chain variable | anti- | US20080292644 SEQ ID NO: 66 | 23428 |
| | region, Japanese | DLVR1/CLEC5A | | |
| | encephalitis virus | | | |
| MOSQ52 | Light chain variable | anti- | US20080292644 SEQ ID NO: 67 | 23429 |
| | region, Japanese | DLVR1/CLEC5A | | |
| | encephalitis virus | | | |
| MOSQ53 | Light chain variable | anti- | US20080292644 SEQ ID NO: 68 | 23430 |
| | region, Japanese | DLVR1/CLEC5A | | |
| | encephalitis virus | | | |
| MOSQ54 | Light chain variable | | CN103864925 SEQ ID NO: 1 | 23431 |
| | region, Japanese | | | |
| | encephalitis virus | | | |
| MOSQ55 | Light chain variable | mAbl 1 | WO2014144061 SEQ ID NO: 3 | 23432 |
| | region, WNV, Dengue, | | | |
| | St. Louis encephalitis, | | | |
| | yellow fever virus, | | | |
| | Japanese encephalitis | | | |
| | virus, Murray Valley | | | |
| | encephalitis virus | | | |
| MOSQ56 | Light chain, WNV | CR4348 | U.S. Pat. No. 8,911,738 SEQ ID NO: 34 | 23433 |
| MOSQ57 | Light chain, WNV | CR4354 | U.S. Pat. No. 8,911,738 SEQ ID NO: 36 | 23434 |
| MOSQ58 | Light chain, WNV | CR4261 | U.S. Pat. No. 8,911,738 SEQ ID NO: 70 | 23435 |
| MOSQ59 | Light chain, WNV | CR4267 | U.S. Pat. No. 8,911,738 SEQ ID NO: 72 | 23436 |
| MOSQ60 | Light chain, WNV | CR4328 | U.S. Pat. No. 8,911,738 SEQ ID NO: 74 | 23437 |
| MOSQ61 | Light chain, WNV | CR4335 | U.S. Pat. No. 8,911,738 SEQ ID NO: 76 | 23438 |
| MOSQ62 | Light chain, WNV | CR4383 | U.S. Pat. No. 8,911,738 SEQ ID NO: 78 | 23439 |
| MOSQ63 | Light chain variable | Antibody from | U.S. Pat. No. 8,911,738 SEQ ID NO: 22 | 23440 |
| | region, WNV | U.S. Pat. No. 8,911,738 | | |
| MOSQ64 | Light chain variable | Antibody from | U.S. Pat. No. 8,911,738 SEQ ID NO: 24 | 23441 |
| | region, WNV | U.S. Pat. No. 8,911,738 | | |
| MOSQ65 | Light chain variable | E16 | U.S. Pat. No. 7,527,973 SEQ ID NO: 2 | 23442 |
| | region, WNV | | | |
| MOSQ66 | Light chain variable | E24 | U.S. Pat. No. 7,527,973 SEQ ID NO: 6 | 23443 |
| | region, WNV | | | |
| MOSQ67 | Light chain variable | E34 | U.S. Pat. No. 7,527,973 SEQ ID NO: 10 | 23444 |
| | region, WNV | | | |
| MOSQ68 | Light chain variable | E16 light chain | U.S. Pat. No. 7,572,456 SEQ ID NO: 25 | 23445 |
| | region, WNV | version 1 | | |
| MOSQ69 | Light chain variable | E16 light chain | U.S. Pat. No. 7,572,456 SEQ ID NO: 26 | 23446 |
| | region, WNV | version 2 | | |
| MOSQ70 | Light chain variable | 11 | US20090130123 SEQ ID NO: 34 | 23447 |
| | region, WNV | | | |
| MOSQ71 | Light chain variable | 71 | US20090130123 SEQ ID NO: 35 | 23448 |
| | region, WNV | | | |
| MOSQ72 | Light chain variable | 73 | US20090130123 SEQ ID NO: 36 | 23449 |
| | region, WNV | | | |
| MOSQ73 | Light chain variable | 85 | US20090130123 SEQ ID NO: 37 | 23450 |
| | region, WNV | | | |
| MOSQ74 | Light chain variable | 15 | US20090130123 SEQ ID NO: 38 | 23451 |
| | region, WNV | | | |
| MOSQ75 | Light chain variable | 95 | US20090130123 SEQ ID NO: 39 | 23452 |
| | region, WNV | | | |
| MOSQ76 | Light chain variable | 84 | US20090130123 SEQ ID NO: 40 | 23453 |
| | region, WNV | | | |
| MOSQ77 | Light chain variable | 10 | US20090130123 SEQ ID NO: 41 | 23454 |
| | region, WNV | | | |
| MOSQ78 | Light chain variable | | US20090130123 SEQ ID NO: 42 | 23455 |
| | region, WNV | | | |
| MOSQ79 | Light chain variable | 79 | US20090130123 SEQ ID NO: 43 | 23456 |
| | region, WNV | | | |
| MOSQ80 | Light chain variable | 94 | US20090130123 SEQ ID NO: 44 | 23457 |
| | region, WNV | | | |
| MOSQ81 | Light chain variable | 9FI2 | WO2010093335 SEQ ID NO: 6 | 23458 |
| | region, WNV | | | |
| MOSQ82 | Light chain variable | | Throsby, M. “Isolation and characterization | 23459 |
| | region, partial sequence, | | of human monoclonal antibodies from | |
| | WNV | | individuals infected with west nile virus” J. | |
| | | | Virol. 80 (14), 6982-6992 (2006), NCBI | |
| | | | Accession # ABF20470.1 | |
| MOSQ83 | Light chain variable | | Throsby, M. “Isolation and characterization | 23460 |
| | region, partial sequence, | | of human monoclonal antibodies from | |
| | WNV | | individuals infected with west nile virus” J. | |
| | | | Virol. 80 (14), 6982-6992 (2006), NCBI | |
| | | | Accession # ABF20469.1 | |
| MOSQ84 | Light chain variable | | Throsby, M. “Isolation and characterization | 23461 |
| | region, partial sequence, | | of human monoclonal antibodies from | |
| | WNV | | individuals infected with west nile virus” J. | |
| | | | Virol. 80 (14), 6982-6992 (2006), NCBI | |
| | | | Accession # ABF20468.1 | |
| MOSQ85 | Light chain variable | | Throsby, M. “Isolation and characterization | 23462 |
| | region, partial sequence, | | of human monoclonal antibodies from | |
| | WNV | | individuals infected with west nile virus” J. | |
| | | | Virol. 80 (14), 6982-6992 (2006), NCBI | |
| | | | Accession # ABF20467.1 | |
| MOSQ86 | Light chain variable | | Throsby, M. “Isolation and characterization | 23463 |
| | region, partial sequence, | | of human monoclonal antibodies from | |
| | WNV | | individuals infected with west nile virus” J. | |
| | | | Virol. 80 (14), 6982-6992 (2006), NCBI | |
| | | | Accession # ABF20466.1 | |
| MOSQ87 | Light chain variable | | Throsby, M. “Isolation and characterization | 23464 |
| | region, partial sequence, | | of human monoclonal antibodies from | |
| | WNV | | individuals infected with west nile virus” J. | |
| | | | Virol. 80 (14), 6982-6992 (2006), NCBI | |
| | | | Accession # ABF20465.1 | |
| MOSQ88 | Light chain variable | | Throsby, M. “Isolation and characterization | 23465 |
| | region, partial sequence, | | of human monoclonal antibodies from | |
| | WNV | | individuals infected with west nile virus” J. | |
| | | | Virol. 80 (14), 6982-6992 (2006), NCBI | |
| | | | Accession # ABF20464.1 | |
| MOSQ89 | Light chain variable | | Throsby, M. “Isolation and characterization | 23466 |
| | region, partial sequence, | | of human monoclonal antibodies from | |
| | WNV | | individuals infected with west nile virus” J. | |
| | | | Virol. 80 (14), 6982-6992 (2006), NCBI | |
| | | | Accession # ABF20463.1 | |
| MOSQ90 | Light chain variable | | Throsby, M. “Isolation and characterization | 23467 |
| | region, partial sequence, | | of human monoclonal antibodies from | |
| | WNV | | individuals infected with west nile virus” J. | |
| | | | Virol. 80 (14), 6982-6992 (2006), NCBI | |
| | | | Accession # ABF20462.1 | |
| MOSQ91 | Light chain variable | | Throsby, M. “Isolation and characterization | 23468 |
| | region, partial sequence, | | of human monoclonal antibodies from | |
| | WNV | | individuals infected with west nile virus” J, | |
| | | | Virol. 80 (14), 6982-6992 (2006), NCBI | |
| | | | Accession # ABF20461.1 | |
| MOSQ92 | Light chain variable | | Throsby, M. “Isolation and characterization | 23469 |
| | region, partial sequence, | | of human monoclonal antibodies from | |
| | WNV | | individuals infected with west nile virus” J. | |
| | | | Virol. 80 (14), 6982-6992 (2006), NCBI | |
| | | | Accession # ABF20460.1 | |
| MOSQ93 | Light chain variable | | Throsby, M. “Isolation and characterization | 23470 |
| | region, partial sequence, | | of human monoclonal antibodies from | |
| | WNV | | individuals infected with west nile virus” J. | |
| | | | Virol. 80 (14), 6982-6992 (2006), NCBI | |
| | | | Accession # ABF20459.1 | |
| MOSQ94 | Light chain variable | | Throsby, M. “Isolation and characterization | 23471 |
| | region, partial sequence, | | of human monoclonal antibodies from | |
| | WNV | | individuals infected with west nile virus” J. | |
| | | | Virol. 80 (14), 6982-6992 (2006), NCBI | |
| | | | Accession # ABF20458.1 | |
| MOSQ95 | Light chain translation, | hu-E16/E16p | U.S. Pat. No. 8,663,950 SEQ ID NO: 7 | 23472 |
| | WNV | | | |
| MOSQ96 | Light chain variable | anti-yellow fever | Thibodeaux, B. A. “A humanized IgG but not | 23473 |
| | region, Yellow fever | virus vaccine | IgM antibody is effective in prophylaxis and | |
| | virus | strain 17D E | therapy of yellow fever infection in an | |
| | | glycoprotein | AG129/17D-204 peripheral challenge mouse | |
| | | | model” Antiviral Res. 94 (1), 1-8 (2012), | |
| | | | NCBI Accession # ADO17684 | |
| MOSQ97 | ScFv, WNV | 9FI2 | WO2010093335 SEQ ID NO: 8 | 23474 |
| MOSQ98 | Fc region, WNV, | mAb-11 | WO2014144061 SEQ ID NO: 5 | 23475 |
| | Dengue, St. Louis | | | |
| | encephalitis, yellow | | | |
| | fever virus, Japanese | | | |
| | encephalitis virus, | | | |
| | Murray Valley | | | |
| | encephalitis virus | | | |
| MOSQ99 | Fc region, WNV, | mAb-11-LALA | WO2014144061 SEQ ID NO: 6 | 23476 |
| | Dengue, St. Louis | | | |
| | encephalitis, yellow | | | |
| | fever virus, Japanese | | | |
| | encephalitis virus, | | | |
| | Murray Valley | | | |
| | encephalitis virus | | | |
| MOSQ100 | ScFv, WNV | 11 | US20090130123 SEQ ID NO: 12 | 23477 |
| MOSQ101 | ScFv, WNV | 71 | US20090130123 SEQ ID NO: 13 | 23478 |
| MOSQ102 | ScFv, WNV | 73 | US20090130123 SEQ ID NO: 14 | 23479 |
| MOSQ103 | ScFv, WNV | 85 | US20090130123 SEQ ID NO: 15 | 23480 |
| MOSQ104 | ScFv, WNV | 15 | US20090130123 SEQ ID NO: 16 | 23481 |
| MOSQ105 | ScFv, WNV | 95 | US20090130123 SEQ ID NO: 17 | 23482 |
| MOSQ106 | ScFv, WNV | 84 | US20090130123 SEQ ID NO: 18 | 23483 |
| MOSQ107 | ScFv, WNV | 10 | US20090130123 SEQ ID NO: 19 | 23484 |
| MOSQ108 | ScFv, WNV | 69 | US20090130123 SEQ ID NO: 20 | 23485 |
| MOSQ109 | ScFv, WNV | 79 | US20090130123 SEQ ID NO: 21 | 23486 |
| MOSQ110 | ScFv, WNV | 94 | US20090130123 SEQ ID NO: 22 | 23487 |
| MOSQ111 | ScFvs, WNV | SC04-348 | U.S. Pat. No. 8,911,738 SEQ ID NO: 26 | 23488 |
| MOSQ112 | ScFvs, WNV | SC04-354 | U.S. Pat. No. 8,911,738 SEQ ID NO: 28 | 23489 |
| MOSQ113 | ScFv, Yellow | anti-yellow | Daffis, S. et al. “Antibody responses against | 23490 |
| | fever virus | fever virus E | wild-type yellow fever virus and the 17D | |
| | | protein scFv 7A | vaccine strain: characterization with human | |
| | | | monoclonal antibody fragments and | |
| | | | neutralization escape variants” Virology 337 | 23491 |
| | | | (2), 262-272 (2005), NCBI Accession # | |
| | | | AAT76799 | |
| MOSQ114 | ScFv, Yellow | anti-yellow | Daffis, S. et al. “Antibody responses against | 23492 |
| | fever virus | fever virus E | wild-type yellow fever virus and the 17D | |
| | | protein scFv | vaccine strain: characterization with human | |
| | | R3(27) | monoclonal antibody fragments and | |
| | | | neutralization escape variants” Virology 337 | |
| | | | (2), 262-272 (2005), NCBI Accession # | |
| | | | AAT76800 | |
| MOSQ115 | ScFv, Yellow | anti-yellow | Daffis, S. et al. “Antibody responses against | 23493 |
| | fever virus | fever virus E | wild-type yellow fever virus and the 17D | |
| | | protein scFv 5A | vaccine strain: characterization with human | |
| | | | monoclonal antibody fragments and | |
| | | | neutralization escape variants” Virology 337 | |
| | | | (2), 262-272 (2005), NCBI Accession # | |
| | | | AAT76801 | |
| MOSQ116 | ScFv, Yellow | anti-yellow | Daffis, S. et al. “Antibody responses against | 23494 |
| | fever virus | fever virus E | wild-type yellow fever virus and the 17D | |
| | | protein scFv 1A | vaccine strain: characterization with human | |
| | | | monoclonal antibody fragments and | |
| | | | neutralization escape variants” Virology 337 | |
| | | | (2), 262-272 (2005), NCBI Accession # | |
| | | | AAT76802 | |
| MOSQ117 | ScFv, Yellow | anti-yellow | Daffis, S. et al. “Antibody responses against | 23495 |
| | fever virus | fever virus E | wild-type yellow fever virus and the 17D | |
| | | protein scFv 2A | vaccine strain: characterization with human | |
| | | | monoclonal antibody fragments and | |
| | | | neutralization escape variants” Virology 337 | |
| | | | (2), 262-272 (2005), NCBI Accession # | |
| | | | AAT76803 | |
| MOSQ118 | ScFv, Yellow | anti-yellow | Daffis, S. et al. “Antibody responses against | 23496 |
| | fever virus | fever virus E | wild-type yellow fever virus and the 17D | |
| | | protein scFv | vaccine strain: characterization with human | |
| | | R3(9) | monoclonal antibody fragments and | |
| | | | neutralization escape variants” Virology 337 | |
| | | | (2), 262-272 (2005), NCBI Accession # | |
| | | | AAT76804 | |

[0457] In some embodiments, the payload region or me viral particle comprises one or more nucleic acid sequences, fragment or variants thereof or encodes one or more polypeptides, fragments or variants thereof described in U.S. Pat. No. 6,399,062 and US Pub. No. US20110171225, the contents of each of which are herein incorporated by reference in their entirety, against Malaria.

### Infectious Diseases

[0458] In some embodiments, the payload region of the viral particle comprises one or more nucleic acid sequences encoding one or more of the infectious disease related payload antibody polypeptides listed in Tables 32-53.

[0459] In some embodiments, the payload region of the viral particle comprises one or more nucleic acid sequences encoding one or more of the payload antibody polypeptides listed in Table 32 against Influenza virus (INFL1-INFL1085; SEQ ID NO: 23496-24580).

TABLE 32
Antibodies against Influenza virus

| | | | | SEQ |
|---|---|---|---|---|
| Antibody | | Antibody | | ID |
| No. | Description | Name | Reference Information | NO |
| INFL1 | Fab Fragment Heavy | ch65 | Whittle, J. R. et al., Broadly neutralizing | 23496 |
| | chain | | human antibody that recognizes the | |
| | | | receptor-binding pocket of influenza | |
| | | | virus hemagglutinin; Proc. Natl. Acad. | |
| | | | Sci. U.S.A. 108 (34), 14216-14221 | |
| | | | (2011), NCBI Accession #3SMS_H | |
| INFL2 | Fab Heavy Chain | Fab Cr6261 | Lingwood, D., et al., Structural and | 23497 |
| | | (Somatic Heavy | genetic basis for development of broadly | |
| | | Chain With | neutralizing influenza antibodies; Nature | |
| | | Germline- | 489 (7417), 566-570 (2012), NCBI | |
| | | Reverted Light | Accession #4EVN_M (242aa) | |
| | | Chain) | | |
| INFL3 | Fab heavy chain | Del2d1 | Krause, J. C. et al., M Bio 2 (1), E00345- | 23498 |
| | | | E00310 (2011), NCBI Accession | |
| | | | #3QHF_H | |
| INFL4 | Fab heavy chain | Fld194 Fab | Xiong, X. et al., Structures of complexes | 23499 |
| | | | formed by H5 influenza hemagglutinin | |
| | | | with a potent broadly neutralizing human | |
| | | | monoclonal antibody; Proc. Natl. Acad. | |
| | | | Sci. U.S.A. 112 (30), 9430-9435 (2015), | |
| | | | NCBI Accession #5A3I_C (230aa) | |
| INFL5 | Fab heavy chain | H5.3 | Winarski, K. L., Thornburg, N. J. et al., | 23500 |
| | | | Vaccine-elicited antibody that neutralizes | |
| | | | H5N1 influenza and variants binds the | |
| | | | receptor site and polymorphic sites | |
| | | | “PNAS 2015 112 (30) 9346-9351”, NCBI | |
| | | | Accession #4XNM_H | |
| INFL6 | Fab Heavy chain | 5j8 | Hong, M. et al., Antibody Recognition of | 23501 |
| | | | the Pandemic H1N1 Influenza Virus | |
| | | | Hemagglutinin Receptor Binding Site; J. | |
| | | | Virol. 87 (22), 12471-12480 (2013), | |
| | | | NCBI Accession #4M5Z_H | |
| INFL7 | Fab lambda heavy | CR6261 | Ekiert, D. C. et al., Antibody recognition | 23502 |
| | chain | | of a highly conserved influenza virus | |
| | | | epitope; Science 324 (5924), 246-251 | |
| | | | (2009), NCBI Accession #3GBN_H | |
| INFL8 | Fab lambda light | CR6261 | Ekiert, D. C. et al., Antibody recognition | 23503 |
| | chain | | of a highly conserved influenza virus | |
| | | | epitope; Science 324 (5924), 246-251 | |
| | | | (2009), NCBI Accession #3GBN_L | |
| INFL9 | Fab lambda light | Fab Cr6261 | Lingwood, D., et al., Structural and | 23504 |
| | chain | (Somatic Heavy | genetic basis for development of broadly | |
| | | Chain With | neutralizing influenza antibodies; Nature | |
| | | Germline- | 489 (7417), 566-570 (2012), NCBI | |
| | | Reverted Light | Accession #4EVN_N (217aa) | |
| | | Chain) | | |
| INFL10 | Fab light chain | Del2d1 | Krause, J. C. et al., M Bio 2 (1), E00345- | 23505 |
| | | | E00310 (2011), NCBI Accession | |
| | | | #3QHF_L | |
| INFL11 | Fab Light Chain | Fld194 Fab | Xiong, X. et al., Structures of complexes | 23506 |
| | | | formed by H5 influenza hemagglutinin | |
| | | | with a potent broadly neutralizing human | |
| | | | monoclonal antibody; Proc. Natl. Acad, | |
| | | | Sci. U.S.A. 112 (30), 9430-9435 (2015), | |
| | | | NCBI Accession #5A3I_D (219aa) | |
| INFL12 | Fab, heavy chain | F045-092 | Lee, P. S. et al., Receptor mimicry by | 23507 |
| | | | antibody F045-092 facilitates universal | |
| | | | binding to the H3 subtype of influenza | |
| | | | virus; Nat Commun 5, 3614 (2014), | |
| | | | NCBI Accession #4O5I_W | |
| INFL13 | Fab, Light Chain | F045-092 | Lee, P. S. et al., Receptor mimicry by | 23508 |
| | | | antibody F045-092 facilitates universal | |
| | | | binding to the H3 subtype of influenza | |
| | | | virus; Nat Commun 5, 3614 (2014), | |
| | | | NCBI Accession #4O5I_V | |
| INFL14 | Fab, light chain | H5.3 | Winarski, K. L., Thornburg, N. J. et al., | 23509 |
| | | | “Vaccine-elicited antibody that | |
| | | | neutralizes H5N1 influenza and variants | |
| | | | binds the receptor site and polymorphic | |
| | | | sites “PNAS 2015 112 (30) 9346-9351”, | |
| | | | NCBI Accession #4XNM_L | |
| INFL15 | Gamma heavy chain | 8i10 | U.S. Pat. No. 8,858,948 SEQ ID NO: 69 | 23510 |
| | variable | | | |
| INFL16 | Gamma heavy chain | 23K12 | U.S. Pat. No. 8,858,948 SEQ ID NO: 100 | 23511 |
| | variable | | | |
| INFL17 | Heavy chain | CR6261, | WO 2008028946 | 23512 |
| | | Diridavumab, CR- | | |
| | | 6261 | | |
| INFL18 | Heavy chain | Firivumab, CT-P22 | US20130004505 | 23513 |
| INFL19 | Heavy chain | CT-P22 | US20130004505 SEQ ID NO: 41; WO | 23514 |
| | | | 2011/111966 | |
| INFL20 | Heavy chain | Navivumab, | WO2013048153, US20140234336 SEQ | 23515 |
| | | CT149 | ID NO: 40 | |
| INFL21 | Heavy chain | AT10-004 | US20150010566, WO2013081463 SEQ | 23516 |
| | | | ID NO: 31 | |
| INFL22 | Heavy chain | AT10-003 | US20150010566, WO2013081463 SEQ | 23517 |
| | | | ID NO: 32 | |
| INFL23 | Heavy chain | AT10-002 | US20150010566, WO2013081463 SEQ | 23518 |
| | | | ID NO: 33 | |
| INFL24 | Heavy chain | AT10-001 | US20150010566, WO2013081463 SEQ | 23519 |
| | | | ID NO: 34 | |
| INFL25 | Heavy chain | AT10-005 | US20150010566, WO2013081463 SEQ | 23520 |
| | | | ID NO: 35 | |
| INFL26 | Heavy chain | CT104 | WO2011111966, US20130004505 SEQ | 23521 |
| | | | ID NO: 37 | |
| INFL27 | Heavy chain | CT120 | WO2011111966, US20130004505 SEQ | 23522 |
| | | | ID NO: 41 | |
| INFL28 | Heavy chain | CT123 | WO2011111966, US20130004505 SEQ | 23523 |
| | | | ID NO: 45 | |
| INFL29 | Heavy chain | 2A | US20140011982 SEQ ID NO: 2 | 23524 |
| INFL30 | Heavy chain | F005-126 | WO2014049520, US20140086927 SEQ | 23525 |
| | | | ID NO: 2 | |
| INFL31 | Heavy chain | BF1-1 | WO2008156763 SEQ ID NO: 7 | 23526 |
| INFL32 | Heavy chain | BF1-19 | WO2008156763 SEQ ID NO: 11 | 23527 |
| INFL33 | Heavy chain | BF1-10 | WO2008156763 SEQ ID NO: 9 | 23528 |
| INFL34 | Heavy chain | | WO2010127252, U.S. Pat. No. 8,894,997 SEQ | 23529 |
| | | | ID NO: 3 | |
| INFL35 | Heavy chain | A18 | WO13170139 SEQ ID NO: 94 | 23530 |
| INFL36 | Heavy chain | Ab A18 | U.S. Pat. No. 7,788,200 SEQ ID NO: 15 | 23531 |
| INFL37 | Heavy chain | Ab 014, Ab 028 | U.S. Pat. No. 7,788,200 SEQ ID NO: 16 | 23532 |
| INFL38 | Heavy chain | Ab 071 | U.S. Pat. No. 7,788,200 SEQ ID NO: 162 | 23533 |
| INFL39 | Heavy chain | Ab 072 | U.S. Pat. No. 7,788,200 SEQ ID NO: 163 | 23534 |
| INFL40 | Heavy chain | Ab 078, Ab 079, | U.S. Pat. No. 7,788,200 SEQ ID NO: 164 | 23535 |
| | | Ab 080, Ab 081 | | |
| INFL41 | Heavy chain | Ab 001, Ab 009, | U.S. Pat. No. 7,788,200 SEQ ID NO: 17 | 23536 |
| | | Ab 017, Ab 160, | | |
| | | Ab 186, Ab 187, | | |
| | | Ab 188, Ab 189, | | |
| | | Ab 190, Ab 191, | | |
| | | Ab 192, Ab 193, | | |
| | | Ab 202, Ab 211 | | |
| INFL42 | Heavy chain | Ab 002, Ab 010, | U.S. Pat. No. 7,788,200 SEQ ID NO: 18 | 23537 |
| | | Ab 026, Ab 203, | | |
| | | Ab 212 | | |
| INFL43 | Heavy chain | Ab 003, Ab 011, | U.S. Pat. No. 7,788,200 SEQ ID NO: 19 | 23538 |
| | | Ab 027, Ab 194, | | |
| | | Ab 195, Ab 196, | | |
| | | Ab 197, Ab 198, | | |
| | | Ab 199, Ab 200, | | |
| | | Ab 204, Ab 213 | | |
| INFL44 | Heavy chain | Ab 086 | U.S. Pat. No. 7,788,200 SEQ ID NO: 20 | 23539 |
| INFL45 | Heavy chain | Ab 154, Ab 155, | U.S. Pat. No. 7,788,200 SEQ ID NO: 21 | 23540 |
| | | Ab 157 | | |
| INFL46 | Heavy chain | Ab 157, Ab 159 | U.S. Pat. No. 7,788,200 SEQ ID NO: 22 | 23541 |
| INFL47 | Heavy chain | Ab 210, Ab 219 | U.S. Pat. No. 7,788,200 SEQ ID NO: 23 | 23542 |
| INFL48 | Heavy chain | Ab A001, Ab | U.S. Pat. No. 7,788,200 SEQ ID NO: 24 | 23543 |
| | | A002, Ab A003, | | |
| | | Ab A010, Ab | | |
| | | A011, Ab 031, Ab | | |
| | | 037 | | |
| INFL49 | Heavy chain | Ab 004, Ab 005, | U.S. Pat. No. 7,788,200 SEQ ID NO: 25 | 23544 |
| | | Ab 006, Ab 012, | | |
| | | Ab 013, Ab 032, | | |
| | | Ab 038, Ab 043, | | |
| | | Ab 044, Ab 045, | | |
| | | Ab 046, Ab 047, | | |
| | | Ab 048, Ab 049, | | |
| | | Ab 050, Ab 051, | | |
| | | Ab 052, Ab 067, | | |
| | | Ab 068, Ab 069, | | |
| | | Ab 070, Ab 073, | | |
| | | Ab 074, Ab 075, | | |
| | | Ab 076, Ab 077 | | |
| INFL50 | Heavy chain | Ab 007, Ab 008, | U.S. Pat. No. 7,788,200 SEQ ID NO: 26 | 23545 |
| | | Ab A009, Ab A14, | | |
| | | Ab 015, Ab 033, | | |
| | | Ab 039 | | |
| INFL51 | Heavy chain | Ab 016, Ab A017, | U.S. Pat. No. 7,788,200 SEQ ID NO: 27 | 23546 |
| | | Ab C18, Ab A019, | | |
| | | Ab 034, Ab 040 | | |
| INFL52 | Heavy chain | F005-126 | WO2014049520 SEQ ID 2 | 23547 |
| INFL53 | Heavy chain | 8f24 | WO2012045001 SEQ ID 1 | 23548 |
| INFL54 | Heavy chain | 3E22 | WO2012045001 SEQ ID 5 | 23549 |
| INFL55 | Heavy chain | 5117 | WO2012045001 SEQ ID 9 | 23550 |
| INFL56 | Heavy chain | | WO2012045001 SEQ ID 13 | 23551 |
| INFL57 | Heavy chain | | WO2012045001 SEQ ID 29 | 23552 |
| INFL58 | Heavy chain | | WO2012045001 SEQ ID 33 | 23553 |
| INFL59 | Heavy chain | | WO2012045001 SEQ ID 17 | 23554 |
| INFL60 | Heavy chain | 10A14 | WO2012045001 SEQ ID 21 | 23555 |
| INFL61 | Heavy chain | 8D4 | WO2012045001 SEQ ID 25 | 23556 |
| INFL62 | Heavy chain | 2B9 | U.S. Pat. No. 9,115,201 SEQ ID NO: 6 | 23557 |
| INFL63 | Heavy chain | mAB 7A7 | US20150239960, US20140170163, | 23558 |
| | | | U.S. Pat. No. 8,673,314, US20110027270, | |
| | | | WO2010138564 SEQ ID NO: 6 | |
| INFL64 | Heavy chain | mAB 12D1 | US20150239960, US20140170163, | 23559 |
| | | | U.S. Pat. No. 8,673,314, US20110027270, | |
| | | | WO2010138564 SEQ ID NO: 12 | |
| INFL65 | Heavy chain | mAB 66A6 | US20150239960, US20140170163, | 23560 |
| | | | U.S. Pat. No. 8,673,314, US20110027270, | |
| | | | WO2010138564 SEQ ID NO: 16 | |
| INFL66 | Heavy chain | M1 D12 | US20110033473, WO2009125395 SEQ | 23561 |
| | | | ID NO: 17 | |
| INFL67 | Heavy chain | mAB1.12 | WO2013030165 SEQ ID NO: 1 | 23562 |
| INFL68 | Heavy chain | mAB3.1 | WO2013030165 SEQ ID NO: 3 | 23563 |
| INFL69 | Heavy chain | 5A7 | WO2015120097 SEQ ID NO: 7 | 23564 |
| INFL70 | Heavy chain | TRL053 | WO2015120097 SEQ ID NO: 17 | 23565 |
| INFL71 | Heavy chain | TRL579 | WO2015120097 SEQ ID NO: 27 | 23566 |
| INFL72 | Heavy chain | TRL784 | WO2015120097 SEQ ID NO: 37 | 23567 |
| INFL73 | Heavy chain | TRL794 | WO2015120097 SEQ ID NO: 47 | 23568 |
| INFL74 | Heavy chain | TRL798 | WO2015120097 SEQ ID NO: 57 | 23569 |
| INFL75 | Heavy chain | TRL799 | WO2015120097 SEQ ID NO: 67 | 23570 |
| INFL76 | Heavy chain | TRL809 | WO2015120097 SEQ ID NO: 77 | 23571 |
| INFL77 | Heavy chain | TRL811 | WO2015120097 SEQ ID NO: 87 | 23572 |
| INFL78 | Heavy chain | TRL812 | WO2015120097 SEQ ID NO: 97 | 23573 |
| INFL79 | Heavy chain | TRL813 | WO2015120097 SEQ ID NO: 107 | 23574 |
| INFL80 | Heavy chain | TRL823 | WO2015120097 SEQ ID NO: 117 | 23575 |
| INFL81 | Heavy chain | TRL832 | WO2015120097 SEQ ID NO: 127 | 23576 |
| INFL82 | Heavy chain | TRL833 | WO2015120097 SEQ ID NO: 137 | 23577 |
| INFL83 | Heavy chain | TRL834 | WO2015120097 SEQ ID NO: 147 | 23578 |
| INFL84 | Heavy chain | TRL835 | WO2015120097 SEQ ID NO: 157 | 23579 |
| INFL85 | Heavy chain | TRL835 | WO2015120097 SEQ ID NO: 158 | 23580 |
| INFL86 | Heavy chain | TRL837 | WO2015120097 SEQ ID NO: 168 | 23581 |
| INFL87 | Heavy chain | TRL839 | WO2015120097 SEQ ID NO: 178 | 23582 |
| INFL88 | Heavy chain | TRL841 | WO2015120097 SEQ ID NO: 188 | 23583 |
| INFL89 | Heavy chain | TRL842 | WO2015120097 SEQ ID NO: 198 | 23584 |
| INFL90 | Heavy chain | TRL845 | WO2015120097 SEQ ID NO: 208 | 23585 |
| INFL91 | Heavy chain | TRL846 | WO2015120097 SEQ ID NO: 217 | 23586 |
| INFL92 | Heavy chain | TRL847 | WO2015120097 SEQ ID NO: 227 | 23587 |
| INFL93 | Heavy chain | TRL848 | WO2015120097 SEQ ID NO: 237 | 23588 |
| INFL94 | Heavy chain | TRL849 | WO2015120097 SEQ ID NO: 247 | 23589 |
| INFL95 | Heavy chain | TRL851 | WO2015120097 SEQ ID NO: 257 | 23590 |
| INFL96 | Heavy chain | TRL854 | WO2015120097 SEQ ID NO: 267 | 23591 |
| INFL97 | Heavy chain | TRL856 | WO2015120097 SEQ ID NO: 277 | 23592 |
| INFL98 | Heavy chain | TRL858 | WO2015120097 SEQ ID NO: 287 | 23593 |
| INFL99 | Heavy chain | humM2e-hBiTE-1 | WO2014140368 SEQ ID NO: 8 | 23594 |
| INFL100 | Heavy chain | humM2e-hBiTE-2 | WO2014140368 SEQ ID NO: 16 | 23595 |
| INFL101 | Heavy chain | humM2e-hBiTE-3 | WO2014140368 SEQ ID NO: 24 | 23596 |
| INFL102 | Heavy chain | humM2e-hBiTE-4 | WO2014140368 SEQ ID NO: 32 | 23597 |
| INFL103 | Heavy chain | VH of humM2e- | WO2014140368 SEQ ID NO: 40 | 23598 |
| | | hBiTE-5 | | |
| INFL104 | Heavy chain | humM2e-hBiTE-6 | WO2014140368 SEQ ID NO: 48 | 23599 |
| INFL105 | Heavy chain | humM2e-hBiTE-7 | WO2014140368 SEQ ID NO: 56 | 23600 |
| INFL106 | Heavy chain | humM2e-hBiTE-8 | WO2014140368 SEQ ID NO: 64 | 23601 |
| INFL107 | Heavy chain | humM2e-hBiTE-9 | WO2014140368 SEQ ID NO: 72 | 23602 |
| INFL108 | Heavy chain | murM2e-hBiTE | WO2014140368 SEQ ID NO: 80 | 23603 |
| INFL109 | Heavy chain | FLA5.10 | U.S. Pat. No. 8,124,092 SEQ ID NO: 1 | 23604 |
| INFL110 | Heavy chain | FLD21.140 | U.S. Pat. No. 8,124,092 SEQ ID NO: 5 | 23605 |
| INFL111 | Heavy chain | FLA3.14 | U.S. Pat. No. 8,124,092 SEQ ID NO: 9 | 23606 |
| INFL112 | Heavy chain | FLD20.19 | U.S. Pat. No. 8,124,092 SEQ ID NO: 13 | 23607 |
| INFL113 | Heavy chain | FLD84 | U.S. Pat. No. 8,124,092 SEQ ID NO: 42 | 23608 |
| INFL114 | Heavy chain | FLD93 | U.S. Pat. No. 8,124,092 SEQ ID NO: 52 | 23609 |
| INFL115 | Heavy chain | FLD122 | U.S. Pat. No. 8,124,092 SEQ ID NO: 62 | 23610 |
| INFL116 | Heavy chain | FLD127 | U.S. Pat. No. 8,124,092 SEQ ID NO: 72 | 23611 |
| INFL117 | Heavy chain | FLD129 | U.S. Pat. No. 8,124,092 SEQ ID NO: 82 | 23612 |
| INFL118 | Heavy chain | FLD132 | U.S. Pat. No. 8,124,092 SEQ ID NO: 92 | 23613 |
| INFL119 | Heavy chain | FLD194 | U.S. Pat. No. 8,124,092 SEQ ID NO: 102 | 23614 |
| INFL120 | Heavy chain | mAb2 | WO2015112994 SEQ ID NO: 80 | 23615 |
| INFL121 | Heavy chain | mAb3 | WO2015112994 SEQ ID NO: 84 | 23616 |
| INFL122 | Heavy chain | | Tsibane, T. et al., Influenza Human | 23617 |
| | | | Monoclonal Antibody 1F1 Interacts with | |
| | | | Three Major Antigenic Sites and | |
| | | | Residues Mediating Human Receptor | |
| | | | Specificity in H1N1 Viruses; PLoS | |
| | | | Pathol. 8 (12), E1003067 (2012), NCBI | |
| | | | Accession #4GXU_S | |
| INFL123 | Heavy chain | C05 | Ekiert, D. C., et al., Cross-neutralization | 23618 |
| | | | of influenza A viruses mediated by a | |
| | | | single antibody loop; Nature 489 (7417), | |
| | | | 526-532 (2012), NCBI Accession | |
| | | | #4FNL_H (247aa) | |
| INFL124 | Heavy chain | CR8020 | Ekiert, D. C., et al., A. highly conserved | 23619 |
| | | | neutralizing epitope on group 2 influenza | |
| | | | A viruses; Science 333 (6044), 843-850 | |
| | | | (2011); WO2010130636, NCBI | |
| | | | Accession #3SDY_H | |
| INFL125 | Heavy chain | CR8043 | Friesen, R. H. et al., A common solution | 23620 |
| | | | to group 2 influenza virus neutralization; | |
| | | | Proc. Natl. Acad. Sci. U.S.A. 111 (1), | |
| | | | 445-450 (2014), NCBI Accession | |
| | | | #4NM8_H | |
| INFL126 | Heavy chain | CR8059 | Dreyfus, C. et al., Highly conserved | 23621 |
| | | | protective epitopes on influenza B | |
| | | | viruses; Science 337 (6100), 1343-1348 | |
| | | | (2012), NCBI Accession #4FQK_H | |
| INFL127 | Heavy chain | CR8071 | Dreyfus, C. et al., Highly conserved | 23622 |
| | | | protective epitopes on influenza B | |
| | | | viruses; Science 337 (6100), 1343-1348 | 23623 |
| | | | (2012), NCBI Accession #4FQJ_H | |
| | | | (234aa) | |
| INFL128 | Heavy chain | CR9114 | WO2013079473; WO2014191435; | 23624 |
| | | | Dreyfus, C., Laursen, N. S. et al., Highly | |
| | | | conserved protective epitopes on | |
| | | | influenza B viruses; Science 337 (6100), | |
| | | | 1343-1348 (2012), NCBI Accession | |
| | | | #4FQY_H (230aa) | |
| INFL129 | Heavy chain | Ch67 | Schmidt, A. G., et al., Preconfiguration of | 23625 |
| | | | the antigen-binding site during affinity | |
| | | | maturation of a broadly neutralizing | |
| | | | influenza virus antibody; Proc. Natl. | |
| | | | Acad. Set. U.S.A. 110 (1), 264-269 | |
| | | | (2013), NCBI Accession #4HKX_A | |
| | | | (231aa) | |
| INFL130 | Heavy chain | Fab 26/9 | Schulze-Gahmen, U. et al., J. Biol. | 23626 |
| | | | Chem. 263 (32), 17100-17105 (1988); | |
| | | | Churchill, M. E., et al., J. Mol. Biol. 241 | |
| | | | (4), 534-556 (1994), NCBI Accession | |
| | | | #1FRG_H | |
| INFL131 | Heavy chain | Fab 3.1 | Wyrzucki, A. et al., Alternative | 23627 |
| | | | Recognition of the Conserved Stem | |
| | | | Epitope in Influenza A Virus | |
| | | | Hemagglutinin by a VH3-30-Encoded | |
| | | | Heterosubtypic Antibody; J. Virol. 88 | |
| | | | (12), 7083-7092 (2014), NCBI Accession | |
| | | | #4PY8_I | |
| INFL132 | Heavy chain | Fab 2g1 | Xu, R. et al., A recurring motif for | 23628 |
| | | | antibody recognition of the receptor- | |
| | | | binding site of influenza hemagglutinin; | |
| | | | Nat. Struct. Mol. Biol. 20 (3), 363-370 | |
| | | | (2013), NCBI Accession #4HG4_N | |
| | | | (223aa) | |
| INFL133 | Heavy chain | Fab 8m2 | Xu, R. et al., A recurring motif for | 23629 |
| | | | antibody recognition of the receptor- | |
| | | | binding site of influenza hemagglutinin; | |
| | | | Nat. Struct. Mol. Biol. 20 (3), 363-370 | |
| | | | (2013), NCBI Accession #4HFU_H | |
| | | | (226aa) | |
| INFL134 | Heavy chain | Fab 8f8 | Xu, R. et al., A recurring motif for | 23630 |
| | | | antibody recognition of the receptor- | |
| | | | binding site of influenza hemagglutinin; | |
| | | | Nat. Struct. Mol. Biol. 20 (3), 363-370 | |
| | | | (2013), NCBI Accession #4HF5_H | |
| | | | (233aa) | |
| INFL135 | Heavy chain | Fab 2d1 | Xu, R., et al., Structural basis of | 23631 |
| | | | preexisting immunity to the 2009 H1N1 | |
| | | | pandemic influenza virus; Science 328 | |
| | | | (5976), 357-360 (2010), NCBI Accession | |
| | | | #3LZF_H (230aa) | |
| INFL136 | Heavy chain | Fi6v3 | Corti, D. et al., A neutralizing antibody | 23632 |
| | | | selected from plasma cells that binds to | |
| | | | group 1 and group 2 influenza A | |
| | | | hemagglutinins; Science 333 (6044), | |
| | | | 850-856 (2011), NCBI Accession | |
| | | | #3ZTJ_G | |
| INFL137 | Heavy Chain | Heavy chain | Iba, Y., et al., Conserved Neutralizing | 23633 |
| | | 3WHE_N | Epitope at Globular Head of | |
| | | | Hemagglutinin in H3N2 Influenza | |
| | | | Viruses; J. Virol. (2014), NCBI | 23634 |
| | | | Accession #3WHE_M (226aa) | |
| INFL138 | Heavy chain | 7A13 | Krause et al. “Human Monoclonal | 23635 |
| | | | Antibodies to Pandemic 1957 H2N2 and | |
| | | | Pandemic 1968 H3N2 Influenza Viruses” | |
| | | | J. Virol. 86 (11), 6334-6340 (2012), | |
| | | | NCBI Accession #AFH78447 | |
| INFL139 | Heavy chain | 2D1 | WO2010127252, U.S. Pat. No. 8,894,997 SEQ ID | 23636 |
| | | | NO: 7 | |
| INFL140 | Heavy chain | 1F1 | WO2010127252, U.S. Pat. No. 8,894,997 SEQ ID | 23637 |
| | | | NO: 1 | |
| INFL141 | Heavy chain | | WO2010127252, U.S. Pat. No. 8,894,997 SEQ ID | 23638 |
| | | | NO: 4 | |
| INFL142 | Heavy chain | 1I20 | WO2010127252, U.S. Pat. No. 8,894,997 SEQ ID | 23639 |
| | | | NO: 5 | |
| INFL143 | Heavy chain | 4D20 | WO2010127252, U.S. Pat. No. 8,894,997 SEQ ID | 23640 |
| | | | NO: 9 | |
| INFL144 | Heavy chain | | WO2010127252, U.S. Pat. No. 8,894,997 SEQ ID | 23641 |
| | | | NO: 11 | |
| INFL145 | Heavy chain | | US20140205614, US20100316654 SEQ | 23642 |
| | | | ID NO: 21 | |
| INFL146 | Heavy chain | | US20140205614, US20100316654 SEQ | 23643 |
| | | | ID NO: 22 | |
| INFL147 | Heavy chain | | US20140205614, US20100316654 SEQ | 23644 |
| | | | ID NO: 23 | |
| INFL148 | Heavy chain | | US20140205614, US20100316654 SEQ | 23645 |
| | | | ID NO: 24 | |
| INFL149 | Heavy chain | | US20140205614, US20100316654 SEQ | 23646 |
| | | | ID NO: 25 | |
| INFL150 | Heavy chain | | US20140205614, US20100316654 SEQ | 23647 |
| | | | ID NO: 26 | |
| INFL151 | Heavy chain | | US20140205614, US20100316654 SEQ | 23648 |
| | | | ID NO: 27 | |
| INFL152 | Heavy chain | | US20140205614, US20100316654 SEQ | 23649 |
| | | | ID NO: 28 | |
| INFL153 | Heavy chain | | US20140205614, US20100316654 SEQ | 23650 |
| | | | ID NO: 29 | |
| INFL154 | Heavy chain | | US20140205614, US20100316654 SEQ | 23651 |
| | | | ID NO: 30 | |
| INFL155 | Heavy chain | | US20140205614, US20100316654 SEQ | 23652 |
| | | | ID NO: 31 | |
| INFL156 | Heavy chain | | US20140205614, US20100316654 SEQ | 23653 |
| | | | ID NO: 32 | |
| INFL157 | Heavy chain | | US20140205614, US20100316654 SEQ | 23654 |
| | | | ID NO: 33 | |
| INFL158 | Heavy chain | | US20140205614, US20100316654 SEQ | 23655 |
| | | | ID NO: 34 | |
| INFL159 | Heavy chain | | US20140205614, US20100316654 SEQ | 23656 |
| | | | ID NO: 35 | |
| INFL160 | Heavy chain | | US20140205614, US20100316654 SEQ | 23657 |
| | | | ID NO: 36 | |
| INFL161 | Heavy chain | | US20140205614, US20100316654 SEQ | 23658 |
| | | | ID NO: 37 | |
| INFL162 | Heavy chain | | US20140205614, US20100316654 SEQ | 23659 |
| | | | ID NO: 38 | |
| INFL163 | Heavy chain | | US20140205614, US20100316654 SEQ | 23660 |
| | | | ID NO: 39 | |
| INFL164 | Heavy chain | | US20140205614, US20100316654 SEQ | 23661 |
| | | | ID NO: 40 | |
| INFL165 | Heavy chain | | US20140205614, US20100316654 SEQ | 23662 |
| | | | ID NO: 41 | |
| INFL166 | Heavy chain | | US20140205614, US20100316654 SEQ | 23663 |
| | | | ID NO: 42 | |
| INFL167 | Heavy chain | | US20140205614, US20100316654 SEQ | 23664 |
| | | | ID NO: 43 | |
| INFL168 | Heavy chain | | US20140205614, US20100316654 SEQ | 23665 |
| | | | ID NO: 44 | |
| INFL169 | Heavy chain | | US20140205614, US20100316654 SEQ | 23666 |
| | | | ID NO: 45 | |
| INFL170 | Heavy chain | mAb1 | WO2015112994 SEQ ID NO: 76 | 23667 |
| INFL171 | Heavy chain | CR8033 | Dreyfus, C., Laursen, N. S. et al., Highly | 23668 |
| | | | conserved protective epitopes on | |
| | | | influenza B viruses; Science 337 (6100), | |
| | | | 1343-1348 (2012), NCBI Accession # | |
| | | | 4FQL_H | |
| INFL172 | Heavy chain (Partial) | monoclonal | Burioni, R. et al., Monoclonal antibodies | 23669 |
| | | antibody PN- | isolated from human B cells neutralize a | |
| | | SIA28 | broad range of H1 subtype influenza A | |
| | | | viruses including swine-origin Influenza | |
| | | | virus(S-OIV); Virology (2010), NCBI | |
| | | | Accession #ACX30936.1 (122aa) | |
| INFL173 | Heavy chain (Partial) | monoclonal | Burioni, R, et al., Monoclonal antibodies | 23670 |
| | | antibody PN- | isolated from human B cells neutralize a | |
| | | SIA49 | broad range of H1 subtype influenza A | |
| | | | viruses including swine-origin Influenza | |
| | | | virus(S-OIV); Virology (2010), NCBI | |
| | | | Accession #ACX30937.1 (127aa) | |
| INFL174 | Heavy chain cdr1 | Ab1A2 | WO2015028478 SEQ ID 6 | 23671 |
| INFL175 | Heavy chain cdr2 | Ab1A2 | WO2015028478 SEQ ID 7 | 23672 |
| INFL176 | Heavy chain cdr3 | Ab1A2 | WO2015028478 SEQ ID 8 | 23673 |
| INFL177 | Heavy chain constant | | U.S. Pat. No. 8,992,929 SEQ ID NO. 22 | 23674 |
| | region, Human igg1 | | | |
| INFL178 | Heavy chain Fab | CT147 | WO2013048153, US20140234336 SEQ | 23675 |
| | | | ID NO: 38 | |
| INFL179 | Heavy chain Fab | CT164 | WO2013048153, US20140234336 SEQ | 23676 |
| | | | ID NO: 42 | |
| INFL180 | Heavy chain Fab | CT166 | WO2013048153, US20140234336 SEQ | 23677 |
| | | | ID NO: 44 | |
| INFL181 | Heavy chain G2 | h2B9 | U.S. Pat. No. 9,115,201 SEQ ID NO: 7 | 23678 |
| INFL182 | Heavy chain G5 | h2B10 | U.S. Pat. No. 9,115,201 SEQ ID NO: 8 | 23679 |
| INFL183 | Heavy chain variable | HC-VD from | US2013030234 SEQ ID NO: 1 | 23680 |
| | (exemplary) | US2013030234 | | |
| INFL184 | Heavy chain variable | HC-VD from | US2013030234 SEQ ID NO: 2 | 23681 |
| | (exemplary) | US2013030234 | | |
| INFL185 | Heavy chain variable | HC-VD from | US2013030234 SEQ ID NO: 3 | 23682 |
| | (exemplary) | US2013030234 | | |
| INFL186 | Heavy chain variable | HC-VD from | US2013030234 SEQ ID NO: 4 | 23683 |
| | (exemplary) | US2013030234 | | |
| INFL187 | Heavy chain variable | HC-VD from | US2013030234 SEQ ID NO: 5 | 23684 |
| | (exemplary) | US2013030234 | | |
| INFL188 | Heavy chain variable | HC-VD from | US2013030234 SEQ ID NO: 6 | 23685 |
| | (exemplary) | US2013030234 | | |
| INFL189 | Heavy chain variable | HC-VD from | US2013030234 SEQ ID NO: 7 | 23686 |
| | (exemplary) | US2013030234 | | |
| INFL190 | Heavy chain variable | HC-VD from | US2013030234 SEQ ID NO: 8 | 23687 |
| | (exemplary) | US2013030234 | | |
| INFL191 | Heavy chain variable | HC-VD from | US2013030234 SEQ ID NO: 9 | 23688 |
| | (exemplary) | US2013030234 | | |
| INFL192 | Heavy chain variable | HC-VD from | US2013030234 SEQ ID NO: 10 | 23689 |
| | (exemplary) | US2013030234 | | |
| INFL193 | Heavy chain variable | HC-VD from | US2013030234 SEQ ID NO: 11 | 23690 |
| | (exemplary) | US2013030234 | | |
| INFL194 | Heavy chain variable | HC-VD from | US2013030234 SEQ ID NO: 12 | 23691 |
| | (exemplary) | US2013030234 | | |
| INFL195 | Heavy chain variable | HC-VD from | US2013030234 SEQ ID NO: 13 | 23692 |
| | (exemplary) | US2013030234 | | |
| INFL196 | Heavy chain variable | HC-VD from | US2013030234 SEQ ID NO: 14 | 23693 |
| | (exemplary) | US2013030234 | | |
| INFL197 | Heavy chain variable | HC-VD from | US2013030234 SEQ ID NO: 15 | 23694 |
| | (exemplary) | US2013030234 | | |
| INFL198 | Heavy chain variable | HC-VD from | US2013030234 SEQ ID NO: 16 | 23695 |
| | (exemplary) | US2013030234 | | |
| INFL199 | Heavy chain variable | CR6141 | US20150104459 SEQ ID NO: 199 | 23696 |
| | region | | | |
| INFL200 | Heavy chain variable | 39.18 B11 | US20140161822 SEQ ID NO: 154 | 23697 |
| | region | | | |
| INFL201 | Heavy chain variable | 39.18 E12 | US20140161822 SEQ ID NO: 158 | 23698 |
| | region | | | |
| INFL202 | Heavy chain variable | GG3 | WO2014159960 SEQ ID NO: 17 | 23699 |
| | region | | | |
| INFL203 | Heavy chain variable | N547 | U.S. Pat. No. 8,003,106 SEQ ID NO: 28 | 23700 |
| | region | | | |
| INFL204 | Heavy chain variable | L66 | U.S. Pat. No. 8,003,106 SEQ ID NO: 30 | 23701 |
| | region | | | |
| INFL205 | Heavy chain variable | C40 | U.S. Pat. No. 8,003,106 SEQ ID NO: 26 | 23702 |
| | region | | | |
| INFL206 | Heavy chain variable | 14C2 | U.S. Pat. No. 8,080,244 SEQ ID NO: 6 | 23703 |
| | region | | | |
| INFL207 | Heavy chain variable | h14C2 | U.S. Pat. No. 8,080,244 SEQ ID NO: 2 | 23704 |
| | region | | | |
| INFL208 | Heavy chain variable | 8G9 | U.S. Pat. No. 8,603,467 SEQ ID NO: 2 | 23705 |
| | region | | | |
| INFL209 | Heavy chain variable | 13D4 | U.S. Pat. No. 8,603,467 SEQ ID NO: 6 | 23706 |
| | region | | | |
| INFL210 | Heavy chain variable | 20A11 | U.S. Pat. No. 8,603,467 SEQ ID NO: 10 | 23707 |
| | region | | | |
| INFL211 | Heavy chain variable | VN04-2-HuG1 | US20100150941 SEQ ID NO: 5 | 23708 |
| | region | | | |
| INFL212 | Heavy chain variable | VN04-3-HuG1 | US20100150941 SEQ ID NO: 7 | 23709 |
| | region | | | |
| INFL213 | Heavy chain variable | FI6 variant 1 | U.S. Pat. No. 8,871,207 SEQ ID NO: 13 | 23710 |
| | region | | | |
| INFL214 | Heavy chain variable | FI6 variant 2 | U.S. Pat. No. 8,871,207 SEQ ID NO: 33 | 23711 |
| | region | | | |
| INFL215 | Heavy chain variable | FI6 variant 3 | U.S. Pat. No. 8,871,207 SEQ ID NO: 55 | 23712 |
| | region | | | |
| INFL216 | Heavy chain variable | FI6 variant 4, FI6 | U.S. Pat. No. 8,871,207 SEQ ID NO: 59 | 23713 |
| | region | variant 5 | | |
| INFL217 | Heavy chain variable | FI28 variant 1 | U.S. Pat. No. 8,871,207 SEQ ID NO: 29 | 23714 |
| | region | | | |
| INFL218 | Heavy chain variable | FI28 variant 2 | U.S. Pat. No. 8,871,207 SEQ ID NO: 35 | 23715 |
| | region | | | |
| INFL219 | Heavy chain variable | 21B15 | U.S. Pat. No. 8,858,948 SEQ ID NO: 44 | 23716 |
| | region | | | |
| INFL220 | Heavy chain variable | 3241_G23 | U.S. Pat. No. 8,858,948 SEQ ID NO: 116 | 23717 |
| | region | | | |
| INFL221 | Heavy chain variable | 3244_I10 | U.S. Pat. No. 8,858,948 SEQ ID NO: 120 | 23718 |
| | region | | | |
| INFL222 | Heavy chain variable | 3243_J07 | U.S. Pat. No. 8,858,948 SEQ ID NO: 124 | 23719 |
| | region | | | |
| INFL223 | Heavy chain variable | 3259_J21 | U.S. Pat. No. 8,858,948 SEQ ID NO: 128 | 23720 |
| | region | | | |
| INFL224 | Heavy chain variable | 3245_O19 | U.S. Pat. No. 8,858,948 SEQ ID NO: 132 | 23721 |
| | region | | | |
| INFL225 | Heavy chain variable | 3244_H04 | U.S. Pat. No. 8,858,948 SEQ ID NO: 136 | 23722 |
| | region | | | |
| INFL226 | Heavy chain variable | 3136_G05 | U.S. Pat. No. 8,858,948 SEQ ID NO: 140 | 23723 |
| | region | | | |
| INFL227 | Heavy chain variable | 3252_C13 | U.S. Pat. No. 8,858,948 SEQ ID NO: 144 | 23724 |
| | region | | | |
| INFL228 | Heavy chain variable | 3255_J06 | U.S. Pat. No. 8,858,948 SEQ ID NO: 148 | 23725 |
| | region | | | |
| INFL229 | Heavy chain variable | 3420_I23 | U.S. Pat. No. 8,858,948 SEQ ID NO: 152 | 23726 |
| | region | | | |
| INFL230 | Heavy chain variable | 3139_P23 | U.S. Pat. No. 8,858,948 SEQ ID NO: 156 | 23727 |
| | region | | | |
| INFL231 | Heavy chain variable | 3139_P23 | U.S. Pat. No. 8,858,948 SEQ ID NO: 158 | 23728 |
| | region | | | |
| INFL232 | Heavy chain variable | 3248_P18 | U.S. Pat. No. 8,858,948 SEQ ID NO: 162 | 23729 |
| | region | | | |
| INFL233 | Heavy chain variable | 3253_P10 | U.S. Pat. No. 8,858,948 SEQ ID NO: 166 | 23730 |
| | region | | | |
| INFL234 | Heavy chain variable | 3260_D19 | U.S. Pat. No. 8,858,948 SEQ ID NO: 170 | 23731 |
| | region | | | |
| INFL235 | Heavy chain variable | 3362_B11 | U.S. Pat. No. 8,858,948 SEQ ID NO: 172 | 23732 |
| | region | | | |
| INFL236 | Heavy chain variable | 3242_P05 | U.S. Pat. No. 8,858,948 SEQ ID NO: 176 | 23733 |
| | region | | | |
| INFL237 | Heavy chain variable | 2K11 | Krause, J. C. et al. “Epitope-specific | 23734 |
| | region | | human influenza antibody repertoires | |
| | | | diversify by B cell intraclonal sequence | |
| | | | divergence and interclonal convergence” | |
| | | | J. Immunol. 187 (7), 3704-3711 (2011), | |
| | | | NCBI Accession #AEO16793 | |
| INFL238 | Heavy chain variable | 2O10 | Krause, J. C. et al. “Epitope-specific | 23735 |
| | region | | human influenza antibody repertoires | |
| | | | diversify by B cell intraclonal sequence | |
| | | | divergence and interclonal convergence” | |
| | | | J. Immunol. 187 (7), 3704-3711 (2011), | |
| | | | NCBI Accession #AEO16795 | |
| INFL239 | Heavy chain variable | 4K8 | Krause, J. C. et al. “Epitope-specific | 23736 |
| | region | | human influenza antibody repertoires | |
| | | | diversify by B cell intraclonal sequence | |
| | | | divergence and interclonal convergence” | |
| | | | J. Immunol. 187 (7), 3704-3711 (2011), | |
| | | | NCBI Accession #AEO16799 | |
| INFL240 | Heavy chain variable | 6D9 | Krause, J. C. et al. “Epitope-specific | 23737 |
| | region | | human influenza antibody repertoires | |
| | | | diversify by B cell intraclonal sequence | |
| | | | divergence and interclonal convergence” | |
| | | | J. Immunol. 187 (7), 3704-3711 (2011), | |
| | | | NCBI Accession #AEO16801 | |
| INFL241 | Heavy chain variable | 4D20 | Yu, X. et al “Neutralizing antibodies | 23738 |
| | region | | derived from the B cells of 1918 | |
| | | | influenza pandemic survivors”, Nature | |
| | | | 455 (7212), 532-536, NCBI Accession | |
| | | | #ACI04579 | |
| INFL242 | Heavy chain variable | 2B12 | Yu, X. et al “Neutralizing antibodies | 23739 |
| | region | | derived from the B cells of 1918 | |
| | | | influenza pandemic survivors”, Nature | |
| | | | 455 (7212), 532-536, NCBI Accession | |
| | | | #ABY48866 | |
| INFL243 | Heavy chain variable | 8D4 | NCBI Accession #AFI57036 | 23740 |
| | region | | | |
| INFL244 | Heavy chain variable | 5B6 | NCBI Accession #AFI57040 | 23741 |
| | region | | | |
| INFL245 | Heavy chain variable | A66 | WO2009079259, US20110038935, | 23742 |
| | region | | US20140011982 SEQ ID NO: 32 | |
| INFL246 | Heavy chain variable | D7 | WO2009079259, US20110038935, | 23743 |
| | region | | US20140011982 SEQ ID NO: 6 | |
| INFL247 | Heavy chain variable | D8, D80 | WO2009079259, US20110038935, | 23744 |
| | region | | US20140011982 SEQ ID NO: 12 | |
| INFL248 | Heavy chain variable | E88 | WO2009079259, US20110038935, | 23745 |
| | region | | US20140011982 SEQ ID NO: 36 | |
| INFL249 | Heavy chain variable | E90, F10 | WO2009079259, US20110038935, | 23746 |
| | region | | US20140011982 SEQ ID NO: 18 | |
| INFL250 | Heavy chain variable | F10 | WO2009079259, US20110038935, | 23747 |
| | region | | US20140011982 SEQ ID NO: 112 | |
| INFL251 | Heavy chain variable | G17 | WO2009079259, US20110038935, | 23748 |
| | region | | US20140011982 SEQ ID NO: 24 | |
| INFL252 | Heavy chain variable | H40 | WO2009079259, US20110038935, | 23749 |
| | region | | US20140011982 SEQ ID NO: 28 | |
| INFL253 | Heavy chain variable | CH65 | WO2013020074, US20140302043 SEQ | 23750 |
| | region | | ID NO: 14 | |
| INFL254 | Heavy chain variable | CH66 | WO2013020074, US20140302043 SEQ | 23751 |
| | region | | ID NO: 15 | |
| INFL255 | Heavy chain variable | CH67 | WO2013020074, US20140302043 SEQ | 23752 |
| | region | | ID NO: 16 | |
| INFL256 | Heavy chain variable | CL86OUCA | WO2013020074, US20140302043 SEQ | 23753 |
| | region | | ID NO: 13 | |
| INFL257 | Heavy chain variable | Antibody 1 | WO2015051010 SEQ ID NO: 2 | 23754 |
| | region | | | |
| INFL258 | Heavy chain variable | Antibody 2 | WO2015051010 SEQ ID NO: 12 | 23755 |
| | region | | | |
| INFL259 | Heavy chain variable | Antibody 3 | WO2015051010 SEQ ID NO: 22 | 23756 |
| | region | | | |
| INFL260 | Heavy chain variable | Antibody 4 | WO2015051010 SEQ ID NO: 32 | 23757 |
| | region | | | |
| INFL261 | Heavy chain variable | Antibody 5 | WO2015051010 SEQ ID NO: 42 | 23758 |
| | region | | | |
| INFL262 | Heavy chain variable | Antibody 6 | WO2015051010 SEQ ID NO: 52 | 23759 |
| | region | | | |
| INFL263 | Heavy chain variable | Antibody 7 | WO2015051010 SEQ ID NO: 62 | 23760 |
| | region | | | |
| INFL264 | Heavy chain variable | Antibody 8 | WO2015051010 SEQ ID NO: 72 | 23761 |
| | region | | | |
| INFL265 | Heavy chain variable | Antibody 9 | WO2015051010 SEQ ID NO: 82 | 23762 |
| | region | | | |
| INFL266 | Heavy chain variable | Antibody 10 | WO2015051010 SEQ ID NO: 92 | 23763 |
| | region | | | |
| INFL267 | Heavy chain variable | Antibody 11 | WO2015051010 SEQ ID NO: 102 | 23764 |
| | region | | | |
| INFL268 | Heavy chain variable | Antibody 12 | WO2015051010 SEQ ID NO: 112 | 23765 |
| | region | | | |
| INFL269 | Heavy chain variable | Antibody 13 | WO2015051010 SEQ ID NO: 122 | 23766 |
| | region | | | |
| INFL270 | Heavy chain variable | Antibody 14 | WO2015051010 SEQ ID NO: 132 | 23767 |
| | region | | | |
| INFL271 | Heavy chain variable | Antibody 15 | WO201505I010 SEQ ID NO: 142 | 23768 |
| | region | | | |
| INFL272 | Heavy chain variable | Antibody 3-GL | WO2015051010 SEQ ID NO: 152 | 23769 |
| | region | | | |
| INFL273 | Heavy chain variable | EM4C04 | US20120282273 SEQ ID NO: 2 | 23770 |
| | region | | | |
| INFL274 | Heavy chain variable | 005-2G02 | WO2013059524, US20140348851 SEQ | 23771 |
| | region | | ID NO: 1 | |
| INFL275 | Heavy chain variable | 005-2G02 | WO2013059524, US20140348851 SEQ | 23772 |
| | region | | ID NO: 9 | |
| INFL276 | Heavy chain variable | 09-2A06 | WO2013059524, US20140348851 SEQ | 23773 |
| | region | | ID NO: 21 | |
| INFL277 | Heavy chain variable | 09-2A06 | WO2013059524, US20140348851 SEQ | 23774 |
| | region | | ID NO: 29 | |
| INFL278 | Heavy chain variable | 09-3A01 | WO2013059524, US20140348851 SEQ | 23775 |
| | region | | ID NO: 41 | |
| INFL279 | Heavy chain variable | 09-3A01 | WO2013059524, US20140348851 SEQ | 23776 |
| | region | | ID NO: 49 | |
| INFL280 | Heavy chain variable | 70-IF02 | WO2012096994, US20140046039 SEQ | 23777 |
| | region | | ID NO: 18 | |
| INFL281 | Heavy chain variable | | US20120058124 SEQ ID NO: 10 | 23778 |
| | region | | | |
| INFL282 | Heavy chain variable | | US20120058124 SEQ ID NO: 11 | 23779 |
| | region | | | |
| INFL283 | Heavy chain variable | | US20120058124 SEQ ID NO: 12 | 23780 |
| | region | | | |
| INFL284 | Heavy chain variable | | US20120058124 SEQ ID NO: 13 | 23781 |
| | region | | | |
| INFL285 | Heavy chain variable | | US20120058124 SEQ ID NO: 14 | 23782 |
| | region | | | |
| INFL286 | Heavy chain variable | 81.39 | US20140161822, US20140248286, | 23783 |
| | region | | WO2014078268 SEQ ID NO: 111 | |
| INFL287 | Heavy chain variable | 81.39 | US20140161822, US20140248286, | 23784 |
| | region | | WO2014078268 SEQ ID NO: 115 | |
| INFL288 | Heavy chain variable | 39.29 | US20140161822, US20140248286, | 23785 |
| | region | | WO2014078268 SEQ ID NO: 134 | |
| INFL289 | Heavy chain variable | 39.29 | US20140161822, US20140248286, | 23786 |
| | region | | WO2014078268 SEQ ID NO: 138 | |
| INFL290 | Heavy chain variable | 39.29 | US20140161822, US20140248286, | 23787 |
| | region | | WO2014078268 SEQ ID NO: 142 | |
| INFL291 | Heavy chain variable | 39.29 | US20140161822, US20140248286, | 23788 |
| | region | | WO2014078268 SEQ ID NO: 148 | |
| INFL292 | Heavy chain variable | 36.89 | US20140161822, US20140248286, | 23789 |
| | region | | WO2014078268 SEQ ID NO: 160 | |
| INFL293 | Heavy chain variable | 9.01F3 | US20140161822, US20140248286, | 23790 |
| | region | | WO2014078268 SEQ ID NO: 164 | |
| INFL294 | Heavy chain variable | 23.06C2 | US20140161822, US20140248286, | 23791 |
| | region | | WO2014078268 SEQ ID NO: 168 | |
| INFL295 | Heavy chain variable | 39.29 | US20140161822, US20140248286, | 23792 |
| | region | | WO2014078268 SEQ ID NO: 234 | |
| INFL296 | Heavy chain variable | F16 Variant 5 | WO2013011347, US20140271655, | 23793 |
| | region | | US8871207 SEQ ID NO: 59 | |
| INFL297 | Heavy chain variable | F16 Variant 3 | WO2013011347, US20140271655, | 23794 |
| | region | | US8871207 SEQ ID NO: 55 | |
| INFL298 | Heavy chain variable | F16 Variant 2 | WO2010010466 SEQ ID NO: 33 | 23795 |
| | region | | | |
| INFL299 | Heavy chain variable | FC41 | WO2010010467 SEQ ID NO 60 | 23796 |
| | region | | | |
| INFL300 | Heavy chain variable | FE43 | WO2010010467 SEQ ID NO 74 | 23797 |
| | region | | | |
| INFL301 | Heavy chain variable | FB75, FB110, | WO2010010467 SEQ ID NO 121 | 23798 |
| | region | FB177 | | |
| INFL302 | Heavy chain variable | FE17 | WO2010010467 SEQ ID NO 105 | 23799 |
| | region | | | |
| INFL303 | Heavy chain variable | FB79 | WO2010010467 SEQ ID NO 131 | 23800 |
| | region | | | |
| INFL304 | Heavy chain variable | FC1C | WO2010010467 SEQ ID NO 139 | 23801 |
| | region | | | |
| INFL305 | Heavy chain variable | FC6 | WO2010010467 SEQ ID NO 45 | 23802 |
| | region | | | |
| INFL306 | Heavy chain variable | FE53 | WO2010010467 SEQ ID NO 89 | 23803 |
| | region | | | |
| INFL307 | Heavy chain variable | 7A7 | WO2010138564 SEQ ID NO: 6 | 23804 |
| | region | | | |
| INFL308 | Heavy chain variable | 12DI | WO2010138564 SEQ ID NO: 12 | 23805 |
| | region | | | |
| INFL309 | Heavy chain variable | 66A6 | WO2010138564 SEQ ID NO: 16 | 23806 |
| | region | | | |
| INFL310 | Heavy chain variable | B-1 | U.S. Pat. No. 8,975,378, US20110319600, | 23807 |
| | region | | WO2010073647 SEQ ID NO: 27 | |
| INFL311 | Heavy chain variable | D1 | U.S. Pat. No. 8,975,378, US20110319600, | 23808 |
| | region | | WO2010073647 SEQ ID NO: 29 | |
| INFL312 | Heavy chain variable | E-2 | U.S. Pat. No. 8,975,378, US20110319600, | 23809 |
| | region | | WO2010073647 SEQ ID NO: 31 | |
| INFL313 | Heavy chain variable | B-3 | U.S. Pat. No. 8,975,378, US20110319600, | 23810 |
| | region | | WO2010073647 SEQ ID NO: 33 | |
| INFL314 | Heavy chain variable | 5A7 | WO2013114885, US20140377262 SEQ | 23811 |
| | region | | ID NO: 33 | |
| INFL315 | Heavy chain variable | 3A2 | WO2013114885, US20140377262 SEQ | 23812 |
| | region | | ID NO: 37 | |
| INFL316 | Heavy chain variable | 10C4 | WO2013114885, US20140377262 SEQ | 23813 |
| | region | | ID NO: 41 | |
| INFL317 | Heavy chain variable | Fab49 | WO2009144667, US20110076265 SEQ | 23814 |
| | region | | ID NO: 1 | |
| INFL318 | Heavy chain variable | Fab28 IgG PN- | WO2009115972, WO2011117848, | 23815 |
| | region | SIA28 | US20110014187 SEQ ID NO: 1 | |
| INFL319 | Heavy chain variable | TCN-522 | US20120207760, U.S. Pat. No. 8,916,160 SEQ ID | 23816 |
| | region | | NO: 771; U.S. Pat. No. 8,900,590 SEQ ID NO: 32 | |
| INFL320 | Heavy chain variable | CR8019 | WO2010130636 SEQ ID NO: 26 | 23817 |
| | region | | | |
| INFL321 | Heavy chain variable | CR8020 | WO2010130636 SEQ ID NO: 30 | 23818 |
| | region | | | |
| INFL322 | Heavy chain variable | CR8021 | WO2010130636 SEQ ID NO: 34 | 23819 |
| | region | | | |
| INFL323 | Heavy chain variable | CR8038 | WO2010130636 SEQ ID NO: 38 | 23820 |
| | region | | | |
| INFL324 | Heavy chain variable | CR8039 | WO2010130636 SEQ ID NO: 42 | 23821 |
| | region | | | |
| INFL325 | Heavy chain variable | CR8040 | WO2010130636 SEQ ID NO: 46 | 23822 |
| | region | | | |
| INFL326 | Heavy chain variable | CR8041 | WO2010130636 SEQ ID NO: 50 | 23823 |
| | region | | | |
| INFL327 | Heavy chain variable | CR8043 | WO2010130636 SEQ ID NO: 54 | 23824 |
| | region | | | |
| INFL328 | Heavy chain variable | CR8049 | WO2010130636 SEQ ID NO: 58 | 23825 |
| | region | | | |
| INFL329 | Heavy chain variable | CR8050 | WO2010130636 SEQ ID NO: 61 | 23826 |
| | region | | | |
| INFL330 | Heavy chain variable | CR8052 | WO2010130636 SEQ ID NO: 65 | 23827 |
| | region | | | |
| INFL331 | Heavy chain variable | CR8055 | WO2010130636 SEQ ID NO: 69 | 23828 |
| | region | | | |
| INFL332 | Heavy chain variable | CR8057 | WO2010130636 SEQ ID NO: 73 | 23829 |
| | region | | | |
| INFL333 | Heavy chain variable | CR8069 | WO2010130636 SEQ ID NO: 77 | 23830 |
| | region | | | |
| INFL334 | Heavy chain variable | CR6255 | US20090311265, U.S. Pat. No. 8,691,223, | 23831 |
| | region | | U.S. Pat. No. 9,109,017, WO2008028946A SEQ ID | |
| | | | NO: 59 | |
| INFL335 | Heavy chain variable | CR6257 | US20090311265, U.S. Pat. No. 8,691,223, | 23832 |
| | region | | U.S. Pat. No. 9,109,017, WO2008028946 SEQ ID | |
| | | | NO: 61 | |
| INFL336 | Heavy chain variable | CR6260 | US20090311265, U.S. Pat. No. 8,691,223, | 23833 |
| | region | | U.S. Pat. No. 9,109,017, WO2008028946 SEQ ID | |
| | | | NO: 63 | |
| INFL337 | Heavy chain variable | CR6261 | US20090311265, U.S. Pat. No. 8,691,223, | 23834 |
| | region | | U.S. Pat. No. 9,109,017, WO2008028946 SEQ ID | |
| | | | NO: 65 | |
| INFL338 | Heavy chain variable | CR6262 | US20090311265, U.S. Pat. No. 8,691,223, | 23835 |
| | region | | U.S. Pat. No. 9,109,017, WO2008028946 SEQ ID | |
| | | | NO: 67 | |
| INFL339 | Heavy chain variable | CR6268 | US20090311265, U.S. Pat. No. 8,691,223, | 23836 |
| | region | | U.S. Pat. No. 9,109,017, WO2008028946 SEQ ID | |
| | | | NO: 69 | |
| INFL340 | Heavy chain variable | CR6307 | US20090311265, U.S. Pat. No. 8,691,223, | 23837 |
| | region | | U.S. Pat. No. 9,109,017, WO2008028946 SEQ ID | |
| | | | NO: 71 | |
| INFL341 | Heavy chain variable | CR6310 | US20090311265, U.S. Pat. No. 8,691,223, | 23838 |
| | region | | U.S. Pat. No. 9,109,017, WO2008028946 SEQ ID | |
| | | | NO: 73 | |
| INFL342 | Heavy chain variable | CR6314 | US20090311265, U.S. Pat. No. 8,691,223, | 23839 |
| | region | | U.S. Pat. No. 9,109,017, WO2008028946 SEQ ID | |
| | | | NO: 75 | |
| INFL343 | Heavy chain variable | CR6323 | US20090311265, U.S. Pat. No. 8,691,223, | 23840 |
| | region | | U.S. Pat. No. 9,109,017, WO2008028946 SEQ ID | |
| | | | NO: 77 | |
| INFL344 | Heavy chain variable | CR6325 | US20090311265, U.S. Pat. No. 8,691,223, | 23841 |
| | region | | U.S. Pat. No. 9,109,017, WO2008028946 SEQ ID | |
| | | | NO: 79 | |
| INFL345 | Heavy chain variable | CR6331 | US20090311265, U.S. Pat. No. 8,691,223, | 23842 |
| | region | | U.S. Pat. No. 9,109,017, WO2008028946 SEQ ID | |
| | | | NO: 81 | |
| INFL346 | Heavy chain variable | CR6344 | US20090311265, U.S. Pat. No. 8,691,223, | 23843 |
| | region | | U.S. Pat. No. 9,109,017, WO2008028946 SEQ ID | |
| | | | NO: 83 | |
| INFL347 | Heavy chain variable | CR6141 | US20090311265, U.S. Pat. No. 8,691,223, | 23844 |
| | region | | U.S. Pat. No. 9,109,017, WO2008028946 SEQ ID | |
| | | | NO: 317 | |
| INFL348 | Heavy chain variable | CR6272 | US20090311265, U.S. Pat. No. 8,691,223, | 23845 |
| | region | | U.S. Pat. No. 9,109,017, WO2008028946 SEQ ID | |
| | | | NO: 321 | |
| INFL349 | Heavy chain variable | CR6296 | US20090311265, U.S. Pat. No. 8,691,223, | 23846 |
| | region | | U.S. Pat. No. 9,109,017, WO2008028946 SEQ ID | |
| | | | NO: 325 | |
| INFL350 | Heavy chain variable | CR6301 | US20090311265, U.S. Pat. No. 8,691,223, | 23847 |
| | region | | U.S. Pat. No. 9,109,017, WO2008028946 SEQ ID | |
| | | | NO: 329 | |
| INFL351 | Heavy chain variable | CR6327 | US20090311265, U.S. Pat. No. 8,691,223, | 23848 |
| | region | | U.S. Pat. No. 9,109,017, WO2008028946 SEQ ID | |
| | | | NO: 333 | |
| INFL352 | Heavy chain variable | CR6328 | US20090311265, U.S. Pat. No. 8,691,223, | 23849 |
| | region | | U.S. Pat. No. 9,109,017, WO2008028946 SEQ ID | |
| | | | NO: 337 | |
| INFL353 | Heavy chain variable | CR6329 | US20090311265, U.S. Pat. No. 8,691,223, | 23850 |
| | region | | U.S. Pat. No. 9,109,017, WO2008028946 SEQ ID | |
| | | | NO: 341 | |
| INFL354 | Heavy chain variable | CR6332 | US20090311265, U.S. Pat. No. 8,691,223, | 23851 |
| | region | | U.S. Pat. No. 9,109,017, WO2008028946 SEQ ID | |
| | | | NO: 345 | |
| INFL355 | Heavy chain variable | CR6334 | US20090311265, U.S. Pat. No. 8,691,223, | 23852 |
| | region | | U.S. Pat. No. 9,109,017, WO2008028946 SEQ ID | |
| | | | NO: 349 | |
| INFL356 | Heavy chain variable | CR6336 | US20090311265, U.S. Pat. No. 8,691,223, | 23853 |
| | region | | U.S. Pat. No. 9,109,017, WO2008028946 SEQ ID | |
| | | | NO: 353 | |
| INFL357 | Heavy chain variable | CR6339 | US20090311265, U.S. Pat. No. 8,691,223, | 23854 |
| | region | | U.S. Pat. No. 9,109,017, WO2008028946 SEQ ID | |
| | | | NO: 357 | |
| INFL358 | Heavy chain variable | CR6342 | US20090311265, U.S. Pat. No. 8,691,223, | 23855 |
| | region | | U.S. Pat. No. 9,109,017, WO2008028946 SEQ ID | |
| | | | NO: 361 | |
| INFL359 | Heavy chain variable | CR6343 | US20090311265, U.S. Pat. No. 8,691,223, | 23856 |
| | region | | U.S. Pat. No. 9,109,017, WO2008028946 SEQ ID | |
| | | | NO: 365 | |
| INFL360 | Heavy chain variable | CR9003 | US20140120113 SEQ ID NO: 2 | 23857 |
| | region | | | |
| INFL361 | Heavy chain variable | CR9004 | US20140120113 SEQ ID NO: 6 | 23858 |
| | region | | | |
| INFL362 | Heavy chain variable | CR9005 | US20140120113 SEQ ID NO: 10 | 23859 |
| | region | | | |
| INFL363 | Heavy chain variable | CR9006 | US20140120113 SEQ ID NO: 14 | 23860 |
| | region | | | |
| INFL364 | Heavy chain variable | CR9007 | US20140120113 SEQ ID NO: 18 | 23861 |
| | region | | | |
| INFL365 | Heavy chain variable | CR9008 | US20140120113 SEQ ID NO: 22 | 23862 |
| | region | | | |
| INFL366 | Heavy chain variable | CR9009 | US20140120113 SEQ ID NO: 26 | 23863 |
| | region | | | |
| INFL367 | Heavy chain variable | CR9010 | US20140120113 SEQ ID NO: 30 | 23864 |
| | region | | | |
| INFL368 | Heavy chain variable | CR9011 | US20140120113 SEQ ID NO: 34 | 23865 |
| | region | | | |
| INFL369 | Heavy chain variable | CR9012 | US20140120113 SEQ ID NO: 38 | 23866 |
| | region | | | |
| INFL370 | Heavy chain variable | CR9029 | US20140120113 SEQ ID NO: 42 | 23867 |
| | region | | | |
| INFL371 | Heavy chain variable | CR9030 | US20140120113 SEQ ID NO: 46 | 23868 |
| | region | | | |
| INFL372 | Heavy chain variable | CR9031 | US20140120113 SEQ ID NO: 50 | 23869 |
| | region | | | |
| INFL373 | Heavy chain variable | CR9112 | US20140120113 SEQ ID NO: 54 | 23870 |
| | region | | | |
| INFL374 | Heavy chain variable | CR9113 | US20140120113 SEQ ID NO: 58 | 23871 |
| | region | | | |
| INFL375 | Heavy chain variable | CR9114 | US20140120113 SEQ ID NO: 62 | 23872 |
| | region | | | |
| INFL376 | Heavy chain variable | CR8033 | U.S. Pat. No. 8,852,595 SEQ ID NO: 71 | 23873 |
| | region | | | |
| INFL377 | Heavy chain variable | CR8059 | U.S. Pat. No. 8,852,595 SEQ ID NO: 75 | 23874 |
| | region | | | |
| INFL378 | Heavy chain variable | CR8071 | U.S. Pat. No. 8,852,595 SEQ ID NO: 78 | 23875 |
| | region | | | |
| INFL379 | Heavy chain variable | CR10051 | U.S. Pat. No. 8,852,595 SEQ ID NO: 81 | 23876 |
| | region | | | |
| INFL380 | Heavy chain variable | CR10049 | U.S. Pat. No. 8,852,595 SEQ ID NO: 85 | 23877 |
| | region | | | |
| INFL381 | Heavy chain variable | CR10023 | U.S. Pat. No. 8,852,595 SEQ ID NO: 89 | 23878 |
| | region | | | |
| INFL382 | Heavy chain variable | CR10032 | U.S. Pat. No. 8,852,595 SEQ ID NO: 93 | 23879 |
| | region | | | |
| INFL383 | Heavy chain variable | CR11035 | U.S. Pat. No. 8,852,595 SEQ ID NO: 101 | 23880 |
| | region | | | |
| INFL384 | Heavy chain variable | CR11036 | U.S. Pat. No. 8,852,595 SEQ ID NO: 105 | 23881 |
| | region | | | |
| INFL385 | Heavy chain variable | CR11038 | U.S. Pat. No. 8,852,595 SEQ ID NO: 109 | 23882 |
| | region | | | |
| INFL386 | Heavy chain variable | CR11039 | U.S. Pat. No. 8,852,595 SEQ ID NO: 113 | 23883 |
| | region | | | |
| INFL387 | Heavy chain variable | CR8031 | U.S. Pat. No. 8,852,595 SEQ ID NO: 119 | 23884 |
| | region | | | |
| INFL388 | Heavy chain variable | CR8032 | U.S. Pat. No. 8,852,595 SEQ ID NO: 123 | 23885 |
| | region | | | |
| INFL389 | Heavy chain variable | CR8034 | U.S. Pat. No. 8,852,595 SEQ ID NO: 127 | 23886 |
| | region | | | |
| INFL390 | Heavy chain variable | CR8035 | U.S. Pat. No. 8,852,595 SEQ ID NO: 131 | 23887 |
| | region | | | |
| INFL391 | Heavy chain variable | | U.S. Pat. No. 8,992,929 SEQ ID NO: 4 | 23888 |
| | region | | | |
| INFL392 | Heavy chain variable | M2e | U.S. Pat. No. 8,420,794 SEQ ID NO: 2 | 23889 |
| | region | | | |
| INFL393 | Heavy chain variable | | U.S. Pat. No. 8,715,743, US20140275492 SEQ ID | 23890 |
| | region | | NO: 22 | |
| INFL394 | Heavy chain variable | | U.S. Pat. No. 8,715,743, US20140275492 SEQ ID | 23891 |
| | region | | NO: 25 | |
| INFL395 | Heavy chain variable | | U.S. Pat. No. 8,715,743, US20140275492 SEQ ID | 23892 |
| | region | | NO: 36 | |
| INFL396 | Heavy chain variable | 4A10 | Krause, J. C. et al. “Epitope-specific | 23893 |
| | region | | human influenza antibody repertoires | |
| | | | diversify by B cell intraclonal sequence | |
| | | | divergence and interclonal convergence” | |
| | | | J. Immunol. 187 (7), 3704-3711 (2011), | |
| | | | NCBI Accession #AEO16797 | |
| INFL397 | Heavy chain variable | anti-1918 influenza | Yu, X., et al., Neutralizing antibodies | 23894 |
| | region | HA Ig | derived front the B cells of 1918 | |
| | | | influenza pandemic survivors; Nature | |
| | | | 455 (7212), 532-536 (2008), NCBI | |
| | | | Accession #ACI04579.1 (129aa) | |
| INFL398 | Heavy chain variable | TCN-522 | US20150086555 SEQ ID NO: 33 | 23895 |
| | region | (3212_I12) | | |
| INFL399 | Heavy chain variable | TCN-521 | US20150086555 SEQ ID NO: 21 | 23896 |
| | region | (3280_D18) | | |
| INFL400 | Heavy chain variable | TCN-523 | US20150086555 SEQ ID NO: 45 | 23897 |
| | region | (5248_A17) | | |
| INFL401 | Heavy chain variable | TCN-563 | US20150086555 SEQ ID NO: 57 | 23898 |
| | region | (5237_B21) | | |
| INFL402 | Heavy chain variable | TCN-526 | US20150086555 SEQ ID NO: 69 | 23899 |
| | region | (5084_C17) | | |
| INFL403 | Heavy chain variable | TCN-527 | US20150086555 SEQ ID NO: 81 | 23900 |
| | region | (5086_C06) | | |
| INFL404 | Heavy chain variable | TCN-528 | US20150086555 SEQ ID NO: 93 | 23901 |
| | region | (5087_P17) | | |
| INFL405 | Heavy chain variable | TCN-529 | US20150086555 SEQ ID NO: 105 | 23902 |
| | region | (5297_H01) | | |
| INFL406 | Heavy chain variable | TCN-530 | US20150086555 SEQ ID NO: 117 | 23903 |
| | region | (5248_H10) | | |
| INFL407 | Heavy chain variable | TCN-531 | US20150086555 SEQ ID NO: 129 | 23904 |
| | region | (5091_H13) | | |
| INFL408 | Heavy chain variable | TCN-532 | US20150086555 SEQ ID NO: 141 | 23905 |
| | region | (5262_H18) | | |
| INFL409 | Heavy chain variable | TCN-533 | US20150086555 SEQ ID NO: 153 | 23906 |
| | region | (5256_A17a), | | |
| | | TCN-564 | | |
| | | (5256_A17b) | | |
| INFL410 | Heavy chain variable | TCN-534 | US20150086555 SEQ ID NO: 161 | 23907 |
| | region | (5249_B02) | | |
| INFL411 | Heavy chain variable | TCN-535 | US20150086555 SEQ ID NO: 173 | 23908 |
| | region | (5246_P19), | | |
| | | TCN-558 | | |
| | | (5248_H10b) | | |
| INFL412 | Heavy chain variable | TCN-536 | US20150086555 SEQ ID NO: 184 | 23909 |
| | region | (5095_N01) | | |
| INFL413 | Heavy chain variable | TCN-537 | US20150086555 SEQ ID NO: 195 | 23910 |
| | region | (3194_D21) | | |
| INFL414 | Heavy chain variable | TCN-538 | US20150086555 SEQ ID NO: 207 | 23911 |
| | region | (3206_O17) | | |
| INFL415 | Heavy chain variable | TCN-539 | US20150086555 SEQ ID NO: 219 | 23912 |
| | region | (5056_A08) | | |
| INFL416 | Heavy chain variable | TCN-540 | US20150086555 SEQ ID NO: 231 | 23913 |
| | region | (5060_F05) | | |
| INFL417 | Heavy chain variable | TCN-541 | US20150086555 SEQ ID NO: 243 | 23914 |
| | region | (5062_M11) | | |
| INFL418 | Heavy chain variable | TCN-542 | US20150086555 SEQ ID NO: 255 | 23915 |
| | region | (5079_A16) | | |
| INFL419 | Heavy chain variable | TCN-543 | US20150086555 SEQ ID NO: 267 | 23916 |
| | region | (5081_G23) | | |
| INFL420 | Heavy chain variable | TCN-544 | US20150086555 SEQ ID NO: 279 | 23917 |
| | region | (5082_A19) | | |
| INFL421 | Heavy chain variable | TCN-545 | US20150086555 SEQ ID NO: 291 | 23918 |
| | region | (5082_I15) | | |
| INFL422 | Heavy chain variable | TCN-546 | US20150086555 SEQ ID NO: 302 | 23919 |
| | region | (5089_L08) | | |
| INFL423 | Heavy chain variable | TCN-547 | US20150086555 SEQ ID NO: 313 | 23920 |
| | region | (5092_F11) | | |
| INFL424 | Heavy chain variable | TCN-548 | US20150086555 SEQ ID NO: 325 | 23921 |
| | region | (5092_P01) | | |
| INFL425 | Heavy chain variable | TCN-549 | US20150086555 SEQ ID NO: 335 | 23922 |
| | region | (5092_P04) | | |
| INFL426 | Heavy chain variable | TCN-550 | US20150086555 SEQ ID NO: 346 | 23923 |
| | region | (5096_F06) | | |
| INFL427 | Heavy chain variable | TCN-551 | US20150086555 SEQ ID NO: 358 | 23924 |
| | region | (5243_D01) | | |
| INFL428 | Heavy chain variable | TCN-552 | US20150086555 SEQ ID NO: 370 | 23925 |
| | region | (5249_I23) | | |
| INFL429 | Heavy chain variable | TCN-553 | US20150086555 SEQ ID NO: 382 | 23926 |
| | region | (5261_C18) | | |
| INFL430 | Heavy chain variable | TCN-554 | US20150086555 SEQ ID NO: 392 | 23927 |
| | region | (5277_M05) | | |
| INFL431 | Heavy chain variable | TCN-555 | US20150086555 SEQ ID NO: 403 | 23928 |
| | region | (5246_L16) | | |
| INFL432 | Heavy chain variable | TCN-556 | US20150086555 SEQ ID NO: 408 | 23929 |
| | region | (5089_K12) | | |
| INFL433 | Heavy chain variable | TCN-557 | US20150086555 SEQ ID NO: 420 | 23930 |
| | region | (5081_A04) | | |
| INFL434 | Heavy chain variable | TCN-559 | US20150086555 SEQ ID NO: 434 | 23931 |
| | region | (5097_G08) | | |
| INFL435 | Heavy chain variable | TCN-560 | US20150086555 SEQ ID NO: 446 | 23932 |
| | region | (5084_P10) | | |
| INFL436 | Heavy chain variable | TCN-504 | US20150086555 SEQ ID NO: 510 | 23933 |
| | region | (3251_K17) | | |
| INFL437 | Heavy chain variable | AB1 | US20120093834, WO2009121004 SEQ | 23934 |
| | region | | ID NO: 4 | |
| INFL438 | Heavy chain variable | AB2 | US20120093834, WO2009121004 SEQ | 23935 |
| | region | | ID NO: 45 | |
| INFL439 | Heavy chain variable | AB3 | US20120093834, WO2009121004 SEQ | 23936 |
| | region | | ID NO: 9 | |
| INFL440 | Heavy chain variable | AB4, AB5, AB6 | US20120093834, WO2009121004 SEQ | 23937 |
| | region | | ID NO: 61 | |
| INFL441 | Heavy chain variable | VN04-2 | WO2008033105 SEQ ID NO: 5 | 23938 |
| | region | | | |
| INFL442 | Heavy chain variable | VN04-3 | WO2008033105 SEQ ID NO: 7 | 23939 |
| | region | | | |
| INFL443 | Heavy chain variable | 1286-C05 | WO2010132604, US20120128671 SEQ | 23940 |
| | region | | ID NO: 1 | |
| INFL444 | Heavy chain variable | 1286-A11 | WO2010132604, US20120128671 SEQ | 23941 |
| | region | | ID NO: 2 | |
| INFL445 | Heavy chain variable | CR8001 | WO2010130636 SEQ ID NO: 2 | 23942 |
| | region | | | |
| INFL446 | Heavy chain variable | CR8003 | WO2010130636 SEQ ID NO: 6 | 23943 |
| | region | | | |
| INFL447 | Heavy chain variable | CR8015 | WO2010130636 SEQ ID NO: 10 | 23944 |
| | region | | | |
| INFL448 | Heavy chain variable | CR8016 | WO2010130636 SEQ ID NO: 14 | 23945 |
| | region | | | |
| INFL449 | Heavy chain variable | CR8017 | WO2010130636 SEQ ID NO: 18 | 23946 |
| | region | | | |
| INFL450 | Heavy chain variable | CR8018 | WO2010130636 SEQ ID NO: 22 | 23947 |
| | region | | | |
| INFL451 | Heavy chain variable | anti-1918 influenza | Yu, X., et al., Neutralizing antibodies | 23948 |
| | region (Partial) | HA Ig | derived from the B cells of 1918 | |
| | | | influenza pandemic survivors; Nature | |
| | | | 455 (7212), 532-536 (2008), NCBI | 23949 |
| | | | Accession #ACI04581.1 (145aa) | |
| INFL452 | Heavy chain variable | 1A2 | WO2015028478 SEQ ID NO: 2 | 23950 |
| | region mouse IgG | | | |
| INFL453 | Heavy chain variable | 7B8 | WO2015028478 SEQ ID NO: 4 | 23951 |
| | region mouse IgG | | | |
| INFL454 | Heavy chain variable | monoclonal | Grandea, A. G. et al., Human antibodies | 23952 |
| | region, partial | antibody TCN-031 | reveal a protective epitope that is highly | |
| | | | conserved among human and nonhuman | |
| | | | influenza A viruses; Proc. Natl. Acad. | |
| | | | Sci. U.S.A. 107 (28), 12658-12663 | |
| | | | (2010), NCBI Accession #ADK23854.1 | |
| | | | (120aa) | |
| INFL455 | Heavy chain variable | monoclonal | Grandea, A. G. et al., Human, antibodies | 23953 |
| | region, partial | antibody TCN-032 | reveal a protective epitope that is highly | |
| | | | conserved among human and nonhuman | |
| | | | influenza A viruses; Proc. Natl. Acad. | |
| | | | Sci. U.S.A. 107 (28), 12658-12663 | |
| | | | (2010), NCBI Accession #ADK23853.1 | |
| | | | (120aa) | |
| INFL456 | Heavy chain variable | monoclonal | Grandea, A. G. et al., Human antibodies | 23954 |
| | region, partial | antibody 3362_B11 | reveal a protective epitope that is highly | |
| | | | conserved among human and nonhuman | |
| | | | influenza A viruses; Proc. Natl. Acad. | |
| | | | Sci. U.S.A. 107 (28), 12658-12663 | |
| | | | (2010), NCBI Accession #ADK23869.1 | |
| | | | (123aa) | |
| INFL457 | Heavy chain variable | monoclonal | Grandea, A. G. et al., Human antibodies | 23955 |
| | region, partial | antibody | reveal a protective epitope that is highly | |
| | | 3260_D19 | conserved among human and nonhuman | |
| | | | influenza A viruses; Proc. Natl. Acad. | |
| | | | Sci. U.S.A. 107 (28), 12658-12663 | |
| | | | (2010), NCBI Accession #ADK23868.1 | |
| | | | (118aa) | |
| INFL458 | Heavy chain variable | monoclonal | Grandea, A. G. et al., Human antibodies | 23956 |
| | region, partial | antibody 3253_P10 | reveal a protective epitope that is highly | |
| | | | conserved among human and nonhuman | |
| | | | influenza A viruses; Proc. Natl. Acad. | |
| | | | Sci. U.S.A. 107 (28), 12658-12663 | |
| | | | (2010), NCBI Accession #ADK23867.1 | |
| | | | (121aa) | |
| INFL459 | Heavy chain variable | monoclonal | Grandea, A. G. et al., Human antibodies | 23957 |
| | region, partial | antibody 3248_P18 | reveal a protective epitope that is highly | |
| | | | conserved among human and nonhuman | |
| | | | influenza A viruses; Proc. Natl. Acad. | |
| | | | Sci. U.S.A. 107 (28), 12658-12663 | |
| | | | (2010), NCBI Accession #ADK23866.1 | |
| | | | (120aa) | |
| INFL460 | Heavy chain variable | monoclonal | Grandea, A. G. et al., Human antibodies | 23958 |
| | region, partial | antibody 3139_P23 | reveal a protective epitope that is highly | |
| | | | conserved among human and nonhuman | |
| | | | influenza A viruses; Proc. Natl. Acad. | |
| | | | Sci. U.S.A. 107 (28), 12658-12663 | |
| | | | (2010), NCBI Accession #ADK23865.1 | |
| | | | (119aa) | |
| INFL461 | Heavy chain variable | monoclonal | Grandea, A. G. et al., Human antibodies | 23959 |
| | region, partial | antibody 3420_I23 | reveal a protective epitope that is highly | |
| | | | conserved among human and nonhuman | |
| | | | influenza A viruses; Proc. Natl. Acad. | |
| | | | Sci. U.S.A. 107 (28), 12658-12663 | |
| | | | (2010), NCBI Accession #ADK23864.1 | 23960 |
| | | | (121aa) | |
| INFL462 | Heavy chain variable | monoclonal | Grandea, A. G. et al., Human antibodies | 23961 |
| | region, partial | antibody 3255_J06 | reveal a protective epitope that is highly | |
| | | | conserved among human and nonhuman | |
| | | | influenza A viruses; Proc. Natl. Acad. | |
| | | | Sci. U.S.A. 107 (28), 12658-12663 | |
| | | | (2010), NCBI Accession #ADK23863.1 | |
| | | | (119aa) | |
| INFL463 | Heavy chain variable | monoclonal | Grandea, A. G. et al., Human antibodies | 23962 |
| | region, partial | antibody 3252_C13 | reveal a protective epitope that is highly | |
| | | | conserved among human and nonhuman | |
| | | | influenza A viruses; Proc. Natl. Acad. | |
| | | | Sci. U.S.A. 107 (28), 12658-12663 | |
| | | | (2010), NCBI Accession # ADK23862.1 | |
| | | | (119aa) | |
| INFL464 | Heavy chain variable | monoclonal | Grandea, A. G. et al., Human antibodies | 23963 |
| | region, partial | antibody | reveal a protective epitope that is highly | |
| | | 3136_G05 | conserved among human and nonhuman | |
| | | | influenza A viruses; Proc. Natl. Acad. | |
| | | | Sci. U.S.A. 107 (28), 12658-12663 | |
| | | | (2010), NCBI Accession #ADK23861.1 | |
| | | | (120aa) | |
| INFL465 | Heavy chain variable | monoclonal | Grandea, A. G. et al., Human antibodies | 23964 |
| | region, partial | antibody | reveal a protective epitope that is highly | |
| | | 3244_H04 | conserved among human and nonhuman | |
| | | | influenza A viruses; Proc. Natl. Acad. | |
| | | | Sci. U.S.A. 107 (28), 12658-12663 | |
| | | | (2010), NCBI Accession #ADK23860.1 | |
| | | | (118aa) | |
| INFL466 | Heavy chain variable | monoclonal | Grandea, A. G. et al., Human antibodies | 23965 |
| | region, partial | antibody | reveal a protective epitope that is highly | |
| | | 3245_O19 | conserved among human and nonhuman | |
| | | | influenza A viruses; Proc. Natl. Acad. | |
| | | | Sci. U.S.A. 107 (28), 12658-12663 | |
| | | | (2010), NCBI Accession #ADK23859.1 | |
| | | | (118aa) | |
| INFL467 | Heavy chain variable | monoclonal | Grandea, A. G. et al., Human antibodies | 23966 |
| | region, partial | antibody 3259_J21 | reveal a protective epitope that is highly | |
| | | | conserved among human and nonhuman | |
| | | | influenza A viruses; Proc. Natl. Acad. | |
| | | | Sci. U.S.A. 107 (28), 12658-12663 | |
| | | | (2010), NCBI Accession #ADK23858.1 | |
| | | | (120aa) | |
| INFL468 | Heavy chain variable | monoclonal | Grandea, A. G. et al., Human antibodies | 23967 |
| | region, partial | antibody 3243_J07 | reveal a protective epitope that is highly | |
| | | | conserved among human and nonhuman | |
| | | | influenza A viruses; Proc. Natl. Acad. | |
| | | | Sci. U.S.A. 107 (28), 12658-12663 | |
| | | | (2010), NCBI Accession #ADK23857.1 | |
| | | | (121aa) | |
| INFL469 | Heavy chain variable | monoclonal | Grandea, A. G. et al., Human antibodies | 23968 |
| | region, partial | antibody 3244_I10 | reveal a protective epitope that is highly | |
| | | | conserved among human and nonhuman | |
| | | | influenza A viruses; Proc. Natl. Acad. | |
| | | | Sci. U.S.A. 107 (28), 12658-12663 | |
| | | | (2010), NCBI Accession # ADK23856.1 | |
| | | | (121aa) | |
| INFL470 | Heavy chain variable | monoclonal | Grandea, A. G. et al., Human antibodies | 23969 |
| | region, partial | antibody | reveal a protective epitope that is highly | |
| | | 3241_G23 | conserved among human and nonhuman | |
| | | | influenza A viruses; Proc. Natl. Acad. | |
| | | | Sci. U.S.A. 107 (28), 12658-12663 | |
| | | | (2010), NCBI Accession #ADK23855.1 | |
| | | | (122aa) | |
| INFL471 | Heavy chain variable | Monoclonal | Yasugi, M. et al., Emerging Antigenic | 23970 |
| | region, partial | antibody clone 5E4 | Variants at the Antigenic Site Sb in | |
| | | | Pandemic A(H1N1)2009 Influenza Virus | |
| | | | in Japan Detected by a Human | |
| | | | Monoclonal Antibody; PLoS ONE 8 | |
| | | | (10), E77892 (2013), NCBI Accession | |
| | | | #BAM76754.1 (141aa) | |
| INFL472 | Heavy chain variable | 100F4-HV | Hu, H., et al., A Human Antibody | 23971 |
| | region, partial | | Recognizing a Conserved Epitope of H5 | |
| | | | Hemagglutinin Broadly Neutralizes | |
| | | | Highly Pathogenic Avian Influenza | |
| | | | H5N1 Viruses; J. Virol. 86 (6), 2978- | |
| | | | 2989 (2012), NCBI Accession | |
| | | | #AEL30603.1 (121aa) | |
| INFL473 | Heavy chain variable | anti-stem HA | Pappas, L. et al., Rapid development of | 23972 |
| | region, partial, Anti- | immunoglobulin | broadly influenza neutralizing antibodies | |
| | stem HA | | through redundant mutations; Nature | |
| | immunoglobulin | | (2014), NCBI Accession #AIN40460.1 | |
| | | | (120aa) | |
| INFL474 | Heavy chain variable | anti-stem HA | Pappas, L. et al., Rapid development of | 23973 |
| | region, partial, Anti- | immunoglobulin | broadly influenza neutralizing antibodies | |
| | stem HA | | through redundant mutations; Nature | |
| | immunoglobulin | | (2014), NCBI Accession #AIN40459.1 | |
| | | | (127aa) | |
| INFL475 | Heavy chain variable | anti-stem HA | Pappas, L. et al., Rapid development of | 23974 |
| | region, partial, Anti- | immunoglobulin | broadly influenza neutralizing antibodies | |
| | stem HA | | through redundant mutations; Nature | |
| | immunoglobulin | | (2014), NCBI Accession #AIN40458.1 | |
| | | | (129aa) | |
| INFL476 | Heavy chain variable | anti-stem HA | Pappas, L. et al., Rapid development of | 23975 |
| | region, partial, Anti- | immunoglobulin | broadly influenza neutralizing antibodies | |
| | stem HA | | through redundant mutations; Nature | |
| | immunoglobulin | | (2014), NCBI Accession #AIN40457.1 | |
| | | | (132aa) | |
| INFL477 | Heavy chain variable | anti-stem HA | Pappas, L. et al., Rapid development of | 23976 |
| | region, partial, Anti- | immunoglobulin | broadly influenza neutralizing antibodies | |
| | stem HA | | through redundant mutations; Nature | |
| | immunoglobulin | | (2014), NCBI Accession #AIN40456.1 | |
| | | | (127aa) | |
| INFL478 | Heavy chain variable | anti-stem HA | Pappas, L. et al., Rapid development of | 23977 |
| | region, partial, Anti- | immunoglobulin | broadly influenza neutralizing antibodies | |
| | stem HA | | through redundant mutations; Nature | |
| | immunoglobulin | | (2014), NCBI Accession #AIN40455.1 | |
| | | | (121aa) | |
| INFL479 | Heavy chain variable | anti-stem HA | Pappas, L. et al., Rapid development of | 23978 |
| | region, partial, Anti- | immunoglobulin | broadly influenza neutralizing antibodies | |
| | stem HA | | through redundant mutations; Nature | |
| | immunoglobulin | | (2014), NCBI Accession #AIN40454.1 | |
| | | | (126aa) | |
| INFL480 | Heavy chain variable | anti-stem HA | Pappas, L. et al., Rapid development of | 23979 |
| | region, partial, Anti- | immunoglobulin | broadly influenza neutralizing antibodies | |
| | stem HA | | through redundant mutations; Nature | |
| | immunoglobulin | | (2014), NCBI Accession #AIN40453.1 | 23980 |
| | | | (120aa) | |
| INFL481 | Heavy chain variable | anti-stem HA | Pappas, L. et al., Rapid development of | 23981 |
| | region, partial, Anti- | immunoglobulin | broadly influenza neutralizing antibodies | |
| | stem HA | | through redundant mutations; Nature | |
| | immunoglobulin | | (2014), NCBI Accession #AIN40452.1 | |
| | | | (122aa) | |
| INFL482 | Heavy chain variable | anti-stem HA | Pappas, L. et al., Rapid development of | 23982 |
| | region, partial, Anti- | immunoglobulin | broadly influenza neutralizing antibodies | |
| | stem HA | | through redundant mutations; Nature | |
| | immunoglobulin | | (2014), NCBI Accession #AIN40451.1 | |
| | | | (125aa) | |
| INFL483 | Heavy chain variable | anti-stem HA | Pappas, L. et al., Rapid development of | 23983 |
| | region, partial, Anti- | immunoglobulin | broadly influenza neutralizing antibodies | |
| | stem HA | | through redundant mutations; Nature | |
| | immunoglobulin | | (2014), NCBI Accession #AIN40450.1 | |
| | | | (126aa) | |
| INFL484 | Heavy chain variable | anti-stem HA | Pappas, L. et al., Rapid development of | 23984 |
| | region, partial, Anti- | immunoglobulin | broadly influenza neutralizing antibodies | |
| | stem HA | | through redundant mutations; Nature | |
| | immunoglobulin | | (2014), NCBI Accession #AIN40449.1 | |
| | | | (129aa) | |
| INFL485 | Heavy chain variable | anti-stem HA | Pappas, L. et al., Rapid development of | 23985 |
| | region, partial, Anti- | immunoglobulin | broadly influenza neutralizing antibodies | |
| | stem HA | | through redundant mutations; Nature | |
| | immunoglobulin | | (2014), NCBI Accession #AIN40448.1 | |
| | | | (119aa) | |
| INFL486 | Heavy chain variable | anti-stem HA | Pappas, L. et al., Rapid development of | 23986 |
| | region, partial, Anti- | immunoglobulin | broadly influenza neutralizing antibodies | |
| | stem HA | | through redundant mutations; Nature | |
| | immunoglobulin | | (2014), NCBI Accession #AIN40447.1 | |
| | | | (120aa) | |
| INFL487 | Heavy chain variable | anti-stem HA | Pappas, L. et al., Rapid development of | 23987 |
| | region, partial, Anti- | immunoglobulin | broadly influenza neutralizing antibodies | |
| | stem HA | | through redundant mutations; Nature | |
| | immunoglobulin | | (2014), NCBI Accession #AIN40446.1 | |
| | | | (120aa) | |
| INFL488 | Heavy chain, Human | Fab 39.29 | Nakamura, G. et al., An in vivo human- | 23988 |
| | igg, | | plasmablast enrichment technique allows | |
| | | | rapid identification of therapeutic | |
| | | | influenza a antibodies; Cell Host | |
| | | | Microbe 14 (1), 93-103 (2013), NCBI | |
| | | | Accession #4KVN_H (227aa) | |
| INFL489 | Heavy chain, Igg1 | Fab H5m9 | Zhu, X., et al., A Unique and Conserved | 23989 |
| | | | Neutralization Epitope in H5N1 | |
| | | | Influenza Viruses Identified by an | |
| | | | Antibody against the | |
| | | | A/Goose/Guangdong/1/96 | |
| | | | Hemagglutinin; J. Virol. 87 (23), 12619- | |
| | | | 12635 (2013), NCBI Accession | |
| | | | #4MHH_H (222aa) | |
| INFL490 | Immunoglobulin | T2-6A | Huang, K.-Y. A., et al., Focused antibody- | 23990 |
| | heavy chain variable | | response to influenza linked to antigenic | |
| | region, partial | | drift; J. Clin. Invest. (2015), NCBI | |
| | | | Accession #AKF02484.1 (124aa) | |
| INFL491 | Kappa light chain | | U.S. Pat. No. 8,992,929 SEQ ID NO. 24 | 23991 |
| | constant region, | | | |
| | human | | | |
| INFL492 | Kappa light chain | 8D4 | NCBI Accession #AFI57037 | 23992 |
| | variable | | | |
| INFL493 | Kappa light chain | 5B6 | NCBI Accession #AFI57041 | 23993 |
| | variable | | | |
| INFL494 | Kappa light chain | 8i10 | U.S. Pat. No. 8,858,948 SEQ ID NO: 56 | 23994 |
| | variable region | | | |
| INFL495 | Kappa light chain | 23K12 | U.S. Pat. No. 8,858,948 SEQ ID NO: 91 | 23995 |
| | variable region | | | |
| INFL496 | Kappa light chain | 4K8 | Krause, J. C. et al. “Epitope-specific | 23996 |
| | variable region | | human influenza antibody repertoires | |
| | | | diversify by B cell intraclonal sequence | |
| | | | divergence and interclonal convergence” | |
| | | | J. Immunol. 187 (7), 3704-3711 (2011), | |
| | | | NCBI Accession #AEO16800 | |
| INFL497 | Kappa light chain | 6D9 | Krause, J. C. et al. “Epitope-specific | 23997 |
| | variable region | | human influenza antibody repertoires | |
| | | | diversify by B cell intraclonal sequence | |
| | | | divergence and interclonal convergence” | |
| | | | J. Immunol. 187 (7), 3704-3711 (2011), | |
| | | | NCBI Accession #AEO16802 | |
| INFL498 | Kappa light chain | 8G9 | U.S. Pat. No. 8,603,467 SEQ ID NO: 4 | 23998 |
| | variable region | | | |
| INFL499 | Kappa light chain | 13D4 | U.S. Pat. No. 8,603,467 SEQ ID NO: 8 | 23999 |
| | variable region | | | |
| INFL500 | Kappa light chain | 20A11 | U.S. Pat. No. 8,603,467 SEQ ID NO: 12 | 24000 |
| | variable region | | | |
| INFL501 | Kappa light chain | EM4C04 | US20120282273 SEQ ID NO: 1 | 24001 |
| | variable region | | | |
| INFL502 | Kappa, light chain | Fab H5m9 | Zhu, X., et al., A Unique and Conserved | 24002 |
| | | | Neutralization Epitope in H5N1 | |
| | | | Influenza Viruses Identified by an | |
| | | | Antibody against the | |
| | | | A/Goose/Guangdong/1/96 | |
| | | | Hemagglutinin; J. Virol. 87 (23), 12619- | |
| | | | 12635 (2013), NCBI Accession # | |
| | | | 4MHH_L(218aa) | |
| INFL503 | Lambda light chain | 7A13 | Krause et al. “Human Monoclonal | 24003 |
| | | | Antibodies to Pandemic 1957 H2N2 and | |
| | | | Pandemic 1968 H3N2 Influenza Viruses” | |
| | | | J. Virol. 86 (11), 6334-6340 (2012), | |
| | | | NCBI Accession #AFH78448 | |
| INFL504 | Lambda light chain | 2K11 | Krause, J. C. et al. “Epitope-specific | 24004 |
| | variable | | human influenza antibody repertoires | |
| | | | diversify by B cell intraclonal sequence | |
| | | | divergence and interclonal convergence” | |
| | | | J. Immunol. 187 (7), 3704-3711 (2011), | |
| | | | NCBI Accession #AEO16794 | |
| INFL505 | Lambda light chain | 2O10 | Krause, J. C. et al. “Epitope-specific | 24005 |
| | variable | | human influenza antibody repertoires | |
| | | | diversify by B cell intraclonal sequence | |
| | | | divergence and interclonal convergence” | |
| | | | J. Immunol. 187 (7), 3704-3711 (2011), | |
| | | | NCBI Accession #AEO16796 | |
| INFL506 | Lambda light chain | Monoclonal | Yasugi, M. et al., Emerging Antigenic | 24006 |
| | variable region, | antibody clone 5E4 | Variants at the Antigenic Site Sb in | |
| | partial | | Pandemic A(H1N1)2009 Influenza Virus | |
| | | | in Japan Detected by a Human | |
| | | | Monoclonal Antibody; PLoS ONE 8 | |
| | | | (10), E77892 (2013), NCBI Accession | |
| | | | #BAM76755.1 (126aa) | |
| INFL507 | Lambda light chain | T2-6A | Huang, K.-Y. A., et al., Focused antibody | 24007 |
| | variable region, | | response to influenza linked to antigenic | |
| | partial, | | drift; J. Clin. Invest. (2015), NCBI | 24008 |
| | Immunoglobulin | | Accession #AKF02488.1 (113aa) | |
| INFL508 | Light chain | CR6261, | WO2008028946 | 24009 |
| | | Diridavumab, CR- | | |
| | | 6261 | | |
| INFL509 | Light chain | Firivumab, CT-P22 | US20130004505 | 24010 |
| INFL510 | Light chain | Navivumab, | WO2013048153, US20140234336 SEQ | 24011 |
| | | CT149 | ID NO: 39 | |
| INFL511 | Light chain | AT10-004 | US20150010566, WO2013081463 SEQ | 24012 |
| | | | ID NO: 36 | |
| INFL512 | Light chain | AT10-003 | US20150010566, WO2013081463 SEQ | 24013 |
| | | | ID NO: 37 | |
| INFL513 | Light chain | AT10-002 | US20150010566, WO2013081463 SEQ | 24014 |
| | | | ID NO: 38 | |
| INFL514 | Light chain | AT10-001 | US20150010566, WO2013081463 SEQ | 24015 |
| | | | ID NO: 39 | |
| INFL515 | Light chain | AT10-005 | US20150010566, WO2013081463 SEQ | 24016 |
| | | | ID NO: 40 | |
| INFL516 | Light chain | CT104 | WO2011111966, US20130004505 SEQ | 24017 |
| | | | ID NO: 36 | |
| INFL517 | Light chain | CT120 | WO2011111966, US20130004505 SEQ | 24018 |
| | | | ID NO: 40 | |
| INFL518 | Light chain | CT123 | WO2011111966, US20130004505 SEQ | 24019 |
| | | | ID NO: 44 | |
| INFL519 | Light chain | 2A | US20140011982 SEQ ID NO: 4 | 24020 |
| INFL520 | Light chain | F005-126 | WO2014049520, US20140086927 SEQ | 24021 |
| | | | ID NO: 13 | |
| INFL521 | Light chain | BF1-1 | WO2008156763 SEQ ID NO: 8 | 24022 |
| INFL522 | Light chain | BF1-19 | WO2008156763 SEQ ID NO: 12 | 24023 |
| INFL523 | Light chain | BF1-10 | WO2008156763 SEQ ID NO: 10 | 24024 |
| INFL524 | Light chain | 2D1 | WO2010127252, U.S. Pat. No. 8,894,997 SEQ ID | 24025 |
| | | | NO: 8 | |
| INFL525 | Light chain | 1F1 | WO2010127252, U.S. Pat. No. 8,894,997 SEQ ID | 24026 |
| | | | NO: 2 | |
| INFL526 | Light chain | 4D20 | WO2010127252, U.S. Pat. No. 8,894,997 SEQ ID | 24027 |
| | | | NO: 10 | |
| INFL527 | Light chain | A18 | WO13170139 SEQ ID NO: 95 | 24028 |
| INFL528 | Light chain | Ab A18 | U.S. Pat. No. 7,788,200 SEQ ID NO: 28 | 24029 |
| INFL529 | Light chain | Ab 067 | U.S. Pat. No. 7,788,200 SEQ ID NO: 153 | 24030 |
| INFL530 | Light chain | Ab 068 | U.S. Pat. No. 7,788,200 SEQ ID NO: 154 | 24031 |
| INFL531 | Light chain | Ab 069, Ab 079 | U.S. Pat. No. 7,788,200 SEQ ID NO: 155 | 24032 |
| INFL532 | Light chain | Ab 070 | U.S. Pat. No. 7,788,200 SEQ ID NO: 156 | 24033 |
| INFL533 | Light chain | Ab 073 | U.S. Pat. No. 7,788,200 SEQ ID NO: 165 | 24034 |
| INFL534 | Light chain | Ab 074, Ab 080 | U.S. Pat. No. 7,788,200 SEQ ID NO: 166 | 24035 |
| INFL535 | Light chain | Ab 075 | U.S. Pat. No. 7,788,200 SEQ ID NO: 167 | 24036 |
| INFL536 | Light chain | Ab 076 | U.S. Pat. No. 7,788,200 SEQ ID NO: 168 | 24037 |
| INFL537 | Light chain | Ab 077, Ab 081 | U.S. Pat. No. 7,788,200 SEQ ID NO: 169 | 24038 |
| INFL538 | Light chain | Ab 014, Ab 154, | U.S. Pat. No. 7,788,200 SEQ ID NO: 29 | 24039 |
| | | Ab 157 | | |
| INFL539 | Light chain | Ab 028, Ab 155 | U.S. Pat. No. 7,788,200 SEQ ID NO: 30 | 24040 |
| INFL540 | Light chain | Ab 001, Ab 002, | U.S. Pat. No. 7,788,200 SEQ ID NO: 31 | 24041 |
| | | Ab 003 | | |
| INFL541 | Light chain | Ab 009, Ab 010, | U.S. Pat. No. 7,788,200 SEQ ID NO: 32 | 24042 |
| | | Ab 011 | | |
| INFL542 | Light chain | Ab 017, Ab B18, | U.S. Pat. No. 7,788,200 SEQ ID NO: 33 | 24043 |
| | | Ab B18, Ab 019, | | |
| | | Ab 019 | | |
| INFL543 | Light chain | Ab 025, Ab 026, | U.S. Pat. No. 7,788,200 SEQ ID NO: 34 | 24044 |
| | | Ab 027, Ab 028 | | |
| INFL544 | Light chain | Ab 159 | U.S. Pat. No. 7,788,200 SEQ ID NO: 35 | 24045 |
| INFL545 | Light chain | Ab 160 | U.S. Pat. No. 7,788,200 SEQ ID NO: 36 | 24046 |
| INFL546 | Light chain | Ab 186, Ab 194 | U.S. Pat. No. 7,788,200 SEQ ID NO: 37 | 24047 |
| INFL547 | Light chain | Ab 187, Ab 195 | U.S. Pat. No. 7,788,200 SEQ ID NO: 38 | 24048 |
| INFL548 | Light chain | Ab 188, Ab 196 | U.S. Pat. No. 7,788,200 SEQ ID NO: 39 | 24049 |
| INFL549 | Light chain | Ab 189, Ab 197 | U.S. Pat. No. 7,788,200 SEQ ID NO: 40 | 24050 |
| INFL550 | Light chain | Ab 190, Ab 198 | U.S. Pat. No. 7,788,200 SEQ ID NO: 41 | 24051 |
| INFL551 | Light chain | Ab 191, Ab 199 | U.S. Pat. No. 7,788,200 SEQ ID NO: 42 | 24052 |
| INFL552 | Light chain | Ab 192, Ab 200 | U.S. Pat. No. 7,788,200 SEQ ID NO: 43 | 24053 |
| INFL553 | Light chain | Ab 193 | U.S. Pat. No. 7,788,200 SEQ ID NO: 44 | 24054 |
| INFL554 | Light chain | Ab 202, Ab 203, | U.S. Pat. No. 7,788,200 SEQ ID NO: 45 | 24055 |
| | | Ab 204, Ab 210, | | |
| | | Ab 031, Ab 032, | | |
| | | Ab 033, Ab 034 | | |
| INFL555 | Light chain | Ab 211, Ab 212, | U.S. Pat. No. 7,788,200 SEQ ID NO: 46 | 24056 |
| | | Ab 213, Ab 219, | | |
| | | Ab 037, Ab 038, | | |
| | | Ab 039, Ab 040 | | |
| INFL556 | Light chain | Ab A001, Ab 004, | U.S. Pat. No. 7,788,200 SEQ ID NO: 47 | 24057 |
| | | Ab 007, Ab 016 | | |
| INFL557 | Light chain | Ab A002, Ab 005, | U.S. Pat. No. 7,788,200 SEQ ID NO: 48 | 24058 |
| | | Ab 008, Ab A017 | | |
| INFL558 | Light chain | Ab A003, Ab 006, | U.S. Pat. No. 7,788,200 SEQ ID NO: 49 | 24059 |
| | | Ab A009, Ab C18 | | |
| INFL559 | Light chain | Ab A010, Ab 012, | U.S. Pat. No. 7,788,200 SEQ ID NO: 50 | 24060 |
| | | Ab A14, Ab A019 | | |
| INFL560 | Light chain | Ab A011, Ab | U.S. Pat. No. 7,788,200 SEQ ID NO: 51 | 24061 |
| | | 013m Ab 0135 | | |
| INFL561 | Light chain | Ab 044, Ab 071, | U.S. Pat. No. 7,788,200 SEQ ID NO: 52 | 24062 |
| | | Ab 072, Ab 078 | | |
| INFL562 | Light chain | Ab 051 | U.S. Pat. No. 7,788,200 SEQ ID NO: 53 | 24063 |
| INFL563 | Light chain | Ab 049 | U.S. Pat. No. 7,788,200 SEQ ID NO: 54 | 24064 |
| INFL564 | Light chain | Ab 047 | U.S. Pat. No. 7,788,200 SEQ ID NO: 55 | 24065 |
| INFL565 | Light chain | Ab 050 | U.S. Pat. No. 7,788,200 SEQ ID NO: 56 | 24066 |
| INFL566 | Light chain | Ab 045 | U.S. Pat. No. 7,788,200 SEQ ID NO: 57 | 24067 |
| INFL567 | Light chain | Ab 048 | U.S. Pat. No. 7,788,200 SEQ ID NO: 58 | 24068 |
| INFL568 | Light chain | Ab 046 | U.S. Pat. No. 7,788,200 SEQ ID NO: 59 | 24069 |
| INFL569 | Light chain | Ab 043 | U.S. Pat. No. 7,788,200 SEQ ID NO: 60 | 24070 |
| INFL570 | Light chain | Ab 052 | U.S. Pat. No. 7,788,200 SEQ ID NO: 61 | 24071 |
| INFL571 | Light chain | F005-126 | WO2014049520 SEQ ID 13 | 24072 |
| INFL572 | Light chain | 8f24 | WO2012045001 SEQ ID 3 | 24073 |
| INFL573 | Light chain | 3E22 | WO2012045001 SEQ ID 7 | 24074 |
| INFL574 | Light chain | 5117 | WO2012045001 SEQ ID 11 | 24075 |
| INFL575 | Light chain | | WO2012045001 SEQ ID 15 | 24076 |
| INFL576 | Light chain | | WO2012045001 SEQ ID 31 | 24077 |
| INFL577 | Light chain | | WO2012045001 SEQ ID 35 | 24078 |
| INFL578 | Light chain | | WO2012045001 SEQ ID 19 | 24079 |
| INFL579 | Light chain | 10A14 | WO2012045001 SEQ ID 23 | 24080 |
| INFL580 | Light chain | 8D4 | WO2012045001 SEQ ID 27 | 24081 |
| INFL581 | Light chain | 2B9 | U.S. Pat. No. 9,115,201 SEQ ID NO: 5 | 24082 |
| INFL582 | Light chain | mAB 7A7 | US20150239960, US20140170163, | 24083 |
| | | | U.S. Pat. No. 8,673,314, US20110027270, | |
| | | | WO2010138564 SEQ ID NO: 7 | |
| INFL583 | Light chain | mAB 12D1 | US20150239960, US20140170163, | 24084 |
| | | | U.S. Pat. No. 8,673,314, US20110027270, | |
| | | | WO2010138564 SEQ ID NO: 13 | |
| INFL584 | Light chain | mAB 66A6 | US20150239960, US20140170163, | 24085 |
| | | | U.S. Pat. No. 8,673,314, US20110027270, | |
| | | | WO2010138564 SEQ ID NO: 17 | |
| INFL585 | Light chain | M1 D12 | US20110033473, WO2009125395 SEQ | 24086 |
| | | | ID NO: 15 | |
| INFL586 | Light chain | mAB1.12 | WO2013030165 SEQ ID NO: 2 | 24087 |
| INFL587 | Light chain | mAB3.1 | WO2013030165 SEQ ID NO: 4 | 24088 |
| INFL588 | Light chain | 5A7 | WO2015120097 SEQ ID NO: 8 | 24089 |
| INFL589 | Light chain | TRL053 | WO2015120097 SEQ ID NO: 18 | 24090 |
| INFL590 | Light chain | TRL579 | WO2015120097 SEQ ID NO: 28 | 24091 |
| INFL591 | Light chain | TRL784 | WO2015120097 SEQ ID NO: 38 | 24092 |
| INFL592 | Light chain | TRL794 | WO2015120097 SEQ ID NO: 48 | 24093 |
| INFL593 | Light chain | TRL798 | WO2015120097 SEQ ID NO: 58 | 24094 |
| INFL594 | Light chain | TRL799 | WO2015120097 SEQ ID NO: 68 | 24095 |
| INFL595 | Light chain | TRL809 | WO2015120097 SEQ ID NO: 78 | 24096 |
| INFL596 | Light chain | TRL811 | WO2015120097 SEQ ID NO: 88 | 24097 |
| INFL597 | Light chain | TRL812 | WO2015120097 SEQ ID NO: 98 | 24098 |
| INFL598 | Light chain | TRL813 | WO2015120097 SEQ ID NO: 108 | 24099 |
| INFL599 | Light chain | TRL823 | WO2015120097 SEQ ID NO: 118 | 24100 |
| INFL600 | Light chain | TRL832 | WO2015120097 SEQ ID NO: 128 | 24101 |
| INFL601 | Light chain | TRL833 | WO2015120097 SEQ ID NO: 138 | 24102 |
| INFL602 | Light chain | TRL834 | WO2015120097 SEQ ID NO: 148 | 24103 |
| INFL603 | Light chain | TRL837 | WO2015120097 SEQ ID NO: 167 | 24104 |
| INFL604 | Light chain | TRL839 | WO2015120097 SEQ ID NO: 177 | 24105 |
| INFL605 | Light chain | TRL841 | WO2015120097 SEQ ID NO: 187 | 24106 |
| INFL606 | Light chain | TRL842 | WO2015120097 SEQ ID NO: 197 | 24107 |
| INFL607 | Light chain | TRL845 | WO2015120097 SEQ ID NO: 207 | 24108 |
| INFL608 | Light chain | TRL846 | WO2015120097 SEQ ID NO: 218 | 24109 |
| INFL609 | Light chain | TRL847 | WO2015120097 SEQ ID NO: 228 | 24110 |
| INFL610 | Light chain | TRL848 | WO2015120097 SEQ ID NO: 238 | 24111 |
| INFL611 | Light chain | TRL849 | WO2015120097 SEQ ID NO: 248 | 24112 |
| INFL612 | Light chain | TRL851 | WO2015120097 SEQ ID NO: 258 | 24113 |
| INFL613 | Light chain | TRL854 | WO2015120097 SEQ ID NO: 268 | 24114 |
| INFL614 | Light chain | TRL856 | WO2015120097 SEQ ID NO: 278 | 24115 |
| INFL615 | Light chain | TRL858 | WO2015120097 SEQ ID NO: 288 | 24116 |
| INFL616 | Light chain | humM2e-hBiTE-1 | WO2014140368 SEQ ID NO: 10 | 24117 |
| INFL617 | Light chain | humM2e-hBiTE-2 | WO2014140368 SEQ ID NO: 18 | 24118 |
| INFL618 | Light chain | humM2e-hBiTE-3 | WO2014140368 SEQ ID NO: 26 | 24119 |
| INFL619 | Light chain | humM2e-hBiTE-4 | WO2014140368 SEQ ID NO: 34 | 24120 |
| INFL620 | Light chain | VH of humM2e- | WO2014140368 SEQ ID NO: 42 | 24121 |
| | | hBiTE-5 | | |
| INFL621 | Light chain | humM2e-hBiTE-6 | WO2014140368 SEQ ID NO: 50 | 24122 |
| INFL622 | Light chain | humM2e-hBiTE-7 | WO2014140368 SEQ ID NO: 58 | 24123 |
| INFL623 | Light chain | humM2e-hBiTE-8 | WO2014140368 SEQ ID NO: 66 | 24124 |
| INFL624 | Light chain | humM2e-hBiTE-9 | WO2014140368 SEQ ID NO: 74 | 24125 |
| INFL625 | Light chain | murM2e-hBiTE | WO2014140368 SEQ ID NO: 82 | 24126 |
| INFL626 | Light chain | FLA5.10 | U.S. Pat. No. 8,124,092 SEQ ID NO: 3 | 24127 |
| INFL627 | Light chain | FLD21.140 | U.S. Pat. No. 8,124,092 SEQ ID NO: 7 | 24128 |
| INFL628 | Light chain | FLA3.14 | U.S. Pat. No. 8,124,092 SEQ ID NO: 11 | 24129 |
| INFL629 | Light chain | FLD20.19 | U.S. Pat. No. 8,124,092 SEQ ID NO: 15 | 24130 |
| INFL630 | Light chain | FLD84 | U.S. Pat. No. 8,124,092 SEQ ID NO: 44 | 24131 |
| INFL631 | Light chain | FLD93 | U.S. Pat. No. 8,124,092 SEQ ID NO: 54 | 24132 |
| INFL632 | Light chain | FLD122 | U.S. Pat. No. 8,124,092 SEQ ID NO: 64 | 24133 |
| INFL633 | Light chain | FLD127 | U.S. Pat. No. 8,124,092 SEQ ID NO: 74 | 24134 |
| INFL634 | Light chain | FLD129 | U.S. Pat. No. 8,124,092 SEQ ID NO: 84 | 24135 |
| INFL635 | Light chain | FLD132 | U.S. Pat. No. 8,124,092 SEQ ID NO: 94 | 24136 |
| INFL636 | Light chain | FLD194 | U.S. Pat. No. 8,124,092 SEQ ID NO: 104 | 24137 |
| INFL637 | Light chain | mAb1 | WO2015112994 SEQ ID NO: 77 | 24138 |
| INFL638 | Light chain | mAb2 | WO2015112994 SEQ ID NO: 81 | 24139 |
| INFL639 | Light chain | mAb3 | WO2015112994 SEQ ID NO: 85 | 24140 |
| INFL640 | Light chain | CT-P22 | US20130004505 SEQ ID NO: 40; | 24141 |
| | | | WO2011/111966 | |
| INFL641 | Light chain | C05 | Ekiert, D. C., et al., Cross-neutralization | 24142 |
| | | | of influenza A viruses mediated by a | |
| | | | single antibody loop; Nature 489 (7417), | |
| | | | 526-532 (2012), NCBI Accession | |
| | | | #4FNL_L (214aa) | |
| INFL642 | Light chain | CR8020 | Ekiert, D. C., et al., A highly conserved | 24143 |
| | | | neutralizing epitope on group 2 influenza | |
| | | | A viruses; Science 333 (6044), 843-850 | |
| | | | (2011); WO2010130636, NCBI | |
| | | | Accession #3SDY_L | |
| INFL643 | Light chain | CR8033 | Dreyfus, C., Laursen, N. S. et al., Highly | 24144 |
| | | | conserved protective epitopes on | |
| | | | influenza B viruses; Science 337 (6100), | |
| | | | 1343-1348 (2012), NCBI Accession # | |
| | | | 4FQL_L | |
| INFL644 | Light chain | CR8043 | Friesen, R. H. et al., A common solution | 24145 |
| | | | to group 2 influenza virus neutralization; | |
| | | | Proc. Natl. Acad. Sci. U.S.A. 111 (1), | |
| | | | 445-450 (2014), NCBI Accession | |
| | | | #4NM8_L | |
| INFL645 | Light chain | CR8059 | Dreyfus, C. et al., Highly conserved | 24146 |
| | | | protective epitopes on influenza B | |
| | | | viruses; Science 337 (6100), 1343-1348 | |
| | | | (2012), NCBI Accession #4FQK_L | |
| INFL646 | Light chain | CR8071 | Dreyfus, C. et al., Highly conserved | 24147 |
| | | | protective epitopes on influenza B | |
| | | | viruses; Science 337 (6100), 1343-1348 | |
| | | | (2012), NCBI Accession # 4FQJ_L | 24148 |
| | | | (216aa) | |
| INFL647 | Light chain | CR9114 | WO2013079473; WO2014191435; | 24149 |
| | | | Dreyfus, C., Laursen, N. S. et al., Highly | |
| | | | conserved protective epitopes on | |
| | | | influenza B viruses; Science 337 (6100), | |
| | | | 1343-1348 (2012), NCBI Accession | |
| | | | #4FQY_L(216aa) | |
| INFL648 | Light chain | Ch67 | Schmidt, A. G., et al., Preconfiguration of | 24150 |
| | | | the antigen-binding site during affinity | |
| | | | maturation of a broadly neutralizing | |
| | | | influenza virus antibody; Proc. Natl. | |
| | | | Acad. Sci. U.S.A. 110 (1), 264-269 | |
| | | | (2013), NCBI Accession #4HKX_B | |
| | | | (214aa) | |
| INFL649 | Light chain | Fab 26/9 | Schulze-Gahmen, U. et al., J. Biol. | 24151 |
| | | | Chem. 263 (32), 17100-17105 (1988); | |
| | | | Churchill, M. E., et al., J. Mol. Biol. 241 | |
| | | | (4), 534-556 (1994), NCBI Accession | |
| | | | #LFRG_L | |
| INFL650 | Light chain | Fab 3.1 | Wyrzucki, A. et al., Alternative | 24152 |
| | | | Recognition of the Conserved Stem | |
| | | | Epitope in Influenza A Virus | |
| | | | Hemagglutinin by a VH3-30-Encoded | |
| | | | Heterosubtypic Antibody; J. Virol. 88 | |
| | | | (12), 7083-7092 (2014), NCBI Accession | |
| | | | #4PY8_J | |
| INFL651 | Light chain | Fab 2g1 | Xu, R. et al., A recurring motif for | 24153 |
| | | | antibody recognition of the receptor- | |
| | | | binding site of influenza hemagglutinin; | |
| | | | Nat. Struct. Mol. Biol. 20 (3), 363-370 | |
| | | | (2013), NCBI Accession #4HG4_M | |
| | | | (214aa) | |
| INFL652 | Light chain | Fab 8m2 | Xu, R. et al., A recurring motif for | 24154 |
| | | | antibody recognition of the receptor- | |
| | | | binding site of influenza hemagglutinin; | |
| | | | Nat. Struct. Mol. Biol. 20 (3), 363-370 | |
| | | | (2013), NCBI Accession #4HFU_L | |
| | | | (215aa) | |
| INFL653 | Light chain | Fab 8f8 | Xu, R. et al., A recurring motif for | 24155 |
| | | | antibody recognition of the receptor- | |
| | | | binding site of influenza hemagglutinin; | |
| | | | Nat. Struct. Mol. Biol. 20 (3), 363-370 | |
| | | | (2013), NCBI Accession # 4HF5_L | |
| | | | (218aa) | |
| INFL654 | Light chain | Fab 2d1 | Xu, R., et al., Structural basis of | 24156 |
| | | | preexisting immunity to the 2009 H1N1 | |
| | | | pandemic influenza virus; Science 328 | |
| | | | (5976), 357-360 (2010), NCBI Accession | |
| | | | #3LZF_L (217aa) | |
| INFL655 | Light chain | Fi6v3 | Corti, D. et al., A neutralizing antibody | 24157 |
| | | | selected from plasma cells that binds to | |
| | | | group 1 and group 2 influenza A | |
| | | | hemagglutinins; Science 333 (6044), | |
| | | | 850-856 (2011), NCBI Accession | |
| | | | #3ZTN_L | |
| INFL656 | Light chain | Light chain from | Iba, Y., et al., Conserved Neutralizing | 24158 |
| | | 3WHE_N | Epitope at Globular Head of | |
| | | | Hemagglutinin in H3N2 Influenza | |
| | | | Viruses; J. Virol. (2014), NCBI | 24159 |
| | | | Accession #3WHE_N (220aa) | |
| INFL657 | Light chain | monoclonal | Burioni, R. et al., Monoclonal antibodies | 24160 |
| | (partial) | antibody PN- | isolated from human B cells neutralize a | |
| | | SIA28 | broad range of H1 subtype influenza A | |
| | | | viruses including swine-origin Influenza | |
| | | | virus(S-OIV); Virology (2010), NCBI | |
| | | | Accession #ACX30939.1 (105aa) | |
| INFL658 | Light chain | monoclonal | Burioni, R. et al., Monoclonal antibodies | 24161 |
| | (partial) | antibody PN- | isolated from human B cells neutralize a | |
| | | SIA49 | broad range of H1 subtype influenza A | |
| | | | viruses including swine-origin Influenza | |
| | | | virus(S-OIV); Virology (2010), NCBI | |
| | | | Accession #ACX30938.1 (105aa) | |
| INFL659 | Light chain; Fab | 5j8 | Hong, M. et al., Antibody Recognition of | 24162 |
| | | | the Pandemic H1N1 Influenza Virus | |
| | | | Hemagglutinin Receptor Binding Site; J. | |
| | | | Virol. 87 (22), 12471-12480 (2013), | |
| | | | NCBI Accession #4M5Z_L | |
| INFL660 | Light chain CDR 1 | Ab1A2 | WO2015028478 SEQ ID 9 | 24163 |
| INFL661 | Light chain CDR 2 | Ab1A2 | WO2015028478 SEQ ID 10 | 24164 |
| INFL662 | Light chain CDR 3 | Ab1A2 | WO2015028478 SEQ ID 11 | 24165 |
| INFL663 | Light chain Fab | CT147 | WO2013048153, US20140234336 SEQ | 24166 |
| | | | ID NO: 37 | |
| INFL664 | Light chain Fab | CT164 | WO2013048153, US20140234336 SEQ | 24167 |
| | | | ID NO: 41 | |
| INFL665 | Light chain Fab | CT166 | WO2013048153, US20140234336 SEQ | 24168 |
| | | | ID NO: 43 | |
| INFL666 | Light chain Human | Fab 39.29 | Nakamura, G. et al., An in vivo human- | 24169 |
| | igg | | plasmablast enrichment technique allows | |
| | | | rapid identification of therapeutic | |
| | | | influenza a antibodies; Cell Host | |
| | | | Microbe 14 (1), 93-103 (2013), NCBI | |
| | | | Accession #4KVN_L (215aa) | |
| INFL667 | Light chain K3 | h2B11 | U.S. Pat. No. 9,115,201 SEQ ID NO: 9 | 24170 |
| INFL668 | Light chain K3 | h2B12 | U.S. Pat. No. 9,115,201 SEQ ID NO: 10 | 24171 |
| INFL669 | Light chain partial | 4A10 | Krause, J. C. et al. “Epitope-specific | 24172 |
| | region | | human influenza antibody repertoires | |
| | | | diversify by B cell intraclonal sequence | |
| | | | divergence and interclonal convergence” | |
| | | | J. Immunol. 187 (7), 3704-3711 (2011), | |
| | | | NCBI Accession #AEO16798 | |
| INFL670 | Light chain variable | LC-VD from | US2013030234 SEQ ID NO: 33 | 24173 |
| | (exemplary) | US2013030234 | | |
| INFL671 | Light chain variable | LC-VD from | US2013030234 SEQ ID NO: 34 | 24174 |
| | (exemplary) | US2013030234 | | |
| INFL672 | Light chain variable | LC-VD from | US2013030234 SEQ ID NO: 35 | 24175 |
| | (exemplary) | US2013030234 | | |
| INFL673 | Light chain variable | LC-VD from | US2013030234 SEQ ID NO: 36 | 24176 |
| | (exemplary) | US2013030234 | | |
| INFL674 | Light chain variable | LC-VD from | US2013030234 SEQ ID NO: 37 | 24177 |
| | (exemplary) | US2013030234 | | |
| INFL675 | Light chain variable | LC-VD from | US2013030234 SEQ ID NO: 38 | 24178 |
| | (exemplary) | US2013030234 | | |
| INFL676 | Light chain variable | LC-VD from | US2013030234 SEQ ID NO: 39 | 24179 |
| | (exemplary) | US2013030234 | | |
| INFL677 | Light chain variable | LC-VD from | US2013030234 SEQ ID NO: 40 | 24180 |
| | (exemplary) | US2013030234 | | |
| INFL678 | Light chain variable | LC-VD from | US2013030234 SEQ ID NO: 41 | 24181 |
| | (exemplary) | US2013030234 | | |
| INFL679 | Light chain variable | LC-VD from | US2013030234 SEQ ID NO: 42 | 24182 |
| | (exemplary) | US2013030234 | | |
| INFL680 | Light chain variable | LC-VD from | US2013030234 SEQ ID NO: 43 | 24183 |
| | (exemplary) | US2013030234 | | |
| INFL681 | Light chain variable | 39.18 B11 | US20140161822 SEQ ID NO: 156 | 24184 |
| | region | | | |
| INFL682 | Light chain variable | GG3 | WO2014159960 SEQ ID NO: 25 | 24185 |
| | region | | | |
| INFL683 | Light chain variable | N547 | U.S. Pat. No. 8,003,106 SEQ ID NO: 29 | 24186 |
| | region | | | |
| INFL684 | Light chain variable | L66 | U.S. Pat. No. 8,003,106 SEQ ID NO: 31 | 24187 |
| | region | | | |
| INFL685 | Light chain variable | C40 | U.S. Pat. No. 8,003,106 SEQ ID NO: 27 | 24188 |
| | region | | | |
| INFL686 | Light chain variable | 14C2 | U.S. Pat. No. 8,080,244 SEQ ID NO: 7 | 24189 |
| | region | | | |
| INFL687 | Light chain variable | h14C2 | U.S. Pat. No. 8,080,244 SEQ ID NO: 1 | 24190 |
| | region | | | |
| INFL688 | Light chain variable | VN04-2-HuG1 | US20100150941 SEQ ID NO: 6 | 24191 |
| | region | | | |
| INFL689 | Light chain variable | VN04-3-HuG1 | US20100150941 SEQ ID NO: 8 | 24192 |
| | region | | | |
| INFL690 | Light chain variable | FI6 variant 1, FI6 | U.S. Pat. No. 8,871,207 SEQ ID NO: 14 | 24193 |
| | region | variant 2 | | |
| INFL691 | Light chain variable | FI6 variant 3, FI6 | U.S. Pat. No. 8,871,207 SEQ ID NO: 57 | 24194 |
| | region | variant 4 | | |
| INFL692 | Light chain variable | FI6 variant 5 | U.S. Pat. No. 8,871,207 SEQ ID NO: 61 | 24195 |
| | region | | | |
| INFL693 | Light chain variable | FI28 vanant 1, | U.S. Pat. No. 8,871,207 SEQ ID NO: 30 | 24196 |
| | region | FI28 variant 2 | | |
| INFL694 | Light chain variable | 21B15 | U.S. Pat. No. 8,858,948 SEQ ID NO: 46 | 24197 |
| | region | | | |
| INFL695 | Light chain variable | 3241_G23 | U.S. Pat. No. 8,858,948 SEQ ID NO: 118 | 24198 |
| | region | | | |
| INFL696 | Light chain variable | 3244_I10 | U.S. Pat. No. 8,858,948 SEQ ID NO: 122 | 24199 |
| | region | | | |
| INFL697 | Light chain variable | 3243_J07 | U.S. Pat. No. 8,858,948 SEQ ID NO: 126 | 24200 |
| | region | | | |
| INFL698 | Light chain variable | 3259_J21 | U.S. Pat. No. 8,858,948 SEQ ID NO: 130 | 24201 |
| | region | | | |
| INFL699 | Light chain variable | 3245_O19 | U.S. Pat. No. 8,858,948 SEQ ID NO: 134 | 24202 |
| | region | | | |
| INFL700 | Light chain variable | 3244_H04 | U.S. Pat. No. 8,858,948 SEQ ID NO: 138 | 24203 |
| | region | | | |
| INFL701 | Light chain variable | 3136_G05 | U.S. Pat. No. 8,858,948 SEQ ID NO: 142 | 24204 |
| | region | | | |
| INFL702 | Light chain variable | 3252_C13 | U.S. Pat. No. 8,858,948 SEQ ID NO: 146 | 24205 |
| | region | | | |
| INFL703 | Light chain variable | 3255_J06 | U.S. Pat. No. 8,858,948 SEQ ID NO: 150 | 24206 |
| | region | | | |
| INFL704 | Light chain variable | 3420_I23 | U.S. Pat. No. 8,858,948 SEQ ID NO: 154 | 24207 |
| | region | | | |
| INFL705 | Light chain variable | 3248_P18 | U.S. Pat. No. 8,858,948 SEQ ID NO: 160 | 24208 |
| | region | | | |
| INFL706 | Light chain variable | 3253_P10 | U.S. Pat. No. 8,858,948 SEQ ID NO: 164 | 24209 |
| | region | | | |
| INFL707 | Light chain variable | 3260_D19 | U.S. Pat. No. 8,858,948 SEQ ID NO: 168 | 24210 |
| | region | | | |
| INFL708 | Light chain variable | 3362_B11 | U.S. Pat. No. 8,858,948 SEQ ID NO: 174 | 24211 |
| | region | | | |
| INFL709 | Light chain variable | 3242_P05 | U.S. Pat. No. 8,858,948 SEQ ID NO: 178 | 24212 |
| | region | | | |
| INFL710 | Light chain variable | A66 | WO2009079259, US20110038935, | 24213 |
| | region | | US20140011982 SEQ ID NO: 34 | |
| INFL711 | Light chain variable | D7, H98 | WO2009079259, US20110038935, | 24214 |
| | region | | US20140011982 SEQ ID NO: 8 | |
| INFL712 | Light chain variable | D8 | WO2009079259, US20110038935, | 24215 |
| | region | | US20140011982 SEQ ID NO: 14 | |
| INFL713 | Light chain variable | D80 | WO2009079259, US20110038935, | 24216 |
| | region | | US20140011982 SEQ ID NO: 16 | |
| INFL714 | Light chain variable | E88 | WO2009079259, US20110038935, | 24217 |
| | region | | US20140011982 SEQ ID NO: 38 | |
| INFL715 | Light chain variable | E90 | WO2009079259, US20110038935, | 24218 |
| | region | | US20140011982 SEQ ID NO: 22 | |
| INFL716 | Light chain variable | F10 | WO2009079259, US20110038935, | 24219 |
| | region | | US20140011982 SEQ ID NO: 20 | |
| INFL717 | Light chain variable | G17 | WO2009079259, US20110038935, | 24220 |
| | region | | US20140011982 SEQ ID NO: 26 | |
| INFL718 | Light chain variable | H40 | WO2009079259, US20110038935, | 24221 |
| | region | | US20140011982 SEQ ID NO: 30 | |
| INFL719 | Light chain variable | H98 | WO2009079259, US20110038935, | 24222 |
| | region | | US20140011982 SEQ ID NO: 10 | |
| INFL720 | Light chain variable | CH65 | WO2013020074, US20140302043 SEQ | 24223 |
| | region | | ID NO: 10 | |
| INFL721 | Light chain variable | CH66 | WO2013020074, US20140302043 SEQ | 24224 |
| | region | | ID NO: 11 | |
| INFL722 | Light chain variable | CH67 | WO2013020074, US20140302043 SEQ | 24225 |
| | region | | ID NO: 12 | |
| INFL723 | Light chain variable | CL86OUCA | WO2013020074, US20140302043 SEQ | 24226 |
| | region | | ID NO: 9 | |
| INFL724 | Light chain variable | Antibody 1 | WO2015051010 SEQ ID NO: 7 | 24227 |
| | region | | | |
| INFL725 | Light chain variable | Antibody 2 | WO2015051010 SEQ ID NO: 17 | 24228 |
| | region | | | |
| INFL726 | Light chain variable | Antibody 3 | WO2015051010 SEQ ID NO: 27 | 24229 |
| | region | | | |
| INFL727 | Light chain variable | Antibody 4 | WO2015051010 SEQ ID NO: 37 | 24230 |
| | region | | | |
| INFL728 | Light chain variable | Antibody 5 | WO2015051010 SEQ ID NO: 47 | 24231 |
| | region | | | |
| INFL729 | Light chain variable | Antibody 6 | WO2015051010 SEQ ID NO: 57 | 24232 |
| | region | | | |
| INFL730 | Light chain variable | Antibody 7 | WO2015051010 SEQ ID NO: 67 | 24233 |
| | region | | | |
| INFL731 | Light chain variable | Antibody 8 | WO2015051010 SEQ ID NO: 77 | 24234 |
| | region | | | |
| INFL732 | Light chain variable | Antibody 9 | WO2015051010 SEQ ID NO: 87 | 24235 |
| | region | | | |
| INFL733 | Light chain variable | Antibody 10 | WO2015051010 SEQ ID NO: 97 | 24236 |
| | region | | | |
| INFL734 | Light chain variable | Antibody 11 | WO2015051010 SEQ ID NO: 107 | 24237 |
| | region | | | |
| INFL735 | Light chain variable | Antibody 12 | WO2015051010 SEQ ID NO: 117 | 24238 |
| | region | | | |
| INFL736 | Light chain variable | Antibody 13 | WO2015051010 SEQ ID NO: 127 | 24239 |
| | region | | | |
| INFL737 | Light chain variable | Antibody 14 | WO2015051010 SEQ ID NO: 137 | 24240 |
| | region | | | |
| INFL738 | Light chain variable | Antibody 15 | WO2015051010 SEQ ID NO: 147 | 24241 |
| | region | | | |
| INFL739 | Light chain variable | Antibody 3-GL | WO2015051010 SEQ ID NO: 157 | 24242 |
| | region | | | |
| INFL740 | Light chain variable | 005-2G02 | WO2013059524, US20140348851 SEQ | 24243 |
| | region | | ID NO: 11 | |
| INFL741 | Light chain variable | 005-2G02 | WO2013059524, US20140348851 SEQ | 24244 |
| | region | | ID NO: 19 | |
| INFL742 | Light chain variable | 09-2A06 | WO2013059524, US20140348851 SEQ | 24245 |
| | region | | ID NO: 31 | |
| INFL743 | Light chain variable | 09-2A06 | WO2013059524, US20140348851 SEQ | 24246 |
| | region | | ID NO: 39 | |
| INFL744 | Light chain variable | 09-3A01 | WO2013059524, US20140348851 SEQ | 24247 |
| | region | | ID NO: 51 | |
| INFL745 | Light chain variable | 09-3A01 | WO2013059524, US20140348851 SEQ | 24248 |
| | region | | ID NO: 59 | |
| INFL746 | Light chain variable | 70-IF02 | WO2012096994, US20140046039 SEQ | 24249 |
| | region | | ID NO: 21 | |
| INFL747 | Light chain variable | | US20120058124 SEQ ID NO: 15 | 24250 |
| | region | | | |
| INFL748 | Light chain variable | | US20120058124 SEQ ID NO: 16 | 24251 |
| | region | | | |
| INFL749 | Light chain variable | | US20120058124 SEQ ID NO: 17 | 24252 |
| | region | | | |
| INFL750 | Light chain variable | | US20120058124 SEQ ID NO: 18 | 24253 |
| | region | | | |
| INFL751 | Light chain variable | | US20120058124 SEQ ID NO: 19 | 24254 |
| | region | | | |
| INFL752 | Light chain variable | | US20120058124 SEQ ID NO: 20 | 24255 |
| | region | | | |
| INFL753 | Light chain variable | | US20120058124 SEQ ID NO: 21 | 24256 |
| | region | | | |
| INFL754 | Light chain variable | | US20120058124 SEQ ID NO: 22 | 24257 |
| | region | | | |
| INFL755 | Light chain variable | | US20120058124 SEQ ID NO: 23 | 24258 |
| | region | | | |
| INFL756 | Light chain variable | | US20120058124 SEQ ID NO: 24 | 24259 |
| | region | | | |
| INFL757 | Light chain variable | | US20120058124 SEQ ID NO: 25 | 24260 |
| | region | | | |
| INFL758 | Light chain variable | | US20120058124 SEQ ID NO: 26 | 24261 |
| | region | | | |
| INFL759 | Light chain variable | | US20120058124 SEQ ID NO: 70 | 24262 |
| | region | | | |
| INFL760 | Light chain variable | 81.39 | US20140161822, US20140248286, | 24263 |
| | region | | WO2014078268 SEQ ID NO: 113 | |
| INFL761 | Light chain variable | 81.39 | US20140161822, US20140248286, | 24264 |
| | region | | WO2014078268 SEQ ID NO: 117 | |
| INFL762 | Light chain variable | 81.39 | US20140161822, US20140248286, | 24265 |
| | region | | WO2014078268 SEQ ID NO: 119 | |
| INFL763 | Light chain variable | 81.39 | US20140161822, US20140248286, | 24266 |
| | region | | WO2014078268 SEQ ID NO: 122 | |
| INFL764 | Light chain variable | 81.39 | US20140161822, US20140248286, | 24267 |
| | region | | WO2014078268 SEQ ID NO: 124 | |
| INFL765 | Light chain variable | 81.39 | US20140161822, US20140248286, | 24268 |
| | region | | WO2014078268 SEQ ID NO: 126 | |
| INFL766 | Light chain variable | 81.39 | US20140161822, US20140248286, | 24269 |
| | region | | WO2014078268 SEQ ID NO: 128 | |
| INFL767 | Light chain variable | 81.39 | US20140161822, US20140248286, | 24270 |
| | region | | WO2014078268 SEQ ID NO: 130 | |
| INFL768 | Light chain variable | 81.39 | US20140161822, US20140248286, | 24271 |
| | region | | WO2014078268 SEQ ID NO: 132 | |
| INFL769 | Light chain variable | 39.29 | US20140161822, US20140248286, | 24272 |
| | region | | WO2014078268 SEQ ID NO: 136 | |
| INFL770 | Light chain variable | 39.29 | US20140161822, US20140248286, | 24273 |
| | region | | WO2014078268 SEQ ID NO: 140 | |
| INFL771 | Light chain variable | 39.29 | US20140161822, US20140248286, | 24274 |
| | region | | WO2014078268 SEQ ID NO: 144 | |
| INFL772 | Light chain variable | 39.29 | US20140161822, US20140248286, | 24275 |
| | region | | WO2014078268 SEQ ID NO: 146 | |
| INFL773 | Light chain variable | 39.29 | US20140161822, US20140248286, | 24276 |
| | region | | WO2014078268 SEQ ID NO: 150 | |
| INFL774 | Light chain variable | 39.29 | US20140161822, US20140248286, | 24277 |
| | region | | WO2014078268 SEQ ID NO: 152 | |
| INFL775 | Light chain variable | 36.89 | US20140161822, US20140248286, | 24278 |
| | region | | WO2014078268 SEQ ID NO: 162 | |
| INFL776 | Light chain variable | 9.01F3 | US20140161822, US20140248286, | 24279 |
| | region | | WO2014078268 SEQ ID NO: 166 | |
| INFL777 | Light chain variable | 23.06C2 | US20140161822, US20140248286, | 24280 |
| | region | | WO2014078268 SEQ ID NO: 170 | |
| INFL778 | Light chain variable | 39.29 | US20140161822, US20140248286, | 24281 |
| | region | | WO2014078268 SEQ ID NO: 235 | |
| INFL779 | Light chain variable | F16 Variant 3 | WO2013011347, US20140271655, | 24282 |
| | region | | U.S. Pat. No. 8,871,207 SEQ ID NO: 57 | |
| INFL780 | Light chain variable | F16 Variant 5 | WO2013011347, US20140271655, | 24283 |
| | region | | U.S. Pat. No. 8,871,207 SEQ ID NO: 61 | |
| INFL781 | Light chain variable | FC41 | WO2010010467 SEQ ID NO 61 | 24284 |
| | region | | | |
| INFL782 | Light chain variable | FE43 | WO2010010467 SEQ ID NO 75 | 24285 |
| | region | | | |
| INFL783 | Light chain variable | FB75, FB110, | WO2010010467 SEQ ID NO 122 | 24286 |
| | region | FB177 | | |
| INFL784 | Light chain variable | FB17 | WO2010010467 SEQ ID NO 106 | 24287 |
| | region | | | |
| INFL785 | Light chain variable | FC6 | WO2010010467 SEQ ID NO 46 | 24288 |
| | region | | | |
| INFL786 | Light chain variable | FE53 | WO2010010467 SEQ ID NO 90 | 24289 |
| | region | | | |
| INFL787 | Light chain variable | 7A7 | WO2010138564 SEQ ID NO: 7 | 24290 |
| | region | | | |
| INFL788 | Light chain variable | 12DI | WO2010138564 SEQ ID NO: 13 | 24291 |
| | region | | | |
| INFL789 | Light chain variable | 66A6 | WO2010138564 SEQ ID NO: 17 | 24292 |
| | region | | | |
| INFL790 | Light chain variable | B-1 | U.S. Pat. No. 8,975,378, US20110319600, | 24293 |
| | region | | WO2010073647 SEQ ID NO: 28 | |
| INFL791 | Light chain variable | D1 | U.S. Pat. No. 8,975,378, US20110319600, | 24294 |
| | region | | WO2010073647 SEQ ID NO: 30 | |
| INFL792 | Light chain variable | E-2 | U.S. Pat. No. 8,975,378, US20110319600, | 24295 |
| | region | | WO2010073647 SEQ ID NO: 32 | |
| INFL793 | Light chain variable | B-3 | U.S. Pat. No. 8,975,378, US20110319600, | 24296 |
| | region | | WO2010073647 SEQ ID NO: 34 | |
| INFL794 | Light chain variable | 5A7 | WO2013114885, US20140377262 SEQ | 24297 |
| | region | | ID NO: 35 | |
| INFL795 | Light chain variable | 3A2 | WO2013114885, US20140377262 SEQ | 24298 |
| | region | | ID NO: 39 | |
| INFL796 | Light chain variable | 10C4 | WO2013114885, US20140377262 SEQ | 24299 |
| | region | | ID NO: 43 | |
| INFL797 | Light chain variable | Fab49 | WO2009144667, US20110076265 SEQ | 24300 |
| | region | | ID NO: 2 | |
| INFL798 | Light chain variable | Fab28, IgG PN- | WO2009115972, WO2011117848, | 24301 |
| | region | SIA28 | US20110014187 SEQ ID NO: 2 | |
| INFL799 | Light chain variable | TCN-522 | US20120207760, U.S. Pat. No. 8,916,160 SEQ ID | 24302 |
| | region | | NO: 778; U.S. Pat. No. 8,900,590 SEQ ID NO: 33 | |
| INFL800 | Light chain variable | CR8018 | WO2010130636 SEQ ID NO: 24 | 24303 |
| | region | | | |
| INFL801 | Light chain variable | CR8019 | WO2010130636 SEQ ID NO: 28 | 24304 |
| | region | | | |
| INFL802 | Light chain variable | CR8020 | WO2010130636 SEQ ID NO: 32 | 24305 |
| | region | | | |
| INFL803 | Light chain variable | CR8021 | WO2010130636 SEQ ID NO: 36 | 24306 |
| | region | | | |
| INFL804 | Light chain variable | CR8038 | WO2010130636 SEQ ID NO: 40 | 24307 |
| | region | | | |
| INFL805 | Light chain variable | CR8039 | WO2010130636 SEQ ID NO: 44 | 24308 |
| | region | | | |
| INFL806 | Light chain variable | CR8040 | WO2010130636 SEQ ID NO: 48 | 24309 |
| | region | | | |
| INFL807 | Light chain variable | CR8041 | WO2010130636 SEQ ID NO: 52 | 24310 |
| | region | | | |
| INFL808 | Light chain variable | CR8043 | WO2010130636 SEQ ID NO: 56 | 24311 |
| | region | | | |
| INFL809 | Light chain variable | CR8049 | WO2010130636 SEQ ID NO: 59 | 24312 |
| | region | | | |
| INFL810 | Light chain variable | CR8050 | WO2010130636 SEQ ID NO: 63 | 24313 |
| | region | | | |
| INFL811 | Light chain variable | CR8052 | WO2010130636 SEQ ID NO: 67 | 24314 |
| | region | | | |
| INFL812 | Light chain variable | CR8055 | WO2010130636 SEQ ID NO: 71 | 24315 |
| | region | | | |
| INFL813 | Light chain variable | CR8057 | WO2010130636 SEQ ID NO: 75 | 24316 |
| | region | | | |
| INFL814 | Light chain variable | CR8069 | WO2010130636 SEQ ID NO: 79 | 24317 |
| | region | | | |
| INFL815 | Light chain variable | CR6255 | US20090311265, U.S. Pat. No. 8,691,223, | 24318 |
| | region | | U.S. Pat. No. 9,109,017, WO2008028946 SEQ ID | |
| | | | NO: 85 | |
| INFL816 | Light chain variable | CR6257 | US20090311265, U.S. Pat. No. 8,691,223, | 24319 |
| | region | | U.S. Pat. No. 9,109,017, WO2008028946 SEQ ID | |
| | | | NO: 87 | |
| INFL817 | Light chain variable | CR6260 | US20090311265, U.S. Pat. No. 8,691,223, | 24320 |
| | region | | U.S. Pat. No. 9,109,017, WO2008028946 SEQ ID | |
| | | | NO: 89 | |
| INFL818 | Light chain variable | CR6261 | US20090311265, U.S. Pat. No. 8,691,223, | 24321 |
| | region | | U.S. Pat. No. 9,109,017, WO2008028946 SEQ ID | |
| | | | NO: 91 | |
| INFL819 | Light chain variable | CR6262 | US20090311265, U.S. Pat. No. 8,691,223, | 24322 |
| | region | | U.S. Pat. No. 9,109,017, WO2008028946 SEQ ID | |
| | | | NO: 93 | |
| INFL820 | Light chain variable | CR6268 | US20090311265, U.S. Pat. No. 8,691,223, | 24323 |
| | region | | U.S. Pat. No. 9,109,017, WO2008028946 SEQ ID | |
| | | | NO: 95 | |
| INFL821 | Light chain variable | CR6307 | US20090311265, U.S. Pat. No. 8,691,223, | 24324 |
| | region | | U.S. Pat. No. 9,109,017, WO2008028946 SEQ ID | |
| | | | NO: 97 | |
| INFL822 | Light chain variable | CR6310 | US20090311265, U.S. Pat. No. 8,691,223, | 24325 |
| | region | | U.S. Pat. No. 9,109,017, WO2008028946 SEQ ID | |
| | | | NO: 99 | |
| INFL823 | Light chain variable | CR6314 | US20090311265, U.S. Pat. No. 8,691,223, | 24326 |
| | region | | U.S. Pat. No. 9,109,017, WO2008028946 SEQ ID | |
| | | | NO: 101 | |
| INFL824 | Light chain variable | CR6323 | US20090311265, U.S. Pat. No. 8,691,223, | 24327 |
| | region | | U.S. Pat. No. 9,109,017, WO2008028946 SEQ ID | |
| | | | NO: 103 | |
| INFL825 | Light chain variable | CR6325 | US20090311265, U.S. Pat. No. 8,691,223, | 24328 |
| | region | | U.S. Pat. No. 9,109,017, WO2008028946 SEQ ID | |
| | | | NO: 105 | |
| INFL826 | Light chain variable | CR6331 | US20090311265, U.S. Pat. No. 8,691,223, | 24329 |
| | region | | U.S. Pat. No. 9,109,017, WO2008028946 SEQ ID | |
| | | | NO: 107 | |
| INFL827 | Light chain variable | CR6344 | US20090311265, U.S. Pat. No. 8,691,223, | 24330 |
| | region | | U.S. Pat. No. 9,109,017, WO2008028946 SEQ ID | |
| | | | NO: 109 | |
| INFL828 | Light chain variable | CR6141 | US20090311265, U.S. Pat. No. 8,691,223, | 24331 |
| | region | | U.S. Pat. No. 9,109,017, WO2008028946 SEQ ID | |
| | | | NO: 319 | |
| INFL829 | Light chain variable | CR6272 | US20090311265, U.S. Pat. No. 8,691,223, | 24332 |
| | region | | U.S. Pat. No. 9,109,017, WO2008028946 SEQ ID | |
| | | | NO: 323 | |
| INFL830 | Light chain variable | CR6296 | US20090311265, U.S. Pat. No. 8,691,223, | 24333 |
| | region | | U.S. Pat. No. 9,109,017, WO2008028946 SEQ ID | |
| | | | NO: 327 | |
| INFL831 | Light chain variable | CR6301 | US20090311265, U.S. Pat. No. 8,691,223, | 24334 |
| | region | | U.S. Pat. No. 9,109,017, WO2008028946 SEQ ID | |
| | | | NO: 331 | |
| INFL832 | Light chain variable | CR6327 | US20090311265, U.S. Pat. No. 8,691,223, | 24335 |
| | region | | U.S. Pat. No. 9,109,017, WO2008028946 SEQ ID | |
| | | | NO: 335 | |
| INFL833 | Light chain variable | CR6328 | US20090311265, U.S. Pat. No. 8,691,223, | 24336 |
| | region | | U.S. Pat. No. 9,109,017, WO2008028946 SEQ ID | |
| | | | NO: 339 | |
| INFL834 | Light chain variable | CR6329 | US20090311265, U.S. Pat. No. 8,691,223, | 24337 |
| | region | | U.S. Pat. No. 9,109,017, WO2008028946 SEQ ID | |
| | | | NO: 343 | |
| INFL835 | Light chain variable | CR6332 | US20090311265, U.S. Pat. No. 8,691,223, | 24338 |
| | region | | U.S. Pat. No. 9,109,017, WO2008028946 SEQ ID | |
| | | | NO: 347 | |
| INFL836 | Light chain variable | CR6334 | US20090311265, U.S. Pat. No. 8,691,223, | 24339 |
| | region | | U.S. Pat. No. 9,109,017, WO2008028946 SEQ ID | |
| | | | NO: 351 | |
| INFL837 | Light chain variable | CR6336 | US20090311265, U.S. Pat. No. 8,691,223, | 24340 |
| | region | | U.S. Pat. No. 9,109,017, WO2008028946 SEQ ID | |
| | | | NO: 355 | |
| INFL838 | Light chain variable | CR6339 | US20090311265, U.S. Pat. No. 8,691,223, | 24341 |
| | region | | U.S. Pat. No. 9,109,017, WO2008028946 SEQ ID | |
| | | | NO: 359 | |
| INFL839 | Light chain variable | CR6342 | US20090311265, U.S. Pat. No. 8,691,223, | 24342 |
| | region | | U.S. Pat. No. 9,109,017, WO2008028946 SEQ ID | |
| | | | NO: 363 | |
| INFL840 | Light chain variable | CR6343 | US20090311265, U.S. Pat. No. 8,691,223, | 24343 |
| | region | | U.S. Pat. No. 9,109,017, WO2008028946 SEQ ID | |
| | | | NO: 367 | |
| INFL841 | Light chain variable | CR9003 | US20140120113 SEQ ID NO: 4 | 24344 |
| | region | | | |
| INFL842 | Light chain variable | CR9004 | US20140120113 SEQ ID NO: 8 | 24345 |
| | region | | | |
| INFL843 | Light chain variable | CR9005 | US20140120113 SEQ ID NO: 12 | 24346 |
| | region | | | |
| INFL844 | Light chain variable | CR9006 | US20140120113 SEQ ID NO: 16 | 24347 |
| | region | | | |
| INFL845 | Light chain variable | CR9007 | US20140120113 SEQ ID NO: 20 | 24348 |
| | region | | | |
| INFL846 | Light chain variable | CR9008 | US20140120113 SEQ ID NO: 24 | 24349 |
| | region | | | |
| INFL847 | Light chain variable | CR9009 | US20140120113 SEQ ID NO: 28 | 24350 |
| | region | | | |
| INFL848 | Light chain variable | CR9010 | US20140120113 SEQ ID NO: 32 | 24351 |
| | region | | | |
| INFL849 | Light chain variable | CR9011 | US20140120113 SEQ ID NO: 36 | 24352 |
| | region | | | |
| INFL850 | Light chain variable | CR9012 | US20140120113 SEQ ID NO: 40 | 24353 |
| | region | | | |
| INFL851 | Light chain variable | CR9029 | US20140120113 SEQ ID NO: 44 | 24354 |
| | region | | | |
| INFL852 | Light chain variable | CR9030 | US20140120113 SEQ ID NO: 48 | 24355 |
| | region | | | |
| INFL853 | Light chain variable | CR9031 | US20140120113 SEQ ID NO: 52 | 24356 |
| | region | | | |
| INFL854 | Light chain variable | CR9112 | US20140120113 SEQ ID NO: 56 | 24357 |
| | region | | | |
| INFL855 | Light chain variable | CR9113 | US20140120113 SEQ ID NO: 60 | 24358 |
| | region | | | |
| INFL856 | Light chain variable | CR9114 | US20140120113 SEQ ID NO: 64 | 24359 |
| | region | | | |
| INFL857 | Light chain variable | CR8033 | U.S. Pat. No. 8,852,595 SEQ ID NO: 73 | 24360 |
| | region | | | |
| INFL858 | Light chain variable | CR8059 | U.S. Pat. No. 8,852,595 SEQ ID NO: 77 | 24361 |
| | region | | | |
| INFL859 | Light chain variable | CR8071 | U.S. Pat. No. 8,852,595 SEQ ID NO: 79 | 24362 |
| | region | | | |
| INFL860 | Light chain variable | CR10051 | U.S. Pat. No. 8,852,595 SEQ ID NO: 83 | 24363 |
| | region | | | |
| INFL861 | Light chain variable | CR10049 | U.S. Pat. No. 8,852,595 SEQ ID NO: 87 | 24364 |
| | region | | | |
| INFL862 | Light chain variable | CR10023 | U.S. Pat. No. 8,852,595 SEQ ID NO: 91 | 24365 |
| | region | | | |
| INFL863 | Light chain variable | CR10032 | U.S. Pat. No. 8,852,595 SEQ ID NO: 95 | 24366 |
| | region | | | |
| INFL864 | Light chain variable | CR11035 | U.S. Pat. No. 8,852,595 SEQ ID NO: 103 | 24367 |
| | region | | | |
| INFL865 | Light chain variable | CR11036 | U.S. Pat. No. 8,852,595 SEQ ID NO: 107 | 24368 |
| | region | | | |
| INFL866 | Light chain variable | CR11038 | U.S. Pat. No. 8,852,595 SEQ ID NO: 111 | 24369 |
| | region | | | |
| INFL867 | Light chain variable | CR11039 | U.S. Pat. No. 8,852,595 SEQ ID NO: 115 | 24370 |
| | region | | | |
| INFL868 | Light chain variable | CR8031 | U.S. Pat. No. 8,852,595 SEQ ID NO: 121 | 24371 |
| | region | | | |
| INFL869 | Light chain variable | CR8032 | U.S. Pat. No. 8,852,595 SEQ ID NO: 125 | 24372 |
| | region | | | |
| INFL870 | Light chain variable | CR8034 | U.S. Pat. No. 8,852,595 SEQ ID NO: 129 | 24373 |
| | region | | | |
| INFL871 | Light chain variable | | U.S. Pat. No. 8,992,929 SEQ ID NO: 2 | 24374 |
| | region | | | |
| INFL872 | Light chain variable | M2e | U.S. Pat. No. 8,420,794 SEQ ID NO: 1 | 24375 |
| | region | | | |
| INFL873 | Light chain variable | | U.S. Pat. No. 8,715,743, US20140275492 SEQ ID | 24376 |
| | region | | NO: 16 | |
| INFL874 | Light chain variable | | U.S. Pat. No. 8,715,743, US20140275492 SEQ ID | 24377 |
| | region | | NO: 19 | |
| INFL875 | Light chain variable | | U.S. Pat. No. 8,715,743, US20140275492 SEQ ID | 24378 |
| | region | | NO: 32 | |
| INFL876 | Light chain variable | anti-1918 influenza | Yu, X., et al., Neutralizing antibodies | 24379 |
| | region | HA Ig | derived from the B cells of 1918 | |
| | | | influenza pandemic survivors; Nature | |
| | | | 455 (7212), 532-536 (2008), NCBI | |
| | | | Accession #ACI04582.1 (121aa) | |
| INFL877 | Light chain variable | anti-1918 influenza | Yu, X., et al., Neutralizing antibodies | 24380 |
| | region | HA Ig | derived from the B cells of 1918 | |
| | | | influenza pandemic survivors; Nature | |
| | | | 455 (7212), 532-536 (2008), NCBI | |
| | | | Accession #ACI04580.1 (118aa) | |
| INFL878 | Light chain variable | 4D20 | Yu, X. et al “Neutralizing antibodies | 24381 |
| | region | | derived from the B cells of 1918 | |
| | | | influenza pandemic survivors”, Nature | |
| | | | 455 (7212), 532-536, NCBI Accession | |
| | | | #ACI04580 | |
| INFL879 | Light chain variable | 2B12 | Yu, X. et al “Neutralizing antibodies | 24382 |
| | region | | derived from the B cells of 1918 | |
| | | | influenza pandemic survivors”, Nature | |
| | | | 455 (7212), 532-536, NCBI Accession | |
| | | | #ABY48869 | |
| INFL880 | Light chain variable | TCN-535 | US20150086555 SEQ ID NO: 180 | 24383 |
| | region | (5246_P19) | | |
| INFL881 | Light chain variable | TCN-536 | US20150086555 SEQ ID NO: 191 | 24384 |
| | region | (5095_N01) | | |
| INFL882 | Light chain variable | TCN-537 | US20150086555 SEQ ID NO: 202 | 24385 |
| | region | (3194_D21) | | |
| INFL883 | Light chain variable | TCN-538 | US20150086555 SEQ ID NO: 214 | 24386 |
| | region | (3206_O17) | | |
| INFL884 | Light chain variable | TCN-539 | US20150086555 SEQ ID NO: 226 | 24387 |
| | region | (5056_A08) | | |
| INFL885 | Light chain variable | TCN-540 | US20150086555 SEQ ID NO: 238 | 24388 |
| | region | (5060_F05) | | |
| INFL886 | Light chain variable | TCN-541 | US20150086555 SEQ ID NO: 250 | 24389 |
| | region | (5062_M11) | | |
| INFL887 | Light chain variable | TCN-542 | US20150086555 SEQ ID NO: 262 | 24390 |
| | region | (5079_A16) | | |
| INFL888 | Light chain variable | TCN-543 | US20150086555 SEQ ID NO: 274 | 24391 |
| | region | (5081_G23) | | |
| INFL889 | Light chain variable | TCN-544 | US20150086555 SEQ ID NO: 286 | 24392 |
| | region | (5082_A19) | | |
| INFL890 | Light chain variable | TCN-545 | US20150086555 SEQ ID NO: 298 | 24393 |
| | region | (5082_I15) | | |
| INFL891 | Light chain variable | TCN-546 | US20150086555 SEQ ID NO: 309 | 24394 |
| | region | (5089_L08) | | |
| INFL892 | Light chain variable | TCN-547 | US20150086555 SEQ ID NO: 320 | 24395 |
| | region | (5092_F11) | | |
| INFL893 | Light chain variable | TCN-548 | US20150086555 SEQ ID NO: 331 | 24396 |
| | region | (5092_P01) | | |
| INFL894 | Light chain variable | TCN-549 | US20150086555 SEQ ID NO: 342 | 24397 |
| | region | (5092_P04) | | |
| INFL895 | Light chain variable | TCN-550 | US20150086555 SEQ ID NO: 353 | 24398 |
| | region | (5096_F06) | | |
| INFL896 | Light chain variable | TCN-551 | US20150086555 SEQ ID NO: 365 | 24399 |
| | region | (5243_D01) | | |
| INFL897 | Light chain variable | TCN-552 | US20150086555 SEQ ID NO: 377 | 24400 |
| | region | (5249_I23) | | |
| INFL898 | Light chain variable | TCN-553 | US20150086555 SEQ ID NO: 389 | 24401 |
| | region | (5261_C18) | | |
| INFL899 | Light chain variable | TCN-554 | US20150086555 SEQ ID NO: 399 | 24402 |
| | region | (5277_M05) | | |
| INFL900 | Light chain variable | TCN-555 | US20150086555 SEQ ID NO: 405 | 24403 |
| | region | (5246_L16) | | |
| INFL901 | Light chain variable | TCN-556 | US20150086555 SEQ ID NO: 415 | 24404 |
| | region | (5089_K12) | | |
| INFL902 | Light chain variable | TCN-557 | US20150086555 SEQ ID NO: 427 | 24405 |
| | region | (5081_A04) | | |
| INFL903 | Light chain variable | TCN-559 | US20150086555 SEQ ID NO: 441 | 24406 |
| | region | (5097_G08) | | |
| INFL904 | Light chain variable | TCN-560 | US20150086555 SEQ ID NO: 453 | 24407 |
| | region | (5084_P10) | | |
| INFL905 | Light chain variable | TCN-564 | US20150086555 SEQ ID NO: 519 | 24408 |
| | region | (5256_A17b) | | |
| INFL906 | Light chain variable | CR8001 | WO2010130636 SEQ ID NO: 4 | 24409 |
| | region | | | |
| INFL907 | Light chain variable | CR8003 | WO2010130636 SEQ ID NO: 8 | 24410 |
| | region | | | |
| INFL908 | Light chain variable | CR8015 | WO2010130636 SEQ ID NO: 12 | 24411 |
| | region | | | |
| INFL909 | Light chain variable | CR8016 | WO2010130636 SEQ ID NO: 16 | 24412 |
| | region | | | |
| INFL910 | Light chain variable | CR8017 | WO2010130636 SEQ ID NO: 20 | 24413 |
| | region | | | |
| INFL911 | Light chain variable | TCN-522 | US20150086555 SEQ ID NO: 40 | 24414 |
| | region | (3212_I12) | | |
| INFL912 | Light chain variable | TCN-521 | US20150086555 SEQ ID NO: 28 | 24415 |
| | region | (3280_D18) | | |
| INFL913 | Light chain variable | TCN-523 | US20150086555 SEQ ID NO: 52 | 24416 |
| | region | (5248_A17), | | |
| | | TCN-533 | | |
| | | (5256_A17a), | | |
| | | TCN-534 | | |
| | | (5249_B02) | | |
| INFL914 | Light chain variable | TCN-563 | US20150086555 SEQ ID NO: 64 | 24417 |
| | region | (5237_B21) | | |
| INFL915 | Light chain variable | TCN-526 | US20150086555 SEQ ID NO: 76 | 24418 |
| | region | (5084_C17) | | |
| INFL916 | Light chain variable | TCN-527 | US20150086555 SEQ ID NO: 88 | 24419 |
| | region | (5086_C06) | | |
| INFL917 | Light chain variable | TCN-528 | US20150086555 SEQ ID NO: 100 | 24420 |
| | region | (5087_P17) | | |
| INFL918 | Light chain variable | TCN-529 | US20150086555 SEQ ID NO: 112 | 24421 |
| | region | (5297_H01) | | |
| INFL919 | Light chain variable | TCN-530 | US20150086555 SEQ ID NO: 124 | 24422 |
| | region | (5248_H10), | | |
| | | TCN-558 | | |
| | | (5248_H10b) | | |
| INFL920 | Light chain variable | TCN-531 | US20150086555 SEQ ID NO: 136 | 24423 |
| | region | (5091_H13) | | |
| INFL921 | Light chain variable | TCN-532 | US20150086555 SEQ ID NO: 148 | 24424 |
| | region | (5262_H18) | | |
| INFL922 | Light chain variable | TCN-534 | US20150086555 SEQ ID NO: 168 | 24425 |
| | region | (5249_B02) | | |
| INFL923 | Light chain variable | TCN-504 | US20150086555 SEQ ID NO: 524 | 24426 |
| | region | (3251_K17) | | |
| INFL924 | Light chain variable | AB1 | US20120093834, WO2009121004 SEQ | 24427 |
| | region | | ID NO: 71 | |
| INFL925 | Light chain variable | AB2 | US20120093834, WO2009121004 SEQ | 24428 |
| | region | | ID NO: 140 | |
| INFL926 | Light chain variable | AB3 | US20120093834, WO2009121004 SEQ | 24429 |
| | region | | ID NO: 81 | |
| INFL927 | Light chain variable | AB4 | US20120093834, WO2009121004 SEQ | 24430 |
| | region | | ID NO: 158 | |
| INFL928 | Light chain variable | AB5 | US20120093834, WO2009121004 SEQ | 24431 |
| | region | | ID NO: 159 | |
| INFL929 | Light chain variable | AB6 | US20120093834, WO2009121004 SEQ | 24432 |
| | region | | ID NO: 160 | |
| INFL930 | Light chain variable | VN04-2 | WO2008033105 SEQ ID NO: 6 | 24433 |
| | region | | | |
| INFL931 | Light chain variable | VN04-3 | WO2008033105 SEQ ID NO: 8 | 24434 |
| | region | | | |
| INFL932 | Light chain variable | 1286-C05 | WO2010132604, US20120128671 SEQ | 24435 |
| | region | | ID NO: 3 | |
| INFL933 | Light chain variable | 1286-C05 | WO2010132604, US20120128671 SEQ | 24436 |
| | region | | ID NO: 4 | |
| INFL934 | Light chain variable | 1286-C05 | WO2010132604, US20120128671 SEQ | 24437 |
| | region | | ID NO: 5 | |
| INFL935 | Light chain variable | 1286-A11 | WO2010132604, US20120128671 SEQ | 24438 |
| | region | | ID NO: 6 | |
| INFL936 | Light chain variable | IA2 | WO2015028478 SEQ ID NO: 3 | 24439 |
| | region mouse IgG | | | |
| INFL937 | Light chain variable | 7B8 | WO2015028478 SEQ ID NO: 5 | 24440 |
| | region mouse IgG | | | |
| INFL938 | Light chain variable | monoclonal | U.S. Pat. No. 8,900,590, US2012039899, Grandea, | 24441 |
| | region, partial | antibody TCN-031 | A. G. et al., Human antibodies reveal a | |
| | | | protective epitope that is highly | |
| | | | conserved among human and nonhuman | |
| | | | influenza A viruses; Proc. Natl. Acad. | |
| | | | Set. U.S.A. 107 (28), 12658-12663 | |
| | | | (2010), NCBI Accession #ADK23871.1 | |
| | | | (106aa) | |
| INFL939 | Light chain variable | monoclonal | Grandea, A. G. et al., Human antibodies | 24442 |
| | region, partial | antibody TCN-032 | reveal a protective epitope that is highly | |
| | | | conserved among human and nonhuman | |
| | | | influenza A viruses; Proc. Natl. Acad. | |
| | | | Sci. U.S.A. 107 (28), 12658-12663 | |
| | | | (2010), NCBI Accession #ADK23870.1 | |
| | | | (107aa) | |
| INFL940 | Light chain variable | monoclonal | Grandea, A. G. et al., Human antibodies | 24443 |
| | region, partial | antibody 3362_B11 | reveal a protective epitope that is highly | |
| | | | conserved among human and nonhuman | |
| | | | influenza A viruses; Proc. Natl. Acad. | |
| | | | Sci. U.S.A. 107 (28), 12658-12663 | |
| | | | (2010), NCBI Accession # ADK23886.1 | 24444 |
| | | | (107aa) | |
| INFL941 | Light chain variable | monoclonal | Grandea, A. G. et al., Human antibodies | 24445 |
| | region, partial | antibody | reveal a protective epitope that is highly | |
| | | 3260_D19 | conserved among human and nonhuman | |
| | | | influenza A viruses; Proc. Natl. Acad. | |
| | | | Sci. U.S.A. 107 (28), 12658-12663 | |
| | | | (2010), NCBI Accession #ADK23885.1 | |
| | | | (106aa) | |
| INFL942 | Light chain variable | monoclonal | Grandea, A. G. et al., Human antibodies | 24446 |
| | region, partial | antibody 3253_P10 | reveal a protective epitope that is highly | |
| | | | conserved among human and nonhuman | |
| | | | influenza A viruses; Proc. Natl. Acad. | |
| | | | Sci. U.S.A. 107 (28), 12658-12663 | |
| | | | (2010), NCBI Accession | |
| | | | #ADK23884.1(107aa) | |
| INFL943 | Light chain variable | monoclonal | Grandea, A. G. et al., Human antibodies | 24447 |
| | region, partial | antibody 3248_P18 | reveal a protective epitope that is highly | |
| | | | conserved among human and nonhuman | |
| | | | influenza A viruses; Proc. Natl. Acad. | |
| | | | Sci. U.S.A. 107 (28), 12658-12663 | |
| | | | (2010), NCBI Accession #ADK23883.1 | |
| | | | (106aa) | |
| INFL944 | Light chain variable | monoclonal | Grandea, A. G. et al., Human antibodies | 24448 |
| | region, partial | antibody 3139_P23 | reveal a protective epitope that is highly | |
| | | | conserved among human and nonhuman | |
| | | | influenza A viruses; Proc. Natl. Acad. | |
| | | | Sci. U.S.A. 107 (28), 12658-12663 | |
| | | | (2010), NCBI Accession | |
| | | | #ADK23882.1(107aa) | |
| INFL945 | Light chain variable | monoclonal | Grandea, A. G. et al., Human antibodies | 24449 |
| | region, partial | antibody 3420_I23 | reveal a protective epitope that is highly | |
| | | | conserved among human and nonhuman | |
| | | | influenza A viruses; Proc. Natl. Acad. | |
| | | | Sci. U.S.A. 107 (28), 12658-12663 | |
| | | | (2010), NCBI Accession | |
| | | | #ADK23881.1(108aa) | |
| INFL946 | Light chain variable | monoclonal | Grandea, A. G. et al., Human antibodies | 24450 |
| | region, partial | antibody 3255_J06 | reveal a protective epitope that is highly | |
| | | | conserved among human and nonhuman | |
| | | | influenza A viruses; Proc. Natl. Acad. | |
| | | | Sci. U.S.A. 107 (28), 12658-12663 | |
| | | | (2010), NCBI Accession | |
| | | | #ADK23880.1(108aa) | |
| INFL947 | Light chain variable | monoclonal | Grandea, A. G. et al., Human antibodies | 24451 |
| | region, partial | antibody 3252_C13 | reveal a protective epitope that is highly | |
| | | | conserved among human and nonhuman | |
| | | | influenza A viruses; Proc. Natl. Acad. | |
| | | | Sci. U.S.A. 107 (28), 12658-12663 | |
| | | | (2010), NCBI Accession #ADK23879.1 | |
| | | | (108aa) | |
| INFL948 | Light chain variable | monoclonal | Grandea, A. G. et al., Human antibodies | 24452 |
| | region, partial | antibody | reveal a protective epitope that is highly | |
| | | 3136_G05 | conserved among human and nonhuman | |
| | | | influenza A viruses; Proc. Natl. Acad. | |
| | | | Sci. U.S.A. 107 (28), 12658-12663 | |
| | | | (2010), NCBI Accession #ADK23878.1 | |
| | | | (108aa) | |
| INFL949 | Light chain variable | monoclonal | Grandea, A. G. et al., Human antibodies | 24453 |
| | region, partial | antibody | reveal a protective epitope that is highly | |
| | | 3244_H04 | conserved among human and nonhuman | |
| | | | influenza A viruses; Proc. Natl. Acad. | |
| | | | Sci. U.S.A. 107 (28), 12658-12663 | |
| | | | (2010), NCBI Accession #ADK23877.1 | |
| | | | (107aa) | |
| INFL950 | Light chain variable | monoclonal | Grandea, A. G. et al., Human antibodies | 24454 |
| | region, partial | antibody | reveal a protective epitope that is highly | |
| | | 3245_O19 | conserved among human and nonhuman | |
| | | | influenza A viruses; Proc. Natl. Acad. | |
| | | | Sci. U.S.A. 107 (28), 12658-12663 | |
| | | | (2010), NCBI Accession #ADK23876.1 | |
| | | | (107aa) | |
| INFL951 | Light chain variable | monoclonal | Grandea, A. G. et al., Human antibodies | 24455 |
| | region, partial | antibody 3259_J21 | reveal a protective epitope that is highly | |
| | | | conserved among human and nonhuman | |
| | | | influenza A viruses; Proc. Natl. Acad. | |
| | | | Sci. U.S.A. 107 (28), 12658-12663 | |
| | | | (2010), NCBI Accession #ADK23875.1 | |
| | | | (107aa) | |
| INFL952 | Light chain variable | monoclonal | Grandea, A. G. et al., Human antibodies | 24456 |
| | region, partial | antibody 3243_J07 | reveal a protective epitope that is highly | |
| | | | conserved among human and nonhuman | |
| | | | influenza A viruses; Proc. Natl. Acad. | |
| | | | Sci. U.S.A. 107 (28), 12658-12663 | |
| | | | (2010), NCBI Accession #ADK23874.1 | |
| | | | (108aa) | |
| INFL953 | Light chain variable | monoclonal | Grandea, A. G. et al., Human antibodies | 24457 |
| | region, partial | antibody 3244_I10 | reveal a protective epitope that is highly | |
| | | | conserved among human and nonhuman | |
| | | | influenza A viruses; Proc. Natl. Acad. | |
| | | | Sci. U.S.A. 107 (28), 12658-12663 | |
| | | | (2010), NCBI Accession #ADK23873.1 | |
| | | | (108aa) | |
| INFL954 | Light chain variable | monoclonal | Grandea, A. G. et al., Human antibodies | 24458 |
| | region, partial | antibody | reveal a protective epitope that is highly | |
| | | 3241_G23 | conserved among human and nonhuman | |
| | | | influenza A viruses; Proc. Natl. Acad. | |
| | | | Sci. U.S.A. 107 (28), 12658-12663 | |
| | | | (2010), NCBI Accession #ADK23872.1 | |
| | | | (108aa) | |
| INFL955 | Light chain variable | 100F4-LV | Hu, H., et al., A Human Antibody | 24459 |
| | region, partial | | Recognizing a Conserved Epitope of H5 | |
| | | | Hemagglutinin Broadly Neutralizes | |
| | | | Highly Pathogenic Avian Influenza | |
| | | | H5N1 Viruses; J. Virol. 86 (6), 2978- | |
| | | | 2989 (2012), NCBI Accession | |
| | | | #AEL30604.1 (112aa) | |
| INFL956 | Light Chain, Fab | ch65 | Whittle, J. R. et al., Broadly neutralizing | 24460 |
| | Fragment | | human antibody that recognizes the | |
| | | | receptor-binding pocket of influenza | |
| | | | virus hemagglutinin; Proc. Natl. Acad. | |
| | | | Sci. U.S.A. 108 (34), 14216-14221 | |
| | | | (2011), NCBI Accession #3SM5_L | |
| INFL957 | Light chain | 1I20 | WO2010127252, U.S. Pat. No. 8,894,997 SEQ ID | 24461 |
| | | | NO: 6 | |
| INFL958 | Light chain | | WO2010127252, U.S. Pat. No. 8,894,997 SEQ ID | 24462 |
| | | | NO: 12 | |
| INFL959 | Monoclonal antibody | Neutralizing | Wu, Y. et al., A potent broad-spectrum | 24463 |
| | heavy chain | Human | protective human monoclonal antibody | |
| | | Monoclonal | crosslinking two hemagglutinin | |
| | | Antibody With | monomers of influenza A virus; Nat | |
| | | 1968 H3 Ha | Commun 6, 7708 (2015), NCBI | |
| | | | Accession #4UBD_C | |
| INFL960 | Monoclonal antibody | Neutralizing | Wu, Y. et al., A potent broad-spectrum | 24464 |
| | light chain | Human | protective human monoclonal antibody | |
| | | Monoclonal | crosslinking two hemagglutinin | |
| | | Antibody With | monomers of influenza A virus; Nat | |
| | | 1968 H3 Ha | Commun 6, 7708 (2015), NCBI | |
| | | | Accession #4UBD_D | |
| INFL961 | Mutated heavy chain | 8G9 mutated | U.S. Pat. No. 8,603,467 SEQ ID NO: 42 | 24465 |
| | variable | | | |
| INFL962 | Mutated heavy chain | 13D4 mutated | U.S. Pat. No. 8,603,467 SEQ ID NO: 46 | 24466 |
| | variable (VH-LV) | | | |
| INFL963 | Mutated heavy chain | 13D4 mutated | U.S. Pat. No. 8,603,467 SEQ ID NO: 44 | 24467 |
| | variable (VH-SV) | | | |
| INFL964 | Nanobody | 202-C8 | US20110182897, WO2009147248 SEQ | 24468 |
| | | | ID NO: 138 | |
| INFL965 | Nanobody | 203-B12 | US20110182897, WO2009147248 SEQ | 24469 |
| | | | ID NO: 2439 | |
| INFL966 | Nanobody | 203-H9 | US20110182897, WO2009147248 SEQ | 24470 |
| | | | ID NO: 2445 | |
| INFL967 | Scfv | JM7_B-G7 | WO2012072788 SEQ ID NO: 7 | 24471 |
| INFL968 | Scfv | JM7_S-F8 | WO2012072788 SEQ ID NO: 15 | 24472 |
| INFL969 | Scfv | JM7JH-F1 | WO2012072788 SEQ ID NO: 17 | 24473 |
| INFL970 | Scfv | JM7_S-A9 | WO2012072788 SEQ ID NO: 19 | 24474 |
| INFL971 | Scfv | JM7_S-A10 | WO2012072788 SEQ ID NO: 21 | 24475 |
| INFL972 | Scfv | JM7_B-H | WO2012072788 SEQ ID NO: 23 | 24476 |
| INFL973 | Scfv | JM6_SC-H1 | WO2012072788 SEQ ID NO: 25 | 24477 |
| INFL974 | Scfv | jM6_SC_D3 | WO2012072788 SEQ ID NO: 27 | 24478 |
| INFL975 | Scfv | H2526 | Schmidt, A. G. et al., Viral receptor- | 24479 |
| | | | binding site antibodies with diverse | |
| | | | germline origins; Cell 161 (5), 1026- | |
| | | | 1034 (2015), NCBI Accession #4YJZ_L | |
| INFL976 | Scfv fragment | AVC4 | WO2010040572A2 FIG. 6 | 24480 |
| INFL977 | Scfv fragment | AVD1 | WO2010040572A2 FIG. 8 | 24481 |
| INFL978 | Scfv fragment | AVE2 | WO2010040572A2 FIG. 10 | 24482 |
| INFL979 | Scfv fragment | AVA6 | WO2010040572A2 FIG. 12 | 24483 |
| INFL980 | Scfv fragment | AVG4 | WO2010040572A2 FIG. 14 | 24484 |
| INFL981 | Scfv heavy chain | SC06-141 | US20150104459 SEQ ID NO: 309 | 24485 |
| | variable region | | | |
| INFL982 | Scfv heavy chain | SC06-255 | US20150104459 SEQ ID NO: 313 | 24486 |
| | variable region | | | |
| INFL983 | Scfv heavy chain | SC06-257 | US20150104459 SEQ ID NO: 317 | 24487 |
| | variable region | | | |
| INFL984 | Scfv heavy chain | SC6-260 | US20150104459 SEQ ID NO: 321 | 24488 |
| | variable region | | | |
| INFL985 | Scfv heavy chain | SC06-261 | US20150104459 SEQ ID NO: 325 | 24489 |
| | variable region | | | |
| INFL986 | Scfv heavy chain | SC06-262 | US20150104459 SEQ ID NO: 329 | 24490 |
| | variable region | | | |
| INFL987 | Scfv heavy chain | SC06-268 | US20150104459 SEQ ID NO: 333 | 24491 |
| | variable region | | | |
| INFL988 | Scfv heavy chain | SC06-272 | US20150104459 SEQ ID NO: 337 | 24492 |
| | variable region | | | |
| INFL989 | Scfv heavy chain | SC06-296 | US20150104459 SEQ ID NO: 341 | 24493 |
| | variable region | | | |
| INFL990 | Scfv heavy chain | SC06-301 | US20150104459 SEQ ID NO: 345 | 24494 |
| | variable region | | | |
| INFL991 | Scfv heavy chain | SC06-307 | US20150104459 SEQ ID NO: 349 | 24495 |
| | variable region | | | |
| INFL992 | Scfv heavy chain | SC06-310 | US20150104459 SEQ ID NO: 353 | 24496 |
| | variable region | | | |
| INFL993 | Scfv heavy chain | SC06-314 | US20150104459 SEQ ID NO: 357 | 24497 |
| | variable region | | | |
| INFL994 | Scfv heavy chain | SC06-323 | US20150104459 SEQ ID NO: 361 | 24498 |
| | variable region | | | |
| INFL995 | Scfv heavy chain | SC06-325 | US20150104459 SEQ ID NO: 365 | 24499 |
| | variable region | | | |
| INFL996 | Scfv heavy chain | SC06-327 | US20150104459 SEQ ID NO: 369 | 24500 |
| | variable region | | | |
| INFL997 | Scfv heavy chain | SC06-328 | US20150104459 SEQ ID NO: 373 | 24501 |
| | variable region | | | |
| INFL998 | Scfv heavy chain | SC06-329 | US20150104459 SEQ ID NO: 377 | 24502 |
| | variable region | | | |
| INFL999 | Scfv heavy chain | SC06-331 | US20150104459 SEQ ID NO: 381 | 24503 |
| | variable region | | | |
| INFL1000 | Scfv heavy chain | SC06-332 | US20150104459 SEQ ID NO: 385 | 24504 |
| | variable region | | | |
| INFL1001 | Scfv heavy chain | SC06-334 | US20150104459 SEQ ID NO: 389 | 24505 |
| | variable region | | | |
| INFL1002 | Scfv heavy chain | SC06-336 | US20150104459 SEQ ID NO: 393 | 24506 |
| | variable region | | | |
| INFL1003 | Scfv heavy chain | SC06-339 | US20150104459 SEQ ID NO: 397 | 24507 |
| | variable region | | | |
| INFL1004 | Scfv heavy chain | SC06-342 | US20150104459 SEQ ID NO: 401 | 24508 |
| | variable region | | | |
| INFL1005 | Scfv heavy chain | SC06-343 | US20150104459 SEQ ID NO: 405 | 24509 |
| | variable region | | | |
| INFL1006 | Scfv heavy chain | SC06-344 | US20150104459 SEQ ID NO: 409 | 24510 |
| | variable region | | | |
| INFL1007 | Scfv heavy chain | CR6255 | US20150104459 SEQ ID NO: 417 | 24511 |
| | variable region | | | |
| INFL1008 | Scfv heavy chain | CR6257 | US20150104459 SEQ ID NO: 423 | 24512 |
| | variable region | | | |
| INFL1009 | Scfv heavy chain | CR6260 | US20150104459 SEQ ID NO: 429 | 24513 |
| | variable region | | | |
| INFL1010 | Scfv heavy chain | CR6261 | US20150104459 SEQ ID NO: 435 | 24514 |
| | variable region | | | |
| INFL1011 | Scfv heavy chain | CR6262 | US20150104459 SEQ ID NO: 441 | 24515 |
| | variable region | | | |
| INFL1012 | Scfv heavy chain | CR6268 | US20150104459 SEQ ID NO: 447 | 24516 |
| | variable region | | | |
| INFL1013 | Scfv heavy chain | CR6272 | US20150104459 SEQ ID NO: 453 | 24517 |
| | variable region | | | |
| INFL1014 | Scfv heavy chain | CR696 | US20150104459 SEQ ID NO: 459 | 24518 |
| | variable region | | | |
| INFL1015 | Scfv heavy chain | CR6301 | US20150104459 SEQ ID NO: 465 | 24519 |
| | variable region | | | |
| INFL1016 | Scfv heavy chain | CR6307 | US20150104459 SEQ ID NO: 471 | 24520 |
| | variable region | | | |
| INFL1017 | Scfv heavy chain | CR6310 | US20150104459 SEQ ID NO: 477 | 24521 |
| | variable region | | | |
| INFL1018 | Scfv heavy chain | CR6314 | US20150104459 SEQ ID NO: 483 | 24522 |
| | variable region | | | |
| INFL1019 | Scfv heavy chain | CR6323 | US20150104459 SEQ ID NO: 489 | 24523 |
| | variable region | | | |
| INFL1020 | Scfv heavy chain | CR6325 | US20150104459 SEQ ID NO: 495 | 24524 |
| | variable region | | | |
| INFL1021 | Scfv heavy chain | CR6327 | US20150104459 SEQ ID NO: 501 | 24525 |
| | variable region | | | |
| INFL1022 | Scfv heavy chain | CR6328 | US20150104459 SEQ ID NO: 507 | 24526 |
| | variable region | | | |
| INFL1023 | Scfv heavy chain | CR6329 | US20150104459 SEQ ID NO: 513 | 24527 |
| | variable region | | | |
| INFL1024 | Scfv heavy chain | CR6331 | US20150104459 SEQ ID NO: 519 | 24528 |
| | variable region | | | |
| INFL1025 | Scfv heavy chain | CR6332 | US20150104459 SEQ ID NO: 525 | 24529 |
| | variable region | | | |
| INFL1026 | Scfv heavy chain | CR6334 | US20150104459 SEQ ID NO: 531 | 24530 |
| | variable region | | | |
| INFL1027 | Scfv heavy chain | CR6336 | US20150104459 SEQ ID NO: 537 | 24531 |
| | variable region | | | |
| INFL1028 | Scfv heavy chain | CR6339 | US20150104459 SEQ ID NO: 543 | 24532 |
| | variable region | | | |
| INFL1029 | Scfv heavy chain | CR6342 | US20150104459 SEQ ID NO: 550 | 24533 |
| | variable region | | | |
| INFL1030 | Scfv heavy chain | CR6343 | US20150104459 SEQ ID NO: 556 | 24534 |
| | variable region | | | |
| INFL1031 | Scfv heavy chain | CR6344 | US20150104459 SEQ ID NO: 562 | 24535 |
| | variable region | | | |
| INFL1032 | Scfv light chain | SC06-141 | US20150104459 SEQ ID NO: 310 | 24536 |
| | variable region | | | |
| INFL1033 | Scfv light chain | SC06-255 | US20150104459 SEQ ID NO: 314 | 24537 |
| | variable region | | | |
| INFL1034 | Scfv light chain | SC06-257 | US20150104459 SEQ ID NO: 318 | 24538 |
| | variable region | | | |
| INFL1035 | Scfv light chain | SC6-260 | US20150104459 SEQ ID NO: 322 | 24539 |
| | variable region | | | |
| INFL1036 | Scfv light chain | SC06-261 | US20150104459 SEQ ID NO: 326 | 24540 |
| | variable region | | | |
| INFL1037 | Scfv light chain | SC06-262 | US20150104459 SEQ ID NO: 330 | 24541 |
| | variable region | | | |
| INFL1038 | Scfv light chain | SC06-268 | US20150104459 SEQ ID NO: 334 | 24542 |
| | variable region | | | |
| INFL1039 | Scfv light chain | SC06-272 | US20150104459 SEQ ID NO: 338 | 24543 |
| | variable region | | | |
| INFL1040 | Scfv light chain | SC06-296 | US20150104459 SEQ ID NO: 342 | 24544 |
| | variable region | | | |
| INFL1041 | Scfv light chain | SC06-301 | US20150104459 SEQ ID NO: 346 | 24545 |
| | variable region | | | |
| INFL1042 | Scfv light chain | SC06-307 | US20150104459 SEQ ID NO: 350 | 24546 |
| | variable region | | | |
| INFL1043 | Scfv light chain | SC06-310 | US20150104459 SEQ ID NO: 354 | 24547 |
| | variable region | | | |
| INFL1044 | Scfv light chain | SC06-314 | US20150104459 SEQ ID NO: 358 | 24548 |
| | variable region | | | |
| INFL1045 | Scfv light chain | SC06-323 | US20150104459 SEQ ID NO: 362 | 24549 |
| | variable region | | | |
| INFL1046 | Scfv light chain | SC06-325 | US20150104459 SEQ ID NO: 366 | 24550 |
| | variable region | | | |
| INFL1047 | Scfv light chain | SC06-327 | US20150104459 SEQ ID NO: 370 | 24551 |
| | variable region | | | |
| INFL1048 | Scfv light chain | SC06-328 | US20150104459 SEQ ID NO: 374 | 24552 |
| | variable region | | | |
| INFL1049 | Scfv light chain | SC06-329 | US20150104459 SEQ ID NO: 378 | 24553 |
| | variable region | | | |
| INFL1050 | Scfv light chain | SC06-331 | US20150104459 SEQ ID NO: 382 | 24554 |
| | variable region | | | |
| INFL1051 | Scfv light chain | SC06-332 | US20150104459 SEQ ID NO: 386 | 24555 |
| | variable region | | | |
| INFL1052 | Scfv light chain | SC06-334 | US20150104459 SEQ ID NO: 390 | 24556 |
| | variable region | | | |
| INFL1053 | Scfv light chain | SC06-336 | US20150104459 SEQ ID NO: 394 | 24557 |
| | variable region | | | |
| INFL1054 | Scfv light chain | SC06-339 | US20150104459 SEQ ID NO: 398 | 24558 |
| | variable region | | | |
| INFL1055 | Scfv light chain | SC06-342 | US20150104459 SEQ ID NO: 402 | 24559 |
| | variable region | | | |
| INFL1056 | Scfv light chain | SC06-343 | US20150104459 SEQ ID NO: 406 | 24560 |
| | variable region | | | |
| INFL1057 | Scfv light chain | SC06-344 | US20150104459 SEQ ID NO: 410 | 24561 |
| | variable region | | | |
| INFL1058 | Scfv light chain | CR6141 | US20150104459 SEQ ID NO: 414 | 24562 |
| | variable region | | | |
| INFL1059 | Scfv light chain | CR6255 | US20150104459 SEQ ID NO: 420 | 24563 |
| | variable region | | | |
| INFL1060 | Scfv light chain | CR6257 | US20150104459 SEQ ID NO: 426 | 24564 |
| | variable region | | | |
| INFL1061 | Scfv light chain | CR6260 | US20150104459 SEQ ID NO: 432 | 24565 |
| | variable region | | | |
| INFL1062 | Scfv light chain | CR6261 | US20150104459 SEQ ID NO: 438 | 24566 |
| | variable region | | | |
| INFL1063 | Scfv light chain | CR6262 | US20150104459 SEQ ID NO: 444 | 24567 |
| | variable region | | | |
| INFL1064 | Scfv light chain | CR6268 | US20150104459 SEQ ID NO: 450 | 24568 |
| | variable region | | | |
| INFL1065 | Scfv light chain | CR6272 | US20150104459 SEQ ID NO: 456 | 24569 |
| | variable region | | | |
| INFL1066 | Scfv light chain | CR696 | US20150104459 SEQ ID NO: 462 | 24570 |
| | variable region | | | |
| INFL1067 | Scfv light chain | CR6301 | US20150104459 SEQ ID NO: 468 | 24571 |
| | variable region | | | |
| INFL1068 | Scfv light chain | CR6307 | US20150104459 SEQ ID NO: 474 | 24572 |
| | variable region | | | |
| INFL1069 | Scfv light chain | CR6310 | US20150104459 SEQ ID NO: 480 | 24573 |
| | variable region | | | |
| INFL1070 | Scfv light chain | CR6314 | US20150104459 SEQ ID NO: 486 | 24574 |
| | variable region | | | |
| INFL1071 | Scfv light chain | CR6323 | US20150104459 SEQ ID NO: 492 | 24575 |
| | variable region | | | |
| INFL1072 | Scfv light chain | CR6325 | US20150104459 SEQ ID NO: 498 | 24576 |
| | variable region | | | |
| INFL1073 | Scfv light chain | CR6327 | US20150104459 SEQ ID NO: 504 | 24577 |
| | variable region | | | |
| INFL1074 | Scfv light chain | CR6328 | US20150104459 SEQ ID NO: 510 | 24578 |
| | variable region | | | |
| INFL1075 | Scfv light chain | CR6329 | US20150104459 SEQ ID NO: 516 | 24579 |
| | variable region | | | |
| INFL1076 | Scfv light chain | CR6331 | US20150104459 SEQ ID NO: 522 | 24580 |
| | variable region | | | |
| INFL1077 | Scfv light chain | CR6332 | US20150104459 SEQ ID NO: 528 | 24581 |
| | variable region | | | |
| INFL1078 | Scfv light chain | CR6334 | US20150104459 SEQ ID NO: 534 | 24582 |
| | variable region | | | |
| INFL1079 | Scfv light chain | CR6336 | US20150104459 SEQ ID NO: 540 | 24583 |
| | variable region | | | |
| INFL1080 | Scfv light chain | CR6339 | US20150104459 SEQ ID NO: 547 | 24584 |
| | variable region | | | |
| INFL1081 | Scfv light chain | CR6342 | US20150104459 SEQ ID NO: 553 | 24585 |
| | variable region | | | |
| INFL1082 | Scfv light chain | CR6343 | US20150104459 SEQ ID NO: 559 | 24586 |
| | variable region | | | |
| INFL1083 | Scfv light chain | CR6344 | US20150104459 SEQ ID NO: 565 | 24587 |
| | variable region | | | |
| INFL1084 | Vhch antibody | 641 I-9 | Schmidt, A. G. et al., Viral receptor- | 24588 |
| | | | binding site antibodies with diverse | |
| | | | germline origins; Cell 161 (5), 1026- | |
| | | | 1034 (2015), NCBI Accession #4YK4_Z | |
| INFL1085 | Vlcl antibody | 641 I-9 | Schmidt, A. G. et al., Viral receptor- | 24589 |
| | | | binding site antibodies with diverse | |
| | | | germline origins; Cell 161 (5), 1026- | |
| | | | 1034 (2015), NCBI Accession #4YK4_Y | |

[0460] In some embodiments, the payload region of the viral particle comprises one or more nucleic acid sequences, fragments or variants thereof or encodes one or more polypeptides, fragments or variants thereof described in U.S. Pat. Nos. 8,003,106 and 8,540,995, International Patent Publication No. WO2015028478, WO2012045001, US Publication No. US20150239960 and US20130251715, the contents of each of which are herein incorporated by reference in their entirety, against influenza.

[0461] In some embodiments, the payload region of the viral particle comprises one or more nucleic acid sequences encoding one or more of the payload antibody polypeptides listed in Table 33 against Respiratory Syncytial Virus (RSV1-RSV1088; SEQ ID NO: 24581-25668).

TABLE 33
Antibodies against Repsiratory Syncytial Virus

| Antibody | | | | SEQ ID |
|---|---|---|---|---|
| No. | Description | Antibody Name | Reference Information | NO |
| RSV1 | Heavy chain variable, F | clone 888 | US20110189171; U.S. Pat. No. 7,879,329 | 24581 |
| | and G Proteins | | SEQ ID NO: 43 | |
| RSV2 | Heavy chain variable, F | mAb 824 | US20110189171; U.S. Pat. No. 7,879,329 | 24582 |
| | and G Proteins | | SEQ ID NO: 178 | |
| RSV3 | Heavy chain variable, F | clone 735 | US20110189171; U.S. Pat. No. 7,879,329 | 24583 |
| | and G Proteins | | SEQ ID NO: 1 | |
| RSV4 | Heavy chain variable, F | clone 736 | US20110189171; U.S. Pat. No. 7,879,329 | 24584 |
| | and G Proteins | | SEQ ID NO: 2 | |
| RSV5 | Heavy chain variable, F | clone 744 | US20110189171; U.S. Pat. No. 7,879,329 | 24585 |
| | and G Proteins | | SEQ ID NO: 3 | |
| RSV6 | Heavy chain variable, F | clone 793 | US20110189171; U.S. Pat. No. 7,879,329 | 24586 |
| | and G Proteins | | SEQ ID NO: 4 | |
| RSV7 | Heavy chain variable, F | clone 795 | US20110189171; U.S. Pat. No. 7,879,329 | 24587 |
| | and G Proteins | | SEQ ID NO: 5 | |
| RSV8 | Heavy chain variable, F | clone 796 | US20110189171; U.S. Pat. No. 7,879,329 | 24588 |
| | and G Proteins | | SEQ ID NO: 6 | |
| RSV9 | Heavy chain variable, F | clone 799 | US20110189171; U.S. Pat. No. 7,879,329 | 24589 |
| | and G Proteins | | SEQ ID NO: 7 | |
| RSV10 | Heavy chain variable, F | clone 800 | US20110189171; U.S. Pat. No. 7,879,329 | 24590 |
| | and G Proteins | | SEQ ID NO: 8 | |
| RSV11 | Heavy chain variable, F | clone 801 | US20110189171; U.S. Pat. No. 7,879,329 | 24591 |
| | and G Proteins | | SEQ ID NO: 9 | |
| RSV12 | Heavy chain variable, F | clone 804 | US20110189171; U.S. Pat. No. 7,879,329 | 24592 |
| | and G Proteins | | SEQ ID NO: 10 | |
| RSV13 | Heavy chain variable, F | clone 810 | US20110189171; U.S. Pat. No. 7,879,329 | 24593 |
| | and G Proteins | | SEQ ID NO: 11 | |
| RSV14 | Heavy chain variable, F | clone 811 | US20110189171; U.S. Pat. No. 7,879,329 | 24594 |
| | and G Proteins | | SEQ ID NO: 12 | |
| RSV15 | Heavy chain variable, F | clone 812 | US20110189171; U.S. Pat. No. 7,879,329 | 24595 |
| | and G Proteins | | SEQ ID NO: 13 | |
| RSV16 | Heavy chain variable, F | clone 814 | US20110189171; U.S. Pat. No. 7,879,329 | 24596 |
| | and G Proteins | | SEQ ID NO: 14 | |
| RSV17 | Heavy chain variable, F | clone 816 | US20110189171; U.S. Pat. No. 7,879,329 | 24597 |
| | and G Proteins | | SEQ ID NO: 15 | |
| RSV18 | Heavy chain variable, F | clone 817 | US20110189171; U.S. Pat. No. 7,879,329 | 24598 |
| | and G Proteins | | SEQ ID NO: 16 | |
| RSV19 | Heavy chain variable, F | clone 818 | US20110189171; U.S. Pat. No. 7,879,329 | 24599 |
| | and G Proteins | | SEQ ID NO: 17 | |
| RSV20 | Heavy chain variable, F | clone 819 | US20110189171; U.S. Pat. No. 7,879,329 | 24600 |
| | and G Proteins | | SEQ ID NO: 18 | |
| RSV21 | Heavy chain variable, F | clone 824 | US20110189171; U.S. Pat. No. 7,879,329 | 24601 |
| | and G Proteins | | SEQ ID NO: 19 | |
| RSV22 | Heavy chain variable, F | clone 825 | US20110189171; U.S. Pat. No. 7,879,329 | 24602 |
| | and G Proteins | | SEQ ID NO: 20 | |
| RSV23 | Heavy chain variable, F | clone 827 | US20110189171; U.S. Pat. No. 7,879,329 | 24603 |
| | and G Proteins | | SEQ ID NO: 21 | |
| RSV24 | Heavy chain variable, F | clone 829 | US20110189171; U.S. Pat. No. 7,879,329 | 24604 |
| | and G Proteins | | SEQ ID NO: 22 | |
| RSV25 | Heavy chain variable, F | clone 830 | US20110189171; U.S. Pat. No. 7,879,329 | 24605 |
| | and G Proteins | | SEQ ID NO: 23 | |
| RSV26 | Heavy chain variable, F | clone 831 | US20110189171; U.S. Pat. No. 7,879,329 | 24606 |
| | and G Proteins | | SEQ ID NO: 24 | |
| RSV27 | Heavy chain variable, F | clone 835 | US20110189171; U.S. Pat. No. 7,879,329 | 24607 |
| | and G Proteins | | SEQ ID NO: 25 | |
| RSV28 | Heavy chain variable, F | clone 838 | US20110189171; U.S. Pat. No. 7,879,329 | 24608 |
| | and G Proteins | | SEQ ID NO: 26 | |
| RSV29 | Heavy chain variable, F | clone 841 | US20110189171; U.S. Pat. No. 7,879,329 | 24609 |
| | and G Proteins | | SEQ ID NO: 27 | |
| RSV30 | Heavy chain variable, F | clone 853 | US20110189171; U.S. Pat. No. 7,879,329 | 24610 |
| | and G Proteins | | SEQ ID NO: 28 | |
| RSV31 | Heavy chain variable, F | clone 855 | US20110189171; U.S. Pat. No. 7,879,329 | 24611 |
| | and G Proteins | | SEQ ID NO: 29 | |
| RSV32 | Heavy chain variable, F | clone 856 | US20110189171; U.S. Pat. No. 7,879,329 | 24612 |
| | and G Proteins | | SEQ ID NO: 30 | |
| RSV33 | Heavy chain variable, F | clone 857 | US20110189171; U.S. Pat. No. 7,879,329 | 24613 |
| | and G Proteins | | SEQ ID NO: 31 | |
| RSV34 | Heavy chain variable, F | clone 858 | US20110189171; U.S. Pat. No. 7,879,329 | 24614 |
| | and G Proteins | | SEQ ID NO: 32 | |
| RSV35 | Heavy chain variable, F | clone 859 | US20110189171; U.S. Pat. No. 7,879,329 | 24615 |
| | and G Proteins | | SEQ ID NO: 33 | |
| RSV36 | Heavy chain variable, F | clone 861 | US20110189171; U.S. Pat. No. 7,879,329 | 24616 |
| | and G Proteins | | SEQ ID NO: 34 | |
| RSV37 | Heavy chain variable, F | clone 863 | US20110189171; U.S. Pat. No. 7,879,329 | 24617 |
| | and G Proteins | | SEQ ID NO: 35 | |
| RSV38 | Heavy chain variable, F | clone 868 | US20110189171; U.S. Pat. No. 7,879,329 | 24618 |
| | and G Proteins | | SEQ ID NO: 36 | |
| RSV39 | Heavy chain variable, F | clone 870 | US20110189171; U.S. Pat. No. 7,879,329 | 24619 |
| | and G Proteins | | SEQ ID NO: 37 | |
| RSV40 | Heavy chain variable, F | clone 871 | US20110189171; U.S. Pat. No. 7,879,329 | 24620 |
| | and G Proteins | | SEQ ID NO: 38 | |
| RSV41 | Heavy chain variable, F | clone 880 | US20110189171; U.S. Pat. No. 7,879,329 | 24621 |
| | and G Proteins | | SEQ ID NO: 39 | |
| RSV42 | Heavy chain variable, F | clone 881 | US20110189171; U.S. Pat. No. 7,879,329 | 24622 |
| | and G Proteins | | SEQ ID NO: 40 | |
| RSV43 | Heavy chain variable, F | clone 884 | US20110189171; U.S. Pat. No. 7,879,329 | 24623 |
| | and G Proteins | | SEQ ID NO: 41 | |
| RSV44 | Heavy chain variable, F | clone 886 | US20110189171; U.S. Pat. No. 7,879,329 | 24624 |
| | and G Proteins | | SEQ ID NO: 42 | |
| RSV45 | Heavy chain variable, F | clone 894 | US20110189171; U.S. Pat. No. 7,879,329 | 24625 |
| | and G Proteins | | SEQ ID NO: 44 | |
| RSV46 | heavy chain variable, F | 3210 variant 1 | WO2013140247 SEQ ID NO: | 24626 |
| | protein of RSV, MPV, or | | 13 | |
| | PVM | | | |
| RSV47 | heavy chain variable, F | 3210 variant 2, | WO2013140247 SEQ ID NO: | 24627 |
| | protein of RSV, MPV, or | 3210 variant 3, | 17 | |
| | PVM | 3210 variant 6 | | |
| RSV48 | heavy chain variable, F | 2430 variant 1 | WO2013140247 SEQ ID NO: | 24628 |
| | protein of RSV, MPV, or | | 29 | |
| | PVM | | | |
| RSV49 | heavy chain variable, F | 2430 variant 2, | WO2013140247 SEQ ID NO: | 24629 |
| | protein of RSV, MPV, or | 2430 variant 5 | 33 | |
| | PVM | | | |
| RSV50 | heavy chain variable, F | 3210 variant 4, | WO2013140247 SEQ ID NO: | 24630 |
| | protein of RSV, MPV, or | 3210 variant 5 | 49 | |
| | PVM | | | |
| RSV51 | heavy chain variable, F | 2430 variant 3, | WO2013140247 SEQ ID NO: | 24631 |
| | protein of RSV, MPV, or | 2430 variant 4 | 59 | |
| | PVM | | | |
| RSV52 | Heavy chain variable, | | US20140093501 SEQ ID NO: | 24632 |
| | CDR Grafted, F Protein, | | 31 | |
| RSV53 | Heavy chain, F Protein | AM22 | U.S. Pat. No. 8,568,726 SEQ ID NO: 16 | 24633 |
| RSV54 | Heavy chain, F Protein | RSVF2-5 | U.S. Pat. No. 8,221,759 SEQ ID NO: 1 | 24634 |
| RSV55 | Heavy chain, F Protein | | EP1259547; U.S. Pat. No. 8,153,133 | 24635 |
| | | | SEQ ID NO: 4 | |
| RSV56 | Heavy chain, F Protein | MEDI- | EP1259547; U.S. Pat. No. 8,153,133 SEQ | 24636 |
| | | 493/Pavilizumab- | ID NO: 2 | |
| | | N-VL (Brand name | | |
| | | Synagis) | | |
| RSV57 | Heavy chain, F Protein | | EP1259547; U.S. Pat. No. 8,153,133 SEQ | 24637 |
| | | | ID NO: 36 | |
| RSV58 | Heavy chain, F Protein | clone 18 | EP1259547; U.S. Pat. No. 8,153,133 SEQ | 24638 |
| | | | ID NO: 37 | |
| RSV59 | Heavy chain, F Protein | clone 19 | EP1259547; U.S. Pat. No. 8,153,133 SEQ | 24639 |
| | | | ID NO: 39 | |
| RSV60 | Heavy chain, F Protein | clone 20 | EP1259547; U.S. Pat. No. 8,153,133 SEQ | 24640 |
| | | | ID NO: 41 | |
| RSV61 | Heavy chain, F Protein | clone 21 | EP1259547; U.S. Pat. No. 8,153,133 SEQ | 24641 |
| | | | ID NO: 43 | |
| RSV62 | Heavy chain, F Protein | clone 22 | EP1259547; U.S. Pat. No. 8,153,133 SEQ | 24642 |
| | | | ID NO: 45 | |
| RSV63 | Heavy chain, F Protein | clone 23 | EP1259547; U.S. Pat. No. 8,153,133 SEQ | 24643 |
| | | | ID NO: 47 | |
| RSV64 | Heavy chain, F Protein | clone 24 | EP1259547; U.S. Pat. No. 8,153,133 SEQ | 24644 |
| | | | ID NO: 49 | |
| RSV65 | Heavy chain, F Protein | clone 25 | EP1259547; U.S. Pat. No. 8,153,133 SEQ | 24645 |
| | | | ID NO: 51 | |
| RSV66 | Heavy chain, F Protein | clone 26 | EP1259547; U.S. Pat. No. 8,153,133 SEQ | 24646 |
| | | | ID NO: 53 | |
| RSV67 | Heavy chain variable | | US20140093501 SEQ ID NO: | 24647 |
| | region, F Protein | | 17 | |
| RSV68 | Heavy chain variable | MAb1308F | US20140093501 SEQ ID NO: | 24648 |
| | region, F Protein | | 18 | |
| RSV69 | Heavy chain variable | huCOR | US20140093501 SEQ ID NO: | 24649 |
| | region, F Protein | | 30 | |
| RSV70 | Heavy chain variable | M.Ab1129 | US20140093501 SEQ ID NO: | 24650 |
| | region, F Protein | | 32 | |
| RSV71 | Heavy chain variable | RSV G8 | U.S. Pat. No. 7,867,497 SEQ ID NO: 2 | 24651 |
| | region, F Protein | | | |
| RSV72 | Heavy chain variable | Clone 1 | US20120135006 SEQ ID NO: | 24652 |
| | region, F Protein | | 18 | |
| RSV73 | Heavy chain variable | Clone 2 | US20120135006 SEQ ID NO: | 24653 |
| | region, F Protein | | 20 | |
| RSV74 | Heavy chain variable | Clone 3 | US20120135006 SEQ ID NO: | 24654 |
| | region, F Protein | | 22 | |
| RSV75 | Heavy chain variable | Clone 22 | US20120135006 SEQ ID NO: | 24655 |
| | region, F Protein | | 24 | |
| RSV76 | Heavy chain variable | Clone 23 | US20120135006 SEQ ID NO: | 24656 |
| | region, F Protein | | 26 | |
| RSV77 | Heavy chain variable | RSV13-9 | WO2009088159 SEQ ID NO: 4 | 24657 |
| | region, F Protein | | | |
| RSV78 | HV3 heavy chain | | US20140093501 SEQ ID NO: | 24658 |
| | variable, F Protein | | 16 | |
| RSV79 | Constant heavy region, F | B4HuVK | EP636182; WO1993020210; | 24659 |
| | protein | | SEQ ID NO: 6 | |
| RSV80 | Constant heavy region, F | B13/B14HuVK | EP636182; WO1993020210; | 24660 |
| | protein | | SEQ ID NO: 8 | |
| RSV81 | Heavy chain, F protein | 58c5 | US20140044719 SEQ ID NO: 1 | 24661 |
| RSV82 | Heavy chain, F protein | sc5 | US20140044719 SEQ ID NO: 9 | 24662 |
| RSV83 | Heavy chain, F protein | | US20110027294 SEQ ID NO: | 24663 |
| | | | 74 | |
| RSV84 | Heavy chain, F protein | | US20110027294 SEQ ID NO: | 24664 |
| | | | 75 | |
| RSV85 | Heavy chain, F protein | | US20110027294 SEQ ID NO: | 24665 |
| | | | 76 | |
| RSV86 | Heavy chain, F protein | | US20110027294 SEQ ID NO: | 24666 |
| | | | 77 | |
| RSV87 | Heavy chain, F protein | | US20110027294 SEQ ID NO: | 24667 |
| | | | 78 | |
| RSV88 | Heavy chain, F protein | | US20110027294 SEQ ID NO: | 24668 |
| | | | 79 | |
| RSV89 | Heavy chain, F protein | | US20110027294 SEQ ID NO: | 24669 |
| | | | 80 | |
| RSV90 | Heavy chain, F protein | Gλ-1 | US20050175986 SEQ ID NO: 5 | 24670 |
| RSV91 | Heavy chain, F protein | A construct | US20050175986 SEQ ID NO: 7 | 24671 |
| RSV92 | Heavy chain, F protein | B construct | US20050175986 SEQ ID NO: 8 | 24672 |
| RSV93 | Heavy chain, F protein | hu19A | US20050019758; | 24673 |
| | | | WO1998019704 SEQ ID NO: 5 | |
| RSV94 | Heavy chain, F protein | hu19B | US20050019758; | 24674 |
| | | | WO1998019704 SEQ ID NO: 6 | |
| RSV95 | Heavy chain, F protein | hu19C | US20050019758; | 24675 |
| | | | WO1998019704 SEQ ID NO: 7 | |
| RSV96 | Heavy chain, F protein | hu19D | US20050019758; | 24676 |
| | | | WO1998019704 SEQ ID NO: 8 | |
| RSV97 | Heavy chain, F protein | B4HuVH | EP636182; WO1993020210; | 24677 |
| | | | SEQ ID NO: 5 | |
| RSV98 | Heavy chain, F protein | B13/B14HuVK | EP636182; WO1993020210; | 24678 |
| | | | SEQ ID NO: 7 | |
| RSV99 | Heavy chain, F protein | RSV19 | EP636182; WO1993020210; | 24679 |
| | | | SEQ ID NO: 10 | |
| RSV100 | Heavy chain, F protein | | WO19922004381 | 24680 |
| RSV101 | Heavy chain, F protein | | WO19922004381 | 24681 |
| RSV102 | Heavy chain variable | P1212 | US20140044719 SEQ ID NO: | 24682 |
| | region, F Protein | | 122 | |
| RSV103 | Heavy chain variable | P12f4 | US20140044719 SEQ ID NO: | 24683 |
| | region, F Protein | | 131 | |
| RSV104 | Heavy chain variable | P11d4 | US20140044719 SEQ ID NO: | 24684 |
| | region, F Protein | | 137 | |
| RSV105 | Heavy chain variable | A1e9 | US20140044719 SEQ ID NO: | 24685 |
| | region, F Protein | | 144 | |
| RSV106 | Heavy chain variable | A12a6 | US20140044719 SEQ ID NO: | 24686 |
| | region, F Protein | | 149 | |
| RSV107 | Heavy chain variable | A13c4 | US20140044719 SEQ ID NO: | 24687 |
| | region, F Protein | | 155 | |
| RSV108 | Heavy chain variable | A17d4 | US20140044719 SEQ ID NO: | 24688 |
| | region, F Protein | | 161 | |
| RSV109 | Heavy chain variable | A4B4 | US20140044719 SEQ ID NO: | 24689 |
| | region, F Protein | | 167 | |
| RSV110 | Heavy chain variable | A8c7 | US20140044719 SEQ ID NO: | 24690 |
| | region, F Protein | | 172 | |
| RSV111 | Heavy chain variable | IX-493L1FR | US20140044719 SEQ ID NO: | 24691 |
| | region, F Protein | | 176 | |
| RSV112 | Heavy chain variable | M3H9 | US20140044719 SEQ ID NO: | 24692 |
| | region, F Protein | | 181 | |
| RSV113 | Heavy chain variable | B21M | US20110027294 SEQ ID NO: | 24693 |
| | region, F Protein | | 49 | |
| RSV114 | Heavy chain variable | 101F | US20110027294 SEQ ID NO: 4 | 24694 |
| | region, F Protein | | | |
| RSV115 | Heavy chain variable | HNK20 | EP1720908; WO2005079479 | 24695 |
| | region, F Protein | | SEQ ID NO: 1 | |
| RSV116 | Heavy chain variable | P1212 | US20140044719 SEQ ID NO: | 24696 |
| | region, F Protein | | 123 | |
| RSV117 | Heavy chain variable | P12f4 | US20140044719 SEQ ID NO: | 24697 |
| | region, F Protein | | 132 | |
| RSV118 | Heavy chain variable | P11d4 | US20140044719 SEQ ID NO: | 24698 |
| | region, F Protein | | 138 | |
| RSV119 | Heavy chain variable | A1e9 | US20140044719 SEQ ID NO: | 24699 |
| | region, F Protein | | 145 | |
| RSV120 | Heavy chain variable | A12a6 | US20140044719 SEQ ID NO: | 24700 |
| | region, F Protein | | 150 | |
| RSV121 | Heavy chain variable | A13c4 | US20140044719 SEQ ID NO: | 24701 |
| | region, F Protein | | 156 | |
| RSV122 | Heavy chain variable | A17d4 | US20140044719 SEQ ID NO: | 24702 |
| | region, F Protein | | 162 | |
| RSV123 | Heavy chain variable | A4B4 | US20140044719 SEQ ID NO: | 24703 |
| | region, F Protein | | 168 | |
| RSV124 | Heavy chain variable | A8c7 | US20140044719 SEQ ID NO: | 24704 |
| | region, F Protein | | 173 | |
| RSV125 | Heavy chain variable | IX-493L1FR | US20140044719 SEQ ID NO: | 24705 |
| | region, F Protein | | 177 | |
| RSV126 | Heavy chain variable | H1 H3564P | WO2014159822 SEQ ID NO: 2 | 24706 |
| | region, F Protein | | | |
| RSV127 | Heavy chain variable | H1 H3565P | WO2014159822 SEQ ID NO: | 24707 |
| | region, F Protein | | 18 | |
| RSV128 | Heavy chain variable | H1 H3566P | WO2014159822 SEQ ID NO: | 24708 |
| | region, F Protein | | 34 | |
| RSV129 | Heavy chain variable | H1 H3567P | WO2014159822 SEQ ID NO: | 24709 |
| | region, F Protein | | 50 | |
| RSV130 | Heavy chain variable | H1 H3581 P | WO2014159822 SEQ ID NO: | 24710 |
| | region, F Protein | | 66 | |
| RSV131 | Heavy chain variable | H1 H3583P | WO2014159822 SEQ ID NO: | 24711 |
| | region, F Protein | | 82 | |
| RSV132 | Heavy chain variable | H1 H3589P | WO2014159822 SEQ ID NO: | 24712 |
| | region, F Protein | | 98 | |
| RSV133 | Heavy chain variable | H1 H3591 P | WO2014159822 SEQ ID NO: | 24713 |
| | region, F Protein | | 114 | |
| RSV134 | Heavy chain variable | H1 H3592P | WO2014159822 SEQ ID NO: | 24714 |
| | region, F Protein | | 130 | |
| RSV135 | Heavy chain variable | H1 H3597P | WO2014159822 SEQ ID NO: | 24715 |
| | region, F Protein | | 146 | |
| RSV136 | Heavy chain variable | H1 H3598P | WO2014159822 SEQ ID NO: | 24716 |
| | region, F Protein | | 162 | |
| RSV137 | Heavy chain variable | H1 H3603P | WO2014159822 SEQ ID NO: | 24717 |
| | region, F Protein | | 178 | |
| RSV138 | Heavy chain variable | H1 H3604P | WO2014159822 SEQ ID NO: | 24718 |
| | region, F Protein | | 194 | |
| RSV139 | Heavy chain variable | H1 H3605P | WO2014159822 SEQ ID NO: | 24719 |
| | region, F Protein | | 210 | |
| RSV140 | Heavy chain variable | H1 H3607P | WO2014159822 SEQ ID NO: | 24720 |
| | region, F Protein | | 226 | |
| RSV141 | Heavy chain variable | H1 H3608P2 | WO2014159822 SEQ ID NO: | 24721 |
| | region, F Protein | | 242 | |
| RSV142 | Heavy chain variable | H1 H3592P2 | WO2014159822 SEQ ID NO: | 24722 |
| | region, F Protein | | 258 | |
| RSV143 | Heavy chain variable | H1 H3592P3 | WO2014159822 SEQ ID NO: | 24723 |
| | region, F Protein | | 274 | |
| RSV144 | Heavy chain variable | H1 M3621 N | WO2014159822 SEQ ID NO: | 24724 |
| | region, F Protein | | 290 | |
| RSV145 | Heavy chain variable | H1 M3622N | WO2014159822 SEQ ID NO: | 24725 |
| | region, F Protein | | 306 | |
| RSV146 | Heavy chain variable | H1 M2634N | WO2014159822 SEQ ID NO: | 24726 |
| | region, F Protein | | 322 | |
| RSV147 | Heavy chain variable | H1 M3627N | WO2014159822 SEQ ID NO: | 24727 |
| | region, F Protein | | 338 | |
| RSV148 | Heavy chain variable | Clone No. 735 | US20120009623 SEQ ID NO: 1 | 24728 |
| | region, F Protein | | | |
| RSV149 | Heavy chain variable | Clone No. 736 | US20120009623 SEQ ID NO: 2 | 24729 |
| | region, F Protein | | | |
| RSV150 | Heavy chain variable | Clone No. 744 | US20120009623 SEQ ID NO: 3 | 24730 |
| | region, F Protein | | | |
| RSV151 | Heavy chain variable | Clone No. 793 | US20120009623 SEQ ID NO: 4 | 24731 |
| | region, F Protein | | | |
| RSV152 | Heavy chain variable | Clone No. 795 | US20120009623 SEQ ID NO: 5 | 24732 |
| | region, F Protein | | | |
| RSV153 | Heavy chain variable | Clone No. 796 | US20120009623 SEQ ID NO: 6 | 24733 |
| | region, F Protein | | | |
| RSV154 | Heavy chain variable | Clone No. 799 | US20120009623 SEQ ID NO: 7 | 24734 |
| | region, F Protein | | | |
| RSV155 | Heavy chain variable | Clone No. 800 | US20120009623 SEQ ID NO: 8 | 24735 |
| | region, F Protein | | | |
| RSV156 | Heavy chain variable | Clone No. 801 | US20120009623 SEQ ID NO: 9 | 24736 |
| | region, F Protein | | | |
| RSV157 | Heavy chain variable | Clone No. 804 | US20120009623 SEQ ID NO: | 24737 |
| | region, F Protein | | 10 | |
| RSV158 | Heavy chain variable | Clone No. 810 | US20120009623 SEQ ID NO: | 24738 |
| | region, F Protein | | 11 | |
| RSV159 | Heavy chain variable | Clone No. 811 | US20120009623 SEQ ID NO: | 24739 |
| | region, F Protein | | 12 | |
| RSV160 | Heavy chain variable | Clone No. 812 | US20120009623 SEQ ID NO: | 24740 |
| | region, F Protein | | 13 | |
| RSV161 | Heavy chain variable | Clone No. 814 | US20120009623 SEQ ID NO: | 24741 |
| | region, F Protein | | 14 | |
| RSV162 | Heavy chain variable | Clone No. 816 | US20120009623 SEQ ID NO: | 24742 |
| | region, F Protein | | 15 | |
| RSV163 | Heavy chain variable | Clone No. 817 | US20120009623 SEQ ID NO: | 24743 |
| | region, F Protein | | 16 | |
| RSV164 | Heavy chain variable | Clone No. 818 | US20120009623 SEQ ID NO: | 24744 |
| | region, F Protein | | 17 | |
| RSV165 | Heavy chain variable | Clone No. 819 | US20120009623 SEQ ID NO: | 24745 |
| | region, F Protein | | 18 | |
| RSV166 | Heavy chain variable | Clone No. 824 | US20120009623 SEQ ID NO: | 24746 |
| | region, F Protein | | 19 | |
| RSV167 | Heavy chain variable | Clone No. 825 | US20120009623 SEQ ID NO: | 24747 |
| | region, F Protein | | 20 | |
| RSV168 | Heavy chain variable | Clone No. 827 | US20120009623 SEQ ID NO: | 24748 |
| | region, F Protein | | 21 | |
| RSV169 | Heavy chain variable | Clone No. 829 | US20120009623 SEQ ID NO: | 24749 |
| | region, F Protein | | 22 | |
| RSV170 | Heavy chain variable | Clone No. 830 | US20120009623 SEQ ID NO: | 24750 |
| | region, F Protein | | 23 | |
| RSV171 | Heavy chain variable | Clone No. 831 | US20120009623 SEQ ID NO: | 24751 |
| | region, F Protein | | 24 | |
| RSV172 | Heavy chain variable | Clone No. 835 | US20120009623 SEQ ID NO: | 24752 |
| | region, F Protein | | 25 | |
| RSV173 | Heavy chain variable | Clone No. 838 | US20120009623 SEQ ID NO: | 24753 |
| | region, F Protein | | 26 | |
| RSV174 | Heavy chain variable | Clone No. 841 | US20120009623 SEQ ID NO: | 24754 |
| | region, F Protein | | 27 | |
| RSV175 | Heavy chain variable | Clone No. 853 | US20120009623 SEQ ID NO: | 24755 |
| | region, F Protein | | 28 | |
| RSV176 | Heavy chain variable | Clone No. 855 | US20120009623 SEQ ID NO: | 24756 |
| | region, F Protein | | 29 | |
| RSV177 | Heavy chain variable | Clone No. 856 | US20120009623 SEQ ID NO: | 24757 |
| | region, F Protein | | 30 | |
| RSV178 | Heavy chain variable | Clone No. 857 | US20120009623 SEQ ID NO: | 24758 |
| | region, F Protein | | 31 | |
| RSV179 | Heavy chain variable | Clone No. 858 | US20120009623 SEQ ID NO: | 24759 |
| | region, F Protein | | 32 | |
| RSV180 | Heavy chain variable | Clone No. 859 | US20120009623 SEQ ID NO: | 24760 |
| | region, F Protein | | 33 | |
| RSV181 | Heavy chain variable | Clone No. 861 | US20120009623 SEQ ID NO: | 24761 |
| | region, F Protein | | 34 | |
| RSV182 | Heavy chain variable | Clone No. 863 | US20120009623 SEQ ID NO: | 24762 |
| | region, F Protein | | 35 | |
| RSV183 | Heavy chain variable | Clone No. 868 | US20120009623 SEQ ID NO: | 24763 |
| | region, F Protein | | 36 | |
| RSV184 | Heavy chain variable | Clone No. 870 | US20120009623 SEQ ID NO: | 24764 |
| | region, F Protein | | 37 | |
| RSV185 | Heavy chain variable | Clone No. 871 | US20120009623 SEQ ID NO: | 24765 |
| | region, F Protein | | 38 | |
| RSV186 | Heavy chain variable | Clone No. 880 | US20120009623 SEQ ID NO: | 24766 |
| | region, F Protein | | 39 | |
| RSV187 | Heavy chain variable | Clone No. 881 | US20120009623 SEQ ID NO: | 24767 |
| | region, F Protein | | 40 | |
| RSV188 | Heavy chain variable | Clone No. 884 | US20120009623 SEQ ID NO: | 24768 |
| | region, F Protein | | 41 | |
| RSV189 | Heavy chain variable | Clone No. 886 | US20120009623 SEQ ID NO: | 24769 |
| | region, F Protein | | 42 | |
| RSV190 | Heavy chain variable | Clone No. 888 | US20120009623 SEQ ID NO: | 24770 |
| | region, F Protein | | 43 | |
| RSV191 | Heavy chain variable | Clone No. 894 | US20120009623 SEQ ID NO: | 24771 |
| | region, F Protein | | 44 | |
| RSV192 | Heavy chain variable | Gλ-1 | US20050175986 SEQ ID NO: 4 | 24772 |
| | region, F Protein | | | |
| RSV193 | Super humanized heavy | SHVh1 | EP1720908; WO2005079479 | 24773 |
| | chain based on HNK20, F | | SEQ ID NO: 3 | |
| | protein | | | |
| RSV194 | Super humanized heavy | SHVh2 | EP1720908; WO2005079479 | 24774 |
| | chain based on HNK20, F | | SEQ ID NO: 4 | |
| | protein | | | |
| RSV195 | Super humanized heavy | SHVh3 | EP1720908; WO2005079479 | 24775 |
| | chain based on HNK20, F | | SEQ ID NO: 5 | |
| | protein | | | |
| RSV196 | Super humanized heavy | SHVh4 | EP1720908; WO2005079479 | 24776 |
| | chain based on HNK20, F | | SEQ ID NO: 6 | |
| | protein | | | |
| RSV197 | Super humanized heavy | SHVh5 | EP1720908; WO2005079479 | 24777 |
| | chain based on HNK20, F | | SEQ ID NO: 7 | |
| | protein | | | |
| RSV198 | Super humanized heavy | SHVh6 | EP1720908; WO2005079479 | 24778 |
| | chain based on HNK20, F | | SEQ ID NO: 8 | |
| | protein | | | |
| RSV199 | Super humanized heavy | SHVh7 | EP1720908; WO2005079479 | 24779 |
| | chain based on HNK20, F | | SEQ ID NO: 9 | |
| | protein | | | |
| RSV200 | Heavy chain variable | B4 | EP636182; WO1993020210; | 24780 |
| | region, F Protein | | SEQ ID NO: 3 | |
| RSV201 | Heavy chain variable | B13/14 | EP636182; WO1993020210; | 24781 |
| | region, F Protein | | SEQ ID NO: 4 | |
| RSV202 | Heavy chain variable | RF-1 | EP854730; WO1996040252; | 24782 |
| | region, F Protein | | FIG. 7B | |
| RSV203 | Heavy chain variable | RF-2 | EP854730; WO1996040252; | 24783 |
| | region, F Protein | | FIG. 8B | |
| RSV204 | Heavy chain, G Protein | IF12 | U.S. Pat. No. 8,273,354 SEQ ID NO: 28 | 24784 |
| RSV205 | Heavy chain, G Protein | 3G12 | U.S. Pat. No. 8,273,354 SEQ ID NO: 29 | 24785 |
| RSV206 | Heavy chain, G Protein | 1A5 | U.S. Pat. No. 8,273,354 SEQ ID NO: 30 | 24786 |
| RSV207 | Heavy chain, G Protein | 3D3 | U.S. Pat. No. 8,273,354 SEQ ID NO: 31 | 24787 |
| RSV208 | Heavy chain, G Protein | 1G1 | U.S. Pat. No. 8,273,354 SEQ ID NO: 32 | 24788 |
| RSV209 | Heavy chain, G Protein | 2B11 | U.S. Pat. No. 8,273,354 SEQ ID NO: 33 | 24789 |
| RSV210 | Heavy chain, G Protein | 5D8 | U.S. Pat. No. 8,273,354 SEQ ID NO: 34 | 24790 |
| RSV211 | Heavy chain, G Protein | 2D10 | U.S. Pat. No. 8,273,354 SEQ ID NO: 35 | 24791 |
| RSV212 | Heavy chain, G Protein | 3F9 | U.S. Pat. No. 8,273,354 SEQ ID NO: 36 | 24792 |
| RSV213 | Heavy chain, G Protein | 1D4 | U.S. Pat. No. 8,273,354 SEQ ID NO: 37 | 24793 |
| RSV214 | Heavy chain, G Protein | 1G8 | U.S. Pat. No. 8,273,354 SEQ ID NO: 38 | 24794 |
| RSV215 | Heavy chain, G Protein | 6A12 | U.S. Pat. No. 8,273,354 SEQ ID NO: 39 | 24795 |
| RSV216 | Heavy chain, G Protein | 10C6 | U.S. Pat. No. 8,273,354 SEQ ID NO: 40 | 24796 |
| RSV217 | Heavy chain, G Protein | Hu 131-2G | U.S. Pat. No. 8,273,354 SEQ ID NO: 41 | 24797 |
| RSV218 | Heavy chain, G Protein | AT46 | US20150004155 SEQ ID NO: | 24798 |
| | | | 109 | |
| RSV219 | Heavy chain, G Protein | AT32 | US20150004155 SEQ ID NO: | 24799 |
| | | | 110 | |
| RSV220 | Heavy chain, G Protein | AT33 | US20150004155 SEQ ID NO: | 24800 |
| | | | 111 | |
| RSV221 | Heavy chain, G Protein | AT34 | US20150004155 SEQ ID NO: | 24801 |
| | | | 112 | |
| RSV222 | Heavy chain, G Protein | AT35 | US20150004155 SEQ ID NO: | 24802 |
| | | | 113 | |
| RSV223 | Heavy chain, G Protein | AT36 | US20150004155 SEQ ID NO: | 24803 |
| | | | 114 | |
| RSV224 | Heavy chain, G Protein | AT37 | US20150004155 SEQ ID NO: | 24804 |
| | | | 115 | |
| RSV225 | Heavy chain, G Protein | AT39 | US20150004155 SEQ ID NO: | 24805 |
| | | | 116 | |
| RSV226 | Heavy chain, G Protein | AT40 | US20150004155 SEQ ID NO: | 24806 |
| | | | 117 | |
| RSV227 | Heavy chain, G Protein | AT42 | US20150004155 SEQ ID NO: | 24807 |
| | | | 118 | |
| RSV228 | Heavy chain, G Protein | AT43 | US20150004155 SEQ ID NO: | 24808 |
| | | | 119 | |
| RSV229 | Heavy chain, G Protein | AT44 | US20150004155 SEQ ID NO: | 24809 |
| | | | 120 | |
| RSV230 | Heavy chain, G Protein | AT45 | US20150004155 SEQ ID NO: | 24810 |
| | | | 121 | |
| RSV231 | Heavy chain, G Protein | AT47 | US20150004155 SEQ ID NO: | 24811 |
| | | | 122 | |
| RSV232 | Heavy chain, G Protein | AT49 | US20150004155 SEQ ID NO: | 24812 |
| | | | 123 | |
| RSV233 | Heavy chain, G Protein | AT50 | US20150004155 SEQ ID NO: | 24813 |
| | | | 124 | |
| RSV234 | Heavy chain, G Protein | AT51 | US20150004155 SEQ ID NO: | 24814 |
| | | | 125 | |
| RSV235 | Heavy chain variable | CB058.1 | WO2014170257 SEQ ID NO: | 24815 |
| | region, G Protein | | 37 | |
| RSV236 | Heavy chain variable | CB048.3 | WO2014170257 SEQ ID NO: | 24816 |
| | region, G Protein | | 39 | |
| RSV237 | Heavy chain variable | CB010.7 | WO2014170257 SEQ ID NO: | 24817 |
| | region, G Protein | | 41 | |
| RSV238 | Heavy chain variable | CB003.1 | WO2014170257 SEQ ID NO: | 24818 |
| | region, G Protein | | 43 | |
| RSV239 | Heavy chain variable | CB028.2 | WO2014170257 SEQ ID NO: | 24819 |
| | region, G Protein | | 45 | |
| RSV240 | Heavy chain variable | CB002.1 | WO2014170257 SEQ ID NO: | 24820 |
| | region, G Protein | | 47 | |
| RSV241 | Heavy chain variable | CB017.3L | WO2014170258 SEQ ID NO: | 24821 |
| | region, G Protein | | 73 | |
| RSV242 | Heavy chain variable | CB017.5L | WO2014170258 SEQ ID NO: | 24822 |
| | region, G Protein | | 75 | |
| RSV243 | Heavy chain variable | CB028.1 | WO2014170258 SEQ ID NO: | 24823 |
| | region, G Protein | | 77 | |
| RSV244 | Heavy chain variable | CB030.1 | WO2014170258 SEQ ID NO: | 24824 |
| | region, G Protein | | 79 | |
| RSV245 | Heavy chain variable | CB047.1 | WO2014170258 SEQ ID NO: | 24825 |
| | region, G Protein | | 81 | |
| RSV246 | Heavy chain variable | CB047.2 | WO2014170258 SEQ ID NO: | 24826 |
| | region, G Protein | | 83 | |
| RSV247 | Heavy chain variable | CB065.1 | WO2014170258 SEQ ID NO: | 24827 |
| | region, G Protein | | 85 | |
| RSV248 | Heavy chain variable | CB071.1L | WO2014170258 SEQ ID NO: | 24828 |
| | region, G Protein | | 87 | |
| RSV249 | Heavy chain variable | CB072.1L | WO2014170258 SEQ ID NO: | 24829 |
| | region, G Protein | | 89 | |
| RSV250 | Heavy chain variable | CB073.1L | WO2014170258 SEQ ID NO: | 24830 |
| | region, G Protein | | 91 | |
| RSV251 | Heavy chain variable | CB076.2L | WO2014170258 SEQ ID NO: | 24831 |
| | region, G Protein | | 93 | |
| RSV252 | Heavy chain variable | CB079.1 | WO2014170258 SEQ ID NO: | 24832 |
| | region, G Protein | | 95 | |
| RSV253 | Heavy chain | AM14 | US20140377279 SEQ ID NO: | 24833 |
| | | | 78 | |
| RSV254 | Heavy chain | AM16 | US20140377279 SEQ ID NO: | 24834 |
| | | | 85 | |
| RSV255 | Heavy chain | AM23 | US20140377279 SEQ ID NO: | 24835 |
| | | | 92 | |
| RSV256 | Heavy chain | D25 | US20140377279 SEQ ID NO: 7 | 24836 |
| RSV257 | Heavy chain | AFFF | U.S. Pat. No. 7,635,568 SEQ ID NO: 210 | 24837 |
| RSV258 | Heavy chain | P12f2 | U.S. Pat. No. 7,635,568 SEQ ID NO: 212 | 24838 |
| RSV259 | Heavy chain | P12f4 | U.S. Pat. No. 7,635,568 SEQ ID NO: 214 | 24839 |
| RSV260 | Heavy chain | P11d4 | U.S. Pat. No. 7,635,568 SEQ ID NO: 216 | 24840 |
| RSV261 | Heavy chain | A1e9 | U.S. Pat. No. 7,635,568 SEQ ID NO: 218 | 24841 |
| RSV262 | Heavy chain | A12a6 | U.S. Pat. No. 7,635,568 SEQ ID NO: 220 | 24842 |
| RSV263 | Heavy chain | A13c4 | U.S. Pat. No. 7,635,568 SEQ ID NO: 222 | 24843 |
| RSV264 | Heavy chain | A17d4 | U.S. Pat. No. 7,635,568 SEQ ID NO: 224 | 24844 |
| RSV265 | Heavy chain | A4B4 | U.S. Pat. No. 7,635,568 SEQ ID NO: 226 | 24845 |
| RSV266 | Heavy chain | A8c7 | U.S. Pat. No. 7,635,568 SEQ ID NO: 228 | 24846 |
| RSV267 | Heavy chain | 1X-493L1FR | U.S. Pat. No. 7,635,568 SEQ ID NO: 230 | 24847 |
| RSV268 | Heavy chain | H3-3F4 | U.S. Pat. No. 7,635,568 SEQ ID NO: 232 | 24848 |
| RSV269 | Heavy chain | M3H9 | U.S. Pat. No. 7,635,568 SEQ ID NO: 234 | 24849 |
| RSV270 | Heavy chain | Y10H6 | U.S. Pat. No. 7,635,568 SEQ ID NO: 236 | 24850 |
| RSV271 | Heavy chain | DG | U.S. Pat. No. 7,635,568 SEQ ID NO: 238 | 24851 |
| RSV272 | Heavy chain | AFFF(1) | U.S. Pat. No. 7,635,568 SEQ ID NO: 240 | 24852 |
| RSV273 | Heavy chain | 6H8 | U.S. Pat. No. 7,635,568 SEQ ID NO: 242 | 24853 |
| RSV274 | Heavy chain | L1-7E5 | U.S. Pat. No. 7,635,568 SEQ ID NO: 244 | 24854 |
| RSV275 | Heavy chain | L2-15B10 | U.S. Pat. No. 7,635,568 SEQ ID NO: 246 | 24855 |
| RSV276 | Heavy chain | A13al1 | U.S. Pat. No. 7,635,568 SEQ ID NO: 248 | 24856 |
| RSV277 | Heavy chain | A1h5 | U.S. Pat. No. 7,635,568 SEQ ID NO: 250 | 24857 |
| RSV278 | Heavy chain | A4B4(1) | U.S. Pat. No. 7,635,568 SEQ ID NO: 252 | 24858 |
| RSV279 | Heavy chain | A4B4LIFR-S28R | U.S. Pat. No. 7,635,568 SEQ ID NO: 254 | 24859 |
| | | (MEDI-524, | | |
| | | Motavizumab, | | |
| | | Numax) | | |
| RSV280 | Heavy chain | A4B4-F52S | U.S. Pat. No. 7,635,568 SEQ ID NO: 256 | 24860 |
| RSV281 | Heavy chain | | U.S. Pat. No. 7,364,737 SEQ ID NO: 1 | 24861 |
| RSV282 | Heavy chain | | U.S. Pat. No. 7,364,737 SEQ ID NO: 2 | 24862 |
| RSV283 | Heavy chain variable | J variant | WO2015108967 SEQ ID NO: | 24863 |
| | region | | 12 | |
| RSV284 | Heavy chain variable | L variant | WO2015108967 SEQ ID NO: | 24864 |
| | region | | 13 | |
| RSV285 | Heavy chain variable | LA variant | WO2015108967 SEQ ID NO: | 24865 |
| | region | | 14 | |
| RSV286 | Heavy chain variable | 1G7 | WO2015108967 SEQ ID NO: | 24866 |
| | region | | 15 | |
| RSV287 | Heavy chain variable | IF5 | WO2015108967 SEQ ID NO: | 24867 |
| | region | | 16 | |
| RSV288 | Heavy chain variable | 2D10 | WO2015108967 SEQ ID NO: | 24868 |
| | region | | 17 | |
| RSV289 | Heavy chain variable | 1G7-GLM | WO2015108967 SEQ ID NO: | 24869 |
| | region | | 18 | |
| RSV290 | Heavy chain variable | B12-1 | WO2015108967 SEQ ID NO: | 24870 |
| | region | | 19 | |
| RSV291 | Heavy chain variable | E3-5 | WO2015108967 SEQ ID NO: | 24871 |
| | region | | 20 | |
| RSV292 | Heavy chain variable | E9-2 | WO2015108967 SEQ ID NO: | 24872 |
| | region | | 21 | |
| RSV293 | Heavy chain variable | 1X-493L1FR | U.S. Pat. No. 7,635,568 SEQ ID NO: 7 | 24873 |
| | region | | | |
| RSV294 | Heavy chain variable | AFFF, AFFF(1) | U.S. Pat. No. 7,635,568 SEQ ID NO: 9 | 24874 |
| | region | | | |
| RSV295 | Heavy chain variable | P12f2 | U.S. Pat. No. 7,635,568 SEQ ID NO: 17 | 24875 |
| | region | | | |
| RSV296 | Heavy chain variable | P12f4 | U.S. Pat. No. 7,635,568 SEQ ID NO: 24 | 24876 |
| | region | | | |
| RSV297 | Heavy chain variable | P11d4 | U.S. Pat. No. 7,635,568 SEQ ID NO: 28 | 24877 |
| | region | | | |
| RSV298 | Heavy chain variable | A1e9, A1h5 | U.S. Pat. No. 7,635,568 SEQ ID NO: 33 | 24878 |
| | region | | | |
| RSV299 | Heavy chain variable | A12a6 | U.S. Pat. No. 7,635,568 SEQ ID NO: 36 | 24879 |
| | region | | | |
| RSV300 | Heavy chain variable | A13c4 | U.S. Pat. No. 7,635,568 SEQ ID NO: 40 | 24880 |
| | region | | | |
| RSV301 | Heavy chain variable | A17d4 | U.S. Pat. No. 7,635,568 SEQ ID NO: 44 | 24881 |
| | region | | | |
| RSV302 | Heavy chain variable | A4B4, A4B4(1), | U.S. Pat. No. 7,635,568 SEQ ID NO: 48 | 24882 |
| | region | A4B4L1FR-S28R | | |
| | | (MEDI-524, | | |
| | | Motavizumab, | | |
| | | Numax), A4B4- | | |
| | | F52S | | |
| RSV303 | Heavy chain variable | A8c7 | U.S. Pat. No. 7,635,568 SEQ ID NO: 51 | 24883 |
| | region | | | |
| RSV304 | Heavy chain variable | H3-3F4, M3H9, | U.S. Pat. No. 7,635,568 SEQ ID NO: 55 | 24884 |
| | region | Y10H6 | | |
| RSV305 | Heavy chain variable | DG, 6H8, L1-7E5, | U.S. Pat. No. 7,635,568 SEQ ID NO: 78 | 24885 |
| | region | L2-15B10 | | |
| RSV306 | Heavy chain variable | A13al1 | U.S. Pat. No. 7,635,568 SEQ ID NO: 67 | 24886 |
| | region | | | |
| RSV307 | Heavy chain variable | | U.S. Pat. No. 7,364,742 SEQ ID NO: 7 | 24887 |
| | region | | | |
| RSV308 | Heavy chain variable | | U.S. Pat. No. 7,364,742 SEQ ID NO: 8 | 24888 |
| | region | | | |
| RSV309 | Heavy chain variable | D2E7 | EP1807111; WO2006041970 | 24889 |
| | region | | SEQ ID NO: 2 | |
| RSV310 | Heavy chain variable | 2SD4 | EP1807111; WO2006041970 | 24890 |
| | region | | SEQ ID NO: 10 | |
| RSV311 | Heavy chain, human | | Wen, X., “Structure of the | 24891 |
| | metapneumovirus fusion | | human metapneumovirus fusion | |
| | protein with | | protein with neutralizing | |
| | neutralizing antibody | | antibody identifies a | |
| | identifies a pneumovirus | | pneumovirus antigenic site”, | |
| | antigenic site, | | Nat. Struct. Mol. Biol. 19 (4), | |
| | | | 461-463 (2012), NCBI | |
| | | | Accession # 4DAG_H(220 aa) | |
| RSV312 | Heavy chain variable, M2 | 8A4/G9 - IgG | US20140348858 SEQ ID NO: 3 | 24892 |
| | 1 antigen | | | |
| RSV313 | Heavy chain, Pre fusion | HMB2435 | WO2015010792 SEQ ID NO: | 24893 |
| | RSV F protein | | 13 | |
| RSV314 | Heavy chain, Pre fusion | HMB2437 | WO2015010792 SEQ ID NO: | 24894 |
| | RSV F protein | | 29 | |
| RSV315 | Heavy chain, Pre fusion | HMB2416 | WO2015010792 SEQ ID NO: | 24895 |
| | RSV F protein | | 45 | |
| RSV316 | Heavy chain, Pre fusion | HMB2437 | WO2015010792 SEQ ID NO: | 24896 |
| | RSV F protein | | 85 | |
| RSV317 | Heavy chain, Pre fusion | CR9501 | WO2014202570 SEQ ID NO: | 24897 |
| | RSV F protein | | 53 | |
| RSV318 | Heavy chain, Pre fusion | CR9502 | WO2014202570 SEQ ID NO: | 24898 |
| | RSV F protein | | 57 | |
| RSV319 | Heavy chain 1, Pre fusion | HMB2432 | WO2015010792 SEQ ID NO: | 24899 |
| | RSV F protein | | 61 | |
| RSV320 | Heavy chain 2, Pre fusion | HMB2432 | WO2015010792 SEQ ID NO: | 24900 |
| | RSV F protein | | 65 | |
| RSV321 | Heavy chain FR LG, Pre | HMB2435 | WO2015010792 SEQ ID NO: | 24901 |
| | fusion RSV F protein | | 75 | |
| RSV322 | light chain, F and G | clone 735 | US20110189171; U.S. Pat. No. 7,879,329 | 24902 |
| | Proteins | | SEQ ID NO: 89 | |
| RSV323 | light chain, F and G | clone 736 | US20110189171; U.S. Pat. No. 7,879,329 | 24903 |
| | Proteins | | SEQ ID NO: 90 | |
| RSV324 | light chain, F and G | clone 744 | US20110189171; U.S. Pat. No. 7,879,329 | 24904 |
| | Proteins | | SEQ ID NO: 91 | |
| RSV325 | light chain, F and G | clone 793 | US20110189171; U.S. Pat. No. 7,879,329 | 24905 |
| | Proteins | | SEQ ID NO: 92 | |
| RSV326 | light chain, F and G | clone 795 | US20110189171; U.S. Pat. No. 7,879,329 | 24906 |
| | Proteins | | SEQ ID NO: 93 | |
| RSV327 | light chain, F and G | clone 796 | US20110189171; U.S. Pat. No. 7,879,329 | 24907 |
| | Proteins | | SEQ ID NO: 94 | |
| RSV328 | light chain, F and G | clone 799 | US20110189171; U.S. Pat. No. 7,879,329 | 24908 |
| | Proteins | | SEQ ID NO: 95 | |
| RSV329 | light chain, F and G | clone 800 | US20110189171; U.S. Pat. No. 7,879,329 | 24909 |
| | Proteins | | SEQ ID NO: 96 | |
| RSV330 | light chain, F and G | clone 801 | US20110189171; U.S. Pat. No. 7,879,329 | 24910 |
| | Proteins | | SEQ ID NO: 97 | |
| RSV331 | light chain, F and G | clone 804 | US20110189171; U.S. Pat. No. 7,879,329 | 24911 |
| | Proteins | | SEQ ID NO: 98 | |
| RSV332 | light chain, F and G | clone 810 | US20110189171; U.S. Pat. No. 7,879,329 | 24912 |
| | Proteins | | SEQ ID NO: 99 | |
| RSV333 | light chain, F and G | clone 811 | US20110189171; U.S. Pat. No. 7,879,329 | 24913 |
| | Proteins | | SEQ ID NO: 100 | |
| RSV334 | light chain, F and G | clone 812 | US20110189171; U.S. Pat. No. 7,879,329 | 24914 |
| | Proteins | | SEQ ID NO: 101 | |
| RSV335 | light chain, F and G | clone 814 | US20110189171; U.S. Pat. No. 7,879,329 | 24915 |
| | Proteins | | SEQ ID NO: 102 | |
| RSV336 | light chain, F and G | clone 816 | US20110189171; U.S. Pat. No. 7,879,329 | 24916 |
| | Proteins | | SEQ ID NO: 103 | |
| RSV337 | light chain, F and G | clone 817 | US20110189171; U.S. Pat. No. 7,879,329 | 24917 |
| | Proteins | | SEQ ID NO: 104 | |
| RSV338 | light chain, F and G | clone 818 | US20110189171; U.S. Pat. No. 7,879,329 | 24918 |
| | Proteins | | SEQ ID NO: 105 | |
| RSV339 | light chain, F and G | clone 819 | US20110189171; U.S. Pat. No. 7,879,329 | 24919 |
| | Proteins | | SEQ ID NO: 106 | |
| RSV340 | light chain, F and G | clone 824 | US20110189171; U.S. Pat. No. 7,879,329 | 24920 |
| | Proteins | | SEQ ID NO: 107 | |
| RSV341 | light chain, F and G | clone 825 | US20110189171; U.S. Pat. No. 7,879,329 | 24921 |
| | Proteins | | SEQ ID NO: 108 | |
| RSV342 | light chain, F and G | clone 827 | US20110189171; U.S. Pat. No. 7,879,329 | 24922 |
| | Proteins | | SEQ ID NO: 109 | |
| RSV343 | light chain, F and G | clone 829 | US20110189171; U.S. Pat. No. 7,879,329 | 24923 |
| | Proteins | | SEQ ID NO: 110 | |
| RSV344 | light chain, F and G | clone 830 | US20110189171; U.S. Pat. No. 7,879,329 | 24924 |
| | Proteins | | SEQ ID NO: 111 | |
| RSV345 | light chain, F and G | clone 831 | US20110189171; U.S. Pat. No. 7,879,329 | 24925 |
| | Proteins | | SEQ ID NO: 112 | |
| RSV346 | light chain, F and G | clone 835 | US20110189171; U.S. Pat. No. 7,879,329 | 24926 |
| | Proteins | | SEQ ID NO: 113 | |
| RSV347 | light chain, F and G | clone 838 | US20110189171; U.S. Pat. No. 7,879,329 | 24927 |
| | Proteins | | SEQ ID NO: 114 | |
| RSV348 | light chain, F and G | clone 841 | US20110189171; U.S. Pat. No. 7,879,329 | 24928 |
| | Proteins | | SEQ ID NO: 115 | |
| RSV349 | light chain, F and G | clone 853 | US20110189171; U.S. Pat. No. 7,879,329 | 24929 |
| | Proteins | | SEQ ID NO: 116 | |
| RSV350 | light chain, F and G | clone 855 | US20110189171; U.S. Pat. No. 7,879,329 | 24930 |
| | Proteins | | SEQ ID NO: 117 | |
| RSV351 | light chain, F and G | clone 856 | US20110189171; U.S. Pat. No. 7,879,329 | 24931 |
| | Proteins | | SEQ ID NO: 118 | |
| RSV352 | light chain, F and G | clone 857 | US20110189171; U.S. Pat. No. 7,879,329 | 24932 |
| | Proteins | | SEQ ID NO: 119 | |
| RSV353 | light chain, F and G | clone 858 | US20110189171; U.S. Pat. No. 7,879,329 | 24933 |
| | Proteins | | SEQ ID NO: 120 | |
| RSV354 | light chain, F and G | clone 859 | US20110189171; U.S. Pat. No. 7,879,329 | 24934 |
| | Proteins | | SEQ ID NO: 121 | |
| RSV355 | light chain, F and G | clone 861 | US20110189171; U.S. Pat. No. 7,879,329 | 24935 |
| | Proteins | | SEQ ID NO: 122 | |
| RSV356 | light chain, F and G | clone 863 | US20110189171; U.S. Pat. No. 7,879,329 | 24936 |
| | Proteins | | SEQ ID NO: 123 | |
| RSV357 | light chain, F and G | clone 868 | US20110189171; U.S. Pat. No. 7,879,329 | 24937 |
| | Proteins | | SEQ ID NO: 124 | |
| RSV358 | light chain, F and G | clone 870 | US20110189171; U.S. Pat. No. 7,879,329 | 24938 |
| | Proteins | | SEQ ID NO: 125 | |
| RSV359 | light chain, F and G | clone 871 | US20110189171; U.S. Pat. No. 7,879,329 | 24939 |
| | Proteins | | SEQ ID NO: 126 | |
| RSV360 | light chain, F and G | clone 880 | US20110189171; U.S. Pat. No. 7,879,329 | 24940 |
| | Proteins | | SEQ ID NO: 127 | |
| RSV361 | light chain, F and G | clone 881 | US20110189171; U.S. Pat. No. 7,879,329 | 24941 |
| | Proteins | | SEQ ID NO: 128 | |
| RSV362 | light chain, F and G | clone 884 | US20110189171; U.S. Pat. No. 7,879,329 | 24942 |
| | Proteins | | SEQ ID NO: 129 | |
| RSV363 | light chain, F and G | clone 886 | US20110189171; U.S. Pat. No. 7,879,329 | 24943 |
| | Proteins | | SEQ ID NO: 130 | |
| RSV364 | light chain, F and G | clone 888 | US20110189171; U.S. Pat. No. 7,879,329 | 24944 |
| | Proteins | | SEQ ID NO: 131 | |
| RSV365 | light chain, F and G | clone 894 | US20110189171; U.S. Pat. No. 7,879,329 | 24945 |
| | Proteins | | SEQ ID NO: 132 | |
| RSV366 | Light chain variable, F | 3210 variant 1, | WO2013140247 SEQ ID NO: | 24946 |
| | protein of RSV, MPV, or | 3210 variant 2, | 14 | |
| | PVM | 3210 variant 5 | | |
| RSV367 | Light chain variable, F | 2430 variant 1, | WO2013140247 SEQ ID NO: | 24947 |
| | protein of RSV, MPV, or | 2430 variant 2, | 30 | |
| | PVM | 2430 variant 4 | | |
| RSV368 | Light chain variable, F | 3210 variant 3 | WO2013140247 SEQ ID NO: | 24948 |
| | protein of RSV, MPV, or | | 37 | |
| | PVM | | | |
| RSV369 | Light chain variable, F | 3210 variant 4, | WO2013140247 SEQ ID NO: | 24949 |
| | protein of RSV, MPV, or | 3210 variant 6 | 50 | |
| | PVM | | | |
| RSV370 | Light chain variable, F | 2430 variant 3, | WO2013140247 SEQ ID NO: | 24950 |
| | protein of RSV, MPV, or | 2430 variant 5 | 60 | |
| | PVM | | | |
| RSV371 | Light chain, F Protein | clone 19 | EP1259547; U.S. Pat. No. 8,153,133 | 24951 |
| | | | SEQ ID NO: 40 | |
| RSV372 | Light chain variable | | US20140093501 SEQ ID NO: | 24952 |
| | region, CDR Grafted, F | | 20 | |
| | Protein | | | |
| RSV373 | Light chain variable | | US20140093501 SEQ ID NO: | 24953 |
| | region, CDR Grafted, F | | 34 | |
| | Protein | | | |
| RSV374 | Light chain, F Protein | AM22 | U.S. Pat. No. 8,568,726 SEQ ID NO: 32 | 24954 |
| RSV375 | Light chain, F Protein | RSVF2-5 | U.S. Pat. No. 8,221,759 SEQ ID NO: 9 | 24955 |
| ID NO: 3 | | | | |
| RSV376 | Light chain, F Protein | | EP1259547; U.S. Pat. No. 8,153,133 SEQ | 24956 |
| | | | ID NO: 3 | |
| RSV377 | Light chain, F Protein | MEDI- | EP1259547; U.S. Pat. No. 8,153,133 SEQ | 24957 |
| | | 493/Pavilizumab- | ID NO: 1 | |
| | | N-VL (Brand name | | |
| | | Synagis) | | |
| RSV378 | Light chain, F Protein | | EP1259547; U.S. Pat. No. 8,153,133 SEQ | 24958 |
| | | | ID NO: 35 | |
| RSV379 | Light chain, F Protein | clone 18 | EP1259547; U.S. Pat. No. 8,153,133 SEQ | 24959 |
| | | | ID NO: 38 | |
| RSV380 | Light chain, F Protein | clone 20 | EP1259547; U.S. Pat. No. 8,153,133 SEQ | 24960 |
| | | | ID NO: 42 | |
| RSV381 | Light chain, F Protein | clone 21 | EP1259547; U.S. Pat. No. 8,153,133 SEQ | 24961 |
| | | | ID NO: 44 | |
| RSV382 | Light chain, F Protein | clone 22 | EP1259547; U.S. Pat. No. 8,153,133 SEQ | 24962 |
| | | | ID NO: 46 | |
| RSV383 | Light chain, F Protein | clone 23 | EP1259547; U.S. Pat. No. 8,153,133 SEQ | 24963 |
| | | | ID NO: 48 | |
| RSV384 | Light chain, F Protein | clone 24 | EP1259547; U.S. Pat. No. 8,153,133 SEQ | 24964 |
| | | | ID NO: 50 | |
| RSV385 | Light chain, F Protein | clone 25 | EP1259547; U.S. Pat. No. 8,153,133 SEQ | 24965 |
| | | | ID NO: 52 | |
| RSV386 | Light chain, F Protein | clone 26 | EP1259547; U.S. Pat. No. 8,153,133 SEQ | 24966 |
| | | | ID NO: 54 | |
| RSV387 | Light chain variable | huK 102 | US20140093501 SEQ ID NO: | 24967 |
| | region, F Protein | | 19 | |
| RSV388 | Light chain variable | huK102 | US20140093501 SEQ ID NO: | 24968 |
| | region, F Protein | | 33 | |
| RSV389 | Light chain variable | RSV G8 | U.S. Pat. No. 7,867,497 SEQ ID NO: 4 | 24969 |
| | region, F Protein | | | |
| RSV390 | Light chain variable | Clone 1 | US20120135006 SEQ ID NO: | 24970 |
| | region, F Protein | | 17 | |
| RSV391 | Light chain variable | Clone 2 | US20120135006 SEQ ID NO: | 24971 |
| | region, F Protein | | 19 | |
| RSV392 | Light chain variable | Clone 3 | US20120135006 SEQ ID NO: | 24972 |
| | region, F Protein | | 21 | |
| RSV393 | Light chain variable | Clone 22 | US20120135006 SEQ ID NO: | 24973 |
| | region, F Protein | | 23 | |
| RSV394 | Light chain variable | Clone 23 | US20120135006 SEQ ID NO: | 24974 |
| | region, F Protein | | 25 | |
| RSV395 | Light chain variable | RSV13-9 | WO2009088159 SEQ ID NO: 2 | 24975 |
| | region, F Protein | | | |
| RSV396 | Light chain variable | MAb1308F | US20140093501 SEQ ID NO: | 24976 |
| | region, F Protein | | 21 | |
| RSV397 | Light chain, F Protein | 58c5 | US20140044719 SEQ ID NO: 5 | 24977 |
| RSV398 | Light chain, F Protein | sc5 | US20140044719 SEQ ID NO: | 24978 |
| | | | 13 | |
| RSV399 | Light chain, F Protein | Clone No. 735 | US20120009623 SEQ ID NO: | 24979 |
| | | | 89 | |
| RSV400 | Light chain, F Protein | Clone No. 736 | US20120009623 SEQ ID NO: | 24980 |
| | | | 90 | |
| RSV401 | Light chain, F Protein | Clone No. 744 | US20120009623 SEQ ID NO: | 24981 |
| | | | 91 | |
| RSV402 | Light chain, F Protein | Clone No. 793 | US20120009623 SEQ ID NO: | 24982 |
| | | | 92 | |
| RSV403 | Light chain, F Protein | Clone No. 795 | US20120009623 SEQ ID NO: | 24983 |
| | | | 93 | |
| RSV404 | Light chain, F Protein | Clone No. 796 | US20120009623 SEQ ID NO: | 24984 |
| | | | 94 | |
| RSV405 | Light chain, F Protein | Clone No. 799 | US20120009623 SEQ ID NO: | 24985 |
| | | | 95 | |
| RSV406 | Light chain, F Protein | Clone No. 800 | US20120009623 SEQ ID NO: | 24986 |
| | | | 96 | |
| RSV407 | Light chain, F Protein | Clone No. 80 | US20120009623 SEQ ID NO: | 24987 |
| | | | 97 | |
| RSV408 | Liglit chain, F Protein | Clone No. 804 | US20120009623 SEQ ID NO: | 24988 |
| | | | 98 | |
| RSV409 | Light chain, F Protein | Clone No. 810 | US20120009623 SEQ ID NO: | 24989 |
| | | | 99 | |
| RSV410 | Light chain, F Protein | Clone No. 811 | US20120009623 SEQ ID NO: | 24990 |
| | | | 100 | |
| RSV411 | Light chain, F Protein | Clone No. 812 | US20120009623 SEQ ID NO: | 24991 |
| | | | 101 | |
| RSV412 | Light chain, F Protein | Clone No. 814 | US20120009623 SEQ ID NO: | 24992 |
| | | | 102 | |
| RSV413 | Light chain, F Protein | Clone No. 816 | US20120009623 SEQ ID NO: | 24993 |
| | | | 103 | |
| RSV414 | Light chain, F Protein | Clone No. 817 | US20120009623 SEQ ID NO: | 24994 |
| | | | 104 | |
| RSV415 | Light chain, F Protein | Clone No. 818 | US20120009623 SEQ ID NO: | 24995 |
| | | | 105 | |
| RSV416 | Light chain, F Protein | Clone No. 819 | US20120009623 SEQ ID NO: | 24996 |
| | | | 106 | |
| RSV417 | Light chain, F Protein | Clone No. 824 | US20120009623 SEQ ID NO: | 24997 |
| | | | 107 | |
| RSV418 | Light chain, F Protein | Clone No. 825 | US20120009623 SEQ ID NO: | 24998 |
| | | | 108 | |
| RSV419 | Light chain, F Protein | Clone No. 827 | US20120009623 SEQ ID NO: | 24999 |
| | | | 109 | |
| RSV420 | Light chain, F Protein | Clone No. 829 | US20120009623 SEQ ID NO: | 25000 |
| | | | 110 | |
| RSV421 | Light chain, F Protein | Clone No. 830 | US20120009623 SEQ ID NO: | 25001 |
| | | | 111 | |
| RSV422 | Light chain, F Protein | Clone No. 831 | US20120009623 SEQ ID NO: | 25002 |
| | | | 112 | |
| RSV423 | Light chain, F Protein | Clone No. 835 | US20120009623 SEQ ID NO: | 25003 |
| | | | 113 | |
| RSV424 | Light chain, F Protein | Clone No. 838 | US20120009623 SEQ ID NO: | 25004 |
| | | | 114 | |
| RSV425 | Light chain, F Protein | Clone No. 841 | US20120009623 SEQ ID NO: | 25005 |
| | | | 115 | |
| RSV426 | Light chain, F Protein | Clone No. 853 | US20120009623 SEQ ID NO: | 25006 |
| | | | 116 | |
| RSV427 | Light chain, F Protein | Clone No. 855 | US20120009623 SEQ ID NO: | 25007 |
| | | | 117 | |
| RSV428 | Light chain, F Protein | Clone No. 856 | US20120009623 SEQ ID NO: | 25008 |
| | | | 118 | |
| RSV429 | Light chain, F Protein | Clone No. 857 | US20120009623 SEQ ID NO: | 25009 |
| | | | 119 | |
| RSV430 | Light chain, F Protein | Clone No. 858 | US20120009623 SEQ ID NO: | 25010 |
| | | | 120 | |
| RSV431 | Light chain, F Protein | Clone No. 859 | US20120009623 SEQ ID NO: | 25011 |
| | | | 121 | |
| RSV432 | Light chain, F Protein | Clone No. 861 | US20120009623 SEQ ID NO: | 25012 |
| | | | 122 | |
| RSV433 | Light chain, F Protein | Clone No. 863 | US20120009623 SEQ ID NO: | 25013 |
| | | | 123 | |
| RSV434 | Light chain, F Protein | Clone No. 868 | US20120009623 SEQ ID NO: | 25014 |
| | | | 124 | |
| RSV435 | Light chain, F Protein | Clone No. 870 | US20120009623 SEQ ID NO: | 25015 |
| | | | 125 | |
| RSV436 | Light chain, F Protein | Clone No. 871 | US20120009623 SEQ ID NO: | 25016 |
| | | | 126 | |
| RSV437 | Light chain, F Protein | Clone No. 880 | US20120009623 SEQ ID NO: | 25017 |
| | | | 127 | |
| RSV438 | Light chain, F Protein | Clone No. 881 | US20120009623 SEQ ID NO: | 25018 |
| | | | 128 | |
| RSV439 | Light chain, F Protein | Clone No. 884 | US20120009623 SEQ ID NO: | 25019 |
| | | | 129 | |
| RSV440 | Light chain, F Protein | Clone No. 886 | US20120009623 SEQ ID NO: | 25020 |
| | | | 130 | |
| RSV441 | Light chain, F Protein | Clone No. 888 | US20120009623 SEQ ID NO: | 25021 |
| | | | 131 | |
| RSV442 | Light chain, F Protein | Clone No. 894 | US20120009623 SEQ ID NO: | 25022 |
| | | | 132 | |
| RSV443 | Light chain, F Protein | | US20110027294 SEQ ID NO: | 25023 |
| | | | 63 | |
| RSV444 | Light chain, F Protein | | US20110027294 SEQ ID NO: | 25024 |
| | | | 64 | |
| RSV445 | Light chain, F Protein | | US20110027294 SEQ ID NO: | 25025 |
| | | | 65 | |
| RSV446 | Light chain, F Protein | | US20110027294 SEQ ID NO: | 25026 |
| | | | 66 | |
| RSV447 | Light chain, F Protein | | US20110027294 SEQ ID NO: | 25027 |
| | | | 67 | |
| RSV448 | Light chain, F Protein | | US20110027294 SEQ ID NO: | 25028 |
| | | | 68 | |
| RSV449 | Light chain, F Protein | | US20110027294 SEQ ID NO: | 25029 |
| | | | 69 | |
| RSV450 | Light chain, F Protein | | US20110027294 SEQ ID NO: | 25030 |
| | | | 70 | |
| RSV451 | Light chain, F Protein | | US20110027294 SEQ ID NO: | 25031 |
| | | | 71 | |
| RSV452 | Light chain, F Protein | | US20110027294 SEQ ID NO: | 25032 |
| | | | 72 | |
| RSV453 | Light chain, F Protein | | US20110027294 SEQ ID NO: | 25033 |
| | | | 73 | |
| RSV454 | Light chain, F Protein | | US20110027294 SEQ ID NO: | 25034 |
| | | | 81 | |
| RSV455 | Light chain, F Protein | | US20110027294 SEQ ID NO: | 25035 |
| | | | 82 | |
| RSV456 | Light chain, F Protein | | US20110027294 SEQ ID NO: | 25036 |
| | | | 83 | |
| RSV457 | Light chain, F Protein | | US20110027294 SEQ ID NO: | 25037 |
| | | | 84 | |
| RSV458 | Light chain, F Protein | | US20110027294 SEQ ID NO: | 25038 |
| | | | 85 | |
| RSV459 | Light chain, F Protein | | US20110027294 SEQ ID NO: | 25039 |
| | | | 86 | |
| RSV460 | Light chain, F Protein | | US20110027294 SEQ ID NO: | 25040 |
| | | | 87 | |
| RSV461 | Light chain, F Protein | | US20110027294 SEQ ID NO: | 25041 |
| | | | 88 | |
| RSV462 | Light chain, F Protein | | US20110027294 SEQ ID NO: | 25042 |
| | | | 89 | |
| RSV463 | Light chain, F Protein | | US20110027294 SEQ ID NO: | 25043 |
| | | | 90 | |
| RSV464 | Light chain, F Protein | | US20110027294 SEQ ID NO: | 25044 |
| | | | 91 | |
| RSV465 | Light chain, F Protein | | US20110027294 SEQ ID NO: | 25045 |
| | | | 92 | |
| RSV466 | Light chain, F Protein | | US20110027294 SEQ ID NO: | 25046 |
| | | | 93 | |
| RSV467 | Light chain, F Protein | | US20110027294 SEQ ID NO: | 25047 |
| | | | 94 | |
| RSV468 | Light chain, F Protein | | US20110027294 SEQ ID NO: | 25048 |
| | | | 95 | |
| RSV469 | Light chain, F Protein | | US20110027294 SEQ ID NO: | 25049 |
| | | | 96 | |
| RSV470 | Light chain, F Protein | | US20110027294 SEQ ID NO: | 25050 |
| | | | 97 | |
| RSV471 | Light chain, F Protein | | US20110027294 SEQ ID NO: | 25051 |
| | | | 98 | |
| RSV472 | Light chain, F Protein | | US20110027294 SEQ ID NO: | 25052 |
| | | | 99 | |
| RSV473 | Light chain, F Protein | | US20110027294 SEQ ID NO: | 25053 |
| | | | 100 | |
| RSV474 | Light chain, F Protein | | US20110027294 SEQ ID NO: | 25054 |
| | | | 101 | |
| RSV475 | Light chain, F Protein | | US20110027294 SEQ ID NO: | 25055 |
| | | | 102 | |
| RSV476 | Light chain, F Protein | | US20110027294 SEQ ID NO: | 25056 |
| | | | 103 | |
| RSV477 | Light chain, F Protein | | US20110027294 SEQ ID NO: | 25057 |
| | | | 104 | |
| RSV478 | Light chain, F Protein | | US20110027294 SEQ ID NO: | 25058 |
| | | | 105 | |
| RSV479 | Light chain, F Protein | | US20110027294 SEQ ID NO: | 25059 |
| | | | 106 | |
| RSV480 | Light chain, F Protein | | US20110027294 SEQ ID NO: | 25060 |
| | | | 107 | |
| RSV481 | Light chain, F Protein | | US20110027294 SEQ ID NO: | 25061 |
| | | | 108 | |
| RSV482 | Light chain, F Protein | | US20110027294 SEQ ID NO: | 25062 |
| | | | 109 | |
| RSV483 | Light chain, F Protein | | US20110027294 SEQ ID NO: | 25063 |
| | | | 110 | |
| RSV484 | Light chain, F Protein | | US20110027294 SEQ ID NO: | 25064 |
| | | | 111 | |
| RSV485 | Light chain, F Protein | | US20110027294 SEQ ID NO: | 25065 |
| | | | 112 | |
| RSV486 | Light chain, F Protein | Gλ-1A | US20050175986 SEQ ID NO: 9 | 25066 |
| RSV487 | Light chain, F Protein | A construct | US20050175986 SEQ ID NO: | 25067 |
| | | | 11 | |
| RSV488 | Light chain, F Protein | B construct | US20050175986 SEQ ID NO: | 25068 |
| | | | 12 | |
| RSV489 | Light chain, F Protein | hu19A | US20050019758; | 25069 |
| | | | WO1998019704 SEQ ID NO: | |
| | | | 10 | |
| RSV490 | Light chain, F Protein | hu19B | US20050019758; | 25070 |
| | | | WO1998019704 SEQ ID NO: | |
| | | | 11 | |
| RSV491 | Light chain, F Protein | hu19C | US20050019758; | 25071 |
| | | | WO1998019704 SEQ ID NO: | |
| | | | 12 | |
| RSV492 | Light chain, F Protein | hu19D | US20050019758; | 25072 |
| | | | WO1998019704 SEQ ID NO: | |
| | | | 13 | |
| RSV493 | Light chain, F Protein | RSV19 | EP636182; WO1993020210; | 25073 |
| | | | SEQ ID NO: 12 | |
| RSV494 | Light chain, F Protein | | WO19922004381 | 25074 |
| RSV495 | Light chain variable | P1212 | US20140044719 SEQ ID NO: | 25075 |
| | region, F Protein | | 127 | |
| RSV496 | Light chain variable | P12f4 | US20140044719 SEQ ID NO: | 25076 |
| | region, F Protein | | 134 | |
| RSV497 | Light chain variable | P11d4 | US20140044719 SEQ ID NO: | 25077 |
| | region, F Protein | | 140 | |
| RSV498 | Light chain variable | A1e9 | US20140044719 SEQ ID NO: | 25078 |
| | region, F Protein | | 146 | |
| RSV499 | Light chain variable | A12a6 | US20140044719 SEQ ID NO: | 25079 |
| | region, F Protein | | 152 | |
| RSV500 | Light chain variable | A13c4 | US20140044719 SEQ ID NO: | 25080 |
| | region, F Protein | | 158 | |
| RSV501 | Light chain variable | A17d4 | US20140044719 SEQ ID NO: | 25081 |
| | region, F Protein | | 164 | |
| RSV502 | Light chain variable | A4B4 | US20140044719 SEQ ID NO: | 25082 |
| | region, F Protein | | 169 | |
| RSV503 | Light chain variable | A8c7 | US20140044719 SEQ ID NO: | 25083 |
| | region, F Protein | | 174 | |
| RSV504 | Light chain variable | IX-493L1FR | US20140044719 SEQ ID NO: | 25084 |
| | region, F Protein | | 178 | |
| RSV505 | Light chain variable | M3H9 | US20140044719 SEQ ID NO: | 25085 |
| | region, F Protein | | 180 | |
| RSV506 | Light chain variable | B21M | US20110027294 SEQ ID NO: | 25086 |
| | region, F Protein | | 51 | |
| RSV507 | Light chain variable | 101F | US20110027294 SEQ ID NO: 6 | 25087 |
| | region, F Protein | | | |
| RSV508 | Light chain variable | HNK20 | EP1720908; WO2005079479 | 25088 |
| | region, F Protein | | SEQ ID NO: 2 | |
| RSV509 | Light chain variable | P1212 | US20140044719 SEQ ID NO: | 25089 |
| | region, F Protein | | 128 | |
| RSV510 | Light chain variable | P12f4 | US20140044719 SEQ ID NO: | 25090 |
| | region, F Protein | | 135 | |
| RSV511 | Light chain variable | P11d4 | US20140044719 SEQ ID NO: | 25091 |
| | region, F Protein | | 141 | |
| RSV512 | Light chain variable | A1e9 | US20140044719 SEQ ID NO: | 25092 |
| | region, F Protein | | 147 | |
| RSV513 | Light chain variable | A12a6 | US20140044719 SEQ ID NO: | 25093 |
| | region, F Protein | | 153 | |
| RSV514 | Light chain variable | A13c4 | US20140044719 SEQ ID NO: | 25094 |
| | region, F Protein | | 159 | |
| RSV515 | Light chain variable | A17d4 | US20140044719 SEQ ID NO: | 25095 |
| | region, F Protein | | 165 | |
| RSV516 | Light chain variable | A4B4 | US20140044719 SEQ ID NO: | 25096 |
| | region, F Protein | | 170 | |
| RSV517 | Light chain variable | A8c7 | US20140044719 SEQ ID NO: | 25097 |
| | region, F Protein | | 175 | |
| RSV518 | Light chain variable | IX-493L1FR | US20140044719 SEQ ID NO: | 25098 |
| | region, F Protein | | 179 | |
| RSV519 | Light chain variable | H1 H3564P | WO2014159822 SEQ ID NO: | 25099 |
| | region, F Protein | | 10 | |
| RSV520 | Light chain variable | H1 H3565P | WO2014159822 SEQ ID NO: | 25100 |
| | region, F Protein | | 26 | |
| RSV521 | Light chain variable | H1 H3566P | WO2014159822 SEQ ID NO: | 25101 |
| | region, F Protein | | 42 | |
| RSV522 | Light chain variable | H1 H3567P | WO2014159822 SEQ ID NO: | 25102 |
| | region, F Protein | | 58 | |
| RSV523 | Light chain variable | H1 H3581 P | WO2014159822 SEQ ID NO: | 25103 |
| | region, F Protein | | 74 | |
| RSV524 | Light chain variable | H1 H3583P | WO2014159822 SEQ ID NO: | 25104 |
| | region, F Protein | | 90 | |
| RSV525 | Light chain variable | H1 H3589P | WO2014159822 SEQ ID NO: | 25105 |
| | region, F Protein | | 106 | |
| RSV526 | Light chain variable | H1 H3591 P | WO2014159822 SEQ ID NO: | 25106 |
| | region, F Protein | | 122 | |
| RSV527 | Light chain variable | H1 H3592P | WO2014159822 SEQ ID NO: | 25107 |
| | region, F Protein | | 138 | |
| RSV528 | Light chain variable | H1 H3597P | WO2014159822 SEQ ID NO: | 25108 |
| | region, F Protein | | 154 | |
| RSV529 | Light chain variable | H1 H3598P | WO2014159822 SEQ ID NO: | 25109 |
| | region, F Protein | | 170 | |
| RSV530 | Light chain variable | H1 H3603P | WO2014159822 SEQ ID NO: | 25110 |
| | region, F Protein | | 186 | |
| RSV531 | Light chain variable | H1 H3604P | WO2014159822 SEQ ID NO: | 25111 |
| | region, F Protein | | 202 | |
| RSV532 | Light chain variable | H1 H3605P | WO2014159822 SEQ ID NO: | 25112 |
| | region, F Protein | | 218 | |
| RSV533 | Light chain variable | H1 H3607P | WO2014159822 SEQ ID NO: | 25113 |
| | region, F Protein | | 234 | |
| RSV534 | Light chain variable | H1 H3608P2 | WO2014159822 SEQ ID NO: | 25114 |
| | region, F Protein | | 250 | |
| RSV535 | Light chain variable | H1 H3592P2 | WO2014159822 SEQ ID NO: | 25115 |
| | region, F Protein | | 266 | |
| RSV536 | Light chain variable | H1 H3592P3 | WO2014159822 SEQ ID NO: | 25116 |
| | region, F Protein | | 282 | |
| RSV537 | Light chain variable | H1 M3621 N | WO2014159822 SEQ ID NO: | 25117 |
| | region, F Protein | | 298 | |
| RSV538 | Light chain variable | H1 M3622N | WO2014159822 SEQ ID NO: | 25118 |
| | region, F Protein | | 314 | |
| RSV539 | Light chain variable | H1 M2634N | WO2014159822 SEQ ID NO: | 25119 |
| | region, F Protein | | 330 | |
| RSV540 | Light chain variable | H1 M3627N | WO2014159822 SEQ ID NO: | 25120 |
| | region, F Protein | | 346 | |
| RSV541 | Light chain variable | Gλ-1 | US20050175986 SEQ ID NO: 2 | 25121 |
| | region, F Protein | | | |
| RSV542 | Light chain variable | MAb1129 | US20140093501 SEQ ID NO: | 25122 |
| | region, F Protein | | 35 | |
| RSV543 | super humanized kappa | SHVl1 | EP1720908; WO2005079479 | 25123 |
| | light chain based on | | SEQ ID NO: 10 | |
| | HNK20, F protein | | | |
| RSV544 | super humanized kappa | SHVl2 | EP1720908: WO2005079479 | 25124 |
| | light chain based on | | SEQ ID NO: 11 | |
| | HNK.20, F protein | | | |
| RSV545 | super humanized kappa | SHVl3 | EP1720908; WO2005079479 | 25125 |
| | light chain based on | | SEQ ID NO: 12 | |
| | HNK20, F protein | | | |
| RSV546 | super humanized kappa | SHVl4 | EP1720908; WO2005079479 | 25126 |
| | light chain based on | | SEQ ID NO: 13 | |
| | HNK20, F protein | | | |
| RSV547 | super humanized kappa | SHVl5 | EP1720908; WO2005079479 | 25127 |
| | light chain based on | | SEQ ID NO: 14 | |
| | HNK20, F protein | | | |
| RSV548 | super humanized kappa | SHVl6 | EP1720908; WO2005079479 | 25128 |
| | light chain based on | | SEQ ID NO: 15 | |
| | HNK20, F protein | | | |
| RSV549 | Light chain variable | B4 | EP636182; WO1993020210; | 25129 |
| | region, F Protein | | SEQ ID NO: 1 | |
| RSV550 | Light chain variable | B13/14 | EP636182; WO1993020210; | 25130 |
| | region, F Protein | | SEQ ID NO: 2 | |
| RSV551 | Light chain variable | RF-1 | EP854730; WO1996040252; | 25131 |
| | region, F Protein | | FIG. 7A | |
| RSV552 | Light chain variable | RF-2 | EP854730; WO1996040252; | 25132 |
| | region, F Protein | | FIG. 8A | |
| RSV553 | Light chain variable | CB058.1 | WO2014170257 SEQ ID NO: | 25133 |
| | region Kappa, G protein | | 38 | |
| RSV554 | Light chain variable | CB048.3 | WO2014170257 SEQ ID NO: | 25134 |
| | region Kappa, G protein | | 40 | |
| RSV555 | Light chain variable | CB010.7 | WO2014170257 SEQ ID NO: | 25135 |
| | region Kappa, G protein | | 42 | |
| RSV556 | Light chain variable | CB003.1 | WO2014170257 SEQ ID NO: | 25136 |
| | region Kappa, G protein | | 44 | |
| RSV557 | Light chain variable | CB028.2 | WO2014170257 SEQ ID NO: | 25137 |
| | region Kappa, G protein | | 46 | |
| RSV558 | Light chain variable | CB002.1 | WO2014170257 SEQ ID NO: | 25138 |
| | region Kappa, G protein | | 48 | |
| RSV559 | Light chain, G Protein | 1F12 | U.S. Pat. No. 8,273,354 SEQ ID NO: 42 | 25139 |
| RSV560 | Light chain, G Protein | 3G12 | U.S. Pat. No. 8,273,354 SEQ ID NO: 43 | 25140 |
| RSV561 | Light chain, G Protein | 1A5 | U.S. Pat. No. 8,273,354 SEQ ID NO: 44 | 25141 |
| RSV562 | Light chain, G Protein | 3D3 | U.S. Pat. No. 8,273,354 SEQ ID NO: 45 | 25142 |
| RSV563 | Light chain, G Protein | 1GI | U.S. Pat. No. 8,273,354 SEQ ID NO: 46 | 25143 |
| RSV564 | Light chain, G Protein | 2B11 | U.S. Pat. No. 8,273,354 SEQ ID NO: 47 | 25144 |
| RSV565 | Light chain, G Protein | 5D8 | U.S. Pat. No. 8,273,354 SEQ ID NO: 48 | 25145 |
| RSV566 | Light chain, G Protein | 2D10 | U.S. Pat. No. 8,273,354 SEQ ID NO: 49 | 25146 |
| RSV567 | Light chain, G Protein | 3F9 | U.S. Pat. No. 8,273,354 SEQ ID NO: 50 | 25147 |
| RSV568 | Light chain, G Protein | 1D4 | U.S. Pat. No. 8,273,354 SEQ ID NO: 51 | 25148 |
| RSV569 | Light chain, G Protein | 1G8 | U.S. Pat. No. 8,273,354 SEQ ID NO: 52 | 25149 |
| RSV570 | Light chain, G Protein | 6A12 | U.S. Pat. No. 8,273,354 SEQ ID NO: 53 | 25150 |
| RSV571 | Light chain, G Protein | 10C6 | U.S. Pat. No. 8,273,354 SEQ ID NO: 54 | 25151 |
| RSV572 | Light chain, G Protein | Hu 131-2G | U.S. Pat. No. 8,273,354 SEQ ID NO: 55 | 25152 |
| RSV573 | Light chain, G Protein | AT46 | US20150004155 SEQ ID NO: | 25153 |
| | | | 127 | |
| RSV574 | Light chain, G Protein | AT32 | US20150004155 SEQ ID NO: | 25154 |
| | | | 128 | |
| RSV575 | Light chain, G Protein | AT33 | US20150004155 SEQ ID NO: | 25155 |
| | | | 129 | |
| RSV576 | Light chain, G Protein | AT34 | US20150004155 SEQ ID NO: | 25156 |
| | | | 130 | |
| RSV577 | Light chain, G Protein | AT35 | US20150004155 SEQ ID NO: | 25157 |
| | | | 131 | |
| RSV578 | Light chain, G Protein | AT36 | US20150004155 SEQ ID NO: | 25158 |
| | | | 132 | |
| RSV579 | Light chain, G Protein | AT37 | US20150004155 SEQ ID NO: | 25159 |
| | | | 133 | |
| 134 | | | | |
| RSV580 | Light chain, G Protein | AT39 | US20150004155 SEQ ID NO: | 25160 |
| | | | 134 | |
| RSV581 | Light chain, G Protein | AT40 | US20150004155 SEQ ID NO: | 25161 |
| | | | 135 | |
| RSV582 | Light chain, G Protein | AT42 | US20150004155 SEQ ID NO: | 25162 |
| | | | 136 | |
| RSV583 | Light chain, G Protein | AT43 | US20150004155 SEQ ID NO: | 25163 |
| | | | 137 | |
| RSV584 | Light chain, G Protein | AT44 | US20150004155 SEQ ID NO: | 25164 |
| | | | 138 | |
| RSV585 | Light chain, G Protein | AT45 | US20150004155 SEQ ID NO: | 25165 |
| | | | 139 | |
| RSV586 | Light chain, G Protein | AT47 | US20150004155 SEQ ID NO: | 25166 |
| | | | 140 | |
| RSV587 | Light chain, G Protein | AT49 | US20150004155 SEQ ID NO: | 25167 |
| | | | 141 | |
| RSV588 | Light chain, G Protein | AT50 | US20150004155 SEQ ID NO: | 25168 |
| | | | 142 | |
| RSV589 | Light chain, G Protein | AT51 | US20150004155 SEQ ID NO: | 25169 |
| | | | 143 | |
| RSV590 | Light chain variable | CB017.3L | WO2014170258 SEQ ID NO: | 25170 |
| | region, G Protein | | 74 | |
| RSV591 | Light chain variable | CB017.5L | WO2014170258 SEQ ID NO: | 25171 |
| | region, G Protein | | 76 | |
| RSV592 | Light chain variable | CB028.1 | WO2014170258 SEQ ID NO: | 25172 |
| | region, G Protein | | 78 | |
| RSV593 | Light chain variable | CB030.1 | WO2014170258 SEQ ID NO: | 25173 |
| | region, G Protein | | 80 | |
| RSV594 | Light chain variable | CB047.1 | WO2014170258 SEQ ID NO: | 25174 |
| | region, G Protein | | 82 | |
| RSV595 | Light chain variable | CB047.2 | WO2014170258 SEQ ID NO: | 25175 |
| | region, G Protein | | 84 | |
| RSV596 | Light chain variable | CB065.1 | WO2014170258 SEQ ID NO: | 25176 |
| | region, G Protein | | 86 | |
| RSV597 | Light chain variable | CB071.1L | WO2014170258 SEQ ID NO: | 25177 |
| | region, G Protein | | 88 | |
| RSV598 | Light chain variable | CB072.1L | WO2014170258 SEQ ID NO: | 25178 |
| | region, G Protein | | 90 | |
| RSV599 | Light chain variable | CB073.1L | WO2014170258 SEQ ID NO: | 25179 |
| | region, G Protein | | 92 | |
| RSV600 | Light chain variable | CB076.2L | WO2014170258 SEQ ID NO: | 25180 |
| | region, G Protein | | 94 | |
| RSV601 | Light chain variable | CB079.1 | WO2014170258 SEQ ID NO: | 25181 |
| | region, G Protein | | 96 | |
| RSV602 | Light chain, human | | Wen,X., “Structure of the | 25182 |
| | metapneumovirus fusion | | human metapneumovirus fusion | |
| | protein with | | protein with neutralizing | |
| | neutralizing antibody | | antibody identifies a | |
| | identifies a pneumovirus | | pneumovirus antigenic site”, | |
| | antigenic site | | Nat. Struct. Mol. Biol. 19 (4), | |
| | | | 461-463 (2012), NCBI | |
| | | | Accession # 4DAG L(213 aa) | |
| RSV603 | Light chain | AM14 | US20140377279 SEQ ID NO: | 25183 |
| | | | 79 | |
| RSV604 | Light chain | AM16 | US20140377279 SEQ ID NO: | 25184 |
| | | | 86 | |
| RSV605 | Light chain | AM23 | US20140377279 SEQ ID NO: | 25185 |
| | | | 93 | |
| RSV606 | Light chain | D25 | US20140377279 SEQ ID NO: 8 | 25186 |
| RSV607 | Light chain | AFFF | U.S. Pat. No. 7,635,568 SEQ ID NO: 211 | 25187 |
| RSV608 | Light chain | P12f2 | U.S. Pat. No. 7,635,568 SEQ ID NO: 213 | 25188 |
| RSV609 | Light chain | P12f4 | U.S. Pat. No. 7,635,568 SEQ ID NO: 215 | 25189 |
| RSV610 | Light chain | P11d4 | U.S. Pat. No. 7,635,568 SEQ ID NO: 217 | 25190 |
| RSV611 | Light chain | A1e9 | U.S. Pat. No. 7,635,568 SEQ ID NO: 219 | 25191 |
| RSV612 | Light chain | A12a6 | U.S. Pat. No. 7,635,568 SEQ ID NO: 221 | 25192 |
| RSV613 | Light chain | A13c4 | U.S. Pat. No. 7,635,568 SEQ ID NO: 223 | 25193 |
| RSV614 | Light chain | A17d4 | U.S. Pat. No. 7,635,568 SEQ ID NO: 225 | 25194 |
| RSV615 | Light chain | A4B4 | U.S. Pat. No. 7,635,568 SEQ ID NO: 227 | 25195 |
| RSV616 | Light chain | A8c7 | U.S. Pat. No. 7,635,568 SEQ ID NO: 229 | 25196 |
| RSV617 | Light chain | 1X-493L1FR | U.S. Pat. No. 7,635,568 SEQ ID NO: 231 | 25197 |
| RSV618 | Light chain | H3-3F4 | U.S. Pat. No. 7,635,568 SEQ ID NO: 233 | 25198 |
| RSV619 | Light chain | M3H9 | U.S. Pat. No. 7,635,568 SEQ ID NO: 235 | 25199 |
| RSV620 | Light chain | Y10H6 | U.S. Pat. No. 7,635,568 SEQ ID NO: 237 | 25200 |
| RSV621 | Light chain | DG | U.S. Pat. No. 7,635,568 SEQ ID NO: 239 | 25201 |
| RSV622 | Light chain | AFFF(1) | U.S. Pat. No. 7,635,568 SEQ ID NO: 241 | 25202 |
| RSV623 | Light chain | 6H8 | U.S. Pat. No. 7,635,568 SEQ ID NO: 243 | 25203 |
| RSV624 | Light chain | L1-7E5 | U.S. Pat. No. 7,635,568 SEQ ID NO: 245 | 25204 |
| RSV625 | Light chain | L2-15B10 | U.S. Pat. No. 7,635,568 SEQ ID NO: 247 | 25205 |
| RSV626 | Light chain | A13a11 | U.S. Pat. No. 7,635,568 SEQ ID NO: 249 | 25206 |
| RSV627 | Light chain | A1h5 | U.S. Pat. No. 7,635,568 SEQ ID NO: 251 | 25207 |
| RSV628 | Light chain | A4B4(1) | U.S. Pat. No. 7,635,568 SEQ ID NO: 253 | 25208 |
| RSV629 | Light chain | A4B4L1FR-S28R | U.S. Pat. No. 7,635,568 SEQ ID NO: 255 | 25209 |
| RSV630 | Light chain | A4B4-F52S | U.S. Pat. No. 7,635,568 SEQ ID NO: 257 | 25210 |
| RSV631 | Light chain variable | AFFF | U.S. Pat. No. 7,635,568 SEQ ID NO: 13 | 25211 |
| | region | | | |
| RSV632 | Light chain variable | P12f2 | U.S. Pat. No. 7,635,568 SEQ ID NO: 21 | 25212 |
| | region | | | |
| RSV633 | Light chain variable | P12f4 | U.S. Pat. No. 7,635,568 SEQ ID NO: 26 | 25213 |
| | region | | | |
| RSV634 | Light chain variable | P11d4 | U.S. Pat. No. 7,635,568 SEQ ID NO: 30 | 25214 |
| | region | | | |
| RSV635 | Light chain variable | A1e9 | U.S. Pat. No. 7,635,568 SEQ ID NO: 34 | 25215 |
| | region | | | |
| RSV636 | Light chain variable | A12a6 | U.S. Pat. No. 7,635,568 SEQ ID NO: 38 | 25216 |
| | region | | | |
| RSV637 | Light chain variable | A13c4 | U.S. Pat. No. 7,635,568 SEQ ID NO: 42 | 25217 |
| | region | | | |
| RSV638 | Light chain variable | A17d4 | U.S. Pat. No. 7,635,568 SEQ ID NO: 46 | 25218 |
| | region | | | |
| RSV639 | Light chain variable | A4B4 | U.S. Pat. No. 7,635,568 SEQ ID NO: 49 | 25219 |
| | region | | | |
| RSV640 | Light chain variable | A8c7 | U.S. Pat. No. 7,635,568 SEQ ID NO: 52 | 25220 |
| | region | | | |
| RSV641 | Light chain variable | 1X-493L1FR | U.S. Pat. No. 7,635,568 SEQ ID NO: 54 | 25221 |
| | region | | | |
| RSV642 | Light chain variable | H3-3F4, DG | U.S. Pat. No. 7,635,568 SEQ ID NO: 56 | 25222 |
| | region | | | |
| RSV643 | Light chain variable | M3H9 | U.S. Pat. No. 7,635,568 SEQ ID NO: 70 | 25223 |
| | region | | | |
| region | | | | |
| RSV644 | Light chain variable | Y10H6 | U.S. Pat. No. 7,635,568 SEQ ID NO: 58 | 25224 |
| | region | | | |
| RSV645 | Light chain variable | AFFF(1) | U.S. Pat. No. 7,635,568 SEQ ID NO: 60 | 25225 |
| | region | | | |
| RSV646 | Light chain variable | 6H8 | U.S. Pat. No. 7,635,568 SEQ ID NO: 62 | 25226 |
| | region | | | |
| RSV647 | Light chain variable | L1-7E5 | U.S. Pat. No. 7,635,568 SEQ ID NO: 64 | 25227 |
| | region | | | |
| RSV648 | Light chain variable | L2-15B10 | U.S. Pat. No. 7,635,568 SEQ ID NO: 65 | 25228 |
| | region | | | |
| RSV649 | Light chain variable | A13a11 | U.S. Pat. No. 7,635,568 SEQ ID NO: 68 | 25229 |
| | region | | | |
| RSV650 | Light chain variable | A1h5 | U.S. Pat. No. 7,635,568 SEQ ID NO: 71 | 25230 |
| | region | | | |
| RSV651 | Light chain variable | A4B4(1) | U.S. Pat. No. 7,635,568 SEQ ID NO: 74 | 25231 |
| | region | | | |
| RSV652 | Light chain variable | A4B4L1FR-S28R | U.S. Pat. No. 7,635,568 SEQ ID NO: 11 | 25232 |
| | region | | | |
| RSV653 | Light chain variable | A4B4-F52S | U.S. Pat. No. 7,635,568 SEQ ID NO: 76 | 25233 |
| | region | | | |
| RSV654 | Light chain variable | 6H; 11H; 21H; | U.S. Pat. No. 7,364,737 SEQ ID NO: 21 | 25234 |
| | region | 22H; and 23H | | |
| RSV655 | Light chain variable | 13H and 19H | U.S. Pat. No. 7,364,737 SEQ ID NO: 22 | 25235 |
| | region | | | |
| RSV656 | Light chain variable | 6L; 11L; 21L; and | U.S. Pat. No. 7,364,737 SEQ ID NO: 23 | 25236 |
| | region | 22L | | |
| RSV657 | Light chain variable | 23L | U.S. Pat. No. 7,364,737 SEQ ID NO: 24 | 25237 |
| | region | | | |
| RSV658 | Light chain variable | 13L and 19L | U.S. Pat. No. 7,364,737 SEQ ID NO: 25 | 25238 |
| | region | | | |
| RSV659 | Light chain variable | | U.S. Pat. No. 7,364,742 SEQ ID NO: 9 | 25239 |
| | region | | | |
| RSV660 | Light chain variable | | U.S. Pat. No. 7,364,742 SEQ ID NO: 10 | 25240 |
| | region | | | |
| RSV661 | Light chain variable | | U.S. Pat. No. 7,364,742 SEQ ID NO: 11 | 25241 |
| | region | | | |
| RSV662 | Light chain variable | | U.S. Pat. No. 7,364,742 SEQ ID NO: 12 | 25242 |
| | region | | | |
| RSV663 | Light chain variable | D2E7 | EP1807111; WO2006041970 | 25243 |
| | region | | SEQ ID NO: 1 | |
| RSV664 | Light chain variable | 2SD4 | EP1807111; WO2006041970 | 25244 |
| | region | | SEQ ID NO: 9 | |
| RSV665 | Light chain variable, M2 | 8A4/G9 - IgG | US20140348858 SEQ ID NO: 4 | 25245 |
| | 1 antigen | | | |
| RSV666 | Light chain, Pre fusion | HMB2435 | WO2015010792 SEQ ID NO: | 25246 |
| | RSV F protein | | 14 | |
| RSV667 | Light chain, Pre fusion | HMB2437 | WO2015010792 SEQ ID NO: | 25247 |
| | RSV F protein | | 30 | |
| RSV668 | Light chain, Pre fusion | HMB2416 | WO2015010792 SEQ ID NO: | 25248 |
| | RSV F protein | | 46 | |
| RSV669 | Light chain, Pre fusion | HMB2437 | WO2015010792 SEQ ID NO: | 25249 |
| | RSV F protein | | 86 | |
| RSV670 | Light chain, Pre fusion | CR9501 | WO2014202570 SEQ ID NO: | 25250 |
| | RSV F protein | | 61 | |
| RSV671 | Light chain, Pre fusion | CR9502 | WO2014202570 SEQ ID NO: | 25251 |
| | RSV F protein | | 65 | |
| RSV672 | Light chain 1, Pre fusion | HMB2432 | WO2015010792 SEQ ID NO: | 25252 |
| | RSV F protein | | 62 | |
| RSV673 | Light chain FR GL, Pre | HMB2432 | WO2015010792 SEQ ID NO: | 25253 |
| | fusion RSV F protein | | 66 | |
| RSV674 | Light chain 2, Pre fusion | HMB2435 | WO2015010792 SEQ ID NO: | 25254 |
| | RSV F protein | | 76 | |
| RSV675 | derived Ig variable region | RSV19VH | EP636182; WO1993020210; | 25255 |
| | amino acid sequence, F | | SEQ ID NO: 13 | |
| | protein | | | |
| RSV676 | derived Ig variable region | pHuRSV19VH | EP636182; WO1993020210; | 25256 |
| | amino acid sequence, F | | SEQ ID NO: 14 | |
| | protein | | | |
| RSV677 | derived Ig variable region | pHuRSV19VHFNS | EP636182; WO1993020210; | 25257 |
| | amino acid sequence, F | | SEQ ID NO: 15 | |
| | protein | | | |
| RSV678 | derived Ig variable region | pHuRSV19VHNIK | EP636182; WO1993020210; | 25258 |
| | amino acid sequence, F | | SEQ ID NO: 16 | |
| | protein | | | |
| RSV679 | derived Ig variable region | pHuRSV19VK | EP636182; WO1993020210; | 25259 |
| | amino acid sequence, F | | SEQ ID NO: 17 | |
| | protein | | | |
| RSV680 | Nanobody binding to | LG202A10 | US20110182897 SEQ ID NO: | 25260 |
| | RSV F protein | | 126 | |
| RSV681 | Nanobody binding to | LG202A12 | US20110182897 SEQ ID NO: | 25261 |
| | RSV F protein | | 127 | |
| RSV682 | Nanobody binding to | LG202A5 | US20110182897 SEQ ID NO: | 25262 |
| | RSV F protein | | 128 | |
| RSV683 | Nanobody binding to | LG202A9 | US20110182897 SEQ ID NO: | 25263 |
| | RSV F protein | | 129 | |
| RSV684 | Nanobody binding to | LG202B10 | US20110182897 SEQ ID NO: | 25264 |
| | RSV F protein | | 130 | |
| RSV685 | Nanobody binding to | LG202B7 | US20110182897 SEQ ID NO: | 25265 |
| | RSV F protein | | 131 | |
| RSV686 | Nanobody binding to | LG202B8 | US20110182897 SEQ ID NO: | 25266 |
| | RSV F protein | | 132 | |
| RSV687 | Nanobody binding to | LG202B9 | US20110182897 SEQ ID NO: | 25267 |
| | RSV F protein | | 133 | |
| RSV688 | Nanobody binding to | LG202C1 | US20110182897 SEQ ID NO: | 25268 |
| | RSV F protein | | 134 | |
| RSV689 | Nanobody binding to | LG202C11 | US20110182897 SEQ ID NO: | 25269 |
| | RSV F protein | | 135 | |
| RSV690 | Nanobody binding to | LG202C2 | US20110182897 SEQ ID NO: | 25270 |
| | RSV F protein | | 136 | |
| RSV691 | Nanobody binding to | LG202C7 | US20110182897 SEQ ID NO: | 25271 |
| | RSV F protein | | 137 | |
| RSV692 | Nanobody binding to | LG202C8 | US20110182897 SEQ ID NO: | 25272 |
| | RSV F protein | | 138 | |
| RSV693 | Nanobody binding to | LG202C9 | US20110182897 SEQ ID NO: | 25273 |
| | RSV F protein | | 139 | |
| RSV694 | Nanobody binding to | LG202D5 | US20110182897 SEQ ID NO: | 25274 |
| | RSV F protein | | 140 | |
| RSV695 | Nanobody binding to | LG202D7 | US20110182897 SEQ ID NO: | 25275 |
| | RSV F protein | | 141 | |
| RSV696 | Nanobody binding to | LG202D8 | US20110182897 SEQ ID NO: | 25276 |
| | RSV F protein | | 142 | |
| RSV697 | Nanobody binding to | LG202E11 | US20110182897 SEQ ID NO: | 25277 |
| | RSV F protein | | 143 | |
| RSV698 | Nanobody binding to | LG202E2 | US20110182897 SEQ ID NO: | 25278 |
| | RSV F protein | | 144 | |
| RSV699 | Nanobody binding to | LG202E5 | US20110182897 SEQ ID NO: | 25279 |
| | RSV F protein | | 145 | |
| RSV700 | Nanobody binding to | LG202E6 | US20110182897 SEQ ID NO: | 25280 |
| | RSV F protein | | 146 | |
| RSV701 | Nanobody binding to | LG202E7 | US20110182897 SEQ ID NO: | 25281 |
| | RSV F protein | | 147 | |
| RSV702 | Nanobody binding to | LG202F10 | US20110182897 SEQ ID NO: | 25282 |
| | RSV F protein | | 148 | |
| RSV703 | Nanobody binding to | LG202F12 | US20110182897 SEQ ID NO: | 25283 |
| | RSV F protein | | 149 | |
| RSV704 | Nanobody binding to | LG202F3 | US20110182897 SEQ ID NO: | 25284 |
| | RSV F protein | | 150 | |
| RSV705 | Nanobody binding to | LG202F4 | US20110182897 SEQ ID NO: | 25285 |
| | RSV F protein | | 151 | |
| RSV706 | Nanobody binding to | LG202F8 | US20110182897 SEQ ID NO: | 25286 |
| | RSV F protein | | 152 | |
| RSV707 | Nanobody binding to | LG202G11 | US20110182897 SEQ ID NO: | 25287 |
| | RSV F protein | | 153 | |
| RSV708 | Nanobody binding to | LG202G3 | US20110182897 SEQ ID NO: | 25288 |
| | RSV F protein | | 154 | |
| RSV709 | Nanobody binding to | LG202G8 | US20110182897 SEQ ID NO: | 25289 |
| | RSV F protein | | 155 | |
| RSV710 | Nanobody binding to | LG202H2 | US20110182897 SEQ ID NO: | 25290 |
| | RSV F protein | | 156 | |
| RSV711 | Nanobody binding to | LG202H8 | US20110182897 SEQ ID NO: | 25291 |
| | RSV F protein | | 157 | |
| RSV712 | Nanobody binding to | LG191B9 | US20110182897 SEQ ID NO: | 25292 |
| | RSV F protein | | 158 | |
| RSV713 | Nanobody binding to | LG191D3 | US20110182897 SEQ ID NO: | 25293 |
| | RSV F protein | | 159 | |
| RSV714 | Nanobody binding to | LG192A8 | US20110182897 SEQ ID NO: | 25294 |
| | RSV F protein | | 160 | |
| RSV715 | Nanobody binding to | LG192B1 | US20110182897 SEQ ID NO: | 25295 |
| | RSV F protein | | 161 | |
| RSV716 | Nanobody binding to | LG192C10 | US20110182897 SEQ ID NO: | 25296 |
| | RSV F protein | | 162 | |
| RSV717 | Nanobody binding to | LG192C4 | US20110182897 SEQ ID NO: | 25297 |
| | RSV F protein | | 163 | |
| RSV718 | Nanobody binding to | LG192C6 | US20110182897 SEQ ID NO: | 25298 |
| | RSV F protein | | 164 | |
| RSV719 | Nanobody binding to | LG192D3 | US20110182897 SEQ ID NO: | 25299 |
| | RSV F protein | | 165 | |
| RSV720 | Nanobody binding to | LG191E4 | US20110182897 SEQ ID NO: | 25300 |
| | RSV F protein | | 166 | |
| RSV721 | Nanobody binding to | LG192F2 | US20110182897 SEQ ID NO: | 25301 |
| | RSV F protein | | 167 | |
| RSV722 | Nanobody binding to | LG192H1 | US20110182897 SEQ ID NO: | 25302 |
| | RSV F protein | | 168 | |
| RSV723 | Nanobody binding to | LG192H2 | US20110182897 SEQ ID NO: | 25303 |
| | RSV F protein | | 169 | |
| RSV724 | Nanobody binding to | LG20610B | US20110182897 SEQ ID NO: | 25304 |
| | RSV F protein | | 170 | |
| RSV725 | Nanobody binding to | LG20610C | US20110182897 SEQ ID NO: | 25305 |
| | RSV F protein | | 171 | |
| RSV726 | Nanobody binding to | LG20610D | US20110182897 SEQ ID NO: | 25306 |
| | RSV F protein | | 172 | |
| RSV727 | Nanobody binding to | LG20610E | US20110182897 SEQ ID NO: | 25307 |
| | RSV F protein | | 173 | |
| RSV728 | Nanobody binding to | LG20610F | US20110182897 SEQ ID NO: | 25308 |
| | RSV F protein | | 174 | |
| RSV729 | Nanobody binding to | LG20611D | US20110182897 SEQ ID NO: | 25309 |
| | RSV F protein | | 175 | |
| RSV730 | Nanobody binding to | LG20611H | US20110182897 SEQ ID NO: | 25310 |
| | RSV F protein | | 176 | |
| RSV731 | Nanobody binding to | LG20612F | US20110182897 SEQ ID NO: | 25311 |
| | RSV F protein | | 177 | |
| RSV732 | Nanobody binding to | LG2062A | US20110182897 SEQ ID NO: | 25312 |
| | RSV F protein | | 178 | |
| RSV733 | Nanobody binding to | LG2062C | US20110182897 SEQ ID NO: | 25313 |
| | RSV F protein | | 179 | |
| RSV734 | Nanobody binding to | LG2062E | US20110182897 SEQ ID NO: | 25314 |
| | RSV F protein | | 180 | |
| RSV735 | Nanobody binding to | LG2062F | US20110182897 SEQ ID NO: | 25315 |
| | RSV F protein | | 181 | |
| RSV736 | Nanobody binding to | LG2062G | US20110182897 SEQ ID NO: | 25316 |
| | RSV F protein | | 182 | |
| RSV737 | Nanobody binding to | LG2062H | US20110182897 SEQ ID NO: | 25317 |
| | RSV F protein | | 183 | |
| RSV738 | Nanobody binding to | LG2063A | US20110182897 SEQ ID NO: | 25318 |
| | RSV F protein | | 184 | |
| RSV739 | Nanobody binding to | LG2063B | US20110182897 SEQ ID NO: | 25319 |
| | RSV F protein | | 185 | |
| RSV740 | Nanobody binding to | LG2063C | US20110182897 SEQ ID NO: | 25320 |
| | RSV F protein | | 186 | |
| RSV741 | Nanobody binding to | LG2063D | US20110182897 SEQ ID NO: | 25321 |
| | RSV F protein | | 187 | |
| RSV742 | Nanobody binding to | LG2063E | US20110182897 SEQ ID NO: | 25322 |
| | RSV F protein | | 188 | |
| RSV743 | Nanobody binding to | LG2063F | US20110182897 SEQ ID NO: | 25323 |
| | RSV F protein | | 189 | |
| RSV744 | Nanobody binding to | LG2064D | US20110182897 SEQ ID NO: | 25324 |
| | RSV F protein | | 190 | |
| RSV745 | Nanobody binding to | LG2064G | US20110182897 SEQ ID NO: | 25325 |
| | RSV F protein | | 191 | |
| RSV746 | Nanobody binding to | LG2065A | US20110182897 SEQ ID NO: | 25326 |
| | RSV F protein | | 192 | |
| RSV747 | Nanobody binding to | LG2065E | US20110182897 SEQ ID NO: | 25327 |
| | RSV F protein | | 193 | |
| RSV748 | Nanobody binding to | LG2066A | US20110182897 SEQ ID NO: | 25328 |
| | RSV F protein | | 194 | |
| RSV749 | Nanobody binding to | LG2066D | US20110182897 SEQ ID NO: | 25329 |
| | RSV F protein | | 195 | |
| RSV750 | Nanobody binding to | LG2067B | US20110182897 SEQ ID NO: | 25330 |
| | RSV F protein | | 196 | |
| RSV751 | Nanobody binding to | LG2067C | US20110182897 SEQ ID NO: | 25331 |
| | RSV F protein | | 197 | |
| RSV752 | Nanobody binding to | LG2067E | US20110182897 SEQ ID NO: | 25332 |
| | RSV F protein | | 198 | |
| RSV753 | Nanobody binding to | LG2067G | US20110182897 SEQ ID NO: | 25333 |
| | RSV F protein | | 199 | |
| RSV754 | Nanobody binding to | LG2067H | US20110182897 SEQ ID NO: | 25334 |
| | RSV F protein | | 200 | |
| RSV755 | Nanobody binding to | LG20711A | US20110182897 SEQ ID NO: | 25335 |
| | RSV F protein | | 201 | |
| RSV756 | Nanobody binding to | LG20711B | US20110182897 SEQ ID NO: | 25336 |
| | RSV F protein | | 202 | |
| RSV757 | Nanobody binding to | LG20711D | US20110182897 SEQ ID NO: | 25337 |
| | RSV F protein | | 203 | |
| RSV758 | Nanobody binding to | LG20711E | US20110182897 SEQ ID NO: | 25338 |
| | RSV F protein | | 204 | |
| RSV759 | Nanobody binding to | LG20711F | US20110182897 SEQ ID NO: | 25339 |
| | RSV F protein | | 205 | |
| RSV760 | Nanobody binding to | LG20711G | US20110182897 SEQ ID NO: | 25340 |
| | RSV F protein | | 206 | |
| RSV761 | Nanobody binding to | LG20711H | US20110182897 SEQ ID NO: | 25341 |
| | RSV F protein | | 207 | |
| RSV762 | Nanobody binding to | LG2071A | US20110182897 SEQ ID NO: | 25342 |
| | RSV F protein | | 208 | |
| RSV763 | Nanobody binding to | LG2071B | US20110182897 SEQ ID NO: | 25343 |
| | RSV F protein | | 209 | |
| RSV764 | Nanobody binding to | LG2071C | US20110182897 SEQ ID NO: | 25344 |
| | RSV F protein | | 210 | |
| RSV765 | Nanobody binding to | LG207D1 | US20110182897 SEQ ID NO: | 25345 |
| | RSV F protein | | 211 | |
| RSV766 | Nanobody binding to | LG2071E | US20110182897 SEQ ID NO: | 25346 |
| | RSV F protein | | 212 | |
| RSV767 | Nanobody binding to | LG2071F | US20110182897 SEQ ID NO: | 25347 |
| | RSV F protein | | 213 | |
| RSV768 | Nanobody binding to | LG2074A | US20110182897 SEQ ID NO: | 25348 |
| | RSV F protein | | 214 | |
| RSV769 | Nanobody binding to | LG2074B | US20110182897 SEQ ID NO: | 25349 |
| | RSV F protein | | 215 | |
| RSV770 | Nanobody binding to | LG2074D | US20110182897 SEQ ID NO: | 25350 |
| | RSV F protein | | 216 | |
| RSV771 | Nanobody binding to | LG2074H | US20110182897 SEQ ID NO: | 25351 |
| | RSV F protein | | 217 | |
| RSV772 | Nanobody binding to | LG2075A | US20110182897 SEQ ID NO: | 25352 |
| | RSV F protein | | 218 | |
| RSV773 | Nanobody binding to | LG2075B | US20110182897 SEQ ID NO: | 25353 |
| | RSV F protein | | 219 | |
| RSV774 | Nanobody binding to | LG2075C | US20110182897 SEQ ID NO: | 25354 |
| | RSV F protein | | 220 | |
| RSV775 | Nanobody binding to | LG2075D | US20110182897 SEQ ID NO: | 25355 |
| | RSV F protein | | 221 | |
| RSV776 | Nanobody binding to | LG2075E | US20110182897 SEQ ID NO: | 25356 |
| | RSV F protein | | 222 | |
| RSV777 | Nanobody binding to | LG2076A | US20110182897 SEQ ID NO: | 25357 |
| | RSV F protein | | 223 | |
| RSV778 | Nanobody binding to | LG2076B | US20110182897 SEQ ID NO: | 25358 |
| | RSV F protein | | 224 | |
| RSV779 | Nanobody binding to | LG2076C | US20110182897 SEQ ID NO: | 25359 |
| | RSV F protein | | 225 | |
| RSV780 | Nanobody binding to | LG2076D | US20110182897 SEQ ID NO: | 25360 |
| | RSV F protein | | 226 | |
| RSV781 | Nanobody binding to | LG2076E | US20110182897 SEQ ID NO: | 25361 |
| | RSV F protein | | 227 | |
| RSV782 | Nanobody binding to | LG2076F | US20110182897 SEQ ID NO: | 25362 |
| | RSV F protein | | 228 | |
| RSV783 | Nanobody binding to | LG2079A | US20110182897 SEQ ID NO: | 25363 |
| | RSV F protein | | 229 | |
| RSV784 | Nanobody binding to | LG2079B | US20110182897 SEQ ID NO: | 25364 |
| | RSV F protein | | 230 | |
| RSV785 | Nanobody binding to | LG2079C | US20110182897 SEQ ID NO: | 25365 |
| | RSV F protein | | 231 | |
| RSV786 | Nanobody binding to | LG2079D | US20110182897 SEQ ID NO: | 25366 |
| | RSV F protein | | 232 | |
| RSV787 | Nanobody binding to | LG2079E | US20110182897 SEQ ID NO: | 25367 |
| | RSV F protein | | 233 | |
| RSV788 | Nanobody binding to | LG2079F | US20110182897 SEQ ID NO: | 25368 |
| | RSV F protein | | 234 | |
| RSV789 | Nanobody binding to | LG2079G | US20110182897 SEQ ID NO: | 25369 |
| | RSV F protein | | 235 | |
| RSV790 | Nanobody binding to | LG2079H | US20110182897 SEQ ID NO: | 25370 |
| | RSV F protein | | 236 | |
| RSV791 | Nanobody binding to | LG213B7 | US20110182897 SEQ ID NO: | 25371 |
| | RSV F protein | | 237 | |
| RSV792 | Nanobody binding to | LG213D6 | US20110182897 SEQ ID NO: | 25372 |
| | RSV F protein | | 238 | |
| RSV793 | Nanobody binding to | LG213D7 | US20110182897 SEQ ID NO: | 25373 |
| | RSV F protein | | 239 | |
| RSV794 | Nanobody binding to | LG213E6 | US20110182897 SEQ ID NO: | 25374 |
| | RSV F protein | | 240 | |
| RSV795 | Nanobody binding to | LG213H7 | US20110182897 SEQ ID NO: | 25375 |
| | RSV F protein | | 241 | |
| RSV796 | Nanobody binding to | LG214A8 | US20110182897 SEQ ID NO: | 25376 |
| | RSV F protein | | 242 | |
| RSV797 | Nanobody binding to | LG214C10 | US20110182897 SEQ ID NO: | 25377 |
| | RSV F protein | | 243 | |
| RSV798 | Nanobody binding to | LG214D10 | US20110182897 SEQ ID NO: | 25378 |
| | RSV F protein | | 244 | |
| RSV799 | Nanobody binding to | LG214E8 | US20110182897 SEQ ID NO: | 25379 |
| | RSV F protein | | 245 | |
| RSV800 | Nanobody binding to | LG214F8 | US20110182897 SEQ ID NO: | 25380 |
| | RSV F protein | | 246 | |
| RSV801 | Nanobody binding to | LG214H10 | US20110182897 SEQ ID NO: | 25381 |
| | RSV F protein | | 247 | |
| RSV802 | Nanobody binding to | RSVPMP5C1 | US20110182897 SEQ ID NO: | 25382 |
| | RSV F protein | | 248 | |
| RSV803 | Nanobody binding to | RSVPMP8A1 | US20110182897 SEQ ID NO: | 25383 |
| | RSV F protein | | 249 | |
| RSV804 | Nanobody binding to | RSVPMP8G1 | US20110182897 SEQ ID NO: | 25384 |
| | RSV F protein | | 250 | |
| RSV805 | Nanobody binding to | RSVPMP25B3 | US20110182897 SEQ ID NO: | 25385 |
| | RSV F protein | | 251 | |
| RSV806 | Nanobody binding to | RSVPMP8C8 | US20110182897 SEQ ID NO: | 25386 |
| | RSV F protein | | 252 | |
| RSV807 | Nanobody binding to | RSVPMP5A6 | US20110182897 SEQ ID NO: | 25387 |
| | RSV F protein | | 253 | |
| RSV808 | Nanobody binding to | RSVPMP8E11 | US20110182897 SEQ ID NO: | 25388 |
| | RSV F protein | | 254 | |
| RSV809 | Nanobody binding to | RSVPMP8F11 | US20110182897 SEQ ID NO: | 25389 |
| | RSV F protein | | 255 | |
| RSV810 | Nanobody binding to | RSVPMP13F11 | US20110182897 SEQ ID NO: | 25390 |
| | RSV F protein | | 256 | |
| RSV811 | Nanobody binding to | RSVPMP15B8 | US20110182897 SEQ ID NO: | 25391 |
| | RSV F protein | | 257 | |
| RSV812 | Nanobody binding to | RSVPMP15G11 | US20110182897 SEQ ID NO: | 25392 |
| | RSV F protein | | 258 | |
| RSV813 | Nanobody binding to | RSVPMP17C10 | US20110182897 SEQ ID NO: | 25393 |
| | RSV F protein | | 259 | |
| RSV814 | Nanobody binding to | RSVPMP21E7 | US20110182897 SEQ ID NO: | 25394 |
| | RSV F protein | | 260 | |
| RSV815 | Nanobody binding to | RSVPMP21F8 | US20110182897 SEQ ID NO: | 25395 |
| | RSV F protein | | 261 | |
| RSV816 | Nanobody binding to | RSVPMP5A2 | US20110182897 SEQ ID NO: | 25396 |
| | RSV F protein | | 262 | |
| RSV817 | Nanobody binding to | RSVPMP5B2 | US20110182897 SEQ ID NO: | 25397 |
| | RSV F protein | | 263 | |
| RSV818 | Nanobody binding to | RSVPMP5C3 | US20110182897 SEQ ID NO: | 25398 |
| | RSV F protein | | 264 | |
| RSV819 | Nanobody binding to | RSVPMP5D2 | US20110182897 SEQ ID NO: | 25399 |
| | RSV F protein | | 265 | |
| RSV820 | Nanobody binding to | RSVPMP5E2 | US20110182897 SEQ ID NO: | 25400 |
| | RSV F protein | | 266 | |
| RSV821 | Nanobody binding to | RSVPMP5F3 | US20110182897 SEQ ID NO: | 25401 |
| | RSV F protein | | 267 | |
| RSV822 | Nanobody binding to | RSVPMP5G3 | US20110182897 SEQ ID NO: | 25402 |
| | RSV F protein | | 268 | |
| RSV823 | Nanobody binding to | RSVPMP5H2 | US20110182897 SEQ ID NO: | 25403 |
| | RSV F protein | | 269 | |
| RSV824 | Nanobody binding to | RSVPMP5H3 | US20110182897 SEQ ID NO: | 25404 |
| | RSV F protein | | 270 | |
| RSV825 | Nanobody binding to | RSVPMP8C1 | US20110182897 SEQ ID NO: | 25405 |
| | RSV F protein | | 271 | |
| RSV826 | Nanobody binding to | RSVPMP8F2 | US20110182897 SEQ ID NO: | 25406 |
| | RSV F protein | | 272 | |
| RSV827 | Nanobody binding to | RSVPMP8G4 | US20110182897 SEQ ID NO: | 25407 |
| | RSV F protein | | 273 | |
| RSV828 | Nanobody binding to | RSVPMP13A1 | US20110182897 SEQ ID NO: | 25408 |
| | RSV F protein | | 274 | |
| RSV829 | Nanobody binding to | RSVPMP13A4 | US20110182897 SEQ ID NO: | 25409 |
| | RSV F protein | | 275 | |
| RSV830 | Nanobody binding to | RSVPMP13B1 | US20110182897 SEQ ID NO: | 25410 |
| | RSV F protein | | 276 | |
| RSV831 | Nanobody binding to | RSVPMP13B2 | US20110182897 SEQ ID NO: | 25411 |
| | RSV F protein | | 277 | |
| RSV832 | Nanobody binding to | RSVPMP13C1 | US20110182897 SEQ ID NO: | 25412 |
| | RSV F protein | | 278 | |
| RSV833 | Nanobody binding to | RSVPMP13C3 | US20110182897 SEQ ID NO: | 25413 |
| | RSV F protein | | 279 | |
| RSV834 | Nanobody binding to | RSVPMP13D6 | US20110182897 SEQ ID NO: | 25414 |
| | RSV F protein | | 280 | |
| RSV835 | Nanobody binding to | RSVPMP13E2 | US20110182897 SEQ ID NO: | 25415 |
| | RSV F protein | | 281 | |
| RSV836 | Nanobody binding to | RSVPMP13E3 | US20110182897 SEQ ID NO: | 25416 |
| | RSV F protein | | 282 | |
| RSV837 | Nanobody binding to | RSVPMP15A5 | US20110182897 SEQ ID NO: | 25417 |
| | RSV F protein | | 283 | |
| RSV838 | Nanobody binding to | RSVPMP15A6 | US20110182897 SEQ ID NO: | 25418 |
| | RSV F protein | | 284 | |
| RSV839 | Nanobody binding to | RSVPMP15B2 | US20110182897 SEQ ID NO: | 25419 |
| | RSV F protein | | 285 | |
| RSV840 | Nanobody binding to | RSVPMP15B3 | US20110182897 SEQ ID NO: | 25420 |
| | RSV F protein | | 286 | |
| RSV841 | Nanobody binding to | RSVPMP15E5 | US20110182897 SEQ ID NO: | 25421 |
| | RSV F protein | | 287 | |
| RSV842 | Nanobody binding to | RSVPMP17C2 | US20110182897 SEQ ID NO: | 25422 |
| | RSV F protein | | 288 | |
| RSV843 | Nanobody binding to | RSVPMP17D4 | US20110182897 SEQ ID NO: | 25423 |
| | RSV F protein | | 289 | |
| RSV844 | Nanobody binding to | RSVPMP17G4 | US20110182897 SEQ ID NO: | 25424 |
| | RSV F protein | | 290 | |
| RSV845 | Nanobody binding to | RSVPMP19B2 | US20110182897 SEQ ID NO: | 25425 |
| | RSV F protein | | 291 | |
| RSV846 | Nanobody binding to | RSVPMP25A4 | US20110182897 SEQ ID NO: | 25426 |
| | RSV F protein | | 292 | |
| RSV847 | Nanobody binding to | RSVPMP25A9 | US20110182897 SEQ ID NO: | 25427 |
| | RSV F protein | | 293 | |
| RSV848 | Nanobody binding to | RSVPMP25B5 | US20110182897 SEQ ID NO: | 25428 |
| | RSV F protein | | 294 | |
| RSV849 | Nanobody binding to | RSVPMP25G2 | US20110182897 SEQ ID NO: | 25429 |
| | RSV F protein | | 295 | |
| RSV850 | Nanobody binding to | RSVPMP25H5 | US20110182897 SEQ ID NO: | 25430 |
| | RSV F protein | | 296 | |
| RSV851 | Nanobody binding to | RSVPMP25E11 | US20110182897 SEQ ID NO: | 25431 |
| | RSV F protein | | 297 | |
| RSV852 | Nanobody binding to | RSVPMP8G3 | US20110182897 SEQ ID NO: | 25432 |
| | RSV F protein | | 298 | |
| RSV853 | Nanobody binding to | RSVPMP13B5 | US20110182897 SEQ ID NO: | 25433 |
| | RSV F protein | | 299 | |
| RSV854 | Nanobody binding to | RSVPMP15F2 | US20110182897 SEQ ID NO: | 25434 |
| | RSV F protein | | 300 | |
| RSV855 | Nanobody binding to | RSVPMP19E2 | US20110182897 SEQ ID NO: | 25435 |
| | RSV F protein | | 301 | |
| RSV856 | Nanobody binding to | RSVPMP25D1 | US20110182897 SEQ ID NO: | 25436 |
| | RSV F protein | | 302 | |
| RSV857 | Nanobody binding to | RSVPMP5A1 | US20110182897 SEQ ID NO: | 25437 |
| | RSV F protein | | 303 | |
| RSV858 | Nanobody binding to | RSVPMP5G2 | US20110182897 SEQ ID NO: | 25438 |
| | RSV F protein | | 304 | |
| RSV859 | Nanobody binding to | RSVPMP5H1 | US20110182897 SEQ ID NO: | 25439 |
| | RSV F protein | | 305 | |
| RSV860 | Nanobody binding to | RSVPMP6B1 | US20110182897 SEQ ID NO: | 25440 |
| | RSV F protein | | 306 | |
| RSV861 | Nanobody binding to | RSVPMP8H2 | US20110182897 SEQ ID NO: | 25441 |
| | RSV F protein | | 307 | |
| RSV862 | Nanobody binding to | RSVPMP8H3 | US20110182897 SEQ ID NO: | 25442 |
| | RSV F protein | | 308 | |
| RSV863 | Nanobody binding to | RSVPMP13A3 | US20110182897 SEQ ID NO: | 25443 |
| | RSV F protein | | 309 | |
| RSV864 | Nanobody binding to | RSVPMP13C5 | US20110182897 SEQ ID NO: | 25444 |
| | RSV F protein | | 310 | |
| RSV865 | Nanobody binding to | RSVPMP13H1 | US20110182897 SEQ ID NO: | 25445 |
| | RSV F protein | | 311 | |
| RSV866 | Nanobody binding to | RSVPMP13H2 | US20110182897 SEQ ID NO: | 25446 |
| | RSV F protein | | 312 | |
| RSV867 | Nanobody binding to | RSVPMP15E6 | US20110182897 SEQ ID NO: | 25447 |
| | RSV F protein | | 313 | |
| RSV868 | Nanobody binding to | RSVPMP17A3 | US20110182897 SEQ ID NO: | 25448 |
| | RSV F protein | | 314 | |
| RSV869 | Nanobody binding to | RSVPMP25G8 | US20110182897 SEQ ID NO: | 25449 |
| | RSV F protein | | 315 | |
| RSV870 | Nanobody binding to | RSVPMP6D1 | US20110182897 SEQ ID NO: | 25450 |
| | RSV F protein | | 316 | |
| RSV871 | Nanobody binding to | RSVPMP8D5 | US20110182897 SEQ ID NO: | 25451 |
| | RSV F protein | | 317 | |
| RSV872 | Nanobody binding to | RSVPMP13B4 | US20110182897 SEQ ID NO: | 25452 |
| | RSV F protein | | 318 | |
| RSV873 | Nanobody binding to | RSVPMP13B6 | US20110182897 SEQ ID NO: | 25453 |
| | RSV F protein | | 319 | |
| RSV874 | Nanobody binding to | RSVPMP13E6 | US20110182897 SEQ ID NO: | 25454 |
| | RSV F protein | | 320 | |
| RSV875 | Nanobody binding to | RSVPMP13F4 | US20110182897 SEQ ID NO: | 25455 |
| | RSV F protein | | 321 | |
| RSV876 | Nanobody binding to | RSVPMP15H3 | US20110182897 SEQ ID NO: | 25456 |
| | RSV F protein | | 322 | |
| RSV877 | Nanobody binding to | RSVPMP17E5 | US20110182897 SEQ ID NO: | 25457 |
| | RSV F protein | | 323 | |
| RSV878 | Nanobody binding to | RSVPMP19D3 | US20110182897 SEQ ID NO: | 25458 |
| | RSV F protein | | 324 | |
| RSV879 | Nanobody binding to | RSVPMP19F3 | US20110182897 SEQ ID NO: | 25459 |
| | RSV F protein | | 325 | |
| RSV880 | Nanobody binding to | RSVPMP25C4 | US20110182897 SEQ ID NO: | 25460 |
| | RSV F protein | | 326 | |
| RSV881 | Nanobody binding to | RSVPMP25E3 | US20110182897 SEQ ID NO: | 25461 |
| | RSV F protein | | 327 | |
| RSV882 | Nanobody binding to | RSVPMP5G4 | US20110182897 SEQ ID NO: | 25462 |
| | RSV F protein | | 328 | |
| RSV883 | Nanobody binding to | RSVPMP6G5 | US20110182897 SEQ ID NO: | 25463 |
| | RSV F protein | | 329 | |
| RSV884 | Nanobody binding to | RSVPMP8E6 | US20110182897 SEQ ID NO: | 25464 |
| | RSV F protein | | 330 | |
| RSV885 | Nanobody binding to | RSVPMP13A10 | US20110182897 SEQ ID NO: | 25465 |
| | RSV F protein | | 331 | |
| RSV886 | Nanobody binding to | RSVPMP21H10 | US20110182897 SEQ ID NO: | 25466 |
| | RSV F protein | | 332 | |
| RSV887 | Nanobody binding to | RSVPMP5A8 | US20110182897 SEQ ID NO: | 25467 |
| | RSV F protein | | 333 | |
| RSV888 | Nanobody binding to | RSVPMP5A10 | US20110182897 SEQ ID NO: | 25468 |
| | RSV F protein | | 334 | |
| RSV889 | Nanobody binding to | RSVPMP14A6 | US20110182897 SEQ ID NO: | 25469 |
| | RSV F protein | | 335 | |
| RSV890 | Nanobody binding to | RSVPMP16A6 | US20110182897 SEQ ID NO: | 25470 |
| | RSV F protein | | 336 | |
| RSV891 | Nanobody binding to | RSVPMP22D6 | US20110182897 SEQ ID NO: | 25471 |
| | RSV F protein | | 337 | |
| RSV892 | Nanobody binding to | RSVPMP8E2 | US20110182897 SEQ ID NO: | 25472 |
| | RSV F protein | | 338 | |
| RSV893 | Nanobody binding to | RSVPMP8C6 | US20110182897 SEQ ID NO: | 25473 |
| | RSV F protein | | 339 | |
| RSV894 | Nanobody binding to | RSVPMP5C6 | US20110182897 SEQ ID NO: | 25474 |
| | RSV F protein | | 340 | |
| RSV895 | Nanobody binding to | RSVPMP6D4 | US20110182897 SEQ ID NO: | 25475 |
| | RSV F protein | | 341 | |
| RSV896 | Nanobody binding to | RSVPMP8B10 | US20110182897 SEQ ID NO: | 25476 |
| | RSV F protein | | 342 | |
| RSV897 | Nanobody binding to | RSVPMP8E10 | US20110182897 SEQ ID NO: | 25477 |
| | RSV F protein | | 343 | |
| RSV898 | Nanobody binding to | RSVPMP15A7 | US20110182897 SEQ ID NO: | 25478 |
| | RSV F protein | | 344 | |
| RSV899 | Nanobody binding to | RSVPMP15E10 | US20110182897 SEQ ID NO: | 25479 |
| | RSV F protein | | 345 | |
| RSV900 | Nanobody binding to | RSVPMP13C7 | US20110182897 SEQ ID NO: | 25480 |
| | RSV F protein | | 346 | |
| RSV901 | Nanobody binding to | RSVPMP15A9 | US20110182897 SEQ ID NO: | 25481 |
| | RSV F protein | | 347 | |
| RSV902 | Nanobody binding to | RSVPMP15F11 | US20110182897 SEQ ID NO: | 25482 |
| | RSV F protein | | 348 | |
| RSV903 | Nanobody binding to | RSVPMP15A1 | US20110182897 SEQ ID NO: | 25483 |
| | RSV F protein | | 349 | |
| RSV904 | Nanobody binding to | RSVPMP6H2 | US20110182897 SEQ ID NO: | 25484 |
| | RSV F protein | | 350 | |
| RSV905 | Nanobody binding to | RSVPMP17A9 | US20110182897 SEQ ID NO: | 25485 |
| | RSV F protein | | 351 | |
| RSV906 | Nanobody binding to | RSVPMP7G1 | US20110182897 SEQ ID NO: | 25486 |
| | RSV F protein | | 352 | |
| RSV907 | Nanobody binding to | RSVPMP5A9 | US20110182897 SEQ ID NO: | 25487 |
| | RSV F protein | | 353 | |
| RSV908 | Nanobody binding to | RSVPMP7B2 | US20110182897 SEQ ID NO: | 25488 |
| | RSV F protein | | 354 | |
| RSV909 | Nanobody binding to | RSVPMP22A4 | US20110182897 SEQ ID NO: | 25489 |
| | RSV F protein | | 355 | |
| RSV910 | Nanobody binding to | RSVPMP22E10 | US20110182897 SEQ ID NO: | 25490 |
| | RSV F protein | | 356 | |
| RSV911 | Nanobody binding to | RSVPMP22H4 | US20110182897 SEQ ID NO: | 25491 |
| | RSV F protein | | 357 | |
| RSV912 | Nanobody binding to | RSVPMP15C5 | US20110182897 SEQ ID NO: | 25492 |
| | RSV F protein | | 358 | |
| RSV913 | Nanobody binding to | RSVNC39 | US20110182897 SEQ ID NO: | 25493 |
| | RSV F protein | | 359 | |
| RSV914 | Nanobody binding to | RSVPMP7B9 | US20110182897 SEQ ID NO: | 25494 |
| | RSV F protein | | 360 | |
| RSV915 | Nanobody binding to | RSVPMP15E11 | US20110182897 SEQ ID NO: | 25495 |
| | RSV F protein | | 361 | |
| RSV916 | Nanobody binding to | RSVPMP7E7 | US20110182897 SEQ ID NO: | 25496 |
| | RSV F protein | | 362 | |
| RSV917 | Nanobody binding to | RSVPMP14H3 | US20110182897 SEQ ID NO: | 25497 |
| | RSV F protein | | 363 | |
| RSV918 | Nanobody binding to | RSVPMP24D6 | US20110182897 SEQ ID NO: | 25498 |
| | RSV F protein | | 364 | |
| RSV919 | Nanobody binding to | RSVPMP23E5 | US20110182897 SEQ ID NO: | 25499 |
| | RSV F protein | | 365 | |
| RSV920 | Nanobody binding to | RSVPMP8A6 | US20110182897 SEQ ID NO: | 25500 |
| | RSV F protein | | 366 | |
| RSV921 | Nanobody binding to | RSVPMP14E2 | US20110182897 SEQ ID NO: | 25501 |
| | RSV F protein | | 367 | |
| RSV922 | Nanobody binding to | RSVPMP25F3 | US20110182897 SEQ ID NO: | 25502 |
| | RSV F protein | | 368 | |
| RSV923 | Nanobody binding to | RSVPMP19A6 | US20110182897 SEQ ID NO: | 25503 |
| | RSV F protein | | 369 | |
| RSV924 | Nanobody binding to | RSVPMP23G1 | US20110182897 SEQ ID NO: | 25504 |
| | RSV F protein | | 370 | |
| RSV925 | Nanobody binding to | RSVPMP15H8 | US20110182897 SEQ ID NO: | 25505 |
| | RSV F protein | | 371 | |
| RSV926 | Nanobody binding to | RSVNC41 | US20110182897 SEQ ID NO: | 25506 |
| | RSV F protein | | 372 | |
| RSV927 | Nanobody binding to | RSVPMP6A8 | US20110182897 SEQ ID NO: | 25507 |
| | RSV F protein | | 373 | |
| RSV928 | Nanobody binding to | RSVPMP25H9 | US20110182897 SEQ ID NO: | 25508 |
| | RSV F protein | | 374 | |
| RSV929 | Nanobody binding to | RSVPMP8B11 | US20110182897 SEQ ID NO: | 25509 |
| | RSV F protein | | 375 | |
| RSV930 | Nanobody binding to | RSVPMP17E1 | US20110182897 SEQ ID NO: | 25510 |
| | RSV F protein | | 376 | |
| RSV931 | Nanobody binding to | RSVPMP21A4 | US20110182897 SEQ ID NO: | 25511 |
| | RSV F protein | | 377 | |
| RSV932 | Nanobody binding to | RSVPMP25A11 | US20110182897 SEQ ID NO: | 25512 |
| | RSV F protein | | 378 | |
| RSV933 | Nanobody binding to | RSVPMP25C8 | US20110182897 SEQ ID NO: | 25513 |
| | RSV F protein | | 379 | |
| RSV934 | Nanobody binding to | RSVNC23 | US20110182897 SEQ ID NO: | 25514 |
| | RSV F protein | | 380 | |
| RSV935 | Nanobody binding to | RSVPMP20A11 | US20110182897 SEQ ID NO: | 25515 |
| | RSV F protein | | 381 | |
| RSV936 | Nanobody binding to | RSVPMP20A9 | US20110182897 SEQ ID NO: | 25516 |
| | RSV F protein | | 382 | |
| RSV937 | Nanobody binding to | RSVPMP1F7 | US20110182897 SEQ ID NO: | 25517 |
| | RSV F protein | | 383 | |
| RSV938 | Nanobody binding to | RSVPMP20D6 | US20110182897 SEQ ID NO: | 25518 |
| | RSV F protein | | 384 | |
| RSV939 | Nanobody binding to | RSVPMP1F1 | US20110182897 SEQ ID NO: | 25519 |
| | RSV F protein | | 385 | |
| RSV940 | Nanobody binding to | RSVPMP3D3 | US20110182897 SEQ ID NO: | 25520 |
| | RSV F protein | | 386 | |
| RSV941 | Nanobody binding to | RSVPMP3E6 | US20110182897 SEQ ID NO: | 25521 |
| | RSV F protein | | 387 | |
| RSV942 | Nanobody binding to | RSVPMP1C8 | US20110182897 SEQ ID NO: | 25522 |
| | RSV F protein | | 388 | |
| RSV943 | Nanobody binding to | RSVPMP1A2 | US20110182897 SEQ ID NO: | 25523 |
| | RSV F protein | | 389 | |
| RSV944 | Nanobody binding to | RSVPMP1C5 | US20110182897 SEQ ID NO: | 25524 |
| | RSV F protein | | 390 | |
| RSV945 | Nanobody binding to | RSVPMP20G5 | US20110182897 SEQ ID NO: | 25525 |
| | RSV F protein | | 391 | |
| RSV946 | Nanobody binding to | RSVPMP4D8 | US20110182897 SEQ ID NO: | 25526 |
| | RSV F protein | | 392 | |
| RSV947 | Nanobody binding to | RSVPMP20B6 | US20110182897 SEQ ID NO: | 25527 |
| | RSV F protein | | 393 | |
| RSV948 | Nanobody binding to | RSVPMPID11 | US20110182897 SEQ ID NO: | 25528 |
| | RSV F protein | | 394 | |
| RSV949 | Nanobody binding to | RSVPMP20A8 | US20110182897 SEQ ID NO: | 25529 |
| | RSV F protein | | 395 | |
| RSV950 | Nanobody binding to | RSVPMP20E7 | US20110182897 SEQ ID NO: | 25530 |
| | RSV F protein | | 396 | |
| RSV951 | Nanobody binding to | RSVPMP20G8 | US20110182897 SEQ ID NO: | 25531 |
| | RSV F protein | | 397 | |
| RSV952 | Nanobody binding to | RSVPMP2D3 | US20110182897 SEQ ID NO: | 25532 |
| | RSV F protein | | 398 | |
| RSV953 | Nanobody binding to | RSVPMP2G5 | US20110182897 SEQ ID NO: | 25533 |
| | RSV F protein | | 399 | |
| RSV954 | Nanobody binding to | RSVPMP2A6 | US20110182897 SEQ ID NO: | 25534 |
| | RSV F protein | | 400 | |
| RSV955 | Nanobody binding to | RSVPMP3A2 | US20110182897 SEQ ID NO: | 25535 |
| | RSV F protein | | 401 | |
| RSV956 | Nanobody binding to | RSVPMP4A8 | US20110182897 SEQ ID NO: | 25536 |
| | RSV F protein | | 402 | |
| RSV957 | Nanobody binding to | RSVPMP4F9 | US20110182897 SEQ ID NO: | 25537 |
| | RSV F protein | | 403 | |
| RSV958 | Nanobody binding to | RSVPMP1A6 | US20110182897 SEQ ID NO: | 25538 |
| | RSV F protein | | 404 | |
| RSV959 | Nanobody binding to | RSVPMP3C2 | US20110182897 SEQ ID NO: | 25539 |
| | RSV F protein | | 405 | |
| RSV960 | Nanobody binding to | RSVPMP4H9 | US20110182897 SEQ ID NO: | 25540 |
| | RSV F protein | | 406 | |
| RSV961 | Nanobody binding to | RSVPMP4B10 | US20110182897 SEQ ID NO: | 25541 |
| | RSV F protein | | 407 | |
| RSV962 | Nanobody binding to | 203B1 | US20110182897 SEQ ID NO: | 25542 |
| | RSV F protein | | 2431 | |
| RSV963 | Nanobody binding to | 203B2 | US20110182897 SEQ ID NO: | 25543 |
| | RSV F protein | | 2432 | |
| RSV964 | Nanobody binding to | 203G1 | US20110182897 SEQ ID NO: | 25544 |
| | RSV F protein | | 2433 | |
| RSV965 | Nanobody binding to | 203H1 | US20110182897 SEQ ID NO: | 25545 |
| | RSV F protein | | 2434 | |
| RSV966 | Nanobody binding to | 202E4 | US20110182897 SEQ ID NO: | 25546 |
| | RSV F protein | | 2435 | |
| RSV967 | Nanobody binding to | 189E2 | US20110182897 SEQ ID NO: | 25547 |
| | RSV F protein | | 2436 | |
| RSV968 | Nanobody binding to | 203A12 | US20110182897 SEQ ID NO: | 25548 |
| | RSV F protein | | 2437 | |
| RSV969 | Nanobody binding to | 203A9 | US20110182897 SEQ ID NO: | 25549 |
| | RSV F protein | | 2438 | |
| RSV970 | Nanobody binding to | 203B12 | US20110182897 SEQ ID NO: | 25550 |
| | RSV F protein | | 2439 | |
| RSV971 | Nanobody binding to | 203D2 | US20110182897 SEQ ID NO: | 25551 |
| | RSV F protein | | 2440 | |
| RSV972 | Nanobody binding to | 203D9 | US20110182897 SEQ ID NO: | 25552 |
| | RSV F protein | | 2441 | |
| RSV973 | Nanobody binding to | 203G3 | US20110182897 SEQ ID NO: | 25553 |
| | RSV F protein | | 2442 | |
| RSV974 | Nanobody binding to | 203G9 | US20110182897 SEQ ID NO: | 25554 |
| | RSV F protein | | 2443 | |
| RSV975 | Nanobody binding to | 203G10 | US20110182897 SEQ ID NO: | 25555 |
| | RSV F protein | | 2444 | |
| RSV976 | Nanobody binding to | 203H9 | US20110182897 SEQ ID NO: | 25556 |
| | RSV F protein | | 2445 | |
| RSV977 | Nanobody binding to | 203H10 | US20110182897 SEQ ID NO: | 25557 |
| | RSV F protein | | 2446 | |
| RSV978 | Nanobody binding to | 202E4 | US20110182897 SEQ ID NO: | 25558 |
| | RSV F protein | | 2447 | |
| RSV979 | Nanobody binding to | 189E2 | US20110182897 SEQ ID NO: | 25559 |
| | RSV F protein | | 2448 | |
| RSV980 | Nanobody binding to | PRSVPMP20C3 | US20110182897 SEQ ID NO: | 25560 |
| | RSV F protein | | 2574 | |
| RSV981 | Nanobody binding to | PRSVPMP20C5 | US20110182897 SEQ ID NO: | 25561 |
| | RSV F protein | | 2575 | |
| RSV982 | Nanobody binding to | PRSVPMP20B2 | US20110182897 SEQ ID NO: | 25562 |
| | RSV F protein | | 2576 | |
| RSV983 | Nanobody binding to | PRSVPMP20C1 | US20110182897 SEQ ID NO: | 25563 |
| | RSV F protein | | 2577 | |
| RSV984 | Nanobody binding to | PRSVPMP1G8 | US20110182897 SEQ ID NO: | 25564 |
| | RSV F protein | | 2578 | |
| RSV985 | Nanobody binding to | PRSVNMP1A4 | US20110182897 SEQ ID NO: | 25565 |
| | RSV F protein | | 2579 | |
| RSV986 | Nanobody binding to | PRSVPMP13E12 | US20110182897 SEQ ID NO: | 25566 |
| | RSV F protein | | 2580 | |
| RSV987 | Nanobody binding to | PRSVPMP5C6 | US20110182897 SEQ ID NO: | 25567 |
| | RSV F protein | | 2581 | |
| RSV988 | Nanobody binding to | LG203E7 | US20110182897 SEQ ID NO: | 25568 |
| | RSV F protein | | 2682 | |
| RSV989 | Nanobody binding to | LG203G8 | US20110182897 SEQ ID NO: | 25569 |
| | RSV F protein | | 2683 | |
| RSV990 | Nanobody binding to | LG211A10 | US20110182897 SEQ ID NO: | 25570 |
| | RSV F protein | | 2684 | |
| RSV991 | Nanobody binding to | LG211A8 | US20110182897 SEQ ID NO: | 25571 |
| | RSV F protein | | 2685 | |
| RSV992 | Nanobody binding to | LG211B10 | US20110182897 SEQ ID NO: | 25572 |
| | RSV F protein | | 2686 | |
| RSV993 | Nanobody binding to | LG211B8 | US20110182897 SEQ ID NO: | 25573 |
| | RSV F protein | | 2687 | |
| RSV994 | Nanobody binding to | LG211C12 | US20110182897 SEQ ID NO: | 25574 |
| | RSV F protein | | 2688 | |
| RSV995 | Nanobody binding to | LG211C8 | US20110182897 SEQ ID NO: | 25575 |
| | RSV F protein | | 2689 | |
| RSV996 | Nanobody binding to | LG211D10 | US20110182897 SEQ ID NO: | 25576 |
| | RSV F protein | | 2690 | |
| RSV997 | Nanobody binding to | LG211D8 | US20110182897 SEQ ID NO: | 25577 |
| | RSV F protein | | 2691 | |
| RSV998 | Nanobody binding to | LG211E10 | US20110182897 SEQ ID NO: | 25578 |
| | RSV F protein | | 2692 | |
| RSV999 | Nanobody binding to | LG211E12 | US20110182897 SEQ ID NO: | 25579 |
| | RSV F protein | | 2693 | |
| RSV1000 | Nanobody binding to | LG211E8 | US20110182897 SEQ ID NO: | 25580 |
| | RSV F protein | | 2694 | |
| RSV1001 | Nanobody binding to | LG211H8 | US20110182897 SEQ ID NO: | 25581 |
| | RSV F protein | | 2695 | |
| RSV1002 | Nanobody binding to | LG212A10 | US20110182897 SEQ ID NO: | 25582 |
| | RSV F protein | | 2696 | |
| RSV1003 | Nanobody binding to | LG212A12 | US20110182897 SEQ ID NO: | 25583 |
| | RSV F protein | | 2697 | |
| RSV1004 | Nanobody binding to | LG212A2 | US20110182897 SEQ ID NO: | 25584 |
| | RSV F protein | | 2698 | |
| RSV1005 | Nanobody binding to | LG212A8 | US20110182897 SEQ ID NO: | 25585 |
| | RSV F protein | | 2699 | |
| RSV1006 | Nanobody binding to | LG212B12 | US20110182897 SEQ ID NO: | 25586 |
| | RSV F protein | | 2700 | |
| RSV1007 | Nanobody binding to | LG212B2 | US20110182897 SEQ ID NO: | 25587 |
| | RSV F protein | | 2701 | |
| RSV1008 | Nanobody binding to | LG212C12 | US20110182897 SEQ ID NO: | 25588 |
| | RSV F protein | | 2702 | |
| RSV1009 | Nanobody binding to | LG212D10 | US20110182897 SEQ ID NO: | 25589 |
| | RSV F protein | | 2703 | |
| RSV1010 | Nanobody binding to | LG212D12 | US20110182897 SEQ ID NO: | 25590 |
| | RSV F protein | | 2704 | |
| RSV1011 | Nanobody binding to | LG212D2 | US20110182897 SEQ ID NO: | 25591 |
| | RSV F protein | | 2705 | |
| RSV1012 | Nanobody binding to | LG212E10 | US20110182897 SEQ ID NO: | 25592 |
| | RSV F protein | | 2706 | |
| RSV1013 | Nanobody binding to | LG212E12 | US20110182897 SEQ ID NO: | 25593 |
| | RSV F protein | | 2707 | |
| RSV1014 | Nanobody binding to | LG212E6 | US20110182897 SEQ ID NO: | 25594 |
| | RSV F protein | | 2708 | |
| RSV1015 | Nanobody binding to | LG212F10 | US20110182897 SEQ ID NO: | 25595 |
| | RSV F protein | | 2709 | |
| RSV1016 | Nanobody binding to | LG212F12 | US20110182897 SEQ ID NO: | 25596 |
| | RSV F protein | | 2710 | |
| RSV1017 | Nanobody binding to | LG212F6 | US20110182897 SEQ ID NO: | 25597 |
| | RSV F protein | | 2711 | |
| RSV1018 | Nanobody binding to | LG212F8 | US20110182897 SEQ ID NO: | 25598 |
| | RSV F protein | | 2712 | |
| RSV1019 | Nanobody binding to | LG212G10 | US20110182897 SEQ ID NO: | 25599 |
| | RSV F protein | | 2713 | |
| RSV1020 | Nanobody binding to | LG212G2 | US20110182897 SEQ ID NO: | 25600 |
| | RSV F protein | | 2714 | |
| RSV1021 | Nanobody binding to | LG212H10 | US20110182897 SEQ ID NO: | 25601 |
| | RSV F protein | | 2715 | |
| RSV1022 | Nanobody binding to | LG212H2 | US20110182897 SEQ ID NO: | 25602 |
| | RSV F protein | | 2716 | |
| RSV1023 | Nanobody binding to | LG212H8 | US20110182897 SEQ ID NO: | 25603 |
| | RSV F protein | | 2717 | |
| RSV1024 | Nanobody binding to | IV121 | US20110182897 SEQ ID NO: | 25604 |
| | RSV F protein | | 3064 | |
| RSV1025 | Nanobody binding to | IV122 | US20110182897 SEQ ID NO: | 25605 |
| | RSV F protein | | 3065 | |
| RSV1026 | Nanobody binding to | IV123 | US20110182897 SEQ ID NO: | 25606 |
| | RSV F protein | | 3066 | |
| RSV1027 | Nanobody binding to | IV126 | US20110182897 SEQ ID NO: | 25607 |
| | RSV F protein | | 3067 | |
| RSV1028 | Nanobody binding to | IV127 | US20110182897 SEQ ID NO: | 25608 |
| | RSV F protein | | 3068 | |
| RSV1029 | Nanobody binding to | IV131 | US20110182897 SEQ ID NO: | 25609 |
| | RSV F protein | | 3069 | |
| RSV1030 | Nanobody binding to | IV132 | US20110182897 SEQ ID NO: | 25610 |
| | RSV F protein | | 3070 | |
| RSV1031 | Nanobody binding to | IV133 | US20110182897 SEQ ID NO: | 25611 |
| | RSV F protein | | 3071 | |
| RSV1032 | Nanobody binding to | IV134 | US20110182897 SEQ ID NO: | 25612 |
| | RSV F protein | | 3072 | |
| RSV1033 | Nanobody binding to | IV135 | US20110182897 SEQ ID NO: | 25613 |
| | RSV F protein | | 3073 | |
| RSV1034 | Nanobody binding to | IV136 | US20110182897 SEQ ID NO: | 25614 |
| | RSV F protein | | 3074 | |
| RSV1035 | Nanobody binding to | IV140 | US20110182897 SEQ ID NO: | 25615 |
| | RSV F protein | | 3075 | |
| RSV1036 | Nanobody binding to | IV144 | US20110182897 SEQ ID NO: | 25616 |
| | RSV F protein | | 3076 | |
| RSV1037 | Nanobody binding to | IV156 | US20110182897 SEQ ID NO: | 25617 |
| | RSV F protein | | 3077 | |
| RSV1038 | Nanobody binding to | IV157 | US20110182897 SEQ ID NO: | 25618 |
| | RSV F protein | | 3078 | |
| RSV1039 | Nanobody binding to | IV160 | US20110182897 SEQ ID NO: | 25619 |
| | RSV F protein | | 3079 | |
| RSV1040 | Nanobody binding to | IV124 | US20110182897 SEQ ID NO: | 25620 |
| | RSV F protein | | 3080 | |
| RSV1041 | Nanobody binding to | IV125 | US20110182897 SEQ ID NO: | 25621 |
| | RSV F protein | | 3081 | |
| RSV1042 | Nanobody binding to | IV145 | US20110182897 SEQ ID NO: | 25622 |
| | RSV F protein | | 3082 | |
| RSV1043 | Nanobody binding to | IV146 | US20110182897 SEQ ID NO: | 25623 |
| | RSV F protein | | 3083 | |
| RSV1044 | Nanobody binding to | IV147 | US20110182897 SEQ ID NO: | 25624 |
| | RSV F protein | | 3084 | |
| RSV1045 | Nanobody binding to | IV151 | US20110182897 SEQ ID NO: | 25625 |
| | RSV F protein | | 3085 | |
| RSV1046 | Nanobody binding to | IV153 | US20110182897 SEQ ID NO: | 25626 |
| | RSV F protein | | 3086 | |
| RSV1047 | Nanobody binding to | IV154 | US20110182897 SEQ ID NO: | 25627 |
| | RSV F protein | | 3087 | |
| RSV1048 | Nanobody binding to | IV155 | US20110182897 SEQ ID NO: | 25628 |
| | RSV F protein | | 3088 | |
| RSV1049 | Nanobody binding to | IV1 | US20110182897 SEQ ID NO: | 25629 |
| | RSV F protein | | 3089 | |
| RSV1050 | Nanobody binding to | IV2 | US20110182897 SEQ ID NO: | 25630 |
| | RSV F protein | | 3090 | |
| RSV1051 | Nanobody binding to | IV3 | US20110182897 SEQ ID NO: | 25631 |
| | RSV F protein | | 3091 | |
| RSV1052 | Nanobody binding to | IV4 | US20110182897 SEQ ID NO: | 25632 |
| | RSV F protein | | 3092 | |
| RSV1053 | Nanobody binding to | IV6 | US20110182897 SEQ ID NO: | 25633 |
| | RSV F protein | | 3093 | |
| RSV1054 | Nanobody binding to | IV7 | US20110182897 SEQ ID NO: | 25634 |
| | RSV F protein | | 3094 | |
| RSV1055 | Nanobody binding to | IV9 | US20110182897 SEQ ID NO: | 25635 |
| | RSV F protein | | 3095 | |
| RSV1056 | Nanobody binding to | IV10 | US20110182897 SEQ ID NO: | 25636 |
| | RSV F protein | | 3096 | |
| RSV1057 | Nanobody binding to | IV11 | US20110182897 SEQ ID NO: | 25637 |
| | RSV F protein | | 3097 | |
| RSV1058 | Nanobody binding to | IV12 | US20110182897 SEQ ID NO: | 25638 |
| | RSV F protein | | 3098 | |
| RSV1059 | Nanobody binding to | IV16 | US20110182897 SEQ ID NO: | 25639 |
| | RSV F protein | | 3099 | |
| RSV1060 | Nanobody binding to | IV24 | US20110182897 SEQ ID NO: | 25640 |
| | RSV F protein | | 3100 | |
| RSV1061 | Nanobody binding to | IV26 | US20110182897 SEQ ID NO: | 25641 |
| | RSV F protein | | 3101 | |
| RSV1062 | Nanobody binding to | IV30 | US20110182897 SEQ ID NO: | 25642 |
| | RSV F protein | | 3102 | |
| RSV1063 | Nanobody binding to | IV34 | US20110182897 SEQ ID NO: | 25643 |
| | RSV F protein | | 3103 | |
| RSV1064 | Nanobody binding to | IV14 | US20110182897 SEQ ID NO: | 25644 |
| | RSV F protein | | 3104 | |
| RSV1065 | Nanobody binding to | IV15 | US20110182897 SEQ ID NO: | 25645 |
| | RSV F protein | | 3105 | |
| RSV1066 | Nanobody binding to | IV17 | US20110182897 SEQ ID NO: | 25646 |
| | RSV F protein | | 3106 | |
| RSV1067 | Nanobody binding to | IV18 | US20110182897 SEQ ID NO: | 25647 |
| | RSV F protein | | 3107 | |
| RSV1068 | Nanobody binding to | IV29 | US20110182897 SEQ ID NO: | 25648 |
| | RSV F protein | | 3108 | |
| RSV1069 | Nanobody binding to | IV31 | US20110182897 SEQ ID NO: | 25649 |
| | RSV F protein | | 3109 | |
| RSV1070 | Nanobody binding to | IV33 | US20110182897 SEQ ID NO: | 25650 |
| | RSV F protein | | 3110 | |
| RSV1071 | Nanobody binding to | IV35 | US20110182897 SEQ ID NO: | 25651 |
| | RSV F protein | | 3111 | |
| RSV1072 | Nanobody binding to | IV36 | US20110182897 SEQ ID NO: | 25652 |
| | RSV F protein | | 3112 | |
| RSV1073 | Nanobody binding to | IV40 | US20110182897 SEQ ID NO: | 25653 |
| | RSV F protein | | 3113 | |
| RSV1074 | Nanobody binding to | IV42 | US20110182897 SEQ ID NO: | 25654 |
| | RSV F protein | | 3114 | |
| RSV1075 | Nanobody binding to | IV8 | US20110182897 SEQ ID NO: | 25655 |
| | RSV F protein | | 3115 | |
| RSV1076 | Nanobody binding to | IV21 | US20110182897 SEQ ID NO: | 25656 |
| | RSV F protein | | 3116 | |
| RSV1077 | Nanobody binding to | IV23 | US20110182897 SEQ ID NO: | 25657 |
| | RSV F protein | | 3117 | |
| RSV1078 | Nanobody binding to | IV45 | US20110182897 SEQ ID NO: | 25658 |
| | RSV F protein | | 3118 | |
| RSV1079 | Nanobody binding to | IV47 | US20110182897 SEQ ID NO: | 25659 |
| | RSV F protein | | 3119 | |
| RSV1080 | Nanobody binding to | IV48 | US20110182897 SEQ ID NO: | 25660 |
| | RSV F protein | | 3120 | |
| RSV1081 | Nanobody binding to | IV50 | US20110182897 SEQ ID NO: | 25661 |
| | RSV F protein | | 3121 | |
| RSV1082 | Nanobody binding to | IV22 | US20110182897 SEQ ID NO: | 25662 |
| | RSV F protein | | 3122 | |
| RSV1083 | Nanobody binding to | IV37 | US20110182897 SEQ ID NO: | 25663 |
| | RSV F protein | | 3123 | |
| RSV1084 | Nanobody binding to | IV38 | US20110182897 SEQ ID NO: | 25664 |
| | RSV F protein | | 3124 | |
| RSV1085 | Nanobody binding to | IV5 | US20110182897 SEQ ID NO: | 25665 |
| | RSV F protein | | 3125 | |
| RSV1086 | Nanobody binding to | IV27 | US20110182897 SEQ ID NO: | 25666 |
| | RSV F protein | | 3126 | |
| RSV1087 | Nanobody binding to | IV25 | US20110182897 SEQ ID NO: | 25667 |
| | RSV F protein | | 3127 | |
| RSV1088 | Nanobody binding to | IV28 | US20110182897 SEQ ID NO: | 25668 |
| | RSV F protein | | 3128 | |

[0462] In some embodiments, the payload region of the viral particle comprises one or more nucleic acid sequences, fragments or variants thereof or encodes one or more polypeptides, fragments or variants thereof described in US Publication No. US20140363427, and international Publication No. WO2004083373, the contents of each of which are herein incorporated by reference in their entirety, against RSV F or RSV G protein.

[0463] In some embodiments, the payload region of the viral particle comprises one or more nucleic acid sequences encoding one or more of the payload antibody polypeptides listed in Table 34 against Hepatitis B, Hepatitis C and/or Hepatitis D (HEPBD1-HEPBD317; SEQ ID NO: 25669-25985).

TABLE 23
Antibodies against Hepatitis B, C, D viruses

| Antibody | | Antibody | | SEQ |
|---|---|---|---|---|
| No. | Description | Name | Reference Information | ID NO |
| HEPBD1 | Anti-preS1 | | Park, S. G., et al., Hepatitis B virus- | 25669 |
| | immunoglobulin, | | neutralizing anti-pre-S1 human antibody | |
| | HBV Ab | | fragments from large naive antibody phage | |
| | | | library; Antiviral Res. 68 (3), 109-115 | |
| | | | (2005); NCBI Accession # AAW82034.1 | |
| | | | (107aa) | |
| HEPBD2 | Anti-preS1 | | Park, S. G., et al., Hepatitis B virus- | 25670 |
| | immunoglobulin, | | neutralizing anti-pre-S1 human antibody | |
| | HBV Ab | | fragments from large naive antibody phage | |
| | | | library; Antiviral Res. 68 (3), 109-115 | |
| | | | (2005); NCBI Accession # AAW82035.1 | |
| | | | (132aa) | |
| HEPBD3 | Anti-preS1 | | Park, S. G., et al., Hepatitis B virus- | 25671 |
| | immunoglobulin, | | neutralizing anti-pre-S1 human antibody | |
| | HBV Ab | | fragments from large naive antibody phage | |
| | | | library; Antiviral Res. 68 (3), 109-115 | |
| | | | (2005); NCBI Accession # | |
| | | | AAW82033.1(111aa) | |
| HEPBD4 | Anti-preS1 | | Park, S. G., et al., Hepatitis B virus- | 25672 |
| | immunoglobulin, | | neutralizing anti-pre-S1 human antibody | |
| | HBV Ab | | fragments from large naive antibody phage | |
| | | | library; Antiviral Res. 68 (3), 109-115 | |
| | | | (2005); NCBI Accession # AAW82032.1 | |
| | | | (142aa) | |
| HEPBD5 | HCV Ab | Hu5b3.v3 | Pantua, H., et al., Glycan shifting on | 25673 |
| | | | hepatitis C virus(HCV) e2 glycoprotein is | |
| | | | a mechanism for escape from broadly | |
| | | | neutralizing antibodies; J. Mol. Biol. 425 | |
| | | | (11), 1899-1914 (2013) NCBI Accession # | |
| | | | 4HS8_H(228aa) | |
| HEPBD6 | HCV Ab | Igh526 | Kong L., et al., Structure of Hepatitis C | 25674 |
| | | | Virus Envelope Glycoprotein E1 Antigenic | |
| | | | Site 314-324 in Complex with Antibody | |
| | | | IGH526; J. Mol. Biol. 427 (16), 2617-2628 | |
| | | | (2015) NCBI Accession # | |
| | | | 4N0Y_H(231aa) | |
| HEPBD7 | Heavy chain partial, | | Esposito, G., et al., Recombinant human | 25675 |
| | HCV Ab | | antibodies specific for hepatitis C virus | |
| | | | proteins; Arch. Virol. 142 (3), 601-610 | |
| | | | (1997) NCBI Accession # CAA54914 | |
| | | | (122aa) | |
| HEPBD8 | Heavy chain variable | | EP0521348 | 25676 |
| | gene, Chimeric HBV | | | |
| | Ab | | | |
| HEPBD9 | Heavy chain variable | | Keck, Z. Y., et al., Human monoclonal | 25677 |
| | region partial, HCV | | antibody to hepatitis C virUSE1 | |
| | Ab | | glycoprotein that blocks virus attachment | |
| | | | and viral infectivity; J. Virol. 78 (13), | |
| | | | 7257-7263 (2004) NCBI Accession # | |
| | | | AAS47839 (142aa) | |
| HEPBD10 | Heavy chain variable | E183/A2 | US20120308580 SEQ ID NO: 33; | 25678 |
| | region, HBV Ab | | WO2011062562; CN102781961, EP2501723 | |
| HEPBD11 | Heavy chain variable | | US20100260712 SEQ ID NO: 1; | 25679 |
| | region, HBV Ab | | WO2009069917 | |
| HEPBD12 | Heavy chain variable | | WO2015107126 SEQ ID NO: 2 | 25680 |
| | region, HBV Ab | | | |
| HEPBD13 | Heavy chain variable | HB48-33, | U.S. Pat. No. 8,840,895 SEQ ID NO: 1 | 25681 |
| | region, HBV Ab | HB48-35, | | |
| | | HB48-59 | | |
| HEPBD14 | Heavy chain variable | HFW141 | U.S. Pat. No. 7,435,414 SEQ ID NO: 35; | 25682 |
| | region, HBV Ab | | US20060014937; WO2005100400; | |
| | | | CN1980956 | |
| HEPBD15 | Heavy chain variable | | U.S. Pat. No. 7,112,664 SEQ ID NO: 8; U.S. Pat. No. 6,680,053, | 25683 |
| | region, HBV Ab | | U.S. Pat. No. 6,924,368, US20020061581, | |
| | | | US20040191259, US20050249753, | |
| | | | WO2001092529 | |
| HEPBD16 | Heavy chain variable | Ab17.1.4 1 | USRE39586 SEQ ID NO: 4; U.S. Pat. No. 6,146,629; | 25684 |
| | region, HBV Ab | | WO1997047653 | |
| HEPBD17 | Heavy chain variable | Ab 19.79.5 | USRE40831 SEQ ID NO: 4 | 25685 |
| | region, HBV Ab | | | |
| HEPBD18 | Heavy chain variable | | US20150232537 SEQ ID NO: 7; | 25686 |
| | region, HBV Ab | | WO2014048910; CA2884388; | |
| | | | CN104662041A; EP2900692 | |
| HEPBD19 | Heavy chain variable | | WO2013165972 SEQ ID NO: 45 | 25687 |
| | region, HBV Ab | | | |
| HEPBD20 | Heavy chain variable | | WO2013165972 SEQ ID NO: 54 | 25688 |
| | region, HBV Ab | | | |
| HEPBD21 | Heavy chain variable | | WO2013165972 SEQ ID NO: 63 | 25689 |
| | region, HBV Ab | | | |
| HEPBD22 | Heavy chain variable | | WO2013165972 SEQ ID NO: 72 | 25690 |
| | region, HBV Ab | | | |
| HEPBD23 | Heavy chain variable | | WO2013165972 SEQ ID NO: 81 | 25691 |
| | region, HBV Ab | | | |
| HEPBD24 | Heavy chain variable | | WO2013165972 SEQ ID NO: 90 | 25692 |
| | region, HBV Ab | | | |
| HEPBD25 | Heavy chain variable | | WO2013165972 SEQ ID NO: 99 | 25693 |
| | region, HBV Ab | | | |
| HEPBD26 | Heavy chain variable | | WO2013165972 SEQ ID NO: 108 | 25694 |
| | region, HBV Ab | | | |
| HEPBD27 | Heavy chain variable | | WO2013165972 SEQ ID NO: 117 | 25695 |
| | region, HBV Ab | | | |
| HEPBD28 | Heavy chain variable | | WO2013165972 SEQ ID NO: 126 | 25696 |
| | region, HBV Ab | | | |
| HEPBD29 | Heavy chain variable | | WO2013165972 SEQ ID NO: 135 | 25697 |
| | region, HBV Ab | | | |
| HEPBD30 | Heavy chain variable | | WO2013165972 SEQ ID NO: 144 | 25698 |
| | region, HBV Ab | | | |
| HEPBD31 | Heavy chain variable | | WO2013165972 SEQ ID NO: 153 | 25699 |
| | region, HBV Ab | | | |
| HEPBD32 | Heavy chain variable | | WO2013165972 SEQ ID NO: 162 | 25700 |
| | region, HBV Ab | | | |
| HEPBD33 | Heavy chain variable | | WO2013165972 SEQ ID NO: 171 | 25701 |
| | region, HBV Ab | | | |
| HEPBD34 | Heavy chain variable | | WO2013165972 SEQ ID NO: 180 | 25702 |
| | region, HBV Ab | | | |
| HEPBD35 | Heavy chain variable | | WO2013165972 SEQ ID NO: 189 | 25703 |
| | region, HBV Ab | | | |
| HEPBD36 | Heavy chain variable | | WO2013165972 SEQ ID NO: 198 | 25704 |
| | region, HBV Ab | | | |
| HEPBD37 | Heavy chain variable | | WO2013165972 SEQ ID NO: 207 | 25705 |
| | region, HBV Ab | | | |
| HEPBD38 | Heavy chain variable | | WO2013165972 SEQ ID NO: 405 | 25706 |
| | region, HBV Ab | | | |
| HEPBD39 | Heavy chain variable | | WO2013165972 SEQ ID NO: 409 | 25707 |
| | region, HBV Ab | | | |
| HEPBD40 | Heavy chain variable | | WO2013165972 SEQ ID NO: 412 | 25708 |
| | region, HBV Ab | | | |
| HEPBD41 | Heavy chain variable | | WO2013165972 SEQ ID NO: 418 | 25709 |
| | region, HBV Ab | | | |
| HEPBD42 | Heavy chain variable | | WO2013165972 SEQ ID NO: 421 | 25710 |
| | region, HBV Ab | | | |
| HEPBD43 | Heavy chain variable | | WO2009069916 SEQ ID NO: 1 | 25711 |
| | region, HBV Ab | | | |
| HEPBD44 | Heavy chain variable | PE1-1 | WO1994011495 | 25712 |
| | region, HBV Ab | | | |
| HEPBD45 | Heavy chain variable | ZM1-1 | WO1994011495 | 25713 |
| | region, HBV Ab | | | |
| HEPBD46 | Heavy chain variable | ZM1-2 | WO1994011495 | 25714 |
| | region, HBV Ab | | | |
| HEPBD47 | Heavy chain variable | MD3-4 | WO1994011495 | 25715 |
| | region, HBV Ab | | | |
| HEPBD48 | Heavy chain variable | A2E2 | CN102757492 SEQ ID NO: 2 | 25716 |
| | region, HBV Ab | | | |
| HEPBD49 | Heavy chain variable | C9G9 | CN102757492 SEQ ID NO: 6 | 25717 |
| | region, HBV Ab | | | |
| HEPBD50 | Heavy chain variable | | CN104530228 SEQ ID NO: 3 | 25718 |
| | region, HBV Ab | | | |
| HEPBD51 | Heavy chain variable | | CN104530228 SEQ ID NO: 4 | 25719 |
| | region, HBV Ab | | | |
| HEPBD52 | Heavy chain variable | Ab19 | U.S. Pat. No. 8,580,256 SEQ ID NO: 2 | 25720 |
| | region, HBV Ab | | | |
| HEPBD53 | Heavy chain variable | Ab17 | U.S. Pat. No. 8,580,256 SEQ ID NO: 4 | 25721 |
| | region, HBV Ab | | | |
| HEPBD54 | Heavy chain variable | KR127 | U.S. Pat. No. 8,420,353 SEQ ID NO: 28 | 25722 |
| | region, HBV Ab | | | |
| HEPBD55 | Heavy chain variable | DP7 | U.S. Pat. No. 8,420,353 SEQ ID NO: 32 | 25723 |
| | region, HBV Ab | | | |
| HEPBD56 | Heavy chain variable | HZI | U.S. Pat. No. 8,420,353 SEQ ID NO: 36 | 25724 |
| | region, HBV Ab | | | |
| HEPBD57 | Heavy chain variable | MBL-HCV1 | U.S. Pat. No. 8,551,484 SEQ ID NO: 1 | 25725 |
| | region, HCV Ab | (Antibody | | |
| | | produced by | | |
| | | clone 83-128) | | |
| HEPBD58 | Heavy chain variable | MBL-HCV1 | U.S. Pat. No. 8,551,484 SEQ ID NO: 3 | 25726 |
| | region, HCV Ab | (Antibody | | |
| | | produced by | | |
| | | clone 95-2) | | |
| HEPBD59 | Heavy chain variable | MBL-HCV1 | U.S. Pat. No. 8,551,484 SEQ ID NO: 5 | 25727 |
| | region, HCV Ab | (Antibody | | |
| | | produced by | | |
| | | clone 95-14) | | |
| HEPBD60 | Heavy chain variable | Clone 13 | U.S. Pat. No. 7,250,166 SEQ ID NO: 1 | 25728 |
| | region, HCV Ab | | | |
| HEPBD61 | Heavy chain variable | Clone 98 | U.S. Pat. No. 7,250,166 SEQ ID NO: 3 | 25729 |
| | region, HCV Ab | | | |
| HEPBD62 | Heavy chain variable | Clone 1:4 | U.S. Pat. No. 7,250,166 SEQ ID NO: 5 | 25730 |
| | region, HCV Ab | | | |
| HEPBD63 | Heavy chain variable | Clone 1:8 | U.S. Pat. No. 7,250,166 SEQ ID NO: 7 | 25731 |
| | region, HCV Ab | | | |
| HEPBD64 | Heavy chain variable | Clone 1:9 | U.S. Pat. No. 7,250,166 SEQ ID NO: 9 | 25732 |
| | region, HCV Ab | | | |
| HEPBD65 | Heavy chain variable | Clone 1:10 | U.S. Pat. No. 7,250,166 SEQ ID NO: 11 | 25733 |
| | region, HCV Ab | | | |
| HEPBD66 | Heavy chain variable | Clone 4:6 | U.S. Pat. No. 7,250,166 SEQ ID NO: 13 | 25734 |
| | region, HCV Ab | | | |
| HEPBD67 | Heavy chain variable | Clone 6a:5 | U.S. Pat. No. 7,250,166 SEQ ID NO: 15 | 25735 |
| | region, HCV Ab | | | |
| HEPBD68 | Heavy chain variable | Clone 2a:2 | U.S. Pat. No. 7,250,166 SEQ ID NO: 17 | 25736 |
| | region, HCV Ab | | | |
| HEPBD69 | Heavy chain variable | Clone 2a:4 | U.S. Pat. No. 7,250,166 SEQ ID NO: 19 | 25737 |
| | region, HCV Ab | | | |
| HEPBD70 | Heavy chain variable | Clone 2a:5 | U.S. Pat. No. 7,250,166 SEQ ID NO: 21 | 25738 |
| | region, HCV Ab | | | |
| HEPBD71 | Heavy chain variable | Clone 2a:13 | U.S. Pat. No. 7,250,166 SEQ ID NO: 23 | 25739 |
| | region, HCV Ab | | | |
| HEPBD72 | Heavy chain variable | Clone 2a:14 | U.S. Pat. No. 7,250,166 SEQ ID NO: 25 | 25740 |
| | region, HCV Ab | | | |
| HEPBD73 | Heavy chain variable | Clone 2a:23 | U.S. Pat. No. 7,250,166 SEQ ID NO: 27 | 25741 |
| | region, HCV Ab | | | |
| HEPBD74 | Heavy chain variable | Clone 2a:23 | U.S. Pat. No. 7,250,166 SEQ ID NO: 29 | 25742 |
| | region, HCV Ab | | | |
| HEPBD75 | Heavy chain variable | Clone 2a:25 | U.S. Pat. No. 7,250,166 SEQ ID NO: 31 | 25743 |
| | region, HCV Ab | | | |
| HEPBD76 | Heavy chain variable | Clone 2a:30 | U.S. Pat. No. 7,250,166 SEQ ID NO: 33 | 25744 |
| | region, HCV Ab | | | |
| HEPBD77 | Heavy chain variable | Clone 2a:32 | U.S. Pat. No. 7,250,166 SEQ ID NO: 35 | 25745 |
| | region, HCV Ab | | | |
| HEPBD78 | Heavy chain variable | Clone 2a:33 | U.S. Pat. No. 7,250,166 SEQ ID NO: 37 | 25746 |
| | region, HCV Ab | | | |
| HEPBD79 | Heavy chain variable | Clone 2a:37 | U.S. Pat. No. 7,250,166 SEQ ID NO: 39 | 25747 |
| | region, HCV Ab | | | |
| HEPBD80 | Heavy chain variable | Clone 2a:40 | U.S. Pat. No. 7,250,166 SEQ ID NO: 41 | 25748 |
| | region, HCV Ab | | | |
| HEPBD81 | Heavy chain variable | Clone 2b:1 | U.S. Pat. No. 7,250,166 SEQ ID NO: 43 | 25749 |
| | region, HCV Ab | | | |
| HEPBD82 | Heavy chain variable | Clone 2b:3 | U.S. Pat. No. 7,250,166 SEQ ID NO: 45 | 25750 |
| | region, HCV Ab | | | |
| HEPBD83 | Heavy chain variable | Clone 2b:4 | U.S. Pat. No. 7,250,166 SEQ ID NO: 47 | 25751 |
| | region, HCV Ab | | | |
| HEPBD84 | Heavy chain variable | Clone 2b:5 | U.S. Pat. No. 7,250,166 SEQ ID NO: 49 | 25752 |
| | region, HCV Ab | | | |
| HEPBD85 | Heavy chain variable | Clone 2b:7 | U.S. Pat. No. 7,250,166 SEQ ID NO: 51 | 25753 |
| | region, HCV Ab | | | |
| HEPBD86 | Heavy chain variable | Clone 2b:9 | U.S. Pat. No. 7,250,166 SEQ ID NO: 53 | 25754 |
| | region, HCV Ab | | | |
| HEPBD87 | Heavy chain variable | Clone 2b:10 | U.S. Pat. No. 7,250,166 SEQ ID NO: 55 | 25755 |
| | region, HCV Ab | | | |
| HEPHD88 | Heavy chain variable | anti-NS3 Fab | U.S. Pat. No. 7,314,919 SEQ ID NO: 1 | 25756 |
| | region, HCV Ab | | | |
| HEPBD89 | Heavy chain variable | Antibody | U.S. Pat. No. 8,551,484 SEQ ID NO: 32 | 25757 |
| | region, HCV Ab | produced by | | |
| | | clone 95-14 | | |
| HEPBD90 | Heavy chain variable | Antibody | U.S. Pat. No. 8,551,484 SEQ ID NO: 33 | 25758 |
| | region, HCV Ab | produced by | | |
| | | clone 95-38 | | |
| HEPBD91 | Heavy chain variable | Antibody | U.S. Pat. No. 8,551,484 SEQ ID NO: 34 | 25759 |
| | region, HCV Ab | produced by | | |
| | | clone 95-25 | | |
| HEPBD92 | Heavy chain variable | Antibody | U.S. Pat. No. 8,551,484 SEQ ID NO: 35 | 25760 |
| | region, HCV Ab | produced by | | |
| | | clone 95.42 | | |
| HEPBD93 | Heavy chain variable | Antibody | U.S. Pat. No. 8,551,484 SEQ ID NO: 36 | 25761 |
| | region, HCV Ab | produced by | | |
| | | clone 95-43 | | |
| HEPBD94 | Heavy chain variable | Antibody | U.S. Pat. No. 8,551,484 SEQ ID NO: 37 | 25762 |
| | region, HCV Ab | produced by | | |
| | | clone 95-49 | | |
| HEPBD95 | Heavy chain variable | Antibody | U.S. Pat. No. 8,551,484 SEQ ID NO: 38 | 25763 |
| | region, HCV Ab | produced by | | |
| | | clone 95-54 | | |
| HEPBD96 | Heavy chain variable | Antibody | U.S. Pat. No. 8,551,484 SEQ ID NO: 39 | 25764 |
| | region, HCV Ab | produced by | | |
| | | clone 95-58 | | |
| HEPBD97 | Heavy chain variable | Antibody | U.S. Pat. No. 8,551,484 SEQ ID NO: 40 | 25765 |
| | region, HCV Ab | produced by | | |
| | | clone 95-62 | | |
| HEPBD98 | Heavy chain variable | HC-84.1 | US20130084301 SEQ ID NO: 55 | 25766 |
| | region, HCV Ab | | | |
| HEPBD99 | Heavy chain variable | HC-84.20 | US20130084301 SEQ ID NO: 56 | 25767 |
| | region, HCV Ab | | | |
| HEPBD100 | Heavy chain variable | HC-84.21 | US20130084301 SEQ ID NO: 57 | 25768 |
| | region, HCV Ab | | | |
| HEPBD101 | Heavy chain variable | HC-84.22 | US20130084301 SEQ ID NO: 58 | 25769 |
| | region, HCV Ab | | | |
| HEPBD102 | Heavy chain variable | HC-23 | US20130084301 SEQ ID NO: 59 | 25770 |
| | region, HCV Ab | | | |
| HEPBD103 | Heavy chain variable | HC-84.24 | US20130084301 SEQ ID NO: 60 | 25771 |
| | region, HCV Ab | | | |
| HEPBD104 | Heavy chain variable | HC-84.25 | US20130084301 SEQ ID NO: 61 | 25772 |
| | region, HCV Ab | | | |
| HEPBD105 | Heavy chain variable | HC-84.26 | US20130084301 SEQ ID NO: 62 | 25773 |
| | region, HCV Ab | | | |
| HEPBD106 | Heavy chain variable | HC-84.27. | US20130084301 SEQ ID NO: 63 | 25774 |
| | region, HCV Ab | | | |
| HEPBD107 | Heavy chain variable | AOT3 | US20120009196 SEQ ID NO: 1 | 25775 |
| | region, HCV Ab | | | |
| HEPBD108 | Heavy chain variable | C11-3 | US20120009196 SEQ ID NO: 3 | 25776 |
| | region, HCV Ab | | | |
| HEPBD109 | Heavy chain variable | C11-7 | US20120009196 SEQ ID NO: 5 | 25777 |
| | region, HCV Ab | | | |
| HEPBD110 | Heavy chain variable | C11-9 | US20120009196 SEQ ID NO: 7 | 25778 |
| | region, HCV Ab | | | |
| HEPBD111 | Heavy chain variable | C11-14 | US20120009196 SEQ ID NO: 9 | 25779 |
| | region, HCV Ab | | | |
| HEPBD112 | Heavy chain variable | | WO2014065822 SEQ ID NO: 3 | 25780 |
| | region, HCV Ab | | | |
| HEPBD113 | Heavy chain variable | | WO2014065822 SEQ ID NO: 7 | 25781 |
| | region, HCV Ab | | | |
| HEPBD114 | Heavy chain variable | mPA-29 | WO2007143701 SEQ ID NO: 2 | 25782 |
| | region, HCV Ab | | | |
| HEPBD115 | Heavy chain variable | Hc33.1 | Li Y. et al., Structural basis for penetration | 25783 |
| | region, HCV Ab | | of the glycan shield of hepatitis C virUSe2 | |
| | | | glycoprotein by a broadly neutralizing | |
| | | | human antibody; J. Biol. Chem. 290 (16), | |
| | | | 10117-10125 (2015) NCBI Accession # | |
| | | | 4XVJ_H (141aa) | |
| HEPBD116 | Heavy chain variable | | Martin, F., et al., Affinity selection of a | 25784 |
| | region, HCV Ab | | camelized V(H) domain antibody inhibitor | |
| | | | of hepatitis C virUSNS3 protease; Protein | |
| | | | Eng. 10 (5), 607-614 (1997NCBI | |
| | | | Accession # 1OL0_B (121aa) | |
| HEPBD117 | Heavy chain variable | | US20150118242 SEQ ID NO: 2 | 25785 |
| | region, HCV Ab | | | |
| HEPBD118 | Heavy chain variable | | US20150166637 SEQ ID NO: 1, | 25786 |
| | region, Human HBV | | WO2014010890; CA2878155, | |
| | antibody that binds to | | CN104487090, EP2858674 | |
| | the surface antigen | | | |
| | (HBsAg) | | | |
| HEPBD119 | Heavy chain variable | | US20150166637 SEQ ID NO: 2; | 25787 |
| | region, Human HBV | | WO2014010890; CA2878155, | |
| | antibody that binds to | | CN104487090, EP2858674 | |
| | the surface antigen | | | |
| | (HBsAg) | | | |
| HEPBD120 | Heavy chain variable | | US20150166637 SEQ ID NO: 3; | 25788 |
| | region, Human HBV | | WO2014010890; CA2878155, | |
| | antibody that binds to | | CN104487090, EP2858674 | |
| | the surface antigen | | | |
| | (HBsAg) | | | |
| HEPBD121 | Heavy chain variable | | US20150166637 SEQ ID NO: 4; | 25789 |
| | region, Human HBV | | WO2014010890; CA2878155, | |
| | antibody that binds to | | CN104487090, EP2858674 | |
| | the surface antigen | | | |
| | (HBsAg) | | | |
| HEPBD122 | Heavy chain variable | | US20150166637 SEQ ID NO: 5; | 25790 |
| | region, Human HBV | | WO2014010890; CA2878155, | |
| | antibody that binds to | | CN104487090, EP2858674 | |
| | the surface antigen | | | |
| | (HBsAg) | | | |
| HEPBD123 | Heavy chain variable | c18/A2 | US20120308580 SEQ ID NO: 2; | 25791 |
| | region, Monoclonal | | WO2011062562; CN102781961, | |
| | HBV antibody | | EP2501723 | |
| HEPBD124 | Heavy chain variable | | US20110097270 SEQ ID NO: 1 | 25792 |
| | region, Neutralizing | | | |
| | monoclonal HBV | | | |
| | antibody | | | |
| HEPBD125 | Heavy chain, full | | US20150232537 SEQ ID NO: 9; | 25793 |
| | HBV Ab | | WO2014048910; CA2884388; | |
| | | | CN104662041A; EP2900692 | |
| HEPBD126 | Heavy chain, HBV Ab | HBFab21 | CN103588874 SEQ ID NO: 2 | 25794 |
| HEPBD127 | Heavy chain, HCV Ab | Fab clone 1:5 | U.S. Pat. No. 6,747,136 SEQ ID NO: 1 | 25795 |
| HEPBD128 | Heavy chain, HCV Ab | Fab clone 1:7 | U.S. Pat. No. 6,747,136 SEQ ID NO: 2 | 25796 |
| HEPBD129 | Heavy chain, HCV Ab | Fab clone 1:11 | U.S. Pat. No. 6,747,136 SEQ ID NO: 3 | 25797 |
| HEPBD130 | Heavy chain, HCV Ab | Fab clone L3 | U.S. Pat. No. 6,747,136 SEQ ID NO: 4 | 25798 |
| HEPBD131 | Heavy chain, HCV Ab | Fab clone L1 | U.S. Pat. No. 6,747,136 SEQ ID NO: 5 | 25799 |
| HEPBD132 | Heavy chain, HCV Ab | Fab clone A8 | U.S. Pat. No. 6,747,136 SEQ ID NO: 6 | 25800 |
| HEPBD133 | Heavy chain, HCV Ab | Fab clone A12 | U.S. Pat. No. 6,747,136 SEQ ID NO: 7 | 25801 |
| HEPBD134 | Heavy chain, HCV Ab | HCV-AB 68 | U.S. Pat. No. 7,241,445 SEQ ID NO: 3 | 25802 |
| HEPBD135 | Heavy chain, HCV Ab | e8 | U.S. Pat. No. 7,727,529 SEQ ID NO: 1 | 25803 |
| HEPBD136 | Heavy chain, HCV Ab | e10 | U.S. Pat. No. 7,727,529 SEQ ID NO: 3 | 25804 |
| HEPBD137 | Heavy chain, HCV Ab | e20 | U.S. Pat. No. 7,727,529 SEQ ID NO: 5 | 25805 |
| HEPBD138 | Heavy chain, HCV Ab | e137 | U.S. Pat. No. 7,727,529 SEQ ID NO: 7 | 25806 |
| HEPBD139 | Heavy chain, HCV Ab | e301 | U.S. Pat. No. 7,727,529 SEQ ID NO: 9 | 25807 |
| HEPBD140 | Heavy chain, HCV Ab | e509 | U.S. Pat. No. 7,727,529 SEQ ID NO: 11 | 25808 |
| HEPBD141 | Heavy chain, HCV Ab | 5D2 | US20090104207 SEQ ID NO: 7 | 25809 |
| HEPBD142 | Heavy chain, HCV Ab | Mab V | WO2013186752 SEQ ID NO: 3 | 25810 |
| HEPBD143 | Heavy chain, HCV Ab | Mab VI | WO2013186752 SEQ ID NO: 5 | 25811 |
| HEPBD144 | Heavy chain, HCV Ab | | WO2007143701 SEQ ID NO: 12 | 25812 |
| HEPBD145 | Heavy chain, HCV Ab | HuPA29VH#1 | WO2007143701 SEQ ID NO: 15 | 25813 |
| HEPBD146 | Heavy chain, HCV Ab | HuPA29VH#2 | WO2007143701 SEQ ID NO: 16 | 25814 |
| HEPBD147 | Heavy chain, HCV Ab | HuPA29VH#3 | WO2007143701 SEQ ID NO: 17 | 25815 |
| HEPBD148 | Heavy chain, HCV Ab | PA29 | WO2007143701 SEQ ID NO: 28 | 25816 |
| HEPBD149 | Heavy chain, HCV Ab | Ap33 | Kong, L., et al., Structure of Hepatitis C | 25817 |
| | | | Virus Envelope Glycoprotein E2 Antigenic | |
| | | | Site 412 to 423 in Complex with Antibody | |
| | | | AP33; J. Virol. 86 (23), 13085-13088 | |
| | | | (2012) NCBI Accession # 4G6A _H | |
| | | | (224aa) | |
| HEPBD150 | Heavy chain, HCV Ab | Single Chain Fv | Gilmartin, A. A., et al., Protein Eng. Des. | 25818 |
| | | Fragment 1:7 | Sel. 25 (2), 59-66 (2012) NCBI Accession | |
| | | | # 3U6R_A(149aa) | |
| HEPBD151 | Heavy Chain, HCV | Ar3c | Kong, L., et al., Hepatitis C virUSE2 | 25819 |
| | Fab | | envelope glycoprotein core structure; | |
| | | | Science 342 (6162), 1090-1094 (2013) | |
| | | | NCBI Accession # 4MWF_A (233aa) | |
| HEPBD152 | Heavy Chain, HCV | Mrct10.v362 | Pantua, H., et al., Glycan shifting on | 25820 |
| | Fab | | hepatitis C virus (HCV) e2 glycoprotein is | |
| | | | a mechanism for escape from broadly | |
| | | | neutralizing antibodies; J. Mol. Biol. 425 | |
| | | | (11), 1899-1914 (2013) NCBI Accession # | |
| | | | HS6_H (226aa) | |
| HEPBD153 | Heavy Chain, Hcv1 | Hcv1, P2(1) | Kong, L., et al., Structural basis of | 25821 |
| | HCV Ab | Form | hepatitis C virus neutralization by broadly | |
| | | | neutralizing antibody HCV1; Proc. Natl. | |
| | | | Acad. Sci. U.S.A. 109 (24), 9499-9504 | |
| | | | (2012) NCBI Accession # 4DGV_H | |
| | | | (226aa) | |
| HEPBD154 | Heavy Chain, Hcv1 | Hcv1, C2 Form | Kong, L., et al., Structural basis of | 25822 |
| | HCV Ab | | hepatitis C virus neutralization by broadly | |
| | | | neutralizing antibody HCV1; Proc. Natl. | |
| | | | Acad. Sci. U.S.A. 109 (24), 9499-9504 | |
| | | | (2012) NCBI Accession # 4DGY_H | |
| | | | (226aa) | |
| HEPBD155 | Heavy gamma chain | P18-9E | U.S. Pat. No. 8,592,559 SEQ ID NO: 13 | 25823 |
| | variable, HCV Ab | | | |
| HEPBD156 | Heavy-chain-only, | VHH D03 | WO2014053634 SEQ ID NO: 4 | 25824 |
| | HCV Ab | | | |
| HEPBD157 | Heavy-chain-only, | VHH C09 | WO2014053634 SEQ ID NO: 5 | 25825 |
| | HCV Ab | | | |
| HEPBD158 | Heavy-chain-only, | Bl 1 | WO2014053634 SEQ ID NO: 6 | 25826 |
| | HCV Ab | | | |
| HEPBD159 | Heavy-chain-only, | D04 | WO2014053634 SEQ ID NO: 7 | 25827 |
| | HCV Ab | | | |
| HEPBD160 | Light chain full, HBV | | US20150232537 SEQ ID NO: 10; | 25828 |
| | Ab | | WO2014048910; CA2884388; | |
| | | | CN104662041A; EP2900692 | |
| HEPBD161 | Light chain kappa, | | Esposito, C., et al., Recombinant human | 25829 |
| | partial, HCV Ab | | antibodies specific for hepatitis C virus | |
| | | | proteins; Arch. Virol. 142 (3), 601-610 | |
| | | | (1997) NCBI Accession # | |
| | | | CAA54913.1(110aa) | |
| HEPBD162 | Light chain variable | c18/A2 | US20120308580 SEQ ID NO: 1; | 25830 |
| | domain, monoclonal | | WO2011062562; CN102781961, EP2501723 | |
| | HBV antibody | | | |
| HEPBD163 | Light chain variable | | US20110097270 SEQ ID NO: 9 | 25831 |
| | domain, neutralizing | | | |
| | monoclonal HBV | | | |
| | antibody, | | | |
| HEPBD164 | Light chain variable | | EP0521348 | 25832 |
| | gene, Chimeric HBV | | | |
| | Ab | | | |
| HEPBD165 | Light chain variable | E183/A2 | US20120308580 SEQ ID NO: 32; | 25833 |
| | region, HBV Ab | | WO2011062562; CN102781961, EP2501723 | |
| HEPBD166 | Light chain variable | HB48-33 | U.S. Pat. No. 8,840,895 SEQ ID NO: 2 | 25834 |
| | region, HBV Ab | | | |
| HEPBD167 | Light chain variable | HB48-35 | U.S. Pat. No. 8,840,895 SEQ ID NO: 3 | 25835 |
| | region, HBV Ab | | | |
| HEPBD168 | Light chain variable | HB48-59 | U.S. Pat. No. 8,840,895 SEQ ID NO: 4 | 25836 |
| | region, HBV Ab | | | |
| HEPBD169 | Light chain variable | LFW22-31 | U.S. Pat. No. 7,435,414 SEQ ID NO: 36; | 25837 |
| | region, HBV Ab | | US20060014937; WO2005100400; | |
| | | | CN1980956 | |
| HEPBD170 | Light chain variable | LFW22-312 | U.S. Pat. No. 7,435,414 SEQ ID NO: 37; | 25838 |
| | region, HBV Ab | | US20060014937; WO2005100400; | |
| | | | CN1980956 | |
| HEPBD171 | Light chain variable | | WO2013165972 SEQ ID NO: 216 | 25839 |
| | region, HBV Ab | | | |
| HEPBD172 | Light chain variable | | WO2013165972 SEQ ID NO: 225 | 25840 |
| | region, HBV Ab | | | |
| HEPBD173 | Light chain variable | | WO2013165972 SEQ ID NO: 234 | 25841 |
| | region, HBV Ab | | | |
| HEPBD174 | Light chain variable | | WO2013165972 SEQ ID NO: 243 | 25842 |
| | region, HBV Ab | | | |
| HEPBD175 | Light chain variable | | WO2013165972 SEQ ID NO: 252 | 25843 |
| | region, HBV Ab | | | |
| HEPBD176 | Light chain variable | | WO2013165972 SEQ ID NO: 261 | 25844 |
| | region, HBV Ab | | | |
| HEPBD177 | Light chain variable | | WO2013165972 SEQ ID NO: 270 | 25845 |
| | region, HBV Ab | | | |
| HEPBD178 | Light chain variable | | WO2013165972 SEQ ID NO: 279 | 25846 |
| | region, HBV Ab | | | |
| HEPBD179 | Light chain variable | | WO2013165972 SEQ ID NO: 288 | 25847 |
| | region, HBV Ab | | | |
| HEPBD180 | Light chain variable | | WO2013165972 SEQ ID NO: 297 | 25848 |
| | region, HBV Ab | | | |
| HEPBD181 | Light chain variable | | WO2013165972 SEQ ID NO: 306 | 25849 |
| | region, HBV Ab | | | |
| HEPBD182 | Light chain variable | | WO2013165972 SEQ ID NO: 315 | 25850 |
| | region, HBV Ab | | | |
| HEPBD183 | Light chain variable | | WO2013165972 SEQ ID NO: 324 | 25851 |
| | region, HBV Ab | | | |
| HEPBD184 | Light chain variable | | WO2013165972 SEQ ID NO: 333 | 25852 |
| | region, HBV Ab | | | |
| HEPBD185 | Light chain variable | | WO2013165972 SEQ ID NO: 342 and 351 | 25853 |
| | region, HBV Ab | | | |
| HEPBD186 | Light chain variable | | WO2013165972 SEQ ID NO: 360 | 25854 |
| | region, HBV Ab | | | |
| HEPBD187 | Light chain variable | | WO2013165972 SEQ ID NO: 369 | 25855 |
| | region, HBV Ab | | | |
| HEPBD188 | Light chain variable | | WO2013165972 SEQ ID NO: 378 | 25856 |
| | region, HBV Ab | | | |
| HEPBD189 | Light chain variable | | WO2013165972 SEQ ID NO: 387 | 25857 |
| | region, HBV Ab | | | |
| HEPBD190 | Light chain variable | | WO2013165972 SEQ ID NO: 396 | 25858 |
| | region, HBV Ab | | | |
| HEPBD191 | Light chain variable | | WO2009069916 SEQ ID NO: 2 | 25859 |
| | region, HBV Ab | | | |
| HEPBD192 | Light chain variable | PE1-1 | WO1994011495 | 25860 |
| | region, HBV Ab | | | |
| HEPBD193 | Light chain variable | ZM1-1 | WO1994011495 | 25861 |
| | region, HBV Ab | | | |
| HEPBD194 | Light chain variable | ZM1-2 | WO1994011495 | 25862 |
| | region, HB V Ab | | | |
| HEPBD195 | Light chain variable | MD3-4 | WO1994011495 | 25863 |
| | region, HBV Ab | | | |
| HEPBD196 | Light chain variable | A2E2 | CN102757492 SEQ ID NO: 4 | 25864 |
| | region, HBV Ab | | | |
| HEPBD197 | Light chain variable | C9G9 | CN102757492 SEQ ID NO: 8 | 25865 |
| | region, HBV Ab | | | |
| HEPBD198 | Light chain variable | | CN104530228 SEQ ID NO: 1 | 25866 |
| | region, HBV Ab | | | |
| HEPBD199 | Light chain variable | | CN104530228 SEQ ID NO: 2 | 25867 |
| | region, HBV Ab | | | |
| HEPBD200 | Light chain variable | Ab19 | U.S. Pat. No. 8,580,256 SEQ ID NO: 1 | 25868 |
| | region, HBV Ab | | | |
| HEPBD201 | Light chain variable | Ab17 | U.S. Pat. No. 8,580,256 SEQ ID NO: 3 | 25869 |
| | region, HBV Ab | | | |
| HEPBD202 | Light chain variable | KR127 | U.S. Pat. No. 8,420,353 SEQ ID NO: 4 | 25870 |
| | region, HBV Ab | | | |
| HEPBD203 | Light chain variable | KR127 | U.S. Pat. No. 8,420,353 SEQ ID NO: 2 | 25871 |
| | region, HBV Ab | | | |
| HEPBD204 | Light chain variable | KR127 | U.S. Pat. No. 8,420,353 SEQ ID NO: 30 | 25872 |
| | region, HBV Ab | | | |
| HEPBD205 | Light chain variable | DPK12 | U.S. Pat. No. 8,420,353 SEQ ID NO: 34 | 25873 |
| | region, HBV Ab | | | |
| HEPBD206 | Light chain variable | HZI | U.S. Pat. No. 8,420,353 SEQ ID NO: 38 | 25874 |
| | region, HBV Ab | | | |
| HEPBD207 | Light chain variable | | U.S. Pat. No. 7,112,664 SEQ ID NO: 7; U.S. Pat. No. 6,680,053, | 25875 |
| | region, HBV Ab | | U.S. Pat. No. 6,924,368, US20020061581, | |
| | | | US20040191259, US20050249753, | |
| | | | WO2001092529 | |
| HEPBD208 | Light chain variable | Ab17.1.4 1 | USRE39586 SEQ ID NO: 2; U.S. Pat. No. 6,146,629; | 25876 |
| | region, HBV Ab | | WO1997047653 | |
| HEPBD209 | Light chain variable | Ab 19.79.5 | USRE40831 SEQ ID NO: 2 | 25877 |
| | region, HBV Ab | | | |
| HEPBD210 | Light chain variable | | US20150232537 SEQ ID NO: 8; | 25878 |
| | region, HBV Ab | | WO2014048910; CA2884388; | |
| | | | CN104662041A; EP2900692 | |
| HEPBD211 | Light chain variable | | US20100260712 SEQ ID NO: 2; | 25879 |
| | region, HBV Ab | | WO2009069917 | |
| HEPBD212 | Light chain variable | | WO2015107126 SEQ ID NO: 4 | 25880 |
| | region, HBV Ab | | | |
| HEPBD213 | Light chain variable | MBL-HCV1 | U.S. Pat. No. 8,551,484 SEQ ID NO: 2 | 25881 |
| | region, HCV Ab | (Antibody | | |
| | | produced by | | |
| | | clone 83-128) | | |
| HEPBD214 | Light chain variable | MBL-HCV1 | U.S. Pat. No. 8,551,484 SEQ ID NO: 4 | 25882 |
| | region, HCV Ab | (Antibody | | |
| | | produced by | | |
| | | clone 95-2) | | |
| HEPBD215 | Light chain variable | MBL-HV1 | U.S. Pat. No. 8,551,484 SEQ ID NO: 6 | 25883 |
| | region, HCV Ab | (Antibody | | |
| | | produced by | | |
| | | clone 073-1) | | |
| HEPBD216 | Light chain variable | Clone 13 | U.S. Pat. No. 7,250,166 SEQ ID NO: 2 | 25884 |
| | region, HCV Ab | | | |
| HEPBD217 | Light chain variable | Clone 98 | U.S. Pat. No. 7,250,166 SEQ ID NO: 4 | 25885 |
| | region, HCV Ab | | | |
| HEPBD218 | Light chain variable | Clone 1:4 | U.S. Pat. No. 7,250,166 SEQ ID NO: 6 | 25886 |
| | region, HCV Ab | | | |
| HEPBD219 | Light chain variable | Clone 1:8 | U.S. Pat. No. 7,250,166 SEQ ID NO: 8 | 25887 |
| | region, HCV Ab | | | |
| HEPBD220 | Light chain variable | Clone 1:9 | U.S. Pat. No. 7,250,166 SEQ ID NO: 10 | 25888 |
| | region, HCV Ab | | | |
| HEPBD221 | Light chain variable | Clone 1:10 | U.S. Pat. No. 7,250,166 SEQ ID NO: 12 | 25889 |
| | region, HCV Ab | | | |
| HEPBD222 | Light chain variable | Clone 4:6 | U.S. Pat. No. 7,250,166 SEQ ID NO: 14 | 25890 |
| | region, HCV Ab | | | |
| HEPBD223 | Light chain variable | Clone 6a:5 | U.S. Pat. No. 7,250,166 SEQ ID NO: 16 | 25891 |
| | region, HCV Ab | | | |
| HEPBD224 | Light chain variable | Clone 2a:2 | U.S. Pat. No. 7,250,166 SEQ ID NO: 18 | 25892 |
| | region, HCV Ab | | | |
| HEPBD225 | Light chain variable | Clone 2a:4 | U.S. Pat. No. 7,250,166 SEQ ID NO: 20 | 25893 |
| | region, HCV Ab | | | |
| HEPBD226 | Light chain variable | Clone 2a:5 | U.S. Pat. No. 7,250,166 SEQ ID NO: 22 | 25894 |
| | region, HCV Ab | | | |
| HEPBD227 | Light chain variable | Clone 2a:13 | U.S. Pat. No. 7,250,166 SEQ ID NO: 24 | 25895 |
| | region, HCV Ab | | | |
| HEPBD228 | Light chain variable | Clone 2a:14 | U.S. Pat. No. 7,250,166 SEQ ID NO: 26 | 25896 |
| | region, HCV Ab | | | |
| HEPBD229 | Light chain variable | Clone 2a:23 | U.S. Pat. No. 7,250,166 SEQ ID NO: 28 | 25897 |
| | region, HCV Ab | | | |
| HEPBD230 | Light chain variable | Clone 2a:23 | U.S. Pat. No. 7,250,166 SEQ ID NO: 30 | 25898 |
| | region, HCV Ab | | | |
| HEPBD231 | Light chain variable | Clone 2a:25 | U.S. Pat. No. 7,250,166 SEQ ID NO: 32 | 25899 |
| | region, HCV Ab | | | |
| HEPBD232 | Light chain variable | Clone 2a:30 | U.S. Pat. No. 7,250,166 SEQ ID NO: 34 | 25900 |
| | region, HCV Ab | | | |
| HEPBD233 | Light chain variable | Clone 2a:32 | U.S. Pat. No. 7,250,166 SEQ ID NO: 36 | 25901 |
| | region, HCV Ab | | | |
| HEPBD234 | Light chain variable | Clone 2a:33 | U.S. Pat. No. 7,250,166 SEQ ID NO: 38 | 25902 |
| | region, HCV Ab | | | |
| HEPBD235 | light chain variable | Clone 2a:37 | U.S. Pat. No. 7,250,166 SEQ ID NO: 40 | 25903 |
| | region, HCV Ab | | | |
| HEPBD236 | Light chain variable | Clone 2a:40 | U.S. Pat. No. 7,250,166 SEQ ID NO: 42 | 25904 |
| | region, HCV Ab | | | |
| HEPBD237 | Light chain variable | Clone 2b:1 | U.S. Pat. No. 7,250,166 SEQ ID NO: 44 | 25905 |
| | region, HCV Ab | | | |
| HEPBD238 | Light chain variable | Clone 2b:3 | U.S. Pat. No. 7,250,166 SEQ ID NO: 46 | 25906 |
| | region, HCV Ab | | | |
| HEPBD239 | Light chain variable | Clone 2b:4 | U.S. Pat. No. 7,250,166 SEQ ID NO: 48 | 25907 |
| | region, HCV Ab | | | |
| HEPBD240 | Light chain variable | Clone 2b:5 | U.S. Pat. No. 7,250,166 SEQ ID NO: 50 | 25908 |
| | region, HCV Ab | | | |
| HEPBD241 | Light chain variable | Clone 2b:7 | U.S. Pat. No. 7,250,166 SEQ ID NO: 52 | 25909 |
| | region, HCV Ab | | | |
| HEPBD242 | Light chain variable | Clone 2b:9 | U.S. Pat. No. 7,250,166 SEQ ID NO: 54 | 25910 |
| | region, HCV Ab | | | |
| HEPBD243 | Light chain variable | Clone 2b:10 | U.S. Pat. No. 7,250,166 SEQ ID NO: 56 | 25911 |
| | region, HCV Ab | | | |
| HEPBD244 | Light chain variable | anti-NS3 Fab | U.S. Pat. No. 7,314,919 SEQ ID NO: 6 | 25912 |
| | region, HCV Ab | | | |
| HEPBD245 | Light chain variable | | U.S. Pat. No. 7,507,408 SEQ ID NO: 2 | 25913 |
| | region, HCV Ab | | | |
| HEPBD246 | Light chain variable | | U.S. Pat. No. 7,507,408 SEQ ID NO: 4 | 25914 |
| | region, HCV Ab | | | |
| HEPBD247 | Light chain variable | | U.S. Pat. No. 7,507,408 SEQ ID NO: 6 | 25915 |
| | region, HCV Ab | | | |
| HEPBD248 | Light chain variable | Antibody | U.S. Pat. No. 8,551,484 SEQ ID NO: 44 | 25916 |
| | region, HCV Ab | produced by | | |
| | | clone 95-14 | | |
| HEPBD249 | Light chain variable | Antibody | U.S. Pat. No. 8,551,484 SEQ ID NO: 53 | 25917 |
| | region, HCV Ab | produced by | | |
| | | clone 95-38 | | |
| HEPBD250 | Light chain variable | HC-84.1 | US20130084301 SEQ ID NO: 64 | 25918 |
| | region, HCV Ab | | | |
| HEPBD251 | Light chain variable | HC-84.20 | US20130084301 SEQ ID NO: 65 | 25919 |
| | region, HCV Ab | | | |
| HEPBD252 | Light chain variable | HC-84.21 | US20130084301 SEQ ID NO: 66 | 25920 |
| | region, HCV Ab | | | |
| HEPBD253 | Light chain variable | HC-84.22 | US20130084301 SEQ ID NO: 67 | 25921 |
| | region, HCV Ab | | | |
| HEPBD254 | Light chain variable | HC-23 | US20130084301 SEQ ID NO: 68 | 25922 |
| | region, HCV Ab | | | |
| HEPBD255 | Light chain variable | HC-84.24 | US20130084301 SEQ ID NO: 69 | 25923 |
| | region, HCV Ab | | | |
| HEPBD256 | Light chain variable | HC-84.25 | US20130084301 SEQ ID NO: 70 | 25924 |
| | region, HCV Ab | | | |
| HEPBD257 | Light chain variable | HC-84.26 | US20130084301 SEQ ID NO: 71 | 25925 |
| | region, HCV Ab | | | |
| HEPBD258 | Light chain variable | HC-84.27. | US20130084301 SEQ ID NO. 72 | 25926 |
| | region, HCV Ab | | | |
| HEPBD259 | Light chain variable | AOT3 | US20120009196 SEQ ID NO: 2 | 25927 |
| | region, HCV Ab | | | |
| HEPBD260 | Light chain variable | C11-3 | US20120009196 SEQ ID NO: 4 | 25928 |
| | region, HCV Ab | | | |
| HEPBD261 | Light chain variable | C11-7 | US20120009196 SEQ ID NO: 6 | 25929 |
| | region, HCV Ab | | | |
| HEPBD262 | Light chain variable | C11-9 | US20120009196 SEQ ID NO: 8 | 25930 |
| | region, HCV Ab | | | |
| HEPBD263 | Light chain variable | C11-14 | US20120009196 SEQ ID NO: 10 | 25931 |
| | region, HCV Ab | | | |
| HEPBD264 | Light chain variable | | WO2014065822 SEQ ID NO: 5 | 25932 |
| | region, HCV Ab | | | |
| HEPBD265 | Light chain variable | | WO2014065822 SEQ ID NO: 9 | 25933 |
| | region, HCV Ab | | | |
| HEPBD266 | Light chain variable | Antibody light | WO2007143701 SEQ ID NO: 1 | 25934 |
| | region, HCV Ab | chain from | | |
| | | WO2007143701 | | |
| HEPBD267 | Light chain variable | Hc33.1 | Li Y. et al., Structural basis for penetration | 25935 |
| | region, HCV Ab | | of the glycan shield of hepatitis C virUSe2 | |
| | | | glycoprotein by a broadly neutralizing | |
| | | | human antibody; J. Biol. Chem. 290 (16), | |
| | | | 10117-10125 (2015) NCBI Accession # | |
| | | | 4XVJ_L (115aa) | |
| HEPBD268 | Light chain variable | | US20150118242 SEQ ID NO: 3 | 25936 |
| | region, HCV Ab | | | |
| HEPBD269 | Light chain variable | | US20150166637 SEQ ID NO: 6; | 25937 |
| | region, Human HBV | | WO2014010890; CA2878155, | |
| | antibody that binds to | | CN104487090; EP2858674 | |
| | the surface antigen | | | |
| | (HBsAg) | | | |
| HEPBD270 | Light chain variable | | US20150166637 SEQ ID NO: 7; | 25938 |
| | region, Human HBV | | WO2014010890; CA2878155, | |
| | antibody that binds to | | CN104487090, EP2858674 | |
| | the surface antigen | | | |
| | (HBsAg) | | | |
| HEPBD271 | Light chain variable | | US20150166637 SEQ ID NO: 8; | 25939 |
| | region, Human HBV | | WO2014010890; CA2878155, | |
| | antibody that binds to | | CN104487090, EP2858674 | |
| | the surface antigen | | | |
| | (HBsAg) | | | |
| HEPBD272 | Light chain variable | | US20150166637 SEQ ID NO: 9; | 25940 |
| | region, Human HBV | | WO2014010890; CA2878155, | |
| | antibody that binds to | | CN104487090, EP2858674 | |
| | the surface antigen | | | |
| | (HBsAg) | | | |
| HEPBD273 | Light chain variable | | US20150166637 SEQ ID NO: 10; | 25941 |
| | region, Human HBV | | WO2014010890, CA2878155, | |
| | antibody that binds to | | CN104487090, EP2858674 | |
| | the surface antigen | | | |
| | (HBsAg) | | | |
| HEPBD274 | Light chain variable | | Keck, Z. Y., et al., Human monoclonal | 25942 |
| | region, partial, HCV | | antibody to hepatitis C virUSE1 | |
| | Ab | | glycoprotein that blocks virus attachment | |
| | | | and viral infectivity; J. Virol. 78(13), | |
| | | | 7257-7263 (2004) NCBI Accession # | |
| | | | AAS47840 (147aa) | |
| HEPBD275 | Light chain, HCV Ab | Hu5b3.v3 | Pantua, H., et al., Glycan shifting on | 25943 |
| | | | hepatitis C virus (HCV) e2 glycoprotein is | |
| | | | a mechanism for escape from broadly | |
| | | | neutralizing antibodies; J. Mol. Biol. 425 | |
| | | | (11), 1899-1914 (2013) NCBI Accession # | |
| | | | 4HS8_L (218aa) | |
| HEPBD276 | Light chain, HCV Ab | Ap33 | Kong, L., et al., Structure of Hepatitis C | 25944 |
| | | | Virus Envelope Glycoprotein E2 Antigenic | |
| | | | Site 412 to 423 in Complex with Antibody | |
| | | | AP33; J. Virol. 86 (23), 13085-13088 | |
| | | | (2012) NCBI Accession # 4G6A_L | |
| | | | (218aa) | |
| HEPBD277 | Light chain, HBV Ab | HBFab21 | CN103588874 SEQ ID NO: 1 | 25945 |
| HEPBD278 | Light chain, HCV Ab | Fab clone 1:5 | U.S. Pat. No. 6,747,136 SEQ ID NO: 8 | 25946 |
| HEPBD279 | Light chain, HCV Ab | Fab clone 1:7 | U.S. Pat. No. 6,747,136 SEQ ID NO: 9 | 25947 |
| HEPBD280 | Light chain, HCV Ab | Fab clone 1:11 | U.S. Pat. No. 6,747,136 SEQ ID NO: 10 | 25948 |
| HEPBD281 | Light chain, HCV Ab | Fab clone L3 | U.S. Pat. No. 6,747,136 SEQ ID NO: 11 | 25949 |
| HEPBD282 | Light chain, HCV Ab | Fab clone L1 | U.S. Pat. No. 6,747,136 SEQ ID NO: 12 | 25950 |
| HEPBD283 | Light chain, HCV Ab | Fab clone A8 | U.S. Pat. No. 6,747,136 SEQ ID NO: 13 | 25951 |
| HEPBD284 | Light chain, HCV Ab | Fab clone A12 | U.S. Pat. No. 6,747,136 SEQ ID NO: 14 | 25952 |
| HEPBD285 | Light chain, HCV Ab | HCV#1 | U.S. Pat. No. 6,924,362 SEQ ID NO: 1 | 25953 |
| HEPBD286 | Light chain, HCV Ab | HCV#4 | U.S. Pat. No. 6,924,362 SEQ ID NO: 2 | 25954 |
| HEPBD287 | Light chain, HCV Ab | HCV#7 | U.S. Pat. No. 6,924,362 SEQ ID NO: 3 | 25955 |
| HEPBD288 | Light chain, HCV Ab | HCV#12 | U.S. Pat. No. 6,924,362 SEQ ID NO: 4 | 25956 |
| HEPBD289 | Light chain, HCV Ab | HGV#13 | U.S. Pat. No. 6,924,362 SEQ ID NO: 5 | 25957 |
| HEPBD290 | Light chain, HCV Ab | HCV-AB 68 | U.S. Pat. No. 7,241,445 SEQ ID NO: 4 | 25958 |
| HEPBD291 | Light chain, HCV Ab | e8 | U.S. Pat. No. 7,727,529 SEQ ID NO: 2 | 25959 |
| HEPBD292 | Light chain, HCV Ab | e10 | U.S. Pat. No. 7,727,529 SEQ ID NO: 4 | 25960 |
| HEPBD293 | Light chain, HCV Ab | e20 | U.S. Pat. No. 7,727,529 SEQ ID NO: 6 | 25961 |
| HEPBD294 | Light chain, HCV Ab | e137 | U.S. Pat. No. 7,727,529 SEQ ID NO: 8 | 25962 |
| HEPBD295 | Light chain, HCV Ab | e301 | U.S. Pat. No. 7,727,529 SEQ ID NO: 10 | 25963 |
| HEPBD296 | Light chain, HCV Ab | e509 | U.S. Pat. No. 7,727,529 SEQ ID NO: 12 | 25964 |
| HEPBD297 | Light chain, HCV Ab | 5D2 | US20090104207 SEQ ID NO: 8 | 25965 |
| HEPBD298 | Light chain, HCV Ab | MabV | WO2013186752 SEQ ID NO: 4 | 25966 |
| HEPBD299 | Light chain, HCV Ab | Mab VI | WO2013186752 SEQ ID NO: 6 | 25967 |
| HEPBD300 | Light chain, HCV Ab | | WO2007143701 SEQ ID NO: 11 | 25968 |
| HEPBD301 | Light chain, HCV Ab | HuPA29VH#1 | WO2007143701 SEQ ID NO: 18 | 25969 |
| HEPBD302 | Light chain, HCV Ab | HuPA29VH#2 | WO2007143701 SEQ ID NO: 19 | 25970 |
| HEPBD303 | Light chain, HCV Ab | PA29 | WO2007143701 SEQ ID NO: 29 | 25971 |
| HEPBD304 | Light chain, HCV Ab | Single Chain Fv | Gilmartin, A. A., et al., Protein Eng. Des. | 25972 |
| | | Fragment 1:7 | Sel. 25 (2), 59-66 (2012) NCBI Accession | |
| | | | # 3U6R_B (143aa) | |
| HEPBD305 | Light chain, HCV Ab | Igh526 | Kong L., et al., Structure of Hepatitis C | 25973 |
| | | | Virus Envelope Glycoprotein E1 Antigenic | |
| | | | Site 314-324 in Complex with Antibody | |
| | | | IGH526; J. Mol. Biol. 427 (16), 2617-2628 | |
| | | | (2015) NCBI Accession # 4N0Y_L | |
| | | | (218aa) | |
| HEPBD306 | Light chain, HCV Fab | Ar3c | Kong, L., et al., Hepatitis C virUSE2 | 25974 |
| | | | envelope glycoprotein core structure; | |
| | | | Science 342 (6162), 1090-1094 (2013) | |
| | | | NCBI Accession # 4MWF_B (214aa) | |
| HEPBD307 | Light chain, HCV Fab | Mrct10.v362 | Pantua, H., et al., Glycan shifting on | 25975 |
| | | | hepatitis C virus (HCV) e2 glycoprotein is | |
| | | | a mechanism for escape from broadly | |
| | | | neutralizing antibodies; J. Mol. Biol. 425 | |
| | | | (11), 1899-1914 (2013) NCBI Accession # | |
| | | | 4HS6_L (218aa) | |
| HEPBD308 | Light chain, Hcv1 | Hcv1, C2 Form | Kong, L., et al., Structural basis of | 25976 |
| | HCV Ab | | hepatitis C virus neutralization by broadly | |
| | | | neutralizing antibody HCV1; Proc. Natl. | |
| | | | Acad. Sci, U.S.A. 109 (24), 9499-9504 | |
| | | | (2012) NCBI Accession # 4DGY_L | |
| | | | (213aa) | |
| HEPBD309 | Light chain, Hcv1 | Hcv1, P2(1) | Kong, L., et al., Structural basis of | 25977 |
| | HCV Ab | Form | hepatitis C virus neutralization by broadly | |
| | | | neutralizing antibody HCV1; Proc. Natl. | |
| | | | Acad. Sci, U.S.A. 109 (24), 9499-9504 | |
| | | | (2012) NCBI Accession # 4DGV_L | |
| | | | (213aa) | |
| HEPBD310 | Light kappa chain | P18-9E | U.S. Pat. No. 8,592,559 SEQ ID NO: 14 | 25978 |
| | variable, HCV Ab | | | |
| HEPBD311 | PEGylated anti-E2 | | WO2006028634 SEQ ID NO: 1 | 25979 |
| | heavy chain, HCV Ab | | | |
| HEPBD312 | PEGylated anti-E2 | | WO2006028634 SEQ ID NO: 2 | 25980 |
| | heavy chain, HCV Ab | | | |
| HEPBD313 | PEGylated anti-E2 | | WO2006028634 SEQ ID NO: 3 | 25981 |
| | heavy chain, HCV Ab | | | |
| HEPBD314 | PEGylated anti-E2 | | WO2006028634 SEQ ID NO: 4 | 25982 |
| | heavy chain, HCV Ab | | | |
| HEPBD315 | PEGylated anti-E2 | | WO2006028634 SEQ ID NO: 8 | 25983 |
| | heavy chain, HCV Ab | | | |
| HEPBD316 | single chain, HBV Ab | | U.S. Pat. No. 6,562,599 SEQ ID NO: 4 | 25984 |
| HEPBD317 | single chain, HBV Ab | | U.S. Pat. No. 6,562,599 SEQ ID NO: 6 | 25985 |

[0464] In some embodiments, the payload region of the viral particle comprises one or more nucleic acid sequences, fragments or variants thereof or encodes one or more polypeptides, fragments or variants thereof described in U.S. Pat. Nos. 7,241,445, and 8,858,947, the contents of each of which are herein incorporated by reference in their entirety, against HCV.

[0465] In some embodiments, the payload region of the viral particle comprises one or more nucleic acid sequences, fragments or variants thereof or encodes one or more polypeptides, fragments or variants thereof described in US Publication No. US20150072885 and US20110046354, U.S. Pat. No. 5,204,095, European Publication No. EP0232921, EP0038642, and EP0186371, and International Publication No. WO1994011495, the contents of each of which are herein incorporated by reference in their entirety, against HBV.

[0466] In some embodiments, the payload region of the viral particle comprises one or more nucleic acid sequences, fragments or variants thereof or encodes one or more polypeptides, fragments or variants thereof described in U.S. Pat. No. 6,020,195, the contents of which are herein incorporated by reference in their entirety, against HGV (hepatitis (i virus).

[0467] In some embodiments, the payload region of the viral particle comprises one or more nucleic acid sequences encoding one or more of the payload antibody polypeptides listed in Table 35 against Herpes Virus (HERP1-HERP109; SEQ ID NO: 25986-26094).

TABLE 35
Antibodies against Herpesvirus

| Antibody | | Antibody | | SEQ |
|---|---|---|---|---|
| No. | Description | Name | Reference Information | ID NO |
| HERP1 | Chain A, HSV | E317 Fab | Lee, C. et al., “Structural basis for the | 25986 |
| | | | antibody neutralization of herpes simplex | |
| | | | virus” Acta Crystallogr. D Biol. Crystallogr. | |
| | | | 69 (PT 10), 1935-1945 (2013), NCBI | |
| | | | Accession # 3W9D_A | |
| HERP2 | Chain B, HSV | E317 Fab | Lee, C. et al., “Structural basis for the | 25987 |
| | | | antibody neutralization of herpes simplex | |
| | | | virus” Acta Crystallogr. D Biol. Clystallogr. | |
| | | | 69 (PT 10), 1935-1945 (2013), NCBI | |
| | | | Accession # 3W9D_B | |
| HERP3 | Chain C, HSV | E317 Fab | Lee, C. et al., “Structural basis for the | 25988 |
| | | | antibody neutralization of herpes simplex | |
| | | | virus” Acta Crystatlogr. D Biol. Crystallogr. | |
| | | | 69 (PT 10), 1935-1945 (2013), NCBI | |
| | | | Accession # 3W9D_C | |
| HERP4 | Chain D, HSV | E317 Fab | Lee, C. et al., “Structural basis for the | 25989 |
| | | | antibody neutralization of herpes simplex | |
| | | | virus” Acta Crystallogr. D Biol. Clystallogr. | |
| | | | 69 (PT 10), 1935-1945 (2013), NCBI | |
| | | | Accession # 3W9D_D | |
| HERP5 | Chimeric anti- | | Tanner, J. E., “Peptides Designed To Spatially | 25990 |
| | EBVs | | Depict the Epstein-Barr Virus Major Virion | |
| | gp350 antibody | | Glycoprotein gp350 Neutralization Epitope | |
| | | | Elicit Antibodies That Block Virus- | |
| | | | Neutralizing Antibody 72A1 Interaction with | |
| | | | the Native gp350 Molecule””, J. Virol. 89 (9), | |
| | | | 4932-4941 (2015), NCBI Accession | |
| | | | #AJR20276 | |
| HERP6 | Chimeric anti- | | Tanner, J. E., “Peptides Designed To Spatially | 25991 |
| | EBVs | | Depict the Epstein-Barr Virus Major Virion | |
| | gp350 antibody | | Glycoprotein gp350 Neutralization Epitope | |
| | | | Elicit Antibodies That Block Virus- | |
| | | | Neutralizing Antibody 72A1 Interaction with | |
| | | | the Native gp350 Molecule””, J. Virol. 89 (9), | |
| | | | 4932-4941 (2015), NCBI Accession | |
| | | | #AJR20275 | |
| HERP7 | CMV | AE11F/3-20L1 | Lantto, J. et al., Binding characteristics | 25992 |
| | | | determine the neutralizing potential of | |
| | | | antibody fragments specific for antigenic | |
| | | | domain 2 on glycoprotein B of human | |
| | | | cytomegalovirus, Virology 305 (1), 201-209 | |
| | | | (2003), NCBI Accession # AAN87569.1 (256 | |
| | | | aa) | |
| HERP8 | Fv, EBV | G5 | Fang, C. Y., “Modulation of Epstein-Barr virus | 25993 |
| | | | latent membrane protein 1 activity by | |
| | | | intrabodies”, Intervirology 50 (4), 254-263 | |
| | | | (2007), NCBI Accession #ABA55015 | |
| HERP9 | Fv, EBV | A4 | Fang, C. Y., “Modulation of Epstein-Barr virus | 25994 |
| | | | latent membrane protein 1 activity by | |
| | | | intrabodies”, Intervirology 50 (4), 254-263 | |
| | | | (2007), NCBI Accession #ABA55014 | |
| HERP10 | Fv, EBV | B8 | Fang, C. Y., “Modulation of Epstein-Barr virus | 25995 |
| | | | latent membrane protein 1 activity by | |
| | | | intrabodies”, Intervirology 50 (4), 254-263 | |
| | | | (2007), NCBI Accession #ABA55013 | |
| HERP11 | Fv, EBV | F5 | Fang, C. Y., “Modulation of Epstein-Barr virus | 25996 |
| | | | latent membrane protein 1 activity by | |
| | | | intrabodies”, Intervirology 50 (4), 254-263 | |
| | | | (2007), NCBI Accession #ABA55012 | |
| HERP12 | Fv, EBV | E2 | Fang, C. Y., “Modulation of Epstein-Barr virus | 25997 |
| | | | latent membrane protein 1 activity by | |
| | | | intrabodies”, Intervirology 50 (4), 254-263 | |
| | | | (2007), NCBI Accession #ABA55011 | |
| HERP13 | Fv, EBV | H3 | Fang, C. Y., “Modulation of Epstein-Barr virus | 25998 |
| | | | latent membrane protein 1 activity by | |
| | | | intrabodies”, Intervirology 50 (4), 254-263 | |
| | | | (2007), NCBI Accession #ABA55010 | |
| HERP14 | Heavy chain, | DDF-VZV1 | US20100074906 SEQ ID NO: 20 | 25999 |
| | FLAGhis tagged | | | |
| | sequence, VZV | | | |
| HERP15 | Heavy chain | ACHDV1 | Burioni, R. et al. “Recombinant human Fab to | 26000 |
| | variable domain, | | glycoprotein D neutralizes infectivity and | |
| | clone 11, HSV | | prevents cell-to-cell transmission of herpes | |
| | | | simplex viruses 1 and 2 in vitro”, Proc. Natl. | |
| | | | Acad. Sci. U.S.A. 91 (1), 355-359 (1994), | |
| | | | NCBI Accession # AAB29447 | |
| HERP16 | Heavy chain | ACHDV1 | Burioni, R. et al. “Recombinant human Fab to | 26001 |
| | variable domain, | | glycoprotein D neutralizes infectivity and | |
| | clone 13, HSV | | prevents cell-to-cell transmission of herpes | |
| | | | simplex viruses 1 and 2 in vitro”, Proc. Natl. | |
| | | | Acad. Sci. U.S.A. 91 (1), 355-359 (1994), | |
| | | | NCBI Accession # AAB29449 | |
| HERP17 | Heavy chain | ACHDV2 | Burioni, R, et al, “Recombinant human Fab to | 26002 |
| | variable domain, | | glycoprotein D neutralizes infectivity and | |
| | clone 15, HSV | | prevents cell-to-cell transmission of herpes | |
| | | | simplex viruses 1 and 2 in vitro”, Proc. Natl. | |
| | | | Acad. Sci. U.S.A. 91 (1), 355-359 (1994), | |
| | | | NCBI Accession # AAB29456 | |
| HERP18 | Heavy chain | ACHDV1 | Burioni, R. et al. “Recombinant human Fab to | 26003 |
| | variable domain, | | glycoprotein D neutralizes infectivity and | |
| | clone 15, HSV | | prevents cell-to-cell transmission of herpes | |
| | | | simplex viruses 1 and 2 in vitro”, Proc. Natl. | |
| | | | Acad. Sci. U.S.A. 91 (1), 355-359 (1994), | |
| | | | NCBI Accession # AAB29450 | |
| HERP19 | Heavy chain | ACHDV1 | Burioni, R. et al. “Recombinant human Fab to | 26004 |
| | variable domain, | | glycoprotein D neutralizes infectivity and | |
| | clone 18, HSV | | prevents cell-to-cell transmission of herpes | |
| | | | simplex viruses 1 and 2 in vitro”, Proc. Natl. | |
| | | | Acad. Sci. U.S.A. 91 (1), 355-359 (1994), | |
| | | | NCBI Accession # AAB29448 | |
| HERP20 | Heavy chain | ACHDV1 | Burioni, R. et al. “Recombinant human Fab to | 26005 |
| | variable domain, | | glycoprotein D neutralizes infectivity and | |
| | clone 2, HSV | | prevents cell-to-cell transmission of herpes | |
| | | | simplex viruses 1 and 2 in vitro”, Proc. Natl. | |
| | | | Acad. Sci. U.S.A. 91 (1), 355-359 (1994), | |
| | | | NCBI Accession # AAB29455 | |
| HERP21 | Heavy chain | IF7 | U.S. Pat. No. 8,202,518 SEQ ID NO: 5 | 26006 |
| | variable region, | | | |
| | CMV | | | |
| HERP22 | Heavy chain | Humanized 57.4 | WO2014200898 SEQ ID NO: 633 | 26007 |
| | variable region, | | | |
| | CMV | | | |
| HERP23 | Heavy chain | Humanized 57.4 | WO2014200898 SEQ ID NO: 634 | 26008 |
| | variable region, | | | |
| | CMV | | | |
| HERP24 | Heavy chain | Humanized 58.5 | WO2014200898 SEQ ID NO: 637 | 26009 |
| | variable region, | | | |
| | CMV | | | |
| HERP25 | Heavy chain | Humanized 58.5 | WO2014200898 SEQ ID NO: 638 | 26010 |
| | variable region, | | | |
| | CMV | | | |
| HERP26 | Heavy chain | Humanized | WO2014200898 SEQ ID NO: 641 | 26011 |
| | variable region, | 272.7 | | |
| | CMV | | | |
| HERP27 | Heavy chain | Humanized | WO2014200898 SEQ ID NO: 644 | 26012 |
| | variable region, | 276.10 | | |
| | CMV | | | |
| HERP28 | Heavy chain | Humanized | WO2014200898 SEQ ID NO: 645 | 26013 |
| | variable region, | 276.10 | | |
| | CMV | | | |
| HERP29 | Heavy chain | Sm5-1 | Li, B., Construction and characterization of a | 26014 |
| | variable region, | | high-affinity humanized SMS-1 monoclonal | |
| | CMV | | antibody, Biochem. Biophys. Res. Commun. | |
| | | | 357 (4), 951-956 (2007), NCBI Accession # | |
| | | | ABI22831.1 | |
| HERP30 | Heavy chain | | Schoppel, K. et al., Antibodies specific for the | 26015 |
| | variable region, | | antigenic domain 1 of glycoprotein B | |
| | CMV | | (gpUL55) of human cytomegalovirus bind to | |
| | | | different substructures, Virology 216 (1), 133- | |
| | | | 145 (1996), NCBI Accession # AAB26953.1 | |
| | | | (163 aa) | |
| HERP31 | Heavy chain | | Schoppel, K. et al., Antibodies specific for the | 26016 |
| | variable region, | | antigenic domain 1 of glycoprotein B | |
| | CMV | | (gpUL55) of human cytomegalovirus bind to | |
| | | | different substructures, Virology 216 (1), 133- | |
| | | | 145 (1996), NCBI Accession # AAB26952.1 | |
| | | | (161 aa) | |
| HERP32 | Heavy chain | | Schoppel, K. et al., Antibodies specific for the | 26017 |
| | variable region, | | antigenic domain 1 of glycoprotein B | |
| | CMV | | (gpUL55) of human cytomegalovirus bind to | |
| | | | different substructures, Virology 216 (1), 133- | |
| | | | 145 (1996), NCBI Accession # AAB26951.1 | |
| | | | (158 aa) | |
| HERP33 | Heavy chain | | Potzsch, S., B Cell Repertoire Analysis | 26018 |
| | variable region, | | Identifies New Antigenic Domains on | |
| | CMV | | Glycoprotein B of Human Cytomegalovirus | |
| | | | which Are Target of Neutralizing Antibodies, | |
| | | | NCBI Accession # AEF33814.1 | |
| HERP34 | Heavy chain | 1F11 | U.S. Pat. No. 9,149,524 SEQ ID NO: 7 | 26019 |
| | variable region, | | | |
| | CMV, a complex | | | |
| | of human | | | |
| | cytomegalovirus | | | |
| | (hCMV) proteins | | | |
| | UL130 and | | | |
| | UL131A | | | |
| HERP35 | Heavy chain | 2F4 | U.S. Pat. No. 9,149,524 SEQ ID NO: 17 | 26020 |
| | variable region, | | | |
| | CMV, a complex | | | |
| | of human | | | |
| | cytomegalovirus | | | |
| | (hCMV) proteins | | | |
| | UL130 and | | | |
| | UL131A | | | |
| HERP36 | Heavy chain | 5A2 | U.S. Pat. No. 9,149,524 SEQ ID NO: 39 | 26021 |
| | variable region, | | | |
| | CMV, a complex | | | |
| | of human | | | |
| | cytomegalovirus | | | |
| | (hCMV) proteins | | | |
| | UL130 and | | | |
| | UL131A | | | |
| HERP37 | Heavy chain | EV2038 | U.S. Pat. No. 8,492,529 SEQ ID NO: 10 | 26022 |
| | variable region, | | | |
| | CMV, AD1 | | | |
| | region of HMV | | | |
| | glycoprotein gB | | | |
| HERP38 | Heavy chain | | US20150064174 SEQ ID 1 | 26023 |
| | variable region, | | | |
| | EBV | | | |
| HERP39 | Heavy chain | | US20150064174 SEQ ID 2 | 26024 |
| | variable region, | | | |
| | EBV | | | |
| HERP40 | Heavy chain | HCMV16 | WO1994009136, FIG. 1 | 26025 |
| | variable region, | | | |
| | gH glycoprotein | | | |
| | of HCMV | | | |
| HERP41 | Heavy chain | | Nejatollahi, F. and Bagheri, V., “Isolation of | 26026 |
| | variable region, | | neutralizing human specific single-chain | |
| | HSV | | antibodies against Herpes Simplex Virus type | |
| | | | 1 glycoproiein D”, unpublished, NCBI | |
| | | | Accession # AGO59015 | |
| HERP42 | Heavy chain | E317 | U.S. Pat. No. 8,431,118 SEQ ID NO: 1; U.S. Pat. No. 8,252,906 | 26027 |
| | variable region, | | | |
| | HSV 1&2 | | | |
| HERP43 | Heavy chain | E425 | U.S. Pat. No. 8,431,118 SEQ ID NO: 3; U.S. Pat. No. 8,252,906 | 26028 |
| | variable region, | | | |
| | HSV 1&2 | | | |
| HERP44 | Heavy chain | Y571 | U.S. Pat. No. 8,431,118 SEQ ID NO: 41; U.S. Pat. No. 8,252,906 | 26029 |
| | variable region, | | | |
| | HSV 1&2 | | | |
| HERP45 | Heavy chain | | U.S. Pat. No. 5,506,132 SEQ ID NO: 4 | 26030 |
| | variable region, | | | |
| | VZV | | | |
| HERP46 | Heavy chain | DDF-VZV2 | US20100074906 SEQ ID NO: 26 | 26031 |
| | variable region, | | | |
| | VZV | | | |
| HERP47 | Heavy chain | EV2038 | U.S. Pat. No. 8,492,529 SEQ ID NO: 6 | 26032 |
| | without a signal | | | |
| | sequence, CMV, | | | |
| | AD1 region of | | | |
| | HCMV | | | |
| | glycoprote in gB | | | |
| HERP48 | Heavy chain, | 8f9 | McLean, G. R. et al., Recognition of human | 26033 |
| | CMV | | cytomegalovirus by human primary | |
| | | | immunoglobulins identifies an innate | |
| | | | foundation to an adaptive immune response, J. | |
| | | | Immunol. 174 (8), 4768-4778 (2005), NCBI | |
| | | | Accession # CAE54374.1 | |
| HERP49 | Heavy chain, | Mab 109 | Simpson, J. A. et al., Neutralizing monoclonal | 26034 |
| | CMV | | antibodies that distinguish three antigenic sites | |
| | | | on human cytomegalovirus glycoprotein H | |
| | | | have conformationally distinct binding sites, J. | |
| | | | Virol. 67 (1), 489-496 (1993), NCBI | |
| | | | Accession # AAB24505.1 (119 aa) | |
| HERP50 | Heavy chain, | Mab 115 | Simpson, J. A. et al., Neutralizing monoclonal | 26035 |
| | CMV | | antibodies that distinguish three antigenic sites | |
| | | | on human cytomegalovirus glycoprotein H | |
| | | | have conformationaly distinct binding sites, J. | |
| | | | Virol. 67 (1), 489-496 (1993), NCBI | |
| | | | Accession # AAB24504.1 (117 aa) | |
| HERP51 | Heavy chain, | Mab 33 | Simpson, J. A. et al., Neutralizing monoclonal | 26036 |
| | CMV | | antibodies that distinguish three antigenic sites | |
| | | | on human cytomegalovirus glycoprotein H | |
| | | | have conformationally distinct binding sites, J. | |
| | | | Virol. 67 (1), 489-496 (1993), NCBI | |
| | | | Accession # AAB24503.1 (120 aa) | |
| HERP52 | Heavy chain, | Mab 5 | Simpson, J. A. et at., Neutralizing monoclonal | 26037 |
| | CMV | | antibodies that distinguish three antigenic sites | |
| | | | on human cytomegalovirus glycoprotein H | |
| | | | have conformationaly distinct binding sites, J. | |
| | | | Virol. 67 (1), 489-496 (1993), NCBI | |
| | | | Accession # AAB24502.1 (120 aa) | |
| HERP53 | Heavy chain, | 6G4 | WO2010007463 SEQ ID NO: 7 | 26038 |
| | CMV, a | | | |
| | combination of | | | |
| | the hCMV | | | |
| | proteins UL128, | | | |
| | UL130 and | | | |
| | UL131A | | | |
| HERP54 | Heavy chain, | | US20140093526 SEQ ID 12 | 26039 |
| | HHV-6 | | | |
| HERP55 | Heavy chain, | FabHSV 8. | U.S. Pat. No. 6,156,313 SEQ ID NO: 2 | 26040 |
| | HSV 1&2 | | | |
| HERP56 | Heavy chain, | 64-683 | U.S. Pat. No. 5,646,041 SEQ ID NO: 2; EP876478 | 26041 |
| | HSV 1&2 | | | |
| HERP57 | Heavy chain, | H005157 | US20140302062 SEQ ID NO: 3 | 26042 |
| | HSV 1&2 | | | |
| HERP58 | Heavy chain, | H005158 | US20140302062 SEQ ID NO: 4 | 26043 |
| | HSV 1&2 | | | |
| HERP59 | Heavy chain, | H005159 | US20140302062 SEQ ID NO: 5 | 26044 |
| | HSV 1&2 | | | |
| HERP60 | Heavy chain, | H005160 | US20140302062 SEQ ID NO: 6 | 26045 |
| | HSV 1&2 | | | |
| HERP61 | Heavy chain, | H005188 | US20140302062 SEQ ID NO: 7 | 26046 |
| | HSV 1&2 | | | |
| HERP62 | Heavy chain, | H005190 | US20140302062 SEQ ID NO: 8 | 26047 |
| | HSV 1&2 | | | |
| HERP63 | Heavy chain, | H005192 | US20140302062 SEQ ID NO: 9 | 26048 |
| | HSV 1&2 | | | |
| HERP64 | Light chain | HCMV16 | WO1994009136, FIG. 2 | 26049 |
| | variable region, | | | |
| | gH glycoprotein | | | |
| | of HCMV | | | |
| HERP65 | Light chain | DDF-VZV1 | US20100074906 SEQ ID NO: 22 | 26050 |
| | recombinant, | | | |
| | VZV | | | |
| HERP66 | Light chain | 1F7 | U.S. Pat. No. 8,202,518 SEQ ID NO: 10 | 26051 |
| | variable region, | | | |
| | CMV | | | |
| HERP67 | Light chain | Humanized 57.4 | WO2014200898 SEQ ID NO: 631 | 26052 |
| | variable region, | | | |
| | CMV | | | |
| HERP68 | Light chain | Humanized 57.4 | WO2014200898 SEQ ID NO: 632 | 26053 |
| | variable region, | | | |
| | CMV | | | |
| HERP69 | Light chain | Humanized 58.5 | WO2014200898 SEQ ID NO: 635 | 26054 |
| | variable region, | | | |
| | CMV | | | |
| HERP70 | Light chain | Humanized 58.5 | WO2014200898 SEQ ID NO: 636 | 26055 |
| | variable region, | | | |
| | CMV | | | |
| HERP71 | Light chain | Humanized | WO2014200898 SEQ ID NO: 639 | 26056 |
| | variable region, | 272.7 | | |
| | CMV | | | |
| HERP72 | Light chain | Humanized | WO2014200898 SEQ ID NO: 640 | 26057 |
| | variable region, | 272.7 | | |
| | CMV | | | |
| HERP73 | Light chain | Humanized | WO2014200898 SEQ ID NO: 642 | 26058 |
| | variable region, | 276.10 | | |
| | CMV | | | |
| HERP74 | Light chain | Humanized | WO2014200898 SEQ ID NO: 643 | 26059 |
| | variable region, | 276.10 | | |
| | CMV | | | |
| HERP75 | Light chain | Sm5-1 | Li, B., Construction and characterization of a | 26060 |
| | variable region, | | high-affinity humanized SM5-1 monoclonal | |
| | CMV | | antibody, Biochem. Biophys. Res. Commun. | |
| | | | 357 (4), 951-956 (2007), NCBI Accession # | |
| | | | ABI22832.1 | |
| HERP76 | Light chain | 8f9 | Schoppel, K. et al., Antibodies specific for the | 26061 |
| | variable region, | | antigenic domain 1 of glycoprotein B | |
| | CMV | | (gpUL55) of human cytomegalovirus bind to | |
| | | | different substructures, Virology 216 (1), 133- | |
| | | | 145 (1996), NCBI Accession # AAB26956.1 | |
| | | | (146 aa) | |
| HERP77 | Light chain | | Schoppel, K. et al., Antibodies specific for the | 26062 |
| | variable region, | | antigenic domain 1 of glycoprotein B | |
| | CMV | | (gpUL55) of human cytomegalovirus bind to | |
| | | | different substructures, Virology 216 (1), 133- | |
| | | | 145 (1996), NCBI Accession # AAB26955.1 | |
| | | | (141 aa) | |
| HERP78 | Light chain | | Schoppel, K. et al., Antibodies specific for the | 26063 |
| | variable region, | | antigenic domain 1 of glycoprotein B | |
| | CMV | | (gpUL55) of human cytomegalovirus bind to | |
| | | | different substructures, Virology 216 (1), 133- | |
| | | | 45 (1996), NCBI Accession # AAB26954.1 | |
| | | | (152 aa) | |
| HERP79 | Light chain | | Potzsch, S., B Cell Repertoire Analysis | 26064 |
| | variable region, | | Identifies New Antigenic Domains on | |
| | CMV | | Glycoprotein B of Human Cytomegalovirus | |
| | | | which Are Target of Neutralizing Antibodies, | |
| | | | NCBI Accession # AEF33824.1 | |
| HERP80 | Light chain | 1F11 | U.S. Pat. No. 9,149,524 SEQ ID NO: 8 | 26065 |
| | variable region, | | | |
| | CMV, a | | | |
| | combination of | | | |
| | the hCMV | | | |
| | proteins UL128, | | | |
| | UL130 and | | | |
| | UL131A | | | |
| HERP81 | Light chain | 2F4 | U.S. Pat. No. 9,149,524 SEQ ID NO: 18 | 26066 |
| | variable region, | | | |
| | CMV, a | | | |
| | combination of | | | |
| | the hCMV | | | |
| | proteins UL128, | | | |
| | UL130 and | | | |
| | UL131A | | | |
| HERP82 | Light chain | 5A2 | U.S. Pat. No. 9,149,524 SEQ ID NO: 40 | 26067 |
| | variable region, | | | |
| | CMV, a | | | |
| | combination of | | | |
| | the hCMV | | | |
| | proteins UL128, | | | |
| | UL130 and | | | |
| | UL131A | | | |
| HERP83 | Light chain | EV2038 | U.S. Pat. No. 8,492,529 SEQ ID NO. 12 | 26068 |
| | variable region, | | | |
| | CMV, AD1 | | | |
| | region of HCMV | | | |
| | glycoprotein gB | | | |
| HERP84 | Light chain | | US20150064174 SEQ ID 3 | 26069 |
| | variable region, | | | |
| | EBV | | | |
| HERP85 | Light chain | | US20150064174 SEQ ID 4 | 26070 |
| | variable region, | | | |
| | EBV | | | |
| HERP86 | Light chain | | Nejatollahi, F. and Bagheri, V., “Isolation of | 26071 |
| | variable region, | | neutralizing human specific single-chain | |
| | HSV | | antibodies against Herpes Simplex Virus type | |
| | | | 1 glycoprotein D”, unpublished”, NCBI | |
| | | | Accession # AGO59016 | |
| HERP87 | Light chain | E317 | U.S. Pat. No. 8,431,118 SEQ ID NO: 2; U.S. Pat. No. 8,252,906 | 26072 |
| | variable region, | | | |
| | HSV 1&2 | | | |
| HERP88 | Light chain | E425 | U.S. Pat. No. 8,431,118 SEQ ID NO: 4; U.S. Pat. No. 8,252,906 | 26073 |
| | variable region, | | | |
| | HSV 1&2 | | | |
| HERP89 | Light chain | Y571 | U.S. Pat. No. 8,431,118 SEQ ID NO: 42; U.S. Pat. No. 8,252,906 | 26074 |
| | variable region, | | | |
| | HSV 1&2 | | | |
| HERP90 | Light chain | | U.S. Pat. No. 5,506,132 SEQ ID NO: 2 | 26075 |
| | variable region, | | | |
| | VZV | | | |
| HERP91 | Light chain | DDF-VZV2 | US20100074906 SEQ ID NO: 24 | 26076 |
| | variable region, | | | |
| | VZV | | | |
| HERP92 | Light chain | EV2038 | U.S. Pat. No. 8,492,529 SEQ ID NO: 8 | 26077 |
| | without a signal | | | |
| | sequence, CMV, | | | |
| | AD1 region of | | | |
| | HCMV | | | |
| | glycoprotein gB | | | |
| HERP93 | Light chain, CMV | 8f9 | McLean, G. R. et al., Recognition of human | 26078 |
| | | | cytomegalovirus by human primary | |
| | | | immunoglobulins identifies an innate | |
| | | | foundation to an adaptive immune response, J. | |
| | | | Immunol. 174 (8), 4768-4778 (2005), NCBI | |
| | | | Accession # CAE54366.1 | |
| HERP94 | Light chain, CMV | Mab 109 | Simpson, J. A. et al., Neutralizing monoclonal | 26079 |
| | | | antibodies that distinguish three antigenic sites | |
| | | | on human cytomegalovirus glycoprotein H | |
| | | | have conformationally distinct binding sites, J. | |
| | | | Virol. 67 (1), 489-496 (1993), NCBI | |
| | | | Accession # AAB24501.1 (111 aa) | |
| HERP95 | Light chain, CMV | Mab 115 | Simpson, J. A. et al., Neutralizing monoclonal | 26080 |
| | | | antibodies that distinguish three antigenic sites | |
| | | | on human cytomegalovirus glycoprotein H | |
| | | | have conformationaly distinct binding sites, J. | |
| | | | Virol. 67 (1), 489-496 (1993), NCBI | |
| | | | Accession # AAB24500.1 (107 aa) | |
| HERP96 | Light chain, CMV | Mab 33 | Simpson, J. A. et al., Neutralizing monoclonal | 26081 |
| | | | antibodies that distinguish three antigenic sites | |
| | | | on human cytomegalovirus glycoprotein H | |
| | | | have conformationally distinct binding sites, J. | |
| | | | Virol. 67 (1), 489-496 (1993), NCBI | |
| | | | Accession # AAB24499.1 (107 aa) | |
| HERP97 | Light chain, CMV | Mab 5 | Simpson, J. A. et al., Neutralizing monoclonal | 26082 |
| | | | antibodies that distinguish three antigenic sites | |
| | | | on human cytomegalovirus glycoprotein H | |
| | | | have conformationally distinct binding sites, J. | |
| | | | Virol. 67 (1), 489-496 (1993), NCBI | |
| | | | Accession # AAB24498.1 (107 aa) | |
| HERP98 | Light chain, | 6G4 | WO2010007463 SEQ ID NO: 8 | 26083 |
| | CMV, a | | | |
| | combination of | | | |
| | the hCMV | | | |
| | proteins UL128, | | | |
| | UL130 and | | | |
| | UL131A | | | |
| HERP99 | Light chain, | | US20140093526 SEQ ID 10 | 26084 |
| | HHV-6 | | | |
| HERP100 | Light chain, HSV | 64-683 | U.S. Pat. No. 5,646,041 SEQ ID NO: 4; EP876478 | 26085 |
| | 1&2 | | | |
| HERP101 | Light chain, HSV | K003927 | US20140302062 SEQ ID NO: 10 | 26086 |
| | 1&2 | | | |
| HERP102 | Light chain, HSV | K003928 | US20140302062 SEQ ID NO: 11 | 26087 |
| | 1&2 | | | |
| HERP103 | Light chain, HSV | K003929 | US20140302062 SEQ ID NO: 12 | 26088 |
| | 1&2 | | | |
| HERP104 | Light chain, HSV | K003930 | US20140302062 SEQ ID NO: 13 | 26089 |
| | 1&2 | | | |
| HERP105 | Light chain, HSV | K003946 | US20140302062 SEQ ID NO: 14 | 26090 |
| | 1&2 | | | |
| HERP106 | Light chain, HSV | K003948 | US20140302062 SEQ ID NO: 15 | 26091 |
| | 1&2 | | | |
| HERP107 | Light chain, HSV | K003949 | US20140302062 SEQ ID NO: 16 | 26092 |
| | 1&2 | | | |
| HERP108 | Light chain, HSV | L001844 | US20140302062 SEQ ID NO: 17 | 26093 |
| | 1&2 | | | |
| HERP109 | Single chain Fv | | Lantto, J. et al., Non-germ-line encoded | 26094 |
| | antibody, | | residues are critical for effective antibody | |
| | glycoprotein B | | recognition of a poorly immunogenic | |
| | recombinant, | | neutralization epitope on glycoprotein B of | |
| | CMV | | human cytomegalovirus, Eur. J. Immunol. 32 | |
| | | | (6), 1659-1669 (2002), NCBI Accession # | |
| | | | AAM92769.1 (255 aa) | |

[0468] In some embodiments, the payload region of the viral particle comprises one or more nucleic acid sequences, fragment or variants thereof or encodes one or more polypeptides, fragments or variants thereof described in International Publication No. WO2010109874, and WO1997026329, the contents of each of which are herein incorporated by reference in their entirety, against HSV.

[0469] In some embodiments, the payload region of the viral particle comprises one or more nucleic acid sequences, fragment or variants thereof or encodes one or more polypeptides, fragments or variants thereof described in International Publication No. WO1995031546, the contents of which are herein incorporated by reference in their entirety, against VZV.

[0470] In some embodiments, the payload region of the viral particle comprises one or more nucleic acid sequences encoding one or more of the payload antibody polypeptides listed in Table 36 against Coronavirus (CORV1-CORV65; SEQ ID NO: 26095-26159).

TABLE 36
Antibodies against Coronaviruses

| Antibody | | Antibody | Reference | SEQ |
|---|---|---|---|---|
| No. | Description | Name | Information | ID NO |
| CORV1 | Heavy chain partial sequence, | | Liu, J., unpublished, NCBI | 26095 |
| | Human anti-SARS antibody, Ig | | Accession # BAE94186.1(228aa) | |
| CORV2 | Heavy chain partial sequence | H12 | AAX19356.1(127aa) | 26096 |
| | Human SARS neutralization | | | |
| | antibody, Ig | | | |
| CORV3 | Heavy chain variable partial | | Leung et at., PLoS Med. 3 (7), | 26097 |
| | sequence, Human neutralizing | | E237 (2006), NCBI Accession # | |
| | SARS antibody | | ABA54614.1(113aa) | |
| CORV4 | Heavy chain variable region, | M396 | Prabakaran et al., J. Biol. Chem. | 26098 |
| | Human anti-SARS antibody | | 281 (23), 15829-15836 (2006), | |
| | | | NCBI Accession # 2G75_D | |
| | | | (213aa) | |
| CORV5 | Heavy chain variable region, | | Prabakaran et al., J. Biol. Chem. | 26099 |
| | Human neutralizing SARS | | 281 (23), 15829-15836 (2006), | |
| | antibody | | NCBI Accession # 2DD8_L | |
| | | | (213aa) | |
| CORV6 | Heavy chain variable region, | | CN103864924 SEQ ID NO: 1 | 26100 |
| | Humanized neutralizing murine | | | |
| | monoclonal MERS | | | |
| CORV7 | Heavy chain variable region, | | CN104447986 SEQ ID NO: 1 | 26101 |
| | MERs | | | |
| CORV8 | Heavy chain variable region, | | U.S. Pat. No. 7,750,123 | 26102 |
| | Neutralizing antibody (binds to | | SEQ ID NO: 12; | |
| | the spike protein (5) of SARS- | | WO2005060520; CN1914226; | |
| | cov) | | US20050249739 | |
| CORV9 | Heavy chain variable region, | s110.4 | US20110159001 SEQ ID NO: 62; | 26103 |
| | SARS antibody | | WO2009128963; EP2242768; | |
| | | | CN102015767 | |
| CORV10 | Heavy chain variable region, | s124.5 | US20110159001 SEQ ID NO: 66; | 26104 |
| | SARS antibody | | WO2009128963; EP2242768; | |
| | | | CN102015767 | |
| CORV11 | Heavy chain variable region, | s215.17 | US20110159001 SEQ ID NO: 70; | 26105 |
| | SARS antibody | | WO2009128963; EP2242768; | |
| | | | CN102015767 | |
| CORV12 | Heavy chain variable region, | s218.9 | US20110159001 SEQ ID NO: 74; | 26106 |
| | SARS antibody | | WO2009128963; EP2242768; | |
| | | | CN102015767 | |
| CORV13 | Heavy chain variable region, | s223.4 | US20110159001 SEQ ID NO: 78; | 26107 |
| | SARS antibody | | WO2009128963; EP2242768; | |
| | | | CN102015767 | |
| CORV14 | Heavy chain variable region, | s225.12 | US20110159001 SEQ ID NO: 82; | 26108 |
| | SARS antibody | | WO2009128963; EP2242768; | |
| | | | CN102015767 | |
| CORV15 | Heavy chain variable region, | s231.19 | US20110159001 SEQ ID NO: 86; | 26109 |
| | SARS antibody | | WO2009128963; EP2242768; | |
| | | | CN102015767 | |
| CORV16 | Heavy chain variable region, | s230.14 + 15 | US20110159001 SEQ ID NO: 90; | 26110 |
| | SARS antibody | | WO2009128963; EP2242768; | |
| | | | CN102015767 | |
| CORV17 | Heavy chain variable region, | s227.14 | US20110159001 SEQ ID NO: 94; | 26111 |
| | SARS antibody | | WO2009128963; EP2242768; | |
| | | | CN102015767 | |
| CORV18 | Heavy chain variable region, | s109.8 | US20110159001 SEQ ID NO: 98; | 26112 |
| | SARS antibody | | WO2009128963; EP2242768; | |
| | | | CN102015767 | |
| CORV19 | Heavy chain variable region, | Fab58 | CN1513874 | 26113 |
| | SARS antibody | | | |
| CORV20 | Heavy chain variable region, | Fab59 | CN1513874 | 26114 |
| | SARS antibody | | | |
| CORV21 | Heavy chain variable region, | 3C7 | U.S. Pat. No. 7,728,110 SEQ | 26115 |
| | SARS human monoclonal | | ID NO: 60; WO2008060331; | |
| | antibody | | EP2035454A2, US20080248043 | |
| CORV22 | Heavy chain variable region, | F26G18 | U.S. Pat. No. 7,622,112 SEQ | 26116 |
| | SARS human monoclonal | | ID NO: 5; WO2005054469; | |
| | antibody | | US20080248043; US20080081047 | |
| CORV23 | Heavy chain variable region A, | | WO2006095180 SEQ ID NO: 24 | 26117 |
| | humanized antibody binding to | | | |
| | S2 domain of SARS | | | |
| CORV24 | Heavy chain Humanized | | CN103864924 SEQ ID NO: 3 | 26118 |
| | neutralizing murine monoclonal | | | |
| | MERS | | | |
| CORV25 | Heavy chain, MERS | m336 | WO2015057942 SEQ ID NO: 1 | 26119 |
| CORV26 | Heavy chain, MERS | m337 | WO2015057942 SEQ ID NO: 9 | 26120 |
| CORV27 | Heavy chain, MERS | m338 | WO2015057942 SEQ ID NO: 16 | 26121 |
| CORV28 | Heavy chain, MERS | 2e 6 | CN104447986 SEQ ID NO: 3 | 26122 |
| CORV29 | Heavy chain, MERS | M336 | Ying et al., Nat Commun 6, 8223 | 26123 |
| | | | (2015), NCBI Accession # | |
| | | | 4XAK_H(252aa) | |
| CORV30 | Human anti-SARS antibody | | Leung et al., PLoS Med. 3 (7), | 26124 |
| | | | E237 (2006), NCBI Accession # | |
| | | | ABA54613.1(117aa) | |
| CORV31 | Human monoclonal MERS | Mers-27 | CN104628848 SEQ ID NO: 1 | 26125 |
| CORV32 | Human monoclonal MERS | Mers-27 | CN104628848 SEQ ID NO. 3 | 26126 |
| CORV33 | Human monoclonal MERS | Mers-4 | CN104628849 SEQ ID NO: 1 | 26127 |
| CORV34 | Human monoclonal MERS | Mers-4 | CN104628849 SEQ ID NO: 3 | 26128 |
| CORV35 | Kappa light chain partial | H12 | AX19355.1(108aa) | 26129 |
| | sequence, human SARS | | | |
| | neutralization antibody, Ig | | | |
| CORV36 | Light chain partial sequence, | | Liu, J., unpublished, NCBI | 26130 |
| | Human anti-SARS antibody, Ig | | Accession # BAE94187.1(219aa) | |
| CORV37 | Light chain variable domain, | | CN104447986 SEQ ID NO: 2 | 26131 |
| | MERS | | | |
| CORV38 | Light chain variable partial | 80R | Hwang et al., J. Biol. Chem. 281 | 26132 |
| | sequence, Human neutralizing | | (45), 34610-34616 (2006), NCBI | |
| | SARS antibody | | Accession # 2GHW_D (247aa) | |
| CORV39 | Light chain variable region, A | | WO2006095180 SEQ ID NO: 25 | 26133 |
| | humanized antibody binding to | | | |
| | S2 domain of SARS | | | |
| CORV40 | Light chain variable region, | M396 | Prabakaran et al., J. Biol. Chem. | 26134 |
| | human anti-SARS antibody | | 281 (23), 15829-15836 (2006), | |
| | | | NCBI Accession # 2G75_C | |
| | | | (245aa) | |
| CORV41 | Light chain variable region, | | Prabakaran et al., J. Biol. Chem. | 26135 |
| | Human neutralizing SARS | | 281 (23), 15829-15836 (2006), | |
| | antibody | | NCBI Accession # | |
| | | | 2DD8_H(245aa) | |
| CORV42 | Light chain variable region, | | CN103864924 SEQ ID NO: 2 | 26136 |
| | Humanized neutralizing murine | | | |
| | monoclonal MERS | | | |
| CORV43 | Light chain variable region, | | U.S. Pat. No. 7,750,123 SEQ | 26137 |
| | neutralizing antibody (binds to | | ID NO: 20; WO2005060520; | |
| | the spike protein (S) of SARS- | | CN1914226; US20050249739 | |
| | cov) | | | |
| CORV44 | Light chain variable region, | s110.4 | US20110159001 SEQ ID NO: 64; | 26138 |
| | SARS antibody | | WO2009128963; EP2242768; | |
| | | | CN102015767 | |
| CORV45 | Light chain variable region, | s124.5 | US20110159001 SEQ ID NO: 68; | 26139 |
| | SARS antibody | | WO2009128963; EP2242768; | |
| | | | CN102015767 | |
| CORV46 | Light chain variable region, | s215.17 | US20110159001 SEQ ID NO: 72; | 26140 |
| | SARS antibody | | WO2009128963; EP2242768; | |
| | | | CN102015767 | |
| CORV47 | Light chain variable region, | s218.9 | US20110159001 SEQ ID NO: 76; | 26141 |
| | SARS antibody | | WO2009128963; EP2242768; | |
| | | | CN102015767 | |
| CORV48 | Light chain variable region, | s223.4 | US20110159001 SEQ ID NO: 80; | 26142 |
| | SARS antibody | | WO2009128963; EP2242768; | |
| | | | CN102015767 | |
| CORV49 | Light chain variable region, | s225.12 | US20110159001 SEQ ID NO: 84; | 26143 |
| | SARS antibody | | WO2009128963; EP2242768; | |
| | | | CN102015767 | |
| CORV50 | Light chain variable region, | s231.19 | US20110159001 SEQ ID NO: 88; | 26144 |
| | SARS antibody | | WO2009128963; EP2242768; | |
| | | | CN102015767 | |
| CORV51 | Light chain variable region, | s230.14 + 15 | US20110159001 SEQ ID NO: 92; | 26145 |
| | SARS antibody | | WO2009128963; EP2242768; | |
| | | | CN102015767 | |
| CORV52 | Light chain variable region, | s227.14 | US20110159001 SEQ ID NO: 96; | 26146 |
| | SARS antibody | | WO2009128963; EP2242768; | |
| | | | CN102015767 | |
| CORV53 | Light chain variable region, | s109.8 | US20110159001 SEQ ID NO: 101; | 26147 |
| | SARS antibody | | WO2009128963; EP2242768; | |
| | | | CN102015767 | |
| CORV54 | Light chain variable region, | Fab58 | CN1513874 | 26148 |
| | SARS antibody | | | |
| CORV55 | Light chain variable region, | Fab59 | CN1513874 | 26149 |
| | SARS antibody | | | |
| CORN56 | Light chain variable region, | 3C7 | U.S. Pat. No. 7,728,110 SEQ | 26150 |
| | SARS human monoclonal | | ID NO: 58; WO2008060331; | |
| | antibody | | EP2035454A2, US20080248043 | |
| CORV57 | Light chain variable region, | F26G18 | U.S. Pat. No. 7,622,112 SEQ | 26151 |
| | SARS human monoclonal | | ID NO: 14; WO2005054469; | |
| | antibody | | US20080248043; US20080081047 | |
| CORV58 | Light chain, Humanized | | CN103864924 SEQ ID NO: 4 | 26152 |
| | neutralizing murine monoclonal | | | |
| | MERS | | | |
| CORV59 | Light chain, MERS | m336 | WO2015057942 SEQ ID NO: 2 | 26153 |
| CORV60 | Light chain, MERS | m337 | WO2015057942 SEQ ID NO: 10 | 26154 |
| CORV61 | Light chain, MERS | m338 | WO2015057942 SEQ ID NO: 17 | 26155 |
| CORV62 | Light chain, MERS | 2E 6 | CN104447986 SEQ ID NO: 4 | 26156 |
| CORV63 | Light chain, MERS | M336 | Ying et al., Nat Commun 6, 8223 | 26157 |
| | | | (2015), NCBI Accession # | |
| | | | 4XAK_L (214aa) | |
| CORV64 | Variable heavy chain-constant | 4C2Fab | CN103864924 SEQ ID NO: 7 | 26158 |
| | heavy chain 1, Humanized | | | |
| | neutralizing murine monoclonal | | | |
| | MERS | | | |
| CORV65 | Variable light chain-constant | 4C2Fab | CN103864924 SEQ ID NO: 9 | 26159 |
| | light chain 1, Humanized | | | |
| | neutralizing murine monoclonal | | | |
| | MERS | | | |

[0471] In some embodiments, the payload region of the viral particle comprises one or more nucleic acid sequences, fragments or variants thereof or encodes one or more polypeptides, fragments or variants thereof described in U.S. Pat. No. 7,629,443, US Publication No. US20080254440, Chinese Publication No. CN103613666, CN1570638, CN101522208, CN1673231, CN1590409, CN1557838, and CN1488645, the contents of each of which are herein incorporated by reference in their entirety, against SARS.

[0472] In some embodiments, the payload region of the viral particle comprises one or more nucleic acid sequences encoding one or more of the payload antibody polypeptides listed in Table 37 against John Cunningham Vitus (JCV1-JCA168; SEQ ID NO: 26160-26223).

TABLE 37
Antibodies against John Cunningham Virus

| Antibody | | Antibody | Reference | SEQ ID |
|---|---|---|---|---|
| No. | Description | Name | Information | NO |
| JCV1 | Heavy chain | 14G8 | US20150056188 SEQ ID NO: 1 | 26160 |
| JCV2 | Heavy chain | 16H5 | US20150056188 SEQ ID NO: 5 | 26161 |
| JCV3 | Heavy chain | 18C9 | US20150056188 SEQ ID NO: 9 | 26162 |
| JCV4 | Heavy chain | 34C6 | US20150056188 SEQ ID NO: 13 | 26163 |
| JCV5 | Heavy chain | 18C9 N55S | US20150056188 SEQ ID NO: 16 | 26164 |
| JCV6 | Heavy chain | 18C9 N55Q | US20150056188 SEQ ID NO: 18 | 26165 |
| JCV7 | Heavy chain | 18C9 N55D | US20150056188 SEQ ID NO: 20 | 26166 |
| JCV8 | Heavy chain | 18C9 N55H | US20150056188 SEQ ID NO: 22 | 26167 |
| JCV9 | Heavy chain | 18C9 N55T | US20150056188 SEQ ID NO: 24 | 26168 |
| JCV10 | Heavy chain | 18C9 N55A | US20150056188 SEQ ID NO: 26 | 26169 |
| JCV11 | Heavy chain | 18C9 N55L | US20150056188 SEQ ID NO: 28 | 26170 |
| JCV12 | Heavy chain | 18C9 N55X | US20150056188 SEQ ID NO: 30 | 26171 |
| JCV13 | Heavy chain | 18C9 G56A | US20150056188 SEQ ID NO: 32 | 26172 |
| JCV14 | Heavy chain | 18C9 G56V | US20150056188 SEQ ID NO: 34 | 26173 |
| JCV15 | Heavy chain | 18C9 G56P | US20150056188 SEQ ID NO: 36 | 26174 |
| JCV16 | Heavy chain | 18C9 G56X | US20150056188 SEQ ID NO: 38 | 26175 |
| JCV17 | Heavy chain | 399-h (C35A | US20150050271 SEQ ID NO: 20 | 26176 |
| | | V50A) | | |
| JCV18 | Heavy chain | Antibody from | US20150050271 SEQ ID NO: 66 | 26177 |
| | | US20150050271 | | |
| JCV19 | Heavy chain | H0 | US20150050271 SEQ ID NO: 51 | 26178 |
| JCV20 | Heavy chain | H1 | US20150050271 SEQ ID NO: 52 | 26179 |
| JCV21 | Heavy chain | H3 | US20150050271 SEQ ID NO: 54 | 26180 |
| JCV22 | Heavy chain | H4 | US20150050271 SEQ ID NO: 55 | 26181 |
| JCV23 | Heavy chain | H5 | US20150050271 SEQ ID NO: 56 | 26182 |
| JCV24 | Heavy chain | H6 | US20150050271 SEQ ID NO: 57 | 26183 |
| JCV25 | Heavy chain | H7 | US20150050271 SEQ ID NO: 58 | 26184 |
| JCV26 | Heavy chain | H8 | US20150050271 SEQ ID NO: 59 | 26185 |
| JCV27 | Heavy chain | H9 | US20150050271 SEQ ID NO: 60 | 26186 |
| JCV28 | Heavy chain | L0 | US20150050271 SEQ ID NO: 48 | 26187 |
| JCV29 | Heavy chain | jcv411_vh | US20150050271 SEQ ID NO: 43 | 26188 |
| JCV30 | Heavy chain | IGHV3-30-3x01 | US20150050271 SEQ ID NO: 44 | 26189 |
| JCV31 | Heavy chain | H0 | US20150050271 SEQ ID NO: 19 | 26190 |
| JCV32 | Heavy chain | H0 V50G | US20150050271 SEQ ID NO: 21 | 26191 |
| JCV33 | Heavy chain | H1 | US20150050271 SEQ ID NO: 22 | 26192 |
| JCV34 | Heavy chain | H2 | US20150050271 SEQ ID NO: 23 | 26193 |
| JCV35 | Heavy chain | H3 | US20150050271 SEQ ID NO: 24 | 26194 |
| JCV36 | Heavy chain | H4 | US20150050271 SEQ ID NO: 25 | 26195 |
| JCV37 | Heavy chain | H5 | US20150050271 SEQ ID NO: 26 | 26196 |
| JCV38 | Heavy chain | H6 | US20150050271 SEQ ID NO: 27 | 26197 |
| JCV39 | Heavy chain | H7 | US20150050271 SEQ ID NO: 28 | 26198 |
| JCV40 | Heavy chain | H8 | US20150050271 SEQ ID NO: 29 | 26199 |
| JCV41 | Heavy chain | H9 | US20150050271 SEQ ID NO: 30 | 26200 |
| JCV42 | Heavy chain | GRE1 | US20150191530 SEQ ID NO: 1 | 26201 |
| | variable region | | | |
| JCV43 | Heavy chain | R399 | US20150050271 SEQ ID NO: 6 | 26202 |
| | variable region | | | |
| JCV44 | Light chain | 14G8 | US20150056188 SEQ ID NO: 3 | 26203 |
| JCV45 | Light chain | 16H5 | US20150056188 SEQ ID NO: 7 | 26204 |
| JCV46 | Light chain | 18C9 | US20150056188 SEQ ID NO: 11 | 26205 |
| JCV47 | Light chain | 34C6 | US20150056188 SEQ ID NO: 14 | 26206 |
| JCV48 | Light chain | 18C9 C96L | US20150056188 SEQ ID NO: 40 | 26207 |
| JCV49 | Light chain | 18C9 C96S | US20150056188 SEQ ID NO: 42 | 26208 |
| JCV50 | Light chain | 18C9 C96A | US20150056188 SEQ ID NO: 44 | 26209 |
| JCV51 | Light chain | 18C9 C96X | US20150056188 SEQ ID NO: 46 | 26210 |
| JCV52 | Light chain | 399-1 (N31G), L | US20150050271 SEQ ID NO: 15 | 26211 |
| JCV53 | Light chain | Antibody from | US20150050271 SEQ ID NO: 67 | 26212 |
| | | US20150050271 | | |
| JCV54 | Light chain | H2 | US20150050271 SEQ ID NO: 53 | 26213 |
| JCV55 | Light chain | L1 | US20150050271 SEQ ID NO: 49 | 26214 |
| JCV56 | Light chain | L2 | US20150050271 SEQ ID NO: 50 | 26215 |
| JCV57 | Light chain | IGKV1D-13x01 | US20150050271 SEQ ID NO: 39 | 26216 |
| JCV58 | Light chain | L0 | US20150050271 SEQ ID NO: 11 | 26217 |
| JCV59 | Light chain | L1 | US20150050271 SEQ ID NO: 12 | 26218 |
| JCV60 | Light chain | L2 | US20150050271 SEQ ID NO: 13 | 26219 |
| JCV61 | Light chain | L2 N31A | US20150050271 SEQ ID NO: 14 | 26220 |
| JCV62 | Light chain | GRE1 | US20150191530 SEQ ID NO: 2 | 26221 |
| | variable region | | | |
| JCV63 | Light chain | R399 | US20150050271 SEQ ID NO: 1 | 26222 |
| | variable region | | | |
| JCV64 | Light chain | R411, jcv411_vh | US20150050271 SEQ ID NO: 38 | 26223 |
| | variable region | | | |

[0473] In some embodiments, the payload region of the viral particle comprises one or more nucleic acid sequences encoding one or more of the payload antibody polypeptides listed in Table 38 against Poxvirus (POXV1-POXV10; SEQ ID NO: 26224-26233).

TABLE 38
Antibodies against Poxvirus

| Antibody | | Antibody | Reference | SEQ ID |
|---|---|---|---|---|
| No. | Description | Name | Information | NO |
| POXV1 | Heavy chain | B5R | U.S. Pat. No. | 26224 |
| | variable region, | binding | 8,623,370 | |
| | B5R envelope | antibody | SEQ ID NO: 2 | |
| | protein | | | |
| POXV2 | Heavy chain | B5R | U.S. Pat. No. | 26225 |
| | variable region, | binding | 8,623,370 | |
| | B5R envelope | antibody | SEQ ID NO: 6 | |
| | protein | | | |
| POXV3 | Heavy chain | B5R | U.S. Pat. No. | 26226 |
| | variable region, | binding | 8,623,370 | |
| | B5R envelope | antibody | SEQ ID NO: 10 | |
| | protein | | | |
| POXV4 | Heavy chain | B5R | U.S. Pat. No. | 26227 |
| | variable region, | binding | 8,623,370 | |
| | B5R envelope | antibody | SEQ ID NO: 14 | |
| | protein | | | |
| POXV5 | Heavy chain, | H3L | US20140186370 | 26228 |
| | H3L envelope | binding | SEQ ID NO: 14 | |
| | protein | antibody | | |
| POXV6 | Light chain | B5R | U.S. Pat. No. | 26229 |
| | variable region, | binding | 8,623,370 | |
| | B5R envelope | antibody | SEQ ID NO: 4 | |
| | protein | | | |
| POXV7 | Light chain | B5R | U.S. Pat. No. | 26230 |
| | variable region, | binding | 8,623,370 | |
| | B5R envelope | antibody | SEQ ID NO: 8 | |
| | protein | | | |
| POXV8 | Light chain | B5R | U.S. Pat. No. | 26231 |
| | variable region, | binding | 8,623,370 | |
| | B5R envelope | antibody | SEQ ID NO: 12 | |
| | protein | | | |
| POXV9 | Light chain | B5R | U.S. Pat. No. | 26232 |
| | variable region, | binding | 8,623,370 | |
| | B5R envelope | antibody | SEQ ID NO: 16 | |
| | protein | | | |
| POXV10 | Light chain | H3L | US20140186370 | 26233 |
| | H3L envelope | binding | SEQ ID NO: 16 | |
| | protein | antibody | | |

[0474] In some embodiments, the payload region of the viral particle comprises one or more nucleic acid sequences encoding one or more of the payload antibody polypeptides listed in Table 39 against Enterovirus 71 (ENTV1-ENTV16; SEQ ID NO: 26234-26249).

TABLE 39
Antibodies against Enterovirus 71

| Antibody | | Antibody | Reference | SEQ ID |
|---|---|---|---|---|
| No. | Description | Name | Information | NO |
| ENTV1 | Heavy chain | | CN102718864A | 26234 |
| | variable region | | SEQ ID NO: 2 | |
| ENTV2 | Heavy chain | E18 | WO2015092668 | 26235 |
| | variable region | | SEQ ID NO: 1 | |
| ENTV3 | Heavy chain | E19 | WO2015092668 | 26236 |
| | variable region | | SEQ ID NO: 3 | |
| ENTV4 | Heavy chain | E20 | WO2015092668 | 26237 |
| | variable region | | SEQ ID NO: 5 | |
| ENTV5 | Heavy chain | E19 humanized | WO2015092668 | 26238 |
| | variable region | VH1 | SEQ ID NO: 19 | |
| ENTV6 | Heavy chain | E19 humanized | WO2015092668 | 26239 |
| | variable region | VH2 | SEQ ID NO: 20 | |
| ENTV7 | Heavy chain | E19 humanized | WO2015092668 | 26240 |
| | variable region | VH3 | SEQ ID NO: 21 | |
| ENTV8 | Heavy chain | E19 humanized | WO2015092668 | 26241 |
| | variable region | VH4 | SEQ ID NO: 22 | |
| ENTV9 | Light chain | | CN102718864A | 26242 |
| | variable region | | SEQ ID NO: 1 | |
| ENTV10 | Light chain | E18 | WO2015092668 | 26243 |
| | variable region | | SEQ ID NO: 2 | |
| ENTV11 | Light chain | E19 | WO2015092668 | 26244 |
| | variable region | | SEQ ID NO: 4 | |
| ENTV12 | Light chain | E20 | WO2015092668 | 26245 |
| | variable region | | SEQ ID NO: 6 | |
| ENTV13 | Light chain | E18 VL2 | WO2015092668 | 26246 |
| | variable region | | SEQ ID NO: 15 | |
| ENTV14 | Light chain | E19 humanized | WO2015092668 | 26247 |
| | variable region | VL1 | SEQ ID NO: 16 | |
| ENTV15 | Light chain | E19 humanized | WO2015092668 | 26248 |
| | variable region | VL2 | SEQ ID NO: 17 | |
| ENTV16 | Light chain | E19 humanized | WO2015092668 | 26249 |
| | variable region | VL3 | SEQ ID NO: 18 | |

[0475] In some embodiments, the payload region of the viral particle comprises one or more nucleic acid sequences, fragments or variants thereof or encodes one or more polypeptides, fragments or variants thereof described in Chinese Publication No, CN104357400, the contents of which are herein incorporated by reference in their entirety, against EV71.

[0476] In some embodiments, the payload region of the viral particle comprises one or more nucleic acid sequences, fragments or variants encoding MAB979, fragments or variants thereof for treating a disease and/or disorder or preventing a disease and/or disorder. As a non-limiting example, the disease and/or disorder is EV71.

[0477] In some embodiments, the payload region of the viral particle comprises one or more nucleic acid sequences encoding one or more of the payload antibody polypeptides listed in Table 40 against Rubella Virus (RUBV1-RUBV4; SEQ ID NO: 26250-26253).

TABLE 40
Antibodies against Rubella Virus

| Antibody | | Antibody | Reference | SEQ ID |
|---|---|---|---|---|
| No. | Description | Name | Information | NO |
| RUBV1 | Heavy chain | DDF-RuV1 | US20100143376 | 26250 |
| | variable region | | SEQ ID NO: 2 | |
| RUBV2 | Heavy chain | DDF-RuV2 | US20100143376 | 26251 |
| | variable region | | SEQ ID NO: 9 | |
| RUBV3 | Light chain | DDF-RuV1 | US20100143376 | 26252 |
| | variable region | | SEQ ID NO: 7 | |
| RUBV4 | Light chain | DDF-RuV2 | US20100143376 | 26253 |
| | variable region | | SEQ ID NO: 14 | |

[0478] In some embodiments, the payload region of the viral particle comprises one or more nucleic acid sequences encoding one or more of the payload antibody polypeptides listed in Table 41 against Human Papilloma Virus (HPV1-HPV2; SEQ ID NO: 6896-6897).

TABLE 41
Antibodies against Human Papilloma Virus

| Antibody | | Reference | SEQ ID |
|---|---|---|---|
| No. | Description | Information | NO |
| HPV1 | Heavy chain | WO2015096269 | 26254 |
| | variable region | SEQ ID NO: 1 | |
| HPV2 | Light chain | WO2015096269 | 26255 |
| | variable region | SEQ ID NO: 2 | |

[0479] In some embodiments, the payload region of the viral particle comprises one or more nucleic acid sequences, fragments or variants thereof or encodes one or more polypeptides, fragments or variants thereof described in US Publication No. US20130337438, the contents of which are herein incorporated by reference in their entirety, against HPV.

[0480] In some embodiments, the payload region of the viral particle comprises one or more nucleic acid sequences encoding one or more of the broadly neutralizing payload antibody polypeptides listed in Table 42 against viruses (VIR1-VIR14; SEQ ID NO: 26256-26269).

TABLE 42
Broadly Neutralizing Antibodies for Viruses

| Antibody | | Antibody | Reference | SEQ ID |
|---|---|---|---|---|
| No. | Description | Name | Information | NO |
| VIR1 | Heavy chain variable region, hepatitis, influenza, | 3G4 | U.S. Pat. No. | 26256 |
| | HIV, herpes, paramyxovirus, poxvirus, | | 7,611,704 | |
| | rhabdovirus or arenavirus | | SEQ ID NO: 2 | |
| VIR2 | Heavy chain variable region, hepatitis, influenza, | 3G4 | U.S. Pat. No. | 26257 |
| | HIV, herpes, paramyxovirus, poxvirus, | | 7,611,704 | |
| | rhabdovirus or arenavirus | | SEQ ID NO: 4 | |
| VIR3 | Heavy chain variable region, HIV, herpes, | 679 | U.S. Pat. No. | 26258 |
| | cytomegalovirus, rabies, influenza, hepatitis B, | | 7,429,381 | |
| | Sendai, feline leukemia, Reo, polio, human serum | | SEQ ID NO: 4 | |
| | parvo-like, simian 40, respiratory syncytial, | | | |
| | mouse mammary tumor, Varicella-Zoster, light | | | |
| | chain variable region, Dengue, rubella, measles, | | | |
| | adenovirus, human T-cell leukemias, Epstein- | | | |
| | Barr, murine leukemia, mumps, vesicular | | | |
| | stomatitis, Sindbis, lymphocytic | | | |
| | choriomeningitis, wart and blue tongue | | | |
| VIR4 | Heavy chain variable region, HIV, herpes, | Mu-9V | U.S. Pat. No. | 26259 |
| | cytomegalovirus, rabies, influenza, hepatitis B, | | 7,429,381 | |
| | Sendai, feline leukemia, Reo, polio, human serum | | SEQ ID NO: 10 | |
| | parvo-like, simian 40, respiratory syncytial, | | | |
| | mouse mammary tumor, Varicella-Zoster, | | | |
| | Dengue, rubella, measles, adenovirus, human T- | | | |
| | cell leukemias, Epstein-Barr, murine leukemia, | | | |
| | mumps, vesicular stomatitis, Sindbis, | | | |
| | lymphocytic choriomeningitis, wart and blue | | | |
| | tongue, light chain variable region | | | |
| VIR5 | Heavy chain variable region, HIV, herpes, | humanized | U.S. Pat. No. | 26260 |
| | cytomegalovirus, rabies, influenza, hepatitis B, | Mu-9 | 7,429,381 | |
| | Sendai, feline leukemia, Reo, polio, human serum | | SEQ ID NO: 14 | |
| | parvo-like, simian 40, respiratory syncytial, | | | |
| | mouse mammary tumor, Varicella-Zoster, | | | |
| | Dengue, rubella, measles, adenovirus, human T- | | | |
| | cell leukemias, Epstein-Barr, murine leukemia, | | | |
| | mumps, vesicular stomatitis, Sindbis, | | | |
| | lymphocytic choriomeningitis, wart and blue | | | |
| | tongue, light chain variable region | | | |
| VIR6 | Heavy chain variable region, Human | Fab-2 | US20120269801 | 26261 |
| | cytomegalovirus, HCMV, human T-cell leukemia | Clone3 | SEQ ID NO: 6 | |
| | virus type 1, HIV-1, simian immunodeficiency | | | |
| | virus, Ebola virus, Herpesvirus saimiri virus, | | | |
| | influenza virus, and vaccinia virus | | | |
| VIR7 | Heavy chain variable region, Human | Fab-3 | US20120269801 | 26262 |
| | cytomegalovirus, HCMV, human T-cell leukemia | Clone 7 | SEQ ID NO: 10 | |
| | virus type 1, HIV-1, simian immunodeficiency | | | |
| | virus, Ebola virus, Herpesvirus saimiri virus, | | | |
| | influenza virus, and vaccinia virus | | | |
| VIR8 | Light chain variable region, HIV, herpes, | Mu-9V | U.S. Pat. No. | 26263 |
| | cytomegalovirus, rabies, influenza, hepatitis B, | | 7,429,381 | |
| | Sendai, feline leukemia, Reo, polio, human serum | | SEQ ID NO: 8 | |
| | parvo-like, simian 40, respiratory syncytial, | | | |
| | mouse mammary tumor, Varicella-Zoster, | | | |
| | Dengue, rubella, measles, adenovirus, human T- | | | |
| | cell leukemias, Epstein-Barr, murine leukemia, | | | |
| | mumps, vesicular stomatitis, Sindbis, | | | |
| | lymphocytic choriomeningitis, wart and blue | | | |
| | tongue, light chain variable region | | | |
| VIR9 | Light chain variable region, HIV, herpes, | humanized | U.S. Pat. No. | 26264 |
| | cytomegalovirus, rabies, influenza, hepatitis B, | Mu-9 | 7,429,381 | |
| | Sendai, feline leukemia, Reo, polio, human serum | | SEQ ID NO: 12 | |
| | parvo-like, simian 40, respiratory syncytial, | | | |
| | mouse mammary tumor, Varicella-Zoster, | | | |
| | Dengue, rubella, measles, adenovirus, human T- | | | |
| | cell leukemias, Epstein-Barr, murine leukemia, | | | |
| | mumps, vesicular stomatitis, Sindbis, | | | |
| | lymphocytic choriomeningitis, wart and blue | | | |
| | tongue, light chain variable region | | | |
| VIR10 | Light chain variable region, HIV, herpes, | 679 | U.S. Pat. No. | 26265 |
| | cytomegalovirus, rabies, influenza, hepatitis B, | | 7,429,381 | |
| | Sendai, feline leukemia, Reo, polio, human serum | | SEQ ID NO: 2 | |
| | parvo-like, simian 40, respiratory syncytial, | | | |
| | mouse mammary tumor, Varicella-Zoster, | | | |
| | Dengue, rubella, measles, adenovirus, human T- | | | |
| | cell leukemias, Epstein-Barr, murine leukemia, | | | |
| | mumps, vesicular stomatitis, Sindbis, | | | |
| | lymphocytic choriomeningitis, wart and blue | | | |
| | tongue | | | |
| VIR11 | Light chain variable region, Human | Fab-3 | US20120269801 | 26266 |
| | cytomegalovirus, HCMV, human T-cell leukemia | Clone 7 | SEQ ID NO: 8 | |
| | virus type 1, HIV-1, simian immunodeficiency | | | |
| | virus, Ebola virus, Herpesvirus saimiri virus, | | | |
| | influenza virus, and vaccinia virus | | | |
| VIR12 | Light chain variable, Human cytomegalovirus, | Fab-2 | US20120269801 | 26267 |
| | HCMV, human T-cell leukemia virus type 1, | Clone3 | SEQ ID NO: 4 | |
| | HIV-1, simian immunodeficiency virus, Ebola | | | |
| | virus, Herpesvirus saimiri virus, influenza virus, | | | |
| | and vaccinia virus, region | | | |
| VIR13 | ScFv, hepatitis, influenza, HIV, herpes, | 3A2 | U.S. Pat. No. | 26268 |
| | paramyxovirus, poxvirus, rhabdovirus or | | 7,611,704 | |
| | arenavirus | | SEQ ID NO: 6 | |
| VIR14 | ScFv, HIV, herpes, cytomegalovirus, rabies, | 679 | U.S. Pat. No. | 26269 |
| | influenza, hepatitis B, Sendai, feline leukemia, | | 7,429,381 | |
| | Reo, polio, human serum parvo-like, simian 40, | | SEQ ID NO: 6 | |
| | respiratory syncytial, mouse mammary tumor, | | | |
| | Varicella-Zoster, Dengue, rubella, measles, | | | |
| | adenovirus, human T-cell leukemias, Epstein- | | | |
| | Barr, murine leukemia, mumps, vesicular | | | |
| | stomatitis, Sindbis, lymphocytic | | | |
| | choriomeningitis, wart and blue tongue | | | |

[0481] In some embodiments, the payload region of the viral particle comprises one or more nucleic acid sequences encoding one or more of the payload antibody polypeptides listed in Table 43 against Pseudomonas Aeruginosa (PSEU1-PSEU285; SEQ ID NO: 26270-26554).

TABLE 43
Antibodies against Pseudomonas Aeruginosa

| Antibody | | Antibody | Reference | SEQ |
|---|---|---|---|---|
| No. | Description | Name | Information | ID NO |
| PSEU1 | Bivalent nanobody | 260 (1E11-40GS-2B10) | US20150044215 SEQ ID NO: 118 | 26270 |
| PSEU2 | Bivalent nanobody | 272 (11B09-40GS-10C05) | US20150044215 SEQ ID NO: 119 | 26271 |
| PSEU3 | Bivalent nanobody | 308 (6B05-40GS-1E11) | US20150044215 SEQ ID NO: 120 | 26272 |
| PSEU4 | Bivalent nanobody | 264 (1E11-40GS-2B02) | US20150044215 SEQ ID NO: 121 | 26273 |
| PSEU5 | Bivalent nanobody | 302 (5H01-40GS-7C10) | US20150044215 SEQ ID NO: 122 | 26274 |
| PSEU6 | Bivalent nanobody | 234 (7C10-40GS-5H01) | US20150044215 SEQ ID NO: 123 | 26275 |
| PSEU7 | Bivalent nanobody | 064 (13F07-40GS-7C10) | US20150044215 SEQ ID NO: 124 | 26276 |
| PSEU8 | Bivalent nanobody | 275 (2G09-40GC-5H10) | US20150044215 SEQ ID NO: 125 | 26277 |
| PSEU9 | Bivalent nanobody | 083 (7C10-40GS-11B09) | US20150044215 SEQ ID NO: 126 | 26278 |
| PSEU10 | Bivalent nanobody | 087 (1E11-40GS-7C10) | US20150044215 SEQ ID NO: 127 | 26279 |
| PSEU11 | Bivalent nanobody | 269 (6B05-40GS-13F07) | US20150044215 SEQ ID NO: 128 | 26280 |
| PSEU12 | Bivalent nanobody | 256 (13F07-40GS-5H01) | US20150044215 SEQ ID NO: 129 | 26281 |
| PSEU13 | Bivalent nanobody | 277 (5H01-40GS-11B09) | US20150044215 SEQ ID NO: 130 | 26282 |
| PSEU14 | Bivalent nanobody | 257 (13F07-40GS-2B10) | US20150044215 SEQ ID NO: 131 | 26283 |
| PSEU15 | Bivalent nanobody | 285 (13F07-40GS-2B02) | US20150044215 SEQ ID NO: 132 | 26284 |
| PSEU16 | Bivalent nanobody | 115 (11B09-40GS-13F07) | US20150044215 SEQ ID NO: 133 | 26285 |
| PSEU17 | Bivalent nanobody | 258 (13F07-40GS-14E10) | US20150044215 SEQ ID NO: 134 | 26286 |
| PSEU18 | Bivalent nanobody | 283 (7E09-40G5-6B05) | US20150044215 SEQ ID NO: 135 | 26287 |
| PSEU19 | Bivalent nanobody | 271 (7C10-40GS-14E10) | US20150044215 SEQ ID NO: 136 | 26288 |
| PSEU20 | Bivalent nanobody | 259 (1E11-40GS-5H01) | US20150044215 SEQ ID NO: 137 | 26289 |
| PSEU21 | Bivalent nanobody | 319 (13F07-40GS-6B05) | US20150044215 SEQ ID NO: 138 | 26290 |
| PSEU22 | Bivalent nanobody | 335 (5H01-40G5-1E11) | US20150044215 SEQ ID NO: 139 | 26291 |
| PSEU23 | Bivalent nanobody | 261 (5H01-40GS-2B10) | US20150044215 SEQ ID NO: 140 | 26292 |
| PSEU24 | Bivalent nanobody | 262 (7E09-40GS-7C10) | US20150044215 SEQ ID NO: 141 | 26293 |
| PSEU25 | Constant heavy chain | | US20150044215 SEQ ID NO: 148 | 26294 |
| PSEU26 | Constant light chain | | US20150044215 SEQ ID NO: 149 | 26295 |
| PSEU27 | Heavy chain | Panobacumab | U.S. Pat. No. 8,197,816 SEQ ID NO: 8 | 26296 |
| PSEU28 | Heavy chain | | US20130156696 SEQ ID NO: 2 | 26297 |
| PSEU29 | Heavy chain | | U.S. Pat. No. 7,494,653 SEQ ID NO: 2 | 26298 |
| PSEU30 | Heavy chain | KB0001 | U.S. Pat. No. 8,044,181 SEQ ID NO: 3 | 26299 |
| | variable region | | | |
| PSEU31 | Heavy chain | KB0001 | U.S. Pat. No. 8,044,181 SEQ ID NO: 5 | 26300 |
| | variable region | | | |
| PSEU32 | Heavy chain | KB0001 | U.S. Pat. No. 8,044,181 SEQ ID NO: 7 | 26301 |
| | variable region | | | |
| PSEU33 | Heavy chain | KB0001 | U.S. Pat. No. 8,044,181 SEQ ID NO: 9 | 26302 |
| | variable region | | | |
| PSEU34 | Heavy chain | KB0001 | U.S. Pat. No. 8,044,181 SEQ ID NO: 11 | 26303 |
| | variable region | | | |
| PSEU35 | Heavy chain | 1F3 | U.S. Pat. No. 9,085,611 SEQ ID NO: 11 | 26304 |
| | variable region | | | |
| PSEU36 | Heavy chain | 2A4 | U.S. Pat. No. 9,085,611 SEQ ID NO: 13 | 26305 |
| | variable region | | | |
| PSEU37 | Heavy chain | | U.S. Pat. No. 9,085,611 SEQ ID NO: 27 | 26306 |
| | variable region | | | |
| PSEU38 | Heavy chain | mAbs LST-001 | U.S. Pat. No. 8,653,242 SEQ ID NO: 29 | 26307 |
| | variable region | | | |
| PSEU39 | Heavy chain | rnAbs LST-002 | U.S. Pat. No. 8,653,242 SEQ ID NO: 49 | 26308 |
| | variable region | | | |
| PSEU40 | Heavy chain | mAbs LST-005 | U.S. Pat. No. 8,653,242 SEQ ID NO: 52 | 26309 |
| | variable region | | | |
| PSEU41 | Heavy chain | rnAbs LST-006 | U.S. Pat. No. 8,653,242 SEQ ID NO: 54 | 26310 |
| | variable region | | | |
| PSEU42 | Heavy chain | mAbs LST-007 | U.S. Pat. No. 8,653,242 SEQ ID NO: 13 | 26311 |
| | variable region | | | |
| PSEU43 | Heavy chain | mAbs LST-008 | U.S. Pat. No. 8,653,242 SEQ ID NO: 15 | 26312 |
| | variable region | | | |
| PSEU44 | Heavy chain | 310BO6 | U.S. Pat. No. 7,597,893 SEQ ID NO: 8 | 26313 |
| | variable region | | | |
| PSEU45 | Heavy chain | Cam-003 | US20140227285 SEQ ID NO: 1 | 26314 |
| | variable region | | | |
| PSEU46 | Heavy chain | Cam-004 | US20140227285 SEQ ID NO: 3 | 26315 |
| | variable region | | | |
| PSEU47 | Heavy chain | Cam-005 | US20140227285 SEQ ID NO: 4 | 26316 |
| | variable region | | | |
| PSEU48 | Heavy chain | WapR-001 | US20140227285 SEQ ID NO: 5 | 26317 |
| | variable region | | | |
| PSEU49 | Heavy chain | WapR-002 | US20140227285 SEQ ID NO: 7 | 26318 |
| | variable region | | | |
| PSEU50 | Heavy chain | WapR-003 | US20140227285 SEQ ID NO: 9 | 26319 |
| | variable region | | | |
| PSEU51 | Heavy chain | WapR-004 | US20140227285 SEQ ID NO: 11 | 26320 |
| | variable region | | | |
| PSEU52 | Heavy chain | WapR-007 | US20140227285 SEQ ID NO: 13 | 26321 |
| | variable region | | | |
| PSEU53 | Heavy chain | WapR-016 | US20140227285 SEQ ID NO: 15 | 26322 |
| | variable region | | | |
| PSEU54 | Heavy chain | 1584 | US20130045207 SEQ ID NO: 8 | 26323 |
| | variable region | | | |
| PSEU55 | Heavy chain | 1573 | US20130045207 SEQ ID NO: 16 | 26324 |
| | variable region | | | |
| PSEU56 | Heavy chain | 1572 | US20130045207 SEQ ID NO: 24 | 26325 |
| | variable region | | | |
| PSEU57 | Heavy chain | 1587 | US20130045207 SEQ ID NO: 32 | 26326 |
| | variable region | | | |
| PSEU58 | Heavy chain | 3099 | US20130022604 SEQ ID NO: 8 | 26327 |
| | variable region | | | |
| PSEU59 | Heavy chain | 2745 | US20130022604 SEQ ID NO: 16 | 26328 |
| | variable region | | | |
| PSEU60 | Heavy chain | 2459 | US20130022604 SEQ ID NO: 24 | 26329 |
| | variable region | | | |
| PSEU61 | Heavy chain | 2316 | US20130022606 SEQ ID NO: 8 | 26330 |
| | variable region | | | |
| PSEU62 | Heavy chain | 1838 | US20130022606 SEQ ID NO: 16 | 26331 |
| | variable region | | | |
| PSEU63 | Heavy chain | 2314 | US20130022606 SEQ ID NO: 24 | 26332 |
| | variable region | | | |
| PSEU64 | Heavy chain | 2326 | US20130022606 SEQ ID NO: 32 | 26333 |
| | variable region | | | |
| PSEU65 | Heavy chain | 2328 | US20130022606 SEQ ID NO: 40 | 26334 |
| | variable region | | | |
| PSEU66 | Heavy chain | 2438 | US20130022606 SEQ ID NO: 48 | 26335 |
| | variable region | | | |
| PSEU67 | Heavy chain | 1774 | US20130004500 SEQ ID NO: 8 | 26336 |
| | variable region | | | |
| PSEU68 | Heavy chain | 1660 | US20130004500 SEQ ID NO: 16 | 26337 |
| | variable region | | | |
| PSEU69 | Heavy chain | 1923 | US20130004500 SEQ ID NO: 24 | 26338 |
| | variable region | | | |
| PSEU70 | Heavy chain | 1656 | US20130004499 SEQ ID NO: 8 | 26339 |
| | variable region | | | |
| PSEU71 | Heavy chain | 1640 | US20130004499 SEQ ID NO: 16 | 26340 |
| | variable region | | | |
| PSEU72 | Heavy chain | 2459 | US20130004499 SEQ ID NO: 24 | 26341 |
| | variable region | | | |
| PSEU73 | Heavy chain | | US20120114657 SEQ ID NO: 8 | 26342 |
| | variable region | | | |
| PSEU74 | Heavy chain | Anti-It-2 | US20110177087 SEQ ID NO: 13 | 26343 |
| | variable region | | | |
| PSEU75 | Heavy chain | Anti-It-3 | US20110177087 SEQ ID NO: 14 | 26344 |
| | variable region | | | |
| PSEU76 | Heavy chain | Anti-It-4 | US20110177087 SEQ ID NO: 15 | 26345 |
| | variable region | | | |
| PSEU77 | Heavy chain | Anti-It-5 | US20110177087 SEQ ID NO: 16 | 26346 |
| | variable region | | | |
| PSEU78 | Heavy chain | Anti-It-6 | US20110177087 SEQ ID NO: 17 | 26347 |
| | variable region | | | |
| PSEU79 | Heavy chain | Anti-170003 | US20110177087 SEQ ID NO: 18 | 26348 |
| | variable region | | | |
| PSEU80 | Heavy chain | Anti-170006 | US20110177087 SEQ ID NO: 19 | 26349 |
| | variable region | | | |
| PSEU81 | Heavy chain | Anti-Pa01 | US20110177087 SEQ ID NO: 20 | 26350 |
| | variable region | | | |
| PSEU82 | Heavy chain | Anti-IATS016 | US20110177087 SEQ ID NO: 21 | 26351 |
| | variable region | | | |
| PSEU83 | Heavy chain | | US20090191186 SEQ ID NO: 1 | 26352 |
| | variable region | | | |
| PSEU84 | Heavy chain | | US20090191186 SEQ ID NO: 11 | 26353 |
| | variable region | | | |
| PSEU85 | Heavy chain | | US20090191186 SEQ ID NO: 3 | 26354 |
| | variable region | | | |
| PSEU86 | Heavy chain | | US20090191186 SEQ ID NO: 7 | 26355 |
| | variable region | | | |
| PSEU87 | Heavy chain | | US20090191186 SEQ ID NO: 9 | 26356 |
| | variable region | | | |
| PSEU88 | Heavy chain | | US20090191186 SEQ ID NO: 5 | 26357 |
| | variable region | | | |
| PSEU89 | Heavy chain | | US20090191186 SEQ ID NO: 13 | 26358 |
| | variable region | | | |
| PSEU90 | Heavy chain | | US20090191186 SEQ ID NO: 21 | 26359 |
| | variable region | | | |
| PSEU91 | Heavy chain | | US20090191186 SEQ ID NO: 17 | 26360 |
| | variable region | | | |
| PSEU92 | Heavy chain | | US20090191186 SEQ ID NO: 26 | 26361 |
| | variable region | | | |
| PSEU93 | Heavy chain | | US20090191186 SEQ ID NO: 25 | 26362 |
| | variable region | | | |
| PSEU94 | Heavy chain | | US20090191186 SEQ ID NO: 23 | 26363 |
| | variable region | | | |
| PSEU95 | Heavy chain | | US20090191186 SEQ ID NO: 29 | 26364 |
| | variable region | | | |
| PSEU96 | Heavy chain | | US20090191186 SEQ ID NO: 35 | 26365 |
| | variable region | | | |
| PSEU97 | Heavy chain | V2L2 | WO2014074528 SEQ ID NO: 216 | 26366 |
| | variable region | | | |
| PSEU98 | Heavy chain | V2L2-MD | WO2014074528 SEQ ID NO: 255 | 26367 |
| | variable region | | | |
| PSEU99 | Heavy chain | V2L2-MD and V2L2- | WO2014074528 SEQ ID NO: 256 | 26368 |
| | variable region | GL | | |
| PSEU100 | Heavy chain | V2L2-GL | WO2014074528 SEQ ID NO: 257 | 26369 |
| | variable region | | | |
| PSEU101 | Heavy chain | 2409 | WO2013024905 SEQ ID NO: 16 | 26370 |
| | variable region | | | |
| PSEU102 | Heavy chain | 2453 | WO2013024905 SEQ ID NO: 24 | 26371 |
| | variable region | | | |
| PSEU103 | Heavy chain | S20 | U.S. Pat. No. 7,972,845 SEQ ID NO: 2 | 26372 |
| | variable region | | | |
| PSEU104 | Heavy chain | Fab 13.37 | US20150044215 SEQ ID NO: 142 | 26373 |
| | variable region | | | |
| PSEU105 | Heavy chain | Fab 26.24 | US20150044215 SEQ ID NO: 144 | 26374 |
| | variable region | | | |
| PSEU106 | Heavy chain | Fab 35.36 | US20150044215 SEQ ID NO: 146 | 26375 |
| | variable region | | | |
| PSEU107 | Heavy chain | KB0001 | U.S. Pat. No. 8,044,181 SEQ ID NO: 1 | 26376 |
| | variable region | | | |
| PSEU108 | Heavy chain, LPS | | Horn, M. P. et al. “Preclinical In | 26377 |
| | serotype IATS-O11, | | Vitro and In Vivo characterization | |
| | | | of the fully human monoclonal | |
| | | | IgM antibody KBPA101 specific | |
| | | | for Pseudomonas aeruginosa | |
| | | | serotype IATS-O11”, Antimicrob. | |
| | | | Agents Chemother. 54 (6), 2338- | |
| | | | 2344 (2010) | |
| PSEU109 | J chain | Panobacumab | | 26378 |
| PSEU110 | Light chain | Panobacumab | U.S. Pat. No. 8,197,816 SEQ ID NO: 7 | 26379 |
| PSEU111 | Light chain | | US20130156696 SEQ ID NO: 4 | 26380 |
| PSEU112 | Light chain | | U.S. Pat. No. 7,494,653 SEQ ID NO: 4 | 26381 |
| PSEU113 | Light chain | 1F3 | U.S. Pat. No. 9,085,611 SEQ ID NO: 12 | 26382 |
| | variable region | | | |
| PSEU114 | Light chain | 2A4 | U.S. Pat. No. 9,085,611 SEQ ID NO: 4 | 26383 |
| | variable region | | | |
| PSEU115 | Light chain | | U.S. Pat. No. 9,085,611 SEQ ID NO: 28 | 26384 |
| | variable region | | | |
| PSEU116 | Light chain | mAbs LST-001 | U.S. Pat. No. 8,653,242 SEQ ID NO: 18 | 26385 |
| | variable region | | | |
| PSEU117 | Light chain | mAbs LST-006 | U.S. Pat. No. 8,653,242 SEQ ID NO: 53 | 26386 |
| | variable region | | | |
| PSEU118 | Light chain | mAbs LST-008 | U.S. Pat. No. 8,653,242 SEQ ID NO: 14 | 26387 |
| | variable region | | | |
| PSEU119 | Light chain | mAbs LST-008 | U.S. Pat. No. 8,653,242 SEQ ID NO: 16 | 26388 |
| | variable region | | | |
| PSEU120 | Light chain | 310BO6 | U.S. Pat. No. 7,597,893 SEQ ID NO: 7 | 26389 |
| | variable region | | | |
| PSEU121 | Light chain | Cam-003, Cam-004, | US20140227285 SEQ ID NO: 2 | 26390 |
| | variable region | Cam-005 | | |
| PSEU122 | Light chain | WapR-001 | US20140227285 SEQ ID NO: 6 | 26391 |
| | variable region | | | |
| PSEU123 | Light chain | WapR-002 | US20140227285 SEQ ID NO: 8 | 26392 |
| | variable region | | | |
| PSEU124 | Light chain | WapR-003 | US20140227285 SEQ ID NO: 10 | 26393 |
| | variable region | | | |
| PSEU125 | Light chain | WapR-004, WapR- | US20140227285 SEQ ID NO: 12 | 26394 |
| | variable region | 004RAD | | |
| PSEU126 | Light chain | WapR-007 | US20140227285 SEQ ID NO: 14 | 26395 |
| | variable region | | | |
| PSEU127 | Light chain | WapR-016 | US20140227285 SEQ ID NO: 16 | 26396 |
| | variable region | | | |
| PSEU128 | Light chain | 1584 | US20130045207 SEQ ID NO: 7 | 26397 |
| | variable region | | | |
| PSEU129 | Light chain | 1573 | US20130045207 SEQ ID NO: 15 | 26398 |
| | variable region | | | |
| PSEU130 | Light chain | 1572 | US20130045207 SEQ ID NO: 23 | 26399 |
| | variable region | | | |
| PSEU131 | Light chain | 1587 | US20130045207 SEQ ID NO: 31 | 26400 |
| | variable region | | | |
| PSEU132 | Light chain | 3099 | US20130022604 SEQ ID NO: 7 | 26401 |
| | variable region | | | |
| PSEU133 | Light chain | 2745 | US20130022604 SEQ ID NO: 15 | 26402 |
| | variable region | | | |
| PSEU134 | Light chain | 2459 | US20130022604 SEQ ID NO: 23 | 26403 |
| | variable region | | | |
| PSEU135 | Light chain | 2316 | US20130022606 SEQ ID NO: 7 | 26404 |
| | variable region | | | |
| PSEU136 | Light chain | 1838 | US20130022606 SEQ ID NO: 15 | 26405 |
| | variable region | | | |
| PSEU137 | Light chain | 2314 | US20130022606 SEQ ID NO: 23 | 26406 |
| | variable region | | | |
| PSEU138 | Light chain | 2326 | US20130022606 SEQ ID NO: 31 | 26407 |
| | variable region | | | |
| PSEU139 | Light chain | 2328 | US20130022606 SEQ ID NO: 39 | 26408 |
| | variable region | | | |
| PSEU140 | Light chain | 2438 | US20130022606 SEQ ID NO: 47 | 26409 |
| | variable region | | | |
| PSEU141 | Light chain | 1774 | US20130004500 SEQ ID NO: 7 | 26410 |
| | variable region | | | |
| PSEU142 | Light chain | 1660 | US20130004500 SEQ ID NO: 15 | 26411 |
| | variable region | | | |
| PSEU143 | Light chain | 1923 | US20130004500 SEQ ID NO: 23 | 26412 |
| | variable region | | | |
| PSEU144 | Light chain | 1656 | US20130004499 SEQ ID NO: 7 | 26413 |
| | variable region | | | |
| PSEU145 | Light chain | 1640 | US20130004499 SEQ ID NO: 15 | 26414 |
| | variable region | | | |
| PSEU146 | Light chain | 2459 | US20130004499 SEQ ID NO: 23 | 26415 |
| | variable region | | | |
| PSEU147 | Light chain | | US20120114657 SEQ ID NO: 7 | 26416 |
| | variable region | | | |
| PSEU148 | Light chain | Anti-It-2 | US20110177087 SEQ ID NO: 22 | 26417 |
| | variable region | | | |
| PSEU149 | Light chain | Anti-It-3 | US20110177087 SEQ ID NO: 23 | 26418 |
| | variable region | | | |
| PSEU150 | Light chain | Anti-It-4 | US20110177087 SEQ ID NO: 24 | 26419 |
| | variable region | | | |
| PSEU151 | Light chain | Anti-It-5 | US20110177087 SEQ ID NO: 25 | 26420 |
| | variable region | | | |
| PSEU152 | Light chain | Anti-It-6 | US20110177087 SEQ ID NO: 26 | 26421 |
| | variable region | | | |
| PSEU153 | Light chain | Anti-170003 | US20110177087 SEQ ID NO: 27 | 26422 |
| | variable region | | | |
| PSEU154 | Light chain | Anti-170006 | US20110177087 SEQ ID NO: 28 | 26423 |
| | variable region | | | |
| PSEU155 | Light chain | Anti-Pa01 | US20110177087 SEQ ID NO: 29 | 26424 |
| | variable region | | | |
| PSEU156 | Light chain | Anti- | US20110177087 SEQ ID NO: 30 | 26425 |
| | variable region | IATS016 | | |
| PSEU157 | Light chain | | US20090191186 SEQ ID NO: 2 | 26426 |
| | variable region | | | |
| PSEU158 | Light chain | | US20090191186 SEQ ID NO: 12 | 26427 |
| | variable region | | | |
| PSEU159 | Light chain | | US20090191186 SEQ ID NO: 8 | 26428 |
| | variable region | | | |
| PSEU160 | Light chain | | US20090191186 SEQ ID NO: 10 | 26429 |
| | variable region | | | |
| PSEU161 | Light chain | | US20090191186 SEQ ID NO: 6 | 26430 |
| | variable region | | | |
| PSEU162 | Light chain | | US20090191186 SEQ ID NO: 37 | 26431 |
| | variable region | | | |
| PSEU163 | Light chain | | US20090191186 SEQ ID NO: 18 | 26432 |
| | variable region | | | |
| PSEU164 | Light chain | | US20090191186 SEQ ID NO: 24 | 26433 |
| | variable region | | | |
| PSEU165 | Light chain | | US20090191186 SEQ ID NO: 20 | 26434 |
| | variable region | | | |
| PSEU166 | Light chain | | US20090191186 SEQ ID NO: 36 | 26435 |
| | variable region | | | |
| PSEU167 | Light chain | | US20090191186 SEQ ID NO: 28 | 26436 |
| | variable region | | | |
| PSEU168 | Light chain | | US20090191186 SEQ ID NO: 30 | 26437 |
| | variable region | | | |
| PSEU169 | Light chain | | US20090191186 SEQ ID NO: 34 | 26438 |
| | variable region | | | |
| PSEU170 | Light chain | | US20090191186 SEQ ID NO: 32 | 26439 |
| | variable region | | | |
| PSEU171 | Light chain | V2L2 | WO2014074528 SEQ ID NO: 217 | 26440 |
| | variable region | | | |
| PSEU172 | Light chain | 2409 | WO2013024905 SEQ ID NO: 15 | 26441 |
| | variable region | | | |
| PSEU173 | Light chain | 2453 | WO2013024905 SEQ ID NO: 23 | 26442 |
| | variable region | | | |
| PSEU174 | Light chain | S20 | U.S. Pat. No. 7,972,845 SEQ ID NO: 4 | 26443 |
| | variable region | | | |
| PSEU175 | Light chain | Fab 13.37 | US20150044215 SEQ ID NO: 143 | 26444 |
| | variable region | | | |
| PSEU176 | Light chain | Fab 26.24 | US20150044215 SEQ ID NO: 145 | 26445 |
| | variable region | | | |
| PSEU177 | Light chain | Fab 35.36 | US20150044215 SEQ ID NO: 145 | 26446 |
| | variable region | | | |
| PSEU178 | Light chain variable | mAbs LST-002 | U.S. Pat. No. 8,653,242 SEQ ID NO: 32 | 26447 |
| | region majority | | | |
| PSEU179 | Light chain variable | mAbs LST-006 | U.S. Pat. No. 8,653,242 SEQ ID NO: 55 | 26448 |
| | region majority | | | |
| PSEU180 | Light chain variable | mAbs LST-002 | U.S. Pat. No. 8,653,242 SEQ ID NO: 51 | 26449 |
| | region minority | | | |
| PSEU181 | Light chain variable | mAbs LST-007 | U.S. Pat. No. 8,653,242 SEQ ID NO: 56 | 26450 |
| | region minority | | | |
| PSEU182 | Light chain, Anti-P. | | Horn, M. P. et al. “Preclinical In | 26451 |
| | Aeuginosa LPS | | Vitro and In Vivo characterization | |
| | serotype IATS-O11, | | of the fully human monoclonal | |
| | | | IgM antibody KBPA101 specific | |
| | | | for Pseudomonas aeruginosa | |
| | | | serotype IATS-O11”, Antimicrob. | |
| | | | Agents Chemother. 54 (6), 2338- | |
| | | | 2344 (2010) | |
| PSEU183 | Light kappa chain | KB0001 | U.S. Pat. No. 8,044,181 SEQ ID NO: 10 | 26452 |
| | variable region | | | |
| PSEU184 | Light kappa chain | KB0001 | U.S. Pat. No. 8,044,181 SEQ ID NO: 2 | 26453 |
| | variable region | | | |
| PSEU185 | Light kappa chain | KB0001 | U.S. Pat. No. 8,044,181 SEQ ID NO: 4 | 26454 |
| | variable region | | | |
| PSEU186 | Light kappa chain | KB0001 | U.S. Pat. No. 8,044,181 SEQ ID NO: 6 | 26455 |
| | variable region | | | |
| PSEU187 | Light kappa chain | KB0001 | U.S. Pat. No. 8,044,181 SEQ ID NO: 8 | 26456 |
| | variable region | | | |
| PSEU188 | Monovalent nanobody | 5H01 | US20150044215 SEQ ID NO: 1 | 26457 |
| PSEU189 | Monovalent nanobody | 7C10 | US20150044215 SEQ ID NO: 2 | 26458 |
| PSEU190 | Monovalent nanobody | 1E11 | US20150044215 SEQ ID NO: 3 | 26459 |
| PSEU191 | Monovalent nanobody | 2B02 | US20150044215 SEQ ID NO: 4 | 26460 |
| PSEU192 | Monovalent nanobody | 2B10 | US20150044215 SEQ ID NO: 5 | 26461 |
| PSEU193 | Monovalent nanobody | 2G09 | US20150044215 SEQ ID NO: 6 | 26462 |
| PSEU194 | Monovalent nanobody | 6B05 | US20150044215 SEQ ID NO: 7 | 26463 |
| PSEU195 | Monovalent nanobody | 10C05 | US20150044215 SEQ ID NO: 8 | 26464 |
| PSEU196 | Monovalent nanobody | 11B09 | US20150044215 SEQ ID NO: 9 | 26465 |
| PSEU197 | Monovalent nanobody | 14E10 | US20150044215 SEQ ID NO: 10 | 26466 |
| PSEU198 | Monovalent nanobody | 7E09 | US20150044215 SEQ ID NO: 11 | 26467 |
| PSEU199 | Monovalent nanobody | 13F07 | US20150044215 SEQ ID NO: 12 | 26468 |
| PSEU200 | Monovalent nanobody | 3B11 | US20150044215 SEQ ID NO: 13 | 26469 |
| PSEU201 | Monovalent nanobody | 4C03 | US20150044215 SEQ ID NO: 14 | 26470 |
| PSEU202 | Monovalent nanobody | 4G10 | US20150044215 SEQ ID NO: 15 | 26471 |
| PSEU203 | Monovalent nanobody | 12B02 | US20150044215 SEQ ID NO: 16 | 26472 |
| PSEU204 | Monovalent nanobody | 14B10 | US20150044215 SEQ ID NO: 17 | 26473 |
| PSEU205 | Monovalent nanobody | 3E10 | US20150044215 SEQ ID NO: 18 | 26474 |
| PSEU206 | Monovalent nanobody | 5E02 | US20150044215 SEQ ID NO: 19 | 26475 |
| PSEU207 | Scfv-Fc | W4-M1 | WO2014074528 SEQ ID NO: 78 | 26476 |
| PSEU208 | Scfv-Fc | W4-M5 | WO2014074528 SEQ ID NO: 79 | 26477 |
| PSEU209 | Scfv-Fc | W4-M6 | WO2014074528 SEQ ID NO: 80 | 26478 |
| PSEU210 | Scfv-Fc | W4-M7 | WO2014074528 SEQ ID NO: 81 | 26479 |
| PSEU211 | Scfv-Fc | W4-M8 | WO2014074528 SEQ ID NO: 82 | 26480 |
| PSEU212 | Scfv-Fc | W4-M9 | WO2014074528 SEQ ID NO: 83 | 26481 |
| PSEU213 | Scfv-Fc | W4-M11 | WO2014074528 SEQ ID NO: 84 | 26482 |
| PSEU214 | Scfv-Fc | W4-M12 | WO2014074528 SEQ ID NO: 85 | 26483 |
| PSEU215 | Scfv-Fc | W4-M14 | WO2014074528 SEQ ID NO: 86 | 26484 |
| PSEU216 | Scfv-Fc | W4-M15 | WO2014074528 SEQ ID NO: 87 | 26485 |
| PSEU217 | Scfv-Fc | W4-M16 | WO2014074528 SEQ ID NO: 88 | 26486 |
| PSEU218 | Scfv-Fc | W4-M17 | WO2014074528 SEQ ID NO: 89 | 26487 |
| PSEU219 | Scfv-Fc | W4-M19 | WO2014074528 SEQ ID NO: 90 | 26488 |
| PSEU220 | Scfv-Fc | W4-M20 | WO2014074528 SEQ ID NO: 91 | 26489 |
| PSEU221 | Sefv-Fc | W4-M4 | WO2014074528 SEQ ID NO: 92 | 26490 |
| PSEU222 | Scfv-Fc | W4-M10 | WO2014074528 SEQ ID NO: 93 | 26491 |
| PSEU223 | Scfv-Fc | W4-HC1-LCP | WO2014074528 SEQ ID NO: 94 | 26492 |
| PSEU224 | Scfv-Fc | W4-HC1-LC7 | WO2014074528 SEQ ID NO: 95 | 26493 |
| PSEU225 | Scfv-Fc | W4-HC2-LC7 | WO2014074528 SEQ ID NO: 96 | 26494 |
| PSEU226 | Scfv-Fc | W4-HC3-LCP | WO2014074528 SEQ ID NO: 97 | 26495 |
| PSEU227 | Scfv-Fc | W4-HC4-LCP | WO2014074528 SEQ ID NO: 98 | 26496 |
| PSEU228 | Scfv-Fc | W4-HC5-LCP | WO2014074528 SEQ ID NO: 99 | 26497 |
| PSEU229 | Scfv-Fc | W4-HC5-LC7 | WO2014074528 SEQ ID NO: 100 | 26498 |
| PSEU230 | Scfv-Fc | W4-HC7-LCP | WO2014074528 SEQ ID NO: 101 | 26499 |
| PSEU231 | Scfv-Fc | W4-VH1-VL8 | WO2014074528 SEQ ID NO: 102 | 26500 |
| PSEU232 | Scfv-Fc | W4-VH2-VLP | WO2014074528 SEQ ID NO: 103 | 26501 |
| PSEU233 | Scfv-Fc | W4-VH2-VL8 | WO2014074528 SEQ ID NO: 104 | 26502 |
| PSEU234 | Scfv-Fc | W4-VH3-VL7 | WO2014074528 SEQ ID NO: 105 | 26503 |
| PSEU235 | Scfv-Fc | W4-VH3-VL8 | WO2014074528 SEQ ID NO: 106 | 26504 |
| PSEU236 | Scfv-Fc | W4-VH5-VL8 | WO2014074528 SEQ ID NO: 107 | 26505 |
| PSEU237 | Scfv-Fc | W4-VH6-VL7 | WO2014074528 SEQ ID NO: 108 | 26506 |
| PSEU238 | Scfv-Fc | W4-VH6-VL8 | WO2014074528 SEQ ID NO: 109 | 26507 |
| PSEU239 | Scfv-Fc | W4-VH6-VLP | WO2014074528 SEQ ID NO: 110 | 26508 |
| PSEU240 | Scfv-Fc | W4-VH7-VLP | WO2014074528 SEQ ID NO: 111 | 26509 |
| PSEU241 | Scfv-Fc | W4-VH7-VL7 | WO2014074528 SEQ ID NO: 112 | 26510 |
| PSEU242 | Scfv-Fc | W4-VH7-VL8 | WO2014074528 SEQ ID NO: 113 | 26511 |
| PSEU243 | Scfv-Fc | W4-VH9-VLP | WO2014074528 SEQ ID NO: 114 | 26512 |
| PSEU244 | Scfv-Fc | W4-VH10-VLP | WO2014074528 SEQ ID NO: 115 | 26513 |
| PSEU245 | Scfv-Fc | W4-VH11-VLP | WO2014074528 SEQ ID NO: 116 | 26514 |
| PSEU246 | Scfv-Fc | W4-VH12-VLP | WO2014074528 SEQ ID NO: 117 | 26515 |
| PSEU247 | Scfv-Fc | W4-VH15-VLP | WO2014074528 SEQ ID NO: 118 | 26516 |
| PSEU248 | Scfv-Fc | W4-VH16-VLP | WO2014074528 SEQ ID NO: 119 | 26517 |
| PSEU249 | Scfv-Fc | W4-VH20-VLP | WO2014074528 SEQ ID NO: 120 | 26518 |
| PSEU250 | Scfv-Fc | W4-VH31-VLP | WO2014074528 SEQ ID NO: 121 | 26519 |
| PSEU251 | Scfv-Fc | W4-VH37-VLP | WO2014074528 SEQ ID NO: 122 | 26520 |
| PSEU252 | Scfv-Fc | W4-VH41-VLP | WO2014074528 SEQ ID NO: 123 | 26521 |
| PSEU253 | Scfv-Fc | W4-VH42-VLP | WO2014074528 SEQ ID NO: 124 | 26522 |
| PSEU254 | Scfv-Fc | W4-VH35-VLP | WO2014074528 SEQ ID NO: 125 | 26523 |
| PSEU255 | Scfv-Fc | W4-VH36-VLP | WO2014074528 SEQ ID NO: 126 | 26524 |
| PSEU256 | Scfv-Fc | W4-VH52-VLP | WO2014074528 SEQ ID NO: 127 | 26525 |
| PSEU257 | Scfv-Fc | W4-VH53-VLP | WO2014074528 SEQ ID NO: 128 | 26526 |
| PSEU258 | Scfv-Fc | W4-VH54-VLP | WO2014074528 SEQ ID NO: 129 | 26527 |
| PSEU259 | Scfv-Fc | W4-VH55-VLP | WO2014074528 SEQ ID NO: 130 | 26528 |
| PSEU260 | Scfv-Fc | W4-VH56-VLP | WO2014074528 SEQ ID NO: 131 | 26529 |
| PSEU261 | Scfv-Fc | W4-VH57-VLP | WO2014074528 SEQ ID NO: 132 | 26530 |
| PSEU262 | Scfv-Fc | W4-VH58-VLP | WO2014074528 SEQ ID NO: 133 | 26531 |
| PSEU263 | Scfv-Fc | W4-VH60-VLP | WO2014074528 SEQ ID NO: 134 | 26532 |
| PSEU264 | Scfv-Fc | W4-VH61-VLP | WO2014074528 SEQ ID NO: 135 | 26533 |
| PSEU265 | Scfv-Fc | W4-VH62-VLP | WO2014074528 SEQ ID NO: 136 | 26534 |
| PSEU266 | Scfv-Fc | W4-VH63-VLP | WO2014074528 SEQ ID NO: 137 | 26535 |
| PSEU267 | Scfv-Fc | W4-VH64-VLP | WO2014074528 SEQ ID NO: 138 | 26536 |
| PSEU268 | Scfv-Fc | W4-VH65-VLP | WO2014074528 SEQ ID NO: 139 | 26537 |
| PSEU269 | Scfv-Fc | W4-VH66-VLP | WO2014074528 SEQ ID NO: 140 | 26538 |
| PSEU270 | Scfv-Fc | W4-VH67-VLP | WO2014074528 SEQ ID NO: 141 | 26539 |
| PSEU271 | Scfv-Fc | W4-VH69-VLP | WO2014074528 SEQ ID NO: 142 | 26540 |
| PSEU272 | Scfv-Fc | W4-VH70-VLP | WO2014074528 SEQ ID NO: 143 | 26541 |
| PSEU273 | Scfv-Fc | W4-VH72-VLP | WO2014074528 SEQ ID NO: 144 | 26542 |
| PSEU274 | Scfv-Fc | W4-VH79-VLP | WO2014074528 SEQ ID NO: 145 | 26543 |
| PSEU275 | Scfv-Fc | W4-VH80-VLP | WO2014074528 SEQ ID NO: 146 | 26544 |
| PSEU276 | Scfv-Fc | W4-M9 | WO2014074528 SEQ ID NO: 152 | 26545 |
| PSEU277 | Scfv-Fc | Psl0170 | WO2014074528 SEQ ID NO: 245 | 26546 |
| PSEU278 | Scfv-Fc | Psl0304 | WO2014074528 SEQ ID NO: 246 | 26547 |
| PSEU279 | Scfv-Fc | Psl0348 | WO2014074528 SEQ ID NO: 247 | 26548 |
| PSEU280 | Scfv-Fc | Psl0573 | WO2014074528 SEQ ID NO: 248 | 26549 |
| PSEU281 | Scfv-Fc | Psl0574 | WO2014074528 SEQ ID NO: 249 | 26550 |
| PSEU282 | Scfv-Fc | Psl0582 | WO2014074528 SEQ ID NO: 250 | 26551 |
| PSEU283 | Scfv-Fc | Psl0584 | WO2014074528 SEQ ID NO: 251 | 26552 |
| PSEU284 | Scfv-Fc | Psl0585 | WO2014074528 SEQ ID NO: 252 | 26553 |
| PSEU285 | Scfv-Fc | Psl0589 | WO2014074528 SEQ ID NO: 253 | 26554 |

[0482] In some embodiments, the payload region of the viral particle comprises one or more nucleic acid sequences encoding one or more of the payload antibody polypeptides listed in Table 44 against Streptococcus bacteria (STRP1-STRP40; SEQ ID NO: 26555-26594),

TABLE 44
Antibodies against Streptococcus bacteria

| Antibody | | Antibody | Reference | SEQ ID |
|---|---|---|---|---|
| No. | Description | Name | Information | NO |
| STRP1 | Heavy chain variable region, | | U.S. Pat. No. 7,625,561 | 26555 |
| | Diabody for Streptococcus | | SEQ ID NO: 5 | |
| STRP2 | Heavy chain variable region, | | U.S. Pat. No. 7,625,561 | 26556 |
| | Diabody for Streptococcus | | SEQ ID NO: 3 | |
| STRP3 | Heavy chain variable region, | | U.S. Pat. No. 7,625,561 | 26557 |
| | Diabody for Streptococcus | | SEQ ID NO: 7 | |
| STRP4 | Heavy chain variable region, | DP-54 | Lucas, A. H. “Combinatorial library | 26558 |
| | partial, Streptococcus | | cloning of human antibodies to | |
| | pneumoniae | | Streptococcus pneumoniae capsular | |
| | | | polysaccharides: variable region | |
| | | | primary structures and evidence for | |
| | | | somatic mutation of Fab fragments | |
| | | | specific for capsular serotypes 6B, | |
| | | | 14, and 23F” Infect. Immun. 69 (2), | |
| | | | 853-864 (2001), NCBI Accession # | |
| | | | AAD48823 | |
| STRP5 | Heavy chain variable | DP-35 | Lucas, A. H. “Combinatorial library | 26559 |
| | region, partial, | | cloning of human antibodies to | |
| | Streptococcus pneumoniae | | Streptococcus pneumoniae capsular | |
| | | | polysaccharides: variable region | |
| | | | primary structures and evidence for | |
| | | | somatic mutation of Fab fragments | |
| | | | specific for capsular serotypes 6B, | |
| | | | 14, and 23F,” Infect. Immun. 69 (2), | |
| | | | 853-864 (2001), NCBI Accession # | |
| | | | AAD48825 | |
| STRP6 | Heavy chain variable | DP-47 | Lucas, A. H. “Combinatorial library | 26560 |
| | region, partial, | | cloning of human antibodies to | |
| | Streptococcus pneumoniae | | Streptococcus pneumoniae capsular | |
| | | | polysaccharides: variable region | |
| | | | primary structures and evidence for | |
| | | | somatic mutation of Fab fragments | |
| | | | specific for capsular serotypes 6B, | |
| | | | 14, and 23F” Infect. Immun. 69 (2), | |
| | | | 853-864 (2001), NCBI Accession # | |
| | | | AAD48827 | |
| STRP7 | Heavy chain variable | DP-47 | Lucas, A. H. “Combinatorial library | 26561 |
| | region, partial, | | cloning of human antibodies to | |
| | Streptococcus pneumoniae | | Streptococcus pneumoniae capsular | |
| | | | polysaccharides: variable region | |
| | | | primary structures and evidence for | |
| | | | somatic mutation of Fab fragments | |
| | | | specific for capsular serotypes 6B, | |
| | | | 14, and 23F” Infect. Immun. 69 (2), | |
| | | | 853-864 (2001), NCBI Accession # | |
| | | | AAD48828 | |
| STRP8 | Heavy chain variable | LSG-6.1 | Lucas, A. H. “Combinatorial library | 26562 |
| | region, partial, | | cloning of human antibodies to | |
| | Streptococcus pneumoniae | | Streptococcus pneumoniae capsular | |
| | | | polysaccharides: variable region | |
| | | | primary structures and evidence for | |
| | | | somatic mutation of Fab fragments | |
| | | | specific for capsular serotypes 6B, | |
| | | | 14, and 23F” Infect. Immun. 69 (2), | |
| | | | 853-864 (2001), NCBI Accession # | |
| | | | AAD48830 | |
| STRP9 | Heavy chain variable | LSG6.1 | Lucas, A. H. “Combinatorial library | 26563 |
| | region, partial, | | cloning of human antibodies to | |
| | Streptococcus pneumoniae | | Streptococcus pneumoniae capsular | |
| | | | polysaccharides: variable region | |
| | | | primary structures and evidence for | |
| | | | somatic mutation of Fab fragments | |
| | | | specific for capsular serotypes 6B, | |
| | | | 14, and 23F” Infect. Immun. 69 (2), | |
| | | | 853-864 (2001), NCBI Accession # | |
| | | | AAD48832 | |
| STRP10 | Heavy chain variable | DP-47 | Lucas, A. H. “Combinatorial library | 26564 |
| | region, partial, | | cloning of human antibodies to | |
| | Streptococcus pneumoniae | | Streptococcus pneumoniae capsular | |
| | | | polysaccharides: variable region | |
| | | | primary structures and evidence for | |
| | | | somatic mutation of Fab fragments | |
| | | | specific for capsular serotypes 6B, | |
| | | | 14, and 23F” Infect. Immun. 69 (2), | |
| | | | 853-864 (2001), NCBI Accession # | |
| | | | AAD48835 | |
| STRP11 | Heavy chain variable region, | humanized | U.S. Pat. No. 7,429,381 | 26565 |
| | Streptococcus agalactiae, | Mu-9 | SEQ ID NO: 14 | |
| | Legionella pneumophilia, | | | |
| | Streptococcus pyogenes, | | | |
| | Escherichia coli, | | | |
| | Neisseria gonorrhoeae, | | | |
| | Neisseria meningitidis, | | | |
| | Pneumococcus, | | | |
| | Hemophilis influenzae B, | | | |
| | Treponema pallidum, | | | |
| | Lyme disease spirochetes, | | | |
| | Pseudomonas aeruginosa, | | | |
| | Mycobacterium leprae, | | | |
| | Brucella abortus and | | | |
| | Mycobacterium tuberculosis. | | | |
| STRP12 | Heavy chain variable region, | Anti-PsaA | US20070003561 | 26566 |
| | Streptococcus pneumoniae | 7-1G9 | SEQ ID NO: 16 | |
| STRP13 | Heavy chain variable region, | Anti-PsaA | US20070003561 | 26567 |
| | Streptococcus pneumoniae | 1-15E5 | SEQ ID NO: 32 | |
| STRP14 | Heavy chain variable region, | Anti-PsaA | US20070003561 | 26568 |
| | Streptococcus pneumoniae | 9A7 | SEQ ID NO: 48 | |
| STRP15 | Heavy chain variable region, | 23f Fab | Bryson, S., “Multitasking | 26569 |
| | Streptococcus pneumoniae | 023.102, | Immunoglobulin V-Genes And | |
| | | chain B | Somatic Div Cdr3 Loops Generate | |
| | | | Binding Sites For Chemically Di | |
| | | | Antigens From Bacterial And Viral | |
| | | | Pathogens” Unpublished”, NCBI | |
| | | | Accession # 4HIE B | |
| STRP16 | Heavy chain variable region, | 5.12.14 | U.S. Pat. No. 5,686,070 | 26570 |
| | Streptococcus pneumoniae, | | SEQ ID NO: 22 | |
| | Escherichia coli, or | | | |
| | Pseudomonas aeruginosa | | | |
| SIRP17 | Heavy chain variable region, | 6G4.2.5 | U.S. Pat. No. 5,686,070 | 26571 |
| | Streptococcus pneumoniae, | | SEQ ID NO: 50 | |
| | Escherichia coli, or | | | |
| | Pseudomonas aeruginosa | | | |
| STRP18 | Heavy chain variable region, | chimeric | U.S. Pat. No. 5,686,070 | 26572 |
| | Streptococcus pneumoniae, | 6G4.2.5 | SEQ ID NO: 58 | |
| | Escherichia coli, or | | | |
| | Pseudomonas aeruginosa | | | |
| STRP19 | Heavy chain, | Mab679 | U.S. Pat. No. 7,429,381 | 26573 |
| | Streptococcus agalactiae, | | SEQ ID NO: 4 | |
| | Legionella pneumophilia, | | | |
| | Streptococcus pyogenes, | | | |
| | Escherichia coli, | | | |
| | Neisseria gonorrhoeae, | | | |
| | Neisseria meningitidis, | | | |
| | Pneumococcus, | | | |
| | Hemophilis influenzae B, | | | |
| | Treponema pallidum, | | | |
| | Lyme disease spirochetes, | | | |
| | Pseudomonas aeruginosa, | | | |
| | Mycobacterium leprae, | | | |
| | Brucella abortus and | | | |
| | Mycobacterium tuberculosis. | | | |
| STRP20 | Light chain variable region, | | U.S. Pat. No. 7,625,561 | 26574 |
| | Diabody for Streptococcus | | SEQ ID NO: 6 | |
| STRP21 | Light chain variable region, | | U.S. Pat. No. 7,625,561 | 26575 |
| | Diabody for Streptococcus | | SEQ ID NO: 8 | |
| STRP22 | Light chain variable region, | | U.S. Pat. No. 7,625,561 | 26576 |
| | Diabody for Streptococcus | | SEQ ID NO: 4 | |
| STRP23 | Light chain variable | A2 | Lucas, A. H. “Combinatorial library | 26577 |
| | region, partial, | | cloning of human antibodies to | |
| | Streptococcus pneumoniae | | Streptococcus pneumoniae capsular | |
| | | | polysaccharides: variable region | |
| | | | primary structures and evidence for | |
| | | | somatic mutation of Fab fragments | |
| | | | specific for capsular serotypes 6B, | |
| | | | 14, and 23F” Infect. Immun. 69 (2), | |
| | | | 853-864 (2001), NCBI Accession # | |
| | | | AAD48824 | |
| STRP24 | Light chain variable | B3 | Lucas, A. H. “Combinatorial library | 26578 |
| | region, partial, | | cloning of human antibodies to | |
| | Streptococcus pneumoniae | | Streptococcus pneumoniae capsular | |
| | | | polysaccharides: variable region | |
| | | | primary structures and evidence for | |
| | | | somatic mutation of Fab fragments | |
| | | | specific for capsular serotypes 6B, | |
| | | | 14, and 23F” Infect. Immun. 69 (2), | |
| | | | 853-864 (2001), NCBI Accession # | |
| | | | AAD48822 | |
| STRP25 | Light chain variable | A23 | Lucas, A. H. “Combinatorial library | 26579 |
| | region, partial, | | cloning of human antibodies to | |
| | Streptococcus pneumoniae | | Streptococcus pneumoniae capsular | |
| | | | polysaccharides: variable region | |
| | | | primary structures and evidence for | |
| | | | somatic mutation of Fab fragments | |
| | | | specific for capsular serotypes 6B, | |
| | | | 14, and 23F” Infect. Immun. 69 (2), | |
| | | | 853-864 (2001), NCBI Accession # | |
| | | | AAD48826 | |
| STRP26 | Light chain variable | L2 | Lucas, A. H. “Combinatorial library | 26580 |
| | region, partial, | | cloning of human antibodies to | |
| | Streptococcus pneumoniae | | Streptococcus pneumoniae capsular | |
| | | | polysaccharides: variable region | |
| | | | primary structures and evidence for | |
| | | | somatic mutation of Fab fragments | |
| | | | specific for capsular serotypes 6B, | |
| | | | 14, and 23F” Infect. Immun. 69 (2), | |
| | | | 853-864 (2001), NCBI Accession # | |
| | | | AAD48829 | |
| STRP27 | Light chain variable | DPL5 | Lucas, A. H. “Combinatorial library | 26581 |
| | region, partial, | | cloning of human antibodies to | |
| | Streptococcus pneumoniae | | Streptococcus pneumoniae capsular | |
| | | | polysaccharides: variable region | |
| | | | primary structures and evidence for | |
| | | | somatic mutation of Fab fragments | |
| | | | specific for capsular serotypes 6B, | |
| | | | 14, and 23F” Infect. Immun. 69 (2), | |
| | | | 853-864 (2001), NCBI Accession # | |
| | | | AAD48831 | |
| STRP28 | Light chain variable | DPL5 | Lucas, A. H. “Combinatorial library | 26582 |
| | region, partial, | | cloning of human antibodies to | |
| | Streptococcus pneumoniae | | Streptococcus pneumoniae capsular | |
| | | | polysaccharides: variable region | |
| | | | primary structures and evidence for | |
| | | | somatic mutation of Fab fragments | |
| | | | specific for capsular serotypes 6B, | |
| | | | 14, and 23F” Infect. Immun. 69 (2), | |
| | | | 853-864 (2001), NCBI Accession # | |
| | | | AAD48833 | |
| STRP29 | Light chain variable | L2 | Lucas, A. H. “Combinatorial library | 26583 |
| | region, partial, | | cloning of human antibodies to | |
| | Streptococcus pneumoniae | | Streptococcus pneumoniae capsular | |
| | | | polysaccharides: variable region | |
| | | | primary structures and evidence for | |
| | | | somatic mutation of Fab fragments | |
| | | | specific for capsular serotypes 6B, | |
| | | | 14, and 23F” Infect. Immun. 69 (2), | |
| | | | 853-864 (2001), NCBI Accession # | |
| | | | AAD48834 | |
| STRP30 | Light chain variable | Anti-PsaA | US20070003561 | 26584 |
| | region, partial, | 7-1G9 | SEQ ID NO: 8 | |
| | Streptococcus pneumoniae | | | |
| STRP31 | Light chain variable | Anti-PsaA | US20070003561 | 26585 |
| | region, partial, | 1-15E5 | SEQ ID NO: 24 | |
| | Streptococcus pneumoniae | | | |
| STRP32 | Light chain variable | Anti-pSaA | US20070003561 | 26586 |
| | region, partial, | 9A7 | SEQ ID NO: 40 | |
| | Streptococcus pneumoniae | | | |
| STRP33 | Light chain variable region, | 5.12.14 | U.S. Pat. No. 5,686,070 | 26587 |
| | Streptococcus pneumoniae, | | SEQ ID NO: 20 | |
| | Escherichia coli, or | | | |
| | Pseudomonas aeruginosa | | | |
| STRP34 | Light chain variable region, | 6G4.2.5 | U.S. Pat. No. 5,686,070 | 26588 |
| | Streptococcus pneumoniae, | | SEQ ID NO: 48 | |
| | Escherichia coli, or | | | |
| | Pseudomonas aeruginosa | | | |
| STRP35 | Light chain variable region, | chimeric | U.S. Pat. No. 5,686,070 | 26589 |
| | Streptococcus pneumoniae, | 6G4.2.5 | SEQ ID NO: 56 | |
| | Escherichia coli, or | | | |
| | Pseudomonas aeruginosa | | | |
| STRP36 | Light chain, | Mab679 | U.S. Pat. No. 7,429,381 | 26590 |
| | Streptococcus agalactiae, | | SEQ ID NO: 2 | |
| | Legionella pneumophilia, | | | |
| | Streptococcus pyogenes, | | | |
| | Escherichia coli, | | | |
| | Neisseria gonorrhoeae, | | | |
| | Neisseria meningitidis, | | | |
| | Pneumococcus, | | | |
| | Hemophilis influenzae B, | | | |
| | Treponema pallidum, | | | |
| | Lyme disease spirochetes, | | | |
| | Pseudomonas aeruginosa, | | | |
| | Mycobacterium leprae, | | | |
| | Brucella abortus and | | | |
| | Mycobacterium tuberculosis | | | |
| STRP37 | scFv, Streptococcus agalactiae, | Mab679 | U.S. Pat. No. 7,429,381 | 26591 |
| | Legionella pneumophilia, | | SEQ ID NO: 6 | |
| | Streptococcus pyogenes, | | | |
| | Escherichia coli, | | | |
| | Neisseria gonorrhoeae, | | | |
| | Neisseria meningitidis, | | | |
| | Pneumococcus, | | | |
| | Hemophilis influenzae B, | | | |
| | Treponema pallidum, | | | |
| | Lyme disease spirochetes, | | | |
| | Pseudomonas aeruginosa, | | | |
| | Mycobacterium leprae, | | | |
| | Brucella abortus and | | | |
| | Mycobacterium tuberculosis | | | |
| STRP38 | scFv, Streptococcus agalactiae, | Mu-9V | U.S. Pat. No. 7,429,381 | 26592 |
| | Legionella pneumophilia, | | SEQ ID NO: 8 | |
| | Streptococcus pyogenes, | | | |
| | Escherichia coli, | | | |
| | Neisseria gonorrhoeae, | | | |
| | Neisseria meningitidis, | | | |
| | Pneumococcus, | | | |
| | Hemophilis influenzae B, | | | |
| | Treponema pallidum, | | | |
| | Lyme disease spirochetes, | | | |
| | Pseudomonas aeruginosa, | | | |
| | Mycobacterium leprae, | | | |
| | Brucella abortus and | | | |
| | Mycobacterium tuberculosis | | | |
| STRP39 | scFv, Streptococcus agalactiae, | Mu-9V | U.S. Pat. No. 7,429,381 | 26593 |
| | Legionella pneumophilia, | | SEQ ID NO: 10 | |
| | Streptococcus pyogenes, | | | |
| | Escherichia coli, | | | |
| | Neisseria gonorrhoeae, | | | |
| | Neisseria meningitidis, | | | |
| | Pneumococcus, | | | |
| | Hemophilis influenzae B, | | | |
| | Treponema pallidum, | | | |
| | Lyme disease spirochetes, | | | |
| | Pseudomonas aeruginosa, | | | |
| | Mycobacterium leprae, | | | |
| | Brucella abortus and | | | |
| | Mycobacterium tuberculosis | | | |
| STRP40 | scFv, Streptococcus agalactiae, | humanized | U.S. Pat. No. 7,429,381 | 26594 |
| | Legionella pneumophilia, | Mu-9 | SEQ ID NO: 12 | |
| | Streptococcus pyogenes, | | | |
| | Escherichia coli, | | | |
| | Neisseria gonorrhoeae, | | | |
| | Neisseria meningitidis, | | | |
| | Pneumococcus, | | | |
| | Hemophilis influenzae B, | | | |
| | Treponema pallidum, | | | |
| | Lyme disease spirochetes, | | | |
| | Pseudomonas aeruginosa, | | | |
| | Mycobacterium leprae, | | | |
| | Brucella abortus and | | | |
| | Mycobacterium tuberculosis | | | |

[0483] In some embodiments, the payload region of the viral particle comprises one or more nucleic acid sequences, fragments or variants thereof or encodes one or more polypeptides, fragments or variants thereof described in US Pub No. US20040198960 and US20130195876, the contents of each of which are herein incorporated by reference in their entirety, against Streptococcus Pneumoniae infection.

[0484] In some embodiments, the payload region of the viral particle comprises one or more nucleic acid sequences, fragments or variants encoding Afelimomab, fragments or variants thereof for treating a disease and/or disorder or preventing a disease and/or disorder. As a non-limiting example, the disease and/or disorder is sepsis.

[0485] In some embodiments, the payload region of the viral particle comprises one or more nucleic acid sequences, fragments or variants encoding Nebacumab, fragments or variants thereof for treating a disease and/or disorder or preventing a disease and/or disorder. As a non-limiting example, the disease and/or disorder is sepsis.

[0486] In some embodiments, the payload region of the viral particle comprises one or more nucleic acid sequences encoding one or more of the payload antibody polypeptides listed in Table 45 against Staphylococcal bacteria and related bacteria (STPH1-STPH249; SEQ ID NO: 26595-26843).

TABLE 45
Antibodies against Staphylococcal bacteria and related bacteria

| Antibody | | Antibody | Reference | SEQ ID |
|---|---|---|---|---|
| No. | Description | Name | Information | NO |
| STPH1 | Heavy chain variable region, S. aureus | | U.S. Pat. No. 8,609,102 | 26595 |
| | | | SEQ ID NO: 2 | |
| STPH2 | Heavy chain variable region, S. aureus | | U.S. Pat. No. 8,609,102 | 26596 |
| | | | SEQ ID NO: 6 | |
| STPH3 | Heavy chain variable region, S. aureus | SAR279356 | U.S. Pat. No. 7,786,255 | 26597 |
| | or S. epidermidis, E. coli, Yersinia | | SEQ ID NO: 1 | |
| | pestis (Y. pestis), Y. entercolitica, | | | |
| | Xanthomnonas axonopodis (X. | | | |
| | axonopodis), Pseudonmonas | | | |
| | fuorescerns (P. | | | |
| | fluorescens), Actinobacillus | | | |
| | actinomycetemcomitans (A. | | | |
| | actinomycetemcomitans), A. | | | |
| | pleuropneumoniae, Ralstonia | | | |
| | solanacearum (R. | | | |
| | solanacearum), Bordetella pertussis (B. | | | |
| | pertussis), B. parapertussis or B. | | | |
| | bronchiseptica | | | |
| STPH4 | Heavy chain variable region, S. aureus | SAR279356 | US20110002932 SEQ ID | 26598 |
| | or S. epidermidis, E. coli, Yersinia | | NO: 1 | |
| | pestis (Y. pestis), Y. entercolitica, | | | |
| | Xanthomnonas axonopodis (X. | | | |
| | axonopodis), Pseudonmonas | | | |
| | fuorescerns (P. | | | |
| | fluorescens), Actinobacillus | | | |
| | actinomycetemcomitans (A. | | | |
| | actinomycetemcomitans), A. | | | |
| | pleuropneumoniae, Ralstonia | | | |
| | solanacearum (R. | | | |
| | solanacearum), Bordetella pertussis (B. | | | |
| | pertussis), B. parapertussis or B. | | | |
| | bronchiseptica | | | |
| STPH5 | Heavy chain variable region, S. | 108-1 | U.S. Pat. No. 8,475,798 | 26599 |
| | epidermidis | | SEQ ID NO: 18 | |
| STPH6 | Heavy chain variable region, S. | 108-36 | U.S. Pat. No. 8,475,798 | 26600 |
| | epidermidis | | SEQ ID NO: 22 | |
| STPH7 | Heavy chain variable region, S. | 110-15 | U.S. Pat. No. 8,475,798 | 26601 |
| | epidermidis | | SEQ ID NO: 26 | |
| STPH8 | Heavy chain variable region, S. | 108-1VH- | U.S. Pat. No. 8,475,798 | 26602 |
| | epidermidis | Hu | SEQ ID NO: 28 | |
| STPH9 | Heavy chain variable region, S. | 108-36VH- | U.S. Pat. No. 8,475,798 | 26603 |
| | epidermidis | Hu | SEQ ID NO: 30 | |
| STPH10 | Heavy chain variable region, S. | 110-15VH- | U.S. Pat. No. 8,475,798 | 26604 |
| | epidermidis | Hu | SEQ ID NO: 32 | |
| STPH11 | Heavy chain variable region, | Pagibaximab | U.S. Pat. No. 8,372,958 | 26605 |
| | Staphylococcal sepsis | | SEQ ID NO: 87 | |
| STPH12 | Heavy chain variable region, | Pagibaximab | U.S. Pat. No. 8,372,958 | 26606 |
| | Staphylococcal sepsis | | SEQ ID NO: 12 | |
| STPH13 | Heavy chain variable region, | Pagibaximab | U.S. Pat. No. 8,372,958 | 26607 |
| | Staphylococcal sepsis | | SEQ ID NO: 17 | |
| STPH14 | Heavy chain variable region, | F628 | U.S. Pat. No. 8,912,314 | 26608 |
| | Staphylococci such as S. aureus and S. | | SEQ ID NO: 3 | |
| | epidermidis, E. coli such as E. | | | |
| | coli strains O157:H7 and | | | |
| | CFT073, Yersinia pestis, Yersinia | | | |
| | entercolitica, Xanthomonas axonopodis, | | | |
| | Pseudomonas fluorescens (all of which | | | |
| | are sequenced species with complete | | | |
| | pgaABCD loci), and Actinobacillus | | | |
| | actinomycetemcomitans (AA), | | | |
| | Actinobacillus pleuropneumoniae (Ap), | | | |
| | Ralstonia solanacearum (e.g., megaplasmid | | | |
| | form), Bordetella pertussis, Bordetella | | | |
| | parapertussis and Bordetella | | | |
| | bronchiseptica | | | |
| STPH15 | Heavy chain variable region, | F630 | U.S. Pat. No. 8,912,314 | 26609 |
| | Staphylococci such as S. aureus and S. | | SEQ ID NO: 5 | |
| | epidermidis, E. coli such as E. | | | |
| | coli strains O157:H7 and | | | |
| | CFT073, Yersinia pestis, Yersinia | | | |
| | entercolitica, Xanthomonas axonopodis, | | | |
| | Pseudomonas fluorescens (all of which | | | |
| | are sequenced species with complete | | | |
| | pgaABCD loci), and Actinobacillus | | | |
| | actinomycetemcomitans (AA), | | | |
| | Actinobacillus pleuropneumoniae (Ap), | | | |
| | Ralstonia solanacearum (e.g., megaplasmid | | | |
| | form), Bordetella pertussis, Bordetella | | | |
| | parapertussis and Bordetella | | | |
| | bronchiseptica | | | |
| STPH16 | Heavy chain variable region, | F598 | U.S. Pat. No. 8,912,314 | 26610 |
| | Staphylococci such as S. aureus and S. | | SEQ ID NO: 55 | |
| | epidermidis, E. coli such as E. | | | |
| | coli strains O157:H7 and | | | |
| | CFT073, Yersinia pestis, Yersinia | | | |
| | entercolitica, Xanthomonas axonopodis, | | | |
| | Pseudomonas fluorescens (all of which | | | |
| | are sequenced species with complete | | | |
| | pgaABCD loci), and Actinobacillus | | | |
| | actinomycetemcomitans (AA), | | | |
| | Actinobacillus pleuropneumoniae (Ap), | | | |
| | Ralstonia solanacearum (e.g., megaplasmid | | | |
| | form), Bordetella pertussis, Bordetella | | | |
| | parapertussis and Bordetella | | | |
| | bronchiseptica | | | |
| STPH17 | Heavy chain variable region, | F628 | U.S. Pat. No. 8,912,314 | 26611 |
| | Staphylococci such as S. aureus and S. | | SEQ ID NO: 58 | |
| | epidermidis, E. coli such as E. | | | |
| | coli strains O157:H7 and | | | |
| | CFT073, Yersinia pestis, Yersinia | | | |
| | entercolitica, Xanthomonas axonopodis, | | | |
| | Pseudomonas fluorescens (all of which | | | |
| | are sequenced species with complete | | | |
| | pgaABCD loci), and Actinobacillus | | | |
| | actinomycetemcomitans (AA), | | | |
| | Actinobacillus pleuropneumoniae (Ap), | | | |
| | Ralstonia solanacearum (e.g., megaplasmid | | | |
| | form), Bordetella pertussis, Bordetella | | | |
| | parapertussis and Bordetella | | | |
| | bronchiseptica | | | |
| STPH18 | Heavy chain variable region, | F598 | U.S. Pat. No. 8,912,314 | 26612 |
| | Staphylococci such as S. aureus and S. | | SEQ ID NO: 1 | |
| | epidermidis, E. coli such as E. | | | |
| | coli strains O157:H7 and | | | |
| | CFT073, Yersinia pestis, Yersinia | | | |
| | entercolitica, Xanthomonas axonopodis, | | | |
| | Pseudomonas fluorescens (all of which | | | |
| | are sequenced species with complete | | | |
| | pgaABCD loci), and Actinobacillus | | | |
| | actinomycetemcomitans (AA), | | | |
| | Actinobacillus pleuropneumoniae (Ap), | | | |
| | Ralstonia solanacearum (e.g., megaplasmid | | | |
| | form), Bordetella pertussis, Bordetella | | | |
| | parapertussis and Bordetella | | | |
| | bronchiseptica | | | |
| STPH19 | Heavy chain variable region, | 108-3BVH- | U.S. Pat. No. 8,475,798 | 26613 |
| | Staphylococcus epidermidis | Hu | SEQ ID NO: 34 | |
| STPH20 | Heavy chain, MRSA, MSSA | 2B2 | U.S. Pat. No. 8,735,554 | 26614 |
| | | | SEQ ID NO: 3 | |
| STPH21 | Heavy chain, MRSA, MSSA | 2G7 | U.S. Pat. No. 8,735,554 | 26615 |
| | | | SEQ ID NO: 5 | |
| STPH22 | Heavy chain, MRSA, MSSA | 3B12 | U.S. Pat. No. 8,735,554 | 26616 |
| | | | SEQ ID NO: 7 | |
| STPH23 | Heavy chain, S. aureus | DF1.1 | U.S. Pat. No. 8,715,673 | 26617 |
| | | | SEQ ID NO: 2 | |
| STPH24 | Heavy chain, S. aureus | DF1 | U.S. Pat. No. 8,715,673 | 26618 |
| | | | SEQ ID NO: 4 | |
| STPH25 | Heavy chain, S. aureus | DF2 | U.S. Pat. No. 8,715,673 | 26619 |
| | | | SEQ ID NO: 35 | |
| STPH26 | Heavy chain, S. aureus | DF3 | U.S. Pat. No. 8,715,673 | 26620 |
| | | | SEQ ID NO: 36 | |
| STPH27 | Heavy chain, S. aureus | DF4 | U.S. Pat. No. 8,715,673 | 26621 |
| | | | SEQ ID NO: 37 | |
| STPH28 | Heavy chain, S. aureus | DF5 | U.S. Pat. No. 8,715,673 | 26622 |
| | | | SEQ ID NO: 38 | |
| STPH29 | Heavy chain, S. aureus | DF6 | U.S. Pat. No. 8,715,673 | 26623 |
| | | | SEQ ID NO: 39 | |
| STPH30 | Heavy chain, S. aureus | DF7 | U.S. Pat. No. 8,715,673 | 26624 |
| | | | SEQ ID NO: 40 | |
| STPH31 | Heavy chain, S. aureus | DF8 | U.S. Pat. No. 8,715,673 | 26625 |
| | | | SEQ ID NO: 41 | |
| STPH32 | Heavy chain, S. aureus | DF9 | U.S. Pat. No. 8,715,673 | 26626 |
| | | | SEQ ID NO: 42 | |
| STPH33 | Heavy chain, S. aureus | DF10 | U.S. Pat. No. 8,715,673 | 26627 |
| | | | SEQ ID NO: 43 | |
| STPH34 | Heavy chain, S. aureus | DF11 | U.S. Pat. No. 8,715,673 | 26628 |
| | | | SEQ ID NO: 44 | |
| STPH35 | Heavy chain, S. aureus | DF12 | U.S. Pat. No. 8,715,673 | 26629 |
| | | | SEQ ID NO: 45 | |
| STPH36 | Heavy chain, S. aureus | DF13 | U.S. Pat. No. 8,715,673 | 26630 |
| | | | SEQ ID NO: 46 | |
| STPH37 | Heavy chain, S. aureus | DF14 | U.S. Pat. No. 8,715,673 | 26631 |
| | | | SEQ ID NO: 47 | |
| STPH38 | Heavy chain, S. aureus | DF15 | U.S. Pat. No. 8,715,673 | 26632 |
| | | | SEQ ID NO: 48 | |
| STPH39 | Heavy chain, S. aureus | DF16 | U.S. Pat. No. 8,715,673 | 26633 |
| | | | SEQ ID NO: 49 | |
| STPH40 | Heavy chain, S. aureus | DF17 | U.S. Pat. No. 8,715,673 | 26634 |
| | | | SEQ ID NO: 50 | |
| STPH41 | Heavy chain, S. aureus | DF18 | U.S. Pat. No. 8,715,673 | 26635 |
| | | | SEQ ID NO: 51 | |
| STPH42 | Heavy chain, S. aureus | DF19 | U.S. Pat. No. 8,715,673 | 26636 |
| | | | SEQ ID NO: 52 | |
| STPH43 | Heavy chain, S. aureus | DF20 | U.S. Pat. No. 8,715,673 | 26637 |
| | | | SEQ ID NO: 53 | |
| STPH44 | Heavy chain, S. aureus and S. | CR2430 | U.S. Pat. No. 8,460,666 | 26638 |
| | epidermidis | | SEQ ID NO: 26 | |
| STPH45 | Heavy chain, S. aureus and S. | CR5132 | U.S. Pat. No. 8,460,666 | 26639 |
| | epidermidis | | SEQ ID NO: 28 | |
| STPH46 | Heavy chain, S. aureus and S. | CR5133 | U.S. Pat. No. 8,460,666 | 26640 |
| | epidermidis | | SEQ ID NO: 30 | |
| STPH47 | Heavy chain, S. aureus and S. | CR6166 | U.S. Pat. No. 8,460,666 | 26641 |
| | epidermidis | | SEQ ID NO: 117 | |
| STPH48 | Heavy chain, S. aureus and S. | CR6171 | U.S. Pat. No. 8,460,666 | 26642 |
| | epidermidis | | SEQ ID NO: 119 | |
| STPH49 | Heavy chain, S. aureus and S. | CR6176 | U.S. Pat. No. 8,460,666 | 26643 |
| | epidermidis | | SEQ ID NO: 121 | |
| STPH50 | Heavy chain, S. aureus and S. | CR6187 | U.S. Pat. No. 8,460,666 | 26644 |
| | epidermidis | | SEQ ID NO: 123 | |
| STPH51 | Heavy chain, S. aureus and S. | CR6193 | U.S. Pat. No. 8,460,666 | 26645 |
| | epidermidis | | SEQ ID NO: 125 | |
| STPH52 | Heavy chain, S. aureus and S. | CR6249 | U.S. Pat. No. 8,460,666 | 26646 |
| | epidermidis | | SEQ ID NO: 127 | |
| STPH53 | Heavy chain, S. aureus and S. | CR6273 | U.S. Pat. No. 8,460,666 | 26647 |
| | epidermidis | | SEQ ID NO: 129 | |
| STPH54 | Heavy chain, S. aureus and S. | CR6389 | U.S. Pat. No. 8,460,666 | 26648 |
| | epidermidis | | SEQ ID NO: 131 | |
| STPH55 | Heavy chain, S. aureus and S. | CR6403 | U.S. Pat. No. 8,460,666 | 26649 |
| | epidermidis | | SEQ ID NO: 133 | |
| STPH56 | Heavy chain, S. aureus and S. | CR6406 | U.S. Pat. No. 8,460,666 | 26650 |
| | epidermidis | | SEQ ID NO: 135 | |
| STPH57 | Heavy chain, S. aureus and S. | CR6410 | U.S. Pat. No. 8,460,666 | 26651 |
| | epidermidis | | SEQ ID NO: 137 | |
| STPH58 | Heavy chain, S. aureus and S. | CR6446 | U.S. Pat. No. 8,460,666 | 26652 |
| | epidermidis | | SEQ ID NO: 139 | |
| STPH59 | Heavy chain, S. aureus and S. | CR6450 | U.S. Pat. No. 8,460,666 | 26653 |
| | epidermidis | | SEQ ID NO: 141 | |
| STPH60 | Heavy chain, S. aureus and S. | CR6452 | U.S. Pat. No. 8,460,666 | 26654 |
| | epidermidis | | SEQ ID NO: 143 | |
| STPH61 | Heavy chain, S. aureus and S. | CR6453 | U.S. Pat. No. 8,460,666 | 26655 |
| | epidermidis | | SEQ ID NO: 145 | |
| STPH62 | Heavy chain, S. aureus and S. | CR6464 | U.S. Pat. No. 8,460,666 | 26656 |
| | epidermidis | | SEQ ID NO: 147 | |
| STPH63 | Heavy chain, S. aureus and S. | CR6471 | U.S. Pat. No. 8,460,666 | 26657 |
| | epidermidis | | SEQ ID NO: 149 | |
| STPH64 | Heavy chain, S. aureus and S. | CR6516 | U.S. Pat. No. 8,460,666 | 26658 |
| | epidermidis | | SEQ ID NO: 151 | |
| STPH65 | Heavy chain, S. aureus and S. | CR6517 | U.S. Pat. No. 8,460,666 | 26659 |
| | epidermidis | | SEQ ID NO: 153 | |
| STPH66 | Heavy chain, S. aureus and S. | CR6526 | U.S. Pat. No. 8,460,666 | 26660 |
| | epidermidis | | SEQ ID NO: 155 | |
| STPH67 | Heavy chain, S. aureus and S. | CR6528 | U.S. Pat. No. 8,460,666 | 26661 |
| | epidermidis | | SEQ ID NO: 157 | |
| STPH68 | Heavy chain, S. aureus and S. | CR6531 | U.S. Pat. No. 8,460,666 | 26662 |
| | epidermidis | | SEQ ID NO: 159 | |
| STPH69 | Heavy chain, S. aureus and S. | CR6533 | U.S. Pat. No. 8,460,666 | 26663 |
| | epidermidis | | SEQ ID NO: 161 | |
| STPH70 | Heavy chain, S. aureus and S. | CR6536 | U.S. Pat. No. 8,460,666 | 26664 |
| | epidermidis | | SEQ ID NO: 163 | |
| STPH71 | Heavy chain, S. aureus and S. | CR6537 | U.S. Pat. No. 8,460,666 | 26665 |
| | epidermidis | | SEQ ID NO: 165 | |
| STPH72 | Heavy chain, S. aureus and S. | CR6538 | U.S. Pat. No. 8,460,666 | 26666 |
| | epidermidis | | SEQ ID NO: 167 | |
| STPH73 | Heavy chain, S. aureus and S. | CR6540 | U.S. Pat. No. 8,460,666 | 26667 |
| | epidermidis | | SEQ ID NO: 169 | |
| STPH74 | Heavy chain, S. aureus and S. | CR6544 | U.S. Pat. No. 8,460,666 | 26668 |
| | epidermidis | | SEQ ID NO: 171 | |
| STPH75 | Heavy chain, S. aureus and S. | CR6566 | U.S. Pat. No. 8,460,666 | 26669 |
| | epidermidis | | SEQ ID NO: 173 | |
| STPH76 | Heavy chain, S. aureus and S. | CR6625 | U.S. Pat. No. 8,460,666 | 26670 |
| | epidermidis | | SEQ ID NO: 175 | |
| STPH77 | Heavy chain, S. aureus, Enterococcus | CR5140 | U.S. Pat. No. 8,628,776 | 26671 |
| | | | SEQ ID NO: 395 | |
| STPH78 | Heavy chain, S. aureus, Enterococcus | CR5159 | U.S. Pat. No. 8,628,776 | 26672 |
| | | | SEQ ID NO: 82 | |
| STPH79 | Heavy chain, S. aureus, Enterococcus | CR5179 | U.S. Pat. No. 8,628,776 | 26673 |
| | | | SEQ ID NO: 399 | |
| STPH80 | Heavy chain, S. aureus, Enterococcus | CR6016 | U.S. Pat. No. 8,628,776 | 26674 |
| | | | SEQ ID NO: 88 | |
| STPH81 | Heavy chain, S. aureus, Enterococcus | CR6049 | U.S. Pat. No. 8,628,776 | 26675 |
| | | | SEQ ID NO: 92 | |
| STPH82 | Heavy chain, S. aureus. Enterococcus | CR6071 | U.S. Pat. No. 8,628,776 | 26676 |
| | | | SEQ ID NO: 94 | |
| STPH83 | Heavy chain, S. aureus, Enterococcus | CR6078 | U.S. Pat. No. 8,628,776 | 26677 |
| | | | SEQ ID NO: 96 | |
| STPH84 | Heavy chain, S. aureus, Enterococcus | CR6086 | U.S. Pat. No. 8,628,776 | 26678 |
| | | | SEQ ID NO: 407 | |
| STPH85 | Heavy chain, S. aureus, Enterococcus | CR6089 | U.S. Pat. No. 8,628,776 | 26679 |
| | | | SEQ ID NO: 213 | |
| STPH86 | Heavy chain, S. aureus, Enterococcus | CR6191 | U.S. Pat. No. 8,628,776 | 26680 |
| | | | SEQ ID NO: 411 | |
| STPH87 | Heavy chain, S. aureus, Enterococcus | CR6198 | U.S. Pat. No. 8,628,776 | 26681 |
| | | | SEQ ID NO: 415 | |
| STPH88 | Heavy chain, S. aureus, Enterococcus | CR6242 | U.S. Pat. No. 8,628,776 | 26682 |
| | | | SEQ ID NO: 417 | |
| STPH89 | Heavy chain, S. aureus, Enterococcus | CR6252 | U.S. Pat. No. 8,628,776 | 26683 |
| | | | SEQ ID NO: 100 | |
| STPH90 | Heavy chain, S. aureus, Enterococcus | CR6389 | U.S. Pat. No. 8,628,776 | 26684 |
| | | | SEQ ID NO: 423 | |
| STPH91 | Heavy chain, S. aureus, Enterococcus | CR6402 | U.S. Pat. No. 8,628,776 | 26685 |
| | | | SEQ ID NO: 427 | |
| STPH92 | Heavy chain, S. aureus, Enterococcus | CR6415 | U.S. Pat. No. 8,628,776 | 26686 |
| | | | SEQ ID NO: 431 | |
| STPH93 | Heavy chain, S. aureus, Enterococcus | CR6429 | U.S. Pat. No. 8,628,776 | 26687 |
| | | | SEQ ID NO: 435 | |
| STPH94 | Heavy chain, S. aureus, Enterococcus | CR5140 | U.S. Pat. No. 8,628,776 | 26688 |
| | | | SEQ ID NO: 439 | |
| STPH95 | Heavy chain, S. aureus, Enterococcus | CR5159 | U.S. Pat. No. 8,628,776 | 26689 |
| | | | SEQ ID NO: 102 | |
| STPH96 | Heavy chain, S. aureus, Enterococcus | CR5179 | U.S. Pat. No. 8,628,776 | 26690 |
| | | | SEQ ID NO: 443 | |
| STPH97 | Heavy chain, S. aureus, Enterococcus | CR6016 | U.S. Pat. No. 8,628,776 | 26691 |
| | | | SEQ ID NO: 108 | |
| STPH98 | Heavy chain, S. aureus, Enterococcus | CR6049 | U.S. Pat. No. 8,628,776 | 26692 |
| | | | SEQ ID NO: 112 | |
| STPH99 | Heavy chain, S. aureus, Enterococcus | CR6071 | U.S. Pat. No. 8,628,776 | 26693 |
| | | | SEQ ID NO: 114 | |
| STPH100 | Heavy chain, S. aureus, Enterococcus | CR6078 | U.S. Pat. No. 8,628,776 | 26694 |
| | | | SEQ ID NO: 116 | |
| STPH101 | Heavy chain, S. aureus, Enterococcus | CR6086 | U.S. Pat. No. 8,628,776 | 26695 |
| | | | SEQ ID NO: 451 | |
| STPH102 | Heavy chain, S. aureus, Enterococcus | CR6089 | U.S. Pat. No. 8,628,776 | 26696 |
| | | | SEQ ID NO: 217 | |
| STPH103 | Heavy chain, S. aureus, Enterococcus | CR6191 | U.S. Pat. No. 8,628,776 | 26697 |
| | | | SEQ ID NO: 455 | |
| STPH104 | Heavy chain, S. aureus, Enterococcus | CR6198 | U.S. Pat. No. 8,628,776 | 26698 |
| | | | SEQ ID NO: 459 | |
| STPH105 | Heavy chain, S. aureus, Enterococcus | CR6242 | U.S. Pat. No. 8,628,776 | 26699 |
| | | | SEQ ID NO: 461 | |
| STPH106 | Heavy chain, S. aureus, Enterococcus | CR6252 | U.S. Pat. No. 8,628,776 | 26700 |
| | | | SEQ ID NO: 120 | |
| STPH107 | Heavy chain, S. aureus, Enterococcus | CR6389 | U.S. Pat. No. 8,628,776 | 26701 |
| | | | SEQ ID NO: 467 | |
| STPH108 | Heavy chain, S. aureus, Enterococcus | CR6402 | U.S. Pat. No. 8,628,776 | 26702 |
| | | | SEQ ID NO: 471 | |
| STPH109 | Heavy chain, S. aureus, Enterococcus | CR6415 | U.S. Pat. No. 8,628,776 | 26703 |
| | | | SEQ ID NO: 475 | |
| STPH110 | Heavy chain, S. aureus, Enterococcus | CR6429 | U.S. Pat. No. 8,628,776 | 26704 |
| | | | SEQ ID NO: 479 | |
| STPH111 | Heavy chain, S. aureus, S. epidermidis, | F1 antibody | U.S. Pat. No. 8,617,556 | 26705 |
| | S. caprae, S. saprophyticus, S. capitis, or | variant | SEQ ID NO: 7 | |
| | methicillin-resistant S. aureus (MRSA) | | | |
| STPH112 | Heavy chain, S. aureus, S. epidermidis, | F1 antibody | U.S. Pat. No. 8,617,556 | 26706 |
| | S. caprae, S. saprophyticus, S. capitis, or | variant | SEQ ID NO: 9 | |
| | methicillin-resistant S. aureus (MRSA) | | | |
| STPH113 | Heavy chain, S. aureus, S. epidermidis, | rF1 | U.S. Pat. No. 8,617,556 | 26707 |
| | S. caprae, S. saprophyticus, S. capitis, or | | SEQ ID NO: 55 | |
| | methicillin-resistant S. aureus (MRSA) | | | |
| STPH114 | Heavy chain, S. aureus, S. epidermidis, | rF1 A114C | U.S. Pat. No. 8,617,556 | 26708 |
| | S. caprae, S. saprophyticus, S. capitis, or | | SEQ ID NO: 56 | |
| | methicillin-resistant S. aureus (MRSA) | | | |
| STPH115 | Heavy chain, S. aureus, S. epidermidis, | rF1 | U.S. Pat. No. 8,617,556 | 26709 |
| | S. caprae, S. saprophyticus, S. capitis, or | | SEQ ID NO: 63 | |
| | methicillin-resistant S. aureus (MRSA) | | | |
| STPH116 | Heavy chain, S. aureus, S. epidermidis, | rF1 A114C | U.S. Pat. No. 8,617,556 | 26710 |
| | S. caprae, S. saprophyticus, S. capitis, or | | SEQ ID NO: 62 | |
| | methicillin-resistant S. aureus (MRSA) | | | |
| STPH117 | Light chain | | U.S. Pat. No. 8,609,102 | 26711 |
| | | | SEQ ID NO: 4 | |
| STPH118 | Light chain variable region, S. aureus | | U.S. Pat. No. 8,609,102 | 26712 |
| | | | SEQ ID NO: 8 | |
| STPH119 | Light chain variable region, S. aureus or | SAR279356 | U.S. Pat. No. 7,786,255 | 26713 |
| | S. epidermidis, E. coli, Yersinia | | SEQ ID NO: 2 | |
| | pestis (Y. pestis), Y. entercolitica, | | | |
| | Xanthomnonas axonopodis (X. | | | |
| | axonopodis), Pseudonmonas | | | |
| | fuorescerns (P. | | | |
| | fluorescens), Actinobacillus | | | |
| | actinomycetemcomitans (A. | | | |
| | actinomycetemcomitans), A. | | | |
| | pleuropneumoniae, Ralstonia | | | |
| | solanacearum (R. | | | |
| | solanacearum), Bordetella pertussis (B. | | | |
| | pertussis), B. parapertussis or B. | | | |
| | bronchiseptica | | | |
| STPH120 | Light chain variable region, S. aureus or | SAR279356 | US20110002932 SEQ ID | 26714 |
| | S. epidermidis, E. coli, Yersinia | | NO: 2 | |
| | pestis (Y. pestis), Y. entercolitica, | | | |
| | Xanthomnonas axonopodis (X. | | | |
| | axonopodis), Pseudonmonas | | | |
| | fuorescerns (P. | | | |
| | fluorescens), Actinobacillus | | | |
| | actinomycetemcomitans (A. | | | |
| | actinomycetemcomitans), A. | | | |
| | pleuropneumoniae, Ralstonia | | | |
| | solanacearum (R. | | | |
| | solanacearum), Bordetella pertussis (B. | | | |
| | pertussis), B. parapertussis or B. | | | |
| | bronchiseptica | | | |
| STPH121 | Light chain variable region, S. | 108-1 | U.S. Pat. No. 8,475,798 | 26715 |
| | epidermidis | | SEQ ID NO: 16 | |
| STPH122 | Light chain variable region, S. | 108-36 | U.S. Pat. No. 8,475,798 | 26716 |
| | epidermidis | | SEQ ID NO: 20 | |
| STPH123 | Light chain variable region, S. | 110-15 | U.S. Pat. No. 8,475,798 | 26717 |
| | epidermidis | | SEQ ID NO: 24 | |
| STPH124 | Light chain variable region, S. | 108-1VL- | U.S. Pat. No. 8,475,798 | 26718 |
| | epidermidis | Hu | SEQ ID NO: 27 | |
| STPH125 | Light chain variable region, S. | 108-36VL- | U.S. Pat. No. 8,475,798 | 26719 |
| | epidermidis | Hu | SEQ ID NO: 29 | |
| STPH126 | Light chain variable region, S. | 110-15VL- | U.S. Pat. No. 8,475,798 | 26720 |
| | epidermidis | Hu | SEQ ID NO: 31 | |
| STPH127 | Light chain variable region, | Pagibaximab | U.S. Pat. No. 8,372,958 | 26721 |
| | Staphylococcal sepsis | | SEQ ID NO: 89 | |
| STPH128 | Light chain variable region, | Pagibaximab | U.S. Pat. No. 8,372,958 | 26722 |
| | Staphylococcal sepsis | | SEQ ID NO: 10 | |
| STPH129 | Light chain variable region, | Pagibaximab | U.S. Pat. No. 8,372,958 | 26723 |
| | Staphylococcal sepsis | | SEQ ID NO: 16 | |
| STPH130 | Light chain variable region, | F598 | U.S. Pat. No. 8,912,314 | 26724 |
| | Staphylococci such as S. aureus and S. | | SEQ ID NO: 2 | |
| | epidermidis, E. coli such as E. | | | |
| | coli strains O157:H7 and | | | |
| | CFT073, Yersinia pestis, Yersinia | | | |
| | entercolitica, Xanthomonas axonopodis, | | | |
| | Pseudomonas fluorescens (all of which | | | |
| | are sequenced species with complete | | | |
| | pgaABCD loci), and Actinobacillus | | | |
| | actinomycetemcomitans (AA), | | | |
| | Actinobacillus pleuropneumoniae (Ap), | | | |
| | Ralstonia solanacearum (e.g., megaplasmid | | | |
| | form), Bordetella pertussis, Bordetella | | | |
| | parapertussis and Bordetella | | | |
| | bronchiseptica | | | |
| STPH131 | Light chain variable region, | F628 | U.S. Pat. No. 8,912,314 | 26725 |
| | Staphylococci such as S. aureus and S. | | SEQ ID NO: 4 | |
| | epidermidis, E. coli such as E. | | | |
| | coli strains O157: H7 and | | | |
| | CFT073, Yersinia pestis, Yersinia | | | |
| | entercolitica, Xanthomonas axonopodis, | | | |
| | Pseudomonas fluorescens (all of which | | | |
| | are sequenced species with complete | | | |
| | pgaABCD loci), and Actinobacillus | | | |
| | actinomycetemcomitans (AA), | | | |
| | Actinobacillus pleuropneumoniae (Ap), | | | |
| | Ralstonia solanacearum (e.g., megaplasmid | | | |
| | form), Bordetella pertussis, Bordetella | | | |
| | parapertussis and Bordetella | | | |
| | bronchiseptica | | | |
| STPH132 | Light chain variable region, | F630 | U.S. Pat. No. 8,912,314 | 26726 |
| | Staphylococci such as S. aureus and S. | | SEQ ID NO: 6 | |
| | epidermidis, E. coli such as E. | | | |
| | coli strains O157:H7 and | | | |
| | CFT073, Yersinia pestis, Yersinia | | | |
| | entercolitica, Xanthomonas axonopodis, | | | |
| | Pseudomonas fluorescens (all of which | | | |
| | are sequenced species with complete | | | |
| | pgaABCD loci), and Actinobacillus | | | |
| | actinomycetemcomitans (AA), | | | |
| | Actinobacillus pleuropneumoniae (Ap), | | | |
| | Ralstonia solanacearum (e.g., megaplasmid | | | |
| | form), Bordetella pertussis, Bordetella | | | |
| | parapertussis and Bordetella | | | |
| | bronchiseptica | | | |
| STPH133 | Light chain variable region, | F598 | U.S. Pat. No. 8,912,314 | 26727 |
| | Staphylococci such as S. aureus and S. | | SEQ ID NO: 57 | |
| | epidermidis, E. coli such as E. | | | |
| | coli strains O157:H7 and | | | |
| | CFT073, Yersinia pestis, Yersinia | | | |
| | entercolitica, Xanthomonas axonopodis, | | | |
| | Pseudomonas fluorescens (all of which | | | |
| | are sequenced species with complete | | | |
| | pgaABCD loci), and Actinobacillus | | | |
| | actinomycetemcomitans (AA), | | | |
| | Actinobacillus pleuropneumoniae (Ap), | | | |
| | Ralstonia solanacearum (e.g., megaplasmid | | | |
| | form), Bordetella pertussis, Bordetella | | | |
| | parapertussis and Bordetella | | | |
| | bronchiseptica | | | |
| STPH134 | Light chain variable region, | F630 | U.S. Pat. No. 8,912,314 | 26728 |
| | Staphylococci such as S. aureus and S. | | SEQ ID NO: 60 | |
| | epidermidis, E. coli such as E. | | | |
| | coli strains O157:H7 and | | | |
| | CFT073, Yersinia pestis, Yersinia | | | |
| | entercolitica, Xanthomonas axonopodis, | | | |
| | Pseudomonas fluorescens (all of which | | | |
| | are sequenced species with complete | | | |
| | pgaABCD loci), and Actinobacillus | | | |
| | actinomycetemcomitans (AA), | | | |
| | Actinobacillus pleuropneumoniae (Ap), | | | |
| | Ralstonia solanacearum (e.g., megaplasmid | | | |
| | form), Bordetella pertussis, Bordetella | | | |
| | parapertussis and Bordetella | | | |
| | bronchiseptica | | | |
| STPH135 | Light chain, MRSA, MSSA | 2B2 | U.S. Pat. No. 8,735,554 | 26729 |
| | | | SEQ ID NO: 2 | |
| STPH136 | Light chain. MRSA, MSSA | 2G7 | U.S. Pat. No. 8,735,554 | 26730 |
| | | | SEQ ID NO: 4 | |
| STPH137 | Light chain, MRSA, MSSA | 3B12 | U.S. Pat. No. 8,735,554 | 26731 |
| | | | SEQ ID NO: 6 | |
| STPH138 | Light chain, S. aureus | DF1.1 | U.S. Pat. No. 8,715,673 | 26732 |
| | | | SEQ ID NO: 1 | |
| STPH139 | Light chain, S. aureus | DF1-DF20 | U.S. Pat. No. 8,715,673 | 26733 |
| | | | SEQ ID NO: 3 | |
| STPH140 | Light chain, S. aureus and S. epidermidis | CR2430 | U.S. Pat. No. 8,460,666 | 26734 |
| | | | SEQ ID NO: 32 | |
| STPH141 | Light chain, S. aureus and S. epidermidis | CR5132 | U.S. Pat. No. 8,460,666 | 26735 |
| | | | SEQ ID NO: 34 | |
| STPH142 | Light chain, S. aureus and S. epidermidis | CR5133 | U.S. Pat. No. 8,460,666 | 26736 |
| | | | SEQ ID NO: 36 | |
| STPH143 | Light chain, S. aureus and S. epidermidis | CR6166 | U.S. Pat. No. 8,460,666 | 26737 |
| | | | SEQ ID NO: 177 | |
| STPH144 | Light chain, S. aureus and S. epidermidis | CR6171 | U.S. Pat. No. 8,460,666 | 26738 |
| | | | SEQ ID NO: 179 | |
| STPH145 | Light chain, S. aureus and S. epidermidis | CR6176 | U.S. Pat. No. 8,460,666 | 26739 |
| | | | SEQ ID NO: 181 | |
| STPH146 | Light chain, S. aureus and S. epidermidis | CR6187 | U.S. Pat. No. 8,460,666 | 26740 |
| | | | SEQ ID NO: 183 | |
| STPH147 | Light chain, S. aureus and S. epidermidis | CR6193 | U.S. Pat. No. 8,460,666 | 26741 |
| | | | SEQ ID NO: 185 | |
| STPH148 | Light chain, S. aureus and S. epidermidis | CR6249 | U.S. Pat. No. 8,460,666 | 26742 |
| | | | SEQ ID NO: 187 | |
| STPH149 | Light chain, S. aureus and S. epidermidis | CR6273 | U.S. Pat. No. 8,460,666 | 26743 |
| | | | SEQ ID NO: 189 | |
| STPH150 | Light chain, S. aureus and S. epidermidis | CR6389 | U.S. Pat. No. 8,460,666 | 26744 |
| | | | SEQ ID NO: 191 | |
| STPH151 | Light chain, S. aureus and S. epidermidis | CR6403 | U.S. Pat. No. 8,460,666 | 26745 |
| | | | SEQ ID NO: 193 | |
| STPH152 | Light chain, S. aureus and S. epidermidis | CR6406 | U.S. Pat. No. 8,460,666 | 26746 |
| | | | SEQ ID NO: 195 | |
| STPH153 | Light chain, S. aureus and S. epidermidis | CR6410 | U.S. Pat. No. 8,460,666 | 26747 |
| | | | SEQ ID NO: 197 | |
| STPH154 | Light chain, S. aureus and S. epidermidis | CR6446 | U.S. Pat. No. 8,460,666 | 26748 |
| | | | SEQ ID NO: 199 | |
| STPH155 | Light chain, S. aureus and S. epidermidis | CR6450 | U.S. Pat. No. 8,460,666 | 26749 |
| | | | SEQ ID NO: 201 | |
| STPH156 | Light chain, S. aureus and S. epidermidis | CR6452 | U.S. Pat. No. 8,460,666 | 26750 |
| | | | SEQ ID NO: 203 | |
| STPH157 | Light chain, S. aureus and S. epidermidis | CR6453 | U.S. Pat. No. 8,460,666 | 26751 |
| | | | SEQ ID NO: 205 | |
| STPH158 | Light chain, S. aureus and S. epidermidis | CR6464 | U.S. Pat. No. 8,460,666 | 26752 |
| | | | SEQ ID NO: 207 | |
| STPH159 | Light chain, S. aureus and S. epidermidis | CR6471 | U.S. Pat. No. 8,460,666 | 26753 |
| | | | SEQ ID NO: 209 | |
| STPH160 | Light chain, S. aureus and S. epidermidis | CR6516 | U.S. Pat. No. 8,460,666 | 26754 |
| | | | SEQ ID NO: 211 | |
| STPH161 | Light chain, S. aureus and S. epidermidis | CR6517 | U.S. Pat. No. 8,460,666 | 26755 |
| | | | SEQ ID NO: 213 | |
| STPH162 | Light chain, S. aureus and S. epidermidis | CR6526 | U.S. Pat. No. 8,460,666 | 26756 |
| | | | SEQ ID NO: 215 | |
| STPH163 | Light chain, S. aureus and S. epidermidis | CR6528 | U.S. Pat. No. 8,460,666 | 26757 |
| | | | SEQ ID NO: 217 | |
| STPH164 | Light chain, S. aureus and S. epidermidis | CR6531 | U.S. Pat. No. 8,460,666 | 26758 |
| | | | SEQ ID NO: 219 | |
| STPH165 | Light chain, S. aureus and S. epidermidis | CR6533 | U.S. Pat. No. 8,460,666 | 26759 |
| | | | SEQ ID NO: 221 | |
| STPH166 | Light chain, S. aureus and S. epidermidis | CR6536 | U.S. Pat. No. 8,460,666 | 26760 |
| | | | SEQ ID NO: 223 | |
| STPH167 | Light chain, S. aureus and S. epidermidis | CR6537 | U.S. Pat. No. 8,460,666 | 26761 |
| | | | SEQ ID NO: 225 | |
| STPH168 | Light chain, S. aureus and S. epidermidis | CR6538 | U.S. Pat. No. 8,460,666 | 26762 |
| | | | SEQ ID NO: 227 | |
| STPH169 | Light chain, S. aureus and S. epidermidis | CR6540 | U.S. Pat. No. 8,460,666 | 26763 |
| | | | SEQ ID NO: 229 | |
| STPH170 | Light chain, S. aureus and S. epidermidis | CR6544 | U.S. Pat. No. 8,460,666 | 26764 |
| | | | SEQ ID NO: 231 | |
| STPH171 | Light chain, S. aureus and S. epidermidis | CR6566 | U.S. Pat. No. 8,460,666 | 26765 |
| | | | SEQ ID NO: 233 | |
| STPH172 | Light chain, S. aureus and S. epidermidis | CR6625 | U.S. Pat. No. 8,460,666 | 26766 |
| | | | SEQ ID NO: 235 | |
| STPH173 | Light chain, S. aureus, Enterococcus | CR6157 | U.S. Pat. No. 8,628,776 | 26767 |
| | | | SEQ ID NO: 397 | |
| STPH174 | Light chain, S. aureus, Enterococcus | CR5166 | U.S. Pat. No. 8,628,776 | 26768 |
| | | | SEQ ID NO: 84 | |
| STPH175 | Light chain, S. aureus, Enterococcus | CR5187 | U.S. Pat. No. 8,628,776 | 26769 |
| | | | SEQ ID NO: 86 | |
| STPH176 | Light chain, S. aureus, Enterococcus | CR6043 | U.S. Pat. No. 8,628,776 | 26770 |
| | | | SEQ ID NO: 90 | |
| STPH177 | Light chain, S. aureus, Enterococcus | CR6050 | U.S. Pat. No. 8,628,776 | 26771 |
| | | | SEQ ID NO: 401 | |
| STPH178 | Light chain, S. aureus, Enterococcus | CR6077 | U.S. Pat. No. 8,628,776 | 26772 |
| | | | SEQ ID NO: 403 | |
| STPH179 | Light chain, S. aureus, Enterococcus | CR6079 | U.S. Pat. No. 8,628,776 | 26773 |
| | | | SEQ ID NO: 405 | |
| STPH180 | Light chain, S. aureus, Enterococcus | CR6087 | U.S. Pat. No. 8,628,776 | 26774 |
| | | | SEQ ID NO: 211 | |
| STPH181 | Light chain, S. aureus, Enterococcus | CR6092 | U.S. Pat. No. 8,628,776 | 26775 |
| | | | SEQ ID NO: 409 | |
| STPH182 | Light chain, S. aureus, Enterococcus | CR6195 | U.S. Pat. No. 8,628,776 | 26776 |
| | | | SEQ ID NO: 413 | |
| STPH183 | Light chain, S. aureus, Enterococcus | CR6241 | U.S. Pat. No. 8,628,776 | 26777 |
| | | | SEQ ID NO: 98 | |
| STPH184 | Light chain, S. aureus, Enterococcus | CR6246 | U.S. Pat. No. 8,628,776 | 26778 |
| | | | SEQ ID NO: 419 | |
| STPH185 | Light chain, S. aureus, Enterococcus | CR6388 | U.S. Pat. No. 8,628,776 | 26779 |
| | | | SEQ ID NO: 421 | |
| STPH186 | Light chain, S. aureus, Enterococcus | CR6396 | U.S. Pat. No. 8,628,776 | 26780 |
| | | | SEQ ID NO: 425 | |
| STPH187 | Light chain, S. aureus, Enterococcus | CR6409 | U.S. Pat. No. 8,628,776 | 26781 |
| | | | SEQ ID NO: 429 | |
| STPH188 | Light chain, S. aureus, Enterococcus | CR6421 | U.S. Pat. No. 8,628,776 | 26782 |
| | | | SEQ ID NO: 433 | |
| STPH189 | Light chain, S. aureus, Enterococcus | CR6432 | U.S. Pat. No. 8,628,776 | 26783 |
| | | | SEQ ID NO: 437 | |
| STPH190 | Light chain, S. aureus, Enterococcus | CR5157 | U.S. Pat. No. 8,628,776 | 26784 |
| | | | SEQ ID NO: 441 | |
| STPH191 | Light chain, S. aureus, Enterococcus | CR5166 | U.S. Pat. No. 8,628,776 | 26785 |
| | | | SEQ ID NO: 104 | |
| STPH192 | Light chain, S. aureus, Enterococcus | CR5187 | U.S. Pat. No. 8,628,776 | 26786 |
| | | | SEQ ID NO: 106 | |
| STPH193 | Light chain, S. aureus, Enterococcus | CR6043 | U.S. Pat. No. 8,628,776 | 26787 |
| | | | SEQ ID NO: 110 | |
| STPH194 | Light chain, S. aureus, Enterococcus | CR6050 | U.S. Pat. No. 8,628,776 | 26788 |
| | | | SEQ ID NO: 445 | |
| STPH195 | Light chain, S. aureus, Enterococcus | CR6077 | U.S. Pat. No. 8,628,776 | 26789 |
| | | | SEQ ID NO: 447 | |
| STPH196 | Light chain, S. aureus, Enterococcus | CR6079 | U.S. Pat. No. 8,628,776 | 26790 |
| | | | SEQ ID NO: 449 | |
| STPH197 | Light chain, S. aureus, Enterococcus | CR6087 | U.S. Pat. No. 8,628,776 | 26791 |
| | | | SEQ ID NO: 215 | |
| STPH198 | Light chain, S. aureus, Enterococcus | CR6092 | U.S. Pat. No. 8,628,776 | 26792 |
| | | | SEQ ID NO: 453 | |
| STPH199 | Light chain, S. aureus, Enterococcus | CR6195 | U.S. Pat. No. 8,628,776 | 26793 |
| | | | SEQ ID NO: 457 | |
| STPH200 | Light chain, S. aureus, Enterococcus | CR6241 | U.S. Pat. No. 8,628,776 | 26794 |
| | | | SEQ ID NO: 118 | |
| STPH201 | Light chain, S. aureus, Enterococcus | CR6246 | U.S. Pat. No. 8,628,776 | 26795 |
| | | | SEQ ID NO: 463 | |
| STPH202 | Light chain, S. aureus, Enterococcus | CR6388 | U.S. Pat. No. 8,628,776 | 26796 |
| | | | SEQ ID NO: 465 | |
| STPH203 | Light chain, S. aureus, Enterococcus | CR6396 | U.S. Pat. No. 8,628,776 | 26797 |
| | | | SEQ ID NO: 469 | |
| STPH204 | Light chain, S. aureus, Enterococcus | CR6409 | U.S. Pat. No. 8,628,776 | 26798 |
| | | | SEQ ID NO: 473 | |
| STPH205 | Light chain, S. aureus, Enterococcus | CR6421 | U.S. Pat. No. 8,628,776 | 26799 |
| | | | SEQ ID NO: 477 | |
| STPH206 | Light chain, S. aureus, Enterococcus | CR6432 | U.S. Pat. No. 8,628,776 | 26800 |
| | | | SEQ ID NO: 481 | |
| STPH207 | Light chain, S. aureus, S. epidermidis, S. | F1 antibody | U.S. Pat. No. 8,617,556 | 26801 |
| | caprae, S. saprophyticus, S. capitis, or | variant | SEQ ID NO: 8 | |
| | methicillin-resistant S. aureus (MRSA) | | | |
| STPH208 | Light chain, S. aureus, S. epidermidis, S. | F1 antibody | U.S. Pat. No. 8,617,556 | 26802 |
| | caprae, S. saprophyticus, S. capitis, or | variant | SEQ ID NO: 10 | |
| | methicillin-resistant S. aureus (MRSA) | | | |
| STPH209 | Light chain, S. aureus, S. epidermidis, S. | F1 antibody | U.S. Pat. No. 8,617,556 | 26803 |
| | caprae, S. saprophyticus, S. capitis, or | variant | SEQ ID NO: 11 | |
| | methicillin-resistant S. aureus (MRSA) | | | |
| STPH210 | Light chain, S. aureus, S. epidermidis, S. | rF1 | U.S. Pat. No. 8,617,556 | 26804 |
| | caprae, S. saprophyticus, S. capitis, or | | SEQ ID NO: 57 | |
| | methicillin-resistant S. aureus (MRSA) | | | |
| STPH211 | Light chain, S. aureus, S. epidermidis, S. | rF1 V205C | U.S. Pat. No. 8,617,556 | 26805 |
| | caprae, S. saprophyticus, S. capitis, or | | SEQ ID NO: 58 | |
| | methicillin-resistant S. aureus (MRSA) | | | |
| STPH212 | Light chain, S. aureus, S. epidermidis, S. | rF1 | U.S. Pat. No. 8,617,556 | 26806 |
| | caprae, S. saprophyticus, S. capitis, or | | SEQ ID NO: 64 | |
| | methicillin-resistant S. aureus (MRSA) | | | |
| STPH213 | ScFv, S. aureus and S. epidermidis | SC02-430 | U.S. Pat. No. 8,460,666 | 26807 |
| | | | SEQ ID NO: 20 | |
| STPH214 | ScFv, S. aureus and S. epidermidis | SC05-132 | U.S. Pat. No. 8,460,666 | 26808 |
| | | | SEQ ID NO: 22 | |
| STPH215 | ScFv, S. aureus and S. epidermidis | SC05-133 | U.S. Pat. No. 8,460,666 | 26809 |
| | | | SEQ ID NO: 24 | |
| STPH216 | ScFv, S. aureus, Enterococcus | SC05-140 | U.S. Pat. No. 8,628,776 | 26810 |
| | | | SEQ ID NO: 351 | |
| STPH217 | ScFv, S. aureus, Enterococcus | SC05-157 | U.S. Pat. No. 8,628,776 | 26811 |
| | | | SEQ ID NO: 353 | |
| STPH218 | ScFv, S. aureus, Enterococcus | SC05-159 | U.S. Pat. No. 8,628,776 | 26812 |
| | | | SEQ ID NO: 62 | |
| STPH219 | ScFv, S. aureus, Enterococcus | SC05-166 | U.S. Pat. No. 8,628,776 | 26813 |
| | | | SEQ ID NO: 64 | |
| STPH220 | ScFv, S. aureus, Enterococcus | SC05-179 | U.S. Pat. No. 8,628,776 | 26814 |
| | | | SEQ ID NO: 355 | |
| STPH221 | ScFv, S. aureus, Enterococcus | SC05-187 | U.S. Pat. No. 8,628,776 | 26815 |
| | | | SEQ ID NO: 66 | |
| STPH222 | ScFv, S. aureus, Enterococcus | SC06-016 | U.S. Pat. No. 8,628,776 | 26816 |
| | | | SEQ ID NO: 68 | |
| STPH223 | ScFv, S. aureus, Enterococcus | SC06-043 | U.S. Pat. No. 8,628,776 | 26817 |
| | | | SEQ ID NO: 70 | |
| STPH224 | ScFv, S. aureus, Enterococcus | SC06-049 | U.S. Pat. No. 8,628,776 | 26818 |
| | | | SEQ ID NO: 72 | |
| STPH225 | ScFv, S. aureus, Enterococcus | SC06-050 | U.S. Pat. No. 8,628,776 | 26819 |
| | | | SEQ ID NO: 357 | |
| STPH226 | ScFv, S. aureus, Enterococcus | SC06-071 | U.S. Pat. No. 8,628,776 | 26820 |
| | | | SEQ ID NO: 74 | |
| STPH227 | ScFv, S. aureus, Enterococcus | SC06-077 | U.S. Pat. No. 8,628,776 | 26821 |
| | | | SEQ ID NO: 359 | |
| STPH228 | ScFv, S. aureus, Enterococcus | SC06-078 | U.S. Pat. No. 8,628,776 | 26822 |
| | | | SEQ ID NO: 76 | |
| STPH229 | ScFv, S. aureus, Enterococcus | SC06-079 | U.S. Pat. No. 8,628,776 | 26823 |
| | | | SEQ ID NO: 361 | |
| STPH230 | ScFv, S. aureus, Enterococcus | SC06-086 | U.S. Pat. No. 8,628,776 | 26824 |
| | | | SEQ ID NO: 363 | |
| STPH231 | ScFv, S. aureus, Enterococcus | SC06-087 | U.S. Pat. No. 8,628,776 | 26825 |
| | | | SEQ ID NO: 207 | |
| STPH232 | ScFv, S. aureus, Enterococcus | SC06-089 | U.S. Pat. No. 8,628,776 | 26826 |
| | | | SEQ ID NO: 209 | |
| STPH233 | ScFv, S. aureus, Enterococcus | SC06-092 | U.S. Pat. No. 8,628,776 | 26827 |
| | | | SEQ ID NO: 365 | |
| STPH234 | ScFv, S. aureus, Enterococcus | SC06-191 | U.S. Pat. No. 8,628,776 | 26828 |
| | | | SEQ ID NO: 367 | |
| STPH235 | ScFv, S. aureus, Enterococcus | SC06-195 | U.S. Pat. No. 8,628,776 | 26829 |
| | | | SEQ ID NO: 369 | |
| STPH236 | ScFv, S. aureus, Enterococcus | SC06-198 | U.S. Pat. No. 8,628,776 | 26830 |
| | | | SEQ ID NO: 371 | |
| STPH237 | ScFv, S. aureus, Enterococcus | SC06-241 | U.S. Pat. No. 8,628,776 | 26831 |
| | | | SEQ ID NO: 78 | |
| STPH238 | ScFv, S. aureus, Enterococcus | SC06-242 | U.S. Pat. No. 8,628,776 | 26832 |
| | | | SEQ ID NO: 373 | |
| STPH239 | ScFv, S. aureus, Enterococcus | SC06-246 | U.S. Pat. No. 8,628,776 | 26833 |
| | | | SEQ ID NO: 375 | |
| STPH240 | ScFv, S. aureus, Enterococcus | SC06-252 | U.S. Pat. No. 8,628,776 | 26834 |
| | | | SEQ ID NO: 80 | |
| STPH241 | ScFv, S. aureus, Enterococcus | SC06-388 | U.S. Pat. No. 8,628,776 | 26835 |
| | | | SEQ ID NO: 377 | |
| STPH242 | ScFv, S. aureus, Enterococcus | SC06-389 | U.S. Pat. No. 8,628,776 | 26836 |
| | | | SEQ ID NO: 379 | |
| STPH243 | ScFv, S. aureus, Enterococcus | SC06-396 | U.S. Pat. No. 8,628,776 | 26837 |
| | | | SEQ ID NO: 381 | |
| STPH244 | ScFv, S. aureus, Enterococcus | SC06-402 | U.S. Pat. No. 8,628,776 | 26838 |
| | | | SEQ ID NO: 383 | |
| STPH245 | ScFv, S. aureus, Enterococcus | SC06-409 | U.S. Pat. No. 8,628,776 | 26839 |
| | | | SEQ ID NO: 385 | |
| STPH246 | ScFv, S. aureus, Enterococcus | SC06-415 | U.S. Pat. No. 8,628,776 | 26840 |
| | | | SEQ ID NO: 387 | |
| STPH247 | ScFv, S. aureus, Enterococcus | SC06-421 | U.S. Pat. No. 8,628,776 | 26841 |
| | | | SEQ ID NO: 389 | |
| STPH248 | ScFv, S. aureus, Enterococcus | SC06-429 | U.S. Pat. No. 8,628,776 | 26842 |
| | | | SEQ ID NO: 391 | |
| STPH249 | ScFv, S. aureus, Enterococcus | SC06-432 | U.S. Pat. No. 8,628,776 | 26843 |
| | | | SEQ ID NO: 393 | |

[0487] In some embodiments, the payload region of the viral particle comprises one or more nucleic acid sequences, fragments or variants thereof or encodes one or more polypeptides, fragments or variants thereof described in International Publication No. WO2000071585, WO2013162751, WO2015089502, WO2015088346 (e.g., SEQ ID NO: 17), US Pub No. US20030224000, US20080014202, US20140037650 US20140170134, U.S. Pat. No. 8,460,666, the contents of each of which are herein incorporated by reference in their entirety, against Staphylococcus infection.

[0488] In some embodiments, the payload region of the viral particle comprises one or more nucleic acid sequences encoding one or more of the payload antibody polypeptides listed in Table 46 against Clostridium tetani (CTET1-CTET57; SEQ ID NO: 26844-26900).

TABLE 46
Antibodies against Clostridium Tetani

| | | | | SEQ |
|---|---|---|---|---|
| Antibody | | Antibody | | ID |
| No. | Description | Name | Reference Information | NO |
| CTET1 | Heavy chain | | Sims, G. P. “Tetanus toxoid specific antibody heavy chain | 26844 |
| | partial | | V-gene sequence”, Unpublished, CNBI Accession # | |
| | | | AAC69189.1 | |
| CTET2 | Heavy chain | F5-20 | Sims, G. P. “Tetanus toxoid specific antibody heavy chain | 26845 |
| | variable region | | V-gene sequence”, Unpublished, CNBI Accession # | |
| | | | AAB50736.1 | |
| CTET3 | Heavy chain | | Larrick, J. W., “Therapeutic human antibodies derived | 26846 |
| | variable region | | from PCR amplification of B-cell variable regions”, | |
| | | | Immunol. Rev. 130, 69-85 (1992), CNBI Accession # | |
| | | | AAB25318.1 | |
| CTET4 | Heavy chain | | de Kruif, J. et al., “Human immunoglobulin repertoires | 26847 |
| | variable region, | | against tetanus toxoid contain a large and diverse fraction | |
| | Human | | of high-affinity promiscuous V(H) genes”, J. Mol. Biol. | |
| | immunoglobulin | | 387 (3), 548-558 (2009), CNBI Accession # ACL36976.1 | |
| CTET5 | Heavy chain | | de Kruif, J. et al., “Human immunoglobulin repertoires | 26848 |
| | variable region, | | against tetanus toxoid contain a large and diverse fraction | |
| | Human | | of high-affinity promiscuous V(H) genes”, J. Mol. Biol. | |
| | immunoglobulin | | 387 (3), 548-558 (2009), CNBI Accession # ACL36975.1 | |
| CTET6 | Heavy chain | | de Kruif, J. et al., “Human immunoglobulin repertoires | 26849 |
| | variable region, | | against tetanus toxoid contain a large and diverse fraction | |
| | Human | | of high-affinity promiscuous V(H) genes”, J. Mol. Biol. | |
| | immunoglobulin | | 387 (3), 548-558 (2009), CNBI Accession # ACL36974.1 | |
| CTET7 | Heavy chain | | de Kruif, J. et al., “Human immunoglobulin repertoires | 26850 |
| | variable region, | | against tetanus toxoid contain a large and diverse fraction | |
| | Human | | of high-affinity promiscuous V(H) genes”, J. Mol. Biol. | |
| | immunoglobulin | | 387 (3), 548-558 (2009), CNBI Accession # ACL36973.1 | |
| CTET8 | Heavy chain | | de Kruif, J. et al., “Human immunoglobulin repertoires | 26851 |
| | variable region, | | against tetanus toxoid contain a large and diverse fraction | |
| | Human | | of high-affinity promiscuous V(H) genes”, J. Mol. Biol. | |
| | immunoglobulin | | 387 (3), 548-558 (2009), CNBI Accession # ACL36972.1 | |
| CTET9 | Heavy chain | | de Kruif, J. et al., “Human immunoglobulin repertoires | 26852 |
| | variable region, | | against tetanus toxoid contain a large and diverse fraction | |
| | Human | | of high-affinity promiscuous V(H) genes”, J. Mol. Biol. | |
| | immunoglobulin | | 387 (3), 548-558 (2009), CNBI Accession # ACL36971.1 | |
| CTET10 | Heavy chain | | de Kruif, J. et al., “Human immunoglobulin repertoires | 26853 |
| | variable region, | | against tetanus toxoid contain a large and diverse fraction | |
| | Human | | of high-affinity promiscuous V(H) genes”, J. Mol. Biol. | |
| | immunoglobulin | | 387 (3), 548-558 (2009), CNBI Accession # ACL36970.1 | |
| CTET11 | Heavy chain | | de Kruif, J. et al., “Human immunoglobulin repertoires | 26854 |
| | variable region, | | against tetanus toxoid contain a large and diverse fraction | |
| | Human | | of high-affinity promiscuous V(H) genes”, J. Mol. Biol. | |
| | immunoglobulin | | 387 (3), 548-558 (2009), CNBI Accession # ACL36969.1 | |
| CTET12 | Heavy chain | | de Kruif, J. et al., “Human immunoglobulin repertoires | 26855 |
| | variable region, | | against tetanus toxoid contain a large and diverse fraction | |
| | Human | | of high-affinity promiscuous V(H) genes”, J. Mol. Biol. | |
| | immunoglobulin | | 387 (3), 548-558 (2009), CNBI Accession # ACL36968.1 | |
| CTET13 | Heavy chain | | de Kruif, J. et al., “Human immunoglobulin repertoires | 26856 |
| | variable region, | | against tetanus toxoid contain a large and diverse fraction | |
| | Human | | of high-affinity promiscuous V(H) genes”, J. Mol, Biol, | |
| | immunoglobulin | | 387 (3), 548-558 (2009), CNBI Accession # ACL36967.1 | |
| CTET14 | Heavy chain | | de Kruif, J. et al., “Human immunoglobulin repertoires | 26857 |
| | variable region, | | against tetanus toxoid contain a large and diverse fraction | |
| | Human | | of high-affinity promiscuous V(H) genes”, J. Mol. Biol. | |
| | immunoglobulin | | 387 (3), 548-558 (2009), CNBI Accession # ACL36966.1 | |
| CTET15 | Heavy chain | | de Kruif, J. et al., “Human immunoglobulin repertoires | 26858 |
| | variable region, | | against tetanus toxoid contain a large and diverse fraction | |
| | Human | | of high-affinity promiscuous V(H) genes”, J. Mol. Biol. | |
| | immunoglobulin | | 387 (3), 548-558 (2009), CNBI Accession # ACL36965.1 | |
| CTET16 | Heavy chain | | de Kruif, J. et al., “Human immunoglobulin repertoires | 26859 |
| | variable region, | | against tetanus toxoid contain a large and diverse fraction | |
| | Human | | of high-affinity promiscuous V(H) genes”, J. Mol. Biol. | |
| | immunoglobulin | | 387 (3), 548-558 (2009), CNBI Accession # ACL36964.1 | |
| CTET17 | Heavy chain | | de Kruif, J. et al., “Human immunoglobulin repertoires | 26860 |
| | variable region, | | against tetanus toxoid contain a large and diverse fraction | |
| | Human | | of high-affinity promiscuous V(H) genes”, J. Mol. Biol. | |
| | immunoglobulin | | 387 (3), 548-558 (2009), CNBI Accession # ACL36963.1 | |
| CTET18 | Heavy chain | | de Kruif, J. et al., “Human immunoglobulin repertoires | 26861 |
| | variable region, | | against tetanus toxoid contain a large and diverse fraction | |
| | Human | | of high-affinity promiscuous V(H) genes”, J. Mol. Biol. | |
| | immunoglobulin | | 387 (3), 548-558 (2009), CNBI Accession # ACL36962.1 | |
| CTET19 | Heavy chain | | de Kruif, J. et al., “Human immunoglobulin repertoires | 26862 |
| | variable region, | | against tetanus toxoid contain a large and diverse fraction | |
| | Human | | of high-affinity promiscuous V(H) genes”, J. Mol. Biol. | |
| | immunoglobulin | | 387 (3), 548-558 (2009), CNBI Accession # ACL36961.1 | |
| CTET20 | Heavy chain | | de Kruif, J. et al., “Human immunoglobulin repertoires | 26863 |
| | variable region, | | against tetanus toxoid contain a large and diverse fraction | |
| | Human | | of high-affinity promiscuous V(H) genes”, J. Mol. Biol. | |
| | immunoglobulin | | 387 (3), 548-558 (2009), CNBI Accession # ACL36960.1 | |
| CTET21 | Heavy chain | | de Kruif, J. et al., “Human immunoglobulin repertoires | 26864 |
| | variable region, | | against tetanus toxoid contain a large and diverse fraction | |
| | Human | | of high-affinity promiscuous V(H) genes”, J. Mol. Biol. | |
| | immunoglobulin | | 387 (3), 548-558 (2009), CNBI Accession # ACL36958.1 | |
| CTET22 | Heavy chain | | de Kruif, J. et al., “Human immunoglobulin repertoires | 26865 |
| | variable region, | | against tetanus toxoid contain a large and diverse fraction | |
| | Human | | of high-affinity promiscuous V(H) genes”, J. Mol. Biol. | |
| | immunoglobulin | | 387 (3), 548-558 (2009), CNBI Accession # ACL36959.1 | |
| CTET23 | Heavy chain | | de Kruif, J. et al., “Human immunoglobulin repertoires | 26866 |
| | variable region, | | against tetanus toxoid contain a large and diverse fraction | |
| | Human | | of high-affinity promiscuous V(H) genes”, J. Mol. Biol. | |
| | immunoglobulin | | 387 (3), 548-558 (2009), CNBI Accession # ACL36957.1 | |
| CTET24 | Heavy chain | | de Kruif, J. et al., “Human immunoglobulin repertoires | 26867 |
| | variable region, | | against tetanus toxoid contain a large and diverse fraction | |
| | Human | | of high-affinity promiscuous V(H) genes”, J. Mol. Biol. | |
| | immunoglobulin | | 387 (3), 548-558 (2009), CNBI Accession # ACL36956.1 | |
| CTET25 | Heavy chain | | de Kruif, J. et al., “Human immunoglobulin repertoires | 26868 |
| | variable region, | | against tetanus toxoid contain a large and diverse fraction | |
| | Human | | of high-affinity promiscuous V(H) genes”, J. Mol. Biol. | |
| | immunoglobulin | | 387 (3), 548-558 (2009), CNBI Accession # ACL36955.1 | |
| CTET26 | Heavy chain | | de Kruif, J. et al., “Human immunoglobulin repertoires | 26869 |
| | variable region, | | against tetanus toxoid contain a large and diverse fraction | |
| | Human | | of high-affinity promiscuous V(H) genes”, J. Mol. Biol. | |
| | immunoglobulin | | 387 (3), 548-558 (2009), CNBI Accession # ACL36954.1 | |
| CTET27 | Heavy chain | | de Kruif, J. et al., “Human immunoglobulin repertoires | 26870 |
| | variable region, | | against tetanus toxoid contain a large and diverse fraction | |
| | Human | | of high-affinity promiscuous V(H) genes”, J. Mol. Biol. | |
| | immunoglobulin | | 387 (3), 548-558 (2009), CNBI Accession # ACL36953.1 | |
| CTET28 | Heavy chain | | de Kruif, J, et al., “Human immunoglobulin repertoires | 26871 |
| | variable region, | | against tetanus toxoid contain a large and diverse fraction | |
| | Human | | of high-affinity promiscuous V(H) genes”, J. Mol. Biol. | |
| | immunoglobulin | | 387 (3), 548-558 (2009), CNBI Accession # ACL36952.1 | |
| CTET29 | Heavy chain | | de Kruif, J. et al., “Human immunoglobulin repertoires | 26872 |
| | variable region, | | against tetanus toxoid contain a large and diverse fraction | |
| | Human | | of high-affinity promiscuous V(H) genes”, J. Mol. Biol. | |
| | immunoglobulin | | 387 (3), 548-558 (2009), CNBI Accession # ACL36951.1 | |
| CTET30 | Heavy chain | | de Kruif, J. et al., “Human immunoglobulin repertoires | 26873 |
| | variable region, | | against tetanus toxoid contain a large and diverse fraction | |
| | Human | | of high-affinity promiscuous V(H) genes”, J. Mol. Biol. | |
| | immunoglobulin | | 387 (3), 548-558 (2009), CNBI Accession # ACL36950.1 | |
| CTET31 | Heavy chain | | de Kruif, J. et al., “Human immunoglobulin repertoires | 26874 |
| | variable region, | | against tetanus toxoid contain a large and diverse fraction | |
| | Human | | of high-affinity promiscuous V(H) genes”, J. Mol. Biol. | |
| | immunoglobulin | | 387 (3), 548-558 (2009), CNBI Accession # ACL36949.1 | |
| CTET32 | Heavy chain | | de Kruif, J. et al., “Human immunoglobulin repertoires | 26875 |
| | variable region, | | against tetanus toxoid contain a large and diverse fraction | |
| | Human | | of high-affinity promiscuous V(H) genes”, J. Mol. Biol. | |
| | immunoglobulin | | 387 (3), 548-558 (2009), CNBI Accession # ACL36948.1 | |
| CTET33 | Heavy chain | | de Kruif, J. et al., “Human immunoglobulin repertoires | 26876 |
| | variable region, | | against tetanus toxoid contain a large and diverse fraction | |
| | Human | | of high-affinity promiscuous V(H) genes”, J. Mol. Biol. | |
| | immunoglobulin | | 387 (3), 548-558 (2009), CNBI Accession # ACL36947.1 | |
| CTET34 | Heavy chain | | de Kruif, J, et al., “Human immunoglobulin repertoires | 26877 |
| | variable region, | | against tetanus toxoid contain a large and diverse fraction | |
| | Human | | of high-affinity promiscuous V(H) genes”, J. Mol. Biol. | |
| | immunoglobulin | | 387 (3), 548-558 (2009), CNBI Accession # ACL36946.1 | |
| CTET35 | Heavy chain | | de Kruif, J. et al., “Human immunoglobulin repertoires | 26878 |
| | variable region, | | against tetanus toxoid contain a large and diverse fraction | |
| | Human | | of high-affinity promiscuous V(H) genes”, J. Mol. Biol. | |
| | immunoglobulin | | 387 (3), 548-558 (2009), CNBI Accession # ACL36924.1 | |
| CTET36 | Heavy chain | | de Kruif, J. et al., “Human immunoglobulin repertoires | 26879 |
| | variable region, | | against tetanus toxoid contain a large and diverse fraction | |
| | Human | | of high-affinity promiscuous V(H) genes”, J. Mol. Biol. | |
| | immunoglobulin | | 387 (3), 548-558 (2009), CNBI Accession # ACL36925.1 | |
| CTET37 | Heavy chain | | de Kruif, J. et al., “Human immunoglobulin repertoires | 26880 |
| | variable region, | | against tetanus toxoid contain a large and diverse fraction | |
| | Human | | of high-affinity promiscuous V(H) genes”, J. Mol. Biol. | |
| | immunoglobulin | | 387 (3), 548-558 (2009), CNBI Accession # ACL36926.1 | |
| CTET38 | Heavy chain | | de Kruif, J. et al., “Human immunoglobulin repertoires | 26881 |
| | variable region, | | against tetanus toxoid contain a large and diverse fraction | |
| | Human | | of high-affinity promiscuous V(H) genes”, J. Mol. Biol. | |
| | immunoglobulin | | 387 (3), 548-558 (2009), CNBI Accession # ACL36927.1 | |
| CTET39 | Heavy chain | | de Kruif, J. et al., “Human immunoglobulin repertoires | 26882 |
| | variable region, | | against tetanus toxoid contain a large and diverse fraction | |
| | Human | | of high-affinity promiscuous V(H) genes”, J. Mol. Biol. | |
| | immunoglobulin | | 387 (3), 548-558 (2009), CNBI Accession # ACL36928.1 | |
| CTET40 | Heavy chain | | de Kruif, J. et al., “Human immunoglobulin repertoires | 26883 |
| | variable region, | | against tetanus toxoid contain a large and diverse fraction | |
| | Human | | of high-affinity promiscuous V(H) genes”, J, Mol. Biol. | |
| | immunoglobulin | | 387 (3), 548-558 (2009), CNBI Accession # ACL36929.1 | |
| CTET41 | Heavy chain | | de Kruif, J. et al., “Human immunoglobulin repertoires | 26884 |
| | variable region, | | against tetanus toxoid contain a large and diverse fraction | |
| | Human | | of high-affinity promiscuous V(H) genes”, J. Mol. Biol. | |
| | immunoglobulin | | 387 (3), 548-558 (2009), CNBI Accession # ACL36930.1 | |
| CTET42 | Heavy chain | | de Kruif, J. et al., “Human immunoglobulin repertoires | 26885 |
| | variable region, | | against tetanus toxoid contain a large and diverse fraction | |
| | Human | | of high-affinity promiscuous V(H) genes”, J. Mol. Biol. | |
| | immunoglobulin | | 387 (3), 548-558 (2009), CNBI Accession # ACL36931.1 | |
| CTET43 | Heavy chain | | de Kruif, J. et al., “Human immunoglobulin repertoires | 26886 |
| | variable region, | | against tetanus toxoid contain a large and diverse fraction | |
| | Human | | of high-affinity promiscuous V(H) genes”, J. Mol. Biol. | |
| | immunoglobulin | | 387 (3), 548-558 (2009), CNBI Accession # ACL36932.1 | |
| CTET44 | Heavy chain | | de Kruif, J. et al., “Human immunoglobulin repertoires | 26887 |
| | variable region, | | against tetanus toxoid contain a large and diverse fraction | |
| | Human | | of high-affinity promiscuous V(H) genes”, J. Mol. Biol. | |
| | immunoglobulin | | 387 (3), 548-558 (2009), CNBI Accession # ACL36933.1 | |
| CTET45 | Heavy chain | | de Kruif, J. et al., “Human immunoglobulin repertoires | 26888 |
| | variable region, | | against tetanus toxoid contain a large and diverse fraction | |
| | Human | | of high-affinity promiscuous V(H) genes”, J. Mol. Biol. | |
| | immunoglobulin | | 387 (3), 548-558 (2009), CNBI Accession # ACL36934.1 | |
| CTET46 | Heavy chain | | de Kruif, J. et al., “Human immunoglobulin repertoires | 26889 |
| | variable region, | | against tetanus toxoid contain a large and diverse fraction | |
| | Human | | of high-affinity promiscuous V(H) genes”, J. Mol. Biol. | |
| | immunoglobulin | | 387 (3), 548-558 (2009), CNBI Accession # ACL36935.1 | |
| CTET47 | Heavy chain | | de Kruif, J. et al., “Human immunoglobulin repertoires | 26890 |
| | variable region, | | against tetanus toxoid contain a large and diverse fraction | |
| | Human | | of high-affinity promiscuous V(H) genes”, J. Mol. Biol. | |
| | immunoglobulin | | 387 (3), 548-558 (2009), CNBI Accession # ACL36936.1 | |
| CTET48 | Heavy chain | | e Kruif, J. et al., “Human immunoglobulin repertoires | 26891 |
| | variable region, | | against tetanus toxoid contain a large and diverse fraction | |
| | Human | | of high-affinity promiscuous V(H) genes”, J. Mol. Biol. | |
| | immunoglobulin | | 387 (3), 548-558 (2009), CNBI Accession # ACL36937.1 | |
| CTET49 | Heavy chain | | e Kruif, J. et al., “Human immunoglobulin repertoires | 26892 |
| | variable region, | | against tetanus toxoid contain a large and diverse fraction | |
| | Human | | of high-affinity promiscuous V(H) genes”, J. Mol. Biol. | |
| | immunoglobulin | | 387 (3), 548-558 (2009), CNBI Accession # ACL36938.1 | |
| CTET50 | Heavy chain | | e Kruif, J. et al., “Human immunoglobulin repertoires | 26893 |
| | variable region, | | against tetanus toxoid contain a large and diverse fraction | |
| | Human | | of high-affinity promiscuous V(H) genes”, J. Mol. Biol. | |
| | immunoglobulin | | 387 (3), 548-558 (2009), CNBI Accession # ACL36939.1 | |
| CTET51 | Heavy chain | | e Kruif, J. et al., “Human immunoglobulin repertoires | 26894 |
| | variable region, | | against tetanus toxoid contain a large and diverse fraction | |
| | Human | | of high-affinity promiscuous V(H) genes”, J. Mol. Biol. | |
| | immunoglobulin | | 387 (3), 548-558 (2009), CNBI Accession # ACL36940.1 | |
| CTET52 | Heavy chain | | e Kruif, J. et al., “Human immunoglobulin repertoires | 26895 |
| | variable region, | | against tetanus toxoid contain a large and diverse fraction | |
| | Human | | of high-affinity promiscuous V(H) genes”, J. Mol. Biol. | |
| | immunoglobulin | | 387 (3), 548-558 (2009), CNBI Accession # ACL36941.1 | |
| CTET53 | Heavy chain | | e Kruif, J. et al., “Human immunoglobulin repertoires | 26896 |
| | variable region, | | against tetanus toxoid contain a large and diverse fraction | |
| | Human | | of high-affinity promiscuous V(H) genes”, J. Mol. Biol. | |
| | immunoglobulin | | 387 (3), 548-558 (2009), CNBI Accession # ACL36943.1 | |
| CTET54 | Heavy chain | | e Kruif, J. et al., “Human immunoglobulin repertoires | 26897 |
| | variable region, | | against tetanus toxoid contain a large and diverse fraction | |
| | Human | | of high-affinity promiscuous V(H) genes”, J. Mol. Biol. | |
| | immunoglobulin | | 387 (3), 548-558 (2009), CNBI Accession # ACL36942.1 | |
| CTET55 | Heavy chain | | e Kruif, J. et al., “Human immunoglobulin repertoires | 26898 |
| | variable region, | | against tetanus toxoid contain a large and diverse fraction | |
| | Human | | of high-affinity promiscuous V(H) genes”, J. Mol. Biol. | |
| | immunoglobulin | | 387 (3), 548-558 (2009), CNBI Accession # ACL36944.1 | |
| CTET56 | Heavy chain | | e Kruif, J. et al., “Human immunoglobulin repertoires | 26899 |
| | variable region, | | against tetanus toxoid contain a large and diverse fraction | |
| | Human | | of high-affinity promiscuous V(H) genes”, J. Mol. Biol. | |
| | immunoglobulin | | 387 (3), 548-558 (2009), CNBI Accession # ACL36945.1 | |
| CTET57 | Light chain | | Larrick, J. W.. “Therapeutic human antibodies derived | 26900 |
| | variable region | | from PCR amplification of B-cell variable regions”, | |
| | | | Immunol. Rev. 130, 69-85 (1992), CNBI Accession # | |
| | | | AAB25319.1 | |

[0489] In some embodiments, the payload region of the viral particle comprises one or more nucleic acid sequences encoding one or more of the payload antibody polypeptides listed in Table 47 against Bordetella Pertussis and/or Bordetella Parapertussis (BORT1-BORT25; SEQ. ID NO: 26901-26925).

TABLE 47
Antibodies against Bordetella Pertussis and Bordetella Parapertussis

| | | | | SEQ |
|---|---|---|---|---|
| Antibody | | Antibody | | ID |
| No. | Description | Name | Reference information | NO |
| BORT1 | Heavy chain | 42.1 1.D4 | WO2014160098 SEQ ID NO: 47 | 26901 |
| BORT2 | Heavy chain | 42.12.G2 | WO2014160098 SEQ ID NO: 51 | 26902 |
| BORT3 | Heavy chain | 42.12.A12 | WO2014160098 SEQ ID NO: 55 | 26903 |
| BORT4 | Heavy chain | 42.12.A9 | WO2014160098 SEQ ID NO: 59 | 26904 |
| BORT5 | Heavy chain | 42.18.E12 | WO2014160098 SEQ ID NO: 63 | 26905 |
| BORT6 | Heavy chain | 55.12.A8 | WO2014160098 SEQ ID NO: 67 | 26906 |
| BORT7 | Heavy chain | 55.15.H5 | WO2014160098 SEQ ID NO: 71 | 26907 |
| BORT8 | Heavy chain | 55.17.D8 | WO2014160098 SEQ ID NO: 75 | 26908 |
| BORT9 | Heavy chain | 55.22.E7 | WO2014160098 SEQ ID NO: 79 | 26909 |
| BORT10 | Light chain | 42,1 1.D4 | WO2014160098 SEQ ID NO: 49 | 26910 |
| BORT11 | Light chain | 42.12.G2 | WO2014160098 SEQ ID NO: 53 | 26911 |
| BORT12 | Light chain | 42.12.A12 | WO2014160098 SEQ ID NO: 57 | 26912 |
| BORT13 | Light chain | 42.12.A9 | WO2014160098 SEQ ID NO: 61 | 26913 |
| BORT14 | Light chain | 42.18.E12 | WO2014160098 SEQ ID NO: 65 | 26914 |
| BORT15 | Light chain | 55.12.A8 | WO2014160098 SEQ ID NO: 69 | 26915 |
| BORT16 | Light chain | 55.15.H5 | WO2014160098 SEQ ID NO: 73 | 26916 |
| BORT17 | Light chain | 55.17.D8 | WO2014160098 SEQ ID NO: 77 | 26917 |
| BORT18 | Light chain | 55.22.E7 | WO2014160098 SEQ ID NO: 81 | 26918 |
| BORT19 | Single chain variable | | Hussein, A. H. et al. “Construction and | 26919 |
| | fragment antibody type | | characterization of single-chain variable | |
| | 1 a1, single chain | | fragment antibodies directed against the | |
| | variable region | | Bordetella pertussis surface adhesins | |
| | | | filamentous hemagglutinin and pertactin” | |
| | | | Infect. Immun. 75 (11), 5476-5482 (2007), | |
| | | | NCBI Accession # ABB13478.1 | |
| BORT20 | Single chain variable | | Hussein, A. H. et al. “Construction and | 26920 |
| | fragment antibody type | | characterization of single-chain variable | |
| | 18 a18, single chain | | fragment antibodies directed against the | |
| | variable region | | Bordetella pertussis surface adhesins | |
| | | | filamentous hemagglutinin and pertactin” | |
| | | | Infect. Immun. 75 (11), 5476-5482 (2007), | |
| | | | NCBI Accession # ABB13483.1 | |
| BORT21 | Single chain variable | | Hussein, A. H, el al. “Construction and | 26921 |
| | fragment antibody type | | characterization of single-chain variable | |
| | 2 a2, single chain | | fragment antibodies directed against the | |
| | variable region | | Bordetella pertussis surface adhesins | |
| | | | filamentous hemagglutinin and pertactin” | |
| | | | Infect. Immun. 75 (11), 5476-5482 (2007), | |
| | | | NCBI Accession # ABB13479.1 | |
| BORT22 | Single chain variable | | Hussein, A. H. et al. “Construction and | 26922 |
| | fragment antibody type | | characterization of single-chain variable | |
| | 4 b4, single chain | | fragment antibodies directed against the | |
| | variable region | | Bordetella pertussis surface adhesins | |
| | | | filamentous hemagglutinin and pertactin” | |
| | | | Infect. Immun. 75 (11), 5476-5482 (2007), | |
| | | | NCBI Accession # ABB13480.1 | |
| BORT23 | Single chain variable | | Hussein, A. H. et al. “Construction and | 26923 |
| | fragment antibody type | | characterization of single-chain variable | |
| | 5 c5, single chain | | fragment antibodies directed against the | |
| | variable region | | Bordetella pertussis surface adhesins | |
| | | | filamentous hemagglutinin and pertactin” | |
| | | | Infect. Immun. 75 (11), 5476-5482 (2007), | |
| | | | NCBI Accession # ABB13481.1 | |
| BORT24 | Single chain variable | | Hussein, A. H. et al. “Construction and | 26924 |
| | fragment antibody type | | characterization of single-chain variable | |
| | 6 d6, single chain | | fragment antibodies directed against the | |
| | variable region | | Bordetella pertussis surface adhesins | |
| | | | filamentous hemagglutinin and pertactin” | |
| | | | Infect. Immun. 75 (11), 5476-5482 (2007), | |
| | | | NCBI Accession # ABB13482.1 | |
| BORT25 | Single chain variable | | Hussein, A. H. et al. “Construction and | 26925 |
| | fragment antibody type | | characterization of single-chain variable | |
| | 7 e, single chain | | fragment antibodies directed against the | |
| | variable region | | Bordetella pertussis surface adhesins | |
| | | | filamentous hemagglutinin and pertactin” | |
| | | | Infect. Immun. 75 (11), 5476-5482 (2007), | |
| | | | NCBI Accession # ABB13484.1 | |

[0490] In some embodiments, the payload region of the viral particle comprises one or more nucleic acid sequences encoding one or more of the payload antibody polypeptides listed in Table 48 against Mycobacteria (MYCO1-MYCO16; SU) ID NO: 26926-26941).

TABLE 48
Antibodies against Mycobacteria

| | | | | SEQ |
|---|---|---|---|---|
| Antibody | | Antibody | | ID |
| No. | Description | Name | Reference Information | NO |
| MYCO1 | Autod2 Single-chain variable | | Berger et al., Microbes Infect, 9 | 26926 |
| | fragment antibody, Tb antibody, anti- | | (8), 963-970 (2007), NCBI | |
| | neutrophil cytoplasmic antibodies | | Accession # ABI81486.1 | |
| | cross-react with mycobacterium avium | | | |
| | subsp. Paratuberculosis antigens | | | |
| MYCO2 | autoh1 single-chain variable fragment | | Berger et al., Microbes Infect. 9 | 26927 |
| | antibody, Tb antibody, anti-neutrophil | | (8), 963-970 (2007), NCBI | |
| | cytoplasmic antibodies cross-react | | Accession # ABI81485.1 | |
| | with mycobacterium avium subsp. | | | |
| | Paratuberculosis antigens, | | | |
| MYCO3 | Heavy chain constant region, | moG2a/ | US20130309237 SEQ ID NO: | 26928 |
| | Mycobacteria | moG2afull | 10 | |
| MYCO4 | Heavy chain constant region, | hG1mG2a | US20130309237 SEQ ID NO: | 26929 |
| | Mycobacteria | | 11 | |
| MYCO5 | Heavy chain constant region, | hG3mG2a | US20130309237 SEQ ID NO: | 26930 |
| | Mycobacteria | | 12 | |
| MYCO6 | Heavy chain constant region, | huG1full | US20130309237 SEQ ID NO: | 26931 |
| | Mycobacteria | | 13 | |
| MYCO7 | Heavy chain constant region, | huG3full | US20130309237 SEQ ID NO: | 26932 |
| | Mycobacteria | | 14 | |
| MYCO8 | Heavy chain variable region, | 2F12 IgGs | US20130309237 SEQ ID NO: | 26933 |
| | Mycobacteria | | 15 | |
| MYCO9 | Heavy chain variable region, | 2F12 IgGs | US20130309237 SEQ ID NO: | 26934 |
| | Mycobacteria | | 18 | |
| MYCO10 | Heavy chain variable region, partial | 16a1 | Al-sayyed et al., Tuberculosis | 26935 |
| | sequence, Tb antibody, mouse | | (Edinb) 87 (6), 489-497 (2007), | |
| | monoclonal mpt51 | | NCBI Accession # ABS20005.1 | |
| MYCO11 | Light chain constant region, | HuCK | US20130309237 SEQ ID NO: | 26936 |
| | Mycobacteria | | 16 | |
| MYCO12 | Light chain variable region, | MoCK | US20130309237 SEQ ID NO: | 26937 |
| | Mycobacteria | | 17 | |
| MYCO13 | Light chain variable region, partial | 16a1 | Al-sayyed el al., Tuberculosis | 26938 |
| | sequence, Tb antibody, mouse | | (Edinb) 87 (6), 489-497 (2007), | |
| | monoclonal mpt51 | | NCBI Accession # ABS20006.1 | |
| MYC014 | Scfv, Tb antibody, an engineered | | US20060229438 SEQ ID NO: 3 | 26939 |
| | single chain antibody | | | |
| MYC015 | Scfv, Tb antibody, an engineered | | US20060229438 SEQ ID NO: 4 | 26940 |
| | single chain antibody | | | |
| MYC016 | Scfv, Tb antibody, an engineered | | US20060229438 SEQ ID NO: 2 | 26941 |
| | single chain antibody | | | |

[0491] In some embodiments, the payload region of the viral particle comprises one or more nucleic acid sequences encoding one or more of the payload antibody polypeptides listed in Table 49 against Francisella tularensis (FRAN1-FRAN16; SEQ ID NO: 26942-26957).

TABLE 49
Antibodies against Francisella Tularensis

| | | | | SEQ |
|---|---|---|---|---|
| Antibody | | Antibody | | ID |
| No. | Description | Name | Reference Information | NO |
| FRAN1 | Chain H | Ab-52 | Rynkiewicz, M. J. et al., “Structural Analysis of a Protective | 26942 |
| | | | Epitope of the Francisella tularensis O-Polysaccharide”, | |
| | | | Biochemistry- 51 (28), 5684-5694 (2012), NCBI Accession # | |
| | | | 3UJT_H | |
| FRAN2 | Chain H | N62 | Lu, Z., et al., “The binding sites of monoclonal antibodies to | 26943 |
| | | | the non-reducing end of Francisella tularensis O-antigen | |
| | | | accommodate mainly the terminal saccharide”, Immunology | |
| | | | 140 (3), 374-389 (2013), NCBI Accession # 4KPH_H | |
| FRAN3 | Chain H | Ab64 | Lu, Z. et al., “B-cell epitopes in GroEL of Francisella | 26944 |
| | | | tularensis”, PLoS ONE 9 (6), E99847 (2014), NCBI | |
| | | | Accession # 4PB9_H | |
| FRAN4 | Chain H | Ab53 | Lu, Z, et al., “B-cell epitopes in GroEL of Francisella | 26945 |
| | | | tularensis”, PLoS ONE 9 (6), E99847 (2014), NCBI | |
| | | | Accession # 4PB0_H | |
| FRAN5 | Chain H | N203 | Lu, Z. et al., “Functional and Structural Characterization of | 26946 |
| | | | Francisella tularensis O-Antigen Antibodies at the Low End | |
| | | | of Antigen Reactivity”, Monoclonal Antib Immunodiagn | |
| | | | Immunother 33 (4), 235-245 (2014), NCBI Accession # | |
| | | | 4OTX_H | |
| FRAN6 | Chain I | Ab-52 | Rynkiewicz, M. J., et al., “Structural Analysis of a Protective | 26947 |
| | | | Epitope of the Francisella tularensis O-Polysaccharide”, | |
| | | | Biochemistry 51 (28), 5684-5694 (2012), NCBI Accession # | |
| | | | 3UJT_I | |
| FRAN7 | Chain I | N62 | Lu, Z., et al., “The binding sites of monoclonal antibodies to | 26948 |
| | | | the non-reducing end of Francisella tularensis O-antigen | |
| | | | accommodate mainly the terminal saccharide”, Immunology | |
| | | | 140 (3), 374-389 (2013), NCBI Accession # 4KPH_I | |
| FRAN8 | Chain I | N203 | Lu, Z. et al., “Functional and Structural Characterization of | 26949 |
| | | | Francisella tularensis O-Antigen Antibodies at the Low End | |
| | | | of Antigen Reactivity”, Monoclonal Antib Immunodiagn | |
| | | | Immunother 33 (4), 235-245 (2014), NCBI Accession # | |
| | | | 4OTX_I | |
| FRAN9 | Chain L | Ab-52 | Rynkiewicz, M. J., et al., “Structural Analysis of a Protective | 26950 |
| | | | Epitope of the Francisella tularensis O-Polysaccharide”, | |
| | | | Biochemistry 51 (28), 5684-5694 (2012), NCBI Accession # | |
| | | | 3UJT_L | |
| FRAN10 | Chain L | N62 | Lu, Z., et al., “The binding sites of monoclonal antibodies to | 26951 |
| | | | the non-reducing end of Francisella tularensis O-antigen | |
| | | | accommodate mainly the terminal saccharide”, Immunology | |
| | | | 140 (3), 374-389 (2013), NCBI Accession # 4KPH_L | |
| FRAN11 | Chain L | Ab64 | Lu, Z. et al., “B-cell epitopes in GroEL of Francisella | 26952 |
| | | | tularensis”, PLoS ONE 9 (6), E99847 (2014), NCBI | |
| | | | Accession # 4PB9_L | |
| FRAN12 | Chain L | Ab53 | Lu, Z. et al., “B-cell epitopes in GroEL of Francisella | 26953 |
| | | | tularensis”, PLoS ONE 9 (6), E99847 (2014), NCBI | |
| | | | Accession # 4PB0_L | |
| FRAN13 | Chain L | N203 | Lu, Z, et al., “Functional and Structural Characterization of | 26954 |
| | | | Francisella tularensis O-Antigen Antibodies at the Low End | |
| | | | of Antigen Reactivity”, Monoclonal Antib Immunodiagn | |
| | | | Immunother 33 (4), 235-245 (2014), NCBI Accession # | |
| | | | 4OTX_L | |
| FRAN14 | Chain M | Ab-52 | Rynkiewicz, M. J. et al., “Structural Analysis of a Protective | 26955 |
| | | | Epitope of the Francisella tularensis O-Polysaccharide”, | |
| | | | Biochemistry 51 (28), 5684-5694 (2012), NCBI Accession # | |
| | | | 3UJT_M | |
| FRAN15 | Chain M | N62 | Lu, Z., et al., “The binding sites of monoclonal antibodies to | 26956 |
| | | | the non-reducing end of Francisella tularensis O-antigen | |
| | | | accommodate mainly the terminal saccharide”, Immunology | |
| | | | 140 (3), 374-389 (2013), NCBI Accession # 4KPH_M | |
| FRAN16 | Chain M | N203 | Lu, Z, et al., “Functional and Structural Characterization of | 26957 |
| | | | Francisella tularensis O-Antigen Antibodies at the Low End | |
| | | | of Antigen Reactivity”, Monoclonal Antib Immunodiagn | |
| | | | Immunother 33 (4), 235-245 (2014), NCBI Accession # | |
| | | | 4OTX_M | |

[0492] In some embodiments, the payload region of the viral particle comprises one or more nucleic acid sequences encoding one or more of the payload antibody polypeptides listed in Table 50 against Bacteria (BACI1-BACI24; SEQ ID NO: 26958-26981).

TABLE 50
Antibodies against Bacteria

| | | | | SEQ |
|---|---|---|---|---|
| Antibody | | | | ID |
| No. | Description | Antibody Name | Reference Information | NO |
| BACI1 | Heavy chain variable | | US20080038266 SEQ ID NO: 1 | 26958 |
| | region, Enterococcus | | | |
| | faecium, Enterococcus | | | |
| | faecalis, Clostridium | | | |
| | difficile | | | |
| BACI2 | Heavy chain variable | Naid60 | US20060073139 SEQ ID NO: 5 | 26959 |
| | region, Neisseria | | | |
| | meningitidis, | | | |
| BACI3 | Heavy chain, Neisseria | | Fernandez de Cossio, M. E., et al. | 26960 |
| | meningitidis, | | “Human monoclonal antibodies against | |
| | | | an epitope on the class 5c outer | |
| | | | membrane protein common to many | |
| | | | pathogenic strains of Neisseria | |
| | | | meningitidis”, J. Infect. Dis. 166 (6), | |
| | | | 1322-1328 (1992), AAB18935 | |
| BACI4 | Heavy chain, Neisseria | | Fernandez de Cossio, M. E., et al. | 26961 |
| | meningitidis, | | “Human monoclonal antibodies against | |
| | | | an epitope on the class 5c outer | |
| | | | membrane protein common to many | |
| | | | pathogenic strains of Neisseria | |
| | | | meningitidis”, J. Infect. Dis. 166 (6), | |
| | | | 1322-1328 (1992), AAB18934 | |
| BACI5 | Heavy chain, Septic | Edobacomab, | | 26962 |
| | shock, meningococcal | E5, XMMEN- | | |
| | septic shock | 0E5 | | |
| BACI6 | Ig kappa chain V-I | | Goni, F. and Frangione, B., “Amino acid | 26963 |
| | region WEA, | | sequence of the Fv region of a human | |
| | Klebsiella bacteria | | monoclonal IgM (protein WEA) with | |
| | | | antibody activity against 3,4-pyruvylated | |
| | | | galactose in Klebsiella polysaccharides | |
| | | | K30 and K33”, Proc. Natl. Acad. Sci. | |
| | | | U.S.A. 80 (15), 4837-4841 (1983). | |
| | | | P01610 | |
| BACI7 | Ig kappa chain V-I | | Goni, F. and Frangione, B., “Amino acid | 26964 |
| | region WEA, | | sequence of the Fv region of a human | |
| | Klebsiella bacteria | | monoclonal IgM (protein WEA) with | |
| | | | antibody activity against 3,4-pyruvylated | |
| | | | galactose in Klebsiella polysaccharides | |
| | | | K30 and K33”, Proc. Natl. Acad. Sci. | |
| | | | U.S.A. 80 (15), 4837-4841 (1983), | |
| | | | P01763 | |
| BACI8 | Light chain variable | | US20080038266 SEQ ID NO: 16 | 26965 |
| | region, Enterococcus | | | |
| | faecium, Enterococcus | | | |
| | faecalis, Clostridium | | | |
| | difficile | | | |
| BACI9 | Light chain variable | Naid60 | US20060073139 SEQ ID NO: 6 | 26966 |
| | region, Neisseria | | | |
| | meningitidis | | | |
| BACI10 | Light chain, Septic | Edobacomab, | | 26967 |
| | shock, meningococcal | E5, XMMEN- | | |
| | septic shock, | 0E5 | | |
| BACI11 | scFv antibody, Anti- | | Zou, N., et al. “Human Single-Chain Fv | 26968 |
| | Burkholderia mallei | | Antibodies against Burkholderia mallei | |
| | | | and Burkholderia pseudomallei”, | |
| | | | unpublished, NCBI Accession # | |
| | | | ABI97022.1 | |
| BACI12 | scFv antibody, Anti- | | Zou, N., et al. “Human Single-Chain Fv | 26969 |
| | Burkholderia mallei | | Antibodies against Burkholderia mallei | |
| | | | and Burkholderia pseudomallei”, | |
| | | | unpublished, NCBI Accession # | |
| | | | ABI97023.1 | |
| BACI13 | scFv antibody, Anti- | | Zou, N., et al. “Human Single-Chain Fv | 26970 |
| | Burkholderia mallei | | Antibodies against Burkholderia mallei | |
| | | | and Burkholderia pseudomallei”, | |
| | | | unpublished, NCBI Accession # | |
| | | | ABI97021.1 | |
| BACI14 | scFv antibody, Anti- | | Zou, N., et al. “Human Single-Chain Fv | 26971 |
| | Burkholderia mallei | | Antibodies against Burkholderia mallei | |
| | | | and Burkholderia pseudomallei”, | |
| | | | unpublished, NCBI Accession # | |
| | | | ABI97018.1 | |
| BACI15 | scFv antibody, Anti- | | Zou, N., et al. “Human Single-Chain Fv | 26972 |
| | Burkholderia mallei | | Antibodies against Burkholderia mallei | |
| | | | and Burkholderia pseudomallei”, | |
| | | | unpublished, NCBI Accession # | |
| | | | ABI97024.1 | |
| BACI16 | scFv antibody, Anti- | | Zou, N., et al. “Human Single-Chain Fv | 26973 |
| | Burkholderia mallei | | Antibodies against Burkholderia mallei | |
| | | | and Burkholderia pseudomallei”, | |
| | | | unpublished, NCBI Accession # | |
| | | | ACZ65033.1 | |
| BACI17 | scFv antibody, Anti- | | Zou, N., et al. “Human Single-Chain Fv | 26974 |
| | Burkholderia mallei | | Antibodies against Burkholderia mallei | |
| | | | and Burkholderia pseudomallei”, | |
| | | | unpublished, NCBI Accession # | |
| | | | ACZ65032.1 | |
| BACI18 | scFv antibody, Anti- | | Zou, N., et al. “Human Single-Chain Fv | 26975 |
| | Burkholderia mallei | | Antibodies against Burkholderia mallei | |
| | | | and Burkholderia pseudomallei”, | |
| | | | unpublished, NCBI Accession # | |
| | | | ACZ65031.1 | |
| BACI19 | scFv antibody, Anti- | | Zou, N., et al. “Human Single-Chain Fv | 26976 |
| | Burkholderia mallei | | Antibodies against Burkholderia mallei | |
| | | | and Burkholderia pseudomallei”, | |
| | | | unpublished, NCBI Accession # | |
| | | | ACZ65030.1 | |
| BACI20 | scFv antibody, Anti- | | Zou, N., et al. “Human Single-Chain. Fv | 26977 |
| | Burkholderia mallei | | Antibodies against Burkholderia mallei | |
| | | | and Burkholderia pseudomallei”, | |
| | | | unpublished, NCBI Accession # | |
| | | | ACZ65029.1 | |
| BACI21 | scFv antibody, Anti- | | Zou, N., et al. “Human Single-Chain Fv | 26978 |
| | Burkholderia mallei | | Antibodies against Burkholderia mallei | |
| | | | and Burkholderia pseudomallei”, | |
| | | | unpublished, NCBI Accession # | |
| | | | ACZ65028.1 | |
| BAC122 | scFv antibody, Anti- | | Zou, N,, et al. “Human Single-Chain Fv | 26979 |
| | Burkholderia mallei | | Antibodies against Burkholderia mallei | |
| | | | and Burkholderia pseudomallei”, | |
| | | | unpublished, NCBI Accession # | |
| | | | AB197020.1 | |
| BACI23 | scFv antibody, Anti- | | Zou, N., et al. “Human Single-Chain Fv | 26980 |
| | Burkholderia mallei | | Antibodies against Burkholderia mallei | |
| | | | and Burkholderia pseudomallei”, | |
| | | | unpublished, NCBI Accession # | |
| | | | ABI97019.1 | |
| BACI24 | Single chain variable, | CB515 | LaRocca, T. J., et al. “Bactericidal action | 26981 |
| | Borrelia, | | of a complement-independent relapsing | |
| | | | fever Borrelia resides in its variable | |
| | | | region”, J. Immunol. 180 (9), 6222-6228 | |
| | | | (2008), NCBI Accession # ABV22509 | |

[0493] In some embodiments, the payload region of the viral particle comprises one or more nucleic acid sequences, fragments or variants encoding Doxorubicin, fragments or variants thereof for treating a disease and/or disorder or preventing a disease and/or disorder. As a non-limiting example, the disease and/or disorder is bacterial infection.

[0494] In some embodiments, the payload region of the viral particle comprises one or more nucleic acid sequences encoding one or more of the payload antibody polypeptides listed in Table 51 against Toxoplasma gondii (TOXO1-TOXO2; SEQ ID NO: 26982-26983).

TABLE 51
Antibodies against Toxoplasma gondii

| Antibody | | | | SEQ ID |
|---|---|---|---|---|
| No. | Description | Antibody Name | Reference Information | NO |
| TOXO1 | 4f11e12 | Fab Heavy Chain Variable | Graille, M. et al., J. Mol. Biol. 354 | 26982 |
| | | Region, Surface antigen 1 | (2), 447-458 (2005), NCBI Accession | |
| | | (SAG1) | # 1YNT_D (218aa) | |
| TOXO2 | 4f11e12 | Fab Light Chain Variable | Graille, M. et al., J. Mol, Biol. 354 | 26983 |
| | | Region, Surface antigen 1 | (2), 447-458 (2005), NCBI Accession | |
| | | (SAG1) | # 1YNT_C (213aa) | |

[0495] In some embodiments, the payload region of the viral particle comprises one or more nucleic acid sequences encoding one or more of the payload antibody polypeptides listed in Table 52 against Candida Yeast (CAND1; SEQ ID NO: 26984).

TABLE 52
Antibodies against Candida Yeast

| Antibody | | | SEQ ID |
|---|---|---|---|
| No. | Description | Antibody Name | NO |
| CAND1 | Efungumab | Candida | 26984 |

[0496] In some embodiments, the payload region of the viral particle comprises one or more nucleic acid sequences encoding one or more of the payload antibody polypeptides listed in Table 53 (HIV1-HIV1601; SEQ ID NO: 26985-28585).

TABLE 53
HIV Antibodies

| | | | | SEQ |
|---|---|---|---|---|
| Antibody | | Antibody | | ID |
| No. | Description | Name | Reference Information | NO |
| HIV1 | 4e10 Antibody | 4e10antibody | NCBI Accession # 4OB5_H (127aa) | 26985 |
| | Germline Precursor 7 | | | |
| | Heavy Chain Fv | | | |
| HIV2 | 4e10 Antibody | 4e10antibody | NCBI Accession # 4OB5_L (114aa) | 26986 |
| | Germline Precursor 7 | | | |
| | Light Chain Fv | | | |
| HIV3 | Antigen Binding | Ch103 | Liao et al., Co-evolution of a broadly | 26987 |
| | Fragment Of Heavy | | neutralizing HIV-1 antibody and founder virus; | |
| | Chain | | Nature 496 (7446), 469-476 (2013), NCBI | |
| | | | Accession # 4JAM_H (226aa) | |
| HIV4 | Antigen Binding | Ch103 | Liao et al., Co-evolution of a broadly | 26988 |
| | Fragment Of Light | | neutralizing HIV-1 antibody and founder virus; | |
| | Chain | | Nature 496 (7446), 469-476 (2013), NCBI | |
| | | | Accession # 4JAM_L (209aa) | |
| HIV5 | Fab Fragment, Heavy | N12-i15 | NCBI Accession # 3QEH_G (232aa) | 26989 |
| | Chain | | | |
| HIV6 | Fab Fragment, Light | N12-i15 | NCBI Accession # 3QEH_H (218aa) | 26990 |
| | Chain | | | |
| HIV7 | Fab Heavy Chain | 35o22 | Huang et al., Broad and potent HIV-1 | 26991 |
| | | | neutralization by a human antibody that binds | |
| | | | the gp41-gp120 interface; Nature 515 (7525), | |
| | | | 138-142 (2014), NCBI Accession # 4TOY_H | |
| | | | (243 aa) | |
| HIV8 | Fab Heavy Chain | 8anc195 | Scharf, L., et al., Cell Rep 7 (3), 785-795 | 26992 |
| | | | (2014), NCBI Accession # 4P9H_H (244aa) | |
| HIV9 | Fab Heavy Chain | B13 | Chen L. et al., Science 326 (5956), 1123-1127 | 26993 |
| | | | (2009), NCBI Accession # 3IDY_B (231aa) | |
| HIV10 | Fab Heavy Chain | Ch58 | Liao et al., vaccine Induction of Antibodies | 26994 |
| | | | against a Structurally Heterogeneous Site of | |
| | | | Immune Pressure within HIV-1 Envelope | |
| | | | Protein Variable region 1 and 2; Immunity 38 | |
| | | | (1), 176-186 (2013), NCBI Accession # | |
| | | | 4HQQ_H (231aa) | |
| HIV11 | Fab Heavy Chain | Ch59 | Liao et al., vaccine Induction of Antibodies | 26995 |
| | | | against a Structurally Heterogeneous Site of | |
| | | | Immune Pressure within HIV-1 Envelope | |
| | | | Protein Variable region 1 and 2; Immunity 38 | |
| | | | (1), 176-186 (2013), NCBI Accession # | |
| | | | 4HPY_H (225aa) | |
| HIV12 | Fab Heavy Chain | E51 | Huang C et al., Proc. Natl, Acad. Sci. U.S.A. | 26996 |
| | | | 101 (9), 2706-2711 (2004), NCBI Accession # | |
| | | | 1RZF_H (235aa) | |
| HIV13 | Fab Heavy Chain | N26-i1 Fab | NCBI Accession # 4FZE_H(232aa) | 26997 |
| HIV14 | Fab Heavy Chain | Pgt145 | McLellan, J. S. et al., Structure of HIV-1 gp120 | 26998 |
| | | | V1 V2 domain with broadly neutralizing | |
| | | | antibody PG9; Nature 480 (7377), 336-343 | |
| | | | (2011), NCBI Accession # 3U1S_H (267aa) | |
| HIV15 | Fab Heavy Chain Of | A32 Fab | NCBI Accession # 3TNM_A (231aa) | 26999 |
| | Human Anti-hiv-1 | | | |
| | Env Antibody A32 | | | |
| HIV16 | Fab Heavy Chain Of | C11 Fab | NCBI Accession # 4FZ8_H (237aa) | 27000 |
| | Human Anti-hiv-1 | | | |
| | Env Antibody C11 | | | |
| HIV17 | Fab Light Chain | 35o22 | Huang et al., Broad and potent HIV-1 | 27001 |
| | | | neutralization by a human antibody that binds | |
| | | | the gp41-gp120 interface; Nature 515 (7525), | |
| | | | 138-142 (2014), NCBI Accession # 4TOY_L | |
| | | | (216aa) | |
| HIV18 | Fab Light Chain | 8anc195 | Scharf, L., et al., Cell Rep 7 (3), 785-795 | 27002 |
| | | | (2014), NCBI Accession # 4P9H_L (215aa) | |
| HIV19 | Fab Light Chain | B13 | Chen L. et al., Science 326 (5956), 1123-1127 | 27003 |
| | | | (2009), NCBI Accession # 3IDY_C (215aa) | |
| HIV20 | Fab Light Chain | Ch58 | Liao et al., vaccine Induction of Antibodies | 27004 |
| | | | against a Structurally Heterogeneous Site of | |
| | | | Immune Pressure within HIV-1 Envelope | |
| | | | Protein Variable region 1 and 2; Immunity 38 | |
| | | | (1), 176-186 (2013), NCBI Accession # | |
| | | | 4HQQ_L (216aa) | |
| HIV21 | Fab Light Chain | Ch59 | Liao et al., vaccine Induction of Antibodies | 27005 |
| | | | against a Structurally Heterogeneous Site of | |
| | | | Immune Pressure within HIV-1 Envelope | |
| | | | Protein Variable region 1 and 2; Immunity 38 | |
| | | | (1), 176-186 (2013), NCBI Accession # | |
| | | | 4HPY_L (215aa) | |
| HIV22 | Fab Light Chain | E51 | Huang C et al., Proc. Natl. Acad. Sci. U.S.A. | 27006 |
| | | | 101 (9), 2706-2711 (2004), NCBI Accession # | |
| | | | 1RZF_L (213aa) | |
| HIV23 | Fab Light Chain | Monoclonal | Bartesaghi, A. et al., Perfusion structure of | 27007 |
| | | Antibody | trimeric HIV-1 envelope glycoprotein | |
| | | Vrc03 | determined by cryo-electron microscopy; Nat. | |
| | | | Struct. Mol. Biol. 20 (12), 1352-1357 (2013), | |
| | | | NCBI Accession # 4CC8_L (209aa) | |
| HIV24 | Fab Light Chain | N26-i1 Fab | NCBI Accession# 4FZE_L (212aa) | 27008 |
| HIV25 | Fab Light Chain | Pgt145 | McLellan, J. S. et al., Structure of HIV-1 gp120 | 27009 |
| | | | V1 V2 domain with broadly neutralizing | |
| | | | antibody PG9; Nature 480 (7377), 336-343 | |
| | | | (2011), NCBI Accession # 3U1S_L (239aa) | |
| HIV26 | Fab Light Chain Of | A32 Fab | NCBI Accession # 3TNM_B (216aa) | 27010 |
| | Human Anti-hiv-1 | | | |
| | Env Antibody A32 | | | |
| HIV27 | Fab Light Chain Of | C11 Fab | NCBI Accession # 4FZ8_L (218aa) | 27011 |
| | Human Anti-hiv-1 | | | |
| | Env Antibody C11 | | | |
| HIV28 | Fab Region Of The | Fab 2558 | Gorny et al., PLoS ONE 6 (12), E27780 (2011), | 27012 |
| | Heavy Chain | | NCBI Accession # 3UJI_H (223aa) | |
| HIV29 | Fab Region Of The | Fab 4025 | Gorny et al., PLoS ONE 6 (12), E27780 (2011), | 27013 |
| | Heavy Chain | | NCBI Accession # 3UJJ_H (230aa) | |
| HIV30 | Fab, Heavy Chain | 3bnc60 | Scheid, J. F., et al,. Science 333 (6049), 1633- | 27014 |
| | | | 1637 (2011), NCBI Accession # 3RPI_A | |
| | | | (229aa) | |
| HIV31 | Fab, Heavy Chain | 48d | Huang C C et al., Proc. Natl. Acad. Sci. U.S.A. | 27015 |
| | | | 101 (9), 2706-2711 (2004), NCBI Accession # | |
| | | | 1R27_H (219aa) | |
| HIV32 | Fab, Heavy Chain | 4e10Fab | Bird et al., Nat. Struct. Mol. Biol. (2014), NCBI | 27016 |
| | | | Accession # 4NGH_H (228aa) | |
| HIV33 | Fab, Heavy Chain | Ch58-ua | Nicely et al. Ebiomedicine 2 (2015), NCBI | 27017 |
| | | | Accession # 4RIS_H (230aa) | |
| HIV34 | Fab, Heavy chain | Mab 2909 | Spurrier, B., et al., Structure 19 (5), 691-699 | 27018 |
| | | | (2011), NCBI Accession # 3Q6F_J (233aa) | |
| HIV35 | Fab, Heavy Chain | Monoclonal | Bartesaghi, A. et al., Perfusion structure of | 27019 |
| | | Antibody | trimeric HIV-1 envelope glycoprotein | |
| | | Vrc03 | determined by cryo-electron microscopy; Nat. | |
| | | | Struct. Mol. Biol. 20 (12), 1352-1357 (2013), | |
| | | | NCBI Accession # 4CC8_I (233aa) | |
| HIV36 | Fab, light chain | 3bnc60 | Scheid, J. F., et al., Science 333 (6049), 1633- | 27020 |
| | | | 1637 (2011), NCBI Accession # 3RPI_B | |
| | | | (206aa) | |
| HIV37 | Fab, Light Chain | 48d | Huang C C et al., Proc. Natl. Acad. Sci. U.S.A. | 27021 |
| | | | 101 (9), 2706-2711. (2004), NCBI Accession # | |
| | | | 1RZ7_L (212aa) | |
| HIV38 | Fab, Light Chain | 4e10Fab | Bird et al., Nat. Struct. Mol. Biol. (2014), NCBI | 27022 |
| | | | Accession # 4NGH_L (215aa) | |
| HIV39 | Fab, Light Chain | Ch58-ua | Nicely et al. Ebiomedicine 2 (2015), NCBI | 27023 |
| | | | Accession # 4RIS_L (216aa) | |
| HIV40 | Fab, light Chain | Mab 2909 | Spurrier, B., et al., Structure 19 (5), 691-699 | 27024 |
| | | | (2011), NCBI Accession # 3Q6F_K (213aa) | |
| HIV41 | Gamma heavy chain | 1443_C16 | U.S. Pat. No. 9,051,362 SEQ ID NO: 12 | 27025 |
| HIV42 | Gamma heavy chain | 1471 M23 | U.S. Pat. No. 9,051,362 SEQ ID NO: 139 | 27026 |
| HIV43 | Gamma heavy chain | 1489_I13 | U.S. Pat. No. 9,051,362 SEQ ID NO: 59 | 27027 |
| HIV44 | Gamma heavy chain | 1503_H05 | U.S. Pat. No. 9,051,362 SEQ ID NO: 53 | 27028 |
| HIV45 | Gamma heavy chain | 1456_A12 | U.S. Pat. No. 9,051,362 SEQ ID NO: 48 | 27029 |
| | variable region | | | |
| HIV46 | Gamma heavy chain | 1456_P20 | U.S. Pat. No. 9,051,362 SEQ ID NO: 33 | 27030 |
| | variable region | | | |
| HIV47 | Gamma heavy chain | 1460_G14 | U.S. Pat. No. 9,051,362 SEQ ID NO: 35 | 27031 |
| | variable region | | | |
| HIV48 | Gamma heavy chain | 1470_M23 | U.S. Pat. No. 9,051,362 SEQ ID NO: 140 | 27032 |
| | variable region | | | |
| HIV49 | Gamma heavy chain | 1480_I08 | U.S. Pat. No. 9,051,362 SEQ ID NO: 31 | 27033 |
| | variable region | | | |
| HIV50 | Gamma heavy chain | 1480_I08 | U.S. Pat. No. 9,051,362 SEQ ID NO: 65 | 27034 |
| | variable region | | | |
| HIV51 | Gamma heavy chain | 1489_I13 | U.S. Pat. No. 9,051,362 SEQ ID NO: 60 | 27035 |
| | variable region | | | |
| HIV52 | Gamma heavy chain | 1495_C14 | U.S. Pat. No. 9,051,362 SEQ ID NO: 37 | 27036 |
| | variable region | | | |
| HIV53 | Gamma heavy chain | 1503_H05 | U.S. Pat. No. 9,051,362 SEQ ID NO: 54 | 27037 |
| | variable region | | | |
| HIV54 | Gamma heavy chain | 1496_C09 | U.S. Pat. No. 9,051,362 SEQ ID NO: 39 | 27038 |
| | variable region | | | |
| HIV55 | Gamma heavy chain | 1456_A12 | U.S. Pat. No. 9,051,362 SEQ ID NO: 47 | 27039 |
| HIV56 | Gamma heavy chain | 1460_G14 | U.S. Pat. No. 9,051,362 SEQ ID NO: 20 | 27040 |
| HIV57 | Gamma heavy chain | 1495_C14 | U.S. Pat. No. 9,051,362 SEQ ID NO: 24 | 27041 |
| HIV58 | Gamma heavy chain | 1496_C09 | U.S. Pat. No. 9,051,362 SEQ ID NO: 28 | 27042 |
| HIV59 | Gamma heavy | 1456_P20 | U.S. Pat. No. 9,051,362 SEQ ID NO: 16 | 27043 |
| HIV60 | Gp41-specific | | US20140348785 SEQ ID NO: 11 | 27044 |
| | antibody, heavy chain | | | |
| HIV61 | Gp41-specific | | US20140348785 SEQ ID NO: 146 | 27045 |
| | antibody, heavy chain | | | |
| | consensus | | | |
| HIV62 | Gp41-specific | | US20140348785 SEQ ID NO: 187 | 27046 |
| | antibody, heavy chain | | | |
| | consensus variable | | | |
| | region | | | |
| HIV63 | Gp41-specific | | US20140348785 SEQ ID NO: 188 | 27047 |
| | antibody, heavy chain | | | |
| | consensus variable | | | |
| | region | | | |
| HIV64 | Gp41-specific | | US20140348785 SEQ ID NO: 153 | 27048 |
| | antibody, heavy chain | | | |
| | variable region | | | |
| HIV65 | Gp41-specific | | US20140348785 SEQ ID NO: 154 | 27049 |
| | antibody, heavy chain | | | |
| | variable region | | | |
| HIV66 | Gp41-specific | | US20140348785 SEQ ID NO: 155 | 27050 |
| | antibody, heavy chain | | | |
| | variable region | | | |
| HIV67 | Gp41-specific | | US20140348785 SEQ ID NO: 156 | 27051 |
| | antibody, heavy chain | | | |
| | variable region | | | |
| HIV68 | Gp41-specific | | US20140348785 SEQ ID NO: 157 | 27052 |
| | antibody, heavy chain | | | |
| | variable region | | | |
| HIV69 | Gp41-specific | | US20140348785 SEQ ID NO: 158 | 27053 |
| | antibody, heavy chain | | | |
| | variable region | | | |
| HIV70 | Gp41-specific | | US20140348785 SEQ ID NO: 159 | 27054 |
| | antibody, heavy chain | | | |
| | variable region | | | |
| HIV71 | Gp41-specific | | US20140348785 SEQ ID NO: 160 | 27055 |
| | antibody, heavy chain | | | |
| | variable region | | | |
| HIV72 | Gp41-specific | | US20140348785 SEQ ID NO: 161 | 27056 |
| | antibody, heavy chain | | | |
| | variable region | | | |
| HIV73 | Gp41-specific | | US20140348785 SEQ ID NO: 162 | 27057 |
| | antibody, heavy chain | | | |
| | variable region | | | |
| HIV74 | Gp41 -specific | | US20140348785 SEQ ID NO: 163 | 27058 |
| | antibody, heavy chain | | | |
| | variable region | | | |
| HIV75 | Gp41-specific | | US20140348785 SEQ ID NO: 189 | 27059 |
| | antibody, heavy chain | | | |
| | variable region | | | |
| HIV76 | Gp41-specific | | US20140348785 SEQ ID NO: 190 | 27060 |
| | antibody, heavy chain | | | |
| | variable region | | | |
| HIV77 | Gp41-specific | | US20140348785 SEQ ID NO: 191 | 27061 |
| | antibody, heavy chain | | | |
| | variable region | | | |
| HIV78 | Gp41-specific | | US20140348785 SEQ ID NO: 192 | 27062 |
| | antibody, heavy chain | | | |
| | variable region | | | |
| HIV79 | Gp41-specific | | US20140348785 SEQ ID NO: 200 | 27063 |
| | antibody, heavy chain | | | |
| | variable region | | | |
| HIV80 | Gp41-specific | | US20140348785 SEQ ID NO: 201 | 27064 |
| | antibody, heavy chain | | | |
| | variable region | | | |
| HIV81 | Gp41-specific | | US20140348785 SEQ ID NO: 202 | 27065 |
| | antibody, heavy chain | | | |
| | variable region | | | |
| HIV82 | Gp41-specific | | US20140348785 SEQ ID NO: 203 | 27066 |
| | antibody, heavy chain | | | |
| | variable region | | | |
| HIV83 | Gp41-specific | | US20140348785 SEQ ID NO: 204 | 27067 |
| | antibody, heavy chain | | | |
| | variable region | | | |
| HIV84 | Gp41-specific | | US20140348785 SEQ ID NO: 205 | 27068 |
| | antibody, heavy chain | | | |
| | variable region | | | |
| HIV85 | Gp41-specific | | US20140348785 SEQ ID NO: 206 | 27069 |
| | antibody, heavy chain | | | |
| | variable region | | | |
| HIV86 | Gp41-specific | | US20140348785 SEQ ID NO: 207 | 27070 |
| | antibody, heavy chain | | | |
| | variable region | | | |
| HIV87 | Gp41-specific | | US20140348785 SEQ ID NO: 208 | 27071 |
| | antibody, heavy chain | | | |
| | variable region | | | |
| HIV88 | Gp41-specific | | US20140348785 SEQ ID NO: 209 | 27072 |
| | antibody, heavy chain | | | |
| | variable region | | | |
| HIV89 | Gp41-specific | | US20140348785 SEQ ID NO: 12 | 27073 |
| | antibody, light chain | | | |
| | variable region | | | |
| HIV90 | Gp41-specific | | US20140348785 SEQ ID NO: 164 | 27074 |
| | antibody, light chain | | | |
| | variable region | | | |
| HIV91 | Gp41-specific | | US20140348785 SEQ ID NO: 165 | 27075 |
| | antibody, light chain | | | |
| | variable region | | | |
| HIV92 | Gp41-specific | | US20140348785 SEQ ID NO: 166 | 27076 |
| | antibody, light chain | | | |
| | variable region | | | |
| HIV93 | Gp41-specific | | US20140348785 SEQ ID NO: 167 | 27077 |
| | antibody, light chain | | | |
| | variable region | | | |
| HIV94 | Gp41-specific | | US20140348785 SEQ ID NO: 168 | 27078 |
| | antibody, light chain | | | |
| | variable region | | | |
| HIV95 | Gp41-specific | | US20140348785 SEQ ID NO: 169 | 27079 |
| | antibody, light chain | | | |
| | variable region | | | |
| HIV96 | Gp41-specific | | US20140348785 SEQ ID NO: 170 | 27080 |
| | antibody, light chain | | | |
| | variable region | | | |
| HIV97 | Gp41-specific | | US20140348785 SEQ ID NO: 171 | 27081 |
| | antibody, light chain | | | |
| | variable region | | | |
| HIV98 | Gp41-specific | | US20140348785 SEQ ID NO: 172 | 27082 |
| | antibody, light chain | | | |
| | variable region | | | |
| HIV99 | Gp41-specific | | US20140348785 SEQ ID NO: 173 | 27083 |
| | antibody, light chain | | | |
| | variable region | | | |
| HIV100 | Gp41-specific | | US20140348785 SEQ ID NO: 174 | 27084 |
| | antibody, light chain | | | |
| | variable region | | | |
| HIV101 | Gp41-specific | | US20140348785 SEQ ID NO: 175 | 27085 |
| | antibody, light chain | | | |
| | variable region | | | |
| HIV102 | Gp41-specific | | US20140348785 SEQ ID NO: 176 | 27086 |
| | antibody, light chain | | | |
| | variable region | | | |
| HIV103 | Gp41-specific | | US20140348785 SEQ ID NO: 177 | 27087 |
| | antibody, light chain | | | |
| | variable region | | | |
| HIV104 | Gp41-specific | | US20140348785 SEQ ID NO: 178 | 27088 |
| | antibody, light chain | | | |
| | variable region | | | |
| HIV105 | Gp41-specific | | US20140348785 SEQ ID NO: 179 | 27089 |
| | antibody, light chain | | | |
| | variable region | | | |
| HIV106 | Gp41-specific | | US20140348785 SEQ ID NO: 180 | 27090 |
| | antibody, light chain | | | |
| | variable region | | | |
| HIV107 | Gp41-specific | | US20140348785 SEQ ID NO: 181 | 27091 |
| | antibody, light chain | | | |
| | variable region | | | |
| HIV108 | Gp41-specific | | US20140348785 SEQ ID NO: 182 | 27092 |
| | antibody, light chain | | | |
| | variable region | | | |
| HIV109 | Gp41-specific | | US20140348785 SEQ ID NO: 183 | 27093 |
| | antibody, light chain | | | |
| | variable region | | | |
| HIV110 | Gp41-specific | | US20140348785 SEQ ID NO: 184 | 27094 |
| | antibody, light chain | | | |
| | variable region | | | |
| HIV111 | Gp41-specific | | US20140348785 SEQ ID NO: 185 | 27095 |
| | antibody, light chain | | | |
| | variable region | | | |
| HIV112 | Gp41-specific | | US20140348785 SEQ ID NO: 186 | 27096 |
| | antibody, light chain | | | |
| | variable region | | | |
| HIV113 | Gp41-specific | | US20140348785 SEQ ID NO: 197 | 27097 |
| | antibody, light chain | | | |
| | variable region | | | |
| HIV114 | Gp41-specific | | US20140348785 SEQ ID NO: 198 | 27098 |
| | antibody, light chain | | | |
| | variable region | | | |
| HIV115 | Gp41-specific | | US20140348785 SEQ ID NO: 199 | 27099 |
| | antibody, light chain | | | |
| | variable region | | | |
| HIV116 | Heavy chain | Vrc06b | Wu, X., et al., Maturation and Diversity of the | 27100 |
| | | | VRC01-Antibody Lineage over 15 Years of | |
| | | | Chronic HIV-1 Infection; Cell 161 (3), 470-485 | |
| | | | (2015), NCBI Accession # 4XNZ_E (234aa) | |
| HIV117 | Heavy Chain | 2424 | Kumar, R., et al., Functional and Structural | 27101 |
| | | | Characterization of Human V3-Specific | |
| | | | Monoclonal Antibody 2424 with Neutralizing | |
| | | | Activity against HIV-1 JRFL; J. Virol. 89 (17), | |
| | | | 9090-9102 (2015), NCBI Accession # | |
| | | | 4XML_H(223aa) | |
| HIV118 | Heavy chain | 5827 | US20140205607 Table S13 | 27102 |
| HIV119 | Heavy chain | 7863 | US20140205607 Table S13 | 27103 |
| HIV120 | Heavy Chain | 8062 | Gustchina, E., PLoS ONE 8 (11), E78187 | 27104 |
| | | | (2013), NCBI Accession # 4KHX_H(245aa) | |
| HIV121 | Heavy chain | 18761 | US20140205607 Table S13 | 27105 |
| HIV122 | Heavy chain | 19891 | US20140205607 Table S13 | 27106 |
| HIV123 | Heavy chain | 22425 | US20140205607 Table S13 | 27107 |
| HIV124 | Heavy chain | 28241 | US20140205607 Table S13 | 27108 |
| HIV125 | Heavy chain | 61272 | US20140205607 Table S13 | 27109 |
| HIV126 | Heavy chain | 61822 | US20140205607 Table S13 | 27110 |
| HIV127 | Heavy chain | 65030 | US20140205607 Table S13 | 27111 |
| HIV128 | Heavy chain | 70085 | US20140205607 Table S13 | 27112 |
| HIV129 | Heavy chain | 70542 | US20140205607 Table S13 | 27113 |
| HIV130 | Heavy chain | 80585 | US20140205607 Table S13 | 27114 |
| HIV131 | Heavy chain | 87722 | US20140205607 Table S13 | 27115 |
| HIV132 | Heavy chain | 96362 | US20140205607 Table S13 | 27116 |
| HIV133 | Heavy chain | 103787 | US20140205607 Table S13 | 27117 |
| HIV134 | Heavy chain | 146940 | US20140205607 Table S13 | 27118 |
| HIV135 | Heavy chain | 153849 | US20140205607 Table S13 | 27119 |
| HIV136 | Heavy chain | 1.00E+09 | US20140348785 SEQ ID NO: 1 | 27120 |
| HIV137 | Heavy chain | 104625_2 | US20140205607 Table S14 | 27121 |
| HIV138 | Heavy chain | 105239_4 | US20140205607 Table S14 | 27122 |
| HIV139 | Heavy chain | 10731_1 | US20140205607 Table S14 | 27123 |
| HIV140 | Heavy Chain | 10e8 | Huang J et al., Nature 491 (7424), 406-412 | 27124 |
| | | (monoclonal) | (2012), NCBI Accession # 4G6F_B (236aa) | |
| HIV141 | Heavy chain | 120119_4 | US20140205607 Table S14 | 27125 |
| HIV142 | Heavy chain | 121325_4 | US20140205607 Table S14 | 27126 |
| HIV143 | Heavy chain | 12467_3 | US20140205607 Table S14 | 27127 |
| HIV144 | Heavy chain | 124918_2 | US20140205607 Table S14 | 27128 |
| HIV145 | Heavy chain | 127586_4 | US20140205607 Table S14 | 27129 |
| HIV146 | Heavy chain | 12A10HC | US20140328862 SEQ ID NO: 147 | 27130 |
| HIV147 | Heavy chain | 12A12HC | US20140328862 SEQ ID NO: 148 | 27131 |
| HIV148 | Heavy chain | 12A13HC | US20140328862 SEQ ID NO: 149 | 27132 |
| HIV149 | Heavy chain | 12A16HC | US20140328862 SEQ ID NO: 150 | 27133 |
| HIV150 | Heavy chain | 12A17HC | US20140328862 SEQ ID NO: 151 | 27134 |
| HIV151 | Heavy chain | 12A1HC | US20140328862 SEQ ID NO: 152 | 27135 |
| HIV152 | Heavy chain | 12A20HC | US20140328862 SEQ ID NO: 153 | 27136 |
| HIV153 | Heavy Chain | 12a21 | NCBI Accession # 4JPW_H (225aa) | 27137 |
| HIV154 | Heavy chain | 12A21HC | US20140328862 SEQ ID NO: 154 | 27138 |
| HIV155 | Heavy chain | I2A22HC | US20140328862 SEQ ID NO: 155 | 27139 |
| HIV156 | Heavy chain | 12A23HC | US20140328862 SEQ ID NO: 156 | 27140 |
| HIV157 | Heavy chain | 12A27HC | US20140328862 SEQ ID NO: 157 | 27141 |
| HIV158 | Heavy chain | 12A2HC | US20140328862 SEQ ID NO: 158 | 27142 |
| HIV159 | Heavy chain | 12A30HC | US20140328862 SEQ ID NO: 159 | 27143 |
| HIV160 | Heavy chain | 12A37HC | US20140328862 SEQ ID NO: 160 | 27144 |
| HIV161 | Heavy chain | 12A46HC | US20140328862 SEQ ID NO: 161 | 27145 |
| HIV162 | Heavy chain | 12A4HC | US20140328862 SEQ ID NO: 162 | 27146 |
| HIV163 | Heavy chain | 12A55HC | US20140328862 SEQ ID NO: 163 | 27147 |
| HIV164 | Heavy chain | 12A56HC | US20140328862 SEQ ID NO: 164 | 27148 |
| HIV165 | Heavy chain | 12A6HC | US20140328862 SEQ ID NO: 165 | 27149 |
| HIV166 | Heavy chain | 12A7HC | US20140328862 SEQ ID NO: 166 | 27150 |
| HIV167 | Heavy chain | 12A9HC | US20140328862 SEQ ID NO: 167 | 27151 |
| HIV168 | Heavy chain | 132797_4 | US20140205607 Table S14 | 27152 |
| HIV169 | Heavy chain | 135083_3 | US20140205607 Table S14 | 27153 |
| HIV170 | Heavy chain | 13826_2 | US20140205607 Table S14 | 27154 |
| HIV171 | Heavy chain | 143251_3 | US20140205607 Table S14 | 27155 |
| HIV172 | Heavy chain | 149590_4 | US20140205607 Table S14 | 27156 |
| HIV173 | Heavy chain | 149768_4 | US20140205607 Table S14 | 27157 |
| HIV174 | Heavy chain | 151901_4 | US20140205607 Table S14 | 27158 |
| HIV175 | Heavy chain | 156858_3 | US20140205607 Table S14 | 27159 |
| HIV176 | Heavy chain | 164202_3 | US20140205607 Table S14 | 27160 |
| HIV177 | Heavy chain | 164922_3 | US20140205607 Table S14 | 27161 |
| HIV178 | Heavy chain | 165478_2 | US20140205607 Table S14 | 27162 |
| HIV179 | Heavy chain | 166726_3 | US20140205607 Table S14 | 27163 |
| HIV180 | Heavy chain | 167612_4 | US20140205607 Table S14 | 27164 |
| HIV181 | Heavy chain | 168509_2 | US20140205607 Table S14 | 27165 |
| HIV182 | Heavy chain | 169094_4 | US20140205607 Table S14 | 27166 |
| HIV183 | Heavy chain | 17720_4 | US20140205607 Table S14 | 27167 |
| HIV184 | Heavy chain | 178037_3 | US20140205607 Table S14 | 27168 |
| HIV185 | Heavy chain | 179400_4 | US20140205607 Table S14 | 27169 |
| HIV186 | Heavy chain | 179500_4 | US20140205607 Table S14 | 27170 |
| HIV187 | Heavy chain | 179888_3 | US20140205607 Table S14 | 27171 |
| HIV188 | Heavy Chain | 17b | Kwong, P. D., et al., structure of an HIV gp120 | 27172 |
| | | | envelope glycoprotein in complex with the CD4 | |
| | | | receptor and a neutralizing human antibody; | |
| | | | Nature 393 (6686), 648-659 (1998), NCBI | |
| | | | Accession# 1G9M_H (229aa) | |
| HIV189 | Heavy chain | 18278_1 | US20140205607 Table S14 | 27173 |
| HIV190 | Heavy chain | 184939_4 | US20140205607 Table S14 | 27174 |
| HIV191 | Heavy chain | 185961_4 | US20140205607 Table S14 | 27175 |
| HIV192 | Heavy chain | 186066_4 | US20140205607 Table S14 | 27176 |
| HIV193 | Heavy chain | 186275_2 | US20140205607 Table S14 | 27177 |
| HIV194 | Heavy chain | 186640_2 | US20140205607 Table S14 | 27178 |
| HIV195 | Heavy chain | 190244_4 | US20140205607 Table S14 | 27179 |
| HIV196 | Heavy chain | 193526_4 | US20140205607 Table S14 | 27180 |
| HIV197 | Heavy chain | 193896_4 | US20140205607 Table S14 | 27181 |
| HIV198 | Heavy chain | 195462_4 | US20140205607 Table S14 | 27182 |
| HIV199 | Heavy chain | 196147_4 | US20140205607 Table S14 | 27183 |
| HIV200 | Heavy chain | 196283_4 | US20140205607 Table S14 | 27184 |
| HIV201 | Heavy Chain | 1b2530 | Zhou T el al., Structural Repertoire of HIV-1- | 27185 |
| | | | Neutralizing Antibodies Targeting the CD4 | |
| | | | Supersite in 14 Donors; Cell 161 (6), 1280- | |
| | | | 1292 (2015), NCBI Accession # 4YFL_H | |
| | | | (227aa) | |
| HIV202 | Heavy chain | 1F7 | U.S. Pat. No. 6,057,421A FIG. 8 | 27186 |
| HIV203 | Heavy chain | 1NC9 | WO2012154312 SEQ ID NO: 2471 | 27187 |
| HIV204 | Heavy Chain | 2.2C | Acharya, P., et al., Structural Definition of an | 27188 |
| | | | Antibody-Dependent Cellular Cytotoxicity | |
| | | | Response Implicated in Reduced Risk for HIV- | |
| | | | 1 Infection; J. Virol. 88 (21), 12895-12906 | |
| | | | (2014), NCBI Accession # 4R4N_H (220aa) | |
| HIV205 | Heavy chain | 24972_4 | US20140205607 Table S14 | 27189 |
| HIV206 | Heavy chain | 28936_1 | US20140205607 Table S14 | 27190 |
| HIV207 | Heavy chain | 2F5 | U.S. Pat. No. 8,637,036B2 SEQ ID NO: 5 | 27191 |
| HIV208 | Heavy chain | 2F5 F100BW | U.S. Pat. No. 8,637,036B2 SEQ ID NO: 7 | 27192 |
| HIV209 | Heavy chain | 2F5 L100AW | U.S. Pat. No. 8,637,036B2 SEQ ID NO: 6 | 27193 |
| HIV210 | Heavy chain | 2F5 | U.S. Pat. No. 8,637,036B2 SEQ ID NO: 9 | 27194 |
| | | L100AW- | | |
| | | V100DW | | |
| HIV211 | Heavy chain | 2F5 | U.S. Pat. No. 8,637,036B2 SEQ ID NO: 8 | 27195 |
| | | V100DW | | |
| HIV212 | Heavy chain | 30263_2 | US20140205607 Table S14 | 27196 |
| HIV213 | Heavy chain | 3040HC | WO2015117008 SEQ ID NO: 14 | 27197 |
| HIV214 | Heavy chain | 3044HC | WO20S5117008 SEQ ID NO: 17 | 27198 |
| HIV215 | Heavy chain | 31458_3 | US20140205607 Table S14 | 27199 |
| HIV216 | Heavy chain | 3430HC | WO2015117008 SEQ ID NO: 15 | 27200 |
| HIV217 | Heavy chain | 3484HC | WO2015117008 SEQ ID NO: 16 | 27201 |
| HIV218 | Heavy chain | 3630HC | WO2015117008 SEQ ID NO: 18 | 27202 |
| HIV219 | Heavy chain | 3A124HC | US20140328862 SEQ ID NO: 261 | 27203 |
| HIV220 | Heavy chain | 3A125HC | US20140328862 SEQ ID NO: 262 | 27204 |
| HIV221 | Heavy chain | 3A140HC | US20140328862 SEQ ID NO: 263 | 27205 |
| HIV222 | Heavy chain | 3A144HC | US20140328862 SEQ ID NO: 264 | 27206 |
| HIV223 | Heavy chain | 3A160HC | US20140328862 SEQ ID NO: 265 | 27207 |
| HIV224 | Heavy chain | 3A18HC | US20140328862 SEQ ID NO: 266 | 27208 |
| HIV225 | Heavy chain | 3A204HC | US20140328862 SEQ ID NO: 267 | 27209 |
| HIV226 | Heavy chain | 3A228HC | US20140328862 SEQ ID NO: 268 | 27210 |
| HIV227 | Heavy chain | 3A233HC | US20140328862 SEQ ID NO: 269 | 27211 |
| HIV228 | Heavy chain | 3A244HC | US20140328862 SEQ ID NO: 270 | 27212 |
| HIV229 | Heavy chain | 3A255HC | US20140328862 SEQ ID NO: 271 | 27213 |
| HIV230 | Heavy chain | 3A296HC | US20140328862 SEQ ID NO: 272 | 27214 |
| HIV231 | Heavy chain | 3A334HC | US20140328862 SEQ ID NO: 273 | 27215 |
| HIV232 | Heavy chain | 3A366HC | US20140328862 SEQ ID NO: 274 | 27216 |
| HIV233 | Heavy chain | 3A381HC | US20140328862 SEQ ID NO: 275 | 27217 |
| HIV234 | Heavy chain | 3A384HC | US20140328862 SEQ ID NO: 276 | 27218 |
| HIV235 | Heavy chain | 3A419HC | US20140328862 SEQ ID NO: 277 | 27219 |
| HIV236 | Heavy chain | 3a426hc | US20140328862 SEQ ID NO: 343 | 27220 |
| HIV237 | Heavy chain | 3A461HC | US20140328862 SEQ ID NO: 278 | 27221 |
| HIV238 | Heavy chain | 3A474HC | US20140328862 SEQ ID NO: 279 | 27222 |
| HIV239 | Heavy chain | 3a515hc | US20140328862 SEQ ID NO: 344 | 27223 |
| HIV240 | Heavy chain | 3A518HC | US20140328862 SEQ ID NO: 280 | 27224 |
| HIV241 | Heavy chain | 3A539HC | US20140328862 SEQ ID NO: 281 | 27225 |
| HIV242 | Heavy chain | 3A576HC | US20140328862 SEQ ID NO: 282 | 27226 |
| HIV243 | Heavy chain | 3A613HC | US20140328862 SEQ ID NO: 283 | 27227 |
| HIV244 | Heavy chain | 3A64HC | US20140328862 SEQ ID NO: 284 | 27228 |
| HIV245 | Heavy chain | 3A650HC | US20140328862 SEQ ID NO: 285 | 27229 |
| HIV246 | Heavy chain | 3A67HC | US20140328862 SEQ ID NO: 286 | 27230 |
| HIV247 | Heavy chain | 3A779HC | US20140328862 SEQ ID NO: 287 | 27231 |
| HIV248 | Heavy chain | 3A816HC | US20140328862 SEQ ID NO: 288 | 27232 |
| HIV249 | Heavy chain | 3A869HC | US20140328862 SEQ ID NO: 289 | 27233 |
| HIV250 | Heavy chain | 3A93HC | US20140328862 SEQ ID NO: 290 | 27234 |
| HIV251 | Heavy chain | 3A966HC | US20140328862 SEQ ID NO: 291 | 27235 |
| HIV252 | Heavy chain | 3A978HC | US20140328862 SEQ ID NO: 292 | 27236 |
| HIV253 | Heavy chain | 3ANC32HC | US20140328862 SEQ ID NO: 346 | 27237 |
| HIV254 | Heavy chain | 3ANC3HC | US20140328862 SEQ ID NO: 293 | 27238 |
| HIV255 | Heavy chain | 3ANC3HC | US20140328862 SEQ ID NO: 347 | 27239 |
| HIV256 | Heavy chain | 3ANC41HC | US20140328862 SEQ ID NO: 348 | 27240 |
| HIV257 | Heavy chain | 3ANC42HC | US20140328862 SEQ ID NO: 294 | 27241 |
| HIV258 | Heavy chain | 3ANC42HC | US20140328862 SEQ ID NO: 349 | 27242 |
| HIV259 | Heavy chain | 3ANC66HC | US20140328862 SEQ ID NO: 295 | 27243 |
| HIV260 | Heavy chain | 3ANC66HC | US20140328862 SEQ ID NO: 350 | 27244 |
| HIV261 | Heavy chain | 3ANC70HC | US20140328862 SEQ ID NO: 351 | 27245 |
| HIV262 | Heavy chain | 3ANC75HC | US20140328862 SEQ ID NO: 352 | 27246 |
| HIV263 | Heavy chain | 3ANC79HC | US20140328862 SEQ ID NO: 296 | 27247 |
| HIV264 | Heavy chain | 3ANC79HC | US20140328862 SEQ ID NO: 353 | 27248 |
| HIV265 | Heavy chain | 3ANC87HC | US20140328862 SEQ ID NO: 354 | 27249 |
| HIV266 | Heavy chain | 3ANC8HC | US20140328862 SEQ ID NO: 355 | 27250 |
| HIV267 | Heavy chain | 3ANC96HC | US20140328862 SEQ ID NO: 356 | 27251 |
| HIV268 | Heavy chain | 3B106HC | US20140328862 SEQ ID NO: 357 | 27252 |
| HIV269 | Heavy chain | 3B10HC | US20140328862 SEQ ID NO: 297 | 27253 |
| HIV270 | Heavy chain | 3B120HC | US20140328862 SEQ ID NO: 298 | 27254 |
| HIV271 | Heavy chain | 3B126HC | US20140328862 SEQ ID NO: 299 | 27255 |
| HIV272 | Heavy chain | 3B129HC | US20140328862 SEQ ID NO: 300 | 27256 |
| HIV273 | Heavy chain | 3B142HC | US20140328862 SEQ ID NO: 301 | 27257 |
| HIV274 | Heavy chain | 3B154HC | US20140328862 SEQ ID NO: 302 | 27258 |
| HIV275 | Heavy chain | 3B165HC | US20140328862 SEQ ID NO: 303 | 27259 |
| HIV276 | Heavy chain | 3B16HC | US20140328862 SEQ ID NO: 358 | 27260 |
| HIV277 | Heavy chain | 3B171HC | US20140328862 SEQ ID NO: 304 | 27261 |
| HIV278 | Heavy chain | 3B17HC | US20140328862 SEQ ID NO: 305 | 27262 |
| HIV279 | Heavy chain | 3B180HC | US20140328862 SEQ ID NO: 359 | 27263 |
| HIV280 | Heavy chain | 3B183HC | US20140328862 SEQ ID NO: 360 | 27264 |
| HIV281 | Heavy chain | 3B186HC | US20140328862 SEQ ID NO: 306 | 27265 |
| HIV282 | Heavy chain | 3B191HC | US20140328862 SEQ ID NO: 361 | 27266 |
| HIV283 | Heavy chain | 3B193HC | US20140328862 SEQ ID NO: 307 | 27267 |
| HIV284 | Heavy chain | 3B21HC | US20140328862 SEQ ID NO: 362 | 27268 |
| HIV285 | Heavy chain | 3B22HC | US20140328862 SEQ ID NO: 308 | 27269 |
| HIV286 | Heavy chain | 3B27HC | US20140328862 SEQ ID NO: 309 | 27270 |
| HIV287 | Heavy chain | 3B29HC | US20140328862 SEQ ID NO: 310 | 27271 |
| HIV288 | Heavy chain | 3B2HC | US20140328862 SEQ ID NO: 311 | 27272 |
| HIV289 | Heavy chain | 3B31HC | US20140328862 SEQ ID NO: 312 | 27273 |
| HIV290 | Heavy chain | 3B33HC | US20140328862 SEQ ID NO: 313 | 27274 |
| HIV291 | Heavy chain | 3B40HC | US20140328862 SEQ ID NO: 314 | 27275 |
| HIV292 | Heavy chain | 3B41HC | US20140328862 SEQ ID NO: 315 | 27276 |
| HIV293 | Heavy chain | 3B44HC | US20140328862 SEQ ID NO: 316 | 27277 |
| HIV294 | Heavy chain | 3B45HC | US20140328862 SEQ ID NO: 317 | 27278 |
| HIV295 | Heavy chain | 3b46HC | US20140328862 SEQ ID NO: 345 | 27279 |
| HIV296 | Heavy chain | 3B48HC | US20140328862 SEQ ID NO: 318 | 27280 |
| HIV297 | Heavy chain | 3B50HC | US20140328862 SEQ ID NO: 319 | 27281 |
| HIV298 | Heavy chain | 3B51HC | US20140328862 SEQ ID NO: 320 | 27282 |
| HIV299 | Heavy chain | 3B56HC | US20140328862 SEQ ID NO: 321 | 27283 |
| HIV300 | Heavy chain | 3B57HC | US20140328862 SEQ ID NO: 322 | 27284 |
| HIV301 | Heavy chain | 3B5HC | US20140328862 SEQ ID NO: 323 | 27285 |
| HIV302 | Heavy chain | 3B61HC | US20140328862 SEQ ID NO: 324 | 27286 |
| HIV303 | Heavy chain | 3B6HC | US20140328862 SEQ ID NO: 325 | 27287 |
| HIV304 | Heavy chain | 3B77HC | US20140328862 SEQ ID NO: 326 | 27288 |
| HIV305 | Heavy chain | 3B79HC | US20140328862 SEQ ID NO: 327 | 27289 |
| HIV306 | Heavy chain | 3B84HC | US20140328862 SEQ ID NO: 328 | 27290 |
| HIV307 | Heavy chain | 3B86HC | US20140328862 SEQ ID NO: 329 | 27291 |
| HIV308 | Heavy chain | 3B8HC | US20140328862 SEQ ID NO: 330 | 27292 |
| HIV309 | Heavy chain | 3B93HC | US20140328862 SEQ ID NO: 331 | 27293 |
| HIV310 | Heavy chain | 3BBM60 | US20140328862 SEQ ID NO: 363 | 27294 |
| HIV311 | Heavy chain | 3BBM60 | US20140328862 SEQ ID NO: 364 | 27295 |
| HIV312 | Heavy chain | 3BBM60 | US20140328862 SEQ ID NO: 365 | 27296 |
| HIV313 | Heavy chain | 3BBM60 | US20140328862 SEQ ID NO: 366 | 27297 |
| HIV314 | Heavy chain | 3BBM60 | US20140328862 SEQ ID NO: 367 | 27298 |
| HIV315 | Heavy chain | 3BBM60 | US20140328862 SEQ ID NO: 368 | 27299 |
| HIV316 | Heavy chain | 3BBM60 | US20140328862 SEQ ID NO: 369 | 27300 |
| HIV317 | Heavy chain | 3BBM60 | US20140328862 SEQ ID NO: 370 | 27301 |
| HIV318 | Heavy chain | 3BBM60 | US20140328862 SEQ ID NO: 371 | 27302 |
| HIV319 | Heavy chain | 3BBM60 | US20140328862 SEQ ID NO: 372 | 27303 |
| HIV320 | Heavy chain | 3BBM60 | US20140328862 SEQ ID NO: 373 | 27304 |
| HIV321 | Heavy chain | 3BBM60 | US20140328862 SEQ ID NO: 374 | 27305 |
| HIV322 | Heavy chain | 3BBM60 | US20140328862 SEQ ID NO: 375 | 27306 |
| HIV323 | Heavy chain | 3BBM60 | US20140328862 SEQ ID NO: 376 | 27307 |
| HIV324 | Heavy chain | 3BBM60 | US20140328862 SEQ ID NO: 377 | 27308 |
| HIV325 | Heavy chain | 3BNC101HC | US20140328862 SEQ ID NO: 332 | 27309 |
| HIV326 | Heavy chain | 3BNC101HC | US20140328862 SEQ ID NO: 378 | 27310 |
| HIV327 | Heavy chain | 3BNC102HC | US20140328862 SEQ ID NO: 379 | 27311 |
| HIV328 | Heavy chain | 3BNC104HC | US20140328862 SEQ ID NO: 380 | 27312 |
| HIV329 | Heavy chain | 3BNC105HC | US20140328862 SEQ ID NO: 381 | 27313 |
| HIV330 | Heavy chain | 3BNC106HC | US20140328862 SEQ ID NO: 382 | 27314 |
| HIV331 | Heavy chain | 3BNC107HC | US20140328862 SEQ ID NO: 383 | 27315 |
| HIV332 | Heavy chain | 3BNC108HC | US20140328862 SEQ ID NO: 384 | 27316 |
| HIV333 | Heavy chain | 3BNC10HC | US20140328862 SEQ ID NO: 385 | 27317 |
| HIV334 | Heavy chain | 3BNC114HC | US20140328862 SEQ ID NO: 386 | 27318 |
| HIV335 | Heavy Chain | 3bnc117 | Zhou T et al., Immunity 39 (2), 245-258 (2013), | 27319 |
| | | | NCBI Accession # 4LSV_H (226aa) | |
| HIV336 | Heavy chain | 3BNC117HC | US20140328862 SEQ ID NO: 387 | 27320 |
| HIV337 | Heavy chain | 3BNC124HC | US20140328862 SEQ ID NO: 333 | 27321 |
| HIV338 | Heavy chain | 3BNC126HC | US20140328862 SEQ ID NO: 388 | 27322 |
| HIV339 | Heavy chain | 3BNC127HC | US20140328862 SEQ ID NO: 389 | 27323 |
| HIV340 | Heavy chain | 3BNC130HC | US20140328862 SEQ ID NO: 334 | 27324 |
| HIV341 | Heavy chain | 3BNC134HC | US20140328862 SEQ ID NO: 390 | 27325 |
| HIV342 | Heavy chain | 3BNC140HC | US20140328862 SEQ ID NO: 391 | 27326 |
| HIV343 | Heavy chain | 3BNC141HC | US20140328862 SEQ ID NO: 392 | 27327 |
| HIV344 | Heavy chain | 3BNC142HC | US20140328862 SEQ ID NO: 393 | 27328 |
| HIV345 | Heavy chain | 3BNC148HC | US20140328862 SEQ ID NO: 394 | 27329 |
| HIV346 | Heavy chain | 3BNC149HC | US20140328862 SEQ ID NO: 335 | 27330 |
| HIV347 | Heavy chain | 3BNC149HC | US20140328862 SEQ ID NO: 395 | 27331 |
| HIV348 | Heavy chain | 3BNC151HC | US20140328862 SEQ ID NO: 396 | 27332 |
| HIV349 | Heavy chain | 3BNC153HC | US20140328862 SEQ ID NO: 397 | 27333 |
| HIV350 | Heavy chain | 3BNC156HC | US20140328862 SEQ ID NO: 398 | 27334 |
| HIV351 | Heavy chain | 3BNC158HC | US20140328862 SEQ ID NO: 399 | 27335 |
| HIV352 | Heavy chain | 3BNC159HC | US20140328862 SEQ ID NO: 400 | 27336 |
| HIV353 | Heavy chain | 3BNC15HC | US20140328862 SEQ ID NO: 401 | 27337 |
| HIV354 | Heavy chain | 3BNC173HC | US20140328862 SEQ ID NO: 402 | 27338 |
| HIV355 | Heavy chain | 3BNC175HC | US20140328862 SEQ ID NO: 403 | 27339 |
| HIV356 | Heavy chain | 3BNC176HC | US20140328862 SEQ ID NO: 404 | 27340 |
| HIV357 | Heavy chain | 3BNC177HC | US20140328862 SEQ ID NO: 336 | 27341 |
| HIV358 | Heavy chain | 3BNC17HC | US20140328862 SEQ ID NO: 337 | 27342 |
| HIV359 | Heavy chain | 3BNC181HC | US20140328862 SEQ ID NO: 405 | 27343 |
| HIV360 | Heavy chain | 3BNC186HC | US20140328862 SEQ ID NO: 406 | 27344 |
| HIV361 | Heavy chain | 3BNC18HC | US20140328862 SEQ ID NO: 407 | 27345 |
| HIV362 | Heavy chain | 3BNC193HC | US20140328862 SEQ ID NO: 408 | 27346 |
| HIV363 | Heavy chain | 3BNC196HC | US20140328862 SEQ ID NO: 409 | 27347 |
| HIV364 | Heavy chain | 3BNC20HC | US20140328862 SEQ ID NO: 410 | 27348 |
| HIV365 | Heavy chain | 3BNC29HC | US20140328862 SEQ ID NO: 411 | 27349 |
| HIV366 | Heavy chain | 3BNC31HC | US20140328862 SEQ ID NO: 412 | 27350 |
| HIV367 | Heavy chain | 3BNC33HC | US20140328862 SEQ ID NO: 413 | 27351 |
| HIV368 | Heavy chain | 3BNC42HC | US20140328862 SEQ ID NO: 414 | 27352 |
| HIV369 | Heavy chain | 3BNC44HC | US20140328862 SEQ ID NO: 415 | 27353 |
| HIV370 | Heavy chain | 3BNC45HC | US20140328862 SEQ ID NO: 416 | 27354 |
| HIV371 | Heavy chain | 3BNC48HC | US20140328862 SEQ ID NO: 338 | 27355 |
| HIV372 | Heavy chain | 3BNC53HC | US20140328862 SEQ ID NO: 417 | 27356 |
| HIV373 | Heavy chain | 3BNC54HC | US20140328862 SEQ ID NO: 418 | 27357 |
| HIV374 | Heavy chain | 3BNC55HC | US20140328862 SEQ ID NO: 419 | 27358 |
| HIV375 | Heavy chain | 3BNC58HC | US20140328862 SEQ ID NO: 339 | 27359 |
| HIV376 | Heavy chain | 3BNC59HC | US20140328862 SEQ ID NO: 420 | 27360 |
| HIV377 | Heavy chain | 3BNC60HC | US20140328862 SEQ ID NO: 421 | 27361 |
| HIV378 | Heavy chain | 3BNC62HC | US20140328862 SEQ ID NO: 422 | 27362 |
| HIV379 | Heavy chain | 3BNC64HC | US20140328862 SEQ ID NO: 423 | 27363 |
| HIV380 | Heavy chain | 3BNC65HC | US20140328862 SEQ ID NO: 424 | 27364 |
| HIV381 | Heavy chain | 3BNC66HC | US20140328862 SEQ ID NO: 425 | 27365 |
| HIV382 | Heavy chain | 3BNC6HC | US20140328862 SEQ ID NO: 426 | 27366 |
| HIV383 | Heavy chain | 3BNC72HC | US20140328862 SEQ ID NO: 427 | 27367 |
| HIV384 | Heavy chain | 3BNC75HC | US20140328862 SEQ ID NO: 428 | 27368 |
| HIV385 | Heavy chain | 3BNC78HC | US20140328862 SEQ ID NO: 340 | 27369 |
| HIV386 | Heavy chain | 3BNC79HC | US20140328862 SEQ ID NO: 429 | 27370 |
| HIV387 | Heavy chain | 3BNC81HC | US20140328862 SEQ ID NO: 430 | 27371 |
| HIV388 | Heavy chain | 3BNC82HC | US20140328862 SEQ ID NO: 341 | 27372 |
| HIV389 | Heavy chain | 3BNC84HC | US20140328862 SEQ ID NO: 431 | 27373 |
| HIV390 | Heavy chain | 3BNC86HC | US20140328862 SEQ ID NO: 432 | 27374 |
| HIV391 | Heavy chain | 3BNC87HC | US20140328862 SEQ ID NO: 433 | 27375 |
| HIV392 | Heavy chain | 3BNC89HC | US20140328862 SEQ ID NO: 434 | 27376 |
| HIV393 | Heavy chain | 3BNC8HC | US20140328862 SEQ ID NO: 342 | 27377 |
| HIV394 | Heavy chain | 3BNC91HC | US20140328862 SEQ ID NO: 435 | 27378 |
| HIV395 | Heavy chain | 3BNC92HC | US20140328862 SEQ ID NO: 436 | 27379 |
| HIV396 | Heavy chain | 3BNC94HC | US20140328862 SEQ ID NO: 437 | 27380 |
| HIV397 | Heavy chain | 3BNC95HC | US20140328862 SEQ ID NO: 438 | 27381 |
| HIV398 | Heavy Chain | 412d | Huang et al., Science 317 (5846), 1930-1934 | 27382 |
| | | | (2007), NCBI Accession # 2QAD_H (231aa) | |
| HIV399 | Heavy chain | 43243_3 | US20140205607 Table S14 | 27383 |
| HIV400 | Heavy chain | 43359_2 | US20140205607 Table S14 | 27384 |
| HIV401 | Heavy chain | 43555_1 | US20140205607 Table S14 | 27385 |
| HIV402 | Heavy chain | 43567_2 | US20140205607 Table S14 | 27386 |
| HIV403 | Heavy Chain | 44-vrc13.01 | Zhou T et al., Structural Repertoire of HIV-1- | 27387 |
| | | | Neutralizing Antibodies Targeting the CD4 | |
| | | | Supersite in 14 Donors; Cell 161 (6), 1280- | |
| | | | 1292 (2015), NCBI Accession # | |
| | | | 4YDJ_A(238aa) | |
| HIV404 | Heavy chain | 45-46m2 | Diskin, R., et al., Restricting HIV-1 pathways | 27388 |
| | | | for escape using rationally designed anti-HIV-1 | |
| | | | antibodies; J. Exp. Med. 210 (6), 1235-1249 | |
| | | | (2013), NCBI Accession # 4JKP_H (229aa) | |
| HIV405 | Heavy chain | 46260_1 | US20140205607 Table S14 | 27389 |
| HIV406 | Heavy chain | 47890_1 | US20140205607 Table S14 | 27390 |
| HIV407 | Heavy Chain | 4e10 Fv | Finton, K. A., et al., PLoS Pathol. 9 (9), | 27391 |
| | | | E1003639 (2013), NCBI Accession # 4LLV_A | |
| | | | (129aa) | |
| HIV408 | Heavy chain | 53821_1 | US20140205607 Table S14 | 27392 |
| HIV409 | Heavy chain | 57729_2 | US20140205607 Table S14 | 27393 |
| HIV410 | Heavy chain | 61048_1 | US20140205607 Table S14 | 27394 |
| HIV411 | Heavy chain | 69713_1 | US20140205607 Table S14 | 27395 |
| HIV412 | Heavy chain | 70679_1 | US20140205607 Table S14 | 27396 |
| HIV413 | Heavy chain | 71632_2 | US20140205607 Table S14 | 27397 |
| HIV414 | Heavy chain | 74400_3 | US20140205607 Table S14 | 27398 |
| HIV415 | Heavy chain | 74511_1 | US20140205607 Table S14 | 27399 |
| HIV416 | Heavy chain | 76927_2 | US20140205607 Table S14 | 27400 |
| HIV417 | Heavy Chain | 7b2 | Santra, S., et al., PLoS Pathol. 11 (8), | 27401 |
| | | | E1005042 (2015), NCBI Accession # 4YDV_H | |
| | | | (252aa) | |
| HIV418 | Heavy chain | 7H6 | US20140348785 SEQ ID NO: 3 | 27402 |
| HIV419 | Heavy chain | 7N16 | US20140348785 SEQ ID NO: 5 | 27403 |
| HIV420 | Heavy chain | 8460_4 | US20140205607 Table S14 | 27404 |
| HIV421 | Heavy chain | 86277_2 | US20140205607 Table S14 | 27405 |
| HIV422 | Heavy chain | 86343_1 | US20140205607 Table S14 | 27406 |
| HIV423 | Heavy chain | 86984_2 | US20140205607 Table S14 | 27407 |
| HIV424 | Heavy chain | 89680_4 | US20140205607 Table S14 | 27408 |
| HIV425 | Heavy chain | 8A253HC | US20140328862 SEQ ID NO: 5 | 27409 |
| HIV426 | Heavy chain | 8A275HC | US20140328862 SEQ ID NO: 6 | 27410 |
| HIV427 | Heavy chain | 8ABM11 | US20140328862 SEQ ID NO: 7 | 27411 |
| HIV428 | Heavy chain | 8ABM12 | US20140328862 SEQ ID NO: 8 | 27412 |
| HIV429 | Heavy chain | 8ABM13 | US20140328862 SEQ ID NO: 9 | 27413 |
| HIV430 | Heavy chain | 8ABM14 | US20140328862 SEQ ID NO: 10 | 27414 |
| HIV431 | Heavy chain | 8ABM20 | US20140328862 SEQ ID NO: 11 | 27415 |
| HIV432 | Heavy chain | 8ABM24 | US20140328862 SEQ ID NO: 12 | 27416 |
| HIV433 | Heavy chain | 8ABM26 | US20140328862 SEQ ID NO: 13 | 27417 |
| HIV434 | Heavy chain | 8ABM27 | US20140328862 SEQ ID NO: 14 | 27418 |
| HIV435 | Heavy chain | 8ANC103HC | US20140328862 SEQ ID NO: 36 | 27419 |
| HIV436 | Heavy chain | 8ANC105HC | US20140328862 SEQ ID NO: 15 | 27420 |
| HIV437 | Heavy chain | 8ANC106HC | US20140328862 SEQ ID NO: 37 | 27421 |
| HIV438 | Heavy chain | 8ANC107HC | US20140328862 SEQ ID NO: 38 | 27422 |
| HIV439 | Heavy chain | 8ANC108HC | US20140328862 SEQ ID NO: 39 | 27423 |
| HIV440 | Heavy chain | 8ANC109HC | US20140328862 SEQ ID NO: 40 | 27424 |
| HIV441 | Heavy chain | 8ANC10HC | US20140328862 SEQ ID NO: 41 | 27425 |
| HIV442 | Heavy chain | 8ANC111HC | US20140328862 SEQ ID NO: 42 | 27426 |
| HIV443 | Heavy chain | 8ANC112HC | US20140328862 SEQ ID NO: 43 | 27427 |
| HIV444 | Heavy chain | 8ANC113HC | US20140328862 SEQ ID NO: 44 | 27428 |
| HIV445 | Heavy chain | 8ANC114HC | US20140328862 SEQ ID NO: 45 | 27429 |
| HIV446 | Heavy chain | 8ANC115HC | US20140328862 SEQ ID NO: 46 | 27430 |
| HIV447 | Heavy chain | 8ANC116HC | US20140328862 SEQ ID NO: 16 | 27431 |
| HIV448 | Heavy chain | 8ANC117HC | US20140328862 SEQ ID NO: 47 | 27432 |
| HIV449 | Heavy chain | 8ANC11HC | US20140328862 SEQ ID NO: 48 | 27433 |
| HIV450 | Heavy chain | 8ANC121HC | US20140328862 SEQ ID NO: 49 | 27434 |
| HIV451 | Heavy chain | 8ANC126HC | US20140328862 SEQ ID NO: 50 | 27435 |
| HIV452 | Heavy chain | 8ANC127HC | US20140328862 SEQ ID NO: 17 | 27436 |
| HIV453 | Heavy chain | 8ANC130HC | US20140328862 SEQ ID NO: 51 | 27437 |
| HIV454 | Heavy Chain | 8anc131 | Zhou T et al., Structural Repertoire of HIV-1- | 27438 |
| | | | Neutralizing Antibodies Targeting the CD4 | |
| | | | Supersite in 14 Donors; Cell 161 (6), 1280- | |
| | | | 1292 (2015), NCBI Accession # 4RWY_H | |
| | | | (227aa) | |
| HIV455 | Heavy chain | 8ANC131HC | US20140328862 SEQ ID NO: 18 | 27439 |
| HIV456 | Heavy chain | 8ANC132HC | US20140328862 SEQ ID NO: 52 | 27440 |
| HIV457 | Heavy chain | 8ANC133HC | US20140328862 SEQ ID NO: 53 | 27441 |
| HIV458 | Heavy Chain | 8anc134 | Zhou T et al., Structural Repertoire of HIV-1- | 27442 |
| | | | Neutralizing Antibodies Targeting the CD4 | |
| | | | Supersite in 14 Donors; Cell 161 (6), 1280- | |
| | | | 1292 (2015), NCBI Accession # 4RX4_H | |
| | | | (229aa) | |
| HIV459 | Heavy chain | 8ANC134HC | US20140328862 SEQ ID NO: 19 | 27443 |
| HIV460 | Heavy chain | 8ANC136HC | US20140328862 SEQ ID NO: 54 | 27444 |
| HIV461 | Heavy chain | 8ANC137HC | US20140328862 SEQ ID NO: 55 | 27445 |
| HIV462 | Heavy chain | 8ANC139HC | US20140328862 SEQ ID NO: 56 | 27446 |
| HIV463 | Heavy chain | 8ANC13HC | US20140328862 SEQ ID NO: 20 | 27447 |
| HIV464 | Heavy chain | 8ANC140HC | US20140328862 SEQ ID NO: 57 | 27448 |
| HIV465 | Heavy chain | 8ANC142HC | US20140328862 SEQ ID NO: 58 | 27449 |
| HIV466 | Heavy chain | 8ANC143HC | US20140328862 SEQ ID NO: 59 | 27450 |
| HIV467 | Heavy chain | 8ANC144HC | US20140328862 SEQ ID NO: 60 | 27451 |
| HIV468 | Heavy chain | 8ANC145HC | US20140328862 SEQ ID NO: 61 | 27452 |
| HIV469 | Heavy chain | 8ANC146HC | US20140328862 SEQ ID NO: 62 | 27453 |
| HIV470 | Heavy chain | 8ANC147HC | US20140328862 SEQ ID NO: 63 | 27454 |
| HIV471 | Heavy chain | 8ANC148HC | US20140328862 SEQ ID NO: 64 | 27455 |
| HIV472 | Heavy chain | 8ANC149HC | US20140328862 SEQ ID NO: 65 | 27456 |
| HIV473 | Heavy chain | 8ANC14HC | US20140328862 SEQ ID NO: 66 | 27457 |
| HIV474 | Heavy chain | 8ANC150HC | US20140328862 SEQ ID NO: 67 | 27458 |
| HIV475 | Heavy chain | 8ANC151HC | US20140328862 SEQ ID NO: 68 | 27459 |
| HIV476 | Heavy chain | 8ANC153HC | US20140328862 SEQ ID NO: 69 | 27460 |
| HIV477 | Heavy chain | 8ANC154HC | US20140328862 SEQ ID NO: 70 | 27461 |
| HIV478 | Heavy chain | 8ANC155HC | US20140328862 SEQ ID NO: 71 | 27462 |
| HIV479 | Heavy chain | 8ANC156HC | US20140328862 SEQ ID NO: 72 | 27463 |
| HIV480 | Heavy chain | 8ANC157HC | US20140328862 SEQ ID NO: 73 | 27464 |
| HIV481 | Heavy chain | 8ANC158HC | US20140328862 SEQ ID NO: 74 | 27465 |
| HIV482 | Heavy chain | 8ANC160HC | US20140328862 SEQ ID NO: 75 | 27466 |
| HIV483 | Heavy chain | 8ANC161HC | US20140328862 SEQ ID NO: 76 | 27467 |
| HIV484 | Heavy chain | 8ANC162HC | US20140328862 SEQ ID NO: 77 | 27468 |
| HIV485 | Heavy chain | 8ANC163HC | US20140328862 SEQ ID NO: 78 | 27469 |
| HIV486 | Heavy chain | 8ANC164HC | US20140328862 SEQ ID NO: 79 | 27470 |
| HIV487 | Heavy chain | 8ANC165HC | US20140328862 SEQ ID NO: 80 | 27471 |
| HIV488 | Heavy chain | 8ANC166HC | US20140328862 SEQ ID NO: 81 | 27472 |
| HIV489 | Heavy chain | 8ANC168HC | US20140328862 SEQ ID NO: 82 | 27473 |
| HIV490 | Heavy chain | 8ANC169HC | US20140328862 SEQ ID NO: 83 | 27474 |
| HIV491 | Heavy chain | 8ANC16HC | US20140328862 SEQ ID NO: 84 | 27475 |
| HIV492 | Heavy chain | 8ANC171HC | US20140328862 SEQ ID NO: 21 | 27476 |
| HIV493 | Heavy chain | 8ANC173HC | US20140328862 SEQ ID NO: 85 | 27477 |
| HIV494 | Heavy chain | 8ANC174HC | US20140328862 SEQ ID NO: 86 | 27478 |
| HIV495 | Heavy chain | 8ANC175HC | US20140328862 SEQ ID NO: 87 | 27479 |
| HIV496 | Heavy chain | 8ANC176HC | US20140328862 SEQ ID NO: 88 | 27480 |
| HIV497 | Heavy chain | 8ANC177HC | US20140328862 SEQ ID NO: 89 | 27481 |
| HIV498 | Heavy chain | 8ANC178HC | US20140328862 SEQ ID NO: 90 | 27482 |
| HIV499 | Heavy chain | 8ANC179HC | US20140328862 SEQ ID NO: 91 | 27483 |
| HIV500 | Heavy chain | 8ANC17HC | US20140328862 SEQ ID NO: 92 | 27484 |
| HIV501 | Heavy chain | 8ANC18 | US20140328862 SEQ ID NO: 22 | 27485 |
| HIV502 | Heavy chain | 8ANC180HC | US20140328862 SEQ ID NO: 93 | 27486 |
| HIV503 | Heavy chain | 8ANC181HC | US20140328862 SEQ ID NO: 94 | 27487 |
| HIV504 | Heavy chain | 8ANC182HC | US20140328862 SEQ ID NO: 23 | 27488 |
| HIV505 | Heavy chain | 8ANC184HC | US20140328862 SEQ ID NO: 95 | 27489 |
| HIV506 | Heavy chain | 8ANC185HC | US20140328862 SEQ ID NO: 96 | 27490 |
| HIV507 | Heavy chain | 8ANC186HC | US20140328862 SEQ ID NO: 97 | 27491 |
| HIV508 | Heavy chain | 8ANC187HC | US20140328862 SEQ ID NO: 98 | 27492 |
| HIV509 | Heavy chain | 8ANC188HC | US20140328862 SEQ ID NO: 99 | 27493 |
| HIV510 | Heavy chain | 8ANC191HC | US20140328862 SEQ ID NO: 100 | 27494 |
| HIV511 | Heavy chain | 8ANC192HC | US20140328862 SEQ ID NO: 24 | 27495 |
| HIV512 | Heavy chain | 8ANC193HC | US20140328862 SEQ ID NO: 101 | 27496 |
| HIV513 | Heavy chain | 8ANC194HC | US20140328862 SEQ ID NO: 102 | 27497 |
| HIV514 | Heavy chain | 8ANC195HC | US20140328862 SEQ ID NO: 103 | 27498 |
| HIV515 | Heavy chain | 8ANC196HC | US20140328862 SEQ ID NO: 104 | 27499 |
| HIV516 | Heavy chain | 8ANC20HC | US20140328862 SEQ ID NO: 105 | 27500 |
| HIV517 | Heavy chain | 8ANC21HC | US20140328862 SEQ ID NO: 106 | 27501 |
| HIV518 | Heavy chain | 8ANC22HC | US20140328862 SEQ ID NO: 25 | 27502 |
| HIV519 | Heavy chain | 8ANC24HC | US20140328862 SEQ ID NO: 107 | 27503 |
| HIV520 | Heavy chain | 8ANC25HC | US20140328862 SEQ ID NO: 108 | 27504 |
| HIV521 | Heavy chain | 8ANC26HC | US20140328862 SEQ ID NO: 26 | 27505 |
| HIV522 | Heavy chain | 8ANC27HC | US20140328862 SEQ ID NO: 109 | 27506 |
| HIV523 | Heavy chain | 8ANC2HC | US20140328862 SEQ ID NO: 27 | 27507 |
| HIV524 | Heavy chain | 8ANC30HC | US20140328862 SEQ ID NO: 28 | 27508 |
| HIV525 | Heavy chain | 8ANC31HC | US20140328862 SEQ ID NO: 110 | 27509 |
| HIV526 | Heavy chain | 8ANC33HC | US20140328862 SEQ ID NO: 111 | 27510 |
| HIV527 | Heavy chain | 8ANC34HC | US20140328862 SEQ ID NO: 112 | 27511 |
| HIV528 | Heavy chain | 8ANC36HC | US20140328862 SEQ ID NO: 113 | 27512 |
| HIV529 | Heavy chain | 8ANC37HC | US20140328862 SEQ ID NO: 29 | 27513 |
| HIV530 | Heavy chain | 8ANC38HC | US20140328862 SEQ ID NO: 114 | 27514 |
| HIV531 | Heavy chain | 8ANC39HC | US20140328862 SEQ ID NO: 115 | 27515 |
| HIV532 | Heavy chain | 8ANC3HC | US20140328862 SEQ ID NO: 116 | 27516 |
| HIV533 | Heavy chain | 8ANC40HC | US20140328862 SEQ ID NO: 30 | 27517 |
| HIV534 | Heavy chain | 8ANC41HC | US20140328862 SEQ ID NO: 31 | 27518 |
| HIV535 | Heavy chain | 8ANC43HC | US20140328862 SEQ ID NO: 117 | 27519 |
| HIV536 | Heavy chain | 8ANC45HC | US20140328862 SEQ ID NO: 32 | 27520 |
| HIV537 | Heavy chain | 8ANC46HC | US20140328862 SEQ ID NO: 118 | 27521 |
| HIV538 | Heavy chain | 8ANC48HC | US20140328862 SEQ ID NO: 119 | 27522 |
| HIV539 | Heavy chain | 8ANC49HC | US20140328862 SEQ ID NO: 120 | 27523 |
| HIV540 | Heavy chain | 8ANC50HC | US20140328862 SEQ ID NO: 33 | 27524 |
| HIV541 | Heavy chain | 8ANC51HC | US20140328862 SEQ ID NO: 121 | 27525 |
| HIV542 | Heavy chain | 8ANC53HC | US20140328862 SEQ ID NO: 34 | 27526 |
| HIV543 | Heavy chain | 8ANC57HC | US20140328862 SEQ ID NO: 122 | 27527 |
| HIV544 | Heavy chain | 8ANC58HC | US20140328862 SEQ ID NO: 123 | 27528 |
| HIV545 | Heavy chain | 8ANC5HC | US20140328862 SEQ ID NO: 124 | 27529 |
| HIV546 | Heavy chain | 8ANC60HC | US20140328862 SEQ ID NO: 125 | 27530 |
| HIV547 | Heavy chain | 8ANC63HC | US20140328862 SEQ ID NO: 126 | 27531 |
| HIV548 | Heavy chain | 8ANC65HC | US20140328862 SEQ ID NO: 127 | 27532 |
| HIV549 | Heavy chain | 8ANC67HC | US20140328862 SEQ ID NO: 128 | 27533 |
| HIV550 | Heavy chain | 8ANC69HC | US20140328862 SEQ ID NO: 129 | 27534 |
| HIV551 | Heavy chain | 8ANC6HC | US20140328862 SEQ ID NO: 130 | 27535 |
| HIV552 | Heavy chain | 8ANC70HC | US20140328862 SEQ ID NO: 131 | 27536 |
| HIV553 | Heavy chain | 8ANC71HC | US20140328862 SEQ ID NO: 132 | 27537 |
| HIV554 | Heavy chain | 8ANC72HC | US20140328862 SEQ ID NO: 133 | 27538 |
| HIV555 | Heavy chain | 8ANC74HC | US20140328862 SEQ ID NO: 134 | 27539 |
| HIV556 | Heavy chain | 8ANC75HC | US20140328862 SEQ ID NO: 135 | 27540 |
| HIV557 | Heavy chain | 8ANC76HC | US20140328862 SEQ ID NO: 136 | 27541 |
| HIV558 | Heavy chain | 8ANC78HC | US20140328862 SEQ ID NO: 137 | 27542 |
| HIV559 | Heavy chain | 8ANC79HC | US20140328862 SEQ ID NO: 138 | 27543 |
| HIV560 | Heavy chain | 8ANC7HC | US20140328862 SEQ ID NO: 139 | 27544 |
| HIV561 | Heavy chain | 8ANC80HC | US20140328862 SEQ ID NO: 140 | 27545 |
| HIV562 | Heavy chain | 8ANC82HC | US20140328862 SEQ ID NO: 141 | 27546 |
| HIV563 | Heavy chain | 8ANC83HC | US20140328862 SEQ ID NO: 142 | 27547 |
| HIV564 | Heavy chain | 8ANC88HC | US20140328862 SEQ ID NO: 35 | 27548 |
| HIV565 | Heavy chain | 8ANC91HC | US20140328862 SEQ ID NO: 143 | 27549 |
| HIV566 | Heavy chain | 8ANC92HC | US20140328862 SEQ ID NO: 144 | 27550 |
| HIV567 | Heavy chain | 8ANC93HC | US20140328862 SEQ ID NO: 145 | 27551 |
| HIV568 | Heavy chain | 8ANC9HC | US20140328862 SEQ ID NO: 146 | 27552 |
| HIV569 | Heavy chain | 94565_1 | US20140205607 Table S14 | 27553 |
| HIV570 | Heavy chain | 95589_2 | US20140205607 Table S14 | 27554 |
| HIV571 | Heavy chain | 96298_1 | US20140205607 Table S14 | 27555 |
| HIV572 | Heavy chain | 9815_2 | US20140205607 Table S14 | 27556 |
| HIV573 | Heavy chain | 99473_3 | US20140205607 Table S14 | 27557 |
| HIV574 | Heavy chain | 99989_1 | US20140205607 Table S14 | 27558 |
| HIV575 | Heavy chain | Antibody | US20140328862 SEQ ID NO: 439 | 27559 |
| HIV576 | Heavy chain | Anti-HcG | Fotinou C. et al “Structure of an Fab fragment | 27560 |
| | | | against a C-terminal peptide of hCG at 2.0 A | |
| | | | resolution” J. Biol. Chem. 273 (35), 22515- | |
| | | | 22518 (1998); NCBI Accession # 1SBS_H | |
| HIV577 | Heavy Chain | B12 | Zhou T et al., Structural definition of a | 27561 |
| | | | conserved neutralization epitope on HIV-1 | |
| | | | gp120; Nature 445 (7129), 732-737 (2007), | |
| | | | NCBI Accession # 2NY7_H (230aa) | |
| HIV578 | Heavy Chain | C38-vrc16.01 | Zhou T et al., Structural Repertoire of HIV-1- | 27562 |
| | | | Neutralizing Antibodies Targeting the CD4 | |
| | | | Supersite in 14 Donors; Cell 161 (6), 1280- | |
| | | | 1292 (2015), NCBI Accession # 4YDK_H | |
| | | | (234aa) | |
| HIV579 | Heavy Chain | C38-vrc18.02 | Zhou T et al., Structural Repertoire of HIV-1- | 27563 |
| | | | Neutralizing Antibodies Targeting the CD4 | |
| | | | Supersite in 14 Donors; Cell 161 (6), 1280- | |
| | | | 1292 (2015), NCBI Accession # 4YDL_H | |
| | | | (226aa) | |
| HIV580 | Heavy chain | CAP256- | WO2015128846 SEQ ID NO: 13 | 27564 |
| | | VRC26.01 | | |
| HIV581 | Heavy chain | CAP256- | WO2015128846 SEQ ID NO: 17 | 27565 |
| | | VRC26.02 | | |
| HIV582 | Heavy chain | CAP256- | WO2015128846 SEQ ID NO: 21 | 27566 |
| | | VRC26.03 | | |
| HIV583 | Heavy chain | CAP256- | WO2015128846 SEQ ID NO: 25 | 27567 |
| | | VRC26.04 | | |
| HIV584 | Heavy chain | CAP256- | WO2015128846 SEQ ID NO: 29 | 27568 |
| | | VRC26.05 | | |
| HIV585 | Heavy chain | CAP256- | WO2015128846 SEQ ID NO: 33 | 27569 |
| | | VRC26.06 | | |
| HIV586 | Heavy chain | CAP256- | WO2015128846 SEQ ID NO: 37 | 27570 |
| | | VRC26.07 | | |
| HIV587 | Heavy chain | CAP256- | WO2015128846 SEQ ID NO: 41 | 27571 |
| | | VRC26.08 | | |
| HIV588 | Heavy chain | CAP256- | WO2015128846 SEQ ID NO: 45 | 27572 |
| | | VRC26.09 | | |
| HIV589 | Heavy chain | CAP256- | WO2015128846 SEQ ID NO: 49 | 27573 |
| | | VRC26.10 | | |
| HIV590 | Heavy chain | CAP256- | WO2015128846 SEQ ID NO: 53 | 27574 |
| | | VRC26.11 | | |
| HIV591 | Heavy chain | CAP256- | WO2015128846 SEQ ID NO: 57 | 27575 |
| | | VRC26.12 | | |
| HIV592 | Heavy chain | CAP256- | WO2015128846 SEQ ID NO: 170 | 27576 |
| | | VRC26.25 | | |
| HIV593 | Heavy chain | CAP256- | WO2015128846 SEQ ID NO: 178 | 27577 |
| | | VRC26.26 | | |
| HIV594 | Heavy chain | CAP256- | WO2015128846 SEQ ID NO: 186 | 27578 |
| | | VRC26.27 | | |
| HIV595 | Heavy chain | CAP256- | WO2015128846 SEQ ID NO: 5 | 27579 |
| | | VRC26-I1 | | |
| HIV596 | Heavy chain | CAP256- | WO2015128846 SEQ ID NO: 9 | 27580 |
| | | VRC26-I2. | | |
| HIV597 | Heavy chain | CAP256- | WO2015128846 SEQ ID NO: 1 | 27581 |
| | | VRC26- | | |
| | | UCA. | | |
| HIV598 | Heavy chain | construct | WO2015013390 SEQ ID NO: 3 | 27582 |
| | | #2816, #2859 | | |
| HIV599 | Heavy chain | construct | WO2015013390 SEQ ID NO: 4 | 27583 |
| | | #2817 | | |
| HIV600 | Heavy chain | construct | WO2015013390 SEQ ID NO: 8 | 27584 |
| | | #2858, #2860 | | |
| HIV601 | Heavy Chain | Fab 2219 | Stanfield, R. L., et al., J. Virol. 80 (12), 6093- | 27585 |
| | | | 6105 (2006), NCBI Accession # 2B0S_H | |
| | | | (226aa) | |
| HIV602 | Heavy Chain | Fab 2g12 | Doores. K. J., et al., J. Virol. 84 (20), 10690- | 27586 |
| | | | 10699 (2010), NCBI Accession # 3OAU_H | |
| | | | (225aa) | |
| HIV603 | Heavy Chain | Fab 2g12 | Stanfield, R. L. et al., Crystal structure of the | 27587 |
| | | | HIV neutralizing antibody 2G12 in complex | |
| | | | with a bacterial oligosaccharide analog of | |
| | | | mammalian oligomannose; Glycobiology 25 | |
| | | | (4), 412-419 (2015), NCBI Accession # | |
| | | | 4RBP_H (224aa) | |
| HIV604 | Heavy Chain | Fab F425- | Bell et al., J. Mol. Biol. 375 (4), 969-978 | 27588 |
| | | b4e8 | (2008), NCBI Accession # 2QSC_H (222aa) | |
| HIV605 | Heavy chain | fusion protein | US20080038280 SEQ ID NO: 5 | 27589 |
| | | of A32 and | | |
| | | m9 | | |
| HIV606 | Heavy chain | g20 | WO2015117008 SEQ ID NO: 4 | 27590 |
| HIV607 | Heavy chain | g22 | WO2015117008 SEQ ID NO: 7 | 27591 |
| HIV608 | Heavy chain | g23 | WO2015117008 SEQ ID NO: 2 | 27592 |
| HIV609 | Heavy chain | g3 | WO2015117008 SEQ ID NO: 13 | 27593 |
| HIV610 | Heavy chain | g4 | WO2015117008 SEQ ID NO: 9 | 27594 |
| HIV611 | Heavy chain | g44 | WO2015117008 SEQ ID NO: 11 | 27595 |
| HIV612 | Heavy chain | g46 | WO2015117008 SEQ ID NO: 10 | 27596 |
| HIV613 | Heavy chain | G4D | US20130195881 SEQ ID NO: 9 | 27597 |
| HIV614 | Heavy chain | G4H | US20130195881 SEQ ID NO: 8 | 27598 |
| HIV615 | Heavy chain | g50 | WO2015117008 SEQ ID NO: 12 | 27599 |
| HIV616 | Heavy chain | g52 | WO2015117008 SEQ ID NO: 1 | 27600 |
| HIV617 | Heavy chain | g59 | WO2015117008 SEQ ID NO: 5 | 27601 |
| HIV618 | Heavy chain | g62 | WO2015117008 SEQ ID NO: 6 | 27602 |
| HIV619 | Heavy chain | g8 | WO2015117008 SEQ ID NO: 3 | 27603 |
| HIV620 | Heavy chain | gl5 | WO2015117008 SEQ ID NO: 8 | 27604 |
| HIV621 | Heavy chain | gVRC- | WO2013090644 SEQ ID NO: 45 | 27605 |
| | | H5(d74)/VR | | |
| | | C-PG04LC | | |
| HIV622 | Heavy chain | gVRCOH12(D74)/ | WO2013090644 SEQ ID NO: 46 | 27606 |
| | | VRC- | | |
| | | PG04LC | | |
| HIV623 | Heavy Chain | I2 (unbound) | Fera, D. et al., Affinity maturation in an HIV | 27607 |
| | | From Ch103 | broadly neutralizing B-cell lineage through | |
| | | Lineage | reorientation of variable domains; Proc. Natl. | |
| | | | Acad. Sci. U.S.A. 111 (28), 10275-10280 | |
| | | | (2014), NCBI Accession # 4QHN_A (232aa) | |
| HIV624 | Heavy chain | IGHV3- | US20140348785 SEQ ID NO: 7 | 27608 |
| | | 15*05 | | |
| HIV625 | Heavy chain | LSSB2055HC | US20140328862 SEQ ID NO: 229 | 27609 |
| HIV626 | Heavy chain | LSSB2066HC | US20140328862 SEQ ID NO: 230 | 27610 |
| HIV627 | Heavy chain | LSSB2068HC | US20140328862 SEQ ID NO: 231 | 27611 |
| HIV628 | Heavy chain | LSSB2080HC | US20140328862 SEQ ID NO: 232 | 27612 |
| HIV629 | Heavy chain | LSSB2133HC | US20140328862 SEQ ID NO: 233 | 27613 |
| HIV630 | Heavy chain | LSSB2182HC | US20140328862 SEQ ID NO: 234 | 27614 |
| HIV631 | Heavy chain | LSSB218HC | US20140328862 SEQ ID NO: 235 | 27615 |
| HIV632 | Heavy chain | LSSB2277HC | US20140328862 SEQ ID NO: 236 | 27616 |
| HIV633 | Heavy chain | LSSB2288HC | US20140328862 SEQ ID NO: 237 | 27617 |
| HIV634 | Heavy chain | LSSB2339HC | US20140328862 SEQ ID NO: 168 | 27618 |
| HIV635 | Heavy chain | LSSB2351HC | US20140328862 SEQ ID NO: 169 | 27619 |
| HIV636 | Heavy chain | LSSB2361HC | US20140328862 SEQ ID NO: 170 | 27620 |
| HIV637 | Heavy chain | LSSB2364HC | US20140328862 SEQ ID NO: 171 | 27621 |
| HIV638 | Heavy chain | LSSB2367HC | US20140328862 SEQ ID NO: 172 | 27622 |
| HIV639 | Heavy chain | LSSB2416HC | US20140328862 SEQ ID NO: 173 | 27623 |
| HIV640 | Heavy chain | LSSB2434HC | US20140328862 SEQ ID NO: 174 | 27624 |
| HIV641 | Heavy chain | LSSB2483HC | US20140328862 SEQ ID NO: 175 | 27625 |
| HIV642 | Heavy chain | LSSB2490HC | US20140328862 SEQ ID NO: 176 | 27626 |
| HIV643 | Heavy chain | LSSB2503HC | US20140328862 SEQ ID NO: 177 | 27627 |
| HIV644 | Heavy chain | LSSB2525HC | US20140328862 SEQ ID NO: 178 | 27628 |
| HIV645 | Heavy chain | LSSB2530HC | US20140328862 SEQ ID NO: 179 | 27629 |
| HIV646 | Heavy chain | LSSB2538HC | US20140328862 SEQ ID NO: 180 | 27630 |
| HIV647 | Heavy chain | LSSB2554HC | US20140328862 SEQ ID NO: 181 | 27631 |
| HIV648 | Heavy chain | LSSB2573HC | US20140328862 SEQ ID NO: 182 | 27632 |
| HIV649 | Heavy chain | LSSB2578HC | US20140328862 SEQ ID NO: 183 | 27633 |
| HIV650 | Heavy chain | LSSB2586HC | US20140328862 SEQ ID NO: 184 | 27634 |
| HIV651 | Heavy chain | LSSB2609HC | US20140328862 SEQ ID NO: 185 | 27635 |
| HIV652 | Heavy chain | LSSB2612HC | US20140328862 SEQ ID NO: 186 | 27636 |
| HIV653 | Heavy chain | LSSB2630HC | US20140328862 SEQ ID NO: 187 | 27637 |
| HIV654 | Heavy chain | LSSB2640HC | US20S40328862 SEQ ID NO: 188 | 27638 |
| HIV655 | Heavy chain | LSSB2644HC | US20140328862 SEQ ID NO: 189 | 27639 |
| HIV656 | Heavy chain | LSSB2665HC | US20S40328862 SEQ ID NO: 190 | 27640 |
| HIV657 | Heavy chain | LSSB2666HC | US20140328862 SEQ ID NO: 191 | 27641 |
| HIV658 | Heavy chain | LSSB2669HC | US20S40328862 SEQ ID NO: 192 | 27642 |
| HIV659 | Heavy chain | LSSB2680HC | US20140328862 SEQ ID NO: 193 | 27643 |
| HIV660 | Heavy chain | LSSB2683HC | US20S40328862 SEQ ID NO: 194 | 27644 |
| HIV661 | Heavy chain | LSSB331HC | US20140328862 SEQ ID NO: 238 | 27645 |
| HIV662 | Heavy chain | LSSB344HC | US20140328862 SEQ ID NO: 195 | 27646 |
| HIV663 | Heavy chain | LSSNEC101HC | US20140328862 SEQ ID NO: 239 | 27647 |
| HIV664 | Heavy chain | LSSNEC106HC | US20140328862 SEQ ID NO: 240 | 27648 |
| HIV665 | Heavy chain | LSSNEC107HC | US20140328862 SEQ ID NO: 196 | 27649 |
| HIV666 | Heavy chain | LSSNEC108HC | US20140328862 SEQ ID NO: 197 | 27650 |
| HIV667 | Heavy chain | LSSNEC109HC | US20140328862 SEQ ID NO: 198 | 27651 |
| HIV668 | Heavy chain | LSSNEC110HC | US20140328862 SEQ ID NO: 199 | 27652 |
| HIV669 | Heavy chain | LSSNEC112HC | US20140328862 SEQ ID NO: 241 | 27653 |
| HIV670 | Heavy chain | LSSNEC115HC | US20140328862 SEQ ID NO: 242 | 27654 |
| HIV671 | Heavy chain | LSSNEC116HC | US20140328862 SEQ ID NO: 200 | 27655 |
| HIV672 | Heavy chain | LSSNEC117HC | US20140328862 SEQ ID NO: 201 | 27656 |
| HIV673 | Heavy chain | LSSNEC118HC | US20140328862 SEQ ID NO: 202 | 27657 |
| HIV674 | Heavy chain | LSSNEC11HC | US20140328862 SEQ ID NO: 203 | 27658 |
| HIV675 | Heavy chain | LSSNEC122HC | US20140328862 SEQ ID NO: 204 | 27659 |
| HIV676 | Heavy chain | LSSNEC123HC | US20140328862 SEQ ID NO: 205 | 27660 |
| HIV677 | Heavy chain | LSSNEC124HC | US20140328862 SEQ ID NO: 243 | 27661 |
| HIV678 | Heavy chain | LSSNEC125HC | US20140328862 SEQ ID NO: 244 | 27662 |
| HIV679 | Heavy chain | LSSNEC126HC | US20140328862 SEQ ID NO: 245 | 27663 |
| HIV680 | Heavy chain | LSSNEC127HC | US20140328862 SEQ ID NO: 206 | 27664 |
| HIV681 | Heavy chain | LSSNEC14HC | US20140328862 SEQ ID NO: 246 | 27665 |
| HIV682 | Heavy chain | LSSNEC16HC | US20140328862 SEQ ID NO: 247 | 27666 |
| HIV683 | Heavy chain | LSSNEC18HC | US20140328862 SEQ ID NO: 207 | 27667 |
| HIV684 | Heavy chain | LSSNEC21HC | US20140328862 SEQ ID NO: 248 | 27668 |
| HIV685 | Heavy chain | LSSNEC24HC | US20140328862 SEQ ID NO: 208 | 27669 |
| HIV686 | Heavy chain | LSSNEC29HC | US20140328862 SEQ ID NO: 209 | 27670 |
| HIV687 | Heavy chain | LSSNEC2HC | US20140328862 SEQ ID NO: 210 | 27671 |
| HIV688 | Heavy chain | LSSNEC30HC | US20140328862 SEQ ID NO: 249 | 27672 |
| HIV689 | Heavy chain | LSSNEC33HC | US20140328862 SEQ ID NO: 211 | 27673 |
| HIV690 | Heavy chain | LSSNEC34HC | US20140328862 SEQ ID NO: 212 | 27674 |
| HIV691 | Heavy chain | LSSNEC3HC | US20140328862 SEQ ID NO: 213 | 27675 |
| HIV692 | Heavy chain | LSSNEC46HC | US20140328862 SEQ ID NO: 214 | 27676 |
| HIV693 | Heavy chain | LSSNEC48HC | US20140328862 SEQ ID NO: 215 | 27677 |
| HIV694 | Heavy chain | LSSNEC49HC | US20140328862 SEQ ID NO: 250 | 27678 |
| HIV695 | Heavy chain | LSSNEC52HC | US20140328862 SEQ ID NO: 216 | 27679 |
| HIV696 | Heavy chain | LSSNEC54HC | US20140328862 SEQ ID NO: 251 | 27680 |
| HIV697 | Heavy chain | LSSNEC55HC | US20140328862 SEQ ID NO: 252 | 27681 |
| HIV698 | Heavy chain | LSSNEC56HC | US20140328862 SEQ ID NO: 217 | 27682 |
| HIV699 | Heavy chain | LSSNEC57HC | US20140328862 SEQ ID NO: 253 | 27683 |
| HIV700 | Heavy chain | LSSNEC5HC | US20140328862 SEQ ID NO: 254 | 27684 |
| HIV701 | Heavy chain | LSSNEC60HC | US20140328862 SEQ ID NO: 218 | 27685 |
| HIV702 | Heavy chain | LSSNEC66HC | US20140328862 SEQ ID NO: 219 | 27686 |
| HIV703 | Heavy chain | LSSNEC67HC | US20140328862 SEQ ID NO: 255 | 27687 |
| HIV704 | Heavy chain | LSSNEC70HC | US20140328862 SEQ ID NO: 220 | 27688 |
| HIV705 | Heavy chain | LSSNEC72HC | US20140328862 SEQ ID NO: 221 | 27689 |
| HIV706 | Heavy chain | LSSNEC74HC | US20140328862 SEQ ID NO: 256 | 27690 |
| HIV707 | Heavy chain | LSSNEC77HC | US20140328862 SEQ ID NO: 257 | 27691 |
| HIV708 | Heavy chain | LSSNEC7HC | US20140328862 SEQ ID NO: 222 | 27692 |
| HIV709 | Heavy chain | LSSNEC82HC | US20140328862 SEQ ID NO: 223 | 27693 |
| HIV710 | Heavy chain | LSSNEC85HC | US20140328862 SEQ ID NO: 258 | 27694 |
| HIV711 | Heavy chain | LSSNEC89HC | US20140328862 SEQ ID NO: 224 | 27695 |
| HIV712 | Heavy chain | LSSNEC8HC | US20140328862 SEQ ID NO: 225 | 27696 |
| HIV713 | Heavy chain | LSSNEC91HC | US20140328862 SEQ ID NO: 259 | 27697 |
| HIV714 | Heavy chain | LSSNEC92HC | US20140328862 SEQ ID NO: 260 | 27698 |
| HIV715 | Heavy chain | LSSNEC94HC | US20140328862 SEQ ID NO: 226 | 27699 |
| HIV716 | Heavy chain | LSSNEC95HC | US20140328862 SEQ ID NO: 227 | 27700 |
| HIV717 | Heavy chain | LSSNEC9HC | US20140328862 SEQ ID NO: 228 | 27701 |
| HIV718 | Heavy chain | m12_Fd-aa | U.S. Pat. No. 7,803,913B2 SEQ ID NO: 3 | 27702 |
| HIV719 | Heavy chain | m14-Fd-aa | U.S. Pat. No. 7,803,913B2 SEQ ID NO: 1 | 27703 |
| HIV720 | Heavy chain | m16-Fd-aa | U.S. Pat. No. 7,803,913B2 SEQ ID NO: 4 | 27704 |
| HIV721 | Heavy chain | m18 Fd-aa | U.S. Pat. No. 7,803,913B2 SEQ ID NO: 2 | 27705 |
| HIV722 | Heavy Chain | M66 | Ofek, G., et al., Structural Basis for HIV-1 | 27706 |
| | | | Neutralization by 2F5-Like Antibodies m66 | |
| | | | and m66.6; J. Virol. 88 (5), 2426-2441 (2014), | |
| | | | NCBI Accession # 4NRY_L (220aa) | |
| HIV723 | Heavy Chain | M66.6 | Ofek, G., et al., Structural Basis for HIV-1 | 27707 |
| | | | Neutralization by 2F5-Like Antibodies m66 | |
| | | | and m66.6; J. Virol. 88 (5), 2426-2441 (2014), | |
| | | | NCBI Accession # 4NRZ_H (234aa) | |
| HIV724 | Heavy Chain | Mab 2158 | Spurrier, B., et al., Functional Implications of | 27708 |
| | | | the Binding Mode of a Human Conformation- | |
| | | | Dependent V2 Monoclonal Antibody against | |
| | | | HIV; J. Virol, 88 (8), 4100-4112 (2014), NCBI | |
| | | | Accession # 4OAW_D (236aa) | |
| HIV725 | Heavy chain | MV1 | US20130195881 SEQ ID NO: 10 | 27709 |
| HIV726 | Heavy Chain | Pg16 Fab | Pancera, M., et al., Nat. Struct. Mol. Biol. 20 | 27710 |
| | | | (7), 804-813 (2013), NCBI Accession # | |
| | | | 4DQO_H (246aa) | |
| HIV727 | Heavy Chain | Pg9 | Willis, J. R., et al., J. Clin. Invest. 125 (6), 2523- | 27711 |
| | | | 2531 (2015), NCBI Accession # | |
| | | | 4YAQ_H(248aa) | |
| HIV728 | Heavy Chain | Pgt121-Gl | Mouquet H et al., Complex-type N-glycan | 27712 |
| | | Fab | recognition by potent broadly neutralizing HIV | |
| | | | antibodies; Proc Natl Acad Sci USA. 2012 | |
| | | | Nov. 20; 109(47): E3268-77, NCBI Accession # | |
| | | | 4FQQ_B (244aa) | |
| HIV729 | Heavy Chain | Pgt122 | Julien, J. P., et al., PLoS Pathol. 9 (5), | 27713 |
| | | | E1003342 (2013), NCBI Accession # 4JY5_H | |
| | | | (235aa) | |
| HIV730 | Heavy Chain | Pgt123 | Julien, J. P., et al., PLoS Pathol. 9 (5), | 27714 |
| | | | E1003342 (2013), NCBI Accession # 4JY6_B | |
| | | | (235aa) | |
| HIV731 | Heavy Chain | Pgt124 | Garces, F., et al., Structural Evolution of | 27715 |
| | | | Glycan Recognition by a Family of Potent HIV | |
| | | | Antibodies; Cell 159 (1), 69-79 (2014), NCBI | |
| | | | Accession # 4R26_H (236aa) | |
| HIV732 | Heavy Chain | Pgt130 | Doores, K. J., et al., J. Virol. 89 (2), 1105-1118 | 27716 |
| | | | (2015), NCBI Accession # 4RNR_A (233aa) | |
| HIV733 | Heavy Chain | Pgt135 | Grover et al., Science 343 (6171), 656-661 | 27717 |
| | | | (2014), NCBI Accession # 4NZR_H (234aa) | |
| HIV734 | Heavy chain | S19 | US20110059015 SEQ ID NO: 6 | 27718 |
| HIV735 | Heavy chain | S20 | US20110059015 SEQ ID NO: 8 | 27719 |
| HIV736 | Heavy chain | S8 | US20110059015 SEQ ID NO: 4 | 27720 |
| HIV737 | Heavy Chain | Vrc- Pg04 | Wu, X., et al., Focused evolution of HIV-1 | 27721 |
| | | | neutralizing antibodies revealed by structures | |
| | | | and deep sequencing; Science 333 (6049), | |
| | | | 1593-1602 (2011)”, NCBI Accession # | |
| | | | 3SE9_H (228aa) | |
| HIV738 | Heavy chain | VRC01 | U.S. Pat. No. 8,637,036B2 SEQ ID NO: 1 | 27722 |
| HIV739 | Heavy chain | VRC01HC/VRCO3LC | WO2013090644 SEQ ID NO: 2 | 27723 |
| HIV740 | Heavy chain | VRC02 | U.S. Pat. No. 8,637,036B2 SEQ ID NO: 3 | 27724 |
| HIV741 | Heavy chain | VRC03 | U.S. Pat. No. 8,637,036B2 SEQ ID NO: 27 | 27725 |
| HIV742 | Heavy chain | VRC03HC- | WO2013090644 SEQ ID NO: 32 | 27726 |
| | | VRC01LC | | |
| HIV743 | Heavy chain | VRC07 | US20140322163 SEQ ID NO: 258 | 27727 |
| | | G54H, S58N | | |
| HIV744 | Heavy chain | VRC07 I37V, | US20140322163 SEQ ID NO: 260 | 27728 |
| | | G54H, S58N, | | |
| | | T93A | | |
| HIV745 | Heavy chain | VRC07 I37V, | US20140322163 SEQ ID NO: 259 | 27729 |
| | | G54H, T93A | | |
| HIV746 | Heavy Chain | Vrc08c | Wu, X., et al., Maturation and Diversity of the | 27730 |
| | | | VRC01-Antibody Lineage over 15 Years of | |
| | | | Chronic HIV-1 Infection; Cell 161 (3), 470-485 | |
| | | | (2015), NCBI Accession # 4XNY_H (235aa) | |
| HIV747 | Heavy Chain | Vrc23 | Georgiev, I. S., et al., Delineating antibody | 27731 |
| | | | recognition in polyclonal sera from patterns of | |
| | | | HIV-1 isolate neutralization; Science 340 | |
| | | | (6133), 751-756 (2013), NCBI Accession # | |
| | | | 4J6R_H (224aa) | |
| HIV748 | Heavy chain | VRC-CH30 | WO2013090644 SEQ ID NO: 22 | 27732 |
| HIV749 | Heavy Chain | Vrc-ch31 | Zhou T et al., Immunity 39 (2), 245-258 (2013), | 27733 |
| | | | NCBI Accession # 4LSP_H (236aa) | |
| HIV750 | Heavy chain | VRC-CH32 | Wu X. et al, “Focused evolution of HIV-1 | 27734 |
| | | | neutralizing antibodies revealed by structures | |
| | | | and deep sequencing” Science 333 (6049), | |
| | | | 1593-1602 (2011), NCBI Accession # | |
| | | | AEM62724 | |
| HIV751 | Heavy chain | VRC-CH33 | WO2013090644 SEQ ID NO: 28 | 27735 |
| HIV752 | Heavy chain | VRC-CH34 | WO2013090644 SEQ ID NO: 30 | 27736 |
| HIV753 | Heavy chain | VRCO7 | US20140322163 SEQ ID NO: 33 | 27737 |
| | | G54H | | |
| HIV754 | Heavy chain | VRC-PG04 | Wu X. et al, “Focused evolution of HIV-1 | 27738 |
| | | | neutralizing antibodies revealed by structures | |
| | | | and deep sequencing” Science 333 (6049), | |
| | | | 1593-1602 (2011), NCBI Accession # | |
| | | | AEM62752 | |
| HIV755 | Heavy chain | VRC-PG04b | WO2013090644 SEQ ID NO: 44 | 27739 |
| HIV756 | Heavy Chain | Vrc-pg20 | Zhou T et al., Immunity 39 (2), 245-258 (2013), | 27740 |
| | | | NCBI Accession # 4LSU_H (227aa) | |
| HIV757 | Heavy chain | X5 | U.S. Pat. No. 7,378,093B2 SEQ ID NO: 3 | 27741 |
| HIV758 | Heavy chain | X5 | U.S. Pat. No. 8,110,192B2 SEQ ID NO: 5 | 27742 |
| HIV759 | Heavy chain | X5 variant | U.S. Pat. No. 7,378,093B2 SEQ ID NO: 11 | 27743 |
| HIV760 | Heavy Chain | Z13e1 | Stanfield, R. L., et al, J. Mol. Biol. 414 (3). 460- | 27744 |
| | | | 476 (2011), NCBI Accession # 3Q1S_H(230aa) | |
| HIV761 | Heavy Chain | Z258- | Zhou. T et al., Structural Repertoire of HIV-1- | 27745 |
| | | vrc27.01 | Neutralizing Antibodies Targeting the CD4 | |
| | | | Supersite in 14 Donors; Cell 161 (6), 1280- | |
| | | | 1292 (2015), NCBI Accession # | |
| | | | 4YDI_H(227aa) | |
| HIV762 | Heavy Chain | | NCBI Accession # 1N0X_K (230aa) | 27746 |
| HIV763 | Heavy chain | | U.S. Pat. No. 5,804,440A SEQ ID NO: 142 | 27747 |
| HIV764 | Heavy chain | | U.S. Pat. No. 5,804,440A SEQ ID NO: 143 | 27748 |
| HIV765 | Heavy chain | | U.S. Pat. No. 5,804,440A SEQ ID NO: 144 | 27749 |
| HIV766 | Heavy chain | | U.S. Pat. No. 5,804,440A SEQ ID NO: 145 | 27750 |
| HIV767 | Heavy chain | | U.S. Pat. No. 5,804,440A SEQ ID NO: 146 | 27751 |
| HIV768 | Heavy chain | | U.S. Pat. No. 5,804,440A SEQ ID NO: 66 | 27752 |
| HIV769 | Heavy chain | | U.S. Pat. No. 5,804,440A SEQ ID NO: 67 | 27753 |
| HIV770 | Heavy chain | | U.S. Pat. No. 5,804,440A SEQ ID NO: 68 | 27754 |
| HIV771 | Heavy chain | | U.S. Pat. No. 5,804,440A SEQ ID NO: 70 | 27755 |
| HIV772 | Heavy chain | | U.S. Pat. No. 5,804,440A SEQ ID NO: 72 | 27756 |
| HIV773 | Heavy chain | | U.S. Pat. No. 5,804,440A SEQ ID NO: 73 | 27757 |
| HIV774 | Heavy chain | | U.S. Pat. No. 5,804,440A SEQ ID NO: 74 | 27758 |
| HIV775 | Heavy chain | | U.S. Pat. No. 5,804,440A SEQ ID NO: 75 | 27759 |
| HIV776 | Heavy chain | | U.S. Pat. No. 5,804,440A SEQ ID NO: 78 | 27760 |
| HIV777 | Heavy chain | | WO2014063059 SEQ ID NO: 10 | 27761 |
| HIV778 | Heavy chain | | WO2014063059 SEQ ID NO: 12 | 27762 |
| HIV779 | Heavy chain | | WO2014063059 SEQ ID NO: 130 | 27763 |
| HIV780 | Heavy chain | | WO2014063059 SEQ ID NO: 14 | 27764 |
| HIV781 | Heavy chain | | WO2014063059 SEQ ID NO: 16 | 27765 |
| HIV782 | Heavy chain | | WO2014063059 SEQ ID NO: 18 | 27766 |
| HIV783 | Heavy chain | | WO2014063059 SEQ ID NO: 20 | 27767 |
| HIV784 | Heavy chain | | WO2014063059 SEQ ID NO: 22 | 27768 |
| HIV785 | Heavy chain | | WO2014063059 SEQ ID NO: 24 | 27769 |
| HIV786 | Heavy chain | | WO2014063059 SEQ ID NO: 4 | 27770 |
| HIV787 | Heavy chain | | WO2014063059 SEQ ID NO: 6 | 27771 |
| HIV788 | Heavy chain | | WO2014063059 SEQ ID NO: 8 | 27772 |
| HIV789 | Heavy chain | | WO2014063059 SEQ ID NO: 2 | 27773 |
| | consensus | | | |
| HIV790 | Heavy chain constant | G4D | US20130195881 SEQ ID NO: 6 | 27774 |
| | region | | | |
| HIV791 | Heavy chain constant | G4H | US20130195881 SEQ ID NO: 5 | 27775 |
| | region | | | |
| HIV792 | Heavy chain constant | MV1 | US20130195881 SEQ ID NO: 7 | 27776 |
| | region | | | |
| HIV793 | Heavy chain constant | TNX-355, | US20130195881 SEQ ID NO: 4 | 27777 |
| | region | Idalizumab | | |
| HIV794 | Heavy Chain Fab | Ch04 | McLellan, J. S., et al. Nature 480 (7377), 336- | 27778 |
| | | | 343 (2011), NCBI Accession # 3U46_A | |
| | | | (238aa) | |
| HIV795 | Heavy Chain Of | 21C | Diskin, R., et al, Nat. Struct. Mol. Biol. 17 (5), | 27779 |
| | Anti-HIV Fab From | | 608-613 (2010), NCBI Accession # 3LMJ_H | |
| | Human 21c Antibody | | (231aa) | |
| HIV796 | Heavy Chain Of | 830a | Pan et al, J. Virol. 89 (15), 8003-8010 (2015), | 27780 |
| | Anti-hiv-1 Gp120 | | NCBI Accession # 4YWG_H (226aa) | |
| | V1v2 Antibody 830a | | | |
| HIV797 | Heavy chain partial | 412D | Huang C. et al “Structural basis of tyrosine | 27781 |
| | | | sulfation and VH-gene usage in antibodies that | |
| | | | recognize the HIV type 1 coreceptor-binding | |
| | | | site on gp120” Proc. Natl. Acad. Sci. U.S.A. | |
| | | | 101 (9), 2706-2711 (2004), NCBI Accession # | |
| | | | AAR88379 | |
| HIV798 | Heavy chain variable | 0.5γ(1C10) | U.S. Pat. No. 8,722,861B2 SEQ ID NO: 1 | 27782 |
| | region | | | |
| HIV799 | Heavy chain variable | 0.5δ (3D6) | U.S. Pat. No. 8,722,861B2 SEQ ID NO: 5 | 27783 |
| | region | | | |
| HIV800 | Heavy chain variable | 10J4 mAb | WO2015103549 SEQ ID NO: 3 | 27784 |
| | region | | | |
| HIV801 | Heavy chain variable | 10M6 mAb | WO2015103549 SEQ ID NO: 5 | 27785 |
| | region | | | |
| HIV802 | Heavy chain variable | 13110 mAb | WO2015103549 SEQ ID NO: 7 | 27786 |
| | region | | | |
| HIV803 | Heavy chain variable | 2N5mAb | WO2015103549 SEQ ID NO: 9 | 27787 |
| | region | | | |
| HIV804 | Heavy chain variable | 35022 mAb | WO2015103549 SEQ ID NO: 1 | 27788 |
| | region | | | |
| HIV805 | Heavy chain variable | 42F9 | U.S. Pat. No. 8,722,861B2 SEQ ID NO: 7 | 27789 |
| | region | | | |
| HIV806 | Heavy chain variable | 4835_F12 | US20140205612 SEQ ID NO: 404 | 27790 |
| | region | (PGT-124) | | |
| HIV807 | Heavy chain variable | 4838_L06 | US20140205612 SEQ ID NO: 66 | 27791 |
| | region | (PGT-121) | | |
| HIV808 | Heavy chain variable | 4858_P08 | US20140205612 SEQ ID NO: 167 | 27792 |
| | region | (PGT-123) | | |
| HIV809 | Heavy chain variable | 4869-K15 | US20140205612 SEQ ID NO: 419 | 27793 |
| | region | (PGT-133) | | |
| HIV810 | Heavy chain variable | 4873_E03 | US20140205612 SEQ ID NO: 62 | 27794 |
| | region | (PGT-121) | | |
| HIV811 | Heavy chain variable | 4876_M06 | US20140205612 SEQ ID NO: 434 | 27795 |
| | region | (PGT-134) | | |
| HIV812 | Heavy chain variable | 4877_D15 | US20140205612 SEQ ID NO: 155 | 27796 |
| | region | (PGT-122) | | |
| HIV813 | Heavy chain variable | 4964_G22 | US20140205612 SEQ ID NO: 275 | 27797 |
| | region | (PGT-141), | | |
| | | 4993_K13 | | |
| | | (PGT-141) | | |
| HIV814 | Heavy chain variable | 4970_K22 | US20140205612 SEQ ID NO: 306 | 27798 |
| | region | (PGT-144) | | |
| HIV815 | Heavy chain variable | 4980_N08 | US20140205612 SEQ ID NO: 297 | 27799 |
| | region | (PGT-143) | | |
| HIV816 | Heavy chain variable | 4995_E20 | US20140205612 SEQ ID NO: 291 | 27800 |
| | region | (PGT-142) | | |
| HIV817 | Heavy chain variable | 4995_P16 | US20140205612 SEQ ID NO: 400 | 27801 |
| | region | (PGT-145) | | |
| HIV818 | Heavy chain variable | 49G2 | U.S. Pat. No. 8,722,861B2 SEQ ID NO: 9 | 27802 |
| | region | | | |
| HIV819 | Heavy chain variable | 4O20mAb | WO2015103549 SEQ ID NO: 11 | 27803 |
| | region | | | |
| HIV820 | Heavy chain variable | 5114_A19 | US20140205612 SEQ ID NO: 333 | 27804 |
| | region | (PGT-128) | | |
| HIV821 | Heavy chain variable | 5120_N10 | US20140205612 SEQ ID NO: 462 | 27805 |
| | region | (PGT-139) | | |
| HIV822 | Heavy chain variable | 5131_A17 | US20140205612 SEQ ID NO: 443 | 27806 |
| | region | (PGT-132) | | |
| HIV823 | Heavy chain variable | 5136_H01 | US20140205612 SEQ ID NO: 345 | 27807 |
| | region | (PGT-131) | | |
| HIV824 | Heavy chain variable | 5138_G07 | US20140205612 SEQ ID NO: 453 | 27808 |
| | region | (PGT-138) | | |
| HIV825 | Heavy chain variable | 5141_B17 | US20140205612 SEQ ID NO: 199 | 27809 |
| | region | (PGT-126) | | |
| HIV826 | Heavy chain variable | 5145_B14 | US20140205612 SEQ ID NO: 318 | 27810 |
| | region | (PGT-127) | | |
| HIV827 | Heavy chain variable | 5147_N06 | US20140205612 SEQ ID NO: 215 | 27811 |
| | region | (PGT-130) | | |
| HIV828 | Heavy chain variable | 5329_C19 | US20140205612 SEQ ID NO: 248 | 27812 |
| | region | (PGT-136), | | |
| | | 5366_P21 | | |
| | | (PGT-136) | | |
| HIV829 | Heavy chain variable | 5343_B08 | US20140205612 SEQ ID NO: 231 | 27813 |
| | region | (PGT-135), | | |
| | | 5344_E16 | | |
| | | (PGT-135) | | |
| HIV830 | Heavy chain variable | 5345_I01 | US20140205612 SEQ ID NO: 362 | 27814 |
| | region | (PGT-137) | | |
| HIV831 | Heavy chain variable | 5G2 | U.S. Pat. No. 8,722,861B2 SEQ ID NO: 3 | 27815 |
| | region | | | |
| HIV832 | Heavy chain variable | 6808_B09 | US20140205612 SEQ ID NO: 546 | 27816 |
| | region | (PGT-156) | | |
| HIV833 | Heavy chain variable | 6831_A21 | US20140205612 SEQ ID NO: 473 | 27817 |
| | region | (PGT-151) | | |
| HIV834 | Heavy chain variable | 6843_G20 | US20140205612 SEQ ID NO: 516 | 27818 |
| | region | (PGT-154) | | |
| HIV835 | Heavy chain variable | 6881_N05 | US20140205612 SEQ ID NO: 572 | 27819 |
| | region | (PGT-158). | | |
| HIV836 | Heavy chain variable | 6889_117 | US20140205612 SEQ ID NO: 489 | 27820 |
| | region | (PGT-152) | | |
| HIV837 | Heavy chain variable | 6891_F06 | US20140205612 SEQ ID NO: 501 | 27821 |
| | region | (PGT-153) | | |
| HIV838 | Heavy chain variable | 6892_C23 | US20140205612 SEQ ID NO: 559 | 27822 |
| | region | (PGT-157) | | |
| HIV839 | Heavy chain variable | 6892_D19 | US20140205612 SEQ ID NO: 531 | 27823 |
| | region | (PGT-155) | | |
| HIV840 | Heavy chain variable | 7B9mAb | WO2015103549 SEQ ID NO: 13 | 27824 |
| | region | | | |
| HIV841 | Heavy chain variable | 7K3mAb | WO2015103549 SEQ ID NO: 15 | 27825 |
| | region | | | |
| HIV842 | Heavy chain variable | B4 | U.S. Pat. No. 7,872,110B2 SEQ ID NO: 2 | 27826 |
| | region | | | |
| HIV843 | Heavy chain variable | B4DIVHv.1 | U.S. Pat. No. 7,872,110B2 SEQ ID NO: 5 | 27827 |
| | region | | | |
| HIV844 | Heavy chain variable | B4DIVHv.2 | U.S. Pat. No. 7,872,110B2 SEQ ID NO: 6 | 27828 |
| | region | | | |
| HIV845 | Heavy chain variable | B4DTVHv.3 | U.S. Pat. No. 7,872,110B2 SEQ ID NO: 7 | 27829 |
| | region | | | |
| HIV846 | Heavy chain variable | B4DIVHv.4 | U.S. Pat. No. 7,872,110B2 SEQ ID NO: 8 | 27830 |
| | region | | | |
| HIV847 | Heavy chain variable | bI2 IgA2 | WO2014040024 SEQ ID NO: 29 | 27831 |
| | region | antibody | | |
| HIV848 | Heavy chain variable | CHμ39.1 | U.S. Pat. No. 5,773,247 SEQ ID NO: 10 | 27832 |
| | region | | | |
| HIV849 | Heavy chain variable | CHμ5.5 | U.S. Pat. No. 5,773,247 SEQ ID NO: 14 | 27833 |
| | region | | | |
| HIV850 | Heavy chain variable | F425-Alg8 | WO2014040024 SEQ ID NO: 9 | 27834 |
| | region | antibody | | |
| HIV851 | Heavy chain variable | Fab 43 | US20090191216 SEQ ID NO: 8 | 27835 |
| | region | | | |
| HIV852 | Heavy chain variable | HGN194 | US20110212106 SEQ ID NO: 45 | 27836 |
| | region | | | |
| HIV853 | Heavy chain variable | HJ16 | US20110212106 SEQ ID NO: 13 | 27837 |
| | region | | | |
| HIV854 | Heavy chain variable | HK20 | US20110212106 SEQ ID NO: 29 | 27838 |
| | region | | | |
| HIV855 | Heavy chain variable | IgA antibody | WO2014040024 SEQ ID NO: 11 | 27839 |
| | region | | | |
| HIV856 | Heavy chain variable | L1719A11 | US20150158934 SEQ ID NO: 175 | 27840 |
| | region | | | |
| HIV857 | Heavy chain variable | L1719A12 | US20150158934 SEQ ID NO: 176 | 27841 |
| | region | | | |
| HIV858 | Heavy chain variable | L1719A9 | US20150158934 SEQ ID NO: 174 | 27842 |
| | region | | | |
| HIV859 | Heavy chain variable | L1719B12 | US20150158934 SEQ ID NO: 177 | 27843 |
| | region | | | |
| HIV860 | Heavy chain variable | L1719C1 | US20150158934 SEQ ID NO: 178 | 27844 |
| | region | | | |
| HIV861 | Heavy chain variable | L1719D10 | US20150158934 SEQ ID NO: 179 | 27845 |
| | region | | | |
| HIV862 | Heavy chain variable | L1719E1 | US20150158934 SEQ ID NO: 180 | 27846 |
| | region | | | |
| HIV863 | Heavy chain variable | L1719E11 | US20150158934 SEQ ID NO: 181 | 27847 |
| | region | | | |
| HIV864 | Heavy chain variable | L1719E12 | US20150158934 SEQ ID NO: 182 | 27848 |
| | region | | | |
| HIV865 | Heavy chain variable | L1719F11 | US20150158934 SEQ ID NO: 183 | 27849 |
| | region | | | |
| HIV866 | Heavy chain variable | L1719H10 | US20150158934 SEQ ID NO: 185 | 27850 |
| | region | | | |
| HIV867 | Heavy chain variable | L1719H9 | US20150158934 SEQ ID NO: 184 | 27851 |
| | region | | | |
| HIV868 | Heavy chain variable | L1720C1 | US20150158934 SEQ ID NO: 186 | 27852 |
| | region | | | |
| HIV869 | Heavy chain variable | L1720E4 | US20150158934 SEQ ID NO: 187 | 27853 |
| | region | | | |
| HIV870 | Heavy chain variable | L1721A3 | US20150158934 SEQ ID NO: 188 | 27854 |
| | region | | | |
| HIV871 | Heavy chain variable | L1721A5 | US20150158934 SEQ ID NO: 189 | 27855 |
| | region | | | |
| HIV872 | Heavy chain variable | L1721A8 | US20150158934 SEQ ID NO: 190 | 27856 |
| | region | | | |
| HIV873 | Heavy chain variable | L1721H4 | US20150158934 SEQ ID NO: 191 | 27857 |
| | region | | | |
| HIV874 | Heavy chain variable | L1723A10 | US20150158934 SEQ ID NO: 193 | 27858 |
| | region | | | |
| HIV875 | Heavy chain variable | L1723A11 | US20150158934 SEQ ID NO: 194 | 27859 |
| | region | | | |
| HIV876 | Heavy chain variable | L1723A9 | US20150158934 SEQ ID NO: 192 | 27860 |
| | region | | | |
| HIV877 | Heavy chain variable | L1723E5 | US20150158934 SEQ ID NO: 195 | 27861 |
| | region | | | |
| HIV878 | Heavy chain variable | L2319G11 | US20150158934 SEQ ID NO: 197 | 27862 |
| | region | | | |
| HIV879 | Heavy chain variable | L2319G7 | US20150158934 SEQ ID NO: 196 | 27863 |
| | region | | | |
| HIV880 | Heavy chain variable | L2319H7 | US20150158934 SEQ ID NO: 198 | 27864 |
| | region | | | |
| HIV881 | Heavy chain variable | L2320E9 | US20150158934 SEQ ID NO: 199 | 27865 |
| | region | | | |
| HIV882 | Heavy chain variable | L2320F9 | US20150158934 SEQ ID NO: 200 | 27866 |
| | region | | | |
| HIV883 | Heavy chain variable | L2321B7 | US20150158934 SEQ ID NO: 201 | 27867 |
| | region | | | |
| HIV884 | Heavy chain variable | L2321H6 | US20150158934 SEQ ID NO: 202 | 27868 |
| | region | | | |
| HIV885 | Heavy chain variable | L81C11 | US20150158934 SEQ ID NO: 15 | 27869 |
| | region | | | |
| HIV886 | Heavy chain variable | L81C9 | US20150158934 SEQ ID NO: 30 | 27870 |
| | region | | | |
| HIV887 | Heavy chain variable | L81D9 | US20150158934 SEQ ID NO: 10 | 27871 |
| | region | | | |
| HIV888 | Heavy chain variable | L81E1 | US20150158934 SEQ ID NO: 18 | 27872 |
| | region | | | |
| HIV889 | Heavy chain variable | L81E7 | US20150158934 SEQ ID NO: 16 | 27873 |
| | region | | | |
| HIV890 | Heavy chain variable | L81F1 | US20150158934 SEQ ID NO: 19 | 27874 |
| | region | | | |
| HIV891 | Heavy chain variable | L81G7 | US20150158934 SEQ ID NO: 13 | 27875 |
| | region | | | |
| HIV892 | Heavy chain variable | L81H1 | US20150158934 SEQ ID NO: 98 | 27876 |
| | region | | | |
| HIV893 | Heavy chain variable | L81H2 | US20150158934 SEQ ID NO: 23 | 27877 |
| | region | | | |
| HIV894 | Heavy chain variable | L81H7 | US20150158934 SEQ ID NO: 11 | 27878 |
| | region | | | |
| HIV895 | Heavy chain variable | L81H9 | US20150158934 SEQ ID NO: 28 | 27879 |
| | region | | | |
| HIV896 | Heavy chain variable | L82B12A | US20150158934 SEQ ID NO: 105 | 27880 |
| | region | | | |
| HIV897 | Heavy chain variable | L82B1A | US20150158934 SEQ ID NO: 99 | 27881 |
| | region | | | |
| HIV898 | Heavy chain variable | L82B1D | US20150158934 SEQ ID NO: 100 | 27882 |
| | region | | | |
| HIV899 | Heavy chain variable | L82B2A | US20150158934 SEQ ID NO: 101 | 27883 |
| | region | | | |
| HIV900 | Heavy chain variable | L82B3F | US20150158934 SEQ ID NO: 102 | 27884 |
| | region | | | |
| HIV901 | Heavy chain variable | L82B4A | US20150158934 SEQ ID NO: 103 | 27885 |
| | region | | | |
| HIV902 | Heavy chain variable | L82B4E | US20150158934 SEQ ID NO: 104 | 27886 |
| | region | | | |
| HIV903 | Heavy chain variable | L82B4F | US20150158934 SEQ ID NO: 21 | 27887 |
| | region | | | |
| HIV904 | Heavy chain variable | L832G6 | US20150158934 SEQ ID NO: 113 | 27888 |
| | region | | | |
| HIV905 | Heavy chain variable | L833E1 | US20150158934 SEQ ID NO: 72 | 27889 |
| | region | | | |
| HIV906 | Heavy chain variable | L833F5 | US20150158934 SEQ ID NO: 17 | 27890 |
| | region | | | |
| HIV907 | Heavy chain variable | L833H1 | US20150158934 SEQ ID NO: 114 | 27891 |
| | region | | | |
| HIV908 | Heavy chain variable | L833H3 | US20150158934 SEQ ID NO: 115 | 27892 |
| | region | | | |
| HIV909 | Heavy chain variable | L88B10B | US20150158934 SEQ ID NO: 27 | 27893 |
| | region | | | |
| HIV910 | Heavy chain variable | L88B11B | US20150158934 SEQ ID NO: 12 | 27894 |
| | region | | | |
| HIV911 | Heavy chain variable | L88B12G | US20150158934 SEQ ID NO: 29 | 27895 |
| | region | | | |
| HIV912 | Heavy chain variable | L88B1D | US20150158934 SEQ ID NO: 20 | 27896 |
| | region | | | |
| HIV913 | Heavy chain variable | L88B2A | US20150158934 SEQ ID NO: 106 | 27897 |
| | region | | | |
| HIV914 | Heavy chain variable | L88FA2 | US20150158934 SEQ ID NO: 26 | 27898 |
| | region | | | |
| HIV915 | Heavy chain variable | L88FA3 | US20150158934 SEQ ID NO: 107 | 27899 |
| | region | | | |
| HIV916 | Heavy chain variable | L88FA5 | US20150158934 SEQ ID NO: 108 | 27900 |
| | region | | | |
| HIV917 | Heavy chain variable | L88FB1 | US20150158934 SEQ ID NO: 25 | 27901 |
| | region | | | |
| HIV918 | Heavy chain variable | L88FC11 | US20150158934 SEQ ID NO: 22 | 27902 |
| | region | | | |
| HIV919 | Heavy chain variable | L88FD12 | US20150158934 SEQ ID NO: 24 | 27903 |
| | region | | | |
| HIV920 | Heavy chain variable | L89B12D | US20150158934 SEQ ID NO: 112 | 27904 |
| | region | | | |
| HIV921 | Heavy chain variable | L89B1D | US20150158934 SEQ ID NO: 109 | 27905 |
| | region | | | |
| HIV922 | Heavy chain variable | L89B2C | US20150158934 SEQ ID NO: 110 | 27906 |
| | region | | | |
| HIV923 | Heavy chain variable | L89B3E | US20150158934 SEQ ID NO: 14 | 27907 |
| | region | | | |
| HIV924 | Heavy chain variable | L89B6B | US20150158934 SEQ ID NO: 111 | 27908 |
| | region | | | |
| HIV925 | Heavy chain variable | L8Cb15 | US20150158934 SEQ ID NO: 116 | 27909 |
| | region | | | |
| HIV926 | Heavy chain variable | L8Cj3 | US20150158934 SEQ ID NO: 73 | 27910 |
| | region | | | |
| HIV927 | Heavy chain variable | L8Fe2 | US20150158934 SEQ ID NO: 117 | 27911 |
| | region | | | |
| HIV928 | Heavy chain variable | L8Fg12 | US20150158934 SEQ ID NO: 118 | 27912 |
| | region | | | |
| HIV929 | Heavy chain variable | L8Fj19 | US20150158934 SEQ ID NO: 119 | 27913 |
| | region | | | |
| HIV930 | Heavy chain variable | L8Fo17 | US20150158934 SEQ ID NO: 120 | 27914 |
| | region | | | |
| HIV931 | Heavy chain variable | L8Fp6 | US20150158934 SEQ ID NO: 121 | 27915 |
| | region | | | |
| HIV932 | Heavy chain variable | L8Hi20 | US20150158934 SEQ ID NO: 122 | 27916 |
| | region | | | |
| HIV933 | Heavy chain variable | L911B11E | US20150158934 SEQ ID NO: 140 | 27917 |
| | region | | | |
| HIV934 | Heavy chain variable | L911B12B | US20150158934 SEQ ID NO: 71 | 27918 |
| | region | | | |
| HIV935 | Heavy chain variable | L911B1E | US20150158934 SEQ ID NO: 137 | 27919 |
| | region | | | |
| HIV936 | Heavy chain variable | L911B1G | US20150158934 SEQ ID NO: 65 | 27920 |
| | region | | | |
| HIV937 | Heavy chain variable | L911B2E | US20150158934 SEQ ID NO: 138 | 27921 |
| | region | | | |
| HIV938 | Heavy chain variable | L911B3D | US20150158934 SEQ ID NO: 75 | 27922 |
| | region | | | |
| HIV939 | Heavy chain variable | L911B9A | US20150158934 SEQ ID NO: 139 | 27923 |
| | region | | | |
| HIV940 | Heavy chain variable | L911F12B | US20150158934 SEQ ID NO: 142 | 27924 |
| | region | | | |
| HIV941 | Heavy chain variable | L911F1B | US20150158934 SEQ ID NO: 141 | 27925 |
| | region | | | |
| HIV942 | Heavy chain variable | L911F1F | US20150158934 SEQ ID NO: 77 | 27926 |
| | region | | | |
| HIV943 | Heavy chain variable | L911F4C | US20150158934 SEQ ID NO: 33 | 27927 |
| | region | | | |
| HIV944 | Heavy chain variable | L91A1 | US20150158934 SEQ ID NO: 123 | 27928 |
| | region | | | |
| HIV945 | Heavy chain variable | L91B5 | US20150158934 SEQ ID NO: 37 | 27929 |
| | region | | | |
| HIV946 | Heavy chain variable | L91B5, 4A7 | US20150158934 SEQ ID NO: 97 | 27930 |
| | region | | | |
| HIV947 | Heavy chain variable | L91B5, A12 | US20150158934 SEQ ID NO: 92 | 27931 |
| | region | | | |
| HIV948 | Heavy chain variable | L91B5, A4 | US20150158934 SEQ ID NO: 90 | 27932 |
| | region | | | |
| HIV949 | Heavy chain variable | L91B5, A7 | US20150158934 SEQ ID NO: 91 | 27933 |
| | region | | | |
| HIV950 | Heavy chain variable | L91B5, B2 | US20150158934 SEQ ID NO: 93 | 27934 |
| | region | | | |
| HIV951 | Heavy chain variable | L91B5, D4 | US20150158934 SEQ ID NO: 94 | 27935 |
| | region | | | |
| HIV952 | Heavy chain variable | L91B5, F11 | US20150158934 SEQ ID NO: 96 | 27936 |
| | region | | | |
| HIV953 | Heavy chain variable | L91B5, F4 | US20150158934 SEQ ID NO: 95 | 27937 |
| | region | | | |
| HIV954 | Heavy chain variable | L91C2 | US20150158934 SEQ ID NO: 61 | 27938 |
| | region | | | |
| HIV955 | Heavy chain variable | L91E1 | US20150158934 SEQ ID NO: 45 | 27939 |
| | region | | | |
| HIV956 | Heavy chain variable | L91E2 | US20150158934 SEQ ID NO: 124 | 27940 |
| | region | | | |
| HIV957 | Heavy chain variable | L91F10 | US20150158934 SEQ ID NO: 69 | 27941 |
| | region | | | |
| HIV958 | Heavy chain variable | L91G2 | US20150158934 SEQ ID NO: 64 | 27942 |
| | region | | | |
| HIV959 | Heavy chain variable | L91H3 | US20150158934 SEQ ID NO: 128 | 27943 |
| | region | | | |
| HIV960 | Heavy chain variable | L91H9 | US20150158934 SEQ ID NO: 41 | 27944 |
| | region | | | |
| HIV961 | Heavy chain variable | L922B2 | US20150158934 SEQ ID NO: 143 | 27945 |
| | region | | | |
| HIV962 | Heavy chain variable | L922B4 | US20150158934 SEQ ID NO: 144 | 27946 |
| | region | | | |
| HIV963 | Heavy chain variable | L922E1 | US20150158934 SEQ ID NO: 145 | 27947 |
| | region | | | |
| HIV964 | Heavy chain variable | L922E2 | US20150158934 SEQ ID NO: 53 | 27948 |
| | region | | | |
| HIV965 | Heavy chain variable | L923A1 | US20150158934 SEQ ID NO: 146 | 27949 |
| | region | | | |
| HIV966 | Heavy chain variable | L923A4 | US20150158934 SEQ ID NO: 32 | 27950 |
| | region | | | |
| HIV967 | Heavy chain variable | L92A11 | US20150158934 SEQ ID NO: 125 | 27951 |
| | region | | | |
| HIV968 | Heavy chain variable | L92C7 | US20150158934 SEQ ID NO: 62 | 27952 |
| | region | | | |
| HIV969 | Heavy chain variable | L92D4 | US20150158934 SEQ ID NO: 126 | 27953 |
| | region | | | |
| HIV970 | Heavy chain variable | L92E6 | US20150158934 SEQ ID NO: 63 | 27954 |
| | region | | | |
| HIV971 | Heavy chain variable | L92E7 | US20150158934 SEQ ID NO: 74 | 27955 |
| | region | | | |
| HIV972 | Heavy chain variable | L92E7, A1 | US20150158934 SEQ ID NO: 85 | 27956 |
| | region | | | |
| HIV973 | Heavy chain variable | L92E7, A2 | US20150158934 SEQ ID NO: 86 | 27957 |
| | region | | | |
| HIV974 | Heavy chain variable | L92E7, A3 | US20150158934 SEQ ID NO: 87 | 27958 |
| | region | | | |
| HIV975 | Heavy chain variable | L92E7, A4 | US20150158934 SEQ ID NO: 80 | 27959 |
| | region | | | |
| HIV976 | Heavy chain variable | L92E7, A4 | US20150158934 SEQ ID NO: 88 | 27960 |
| | region | | | |
| HIV977 | Heavy chain variable | L92E7, A5 | US20150158934 SEQ ID NO: 89 | 27961 |
| | region | | | |
| HIV978 | Heavy chain variable | L92E7, B5 | US20150158934 SEQ ID NO: 78 | 27962 |
| | region | | | |
| HIV979 | Heavy chain variable | L92E7. C | US20150158934 SEQ ID NO: 79 | 27963 |
| | region | | | |
| HIV980 | Heavy chain variable | L92E7, C3 | US20150158934 SEQ ID NO: 82 | 27964 |
| | region | | | |
| HIV981 | Heavy chain variable | L92E7, D3 | US20150158934 SEQ ID NO: 83 | 27965 |
| | region | | | |
| HIV982 | Heavy chain variable | L92E7, E1 | US20150158934 SEQ ID NO: 84 | 27966 |
| | region | | | |
| HIV983 | Heavy chain variable | L92E7, G4 | US20150158934 SEQ ID NO: 81 | 27967 |
| | region | | | |
| HIV984 | Heavy chain variable | L932A9 | US20150158934 SEQ ID NO: 58 | 27968 |
| | region | | | |
| HIV985 | Heavy chain variable | L932E10 | US20150158934 SEQ ID NO: 35 | 27969 |
| | region | | | |
| HIV986 | Heavy chain variable | L932E8 | US20150158934 SEQ ID NO: 147 | 27970 |
| | region | | | |
| HIV987 | Heavy chain variable | L932G9 | US20150158934 SEQ ID NO: 34 | 27971 |
| | region | | | |
| HIV988 | Heavy chain variable | L933D10 | US20150158934 SEQ ID NO: 50 | 27972 |
| | region | | | |
| HIV989 | Heavy chain variable | L93B3 | US20150158934 SEQ ID NO: 70 | 27973 |
| | region | | | |
| HIV990 | Heavy chain variable | L93B4 | US20150158934 SEQ ID NO: 127 | 27974 |
| | region | | | |
| HIV991 | Heavy chain variable | L93C3 | US20150158934 SEQ ID NO: 51 | 27975 |
| | region | | | |
| HIV992 | Heavy chain variable | L93C6 | US20150158934 SEQ ID NO: 67 | 27976 |
| | region | | | |
| HIV993 | Heavy chain variable | L93D3 | US20150158934 SEQ ID NO: 129 | 27977 |
| | region | | | |
| HIV994 | Heavy chain variable | L93D4 | US20150158934 SEQ ID NO: 43 | 27978 |
| | region | | | |
| HIV995 | Heavy chain variable | L93D9 | US20150158934 SEQ ID NO: 130 | 27979 |
| | region | | | |
| HIV996 | Heavy chain variable | L93E3 | US20150158934 SEQ ID NO: 55 | 27980 |
| | region | | | |
| HIV997 | Heavy chain variable | L93E6 | US20150158934 SEQ ID NO: 131 | 27981 |
| | region | | | |
| HIV998 | Heavy chain variable | L93F12 | US20150158934 SEQ ID NO: 133 | 27982 |
| | region | | | |
| HIV999 | Heavy chain variable | L93F2 | US20150158934 SEQ ID NO: 132 | 27983 |
| | region | | | |
| HIV1000 | Heavy chain variable | L93F2 | US20150158934 SEQ ID NO: 59 | 27984 |
| | region | | | |
| HIV1001 | Heavy chain variable | L93H6 | US20150158934 SEQ ID NO: 38 | 27985 |
| | region | | | |
| HIV1002 | Heavy chain variable | L93H9 | US20150158934 SEQ ID NO: 134 | 27986 |
| | region | | | |
| HIV1003 | Heavy chain variable | L94A12 | US20150158934 SEQ ID NO: 46 | 27987 |
| | region | | | |
| HIV1004 | Heavy chain variable | L94C2 | US20150158934 SEQ ID NO: 31 | 27988 |
| | region | | | |
| HIV1005 | Heavy chain variable | L94D12 | US20150158934 SEQ ID NO: 42 | 27989 |
| | region | | | |
| HIV1006 | Heavy chain variable | L94D4 | US20150158934 SEQ ID NO: 47 | 27990 |
| | region | | | |
| HIV1007 | Heavy chain variable | L94E3 | US20150158934 SEQ ID NO: 39 | 27991 |
| | region | | | |
| HIV1008 | Heavy chain variable | L94E4 | US20150158934 SEQ ID NO: 54 | 27992 |
| | region | | | |
| HIV1009 | Heavy chain variable | L94E5 | US20150158934 SEQ ID NO: 57 | 27993 |
| | region | | | |
| HIV1010 | Heavy chain variable | L94H1 | US20150158934 SEQ ID NO: 36 | 27994 |
| | region | | | |
| HIV1011 | Heavy chain variable | L94H2 | US20150158934 SEQ ID NO: 40 | 27995 |
| | region | | | |
| HIV1012 | Heavy chain variable | L94H5 | US20150158934 SEQ ID NO: 48 | 27996 |
| | region | | | |
| HIV1013 | Heavy chain variable | L94H7 | US20150158934 SEQ ID NO: 135 | 27997 |
| | region | | | |
| HIV1014 | Heavy chain variable | L95B10D | US20150158934 SEQ ID NO: 136 | 27998 |
| | region | | | |
| HIV1015 | Heavy chain variable | L95B12A | US20150158934 SEQ ID NO: 68 | 27999 |
| | region | | | |
| HIV1016 | Heavy chain variable | L95B12E | US20150158934 SEQ ID NO: 66 | 28000 |
| | region | | | |
| HIV1017 | Heavy chain variable | L95B8A | US20150158934 SEQ ID NO: 60 | 28001 |
| | region | | | |
| HIV1018 | Heavy chain variable | L98FB10 | US20150158934 SEQ ID NO: 76 | 28002 |
| | region | | | |
| HIV1019 | Heavy chain variable | L9Ab16 | US20150158934 SEQ ID NO: 148 | 28003 |
| | region | | | |
| HIV1020 | Heavy chain variable | L9Ab19 | US20150158934 SEQ ID NO: 149 | 28004 |
| | region | | | |
| HIV1021 | Heavy chain variable | L9Ad13 | US20150158934 SEQ ID NO: 151 | 28005 |
| | region | | | |
| HIV1022 | Heavy chain variable | L9Ad14 | US20150158934 SEQ ID NO: 152 | 28006 |
| | region | | | |
| HIV1023 | Heavy chain variable | L9Ad3 | US20150158934 SEQ ID NO: 150 | 28007 |
| | region | | | |
| HIV1024 | Heavy chain variable | L9Aj2 | US20150158934 SEQ ID NO: 153 | 28008 |
| | region | | | |
| HIV1025 | Heavy chain variable | L9An7 | US20150158934 SEQ ID NO: 154 | 28009 |
| | region | | | |
| HIV1026 | Heavy chain variable | L9Ao15 | US20150158934 SEQ ID NO: 155 | 28010 |
| | region | | | |
| HIV1027 | Heavy chain variable | L9Ap11 | US20150158934 SEQ ID NO: 156 | 28011 |
| | region | | | |
| HIV1028 | Heavy chain variable | L9Bb3 | US20150158934 SEQ ID NO: 157 | 28012 |
| | region | | | |
| HIV1029 | Heavy chain variable | L9Bc6 | US20150158934 SEQ ID NO: 158 | 28013 |
| | region | | | |
| HIV1030 | Heavy chain variable | L9Bd8 | US20150158934 SEQ ID NO: 159 | 28014 |
| | region | | | |
| HIV1031 | Heavy chain variable | L9Bd9 | US20150158934 SEQ ID NO: 160 | 28015 |
| | region | | | |
| HIV1032 | Heavy chain variable | L9Be11 | US20150158934 SEQ ID NO: 161 | 28016 |
| | region | | | |
| HIV1033 | Heavy chain variable | L9Bf11 | US20150158934 SEQ ID NO: 49 | 28017 |
| | region | | | |
| HIV1034 | Heavy chain variable | L9Bf19 | US20150158934 SEQ ID NO: 162 | 28018 |
| | region | | | |
| HIV1035 | Heavy chain variable | L9Bj13 | US20150158934 SEQ ID NO: 163 | 28019 |
| | region | | | |
| HIV1036 | Heavy chain variable | L9Bm10 | US20150158934 SEQ ID NO: 164 | 28020 |
| | region | | | |
| HIV1037 | Heavy chain variable | L9Bm16 | US20150158934 SEQ ID NO: 56 | 28021 |
| | region | | | |
| HIV1038 | Heavy chain variable | L9Bp16 | US20150158934 SEQ ID NO: 165 | 28022 |
| | region | | | |
| HIV1039 | Heavy chain variable | L9Bp5 | US20150158934 SEQ ID NO: 44 | 28023 |
| | region | | | |
| HIV1040 | Heavy chain variable | L9Ca12 | US20150158934 SEQ ID NO: 166 | 28024 |
| | region | | | |
| HIV1041 | Heavy chain variable | L9Ca13 | US20150158934 SEQ ID NO: 167 | 28025 |
| | region | | | |
| HIV1042 | Heavy chain variable | L9Cd12 | US20150158934 SEQ ID NO: 168 | 28026 |
| | region | | | |
| HIV1043 | Heavy chain variable | L9Cf15 | US20150158934 SEQ ID NO: 169 | 28027 |
| | region | | | |
| HIV1044 | Heavy chain variable | L9Cl22 | US20150158934 SEQ ID NO: 52 | 28028 |
| | region | | | |
| HIV1045 | Heavy chain variable | L9Cm18 | US20150158934 SEQ ID NO: 170 | 28029 |
| | region | | | |
| HIV1046 | Heavy chain variable | L9Co22 | US20150158934 SEQ ID NO: 171 | 28030 |
| | region | | | |
| HIV1047 | Heavy chain variable | L9Cp5 | US20150158934 SEQ ID NO: 172 | 28031 |
| | region | | | |
| HIV1048 | Heavy chain variable | L9Cpl3 | US20150158934 SEQ ID NO: 173 | 28032 |
| | region | | | |
| HIV1049 | Heavy chain variable | Makandal | US20100111990 SEQ ID NO: 4 | 28033 |
| | region | monoclonal | | |
| | | antibody | | |
| | | (Mmab) | | |
| HIV1050 | Heavy chain variable | NM-01 | U.S. Pat. No. 5,665,569 SEQ ID NO: 17 | 28034 |
| | region | | | |
| HIV1051 | Heavy chain variable | NM-01 | U.S. Pat. No. 5,665,569 SEQ ID NO: 27 | 28035 |
| | region | HuVH | | |
| HIV1052 | Heavy chain variable | NM-01 | U.S. Pat. No. 5,665,569 SEQ ID NO: 29 | 28036 |
| | region | HuVK | | |
| HIV1053 | Heavy chain variable | NM-01 | U.S. Pat. No. 5,665,569 SEQ ID NO: 31 | 28037 |
| | region | HuVKF | | |
| HIV1054 | Heavy chain variable | PGT125 | Walker L. M. et al “Broad neutralization | 28038 |
| | region | | coverage of HIV by multiple highly potent | |
| | | | antibodies”, Nature 477 (7365), 466-470 | |
| | | | (2011), NCBI Accession # AEN14393 | |
| HIV1055 | Heavy chain variable | PGT126 | Walker L. M. et al “Broad neutralization | 28039 |
| | region | | coverage of HIV by multiple highly potent | |
| | | | antibodies”, Nature 477 (7365), 466-470 | |
| | | | (2011), NCBI Accession # AEN14394 | |
| HIV1056 | Heavy chain variable | PGT131 | Walker L. M. et al “Broad neutralization | 28040 |
| | region | | coverage of HIV by multiple highly potent | |
| | | | antibodies”, Nature 477 (7365), 466-470 | |
| | | | (2011), NCBI Accession # AEN14389 | |
| HIV1057 | Heavy chain variable | PGT136 | Walker L. M. et al “Broad neutralization | 28041 |
| | region | | coverage of HIV by multiple highly potent | |
| | | | antibodies”, Nature 477 (7365),466-470 | |
| | | | (2011), NCBI Accession # AEN14400 | |
| HIV1058 | Heavy chain variable | PGT137 | Walker L. M. et al “Broad neutralization | 28042 |
| | region | | coverage of HIV by multiple highly potent | |
| | | | antibodies”, Nature 477 (7365), 466-470 | |
| | | | (2011), NCBI Accession # AEN14401 | |
| HIV1059 | Heavy chain variable | PGT141 | Walker L. M. et al “Broad neutralization | 28043 |
| | region | | coverage of HIV by multiple highly potent | |
| | | | antibodies”, Nature 477 (7365), 466-470 | |
| | | | (2011), NCBI Accession # AEN14402 | |
| HIV1060 | Heavy chain variable | PGT142 | Walker L. M. et al “Broad neutralization | 28044 |
| | region | | coverage of HIV by multiple highly potent | |
| | | | antibodies”, Nature 477 (7365), 466-470 | |
| | | | (2011), NCBI Accession # AEN14368 | |
| HIV1061 | Heavy chain variable | PGT143 | Walker L. M. et al “Broad neutralization | 28045 |
| | region | | coverage of HIV by multiple highly potent | |
| | | | antibodies”, Nature 477 (7365), 466-470 | |
| | | | (2011), NCBI Accession # AEN14404 | |
| HIV1062 | Heavy chain variable | PGT144 | Walker L. M. et al “Broad neutralization | 28046 |
| | region | | coverage of HIV by multiple highly potent | |
| | | | antibodies”, Nature 477 (7365), 466-470 | |
| | | | (2011), NCBI Accession # AEN14405 | |
| HIV1063 | Heavy chain variable | PGT151 | Falkowska, E. et al “Broadly Neutralizing HIV | 28047 |
| | region | | Antibodies Define a Glycan-Dependent Epitope | |
| | | | on the Perfusion Conformation of gp41 on | |
| | | | Cleaved Envelope Trimers” Immunity 40 (5), | |
| | | | 657-668 (2014), NCBI Accession # AIC3535 | |
| HIV1064 | Heavy chain variable | PGT152 | Falkowska, E. et al “Broadly Neutralizing HIV | 28048 |
| | region | | Antibodies Define a Glycan-Dependent Epitope | |
| | | | on the Perfusion Conformation of gp41 on | |
| | | | Cleaved Envelope Trimers” Immunity 40 (5), | |
| | | | 657-668 (2014), NCBI Accession # AIC32536 | |
| HIV1065 | Heavy chain variable | PGT153 | Falkowska, E. et al “Broadly Neutralizing HIV | 28049 |
| | region | | Antibodies Define a Glycan-Dependent Epitope | |
| | | | on the Perfusion Conformation of gp41 on | |
| | | | Cleaved Envelope Trimers” Immunity 40 (5), | |
| | | | 657-668 (2014), NCBI Accession # AIC32537 | |
| HIV1066 | Heavy chain variable | PGT154 | Falkowska, E. et al “Broadly Neutralizing HIV | 28050 |
| | region | | Antibodies Define a Glycan-Dependent Epitope | |
| | | | on the Perfusion Conformation of gp41 on | |
| | | | Cleaved Envelope Trimers” Immunity 40 (5), | |
| | | | 657-668 (2014), NCBI Accession # AIC32521 | |
| HIV1067 | Heavy chain variable | PGT155 | Falkowska, E. et al “Broadly Neutralizing HIV | 28051 |
| | region | | Antibodies Define a Glycan-Dependent Epitope | |
| | | | on the Perfusion Conformation of gp41 on | |
| | | | Cleaved Envelope Trimers” Immunity 40 (5), | |
| | | | 657-668 (2014), NCBI Accession # AIC32539 | |
| HIV1068 | Heavy chain variable | PGT156 | Falkowska, E. et al “Broadly Neutralizing HIV | 28052 |
| | region | | Antibodies Define a Glycan-Dependent Epitope | |
| | | | on the Perfusion Conformation of gp41 on | |
| | | | Cleaved Envelope Trimers” Immunity 40 (5), | |
| | | | 657-668 (2014), NCBI Accession # AIC32540 | |
| HIV1069 | Heavy chain variable | PGT157 | Falkowska, E. et al “Broadly Neutralizing HIV | 28053 |
| | region | | Antibodies Define a Glycan-Dependent Epitope | |
| | | | on the Perfusion Conformation of gp41 on | |
| | | | Cleaved Envelope Trimers” Immunity 40 (5), | |
| | | | 657-668 (2014), NCBI Accession # AIC32541 | |
| HIV1070 | Heavy chain variable | PGT158 | Falkowska, E. et al “Broadly Neutralizing HIV | 28054 |
| | region | | Antibodies Define a Glycan-Dependent Epitope | |
| | | | on the Perfusion Conformation of gp41 on | |
| | | | Cleaved Envelope Trimers” Immunity 40 (5), | |
| | | | 657-668 (2014), NCBI Accession # AIC32542 | |
| HIV1071 | Heavy chain variable | rF105 | WO1993012232 SEQ ID NO: 4 | 28055 |
| | region | | | |
| HIV1072 | Heavy chain variable | ScFvX5- | U.S. Pat. No. 7,378,093B2 SEQ ID NO: 14 | 28056 |
| | region | CD4 | | |
| HIV1073 | Heavy chain variable | TNX-355, | US20130195881 SEQ ID NO: 3 | 28057 |
| | region | Idalizumab | | |
| HIV1074 | Heavy chain variable | VCR14 | US20150044137 SEQ ID NO: 13 | 28058 |
| | region | | | |
| HIV1075 | Heavy chain variable | VCR14b | US20150044137 SEQ ID NO: 14 | 28059 |
| | region | | | |
| HIV1076 | Heavy chain variable | VCR14c | US20150044137 SEQ ID NO: 15 | 28060 |
| | region | | | |
| HIV1077 | Heavy chain variable | VCR16 | US20150044137 SEQ ID NO: 29 | 28061 |
| | region | | | |
| HIV1078 | Heavy chain variable | VCR16b | US20150044137 SEQ ID NO: 30 | 28062 |
| | region | | | |
| HIV1079 | Heavy chain variable | VCR16c | US20150044137 SEQ ID NO: 31 | 28063 |
| | region | | | |
| HIV1080 | Heavy chain variable | VCR16d | US20150044137 SEQ ID NO: 32 | 28064 |
| | region | | | |
| HIV1081 | Heavy chain variable | VLP_A14 | US20150158934 SEQ ID NO: 203 | 28065 |
| | region | | | |
| HIV1082 | Heavy chain variable | VLP_B9 | US20150158934 SEQ ID NO: 204 | 28066 |
| | region | | | |
| HIV1083 | Heavy chain variable | VLP3_B21 | US20150158934 SEQ ID NO: 205 | 28067 |
| | region | | | |
| HIV1084 | Heavy chain variable | VRC13 | US20150044137 SEQ ID NO: 5 | 28068 |
| | region | | | |
| HIV1085 | Heavy chain variable | VRC13b | US20150044137 SEQ ID NO: 6 | 28069 |
| | region | | | |
| HIV1086 | Heavy chain variable | VRC13c | US20150044137 SEQ ID NO: 7 | 28070 |
| | region | | | |
| HIV1087 | Heavy chain variable | VRC13d | US20150044137 SEQ ID NO: 8 | 28071 |
| | region | | | |
| HIV1088 | Heavy chain variable | VRC13e | US20150044137 SEQ ID NO: 9 | 28072 |
| | region | | | |
| HIV1089 | Heavy chain variable | VRC13f | US20150044137 SEQ ID NO: 10 | 28073 |
| | region | | | |
| HIV1090 | Heavy chain variable | VRC13g | US20150044137 SEQ ID NO: 11 | 28074 |
| | region | | | |
| HIV1091 | Heavy chain variable | VRC13h | US20150044137 SEQ ID NO: 12 | 28075 |
| | region | | | |
| HIV1092 | Heavy chain variable | VRC15 | US20150044137 SEQ ID NO: 16 | 28076 |
| | region | | | |
| HIV1093 | Heavy chain variable | | US20150004190 SEQ ID NO: 56 | 28077 |
| | region | | | |
| HIV1094 | Heavy chain variable | P7 | NCBI Accession # AAB41043.1 (136aa) | 28078 |
| | region, partial | | | |
| HIV1095 | Heavy Chain, Fab | Ch04 | McLellan, J. S. et al., Structure of HIV-1 gp120 | 28079 |
| | | | V1 V2 domain with broadly neutralizing | |
| | | | antibody PG9; Nature 480 (7377), 336-343 | |
| | | | (2011), NCBI Accession # 3TCL_A (237aa) | |
| HIV1096 | Heavy Chain, Fab | N5-i5 | Acharya, P., et al., Structural Definition of an | 28080 |
| | | | Antibody-Dependent Cellular Cytotoxicity | |
| | | | Response Implicated in Reduced Risk for HIV- | |
| | | | 1 infection; J. Virol. 88 (21), 12895-12906 | |
| | | | (2014), NCBI Accession # 4H8W_H (226aa) | |
| HIV1097 | Heavy Chain, Fab | N60-i3 | Gohain, N., et al., Cocrystal Structures of | 28081 |
| | | | Antibody N60-i3 and Antibody JR4 in | |
| | | | Complex with gp120 Define More Cluster A | |
| | | | Epitopes Involved in Effective Antibody- | |
| | | | Dependent Effector Function against HIV-1; J. | |
| | | | Virol. 89 (17), 8840-8854 (2015), NCBI | |
| | | | Accession # 4RFO_H (229aa) | |
| HIV1098 | Heavy Chain, Ig | Nih45-46 Fab | Diskin, R., et al., Science 334 (6060), 1289- | 28082 |
| | Gamma-1 Chain C | | 1293 (2011), NCBI Accession # 3U7Y_H | |
| | Region | | (229aa) | |
| HIV1099 | Heavy Chain, Ig | Pgt127 | Pejchal, R., et al., Science 334 (6059), 1097- | 28083 |
| | Gamma-1 Chain C | | 1103 (2011), NCBI Accession # | |
| | Region | | 3TWC_H(239aa) | |
| HIV1100 | Heavy Chain, Ig | Pgt128 | Pejchal, R., et al., Science 334 (6059), 1097- | 28084 |
| | Gamma-1 Chain C | | 1103 (2011), NCBI Accession # | |
| | Region | | 3TV3_H(239aa) | |
| HIV1101 | HIV, heavy chain | Suvizumab | | 28085 |
| HIV1102 | HIV1 gp120 | HIV1 gp120 | WO2001000678 SEQ ID NO: 43 | 28086 |
| | antibody, heavy chain | antibody | | |
| HIV1103 | HIV1 gp120 | HIV1 gp120 | WO2001000678 SEQ ID NO: 44 | 28087 |
| | antibody, heavy chain | antibody | | |
| HIV1104 | HIV1 gp120 | HIV1 gp120 | WO2001000678 SEQ ID NO: 45 | 28088 |
| | antibody, heavy chain | antibody | | |
| HIV1105 | HIV1 gp120 | HIV1 gp120 | WO2001000678 SEQ ID NO: 46 | 28089 |
| | antibody, heavy chain | antibody | | |
| HIV1106 | HIV1 gp120 | HIV1 gp120 | WO2001000678 SEQ ID NO: 47 | 28090 |
| | antibody, heavy chain | antibody | | |
| HIV1107 | HIV1 gp120 | HIV1 gp120 | WO2001000678 SEQ ID NO: 48 | 28091 |
| | antibody, heavy chain | antibody | | |
| HIV1108 | HIV1 gp120 | HIV1 gp120 | WO2001000678 SEQ ID NO: 49 | 28092 |
| | antibody, heavy chain | antibody | | |
| HIV1109 | HIV1 gp120 | HIV1 gp120 | WO2001000678 SEQ ID NO: 57 | 28093 |
| | antibody, heavy chain | antibody | | |
| HIV1110 | HIV1 gp120 | HIV1 gp120 | WO2001000678 SEQ ID NO: 58 | 28094 |
| | antibody, heavy chain | antibody | | |
| HIV1111 | HIV1 gp120 | HIV1 gp120 | WO2001000678 SEQ ID NO: 59 | 28095 |
| | antibody, heavy chain | antibody | | |
| HIV1112 | HIV1 gp120 | HIV1 gp120 | WO2001000678 SEQ ID NO: 60 | 28096 |
| | antibody, heavy chain | antibody | | |
| HIV1113 | HIV1 gp120 | HIV1 gp120 | WO2001000678 SEQ ID NO: 61 | 28097 |
| | antibody, heavy chain | antibody | | |
| HIV1114 | HIV1 gp120 | HIV1 gp120 | WO2001000678 SEQ ID NO: 62 | 28098 |
| | antibody, heavy chain | antibody | | |
| HIV1115 | HIV1 gp120 | HIV1 gp120 | WO2001000678 SEQ ID NO: 63 | 28099 |
| | antibody, heavy chain | antibody | | |
| HIV1116 | HIV1 gp120 | HIV1 gp120 | WO2001000678 SEQ ID NO: 64 | 28100 |
| | antibody, heavy chain | antibody | | |
| HIV1117 | HIV1 gp120 | HIV1 gp120 | WO2001000678 SEQ ID NO: 73 | 28101 |
| | antibody, heavy chain | antibody | | |
| HIV1118 | HIV1 gp120 | HIV1 gp120 | WO2001000678 SEQ ID NO: 74 | 28102 |
| | antibody, heavy chain | antibody | | |
| HIV1119 | HIV1 gp120 | HIV1 gp120 | WO2001000678 SEQ ID NO: 75 | 28103 |
| | antibody, heavy chain | antibody | | |
| HIV1120 | HIV1 gp120 | HIV1 gp120 | WO2001000678 SEQ ID NO: 76 | 28104 |
| | antibody, heavy chain | antibody | | |
| HIV1121 | HIV1 gp120 | HIV1 gp120 | WO2001000678 SEQ ID NO: 77 | 28105 |
| | antibody, heavy chain | antibody | | |
| HIV1122 | HIV1 gp120 | HIV1 gp120 | WO2001000678 SEQ ID NO: 78 | 28106 |
| | antibody, heavy chain | antibody | | |
| HIV1123 | HIV1 gp120 | HIV1 gp120 | WO2001000678 SEQ ID NO: 50 | 28107 |
| | antibody, light chain | antibody | | |
| HIV1124 | HIV1 gp120 | HIV1 gp120 | WO2001000678 SEQ ID NO: 51 | 28108 |
| | antibody, light chain | antibody | | |
| HIV1125 | HIV1 gp120 | HIV1 gp120 | WO2001000678 SEQ ID NO: 52 | 28109 |
| | antibody, light chain | antibody | | |
| HIV1126 | HIV1 gp120 | HIV1 gp120 | WO2001000678 SEQ ID NO: 53 | 28110 |
| | antibody, light chain | antibody | | |
| HIV1127 | HIV1 gp120 | HIV1 gp120 | WO2001000678 SEQ ID NO: 54 | 28111 |
| | antibody, light chain | antibody | | |
| HIV1128 | HIV1 gp120 | HIV1 gp120 | WO2001000678 SEQ ID NO: 55 | 28112 |
| | antibody, light chain | antibody | | |
| HIV1129 | HIV1 gp120 | HIV1 gp120 | WO2001000678 SEQ ID NO: 56 | 28113 |
| | antibody, light chain | antibody | | |
| HIV1130 | HIV1 gp120 | HIV1 gp120 | WO2001000678 SEQ ID NO: 65 | 28114 |
| | antibody, light chain | antibody | | |
| HIV1131 | HIV1 gp120 | HIV1 gp120 | WO2001000678 SEQ ID NO: 66 | 28115 |
| | antibody, light chain | antibody | | |
| HIV1132 | HIV1 gp120 | HIV1 gp120 | WO2001000678 SEQ ID NO: 67 | 28116 |
| | antibody, light chain | antibody | | |
| HIV1133 | HIV1 gp120 | HIV1 gp120 | WO2001000678 SEQ ID NO: 68 | 28117 |
| | antibody, light chain | antibody | | |
| HIV1134 | HIV1 gp120 | HIV1 gp120 | WO2001000678 SEQ ID NO: 69 | 28118 |
| | antibody, light chain | antibody | | |
| HIV1135 | HIV1 gp120 | HIV1 gp120 | WO2001000678 SEQ ID NO: 70 | 28119 |
| | antibody, light chain | antibody | | |
| HIV1136 | HIV1 gp120 | HIV1 gp120 | WO2001000678 SEQ ID NO: 71 | 28120 |
| | antibody, light chain | antibody | | |
| HIV1137 | HIV1 gp120 | HIV1 gp120 | WO2001000678 SEQ ID NO: 72 | 28121 |
| | antibody, light chain | antibody | | |
| HIV1138 | HIV1 gp120 | HIV1 gp120 | WO2001000678 SEQ ID NO: 79 | 28122 |
| | antibody, light chain | antibody | | |
| HIV1139 | HIV1 gp120 | HIV1 gp120 | WO2001000678 SEQ ID NO: 80 | 28123 |
| | antibody, light chain | antibody | | |
| HIV1140 | HIV1 gp120 | HIV1 gp120 | WO2001000678 SEQ ID NO: 81 | 28124 |
| | antibody, light chain | antibody | | |
| HIV1141 | HIV1 gp120 | HIV1 gp120 | WO2001000678 SEQ ID NO: 82 | 28125 |
| | antibody, light chain | antibody | | |
| HIV1142 | HIV1 gp120 | HIV1 gp120 | WO2001000678 SEQ ID NO: 83 | 28126 |
| | antibody, light chain | antibody | | |
| HIV1143 | Kappa light chain | 1460_G14 | U.S. Pat. No. 9,051,362 SEQ ID NO: 22 | 28127 |
| HIV1144 | Kappa light chain | 1456_P20 | U.S. Pat. No. 9,051,362 SEQ ID NO: 34 | 28128 |
| | variable region | | | |
| HIV1145 | Kappa light chain | 1460_G14 | U.S. Pat. No. 9,051,362 SEQ ID NO: 36 | 28129 |
| | variable region | | | |
| HIV1146 | Kappa light chain | 1456_P20 | U.S. Pat. No. 9,051,362 SEQ ID NO: 18 | 28130 |
| HIV1147 | Lambda light chain | 1456_A12 | U.S. Pat. No. 9,051,362 SEQ ID NO: 50 | 28131 |
| HIV1148 | Lambda light chain | 1469 M23 | U.S. Pat. No. 9,051,362 SEQ ID NO: 142 | 28132 |
| HIV1149 | Lambda light chain | 1489_I13 | U.S. Pat. No. 9,051,362 SEQ ID NO: 14 | 28133 |
| HIV1150 | Lambda light chain | 1495_C14 | U.S. Pat. No. 9,051,362 SEQ ID NO: 26 | 28134 |
| HIV1151 | Lambda light chain | 1489_I13 | U.S. Pat. No. 9,051,362 SEQ ID NO: 32 | 28135 |
| | variable region | | | |
| HIV1152 | Lambda light chain | 1495_C14 | U.S. Pat. No. 9,051,362 SEQ ID NO: 38 | 28136 |
| | variable region | | | |
| HIV1153 | Lambda light chain | 1496_C09 | U.S. Pat. No. 9,051,362 SEQ ID NO: 40 | 28137 |
| | variable region | | | |
| HIV1154 | Lambda light chain | 1456_A12 | U.S. Pat. No. 9,051,362 SEQ ID NO: 51 | 28138 |
| | variable region | | | |
| HIV1155 | Lambda light chain | 1503_H05 | U.S. Pat. No. 9,051,362 SEQ ID NO: 56 | 28139 |
| | variable region | | | |
| HIV1156 | Lambda light chain | 1496_C09 | U.S. Pat. No. 9,051,362 SEQ ID NO: 30 | 28140 |
| HIV1157 | Light chain | 2424 | Kumar, R., et al., Functional and Structural | 28141 |
| | | | Characterization of Human V3-Specific | |
| | | | Monoclonal Antibody 2424 with Neutralizing | |
| | | | Activity against HIV-1 JRFL; J. Virol. 89 (17), | |
| | | | 9090-9102 (2015), NCBI Accession # | |
| | | | 4XML_L(215aa) | |
| HIV1158 | Light chain | 8062 | Gustchina, E., PLoS ONE 8 (11), E78187 | 28142 |
| | | | (2013), NCBI Accession # 4KHX_L(213aa) | |
| HIV1159 | Light chain | 1.00E+09 | US20140348785 SEQ ID NO: 2 | 28143 |
| HIV1160 | Light Chain | 10e8 | Huang J et al., Nature 491 (7424), 406-412 | 28144 |
| | | (monoclonal) | (2012), NCBI Accession # 4G6F_D (215aa) | |
| HIV1161 | Light chain | 12a12kc | US20140328862 SEQ ID NO: 453 | 28145 |
| HIV1162 | Light chain | 12a13kc | US20140328862 SEQ ID NO: 454 | 28146 |
| HIV1163 | Light chain | 12a16kc | US20140328862 SEQ ID NO: 455 | 28147 |
| HIV1164 | Light chain | 12a1kc | US20140328862 SEQ ID NO: 456 | 28148 |
| HIV1165 | Light chain | 12a20kc | US20140328862 SEQ ID NO: 457 | 28149 |
| HIV1166 | Light chain | 12a21 | NCBI Accession # 4JPW_L (210aa) | 28150 |
| HIV1167 | Light chain | 12a21kc | US20140328862 SEQ ID NO: 458 | 28151 |
| HIV1168 | Light chain | 12a22kc | US20140328862 SEQ ID NO: 459 | 28152 |
| HIV1169 | Light chain | 12a23kc | US20140328862 SEQ ID NO: 460 | 28153 |
| HIV1170 | Light chain | 12a27kc | US20140328862 SEQ ID NO: 461 | 28154 |
| HIV1171 | Light chain | 12a46kc | US20140328862 SEQ ID NO: 462 | 28155 |
| HIV1172 | Light chain | 12a55kc | US20140328862 SEQ ID NO: 463 | 28156 |
| HIV1173 | Light chain | 12a56kc | US20140328862 SEQ ID NO: 464 | 28157 |
| HIV1174 | Light chain | 12a6kc | US20140328862 SEQ ID NO: 465 | 28158 |
| HIV1175 | Light chain | 12a7kc | US20140328862 SEQ ID NO: 466 | 28159 |
| HIV1176 | Light chain | 17b | Kwong, P. D., et al., structure of an HIV gp120 | 28160 |
| | | | envelope glycoprotein in complex with the CD4 | |
| | | | receptor and a neutralizing human antibody; | |
| | | | Nature 393 (6686). 648-659 (1998), NCBI | |
| | | | Accession # 1G9M_L(214aa) | |
| HIV1177 | Light chain | 1b2530 | Zhou T et al., Structural Repertoire of HIV-1- | 28161 |
| | | | Neutralizing Antibodies Targeting the CD4 | |
| | | | Supersite in 14 Donors; Cell 161 (6), 1280- | |
| | | | 1292 (2015), NCBI Accession # 4YFL_L | |
| | | | (215aa) | |
| HIV1178 | Light chain | 1F7 | U.S. Pat. No. 6,057,421A FIG. 8 | 28162 |
| HIV1179 | Light chain | 1NC9 | WO2012154312 SEQ ID NO: 2472 | 28163 |
| HIV1180 | Light chain | 2.2C | Acharya, P., et al., Structural Definition of an | 28164 |
| | | | Antibody-Dependent Cellular Cytotoxicity | |
| | | | Response Implicated in Reduced Risk for HIV- | |
| | | | 1 Infection; J. Virol. 88 (21), 12895-12906 | |
| | | | (2014), NCBI Accession # 4R4N_L (210aa) | |
| HIV1181 | Light chain | 2F5 | U.S. Pat. No. 8,637,036B2 SEQ ID NO: 10 | 28165 |
| HIV1182 | Light chain | 3040LC | WO2015117008 SEQ ID NO: 29 | 28166 |
| HIV1183 | Light chain | 3044LC | WO2015117008 SEQ ID NO: 32 | 28167 |
| HIV1184 | Light chain | 3430LC | WO2015117008 SEQ ID NO: 30 | 28168 |
| HIV1185 | Light chain | 3484LC | WO2015117008 SEQ ID NO: 31 | 28169 |
| HIV1186 | Light chain | 3630LC | WO2015117008 SEQ ID NO: 33 | 28170 |
| HIV1187 | Light chain | 3A124KC | US20140328862 SEQ ID NO: 506 | 28171 |
| HIV1188 | Light chain | 3A125KC | US20140328862 SEQ ID NO: 507 | 28172 |
| HIV1189 | Light chain | 3A140LC | US20140328862 SEQ ID NO: 508 | 28173 |
| HIV1190 | Light chain | 3A144KC | US20140328862 SEQ ID NO: 509 | 28174 |
| HIV1191 | Light chain | 3A160KC | US20140328862 SEQ ID NO: 510 | 28175 |
| HIV1192 | Light chain | 3A18KC | US20140328862 SEQ ID NO: 511 | 28176 |
| HIV1193 | Light chain | 3A204KC | US20140328862 SEQ ID NO: 512 | 28177 |
| HIV1194 | Light chain | 3A228KC | US20140328862 SEQ ID NO: 513 | 28178 |
| HIV1195 | Light chain | 3A233LC | US20140328862 SEQ ID NO: 514 | 28179 |
| HIV1196 | Light chain | 3A244LC | US20140328862 SEQ ID NO: 515 | 28180 |
| HIV1197 | Light chain | 3A255LC | US20140328862 SEQ ID NO: 516 | 28181 |
| HIV1198 | Light chain | 3A296KC | US20140328862 SEQ ID NO: 517 | 28182 |
| HIV1199 | Light chain | 3A334LC | US20140328862 SEQ ID NO: 518 | 28183 |
| HIV1200 | Light chain | 3A366KC | US20140328862 SEQ ID NO: 519 | 28184 |
| HIV1201 | Light chain | 3A384KC | US20140328862 SEQ ID NO: 520 | 28185 |
| HIV1202 | Light chain | 3A419KC | US20140328862 SEQ ID NO: 521 | 28186 |
| HIV1203 | Light chain | 3a426kc | US20140328862 SEQ ID NO: 535 | 28187 |
| HIV1204 | Light chain | 3A461KC | US20140328862 SEQ ID NO: 522 | 28188 |
| HIV1205 | Light chain | 3A474KC | US20140328862 SEQ ID NO: 523 | 28189 |
| HIV1206 | Light chain | 3a515kc | US20140328862 SEQ ID NO: 536 | 28190 |
| HIV1207 | Light chain | 3A518KC | US20140328862 SEQ ID NO: 524 | 28191 |
| HIV1208 | Light chain | 3A539LC | US20140328862 SEQ ID NO: 525 | 28192 |
| HIV1209 | Light chain | 3A576LC | US20140328862 SEQ ID NO: 526 | 28193 |
| HIV1210 | Light chain | 3A613LC | US20140328862 SEQ ID NO: 527 | 28194 |
| HIV1211 | Light chain | 3A64KC | US20140328862 SEQ ID NO: 528 | 28195 |
| HIV1212 | Light chain | 3A650KC | US20140328862 SEQ ID NO: 529 | 28196 |
| HIV1213 | Light chain | 3A67KC | US20140328862 SEQ ID NO: 530 | 28197 |
| HIV1214 | Light chain | 3A779KC | US20140328862 SEQ ID NO: 531 | 28198 |
| HIV1215 | Light chain | 3A816KC | US20140328862 SEQ ID NO: 532 | 28199 |
| HIV1216 | Light chain | 3A869KC | US20140328862 SEQ ID NO: 533 | 28200 |
| HIV1217 | Light chain | 3A93LC | US20140328862 SEQ ID NO: 534 | 28201 |
| HIV1218 | Light chain | 3anc3kc | US20140328862 SEQ ID NO: 547 | 28202 |
| HIV1219 | Light chain | 3b106kc | US20140328862 SEQ ID NO: 548 | 28203 |
| HIV1220 | Light chain | 3b129kc | US20140328862 SEQ ID NO: 537 | 28204 |
| HIV1221 | Light chain | 3b16kc | US20140328862 SEQ ID NO: 549 | 28205 |
| HIV1222 | Light chain | 3b171lc | US20140328862 SEQ ID NO: 538 | 28206 |
| HIV1223 | Light chain | 3b180kc | US20140328862 SEQ ID NO: 550 | 28207 |
| HIV1224 | Light chain | 3b183kc | US20140328862 SEQ ID NO: 551 | 28208 |
| HIV1225 | Light chain | 3b191kc | US20140328862 SEQ ID NO: 552 | 28209 |
| HIV1226 | Light chain | 3b21kc | US20140328862 SEQ ID NO: 553 | 28210 |
| HIV1227 | Light chain | 3b27kc | US20140328862 SEQ ID NO: 539 | 28211 |
| HIV1228 | Light chain | 3b41kc | US20140328862 SEQ ID NO: 540 | 28212 |
| HIV1229 | Light chain | 3b46kc | US20140328862 SEQ ID NO: 542 | 28213 |
| HIV1230 | Light chain | 3b57lc | US20140328862 SEQ ID NO: 543 | 28214 |
| HIV1231 | Light chain | 3b5kc | US20140328862 SEQ ID NO: 541 | 28215 |
| HIV1232 | Light chain | 3b8kc | US20140328862 SEQ ID NO: 544 | 28216 |
| HIV1233 | Light chain | 3bnc102kc | US20140328862 SEQ ID NO: 554 | 28217 |
| HIV1234 | Light chain | 3bnc104kc | US20140328862 SEQ ID NO: 555 | 28218 |
| HIV1235 | Light chain | 3bnc105kc | US20140328862 SEQ ID NO: 556 | 28219 |
| HIV1236 | Light chain | 3bnc107kc | US20140328862 SEQ ID NO: 557 | 28220 |
| HIV1237 | Light chain | 3bnc108kc | US20140328862 SEQ ID NO: 558 | 28221 |
| HIV1238 | Light chain | 3bnc117 | Zhou T et al., Immunity 39 (2), 245-258 (2013), | 28222 |
| | | | NCBI Accession # 4LSV_L(206aa) | |
| HIV1239 | Light chain | 3bnc117kc | US20140328862 SEQ ID NO: 559 | 28223 |
| HIV1240 | Light chain | 3bnc134kc | US20140328862 SEQ ID NO: 560 | 28224 |
| HIV1241 | Light chain | 3bnc142kc | US20140328862 SEQ ID NO: 561 | 28225 |
| HIV1242 | Light chain | 3bnc151kc | US20140328862 SEQ ID NO: 562 | 28226 |
| HIV1243 | Light chain | 3bnc153kc | US20140328862 SEQ ID NO: 563 | 28227 |
| HIV1244 | Light chain | 3bnc156kc | US20140328862 SEQ ID NO: 564 | 28228 |
| HIV1245 | Light chain | 3bnc158kc | US20140328862 SEQ ID NO: 565 | 28229 |
| HIV1246 | Light chain | 3bnc159kc | US20140328862 SEQ ID NO: 566 | 28230 |
| HIV1247 | Light chain | 3bnc15kc | US20140328862 SEQ ID NO: 567 | 28231 |
| HIV1248 | Light chain | 3bnc176kc | US20140328862 SEQ ID NO: 568 | 28232 |
| HIV1249 | Light chain | 3bnc193kc | US20140328862 SEQ ID NO: 569 | 28233 |
| HIV1250 | Light chain | 3bnc196kc | US20140328862 SEQ ID NO: 570 | 28234 |
| HIV1251 | Light chain | 3bnc31kc | US20140328862 SEQ ID NO: 571 | 28235 |
| HIV1252 | Light chain | 3bnc42kc | US20140328862 SEQ ID NO: 572 | 28236 |
| HIV1253 | Light chain | 3bnc53kc | US20140328862 SEQ ID NO: 573 | 28237 |
| HIV1254 | Light chain | 3BNC55KC | US20140328862 SEQ ID NO: 545 | 28238 |
| HIV1255 | Light chain | 3BNC60KC | US20140328862 SEQ ID NO: 546 | 28239 |
| HIV1256 | Light chain | 3bnc62kc | US20140328862 SEQ ID NO: 574 | 28240 |
| HIV1257 | Light chain | 3bnc65kc | US20140328862 SEQ ID NO: 575 | 28241 |
| HIV1258 | Light chain | 3bnc66kc | US20140328862 SEQ ID NO: 576 | 28242 |
| HIV1259 | Light chain | 3bnc75kc | US20140328862 SEQ ID NO: 577 | 28243 |
| HIV1260 | Light chain | 3bnc79kc | US20140328862 SEQ ID NO: 578 | 28244 |
| HIV1261 | Light chain | 3bnc81kc | US20140328862 SEQ ID NO: 579 | 28245 |
| HIV1262 | Light chain | 3bnc84kc | US20140328862 SEQ ID NO: 580 | 28246 |
| HIV1263 | Light chain | 3bnc87kc | US20140328862 SEQ ID NO: 581 | 28247 |
| HIV1264 | Light chain | 3bnc89kc | US20140328862 SEQ ID NO: 582 | 28248 |
| HIV1265 | Light chain | 3bnc91kc | US20140328862 SEQ ID NO: 583 | 28249 |
| HIV1266 | Light chain | 3bnc95kc | US20140328862 SEQ ID NO: 584 | 28250 |
| HIV1267 | Light chain | 412d | Huang et al., Science 317 (5846), 1930-1934 | 28251 |
| | | | (2007), NCBI Accession # 2QAD_G (214aa) | |
| HIV1268 | Light Chain | 44-vrc13.01 | Zhon T et al., Structural Repertoire of HIV-1- | 28252 |
| | | | Neutralizing Antibodies Targeting the CD4 | |
| | | | Supersite in 14 Donors; Cell 161 (6), 1280- | |
| | | | 1292 (2015), NCBI Accession # 4YDJ_B | |
| | | | (206aa) | |
| HIV1269 | Light chain | 45-46m2 | Diskin, R., et al., Restricting HIV-1 pathways | 28253 |
| | | | for escape using rationally designed anti-HIV-1 | |
| | | | antibodies; J. Exp. Med. 210 (6), 1235-1249 | |
| | | | (2013), NCBI Accession # 4JKP_L (210aa) | |
| HIV1270 | Light chain | 4835_F12 | US20140205612 SEQ ID NO: 413 | 28254 |
| | | (PGT-124) | | |
| HIV1271 | Light chain | 4838_L06 | US20140205612 SEQ ID NO: 148 | 28255 |
| | | (PGT-121) | | |
| HIV1272 | Light chain | 4858_P08 | US20140205612 SEQ ID NO: 176 | 28256 |
| | | (PGT-123) | | |
| HIV1273 | Light chain | 4869-K15 | US20140205612 SEQ ID NO: 428 | 28257 |
| | | (PGT-133) | | |
| HIV1274 | Light chain | 4873_E03 | US20140205612 SEQ ID NO: 147 | 28258 |
| | | (PGT-121) | | |
| HIV1275 | Light chain | 4876_M06 | US20140205612 SEQ ID NO: 439 | 28259 |
| | | (PGT-134) | | |
| HIV1276 | Light chain | 4877_D15 | US20140205612 SEQ ID NO: 160 | 28260 |
| | | (PGT-122) | | |
| HIV1277 | Light chain | 4964_G22 | US20140205612 SEQ ID NO: 284 | 28261 |
| | | (PGT-141), | | |
| | | 4993_K13 | | |
| | | (PGT-141), | | |
| | | 4995_E20 | | |
| | | (PGT-142) | | |
| HIV1278 | Light chain | 4970_K22 | US20140205612 SEQ ID NO: 312 | 28262 |
| | | (PGT-144) | | |
| HIV1279 | Light chain | 4980_N08 | US20140205612 SEQ ID NO: 301 | 28263 |
| | | (PGT-143) | | |
| HIV1280 | Light chain | 4995_P16 | US20140205612 SEQ ID NO: 385 | 28264 |
| | | (PGT-145) | | |
| HIV1281 | Light chain | 4e10 Fv | Finton, K. A., et al., PLoS Pathol. 9 (9), | 28265 |
| | | | E1003639 (2013), NCBI Accession # 4LLV_B | |
| | | | (112aa) | |
| HIV1282 | Light chain | 5114_A19 | US20140205612 SEQ ID NO: 392 | 28266 |
| | | (PGT-128) | | |
| HIV1283 | Light chain | 5120_N10 | US20140205612 SEQ ID NO: 469 | 28267 |
| | | (PGT-139) | | |
| HIV1284 | Light chain | 5131_A17 | US20140205612 SEQ ID NO: 488 | 28268 |
| | | (PGT-132) | | |
| HIV1285 | Light chain | 5136_H01 | US20140205612 SEQ ID NO: 355 | 28269 |
| | | (PGT-131) | | |
| HIV1286 | Light chain | 5138_G07 | US20140205612 SEQ ID NO: 483 | 28270 |
| | | (PGT-138) | | |
| HIV1287 | Light chain | 5141_B17 | US20140205612 SEQ ID NO: 208 | 28271 |
| | | (PGT-126) | | |
| HIV1288 | Light chain | 5145_B14 | US20140205612 SEQ ID NO: 329 | 28272 |
| | | (PGT-127) | | |
| HIV1289 | Light chain | 5147_N06 | US20140205612 SEQ ID NO: 244 | 28273 |
| | | (PGT-130) | | |
| HIV1290 | Light chain | 5329_C19 | US20140205612 SEQ ID NO: 257 | 28274 |
| | | (PGT-136), | | |
| | | 5366_P21 | | |
| | | (PGT-136) | | |
| HIV1291 | Light chain | 5343_B08 | US20140205612 SEQ ID NO: 240 | 28275 |
| | | (PGT-135), | | |
| | | 5344_E16 | | |
| | | (PGT-135) | | |
| HIV1292 | Light chain | 5345_I01 | US20140205612 SEQ ID NO: 396 | 28276 |
| | | (PGT-137) | | |
| HIV1293 | Light chain | 6808_B09 | US20140205612 SEQ ID NO: 553 | 28277 |
| | | (PGT-156) | | |
| HIV1294 | Light chain | 6831_A21 | US20140205612 SEQ ID NO: 482 | 28278 |
| | | (PGT-151) | | |
| HIV1295 | Light chain | 6843_G20 | US20140205612 SEQ ID NO: 524 | 28279 |
| | | (PGT-154) | | |
| HIV1296 | Light chain | 6881_N05 | US20140205612 SEQ ID NO: 578 | 28280 |
| | | (PGT-158). | | |
| HIV1297 | Light chain | 6889_I17 | US20140205612 SEQ ID NO: 496 | 28281 |
| | | (PGT-152) | | |
| HIV1298 | Light chain | 6891_F06 | US20140205612 SEQ ID NO: 510 | 28282 |
| | | (PGT-153) | | |
| HIV1299 | Light chain | 6892_C23 | US20140205612 SEQ ID NO: 565 | 28283 |
| | | (PGT-157) | | |
| HIV1300 | Light chain | 6892_D19 | US20140205612 SEQ ID NO: 539 | 28284 |
| | | (PGT-155) | | |
| HIV1301 | Light chain | 7H6 | US20140348785 SEQ ID NO: 4 | 28285 |
| HIV1302 | Light chain | 7N16 | US20140348785 SEQ ID NO: 6 | 28286 |
| HIV1303 | Light chain | 8anc131 | Zhou T et al. Structural Repertoire of HIV-1- | 28287 |
| | | | Neutralizing Antibodies Targeting the CD4 | |
| | | | Supersite in 14 Donors; Cell 161 (6), 1280- | |
| | | | 1292 (2015), NCBI Accession # 4RWY_L | |
| | | | (213aa) | |
| HIV1304 | Light chain | 8ANC131KC | US20140328862 SEQ ID NO: 440 | 28288 |
| HIV1305 | Light chain | 8anc134 | Zhou T et al, Structural Repertoire of HIV-1- | 28289 |
| | | | Neutralizing Antibodies Targeting the CD4 | |
| | | | Supersite in 14 Donors; Cell 161 (6), 1280- | |
| | | | 1292 (2015), NCBI Accession # 4RX4_L | |
| | | | (213aa) | |
| HIV1306 | Light chain | 8ANC134KC | US20140328862 SEQ ID NO: 441 | 28290 |
| HIV1307 | Light chain | 8ANC13KC | US20140328862 SEQ ID NO: 442 | 28291 |
| HIV1308 | Light chain | 8ANC14KC | US20140328862 SEQ ID NO: 448 | 28292 |
| HIV1309 | Light chain | 8ANC16KC | US20140328862 SEQ ID NO: 449 | 28293 |
| HIV1310 | Light chain | 8anc182kc | US20140328862 SEQ ID NO: 446 | 28294 |
| HIV1311 | Light chain | 8anc192kc | US20140328862 SEQ ID NO: 447 | 28295 |
| HIV1312 | Light chain | 8ANC195KC | US20140328862 SEQ ID NO: 450 | 28296 |
| HIV1313 | Light chain | 8ANC24KC | US20140328862 SEQ ID NO: 451 | 28297 |
| HIV1314 | Light chain | 8ANC45KC | US20140328862 SEQ ID NO: 443 | 28298 |
| HIV1315 | Light chain | 8ANC50KC | US20140328862 SEQ ID NO: 444 | 28299 |
| HIV1316 | Light chain | 8ANC5KC | US20140328862 SEQ ID NO: 452 | 28300 |
| HIV1317 | Light chain | 8ANC88KC | US20140328862 SEQ ID NO: 445 | 28301 |
| HIV1318 | Light chain | Anti-HcG | Fotinou C. et al “Structure of an Fab fragment | 28302 |
| | | | against a C-terminal peptide of hCG at 2.0 A | |
| | | | resolution” J. Biol. Chem. 273 (35), 22515- | |
| | | | 22518 (1998); NCBI Accession # 1SBS_L | |
| HIV1319 | Light chain | B12 | Zhou T et al., Structural definition of a | 28303 |
| | | | conserved neutralization epitope on HIV-1 | |
| | | | gp120; Nature 445 (7129), 732-737 (2007), | |
| | | | NCBI Accession # 2NY7_L (215aa) | |
| HIV1320 | Light Chain | C38-vrc16.01 | Zhou T et al., Structural Repertoire of HIV-1- | 28304 |
| | | | Neutralizing Antibodies Targeting the CD4 | |
| | | | Supersite in 14 Donors; Cell 161 (6), 1280- | |
| | | | 1292 (2015), NCBI Accession # 4YDK_L | |
| | | | (214aa) | |
| HIV1321 | Light chain | C38-vrc18.02 | Zhou T et al., Structural Repertoire of HIV-1- | 28305 |
| | | | Neutralizing Antibodies Targeting the CD4 | |
| | | | Supersite in 14 Donors; Cell 161 (6), 1280- | |
| | | | 1292 (2015), NCBI Accession # 4YDL_L | |
| | | | (211aa) | |
| HIV1322 | Light chain | CAP256- | WO2015128846 SEQ ID NO: 14 | 28306 |
| | | VRC26.01 | | |
| HIV1323 | Light chain | CAP256- | WO2015128846 SEQ ID NO: 18 | 28307 |
| | | VRC26.02 | | |
| HIV1324 | Light chain | CAP256- | WO2015128846 SEQ ID NO: 22 | 28308 |
| | | VRC26.03 | | |
| HIV1325 | Light chain | CAP256- | WO2015128846 SEQ ID NO: 26 | 28309 |
| | | VRC26.04 | | |
| HIV1326 | Light chain | CAP256- | WO2015128846 SEQ ID NO: 30 | 28310 |
| | | VRC26.05 | | |
| HIV1327 | Light chain | CAP256- | WO2015128846 SEQ ID NO: 34 | 28311 |
| | | VRC26.06 | | |
| HIV1328 | Light chain | CAP256- | WO2015128846 SEQ ID NO: 38 | 28312 |
| | | VRC26.07 | | |
| HIV1329 | Light chain | CAP256- | WO2015128846 SEQ ID NO: 42 | 28313 |
| | | VRC26.08 | | |
| HIV1330 | Light chain | CAP256- | WO2015128846 SEQ ID NO: 46 | 28314 |
| | | VRC26.09 | | |
| HIV1331 | Light chain | CAP256- | WO2015128846 SEQ ID NO: 50 | 28315 |
| | | VRC26.10 | | |
| HIV1332 | Light chain | CAP256- | WO2015128846 SEQ ID NO: 54 | 28316 |
| | | VRC26.11 | | |
| HIV1333 | Light chain | CAP256- | WO2015128846 SEQ ID NO: 58 | 28317 |
| | | VRC26.12 | | |
| HIV1334 | Light chain | CAP256- | WO2015128846 SEQ ID NO: 171 | 28318 |
| | | VRC26.25 | | |
| HIV1335 | Light chain | CAP256- | WO2015128846 SEQ ID NO: 179 | 28319 |
| | | VRC26.26 | | |
| HIV1336 | Light chain | CAP256- | WO2015128846 SEQ ID NO: 187 | 28320 |
| | | VRC26.27 | | |
| HIV1337 | Light chain | CAP256- | WO2015128846 SEQ ID NO: 6 | 28321 |
| | | VRC26-I1 | | |
| HIV1338 | Light chain | CAP256- | WO2015128846 SEQ ID NO: 10 | 28322 |
| | | VRC26-I2 | | |
| HIV1339 | Light chain | CAP256- | WO2015128846 SEQ ID NO: 2 | 28323 |
| | | VRC26- | | |
| | | UCA. | | |
| HIV1340 | Light chain | construct | WO2015013390 SEQ ID NO: 5 | 28324 |
| | | #2816, #2861 | | |
| HIV1341 | Light chain | construct | WO2015013390 SEQ ID NO: 6 | 28325 |
| | | #2817, #2860 | | |
| HIV1342 | Light chain | construct | WO2015013390 SEQ ID NO: 7 | 28326 |
| | | #2858, | | |
| | | #2859, #2861 | | |
| HIV1343 | Light chain | Fab 2219 | Stanfield, R. L., et al., J. Virol. 80 (12), 6093- | 28327 |
| | | | 6105 (2006), NCBI Accession # 2B0S_L | |
| | | | (215aa) | |
| HIV1344 | Light chain | Fab 2g12 | Doores, K. J., et al., J. Virol. 84 (20), 10690- | 28328 |
| | | | 10699 (2010), NCBI Accession # | |
| | | | 3OAU_L(212a) | |
| HIV1345 | Light chain | Fab 2g12 | Stanfield, R. L. et al., Crystal structure of the | 28329 |
| | | | HIV neutralizing antibody 2G12, in complex | |
| | | | with a bacterial oligosaccharide analog of | |
| | | | mammalian oligomannose; Glycobiology 25 | |
| | | | (4), 412-419 (2015), NCBI Accession # | |
| | | | 4RBP_L (213aa) | |
| HIV1346 | Light chain | Fab F425- | Bell et al., J. Mol. Biol. 375 (4), 969-978 | 28330 |
| | | b4e8 | (2008), NCBI Accession # 2QSC_L (215aa) | |
| HIV1347 | Light chain | G4D | US20130195881 SEQ ID NO: 39 | 28331 |
| HIV1348 | Light chain | G4H | US20130195881 SEQ ID NO: 38 | 28332 |
| HIV1349 | Light chain | gVRC-H5(d74)/ | WO2013090644 SEQ ID NO: 19 | 28333 |
| | | VRC-PG04LC, | | |
| | | gVRCOH12(D74)/ | | |
| | | VRC-PG04LC | | |
| HIV1350 | Light chain | 12 (unbound) | Fera, D. et al., Affinity maturation in an HIV | 28334 |
| | | From Ch103 | broadly neutralizing B-cell lineage through | |
| | | Lineage | reorientation of variable domains; Proc. Natl. | |
| | | | Acad. Sci. U.S.A. 111 (28), 10275-10280 | |
| | | | (2014), NCBI Accession # 4QHN_B (213aa) | |
| HIV1351 | Light chain | IGLV3- | US20140348785 SEQ ID NO: 8 | 28335 |
| | | 19*01 | | |
| HIV1352 | Light chain | k3 | WO2015117008 SEQ ID NO: 19 | 28336 |
| HIV1353 | Light chain | k5 | WO2015117008 SEQ ID NO: 20 | 28337 |
| HIV1354 | Light chain | k53 | WO2015117008 SEQ ID NO: 24 | 28338 |
| HIV1355 | Light chain | k59 | WO2015117008 SEQ ID NO: 21 | 28339 |
| HIV1356 | Light chain | k61 | WO2015117008 SEQ ID NO: 25 | 28340 |
| HIV1357 | Light chain | k62 | WO2015117008 SEQ ID NO: 22 | 28341 |
| HIV1358 | Light chain | k81 | WO2015117008 SEQ ID NO: 28 | 28342 |
| HIV1359 | Light chain | kl 1 | WO2015117008 SEQ ID NO: 26 | 28343 |
| HIV1360 | Light chain | kl8 | WO2015117008 SEQ ID NO: 23 | 28344 |
| HIV1361 | Light chain | kl9 | WO2015117008 SEQ ID NO: 27 | 28345 |
| HIV1362 | Light chain | LSSB2066KC | US20140328862 SEQ ID NO: 501 | 28346 |
| HIV1363 | Light chain | LSSB2080KC | US20140328862 SEQ ID NO: 502 | 28347 |
| HIV1364 | Light chain | LSSB2133KC | US20140328862 SEQ ID NO: 503 | 28348 |
| HIV1365 | Light chain | LSSB2182KC | US20140328862 SEQ ID NO: 504 | 28349 |
| HIV1366 | Light chain | LSSB2339LC | US20140328862 SEQ ID NO: 467 | 28350 |
| HIV1367 | Light chain | LSSB2351LC | US20140328862 SEQ ID NO: 468 | 28351 |
| HIV1368 | Light chain | LSSB2364LC | US20140328862 SEQ ID NO: 469 | 28352 |
| HIV1369 | Light chain | LSSB2367LC | US20140328862 SEQ ID NO: 470 | 28353 |
| HIV1370 | Light chain | LSSB2490LC | US20140328862 SEQ ID NO: 471 | 28354 |
| HIV1371 | Light chain | LSSB2530LC | US20140328862 SEQ ID NO: 472 | 28355 |
| HIV1372 | Light chain | LSSB2554LC | US20140328862 SEQ ID NO: 473 | 28356 |
| HIV1373 | Light chain | LSSB2586LC | US20140328862 SEQ ID NO: 474 | 28357 |
| HIV1374 | Light chain | LSSB2612LC | US20140328862 SEQ ID NO: 475 | 28358 |
| HIV1375 | Light chain | LSSB2640LC | US20140328862 SEQ ID NO: 476 | 28359 |
| HIV1376 | Light chain | LSSB2644LC | US20140328862 SEQ ID NO: 477 | 28360 |
| HIV1377 | Light chain | LSSB2666LC | US20140328862 SEQ ID NO: 478 | 28361 |
| HIV1378 | Light chain | LSSB2680LC | US20140328862 SEQ ID NO: 479 | 28362 |
| HIV1379 | Light chain | LSSB2683LC | US20140328862 SEQ ID NO: 480 | 28363 |
| HIV1380 | Light chain | LSSB331KC | US20140328862 SEQ ID NO: 505 | 28364 |
| HIV1381 | Light chain | LSSB344LC | US20140328862 SEQ ID NO: 481 | 28365 |
| HIV1382 | Light chain | LSSNEC107LC | US20140328862 SEQ ID NO: 482 | 28366 |
| HIV1383 | Light chain | LSSNEC108LC | US20140328862 SEQ ID NO: 483 | 28367 |
| HIV1384 | Light chain | LSSNEC117LC | US20140328862 SEQ ID NO: 484 | 28368 |
| HIV1385 | Light chain | LSSNEC118LC | US20140328862 SEQ ID NO: 485 | 28369 |
| HIV1386 | Light chain | LSSNEC122LC | US20140328862 SEQ ID NO: 486 | 28370 |
| HIV1387 | Light chain | LSSNEC24LC | US20140328862 SEQ ID NO: 487 | 28371 |
| HIV1388 | Light chain | LSSNEC2LC | US20140328862 SEQ ID NO: 488 | 28372 |
| HIV1389 | Light chain | LSSNEC33LC | US20140328862 SEQ ID NO: 489 | 28373 |
| HIV1390 | Light chain | LSSNEC46LC | US20140328862 SEQ ID NO: 490 | 28374 |
| HIV1391 | Light chain | LSSNEC48LC | US20140328862 SEQ ID NO: 491 | 28375 |
| HIV1392 | Light chain | LSSNEC52LC | US20140328862 SEQ ID NO: 492 | 28376 |
| HIV1393 | Light chain | LSSNEC56LC | US20140328862 SEQ ID NO: 493 | 28377 |
| HIV1394 | Light chain | LSSNEC60LC | US20140328862 SEQ ID NO: 494 | 28378 |
| HIV1395 | Light chain | LSSNEC70LC | US20140328862 SEQ ID NO: 495 | 28379 |
| HIV1396 | Light chain | LSSNEC72LC | US20140328862 SEQ ID NO: 496 | 28380 |
| HIV1397 | Light chain | LSSNEC7LC | US20140328862 SEQ ID NO: 497 | 28381 |
| HIV1398 | Light chain | LSSNEC89LC | US20140328862 SEQ ID NO: 498 | 28382 |
| HIV1399 | Light chain | LSSNEC94LC | US20140328862 SEQ ID NO: 499 | 28383 |
| HIV1400 | Light chain | LSSNEC9LC | US20140328862 SEQ ID NO: 500 | 28384 |
| HIV1401 | Light chain | m12-Fd-aa | U.S. Pat. No. 7,803,913B2 SEQ ID NO: 7 | 28385 |
| HIV1402 | Light chain | m14-Fd-aa | U.S. Pat. No. 7,803,913B2 SEQ ID NO: 5 | 28386 |
| HIV1403 | Light chain | m16-Fd-aa | U.S. Pat. No. 7,803,913B2 SEQ ID NO: 8 | 28387 |
| HIV1404 | Light chain | m18 Fd-aa | U.S. Pat. No. 7,803,913B2 SEQ ID NO: 6 | 28388 |
| HIV1405 | Light chain | M66 | Ofek, G., et al., Structural Basis for HIV-1 | 28389 |
| | | | Neutralization by 2F5-Like Antibodies m66 | |
| | | | and m66.6; J. Virol. 88 (5), 2426-2441 (2014), | |
| | | | NCBI Accession # 4NRY_H (235aa) | |
| HIV1406 | Light chain | M66.6 | Ofek, G., et al., Structural Basis for HIV-1 | 28390 |
| | | | Neutralization by 2F5-Like Antibodies m66 | |
| | | | and m66.6; J. Virol. 88 (5), 2426-2441 (2014), | |
| | | | NCBI Accession # 4NRZ_L (213aa) | |
| HIV1407 | Light Chain | Mab 2158 | Spurrier, B., et al., Functional Implications of | 28391 |
| | | | the Binding Mode of a Human Conformation- | |
| | | | Dependent V2 Monoclonal Antibody against | |
| | | | HIV; J. Virol, 88 (8), 4100-4112 (2014), NCBI | |
| | | | Accession # 4OAW_C (214aa) | |
| HIV1408 | Light chain | MV1 | US20130195881 SEQ ID NO: 40 | 28392 |
| HIV1409 | Light chain | Pg16 Fab | Pancera, M., et al., Nat. Struct. Mol. Biol. 20 | 28393 |
| | | | (7), 804-813 (2013), NCBI Accession # | |
| | | | 4DQO_L (216aa) | |
| HIV1410 | Light chain | Pg9 | Willis, J. R., et al., J. Clin. Invest. 125 (6), 2523- | 28394 |
| | | | 2531 (2015), NCBI Accession # 4YAQ_L | |
| | | | (216aa) | |
| HIV1411 | Light chain | Pgt121-Gl | Mouquet H et al., Complex-type N-glycan | 28395 |
| | | Fab | recognition by potent broadly neutralizing HIV | |
| | | | antibodies; Proc Natl Acad Sci USA. 2012 | |
| | | | Nov. 20; 109(47): E3268-77, NCBI Accession # | |
| | | | 4FQQ_A (215aa) | |
| HIV1412 | Light chain | Pgt122 | Julien, J. P., et al., PLoS Pathol. 9 (5), | 28396 |
| | | | E1003342 (2013)”, NCBI Accession # 4JY5_L | |
| | | | (211aa) | |
| HIV1413 | Light chain | Pgt123 | Julien, J. P., et al., PLoS Pathol. 9 (5), | 28397 |
| | | | E1003342 (2013)”, NCBI Accession # 4JY6_A | |
| | | | (211aa) | |
| HIV1414 | Light chain | Pgt124 | Garces, F., et al., Structural Evolution of | 28398 |
| | | | Glycan Recognition by a Family of Potent HIV | |
| | | | Antibodies; Cell 159 (1), 69-79 (2014), NCBI | |
| | | | Accession # 4R26_L (214aa) | |
| HIV1415 | Light chain | Pgt130 | Doores, K. J., et al., J. Virol. 89 (2), 1105-1118 | 28399 |
| | | | (2015), NCBI Accession # 4RNR_B (216aa) | |
| HIV1416 | Light chain | Pgt135 | Grover et al., Science 343 (6171), 656-661 | 28400 |
| | | | (2014), NCBI Accession # 4NZR_L (214aa) | |
| HIV1417 | Light chain | S8, S19, S20 | US20110059015 SEQ ID NO: 2 | 28401 |
| HIV1418 | light chain | Suvizumab | | 28402 |
| HIV1419 | Light Chain | Vrc- Pg04 | Wu, X., et al., Focused evolution of HIV-1 | 28403 |
| | | | neutralizing antibodies revealed by structures | |
| | | | and deep sequencing; Science 333 (6049), | |
| | | | 1593-1602 (2011)”, NCBI Accession # 3SE9_L | |
| | | | (208aa) | |
| HIV1420 | Light chain | VRC01 | U.S. Pat. No. 8,637,036B2 SEQ ID NO: 2 | 28404 |
| HIV1421 | Light chain | VRC01 | US2014 0322163 SEQ ID NO: 53 | 28405 |
| | | E1/12 | | |
| | | deletion | | |
| HIV1422 | Light chain | VRC01 | US2014 0322163 SEQ ID NO: 222 | 28406 |
| | | E1/I2del | | |
| | | F97D | | |
| HIV1423 | Light chain | VRC01 | US2014 0322163 SEQ ID NO: 225 | 28407 |
| | | E1/I2del | | |
| | | F97H | | |
| HIV1424 | Light chain | VRC01 | US2014 0322163 SEQ ID NO: 223 | 28408 |
| | | E1/I2del | | |
| | | F97K | | |
| HIV1425 | Light chain | VRC01 | US2014 0322163 SEQ ID NO: 224 | 28409 |
| | | E1/I2del | | |
| | | F97S | | |
| HIV1426 | Light chain | VRC01 | US2014 0322163 SEQ ID NO: 219 | 28410 |
| | | E1/I2del V3E | | |
| HIV1427 | Light chain | VRC01 | US2014 0322163 SEQ ID NO: 227 | 28411 |
| | | E1/I2del | | |
| | | V3E, F97H | | |
| HIV1428 | Light chain | VRC01 | US2014 0322163 SEQ ID NO: 226 | 28412 |
| | | E1/I2del | | |
| | | V3E, F97S | | |
| HIV1429 | Light chain | VRC01 | US2014 0322163 SEQ ID NO: 220 | 28413 |
| | | E1/I2del V3K | | |
| HIV1430 | Light chain | VRC01 | US2014 0322163 SEQ ID NO: 221 | 28414 |
| | | E1/I2del V3S | | |
| HIV1431 | Light chain | VRC01HC/ | WO2013090644 SEQ ID NO: 31 | 28415 |
| | | VRC03LC | | |
| HIV1432 | Light chain | VRC01hpL02 | US2014 0322163 SEQ ID NO: 50 | 28416 |
| HIV1433 | Light chain | VRC01hpL02 | US2014 0322163 SEQ ID NO: 232 | 28417 |
| | | E1/I2- | | |
| | | deletion, V3S | | |
| HIV1434 | Light chain | VRC01hpL03 | US2014 0322163 SEQ ID NO: 228 | 28418 |
| HIV1435 | Light chain | VRC01hpL04 | US2014 0322163 SEQ ID NO: 229 | 28419 |
| HIV1436 | Light chain | VRC01hpL05 | US2014 0322163 SEQ ID NO: 230 | 28420 |
| HIV1437 | Light chain | VRC01hpL06 | US2014 0322163 SEQ ID NO: 231 | 28421 |
| HIV1438 | Light chain | VRC01LhpL | US2014 0322163 SEQ ID NO: 233 | 28422 |
| | | 03 E1/I2- | | |
| | | deletion, V3S | | |
| HIV1439 | Light chain | VRC01LhpL | US2014 0322163 SEQ ID NO: 237 | 28423 |
| | | 04 E1/I2- | | |
| | | deletion, V3E | | |
| HIV1440 | Light chain | VRC01LhpL | US2014 0322163 SEQ ID NO: 234 | 28424 |
| | | 04 E1/I2- | | |
| | | deletion, V3S | | |
| HIV1441 | Light chain | VRC01LhpL | US2014 0322163 SEQ ID NO: 235 | 28425 |
| | | 05 E1/12 | | |
| | | deletion, V3S | | |
| HIV1442 | Light chain | VRC01LhpL | US2014 0322163 SEQ ID NO: 236 | 28426 |
| | | 06 E1/I2- | | |
| | | deletion, V3S | | |
| HIV1443 | Light chain | VRC02 | U.S. Pat. No. 8,637,036B2 SEQ ID NO: 4 | 28427 |
| HIV1444 | Light chain | VRC03 | U.S. Pat. No. 8,637,036B2 SEQ ID NO: 28 | 28428 |
| HIV1445 | Light chain | VRC03HC- | WO2013090644 SEQ ID NO: 1 | 28429 |
| | | VRC01LC | | |
| HIV1446 | Light chain | Vrc06b | Wu, X., et al., Maturation and Diversity of the | 28430 |
| | | | VRC01-Antibody Lineage over 15 Years of | |
| | | | Chronic HIV-1 Infection; Cell 161 (3), 470-485 | |
| | | | (2015), NCBI Accession # 4XNZ_F (209aa) | |
| HIV1447 | Light chain | Vrc08c | Wu, X., et al., Maturation and Diversity of the | 28431 |
| | | | VRC01-Antibody Lineage over 15 Years of | |
| | | | Chronic HIV-1 Infection; Cell 161 (3), 470-485 | |
| | | | (2015), NCBI Accession # 4XNY_L (211aa) | |
| HIV1448 | Light chain | Vrc23 | Georgiev, I. S., et al., Delineating antibody | 28432 |
| | | | recognition in polyclonal sera from patterns of | |
| | | | HIV-1 isolate neutralization; Science 340 | |
| | | | (6133), 751-756 (2013), NCBI Accession # | |
| | | | 4J6R_L (210aa) | |
| HIV1449 | Light chain | VRC-CH30 | WO2013090644 SEQ ID NO: 21 | 28433 |
| HIV1450 | Light chain | Vrc-ch31 | Zhou T et al., Immunity 39 (2), 245-258 (2013), | 28434 |
| | | | NCBI Accession # 4LSP_L (210aa) | |
| HIV1451 | Light chain | VRC-CH32 | Wu X. et al., “Focused evolution of HIV-1 | 28435 |
| | | | neutralizing antibodies revealed by structures | |
| | | | and deep sequencing” Science 333 (6049), | |
| | | | 1593-1602 (2011), NCBI Accession # | |
| | | | AEM62727 | |
| HIV1452 | Light chain | VRC-CH33 | WO2013090644 SEQ ID NO: 27 | 28436 |
| HIV1453 | Light chain | VRC-CH34 | WO2013090644 SEQ ID NO: 29 | 28437 |
| HIV1454 | Light chain | VRC-PG04 | Wu X. et al,“Focused evolution of HIV-1 | 28438 |
| | | | neutralizing antibodies revealed by structures | |
| | | | and deep sequencing” Science 333 (6049), | |
| | | | 1593-1602 (2011), NCBI Accession # | |
| | | | AEM62754 | |
| HIV1455 | Light chain | VRC-PG04b | WO2013090644 SEQ ID NO: 43 | 28439 |
| HIV1456 | Light chain | Vrc-pg20 | Zhou T et al., immunity 39 (2), 245-258 (2013), | 28440 |
| | | | NCBI Accession # 4LSU_L (204aa) | |
| HIV1457 | Light chain | X5 | U.S. Pat. No. 7,378,093B2 SEQ ID NO: 2 | 28441 |
| HIV1458 | Light chain | X5 | U.S. Pat. No. 8,110,192B2 SEQ ID NO: 4 | 28442 |
| HIV1459 | Light chain | Z13e1 | Stanfield. R. L., et al, J. Mol. Biol. 414 (3), 460- | 28443 |
| | | | 476 (2011), NCBI Accession # 3Q1S_L | |
| | | | (212aa) | |
| HIV1460 | Light Chain | Z258- | Zhon T et al., Structural Repertoire of HIV-1- | 28444 |
| | | vrc27.01 | Neutralizing Antibodies Targeting the CD4 | |
| | | | Supersite in 14 Donors; Cell 161 (6), 1280- | |
| | | | 1292 (2015), NCBI Accession # 4YDI_L | |
| | | | (210aa) | |
| HIV1461 | Light chain | | NCBI Accession # 1N0X_M (215aa) | 28445 |
| HIV1462 | Light chain | | Okada, N., et al., Human IgM Monoclonal | 28446 |
| | | | Antibodies Reactive with HIV-1-Infected Cells | |
| | | | Generated Using a Trans-Chromosome Mouse; | |
| | | | Microbiol. Immunol. 49 (5), 447-459 (2005), | |
| | | | NCBI Accession # AAS01772.1(236aa) | |
| HIV1463 | Light chain | | U.S. Pat. No. 5,804,440A SEQ ID NO: 101 | 28447 |
| HIV1464 | Light chain | | U.S. Pat. No. 5,804,440A SEQ ID NO: 102 | 28448 |
| HIV1465 | Light chain | | U.S. Pat. No. 5,804,440A SEQ ID NO: 103 | 28449 |
| HIV1466 | Light chain | | U.S. Pat. No. 5,804,440A SEQ ID NO: 104 | 28450 |
| HIV1467 | Light chain | | U.S. Pat. No. 5,804,440A SEQ ID NO: 105 | 28451 |
| HIV1468 | Light chain | | U.S. Pat. No. 5,804,440A SEQ ID NO: 107 | 28452 |
| HIV1469 | Light chain | | U.S. Pat. No. 5,804,440A SEQ ID NO: 110 | 28453 |
| HIV1470 | Light chain | | U.S. Pat. No. 5,804,440A SEQ ID NO: 115 | 28454 |
| HIV1471 | Light chain | | U.S. Pat. No. 5,804,440A SEQ ID NO: 118 | 28455 |
| HIV1472 | Light chain | | U.S. Pat. No. 5,804,440A SEQ ID NO: 121 | 28456 |
| HIV1473 | Light chain | | U.S. Pat. No. 5,804,440A SEQ ID NO: 122 | 28457 |
| HIV1474 | Light chain | | U.S. Pat. No. 5,804,440A SEQ ID NO: 124 | 28458 |
| HIV1475 | Light chain | | U.S. Pat. No. 5,804,440A SEQ ID NO: 132 | 28459 |
| HIV1476 | Light chain | | U.S. Pat. No. 5,804,440A SEQ ID NO: 147 | 28460 |
| HIV1477 | Light chain | | U.S. Pat. No. 5,804,440A SEQ ID NO: 148 | 28461 |
| HIV1478 | Light chain | | U.S. Pat. No. 5,804,440A SEQ ID NO: 149 | 28462 |
| HIV1479 | Light chain | | U.S. Pat. No. 5,804,440A SEQ ID NO: 150 | 28463 |
| HIV1480 | Light chain | | U.S. Pat. No. 5,804,440A SEQ ID NO: 151 | 28464 |
| HIV1481 | Light chain | | U.S. Pat. No. 5,804,440A SEQ ID NO: 95 | 28465 |
| HIV1482 | Light chain | | U.S. Pat. No. 5,804,440A SEQ ID NO: 96 | 28466 |
| HIV1483 | Light chain | | U.S. Pat. No. 5,804,440A SEQ ID NO: 97 | 28467 |
| HIV1484 | Light chain | | U.S. Pat. No. 5,804,440A SEQ ID NO: 98 | 28468 |
| HIV1485 | Light chain | | WO2014063059 SEQ ID NO: 11 | 28469 |
| HIV1486 | Light chain | | WO2014063059 SEQ ID NO: 129 | 28470 |
| HIV1487 | Light chain | | WO2014063059 SEQ ID NO: 13 | 28471 |
| HIV1488 | Light chain | | WO2014063059 SEQ ID NO: 15 | 28472 |
| HIV1489 | Light chain | | WO2014063059 SEQ ID NO: 17 | 28473 |
| HIV1490 | Light chain | | WO2014063059 SEQ ID NO: 19 | 28474 |
| HIV1491 | Light chain | | WO2014063059 SEQ ID NO: 21 | 28475 |
| HIV1492 | Light chain | | WO2014063059 SEQ ID NO: 23 | 28476 |
| HIV1493 | Light chain | | WO2014063059 SEQ ID NO: 3 | 28477 |
| HIV1494 | Light chain | | WO2014063059 SEQ ID NO: 5 | 28478 |
| HIV1495 | Light chain | | WO2014063059 SEQ ID NO: 7 | 28479 |
| HIV1496 | Light chain | | WO2014063059 SEQ ID NO: 9 | 28480 |
| HIV1497 | Light chain | | WO2014063059 SEQ ID NO: 1 | 28481 |
| | consensus | | | |
| HIV1498 | Light chain constant | TNX-355, | US20130195881 SEQ ID NO: 2 | 28482 |
| | region | Idalizumab | | |
| HIV1499 | Light Chain Fab | Ch02 | McLellan, J. S., et al., Nature 480 (7377), 336- | 28483 |
| | | | 343 (2011), NCBI Accession # 3U46_B | |
| | | | (215aa) | |
| HIV1500 | Light Chain Of Anti- | 21C | Diskin, R., et al., Nat. Struct. Mol. Biol. 17 (5), | 28484 |
| | HIV Fab From | | 608-613 (2010), NCBI Accession # 3LMJ_L | |
| | Human 21c Antibody | | (217aa) | |
| HIV1501 | Light Chain Of Anti- | 830a | Pan et al., J. Virol. 89 (15), 8003-8010 (2015), | 28485 |
| | hiv-1 Gp120 V1v2 | | NCBI Accession # 4YWG_L (216aa) | |
| | Antibody 830a | | | |
| HIV1502 | Light Chain Of Anti- | Fab 2558 | Gorny et al., PLoS ONE 6 (12), E27780 (2011), | 28486 |
| | hiv-1 V3 Monoclonal | | NCBI Accession # 3UJI_L (209aa) | |
| | Antibody | | | |
| HIV1503 | Light Chain Of Anti- | Fab 4025 | Gorny et al., PLoS ONE 6 (12), E27780 (2011), | 28487 |
| | hiv-1 V3 Monoclonal | | NCBI Accession # 3UJJ_L (213aa) | |
| | Antibody | | | |
| HIV1504 | Light chain partial | 412D | Huang C. et al “Structural basis of tyrosine | 28488 |
| | | | sulfation and VH-gene usage in antibodies that | |
| | | | recognize the HIV type 1 coreceptor-binding | |
| | | | site on gp120” Proc. Natl. Acad. Sci. U.S.A. | |
| | | | 101 (9), 2706-2711 (2004), NCBI Accession # | |
| | | | AAR88380 | |
| HIV1505 | Light chain partial | 694/98D | Li L. et al, “A broad range of mutations in HIV- | 28489 |
| | | | 1 neutralizing human monoclonal antibodies | |
| | | | specific for V2, V3, and the CD4 binding site”, | |
| | | | Mol. Immunol. 66 (2), 364-374 (2015); NCBI | |
| | | | Accession # AKH36512 | |
| HIV1506 | Light chain variable | 0.5γ (1C10) | U.S. Pat. No. 8,722,861B2 SEQ ID NO: 2 | 28490 |
| | region | | | |
| HIV1507 | Light chain variable | 0.5γ (3D6) | U.S. Pat. No. 8,722,861B2 SEQ ID NO: 6 | 28491 |
| | region | | | |
| HIV1508 | Light chain variable | 10J4 mAb | WO2015103549 SEQ ID NO: 4 | 28492 |
| | region | | | |
| HIV1509 | Light chain variable | 10M6 mAb | WO2015103549 SEQ ID NO: 6 | 28493 |
| | region | | | |
| HIV1510 | Light chain variable | 13110 mAb | WO2015103549 SEQ ID NO: 8 | 28494 |
| | region | | | |
| HIV1511 | Light chain variable | 2N5mAb | WO2015103549 SEQ ID NO: 10 | 28495 |
| | region | | | |
| HIV1512 | Light chain variable | 35022 mAb | WO2015103549 SEQ ID NO: 2 | 28496 |
| | region | | | |
| HIV1513 | Light chain variable | 42F9 | U.S. Pat. No. 8,722,861B2 SEQ ID NO: 8 | 28497 |
| | region | | | |
| HIV1514 | Light chain variable | 49G2 | U.S. Pat. No. 8,722,861B2 SEQ ID NO: 10 | 28498 |
| | region | | | |
| HIV1515 | Light chain variable | 4O20mAb | WO2015103549 SEQ ID NO: 12 | 28499 |
| | region | | | |
| HIV1516 | Light chain variable | 5G2 | U.S. Pat. No. 8,722,861B2 SEQ ID NO: 4 | 28500 |
| | region | | | |
| HIV1517 | Light chain variable | 7B9mAb | WO2015103549 SEQ ID NO: 14 | 28501 |
| | region | | | |
| HIV1518 | Light chain variable | 7K3mAb | WO2015103549 SEQ ID NO: 16 | 28502 |
| | region | | | |
| HIV1519 | Light chain variable | B4 | U.S. Pat. No. 7,872,110B2 SEQ ID NO: 4 | 28503 |
| | region | | | |
| HIV1520 | Light chain variable | B4DIVKv.1 | U.S. Pat. No. 7,872,110B2 SEQ ID NO: 9 | 28504 |
| | region | | | |
| HIV1521 | Light chain variable | B4DIVKv.2 | U.S. Pat. No. 7,872,110B2 SEQ ID NO: 10 | 28505 |
| | region | | | |
| HIV1522 | Light chain variable | B4DIVKv.3 | U.S. Pat. No. 7,872,110B2 SEQ ID NO: 11 | 28506 |
| | region | | | |
| HIV1523 | Light chain variable | bl2 IgA2 | WO2014040024 SEQ ID NO: 30 | 28507 |
| | region | antibody | | |
| HIV1524 | Light chain variable | CHμ39.1 | U.S. Pat. No. 5,773,247 SEQ ID NO: 12 | 28508 |
| | region | | | |
| HIV1525 | Light chain variable | CHμ5.5 | U.S. Pat. No. 5,773,247 SEQ ID NO: 16 | 28509 |
| | region | | | |
| HIV1526 | Light chain variable | F425-Alg8 | WO2014040024 SEQ ID NO: 13 | 28510 |
| | region | antibody | | |
| HIV1527 | Light chain variable | Fab 43 | US20090191216 SEQ ID NO: 9 | 28511 |
| | region | | | |
| HIV1528 | Light chain variable | HGN194 | US20110212106 SEQ ID NO: 46 | 28512 |
| | region | | | |
| HIV1529 | Light chain variable | HJ16 | US20110212106 SEQ ID NO: 14 | 28513 |
| | region | | | |
| HIV1530 | Light chain variable | HK20 | US20110212106 SEQ ID NO: 30 | 28514 |
| | region | | | |
| HIV1531 | Light chain variable | IgA antibody | WO2014040024 SEQ ID NO: 15 | 28515 |
| | region | | | |
| HIV1532 | Light chain variable | Makandal | US20100111990 SEQ ID NO: 3 | 28516 |
| | region | monoclonal | | |
| | | antibody | | |
| | | (Mmab) | | |
| HIV1533 | Light chain variable | NM-01 | U.S. Pat. No. 5,665,569 SEQ ID NO: 18 | 28517 |
| | region | | | |
| HIV1534 | Light chain variable | NM-01 | U.S. Pat. No. 5,665,569 SEQ ID NO: 28 | 28518 |
| | region | HuVH | | |
| HIV1535 | Light chain variable | NM-01 | U.S. Pat. No. 5,665,569 SEQ ID NO: 30 | 28519 |
| | region | HuVK | | |
| HIV1536 | Light chain variable | NM-01 | U.S. Pat. No. 5,665,569 SEQ ID NO: 32 | 28520 |
| | region | HuVKF | | |
| HIV1537 | Light chain variable | PGT125 | Walker L. M. et al “Broad neutralization | 28521 |
| | region | | coverage of HIV by multiple highly potent | |
| | | | antibodies”, Nature 477 (7365), 466-470 | |
| | | | (2011), NCBI Accession # AEN14410 | |
| HIV1538 | Light chain variable | PGT126 | Walker L. M. et al “Broad neutralization | 28522 |
| | region | | coverage of HIV by multiple highly potent | |
| | | | antibodies”, Nature 477 (7365), 466-470 | |
| | | | (2011), NCBI Accession # AEN14411 | |
| HIV1539 | Light chain variable | PGT131 | Walker L. M. et al “Broad neutralization | 28523 |
| | region | | coverage of HIV by multiple highly potent | |
| | | | antibodies”, Nature 477 (7365), 466-470 | |
| | | | (2011), NCBI Accession # AENT4415 | |
| HIV1540 | Light chain variable | PGT136 | Walker L. M. et al “Broad neutralization | 28524 |
| | region | | coverage of HIV by multiple highly potent | |
| | | | antibodies”, Nature 477 (7365), 466-470 | |
| | | | (2011), NCBI Accession # AEN14417 | |
| HIV1541 | Light chain variable | PGT137 | Walker L. M. et al “Broad neutralization | 28525 |
| | region | | coverage of HIV by multiple highly potent | |
| | | | antibodies”, Nature 477 (7365), 466-470 | |
| | | | (2011), NCBI Accession # AEN14418 | |
| HIV1542 | Light chain variable | PGT141 | Walker L. M. et al “Broad neutralization | 28526 |
| | region | | coverage of HIV by multiple highly potent | |
| | | | antibodies”, Nature 477 (7365), 466-470 | |
| | | | (2011), NCBI Accession# AEN14419 | |
| HIV1543 | Light chain variable | PGT142 | Walker L.M. et al “Broad neutralization | 28527 |
| | region | | coverage of HIV by multiple highly potent | |
| | | | antibodies”, Nature 477 (7365), 466-470 | |
| | | | (20 1 I), NCBI Accessiots # AEN14385 | |
| HIV1544 | Light chain variable | PGT143 | Walker L.M. et al “Broad neutralization | 28528 |
| | region | | coverage of HIV by multiple liighly potent | |
| | | | antibodies”. Nature 477 (7365), 466-470 | |
| | | | (2011), NCBI Accession # AEN14421 | |
| HIV1545 | Light chain variable | PGT144 | Walker L.M. et al “Broad neutralization | 28529 |
| | region | | coverage of HIV by multiple highly potent | |
| | | | antibodies”, Nature 477 (7365), 466-470 | |
| | | | (2011), NCBI Accession # AEN14422 | |
| HIV1546 | Light chain variable | PGT151 | Falkowska, E. et al “Broadly Neutralizing HIV | 28530 |
| | region | | Antibodies Define a Gly can-Dependent Epitope | |
| | | | on the Prefusion Conformation of gp41 on | |
| | | | Cleaved Envelope Trimers” Immunity 40 (5), | |
| | | | 657-668 (2014), NCBI Accession # AIC32543 | |
| HIV1547 | Light chain variable | PGT152 | Falkowska, E. et al “Broadly Neutralizing HIV | 28531 |
| | region | | Antibodies Define a Glycan-Dependent Epitope | |
| | | | on the Prefusion Conformation of gp41 on | |
| | | | Cleaved Envelope Trimers” Immunity 40 (5), | |
| | | | 657-668 (2014), NCBI Accession # AIC32544 | |
| HIV1548 | Light chain variable | PGT153 | Falkowska, E. et al “Broadly Neutralizing HIV | 28532 |
| | region | | Antibodies Define a Glycan-Dependent Epitope | |
| | | | on the Profusion Conformation of gp41 on | |
| | | | Cleaved Envelope Trimers” Immunity 40 (>). | |
| | | | 657-668 (2014), NCBI Accession # AIC32545 | |
| HIV1549 | Light chain variable | PGT154 | Falkowska, E. et al “Broadly Neutralizing HIV | 28533 |
| | region | | Antibodies Define a Glycan-Dependent Epitope | |
| | | | on the Prefusion Conformation of gp41 on | |
| | | | Cleaved Envelope Trimers” Immunity 40 (5), | |
| | | | 657-668 (2014), NCBI Accession # AIC32529 | |
| HIV1550 | Light chain variable | PGT155 | Falkowska, E. et al “Broadly Neutralizing HIV | 28534 |
| | region | | Antibodies Define a Glycan-Dependent Epitope | |
| | | | on the Prefusion Conformation of gp41 on | |
| | | | Cleaved Envelope Trimers” Immunity 40 (5), | |
| | | | 657-668 (2014), NCBI Accession # AIC32547 | |
| HIV1551 | Light chain variable | PGT156 | Falkowska, E. et al “Broadly Neutralizing HIV | 28535 |
| | region | | Antibodies Define a Glycan-Dependent Epitope | |
| | | | on the Prefusion Conformation of gp41 on | |
| | | | Cleaved Envelope Trimers” Immunity 40 (5), | |
| | | | 657-668 (2014), NCBI Accession # AIC32548 | |
| HIV1552 | Light chain variable | PGT157 | Falkowska, E. et al “Broadly Neutralizing HIV | 28536 |
| | region | | Antibodies Define a Glycan-Dependent Epitope | |
| | | | on the Prefusion Conformation of gp41 on | |
| | | | Cleaved Envelope Trimers” Immunity 40 (5), | |
| | | | 657-668 (2014), NCBI Accession # AIC32549 | |
| HIV1553 | Light chain variable | PGTI58 | Falkowska, E. et al “Broadly Neutralizing HIV | 28537 |
| | region | | Antibodies Define a Glycan-Dependent Epitope | |
| | | | on the Prefusion Conformation of gp41 on | |
| | | | Cleaved Envelope Trimers” Immunity 40 (5), | |
| | | | 657-668 (2014), NCBI Accession # AIC32550 | |
| HIV1554 | Light chain variable | rF105 | WO1993012232 SEQ ID NO: 3 | 28538 |
| | region | | | |
| HIV1555 | Light chain variable | ScFvX5-CD4 | U.S. Pat. No. 7,378,093B2 SEQ ID NO: 15 | 28539 |
| | region | | | |
| HIV1556 | Light chain variable | TNX-355, | US20130195881 SEQ ID NO: 1 | 28540 |
| | region | Idalizumab | | |
| HIV1557 | Light chain variable | VCR14 | US20150044137 SEQ ID NO: 25 | 28541 |
| | region | | | |
| HIV1558 | Light chain variable | VCR14b | US20150044137 SEQ ID NO: 26 | 28542 |
| | region | | | |
| HIV1559 | Light chain variable | VCR14c | US20150044137 SEQ ID NO: 27 | 28543 |
| | region | | | |
| HIV1560 | Light chain variable | VCR16 | US20150044137 SEQ ID NO: 33 | 28544 |
| | region | | | |
| HIV1561 | Light chain variable | VCR16b | US20150044137 SEQ ID NO: 34 | 28545 |
| | region | | | |
| HIV1562 | Light chain variable | VCR16c | US20150044137 SEQ ID NO: 35 | 28546 |
| | region | | | |
| HIV1563 | Light chain variable | VCR16d | US20150044137 SEQ ID NO: 36 | 28547 |
| | region | | | |
| HIV1564 | Light chain variable | VRC13 | US20150044137 SEQ ID NO: 17 | 28548 |
| | region | | | |
| HIV1565 | Light chain variable | VRC13b | US20150044137 SEQ ID NO: 18 | 28549 |
| | region | | | |
| HIV1566 | Light chain variable | VRC13c | US20150044137 SEQ ID NO: 19 | 28550 |
| | region | | | |
| HIV1567 | Light chain variable | VRC13d | US20150044137 SEQ ID NO: 20 | 28551 |
| | region | | | |
| HIV1568 | Light chain variable | VRC13e | US20150044137 SEQ ID NO: 21 | 28552 |
| | region | | | |
| HIV1569 | Light chain variable | VRC13f | US20150044137 SEQ ID NO: 22 | 28553 |
| | region | | | |
| HIV1570 | Light chain variable | VRC13g | US20150044137 SEQ ID NO: 23 | 28554 |
| | region | | | |
| HIV1571 | Light chain variable | VRC13h | US20150044137 SEQ ID NO: 24 | 28555 |
| | region | | | |
| HIV1572 | Light chain variable | VRC15 | US20150044137 SEQ ID NO: 28 | 28556 |
| | region | | | |
| HIV1573 | Light chain variable | | US20150004190 SEQ ID NO: 57 | 28557 |
| | region | | | |
| HIV1574 | Light Chain, Fab | Ch04 | McLellan, J. S. et al., Structure of HIV-1 gp120 | 28558 |
| | | | V1 V2 domain with broadly neutralizing | |
| | | | antibody PC9; Nature 480 (7377), 336-343 | |
| | | | (2011), NCBI Accession # 3TCL_B (215aa) | |
| HIV1575 | Light Chain, Fab | N5-i5 | Acharya, P., et al., Structural Definition of an | 28559 |
| | | | Antibody-Dependent Cellular Cytotoxicity | |
| | | | Response Implicated in Reduced Risk for HIV- | |
| | | | 1 Infection; J. Virol. 88 (21), 12895-12906 | |
| | | | (2014), NCBI Accession # 4H8W_L (217aa) | |
| HIV1576 | Light Chain, Ig | Nih45-46 Fab | Diskin, R., et al., Science 334 (6060), 1289- | 28560 |
| | Kappa Chain C | | 1293 (2011), NCBI Accession # 3U7Y_L | |
| | Region | | (210aa) | |
| HIV1577 | Light Chain, Ig | Pgt127 | Pejchal, R., et al., Science 334 (6059), 1097- | 28561 |
| | Lambda-2 Chain C | | 1103 (2011), NCBI Accession # | |
| | region | | 3TWC_L(211aa) | |
| HIV1578 | Light Chain, Ig | 7b2 | Santra, S., et al., PLoS Pathol. 11 (8), | 28562 |
| | Kappa Chain C | | E1005042 (2015), NCBI Accession # 4YDV_L | |
| | Region | | (265aa) | |
| HIV1579 | Light Chain; Fab | N60-i3 | Gohain, N., et al., Cocrystal Structures of | 28563 |
| | | | Antibody N60-i3 and Antibody JR4 in | |
| | | | Complex with gp120 Define More Cluster A | |
| | | | Epitopes Invoked in Effective Antibody- | |
| | | | Dependent Effector Function against HIV-1; J. | |
| | | | Virol. 89 (17), 8840-8854 (2015), NCBI | |
| | | | Accession # 4RFO_L (221aa) | |
| HIV1580 | Light Chain; Ig | Pgt128 | Pejchal, R., et al., Science 334 (6059), 1097- | 28564 |
| | Lambda-2 Chain C | | 1103 (2011), NCBI Accession # 3TV3_L | |
| | region | | (211aa) | |
| HIV1581 | Scfv | B11 | U.S. Pat. No. 7,744,887B2 SEQ ID NO: 8 | 28565 |
| HIV1582 | Scfv | | U.S. Pat. No. 8,110,192B2 SEQ ID NO: 1 | 28566 |
| HIV1583 | Scfv | | U.S. Pat. No. 8,110,192B2 SEQ ID NO: 2 | 28567 |
| HIV1584 | Scfv | | U.S. Pat. No. 8,110,192B2 SEQ ID NO: 3 | 28568 |
| HIV1585 | Scfv (SEQRES) | 3b3 variant | Clark et al., Protein Sci. 18 (12), 2429-2441 | 28569 |
| | | | (2009), NCBI Accession # 3JUY_A (256aa) | |
| HIV1586 | Scfv | D5 | U.S. Pat. No. 7,744,887B2 SEQ ID NO: 2 | 28570 |
| HIV1587 | Scfv-cd4 fusion | | U.S. Pat. No. 8,110,192B2 SEQ ID NO: 8 | 28571 |
| | protein | | | |
| HIV1588 | | 447-52d | Dhillon, A. K., et al., Acta Crystallogr. D Biol. | 28572 |
| | | | Crystallogr. D64 (PT 7), 792-802 (2008), NCBI | |
| | | | Accession # 3C2A_1(231aa) | |
| HIV1589 | | 447-52d | Dhillon, A. K., et al., Acta Crystallogr, D Biol. | 28573 |
| | | | Crystallogr. D64 (PT 7), 792-802 (2008), NCBI | |
| | | | Accession # 3C2A_M (216aa) | |
| HIV1590 | | F105 | Wilkinson, R. A., et al., J. Virol. 79 (20), 13060- | 28574 |
| | | | 13069 (2005), NCBI Accession # 1U6A_H | |
| | | | (224aa) | |
| HIV1591 | | F105 | Wilkinson, R. A., et al., J. Virol. 79 (20), 13060- | 28575 |
| | | | 13069 (2005), NCBI Accession # 1U6A_L | |
| | | | (215aa) | |
| HIV1592 | | Fab 8062 | Frisch, C., et al., PLoS Pathol. 6 (11), | 28576 |
| | | | E1001182 (2010), NCBI Accession # 3MAC_H | |
| | | | (245aa) | |
| HIV1593 | | Fab 8062 | Frisch, C., et al., PLoS Pathol. 6 (11), | 28577 |
| | | | E1001182 (2010), NCBI Accession # 3MAC_L | |
| | | | (213aa) | |
| HIV1594 | | Fab 8066 | Frisch, C., et al., PLoS Pathol. 6 (11), | 28578 |
| | | | E1001182 (2010), NCBI Accession # 3MA9_H | |
| | | | (245aa) | |
| HIV1595 | | Fab 8066 | Frisch, C., et al., PLoS Pathol. 6 (11), | 28579 |
| | | | E1001182 (2010), NCBI Accession # 3MA9_L | |
| | | | (213aa) | |
| HIV1596 | | Fab′2F5 | U.S. Pat. No. 6,482,928 SEQ ID NO: 6 | 28580 |
| | | fragment | | |
| HIV1597 | | Fab′2F5 | U.S. Pat. No. 6,482,928 SEQ ID NO: 7 | 28581 |
| | | fragment | | |
| HIV1598 | | M18 Fab | Prabakaran, P., et al., J. Mol. Biol. 357 (1), 82- | 28582 |
| | | | 99 (2006), NCBI Accession # 2AJ3_D (228aa) | |
| HIV1599 | | M18 Fab | Prabakaran, P., et al., J. Mol. Biol. 357 (1), 82- | 28583 |
| | | | 99 (2006), NCBI Accession # 2AJ3_E (213aa) | |
| HIV1600 | | Pg16 | Pancera, M. et al., J. Virol. 84 (16), 8098-8110 | 28584 |
| | | | (2010), NCBI Accession # 3MME_A (238aa) | |
| HIV1601 | | Pg16 | Paneera, M, et al., J. Virol. 84 (16), 8098-8110 | 28585 |
| | | | (2010), NCBI Accession # 3MME_B (216aa) | |

[0497] In some embodiments, the payload region of the viral particle comprises one or more nucleic acid sequences, fragments or variants thereof or encodes one or more polypeptides, fragments or variants thereof described in European Patent Publication No. EP327000, EP478689, EP554401, EP581353 and EP711439, US Publication No. US20110104163, US20110212106, 0520130215726 and US20130251726, U.S. Pat. Nos. 5,266,479, 5,804,440, 6,657,050, 8,637,036, and 9,090,675, and International Publication No. WO2012154312, WO2013163427, WO2014043386, WO2015048462, WO2015048610, WO2015048770 the contents of each of which are herein incorporated by reference in their entirety, against HIV.

AAV Particles Comprising TRIM21 payloads

[0498] In some embodiments, the payload region of the viral particle comprises one or more nucleic acid sequences encoding TRIM21, variants or fragments thereof.

[0499] In some embodiments, the viral particles are useful in the field of medicine for the treatment, prophylaxis, palliation or amelioration of neurological diseases and/or disorders.

[0500] In some embodiments, the viral particles are AAV particles, comprising a viral genome and a capsid.

[0501] Non-limiting examples of ITR to ITR sequences of AAV particles comprising a viral genome with a payload region comprising a TRIM21 polynucleotide sequence are described in Table 54,

TABLE 54
Representative ITR to ITR Sequences of AAV
particles comprising TRIM21 sequences

| ITR to ITR | Sequence | ITR to ITR |
|---|---|---|
| Construct Name | Length (nt) | SEQ ID NO |
| TRIM21_ITR1 | 3590 | 32672 |
| TRIM21_ITR2 | 3629 | 32673 |
| TRIM21_ITR3 | 3638 | 32674 |
| TRIM21_ITR4 | 4307 | 32675 |

[0502] In some embodiments, the AAV particle comprises a viral genome which comprises a sequence that has a percent identity to any of SEQ ID NO: 32672-32675, The viral genome may have 1%, 2%, 3%, 4%, 5%, 6%, 7%, 8%, 9%, 10%, 15%, 20%, 25%, 30%, 35%, 40%, 45%, 50%, 55%, 60%, 65%, 70%, 75%, 80%, 85%, 90%, 95%, 99% or 100% identity to any of SEQ NOs: 32672-32675. The viral genome may have 1-10%, 10-20%, 30-40%, 50-60%, 50-70%, 50-80%, 50-90%, 50-99%, 50-100%, 60-70%, 60-80%, 60-90%, 60-99%, 60100%, 70-80%, 70-90%, 70-99%, 70-100%, 80-85%, 80-90%, 80-95%, 80-99%, 80-100%, 90-95%, 90-99%, or 90-100% to any of SEQ ID NOs: 32672-32675. As a non-limiting example, the viral genome comprises a sequence which has 80% identity to any of SEQ ID NO: 32672-32675. As another non-limiting example, the viral genome comprises a sequence which as 85% identity to any of SEQ ID NO: 32672-32675, As another non-limiting example, the viral genome comprises a sequence which as 90% identity to any of SEQ ID NO: 32672-32675. As another non-limiting example, the viral genome comprises a sequence which as 95% identity to any of SEQ ID NO: 32672-32675. As another non-limiting example, the viral genome comprises a sequence which as 99% identity to any of SEQ ID NO: 32672-32675.

[0503] In some embodiments, the AAV particles comprising a TRIM21 polynucleotide comprise one or more components such as, but not limited to, a 5′ ITR, a promoter, an exon region, an intron region, a tag, a TRIM21 polynucleotide, a poly(A) sequence and a 3′ ITR.

[0504] In certain embodiments the viral genome may also encode one or more antibody polynucleotides as described herein.

[0505] In some embodiments, the AAV particle viral genome may comprise one or more sequences as described in Table 55 below. The regions may be located before or after any of the other sequence regions described herein. Viral genomes may further comprise more than one copy of one or more sequence regions as described in Table 55.

TABLE 55
Representative viral genome component sequences

| Component | Sequence | Component |
|---|---|---|
| Name | Length (nt) | SEQ ID NO |
| ITR1 | 141 | 32676 |
| PROMOTER1 | 654 | 32677 |
| EXON1 | 134 | 32678 |
| INTRON1 | 32 | 32679 |
| INTRON2 | 347 | 32680 |
| EXON2 | 53 | 32681 |
| TAG1 | 27 | 32682 |
| TAG2 | 18 | 32683 |
| TAG3 | 21 | 32684 |
| TAG4 | 708 | 32685 |
| TRIM21_1 | 1428 | 32686 |
| POLYA1 | 477 | 32687 |
| ITR2 | 141 | 32688 |

[0506] In some embodiments, the AAV particle viral genome may comprise at least one inverted terminal region (ITR) region. The ITR region(s) may, independently, have a length such as, but not limited to, 75, 6, 77, 78, 79, 80, 81, 82, 83, 84, 85, 86, 87, 88, 89, 90, 91, 92, 93, 94, 95, 96, 97, 98, 99, 100, 101, 102, 103, 104, 105, 106, 107, 108, 109, 110, 111, 112, 113, 114, 115, 116, 117, 118, 119, 120, 121, 122, 123, 124, 125, 126, 127, 128, 129, 130, 131, 132, 133, 134, 135, 136, 137, 138, 139, 140, 141, 142, 143, 144, 145, 146, 147, 148, 149, 150, 151, 152, 153, 154, 155, 156, 157, 158, 159, 160, 161, 162, 163, 164, 165, 166, 167, 168, 169, 170, 171, 172, 173, 174, and 175 nucleotides. The length of the ITR. region for the viral genome may be 75-80, 75-85, 75-100, 80-85, 80-90, 80-105, 85-90, 85-95, 85-110, 90-95, 90-100, 90115, 95-100, 95-105, 95-120, 100-105, 100-110, 100-125, 105-110, 1105-115, 1105-130, 1110-115, 110-120, 110-135, 115-120, 115-125, 115-140, 120-125, 120-130, 120-145, 125-130, 1125-135, 125-150, 130-135, 130-140, 130-155, 135-140, 135-145, 135-160, 140-145, 140-150, 140-165, 145-150, 145-155, 145-170, 150-155, 150-160, 150-175, 155-160, 155-165, 160-1165, 160-1170, 165-170, 165-175, and 170-175 nucleotides. As a non-limiting example, the viral genome comprises a 5′ ITR that is about 141 nucleotides in length. As a non-limiting example, the viral genome comprises a 5′ ITR that is about 130 nucleotides in length. As a non-limiting example, the viral genome comprises a 5′ ITR that is about 119 nucleotides in length. As a non-limiting example, the viral genome comprises a 3′ ITR that is about 141 nucleotides in length. As a non-limiting example, the viral genome comprises a 3′ ITR that is about 130 nucleotides in length. As a non-limiting example, the viral genome comprises a 3′ ITR that is about 1119 nucleotides in length. As a non-limiting example, the 5′ ITR and the 3′ ITR may comprise the same length and/or the same sequence. In another non-limiting example, the 5′ 11′R and the 3′1717R are different in length and/or in sequence.

[0507] In some embodiments, the at least one ITR may be ITR1 (SEQ ID NO: 32676). In some embodiments, the at least one ITR may be ITR2 (SEQ ID NO: 32688). In some embodiments, the AAV particle viral genome comprises two ITR regions. As a non-limiting example, the ITR regions may be ITR1 and ITR2. In some embodiments, the 5′ ITR, comprises ITR1 and the 3′ ITR comprises ITR2.

[0508] In some embodiments, the AAV particle viral genome may comprise at least one promoter sequence region. The promoter sequence region(s) may, independently, have a length such as, but not limited to, 4, 5, 6, 7, 8, 9, 10, 11, 12, 13, 14, 15, 16, 17, 18, 19, 20, 21, 22, 23, 24, 25, 26, 27, 28, 29, 30, 31, 32, 33, 34, 35, 36, 37, 38, 39, 40, 41, 42, 43, 44, 45, 46, 47, 48, 49, 50, 51, 52, 53, 54, 55, 56, 57, 58, 59, 60, 61, 62, 63, 64, 65, 66, 67, 68, 69, 70, 71, 72, 73, 74, 75, 76, 77, 78, 79, 80, 81, 82, 83, 84, 85, 86, 87, 88, 89, 90, 91, 92, 93, 94, 95, 96, 97, 98, 99, 100, 101, 102, 103, 104, 105, 106, 107, 108, 109, 110, 111, 112, 113, 114, 115, 116, 117, 118, 119, 120, 121, 122, 123, 124, 125, 126, 127, 128, 129, 130, 131, 132, 133, 134, 135, 136, 137, 138, 139, 140, 141, 142, 143, 144, 145, 146, 147, 148, 149, 150, 151, 152, 153, 154, 155, 156, 157, 158, 159, 160, 161, 162, 163, 164, 165, 166, 167, 168, 169, 170, 171, 172, 173, 174, 175, 176, 177, 178, 179, 180, 181, 182, 183, 184, 185, 186, 187, 188, 189, 190, 191, 192, 193, 194, 195, 196, 197, 198, 199, 200, 201, 202, 203, 204, 205, 206, 207, 208, 209, 210, 211, 212, 213, 214, 215, 216, 217, 218, 219, 220, 221, 222, 223, 224, 225, 226, 227, 228, 229, 230, 231, 232, 233, 234, 235, 236, 237, 238, 239, 240, 241, 242, 243, 244, 245, 246, 247, 248, 249, 250, 251, 252, 253, 254, 255, 256, 257, 258, 259, 260, 261, 262, 263, 264, 265, 266, 267, 268, 269, 270, 271, 272, 273, 274, 275, 276, 277, 278, 279, 280, 281, 282, 283, 284, 285, 286, 287, 288, 289, 290, 291, 292, 293, 294, 295, 296, 297, 298, 299, 300, 301, 302, 303, 304, 305, 306, 307, 308, 309, 310, 311, 312, 313, 314, 315, 316, 317, 318, 319, 320, 321, 322, 323, 324, 325, 326, 327, 328, 329, 330, 331, 332, 333, 334, 335, 336, 337, 338, 339, 340, 341, 342, 343, 344, 345, 346, 347, 348, 349, 350, 351, 352, 353, 354, 355, 356, 357, 358, 359, 360, 361, 362, 363, 364, 365, 366, 367, 368, 369, 370, 371, 372, 373, 374, 375, 376, 377, 378, 379, 380, 381, 382, 383, 384, 385, 386, 387, 388, 389, 390, 391, 392, 393, 394, 395, 396, 397, 398, 399, 400, 401, 402, 403, 404, 405, 406, 407, 408, 409, 410, 411, 412, 413, 414, 415, 416, 417, 418, 419, 420, 421, 422, 423, 424, 425, 426, 427, 428, 429, 430, 431, 432, 433, 434, 435, 436, 437, 438, 439, 440, 441, 442, 443, 444, 445, 446, 447, 448, 449, 450, 451, 452, 453, 454, 455, 456, 457, 458, 459, 460, 461, 462, 463, 464, 465, 466, 467, 468, 469, 470, 471, 472, 473, 474, 475, 476, 477, 478, 479, 480, 481, 482, 483, 484, 485, 486, 487, 488, 489, 490, 491, 492, 493, 494, 495, 496, 497, 498, 499, 500, 501, 502, 503, 504, 505, 506, 507, 508, 509, 510, 511, 512, 513, 514, 515, 516, 517, 518, 519, 520, 521, 522, 523, 524, 525, 526, 527, 528, 529, 530, 531, 532, 533, 534, 535, 536, 537, 538, 539, 540, 541, 542, 543, 544, 545, 546, 547, 548, 549, 550, 551, 552, 553, 554, 555, 556, 557, 558, 559, 560, 561, 562, 563, 564, 565, 566, 567, 568, 569, 570, 571, 572, 573, 574, 575, 576, 577, 578, 579, 580, 581, 582, 583, 584, 585, 586, 587, 588, 589, 590, 591, 592, 593, 594, 595, 596, 597, 598, 599, 600 and more than 600 nucleotides. The length of the promoter region for the viral genome may be 4-10, 10-20, 10-50, 20-30, 30-40, 40-50, 50-60, 50-100, 60-70, 70-80, 80-90, 90-100, 100-110, 100-150, 110-120, 120-130, 130-140, 140-150, 150-160, 150-200, 160-470, 170-480, 180-190, 190-200, 200-210, 200-250, 210-220, 220-230, 230-240, 240-250, 250-260, 250-300, 260-270, 270-280, 280-290, 290-300, 300-310, 300-350, 310-320, 320-330, 330-340, 340-350, 350-360, 350-400, 360-370, 370-380, 380-390, 390-400, 400-410, 400-450, 410-420, 420-430, 430-440, 440-450, 450-460, 450-500, 460-470, 470-480, 480-490, 490-500, 500-510, 500-550, 510520, 520530, 530540, 540-550, 550-560, 550-600, 560-570, 570-580, 580-590, 590-600 and more than 600 nucleotides. As a non-limiting example, the viral genome comprises a promoter region that is about 654 nucleotides in length.

[0509] In certain embodiments, the AAV particle viral genome comprises one promoter sequence region. In certain embodiments, the promoter sequence region is PROMOTER1 (SEQ ID NO: 32677).

[0510] In some embodiments, the AAV particle viral genome promoter sequence region comprises a chicken beta-actin (CBA) promoter or variant or derivative thereof.

[0511] In some embodiments, the AAV particle viral genome may comprise more than one promoter sequence region. In some embodiments, the AAV particle viral genome comprises two promoter sequence regions. In some embodiments, the AAV particle viral genome comprises more than two promoter sequence regions.

[0512] In some embodiments, the AAV particle viral genome may comprise at least one intron and/or exon sequence region.

[0513] In some embodiments, the AAV particle viral genome may comprise at least one intron sequence region. The intron sequence region(s) may, independently, have a length such as, but not limited to, 10, 11, 12, 13, 14, 15, 16, 17, 18, 19, 20, 21, 22, 23, 24, 25, 26, 27, 28, 29, 30, 31, 32, 33, 34, 35, 36, 37, 38, 39, 40, 41, 42, 43, 44, 45, 46, 47, 48, 49, 50, 51, 52, 53, 54, 55, 56, 57, 58, 59, 60, 61, 62, 63, 64, 65, 66, 67, 68, 69, 70, 71, 72, 73, 74, 75, 76, 77, 78, 79, 80, 81, 82, 83, 84, 85, 86, 87, 88, 89, 90, 91, 92, 93, 94, 95, 96, 97, 98, 99, 100, 101, 102, 103, 104, 105, 106, 107, 108, 109, 110, 11.1, 112, 113, 114, 115, 116, 117, 118, 119, 120, 121, 122, 123, 124, 125, 126, 127, 128, 129, 130, 131, 132, 133, 134, 135, 136, 137, 138, 139, 140, 141, 142, 143, 144, 145, 146, 147, 148, 149, 150, 151, 152, 153, 154, 155, 156, 157, 158, 159, 160, 161, 162, 163, 164, 165, 166, 167, 168, 169, 170, 171, 172, 173, 174, 175, 176, 177, 178, 179, 180, 181, 182, 183, 184, 185, 186, 187, 188, 189, 190, 191, 192, 193, 194, 195, 196, 197, 198, 199, 200, 201, 202, 203, 204, 205, 206, 207, 208, 209, 210, 211, 212, 213, 214, 215, 216, 217, 218, 219, 220, 221, 222, 223, 224, 225, 226, 227, 228, 229, 230, 231, 232, 233, 234, 235, 236, 237, 238, 239, 240, 241, 242, 243, 244, 245, 246, 247, 248, 249, 250, 251, 252, 253, 254, 255, 256, 257, 258, 259, 260, 261, 262, 263, 264, 265, 266, 267, 268, 269, 270, 271, 272, 273, 274, 275, 276, 277, 278, 279, 280, 281, 282, 283, 284, 285, 286, 287, 288, 289, 290, 291, 292, 293, 294, 295, 296, 297, 298, 299, 300, 301, 302, 303, 304, 305, 306, 307, 308, 309, 310, 311, 312, 313, 314, 315, 316, 317, 318, 319, 320, 321, 322, 323, 324, 325, 326, 327, 328, 329, 330, 331, 332, 333, 334, 335, 336, 337, 338, 339, 340, 341, 342, 343, 344, 345, 346, 347, 348, 349, 350, and more than 350 nucleotides. The length of the intron sequence region for the viral genome may be 25-35, 25-50, 35-45, 45-55, 50-75, 5565, 65-75, 75-85, 75100, 85-95, 95-105, 100-125, 105-115, 115-125, 125-135, 125-150, 135-145, 145-155, 150-175, 155-165, 165-175, 175-185, 175-200, 185-195, 195-205, 200-225, 205-215, 215-225, 225-235, 225-250, 235-245, 245-255, 250-275, 255-265, 265-275, 275-285, 275-300, 285-295, 295-305, 300-325, 305-315, 315325, 325335, 325-350, and 335-345 nucleotides. As a non-limiting example, the viral genome comprises an intron sequence region that is about 32 nucleotides in length. As a non-limiting example, the viral genome comprises an intron sequence region that is about 53 nucleotides in length. As a non-limiting example, the viral genome comprises an intron sequence region that is about 134 nucleotides in length. As a non-limiting example, the viral genome comprises an intron sequence region that is about 347 nucleotides in length. As a non-limiting example, the viral genome comprises an intron sequence region that is about 379 nucleotides in length. As a non-limiting example, the viral genome comprises an intron sequence region that is about 566 nucleotides in length.

[0514] In some embodiments, the AAV particle viral genome comprises two intron sequence regions. In some embodiments, the AAV particle viral genome comprises three intron sequence regions. In some embodiments, the AAV particle viral genome comprises more than three intron sequence regions.

[0515] In some embodiments, the AAV particle viral genome comprises INTRON1 (SEQ ID NO: 32679). In some embodiments, the AAV particle viral genome comprises INTRON2 (SEQ ID NO: 32680), In some embodiments, the AAV particle viral genome comprises INTRON 1 and INTRON2. In some embodiments, one or more intron sequences are derived from an ie1 (CMV immediate early) gene. In some embodiments, one or more intron sequences are derived from a human beta-globin gene.

[0516] In some embodiments, the AAV particle viral genome may comprise at least one exon sequence region. The exon sequence region(s) may, independently, have a length such as, but not limited to, 10, 11, 12, 13, 14, 15, 16, 17, 18, 19, 20, 21, 22, 23, 24, 25, 26, 27, 28, 29, 30, 31, 32, 33, 34, 35, 36, 37, 38, 39, 40, 41, 42, 43, 44, 45, 46, 47, 48, 49, 50, 51, 52, 53, 54, 55, 56, 57, 58, 59, 60, 61, 62, 63, 64, 65, 66, 67, 68, 69, 70, 71, 72, 73, 74, 75, 76, 77, 78, 79, 80, 81, 82, 83, 84, 85, 86, 87, 88, 89, 90, 91, 92, 93, 94, 95, 96, 97, 98, 99, 100, 101, 102, 103, 104, 105, 106, 107, 108, 109, 110, 111, 112, 113, 114, 115, 116, 117, 118, 119, 120, 121, 122, 123, 124, 125, 126, 127, 128, 129, 130, 131, 132, 133, 134, 135, 136, 137, 138, 139, 140, 141, 142, 143, 144, 145, 146, 147, 148, 149, 150, 151, 152, 153, 154, 155, 156, 157, 158, 159, 160, 161, 162, 163, 164, 165, 166, 167, 168, 169, 170, 171, 172, 173, 174, 175, 176, 177, 178, 179, 180, 181, 182, 183, 184, 185, 186, 187, 188, 189, 190, 191, 192, 193, 194, 195, 196, 197, 198, 199, 200, 201, 202, 203, 204, 205, 206, 207, 208, 209, 210, 211, 212, 213, 214, 215, 216, 217, 218, 219, 220, 221, 222, 223, 224, 225, 226, 227, 228, 229, 230, 231, 232, 233, 234, 235, 236, 237, 238, 239, 240, 241, 242, 243, 244, 245, 246, 247, 248, 249, 250, 251, 252, 253, 254, 255, 256, 257, 258, 259, 260, 261, 262, 263, 264, 265, 266, 267, 268, 269, 270, 271, 272, 273, 274, 275, 276, 277, 278, 279, 280, 281, 282, 283, 284, 285, 286, 287, 288, 289, 290, 291, 292, 293, 294, 295, 296, 297, 298, 299, 300, 301, 302, 303, 304, 305, 306, 307, 308, 309, 310, 311, 312, 313, 314, 315, 316, 317, 318, 319, 320, 321, 322, 323, 324, 325, 326, 327, 328, 329, 330, 331, 332, 333, 334, 335, 336, 337, 338, 339, 340, 341, 342, 343, 344, 345, 346, 347, 348, 349, 350, and more than 350 nucleotides. The length of the exon sequence region for the viral genome may be 25-35, 25-50, 3545, 4555, 50-75, 55-65, 65-75, 75-85, 75-100, 8595, 95-105, 100-125, 105-115, 115-125, 125-135, 125-150, 135-145, 145-155, 150-175, 155-165, 165-175, 175-185, 175-200, 185-195, 195-205, 200-225, 205-215, 215-225, 225-235, 225-250, 235-245, 245-255, 250275, 255265, 265-275, 275-285, 275-300, 285-295, 295-305, 300-325, 305-315, 315-325, 325-335, 325-350, and 335-345 nucleotides. As a non-limiting example, the viral genome comprises an exon region that is about 32 nucleotides in length. As a non-limiting example, the viral genome comprises an exon sequence region that is about 53 nucleotides in length. As a non-limiting example, the viral genome comprises an exon sequence region that is about 134 nucleotides in length. As a non-limiting example, the viral genome comprises an exon sequence region that is about 347 nucleotides in length. As a non-limiting example, the viral genome comprises an exon sequence region that is about 379 nucleotides in length. As a non-limiting example, the viral genome comprises an exon sequence region that is about 566 nucleotides in length.

[0517] In some embodiments, the AAV particle viral genome comprises two exon sequence regions. In some embodiments, the AAV particle viral genome comprises three exon sequence regions. In some embodiments, the AAV particle viral genome comprises more than three exon sequence regions.

[0518] In some embodiments, the AAV particle viral genome comprises EXON1 (SEQ ID NO. 32678). In some embodiments, the AAV particle viral genome comprises EXON2 (SEQ ID NO: 32681). In some embodiments, the AAV particle viral genome comprises EXON: 1 and EXON2. In some embodiments, one or more exon sequences are derived from an ie1 (CMV immediate early) gene. In some embodiments, one or more exon sequences are derived from a human beta-globin gene.

[0519] In some embodiments, the AAV particle viral genome comprises a hybrid intron/exon sequence region comprising at least one intron and at least one exon. In some embodiments, the hybrid intron/exon sequence region comprises one intron and one exon. In some embodiments, the hybrid intron/exon sequence region comprises two introns and two exons. In some embodiments, an intron or exon sequence may comprise a full length intron or exon. In some embodiments, an intron or exon sequence may comprise a fragment or variant of an intron or exon sequence.

[0520] The hybrid intron/exon sequence region(s) may, independently, have a length such as, but not limited to, 15-100, 100-200, 200-300, 300-400, 400-500, 500-600, 600-700, 700-800, 800-900, 900-1000, 1000-1100, 1100-1200, and more than 1200 nucleotides. As a non-limiting example, the viral genome comprises a hybrid intron/exon sequence region that is about 379 nucleotides in length. As a non-limiting example, the viral genome comprises a hybrid intron/exon sequence region that is about 566 nucleotides in length. As a non-limiting example, the viral genome comprises a hybrid intron/exon region that is about 379 nucleotides in length.

[0521] In some embodiments, the hybrid intron/exon sequence region may comprise one or more of EXON1 (SEQ ID NO: 32678), EXON2 (SEQ ID NO: 32681), INTRON1 (SEQ ID NO: 32679) and/or INTRON2 (SEQ ID NO: 32680), In some embodiments, the hybrid intron/exon sequence region, when read 5′ to 3′ comprises EXON1, INTRON1, INTRON2, and EXON2.

[0522] In some embodiments, the intron/exon sequence region is an enhancer sequence. In some embodiments, the intron/exon sequence region is not an enhancer sequence.

[0523] As used herein, an “enhancer” or “enhancer sequence” refers to an element or component of the viral genome used to enhance the target specificity and/or expression of the payload (e.g., antibody or TRIM21). In some embodiments, a promoter may comprise an enhancer sequence. In some embodiments, an enhancer may be a separate component of the viral genome than the promoter. In some embodiments, an enhancer may be 5′ to a promoter sequence in a viral genome. In some embodiments, an enhancer may be 3′ to a promoter sequence in a viral genome.

[0524] In some embodiments, the intron/exon sequence region is a component of a promoter sequence. In some embodiments, the intron/exon sequence region is not a component of a promoter sequence.

[0525] In some embodiments, the AAV particle viral genome comprises at least one tag sequence region. As used herein, the term “tag” indicates a polynucleotide sequence appended to the payload (5′ or 3′), that once expressed may be used to identify the expressed payload. Alternatively, the term “tag” may indicate a polynucleotide sequence appended to the payload (5′ or 3′) that signals for retention of the expressed payload in a particular region of the cell (e.g., endoplasmic reticulum).

[0526] The tag sequence region(s) may, independently, have a length such as, but not limited to, 10, 11, 12, 13, 14, 15, 16, 17, 18, 11.9, 20, 21, 22, 23, 24, 25, 26, 27, 28, 29, 30 or more than 30 nucleotides. The length of the tag sequence region in the viral genome may be 10-15, 15-20, 20-25, 25-30, or more than 30 nucleotides. As a non-limiting example, the viral genome comprises a tag sequence region that is about 18 nucleotides in length. As a non-limiting example, the viral genome comprises a tag sequence region that is about 21 nucleotides in length. As a non-limiting example, the viral genome comprises a tag sequence region that is about 27 nucleotides in length. As a non-limiting example, the viral genome comprises a tag sequence region that is about 39 nucleotides in length. As a non-limiting example, the viral genome comprises a tag sequence region that is about 708 nucleotides in length.

[0527] In some embodiments, the AAV particle viral genome comprises one tag sequence region. In some embodiments, the AAV particle viral genome comprises a tag sequence region given as TAG1 (SEQ ID NO: 32682). In some embodiments, the AAV particle viral genome comprises a tag sequence region given as TAG2 (SEQ ID NO: 32683). In some embodiments, the AAV particle viral genome comprises a tag sequence region given as TAG3 (SEQ ID NO: 32684). In some embodiments, the AAV particle viral genome comprises a tag sequence region given as TAG4 (SEQ ID NO: 32685). In some embodiments, the tag sequence region is a Human influenza hemagglutinin (HA) tag. In some embodiments, the tag sequence region a His tag. In some embodiments, the tag sequence region comprises more than one His sequence repeated. In some embodiments, the tag sequence region comprises six repeats of a His tag sequence. In some embodiments, the tag sequence region comprises a TEV (Tobacco Etch Virus protease) site. In some embodiments, the tag sequence region comprises an mcherry sequence.

[0528] In some embodiments, the AAV particle viral genome comprises more than one tag sequence region. In some embodiments, the AAV particle viral genome comprises two tag sequence regions. In some embodiments, the AAV particle viral genome comprises tag sequence regions TACI2 and TAG3. In some embodiments, the AAV particle viral genome comprises three tag sequence regions. In some embodiments, the AAV particle viral genome comprises more than three tag sequence regions.

[0529] In some embodiments, the AAV particle viral genome comprises one or more TRIM21 sequence regions. In some embodiments, the AAV particle viral genome comprises a TRIM21 sequence region given as TRIM21_1 (SEQ ID NO: 32686). In some embodiments, the AAV particle viral genome comprises a TRIM21 sequence region given as SEQ ID NO: 32670 or a fragment, variant or derivative thereof. In some embodiments, the TRIM21 sequence region may be 1428 nucleotides in length.

[0530] In some embodiments, the AAV particle viral genome may comprise at least one polyadenylation (polyA) sequence region. The polyadenylation sequence region(s) may, independently, have a length such as, but not limited to, 4, 5, 6, 7, 8, 9, 10, 11, 12, 13, 14, 15, 16, 17, 18, 19, 20, 21, 22, 23, 24, 25, 26, 27, 28, 29, 30, 31, 32, 33, 34, 35, 36, 37, 38, 39, 40, 41, 42, 43, 44, 45, 46, 47, 48, 49, 50, 51, 52, 53, 54, 55, 56, 57, 58, 59, 60, 61, 62, 63, 64, 65, 66, 67, 68, 69, 70, 71, 72, 73, 74, 75, 76, 77, 78, 79, 80, 81, 82, 83, 84, 85, 86, 87, 88, 89, 90, 91, 92, 93, 94, 95, 96, 97, 98, 99, 100, 101, 102, 103, 104, 105, 106, 107, 108, 109, 110, 111, 112, 113, 114, 115, 116, 117, 118, 119, 120, 121, 122, 123, 124, 125, 126, 127, 128, 129, 130, 131, 132, 133, 134, 135, 136, 137, 138, 139, 140, 141, 142, 143, 144, 145, 146, 147, 148, 149, 150, 151, 152, 162, 163, 164, 165, 166, 167, 168, 169, 170, 171, 172, 173, 174, 175, 176, 177, 178, 179, 180, 181, 182, 183, 184, 185, 186, 187, 188, 189, 190, 191, 192, 193, 194, 195, 196, 197, 198, 199, 200, 201, 202, 203, 204, 205, 206, 207, 208, 209, 210, 211, 212, 213, 214, 215, 216, 217, 218, 219, 220, 221, 222, 223, 224, 225, 226, 227, 228, 229, 230, 231, 232, 233, 234, 235, 236, 237, 238, 239, 240, 241, 242, 243, 244, 245, 246, 247, 248, 249, 250, 251, 252, 253, 254, 255, 256, 257, 258, 259, 260, 261, 262, 263, 264, 265, 266, 267, 268, 269, 270, 271, 272, 273, 274, 275, 276, 277, 278, 279, 280, 281, 282, 283, 284, 285, 286, 287, 288, 289, 290, 291, 292, 293, 294, 295, 296, 297, 298, 299, 300, 301, 302, 303, 304, 305, 306, 307, 308, 309, 310, 311, 312, 313, 314, 315, 316, 317, 318, 319, 320, 321, 322, 323, 324, 325, 326, 327, 328, 329, 330, 331, 332, 333, 334, 335, 336, 337, 338, 339, 340, 341, 342, 343, 344, 345, 346, 347, 348, 349, 350, 351, 352, 353, 354, 355, 356, 357, 358, 359, 360, 361, 362, 363, 364, 365, 366, 367, 368, 369, 370, 371, 372, 373, 374, 375, 376, 377, 378, 379, 380, 381, 382, 383, 384, 385, 386, 387, 388, 389, 390, 391, 392, 393, 394, 395, 396, 397, 398, 399, 400, 401, 402, 403, 404, 405, 406, 407, 408, 409, 410, 411, 412, 413, 414, 415, 416, 417, 418, 419, 420, 421, 422, 423, 424, 425, 426, 427, 428, 429, 430, 431, 432, 433, 434, 435, 436, 437, 438, 439, 440, 441, 442, 443, 444, 445, 446, 447, 448, 449, 450, 451, 452, 453, 454, 455, 456, 457, 458, 459, 460, 461, 462, 463, 464, 465, 466, 467, 468, 469, 470, 471, 472, 473, 474, 475, 476, 477, 478, 479, 480, 481, 482, 483, 484, 485, 486, 487, 488, 489, 490, 491, 492, 493, 494, 495, 496, 497, 498, 499, 500, 501, 502, 503, 504, 505, 506, 507, 508, 509, 510, 511, 512, 513, 514, 515, 516, 517, 518, 519, 520, 521, 522, 523, 524, 525, 526, 527, 528, 529, 530, 531, 532, 533, 534, 535, 536, 537, 538, 539, 540, 541, 542, 543, 544, 545, 546, 547, 548, 549, 550, 551, 552, 553, 554, 555, 556, 557, 558, 559, 560, 561, 562, 563, 564, 565, 566, 567, 568, 569, 570, 571, 572, 573, 574, 575, 576, 577, 578, 579, 580, 581, 582, 583, 584, 585, 586, 587, 588, 589, 590, 591, 592, 593, 594, 595, 596, 597, 598, 599, and 600 nucleotides. The length of the polyadenylation sequence region for the viral genome may be 4-10, 10-20, 10-50, 20-30, 3040, 40-50, 50-60, 50-100, 60-70, 70-80, 80-90, 90-100, 100-110, 100-150, 110-120, 120-130, 130-140, 140-150, 150-160, 150-200, 160-170, 170-180, 180-190, 190-200, 200210, 200250, 210 220, 220-230, 230-240, 240-250, 250-260, 250-300, 260-270, 270-280, 280-290, 290-300, 300-310-300-350, 310-320, 320-330, 330-340, 340-350, 350-360, 350-400, 360-370, 370-380, 380-390, 390-400, 400-410, 400-450, 410-420, 420-430, 430-440, 440-450, 450-460, 450-500, 460-470, 470-480, 480-490, 490-500, 500-510, 500-550, 510-520, 520-530, 530-540, 540-550, 550 560, 550-600, 560-570, 570-580, 580-590, and 590-600 nucleotides. In some embodiments, the viral genome comprises a polyadenylation sequence region that is about 477 nucleotides in length.

[0531] In some embodiments, the AAV particle viral genome comprises at least one polyA sequence region. In some embodiments, the AAV particle viral genome comprises one polyA sequence region. In some embodiments, the AAV particle viral genome comprises a polyA sequence region given as POLYA1 (SEC.) ID NO: 32687). As a non-limiting example, the polyA sequence comprises a human growth hormone polyadenylation sequence.

[0532] In some embodiments, the AAV particle viral genome comprises more than one polyA sequence region.

[0533] In some embodiments, the AAV particle viral genome may comprise any of the sequences shown in Table 56.

TABLE 56
Representative sequence regions in ITR to ITR sequences

| | TRIM21_ITR1 | | TRIM21_ITR2 | | TRIM21_ITR3 | | TRIM21_ITR4 | |
|---|---|---|---|---|---|---|---|---|
| | (SEQ ID NO: | | (SEQ ID NO: | | (SEQ ID NO: | | (SEQ ID NO: | |
| | 32672) | | 32673) | | 32674) | | 32675) | |
| | Region | | Region | | Region | | Region | |
| | SEQ | Region | SEQ | Region | SEQ | Region | SEQ | Region |
| Sequence Regions | ID NO | length | ID NO | length | ID NO | length | ID NO | length |
| 5′ ITR | 32676 | 141 | 32676 | 141 | 32676 | 141 | 32676 | 141 |
| Promoter | 32677 | 654 | 32677 | 654 | 32677 | 654 | 32677 | 654 |
| Exon | 32678 | 134 | 32678 | 134 | 32678 | 134 | 32678 | 134 |
| Intron | 32679 | 32 | 32679 | 32 | 32679 | 32 | 32679 | 32 |
| Intron | 32680 | 347 | 32680 | 347 | 32680 | 347 | 32680 | 347 |
| Exon | 32681 | 53 | 32681 | 53 | 32681 | 53 | 32681 | 53 |
| Tag | — | — | 32682 | 27 | 32683 | 18 | 32685 | 708 |
| Tag | — | — | — | — | 32684 | 21 | — | — |
| TRIM21 | 32686 | 1428 | 32686 | 1428 | 32686 | 1428 | 32686 | 1428 |
| PolyA | 32687 | 477 | 32687 | 477 | 32687 | 477 | 32687 | 477 |
| 3′ ITR | 32688 | 141 | 32688 | 141 | 32688 | 141 | 32688 | 141 |

[0534] In some embodiments, the AAV particle viral genome comprises SEQ ID NO: 32672 (TRIM21_ITR1), which comprises a 5′ inverted terminal repeat (ITR) sequence region and a 3′ ITR sequence region, a CBA promoter region, a human beta globin intron/exon region comprising an ie1 exon 1 region, an ie1 intron 1 region, a human beta-globin intron region, a human-beta-globin exon region, a TRIM21 sequence region, and a human growth hormone polyadenylation sequence.

[0535] In some embodiments, the AAV particle viral genome comprises SEQ ID NO: 32673 (TRIM21_ITR2), which comprises a 5′ inverted terminal repeat (ITR) sequence region and a 3′ ITR sequence region, a CBA promoter region, a human beta globin intron/exon region comprising an ie1 exon 1 region, an ie1 intron 1 region, a human beta-globin intron region, a human beta-globin exon region, an HA tag sequence region, a TRIM sequence region, and a human growth hormone polyadenylation sequence.

[0536] In some embodiments, the AAV particle viral genome comprises SEQ ID NO: 32674 (TRINE′ ITR3), which comprises a 5′ inverted terminal repeat (ITR) sequence region and a 3′ ITR sequence region, a CBA promoter region, a human beta globin intron/exon region comprising an ie1 exon 1 region, an ie1 intron 1 region, a human beta-globin intron region, a human beta globin exon region, a His tag sequence region, a TEV site, a TRIM21 sequence region, and a human growth hormone polyadenylation sequence.

[0537] In some embodiments, the AAV particle viral genome comprises SEQ ID NO: 32675 (TRIM21_ITR4), which comprises a 5′ inverted terminal repeat (ITR) sequence region and a 3′ ITR sequence region, a CBA promoter region, a human beta globin intron/exon region comprising an ie1 exon 1 region, an ie1 intron 1 region, a human beta-globin intron region, a human-beta-globin exon region, an mCherry tag sequence region, a TRIM21 sequence region, and a human growth hormone polyadenylation sequence.

[0538] Certain embodiments provide the viral genome as packaged in a capsid having a serotype selected from Table 1, or any capsid known in the art. For example, the capsid serotype may be selected from the group consisting of VOY101, VOY201, AAVPHP.B, AAVPHP.N, AAV1, AAV2, AAV3, AAV4, AAV5, AAV6, AAV7, AAV8, AAV9, AAV9.47, AAV9(hu14), AAV9 K449R, AAV10, AAV11, AAV12, AAVrh8, AAVrh10, ARVIN, and AAVDJ8, or any variant thereof.

[0539] In some embodiments a viral genome as provided in Tables 54-56 is packaged into an AAV capsid to generate an AAV particle. In some embodiments, the AAV particle comprises a viral genome comprising SEQ ID NO: 32672 and a VOY101 capsid. In some embodiments, the AAV particle comprises a viral genome comprising SEQ ID NO: 32672 and a VOY201 capsid. In some embodiments, the AAV particle comprises a viral genome comprising SEQ ID NO: 32672 and an AAV9 capsid. In some embodiments, the AAV particle comprises a viral genome comprising SEQ ID NO: 32672 and an AAV9 K449R. capsid. In some embodiments, the AAV particle comprises a viral genome comprising SEQ ID NO: 32672 and an AAVPHP.B capsid. In some embodiments, the AAV particle comprises a viral genome comprising SEQ ID NO: 32672 and an AAVPHP.N capsid.

[0540] In some embodiments a viral genome as provided in Tables 54-56 is packaged into an AAV capsid to generate an AAV particle. In some embodiments, the AAV particle comprises a viral genome comprising SEQ ID NO: 32673 and a VOY101 capsid. In some embodiments, the AAV particle comprises a viral genome comprising SEQ ID NO: 32673 and a VOY201 capsid. In some embodiments, the AAV particle comprises a viral genome comprising SEQ ID NO: 32673 and an AAV9 capsid. In some embodiments, the AAV particle comprises a viral genome comprising SEQ ID NO: 32673 and an AAV9 K449R capsid. In some embodiments, the AAV particle comprises a viral genome comprising SEQ ID NO: 32673 and an AAVPHP.B capsid. In some embodiments, the AAV particle comprises a viral genome comprising SEQ ID NO: 32673 and an AAVPHP.N capsid.

[0541] In some embodiments a viral genome as provided in Tables 54-56 is packaged into an AAV capsid to generate an AAV particle. In some embodiments, the AAV particle comprises a viral genome comprising SEQ ID NO: 32674 and a VOY101 capsid. In some embodiments, the AAV particle comprises a viral genome comprising SEQ ID NO: 32674 and a VOY201 capsid. In some embodiments, the AAV particle comprises a viral genome comprising SEQ ID NO: 32674 and an AAV9 capsid. In some embodiments, the AAV particle comprises a viral genome comprising SEQ ID NO: 32674 and an AAV9 K449R capsid. In some embodiments, the AAV particle comprises a viral genome comprising SEQ ID NO: 32674 and an AAVPHP.B capsid. In some embodiments, the AAV particle comprises a viral genome comprising SEQ ID NO: 32674 and an AAVPHRN capsid.

[0542] In some embodiments a viral genome as provided in Tables 54-56 is packaged into an AAV capsid to generate an AAV particle. In some embodiments, the AAV particle comprises a viral genome comprising SEQ ID NO: 32675 and a VOY101 capsid. In some embodiments, the AAV particle comprises a viral genome comprising SEQ ID NO: 32675 and a VOY201. capsid. In some embodiments, the AAV particle comprises a viral genome comprising SEQ ID NO: 32675 and an AAV9 capsid. In some embodiments, the AAV particle comprises a viral genome comprising SEQ ID NO: 32675 and an AAV9 K449R capsid. In some embodiments, the AAV particle comprises a viral genome comprising SEQ ID NO: 32675 and an AAVPHP.B capsid. In some embodiments, the AAV particle comprises a viral genome comprising SEQ ID NO: 32675 and an AAVPHP.N capsid.

### Chimeric Antigen Receptor

[0543] In some embodiments, payloads of the present disclosure may be a chimeric antigen receptor (CAR), which when transduced into immune cells (e.g., T cells and NK cells), can re-direct the immune cells against the target (e.g., a tumor cell) which expresses a molecule recognized by the extracellular target moiety of the CAR. The expression of such payloads may be augmented using the VA-DER systems of the disclosure whereby either TRIM21 as a protein or vectored TRIM21 is also delivered or administered with the CAR or with an antibody which recognizes the CAR. Cells engineered to express CARs may also be engineered to express TRIM21 either chromosomally or by using a vectored delivery of a sequence encoding TRIM21.

[0544] As used herein, the term “chimeric antigen receptor (CAR)” refers to a synthetic receptor that mimics the TCR on the surface of T cells. In general, a CAR is composed of an extracellular targeting domain, a transmembrane domain/region and an intracellular signaling/activation domain. In a standard CAR receptor, the components: the extracellular targeting domain, transmembrane domain and intracellular signaling/activation domain, are linearly constructed as a single fusion protein. The extracellular region comprises a targeting domain/moiety (e.g., a scFv) that recognizes a specific tumor antigen or other tumor cell-surface molecules. The intracellular region may contain a signaling domain of TCR. complex (e.g., the signal region of CD3C), and/or one or more costimulatory signaling domains, such as those from CD28, 4-1BB (CD137) and OX-40 (CD134). For example, a “first-generation CAR” only has the CD3 signaling domain, whereas, a second-generation CARs have a CD3ζ signal domain plus one costimulatory signaling domain, and a third-generation CARs having CD3ζ signal domain plus two or more costimulatory signaling domains. A CAR, when expressed by a T cell, endows the T cell with antigen specificity determined by the extracellular targeting moiety of the CAR. It is also desirable to add one or more elements such as homing and suicide genes to develop a more competent and safer architecture of CAR, which has given rise to the so called the fourth-generation CAR.

[0545] In some embodiments, the extracellular targeting domain is joined through the hinge (also called space domain or spacer) and transmembrane regions to an intracellular signaling domain. The hinge may need to be varied to optimize the potency of CAR expressing cells towards the cancer cells due to the size of the target protein where the targeting moiety binds, and the size and affinity of the targeting domain itself. Upon recognition and binding of the targeting moiety to the target cell, the intracellular signaling domain leads to an activation signal for the CAR T cell, which is further amplified by the “second signal” from one or more intracellular costimulatory domains. The CAR T cell, once activated, can destroy the target cell.

[0546] In some embodiments, the CAR of the present disclosure may be split into two parts, each part is linked a dimerizing domain, such that an input that triggers the dimerization promotes assembly of the intact functional receptor. Wu and Lim recently reported a split CAR in which the extracellular CD19 binding domain and the intracellular signaling element are separated and linked to the FKBP domain and the FRB* (T2089L mutant of FKBP-rapamycin binding) domain that heterodimerize in the presence of the rapamycin analog AP2.1967. The split receptor is assembled in the presence of AP21967 and together with the specific antigen binding, activates T cells (Wu et al, Science, 2015, 625(6258): aab4077).

[0547] In accordance with the disclosure, the extracellular target moiety of a CAR may be any agent that recognizes and binds to a given target molecule, for example, a neoantigen on tumor cells, with high specificity and affinity. The target moiety may be an antibody and variants thereof that specifically bind to a target molecule on tumor cells, or a peptide aptamer selected from a random sequence pool based on its ability to bind to the target molecule on tumor cells, or a variant or fragment thereof that can bind to the target molecule on tumor cells, or an antigen recognition domain from native T-cell receptor (TCR) (e.g. CD4 extracellular domain to recognize HIV infected cells), or exotic recognition components such as a linked cytokine that leads to recognition of target cells bearing the cytokine receptor, or a natural ligand of a receptor.

[0548] In some embodiments, the targeting domain of a CAR may be a Ig NAR, a Fab fragment, a Fab′ fragment, a F(ab)′2 fragment, a F(ab)′3 fragment, Fv, a single chain variable fragment (scFv), a bis-scFv, a (scFv)2, a minibody, a diabody, a triabody, a tetrabody, a disulfide stabilized Fv protein (dsFv), a unibody, a nanobody, or an antigen binding region derived from an antibody that specifically recognizes a target molecule, for example a tumor specific antigen (TSA). In some embodiments, the targeting moiety is a scFv antibody. The scFv domain, when it is expressed on the surface of a CAR T cell and subsequently binds to a target protein on a cancer cell, is able to maintain the CAR T cell in proximity to the cancer cell and to trigger the activation of the T cell. A scFv can be generated using routine recombinant DNAA_technology techniques and is discussed in the present disclosure.

[0549] In some embodiments, the targeting moiety of a CAR construct may be a natural ligand of the target molecule, or a variant and/or fragment thereof capable of binding the target molecule. In some aspects, the targeting moiety of a CAR may be a receptor of the target molecule, for example, a full length human CD27, as a CD70 receptor, may be fused in frame to the signaling domain of CD3ζ forming a CD27 chimeric receptor as an immunotherapeutic agent for CD70-positive malignancies (see, e.g., US patent publication NO: US20130323214; the contents of which are incorporated by reference herein in their entirety).

[0550] In some embodiments, the targeting moiety of a CAR may recognize a tumor specific antigen (TSA), for example a cancer neoantigen whose expression is restricted to tumor cells.

[0551] As non-limiting examples, the CAR of the present disclosure may comprise the extracellular targeting domain capable of binding to a tumor specific antigen selected from 5T4, 707-AP, A33, AFP (α-fetoprotein), AKAP-4 (A kinase anchor protein 4), ALK, α5β1-integrin, androgen receptor, annexin II, alpha-actinin-4, ART-4, B1, B7113, B7114, BAGE (B melanoma antigen), BCMA, BCR-ABL fusion protein, beta-catenin, BKT-antigen, BTAA, CA-I (carbonic anhydrase I), CA50 (cancer antigen 50), CA125, CA15-3, CA195, CA242, calretinin, CAIX (carbonic anhydrase), CAMEL (cytotoxic T-lymphocyte recognized antigen on melanoma), CAM43, CAP-1, Caspase-8/m, CD4, CD5, CD7, CD19, CD20, CD22, CD23, CD25, CD27/m, CD28, CD30, CD33, CD34, CD36, CD38, CD40/CD154, CD41, CD44v6, CD44v7/8, CD45, CD49f, CD56, CD68KP1, CD74, CD79a/CD79b, CD103, CD123, CD133, CD138, CD171, cdc27/m, CDK4 (cyclin dependent kinase 4), CDKN2A, CD5, CEA (carcinoembryonic antigen), CEACAMS, CEACAM6, chromogranin, c-Met, c-Myc, coa-1, CSAp, CT7, CT10, cyclophilin B, cyclin B1, cytoplasmic tyrosine kinases, cytokeratin, DAM-10, DAM-6, dek-can fusion protein, desmin, DEPDC1 (DEP domain containing 1), E2A-PRL, EBNA, EGF-R (epidermal growth factor receptor), EGP-1(epithelial glycoprotein-1) (TROP-2), EGP-2, EGP-40, EGFR (epidermal growth factor receptor), EGFRvIII, EF-2, ELF2M, EMMPRIN, EpCAM (epithelial cell adhesion molecule), EphA2, Epstein Barr virus antigens, Erb (ErbB1; ErbB3; ErbB4), ETA (epithelial tumor antigen), ETV6-AML1 fusion protein, FAP (fibroblast activation protein), FBP (folate-binding protein), FGF-5, folate receptor α, FOS related antigen 1, fucosyl GM1, G250, GAGE (GAGE-1; GAGE-2), galactin, GD2 (ganglioside), GD3, GFAP (glial fibrillary acidic protein), GM2 (oncofetal antigen-immunogenic-1; OFA-I-1), GnT-V, Gp100, H4-RET, HAGE (helicase antigen), HER-2/neu, HIFs (hypoxia inducible factors), HIF-1α, HIF-2α, HLA-A2, HLA-A*0201-R1701, HLA-A11, HMWMAA, Hom/Mel-40, HSP70-2M (Heat shock protein 70), HST-2, HTgp-175, hTERT (or hTRT), human papillomavirus-E6/human papillomavirus-E7 and E6, iCE (immune-capture EIA), IGH-IGK, IL-2R, IL-5, ILK (integrin-linked kinase), IMP3 (insulin-like growth factor II mRNA-binding protein 3), IRF4 (interferon regulatory factor 4), KDR (kinase insert domain receptor), KIAA0205, KRAB-zinc finger protein (KID)-3; KID31, KSA (17-1A), K-ras, LADE, LCK, LDLR/FUT (LDLR-fucosyltransferaseAS fusion protein), LeY (Lewis Y), MAD-CT-1, MAGE (tyrosinase, melanoma-associated antigen) (MAGE-1; MAGE-3), melan-A tumor antigen (MART), MART-2/Ski, MC1R (melanocortin 1 receptor), MDM2, mesothelin, MPHOSPH1, MSA(muscle-specific actin), mTOR (mammalian targets of rapamycin), MUC-1, MUC-2, MUM-1 (melanoma. associated antigen (mutated) 1), MUM-2, MUM-3, Myosin/m, MYL-RAR, NA88-A, N-acetylglucosaminyltransferase, neo-PAP, NF-KB (nuclear factor-kappa B), neurofilament, NSE (neuron-specific enolase), Notch receptors, NuMa, N-Ras, NY-BR-1, NY-CO-1, NY-ESO-1, Oncostatin M, OS-9, OY-TES1, pS3 mutants, p190 minor bcr-abl, p15(58), p185erbB2, p180erbB-3; PAGE (prostate associated gene), PAP (prostatic acid phosphatase), PAX3, PARS, PDGFR (platelet derived growth factor receptor), cytochrome P450 involved in piperidine and pyrrolidine utilization (MA); Pml-RAR alpha fusion protein, PR-3 (proteinase 3), PSA (prostate specific antigen), PSM, PSMA (Prostate stem cell antigen), PRAME (preferentially expressed antigen of melanoma), PTPRK, RAGE (renal tumor antigen), Raf (A-Raf, B-Raf and C-Raf), Ras, receptor tyrosine kinases, RCAS1, RGSS, RORI (receptor tyrosine kinase-like orphan receptor 1), RU1, RU2, SAGE, SART-1, SART-3, SCP-1, SDCCAG16, SP-17 (sperm protein 17), src-family, SSX (synovial sarcoma X breakpoint)-1, SSX-2(HOM-MEL-40), SSX-3, SSX-4, STAT-3, STAT-5, STAT-6, STEAD, STn, survivin, syk-ZAP70, TA-90 (Mac-2 binding protein\cyclophilin C-associated protein), TAAL6, TACSTD1 (tumor associated calcium signal transducer 1), TACSTD2, TAG-72-4, TAGE, TARP (T cell receptor gamma alternate reading frame protein), TEL/AML1 fusion protein, TEM1, TEM8 (endosialin or CD248), TGFβ, T1F2, TLP, IMERSS2 ETS fusion gene, TNF-receptor (TNF-α, receptor, TNF-β receptor; or TNF-γ receptor), transferrin receptor, TPS, TRP-1 (tyrosine related protein 1), TRP-2, TRP-2/INT2, TSP-180, VEGF receptor, WNT, WT-1 (Wilm's tumor antigen) and XAGE.

[0552] As non-limiting examples, the targeting moiety of the present disclosure may be a scFv antibody that recognizes a tumor specific antigen (TSA), for example scFvs of antibodies SS, SS1 and HN1 that specifically recognize and bind to human mesothelin (U.S. Pat. No. 9,359,447), scFv of antibody of GD2 (U.S. Pat. No. 9,315,585), a CD19 antigen binding domain (U.S. Pat. No. 9,328,156); a NKG2D ligand binding domain (U.S. Pat. No. 9,273,283; US patent publication NO.: US20160311906A1); human anti-mesothelin scFvs comprising the amino acid sequences of SEQ ID NO.: 11 and 12 of U.S. Pat. No. 9,272,002; an anti-CS1 binding agent (US patent publication NO.: 11520160075784); an anti-BCMA binding domain (International Patent Publication NO. WO2016/014565); anti-CD1.9 scFv antibody of SEQ ID NO.: 20 in U.S. Pat. No. 9,102,761; GFR alpha 4 antigen binding fragments having the amino acid sequences of SEQ ID NOs.: 59 and 79 of International patent publication NO.: 2016/025880; anti-CLL-1 (C-type lectin-like molecule 1) binding domains having the amino acid sequences of SEQ ID NO.:47, 44, 48, 49, 50, 39, 40, 41, 42, 43, 45, 46, 51, 73, 70, 74, 75, 76, 65, 66, 67, 68, 69, 71, 72, 77, 195, 86, 83, 87, 88, 89, 78, 79, 80, 81, 82, 84, 85, 90 and 196 of International Patent Publication NO.: WO2016014535); CD33 binding domains having the amino acid sequences of SEQ ID NOs.: 39-46 of International patent publication NO.: WO2016014576; a GPC3 (glypican-3) binding domain (SEQ ID NO.: 2 and SEQ ID NO.: 4 of International patent publication NO.: WO2016036973), a GFR alpha4 (Glycosyl-phosphatidylinositol (GPI)-linked GDNF family a receptor 4 cell-surface receptor) binding domain (International Patent Publication NO.: WO2016025880); CD123 binding domains having the amino acid sequences of SEQ ID NOs.: 480, 483, 485, 478, 158, 159, 160, 157, 217, 218, 219, 216, 276, 277, 278, and 275 of International patent publication NO.: WO20160258896; an anti-RORI antibody or fragments thereof (International patent publication NO.: WO2016016344); says specific to GPC-3 (SEQ ID NOs.: 1 and 24 of International patent publication NO.: WO2016049459); scFv for CSPG4 (SEQ ID NO.: 2 of International patent publication NO.: NV02015080981; scFv for folate receptor alpha (US Patent Publication NO.: US20170002072A1); the contents of each of which are incorporated herein by reference in their entirety.

[0553] The intracellular domain of a CAR fusion polypeptide, after binding to its target molecule, transmits a signal to the immune effector cell, activating at least one of the normal effector functions of immune effector cells, including cytolytic activity (e.g., cytokine secretion) or helper activity. Therefore, the intracellular domain comprises an “intracellular signaling domain” of a T cell receptor (TCR). In some embodiments, the intracellular signaling domain of the present disclosure may contain signaling motifs which are known as immunoreceptor tyrosine-based activation motifs (ITAMs). In some embodiments, the intracellular region of the present disclosure further comprises one or more costimulatory signaling domains which provide additional signals to the immune effector cells. These costimulatory signaling domains, in combination with the signaling domain can further improve expansion, activation, memory, persistence, and tumor-eradicating efficiency of CAR engineered immune cells (e.g., CAR T cells). In some cases, the costimulatory signaling region contains 1, 2, 3, or 4 cytoplasmic domains of one or more intracellular signaling and/or costimulatory molecules. In some embodiments, the intracellular region of the present disclosure may comprise a functional signaling domain from a protein selected from the group consisting of an MHC class I molecule, a TNF receptor protein, an immunoglobulin-like protein, a cytokine receptor, an integrin, a signaling lymphocytic activation protein (SLAM) such as CD48, CD229, 2B4, CD84, NTB-A, CRACC, BLAME, CD2F-10, SLAMF6, SLAMF7, an activating NK cell receptor, BTLA, a Toll ligand receptor, 0X40, CD2, CD7, CD27, CD28, CD30, CD40, CD5, ICAM-1, LFA-1 (CM11a/CD18), 4-1BB (CD137), B7-H3, CDS, ICAM-1, ICOS (CD278), GITR, BAFFR, LIGHT, HVEM (LIGHTR), SLAMF7, NKp80 (KLRF1), NKp44, NKp30, NKp46, CD19, CD4, CD8alpha, CD8beta, IL2R beta, IL2R gamma, IL7R alpha, IL-15Ra, ITGA4, VLA1, CD49a, ITGA4, IA4, CD49D, ITGA6, VLA-6, CD49f, ITGAD, CD11d, ITGAE, CD103, ITGAL, CD11a, LFA-1, ITGAM, CD11b, ITGAX, CD11c, ITGB1, CD29, ITGB2, CD18, LFA-1, ITGB7, NKG2D, NKG2C, NKD2, CSLP76, TNFR2, TRANCE/RANKL, DNAM1 (CD226), SLAMF4 (CD244, 2B4), CD84, CD96 (Tactile), CEACAM1, CRTAM, Ly9 (CD229), CD160 (BY55), PSGL1, CD100 (SEMA4D), CD69, SLAMF6 (NTB-A, Ly108), SLAM (SLAMF1, CD150, IPO-3), BLAME (SLAMF8), SELPLG (CD162), LTBR, LAT, CD270 (MEM), GADS, SLP-76, PAG/Cbp, CD19a, a ligand that specifically binds with CD83, DAP 10, TRIM, ZAP70, Killer immunoglobulin receptors (KIRs) such as KIR2IL1, KIR2DL2/L3, KIR2DL4, KIR2DL5A, KIR2DL5B, KIR2DS1, KIR2DS2, KIR2DS3, KIR2DS4, KIR2DS5, KIR3DL1/S1, KIR3DL2, KIR3DL3, and KIR2DP1; lectin related NK cell receptors such as Ly49, Ly49A, and. Ly49C.

[0554] In some embodiments, the CAR of the present disclosure may comprise a transmembrane domain. As used herein, the term “Transmembrane domain™” refers broadly to an amino acid sequence of about 15 residues in length which spans the plasma membrane. More preferably, a transmembrane domain includes at least 20, 21, 22, 23, 24, 25, 26, 27, 28, 29, 30, 31, 32, 33, 34, 35, 36, 37, 38, 39, 40, 41, 42, 43, 44, or 45 amino acid residues and spans the plasma membrane. In some embodiments, the transmembrane domain of the present disclosure may be derived either from a natural or from a synthetic source. The transmembrane domain of a CAR may be derived from any naturally membrane-bound or transmembrane protein. In some embodiments, the transmembrane domain of the present disclosure may be selected from the group consisting of a CD8a transmembrane domain, a CD4 transmembrane domain, a CD 28 transmembrane domain, a CTLA-4 transmembrane domain, a PD-1 transmembrane domain, and a human IgG4 Fc region.

[0555] In some embodiments, the CAR of the present disclosure may comprise an optional hinge region (also called spacer). A hinge sequence is a short sequence of amino acids that facilitates flexibility of the extracellular targeting domain that moves the target binding domain away from the effector cell surface to enable proper cell/cell contact, target binding and effector cell activation (Patel et al., Gene Therapy, 1999; 6: 412-419). The hinge sequence may be positioned between the targeting moiety and the transmembrane domain. The hinge sequence can be any suitable sequence derived or obtained from any suitable molecule. The hinge sequence may be derived from all or part of an immunoglobulin (e.g., IgG1, IgG2, IgG3, IgG4) hinge region, i.e., the sequence that falls between the CH1 and CH2 domains of an immunoglobulin, e.g., an IgG4 Fc hinge, the extracellular regions of type 1 membrane proteins such as CD8a. CD4, CD28 and CD7, which may be a wild type sequence or a derivative.

### Disease Specific Epitopes, Innate Defense Regulator Peptides Cyclic Peptides

[0556] In some embodiments, the viral genomes of the viral particles may comprise nucleic acids which have been engineered to enable expression of antibodies binding to disease-specific epitopes of proteins. Such antibodies may be used to diagnose, prevent, and/or treat the corresponding medical conditions by targeting epitopes of the protein presented by or accessible on native or non-native forms (e.g., misfolded forms of native proteins) of the target. Such epitopes may be specific to diseases involved with misfolding of a protein due to pathologic condition and resulting in misfolded aggregates. The disease-specific proteins are considered to be toxic to neurons and to have a role in neuronal cell death and dysfunction in neurodegenerative diseases including, but not limited to, Alzheimer's disease (AD), amyotrophic lateral sclerosis (ALS), Parkinson's disease, dementia by Lewy body (DLB), and prion diseases, e.g. Creutzfeldt-Jakob disease (CJD), Gerstmann-Straussler-Scheinker syndrome (GSS), kuru, and fatal familial insomnia (FFI). By also utilizing a vectored TRI 21 construct, such antibody destruction, expression or regulation may be augmented as with the present VA-DER systems.

[0557] In some embodiments, the encoded disease-specific epitopes may include epitopes on SOD1 that are revealed as SOD1 (Superoxide dismutase [Cu—Zn]) dissociates from its homodimeric, normal state. The SOD epitopes may be selectively presented or accessible in non-native SOD1 forms including misfolded SOD1 monomer, misfolded SOD1 dimer, and the epitopes selectively presented or accessible in SOD1 aggregates. Such epitopes may be specific to neurodegenerative diseases including, but not limited to, amyotrophic lateral sclerosis (ALS), Alzheimer's (AD), Parkinson's (PD), and Lewy body diseases (LBD).

[0558] In some embodiments, the expressed antibodies may bind to epitopes presented by or accessible on non-native forms of SOD1, such as those presented by SEQ ID NO: 2, 3, 5, 6, and 7 of U.S. Pat. No. 7,977,314 (the contents of which are herein incorporated by reference in its entirety), or presented by or accessible on monomeric forms of SOD1, such as those presented by SEQ ID NO: 1 and 4 of U.S. Pat. No. 7,977,314, the contents of which are herein incorporated by reference in their entirety. In some embodiments, the expressed antibodies may comprise isolated peptides corresponding to such epitopes, such as those presented in SEQ ID NO: 1-8 or SEQ ID NO: 8-16, or epitopes presented by SEQ ID N0: 34-63, 65-79 of U.S. Pat. No. 7,977,314, the contents of which are herein incorporated by reference in their entirety.

[0559] In some embodiments, the encoded disease-specific epitopes may be specific to diseases associated with prion protein (PrP); familial amyloid polyneuropathy or senile systemic amyloidosis or a disease related by the presence of misfolded transthyretine (TTR); renal accumulation of 132 microglobulin amyloid deposits or a disease related by the presence of misfolded 132 microglobulin, amyotrophic lateral sclerosis (AI 0.5) or a disease related by the presence of misfolded SOD1; leukemias or myelomas or a disease related by the presence of misfolded cluster of differentiation 38 (CD38); colon cancer metastasis and or a disease related by the presence of misfolded cluster of differentiation (CD44); tumors associated with tumor necrosis factor receptor (TNFR); cancers including cervical, head and neck, endometrial, lung and breast carcinomas, pleural mesotheliomas, malignant melanomas, Hodgkin lymphomas, anaplastic large cell non-Hodgkin lymphomas, or a disease related by the presence of misfolded. Notch homolog 1 (NOTCH1) e.g. acute myeloid leukemias and B-cell chronic lymphoid leukemias; cancer in which Fas receptor (FasR) is implicated; cancers and related disorders in which misfolded epidermal growth factor (EGFR_) is implicated; and/or other related diseases, disorders and conditions.

[0560] In some embodiments, the encoded disease specific epitopes may include epitopes that are revealed as the proteins misfold. In some embodiments, the expressed antibodies may bind to predicted epitopes of human PrP, such as those presented by SEQ ID NO: 1-10 of US Patent Publication No. US20100233176; bovine PIT, such as those presented by SEQ ID NO: 11-15 of US Patent Publication No. US20100233176, TTR, such as those presented by SEQ ID NO: 16-22 of US Patent Publication No. US20100233176; beta-2 microglobulin, such as those presented by SEQ ID NO: 23-26 of US Patent Publication No. US20100233176; SOD1, such as those presented by SEQ ID NO: 27-40 of US Patent Publication No. US20100233176; CD38, such as those presented by SEQ ID NO: 41-45 of US Patent Publication No. US20100233176; CD44, such as those presented by 46-50 of US Patent Publication No. US20100233176; TNFR, such as those presented by 51-55 of US Patent Publication No. US20100233176; notch protein, such as those presented in SEQ ID NO: 56-60 of US Patent Publication No. US20100233176; FasR, such as those presented by SEQ ID NO: 61-65 of US Patent Publication No. US20100233176; and EGFR, such as those presented by SEQ ID NO: 66-80 of US Patent Publication No. US20100233176; the contents of which are herein incorporated by reference in their entirety.

[0561] In some embodiments, the expressed antibodies may comprise peptides corresponding to such epitopes. In some embodiments, the expressed antibodies may comprise prion-specific peptides, such as those presented by SEQ ID NO: 81-88 of US Patent Publication No. US20100233176, the contents of which are herein incorporated by reference in their entirety, and variations thereof.

[0562] In some embodiments, the encoded disease-specific epitopes may be specific to prion diseases, including transmissible spongiform encephalopathies (TSEs) or other prion diseases. In some embodiments, the expressed antibodies may bind to predicted epitopes of PrP, such as those presented by SEQ ID NO: 24, 26, 28, 30, 34, 36, 39-43, of US Patent Publication No. US20150004185, the contents of which are herein incorporated by reference in their entirety. In some embodiments, the expressed antibodies may comprise prion-specific peptides or peptide fusions, such as those presented by SEQ ID NO: 12-23, 25, 27, 29, 31, 33, 35, 37, 38, 43, and 44-48 of US Patent Publication No. US20150004185, the contents of which are herein incorporated by reference in their entirety.

[0563] In some embodiments, the expressed antibodies may comprise prion peptides binding to prion specific abnormal isoform of the prion protein, such as those presented by SEQ ID NO: 2-10 of US Patent Publication No. US20040072236, the contents of which are herein incorporated by reference in their entirety.

[0564] In some embodiments, the viral genomes of the viral particles may comprise nucleic acids which have been engineered to express innate defense regulator (IDR) peptides. IDRs are immunomodulatory peptides that act directly on cells to affect an innate immune response. Such IDRs may be used to treat neurodegenerative diseases associated with neuroinflammation, e.g. amyotrophic lateral sclerosis (ALS), Alzheimer's disease, Friedreich's ataxia, Huntington's disease, Lewy body disease, Parkinson's disease, spinal muscular atrophy, and multiple sclerosis (MS) and other neurodegenerative diseases. In some embodiments, IDRs may be those presented by SEQ ID NO: 1-969, and 973-1264 of International Publication No. WO2013034982, the contents of which are herein incorporated by reference in their entirety, or analogs, derivatives, amidated variations and conservative variations thereof.

[0565] In some embodiments, the viral genomes of the viral particles may comprise nucleic acids which have been engineered to express antibodies binding to an epitope of the Tropomyosin receptor kinase (TrkC) receptor. Such antibodies may comprise a peptide, such as one presented by SES) Il) NO: 1 of U.S. Pat. No. 9,200,080, the contents of which are herein incorporated by reference in their entirety.

[0566] In some embodiments, the viral genomes of the viral particles may comprise nucleic acids which have been engineered to express cyclic peptides with an amino acid sequence SNK. Non-limiting examples of other cyclic peptides include SEQ ID NO: 1-7 of U.S. Pat. No. 9,216,217, the contents of which are herein incorporated by reference in their entirety. The method of preparing the antibodies may include hyperimmune preparation method, as described in U.S. Pat. No. 9,216,217, the contents of which are herein incorporated by reference in their entirety.

### Prions

[0567] In some embodiments, the viral genomes of the viral particles may comprise a nucleic acid sequence encoding antibodies comprising prion peptides comprising prion epitopes, and fusions and repeats thereof, such as those presented by SEQ NO: 8-32, 35, and 36 of U.S. patent Ser. No. US/905,6918, the contents of which are herein incorporated by reference in their entirety.

[0568] In some embodiments, the viral genomes of the viral particles may comprise a nucleic acid sequence encoding prion binding proteins (PrPBP). In some embodiments, the PrPBPs are cadherins, such as those presented by SEQ ID NO: 1 and 2 of International Publication WO1997/045746, the contents of which are herein incorporated by reference in their entirety. In some embodiments, the PrPBPs are cadherins, such as those presented by SEQ ID NO: 2 and 7-9 of International Publication No. WO2001000235, the contents of which are herein incorporated by reference in their entirety.

### The Nature of the Polypeptides and Variants

[0569] Antibodies as well as any proteins, including TRIM21, encoded by payload regions of the viral genomes of the disclosure may be translated as a whole polypeptide, a plurality of polypeptides or fragments of polypeptides, which independently may be encoded by one or more nucleic acids, fragments of nucleic acids or variants of any of the aforementioned. As used herein, “polypeptide” means a polymer of amino acid residues (natural or unnatural) linked together most often by peptide bonds. The term, as used herein, refers to proteins, polypeptides, and peptides of any size, structure, or function. In some instances, the polypeptide encoded is smaller than about 50 amino acids and the polypeptide is then termed a peptide. If the polypeptide is a peptide, it will be at least about 2, 3, 4, or at least 5 amino acid residues long. Thus, polypeptides include gene products, naturally occurring polypeptides, synthetic polypeptides, homologs, orthologs, paralogs, fragments and other equivalents, variants, and analogs of the foregoing. A polypeptide may be a single molecule or may be a multi-molecular complex such as a dimer, trimer or tetramer. They may also comprise single chain or multichain polypeptides and may be associated or linked. The term polypeptide may also apply to amino acid polymers in which one or more amino acid residues are an artificial chemical analogue of a corresponding naturally occurring amino acid.

[0570] The term “polypeptide variant” refers to molecules which differ in their amino acid sequence from a native or reference sequence. The amino acid sequence variants may possess substitutions, deletions, and/or insertions at certain positions within the amino acid sequence, as compared to a native or reference sequence. Ordinarily, variants will possess at least about 50% identity (homology) to a native or reference sequence, and preferably, they will be at least about 80%, more preferably at least about 90% identical (homologous) to a native or reference sequence.

[0571] In some embodiments “variant mimics” are provided. As used herein, the term “variant mimic” is one which contains one or more amino acids which would mimic an activated sequence. For example, glutamate may serve as a mimic for phosphoro-threonine and/or phosphoro-serine. Alternatively, variant mimics may result in deactivation or in an inactivated product containing the mimic, e.g., phenylalanine may act as an inactivating substitution for tyrosine; or alanine may act as an inactivating substitution for serine.

[0572] The term “amino acid sequence variant” refers to molecules with some differences in their amino acid sequences as compared to a native or starting sequence. The amino acid sequence variants may possess substitutions, deletions, and/or insertions at certain positions within the amino acid sequence. “Native” or “starting” sequence should not be confused with a wild type sequence. As used herein, a native or starting sequence is a relative term referring to an original molecule against which a comparison may be made. “Native” or “starting” sequences or molecules may represent the wild-type (that sequence found in nature) but do not have to be the wild-type sequence.

[0573] Ordinarily, variants will possess at least about 70?/(homology to a native sequence, and preferably, they will be at least about 80%, more preferably at least about 90% homologous to a native sequence. “Homology” as it applies to amino acid sequences is defined as the percentage of residues in the candidate amino acid sequence that are identical with the residues in the amino acid sequence of a second sequence after aligning the sequences and introducing gaps, if necessary, to achieve the maximum percent homology. Methods and computer programs for the alignment are well known in the art. It is understood that homology depends on a calculation of percent identity but may differ in value due to gaps and penalties introduced in the calculation.

[0574] By “homologs” as it applies to amino acid sequences is meant the corresponding sequence of other species having substantial identity to a second sequence of a second species.

[0575] “Analogs” is meant to include polypeptide variants which differ by one or more amino acid alterations, e.g., substitutions, additions, or deletions of amino acid residues that still maintain the properties of the parent polypeptide.

[0576] Sequence tags or amino acids, such as one or more lysines, can be added to the peptide sequences of the disclosure (e.g., at the N-terminal or C-terminal ends). Sequence tags can be used for peptide purification or localization. Lysines can be used to increase peptide solubility or to allow for biotinylation. Alternatively, amino acid residues located at the carboxy and amino terminal regions of the amino acid sequence of a peptide or protein may optionally be deleted providing for truncated sequences. Certain amino acids (e.g., C-terminal or N-terminal residues) may alternatively be deleted depending on the use of the sequence, as for example, expression of the sequence as part of a larger sequence which is soluble or linked to a solid support.

[0577] “Substitutional variants” when referring to proteins are those that have at least one amino acid residue in a native or starting sequence removed and a different amino acid inserted in its place at the same position. The substitutions may be single, where only one amino acid in the molecule has been substituted, or they may be multiple, where two or more amino acids have been substituted in the same molecule.

[0578] As used herein the term “conservative amino acid substitution” refers to the substitution of an amino acid that is normally present in the sequence with a different amino acid of similar size, charge, or polarity. Examples of conservative substitutions include the substitution of a non-polar (hydrophobic) residue such as isoleucine, valine, and leucine for another non-polar residue. Likewise, examples of conservative substitutions include the substitution of one polar (hydrophilic) residue for another such as between arginine and lysine, between glutamine and asparagine, and between glycine and serine. Additionally, the substitution of a basic residue such as lysine, arginine, or histidine for another, or the substitution of one acidic residue such as aspartic acid or glutamic acid for another acidic residue are additional examples of conservative substitutions. Examples of non-conservative substitutions include the substitution of a non-polar (hydrophobic) amino acid residue such as isoleucine, valine, leucine, alanine, methionine for a polar (hydrophilic) residue such as cysteine, glutamine, glutamic acid or lysine and/or a polar residue for a non-polar residue.

[0579] “Insertional variants” when referring to proteins are those with one or more amino acids inserted immediately adjacent to an amino acid at a particular position in a native or starting sequence. “Immediately adjacent” to an amino acid means connected to either the alpha-carboxy or alpha-amino functional group of the amino acid.

[0580] “Deletional variants” when referring to proteins, are those with one or more amino acids in the native or starting amino acid sequence removed. Ordinarily, deletional variants will have one or more amino acids deleted in a particular region of the molecule.

[0581] As used herein, the term “derivative” is used synonymously with the term “variant” and refers to a molecule that has been modified or changed in any way relative to a reference molecule or starting molecule. In some embodiments, derivatives include native or starting proteins that have been modified with an organic proteinaceous or non-proteinaceous derivatizing agent, and post-translational modifications. Covalent modifications are traditionally introduced by reacting targeted amino acid residues of the protein with an organic derivatizing agent that is capable of reacting with selected side-chains or terminal residues, or by harnessing mechanisms of post-translational modifications that function in selected recombinant host cells. The resultant covalent derivatives are useful in programs directed at identifying residues important for biological activity, for immunoassays, or for the preparation of anti-protein antibodies for immunoaffinity purification of the recombinant glycoprotein. Such modifications are within the ordinary skill in the art and are performed without undue experimentation.

[0582] Certain post-translational modifications are the result of the action of recombinant host cells on the expressed polypeptide. Glutaminyl and asparaginyl residues are frequently post-translationally deamidated to the corresponding glutamyl and aspartyl residues. Alternatively, these residues are deamidated under mildly acidic conditions. Either form of these residues may be present in the proteins used in accordance with the present disclosure.

[0583] Other post-translational modifications include hydroxylation of proline and lysine, phosphorylation of hydroxyl groups of seryl or threonyl residues, methylation of the alpha-amino groups of lysine, arginine, and histidine side chains (T. E. Creighton, Proteins: Structure and Molecular Properties, W. H. Freeman & Co., San Francisco, pp. 79-86 (1983)).

[0584] “Features” when referring to proteins are defined as distinct amino acid sequence-based components of a molecule. Features of the proteins of the present disclosure include surface manifestations, local conformational shape, folds, loops, half-loops, domains, half-domains, sites, termini or any combination thereof.

[0585] As used herein when referring to proteins the term “surface manifestation” refers to a polypeptide-based component of a protein appearing on an outermost surface.

[0586] As used herein when referring to proteins the term “local conformational shape” means a polypeptide based structural manifestation of a protein which is located within a definable space of the protein.

[0587] As used herein when referring to proteins the term “fold” means the resultant conformation of an amino acid sequence upon energy minimization. A fold may occur at the secondary or tertiary level of the folding process. Examples of secondary level folds include beta sheets and alpha helices. Examples of tertiary folds include domains and regions formed due to aggregation or separation of energetic forces. Regions formed in this way include hydrophobic and hydrophilic pockets, and the like.

[0588] As used herein the term “turn” as it relates to protein conformation means a bend which alters the direction of the backbone of a peptide or polypeptide and may involve one, two, three or more amino acid residues.

[0589] As used herein when referring to proteins the term “loop” refers to a structural feature of a peptide or polypeptide which reverses the direction of the backbone of a peptide or polypeptide and comprises four or more amino acid residues. Oliva et al. have identified at least 5 classes of protein loops (J. Mol Biol 266 (4): 814-830; 1997).

[0590] As used herein when referring to proteins the term “half-loop” refers to a portion of an identified loop having at least half the number of amino acid residues as the loop from which it is derived. It is understood that loops may not always contain an even number of amino acid residues. Therefore, in those cases where a loop contains or is identified to comprise an odd number of amino acids, a half-loop of the odd-numbered loop will comprise the whole number portion or next whole number portion of the loop (number of amino acids of the loop/2+/−0.5 amino acids). For example, a loop identified as a 7-amino acid loop could produce half-loops of 3 amino acids or 4 amino acids (7/2=3.5+/−0.5 being 3 or 4).

[0591] As used herein when referring to proteins the term “domain” refers to a motif of a polypeptide having one or more identifiable structural or functional characteristics or properties (e.g., binding capacity, serving as a site for protein-protein interactions).

[0592] As used herein when referring to proteins the term “half-domain” means portion of an identified domain having at least half the number of amino acid residues as the domain from which it is derived. It is understood that domains may not always contain an even number of amino acid residues. Therefore, in those cases where a domain contains or is identified to comprise an odd number of amino acids, a half-domain of the odd-numbered domain will comprise the whole number portion or next whole number portion of the domain (number of amino acids of the domain/2+/−0.5 amino acids). For example, a domain identified as a 7-amino acid domain could produce half-domains of 3 amino acids or 4 amino acids (7/2=3.5+/−0.5 being 3 or 4). It is also understood that sub-domains may be identified within domains or half-domains, these subdomains possessing less than all of the structural or functional properties identified in the domains or half domains from which they were derived. It is also understood that the amino acids that comprise any of the domain types herein need not be contiguous along the backbone of the polypeptide (i.e., nonadjacent amino acids may fold structurally to produce a domain, half-domain or subdomain).

[0593] As used herein when referring to proteins the terms “site” as it pertains to amino acid based embodiments is used synonymous with “amino acid residue” and “amino acid side chain”. A site represents a position within a peptide or polypeptide that may be modified, manipulated, altered, derivatized or varied within the polypeptide based molecules of the present disclosure.

[0594] As used herein the terms “termini or terminus” when referring to proteins refers to an extremity of a peptide or polypeptide. Such extremity is not limited only to the first or final site of the peptide or polypeptide but may include additional amino acids in the terminal regions. The polypeptide based molecules of the present disclosure may be characterized as having both an N-terminus (terminated by an amino acid with a free amino group (NH2)) and a C-terminus (terminated by an amino acid with a free carboxyl group (COOH)). Proteins of the disclosure are in some cases made up of multiple polypeptide chains brought together by disulfide bonds or by non-covalent forces (multimers, oligomers). These sorts of proteins will have multiple N- and C-termini. Alternatively, the termini of the polypeptides may be modified such that they begin or end, as the case may be, with a non-polypeptide-based moiety such as an organic conjugate.

[0595] Once any of the features have been identified or defined as a component of a molecule of the disclosure, any of several manipulations and/or modifications of these features may be performed by moving, swapping, inverting, deleting, randomizing, or duplicating. Furthermore, it is understood that manipulation of features may result in the same outcome as a modification to the molecules of the disclosure. For example, a manipulation which involves deleting a domain would result in the alteration of the length of a molecule just as modification of a nucleic acid to encode less than a full-length molecule would.

[0596] Modifications and manipulations can be accomplished by methods known in the art such as site directed mutagenesis. The resulting modified molecules may then be tested for activity using in vitro or in vivo assays such as those described herein or any other suitable screening assay known in the art.

microRNA

[0597] microRNAs (or miRNA) are 19-25 nucleotide long noncoding RNAs that bind to the 3′ UTR. of nucleic acid molecules and down-regulate gene expression either by reducing nucleic acid molecule stability or by inhibiting translation. The polynucleotides of the disclosure may comprise one or more microRNA target sequences, microRNA sequences, or microRNA seeds. Such sequences may correspond to any known microRNA such as those taught in US Publication US2005/0261218 and US Publication US2005/0059005, the contents of which are incorporated herein by reference in their entirety. As a non-limiting embodiment, known microRNAs, their sequences and their binding site sequences in the human genome are listed below in Table 57.

[0598] A microRNA sequence comprises a “seed” region, i.e., a sequence in the region of positions 2-8 of the mature microRNA, which sequence has perfect Watson-Crick complementarity to the miRNA target sequence. A microRNA seed may comprise positions 2-8 or 2-7 of the mature microRNA. In some embodiments, a microRNA seed may comprise 7 nucleotides (e.g., nucleotides 2-8 of the mature microRNA), wherein the seed-complementary site in the corresponding miRNA target is flanked by an adenine (A) opposed to microRNA position 1. In some embodiments, a microRNA seed may comprise 6 nucleotides (e.g., nucleotides 2-7 of the mature microRNA), wherein the seed-complementary site in the corresponding miRNA target is flanked by an adenine (A) opposed to microRNA position 1. See for example, Grimson A, Farh K K, Johnston W K, Garrett-Engele P, Lim L P, Bartel D P; Mol Cell. 2007 Jul. 6; 27(1):91-105, The bases of the microRNA seed have complete complementarily with the target sequence. By engineering microRNA target sequences into the payloads of the disclosure one can target the molecule, provided the microRNA in question is available. This process will reduce the hazard of off target effects upon nucleic acid delivery.

[0599] Identification of microRNA, microRNA target regions, and their expression patterns and role in biology have been reported (Bonauer et al., Curr Drug Targets 2010 11:943-949; Anand and Cheresh Curr Opin Hematol 2011 18:171-176; Contreras and Rao Leukemia 2012 26:404-413 (2011 Dec. 20. doi: 10.1038/leu.2011.356); Bartel Cell 2009 136:215-233; Landgraf et al, Cell, 2007 129:1401-1414; Gentner and Naldini, Tissue Antigens. 2012 80:393-403 and all references therein; each of which is herein incorporated by reference in its entirety).

[0600] For example, if the polynucleotide is not intended to be delivered to the liver but ends up there, then miR-122, a microRNA abundant in liver, can inhibit the expression of the polynucleotide if one or multiple target sites of miR-122 are engineered into the polynucleotide. Introduction of one or multiple binding sites for different microRNA can be engineered to further decrease the longevity, stability, and protein translation of a polynucleotide.

[0601] As used herein, the term “microRNA. site” refers to a microRNA target site or a microRNA recognition site, or any nucleotide sequence to which a microRNA binds or associates. It should be understood that “binding” may follow traditional Watson-Crick hybridization rules or may reflect any stable association of the microRNA with the target sequence at or adjacent to the microRNA site.

[0602] Conversely, for the purposes of the polynucleotides of the present disclosure, microRNA binding sites can be engineered out of (i.e. removed from) sequences in which they naturally occur in order to increase protein expression in specific tissues. For example, miR-122 binding sites may be removed to improve protein expression in the liver.

[0603] Regulation of expression in multiple tissues can be accomplished through introduction or removal or one or several microRNA binding sites.

[0604] Specifically, microRNAs are known to be differentially expressed in immune cells (also called hematopoietic cells), such as antigen presenting cells (APCs) (e.g. dendritic cells and macrophages), macrophages, monocytes, B lymphocytes, T lymphocytes, granulocytes, natural killer cells, etc. Immune cell specific microRNAs are involved in immunogenicity, autoimmunity, the immune-response to infection, inflammation, as well as unwanted immune response after gene therapy and tissue/organ transplantation. Immune cells specific microRNAs also regulate many aspects of development, proliferation, differentiation and apoptosis of hematopoietic cells (immune cells). For example, miR-142 and miR-146 are exclusively expressed in the immune cells, particularly abundant in myeloid dendritic cells. Introducing the miR-142 binding site into the 3′-UTR of a polypeptide of the present disclosure can selectively suppress the gene expression in the antigen presenting cells through miR-142 mediated mRNA degradation, limiting antigen presentation in professional APCs (e.g. dendritic cells) and thereby preventing antigen-mediated immune response after gene delivery (see, Annoni A et al., blood, 2009, 114, 5152-5161, the content of which is herein incorporated by reference in its entirety.)

[0605] In some embodiments, microRNAs binding sites that are known to be expressed in immune cells, in particular, the antigen presenting cells, can be engineered into the polynucleotides to suppress the expression of the polynucleotide in APCs through microRNA mediated RNA degradation, subduing the antigen-mediated immune response, while the expression of the polynucleotide is maintained in non-immune cells where the immune cell specific microRNAs are not expressed.

[0606] Many microRNA expression studies have been conducted, and are described in the art, to profile the differential expression of microRNAs in various cancer cells/tissues and other diseases. Some microRNAs are abnormally over-expressed in certain cancer cells and others are under-expressed. For example, microRNAs are differentially expressed in cancer cells (WO2008/154098, US2013/0059015, US2013/0042333, WO2011/157294); cancer stem cells (US2012/0053224); pancreatic cancers and diseases (US2009/0131348, US2011/0171646, US2010/0286232, U.S. Pat. No. 8,389,210); asthma and inflammation (U.S. Pat. No. 8,415,096); prostate cancer (US2013/0053264); hepatocellular carcinoma (WO2012/151212, US2012/0329672, WO2008/054828, U.S. Pat. No. 8,252,538); lung cancer cells (WO2011/076143, WO2013/033640, WO2009/070653, US2010/0323357); cutaneous T cell lymphoma (WO2013/011378); colorectal cancer cells (WO2011/0281756, WO2011/076142); cancer positive lymph nodes (WO2009/100430; US2009/0263803); nasopharyngeal carcinoma (EP2112235); chronic obstructive pulmonary disease (US2012/0264626, US2013/0053263); thyroid cancer (WO2013/066678); ovarian cancer cells (US2012/0309645, WO2011/095623); breast cancer cells (WO2008/154098, WO2007/081740, US2012/0214699), leukemia and lymphoma (WO2008/073915; US2009/0092974, US2012/0316081, US2012/0283310, WO2010/018563, the content of each of which is incorporated herein by reference in their entirety).

TABLE 57
microRNA Sequences

| | | | | miR | |
|---|---|---|---|---|---|
| | | miR | | BS | |
| microRNA | | SEQ | | SEQ | Types of Tissues |
| name | miR SEQ | ID | miR BS SEQ | ID | and/or Cells |
| hsa-miR- | CCGGUUCCAGUCC | 28586 | CUCCAGGGACUGGA | 30628 | A colorectal |
| 6070 | CUGGAG | | ACCGG | | microRNAome |
| hsa-miR- | UGCUCAGGUUGC | 28587 | UCCCAGCUGUGCAA | 30629 | Abnormal skin |
| 3934-3p | ACAGCUGGGA | | CCUGAGCA | | (psoriasis) |
| hsa-miR- | UCAGGUGUGGAA | 28588 | CUGCCUCAGUUUCC | 30630 | Abnormal skin |
| 3934-5p | ACUGAGGCAG | | ACACCUGA | | (psoriasis) |
| hsa-miR- | CAAAACCGCGAUU | 28589 | UGCAAGAGUAAUCG | 30631 | Abnormal skin |
| 548ay-3p | ACUCUUGCA | | CGGUUUUG | | (psoriasis) |
| hsa-miR- | AAAAGUAAUUGU | 28590 | GCAAAAACCACAAU | 30632 | Abnormal skin |
| 548ay-5p | GGUUUUUGC | | UACUUUU | | (psoriasis) |
| hsa-miR- | AAAAACUGCAAU | 28591 | GCAAAAGUGAUUGC | 30633 | Abnormal skin |
| 548az-3p | CACUUUUGC | | AGUUUUU | | (psoriasis) |
| hsa-miR- | CAAAAGUGAUUG | 28592 | GCAAAAACCACAAU | 30634 | Abnormal skin |
| 548az-5p | UGGUUUUUGC | | CACUUUUG | | (psoriasis) |
| hsa-miR- | AGCAGUGUUUGU | 28593 | UGUGGGCAAAACAA | 30635 | Abnormal skin |
| 6499-3p | UUUGCCCACA | | ACACUGCU | | (psoriasis) |
| hsa-miR- | UCGGGCGCAAGA | 28594 | ACUGCAGUGCUCUU | 30636 | Abnormal skin |
| 6499-5p | GCACUGCAGU | | GCGCCCGA | | (psoriasis) |
| hsa-miR- | ACACUUGUUGGG | 28595 | GCAGGUCAUCCCAA | 30637 | Abnormal skin |
| 6500-3p | AUGACCUGC | | CAAGUGU | | (psoriasis) |
| hsa-miR- | AGGAGCUAUCCAC | 28596 | GGACACCUGGAGUG | 30638 | Abnormal skin |
| 6500-5p | UCCAGGUGUCC | | GAUAGCUCCU | | (psoriasis) |
| hsa-miR- | CCAGAGCAGCCUG | 28597 | ACUGUUACCGCAGG | 30639 | Abnormal skin |
| 6501-3p | CGGUAACAGU | | CUGCUCUGG | | (psoriasis) |
| hsa-miR- | AGUUGCCAGGGC | 28598 | ACCAAAGGCAGCCC | 30640 | Abnormal skin |
| 6501-5p | UGCCUUUGGU | | UGGCAACU | | (psoriasis) |
| hsa-miR- | UAGACCAUCUUUC | 28599 | AUACUCUAGAAAGA | 30641 | Abnormal skin |
| 6502-3p | UAGAGUAU | | UGGUCUA | | (psoriasis) |
| hsa-miR- | AGCUCUAGAAAG | 28600 | GGUCAACAAUCUUU | 30642 | Abnormal skin |
| 6502-5p | AUUGUUGACC | | CUAGAGCU | | (psoriasis) |
| hsa-miR- | GGGACUAGGAUG | 28601 | GGAGGUCUGCAUCC | 30643 | Abnormal skin |
| 6503-3p | CAGACCUCC | | UAGUCCC | | (psoriasis) |
| hsa-miR- | AGGUCUGCAUUC | 28602 | UCUGGGGAUUUGAA | 30644 | Abnormal skin |
| 6503-5p | AAAUCCCCAGA | | UGCAGACCU | | (psoriasis) |
| hsa-miR- | CAUUACAGCACAG | 28603 | AGAAUGGCUGUGCU | 30645 | Abnormal skin |
| 6504-3p | CCAUUCU | | GUAAUG | | (psoriasis) |
| hsa-miR- | UCUGGCUGUGCU | 28604 | CUGCAUUACAGCAC | 30646 | Abnormal skin |
| 6504-5p | GUAAUGCAG | | AGCCAGA | | (psoriasis) |
| hsa-miR- | UGACUUCUACCUC | 28605 | CUUUGGAAGAGGUA | 30647 | Abnormal skin |
| 6505-3p | UUCCAAAG | | GAAGUCA | | (psoriasis) |
| hsa-miR- | UUGGAAUAGGGG | 28606 | GCUGAGAUAUCCCC | 30648 | Abnormal skin |
| 6505-5p | AUAUCUCAGC | | UAUUCCAA | | (psoriasis) |
| hsa-miR- | UCGUAUCAGAGA | 28607 | GUGUCUGGAAUCUC | 30649 | Abnormal skin |
| 6506-3p | UUCCAGACAC | | UGAUACGA | | (psoriasis) |
| hsa-miR- | ACUGGGAUGUCA | 28608 | ACCAUAUUCAGUGA | 30650 | Abnormal skin |
| 6506-5p | CUGAAUAUGGU | | CAUCCCAGU | | (psoriasis) |
| hsa-miR- | CAAAGUCCUUCCU | 28609 | GGGAAAAAUAGGAA | 30651 | Abnormal skin |
| 6507-3p | AUUUUUCCC | | GGACUUUG | | (psoriasis) |
| hsa-miR- | GAAGAAUAGGAG | 28610 | ACAAAGUCCCUCCU | 30652 | Abnormal skin |
| 6507-5p | GGACUUUGU | | AUUCUUC | | (psoriasis) |
| hsa-miR- | UGGGCCAUGCAU | 28611 | AGUUCUAGAAAUGC | 30653 | Abnormal skin |
| 6508-3p | UUCUAGAACU | | AUGGCCCA | | (psoriasis) |
| hsa-miR- | UCUAGAAAUGCA | 28612 | GGUGGGUCAUGCAU | 30654 | Abnormal skin |
| 6508-5p | UGACCCACC | | UUCUAGA | | (psoriasis) |
| hsa-miR- | UUCCACUGCCACU | 28613 | AAAUUAGGUAGUGG | 30655 | Abnormal skin |
| 6509-3p | ACCUAAUUU | | CAGUGGAA | | (psoriasis) |
| hsa-miR- | AUUAGGUAGUGG | 28614 | GUUCCACUGCCACU | 30656 | Abnormal skin |
| 6509-5p | CAGUGGAAC | | ACCUAAU | | (psoriasis) |
| hsa-miR- | CACCGACUCUGUC | 28615 | CUGCAGGAGACAGA | 30657 | Abnormal skin |
| 6510-3p | UCCUGCAG | | GUCGGUG | | (psoriasis) |
| hsa-miR- | CAGCAGGGGAGA | 28616 | GACUCCUCUCUCUC | 30658 | Abnormal skin |
| 6510-5p | GAGAGGAGUC | | CCCUGCUG | | (psoriasis) |
| hsa-miR- | UUCCAGCCCUUCU | 28617 | CCUACCAUUAGAAG | 30659 | Abnormal skin |
| 6512-3p | AAUGGUAGG | | GGCUGGAA | | (psoriasis) |
| hsa-miR- | UACCAUUAGAAG | 28618 | UCUUCCAGCUCUUC | 30660 | Abnormal skin |
| 6512-5p | AGCUGGAAGA | | UAAUGGUA | | (psoriasis) |
| hsa-miR- | UCAAGUGUCAUC | 28619 | CUAGGGACAGAUGA | 30661 | Abnormal skin |
| 6513-3p | UGUCCCUAG | | CACUUGA | | (psoriasis) |
| hsa-miR- | UUUGGGAUUGAC | 28620 | AGACAUGUGGCGUC | 30662 | Abnormal skin |
| 6513-5p | GCCACAUGUCU | | AAUCCCAAA | | (psoriasis) |
| hsa-miR- | CUGCCUGUUCUUC | 28621 | CUGGAGUGGAAGAA | 30663 | Abnormal skin |
| 6514-3p | CACUCCAG | | CAGGCAG | | (psoriasis) |
| hsa-miR- | UAUGGAGUGGAC | 28622 | GCCAGCUGAAAGUC | 30664 | Abnormal skin |
| 6514-5p | UUUCAGCUGGC | | CACUCCAUA | | (psoriasis) |
| hsa-miR- | CCUCACCAUCCCU | 28623 | GCAGGCAGAAGGGA | 30665 | Abnormal skin |
| 6511a-3p | UCUGCCUGC | | UGGUGAGG | | (psoriasis) and |
| | | | | | epididymis |
| hsa-miR- | CAGGCAGAAGUG | 28624 | CCUGUCAGCCCCAC | 30666 | Abnormal skin |
| 6511a-5p | GGGCUGACAGG | | UUCUGCCUG | | (psoriasis) and |
| | | | | | epididymis |
| hsa-miR- | UCUCUUCAUCUAC | 28625 | CUGGGGGGUAGAUG | 30667 | Abnormal skin |
| 6515-3p | CCCCCAG | | AAGAGA | | (psoriasis) and |
| | | | | | epididymis |
| hsa-miR- | UUGGAGGGUGUG | 28626 | GAUGUCUUCCACAC | 30668 | Abnormal skin |
| 6515-5p | GAAGACAUC | | CCUCCAA | | (psoriasis) and |
| | | | | | epididymis |
| hsa-miR- | CUGCCAGCCCCGU | 28627 | UGCCCUGGAACGGG | 30669 | Acute Myeloid |
| 3972 | UCCAGGGCA | | GCUGGCAG | | Leukemia |
| hsa-miR- | ACAAAGUACAGC | 28628 | CUAAGGCUAAUGCU | 30670 | Acute Myeloid |
| 3973 | AUUAGCCUUAG | | GUACUUUGU | | Leukemia |
| hsa-miR- | AAAGGUCAUUGU | 28629 | GCAUUAACCUUACA | 30671 | Acute Myeloid |
| 3974 | AAGGUUAAUGC | | AUGACCUUU | | Leukemia |
| hsa-miR- | UGAGGCUAAUGC | 28630 | GUGAAGUAGUGCAU | 30672 | Acute Myeloid |
| 3975 | ACUACUUCAC | | UAGCCUCA | | Leukemia |
| hsa-miR- | UAUAGAGAGCAG | 28631 | ACAUUAAUCUUCCU | 30673 | Acute Myeloid |
| 3976 | GAAGAUUAAUGU | | GCUCUCUAUA | | Leukemia |
| hsa-miR- | GUGCUUCAUCGU | 28632 | UAAGGUUAAUUACG | 30674 | Acute Myeloid |
| 3977 | AAUUAACCUUA | | AUGAAGCAC | | Leukemia |
| hsa-miR- | GUGGAAAGCAUG | 28633 | ACACCCUGGAUGCA | 30675 | Acute Myeloid |
| 3978 | CAUCCAGGGUGU | | UGCUUUCCAC | | Leukemia |
| hsa-miR- | AGACACAUUUGG | 28634 | GGUUCCCUCUCCAA | 30676 | Adipocyte |
| 642a-3p | AGAGGGAACC | | AUGUGUCU | | |
| hsa-miR- | UUCCCUUUGUCAU | 28635 | AGGCAUAGGAUGAC | 30677 | Adipose, other |
| 204-5p | CCUAUGCCU | | AAAGGGAA | | tissues/cells, kidney |
| hsa-miR- | GCUGGGAAGGCA | 28636 | ACGUCCCUUUGCCU | 30678 | Adipose, other |
| 204-3p | AAGGGACGU | | UCCCAGC | | tissues/cells, |
| | | | | | Kidney |
| hsa-miR- | UACCACAGGGUA | 28637 | CCGUGGUUCUACCC | 30679 | Airway smooth |
| 140-3p | GAACCACGG | | UGUGGUA | | muscle |
| hsa-miR- | GGCUGGAGCGAG | 28638 | CACCACUGCACUCG | 30680 | B cells |
| 3135b | UGCAGUGGUG | | CUCCAGCC | | |
| hsa-miR- | CCAGGCUCUGCAG | 28639 | UCCCACUGCAGAGC | 30681 | B cells |
| 3155b | UGGGA | | CUGG | | |
| hsa-miR- | CUGGGAGGUGUG | 28640 | ACCACAAUAUCACA | 30682 | B cells |
| 3689c | AUAUUGUGGU | | CCUCCCAG | | |
| hsa-miR- | GGGAGGUGUGAU | 28641 | CGAGUGUGAGAUCA | 30683 | B cells |
| 3689d | CUCACACUCG | | CACCUCCC | | |
| hsa-miR- | UGUGAUAUCAUG | 28642 | UCCCAGGAACCAUG | 30684 | B cells |
| 3689e | GUUCCUGGGA | | AUAUCACA | | |
| hsa-miR- | UGUGAUAUCGUG | 28643 | UCCCAGGAAGCACG | 30685 | B cells |
| 3689f | CUUCCUGGGA | | AUAUCACA | | |
| hsa-miR- | GGUGGGCUUCCCG | 28644 | CCCUCCGGGAAGCC | 30686 | B cells |
| 4417 | GAGGG | | CACC | | |
| hsa-miR- | CACUGCAGGACUC | 28645 | CUGCUGAGUCCUGC | 30687 | B cells |
| 4418 | AGCAG | | AGUG | | |
| hsa-miR- | UGAGGGAGGAGA | 28646 | UGCAGUCUCCUCCC | 30688 | B cells |
| 1419a | CUGCA | | UCA | | |
| hsa-miR- | GAGGCUGAAGGA | 28647 | CCAUCUUCCUUCAG | 30689 | B cells |
| 4419b | AGAUGG | | CCUC | | |
| hsa-miR- | GUCACUGAUGUC | 28648 | CUCAGCUACAGACA | 30690 | B cells |
| 4420 | UGUAGCUGAG | | UCAGUGAC | | |
| hsa-miR- | ACCUGUCUGUGG | 28649 | UAGCUCCUUUCCAC | 30691 | B cells |
| 4421 | AAAGGAGCUA | | AGACAGGU | | |
| hsa-miR- | AGAGUUAACUCA | 28650 | UAGUCCAUUUUGAG | 30692 | B cells |
| 4424 | AAAUGGACUA | | UUAACUCU | | |
| hsa-miR- | UGUUGGGAUUCA | 28651 | AUGGUCCUGCUGAA | 30693 | B cells |
| 4425 | GCAGGACCAU | | UCCCAACA | | |
| hsa-miR- | GAAGAUGGACGU | 28652 | AAAGUACGUCCAUC | 30694 | B cells |
| 4426 | ACUUU | | UUC | | |
| hsa-miR- | UCUGAAUAGAGU | 28653 | ACUCUUCAGACUCU | 30695 | B cells |
| 4427 | CUGAAGAGU | | AUUCAGA | | |
| hsa-miR- | CAAGGAGACGGG | 28654 | GCUCCAUGUUCCCG | 30696 | B cells |
| 4428 | AACAUGGAGC | | UCUCCUUG | | |
| hsa-miR- | AAAAGCUGGGCU | 28655 | CGCCUCUCAGCCCA | 30697 | B cells |
| 4429 | GAGAGGCG | | GCUUUU | | |
| hsa-miR- | AGGCUGGAGUGA | 28656 | CUCCGCUCACUCCA | 30698 | B cells |
| 4430 | GCGGAG | | GCCU | | |
| hsa-miR- | GCGACUCUGAAA | 28657 | ACCUUCUAGUUUUC | 30699 | B cells |
| 4431 | ACUAGAAGGU | | AGAGUCGC | | |
| hsa-miR- | AAAGACUCUGCA | 28658 | AGGCAUCUUGCAGA | 30700 | B cells |
| 4432 | AGAUGCCU | | GUCUUU | | |
| hsa-miR- | ACAGGAGUGGGG | 28659 | AUGUCCCACCCCCA | 30701 | B cells |
| 4433-3p | GUGGGACAU | | CUCCUGU | | |
| hsa-miR- | CGUCCCACCCCCC | 28660 | ACAGGAGUGGGGGG | 30702 | B cells |
| 4433-5p | ACUCCUGU | | UGGGACG | | |
| hsa-miR- | AGGAGAAGUAAA | 28661 | UUCUACUUUACUUC | 30703 | B cells |
| 4434 | GUAGAA | | UCCU | | |
| hsa-miR- | AUGGCCAGAGCUC | 28662 | CCUCUGUGUGAGCU | 30704 | B cells |
| 4435 | ACACAGAGG | | CUGGCCAU | | |
| hsa-miR- | UGGGCUCAGGGU | 28663 | AACCUUUGUACCCU | 30705 | B cells |
| 4437 | ACAAAGGUU | | GAGCCCA | | |
| hsa-miR- | CACAGGCUUAGA | 28664 | ACUGUCUUUUCUAA | 30706 | B cells |
| 4438 | AAAGACAGU | | GCCUGUG | | |
| hsa-miR- | GUGACUGAUACC | 28665 | AUGCCUCCAAGGUA | 30707 | B cells |
| 4439 | UUGGAGGCAU | | UCAGUCAC | | |
| hsa-miR- | UGUCGUGGGGCU | 28666 | CAAGCCAGCAAGCC | 30708 | B cells |
| 4440 | UGCUGGCUUG | | CCACGACA | | |
| hsa-miR- | ACAGGGAGGAGA | 28667 | UACAAUCUCCUCCC | 30709 | B cells |
| 4441 | UUGUA | | UGU | | |
| hsa-miR- | GCCGGACAAGAG | 28668 | CCUCCCUCUUGUCC | 30710 | B cells |
| 4442 | GGAGG | | GGC | | |
| hsa-miR- | UUGGAGGCGUGG | 28669 | AAAACCCACGCCUC | 30711 | B cells |
| 4443 | GUUUU | | CAA | | |
| hsa-miR- | CUCGAGUUGGAA | 28670 | CGCCUCUUCCAACU | 30712 | B cells |
| 4444 | GAGGCG | | CGAG | | |
| hsa-miR- | CACGGCAAAAGA | 28671 | UGGAUUGUUUCUUU | 30713 | B cells |
| 4445-3p | AACAAUCCA | | UGCCGUG | | |
| hsa-miR- | AGAUUGUUUCUU | 28672 | UGCACGGCAAAAGA | 30714 | B cells |
| 4445-5p | UUGCCGUGCA | | AACAAUCU | | |
| hsa-miR- | GGUGGGGGCUGU | 28673 | AAACAACAGCCCCC | 30715 | B cells |
| 4447 | UGUUU | | ACC | | |
| hsa-miR- | GGCUCCUUGGUCU | 28674 | UACCCCUAGACCAA | 30716 | B cells |
| 4448 | AGGGGUA | | GGAGCC | | |
| hsa-miR- | CGUCCCGGGGCUG | 28675 | UGCCUCGCGCAGCC | 30717 | B cells |
| 4449 | CGCGAGGCA | | CCGGGACG | | |
| hsa-miR- | UGGGGAUUUGGA | 28676 | UCACCACUUCUCCA | 30718 | B cells |
| 4450 | GAAGUGGUGA | | AAUCCCCA | | |
| hsa-miR- | UGGUAGAGCUGA | 28677 | UGUCCUCAGCUCUA | 30719 | B cells |
| 4451 | GGACA | | CCA | | |
| hsa-miR- | UUGAAUUCUUGG | 28678 | AUCACUUAAGGCCA | 30720 | B cells |
| 4452 | CCUUAAGUGAU | | AGAAUUCAA | | |
| hsa-miR- | GAGCUUGGUCUG | 28679 | AACCGCUACAGACC | 30721 | B cells |
| 4453 | UAGCGGUU | | AAGCUC | | |
| hsa-miR- | GGAUCCGAGUCAC | 28680 | UGGUGCCGUGACUC | 30722 | B cells |
| 4454 | GGCACCA | | GGAUCC | | |
| hsa-miR- | AGGGUGUGUGUG | 28681 | AAAAACACACACAC | 30723 | B cells |
| 4455 | UUUUU | | CCU | | |
| hsa-miR- | CCUGGUGGCUUCC | 28682 | AAAAGGAAGCCACC | 30724 | B cells |
| 4456 | UUUU | | AGG | | |
| hsa-miR- | UCACAAGGUAUU | 28683 | UACGCCAGUCAAUA | 30725 | B cells |
| 4457 | GACUGGCGUA | | CCUUGUGA | | |
| hsa-miR- | AGAGGUAGGUGU | 28684 | UUCUUCCACACCUA | 30726 | B cells |
| 4458 | GGAAGAA | | CCUCU | | |
| hsa-miR- | CCAGGAGGCGGA | 28685 | CUCCACCUCCUCCG | 30727 | B cells |
| 4459 | GGAGGUGGAG | | CCUCCUGG | | |
| hsa-miR- | AUAGUGGUUGUG | 28686 | AAGGUAAAUUCACA | 30728 | B cells |
| 4460 | AAUUUACCUU | | ACCACUAU | | |
| hsa-miR- | GAUUGAGACUAG | 28687 | GCCUAGCCCUACUA | 30729 | B cells |
| 4461 | UAGGGCUAGGC | | GUCUCAAUC | | |
| hsa-miR- | UGACACGGAGGG | 28688 | UUCCCAAGCCACCC | 30730 | B cells |
| 4462 | UGGCUUGGGAA | | UCCGUGUCA | | |
| hsa-miR- | GAGACUGGGGUG | 28689 | GGCCCCACCCCAGU | 30731 | B cells |
| 4463 | GGGCC | | CUC | | |
| hsa-miR- | AAGGUUUGGAUA | 28690 | UAUUGCAUCUAUCC | 30732 | B cells |
| 4464 | GAUGCAAUA | | AAACCUU | | |
| hsa-miR- | CUCAAGUAGUCU | 28691 | UCCCCUGGUCAGAC | 30733 | B cells |
| 4465 | GACCAGGGGA | | UACUUGAG | | |
| hsa-miR- | GGGUGCGGGCCG | 28692 | CCCCGCCGGCCCGC | 30734 | B cells |
| 4466 | GCGGGG | | ACCC | | |
| hsa-miR- | AGAGCAGAAGGA | 28693 | AUCUCAUCCUUCUG | 30735 | B cells |
| 4468 | UGAGAU | | CUCU | | |
| hsa-miR- | UGGCAAACGUGG | 28694 | UCUCGGCUUCCACG | 30736 | B cells |
| 4470 | AAGCCGAGA | | UUUGCCA | | |
| hsa-miR- | GGUGGGGGGUGU | 28695 | AAAACAACACCCCC | 30737 | B cells |
| 4472 | UGUUUU | | CACC | | |
| hsa-miR- | CUAGUGCUCUCCG | 28696 | UACUUGUAACGGAG | 30738 | B cells |
| 4473 | UUACAAGUA | | AGCACUAG | | |
| hsa-miR- | CAAGGGACCAAGC | 28697 | AUAAUGAAUGCUUG | 30739 | B cells |
| 4475 | AUUCAUUAU | | GUCCCUUG | | |
| hsa-miR- | CAGGAAGGAUUU | 28698 | GCCUGUCCCUAAAU | 30740 | B cells |
| 4476 | AGGGACAGGC | | CCUUCCUG | | |
| hsa-miR- | CUAUUAAGGACA | 28699 | GAAUCACAAAUGUC | 30741 | B cells |
| 4477a | UUUGUGAUUC | | CUUAAUAG | | |
| hsa-miR- | AUUAAGGACAUU | 28700 | AUCAAUCACAAAUG | 30742 | B cells |
| 4477b | UGUGAUUGAU | | UCCUUAAU | | |
| hsa-miR- | GAGGCUGAGCUG | 28701 | CUCCUCAGCUCAGC | 30743 | B cells |
| 4478 | AGGAG | | CUC | | |
| hsa-miR- | CGCGCGGCCGUGC | 28702 | CUGCUCCGAGCACG | 30744 | B cells |
| 4479 | UCGGAGCAG | | GCCGCGCG | | |
| hsa-miR- | AGCCAAGUGGAA | 28703 | UAAAGUAACUUCCA | 30745 | B cells |
| 4480 | GUUACUUUA | | CUUGGCU | | |
| hsa-miR- | GGAGUGGGCUGG | 28704 | AACCACCAGCCCAC | 30746 | B cells |
| 1481 | UGGUU | | UCC | | |
| hsa-miR- | UUUCUAUUUCUC | 28705 | GAGCCCCACUGAGA | 30747 | B cells |
| 4482-3p | AGUGGGGCUC | | AAUAGAAA | | |
| hsa-miR- | AACCCAGUGGGCU | 28706 | CAUUUCCAUAGCCC | 30748 | B cells |
| 4482-5p | AUGGAAAUG | | ACUGGGUU | | |
| hsa-miR- | GGGGUGGUCUGU | 28707 | CAACAACAGACCAC | 30749 | B cells |
| 4483 | UGUUG | | CCC | | |
| hsa-miR- | AAAAGGCGGGAG | 28708 | UGGGGCUUCUCCCG | 30750 | B cells |
| 4484 | AAGCCCCA | | CCUUUU | | |
| hsa-miR- | UAACGGCCGCGGU | 28709 | UUAGGGUACCGCGG | 30751 | B cells |
| 4485 | ACCCUAA | | CCGUUA | | |
| hsa-miR- | GCUGGGCGAGGC | 28710 | UGCCAGCCUCGCCC | 30752 | B cells |
| 4486 | UGGCA | | AGC | | |
| hsa-miR- | AGAGCUGGCUGA | 28711 | CUGCCCUUCAGCCA | 30753 | B cells |
| 4487 | AGGGCAG | | GCUCU | | |
| hsa-miR- | AGGGGGGGGCU | 28712 | CGCCGGAGCCCGCC | 30754 | B cells |
| 4488 | CCGGCG | | CCCU | | |
| hsa-miR- | UCUGGUAAGAGA | 28713 | UAUGCCCAAAUCUC | 30755 | B cells |
| 4490 | UUUGGGCAUA | | UUACCAGA | | |
| hsa-miR- | AAUGUGGACUGG | 28714 | UUUGGUCACACCAG | 30756 | B cells |
| 4491 | UGUGACCAAA | | UCCACAUU | | |
| hsa-miR- | GGGGCUGGGCGC | 28715 | GGCGCGCGCCCAGC | 30757 | B cells |
| 4492 | GCGCC | | CCC | | |
| hsa-miR- | AGAAGGCCUUUCC | 28716 | ACAGAGAUGGAAAG | 30758 | B cells |
| 4493 | AUCUCUGU | | GCCUUCU | | |
| hsa-miR- | CCAGACUGUGGCU | 28717 | CCUCUGGUCAGCCA | 30759 | B cells |
| 4494 | GACCAGAGG | | CAGUCUGG | | |
| hsa-miR- | AAUGUAAACAGG | 28718 | AGCAAAAAGCCUGU | 30760 | B cells |
| 4495 | CUUUUUGCU | | UUACAUU | | |
| hsa-miR- | GAGGAAACUGAA | 28719 | CCCUCUCAGCUUCA | 30761 | B cells |
| 4496 | GCUGAGAGGG | | GUUUCCUC | | |
| hsa-miR- | CUCCGGGACGGCU | 28720 | GCCCAGCCGUCCCG | 30762 | B cells |
| 4497 | GGGC | | GAG | | |
| hsa-miR- | UGGGCUGGCAGG | 28721 | CAGCACUUGCCCUG | 30763 | B cells |
| 4498 | GCAAGUGCUG | | CCAGCCCA | | |
| hsa-miR- | AAGACUGAGAGG | 28722 | UCCCUCCUCUCAGU | 30764 | B cells |
| 4499 | AGGGA | | CUU | | |
| hsa-miR- | UGAGGUAGUAGU | 28723 | AAGAAACUACUACC | 30765 | B cells |
| 4500 | UUCUU | | UCA | | |
| hsa-miR- | UAUGUGACCUCG | 28724 | UGAUUCAUCCGAGG | 30766 | B cells |
| 4501 | GAUGAAUCA | | UCACAUA | | |
| hsa-miR- | GCUGAUGAUGAU | 28725 | CUUCAGCACCAUCA | 30767 | B cells |
| 4502 | GGUGCUGAAG | | UCAUCAGC | | |
| hsa-miR- | UUUAAGCAGGAA | 28726 | UAAAUUCUAUUUCC | 30768 | B cells |
| 4503 | AUAGAAUUUA | | UGCUUAAA | | |
| hsa-miR- | UGUGACAAUAGA | 28727 | CAUGUUCAUCUCUA | 30769 | B cells |
| 4504 | GAUGAACAUG | | UUGUCACA | | |
| hsa-miR- | AGGCUGGGCUGG | 28728 | UCCGUCCCAGCCCA | 30770 | B cells |
| 4505 | GACGGA | | GCCU | | |
| hsa-miR- | AAAUGGGUGGUC | 28729 | UUGCCUCAGACCAC | 30771 | B cells |
| 4506 | UGAGGCAA | | CCAUUU | | |
| hsa-miR- | CUGGGUUGGGCU | 28730 | CCCAGCCCAGCCCA | 30772 | B cells |
| 4507 | GGGCUGGG | | ACCCAG | | |
| hsa-miR- | GCGGGGCUGGGC | 28731 | CGCGCGCCCAGCCC | 30773 | B cells |
| 4508 | GCGCG | | CGC | | |
| hsa-miR- | ACUAAAGGAUAU | 28732 | AAAACCUUCUAUAU | 30774 | B cells |
| 4509 | AGAAGGUUUU | | CCUUUAGU | | |
| hsa-miR- | UGAGGGAGUAGG | 28733 | AACCAUACAUCCUA | 30775 | B cells |
| 4510 | AUGUAUGGUU | | CUCCCUCA | | |
| hsa-miR- | GAAGAACUGUUG | 28734 | AGGGCAAAUGCAAC | 30776 | B cells |
| 4511 | CAUUUGCCCU | | AGUUCUUC | | |
| hsa-miR- | CAGGGCCUCACUG | 28735 | UGGGCGAUACAGUG | 30777 | B cells |
| 4512 | UAUCGCCCA | | AGGCCCUG | | |
| hsa-miR- | AGACUGACGGCU | 28736 | AUGGGCCUCCAGCC | 30778 | B cells |
| 4513 | GGAGGCCCAU | | GUCAGUCU | | |
| hsa-miR- | ACAGGCAGGAUU | 28737 | UUCCCCAAUCCUGC | 30779 | B cells |
| 4514 | GGGGAA | | CUGU | | |
| hsa-miR- | AGGACUGGACUCC | 28738 | GGGCUGCCGGGAGU | 30780 | B cells |
| 4515 | CGGCAGCCC | | CCAGUCCU | | |
| hsa-miR- | GGGAGAAGGGUC | 28739 | GCCCCGACCCUUCU | 30781 | B cells |
| 4516 | GGGGC | | CCC | | |
| hsa-miR- | AAAUAUGAUGAA | 28740 | CUCAGCUGUGAGUU | 30782 | B cells |
| 4517 | ACUCACAGCUGAG | | UCAUCAUAUUU | | |
| hsa-miR- | GCUCAGGGAUGA | 28741 | UCUCAGCACAGUUA | 30783 | B cells |
| 4518 | UAACUGUGCUGA | | UCAUCCCUGAGC | | |
| | GA | | | | |
| hsa-miR- | CAGCAGUGCGCAG | 28742 | CAGCCCUGCGCACU | 30784 | B cells |
| 4519 | GGCUG | | GCUG | | |
| hsa-miR- | GCUAAGGAAGUC | 28743 | CUGAGCACAGGACU | 30785 | B cells |
| 4521 | CUGUGCUCAG | | UCCUUAGC | | |
| hsa-miR- | UGACUCUGCCUGU | 28744 | ACCGGCCUACAGGC | 30786 | B cells |
| 4522 | AGGCCGGU | | AGAGUCA | | |
| hsa-miR- | GACCGAGAGGGCC | 28745 | ACAGCCGAGGCCCU | 30787 | B cells |
| 4523 | UCGGCUGU | | CUCGGUC | | |
| hsa-miR- | GGGGGGAUGUGC | 28746 | AACCAGCAUGCACA | 30788 | B cells |
| 4525 | AUGCUGGUU | | UCCCCCC | | |
| hsa-miR- | UGGUCUGCAAAG | 28747 | ACAGUCAUCUCUUU | 30789 | B cells |
| 4527 | AGAUGACUGU | | GCAGACCA | | |
| hsa-miR- | UCAUUAUAUGUA | 28748 | GUCCAGAUCAUACA | 30790 | B cells |
| 4528 | UGAUCUGGAC | | UAUAAUGA | | |
| hsa-miR- | CCCAGCAGGACGG | 28749 | CGCUCCCGUCCUGC | 30791 | B cells |
| 4530 | GAGCG | | UGGG | | |
| hsa-miR- | AUGGAGAAGGCU | 28750 | UCAGAAGCCUUCUC | 30792 | B cells |
| 4531 | UCUGA | | CAU | | |
| hsa-miR- | CCCCGGGGAGCCC | 28751 | CGCCGGGCUCCCCG | 30793 | B cells |
| 4532 | GGCG | | GGG | | |
| hsa-miR- | UGGAAGGAGGUU | 28752 | AGCGUCCGGCAACC | 30794 | B cells |
| 4533 | GCCGGACGCU | | UCCUUCCA | | |
| hsa-miR- | GGAUGGAGGAGG | 28753 | AGACCCCUCCUCCA | 30795 | B cells |
| 4534 | GGUCU | | UCC | | |
| hsa-miR- | GUGGACCUGGCU | 28754 | GUCCCAGCCAGGUC | 30796 | B cells |
| 4535 | GGGAC | | CAC | | |
| hsa-miR- | UCGUGCAUAUAU | 28755 | AUGUGGUAGAUAUA | 30797 | B cells |
| 4536-3p | CUACCACAU | | UGCACGA | | |
| hsa-miR- | UGUGGUAGAUAU | 28756 | AUCGUGCAUAUAUC | 30798 | B cells |
| 4536-5p | AUGCACGAU | | UACCACA | | |
| hsa-miR- | UGAGCCGAGCUG | 28757 | CAGCUAAGCUCAGC | 30799 | B cells |
| 4537 | AGCUUAGCUG | | UCGGCUCA | | |
| hsa-miR- | GAGCUUGGAUGA | 28758 | UCAGCCCAGCUCAU | 30800 | B cells |
| 4538 | GCUGGGCUGA | | CCAAGCUC | | |
| hsa-miR- | GCUGAACUGGGC | 28759 | GCCCAGCUCAGCCC | 30801 | B cells |
| 4539 | UGAGCUGGGC | | AGUUCAGC | | |
| hsa-miR- | UUAGUCCUGCCUG | 28760 | UAAACCUACAGGCA | 30802 | B cells |
| 4540 | UAGGUUUA | | GGACUAA | | |
| hsa-miR- | UUGGGCUGGGCU | 28761 | CCCAACCCAGCCCA | 30803 | B-cells |
| 1587 | GGGUUGGG | | GCCCAA | | |
| hsa-miR- | UAGGAUGGGGGU | 28762 | CACCUCUCACCCCC | 30804 | B-cells |
| 2392 | GAGAGGUG | | AUCCUA | | |
| hsa-miR- | AAAAGUAAUUGU | 28763 | AGCAAAAUCCACAA | 30805 | B-cells |
| 548ab | GGAUUUUGCU | | UUACUUUU | | |
| hsa-miR- | CAAAAACCGGCAA | 28764 | CAAAAGUAAUUGCC | 30806 | B-cells |
| 548ac | UUACUUUUG | | GGUUUUUG | | |
| hsa-miR- | GAAAACGACAAU | 28765 | UGCAAAAGUCAUUG | 30807 | B-cells |
| 548ad | GACUUUUGCA | | UCGUUUUC | | |
| hsa-miR- | CAAAAACUGCAA | 28766 | UGAAAGUAAUUGCA | 30808 | B-cells |
| 548ae | UUACUUUCA | | GUUUUUG | | |
| hsa-miR- | AAAGGUAAUUGU | 28767 | GCAGAAACCACAAU | 30809 | B-cells |
| 548ag | GGUUUCUGC | | UACCUUU | | |
| hsa-miR- | CAAAAACUGCAG | 28768 | GCAAAAGUAACUGC | 30810 | B-cells |
| 548ah-3p | UUACUUUUGC | | AGUUUUUG | | |
| hsa-miR- | AAAAGUGAUUGC | 28769 | CAAACACUGCAAUC | 30811 | B-cells |
| 548ah-5p | AGUGUUUG | | ACUUUU | | |
| hsa-miR- | AAAGGUAAUUGC | 28770 | GGGAAAAACUGCAA | 30812 | B-cells |
| 548ai | AGUUUUUCCC | | UUACCUUU | | |
| hsa-miR- | UAAAAACUGCAA | 28771 | UAAAAGUAAUUGCA | 30813 | B-cells |
| 548aj-3p | UUACUUUUA | | GUUUUUA | | |
| hsa-miR- | UGCAAAAGUAAU | 28772 | CAAAAACUGCAAUU | 30814 | B-cells |
| 548aj-5p | UGCAGUUUUUG | | ACUUUUGCA | | |
| hsa-miR- | AAAAGUAACUGC | 28773 | UCAAAAACCGCAGU | 30815 | B-cells |
| 548ak | GGUUUUUGA | | UACUUUU | | |
| hsa-miR- | AACGGCAAUGAC | 28774 | UGGUACAAAAGUCA | 30816 | B-cells |
| 548al | UUUUGUACCA | | UUGCCGUU | | |
| hsa-miR- | CAAAAACUGCAG | 28775 | ACAAAAGUAACUGC | 30817 | B-cells |
| 548am-3p | UUACUUUUGU | | AGUUUUUG | | |
| hsa-miR- | AAAAGUAAUUGC | 28776 | GGCAAAAACCGCAA | 30818 | B-cells |
| 548am-5p | GGUUUUUGCC | | UUACUUUU | | |
| hsa-miR- | AAAAGGCAUUGU | 28777 | CAAAAACCACAAUG | 30819 | B-cells |
| 548an | GGUUUUUG | | CCUUUU | | |
| hsa-miR- | CGGCCCGGGCUGC | 28778 | AGGAACAGCAGCAG | 30820 | Blood |
| 1538 | UGCUGUUCCU | | CCCGGGCCG | | |
| hsa-miR- | AGAGGUAUAGGG | 28779 | UUCCCAUGCCCUAU | 30821 | Blood |
| 202-3p | CAUGGGAA | | ACCUCU | | |
| hsa-miR- | UUCCUAUGCAUA | 28780 | CAAAGAAGUAUAUG | 30822 | Blood |
| 202-5p | UACUUCUUUG | | CAUAGGAA | | |
| hsa-miR- | AUCAUAGAGGAA | 28781 | AACAUGGAUUUUCC | 30823 | Blood |
| 376b-3p | AAUCCAUGUU | | UCUAUGAU | | |
| hsa-miR- | CGUGGAUAUUCC | 28782 | AAACAUAGAAGGAA | 30824 | Blood |
| 376b-5p | UUCUAUGUUU | | UAUCCACG | | |
| hsa-miR- | UGAGUAUUACAU | 28783 | GAGAUUGGCCAUGU | 30825 | Blood |
| 496 | GGCCAAUCUC | | AAUACUCA | | |
| hsa-miR- | CUUCCGCCCCGCC | 28784 | CGACGCCCGGCGGG | 30826 | Blood |
| 718 | GGGCGUCG | | GCGGAAG | | |
| hsa-miR- | UAGCUUAUCAGA | 28785 | UCAACAUCAGUCUG | 30827 | Blood ( myeloid |
| 21-5p | CUGAUGUUGA | | AUAAGCUA | | cells), liver, |
| | | | | | endothelial cells |
| hsa-miR- | CACUAGAUUGUG | 28786 | UCCAGGAGCUCACA | 30828 | Blood (immune |
| 28-3p | AGCUCCUGGA | | AUCUAGUG | | cells) |
| hsa-miR- | AAGGAGCUCACA | 28787 | CUCAAUAGACUGUG | 30829 | Blood (immune |
| 28-5p | GUCUAUUGAG | | AGCUCCUU | | cells) |
| hsa-miR- | UACGUCAUCGUU | 28788 | UGACGAUGACAACG | 30830 | Blood |
| 598 | GUCAUCGUCA | | AUGACGUA | | (lymphocytes) |
| hsa-miR- | CACGCUCAUGCAC | 28789 | UGUGGGUGUGUGCA | 30831 | Blood (myeloid |
| 574-3p | ACACCCACA | | UGAGCGUG | | cells) |
| hsa-miR- | CAACACCAGUCGA | 28790 | ACAGCCCAUCGACU | 30832 | Blood (myeloid |
| 21-3p | UGGGCUGU | | GGUGUUG | | cells), glioblast, |
| | | | | | liver, vascular |
| | | | | | endothelial cells |
| hsa-miR- | UUCACCACCUUCU | 28791 | GCUGGGUGGAGAAG | 30833 | Blood (myeloid), |
| 197-3p | CCACCCAGC | | GUGGUGAA | | other tissues/cells |
| hsa-miR- | CGGGUAGAGAGG | 28792 | CCUCCCACUGCCCU | 30834 | Blood (myeloid), |
| 197-5p | GCAGUGGGAGG | | CUCUACCCG | | other tissues/cells |
| hsa-miR- | AAUCCUUGCUACC | 28793 | ACCCAGGUAGCAAG | 30835 | Blood (plasma) |
| 500b | UGGGU | | GAUU | | |
| hsa-miR- | CAAUUUAGUGUG | 28794 | AAAUAUCACACACA | 30836 | Blood and glia |
| 32-3p | UGUGAUAUUU | | CUAAAUUG | | |
| hsa-miR- | UAUUGCACAUUA | 28795 | UGCAACUUAGUAAU | 30837 | Blood and glia |
| 32-5p | CUAAGUUGCA | | GUGCAAUA | | |
| hsa-miR- | CCUAUUCUUGAU | 28796 | GAAACAAGUAAUCA | 30838 | Blood and other |
| 26a-2-3p | UACUUGUUUC | | AGAAUAGG | | tissues |
| hsa-miR- | UUCAAGUAAUCC | 28797 | AGCCUAUCCUGGAU | 30839 | Blood and other |
| 26a-5p | AGGAUAGGCU | | UACUUGAA | | tissues |
| hsa-miR- | CCAGUUACCGCUU | 28798 | GCGGUAGCGGAAGC | 30840 | Blood mononuclear |
| 935 | CCGCUACCGC | | GGUAACUGG | | cells |
| hsa-miR- | GAUUUCAGUGGA | 28799 | GAACUUCACUCCAC | 30841 | Blood(plasma) |
| 205-3p | GUGAAGUUC | | UGAAAUC | | |
| hsa-miR- | UCCUUCAUUCCAC | 28800 | CAGACUCCGGUGGA | 30842 | Blood(plasma) |
| 205-5p | CGGAGUCUG | | AUGAAGGA | | |
| hsa-miR- | AAAAUGGUGCCC | 28801 | UGUAGUCACUAGGG | 30843 | Blood(plasma), |
| 224-3p | UAGUGACUACA | | CACCAUUUU | | ovary |
| hsa-miR- | CAAGUCACUAGU | 28802 | AACGGAACCACUAG | 30844 | Blood(plasma) |
| 224-5p | GGUUCCGUU | | UGACUUG | | ovary |
| hsa-miR- | CCAGUAUUAACU | 28803 | UCAGCAGCACAGUU | 30845 | Blood, embryonic |
| 16-1-3p | GUGCUGCUGA | | AAUACUGG | | stem cells, |
| | | | | | hematopoietic |
| | | | | | tissues (spleen) |
| hsa-miR- | UCCCCCAGGUGUG | 28804 | AAAUCAGAAUCACA | 30846 | Blood, endothelial |
| 361-3p | AUUCUGAUUU | | CCUGGGGGA | | cells |
| hsa-miR- | AAAAGCUGGGUU | 28805 | UCGCCCUCUCAACC | 30847 | Blood, heart |
| 320a | GAGAGGGCGA | | CAGCUUUU | | (myocardial) |
| hsa-miR- | UGGACGGAGAAC | 28806 | ACCCUUAUCAGUUC | 30848 | Blood, tongue, |
| 184 | UGAUAAGGGU | | UCCGUCCA | | pancreas (islet) |
| hsa-miR- | UGGUGGGCCGCA | 28807 | GCACAUGUUCUGCG | 30849 | Bone marrow |
| 654-5p | GAACAUGUGC | | GCCCACCA | | |
| hsa-miR- | AGUGCCUGCUAU | 28808 | UGCCUGGCACAUAG | 30850 | Brain |
| 1271-3p | GUGCCAGGCA | | CAGGCACU | | |
| hsa-miR- | CUUGGCACCUAGC | 28809 | UGAGUGCUUGCUAG | 30851 | Brain |
| 1271-5p | AAGCACUCA | | GUGCCAAG | | |
| hsa-miR- | UUAUUGCUUAAG | 28810 | CUACGCGUAUUCUU | 30852 | Brain |
| 137 | AAUACGCGUAG | | AAGCAAUAA | | |
| hsa-miR- | UUGCAUAGUCAC | 28811 | GAUCACUUUUGUGA | 30853 | Brain |
| 153 | AAAAGUGAUC | | CUAUGCAA | | |
| hsa-miR- | GUGAAUUACCGA | 28812 | UUAUGGCCCUUCGG | 30854 | Brain |
| 183-3p | AGGGCCAUAA | | UAAUUCAC | | |
| hsa-miR- | UAUGGCACUGGU | 28813 | AGUGAAUUCUACCA | 30855 | Brain |
| 183-5p | AGAAUUCACU | | GUGCCAUA | | |
| hsa-miR- | UGAUAUGUUUGA | 28814 | ACCUAAUAUAUCAA | 30856 | Brain |
| 190a | UAUAUUAGGU | | ACAUAUCA | | |
| hsa-miR- | UGAUAUGUUUGA | 28815 | AACCCAAUAUCAAA | 30857 | Brain |
| 190b | UAUUGGGUU | | CAUAUCA | | |
| hsa-miR- | AGCAGGUGCGGG | 28816 | CGCCGCCCCGCACC | 30858 | Brain |
| 3665 | GCGGCG | | UGCU | | |
| hsa-miR- | CAGUGCAAGUGU | 28817 | UCGGCAUCUACACU | 30859 | Brain |
| 3666 | AGAUGCCGA | | UGCACUG | | |
| hsa-miR- | UAUGUAAUAUGG | 28818 | AAGAUGUGGACCAU | 30860 | Brain |
| 380-3p | UCCACAUCUU | | AUUACAUA | | |
| hsa-miR- | AAUAUAACACAG | 28819 | ACAGGCCAUCUGUG | 30861 | Brain |
| 410 | AUGGCCUGU | | UUAUAUU | | |
| hsa-miR- | AUCGGGAAUGUC | 28820 | GGGCGGACACGACA | 30862 | Brain |
| 425-3p | GUGUCCGCCC | | UUCCCGAU | | |
| hsa-miR- | AAUGACACGAUC | 28821 | UCAACGGGAGUGAU | 30863 | Brain |
| 425-5p | ACUCCCGUUGA | | CGUGUCAUU | | |
| hsa-miR- | UACUCAGGAGAG | 28822 | GUGAUUGCCACUCU | 30864 | Brain |
| 510 | UGGCAAUCAC | | CCUGAGUA | | |
| hsa-miR-7- | UGGAAGACUAGU | 28823 | ACAACAAAAUCACU | 30865 | Brain |
| 5p | GAUUUUGUUGU | | AGUCUUCCA | | |
| hsa-miR-9- | AUAAAGCUAGAU | 28824 | ACUUUCGGUUAUCU | 30866 | Brain |
| 3p | AACCGAAAGU | | AGCUUUAU | | |
| hsa-miR-9- | UCUUUGGUUAUC | 28825 | UCAUACAGCUAGAU | 30867 | Brain |
| 5p | UAGCUGUAUGA | | AACCAAAGA | | |
| hsa-miR- | ACAGGUGAGGUU | 28826 | GGCUCCCAAGAACC | 30868 | Brain and |
| 125a-3p | CUUGGGAGCC | | UCACCUGU | | hematopoietic cells |
| hsa-miR- | UCCCUGAGACCCU | 28827 | UCACAGGUUAAAGG | 30869 | Brain and |
| 125a-5p | UUAACCUGUGA | | GUCUCAGGGA | | hematopoietic cells |
| hsa-miR-7- | CAACAAAUCCCAG | 28828 | UUAGGUAGACUGGG | 30870 | Brain and pancreas |
| 2-3p | UCUACCUAA | | AUUUGUUG | | |
| hsa-miR- | CGUGUUCACAGCG | 28829 | AUCAAGGUCCGCUG | 30871 | Brain and plasma |
| 124-5p | GACCUUGAU | | UGAACACG | | (circulating) |
| hsa-miR- | UAAGGCACGCGG | 28830 | GGCAUUCACCGCGU | 30872 | Brain and plasma |
| 124-3p | UGAAUGCC | | GCCUUA | | (exosomal) |
| hsa-miR- | AACACACCUGGUU | 28831 | AAAGAGGUUAACCA | 30873 | Brain and platelet |
| 329 | AACCUCUUU | | GGUGUGUU | | |
| hsa-miR- | UAACAGUCUACA | 28832 | CGACCAUGGCUGUA | 30874 | Brain(neuron), |
| 132-3p | GCCAUGGUCG | | GACUGUUA | | immune cells |
| hsa-miR- | ACCGUGGCUUUCG | 28833 | AGUAACAAUCGAAA | 30875 | Brain(neuron), |
| 132-5p | AUUGUUACU | | GCCACGGU | | immune cells |
| hsa-miR- | UAACAGUCUCCAG | 28834 | GGCCGUGACUGGAG | 30876 | Brain(ncuron), |
| 212-3p | UCACGGCC | | ACUGUUA | | spleen |
| hsa-miR- | ACCUUGGCUCUAG | 28835 | AGUAAGCAGUCUAG | 30877 | Brain(neuron), |
| 212-5p | ACUGCUUACU | | AGCCAAGGU | | spleen |
| hsa-miR- | UCUCACACAGAAA | 28836 | ACGGGUGCGAUUUC | 30878 | Brain, circulating |
| 342-3p | UCGCACCCGU | | UGUGUGAGA | | plasma |
| hsa-miR- | UGGUUGACCAUA | 28837 | GCGCAUGUUCUAUG | 30879 | Brain, embryonic |
| 380-5p | GAACAUGCGC | | GUCAACCA | | stem cells |
| hsa-miR- | CAGUAACAAAGA | 28838 | ACAAGGAUGAAUCU | 30880 | Brain, epithelial |
| 802 | UUCAUCCUUGU | | UUGUUACUG | | cells, hepatocytes |
| hsa-miR- | AGAGUUGAGUCU | 28839 | CGGGACGUCCAGAC | 30881 | Brain, |
| 219-1-3p | GGACGUCCCG | | UCAACUCU | | oligodendrocytes |
| hsa-miR- | AGAAUUGUGGCU | 28840 | ACAGAUGUCCAGCC | 30882 | Brain, |
| 219-2-3p | GGACAUCUGU | | ACAAUUCU | | oligodendrocytes |
| hsa-miR- | UGAUUGUCCAAA | 28841 | AGAAUUGCGUUUGG | 30883 | Brain, |
| 219-5p | CGCAAUUCU | | ACAAUCA | | oligodendrocytes |
| hsa-miR- | UAUAGGGAUUGG | 28842 | CGCCACGGCUCCAA | 30884 | Brain, other tissues |
| 135a-3p | AGCCGUGGCG | | UCCCUAUA | | |
| hsa-miR- | UAUGGCUUUUUA | 28843 | UCACAUAGGAAUAA | 30885 | Brain, other tissues |
| 135a-5p | UUCCUAUGUGA | | AAAGCCAUA | | |
| hsa-miR- | AUGUAGGGCUAA | 28844 | CCCAUGGCUUUUAG | 30886 | Brain, placenta, |
| 135b-3p | AAGCCAUGGG | | CCCUACAU | | other tissues |
| hsa-miR- | UAUGGCUUUUCA | 28845 | UCACAUAGGAAUGA | 30887 | Brain, placenta, |
| 135b-5p | UUCCUAUGUGA | | AAAGCCAUA | | other tissues |
| hsa-miR- | AACCAUCGACCGU | 28846 | GUCCACUCAACGGU | 30888 | Brain, stem |
| 181c-3p | UGAGUGGAC | | CGAUGGUU | | cells/progenitor |
| hsa-miR- | AACAUUCAACCUG | 28847 | ACUCACCGACAGGU | 30889 | Brain, stem |
| 181c-5p | UCGGUGAGU | | UGAAUGUU | | cells/progenitor |
| hsa-miR- | CUUCCAGACGCUC | 28848 | CGACGUGGGGCGGA | 30890 | Breast tumor |
| 3180-5p | CGCCCCACGUCG | | GCGUCUGGAAG | | |
| hsa-miR- | AACAACAAAAUC | 28849 | UGGAAGACUAGUGA | 30891 | Breast tumor |
| 3529-3p | ACUAGUCUUCCA | | UUUUGUUGUU | | |
| hsa-miR- | AGGUAGACUGGG | 28850 | AACAACAAAUCCCA | 30892 | Breast tumor |
| 3529-5p | AUUUGUUGUU | | GUCUACCU | | |
| hsa-miR- | AAACACCAUUGUC | 28851 | GUGGAGUGUGACAA | 30893 | Breast tumor |
| 3591-3p | ACACUCCAC | | UGGUGUUU | | |
| hsa-miR- | UUUAGUGUGAUA | 28852 | UCAAACGCCAUUAU | 30894 | Breast tumor |
| 3591-5p | AUGGCGUUUGA | | CACACUAAA | | |
| hsa-miR- | UAUGGAAAGACU | 28853 | AGAGUGGCAAAGUC | 30895 | Breast tumor |
| 3688-3p | UUGCCACUCU | | UUUCCAUA | | |
| hsa-miR- | AGUGGCAAAGUC | 28854 | AUAUGGAAAGACUU | 30896 | Breast tumor |
| 3688-5p | UUUCCAUAU | | UGCCACU | | |
| hsa-miR- | CAGCCCGGAUCCC | 28855 | AAGUGGGCUGGGAU | 30897 | Breast tumor |
| 3940-3p | AGCCCACUU | | CCGGGCUG | | |
| hsa-miR- | GUGGGUUGGGGC | 28856 | CAGAGCCCGCCCCA | 30898 | Breast tumor |
| 3940-5p | GGGCUCUG | | ACCCAC | | |
| hsa-miR- | UUCGGGCUGGCCU | 28857 | CCGGAGCAGCAGGC | 30899 | Breast tumor |
| 3944-3p | GCUGCUCCGG | | CAGCCCGAA | | |
| hsa-miR- | UGUGCAGCAGGCC | 28858 | UCUCGGUUGGCCUG | 30900 | Breast tumor |
| 3944-5p | AACCGAGA | | CUGCACA | | |
| hsa-miR- | CAGGGCAGGAAG | 28859 | UUGUCCACUUCUUC | 30901 | Breast tumor |
| 4436b-3p | AAGUGGACAA | | CUGCCCUG | | |
| hsa-miR- | GUCCACUUCUGCC | 28860 | GGCAGGGCAGGCAG | 30902 | Breast tumor |
| 4436b-5p | UGCCCUGCC | | AAGUGGAC | | |
| hsa-miR- | UUUGGACAGAAA | 28861 | ACCUGCGUGUUUUC | 30903 | Breast tumor |
| 4520b-3p | ACACGCAGGU | | UGUCCAAA | | |
| hsa-miR- | CCUGCGUGUUUUC | 28862 | UUGGACAGAAAACA | 30904 | Breast tumor |
| 4520b-5p | UGUCCAA | | CGCAGG | | |
| hsa-miR- | UGCCGCCCUCUCG | 28863 | CUAGAGCAGCGAGA | 30905 | Breast tumor |
| 4632-3p | CUGCUCUAG | | GGGCGGCA | | |
| hsa-miR- | GAGGGCAGCGUG | 28864 | UCCGCCACACCCAC | 30906 | Breast tumor |
| 4632-5p | GGUGUGGCGGA | | GCUGCCCUC | | |
| hsa-miR- | AGGAGCUAGCCA | 28865 | UGCAUAUGCCUGGC | 30907 | Breast tumor |
| 4633-3p | GGCAUAUGCA | | UAGCUCCU | | |
| hsa-miR- | AUAUGCCUGGCU | 28866 | GAGGAGCUAGCCAG | 30908 | Breast tumor |
| 4633-5p | AGCUCCUC | | GCAUAU | | |
| hsa-miR- | CGGCGCGACCGGC | 28867 | CCCCGGGCCGGUCG | 30909 | Breast tumor |
| 4634 | CCGGGG | | CGCCG | | |
| hsa-miR- | UCUUGAAGUCAG | 28868 | UUGCGGGUUCUGAC | 30910 | Breast tumor |
| 4635 | AACCCGCAA | | UUCAAGA | | |
| hsa-miR- | AACUCGUGUUCA | 28869 | CUAAAGGCUUUGAA | 30911 | Breast tumor |
| 4636 | AAGCCUUUAG | | CACGAGUU | | |
| hsa-miR- | CCUGGACACCGCU | 28870 | CGGCCGGCUGAGCG | 30912 | Breast tumor |
| 4638-3p | CAGCCGGCCG | | GUGUCCAGG | | |
| hsa-miR- | ACUCGGCUGCGGU | 28871 | ACUUGUCCACCGCA | 30913 | Breast tumor |
| 4638-5p | GGACAAGU | | GCCGAGU | | |
| hsa-miR- | UCACUCUCACCUU | 28872 | GCAAAGCAAGGUGA | 30914 | Breast tumor |
| 4639-3p | GCUUUGC | | GAGUGA | | |
| hsa-miR- | UUGCUAAGUAGG | 28873 | UCAAUCUCAGCCUA | 30915 | Breast tumor |
| 4639-5p | CUGAGAUUGA | | CUUAGCAA | | |
| hsa-miR- | CACCCCCUGUUUC | 28874 | GUGGGCCAGGAAAC | 30916 | Breast tumor |
| 4640-3p | CUGGCCCAC | | AGGGGGUG | | |
| hsa-miR- | UGGGCCAGGGAG | 28875 | CCCACCAGCUGCUC | 30917 | Breast tumor |
| 4640-5p | CAGCUGGUGGG | | CCUGGCCCA | | |
| hsa-miR- | UGCCCAUGCCAUA | 28876 | UGAGGCAAAAGUAU | 30918 | Breast tumor |
| 4641 | CUUUUGCCUCA | | GGCAUGGGCA | | |
| hsa-miR- | AUGGCAUCGUCCC | 28877 | AGCCACCAGGGGAC | 30919 | Breast tumor |
| 4642 | CUGGUGGCU | | GAUGCCAU | | |
| hsa-miR- | GACACAUGACCAU | 28878 | UUAGCAUUUAUGGU | 30920 | Breast tumor |
| 4643 | AAAUGCUAA | | CAUGUGUC | | |
| hsa-miR- | UGGAGAGAGAAA | 28879 | CUUCUGUCUCUUUU | 30921 | Breast tumor |
| 4644 | AGAGACAGAAG | | CUCUCUCCA | | |
| hsa-miR- | AGACAGUAGUUC | 28880 | AACCAGGCAAGAAC | 30922 | Breast tumor |
| 4645-3p | UUGCCUGGUU | | UACUGUCU | | |
| hsa-miR- | ACCAGGCAAGAA | 28881 | ACAAUAUUUCUUGC | 30923 | Breast tumor |
| 4645-5p | AUAUUGU | | CUGGU | | |
| hsa-miR- | AUUGUCCCUCUCC | 28882 | CUGGGAAGGGAGAG | 30924 | Breast tumor |
| 4646-3p | CUUCCCAG | | GGACAAU | | |
| hsa-miR- | ACUGGGAAGAGG | 28883 | UCCCUCAGCUCCUC | 30925 | Breast tumor |
| 4646-5p | AGCUGAGGGA | | UUCCCAGU | | |
| hsa-miR- | GAAGAUGGUGCU | 28884 | UUCCUCAGCACAGC | 30926 | Breast tumor |
| 4647 | GUGCUGAGGAA | | ACCAUCUUC | | |
| hsa-miR- | UGUGGGACUGCA | 28885 | CUCCCAUUUGCAGU | 30927 | Breast tumor |
| 4648 | AAUGGGAG | | CCCACA | | |
| hsa-miR- | UCUGAGGCCUGCC | 28886 | UGGGGAGAGGCAGG | 30928 | Breast tumor |
| 4649-3p | UCUCCCCA | | CCUCAGA | | |
| hsa-miR- | UGGGCGAGGGGU | 28887 | CUCUGAGAGCCCAC | 30929 | Breast tumor |
| 4649-5p | GGGCUCUCAGAG | | CCCUCGCCCA | | |
| hsa-miR- | AGGUAGAAUGAG | 28888 | AUGUCAGGCCUCAU | 30930 | Breast tumor |
| 4650-3p | GCCUGACAU | | UCUACCU | | |
| hsa-miR- | UCAGGCCUCUUUC | 28889 | AAGGUAGAAAGAGG | 30931 | Breast tumor |
| 4650-5p | UACCUU | | CCUGA | | |
| hsa-miR- | CGGGGUGGGUGA | 28890 | GCCCGACCUCACCC | 30932 | Breast tumor |
| 4651 | GGUCGGGC | | ACCCCG | | |
| hsa-miR- | GUUCUGUUAACCC | 28891 | UGAGGGGAUGGGUU | 30933 | Breast tumor |
| 4652-3p | AUCCCCUCA | | AACAGAAC | | |
| hsa-miR- | AGGGGACUGGUU | 28892 | UAGUUCUAUUAACC | 30934 | Breast tumor |
| 4652-5p | AAUAGAACUA | | AGUCCCCU | | |
| hsa-miR- | UGGAGUUAAGGG | 28893 | UCUCCAAGCAACCC | 30935 | Breast tumor |
| 4653-3p | UUGCUUGGAGA | | UUAACUCCA | | |
| hsa-miR- | UCUCUGAGCAAG | 28894 | GGUGUUAAGCCUUG | 30936 | Breast tumor |
| 4653-5p | GCUUAACACC | | CUCAGAGA | | |
| hsa-miR- | UGUGGGAUCUGG | 28895 | CCAGAUGCCUCCAG | 30937 | Breast tumor |
| 4654 | AGGCAUCUGG | | AUCCCACA | | |
| hsa-miR- | ACCCUCGUCAGGU | 28896 | CCCCGGGGACCUGA | 30938 | Breast tumor |
| 4655-3p | CCCCGGGG | | CGAGGGU | | |
| hsa-miR- | CACCGGGGAUGGC | 28897 | CGACCCUCUGCCAU | 30939 | Breast tumor |
| 4655-5p | AGAGGGUCG | | CCCCGGUG | | |
| hsa-miR- | UGGGCUGAGGGC | 28898 | ACAGGCCUCCUGCC | 30940 | Breast tumor |
| 4656 | AGGAGGCCUGU | | CUCAGCCCA | | |
| hsa-miR- | AAUGUGGAAGUG | 28899 | AUGCCUCAGACCAC | 30941 | Breast tumor |
| 4657 | GUCUGAGGCAU | | UUCCACAUU | | |
| hsa-miR- | GUGAGUGUGGAU | 28900 | AUUCCUCCAGGAUC | 30942 | Breast tumor |
| 4658 | CCUGGAGGAAU | | CACACUCAC | | |
| hsa-miR- | UUUCUUCUUAGA | 28901 | CGUUGCCAUGUCUA | 30943 | Breast tumor |
| 4659a-3p | CAUGGCAACG | | AGAAGAAA | | |
| hsa-miR- | CUGCCAUGUCUAA | 28902 | GUUUUCUUCUUAGA | 30944 | Breast tumor |
| 4659a-5p | GAAGAAAAC | | CAUGGCAG | | |
| hsa-miR- | UUUCUUCUUAGA | 28903 | AGCUGCCAUGUCUA | 30945 | Breast tumor |
| 4659b-3p | CAUGGCAGCU | | AGAAGAAA | | |
| hsa-miR- | UUGCCAUGUCUA | 28904 | UUCUUCUUAGACAU | 30946 | Breast tumor |
| 4659b-5p | AGAAGAA | | GGCAA | | |
| hsa-miR- | UGCAGCUCUGGU | 28905 | CUCCAUUUUCCACC | 30947 | Breast tumor |
| 4660 | GGAAAAUGGAG | | AGAGCUGCA | | |
| hsa-miR- | CAGGAUCCACAGA | 28906 | UGGACUAGCUCUGU | 30948 | Breast tumor |
| 4661-3p | GCUAGUCCA | | GGAUCCUG | | |
| hsa-miR- | AACUAGCUCUGU | 28907 | GUCAGGAUCCACAG | 30949 | Breast tumor |
| 4661-5p | GGAUCCUGAC | | AGCUAGUU | | |
| hsa-miR- | AAAGAUGGACAA | 28908 | AUUUAGCCAAUUGU | 30950 | Breast tumor |
| 4662b | UUGGCUAAAU | | CCAUCUUU | | |
| hsa-miR- | AGCUGAGCUCCAU | 28909 | ACUGCACGUCCAUG | 30951 | Breast tumor |
| 4663 | GGACGUGCAGU | | GAGCUCAGCU | | |
| hsa-miR- | CUUCCGGUCUGUG | 28910 | GACGGGGCUCACAG | 30952 | Breast tumor |
| 4664-3p | AGCCCCGUC | | ACCGGAAG | | |
| hsa-miR- | UGGGGUGCCCACU | 28911 | AACUUGCGGAGUGG | 30953 | Breast tumor |
| 4664-5p | CCGCAAGUU | | GCACCCCA | | |
| hsa-miR- | CUCGGCCGCGGCG | 28912 | GGCGGGGGCUACGC | 30954 | Breast tumor |
| 4665-3p | CGUAGCCCCCGCC | | GCCGCGGCCGAG | | |
| hsa-miR- | CUGGGGGACGCG | 28913 | GCUCGCGCUCACGC | 30955 | Breast tumor |
| 4665-5p | UGAGCGCGAGC | | GUCCCCCAG | | |
| hsa-miR- | CAUACAAUCUGAC | 28914 | AAAUACAUGUCAGA | 30956 | Breast tumor |
| 4666a-3p | AUGUAUUU | | UUGUAUG | | |
| hsa-miR- | AUACAUGUCAGA | 28915 | GGCAUACAAUCUGA | 30957 | Breast tumor |
| 4666a-5p | UUGUAUGCC | | CAUGUAU | | |
| hsa-miR- | UCCCUCCUUCUGU | 28916 | CUGUGGGGACAGAA | 30958 | Breast tumor |
| 4667-3p | CCCCACAG | | GGAGGGA | | |
| hsa-miR- | ACUGGGGAGCAG | 28917 | GGUUCUCCUUCUGC | 30959 | Breast tumor |
| 4667-5p | AAGGAGAACC | | UCCCCAGU | | |
| hsa-miR- | GAAAAUCCUUUU | 28918 | CUGGAAAAACAAAA | 30960 | Breast tumor |
| 4668-3p | UGUUUUUCCAG | | AGGAUUUUC | | |
| hsa-miR- | AGGGAAAAAAAA | 28919 | GACAAAUCCUUUUU | 30961 | Breast tumor |
| 4668-5p | AAGGAUUUGUC | | UUUUUCCCU | | |
| hsa-miR- | UGUGUCCGGGAA | 28920 | CCUCCUCCACUUCC | 30962 | Breast tumor |
| 4669 | GUGGAGGAGG | | CGGACACA | | |
| hsa-miR- | UGAAGUUACAUC | 28921 | AAGCGACCAUGAUG | 30963 | Breast tumor |
| 4670-3p | AUGGUCGCUU | | UAACUUCA | | |
| hsa-miR- | AAGCGACCAUGA | 28922 | UGAAGUUACAUCAU | 30964 | Breast tumor |
| 4670-5p | UGUAACUUCA | | GGUCGCUU | | |
| hsa-miR- | UUAGUGCAUAGU | 28923 | AGACCAAAGACUAU | 30965 | Breast tumor |
| 4671-3p | CUUUGGUCU | | GCACUAA | | |
| hsa-miR- | ACCGAAGACUGU | 28924 | AGAUUAGCGCACAG | 30966 | Breast tumor |
| 4671-5p | GCGCUAAUCU | | UCUUCGGU | | |
| hsa-miR- | UUACACAGCUGG | 28925 | UGCCUCUGUCCAGC | 30967 | Breast tumor |
| 4672 | ACAGAGGCA | | UGUGUAA | | |
| hsa-miR- | UCCAGGCAGGAGC | 28926 | UCCAGUCCGGCUCC | 30968 | Breast tumor |
| 4673 | CGGACUGGA | | UGCCUGGA | | |
| hsa-miR- | CUGGGCUCGGGAC | 28927 | AGCCGCGCGUCCCG | 30969 | Breast tumor |
| 4674 | GCGCGGCU | | AGCCCAG | | |
| hsa-miR- | GGGGCUGUGAUU | 28928 | CCUGCUGGUCAAUC | 30970 | Breast tumor |
| 4675 | GACCAGCAGG | | ACAGCCCC | | |
| hsa-miR- | CACUGUUUCACCA | 28929 | AAGAGCCAGUGGUG | 30971 | Breast tumor |
| 4676-3p | CUGGCUCUU | | AAACAGUG | | |
| hsa-miR- | GAGCCAGUGGUG | 28930 | UCACUGUCUCACCA | 30972 | Breast tumor |
| 4676-5p | AGACAGUGA | | CUGGCUC | | |
| hsa-miR- | AAGGUAUUGUUC | 28931 | UCAUAAGUCUGAAC | 30973 | Breast tumor |
| 4678 | AGACUUAUGA | | AAUACCUU | | |
| hsa-miR- | UCUGUGAUAGAG | 28932 | AGCAAAGAAUCUCU | 30974 | Breast tumor |
| 4679 | AUUCUUUGCU | | AUCACAGA | | |
| hsa-miR- | UCUGAAUUGUAA | 28933 | UAACAACUCUUACA | 30975 | Breast tumor |
| 4680-3p | GAGUUGUUA | | AUUCAGA | | |
| hsa-miR- | AGAACUCUUGCA | 28934 | ACAUCUAAGACUGC | 30976 | Breast tumor |
| 4680-5p | GUCUUAGAUGU | | AAGAGUUCU | | |
| hsa-miR- | AACGGGAAUGCA | 28935 | AGAUACAGCCUGCA | 30977 | Breast tumor |
| 4681 | GGCUGUAUCU | | UUCCCGUU | | |
| hsa-miR- | UCUGAGUUCCUG | 28936 | AGACCAGGCUCCAG | 30978 | Breast tumor |
| 4682 | GAGCCUGGUCU | | GAACUCAGA | | |
| hsa-miR- | UGGAGAUCCAGU | 28937 | AUCGGGCGAGCACU | 30979 | Breast tumor |
| 4683 | GCUCGCCCGAU | | GGAUCUCCA | | |
| hsa-miR- | UGUUGCAAGUCG | 28938 | ACGUCUCCACCGAC | 30980 | Breast tumor |
| 4684-3p | GUGGAGACGU | | UUGCAACA | | |
| hsa-miR- | CUCUCUACUGACU | 28939 | UAUGUUGCAAGUCA | 30981 | Breast tumor |
| 4684-5p | UGCAACAUA | | GUAGAGAG | | |
| hsa-miR- | UCUCCCUUCCUGC | 28940 | CUAGCCAGGGCAGG | 30982 | Breast tumor |
| 4685-3p | CCUGGCUAG | | AAGGGAGA | | |
| hsa-miR- | CCCAGGGCUUGGA | 28941 | AACCUUGCCCCACU | 30983 | Breast tumor |
| 4685-5p | GUGGGGCAAGGU | | CCAAGCCCUGGG | | |
| | U | | | | |
| hsa-miR- | UAUCUGCUGGGC | 28942 | AACACCAGAAAGCC | 30984 | Breast tumor |
| 4686 | UUUCUGGUGUU | | CAGCAGAUA | | |
| hsa-miR- | UGGCUGUUGGAG | 28943 | GCCUGCCCCCUCCA | 30985 | Breast tumor |
| 4687-3p | GGGGCAGGC | | ACAGCCA | | |
| hsa-miR- | CAGCCCUCCUCCC | 28944 | UUUGGGUGCGGGAG | 30986 | Breast tumor |
| 4687-5p | GCACCCAAA | | GAGGGCUG | | |
| hsa-miR- | UAGGGGCAGCAG | 28945 | CCCAGGUCCUCUGC | 30987 | Breast tumor |
| 4688 | AGGACCUGGG | | UGCCCCUA | | |
| hsa-miR- | UUGAGGAGACAU | 28946 | GGCCCCCACCAUGU | 30988 | Breast tumor |
| 4689 | GGUGGGGGCC | | CUCCUCAA | | |
| hsa-miR- | GCAGCCCAGCUGA | 28947 | CAGAGGCCUCAGCU | 30989 | Breast tumor |
| 4690-3p | GGCCUCUG | | GGGCUGC | | |
| hsa-miR- | GAGCAGGCGAGG | 28948 | UUCAGCCCAGOCUC | 30990 | Breast tumor |
| 4690-5p | CUGGGCUGAA | | GCCUGCUC | | |
| hsa-miR- | CCAGCCACGGACU | 28949 | AUGCACUCUCAGUC | 30991 | Breast tumor |
| 4691-3p | GAGAGUGCAU | | CGUGGCUGG | | |
| hsa-miR- | GUCCUCCAGGCCA | 28950 | CCGCAGCUCAUGGC | 30992 | Breast tumor |
| 4691-5p | UGAGCUGCGG | | CUGGAGGAC | | |
| hsa-miR- | UCAGGCAGUGUG | 28951 | AUCUGAUACCCACA | 30993 | Breast tumor |
| 4692 | GGUAUCAGAU | | CUGCCUGA | | |
| hsa-miR- | UGAGAGUGGAAU | 28952 | AAAUACUGUGAAUU | 30994 | Breast tumor |
| 4693-3p | UCACAGUAUUU | | CCACUCUCA | | |
| hsa-miR- | AUACUGUGAAUU | 28953 | UGUGACAGUGAAAU | 30995 | Breast tumor |
| 4693-5p | UCACUGUCACA | | UCACAGUAU | | |
| hsa-miR- | CAAAUGGACAGG | 28954 | AGGUGUUAUCCUGU | 30996 | Breast tumor |
| 4694-3p | AUAACACCU | | CCAUUUG | | |
| hsa-miR- | AGGUGUUAUCCU | 28955 | GCAAAUGGAUAGGA | 30997 | Breast tumor |
| 4694-5p | AUCCAUUUGC | | UAACACCU | | |
| hsa-miR- | UGAUCUCACCGCU | 28956 | GAAGGAGGCAGCGG | 30998 | Breast tumor |
| 4695-3p | GCCUCCUUC | | UGAGAUCA | | |
| hsa-miR- | CAGGAGGCAGUG | 28957 | CCUGCUCGCCCACU | 30999 | Breast tumor |
| 4695-5p | GGCGAGCAGG | | GCCUCCUG | | |
| hsa-miR- | UGCAAGACGGAU | 28958 | AGAUGACAGUAUCC | 31000 | Breast tumor |
| 4696 | ACUGUCAUCU | | GUCUUGCA | | |
| hsa-miR- | UGUCAGUGACUCC | 28959 | ACCAAGGGGCAGGA | 31001 | Breast tumor |
| 4697-3p | UGCCCCUUGGU | | GUCACUGACA | | |
| hsa-miR- | AGGGGGCGCAGU | 28960 | CACGUCAGUGACUG | 31002 | Breast tumor |
| 4697-5p | CACUGACGUG | | CGCCCCCU | | |
| hsa-miR- | UCAAAAUGUAGA | 28961 | UGGGGUCUUCCUCU | 31003 | Breast tumor |
| 4698 | GGAAGACCCCA | | ACAUUUUGA | | |
| hsa-miR- | AAUUUACUCUGC | 28962 | GGAGAAGAUUGCAG | 31004 | Breast tumor |
| 4699-3p | AAUCUUCUCC | | AGUAAAUU | | |
| hsa-miR- | AGAAGAUUGCAG | 28963 | GGAACUUACUCUGC | 31005 | Breast tumor |
| 4699-5p | AGUAAGUUCC | | AAUCUUCU | | |
| hsa-miR- | CACAGGACUGACU | 28964 | CACUGGGGUGAGGA | 31006 | Breast tumor |
| 4700-3p | CCUCACCCCAGUG | | GUCAGUCCUGUG | | |
| hsa-miR- | UCUGGGGAUGAG | 28965 | ACACACUGUCCUCA | 31007 | Breast tumor |
| 4700-5p | GACAGUGUGU | | UCCCCAGA | | |
| hsa-miR- | AUGGGUGAUGGG | 28966 | ACACCACACCCAUC | 31008 | Breast tumor |
| 4701-3p | UGUGGUGU | | ACCCAU | | |
| hsa-miR- | UUGGCCACCACAC | 28967 | AAGGGGUAGGUGUG | 31009 | Breast tumor |
| 4701-5p | CUACCCCUU | | GUGGCCAA | | |
| hsa-miR- | UGUAGUUGUAUU | 28968 | GUGGCAAUACAAUA | 31010 | Breast tumor |
| 4703-3p | GUAUUGCCAC | | CAACUACA | | |
| hsa-miR- | UAGCAAUACAGU | 28969 | ACUAUAUUUGUACU | 31011 | Breast tumor |
| 4703-5p | ACAAAUAUAGU | | GUAUUGCUA | | |
| hsa-miR- | UCAGUCACAUAUC | 28970 | UAGACACUAGAUAU | 31012 | Breast tumor |
| 4704-3p | UAGUGUCUA | | GUGACUGA | | |
| hsa-miR- | GACACUAGGCAU | 28971 | AAUCACUCACAUGC | 31013 | Breast tumor |
| 4704-5p | GUGAGUGAUU | | CUAGUGUC | | |
| hsa-miR- | UCAAUCACUUGG | 28972 | ACAGCAAUUACCAA | 31014 | Breast tumor |
| 4705 | UAAUUGCUGU | | GUGAUUGA | | |
| hsa-miR- | AGCGGGGAGGAA | 28973 | AAGCAGCGCCCACU | 31015 | Breast tumor |
| 4706 | GUGGGCGCUGCU | | UCCUCCCCGCU | | |
| | U | | | | |
| hsa-miR- | AGCCCGCCCCAGC | 28974 | AGAACCUCGGCUGG | 31016 | Breast tumor |
| 4707-3p | CGAGGUUCU | | GGCGGGCU | | |
| hsa-miR- | GCCCCGGCGCGGG | 28975 | CCAGAACCCGCCCG | 31017 | Breast tumor |
| 4707-5p | CGGGUUCUGG | | CGCCGGGGC | | |
| hsa-miR- | AGCAAGGCGGCA | 28976 | AUCAGAGAGAUGCC | 31018 | Breast tumor |
| 4708-3p | UCUCUCUGAU | | GCCUUGCU | | |
| hsa-miR- | AGAGAUGCOGCCU | 28977 | AAGGAGCAAGGCGG | 31019 | Breast tumor |
| 4708-5p | UGCUCCUU | | CAUCUCU | | |
| hsa-miR- | UUGAAGAGGAGG | 28978 | GCUACAGAGCACCU | 31020 | Breast tumor |
| 4709-3p | UGCUCUGUAGC | | CCUCUUCAA | | |
| hsa-miR- | ACAACAGUGACU | 28979 | UUGGAGAGCAAGUC | 31021 | Breast tumor |
| 4709-5p | UGCUCUCCAA | | ACUGUUGU | | |
| hsa-miR- | GGGUGAGGGCAG | 28980 | AACCACCUGCCCUC | 31022 | Breast tumor |
| 4710 | GUGGUU | | ACCC | | |
| hsa-miR- | CGUGUCUUCUGGC | 28981 | AUCAAGCCAGAAGA | 31023 | Breast tumor |
| 4711-3p | UUGAU | | CACG | | |
| hsa-miR- | UGCAUCAGGCCAG | 28982 | CUCAUGUCUUCUGG | 31024 | Breast tumor |
| 4711-5p | AAGACAUGAG | | CCUGAUGCA | | |
| hsa-miR- | AAUGAGAGACCU | 28983 | AUACAGUACAGGUC | 31025 | Breast tumor |
| 4712-3p | GUACUGUAU | | UCUCAUU | | |
| hsa-miR- | UCCAGUACAGGUC | 28984 | GAAAUGAGAGACCU | 31026 | Breast tumor |
| 4712-5p | UCUCAUUUC | | GUACUGGA | | |
| hsa-miR- | UGGGAUCCAGAC | 28985 | UUCUCCCACUGUCU | 31027 | Breast tumor |
| 4713-3p | AGUGGGAGAA | | GGAUCCCA | | |
| hsa-miR- | UUCUCCCACUACC | 28986 | UGGGAGCCUGGUAG | 31028 | Breast tumor |
| 4713-5p | AGGCUCCCA | | UGGGAGAA | | |
| hsa-miR- | CCAACCUAGGUGG | 28987 | CAACUCUGACCACC | 31029 | Breast tumor |
| 4714-3p | UCAGAGUUG | | UAGGUUGG | | |
| hsa-miR- | AACUCUGACCCCU | 28988 | AUCAACCUAAGGGG | 31030 | Breast tumor |
| 4714-5p | UAGGUUGAU | | UCAGAGUU | | |
| hsa-miR- | GUGCCACCUUAAC | 28989 | AUUGGCUGCAGUUA | 31031 | Breast tumor |
| 4715-3p | UGCAGCCAAU | | AGGUGGCAC | | |
| hsa-miR- | AAGUUGGCUGCA | 28990 | CCACCUUAACUGCA | 31032 | Breast tumor |
| 4715-5p | GUUAAGGUGG | | GCCAACUU | | |
| hsa-miR- | AAGGGGGAAGGA | 28991 | UCUCCAUGUUUCCU | 31033 | Breast tumor |
| 4716-3p | AACAUGGAGA | | UCCCCCUU | | |
| hsa-miR- | UCCAUGUUUCCUU | 28992 | AGAAGGGGGAAGGA | 31034 | Breast tumor |
| 4716-5p | CCCCCUUCU | | AACAUGGA | | |
| hsa-miR- | ACACAUGGGUGG | 28993 | AGGCCACAGCCACC | 31035 | Breast tumor |
| 4717-3p | CUGUGGCCU | | CAUGUGU | | |
| hsa-miR- | UAGGCCACAGCCA | 28994 | ACACAUGGGUGGCU | 31036 | Breast tumor |
| 4717-5p | CCCAUGUGU | | GUGGCCUA | | |
| hsa-miR- | AGCUGUACCUGA | 28995 | UGCUUGGUUUCAGG | 31037 | Breast tumor |
| 4718 | AACCAAGCA | | UACAGCU | | |
| hsa-miR- | UCACAAAUCUAU | 28996 | CCUGCAUAUUAUAG | 31038 | Breast tumor |
| 4719 | AAUAUGCAGG | | AUUUGUGA | | |
| hsa-miR- | UGCUUAAGUUGU | 28997 | AUACUUGGUACAAC | 31039 | Breast tumor |
| 4720-3p | ACCAAGUAU | | UUAAGCA | | |
| hsa-miR- | CCUGGCAUAUUU | 28998 | AAGUUAUACCAAAU | 31040 | Breast tumor |
| 4720-5p | GGUAUAACUU | | AUGCCAGG | | |
| hsa-miR- | UGAGGGCUCCAG | 28999 | CCACCGUCACCUGG | 31041 | Breast tumor |
| 4721 | GUGACGGUGG | | AGCCCUCA | | |
| hsa-miR- | ACCUGCCAGCACC | 29000 | CUGCAGGGAGGUGC | 31042 | Breast tumor |
| 4722-3p | UCCCUGCAG | | UGGCAGGU | | |
| hsa-miR- | GGCAGGAGGGCU | 29001 | CAACCUGGCACAGC | 31043 | Breast tumor |
| 4722-5p | GUGCCAGGUUG | | CCUCCUGCC | | |
| hsa-miR- | CCCUCUCUGGCUC | 29002 | UUUGGGGAGGAGCC | 31044 | Breast tumor |
| 4723-3 | CUCCCCAAA | | AGAGAGGG | | |
| hsa-miR- | UGGGGGAGCCAU | 29003 | UGCUCUUAUCUCAU | 31045 | Breast tumor |
| 4723-5p | GAGAUAAGAGCA | | GGCUCCCCCA | | |
| hsa-miR- | GUACCUUCUGGU | 29004 | ACUAGCUGAACCAG | 31046 | Breast tumor |
| 4724-3p | UCAGCUAGU | | AAGGUAC | | |
| hsa-miR- | AACUGAACCAGG | 29005 | CGAAGCUCACUCCU | 31047 | Breast tumor |
| 4724-5p | AGUGAGCUUCG | | GGUUCAGUU | | |
| hsa-miR- | UGGGGAAGGCGU | 29006 | CCCGACACUGACGC | 31048 | Breast tumor |
| 4725-3p | CAGUGUCGGG | | CUUCCCCA | | |
| hsa-miR- | AGACCCUGCAGCC | 29007 | GGUGGGAAGGCUGC | 31049 | Breast tumor |
| 4725-5p | UUCCCACC | | AGGGUCU | | |
| hsa-miR- | ACCCAGGUUCCCU | 29008 | UGCGGCCAGAGGGA | 31050 | Breast tumor |
| 4726-3p | CUGGCCGCA | | ACCUGGGU | | |
| hsa-miR- | AGGGCCAGAGGA | 29009 | CCACUCCAGGCUCC | 31051 | Breast tumor |
| 4726-5p | GCCUGGAGUGG | | UCUGGCCCU | | |
| hsa-miR- | AUAGUGGGAAGC | 29010 | GAAUCUGCCAGCUU | 31052 | Breast tumor |
| 4727-3p | UGGCAGAUUC | | CCCACUAU | | |
| hsa-miR- | AUCUGCCAGCUUC | 29011 | CCACUGUGGAAGCU | 31053 | Breast tumor |
| 4727-5p | CACAGUGG | | GGCAGAU | | |
| hsa-miR- | CAUGCUGACCUCC | 29012 | CUGGGGCAGGAGGG | 31054 | Breast tumor |
| 4728-3p | CUCCUGCCCCAG | | AGGUCAGCAUG | | |
| hsa-miR- | UGGGAGGGGAGA | 29013 | UGCUUGCUGCCUCU | 31055 | Breast tumor |
| 4728-5p | GGCAGCAAGCA | | CCCCUCCCA | | |
| hsa-miR- | UCAUUUAUCUGU | 29014 | UAGCUUCCCAACAG | 31056 | Breast tumor |
| 4729 | UGGGAAGCUA | | AUAAAUGA | | |
| hsa-miR- | CUGGOGGAGCOCA | 29015 | UGGCAUGGAAUGGG | 31057 | Breast tumor |
| 4730 | UUCCAUGCCA | | CUCCGCCAG | | |
| hsa-miR- | CACACAAGUGGCC | 29016 | AGUGUUGGGGGCCA | 31058 | Breast tumor |
| 4731-3p | CCCAACACU | | CUUGUGUG | | |
| hsa-miR- | UGCUGGGGGCCAC | 29017 | CACACUCAUGUGGC | 31059 | Breast tumor |
| 4731-5p | AUGAGUGUG | | CCCCAGCA | | |
| hsa-miR- | GCCCUGACCUGUC | 29018 | CAGAACAGGACAGG | 31060 | Breast tumor |
| 4732-3p | CUGUUCUG | | UCAGGGC | | |
| hsa-miR- | UGUAGAGCAGGG | 29019 | AGCUUCCUGCUCCC | 31061 | Breast tumor |
| 4732-5p | AGCAGGAAGCU | | UGCUCUACA | | |
| hsa-miR- | CCACCAGGUCUAG | 29020 | AUCCCAAUGCUAGA | 31062 | Breast tumor |
| 4733-3p | CAUUGGGAU | | CCUGGUGG | | |
| hsa-miR- | AAUCCCAAUGCUA | 29021 | CACCGGGUCUAGCA | 31063 | Breast tumor |
| 4733-5p | GACCCGGUG | | UUGGGAUU | | |
| hsa-miR- | GCUGCGGGCUGCG | 29022 | CGCCCUGACCGCAG | 31064 | Breast tumor |
| 4734 | GUCAGGGCG | | CCCGCAGC | | |
| hsa-miR- | AAAGGUGCUCAA | 29023 | AUGUCUAAUUUGAG | 31065 | Breast tumor |
| 4735-3p | AUUAGACAU | | CACCUUU | | |
| hsa-miR- | CCUAAUUUGAAC | 29024 | UACCGAAGGUGUUC | 31066 | Breast tumor |
| 4735-5p | ACCUUCGGUA | | AAAUUAGG | | |
| hsa-miR- | AGGCAGGUUAUC | 29025 | CAGCCCAGAUAACC | 31067 | Breast tumor |
| 4736 | UGGGCUG | | UGCCU | | |
| hsa-miR- | AUGCGAGGAUGC | 29026 | CACUGUCAGCAUCC | 31068 | Breast tumor |
| 4737 | UGACAGUG | | UCGCAU | | |
| hsa-miR- | UGAAACUGGAGC | 29027 | UCCUCCAGGCGCUC | 31069 | Breast tumor |
| 4738-3p | GCCUGGAGGA | | CAGUUUCA | | |
| hsa-miR- | ACCAGCGCGUUUU | 29028 | AUGAAACUGAAAAC | 31070 | Breast tumor |
| 4738-5p | CAGUUUCAU | | GCGCUGGU | | |
| hsa-miR- | AAGGGAGGAGGA | 29029 | AGGGCCCCUCCGCU | 31071 | Breast tumor |
| 4739 | GCGGAGGGGCCCU | | CCUCCUCCCUU | | |
| hsa-miR- | GCCCGAGAGGAUC | 29030 | GCAGGGACGGAUCC | 31072 | Breast tumor |
| 4740-3p | CGUCCCUGC | | UCUCGGGC | | |
| hsa-miR- | AGGACUGAUCCUC | 29031 | CCUGCCCGAGAGGA | 31073 | Breast tumor |
| 4740-5p | UCGGGCAGG | | UCAGUCCU | | |
| hsa-miR- | UCAGGCAAAGGG | 29032 | UCUGUAAAUAUCCC | 31074 | Breast tumor |
| 4742-5p | AUAUUUACAGA | | UUUGCCUGA | | |
| hsa-miR- | UUUCUGUCUUUU | 29033 | CUGGACCAGAAAAG | 31075 | Breast tumor |
| 4743-3p | CUGGUCCAG | | ACAGAAA | | |
| hsa-miR- | UGGCCGGAUGGG | 29034 | AUGCCUCCUGUCCC | 31076 | Breast tumor |
| 4743-5p | ACAGGAGGCAU | | AUCCGGCCA | | |
| hsa-miR- | UCUAAAGACUAG | 29035 | CAUAGCGAAGUCUA | 31077 | Breast tumor |
| 4744 | ACUUCGCUAUG | | GUCUUUAGA | | |
| hsa-miR- | UGGCCCGGCGACG | 29036 | GACCGUGAGACGUC | 31078 | Breast tumor |
| 4745-3p | UCUCACGGUC | | GCCGGGCCA | | |
| hsa-miR- | UGAGUGGGGCUC | 29037 | CGCCGUCCCGGGAG | 31079 | Breast tumor |
| 4745-5p | CCGGGACGGCG | | CCCCACUCA | | |
| hsa-miR- | AGCGGUGCUCCUG | 29038 | UCGGCCCGCAGGAG | 31080 | Breast tumor |
| 4746-3p | CGGGCCGA | | CACCGCU | | |
| hsa-miR- | CCGGUCCCAGGAG | 29039 | UCUGCAGGUUCUCC | 31081 | Breast tumor |
| 4746-5p | AACCUGCAGA | | UGGGACCGG | | |
| hsa-miR- | AAGGCCCGGGCUU | 29040 | CUGGGAGGAAAGCC | 31082 | Breast tumor |
| 4747-3p | UCCUCCCAG | | CGGGCCUU | | |
| hsa-miR- | AGGGAAGGAGGC | 29041 | CUAAGACCAAGCCU | 31083 | Breast tumor |
| 4747-5p | UUGGUCUUAG | | CCUUCCCU | | |
| hsa-miR- | GAGGUUUGGGGA | 29042 | AGCAAAUCCUCCCC | 31084 | Breast tumor |
| 4748 | GGAUUUGCU | | AAACCUC | | |
| hsa-miR- | CGCCCCUCCUGCC | 29043 | CUGUGGGGGCAGGA | 31085 | Breast tumor |
| 4749-3p | CCCACAG | | GGGGCG | | |
| hsa-miR- | UGCGGGGACAGG | 29044 | GAUGCCCUGGCCUG | 31086 | Breast tumor |
| 4749-5p | CCAGGGCAUC | | UCCCCGCA | | |
| hsa-miR- | CCUGACCCACCCC | 29045 | CUGCGGGAGGGGGU | 31087 | Breast tumor |
| 4750-3p | CUCCCGCAG | | GGGUCAGG | | |
| hsa-miR- | CUCGGGCGGAGG | 29046 | CACUCAACCACCUC | 31088 | Breast tumor |
| 4750-5p | UGGUUGAGUG | | CGCCCGAG | | |
| hsa-miR- | AGAGGACCCGUA | 29047 | CCUUCUAGCAGCUA | 31089 | Breast tumor |
| 4751 | GCUGCUAGAAGG | | CGGGUCCUCU | | |
| hsa-miR- | UUGUGGAUCUCA | 29048 | AGCACAUCCUUGAG | 31090 | Breast tumor |
| 4752 | AGGAUGUGCU | | AUCCACAA | | |
| hsa-miR- | UUCUCUUUCUUU | 29049 | ACACAAGGCUAAAG | 31091 | Breast tumor |
| 4753-3p | AGCCUUGUGU | | AAAGAGAA | | |
| hsa-miR- | CAAGGCCAAAGG | 29050 | CUGUUCUCUUCCUU | 31092 | Breast tumor |
| 4753-5p | AAGAGAACAG | | UGGCCUUG | | |
| hsa-miR- | AUGCGGACCUGG | 29051 | ACUCCGCUAACCCA | 31093 | Breast tumor |
| 4754 | GUUAGCGGAGU | | GGUCCGCAU | | |
| hsa-miR- | AGCCAGGCUCUGA | 29052 | ACUUUCCCUUCAGA | 31094 | Breast tumor |
| 4755-3p | AGGGAAAGU | | GCCUGGCU | | |
| hsa-miR- | UUUCCCUUCAGAG | 29053 | AAAGCCAGGCUCUG | 31095 | Breast tumor |
| 4755-5p | CCUGGCUUU | | AAGGGAAA | | |
| hsa-miR- | CCAGAGAUGGUU | 29054 | AUAGGAAGGCAACC | 31096 | Breast tumor |
| 4756-3p | GCCUUCCUAU | | AUCUCUGG | | |
| hsa-miR- | CAGGGAGGCGCUC | 29055 | AGCAGAGAGUGAGC | 31097 | Breast tumor |
| 4756-5p | ACUCUCUGCU | | GCCUCCCUG | | |
| hsa-miR- | CAUGACGUCACAG | 29056 | GCGAAGCCUCUGUG | 31098 | Breast tumor |
| 4757-3p | AGGCUUCGC | | ACGUCAUG | | |
| hsa-miR- | AGGCCUCUGUGAC | 29057 | ACACCGUGACGUCA | 31099 | Breast tumor |
| 4757-5p | GUCACGGUGU | | CAGAGGCCU | | |
| hsa-miR- | UGCCCCACCUGCU | 29058 | GAGGGUGGUCAGCA | 31100 | Breast tumor |
| 4758-3p | GACCACCCUC | | GGUGGGGCA | | |
| hsa-miR- | GUGAGUGGGAGC | 29059 | CAGCCCCACCGGCU | 31101 | Breast tumor |
| 4758-5p | CGGUGGGGCUG | | CCCACUCAC | | |
| hsa-miR- | UAGGACUAGAUG | 29060 | UAAUUCCAACAUCU | 31102 | Breast tumor |
| 4759 | UUGGAAUUA | | AGUCCUA | | |
| hsa-miR- | AAAUUCAUGUUC | 29061 | GGUUUAGAUUGAAC | 31103 | Breast tumor |
| 4760-3p | AAUCUAAACC | | AUGAAUUU | | |
| hsa-miR- | UUUAGAUUGAAC | 29062 | CUAACUUCAUGUUC | 31104 | Breast tumor |
| 4760-5p | AUGAAGUUAG | | AAUCUAAA | | |
| hsa-miR- | GAGGGCAUGCGC | 29063 | GGACAAAGUGCGCA | 31105 | Breast tumor |
| 4761-3p | ACUUUGUCC | | UGCCCUC | | |
| hsa-miR- | ACAAGGUGUGCA | 29064 | GGUCAGGCAUGCAC | 31106 | Breast tumor |
| 4761-5p | UGCCUGACC | | ACCUUGU | | |
| hsa-miR- | CUUCUGAUCAAG | 29065 | CACCACAAAUCUUG | 31107 | Breast tumor |
| 4762-3p | AUUUGUGGUG | | AUCAGAAG | | |
| hsa-miR- | CCAAAUCUUGAUC | 29066 | AGGCUUCUGAUCAA | 31108 | Breast tumor |
| 4762-5p | AGAAGCCU | | GAUUUGG | | |
| hsa-miR- | AGGCAGGGGCUG | 29067 | CCCGCCCAGCACCA | 31109 | Breast tumor |
| 4763-3p | GUGCUGGGCGGG | | GCCCCUGCCU | | |
| hsa-miR- | CGCCUGCCCAGCC | 29068 | AGCAGGAGGGCUGG | 31110 | Breast tumor |
| 4763-5p | CUCCUGCU | | GCAGGCG | | |
| hsa-miR- | UUAACUCCUUUCA | 29069 | CCAUGGGUGUGAAA | 31111 | Breast tumor |
| 4764-3p | CACCCAUGG | | GGAGUUAA | | |
| hsa-miR- | UGGAUGUGGAAG | 29070 | AGAUAACUCCUUCC | 31112 | Breast tumor |
| 4764-5p | GAGUUAUCU | | ACAUCCA | | |
| hsa-miR- | UGAGUGAUUGAU | 29071 | GAACAUAGCUAUCA | 31113 | Breast tumor |
| 4765 | AGCUAUGUUC | | AUCACUCA | | |
| hsa-miR- | AUAGCAAUUGCU | 29072 | UUCCAAAAGAGCAA | 31114 | Breast tumor |
| 4766-3p | CUUUUGGAA | | UUGCUAU | | |
| hsa-miR- | UCUGAAAGAGCA | 29073 | AACACCAACUGCUC | 31115 | Breast tumor |
| 4766-5p | GUUGGUGUU | | UUUCAGA | | |
| hsa-miR- | CGCGGGCGCUCCU | 29074 | GGCGGCGGCCAGGA | 31116 | Breast tumor |
| 4767 | GGCCGCCGCC | | GCGCCCGCG | | |
| hsa-miR- | CCAGGAGAUCCAG | 29075 | AUUCUCUCUGGAUC | 31117 | Breast tumor |
| 4768-3p | AGAGAAU | | UCCUGG | | |
| hsa-miR- | AUUCUCUCUGGA | 29076 | AUCCAUGGGAUCCA | 31118 | Breast tumor |
| 4768-5p | UCCCAUGGAU | | GAGAGAAU | | |
| hsa-miR- | UCUGCCAUCCUCC | 29077 | GUAGGGGAGGGAGG | 31119 | Breast tumor |
| 4769-3p | CUCCCCUAC | | AUGGCAGA | | |
| hsa-miR- | GGUGGGAUGGAG | 29078 | CUCAUACCUUCUCU | 31120 | Breast tumor |
| 4769-5p | AGAAGGUAUGAG | | CCAUCCCACC | | |
| hsa-miR- | UGAGAUGACACU | 29079 | AGCUACAGUGUCAU | 31121 | Breast tumor |
| 4770 | GUAGCU | | CUCA | | |
| hsa-miR- | AGCAGACUUGACC | 29080 | UAAUUGUAGGUCAA | 31122 | Breast tumor |
| 4771 | UACAAUUA | | GUCUGCU | | |
| hsa-miR- | CAGAACAGGAGC | 29081 | GCCUUUCUAUGCUC | 31123 | Breast tumor |
| 4773 | AUAGAAAGGC | | CUGUUCUG | | |
| hsa-miR- | UUAAUUUUUUGU | 29082 | AGUGACCGAAACAA | 31124 | Breast tumor |
| 4775 | UUCGGUCACU | | AAAAUUAA | | |
| hsa-miR- | CUUGCCAUCCUGG | 29083 | AUGCAGUGGACCAG | 31125 | Breast tumor |
| 4776-3p | UCCACUGCAU | | GAUGGCAAG | | |
| hsa-miR- | GUGGACCAGGAU | 29084 | AGCCCUUGCCAUCC | 31126 | Breast tumor |
| 4776-5p | GGCAAGGGCU | | UGGUCCAC | | |
| hsa-miR- | AUACCUCAUCUAG | 29085 | UACAGCAUUCUAGA | 31127 | Breast tumor |
| 4777-3p | AAUGCUGUA | | UGAGGUAU | | |
| hsa-miR- | UUCUAGAUGAGA | 29086 | UAUAUAUAUCUCUC | 31128 | Breast tumor |
| 4777-5p | GAUAUAUAUA | | AUCUAGAA | | |
| hsa-miR- | UCUUCUUCCUUUG | 29087 | UCAACUCUGCAAAG | 31129 | Breast tumor |
| 4778-3p | CAGAGUUGA | | GAAGAAGA | | |
| hsa-miR- | AAUUCUGUAAAG | 29088 | CCUCUUCUUCCUUU | 31130 | Breast tumor |
| 4778-5p | GAAGAAGAGG | | ACAGAAUU | | |
| hsa-miR- | UAGGAGGGAAUA | 29089 | CUGCUUUUACUAUU | 31131 | Breast tumor |
| 4779 | GUAAAAGCAG | | CCCUCCUA | | |
| hsa-miR- | ACCCUUGAGCCUG | 29090 | GCUAGGGAUCAGGC | 31132 | Breast tumor |
| 4780 | AUCCCUAGC | | UCAAGGGU | | |
| hsa-miR- | AAUGUUGGAAUC | 29091 | CUCUAGCGAGGAUU | 31133 | Breast tumor |
| 4781-3p | CUCGCUAGAG | | CCAACAUU | | |
| hsa-miR- | UAGCGGGGAUUC | 29092 | CCAAUAUUGGAAUC | 31134 | Breast tumor |
| 4781-5p | CAAUAUUGG | | CCCGCUA | | |
| hsa-miR- | UGAUUGUCUUCA | 29093 | GUUCUAGAUAUGAA | 31135 | Breast tumor |
| 4782-3p | UAUCUAGAAC | | GACAAUCA | | |
| hsa-miR- | UUCUGGAUAUGA | 29094 | UUGAUUGUCUUCAU | 31136 | Breast tumor |
| 4782-5p | AGACAAUCAA | | AUCCAGAA | | |
| hsa-miR- | CCCCGGUGUUGGG | 29095 | GCAGACGCGCCCCA | 31137 | Breast tumor |
| 4783-3p | GCGCGUCUGC | | ACACCGGGG | | |
| hsa-miR- | GGCGCGCCCAGCU | 29096 | AGCCCGGGAGCUGG | 31138 | Breast tumor |
| 4783-5p | CCCGGGCU | | GCGCGCC | | |
| hsa-miR- | UGAGGAGAUGCU | 29097 | UCAGUCCCAGCAUC | 31139 | Breast tumor |
| 4784 | GGGACUGA | | UCCUCA | | |
| hsa-miR- | AGAGUCGGCGAC | 29098 | GCUGGCGGCGUCGC | 31140 | Breast tumor |
| 4785 | GCCGCCAGC | | CGACUCU | | |
| hsa-miR- | UGAAGCCAGCUCU | 29099 | GCCCAGACCAGAGC | 31141 | Breast tumor |
| 4786-3p | GGUCUGGGC | | UGGCUUCA | | |
| hsa-miR- | UGAGACCAGGAC | 29100 | GGUGCAUCCAGUCC | 31142 | Breast tumor |
| 4786-5p | UGGAUGCACC | | UGGUCUCA | | |
| hsa-miR- | GAUGCGCCGCCCA | 29101 | GCGCGGGGCAGUGG | 31143 | Breast tumor |
| 4787-3p | CUGCCCCGCGC | | GCGGCGCAUC | | |
| hsa-miR- | GCGGGGGUGGCG | 29102 | GGGAUGCCGCCGCC | 31144 | Breast tumor |
| 4787-5p | GCGGCAUCCC | | ACCCCCGC | | |
| hsa-miR- | UUACGGACCAGCU | 29103 | GCCUCCCUUAGCUG | 31145 | Breast tumor |
| 4788 | AAGGGAGGC | | GUCCGUAA | | |
| hsa-miR- | CACACAUAGCAGG | 29104 | UAUAUACACCUGCU | 31146 | Breast tumor |
| 4789-3p | UGUAUAUA | | AUGUGUG | | |
| hsa-miR- | GUAUACACCUGA | 29105 | CAUACACAUAUCAG | 31147 | Breast tumor |
| 4789-5p | UAUGUGUAUG | | GUGUAUAC | | |
| hsa-miR- | UGAAUGGUAAAG | 29106 | UGUGACAUCGCUUU | 31148 | Breast tumor |
| 4790-3p | CGAUGUCACA | | ACCAUUCA | | |
| hsa-miR- | AUCGCUUUACCAU | 29107 | AACAUGAAUGGUAA | 31149 | Breast tumor |
| 4790-5p | UCAUGUU | | AGCGAU | | |
| hsa-miR- | UGGAUAUGAUGA | 29108 | UUUCAGUCAUCAUA | 31150 | Breast tumor |
| 4791 | CUGAAA | | UCCA | | |
| hsa-miR- | CGGUGAGCGCUCG | 29109 | GCCAGCGAGCGCUC | 31151 | Breast tumor |
| 4792 | CUGGC | | ACCG | | |
| hsa-miR- | UCUGCACUGUGA | 29110 | AGCCAGCCAACUCA | 31152 | Breast tumor |
| 4793-3p | GUUGGCUGGCU | | CAGUGCAGA | | |
| hsa-miR- | ACAUCCUGCUCCA | 29111 | CCUCUGCCCUGUGG | 31153 | Breast tumor |
| 4793-5p | CAGGGCAGAGG | | AGCAGGAUGU | | |
| hsa-miR- | UCUGGCUAUCUCA | 29112 | ACAGUCUCGUGAGA | 31154 | Breast tumor |
| 4794 | CGAGACUGU | | UAGCCAGA | | |
| hsa-miR- | AUAUUAUUAGCC | 29113 | AUCCAGAAGUGGCU | 31155 | Breast tumor |
| 4795-3p | ACUUCUGGAU | | AAUAAUAU | | |
| hsa-miR- | AGAAGUGGCUAA | 29114 | UCAAUAUUAUUAGC | 31156 | Breast tumor |
| 4795-5p | UAAUAUUGA | | CACUUCU | | |
| hsa-miR- | UAAAGUGGCAGA | 29115 | GUGUCUAUACUCUG | 31157 | Breast tumor |
| 4796-3p | GUAUAGACAC | | CCACUUUA | | |
| hsa-miR- | UGUCUAUACUCU | 29116 | GUAAAGUGACAGAG | 31158 | Breast tumor |
| 4796-5p | GUCACUUUAC | | UAUAGACA | | |
| hsa-miR- | UCUCAGUAAGUG | 29117 | ACAGAGUGCCACUU | 31159 | Breast tumor |
| 4797-3p | GCACUCUGU | | ACUGAGA | | |
| hsa-miR- | GACAGAGUGCCAC | 29118 | UUCAGUAAGUGGCA | 31160 | Breast tumor |
| 4797-5p | UUACUGAA | | CUCUGUC | | |
| hsa-miR- | AACUCACGAAGU | 29119 | ACUUCGGUAUACUU | 31161 | Breast tumor |
| 4798-3p | AUACCGAAGU | | CGUGAGUU | | |
| hsa-miR- | UUCGGUAUACUU | 29120 | CCAAUUCACAAAGU | 31162 | Breast tumor |
| 4798-5p | UGUGAAUUGG | | AUACCGAA | | |
| hsa-miR- | ACUGGCAUGCUGC | 29121 | UAUAUAAAUGCAGC | 31163 | Breast tumor |
| 4799-3p | AUUUAUAUA | | AUGCCAGU | | |
| hsa-miR- | AUCUAAAUGCAG | 29122 | GACUGGCAUGCUGC | 31164 | Breast tumor |
| 4799-5p | CAUGCCAGUC | | AUUUAGAU | | |
| hsa-miR- | CAUCCGUCCGUCU | 29123 | GUGGACAGACGGAC | 31165 | Breast tumor |
| 4800-3p | GUCCAC | | GGAUG | | |
| hsa-miR- | AGUGGACCGAGG | 29124 | UCCUUCCUUCCUCG | 31166 | Breast tumor |
| 4800-5p | AAGGAAGGA | | GUCCACU | | |
| hsa-miR- | UACACAAGAAAA | 29125 | UGAGCCUUGGUUUU | 31167 | Breast tumor |
| 4801 | CCAAGGCUCA | | CUUGUGUA | | |
| hsa-miR- | UAACAUAAUAGU | 29126 | UCAAUCCACACUAU | 31168 | Breast tumor |
| 4803 | GUGGAUUGA | | UAUGUUA | | |
| hsa-miR- | UGCUUAACCUUGC | 29127 | UUUCGAGGGCAAGG | 31169 | Breast tumor |
| 4804-3p | CCUCGAAA | | UUAAGCA | | |
| hsa-miR- | UUGGACGGUAAG | 29128 | UUGCUUAACCUUAC | 31170 | Breast tumor |
| 4804-5p | GUUAAGCAA | | CGUCCAA | | |
| hsa-miR- | AAAAGCAUCAGG | 29129 | UGGGUACUUCCUGA | 31171 | Breast tumor and B |
| 4422 | AAGUACCCA | | UGCUUUU | | cells |
| hsa-miR- | GCAGGACAGGCA | 29130 | AUCCACUUCUGCCU | 31172 | Breast tumor and B |
| 4436a | GAAGUGGAU | | GUCCUGC | | cells |
| hsa-miR- | CAGGGCUGGCAG | 29131 | ACCCAUGUCACUGC | 31173 | Breast tumor and B |
| 4446-3p | UGACAUGGGU | | CAGCCCUG | | cells |
| hsa-miR- | AUUUCCCUGCCAU | 29132 | GCCAAGGGAAUGGC | 31174 | Breast tumor and B |
| 4446-5p | UCCCUUGGC | | AGGGAAAU | | cells |
| hsa-miR- | UGGCGGCGGUAG | 29133 | AAGCCCAUAACUAC | 31175 | Breast tumor and B |
| 4467 | UUAUGGGCUU | | CGCCGCCA | | cells |
| hsa-miR- | GCUCCCUCUAGGG | 29134 | UCCGAGCGACCCUA | 31176 | Breast tumor and B |
| 4469 | UCGCUCGGA | | GAGGGAGC | | cells |
| hsa-miR- | UGGGAACUUAGU | 29135 | UUAAACCUCUACUA | 31177 | Breast tumor and B |
| 4471 | AGAGGUUUAA | | AGUUCCCA | | cells |
| hsa-miR- | UGGGGCUAGUGA | 29136 | CGUCCUGCAUCACU | 31178 | Breast tumor and B |
| 4489 | UGCAGGACG | | AGCCCCA | | cells |
| hsa-miR- | GCUGACAGCAGG | 29137 | AGCGGCCAGCCCUG | 31179 | Breast tumor and B |
| 4526 | GCUGGCCGCU | | CUGUCAGC | | cells |
| hsa-miR- | AUUGGACUGCUG | 29138 | ACGGGCCAUCAGCA | 31180 | Breast tumor and B |
| 4529-3p | AUGGCCCGU | | GUCCAAU | | cells |
| hsa-miR- | AGGCCAUCAGCAG | 29139 | UUCAUUGGACUGCU | 31181 | Breast tumor and B |
| 4529-5p | UCCAAUGAA | | GAUGGCCU | | cells |
| hsa-miR- | UUGGACAGAAAA | 29140 | UUCCUGCGUGUUUU | 31182 | Breast tumor and B |
| 4520a-3p | CACGCAGGAA | | CUGUCCAA | | cells, skin |
| | | | | | (psoriasis) |
| hsa-miR- | CCUGCGUGUUUUC | 29141 | UUGGACAGAAAACA | 31183 | Breast tumor and B |
| 4520a-5p | UGUCCAA | | CGCAGG | | cells, skin |
| | | | | | (psoriasis) |
| hsa-miR- | UGAGACAGGCUU | 29142 | AUAGCAGCAUAAGC | 31184 | Breast tumor and B |
| 4524a-3p | AUGCUGCUAU | | CUGUCUCA | | cells, skin |
| | | | | | (psoriasis) |
| hsa-miR- | AUAGCAGCAUGA | 29143 | UGAGACAGGUUCAU | 31185 | Breast tumor and B |
| 4524a-5p | ACCUGUCUCA | | GCUGCUAU | | cells, skin |
| | | | | | (psoriasis) |
| hsa-miR- | GAGACAGGUUCA | 29144 | UAGCAGCAUGAACC | 31186 | Breast tumor and B |
| 4524b-3p | UGCUGCUA | | UGUCUC | | cells, skin |
| | | | | | (psoriasis) |
| hsa-miR- | AUAGCAGCAUAA | 29145 | GAGACAGGCUUAUG | 31187 | Breast tumor and B |
| 4524b-Sp | GCCUGUCUC | | CUGCUAU | | cells, skin |
| | | | | | (psoriasis) |
| hsa-miR- | UGUGUGGAUCCU | 29146 | UGCCUCCUCCAGGA | 31188 | Breast tumor and |
| 3911 | GGAGGAGGCA | | UCCACACA | | female reproductive |
| | | | | | tract |
| hsa-miR- | AGACAUCAAGAU | 29147 | UUUGGGACUGAUCU | 31189 | Breast tumor and |
| 3913-3p | CAGUCCCAAA | | UGAUGUCU | | female reproductive |
| | | | | | tract |
| hsa-miR- | UUUGGGACUGAU | 29148 | AGACAUCAAGAUCA | 31190 | Breast tumor and |
| 3913-5p | CUUGAUGUCU | | GUCCCAAA | | female reproductive |
| | | | | | tract |
| hsa-miR- | AAGGAACCAGAA | 29149 | ACUUCUCAUUUUCU | 31191 | Breast tumor and |
| 3914 | AAUGAGAAGU | | GGUUCCUU | | female reproductive |
| | | | | | tract |
| hsa-miR- | UCUGGCCUUGACU | 29150 | AAAGAGUCAAGUCA | 31192 | Breast tumor and |
| 3922-3p | UGACUCUUU | | AGGCCAGA | | female reproductive |
| | | | | | tract |
| hsa-miR- | UCAAGGCCAGAG | 29151 | UGCUGUGGGACCUC | 31193 | Breast tumor and |
| 3922-5p | GUCCCACAGCA | | UGGCCUUGA | | female reproductive |
| | | | | | tract |
| hsa-miR- | ACUCCAGUUUUA | 29152 | CAAGAGAACUAAAA | 31194 | Breast tumor and |
| 3925-3p | GUUCUCUUG | | CUGGAGU | | female reproductive |
| | | | | | tract |
| hsa-miR- | AAGAGAACUGAA | 29153 | AGGCUCCACUUUCA | 31195 | Breast tumor and |
| 3925-5p | AGUGGAGCCU | | GUUCUCUU | | female reproductive |
| | | | | | tract |
| hsa-miR- | UAAGGGGUGUAU | 29154 | UGCAUCUGCCAUAC | 31196 | Breast tumor and |
| 3936 | GGCAGAUGCA | | ACCCCUUA | | lymphoblastic |
| | | | | | leukemia |
| hsa-miR- | UUUCAGAUAACA | 29155 | AUGUAAUACUGUUA | 31197 | Breast tumor and |
| 3942-3p | GUAUUACAU | | UCUGAAA | | lymphoblastic |
| | | | | | leukemia |
| hsa-miR- | AAGCAAUACUGU | 29156 | AUUUCAGGUAACAG | 31198 | Breast tumor and |
| 3942-5p | UACCUGAAAU | | UAUUGCUU | | lymphoblastic |
| | | | | | leukemia |
| hsa-miR- | UACUAACUGCAG | 29157 | UCACUUGAAUCUGC | 31199 | Breast tumor and |
| 4637 | AUUCAAGUGA | | AGUUAGUA | | lymphoblastic |
| | | | | | leukemia |
| hsa-miR- | AUUGCCUAACAU | 29158 | UUCUGGCACAUGUU | 31200 | Breast tumor and |
| 4774-3p | GUGCCAGAA | | AGGCAAU | | Lymphoblastic |
| | | | | | leukemia |
| hsa-miR- | UCUGGUAUGUAG | 29159 | UUAUUACCUACUAC | 31201 | Breast tumor and |
| 4774-5p | UAGGUAAUAA | | AUACCAGA | | Lymphoblastic |
| | | | | | leukemia |
| hsa-miR- | AGUUGCCUUUUU | 29160 | GCAUGGGAACAAAA | 31202 | Breast tumor B |
| 4423-5p | GUUCCCAUGC | | AGGCAACU | | cells and skin |
| | | | | | (psoriasis) |
| hsa-miR- | AUAGGCACCAAA | 29161 | UUGUUGCUUUUUGG | 31203 | Breast tumor, B |
| 4423-3p | AAGCAACAA | | UGCCUAU | | cells and skin |
| | | | | | (psoriasis) |
| hsa-miR- | CCUGCAACUUUGC | 29162 | UCUGAUCAGGCAAA | 31204 | Breast tumor, blood |
| 4772-3p | CUGAUCAGA | | GUUGCAGG | | mononuclear cells |
| hsa-miR- | UGAUCAGGCAAA | 29163 | AGUCUGCAAUUUUG | 31205 | Breast tumor, blood |
| 4772-5p | AUUGCAGACU | | CCUGAUCA | | mononuclear cells |
| hsa-miR- | UUGUGGCUGGUC | 29164 | UUAGCCUCAUGACC | 31206 | Breast tumor, |
| 4474-3p | AUGAGGCUAA | | AGCCACAA | | lymphoblastic |
| | | | | | leukemia and B |
| | | | | | cells |
| hsa-miR- | UUAGUCUCAUGA | 29165 | UGUGUCUGAUCAUG | 31207 | Breast tumor, |
| 4474-5p | UCAGACACA | | AGACUAA | | lymphoblastic |
| | | | | | leukemia and B |
| | | | | | cells |
| hsa-miR- | AAAGAUAGACAA | 29166 | AUUUAGCCAAUUGU | 31208 | Breast tumor, |
| 4662a-3p | UUGGCUAAAU | | CUAUCUUU | | psoriasis |
| hsa-miR- | UUAGCCAAUUGU | 29167 | CUAAAGAUGGACAA | 31209 | Breast tumor, |
| 4662a-5p | CCAUCUUUAG | | UUGGCUAA | | psoriasis |
| hsa-miR- | UCUGUGAGACCA | 29168 | AGUAGUUCUUUGGU | 31210 | Breast tumor, |
| 4677-3p | AAGAACUACU | | CUCACAGA | | psoriasis |
| hsa-miR- | UUGUUCUUUGGU | 29169 | UGGCUGAAAGACCA | 31211 | Breast tumor, |
| 4677-5p | CUUUCAGCCA | | AAGAACAA | | psoriasis |
| hsa-miR- | CGGGCUGUCCGGA | 29170 | AGCCGACCCCUCCG | 31212 | Breast tumor, |
| 4741 | GGGGUCGGCU | | GACAGCCCG | | psoriasis |
| hsa-miR- | UCUGUAUUCUCCU | 29171 | CUGCAGGCAAAGGA | 31213 | Breast tumor, |
| 4742-3p | UUGCCUGCAG | | GAAUACAGA | | psoriasis |
| hsa-miR- | UACAUGGAUGGA | 29172 | GCUUGAAGGUUUCC | 31214 | Breast tumor, |
| 4802-3p | AACCUUCAAGC | | AUCCAUGUA | | psoriasis |
| hsa-miR- | UAUGGAGGUUCU | 29173 | AACAUGGUCUAGAA | 31215 | Breast tumor, |
| 4802-5p | AGACCAUGUU | | CCUCCAUA | | psoriasis |
| hsa-miR- | GGGACCAUCCUGC | 29174 | CCACAGCAGGCAGG | 31216 | Breast tumors |
| 3619-3p | CUGCUGUGG | | AUGGUCCC | | |
| hsa-miR- | UCAGCAGGCAGGC | 29175 | GCUGCACCAGCCUG | 31217 | Breast tumors |
| 3619-5p | UGGUGCAGC | | CCUGCUGA | | |
| hsa-miR- | UCACCUGACCUCC | 29176 | ACAGGCAUGGGAGG | 31218 | Breast tumors |
| 3622a-3p | CAUGCCUGU | | UCAGGUGA | | |
| hsa-miR- | CAGGCACGGGAGC | 29177 | CUCACCUGAGCUCC | 31219 | Breast tumors |
| 3622a-5p | UCAGGUGAG | | CGUGCCUG | | |
| hsa-miR- | UGAGUGUUGUCU | 29178 | UGCCCUCGUAGACA | 31220 | Breast tumors |
| 3659 | ACGAGGGCA | | ACACUCA | | |
| hsa-miR- | ACUGACAGGAGA | 29179 | UCAAAAUGCUCUCC | 31221 | Breast tumors |
| 3660 | GCAUUUUGA | | UGUCAGU | | |
| hsa-miR- | UGACCUGGGACUC | 29180 | CAGCUGUCCGAGUC | 31222 | Breast tumors |
| 3661 | GGACAGCUG | | CCAGGUCA | | |
| hsa-miR- | UCUCAGGAGUAA | 29181 | AACUCUGUCUUUAC | 31223 | Breast tumors |
| 3664-3p | AGACAGAGUU | | UCCUGAGA | | |
| hsa-miR- | AACUCUGUCUUCA | 29182 | ACUCAUGAGUGAAG | 31224 | Breast tumors |
| 3664-5p | CUCAUGAGU | | ACAGAGUU | | |
| hsa-miR- | UGGGGCGGAGCU | 29183 | GGCCUCCGGAAGCU | 31225 | Breast tunor |
| 3180-3p | UCCGGAGGCC | | CCGCCCCA | | |
| hsa-miR- | CAAUCAGCAAGU | 29184 | AGGGCAGUAUACUU | 31226 | Breast, myeloid |
| 34a-3p | AUACUGCCCU | | GCUGAUUG | | cells, ciliated |
| | | | | | epithelial cells |
| hsa-miR- | UGGCAGUGUCUU | 29185 | ACAACCAGCUAAGA | 31227 | Breast, myeloid |
| 34a-5p | AGCUGGUUGU | | CACUGCCA | | cells, ciliated |
| | | | | | epithelial cells |
| hsa-miR- | CCAAUAUUGGCU | 29186 | GGAGCAGCACAGCC | 31228 | Breast, pancreas |
| 195-3p | GUGCUGCUCC | | AAUAUUGG | | (islet) |
| hsa-miR- | UAGCAGCACAGA | 29187 | GCCAAUAUUUCUGU | 31229 | Breast, pancreas |
| 195-5p | AAUAUUGGC | | GCUGCUA | | (islet) |
| hsa-miR- | UAAUUUUAUGUA | 29188 | ACUAGCUUAUACAU | 31230 | Cardiomyocytes |
| 590-3p | UAAGCUAGU | | AAAAUUA | | |
| hsa-miR- | GAGCUUAUUCAU | 29189 | CUGCACUUUUAUGA | 31231 | Cardiomyocytes |
| 590-5p | AAAAGUGCAG | | AUAAGCUC | | |
| hsa-miR- | AAGACGGGAGGA | 29190 | CUCCCUUCUUUCCU | 31232 | Cartilage |
| 483-5p | AAGAAGGGAG | | CCCGUCUU | | (chondrocyte), fetal |
| | | | | | brain |
| hsa-miR- | CAGUGGUUUUAC | 29191 | CUACCAUAGGGUAA | 31233 | Cartilage |
| 140-5p | CCUAUGGUAG | | AACCACUG | | (chondrocytes) |
| hsa-miR- | AUUCUAAUUUCU | 29192 | AAAGACGUGGAGAA | 31234 | Cartilage/ |
| 576-5p | CCACGUCUUU | | AUUAGAAU | | chondrocyte |
| hsa-miR- | AACCAGCACCCCA | 29193 | GUCCAAAGUUGGGG | 31235 | Cartilage/ |
| 634 | ACUUUGGAC | | UGCUGGUU | | chondrocyte |
| hsa-miR- | AAAGACAUAGGA | 29194 | GAGGUGACUCUAUC | 31236 | Cartilage/ |
| 641 | UAGAGUCACCUC | | CUAUGUCUUU | | chondrocyte |
| hsa-miR- | UAACUGGUUGAA | 29195 | GGUUCAGUUGUUCA | 31237 | Cartilage/chondroc |
| 582-3p | CAACUGAACC | | ACCAGUUA | | yte |
| hsa-miR- | CGUGCCACCCUUU | 29196 | CUGGGGAAAAGGGU | 31238 | Cartilage/chondroc |
| 1227-3p | UCCCCAG | | GGCACG | | vtes |
| hsa-miR- | GUGGGGCCAGGC | 29197 | CCACCGCCUGGCCC | 31239 | Cartilage/chondroc |
| 1227-5p | GGUGG | | CAC | | vtes |
| hsa-miR- | AAAAGCUGGGUU | 29198 | UUGCCCUCUCAACC | 31240 | Central nervous |
| 320b | GAGAGGGCAA | | CAGCUUUU | | system |
| hsa-miR- | GGUCCAGAGGGG | 29199 | GAACCUAUCUCCCC | 31241 | Central nervous |
| 198 | AGAUAGGUUC | | UCUGGACC | | system(CNS) |
| hsa-miR- | UAGCCUUCAGAUC | 29200 | AAAACACCAAGAUC | 31242 | Cervical and breast |
| 3614-3p | UUGGUGUUUU | | UGAAGGCUA | | tumors |
| hsa-miR- | CCACUUGGAUCUG | 29201 | GGGCAGCCUUCAGA | 31243 | Cervical and breast |
| 3614-5p | AAGGCUGCCC | | UCCAAGUGG | | tumors |
| hsa-miR- | UGUGCGCAGGGA | 29202 | GGGAGAGGUCUCCC | 31244 | Cervical cancer |
| 933 | GACCUCUCCC | | UGCGCACA | | |
| hsa-miR- | UGUCUACUACUG | 29203 | CCAGUGUCUCCAGU | 31245 | Cervical cancer |
| 934 | GAGACACUGG | | AGUAGACA | | |
| hsa-miR- | AAGGCAGGGCCCC | 29204 | GGGGAGCGGGGGCC | 31246 | Cervical cancer |
| 940 | CGCUCCCC | | CUGCCUU | | |
| hsa-miR- | CUGACUGUUGCCG | 29205 | CUGGAGGACGGCAA | 31247 | Cervical cancer |
| 943 | UCCUCCAG | | CAGUCAG | | |
| hsa-miR- | AAAAACCACAAU | 29206 | UGGUGCAAAAGUAA | 31248 | Cervical tumor |
| 548aa | UACUUUUGCACCA | | UUGUGGUUUUU | | |
| hsa-miR- | CAAAAACCGCAAU | 29207 | UGCAAAAGUAAUUG | 31249 | Cervical tumor |
| 548z | UACUUUUGCA | | CGGUUUUUG | | |
| hsa-miR- | AUGUGCCUGAGG | 29208 | UGUCUUACUCCCUC | 31250 | Cervical tumor |
| 550b-2-5p | GAGUAAGACA | | AGGCACAU | | |
| hsa-miR- | UCUUACUCCCUCA | 29209 | CAGUGCCUGAGGGA | 31251 | Cervical tumor |
| 550b-3p | GGCACUG | | GUAAGA | | |
| hsa-miR- | AGACACAUUUGG | 29210 | GGGUCCCUCUCCAA | 31252 | Cervical tumor |
| 642b-3p | AGAGGGACCC | | AUGUGUCU | | |
| hsa-miR- | GGUUCCCUCUCCA | 29211 | AGACACAUUUGGAG | 31253 | Cervical tumor |
| 642b-5p | AAUGUGUCU | | AGGGAACC | | |
| hsa-miR- | AAAAUUUCUUUC | 29212 | CUAAGUAGUGAAAG | 31254 | Cervical tumors |
| 3606-3p | ACUACUUAG | | AAAUUUU | | |
| hsa-miR- | UUAGUGAAGGCU | 29213 | AAUUAAAAUAGCCU | 31255 | Cervical tumors |
| 3606-5p | AUUUUAAUU | | UCACUAA | | |
| hsa-miR- | ACUGUAAACGCU | 29214 | CAUCAGAAAGCGUU | 31256 | Cervical tumors |
| 3607-3p | UUCUGAUG | | UACAGU | | |
| hsa-miR- | GCAUGUGAUGAA | 29215 | ACUGAUUUGCUUCA | 31257 | Cervical tumors |
| 3607-5p | GCAAAUCAGU | | UCACAUGC | | |
| hsa-miR- | CAAAGUGAUGAG | 29216 | CAGCCAGUAUUACU | 31258 | Cervical tumors |
| 3609 | UAAUACUGGCUG | | CAUCACUUUG | | |
| hsa-miR- | GAAUCGGAAAGG | 29217 | CGGCGCCUCCUUUC | 31259 | Cervical tumors |
| 3610 | AGGCGCCG | | CGAUUC | | |
| hsa-miR- | UUGUGAAGAAAG | 29218 | UAAGAAUUUCUUUC | 31260 | Cervical tumors |
| 3611 | AAAUUCUUA | | UUCACAA | | |
| hsa-miR- | AGGAGGCAUCUU | 29219 | UCCAUUUCUCAAGA | 31261 | Cervical tumors |
| 3612 | GAGAAAUGGA | | UGCCUCCU | | |
| hsa-miR- | ACAAAAAAAAAA | 29220 | GAAGGGUUGGGCUU | 31262 | Cervical tumors |
| 3613-3p | GCCCAACCCUUC | | UUUUUUUUGU | | |
| hsa-miR- | UGUUGUACUUUU | 29221 | GAACAAAAAAAAAA | 31263 | Cervical tumors |
| 3613-5p | UUUUUUGUUC | | GUACAACA | | |
| hsa-miR- | UCUCUCGGCUCCU | 29222 | GAGCCGCGAGGAGC | 31264 | Cervical tumors |
| 3615 | CGCGGCUC | | CGAGAGA | | |
| hsa-miR- | CGAGGGCAUUUC | 29223 | GCCUGCAUCAUGAA | 31265 | Cervical tumors |
| 3616-3p | AUGAUGCAGGC | | AUGCCCUCG | | |
| hsa-miR- | AUGAAGUGCACU | 29224 | ACAUAUCAUGAGUG | 31266 | Cervical tumors |
| 3616-5p | CAUGAUAUGU | | CACUUCAU | | |
| hsa-miR- | UGUCUACAUUAA | 29225 | GCUCUUUUCAUUAA | 31267 | Cervical tumors |
| 3618 | UGAAAAGAGC | | UGUAGACA | | |
| hsa-miR- | UCACCCUGCAUCC | 29226 | CUGGGUGCGGGAUG | 31268 | Cervical tumors |
| 3620-3p | CGCACCCAG | | CAGGGUGA | | |
| hsa-miR- | GUGGGCUGGGCU | 29227 | GGCCCAGCCCAGCC | 31269 | Cervical tumors |
| 3620-5p | GGGCUGGGCC | | CAGCCCAC | | |
| hsa-miR- | CGCGGGUCGGGG | 29228 | CCUGCAGACCCCGA | 31270 | Cervical tumors |
| 3621 | UCUGCAGG | | CCCGCG | | |
| hsa-miR- | UCACCUGAGCUCC | 29229 | CAGGCACGGGAGCU | 31271 | Cervical tumors |
| 3622b-3p | CGUGCCUG | | CAGGUGA | | |
| hsa-miR- | AGGCAUGGGAGG | 29230 | UCACCUGACCUCCC | 31272 | Cervical tumors |
| 3622b-5p | UCAGGUGA | | AUGCCU | | |
| hsa-miR- | CAUCAGCACCCUA | 29231 | AGAAAGGACAUAGG | 31273 | Cervical tumors and |
| 3617-3p | UGUCCUUUCU | | GUGCUGAUG | | psoriasis |
| hsa-miR- | AAAGACAUAGUU | 29232 | CCCAUCUUGCAACU | 31274 | Cervical tumors and |
| 3617-5p | GCAAGAUGGG | | AUGUCUUU | | psoriasis |
| hsa-miR- | UUUGUGACCUGG | 29233 | GGUUAGUGGACCAG | 31275 | Cholesterol |
| 758-3p | UCCACUAACC | | GUCACAAA | | regulation and brain |
| hsa-miR- | GAUGGUUGACCA | 29234 | GUGUGCUCUCUGGU | 31276 | Cholesterol |
| 758-5p | GAGAGCACAC | | CAACCAUC | | regulation and brain |
| hsa-miR- | AAAAGCUGGGUU | 29235 | ACCCUCUCAACCCA | 31277 | Chondrocyte |
| 320c | GAGAGGGU | | GCUUUU | | |
| hsa-miR- | CACAAGGUAUUG | 29236 | AGGUAAUACCAAUA | 31278 | Chondrocyte |
| 624-3p | GUAUUACCU | | CCUUGUG | | |
| hsa-miR- | UAGUACCAGUACC | 29237 | UGAACACAAGGUAC | 31279 | Chondrocyte |
| 624-5p | UUGUGUUCA | | UGGUACUA | | |
| hsa-miR- | AGUAUUCUGUAC | 29238 | ACCUUCCCUGGUAC | 31280 | Chondrocytes |
| 630 | CAGGGAAGGU | | AGAAUACU | | |
| hsa-miR- | UGGCAGUGUAUU | 29239 | ACCAGCUAACAAUA | 31281 | Chondrocytes, |
| 449a | GUUAGCUGGU | | CACUGCCA | | ciliated epithelial |
| | | | | | cells |
| hsa-miR- | UAUACAAGGGCA | 29240 | ACAGAGAGCUUGCC | 31282 | Chondrogenesis, |
| 381-3p | AGCUCUCUGU | | CUUGUAUA | | lung, brain |
| hsa-miR- | AGCGAGGUUGCCC | 29241 | AUAUACAAAGGGCA | 31283 | Chondrogenesis, |
| 381-5p | UUUGUAUAU | | ACCUCGCU | | lung, brain |
| hsa-miR- | CAAUCACUAACUC | 29242 | AUGGCAGUGGAGUU | 31284 | Ciliated epithelial |
| 34b-3p | CACUGCCAU | | AGUGAUUG | | cells |
| hsa-miR- | UAGGCAGUGUCA | 29243 | CAAUCAGCUAAUGA | 31285 | Ciliated epithelial |
| 34b-5p | UUAGCUGAUUG | | CACUGCCUA | | cells |
| hsa-miR- | CAGCCACAACUAC | 29244 | AGUGGCAGGGUAGU | 31286 | Ciliated epithelial |
| 449b-3p | CCUGCCACU | | UGUGGCUG | | cells, other tissues |
| hsa-miR- | AGGCAGUGUAUU | 29245 | GCCAGCUAACAAUA | 31287 | Ciliated epithelial |
| 449b-5p | GUUAGCUGGC | | CACUGCCU | | cells, other tissues |
| hsa-miR- | AAUCACUAACCAC | 29246 | CCUGGCCGUGUGGU | 31288 | Ciliated epithelial |
| 34c-3p | ACGGCCAGG | | UAGUGAUU | | cells, placenta |
| hsa-miR- | AGGCAGUGUAGU | 29247 | GCAAUCAGCUAACU | 31289 | Ciliated epithelial |
| 34c-5p | UAGCUGAUUGC | | ACACUGCCU | | cells, placenta |
| hsa-miR- | GUCCGCUCGGCGG | 29248 | UGGGCCACCGCCGA | 31290 | Circulating |
| 572 | UGGCCCA | | GCGGAC | | microrna (in |
| | | | | | plasma) |
| hsa-miR- | GAACGCCUGUUCU | 29249 | CCACCUGGCAAGAA | 31291 | Circulating |
| 614 | UGCCAGGUGG | | CAGGCGUUC | | micrornas (in |
| | | | | | Plasma) |
| hsa-miR- | AAGUGUGCAGGG | 29250 | ACCAGUGCCCUGCA | 31292 | Circulating |
| 648 | CACUGGU | | CACUU | | micrornas (in |
| | | | | | Plasma) |
| hsa-miR- | AGGGGUGCUAUC | 29251 | UCAAUCACAGAUAG | 31293 | Circulating plasma |
| 342-5p | UGUGAUUGA | | CACCCCU | | |
| hsa-miR- | CUUUCAGUCAGA | 29252 | GCAGCAAACAUCUG | 31294 | CNS (prefrontal |
| 30d-3p | UGUUUGCUGC | | ACUGAAAG | | cortex |
| hsa-miR- | UGUAAACAUCCCC | 29253 | CUUCCAGUCGGGGA | 31295 | CNS (prefrontal |
| 30d-5p | GACUGGAAG | | UGUUUACA | | cortex, embryoid |
| | | | | | body cells |
| hsa-miR- | UGUAAACAUCCUC | 29254 | CUUCCAGUCGAGGA | 31296 | CNS(prefrontal |
| 30a-5p | GACUGGAAG | | UGUUUACA | | cortex), other |
| | | | | | tissues |
| hsa-miR- | AGAAGUAAUUGC | 29255 | UGGCAAAACCGCAA | 31297 | Colorectal |
| 548a | GGUUUUGCCA | | UUACUUCU | | micrornaome |
| hsa-miR- | CAAAACUGGCAA | 29256 | GCAAAAGUAAUUGC | 31298 | Colorectal |
| 548a-3p | UUACUUUUGC | | CAGUUUUG | | micrornaome |
| hsa-miR- | AAAAGUAAUUGC | 29257 | GGUAAAACUCGCAA | 31299 | Colorectal |
| 548a-5p | GAGUUUUACC | | UUACUUUU | | micrornaome |
| hsa-miR- | CAAGAACCUCAGU | 29258 | ACAAAAGCAACUGA | 31300 | Colorectal |
| 548b-3p | UGCUUUUGU | | GGUUCUUG | | micrornaome |
| hsa-miR- | CAAAAAUCUCAA | 29259 | GCAAAAGUAAUUGA | 31301 | Colorectal |
| 548c-3p | UUACUUUUGC | | GAUUUUUG | | micrornaome |
| hsa-miR- | CAAAAACCACAGU | 29260 | GCAAAAGAAACUGU | 31302 | Colorectal |
| 548d-3p | UUCUUUUGC | | GGUUUUUG | | micrornaome |
| hsa-miR- | AAAAGUAAUUGU | 29261 | GGCAAAAACCACAA | 31303 | Colorectal |
| 548d-5p | GGUUUUUGCC | | UUACUUUU | | micrornaome |
| hsa-miR- | UGACAACUAUGG | 29262 | AGAGCUCAUCCAUA | 31304 | Colorectal |
| 549a | AUGAGCUCU | | GUUGUCA | | micrornaome |
| hsa-miR- | AACAGGUGACUG | 29263 | UUGUCUAACCAGUC | 31305 | Colorectal |
| 552 | GUUAGACAA | | ACCUGUU | | micrornaome |
| hsa-miR- | AAAACGGUGAGA | 29264 | AAAACAAAAUCUCA | 31306 | Colorectal |
| 553 | UUUUGUUUU | | CCGUUUU | | micrornaome |
| hsa-miR- | GCUAGUCCUGACU | 29265 | ACUGGCUGAGUCAG | 31307 | Colorectal |
| 554 | CAGCCAGU | | GACUAGC | | micrornaome |
| hsa-miR- | AGGGUAAGCUGA | 29266 | AUCAGAGGUUCAGC | 31308 | Colorectal |
| 555 | ACCUCUGAU | | UUACCCU | | micrornaome |
| hsa-miR- | AUAUUACCAUUA | 29267 | AAAGAUGAGCUAAU | 31309 | Colorectal |
| 556-3p | GCUCAUCUUU | | GGUAAUAU | | micrornaome |
| hsa-miR- | GAUGAGCUCAUU | 29268 | CUCAUAUUACAAUG | 31310 | Colorectal |
| 556-5p | GUAAUAUGAG | | AGCUCAUC | | micrornaome |
| hsa-miR- | AGGUUGACAUAC | 29269 | GGGAAACGUAUGUC | 31311 | Colorectal |
| 563 | GUUUCCC | | AACCU | | micrornaome |
| hsa-miR- | AUGUAUAAAUGU | 29270 | GUGUGUAUACAUUU | 31312 | Colorectal |
| 568 | AUACACAC | | AUACAU | | micrornaome |
| hsa-miR- | CUGAAGUGAUGU | 29271 | CUGAUCAGUUACAC | 31313 | Colorectal |
| 573 | GUAACUGAUCAG | | AUCACUUCAG | | micrornaome |
| hsa-miR- | AAGAUGUGGAAA | 29272 | GAUUCCAAUUUUUC | 31314 | Colorectal |
| 576-3p | AAUUGGAAUC | | CACAUCUU | | micrornaome |
| hsa-miR- | UAGAUAAAAUAU | 29273 | CAGGUACCAAUAUU | 31315 | Colorectal |
| 577 | UGGUACCUG | | UUAUCUA | | micrornaome |
| hsa-miR- | CUUCUUGUGCUCU | 29274 | ACAAUCCUAGAGCA | 31316 | Colorectal |
| 578 | AGGAUUGU | | CAAGAAG | | micrornaome |
| hsa-miR- | UAUGCAUUGUAU | 29275 | GGACCUAAAAAUAC | 31317 | Colorectal |
| 586 | UUUUAGGUCC | | AAUGCAUA | | micrornaome |
| hsa-miR- | UUUCCAUAGGUG | 29276 | GUGACUCAUCACCU | 31318 | Colorectal |
| 587 | AUGAGUCAC | | AUGGAAA | | micrornaome |
| hsa-miR- | UUGGCCACAAUG | 29277 | GUUCUAACCCAUUG | 31319 | Colorectal |
| 588 | GGUUAGAAC | | UGGCCAA | | micrornaome |
| hsa-miR- | UGUGUCACUCGA | 29278 | ACAGUGGUCAUCGA | 31320 | Colorectal |
| 597 | UGACCACUGU | | GUGACACA | | micrornaome |
| hsa-miR- | ACUUACAGACAA | 29279 | GAGCAAGGCUCUUG | 31321 | Colorectal |
| 600 | GAGCCUUGCUC | | UCUGUAAGU | | micrornaome |
| hsa-miR- | AGGCUGCGGAAU | 29280 | GUCCUGAAUUCCGC | 31322 | Colorectal |
| 604 | UCAGGAC | | AGCCU | | micrornaome |
| hsa-miR- | UAAAUCCCAUGG | 29281 | AGGAGAAGGCACCA | 31323 | Colorectal |
| 605 | UGCCUUCUCCU | | UGGGAUUUA | | micrornaome |
| hsa-miR- | AAACUACUGAAA | 29282 | AUCUUUGAUUUUCA | 31324 | Colorectal |
| 606 | AUCAAAGAU | | GUAGUUU | | micrornaome |
| hsa-miR- | GUUCAAAUCCAG | 29283 | GUUAUAGAUCUGGA | 31325 | Colorectal |
| 607 | AUCUAUAAC | | UUUGAAC | | micrornaome |
| hsa-miR- | AGGGUGUUUCUC | 29284 | AGAGAUGAGAGAAA | 31326 | Colorectal |
| 609 | UCAUCUCU | | CACCCU | | micrornaome |
| hsa-miR- | GACCUGGACAUG | 29285 | ACUGGGCACAAACA | 31327 | Colorectal |
| 619 | UUUGUGCCCAGU | | UGUCCAGGUC | | micrornaome |
| hsa-miR- | AUGGAGAUAGAU | 29286 | AUUUCUAUAUCUAU | 31328 | Colorectal |
| 620 | AUAGAAAU | | CUCCAU | | micrornaome |
| hsa-miR- | AGCUGUCUGAAA | 29287 | AAGACAUUUUCAGA | 31329 | Colorectal |
| 626 | AUGUCUU | | CAGCU | | micrornaome |
| hsa-miR- | AGACCUGGCCCAG | 29288 | GCUGAGGUCUGGGC | 31330 | Colorectal |
| 631 | ACCUCAGC | | CAGGUCU | | micrornaome |
| hsa-miR- | ACUUGGGCACUG | 29289 | GGACAUUGUUUCAG | 31331 | Colorectal |
| 635 | AAACAAUGUCC | | UGCCCAAGU | | micrornaome |
| hsa-miR- | ACUGGGGGCUUU | 29290 | ACGCAGAGCCCGAA | 31332 | Colorectal |
| 637 | CGGGCUCUGCGU | | AGCCCCCAGU | | micrornaome |
| hsa-miR- | AUCGCUGCGGUU | 29291 | ACAGCGCUCGCAAC | 31333 | Colorectal |
| 639 | GCGAGCGCUGU | | CGCAGCGAU | | micrornaome |
| hsa-miR- | GUCCCUCUCCAAA | 29292 | CAAGACACAUUUGG | 31334 | Colorectal |
| 642a-5p | UGUGUCUUG | | AGAGGGAC | | micrornaome |
| hsa-miR- | ACUUGUAUGCUA | 29293 | CUACCUGAGCUAGC | 31335 | Colorectal |
| 643 | GCUCAGGUAG | | AUACAAGU | | micrornaome |
| hsa-miR- | UUUAGGAUAAGC | 29294 | CAAAAGUCAAGCUU | 31336 | Colorectal |
| 651 | UUGACUUUUG | | AUCCUAAA | | micrornaome |
| hsa-miR- | GUGUUGAAACAA | 29295 | CAGUAGAGAUUGUU | 31337 | Colorectal |
| 653 | UCUCUACUG | | UCAACAC | | micrornaome |
| hsa-miR- | UAUGUCUGCUGA | 29296 | AAGGUGAUGGUCAG | 31338 | Colorectal |
| 654-3p | CCAUCACCUU | | CAGACAUA | | micrornaome |
| hsa-miR- | GGGGCUGGGGCC | 29297 | GCUCGGCCCCGGCC | 31339 | Corneal epithelial |
| 762 | GGGGCCGAGC | | CCAGCCCC | | cells |
| hsa-let-7c | UGAGGUAGUAGG | 29298 | AACCAUACAACCUA | 31340 | Dendritic cells |
| | UUGUAUGGUU | | CUACCUCA | | |
| hsa-miR- | GUGUCUUUUGCU | 29299 | UGACUGCAGAGCAA | 31341 | Dendritic cells and |
| 511 | CUGCAGUCA | | AAGACAC | | macrophages |
| hsa-miR- | CCCCGGGAACGUC | 29300 | GCUCCAGUCUCGAC | 31342 | Embryoid body |
| 1247-3p | GAGACUGGAGC | | GUUCCCGGGG | | cells |
| hsa-miR- | ACCCGUCCCGUUC | 29301 | UCCGGGGACGAACG | 31343 | Embryoid body |
| 1247-5p | GUCCCCGGA | | GGACGGGU | | cells |
| hsa-miR- | AUGGGUGAAUUU | 29302 | AUCCUUCUACAAAU | 31344 | Embryoid body |
| 1262 | GUAGAAGGAU | | UCACCCAU | | cells |
| hsa-miR- | CUGGACUGAGCCG | 29303 | CCAGUAGCACGGCU | 31345 | Embryoid body |
| 1269a | UGCUACUGG | | CAGUCCAG | | cells |
| hsa-miR- | CUGGACUGAGCCA | 29304 | CCAGUAGCAUGGCU | 31346 | Embryoid body |
| 1269b | UGCUACUGG | | CAGUCCAG | | cells |
| hsa-miR- | UACGUAGAUAUA | 29305 | AAAAUACAUAUAUA | 31347 | Embryoid body |
| 1277-3p | UAUGUAUUUU | | UCUACGUA | | cells |
| hsa-miR- | AAAUAUAUAUAU | 29306 | GCUCUUUUCAUUAA | 31348 | Embryoid body |
| 1277-5p | AUAUGUACGUAU | | UGUAGACA | | cells |
| hsa-miR- | UGCUGGAUCAGU | 29307 | GACUCGAACCACUG | 31349 | Embryoid body |
| 1287 | GGUUCGAGUC | | AUCCAGCA | | cells |
| hsa-miR- | UGGAUUUUUGGA | 29308 | UCCCUGAUCCAAAA | 31350 | Embryoid body |
| 1290 | UCAGGGA | | AUCCA | | cells |
| hsa-miR- | UUAUAAAGCAAU | 29309 | AAUCAGUCUCAUUG | 31351 | Embryoid body |
| 340-5p | GAGACUGAUU | | CUUUAUAA | | cells |
| hsa-miR- | UAGUGCAAUAUU | 29310 | ACCCUAUAAGCAAU | 31352 | Embryoid body |
| 454-3p | GCUUAUAGGGU | | AUUGCACUA | | cells, central |
| | | | | | nervous system, |
| | | | | | monocytes |
| hsa-miR- | ACCCUAUCAAUAU | 29311 | GCAGAGACAAUAUU | 31353 | Embryoid body |
| 454-5p | UGUCUCUGC | | GAUAGGGU | | cells, central |
| | | | | | nervous system, |
| | | | | | monocytes |
| hsa-miR- | UAAGUGCUUCCA | 29312 | AAGCAUGGAAGCAC | 31354 | Embryonic body |
| 302e | UGCUU | | UUA | | cells |
| hsa-miR- | UCGGCCUGACCAC | 29313 | GUGGGGUGGGUGGU | 31355 | Embryonic stem |
| 1234-3p | CCACCCCAC | | CAGGCCGA | | cell |
| hsa-miR- | GGGGGGGGGGGG | 29314 | CGGCCCCCCCCCCCC | 31356 | Embryonic stem |
| 1234-5p | GGGGGGCCG | | CCCCCC | | cell |
| hsa-let- | CUAUACGACCUGC | 29315 | AGAAAGGCAGCAGG | 31357 | Embryonic stem |
| 7d-3p | UGCCUUUCU | | UCGUAUAG | | cells |
| hsa-let- | AGAGGUAGUAGG | 29316 | AACUAUGCAACCUA | 31358 | Embryonic stem |
| 7d-5p | UUGCAUAGUU | | CUACCUCU | | cells |
| hsa-miR- | CCGCACUGUGGGU | 29317 | GCAGCAAGUACCCA | 31359 | Embryonic stem |
| 106b-3p | ACUUGCUGC | | CAGUGCGG | | cells |
| hsa-miR- | UAAAGUGCUGAC | 29318 | AUCUGCACUGUCAG | 31360 | Embryonic stem |
| 106b-5p | AGUGCAGAU | | CACUUUA | | cells |
| hsa-miR- | AACUGGAUCAAU | 29319 | CACUCCUAUAAUUG | 31361 | Embryonic stem |
| 1243 | UAUAGGAGUG | | AUCCAGUU | | cells |
| hsa-miR- | AAGUAGUUGGUU | 29320 | AACCAUCUCAUACA | 31362 | Embryonic stem |
| 1244 | UGUAUGAGAUGG | | AACCAACUACUU | | cells |
| | UU | | | | |
| hsa-miR- | AAGUGAUCUAAA | 29321 | AUGUAGGCCUUUAG | 31363 | Embryonic stem |
| 1245a | GGCCUACAU | | AUCACUU | | cells |
| hsa-miR- | UCAGAUGAUCUA | 29322 | UAUAGGCCUUUAGA | 31364 | Embryonic stem |
| 1245b-3p | AAGGCCUAUA | | UCAUCUGA | | cells |
| hsa-miR- | UAGGCCUUUAGA | 29323 | UUUAAGUGAUCUAA | 31365 | Embryonic stem |
| 1245b-5p | UCACUUAAA | | AGGCCUA | | cells |
| hsa-miR- | ACUCUAGCUGCCA | 29324 | AGCGCCUUUGGCAG | 31366 | Embryonic stem |
| 1251 | AAGGCGCU | | CUAGAGU | | cells |
| hsa-miR- | AGAAGGAAAUUG | 29325 | UAAAUGAAUUCAAU | 31367 | Embryonic stem |
| 1252 | AAUUCAUUUA | | UUCCUUCU | | cells |
| hsa-miR- | AGAGAAGAAGAU | 29326 | UGCAGGCUGAUCUU | 31368 | Embryonic stem |
| 1253 | CAGCCUGCA | | CUUCUCU | | cells |
| hsa-miR- | AGCCUGGAAGCU | 29327 | ACUGCAGGCUCCAG | 31369 | Embryonic stem |
| 1254 | GGAGCCUGCAGU | | CUUCCAGGCU | | cells |
| hsa-miR- | AGGAUGAGCAAA | 29328 | AAUCUACUUUCUUU | 31370 | Embryonic stem |
| 1255a | GAAAGUAGAUU | | GCUCAUCCU | | cells |
| hsa-miR- | AACCACUUUCUUU | 29329 | UGGAUGAGCAAAGA | 31371 | Embryonic stem |
| 1255b-2-3p | GCUCAUCCA | | AAGUGGUU | | cells |
| hsa-miR- | CGGAUGAGCAAA | 29330 | AACCACUUUCUUUG | 31372 | Embryonic stem |
| 1255b-5p | GAAAGUGGUU | | CUCAUCCG | | cells |
| hsa-miR- | AGGCAUUGACUU | 29331 | AGCUAGUGAGAAGU | 31373 | Embryonic stem |
| 1256 | CUCACUAGCU | | CAAUGCCU | | cells |
| hsa-miR- | AGUGAAUGAUGG | 29332 | GGUCAGAACCCAUC | 31374 | Embryonic stem |
| 1257 | GUUCUGACC | | AUUCACU | | cells |
| hsa-miR- | AGUUAGGAUUAG | 29333 | UUCCACGACCUAAU | 31375 | Embryonic stem |
| 1258 | GUCGUGGAA | | CCUAACU | | cells |
| hsa-miR- | AUGGAUAAGGCU | 29334 | AAGCCAAAGCCUUA | 31376 | Embryonic stem |
| 1261 | UUGGCUU | | UCCAU | | cells |
| hsa-miR- | AUGGUACCCUGGC | 29335 | ACUCAGUAUGCCAG | 31377 | Embryonic stem |
| 1263 | AUACUGAGU | | GGUACCAU | | cells |
| hsa-miR- | CAAGUCUUAUUU | 29336 | AACAGGUGCUCAAA | 31378 | Embryonic stem |
| 1264 | GAGCACCUGUU | | UAAGACUUG | | cells |
| hsa-miR- | CAGGAUGUGGUC | 29337 | AACAACACUUGACC | 31379 | Embryonic stem |
| 1265 | AAGUGUUGUU | | ACAUCCUG | | cells |
| hsa-miR- | CCUCAGGGCUGUA | 29338 | AGCCCUGUUCUACA | 31380 | Embryonic stem |
| 1266 | GAACAGGGCU | | GCCCUGAGG | | cells |
| hsa-miR- | CCUGUUGAAGUG | 29339 | UGGGGAUUACACUU | 31381 | Embryonic stem |
| 1267 | UAAUCCCCA | | CAACAGG | | cells |
| hsa-miR- | CGGGCGUGGUGG | 29340 | CCCCCACCACCACG | 31382 | Embryonic stem |
| 1268a | UGGGGG | | CCCG | | cells |
| hsa-miR- | CGGGCGUGGUGG | 29341 | CACCCCCACCACCA | 31383 | Embryonic stem |
| 1268b | UGGGGGUG | | CGCCCG | | cells |
| hsa-miR- | CUGGAGAUAUGG | 29342 | ACACAGCUCUUCCA | 31384 | Embryonic stem |
| 1270 | AAGAGCUGUGU | | UAUCUCCAG | | cells |
| hsa-miR- | GAUGAUGAUGGC | 29343 | UUUCAGAAUUUGCU | 31385 | Embryonic stem |
| 1272 | AGCAAAUUCUGA | | GCCAUCAUCAUC | | cells |
| | AA | | | | |
| hsa-miR- | GGGCGACAAAGC | 29344 | AAGAAAGAGUCUUG | 31386 | Embryonic stem |
| 1273a | AAGACUCUUUCU | | CUUUGUCGCCC | | cells |
| | U | | | | |
| hsa-miR- | GAACCCAUGAGG | 29345 | ACUGCAGCCUCAAC | 31387 | Embryonic stem |
| 1273d | UUGAGGCUGCAG | | CUCAUGGGUUC | | cells |
| | U | | | | |
| hsa-miR- | GUGGGGGAGAGG | 29346 | GACAGCCUCUCCCC | 31388 | Embryonic stem |
| 1275 | CUGUC | | CAC | | cells |
| hsa-miR- | UAAAGAGCCCUG | 29347 | UGUCUCCACAGGGC | 31389 | Embryonic stem |
| 1276 | UGGAGACA | | UCUUUA | | cells |
| hsa-miR- | UAGUACUGUGCA | 29348 | AUAGAUGAUAUGCA | 31390 | Embryonic stem |
| 1278 | UAUCAUCUAU | | CAGUACUA | | cells |
| hsa-miR- | UCGUUUGCCUUU | 29349 | AAGCAGAAAAAGGC | 31391 | Embryonic stem |
| 1282 | UUCUGCUU | | AAACGA | | cells |
| hsa-miR- | UGGACUGCCCUGA | 29350 | UCUCCAGAUCAGGG | 31392 | Embryonic stem |
| 1288 | UCUGGAGA | | CAGUCCA | | cells |
| hsa-miR- | UGGGUGGUCUGG | 29351 | GCACAAAUCUCCAG | 31393 | Embryonic stem |
| 1293 | AGAUUUGUGC | | ACCACCCA | | cells |
| hsa-miR- | UGUGAGGUUGGC | 29352 | AGACAACAAUGCCA | 31394 | Embryonic stem |
| 1294 | AUUGUUGUCU | | ACCUCACA | | cells |
| hsa-miR- | UUCAAGUAAUUC | 29353 | CACCUGAAUUACUU | 31395 | Embryonic stem |
| 1297 | AGGUG | | GAA | | cells |
| hsa-miR- | UUCUGGAAUUCU | 29354 | UCCCUCACACAGAA | 31396 | Embryonic stem |
| 1299 | GUGUGAGGGA | | UUCCAGAA | | cells |
| hsa-miR- | UUUUCAACUCUA | 29355 | UCUCUCCCAUUAGA | 31397 | Embryonic stem |
| 1305 | AUGGGAGAGA | | GUUGAAAA | | cells |
| hsa-miR- | ACGUUGGCUCUG | 29356 | CACCACCAGAGCCA | 31398 | Embryonic stem |
| 1306-3p | GUGGUG | | ACGU | | cells |
| hsa-miR- | CCACCUCCCCUGC | 29357 | UGGACGUUUGCAGG | 31399 | Embryonic stem |
| 1306-5p | AAACGUCCA | | GGAGGUGG | | cells |
| hsa-miR- | ACUCGGCGUGGCG | 29358 | CACGACCGACGCCA | 31400 | Embryonic stem |
| 1307-3p | UCGGUCGUG | | CGCCGAGU | | cells |
| hsa-miR- | UCGACCGGACCUC | 29359 | AGCCGGUCGAGGUC | 31401 | Embryonic stem |
| 1307-5p | GACCGGCU | | CGGUCGA | | cells |
| hsa-miR- | UGAGAACUGAAU | 29360 | AGCCUAUGGAAUUC | 31402 | Embryonic stem |
| 146b-5p | UCCAUAGGCU | | AGUUCUCA | | cells |
| hsa-miR- | AAUCAUACACGG | 29361 | AAUAGGUCAACCGU | 31403 | Embryonic stem |
| 154-3p | UUGACCUAUU | | GUAUGAUU | | cells |
| hsa-miR- | UAGGUUAUCCGU | 29362 | CGAAGGCAACACGG | 31404 | Embryonic stem |
| 154-5p | GUUGCCUUCG | | AUAACCUA | | cells |
| hsa-miR- | CCAGUCCUGUGCC | 29363 | AGGCGGCAGGCACA | 31405 | Embryonic stem |
| 1910 | UGCCGCCU | | GGACUGG | | cells |
| hsa-miR- | UCUGCCCCCUCCG | 29364 | UGGCAGCAGCGGAG | 31406 | Embryonic stem |
| 1913 | CUGCUGCCA | | GGGGCAGA | | cells |
| hsa-miR- | GGAGGGGUCCCGC | 29365 | CCUCCCAGUGCGGG | 31407 | Embryonic stem |
| 1914-3p | ACUGGGAGG | | ACCCCUCC | | cells |
| hsa-miR- | CCCUGUGCCCGGC | 29366 | CAGAAGUGGGCCGG | 31408 | Embryonic stem |
| 1914-5p | CCACUUCUG | | GCACAGGG | | cells |
| hsa-miR- | CCCCAGGGCGACG | 29367 | CCCGCCGCGUCGCC | 31409 | Embryonic stem |
| 1915-3p | CGGCGGG | | CUGGGG | | cells |
| hsa-miR- | ACCUUGCCUUGCU | 29368 | GGCCCGGGCAGCAA | 31410 | Embryonic stem |
| 1915-5p | GCCCGGGCC | | GGCAAGGU | | cells |
| hsa-miR- | AUUUGUGCUUGG | 29369 | GUGACAGAGCCAAG | 31411 | Embryonic stem |
| 2113 | CUCUGUCAC | | CACAAAU | | cells |
| hsa-miR- | AUUGUCCUUGCU | 29370 | AUCUCCAAACAGCA | 31412 | Embryonic stem |
| 2355-3p | GUUUGGAGAU | | AGGACAAU | | cells |
| hsa-miR- | AUCCCCAGAUACA | 29371 | UUGUCCAUUGUAUC | 31413 | Embryonic stem |
| 2355-5p | AUGGACAA | | UGGGGAU | | cells |
| hsa-miR- | CAGUGCAAUAGU | 29372 | GCUUUGACAAUACU | 31414 | Embryonic stem |
| 301a-3p | AUUGUCAAAGC | | AUUGCACUG | | cells |
| hsa-miR- | GCUCUGACUUUA | 29373 | AGUAGUGCAAUAAA | 31415 | Embryonic stem |
| 30la-5p | UUGCACUACU | | GUCAGAGC | | cells |
| hsa-miR- | UAAGUGCUUCCA | 29374 | CUACUAAAACAUGG | 31416 | Embryonic stem |
| 3026-3p | UGUUUUAGUAG | | AAGCACUUA | | cells |
| hsa-miR- | ACUUUAACAUGG | 29375 | GAAAGCACUUCCAU | 31417 | Embryonic stem |
| 302b-5p | AAGUGCUUUC | | GUUAAAGU | | cells |
| hsa-miR- | UAAGUGCUUCCA | 29376 | CCACUGAAACAUGG | 31418 | Embryonic stem |
| 302c-3p | UGUUUCAGUGG | | AAGCACUUA | | cells |
| hsa-miR- | UUUAACAUGGGG | 29377 | CAGCAGGUACCCCC | 31419 | Embryonic stem |
| 302c-5p | GUACCUGCUG | | AUGUUAAA | | cells |
| hsa-miR- | UAAGUGCUUCCA | 29378 | ACACUCAAACAUGG | 31420 | Embryonic stem |
| 302d-3p | UGUUUGAGUGU | | AAGCACUUA | | cells |
| hsa-miR- | ACUUUAACAUGG | 29379 | GCAAGUGCCUCCAU | 31421 | Embryonic stem |
| 302d-5p | AGGCACUUGC | | GUUAAAGU | | cells |
| hsa-miR- | AAUUGCACUUUA | 29380 | UCACCAUUGCUAAA | 31422 | Embryonic stem |
| 367-3p | GCAAUGGUGA | | GUGCAAUU | | cells |
| hsa-miR- | ACUGUUGCUAAU | 29381 | AGAGUUGCAUAUUA | 31423 | Embryonic stem |
| 367-5p | AUGCAACUCU | | GCAACAGU | | cells |
| hsa-miR- | AGCUCGGUCUGA | 29382 | ACUGAGGGGCCUCA | 31424 | Embryonic stem |
| 423-3p | GGCCCCUCAGU | | GACCGAGCU | | cells |
| hsa-miR- | AAAAACUGAGAC | 29383 | UGCAAAAGUAGUCU | 31425 | Embryonic stem |
| 548e | UACUUUUGCA | | CAGUUUUU | | cells |
| hsa-miR- | AAAAACUGUAAU | 29384 | AAAAGUAAUUACAG | 31426 | Embryonic stem |
| 548f | UACUUUU | | UUUUU | | cells |
| hsa-miR- | AAAACUGUAAUU | 29385 | GUACAAAAGUAAUU | 31427 | Embryonic stem |
| 548g-3p | ACUUUUGUAC | | ACAGUUUU | | cells |
| hsa-miR- | UGCAAAAGUAAU | 29386 | CAAAAACUGCAAUU | 31428 | Embryonic stem |
| 548g-5p | UGCAGUUUUUG | | ACUUUUGCA | | cells |
| hsa-miR- | CAAAAACCGCAAU | 29387 | UGCAAAAGUAAUUG | 31429 | Embryonic stem |
| 548h-3p | UACUUUUGCA | | CGGUUUUUG | | cells |
| hsa-miR- | AAAAGUAAUCGC | 29388 | GACAAAAACCGCGA | 31430 | Embryonic stem |
| 548h-5p | GGUUUUUGUC | | UUACUUUU | | cells |
| hsa-miR- | AAAAGUACUUGC | 29389 | AGCAAAAUCCGCAA | 31431 | Embryonic stem |
| 548k | GGAUUUUGCU | | GUACUUUU | | cells |
| hsa-miR- | AAAAGUAUUUGC | 29390 | GACAAAACCCGCAA | 31432 | Embryonic stem |
| 5481 | GGGUUUUGUC | | AUACUUUU | | cells |
| hsa-miR- | CAAAGGUAUUUG | 29391 | CAAAAACCACAAAU | 31433 | Embryonic stem |
| 548m | UGGUUUUUG | | ACCUUUG | | cells |
| hsa-miR- | CCAAAACUGCAGU | 29392 | GCAAAAGUAACUGC | 31434 | Embryonic stem |
| 5480-3p | UACUUUUGC | | AGUUUUGG | | cells |
| hsa-miR- | AAAAGUAAUUGC | 29393 | GGCAAAAACCGCAA | 31435 | Embryonic stem |
| 5480-5p | GGUUUUUGCC | | UUACUUUU | | cells |
| hsa-miR- | UAGCAAAAACUG | 29394 | AAAGUAACUGCAGU | 31436 | Embryonic stem |
| 548p | CAGUUACUUU | | UUUUGCUA | | cells |
| hsa-miR- | GGAGGUUGGGAA | 29395 | CUCUGCCCUUCCCA | 31437 | Embryonic stem |
| 6086 | GGGCAGAG | | ACCUCC | | cells |
| hsa-miR- | UGAGGCGGGGGG | 29396 | GCUCGCCCCCCCGC | 31438 | Embryonic stem |
| 6087 | GCGAGC | | CUCA | | cells |
| hsa-miR- | AGAGAUGAAGCG | 29397 | CGCCCCCCCGCUUC | 31439 | Embryonic stem |
| 6088 | GGGGGGCG | | AUCUCU | | cells |
| hsa-miR- | GGAGGCCGGGGU | 29398 | CCGCCCCGCCCCACC | 31440 | Embryonic stem |
| 6089 | GGGGGGGGGGGG | | CCGGCCUCC | | cells |
| hsa-miR- | GGGGAGCGAGGG | 29399 | GCCCCGCCCCUCGC | 31441 | Embryonic stem |
| 6090 | GCGGGGC | | UCCCC | | cells |
| hsa-miR- | UAUUCAUUUAUC | 29400 | UGUAGGCUGGGGAU | 31442 | Embryonic stem |
| 664a-3p | CCCAGCCUACA | | AAAUGAAUA | | cells |
| hsa-miR- | ACUGGCUAGGGA | 29401 | AUCCAAUCAUUUUC | 31443 | Embryonic stem |
| 664a-5p | AAAUGAUUGGAU | | CCUAGCCAGU | | cells |
| hsa-miR- | UUCAUUUGCCUCC | 29402 | UGUAGGCUGGGAGG | 31444 | Embryonic stem |
| 664b-3p | CAGCCUACA | | CAAAUGAA | | cells |
| hsa-miR- | UGGGCUAAGGGA | 29403 | UACCCAAUCAUCUC | 31445 | Embryonic stem |
| 6646-5p | GAUGAUUGGGUA | | CCUUAGCCCA | | cells |
| hsa-miR- | ACUCCAGCCCCAC | 29404 | GCUGAGGCUGUGGG | 31446 | Embryonic stem |
| 766-3p | AGCCUCAGC | | GCUGGAGU | | cells |
| hsa-miR- | AGGAGGAAUUGG | 29405 | AAGACCAGCACCAA | 31447 | Embryonic stem |
| 766-5p | UGCUGGUCUU | | UUCCUCCU | | cells |
| hsa-miR- | AGGCAGCGGGGU | 29406 | UAUCCACUACACCC | 31448 | Embryonic stem |
| 885-3p | GUAGUGGAUA | | CGCUGCCU | | cells |
| hsa-miR- | UCCAUUACACUAC | 29407 | AGAGGCAGGGUAGU | 31449 | Embryonic stem |
| 885-5p | CCUGCCUCU | | GUAAUGGA | | cells |
| hsa-miR- | ACUGCUGAGCUA | 29408 | CGGGAAGUGCUAGC | 31450 | Embryonic stem |
| 93-3p | GCACUUCCCG | | UCAGCAGU | | cells |
| hsa-miR- | CAAAGUGCUGUU | 29409 | CUACCUGCACGAAC | 31451 | Embryonic stem |
| 93-5p | CGUGCAGGUAG | | AGCACUUUG | | cells |
| hsa-miR- | CACCCGGCUGUGU | 29410 | GCACAUGUGCACAC | 31452 | Embryonic stem |
| 941 | GCACAUGUGC | | AGCCGGGUG | | cells |
| hsa-miR- | AGCUUCUUUACA | 29411 | CAAGGCAGCACUGU | 31453 | Embryonic stem |
| 103a-2-5p | GUGCUGCCUUG | | AAAGAAGCU | | cells and a variety |
| | | | | | of cells and tissues |
| hsa-miR- | AGCAGCAUUGUA | 29412 | UCAUAGCCCUGUAC | 31454 | Embryonic stem |
| 103a-3p | CAGGGCUAUGA | | AAUGCUGCU | | cells and a variety |
| | | | | | of cells and tissues |
| hsa-miR- | CCUGAGAAAAGG | 29413 | UUGGCCCUUUUCUC | 31455 | Embryonic stem |
| 4251 | GCCAA | | AGG | | cells and neural |
| | | | | | precursors |
| hsa-miR- | GGCCACUGAGUCA | 29414 | UGGUGCUGACUCAG | 31456 | Embryonic stem |
| 4252 | GCACCA | | UGGCC | | cells and neural |
| | | | | | precursors |
| hsa-miR- | AGGGCAUGUCCA | 29415 | ACCCCCUGGACAUG | 31457 | Embryonic stem |
| 4253 | GGGGGU | | CCCU | | cells and neural |
| | | | | | precursors |
| hsa-miR- | GCCUGGAGCUACU | 29416 | GAGAUGGUGGAGUA | 31458 | Embryonic stem |
| 4254 | CCACCAUCUC | | GCUCCAGGC | | cells and neural |
| | | | | | precursors |
| hsa-miR- | CAGUGUUCAGAG | 29417 | UCCAUCUCUGAACA | 31459 | Embryonic stem |
| 4255 | AUGGA | | CUG | | cells and neural |
| | | | | | precursors |
| hsa-miR- | AUCUGACCUGAU | 29418 | ACCUUCAUCAGGUC | 31460 | Embryonic stem |
| 4256 | GAAGGU | | AGAU | | cells and neural |
| | | | | | precursors |
| hsa-miR- | CCAGAGGUGGGG | 29419 | CUCAGUCCCCACCU | 31461 | Embryonic stem |
| 4257 | ACUGAG | | CUGG | | cells and neural |
| | | | | | precursors |
| hsa-miR- | CCCCGCCACCGCC | 29420 | CCAAGGCGGUGGCG | 31462 | Embryonic stem |
| 4258 | UUGG | | GGG | | cells and neural |
| | | | | | precursors |
| hsa-miR- | CAGUUGGGUCUA | 29421 | UCCUGACCCCUAGA | 31463 | Embryonic stem |
| 4259 | GGGGUCAGGA | | CCCAACUG | | cells and neural |
| | | | | | precursors |
| hsa-miR- | CUUGGGGCAUGG | 29422 | UGGGACUCCAUGCC | 31464 | Embryonic stem |
| 4260 | AGUCCCA | | CCAAG | | cells and neural |
| | | | | | precursors |
| hsa-miR- | AGGAAACAGGGA | 29423 | UGGGUCCCUGUUUC | 31465 | Embryonic stem |
| 4261 | CCCA | | CU | | cells and neural |
| | | | | | precursors |
| hsa-miR- | GACAUUCAGACU | 29424 | CAGGUAGUCUGAAU | 31466 | Embryonic stem |
| 4262 | ACCUG | | GUC | | cells and neural |
| | | | | | precursors |
| hsa-miR- | AUUCUAAGUGCC | 29425 | GGCCAAGGCACUUA | 31467 | Embryonic stem |
| 4263 | UUGGCC | | GAAU | | cells and neural |
| | | | | | precursors |
| hsa-miR- | ACUCAGUCAUGG | 29426 | AAUGACCAUGACUG | 31468 | Embryonic stem |
| 4264 | UCAUU | | AGU | | cells and neural |
| | | | | | precursors |
| hsa-miR- | CUGUGGGCUCAGC | 29427 | CCCAGAGCUGAGCC | 31469 | Embryonic stem |
| 4265 | UCUGGG | | CACAG | | cells and neural |
| | | | | | precursors |
| hsa-miR- | CUAGGAGGCCUU | 29428 | GGCCAAGGCCUCCU | 31470 | Embryonic stem |
| 4266 | GGCC | | AG | | cells and neural |
| | | | | | precursors |
| hsa-miR- | UCCAGCUCGGUGG | 29429 | GUGCCACCGAGCUG | 31471 | Embryonic stem |
| 4267 | CAC | | GA | | cells and neural |
| | | | | | precursors |
| hsa-miR- | GGCUCCUCCUCUC | 29430 | CACAUCCUGAGAGG | 31472 | Embryonic stem |
| 4268 | AGGAUGUG | | AGGAGCC | | cells and neural |
| | | | | | precursors |
| hsa-miR- | GCAGGCACAGACA | 29431 | GCCAGGGCUGUCUG | 31473 | Embryonic stem |
| 4269 | GCCCUGGC | | UGCCUGC | | cells and neural |
| | | | | | precursors |
| hsa-miR- | UCAGGGAGUCAG | 29432 | GCCCUCCCCUGACU | 31474 | Embryonic stem |
| 4270 | GGGAGGGC | | CCCUGA | | cells and neural |
| | | | | | precursors |
| hsa-miR- | GGGGGAAGAAAA | 29433 | CCCCACCUUUUCUU | 31475 | Embryonic stem |
| 4271 | GGUGGGG | | CCCCC | | cells and neural |
| | | | | | precursors |
| hsa-miR- | CAUUCAACUAGU | 29434 | ACAAUCACUAGUUG | 31476 | Embryonic stem |
| 4272 | GAUUGU | | AAUG | | cells and neural |
| | | | | | precursors |
| hsa-miR- | CAGCAGUCCCUCC | 29435 | CAGGGGGAGGGACU | 31477 | Embryonic stem |
| 4274 | CCCUG | | GCUG | | cells and neural |
| | | | | | precursors |
| hsa-miR- | CCAAUUACCACUU | 29436 | AAAGAAGUGGUAAU | 31478 | Embryonic stem |
| 4275 | CUUU | | UGG | | cells and neural |
| | | | | | precursors |
| hsa-miR- | CUCAGUGACUCAU | 29437 | GCACAUGAGUCACU | 31479 | Embryonic stem |
| 4276 | GUGC | | GAG | | cells and neural |
| | | | | | precursors |
| hsa-miR- | GCAGUUCUGAGC | 29438 | GUGUACUGUGCUCA | 31480 | Embryonic stem |
| 4277 | ACAGUACAC | | GAACUGC | | cells and neural |
| | | | | | precursors |
| hsa-miR- | CUAGGGGGUUUG | 29439 | CAAGGGCAAACCCC | 31481 | Embryonic stem |
| 4278 | CCCUUG | | CUAG | | cells and neural |
| | | | | | precursors |
| hsa-miR- | CUCUCCUCCCGGC | 29440 | GAAGCCGGGAGGAG | 31482 | Embryonic stem |
| 4279 | UUC | | AG | | cells and neural |
| | | | | | precursors |
| hsa-miR- | GAGUGUAGUUCU | 29441 | GCUCUGCUCAGAAC | 31483 | Embryonic stem |
| 4280 | GAGCAGAGC | | UACACUC | | cells and neural |
| | | | | | precursors |
| hsa-miR- | GGGUCCCGGGGA | 29442 | CCCCCCUCCCCGGG | 31484 | Embryonic stem |
| 4281 | GGGGGG | | ACCC | | cells and neural |
| | | | | | precursors |
| hsa-miR- | UAAAAUUUGCAU | 29443 | UCCUGGAUGCAAAU | 31485 | Embryonic stem |
| 4282 | CCAGGA | | UUUA | | cells and neural |
| | | | | | precursors |
| hsa-miR- | UGGGGCUCAGCG | 29444 | AAACUCGCUGAGCC | 31486 | Embryonic stem |
| 4283 | AGUUU | | CCA | | cells and neural |
| | | | | | precursors |
| hsa-miR- | GGGCUCACAUCAC | 29445 | AUGGGGUGAUGUGA | 31487 | Embryonic stem |
| 4284 | CCCAU | | GCCC | | cells and neural |
| | | | | | precursors |
| hsa-miR- | GCGGCGAGUCCGA | 29446 | AUGAGUCGGACUCG | 31488 | Embryonic stem |
| 4285 | CUCAU | | CCGC | | cells and neural |
| | | | | | precursors |
| hsa-miR- | ACCCCACUCCUGG | 29447 | GGUACCAGGAGUGG | 31489 | Embryonic stem |
| 4286 | UACC | | GGU | | cells and neural |
| | | | | | precursors |
| hsa-miR- | UCUCCCUUGAGGG | 29448 | AAAGUGCCCUCAAG | 31490 | Embryonic stem |
| 4287 | CACUUU | | GGAGA | | cells and neural |
| | | | | | precursors |
| hsa-miR- | UUGUCUGCUGAG | 29449 | GGAAACUCAGCAGA | 31491 | Embryonic stem |
| 4288 | UUUCC | | CAA | | cells and neural |
| | | | | | precursors |
| hsa-miR- | GCAUUGUGCAGG | 29450 | UGAUAGCCCUGCAC | 31492 | Embryonic stem |
| 4289 | GCUAUCA | | AAUGC | | cells and neural |
| | | | | | precursors |
| hsa-miR- | UGCCCUCCUUUCU | 29451 | GAGGGAAGAAAGGA | 31493 | Embryonic stem |
| 4290 | UCCCUC | | GGGCA | | cells and neural |
| | | | | | precursors |
| hsa-miR- | UUCAGCAGGAAC | 29452 | AGCUGUUCCUGCUG | 31494 | Embryonic stem |
| 4291 | AGCU | | AA | | cells and neural |
| | | | | | precursors |
| hsa-miR- | CCCCUGGGCCGGC | 29453 | CCAAGGCCGGCCCA | 31495 | Embryonic stem |
| 4292 | CUUGG | | GGGG | | cells and neural |
| | | | | | precursors |
| hsa-miR- | CAGCCUGACAGGA | 29454 | CUGUUCCUGUCAGG | 31496 | Embryonic stem |
| 4293 | ACAG | | CUG | | cells and neural |
| | | | | | precursors |
| hsa-miR- | GGGAGUCUACAG | 29455 | CCCUGCUGUAGACU | 31497 | Embryonic stem |
| 4294 | CAGGG | | CCC | | cells and neural |
| | | | | | precursors |
| hsa-miR- | CAGUGCAAUGUU | 29456 | AAGGAAAACAUUGC | 31498 | Embryonic stem |
| 4295 | UUCCUU | | ACUG | | cells and neural |
| | | | | | precursors |
| hsa-miR- | AUGUGGGCUCAG | 29457 | UGAGCCUGAGCCCA | 31499 | Embryonic stem |
| 4296 | GCUCA | | CAU | | cells and neural |
| | | | | | precursors |
| hsa-miR- | UGCCUUCCUGUCU | 29458 | CACAGACAGGAAGG | 31500 | Embryonic stem |
| 4297 | GUG | | CA | | cells and neural |
| | | | | | precursors |
| hsa-miR- | CUGGGACAGGAG | 29459 | CUGCCUCCUCCUCC | 31501 | Embryonic stem |
| 4298 | GAGGAGGCAG | | UGUCCCAG | | cells and neural |
| | | | | | precursors |
| hsa-miR- | GCUGGUGACAUG | 29460 | GCCUCUCAUGUCAC | 31502 | Embryonic stem |
| 4299 | AGAGGC | | CAGC | | cells and neural |
| | | | | | precursors |
| hsa-miR- | UGGGAGCUGGAC | 29461 | GAAGUAGUCCAGCU | 31503 | Embryonic stem |
| 4300 | UACUUC | | CCCA | | cells and neural |
| | | | | | precursors |
| hsa-miR- | UCCCACUACUUCA | 29462 | UCACAAGUGAAGUA | 31504 | Embryonic stem |
| 4301 | CUUGUGA | | GUGGGA | | cells and neural |
| | | | | | precursors |
| hsa-miR- | CCAGUGUGGCUCA | 29463 | CUCGCUGAGCCACA | 31505 | Embryonic stem |
| 4302 | GCGAG | | CUGG | | cells and neural |
| | | | | | precursors |
| hsa-miR- | UUCUGAGCUGAG | 29464 | CUGUCCUCAGCUCA | 31506 | Embryonic stem |
| 4303 | GACAG | | GAA | | cells and neural |
| | | | | | precursors |
| hsa-miR- | CCGGCAUGUCCAG | 29465 | UGCCCUGGACAUGC | 31507 | Embryonic stem |
| 4304 | GGCA | | CGG | | cells and neural |
| | | | | | precursors |
| hsa-miR- | CCUAGACACCUCC | 29466 | GAACUGGAGGUGUC | 31508 | Embryonic stem |
| 4305 | AGUUC | | UAGG | | cells and neural |
| | | | | | precursors |
| hsa-miR- | UGGAGAGAAAGG | 29467 | UACUGCCUUUCUCU | 31509 | Embryonic stem |
| 4306 | CAGUA | | CCA | | cells and neural |
| | | | | | precursors |
| hsa-miR- | AAUGUUUUUUCC | 29468 | GGAAACAGGAAAAA | 31510 | Embryonic stem |
| 4307 | UGUUUCC | | ACAUU | | cells and neural |
| | | | | | precursors |
| hsa-miR- | UCCCUGGAGUUUC | 29469 | AAGAAGAAACUCCA | 31511 | Embryonic stem |
| 4308 | UUCUU | | GGGA | | cells and neural |
| | | | | | precursors |
| hsa-miR- | CUGGAGUCUAGG | 29470 | UGGAAUCCUAGACU | 31512 | Embryonic stem |
| 4309 | AUUCCA | | CCAG | | cells and neural |
| | | | | | precursors |
| hsa-miR- | GCAGCAUUCAUG | 29471 | GGGACAUGAAUGCU | 31513 | Embryonic stem |
| 4310 | UCCC | | GC | | cells and neural |
| | | | | | precursors |
| hsa-miR- | GAAAGAGAGCUG | 29472 | CACACUCAGCUCUC | 31514 | Embryonic stem |
| 4311 | AGUGUG | | UUUC | | cells and neural |
| | | | | | precursors |
| hsa-miR- | GGCCUUGUUCCUG | 29473 | UGGGGACAGGAACA | 31515 | Embryonic stem |
| 4312 | UCCCCA | | AGGCC | | cells and neural |
| | | | | | precursors |
| hsa-miR- | AGCCCCCUGGCCC | 29474 | GGGUUUGGGGCCAG | 31516 | Embryonic stem |
| 4313 | CAAACCC | | GGGGCU | | cells and neural |
| | | | | | precursors |
| hsa-miR- | CUCUGGGAAAUG | 29475 | CUGUCCCAUUUCCC | 31517 | Embryonic stem |
| 4314 | GGACAG | | AGAG | | cells and neural |
| | | | | | precursors |
| hsa-miR- | CCGCUUUCUGAGC | 29476 | GUCCAGCUCAGAAA | 31518 | Embryonic stem |
| 4315 | UGGAC | | GCGG | | cells and neural |
| | | | | | precursors |
| hsa-miR- | GGUGAGGCUAGC | 29477 | CACCAGCUAGCCUC | 31519 | Embryonic stem |
| 4316 | UGGUG | | ACC | | cells and neural |
| | | | | | precursors |
| hsa-miR- | ACAUUGCCAGGG | 29478 | AAACUCCCUGGCAA | 31520 | Embryonic stem |
| 4317 | AGUUU | | UGU | | cells and neural |
| | | | | | precursors |
| hsa-miR- | CACUGUGGGUAC | 29479 | AGCAUGUACCCACA | 31521 | Embryonic stem |
| 4318 | AUGCU | | GUG | | cells and neural |
| | | | | | precursors |
| hsa-miR- | UCCCUGAGCAAAG | 29480 | GUGGCUUUGCUCAG | 31522 | Embryonic stem |
| 4319 | CCAC | | GGA | | cells and neural |
| | | | | | precursors |
| hsa-miR- | GGGAUUCUGUAG | 29481 | AGGAAGCUACAGAA | 31523 | Embryonic stem |
| 4320 | CUUCCU | | UCCC | | cells and neural |
| | | | | | precursors |
| hsa-miR- | UUAGCGGUGGAC | 29482 | CGCAGGGCGGUCCA | 31524 | Embryonic stem |
| 4321 | CGCCCUGCG | | CCGCUAA | | cells and neural |
| | | | | | precursors |
| hsa-miR- | CUGUGGGCUCAGC | 29483 | CCCCACGCGCUGAG | 31525 | Embryonic stem |
| 4322 | GCGUGGGG | | CCCACAG | | cells and neural |
| | | | | | precursors |
| hsa-miR- | CAGCCCCACAGCC | 29484 | UCUGAGGCUGUGGG | 31526 | Embryonic stem |
| 4323 | UCAGA | | GCUG | | cells and neural |
| | | | | | precursors |
| hsa-miR- | CCCUGAGACCCUA | 29485 | UUAAGGUUAGGGUC | 31527 | Embryonic stem |
| 4324 | ACCUUAA | | UCAGGG | | cells and neural |
| | | | | | precursors |
| hsa-miR- | UUGCACUUGUCUC | 29486 | UCACUGAGACAAGU | 31528 | Embryonic stem |
| 4325 | AGUGA | | GCAA | | cells and neural |
| | | | | | precursors |
| hsa-miR- | UGUUCCUCUGUCU | 29487 | GUCUGGGAGACAGA | 31529 | Embryonic stem |
| 4326 | CCCAGAC | | GGAACA | | cells and neural |
| | | | | | precursors |
| hsa-miR- | GGCUUGCAUGGG | 29488 | CCAGUCCCCCAUGC | 31530 | Embryonic stem |
| 4327 | GGACUGG | | AAGCC | | cells and neural |
| | | | | | precursors |
| hsa-miR- | CCAGUUUUCCCAG | 29489 | AAUCCUGGGAAAAC | 31531 | Embryonic stem |
| 4328 | GAUU | | UGG | | cells and neural |
| | | | | | precursors |
| hsa-miR- | CCUGAGACCCUAG | 29490 | GUGGAACUAGGGUC | 31532 | Embryonic stem |
| 4329 | UUCCAC | | UCAGG | | cells and neural |
| | | | | | precursors |
| hsa-miR- | CCUCAGAUCAGAG | 29491 | GCAAGGCUCUGAUC | 31533 | Embryonic stem |
| 4330 | CCUUGC | | UGAGG | | cells and neural |
| | | | | | precursors |
| hsa-miR- | CAUUGCACUUGUC | 29492 | UCAGACCGAGACAA | 31534 | Embryonic stem |
| 25-3p | UCGGUCUGA | | GUGCAAUG | | cells, airway |
| | | | | | smooth muscle |
| hsa-miR- | AGGCGGAGACUU | 29493 | CAAUUGCCCAAGUC | 31535 | Embryonic stem |
| 25-5p | GGGCAAUUG | | UCCGCCU | | cells, airway |
| | | | | | smooth muscle |
| hsa-miR- | CCUAUUCUUGGU | 29494 | CGUGCAAGUAACCA | 31536 | Embryonic stem |
| 26a-1-3p | UACUUGCACG | | AGAAUAGG | | cells, Blood and |
| | | | | | other tissues |
| hsa-miR- | AAUGGAUUUUUG | 29495 | CCUGCUCCAAAAAU | 31537 | Embryonic stem |
| 1246 | GAGCAGG | | CCAUU | | cells, epithelial cells |
| hsa-miR- | UGCGGGGCUAGG | 29496 | UGCUGUUAGCCCUA | 31538 | Embryonic stem |
| 744-5p | GCUAACAGCA | | GCCCCGCA | | cells, heart |
| hsa-miR- | AAAAGUAAUUGC | 29497 | GGCAAAAUCCGCAA | 31539 | Embryonic stem |
| 548i | GGAUUUUGCC | | UUACUUUU | | cells, immune cells |
| hsa-miR- | CAAAAGUAAUUG | 29498 | ACAAAAUCCACAAU | 31540 | Embryonic stem |
| 548n | UGGAUUUUGU | | UACUUUUG | | cells, immune cells |
| hsa-miR- | UAAGUGCUUCCA | 29499 | UCACCAAAACAUGG | 31541 | Embryonic stem |
| 302a-3p | UGUUUUGGUGA | | AAGCACUUA | | cells, lipid |
| | | | | | metabolism |
| hsa-miR- | ACUUAAACGUGG | 29500 | AGCAAGUACAUCCA | 31542 | Embryonic stem |
| 302a-5p | AUGUACUUGCU | | CGUUUAAGU | | cells, lipid |
| | | | | | metabolism |
| hsa-let- | CUAUACAAUCUAC | 29501 | GAAAGACAGUAGAU | 31543 | Embryonic stem |
| 7a-3p | UGUCUUUC | | UGUAUAG | | cells, lung |
| hsa-let- | UGAGGUAGUAGG | 29502 | AACUAUACAACCUA | 31544 | Embryonic stem |
| 7a-5p | UUGUAUAGUU | | CUACCUCA | | cells, lung |
| hsa-let- | CUGUACAGCCUCC | 29503 | GGAAAGCUAGGAGG | 31545 | Embryonic stem |
| 7a-2-3p | UAGCUUUCC | | CUGUACAG | | cells, lung, myeloid |
| | | | | | cells |
| hsa-miR- | CACCAGGCAUUGU | 29504 | GGAGACCACAAUGC | 31546 | Embryonic stem |
| 1911-3p | GGUCUCC | | CUGGUG | | cells, neural |
| | | | | | precursor |
| hsa-miR- | UGAGUACCGCCAU | 29505 | CCCAACAGACAUGG | 31547 | Embryonic stem |
| 1911-5p | GUCUGUUGGG | | CGGUACUCA | | cells, neural |
| | | | | | precursor |
| hsa-miR- | UACCCAGAGCAUG | 29506 | UUCACACUGCAUGC | 31548 | Embryonic stem |
| 1912 | CAGUGUGAA | | UCUGGGUA | | cells, neural |
| | | | | | precursor |
| hsa-miR- | AAGUGCUGUCAU | 29507 | GACCUCAGCUAUGA | 31549 | Embryonic stem |
| 512-3p | AGCUGAGGUC | | CAGCACUU | | cells, placenta |
| hsa-miR- | CACUCAGCCUUGA | 29508 | GAAAGUGCCCUCAA | 31550 | Embryonic stem |
| 512-5p | GGGCACUUUC | | GGCUGAGUG | | cells, placenta, |
| hsa-miR- | UCGACAGCACGAC | 29509 | GAAGGCAGUGUCGU | 31551 | Endometrial tissues |
| 196b-3p | ACUGCCUUC | | GCUGUCGA | | |
| hsa-miR- | UAGGUAGUUUCC | 29510 | CCCAACAACAGGAA | 31552 | Endometrial tissues |
| 196b-5p | UGUUGUUGGG | | ACUACCUA | | |
| hsa-miR- | UACAGUACUGUG | 29511 | UUCAGUUAUCACAG | 31553 | Endothelial cells |
| 101-3p | AUAACUGAA | | UACUGUA | | |
| hsa-miR- | CAGUUAUCACAG | 29512 | AGCAUCAGCACUGU | 31554 | Endothelial cells |
| 101-5p | UGCUGAUGCU | | GAUAACUG | | |
| hsa-miR- | UGUGCAAAUCUA | 29513 | UCAGUUUUGCAUAG | 31555 | Endothelial cells |
| 19a-3p | UGCAAAACUGA | | AUUUGCACA | | |
| hsa-miR- | AGUUUUGCAUAG | 29514 | UGUAGUGCAACUAU | 31556 | Endothelial cells |
| 19a-5p | UUGCACUACA | | GCAAAACU | | |
| hsa-miR- | AGUUUUGCAGGU | 29515 | GCUGGAUGCAAACC | 31557 | Endothelial cells |
| 19b-1-5p | UUGCAUCCAGC | | UGCAAAACU | | |
| hsa-miR- | AGUUUUGCAGGU | 29516 | UGAAAUGCAAACCU | 31558 | Endothelial cells |
| 19b-2-5p | UUGCAUUUCA | | GCAAAACU | | |
| hsa-miR- | UGUGCAAAUCCA | 29517 | UCAGUUUUGCAUGG | 31559 | Endothelial cells |
| 19b-3p | UGCAAAACUGA | | AUUUGCACA | | |
| hsa-miR- | UACUGCAUCAGG | 29518 | UCCAAUCAGUUCCU | 31560 | Endothelial cells |
| 217 | AACUGAUUGGA | | GAUGCAGUA | | |
| hsa-miR- | AUGGUUCCGUCA | 29519 | CCAUGGUGCUUGAC | 31561 | Endothelial cells |
| 218-1-3p | AGCACCAUGG | | GGAACCAU | | |
| hsa-miR- | AGCUACAUCUGGC | 29520 | ACCCAGUAGCCAGA | 31562 | Endothelial cells |
| 222-3p | UACUGGGU | | UGUAGCU | | |
| hsa-miR- | CUCAGUAGCCAGU | 29521 | AGGAUCUACACUGG | 31563 | Endothelial cells |
| 222-5p | GUAGAUCCU | | CUACUGAG | | |
| hsa-miR- | UUAUCAGAAUCU | 29522 | GUACCCCUGGAGAU | 31564 | Endothelial cells |
| 361-5p | CCAGGGGUAC | | UCUGAUAA | | |
| hsa-miR- | AUCAACAGACAU | 29523 | GCGCCCAAUUAAUG | 31565 | Endothelial cells |
| 421 | UAAUUGGGCGC | | UCUGUUGAU | | |
| hsa-miR- | CAAAACGUGAGG | 29524 | AUAGCAGCGCCUCA | 31566 | Endothelial cells |
| 424-3p | CGCUGCUAU | | CGUUUUG | | |
| hsa-miR- | CAGCAGCAAUUCA | 29525 | UUCAAAACAUGAAU | 31567 | Endothelial cells |
| 424-5p | UGUUUUGAA | | UGCUGCUG | | |
| hsa-miR- | UUCACAGGGAGG | 29526 | AUGACACCUCCCUG | 31568 | Endothelial cells |
| 513a-5p | UGUCAU | | UGAA | | |
| hsa-miR- | GCGGAGAGAGAA | 29527 | GCUCCCCAUUCUCU | 31569 | Endothelial cells |
| 5739 | UGGGGAGC | | CUCCGC | | |
| hsa-miR- | CCUGCGAGUCUCC | 29528 | CCACCGCCGGAGAC | 31570 | Endothelial cells |
| 6068 | GGCGGUGG | | UCGCAGG | | |
| hsa-miR- | GGGCUAGGGCCU | 29529 | GGGGGCAGCAGGCC | 31571 | Endothelial cells |
| 6069 | GCUGCCCCC | | CUAGCCC | | |
| hsa-miR- | UUCUGCUGCCGGC | 29530 | GCCUUGGCCGGCAG | 31572 | Endothelial cells |
| 6071 | CAAGGC | | CAGAA | | |
| hsa-miR- | UCCUCAUCACACU | 29531 | CUAAGGUGCAGUGU | 31573 | Endothelial cells |
| 6072 | GCACCUUAG | | GAUGAGGA | | |
| hsa-miR- | GGUAGUGAGUUA | 29532 | GUAGCUGAUAACUC | 31574 | Endothelial cells |
| 6073 | UCAGCUAC | | ACUACC | | |
| hsa-miR- | GAUAUUCAGAGG | 29533 | CCACCUAGCCUCUG | 31575 | Endothelial cells |
| 6074 | CUAGGUGG | | AAUAUC | | |
| hsa-miR- | ACGGCCCAGGCGG | 29534 | CACCAAUGCCGCCU | 31576 | Endothelial cells |
| 6075 | CAUUGGUG | | GGGCCGU | | |
| hsa-miR- | AGCAUGACAGAG | 29535 | CCACCUCUCCUCUG | 31577 | Endothelial cells |
| 6076 | GAGAGGUGG | | UCAUGCU | | |
| hsa-miR- | GGGAAGAGCUGU | 29536 | GAAGGCCGUACAGC | 31578 | Endothelial cells |
| 6077 | ACGGCCUUC | | UCUUCCC | | |
| hsa-miR- | CCGCCUGAGCUAG | 29537 | CCACAGCUAGCUCA | 31579 | Endothelial cells |
| 6078 | CUGUGG | | GGCGG | | |
| hsa-miR- | UUGGAAGCUUGG | 29538 | CAGCUAGUUGGUCC | 31580 | Endothelial cells |
| 6079 | ACCAACUAGCUG | | AAGCUUCCAA | | |
| hsa-miR- | UCUAGUGCGGGC | 29539 | CGGGAACGCCCGCA | 31581 | Endothelial cells |
| 6080 | GUUCCCG | | CUAGA | | |
| hsa-miR- | AGGAGCAGUGCC | 29540 | GGCGCCUUGGCCGG | 31582 | Endothelial cells |
| 6081 | GGCCAAGGCGCC | | CACUGCUCCU | | |
| hsa-miR- | GAAUACGUCUGG | 29541 | GGAUCAACCAGACG | 31583 | Endothelial cells |
| 6082 | UUGAUCC | | UAUUC | | |
| hsa-miR- | CUUAUAUCAGAG | 29542 | CCCACAGCCUCUGA | 31584 | Endothelial cells |
| 6083 | GCUGUGGG | | UAUAAG | | |
| hsa-miR- | UUCCGCCAGUCGG | 29543 | CCGGCCACCGACUG | 31585 | Endothelial cells |
| 6084 | UGGCCGG | | GCGGAA | | |
| hsa-miR- | AAGGGGCUGGGG | 29544 | UGUGCUCCCCCAGC | 31586 | Endothelial cells |
| 6085 | GAGCACA | | CCCUU | | |
| hsa-miR- | AGGUUGGGAUCG | 29545 | AGCAUUGCAACCGA | 31587 | Endothelial cells |
| 92a-1-5p | GUUGCAAUGCU | | UCCCAACCU | | |
| hsa-miR- | GGGUGGGGAUUU | 29546 | GUAAUGCAACAAAU | 31588 | Endothelial cells |
| 92a-2-5p | GUUGCAUUAC | | CCCCACCC | | |
| hsa-miR- | UAUUGCACUUGU | 29547 | ACAGGCCGGGACAA | 31589 | Endothelial cells |
| 92a-3p | CCCGGCCUGU | | GUGCAAUA | | and CNS |
| hsa-miR- | UAUUGCACUCGUC | 29548 | GGAGGCCGGGACGA | 31590 | Endothelial cells |
| 92b-3p | CCGGCCUCC | | GUGCAAUA | | and heart |
| hsa-miR- | AGGGACGGGACG | 29549 | CACUGCACCGCGUC | 31591 | Endothelial cells |
| 92b-5p | CGGUGCAGUG | | CCGUCCCU | | and heart |
| hsa-miR- | AUCACAUUGCCAG | 29550 | GGAAAUCCCUGGCA | 31592 | Endothelial cells, |
| 23a-3p | GGAUUUCC | | AUGUGAU | | brain(astrocyte), |
| | | | | | blood(erythroid) |
| hsa-miR- | GGGGUUCCUGGG | 29551 | AAAUCCCAUCCCCA | 31593 | Endothelial cells, |
| 23a-5p | GAUGGGAUUU | | GGAACCCC | | brain(astrocyte), |
| | | | | | blood(erythroid) |
| hsa-miR- | ACUGCAGUGAAG | 29552 | CUACAAGUGCCUUC | 31594 | Endothelial cells, |
| 17-3p | GCACUUGUAG | | ACUGCAGU | | embryonic stem |
| | | | | | cells |
| hsa-miR- | AGCUACAUUGUC | 29553 | GAAACCCAGCAGAC | 31595 | Endothelial cells, |
| 221-3p | UGCUGGGUUUC | | AAUGUAGCU | | immune cells |
| hsa-miR- | ACCUGGCAUACAA | 29554 | AAAUCUACAUUGUA | 31596 | Endothelial cells, |
| 221-5p | UGUAGAUUU | | UGCCAGGU | | immune cells |
| hsa-miR- | UCGUACCGUGAG | 29555 | CGCAUUAUUACUCA | 31597 | Endothelial cells, |
| 126-3p | UAAUAAUGCG | | CGGUACGA | | lung |
| hsa-miR- | CAUUAUUACUUU | 29556 | CGCGUACCAAAAGU | 31598 | Endothelial cells, |
| 126-5p | UGGUACGCG | | AAUAAUG | | lung |
| hsa-miR- | UACUCCAGAGGGC | 29557 | CAUGAGUGACGCCC | 31599 | Endothelial |
| 508-5p | GUCACUCAUG | | UCUGGAGUA | | progenitor cells |
| | | | | | (pcs) |
| hsa-miR- | UCCCACGUUGUGG | 29558 | CUGCUGGGCCACAA | 31600 | Endothelial |
| 662 | CCCAGCAG | | CGUGGGA | | progenitor cells, |
| | | | | | oocytes |
| hsa-miR- | CCUCACCACCCCU | 29559 | UGCAGGCAGAAGGG | 31601 | Epididymis |
| 6511b-3p | UCUGCCUGCA | | GUGGUGAGG | | |
| hsa-miR- | CUGCAGGCAGAA | 29560 | UGUCAGCCCCACUU | 31602 | Epididymis |
| 6511b-5p | GUGGGGCUGACA | | CUGCCUGCAG | | |
| hsa-miR- | CCAAACCAGUCGU | 29561 | CCACAGGCACGACU | 31603 | Epididymis |
| 6715a-3p | GCCUGUGG | | GGUUUGG | | |
| hsa-miR- | CUCAAACCGGCUG | 29562 | CCACAGGCACAGCC | 31604 | Epididy mis |
| 6715b-3p | UGCCUGUGG | | GGUUUGAG | | |
| hsa-miR- | ACAGGCACGACUG | 29563 | UGCCAAACCAGUCG | 31605 | Epididymis |
| 6715b-5p | GUUUGGCA | | UGCCUGU | | |
| hsa-miR- | UCCGAACUCUCCA | 29564 | GCAGAGGAAUGGAG | 31606 | Epididymis |
| 6716-3p | UUCCUCUGC | | AGUUCGGA | | |
| hsa-miR- | UGGGAAUGGGGG | 29565 | GGCCCUUACCCCCA | 31607 | Epididymis |
| 6716-5p | UAAGGGCC | | UUCCCA | | |
| hsa-miR- | AGGCGAUGUGGG | 29566 | UCUCUACAUCCCCA | 31608 | Epididymis |
| 6717-5p | GAUGUAGAGA | | CAUCGCCU | | |
| hsa-miR- | UAGUGGUCAGAG | 29567 | UCAUAAGCCCUCUG | 31609 | Epididymis |
| 6718-5p | GGCUUAUGA | | ACCACUA | | |
| hsa-miR- | UCUGACAUCAGU | 29568 | CAGGAGAAUCACUG | 31610 | Epididymis |
| 6719-3p | GAUUCUCCUG | | AUGUCAGA | | |
| hsa-miR- | CGCGCCUGCAGGA | 29569 | UCUACCAGUUCCUG | 31611 | Epididymis |
| 6720-3p | ACUGGUAGA | | CAGGCGCG | | |
| hsa-miR- | UGGGCAGGGGCU | 29570 | CUCCUACAAUAAGC | 31612 | Epididymis |
| 6721-5p | UAUUGUAGGAG | | CCCUGCCCA | | |
| hsa-miR- | UGCAGGGGUCGG | 29571 | CCUGGCCCACCCGA | 31613 | Epididymis |
| 6722-3p | GUGGGCCAGG | | CCCCUGCA | | |
| hsa-miR- | AGGCGCACCCGAC | 29572 | GCAUGUGGUCGGGU | 31614 | Epididymis |
| 6722-5p | CACAUGC | | GCGCCU | | |
| hsa-miR- | AUAGUCCGAGUA | 29573 | GCCCCGACGUUACU | 31615 | Epididymis |
| 6723-5p | ACGUCGGGGC | | CGGACUAU | | |
| hsa-miR- | CUGGGCCCGCGGC | 29574 | CCCCACGCCCGCCG | 31616 | Epididy mis |
| 6724-5p | GGGCGUGGGG | | CGGGCCCAG | | |
| hsa-miR- | UACUUGGAAAGG | 29575 | CAACUGAUGCCUUU | 31617 | Epididy mis |
| 890 | CAUCAGUUG | | CCAAGUA | | |
| hsa-miR- | UGCAACGAACCUG | 29576 | UCAGUGGCUCAGGU | 31618 | Epididy mis |
| 891a | AGCCACUGA | | UCGUUGCA | | |
| hsa-miR- | UGCAACUUACCUG | 29577 | UCAAUGACUCAGGU | 31619 | Epididymis |
| 891b | AGUCAUUGA | | AAGUUGCA | | |
| hsa-miR- | CACUGUGUCCUUU | 29578 | CUACGCAGAAAGGA | 31620 | Epididymis |
| 892a | CUGCGUAG | | CACAGUG | | |
| hsa-miR- | CACUGGCUCCUUU | 29579 | UCUACCCAGAAAGG | 31621 | Epididymis |
| 892b | CUGGGUAGA | | AGCCAGUG | | |
| hsa-miR- | CACUGUUUCCUUU | 29580 | UCCACUCAGAAAGG | 31622 | Epididy mis |
| 892c-3p | CUGAGUGGA | | AAACAGUG | | |
| hsa-miR- | UAUUCAGAAAGG | 29581 | UGACUGGCACCUUU | 31623 | Epididymis |
| 892c-5p | UGCCAGUCA | | CUGAAUA | | |
| hsa-miR- | AUUCCUAGAAAU | 29582 | UAUGAACAAUUUCU | 31624 | Epithelial cells |
| 384 | UGUUCAUA | | AGGAAU | | |
| hsa-miR- | UAAUACUGUCUG | 29583 | ACGGUUUUACCAGA | 31625 | Epithelial cells |
| 429 | GUAAAACCGU | | CAGUAUUA | | |
| hsa-miR- | UGAAACAUACAC | 29584 | GAGGUUUCCCGUGU | 31626 | Epithelial cells |
| 494 | GGGAAACCUC | | AUGUUUCA | | |
| hsa-let- | CUAUACAACCUAC | 29585 | GGGAAGGCAGUAGG | 31627 | Epithelial cells, |
| 7b-3p | UGCCUUCCC | | UUGUAUAG | | endothelial cells |
| | | | | | (vascular) |
| hsa-let- | UGAGGUAGUAGG | 29586 | AACCACACAACCUA | 31628 | Epithelial cells, |
| 7b-5p | UUGUGUGGUU | | CUACCUCA | | endothelial cells |
| | | | | | (vascular) |
| hsa-miR- | UAACACUGUCUG | 29587 | ACAUCGUUACCAGA | 31629 | Epithelial cells, |
| 200a-3p | GUAACGAUGU | | CAGUGUUA | | many other tissues |
| hsa-miR- | CAUCUUACCGGAC | 29588 | UCCAGCACUGUCCG | 31630 | Epithelial cells, |
| 200a-5p | AGUGCUGGA | | GUAAGAUG | | many other tissues |
| hsa-miR- | UAAUACUGCCUG | 29589 | UCAUCAUUACCAGG | 31631 | Epithelial cells, |
| 200b-3p | GUAAUGAUGA | | CAGUAUUA | | many other tissues |
| hsa-miR- | CAUCUUACUGGGC | 29590 | UCCAAUGCUGCCCA | 31632 | Epithelial cells, |
| 200b-5p | AGCAUUGGA | | GUAAGAUG | | many other tissues |
| hsa-miR- | UAAUACUGCCGG | 29591 | UCCAUCAUUACCCG | 31633 | Epithelial cells, |
| 200c-3p | GUAAUGAUGGA | | GCAGUAUUA | | many other tissues, |
| | | | | | embryonic stem |
| | | | | | cells |
| hsa-miR- | CGUCUUACCCAGC | 29592 | CCAAACACUGCUGG | 31634 | Epithelial cells, |
| 200c-5p | AGUGUUUGG | | GUAAGACG | | many other tissues, |
| | | | | | embryonic stem |
| | | | | | cells |
| hsa-miR- | UCCAGCAUCAGUG | 29593 | CAACAAAAUCACUG | 31635 | Epithelial cells, |
| 338-3p | AUUUUGUUG | | AUGCUGGA | | oligodendrocytes |
| hsa-miR- | UACAGUAUAGAU | 29594 | AGUACAUCAUCUAU | 31636 | Erythroid |
| 144-3p | GAUGUACU | | ACUGUA | | |
| hsa-miR- | GGAUAUCAUCAU | 29595 | CUUACAGUAUAUGA | 31637 | Erythroid |
| 144-5p | AUACUGUAAG | | UGAUAUCC | | |
| hsa-miR- | CGGGGCAGCUCAG | 29596 | AUCCUGUACUGAGC | 31638 | Erythroid cells |
| 486-3p | UACAGGAU | | UGCCCCG | | |
| hsa-miR- | UCCUUCUGCUCCG | 29597 | CUGGGGGACGGAGC | 31639 | Esophageal cell line |
| 1237-3p | UCCCCCAG | | AGAAGGA | | KYSE-150R |
| hsa-miR- | CGGGGGCGGGGCC | 29598 | CGCGCUUCGGCCCC | 31640 | Esophageal cell line |
| 1237-5p | GAAGCGCG | | GCCCCCG | | KYSE-150R |
| hsa-miR- | UCCUGCGCGUCCC | 29599 | GGGCAUCUGGGACG | 31641 | Esophageal cell line |
| 1539 | AGAUGCCC | | CGCAGGA | | KYSE-150R |
| hsa-miR- | CAUCAGAAUUCA | 29600 | CUAGCCUCCAUGAA | 31642 | Female |
| 2115-3p | UGGAGGCUAG | | UUCUGAUG | | reproductive tract |
| hsa-miR- | AGCUUCCAUGACU | 29601 | UCCAUCAGGAGUCA | 31643 | Female |
| 2115-5p | CCUGAUGGA | | UGGAAGCU | | reproductive tract |
| hsa-miR- | UGACAGCGCCCUG | 29602 | GAGCCAGGCAGGGC | 31644 | Female |
| 2277-3p | CCUGGCUC | | GCUGUCA | | reproductive tract |
| hsa-miR- | AGCGCGGGCUGA | 29603 | GACUGGCAGCGCUC | 31645 | Female |
| 2277-5p | GCGCUGCCAGUC | | AGCCCGCGCU | | reproductive tract |
| hsa-miR- | CUGGGAGGUGUG | 29604 | ACCACGAUAUCACA | 31646 | Female |
| 3689a-3p | AUAUCGUGGU | | CCUCCCAG | | reproductive tract |
| hsa-miR- | UGUGAUAUCAUG | 29605 | UCCCAGGAACCAUG | 31647 | Female |
| 3689b-5p | GUUCCUGGGA | | AUAUCACA | | reproductive tract |
| hsa-miR- | AGGUGCUCCAGGC | 29606 | UGUGAGCCAGCCUG | 31648 | Female |
| 3907 | UGGCUCACA | | GAGCACCU | | reproductive tract |
| hsa-miR- | GAGCAAUGUAGG | 29607 | AAACAGUCUACCUA | 31649 | Female |
| 3908 | UAGACUGUUU | | CAUUGCUC | | reproductive tract |
| hsa-miR- | UGUCCUCUAGGGC | 29608 | AGACUGCAGGCCCU | 31650 | Female |
| 3909 | CUGCAGUCU | | AGAGGACA | | reproductive tract |
| hsa-miR- | AAAGGCAUAAAA | 29609 | UGUCUUGGUUUUAU | 31651 | Female |
| 3910 | CCAAGACA | | GCCUUU | | reproductive tract |
| hsa-miR- | UAACGCAUAAUA | 29610 | ACAUGUCCAUAUUA | 31652 | Female |
| 3912 | UGGACAUGU | | UGCGUUA | | reproductive tract |
| hsa-miR- | UUGAGGAAAAGA | 29611 | AAUAAGACCAUCUU | 31653 | Female |
| 3915 | UGGUCUUAUU | | UUCCUCAA | | reproductive tract |
| hsa-miR- | AAGAGGAAGAAA | 29612 | CUGAGAACCAGCCA | 31654 | Female |
| 3916 | UGGCUGGUUCUC | | UUUCUUCCUCUU | | reproductive tract |
| | AG | | | | |
| hsa-miR- | GCUCGGACUGAGC | 29613 | CCCACCUGCUCAGU | 31655 | Female |
| 3917 | AGGUGGG | | CCGAGC | | reproductive tract |
| hsa-miR- | ACAGGGCCGCAGA | 29614 | AGUCUCCAUCUGOG | 31656 | Female |
| 3918 | UGGAGACU | | GCCCUGU | | reproductive tract |
| hsa-miR- | GCAGAGAACAAA | 29615 | ACUGAGUCCUUUGU | 31657 | Female |
| 3919 | GGACUCAGU | | UCUCUGC | | reproductive tract |
| hsa-miR- | ACUGAUUAUCUU | 29616 | UCAGAGAGUUAAGA | 31658 | Female |
| 3920 | AACUCUCUGA | | UAAUCAGU | | reproductive tract |
| hsa-miR- | UCUCUGAGUACCA | 29617 | ACAAGGCAUAUGGU | 31659 | Female |
| 3921 | UAUGCCUUGU | | ACUCAGAGA | | reproductive tract |
| hsa-miR- | AACUAGUAAUGU | 29618 | CCCUAAUCCAACAU | 31660 | Female |
| 3923 | UGGAUUAGGG | | UACUAGUU | | reproductive tract |
| hsa-miR- | AUAUGUAUAUGU | 29619 | AGUAGCAGUCACAU | 31661 | Female |
| 3924 | GACUGCUACU | | AUACAUAU | | reproductive tract |
| hsa-miR- | UGGCCAAAAAGC | 29620 | UCUCUGCCUGCUUU | 31662 | Female |
| 3926 | AGGCAGAGA | | UUGGCCA | | reproductive tract |
| hsa-miR- | GGAGGAACCUUG | 29621 | GCCGAAGCUCCAAG | 31663 | Female |
| 3928 | GAGCUUCGGC | | GUUCCUCC | | reproductive tract |
| hsa-miR- | GAGGCUGAUGUG | 29622 | AGUGGUCUACUCAC | 31664 | Female |
| 3929 | AGUAGACCACU | | AUCAGCCUC | | reproductive tract |
| hsa-miR- | CUGUCCUAAGGU | 29623 | AACUCAACAACCUU | 31665 | Female |
| 676-3p | UGUUGAGUU | | AGGACAG | | reproductive tract |
| hsa-miR- | UCUUCAACCUCAG | 29624 | UGCAAGUCCUGAGG | 31666 | Female |
| 676-5p | GACUUGCA | | UUGAAGA | | reproductive tract |
| hsa-miR- | UGUGAUAUCAUG | 29625 | UCCCAGGAACCAUG | 31667 | Female |
| 3689a-5p | GUUCCUGGGA | | AUAUCACA | | reproductive tract |
| | | | | | and peripheral |
| | | | | | blood |
| hsa-miR- | CUGGGAGGUGUG | 29626 | ACCACAAUAUCACA | 31668 | Female |
| 3689b-3p | AUAUUGUGGU | | CCUCCCAG | | reproductive tract |
| | | | | | and peripheral |
| | | | | | blood |
| hsa-miR- | CAGGUAGAUAUU | 29627 | AUGCCUAUCAAAUA | 31669 | Female |
| 3927-3p | UGAUAGGCAU | | UCUACCUG | | reproductive tract |
| | | | | | and psoriasis |
| hsa-miR- | GCCUAUCACAUAU | 29628 | ACAGGCAGAUAUGU | 31670 | Female |
| 3927-5p | CUGCCUGU | | GAUAGGC | | reproductive tract |
| | | | | | and psoriasis |
| hsa-miR- | GGGCUGGGGCGC | 29629 | ACCUCCCCGCGCCC | 31671 | Fibroblast |
| 5787 | GGGGAGGU | | CAGCCC | | |
| hsa-miR- | UGCUUCCUUUCAG | 29630 | ACCCUCUGAAAGGA | 31672 | Frontal cortex |
| 516a-3p | AGGGU | | AGCA | | |
| hsa-miR- | UGAGUUGGCCAU | 29631 | CUCACUCAGAUGGC | 31673 | Frontal cortex |
| 571 | CUGAGUGAG | | CAACUCA | | |
| hsa-miR- | AACAUUCAUUGU | 29632 | ACCCACCGACAACA | 31674 | Glia cells |
| 181d | UGUCGGUGGGU | | AUGAAUGUU | | |
| hsa-miR- | UCACAGUGAACCG | 29633 | AAAGAGACCGGUUC | 31675 | Glioblast, brain |
| 128 | GUCUCUUU | | ACUGUGA | | |
| hsa-miR- | CAACAAAUCACAG | 29634 | UAUGGCAGACUGUG | 31676 | Glioblast, brain, |
| 7-1-3p | UCUGCCAUA | | AUUUGUUG | | pancreas |
| hsa-miR- | CUCACUGAACAAU | 29635 | UUGCAUUCAUUGUU | 31677 | Glioblast, |
| 181b-3p | GAAUGCAA | | CAGUGAG | | Embryonic stem |
| | | | | | cells, epidermal |
| | | | | | (keratinocytes) |
| hsa-miR- | AACAUUCAUUGC | 29636 | ACCCACCGACAGCA | 31678 | Glioblast, |
| 181b-5p | UGUCGGUGGGU | | AUGAAUGUU | | Embryonic stem |
| | | | | | cells, epidermal |
| | | | | | (keratinocytes) |
| hsa-miR- | ACCAUCGACCGUU | 29637 | GGUACAAUCAACGG | 31679 | Glioblast, myeloid |
| 181a-3p | GAUUGUACC | | UCGAUGGU | | cells, embryonic |
| | | | | | stem cells |
| hsa-miR- | AACAUUCAACGCU | 29638 | ACUCACCGACAGCG | 31680 | Glioblast, myeloid |
| 181a-5p | GUCGGUGAGU | | UUGAAUGUU | | cells, embryonic |
| | | | | | stem cells |
| hsa-miR- | ACCACUGACCGUU | 29639 | GGUACAGUCAACGG | 31681 | Glioblast, stem cells |
| 181a-2-3p | GACUGUACC | | UCAGUGGU | | |
| hsa-miR- | CUGUUGCCACUAA | 29640 | AGGUUGAGGUUAGU | 31682 | Heart |
| 744-3p | CCUCAACCU | | GGCAACAG | | |
| hsa-miR- | AUAAGACGAGCA | 29641 | ACAAGCUUUUUGCU | 31683 | Heart |
| 208a | AAAAGCUUGU | | CGUCUUAU | | (cardiomyocyte), |
| | | | | | muscle |
| hsa-miR- | AUAAGACGAACA | 29642 | ACAAACCUUUUGUU | 31684 | Heart |
| 208b | AAAGGUUUGU | | CGUCUUAU | | (cardiomyocyte), |
| | | | | | muscle |
| hsa-miR- | AGGGAGGGACGG | 29643 | GCACAGCCCCCGUC | 31685 | Heart and brain |
| 149-3p | GGGCUGUGC | | CCUCCCU | | |
| hsa-miR- | UCUGGCUCCGUGU | 29644 | GGGAGUGAAGACAC | 31686 | Heart and brain |
| 149-5p | CUUCACUCCC | | GGAGCCAGA | | |
| hsa-miR-1 | UGGAAUGUAAAG | 29645 | AUACAUACUUCUUU | 31687 | Heart and muscle |
| | AAGUAUGUAU | | ACAUUCCA | | |
| hsa-miR- | AACAUCACAGCAA | 29646 | AGCACAGACUUGCU | 31688 | Heart, cardiac stem |
| 499a-3p | GUCUGUGCU | | GUGAUGUU | | cells |
| hsa-miR- | UUAAGACUUGCA | 29647 | AAACAUCACUGCAA | 31689 | Heart, cardiac stem |
| 499a-5p | GUGAUGUUU | | GUCUUAA | | cells |
| hsa-miR- | AACAUCACUGCAA | 29648 | UGUUAAGACUUGCA | 31690 | Heart, cardiac stem |
| 499b-3p | GUCUUAACA | | GUGAUGUU | | cells |
| hsa-miR- | ACAGACUUGCUG | 29649 | UGAACAUCACAGCA | 31691 | Heart, cardiac stem |
| 499b-5p | UGAUGUUCA | | AGUCUGU | | cells |
| hsa-miR- | AAACCGUUACCAU | 29650 | AACUCAGUAAUGGU | 31692 | Heart, central |
| 45la | UACUGAGUU | | AACGGUUU | | nervous system, |
| | | | | | epithelial cells |
| hsa-miR- | UAGCAAGAGAAC | 29651 | AAUGGUAAUGGUUC | 31693 | Heart, central |
| 451b | CAUUACCAUU | | UCUUGCUA | | nervous system, |
| | | | | | epithelial cells |
| hsa-miR- | UGAGGGGCAGAG | 29652 | AAAGUCUCGCUCUC | 31694 | Heart, embryonic |
| 423-5p | AGCGAGACUUU | | UGCCCCUCA | | stem cells |
| hsa-miR- | CAAGCUCGCUUCU | 29653 | CAGACCCAUAGAAG | 31695 | Hematopoietic cells |
| 99a-3p | AUGGGUCUG | | CGAGCUUG | | |
| hsa-miR- | AACCCGUAGAUCC | 29654 | CACAAGAUCGGAUC | 31696 | Hematopoietic cells |
| 99a-5p | GAUCUUGUG | | UACGGGUU | | |
| hsa-miR- | CAAGCUCGUGUCU | 29655 | CGGACCCACAGACA | 31697 | Hematopoietic cells |
| 99b-3p | GUGGGUCCG | | CGAGCUUG | | and embryonic stem |
| | | | | | cells |
| hsa-miR- | CACCCGUAGAACC | 29656 | CGCAAGGUCGGUUC | 31698 | Hematopoietic cells |
| 99b-5p | GACCUUGCG | | UACGGGUG | | and embryonic stem |
| | | | | | cells |
| hsa-miR- | UGGAGACGCGGCC | 29657 | ACUCCAACAGGGCC | 31699 | Hematocytes, brain |
| 139-3p | CUGUUGGAGU | | GCGUCUCCA | | |
| hsa-miR- | UCUACAGUGCACG | 29658 | ACUGGAGACACGUG | 31700 | Hematocytes, brain |
| 139-5p | UGUCUCCAGU | | CACUGUAGA | | |
| hsa-miR- | CAAAUUCGUAUC | 29659 | UAUUCCCCUAGAUA | 31701 | Hematopoietic cells |
| 10a-3p | UAGGGGAAUA | | CGAAUUUG | | |
| hsa-miR- | UACCCUGUAGAUC | 29660 | CACAAAUUCGGAUC | 31702 | Hematopoietic cells |
| 10a-5p | CGAAUUUGUG | | UACAGGGUA | | |
| hsa-miR- | CCUGCAGCGACUU | 29661 | GGAAGCCAUCAAGU | 31703 | Hematopoietic cells |
| 1184 | GAUGGCUUCC | | CGCUGCAGG | | |
| hsa-miR- | UCAGUGCACUACA | 29662 | ACAAAGUUCUGUAG | 31704 | Hematopoietic cells |
| 148a-3p | GAACUUUGU | | UGCACUGA | | |
| hsa-miR- | AAAGUUCUGAGA | 29663 | AGUCGGAGUGUCUC | 31705 | Hematopoietic cells |
| 148a-5p | CACUCCGACU | | AGAACUUU | | |
| hsa-miR- | CCUGUUCUCCAUU | 29664 | GAGCCAAGUAAUGG | 31706 | Hematopoietic cells |
| 26b-3p | ACUUGGCUC | | AGAACAGG | | |
| hsa-miR- | UUCAAGUAAUUC | 29665 | ACCUAUCCUGAAUU | 31707 | Hematopoietic cells |
| 26b-5p | AGGAUAGGU | | ACUUGAA | | |
| hsa-miR- | GCCCUGAACGAGG | 29666 | CUCCAGACCCCUCG | 31708 | Hematopoietic cells |
| 345-3p | GGUCUGGAG | | UUCAGGGC | | |
| hsa-miR- | GCUGACUCCUAGU | 29667 | GAGCCCUGGACUAG | 31709 | Hematopoietic cells |
| 345-5p | CCAGGGCUC | | GAGUCAGC | | |
| hsa-miR- | AUCACACAAAGGC | 29668 | ACAAAAGUUGCCUU | 31710 | Hematopoietic cells |
| 377-3p | AACUUUUGU | | UGUGUGAU | | |
| hsa-miR- | AGAGGUUGCCCU | 29669 | GAAUUCACCAAGGG | 31711 | Hematopoietic cells |
| 377-5p | UGGUGAAUUC | | CAACCUCU | | |
| hsa-miR- | GGUAGAUUUUCC | 29670 | ACCAUAGAAGGAAA | 31712 | Hematopoietic cells |
| 376a-2-5p | UUCUAUGGU | | AUCUACC | | (erythroid, platelet, |
| | | | | | and lymphoma) |
| hsa-miR- | AUCAUAGAGGAA | 29671 | ACGUGGAUUUUCCU | 31713 | Hematopoietic cells |
| 376a-3p | AAUCCACGU | | CUAUGAU | | (erythroid, platelet, |
| | | | | | and lymphoma) |
| hsa-miR- | GUAGAUUCUCCU | 29672 | UACUCAUAGAAGGA | 31714 | Hematopoietic cells |
| 376a-5p | UCUAUGAGUA | | GAAUCUAC | | (erythroid, platelet, |
| | | | | | and lymphoma) |
| hsa-miR- | CUGGUACAGGCCU | 29673 | CUGUCCCCCAGGCC | 31715 | Hematopoietic cells |
| 150-3p | GGGGGACAG | | UGUACCAG | | (lymphoid) |
| hsa-miR- | UCUCCCAACCCUU | 29674 | CACUGGUACAAGGG | 31716 | Hematopoietic cells |
| 150-5p | GUACCAGUG | | UUGGGAGA | | (lymphoid) |
| hsa-miR- | ACGGGUUAGGCU | 29675 | AGCUCCCAAGAGCC | 31717 | Hematopoietic cells |
| 125b-1-3p | CUUGGGAGCU | | UAACCCGU | | (monocytes), |
| | | | | | brain(neuron) |
| hsa-miR- | UCACAAGUCAGGC | 29676 | GUCCCAAGAGCCUG | 31718 | Hematopoietic cells |
| 125b-2-3p | UCUUGGGAC | | ACUUGUGA | | (monocytes), |
| | | | | | brain(neuron) |
| hsa-miR- | AACCCGUAGAUCC | 29677 | CACAAGUUCGGAUC | 31719 | Hematopoietic cells |
| 100-5p | GAACUUGUG | | UACGGGUU | | and endothelial |
| | | | | | cells |
| hsa-let- | CUGUACAGGCCAC | 29678 | GCAAGGCAGUGGCC | 31720 | Hematopoietic |
| 7g-3p | UGCCUUGC | | UGUACAG | | cells, adipose, |
| | | | | | smooth muscle cells |
| hsa-let- | UGAGGUAGUAGU | 29679 | AACUGUACAAACUA | 31721 | Hematopoietic |
| 7g-5p | UUGUACAGUU | | CUACCUCA | | cells, adipose, |
| | | | | | smooth muscle cells |
| hsa-miR- | UCCCUGAGACCCU | 29680 | UCACAAGUUAGGGU | 31722 | Hematopoietic |
| 125b-5p | AACUUGUGA | | CUCAGGGA | | cells, brain (neuron) |
| hsa-miR- | CAAGCUUGUAUC | 29681 | CAUACCUAUAGAUA | 31723 | Hematopoietic |
| 100-3p | UAUAGGUAUG | | CAAGCUUG | | cells, endothelial |
| | | | | | cells |
| hsa-miR- | AAAGUGCUGCGA | 29682 | ACGCUCAAAUGUCG | 31724 | Hematopoietic |
| 372 | CAUUUGAGCGU | | CAGCACUUU | | cells, lung, |
| | | | | | placental (blood) |
| hsa-miR- | UUUAGAGACGGG | 29683 | AGAGCAAGACCCCG | 31725 | Hepatocyte |
| 1303 | GUCUUGCUCU | | UCUCUAAA | | |
| hsa-miR- | UGGCCCUGACUGA | 29684 | ACUGCUGGUCUUCA | 31726 | Hepatocytes |
| 1291 | AGACCAGCAGU | | GUCAGGGCCA | | |
| hsa-miR- | GCGACCCAUACUU | 29685 | CUGAAACCAAGUAU | 31727 | Hepatocytes |
| 551b-3p | GGUUUCAG | | GGGUCGC | | |
| hsa-miR- | GAAAUCAAGCGU | 29686 | GGUCUCACCCACGC | 31728 | Hepatocytes |
| 551b-5p | GGGUGAGACC | | UUGAUUUC | | |
| hsa-miR- | CCCUGGGCCUCUG | 29687 | CUGGGGAGCAGAGG | 31729 | Hepatocytes |
| 939-3p | CUCCCCAG | | CCCAGGG | | |
| hsa-miR- | UGGGGAGCUGAG | 29688 | CACCCCCAGAGCCU | 31730 | Hepatocytes |
| 939-5p | GCUCUGGGGGUG | | CAGCUCCCCA | | |
| hsa-miR- | GGGGAGCUGUGG | 29689 | UACUGCUUCCACAG | 31731 | Human testis |
| 920 | AAGCAGUA | | CUCCCC | | |
| hsa-miR- | CUAGUGAGGGAC | 29690 | GAAUCCUGGUUCUG | 31732 | Human testis |
| 921 | AGAACCAGGAUU | | UCCCUCACUAG | | |
| | C | | | | |
| hsa-miR- | AGAGUCUUGUGA | 29691 | GCAAGACAUCACAA | 31733 | Human testis |
| 924 | UGUCUUGC | | GACUCU | | |
| hsa-miR- | GCAGCAGAGAAU | 29692 | GACGUAGUCCUAUU | 31734 | Human testis, |
| 922 | AGGACUACGUC | | CUCUGCUGC | | neuronal tissues |
| hsa-miR- | UGAGCGCCUCGAC | 29693 | CGGCUCUGUCGUCG | 31735 | Immune cell |
| 339-3p | GACAGAGCCG | | AGGCGCUCA | | |
| hsa-miR- | UCCCUGUCCUCCA | 29694 | CGUGAGCUCCUGGA | 31736 | Immune cell |
| 339-5p | GGAGCUCACG | | GGACAGGGA | | |
| hsa-let- | CUAUACGGCCUCC | 29695 | GGAAAGCUAGGAGG | 31737 | Immune cells |
| 7e-3p | UAGCUUUCC | | CCGUAUAG | | |
| hsa-let- | UGAGGUAGGAGG | 29696 | AACUAUACAACCUC | 31738 | Immune cells |
| 7e-5p | UUGUAUAGUU | | CUACCUCA | | |
| hsa-let- | CUGCGCAAGCUAC | 29697 | AGCAAGGCAGUAGC | 31739 | Immune cells |
| 7i-3p | UGCCUUGCU | | UUGCGCAG | | |
| hsa-let- | UGAGGUAGUAGU | 29698 | AACAGCACAAACUA | 31740 | Immune cells |
| 7i-5p | UUGUGCUGUU | | CUACCUCA | | |
| hsa-miR- | UGCCCUGUGGACU | 29699 | CCAGAACUGAGUCC | 31741 | Immune cells |
| 146b-3p | CAGUUCUGG | | ACAGGGCA | | |
| hsa-miR- | UGGUUCUAGACU | 29700 | UAGUUGGCAAGUCU | 31742 | Immune cells |
| 182-3p | UGCCAACUA | | AGAACCA | | |
| hsa-miR- | UGUCUGCCCGCAU | 29701 | AGAGGCAGGCAUGC | 31743 | Immune cells |
| 346 | GCCUGCCUCU | | GGGCAGACA | | |
| hsa-miR- | AAAAGUAAUUGC | 29702 | ACCAAAGACCGCAA | 31744 | Immune cells |
| 548j | GGUCUUUGGU | | UUACUUUU | | |
| hsa-miR- | UCGAGGAGCUCAC | 29703 | AGACUGUGAGCUCC | 31745 | Immune cells (B- |
| 151b | AGUCU | | UCGA | | cells) |
| hsa-let- | CUAUACAAUCUA | 29704 | GGGAAGGCAAUAGA | 31746 | Immune cells (T |
| 7f-1-3p | UUGCCUUCCC | | UUGUAUAG | | cells) |
| hsa-let- | CUAUACAGUCUAC | 29705 | GGAAAGACAGUAGA | 31747 | Immune cells (T |
| 7f-2-3p | UGUCUUUCC | | CUGUAUAG | | cells) |
| hsa-let- | UGAGGUAGUAGA | 29706 | AACUAUACAAUCUA | 31748 | Immune cells (T |
| 7f-5p | UUGUAUAGUU | | CUACCUCA | | cells) |
| hsa-miR- | AAAAGUAAUUGU | 29707 | GGCCAAAACCACAA | 31749 | Immune cells, |
| 548b-5p | GGUUUUGGCC | | UUACUUUU | | frontal cortex |
| hsa-miR- | AAAAGUAAUUGC | 29708 | GGCAAAAACCGCAA | 31750 | Immune cells, |
| 548c-5p | GGUUUUUGCC | | UUACUUUU | | frontal cortex |
| hsa-miR- | CCUCUGAAAUUCA | 29709 | CUGAAGAACUGAAU | 31751 | Immune cells, |
| 146a-3p | GUUCUUCAG | | UUCAGAGG | | hematopoiesis |
| hsa-miR- | UGAGAACUGAAU | 29710 | AACCCAUGGAAUUC | 31752 | Immune cells, |
| 146a-5p | UCCAUGGGUU | | AGUUCUCA | | hematopoiesis |
| hsa-miR- | ACAGCAGGCACAG | 29711 | ACUGCCUGUCUGUG | 31753 | Immune cells, |
| 214-3p | ACAGGCAGU | | CCUGCUGU | | pancreas |
| hsa-miR- | UGCCUGUCUACAC | 29712 | GCACAGCAAGUGUA | 31754 | Immune cells, |
| 214-5p | UUGCUGUGC | | GACAGGCA | | pancreas |
| hsa-miR- | UAGCACCAUCUGA | 29713 | UAACCGAUUUCAGA | 31755 | Immune system |
| 29a-3p | AAUCGGUUA | | UGGUGCUA | | |
| hsa-miR- | ACUGAUUUCUUU | 29714 | CUGAACACCAAAAG | 31756 | Immune system |
| 29a-5p | UGGUGUUCAG | | AAAUCAGU | | |
| hsa-miR- | GCUGGUUUCAUA | 29715 | UCUAAACCACCAUA | 31757 | Immune system |
| 29b-1-5p | UGGUGGUUUAGA | | UGAAACCAGC | | |
| hsa-miR- | CUGGUUUCACAU | 29716 | CUAAGCCACCAUGU | 31758 | Immune system |
| 29b-2-5p | GGUGGCUUAG | | GAAACCAG | | |
| hsa-miR- | UAGCACCAUUUG | 29717 | AACACUGAUUUCAA | 31759 | Immune system |
| 29b-3p | AAAUCAGUGUU | | AUGGUGCUA | | |
| hsa-miR- | UAGCACCAUUUG | 29718 | UAACCGAUUUCAAA | 31760 | Immune system |
| 29c-3p | AAAUCGGUUA | | UGGUGCUA | | |
| hsa-miR- | UGACCGAUUUCUC | 29719 | GAACACCAGGAGAA | 31761 | Immune system |
| 29c-5p | CUGGUGUUC | | AUCGGUCA | | |
| hsa-miR- | UGUCACUCGGCUC | 29720 | GUAGUGGGCCGAGC | 31762 | Keratinocytes |
| 668 | GGCCCACUAC | | CGAGUGACA | | |
| hsa-miR- | CUGCCAAUUCCAU | 29721 | CUGUGACCUAUGGA | 31763 | Kidney |
| 192-3p | AGGUCACAG | | AUUGGCAG | | |
| hsa-miR- | CUGACCUAUGAA | 29722 | GGCUGUCAAUUCAU | 31764 | Kidney |
| 192-5p | UUGACAGCC | | AGGUCAG | | |
| hsa-miR- | ACUGCCCCAGGUG | 29723 | CCAGCAGCACCUGG | 31765 | Kidney |
| 324-3p | CUGCUGG | | GGCAGU | | |
| hsa-miR- | AACGCCAUUAUCA | 29724 | UAUUUAGUGUGAUA | 31766 | Kidney and |
| 122-3p | CACUAAAUA | | AUGGCGUU | | liver/hepatocytes |
| hsa-miR- | CUUUCAGUCGGA | 29725 | GCUGCAAACAUCCG | 31767 | Kidney and |
| 30a-3p | UGUUUGCAGC | | ACUGAAAG | | pancreatic cells |
| hsa-miR- | AAUUGCACGGUA | 29726 | UACAGAUGGAUACC | 31768 | Kidney stem cell, |
| 363-3p | UCCAUCUGUA | | GUGCAAUU | | blood cells |
| hsa-miR- | CGGGUGGAUCAC | 29727 | AAAUUGCAUCGUGA | 31769 | Kidney stem cell, |
| 363-5p | GAUGCAAUUU | | UCCACCCG | | blood cells |
| hsa-miR- | CUGGGAGGUGGA | 29728 | GAAGUAAACAUCCA | 31770 | Kidney, adipose, |
| 30b-3p | UGUUUACUUC | | CCUCCCAG | | CNS(prefrontal |
| | | | | | cortex) |
| hsa-miR- | UGUAAACAUCCU | 29729 | AGCUGAGUGUAGGA | 31771 | Kidney, adipose, |
| 30b-5p | ACACUCAGCU | | UGUUUACA | | CNS(prefrontal |
| | | | | | cortex) |
| hsa-miR- | CUGGGAGAGGGU | 29730 | GGAGUAAACAACCC | 31772 | Kidney, adipose, |
| 30c-1-3p | UGUUUACUCC | | UCUCCCAG | | CNS(prefrontal |
| | | | | | cortex) |
| hsa-miR- | CUGGGAGAAGGC | 29731 | AGAGUAAACAGCCU | 31773 | Kidney, adipose, |
| 30c-2-3p | UGUUUACUCU | | UCUCCCAG | | CNS(prefrontal |
| | | | | | cortex) |
| hsa-miR- | UGUAAACAUCCU | 29732 | GCUGAGAGUGUAGG | 31774 | Kidney, adipose, |
| 30c-5p | ACACUCUCAGC | | AUGUUUACA | | CNS(prefrontal |
| | | | | | cortex) |
| hsa-miR- | UUUUUCAUUAUU | 29733 | GGUCAGGAGCAAUA | 31775 | Kidney, breast |
| 335-3p | GCUCCUGACC | | AUGAAAAA | | |
| hsa-miR- | UCAAGAGCAAUA | 29734 | ACAUUUUUCGUUAU | 31776 | Kidney, breast |
| 335-5p | ACGAAAAAUGU | | UGCUCUUGA | | |
| hsa-miR- | CAAAGUGCUUAC | 29735 | CUACCUGCACUGUA | 31777 | Kidney, breast and |
| 17-5p | AGUGCAGGUAG | | AGCACUUUG | | endothelial cells |
| hsa-miR- | GGAUUCCUGGAA | 29736 | AGAACAGUAUUUCC | 31778 | Kidney, cartilage, |
| 145-3p | AUACUGUUCU | | AGGAAUCC | | vascular smooth |
| | | | | | muscle |
| hsa-miR- | GUCCAGUUUUCCC | 29737 | AGGGAUUCCUGGGA | 31779 | Kidney, cartilage, |
| 145-5p | AGGAAUCCCU | | AAACUGGAC | | vascular smooth |
| | | | | | muscle |
| hsa-miR- | ACUGCAUUAUGA | 29738 | CUUUAAGUGCUCAU | 31780 | Kidney, endothelial |
| 20a-3p | GCACUUAAAG | | AAUGCAGU | | cells, osteogenic |
| | | | | | cells |
| hsa-miR- | UAAAGUGCUUAU | 29739 | CUACCUGCACUAUA | 31781 | Kidney, endothelial |
| 20a-5p | AGUGCAGGUAG | | AGCACUUUA | | cells, osteogenic |
| | | | | | cells |
| hsa-miR- | GAGGGUUGGGUG | 29740 | GGAGAGCCUCCACC | 31782 | Kidney, heart, lung, |
| 296-3p | GAGGCUCUCC | | CAACCCUC | | endothelial cells |
| hsa-miR- | CUGUGCGUGUGA | 29741 | UCAGCCGCUGUCAC | 31783 | Kidney, heart, |
| 210 | CAGCGGCUGA | | ACGCACAG | | vascular endothelial |
| | | | | | cells |
| hsa-miR- | CCAGUGGGGCUGC | 29742 | CAGAUAACAGCAGC | 31784 | Kidney, liver |
| 194-3p | UGUUAUCUG | | CCCACUGG | | |
| hsa-miR- | UGUAACAGCAAC | 29743 | UCCACAUGGAGUUG | 31785 | Kidney, liver |
| 194-5p | UCCAUGUGGA | | CUGUUACA | | |
| hsa-miR- | UCACAGUGGUCUC | 29744 | AUAAUCCCAGAGAC | 31786 | Kidney, pancreas |
| 216a-3p | UGGGAUUAU | | CACUGUGA | | |
| hsa-miR- | UAAUCUCAGCUG | 29745 | UCACAGUUGCCAGC | 31787 | Kidney, pancreas |
| 216a-5p | GCAACUGUGA | | UGAGAUUA | | |
| hsa-miR- | CAGUGCCUCGGCA | 29746 | GGGCUGCACUGCCG | 31788 | Lipid metabolism |
| 33b-3p | GUGCAGCCC | | AGGCACUG | | |
| hsa-miR- | GUGCAUUGCUGU | 29747 | GCAAUGCAACAGCA | 31789 | Lipid metabolism |
| 33b-5p | UGCAUUGC | | AUGCAC | | |
| hsa-miR- | ACUGGACUUGGA | 29748 | UUCUGCCUCCAAGU | 31790 | Lipid metabolism |
| 378b | GGCAGAA | | CCAGU | | |
| hsa-miR- | ACUGGACUUGGA | 29749 | CCACUCUUCUGACU | 31791 | Lipid metabolism |
| 378c | GUCAGAAGAGUG | | CCAAGUCCAGU | | |
| | G | | | | |
| hsa-miR- | ACUGGACUUGGA | 29750 | UUUCUGACUCCAAG | 31792 | Lipid metabolism |
| 378d | GUCAGAAA | | UCCAGU | | |
| hsa-miR- | ACUGGACUUGGA | 29751 | UCCUGACUCCAAGU | 31793 | Lipid metabolism |
| 378e | GUCAGGA | | CCAGU | | |
| hsa-miR- | ACUGGACUUGGA | 29752 | CUUCUGGCUCCAAG | 31794 | Lipid metabolism |
| 378f | GCCAGAAG | | UCCAGU | | |
| hsa-miR- | ACUGGGCUUGGA | 29753 | CUUCUGACUCCAAG | 31795 | Lipid metabolism |
| 378g | GUCAGAAG | | CCCAGU | | |
| hsa-miR- | ACUGGACUUGGU | 29754 | CCAUCUGACACCAA | 31796 | Lipid metabolism |
| 378h | GUCAGAUGG | | GUCCAGU | | |
| hsa-miR- | ACUGGACUAGGA | 29755 | CCUUCUGACUCCUA | 31797 | Lipid metabolism |
| 378i | GUCAGAAGG | | GUCCAGU | | |
| hsa-miR- | ACUGGAUUUGGA | 29756 | UUCUGGCUCCAAAU | 31798 | Lipid metabolism |
| 378 | GCCAGAA | | CCAGU | | |
| hsa-miR- | AGGAAUGUUCCU | 29757 | GGCAAAGAAGGAAC | 31799 | Lipid metabolism |
| 613 | UCUUUGCC | | AUUCCU | | |
| hsa-miR- | UCAGUGCAUGAC | 29758 | CCAAGUUCUGUCAU | 31800 | Liver |
| 152 | AGAACUUGG | | GCACUGA | | |
| hsa-miR- | UCACACCUGCCUC | 29759 | GGGGGGCGAGGCAG | 31801 | Liver (hepatocytes) |
| 1228-3p | GCCCCCC | | GUGUGA | | |
| hsa-miR- | GUGGGCGGGGGC | 29760 | CACACACCUGCCCC | 31802 | Liver (hepatocytes) |
| 1228-5p | AGGUGUGUG | | CGCCCAC | | |
| hsa-miR- | ACGCCCUUCCCCC | 29761 | UGAAGAAGGGGGGG | 31803 | Liver (hepatocytes) |
| 1249 | CCUUCUUCA | | AAGGGCGU | | |
| hsa-miR- | UUGCAUAUGUAG | 29762 | AUGGGACAUCCUAC | 31804 | Liver (hepatocytes) |
| 448 | GAUGUCCCAU | | AUAUGCAA | | |
| hsa-miR- | GUUUGCACGGGU | 29763 | AGACAAGGCCCACC | 31805 | Liver (hepatocytes) |
| 557 | GGGCCUUGUCU | | CGUGCAAAC | | |
| hsa-miR- | GACUAUAGAACU | 29764 | UGAGGGGGAAAGUU | 31806 | Liver (hepatocytes), |
| 625-3p | UUCCCCCUCA | | CUAUAGUC | | circulating (blood) |
| hsa-miR- | AGGGGGAAAGUU | 29765 | GGACUAUAGAACUU | 31807 | Liver (hepatocytes), |
| 625-5p | CUAUAGUCC | | UCCCCCU | | circulating (blood) |
| hsa-miR- | CUUUUUGCGGUC | 29766 | GCAAGCCCAGACCG | 31808 | Liver(hepatocytes) |
| 129-5p | UGGGCUUGC | | CAAAAAG | | |
| hsa-miR- | UCUUGUGUUCUC | 29767 | ACUGAUCUAGAGAA | 31809 | Liver(hepatocytes) |
| 581 | UAGAUCAGU | | CACAAGA | | |
| hsa-miR- | CCCAGUGUUCAGA | 29768 | GAACAGGUAGUCUG | 31810 | Liver, |
| 199a-5p | CUACCUGUUC | | AACACUGGG | | cardiomyocytes |
| hsa-miR- | ACAGUAGUCUGC | 29769 | UAACCAAUGUGCAG | 31811 | Liver, embryonic |
| 199a-3p | ACAUUGGUUA | | ACUACUGU | | body cells, |
| | | | | | cardiomyocytes |
| hsa-miR- | ACAGUAGUCUGC | 29770 | UAACCAAUGUGCAG | 31812 | Liver, osteoblast |
| 199b-3p | ACAUUGGUUA | | ACUACUGU | | |
| hsa-miR- | CCCAGUGUUUAG | 29771 | GAACAGAUAGUCUA | 31813 | Liver, osteoblast |
| 199b-5p | ACUAUCUGUUC | | AACACUGGG | | |
| hsa-miR- | UGGAGUGUGACA | 29772 | CAAACACCAUUGUC | 31814 | Liver/hepatocytes |
| 122-5p | AUGGUGUUUG | | ACACUCCA | | |
| hsa-miR- | UGCCCUAAAUGCC | 29773 | GCCAGAAGGGGCAU | 31815 | Lung |
| 18b-3p | CCUUCUGGC | | UUAGGGCA | | |
| hsa-miR- | UAAGGUGCAUCU | 29774 | CUAACUGCACUAGA | 31816 | Lung |
| 18b-5p | AGUGCAGUUAG | | UGCACCUUA | | |
| hsa-miR- | CUCCUAUAUGAU | 29775 | GAAGAAAGGCAUCA | 31817 | Lung |
| 337-3p | GCCUUUCUUC | | UAUAGGAG | | |
| hsa-miR- | GAACGGCUUCAU | 29776 | AACUCCUGUAUGAA | 31818 | Lung |
| 337-5p | ACAGGAGUU | | GCCGUUC | | |
| hsa-miR- | UGUGACUGGUUG | 29777 | CCCCUCUGGUCAAC | 31819 | Lung (epithelial) |
| 134 | ACCAGAGGGG | | CAGUCACA | | |
| hsa-miR- | ACUGCCCUAAGUG | 29778 | CCAGAAGGAGCACU | 31820 | Lung and |
| 18a-3p | CUCCUUCUGG | | UAGGGCAGU | | endothelial cells |
| hsa-miR- | UAAGGUGCAUCU | 29779 | CUAUCUGCACUAGA | 31821 | Lung and |
| 18a-5p | AGUGCAGAUAG | | UGCACCUUA | | endothelial cells |
| hsa-miR- | CAGUGCAAUGAU | 29780 | AUGCCCUUUCAUCA | 31822 | Lung, epidermal |
| 130b-3p | GAAAGGGCAU | | UUGCACUG | | cells( keratinocytes) |
| hsa-miR- | ACUCUUUCCCUGU | 29781 | GUAGUGCAACAGGG | 31823 | Lung, epidermal |
| 130b-5p | UGCACUAC | | AAAGAGU | | cells( keratinocytes) |
| hsa-miR- | UUUGGCAAUGGU | 29782 | AGUGUGAGUUCUAC | 31824 | Lung, immune cells |
| 182-5p | AGAACUCACACU | | CAUUGCCAAA | | |
| hsa-miR- | AGGGCCCCCCCUC | 29783 | ACAGGAUUGAGGGG | 31825 | Lung, liver, |
| 296-5p | AAUCCUGU | | GGGCCCU | | endothelial cells |
| hsa-miR- | CAGUGCAAUGUU | 29784 | AUGCCCUUUUAACA | 31826 | Lung, monocytes, |
| 130a-3p | AAAAGGGCAU | | UUGCACUG | | vascular endothelial |
| | | | | | cells |
| hsa-miR- | UUCACAUUGUGC | 29785 | GCAGACAGUAGCAC | 31827 | Lung, monocytes, |
| 130a-5p | UACUGUCUGC | | AAUGUGAA | | vascular endothelial |
| | | | | | cells |
| hsa-miR- | UCGGAUCCGUCUG | 29786 | AGCCAAGCUCAGAC | 31828 | Lung, placenta |
| 127-3p | AGCUUGGCU | | GGAUCCGA | | |
| hsa-miR- | CUGAAGCUCAGA | 29787 | AUCAGAGCCCUCUG | 31829 | Lung, |
| 127-5p | GGGCUCUGAU | | AGCUUCAG | | placenta(islet) |
| hsa-miR- | CCUCUUCCCCUUG | 29788 | CUGGAGAGACAAGG | 31830 | Lymphatic |
| 1236-3p | UCUCUCCAG | | GGAAGAGG | | endothelial cells |
| hsa-miR- | UGAGUGACAGGG | 29789 | UCCCCAUUUCCCCU | 31831 | Lymphatic |
| 1236-5p | GAAAUGGGGA | | GUCACUCA | | endothelial cells |
| hsa-miR- | UCAGGACACUUCU | 29790 | UCCAAGUUCAGAAG | 31832 | Lymphoblastic |
| 5000-3p | GAACUUGGA | | UGUCCUGA | | leukemia |
| hsa-miR- | CAGUUCAGAAGU | 29791 | ACUCAGGAACACUU | 31833 | Lymphoblastic |
| 5000-5p | GUUCCUGAGU | | CUGAACUG | | leukemia |
| hsa-miR- | UUUCCCUUUCCAU | 29792 | CUGCCAGGAUGGAA | 31834 | Lymphoblastic |
| 5006-3p | CCUGGCAG | | AGGGAAA | | leukemia |
| hsa-miR- | UUGCCAGGGCAG | 29793 | UUCCACCUCCUGCC | 31835 | Lymphoblastic |
| 5006-5p | GAGGUGGAA | | CUGGCAA | | leukemia |
| hsa-miR- | AGAGAUUGGUAG | 29794 | ACCUGAUUUCUACC | 31836 | Lymphoblastic |
| 5186 | AAAUCAGGU | | AAUCUCU | | leukemia |
| hsa-miR- | AAUCGGACCCAUU | 29795 | CUCCGGUUUAAAUG | 31837 | Lymphoblastic |
| 5188 | UAAACCGGAG | | GGUCCGAUU | | leukemia |
| hsa-miR- | UCUGGGCACAGGC | 29796 | CCUGUCCAUCCGCC | 31838 | Lymphoblastic |
| 5189 | GGAUGGACAGG | | UGUGCCCAGA | | leukemia |
| hsa-miR- | CCAGUGACUGAGC | 29797 | UGGCUCCAGCUCAG | 31839 | Lymphoblastic |
| 5190 | UGGAGCCA | | UCACUGG | | leukemia |
| hsa-miR- | AGGAUAGGAAGA | 29798 | AGCACUUCAUUCUU | 31840 | Lymphoblastic |
| 5191 | AUGAAGUGCU | | CCUAUCCU | | leukemia |
| hsa-miR- | AGGAGAGUGGAU | 29799 | ACCACCUGGAAUCC | 31841 | Lymphoblastic |
| 5192 | UCCAGGUGGU | | ACUCUCCU | | leukemia |
| hsa-miR- | UCCUCCUCUACCU | 29800 | ACUGGGAUGAGGUA | 31842 | Lymphoblastic |
| 5193 | CAUCCCAGU | | GAGGAGGA | | leukemia |
| hsa-miR- | UGAGGGGUUUGG | 29801 | CCAUCCCAUUCCAA | 31843 | Lymphoblastic |
| 5194 | AAUGGGAUGG | | ACCCCUCA | | leukemia |
| hsa-miR- | AUCCAGUUCUCUG | 29802 | AGCCCCCUCAGAGA | 31844 | Lymphoblastic |
| 5195-3p | AGGGGGCU | | ACUGGAU | | leukemia |
| hsa-miR- | AACCCCUAAGGCA | 29803 | CCAUCCAGUUGCCU | 31845 | Lymphoblastic |
| 5195-5p | ACUGGAUGG | | UAGGGGUU | | leukemia |
| hsa-miR- | UCAUCCUCGUCUC | 29804 | CUGGGAGGGAGACG | 31846 | Lymphoblastic |
| 5196-3p | CCUCCCAG | | AGGAUGA | | leukemia |
| hsa-miR- | AGGGAAGGGGAC | 29805 | CCCAACCCUCGUCC | 31847 | Lymphoblastic |
| 5196-5p | GAGGGUUGGG | | CCUUCCCU | | leukemia |
| hsa-miR- | AAGAAGAGACUG | 29806 | AUUCGAUGACUCAG | 31848 | Lymphoblastic |
| 5197-3p | AGUCAUCGAAU | | UCUCUUCUU | | leukemia |
| hsa-miR- | CAAUGGCACAAAC | 29807 | UCAAGAAUGAGUUU | 31849 | Lymphoblastic |
| 5197-5p | UCAUUCUUGA | | GUGCCAUUG | | leukemia |
| hsa-miR- | ACUGAAUCCUCUU | 29808 | CUGAGGAAAAGAGG | 31850 | Lymphoblastic |
| 5187-3p | UUCCUCAG | | AUUCAGU | | leukemia, skin |
| | | | | | (psoriasis) |
| hsa-miR- | UGGGAUGAGGGA | 29809 | UCCACUUCAAUCCC | 31851 | Lymphoblastic |
| 5187-5p | UUGAAGUGGA | | UCAUCCCA | | leukemia, skin |
| | | | | | (psoriasis) |
| hsa-miR- | CAGGCCAUAUUG | 29810 | UGAGGCAGCACAAU | 31852 | Lymphocyte, blood, |
| 15a-3p | UGCUGCCUCA | | AUGGCCUG | | hematopoietic |
| | | | | | tissues (spleen) |
| hsa-miR- | UAGCAGCACAUA | 29811 | CACAAACCAUUAUG | 31853 | Lymphocyte, blood, |
| 15a-5p | AUGGUUUGUG | | UGCUGCUA | | hematopoietic |
| | | | | | tissues (spleen) |
| hsa-miR- | CGAAUCAUUAUU | 29812 | UAGAGCAGCAAAUA | 31854 | Lymphocyte, blood, |
| 15b-3p | UGCUGCUCUA | | AUGAUUCG | | hematopoietic |
| | | | | | tissues (spleen) |
| hsa-miR- | UAGCAGCACAUCA | 29813 | UGUAAACCAUGAUG | 31855 | Lymphocyte, blood, |
| 15b-5p | UGGUUUACA | | UGCUGCUA | | hematopoietic |
| | | | | | tissues (spleen) |
| hsa-miR- | CCAAUAUUACUG | 29814 | UAAAGCAGCACAGU | 31856 | Lymphocyte, blood, |
| 16-2-3p | UGCUGCUUUA | | AAUAUUGG | | hematopoietic |
| | | | | | tissues (spleen) |
| hsa-miR- | CUAGGUAUGGUC | 29815 | GGAUCCCUGGGACC | 31857 | Lymphocytes |
| 331-5p | CCAGGGAUCC | | AUACCUAG | | |
| hsa-miR- | GUGUGUGGAAAU | 29816 | GCAGAAGCAUUUCC | 31858 | Macrophage |
| 147a | GCUUCUGC | | ACACAC | | |
| hsa-miR- | GUGUGCGGAAAU | 29817 | UAGCAGAAGCAUUU | 31859 | Macrophage |
| 147b | GCUUCUGCUA | | CCGCACAC | | |
| hsa-miR- | AGCAGCAUUGUA | 29818 | UGAUAGCCCUGUAC | 31860 | Many tissues and |
| 107 | CAGGGCUAUCA | | AAUGCUGCU | | brain |
| | | | | | hepatocytes/liver |
| hsa-miR- | AACUGGOCCUCAA | 29819 | AGCGGGACUUUGAG | 31861 | Many tissues/cells, |
| 193b-3p | AGUCCCGCU | | GGCCAGUU | | semen |
| hsa-miR- | CGGGGUUUUGAG | 29820 | UCAUCUCGCCCUCA | 31862 | Many tissues/cells, |
| 193b-5p | GGCGAGAUGA | | AAACCCCG | | semen |
| hsa-miR- | GCAGGGACAGCA | 29821 | GCACCCCUUUGCUG | 31863 | Melanocytes |
| 211-3p | AAGGGGUGC | | UCCCUGC | | |
| hsa-miR- | UUCCCUUUGUCAU | 29822 | AGGCGAAGGAUGAC | 31864 | Melanocytes |
| 211-5p | CCUUCGCCU | | AAAGGGAA | | |
| hsa-miR- | AUGGCCAAAACU | 29823 | AAAAUAACUGCAGU | 31865 | Melanoma |
| 548s | GCAGUUAUUUU | | UUUGGCCAU | | micrornaome |
| hsa-miR- | AAAAACCACAAU | 29824 | UGGUGCAAAAGUAA | 31866 | Melanoma |
| 548t-3p | UACUUUUGCACCA | | UUGUGGUUUUU | | micrornaome |
| hsa-miR- | CAAAAGUGAUCG | 29825 | CAAAAACCACGAUC | 31867 | Melanoma |
| 548t-5p | UGGUUUUUG | | ACUUUUG | | micrornaome |
| hsa-miR- | CAAAGACUGCAA | 29826 | CGCAAAAGUAAUUG | 31868 | Melanoma |
| 548u | UUACUUUUGCG | | CAGUCUUUG | | micrornaome |
| hsa-miR- | AAAAGUAACUGC | 29827 | AGGCAAAAACCGCA | 31869 | Melanoma |
| 548w | GGUUUUUGCCU | | GUUACUUUU | | micrornaome |
| hsa-miR- | UGCCUGGAACAU | 29828 | AGUCCCUACUAUGU | 31870 | Melanoma |
| 3116 | AGUAGGGACU | | UCCAGGCA | | miRNAome |
| hsa-miR- | AUAGGACUCAUA | 29829 | CUGGCACUAUAUGA | 31871 | Melanoma |
| 3117-3p | UAGUGCCAG | | GUCCUAU | | miRNAome |
| hsa-miR- | AGACACUAUACG | 29830 | AUAUGACUCGUAUA | 31872 | Melanoma |
| 3117-5p | AGUCAUAU | | GUGUCU | | miRNAome |
| hsa-miR- | UGUGACUGCAUU | 29831 | AGAAUUUUCAUAAU | 31873 | Melanoma |
| 3118 | AUGAAAAUUCU | | GCAGUCACA | | miRNAome |
| hsa-miR- | UGGCUUUUAACU | 29832 | GCCAUCAAAGUUAA | 31874 | Melanoma |
| 3119 | UUGAUGGC | | AAGCCA | | miRNAome |
| hsa-miR- | CACAGCAAGUGU | 29833 | UGCCUGUCUACACU | 31875 | Melanoma |
| 3120-3p | AGACAGGCA | | UGCUGUG | | miRNAome |
| hsa-miR- | CCUGUCUGUGCCU | 29834 | UGUACAGCAGGCAC | 31876 | Melanoma |
| 3120-5p | GCUGUACA | | AGACAGG | | miRNAome |
| hsa-miR- | UAAAUAGAGUAG | 29835 | UGUCCUUUGCCUAC | 31877 | Melanoma |
| 3121-3p | GCAAAGGACA | | UCUAUUUA | | miRNAome |
| hsa-miR- | UCCUUUGCCUAUU | 29836 | CUUAAAUAGAAUAG | 31878 | Melanoma |
| 3121-5p | CUAUUUAAG | | GCAAAGGA | | miRNAome |
| hsa-miR- | GUUGGGACAAGA | 29837 | AAGACCGUCCUCUU | 31879 | Melanoma |
| 3122 | GGACGGUCUU | | GUCCCAAC | | miRNAome |
| hsa-miR- | CAGAGAAUUGUU | 29838 | GAUUAAACAAUUCU | 31880 | Melanoma |
| 3123 | UAAUC | | CUG | | miRNAome |
| hsa-miR- | UAGAGGAAGCUG | 29839 | UCUCUCCACAGCUU | 31881 | Melanoma |
| 3125 | UGGAGAGA | | CCUCUA | | miRNAome |
| hsa-miR- | UCCCCUUCUGCAG | 29840 | CCAGCAGGCCUGCA | 31882 | Melanoma |
| 3127-3p | GCCUGCUGG | | GAAGGGGA | | miRNAome |
| hsa-miR- | AUCAGGGCUUGU | 29841 | CUUCCCAUUCCACA | 31883 | Melanoma |
| 3127-5p | GGAAUGGGAAG | | AGCCCUGAU | | miRNAome |
| hsa-miR- | UCUGGCAAGUAA | 29842 | AUGAGAGUUUUUUA | 31884 | Melanoma |
| 3128 | AAAACUCUCAU | | CUUGCCAGA | | miRNAome |
| hsa-miR- | UCGAGGACUGGU | 29843 | AAGGCCCUUCCACC | 31885 | Melanoma |
| 3131 | GGAAGGGCCUU | | AGUCCUCGA | | miRNAome |
| hsa-miR- | UGGGUAGAGAAG | 29844 | UCCUCUGAGCUCCU | 31886 | Melanoma |
| 3132 | GAGCUCAGAGGA | | UCUCUACCCA | | miRNAome |
| hsa-miR- | UAAAGAACUCUU | 29845 | AUUGGGUUUUAAGA | 31887 | Melanoma |
| 3133 | AAAACCCAAU | | GUUCUUUA | | miRNAome |
| hsa-miR- | UGAUGGAUAAAA | 29846 | AAUAUGUAGUCUUU | 31888 | Melanoma |
| 3134 | GACUACAUAUU | | UAUCCAUCA | | miRNAome |
| hsa-miR- | UGCCUAGGCUGA | 29847 | CACUGCAGUCUCAG | 31889 | Melanoma |
| 3135a | GACUGCAGUG | | CCUAGGCA | | miRNAome |
| hsa-miR- | UGGCCCAACCUAU | 29848 | ACUAACUGAAUAGG | 31890 | Melanoma |
| 3136-3p | UCAGUUAGU | | UUGGGCCA | | miRNAome |
| hsa-miR- | CUGACUGAAUAG | 29849 | AAUGACCCUACCUA | 31891 | Melanoma |
| 3136-5p | GUAGGGUCAUU | | UUCAGUCAG | | miRNAome |
| hsa-miR- | UCUGUAGCCUGG | 29850 | ACCCCAUUGCUCCC | 31892 | Melanoma |
| 3137 | GAGCAAUGGGGU | | AGGCUACAGA | | miRNAome |
| hsa-miR- | UAGGAGCUCAAC | 29851 | AACAGGCAUCUGUU | 31893 | Melanoma |
| 3139 | AGAUGCCUGUU | | GAGCUCCUA | | miRNAome |
| hsa-miR- | GAGGGCGGGUGG | 29852 | UCCUCCUCCACCCG | 31894 | Melanoma |
| 3141 | AGGAGGA | | CCCUC | | miRNAome |
| hsa-miR- | AUAACAUUGUAA | 29853 | CGAAAGAAGCGCUU | 31895 | Melanoma |
| 3143 | AGCGCUUCUUUCG | | UACAAUGUUAU | | miRNAome |
| hsa-miR- | AGAUAUUUUGAG | 29854 | CAAUUCCAAACACU | 31896 | Melanoma |
| 3145-3p | UGUUUGGAAUUG | | CAAAAUAUCU | | miRNAome |
| hsa-miR- | AACUCCAAACACU | 29855 | UGAGUUUUGAGUGU | 31897 | Melanoma |
| 3145-5p | CAAAACUCA | | UUGGAGUU | | miRNAome |
| hsa-miR- | CAUGCUAGGAUA | 29856 | CCAUUCUUUCUAUC | 31898 | Melanoma |
| 3146 | GAAAGAAUGG | | CUAGCAUG | | miRNAome |
| hsa-miR- | GGUUGGGCAGUG | 29857 | UCACACCCUCCUCA | 31899 | Melanoma |
| 3147 | AGGAGGGUGUGA | | CUGCCCAACC | | miRNAome |
| hsa-miR- | UGGAAAAAACUG | 29858 | AAGCACACACCAGU | 31900 | Melanoma |
| 3148 | GUGUGUGCUU | | UUUUUCCA | | miRNAome |
| hsa-miR- | CUGGGGAGAUCC | 29859 | CCAACCUCGAGGAU | 31901 | Melanoma |
| 3150a-3p | UCGAGGUUGG | | CUCCCCAG | | miRNAome |
| hsa-miR- | CAACCUCGACGAU | 29860 | GCUGAGGAGAUCGU | 31902 | Melanoma |
| 3150a-5p | CUCCUCAGC | | CGAGGUUG | | miRNAome |
| hsa-miR- | UGAGGAGAUCGU | 29861 | CCAACCUCGACGAU | 31903 | Melanoma |
| 3150b-3p | CGAGGUUGG | | CUCCUCA | | miRNAome |
| hsa-miR- | CAACCUCGAGGAU | 29862 | GCUGGGGAGAUCCU | 31904 | Melanoma |
| 3150b-5p | CUCCCCAGC | | CGAGGUUG | | miRNAome |
| hsa-miR- | GGUGGGGCAAUG | 29863 | ACCUGAUCCCAUUG | 31905 | Melanoma |
| 3151 | GGAUCAGGU | | CCCCACC | | miRNAome |
| hsa-miR- | GGGGAAAGCGAG | 29864 | AAAUGUCCCUACUC | 31906 | Melanoma |
| 3153 | UAGGGACAUUU | | GCUUUCCCC | | miRNAome |
| hsa-miR- | CAGAAGGGGAGU | 29865 | UCUGCUCCCAACUC | 31907 | Melanoma |
| 3154 | UGGGAGCAGA | | CCCUUCUG | | miRNAome |
| hsa-miR- | CCAGGCUCUGCAG | 29866 | AGUUCCCACUGCAG | 31908 | Melanoma |
| 3155a | UGGGAACU | | AGCCUGG | | miRNAome |
| hsa-miR- | CUCCCACUUCCAG | 29867 | AGAAAGAUCUGGAA | 31909 | Melanoma |
| 3156-3p | AUCUUUCU | | GUGGGAG | | miRNAome |
| hsa-miR- | AAAGAUCUGGAA | 29868 | UGUCUCCCACUUCC | 31910 | Melanoma |
| 3156-5p | GUGGGAGACA | | AGAUCUUU | | miRNAome |
| hsa-miR- | CUGCCCUAGUCUA | 29869 | AGCUUCAGCUAGAC | 31911 | Melanoma |
| 3157-3p | GCUGAAGCU | | UAGGGCAG | | miRNAome |
| hsa-miR- | UUCAGCCAGGCUA | 29870 | AGACUGCACUAGCC | 31912 | Melanoma |
| 3157-5p | GUGCAGUCU | | UGGCUGAA | | miRNAome |
| hsa-miR- | UAGGAUUACAAG | 29871 | GUGGCCGACACUUG | 31913 | Melanoma |
| 3159 | UGUCGGCCAC | | UAAUCCUA | | miRNAome |
| hsa-miR- | AGAGCUGAGACU | 29872 | UGGGCUUUCUAGUC | 31914 | Melanoma |
| 3160-3p | AGAAAGCCCA | | UCAGCUCU | | miRNAome |
| hsa-miR- | GGCUUUCUAGUC | 29873 | GGAGAGCUGAGACU | 31915 | Melanoma |
| 3160-5p | UCAGCUCUCC | | AGAAAGCC | | miRNAome |
| hsa-miR- | CUGAUAAGAACA | 29874 | AUCUGGGCCUCUGU | 31916 | Melanoma |
| 3161 | GAGGCCCAGAU | | UCUUAUCAG | | miRNAome |
| hsa-miR- | UCCCUACCCCUCC | 29875 | UGGGGAGUGGAGGG | 31917 | Melanoma |
| 3162-3p | ACUCCCCA | | GUAGGGA | | miRNAome |
| hsa-miR- | UUAGGGAGUAGA | 29876 | CUCCCCACCCUUCU | 31918 | Melanoma |
| 3162-5p | AGGGUGGGGAG | | ACUCCCUAA | | miRNAome |
| hsa-miR- | UAUAAAAUGAGG | 29877 | GUCUUACUGCCCUC | 31919 | Melanoma |
| 3163 | GCAGUAAGAC | | AUUUUAUA | | miRNAome |
| hsa-miR- | UGUGACUUUAAG | 29878 | CGCCAUUUCCCUUA | 31920 | Melanoma |
| 3164 | GGAAAUGGCG | | AAGUCACA | | miRNAome |
| hsa-miR- | AGGUGGAUGCAA | 29879 | UGAGGUCACAUUGC | 31921 | Melanoma |
| 3165 | UGUGACCUCA | | AUCCACCU | | miRNAome |
| hsa-miR- | CGCAGACAAUGCC | 29880 | UAGGCCAGUAGGCA | 31922 | Melanoma |
| 3166 | UACUGGCCUA | | UUGUCUGCG | | miRNAome |
| hsa-miR- | GAGUUCUACAGU | 29881 | GUCUGACUGUAGAA | 31923 | Melanoma |
| 3168 | CAGAC | | CUC | | miRNAome |
| hsa-miR- | UAGGACUGUGCU | 29882 | CUAUGUGCCAAGCA | 31924 | Melanoma |
| 3169 | UGGCACAUAG | | CAGUCCUA | | miRNAome |
| hsa-miR- | CUGGGGUUCUGA | 29883 | ACUGUCUGUCUCAG | 31925 | Melanoma |
| 3170 | GACAGACAGU | | AACCCCAG | | miRNAome |
| hsa-miR- | AAAGGAGGAAAU | 29884 | UGGCCUGCCUAUUU | 31926 | Melanoma |
| 3173-3p | AGGCAGGCCA | | CCUCCUUU | | miRNAome |
| hsa-miR- | UGCCCUGCCUGUU | 29885 | AAAGGAGAAAACAG | 31927 | Melanoma |
| 3173-5p | UUCUCCUUU | | GCAGGGCA | | miRNAome |
| hsa-miR- | UAGUGAGUUAGA | 29886 | GGCUCUGCAUCUCU | 31928 | Melanoma |
| 3174 | GAUGCAGAGCC | | AACUCACUA | | miRNAome |
| hsa-miR- | ACUGGCCUGGGAC | 29887 | CCGGUAGUCCCAGG | 31929 | Melanoma |
| 3176 | UACCGG | | CCAGU | | miRNAome |
| hsa-miR- | UGCACGGCACUGG | 29888 | ACGUGUCCCCAGUG | 31930 | Melanoma |
| 3177-3p | GGACACGU | | CCGUGCA | | miRNAome |
| hsa-miR- | UGUGUACACACG | 29889 | AGCGCCUGGCACGU | 31931 | Melanoma |
| 3177-5p | UGCCAGGCGCU | | GUGUACACA | | miRNAome |
| hsa-miR- | GGGGCGCGGCCGG | 29890 | CGAUCCGGCCGCGC | 31932 | Melanoma |
| 3178 | AUCG | | CCC | | miRNAome |
| hsa-miR- | AGAAGGGGUGAA | 29891 | ACGUUUAAAUUUCA | 31933 | Melanoma |
| 3179 | AUUUAAACGU | | CCCCUUCU | | miRNAome |
| hsa-miR- | AUCGGGCCCUCGG | 29892 | CCGGCGCCGAGGGC | 31934 | Melanoma |
| 3181 | CGCCGG | | CCGAU | | miRNAome |
| hsa-miR- | GCUUCUGUAGUG | 29893 | GACUACACUACAGA | 31935 | Melanoma |
| 3182 | UAGUC | | AGC | | miRNAome |
| hsa-miR- | GCCUCUCUCGGAG | 29894 | UCCGAGCGACUCCG | 31936 | Melanoma |
| 3183 | UCGCUCGGA | | AGAGAGGC | | miRNAome |
| hsa-miR- | AAAGUCUCGCUCU | 29895 | UGAGGGGCAGAGAG | 31937 | Melanoma |
| 3184-3p | CUGCCCCUCA | | CGAGACUUU | | miRNAome |
| hsa-miR- | UGAGGGGCCUCA | 29896 | AAAAGCUCGGUCUG | 31938 | Melanoma |
| 3184-5p | GACCGAGCUUUU | | AGGCCCCUCA | | miRNAome |
| hsa-miR- | AGAAGAAGGCGG | 29897 | CCGCAGACCGACCG | 31939 | Melanoma |
| 3185 | UCGGUCUGCGG | | CCUUCUUCU | | miRNAome |
| hsa-miR- | UUGGCCAUGGGG | 29898 | CCGCGCAGCCCCAU | 31940 | Melanoma |
| 3187-3p | CUGCGCGG | | GGCCAA | | miRNAome |
| hsa-miR- | CCUGGGCAGCGUG | 29899 | CCUUCAGCCACACG | 31941 | Melanoma |
| 3187-5p | UGGCUGAAGG | | CUGCCCAGG | | miRNAome |
| hsa-miR- | AGAGGCUUUGUG | 29900 | CCCCGUAUCCGCAC | 31942 | Melanoma |
| 3188 | CGGAUACGGGG | | AAAGCCUCU | | miRNAome |
| hsa-miR- | CCCUUGGGUCUGA | 29901 | CUACCCCAUCAGAC | 31943 | Melanoma |
| 3189-3p | UGGGGUAG | | CCAAGGG | | miRNAome |
| hsa-miR- | UGCCCCAUCUGUG | 29902 | UCCUACCCAGGGCA | 31944 | Melanoma |
| 3189-5p | CCCUGGGUAGGA | | CAGAUGGGGCA | | miRNAome |
| hsa-miR- | UGUGGAAGGUAG | 29903 | UCUCUGGCCGUCUA | 31945 | Melanoma |
| 3190-3p | ACGGCCAGAGA | | CCUUCCACA | | miRNAome |
| hsa-miR- | UCUGGCCAGCUAC | 29904 | UGGGGACGUAGCUG | 31946 | Melanoma |
| 3190-5p | GUCCCCA | | GCCAGA | | miRNAome |
| hsa-miR- | UGGGGACGUAGC | 29905 | CUGUCUGGCCAGCU | 31947 | Melanoma |
| 3191-3p | UGGCCAGACAG | | ACGUCCCCA | | miRNAome |
| hsa-miR- | CUCUCUGGCCGUC | 29906 | UGGAAGGUAGACGG | 31948 | Melanoma |
| 3191-5p | UACCUUCCA | | CCAGAGAG | | miRNAome |
| hsa-miR- | UCUGGGAGGUUG | 29907 | UUCCACUGCUACAA | 31949 | Melanoma |
| 3192 | UAGCAGUGGAA | | CCUCCCAGA | | miRNAome |
| hsa-miR- | UCCUGCGUAGGA | 29908 | ACUCCUCAGAUCCU | 31950 | Melanoma |
| 3193 | UCUGAGGAGU | | ACGCAGGA | | miRNAome |
| hsa-miR- | AGCUCUGCUGCUC | 29909 | ACUGCCAGUGAGCA | 31951 | Melanoma |
| 3194-3p | ACUGGCAGU | | GCAGAGCU | | miRNAome |
| hsa-miR- | GGCCAGCCACCAG | 29910 | CAGCCCUCCUGGUG | 31952 | Melanoma |
| 3194-5p | GAGGGCUG | | GCUGGCC | | miRNAome |
| hsa-miR- | CGCGCCGGGCCCG | 29911 | AACCCGGGCCCGGC | 31953 | Melanoma |
| 3195 | GGUU | | GCG | | miRNAome |
| hsa-miR- | GGAGGCGCAGGO | 29912 | CGCCUUUCCGAGCC | 31954 | Melanoma |
| 3197 | UCGGAAAGGCG | | UGCGCCUCC | | miRNAome |
| hsa-miR- | GUGGAGUCCUGG | 29913 | UCUCCAUUCCCCAG | 31955 | Melanoma |
| 3198 | GGAAUGGAGA | | GACUCCAC | | miRNAome |
| hsa-miR- | AGGGACUGCCUU | 29914 | AACUUUCUCCUAAG | 31956 | Melanoma |
| 3199 | AGGAGAAAGUU | | GCAGUCCCU | | miRNAome |
| hsa-miR- | GGGAUAUGAAGA | 29915 | AUUUUUCUUCAUAU | 31957 | Melanoma |
| 3201 | AAAAU | | CCC | | miRNAome, |
| hsa-miR- | UGGAAGGGAGAA | 29916 | AUUAAAGCUCUUCU | 31958 | Melanoma |
| 3202 | GAGCUUUAAU | | CCCUUCCA | | miRNAome, |
| | | | | | epithelial cell |
| | | | | | BEAS2B |
| hsa-miR- | ACUUUCCUCACUC | 29917 | ACUUCACGGGAGUG | 31959 | Melanoma |
| 3124-3p | CCGUGAAGU | | AGGAAAGU | | miRNAome, ovary |
| hsa-miR- | UUCGCGGGCGAA | 29918 | GACUUUGCCUUCGC | 31960 | Melanoma |
| 3124-5p | GGCAAAGUC | | CCGCGAA | | miRNAome, ovary |
| hsa-miR- | CAUCUGGCAUCCG | 29919 | UCUGUGUGACGGAU | 31961 | Melanoma |
| 3126-3p | UCACACAGA | | GCCAGAUG | | miRNAome, ovary |
| hsa-miR- | UGAGGGACAGAU | 29920 | UGCUUCUGGCAUCU | 31962 | Melanoma |
| 3126-5p | GCCAGAAGCA | | GUCCCUCA | | miRNAome, ovary |
| hsa-miR- | AAACUAAUCUCU | 29921 | GCAGCAGUGUAGAG | 31963 | Melanoma |
| 3129-3p | ACACUGCUGC | | AUUAGUUU | | miRNAome, ovary |
| hsa-miR- | GCAGUAGUGUAG | 29922 | AAACCAAUCUCUAC | 31964 | Melanoma |
| 3129-5p | AGAUUGGUUU | | ACUACUGC | | miRNAome, ovary |
| hsa-miR- | GCUGCACCGGAGA | 29923 | UUACCCAGUCUCCG | 31965 | Melanoma |
| 3130-3p | CUGGGUAA | | GUGCAGC | | miRNAome, ovary |
| hsa-miR- | UACCCAGUCUCCG | 29924 | GGCUGCACCGGAGA | 31966 | Melanoma |
| 3130-5p | GUGCAGCC | | CUGGGUA | | miRNAome, ovary |
| hsa-miR- | UGUGGACAGUGA | 29925 | ACUCCCUCUACCUC | 31967 | Melanoma |
| 3138 | GGUAGAGGGAGU | | ACUGUCCACA | | miRNAome, ovary |
| hsa-miR- | AGCUUUUGGGAA | 29926 | ACUACCUGAAUUCC | 31968 | Melanoma |
| 3140-3p | UUCAGGUAGU | | CAAAAGCU | | miRNAome, ovary |
| hsa-miR- | ACCUGAAUUACCA | 29927 | AAAGCUUUUGGUAA | 31969 | Melanoma |
| 3140-5p | AAAGCUUU | | UUCAGGU | | miRNAome, ovary |
| hsa-miR- | AUAUACCUGUUC | 29928 | UAAAGAGACCGAAC | 31970 | Melanoma |
| 3144-3p | GGUCUCUUUA | | AGGUAUAU | | miRNAome, ovary |
| hsa-miR- | AGGGGACCAAAG | 29929 | CUAUAUAUCUCUUU | 31971 | Melanoma |
| 3144-5p | AGAUAUAUAG | | GGUCCCCU | | miRNAome, ovary |
| hsa-miR- | UUUGUAUGGAUA | 29930 | AUACACACACAUAU | 31972 | Melanoma |
| 3149 | UGUGUGUGUAU | | CCAUACAAA | | miRNAome, ovary |
| hsa-miR- | UGUGUUAGAAUA | 29931 | UUAUUGCCCCUAUU | 31973 | Melanoma |
| 3152-3p | GGGGCAAUAA | | CUAACACA | | miRNAome, ovary |
| hsa-miR- | AUUGCCUCUGUUC | 29932 | CUUGUGUUAGAACA | 31974 | Melanoma |
| 3152-5p | UAACACAAG | | GAGGCAAU | | miRNAome, ovary |
| hsa-miR- | AAGGGCUUCCUCU | 29933 | GUCCUGCAGAGAGG | 31975 | Melanoma |
| 3158-3p | CUGCAGGAC | | AAGCCCUU | | miRNAome, ovary |
| hsa-miR- | CCUGCAGAGAGG | 29934 | GAAGGGCUUCCUCU | 31976 | Melanoma |
| 3158-5p | AAGCCCUUC | | CUGCAGG | | miRNAome, ovary |
| hsa-miR- | AGGAUUUCAGAA | 29935 | ACACCAGUAUUUCU | 31977 | Melanoma |
| 3167 | AUACUGGUGU | | GAAAUCCU | | miRNAome, ovary |
| hsa-miR- | AGAUGUAUGGAA | 29936 | GAUAUAUACAGAUU | 31978 | Melanoma |
| 3171 | UCUGUAUAUAUC | | CCAUACAUCU | | miRNAome, ovary |
| hsa-miR- | CGGGGAGAGAAC | 29937 | ACGUCACUGCGUUC | 31979 | Melanoma |
| 3175 | GCAGUGACGU | | UCUCCCCG | | miRNAome, ovary |
| hsa-miR- | UGGGGCGGAGCU | 29938 | CUCCGGAAGCUCCG | 31980 | Melanoma |
| 3180 | UCCGGAG | | CCCCA | | miRNAome, ovary |
| hsa-miR- | UCACGCGGAGAG | 29939 | CAAAGCCAUCUCUC | 31981 | Melanoma |
| 3186-3p | AUGGCUUUG | | CGCGUGA | | miRNAome, ovary |
| hsa-miR- | CAGGCGUCUGUCU | 29940 | AAGCCACGUAGACA | 31982 | Melanoma |
| 3186-5p | ACGUGGCUU | | GACGCCUG | | miRNAome, ovary |
| hsa-miR- | CACCUUGCGCUAC | 29941 | CAGACCUGAGUAGC | 31983 | Melanoma |
| 3200-3p | UCAGGUCUG | | GCAAGGUG | | miRNAome, ovary |
| hsa-miR- | AAUCUGAGAAGG | 29942 | ACCUUGUGOGCCUU | 31984 | Melanoma |
| 3200-5p | CGCACAAGGU | | CUCAGAUU | | miRNAome, ovary |
| hsa-miR- | AAGGCCUUUCUG | 29943 | UCUGAAGGUUCAGA | 31985 | Melanoma |
| 3142 | AACCUUCAGA | | AAGGCCUU | | miRNAome; |
| | | | | | immune cells |
| hsa-miR- | GUGACAUCACAU | 29944 | GCUGCCGUAUAUGU | 31986 | Mesenchymal stem |
| 489 | AUACGGCAGC | | GAUGUCAC | | cells |
| hsa-miR- | UCAGAACAAAUG | 29945 | UCUGGGAACCGGCA | 31987 | Mesothelial cells |
| 589-3p | CCGGUUCCCAGA | | UUUGUUCUGA | | |
| hsa-miR- | UGAGAACCACGUC | 29946 | CUCAGAGCAGACGU | 31988 | Mesothelial cells |
| 589-5p | UGCUCUGAG | | GGUUCUCA | | |
| hsa-miR- | UCAUAUUGCUUC | 29947 | AGAAAGAAGCAAUA | 31989 | Monocytes |
| 1279 | UUUCU | | UGA | | |
| hsa-miR- | UGUGACAGAUUG | 29948 | UUUCAGUUAUCAAU | 31990 | Monocytes |
| 542-3p | AUAACUGAAA | | CUGUCACA | | |
| hsa-miR- | UGGAGUCCAGGA | 29949 | AAAAUGCAGAUUCC | 31991 | Multiple cell types |
| 1289 | AUCUGCAUUUU | | UGGACUCCA | | |
| hsa-miR- | AAGCCCUUACCCC | 29950 | AUACUUUUUGGGGU | 31992 | Multiple cell types |
| 129-1-3p | AAAAAGUAU | | AAGGGCUU | | |
| hsa-miR- | AAGCCCUUACCCC | 29951 | AUGCUUUUUGGGGU | 31993 | Multiple cell types |
| 129-2-3p | AAAAAGCAU | | AAGGGCUU | | |
| hsa-miR- | UGGAAUGUAAGG | 29952 | CCACACACUUCCUU | 31994 | Muscle (cardiac and |
| 206 | AAGUGUGUGG | | ACAUUCCA | | skeletal) |
| hsa-miR- | CUUAUCAGAUUG | 29953 | AAUUACAAUACAAU | 31995 | Muscle (myoblasts) |
| 374a-3p | UAUUGUAAUU | | CUGAUAAG | | |
| hsa-miR- | UUAUAAUACAAC | 29954 | CACUUAUCAGGUUG | 31996 | Muscle (myoblasts) |
| 374a-5p | CUGAUAAGUG | | UAUUAUAA | | |
| hsa-miR- | CUUAGCAGGUUG | 29955 | AAUGAUAAUACAAC | 31997 | Muscle (myoblasts) |
| 374b-3p | UAUUAUCAUU | | CUGCUAAG | | |
| hsa-miR- | AUAUAAUACAAC | 29956 | CACUUAGCAGGUUG | 31998 | Muscle (myoblasts) |
| 374b-5p | CUGCUAAGUG | | UAUUAUAU | | |
| hsa-miR- | CACUUAGCAGGU | 29957 | AUAUAAUACAACCU | 31999 | Muscle (myoblasts) |
| 374c-3p | UGUAUUAUAU | | GCUAAGUG | | |
| hsa-miR- | AUAAUACAACCU | 29958 | AGCACUUAGCAGGU | 32000 | Muscle (myoblasts) |
| 374c-5p | GCUAAGUGCU | | UGUAUUAU | | |
| hsa-miR- | UUUGGUCCCCUUC | 29959 | CAGCUGGUUGAAGG | 32001 | Muscle, heart, |
| 133a | AACCAGCUG | | GGACCAAA | | epithelial cells |
| | | | | | (lung) |
| hsa-miR- | UUUGGUCCCCUUC | 29960 | UAGCUGGUUGAAGG | 32002 | Muscle, heart, |
| 133b | AACCAGCUA | | GGACCAAA | | epithelial cells |
| | | | | | (lung) |
| hsa-miR- | UGUAAACAUCCU | 29961 | CUUCCAGUCAAGGA | 32003 | Myeloid cell and |
| 30e-5p | UGACUGGAAG | | UGUUUACA | | glia cells |
| hsa-miR- | UGUCAGUUUGUC | 29962 | UGGGGUAUUUGACA | 32004 | Myeloid cells |
| 223-3p | AAAUACCCCA | | AACUGACA | | |
| hsa-miR- | CGUGUAUUUGAC | 29963 | AACUCAGCUUGUCA | 32005 | Myeloid cells |
| 223-5p | AAGCUGAGUU | | AAUACACG | | |
| hsa-miR- | UUCACAGUGGCU | 29964 | GCGGAACUUAGCCA | 32006 | Myeloid cells |
| 27a-3p | AAGUUCCGC | | CUGUGAA | | |
| hsa-miR- | AGGGCUUAGCUG | 29965 | UGCUCACAAGCAGC | 32007 | Myeloid cells |
| 27a-5p | CUUGUGAGCA | | UAAGCCCU | | |
| hsa-miR- | AUCACAUUGCCAG | 29966 | GGUAAUCCCUGGCA | 32008 | Myeloid cells and |
| 23b-3p | GGAUUACC | | AUGUGAU | | blood |
| hsa-miR- | UGGGUUCCUGGC | 29967 | AAAUCAGCAUGCCA | 32009 | Myeloid cells and |
| 23b-5p | AUGCUGAUUU | | GGAACCCA | | blood |
| hsa-miR- | CUUUCAGUCGGA | 29968 | GCUGUAAACAUCCG | 32010 | Myeloid cells and |
| 30e-3p | UGUUUACAGC | | ACUGAAAG | | glia cells |
| hsa-miR- | UGCCUACUGAGCU | 29969 | ACUGAUAUCAGCUC | 32011 | Myeloid cells and |
| 24-1-5p | GAUAUCAGU | | AGUAGGCA | | lung |
| hsa-miR- | UGCCUACUGAGCU | 29970 | CUGUGUUUCAGCUC | 32012 | Myeloid cells and |
| 24-2-5p | GAAACACAG | | AGUAGGCA | | lung |
| hsa-miR- | UGGCUCAGUUCA | 29971 | CUGUUCCUGCUGAA | 32013 | Myeloid cells and |
| 24-3p | GCAGGAACAG | | CUGAGCCA | | lung |
| hsa-miR- | UUCACAGUGGCU | 29972 | GCAGAACUUAGCCA | 32014 | Myeloid cells and |
| 27b-3p | AAGUUCUGC | | CUGUGAA | | vascular endothelial |
| | | | | | cells |
| hsa-miR- | AGAGCUUAGCUG | 29973 | GUUCACCAAUCAGC | 32015 | Myeloid cells and |
| 27b-5p | AUUGGUGAAC | | UAAGCUCU | | vascular endothelial |
| | | | | | cells |
| hsa-miR- | UGUAGUGUUUCC | 29974 | UCCAUAAAGUAGGA | 32016 | Myeloid cells, |
| 142-3p | UACUUUAUGGA | | AACACUACA | | hematopoiesis, |
| | | | | | APC cells |
| hsa-miR- | CAUAAAGUAGAA | 29975 | AGUAGUGCUUUCUA | 32017 | Myeloid cells, |
| 142-5p | AGCACUACU | | CUUUAUG | | hematopoiesis, |
| | | | | | APC cells |
| hsa-miR- | UGAAGGUCUACU | 29976 | CCUGGCACACAGUA | 32018 | Myeloid cells, |
| 493-3p | GUGUGCCAGG | | GACCUUCA | | pancreas (islet) |
| hsa-miR- | UUGUACAUGGUA | 29977 | AAUGAAAGCCUACC | 32019 | Myeloid cells, |
| 493-5p | GGCUUUCAUU | | AUGUACAA | | pancreas (islet) |
| hsa-miR- | CUGGAUGGCUCCU | 29978 | AGACAUGGAGGAGC | 32020 | Myoblast |
| 432-3p | CCAUGUCU | | CAUCCAG | | |
| hsa-miR- | UCUUGGAGUAGG | 29979 | CCACCCAAUGACCU | 32021 | Myoblast |
| 432-5p | UCAUUGGGUGG | | ACUCCAAGA | | |
| hsa-miR- | CUCAUCUGCAAAG | 29980 | CACUUACUUCUUUG | 32022 | Myoblast |
| 452-3p | AAGUAAGUG | | CAGAUGAG | | |
| hsa-miR- | AACUGUUUGCAG | 29981 | UCAGUUUCCUCUGC | 32023 | Myoblast |
| 452-5p | AGGAAACUGA | | AAACAGUU | | |
| hsa-miR- | CUUGGUUCAGGG | 29982 | UGGGGACCCUCCCU | 32024 | Myoblast |
| 659-3p | AGGGUCCCCA | | GAACCAAG | | |
| hsa-miR- | AGGACCUUCCCUG | 29983 | UCCUUGGUUCAGGG | 32025 | Myoblast |
| 659-5p | AACCAAGGA | | AAGGUCCU | | |
| hsa-miR- | ACCUCCUGUGUGC | 29984 | UAAUCCAUGCACAC | 32026 | Myoblast |
| 660-3p | AUGGAUUA | | AGGAGGU | | |
| hsa-miR- | UACCCAUUGCAUA | 29985 | CAACUCCGAUAUGC | 32027 | Myoblast |
| 660-5p | UCGGAGUUG | | AAUGGGUA | | |
| hsa-miR- | AAAGCUGGGUUG | 29986 | CCUUCUCAACCCAG | 32028 | Neural cells |
| 320e | AGAAGG | | CUUU | | |
| hsa-miR- | GGUAUCCGUUUG | 29987 | ACCAUCCCCAAACG | 32029 | Neuroblastoma |
| 3713 | GGGAUGGU | | GAUACC | | |
| hsa-miR- | GAAGGCAGCAGU | 29988 | ACAGGGGAGCACUG | 32030 | Neuroblastoma |
| 3714 | GCUCCCCUGU | | CUGCCUUC | | |
| hsa-miR- | UCAGUGCAUCACA | 29989 | ACAAAGUUCUGUGA | 32031 | Neuron |
| 148b-3p | GAACUUUGU | | UGCACUGA | | |
| hsa-miR- | AAGUUCUGUUAU | 29990 | GCCUGAGUGUAUAA | 32032 | Neuron |
| 148b-5p | ACACUCAGGO | | CAGAACUU | | |
| hsa-miR- | CUGGCCCUCUCUG | 29991 | ACGGAAGGGCAGAG | 32033 | Neuron, blood |
| 328 | CCCUUCCGU | | AGGGCCAG | | |
| hsa-miR- | CUAGACUGAAGC | 29992 | CCUCAAGGAGCUUC | 32034 | Neuron, fetal liver |
| 151a-3p | UCCUUGAGG | | AGUCUAG | | |
| hsa-miR- | UCGAGGAGCUCAC | 29993 | ACUAGACUGUGAGC | 32035 | Neuron, fetal liver |
| 15la-5p | AGUCUAGU | | UCCUCGA | | |
| hsa-miR- | CACAUUACACGGU | 29994 | AGAGGUCGACCGUG | 32036 | Neurons |
| 323a-3p | CGACCUCU | | UAAUGUG | | |
| hsa-miR- | AGGUGGUCCGUG | 29995 | GCGAACGCGCCACG | 32037 | Neurons |
| 323a-5p | GCGCGUUCGC | | GACCACCU | | |
| hsa-miR- | CGCAUCCCCUAGG | 29996 | ACACCAAUGCCCUA | 32038 | Neurons |
| 324-5p | GCAUUGGUGU | | GGGGAUGCG | | |
| hsa-miR- | CCUCUGGGCCCUU | 29997 | CUGGAGGAAGGGCC | 32039 | Neurons |
| 326 | CCUCCAG | | CAGAGG | | |
| hsa-miR- | CCUAGUAGGUGU | 29998 | ACACUUACUGGACA | 32040 | Neurons, placenta |
| 325 | CCAGUAAGUGU | | CCUACUAGG | | |
| hsa-miR- | ACGGUGCUGGAU | 29999 | AAAGGCCACAUCCA | 32041 | Oligodendrocytes |
| 1250 | GUGGCCUUU | | GCACCGU | | |
| hsa-miR- | UCAGCACCAGGAU | 30000 | CUCCAACAAUAUCC | 32042 | Oligodendrocytes |
| 3065-3p | AUUGUUGGAG | | UGGUGCUGA | | |
| hsa-miR- | UCAACAAAAUCAC | 30001 | UCCAGCAUCAGUGA | 32043 | Oligodendrocytes |
| 3065-5p | UGAUGCUGGA | | UUUUGUUGA | | |
| hsa-miR- | AACAAUAUCCUG | 30002 | CACUCAGCACCAGG | 32044 | Oligodendrocytes |
| 338-5p | GUGCUGAGUG | | AUAUUGUU | | |
| hsa-miR- | GGCAGGUUCUCAC | 30003 | CCUAGAGAGGGUGA | 32045 | Oligodendrocytes |
| 657 | CCUCUCUAGG | | GAACCUGCC | | |
| hsa-miR- | GACACGGGCGACA | 30004 | GGGCCGCAGCUGUC | 32046 | Oocyte |
| 602 | GCUGCGGCCC | | GCCCGUGUC | | |
| hsa-miR- | AUGUAUGUGUGC | 30005 | CAUGCACAUGCACA | 32047 | Oocyte and prostate |
| 297 | AUGUGCAUG | | CAUACAU | | |
| hsa-miR- | UAUACAAGGGCA | 30006 | AGAGAGAGUCUGCC | 32048 | Osteoblast |
| 300 | GACUCUCUCU | | CUUGUAUA | | |
| hsa-miR- | GGCGGCGGCGGA | 30007 | CCCCCGCCUCCGCC | 32049 | Osteoblast |
| 3960 | GGCGGGGG | | GCCGCC | | |
| hsa-miR- | GCAGGUGCUCACU | 30008 | AGGAGGACAAGUGA | 32050 | Osteoblast |
| 764 | UGUCCUCCU | | GCACCUGC | | |
| hsa-miR- | GGGGCCUGGCGG | 30009 | CCGCCCACCGCCAG | 32051 | Osteoblasts |
| 2861 | UGGGCGG | | GCCCC | | |
| hsa-miR- | GCCCAAAGGUGA | 30010 | CCCAAAAAAUUCAC | 32052 | Osteoblasts, heart |
| 186-3p | AUUUUUUGGG | | CUUUGGGC | | |
| hsa-miR- | CAAAGAAUUCUCC | 30011 | AGCCCAAAAGGAGA | 32053 | Osteoblasts, heart |
| 186-5p | UUUUGGGCU | | AUUCUUUG | | |
| hsa-miR- | CUGCAAUGUAAG | 30012 | GUAAGAAGUGCUUA | 32054 | Osteogenic cells |
| 106a-3p | CACUUCUUAC | | CAUUGCAG | | |
| hsa-miR- | AAAAGUGCUUAC | 30013 | CUACCUGCACUGUA | 32055 | Osteogenic cells |
| 106a-5p | AGUGCAGGUAG | | AGCACUUUU | | |
| hsa-miR- | ACUGUAGUAUGG | 30014 | CUGGAAGUGCCCAU | 32056 | Osteogenic cells |
| 20b-3p | GCACUUCCAG | | ACUACAGU | | |
| hsa-miR- | CAAAGUGCUCAU | 30015 | CUACCUGCACUAUG | 32057 | Osteogenic cells |
| 20b-5p | AGUGCAGGUAG | | AGCACUUUG | | |
| hsa-miR- | GGGGUAUUGUUU | 30016 | CCUGGCAGCGGAAA | 32058 | Ovary |
| 503-3p | CCGCUGCCAGG | | CAAUACCCC | | |
| hsa-miR- | UAGCAGCGGGAA | 30017 | CUGCAGAACUGUUC | 32059 | Ovary |
| 503-5p | CAGUUCUGCAG | | CCGCUGCUA | | |
| hsa-miR- | CGAGCCUCAAGCA | 30018 | AAGUCCCUUGCUUG | 32060 | Ovary, female |
| 2114-3p | AGGGACUU | | AGGCUCG | | reproductive tract |
| hsa-miR- | UAGUCCCUUCCUU | 30019 | GACCGCUUCAAGGA | 32061 | Ovary, female |
| 2114-5p | GAAGCGGUC | | AGGGACUA | | reproductive tract |
| hsa-miR- | ACUGGACUUGGA | 30020 | CCUUCUGACUCCAA | 32062 | Ovary, lipid |
| 378a-3p | GUCAGAAGG | | GUCCAGU | | metabolism |
| hsa-miR- | CUCCUGACUCCAG | 30021 | ACACAGGACCUGGA | 32063 | Ovary, |
| 378a-5p | GUCCUGUGU | | GUCAGGAG | | placenta/trophoblast |
| | | | | | lipid metabolism |
| hsa-miR- | UUUGUUCGUUCG | 30022 | UCACGCGAGCCGAA | 32064 | Pancreas (islet) |
| 375 | GCUCGCGUGA | | CGAACAAA | | |
| hsa-miR- | ACGGAUGUUUGA | 30023 | UAGCACAUGCUCAA | 32065 | Pancreatic cells |
| 105-3p | GCAUGUGCUA | | ACAUCCGU | | |
| hsa-miR- | UCAAAUGCUCAG | 30024 | ACCACAGGAGUCUG | 32066 | Pancreatic cells |
| 105-5p | ACUCCUGUGGU | | AGCAUUUGA | | |
| hsa-miR- | CGGCAACAAGAA | 30025 | CUCAGGCAGUUUCU | 32067 | Pancreatic cells, |
| 196a-3p | ACUGCCUGAG | | UGUUGCCG | | endometrial tissues, |
| | | | | | mesenchymal stem |
| | | | | | cells |
| hsa-miR- | UAGGUAGUUUCA | 30026 | CCCAACAACAUGAA | 32068 | Pancreatic cells, |
| 196a-5p | UGUUGUUGGG | | ACUACCUA | | endometrial tissues, |
| | | | | | mesenchymal stem |
| | | | | | cells |
| hsa-miR- | CAAUGUUUCCACA | 30027 | GUGAUGCACUGUGG | 32069 | Pancreatic islet, |
| 33a-3p | GUGCAUCAC | | AAACAUUG | | lipid metabolism |
| hsa-miR- | GUGCAUUGUAGU | 30028 | UGCAAUGCAACUAC | 32070 | Pancreatic islet, |
| 33a-5p | UGCAUUGCA | | AAUGCAC | | lipid metabolism |
| hsa-miR- | AUCCCACCUCUGC | 30029 | UGGUGGCAGAGGUG | 32071 | Periodontal tissue |
| 1260a | CACCA | | GGAU | | |
| hsa-miR- | AUCCCACCACUGC | 30030 | AUGGUGGCAGUGGU | 32072 | Periodontal tissue |
| 1260b | CACCAU | | GGGAU | | |
| hsa-miR- | ACCUUCCUCUCCA | 30031 | AAAGACCCAUGGAG | 32073 | Peripheral blood |
| 3667-3p | UGGGUCUUU | | AGGAAGGU | | |
| hsa-miR- | AAAGACCCAUUG | 30032 | ACCUUCUCCUCAAU | 32074 | Peripheral blood |
| 3667-5p | AGGAGAAGGU | | GGGUCUUU | | |
| hsa-miR- | AAUGUAGAGAUU | 30033 | AUUUUGAUCAAUCU | 32075 | Peripheral blood |
| 3668 | GAUCAAAAU | | CUACAUU | | |
| hsa-miR- | ACGGAAUAUGUA | 30034 | UAUAUUCCGUAUAC | 32076 | Peripheral blood |
| 3669 | UACGGAAUAUA | | AUAUUCCGU | | |
| hsa-miR- | AGAGCUCACAGCU | 30035 | UAGAGAAGGACAGC | 32077 | Peripheral blood |
| 3670 | GUCCUUCUCUA | | UGUGAGCUCU | | |
| hsa-miR- | AUCAAAUAAGGA | 30036 | UGCAGACUAGUCCU | 32078 | Peripheral blood |
| 3671 | CUAGUCUGCA | | UAUUUGAU | | |
| hsa-miR- | AUGAGACUCAUG | 30037 | AAGAUGUUUUACAU | 32079 | Peripheral blood |
| 3672 | UAAAACAUCUU | | GAGUCUCAU | | |
| hsa-miR- | AUGGAAUGUAUA | 30038 | UAUUCCGUAUAUAC | 32080 | Peripheral blood |
| 3673 | UACGGAAUA | | AUUCCAU | | |
| hsa-miR- | AUUGUAGAACCU | 30039 | GGCCAAUCUUAGGU | 32081 | Peripheral blood |
| 3674 | AAGAUUGGCC | | UCUACAAU | | |
| hsa-miR- | CAUCUCUAAGGA | 30040 | UUGGGGGAGUUCCU | 32082 | Peripheral blood |
| 3675-3p | ACUCCCCCAA | | UAGAGAUG | | |
| hsa-miR- | UAUGGGGCUUCU | 30041 | GAAAUCUCUACAGA | 32083 | Peripheral blood |
| 3675-5p | GUAGAGAUUUC | | AGCCCCAUA | | |
| hsa-miR- | CCGUGUUUCCCCC | 30042 | AAAGCGUGGGGGAA | 32084 | Peripheral blood |
| 3676-3p | ACGCUUU | | ACACGG | | |
| hsa-miR- | AGGAGAUCCUGG | 30043 | AACCCAGGAUCUCC | 32085 | Peripheral blood |
| 3676-5p | GUU | | U | | |
| hsa-miR- | CUCGUGGGCUCUG | 30044 | GGCCGUGGCCAGAG | 32086 | Peripheral blood |
| 3677-3p | GCCACGGCC | | CCCACGAG | | |
| hsa-miR- | CAGUGGCCAGAGC | 30045 | CACUGCAGGGCUCU | 32087 | Peripheral blood |
| 3677-5p | CCUGCAGUG | | GGCCACUG | | |
| hsa-miR- | CUGCAGAGUUUG | 30046 | CCGGUCCGUACAAA | 32088 | Peripheral blood |
| 3678-3p | UACGGACCGG | | CUCUGCAG | | |
| hsa-miR- | UCCGUACAAACUC | 30047 | CACAGCAGAGUUUG | 32089 | Peripheral blood |
| 3678-5p | UGCUGUG | | UACGGA | | |
| hsa-miR- | CUUCCCCCCAGUA | 30048 | GAUGAAGAUUACUG | 32090 | Peripheral blood |
| 3679-3p | AUCUUCAUC | | GGGGGAAG | | |
| hsa-miR- | UGAGGAUAUGGC | 30049 | UCCCCUUCCCUGCC | 32091 | Peripheral blood |
| 3679-5p | AGGGAAGGGGA | | AUAUCCUCA | | |
| hsa-miR- | UUUUGCAUGACCC | 30050 | CCUACUCCCAGGGU | 32092 | Peripheral blood |
| 3680-3p | UGGGAGUAGG | | CAUGCAAAA | | |
| hsa-miR- | GACUCACUCACAG | 30051 | UGCACAAUCCUGUG | 32093 | Peripheral blood |
| 3680-5p | GAUUGUGCA | | AGUGAGUC | | |
| hsa-miR- | ACACAGUGCUUCA | 30052 | AGUAGUGGAUGAAG | 32094 | Peripheral blood |
| 3681-3p | UCCACUACU | | CACUGUGU | | |
| hsa-miR- | UAGUGGAUGAUG | 30053 | GCACAGAGUGCAUC | 32095 | Peripheral blood |
| 3681-5p | CACUCUGUGC | | AUCCACUA | | |
| hsa-miR- | UGAUGAUACAGG | 30054 | CUACCUCCACCUGU | 32096 | Peripheral blood |
| 3682-3p | UGGAGGUAG | | AUCAUCA | | |
| hsa-miR- | CUACUUCUACCUG | 30055 | AUGAUAACACAGGU | 32097 | Peripheral blood |
| 3682-5p | UGUUAUCAU | | AGAAGUAG | | |
| hsa-miR- | UGCGACAUUGGA | 30056 | UGAUACUACUUCCA | 32098 | Peripheral blood |
| 3683 | AGUAGUAUCA | | AUGUCGCA | | |
| hsa-miR- | UUAGACCUAGUA | 30057 | AAGGACGUGUACUA | 32099 | Peripheral blood |
| 3684 | CACGUCCUU | | GGUCUAA | | |
| hsa-miR- | UUUCCUACCCUAC | 30058 | AGUCUUCAGGUAGG | 32100 | Peripheral blood |
| 3685 | CUGAAGACU | | GUAGGAAA | | |
| hsa-miR- | AUCUGUAAGAGA | 30059 | UCAUUUACUUUCUC | 32101 | Peripheral blood |
| 3686 | AAGUAAAUGA | | UUACAGAU | | |
| hsa-miR- | CCCGGACAGGCGU | 30060 | ACGUCGCACGAACG | 32102 | Peripheral blood |
| 3687 | UCGUGCGACGU | | CCUGUCCGGG | | |
| hsa-miR- | ACCUGGACCCAGC | 30061 | CUUUGUCUACGCUG | 32103 | Peripheral blood |
| 3690 | GUAGACAAAG | | GGUCCAGGU | | |
| hsa-miR- | ACCAAGUCUGCGU | 30062 | GAGAGGAUGACGCA | 32104 | Peripheral blood |
| 3691-3p | CAUCCUCUC | | GACUUGGU | | |
| hsa-miR- | AGUGGAUGAUGG | 30063 | GUACCGAGUCUCCA | 32105 | Peripheral blood |
| 3691-5p | AGACUCGGUAC | | UCAUCCACU | | |
| hsa-miR- | GUUCCACACUGAC | 30064 | ACUUCUGCAGUGUC | 32106 | Peripheral blood |
| 3692-3p | ACUGCAGAAGU | | AGUGUGGAAC | | |
| hsa-miR- | CCUGCUGGUCAGG | 30065 | CAGUAUCCACUCCU | 32107 | Peripheral blood |
| 3692-5p | AGUGGAUACUG | | GACCAGCAGG | | |
| hsa-miR- | GAGGGUCUUGGG | 30066 | GUCACAUCCCUCCC | 32108 | Placenta |
| 1182 | AGGGAUGUGAC | | AAGACCCUC | | |
| hsa-miR- | AUAUACAGGGGG | 30067 | AUAAGAGUCUCCCC | 32109 | Placenta |
| 1185-1-3p | AGACUCUUAU | | CUGUAUAU | | |
| hsa-miR- | AUAUACAGGGGG | 30068 | AUGAGAGUCUCCCC | 32110 | Placenta |
| 1185-2-3p | AGACUCUCAU | | CUGUAUAU | | |
| hsa-miR- | AGAGGAUACCCU | 30069 | AACAUACAAAGGGU | 32111 | Placenta |
| 1185-5p | UUGUAUGUU | | AUCCUCU | | |
| hsa-miR- | UCUACAAAGGAA | 30070 | AGAAAGCGCUUUCC | 32112 | Placenta |
| 1283 | AGCGCUUUCU | | UUUGUAGA | | |
| hsa-miR- | UCAAAACUGAGG | 30071 | AGAAAAUGCCCCUC | 32113 | Placenta |
| 1323 | GGCAUUUUCU | | AGUUUUGA | | |
| hsa-miR- | UUCUCCAAAAGA | 30072 | CAGAAAGUGCUUUC | 32114 | Placenta |
| 515-5p | AAGCACUUUCUG | | UUUUGGAGAA | | |
| hsa-miR- | UUCUCGAGGAAA | 30073 | GAAAGUGCUUCUUU | 32115 | Placenta |
| 516a-5p | GAAGCACUUUC | | CCUCGAGAA | | |
| hsa-miR- | CCUCUAGAUGGA | 30074 | AGACAGUGCUUCCA | 32116 | Placenta |
| 517-5p | AGCACUGUCU | | UCUAGAGG | | |
| hsa-miR- | AUCGUGCAUCCCU | 30075 | ACACUCUAAAGGGA | 32117 | Placenta |
| 517a-3p | UUAGAGUGU | | UGCACGAU | | |
| hsa-miR- | AUCGUGCAUCCCU | 30076 | ACACUCUAAAGGGA | 32118 | Placenta |
| 517b-3p | UUAGAGUGU | | UGCACGAU | | |
| hsa-miR- | AUCGUGCAUCCUU | 30077 | ACACUCUAAAAGGA | 32119 | Placenta |
| 517c-3p | UUAGAGUGU | | UGCACGAU | | |
| hsa-miR- | CAAAGCGCUCCCC | 30078 | ACCUCUAAAGGGGA | 32120 | Placenta |
| 518b | UUUAGAGGU | | GCGCUUUG | | |
| hsa-miR- | CAAAGCGCUUCUC | 30079 | ACACUCUAAAGAGA | 32121 | Placenta |
| 518c-3p | UUUAGAGUGU | | AGCGCUUUG | | |
| hsa-miR- | UCUCUGGAGGGA | 30080 | CAGAAAGUGCUUCC | 32122 | Placenta |
| 518c-5p | AGCACUUUCUG | | CUCCAGAGA | | |
| hsa-miR- | GAAAGCGCUUCUC | 30081 | CCUCUAAAGAGAAG | 32123 | Placenta |
| 518f-3p | UUUAGAGG | | CGCUUUC | | |
| hsa-miR- | CUCUAGAGGGAA | 30082 | GAGAAAGUGCUUCC | 32124 | Placenta |
| 518f-5p | GCACUUUCUC | | CUCUAGAG | | |
| hsa-miR- | AAAGUGCAUCCU | 30083 | ACACUCUAAAAGGA | 32125 | Placenta |
| 519a-3p | UUUAGAGUGU | | UGCACUUU | | |
| hsa-miR- | CUCUAGAGGGAA | 30084 | CAGAAAGCGCUUCC | 32126 | Placenta |
| 519a-5p | GCGCUUUCUG | | CUCUAGAG | | |
| hsa-miR- | CAAAGUGCCUCCC | 30085 | CACUCUAAAGGGAG | 32127 | Placenta |
| 519d | UUUAGAGUG | | GCACUUUG | | |
| hsa-miR- | AAGUGCCUCCUUU | 30086 | AACACUCUAAAAGG | 32128 | Placenta |
| 519e-3p | UAGAGUGUU | | AGGCACUU | | |
| hsa-miR- | UUCUCCAAAAGG | 30087 | GAAAGUGCUCCCUU | 32129 | Placenta |
| 519e-5p | GAGCACUUUC | | UUGGAGAA | | |
| hsa-miR- | AAAGUGCUUCCCU | 30088 | ACAGUCCAAAGGGA | 32130 | Placenta |
| 520a-3p | UUGGACUGU | | AGCACUUU | | |
| hsa-miR- | CUCCAGAGGGAA | 30089 | AGAAAGUACUUCCC | 32131 | Placenta |
| 520a-5p | GUACUUUCU | | UCUGGAG | | |
| hsa-miR- | ACAAAGUGCUUCC | 30090 | ACUCUAAAGGGAAG | 32132 | Placental specific |
| 520h | CUUUAGAGU | | CACUUUGU | | |
| hsa-miR- | CUACAAAGGGAA | 30091 | GAGAAAGUGCUUCC | 32133 | Placental specific |
| 524-5p | GCACUUUCUC | | CUUUGUAG | | |
| hsa-miR- | GAAGGOGCUUCCC | 30092 | CGCUCUAAAGGGAA | 32134 | Placental specific |
| 525-3p | UUUAGAGCG | | GCGCCUUC | | |
| hsa-miR- | CUCCAGAGGGAU | 30093 | AGAAAGUGCAUCCC | 32135 | Placental specific |
| 525-5p | GCACUUUCU | | UCUGGAG | | |
| hsa-miR- | CUCUAGAGGGAA | 30094 | CAGAAAGUGCUUCC | 32136 | Placental specific |
| 526a | GCACUUUCUG | | CUCUAGAG | | |
| hsa-miR- | GAAAGUGCUUCC | 30095 | GCCUCUAAAAGGAA | 32137 | Placental specific |
| 526b-3p | UUUUAGAGGC | | GCACUUUC | | |
| hsa-miR- | CUCUUGAGGGAA | 30096 | ACAGAAAGUGCUUC | 32138 | Placental specific |
| 526b-5p | GCACUUUCUGU | | CCUCAAGAG | | |
| hsa-miR- | ACUGGACUUAGG | 30097 | GCCUUCUGACCCUA | 32139 | Plasma |
| 422a | GUCAGAAGGC | | AGUCCAGU | | |
| hsa-miR- | AAACAAACAUGG | 30098 | AAGAAGUGCACCAU | 32140 | Platelet |
| 495-3p | UGCACUUCUU | | GUUUGUUU | | |
| hsa-miR- | GAAGUUGCCCAU | 30099 | CGAAAAUAACAUGG | 32141 | Platelet |
| 495-5p | GUUAUUUUCG | | GCAACUUC | | |
| hsa-miR- | AAUCAUUCACGG | 30100 | AAGUGUUGUCCGUG | 32142 | Renal epithelial |
| 382-3p | ACAACACUU | | AAUGAUU | | cells |
| hsa-miR- | GAAGUUGUUCGU | 30101 | CGAAUCCACCACGA | 32143 | Renal epithelial |
| 382-5p | GGUGGAUUCG | | ACAACUUC | | cells |
| hsa-miR- | CCUCCGUGUUACC | 30102 | CUAGAGGACAGGUA | 32144 | Reproductive tracts |
| 3605-3p | UGUCCUCUAG | | ACACGGAGG | | |
| hsa-miR- | UGAGGAUGGAUA | 30103 | GGCUUCCUUGCUAU | 32145 | Reproductive tracts |
| 3605-5p | GCAAGGAAGCC | | CCAUCCUCA | | |
| hsa-miR- | UUCAGAUCCCAGC | 30104 | AGAGGCACCGCUGG | 32146 | Salivary gland |
| 5100 | GGUGCCUCU | | GAUCUGAA | | |
| hsa-miR- | GUCCUAGGAGGC | 30105 | CAGAGGAGCCUCCU | 32147 | Salivary gland |
| 5571-3p | UCCUCUG | | AGGAC | | |
| hsa-miR- | CAAUUCUCAAAG | 30106 | GGGAGGCUCCUUUG | 32148 | Salivary gland |
| 5571-5p | GAGCCUCCC | | AGAAUUG | | |
| hsa-miR- | GUUGGGGUGCAG | 30107 | AGCAGACCCCUGCA | 32149 | Salivary gland |
| 5572 | GGGUCUGCU | | CCCCAAC | | |
| hsa-miR- | UUUCCGGCUCGCG | 30108 | ACACACCCACGCGA | 32150 | Sarcoma |
| 1180 | UGGGUGUGU | | GCCGGAAA | | |
| hsa-miR- | UGAGUGUGUGUG | 30109 | ACACACUCACACAC | 32151 | Semen |
| 574-5p | UGUGAGUGUGU | | ACACACUCA | | |
| hsa-miR- | AGUGGGAGGCCA | 30110 | UGCCGUGCCCUGGC | 32152 | Serum |
| 1233-1-5p | GGGCACGGCA | | CUCCCACU | | |
| hsa-miR- | UGAGCCCUGUCCU | 30111 | CUGCGGGAGGACAG | 32153 | Serum |
| 1233-3p | CCCGCAG | | GGCUCA | | |
| hsa-miR- | AAGUGCCGCCAUC | 30112 | ACACUCAAAAGAUG | 32154 | Serum |
| 37la-3p | UUUUGAGUGU | | GCGGCACUU | | |
| hsa-miR- | ACUCAAACUGUG | 30113 | AGUGCCCCCACAGU | 32155 | Serum |
| 371a-5p | GGGGCACU | | UUGAGU | | |
| hsa-miR- | AAGUGCCCCCACA | 30114 | GCACUCAAACUGUG | 32156 | Serum |
| 371b-3p | GUUUGAGUGC | | GGGGCACUU | | |
| hsa-miR- | ACUCAAAAGAUG | 30115 | AAAGUGCCGCCAUC | 32157 | Serum |
| 371b-5p | GCGGCACUUU | | UUUUGAGU | | |
| hsa-miR- | AAACCUGUGUUG | 30116 | GACUCUUGAACAAC | 32158 | Serum |
| 649 | UUCAAGAGUC | | ACAGGUUU | | |
| hsa-miR- | ACAGUAGAGGGA | 30117 | CUGCGAUUCCUCCO | 32159 | Skin |
| 936 | GGAAUCGCAG | | UCUACUGU | | |
| hsa-miR- | GUGAAAUGUUUA | 30118 | CUAGUGGUCCUAAA | 32160 | Skin (epithelium) |
| 203a | GGACCACUAG | | CAUUUCAC | | |
| hsa-miR- | UUGAACUGUUAA | 30119 | UCCAGUGGUUCUUA | 32161 | Skin specific |
| 203b-3p | GAACCACUGGA | | ACAGUUCAA | | (epithelium) |
| hsa-miR- | UAGUGGUCCUAA | 30120 | UGUGAAAUGUUUAG | 32162 | Skin specific |
| 203b-5p | ACAUUUCACA | | GACCACUA | | (epithelium) |
| hsa-miR- | UGCAGGACCAAG | 30121 | AGGGCUCAUCUUGG | 32163 | Smooth muscle |
| 1286 | AUGAGCCCU | | UCCUGCA | | |
| hsa-miR- | CUCCCACAUGCAG | 30122 | UGCAAACCCUGCAU | 32164 | Smooth muscle, |
| 188-3p | GGUUUGCA | | GUGGGAG | | central nervous |
| | | | | | system |
| hsa-miR- | CAUCCCUUGCAUG | 30123 | CCCUCCACCAUGCA | 32165 | Smooth muscle, |
| 188-5p | GUGGAGGG | | AGGGAUG | | central nervous |
| | | | | | system |
| hsa-miR- | AAAAUGAAAUGA | 30124 | UGGGCUGGGCUCAU | 32166 | Solid tumor |
| 3646 | GCCCAGCCCA | | UUCAUUUU | | |
| hsa-miR- | AGCCGCGGGGAUC | 30125 | CCCUCGGCGAUCCC | 32167 | Solid tumor |
| 3648 | GCCGAGGG | | CGCGGCU | | |
| hsa-miR- | AGGGACCUGAGU | 30126 | CUUAGACACUCAGG | 32168 | Solid tumor |
| 3649 | GUCUAAG | | UCCCU | | |
| hsa-miR- | AGGUGUGUCUGU | 30127 | GGACUCUACAGACA | 32169 | Solid tumor |
| 3650 | AGAGUCC | | CACCU | | |
| hsa-miR- | CAUAGCCCGGUCG | 30128 | UCAUGUACCAGCGA | 32170 | Solid tumor |
| 3651 | CUGGUACAUGA | | CCGGGCUAUG | | |
| hsa-miR- | CGGCUGGAGGUG | 30129 | UCCUCACACCUCCA | 32171 | Solid tumor |
| 3652 | UGAGGA | | GCCG | | |
| hsa-miR- | CUAAGAAGUUGA | 30130 | CUUCAGUCAACUUC | 32172 | Solid tumor |
| 3653 | CUGAAG | | UUAG | | |
| hsa-miR- | GACUGGACAAGC | 30131 | UUCCUCAGCUUGUC | 32173 | Solid tumor |
| 3654 | UGAGGAA | | CAGUC | | |
| hsa-miR- | GCUUGUCGCUGCG | 30132 | AGCAACACCGCAGC | 32174 | Solid tumor |
| 3655 | GUGUUGCU | | GACAAGC | | |
| hsa-miR- | GGCGGGUGCGGG | 30133 | CCACCCCCGCACCC | 32175 | Solid tumor |
| 3656 | GGUGG | | GCC | | |
| hsa-miR- | UGUGUCCCAUUA | 30134 | AAUCACCAAUAAUG | 32176 | Solid tumor |
| 3657 | UUGGUGAUU | | GGACACA | | |
| hsa-miR- | UUUAAGAAAACA | 30135 | AUCUCCAUGGUGUU | 32177 | Solid tumor |
| 3658 | CCAUGGAGAU | | UUCUUAAA | | |
| hsa-miR- | GCUAUUUCACGAC | 30136 | AACCCUGGUGUCGU | 32178 | Stem cells |
| 138-2-3p | ACCAGGGUU | | GAAAUAGC | | |
| hsa-miR- | AGCUGGUGUUGU | 30137 | CGGCCUGAUUCACA | 32179 | Stem cells |
| 138-5p | GAAUCAGGCCG | | ACACCAGCU | | |
| hsa-miR- | AAUAAUACAUGG | 30138 | AAAGAUCAACCAUG | 32180 | Stem cells |
| 369-3p | UUGAUCUUU | | UAUUAUU | | |
| hsa-miR- | AGAUCGACCGUG | 30139 | GCGAAUAUAACACG | 32181 | Stem cells |
| 369-5p | UUAUAUUCGC | | GUCGAUCU | | |
| hsa-miR- | AAUCAUGUGCAG | 30140 | CAUAUUGGCACUGC | 32182 | Stem cells |
| 96-3p | UGCCAAUAUG | | ACAUGAUU | | |
| hsa-miR- | UUUGGCACUAGC | 30141 | AGCAAAAAUGUGCU | 32183 | Stem cells |
| 96-5p | ACAUUUUUGCU | | AGUGCCAAA | | |
| hsa-miR- | UCCUGUACUGAGC | 30142 | CUCGGGGCAGCUCA | 32184 | Stem cells (adipose) |
| 486-5p | UGCCCCGAG | | GUACAGGA | | |
| hsa-miR- | GCUACUUCACAAC | 30143 | GGCCCUGGUGUUGU | 32185 | Stem cells, |
| 138-1-3p | ACCAGGGCC | | GAAGUAGC | | epidermal cells |
| | | | | | (keratinocytes) |
| hsa-miR- | CAUCAUCGUCUCA | 30144 | AGACUCAUUUGAGA | 32186 | Stem cells, placenta |
| 136-3p | AAUGAGUCU | | CGAUGAUG | | |
| hsa-miR- | ACUCCAUUUGUU | 30145 | UCCAUCAUCAAAAC | 32187 | Stem cells, placenta |
| 136-5p | UUGAUGAUGGA | | AAAUGGAGU | | |
| hsa-miR- | CUCCUACAUAUUA | 30146 | UGUUAAUGCUAAUA | 32188 | T/B cells, |
| 155-3p | GCAUUAACA | | UGUAGGAG | | monocytes, breast |
| hsa-miR- | UUAAUGCUAAUC | 30147 | ACCCCUAUCACGAU | 32189 | T/B cells, |
| 155-5p | GUGAUAGGGGU | | UAGCAUUAA | | monocytes, breast |
| hsa-miR- | AGAUCAGAAGGU | 30148 | AGCCACAAUCACCU | 32190 | Testes, brain |
| 383 | GAUUGUGGCU | | UCUGAUCU | | (medulla) |
| hsa-miR- | UACUGCAGACGU | 30149 | CAUGAUUGCCACGU | 32191 | Testis |
| 509-3-5p | GGCAAUCAUG | | CUGCAGUA | | |
| hsa-miR- | GUUAGGGCCAAC | 30150 | CCAAGAGAUGUUGG | 32192 | T-Lymphocytes |
| 2909 | AUCUCUUGG | | CCCUAAC | | |
| hsa-miR- | AACAUAGAGGAA | 30151 | ACGUGGAAUUUCCU | 32193 | Trophoblast |
| 376c-3p | AUUCCACGU | | CUAUGUU | | |
| hsa-miR- | GGUGGAUAUUCC | 30152 | AACAUAGAAGGAAU | 32194 | Trophoblast |
| 376c-5p | UUCUAUGUU | | AUCCACC | | |
| hsa-miR- | UCAUAGOCCUGUA | 30153 | AGCAGCAUUGUACA | 32195 | Variety of cells and |
| 103b | CAAUGCUGCU | | GGGCUAUGA | | tissues |
| hsa-miR- | UAACACUGUCUG | 30154 | CCAUCUUUACCAGA | 32196 | Variety of cells and |
| 141-3p | GUAAAGAUGG | | CAGUGUUA | | tissues |
| hsa-miR- | CAUCUUCCAGUAC | 30155 | UCCAACACUGUACU | 32197 | Variety of cells and |
| 141-5p | AGUGUUGGA | | GGAAGAUG | | tissues |
| hsa-miR- | AACUGGCCUACAA | 30156 | ACUGGGACUUUGUA | 32198 | Variety of cells and |
| 193a-3p | AGUCCCAGU | | GGCCAGUU | | tissues |
| hsa-miR- | UGGGUCUUUGCG | 30157 | UCAUCUCGCCCGCA | 32199 | Variety of cells and |
| 193a-5p | GGCGAGAUGA | | AAGACCCA | | tissues |
| hsa-miR- | AUGACCUAUGAA | 30158 | GUCUGUCAAUUCAU | 32200 | Variety of cells and |
| 215 | UUGACAGAC | | AGGUCAU | | tissues |
| hsa-miR- | AAGCUGCCAGUU | 30159 | ACAGUUCUUCAACU | 32201 | Variety of cells and |
| 22-3p | GAAGAACUGU | | GGCAGCUU | | tissues |
| hsa-miR- | AGUUCUUCAGUG | 30160 | UAAAGCUUGCCACU | 32202 | Variety of cells and |
| 22-5p | GCAAGCUUUA | | GAAGAACU | | tissues |
| hsa-miR- | ACAGAUUCGAUU | 30161 | AUUCCCCUAGAAUC | 32203 | Variety of tissues |
| 10b-3p | CUAGGGGAAU | | GAAUCUGU | | and cells |
| hsa-miR- | UACCCUGUAGAAC | 30162 | CACAAAUUCGGUUC | 32204 | Variety of tissues |
| 10b-5p | CGAAUUUGUG | | UACAGGGUA | | and cells |
| hsa-miR- | UAGCAGCACGUA | 30163 | CGCCAAUAUUUACG | 32205 | Variety of tissues, |
| 16-5p | AAUAUUGGCG | | UGCUGCUA | | blood |
| hsa-miR- | UGAGAUGAAGCA | 30164 | GAGCUACAGUGCUU | 32206 | Vascular smooth |
| 143-3p | CUGUAGCUC | | CAUCUCA | | muscle |
| hsa-miR- | GGUGCAGUGCUG | 30165 | ACCAGAGAUGCAGC | 32207 | Vascular smooth |
| 143-5p | CAUCUCUGGU | | ACUGCACC | | muscle, T-cells |
| hsa-miR- | UUGCUCACUGUUC | 30166 | CUAGGGAAGAACAG | 32208 | |
| 1178-3p | UUCCCUAG | | UGAGCAA | | |
| hsa-miR- | CAGGGUCAGCUG | 30167 | CAUGCUCAGCUGAC | 32209 | |
| 1178-5p | AGCAUG | | CCUG | | |
| hsa-miR- | AAGCAUUCUUUC | 30168 | CCAACCAAUGAAAG | 32210 | |
| 1179 | AUUGGUUGG | | AAUGCUU | | |
| hsa-miR- | CCGUCGCCGCCAC | 30169 | CGGCUCGGGUGGCG | 32211 | |
| 1181 | CCGAGCCG | | GCGACGG | | |
| hsa-miR- | CACUGUAGGUGA | 30170 | UGCCCACUCUCACC | 32212 | |
| 1183 | UGGUGAGAGUGG | | AUCACCUACAGUG | | |
| | GCA | | | | |
| hsa-miR- | GGGAUGGUAGAC | 30171 | GCACGUCACCGGUC | 32213 | |
| 1193 | CGGUGACGUGC | | UACCAUCCC | | |
| hsa-miR- | UAGGACACAUGG | 30172 | AGAAGUAGACCAUG | 32214 | |
| 1197 | UCUACUUCU | | UGUCCUA | | |
| hsa-miR- | CUCCUGAGCCAUU | 30173 | GAGGCUCAGAAUGG | 32215 | |
| 1200 | CUGAGCCUC | | CUCAGGAG | | |
| hsa-miR- | GUGCCAGCUGCAG | 30174 | CUCCCCCACUGCAG | 32216 | |
| 1202 | UGGGGGAG | | CUGGCAC | | |
| hsa-miR- | CCCGGAGCCAGGA | 30175 | GAGCUGCAUCCUGG | 32217 | |
| 1203 | UGCAGCUC | | CUCCGGG | | |
| hsa-miR- | UCGUGGCCUGGUC | 30176 | AUAAUGGAGACCAG | 32218 | |
| 1204 | UCCAUUAU | | GCCACGA | | |
| hsa-miR- | UCUGCAGGGUUU | 30177 | CUCAAAGCAAACCC | 32219 | |
| 1205 | GCUUUGAG | | UGCAGA | | |
| hsa-miR- | UGUUCAUGUAGA | 30178 | GCUUAAACAUCUAC | 32220 | |
| 1206 | UGUUUAAGC | | AUGAACA | | |
| hsa-miR- | UCAGCUGGCCCUC | 30179 | GAAAUGAGGGCCAG | 32221 | |
| 1207-3p | AUUUC | | CUGA | | |
| hsa-miR- | UGGCAGGGAGGC | 30180 | CCCCUCCCAGCCUC | 32222 | |
| 1207-5p | UGGGAGGGG | | CCUGCCA | | |
| hsa-miR- | UCACUGUUCAGAC | 30181 | UCCGCCUGUCUGAA | 32223 | |
| 1208 | AGGCGGA | | CAGUGA | | |
| hsa-miR- | CCCCACCUCCUCU | 30182 | CUGAGGAGAGAGGA | 32224 | |
| 1224-3p | CUCCUCAG | | GGUGGGG | | |
| hsa-miR- | GUGAGGACUCGG | 30183 | CCACCUCCCGAGUC | 32225 | |
| 1224-5p | GAGGUGG | | CUCAC | | |
| hsa-miR- | UGAGCCCCUGUGC | 30184 | CUGGGGGCGGCACA | 32226 | |
| 1225-3p | CGCCCCCAG | | GGGGCUCA | | |
| hsa-miR- | GUGGGUACGGCCC | 30185 | CCCCCCACUGGGCC | 32227 | |
| 1225-5p | AGUGGGGGG | | GUACCCAC | | |
| hsa-miR- | UCACCAGCCCUGU | 30186 | CUAGGGAACACAGG | 32228 | |
| 1226-3p | GUUCCCUAG | | GCUGGUGA | | |
| hsa-miR- | GUGAGGGCAUGC | 30187 | CCCCAUCCAGGCCU | 32229 | |
| 1226-5p | AGGCCUGGAUGG | | GCAUGCCCUCAC | | |
| | GG | | | | |
| hsa-miR- | CUCUCACCACUGC | 30188 | CUGUGGGAGGGCAG | 32230 | |
| 1229-3p | CCUCCCACAG | | UGGUGAGAG | | |
| hsa-miR- | GUGGGUAGGGUU | 30189 | CGCUCUCCCCCAAA | 32231 | |
| 1229-5p | UGGGGGAGAGCG | | CCCUACCCAC | | |
| hsa-miR- | GUGUCUGGGCGG | 30190 | GCAGCUGUCCGCCC | 32232 | |
| 1231 | ACAGCUGC | | AGACAC | | |
| hsa-miR- | CUUCCUCGUCUGU | 30191 | GGGGCAGACAGACG | 32233 | |
| 1238-3p | CUGCCCC | | AGGAAG | | |
| hsa-miR- | GUGAGUGGGAGC | 30192 | CACACACUGGGGCU | 32234 | |
| 1238-5p | CCCAGUGUGUG | | CCCACUCAC | | |
| hsa-miR- | ACCUUCUUGUAU | 30193 | UUUAGCACAGUGCU | 32235 | |
| 1248 | AAGCACUGUGCU | | UAUACAAGAAGGU | | |
| | AAA | | | | |
| hsa-miR- | GGCGACAAAACG | 30194 | GACAGGGUCUCGUU | 32236 | |
| 1273c | AGACCCUGUC | | UUGUCGCC | | |
| hsa-miR- | UUGCUUGAACCCA | 30195 | UCCACUUCCUGGGU | 32237 | |
| 1273e | GGAAGUGGA | | UCAAGCAA | | |
| hsa-miR- | GGAGAUGGAGGU | 30196 | CACUGCAACCUCCA | 32238 | |
| 1273f | UGCAGUG | | UCUCC | | |
| hsa-miR- | ACCACUGCACUCC | 30197 | CUCAGGCUGGAGUG | 32239 | |
| 1273g-3p | AGCCUGAG | | CAGUGGU | | |
| hsa-miR- | GGUGGUUGAGGC | 30198 | ACUUACUGCAGCCU | 32240 | |
| 1273g-5p | UGCAGUAAGU | | CAACCACC | | |
| hsa-miR- | UCGCCUCCUCCUC | 30199 | GGGAGAGGAGGAGG | 32241 | |
| 1281 | UCCC | | CGA | | |
| hsa-miR- | UCUAUACAGACCC | 30200 | GAAAAGCCAGGGUC | 32242 | |
| 1284 | UGGCUUUUC | | UGUAUAGA | | |
| hsa-miR- | UCUGGGCAACAA | 30201 | AGGUCUCACUUUGU | 32243 | |
| 1285-3p | AGUGAGACCU | | UGCCCAGA | | |
| hsa-miR- | GAUCUCACUUUG | 30202 | CCUGGGCAACAAAG | 32244 | |
| 1285-5p | UUGCCCAGG | | UGAGAUC | | |
| hsa-miR- | UCGCGCCCCGGCU | 30203 | GAACGGGAGCCGGG | 32245 | |
| 1292-3p | CCCGUUC | | GCGCGA | | |
| hsa-miR- | UGGGAACGGGUU | 30204 | CAGCGUCUGCCGGA | 32246 | |
| 1292-5p | CCGGCAGACGCUG | | ACCCGUUCCCA | | |
| hsa-miR- | UUAGGCCGCAGA | 30205 | UCACCCAGAUCUGC | 32247 | |
| 1295a | UCUGGGUGA | | GGCCUAA | | |
| hsa-miR- | AAUAGGCCACGG | 30206 | UUGCCCAGAUCCGU | 32248 | |
| 1295b-3p | AUCUGGGCAA | | GGCCUAUU | | |
| hsa-miR- | CACCCAGAUCUGC | 30207 | AUUAGGCCGCAGAU | 32249 | |
| 1295b-5p | GGCCUAAU | | CUGGGUG | | |
| hsa-miR- | UUAGGGCCCUGGC | 30208 | GGAGAUGGAGCCAG | 32250 | |
| 1296 | UCCAUCUCC | | GGCCCUAA | | |
| hsa-miR- | UUCAUUCGGCUG | 30209 | UACAUCUGGACAGC | 32251 | |
| 1298 | UCCAGAUGUA | | CGAAUGAA | | |
| hsa-miR- | UUGCAGCUGCCUG | 30210 | GAAGUCACUCCCAG | 32252 | |
| 1301 | GGAGUGACUUC | | GCAGCUGCAA | | |
| hsa-miR- | UUGGGACAUACU | 30211 | UUUAGCAUAAGUAU | 32253 | |
| 1302 | UAUGCUAAA | | GUCCCAA | | |
| hsa-miR- | UCUCACUGUAGCC | 30212 | GGGGUUCGAGGCUA | 32254 | |
| 1304-3p | UCGAACCCC | | CAGUGAGA | | |
| hsa-miR- | UUUGAGGCUACA | 30213 | CACAUCUCACUGUA | 32255 | |
| 1304-5p | GUGAGAUGUG | | GCCUCAAA | | |
| hsa-miR- | CAGGGAGGUGAA | 30214 | AUCACAUUCACCUC | 32256 | |
| 1321 | UGUGAU | | CCUG | | |
| hsa-miR- | GAUGAUGCUGCU | 30215 | CAGCAUCAGCAGCA | 32257 | |
| 1322 | GAUGCUG | | UCAUC | | |
| hsa-miR- | CCAGACAGAAUUC | 30216 | GAAAGUGCAUAGAA | 32258 | |
| 1324 | UAUGCACUUUC | | UUCUGUCUGG | | |
| hsa-miR- | CUCCUGGGGCCCG | 30217 | GCGAGAGUGCGGGC | 32259 | |
| 1343 | CACUCUCGC | | CCCAGGAG | | |
| hsa-miR- | CUCCGUUUGCCUG | 30218 | CAGCGAAACAGGCA | 32260 | |
| 1468 | UUUCGCUG | | AACGGAG | | |
| hsa-miR- | CUCGGCGCGGGGC | 30219 | GGAGCCCGCGCCCC | 32261 | |
| 1469 | GCGGGCUCC | | GCGCCGAG | | |
| hsa-miR- | GCCCUCCGCCCGU | 30220 | CGGGGUGCACGGGC | 32262 | |
| 1470 | GCACCCCG | | GGAGGGC | | |
| hsa-miR- | GCCCGCGUGUGGA | 30221 | ACACCUGGCUCCAC | 32263 | |
| 1471 | GCCAGGUGU | | ACGCGGGC | | |
| hsa-miR- | AAAACCGUCUAG | 30222 | ACAACUGUAACUAG | 32264 | |
| 1537 | UUACAGUUGU | | ACGGUUUU | | |
| hsa-miR- | UCCAGUGCCCUCC | 30223 | GGAGAGGAGGGCAC | 32265 | |
| 1825 | UCUCC | | UGGA | | |
| hsa-miR- | UGAGGCAGUAGA | 30224 | AUUCAAUCUACUGC | 32266 | |
| 1827 | UUGAAU | | CUCA | | |
| hsa-miR- | AGGGGCUGGCUU | 30225 | GACCAGAGGAAAGC | 32267 | |
| 185-3p | UCCUCUGGUC | | CAGCCCCU | | |
| hsa-miR- | UGGAGAGAAAGG | 30226 | UCAGGAACUGCCUU | 32268 | |
| 185-5p | CAGUUCCUGA | | UCUCUCCA | | |
| hsa-miR- | UCGUGUCUUGUG | 30227 | CCGGCUGCAACACA | 32269 | |
| 187-3p | UUGCAGCCGG | | AGACACGA | | |
| hsa-miR- | GGCUACAACACAG | 30228 | GCCCGGGUCCUGUG | 32270 | |
| 187-5p | GACCCGGGC | | UUGUAGCC | | |
| hsa-miR- | CGGCGGGGACGGC | 30229 | GACCAAUCGCCGUC | 32271 | |
| 1908 | GAUUGGUC | | CCCGCCG | | |
| hsa-miR- | CGCAGGGGCCGGG | 30230 | CGGUGAGCACCCGG | 32272 | |
| 1909-3p | UGCUCACCG | | CCCCUGCG | | |
| hsa-miR- | UGAGUGCCGGUG | 3023 | CAGGGCAGGCACCG | 32273 | |
| 1909-5p | CCUGCCCUG | | GCACUCA | | |
| hsa-miR- | GCUGCGCUUGGA | 30232 | GGGGACGAAAUCCA | 32274 | |
| 191-3p | UUUCGUCCCC | | AGCGCAGC | | |
| hsa-miR- | CAACGGAAUCCCA | 30233 | CAGCUGCUUUUGGG | 32275 | |
| 191-5p | AAAGCAGCUG | | AUUCCGUUG | | |
| hsa-miR- | UCAGGCCAGGCAC | 30234 | UGAGCCACUGUGCC | 32276 | |
| 1972 | AGUGGCUCA | | UGGCCUGA | | |
| hsa-miR- | ACCGUGCAAAGG | 30235 | UAUGCUACCUUUGC | 32277 | |
| 1973 | UAGCAUA | | ACGGU | | |
| hsa-miR- | CCUCCUGCCCUCC | 30236 | ACAGCAAGGAGGGC | 32278 | |
| 1976 | UUGCUGU | | AGGAGG | | |
| hsa-miR- | UGUUUUGAUAAC | 30237 | ACAUUACUGUUAUC | 32279 | |
| 2052 | AGUAAUGU | | AAAACA | | |
| hsa-miR- | GUGUUAAUUAAA | 30238 | GUAAAUAGAGGUUU | 32280 | |
| 2053 | CCUCUAUUUAC | | AAUUAACAC | | |
| hsa-miR- | CUGUAAUAUAAA | 30239 | AAUAAAUUAAAUUU | 32281 | |
| 2054 | UUUAAUUUAUU | | AUAUUACAG | | |
| hsa-miR- | UUGGGGAAACGG | 30240 | CACUCAGCGGCCGU | 32282 | |
| 2110 | CCGCUGAGUG | | UUCCCCAA | | |
| hsa-miR- | CCUCCCAUGCCAA | 30241 | GGGAGUUCUUGGCA | 32283 | |
| 2116-3p | GAACUCCC | | UGGGAGG | | |
| hsa-miR- | GGUUCUUAGCAU | 30242 | AGACCUCCUAUGCU | 32284 | |
| 2116-5p | AGGAGGUCU | | AAGAACC | | |
| hsa-miR- | UGUUCUCUUUGCC | 30243 | CUGUCCUUGGCAAA | 32285 | |
| 2117 | AAGGACAG | | GAGAACA | | |
| hsa-miR- | AAAUCUCUGCAG | 30244 | UCACAUUUGCCUGC | 32286 | |
| 216b | GCAAAUGUGA | | AGAGAUUU | | |
| hsa-miR- | CAUGGUUCUGUC | 30245 | CGCGGUGCUUGACA | 32287 | |
| 218-2-3p | AAGCACCGCG | | GAACCAUG | | |
| hsa-miR- | UUGUGCUUGAUC | 30246 | ACAUGGUUAGAUCA | 32288 | |
| 218-5p | UAACCAUGU | | AGCACAA | | |
| hsa-miR- | UCUGCAAGUGUC | 30247 | CCUCGCCUCUGACA | 32289 | |
| 2276 | AGAGGCGAGG | | CUUGCAGA | | |
| hsa-miR- | GAGAGCAGUGUG | 30248 | CCAGGCAACACACA | 32290 | |
| 2278 | UGUUGCCUGG | | CUGCUCUC | | |
| hsa-miR- | AUCACAUUGCCAG | 30249 | GGGUAAUCACUGGC | 32291 | |
| 23c | UGAUUACCC | | AAUGUGAU | | |
| hsa-miR- | AGCAGAGGCAGA | 30250 | CCUGAGCCUCUCUG | 32292 | |
| 2467-3p | GAGGCUCAGG | | CCUCUGCU | | |
| hsa-miR- | UGAGGCUCUGUU | 30251 | GAGCCAAGGCUAAC | 32293 | |
| 2467-5p | AGCCUUGGCUC | | AGAGCCUCA | | |
| hsa-miR- | UAUCAUGGAGUU | 30252 | GUGCUUUACCAACU | 32294 | |
| 2681-3p | GGUAAAGCAC | | CCAUGAUA | | |
| hsa-miR- | GUUUUACCACCUC | 30253 | AGUCUCCUGGAGGU | 32295 | |
| 2681-5p | CAGGAGACU | | GGUAAAAC | | |
| hsa-miR- | CGCCUCUUCAGCG | 30254 | GGAAGACAGCGCUG | 32296 | |
| 2682-3p | CUGUCUUCC | | AAGAGGCG | | |
| hsa-miR- | CAGGCAGUGACU | 30255 | GACGUCUGAACAGU | 32297 | |
| 2682-5p | GUUCAGACGUC | | CACUGCCUG | | |
| hsa-miR- | AGAAUUGCGUUU | 30256 | ACUGAUUGUCCAAA | 32298 | |
| 2964a-3p | GGACAAUCAGU | | CGCAAUUCU | | |
| hsa-miR- | AGAUGUCCAGCCA | 30257 | CGAGAAUUGUGGCU | 32299 | |
| 2964a-5p | CAAUUCUCG | | GGACAUCU | | |
| hsa-miR- | AGCAGAAGCAGG | 30258 | UGGGAGAACCUCCC | 32300 | |
| 298 | GAGGUUCUCCCA | | UGCUUCUGCU | | |
| hsa-miR- | UAUGUGGGAUGG | 30259 | AAGCGGUUUACCAU | 32301 | |
| 299-3p | UAAACCGCUU | | CCCACAUA | | |
| hsa-miR- | UGGUUUACCGUCC | 30260 | AUGUAUGUGGGACG | 32302 | |
| 299-5p | CACAUACAU | | GUAAACCA | | |
| hsa-miR- | CAGUGCAAUGAU | 30261 | GCUUUGACAAUAUC | 32303 | |
| 301b | AUUGUCAAAGC | | AUUGCACUG | | |
| hsa-miR- | UAAUUGCUUCCA | 30262 | AAACAUGGAAGCAA | 32304 | |
| 302f | UGUUU | | UUA | | |
| hsa-miR- | UUGCCACACUGCA | 30263 | UGUAAGGUGUUGCA | 32305 | |
| 3064-3p | ACACCUUACA | | GUGUGGCAA | | |
| hsa-miR- | UCUGGCUGUUGU | 30264 | UUGCACACCACAAC | 32306 | |
| 3064-5p | GGUGUGCAA | | AGCCAGA | | |
| hsa-miR- | GAUAUCAGCUCA | 30265 | CGGUGCCUACUGAG | 32307 | |
| 3074-3p | GUAGGCACCG | | CUGAUAUC | | |
| hsa-miR- | GUUCCUGCUGAAC | 30266 | CUGGCUCAGUUCAG | 32308 | |
| 3074-5p | UGAGCCAG | | CAGGAAC | | |
| hsa-miR- | AUAUGGGUUUAC | 30267 | ACCAACUAGUAAAC | 32309 | |
| 3115 | UAGUUGGU | | CCAUAU | | |
| hsa-miR- | UGCUAUGCCAACA | 30268 | AUGGCAAUAUGUUG | 32310 | |
| 31-3p | UAUUGCCAU | | GCAUAGCA | | |
| hsa-miR- | AGGCAAGAUGCU | 30269 | AGCUAUGCCAGCAU | 32311 | |
| 31-5p | GGCAUAGCU | | CUUGCCU | | |
| hsa-miR- | CGGGGCGGCAGG | 30270 | GAGGCCCCUGOCGC | 32312 | |
| 3196 | GGCCUC | | CCCG | | |
| hsa-miR- | AAAAGCUGGGUU | 30271 | UCCUCUCAACCCAG | 32313 | |
| 320d | GAGAGGA | | CUUUU | | |
| hsa-miR- | CCCAAUACACGGU | 30272 | AAGAGGUCGACCGU | 32314 | |
| 323b-3p | CGACCUCUU | | GUAUUGGG | | |
| hsa-miR- | AGGUUGUCCGUG | 30273 | UGCGAACUCACCAC | 32315 | |
| 323b-5p | GUGAGUUCGCA | | GGACAACCU | | |
| hsa-miR- | GCAAAGCACACGG | 30274 | UCUCUGCAGGCCGU | 32316 | |
| 330-3p | CCUGCAGAGA | | GUGCUUUGC | | |
| hsa-miR- | UCUCUGGGCCUGU | 30275 | GCCUAAGACACAGG | 32317 | |
| 330-5p | GUCUUAGGC | | COCAGAGA | | |
| hsa-miR- | GCCCCUGGGCCUA | 30276 | UUCUAGGAUAGGCC | 32318 | |
| 331-3p | UCCUAGAA | | CAGGGGC | | |
| hsa-miR- | UCCGUCUCAGUUA | 30277 | GCUAUAAAGUAACU | 32319 | |
| 340-3p | CUUUAUAGC | | GAGACGGA | | |
| hsa-miR- | AACACACCUAUUC | 30278 | UGAAUCCUUGAAUA | 32320 | |
| 362-3p | AAGGAUUCA | | GGUGUGUU | | |
| hsa-miR- | AAUCCUUGGAACC | 30279 | ACUCACACCUAGGU | 32321 | |
| 362-5p | UAGGUGUGAGU | | UCCAAGGAUU | | |
| hsa-miR- | UAAUGCCCCUAAA | 30280 | AUAAGGAUUUUUAG | 32322 | |
| 365a-3p | AAUCCUUAU | | GGGCAUUA | | |
| hsa-miR- | AGGGACUUUUGG | 30281 | CACAUCUGCCCCCA | 32323 | |
| 365a-5p | GGGCAGAUGUG | | AAAGUCCCU | | |
| hsa-miR- | UAAUGCCCCUAAA | 30282 | AUAAGGAUUUUUAG | 32324 | |
| 365b-3p | AAUCCUUAU | | GGGCAUUA | | |
| hsa-miR- | AGGGACUUUCAG | 30283 | ACAGCUGCCCCUGA | 32325 | |
| 365b-5p | GGGCAGCUGU | | AAGUCCCU | | |
| hsa-miR- | GAAAAUGAUGAG | 30284 | CAUCAGUCACUACU | 32326 | |
| 3662 | UAGUGACUGAUG | | CAUCAUUUUC | | |
| hsa-miR- | UGAGCACCACACA | 30285 | GCGCCCGGCCUGUG | 32327 | |
| 3663-3p | GGCCGGGCGC | | UGGUGCUCA | | |
| hsa-miR- | GCUGGUCUGCGU | 30286 | CCGAGCACCACGCA | 32328 | |
| 3663-5p | GGUGCUCGG | | GACCAGC | | |
| hsa-miR- | GCCUGCUGGGGU | 30287 | ACCAGGUUCCACCC | 32329 | |
| 370 | GGAACCUGGU | | CAGCAGGC | | |
| hsa-miR- | GAAGUGCUUCGA | 30288 | ACACCCCAAAAUCG | 32330 | |
| 373-3p | UUUUGGGGUGU | | AAGCACUUC | | |
| hsa-miR- | ACUCAAAAUGGG | 30289 | GGAAAGCGCCCCCA | 32331 | |
| 373-5p | GGCGCUUUCC | | UUUUGAGU | | |
| hsa-miR- | UAUGUAACAUGG | 30290 | AGUUAGUGGACCAU | 32332 | |
| 379-3p | UCCACUAACU | | GUUACAUA | | |
| hsa-miR- | UGGUAGACUAUG | 30291 | CCUACGUUCCAUAG | 32333 | |
| 379-5p | GAACGUAGG | | UCUACCA | | |
| hsa-miR- | UGUAGAUACGAG | 30292 | GUGGCUGGUGCUCG | 32334 | |
| 3935 | CACCAGCCAC | | UAUCUACA | | |
| hsa-miR- | ACAGGCGGCUGU | 30293 | CCCCCAUUGCUACA | 32335 | |
| 3937 | AGCAAUGGGGG | | GCCGCCUGU | | |
| hsa-miR- | AAUUCCCUUGUA | 30294 | CCGGGUUAUCUACA | 32336 | |
| 3938 | GAUAACCCGG | | AGGGAAUU | | |
| hsa-miR- | UACGOGCAGACCA | 30295 | GACAUCCUGUGGUC | 32337 | |
| 3939 | CAGGAUGUC | | UGCGCGUA | | |
| hsa-miR- | UUACACACAACUG | 30296 | UAUGAUCCUCAGUU | 32338 | |
| 3941 | AGGAUCAUA | | GUGUGUAA | | |
| hsa-miR- | UAGCCCCCAGGCU | 30297 | CGCCAAGUGAAGCC | 32339 | |
| 3943 | UCACUUGGCG | | UGGGGGCUA | | |
| hsa-miR- | AGGGCAUAGGAG | 30298 | AUAUCAACCCUCUC | 32340 | |
| 3945 | AGGGUUGAUAU | | CUAUGCCCU | | |
| hsa-miR- | GAAUGUUGCUCG | 30299 | AGGGGUUCACCGAG | 32341 | |
| 409-3p | GUGAACCCCU | | CAACAUUC | | |
| hsa-miR- | AGGUUACCCGAGC | 30300 | AUGCAAAGUUGCUC | 32342 | |
| 409-5p | AACUUUGCAU | | GGGUAACCU | | |
| hsa-miR- | UAUGUAACACGG | 30301 | GGUUAGUGGACCGU | 32343 | |
| 411-3p | UCCACUAACC | | GUUACAUA | | |
| hsa-miR- | UAGUAGACCGUA | 30302 | CGUACGCUAUACGG | 32344 | |
| 411-5p | UAGCGUACG | | UCUACUA | | |
| hsa-miR- | ACUUCACCUGGUC | 30303 | ACGGCUAGUGGACC | 32345 | |
| 412 | CACUAGCCGU | | AGGUGAAGU | | |
| hsa-miR- | GUGUUCUCUGAU | 30304 | CUGUCCAUCAGAGA | 32346 | |
| 4273 | GGACAG | | ACAC | | |
| hsa-miR- | CAGGUCGUCUUGC | 30305 | AGAAGCCCUGCAAG | 32347 | |
| 431-3p | AGGGCUUCU | | ACGACCUG | | |
| hsa-miR- | UGUCUUGCAGGCC | 30306 | UGCAUGACGGCCUG | 32348 | |
| 431-5p | GUCAUGCA | | CAAGACA | | |
| hsa-miR- | AUCAUGAUGGGC | 30307 | ACACCGAGGAGCCC | 32349 | |
| 433 | UCCUCGGUGU | | AUCAUGAU | | |
| hsa-miR- | UUGCUAGUUGCA | 30308 | ACAGAGAGGAGUGC | 32350 | |
| 449c-3p | CUCCUCUCUGU | | AACUAGCAA | | |
| hsa-miR- | UAGGCAGUGUAU | 30309 | ACAGCCGCUAGCAA | 32351 | |
| 449c-5p | UGCUAGCGGCUG | | UACACUGCCUA | | |
| | U | | | | |
| hsa-miR- | AUUGGGGACAUU | 30310 | AUGAAUGCAAAAUG | 32352 | |
| 450a-3p | UUGCAUUCAU | | UCCCCAAU | | |
| hsa-miR- | UUUUGCGAUGUG | 30311 | AUAUUAGGAACACA | 32353 | |
| 450a-5p | UUCCUAAUAU | | UCGCAAAA | | |
| hsa-miR- | UUGGGAUCAUUU | 30312 | UAUGGAUGCAAAAU | 32354 | |
| 450b-3p | UGCAUCCAUA | | GAUCCCAA | | |
| hsa-miR- | UUUUGCAAUAUG | 30313 | UAUUCAGGAACAUA | 32355 | |
| 450b-5p | UUCCUGAAUA | | UUGCAAAA | | |
| hsa-miR- | GCAGUCCAUGGGC | 30314 | GUGUAUAUGCCCAU | 32356 | |
| 455-3p | AUAUACAC | | GGACUGC | | |
| hsa-miR- | UAUGUGCCUUUG | 30315 | CGAUGUAGUCCAAA | 32357 | |
| 455-5p | GACUACAUCG | | GGCACAUA | | |
| hsa-miR- | AUACACAUACACG | 30316 | AUGUGUGUUGCGUG | 32358 | |
| 466 | CAACACACAU | | UAUGUGUAU | | |
| hsa-miR- | UUGCAUGUCAGA | 30317 | GGGAAUUACAAUCU | 32359 | |
| 4666b | UUGUAAUUCCC | | GACAUGCAA | | |
| hsa-miR- | UCACUCCUCUCCU | 30318 | AAGACGGGAGGAGA | 32360 | |
| 483-3p | CCCGUCUU | | GGAGUGA | | |
| hsa-miR- | UCAGGCUCAGUCC | 30319 | AUCGGGAGGGGACU | 32361 | |
| 484 | CCUCCCGAU | | GAGCCUGA | | |
| hsa-miR- | GUCAUACACGGCU | 30320 | AGAGAGGAGAGCCG | 32362 | |
| 485-3p | CUCCUCUCU | | UGUAUGAC | | |
| hsa-miR- | AGAGGCUGGCCG | 30321 | GAAUUCAUCACGGC | 32363 | |
| 485-5p | UGAUGAAUUC | | CAGCCUCU | | |
| hsa-miR- | AAUCAUACAGGG | 30322 | AACUGGAUGUCCCU | 32364 | |
| 487a | ACAUCCAGUU | | GUAUGAUU | | |
| hsa-miR- | AAUCGUACAGGG | 30323 | AAGUGGAUGACCCU | 32365 | |
| 487b | UCAUCCACUU | | GUACGAUU | | |
| hsa-miR- | UUGAAAGGCUAU | 30324 | GACCAAGAAAUAGC | 32366 | |
| 488-3p | UUCUUGGUC | | CUUUCAA | | |
| hsa-miR- | CCCAGAUAAUGGC | 30325 | UUGAGAGUGCCAUU | 32367 | |
| 488-5p | ACUCUCAA | | AUCUGGG | | |
| hsa-miR- | CAACCUGGAGGAC | 30326 | CAGCAUGGAGUCCU | 32368 | |
| 490-3p | UCCAUGCUG | | CCAGGUUG | | |
| hsa-miR- | CCAUGGAUCUCCA | 30327 | ACCCACCUGGAGAU | 32369 | |
| 490-5p | GGUGGGU | | CCAUGG | | |
| hsa-miR- | CUUAUGCAAGAU | 30328 | GUAGAAGGGAAUCU | 32370 | |
| 491-3p | UCCCUUCUAC | | UGCAUAAG | | |
| hsa-miR- | AGUGGGGAACCC | 30329 | CCUCAUGGAAGGGU | 32371 | |
| 491-5p | UUCCAUGAGG | | UCCCCACU | | |
| hsa-miR- | AGGACCUGCGGG | 30330 | AAGAAUCUUGUCCC | 32372 | |
| 492 | ACAAGAUUCUU | | GCAGGUCCU | | |
| hsa-miR- | CAAACCACACUGU | 30331 | UCUAACACCACAGU | 32373 | |
| 497-3p | GGUGUUAGA | | GUGGUUUG | | |
| hsa-miR- | CAGCAGCACACUG | 30332 | ACAAACCACAGUGU | 32374 | |
| 497-5p | UGGUUUGU | | GCUGCUG | | |
| hsa-miR- | UUUCAAGCCAGG | 30333 | GAAAAACGCCCCCU | 32375 | |
| 498 | GGGCGUUUUUC | | GGCUUGAAA | | |
| hsa-miR- | UCACUACCUGACA | 30334 | ACUGUAUUGUCAGG | 32376 | |
| 4999-3p | AUACAGU | | UAGUGA | | |
| hsa-miR- | UGCUGUAUUGUC | 30335 | UCACUACCUGACAA | 32377 | |
| 4999-5p | AGGUAGUGA | | UACAGCA | | |
| hsa-miR- | UUCUGCCUCUGUC | 30336 | AAGGACCUGGACAG | 32378 | |
| 5001-3p | CAGGUCCUU | | AGGCAGAA | | |
| hsa-miR- | AGGGCUGGACUC | 30337 | AGCUCCGCCGCUGA | 32379 | |
| 5001-5p | AGCGGCGGAGCU | | GUCCAGCCCU | | |
| hsa-miR- | UGACUGCCUCACU | 30338 | AAGUGGUCAGUGAG | 32380 | |
| 5002-3p | GACCACUU | | GCAGUCA | | |
| hsa-miR- | AAUUUGGUUUCU | 30339 | ACUAAGUGCCUCAG | 32381 | |
| 5002-5p | GAGGCACUUAGU | | AAACCAAAUU | | |
| hsa-miR- | UACUUUUCUAGG | 30340 | CCCCAACAACCUAG | 32382 | |
| 5003-3p | UUGUUGGGG | | AAAAGUA | | |
| hsa-miR- | UCACAACAACCUU | 30341 | UCUACCCUGCAAGG | 32383 | |
| 5003-5p | GCAGGGUAGA | | UUGUUGUGA | | |
| hsa-miR- | CUUGGAUUUUCC | 30342 | CUGAGGCCCAGGAA | 32384 | |
| 5004-3p | UGGGCCUCAG | | AAUCCAAG | | |
| hsa-miR- | UGAGGACAGGGC | 30343 | UCGUGAAUUUGCCC | 32385 | |
| 5004-5p | AAAUUCACGA | | UGUCCUCA | | |
| hsa-miR- | AUCAUAUGAACC | 30344 | AUUAGAGUUUGGUU | 32386 | |
| 5007-3p | AAACUCUAAU | | CAUAUGAU | | |
| hsa-miR- | UAGAGUCUGGCU | 30345 | AAACCAUAUCAGCC | 32387 | |
| 5007-5p | GAUAUGGUUU | | AGACUCUA | | |
| hsa-miR- | CCUGUGCUCCCAG | 30346 | GCGAGGCCCUGGGA | 32388 | |
| 5008-3p | GGCCUCGC | | GCACAGG | | |
| hsa-miR- | UGAGGCCCUUGG | 30347 | CCACUGUGCCCCAA | 32389 | |
| 5008-5p | GGCACAGUGG | | GGGCCUCA | | |
| hsa-miR- | UCCUAAAUCUGA | 30348 | UUUUGGACUUUCAG | 32390 | |
| 5009-3p | AAGUCCAAAA | | AUUUAGGA | | |
| hsa-miR- | UUGGACUUUUUC | 30349 | AUCCCCAAAUCUGA | 32391 | |
| 5009-5p | AGAUUUGGGGAU | | AAAAGUCCAA | | |
| hsa-miR- | AUGCACCUGGGCA | 30350 | CAGAAUCCUUGCCC | 32392 | |
| 500a-3p | AGGAUUCUG | | AGGUGCAU | | |
| hsa-miR- | UAAUCCUUGCUAC | 30351 | UCUCACCCAGGUAG | 32393 | |
| 500a-5p | CUGGGUGAGA | | CAAGGAUUA | | |
| hsa-miR- | UUUUGUGUCUCCC | 30352 | CUGGGGAAUGGGAG | 32394 | |
| 5010-3p | AUUCCCCAG | | ACACAAAA | | |
| hsa-miR- | AGGGGGAUGGCA | 30353 | AAUUUUGCUCUGCC | 32395 | |
| 5010-5p | GAGCAAAAUU | | AUCCCCCU | | |
| hsa-miR- | GUGCAUGGCUGU | 30354 | UGUUAUAUAUACAG | 32396 | |
| 5011-3p | AUAUAUAACA | | CCAUGCAC | | |
| hsa-miR- | UAUAUAUACAGC | 30355 | GAGUGCAUGGCUGU | 32397 | |
| 5011-5p | CAUGCACUC | | AUAUAUA | | |
| hsa-miR- | AAUGCACCCGGGC | 30356 | AGAAUCCUUGCCCG | 32398 | |
| 501-3p | AAGGAUUCU | | GGUGCAUU | | |
| hsa-miR- | AAUCCUUUGUCCC | 30357 | UCUCACCCAGGGAC | 32399 | |
| 501-5p | UGGGUGAGA | | AAAGGAUU | | |
| hsa-miR- | AAUGCACCUGGGC | 30358 | UGAAUCCUUGCCCA | 32400 | |
| 502-3p | AAGGAUUCA | | GGUGCAUU | | |
| hsa-miR- | AUCCUUGCUAUCU | 30359 | UAGCACCCAGAUAG | 32401 | |
| 502-5p | GGGUGCUA | | CAAGGAU | | |
| hsa-miR- | AGACCCUGGUCUG | 30360 | GAUAGAGUGCAGAC | 32402 | |
| 504 | CACUCUAUC | | CAGGGUCU | | |
| hsa-miR- | UUGCAGCUGCGG | 30361 | ACCUUACAACCGCA | 32403 | |
| 5047 | UUGUAAGGU | | GCUGCAA | | |
| hsa-miR- | CGUCAACACUUGC | 30362 | AGGAAACCAGCAAG | 32404 | |
| 505-3p | UGGUUUCCU | | UGUUGACG | | |
| hsa-miR- | GGGAGCCAGGAA | 30363 | ACAUCAAUACUUCC | 32405 | |
| 505-5p | GUAUUGAUGU | | UGGCUCCC | | |
| hsa-miR- | UAAGGCACCCUUC | 30364 | UCUACUCAGAAGGG | 32406 | |
| 506-3p | UGAGUAGA | | UGCCUUA | | |
| hsa-miR- | UAUUCAGGAAGG | 30365 | UUAAGUAACACCUU | 32407 | |
| 506-5p | UGUUACUUAA | | CCUGAAUA | | |
| hsa-miR- | UUUUGCACCUUU | 30366 | UUCACUCCAAAAGG | 32408 | |
| 507 | UGGAGUGAA | | UGCAAAA | | |
| hsa-miR- | UGAUUGUAGCCU | 30367 | UCUACUCCAAAAGG | 32409 | |
| 508-3p | UUUGGAGUAGA | | CUACAAUCA | | |
| hsa-miR- | GGGUUUGUAGCU | 30368 | CAUGCCAGCAAAGC | 32410 | |
| 5087 | UUGCUGGCAUG | | UACAAACCC | | |
| hsa-miR- | CAGGGCUCAGGG | 30369 | CUCCAUCCAAUCCC | 32411 | |
| 5088 | AUUGGAUGGAG | | UGAGCCCUG | | |
| hsa-miR- | AUGCUACUCGGA | 30370 | UCAGUGGGAUUUCC | 32412 | |
| 5089-3p | AAUCCCACUGA | | GAGUAGCAU | | |
| hsa-miR- | GUGGGAUUUCUG | 30371 | GAUGCUACUCAGAA | 32413 | |
| 5089-5p | AGUAGCAUC | | AUCCCAC | | |
| hsa-miR- | CCGGGGCAGAUU | 30372 | CACCCUACACCAAU | 32414 | |
| 5090 | GGUGUAGGGUG | | CUGCCCCGG | | |
| hsa-miR- | ACGGAGACGACA | 30373 | CAGCACAGUCUUGU | 32415 | |
| 5091 | AGACUGUGCUG | | CGUCUCCGU | | |
| hsa-miR- | AAUCCACGCUGAG | 30374 | GAUGCCAAGCUCAG | 32416 | |
| 5092 | CUUGGCAUC | | CGUGGAUU | | |
| hsa-miR- | AGGAAAUGAGGC | 30375 | GCUCCUAGCCAGCC | 32417 | |
| 5093 | UGGCUAGGAGC | | UCAUUUCCU | | |
| hsa-miR- | UGAUUGGUACGU | 30376 | CUACCCACAGACGU | 32418 | |
| 509-3p | CUGUGGGUAG | | ACCAAUCA | | |
| hsa-miR- | AAUCAGUGAAUG | 30377 | AGGUUCAAGGCAUU | 32419 | |
| 5094 | CCUUGAACCU | | CACUGAUU | | |
| hsa-miR- | UUACAGGCGUGA | 30378 | CGCGGUGGUUCACG | 32420 | |
| 5095 | ACCACCGCG | | CCUGUAA | | |
| hsa-miR- | UACUGCAGACAG | 30379 | UGAUUGCCACUGUC | 32421 | |
| 509-5p | UGGCAAUCA | | UGCAGUA | | |
| hsa-miR- | GUUUCACCAUGU | 30380 | GCCUGACCAACAUG | 32422 | |
| 5096 | UGGUCAGGC | | GUGAAAC | | |
| hsa-miR- | UAAAUUUCACCU | 30381 | CCUUCUCAGAAAGG | 32423 | |
| 513a-3p | UUCUGAGAAGG | | UGAAAUUUA | | |
| hsa-miR- | UUCACAAGGAGG | 30382 | AUAAAUGACACCUC | 32424 | |
| 513b | UGUCAUUUAU | | CUUGUGAA | | |
| hsa-miR- | UAAAUUUCACCU | 30383 | UCUUCUCAGAAAGG | 32425 | |
| 513c-3p | UUCUGAGAAGA | | UGAAAUUUA | | |
| hsa-miR- | UUCUCAAGGAGG | 30384 | AUAAACGACACCUC | 32426 | |
| 513c-5p | UGUCGUUUAU | | CUUGAGAA | | |
| hsa-miR- | AUUGACACUUCU | 30385 | UCUACUCACAGAAG | 32427 | |
| 514a-3p | GUGAGUAGA | | UGUCAAU | | |
| hsa-miR- | UACUCUGGAGAG | 30386 | CAUGAUUGUCACUC | 32428 | |
| 514a-5p | UGACAAUCAUG | | UCCAGAGUA | | |
| hsa-miR- | AUUGACACCUCUG | 30387 | UCCACUCACAGAGG | 32429 | |
| 514b-3p | UGAGUGGA | | UGUCAAU | | |
| hsa-miR- | UUCUCAAGAGGG | 30388 | AUGAUUGCCUCCCU | 32430 | |
| 514b-5p | AGGCAAUCAU | | CUUGAGAA | | |
| hsa-miR- | GAGUGCCUUCUU | 30389 | AACGCUCCAAAAGA | 32431 | |
| 515-3p | UUGGAGCGUU | | AGGCACUC | | |
| hsa-miR- | UGCUUCCUUUCAG | 30390 | ACCCUCUGAAAGGA | 32432 | |
| 516b-3p | AGGGU | | AGCA | | |
| hsa-miR- | AUCUGGAGGUAA | 30391 | AAAGUGCUUCUUAC | 32433 | |
| 516b-5p | GAAGCACUUU | | CUCCAGAU | | |
| hsa-miR- | GAAAGCGCUUCCC | 30392 | UCCAGCAAAGGGAA | 32434 | |
| 518a-3p | UUUGCUGGA | | GCGCUUUC | | |
| hsa-miR- | CUGCAAAGGGAA | 30393 | GAAAGGGCUUCCCU | 32435 | |
| 518a-5p | GCCCUUUC | | UUGCAG | | |
| hsa-miR- | CAAAGCGCUUCCC | 30394 | GCUCCAAAGGGAAG | 32436 | |
| 518d-3p | UUUGGAGC | | CGCUUUG | | |
| hsa-miR- | CUCUAGAGGGAA | 30395 | CAGAAAGUGCUUCC | 32437 | |
| 518d-5p | GCACUUUCUG | | CUCUAGAG | | |
| hsa-miR- | AAAGCGCUUCCCU | 30396 | CACUCUGAAGGGAA | 32438 | |
| 518e-3p | UCAGAGUG | | GCGCUUU | | |
| hsa-miR- | CUCUAGAGGGAA | 30397 | CAGAAAGCGCUUCC | 32439 | |
| 518e-5p | GCGCUUUCUG | | CUCUAGAG | | |
| hsa-miR- | AAAGUGCAUCCU | 30398 | AACCUCUAAAAGGA | 32440 | |
| 519b-3p | UUUAGAGGUU | | UGCACUUU | | |
| hsa-miR- | CUCUAGAGGGAA | 30399 | CAGAAAGCGCUUCC | 32441 | |
| 519b-5p | GOGCUUUCUG | | CUCUAGAG | | |
| hsa-miR- | AAAGUGCAUCUU | 30400 | AUCCUCUAAAAAGA | 32442 | |
| 519c-3p | UUUAGAGGAU | | UGCACUUU | | |
| hsa-miR- | CUCUAGAGGGAA | 30401 | CAGAAAGCGCUUCC | 32443 | |
| 519c-5p | GCGCUUUCUG | | CUCUAGAG | | |
| hsa-miR- | AAAGUGCUUCCU | 30402 | CCCUCUAAAAGGAA | 32444 | |
| 520b | UUUAGAGGG | | GCACUUU | | |
| hsa-miR- | AAAGUGCUUCCU | 30403 | ACCCUCUAAAAGGA | 32445 | |
| 520c-3p | UUUAGAGGGU | | AGCACUUU | | |
| hsa-miR- | CUCUAGAGGGAA | 30404 | CAGAAAGUGCUUCC | 32446 | |
| 520c-5p | GCACUUUCUG | | CUCUAGAG | | |
| hsa-miR- | AAAGUGCUUCUC | 30405 | ACCCACCAAAGAGA | 32447 | |
| 520d-3p | UUUGGUGGGU | | AGCACUUU | | |
| hsa-miR- | CUACAAAGGGAA | 30406 | GAAAGGGCUUCCCU | 32448 | |
| 520d-5p | GCCCUUUC | | UUGUAG | | |
| hsa-miR- | AAAGUGCUUCCU | 30407 | CCCUCAAAAAGGAA | 32449 | |
| 520e | UUUUGAGGG | | GCACUUU | | |
| hsa-miR- | AAGUGCUUCCUU | 30408 | AACCCUCUAAAAGG | 32450 | |
| 520f | UUAGAGGGUU | | AAGCACUU | | |
| hsa-miR- | ACAAAGUGCUUCC | 30409 | ACACUCUAAAGGGA | 32451 | |
| 520g | CUUUAGAGUGU | | AGCACUUUGU | | |
| hsa-miR- | AACGCACUUCCCU | 30410 | ACACUCUAAAGGGA | 32452 | |
| 521 | UUAGAGUGU | | AGUGCGUU | | |
| hsa-miR- | AAAAUGGUUCCC | 30411 | ACACUCUAAAGGGA | 32453 | |
| 522-3p | UUUAGAGUGU | | ACCAUUUU | | |
| hsa-miR- | CUCUAGAGGGAA | 30412 | CAGAAAGCGCUUCC | 32454 | |
| 522-5p | GCGCUUUCUG | | CUCUAGAG | | |
| hsa-miR- | GAACGCGCUUCCC | 30413 | ACCCUCUAUAGGGA | 32455 | |
| 523-3p | UAUAGAGGGU | | AGCGCGUUC | | |
| hsa-miR- | CUCUAGAGGGAA | 30414 | CAGAAAGCGCUUCC | 32456 | |
| 523-5p | GCGCUUUCUG | | CUCUAGAG | | |
| hsa-miR- | GAAGGCGCUUCCC | 30415 | ACUCCAAAGGGAAG | 32457 | |
| 524-3p | UUUGGAGU | | CGCCUUC | | |
| hsa-miR- | CUGCAAAGGGAA | 30416 | GAAAGGGCUUCCCU | 32458 | |
| 527 | GCCCUUUC | | UUGCAG | | |
| hsa-miR- | CCUCCCACACCCA | 30417 | UGCAAGCCUUGGGU | 32459 | |
| 532-3p | AGGCUUGCA | | GUGGGAGG | | |
| hsa-miR- | CAUGCCUUGAGU | 30418 | ACGGUCCUACACUC | 32460 | |
| 532-5p | GUAGGACCGU | | AAGGCAUG | | |
| hsa-miR- | AUCAUACAAGGA | 30419 | AAAGAAAUUGUCCU | 32461 | |
| 539-3p | CAAUUUCUUU | | UGUAUGAU | | |
| hsa-miR- | GGAGAAAUUAUC | 30420 | ACACACCAAGGAUA | 32462 | |
| 539-5p | CUUGGUGUGU | | AUUUCUCC | | |
| hsa-miR- | UGGUGGGCACAG | 30421 | AGUCCAGAUUCUGU | 32463 | |
| 541-3p | AAUCUGGACU | | GCCCACCA | | |
| hsa-miR- | AAAGGAUUCUGC | 30422 | AGUGGGACCGACAG | 32464 | |
| 541-5p | UGUCGGUCCCACU | | CAGAAUCCUUU | | |
| hsa-miR- | UCGGGGAUCAUC | 30423 | UCUCGUGACAUGAU | 32465 | |
| 542-5p | AUGUCACGAGA | | GAUCCCCGA | | |
| hsa-miR- | AAACAUUCGCGG | 30424 | AAGAAGUGCACCGC | 32466 | |
| 543 | UGCACUUCUU | | GAAUGUUU | | |
| hsa-miR- | AUUCUGCAUUUU | 30425 | GAACUUGCUAAAAA | 32467 | |
| 544a | UAGCAAGUUC | | UGCAGAAU | | |
| hsa-miR- | ACCUGAGGUUGU | 30426 | UUAGAAAUGCACAA | 32468 | |
| 544b | GCAUUUCUAA | | CCUCAGGU | | |
| hsa-miR- | UCAGCAAACAUU | 30427 | GCACACAAUAAAUG | 32469 | |
| 545-3p | UAUUGUGUGC | | UUUGCUGA | | |
| hsa-miR- | UCAGUAAAUGUU | 30428 | UCAUCUAAUAAACA | 32470 | |
| 545-5p | UAUUAGAUGA | | UUUACUGA | | |
| hsa-miR- | AGCUACAGUUAC | 30429 | UGGUGCAAAAGUAA | 32471 | |
| 548 | UUUUGCACCA | | CUGUAGCU | | |
| hsa-miR- | UAAAAACUGCAA | 30430 | GAAAGUAAUUGCAG | 32472 | |
| 548-3p | UUACUUUC | | UUUUUA | | |
| hsa-miR- | UGCAAAAGUAAU | 30431 | CAAAAACUGCAAUU | 32473 | |
| 548-5p | UGCAGUUUUUG | | ACUUUUGCA | | |
| hsa-miR- | AAAGACCGUGAC | 30432 | UGCAAAAGUAGUCA | 32474 | |
| 548ao-3p | UACUUUUGCA | | CGGUCUUU | | |
| hsa-miR- | AGAAGUAACUAC | 30433 | UGCAAAAACCGUAG | 32475 | |
| 548ao-5p | GGUUUUUGCA | | UUACUUCU | | |
| hsa-miR- | AAAAACCACAAU | 30434 | AAAAGUAAUUGUGG | 32476 | |
| 548ap-3p | UACUUUU | | UUUUU | | |
| hsa-miR- | AAAAGUAAUUGC | 30435 | AAAGACCGCAAUUA | 32477 | |
| 548ap-5p | GGUCUUU | | CUUUU | | |
| hsa-miR- | CAAAAACUGCAA | 30436 | GCAAAAGUAAUUGC | 32478 | |
| 548ag-3p | UUACUUUUGC | | AGUUUUUG | | |
| hsa-miR- | GAAAGUAAUUGC | 30437 | GGCAAAAACAGCAA | 32479 | |
| 548aq-5p | UGUUUUUGCC | | UUACUUUC | | |
| hsa-miR- | UAAAACUGCAGU | 30438 | GCAAAAAUAACUGC | 32480 | |
| 548ar-3p | UAUUUUUGC | | AGUUUUA | | |
| hsa-miR- | AAAAGUAAUUGC | 30439 | GCAAAAACUGCAAU | 32481 | |
| 548ar-5p | AGUUUUUGC | | UACUUUU | | |
| hsa-miR- | UAAAACCCACAAU | 30440 | ACAAACAUAAUUGU | 32482 | |
| 548as-3p | UAUGUUUGU | | GGGUUUUA | | |
| hsa-miR- | AAAAGUAAUUGC | 30441 | GGCAAAACCCGCAA | 32483 | |
| 548as-5p | GGGUUUUGCC | | UUACUUUU | | |
| hsa-miR- | CAAAACCGCAGUA | 30442 | ACAAAAGUUACUGC | 32484 | |
| 548at-3p | ACUUUUGU | | GGUUUUG | | |
| hsa-miR- | AAAAGUUAUUGC | 30443 | AGCCAAAACCGCAA | 32485 | |
| 548at-5p | GGUUUUGGCU | | UAACUUUU | | |
| hsa-miR- | UGGCAGUUACUU | 30444 | CUGGUGCAAAAGUA | 32486 | |
| 548au-3p | UUGCACCAG | | ACUGCCA | | |
| hsa-miR- | AAAAGUAAUUGC | 30445 | GCAAAAACCGCAAU | 32487 | |
| 548au-5p | GGUUUUUGC | | UACUUUU | | |
| hsa-miR- | AAAACUGCAGUU | 30446 | GCAAAAGUAACUGC | 32488 | |
| 548av-3p | ACUUUUGC | | AGUUUU | | |
| hsa-miR- | AAAAGUACUUGC | 30447 | AAAUCCGCAAGUAC | 32489 | |
| 548av-5p | GGAUUU | | UUUU | | |
| hsa-miR- | GUGCAAAAGUCA | 30448 | AACCGUGAUGACUU | 32490 | |
| 548aw | UCACGGUU | | UUGCAC | | |
| hsa-miR- | GCUGGUGCAAAA | 30449 | CCGCCAUUACUUUU | 32491 | |
| 548q | GUAAUGGCGG | | GCACCAGC | | |
| hsa-miR- | AAAAGUAAUCAC | 30450 | GGCAAAAACAGUGA | 32492 | |
| 548y | UGUUUUUGCC | | UUACUUUU | | |
| hsa-miR- | AGUGCCUGAGGG | 30451 | CUCUUACUCCCUCA | 32493 | |
| 550a-3-5p | AGUAAGAG | | GGCACU | | |
| hsa-miR- | UGUCUUACUCCCU | 30452 | AUGUGCCUGAGGGA | 32494 | |
| 550a-3p | CAGGCACAU | | GUAAGACA | | |
| hsa-miR- | AGUGCCUGAGGG | 30453 | GGGCUCUUACUCCC | 32495 | |
| 550a-5p | AGUAAGAGCCC | | UCAGGCACU | | |
| hsa-miR- | GCGACCCACUCUU | 30454 | UGGAAACCAAGAGU | 32496 | |
| 55la | GGUUUCCA | | GGGUCGC | | |
| hsa-miR- | UUAGCUUAAGGA | 30455 | GAUCUGGUACUCCU | 32497 | |
| 5579-3p | GUACCAGAUC | | UAAGCUAA | | |
| hsa-miR- | UAUGGUACUCCU | 30456 | GUUAGCUUAAGGAG | 32498 | |
| 5579-5p | UAAGCUAAC | | UACCAUA | | |
| hsa-miR- | UGAGCUGCUGUA | 30457 | AUUUUGGUACAGCA | 32499 | |
| 558 | CCAAAAU | | GCUCA | | |
| hsa-miR- | CACAUAUGAAGU | 30458 | GUGCUGGCUCACUU | 32500 | |
| 5580-3p | GAGCCAGCAC | | CAUAUGUG | | |
| hsa-miR- | UGCUGGCUCAUU | 30459 | ACACAUAUGAAAUG | 32501 | |
| 5580-5p | UCAUAUGUGU | | AGCCAGCA | | |
| hsa-miR- | UUCCAUGCCUCCU | 30460 | GGAACUUCUAGGAG | 32502 | |
| 5581-3p | AGAAGUUCC | | GCAUGGAA | | |
| hsa-miR- | AGCCUUCCAGGAG | 30461 | UCUCCAUUUCUCCU | 32503 | |
| 5581-5p | AAAUGGAGA | | GGAAGGCU | | |
| hsa-miR- | UAAAACUUUAAG | 30462 | CCUAGGCACACUUA | 32504 | |
| 5582-3p | UGUGCCUAGG | | AAGUUUUA | | |
| hsa-miR- | UAGGCACACUUA | 30463 | GCUAUAACUUUAAG | 32505 | |
| 5582-5p | AAGUUAUAGC | | UGUGCCUA | | |
| hsa-miR- | GAAUAUGGGUAU | 30464 | CCAAACUAAUAUAC | 32506 | |
| 5583-3p | AUUAGUUUGG | | CCAUAUUC | | |
| hsa-miR- | AAACUAAUAUAC | 30465 | CAGAAUAUGGGUAU | 32507 | |
| 5583-5p | CCAUAUUCUG | | AUUAGUUU | | |
| hsa-miR- | UAGUUCUUCCCUU | 30466 | AAUUGGGCAAAGGG | 32508 | |
| 5584-3p | UGCCCAAUU | | AAGAACUA | | |
| hsa-miR- | CAGGGAAAUGGG | 30467 | UCUAGUUCUUCCCA | 32509 | |
| 5584-5p | AAGAACUAGA | | UUUCCCUG | | |
| hsa-miR- | CUGAAUAGCUGG | 30468 | ACCUGUAGUCCCAG | 32510 | |
| 5585-3p | GACUACAGGU | | CUAUUCAG | | |
| hsa-miR- | UGAAGUACCAGC | 30469 | CUCUCGAGUAGCUG | 32511 | |
| 5585-5p | UACUCGAGAG | | GUACUUCA | | |
| hsa-miR- | CAGAGUGACAAG | 30470 | CUUUAACCAGCUUG | 32512 | |
| 5586-3p | CUGGUUAAAG | | UCACUCUG | | |
| hsa-miR- | UAUCCAGCUUGU | 30471 | GCAUAUAGUAACAA | 32513 | |
| 5586-5p | UACUAUAUGC | | GCUGGAUA | | |
| hsa-miR- | GCCCCGGGCAGUG | 30472 | GAUGAUCACACUGC | 32514 | |
| 5587-3p | UGAUCAUC | | CCGGGGC | | |
| hsa-miR- | AUGGUCACCUCCG | 30473 | AGUCCCGGAGGUGA | 32515 | |
| 5587-5p | GGACU | | CCAU | | |
| hsa-miR- | AAGUCCCACUAAU | 30474 | GCUGGCAUUAGUGG | 32516 | |
| 5588-3p | GCCAGC | | GACUU | | |
| hsa-miR- | ACUGGCAUUAGU | 30475 | AAAAGUCCCACUAA | 32517 | |
| 5588-5p | GGGACUUUU | | UGCCAGU | | |
| hsa-miR- | UGCACAUGGCAAC | 30476 | UGGGAGCUAGGUUG | 32518 | |
| 5589-3p | CUAGCUCCCA | | CCAUGUGCA | | |
| hsa-miR- | GGCUGGGUGCUC | 30477 | ACUGCACAAGAGCA | 32519 | |
| 5589-5p | UUGUGCAGU | | CCCAGCC | | |
| hsa-miR- | UAAAGUAAAUAU | 30478 | UUUUGGUGCAUAUU | 32520 | |
| 559 | GCACCAAAA | | UACUUUA | | |
| hsa-miR- | AAUAAAGUUCAU | 30479 | UUGCCAUACAUGAA | 32521 | |
| 5590-3p | GUAUGGCAA | | CUUUAUU | | |
| hsa-miR- | UUGCCAUACAUA | 30480 | AAUAAAGUCUAUGU | 32522 | |
| 5590-5p | GACUUUAUU | | AUGGCAA | | |
| hsa-miR- | AUACCCAUAGCUU | 30481 | UGGGAGCUAAGCUA | 32523 | |
| 5591-3p | AGCUCCCA | | UGGGUAU | | |
| hsa-miR- | UGGGAGCUAAGC | 30482 | AUACCCAUAGCUUA | 32524 | |
| 5591-5p | UAUGGGUAU | | GCUCCCA | | |
| hsa-miR- | CAAAGUUUAAGA | 30483 | ACUUCAAGGAUCUU | 32525 | |
| 561-3p | UCCUUGAAGU | | AAACUUUG | | |
| hsa-miR- | AUCAAGGAUCUU | 30484 | GGCAAAGUUUAAGA | 32526 | |
| 561-5p | AAACUUUGCC | | UCCUUGAU | | |
| hsa-miR- | AAAGUAGCUGUA | 30485 | GCAAAUGGUACAGC | 32527 | |
| 562 | CCAUUUGC | | UACUUU | | |
| hsa-miR- | AGGCACGGUGUC | 30486 | GCCUGCUGACACCG | 32528 | |
| 564 | AGCAGGC | | UGCCU | | |
| hsa-miR- | GGGCGCCUGUGA | 30487 | GUUGGGAUCACAGG | 32529 | |
| 566 | UCCCAAC | | CGCCC | | |
| hsa-miR- | AGUAUGUUCUUC | 30488 | GUUCUGUCCUGGAA | 32530 | |
| 567 | CAGGACAGAAC | | GAACAUACU | | |
| hsa-miR- | GAGAAAUGCUGG | 30489 | GCAGAUUAGUCCAG | 32531 | |
| 5680 | ACUAAUCUGC | | CAUUUCUC | | |
| hsa-miR- | AGAAAGGGUGGC | 30490 | AAGAGGUAUUGCCA | 32532 | |
| 5681a | AAUACCUCUU | | CCCUUUCU | | |
| hsa-miR- | AGGUAUUGCCACC | 30491 | ACUAGAAAGGGUGG | 32533 | |
| 5681b | CUUUCUAGU | | CAAUACCU | | |
| hsa-miR- | GUAGCACCUUGCA | 30492 | ACCUUAUCCUGCAA | 32534 | |
| 5682 | GGAUAAGGU | | GGUGCUAC | | |
| hsa-miR- | UACAGAUGCAGA | 30493 | GAAGUCAGAGAAUC | 32535 | |
| 5683 | UUCUCUGACUUC | | UGCAUCUGUA | | |
| hsa-miR- | AACUCUAGCCUGA | 30494 | CUGUUGCUCAGGCU | 32536 | |
| 5684 | GCAACAG | | AGAGUU | | |
| hsa-miR- | ACAGCCCAGCAGU | 30495 | CCCGUGAUAACUGC | 32537 | |
| 5685 | UAUCACGGG | | UGGGCUGU | | |
| hsa-miR- | UAUCGUAUCGUA | 30496 | ACAAUACAAUACGA | 32538 | |
| 5686 | UUGUAUUGU | | UACGAUA | | |
| hsa-miR- | UUAGAACGUUUU | 30497 | AUUUGACCCUAAAA | 32539 | |
| $687 | AGGGUCAAAU | | CGUUCUAA | | |
| hsa-miR- | UAACAAACACCUG | 30498 | GCUGUUUUACAGGU | 32540 | |
| 5688 | UAAAACAGC | | GUUUGUUA | | |
| hsa-miR- | AGCAUACACCUGU | 30499 | UCUAGGACUACAGG | 32541 | |
| 5689 | AGUCCUAGA | | UGUAUGCU | | |
| hsa-miR- | AGUUAAUGAAUC | 30500 | ACUUUCCAGGAUUC | 32542 | |
| 569 | CUGGAAAGU | | AUUAACU | | |
| hsa-miR- | UCAGCUACUACCU | 30501 | CCUAAUAGAGGUAG | 32543 | |
| 5690 | CUAUUAGG | | UAGCUGA | | |
| hsa-miR- | UUGCUCUGAGCUC | 30502 | GCUUUCUCGGAGCU | 32544 | |
| 5691 | CGAGAAAGC | | CAGAGCAA | | |
| hsa-miR- | CAAAUAAUACCAC | 30503 | ACACCCACUGUGGU | 32545 | |
| 5692a | AGUGGGUGU | | AUUAUUUG | | |
| hsa-miR- | AAUAAUAUCACA | 30504 | ACACCUACUGUGAU | 32546 | |
| 5692b | GUAGGUGU | | AUUAUU | | |
| hsa-miR- | AAUAAUAUCACA | 30505 | GUACACCUACUGUG | 32547 | |
| 5692c | GUAGGUGUAC | | AUAUUAUU | | |
| hsa-miR- | GCAGUGGCUCUG | 30506 | GAGUUCAUUUCAGA | 32548 | |
| 5693 | AAAUGAACUC | | GCCACUGC | | |
| hsa-miR- | CAGAUCAUGGGA | 30507 | CUGAGACAGUCCCA | 32549 | |
| 5694 | CUGUCUCAG | | UGAUCUG | | |
| hsa-miR- | ACUCCAAGAAGA | 30508 | CUGUCUAGAUUCUU | 32550 | |
| 5695 | AUCUAGACAG | | CUUGGAGU | | |
| hsa-miR- | CUCAUUUAAGUA | 30509 | GGCAUCAGACUACU | 32551 | |
| 5696 | GUCUGAUGCC | | UAAAUGAG | | |
| hsa-miR- | UCAAGUAGUUUC | 30510 | CCUUUAUCAUGAAA | 32552 | |
| 5697 | AUGAUAAAGG | | CUACUUGA | | |
| hsa-miR- | UGGGGGAGUGCA | 30511 | CCACAAUCACUGCA | 32553 | |
| 5698 | GUGAUUGUGG | | CUCCCCCA | | |
| hsa-miR- | UCCUGUCUUUCCU | 30512 | GCUCCAACAAGGAA | 32554 | |
| 5699 | UGUUGGAGC | | AGACAGGA | | |
| hsa-miR- | UAAUGCAUUAAA | 30513 | CCUUCAAUAAUUUA | 32555 | |
| 5700 | UUAUUGAAGG | | AUGCAUUA | | |
| hsa-miR- | UUAUUGUCACGU | 30514 | AAUCAGAACGUGAC | 32556 | |
| 5701 | UCUGAUU | | AAUAA | | |
| hsa-miR- | UGAGUCAGCAAC | 30515 | CAUGGGAUAUGUUG | 32557 | |
| 5702 | AUAUCCCAUG | | CUGACUCA | | |
| hsa-miR- | AGGAGAAGUCGG | 30516 | ACCUUCCCGACUUC | 32558 | |
| 5703 | GAAGGU | | UCCU | | |
| hsa-miR- | CGAAAACAGCAA | 30517 | GCAAAGGUAAUUGC | 32559 | |
| 570-3p | UUACCUUUGC | | UGUUUUCG | | |
| hsa-miR- | UUAGGCCAUCAUC | 30518 | GCAUAAUGGGAUGA | 32560 | |
| 5704 | CCAUUAUGC | | UGGCCUAA | | |
| hsa-miR- | UGUUUCGGGGCU | 30519 | CACAGGCCAUGAGC | 32561 | |
| 5705 | CAUGGCCUGUG | | CCCGAAACA | | |
| hsa-miR- | AAAGGUAAUUGC | 30520 | GGGAAAAACUGCAA | 32562 | |
| 570-5p | AGUUUUUCCC | | UUACCUUU | | |
| hsa-miR- | UUCUGGAUAACA | 30521 | AGCUUCAGCAUGUU | 32563 | |
| 5706 | UGCUGAAGCU | | AUCCAGAA | | |
| hsa-miR- | ACGUUUGAAUGC | 30522 | GCCUUGUACAGCAU | 32564 | |
| 5707 | UGUACAAGGC | | UCAAACGU | | |
| hsa-miR- | AUGAGCGACUGU | 30523 | GGUCAGGCACAGUC | 32565 | |
| 5708 | GCCUGACC | | GCUCAU | | |
| hsa-miR- | GAGCCAGUUGGA | 30524 | GCUCCUGUCCAACU | 32566 | |
| 575 | CAGGAGC | | GGCUC | | |
| hsa-miR- | UUCAUUUGGUAU | 30525 | AAUCGCGGUUUAUA | 32567 | |
| 579 | AAACCGCGAUU | | CCAAAUGAA | | |
| hsa-miR- | UUGAGAAUGAUG | 30526 | CCUAAUGAUUCAUC | 32568 | |
| 580 | AAUCAUUAGG | | AUUCUCAA | | |
| hsa-miR- | UUACAGUUGUUC | 30527 | AGUAACUGGUUGAA | 32569 | |
| 582-5p | AACCAGUUACU | | CAACUGUAA | | |
| hsa-miR- | CAAAGAGGAAGG | 30528 | GUAAUGGGACCUUC | 32570 | |
| 583 | UCCCAUUAC | | CUCUUUG | | |
| hsa-miR- | UCAGUUCCAGGCC | 30529 | AGCCUGGUUGGCCU | 32571 | |
| 584-3p | AACCAGGCU | | GGAACUGA | | |
| hsa-miR- | UUAUGGUUUGCC | 30530 | CUCAGUCCCAGGCA | 32572 | |
| 584-5p | UGGGACUGAG | | AACCAUAA | | |
| hsa-miR- | UGGGCGUAUCUG | 30531 | UAGCAUACAGAUAC | 32573 | |
| 585 | UAUGCUA | | GCCCA | | |
| hsa-miR- | AGACCAUGGGUU | 30532 | ACAAUGAGAACCCA | 32574 | |
| 591 | CUCAUUGU | | UGGUCU | | |
| hsa-miR- | UUGUGUCAAUAU | 30533 | ACAUCAUCGCAUAU | 32575 | |
| 592 | GCGAUGAUGU | | UGACACAA | | |
| hsa-miR- | UGUCUCUGCUGG | 30534 | AGAAACCCCAGCAG | 32576 | |
| 593-3p | GGUUUCU | | AGACA | | |
| hsa-miR- | AGGCACCAGCCAG | 30535 | GCUGAGCAAUGCCU | 32577 | |
| 593-5p | GCAUUGCUCAGC | | GGCUGGUGCCU | | |
| hsa-miR- | GAAGUGUGCCGU | 30536 | AGACACACCACGGC | 32578 | |
| 595 | GGUGUGUCU | | ACACUUC | | |
| hsa-miR- | AAGCCUGCCCGGC | 30537 | CCCGAGGAGCCGGG | 32579 | |
| 596 | UCCUCGGG | | CAGGCUU | | |
| hsa-miR- | GUUGUGUCAGUU | 30538 | GUUUGAUAAACUGA | 32580 | |
| 599 | UAUCAAAC | | CACAAC | | |
| hsa-miR- | UGGUCUAGGAUU | 30539 | CUCCUCCAACAAUC | 32581 | |
| 601 | GUUGGAGGAG | | CUAGACCA | | |
| hsa-miR- | CACACACUGCAAU | 30540 | GCAAAAGUAAUUGC | 32582 | |
| 603 | UACUUUUGC | | AGUGUGUG | | |
| hsa-miR- | AGGGGUGGUGUU | 30541 | ACGGAGCUGUCCCA | 32583 | |
| 608 | GGGACAGCUCCGU | | ACACCACCCCU | | |
| hsa-miR- | UGAGCUAAAUGU | 30542 | UCCCAGCACACAUU | 32584 | |
| 610 | GUGCUGGGA | | UAGCUCA | | |
| hsa-miR- | GCGAGGACCCCUC | 30543 | GUCAGACCCCGAGG | 32585 | |
| 611 | GGGGUCUGAC | | GGUCCUCGC | | |
| hsa-miR- | GCUGGGCAGGGC | 30544 | AAGGAGCUCAGAAG | 32586 | |
| 612 | UUCUGAGCUCCUU | | CCCUGCCCAGC | | |
| hsa-miR- | GGGAAAAGGAAG | 30545 | UCCUCCCCCUUCCU | 32587 | |
| 6124 | GGGGAGGA | | UUUCCC | | |
| hsa-miR- | GCGGAAGGCGGA | 30546 | UCCGCCGCUCCGCC | 32588 | |
| $125 | GCGGCGGA | | UUCCGC | | |
| hsa-miR- | GUGAAGGCCCGGC | 30547 | UCUCCGCCGGGCCU | 32589 | |
| 6126 | GGAGA | | UCAC | | |
| hsa-miR- | UGAGGGAGUGGG | 30548 | CCUCCCACCCACUC | 32590 | |
| 6127 | UGGGAGG | | CCUCA | | |
| hsa-miR- | ACUGGAAUUGGA | 30549 | UUUUGACUCCAAUU | 32591 | |
| 5128 | GUCAAAA | | CCAGU | | |
| hsa-miR- | UGAGGGAGUUGG | 30550 | UAUACACCCAACUC | 32592 | |
| 6129 | GUGUAUA | | CCUCA | | |
| hsa-miR- | UGAGGGAGUGGA | 30551 | CAUACAAUCCACUC | 32593 | |
| 6130 | UUGUAUG | | CCUCA | | |
| hsa-miR- | GGCUGGUCAGAU | 30552 | CACUCCCAUCUGAC | 32594 | |
| 6131 | GGGAGUG | | CAGCC | | |
| hsa-miR- | AGCAGGGCUGGG | 30553 | UGCAAUCCCCAGCC | 32595 | |
| 6132 | GAUUGCA | | CUGCU | | |
| hsa-miR- | UGAGGGAGGAGG | 30554 | UACCCAACCUCCUC | 32596 | |
| 6133 | UUGGGUA | | CCUCA | | |
| hsa-miR- | UGAGGUGGUAGG | 30555 | UCUACAUCCUACCA | 32597 | |
| 6134 | AUGUAGA | | CCUCA | | |
| hsa-miR- | UCCGAGCCUGGGU | 30556 | AAGAGGGAGACCCA | 32598 | |
| 615-3p | CUCCCUCUU | | GGCUCGGA | | |
| hsa-miR- | GGGGGUCCCCGGU | 30557 | GAUCCGAGCACCGG | 32599 | |
| 615-5p | GCUCGGAUC | | GGACCCCC | | |
| hsa-miR- | AGUCAUUGGAGG | 30558 | CUGCUCAAACCCUC | 32600 | |
| 616-3p | GUUUGAGCAG | | CAAUGACU | | |
| hsa-miR- | CAGCAGGAGGUG | 30559 | CUCCCCUCACCUCC | 32601 | |
| 6165 | AGGGGAG | | UGCUG | | |
| hsa-miR- | ACUCAAAACCCUU | 30560 | AAGUCACUGAAGGG | 32602 | |
| 616-5p | CAGUGACUU | | UUUUGAGU | | |
| hsa-miR- | AGACUUCCCAUUU | 30561 | GCCACCUUCAAAUG | 32603 | |
| 617 | GAAGGUGGC | | GGAAGUCU | | |
| hsa-miR- | AAACUCUACUUG | 30562 | ACUCAGAAGGACAA | 32604 | |
| 618 | UCCUUCUGAGU | | GUAGAGUUU | | |
| hsa-miR- | GGCUAGCAACAGC | 30563 | AGGUAAGCGCUGUU | 32605 | |
| 621 | GCUUACCU | | GCUAGCC | | |
| hsa-miR- | ACAGUCUGCUGA | 30564 | GCUCCAACCUCAGC | 32606 | |
| 622 | GGUUGGAGC | | AGACUGU | | |
| hsa-miR- | AUCCCUUGCAGGG | 30565 | ACCCAACAGCCCCU | 32607 | |
| 623 | GCUGUUGGGU | | GCAAGGGAU | | |
| hsa-miR- | GUGAGUCUCUAA | 30566 | UCCUCUUUUCUUAG | 32608 | |
| 627 | GAAAAGAGGA | | AGACUCAC | | |
| hsa-miR- | UCUAGUAAGAGU | 30567 | UCGACUGCCACUCU | 32609 | |
| 628-3p | GGCAGUCGA | | UACUAGA | | |
| hsa-miR- | AUGCUGACAUAU | 30568 | CCUCUAGUAAAUAU | 32610 | |
| 628-5p | UUACUAGAGG | | GUCAGCAU | | |
| hsa-miR- | GUUCUCCCAACGU | 30569 | GCUGGGCUUACGUU | 32611 | |
| 629-3p | AAGCCCAGC | | GGGAGAAC | | |
| hsa-miR- | UGGGUUUACGUU | 30570 | AGUUCUCCCAACGU | 32612 | |
| 629-5p | GGGAGAACU | | AAACCCA | | |
| hsa-miR- | GUGUCUGCUUCCU | 30571 | UCCCACAGGAAGCA | 32613 | |
| 632 | GUGGGA | | GACAC | | |
| hsa-miR- | CUAAUAGUAUCU | 30572 | UUUAUUGUGGUAGA | 32614 | |
| 633 | ACCACAAUAAA | | UACUAUUAG | | |
| hsa-miR- | UGUGCUUGCUCG | 30573 | UGCGGGCGGGACGA | 32615 | |
| 636 | UCCCGCCCGCA | | GCAAGCACA | | |
| hsa-miR- | AGGGAUCGCGGG | 30574 | AGGCCGCCACCCGC | 32616 | |
| 638 | CGGGUGGCGGCCU | | CCGCGAUCCCU | | |
| hsa-miR- | AUGAUCCAGGAA | 30575 | AGAGGCAGGUUCCU | 32617 | |
| 640 | CCUGCCUCU | | GGAUCAU | | |
| hsa-miR- | AGUGUGGCUUUC | 30576 | GCUCUAAGAAAGCC | 32618 | |
| 644a | UUAGAGC | | ACACU | | |
| hsa-miR- | UCUAGGCUGGUA | 30577 | UCAGCAGUACCAGC | 32619 | |
| 645 | CUGCUGA | | CUAGA | | |
| hsa-miR- | AAGCAGCUGCCUC | 30578 | GCCUCAGAGGCAGC | 32620 | |
| 646 | UGAGGC | | UGCUU | | |
| hsa-miR- | GUGGCUGCACUCA | 30579 | GAAGGAAGUGAGUG | 32621 | |
| 647 | CUUCCUUC | | CAGCCAC | | |
| hsa-miR- | AGGAGGCAGCGC | 30580 | GUCCUGAGAGCGCU | 32622 | |
| 650 | UCUCAGGAC | | GCCUCCU | | |
| hsa-miR- | AAUGGCGCCACUA | 30581 | CACAACCCUAGUGG | 32623 | |
| 652-3p | GGGUUGUG | | CGCCAUU | | |
| hsa-miR- | CAACCCUAGGAGA | 30582 | UGAAUGGCACCCUC | 32624 | |
| 652-5p | GGGUGCCAUUCA | | UCCUAGGGUUG | | |
| hsa-miR- | AUAAUACAUGGU | 30583 | AAAGAGGUUAACCA | 32625 | |
| 655 | UAACCUCUUU | | UGUAUUAU | | |
| hsa-miR- | AAUAUUAUACAG | 30584 | AGAGGUUGACUGUA | 32626 | |
| 656 | UCAACCUCU | | UAAUAUU | | |
| hsa-miR- | GGCGGAGGGAAG | 30585 | ACCAACGGACCUAC | 32627 | |
| 658 | UAGGUCCGUUGG | | UUCCCUCCGCC | | |
| | U | | | | |
| hsa-miR- | UGCCUGGGUCUCU | 30586 | ACGCGCAGGCCAGA | 32628 | |
| 661 | GGCCUGCGCGU | | GACCCAGGCA | | |
| hsa-miR- | AGGCGGGGCGCCG | 30587 | GCGGUCCCGCGGCG | 32629 | |
| 663a | CGGGACCGC | | CCCCGCCU | | |
| hsa-miR- | GGUGGCCCGGCCG | 30588 | CCUCAGGCACGGCC | 32630 | |
| 663b | UGCCUGAGG | | GGGCCACC | | |
| hsa-miR- | ACCAGGAGGCUG | 30589 | AGGGGCCUCAGCCU | 32631 | |
| 665 | AGGCCCCU | | CCUGGU | | |
| hsa-miR- | GUCCCUGAGUGU | 30590 | CACCACAUACACUC | 32632 | |
| 670 | AUGUGGUG | | AGGGAC | | |
| hsa-miR- | UCCGGUUCUCAGG | 30591 | GGUGGAGCCCUGAG | 32633 | |
| 671-3p | GCUCCACC | | AACCGGA | | |
| hsa-miR- | AGGAAGCCCUGG | 30592 | CUCCAGCCCCUCCA | 32634 | |
| 671-5p | AGGGGCUGGAG | | GGGCUUCCU | | |
| hsa-miR- | CUGUAUGCCCUCA | 30593 | UGAGCGGUGAGGGC | 32635 | |
| 675-3p | CCGCUCA | | AUACAG | | |
| hsa-miR- | UGGUGCGGAGAG | 30594 | CACUGUGGGCCCUC | 32636 | |
| 675-5p | GGCCCACAGUG | | UCCGCACCA | | |
| hsa-miR- | CAACUAGACUGU | 30595 | CUAGAAGCUCACAG | 32637 | |
| 708-3p | GAGCUUCUAG | | UCUAGUUG | | |
| hsa-miR- | AAGGAGCUUACA | 30596 | CCCAGCUAGAUUGU | 32638 | |
| 708-5p | AUCUAGCUGGG | | AAGCUCCUU | | |
| hsa-miR- | GGGACCCAGGGA | 30597 | CUUACGUCUCUCCC | 32639 | |
| 711 | GAGACGUAAG | | UGGGUCCC | | |
| hsa-miR- | GCAGAGUGCAAA | 30598 | GUCAAAAUUGUUUG | 32640 | |
| 759 | CAAUUUUGAC | | CACUCUGC | | |
| hsa-miR- | CGGCUCUGGGUCU | 30599 | UCCCCACAGACCCA | 32641 | |
| 760 | GUGGGGA | | GAGCCG | | |
| hsa-miR- | GCAGCAGGGUGA | 30600 | UGUGUCAGUUUCAC | 32642 | |
| 761 | AACUGACACA | | CCUGCUGC | | |
| hsa-miR- | UGGAGGAGAAGG | 30601 | CAUCACCUUCCUUC | 32643 | |
| 765 | AAGGUGAUG | | UCCUCCA | | |
| hsa-miR- | UCUGCUCAUACCC | 30602 | AGAAACCAUGGGGU | 32644 | |
| 767-3p | CAUGGUUUCU | | AUGAGCAGA | | |
| hsa-miR- | UGCACCAUGGUU | 30603 | CAUGCUCAGACAAC | 32645 | |
| 767-5p | GUCUGAGCAUG | | CAUGGUGCA | | |
| hsa-miR- | CUGGGAUCUCCGG | 30604 | AACCAAGACCCCGG | 32646 | |
| 769-3p | GGUCUUGGUU | | AGAUCCCAG | | |
| hsa-miR- | UGAGACCUCUGG | 30605 | AGCUCAGAACCCAG | 32647 | |
| 769-5p | GUUCUGAGCU | | AGGUCUCA | | |
| hsa-miR- | UCCAGUACCACGU | 30606 | UGGCCCUGACACGU | 32648 | |
| 770-5p | GUCAGGGCCA | | GGUACUGGA | | |
| hsa-miR- | GGAGACUGAUGA | 30607 | UCCCGGGAACUCAU | 32649 | |
| 873-3p | GUUCCCGGGA | | CAGUCUCC | | |
| hsa-miR- | GCAGGAACUUGU | 30608 | AGGAGACUCACAAG | 32650 | |
| 873-5p | GAGUCUCCU | | UUCCUGC | | |
| hsa-miR- | CUGCCCUGGCCCG | 30609 | UCGGUCCCUCGGGC | 32651 | |
| 874 | AGGGACCGA | | CAGGGCAG | | |
| hsa-miR- | CCUGGAAACACUG | 30610 | CACAACCUCAGUGU | 32652 | |
| 875-3p | AGGUUGUG | | UUCCAGG | | |
| hsa-miR- | UAUACCUCAGUU | 30611 | CACCUGAUAAAACU | 32653 | |
| 875-5p | UUAUCAGGUG | | GAGGUAUA | | |
| hsa-miR- | UGGUGGUUUACA | 30612 | UGAAUUACUUUGUA | 32654 | |
| 876-3p | AAGUAAUUCA | | AACCACCA | | |
| hsa-miR- | UGGAUUUCUUUG | 30613 | UGGUGAUUCACAAA | 32655 | |
| 876-5p | UGAAUCACCA | | GAAAUCCA | | |
| hsa-miR- | UCCUCUUCUCCCU | 30614 | CUGGGAGGAGGGAG | 32656 | |
| 877-3p | CCUCCCAG | | AAGAGGA | | |
| hsa-miR- | GUAGAGGAGAUG | 30615 | CCCUGCGCCAUCUC | 32657 | |
| 877-5p | GCGCAGGG | | CUCUAC | | |
| hsa-miR- | GUGAACGGGCGCC | 30616 | CCUCGGGAUGGCGC | 32658 | |
| 887 | AUCCCGAGG | | CCGUUCAC | | |
| hsa-miR- | GACUGACACCUCU | 30617 | UUCACCCAAAGAGG | 32659 | |
| 888-3p | UUGGGUGAA | | UGUCAGUC | | |
| hsa-miR- | UACUCAAAAAGC | 30618 | UGACUGACAGCUUU | 32660 | |
| 888-5p | UGUCAGUCA | | UUGAGUA | | |
| hsa-miR- | UUAAUAUCGGAC | 30619 | ACAAUGGUUGUCCG | 32661 | |
| 889 | AACCAUUGU | | AUAUUAA | | |
| hsa-miR- | AUCCGOGCUCUGA | 30620 | GGCAGAGAGUCAGA | 32662 | |
| 937-3p | CUCUCUGCC | | GCGCGGAU | | |
| hsa-miR- | GUGAGUCAGGGU | 30621 | CCAGCCCCACCCUG | 32663 | |
| 937-5p | GGGGCUGG | | ACUCAC | | |
| hsa-miR- | UGCCCUUAAAGG | 30622 | ACUGGGUUCACCUU | 32664 | |
| 938 | UGAACCCAGU | | UAAGGGCA | | |
| hsa-miR- | UCUUCUCUGUUU | 30623 | CACAUGGCCAAAAC | 32665 | |
| 942 | UGGCCAUGUG | | AGAGAAGA | | |
| hsa-miR- | AAAUUAUUGUAC | 30624 | CUCAUCCGAUGUAC | 32666 | |
| 944 | AUCGGAUGAG | | AAUAAUUU | | |
| hsa-miR-95 | UUCAACGGGUAU | 30625 | UGCUCAAUAAAUAC | 32667 | |
| | UUAUUGAGCA | | CCGUUGAA | | |
| hsa-miR- | CUAUACAACUUAC | 30626 | GGGAAAGUAGUAAG | 32668 | |
| 98-3p | UACUUUCCC | | UUGUAUAG | | |
| hsa-miR- | UGAGGUAGUAAG | 30627 | AACAAUACAACUUA | 32669 | |
| 98-5p | UUGUAUUGUU | | CUACCUCA | | |

### II. Formulation and Delivery

### Pharmaceutical Compositions

[0607] According to the present disclosure the viral particles may be prepared as pharmaceutical compositions. It will be understood that such compositions necessarily comprise one or more active ingredients and, most often, a pharmaceutically acceptable excipient.

[0608] Relative amounts of the active ingredient (e.g. viral particle), a pharmaceutically acceptable excipient, and/or any additional ingredients in a pharmaceutical composition in accordance with the present disclosure may vary, depending upon the identity, size, and/or condition of the subject being treated and further depending upon the route by which the composition is to be administered. For example, the composition may comprise between 0.1% and 99% (w/w) of the active ingredient. By way of example, the composition may comprise between 0.1% and 100%, e.g., between 0.5 and 50%, between 1-30%, between 5-80%, at least 80% (w/w) active ingredient.

[0609] In some embodiments, the viral particle pharmaceutical compositions described herein may comprise at least one payload. As a non-limiting example, the pharmaceutical compositions may contain a viral particle with 1, 2, 3, 4 or 5 payloads. In some embodiments, the pharmaceutical composition may contain a nucleic acid encoding a payload construct encoding proteins selected from antibodies and/or antibody-based compositions.

[0610] Although the descriptions of pharmaceutical compositions provided herein are principally directed to pharmaceutical compositions which are suitable for administration to humans, it will be understood by the skilled artisan that such compositions are generally suitable for administration to any other animal, e.g., to non-human animals, e.g. non-human mammals. Modification of pharmaceutical compositions suitable for administration to humans in order to render the compositions suitable for administration to various animals is well understood, and the ordinarily skilled veterinary pharmacologist can design and/or perform such modification with merely ordinary, if any, experimentation. Subjects to which administration of the pharmaceutical compositions is contemplated include, but are not limited to, humans and/or other primates; mammals, including commercially relevant mammals such as cattle, pigs, horses, sheep, cats, dogs, mice, rats, birds, including commercially relevant birds such as poultry, chickens, ducks, geese, and/or turkeys.

[0611] In some embodiments, compositions are administered to humans, human patients, or subjects.

### Formulations

[0612] The viral particles of the disclosure can be formulated using one or more excipients to: (1) increase stability; (2) increase cell transfection or transduction; (3) permit the sustained or delayed expression of the payload; (4) alter the biodistribution (e.g., target the viral particle to specific tissues or cell types); (5) increase the translation of encoded protein; (6) alter the release profile of encoded protein; and/or (7) allow for regulatable expression of the payload.

[0613] Formulations of the present disclosure can include, without limitation, saline, liposomes, lipid nanoparticles, polymers, peptides, proteins, cells transfected with viral vectors (e.g., for transfer or transplantation into a subject) and combinations thereof.

[0614] Formulations of the pharmaceutical compositions described herein may be prepared by any method known or hereafter developed in the art of pharmacology. As used herein the term “pharmaceutical composition” refers to compositions comprising at least one active ingredient and optionally one or more pharmaceutically acceptable excipients.

[0615] In general, such preparatory methods include the step of associating the active ingredient with an excipient and/or one or more other accessory ingredients. As used herein, the phrase “active ingredient” generally refers either to a viral particle carrying a payload region encoding the polypeptides of the disclosure or to the antibody or antibody-based composition encoded by a viral genome of by a viral particle as described herein.

[0616] Formulations of the viral particles and pharmaceutical compositions described herein may be prepared by any method known or hereafter developed in the art of pharmacology. In general, such preparatory methods include the step of bringing the active ingredient into association with an excipient and/or one or more other accessory ingredients, and then, if necessary and/or desirable, dividing, shaping and/or packaging the product into a desired single- or multi-dose unit.

[0617] A pharmaceutical composition in accordance with the present disclosure may be prepared, packaged, and/or sold in bulk, as a single unit dose, and/or as a plurality of single unit doses. As used herein, a “unit dose” refers to a discrete amount of the pharmaceutical composition comprising a predetermined amount of the active ingredient. The amount of the active ingredient is generally equal to the dosage of the active ingredient which would be administered to a subject and/or a convenient fraction of such a dosage such as, for example, one-half or one-third of such a dosage.

[0618] In some embodiments, the viral particles of the disclosure may be formulated in PBS with 0.001% of Pluronic acid (F-68) at a pH of about 7.0.

[0619] Relative amounts of the active ingredient (e.g. viral particle), the pharmaceutically acceptable excipient, and/or any additional ingredients in a pharmaceutical composition in accordance with the present disclosure may vary, depending upon the identity, size, and/or condition of the subject being treated and further depending upon the route by which the composition is to be administered. For example, the composition may comprise between 0.1% and 99% (w/w) of the active ingredient. By way of example, the composition may comprise between 0.1% and 100%, e.g., between 0.5 and 50%, between 1-30%, between 5-80%, or at least 80% (w/w) active ingredient.

[0620] In some embodiments, the AAV formulations described herein may contain sufficient viral particles for expression of at least one expressed functional antibody or antibody-based composition. As a non-limiting example, the viral particles may contain viral genomes encoding 1, 2, 3, 4, or 5 functional antibodies.

[0621] According to the present disclosure viral particles may be formulated for CNS delivery. Agents that cross the brain blood barrier may be used. For example, some cell penetrating peptides that can target molecules to the brain blood barrier endothelium may be used for formulation (e.g., Mathupala, Expert Opin Ther Pat., 2009, 19, 137-140: the content of which is incorporated herein by reference in its entirety).

### Excipients and Diluents

[0622] The viral particles of the disclosure can be formulated using one or more excipients or diluents to (1) increase stability; (2) increase cell transfection or transduction; (3) permit the sustained or delayed release; (4) alter the biodistribution (e.g., target the viral particle to specific tissues or cell types); (5) increase the translation of encoded protein in vivo; (6) alter the release profile of encoded protein in vivo; and; or (7) allow for regulatable expression of the polypeptides of the disclosure.

[0623] In some embodiments, a pharmaceutically acceptable excipient may be at least 95%, at least 96%, at least 97%, at least 98%, at least 99%, or 100% pure. In some embodiments, an excipient is approved for use for humans and for veterinary use. In some embodiments, an excipient may be approved by United States Food and Drug Administration. In some embodiments, an excipient may be of pharmaceutical grade. In some embodiments, an excipient may meet the standards of the United States Pharmacopoeia (USP), the European Pharmacopoeia (EP), the British Pharmacopoeia, and/or the International Pharmacopoeia.

[0624] Excipients, as used herein, include, but are not limited to, any and all solvents, dispersion media, diluents, or other liquid vehicles, dispersion or suspension aids, surface active agents, isotonic agents, thickening or emulsifying agents, preservatives, and the like, as suited to the particular dosage form desired. Various excipients for formulating pharmaceutical compositions and techniques for preparing the composition are known in the art (see Remington: The Science and Practice of Pharmacy, 21st Edition, A. R. Gennaro, Lippincott, Williams & Wilkins, Baltimore, M D, 2006; incorporated herein by reference in its entirety). The use of a conventional excipient medium may be contemplated within the scope of the present disclosure, except insofar as any conventional excipient medium may be incompatible with a substance or its derivatives, such as by producing any undesirable biological effect or otherwise interacting in a deleterious manner with any other component(s) of the pharmaceutical composition.

[0625] Exemplary diluents include, but are not limited to, calcium carbonate, sodium carbonate, calcium phosphate, dicalcium phosphate, calcium sulfate, calcium hydrogen phosphate, sodium phosphate lactose, sucrose, cellulose, microcrystalline cellulose, kaolin, mannitol, sorbitol, inositol, sodium chloride, dry starch, cornstarch, powdered sugar, etc., and/or combinations thereof.

### Inactive Ingredients

[0626] In some embodiments, viral particle formulations may comprise at least one inactive ingredient. As used herein, the term “inactive ingredient” refers to one or more agents that do not contribute to the activity of the active ingredient of the pharmaceutical composition included in formulations. In some embodiments, all, none or some of the inactive ingredients which may be used in the formulations of the present disclosure may be approved by the US Food and Drug Administration (FDA).

[0627] In some embodiments, the viral particle pharmaceutical compositions comprise at least one inactive ingredient such as, but not limited to, 1,2,6-Hexanetriol; 1,2-Dimyristoyl-Sn-Glycero-3-(Phospho-S-(1-Glycerol)); 1,2-Dimyristoyl-Sn-Glycero-3-Phosphocholine; 1,2-Dioleoyl-Sn-Glycero-3-Phosphocholine; 1,2-Dipalmitoyl-Sn-Glycero-3-(Phospho-Rac-(1-Glycerol)); 1,2-Distearoyl-Sn-Glycero-3-(Phospho-Rac-(1-Glycerol)); 1,2-Distearoyl-Sn-Glycero-3-Phosphocholine; 1-O-Tolylbiguanide; 2-Ethyl-1,6-Hexanediol; Acetic Acid; Acetic Acid, Glacial; Acetic Anhydride; Acetone; Acetone Sodium Bisulfate; Acetylated Lanolin Alcohols; Acetylated Monoglycerides; Acetylcysteine; Acetyltryptophan, DL-; Acrylates Copolymer; Acrylic Acid-Isooctyl Acrylate Copolymer; Acrylic Adhesive 788; Activated Charcoal; Adcote 72A103; Adhesive Tape; Adipic Acid; Aerotex Resin 3730; Alanine; Albumin Aggregated; Albumin Colloidal; Albumin Human; Alcohol; Alcohol, Dehydrated; Alcohol, Denatured; Alcohol, Diluted; Alfadex; Alginic Acid; Alkyl Ammonium Sulfonic Acid Betaine; Alkyl Aryl Sodium Sulfonate; Allantoin; Allyl .Alpha.-Ionone; Almond Oil; Alpha-Terpineol; Alpha-Tocopherol; Alpha-Tocopherol Acetate, D1-; Alpha-Tocopherol, D1-; Aluminum Acetate; Aluminum Chlorhydroxy Allantoinate; Aluminum Hydroxide; Aluminum Hydroxide-Sucrose, Hydrated; Aluminum Hydroxide Gel; Aluminum Hydroxide Gel F 500; Aluminum Hydroxide Gel F 5000; Aluminum Monostearate; Aluminum Oxide; Aluminum Polyester; Aluminum Silicate; Aluminum Starch Octenylsuccinate; Aluminum Stearate; Aluminum Subacetate; Aluminum Sulfate Anhydrous; Amerchol C; Amerchol-Cab; Aminomethylpropanol; Ammonia; Ammonia Solution; Ammonia Solution, Strong; Ammonium Acetate; Ammonium Hydroxide; Ammonium Lauryl Sulfate; Ammonium Nonoxynol-4 Sulfate; Ammonium Salt Of C-12-C-15 Linear Primary Alcohol Ethoxylate; Ammonium Sulfate; Ammonyx; Amphoteric-2; Amphoteric-9; Anethole; Anhydrous Citric Acid; Anhydrous Dextrose; Anhydrous Lactose; Anhydrous Trisodium Citrate; Aniseed Oil; Anoxid Sbn; Antifoam; Antipyrine; Apaflurane; Apricot Kernel Oil Peg-6 Esters; Aquaphor; Arginine; Arlacel; Ascorbic Acid; Ascorbyl Palmitate; Aspartic Acid; Balsam Peru; Barium Sulfate; Beeswax; Beeswax, Synthetic; Beheneth-10; Bentonite; Benzalkonium Chloride; Benzenesulfonic Acid; Benzethonium Chloride; Benzododecinium Bromide; Benzoic Acid; Benzyl Alcohol; Benzyl Benzoate; Benzyl Chloride; Betadex; Bibapcitide; Bismuth Subgallate; Boric Acid; Brocrinat; Butane; Butyl Alcohol; Butyl Ester Of Vinyl Methyl Ether/Maleic Anhydride Copolymer (125000 Mw); Butyl Stearate; Butylated Hydroxyanisole; Butylated Hydroxytoluene; Butylene Glycol; Butylparaben; Butyric Acid; C20-40 Paneth-24; Caffeine; Calcium; Calcium Carbonate; Calcium Chloride; Calcium Gluceptate; Calcium Hydroxide; Calcium Lactate; Calcobutrol; Caldiamide Sodium; Caloxetate Trisodium; Calteridol Calcium; Canada Balsam; Caprylic/Capric Triglyceride; Caprylic/Capric/Stearic Triglyceride; Captan; Captisol; Caramel; Carbomer 1342; Carbomer 1382; Carbomer 934; Carbomer 934p; Carbomer 940; Carbomer 941; Carbomer 980; Carbomer 981; Carbomer Homopolymer Type B (Allyl Pentaerythritol Crosslinked); Carbomer Homopolymer Type C (Allyl Pentaerythritol Crosslinked); Carbon Dioxide; Carboxy Vinyl Copolymer; Carboxymethylcellulose; Carboxymethylcellulose Sodium; Carboxypolymethylene; Carrageenan; Carrageenan Salt; Castor Oil; Cedar Leaf Oil; Cellulose; Cellulose, Microcrystalline; Cerasynt-Se; Ceresin; Ceteareth-12; Ceteareth-15; Ceteareth-30; Cetearyl Alcohol/Ceteareth-20; Cetearyl Ethylhexanoate; Ceteth-10; Ceteth-2; Ceteth-20; Ceteth-23; Cetostearyl Alcohol; Cetrimonium Chloride; Cetyl Alcohol; Cetyl Esters Wax; Cetyl Palmitate; Cetylpyridinium Chloride; Chlorobutanol; Chlorobutanol Hemihydrate; Chlorobutanol, Anhydrous; Chlorocresol; Chloroxylenol; Cholesterol; Choleth; Choleth-24; Citrate; Citric Acid; Citric Acid Monohydrate; Citric Acid, Hydrous; Cocamide Ether Sulfate; Cocamine Oxide; Coco Betaine; Coco Diethanolamide; Coco Monoethanolamide; Cocoa Butter; Coco-Glycerides; Coconut Oil; Coconut Oil, Hydrogenated; Coconut Oil/Palm Kernel Oil Glycerides, Hydrogenated; Cocoyl Caprylocaprate; Cola Nitida Seed Extract; Collagen; Coloring Suspension; Corn Oil; Cottonseed Oil; Cream Base; Creatine; Creatinine; Cresol; Croscarmellose Sodium; Crospovidone; Cupric Sulfate; Cupric Sulfate Anhydrous; Cyclomethicone; Cyclomethicone/Dimethicone Copolyol; Cysteine; Cysteine Hydrochloride; Cysteine Hydrochloride Anhydrous; Cysteine, D1-; D&C Red No. 28; D&C Red No. 33; D&C Red No. 36; D&C Red No. 39; D&C Yellow No. 10; Dalfampridine; Daubert 1-5 Pestr (Matte) 164z; Decyl Methyl Sulfoxide; Dehydag Wax Sx; Dehydroacetic Acid; Dehymuls E; Denatonium Benzoate; Deoxycholic Acid; Dextran; Dextran 40; Dextrin; Dextrose; Dextrose Monohydrate; Dextrose Solution; Diatrizoic Acid; Diazolidinyl Urea; Dichlorobenzyl Alcohol; Dichlorodifluoromethane; Dichlorotetrafluoroethane; Diethanolamine; Diethyl Pyrocarbonate; Diethyl Sebacate; Diethylene Glycol Monoethyl Ether; Diethylhexyl Phthalate; Dihydroxyaluminum Aminoacetate; Diisopropanolamine; Diisopropyl Adipate; Diisopropyl Dilinoleate; Dimethicone 350; Dimethicone Copolyol; Dimethicone Mdx4-4210; Dimethicone Medical Fluid 360; Dimethyl Isosorbide; Dimethyl Sulfoxide; Dimethylaminoethyl Methacrylate-Butyl Methacrylate-Methyl Methacrylate Copolymer; Dimethyldioctadecylammonium Bentonite; Dimethylsiloxane/Methylvinylsiloxane Copolymer; Dinoseb Ammonium Salt; Dipalmitoylphosphatidylglycerol, D1-; Dipropylene Glycol; Disodium Cocoamphodiacetate; Disodium Laureth Sulfosuccinate; Disodium Lauryl Sulfosuccinate; Disodium Sulfosalicylate; Disofenin; Divinylbenzene Styrene Copolymer; Dmdm Hydantoin; Docosanol; Docusate Sodium; Duro-Tak 280-2516; Duro-Tak 387-2516; Duro-Tak 80-1196; Duro-Tak 87-2070; Duro-Tak 87-2194; Duro-Tak 87-2287; Duro-Tak 87-2296; Duro-Tak 87-2888; Duro-Tak 87-2979; Edetate Calcium Disodium; Edetate Disodium; Edetate Disodium Anhydrous; Edetate Sodium; Edetic Acid; Egg Phospholipids; Entsufon; Entsufon Sodium; Epilactose; Epitetracycline Hydrochloride; Essence Bouquet 9200; Ethanolamine Hydrochloride; Ethyl Acetate; Ethyl Oleate; Ethylcelluloses; Ethylene Glycol; Ethylene Vinyl Acetate Copolymer; Ethylenediamine; Ethylenediamine Dihydrochloride; Ethylene-Propylene Copolymer; Ethylene-Vinyl Acetate Copolymer (28% Vinyl Acetate); Ethylene-Vinyl Acetate Copolymer (9% Vinylacetate); Ethylhexyl Hydroxystearate; Ethylparaben; Eucalyptol; Exametazime; Fat, Edible; Fat, Hard; Fatty Acid Esters; Fatty Acid Pentaerythriol Ester; Fatty Acids; Fatty Alcohol Citrate; Fatty Alcohols; Fd&C Blue No. I; Fd&C Green No. 3; Fd&C Red No. 4; Fd&C Red No. 40; Fd&C Yellow No. 10 (Delisted); Fd&C Yellow No. 5; Fd&C Yellow No. 6; Ferric Chloride; Ferric Oxide; Flavor 89-186; Flavor 89-259; Flavor Df-119; Flavor Df-1530; Flavor Enhancer; Flavor Fig 827118; Flavor Raspberry Pfc-8407; Flavor Rhodia Pharmaceutical No. Rf 451; Fluorochlorohydrocarbons; Formaldehyde; Formaldehyde Solution; Fractionated Coconut Oil; Fragrance 3949-5; Fragrance 520a; Fragrance 6.007; Fragrance 91-122; Fragrance 9128-Y; Fragrance 93498g; Fragrance Balsam Pine No, 5124; Fragrance Bouquet 10328; Fragrance Chemoderm 6401-B; Fragrance Chemoderm 6411; Fragrance Cream No. 73457; Fragrance Cs-28197; Fragrance Felton 066m; Fragrance Firmenich 47373; Fragrance Givaudan Ess 9090/1c; Fragrance 11-6540; Fragrance Herbal 10396; Fragrance Nj-1085; Fragrance P O F1-147; Fragrance Pa 52805; Fragrance Pera Derm D; Fragrance Rbd-9819; Fragrance Shaw Mudge U-7776; Fragrance Tf 044078; Fragrance Lingerer Honeysuckle K 2771; Fragrance lingerer N5195; Fructose; Gadolinium Oxide; Galactose; Gamma Cyclodextrin; Gelatin; Gelatin, Crosslinked; Gelfoam Sponge; Gellan Gum (Low Acyl); Gelva 737; Gentisic Acid; Gentisic Acid Ethanolamide; Gluceptate Sodium; Gluceptate Sodium Dihydrate; Gluconolactone; Glucuronic Acid; Glutamic Acid, D1-; Glutathione; Glycerin; Glycerol Ester Of Hydrogenated Rosin; Glyceryl Citrate; Glyceryl Isostearate; Glyceryl Laurate; Glyceryl Monostearate; Glyceryl Oleate; Glyceryl Oleate/Propylene Glycol; Glyceryl Palmitate; Glyceryl Ricinoleate; Glyceryl Stearate; Glyceryl Stearate Laureth-23; Glyceryl Stearate/Peg Stearate; Glyceryl Stearate/Peg-100 Stearate; Glyceryl Stearate/Peg-40 Stearate; Glyceryl Stearate-Stearamidoethyl Diethylamine; Glyceryl Trioleate; Glycine; Glycine Hydrochloride; Glycol Distearate; Glycol Stearate; Guanidine Hydrochloride; Guar Gum; Hair Conditioner (18n195-1m); Heptane; Hetastarch; Hexylene Glycol; High Density Polyethylene; Histidine; Human Albumin Microspheres; Hyaluronate Sodium; Hydrocarbon; Hydrocarbon Gel, Plasticized; Hydrochloric Acid; Hydrochloric Acid, Diluted; Hydrocortisone; Hydrogel Polymer; Hydrogen Peroxide; Hydrogenated Castor Oil; Hydrogenated Palm Oil; Hydrogenated Palm/Palm Kernel Oil Peg-6 Esters; Hydrogenated Polybutene 635-690; Hydroxide Ion; Hydroxyethyl Cellulose; Hydroxyethylpiperazine Ethane Sulfonic Acid; Hydroxymethyl Cellulose; Hydroxyoctacosanyl Hydroxystearate; Hydroxypropyl Cellulose; Hydroxypropyl Methylcellulose 2906; Hydroxypropyl-Beta-cyclodextrin; Hypromellose 2208 (15000 Mpa·S); Hypromellose 2910 (15000 Mpa·S); Hypromelloses; Imidurea; Iodine; Iodoxamic Acid; Iofetamine Hydrochloride; Irish Moss Extract; Isobutane; Isoceteth-20; Isoleucine; Isooctyl Acrylate; Isopropyl Alcohol; Isopropyl Isostearate; Isopropyl Myristate; Isopropyl Myristate m Myristyl Alcohol; Isopropyl Palmitate; Isopropyl Stearate; Isostearic Acid; Isostearyl Alcohol; Isotonic Sodium Chloride Solution; Jelene; Kaolin; Kathon Cg; Kathon Cg E; Lactate; Lactic Acid; Lactic Acid, D1-; Lactic Acid, L-; Lactobionic Acid; Lactose; Lactose Monohydrate; Lactose, Hydrous; Laneth; Lanolin; Lanolin Alcohol-Mineral Oil; Lanolin Alcohols; Lanolin Anhydrous; Lanolin Cholesterols; Lanolin Nonionic Derivatives; Lanolin, Ethoxylated; Lanolin, Hydrogenated; Lauralkonium Chloride; Lauramine Oxide; Laurdimonium Hydrolyzed Animal Collagen; Laureth Sulfate; Laureth-2; Laureth-23; Laureth-4; Laurie Diethanolamide; Laurie Myristic Diethanolamide; Lauroyl Sarcosine; Lauryl Lactate; Lauryl Sulfate; Lavandula Angustifolia Flowering Top; Lecithin; Lecithin Unbleached; Lecithin, Egg; Lecithin, Hydrogenated; Lecithin, Hydrogenated Soy; Lecithin, Soybean; Lemon Oil; Leucine; Levulinic Acid; Lidofenin; Light Mineral Oil; Light Mineral Oil (85 Ssu); Limonene, (+/−)-; Lipocol Se-15; Lysine; Lysine Acetate; Lysine Monohydrate; Magnesium Aluminum Silicate; Magnesium Aluminum Silicate Hydrate; Magnesium Chloride; Magnesium Nitrate; Magnesium Stearate; Maleic Acid; Mannitol; Maprofix; Mebrofenin; Medical Adhesive Modified S-15; Medical Antiform A-F Emulsion; Medronate Disodium; Medronic Acid; Meglumine; Menthol; Metacresol; Metaphosphoric Acid; Methanesulfonic Acid; Methionine; Methyl Alcohol; Methyl Gluceth-10; Methyl Gluceth-20; Methyl Gluceth-20 Sesquistearate; Methyl Glucose Sesquistearate; Methyl Laurate; Methyl Pyrrolidone; Methyl Salicylate; Methyl Stearate; Methylboronic Acid; Methylcellulose (4000 Mpa·S); Methylcelluloses; Methylchloroisothiazolinone; Methylene Blue; Methylisothiazolinone; Methylparaben; Microcrystal line Wax; Mineral Oil; Mono and Diglyceride; Monostearyl Citrate; Monothioglycerol; Multisterol Extract; Myristyl Alcohol; Myristyl Lactate; Myristyl-.Gamma.-Picolinium Chloride; N-(Carbamoyl-Methoxy Peg-40)-1,2-Distearoyl-Cephalin Sodium; N,N-Dimethylacetamide; Niacinamide; Nioxime; Nitric Acid; Nitrogen; Nonoxynol Iodine; Nonoxynol-15; Nonoxynol-9; Norflurane; Oatmeal; Octadecene-1/Maleic Acid Copolymer; Octanoic Acid; Octisalate; Octoxynol-1; Octoxynol-40; Octoxynol-9; Octyldodecanol; Octylphenol Polymethylene; Oleic Acid; Oleth-10/01eth-5; Oleth-2; Oleth-20; Oleyl Alcohol; Oleyl Oleate; Olive Oil; Oxidronate Disodium; Oxyquinoline; Palm Kernel Oil; Palmitamine Oxide; Parabens; Paraffin; Paraffin, White Soft; Parfum Creme 45/3; Peanut Oil; Peanut Oil, Refined; Pectin; Peg 6-32 Stearate/Glycol Stearate; Peg Vegetable Oil; Peg-100 Stearate; Peg-12 Glyceryl Laurate; Peg-120 Glyceryl Stearate; Peg-120 Methyl Glucose Dioleate; Peg-15 Cocamine; Peg-150 Distearate; Peg-2 Stearate; Peg-20 Sorbitan Isostearate; Peg-22 Methyl Ether/Dodecyl Glycol Copolymer; Peg-25 Propylene Glycol Stearate; Peg-4 Dilaurate; Peg-4 Laurate; Peg-40 Castor Oil; Peg-40 Sorbitan Diisostearate; Peg-45/Dodecyl Glycol Copolymer; Peg-5 Oleate; Peg-50 Stearate; Peg-54 Hydrogenated Castor Oil; Peg-6 Isostearate; Peg-60 Castor Oil; Peg-60 Hydrogenated Castor Oil; Peg-7 Methyl Ether; Peg-75 Lanolin; Peg-8 Laurate; Peg-8 Stearate; Pegoxol 7 Stearate; Pentadecalactone; Pentaerythritol Cocoate; Pentasodium Pentetate; Pentetate Calcium Trisodium; Pentetic Acid; Peppermint Oil; Perflutren; Perfume 25677; Perfume Bouquet; Perfume E-1991; Perfume Gd 5604; Perfume Tana 90/42 Scba; Perfume W-1952-1; Petrolatum; Petrolatum, White; Petroleum Distillates; Phenol; Phenol, Liquefied; Phenonip; Phenoxyethanol; Phenylalanine; Phenylethyl Alcohol; Phenylmercuric Acetate; Phenylmercuric Nitrate; Phosphatidyl Glycerol, Egg; Phospholipid; Phospholipid, Egg; Phospholipon 90g; Phosphoric Acid; Pine Needle Oil (Pinus Sylvestris); Piperazine Hexahydrate; Plastibase-50w; Polacrilin; Polidronium Chloride; Poloxamer 124; Poloxamer 181; Poloxamer 182; Poloxamer 188; Poloxamer 237; Poloxamer-407; Poly(Bis(P-Carboxyphenoxy)Propane Anhydride):Sebacic Acid; Poly(Dimethylsiloxane/MethylvinylsiloxanelMethylhydrogensiloxane) Dimethylvinyl Or Dimethylhydroxy Or Trimethyl. Endblocked; Poly(D1-Lactic-Co-Glycolic Acid), (50:50; Poly(D1-Lactic-Co-Glycolic Acid), Ethyl Ester Terminated, (50:50; Polyacrylic Acid (250000 Mw); Polybutene (1400 Mw); Polycarbophil; Polyester; Polyester Polyamine Copolymer; Polyester Rayon; Polyethylene Glycol 1000; Polyethylene Glycol 1450; Polyethylene Glycol 1500; Polyethylene Glycol 1540; Polyethylene Glycol 200; Polyethylene Glycol 300; Polyethylene Glycol 300-1600; Polyethylene Glycol 3350; Polyethylene Glycol 400; Polyethylene Glycol 4000; Polyethylene Glycol 540; Polyethylene Glycol 600; Polyethylene Glycol 6000; Polyethylene Glycol 8000; Polyethylene Glycol 900; Polyethylene High Density Containing Ferric Oxide Black (<1%); Polyethylene Low Density Containing Barium Sulfate (20-24%); Polyethylene T; Polyethylene Terephthalates; Polyglactin; Polyglyceryl-3 Oleate; Polyglyceryl-4 Oleate; Polyhydroxyethyl Methacrylate; Polyisobutylene; Polyisobutylene (1100000 Mw); Polyisobutylene (35000 Mw); Polyisobutylene 178-236; Polyisobutylene 241-294; Polyisobutylene 35-39; Polyisobutylene Low Molecular Weight; Polyisobutylene Medium Molecular Weight; Polyisobutylene/Polybutene Adhesive; Polylactide; Polyols; Polyoxyethylene Polyoxypropylene 1800; Polyoxyethylene Alcohols; Polyoxyethylene Fatty Acid Esters; Polyoxyethylene Propylene; Polyoxyl 20 Cetostearyl Ether; Polyoxyl 35 Castor Oil; Polyoxyl 40 Hydrogenated Castor Oil; Polyoxyl 40 Stearate; Polyoxyl 400 Stearate; Polyoxyl 6 And Polyoxyl 32 Palmitostearate; Polyoxyl Distearate; Polyoxyl Glyceryl Stearate; Polyoxyl Lanolin; Polyoxyl Palmitate; Polyoxyl Stearate; Polypropylene; Polypropylene Glycol; Polyquaternium-10; Polyquaternium-7 (70/30 Acrylamide/Dadmac; Polysiloxane; Polysorbate 20; Polysorbate 40; Polysorbate 60; Polysorbate 65; Polysorbate 80; Polyurethane; Polyvinyl Acetate; Polyvinyl Alcohol; Polyvinyl Chloride; Polyvinyl Chloride-Polyvinyl Acetate Copolymer; Polyvinylpyridine; Poppy Seed Oil; Potash; Potassium Acetate; Potassium Alum; Potassium Bicarbonate; Potassium Bisulfite; Potassium Chloride; Potassium Citrate; Potassium Hydroxide; Potassium Metabisulfite; Potassium Phosphate, Dibasic; Potassium Phosphate, Monobasic; Potassium Soap; Potassium Sorbate; Povidone Acrylate Copolymer; Povidone Hydrogel; Povidone K17; Povidone K25; Povidone K29/32; Povidone K30; Povidone K90; Povidone K90f; Povidone/Eicosene Copolymer; Povidones; Ppg-12/Smdi Copolymer; Ppg-15 Stearyl Ether; Ppg-20 Methyl Glucose Ether Distearate; Ppg-26 Oleate; Product Wat; Proline; Promigen D; Promulgen G; Propane; Propellant A-46; Propyl Gallate; Propylene Carbonate; Propylene Glycol; Propylene Glycol Diacetate; Propylene Glycol Dicaprylate; Propylene Glycol Monolaurate; Propylene Glycol Monopalmitostearate; Propylene Glycol Palmitostearate; Propylene Glycol Ricinoleate; Propylene Glycol/Diazolidinyl Urea/Methylparaben/Propylparben; Propylparaben; Protamine Sulfate; Protein Hydrolysate; Pvm/Ma Copolymer; Quaternium-15; Quaternium-15 Cis-Form; Quaternium-52; Ra-2397; Ra-3011; Saccharin; Saccharin Sodium; Saccharin Sodium Anhydrous; Safflower Oil; Sd Alcohol 3a; Sd Alcohol 40; Sd Alcohol 40-2; Sd Alcohol 40b; Sepineo P 600; Serine; Sesame Oil; Shea Butter; Silastic Brand Medical Grade Tubing; Silastic Medical Adhesive, Silicone Type A; Silica, Dental; Silicon; Silicon Dioxide; Silicon Dioxide, Colloidal; Silicone; Silicone Adhesive 4102; Silicone Adhesive 4502; Silicone Adhesive Bio-Psa Q7-4201; Silicone Adhesive Bio-Psa Q7-4301; Silicone Emulsion; Silicone/Polyester Film Strip; Simethicone; Simethicone Emulsion; Sipon Ls 20np; Soda Ash; Sodium Acetate; Sodium Acetate Anhydrous; Sodium Alkyl Sulfate; Sodium Ascorbate; Sodium Benzoate; Sodium Bicarbonate; Sodium Bisulfate; Sodium Bi sulfite; Sodium Borate; Sodium Borate Decahydrate; Sodium Carbonate; Sodium Carbonate Decahydrate; Sodium Carbonate Monohydrate; Sodium Cetostearyl Sulfate; Sodium Chlorate; Sodium Chloride; Sodium Chloride Injection; Sodium Chloride Injection, Bacteriostatic; Sodium Cholesteryl Sulfate; Sodium Citrate; Sodium Cocoyl Sarcosinate; Sodium Desoxycholate; Sodium Dithionite; Sodium Dodecylbenzenesulfonate; Sodium Formaldehyde Sulfoxylate; Sodium Gluconate; Sodium Hydroxide; Sodium Hypochlorite; Sodium Iodide; Sodium Lactate; Sodium Lactate, L-; Sodium Laureth-2 Sulfate; Sodium Laureth-3 Sulfate; Sodium Laureth-5 Sulfate; Sodium Lauroyl Sarcosinate; Sodium Lauryl Sulfate; Sodium Lauryl Sulfoacetate; Sodium Metabisulfite; Sodium Nitrate; Sodium Phosphate; Sodium Phosphate Dihydrate; Sodium Phosphate, Dibasic; Sodium Phosphate, Dibasic, Anhydrous; Sodium Phosphate, Dibasic, Dihydrate; Sodium Phosphate, Dibasic, Dodecahydrate; Sodium Phosphate, Dibasic, Heptahydrate; Sodium Phosphate, Monobasic; Sodium Phosphate, Monobasic, Anhydrous; Sodium Phosphate, Monobasic, Dihydrate; Sodium Phosphate, Monobasic, Monohydrate; Sodium Polyacrylate (2500000 Mw); Sodium Pyrophosphate; Sodium Pyrrolidone Carboxylate; Sodium Starch Glycolate; Sodium Succinate Hexahydrate; Sodium Sulfate; Sodium Sulfate Anhydrous; Sodium Sulfate Decahydrate; Sodium Sulfite; Sodium Sulfosuccinated Undecyclenic Monoalkylolamide; Sodium Tartrate; Sodium Thioglycolate; Sodium Thiomalate; Sodium Thiosulfate; Sodium Thiosulfate Anhydrous; Sodium Trimetaphosphate; Sodium Xylenesulfonate; Somay 44; Sorbic Acid; Sorbitan; Sorbitan Isostearate; Sorbitan Monolaurate; Sorbitan Monooleate; Sorbitan Monopalmitate; Sorbitan Monostearate; Sorbitan Sesquioleate; Sorbitan Trioleate; Sorbitan Tri stearate; Sorbitol; Sorbitol Solution; Soybean Flour; Soybean Oil; Spearmint Oil; Spermaceti; Squalane; Stabilized Oxychloro Complex; Stannous 2-Ethylhexanoate; Stannous Chloride; Stannous Chloride Anhydrous; Stannous Fluoride; Stannous Tartrate; Starch; Starch 1500, Pregelatinized; Starch, Corn; Stearalkonium Chloride; Stearalkonium Hectorite/Propylene Carbonate; Stearamidoethyl Diethylamine; Steareth-10, Steareth-2; Steareth-20; Steareth-21; Steareth-40; Stearic Acid; Stearic Diethanolamide; Stearoxytrimethylsilane; Steartrimonium Hydrolyzed Animal Collagen; Stearyl Alcohol; Sterile Water For Inhalation; Styrene/Isoprene/Styrene Block Copolymer; Succimer; Succinic Acid; Sucralose; Sucrose; Sucrose Distearate; Sucrose Polyesters; Sulfacetamide Sodium; Sulfobutylether .Beta.-Cyclodextrin; Sulfur Dioxide; Sulfuric Acid; Sulfurous Acid; Surfactol Qs; Tagatose, D-; Talc; Tall Oil; Tallow Glycerides; Tartaric Acid; Tartaric Acid, D1-; Tenox; Tenox-2; Tert-Butyl Alcohol; Tert-Butyl Hydroperoxide; Tert-Butylhydroquinone; Tetrakis(2-Methoxyisobutylisocyanide)Copper(f) Tetrafluoroborate; Tetrapropyl Orthosilicate; Tetrofosmin; Theophylline; Thimerosal; Threonine; Thymol; Tin; Titanium Dioxide; Tocopherol; Tocophersolan; Total parenteral nutrition, lipid emulsion; Triacetin; Tricaprylin; Trichloromonofluoromethane; Trideceth-10; Triethanolamine Lauryl Sulfate; Trifluoroacetic Acid; Triglycerides, Medium Chain; Trihydroxystearin; Trilaneth-4 Phosphate; Trilaureth-4 Phosphate; Trisodium Citrate Dihydrate; Tri sodium Hedta; Triton 720; Triton X-200; Trolamine; Tromantadine; Tromethamine (TRIS); Tryptophan; Tyloxapol; Tyrosine; Undecylenic Acid; Union 76 Amsco-Res 6038; Urea; Valine; Vegetable Oil; Vegetable Oil Glyceride, Hydrogenated; Vegetable Oil, Hydrogenated; Versetamide; Viscarin; Viscose/Cotton; Vitamin E; Wax, Emulsifying; Wecobee Fs; White Ceresin Wax; White Wax; Xanthan Gum; Zinc; Zinc Acetate; Zinc Carbonate; Zinc Chloride; and Zinc Oxide.

[0628] Pharmaceutical composition formulations of viral particles disclosed herein may include cations or anions. In some embodiments, the formulations include metal cations such as, but not limited to, Zn2+, Ca2+, Cu2+, Mn2+, Mg+ and combinations thereof. As a non-limiting example, formulations may include polymers and complexes with a metal cation (See e.g., U.S. Pat. Nos. 6,265,389 and 6,555,525, each of which is herein incorporated by reference in its entirety).

[0629] Formulations of the disclosure may also include one or more pharmaceutically acceptable salts. As used herein, “pharmaceutically acceptable salts” refers to derivatives of the disclosed compounds wherein the parent compound is modified by converting an existing acid or base moiety to its salt form (e.g., by reacting the free base group with a suitable organic acid). Examples of pharmaceutically acceptable salts include, but are not limited to, mineral or organic acid salts of basic residues such as amines; alkali or organic salts of acidic residues such as carboxylic acids; and the like. Representative acid addition salts include acetate, acetic acid, adipate, alginate, ascorbate, aspartate, benzenesulfonate, benzene sulfonic acid, benzoate, bisulfate, borate, butyrate, camphorate, camphorsulfonate, citrate, cyclopentanepropionate, digluconate, dodecylsulfate, ethanesulfonate, fumarate, glucoheptonate, glycerophosphate, hemisulfate, heptonate, hexanoate, hydrobromide, hydrochloride, hydroiodide, 2-hydroxy-ethanesulfonate, lactobionate, lactate, laurate, lauryl sulfate, malate, maleate, malonate, methanesulfonate, 2-naphthalenesulfonate, nicotinate, nitrate, oleate, oxalate, palmitate, pamoate, pectinate, persulfate, 3-phenylpropionate, phosphate, picrate, pivalate, propionate, stearate, succinate, sulfate, tartrate, thiocyanate, toluenesulfonate, undecanoate, valerate salts, and the like. Representative alkali or alkaline earth metal salts include sodium, lithium, potassium, calcium, magnesium, and the like, as well as nontoxic ammonium, quaternary ammonium, and airline cations, including, but not limited to ammonium, tetramethylammonium, tetraethylammonium, methylamine, dimethylamine, trimethylamine, triethylamine, ethylamine, and the like. The pharmaceutically acceptable salts of the present disclosure include the conventional non-toxic salts of the parent compound formed, for example, from non-toxic inorganic or organic acids.

[0630] Solvates may be prepared by crystallization, recrystallization, or precipitation from a solution that includes organic solvents, water, or a mixture thereof. Examples of suitable solvents are ethanol, water (for example, mono-, di-, and tri-hydrates), N-methylpyrrolidinone (NMP), dimethyl sulfoxide (DMSO), N,N′-dimethylformamide (DMF), N,N′-dimethylacetamide (DMAC), 1,3-dimethyl-2-imidazolidinone (DMEU), 1,3-dimethyl-3,4,5,6-tetrahydro-2-(114)-pyrimidinone (DMPU), acetonitrile (ACCT), propylene glycol, ethyl acetate, benzyl alcohol, 2-pyrrolidone, benzyl benzoate, and the like. When water is the solvent, the solvate is referred to as a “hydrate.”

### III. Administration and Dosing

### Administration

[0631] The viral particles of the present disclosure may be administered by any delivery route which results in a therapeutically effective outcome. These include, but are not limited to, enteral (into the intestine), gastroenteral, epidural (into the dura mater), oral (by way of the mouth), transdermal, intracerebral (into the cerebrum), intracerebroventricular (into the cerebral ventricles), epicutaneous (application onto the skin), intradermal (into the skin itself), subcutaneous (under the skin), nasal administration (through the nose), intravenous (into a vein), intravenous bolus, intravenous drip, intra-arterial (into an artery), intramuscular (into a muscle), intracardiac (into the heart), intraosseous infusion (into the bone marrow), intrathecal (into the spinal canal), intraparenchymal (into brain tissue), intraperitoneal (infusion or injection into the peritoneum), intravesical infusion, intravitreal (through the eye), intracavernous injection (into a pathologic cavity) intracavitary (into the base of the penis), intravaginal administration, intrauterine, extra-amniotic administration, transdermal (diffusion through the intact skin for systemic distribution), transmucosal (diffusion through a mucous membrane), transvaginal, insufflation (snorting), sublingual, sublabial, enema, eye drops (onto the conjunctiva), ear drops, auricular (in or by way of the ear), buccal (directed toward the cheek), conjunctival, cutaneous, dental (to a tooth or teeth), electro-osmosis, endocervical, endosinusial, endotracheal, extracorporeal, hemodialysis, infiltration, interstitial, intra-abdominal, intra-amniotic, intra-articular, intrabiliary, intrabronchial, intrabursal, intracartilaginous (within a cartilage), intracaudal (within the cauda equine), intracisternal (within the cisterna magna cerebellomedularis), intracorneal (within the cornea), dental intracoronal, intracoronary (within the coronary arteries), intracorporus cavernosum (within the dilatable spaces of the corporus cavernosa of the penis), intradiscal (within a disc), intraductal (within a duct of a gland), intraduodenal (within the duodenum), intradural (within or beneath the dura), intraepidermal (to the epidermis), intraesophageal (to the esophagus), intragastric (within the stomach), intragingival (within the gingivae), intraileal (within the distal portion of the small intestine), intralesional (within or introduced directly to a localized lesion), intraluminal (within a lumen of a tube), intralymphatic (within the lymph), intramedullary (within the marrow cavity of a bone), intrameningeal (within the meninges), intramyocardial (within the myocardium), intraocular (within the eye), intraovarian (within the ovary), intrapericardial (within the pericardium), intrapleural (within the pleura), intraprostatic (within the prostate gland), intrapulmonary (within the lungs or its bronchi), intrasinal (within the nasal or periorbital sinuses), intraspinal (within the vertebral column), intrasynovial (within the synovial cavity of a joint), intratendinous (within a tendon), intratesticular (within the testicle), intrathecal (within the cerebrospinal fluid at any level of the cerebrospinal axis), intrathoracic (within the thorax), intratubular (within the tubules of an organ), intratumor (within a tumor), intratympanic (within the aurus media), intravascular (within a vessel or vessels), intraventricular (within a ventricle), iontophoresis (by means of electric current where ions of soluble salts migrate into the tissues of the body), irrigation (to bathe or flush open wounds or body cavities), laryngeal (directly upon the larynx), nasogastric (through the nose and into the stomach), occlusive dressing technique (topical route administration which is then covered by a dressing which occludes the area), ophthalmic (to the external eye), oropharyngeal (directly to the mouth and pharynx), parenteral, percutaneous, periarticular, peridural, perineural, periodontal, rectal, respiratory (within the respiratory tract by inhaling orally or nasally for local or systemic effect), retrobulbar (behind the pons or behind the eyeball), soft tissue, subarachnoid, subconjunctival, submucosal, topical, transplacental (through or across the placenta), transtracheal (through the wall of the trachea), transtympanic (across or through the tympanic cavity), ureteral (to the ureter), urethral (to the urethra), vaginal, caudal block, diagnostic, nerve block, biliary perfusion, cardiac perfusion, photopheresis, and spinal.

[0632] In some embodiments, compositions may be administered in a way which allows them to cross the blood-brain barrier, vascular barrier, or other epithelial barrier. The viral particles of the present disclosure may be administered in any suitable form, either as a liquid solution or suspension, as a solid form suitable for liquid solution or suspension in a liquid solution. The viral particles may be formulated with any appropriate and pharmaceutically acceptable excipient.

[0633] In some embodiments, the viral particles of the present disclosure may be delivered to a subject via a single route administration.

[0634] In some embodiments, the viral particles of the present disclosure may be delivered to a subject via a multi-site route of administration. A subject may be administered at 2, 3, 4, 5, or more than 5 sites.

[0635] In some embodiments, a subject may be administered the viral particles of the present disclosure using a bolus infusion.

[0636] In some embodiments, a subject may be administered the viral particles of the present disclosure using sustained delivery over a period of minutes, hours, or days. The infusion rate may be changed depending on the subject, distribution, formulation or another delivery parameter.

[0637] In some embodiments, the viral particles of the present disclosure may be delivered by intramuscular delivery route. (See, e.g., U.S. Pat. No. 6,506,379; the content of which is incorporated herein by reference in its entirety). Non-limiting examples of intramuscular administration include an intravenous injection or a subcutaneous injection.

[0638] In some embodiments, the viral particles of the present disclosure may be delivered by oral administration. Non-limiting examples of oral administration include a digestive tract administration and a buccal administration.

[0639] In some embodiments, the viral particles of the present disclosure may be delivered by intraocular delivery route. A non-limiting example of intraocular administration include an intravitreal injection.

[0640] In some embodiments, the viral particles of the present disclosure may be delivered by intranasal delivery route. Non-limiting examples of intranasal delivery include administration of nasal drops or nasal sprays.

[0641] In some embodiments, the viral particles that may be administered to a subject by peripheral injections. Non-limiting examples of peripheral injections include intraperitoneal, intramuscular, intravenous, conjunctival, or joint injection. It was disclosed in the art that the peripheral administration of AAV vectors can be transported to the central nervous system, for example, to the motor neurons (e.g., U.S. Patent Publication Nos. US20100240739 and US20100130594; the content of each of which is incorporated herein by reference in their entirety).

[0642] In some embodiments, the viral particles may be delivered by injection into the CSF pathway. Non-limiting examples of delivery to the CSF pathway include intrathecal and intracerebroventricular administration.

[0643] In some embodiments, the viral particles may be delivered by systemic delivery. As a non-limiting example, the systemic delivery may be by intravascular administration.

[0644] In some embodiments, the viral particles of the present disclosure may be administered to a subject by intracranial delivery (See, e.g., U.S. Pat. No. 8,119,611; the content of which is incorporated herein by reference in its entirety).

[0645] In some embodiments, the viral particles of the present disclosure may be administered to a subject by intraparenchymal administration.

[0646] In some embodiments, the viral particles of the present disclosure may be administered to a subject by intramuscular administration.

[0647] In some embodiments, the viral particles of the present disclosure are administered to a subject and transduce muscle of a subject. As a non-limiting example, the viral particles are administered by intramuscular administration.

[0648] In some embodiments, the viral particles of the present disclosure may be administered to a subject by intravenous administration.

[0649] In some embodiments, the viral particles of the present disclosure may be administered to a subject by subcutaneous administration.

[0650] In some embodiments, the viral particles of the present disclosure may be administered to a subject by topical administration.

[0651] In some embodiments, the viral particles may be delivered by direct injection into the brain. As a nonlimiting example, the brain delivery may be by intrastriatal administration.

[0652] In some embodiments, the viral particles may be delivered by more than one route of administration. As nonlimiting examples of combination administrations, viral particles may be delivered by intrathecal and intracerebroventricular, or by intravenous and intraparenchymal administration.

### Parenteral and Injectable Administration

[0653] In some embodiments, pharmaceutical compositions, viral particles of the present disclosure may be administered parenterally. Liquid dosage forms for oral and parenteral administration include, but are not limited to, pharmaceutically acceptable emulsions, microemulsions, solutions, suspensions, syrups, and/or elixirs. In addition to active ingredients, liquid dosage forms may comprise inert diluents commonly used in the art such as, for example, water or other solvents, solubilizing agents and emulsifiers such as ethyl alcohol, isopropyl alcohol, ethyl carbonate, ethyl acetate, benzyl alcohol, benzyl benzoate, propylene glycol, 1,3-butylene glycol, dimethylformamide, oils (in particular, cottonseed, groundnut, corn, germ, olive, castor, and sesame oils), glycerol, tetrahydrofurfuryl alcohol, polyethylene glycols and fatty acid esters of sorbitan, and mixtures thereof. Besides inert diluents, oral compositions can include adjuvants such as wetting agents, emulsifying and suspending agents, sweetening, flavoring, and/or perfuming agents. In certain embodiments for parenteral administration, compositions are mixed with solubilizing agents such as CREMOPHOR®, alcohols, oils, modified oils, glycols, polysorbates, cyclodextrins, polymers, and/or combinations thereof. In other embodiments, surfactants are included such as hydroxypropylcellulose.

[0654] Injectable preparations, for example, sterile injectable aqueous or oleaginous suspensions may be formulated according to the known art using suitable dispersing agents, wetting agents, and/or suspending agents. Sterile injectable preparations may be sterile injectable solutions, suspensions, and/or emulsions in nontoxic parenterally acceptable diluents and/or solvents, for example, as a solution in 1,3-butanediol. Among the acceptable vehicles and solvents that may be employed are water, Ringer's solution, U.S.P., and isotonic sodium chloride solution. Sterile, fixed oils are conventionally employed as a solvent or suspending medium. For this purpose, any bland fixed oil can be employed including synthetic mono- or diglycerides. Fatty acids such as oleic acid can be used in the preparation of injectables.

[0655] Injectable formulations may be sterilized, for example, by filtration through a bacterial-retaining filter, and/or by incorporating sterilizing agents in the form of sterile solid compositions which can be dissolved or dispersed in sterile water or other sterile injectable medium prior to use.

[0656] In order to prolong the effect of active ingredients, it is often desirable to slow the absorption of active ingredients from subcutaneous or intramuscular injections. This may be accomplished by the use of liquid suspensions of crystalline or amorphous material with poor water solubility. The rate of absorption of active ingredients depends upon the rate of dissolution which, in turn, may depend upon crystal size and crystalline form. Alternatively, delayed absorption of a parenterally administered drug form is accomplished by dissolving or suspending the drug in an oil vehicle. Injectable depot forms are made by forming microencapsule matrices of the drug in biodegradable polymers such as polylactide-polyglycolide. Depending upon the ratio of drug to polymer and the nature of the particular polymer employed, the rate of drug release can be controlled. Examples of other biodegradable polymers include poly(orthoesters) and poly(anhydrides). Depot injectable formulations are prepared by entrapping the drug in liposomes or microemulsions which are compatible with body tissues.

### Rectal and Vaginal Administration

[0657] In some embodiments, pharmaceutical compositions, viral particles of the present disclosure may be administered rectally and/or vaginally. Compositions for rectal or vaginal administration are typically suppositories which can be prepared by mixing compositions with suitable non-irritating excipients such as cocoa butter, polyethylene glycol or a suppository wax which are solid at ambient temperature but liquid at body temperature and therefore melt in the rectum or vaginal cavity and release the active ingredient.

### Oral Administration

[0658] In some embodiments, pharmaceutical compositions, viral particles of the present disclosure may be administered orally. Solid dosage forms for oral administration include capsules, tablets, pills, powders, and granules. In such solid dosage forms, an active ingredient is mixed with at least one inert, pharmaceutically acceptable excipient such as sodium citrate or dicalcium phosphate and/or fillers or extenders (e.g. starches, lactose, sucrose, glucose, mannitol, and silicic acid), binders (e.g. carboxymethylcellulose, alginates, gelatin, polyvinylpyrrolidinone, sucrose, and acacia), humectants (e.g. glycerol), disintegrating agents (e.g. agar, calcium carbonate, potato or tapioca starch, alginic acid, certain silicates, and sodium carbonate), solution retarding agents (e.g. paraffin), absorption accelerators (e.g. quaternary ammonium compounds), wetting agents (e.g. cetyl alcohol and glycerol monostearate), absorbents (e.g. kaolin and bentonite clay), and lubricants (e.g. talc, calcium stearate, magnesium stearate, solid polyethylene glycols, sodium lauryl sulfate), and mixtures thereof. In the case of capsules, tablets and pills, the dosage form may comprise buffering agents.

### Topical or Transdermal Administration

[0659] As described herein, pharmaceutical compositions, viral particles of the present disclosure may be formulated for administration topically. The skin may be an ideal target site for delivery as it is readily accessible. Three routes are commonly considered to deliver pharmaceutical compositions, viral particles of the present disclosure to the skin: (i) topical application (e.g. for local/regional treatment and/or cosmetic applications); (ii) intradermal injection (e.g. for local/regional treatment and/or cosmetic applications); and (iii) systemic delivery (e for treatment of dermatologic diseases that affect both cutaneous and extracutaneous regions). Pharmaceutical compositions, viral particles of the present disclosure can be delivered to the skin by several different approaches known in the art.

[0660] In some embodiments, the disclosure provides for a variety of dressings (e.g., wound dressings) or bandages (e.g., adhesive bandages) for conveniently and/or effectively carrying out methods of the present disclosure. Typically dressing or bandages may comprise sufficient amounts of pharmaceutical compositions, viral particles of the present disclosure described herein to allow users to perform multiple treatments.

[0661] Dosage forms for topical and/or transdermal administration may include ointments, pastes, creams, lotions, gels, powders, solutions, sprays, inhalants and/or patches. Generally, active ingredients are admixed under sterile conditions with pharmaceutically acceptable excipients and/or any needed preservatives and/or buffers. Additionally, the present disclosure contemplates the use of transdermal patches, which often have the added advantage of providing controlled delivery of pharmaceutical compositions, viral particles of the present disclosure to the body. Such dosage forms may be prepared, for example, by dissolving and/or dispensing pharmaceutical compositions, viral particles in the proper medium. Alternatively, or additionally, rates may be controlled by either providing rate controlling membranes and/or by dispersing pharmaceutical compositions, viral particles in a polymer matrix and/or gel.

[0662] Formulations suitable for topical administration include, but are not limited to, liquid and/or semi liquid preparations such as liniments, lotions, oil in water and/or water in oil emulsions such as creams, ointments and/or pastes, and/or solutions and/or suspensions.

[0663] Topically-administrable formulations may, for example, comprise from about 1% (to about 10% (w/w) active ingredient, although the concentration of active ingredient may be as high as the solubility limit of the active ingredient in the solvent. Formulations for topical administration may further comprise one or more of the additional ingredients described herein.

### Depot Administration

[0664] As described herein, in some embodiments, pharmaceutical compositions, viral particles of the present disclosure are formulated in depots for extended release. Generally, specific organs or tissues (“target tissues”) are targeted for administration.

[0665] In some aspects of the disclosure, pharmaceutical compositions, viral particles of the present disclosure are spatially retained within or proximal to target tissues. Provided are methods of providing pharmaceutical compositions, viral particles, to target tissues of mammalian subjects by contacting target tissues (which comprise one or more target cells) with pharmaceutical compositions, viral particles, under conditions such that they are substantially retained in target tissues, meaning that at least 10, 20, 30, 40, 50, 60, 70, 80, 85, 90, 95, 96, 97, 98, 99, 99.9, 99.99 or greater than 99,99% of the composition is retained in the target tissues. Advantageously, retention is determined by measuring the amount of pharmaceutical compositions, viral particles, that enter one or more target cells. For example, at least 1%, 5%, 10%, 20%, 30%, 40%, 50%, 60%, 70%, 80%, 85%, 90%, 95%, 96%, 97%, 98%, 99%, 99.9%, 99.99%, or greater than 99.99% of pharmaceutical compositions, viral particles, administered to subjects are present intracellularly at a period of time following administration. For example, intramuscular injection to mammalian subjects may be performed using aqueous compositions comprising pharmaceutical compositions, viral particles of the present disclosure and one or more transfection reagents, and retention is determined by measuring the amount of pharmaceutical compositions, viral particles, present in muscle cells.

[0666] Certain aspects of the disclosure are directed to methods of providing pharmaceutical compositions, viral particles of the present disclosure to a target tissues of mammalian subjects, by contacting target tissues (comprising one or more target cells) with pharmaceutical compositions, viral particles under conditions such that they are substantially retained in such target tissues. Pharmaceutical compositions, viral particles comprise enough active ingredient such that the effect of interest is produced in at least one target cell. In some embodiments, pharmaceutical compositions, viral particles generally comprise one or more cell penetration agents, although “naked” formulations (such as without cell penetration agents or other agents) are also contemplated, with or without pharmaceutically acceptable carriers.

### Pulmonary Administration

[0667] In some embodiments, pharmaceutical compositions, viral particles of the present disclosure may be prepared, packaged, and/or sold in formulations suitable for pulmonary administration. In some embodiments, such administration is via the buccal cavity. In some embodiments, formulations may comprise dry particles comprising active ingredients. In such embodiments, dry particles may have a diameter in the range from about 0.5 nm to about 7 nm or from about 1 nm to about 6 nm. In some embodiments, formulations may be in the form of dry powders for administration using devices comprising dry powder reservoirs to which streams of propellant may be directed to disperse such powder. In some embodiments, self-propelling solvent/powder dispensing containers may be used. In such embodiments, active ingredients may be dissolved and/or suspended in low-boiling propellant in sealed containers. Such powders may comprise particles wherein at least 98% of the particles by weight have diameters greater than 0.5 nm and at least 95% of the particles by number have diameters less than 7 nm. Alternatively, at least 95% of the particles by weight have a diameter greater than 1 nm and at least 90% of the particles by number have a diameter less than 6 nm. Dry powder compositions may include a solid fine powder diluent such as sugar and are conveniently provided in a unit dose form.

[0668] Low boiling propellants generally include liquid propellants having a boiling point of below 65° F. at atmospheric pressure. Generally, propellants may constitute 50% to 99.9% (w/w) of the composition, and active ingredient may constitute 0.1% to 20% (w/w) of the composition. Propellants may further comprise additional ingredients such as liquid non-ionic and/or solid anionic surfactant and/or solid diluent (which may have particle sizes of the same order as particles comprising active ingredients).

[0669] Pharmaceutical compositions formulated for pulmonary delivery may provide active ingredients in the form of droplets of solution and/or suspension. Such formulations may be prepared, packaged, and/or sold as aqueous and/or dilute alcoholic solutions and/or suspensions, optionally sterile, comprising active ingredients, and may conveniently be administered using any nebulization and/or atomization device. Such formulations may further comprise one or more additional ingredients including, but not limited to, a flavoring agent such as saccharin sodium, a volatile oil, a buffering agent, a surface active agent, and/or a preservative such as methylhydroxybenzoate. Droplets provided by this route of administration may have an average diameter in the range from about 0.1 nm to about 200 nm.

### Intranasal, Nasal and Buccal Administration

[0670] In some embodiments, pharmaceutical compositions, viral particles of the present disclosure may be administered nasally and/or intranasal. In some embodiments, formulations described herein useful for pulmonary delivery may also be useful for intranasal delivery. In some embodiments, formulations for intranasal administration comprise a coarse powder comprising the active ingredient and having an average particle from about 0.2 μm to 500 μm. Such formulations are administered in the manner in which snuff is taken, i.e. by rapid inhalation through the nasal passage from a container of the powder held close to the nose.

[0671] Formulations suitable for nasal administration may, for example, comprise from about as little as 0.1% (w/w) and as much as 100% (w/w) of active ingredient, and may comprise one or more of the additional ingredients described herein. A pharmaceutical composition may be prepared, packaged, and/or sold in a formulation suitable for buccal administration. Such formulations may, for example, be in the form of tablets and/or lozenges made using conventional methods, and may, for example, 0.1% to 20% (w/w) active ingredient, the balance comprising an orally dissolvable and/or degradable composition and, optionally, one or more of the additional ingredients described herein. Alternately, formulations suitable for buccal administration may comprise powders and/or an aerosolized and/or atomized solutions and/or suspensions comprising active ingredients. Such powdered, aerosolized, and/or aerosolized formulations, when dispersed, may comprise average particle and/or droplet sizes in the range of from about 0.1 nm to about 200 nm, and may further comprise one or more of any additional ingredients described herein.

### Ophthalmic or Otic Administration

[0672] In some embodiments, pharmaceutical compositions, viral particles of the present disclosure may be prepared, packaged, and/or sold in formulations suitable for ophthalmic and/or otic administration. Such formulations may, for example, be in the form of eye and/or ear drops including, for example, a 0.1/1.0% (w/w) solution and/or suspension of the active ingredient in aqueous and/or oily liquid excipients. Such drops may further comprise buffering agents, salts, and/or one or more other of any additional ingredients described herein. Other ophthalmically-administrable formulations which are useful include those which comprise active ingredients in microcrystalline form and/or in liposomal preparations. Subretinal inserts may also be used as forms of administration.

### Delivery

[0673] In some embodiments, the viral particles or pharmaceutical compositions of the present disclosure may be administered or delivered using the methods for treatment of disease described in U.S. Pat. No. 8,999,948, or International Publication No. WO2014178863, the contents of which are herein incorporated by reference in their entirety.

[0674] In some embodiments, the viral particles or pharmaceutical compositions of the present disclosure may be administered or delivered using the methods for delivering gene therapy in Alzheimer's Disease or other neurodegenerative conditions as described in US Application No. 20150126590, the contents of which are herein incorporated by reference in their entirety.

[0675] In some embodiments, the viral particles or pharmaceutical compositions of the present disclosure may be administered or delivered using the methods for delivery of a CNS gene therapy as described in U.S. Pat. Nos. 6,436,708, and 8,946,152, and International Publication No. WO2015168666, the contents of which are herein incorporated by reference in their entirety.

[0676] In some embodiments, the viral particle or pharmaceutical compositions of the present disclosure may be administered or delivered using the methods for delivering proteins using AAV vectors described in European Patent Application No. EP2678433, the contents of which are herein incorporated by reference in their entirety.

[0677] In some embodiments, the viral particle or pharmaceutical compositions of the present disclosure may be administered or delivered using the methods for delivering DNA to the bloodstream described in U.S. Pat. No. 6,211,163, the contents of which are herein incorporated by reference in their entirety.

[0678] In some embodiments, the viral particle or pharmaceutical compositions of the present disclosure may be administered or delivered using the methods for delivering a payload to the central nervous system described in U.S. Pat. No. 7,588,757, the contents of which are herein incorporated by reference in their entirety.

[0679] In some embodiments, the viral particle or pharmaceutical compositions of the present disclosure may be administered or delivered using the methods for delivering a payload described in U.S. Pat. No. 8,283,151, the contents of which are herein incorporated by reference in their entirety.

[0680] In some embodiments, the viral particle or pharmaceutical compositions of the present disclosure may be administered or delivered using the methods for delivering a payload using a glutamic acid decarboxylase (GAD) delivery vector described in International Patent Publication No. WO2001089583, the contents of which are herein incorporated by reference in their entirety.

[0681] In some embodiments, the viral particle or pharmaceutical compositions of the present disclosure may be administered or delivered using the methods for delivering a payload to neural cells described in International Patent Publication No. WO2012057363, the contents of which are herein incorporated by reference in their entirety.

### Delivery to Cells

[0682] The present disclosure provides a method of delivering to a cell or tissue any of the above-described viral particles, comprising contacting the cell or tissue with said viral particle or contacting the cell or tissue with a formulation comprising said viral particle, or contacting the cell or tissue with any of the described compositions, including pharmaceutical compositions. The method of delivering the viral particle to a cell or tissue can be accomplished in vitro, ex vivo, or in vivo.

### Delivery to Subjects

[0683] The present disclosure additionally provides a method of delivering to a subject, including a mammalian subject, any of the above-described viral particles comprising administering to the subject said viral particle, or administering to the subject a formulation comprising said viral particle, or administering to the subject any of the described compositions, including pharmaceutical compositions.

### Dose and Regimen

[0684] The present disclosure provides methods of administering viral particles in accordance with the disclosure to a subject in need thereof. The pharmaceutical, diagnostic, or prophylactic viral particles and compositions of the present disclosure may be administered to a subject using any amount and any route of administration effective for preventing, treating, managing, or diagnosing diseases, disorders and/or conditions. The exact amount required will vary from subject to subject, depending on the species, age, and general condition of the subject, the severity of the disease, the particular composition, its mode of administration, its mode of activity, and the like. The subject may be a human, a mammal, or an animal. Compositions in accordance with the disclosure are typically formulated in unit dosage form for ease of administration and uniformity of dosage. It will be understood, however, that the total daily usage of the compositions of the present disclosure may be decided by the attending physician within the scope of sound medical judgment. The specific therapeutically effective, prophylactically effective, or appropriate diagnostic dose level for any particular individual will depend upon a variety of factors including the disorder being treated and the severity of the disorder; the activity of the specific payload employed; the specific composition employed; the age, body weight, general health, sex and diet of the patient; the time of administration, route of administration, and rate of excretion of the specific viral particle employed; the duration of the treatment; drugs used in combination or coincidental with the specific viral particle employed; and like factors well known in the medical arts.

[0685] In certain embodiments, viral particle pharmaceutical compositions in accordance with the present disclosure may be administered at dosage levels sufficient to deliver from about 0.0001 mg/kg to about 100 mg/kg, from about 0.001 mg/kg to about 0.05 mg/kg, from about 0.005 mg/kg to about 0.05 mg/kg, from about 0.001 mg/kg to about 0.005 mg/kg, from about 0.05 mg/kg to about 0.5 mg/kg, from about 0.01 mg/kg to about 50 mg/kg, from about 0.1 mg/kg to about 40 mg/kg, from about 0.5 mg/kg to about 30 mg/kg, from about 0.01 mg/kg to about 10 mg/kg, from about 0.1 mg/kg to about 10 mg/kg, or from about 1 mg/kg to about 25 mg/kg, of subject body weight per day, one or more times a day, to obtain the desired therapeutic, diagnostic, or prophylactic, effect, it will be understood that the above dosing concentrations may be converted to vg or viral genomes per kg or into total viral genomes administered by one of skill in the art.

[0686] In certain embodiments, viral particle pharmaceutical compositions in accordance with the present disclosure may be administered at about 10 to about 600 μl/site, 50 to about 500 μl/site, 100 to about 400 μl/site, 120 to about 300 μl/site, 140 to about 200 μl/site, about 160 1,11/site. As non-limiting examples, viral particles may be administered at 50 μl/site and/or 150 μl/site.

[0687] The desired dosage of the viral particles of the present disclosure may be delivered only once, three times a day, two times a day, once a day, every other day, every third day, every week, every two weeks, every three weeks, or every four weeks. In certain embodiments, the desired dosage may be delivered using multiple administrations (e.g., two, three, four, five, six, seven, eight, nine, ten, eleven, twelve, thirteen, fourteen, or more administrations). When multiple administrations are employed, split dosing regimens such as those described herein may be used. As used herein, a “split dose” is the division of “single unit dose” or total daily dose into two or more doses, e.g., two or more administrations of the “single unit dose”. As used herein, a “single unit dose” is a dose of any therapeutic administered in one dose/at one time/single route/single point of contact, i.e., single administration event.

[0688] The desired dosage of the viral particles of the present disclosure may be administered as a “pulse dose” or as a “continuous flow”. As used herein, a “pulse dose” is a series of single unit doses of any therapeutic administered with a set frequency over a period of time. As used herein, a “continuous flow” is a dose of therapeutic administered continuously for a period of time in a single route/single point of contact, i.e., continuous administration event. A total daily dose, an amount given or prescribed in 24-hour period, may be administered by any of these methods, or as a combination of these methods, or by any other methods suitable for a pharmaceutical administration.

[0689] In some embodiments, delivery of the viral particles of the present disclosure to a subject provides neutralizing activity to a subject. The neutralizing activity can be for at least 1 month, 2 months, 3 months, 4 months, 5 months, 6 months, 7 months, 8 months, 9 months, 10 months, 11 months, 1 year, 13 months, 14 months, 15 months, 16 months, 17 months, 18 months, 19 months, 20 months, 20 months, 21 months, 22 months, 23 months, 2 years, 3 years, 4 years, 5 years, 6 years, 7 years, 8 years, 9 years, 10 years or more than 10 years.

[0690] In some embodiments, delivery of the viral particles of the present disclosure results in minimal serious adverse events (SAES) as a result of the delivery of the viral particles.

[0691] In some embodiments, delivery of viral particles to cells of the central nervous system (e.g., parenchyma) may comprise a total dose between about 1×10⁶ VG and about 1×10 6 VG. In some embodiments, delivery may comprise a total dose of about 1×10⁶, 2×10⁶, 3×10⁶, 4×10⁶, 5×10⁶, 6×10⁶, 7×10⁶, 8×10⁶, 9×10⁶, 1×10⁷, 2×10⁷, 3×10⁷, 4×10⁷, 5×10⁷, 6×10⁷, 7×10⁷, 8×10⁷, 9×10⁷, 1×10⁸, 2×10⁸, 3×10⁸, 4×10⁸, 5×10⁸, 6×10⁸, 7×10⁸, 8×10⁸, 9×10⁸, 1×10⁹, 2×10⁹, 3×10⁹, 4×10⁹, 5×10⁹, 6×10⁹, 7×10⁹, 8×10⁹, 9×10⁹, 1.9×10¹⁰, 2×10¹⁰, 3×10¹⁰, 3×10¹⁰, 4×10¹⁰, 5×10¹⁰, 6×10¹⁰, 7×10¹⁰, 8×10¹⁰, 9×10¹⁰, 1×10¹¹, 2×10¹¹, 2.5×10¹¹, 3×10¹¹, 4×10¹¹, 5×10¹¹, 6×10¹¹, 7×10¹¹, 8×10¹¹, 9×10¹¹, 11×10¹², 2×10¹², 3×10¹², 4×10¹², 5×10¹², 6×10¹², 7×10¹², 8×10¹², 9×10¹¹, 1×10¹³, 2×10¹³, 3×10¹³, 4×10¹³, 5×10¹³, 6×10¹³, 7×10¹³, 8×10¹³, 9×10¹³, 1×10¹⁴, 2×10¹⁴, 3×10¹⁴, 4×10¹⁴, 5×10¹⁴, 6×10¹⁴, 7×10¹⁴, 8×10¹⁴, 9×10¹⁴, 1×10¹⁵, 2×10¹⁵, 3×10¹⁵, 4×10¹⁵, 5×10¹⁵, 6×10¹⁵, 7×10¹⁵, 8×10¹⁵, 9×10¹⁵, or 1×10¹⁶ VG. As a non-limiting example, the total dose is 1×10¹³ VG. As another non-limiting example, the total dose is 2.1×10¹² VG.

[0692] In some embodiments, delivery of viral particles to cells of the central nervous system (e.g., parenchyma) may comprise a composition concentration between about 1×10⁶ VG/mL and about 1×10¹⁶ VG/ML. In some embodiments, delivery may comprise a composition concentration of about 1×10⁶, 2×10⁶, 3×10⁶, 4×10⁶, 5×10⁶, 6×10⁶, 7×10⁶, 8×10⁶, 9×10⁶, 1×10⁷, 2×10⁷, 3×10⁷, 4×10⁷, 5×10⁷, 6×10⁷, 7×10⁷, 8×10⁷, 9×10⁷, 1×10⁸, 2×10⁸, 3×10⁸, 4×10⁸, 5×10⁸, 6×10⁸, 7×10⁸, 8×10⁸, 9×10⁸, 1×10⁹, 2×10⁹, 3×10⁹, 4×10⁹, 5×10⁹, 6×10⁹, 7×10⁹, 8×10 9 9×10⁹, 1.9×10¹⁰, 2×10¹⁰, 3×10¹⁰, 3×10¹⁰, 4×10¹⁰, 5×10¹⁰, 6×10¹⁰, 7×10¹⁰, 8×10¹⁰, 9×10¹⁰, 1×10¹¹, 2×10¹¹, 2.5×10¹¹, 3×10¹¹, 4×10¹¹, 5×10¹¹, 6×10¹¹, 7×10¹¹, 8×10¹¹, 9×10¹¹, 11×10¹², 2×10¹², 3×10¹², 4×10¹², 5×10¹², 6×10¹², 7×10¹², 8×10¹², 9×10¹², 1×10¹³, 2×10¹³, 3×10¹³, 4×10¹³, 5×10¹³, 6×10¹³, 7×10¹³, 8×10¹³, 9×10¹³, 1×10¹⁴, 2×10¹⁴, 3×10¹⁴, 4×10¹⁴, 5×10¹⁴, 6×10¹⁴, 7×10¹⁴, 8×10¹⁴, 9×10¹⁴, 1×10¹⁵, 2×10¹⁵, 3×10¹⁵, 4×10¹⁵, 5×10¹⁵, 6×10¹⁵, 7×10¹⁵, 8×10¹⁵, 9×10¹⁵, or 1×10¹⁶ VG/mL. In some embodiments, the delivery comprises a composition concentration of 1×10¹³ VG/mL. In some embodiments, the delivery comprises a composition concentration of 2×10¹² VG/mL.

### Combinations

[0693] The viral particles may be used in combination with one or more other therapeutic, prophylactic, research or diagnostic agents. By “in combination with,” it is not intended to imply that the agents must be administered at the same time and/or formulated for delivery together, although these methods of delivery are within the scope of the present disclosure. Compositions can be administered concurrently with, prior to, or subsequent to, one or more other desired therapeutics or medical procedures. In general, each agent will be administered at a dose and/or on a time schedule determined for that agent. In some embodiments, the present disclosure encompasses the delivery of pharmaceutical, prophylactic, research, or diagnostic compositions in combination with agents that may improve their bioavailability, reduce and/or modify their metabolism, inhibit their excretion, and/or modify their distribution within the body.

### Measurement of Expression

[0694] Expression of payloads from viral genomes may be determined using various methods known in the art such as, but not limited to immunochemistry (e.g., IHC), in situ hybridization (ISH), enzyme-linked immunosorbent assay (ELISA), affinity ELISA, ELISPOT, flow cytometry, immunocytology, surface plasmon resonance analysis, kinetic exclusion assay, liquid chromatography-mass spectrometry (LCMS), high-performance liquid chromatography (HPLC), BCA assay, immunoelectrophoresis, Western blot, SDS-PAGE, protein immunoprecipitation, and/or PCR.

### Bioavailability

[0695] The viral particles, when formulated into a composition with a delivery agent as described herein, can exhibit an increase in bioavailability as compared to a composition lacking a delivery agent as described herein. As used herein, the term “bioavailability” refers to the systemic availability of a given amount of viral particle or expressed payload administered to a mammal. Bioavailability can be assessed by measuring the area under the curve (AUC) or the maximum serum or plasma concentration (Cₘₐₓ) of the composition following. AUC is a determination of the area under the curve plotting the serum or plasma concentration of a compound (e.g., viral particles or expressed payloads) along the ordinate (Y-axis) against time along the abscissa (X-axis). Generally, the AUC for a particular compound can be calculated using methods known to those of ordinary skill in the art and as described in G. S. Banker, Modern Pharmaceutics, Drugs and the Pharmaceutical Sciences, v. 72, Marcel Dekker, New York, Inc., 1996, the contents of which are herein incorporated by reference in its entirety.

[0696] The Cₘₐₓ value is the maximum concentration of the viral particle or expressed payload achieved in the serum or plasma of a mammal following administration of the viral particle to the mammal. The Cₘₐₓ value of can be measured using methods known to those of ordinary skill in the art. The phrases “increasing bioavailability” or “improving the pharmacokinetics,” as used herein mean that the systemic availability of a first viral particle or expressed payload, measured as AUC, Cₘₐₓ, or Cₘᵢₙ in a mammal is greater, when co-administered with a delivery agent as described herein, than when such co-administration does not take place. In some embodiments, the bioavailability can increase by at least about 2%, at least about 5%, at least about 10%, at least about 15%, at least about 20%, at least about 25%, at least about 30%, at least about 35%, at least about 40%, at least about 45%, at least about 50%, at least about 55%, at least about 60%, at least about 65%, at least about 70%, at least about 75%, at least about 80%, at least about 85%, at least about 90%, at least about 95%, or about 100%.

### Therapeutic Window

[0697] As used herein “therapeutic window” refers to the range of plasma concentrations, or the range of levels of therapeutically active substance at the site of action, with a high probability of eliciting a therapeutic effect. In some embodiments, the therapeutic window of the viral particle as described herein can increase by at least about 2%, at least about 5%, at least about 10%, at least about 15%, at least about 20%, at least about 25%, at least about 30%, at least about 35%, at least about 40%, at least about 45%, at least about 50%, at least about 55%, at least about 60%, at least about 65%, at least about 70%, at least about 75%, at least about 80%, at least about 85%, at least about 90%, at least about 95%, or about 100%.

### Volume of Distribution

[0698] As used herein, the term “volume of distribution” refers to the fluid volume that would be required to contain the total amount of the drug in the body at the same concentration as in the blood or plasma: V_{dist} equals the amount of drug in the body/concentration of drug in blood or plasma. For example, for a 10 mg dose and a plasma concentration of 10 mg/L, the volume of distribution would be 1 liter. The volume of distribution reflects the extent to which the drug is present in the extravascular tissue. A large volume of distribution reflects the tendency of a compound to bind to the tissue components compared with plasma protein binding. In a clinical setting, V_{dist} can be used to determine a loading dose to achieve a steady state concentration. In some embodiments, the volume of distribution of the viral particles as described herein can decrease at least about 2%, at least about 5%, at least about 10%, at least about 15%, at least about 20%, at least about 25%, at least about 30%, at least about 35%, at least about 40%, at least about 45%, at least about 50%, at least about 55%, at least about 60%, at least about 65%, at least about 70%.

### Biological Effect

[0699] In some embodiments, the biological effect of the viral particles delivered to the animals may be categorized by analyzing the payload expression in the animals. The payload expression may be determined from analyzing a biological sample collected from a mammal administered the viral particles of the present disclosure. For example, a protein expression of 50-200 pg/ml for the protein encoded by the viral particles delivered to the mammal may be seen as a therapeutically effective amount of protein in the mammal.

### IV. Methods and Uses of the Compositions of the Disclosure

[0700] The present disclosure provides a method for treating a disease, disorder and/or condition in a mammalian subject, including a human subject, comprising administering to the subject any of the viral particles described herein or administering to the subject any of the described compositions, including pharmaceutical compositions, described herein.

[0701] In some embodiments, the viral particles of the present disclosure are administered to a subject prophylactically.

[0702] In some embodiments, the viral particles of the present disclosure are administered to a subject having at least one of the diseases described herein.

[0703] In some embodiments, the viral particles of the present disclosure are administered to a subject to treat a disease or disorder described herein. The subject may have the disease or disorder or may be at-risk to developing the disease or disorder.

[0704] In some embodiments, the viral particles of the present disclosure are part of an active immunization strategy to protect against diseases and disorders. In an active immunization strategy, a vaccine or viral particles are administered to a subject to prevent an infectious disease by activating the subject's production of antibodies that can fight off invading bacteria or viruses.

[0705] In some embodiments, the viral particles of the present disclosure are part of a passive immunization strategy. In a passive immunization strategy, antibodies against a particular infectious agent are given directly to the subject.

### Diseases and Toxins

[0706] Various infectious diseases may be treated with pharmaceutical compositions, viral particles, of the present disclosure. As used herein, the term “infectious disease” refers to any disorders caused by organisms such as bacteria, viruses, fungi or parasites. As a non-limiting example, the infectious disease may be Acute bacterial rhinosinusitis, 14-day measles, Acne, Acrodermatitis chronica atrophicans (ACA)-(late skin manifestation of latent Lyme disease), Acute hemorrhagic conjunctivitis, Acute hemorrhagic cystitis, Acute rhinosinusitis, Adult T-cell Leukemia-Lymphoma (ATLL), African Sleeping Sickness, AIDS (Acquired Immunodeficiency Syndrome), Alveolar hydatid, Amebiasis, Amebic meningoencephalitis, Anaplasmosis, Anthrax, Arboviral or parainfectious, Ascariasis (Roundworm infections), Aseptic meningitis, Athlete's foot (Tinea pedis), Australian tick typhus, Avian Influenza, Babesiosis, Bacillary angiomatosis, Bacterial meningitis, Bacterial vaginosis, Balanitis, Balantidiasis, Bang's disease, Barmah Forest virus infection, Bartonellosis (Verruga peruana; Carrion's disease; Oroya fever), Bat Lyssavirus Infection, Bay sore (Chiclero's ulcer), Baylisascaris infection (Racoon roundworm infection), Beaver fever, Beef tapeworm, Bejel (endemic syphilis), Biphasic meningoencephalitis, Black Bane, Black death, Black piedra, Blackwater Fever, Blastomycosis, Blennorrhea of the newborn, Blepharitis, Boils, Bornholm disease (pleurodynia), Borrelia miyamotoi Disease, Botulism, Boutonneuse fever, Brazilian purpuric fever, Break Bone fever, Brill, Bronchiolitis, Bronchitis, Brucellosis (Bang's disease), Bubonic plague, Bullous impetigo, Burkholderia mallei (Glanders), Burkholderia pseudomallei (Melioidosis), Buruli ulcers (also Mycoburuli ulcers), Busse, Busse-Buschke disease (Cryptococcosis), California group encephalitis, Campylobacteriosis, Candidiasis, Canefield fever (Canicola fever; 7-day fever; Weil's disease; leptospirosis; canefield fever), Canicola fever, Capillariasis, Carate, Carbapenem-resistant Enterobacteriaceae (CRE), Carbuncle, Carrion's disease, Cat Scratch fever, Cave disease, Central Asian hemorrhagic fever, Central European tick, Cervical cancer, Chagas disease, Chancroid (Soft chancre), Chicago disease, Chickenpox (Varicella), Chiclero's ulcer, Chikungunya fever, Chlamydial infection, Cholera, Chromoblastomycosis, Ciguatera, Clap, Clonorchiasis (Liver fluke infection), Clostridium Difficile Infection, Clostridium Perfringens (Epsilon Toxin), Coccidioidomycosis fungal infection (Valley fever; desert rheumatism), Coenurosis, Colorado tick fever, Condyloma accuminata, Condyloma accuminata(Warts), Condyloma lata, Congo fever, Congo hemorrhagic fever virus, Conjunctivitis, cowpox, Crabs, Crimean, Croup, Cryptococcosis, Cryptosporidiosis (Crypto), Cutaneous Larval Migrans, Cyclosporiasis, Cystic hydatid, Cysticercosis, Cystitis, Czechoslovak tick, D68 (EV-D68), Dacryocytitis, Dandy fever, Darling's Disease, Deer fly fever, Dengue fever (1, 2, 3 and 4), Desert rheumatism, Devil's grip, Diphasic milk fever, Diphtheria, Disseminated Intravascular Coagulation, Dog tapeworm, Donovanosis, Donovanosis (Granuloma inguinale), Dracontiasis, Dracunculosis, Duke's disease, Dum Dum Disease, Durand-Nicholas-Favre disease, Dwarf tapeworm, E. Coli infection (E. Coli), Eastern equine encephalitis, Ebola Hemorrhagic Fever (Ebola virus disease EVD), Ectothrix, Ehrlichiosis (Sennetsu fever), Encephalitis, Endemic Relapsing fever, Endemic syphilis, Endophthalmitis, Endothrix, Enterobiasis (Pinworm infection), Enterotoxins B Poisoning (Staph Food Poisoning), Enterovirus Infection, Epidemic Keratoconjunctivitis, Epidemic Relapsing fever, Epidemic typhus, Epiglottitis, Erysipelis, Erysipeloid (Erysipelothricosis), Erythema chronicum migrans, Erythema infectiosum, Erythema marginatum, Erythema multiforme, Erythema nodosum, Erythema nodosum leprosum, Erythrasma, Espundia, Eumycotic mycetoma, European blastomycosis, Exanthem subitum (Sixth disease), Eyeworm, Far Eastern tick, Fascioliasis, Fievre boutonneuse (Tick typhus), Fifth Disease (erythema infectiosum), Filatow-Dukes' Disease (Scalded Skin Syndrome; Ritter's Disease), Fish tapeworm, Fitz-Hugh-Curtis syndrome—Perihepatitis, Flinders Island Spotted Fever, Flu (Influenza), Folliculitis, Four Corners Disease, Four Corners Disease (Human Pulmonary Syndrome (HPS)), Frambesia, Francis disease, Furunculosis, Gas gangrene, Gastroenteritis, Genital Herpes, Genital Warts, German measles, Gerstmann-Straussler-Scheinker (GSS), Giardiasis, Gilchrist's disease, Gingivitis, Gingivostomatitis, Glanders, Glandular fever (infectious mononucleosis), Gnathostomiasis, Gonococcal Infection (Gonorrhea), Gonorrhea, Granuloma inguinale (Donovanosis), Guinea Worm, Haemophilus Influenza disease, Hamburger disease, Hansen's disease-leprosy, Hantaan disease, Hantaan-Korean hemorrhagic fever, Hantavirus Pulmonary Syndrome, Hantavirus Pulmonary Syndrome (HPS), Hard chancre, Hard measles, Haverhill fever—Rat bite fever, Head and Body Lice, Heartland fever, Helicobacterosis, Hemolytic Uremic Syndrome (WS), Hepatitis A, Hepatitis B, Hepatitis C, Hepatitis D, Hepatitis E, Herpangina, Herpes-genital, Herpes labialis, Herpes-neonatal, Hidradenitis, Histoplasmosis, Histoplasmosis infection (Histoplasmosis), His-Werner disease, HIV infection, Hookworm infections, Hordeola, Hordeola (Stye), HTLV, HTLV-associated myelopathy (HAM), Human granulocytic ehrlichiosis, Human monocytic ehrlichiosis, Human Papillomavirus (HPV), Human Pulmonary Syndrome, Hydatid cyst, Hydrophobia, Impetigo, Including congenital (German Measles), Inclusion conjunctivitis, Inclusion conjunctivitis-Swimming Pool conjunctivitis-Pannus, Infantile diarrhea, Infectious Mononucleosis, Infectious myocarditis, Infectious pericarditis, influenza, isosporiasis, Israeli spotted fever, Japanese Encephalitis, Jock itch, Jorge Lobo disease lobomycosis, Jungle yellow fever, Junin Argentinian hemorrhagic fever, Kala Azar, Kaposi's sarcoma, Keloidal blastomycosis, Keratoconjunctivitis, Kuru, Kyasanur forest disease, LaCrosse encephalitis, Lassa hemorrhagic fever, Legionellosis (Legionnaires Disease), Legionnaire's pneumonia, Lemierre's Syndrome (Postanginal septicemia), Lemming fever, Leprosy, Leptospirosis (Nanukayami fever; Weirs disease), Listeriosis (Listeria), Liver fluke infection, Lobo's mycosis, Lockjaw, Loiasis, Louping Ill, Ludwig's angina, Lung fluke infection, Lung fluke infection (Paragonimiasis), Lyme disease, Lymphogranuloma venereum infection (LGV), Machupo Bolivian hemorrhagic fever, Madura foot, Mal del pinto, Malaria, Malignant pustule, Malta fever, Marburg hemorrhagic fever, Masters disease, Maternal Sepsis (Puerperal fever), Measles, Mediterranean spotted fever, Melioidosis (Whitmore's disease), Meningitis, Meningococcal Disease, MERS, Milker's nodule, Molluscum contagiosum, Moniliasis, monkeypox, Mononucleosis, Mononucleosis-like syndrome, Montezuma's Revenge, Morbilli, MRSA (methicillin-resistant Staphylococcus aureus) infection, Mucormycosis-Zygomycosis, Multiple Organ Dysfunction Syndrome or MODS, Multiple-system atrophy (MSA), Mumps, Murine typhus, Murray Valley Encephalitis (MVE), Mycoburuli ulcers, Mycoburuli ulcers-Buruli ulcers, Mycotic vulvovaginitis, Myositis, Nanukayami fever, Necrotizing fasciitis, Necrotizing fasciitis-Type 1, Necrotizing fasciitis-Type 2, Negishi, New world spotted fever, Nocardiosis, Nongonococcal urethritis, Non-Polio (Non-Polio Enterovirus), Norovirus infection, North American blastomycosis, North Asian tick typhus, Norwalk virus infection, Norwegian itch, O'Hara disease, Omsk hemorrhagic fever, Onchoceriasis, Onychomycosis, Opisthorchiasis, Opthalmia neonatorium, Oral hairy leukoplakia, Off, Oriental Sore, Oriental Spotted Fever, Ornithosis (Parrot fever; Psittacosis), Oroya fever, Otitis externa, Otitis media, Pannus, Paracoccidioidomycosis, Paragonimiasis, Paralytic Shellfish Poisoning (Paralytic Shellfish Poisoning), Paronychia (Whitlow), Parotitis, PCP pneumonia, Pediculosis, Peliosis hepatica, Pelvic Inflammatory Disease, Pertussis (also called Whooping cough), Phaeohyphomycosis, Pharyngoconjunctival fever, Piedra (White Piedra), Piedra (Black Piedra), Pigbel, Pink eye conjunctivitis, Pinta, Pinworm infection, Pitted Keratolysis, Pityriasis versicolor (Tinea versicolor), Plague; Bubonic, Pleurodynia, Pneumococcal Disease, Pneumocystosis, Pneumonia, Pneumonic (Plague), Polio or Poliomyelitis, Polycystic hydatid, Pontiac fever, Pork tapeworm, Posada-Wernicke disease, Postanginal septicemia, Powassan, Progressive multifocal leukencephalopathy, Progressive Rubella Panencephalitis, Prostatitis, Pseudomembranous colitis, Psittacosis, Puerperal fever, Pustular Rash diseases (Small pox), Pyelonephritis, Pylephlebitis, Q-Fever, Quinsy, Quintana fever (5-day fever), Rabbit fever, Rabies, Racoon roundworm infection, Rat bite fever, Rat tapeworm, Reiter Syndrome, Relapsing fever, Respiratory syncytial virus (RSV) infection, Rheumatic fever, Rhodotorulosis, Ricin Poisoning, Rickettsialpox, Rickettsiosis, Rift Valley Fever, Ringworm, Ritter's Disease, River Blindness, Rocky Mountain spotted fever, Rose Handler's disease (Sporotrichosis), Rose rash of infants, Roseola, Ross River fever, Rotavirus infection, Roundworm infections, Rubella, Rubeola, Russian spring, Salmonellosis gastroenteritis, San Joaquin Valley fever, Sao Paulo Encephalitis, Sao Paulo fever, SARS, Scabies Infestation (Scabies) (Norwegian itch), Scalded Skin Syndrome, Scarlet fever (Scarlatina), Schistosomiasis, Scombroid, Scrub typhus, Sennetsu fever, Sepsis (Septic shock), Severe Acute Respiratory Syndrome, Severe Acute Respiratory Syndrome (SARS), Shiga Toxigenic Escherichia coli (STECNTEC), Shigellosis gastroenteritis (Shigella), Shinbone fever, Shingles, Shipping fever, Siberian tick typhus, Sinusitis, Sixth disease, Slapped cheek disease, Sleeping sickness, Smallpox (Variola), Snail Fever, Soft chancre, Southern tick associated rash illness, Sparganosis, Spelunker's disease, Sporadic typhus, Sporotrichosis, Spotted fever, Spring, St. Louis encephalitis, Staphylococcal Food Poisoning, Staphylococcal Infection, Strep. throat, Streptococcal Disease, Streptococcal Toxic-Shock Syndrome, Strongyloiciasis, Stye, Subacute Sclerosing Panencephalitis, Subacute Sclerosing Panencephalitis (SSPE), Sudden Acute Respiratory Syndrome, Sudden Rash, Swimmer's ear, Swimmer's Itch, Swimming Pool conjunctivitis, Sylvatic yellow fever, Syphilis, Systemic Inflammatory Response Syndrome (SIRS), Tabes dorsalis (tertiary syphilis), Taeniasis, Taiga encephalitis, Tanner's disease, Tapeworm infections, Temporal lobe encephalitis, Temporal lobe encephalitis, tetani (Lock Jaw), Tetanus Infection, Threadworm infections, Thrush, Tick, Tick typhus, Tinea barbae, Tinea capitis, Tinea corporis, Tinea cruris, Tinea manuum, Tinea nigra, Tinea pedis, Tinea unguium, Tinea versicolor, Torulopsosis, Torulosis, Toxic Shock Syndrome, Toxoplasmosis, transmissible spongioform (CJD), Traveler's diarrhea, Trench fever 5, Trichinellosis, Trichomoniasis, Trichomycosis axillaris, Trichuriasis, Tropical Spastic Paraparesis (TSP), Trypanosomiasis, Tuberculosis (TB), Tuberculousis, Tularemia, Typhoid Fever, Typhus fever, Ulcus nolle, Undulant fever, Urban yellow fever, Urethritis, Vaginitis, Vaginosis, Vancomycin Intermediate (VISA), Vancomycin Resistant (VRSA), Varicella, Venezuelan Equine encephalitis, Verruga peruana, Vibrio cholerae (Cholera), Vibriosis (Vibrio), Vincent's disease or Trench mouth, Viral conjunctivitis, Viral Meningitis, Viral meningoencephalitis, Viral rash, Visceral Larval Migrans, Vomito negro, Vulvovaginitis, Warts, Waterhouse, Weirs disease, West Nile Fever, Western equine encephalitis, Whipple's disease, Whipworm infection, White Piedra, Whitlow, Whitmore's disease, Winter diarrhea, Wolhynia fever, Wool sorters' disease, Yaws, Yellow Fever, Yersinosis, Yersinosis (Yersinia), Zahorsky's disease, Zika virus disease, Zoster, Zygomycosis, John Cunningham Virus (JCV), Human immunodeficiency virus (HIV), Influenza virus, Hepatitis B, Hepatitis C, Hepatitis D, Respiratory syncytial virus (RSV), Herpes simplex virus 1 and 2, Human Cytomegalovirus, Epstein-Barr virus, Varicella zoster virus, Coronaviruses Poxviruses, Enterovirus 71, Rubella virus, Human papilloma virus, Streptococcus pneumoniae, Streptococcus viridans Staphylococcus aureus (S. aureus), Methicillin-resistant Staphylococcus aureus (MRSA), Vancomycin-intermediate Staphylococcus aureus (VISA), Vancomycin resistant Staphylococcus aureus (VRSA), Staphylococcus epidermidis (S. epidermidis), Clostridium Tetani, Bordetella pertussis, Bordetella paratussis, Mycobacterium, Francisella tularensis, Toxoplasma gondii, Candida (C. albicans, C. glabrata, C. parapsilosis, C. tropicalis, C. krusei and C. lusitaniae) and/or any other infectious diseases, disorders or syndromes.

[0707] Various toxins may be treated with the pharmaceutical compositions, viral particles, of the present disclosure. Non-limited examples of toxins include Ricin, Bacillus anthracis, Shiga toxin and Shiga-like toxin, Botulinum toxins.

[0708] Various tropical diseases may be treated with pharmaceutical compositions, viral particles, of the present disclosure. Non-limited examples of tropical diseases include Chikungunya fever, Dengue fever, Chagas disease, Rabies, Malaria, Ebola virus, Marburg virus, West Nile Virus, Yellow Fever, Japanese encephalitis virus, St. Louis encephalitis virus.

[0709] Various foodborne illnesses and gastroenteritis may be treated with pharmaceutical compositions, viral particles, of the present disclosure. Non-limited examples of foodborne illnesses and gastroenteritis include Rotavirus, Norwalk virus (Norovirus), Campylobacter jejuni, Clostridium difficile, Entamoeba histolytica, Helicobacter pyroli, Enterotoxin B of Staphylococcus aureus, Hepatitis A virus (HAV), Hepatitis E, Listeria monocytogenes, Salmonella, Clostridium perfringens, and Salmonella.

[0710] Various infectious agents may be treated with pharmaceutical compositions, viral particles, of the present disclosure. Non-limited examples of infectious agents include adenoviruses, Anaplasma phagocytophilium, Ascaris lumbricoides, Bacillus anthracis, Bacillus cereus, Bacteroides sp, Barmah Forest virus, Bartonella bacilliformis, Bartonella henselae, Bartonella quintana, beta-toxin of Clostridium perfringens, Bordetella pertussis, Bordetella parapertussis, Borrelia burgdorferi, Borrelia tutyctutotol, Borrelia recurrentis, Borrelia sp., Botulinum toxin, Brucella sp., Burkholderia pseudomallei, California encephalitis virus, Campylobacter, Candida albicans, chikungunya virus, Chlamydia psittaci, Chlamydia trachomatis, Clonorchis sinensis, Clostridium difficile bacteria, Clostridium tetani, Colorado tick fever virus, Corynebacterium diphtheriae, Corynebacterium minutissimum, Coxiella burnetii, coxsackie A, coxsackie B, Crimean-Congo hemorrhagic fever virus, cytomegalovirus, dengue virus, Eastern Equine encephalitis virus, Ebola viruses, echovirus, Ehrlichia chaffeensis., Ehrlichia equi., Ehrlichia sp., Entamoeba histolytica, Enterobacter.sp Enterococcus feacalis, Enterovirus 71, Epstein-Barr virus (EBV), Erysipelothrix rhusiopathiae, Escherichia Flavivirus, Fusobacterium necrophorum, Gardnerella vaginalis, Group B streptococcus, Haemophilus aegyptius, Haemophilus thicreyi, Haemophilus infitienzae, hantavirus, Helicobacter pylori, Hepatitis A, Hepatitis B, Hepatitis C, Hepatitis D, Hepatitis E, herpes simplex virus 1 and 2, human herpes virus 6, human herpes Virus 8, human immunodeficiency. virus 1 and 2, human T-cell leukemia viruses I and II, influenza viruses (A, B, C), Jamestown Canyon virus, Japanese encephalitis antigenic, Japanese encephalitis virus, John Cunningham virus, juninvirus, Kaposi's Sarcoma-associated Herpes Virus OK SEW), Klebsiella granulomatis, Klebsiella sp., Kyasanur Forest Disease virus, La Crosse virus, Lassavirus, Legionella pneumophila, Leptospira interrogans, Listeria monocytogenes, lymphocytic choriomeningitis virus, lyssavirus, Machupovirus, Marburg virus, measles virus, MFRS coronavirus (MFRS-CoV), Micrococcus sedentarius, Mobiluncus sp., Molluscipoxvirus, Moraxella catarrhalis, Rubeola virus, Mumpsvirus, Mycobacterium leprae, Mycobacterium tuberculosis. Mycobacterium ulcerans, Mycoplasma genitalium, Mycoplasma sp, Nairovirus, Neisseria gonorrhoeae, Neisseria meningitidis, Nocardia, Norwalk virus, norovirus, Omsk hemorrhagic fever virus, papilloma virus, parainfluenza viruses 1-3, parapoxvirus, parvovirus B19, Peptostreptococccus sp., Plasmodium sp., polioviruses types 1, 0.11, and HI, Proteus sp., Pseudomonas aeruginosa, Pseudomonas pseudomallei, Pseudomonas sp., rabies virus, respiratory syncytial virus, ricin toxin, Rickettsia australis, Rickettsia conori, Rickettsia honei, Rickettsia prowazekii, Ross River Virus, rotavirus, rubellavirus, Saint Louis encephalitis, Salmonella Typhi, Sarcoptes scabiei, SARS-associated coronavirus (SARS-CoV), Serratia sp., Shiga toxin and Shiga-like toxin, Shigella sp., Sin Nombre Virus, Snowshoe hare virus, Staphylococcus aureus, Staphylococcus epidermidis, Streptobacillus moniliformis, Streptoccoccus pneumoniae, Streptococcus agalactiae, Streptococcus agalactiae, Streptococcus group A-H, Streptococcus pneumoniae, Streptococcus pyogenes, Treponema pallidum subsp. Pallidum, Treponema pallidum var. carateum, Treponema pallidum var. endemicum, Tropheryma Ureaplasma urealyticum, Varicella-Zoster virus, variola virus, Vibrio cholerae, West Nile virus, yellow fever virus, Yersinia enterocolitica, Yersinia pestis, and Zika virus.

[0711] Various rare diseases may be treated with pharmaceutical compositions, viral particles, of the present disclosure. As used herein, the term “rare disease” refers to any disease that affects a small percentage of the population. As a non-limiting example, the rare disease may be Acrocephalosyndactylia, Acrodermatitis, Addison Disease, Adie Syndrome, Alagille Syndrome, Amylose, Amyotrophic Lateral Sclerosis, Angelman Syndrome, Angiolymphoid Hyperplasia with Eosinophilia, Arnold-Chiari Malformation, Arthritis, Juvenile Rheumatoid, Asperger Syndrome, Bardet-Biedl Syndrome, Barrett Esophagus, Beckwith-Wiedemann Syndrome, Behcet Syndrome, Bloom Syndrome, Bowen's Disease, Brachial Plexus Neuropathies, Brown-Sequard Syndrome, Budd-Chiari Syndrome, Burkitt Lymphoma, Carcinoma 256, Walker, Caroli Disease, Charcot-Marie-Tooth Disease, Chediak-Higashi Syndrome, Chiari-Frommel Syndrome, Chondrodysplasia Punctata, Colonic Pseudo-Obstruction, Colorectal Neoplasms, Hereditary Nonpolyposis, Craniofacial Dysostosis, Creutzfeldt-Jakob Syndrome, Crohn Disease, Cushing Syndrome, Cystic Fibrosis, Dandy-Walker Syndrome, De Lange Syndrome, Dementia, Vascular, Dermatitis Herpetiformis, DiGeorge Syndrome, Diffuse Cerebral Sclerosis of Schilder, Duane Retraction Syndrome, Dupuytren Contracture, Ebstein Anomaly, Eisenmenger Complex, Ellis-Van Creveld Syndrome, Encephalitis, Enchondromatosis, Epidermal Necrolysis, Toxic, Facial Hemiatrophy, Factor XII Deficiency, Fanconi Anemia, Felty's Syndrome, Fibrous Dysplasia, Polyostotic, Fox-Fordyce Disease, Friedreich Ataxia, Fusobacterium, Gardner Syndrome, Gaucher Disease, Gerstmann Syndrome, Giant Lymph Node Hyperplasia, Glycogen Storage Disease Type I, Glycogen Storage Disease Type II, Glycogen Storage Disease Type IV, Glycogen Storage Disease Type V, Glycogen Storage Disease Type VII, Goldenhar Syndrome, Guillain-Barre Syndrome, Hallermann's Syndrome, Hamartoma Syndrome, Multiple, Hartnup Disease, Hepatolenticular Degeneration, Hepatolenticular Degeneration, Hereditary Sensory and Motor Neuropathy, Hirschsprung Disease, Histiocytic Necrotizing Lymphadenitis, Histiocytosis, Langerhans-Cell, Hodgkin Disease, Horner Syndrome, Huntington Disease, Hyperaldosteronism, Hyperhidrosis, Hyperostosis, Diffuse Idiopathic Skeletal, Hypopituitarism, Inappropriate ADH Syndrome, Intestinal Polyps, Isaacs Syndrome, Kartagener Syndrome, Kearns-Sayre Syndrome, Klippel-Feil Syndrome, Klippel-Trenaunay-Weber Syndrome, Kluver-Bucy Syndrome, Korsakoff Syndrome, Lafora Disease, Lambert-Eaton Myasthenic Syndrome, Landau Kleffner Syndrome, Langer-Giedion Syndrome, Leigh Disease, Lesch-Nyhan Syndrome, Leukodystrophy, Globoid Cell, Li-Fraumeni Syndrome, Long Q T Syndrome, Machado-Joseph Disease, Mallory-Weiss Syndrome, Marek Disease, Marfan Syndrome, Meckel Diverticulum, Meige Syndrome, Melkersson-Rosenthal Syndrome, Meniere Disease, Mikulicz' Disease, Miller Fisher Syndrome, Mobius Syndrome, Moyamoya Disease, Mucocutaneous Lymph Node Syndrome, Mucopolysaccharidosis I, Mucopolysaccharidosis II, Mucopolysaccharidosis Mucopolysaccharidosis IV, Mucopolysaccharidosis VI, Multiple Endocrine Neoplasia Type 1, Munchausen Syndrome by Proxy, Muscular Atrophy, Spinal, Narcolepsy, Neuroaxonal Dystrophies, Neuromyelitis Optica, Neuronal Ceroid-Lipofuscinoses, Niemann-Pick Diseases, Noonan Syndrome, Optic Atrophies, Hereditary, Osteitis Deformans, Osteochondritis, Osteochondrodysplasias, Osteolysis, Essential, Paget Disease Extramammary, Paget's Disease, Mammary, Panniculitis, Nodular Nonsuppurative, Papillon-Lefevre Disease, Paralysis, Pelizaeus-Merzbacher Disease, Pemphigus, Benign Familial, Penile Induration, Pericarditis, Constrictive, Peroxisomal Disorders, Peutz-Jeghers Syndrome, Pick Disease of the Brain, Pierre Robin Syndrome, Pigmentation Disorders, Pityriasis Lichenoides, Polycystic Ovary Syndrome, Polyendocrinopathies, Autoimmune, Prader-Willi Syndrome, Pupil Disorders, Rett Syndrome, Reye Syndrome, Rubinstein-Taybi Syndrome, Sandhoff Disease, Sarcoma, Ewing's, Schnitzler Syndrome, Sjogren's Syndrome, Sjogren-Larsson Syndrome, Smith-Lemli-Opitz Syndrome, Spinal Muscular Atrophies of Childhood, Sturge-Weber Syndrome, Sweating, Gustatory, Takayasu Arteritis, Tangier Disease, Tay-Sachs Disease, Thromboangiitis Obliterans, Thyroiditis, Autoimmune, Tietze's Syndrome, Togaviridae Infections, Tolosa-Ilunt Syndrome, Tourette Syndrome, Uveomeningoencephalitic Syndrome, Waardenburg's Syndrome, Wegener Granulomatosis, Weil Disease, Werner Syndrome, Williams Syndrome, Wilms Tumor, Wolff-Parkinson-White Syndrome, Wolfram Syndrome, Wolman Disease, Zellweger Syndrome, Zollinger-Ellison Syndrome, and von Willebrand Diseases.

[0712] Various autoimmune diseases and autoimmune-related diseases may be treated with pharmaceutical compositions, viral particles, of the present disclosure. As used herein, the term “autoimmune disease” refers to a disease in which the body produces antibodies that attack its own tissues. As a non-limiting example, the autoimmune disease may be Acute Disseminated Encephalomyelitis (ADEM), Acute necrotizing hemorrhagic leukoencephalitis, Addison's, disease, Agammaglobulinemia, Alopecia areata, Amyloidosis, Ankylosing spondylitis, Anti-GBM/Anti-TBM nephritis, Antiphospholipid syndrome (APS), Autoimmune angioedema, Autoimmune aplastic anemia, Autoimmune dysautonomia, Autoimmune hepatitis, Autoimmune hyperlipidemia, Autoimmune immunodeficiency, Autoimmune inner ear disease (AIED), Autoimmune myocarditis, Autoimmune oophoritis, Autoimmune pancreatitis, Autoimmune retinopathy, Autoimmune thrombocytopenic purpura (ATP), Autoimmune thyroid disease, Autoimmune urticaria, Axonal & neuronal neuropathies, Mc) disease, Behcet's disease, Bullous pemphigoid, Cardiomyopathy, Castleman disease, Celiac disease, Chagas disease, Chronic fatigue syndrome**, Chronic inflammatory demyelinating polyneuropathy (CIDP), Chronic recurrent multifocal ostomyelitis (CRMO), Churg-Strauss syndrome, Cicatricial pemphigoid/benign mucosal pemphigoid, Crohn's disease, Cogans syndrome, Cold agglutinin disease, Congenital heart block, Coxsackie myocarditis, CREST disease, Essential mixed cryoglobulinemia, Demyelinating neuropathies, Dermatitis herpetiformis, Dermatomyositis, Devic's disease (neuromyelitis optica), Discoid lupus, Dressler's syndrome, Endometriosis, Eosinophilic esophagitis, Eosinophilic fasciitis, Erythema nodosum, Experimental allergic encephalomyelitis, Evans syndrome, Fibromyalgia**, Fibrosing alveolitis, Giant cell arteritis (temporal arteritis), Giant cell myocarditis, Glomerulonephritis, Goodpasture's syndrome, Granulomatosis with Polyangiitis (GPA) (formerly called Wegener's Granulomatosis), Graves' disease, Guillain-Barre syndrome, Hashimoto's encephalitis, Hashimoto's thyroiditis, Hemolytic anemia, Henoch-Schonlein purpura, Herpes gestationis, Hypogammaglobulinemia, Idiopathic thrombocytopenic purpura (ITP), IgA nephropathy, IgG4-related sclerosing disease, Immunoregulatory lipoproteins, Inclusion body myositis, Interstitial cystitis, Juvenile arthritis, Juvenile diabetes (Type 1 diabetes), Juvenile myositis, Kawasaki syndrome, Lambert-Eaton syndrome, Leukocytoclastic vasculitis, Lichen planus, Lichen sclerosus, Ligneous conjunctivitis, Linear IgA disease (LAD), Lupus (SLE), Lyme disease, chronic, Meniere's disease, Microscopic polyangiitis, Mixed connective tissue disease (MCTD), Mooren's ulcer, Mucha-Habermann disease, Multiple sclerosis, Myasthenia gravis, Myositis, Narcolepsy, Neuromyelitis optica (Devic's), Neutropenia, Ocular cicatricial pemphigoid, Optic neuritis, Palindromic rheumatism, PANDAS (Pediatric Autoimmune Neuropsychiatric Disorders Associated with Streptococcus), Paraneoplastic cerebellar degeneration, Paroxysmal nocturnal hemoglobinuria (PNH), Parry Romberg syndrome, Parsonnage-Turner syndrome, Pars planitis (peripheral uveitis), Pemphigus, Peripheral neuropathy, Perivenous encephalomyelitis, Pernicious anemia, POEMS syndrome, Polyarteritis nodosa, Type I, II, & III autoimmune polyglandular syndromes, Polymyalgia rheumatica, Polymyositis, Postmyocardial infarction syndrome, Postpericardiotomy syndrome, Progesterone dermatitis, Primary biliary cirrhosis, Primary sclerosing cholangitis, Psoriasis, Psoriatic arthritis, idiopathic pulmonary fibrosis, Pyoderma gangrenosum, Pure red cell aplasia, Raynauds phenomenon, Reactive Arthritis, Reflex sympathetic dystrophy, Reiter's syndrome, Relapsing polychondritis, Restless legs syndrome, Retroperitoneal fibrosis, Rheumatic fever, Rheumatoid arthritis, Sarcoidosis, Schmidt syndrome, Scleritis, Scleroderma, Sjogren's syndrome, Sperm & testicular autoimmunity, Stiff person syndrome, Subacute bacterial endocarditis (SBE), Susac's syndrome, Sympathetic ophthalmia, Takayasu's arteritis, Temporal arteritis/Giant cell arteritis, Thrombocytopenic purpura (TTP), Tolosa-Hunt syndrome, Transverse myelitis, Ulcerative colitis, Undifferentiated connective tissue disease (UCTD), Uveitis, Vasculitis, Vesiculobullous dermatosis, Vitiligo, and Wegener's granulomatosis (now termed Granulomatosis with Polyangiitis (GPA).

[0713] Various kidney diseases may be treated with pharmaceutical compositions, viral particles, of the present disclosure. As a non-limiting example, the kidney disease Abderhal den-Kaufmann-Lignac syndrome (Nephropathic Cystinosis), Abdominal Compartment Syndrome, Acute Kidney Failure/Acute Kidney Injury, Acute Lobar Nephronia, Acute Phosphate Nephropathy, Acute Tubular Necrosis, Adenine Phosphofibosyltransferase Deficiency, Adenovirus Nephritis, Alport Syndrome, Amyloidosis, ANCA Vasculitis Related to Endocarditis and Other Infections, Angiomyolipoma, Analgesic Nephropathy, Anorexia Nervosa and Kidney Disease, Angiotensin Antibodies and Focal Segmental Glomerulosclerosis, Antiphospholipid Syndrome, Anti-TNF-α. Therapy-related Glomerulonephritis, APOL1 Mutations, Apparent Mineralocorticoid Excess Syndrome, Aristolochic Acid Nephropathy, Chinese Herbal Nephropathy, Balkan Endemic Nephropathy, Bartter Syndrome, Beeturia, 13-Thalassemia Renal Disease, Bile Cast Nephropathy, BK Polyoma Virus Nephropathy in the Native Kidney, Bladder Rupture, Bladder Sphincter Dyssynergia, Bladder Tamponade, Border-Crossers' Nephropathy, Bourbon Virus and Acute Kidney Injury, Burnt Sugarcane Harvesting and Acute Renal Dysfunction, Byetta and Renal Failure, Clq Nephropathy, Cannabinoid Hyperemesis Acute Renal Failure, Cardiorenal syndrome, Carfilzomib-Induced Renal Injury, CFHR5 nephropathy, Charcot-Marie-Tooth Disease with Glomerulopathy, Cherry Concentrate and Acute Kidney Injury, Cholesterol Emboli, Churg-Strauss syndrome, Chyluria, Colistin Nephrotoxicity, Collagenofibrotic Glomerulopathy, Collapsing Glomerulopathy, Collapsing Glomerulopathy Related to CMV, Congenital Nephrotic Syndrome, Conorenal syndrome (Mainzer-Saldino Syndrome or Saldino-Mainzer Disease), Contrast Nephropathy, Copper Sulpfate Intoxication, Cortical Necrosis, Crizotinib-related Acute Kidney Injury, Cryoglobuinemia, Crystalglobulin-Induced Nephropathy, Crystal-Induced Acute Kidney injury, Cystic Kidney Disease, Acquired, Cystinuria, Dasatinib-Induced Nephrotic-Range Proteinuria, Dense Deposit Disease (MPGN Type 2), Dent Disease (X-linked Recessive Nephrolithiasis), Dialysis Disequilibrium Syndrome, Diabetes and Diabetic Kidney Disease, Diabetes insipidus, Dietary Supplements and Renal Failure, Drugs of Abuse and Kidney Disease, Duplicated Ureter, EAST syndrome, Ebola and the Kidney, Ectopic Kidney, Ectopic Ureter, Edema, Swelling, Erdheim-Chester Disease, Fabry's Disease, Familial Hypocalciuric Hypercalcemia, Fanconi Syndrome, Fraser syndrome, Fibronectin Glomerulopathy, Fibrillary Glomerulonephritis and Iminunotactoid Glomerulopathy, Fraley syndrome, Focal Segmental Glomerulosclerosis, Focal Sclerosis, Focal Glomerulosclerosis, Galloway Mowat syndrome, Giant Cell (Temporal) Arteritis with Kidney Involvement, Gestational Hypertension, Gitelman Syndrome, Glomerular Diseases, Glomerular Tubular Reflux, Glycosuria, Goodpasture Syndrome, Hair Dye ingestion and Acute Kidney Injury, Hantavirus Infection Podocytopathy, Hematuria (Blood in Urine), Hemolytic Uremic Syndrome (HUS), Atypical Hemolytic Uremic Syndrome (aHUS), Hemophagocytic Syndrome, Hemorrhagic Cystitis, Hemorrhagic Fever with Renal Syndrome (HFRS, Hantavirus Renal Disease, Korean Hemorrhagic Fever, Epidemic Hemorrhagic Fever, Nephropathis Epidemica), Hemosiderosis related to Paroxysmal Nocturnal Hemoglobinuria and Hemolytic Anemia, Hepatic Glomerulopathy, Hepatic Veno-Occlusive Disease, Sinusoidal Obstruction Syndrome, Hepatitis C-Associated Renal Disease, Hepatorenal Syndrome, Herbal Supplements and Kidney Disease, High Blood Pressure and Kidney Disease, HIV-Associated Nephropathy (HIVAN), Horseshoe Kidney (Renal Fusion), Hunner's Ulcer, Hyperaldosteronism, Hypercalcemia, Hyperkalemia, Hypermagnesemia, Hypernatremia, Hyperoxaluria, Hyperphosphatemia, Hypocalcemia, Hypokalemia, Hypokalemia-induced renal dysfunction, Hypokalemic Periodic Paralysis, Hypomagnesemia, Hyponatremia, Hypophosphatemia, IgA Nephropathy, IgG4 Nephropathy, Interstitial Cystitis, Painful Bladder Syndrome (Questionnaire), Interstitial Nephritis, Ivemark's syndrome, Ketamine-Associated Bladder Dysfunction, Kidney Stones, Nephrolithiasis, Kombucha Tea Toxicity, Lead Nephropathy and Lead-Related Nephrotoxicity, Leptospirosis Renal Disease, Light Chain Deposition Disease, Monoclonal Immunoglobulin Deposition Disease, Liddle Syndrome, Lightwood-Albright Syndrome, Lipoprotein Glomerulopathy, Lithium Nephrotoxicity, LMX1B Mutations Cause Hereditary FSGS, Loin Pain Hematuria, Lupus, Systemic Lupus Erythematosis, Lupus Kidney Disease, Lupus Nephritis, Lupus Nephritis with Antineutrophil Cytoplasmic Antibody Seropositivity, Lyme Disease-Associated Glomerulonephritis, Malarial Nephropathy, Malignancy-Associated Renal Disease, Malignant Hypertension, Malakoplakia, Meatal Stenosis, Medullary Cystic Kidney Disease, Medullary Sponge Kidney, Megaureter, Melamine Toxicity and the Kidney, Membranoproliferative Glomerulonephritis, Membranous Nephropathy, MesoAmerican Nephropathy, Metabolic Acidosis, Metabolic Alkalosis, Methotrexate-related Renal Failure, Microscopic Polyangiitis, Milk-alkalai syndrome, Minimal Change Disease, MDMA (Molly; Ecstacy; 3,4-Methylenedioxymethamphetamine) and Kidney Failure, Multicystic dysplastic kidney, Multiple Myeloma, Myeloproliferative Neoplasms and Glomerulopathy, Nail-patella Syndrome, Nephrocalcinosis, Nephrogenic Systemic Fibrosis, Nephroptosis (Floating Kidney, Renal Ptosis), Nephrotic Syndrome, Neurogenic Bladder, Nodular Glomerulosclerosis, Non-Gonococcal Urethritis, Nutcracker syndrome, Orofaciodigital Syndrome, Orotic Aciduria, Orthostatic Hypotension, Orthostatic Proteinuria, Osmotic Diuresis, Ovarian Hyperstimulation Syndrome, Page Kidney, Papillary Necrosis, Papillorenal Syndrome (Renal-Coloboma Syndrome, Isolated Renal Hypoplasia), Parvovirus B19 and the Kidney. The Peritoneal-Renal Syndrome, Posterior Urethral Valve, Post-infectious Glomerulonephritis, Post-streptococcal Glomerulonephritis, Polyarteritis Nodosa, Polycystic Kidney Disease, Posterior Urethral Valves, Preeclampsia, Propofol infusion syndrome, Proliferative Glomerulonephritis with Monoclonal IgG Deposits (Nasr Disease), Propolis (Honeybee Resin) Related Renal Failure, Proteinuria (Protein in Urine), Pseudohyperaldosteronism, Pseudohypobicarbonatemia, Pseudohypoparathyroidism, Pulmonary-Renal Syndrome, Pyelonephritis (Kidney Infection), Pyonephrosis, Radiation Nephropathy, Ranolazine and the Kidney, Refeeding syndrome, Reflux Nephropathy, Rapidly Progressive Glomerulonephritis, Renal Abscess, Peripnephric Abscess, Renal Agenesis, Renal Arcuate Vein Microthrombi-Associated Acute Kidney Injury, Renal Artery Aneurysm, Renal Artery Stenosis, Renal Cell Cancer, Renal Cyst, Renal Hypouricemia with Exercise-induced Acute Renal Failure, Renal Infarction, Renal Osteodystrophy, Renal Tubular Acidosis, Renin Secreting Tumors (Juxtaglomerular Cell Tumor), Reset Osmostat, Retrocaval Ureter, Retroperitoneal Fibrosis, Rhabdomyolysis, Rhabdomyolysis related to Bariatric Sugery, Rheumatoid Arthritis-Associated Renal Disease, Sarcoidosis Renal Disease, Salt Wasting, Renal and Cerebral, Schistosomiasis and Glomerular Disease, Schimke immuno-osseous dysplasia, Scleroderma Renal Crisis, Serpentine Fibula-Polycystic Kidney Syndrome, Exner Syndrome, Sickle Cell Nephropathy, Silica Exposure and Chronic Kidney Disease, Sri Lankan Farmers' Kidney Disease, Sjögren's Syndrome and Renal Disease, Synthetic Cannabinoid Use and Acute Kidney Injury, Kidney Disease Following Hematopoietic Cell Transplantation, Kidney Disease Related to Stem Cell Transplantation, Thin Basement Membrane Disease, Benign Familial Hematuria, Trigonitis, Tuberculosis, Genitourinary, Tuberous Sclerosis, Tubular Dysgenesis, Immune Complex Tubulointerstitial Nephritis Due to Autoantibodies to the Proximal Tubule Brush Border, Tumor Lysis Syndrome, Uremia, Uremic Optic Neuropathy, Ureteritis Cystica, Ureterocele, Urethral Caruncle, Urethral Stricture, Urinary incontinence, Urinary Tract Infection, Urinary Tract Obstruction, Vesicointestinal Fistula, Vesicoureteral Reflux, Volatile Anesthetics and Acute Kidney Injury, Von Hippel-Lindau Disease, Waldenstrom's Macroglobulinemic Glomerulonephritis, Warfarin-Related Nephropathy, Wasp Stings and Acute Kidney Injury, Wegener's Granulomatosis, Granulomatosis with Polyangiitis, West Nile Virus and Chronic Kidney Disease, and Wunderlich syndrome.

[0714] Various cardiovascular diseases may be treated with pharmaceutical compositions, viral particles, of the present disclosure. As a non-limiting example, the cardiovascular disease may be Ischemic heart disease also known as coronary artery disease, cerebrovascular disease (Stroke), Peripheral vascular disease, Heart failure, Rheumatic heart disease, and Congenital heart disease.

[0715] Various antibody deficiencies may be treated with pharmaceutical compositions, viral particles, of the present disclosure. As a non-limiting example, the antibody deficiencies may be X-Linked Agammaglobulinemia (XLA), Autosomal Recessive Agammaglobulinemia (ARA), Common Variable Immune Deficiency (LVID), IgG (IgGE IgG2, IgG3 and IgG4) Subclass Deficiency, Selective IgA Deficiency, Specific Antibody Deficiency (SAD), Transient Hypogammaglobulinemia of Infancy, Antibody Deficiency with Normal or Elevated Immunoglobulins, Selective IgM Deficiency, Immunodeficiency with Thymoma (Good's Syndrome), Transcobalamin II Deficiency, Warts, Hypogammaglobulinemia, Infection, Myelokathexis (WHIM) Syndrome, Drug-Induced Antibody Deficiency, Kappa Chain Deficiency, Heavy Chain Deficiencies, Post-Meiotic Segregation (PMS2) Disorder, and Unspecified Hypogammaglobulinemia.

[0716] Various ocular diseases may be treated with pharmaceutical compositions, viral particles, of the present disclosure. As a non-limiting example, the ocular disease may be thyroid eye disease (TED), Graves' disease (GD) and orbitopathy, Retina Degeneration, Cataract, optic atrophy, macular degeneration, Leber congenital amaurosis, retinal degeneration, cone-rod dystrophy, Usher syndrome, leopard syndrome, photophobia, and photoaversion.

[0717] Various neurological diseases may be treated with pharmaceutical compositions, viral particles, of the present disclosure. As a non-limiting example, the neurological disease may be Absence of the Septum Pellucidum, Acid Lipase Disease, Acid Maltase Deficiency, Acquired Epileptiform Aphasia, Acute Disseminated Encephalomyelitis, Attention Deficit-Hyperactivity Disorder (ADHD), Adie's Pupil, Adie's Syndrome, Adrenoleukodystrophy, Agenesis of the Corpus Callosum, Agnosia, Aicardi Syndrome, Aicardi-Goutieres Syndrome Disorder, AIDS Neurological Complications, Alexander Disease, Alpers' Disease, Alternating Hemiplegia, Alzheimer's Disease, Amyotrophic Lateral Sclerosis (ALS), Anencephaly, Aneurysm, Angelman Syndrome, Angiomatosis, Anoxia, Antiphospholipid Syndrome, Aphasia, Apraxia, Arachnoid Cysts, Arachnoiditis, Arnold-Chiari Malformation, Arteriovenous Malformation, Asperger Syndrome, Ataxia, Ataxia Telangiectasia, Ataxias and Cerebellar or Spinocerebellar Degeneration, Atrial Fibrillation and Stroke, Attention Deficit-Hyperactivity Disorder, Autism Spectrum Disorder, Autonomic Dysfunction, Back Pain, Barth Syndrome, Batten Disease, Becker's Myotonia, Behcet's Disease, Bell's Palsy, Benign Essential Blepharospasm, Benign Focal Amyotrophy, Benign Intracranial Hypertension, Bernhardt-Roth Syndrome, Binswanger's Disease, Blepharospasm, Bloch-Sulzberger Syndrome, Brachial Plexus Birth Injuries, Brachial Plexus Injuries, Bradbury-Eggleston Syndrome, Brain and Spinal Tumors, Brain Aneurysm, Brain injury, Brown-Sequard Syndrome, Bulbospinal Muscular Atrophy, Cerebral Autosomal Dominant Arteriopathy with Sub-cortical Infarcts and Leukoencephalopathy (CADASIL), Canavan Disease, Carpal Tunnel Syndrome, Causalgia, Cavernomas, Cavernous Angioma, Cavernous Malformation, Central Cervical Cord Syndrome, Central Cord Syndrome, Central Pain Syndrome, Central Pontine Myelinolysis, Cephalic Disorders, Ceramidase Deficiency, Cerebellar Degeneration, Cerebellar Hypoplasia, Cerebral Aneurysms, Cerebral Arteriosclerosis, Cerebral Atrophy, Cerebral Beriberi, Cerebral Cavernous Malformation, Cerebral Gigantism, Cerebral Hypoxia, Cerebral Palsy, Cerebro-Oculo-Facio-Skeletal Syndrome (COFS), Charcot-Marie-Tooth Disease, Chiari Malformation, Cholesterol Ester Storage Disease, Chorea, Choreoacanthocytosis, Chronic Inflammatory Demyelinating Polyneuropathy (CIDP), Chronic Orthostatic Intolerance, Chronic Pain, Cockayne Syndrome Type II, Coffin Lowry Syndrome, Colpocephaly, Coma, Complex Regional Pain Syndrome, Congenital Facial Diplegia, Congenital Myasthenia, Congenital Myopathy, Congenital Vascular Cavernous Malformations, Corticobasal Degeneration, Cranial Arteritis, Craniosynostosis, Cree encephalitis, Creutzfeldt Jakob Disease, Cumulative Trauma Disorders, Cushing's Syndrome, Cytomegalic Inclusion Body Disease, Cytomegalovirus Infection, Dancing-Eyes-Dancing Feet Syndrome, Dandy-Walker Syndrome, Dawson Disease, De Morsier's Syndrome, Dejerine-Klumpke Palsy, Dementia, Dementia-Multi-Infarct Dementia-Semantic, Dementia-Subcortical, Dementia With Lewy Bodies, Dentate Cerebellar Ataxia, Dentatorubral Atrophy, Dertnatomyositis, Developmental Dyspraxia, Devic's Syndrome, Diabetic Neuropathy, Diffuse Sclerosis, Dravet Syndrome, Dysautonomia, Dysgraphia, Dyslexia, Dysphagia, Dyspraxia, Dyssynergia Cerebeillaris Myoclonica, Dyssynergia Cerebellaris Progressiva, Dystonias, Early Infantile Epileptic Encephalopathy, Empty Sella Syndrome, Encephalitis, Encephalitis Lethargica, Encephaloceles, Encephalopathy, Encephalopathy (familial infantile), Encephalotrigeminal Angiomatosis, Epilepsy, Epileptic Hemiplegia, Erb's Palsy, Erb-Duchenne and Dejerine-Klumpke Palsies, Essential Tremor, Extrapontine Myelinolysis, Fabry Disease, Fahr's Syndrome, Fainting, Familial Dysautonomia, Familial Hemangioma, Familial Idiopathic Basal Ganglia Calcification, Familial Periodic Paralyses, Familial Spastic Paralysis, Farber's Disease, Febrile Seizures, Fibromuscular Dysplasia, Fisher Syndrome, Floppy Infant Syndrome, Foot Drop, Friedreich's Ataxia, Frontotemporal Dementia, Gaucher Disease, Generalized Gangliosidoses, Gerstmann's Syndrome, Gerstmann-Straussler-Scheinker Disease, Giant Axonal Neuropathy, Giant Cell Arteritis, Giant Cell Inclusion Disease, Globoid Cell Leukodystrophy, Glossopharyngeal Neuralgia, Glycogen Storage Disease, Guillain-Barre Syndrome, Hallervorden-Spatz Disease, Head Injury, Headache, Hemicrania Continua, Hemifacial Spasm, Efemiplegia. Alterans, Hereditary Neuropathies, Hereditary Spastic Paraplegia, fIeredopathia Atactica Pollyneuritiformis, Herpes Zoster, Herpes Zoster Oticus, Birayam a Syndrome, Holmes-Adie syndrome, Holoprosencephaly, HTLV-1 Associated Myelopathy, Hughes Syndrome, Huntington's Disease, Hydranencephaly, Hydrocephalus, Hydrocephalus-Normal Pressure, Hydromyelia, Hypercortisolism, Hypersomnia, Hypertonia, Hypotonia, Hypoxia, Immunes Mediated Encephalomyelitis, Inclusion Body Myositis, incontinentia Pigmenti, Infantile Hypotonia, Infantile Neuroaxonal Dystrophy, Infantile Phytanic Acid Storage Disease, Infantile Refsum Disease, Infantile Spasms, Inflammatory Myopathies, Iniencephaly, Intestinal Lipodystrophy, Intracranial Cysts, Intracranial Hypertension, Isaacs' Syndrome, Joubert Syndrome, Kearns-Sayre Syndrome, Kennedy's Disease, Kinsbourne syndrome, Kleine-Levin Syndrome, Klippel-Feil Syndrome, Klippel-Trenaunay Syndrome (KTS), Kitiver-Bucy Syndrome, Korsakoffs Amnesic Syndrome, Krabbe Disease, Kugelberg-Welander Disease, Kuru, Lambert-Eaton Myasthenic Syndrome, Landau-Kleffner Syndrome, Lateral Femoral Cutaneous Nerve Entrapment, Lateral Medullary Syndrome, Learning Disabilities, Leigh's Disease, Lennox-Gastaut Syndrome, Lesch-Nyhan Syndrome, Leukodystrophy, Levine-Critchley Syndrome, Lewy Body Dementia, Lipid Storage Diseases, Lipoid Proteinosis, Lissencephaly, Locked-In Syndrome, Lou Gehrig's Disease, Lupus-Neurological Sequelae, Lyme Disease-Neurological Complications, Machado-Joseph Disease, Macrencephaly, Megalencephaly, Melkersson-Rosenthal Syndrome, Meningitis, Meningitis and Encephalitis, Menkes Disease, Meralgia Paresthetica, Metachromatic Leukodystrophy, Microcephaly, Migraine, Miller Fisher Syndrome, Mini Stroke, Mitochondrial Myopathy, Moebius Syndrome, Monomelic Amyotrophy, Motor Neuron Diseases, Moyamoya Disease, Mucolipidoses, Mucopolysaccharidoses, Multi-Infarct Dementia, Multifocal Motor Neuropathy, Multiple Sclerosis, Multiple System Atrophy, Multiple System Atrophy with Orthostatic Hypotension, Muscular Dystrophy, Myasthenia m Congenital, Myasthenia Gravis, Myelinoclastic Diffuse Sclerosis, Myoclonic Encephalopathy of Infants, Myoclonus, Myopathy, Myopathy-Congenital, Myopathy-Thyrotoxic, Myotonia, Myotonia Congenita, Narcolepsy, Neuroacanthocytosis, Neurodegeneration with Brain Iron Accumulation, Neurofibromatosis, Neuroleptic Malignant Syndrome, Neurological Complications of AIDS, Neurological Complications of Lyme Disease, Neurological Consequences of Cytomegalovirus Infection, Neurological Manifestations of Pompe Disease, Neurological Sequelae Of Lupus, Neuromyelitis Optica, Neuromyotonia, Neuronal Ceroid Lipofuscinosis, Neuronal Migration Disorders, Neuropathy-Hereditary, Neurosarcoidosis, Neurosyphilis, Neurotoxicity, Nevus Cavernosus, Niemann-Pick Disease, O'Sullivan-McLeod Syndrome, Occipital Neuralgia, Ohtahara Syndrome, Olivopontocerebellar Atrophy, Opsoclonus Myoclonus, Orthostatic Hypotension, Overuse Syndrome, Pain-Chronic, Pantothenate Kinase-Associated Neurodegeneration, Paraneoplastic Syndromes, Paresthesia, Parkinson's Disease, Paroxysmal Choreoathetosis, Paroxysmal Hemicrania, Parry-Romberg, Pelizaeus-Merzbacher Disease, Pena Shokeir II Syndrome, Perineural Cysts, Periodic Paralyses, Peripheral Neuropathy, Periventricular Leukomalacia, Persistent Vegetative State, Pervasive Developmental Disorders, Phytanic Acid Storage Disease, Pick's Disease, Pinched Nerve, Piriformis Syndrome, Pituitary Tumors, Polymyositis, Pompe Disease, Porencephaly, Post-Polio Syndrome, Postherpetic Neuralgia, Postinfectious Encephalomyelitis, Postural Hypotension, Postural Orthostatic Tachycardia Syndrome, Postural Tachycardia Syndrome, Primary Dentatum Atrophy, Primary Lateral Sclerosis, Primary Progressive Aphasia, Prion Diseases, Progressive Hemifacial Atrophy, Progressive Locomotor Ataxia, Progressive Multifocal Leukoencephalopathy, Progressive Sclerosing Poliodystrophy, Progressive Supranuclear Palsy, Prosopagnosia, Pseudo-Torch syndrome, Pseudotoxoplasmosis syndrome, Pseudotumor Cerebri, Psychogenic Movement, Ramsay Hunt Syndrome I, Ramsay Hunt Syndrome II, Rasmussen's Encephalitis, Reflex Sympathetic Dystrophy Syndrome, Refsum Disease, Refsum Disease-Infantile, Repetitive Motion Disorders, Repetitive Stress injuries, Restless Legs Syndrome, Retrovirus-Associated Myelopathy, Rett Syndrome, Reyes Syndrome, Rheumatic Encephalitis, Riley-Day Syndrome, Sacral Nerve Root Cysts, Saint Vitus Dance, Salivary Gland Disease, Sandhoff Disease, Schilder's Disease, Schizencephaly, Seitelberger Disease, Seizure Disorder, Semantic Dementia, Septo-Optic Dysplasia, Severe Myoclonic Epilepsy of Infancy (SMEI), Shaken Baby Syndrome, Shingles, Shy-Drager Syndrome, Sjogren's Syndrome, Sleep Apnea, Sleeping Sickness, Sotos Syndrome, Spasticity, Spina Bifida, Spinal Cord Infarction, Spinal Cord Injury, Spinal Cord Tumors, Spinal Muscular Atrophy, Spinocerebellar Atrophy, Spinocerebellar Degeneration, Steele-Richardson-Olszewski Syndrome, Stiff-Person Syndrome, Striatonigral Degeneration, Stroke, Sturge-Weber Syndrome, Subacute Sclerosing Panencephalitis, Subcortical Arteriosclerotic Encephalopathy, Short-lasting, Unilateral, Neuralgiform (SUNCT) Headache, Swallowing Disorders, Sydenham Chorea, Syncope, Syphilitic Spinal Sclerosis, Syringohydromyelia, Syringomyelia, Systemic Lupus Erythematosus, Tabes Dorsalis, Tardive Dyskinesia, Tarlov Cysts, Tay-Sachs Disease, Temporal Arteritis, Tethered Spinal Cord Syndrome, Thomsen's Myotonia, Thoracic Outlet Syndrome, Thyrotoxic Myopathy, Tic Douloureux, Todd's Paralysis, Tourette Syndrome, Transient Ischemic Attack, Transmissible Spongiform Encephalopathies, Transverse Myelitis, Traumatic Brain Injury, Tremor, Trigeminal Neuralgia, Tropical Spastic Paraparesis, Troyer Syndrome, Tuberous Sclerosis, Vascular Erectile Tumor, Vasculitis Syndromes of the Central and Peripheral Nervous Systems, Von Economo's Disease, Von Hippel-Lindau Disease (VHL), Von. Recklinghausen's Disease, Wallenberg's Syndrome, Werdnig-Hoffman Disease, Wernicke-Korsakoff Syndrome, West Syndrome, Whiplash, Whipple's Disease, Williams Syndrome, Wilson Disease, Wolman's Disease, IX-Linked Spinal and Bulbar Muscular Atrophy.

[0718] Various psychological disorders may be treated with pharmaceutical compositions, viral particles, of the present disclosure. As a non-limiting example, the psychological disorders may be Aboulia, Absence epilepsy, Acute stress Disorder, Adjustment Disorders, Adverse effects of medication NOS, Age related cognitive decline, Agoraphobia, Alcohol Addiction, Alzheimer's Disease, Amnesia (also known as Amnestic Disorder), Amphetamine Addiction, Anorexia Nervosa, Anterograde amnesia, Antisocial personality disorder (also known as Sociopathy), Anxiety Disorder (Also known as Generalized Anxiety Disorder), Anxiolytic related disorders, Asperger's Syndrome (now part of Autism Spectrum Disorder), Attention Deficit Disorder (Also known as ADD), Attention Deficit Hyperactivity Disorder (Also known as ADM), Autism Spectrum Disorder (also known as Autism), Autophagia, Avoidant Personality Disorder, Barbiturate related disorders, Benzodiazepine related disorders, Bereavement, Bibliomania, Binge Eating Disorder, Bipolar disorder (also known as Manic Depression, includes Bipolar I and Bipolar II), Body Dysmorphic Disorder, Borderline intellectual functioning, Borderline Personality Disorder, Breathing-Related Sleep Disorder, Brief Psychotic Disorder, Bruxism, Bulimia Nervosa, Caffeine Addiction, Cannabis Addiction, Catatonic disorder, Catatonic schizophrenia, Childhood amnesia, Childhood Disintegrative Disorder (now part of Autism Spectrum Disorder), Childhood Onset Fluency Disorder (formerly known as Stuttering), Circadian Rhythm Disorders, Claustrophobia, Cocaine related disorders, Communication disorder, Conduct Disorder, Conversion Disorder, Cotard delusion, Cyclothymia (also known as Cyclothymic Disorder), Delerium, Delusional Disorder, dementia, Dependent Personality Disorder (also known as Asthenic Personality Disorder), Depersonalization disorder (now known as Depersonalization/Derealization Disorder), Depression (also known as Major Depressive Disorder), Depressive personality disorder, Derealization disorder (now known as Depersonalization/Derealization Disorder), Dermotillomani a, Desynchronosis, Developmental coordination disorder, Diogenes Syndrome, Disorder of written expression, Dispareunia, Dissocial Personality Disorder, Dissociative Amnesia, Dissociative Fugue, Dissociative Identity Disorder (formerly known as Multiple Personality Disorder), Down syndrome, Dyslexia, Dyspareunia, Dysthymia (now known as Persistent Depressive Disorder), Eating disorder NOS, Ekbom's Syndrome (Delusional Parasitosis), Emotionally unstable personality disorder, Encopresis, Enuresis (bedwetting), Erotomania, Exhibitionistic Disorder, Expressive language disorder, Factitious Disorder, Female Sexual Disorders, Fetishistic Disorder, Folie à deux, Fregoli delusion, Frotteuristic Disorder, Fugue State, Ganser syndrome, Gambling Addiction, Gender Dysphoria (formerly known as Gender Identity Disorder), Generalized Anxiety Disorder, General adaptation syndrome, Grandiose delusions, Hallucinogen Addiction, Haitlose personality disorder, Histrionic Personality Disorder, Primary hypersomnia, Huntington's Disease, Hypoactive sexual desire disorder, Hypochondriasis, Hypomania, Hyperkinetic syndrome, Hypersomnia, Hysteria, Impulse control disorder, Impulse control disorder NOS, Inhalant Addiction, Insomnia, Intellectual Development Disorder, Intermittent Explosive Disorder, Joubert syndrome, Kleptomania, Korsakoff's syndrome, Lacunar amnesia, Language Disorder, Learning Disorders, Major Depression (also known as Major Depressive Disorder), major depressive disorder, Male Sexual Disorders, Malingering, Mathematics disorder, Medication-related disorder, Melancholia, Mental Retardation (now known as Intellectual Development Disorder), Misophonia, Morbid jealousy, Multiple Personality Disorder (now known as Dissociative Identity Disorder), Munchausen Syndrome, Munchausen by Proxy, Narcissistic Personality Disorder, Narcolepsy, Neglect of child, Neurocognitive Disorder (formerly known as Dementia), Neuroleptic-related disorder, Nightmare Disorder, Non Rapid Eye Movement, Obsessive-Compulsive Disorder, Obsessive-Compulsive Personality Disorder (also known as Anankastic Personality Disorder), Oneirophrenia, Onychophagia, Opioid Addiction, Oppositional Defiant Disorder, Orthorexia (ON), Pain disorder, Panic attacks, Panic Disorder, Paranoid Personality Disorder, Parkinson's Disease, Partner relational problem, Passive-aggressive personality disorder, Pathological gambling, Pedophilic Disorder, Perfectionism, Persecutory delusion, Persistent Depressive Disorder (also known as Dysthymia), Personality change due to a general medical condition, Personality disorder, Pervasive developmental disorder (PDD), Phencyclidine related disorder, Phobic disorder, Phonological disorder, Physical abuse, Pica, Polysubstance related disorder, Postpartum Depression, Post-traumatic embitterment disorder (PTSD), Post Traumatic Stress Disorder, Premature ejaculation, Premenstrual Dysphoric Disorder, Psychogenic amnesia, Psychological factor affecting medical condition, Psychoneurotic personality disorder, Psychotic disorder, not otherwise specified, Pyromania, Reactive Attachment Disorder, Reading disorder, Recurrent brief depression, Relational disorder, REM Sleep Behavior Disorder, Restless Leg Syndrome, Retrograde amnesia, Retts Disorder (now part of Autism Spectrum Disorder), Rumination syndrome, Sadistic personality disorder, Schizoaffective Disorder, Schizoid Personality Disorder, Schizophrenia, Schizophreniform disorder, Schizotypal Personality Disorder, Seasonal Affective Disorder, Sedative, Hypnotic, or Anxiolytic Addiction, Selective Mutism, Self-defeating personality disorder, Separation Anxiety Disorder, Sexual Disorders Female, Sexual Disorders Male, Sexual Addiction, Sexual Masochism Disorder, Sexual Sadism Disorder, Shared Psychotic Disorder, Sleep Arousal Disorders, Sleep Paralysis, Sleep Terror Disorder (now part of Nightmare Disorder, Social Anxiety Disorder, Somatization Disorder, Specific Phobias, Stendhal syndrome, Stereotypic movement disorder, Stimulant Addiction, Stuttering (now known as Childhood Onset Fluency Disorder), Substance related disorder, Tardive dyskinesia, Tobacco Addiction, Tourettes Syndrome, Transient tic disorder, Transient global amnesia, Transvestic Disorder, Trichotillomania, Undifferentiated Somatoform Disorder, Vaginismus, and Voyeuristic Disorder.

[0719] Various lung diseases may be treated with pharmaceutical compositions, viral particles, of the present disclosure. As a non-limiting example, the lung diseases may be Asbestosis, Asthma, Bronchiectasis, Bronchitis, Chronic Cough, Chronic Obstructive Pulmonary Disease (COPT)), Croup, Cystic Fibrosis, Hantavirus, Idiopathic Pulmonary Fibrosis, Pertussis, Pleurisy, Pneumonia, Pulmonary Embolism, Pulmonary Hypertension, Sarcoidosis, Sleep Apnea, Spirometry, Sudden Infant Death Syndrome (SIDS), Tuberculosis, klagille Syndrome, Autoimmune Hepatitis, Biliary Atresia, Cirrhosis, ERCP (Endoscopic Retrograde Cholangiopancreatography), and Hemochromatosis. Nonalcoholic Steatohepatitis, Porphyria, Primary Biliary Cirrhosis, Primary Sclerosing Cholangitis.

[0720] Various bone diseases may be treated with pharmaceutical compositions, viral particles, of the present disclosure. As a non-limiting example, the bone diseases may be osteoporosis, neurofibromatosis, osteogenesis imperfecta (OI), rickets, osteosarcoma, achondroplasia, fracture, osteomyelitis, Ewing tumour of bone, osteomalacia, hip dysplasia, Paget disease of bone, marble bone disease, osteochondroma, bone cancer, bone disease, osteochondrosis, osteoma, fibrous dysplasia, cleidocranial dysostosis, osteoclastoma, bone cyst, metabolic bone disease, melorheostosis, callus, Caffey syndrome, and mandibulofacial dysostosis.

[0721] Various blood diseases may be treated with pharmaceutical compositions, viral particles, of the present disclosure. As a non-limiting example, the blood diseases may be Anemia and CKT) (for health care professionals), Aplastic Anemia and Myelodysplastic Syndromes, Deep Vein Thrombosis, Hemochromatosis, Hemophilia, Henoch-Schonlein Purpura, Idiopathic Thrombocytopenic Purpura, Tron-Defi ciency Anemia, Pernicious Anemia, Pulmonary Embolism, Sickle Cell Anemia, Sickle Cell Trait and Other Hemoglobinopathies, Thalassemia, Thrombotic Thrombocytopenic Purpura, and Von Willebrand Disease.

[0722] Various diseases associated with TNF alpha may be treated with the pharmaceutical compositions, viral particles, of the present disclosure. As a non-limiting example, the disease may be respiratory disorder; asthma; allergic and nonallergic asthma; asthma due to infection; asthma due to infection with respiratory syncytial virus (RSV); chronic obstructive pulmonary disease (COPD); a condition involving airway inflammation; eosinophilia; fibrosis and excess mucus production; cystic fibrosis; pulmonary fibrosis; an atopic disorder; atopic dermatitis; urticaria; eczema; allergic rhinitis; allergic enterogastritis; an inflammatory and/or autoimmune condition of the skin; an inflammatory and/or autoimmune condition of gastrointestinal organs; inflammatory bowel diseases (IBD); ulcerative colitis; Crohn's disease; an inflammatory and/or autoimmune condition of the liver; liver cirrhosis; liver fibrosis; liver fibrosis caused by hepatitis B and/or C virus; scleroderma; tumors or cancers; hepatocellular carcinoma; glioblastoma; lymphoma; Hodgkin's lymphoma; a viral infection; a bacterial infection; a parasitic infection; HTLV-1 infection; suppression of expression of protective type 1 immune responses, and suppression of expression of a protective type 1 immune response during vaccination, rheumatoid arthritis, osteoarthritis, juvenile chronic arthritis, septic arthritis, Lyme arthritis, psoriatic arthritis, reactive arthritis, spondyloarthropathy, systemic lupus erythematosus, Crohn's disease, ulcerative colitis, inflammatory bowel disease, insulin dependent diabetes mellitus, thyroiditis, asthma, allergic diseases, psoriasis, dermatitis scleroderma, graft versus host disease, organ transplant rejection, acute or chronic immune disease associated with organ transplantation, sarcoidosis, atherosclerosis, disseminated intravascular coagulation, Kawasaki's disease, Grave's disease, nephrotic syndrome, chronic fatigue syndrome, Wegener's granulomatosis, Henoch-Schoenlein purpurea, microscopic vasculitis of the kidneys, chronic active hepatitis, uveitis, septic shock, toxic shock syndrome, sepsis syndrome, cachexia, infectious diseases, parasitic diseases, acquired immunodeficiency syndrome, acute transverse myelitis, Huntington's chorea, Parkinson's disease, Alzheimer's disease, stroke, primary biliary cirrhosis, hemolytic anemia, malignancies, heart failure, myocardial infarction, Addison's disease, sporadic, polyglandular deficiency type I and polyglandular deficiency type II, Schmidt's syndrome, adult (acute) respiratory distress syndrome, alopecia, alopecia greata, seronegative arthropathy, arthropathy, Reiter's disease, psoriatic arthropathy, ulcerative colitic arthropathy, enteropathic synovitis, chlamydia, yersinia and salmonella associated arthropathy, spondyloarthropathy, atheromatous disease/arteriosclerosis, atopic allergy, autoimmune bullous disease, pemphigus vulgaris, pemphigus foliaceus, pemphigoid, linear IgA disease, autoimmune haemolytic anaemia, Coombs positive haemolytic anaemia, acquired pernicious anaemia, juvenile pernicious anaemia, myalgic encephalitis/Royal Free Disease, chronic mucocutaneous candidiasis, giant cell arteritis, primary sclerosing hepatitis, cryptogenic autoimmune hepatitis, Acquired Immunodeficiency Disease Syndrome, Acquired immunodeficiency Related Diseases, hepatitis B, hepatitis C, common varied immunodeficiency (common variable hypogammaglobulinaemia), dilated cardiomyopathy, female infertility, ovarian failure, premature ovarian failure, fibrotic lung disease, cryptogenic fibrosing alveolitis, post-inflammatory interstitial lung disease, interstitial pneumonitis, connective tissue disease associated interstitial lung disease, mixed connective tissue disease associated lung disease, systemic sclerosis associated interstitial lung disease, rheumatoid arthritis associated interstitial lung disease, systemic lupus erythematosus associated lung disease, dermatomyositis/polymyositis associated lung disease, Sjögren's disease associated lung disease, ankylosing spondylitis associated lung disease, vasculitic diffuse lung disease, haemosiderosis associated lung disease, drug-induced interstitial lung disease, fibrosis, radiation fibrosis, bronchiolitis obliterans, chronic eosinophilic pneumonia, lymphocytic infiltrative lung disease, postinfectious interstitial lung disease, gouty arthritis, autoimmune hepatitis, type-1 autoimmune hepatitis (classical autoimmune or lupoid hepatitis), type-2 autoimmune hepatitis (anti-LKM antibody hepatitis), autoimmune mediated hypoglycaemia, type B insulin resistance with acanthosis nigricans, hypoparathyroidism, acute immune disease associated with organ transplantation, chronic immune disease associated with organ transplantation, osteoarthrosis, primary sclerosing cholangitis, psoriasis type 1, psoriasis type 2, idiopathic leucopaenia, autoimmune neutropaenia, renal disease NOS, glomerulonephritides, microscopic vasculitis of the kidneys, Lyme disease, discoid lupus erythematosus, male infertility idiopathic or NOS, spenn autoimmunity, multiple sclerosis (all subtypes), sympathetic ophthalmia, pulmonary hypertension secondary to connective tissue disease, Goodpasture's syndrome, pulmonary manifestation of polyarteritis nodosa, acute rheumatic fever, rheumatoid spondylitis, Still's disease, systemic sclerosis, Sjorgren's syndrome, Takayasu's disease/arteritis, autoimmune thrombocytopaenia, idiopathic thrombocytopaenia, autoimmune thyroid disease, hyperthyroidism, goitrous autoimmune hypothyroidism (Hashimoto's disease), atrophic autoimmune hypothyroidism, primary myxoedema, phacogenic uveitis, primary vasculitis, vitiligo acute liver disease, chronic liver diseases, alcoholic cirrhosis, alcohol-induced liver injury, choleostasis, idiosyncratic liver disease, drug-Induced hepatitis, non-alcoholic steatohepatitis, allergy and asthma, group B streptococci (GBS) infection, mental disorders (e.g., depression and schizophrenia), Th2 Type and Th1 Type mediated diseases, acute and chronic pain (different forms of pain), and cancers such as lung, breast, stomach, bladder, colon, pancreas, ovarian, prostate and rectal cancer and hematopoietic malignancies (leukemia and lymphoma) abetalipoproteinemia, acrocyanosis, acute and chronic parasitic or infectious processes, acute leukemia, acute lymphoblastic leukemia (ALL), acute myeloid leukemia. (AML), acute or chronic bacterial infection, acute pancreatitis, acute renal failure, adenocarcinomas, aerial ectopic beats, AIDS dementia complex, alcohol-induced hepatitis, allergic conjunctivitis, allergic contact dermatitis, allergic rhinitis, allograft rejection, alpha-1-antitrypsin deficiency, amyotrophic lateral sclerosis, anemia, angina pectoris, anterior horn cell degeneration, anti-CD3 therapy, antiphospholipid syndrome, anti-receptor hypersensitivity reactions, aortic and peripheral aneurysms, aortic dissection, arterial hypertension, arteriosclerosis, arteriovenous fistula, ataxia, atrial fibrillation (sustained or paroxysmal), atrial flutter, atrioventricular block, B cell lymphoma, bone graft rejection, bone marrow transplant (BMT) rejection, bundle branch block, Burkitt's lymphoma, burns, cardiac arrhythmias, cardiac stun syndrome, cardiac tumors, cardiomyopathy, cardiopulmonary bypass inflammation response, cartilage transplant rejection, cerebellar cortical degenerations, cerebellar disorders, chaotic or multi focal atrial tachycardia, chemotherapy associated disorders, chronic myelocytic leukemia (CML), chronic alcoholism, chronic inflammatory pathologies, chronic lymphocytic leukemia (CLL), chronic obstructive pulmonary disease (COPD), chronic salicylate intoxication, colorectal carcinoma, congestive heart failure, conjunctivitis, contact dermatitis, corpulmonale, coronary artery disease, Creutzfeldt-Jakob disease, culture negative sepsis, cystic fibrosis, cytokine therapy associated disorders, dementia pugilistica, demyelinating diseases, dengue hemorrhagic fever, dermatitis, dermatologic conditions, diabetes, diabetes mellitus, diabetic arteriosclerotic disease, Diffuse Lewy body disease, dilated congestive cardiomyopathy, disorders of the basal ganglia, Down's Syndrome in middle age, drug-induced movement disorders induced by drugs which block CNS dopamine receptors, drug sensitivity, eczema, encephalomyelitis, endocarditis, endocrinopathy, epiglottitis, Epstein-Barr vim s infection, erythromelalgia, extrapyramidal and cerebellar disorders, familial hemophagocytic lymphohistiocytosis, fetal thymus implant rejection, Friedreich's ataxia, functional peripheral arterial disorders, fungal sepsis, gas gangrene, gastric ulcer, glomerular nephritis, graft rejection of any organ or tissue, gram negative sepsis, gram positive sepsis, granulomas due to intracellular organisms, hairy cell leukemia, Hallervorden-Spatz disease, Hashimoto's thyroiditis, hay fever, heart transplant rejection, hemochromatosis, hemodialysis, hemolytic uremic syndrome/thrombolytic thrombocytopenic purpura, hemorrhage, hepatitis (A), His bundle arrhythmi as, infection/HIV neuropathy, Hodgkin's disease, hyperkinetic movement disorders, hypersensitivity reactions, hypersensitivity pneumonitis, hypertension, hypokinetic movement disorders, hypothalamic-pituitary-adrenal axis evaluation, idiopathic Addison's disease, idiopathic pulmonary fibrosis, antibody mediated cytotoxicity, asthenia, infantile spinal muscular atrophy, inflammation of the aorta, influenza a, ionizing radiation exposure, iridocyclitis/uveitis/optic neuritis, ischernia-reperfiusion injury, ischemic stroke, juvenile rheumatoid arthritis (JRA), juvenile spinal muscular atrophy, Kaposi's sarcoma, kidney transplant rejection, legionella, leishmaniasis, leprosy, lesions of the corticospinal system, lipedema, liver transplant rejection, lymphedema, malaria, malignant lymphoma, malignant histiocytosis, malignant melanoma, meningitis, meningococcemia, metabolic/idiopathic, migraine headache, mitochondrial multi-system disorder, mixed connective tissue disease, monoclonal gammopathy, multiple myeloma, multiple systems degenerations (Menzel, Dejerine-Thomas, Shy-Drager, and Machado-Joseph), myasthenia gravis, Mycobacterium avium intracellulare, Mycobacterium tuberculosis, myelodysplastic syndrome, myocardial infarction, myocardial ischemic disorders, nasopharyngeal carcinoma, neonatal chronic lung disease, nephritis, nephrosis, neurodegenerative diseases, neurogenic I muscular atrophies, neutropenic fever, non-Hodgkins lymphoma, occlusion of the abdominal aorta and its branches, occlusive arterial disorders, OKT3© therapy, orchitis/epidydimitis, orchitis/vasectomy reversal procedures, organomegaly, osteoporosis, pancreas transplant rejection, pancreatic carcinoma, paraneoplastic syndrome/hypercalcemia of malignancy, parathyroid transplant rejection, pelvic inflammatory disease, perennial rhinitis, pericardial disease, peripheral atherosclerotic disease, peripheral vascular disorders, peritonitis, pernicious anemia, Pneumocystis carinii pneumonia, pneumonia, POEMS syndrome (polyneuropathy, organomegaly, endocrinopathy, monoclonal gammopathy, and skin changes syndrome), post perfusion syndrome, post pump syndrome, post-MI cardiotomy syndrome, preeclampsia, progressive supranuclear palsy, primary pulmonary hypertension, radiation therapy, Raynaud's phenomenon and disease, Raynaud's disease, Refsum's disease, regular narrow QRS tachycardia, renovascular hypertension, reperfusion injury, restrictive cardiomyopathy, sarcomas, scleroderma, senile chorea, senile dementia of Lewy body type, seronegative arthropathies, shock, sickle cell anemia, skin allograft rejection, skin changes syndrome, small bowel transplant rejection, solid tumors, specific arrhythmias, spinal ataxia, spinocerebellar degenerations, streptococcal myositis, structural lesions of the cerebellum, subacute sclerosing panencephalitis, syncope, syphilis of the cardiovascular system, systemic anaphylaxis, systemic inflammatory response syndrome, systemic onset juvenile rheumatoid arthritis, T-cell or FAB AT L, telangiectasia, thromboangitis obliterans, thrombocytopenia, toxicity, transplants, traumalhemorrhage, type IIl hypersensitivity reactions, type IV hypersensitivity, unstable angina, uremia, urosepsis, urticaria, valvular heart diseases, varicose veins, vasculitis, venous diseases, venous thrombosis, ventricular fibrillation, viral and fungal infections, viral encephalitis/aseptic meningitis, viral-associated hemophagocytic syndrome, Wernicke-Korsakoff syndrome, Wilson's disease, xenograft rejection of any organ or tissue, acute coronary syndromes, acute idiopathic polyneuritis, acute inflammatory demyelinating polyradiculoneuropathy, acute ischemia, adult Still's disease, alopecia greata, anaphylaxis, anti-phospholipid antibody syndrome, aplastic anemia, arteriosclerosis, atopic eczema, atopic dermatitis, autoimmune dermatitis, autoimmune disorder associated with streptococcus infection, autoimmune enteropathy, autoimmune hearing loss, autoimmune lymphoproliferative syndrome (ALPS), autoimmune myocarditis, autoimmune premature ovarian failure, blepharitis, bronchiectasis, bullous pemphigoid, cardiovascular disease, catastrophic antiphospholipid syndrome, celiac disease, cervical spondylosis, chronic ischemia, cicatricial pemphigoid, clinically isolated syndrome (CIS) with risk for multiple sclerosis, conjunctivitis, childhood onset psychiatric disorder, chronic obstructive pulmonary disease (COPD), dacryocystitis, dermatomyositis, diabetic retinopathy, diabetes mellitus, disk herniation, disk prolapse, drug induced immune hemolytic anemia, endocarditis, endometriosis, endophthalmitis, episcleritis, erythema multifoune, erythema multiforme major, gestational pemphigoid, Guillain-Barre syndrome (GB S), hay fever, Hughes syndrome, idiopathic Parkinson's disease, idiopathic interstitial pneumonia, IgE-mediated allergy, immune hemolytic anemia, inclusion body myositis, infectious ocular inflammatory disease, inflammatory demyelinating disease, inflammatory heart disease, inflammatory kidney disease, IPF′/LIP, iritis, keratitis, keratojunctivitis sicca, Kussmaul disease or Kussmaul-Meier disease, Landry's paralysis, Langerhan's cell histiocytosis, livedo reticularis, macular degeneration, microscopic polyangiitis, morbus bechterev, motor neuron disorders, mucous membrane pemphigoid, multiple organ failure, myasthenia gravis, myelodysplastic syndrome, myocarditis, nerve root disorders, neuropathy, non-A non-B hepatitis, optic neuritis, osteolysis, ovarian cancer, pauciarticular JRA, peripheral artery occlusive disease (PROD), peripheral vascular disease (PVD), peripheral artery disease (PAD), phlebitis, polyarteritis nodosa (or periarteritis nodosa), polychondritis, polymyalgia rheumatica, poliosis, polyarticular polyendocrine deficiency syndrome, polymyositis, polymyalgia rheumatica (PIER), post-pump syndrome, primary Parkinsonism, prostate and rectal cancer and hematopoietic malignancies (leukemia and lymphoma), prostatitis, pure red cell aplasia, primary adrenal insufficiency, recurrent neuromyelitis optica, restenosis, rheumatic heart disease, sapho (synovitis, acne, pustulosis, hyperostosis, and osteitis), scleroderma, secondary amyloidosis, shock lung, scleritis, sciatica, secondary adrenal insufficiency, silicone associated connective tissue disease, Sneddon-Wilkinson dermatosis, spondylitis ankylosans, Stevens-Johnson syndrome (SIS), systemic inflammatory response syndrome, temporal arteritis, toxoplasmic retinitis, toxic epidermal necrolysis, transverse myelitis, TRAPS (tumor necrosis factor receptor associated periodic syndrome), type 1 allergic reaction, type II diabetes, urticaria, usual interstitial pneumonia (VIP), vasculitis, vernal conjunctivitis, viral retinitis, Vogt-Koyanagi-Harada syndrome (VKH syndrome), wet macular degeneration, wound healing, yersinia or salmonella associated arthropathy.

[0723] Various receptor for advanced glycation endproducts (RAGE) diseases may be treated with the pharmaceutical compositions, viral particles, of the present disclosure. As a non-limiting example, the disease may be Amyotrophic Lateral Sclerosis, Brachial Plexus Injury, Brain Injury, including traumatic brain injury, Cerebral Palsy, Friedrich's Ataxia, Guillain Barre, Leukodystrophies, Multiple Sclerosis, Post Polio, Spina Bifida, Spinal Cord Injury, Spinal Muscle Atrophy, Spinal Tumors, Stroke, Transverse Myelitis, dementia, senile dementia, mild cognitive impairment, Alzheimer-related dementia, Huntington's chorea, tardive dyskinesia, hyperkinesias, manias, Morbus Parkinson, steel-Richard syndrome, Down's syndrome, myasthenia gravis, nerve trauma, vascular amyloidosis, cerebral hemorrhage I with amyloidosis, brain inflammation, Friedrich's ataxia, acute confusion disorder, amyotrophic lateral sclerosis, glaucoma, Alzheimer's disease, diabetic nephropathy, sepsis, rheumatoid arthritis and related inflammatory diseases.

[0724] Various neurite degenerative diseases may be treated with the pharmaceutical compositions, viral particles, of the present disclosure. As a non-limiting example, the disease may be multiple sclerosis, Parkinson's disease, Alzheimer's disease, Tay-Sachs disease, Niemann-Pick disease, Gaucher's disease, Hurler's syndrome, Huntington's disease, amyotrophic lateral sclerosis, idiopathic inflammatory demyelinating diseases, vitamin B12 deficiency, central pontine myelinolysis, tabes dorsalis, transverse myelitis, Devic's disease, progressive multifocal leukoencephalopathy, optic neuritis, traumatic injury to the CNS, an ischemic cerebral stroke, glaucoma, diabetic retinopathy, age-dependent macular degeneration, and a leukodystrophy.

[0725] Various neurological diseases may be treated with the pharmaceutical compositions, viral particles, of the present disclosure. As a non-limiting example, the disease may be Amyotrophic Lateral Sclerosis, Brachial Plexus Injury, Brain Injury, including traumatic brain injury, Cerebral Palsy, Guillain Barre, Leukodystrophies, Multiple Sclerosis, Post Polio, Spina Bifida, Spinal Cord Injury, Spinal Muscle Atrophy, Spinal Tumors, Stroke, Transverse Myelitis; dementia, senile dementia, mild cognitive impairment, Alzheimer-related dementia, Huntington's chorea, tardive dyskinesia, hyperkinesias, manias, Morbus Parkinson, steel-Richard syndrome, Down's syndrome, myasthenia gravis, nerve trauma, vascular amyloidosis, cerebral hemorrhage I with amyloidosis, brain inflammation, acute confusion disorder, amyotrophic lateral sclerosis, glaucoma and Alzheimer's disease.

[0726] Various cancers may be treated with pharmaceutical compositions, viral particles, of the present disclosure. As used herein, the term “cancer” refers to any of various malignant neoplasms characterized by the proliferation of anaplastic cells that tend to invade surrounding tissue and metastasize to new body sites and also refers to the pathological condition characterized by such malignant neoplastic growths. Cancers may be tumors or hematological malignancies, and include but are not limited to, all types of lymphomas/leukemias, carcinomas and sarcomas, such as those cancers or tumors found in the anus, bladder, bile duct, bone, brain, breast, cervix, colon/rectum, endometrium, esophagus, eye, gallbladder, head and neck, liver, kidney, larynx, lung, mediastinum (chest), mouth, ovaries, pancreas, penis, prostate, skin, small intestine, stomach, spinal marrow, tailbone, testicles, thyroid and uterus.

[0727] Types of carcinomas which may be treated with the viral particles of the present disclosure include, but are not limited to, papillomalcarcinoma, choriocarcinoma, endodermal sinus tumor, teratoma, adenoma/adenocarcinoma, melanoma, fibroma, lipoma, leiomyoma, rhabdomyoma, mesothelioma, angioma, osteoma, chondroma, glioma, lymphoma/leukemia, squamous cell carcinoma, small cell carcinoma, large cell undifferentiated carcinomas, basal cell carcinoma and sinonasal undifferentiated carcinoma.

[0728] Types of sarcomas which may be treated with the viral particles of the present disclosure include, but are not limited to, soft tissue sarcoma such as alveolar soft part sarcoma, angiosarcoma, dermatofibrosarcoma., desmoid tumor, desmoplastic small round cell tumor, extraskeletal chondrosarcoma, extraskeletal osteosarcoma, fibrosarcoma, hemangiopericytoma, hemangiosarcoma, Kaposi's sarcoma, leiomyosarcoma, liposarcoma, lymphangiosarcoma, lymphosarcoma, malignant fibrous histiocytoma, neurofibrosarcoma, rhabdomyosarcoma, synovial sarcoma, and Askin's tumor, Ewing's sarcoma (primitive neuroectodermal tumor), malignant hemangioendothelioma, malignant schwannoma, osteosarcoma, and chondrosarcoma.

[0729] As a non-limiting example, the cancer which may be treated may be Acute granulocytic leukemia, Acute lymphocytic leukemia, Acute myelogenous leukemia, Adenocarcinoma, Adenosarcoma, Adrenal cancer, Adrenocortical carcinoma, Anal cancer, Anaplastic astrocytoma, Angiosarcoma, Appendix cancer, Astrocytoma, Basal cell carcinoma, B-Cell lymphoma), Bile duct cancer, Bladder cancer, Bone cancer, Bowel cancer, Brain cancer, Brain stein glioma, Brain tumor, Breast cancer, Carcinoid tumors, Cervical cancer, Cholangiocarcinoma, Chondrosarcoma, Chronic lymphocytic leukemia, Chronic myelogenous leukemia, Colon cancer, Colorectal cancer, Craniopharyngioma, Cutaneous lymphoma, Cutaneous melanoma, Diffuse astrocytoma, Ductal carcinoma in situ, Endometrial cancer, Ependymoma, Epithelioid sarcoma, Esophageal cancer, Ewing sarcoma, Extrahepatic bile duct cancer, Eye cancer, Fallopian tube cancer, Fibrosarcoma, Gallbladder cancer, Gastric cancer, Gastrointestinal cancer, Gastrointestinal carcinoid cancer, Gastrointestinal stromal tumors, General, Germ cell tumor, Glioblastoma multiforme, Glioma, Hairy cell leukemia, Head and neck cancer, Hemangioendothelioma, Hodgkin lymphoma, Hodgkin's disease, Hodgkin's lymphoma, Hypopharyngeal cancer, Infiltrating ductal carcinoma, Infiltrating lobular carcinoma, Inflammatory breast cancer, Intestinal Cancer, Intrahepatic bile duct cancer, Invasive/infiltrating breast cancer, Islet cell cancer, Jaw cancer, Kaposi sarcoma, Kidney cancer, Laryngeal cancer, Leiomyosarcoma, Leptomeningeal metastases, Leukemia, Lip cancer, Liposarcoma, Liver cancer, Lobular carcinoma in situ, Low-grade astrocytoma, Lung cancer, Lymph node cancer, Lymphoma, Male breast cancer, Medullary carcinoma, Medulloblastoma, Melanoma, Meningioma, Merkel cell carcinoma, Mesenchymal chondrosarcoma, Mesenchymous, Mesothelioma, Metastatic breast cancer, Metastatic melanoma, Metastatic squamous neck cancer, Mixed gliomas, Mouth cancer, Mucinous carcinoma, Mucosal melanoma, Multiple myeloma, Nasal cavity cancer, Nasopharyngeal cancer, Neck cancer, Neuroblastoma, Neuroendocrine tumors, Non-Hodgkin lymphoma, Non-Hodgkin's lymphoma, Non-small cell lung cancer, Oat cell cancer, Ocular cancer, Ocular melanoma, Oligodendroglioma, Oral cancer, Oral cavity cancer, Oropharyngeal cancer, Osteogenic sarcoma, Osteosarcoma, Ovarian cancer, Ovarian epithelial cancer, Ovarian germ cell tumor, Ovarian primary peritoneal carcinoma, Ovarian sex cord stromal tumor, Paget's disease, Pancreatic cancer, Papillary carcinoma, Paranasal sinus cancer, Parathyroid cancer, Pelvic cancer, Penile cancer, Peripheral nerve cancer, Peritoneal cancer, Pharyngeal cancer, Pheochromocytoma, Pilocytic astrocytoma, Pineal region tumor, Pineoblastoma, Pituitary gland cancer, Primary central nervous system lymphoma, Prostate cancer, Rectal cancer, Renal cell cancer, Renal pelvis cancer, Rhabdomyosarcoma, Salivary gland cancer, Sarcoma, Sarcoma, bone, Sarcoma, soft tissue, Sarcoma, uterine, Sinus cancer, Skin cancer, Small cell lung cancer, Small intestine cancer, Soft tissue sarcoma, Spinal cancer, Spinal column cancer, Spinal cord cancer, Spinal tumor, Squamous cell carcinoma, Stomach cancer, Synovial sarcoma, T-cell lymphoma), Testicular cancer, Throat cancer, Thymoma/thymic carcinoma, Thyroid cancer, Tongue cancer, Tonsil cancer, Transitional cell cancer, Transitional cell cancer, Transitional cell cancer, Triple-negative breast cancer, Tubal cancer, Tubular carcinoma, Ureteral cancer, Ureteral cancer, Urethral cancer, Uterine adenocarcinoma, Uterine cancer, Uterine sarcoma, Vaginal cancer, and Vulvar cancer,

### Diagnostic Applications

[0730] The viral particles of the present disclosure may be used for diagnostic purposes or as diagnostic tools for any of the aforementioned diseases or disorders. As a non-limiting example, the viral particles of the present disclosure or the antibodies encoded within the viral genome therein may be used as a biomarker for disease diagnosis. As a second non-limiting example, the viral particles of the present disclosure or the antibodies encoded within the viral genome therein may be used for diagnostic imaging purposes, e.g., MRI, PET, CT or ultrasound.

### Preventative Applications

[0731] The viral particles of the present disclosure or the antibodies encoded by the viral genome therein may be used to prevent disease or stabilize the progression of disease. In some embodiments, the viral particles of the present disclosure are used to as a prophylactic to prevent a disease or disorder in the future. In some embodiments, the viral particles of the present disclosure are used to halt further progression of a disease or disorder. As a non-limiting example, the viral particles of the disclosure may be used in a manner similar to that of a vaccine.

### Research Applications

[0732] The viral particles of the present disclosure or the antibodies encoded by the viral genome therein may also be used as research tools. The viral particles of the disclosure may be used as in any research experiment, e.g., in vivo or in vitro experiments. In a non-limiting example, the viral particles of the disclosure may be used in cultured cells. The cultured cells may be derived from any origin known to one with skill in the art, and may be as non-limiting examples, derived from a stable cell line, an animal model or a human patient or control subject. In a non-limiting example, the viral particles of the disclosure may be used in in vivo experiments in animal models (i.e., mouse, rat, rabbit, dog, cat, non-human primate, guinea pig, ferret, c-elegans, drosophila, zebrafish, or any other animal used for research purposes, known in the art). In another non-limiting example, the viral particles of the disclosure may be used in human research experiments or human clinical trials.

### Combination Application

[0733] The viral particles of the disclosure may be used as a combination therapy with any other therapeutic molecule known in the art. The therapeutic molecule may be approved by the US Food and Drug Administration or may be in clinical trial or at the preclinical research stage. The therapeutic molecule may utilize any therapeutic modality known in the art, with non-limiting examples including gene silencing or interference (i.e., miRNA, siRNA, RNAi, shRNA), gene editing (i.e., TALEN, CRISPR/Cas9 systems, zinc finger nucleases), and gene, protein or enzyme replacement.

### Therapeutic Applications: Non-Infectious Disease

[0734] The present disclosure additionally provides a method for treating non-infectious diseases and/or disorders in a mammalian subject, including a human subject, comprising administering to the subject any of the viral particles or pharmaceutical compositions of the disclosure. In some embodiments, non-infectious diseases and/or disorders treated according to the methods described herein include, but are not limited to, Parkinson's Disease (PD), Dementia with Lewy Bodies (DLB), Multiple System Atrophy (MSA), Decreased muscle mass, Spinal muscular atrophy (SMA) Alzheimer's disease (AD), Amyotrophic lateral sclerosis (ALS), Huntington's Disease (HD), Multiple sclerosis (MS), Stroke, Migraine, Pain, Neuropathies, Psychiatric disorders including schizophrenia, bipolar disorder, and autism, Cancer, ocular diseases, systemic diseases of the blood, heart and bone, Immune system and Autoimmune diseases and Inflammatory diseases.

[0735] In some embodiments, methods of treating non-infectious diseases and/or disorders in a subject in need thereof may comprise the steps of (1) deriving, generating and/or selecting an antibody, antibody-based composition or fragment thereof that targets the antigen of interest; (2) producing a viral particle with a viral genome that includes a payload region encoding the selected antibody of (1); and (3) administering the viral particle (or pharmaceutical composition thereof) to the subject.

[0736] The present disclosure provides a method for administering to a subject in need thereof, including a human subject, a therapeutically effective amount of the viral particles of the disclosure to slow, stop or reverse disease progression. As a non-limiting example, disease progression may be measured by tests or diagnostic tool(s) known to those skilled in the art. As another non-limiting example, disease progression may be measured by change in the pathological features of the brain, CSF or other tissues of the subject.

### Parkinson's Disease

[0737] Parkinson's Disease (PD) is a progressive disorder of the nervous system affecting especially the substantia nigra of the brain. PD develops are a result of the loss of dopamine producing brain cells. Typical early symptoms of PD include shaking or trembling of a limb, e.g. hands, arms, legs, feet and face. Additional characteristic symptoms are stiffness of the limbs and torso, slow movement or an inability to move, impaired balance and coordination, cognitional changes, and psychiatric conditions e.g. depression and visual hallucinations. PD has both familial and idiopathic forms and it is suggestion to be involved with genetic and environmental causes. PD affects more than 4 million people worldwide. In the US, approximately 60, 000 cases are identified annually. Generally, PD begins at the age of 50 or older. An early-onset form of the condition begins at age younger than 50, and juvenile-onset PD begins before age of 20.

[0738] Death of dopamine producing brain cells related to PD has been associated with aggregation, deposition and dysfunction of alpha-synuclein protein (see, e.g. Marques and Outeiro, 2012, Cell Death Dis. 3:e350, Jenner, 1989, J Neural Neurosurg Psychiatry. Special Supplement, 22-28, and references therein). Studies have suggested that alpha-synuclein has a role in presynaptic signaling, membrane trafficking and regulation of dopamine release and transport. Alpha-synuclein aggregates, e.g. in forms of oligomers, have been suggested to be species responsible for neuronal dysfunction and death. Mutations of the alpha-synuclein gene (SNCA) have been identified in the familial forms of PD, but also environmental factors, e.g. neurotoxin affect alpha-synuclein aggregation. Other suggested causes of brain cell death in PD are dysfunction of proteasomal and lysosomal systems, reduced mitochondrial activity.

[0739] PD is related to other diseases related to alpha-synuclein aggregation, referred to as “synucleinopathies.” Such diseases include, but are not limited to, Parkinson's Disease Dementia (PDD), multiple system atrophy (MSA), dementia with Lewy bodies, juvenile-onset generalized neuroaxonal dystrophy (Hallervorden-Spatz disease), pure autonomic failure (PAF), neurodegeneration with brain iron accumulation type-4 (NBIA-1) and combined Alzheimer's and Parkinson's disease.

[0740] As of today, no cure or prevention therapy for PD has been identified. A variety of drug therapies available provide relief to the symptoms. Non-limiting examples of symptomatic medical treatments include carbidopa and levodopa combination reducing stiffness and slow movement, and anticholinergics to reduce trembling and stiffness. Other optional therapies include e.g. deep brain stimulation and surgery. There remains a need for therapy affecting the underlying pathophysiology. For example, antibodies targeting alpha-synuclein protein, or other proteins relevant for brain cell death in PD, may be used to prevent and/or treat PD.

[0741] In some embodiments, methods of the present disclosure may be used to treat subjects suffering from PD and other synucleinopathies. In some cases, methods of the present disclosure may be used to treat subjects suspected of developing PD and other synucleinopathies.

[0742] AAV Particles and methods of using the viral particles described in the present disclosure may be used to prevent, manage and/or treat PD. As a non-limiting example, the viral particles of the present disclosure comprise a nucleic acid sequence encoding at least one of the sequences described in Table 3.

Dementia with Lewy Bodies

[0743] Dementia with Lewy Bodies (DLB), also known as diffuse Lewy body disease, is a form of progressive dementia, characterized by cognitive decline, fluctuating alertness and attention, visual hallucinations and parkinsonian motor symptoms. DLB may be inherited by an autosomal dominant pattern. DLB affects more than 1 million individuals in the US. The condition typically shows symptoms at the age of 50 or older.

[0744] DLB is caused by the abnormal build-up of Lewy bodies, aggregates of the alpha-synuclein protein, in the cytoplasm of neurons in the brain areas controlling memory and motor control. The pathophysiology of these aggregates is very similar to aggregates observed in Parkinson's disease and DLB also has similarities to Alzheimer's disease. Inherited DLB has been associated with gene mutations in SNCA and SNOB genes, producing synuclein proteins.

[0745] As of today, there is no cure or prevention therapy for DLB. A variety of drug therapies available are aimed at managing the cognitive, psychiatric and motor control symptoms of the condition. Non-limiting examples of symptomatic medical treatments include e.g. acetylcholinesterase inhibitors to reduce cognitive symptoms, and levodopa to reduce stiffness and loss of movement. There remains a need for therapy affecting the underlying pathophysiology. Antibodies targeting alpha-synuclein protein may be used to prevent and/or treat DLB.

[0746] In some embodiments, methods of the present disclosure may be used to treat subjects suffering from DLB. In some cases, methods of the present disclosure may be used to treat subjects suspected of developing DLB.

[0747] AAV Particles and methods of using the viral particles described in the present disclosure may be used to prevent, manage and/or treat DLB. As a non-limiting example, the viral particles of the present disclosure comprise a nucleic acid sequence encoding at least one of the sequences described in Table 3 (SEQ ID NO: 2948-17938).

### Multiple System Atrophy

[0748] Multiple system atrophy (MSA), also known as Shy-Drager Syndrome, is a progressive neurodegenerative disorder. The characteristic symptoms are associated with failure of autonomic nervous system causing dizziness, fainting, bladder control problems, and problems regulating heart rate, blood pressure and breathing, accompanied by motor control symptoms similar to Parkinson's disease, e.g. tremor, rigidity and loss of muscle coordination. The symptoms are a reflection of the loss of nerve cells in certain areas of the brain and spinal cord. The disease typically develops around ages of 50 or 60 years. MSA affects approximately 50,000 individuals in the US.

[0749] MSA belongs to the synucleinopathies and is characterized by the appearance of glial cytoplasmic inclusions (GCIs) in oligodendrocytes, which are the myelin producing support cells of the central nervous system (see, e.g. Bleasel et al. 2014, Acta Neuropathologica Communications, 2014, 2:15, and references therein). GCIs comprise insoluble proteinaceous filaments composed of the alpha-synuclein protein. Also, tau proteins have been identified in GCIs. The pathophysiology of the CGIs is not yet fully understood but alpha-synuclein and tau proteins are suggested to have a role in the development and progression of SMA.

[0750] As of today, there is no cure or prevention therapy for MSA. A variety of drug therapies available are aimed at managing the symptoms. Non-limiting examples of symptomatic medical treatments include those used for Parkinson's disease to relief symptoms related motor movement, increased salt intake and steroid hormones for increasing blood pressure. There remains a need for therapy affecting the underlying pathophysiology. Antibodies targeting tau and alpha-synuclein proteins may be used to prevent and/or treat MSA.

[0751] In some embodiments, methods of the present disclosure may be used to treat subjects suffering from MSA. In some cases, methods of the present disclosure may be used to treat subjects suspected of developing MSA.

[0752] AAV Particles and methods of using the viral particles described in the present disclosure may be used to prevent, manage and/or treat MSA. As a non-limiting example, the viral particles of the present disclosure comprise a nucleic acid sequence encoding at least one of the sequences described in Table 3 or Table 6.

### Decreased Muscle Mass, Muscle Strength and Muscle Function

[0753] A number of diseases, disorders and condition are associated with muscle weakness, which refers to reduced muscle mass, muscle strength and muscle function. For example, such disorders include myopathies, which are neuromuscular disorders characterized by muscle weakness due to dysfunction of muscle fiber. Myopathies include, but are not limited to, congenital myopathies, muscular dystrophies, mitochondrial myopathies, glycogen storage diseases of muscle, myoglobinurias, dermatomyositis, myositis ossificans, familial periodic paralysis, polymyositis, inclusion body myositis, and related myopathies, neuromyotonia, stiff-man syndrome, common muscle cramps and stiffness, and tetany. Muscle weakness may also be caused by ageing, diabetes, obesity, chronic pain, peripheral vascular disease, chronic lung diseases, heart diseases, cancers, anemia, arthritis, chronic renal failure and renal diseases, chronic obstructive pulmonary disease, multiple sclerosis (MS), stroke, muscular dystrophy, motor neuron neuropathy, amyotrophic lateral sclerosis (ALS), Parkinson's disease, osteoporosis, osteoarthritis, fatty acid liver disease, liver cirrhosis, Addison's disease, Cushing's syndrome, acute respiratory distress syndrome, steroid induced muscle wasting, myositis, scoliosis, or infections e.g influenza, Epstein-Barr virus infection, HIV/AIDS, Lyme disease, and hepatitis C infection, Muscle weakness may occur after surgery, burn trauma, medical treatment, or trauma. through an injury. Severity of muscle weakness varies. In many cases the condition reduces the quality of life significantly or may be even life-threatening.

[0754] A regulator protein associated with muscles is myostatin (MSTN), also known as growth and differentiation factor 8 (GDF-8). Myostatin is a protein encoded by the MSTN gene, released in the myocytes. Myostatin and myostatin receptors (e.g. ACVR2A and ACVR2B), have a role in suppressing the growth and development of muscle tissue in the body.

[0755] Treatment of muscle weakness depends on the underlying disease or condition, and may include e.g. drug therapy, good nutrition, physiotherapy, mechanical support for weakened muscles and/or surgery. However, efficient therapy to treat a combination of loss of muscle mass, muscle strength and muscle function are needed. Antibodies targeting myostatin may be used in the treatment and prophylaxis of diseases associated with such conditions. For example, bimagrumab (developed by Novartis) is a monoclonal antibody targeting ACVR2B myostatin receptor and used for therapy of musculoskeletal diseases and domagrozumab (developed by Pfizer) is an antibody targeting myostatin, and used for therapy of muscle degeneration and muscle weakness.

[0756] In some embodiments, methods of the present disclosure may be used to treat subjects suffering from loss of muscle mass, muscle strength and muscle function. In some cases, methods of the present disclosure may be used to treat subjects suspected of developing such conditions.

[0757] AAV Particles and methods of using the viral particles described in the present disclosure may be used to prevent, manage and/or treat MSA. As a non-limiting example, the viral particles of the present disclosure comprise a nucleic acid sequence encoding at least one of the sequences described in Table 6.

### Spinal Muscular Atrophy

[0758] Spinal muscular atrophy (SMA) is a hereditary disease-causing weakness and wasting of the voluntary muscles in the arms and legs of infants and children. SMA is associated with abnormalities in the protein production of the survival motor neuron gene 1 (SMN1). Lack of the protein affects degeneration and death of lower motor neurons. Typical symptoms include floppy limbs and trunk, feeble movement of the arms and legs, difficulties in swallowing and eating, and impaired breathing. SMA is the most common genetic disorder leading to death of children under 2 years of age. SMA affects one in 6,000 to 10,000 people.

[0759] As of today, there is no cure for SMA. Therapies available are aimed at management of the symptoms and prevention of additional complications. Such therapies are associated e.g. with cardiology, movement management, respiratory care and mental health. There remains a need for therapy affecting the underlying pathophysiology of SMA.

[0760] In some embodiments, methods of the present disclosure may be used to treat subjects suffering from SMA. In some cases, methods of the present disclosure may be used to treat subjects suspected of developing SMA.

[0761] AAV Particles and methods of using the viral particles described in the present disclosure may be used to prevent, manage and/or treat SMA. As a non-limiting example, the viral particles of the present disclosure comprise a nucleic acid sequence encoding at least one of the sequences described in Table 6.

### Alzheimer's Disease

[0762] Alzheimer's Disease (AD) is a debilitating neurodegenerative disease and the most common form of dementia affecting the memory, thinking and behavior. Typical early symptom is difficulty of remembering newly learned information. As the disease advances, symptoms include disorientation, changes in sleep, changes in mood and behavior, confusion, unfound suspicions and eventually difficulty to speak, swallow and walk. AD currently afflicts more than 35 million people worldwide, with that number expected to double in coming decades.

[0763] As of today, no cure or prevention therapy for AD has been identified. Drug therapy to treat memory loss, behavioral changes and sleep changes, and to slow down the progression of AD are available. However, these symptomatic treatments do not address the underlying pathophysiology.

[0764] The AD brain is characterized by dual aggregates, the extracellular β-amyloid plaques and the intracellular neurofibrillary tangles (NTT) of misfolded, hyperphosphorylated microtubule associated, tau proteins. The P-amyloid plaques may lead to pathological cascades that are associated with a number of proteins, such as, but not limited to, APP (amyloid beta (A4) precursor protein), A beta (amyloid beta), BALE (Beta-secretases), and APOE (apolipoprotein E). Historically, it has been thought that amyloid pathology precedes the appearance of NFT, and therefore, that tau pathology in the form of aggregates is symbolic of impending cell death (Selkoe, D. J., 2001, Physiological Reviews, 81(2):741-66). However, clinical trials addressing amyloid pathology have largely failed thus far and advances in the field suggest that targeting tau aggregates may be advantageous and lead to improved cognitive ability.

[0765] In some embodiments, methods of the present disclosure may be used to treat subjects suffering from AD. In some cases, methods of the present disclosure may be used to treat subjects suspected of developing AD.

[0766] AAV Particles and methods of using the viral particles described in the present disclosure may be used to prevent, manage and/or treat AD. As a non-limiting example, the viral particles of the present disclosure comprise a nucleic acid sequence encoding at least one of the sequences described in Table 4.

### Huntington's Disease

[0767] Huntington's disease (FID) is a rare, inherited disorder causing degeneration of neurons in the motor control region of the brain, as well as other areas. Typical symptoms of the disease include uncontrolled movements (chorea), abnormal postures, impaired coordination, slurred speech and difficulty of feeding and swallowing accompanied by changes in behavior, judgment and cognition. HD is caused by mutations in the gene associated with the huntingtin (HTT) protein. The mutation causes the (CAG) blocks of DNA. to repeat abnormally many times. HD affects approximately 30, 000 individuals in the US.

[0768] HD is characterized by mutations of the huntingtin (HTT) protein with abnormal expansions of polyglutamine tracts, e.g. expansion of the length of glutamine residues encoded by CAG repeats. The expansion threshold for occurrence of the disease is considered to be approximately 35-40 residues. HD is also associated with beta sheet rich aggregates in striatal neurons formed by N-terminal region of HIT. The expansions and aggregates lead to gradual loss of neurons as HD progresses. Additionally, the cell death in HD is associated with death receptor 6 (DR6) which is known to induce apoptosis.

[0769] As of today, there is no therapy to cure, or prevent the progression of the disease. Drug therapies available are aimed at management of the symptoms. For example, FDA has approved tetrabenezine to be prescribed for prevention of chorea. Additionally, e.g. antipsychotic drugs may help to control delusions, hallucinations and violent outbursts. There remains a need for therapy affecting the underlying pathophysiology, such as antibody therapies targeting the HTT protein, DR6 protein, and/or other HD associated proteins.

[0770] In some embodiments, methods of the present disclosure may be used to treat subjects suffering from HD. In some cases, methods of the present disclosure may be used to treat subjects suspected of developing HD.

[0771] AAV Particles and methods of using the viral particles described in the present disclosure may be used to prevent, manage and/or treat HD. As a non-limiting example, the viral particles of the present disclosure comprise a nucleic acid sequence encoding at least one of the sequences described in Table 5.

### Multiple Sclerosis

[0772] Multiple sclerosis is a disease of the central nervous system (CNS). The typical early symptoms occurring between the ages of 20 to 40 include blurring vision, red-green color distortion, partial blindness, extreme muscle weakness, feeling of numbness or prickling, difficulties with coordination and balance. In severe cases MS may lead to a partial or complete paralysis. MS is believed to be an autoimmune disease as the communication between the brain and other parts of the body being disrupted as the immune system causes an inflammation within the central nervous system. MS is caused by both genetic and environmental factors, e.g. viral infections. MS is the most common neurological condition of young adults globally, affecting more than 2.3 million individuals.

[0773] At present time, the pathophysiology of MS is not fully understood. The disease is associated with a complex combination related to formation of lesions in the central nervous system, inflammation and demyelination (destruction of the protective myelin surrounding the nerve fibers) in white matter and cortex, and axon destruction (see, e.g. Longbrake et at, 2013, Curr Neurol Neurosci Rep., 13(11), and references therein). A number of myelin inhibitory proteins have been characterized in association with MS, including, but not limited to, NogoA ((Neurite outgrowth inhibitor A), Nogo receptor-1 (NgR1), myelin associated glycoprotein (MAG), oligodendrocyte glycoprotein (OM-gp), LINGO-1 (Leucine rich repeat and immunoglobin-like domain-containing protein 1), and MAI (myelin associated inhibitor). MS is also affiliated with many immune response related proteins. Non-limiting examples of such proteins include e.g. B-cell and T-cell associated proteins, such as, but not limited to, leukocyte surface antigen CD52, alpha chain of the IL-2 receptor CD25, B-cell surface molecule CD20, T helper cell CD4, and/or cytokine IL-12/23. Alpha 4-integrin, has been associated with inflammation of CNS, as it has a role in leukocyte adhesion and migration to the inflamed CNS. Additionally, MS patients have been characterized with elevated tumor necrosis factor (TNF) level s.

[0774] As of today, there is no prevention therapy or cure for MS. Patients in need of medical therapy may be treated with e.g. synthetic form of myelin basic protein, (Copaxone, copolymer I), antiviral proteins known as interferons, or immunosuppressant drugs e.g. mitoxantore. Some drugs are aimed at treating a symptom of MS, such as dalapridine, which is aimed at improving walking of individuals with MS. Antibodies for MS have been developed. For example, natalizumab is a monoclonal antibody targeting alpha 4 integrin, (developed by Elan Pharmaceuticals and Biogen) approved by the FDA for treatment of relapsing MS under treatment guidelines to monitor patients by physicians. Other non-limiting examples for MS antibody drugs include alemtuzumab (CD52), daclizumab (CD25), rituximab (CD20), ocrelizumab (CD20), ofatumumab (CD20), (see, e.g. Longbrake et al., 2013, Curr Neural Neurosci Rep., 13(11), and references therein). However, many current medications have serious side effects, and there remains a need for therapy affecting the underlying pathophysiology, such as improved antibody therapies.

[0775] In some embodiments, methods of the present disclosure may be used to treat subjects suffering from MS. In some cases, methods of the present disclosure may be used to treat subjects suspected of developing MS.

[0776] AAV Particles and methods of using the viral particles described in the present disclosure may be used to prevent, manage and/or treat MS. As a non-limiting example, the viral particles of the present disclosure comprise a nucleic acid sequence encoding at least one of the sequences described in Table 6,

### Amyotrophic Lateral Sclerosis

[0777] Amyotrophic Lateral Sclerosis (ALS), also known as Lou Gehrig's disease or classical motor neuron disease, is a rapidly progressive and fatal neurological disease. ALS is associated with cell degeneration and death of the upper and lower motor neurons, leading to enablement of muscle movement, weakening, wasting and loss of control over voluntary muscle movement. Early symptoms include muscle weakness of hands, legs and swallowing muscles, eventually progressing to inability to breathe due to diaphragm failure. According to Centers for Disease Control and Prevention (CDC), ALS affects an estimated 12,000-15,000 individuals in the US. About 5-10% of cases are familial.

[0778] ALS, as other non-infectious neurodegenerative diseases, has been characterized by presence of misfolded proteins, including, but not limited to, tau, amyloid-beta (A beta), alpha-synuclein, HTT (huntingtin) or SOD1 (superoxide dismutase 1 protein), and myelin associated inhibitors and their receptors, (see, e.g., Krishnamurthy and Sigurdsson, 2011, N Biotechnol. 28(5):511-7, and Musaro, 2013, HMS J; 280(17):4315-22, and references therein). Familial ALS has been associated with mutations of TAR DNA-binding protein 43 (TDP-43) and RNA-binding protein FUS/ILS. Some proteins have been identified to slow down progression of ALS, such as, but not limited, to growth factors, e.g. insulin-like growth factor 1 (IGF-1), glial cell line-derived growth factor, brain-derived growth factor, vascular endothelial growth factor and ciliary neurotrophic factor, or growth factors promoting muscle growth, e.g. myostatin.

[0779] As of today, there is no prevention or cure for ALS. FDA approved drug niluzole has been approved to prolong the life, but does not have an effect on symptoms. Additionally, drugs and medical devices are available to tolerate pain and attacks associated with ALS. There remains a need for therapy affecting the underlying pathophysiology.

[0780] In some embodiments, methods of the present disclosure may be used to treat subjects suffering from ALS. In some cases, methods of the present disclosure may be used to treat subjects suspected of developing AT S.

[0781] AAV Particles and methods of using the viral particles described in the present disclosure may be used to prevent, manage and/or treat MS. As a non--limiting example, the viral particles of the present disclosure comprise a nucleic acid sequence encoding at least one of the sequences described in Table 6.

### Stroke

[0782] Stroke is a medical emergency characterized by a burst of a blood vessel in the brain, referred to as hemorrhagic stroke, or an interruption of blood supply in the brain, referred to as ischemic stroke. Stroke triggers an inflammation, and causes brain cell death, as the oxygen and nutrient supply is impaired suddenly. Typical symptoms include numbness or weakness, especially on one side of the body, confusion, trouble speaking and understanding speech, vision problems, dizziness and loss of balance. Typically, patients recovering from stroke have permanent disabilities, e.g. affecting movement, speech, coordination, vision and balance. Medical conditions, e.g. diabetes, high blood pressure, high cholesterol, and obesity, as well as, cigarette smoking and poor nutrition, increase susceptibility to a stroke. According to CDC, stroke affects about 800,000 people in the US annually and is the fifth most common cause of death.

[0783] Typical recovery from a stroke is slow or impartial. The inability of the central nervous system to repair after injury has been associated with inhibitory proteins associated with CNS. For example, myelin associated proteins, such as, but not limited to, myelin associated glycoprotein (MAG), myelin associated inhibitor (MAI), and their receptors, proteoglycans, versi can V2, oligodendrocyte myelin glycoprotein (Omgp), and neurite outgrowth inhibitor (logo) have been identified to inhibit neurite outgrowth (see, e.g. Yu et al., 2013, Transl Stroke Res, 4(5):477-83, and references therein). Cell death in ischemic stroke has been associated with excessive activation of glutamate receptors, involved with glutamate receptors such as, but not limited to, N-methyl-D-aspartic acid (NMDA) receptors and DL-a-amino-3-hydroxy-5 ethyl-4-i soxazole propionic acid (AMPA). Inflammatory signaling triggered after stroke has been associated with adhesion molecules of the endothelial cells, such as, but not limited to, selectin family, intercellular adhesion molecule-1 (ICAM-1, also known as CD54), and 132-integrins.

[0784] Therapies to prevent stroke are typically focused on treatment of underlying medical conditions. Acute treatment after stroke involves dissolving blood clot in the case of an ischemic stroke es. by antiplatelet agents, anticoagulants and thrombolytics, or quenching of bleeding in the case of a hemorrhagic stroke. As of today, there is no effective prevention therapy for a stroke. There remains a need for therapy affecting the underlying pathophysiology of a stroke. Antibodies targeting the stroke associated proteins have been developed. For example, Refanezumab is a monoclonal antibody targeting myelin-associated glycoprotein, MAG, for improvement and recovery of motor function after stroke.

[0785] In some embodiments, methods of the present disclosure may be used to prevent a stroke, or treat individuals recovering from a stroke.

[0786] AAV Particles and methods of using the viral particles described in the present disclosure may be used to prevent, manage and/or treat stroke. As a non-limiting example, the viral particles of the present disclosure comprise a nucleic acid sequence encoding at least one of the sequences described herein.

### Migraine

[0787] Migraine is a neurological condition characterized by reoccurring attacks of severe headache, accompanied by nausea, light visions, and sensitivity to light, sound and movement. Migraine attacks may last from hours to days. The cause of migraine is unknown, but it is associated with some underlying diseases, as well as environmental and genetic factors. Migraine affects about 12% of population in the US.

[0788] Present methods for management and treatment of migraine include medical therapies (e.g. analgesics, triptans, ergotamines), surgery, and neurostimulation. As of today, there is no therapy to prevent or cure migraine, and a need for medical therapy focusing on the pathophysiology of migraine remains. CGRP (calcitonin gene-related peptide) vasodilatation has been associated with migraine and photophobia, which is a typical symptom of a migraine attach. Antibodies targeting CGRP may be used for treatment and/or management of migraine, e.g. as described in U.S. Pat. Nos. 9,115,194, and 9,102,731, and US Patent application US20120294802, the contents of which are herein incorporated by reference in their entirety.

[0789] In some embodiments, methods of the present disclosure may be used to treat subjects suffering from migraine. In some cases, methods of the present disclosure may be used to treat subjects suspected of developing migraine.

[0790] AAV Particles and methods of using the viral particles described in the present disclosure may be used to prevent, manage and/or treat migraine. As a non-limiting example, the viral particles of the present disclosure comprise a nucleic acid sequence encoding at least one of the sequences described in Table 10.

### Pain

[0791] Pain is a complex symptom associated with a variety of diseases and disorders and may be acute or chronic. Pain is challenging to treat, and many anti-pain medications have side effects, and/or they can be addictive. There remains a need for pain medications affecting the underlying pathophysiology of a pain. Antibodies for treatment for pain are on the market. For example, fasinumab (developed by Regeneron Pharmaceuticals Inc.), Fulranumab (developed by Johnson & Johnson) and tanezumab (developed by Pfizer) are antibodies against NGF (nerve growth factor) for treatment of pain, such as, osteoarthritis knee pain, chronic low back pain, bone cancer pain and/or pain associated with interstitial cystitis.

[0792] In some embodiments, methods of the present disclosure may be used to treat subjects suffering from pain. In some cases, methods of the present disclosure may be used to treat subjects suspected of developing pain.

[0793] AAV Particles and methods of using the viral particles described in the present disclosure may be used to prevent, manage and/or treat pain. As a non-limiting example, the viral particles of the present disclosure comprise a nucleic acid sequence encoding at least one of the sequences described in Table 10.

### Neuropathies

[0794] Neuropathies are a group of diseases or conditions affecting the nerves. Typical symptoms of neuropathies include impaired movement and sensation, cramping, pain and abnormal organ functions. Neuropathies include e.g. diabetic neuropathy, cisplatin-induced neuropathy, mononeuropathy, pyridoxine-induced neuropathy, peripheral neuropathy, small fiber peripheral neuropathy, polyneuropathy and cisplatin/pyridoxine-induced neuropathy.

[0795] As of today, there is no prevention or treatment therapy specific for neuropathies on the market. Typical treatment involves with treatment of underlying diseases, e.g. diabetes, or management of the symptoms. Therefore, there remains a need for therapy affecting the underlying pathophysiology of neuropathi es, such as efficient antibody therapies. Tyrosine kinases, such as Trk receptors, have a role in regulation of the nervous system, neuronal survival and signal cascades. Antibodies targeting e.g. Trk C may be used for prevention, treatment and/or management of neuropathies, as described in U.S. Pat. No. 7,615,383, the contents of which are herein incorporated by reference in their entirety.

[0796] In some embodiments, methods of the present disclosure may be used to treat subjects suffering from neuropathies. In some cases, methods of the present disclosure may be used to treat subjects suspected of developing neuropathies.

[0797] AAV Particles and methods of using the viral particles described in the present disclosure may be used to prevent, manage and/or treat neuropathies. As a non-limiting example, the viral particles of the present disclosure comprise a nucleic acid sequence encoding at least one of the sequences described in Table 7.

### Psychiatric Disorders

[0798] Psychiatric disorders are characterized by behavioral or mental condition that affects individual's ordinary ability to function. Common psychiatric disorders include, but are not limited to, Tourette syndrome, bipolar disorder, schizophrenia, anxiety, depression, panic disorder, obsessive-compulsive disorder (0CD), eating disorders (e.g. anorexia, bulimia, orthorexia, obesity), substance abuse (e.g. alcohol or drug), addiction, psychosis, phobias, mood disorders, manic-depression disorder, insomnia and other sleep disorders. Psychiatric disorders may significantly affect individual's quality of life, and in severe cases lead to harmful behavior, such as suicidal or homicidal behavior. The diseases are typically managed and treated with psychotherapy, behavioral therapy, medical therapy (e.g. antipsychotic drugs), and/or other therapies. There remains a need for improved medical therapies affecting the underlying pathophysiology of psychiatric disorders, such as antibodies targeting proteins associated with such disorders.

[0799] For example, ghrelin hormone has been associated with eating disorders, including obesity and anorexia. Antibodies targeting ghrelin may be used for prevention, management and/or treatment of eating disorders, e.g. as described in US Patent application US20060233788, the contents of which are herein incorporated by reference in their entirety.

[0800] Depression has been associated with an inhibition of peripheral cytokine activity, especially INFa (tumor necrosis factor alpha). Antibodies targeting TNF alpha may be used for prevention, management and/or treatment of depression, e.g. as described in U.S. patent application US20140296493, the contents of which are herein incorporated by reference in their entirety.

[0801] OCD and OCD related diseases have been associated T-cell activation. Anx-A1 (annexin A1) is a protein promoting T-cell activation, and antibodies binding Annexin-1 may be used for prevention, management and/or treatment of OCD and related diseases, e.g. as described in US Patent application US20150004164, the contents of which are herein incorporated by reference in their entirety.

[0802] In some embodiments, methods of the present disclosure may be used to treat subjects suffering from a psychiatric disorder. In some cases, methods of the present disclosure may be used to treat subjects suspected of developing a psychiatric disorder.

[0803] AAV Particles and methods of using the viral particles described in the present disclosure may be used to prevent, manage and/or treat psychiatric disorder. As a non-limiting example, the viral particles of the present disclosure comprise a nucleic acid sequence encoding at least one of the sequences described in Table 8.

### Cancer

[0804] Cancer is a group of more than 100 diseases associated with abnormal division and cell growth with characteristic spreading in the body. Many cancers are in the form of tumors, e.g. breast cancer, lung cancer, colon cancer, ovarian cancer, renal cancer, prostate cancer, head and neck cancer, pancreas cancer, bone cancer, and thyroid cancer. Cancers associated with blood and lymphoid tissues may be referred to as liquid tumors, e.g. leukemia, lymphoma and myeloma. Cancer is caused by failure of tissue growth regulation. Genes associated with cancer include oncogenes, that promote cell growth and reproduction, and tumor suppressor genes, that inhibit cell division. Oncogenes include, but are not limited to, growth factors, receptor and cytoplasmic tyrosine kinases, transcription factors, serine/threonine kinases and regulatory GTPases. Tumor protein pS3 is the most common tumor suppressor protein found in more than half of cancer types. Susceptibility to cancer is involved with environmental factors, as well as genetic. Though progress with prevention, diagnosis and treatment of cancer has been tremendous, cancer still remains a severe and life-threatening disease. According to American Cancer Society, an estimated 1.6 cancers are diagnosed annually in the US, leading to more than a half a million deaths.

[0805] Therapies associated with cancer treatment include surgery, chemotherapy, radiation and antibody therapies. Antibodies for treatment and/or prevention of cancers have been on the market for nearly two decades, and are considered as one of the most important strategies for treatment of e.g. hematological malignancies and solid tumors. A number of cancer-associated antigens have been identified for treatment of cancers. Antibodies targeting such antigens may be used to diagnose, prevent and/or treat the associated cancers (see, e.g. Scott et al, 2012, Nature Reviews Cancer 12, 278-287, and references therein).

[0806] Some solid cancer tumors are associated with expressed glycoproteins antigens. Such antigens include, but are not limited to, EPCAM (Epithelial cell adhesion molecule), CEA (Carcinoembryonic antigen), gpA33 (Glycoprotein A33 (Transmembrane)), mucins, TAG-72 (Tumor-associated glycoprotein 72), CAIX (Carbonic anhydrase IX), PSMA (Prostate-specific membrane antigen), and FBP (Folate-binding protein). Antibodies targeting the expressed glycoproteins may be used to treat associated tumors. Such solid tumors include, but are not limited to, breast, colon cancer, lung, colorectal, ovarian, renal cell, and/or prostate tumors.

[0807] Some solid cancer tumors are associated with growth factor and differentiation signaling associated antigens. Such antigens include, but are not limited to, EGFR/ERBB 1/HER I (epidermal growth factor receptor 1), ERBB2 (epidermal growth factor receptor 2), ERBB3 (epidermal growth factor receptor 3), MET (Tyrosine-Protein Kinase Met), IGF1R (insulin-like growth factor 1 receptor), EPHA3 (EPH Receptor A3), TRAILR1, (Death receptor 4), and (Receptor activator of nuclear factor kappa-B ligand). Cancers that may be treated with antibodies targeting the growth factor and differentiation signaling include, but are not limited to, breast, colon, lung, ovarian, prostate, head and neck, pancreas, thyroid, kidney, and colon tumors, melanoma, glioma, bone metastases, and hematological malignancies.

[0808] Some cancer tumors are associated with antigens of stromal and extracellular matrix. Such antigens include, but are not limited to, tenascin and FAP (Fibroblast Activation Protein, Alpha). Cancers that may be treated with antibodies targeting the stromal and extracellular matrix antibodies include, but are not limited to, breast, prostate, colon, lung, pancreas and head and neck tumors and glioma.

[0809] Some cancer tumors are associated with such as Lewis-Y Le(y) antigen. Le(y) antigen has been found expressed on a number of cancers, such as, but not limited to, ovarian, breast, colon, lung and prostate cancer. Antibodies targeting Le(y) antigen may be used to treat the associated cancers.

[0810] Some cancer tumors are associated with glycolipid antigens. Such antigens include, but are not limited to, gangliosides, such as GD2, GD3, and GM2 (monosialotetrahexosylganglioside 2). Cancers that may be treated with antibodies targeting the glycolipid antigens include, but are not limited to, epithelial tumors (e.g. breast, colon and lung tumors) and neuroectodermal tumors (tumors of the central and peripheral nervous system).

[0811] The vasculature of solid tumors is abnormal, compared to normal vasculature. Antigens supporting the formation of abnormal microvasculature and progress of cancer include, but are not limited to, VEGF (Vascular endothelial growth factor), VEGFR (vascular endothelial growth factor receptor), integrin αVβ3 and integrin α5β1. Antibodies targeting such antigens may be used to treat a number of solid tumors such as, but not limited to, lung, breast, renal, brain, eye, colorectal, melanoma, ovarian, and/or other tumors, by preventing the formation of abnormal vasculature.

[0812] Hematopoietic and lymphoid malignancies are cancers affecting the blood, bone marrow, lymphs and lymphatic system. Such cancers include e.g. leukemias (acute and chronic lymphoblastic leukemia, acute and chronic myelogenous leukemia), lymphomas (Hodgkin's lymphoma, Non-Hodgkin's lymphoma) and myelomas. Tumors of the hematopoietic and lymphoid tissues are closely related to immune systems. Hematological tumors may be caused by chromosomal abnormalities derived from the myeloid and lymphoid cell lines. The lymphoid cell line produces T and B cells, whereas myeloid cell line produces granulocytes, erythrocytes, thrombocytes, macrophages and mast cells. T and B cell associated hematopoietic differentiation antigens are glycoproteins that are usually from cluster of differentiation (CD) group, such as, but not limited to, CD20, CD30, CD33 and CD52. Antibodies targeting such antigens may be used for prevention and/or treatment of hematopoietic and lymphoid cancers.

[0813] In some embodiments, methods of the present disclosure may be used to treat subjects suffering from a cancer. In some cases, methods of the present disclosure may be used to treat subjects suspected of developing a cancer.

[0814] In some embodiments, methods of the present disclosure may be used for immuno-oncology (I-O) applications. viral particles or pharmaceutical compositions of the present disclosure may be used to develop an immunotherapy or as an immunotherapy in an I-O treatment of a subject suffering from cancer. Non-limiting examples of I-O applications include active, passive or hybrid immunotherapies, checkpoint blockade, adoptive cell transfer (ACT), cancer vaccines, CAR or CAR-T therapies, dendritic cell therapy, stem cell therapies, natural killer (NK) cell-based therapies, and interferon or interleukin based methods.

[0815] AAV Particles and methods of using the viral particles described in the present disclosure may be used to prevent, manage and/or treat cancer. As a non-limiting example, the viral particles of the present disclosure comprise a nucleic acid sequence encoding at least one of the sequences described in Table 9.

### Ocular Diseases

[0816] Eye is an organ comprising a number of components, including the cornea, aqueous humor, lens, vitreous humor, retina, the retinal pigment epithelium, and choroid. Ocular diseases are conditions affecting the different tissues of the eye. A number of diseases and disorders affect the different components of the eye, and may cause impaired vision, full or partial blindness, irritation, dryness, sensitivity, photophobia, and/or light aversion.

[0817] Complement in the eye has an important role in protecting the eye from infections and in modulation of the immune and inflammatory responses. In normal eye, the complement activity is at low level and is regulated by membrane bound and soluble intraocular complement regulatory proteins. Disturbance of the balance between complement activation and complement inhibition may lead to damage to self-tissue (see, e.g, ha et al., 2007, Mol Immunol.; 44(16): 3901-3908, and references therein). The complement system may be activated in three pathways. The classical pathway is activated by immune complexes or substances and involves e.g. complement components C1, C2, C3, C4, C3a, C5, C5a, C5b, CO, C7, C8, C9 and C5b-9. The alternative pathway activates complement component C3 when in interaction with e.g. zymosan, or lipopolysaccharide surfaces, additionally involving, e.g. Factor B, Factor Ba, Factor Bb, Factor D, and Factor P. The third activation pathway is the lectin pathway, and is related to interaction of certain serum lectins, e.g. mannose binding lectin (MBL), mannose and N-acetyl glucosamine residues present in bacterial cell walls. Complement activation is associated with a number of ocular diseases, such as, but not related, age-related macular degeneration (AMD); diabetic retinopathy, choroidal neovascularization (CNV), uveitis, diabetic macular edema, pathological myopia, von Hippel-Lindau disease, histoplasmosis of the eye, Central Retinal Vein Occlusion (C QVC)), corneal neovascularization, and retinal neovascularization, choroidal neovascularization, and other ocular conditions involving complement activation. Antibodies targeting the associated complement components may be used to diagnose, manage and/or treat such ocular diseases.

[0818] Age-related macular degeneration (AMD) is a major cause of irreversible loss of central vision in the elderly worldwide. AMD leads to gradually worsening vision. AMI) does not result in blindness, but may affect daily life. Wet AMD is caused by abnormal blood vessels behind the retina grow under the macula and leak blood and fluid that damage the macula. Wet AMD may be treated with laser coagulation and medication to reverse or stop the growth of blood vessels. Dry AMD is caused by break down of the light sensitive cells in the macula. As of today, there is no treatment for dry AMD.

[0819] There remains a need for prevention, management and treatment therapies for wet and dry AMD. AMD is associated with complement components, as described above. In addition, AMD is associated with proteins such as, but not limited to, VEGF (Vascular endothelial growth factor), EPO (Erythropoietin), EPOR (EPC) receptor), Interleukins IL-1p, IL-17A, Il-10, TNFo. (tumor necrosis factor alpha), or FGFR2 (Fibroblast Growth Factor Receptor). Antibodies targeting the AMD associated complement and growth proteins may be used to treat AN/ID. For example, bevacizumab and ranibizumab (developed by Genentech Inc.) are antibodies targeting VEGF-A to slow down growth of new blood vessels.

[0820] Corneal diseases affect the cornea and the conjunctiva. Cornea and conjunctiva form the outer surface of the eye, which is exposed to external environment, and are susceptible to infection agents, trauma, and/or exposure to chemicals, toxins, allergens etc. Cornea is also affected by autoimmune conditions, nutritional deficiencies and cancer. Corneal diseases may cause e.g. loss of vision, blurred vision, tearing, light sensitivity and pain. Diseases affecting cornea include, but are not limited to, keratitis, corneal dystrophy, corneal degeneration, Fuchs' dystrophy, cancer of cornea, and keratoconjunctivitis, Though surgical and medical treatment therapies for corneal diseases exist, in some cases, the diseases still remain severe and may cause blindness. There remains a need to efficient therapies for prevention, management and treatment of corneal diseases. Complement components of the cornea and the conjunctiva present in a normal eye include, but are not limited to, C1, C2, C3, C4, C5, C6, C7, Factor P (properdin) and factor B. Complement may have a role in corneal diseases, and antibodies targeting complement components of the eye may be used for prevention, treatment and/or management of corneal diseases.

[0821] Uveitis is an inflammation of the uvea, comprising the iris, choroids, and ciliary body. Early symptoms include eye redness, pain, irritation and blurred vision. Uveitis may lead to transient or permanent loss of vision. Uveitis may be associated with other diseases and conditions, such as infections, systemic diseases, non-infectious and autoimmune diseases. Complement components associated with an autoimmune form of uveitis include C3b and C4b. Uveitis may be managed or treated with vitrectomy, immunosuppressive drugs, corticosteroids or cytotoxic medication. However, despite the existing therapies, autoimmune uveitis is a serious condition and may lead to full or partial blindness. There remains a need for therapies for prevention, management, and treatment of uveitis targeting pathophysiology of the disease.

[0822] Retinopathy is a disease resulting from neovascularization (excessive growth of blood vessels) in the light-sensitive tissue of the eye, retina. Retinopathy may result in impaired vision or partial or full blindness. Retinopathy may be caused by systemic diseases, e.g. diabetes, or hypertension, trauma, excessive sun light exposure or ionizing radiation. Retinopathy is often treated with laser therapy. Medical treatments, such as antibodies, to control the growth of blood vessels, are also applied. However, despite the existing treatment methods, retinopathy is still a severe condition and may lead to blindness. Diabetic retinopathy is one of the leading causes of vision loss in middle-aged individuals. There remains a need for new therapies for prevention, management and/or treatment of retinopathy. For example, antibodies targeting blood vessel growth (e.g. vascular endothelial growth factor (′EGF), complement components (e.g. C3, C4, Clq, C9, C4b), and cluster of differentiation proteins (e.g. CD55, CD59) may be used for prevention, management and/or treatment of different retinopathies.

[0823] Photophobia is a condition referring to abnormal sensitivity or aversion to light. Photophobia is related to a number of ocular and nervous system diseases and disorders. Photophobia may be caused by damage to cornea or retina, albinism, overstimulation of the photoreceptors, excessive electric pulses to the central nervous system, or optic nerve. Photophobia may be associated with migraine, nervous system disorders (e.g. autism, dyslexia, encephalitis), infections (e.g. rabies, Lyme disease, mononucleosis), eye disorders (e.g. uveitis, corneal diseases, retinal diseases, scarring or trauma to cornea). As of today, there is no medical treatment for photophobia on the market. Photophobia is associated with calcitonin gene related peptide (CGRP) and CGRP receptors, and antibodies targeting CGRP may be used to prevent and/or treat photophobia, as described in U.S. Patent application US20120294802, the contents of which are herein incorporated by their reference.

[0824] In some embodiments, methods of the present disclosure may be used to treat subjects suffering from ocular diseases. In some cases, methods of the present disclosure may be used to treat subjects suspected of developing ocular diseases.

[0825] AAV Particles and methods of using the viral particles described in the present disclosure may be used to prevent, manage and/or treat psychiatric disorder. As a non-limiting example, the viral particles of the present disclosure comprise a nucleic acid sequence encoding at least one of the sequences described in Table 11.

### Systemic Diseases of the Blood, Heart and Bone

[0826] Systemic diseases are a category of conditions affecting the whole body, or many tissues and organs of the body. Systemic conditions associated with the blood, blood vessels, and heart, include, but are not limited to, heart failure, acute coronary syndrome, atherosclerosis, hypertension, lung disease, cardiomyopathy, hyperlipidemia, hypercholesterolemia, hypertriglyceridemia, blood clotting, cardiopulmonary bypass, myocardial infection, platelet aggregation and hemolytic diseases. In general, such conditions affect individual's quality of life and may be life-threatening. Cardiovascular diseases, referring to heart and blood vessels related conditions, are the leading cause of death worldwide. There remains a need for therapies affecting the pathophysiology of systemic heart, blood and blood circulation diseases. Antibodies for treating such conditions have been developed, targeting proteins such as, but not limited to, selectin P, integrin αIIbβ3, GPIIb/IIIa, RHD (Rh blood group, D antigen), PCSK9 (proprotein convertase subtilisin/kexin type 9), oxLDL (Oxidized low-density lipoprotein), CD20 (B-lymphocyte antigen), ANGPTL3 (Angiopoietin-tike 3), F9 (human factor 9), F10 (human factor 10), TFPI (Tissue Factor Pathway Inhibitor (Lipoprotein-Associated Coagulation inhibitor)), CD41 (Integrin, Alpha 2b (Platelet Glycoprotein lib Of IIb/IIIa Complex, Antigen CD41)).

[0827] In some embodiments, methods of the present disclosure may be used to treat subjects suffering from blood, blood circulation and heart related systemic diseases. In some cases, methods of the present disclosure may be used to treat subjects suspected of developing systemic blood, blood circulation and heart related systemic diseases.

[0828] Osteoporosis is a disease characterized by a reduced bone mineral density, and disrupted bone microarchitecture. Individuals with osteoporosis have a high susceptibility to bone fractures. Osteoporosis causes disability especially in the elderly, and may be fatal.

[0829] There are medical therapies for management of the osteoporosis, and other conditions associated with reduced bone density, such as calcitonin, bisphosphonates, estrogen replacement and selective estrogen modulators for prevention of bone loss, and anabolic agents to increase bone mass and bone mineral density. However, the present medical therapies have side effects and/or require frequent administration. There remains a need for efficient and long lasting medical therapy affecting the pathophysiology of osteoporosis and other conditions associated with reduced bone density, such as antibody therapies. Antibodies for treatment of osteoporosis are on the market, e.g. blosozumab (developed by Eli Lilly and Co.) targeting sclerostin (SOST) for increasing bone density, and denosumab (developed by Amgen) targeting TNF SF11 (Tumor Necrosis Factor (Ligand) Superfamily, Member 11) for treatment of bone loss.

[0830] In some embodiments, methods of the present disclosure may be used to treat subjects suffering from osteoporosis and/or other conditions associated with reduced bone density. In some cases, methods of the present disclosure may be used to treat subjects suspected of developing osteoporosis and/or other conditions associated with reduced bone density.

[0831] AAV Particles and methods of using the viral particles described in the present disclosure may be used to prevent, manage and/or treat systemic diseases of the blood, heart and/or bone. As a non-limiting example, the viral particles of the present disclosure comprise a nucleic acid sequence encoding at least one of the sequences described in Table 12.

### Immune System & Autoimmune Disease

[0832] Human immune system is a complex mechanism for identifying and removing harmful environmental agents and repairing the harm and damage caused by them. The basis of the immune system is ability to identify body's own substances from substances acquired. The immune response system can be divided into innate and adaptive systems. The innate system is present at all times and includes macrophages, dendritic cells, myeloid cells (neutrophils, mast cells, basophils, eosinophils) NK cells, complement factors and cytokines. The adaptive system responses to infectious agents, and include T and B lymphocytes, antibodies and cytokines. Activation of T and B cells in the absence of an infectious agents leads to autoimmune diseases (see, e.g. Mackay et al., 2001, N Engl J Med, Vol. 345, No. 5, and references therein). Autoimmune diseases may affect a number of body's tissues and functions, e.g. joints, skin, blood vessels, muscles, organs, intestine etc. Autoimmune diseases arise from and overactive and misguided immune response to body's natural tissues and species. Autoimmune diseases and conditions include, but are not limited to, rheumatoid arthritis, diabetes type 1, systemic lupus erythematosus, celiac sprue, psoriasis, Graves' disease, and Lyme disease. Autoimmune diseases may be caused by infections, drugs, environmental irritants, toxins, and/or genetic factors. Autoimmune diseases affect up to 50 million individuals in the US. Two most common autoimmune diseases are rheumatoid arthritis and autoimmune thyroiditis, together affecting approximately 5% of population in Western countries.

[0833] Though medical therapies for autoimmune diseases exits, the diseases may still significantly lower the quality of life, or even be fatal. There remains a need for medical therapies affecting the pathophysiology of autoimmune diseases. Autoimmune disease pathophysiology is associated with a number of factors and may be prevented and/or treated by antibodies targeting associated proteins. Such targets include, but are not limited to, infectious agents; environmental triggers (e.g. gliadin); targets affecting cytokinone production or signaling (e.g. TNFa (tumor necrosis factor alpha), IL-1 (interleukin 1-receptor), IL-2 (interleukin-.2), IL-2R (interleukin-2 receptor), IL-7 (interleukin-7), IL-10 (interleukin-10), IL-10R (interleukin-10 receptor), interferon-y, STAT-3 (Signal transducer and activator of transcription 3), STAT-4 (Signal transducer and activator of transcription 4), TGF beta (transforming growth factor beta), T cell trans TGF beta); T cell regulators (e.g. CTLA4 (Cytotoxic T-Lymphocyte-Associated Protein 4)); complement components (e.g. C1 and C4); TNFa (tumor necrosis factor alpha) and TNFb (tumor necrosis factor beta); T cell regulators (e.g. CD1); epitopes of B and T cells; and/or other targets, such as those associated with B and C cells. (see, e.g. Mackay et al., 2001, N Engl J Med, Vol. 345, No, 5, and references therein).

[0834] In some embodiments, methods of the present disclosure may be used to treat subjects suffering from an autoimmune disease. In some cases, methods of the present disclosure may be used to treat subjects suspected of developing an autoimmune disease.

[0835] AAV Particles and methods of using the viral particles described in the present disclosure may be used to prevent, manage and/or treat immune system and autoimmune disease. As a non-limiting example, the viral particles of the present disclosure comprise a nucleic acid sequence encoding at least one of the sequences described in Table 9.

### Inflammatory Disorders and Inflammation

[0836] Inflammation is a natural response of the body to an irritation e.g. by infection, damaged cells or other harmful agents. The purpose of the inflammation is to remove the cause of irritation and necrotic cells and damaged tissues and initiate cell and tissue repair. Inflammation has a role in majority of diseases. Inflammatory disorders are abnormalities in the body's ability to regulate inflammation. Over 100 disorders associated with high level of inflammation have been identified, including, but not limited to, Alzheimer's, ankylosing spondylitis, arthritis (osteoarthritis, rheumatoid arthritis (RA), psoriatic arthritis), asthma, atherosclerosis, Crohn's disease, colitis, dermatitis, diverticulitis, fibromyalgia, hepatitis, irritable bowel syndrome (IBS), systemic lupus erythematous (SLE), nephritis, Parkinson's disease, and ulcerative colitis. Many inflammatory disorders are severe, and even life-threatening. Antibodies targeting proteins associated with inflammation may be used to prevent, manage or treat inflammatory disorders as well as inflammation associated diseases.

[0837] A large number of proteins are associated in inflammation, including, but not limited to, TNF (anti-tumor necrosis factor), IL1R (Interleukin-1 receptor), IL-6R (Interleukin-6 receptor), Alpha integrin subunit, CTLA4 (Cytotoxic T-Lymphocyte-Associated Protein 4), and CD20 (see, e.g. Kotsovilis and Andreakos, 2014, Michael Steinitz (ed.), Human Monoclonal Antibodies: Methods and Protocols, Methods in Molecular Biology, vol. 1060, and references therein). For example, adalimumab (developed by Abbot Laboratories) is a TNF-targeting antibody for rheumatoid arthritis and other arthritises, psoriasis, and Crohn's disease and Natalizumab (developed by Biogen Idec) is an antibody targeting alpha 4-integring for treatment of Crohn's disease. Additionally, plethora of cytokines, chemokines, adhesion and co-stimulatory molecules, receptors, as well as diverse cell types, may have a role in inflammatory diseases.

[0838] In some embodiments, methods of the present disclosure may be used to treat subjects suffering from an inflammatory disease. In some cases, methods of the present disclosure may be used to treat subjects suspected of developing an inflammatory disease.

[0839] AAV Particles and methods of using the viral particles described in the present disclosure may be used to prevent, manage and/or treat inflammatory disorders and inflammation. As a non-limiting example, the viral particles of the present disclosure comprise a nucleic acid sequence encoding at least one of the sequences described in Table 9.

### Other Therapeutic Targets

[0840] The viral particles or pharmaceutical compositions of the present disclosure useful in preventing or treating disease may alternatively, or in combination, encode an antibody that binds a target antigen including, but not limited to, any of the following, including fragments or variants thereof, α-synuclein (monomers, oligomers, aggregates, fragments), ABCA1 (ATP-binding cassette, sub-family A, member 1), ABCA4 (ATP-binding cassette, sub-family A, member 4), ABCB1 (ATP-binding cassette, sub-family B, member 1), ACE (angiotensin I converting enzyme), ACKR1 (atypical chemokine receptor 1 (Duffy blood group)), AMPA (DL-a-amino-3-hydroxy-5-methyl-4-isoxazole propionic acid), ACTH (Adrenocorticotropic Hormone), ACVR2A (Activin receptor type-2A), ACVR2B (Activin receptor type-2B), ADDL (Adducin-Like Protein 70), ADORA2A (adenosine A.2a. receptor), ADRA2A (adrenoceptor alpha 2A), AIFM1 (apoptosis-inducing factor), AKT1 (RAC-alpha serine/threonine-protein kinase), ALK-1 (activin receptor-like kinase 1), Alpha beta fibril, alpha subunit (basic helix-loop-helix transcription factor), AMT (Aminomethyltransferase), Amyloid 13 (monomers, oligomers, aggregates, fragments), amyloid or amyloid-like proteins, ANGPTL3 (Angi opoietin-Like 3), ANGTP1 (angiopoitin 1), ANGTP2 (angiopoietin 2), ANK3 (ankyrin 3), ANKG (ankyrin G), Annexin IV, phospholipid, Anx-A1 (annexin A1), APOE (apolipoprotein E), APP (amyloid beta precursor protein), ARSD (Aryl sulfatase D), ATM (Ataxia Telangiectasia Mutated serine/threonine kinase), ATXN1 (ataxin 1), ATXN2 (ataxin 2), ATXN3 (ataxin 3), ATXN7 (ataxin 7), B Lymphocyte Stimulator, BDNF (brain-derived neurotrophic factor), beta A4 peptide/Alpha beta 4, beta A4 peptide, Alpha beta 5, bAlpha beta 6, Alpha beta 7, Alpha beta 8, Alpha beta 9, Beta-secretases (RACE), BRAE (B-Raf Proto-Oncogene, Serineffhreonine Kinase), Properdin (factor P), Factors Ba and Bb, C1, Clq (complement component 1, subcomponent q), C2, C3, C4, C3a, C3b, C5, C5a, C5b, C6, C7, C8, C9 and C5b-9 (complement components), CAIX (Carbonic anhydrase IX) CA 125 (cancer antigen 125), CACNA1A (calcium channel voltage-dependent P/Q type alpha 1A subunit), cadherins, CA-IX (carbonic anhydrase 9), CALCA (calcitonin-related polypeptide alpha), CCKBR (cholecystokinin B receptor), CCL1.1 (eotaxin-1), CCL2 (Chemokine (C-C Motif) Ligand 2), CD11 (integrin alpha component), CD147 (basigin), CD154 (CD40L), CD19 (Cluster of Differentiation 19), CD2 (cluster of differentiation 2), CD20 (B-lymphocyte antigen), CD200 (cluster of differentiation 200), CD22 (cluster of differentiation 22), CD221 (insulin-like growth factor 1 (IGF-1) receptor), CD248 (Endosialin), CD26 (Dipeptidyl peptidase-4), CD27 (antigen precursor), CD274 (cluster of differentiation 274), CD28 (Cluster of Differentiation 28), CD29 (Integrin, Beta 1), CD3 (cluster of differentiation 3), CD30 (cluster of differentiation 30), CD31 (cluster of differentiation 31), CD33 (cluster of differentiation 33), CD37 (Leukocyte antigen), CD38 (cyclic ADP ribose hydrolase), CD3E (T-Cell Surface Antigen T3/Leu-4 Epsilon Chain), CD4 (T-Cell Surface Antigen T4/Leu-3), CD40 (CD40 Molecule, INF Receptor Superfamily Member 5), CD41 (Integrin, Alpha 2b (Platelet Glycoprotein fib Of IIb/IIIa Complex, Antigen CD41)), CD44 (cluster of differentiation 44), CD51 (integrin alpha 1), CD52 (Human Epididymis-Specific Protein 5), CD55 (Decay Accelerating Factor For Complement (Cromer Blood Group)), CD58 (lymphocyte function-associated antigen 3), CD59 (MAC-inhibitory protein), CD6 (cluster of differentiation 6), CD70 (cluster of differentiation 70, ligand for CD27), CD74 (HLA class II histocompatibility antigen gamma chain), CD79B (immunoglobulin-associated beta), CEA (Carcinoembryonic antigen), CFHR1 (Complement Factor H-Related 1), CGRP (Calcitonin gene-related peptide), CHMP213 (charged multivesicular body protein 2B), CHRNA4 (cholinergic receptor nicotinic alpha 4 (neuronal)), CHRNB2 (cholinergic receptor nicotinic beta 2 (neuronal)), CISD2 (CDGSH iron sulfur domain 2), CLEC16A (C-type lectin domain family 16 member A), CLRN1 (clarin 1), CNR1 (cannabinoid receptor 1), CNTNAP2 (contactin associated protein-like 2), COMT (catechol-O-methyltransferase), CRB1 (crumbs family member 1, photoreceptor morphogenesis associated), CRX (cone-rod homeobox), CRY (crystallin), CSF1R (Colony Stimulating Factor 1 Receptor), CSF2 (Colony Stimulating Factor 2 (Granulocyte-Macrophage)), CSF2RA (Colony Stimulating Factor 2 Receptor, Alpha, Low-Affinity), CTGF (Connective Tissue Growth Factor), CTLA4 (Cytotoxic T-Lymphocyte-Associated Protein 4), CXC (chemokine receptor type 4), CXCL10 (Chemokine (C-X-C Motif) Ligand 10), DDC (dopa decarboxylase (aromatic L-amino acid decarboxylase)), DIABLO (LAP-Binding Mitochondrial Protein), differentiation factor 8 (GDF8), DISC1 (disrupted in schizophrenia 1), DLL3 (Delta-Like 3 (Drosophila)), DLL4 (Delta-Like 4 (Drosophila)) DPP4 (dipeptyl-peptidase 4), DPP6 (dipeptidyl-peptidase 6), DR6 (Death receptor 6), DRD1 (dopamine receptor D1), DRD2 (dopamine receptor D2), DRD4 (dopamine receptor D4), DRD5 (dopamine receptor 5), DRD5 (dopamine receptor D5), DTNBP1 (dystrobrevin binding protein 1), EAG1 (Ether-A-Go-Go Potassium Channel 1), EDB (fibronectin extra domain-B), EDNRA (endothelin receptor type A), EFNA1 (Ephrin-A1) EGET; (EGF-Like-Domain, Multiple 7), EGFR/ERBB1/HER1 (epidermal growth factor receptor 1), EN2 (Engrailed Homeobox 2), EPCAM (Epithelial cell adhesion molecule), EPHA3 (EPH Receptor A3), episialin (a carcinoma-associated mucin, MUC-1), ERBB2 (epidermal growth factor receptor 2), ERBB3 (epidermal growth factor receptor 3), ESR1 (estrogen receptor 1), F3 (coagulation factor Hp, F9 (human factor 9), F10 (human factor 10), FAAH (fatty acid amide hydrolase), Factor D C3 proactivator convertase), humanized IgG1, humanized IgG2, FAP (Fibroblast Activation Protein, Alpha), FBN2 (fibrillin 2), FBP (Folate-binding protein), FcγRIIB (Fc receptor gamma B), FcγRIIIA (Fc receptor gamma A), FLT1 (Fms-Related Tyrosine Kinase 1), FOLR1 (folate receptor alpha), Frizzled receptor, FAN (frataxin), FUS/TLS (RNA binding protein), G protein-coupled, GAA (glucosidase alpha acid), Gc-globulin (Vitamin D binding protein), Gangliosides, GD2 (ganglioside G2), GD3 (ganglioside g3), GM2 (monosialotetrahexosylganglioside 2) (GDF-8 (myostatin), GDNF (glial cell derived neurotrophic factor), GDNF (glial cell derived neurotrophic factor), GFAP (glial fibrillary acidic protein), GFRα3 (GDNF family receptor alpha-3), ghrelin, GIT1 (G protein-coupled receptor kinase interacting ArfGAP 1), GJA (Gap junction protein), GLDC Glycine Dehydrogenase (Decarboxylating), glycoprotein NMB (GPM/1B), gpA33 (Glycoprotein A33 (Transmembrane)), GPC3 (glypican 3), GRIN2B (glutamate receptor ionotropic N-methyl D-aspartate 2B), GRN (granulin), GDF8 (growth differentiation factor 8), GTPases (guanosine triphosphate), GSTP1 (glutathione S-transferase pi 1), GUCA1A (guanylate cyclase activator 1A (retina), GUCY2C (anti-GCC), HMCN1 (hemicentin 1), HGF (Hepatocyte Growth Factor), HIF1A (hypoxia inducible factor 1, HINT1 (histidine triad nucleotide binding protein 1), HIST3H3 (Histone 113), histone, HLA-DQB1 (major histocompatibility complex class II DQ beta 1), HLA-DR (MHC class cell surface receptor), HLA-DRB1 (major histocompatibility complex class DR beta 1), hNav1.7 (sodium ion channel), HTR1A (5-hydroxytryptamine (serotonin) receptor 1A G protein-coupled), HTR2A (5-hydroxytryptamine (serotonin) receptor 2A, HTR2A (5-hydroxytryptamine (serotonin) receptor 2A G protein-coupled), (huntingtin), IAP-binding mitochondrial protein, IFNAR1 (Interferon (Alpha, Beta And Omega) Receptor 1), IFNB1 (interferon beta 1 fibroblast), IFN-γ (Interferon gamma), IGF-1 receptor, IGF1R (insulin-like growth factor 1 receptor), IGF-I (insulin-like growth factor 1), IGG1 (immunoglobulin subclass 1), IgG2 (immunoglobulin subclass 2), IgG4 (immunoglobulin subclass 4), KM1H (Immunoglobulin Heavy Constant Epsilon) IL 1B (interleukin 1 beta), IL12 (interleukin 12), IL12B (interleukin 12B), IL13 (interleukin 13), 11.L17A (interleukin 17A), IL17F (interleukin 17F), ILIA (interleukin 1A), IL1B (interleukin 1 beta), IL1-Ri (Interleukin 1 receptor, type I), 1120 (Interleukin 20), IL23A (interleukin 23A), IL-23p19 subunit (interleukin 23 subunit p19), IL2RA (interleukin 2 receptor alpha), IL4R (interleukin 4 receptor alpha, IL6 (interleukin 6), IL6R (interleukin 6 receptor), IL7R (interleukin 7 receptor), ILGF2 (insulin like growth factor 2), INS (insulin), Integrin a5(31, Integrin αVβ3, integrin αIIbβ3/GPIIb/IIIa, IP6K2 (inositol hexakisphosphate kinase 2), ITGA4 (Integrin, Alpha 4 (Antigen CD49D, Alpha 4 Subunit Of VLA-4 Receptor)), ITGB7 (Integrin, Alpha 7 (Antigen CD49D, Alpha 4 Subunit Of VLA-7 Receptor)), ITGAL (integrin alpha L chain), ITGAV ((Vitronectin Receptor, Alpha Polypeptide, Antigen CD51), ITGB3 (Integrin alpha-V/beta-3), KCNQ2 (potassium channel voltage gated KQT-like subfamily Q member 2), KDR (Kinase Insert Domain Receptor), KIR2D (killer immunoglobulin-like receptor (KIR) 2D subtype), KLRC1 (Killer Cell Lectin-Like Receptor Subfamily C, Member 1), LAG-3 (Lymphocyte-activation gene 3), Le (y) (Lewis y) antigen, LINGO (Leucine rich repeat and Immunoglobin-like domain-containing protein 1), LOXL2 (Lysyl oxidase homolog 2), LPG (lysophosphatidylglucoside), LPS (Lipopolysaccharides), LRP1 (low density lipoprotein receptor-related protein 1), LRRC6 (Leucine Rich Repeat Containing 6), LRRK2 (leucine-rich repeat kinase 2), LTA (Lymphotoxin Alpha), MAF (maf avian musculoaponeurotic fibrosarcoma oncogene homolog), MAG (Myelin Associated Glycoprotein), MAI (myelin associated inhibitor), MAOB (monoamine oxidase B), MAPT (microtubule-associated protein tau), MBP (myelin basic protein), MCAT (monocyte chemotactic and activating factor), MCP-1 (Monocyte chemoattractant protein-i), MBL (mannose binding lectin), mannose, MET (Tyrosine-Protein Kinase Met), MIF (Macrophage Migration Inhibitory Factor (Glycosylation-Inhibiting Factor), MS4A1 (Membrane-Spanning 4-Domains, Subfamily A, Member 1), MSLN (Mesothelin), MST1R (Macrophage Stimulating 1 Receptor), MSTN (myostatin), MUC1/Episialin MUC5AC (Mucin 5AC, Oligomeric Mucus/Gel-Forming), mucin CanAg (glycoform. MUC-1), Mucins, myostatin, myostatin antagonists, N-acetyl glucosamine, NCAM1 (Neural Cell Adhesion Molecule 1) Neu5Gc/NGNA (Neurogenin A), neuregulin (NRG), neurokinin B, NGF (Nerve growth factor), NMDA (N-methyl-D-aspartate), NOGO (Neurite outgrowth inhibitor), NOGO receptor-i, Nogo-66, NOGOA/NiG (Neurite Outgrowth Inhibitory Fragments of NOGOA), Notch receptor, NOTCH-1 (Notch homolog 1, translocation-associated (Drosophila)), NRG1 (neuregulin 1), INRP1 (Neuropilin 1), NT-3 trkC ligand, N-terminal region of Aβ8-x peptide, OGG1 (8-oxoguanine DNA glycosylase), oligomers of N-terminal truncated Aβ, OPA2 (Optic Atrophy 2), OPA3 (Optic Atrophy 3), oxLDL (Oxidized low-density lipoprotein), P75 (Low-affinity Nerve Growth Factor Receptor), PAND1 9Panic disorder 1), PAND2 (Panic disorder 2), PAND3 9 Panic disorder 3), PARK2 (parkin RBR E3 ubiquitin protein ligase), PCSK9 (proprotein convertase subtilisin/kexin type 9), PD-1 (Programmed cell death protein 1), PD-2 (Programmed cell death protein 2), PD-3 (Programmed cell death protein 3), PD-4 (Programmed cell death protein 4), PD-S(Programmed cell death protein 5), PD-6 (Programmed cell death protein 6), PD-7 (Programmed cell death protein 7), PD-8 (Programmed cell death protein 8), PDGFRA (Platelet-derived growth factor receptor alpha), PDGFRB (Platelet-derived growth factor receptor beta), PD-L1 (Programmed cell death protein 1 ligand), PEX7 ((Peroxisomal Biogenesis Factor 7), PHOBS (phobia specific), PhosphatidyL-serine, chimeric IgG1, Phosphatide L-serine, Chimeric IgG2, PINK1 (PTEN induced putative kinase 1), platelet-derived growth factor receptor beta PDGFRB, PLAU (plasminogen activator urokinase), PLP (protelopid protein), PMP22 (peripheral myelin protein 22), POLG (polymerase (DNA directed) gamma), PRDM16 (PR domain containing 16), Prion proteins, PrP, PrPC, PrPSc, PRKCG (protein kinase C gamma), PSEN1 (presenilin 1), PSEN2 (presenilin 2), PSMA (Prostate-specific membrane antigen), PTGS2 (prostaglandin-endoperoxide synthase 2 (prostaglandin G/H synthase and cyclooxygenase)), PIPN11 (Tyrosine-protein phosphatase non-receptor type 11), PVRL4 (Poliovirus Receptor-Related 4), PVRL5 (Poliovirus Receptor-Related 5), pyroglutamated A (3, RAfl (proto-oncogene serine/threonine-protein kinase), RAGE protein, RANKL (Receptor activator of nuclear factor kappa-B ligand), RCAN1 (regulator of calcineurin 1), RDh12 (retinol dehydrogenase 12 (ail-trans/9-cis/11-cis)), RGI A (Repulsive guidance molecule A), RHD (Rh blood group, D antigen), RHO (rhodopsin), RPE65 (retinal pigment epithelium-specific protein 65 kDa), RTN4 (Reticulon-4, NOGO), S100B (calcium-binding protein B), S 1P4 (Type 4 sphingosine 1-phosphate G protein-coupled receptor), SCN1A (Sodium Channel, Voltage Gated, Type I Alpha Subunit), SDC1 (Syndecan 1), selectin P, SHANK3 (S113 And Multiple Ankyrin Repeat Domains 3), SLAMF7 (SLAM Family Member 7), SLC18A2 (solute carrier family 18 (vesicular monoamine transporter, member 2), SLC1A.2 (solute carrier family 1 (glial high affinity glutamate transporter, member 2), SLC34A2 (Solute Carrier Family 34 (Type II Sodium/Phosphate Cotransporter), SLC6A3 (solute carrier family 6 (neurotransmitter transporter) member 3), SLC6A4 (Solute Carrier Family 6 (Neurotransmitter Transporter), SMN1 (survival of motor neuron 1 telomeric), SMN2 (survival of motor neuron 2 centromeric), SNCA (synuclein alpha (non A4 component of amyloid precursor)), SNCA. (synuclein alpha (non A4 component of amyloid precursor), SNCB (synuclein beta), SOD1 (superoxide dismutase 1 soluble), SOST (Sclerostin), sphingosine-1-phosphate, SQSTM1 (sequestosome 1), STEAP1 (Six Transmembrane Epithelial Antigen Of The Prostate 1), SLIF2 (Sulfatase 2), TACR1 (tachykinin receptor 1), TAG-72 (Tumor-associated glycoprotein 72), TARDBP (TAR DNA binding protein), tau antigen, tau protein, tau pS422, TDP-43, tenascin, tenascin C, TFPI (Tissue Factor Pathway inhibitor (Lipoprotein-Associated Coagulation Inhibitor)), TGF beta (Transforming growth factor beta), TH (Tyrosine hydroxylase), TkrC (Tropomyosin receptor kinase C), TMEFF2 (Transmembrane Protein With EGF-Like And Two Follistatin-Like Domains 2), TMEFF3 (Transmembrane Protein With EGF-Like And Two Follistatin-Like Domains 3), TNF (tumor necrosis factor), TNFa (tumor necrosis factor alpha), TNTRSF1OB (Tumor Necrosis Factor Receptor Superfamily, Member 10b), TNFRSF12A (Tumor Necrosis Factor Receptor Superfamily, Member 12A), TNFRSF8 (Tumor Necrosis Factor Receptor Superfamily, Member 8), TNFRSF9 (Tumor Necrosis Factor Receptor Superfamily, Member 9), TNF SF11 (Tumor Necrosis Factor Receptor Superfamily, Member 11), TNFSF13B (Tumor Necrosis Factor Receptor Superfamily, Member 13b), TNF-α, (Tumor Necrosis Factor alpha)), TNNT2 (troponin T type 2), TOR1A (torsin family 1 member A (torsin A)), TPBG (Trophoblast Glycoprotein), TPH2 (tryptophan hydroxylase 2), TRAILR1 (Death receptor 4), TRAILR2 (Death receptor 5), TrkA (Tropomyosin receptor kinase A), TRPV4 (Transient Receptor Potential Cation Channel, Subfamily V, Member 4), TSC2 (tuberous sclerosis 2), TULP1 (tubby like protein 1), tumor necrosis factor related protein 5, tumor specific glycosylation of MUC1, tumor-associated calcium signal transducer 2, tumor protein pS3, 71YRP1 (glycoprotein 75), UCHl1 (ubiquitin carboxyl-terminal esterase L1 (ubiquitin thiolesterase)), UNC-13A (unc-13 homolog A), USH1C (Usher Syndrome 1C), USI-12A (Usher Syndrome 2A (Autosomal Recessive, Mild), VEGF (Vascular endothelial growth factor), VEGF A (Vascular endothelial growth factor A), C5, Factor P, Factor D, EPO (Erythropoietin), EPOR (EPO receptor), Interleukins, IL-113, IL-17A, IL-10, TNFa, FGFR2 (Fibroblast Growth Factor Receptor 2), VEGFR (vascular endothelial growth factor receptor), VEGFR2 (vascular endothelial growth factor receptor 2), vimentin, voltage gated ion channels, VWF (Von Willebrand Factor), WFS1 (Wolfram syndrome 1 (wolframin)), YES1 (Yamaguchi Sarcoma Viral Oncogene Bornolog 1).

[0841] In some embodiments, the viral particle of the present disclosure, useful in treating a non-infectious disease, targets an antigen considered to be useful in the treatment of a different disease. As a non-limiting example, a viral particle or pharmaceutical composition thereof used for the treatment of cancer, immune system dysfunctions or inflammatory disease may likewise be used for the treatment of a neurodegenerative disorder such as, but not limited to, A1), PD, HD, ALS, SMA, or DLB.

[0842] AAV Particles and methods of using the viral particles described in the present disclosure may be used to prevent, manage and/or treat non-infectious disease. As a non-limiting example, the viral particles of the present disclosure comprise a nucleic acid sequence encoding at least one of the sequences described in Table 3-12.

### Therapeutic Applications: Tau

[0843] The present disclosure additionally provides a method for treating neurological diseases and/or disorders in a mammalian subject, including a human subject, comprising administering to the subject any of the viral particles of the disclosure. In some cases, neurological diseases and/or disorders treated according to methods described herein include indications involving irregular expression or aggregation of tau. Such indications may include, but are not limited to Alzheimer's disease (AD), frontotemporal dementia and parkinsonism linked to chromosome 17 (FTDP-17), Frontotemporal lobar degeneration (FTLD), chronic traumatic encephalopathy (CTE), Progressive Supranuclear Palsy (PSI)), Down's syndrome, Pick's disease, Corticobasal degeneration (CBD), Amyotrophic lateral sclerosis (ALS), Prion diseases, Creutzfeldt-Jakob disease (CID), Multiple system atrophy, Tangle-only dementia, and Progressive subcortical gliosis.

[0844] In some embodiments, methods of treating neurological diseases and/or disorders in a subject in need thereof may comprise the steps of: (1) deriving, generating and/or selecting an anti-tau antibody, antibody-based composition or fragment thereof; (2) producing a viral particle with a viral genome that includes a payload region encoding the selected antibody of (1); and (3) administering the viral particle (or pharmaceutical composition thereof) to the subject.

[0845] The present disclosure provides a method for administering to a subject in need thereof, including a human subject, a therapeutically effective amount of the viral particles of the disclosure to slow, stop or reverse disease progression. As a non-limiting example, disease progression may be measured by cognitive tests such as, but not limited to, the Mini-Mental State Exam (MMSE) or other similar diagnostic tool(s), known to those skilled in the art. As another non-limiting example, disease progression may be measured by change in the pathological features of the brain, CSF or other tissues of the subject, such as, but not limited to a decrease in levels of tau (either soluble or insoluble). In some embodiments levels of insoluble hyperphosphorylated tau are decreased. In some embodiments levels of soluble tau are decreased. In some embodiments both soluble and insoluble tau are decreased. In some embodiments, levels of insoluble hypetphosphorylated tau are increased. In some embodiments levels of soluble tau are increased. In some embodiments both insoluble and soluble tau levels are increased. In some embodiments, neurofibrillary tangles are decreased in size, number, density, or combination thereof. In another embodiment, neurofibrillary tangles are increased in size, number, density or combination thereof.

### Alzheimer's Disease

[0846] Alzheimer Disease (AD) is a debilitating neurodegenerative disease currently afflicting more than 35 million people worldwide, with that number expected to double in coming decades. Symptomatic treatments have been available for many years but these treatments do not address the underlying pathophysiology. Recent clinical trials using these and other treatments have largely failed and, to date, no known cure has been identified.

[0847] The AD brain is characterized by the presence of two forms of pathological aggregates, the extracellular plaques composed of β-amyloid (Aβ) and the intracellular neurofibrillary tangles (NFT) comprised of hyperphosphorylated microtubule associated protein tau. Based on early genetic findings, β-amyloid alterations were thought to initiate disease, with changes in tau considered downstream. Thus, most clinical trials have been Aβ-centric. Although no mutations of the tau gene have been linked to AD, such alterations have been shown to result in a family of dementias known as tauopathies, demonstrating that changes in tau can contribute to neurodegenerative processes. Tau is normally a very soluble protein known to associate with microtubules based on the extent of its phosphorylation. Hyperphosphorylation of tau depresses its binding to microtubules and microtubule assembly activity. In tauopathies, the tau becomes hyperphosphorylated, misfolds and aggregates as NFT of paired helical filaments (PHF), twisted ribbons or straight filaments. In AD, NFT pathology, rather than plaque pathology, correlates more closely with neuropathological markers such as neuronal loss, synaptic deficits, severity of disease and cognitive decline. NFT pathology marches through the brain in a stereotyped manner and animal studies suggest a trans-cellular propagation mechanism along neuronal connections.

[0848] Several approaches have been proposed for therapeutically interfering with progression of tau pathology and preventing the subsequent molecular and cellular consequences. Given that NFT are composed of a hyperphosphorylated, misfolded and aggregated form of tau, interference at each of these stages has yielded the most avidly pursued set of targets. Introducing agents that limit phosphorylation, block misfolding or prevent aggregation have all generated promising results. Passive and active immunization with late stage anti-phospho-tau antibodies in mouse models have led to dramatic decreases in tau aggregation and improvements in cognitive parameters. It has also been suggested that introduction of anti-tau antibodies can prevent the trans-neuronal spread of tau pathology.

[0849] The vectored antibody delivery (VAD) of tau disease associated antibodies of the present disclosure may be used to treat subjects suffering from AD and other tauopathies. In some cases, methods of the present disclosure may be used to treat subjects suspected of developing AD or other tauopathies.

### Frontotemporal Dementia and Parkinsonism Linked to Chromosome 17 (FTDP-17)

[0850] Although Alzheimer's disease is, in part, characterized by the presence of tau pathology, no known mutations in the tau gene have been causally linked to the disease. Mutations in the tau gene have been shown to lead to an autosomal dominantly inherited tauopathy known as frontotemporal dementia and parkinsonism linked to chromosome 17 (FTDP-17) and demonstrate that alterations in tau can lead to neurodegenerative changes in the brain. Mutations in the tau gene that lead to FTDP-17 are thought to influence splicing patterns, thereby leading to an elevated proportion of tau with four microtubule binding domains (rather than three). These molecules are considered to be more amyloidogenic, meaning they are more likely to become hyperphosphorylated and more likely to aggregate into NFT (Hutton, M. et al., 1998, Nature 393(6686):702-5). Although physically and behaviorally, FTDP-17 patients can appear quite similar to Alzheimer's disease patients, at autopsy FTDP-17 brains lack the prominent Aβ plaque pathology of an AD brain (Gotz, J. et al., 2012, British Journal of Pharmacology 165(5):1246-59). Therapeutically targeting the aggregates of tau protein may ameliorate and prevent degenerative changes in the brain and potentially lead to improved cognitive ability.

[0851] As of today, there is no treatment to prevent, slow the progression, or cure FTD. Medication may be prescribed to reduce aggressive, agitated or dangerous behavior. There remains a need for therapy affecting the underlying pathophysiology, such as antibody therapies targeting tau protein.

[0852] In some embodiments, the vectored antibody delivery of the present disclosure may be used to treat subjects suffering from FTDP-17. In some cases, methods of the present disclosure may be used to treat subjects suspected of developing FTDP-17.

### Chronic Traumatic Encephalopathy

[0853] Unlike the genetically linked tauopathies, chronic traumatic encephalopathy is a degenerative tauopathy linked to repeated head injuries. The disease was first described in boxers whom behaved “punch drunk” and has since been identified primarily in athletes that play American football, ice hockey, wrestling and other contact sports. The brains of those suffering from CTE are characterized by distinctive patterns of brain atrophy accompanied by accumulation of hyperphosphorylated species of aggregated tau in NFT. In CTE, pathological changes in tau are accompanied by a number of other pathobiological processes, such as inflammation (Daneshvar, D. H. et al., 2015 Mol Cell Neurosci 66(Pt B): 81-90). Targeting the tau aggregates may provide reprieve from the progression of the disease and may allow cognitive improvement.

[0854] As of today, there is no medical therapy to treat or cure CTE. The condition is only diagnosed after death, due to lack of in vivo techniques to identify CTE specific biomarkers. There remains a need for therapy affecting the underlying pathophysiology, such as antibody therapies targeting tau protein.

[0855] In some embodiments, the vectored antibody delivery methods of the present disclosure may be used to treat subjects suffering from CTE. In some cases, methods of the present disclosure may be used to treat subjects suspected of developing CTE.

### Prion Diseases

[0856] Prion diseases, also known as transmissible spongiform encephalopathies (TSEs), are a group of rare progressive conditions affecting the nervous system. The related conditions are rare and are typically caused by mutations in the PRNP gene which enables production of the prion protein. Gene mutations lead to an abnormally structured prion protein. Alternatively, the abnormal prion may be acquired by exposure from an outside source, e.g. by consumption of beef products containing the abnormal pion protein. Abnormal prions are misfolded, causing the brain tissue to degenerate rapidly. Prion diseases include, but are not limited to, Creutzfeldt-Jakob disease (CJD), Gerstmann-Sträussler-Scheinker syndrome (GSS), fatal insomnia (FFI), variably protease-sensitive prionopathy (VPSPr), and kuru. Prion diseases are rare. Approximately 350 cases of prion diseases are diagnosed in the US annually.

[0857] OD is a degenerative brain disorder characterized by problems with muscular coordination, personality changes including mental impairment, impaired vision, involuntary muscle jerks, weakness and eventually coma. The most common categories of CJD are sporadic, hereditary due to a genetic mutation, and acquired. Sporadic OD is the most common form affecting people with no known risk factors for the disease. The acquired form of CII) is transmitted by exposure of the brain and nervous system tissue to the prion. As an example, variant CJD (vCDJ) is linked to a bovine spongiform encephalopathy (BSE), also known as a ‘mad cow’ disease. CJD is fatal and patients typically die within one year of diagnosis.

[0858] Priori diseases are associated with an infectious agent consisting of an alternative conformational isoform of the prion protein, PrPSc. PrPSc replication is considered to occur through an induction of the infectious prion in the normal prion protein (PrPC). The replication occurs without a nucleic acid.

[0859] As of today, there is no therapy to manage or cure CJD, or other prion diseases. Typically, treatment is aimed at alleviating symptoms and increasing comfortability of the patient, e.g. with pain relievers. There remains a need for therapy affecting the underlying pathophysiology, such as antibody therapies targeting the priori protein.

[0860] In some embodiments, vectored antibody delivery methods of the present disclosure may be used to treat subjects suffering from a prion disease. In some cases, methods of the present disclosure may be used to treat subjects suspected of developing a prion disease.

### Neurodegeneration and Stroke

[0861] Neurodegenerative diseases and other diseases of the nervous system share many common features. Neurodegenerative diseases, in particular, are a group of conditions characterized by progressive loss of neuronal structure and function, ultimately leading to neuronal cell death. Neurons are the building blocks of the nervous system(s) and are generally not able to reproduce and/or be replaced, and therefore neuron damage and/or death is especially devastating. Other, non-degenerating diseases that lead to neuronal cell loss, such as stroke, have similarly debilitating outcomes. Targeting molecules that contribute to the deteriorating cell structure or function may prove beneficial generally for treatment of nervous system diseases, neurodegenerative disease and/or stroke.

[0862] Certain molecules are believed to have inhibitory effects on neurite outgrowth, contributing to the limited ability of the central nervous system to repair. Such molecules include, but are not limited to, myelin associated proteins, such as, but not limited to, RGM (Repulsive guidance molecule), NOGO (Neurite outgrowth inhibitor), NOGO receptor, MAG (myelin associated glycoprotein), and MAI (myelin associated inhibitor). In some embodiments, the vectored antibody delivery of the present disclosure is utilized to target the aforementioned antigens (e.g., neurite outgrowth inhibitors).

[0863] Many neurodegenerative diseases are associated with aggregation of misfolded proteins, including, but not limited to, alpha synuclein, tau, amyloid β, prion proteins, TDP-43, and huntingtin (see, e.g. De Genst et al., 2014, Biochim Biophys Acta; 1844(11):1907-1919, and Yu et al., 2013, Neurotherapeutics.; 10(3): 459-472, references therein). The aggregation results from disease-specific conversion of soluble proteins to an insoluble, highly ordered fibrillary deposit. This conversion is thought to prevent the proper disposal or degradation of the misfolded protein, thereby leading to further aggregation. Conditions associated with alpha synuclein and tau may be referred to as “synucleinopathies” and “tauopathies”, respectively. In some embodiments, the vectored antibody delivery of the present disclosure is utilized to target the aforementioned antigens (e.g., misfolded or aggregated proteins).

[0864] AAV Particles and methods of using the viral particles described in the present disclosure may be used to prevent, manage and/or treat tauopathies or tau associated disease. As a non-limiting example, the viral particles of the present disclosure comprise a nucleic acid sequence encoding at least one of the sequences described in Table 13.

### Therapeutic Applications: Infectious Diseases

[0865] Viral particles and methods of using the viral particles described in the present disclosure may be used to prevent, manage and/or treat infectious disease. As a non-limiting example, the viral particles of the present disclosure comprise a nucleic acid sequence encoding at least one of the sequences described in Tables 17, and 32-53.

[0866] The methods, components and compositions of the present disclosure may be used to diagnose, prevent, treat and/or manage infectious diseases. Infectious diseases, also known as transmissible diseases or communicable diseases, are caused by invasion and multiplication of agents in the body. infection agents are species typically not present within the body and may be, but are not limited to, viruses, bacteria, prions, nematodes, fungus, parasites or arthropods. Additionally, an infection or symptoms associated with an infection may be caused by one or more toxins produced by such agents. Humans, and other mammals, react to infections with an innate immune system response, often involving an inflammation. The illnesses and symptoms involved with infections vary according to the infectious agent. Many infections may be subclinical without presenting any definite or observable symptoms, whereas some infections cause severe symptoms, require hospitalization or may be life-threatening. Some infections are localized, whereas some may overcome the body through blood circulation or lymphatic vessels. Some infections have long-term effects on wellbeing of infected individuals.

[0867] Infectious agents may be transmitted to humans via different routes. For example, infection agents may be transmitted by direct contact with an infected human, an infected animal, or an infected surface. Infections may be transmitted by direct contact with bodily fluids of an infected human or an animal, e.g. blood, saliva, sweat, tears, mucus, female ejaculate, semen, vomit or urine. For example, infection may be transmitted by a fecal-oral route, referring to an infected person shedding the virus in fecal particles which then enters to person's mouth causing infection. The fecal-oral route is especially common transmission route in environments with poor sanitation and hygiene. Non-limiting examples of agents transmitted by the fecal-oral route include bacteria, e.g. shigella, Salmonella typhi and Vibrio Cholerae, virus, e.g. norovirus, rotavirus, enteroviruses, and hepatitis A, fungi, e.g. Entamadeba histolytica, parasites, tape worms, transmitted by contaminated food or beverage, leading to food poisoning or gastroenteritis. Infections may be transmitted by a respiratory route, referring to agents that are spread through the air. Typical examples include agents spread as small droplets of liquid or as aerosols, e.g. respiratory droplets expelled from the mouth and nose while coughing and sneezing. Typical examples of respiratory transmitted diseases include the common cold mostly implicated to rhinoviruses, influenza caused by influenza viruses, respiratory tract infections caused by e.g. respiratory syncytial virus (RSV). Infections may be transmitted by a sexual transmission route. Examples of common sexually transmitted infections include e.g, human immunodeficiency virus (HIV) causing acquired immune deficiency syndrome (AIDS), chlamydia caused by Neisseria gonorrhoeae bacteria, fungal infection Candidiasis caused by Candida yeast, and Herpes Simplex disease caused by herpes simplex virus. Infections may be transmitted by an oral transmission route, e.g. by kissing or sharing a drinking glass. A common infection transmitted by oral transmission is an infectious mononucleosis caused by Epstein-Barr virus. Infections may be transmitted by a vertical transmission, also known as “mother-to-child transmission,” from mother to an embryo, fetus or infant during pregnancy or childbirth. Examples of infection agents that may be transmitted vertically include HIV, chlamydia, rubella, Toxoplasma gondii, and herpes simplex virus. Infections may be transmitted by an iatrogenic route, referring to a transmission by medical procedures such as injection (contaminated reused needles and syringes), or transplantation of infected material, blood transfusions, or infection occurring during surgery. For example, methicillin-resistant Staphylococcus aureus (MRSA), which may cause several severe infections, may be transmitted via iatrogenic route during surgery. Infections may also be transmitted by vector-borne transmission, where a vector may be an organism transferring the infection agents from one host to another. Such vectors may be triatomine bugs, e.g. trypanosomes, parasites, animals, arthropods including e.g. mosquitos, flies, lice, flees, tick and mites or humans. Non-limiting examples of mosquito-borne infections include Dengue fever, West Nile virus related infections, Yellow fever and Chikungunya fever. Non-limiting examples of parasite-borne diseases include malaria, Human African trypanosomiasis and Lyme disease. Non-limiting examples of diseases spread by humans or mammals include HIV, Ebola hemorrhagic fever and Marburg fever.

[0868] Traditionally infectious diseases are treated with medications and/or good supportive care. Medical prevention, treatment and/or management of bacterial infections may include administration of antibiotics. Antibiotics may inhibit the colonization of bacteria or kill the bacteria. Antibiotics include e.g. penicillins, cephalosporins, macrolides, fluoroquinolones, sulfonamides, tetracyclines, and aminoglycosides. Antibiotics may be specific to a certain bacteria or act against broad spectrum of bacteria. Some types of bacteria are especially susceptible to antibiotics, whereas some bacteria are more resistant. Development of bacterial strain mutations that are resistant to antibiotics is an increasing concern. Methicillin-resistant Staphylococcus aureus (MRSA), vancomycin-resistant Enterococcus (VIDE), multi-drug-resistant Mycobacterium tuberculosis (MDR-TB) and Klebsiella pneumoniae carbapenemase-producing bacteria (KPC) are examples of bacteria that are resistant to most general antibiotics. Due to the emerging resistance, unnecessary administration and overdosing of antibiotics should be avoided. Medical prevention, treatment and/or management of viral infections may include administration of antiviral medications. Antiviral medications may be specific to a certain bacteria or act against a broad spectrum of viruses. Currently antiviral medications are available for es. HIV, influenza, hepatitis B and C. Medical prevention, treatment and/or management of viral infections may include administration of antifungal medication. Antifungal medication kills or prevents the growth of fungi. Types of antifungal medications include e.g. imidazoles, triazoles and triazoles, allylamines, and echinocandins. Development of antifungal medication capable of targeting fungal cells without affecting human cells is a challenge due to the similarities of human and fungal cell on the molecular level. Typically, medical treatment is combined with good supportive care, which includes provision of fluids, bed rest, medication to relieve pain and lower fever, supportive alternative medicine such as vitamins, antioxidants and other supplements important for wellbeing of patients.

[0869] Antibody therapies for infectious diseases have also been developed. Examples of commercial therapeutic antibodies include raxibacumab (developed by Cambridge Antibody Technology and Human Genome Sciences) which is an antibody for the prophylaxis and treatment of inhaled anthrax, SHIGAMAB™ (developed by Bellus Health Inc.) is a monoclonal antibody for treatment of Shiga toxin induced hemolytic uremic syndrome, and actoxumab and bezlotoxumab (developed by Medarex Inc. and the University of Massachusetts Medical School) are commercial human monoclonal antibodies targeting C. difficile toxin A and toxin B, respectively.

[0870] Infectious diseases and/or infection related diseases, disorders, and/or conditions that may be treated by methods, components and compositions of the present disclosure include, but are not limited to, 14-day measles, 5-day fever, acne, acquired immunodeficiency syndrome (AIDS), acrodermatitis chronica atrophicans (ACM, acute hemorrhagic conjunctivitis, acute hemorrhagic cystitis, acute rhinosinusitis, adult T-cell leukemia-lymphoma (ATLL), African sleeping sickness, alveolar hydatid, amebiasis, amebic meningoencephalitis, anaplasmosis, anthrax, arboviral, ascariasis, aseptic meningitis, Athlete's foot, Australian tick typhus, avian Influenza, babesiosis, bacillary angiomatosis, bacterial meningitis, bacterial vaginosis, balanitis, balantidiasis, Bang's disease, Barmah Forest virus, bartonellosis, bat lyssavirus, Bay sore, Baylisascaris, beaver fever, beef tapeworm, bejel, biphasic meningoencephalitis, black bane, black death, black piedra, Blackwater fever, blastomycosis, blennorrhea of the newborn, blepharitis, boils, Bornholm disease, borrelia miyamotoi disease, botulism, boutonneuse fever, Brazilian purpuric fever, break bone fever, brill, bronchiolitis, bronchitis, brucellosis, bubonic, bubonic plague, bullous impetigo, Burkholderia mallei, Burkholderia pseudomallei, burly ulcers mycoburuli ulcers, Busse-Buschke disease, California group encephalitis, campylobacteriosis, candidiasis, canefield fever, canicola fever, capillariasis, carate, carbapenem-resistant enterobacteriaceae (CRE), Carrion's disease, cat scratch fever, cave disease, central Asian hemorrhagic fever, Central European tick, cervical cancer, Chagas disease, cancroid, Chicago disease, chickenpox, Chiclero's ulcer, chikungunya fever, chlamydial, cholera, chromoblastomycosis, ciguatera, clap, clonorchiasis, Clostridium difficile, Clostridium perfringens, coccidioidomycosis fungal, coenurosis, colorado tick fever, condyloma accuminata, condyloma lata, Congo fever, Congo hemorrhagic fever virus, conjunctivitis, cowpox, crabs, Crimean disease, croup, crypto, cryptococcosis, cryptosporidiosis, cutaneous larval migrans, cyclosporiasis, cystic hydatid, cysticercosis, cystitis, Czechoslovak tick, d68 (EV-d68), dacryocytitis, dandy fever, darling's disease, deer fly fever, dengue fever types 1, 2, 3, and 4, desert rheumatism, devil's grip, diphasic milk fever, diphtheria, disseminated intravascular coagulation, dog tapeworm, donovanosis, dracontiasis, dracunculosis, duke's disease, dum dum disease, Durand-Nicholas-Favre disease, dwarf tapeworm, E. coli, eastern equine encephalitis, Ebola hemorrhagic fever, Ebola virus disease (EVD), ectothrix, ehrlichiosis, encephalitis, endemic relapsing fever, endemic syphilis, endophthalmitis, endothrix, enterobiasis, enterotoxin B poisoning (staph food poisoning), enterovirus, epidemic keratoconjunctivitis, epidemic relapsing fever, epidemic typhus, epiglottitis, epsilon toxin, erysipelis, erysipeloid, erysipelothricosis, erythema chronicum migrans, erythema infectiosum, erythema marginatum, erythema multiforme, erythema nodosum, erythema nodosum leprosum, erythrasma, espundia, eumycotic mycetoma, European blastomycosis, exanthem subitum, eyewolin, Far-Eastern tick, fascioliasis, fievre boutonneuse, fifth disease, Filatow-Dukes' disease, fish tapeworm, Fitz-Hugh-Curtis syndrome-perihepatitis, finders island spotted fever, flu, folliculitis, four corners disease, frambesia, francis disease, furunculosis, gas gangrene, gastroenteritis, genital herpes, genital warts, German measles, Gerstmann-Straussler-Scheinker (GSS), giardiasis, Gilchrist's disease, gingivitis, gingivostomatitis, glanders, glandular fever, gnathostomiasis, gonococcal, gonorrhea, granuloma inguinale, guinea worm, haemophilus influenza disease, hamburger disease, Hansen's disease, Hantaan disease, Hantaan-Korean hemorrhagic fever, hantavirus pulmonary syndrome (UPS), hard chancre, hard measles, Haverhill fever, head and body lice, heartland fever, helicobacterosis, hemolytic uremic syndrome (HUS), hepatitis A, hepatitis B, hepatitis C, hepatitis D, hepatitis E, herpangina, herpes-genital, herpes labialis, herpes-neonatal, hidradenitis, histoplasmosis, histoplasmosis, his-werner disease, hiv, hookworm s, hordeola, HTLV-associated myelopathy (HAM), human granulocytic ehrlichiosis, human monocytic ehrlichiosis, human papillomarivus (HPV), human pulmonary syndrome, human pulmonary syndrome (HPS), human T-cell lymphotropic virus (HTLV), hydatid cyst, hydrophobia, impetigo, including congenital, inclusion conjunctivitis, infantile diarrhea, infectious mononucleosis, infectious myocarditis, infectious pericarditis, influenza, isosporiasis, Israeli spotted fever, Japanese encephalitis, jock itch, jorge lobo disease, jungle yellow fever, Junin Argentinian hemorrhagic fever, kala azar, Kaposi's sarcoma, keloidal blastomycosis, keratoconjunctivitis, kuru, Kyasanur forest disease, lacrosse encephalitis, lassa hemorrhagic fever, legionellosis, legionnaires disease, legionnaire's pneumonia, Lemierre's syndrome, lemming fever, leprosy, leptospirosis, listeria, listeriosis, liver fluke, lobo's mycosis, lock jaw, lockjaw, loiasis, louping ill, Ludwig's angina, lung fluke, Lyme disease, lymphogranuloma venereum (LGV), Machupo Bolivian hemorrhagic fever, Madura foot, mal del pinto, malaria, malignant pustule, Malta fever, Marburg hemorrhagic fever, masters disease, maternal sepsis, measles, Mediterranean spotted fever, melioidosis, meningitis, meningococcal disease, Middle East Respiratory Syndrome (NIERS), methicillin-resistant Staphylococcus aureus (MIRSA), milker's nodule, molluscum contagiosum, moniliasis, monkeypox, mononucleosis, mononucleosis-like syndrome, Montezuma's revenge, morbilli, mucormycosis, multiple organ dysfunction syndrome (MODS), multiple-system atrophy (MSA), mumps, murine typhus, Murray Valley encephalitis (MVE), mycoburuli ulcers, mycotic vulvovaginitis, myositis, Nanukayami fever, necrotizing fasciitis, necrotizing fasciitis-type 1, necrotizing fasciitis-type 2, negishi, new world spotted fever, nocardiosis, nongonococcal urethritis, non-polio enterovirus, norovirus, North American blastomycosis, North Asian tick typhus, Norwalk virus, Norwegian itch, Ohara disease, Omsk hemorrhagic fever, onchoceriasis, onychomycosis, opisthorchiasis, opthalmia neonatorium, oral hairy leukoplakia, orf, oriental sore, oriental spotted fever, ornithosis, Oroya fever, otitis externa, otitis media, pannus, paracoccidioidomycosis, paragonimiasis, parainfectious, paralytic shellfish poisoning, paronychia, parotitis, parrot fever, pediculosis, peliosis hepatica, pelvic inflammatory disease, pertussis, phaeohyphomycosis, pharyngoconjunctival fever, piedra, pigbel, pink eye conjunctivitis, pinta, pinworm, pitted keratolysis, pityriasis versicolor, plague, pleurodynia, pneumococcal disease, pneumocystis pneumonia, pneumocystosis, pneumonia, polio, poliomyelitis, polycystic hydatid, Pontiac fever, pork tapeworm, Posada-Wernicke disease, postangina septicemia, Powassan, progressive multifocal leukencephalopathy (PML), progressive rubella panencephalitis, prostatitis, pseudomembranous colitis, psittacosis, puerperal fever, pustular rash diseases, pyelonephritis, pylephlebitis, q-fever, quinsy, quintana fever, rabbit fever, rabies, racoon roundworm, rat bite fever, rat tapeworm, Reiter syndrome, relapsing fever, respiratory syncytial virus (RSV), rheumatic fever, rhodotorulosis, ricin poisoning, rickettsialpox, rickettsiosis, Rift valley fever, ringworm, Ritter's disease, river blindness, rocky mountain spotted fever, rose handler's disease, rose rash of infants, roseola, Ross river fever, rotavirus, roundworm s, rubella, rubeola, Russian spring, salmonellosis gastroenteritis, San Joaquin valley fever, Sao Paulo encephalitis, Sao Paulo fever, scabies infestation, scalded skin syndrome, scalded skin syndrome, scarlatina, scarlet fever, schistosomiasis, scombroid, scrub typhus, sennetsu fever, sepsis, septic shock, severe acute respiratory syndrome, severe acute respiratory syndrome (SARS), shiga. toxigenic Escherichia coli, shigella, shigellosis gastroenteritis, shinbone fever, shingles, shipping fever, siberian tick typhus, sinusitis, sixth disease, slapped cheek disease, sleeping sickness, small pox, smallpox, snail fever, soft chancre, southern tick associated rash illness, sparganosis, Spelunker's disease, sporadic typhus, sporotrichosis, spotted fever, spring, St. Louis encephalitis, staphylococcal food poisoning, staphylococcal, strep. throat, streptococcal disease, streptococcal toxic-shock syndrome, strongyloiciasis, stye, subacute sclerosing panencephalitis (SS APE), sudden acute respiratory syndrome, sudden rash, swimmer's ear, swimmer's itch, swimming pool conjunctivitis, sylvatic yellow fever, syphilis, systemic inflammatory response syndrome (SIRS), tabes dorsalis, taeniasis, taiga encephalitis, tanner's disease, tapeworm s, temporal lobe encephalitis, tertiary syphilis, tetani, tetanus, threadworm s, thrush, tick, tick typhus, tinea barbae, tinea capitis, tinea corporis, tinea cruris, tinea manuum, tinea nigra, Tinea pedis, tinea unguium, tinea versicolor, torulopsosis, torulosis, toxic shock syndrome, toxoplasmosis, transmissible spongioform, traveler's diarrhea, trench fever 5, trichinellosis, trichomoniasis, trichomycosis axillaris, trichuriasis, tropical spastic paraparesis (TSP), trypanosomiasis, tuberculosis (TB), tularemia, typhoid fever, typhus fever, ulcus molle, undulant fever, urban yellow fever, urethritis, vaginitis, vaginosis, valley fever, vancomycin intermediate (VISA), vancomycin resistant (VRSA), varbuncle, varicella, variola, varrion's disease, venezuelan equine encephalitis, Verruga peruana, vibrio, Vibrio cholerae, vibriosis, vincent's disease or trench mouth, viral conjunctivitis, viral meningitis, viral meningoencephalitis, viral rash, visceral larval migrans, vomito negro, vulvovaginitis, warts, Waterhouse, Weil's disease, West Nile fever, Western equine encephalitis, Whipple's disease, whipworm, white piedra, whitlow, Whitmore's disease, whooping cough, winter diarrhea, wolhynia fever, wool sorters' disease, yaws, yellow fever, yersinosis, zahorsky's disease, zika virus disease, zoster, zygomycosis, acute bacterial rhinosinusitis, lobomycosis, and/or any other infectious diseases, disorders or conditions.

### John Cunningham Virus (JCV)

[0871] John Cunningham Virus is a common human polyomavirus. The transmission route of JCV is unknown. The virus is suspected to be spread by contaminated water and may be Obtained through tonsils or by the gastrointestinal tract. 70-90% of humans are estimated to be infected by the virus, and for normal healthy individuals the infection is asymptomatic. However, for patients with weakened immune system, KW may lead to Progressive multifocal leukoencephalopathy (PML). PML is a condition characterized by multifocal progressive damage or inflammation of the white matter of the brain. The symptoms include clumsiness, progressive weakness and changes in visual, speech and personality. PLM has a mortality rate of 30-50% and patients who survive the disease are left with severe neurological disabilities. PML occurs in patients with a severe immunodeficiency, most commonly in patients with HIV/AIDS. As many as 5% of HIV/AIDS patients are affected by PML. Individuals with other autoimmune conditions such as multiple sclerosis, rheumatoid arthritis, and systemic lupus erythematosus are also at risk, as well as individuals going through immunosuppressive therapy for cancer, e.g. lymphoma or Hodgkin's disease, or organ transplant. PML associated with immunosuppressive therapy is an increasing concern. For example, commercial antibody natalizumab (TYSABRI®, developed by Biogen Idec) for treatment of multiple sclerosis increases susceptibility to PML. Other drugs associated with increased risk of PML include Rituximab (JURAAN®, developed by DEC Pharmaceuticals), Efalizumab (RAPTIVA® developed by Genentech and XOMA) and Mycophenolate mofetil (CELLCEPT®, developed by Genentech).

[0872] JCV is a nonenveloped, T=7 icosahedral virus with a closed circular, double-stranded DNA genome. The major capsid component is the viral protein VP1 is made of 72 pentamers formed by VP1 monomers linked through the C terminal end. VP1 starts the infection by binding to the receptor target cells. After initial infection, typically occurring in childhood or adolescence, the virus stays quiescent in the kidneys and the lymphoid organs. In healthy individuals, the virus may replicate in kidney without causing any symptoms. However, in patients with weakened immune system, JCV may cross the blood-brain barrier into the central nervous system causing PIL.

[0873] As of today, there is no known cure for PML. Current therapies focus on reversing the immune deficiency to slow down or stop the progress of the disease. There remains a need for therapies neutralizing JVC for prevention, management and treatment of JCV infection and PML Goldmann et al. demonstrated that neutralizing activity with JCV VP1 protein in sera of a rabbit (see Goldmann C. et al., 1999, J Virol. 73(5): 4465-4469). Therapies based on neutralizing JCV antibodies could be applied for treatment, management and/or prevention of PML. Recently, immunological approaches have been under investigation and neutralizing antibodies binding to JC virus, especially targeting the VP1 protein, have been developed e.g. as described in US Patent Publication US2015/0191530, US2015/0056188 and US2015/0050271, the contents of each of which are incorporated herein by reference in their entirety. Such antibodies may cause reduction of JCV replication, proliferation or infectivity. Antibodies may bind to a conformational epitope of JCV VP1 protein or to the sialic acid binding pocket of VP 1 protein of JCV.

[0874] In some embodiments, methods of the present disclosure may be used to prevent, manage and/or treat JCV infection and/or PML.

[0875] Viral particles and methods of using the viral particles described in the present disclosure may be used to prevent, manage and/or treat JCV. As a non-limiting example, the viral particles of the present disclosure comprise a nucleic acid sequence encoding at least one of the sequences described in Table 37.

### Influenza Virus

[0876] Influenza viruses cause a common respiratory infection called influenza (flu). Influenza viruses are categorized into three main groups, virus A, B and C. Influenza viruses are negative-sense, single-stranded, segmented RNA viruses. Influenza A contains two proteins on the surface of the viral envelope: hemagglutinin (H), which is a protein responsible for red blood cell agglutination and neuraminidase (N), which is an enzyme cleaving the glycosidic bonds of neuraminic acid. Influenza A mutates at a faster rate than types B and C. Several serotypes of H and subtypes of N have been identified. Influenza Type B, similarly to Type A, contains H and N protein. Type C influenza virus is a single stranded RNA virus with glycoprotein called hemagglutinin-esterase fusion. Influenza strains vary according to geographical presentation.

[0877] Influenza in general is a highly contagious disease and may be transmitted by the respiratory route. Influenza symptoms include e.g. high fever, runny nose, headache, sore throat, muscle pain, cough and occasionally nausea and vomiting. Influenza may lead to other complications such as pneumonia or sinus infections. Influenza may be dangerous to young children, the elderly, pregnant women and individuals with chronic medical conditions or weakened immune system. According to Centers for Disease Control and Prevention (CDC), the estimated annual number of flu-associated deaths in the United States ranges between 3000 and 49,000, depending on the severity of the seasonal variations.

[0878] Influenza may be treated with good supportive care and antiviral medication. Antiviral medications include neuraminidase inhibitors, e.g. oseltamivir and zanamivir and M2 protein inhibitors. However, some strains of influenza appear to be resistant to these antiviral medications. Seasonal vaccinations to influenza are very efficient in prevention of the disease and are recommended annually.

[0879] There remains a need for prevention and treatment therapies for influenza, especially for those providing long lasting and broad neutralization. Therapeutic antibodies against influenza viruses have been developed. In general, antibody responses to different subtypes and serotypes of influenza A, B and C are unique. Some therapeutic antibodies are specific to an antibody type, whereas some have a broad coverage. Navivumab (developed by Celltrion, Inc.) taught in US Patent application US20140234336, firivumab (developed by Celltrion, Inc.) taught in US Patent application US20130004505 and diridavumab (developed by Jansen Biotech, Crucell and Johnson&Johnson) taught in International Patent application WO/2008/028946 are examples of therapeutically antibodies against influenza A hemagglutinin HA.

[0880] Viral particles and methods of using the viral particles described in the present disclosure may be used to prevent, manage and/or treat influenza. As a non-limiting example, the viral particles of the present disclosure comprise a nucleic acid sequence encoding at least one of the sequences described in Table 32.

### Hepatitis

[0881] Hepatitis is an inflammation of the liver. Hepatitis may be caused by an infection of hepatitis viruses A, B, C, D or E. In some cases, hepatitis may be asymptotic, A typical symptom of hepatitis is jaundice, characterized by yellowing of the skin, mucous membrane and conjunctiva. Other symptoms include loss of appetite, diarrhea, nausea and fever. Hepatitis may lead to a liver failure. Acute form of hepatitis is healed within six months of infection. The inflammation may also progress to a chronic hepatitis, which may lead to liver complications such as fibrosis, cirrhosis or hepatocellular carcinoma. There is no specific treatment for hepatitis. Typically, acute hepatitis is treated with good supportive care, including good nutritional balance, fluid and rest. Chronic hepatitis may be treated with antiviral drugs. Hepatitis may be prevented by vaccinations.

[0882] Hepatitis A (HAV) virus belongs to the family of Picornaviridae. HAV is encapsidated in an icosahedral structure formed by 60 copies of three viral structural proteins (VP1, VP2 and VP3), (see e.g. Kim et al. 2004, Virology.; 318(4598-607, and references therein). HAY is spread by the fecal-oral-route. Typical transmission is through contaminated food or drink or in contact with an infected individual. Improperly cooked shellfish is a common source of HAV. Hepatitis A is more abundant in developing countries with poor sanitary conditions. According to the World Health Organization (WHO), an estimated 1.4 million people are infected by HAV every year.

[0883] Vaccines for prevention of HAV infection exists and are recommended to be administered to children under 1 year of age by CDC, As of today, there is no specific treatment for HAY infection. The treatment includes supportive therapy and may last for weeks or even months. There remains a need for treatment therapies for HAV, Antibodies for prevention and/or treatment of HAY have been developed. For example, US Patent US763476, International Publication WO2011114353 and Kim et al in Virology. 2004 Jan. 20; 318(2):598-607, the contents of each of which are incorporated herein by reference in their entirety, teach neutralizing antibodies targeting HAY antigens.

[0884] Hepatitis B (HBV) belongs to the family of Orthohepadnaviridae. HBV comprises a 3.2 kb-partially double-stranded circular DNA genome. HBV virus may be transmitted via the sexual transmission route, vertical transmission at birth, iatrogenic route (e.g. blood transfusions, contaminated reused needles and syringes), as well as via exposure to certain body fluids of an infected individual. According to the WHO, an estimated 240 million people are chronically infected with hepatitis B annually, and more than 780 000 people die to associated complications.

[0885] HBV may be prevented by vaccination. The WHO recommends vaccination for all infants, as well as for adults living in increased risk of the infection. HBV infection may be treated with antiviral medications, e.g. tenofovir and entecavir. The medication does not cure the disease but suppresses the replication of the virus. Individuals with chronic hepatitis B infection are administered antiviral medications for life. There remains a need for therapies providing long lasting management and/or cure for HBV infection. Antibodies for prevention and/or treatment of HBV infection are described e.g. in US Patent publication US20120308580 and International publication WO2013165972, the contents of each of which are herein incorporated by their reference in their entirety.

[0886] Hepatitis C (HCV) belongs to the family of Flaviviridae HCV is a positive-sense single-stranded RNA virus with an open reading frame with 9600 nucleotide bases. HCV is most commonly transmitted by the sexual transmission route or iatrogenic route. Hepatitis C may be transmitted also via the vertical route, though uncommon. According to WHO, 130-150 million people have a chronic HCV infection and approximately half a million people die from complications associated with HCV annually.

[0887] As of today, there is no vaccine for I-ICY infection. Traditional treatment of hepatitis C is based on antiviral medication therapy with e.g. ribavirin and interferon. More recently, direct antiviral agents (DAA) have been developed to treat hepatitis C infections. However, there remains a need for efficient prevention and treatment therapies for HCV infection.

[0888] Hepatitis D (HDV) is a small spherical enveloped RNA virus belonging to the genus of deltaviruses. HDV infection may only replicate in the presence of a HBV virus and therefore HDV infection has a dependency on HBV. HMI virus may be transmitted as coinfection with HBV or be superimposed on chronic HBV or HBV carrier state. HDV may be transmitted similarly to HBV, e.g. via the sexual transmission route, vertical transmission at birth, iatrogenic route, as well as via exposure to certain body fluids of an infected individual. Treatment and vaccination against HBV may be applied against HDV, and there remains a need for therapies to cure both infections.

[0889] Hepatitis E (HEY) is a linear, monoparte, single-stranded RNA virus belonging to the family of Hepeviridae. HEY may be transmitted via the fecal-oral route due to contaminated food or beverage, the iatrogenic route (e.g. blood transfusions, contaminated reused needles and syringes) or the vertical transmission route during pregnancy. Contaminated drinking water is the most common source of infection. Improperly cooked shellfish are a common source of HEY. The disease is present worldwide but is more abundant in East and South Asia, and especially in environments with poor sanitation and hygiene. According to WHO, an estimated 20 million HEV infections occur annually leading to 56 600 death associated with HEV complications.

[0890] There is no specific treatment for BEV. The disease is typically cured with good supportive care. As of today, vaccinations against HEV are not globally available, though development in the field has been done. There remains a need for prevention and treatment therapies for HEV infection. Antibodies for prevention and treatment of REV have been developed. For example, neutralizing antibodies targeting HRV have been taught in U.S. Pat. No. 7,148,323, Tang et al. 2011, Proc. Nod. Acad. Sri. U.S.A. 108 (25), 10266-10271 and Gu et al. 2015, Cell Res. 25 (5), 604-620, the contents of each of which are incorporated herein by reference in their entirety.

[0891] In some embodiments, methods of the present disclosure may be used to prevent, manage and/or treat infections and complications caused by HAV, HBV, HCV, HDV and/or HEV.

[0892] Viral particles and methods of using the viral particles described in the present disclosure may be used to prevent, manage and/or treat HAV. As a non-limiting example, the viral particles of the present disclosure comprise a nucleic acid sequence encoding at least one of the sequences described in Table 17.

[0893] Viral particles and methods of using the viral particles described in the present disclosure may be used to prevent, manage and/or treat HBV. As a non-limiting example, the viral particles of the present disclosure comprise a nucleic acid sequence encoding at least one of the sequences described in Table 34.

[0894] Viral particles and methods of using the viral particles described in the present disclosure may be used to prevent, manage and/or treat HDV. As a non-limiting example, the viral particles of the present disclosure comprise a nucleic acid sequence encoding at least one of the sequences described in Table 34.

[0895] Viral particles and methods of using the viral particles described in the present disclosure may be used to prevent, manage and/or treat HEV. As a non-limiting example, the viral particles of the present disclosure comprise a nucleic acid sequence encoding at least one of the sequences described in Table 17.

### Respiratory Syncytial Virus (RST)

[0896] Respiratory syncytial virus (RSV) is a single-stranded RNA virus belonging to the family of Paramyxoviridae. The RSV RNA is contained in a nucleocapsid made of 11 proteins and covered with a lipid envelope (see, e.g. Piedimonte, 2015, Cleve Clin J Med.; 82(11 Suppl 1):S13-8, and references therein). RSV attaches to the epithelial cells of the host airway cells with the surface glycoproteins G and F and merges the viral envelope to the membranes of adjacent cells. G and F glycoproteins are the principal antigens exposed to the host immune system.

[0897] Respiratory syncytial virus (RSV) causes infections of the respiratory tract including the lungs and breathing passages. RSV is transmitted through the respiratory transmission route, in direct contact with nasal or oral secretions of infected individuals, or indirectly e.g. by touching a contaminated surface. The symptoms include a runny nose, decrease of appetite, coughing, sneezing, fever and wheezing. The infection may progress into a pneumonia or bronchiolitis. Additionally, RSV infection may have a role in triggering asthma attacks and in the inception of asthma for individuals with a family history of asthma. In healthy adults, RSV infection is typically mild and does not require hospitalization. However, the infection may be dangerous for young children and infants, and for individuals with a weakened immune system. According to the CDC, almost all children under 3 years of age will acquire an RSV infection and up to 2% of cases require hospitalization. RSV infection the most common cause for bronchiolitis and pneumonia in children younger than 1-year-old.

[0898] As of today, there is no specific medical treatment for RSV infection on the market and typically the infection is treated with good supportive care. There remains a need for prevention and treatment therapies for RSV infections and associated complications. Antibodies for treatment and prevention of RSV infection have been developed. For example, palivizumab (developed by MedImmune) taught in U.S. Pat. No. 8,153,133, the contents of which are incorporated herein by reference in their entirety, is a nearly human monoclonal antibody targeting the RSV F glycoprotein. Palivizumab is used for passive immunity for infants at risk for severe infection, including children with hemodynamically significant congenital heart defects, profound immunodeficiency and pulmonary or neuromuscular pathologies impairing airway clearance.

[0899] In some embodiments, methods of the present disclosure may be used to prevent, manage and/or treat infections and complications caused by RSV.

[0900] Viral particles and methods of using the viral particles described in the present disclosure may be used to prevent, manage and/or treat RSV. As a non-limiting example, the viral particles of the present disclosure comprise a nucleic acid sequence encoding at least one of the sequences described in Table 33.

### Herpes Simplex Virus 1 and 2

[0901] Herpes simplex viruses 1 and 2 (HSV1 and HSV2), also known as human herpesvirus 1 and 2 (HHV-1 and HHV-2), belong to the family of Herpesviridae Herpesviruses in general, consist of an icosahedral capsid surrounded by a membrane envelope. The capsid contains the viral double stranded DNA. The capsid is surrounded by an amorphous tegument of 30 viral proteins. The virion is enveloped by lipids with multiple viral glycoproteins and cellular proteins (see, e.g. McAllister and Schleiss, 2014, Expert Rev Vaccines.; 13(11): 1349-1360, and references therein).

[0902] HSV1 and HSV2 cause an infection known as herpes, which is characterized by blisters in the skin, or mucous membranes of the mouth, lips, also known as “cold sores”, or genitals. Typically, the symptoms are mild or asymptomatic. However, HSV1 and HSV2 are neurotropic and neuroinvasive viruses persisting in the body by becoming latent, and sustain in the cell bodies of neurons. The infection is lifelong with outbreaks, or sporadic episodes of viral reactivation, when the virus in the nerve cells become active causing new blistering. The infection may be dangerous to individuals with weakened immune system. Neonatal herpes of infants may be fatal. Occasionally HSV1 infections may lead to encephalitis or keratitis. HSV1 and HSV2 are transmitted by contact with an infected area during reactivations of the virus. HSV1 is mainly transmitted by oral-to-oral contact, skin contact or the sexual transmission route. HSV1 may also be transmitted vertically during birth. HSV2 is transmitted via the sexual transmission route and is one of the most common sexually transmitted infections. According to the WHO, an estimated 67% of world's population aged under 50 years has an HSV-1 infection. An estimated 11% of world's population aged 15-49 years has an HSV2 infection.

[0903] As of today, there is no vaccination for prevention of HSV1 and HSV2 infections on the market. HSV1 and HSV2 infections may be treated with antiviral medications, such as acyclovir, famciclovir and valacyclovir. Antiviral medications do not cure the infection, but reduce the severity and frequency of symptoms. There remains a therapy for prevention and cure for these infections. Antibodies for prevention, treatment and management of HSV1 and HSV2, targeting the viral glycoproteins, have been developed, as described e.g. in U.S. Pat. Nos. 8,431,118, 5,646,041, Haynes US Patent Publication US2014/0302062, the contents of each of which are incorporated herein by reference in their entirety.

[0904] In some embodiments, methods of the present disclosure may be used to prevent, manage and/or treat infections and complications caused by HSV1 and HSV2.

[0905] Viral particles and methods of using the viral particles described in the present disclosure may be used to prevent, manage and/or treat HSV. As a non-limiting example, the viral particles of the present disclosure comprise a nucleic acid sequence encoding at least one of the sequences described in Table 35.

### Human Cytomegalovirus

[0906] Human Cytomegalovirus (HCMV) also known as human herpesvirus 5 (HHV-5) belongs to the family of Herpesviridae, a sub-family of Betaherpesvirinae. HCMV is a double-stranded DNA enveloped virus composed of a nucleocapsid surrounded by structured tegument layer and bounded by a trilaminate membrane envelope.

[0907] In most occasions, an initial HCMV infection is asymptomatic, or associated with mild symptoms e.g. sore throat, fatigue, flu-like symptoms, and fever. After initial infections, HCMV virus resides in mononuclear cells without detectable symptoms. HCMV infection may be dangerous to individuals with weakened immune system. HCMV may be transmitted by contact with certain body fluids of an infected individuals (e.g. saliva, urine, semen). HCMV may be transmitted vertically, especially if acquired during pregnancy, leading to a congenital HCMV infection. According to CDC, about 1 in 150 children are born with congenital CMV infection. In about 20% of cases, congenital HCMV infection may lead to premature birth, birth defects or developmental disabilities, e.g. liver, lung, spleen problems, small head size, small body size or seizures.

[0908] As of today, there is no specific treatment or prevention therapy for HCMV infection. In severe cases of congenital HCMV infection, infants may be treated with an antiviral drug, ganciclovir, to prevent hearing loss and developmental outcomes. However, the drug has serious side effects. There remains a need for prevention therapy and improved therapies for treatment and cure of HCMV infection. Antibodies neutralizing HCMV have been developed. Such antibodies are taught e.g. in International Patent Publication WO2010007463, U.S. Pat. No. 59,149,524, US8492529 and 58202518, the contents of each of which are incorporated herein by reference in their entirety.

[0909] In some embodiments, methods of the present disclosure may be used to prevent, manage and/or treat infections and complications caused by HCMV.

[0910] Viral particles and methods of using the viral particles described in the present disclosure may be used to prevent, manage and/or treat HCMV. As a non-limiting example, the viral particles of the present disclosure comprise a nucleic acid sequence encoding at least one of the sequences described in Table 35.

### Epstein-Farr Virus

[0911] Epstein-Barr virus (EBV), also known as human herpesvirus 4 (HHV-4) belongs to the family of Herpesviridae, EBV is a double-stranded DNA virus composed of a protein nucleocapsid surrounded by a tegument layer and bounded by an envelope containing lipids and surface projection of glycoproteins. EBV may enter B cells and epithelial cells.

[0912] EBV infection causes glandular fever known as infectious mononucleosis, also known as the kissing disease. Typical symptoms include e.g. sore throat, fever swollen lymph nodes in the neck, enlarged spleen, swollen liver, rash and fatigue, Additionally, EBV infection is associated with certain cancers, e.g. central nervous system lymphomas, Hodgkin's lymphoma, Burkitt's lymphoma, Guillain-Barre syndrome, multiple sclerosis, and higher susceptibility to certain autoimmune diseases. The virus is transmitted via contact with certain bodily fluids of an infected individual, especially through saliva. The infection affects majority of population. According to CDC, 90% of adult population have antibodies demonstrating current or past EBV infection.

[0913] As of today, there is no specific therapy for prevention or treatment of EBV infection on the market. Typically, EBV infection is treated with good supportive care. Antibodies for prevention, management and treatment of EBV infection and associated diseases have been developed, e.g. by Wang and Fogg in US Patent publication US20150064174 and Fang et al. in Intervirology 50 (4), 254-263 (2007), the contents of each of which are incorporated herein by reference in their entirety.

[0914] In some embodiments, methods of the present disclosure may be used to prevent, manage and/or treat infections and complications caused by EBV.

[0915] Viral particles and methods of using the viral particles described in the present disclosure may be used to prevent, manage and/or treat EBV. As a non-limiting example, the viral particles of the present disclosure comprise a nucleic acid sequence encoding at least one of the sequences described in Table 42.

### Varicella Zoster Virus

[0916] Varicella. zoster virus (VZV), also known as human herpes virus 3 (HHV-3) and chickenpox virus, belongs to the family of Herpesviridae. VZV is a linear duplex DNA molecule containing two segments (L and 5) joined covalently. At least five clades of the virus have been identified.

[0917] VZV causes varicella, also known as chickenpox, which is an infection characterized by blister-like rash, itching, fatigue and fever. Chickenpox may be dangerous for babies, adults and individuals with weakened immune system. After primary phase of the infection, VZV resides in the nerves, including cranial nerve ganglia, dorsal root ganglia and autonomic ganglia, and may eventually lead to shingles, which is a viral disease characterized with a painful skin rash, blistering and occasionally nerve pain, Additionally, VZV has been associated with other complications, e.g, neurological conditions, inflammation of arteries, myelitis, Ramsay Hunt syndrome, Mollaret's meningitis. VZV is transmitted by direct contact or by the respiratory route. VZV is highly contagious. According to CDC, before WV vaccination, about 4 million people would be affected by chickenpox in the US annually, with more than 10,000 hospitalized.

[0918] VZV infection may be prevented by a vaccination, which is recommended by CDC to all children and unvaccinated adults. Chickenpox may be treated with antiviral medications, e.g. acyclovir, valacyclovir and famciclovir, or with other symptom relieving medications and therapies. However, the present antiviral medications may have undesirable side effects. There remains a need for improved therapies to treat VZV infection, and its reactivation stages. Antibodies targeting VZV have been developed, e.g. as described in U.S. Pat. No. 5,506,132, and US Patent application US20100074906, the contents of which are herein incorporated by their reference in their entirety.

[0919] In some embodiments, methods of the present disclosure may be used to prevent, manage and/or treat infections and complications caused by VZV.

[0920] Viral particles and methods of using the viral particles described in the present disclosure may be used to prevent, manage and/or treat VZV. As a non-limiting example, the viral particles of the present disclosure comprise a nucleic acid sequence encoding at least one of the sequences described in Table 42.

### Coronaviruses

[0921] Coronaviruses are a diverse group of enveloped viruses belonging to the family of Coronaviridae. Coronaviruses contain an envelope, a helical capsid, and a single-stranded, positive-sense RNA genome. Coronaviruses have a characteristic structure with viral spike-shaped glycoprotein populating the surface of the virus and causing an appearance resembling the solar corona. Coronaviruses are a common cause of mammalian and avian infections causing upper respiratory tract, gastrointestinal and central nervous system diseases.

[0922] Human coronavirus 229E, OC-43, NL63, and HKU1 are a cause a behind typical, short term ‘common cold’ and affect individuals all over the world. Typical symptoms of the infections include coughing, sneezing, fatigue and fever. Occasionally the viruses can cause lower-respiratory tract illnesses, such as pneumonia. The viruses are spread by direct contact or by the respiratory route. The infections may be dangerous to the elderly and individuals with weakened immune system. There is no specific treatment or prevention therapy for these coronavirus infections.

[0923] Severe Acute Respiratory Syndrome coronavirus (SARS-CoV) causes a viral respiratory illness. Typical symptoms of the infection include a high fever, headache, body aches, dry coughing and eventually pneumonia. SARS-CoV was identified in 2003 in an outbreak starting from Asia. SARS-CoV is transmitted by direct contact with an infected individual or by the respiratory route. According to the WHO, during the 2003 outbreak of SARS-CoV, 8098 people worldwide were infected with symptoms and out of them, 774 died. As of today, there is no specific treatment or prevention therapy for SARS on the market. Antiviral medication and steroids may be prescribed to certain patients. Antibodies targeting SARS-CoV have been developed, e.g. as described in U.S. Pat. No. 7,728,110 and US Patent publication US20110159001, the contents of each of which are herein incorporated by their reference in their entirety.

[0924] Middle East Respiratory syndrome coronavirus (MFRS-CoV) causes an acute severe respiratory infection affecting the lungs and breathing tubes. MERS-CoV was identified in 2012. Typical symptoms include fever, cough and shortness of breath, eventually pneumonia and additionally gastrointestinal symptoms. MERS-CoV is highly dangerous to humans. According to the WHO, 36% of the infections are fatal. MERS-CoV is a zoonotic virus transmitted to humans from animals, e.g. bats and camels, or from human to human. Camels are suggested to be a reservoir for MERS-CoV. Majority of MERS-CoV infection have occurred in the Arabian Peninsula, and especially in Saudi Arabia. As of today, no specific treatment of prevention therapy for MERS-CoV infection is available on the market. Antibodies targeting MERS-CoV have been developed, e.g. as described in International publication WO2015057942, the contents of which are herein incorporated by their reference in their entirety.

[0925] In some embodiments, methods of the present disclosure may be used to prevent, manage and/or treat infections and complications caused by SARS-CoV, MERS-CoV and/or other coronaviruses.

[0926] Viral particles and methods of using the viral particles described in the present disclosure may be used to prevent, manage and/or treat coronaviruses. As a non-limiting example, the viral particles of the present disclosure comprise a nucleic acid sequence encoding at least one of the sequences described in Table 36.

### Poxviruses

[0927] Poxviruses affecting humans include orthopoxvirus, parapoxvirus, yatapoxvirus and mollusipoxvirus. Poxviruses are typically brick-shaped, enveloped, single, liner or double-stranded viruses with DNA genome. Typically, poxvirus infections cause lesions, skin nodules, or disseminated rash. Poxviruses may be transmitted by direct contact with contaminated humans, animals or materials. Diseases caused by poxviruses include e.g. smallpox, monkeypox, molluscum conagiosum, vaccinia virus and orf virus infection.

[0928] Smallpox virus infection is highly fatal, and though it does not occur in nature anymore, smallpox virus is considered to be a potential chemical or biological warfare agent. The threat of terrorism has created a need for efficient and improved methods for treatment and/or prevention of smallpox infection. The traditional vaccination for smallpox, also applicable against monkeypox, has a rare but severe side effect due to vaccinia virus, which is the active constituent of the vaccine that eradicated smallpox. Vaccinia Immune Globulin (VIG) is the only licensed therapeutic treatment for smallpox, but is highly variable and available in limited quantities. Antibodies against smallpox have been developed, as described e.g. in U.S. Pat. No. 8,623,370 and US Patent publication US20140186370, the contents of each of which are herein incorporated by their reference in their entirety.

[0929] In some embodiments, methods of the present disclosure may be used to prevent, manage and/or treat infections and complications caused by smallpox virus and/or other poxviruses.

[0930] Viral particles and methods of using the viral particles described in the present disclosure may be used to prevent, manage and/or treat poxvirus. As a non-limiting example, the viral particles of the present disclosure comprise a nucleic acid sequence encoding at least one of the sequences described in Table 38.

### Enterovirus 71

[0931] Enterovirus 71 (EV71) belongs to the family of Picornaviridae. Enterovirus 71 is a single-stranded RNA positive sense virus. The virus has approximately 7411 nucleotides. The RNA genome is enclosed in an icosahedral capsid of structural proteins VP1-VP4. (see, e.g. Tan et al., 2014, J Biomed Sci; 21(1): 140, and references therein).

[0932] EV71 infections typically cause hand, foot and mouth (HFMD), which is characterized by fever, mouth ulcers, and vesicles on the palms of the hands and feet. Additionally, EV71 causes severe neurological manifestations, including poliomyelitis-like acute flaccid paralysis, brainstem encephalitis in infants and children. These neurological manifestations may be fatal, or cause permanent neurological consequences, such as delayed neurodevelopment or reduced cognitive function in children. EV71 is transmitted through direct contact with certain bodily fluids, such as saliva, or the respiratory route, or the fecal-to-mouth route. Outbreaks of EV71 have been reported by WHO in the US, Europe, and more frequently in Asia-Pacific region in the past 30 year.

[0933] As of today, no specific treatment or prevention therapy for EV71 is on the market. Antiviral drugs, e.g. pleconaris and other capsid-function inhibitors (see, e.g. Tan et al. a Biomed Sci. 2014; 21(1): 140), may be prescribed against EV71 infections, though their effectiveness is not swell established. There remains a need for prevention and treatment therapies for EV71 infection. Antibodies neutralizing EV71 have been developed. Non-limiting examples include the anti-EV71 antibody MAB979 (developed by Merck Millipore) and those taught by Carderosa et al. in International Patent Publication WO2015092668, the contents of which are incorporated herein by reference in their entirety.

[0934] In some embodiments, methods of the present disclosure may be used to prevent, manage and/or treat infections and complications caused by EV71.

[0935] Viral particles and methods of using the viral particles described in the present disclosure may be used to prevent, manage and/or treat EV71. As a non-limiting example, the viral particles of the present disclosure comprise a nucleic acid sequence encoding at least one of the sequences described in Table 39.

### Rubella Virus

[0936] Rubella virus belongs to the family of Togaviridae. Rubella virus is a positive sense, single-stranded RNA virus with spike-like, hemagglutinin containing surface projections. The virus core is enveloped by glycosylated E1 and E2 proteins.

[0937] Rubella, also known as German measles or three-day measles, is a viral infection typically characterized by a rash, low fever, nausea, swollen lymph glands behind the ears and the neck, and mild conjunctivitis. At later stage, the infection may develop arthritis and pain in the joints. Typical symptoms of rubella infection are mild and affect children and young adults. Rubella virus is transmitted by the respiratory route and the virus replicates in the nasopharyngeal mucosa and local lymph nodes. However, when an infection is acquired during pregnancy, the virus is transmitted through vertical route with 90% chance and may cause fetal death or congenital defects known as congenital rubella syndrome (CRS), Infants with CRS may have hearing impairments, eye and heart defects, diabetes mellitus, thyroid dysfunction and/or autism. According to the WHO, about 10,000 infants with CRS are born every year, majority occurring in countries with low vaccine coverage.

[0938] As of today, there is no specific treatment for rubella. Rubella may be prevented with vaccination, and rubella has been part of the vaccination program for the past 40 years. However, the infection still persists and an increasing concern related to the life-time of vaccine efficiency exists. There remains a need for long lasting prevention therapy, as well as treatment for rubella virus infection. Antibodies against rubella have been described e.g. in US Patent US20100143376, the contents of each of which are herein incorporated by reference in their entirety.

[0939] In some embodiments, methods of the present disclosure may be used to prevent, manage and/or treat infections and complications caused by rubella.

[0940] Viral particles and methods of using the viral particles described in the present disclosure may be used to prevent, manage and/or treat Rubella. As a non-limiting example, the viral particles of the present disclosure comprise a nucleic acid sequence encoding at least one of the sequences described in Table 40.

### Human Papilloma Virus

[0941] Human papilloma virus (HMO is a non-enveloped double-stranded DNA virus belonging to the family of Papillomaviridae. Over 170 types of HPV have been identified.

[0942] HPV infections may be asymptomatic, or cause infection related to warts (e.g. plantar, flat or anogenital warts), oral infections such as papillomas or multifocal epithelial hyperplasia. The infection may be undetected, and clears from the body to low levels within two years. Infections caused by human papillomavirus (HPV) have been associated with certain cancers of stratified epithelial tissues, e.g. cervical, anal, vaginal, vulvar and penile cancers, lung and throat cancers. Especially HPV16 and HPV18 are known to be carcinogenic. According to the WHO, persistent genital HPV infection may cause cervical cancer which is the second most common cancer in women worldwide. In developing countries, cervical cancer counts for 13% of all female cancers, and survivor rate worldwide is approximately 50%. HPV is very common. CDC estimates that every one in four individuals in the US has an HPV infection. Most commonly HPV is transmitted by the sexual route, but also the vertical transmission route, or by direct contact to infected blood, or objects may occur.

[0943] Cancers caused by HPV may be prevented by vaccines developed against certain HPV types. The vaccines are available worldwide and are recommended by CDC for all preteen aged children. As of today, there are no specific treatment for HPV infection. There remains a need for prevention and treatment therapy affecting a broad range of HPV infections. Antibodies for HPV have been developed, e.g. as described in International publication WO2015096269, the contents of each of which are herein incorporated by reference in their entirety.

[0944] In some embodiments, methods of the present disclosure may be used to prevent, manage and/or treat infections and complications caused by HPV.

[0945] Viral particles and methods of using the viral particles described in the present disclosure may be used to prevent, manage and/or treat HPV. As a non-limiting example, the viral particles of the present disclosure comprise a nucleic acid sequence encoding at least one of the sequences described in Table 41.

### Pseudomonas Aeruginosa

[0946] Pseudomonas Aeruginosa (P. Aeruginosa) is a common Gram-negative, aerobic, rod-shaped bacterium belonging to the family of Pseudomonodaceae. P. aeruginosa is found in soil, water, skin, flora, and in most manmade environments around the world. P. aeruginosa is considered as an opportunistic pathogen taking advantage of a weakened immune system.

[0947] P. aeruginosa may cause a variety of mild infections, such as, urinary tract infections, respiratory system infections, dermatitis, soft tissue infections, bacteremia, bone and joint infections, gastrointestinal infections, blood infections, ear infections, skin rash, eye infections and a variety of systemic infections. P. aeruginosa is transmitted through water, contaminated hands, materials or objects. In general, P. aeruginosa infections in healthy individuals are very mild or asymptomatic. However, the infections expose a significant risk for individuals with weakened immunity, such as patients with other underlying illnesses or complications, and especially when in a hospital environment. For example, patients with cystic fibrosis have a susceptibility towards loss of lung function due to respiratory tract infection with the bacterium. Patients attached to breathing machines, patients with catheters, or with surgery wounds or burn wounds are potentially at risk for serious and life-threatening infections. P. aeruginosa infection may lead to a fatal sepsis. According to CDC, approximately 51, 000 healthcare associated infection occur in the US every year, leading to approximately 400 deaths.

[0948] As of today, there are no prevention therapies for P. aeruginosa infection on the market. Some strains of P. aeruginosa may be treated with antibiotics, e.g. gentamicin, tobramycin, colistin, and amikacin. However, an increasing number of strains of P. aeruginosa, especially those affecting hospitalized patients, are resistant to antibiotics and no specific treatment therapy exists. There remains a need for improved treatment and prevention therapies against P. aeruginosa infections. Antibodies against P. aeruginosa have been developed, such as, panobacumab (developed by Kenta Biotech Inc), which is an antibacterial antibody against P. Aeruginosa.

[0949] In some embodiments, methods of the present disclosure may be used to prevent, manage and/or treat infections and complications caused by P. aeruginosa.

[0950] Viral particles and methods of using the viral particles described in the present disclosure may be used to prevent, manage and/or treat P. aeruginosa. As a non--limiting example, the viral particles of the present disclosure comprise a nucleic acid sequence encoding at least one of the sequences described in Table 43.

### Streptococcus Bacteria

[0951] Streptococcus is a genus of gram-positive bacteria belonging to the family of Streptococcaceae. Species of Streptococcus are divided into alpha- and beta-hemolytic species. Alpha-hemolytic species cause oxidation of iron in hemoglobin molecules within the red blood cells. Alpha-hemolytic streptococci include e.g. Streptococcus pneumoniae and Streptococcus viridans. Beta-hemolytic species cause complete rupture of the red blood cells and include e.g. Lancefield groups A and B, also known as ‘group A strep’ and ‘group B strep’. Streptococcus genus includes overall more than 50 species. Streptococcus bacteria cause a variety of infections in humans, including dental caries, pneumonia, endocarditis, meningitis, respiratory tract infections, urinary tract infections, neonatal meningitis, pharyngitis and/or sepsis.

[0952] Streptococcus pneumoniae is a common bacterium causing, i.e. pneumonia, meningitis, bronchitis, acute sinusitis, conjunctivitis, osteomyelitis, endocarditis and/or septic arthritis. The bacteria is transmitted by direct contact or via the respiratory route. The bacteria resides in the nasopharynx of healthy carriers and proceeds into an infection under certain circumstances. The infection may be prevented by vaccines, e.g. conjugate vaccine or polysaccharide vaccines. The infection may be treated with antibiotics, e.g. broad-spectrum cephalosporin, and vancomycin, but there is a concern over increasing resistant towards antibodies, According to CDC, Streptococcus pneumoniae is currently resistant to one or more antibiotics in 30% of infections. Streptococcus pneumoniae is resistant to e.g. penicillins. There remains a need for improved, non-antibiotic, therapies for treatment of Streptococcus pneumoniae and other Streptococcus infections. Antibodies for Streptococcus have been developed, as described e.g. in U.S. Pat. No. 5,686,070 and US Patent publication US20070003561, the contents of each of which are herein incorporated by reference in their entirety.

[0953] In some embodiments, methods of the present disclosure may be used to prevent, manage and/or treat infections and complications caused by Streptococcus pneumoniae and other Streptococcus bacteria.

[0954] Viral particles and methods of using the viral particles described in the present disclosure may be used to prevent, manage and/or treat Streptococcus pneumoniae. As a non-limiting example, the viral particles of the present disclosure comprise a nucleic acid sequence encoding at least one of the sequences described in Table 44.

### Staphylococcus Bacteria

[0955] Staphylococcus is a genus of gram-positive bacteria belonging to the family of Staphylococcaceae. The genus includes overall approximately 40 species, Most species of the genus are harmless and reside in the skin and mucous membranes of humans. Staphylococcus bacteria may also be found in the soil. The bacteria may cause diseases either through toxin production or penetration. Staphylococcal toxins are a common cause of food poisoning. Staphylococcus bacteria may cause a variety of diseases, e.g. localized or diffuse skin infection, gastroenteritis, ear infections, septic arthritis, osteomyelitis, sinusitis, infective endocarditis and/or toxic shock syndrome.

[0956] Staphylococcus aureus (S. aureus) is typically residing in human nose asymptomatically. In certain circumstances, S. aureus infections may affect many tissues and organs. Individuals with chronic conditions, e.g. diabetes, cancer, vascular disease, eczema and lung disease, have an increased susceptibility towards S. aureus infections. S. aureus may cause skin infections, such as, pimples, impetigo, atopic dermatitis, cellulitis folliculitis. More serious forms of infections include pneumonia, meningitis, osteomyelitis and endocarditis. S. aureus may also cause food poisoning. In severe cases, S. aureus infection may enter the blood stream causing bacteremia and/or sepsis. As of today, there is no medical therapy for prevention of the infection. Some strains of S. aureus may be treated with antibiotics. However, increasing resistance towards antibiotics is a concern. Currently several antibiotic resistant forms of S. aureus exist, including, but not limited to, Methicillin-resistant Staphylococcus aureus (MRSA), Vancomycin-intermediate Staphylococcus aureus (VISA) and Vancomycin-resistant Staphylococcus aureus (VRSA). The drug resistant forms of S. aureus are more frequent in hospital environments.

[0957] Staphylococcus epidermidis (S. epidermidis) resides in the normal human skin flora and may cause an infection to individuals with weakened immune system, and to individuals who have catheters, prostheses or surgical implants. S. epidermidis has an ability to colonize on plastic materials or devices placed within the body. The infection may be treated with some antibiotics, but they do not remove the infection and can only be used to manage such infections. Many S. epidermis strains are resistant to antibiotics, such as penicillin, methicillin and/or amoxicillin, and increasing resistance to antibiotics in a concern.

[0958] There remains a need for prevention and/or improved treatment therapies against Staphylococcal infections. Antibodies targeting Staphylococcal bacteria have been developed. As an example, pagadaximab (developed by Medlmmune and AstraZeneca) is a monoclonal antibody for prevention of staphylococcal sepsis and may be administered to infants with low birth weight.

[0959] In some embodiments, methods of the present disclosure may be used to prevent, manage and/or treat infections and complications caused by Staphylococcus bacteria.

[0960] Viral particles and methods of using the viral particles described in the present disclosure may be used to prevent, manage and/or treat Staphylococcal infections. As a non-limiting example, the viral particles of the present disclosure comprise a nucleic acid sequence encoding at least one of the sequences described in Table 45.

Clostridium tetani

[0961] Clostridium tetani (C. tetani) is a rod-shaped, anaerobic, Gram-positive bacteria belonging to the family of Clostridiaceae. A matured bacterium develops a terminal spore, which is resistant to heat and common antiseptics. C. tetani produces tetanospasmin toxin. C. tetani is found as spores in soil and in the gastrointestinal tract of animals.

[0962] C. tetani infection spreads the tetanospamin toxin to the body, causing tetanus, also known as lock jaw. Tetanus is a dangerous disease characterized by painful tightening of the muscles. The disease may lead to locking of the jaw and neck, leading to inability to open mouth or swallow. The tightening may affect the whole body. In severe cases, the infection may lead to breathing difficulties, pneumonia, or pulmonary embolism. Even more serious is an infection acquired during pregnancy, leading to almost always fatal neonatal tetanus of an infant. The bacteria is typically transmitted through broken skin by direct contact with contaminated soil or objects, or saliva or feces of a contaminated animal. Especially susceptible are individuals with burns, puncture wounds, crush injuries or injuries with dead tissue, individuals having animal bites or scratches. Tetanus is fairly uncommon in developed countries. However, the WHO reported an estimated 50,000 neonatal tetanus deaths in year 2008. A program form elimination of tetanus was started in 1989 by the WHO.

[0963] Tetanus may be prevented efficiently by a four vaccine combination, DTaP, Tdap, DT and Td, given to children and adults. For adequate immunity, the primary vaccine is administered during childhood, a booster dose during adolescence and every 10 years thereafter during adulthood. C. tetani infection may be treated with antibiotics, wound care and with human tetanus immune globulin (an antitoxin). Despite the existing treatment methods, approximately 10% of tetanus infections lead to death, according to CDC. There remains a need for longer lasting vaccine as well as improved treatment therapies against C. tetani infections. Antibodies against C. tetani have been developed, as described e.g. by Larrick, J. W. et al., 1992, Immunal. Rev. 130, 69-85, and de Kruif, J. et al., 2009, J. Mol. Biol. 387 (3), 548-558, the contents of each of which are herein incorporated by reference in their entirety.

[0964] In some embodiments, methods of the present disclosure may be used to prevent, manage and/or treat infections and complications caused by C. tetani.

[0965] Viral particles and methods of using the viral particles described in the present disclosure may be used to prevent, manage and/or treat C. tetani. As a non-limiting example, the viral particles of the present disclosure comprise a nucleic acid sequence encoding at least one of the sequences described in Table 46.

### Bordetella

[0966] Bordetella is a genus of Gram-negative, coccobacilli belonging to the family of Alcaliigenaceae. The structure of the bacteria consists of an outer membrane with lipopolysaccharides and phospholipids forming a capsule. Bordetella bacteria affecting humans include, but are not limited to, B. pertussis, B. parapertussis and B. bronchiseptica. B. pertussis resides in the upper air pathways, mostly the trachea and the bronchii, of humans. B. parapertussis resides in the upper air pathways of mammals. The bacteria release toxins that cause damage and swelling of the respiratory pathways.

[0967] Pertussis, also known as whooping cough, is a highly contagious infection of the respiratory track caused most commonly by B. pertussis, and occasionally by B. parapertussis. Typical symptoms of the infection include severe coughing and difficulty to breathe accompanied by a runny nose, apnea and fever. Additional complications for infants include pneumonia, convulsions, apnea, and encephalopathy. The bacteria are transmitted through the respiratory tract route. The disease is especially dangerous for infants. According to CDC, about 30,000 infections were reported in the US in 2014. CDC reports 277 deaths occurring from 2000 through 2014, out of which 2-41 where infants less than 3 months of age.

[0968] Pertussis may be treated with antibiotics, such as, erythromycin, clarithromycin or azithromycin. However, an increasing resistance to antibiotics is a concern. Pertussis caused B. pertussis may be prevented by vaccination, e.g. by DTaP combination vaccine, which is recommended routinely for infants by CDC and WHO. Despite the widespread vaccination, the disease has insisted. The protection provided by the traditional vaccination is estimated to be 3-6 years. There remains a need for prevention therapies providing a longer lasting immunity, as well as for improved, non-antibiotic, treatments. Antibodies for prevention and/or treatment of pertussis have been developed, as described e.g. in International publication WO2014160098, and Hussein, A. H. et al., 2007, Infect. Immun. 75 (11), 5476-5482, the contents of each of which are herein incorporated by reference in their entirety.

[0969] In some embodiments, methods of the present disclosure may be used to prevent, manage and/or treat infections and complications caused by B. pertussis, B. parapertussis and/or other Bordetella bacteria.

[0970] Viral particles and methods of using the viral particles described in the present disclosure may be used to prevent, manage and/or treat Bordetella infection. As a non-limiting example, the viral particles of the present disclosure comprise a nucleic acid sequence encoding at least one of the sequences described in Table 47.

### Mycobacterium

[0971] Mycobacterium is a genus of nonmotile and aerobic bacteria, belonging to its own family of Mycobacteriaceae. Mycobacteria have an outer membrane, and a hydrophobic and waxy cell wall with mycotic acid/mycolates. The cell wall is neither truly Gram-positive nor-negative. In general, the infections are difficult to treat and the bacteria is naturally resistant to many antibiotics, e.g. penicillin, due to the cell wall. Mycobacteria includes species, such as, but not limited to, M. tuberculosis, Nontuberculous mycobacteria (NTM), M. leprae, M. bovis, M. africanum, and M. microti.

[0972] M. tuberculosis is a genetically diverse bacterium and most common and dangerous of the mycobacteria family species. M. tuberculosis causes tuberculosis (TB) which is an infection mainly affecting the lungs. Typical early symptoms include cough, fever, night sweat, and weight loss. The disease may be mild for a period of time and therefore early diagnosis is difficult. Eventually the symptoms get more severe and coughing sputum and blood may occur. TB may be transmitted by the respiratory tract. TB affects all ages of the population, but is most dangerous to children, and individuals with weakened immune systems, e.g. HIV patients. According to the WHO, TB is referred to as a top infectious disease killer worldwide. WHO reports an estimated 9.6 million infections of TB in 2014, out of which 1.5 million cases were fatal. The disease is globally spread, but it is most abundant in the South-East Asia and Western Pacific Regions.

[0973] TB may be prevented by vaccinations, i.e. Bacille Clamette-Guerin vaccine. The vaccine is provided for children and adults exposed to environments with high risk of infection. However, the vaccine is not always efficient against TB, e.g. due to the diversity of strains geographically. TB may be treated with a 6 to 9 month course of combinational antimicrobial drug therapy. Antimicrobial drugs effective against TB include e.g. isoniazid, rifampin, ethambutol, and pyrazinamide. However, an increasing resistance towards the medication is a concern. Certain strains of existing TB are identified as multi-drug resistant TB strains, which do not respond to therapy with e.g. isoniazid, rifampicin, or other common drugs. WHO reports an estimated 480 000 multidrug-resistant TB infections in 2014. There remains a need for prevention therapies protecting against broad spectrum of strains, as well as for improved treatment of M. tuberculosis and/or other mycobacteria. Antibodies against mycobacteria have been developed, as described e.g. in US Patent publications US20130309237, US20130309237, US20060229438, the contents of each of which are herein incorporated by reference in their entirety.

[0974] In some embodiments, methods of the present disclosure may be used to prevent, manage and/or treat infections and complications caused by tuberculosis and/or other mycobacteria.

[0975] Viral particles and methods of using the viral particles described in the present disclosure may be used to prevent, manage and/or treat myobacterium related diseases. As a non-limiting example, the viral particles of the present disclosure comprise a nucleic acid sequence encoding at least one of the sequences described in Table 48.

[0976] Francisella tularensis

[0977] Francisella tularensis (F. tularensis) is a facultative intracellular Gram-negative, rod-shaped bacterium belonging to the family of Francisellaceae. F. tularensis resides in invertebrates, birds, reptiles, fish, and mammals, including humans. It is one of the most infectious and pathogenic bacteria known (see, e.g. Pechous et al., 2009, Microbial MOl Biol Rev.; 73(4): 684-711).

[0978] F. tularensis causes infection called Tularemia. Severity of tularemia varies from mild to fatal. F tularensis may be transmitted to a human by direct skin or eye contact, by the respiratory route or by consumption of contaminated food or drink. Most commonly, the infection is acquired while handling infected animals. Most common form of tularemia is ulceroglandular tularemia, characterized by skin ulcers on the site of infection accompanied by swelling or regional lymph glands. Ulceroglandular tularemia is typically acquire by a tick, or deer fly bite. Pneumonic tularemia is an infection of the respiratory tract characterized by a cough, chest pain, and difficulty of breathing. Pneumonic tularemia is transmitted through the respiratory route and may be fatal if not treated. Oropharyngeal tularemia is transmitted by contaminated food or beverage and causes a sore throat, mouth ulcers, tonsillitis and swelling of lymph glands in the neck. Other forms of tularemia include glandular, oculoglandular (affecting the eyes) and typhoidal (combination of the general symptoms). F. tularensis is considered to be a potential biological and chemical warfare agent.

[0979] As of today, there is not preventive therapy for tularemia infection on the market. Some vaccines have been under development (see, e.g. Pechous et al. Microbiol Mol Biol Rev. 2009 December; 73(4): 684-711). Tularemia may be treated with antibiotics, such as, streptomycin, gentamicin, doxycycline, and ciprofloxacin. However, increasing resistance against antibiotics is a concern. There remains a need for improved prevention and treatment therapies for F. tularensis infections. Antibodies against F. tularensis have been developed, e.g. as described by Rynkiewicz, M. J. et al., 2012, Biochemistry, 51 (28), 5684-5694 and Lu, Z., et al., 2013, Immunology, 140 (3), 374-389, the contents of each of which are herein incorporated by reference in their entirety.

[0980] In some embodiments, methods of the present disclosure may be used to prevent, manage and/or treat infections and complications caused by F. tularensis.

[0981] Viral particles and methods of using the viral particles described in the present disclosure may be used to prevent, manage and/or treat F. tularensis related infections. As a non-limiting example, the viral particles of the present disclosure comprise a nucleic acid sequence encoding at least one of the sequences described in Table 49.

Toxoplasma gondii

[0982] Toxoplasma gondii is a parasitic protozoan infecting warm-blooded animals, including humans. Domestic cats and other felines are the most desired hosts for Toxoplasma gondii, as they are the only hosts where the protozoan is capable of sexual reproduction. According to CDC, more than 60 million people in the US may be infected by Toxoplasma gondii.

[0983] Toxoplasma gondii causes toxoplasmosis, which is typically asymptomatic in healthy individuals and is controlled by the natural immune system. The infection may be obtained from undercooked, contaminated food, especially pork, lamb and venison, from food contaminated by utensils, or contaminated hands, occasionally from contaminated drinking water, or by the fecal-to-oral route from cat feces. Toxoplasma gondii may also be transmitted by vertical route, especially when the protozoan is acquired during pregnancy. Children infected during or just prior to pregnancy may have eye problems, or brain damage at birth, or may develop symptoms later in their lives. Toxoplasmosis may be dangerous to individuals with a weakened immune system, such as patients with AIDS, undergoing certain chemotherapies or having organ transplants.

[0984] Toxoplasmosis may be treated with certain medications such as antibiotics called sulfadiazine and pyrimethamine, which is an anti-parasite medication used for e.g. malaria. However, resistance to both of the medications is an increasing concern. There remains a need for improved treatment methods as well as prevention therapies against Toxoplasma gondii infection. Antibodies targeting Toxoplasma gondii have been developed, as described by e.g. Graille, M. et al., 2005, J. Mol. Biol. 354 (2), 447-458, the contents of which are herein incorporated by reference in their entirety.

[0985] In some embodiments, methods of the present disclosure may be used to prevent, manage and/or treat infections and complications caused by Toxoplasma gondii.

[0986] Viral particles and methods of using the viral particles described in the present disclosure may be used to prevent, manage and/or treat Toxoplasma gondii related infections. As a non-limiting example, the viral particles of the present disclosure comprise a nucleic acid sequence encoding at least one of the sequences described in Table 51.

### Candida Yeast

[0987] Typically, species of yeast are commensals and endosymbionts of human hosts, but may cause an infection under certain circumstances. C. albicans is a yeast belonging to the family of Saccharomycetaceae. C. albicans causes infection of the mouth characterized by white patches on the tongue, mouth and throat. The infection of the mouth is most typical with new born babies, the elderly and individuals with weakened immune system, e.g. HIV/AIDS patients. Optionally, the infection may affect the nails, leading o brittle and defected nails. Optionally, the infection may cause an infection of the vagina, leading to genital burning or uncomfortable discharge. Typically, Candida albicans infections are mild and localized. However, the infection may be severe or fatal for individuals with underlying health problems and left untreated. Invasive candidiasis refers to an infection spreading to many parts of the body, including the heart, brain, eyes, bones and/or joints. Candidemia refers to an infection where candida yeast is present in the blood stream. Severe forms of C. albicans infections affect individuals in health care environments, e.g. patients with central venous catheter, patients treated at an intensive care unit, patients undergoing antibiotic treatments, treatments for kidney failure, recovering from a surgery, and patients with chronic diseases, e.g. diabetes and/or HIV/AIDS. C. albicans is typically transmitted from mother to an infant during childbirth and it remains as a species of human's normal microflora. It may also be transmitted through the sexual transmission route. Other species of candida yeast family include, e.g., C. glabrata, parapsilosis, C. tropicalis, C. krusei and C. lusitaniae.

[0988] C. albicans infection may be treated with antifungal drugs, e.g. nystatin, clotrimazole, amphotericin B oral suspension) or systemic oral azoles (e.g. fluconazole, itraconazole, or posaconazole). Despite the medical therapy available, some forms of C. albicans infections are dangerous, or life-threatening. There remains a need for improved prevention, and/or treatment therapies against C. albican infections, for example by antibody therapies. Efungumab (developed by NeuTec Pharma) is an antibody for treatment of invasive C. albicans infection.

[0989] In some embodiments, methods of the present disclosure may be used to prevent and/or treat C. albican infections.

[0990] Viral particles and methods of using the viral particles described in the present disclosure may be used to prevent, manage and/or treat C. albican related infections. As a non-limiting example, the viral particles of the present disclosure comprise a nucleic acid sequence encoding at least one of the sequences described in Table 52.

### Human Immunodeficiency Virus (HIV)

[0991] Human immunodeficiency virus (HIV) is a roughly spherical enveloped RNA virus belonging to the family of Retroviridae. HIV is composed of two positive single-stranded RNA copies. The viral core contains a viral capsule protein, p24, which surrounds the two single stranded RNAs and the enzymes for HIV replication. The viral envelope consists of two lipid layers, the outer layer glycoprotein 120 (gp 120) and the transmembrane glycoprotein 41 (gp41), Gp120 attached to the host cell whereas gp41 has a role in the cell fusion process. For replication, the virus needs a host cell and the RNA first transcribes into DNA by enzyme reverse transcriptase. HIV infects the CD4 lymphocyte (T cell) leading to depletion of CD4+ T cells and loss of CD4+ T-cell function, as infected cell loses its function and converts to a HIV-replicating cell. (see, e.g. Okoye and Picker, 2013, Immunol Rev.; 254(1): 54-64, and references therein). Additionally, HIV infection leads to B lymphocyte (B cell) hyper-activation and dysfunction (see, e.g. Moir and Fauci, 2009, Nat Rev Immunol.; 9(4): 235-245, and references therein). The virus may be transmitted through sexual transmission route, vertical transmission route, iatrogenic (medical procedure) route, or in direct contact with certain body fluids with high concentration of HIV, including e.g. blood, breast milk, semen, vaginal, and rectal secretions. Two types of HIV (HIV-1 and HIV-2) have been identified. HIV-1 has higher infectivity and has spread around the globe whereas HIV-2 is more localized to West Africa. According to CDC, there is about 36.9 million people in the world with HIV/AIDS with about 2 million cases arising every year. The infection is most abundant in Sub-Saharan Africa.

[0992] In acute HIV infection stage, within 2-4 weeks after infection, infected patients experience flu-like illness. In the second stage the infection is asymptomatic and the HW replication is at low level. The second stage may last for years or decades, especially when treated with HIV medication. Eventually, HIV causes acquired immune deficiency syndrome (AIDS), which is a clinical condition characterized by severe immunosuppression attacking the CD4 cells, making individuals susceptible to life-threatening malignancies and infections. Complications associated with HIV/AIDS include common bacterial and viral infections, parasite infections, certain cancers (e.g. Kaposi's sarcoma, Non-Hodgkin's lymphoma, and angiosarcoma), progressive multifocal leukoencephalopathy (PN/ft) and wasting.

[0993] As of today, there is no prevention therapy or cure for HIV/AIDS. However, with antiretroviral (ART) therapy, the disease may be managed for a long period of time. ART therapy comprises of five classes of drugs used in different combinations to treat HIV. The drugs target the different phases of the retrovirus life-cycle. However, there remains a need for improved therapies for prevention, management and/or treatment of HIV/AIDS.

[0994] Antibodies for treatment and prevention of HIV infection have been developed. For example, commercial antibody Ibalizumab (developed by Taimed Biologics Inc.) is a non-immunosuppressive monoclonal antibody binding to CD4, Anaplasma phagocytophilum inhibiting the viral entry process. As another example, suvizumab (developed by Kaktsuden, Chemo-Sero Therapeutic Research Institute) is a humanized antibody targeting the HIV-1 envelope glycoprotein GP120. As a non-limiting example, any of the antibodies in Table 42, variants or fragments thereof may be used in the treatment and/or prevention of HIV.

[0995] Antibodies neutralizing HIV-1 and HIV-1 strains have been identified, but as of today, the researchers have not been able to develop a vaccination for HIV. HIV has a capability to evolve with unusually high somatic mutation and recombination rate. So far, conventional vaccines have not succeeded in eliciting analogues of the broadly neutralizing antibodies. An alternative approach suggested involves using adeno-associated vectored gene delivery for expression of antibodies from muscle tissue (e.g. Balasz et al, 2012, Nature Letter, 481, 81-84, Balasz et al, 2014, Nat Med.; 20(3): 296-300, Saunders et al., 2015, J Virol.; 89(16):8334-45, and US Patent publication US20030219733, the contents of which are herein incorporated by reference in their entirety). The studies have demonstrated efficient and long lasting protection from HINT infection by e.g. intravenous or mucosal surface transmission.

[0996] Viral Particles and methods of using the viral particles described in the present disclosure may be used to prevent, manage and/or treat HIV infection and AIDS. As a non-limiting example, the viral particles of the present disclosure comprise a nucleic acid sequence encoding at least one of the sequences described in Table 53.

### Therapeutic Applications: Toxins

[0997] Viral particles and methods of using the viral particles described in the present disclosure may be used to prevent, manage and/or treat infectious disease. As a non-limiting example, the viral particles of the present disclosure comprise a nucleic acid sequence encoding at least one of the sequences described in Tables 25-28.

[0998] Toxins are a group of substances that are highly poisonous and dangerous to humans. Toxins are infectious agents in form of bacteria, viruses, fungi, proteins, and other chemical and/or biological substances. Toxins may lead to fatal conditions. Toxins are produced by nature, and may be produced synthetically. Exposure to toxins may be unintentional and occur when in contact with toxic plants, or contaminated food, water, livestock or animals. Due to the life-threatening impact of toxins, they are considered to be potential biological and/or chemical warfare agents that may be applied as weapons of mass destruction in war field. They also impose a threat to be used as means for terrorist attacks.

### Ricin

[0999] Is a naturally occurring carbohydrate-binding lectin protein produced by castor oil plant growing in Eastern Africa, India, Southeastern Mediterranean basin area, and in tropical regions. Ricin may also be manufactured from the waste products when processing castor beans. Ricin has a globular structure with two toxin chains, chain A and chain B, which both need to be present for the cytotoxic affect. Ricin kills cells by inhibiting protein synthesis. Chain B penetrates to the cell whereas the disulfide bond joining chain A to chain B lectin has an affinity to bind to cell surface carbohydrates, (see, e.g. Friedman and Rasooly, 2013, Toxins (Basel); 5(4): 743-775). Ricin is highly toxic to humans with median lethal dose (LD₅₀) of 22 micrograms per kilogram of body weight. The exposure to Ricin may be by inhaling, ingestion or by injection. The symptoms are dependent of the method of exposure. When inhaled, ricing causes severe inflammation of the lungs, causing would has symptoms including coughing, difficulty breathing, muscle ache and nausea. When ingested, ricin induces internal bleeding of the stomach and intestines leading to pain, vomiting and bloody diarrhea, and eventual failure of the kidneys, liver and spleen. When injected, ricin induces failure of the muscles and lymph nodes, and eventually failure of the liver, kidney and spleen. There is no known treatment for Ricin poisoning.

[1000] Unintentional poisoning by Ricin is uncommon. However, Ricin is a potential biological and chemical warfare agent creating a need for treatment and prevention therapies for ricin poisoning. Antibodies targeting ricin have been developed, as described e.g. in International publication WO2015100409, the contents of which are herein incorporated by reference in their entirety.

[1001] In some embodiments, methods of the present disclosure may be used to prevent, manage and/or treat infections and complications caused by ricin.

[1002] Viral particles and methods of using the viral particles described in the present disclosure may be used to prevent, manage and/or treat Ricin related infections and/or conditions. As a non-limiting example, the viral particles of the present disclosure comprise a nucleic acid sequence encoding at least one of the sequences described in Table 25.

Bacillus anthracis

[1003] Bacillicus anthracis is a Gram-positive, rod-shaped bacterium causing anthrax disease (see, e.g. Spencer, 2003, J Clin Pathol.; 56(3): 182-187, and references therein). Most animals, especially herbivores, are susceptible to infection of Bacillicus anthracis. Anthrax may be infected via respiratory exposure, skin contact or eating contaminated food, in most cases meat. Inhaled anthrax causes flu-like symptoms, pneumonia and severe respiratory collapse. Gastrointestinal anthrax causes severe diarrhea, acute inflammation of the intestinal tract, and vomiting of blood. Skin exposure to the bacteria will lead to boil-like skin lesions forming an ulcer with black center. Typically, infection to humans occurs by eating contaminated meat or while handling infected animals or their product, such as skin, wool or meat. Bacillicus anthracis is a potential biological warfare agent. In 2001, weeks following the September 11 terrorist attacks, letters containing Bacillicus anthracis were mailed to news media offices and two U.S. Senators resulting in death of five people and infected many more.

[1004] Anthrax may be treated with antibiotics, such as penicillin and amoxicillin, and may be prevented by vaccines, developed both for humans and animals. However, due to increased threat of biological warfare and terrorism, improved methods of treatment are in demand. Anthrax may also be treated by antibody therapy. For example, Raxibacumab (developed by Cambridge Antibody Technology and Human Genome Sciences) is an antibody for the prophylaxis and treatment of inhaled anthrax.

[1005] In some embodiments, methods of the present disclosure may be used to prevent, manage and/or treat infections and complications caused by Bacillicus anthracis.

[1006] Viral particles and methods of using the viral particles described in the present disclosure may be used to prevent, manage and/or treat Bacillicus anthracis related infections and/or conditions. As a non-limiting example, the viral particles of the present disclosure comprise a nucleic acid sequence encoding at least one of the sequences described in Table 26.

### Shiga Toxin and Shiga-Like Toxin

[1007] Shiga toxin, including two major types Stx1 and Stx2, is a toxin produced by Shigella dysenteriae, a rod-shaped bacteria belonging to bacterial genus Shigella. Shiga toxin inhibits protein synthesis within cells. The toxin enters cell via a marcopinosome and inhibits the protein synthesis by cleaving a specific nucleobase RNA of the 60S subunit of ribosome. Shiga-like toxins 1 and 2 are structurally similar to Stx1 and Stx2 and are produced by enterohemorrhagic strains of Escherichia coli (EHEC) strains. (see, e.g. Friedman and Rasooly, Toxins (Basel). 2013 April; 5(4): 743-775). EHEC type 0157 is the most common pathogen causing E. Coli outbreaks in the US. Stx2 is considered to be orders of magnitude more toxic that Stx1. The severity of Shiga toxin foodborne illnesses range from mild diarrhea to a life-threatening complication known as hemolytic uremic syndrome (HUS). HUS is a disease associated with hemolytic anemia, acute kidney failure and low platelet count. Cattle is the major source or infection to humans, but the disease may be spread by birds or pigs. Shiga infection is typically obtained from contaminated food or drink, such as meat, unpasteurized milk, or contaminated water, or by contact with cattle. Shiga toxin and Shiga-like toxins considered to be potential chemical and biological warfare agents.

[1008] As of today, there is no prevention therapy or specific treatment for Shiga and Shiga-like toxins. Recent developments have been made in antibody therapy of Shiga toxin induced HUS. For example, SHIGAMAB™ (developed by Bellus Health Inc.) is a monoclonal antibody for treatment of Shiga toxin induced HUS.

[1009] In some embodiments, methods of the present disclosure may be used to prevent, manage and/or treat infections and complications caused by Shigella dysenteriae.

[1010] Viral particles and methods of using the viral particles described in the present disclosure may be used to prevent, manage and/or treat Shigella dysenteriae related infections and/or conditions. As a non-limiting example, the viral particles of the present disclosure comprise a nucleic acid sequence encoding at least one of the sequences described in Table 28.

### Botulinum Toxins

[1011] Botulinum toxins are neurotoxins produced by Clostridium bacteria and they cause a disease called botulism which is characterized by weakness, problems in vision, tiredness, and problems with speech, followed by weakness of the arms, chest muscles and legs. Botulism may be fatal. There are seven different botulinum neurotoxins with a four-domain structure varying in antigenic properties and interactions with intracellular targets. L-chain enters the cytosol, cleaves the synaptosomal protein and blocks neurotransmitter release resulting in peripheral neuromuscular blockade and flaccid paralysis in humans. (see, e.g. Friedman and Rasooly, Toxins (Basel). 2013 April; 5(4): 743-775) Botulinum neurotoxins are highly dangerous to humans, serotype A having a median lethal dose (LD₅₀) of 0.8 micrograms for a human of 70 kg weight. The bacteria is common in soil and water and may produce the botulinum toxins when exposed to low oxygen levels and certain temperatures. Outbreaks of foodborne botulism occur occasionally. Most susceptible to contamination by botulinum are baked products, fresh mussels, canned fruit and vegetables. Infant botulism occurs when the toxins are produced and released by bacteria in the infant's intestines. Botulism may also occur in wounds where the bacteria in the absence of oxygen produces and releases the toxins. Wound botulism is most common in cases where contaminated needles are used for injection. Botulinum toxins are potential biological and chemical warfare agents.

[1012] As of today, there is no prevention therapy for botulism. Botulism may be treated with antitoxins that block the circulation of toxins in the blood and prevent worsening of the disease. However, the antitoxins are expensive and not easily available. In cases of wound botulism, the area infected may be removed surgically. Additionally, good supportive care therapy is applied. There remains a need for therapies to prevent and treat botulism. Antibodies targeting botulinum toxins are developed, as described e.g. in US Patent publication US20130058962, and International publication WO2015100409, the contents of each of which are herein incorporated by reference in their entirety.

[1013] In some embodiments, methods of the present disclosure may be used to prevent, manage and/or treat infections and complications caused by botulinum toxins.

[1014] Viral particles and methods of using the viral particles described in the present disclosure may be used to prevent, manage and/or treat botulinum toxin related infections and/or conditions. As a non-limiting example, the viral particles of the present disclosure comprise a nucleic acid sequence encoding at least one of the sequences described in Table 27.

### Therapeutic Applications: Neglected Tropical Diseases (NTDs)

[1015] Viral particles and methods of using the viral particles described in the present disclosure may be used to prevent, manage and/or treat infectious disease. As a non-limiting example, the viral particles of the present disclosure comprise a nucleic acid sequence encoding at least one of the sequences described in Tables 21-24.

[1016] Neglected Tropical diseases (NTDs) are a diverse category of communicable diseases present in tropical and subtropical environments. NTDs affect more than one billion people in about 150 countries. NTDs are a significant public health problem costing the involved developing economies billions of dollars annually. The diseases affect mostly the populations with inadequate sanitation, and those in contact with infectious vectors, domestic animals and livestock. In May 2013, the 66th WHO Assembly announced resolution WHA66.12 to integrate measures and plan investments to improve the wellbeing of populations affected by NTDs. NTDs include Buruli ulcer, Chagas disease, Dengue and Chikungunya, Dracunculiasis (guinea-worm disease), Echinococcosis, Endemic treponematoses (Yaws), Foodborne trematodiases, Human African trypanosomiasis (sleeping sickness), Leishmaniasis, Leprosy (Hansen disease), Lymphatic filariasis, Onchocerciasis (river blindness), Rabies, Schistosomiasis, Soil-transmitted helminthiaces, Taeniasis/Cysticercosis and Trachoma.

### Chikungunya Virus

[1017] Chikungunya virus is an arbovirus belonging to the Togoviridae family. The genome is a single-strand RNA molecule encoding four non-structural and three structural glycoproteins (C, E1, E2) (see, e.g. Caglioti et at, 2013, New Microbiol; 36(4211-27, and references therein). Chikungunya fever is a mosquito-borne disease caused by chikungunya virus. The symptoms include a fever lasting 2-7 days, rash and flu-like symptoms accompanied by a joint pain that may last for weeks, months or even years. The disease may be dangerous for the elderly and individuals with chronic medical problems. Chikungunya virus is spread by Aedes albopictus and Aedes aegypti. Outbreaks of chikungunya fever have occurred in Africa, Asia, Europe and Indian and Pacific Oceans, and more recently in islands in the Caribbean. As an example, according to the WHO, an outbreak of 1.9 million cases in India, Indonesia, Maldives, Myanmar and Thailand since 2005 has been reported. More recently, as of April 2015 more than million cases have reported in Caribbean Islands, Latin American countries and the United States.

[1018] As of today, there is no specific treatment or vaccination for chikungunya fever. The disease is typically treated with supportive care therapy, as well as anti-inflammatory drugs and medicines to relieve the symptoms. Research and development on vaccinations has been done but none has been approved for commercial use so far. Antibodies for detection and treatment of Chikungunya have been developed. E.g, fully human antibodies binding to an epitope located in an antigenic site of the chikungunya virus E1 and E2 envelope proteins were in US Patent Publication US20130189279, the contents of each of which are incorporated herein by reference in their entirety.

[1019] In some embodiments, methods of the present disclosure may be used to prevent, manage and/or treat infections and complications caused by chikungunya virus.

[1020] Viral particles and methods of using the viral particles described in the present disclosure may be used to prevent, manage and/or treat chikunguyna virus related infections and/or conditions. As a non-limiting example, the viral particles of the present disclosure comprise a nucleic acid sequence encoding at least one of the sequences described in Table 24.

### Dengue Virus

[1021] Dengue virus belongs to the family of Flaviviridae, genus of Flavivirus. It is an enveloped, positive strand RNA virus containing two integral membrane proteins envelope (E) and premembrane (prM). Dengue virus is closely related to e.g. Yellow fever, West Nile virus and St. Louis and Japanese encephalitis viruses. There are five serotypes of the virus that can cause dengue fever, which is a mosquito-borne tropical disease. Neutralizing antibodies target the protein E as it binds to the cellular receptors and mediates the viral entry into cells. Infection with a serotype may produce a lifelong immunity to that serotype but no long-term immunity against other serotypes, (see e.g., Wahala. and de Silva, 2011, Viruses.; 3(12): 2374-2395, and references therein). In fact, an infection by a second serotype may lead to a more severe form of disease, due to the complexity of the antibody respond and possible antibody dependent enhancement (ADE), which hypothesizes that weakly neutralizing antibodies from the first infection bind to the second serotype and enhance the infection. The symptoms of dengue fever are similar to flu, including fever, headache, muscle and joint pain and skin rash. The disease may also manifest as a potentially lethal complication called severe dengue, also known as dengue hemorrhagic fever. The disease may be dangerous to individuals with chronic diseases, such as diabetes or asthma, or children and the elderly. Dengue virus is spread by several mosquito species, out of which Aedes aegypti is the most common. Dengue may also be transmitted via infected blood or organ donation or by the vertical transmission route. According to the WHO, the estimated number of dengue infections annually could be as high as 390 million.

[1022] As of today, there is no specific treatment or prevention therapy for dengue fever. Antibodies targeting dengue virus have been developed. As an example, antibodies neutralizing four serotypes of dengue virus have been in US Patent publication US20150225474, US20150218255 and in U.S. Pat. No. 9,073,981 the contents of each of which are incorporated herein by reference in their entirety.

[1023] In some embodiments, methods of the present disclosure may be used to prevent, manage and/or treat infections and complications caused by dengue virus.

[1024] Viral particles and methods of using the viral particles described in the present disclosure may be used to prevent, manage and/or treat Dengue virus related infections and/or conditions. As a non-limiting example, the viral particles of the present disclosure comprise a nucleic acid sequence encoding at least one of the sequences described in Table 21.

Trypanosoma cruzi

[1025] Trypanosoma Cruzi (T. cruzi) is a species of parasitic euglenoid protozoan. T. cruzi causes Chagas disease, also known as American trypanosomiasis, which is a tropical parasitic disease. The symptoms of Chagas disease at the early stage include fever, swollen lymph nodes, headaches or local swelling at the site of bite. The chronic phase of Chagas starts after 8-12 weeks, which may be symptomless, or include enlargement of the ventricles of the heart, which may result in heart failure, or to an enlarged esophagus or enlarged colon. The severity of Chagas disease varies from almost unnoticeable to fatal. Chagas disease is spread by an insect vector triatomine bug. These bugs get infected with T. cruzi by feeding on the blood of an infected human or animals, and they spread it further by bites and ingestion of blood. The triatomine bug is also known as a “kissing bug” referring to its tendency to feed on people's faces. T. cruzi may also be transmitted through blood transfusions or through breast milk. Chagas disease is present mainly in 12 Latin American countries but has also spread to other continents. According The WHO, over 10 000 people die every year from Chagas disease, and 25 million people are in the risk of infection.

[1026] As of today, there is no specific prevention or treatment therapy for Chagas disease. The traditional therapies for Chagas have been involved with attempts to kill the parasite and treatment of the symptoms. For example, azole and nitro-derivative drugs have been used, but have not been successful in removal of the parasite fully. Other mechanisms to treat the disease have been under research. After infection in mammals, the parasite incorporates a charged carbohydrate (sialic acid) to survive to the chronic phase of the disease. To do so, the parasite scavenged sialic acid it from the host's sialoglycoconjugates, through a transglycosylation reaction catalyzed by an enzyme called trans-sialidase. The trans-sialidase has been identified as a potential target for drug development. Buschiazzo et al. have reported an antibody inhibiting the T. cruzi trans-sialidase enzyme providing an antibody therapy mechanism for Chagas disease (see, Buschiazzo et al., 2012, PLoS Pathol. 8 (1), E1002474, and references therein).

[1027] In some embodiments, methods of the present disclosure may be used to prevent, manage and/or treat infections and complications caused by Chagas disease.

[1028] Viral particles and methods of using the viral particles described in the present disclosure may be used to prevent, manage and/or treat Chagas disease. As a non-limiting example, the viral particles of the present disclosure comprise a nucleic acid sequence encoding at least one of the sequences described in Table 23.

### Rabies Virus

[1029] Lyssaviruses are a genus of RNA viruses belonging to the family of Rhabdoviridae. Rabies virus is a neurotropic virus with cylindrical morphology. After infection, rabies virus enters the peripheral nervous system, and further to central nervous system by retrograde axonal transport. Rabies virus and Australian bat lyssavirus cause rabies. Rabies affects humans and warm-blooded animals. The early stage symptoms include flu-like signs, but later the disease manifests as paralysis, anxiety, insomnia, abnormal behavior, hallucinations. Humans and animals infected may also experience hydrophobia, “fear of water”, which is considered a characteristic symptom of the disease. Eventually the disease affects the central nervous system and brain, causing death. Humans are typically infected by being bitten, scratched or licked by an animal with the disease. Most commonly the infection is by dogs. Whereas efficient vaccination programs for animals have been able to reduce or even eliminate rabies in developing countries, the disease still affects poor population mainly in Africa and Asia. According to the WHO, post-bite treatment and vaccination is provided for 15 million people annually.

[1030] Rabies is a vaccine-preventable disease and especially systematic vaccination of dogs has been a cost-effective strategy for prevention of rabies. Post-exposure prophylaxis (PEP), the treatment of bite victims immediately after the exposure, includes local treatment of the wound, rabies vaccination and administration of rabies immunoglobulin. Though efficient vaccines for rabies have been developed, there remains a need for treatment/or management of rabies to prevent death after rabies virus has entered the central nervous system (see, e.g., Hicks et al., 2012, Clin Exp Immunol., 169(3): 199-204, and references therein). The genome of rabies virus codes for five viral proteins. Out of the five, G protein, which is an external surface glycoprotein, forms protrusions that cover the outer surface of the virion envelope and is known to induce neutralizing antibodies. Also, nucleoprotein (N) molecules and the phospho-protein (NS) participate in immune responses. G protein has been the target of antibody developments. For example, therapeutic antibodies against rabies virus are taught in U.S. Pat. Nos. 7,071,319, 6,890,532, and 9,005,624, the contents of each of which are incorporated herein by reference in their entirety.

[1031] In some embodiments, methods of the present disclosure may be used to prevent, manage and/or treat infections and complications caused by rabies virus.

[1032] Viral particles and methods of using the viral particles described in the present disclosure may be used to prevent, manage and/or treat rabies virus related infections and/or conditions. As a non-limiting example, the viral particles of the present disclosure comprise a nucleic acid sequence encoding at least one of the sequences described in Table 22.

### Therapeutic Applications: Tropical Diseases (TDs) and Vector-Borne Diseases

[1033] Viral particles and methods of using the viral particles described in the present disclosure may be used to prevent, manage and/or treat infectious disease. As a non-limiting example, the viral particles of the present disclosure comprise a nucleic acid sequence encoding at least one of the sequences described in Tables 29-31.

Plasmodium falciparum

[1034] Plasmodium falciparum (P. falciparum) is a protozoan parasite belonging to Plasmodium parasite family. P. falciparum is the main cause of malaria and responsible for nearly all death cases in malaria. P. falciparum is released to the human bloodstream through mosquito saliva. The parasite has a high rate of replication and capability to alter. P, falciparum, among other Plasmodium parasites, cause malaria, which is a mosquito borne tropical disease. The early stage symptoms include fever, headache, chills and vomiting. If not treated at the early stage, malaria can progress to a life-threatening condition involving multiple organs, resulting in skin yellowing, seizures and coma. In children, malaria may cause severe anemia, respiratory distress in relation to metabolic acidosis, and/or cerebral malaria. The disease is especially dangerous for young children, pregnant women and individuals without immunity to the disease, such as travelers from non-malaria areas. An infection may develop a partial immunity, allowing the following infections to be asymptomatic. According to the WHO, about half of world's population are at risk of malaria. Sub-Saharan Africa carries the highest density of malaria. In 2015, 88% of malaria cases and 90% of malaria deaths was in Sub-Saharan Africa. Malaria is spread by female Anopheles mosquitos and caused by 5 different parasite species, out of which Plasmodium falciparum is the most prevalent and responsible for the severe cases of malaria.

[1035] Despite tremendous efforts, there is no commercial vaccination for malaria. Traditional treatment for malaria consists of antimalarial medicine therapies, such as artemisinin-based combination therapies, which consists of artemisinin combined with antimalarial drugs such as amodiaquine, lumefantrine, mefloquine and sulfadoxine/pyrimethamine. However, drug resistance has been a serious challenge in malaria treatment. Currently resistance is common for all antimalarial medications apart from artemisinin combination therapy. The cost of artemisinin treatment is high and there remains a need for prevention therapies and improved treatment against malaria.

[1036] Due to the polymorphic nature and high replication rate of P Falciparum, tolerance to malaria is achieved only after years of repeated infections. Antibodies for prevention and treatment of malaria have been developed. For example, antibodies against P. falciparum are taught in U.S. Pat. No. 7,811,569, in US Patent publication US20150197562 and in international Patent publication WO2014087007, the contents of each of which are incorporated herein by reference in their entirety. A need for mechanism to deliver constant, effective concentration of malaria antibody for a long period is still in need. Studies by Deal et al. demonstrate results on vectored immunoprophylaxis delivery of malaria antibodies to mice (see, Deal et al. PNAS, 2014, 111(34), 12528-12532).

[1037] In some embodiments, methods of the present disclosure may be used to prevent, manage and/or treat infections and complications caused by P. falciparum.

[1038] Viral particles and methods of using the viral particles described in the present disclosure may be used to prevent, manage and/or treat P. falciparum related infections and/or conditions. As a non-limiting example, the viral particles of the present disclosure comprise a nucleic acid sequence encoding at least one of the sequences described in Table 29.

### Ebola Virus

[1039] Genus of Ebola virus includes five viruses, Zaire, Reston, Sudan, Tai Forest and Bundibygyo Ebola viruses, is a negative-sense RNA virus belonging to the family of filoviridae. The West Africa outbreak has been associated with Zaire Ebola virus. The genome of Ebolavirus encodes seven genes. The glycoprotein GP gene encodes two distinct gene products: sGP which is a dimeric and secreted glycoprotein and less abundant GP, which is a trimeric-virion attached, membrane embedded envelope glycoprotein and responsible for the virus attachment, fusion and entry during infection. Ebola virus disease is a hemorrhagic fever disease caused. The early symptoms include fever, sore throat, muscular pain, followed by a diarrhea and rash. Eventually the disease will affect the liver and kidney function and cause internal bleeding. The disease is highly fatal, as about 50% infected individuals die. The Ebola virus is transmitted by direct contact with the blood and body fluids and tissues of an infected person or an animal, most commonly a chimpanzee, gorilla, fruit bat, monkey, forest antelope and porcupine. The disease is also transmitted when handling dead bodies of infected animals or humans. Also, sexual transmittance of the disease has been suggested. The WHO has reported more than 28 000 infections and 11 000 deaths in Ebola virus disease outbreak in West Africa (2014-present), mainly affecting Guinea, Sierra Leone and Liberia.

[1040] As of today, there is no licensed treatment or prevention therapy proven to neutralize the virus, Typically, Ebola virus disease is treated with a good supportive care. A variety of blood, immunological and drug therapies are under investigation, as well as preventive vaccines undergoing evaluations. However, a demand for effective therapies for treatment and prevention of Ebola virus disease remain.

[1041] Viral surface of GP has been identified as a target for neutralizing antibodies. Antibodies targeting GP of Ebola virus have been taught, e.g. in International Patent publication WO2015127136 and Olal, D., et al., 2012, J. Tirol. 86 (5), 2809-2816, the contents of each of which are incorporated herein by reference in their entirety.

[1042] In some embodiments, methods of the present disclosure may be used to prevent, manage and/or treat infections and complications caused by Ebola virus.

[1043] Viral particles and methods of using the viral particles described in the present disclosure may be used to prevent, manage and/or treat Ebola related infections and/or conditions. As a non-limiting example, the viral particles of the present disclosure comprise a nucleic acid sequence encoding at least one of the sequences described in Table 30.

### Marburg Virus

[1044] Marburg virus belongs to the filoviridae family of viruses with coiled, toroid or branched structures with seven proteins. The structure of Marburg virus is similar to Ebola virus, however, the involved antigens are different. The filoviruses express a single glycoprotein on their surface. The glycoprotein is responsible for the infection, as it is involved in the attachment and entry of the viruses causing infection. Marburg virus disease is a hemorrhaging fever disease caused by Marburg virus. It is highly fatal disease and related to Ebola virus diseases. The early symptoms of the disease include severe headache and malaise. Severe hemorrhagic manifestations in later stages include bleeding from multiple sites. The Marburg virus is transmitted by direct contact with the blood and body fluids and tissues of infected persons or animals, most commonly fruit bats and monkeys. The disease is also transmitted when handling dead the bodies of infected animals or humans. Marburg virus disease is uncommon, but outbreaks typically have a high rate of fatality. According to the WHO, the death rate was as high 80% in outbreaks of 1998-2000 in Democratic Republic of Congo and 2005 in Angola.

[1045] As of today, there is no preventive or treatment therapy for Marburg virus disease. The current treatment methods include good supportive treatment. The surface glycoprotein has been a target for development of antibodies for Marburg disease vaccines and treatments. For example, International Patent publication WO2015127140, and US Patent publication US20140356354, the contents of which are incorporated herein by reference in their entirety, teach therapeutic antibodies that recognize glycoprotein of filoviruses for different strains of Marburg, as well as Ebola.

[1046] In some embodiments, methods of the present disclosure may be used to prevent, manage and/or treat infections and complications caused by Marburg virus.

[1047] Viral particles and methods of using the viral particles described in the present disclosure may be used to prevent, manage and/or treat Marburg related infections and/or conditions. As a non-limiting example, the viral particles of the present disclosure comprise a nucleic acid sequence encoding at least one of the sequences described in Table 30.

### West Nile Virus

[1048] West Nile virus (WNV) is a positive-stranded RNA of the flavivirus genome and member of the Japanese encephalitis serocomplex of flaviviruses, (see Throsby, M., J. Virol. 80 (14), 6982-6992 (2006)). Two lineages of the virus have been identified. The genome of the virus encodes a single polyprotein producing three structural proteins, capsid C, precursor membrane prM and envelope E as well as seven nonstructural proteins. WNV causes mosquito-borne infections with a variety of manifestations. Tough about 80% of WNV infections are symptomless and not harmful, in certain cases, the disease may lead to fatal neurological diseases. Infection of MNV may lead to a West Nile fever, which causes flu-like symptoms accompanied by high fever, headache, chills, excessive sweating, fatigue, weakness, swollen lymph nodes, and joint pains. Infection by MNV may also occur as cutaneous manifestations, including rashes that may include punctate erythematous, macular and popular eruptions. West Nile infections may also affect the central nervous system resulting in West Nile neuroinvasive diseases, including meningitis, encephalitis, meningoencephalitis and poliomyelitis-like syndrome. These neuroinvasive forms of NWV infections occur in only about 1% of infections, but they may be life-threatening. WNV is commonly found in Africa, Europe, the Middle East, North America and West Asia. WNV is typically transmitted to humans and other mammals by mosquitos and is maintained in nature in a cycle involving transmission between birds and mosquitoes. WNV is carried by different types of mosquitos, dependent on geographical distribution. Transmission to humans may also occur from birds, horses or other humans.

[1049] As of today, there is no specific treatment or prevention therapy for MNV infections. Current methods of treatment include good supportive care. Due to severity of some of the manifestations, there remains a need for such therapies. Envelope E has been a target of most antibody related studies. Antibodies targeting M and the first non-structural protein have also been investigated. As an example, Thorsby et al., 2006, J. Virol. 80 (14), 6982-6992, the contents of which are incorporated herein by reference in their entirety, teaches antibodies binding to E and prM proteins. U.S. Pat. Nos. 8,663,950 and 7,527,973, the contents of each of which are incorporated herein by reference in their entirety, teach antibodies binding to E protein of WNV.

[1050] In some embodiments, methods of the present disclosure may be used to prevent, manage and/or treat infections and complications caused by West Nile virus.

[1051] Viral particles and methods of using the viral particles described in the present disclosure may be used to prevent, manage and/or treat West Nile virus related infections and/or conditions. As a non-limiting example, the viral particles of the present disclosure comprise a nucleic acid sequence encoding at least one of the sequences described in Table 31.

### Yellow Fever Virus

[1052] Yellow fever virus is an enveloped RNA virus belonging to the Flavivirus family. Yellow fever, also known as Yellow Jack, Yellow Plague or Bronze John, is a mosquito-borne viral hemorrhagic disease. In most cases, the symptoms include fever, headache, chills, loss of appetite, nausea, and muscle pain. In some occasions, the disease progresses to a second stage which includes fever accompanied by abdominal pains, liver damage resulting in jaundice, kidney problems and/or bleeding. The disease is spread primarily by Aedes and Haemogogus type mosquitos. The disease is most typical in tropical environments. According to the WHO, there are 200 000 annual cases of yellow fever resulting in 30 000 deaths mainly in Africa and Latin America. 90% of cases occur in Africa.

[1053] Preventive live-attenuated vaccines for yellow fever are available. However, concern related to post-vaccine adverse events has decreased the popularity of the vaccines. The vaccination is not recommended to infants younger than 9 months, pregnant women and individuals with an immune deficiency. As of today, there is no specific treatment for yellow fever. Current methods for treatment involve with supportive care to treat dehydration, respiratory failure and fever. There is a need for improved prevention and treatment therapies against yellow fever virus.

[1054] Envelope E glycoprotein of yellow fever virus has been identified as a potential target for antibody therapies. Neutralizing antibodies for yellow fever virus have been reported by Thibodeaux, B. A. et al, 2012, Antiviral Res. 94 (1), 1-8 and Daffis, S. et al., 2005, Virology, 337 (2), 262-272, the contents of each of which are incorporated herein by reference in their entirety.

[1055] In some embodiments, methods of the present disclosure may be used to prevent, manage and/or treat infections and complications caused by yellow fever virus.

[1056] Viral particles and methods of using the viral particles described in the present disclosure may be used to prevent, manage and/or treat yellow fever virus related infections and/or conditions. As a non-limiting example, the viral particles of the present disclosure comprise a nucleic acid sequence encoding at least one of the sequences described in Table 31.

### Japanese Encephalitis Virus

[1057] Japanese encephalitis virus is an enveloped positive sense single-stranded RNA virus belonging to Flavivirus family and closely related to St. Louis encephalitis and West Nile virus. The virus causes Japanese encephalitis, also known as Japanese B encephalitis. In majority of cases, the disease is symptomless. However, in less than 1% of infections, the disease leads to a life-threatening encephalitis. The early stage symptoms include fever, headache and malaise. As the disease progresses into an acute encephalitis, the symptoms include neck rigidity, cachexia, hemiparesis, convulsions and fever, accompanied by lifelong neurological problems such as deafness, and/or mental retardation. The disease is transmitted to humans via mosquitos of the Culex species. The virus exists in a transmission cycle between mosquitos, pigs, and water birds. The disease affects 24 counties in the South-East Asia and Western Pacific. According to the WHO, an estimated 68 000 clinical cases are reported annually, with case-fatality rate as high as 30%. Major outbreaks of the disease occur every 2-15 years.

[1058] The disease may be prevented by a vaccination, most common vaccination being a live attenuated vaccine. In general, the vaccines initially show high effectiveness, but the protection decreases over time. As of today, there is no specific treatment for the disease. Current treatment therapies include good supportive care. There remains a need for longer lasting, improved prevention therapies, and treatment for Japanese encephalitis virus infections.

[1059] Antibodies for treatment of Japanese encephalitis have been developed. For example, Hsieh et al. teach antibodies that target cellular receptors and interrupts their function in flavivirus infections in US Patent publication US20080292644, the contents of which are incorporated herein by reference in their entirety.

[1060] In some embodiments, methods of the present disclosure may be used to prevent, manage and/or treat infections and complications caused by Japanese encephalitis virus.

[1061] Viral particles and methods of using the viral particles described in the present disclosure may be used to prevent, manage and/or treat Japanese encephalitis virus related infections and/or conditions. As a non-limiting example, the viral particles of the present disclosure comprise a nucleic acid sequence encoding at least one of the sequences described in Table 31.

St. Louis Encephalitis Virus

[1062] St. Louis encephalitis virus is a positive-stranded RNA virus and member of the Flavivirus family and closely related to Japanese encephalitis virus. St. Louis encephalitis is a mosquito-borne disease caused by the virus. In majority of cases, the disease is symptomless. However, in less than 1% of the cases, the disease may lead to encephalitis, which may be life-threatening, especially for the elderly. The early stage symptoms include fever, headache, dizziness, malaise and nausea. If the disease progresses to the central nervous system, symptoms include stiff neck, confusion, disorientation, dizziness, tremor and unsteadiness, and in severe cases coma or even death. St. Louis encephalitis virus is transmitted to humans through Culex mosquitos. The virus exists in a transmission cycle between mosquitos and birds. The disease mainly affects the USA, especially eastern and central states. The disease has also spread to Canada and Mexico.

[1063] As of today, there is no vaccine or specific treatment for St. Louis encephalitis. Current treatment therapies include good supportive care. There is a demand for preventive and treatment therapies for the disease. Neutralizing antibodies for St. Louis encephalitis virus have been reported in Thibodeaux, B. A., et al, 2012, Antiviral Res, 94 (1), 1-8 and Daffis, S, et al., 2005, Virology 337 (2), 262-272, the contents of which are incorporated herein by reference in their entirety.

[1064] In some embodiments, methods of the present disclosure may be used to prevent, manage and/or treat infections and complications caused by St. Louis encephalitis virus.

[1065] Viral particles and methods of using the viral particles described in the present disclosure may be used to prevent, manage and/or treat St. Louis encephalitis virus related infections and/or conditions. As a non-limiting example, the viral particles of the present disclosure comprise a nucleic acid sequence encoding at least one of the sequences described in Table 31.

### Therapeutic Applications: Foodborne Illness and Gastroenteritis

[1066] Viral particles and methods of using the viral particles described in the present disclosure may be used to prevent, manage and/or treat infectious disease. As a non-limiting example, the viral particles of the present disclosure comprise a nucleic acid sequence encoding at least one of the sequences described in Tables 14-20.

[1067] Foodborne illnesses, also known as food poisoning, are a common and costly public health problem. The illnesses are typically transmitted by the fecal-oral-route. The transmission to humans is by consuming contaminated food or beverage. More than 250 different foodborne diseases, mostly infections caused by viruses, bacteria, parasites or fungus, are identified by the CDC. CDC estimates that approximately 48 million individuals are affected by foodborne illnesses annually in the United States. Gastroenteritis is an inflammation of the gastrointestinal tract involving stomach and small intestine. Gastroenteritis is also caused by an infection caused by viruses, bacteria, parasites or fungus. The transmission to humans is by person-to-person contact, or by consuming contaminated food or beverage. Foodborne illnesses and gastroenteritis have similar symptoms including diarrhea, vomiting, abdominal pain, dehydration. In some cases, the diseases may require hospitalization or be fatal. Both illnesses are best prevented by proper hand hygiene, proper hygiene while preparing food, treatments to kill bacteria such as pasteurizing, cooking or heating food, and proper methods to store food.

### Rotavirus

[1068] Rotavirus is a double-stranded RNA virus belonging to the family of Reoviridae. The rotavirus genome consists of 10 segments coding for a single protein, and segment 11 coding for two proteins. The virions are non-enveloped, triple-layered and icosahedral in structure (see, e.g. Aiyegbo et al., 2013, Pleas One 8, 61101, and references therein). The virus is spread by the fecal-oral-route. Rotavirus is very common especially among infants and young children and spreads easily. Almost all children worldwide are infected with rotavirus by the age of 5, and the disease leads to death of half a million children annually. Rotavirus causes rotavirus gastroenteritis with symptoms including nausea, vomiting, diarrhea and fever. Rotavirus is associated with dehydration. The disease is milder in adults and more severe in young children, infants and the elderly. Though infection does not provide full immunity to the virus, the first infection is typically the most severe in symptoms.

[1069] As of today, there is no specific treatment rotavirus infections. Present treatment includes good supportive care including drinking of fluids to prevent dehydration. In severe cases, the rotavirus gastroenteritis requires hospital care e.g. treatment with intravenous fluids. Vaccines for prevention of the disease have been developed and CDC recommends rotavirus vaccination for infants as part of the routine vaccinations. There remains a need for medical treatment therapies for the infection. Development has been done in the field of antibodies. E.g. Aiyegbo et al., in plus One 8, 61101 (2013, teach antibodies targeting the intermediate capsid layer of Is/P6 of the triple-layered particle and Frenken et al. teach anti-rotavirus antibodies in U.S. Pat. No. 8,105,592, the contents of which are incorporated herein by reference in their entirety.

[1070] In some embodiments, methods of the present disclosure may be used to prevent, manage and/or treat infections and complications caused by rotavirus.

[1071] Viral particles and methods of using the viral particles described in the present disclosure may be used to prevent, manage and/or treat rotavirus related infections and/or conditions. As a non-limiting example, the viral particles of the present disclosure comprise a nucleic acid sequence encoding at least one of the sequences described in Table 19.

### Norwalk Virus/Norovirus

[1072] Norwalk virus, also known as winter vomiting bug, is the only member of genus norovirus belonging to the family of Caliciviridae. Norwalk virus is a single-stranded RNA with three open-reading frames that encode a polyprotein precursor to non-structural proteins, and two polypeptides of different sizes (see e.g. Jiang et al., 1993, Virology; 195(1):51-61, and references therein). Norwalk virus is spread by the fecal-oral-route. Norwalk virus is extremely contagious and can be transmitted through contaminated food or drink, touching contaminated surfaces or Objects or from a contact with an infected individual. The Norwalk virus causes an inflammation of stomach and/or intestines. The symptoms associated with the infection include stomach pain, nausea, vomiting and diarrhea. The disease can be dangerous, especially for your children or young adults. According to CDC, every year 1921 million infections occur leading to 570-800 deaths in the US.

[1073] As of today, there is no vaccine or specific treatment for Norwalk virus associated gastroenteritis. Antibodies for prevention and treatment of Norwalk virus have been developed. For example, International Patent publication WO2014126921 and WO2014183052, the contents of each of which are incorporated herein by reference in their entirety, teach neutralizing antibodies binding to the polypeptides of Norwalk virus.

[1074] In some embodiments, methods of the present disclosure may be used to prevent, manage and/or treat infections and complications caused by Norwalk virus.

[1075] Viral particles and methods of using the viral particles described in the present disclosure may be used to prevent, manage and/or treat Norwalk virus related infections and/or conditions. As a non-limiting example, the viral particles of the present disclosure comprise a nucleic acid sequence encoding at least one of the sequences described in Table 18.

Campylobacter jejuni

[1076] Campylobacter jejuni (C. jejuni) is an oxidase-positive, catalase-positive, nonfermentative Gram-negative bacteria with a helical shape. The C. jejuni inhabits in the intestinal tract of animals (e.g. poultry, cattle, pigs, sheep, ostriches and shellfish), and in pets (e.g, cats and dogs). The bacteria may be transmitted to humans foodborne, e.g. when eating contaminated food or drink, such as unpasteurized milk. According to the WHO, campylobacter is the most common cause of gastroenteritis worldwide. C. jejuni causes campylobacteriosis infection. The typical symptoms include diarrhea with blood in the feces, abdominal pain, fever, headache, nausea and/or vomiting. The infection may be dangerous to young children, the elderly and individuals with immunodeficiency and is most abundant with malnourished children. C. jejuni infections have been associated with severe long-term complications such as Guillain-Barre Syndrome, inflammatory bowel disease and reactive arthritis (see, e.g., Platts-Mills and Kosek, 2014, Curr Opin Infect Dis.; 27(5): 444-450, and references therein).

[1077] Typically, C. jejuni infection does not require specific treatment in addition to good supportive care. In more severe cases, in humans and in poultry, the infection has been treated with antibiotics such as fluoroquinoles and macrolides. However, spread of antibiotic-resistant strains is an increasing concern. The treatment with antibiotics is recommended in cases where the bacteria has invaded the intestinal mucosa cell and damaged the tissues, or to eliminate the carrier state. There remains a need for prevention therapies, as well as improved, non-antibiotic, therapies for treatment of the infection. Antibodies targeting C. jejuni have been taught e.g. in International Patent publication WO2014063253, the contents of which are incorporated herein by reference in their entirety.

[1078] In some embodiments, methods of the present disclosure may be used to prevent, manage and/or treat infections and complications caused by C. Jejuni.

[1079] Viral particles and methods of using the viral particles described in the present disclosure may be used to prevent, manage and/or treat C. Jejuni related infections and/or conditions. As a non-limiting example, the viral particles of the present disclosure comprise a nucleic acid sequence encoding at least one of the sequences described in Table 15.

Clostridium difficile

[1080] Clostridium difficile bacteria (C. difficile) is a Gram-positive, anaerobic spore-forming bacteria belonging to the genus of Clostridium. C. difficile inhabits in the soil. C. difficile produces toxins, most commonly enterotoxin A and cytotoxin B. Toxins A and B both have a C-terminal receptor-binding domain containing repeating sequences, a central hydrophobic domain and N-terminal glucosyltranferase domain. The toxins bind to the intestinal epithelial cells leading to glucosylation of target Rho GTPases, disruption of the cytoskeleton and cell death. C. difficile toxins A and B are a common cause C. difficile associated diarrhea and Clostridium difficile colitis, which is an inflammation of the large intestine. Typical symptoms of the colitis include flu-like symptoms, bloating, diarrhea, and/or abdominal pain. The disease may lead to dehydration, kidney failure, bowel perforation, toxic megacolon resulting in colon rupture. The elderly and individuals with a weakened immunity are more susceptible to severe and recurring infections which can be life-threatening. C. difficile is transmitted by the fecal-oral-route. Due to the ability to form heat-resistant spores, the bacteria is not killed by alcohol-based. cleansers or routine surface cleaning. The bacteria may be cultured on almost any surface and survives in clinical environments, such as hospitals. C. difficile is one of the most common and severe healthcare-associated infections. According to CDC, an estimated about half a million infections occur in the United States annually. In 2011, 29,000 deaths related to C. difficile were reported.

[1081] Currently C. difficile infections are treated with antibiotics such as vancomycin and metronidazole. How-ever, increasing an antibiotic-resistance to the bacteria is a concern. Especially in cases of recurring infections, antibiotic treatments have an incomplete response and they disrupt the nolinal colonic flora. There remains a need for prevention and improved treatment therapies for the infection. Antibodies targeting C. difficile have been developed. For example, actoxumab and bezlotoxumab (developed by Medarex Inc, and the University of Massachusetts Medical School) are human monoclonal antibodies targeting C. difficile toxin A and toxin B, respectively. The antibodies may be administered as a combination for the prevention of recurring C. difficile infection.

[1082] In some embodiments, methods of the present disclosure may be used to prevent, manage and/or treat infections and complications caused by C. difficile.

[1083] Viral particles and methods of using the viral particles described in the present disclosure may be used to prevent, manage and/or treat C. difficile related infections and/or conditions. As a non-limiting example, the viral particles of the present disclosure comprise a nucleic acid sequence encoding at least one of the sequences described in Table 14.

Entamoeba histolytica

[1084] Entamoeba histolytica (E. histolytica) is an anaerobic one-celled parasite protozoan belonging to the genus of Entamoeba. The active stage of the protozoan exists only in the host and in fresh feces. Cysts survive outside the host in water, soil and food in moist conditions. E. histolytica causes an infection called amebiasis, also known as ameobiasis or entamoebiasis. In majority of cases, amebiasis is symptomless. In 10-20% of individuals infected have symptoms that include loose feces, stomach pain and cramping. The severe more form of amebiasis called amebic dysentery is associated with stomach pain, blood stools and fever. In rare cases, E. histolytica invades the liver, forms an abscess and may spread to other parts of the body, such as the lungs or brain. The transmission to humans is mostly via the fecal-oral-route. The disease is typically caused by ingestion of mature cysts in contaminated food, water or via hands. The disease may also be transmitted in close person-to-person contact, e.g. sexual contact. E. histolytica infections are most common in tropical areas and especially in poor sanitary conditions. It is estimated that 50 million cases of amebiasis occur annually, leading to 100,000 deaths.

[1085] As of today, there are no preventive vaccines for E. histolytica infections, though cellular immunity is important for the prevention of liver invasive amebiasis. Amebiasis is typically treated with amebicides, which are medicines targeting E. histolytica at specific parts of the body, e.g. the intestine tissue or liver. Optionally, the treatment may involve one or more antibiotics, as well as steroids. However, increasing antibiotic-resistance of E. histolytica is a concern. There remains a need for prevention therapy as well as for improved treatments. Antibodies targeting E. histolytica are taught in, e.g., 2009, infect limmtm.; 77(1): 549-556, and Tachibana et al., 1999, Clin Diagn Lab Immunol.; 6(3):383-7, the contents of which are incorporated herein by reference in their entirety.

[1086] In some embodiments, methods of the present disclosure may be used to prevent, manage and/or treat infections and complications caused by E. histolytica.

[1087] Viral particles and methods of using the viral particles described in the present disclosure may be used to prevent, manage and/or treat E. histolytica related infections and/or conditions. As a non-limiting example, the viral particles of the present disclosure comprise a nucleic acid sequence encoding at least one of the sequences described in Table 20.

Helicobacter pyroli

[1088] Helicobacter pyroli (H. pyroli) is a Gram-negative, spiral-shaped microaerophilic bacterium. H. pyroli infection is typically asymptomatic and is suggested to be transmitted through the fecal-oral route or oral-oral route. According to CDC, two-thirds of the world's population is infected with H. pyroli. The infection may cause chronic active, chronic, persistent, and atrophic gastritis, duodenal and gastric ulcers and is associated with cancer. CDC reposts 25 million Americans suffering from an ulcer during their lifetime. Typical symptoms associated with ulcer are gnawing or burning pain in the epigastrium, especially between meals. Additional symptoms include nausea, vomiting, loss of appetite, internal bleeding leading to anemia and fatigue.

[1089] Typical treatment for d. pyroli infection involves antibiotics. Increasing antibiotic resistance and patient noncompliance are major challenges associated with the antibiotic treatment. There remains a need for improved, non-antibiotic, treatment and prevention therapies targeting H. Pyroli. Antibodies targeting H. pyroli infection have been developed. For example, Boren et al. teach antibodies targeting the BAbA antigen expressed by H. pyroli in US patent US8025880, the contents of which are incorporated herein by reference in their entirety.

[1090] In some embodiments, methods of the present disclosure may be used to prevent, manage and/or treat infections and complications caused by H. pyroli.

[1091] Viral particles and methods of using the viral particles described in the present disclosure may be used to prevent, manage and/or treat H. pyroli related infections and/or conditions. As a non-limiting example, the viral particles of the present disclosure comprise a nucleic acid sequence encoding at least one of the sequences described in Table 16.

### Enterotoxin B

[1092] Enterotoxin B is a toxin produced by certain strains of Gram-positive bacteria Staphylococcus (wrens and is a common cause for food poisoning. Staphylococcus species thrive and produce toxins in unrefrigerated meats, dairy, and bakery products. The symptoms associated with enterotoxin B infection are severe diarrhea, nausea and intestinal cramping. The toxin may remain active in the human body after the bacteria has been killed. Enterotoxin B is a so-called superantigen. Superantigens are toxins that may activate T cells by forming a bridge between a MEC II on antigen presenting cells (APCs) and the T cell receptors (TCR). Due to binding of enterotoxin B, the T cells release large amount of cytokines leading to an inflammation and gastroenteritis. Though enterotoxin B infection is typically not life threatening, enterotoxin B has been identified as a potential chemical and biological warfare agent.

[1093] As of today, there is no specific prevention or treatment for enterotoxin B infection. Antibodies that neutralize enterotoxin B have been investigated, e.g. as described in U.S. Pat. No. 8,895,704.

[1094] In some embodiments, methods of the present disclosure may be used to prevent, manage and/or treat infections and complications caused by enterotoxin B.

[1095] Viral particles and methods of using the viral particles described in the present disclosure may be used to prevent, manage and/or treat enterotoxin B related infections and/or conditions. As a non-limiting example, the viral particles of the present disclosure comprise a nucleic acid sequence encoding at least one of the sequences described in Table 16.

### V. Kits and Devices

### Kits

[1096] In some embodiments, the disclosure provides a variety of kits for conveniently and/or effectively carrying out methods of the present disclosure. Typically, kits will comprise sufficient amounts and/or numbers of components to allow a user to perform multiple treatments of a subject(s) and/or to perform multiple experiments.

[1097] Any of the viral particles of the present disclosure may be comprised in a kit. In some embodiments, kits may further include reagents and/or instructions for creating and/or synthesizing compounds and/or compositions of the present disclosure. In some embodiments, kits may also include one or more buffers. In some embodiments, kits of the disclosure may include components for making protein or nucleic acid arrays or libraries and thus, may include, for example, solid supports.

[1098] In some embodiments, kit components may be packaged either in aqueous media or in lyophilized form. The container means of the kits will generally include at least one vial, test tube, flask, bottle, syringe or other container means, into which a component may be placed, and preferably, suitably aliquoted. Where there is more than one kit component, (labeling reagent and label may be packaged together), kits may also generally contain second, third or other additional containers into which additional components may be separately placed. In some embodiments, kits may also comprise second container means for containing sterile, pharmaceutically acceptable buffers and/or other diluents. In some embodiments, various combinations of components may be comprised in one or more vial. Kits of the present disclosure may also typically include means for containing compounds and/or compositions of the present disclosure, e.g., proteins, nucleic acids, and any other reagent containers in close confinement for commercial sale. Such containers may include injection or blow-molded plastic containers into which desired vials are retained.

[1099] In some embodiments, kit components are provided in one and/or more liquid solutions. In some embodiments, liquid solutions are aqueous solutions, with sterile aqueous solutions being particularly preferred. In some embodiments, kit components may be provided as dried powder(s). When reagents and/or components are provided as dry powders, such powders may be reconstituted by the addition of suitable volumes of solvent. In some embodiments, it is envisioned that solvents may also be provided in another container means. In some embodiments, labeling dyes are provided as dried powders. In some embodiments, it is contemplated that 10, 20, 30, 40, 50, 60, 70, 80, 90, 100, 120, 120, 130, 140, 150, 160, 170, 180, 190, 200, 300, 400, 500, 600, 700, 800, 900, 1000 micrograms or at least or at most those amounts of dried dye are provided in kits of the disclosure. In such embodiments, dye may then be resuspended in any suitable solvent, such as DMSO.

[1100] In some embodiments, kits may include instructions for employing kit components as well the use of any other reagent not included in the kit. Instructions may include variations that may be implemented.

### Devices

[1101] In some embodiments, the viral particles may be delivered to a subject using a device to deliver the viral particles and a head fixation assembly. The head fixation assembly may be, but is not limited to, any of the head fixation assemblies sold by MRI interventions. As a non-limiting example, the head fixation assembly may be any of the assemblies described in U.S. Pat. Nos. 8,099,150, 8,548,569, and 9,031,636 and International Patent Publication Nos. WO201108495 and WO2014014585, the contents of each of which are incorporated by reference in their entireties. A head fixation assembly may be used in combination with an MM compatible drill such as, but not limited to, the MRI, compatible drills described in International Patent Publication No. WO2013181008 and US Patent Publication No. US20130325012, the contents of which are herein incorporated by reference in its entirety.

[1102] In some embodiments, the viral particles may be delivered using a method, system and/or computer program for positioning apparatus to a target point on a subject to deliver the viral particles. As a non-limiting example, the method, system and/or computer program may be the methods, systems and/or computer programs described in U.S. Pat. No. 8,340,743, the contents of which are herein incorporated by reference in its entirety. The method may include: determining a target point in the body and a reference point, wherein the target point and the reference point define a planned trajectory line (PTL) extending through each; determining a visualization plane, wherein the PTL intersects the visualization plane at a sighting point; mounting the guide device relative to the body to move with respect to the PTL, wherein the guide device does not intersect the visualization plane; determining a point of intersection (GPP) between the guide axis and the visualization plane; and aligning the GPP with the sighting point in the visualization plane.

[1103] In some embodiments, the viral particles may be delivered to a subject using a convention-enhanced delivery device. Non-limiting examples of targeted delivery of drugs using convection are described in US Patent Publication Nos. US20100217228, US20130035574, and US 20130035660 and international Patent Publication No. WO2013019830 and WO2008144585, the contents of each of which are herein incorporated by reference in their entireties.

[1104] In some embodiments, a subject may be imaged prior to, during and/or after delivery of the viral particles. The imaging method may be a method known in the art and/or described herein, such as but not limited to, magnetic resonance imaging (MRI) As a non-limiting example, imaging may be used to assess therapeutic effect. As another non-limiting example, imaging may be used for assisted delivery of viral particles.

[1105] In some embodiments, the viral particles may be delivered using an MRI-guided device. Non-limiting examples of MRI-guided devices are described in U.S. Pat. Nos. 9,055,884, 9,042,958, 8,886,288, 8,768,433, 8,396,532, 8,369,930, 8,374,677, and 8,175,677 and US Patent Application No. US20140024927 the contents of each of which are herein incorporated by reference in their entireties. As a non-limiting example, the MRI-guided device may be able to provide data in real time such as those described in U.S. Pat. Nos. 8,886,288 and 8,768,433, the contents of each of which is herein incorporated by reference in its entirety. As another non-limiting example, the MM-guided device or system may be used with a targeting cannula such as the systems described in U.S. Pat. Nos. 8,175,677 and 8,374,677, the contents of each of which are herein incorporated by reference in their entireties. As yet another non-limiting example, the MRI-guided device includes a trajectory guide frame for guiding an interventional device as described, for example, in U.S. Pat. No. 9,055,884 and US Patent Application No. US20140024927, the contents of each of which are herein incorporated by reference in their entireties.

[1106] In some embodiments, the viral particles may be delivered using an MM-compatible tip assembly. Non-limiting examples of MRI-compatible tip assemblies are described in US Patent Publication No. US20140275980, the contents of which is herein incorporated by reference in its entirety.

[1107] In some embodiments, the viral particles may be delivered using a cannula which is MRI-compatible. Non-limiting examples of MRI-compatible cannulas include those taught in International Patent Publication No. WO2011130107, the contents of which are herein incorporated by reference in its entirety.

[1108] In some embodiments, the viral particles may be delivered using a catheter which is MRI-compatible. Non-limiting examples of MM-compatible catheters include those taught in International Patent Publication No. WO2012116265, U.S. Pat. No. 8,825,133 and US Patent Publication No. US20140024909, the contents of each of which are herein incorporated by reference in their entireties.

[1109] In some embodiments, the viral particles may be delivered using a device with an elongated tubular body and a diaphragm as described in US Patent Publication Nos. US20140276582 and US20140276614, the contents of each of which are herein incorporated by reference in their entireties.

[1110] In some embodiments, the viral particles may be delivered using an MRI compatible localization and/or guidance system such as, but not limited to, those described in US Patent Publication Nos. US20150223905 and US20150230871, the contents of each of which are herein incorporated by reference in their entireties. As a non-limiting example, the MRI compatible localization and/or guidance systems may comprise a mount adapted for fixation to a patient, a targeting cannula with a lumen configured to attach to the mount so as to be able to controllably translate in at least three dimensions, and an elongate probe configured to snugly advance via slide and retract in the targeting cannula lumen, the elongate probe comprising at least one of a stimulation or recording electrode.

[1111] In some embodiments, the viral particles may be delivered to a subject using a trajectory frame as described in US Patent Publication Nos. US20150031982 and US20140066750 and International Patent Publication Nos. WO2015057807 and WO2014039481, the contents of each of which are herein incorporated by reference in their entireties.

[1112] In some embodiments, the viral particles may be delivered to a subject using a gene gun.

### VI. Definitions

[1113] At various places in the present specification, substituents of compounds of the present disclosure are disclosed in groups or in ranges. It is specifically intended that the present disclosure include each and every individual subcombination of the members of such groups and ranges.

[1114] About: As used herein, the term “about” means+/−10% of the recited value.

[1115] Adeno-associated virus: The term “adeno-associated virus” or “AAV” as used herein refers to members of the dependovirus genus comprising any particle, sequence, gene, protein, or component derived therefrom.

[1116] AAV Particle: As used herein, an “AAV particle” is a virus which comprises a viral genome with at least one payload region and at least one ITR region. AAV vectors of the present disclosure may be produced recombinantly and may be based on adeno-associated virus (AAV) parent or reference sequences. AAV particle may be derived from any serotype, described herein or known in the art, including combinations of serotypes (i.e., “pseudotyped” AAV) or from various genomes (e.g., single stranded or self-complementary). In addition, the AAV particle may be replication defective and/or targeted.

[1117] Activity: As used herein, the term “activity” refers to the condition in which things are happening or being done. Compositions of the disclosure may have activity and this activity may involve one or more biological events.

[1118] Administered in combination: As used herein, the term “administered in combination” or “combined administration” means that two or more agents are administered to a subject at the same time or within an interval such that there may be an overlap of an effect of each agent on the patient. In some embodiments, they are administered within about 60, 30, 15, 10, 5, or 1 minute of one another. In some embodiments, the administrations of the agents are spaced sufficiently closely together such that a combinatorial (e.g., a synergistic) effect is achieved.

[1119] Amelioration: As used herein, the term “amelioration” or “ameliorating” refers to a lessening of severity of at least one indicator of a condition or disease. For example, in the context of neurodegeneration disorder, amelioration includes the reduction of neuron loss.

[1120] Animal: As used herein, the term “animal” refers to any member of the animal kingdom. In some embodiments, “animal” refers to humans at any stage of development. In some embodiments, “animal” refers to nonhuman animals at any stage of development. In certain embodiments, the non-human animal is a mammal (e.g., a rodent, a mouse, a rat, a rabbit, a monkey, a dog, a cat, a sheep, cattle, a primate, or a pig). In some embodiments, animals include, but are not limited to, mammals, birds, reptiles, amphibians, fish, and worms. In some embodiments, the animal is a transgenic animal, genetically-engineered animal, or a clone.

[1121] Antibody: As used herein, the term “antibody” is referred to in the broadest sense and specifically covers various embodiments including, but not limited to monoclonal antibodies, polyclonal antibodies, multispecific antibodies (e.g. bispecific antibodies formed from at least two intact antibodies), and antibody fragments (e.g., diabodies) so long as they exhibit a desired biological activity (e.g., “functional”). Antibodies are primarily amino-acid based molecules but may also comprise one or more modifications (including, but not limited to the addition of sugar moieties, fluorescent moieties, chemical tags, etc.). Non-limiting examples of antibodies or fragments thereof include V_{H} and V_{L} domains, scFvs, Fab, Fab′, F(ab′)₂, Fv fragment, diabodies, linear antibodies, single chain antibody molecules, multispecific antibodies, bispecifrc antibodies, intrabodies, monoclonal antibodies, polyclonal antibodies, humanized antibodies, codon-optimized antibodies, tandem say antibodies, bispecific T-cell engagers, mAb2 antibodies, chimeric antigen receptors (CAR), tetravalent bispecific antibodies, biosynthetic antibodies, native antibodies, miniaturized antibodies, unibodies, maxibodies, antibodies to senescent cells, antibodies to conformers, antibodies to disease specific epitopes, or antibodies to innate defense molecules.

[1122] Antibody-based composition: As used herein, “antibody-based” or “antibody-derived” compositions are monomeric or multimeric polypeptides which comprise at least one amino-acid region derived from a known or parental antibody sequence and at least one amino acid region derived from a non-antibody sequence, e.g., mammalian protein.

[1123] Approximately: As used herein, the term “approximately” or “about,” as applied to one or more values of interest, refers to a value that is similar to a stated reference value. In certain embodiments, the term “approximately” or “about” refers to a range of values that fall within 25%, 20%, 19%, 18%, 17%, 16%, 15%, 14%, 13%, 12%, 11%, 10%, 9%, 8%, 7%, 6%, 5%, 4%, 3%, 2%, 1%, or less in either direction (greater than or less than) of the stated reference value unless otherwise stated or otherwise evident from the context (except where such number would exceed 100% of a possible value).

[1124] Associated with: As used herein, the wills “associated with,” “conjugated,” “linked,” “attached,” and “tethered,” when used with respect to two or more moieties, means that the moieties are physically associated or connected with one another, either directly or via one or more additional moieties that serves as a linking agent, to form a structure that is sufficiently stable so that the moieties remain physically associated under the conditions in which the structure is used, e.g., physiological conditions. An “association” need not be strictly through direct covalent chemical bonding. It may also suggest ionic or hydrogen bonding or a hybridization based connectivity sufficiently stable such that the “associated” entities remain physically associated.

[1125] Bifunctional: As used herein, the term “bifunctional” refers to any substance, molecule or moiety which is capable of or maintains at least two functions. The functions may affect the same outcome or a different outcome. The structure that produces the function may be the same or different.

[1126] Biocompatible: As used herein, the term “biocompatible” means compatible with living cells, tissues, organs or systems posing little to no risk of injury, toxicity or rejection by the immune system.

[1127] Biodegradable: As used herein, the term “biodegradable” means capable of being broken down into innocuous products by the action of living things.

[1128] Biologically active: As used herein, the phrase “biologically active” refers to a characteristic of any substance that has activity in a biological system and/or organism. For instance, a substance that, when administered to an organism, has a biological effect on that organism, is considered to be biologically active. In particular embodiments, a viral particle of the present disclosure may be considered biologically active if even a portion of the encoded payload is biologically active or mimics an activity considered biologically relevant.

[1129] Capsid: As used herein, the term “capsid” refers to the protein shell of a virus particle.

[1130] Chimeric antigen receptor (CAR): As used herein, the term “chimeric antigen receptor” or “CAR” refers to an artificial chimeric protein comprising at least one antigen specific targeting region (ASTR), a transmembrane domain and an intracellular signaling domain, wherein the antigen specific targeting region comprises a full-length antibody or a fragment thereof. As a non-limiting example the ASTR of a CAR may be any of the antibodies listed in Tables 3-53, antibody-based compositions or fragments thereof. Any molecule that is capable of binding a target antigen with high affinity can be used in the ASTR of a CAR. The CAR may optionally have an extracellular spacer domain and/or a co-stimulatory domain. A CAR may also be used to generate a cytotoxic cell carrying the CAR.

[1131] Complementary and substantially complementary: As used herein, the term “complementary” refers to the ability of polynucleotides to form base pairs with one another. Base pairs are typically formed by hydrogen bonds between nucleotide units in antiparallel polynucleotide strands. Complementary polynucleotide strands can form base pair in the Watson-Crick manner (e.g., A to T, A to U, C to G), or in any other manner that allows for the formation of duplexes. As persons skilled in the art are aware, when using RNA as opposed to DNA, uracil rather than thymine is the base that is considered to be complementary to adenosine. However, when a U is denoted in the context of the present disclosure, the ability to substitute a T is implied, and vice versa, unless otherwise stated. Perfect complementarity or 100% complementarity refers to the situation in which each nucleotide unit of one polynucleotide strand can form hydrogen bond with a nucleotide unit of a second polynucleotide strand. Less than perfect complementarity refers to the situation in which some, but not all, nucleotide units of two strands can form hydrogen bond with each other. For example, for two 20-mess, if only two base pairs on each strand can form hydrogen bond with each other, the polynucleotide strands exhibit 10% complementarity. In the same example, if 18 base pairs on each strand can form hydrogen bonds with each other, the polynucleotide strands exhibit 90% complementarity. As used herein, the term “substantially complementary” means that the siRNA has a sequence (e.g., in the antisense strand) which is sufficient to bind the desired target mRNA, and to trigger the RNA silencing of the target mRNA.

[1132] Compound: Compounds of the present disclosure include all of the isotopes of the atoms occurring in the intermediate or final compounds. “Isotopes” refers to atoms having the same atomic number but different mass numbers resulting from a different number of neutrons in the nuclei. For example, isotopes of hydrogen include tritium and deuterium.

[1133] The compounds and salts of the present disclosure can be prepared in combination with solvent or water molecules to form solvates and hydrates by routine methods.

[1134] Comprehensive Positional Evolution (CPE™): As used herein, the term “comprehensive positional evolution” refers to an antibody evolution technology that allows for mapping of the effects of amino acid changes at every position along an antibody variable domain's sequence. This comprehensive mutagenesis technology can be used to enhance one or more antibody properties or characteristics.

[1135] Comprehensive Protein Synthesis (CPS™): As used herein, the term “comprehensive protein synthesis” refers to a combinatorial protein synthesis technology that can be used to optimize antibody properties or characteristics by combining the best properties into a new, high-performance antibody.

[1136] Conditionally active: As used herein, the term “conditionally active” refers to a mutant or variant of a wild-type polypeptide, wherein the mutant or variant is more or less active at physiological conditions than the parent polypeptide. Further, the conditionally active polypeptide may have increased or decreased activity at aberrant conditions as compared to the parent polypeptide. A conditionally active polypeptide may be reversibly or irreversibly inactivated at normal physiological conditions or aberrant conditions.

[1137] Conserved. As used herein, the term “conserved” refers to nucleotides or amino acid residues of a polynucleotide sequence or polypeptide sequence, respectively, that are those that occur unaltered in the same position of two or more sequences being compared. Nucleotides or amino acids that are relatively conserved are those that are conserved amongst more related sequences than nucleotides or amino acids appearing elsewhere in the sequences.

[1138] In some embodiments, two or more sequences are said to be “completely conserved” if they are 100% identical to one another. In some embodiments, two or more sequences are said to be “highly conserved” if they are at least 70?/(identical, at least 80% identical, at least 90% identical, or at least 95% identical to one another. In some embodiments, two or more sequences are said to be “highly conserved” if they are about 70% identical, about 80% identical, about 90% identical, about 95%, about 98%, or about 99% identical to one another. In some embodiments, two or more sequences are said to be “conserved” if they are at least 30% identical, at least 40% identical, at least 50% identical, at least 60% identical, at least 70% identical, at least 80% identical, at least 90% identical, or at least 95% identical to one another. In some embodiments, two or more sequences are said to be “conserved” if they are about 30% identical, about 40% identical, about 50% identical, about 60% identical, about 70% identical, about 80% identical, about 90% identical, about 95% identical, about 98% identical, or about 99% identical to one another. Conservation of sequence may apply to the entire length of a polynucleotide or polypeptide or may apply to a portion, region or feature thereof.

[1139] Control Elements: As used herein, “control elements”, “regulatory control elements”, or “regulatory sequences” refers to promoter regions, polyadenylation signals, transcription termination sequences, upstream regulatory domains, origins of replication, internal ribosome entry sites (“TRES”), enhancers, and the like, which provide for the replication, transcription and translation of a coding sequence in a recipient cell. Not all of these control elements need always be present as long as the selected coding sequence is capable of being replicated, transcribed and/or translated in an appropriate host cell.

[1140] Controlled Release: As used herein, the term “controlled release” refers to a pharmaceutical composition or compound release profile that conforms to a particular pattern of release to effect a therapeutic outcome.

[1141] Cytostatic: As used herein, “cytostatic” refers to inhibiting, reducing, suppressing the growth, division, or multiplication of a cell (e.g., a mammalian cell (e.g., a human cell)), bacterium, virus, fungus, protozoan, parasite, prion, or a combination thereof.

[1142] Cytotoxic: As used herein, “cytotoxic” refers to killing or causing injurious, toxic, or deadly effect on a cell (e.g., a mammalian cell (e.g., a human cell)), bacterium, virus, fungus, protozoan, parasite, prion, or a combination thereof.

[1143] Delivery: As used herein, “delivery” refers to the act or manner of delivering a viral particle, a compound, substance, entity, moiety, cargo or payload.

[1144] Delivery Agent: As used herein, “delivery agent” refers to any substance which facilitates, at least in part, the in vivo delivery of a viral particle to targeted cells.

[1145] Destabilized: As used herein, the term “destable”, “destabilize”, or “destabilizing region” means a region or molecule that is less stable than a starting, wild-type or native form of the same region or molecule.

[1146] Delectable label: As used herein, “detectable label” refers to one or more markers, signals, or moieties which are attached, incorporated or associated with another entity that is readily detected by methods known in the art including radiography, fluorescence, chemiluminescence, enzymatic activity, absorbance and the like. Detectable labels include radioisotopes, fluorophores, chromophores, enzymes, dyes, metal ions, ligands such as biotin, avidin, streptavidin and haptens, quantum dots, and the like. Detectable labels may be located at any position in the peptides or proteins disclosed herein. They may be within the amino acids, the peptides, or proteins, or located at the N- or C-termini.

[1147] Digest: As used herein, the term “digest” means to break apart into smaller pieces or components. When referring to polypeptides or proteins, digestion results in the production of peptides.

[1148] Distal: As used herein, the term “distal” means situated away from the center or away from a point or region of interest.

[1149] Dosing regimen: As used herein, a “dosing regimen” is a schedule of administration or physician determined regimen of treatment, prophylaxis, or palliative care.

[1150] Encapsulate: As used herein, the term “encapsulate” means to enclose, surround or encase.

[1151] Engineered: As used herein, embodiments of the disclosure are “engineered” when they are designed to have a feature or property, whether structural or chemical, that varies from a starting point, wild type or native molecule.

[1152] Effective Amount: As used herein, the term “effective amount” of an agent is that amount sufficient to effect beneficial or desired results, for example, clinical results, and, as such, an “effective amount” depends upon the context in which it is being applied. For example, in the context of administering an agent that treats cancer, an effective amount of an agent is, for example, an amount sufficient to achieve treatment, as defined herein, of cancer, as compared to the response obtained without administration of the agent.

[1153] Epitope: As used herein, an “epitope” refers to a surface or region on a molecule that is capable of interacting with a biomolecule. For example, a protein may contain one or more amino acids, e.g., an epitope, which interacts with an antibody, e.g., a biomolecule. In some embodiments, when referring to a protein or protein module, an epitope may comprise a linear stretch of amino acids or a three-dimensional structure formed by folded amino acid chains.

[1154] EvoMap™: As used herein, an EvoMap™ refers to a map of a polypeptide, wherein detailed informatics are presented about the effects of single amino acid mutations within the length of the polypeptide and their influence on the properties and characteristics of that polypeptide.

[1155] Expression: As used herein, “expression” of a nucleic acid sequence refers to one or more of the following events: (1) production of an RNA template from a DNA sequence (e.g., by transcription); (2) processing of an RNA transcript (e.g., by splicing, editing, 5′ cap formation, and/or 3′ end processing); (3) translation of an RNA into a polypeptide or protein; and (4) post-translational modification of a polypeptide or protein.

[1156] Feature: As used herein, a “feature” refers to a characteristic, a property, or a distinctive element.

[1157] Formulation: As used herein, a “formulation” includes at least one viral particle and a. delivery agent.

[1158] Fragment: A “fragment,” as used herein, refers to a portion. For example, fragments of proteins may comprise polypeptides obtained by digesting full-length protein isolated from cultured cells.

[1159] Functional: As used herein, a “functional” biological molecule is a biological molecule in a form in which it exhibits a property and/or activity by which it is characterized.

[1160] Gene expression: The term “gene expression” refers to the process by which a nucleic acid sequence undergoes successful transcription and in most instances translation to produce a protein or peptide. For clarity, when reference is made to measurement of “gene expression”, this should be understood to mean that measurements may be of the nucleic acid product of transcription, e.g., RNA or mRNA or of the amino acid product of translation, e.g., polypeptides or peptides. Methods of measuring the amount or levels of RINA, mRNA, polypeptides and peptides are well known in the art.

[1161] Homology: As used herein, the term “homology” refers to the overall relatedness between polymeric molecules, e.g. between polynucleotide molecules (e.g. DNA molecules and/or RNA molecules) and/or between polypeptide molecules. In some embodiments, polymeric molecules are considered to be “homologous” to one another if their sequences are at least 25%, 30%, 35%, 40%, 45%, 50%, 55%, 60%, 65%, 70%, 75%, 80%, 85%, 90%, 95%, or 99% identical or similar. The term “homologous” necessarily refers to a comparison between at least two sequences (polynucleotide or polypeptide sequences). In accordance with the disclosure, two polynucleotide sequences are considered to be homologous if the polypeptides they encode are at least about 50%, 60%, 70%, 80%, 90%, 95%, or even 99% for at least one stretch of at least about 20 amino acids. In some embodiments, homologous polynucleotide sequences are characterized by the ability to encode a stretch of at least 4-5 uniquely specified amino acids. For polynucleotide sequences less than 60 nucleotides in length, homology is determined by the ability to encode a stretch of at least 4-5 uniquely specified amino acids. In accordance with the disclosure, two protein sequences are considered to be homologous if the proteins are at least about 50%, 60%, 70%, 80%, or 90% identical for at least one stretch of at least about 20 amino acids.

[1162] Heterologous Region: As used herein the term “heterologous region” refers to a region which would not be considered a homologous region.

[1163] Homologous Region: As used herein the term “homologous region” refers to a region which is similar in position, structure, evolution origin, character, form or function.

[1164] Identity As used herein, the term “identity” refers to the overall relatedness between polymeric molecules, e.g., between polynucleotide molecules (e.g. DNA molecules and/or RNA molecules) and/or between polypeptide molecules. Calculation of the percent identity of two polynucleotide sequences, for example, can be performed by aligning the two sequences for optimal comparison purposes (e.g., gaps can be introduced in one or both of a first and a second nucleic acid sequences for optimal alignment and non-identical sequences can be disregarded for comparison purposes). In certain embodiments, the length of a sequence aligned for comparison purposes is at least 30%, at least 40%, at least 50%, at least 60%, at least 70%, at least 80%, at least 90%, at least 95%, or 100% of the length of the reference sequence. The nucleotides at corresponding nucleotide positions are then compared. When a position in the first sequence is occupied by the same nucleotide as the corresponding position in the second sequence, then the molecules are identical at that position. The percent identity between the two sequences is a function of the number of identical positions shared by the sequences, taking into account the number of gaps, and the length of each gap, which needs to be introduced for optimal alignment of the two sequences. The comparison of sequences and determination of percent identity between two sequences can be accomplished using a mathematical algorithm. For example, the percent identity between two nucleotide sequences can be determined using methods such as those described in Computational Molecular Biology, Lesk, A. M., ed., Oxford University Press, New York, 1988; Biocomputing: Informatics and Genome Projects, Smith, D. W., ed., Academic Press, New York, 1993; Sequence Analysis in Molecular Biology, von Heinje, G., Academic Press, 1987; Computer Analysis of Sequence Data, Part I, Griffin, A. M., and Griffin, H. G, eds., Humana Press, New Jersey, 1994; and Sequence Analysis Primer, Gribskov, M. and Devereux, J., eds., M Stockton Press, New York, 1991; each of which is incorporated herein by reference. For example, the percent identity between two nucleotide sequences can be determined using the algorithm of Meyers and Miller (CABIOS, 1989, 4:11-17), which has been incorporated into the ALIGN program (version 2.0) using a PAM120 weight residue table, a gap length penalty of 12 and a gap penalty of 4. The percent identity between two nucleotide sequences can, alternatively, be determined using the GAP program in the (SCG software package using an NWSgapdna.CMP matrix. Methods commonly employed to determine percent identity between sequences include, but are not limited to those disclosed in Carillo, H. and Lipman, D., SIAM J Applied Math., 48:1073 (1988); incorporated herein by reference. Techniques for determining identity are codified in publicly available computer programs, Exemplary computer software to determine homology between two sequences include, but are not limited to, GCG program package, Devereux, J., et al., Nucleic Acids Research, 12(1), 387 (1984)), BLASTP, BLASTN, and FASTA Altschul, S. F. et al., J. Molec. Biol., 215, 403 (1990)).

[1165] Inhibit expression of a gene: As used herein, the phrase “inhibit expression of a gene” means to cause a reduction in the amount of an expression product of the gene. The expression product can be an RNA transcribed from the gene (e.g., an mRNA) or a polypeptide translated from an mRNA transcribed from the gene. Typically, a reduction in the level of an mRNA results in a reduction in the level of a polypeptide translated therefrom. The level of expression may be determined using standard techniques for measuring mRNA or protein.

[1166] In vitro: As used herein, the term “in vitro” refers to events that occur in an artificial environment, e.g., in a test tube or reaction vessel, in cell culture, in a Petri dish, etc., rather than within an organism (e.g., animal, plant, or microbe).

[1167] In vivo: As used herein, the term “in vivo” refers to events that occur within an organism (e.g., animal, plant, or microbe or cell or tissue thereof).

[1168] Isolated: As used herein, the term “isolated” refers to a substance or entity that has been separated from at least some of the components with which it was associated (whether in nature or in an experimental setting), Isolated substances may have varying levels of purity in reference to the substances from which they have been associated. Isolated substances and/or entities may be separated from at least about 10%, about 20%, about 30%, about 40%, about 50%, about 60%, about 70%, about 80%, about 90%, or more of the other components with which they were initially associated. In some embodiments, isolated agents are more than about 80%, about 85%, about 90%, about 91%, about 92%, about 93%, about 94%, about 95%, about 96%, about 97%, about 98%, about 99%, or more than about 99% pure. As used herein, a substance is “pure” if it is substantially free of other components.

[1169] Substantially isolated: By “substantially isolated” is meant that a substance is substantially separated from the environment in which it was formed or detected. Partial separation can include, for example, a composition enriched in the substance or viral particles of the present disclosure. Substantial separation can include compositions containing at least about 50%, at least about 60%, at least about 70%, at least about 80%, at least about 90%, at least about 95%, at least about 97%, or at least about 99% by weight of the compound of the present disclosure, or salt thereof. Methods for isolating compounds and their salts are routine in the art.

[1170] Linker: As used herein “linker” refers to a molecule or group of molecules which connects two molecules, such as a V_{H} chain and V_{L} chain or an antibody. A linker may be a nucleic acid sequence connecting two nucleic acid sequences encoding two different polypeptides. The linker may or may not be translated. The linker may be a cleavable linker.

[1171] MicroRNA (miRNA) binding site: As used herein, a microRNA (miRNA) binding site represents a nucleotide location or region of a nucleic acid transcript to which at least the “seed” region of a miRNA binds.

[1172] Modified. As used herein “modified” refers to a changed state or structure of a molecule of the disclosure. Molecules may be modified in many ways including chemically, structurally, and functionally.

[1173] Naturally Occurring: As used herein, “naturally occurring” or “wild-type” means existing in nature without artificial aid, or involvement of the hand of man.

[1174] Non-human vertebrate: As used herein, a “non-human vertebrate” includes all vertebrates except Homo sapiens, including wild and domesticated species. Examples of non-human vertebrates include, but are not limited to, mammals, such as alpaca, banteng, bison, camel, cat, cattle, deer, dog, donkey, gayal, goat, guinea pig, horse, llama, mule, pig, rabbit, reindeer, sheep water buffalo, and yak.

[1175] Off-target: As used herein, “off target” refers to any unintended effect on any one or more target, gene, or cellular transcript.

[1176] Open reading frame: As used herein, “open reading frame” or “ORF” refers to a sequence which does not contain a stop codon in a given reading frame.

[1177] Operably linked. As used herein, the phrase “operably linked” refers to a functional connection between two or more molecules, constructs, transcripts, entities, moieties or the like.

[1178] Particle: As used herein, a “particle” is a virus comprised of at least two components, a protein capsid and a polynucleotide sequence enclosed within the capsid.

[1179] Patient: As used herein, “patient” refers to a subject who may seek or be in need of treatment, requires treatment, is receiving treatment, will receive treatment, or a subject who is under care by a trained professional for a particular disease or condition.

[1180] Payload: As used herein, “payload” or “payload region” refers to one or more polynucleotides or polynucleotide regions encoded by or within a viral genome or an expression product of such polynucleotide or polynucleotide region, e.g., a transgene, a polynucleotide encoding a polypeptide or multi-polypeptide or a modulatory nucleic acid or regulatory nucleic acid.

[1181] Payload construct: As used herein, “payload construct” is one or more polynucleotide regions encoding or comprising a payload that is flanked on one or both sides by an inverted terminal repeat (ITR) sequence. The payload construct is a template that is replicated in a viral production cell to produce a viral genome.

[1182] Payload construct vector: As used herein, “payload construct vector” is a vector encoding or comprising a payload construct, and regulatory regions for replication and expression in bacterial cells.

[1183] Payload construct expression vector: As used herein, a “payload construct expression vector” is a vector encoding or comprising a payload construct and which further comprises one or more polynucleotide regions encoding or comprising components for viral expression in a viral replication cell.

[1184] Peptide: As used herein, “peptide” is less than or equal to 50 amino acids long, e.g., about 5, 10, 15, 20, 25, 30, 35, 40, 45, or 50 amino acids long.

[1185] Pharmaceutically acceptable: The phrase “pharmaceutically acceptable” is employed herein to refer to those compounds, materials, compositions, and/or dosage forms which are, within the scope of sound medical judgment, suitable for use in contact with the tissues of human beings and animals without excessive toxicity, irritation, allergic response, or other problem or complication, commensurate with a reasonable benefit/risk ratio.

[1186] Pharmaceutically acceptable excipients: The phrase “pharmaceutically acceptable excipient,” as used herein, refers any ingredient other than the compounds described herein (for example, a vehicle capable of suspending or dissolving the active compound) and having the properties of being substantially nontoxic and non-inflammatory in a patient. Excipients may include, for example: antiadherents, antioxidants, binders, coatings, compression aids, disintegrants, dyes (colors), emollients, emulsifiers, fillers (diluents), film formers or coatings, flavors, fragrances, glidants (flow enhancers), lubricants, preservatives, printing inks, sorbents, suspending or dispersing agents, sweeteners, and waters of hydration. Exemplary excipients include, but are not limited to: butylated hydroxytoluene (BHT), calcium carbonate, calcium phosphate (dibasic), calcium stearate, croscarmellose, crosslinked polyvinyl pyrrolidone, citric acid, crospovidone, cysteine, ethylcellulose, gelatin, hydroxypropyl cellulose, hydroxypropyl methylcellulose, lactose, magnesium stearate, maltitol, mannitol, methionine, methylcellulose, methyl paraben, microcrystalline cellulose, polyethylene glycol, polyvinyl pyrrolidone, povidone, pregelatinized starch, propyl paraben, retinyl palmitate, shellac, silicon dioxide, sodium carboxymethyl cellulose, sodium citrate, sodium starch glycolate, sorbitol, starch (corn), stearic acid, sucrose, talc, titanium dioxide, vitamin A, vitamin E, vitamin C, and xylitol.

[1187] Pharmaceutically acceptable salts: The present disclosure also includes pharmaceutically acceptable salts of the compounds described herein. As used herein, “pharmaceutically acceptable salts” refers to derivatives of the disclosed compounds wherein the parent compound is modified by converting an existing acid or base moiety to its salt form (e.g., by reacting the free base group with a suitable organic acid). Examples of pharmaceutically acceptable salts include, but are not limited to, mineral or organic acid salts of basic residues such as amines; alkali or organic salts of acidic residues such as carboxylic acids; and the like. Representative acid addition salts include acetate, acetic acid, adipate, alginate, ascorbate, aspartate, benzenesulfonate, benzene sulfonic acid, benzoate, bisulfate, borate, butyrate, camphorate, camphorsulfonate, citrate, cyclopentanepropionate, di gluconate, dodecylsulfate, ethanesulfonate, fumarate, glucoheptonate, glycerophosphate, hemisulfate, heptonate, hexanoate, hydrobromide, hydrochloride, hydroiodide, 2-hydroxy-ethanesulfonate, lactobionate, lactate, laurate, lauryl sulfate, malate, maleate, malonate, methanesulfonate, 2-naphthalenesulfonate, nicotinate, nitrate, oleate, oxalate, palmitate, pamoate, pectinate, persulfate, 3-phenylpropionate, phosphate, picrate, pivalate, propionate, stearate, succinate, sulfate, tartrate, thiocyanate, toluenesulfonate, undecanoate, valerate salts, and the like. Representative alkali or alkaline earth metal salts include sodium, lithium, potassium, calcium, magnesium, and the like, as well as nontoxic ammonium, quaternary ammonium, and amine cations, including, but not limited to ammonium, tetramethylammonium, tetraethylammonium, methylamine, dimethylamine, trimethyl amine, triethylamine, ethylamine, and the like. The pharmaceutically acceptable salts of the present disclosure include the conventional non-toxic salts of the parent compound formed, for example, from non-toxic inorganic or organic acids. The pharmaceutically acceptable salts of the present disclosure can be synthesized from the parent compound which contains a basic or acidic moiety by conventional chemical methods. Generally, such salts can be prepared by reacting the free acid or base forms of these compounds with a stoichiometric amount of the appropriate base or acid in water or in an organic solvent, or in a mixture of the two; generally, nonaqueous media like ether, ethyl acetate, ethanol, isopropanol, or acetonitrile are preferred. Lists of suitable salts are found in Remington's Pharmaceutical Sciences, 17th ed., Mack Publishing Company, Easton, Pa., 1985, p. 1418, Pharmaceutical Salts: Properties, Selection, and Use, P. H. Stahl and C. G. Wermuth (eds.), Wiley-VCH, 2008, and Berge et al., Journal of Pharmaceutical Science, 66, 1-19 (1977), each of which is incorporated herein by reference in its entirety.

[1188] Pharmaceutically acceptable solvate: The term “pharmaceutically acceptable solvate,” as used herein, means a compound of the disclosure wherein molecules of a suitable solvent are incorporated in the crystal lattice. A suitable solvent is physiologically tolerable at the dosage administered. For example, solvates may be prepared by crystallization, recrystallization, or precipitation from a solution that includes organic solvents, water, or a mixture thereof. Examples of suitable solvents are ethanol, water (for example, mono, di-, and tri-hydrates), AI-methylpyrrolidinone (NMP), dimethyl sulfoxide (DMSO), N,N′-dimethylformamide (DMF), N,N″-dimethylacetamide (DMAC), 1,3-dimethyl-2-imidazolidinone (DMEU), 1,3-dimethyl-3,4,5,6-tetrahydro-2-(1H)-pyrimidinone (DMPU), acetonitrile (ACN), propylene glycol, ethyl acetate, benzyl alcohol, 2-pyrrolidone, benzyl benzoate, and the like. When water is the solvent, the solvate is referred to as a “hydrate.”

[1189] Pharmacokinetic: As used herein, “pharmacokinetic” refers to any one or more properties of a molecule or compound as it relates to the determination of the fate of substances administered to a living organism. Pharmacokinetics is divided into several areas including the extent and rate of absorption, distribution, metabolism and excretion. This is commonly referred to as ADME where: (A) Absorption is the process of a substance entering the blood circulation; (D) Distribution is the dispersion or dissemination of substances throughout the fluids and tissues of the body; (M) Metabolism (or Biotransformation) is the irreversible transformation of parent compounds into daughter metabolites; and (E) Excretion (or Elimination) refers to the elimination of the substances from the body. In rare cases, some drugs irreversibly accumulate in body tissue.

[1190] Physicochemical: As used herein, “physicochemical” means of or relating to a physical and/or chemical property.

[1191] Preventing: As used herein, the term “preventing” refers to partially or completely delaying onset of an infection, disease, disorder and/or condition; partially or completely delaying onset of one or more symptoms, features, or clinical manifestations of a particular infection, disease, disorder, and/or condition; partially or completely delaying onset of one or more symptoms, features, or manifestations of a particular infection, disease, disorder, and/or condition; partially or completely delaying progression from an infection, a particular disease, disorder and/or condition; and/or decreasing the risk of developing pathology associated with the infection, the disease, disorder, and/or condition.

[1192] Proliferate: As used herein, the term “proliferate” means to grow, expand or increase or cause to grow, expand or increase rapidly. “Proliferative” means having the ability to proliferate. “Anti-proliferative” means having properties counter to or inapposite to proliferative properties.

[1193] Prophylactic: As used herein, “prophylactic” refers to a therapeutic or course of action used to prevent the spread of disease.

[1194] Prophylaxis: As used herein, a “prophylaxis” refers to a measure taken to maintain health and prevent the spread of disease.

[1195] Protein of interest: As used herein, the terms “proteins of interest” or “desired proteins” include those provided herein and fragments, mutants, variants, and alterations thereof.

[1196] Proximal: As used herein, the term “proximal” means situated nearer to the center or to a point or region of interest.

[1197] Purified. As used herein, “purify,” “purified,” “purification” means to make substantially pure or clear from unwanted components, material defilement, admixture or imperfection. “Purified” refers to the state of being pure. “Purification” refers to the process of making pure.

[1198] Region: As used herein, the term “region” refers to a zone or general area. In some embodiments, when referring to a protein or protein module, a region may comprise a linear sequence of amino acids along the protein or protein module or may comprise a three-dimensional area, an epitope and/or a cluster of epitopes. In some embodiments, regions comprise terminal regions. As used herein, the term “terminal region” refers to regions located at the ends or termini of a given agent. When referring to proteins, terminal regions may comprise N- and/or C-termini. N-termini refer to the end of a protein comprising an amino acid with a free amino group. C-termini refer to the end of a protein comprising an amino acid with a free carboxyl group. N- and/or C-terminal regions may there for comprise the N- and/or C-termini as well as surrounding amino acids. In some embodiments, N- and/or C-terminal regions comprise from about 3 amino acid to about 30 amino acids, from about 5 amino acids to about 40 amino acids, from about 10 amino acids to about 50 amino acids, from about 20 amino acids to about 100 amino acids and/or at least 100 amino acids. In some embodiments, N-terminal regions may comprise any length of amino acids that includes the N-terminus, but does not include the C-terminus. In some embodiments, C-terminal regions may comprise any length of amino acids, which include the C-terminus, but do not comprise the N-terminus.

[1199] In some embodiments, when referring to a polynucleotide, a region may comprise a linear sequence of nucleic acids along the polynucleotide or may comprise a three-dimensional area, secondary structure, or tertiary structure. In some embodiments, regions comprise terminal regions. As used herein, the term “terminal region” refers to regions located at the ends or termini of a given agent. When referring to polynucleotides, terminal regions may comprise 5′ and 3′ termini. 5′ termini refer to the end of a polynucleotide comprising a nucleic acid with a free phosphate group. 3′ termini refer to the end of a polynucleotide comprising a nucleic acid with a free hydroxyl group. 5′ and 3′ regions may there for comprise the 5′ and 3′ termini as well as surrounding nucleic acids. In some embodiments, 5′ and 3′ terminal regions comprise from about 9 nucleic acids to about 90 nucleic acids, from about 15 nucleic acids to about 120 nucleic acids, from about 30 nucleic acids to about 150 nucleic acids, from about 60 nucleic acids to about 300 nucleic acids and/or at least 300 nucleic acids. In some embodiments, 5′ regions may comprise any length of nucleic acids that includes the 5′ terminus, but does not include the 3′ terminus. In some embodiments, 3′ regions may comprise any length of nucleic acids, which include the 3′ terminus, but does not comprise the 5′ terminus.

[1200] RNA or RATA molecule: As used herein, the term “RNA” or “RNA molecule” or “ribonucleic acid molecule” refers to a polymer of ribonucleotides; the term “DNA” or “DNA molecule” or “deoxyribonucleic acid molecule” refers to a polymer of deoxyribonucleotides. DNA and RNA can be synthesized naturally, e.g., by DNA replication and transcription of DNA, respectively; or be chemically synthesized. DINA and RNA can be single-stranded (i.e., ssRNA or ssDNA, respectively) or multi-stranded (e.g., double stranded, i.e., dsRNA and dsDNA, respectively). The term “mRNA” or “messenger RNA”, as used herein, refers to a single stranded RNA that encodes the amino acid sequence of one or more polypeptide chains.

[1201] Sample: As used herein, the term “sample” or “biological sample” refers to a subset of its tissues, cells or component parts (e.g. body fluids, including but not limited to blood, mucus, lymphatic fluid, synovial fluid, cerebrospinal fluid, saliva, amniotic fluid, amniotic cord blood, urine, vaginal fluid and semen). A sample further may include a homogenate, lysate or extract prepared from a whole organism or a subset of its tissues, cells or component parts, or a fraction or portion thereof, including but not limited to, for example, plasma, serum, spinal fluid, lymph fluid, the external sections of the skin, respiratory, intestinal, and genitourinary tracts, tears, saliva, milk, blood cells, tumors, organs. A sample further refers to a medium, such as a nutrient broth or gel, which may contain cellular components, such as proteins or nucleic acid molecule.

[1202] Self-complementary viral particle: As used herein, a “self-complementary viral particle” is a particle comprised of at least two components, a protein capsid and a polynucleotide sequence encoding a self-complementary genome enclosed within the capsid.

[1203] Signal Sequences: As used herein, the phrase “signal sequences” refers to a sequence which can direct the transport or localization of a protein.

[1204] Single unit dose: As used herein, a “single unit dose” is a dose of any therapeutic administered in one dose/at one time/single route/single point of contact, i.e., single administration event. In some embodiments, a single unit dose is provided as a discrete dosage fo (e.g., a tablet, capsule, patch, loaded syringe, vial, etc.).

[1205] Similarity: As used herein, the term “similarity” refers to the overall relatedness between polymeric molecules, e.g. between polynucleotide molecules (e.g. DNA molecules and/or RNA molecules) and/or between polypeptide molecules. Calculation of percent similarity of polymeric molecules to one another can be performed in the same manner as a calculation of percent identity, except that calculation of percent similarity takes into account conservative substitutions as is understood in the art.

[1206] Split dose: As used herein, a “split dose” is the division of single unit dose or total daily dose into two or more doses.

[1207] Stable: As used herein “stable” refers to a compound that is sufficiently robust to survive isolation to a useful degree of purity from a reaction mixture, and preferably capable of formulation into an efficacious therapeutic agent.

[1208] Stabilized: As used herein, the term “stabilize”, “stabilized,” “stabilized region” means to make or become stable.

[1209] Subject: As used herein, the term “subject” or “patient” refers to any organism to which a composition in accordance with the disclosure may be administered, e.g., for experimental, diagnostic, prophylactic, and/or therapeutic purposes. Typical subjects include animals (e.g., mammals such as mice, rats, rabbits, non-human primates, and humans) and/or plants.

[1210] Substantially: As used herein, the term “substantially” refers to the qualitative condition of exhibiting total or near-total extent or degree of a characteristic or property of interest. One of ordinary skill in the biological arts will understand that biological and chemical phenomena rarely, if ever, go to completion and/or proceed to completeness or achieve or avoid an absolute result. The term “substantially” is therefore used herein to capture the potential lack of completeness inherent in many biological and chemical phenomena.

[1211] Substantially equal: As used herein as it relates to time differences between doses, the term means plus/minus 2%.

[1212] Substantially simultaneously: As used herein and as it relates to plurality of doses, the term means within 2 seconds.

[1213] Suffering from: An individual who is “suffering from” a disease, disorder, and/or condition has been diagnosed with or displays one or more symptoms of a disease, disorder, and/or condition.

[1214] Susceptible to: An individual who is “susceptible to” a disease, disorder, and/or condition has not been diagnosed with and/or may not exhibit symptoms of the disease, disorder, and/or condition but harbors a propensity to develop a disease or its symptoms. In some embodiments, an individual who is susceptible to a disease, disorder, and/or condition (for example, cancer) may be characterized by one or more of the following: (1) a genetic mutation associated with development of the disease, disorder, and/or condition; (2) a genetic polymorphism associated with development of the disease, disorder, and/or condition; (3) increased and/or decreased expression and/or activity of a protein and/or nucleic acid associated with the disease, disorder, and/or condition; (4) habits and/or lifestyles associated with development of the disease, disorder, and/or condition; (5) a family history of the disease, disorder, and/or condition; and (6) exposure to and/or infection with a microbe associated with development of the disease, disorder, and/or condition. In some embodiments, an individual who is susceptible to a disease, disorder, and/or condition will develop the disease, disorder, and/or condition. In some embodiments, an individual who is susceptible to a disease, disorder, and/or condition will not develop the disease, disorder, and/or condition.

[1215] Sustained release: As used herein, the term “sustained release” refers to a pharmaceutical composition or compound release profile that conforms to a release rate over a specific period of time.

[1216] Synthetic: The term “synthetic” means produced, prepared, and/or manufactured by the hand of man. Synthesis of polynucleotides or polypeptides or other molecules of the present disclosure may be chemical or enzymatic.

[1217] Targeting: As used herein, “targeting” means the process of design and selection of nucleic acid sequence that will hybridize to a target nucleic acid and induce a desired effect.

[1218] Targeted Cells: As used herein, “targeted cells” refers to any one or more cells of interest. The cells may be found in vitro, in vivo, in situ or in the tissue or organ of an organism. The organism may be an animal, preferably a mammal, more preferably a human and most preferably a patient.

[1219] Therapeutic Agent: The term “therapeutic agent” refers to any agent that, when administered to a subject, has a therapeutic, diagnostic, and/or prophylactic effect and/or elicits a desired biological and/or pharmacological effect.

[1220] Therapeutically effective amount: As used herein, the term “therapeutically effective amount” means an amount of an agent to be delivered (e.g., nucleic acid, drug, therapeutic agent, diagnostic agent, prophylactic agent, etc.) that is sufficient, when administered to a subject suffering from or susceptible to an infection, disease, disorder, and/or condition, to treat, improve symptoms of, diagnose, prevent, and/or delay the onset of the infection, disease, disorder, and/or condition. In some embodiments, a therapeutically effective amount is provided in a single dose. In some embodiments, a therapeutically effective amount is administered in a dosage regimen comprising a plurality of doses. Those skilled in the art will appreciate that in some embodiments, a unit dosage form may be considered to comprise a therapeutically effective amount of a particular agent or entity if it comprises an amount that is effective when administered as part of such a dosage regimen.

[1221] Therapeutically of outcome: As used herein, the term “therapeutically effective outcome” means an outcome that is sufficient in a subject suffering from or susceptible to an infection, disease, disorder, and/or condition, to treat, improve symptoms of, diagnose, prevent, and/or delay the onset of the infection, disease, disorder, and/or condition.

[1222] Total daily dose: As used herein, a “total daily dose” is an amount given or prescribed in 24 hr period. It may be administered as a single unit dose.

[1223] Transfection: As used herein, the term “transfection” refers to methods to introduce exogenous nucleic acids into a cell. Methods of transfection include, but are not limited to, chemical methods, physical treatments and cationic lipids or mixtures.

[1224] Treating: As used herein, the term “treating” refers to partially or completely alleviating, ameliorating, improving, relieving, delaying onset of, inhibiting progression of, reducing severity of, and/or reducing incidence of one or more symptoms or features of a particular infection, disease, disorder, and/or condition. For example, “treating” cancer may refer to inhibiting survival, growth, and/or spread of a tumor. Treatment may be administered to a subject who does not exhibit signs of a disease, disorder, and/or condition and/or to a subject who exhibits only early signs of a disease, disorder, and/or condition for the purpose of decreasing the risk of developing pathology associated with the disease, disorder, and/or condition.

[1225] Unmodified: As used herein, “unmodified” refers to any substance, compound or molecule prior to being changed in any way. Unmodified may, but does not always, refer to the wild type or native form of a biomolecule. Molecules may undergo a series of modifications whereby each modified molecule may serve as the “unmodified” starting molecule for a subsequent modification.

[1226] Vector: As used herein, a “vector” is any molecule or moiety which transports, transduces or otherwise acts as a carrier of a heterologous molecule. Vectors of the present disclosure may be produced recombinantly and may be based on and/or may comprise adeno-associated virus AAV) parent or reference sequence. Such parent or reference AAV sequences may serve as an original, second, third or subsequent sequence for engineering vectors. In non-limiting examples, such parent or reference AAV sequences may comprise any one or more of the following sequences: a polynucleotide sequence encoding a polypeptide or multi-polypeptide, which sequence may be wild-type or modified from wild-type and which sequence may encode full-length or partial sequence of a protein, protein domain, or one or more subunits of a protein; a polynucleotide comprising a modulatory or regulatory nucleic acid which sequence may be wild-type or modified from wild-type; and a transgene that may or may not be modified from wild-type sequence. These AAV sequences may serve as either the “donor” sequence of one or more codons (at the nucleic acid level) or amino acids (at the polypeptide level) or “acceptor” sequences of one or more codons (at the nucleic acid level) or amino acids (at the polypeptide level).

[1227] Viral genome: As used herein, a “viral genome” or “vector genome” is a polynucleotide comprising at least one inverted terminal repeat (ITR) and at least one encoded payload. A viral genome encodes at least one copy of the payload.

[1228] Described herein are compositions, methods, processes, kits and devices for the design, preparation, manufacture and/or formulation of viral particles. In some embodiments, payloads, such as but not limited to polynucleotides, may be encoded by payload constructs or contained within plasmids or vectors or recombinant viruses (e.g., AAVs, lentivirus, or retrovirus).

[1229] The details of one or more embodiments of the disclosure are set forth in the accompanying description below. Although any materials and methods similar or equivalent to those described herein can be used in the practice or testing of the present disclosure, the preferred materials and methods are now described. Other features, objects and advantages of the disclosure will be apparent from the description. In the description, the singular forms also include the plural unless the context clearly dictates otherwise. Unless defined otherwise, all technical and scientific terms used herein have the same meaning as commonly understood by one of ordinary skill in the art to which this disclosure belongs. In the case of conflict, the present description will control.

[1230] The present disclosure is further illustrated by the following non-limiting examples.

### VII. Examples

### Example 1. Production and Purification of AAV Particles

[1231] AAV particles described herein may be produced using methods known in the art, such as, for example, triple transfection or baculovirus mediated virus production. Any suitable permissive or packaging cell known in the art may be employed to produce the vectors. Mammalian cells are often preferred. Also preferred are trans-complementing packaging cell lines that provide functions deleted from a replication-defective helper virus, e.g., 293 cells or other E1a trans-complementing cells.

[1232] The gene cassette may contain some or all of the parvovirus (e.g., AAV) cap and rep genes. Preferably, however, some or all of the cap and rep functions are provided in trans by introducing a packaging vector(s) encoding the capsid and/or Rep proteins into the cell, Most preferably, the gene cassette does not encode the capsid or Rep proteins. Alternatively, a packaging cell line is used that is stably transformed to express the cap and/or rep genes

[1233] Recombinant AAV virus particles are, in some cases, produced and purified from culture supernatants according to the procedure as described in US20160032254, the contents of which are incorporated by reference, Production may also involve methods known in the art including those using 293T cell, sf9 insect cells, triple transfection or any suitable production method.

[1234] In some cases, 293 cells are transfected with CaPO4 with plasmids required for production of AAV, i.e., AAV2 rep, an adenoviral helper construct and a ITR flanked transgene cassette. The AAV2 rep plasmid also contains the cap sequence of the particular virus being studied. Twenty-four hours after transfection, which occurs in serum containing DMEM, the medium is replaced with fresh medium with or without serum. Three (3) days after transfection, a sample is taken from the culture medium of the 293 adherent cells. Subsequently cells are scraped and transferred into a receptacle. After centrifugation to remove cellular pellet, a second sample is taken from the supernatant after scraping. Next cell lysis is achieved by three consecutive freeze-thaw cycles (−80C. to 37C.). Cellular debris is removed and sample 3 is taken from the medium. The samples are quantified for AAV particles by DNase resistant genome titration by Taqman™. PCR. The total production yield from such a transfection is equal to the particle concentration from sample 3.

[1235] AAV vector titers are measured according to genome copy number (genome particles per milliliter). Genome particle concentrations are based on Taqman® PCR of the vector DNA as previously reported (Clark et al. (1999) Hum. Gene Ther., 10:1031-1039; Veldwijk et al. (2002) Mol. Ther., 6:272-278).

### Example 2. Tissue Specific Expression

[1236] To evaluate the expression of various encoded antibody payloads in tissues, a series of AAV particles carrying the encoded antibody sequences driven by a panel of ubiquitous and tissue-specific promoters are made. These particles are administered to the specific tissue, e.g., intramuscularly, via an appropriate route, e.g., a single injection in the gastrocnemius muscle and expression is monitored to determine the relative expression potential of the payload as well as of each promoter in this target tissue. Measurement of antibody production is performed using standard techniques, for example by ELISA.

[1237] In some cases, the cytomegalovirus immediate early promoter (CMV), chimeric chicken-beta-actin (CAG), and ubiquitin C (UBC), CBA, Hi promoters provide robust expression.

### Example 3. Generation of Antibodies

### Antibody Production by Hybridoma Technology

[1238] Host animals (e.g. mice, rabbits, goats, and llamas) are immunized by an injection with an antigenic protein (e.g., tau) to elicit lymphocytes that specifically bind to the antigen (e.g., tau). Lymphocytes are collected and fused with immortalized cell lines to generate hybridomas. Hybridomas are cultured in a suitable culture medium that is enriched with appropriate selection agents to promote growth.

[1239] Antibodies produced by the cultured hybridomas are subjected to analysis to determine binding specificity of the antibodies for the target antigen. Once antibodies with desirable characteristics are identified, corresponding hybridomas are subcloned through limiting dilution procedures and grown by standard methods. Antibodies produced by these cells are isolated and purified using standard immunoglobulin purification procedures.

### Recombinant Antibody Production

[1240] Recombinant antibodies are produced using heavy and light chain variable region cDNA sequences selected from hybridomas or from other sources. Sequences encoding antibody variable domains expressed by hybridomas are determined by extracting RNA molecules from antibody-producing hybridoma cells and producing cDNA by reverse transcriptase polymerase chain reaction (PCR). PCR is used to amplify cDNA using primers specific for heavy and light chain sequences. PCR products are then subcloned into plasmids for sequence analysis. Antibodies are produced by insertion of resulting variable domain sequences into expression vectors.

[1241] Recombinant antibodies are also produced using phage display technology. Target antigens are screened, in vitro, using phage display libraries having millions to billions of phage particles expressing unique single chain variable fragments (scFvs) on their viral coat. Precipitated phage particles are analyzed and sequences encoding expressed says are determined. Sequences encoding antibody variable domains and/or CDRs are inserted into expression vectors for antibody production.

[1242] Recombinant antibodies are further produced using yeast surface display technology, wherein antibody variable domain sequences are expressed on the cell surface of Saccharomyces cerevisiae. Recombinant antibodies are developed by displaying the antibody fragment of interest as a fusion to e.g. Aga2p protein on the surface of the yeast, where the protein interacts with proteins and small molecules in a solution. says with affinity towards desired receptors are isolated from the yeast surface using magnetic separation and flow cytometry. Several cycles of yeast surface display and isolation will be done to attain scFvs with desired properties through directed evolution.

### Example 4. Optimization of the Encoded Antibody

[1243] To design an optimal framework for the expression of an antibody, the heavy and light chains of several antibodies separated by an F2A self-processing peptide sequence are cloned into a mammalian expression vector under the control of the CMV promoter. 293T cells or any suitable cell line transfected with these vectors exhibit secretion of human IgG into the culture supernatant that is then detected by ELISA.

[1244] To increase expression, the antibody chains and/or the processing peptide are codon optimized for mammalian expression. In some instances, a furin cleavage site at the N-terminus is inserted for better processing.

[1245] To improve secretion of the antibody, the endogenous signal sequences are replaced with a sequence which may or may not be codon optimized, derived from any gene. In some cases, the human growth hormone signal sequence is used. Any of the heavy, light or both chains may be driven by any signal sequence, whether the same or different. Antibody expression is confirmed using standard immunohistochemical techniques, including ELISA.

### Example 5. Vectored Antibodies

[1246] Viral genomes are designed for AAV delivery of antibodies to cells. The viral genome comprises a payload region and at least one inverted terminal repeat (ITR) region. The payload region may optionally encode regulatory elements e.g., a promoter region, an intronic region, or a polyadenylation sequence. The payload region comprises a sequence encoding one or more polypeptides selected from the group consisting of those listed in Tables 3-53. An exemplary payload region comprises a sequence encoding an antibody heavy chain, a region encoding an antibody light chain and a region encoding a linker connecting the heavy and light chain sequences or polypeptides before further processing. A promoter is selected to target the desired tissue or for desired regulation of expression, or both. The promoter may be selected from human EF1a, CMV, CBA, and its derivative CAG, GUSB, UBC, or any other promoter known to one with skill in the art, or combinations thereof. The 5′ and 3′ ITRs may or may not be of the same serotype as the capsid of the AAV particle.

[1247] Payload regions may optionally encode a linker between light and heavy antibody chain sequences or polypeptides. Sequence encoding linkers are derived from an internal ribosome entry site (IRES), foot and mouth disease virus 2A (F2A), porcine teschovirus-1 virus 2A (P2A), a furin cleavage site (F), or a 5xG4S linker sequence (SEQ ID N0: 32689 or SEQ ID NO: 1728). In various payload regions, the order of heavy and light chains is alternated with respect to 5′ to 3′ direction. Payloads are further designed to encode protein signal sequences (to aid in protein processing, localization, and/or secretion) as well as an untranslated poly A tail.

[1248] Each viral genome is then incorporated into an AAV cloning vector to create payload expression vectors.

[1249] The payload expression vectors are expressed in e.g. Expi293 cells. The supernatants are collected and expressed antibodies are purified using protein A/G beads. Supernatants are diluted with a loading buffer and applied to a column prepared with A/G beads. Unbound proteins are washed through with loading buffer. Elution buffer is added to the column, fractions collected, and fractions containing proteins of interest are identified with absorption spectroscopy technique, pooled together, and neutralized. Western blotting techniques are used to identify payload regions producing the antibody proteins of interest. Purified antibodies are then tested for their affinity to their specific target by e.g. ELISA essay technique and antibodies with the highest affinity are identified and selected.

[1250] Finally, the rAAVs are produced using, for example, HEK293T cells. The cells are transfected simultaneously with the viral genome of the present disclosure, a viral genome encoding helper proteins and a viral genome encoding replication and capsid proteins.

### Example 6. In Vivo Expression and Efficacy of Antibody Payloads

[1251] To determine the efficacy or comparative expression of encoded antibodies, dose-dependent expression is determined at a series of time points. Samples from mice treated with AAV particles encoding antibodies or luciferase at various levels are examined for expression using standard techniques such as nucleic acid analyses for RNA levels, protein analyses for antibody levels and compared to the expression of the luciferase control.

### Example 7. Generation of VA-DER Systems

[1252] The vectored augmentation systems and or methods of the present disclosure include at least a TRIM21 protein or a nucleic acid sequence encoding a TRIM21 protein or fragment or variant thereof.

[1253] TRIM21 sequences include those in Table 58.

TABLE 58
TRIM21 Sequences

| Sequence | SEQ ID | |
|---|---|---|
| Type | NO | SEQUENCE |
| mRNA | 32670 | >NM_003141.3 Homo sapiens |
| | | tripartite motif containing |
| | | 21 (TRIM21), mRNA |
| | | GCTTCTGAGCGGAAACTGAAAGTGAAATAG |
| | | GGAGCTGGCTACCAGCGTTGAGTCCCCTGT |
| | | AAAGCCAAACCCCCTAAAGGTCTCCACACT |
| | | GCTGTTTAACGGCACACTTGACAATGGCTT |
| | | CAGCAGCACGCTTGACAATGATGTGGGAGG |
| | | AGGTCACATGCCCTATCTGCCTGGACCCCT |
| | | TCGTGGAGCCTGTGAGCATCGAGTGTGGCC |
| | | ACAGCTTCTGCCAGGAATGCATCTCTCAGG |
| | | TTGGGAAAGGTGGGGGCAGCGTCTGTCCTG |
| | | TGTGCCGGCAGCGCTTTCTGCTCAAGAATC |
| | | TCCGGCCCAATCGACAGCTAGCCAACATGG |
| | | TGAACAACCTTAAAGAAATCAGCCAGGAGG |
| | | CCAGAGAGGGCACACAGGGGGAACGGTGTG |
| | | CAGTGCATGGAGAGAGACTTCACCTGTTCT |
| | | GTGAGAAAGATGGGAAGGCCCTTTGCTGGG |
| | | TATGTGCCCAGTCTCGGAAACACCGTGACC |
| | | ACGCCATGGTCCCTCTTGAGGAGGCTGCAC |
| | | AGGAGTACCAGGAGAAGCTCCAGGTGGCAT |
| | | TAGGGGAACTGAGAAGAAAGCAGGAGTTGG |
| | | CTGAGAAGTTGGAAGTGGAAATTGCAATAA |
| | | AGAGAGCAGACTGGAAGAAAACAGTGGAAA |
| | | CACAGAAATCTAGGATTCACGCAGAGTTTG |
| | | TGCAGCAAAAAAACTTCCTGGTTGAAGAAG |
| | | AACAGAGGCAGCTGCAGGAGCTGGAGAAGG |
| | | ATGAGAGGGAGCAGCTGAGAATCCTGGGGG |
| | | AGAAAGAGGCCAAGCTGGCCCAGCAGAGCC |
| | | AGGCCCTACAGGAGCTCATCTCAGAGCTAG |
| | | ATCGAAGGTGCCACAGCTCAGCACTGGAAC |
| | | TGCTGCAGGAGGTGATAATTGTCCTGGAAA |
| | | GGAGTGAGTCCTGGAACCTGAAGGACCTGG |
| | | ATATTACCTCTCCAGAACTCAGGAGTGTGT |
| | | GCCATGTGCCAGGGCTGAAGAAGATGCTGA |
| | | GGACATGTGCAGTCCACATCACTCTGGATC |
| | | CAGACACAGCCAATCCGTGGCTGATACTTT |
| | | CAGAAGATCGGAGACAAGTGAGGCTTGGAG |
| | | ACACCCAGCAGAGCATACCTGGAAATGAAG |
| | | AGAGATTTGATAGTTATCCTATGGTCCTGG |
| | | GTGCCCAGCACTTTCACTCTGGAAAACATT |
| | | ACTGGGAGGTAGATGTGACAGGAAAGGAGG |
| | | CCTGGGACCTGGGTGTCTGCAGAGACTCTG |
| | | TGCGCAGGAAGGGGCACTTTTTGCTTAGTT |
| | | CCAAGAGTGGCTTCTGGACAATTTGGTTGT |
| | | GGAACAAACAAAAATATGAGGCTGGCACCT |
| | | ACCCCCAGACTCCCCTCCACCTTCAGGTGC |
| | | CTCCATGCCAAGTTGGGATTTTCCTGGACT |
| | | ATGAGGCTGGCATGGTCTCCTTCTACAACA |
| | | TCACTGACCATGGCTCCCTCATCTACTCCT |
| | | TCTCTGAATGTGCCTTTACAGGACCTCTGC |
| | | GGCCCTTCTTCAGTCCTGGTTTCAATGATG |
| | | GAGGAAAAAACACAGCCCCTCTAACCCTCT |
| | | GTCCACTGAATATTGGATCACAAGGATCCA |
| | | CTGACTATTGATGGCTTTCTCTGGACACTG |
| | | CCACTCTCCCCATTGGCACCGCTTCTCAGC |
| | | CACAAACCCTGCCTCTTTTCCCCATGAACT |
| | | CTGAACCACCTTTGTCTCTGCAGAGGCATC |
| | | CGGATCCCAGCAAGCGAGCTTTAGCAGGGA |
| | | AGTCACTTCACCATCAACATTCCTGCCCCA |
| | | GATGGCTTTGTGATTCCCTCCAGTGAAGCA |
| | | GCCTCCTTATATTTGGCCCAAACTCATCTT |
| | | GATCAACCAAAAACATGTTTCTGCCTTCTT |
| | | TATGGGACTTAAGTTTTTTTTTTCTCCTCT |
| | | CCATCTCTAGGATGTCGTCTTTGGTGAGAT |
| | | CTCTATTATATCTTGTATGGTTTGCAAAAG |
| | | GGCTTCCTAAAAATAAAAAATAAAATTTAA |
| | | AAAACTGTGAAAAAAAAAAAAAAAAA |
| Protein | 32671 | >NP_003132.2 E3 ubiquitin- |
| | | protein ligase TRIM21 |
| | | [Homo sapiens] |
| | | MASAARLTMMWEEVTCPICLDPFVEPVSIE |
| | | CGHSFCQECISQVGKGGGSVCPVCRQRFLL |
| | | KNLRPNRQLANMVNNLKEISQEAREGTQGE |
| | | RCAVHGERLHLFCEKDGKALCWVCAQSRKH |
| | | RDHAMVPLEEAAQEYQEKLQVALGELRRKQ |
| | | ELAEKLEVEIAIKRADWKKTVETQKSRIHA |
| | | EFVQQKNFLVEEEQRQLQELEKDEREQLRI |
| | | LGEKEAKLAQQSQALQELISELDRRCHSSA |
| | | LELLQEVIIVLERSESWNLKDLDITSPELR |
| | | SVCHVPGLKKMLRTCAVHITLDPDTANPWL |
| | | ILSEDRRQVRLGDTQQSIPGNEERFDSYPM |
| | | VLGAQHFHSGKHYWEVDVTGKEAWDLGVCR |
| | | DSVRRKGHFLLSSKSGFWTIWLWNKQKYEA |
| | | GTYPQTPLHLQVPPCQVGIFLDYEAGMVSF |
| | | YNITDHGSLIYSESECAFTGPLRPFFSPGF |
| | | NDGGKNTAPLTLCPLNIGSQGSTDY |

[1254] To establish functionality of the VA-DER TRIM21 systems, an ELISA is developed to demonstrate that TRIM21 binds to a full antibody sequence but not to a Fab2 sequence.

[1255] In such an assay, cell lysates (e.g., 293 cells) where the cells either express TRIM21 or do not express TRIM21 are prepared. Plates are coated with goat anti-mouse IgG or Fab2 goat anti-mouse IgG. TR1M21 or 293 cell lysate is then applied. Rabbit anti-TR1M21 polyclonal antibody is applied. Then HRP conjugated goat anti-rabbit secondary antibody is applied.

[1256] If HA-MB/121 is used, then BRP conjugated rabbit anti-HA is used. The readout is per any standard ELISA method. The assay demonstrates whether TRIM21 binds the test antibody and that the binding is effector function dependent.

[1257] Pull down assays are also used to illustrate the same outcome, i.e., that TRIM21 binds its target antibody.

### Neutralization Assay

[1258] Cell-based TRIM21 mediated antibody neutralization assays may also be used.

[1259] In such an assay, cells are prepared which express TRIM21. A GFP or other labeled AAV vector is prepared, for example AAV2, which expresses the label. A20, an antibody which recognizes a conformational epitope of AAV2 is incubated with the AAV2-GFP to determine if AAV2-GFP infection is impaired. If there is no impairment, the GFP levels may be measured and compared to levels in cells which do, or do not, express TRIM21. Controls are standard and include cells which do not express TRIM21 or which are not treated with antibody or GFP expressing vector. This assay shows if the TRIM21 in the cell is augmenting the A20 antibody bound AAV2 particle to the proteasome for destruction.

### VA-DER 1R1A 421 Assay

[1260] Vectored TRIM21 is evaluated for its ability to augment the destruction of an antibody of choice, and by extension any protein or antigen so bound by the antibody.

[1261] In this example, TRIM21 is delivered to a cell as an AAV payload. An antibody which is specific for a protein of interest, e.g., a cellular protein, is also delivered as an AAV payload.

[1262] The TRIM21, AAV and Antibody AAV are mixed in different ratios such as ft 1:1, 0.31, Li, L3 or 1:0 (TRIM21:Antibody). The AAV vectors are injected into a subject. In mice, the wt/P301s model is used. Levels of the protein targeted by the antibody encoded in the Antibody AAV are measured at a later time, e.g., 1 day, 1 week, 2, weeks, 3 weeks, 4 weeks or more by ELISA or TEC. Results demonstrate a TRIM21 dependent reduction in the protein targeted by the antibody. In some embodiments the protein being targeted is tau and the antibody is any tau binding antibody taught herein.

### VIII. Equivalents and Scope

[1263] Those skilled in the art will recognize or be able to ascertain using no more than routine experimentation, many equivalents to the specific embodiments in accordance with the disclosure described herein. The scope of the present disclosure is not intended to be limited to the above Description, but rather is as set forth in the appended claims.

[1264] In the claims, articles such as “a,” “an,” and “the” may mean one or more than one unless indicated to the contrary or otherwise evident from the context. Claims or descriptions that include “or” between one or more members of a group are considered satisfied if one, more than one, or all of the group members are present in, employed in, or otherwise relevant to a given product or process unless indicated to the contrary or otherwise evident from the context. The disclosure includes embodiments in which exactly one member of the group is present in, employed in, or otherwise relevant to a given product or process. The disclosure includes embodiments in which more than one, or the entire group members are present in, employed in, or otherwise relevant to a given product or process.

[1265] It is also noted that the term “comprising” is intended to be open and permits but does not require the inclusion of additional elements or steps. When the term “comprising” is used herein, the term “consisting of” is thus also encompassed and disclosed.

[1266] Where ranges are given, endpoints are included. Furthermore, it is to be understood that unless otherwise indicated or otherwise evident from the context and understanding of one of ordinary skill in the art, values that are expressed as ranges can assume any specific value or subrange within the stated ranges in different embodiments of the disclosure, to the tenth of the unit of the lower limit of the range, unless the context clearly dictates otherwise.

[1267] In addition, it is to be understood that any particular embodiment of the present disclosure that falls within the prior art may be explicitly excluded from any one or more of the claims. Since such embodiments are deemed to be known to one of ordinary skill in the art, they may be excluded even if the exclusion is not set forth explicitly herein. Any particular embodiment of the compositions of the disclosure (e.g., any antibiotic, therapeutic or active ingredient; any method of production; any method of use; etc.) can be excluded from any one or more claims, for any reason, whether or not related to the existence of prior art.

[1268] It is to be understood that the words which have been used are words of description rather than limitation, and that changes may be made within the purview of the appended claims without departing from the true scope and spirit of the disclosure in its broader aspects.

[1269] While the present disclosure has been described at some length and with some particularity with respect to the several described embodiments, it is not intended that it should be limited to any such particulars or embodiments or any particular embodiment, but it is to be construed with reference to the appended claims so as to provide the broadest possible interpretation of such claims in view of the prior art and, therefore, to effectively encompass the intended scope of the disclosure.

LENGTHY TABLES
The patent application contains a lengthy table section. A copy of the table is available in electronic form from the USPTO web site (https://seqdata.uspto.gov/?pageRequest=docDetail&DocID=US20240124889A1). An electronic copy of the table will also be available from the USPTO upon request and payment of the fee set forth in 37 CFR 1.19(b)(3).

1. A vector-based system of augmenting protein destruction, expression and/or regulation comprising
a. a first component comprising a nucleic acid vector or plasmid sequence encoding a payload,
b. a second component comprising a TRIM21 protein or a nucleic acid sequence encoding a TRIM21 protein, and
c. optionally a third component comprising a biomolecule selected from the group consisting of a nucleic acid sequence, a protein sequence, a lipid, a small molecule and a vitamin.

2. The vector-based system of claim 1, wherein said first component is an AAV vector and the serotype of said AAV vector is selected from any of those listed in Table 1.

3. The vector-based system of claim 1, wherein said second component comprises a TRIM21 protein encoded in an AAV vector and the serotype of said AAV vector is selected from any of those listed in Table 1.

4. The vector-based system of claim 1, wherein the payload of said first component is an antibody.

5. The vector-based system of claim 4, wherein the antibody is selected from any of those listed in Tables 3-53.

6. The vector-based system of claim 1, wherein the payload is a chimeric antigen receptor.

7. A vector-based system of augmenting protein destruction, expression and/or regulation comprising
a. a first component comprising a nucleic acid vector or plasmid sequence encoding a payload, wherein the payload comprises a nucleic acid sequence encoding
i. at least one TRIM21 protein or TRIM21 protein fragment, and,
ii. at least one antibody or antibody fragment.

8. The vector-based system of claim 7, wherein said first component is an AAV vector and the serotype of said AAV vector is selected from any of those listed in Table 1.

9. The vector-based system of claim 7, wherein the antibody or antibody fragment is selected from any of those listed in Tables 3-53.

10. The vector-based system of claim 7, wherein the payload is a chimeric antigen receptor.

11. The vector-based system of claim 7, wherein the at least one antibody fragment is selected from the group consisting of an Fc, scFv, nanobody, intrabody, and Fab fragment or combinations thereof.

12. The vector-based system of claim 11, wherein the at least one antibody fragment is in combination with at least one other different antibody fragment.

13. The vector-based system of claim 12, wherein the at least one antibody fragment is an Fc fragment.

14. The vector-based system of claim 7, wherein the payload comprises a nucleic acid sequence further encoding
iii. at least one target binding protein or fragment thereof.

15. The vector-based system of claim 14, wherein the target binding protein is tau or a tau binding protein.

16. The vector-based system of claim 1, comprising a sequence selected from the group consisting of SEQ ID NO: 32672-32675.

17. An AAV viral genome comprising a sequence selected from the group consisting of SEQ ID NO: 32672-32675.

18. An AAV particle comprising the viral genome of claim 17 and a capsid.

19. A pharmaceutical composition comprising the AAV particle of claim 18.

20. A method of treating a disease, disorder, or condition in a subject, said method comprising administering to the subject the AAV particle of claim 18.

21. A method of treating a disease, disorder, or condition in a subject, said method comprising administering to the subject the pharmaceutical composition of claim 19.

22. The vector-based system of claim 7, comprising a sequence selected from the group consisting of SEQ ID NO: 32672-32675.

The application's sequence listing, which the Patent Office published only in electronic form, follows.

SEQUENCE LISTING (32695 sequences)

SEQ ID NO: 1 - protein, 743 aa, Artificial Sequence
  source: /note="Description of Artificial Sequence: Synthetic polypeptide"
MAADGYLPDWLEDNLSEGIREWWALKPGAPQPKANQQHQDNARGLVLPGYKYLGPGNGLDKGEPVNAADAAALEHDKAYDQQLKAGDNPYLKYNHADAEFQERLKEDTSFGGNLGRAVFQAKKRLLEPLGLVEEAAKTAPGKKRPVEQSPQEPDSSAGIGKSGAQPAKKRLNFGQTGDTESVPDPQPIGEPPAAPSGVGSLTMASGGGAPVADNNEGADGVGSSSGNWHCDSQWLGDRVITTSTRTWALPTYNNHLYKQISNSTSGGSSNDNAYFGYSTPWGYFDFNRFHCHFSPRDWQRLINNNWGFRPKRLNFKLFNIQVKEVTDNNGVKTIANNLTSTVQVFTDSDYQLPYVLGSAHEGCLPPFPADVFMIPQYGYLTLNDGSQAVGRSSFYCLEYFPSQMLRTGNNFQFSYEFENVPFHSSYAHSQSLDRLMNPLIDQYLYYLSKTINGSGQNQQTLKFSVAGPSNMAVQGRNYIPGPSYRQQRVSTTVTQNNNSEFAWPGASSWALNGRNSLMNPGPAMASHKEGEDRFFPLSGSLIFGKQGTGRDNVDADKVMITNEEEIKTTNPVATESYGQVATNHQSDGTLAVPFKAQAQTGWVQNQGILPGMVWQDRDVYLQGPIWAKIPHTDGNFHPSPLMGGFGMKHPPPQILIKNTPVPADPPTAFNKDKLNSFITQYSTGQVSVEIEWELQKENSKRWNPEIQYTSNYYKSNNVEFAVNTEGVYSEPRPIGTRYLTRNL

SEQ ID NO: 2 - protein, 743 aa, Artificial Sequence
  source: /note="Description of Artificial Sequence: Synthetic polypeptide"
MAADGYLPDWLEDNLSEGIREWWALKPGAPQPKANQQHQDNARGLVLPGYKYLGPGNGLDKGEPVNAADAAALEHDKAYDQQLKAGDNPYLKYNHADAEFQERLKEDTSFGGNLGRAVFQAKKRLLEPLGLVEEAAKTAPGKKRPVEQSPQEPDSSAGIGKSGAQPAKKRLNFGQTGDTESVPDPQPIGEPPAAPSGVGSLTMASGGGAPVADNNEGADGVGSSSGNWHCDSQWLGDRVITTSTRTWALPTYNNHLYKQISNSTSGGSSNDNAYFGYSTPWGYFDFNRFHCHFSPRDWQRLINNNWGFRPKRLNFKLFNIQVKEVTDNNGVKTIANNLTSTVQVFTDSDYQLPYVLGSAHEGCLPPFPADVFMIPQYGYLTLNDGSQAVGRSSFYCLEYFPSQMLRTGNNFQFSYEFENVPFHSSYAHSQSLDRLMNPLIDQYLYYLSRTINGSGQNQQTLKFSVAGPSNMAVQGRNYIPGPSYRQQRVSTTVTQNNNSEFAWPGASSWALNGRNSLMNPGPAMASHKEGEDRFFPLSGSLIFGKQGTGRDNVDADKVMITNEEEIKTTNPVATESYGQVATNHQSDGTLAVPFKAQAQTGWVQNQGILPGMVWQDRDVYLQGPIWAKIPHTDGNFHPSPLMGGFGMKHPPPQILIKNTPVPADPPTAFNKDKLNSFITQYSTGQVSVEIEWELQKENSKRWNPEIQYTSNYYKSNNVEFAVNTEGVYSEPRPIGTRYLTRNL

SEQ ID NO: 3 - protein, 743 aa, Artificial Sequence
  source: /note="Description of Artificial Sequence: Synthetic polypeptide"
MAADGYLPDWLEDNLSEGIREWWALKPGAPQPKANQQHQDNARGLVLPGYKYLGPGNGLDKGEPVNAADAAALEHDKAYDQQLKAGDNPYLKYNHADAEFQERLKEDTSFGGNLGRAVFQAKKRLLEPLGLVEEAAKTAPGKKRPVEQSPQEPDSSAGIGKSGAQPAKKRLNFGQTGDTESVPDPQPIGEPPAAPSGVGSLTMASGGGAPVADNNEGADGVGSSSGNWHCDSQWLGDRVITTSTRTWALPTYNNHLYKQISNSTSGGSSNDNAYFGYSTPWGYFDFNRFHCHFSPRDWQRLINNNWGFRPKRLNFKLFNIQVKEVTDNNGVKTIANNLTSTVQVFTDSDYQLPYVLGSAHEGCLPPFPADVFMIPQYGYLTLNDGSQAVGRSSFYCLEYFPSQMLRTGNNFQFSYEFENVPFHSSYAHSQSLDRLMNPLIDQYLYYLSRTINGSGQNQQTLKFSVAGPSNMAVQGRNYIPGPSYRQQRVSTTVTQNNNSEFAWPGASSWALNGRNSLMNPGPAMASHKEGEDRFFPLSGSLIFGKQGTGRDNVDADKVMITNEEEIKTTNPVATESYGQVATNHQSAQTLAVPFKAQAQTGWVQNQGILPGMVWQDRDVYLQGPIWAKIPHTDGNFHPSPLMGGFGMKHPPPQILIKNTPVPADPPTAFNKDKLNSFITQYSTGQVSVEIEWELQKENSKRWNPEIQYTSNYYKSNNVEFAVNTEGVYSEPRPIGTRYLTRNL

SEQ ID NO: 4 - DNA, 2232 bp, Artificial Sequence
  source: /note="Description of Artificial Sequence: Synthetic polynucleotide"
atggctgccgatggttatcttccagattggctcgaggacaaccttagtgaaggaattcgcgagtggtgggctttgaaacctggagcccctcaacccaaggcaaatcaacaacatcaagacaacgctcgaggtcttgtgcttccgggttacaaataccttggacccggcaacggactcgacaagggggagccggtcaacgcagcagacgcggcggccctcgagcacgacaaggcctacgaccagcagctcaaggccggagacaacccgtacctcaagtacaaccacgccgacgccgagttccaggagcggctcaaagaagatacgtcttttgggggcaacctcgggcgagcagtcttccaggccaaaaagaggcttcttgaacctcttggtctggttgaggaagcggctaagacggctcctggaaagaagaggcctgtagagcagtctcctcaggaaccggactcctccgcgggtattggcaaatcgggtgcacagcccgctaaaaagagactcaatttcggtcagactggcgacacagagtcagtcccagaccctcaaccaatcggagaacctcccgcagccccctcaggtgtgggatctcttacaatggcttcaggtggtggcgcaccagtggcagacaataacgaaggtgccgatggagtgggtagttcctcgggaaattggcattgcgattcccaatggctgggggacagagtcatcaccaccagcacccgaacctgggccctgcccacctacaacaatcacctctacaagcaaatctccaacagcacatctggaggatcttcaaatgacaacgcctacttcggctacagcaccccctgggggtattttgacttcaacagattccactgccacttctcaccacgtgactggcagcgactcatcaacaacaactggggattccggcctaagcgactcaacttcaagctcttcaacattcaggtcaaagaggttacggacaacaatggagtcaagaccatcgccaataaccttaccagcacggtccaggtcttcacggactcagactatcagctcccgtacgtgctcgggtcggctcacgagggctgcctcccgccgttcccagcggacgttttcatgattcctcagtacgggtatctgacgcttaatgatggaagccaggccgtgggtcgttcgtccttttactgcctggaatatttcccgtcgcaaatgctaagaacgggtaacaacttccagttcagctacgagtttgagaacgtacctttccatagcagctacgctcacagccaaagcctggaccgactaatgaatccactcatcgaccaatacttgtactatctctctagaactattaacggttctggacagaatcaacaaacgctaaaattcagtgtggccggacccagcaacatggctgtccagggaagaaactacatacctggacccagctaccgacaacaacgtgtctcaaccactgtgactcaaaacaacaacagcgaatttgcttggcctggagcttcttcttgggctctcaatggacgtaatagcttgatgaatcctggacctgctatggccagccacaaagaaggagaggaccgtttctttcctttgtctggatctttaatttttggcaaacaaggtaccggcagagacaacgtggatgcggacaaagtcatgataaccaacgaagaagaaattaaaactactaacccggtagcaacggagtcctatggacaagtggccacaaaccaccagagtgcccaaactttggcggtgccttttaaggcacaggcgcagaccggttgggttcaaaaccaaggaatacttccgggtatggtttggcaggacagagatgtgtacctgcaaggacccatttgggccaaaattcctcacacggacggcaactttcacccttctccgctgatgggagggtttggaatgaagcacccgcctcctcagatcctcatcaaaaacacacctgtacctgcggatcctccaacggccttcaacaaggacaagctgaactctttcatcacccagtattctactggccaagtcagcgtggagatcgagtgggagctgcagaaggaaaacagcaagcgctggaacccggagatccagtacacttccaactattacaagtctaataatgttgaatttgctgttaatactgaaggtgtatatagtgaaccccgccccattggcaccagatacctgactcgtaatctgtaa

SEQ ID NO: 5 - protein, 736 aa, Artificial Sequence
  source: /note="Description of Artificial Sequence: Synthetic polypeptide"
MAADGYLPDWLEDNLSEGIREWWALKPGAPQPKANQQHQDNARGLVLPGYKYLGPGNGLDKGEPVNAADAAALEHDKAYDQQLKAGDNPYLKYNHADAEFQERLKEDTSFGGNLGRAVFQAKKRLLEPLGLVEEAAKTAPGKKRPVEQSPQEPDSSAGIGKSGAQPAKKRLNFGQTGDTESVPDPQPIGEPPAAPSGVGSLTMASGGGAPVADNNEGADGVGSSSGNWHCDSQWLGDRVITTSTRTWALPTYNNHLYKQISNSTSGGSSNDNAYFGYSTPWGYFDFNRFHCHFSPRDWQRLINNNWGFRPKRLNFKLFNIQVKEVTDNNGVKTIANNLTSTVQVFTDSDYQLPYVLGSAHEGCLPPFPADVFMIPQYGYLTLNDGSQAVGRSSFYCLEYFPSQMLRTGNNFQFSYEFENVPFHSSYAHSQSLDRLMNPLIDQYLYYLSRTIQSSQTPRQTLKFSVAGPSNMAVQGRNYIPGPSYRQQRVSTTVTQNNNSEFAWPGASSWALNGRNSLMNPGPAMASHKEGEDRFFPLSGSLIFGKQGTGRDNVDADKVMITNEEEIKTTNPVATESYGQVATNHQSAQAQAQTGWVQNQGILPGMVWQDRDVYLQGPIWAKIPHTDGNFHPSPLMGGFGMKHPPPQILIKNTPVPADPPTAFNKDKLNSFITQYSTGQVSVEIEWELQKENSKRWNPEIQYTSNYYKSNNVEFAVNTEGVYSEPRPIGTRYLTRNL

SEQ ID NO: 6 - protein, 743 aa, Artificial Sequence
  source: /note="Description of Artificial Sequence: Synthetic polypeptide"
MAADGYLPDWLEDNLSEGIREWWALKPGAPQPKANQQHQDNARGLVLPGYKYLGPGNGLDKGEPVNAADAAALEHDKAYDQQLKAGDNPYLKYNHADAEFQERLKEDTSFGGNLGRAVFQAKKRLLEPLGLVEEAAKTAPGKKRPVEQSPQEPDSSAGIGKSGAQPAKKRLNFGQTGDTESVPDPQPIGEPPAAPSGVGSLTMASGGGAPVADNNEGADGVGSSSGNWHCDSQWLGDRVITTSTRTWALPTYNNHLYKQISNSTSGGSSNDNAYFGYSTPWGYFDFNRFHCHFSPRDWQRLINNNWGFRPKRLNFKLFNIQVKEVTDNNGVKTIANNLTSTVQVFTDSDYQLPYVLGSAHEGCLPPFPADVFMIPQYGYLTLNDGSQAVGRSSFYCLEYFPSQMLRTGNNFQFSYEFENVPFHSSYAHSQSLDRLMNPLIDQYLYYLSRTIILGTGTSQTLKFSVAGPSNMAVQGRNYIPGPSYRQQRVSTTVTQNNNSEFAWPGASSWALNGRNSLMNPGPAMASHKEGEDRFFPLSGSLIFGKQGTGRDNVDADKVMITNEEEIKTTNPVATESYGQVATNHQSAQTRTNPEAAQAQTGWVQNQGILPGMVWQDRDVYLQGPIWAKIPHTDGNFHPSPLMGGFGMKHPPPQILIKNTPVPADPPTAFNKDKLNSFITQYSTGQVSVEIEWELQKENSKRWNPEIQYTSNYYKSNNVEFAVNTEGVYSEPRPIGTRYLTRNL

SEQ ID NO: 7 - protein, 743 aa, Artificial Sequence
  source: /note="Description of Artificial Sequence: Synthetic polypeptide"
MAADGYLPDWLEDNLSEGIREWWALKPGAPQPKANQQHQDNARGLVLPGYKYLGPGNGLDKGEPVNAADAAALEHDKAYDQQLKAGDNPYLKYNHADAEFQERLKEDTSFGGNLGRAVFQAKKRLLEPLGLVEEAAKTAPGKKRPVEQSPQEPDSSAGIGKSGAQPAKKRLNFGQTGDTESVPDPQPIGEPPAAPSGVGSLTMASGGGAPVADNNEGADGVGSSSGNWHCDSQWLGDRVITTSTRTWALPTYNNHLYKQISNSTSGGSSNDNAYFGYSTPWGYFDFNRFHCHFSPRDWQRLINNNWGFRPKRLNFKLFNIQVKEVTDNNGVKTIANNLTSTVQVFTDSDYQLPYVLGSAHEGCLPPFPADVFMIPQYGYLTLNDGSQAVGRSSFYCLEYFPSQMLRTGNNFQFSYEFENVPFHSSYAHSQSLDRLMNPLIDQYLYYLSRTIILGTGTSQTLKFSVAGPSNMAVQGRNYIPGPSYRQQRVSTTVTQNNNSEFAWPGASSWALNGRNSLMNPGPAMASHKEGEDRFFPLSGSLIFGKQGTGRDNVDADKVMITNEEEIKTTNPVATESYGQVATNHQSAQNGGTSSSAQAQTGWVQNQGILPGMVWQDRDVYLQGPIWAKIPHTDGNFHPSPLMGGFGMKHPPPQILIKNTPVPADPPTAFNKDKLNSFITQYSTGQVSVEIEWELQKENSKRWNPEIQYTSNYYKSNNVEFAVNTEGVYSEPRPIGTRYLTRNL

SEQ ID NO: 8 - protein, 743 aa, Artificial Sequence
  source: /note="Description of Artificial Sequence: Synthetic polypeptide"
MAADGYLPDWLEDNLSEGIREWWALKPGAPQPKANQQHQDNARGLVLPGYKYLGPGNGLDKGEPVNAADAAALEHDKAYDQQLKAGDNPYLKYNHADAEFQERLKEDTSFGGNLGRAVFQAKKRLLEPLGLVEEAAKTAPGKKRPVEQSPQEPDSSAGIGKSGAQPAKKRLNFGQTGDTESVPDPQPIGEPPAAPSGVGSLTMASGGGAPVADNNEGADGVGSSSGNWHCDSQWLGDRVITTSTRTWALPTYNNHLYKQISNSTSGGSSNDNAYFGYSTPWGYFDFNRFHCHFSPRDWQRLINNNWGFRPKRLNFKLFNIQVKEVTDNNGVKTIANNLTSTVQVFTDSDYQLPYVLGSAHEGCLPPFPADVFMIPQYGYLTLNDGSQAVGRSSFYCLEYFPSQMLRTGNNFQFSYEFENVPFHSSYAHSQSLDRLMNPLIDQYLYYLSRTINGSGQNQQTLKFSVAGPSNMAVQGRNYIPGPSYRQQRVSTTVTQNNNSEFAWPGASSWALNGRNSLMNPGPAMASHKEGEDRFFPLSGSLIFGKQGTGRDNVDADKVMITNEEEIKTTNPVATESYGQVATNHQSAQQAVRTSLAQAQTGWVQNQGILPGMVWQDRDVYLQGPIWAKIPHTDGNFHPSPLMGGFGMKHPPPQILIKNTPVPADPPTAFNKDKLNSFITQYSTGQVSVEIEWELQKENSKRWNPEIQYTSNYYKSNNVEFAVNTEGVYSEPRPIGTRYLTRNL

SEQ ID NO: 9 - protein, 736 aa, Artificial Sequence
  source: /note="Description of Artificial Sequence: Synthetic polypeptide"
MAADGYLPDWLEDNLSEGIREWWALKPGAPQPKANQQHQDNARGLVLPGYKYLGPGNGLDKGEPVNAADAAALEHDKAYDQQLKAGDNPYLKYNHADAEFQERLKEDTSFGGNLGRAVFQAKKRLLEPLGLVEEAAKTAPGKKRPVEQSPQEPDSSAGIGKSGAQPAKKRLNFGQTGDTESVPDPQPIGEPPAAPSGVGSLTMASGGGAPVADNNEGADGVGSSSGNWHCDSQWLGDRVITTSTRTWALPTYNNHLYKQISNSTSGGSSNDNAYFGYSTPWGYFDFNRFHCHFSPRDWQRLINNNWGFRPKRLNFKLFNIQVKEVTDNNGVKTIANNLTSTVQVFTDSDYQLPYVLGSAHEGCLPPFPADVFMIPQYGYLTLNDGSQAVGRSSFYCLEYFPSQMLRTGNNFQFSYEFENVPFHSSYAHSQSLDRLMNPLIDQYLYYLSRTINGSGQNQQTLKFSVAGPSNMAVQGRNYIPGPSYRQQRVSTTVTQNNNSEFAWPGASSWALNGRNSLMNPGPAMASHKEGEDRFFPLSGSLIFGKQGTGRDNVDADKVMITNEEEIKTTNPVATESYGQVATNHQSAQAQAQTGWVQNQGILPGMVWQDRDVYLQGPIWAKIPHTDGNFHPSPLMGGFGMKHPPPQILIKNTPVPADPPTAFNKDKLNSFITQYSTGQVSVEIEWELQKENSKRWNPEIQYTSNYYKSNNVEFAVNTEGVYSEPRPIGTRYLTRNL

SEQ ID NO: 10 - DNA, 2211 bp, Artificial Sequence
  source: /note="Description of Artificial Sequence: Synthetic polynucleotide"
atggctgccgatggttatcttccagattggctcgaggacaacctctctgagggcattcgcgagtggtgggacttgaaacctggagccccgaagcccaaagccaaccagcaaaagcaggacgacggccggggtctggtgcttcctggctacaagtacctcggacccttcaacggactcgacaagggggagcccgtcaacgcggcggacgcagcggccctcgagcacgacaaggcctacgaccagcagctcaaagcgggtgacaatccgtacctgcggtataaccacgccgacgccgagtttcaggagcgtctgcaagaagatacgtcttttgggggcaacctcgggcgagcagtcttccaggccaagaagcgggttctcgaacctctcggtctggttgaggaaggcgctaagacggctcctggaaagaaacgtccggtagagcagtcgccacaagagccagactcctcctcgggcatcggcaagacaggccagcagcccgctaaaaagagactcaattttggtcagactggcgactcagagtcagtccccgatccacaacctctcggagaacctccagcaacccccgctgctgtgggacctactacaatggcttcaggcggtggcgcaccaatggcagacaataacgaaggcgccgacggagtgggtaatgcctcaggaaattggcattgcgattccacatggctgggcgacagagtcatcaccaccagcacccgcacctgggccttgcccacctacaataaccacctctacaagcaaatctccagtgcttcaacgggggccagcaacgacaaccactacttcggctacagcaccccctgggggtattttgatttcaacagattccactgccacttttcaccacgtgactggcagcgactcatcaacaacaattggggattccggcccaagagactcaacttcaaactcttcaacatccaagtcaaggaggtcacgacgaatgatggcgtcacaaccatcgctaataaccttaccagcacggttcaagtcttctcggactcggagtaccagcttccgtacgtcctcggctctgcgcaccagggctgcctccctccgttcccggcggacgtgttcatgattccgcaatacggctacctgacgctcaacaatggcagccaagccgtgggacgttcatccttttactgcctggaatatttcccttctcagatgctgagaacgggcaacaactttaccttcagctacacctttgaggaagtgcctttccacagcagctacgcgcacagccagagcctggaccggctgatgaatcctctcatcgaccaatacctgtattacctgaacagaactcaaaatcagtccggaagtgcccaaaacaaggacttgctgtttagccgtgggtctccagctggcatgtctgttcagcccaaaaactggctacctggaccctgttatcggcagcagcgcgtttctaaaacaaaaacagacaacaacaacagcaattttacctggactggtgcttcaaaatataacctcaatgggcgtgaatccatcatcaaccctggcactgctatggcctcacacaaagacgacgaagacaagttctttcccatgagcggtgtcatgatttttggaaaagagagcgccggagcttcaaacactgcattggacaatgtcatgattacagacgaagaggaaattaaagccactaaccctgtggccaccgaaagatttgggaccgtggcagtcaatttccagagcagcagcacagaccctgcgaccggagatgtgcatgctatgggagcattacctggcatggtgtggcaagatagagacgtgtacctgcagggtcccatttgggccaaaattcctcacacagatggacactttcacccgtctcctcttatgggcggctttggactcaagaacccgcctcctcagatcctcatcaaaaacacgcctgttcctgcgaatcctccggcggagttttcagctacaaagtttgcttcattcatcacccaatactccacaggacaagtgagtgtggaaattgaatgggagctgcagaaagaaaacagcaagcgctggaatcccgaagtgcagtacacatccaattatgcaaaatctgccaacgttgattttactgtggacaacaatggactttatactgagcctcgccccattggcacccgttaccttacccgtcccctgtaa

SEQ ID NO: 11 - protein, 736 aa, Adeno-associated virus 1
MAADGYLPDWLEDNLSEGIREWWDLKPGAPKPKANQQKQDDGRGLVLPGYKYLGPFNGLDKGEPVNAADAAALEHDKAYDQQLKAGDNPYLRYNHADAEFQERLQEDTSFGGNLGRAVFQAKKRVLEPLGLVEEGAKTAPGKKRPVEQSPQEPDSSSGIGKTGQQPAKKRLNFGQTGDSESVPDPQPLGEPPATPAAVGPTTMASGGGAPMADNNEGADGVGNASGNWHCDSTWLGDRVITTSTRTWALPTYNNHLYKQISSASTGASNDNHYFGYSTPWGYFDFNRFHCHFSPRDWQRLINNNWGFRPKRLNFKLFNIQVKEVTTNDGVTTIANNLTSTVQVFSDSEYQLPYVLGSAHQGCLPPFPADVFMIPQYGYLTLNNGSQAVGRSSFYCLEYFPSQMLRTGNNFTFSYTFEEVPFHSSYAHSQSLDRLMNPLIDQYLYYLNRTQNQSGSAQNKDLLFSRGSPAGMSVQPKNWLPGPCYRQQRVSKTKTDNNNSNFTWTGASKYNLNGRESIINPGTAMASHKDDEDKFFPMSGVMIFGKESAGASNTALDNVMITDEEEIKATNPVATERFGTVAVNFQSSSTDPATGDVHAMGALPGMVWQDRDVYLQGPIWAKIPHTDGHFHPSPLMGGFGLKNPPPQILIKNTPVPANPPAEFSATKFASFITQYSTGQVSVEIEWELQKENSKRWNPEVQYTSNYAKSANVDFTVDNNGLYTEPRPIGTRYLTRPL

SEQ ID NO: 12 - DNA, 4718 bp, Adeno-associated virus 1
ttgcccactccctctctgcgcgctcgctcgctcggtggggcctgcggaccaaaggtccgcagacggcagagctctgctctgccggccccaccgagcgagcgagcgcgcagagagggagtgggcaactccatcactaggggtaatcgcgaagcgcctcccacgctgccgcgtcagcgctgacgtaaattacgtcataggggagtggtcctgtattagctgtcacgtgagtgcttttgcgacattttgcgacaccacgtggccatttagggtatatatggccgagtgagcgagcaggatctccattttgaccgcgaaatttgaacgagcagcagccatgccgggcttctacgagatcgtgatcaaggtgccgagcgacctggacgagcacctgccgggcatttctgactcgtttgtgagctgggtggccgagaaggaatgggagctgcccccggattctgacatggatctgaatctgattgagcaggcacccctgaccgtggccgagaagctgcagcgcgacttcctggtccaatggcgccgcgtgagtaaggccccggaggccctcttctttgttcagttcgagaagggcgagtcctacttccacctccatattctggtggagaccacgggggtcaaatccatggtgctgggccgcttcctgagtcagattagggacaagctggtgcagaccatctaccgcgggatcgagccgaccctgcccaactggttcgcggtgaccaagacgcgtaatggcgccggaggggggaacaaggtggtggacgagtgctacatccccaactacctcctgcccaagactcagcccgagctgcagtgggcgtggactaacatggaggagtatataagcgcctgtttgaacctggccgagcgcaaacggctcgtggcgcagcacctgacccacgtcagccagacccaggagcagaacaaggagaatctgaaccccaattctgacgcgcctgtcatccggtcaaaaacctccgcgcgctacatggagctggtcgggtggctggtggaccggggcatcacctccgagaagcagtggatccaggaggaccaggcctcgtacatctccttcaacgccgcttccaactcgcggtcccagatcaaggccgctctggacaatgccggcaagatcatggcgctgaccaaatccgcgcccgactacctggtaggccccgctccgcccgcggacattaaaaccaaccgcatctaccgcatcctggagctgaacggctacgaacctgcctacgccggctccgtctttctcggctgggcccagaaaaggttcgggaagcgcaacaccatctggctgtttgggccggccaccacgggcaagaccaacatcgcggaagccatcgcccacgccgtgcccttctacggctgcgtcaactggaccaatgagaactttcccttcaatgattgcgtcgacaagatggtgatctggtgggaggagggcaagatgacggccaaggtcgtggagtccgccaaggccattctcggcggcagcaaggtgcgcgtggaccaaaagtgcaagtcgtccgcccagatcgaccccacccccgtgatcgtcacctccaacaccaacatgtgcgccgtgattgacgggaacagcaccaccttcgagcaccagcagccgttgcaggaccggatgttcaaatttgaactcacccgccgtctggagcatgactttggcaaggtgacaaagcaggaagtcaaagagttcttccgctgggcgcaggatcacgtgaccgaggtggcgcatgagttctacgtcagaaagggtggagccaacaaaagacccgcccccgatgacgcggataaaagcgagcccaagcgggcctgcccctcagtcgcggatccatcgacgtcagacgcggaaggagctccggtggactttgccgacaggtaccaaaacaaatgttctcgtcacgcgggcatgcttcagatgctgtttccctgcaagacatgcgagagaatgaatcagaatttcaacatttgcttcacgcacgggacgagagactgttcagagtgcttccccggcgtgtcagaatctcaaccggtcgtcagaaagaggacgtatcggaaactctgtgccattcatcatctgctggggcgggctcccgagattgcttgctcggcctgcgatctggtcaacgtggacctggatgactgtgtttctgagcaataaatgacttaaaccaggtatggctgccgatggttatcttccagattggctcgaggacaacctctctgagggcattcgcgagtggtgggacttgaaacctggagccccgaagcccaaagccaaccagcaaaagcaggacgacggccggggtctggtgcttcctggctacaagtacctcggacccttcaacggactcgacaagggggagcccgtcaacgcggcggacgcagcggccctcgagcacgacaaggcctacgaccagcagctcaaagcgggtgacaatccgtacctgcggtataaccacgccgacgccgagtttcaggagcgtctgcaagaagatacgtcttttgggggcaacctcgggcgagcagtcttccaggccaagaagcgggttctcgaacctctcggtctggttgaggaaggcgctaagacggctcctggaaagaaacgtccggtagagcagtcgccacaagagccagactcctcctcgggcatcggcaagacaggccagcagcccgctaaaaagagactcaattttggtcagactggcgactcagagtcagtccccgatccacaacctctcggagaacctccagcaacccccgctgctgtgggacctactacaatggcttcaggcggtggcgcaccaatggcagacaataacgaaggcgccgacggagtgggtaatgcctcaggaaattggcattgcgattccacatggctgggcgacagagtcatcaccaccagcacccgcacctgggccttgcccacctacaataaccacctctacaagcaaatctccagtgcttcaacgggggccagcaacgacaaccactacttcggctacagcaccccctgggggtattttgatttcaacagattccactgccacttttcaccacgtgactggcagcgactcatcaacaacaattggggattccggcccaagagactcaacttcaaactcttcaacatccaagtcaaggaggtcacgacgaatgatggcgtcacaaccatcgctaataaccttaccagcacggttcaagtcttctcggactcggagtaccagcttccgtacgtcctcggctctgcgcaccagggctgcctccctccgttcccggcggacgtgttcatgattccgcaatacggctacctgacgctcaacaatggcagccaagccgtgggacgttcatccttttactgcctggaatatttcccttctcagatgctgagaacgggcaacaactttaccttcagctacacctttgaggaagtgcctttccacagcagctacgcgcacagccagagcctggaccggctgatgaatcctctcatcgaccaatacctgtattacctgaacagaactcaaaatcagtccggaagtgcccaaaacaaggacttgctgtttagccgtgggtctccagctggcatgtctgttcagcccaaaaactggctacctggaccctgttatcggcagcagcgcgtttctaaaacaaaaacagacaacaacaacagcaattttacctggactggtgcttcaaaatataacctcaatgggcgtgaatccatcatcaaccctggcactgctatggcctcacacaaagacgacgaagacaagttctttcccatgagcggtgtcatgatttttggaaaagagagcgccggagcttcaaacactgcattggacaatgtcatgattacagacgaagaggaaattaaagccactaaccctgtggccaccgaaagatttgggaccgtggcagtcaatttccagagcagcagcacagaccctgcgaccggagatgtgcatgctatgggagcattacctggcatggtgtggcaagatagagacgtgtacctgcagggtcccatttgggccaaaattcctcacacagatggacactttcacccgtctcctcttatgggcggctttggactcaagaacccgcctcctcagatcctcatcaaaaacacgcctgttcctgcgaatcctccggcggagttttcagctacaaagtttgcttcattcatcacccaatactccacaggacaagtgagtgtggaaattgaatgggagctgcagaaagaaaacagcaagcgctggaatcccgaagtgcagtacacatccaattatgcaaaatctgccaacgttgattttactgtggacaacaatggactttatactgagcctcgccccattggcacccgttaccttacccgtcccctgtaattacgtgttaatcaataaaccggttgattcgtttcagttgaactttggtctcctgtccttcttatcttatcggttaccatggttatagcttacacattaactgcttggttgcgcttcgcgataaaagacttacgtcatcgggttacccctagtgatggagttgcccactccctctctgcgcgctcgctcgctcggtggggcctgcggaccaaaggtccgcagacggcagagctctgctctgccggccccaccgagcgagcgagcgcgcagagagggagtgggcaa

SEQ ID NO: 13 - DNA, 3131 bp, Artificial Sequence
  source: /note="Description of Artificial Sequence: Synthetic polynucleotide"
gcggccgcgaattcgcccttggctgcgtcaactggaccaatgagaactttcccttcaatgattgcgtcgacaagatggtgatctggtgggaggagggcaagatgacggccaaggtcgtggagtccgccaaggccattctcggcggcagcaaggtgcgcgtggaccaaaagtgcaagtcgtccgcccagatcgaccccacccccgtgatcgtcacctccaacaccaacatgtgcgccgtgattgacgggaacagcaccaccttcgagcaccagcagcctctccaggaccggatgtttaagttcgaactcacccgccgtctggagcacgactttggcaaggtgacaaagcaggaagtcaaagagttcttccgctgggccagtgatcacgtgaccgaggtggcgcatgagttttacgtcagaaagggcggagccagcaaaagacccgcccccgatgacgcggataaaagcgagcccaagcgggcctgcccctcagtcgcggatccatcgacgtcagacgcggaaggagctccggtggactttgccgacaggtaccaaaacaaatgttctcgtcacgcgggcatgcttcagatgctgtttccctgcaaaacgtgcgagagaatgaatcggaatttcaacatttgcttcacacacggggtcagagactgctcagagtgtttccccggcgtgtcagaatctcaaccggtcgtcagaaagaggacgtatcggaaactccgtgcgattcatcatctgctggggcgggctcccgagattgcttgctcggcctgcgatctggtcaacgtggacctggatgactgtgtttctgagcaataaatgacttaaaccaggtatggctgccgatggttatcttccagattggctcgaggacaacctctctgagggcattcgcgagtggtgggcgctgaaacctggagccccgaagcccaaagccaaccagcaaaagcaggacgacggccggggtctggtgcttcctggctacaagtacctcggacccttcaacggactcgacaagggggagcccgtcaacgcggcggacgcagcggccctcgagcacgacaaggcttacgaccagcagctgcaggcgggtgacaatccgtacctgcggtataaccacgccgacgccgagtttcaggagcgtctgcaagaagatacgtcttttgggggcaacctcgggcgagcagtcttccaggccaagaagcgggttctcgaacctctcggtctggttgaggaaggcgctaagacggctcctggaaagaagagaccggtagagccatcaccccagcgttctccagactcctctacgggcatcggcaagaaaggccaacagcccgccagaaaaagactcaattttggtcagactggcgactcagagtcagttccagaccctcaacctctcggagaacctccagcagcgccctctggtgtgggacctaatacaatggctgcaggcggtggcgcaccaatggcagacaataacgaaggcgccgacggagtgggtagttcctcgggaaattggcattgcgattccacatggctgggcgacagagtcatcaccaccagcacccgaacctgggccctgcccacctacaacaaccacctctacaagcaaatctccaacgggacatcgggaggagccaccaacgacaacacctacttcggctacagcaccccctgggggtattttgactttaacagattccactgccacctttcaccacgtgactggcagcgactcatcaacaacaactggggattccgacccaagagactcagcttcaagctcttcaacatccaggtcaaggaggtcacgcagaatgaaggcaccaagaccatcgccaataacctcaccagcaccatccaggtgtttacggactcggagtaccagctgccgtacgttctcggctctgtccaccagggctgcctgcctccgttcccggcggacgtgttcatgattccccagtacggctacctaacactcaacaacggtagtcaggccgtgggacgctcctccttctactgcctggaatactttccttcgcagatgctgagaaccggcaacaacttccagtttacttacaccttcgaggacgtgcctttccacagcagctacgcccacagctagagcttggaccggctgatgaatcctctgattgaccagtacctgtactacttgtctcggactcaaacaacaggaggcacggcaaatacgcagactctgggcttcagccaaggtgggcctaatacaatggccaatcaggcaaagaactggctgccaggaccctgttaccgccaacaacgcgtctcaacgacaaccgggcaaaacaacaatagcaactttgcctggactgctgggaccaaataccatctgaatggaagaaattcattggctaatcctggcatcgctatggcaacacacaaagacgacgaggagcgtttttttcccagtaacgggatcctgatttttggcaaacaaaatgctgccagagacaatgcggattacagcgatgtcatgctcaccagcgaggaagaaatcaaaaccactaaccctgtggctacagaggaatacggtatcgtggcagataacttgcagcagcaaaacacggctcctcaaattggaactgtcaacagccagggggccttacccggtatggtctggcagaaccgggacgtgtacctgcagggtcccatctgggccaagattcctcacacggacggcaacttccacccgtctccgctgatgggcggctttggcctgaaacatcctccgcctcagatcctgatcaagaacacgcctgtacctgcggatcctccgaccaccttcaaccagtcaaagctgaactctttcatcacgcaatacagcaccggacaggtcagcgtggaaattgaatgggagctgcagaaggaaaacagcaagcgctggaaccccgagatccagtacacctccaactactacaaatctataagtgtggactttgctgttaatacagaaggcgtgtactctgaaccccgccccattggcacccgttacctcacccgtaatctgtaattgcctgttaatcaataaaccggttgattcgtttcagttgaactttggtctctgcgaagggcgaattc

SEQ ID NO: 14 - DNA, 255 bp, Adeno-associated virus 10
ggtaattcctccggaaattggcattgcgattccacatggctgggcgacagagtcatcaccaccagcacccgaacctgggtcctgcccacctacaacaaccacatctacaagcaaatctccagcgagacaggagccaccaacgacaaccactacttcggctacagcaccccctgggggtattttgactttaacagattccactgccacttttcaccacgtgactggcagcgactcatcaacaacaactggggattc

SEQ ID NO: 15 - protein, 738 aa, Adeno-associated virus 10
MAADGYLPDWLEDNLSEGIREWWDLKPGAPKPKANQQKQDDGRGLVLPGYKYLGPFNGLDKGEPVNAADAAALEHDKAYDQQLKAGDNPYLRYNHADAEFQERLQEDTSFGGNLGRAVFQAKKRVLEPLGLVEEAAKTAPGKKRPVEPSPQRSPDSSTGIGKKGQQPAKKRLNFGQTGESESVPDPQPIGEPPAGPSGLGSGTMAAGGGAPMADNNEGADGVGSSSGNWHCDSTWLGDRVITTSTRTWALPTYNNHLYKQISNGTSGGSTNDNTYFGYSTPWGYFDFNRFHCHFSPRDWQRLINNNWGFRPKRLSFKLFNIQVKEVTQNEGTKTIANNLTSTIQVFTDSEYQLPYVLGSAHQGCLPPFPADVFMIPQYGYLTLNNGSQAVGRSSFYCLEYFPSQMLRTGNNFEFSYTFEDVPFHSSYAHSQSLDRLMNPLIDQYLYYLSRTQSTGGTQGTQQLLFSQAGPANMSAQAKNWLPGPCYRQQRVSTTLSQNNNSNFAWTGATKYHLNGRDSLVNPGVAMATHKDDEERFFPSSGVLMFGKQGAGRDNVDYSSVMLTSEEEIKTTNPVATEQYGVVADNLQQANTGPIVGNVNSQGALPGMVWQNRDVYLQGPIWAKIPHTDGNFHPSPLMGGFGLKHPPPQILIKNTPVPADPPTTFSQAKLASFITQYSTGQVSVEIEWELQKENSKRWNPEIQYTSNYYKSTNVDFAVNTEGTYSEPRPIGTRYLTRNL

SEQ ID NO: 16 - protein, 738 aa, Adeno-associated virus 10
MAADGYLPDWLEDNLSEGIREWWDLKPGAPKPKANQQKQDDGRGLVLPGYKYLGPFNGLDKGEPVNAADAAALEHDKAYDQQLKAGDNPYLRYNHADAEFQERLQEDTSFGGNLGRAVFQAKKRVLEPLGLVEEGAKTAPGKKRPVEPSPQRSPDSSTGIGKKGQQPAKKRLNFGQTGDSESVPDPQPIGEPPAGPSGLGSGTMAAGGGAPMADNNEGADGVGSSSGNWHCDSTWLGDRVITTSTRTWALPTYNNHLYKQISNGTSGGSTNDNTYFGYSTPWGYFDFNRFHCHFSPRDWQRLINNNWGFRPKRLNFKLFNIQVKEVTQNEGTKTIANNLTSTIQVFTDSEYQLPYVLGSAHQGCLPPFPADVFMIPQYGYLTLNNGSQAVGRSSFYCLEYFPSQMLRTGNNFEFSYQFEDVPFHSSYAHSQSLDRLMNPLIDQYLYYLSRTQSTGGTAGTQQLLFSQAGPNNMSAQAKNWLPGPCYRQQRVSTTLSQNNNSNFAWTGATKYHLNGRDSLVNPGVAMATHKDDEERFFPSSGVLMFGKQGAGKDNVDYSSVMLTSEEEIKTTNPVATEQYGVVADNLQQQNAAPIVGAVNSQGALPGMVWQNRDVYLQGPIWAKIPHTDGNFHPSPLMGGFGLKHPPPQILIKNTPVPADPPTTFSQAKLASFITQYSTGQVSVEIEWELQKENSKRWNPEIQYTSNYYKSTNVDFAVNTDGTYSEPRPIGTRYLTRNL

SEQ ID NO: 17 - DNA, 258 bp, Adeno-associated virus 11
ggtaattcctccggaaattggcattgcgattccacatggctgggcgacagagtcatcaccaccagcacccgaacctgggccctgccaacctacaacaaccacctctacaaacaaatctccagcgcttcaacgggggccagcaacgacaaccactactttggctacagcaccccctgggggtattttgactttaacagattccactgccacttctcaccacgtgactggcagcgactcatcaacaacaactggggattc

SEQ ID NO: 18 - DNA, 255 bp, Adeno-associated virus 12
ggtaattcctccggaaattggcattgcgattccacatggctgggcgaccgagtcattaccaccagcacccggacttgggccctgcccacctacaacaaccacctctacaagcaaatctccagccaatcgggtgccaccaacgacaaccactacttcggctacagcaccccttgggggtattttgatttcaacagattccactgccatttctcaccacgtgactggcagcgactcatcaacaacaactggggattc

SEQ ID NO: 19 - DNA, 2208 bp, Adeno-associated virus 2
atggctgccgatggttatcttccagattggctcgaggacactctctctgaaggaataagacagtggtggaagctcaaacctggcccaccaccaccaaagcccgcagagcggcataaggacgacagcaggggtcttgtgcttcctgggtacaagtacctcggacccttcaacggactcgacaagggagagccggtcaacgaggcagacgccgcggccctcgagcacgacaaagcctacgaccggcagctcgacagcggagacaacccgtacctcaagtacaaccacgccgacgcggagtttcaggagcgccttaaagaagatacgtcttttgggggcaacctcggacgagcagtcttccaggcgaaaaagagggttcttgaacctctgggcctggttgaggaacctgttaagacggctccgggaaaaaagaggccggtagagcactctcctgtggagccagactcctcctcgggaaccggaaaggcgggccagcagcctgcaagaaaaagattgaattttggtcagactggagacgcagactcagtacctgacccccagcctctcggacagccaccagcagccccctctggtctgggaactaatacgatggctacaggcagtggcgcaccaatggcagacaataacgagggcgccgacggagtgggtaattcctcgggaaattggcattgcgattccacatggatgggcgacagagtcatcaccaccagcacccgaacctgggccctgcccacctacaacaaccacctctacaaacaaatttccagccaatcaggagcctcgaacgacaatcactactttggctacagcaccccttgggggtattttgacttcaacagattccactgccacttttcaccacgtgactggcaaagactcatcaacaacaactggggattccgacccaagagactcaacttcaagctctttaacattcaagtcaaagaggtcacgcagaatgacggtacgacgacgattgccaataaccttaccagcacggttcaggtgtttactgactcggagtaccagctcccgtacgtcctcggctcggcgcatcaaggatgcctcccgccgttcccagcagacgtcttcatggtgccacagtatggatacctcaccctgaacaacgggagtcaggcagtaggacgctcttcattttactgcctggagtactttccttctcagatgctgcgtaccggaaacaactttaccttcagctacacttttgaggacgttcctttccacagcagctacgctcacagccagagtctggaccgtctcatgaatcctctcatcgaccagtacctgtattacttgagcagaacaaacactccaagtggaaccaccacgcagtcaaggcttcagttttctcaggccggagcgagtgacattcgggaccagtctaggaactggcttcctggaccctgttaccgccagcagcgagtatcaaagacatctgcggataacaacaacagtgaatactcgtggactggagctaccaagtaccacctcaatggcagagactctctggtgaatccgggcccggccatggcaagccacaaggacgatgaagaaaagttttttcctcagagcggggttctcatctttgggaagcaaggctcagagaaaacaaatgtggacattgaaaaggtcatgattacagacgaagaggaaatcaggacaaccaatcccgtggctacggagcagtatggttctgtatctaccaacctccagagaggcaacagacaagcagctaccgcagatgtcaacacacaaggcgttcttccaggcatggtctggcaggacagagatgtgtaccttcaggggcccatctgggcaaagattccacacacggacggacattttcacccctctcccctcatgggtggattcggacttaaacaccctcctccacagattctcatcaagaacaccccggtacctgcgaatccttcgaccaccttcagtgcggcaaagtttgcttccttcatcacacagtactccacgggacaggtcagcgtggagatcgagtgggagctgcagaaggaaaacagcaaacgctggaatcccgaaattcagtacacttccaactacaacaagtctgttaatgtggactttactgtggacactaatggcgtgtattcagagcctcgccccattggcaccagatacctgactcgtaatctgtaa

SEQ ID NO: 20 - protein, 735 aa, Adeno-associated virus 2 [sequence omitted]

SEQ ID NO: 21 - protein, 621 aa, Adeno-associated virus 2
MPGFYEIVIKVPSDLDGHLPGISDSFVNWVAEKEWELPPDSDMDLNLIEQAPLTVAEKLQRDFLTEWRRVSKAPEALFFVQFEKGESYFHMHVLVETTGVKSMVLGRFLSQIREKLIQRIYRGIEPTLPNWFAVTKTRNGAGGGNKVVDECYIPNYLLPKTQPELQWAWTNMEQYLSACLNLTERKRLVAQHLTHVSQTQEQNKENQNPNSDAPVIRSKTSARYMELVGWLVDKGITSEKQWIQEDQASYISFNAASNSRSQIKAALDNAGKIMSLTKTAPDYLVGQQPVEDISSNRIYKILELNGYDPQYAASVFLGWATKKFGKRNTIWLFGPATTGKTNIAEAIAHTVPFYGCVNWTNENFPFNDCVDKMVIWWEEGKMTAKVVESAKAILGGSKVRVDQKCKSSAQIDPTPVIVTSNTNMCAVIDGNSTTFEHQQPLQDRMFKFELTRRLDHDFGKVTKQEVKDFFRWAKDHVVEVEHEFYVKKGGAKKRPAPSDADISEPKRVRESVAQPSTSDAEASINYADRYQNKCSRHVGMNLMLFPCRQCERMNQNSNICFTHGQKDCLECFPVSESQPVSVVKKAYQKLCYIHHIMGKVPDACTACDLVNVDLDDCIFEQ

SEQ ID NO: 22 - DNA, 4675 bp, Adeno-associated virus 2
ttggccactccctctctgcgcgctcgctcgctcactgaggccgggcgaccaaaggtcgcccgacgcccgggctttgcccgggcggcctcagtgagcgagcgagcgcgcagagagggagtggccaactccatcactaggggttcctggaggggtggagtcgtgacgtgaattacgtcatagggttagggaggtcctgtattagaggtcacgtgagtgttttgcgacattttgcgacaccatgtggtcacgctgggtatttaagcccgagtgagcacgcagggtctccattttgaagcgggaggtttgaacgcgcagccgccatgccggggttttacgagattgtgattaaggtccccagcgaccttgacgggcatctgcccggcatttctgacagctttgtgaactgggtggccgagaaggaatgggagttgccgccagattctgacatggatctgaatctgattgagcaggcacccctgaccgtggccgagaagctgcagcgcgactttctgacggaatggcgccgtgtgagtaaggccccggaggcccttttctttgtgcaatttgagaagggagagagctacttccacatgcacgtgctcgtggaaaccaccggggtgaaatccatggttttgggacgtttcctgagtcagattcgcgaaaaactgattcagagaatttaccgcgggatcgagccgactttgccaaactggttcgcggtcacaaagaccagaaatggcgccggaggcgggaacaaggtggtggatgagtgctacatccccaattacttgctccccaaaacccagcctgagctccagtgggcgtggactaatatggaacagtatttaagcgcctgtttgaatctcacggagcgtaaacggttggtggcgcagcatctgacgcacgtgtcgcagacgcaggagcagaacaaagagaatcagaatcccaattctgatgcgccggtgatcagatcaaaaacttcagccaggtacatggagctggtcgggtggctcgtggacaaggggattacctcggagaagcagtggatccaggaggaccaggcctcatacatctccttcaatgcggcctccaactcgcggtcccaaatcaaggctgccttggacaatgcgggaaagattatgagcctgactaaaaccgcccccgactacctggtgggccagcagcccgtggaggacatttccagcaatcggatttataaaattttggaactaaacgggtacgatccccaatatgcggcttccgtctttctgggatgggccacgaaaaagttcggcaagaggaacaccatctggctgtttgggcctgcaactaccgggaagaccaacatcgcggaggccatagcccacactgtgcccttctacgggtgcgtaaactggaccaatgagaactttcccttcaacgactgtgtcgacaagatggtgatctggtgggaggaggggaagatgaccgccaaggtcgtggagtcggccaaagccattctcggaggaagcaaggtgcgcgtggaccagaaatgcaagtcctcggcccagatagacccgactcccgtgatcgtcacctccaacaccaacatgtgcgccgtgattgacgggaactcaacgaccttcgaacaccagcagccgttgcaagaccggatgttcaaatttgaactcacccgccgtctggatcatgactttgggaaggtcaccaagcaggaagtcaaagactttttccggtgggcaaaggatcacgtggttgaggtggagcatgaattctacgtcaaaaagggtggagccaagaaaagacccgcccccagtgacgcagatataagtgagcccaaacgggtgcgcgagtcagttgcgcagccatcgacgtcagacgcggaagcttcgatcaactacgcagacaggtaccaaaacaaatgttctcgtcacgtgggcatgaatctgatgctgtttccctgcagacaatgcgagagaatgaatcagaattcaaatatctgcttcactcacggacagaaagactgtttagagtgctttcccgtgtcagaatctcaacccgtttctgtcgtcaaaaaggcgtatcagaaactgtgctacattcatcatatcatgggaaaggtgccagacgcttgcactgcctgcgatctggtcaatgtggatttggatgactgcatctttgaacaataaatgatttaaatcaggtatggctgccgatggttatcttccagattggctcgaggacactctctctgaaggaataagacagtggtggaagctcaaacctggcccaccaccaccaaagcccgcagagcggcataaggacgacagcaggggtcttgtgcttcctgggtacaagtacctcggacccttcaacggactcgacaagggagagccggtcaacgaggcagacgccgcggccctcgagcacgtacaaagcctacgaccggcagctcgacagcggagacaacccgtacctcaagtacaaccacgccgacgcggagtttcaggagcgccttaaagaagatacgtcttttgggggcaacctcggacgagcagtcttccaggcgaaaaagagggttcttgaacctctgggcctggttgaggaacctgttaagacggctccgggaaaaaagaggccggtagagcactctcctgtggagccagactcctcctcgggaaccggaaaggcgggccagcagcctgcaagaaaaagattgaattttggtcagactggagacgcagactcagtacctgacccccagcctctcggacagccaccagcagccccctctggtctgggaactaatacgatggctacaggcagtggcgcaccaatggcagacaataacgagggcgccgacggagtgggtaattcctccggaaattggcattgcgattccacatggatgggcgacagagtcatcaccaccagcacccgaacctgggccctgcccacctacaacaaccacctctacaaacaaatttccagccaatcaggagcctcgaacgacaatcactactttggctacagcaccccttgggggtattttgacttcaacagattccactgccacttttcaccacgtgactggcaaagactcatcaacaacaactggggattccgacccaagagactcaacttcaagctctttaacattcaagtcaaagaggtcacgcagaatgacggtacgacgacgattgccaataaccttaccagcacggttcaggtgtttactgactcggagtaccagctcccgtacgtcctcggctcggcgcatcaaggatgcctcccgccgttcccagcagacgtcttcatggtgccacagtatggatacctcaccctgaacaacgggagtcaggcagtaggacgctcttcattttactgcctggagtactttccttctcagatgctgcgtaccggaaacaactttaccttcagctacacttttgaggacgttcctttccacagcagctacgctcacagccagagtctggaccgtctcatgaatcctctcatcgaccagtacctgtattacttgagcagaacaaacactccaagtggaaccaccacgcagtcaaggcttcagttttctcaggccggagcgagtgacattcgggaccagtctaggaactggcttcctggaccctgttaccgccagcagcgagtatcaaagacatctgcggataacaacaacagtgaatactcgtggactggagctaccaagtaccacctcaatggcagagactctctggtgaatccggccatggcaagccacaaggacgatgaagaaaagttttttcctcagagcggggttctcatctttgggaagcaaggctcagagaaaacaaatgtgaacattgaaaaggtcatgattacagacgaagaggaaatcggaacaaccaatcccgtggctacggagcagtatggttctgtatctaccaacctccagagaggcaacagacaagcagctaccgcagatgtcaacacacaaggcgttcttccaggcatggtctggcaggacagagatgtgtaccttcaggggcccatctgggcaaagattccacacacggacggacattttcacccctctcccctcatgggtggattcggacttaaacaccctcctccacagattctcatcaagaacaccccggtacctgcgaatccttcgaccaccttcagtgcggcaaagtttgcttccttcatcacacagtactccacgggacacggtcagcgtggagatcgagtgggagctgcagaaggaaaacagcaaacgctggaatcccgaaattcagtacacttccaactacaacaagtctgttaatcgtggacttaccgtggatactaatggcgtgtattcagagcctcgccccattggcaccagatacctgactcgtaatctgtaattgcttgttaatcaataaaccgtttaattcgtttcagttgaactttggtctctgcgtatttctttcttatctagtttccatggctacgtagataagtagcatggcgggttaatcattaactacaaggaacccctagtgatggagttggccactccctctctgcgcgctcgctcgctcactgaggccgggcgaccaaaggtcgcccgacgcccgggctttgcccgggcggcctcagtgagcgagcgagcgcgcagagagggagtggccaa

SEQ ID NO: 23 - DNA, 4679 bp, Adeno-associated virus 2
ttggccactccctctctgcgcgctcgctcgctcactgaggccgggcgaccaaaggtcgcccgacgcccgggctttgcccgggcggcctcagtgagcgagcgagcgcgcagagagggagtggccaactccatcactaggggttcctggaggggtggagtcgtgacgtgaattacgtcatagggttagggaggtcctgtattagaggtcacgtgagtgttttgcgacattttgcgacaccatgtggtcacgctgggtatttaagcccgagtgagcacgcagggtctccattttgaagcgggaggtttgaacgcgcagccgccatgccggggttttacgagattgtgattaaggtccccagcgaccttgacgggcatctgcccggcatttctgacagctttgtgaactgggtggccgagaaggaatgggagttgccgccagattctgacatggatctgaatctgattgagcaggcacccctgaccgtggccgagaagctgcagcgcgactttctgacggaatggcgccgtgtgagtaaggccccggaggcccttttctttgtgcaatttgagaagggagagagctacttccacatgcacgtgctcgtggaaaccaccggggtgaaatccatggttttgggacgtttcctgagtcagattcgcgaaaaactgattcagagaatttaccgcgggatcgagccgactttgccaaactggttcgcggtcacaaagaccagaaatggcgccggaggcgggaacaaggtggtggatgagtgctacatccccaattacttgctccccaaaacccagcctgagctccagtgggcgtggactaatatggaacagtatttaagcgcctgtttgaatctcacggagcgtaaacggttggtggcgcagcatctgacgcacgtgtcgcagacgcaggagcagaacaaagagaatcagaatcccaattctgatgcgccggtgatcagatcaaaaacttcagccaggtacatggagctggtcgggtggctcgtggacaaggggattacctcggagaagcagtggatccaggaggaccaggcctcatacatctccttcaatgcggcctccaactcgcggtcccaaatcaaggctgccttggacaatgcgggaaagattatgagcctgactaaaaccgcccccgactacctggtgggccagcagcccgtggaggacatttccagcaatcggatttataaaattttggaactaaacgggtacgatccccaatatgcggcttccgtctttctgggatgggccacgaaaaagttcggcaagaggaacaccatctggctgtttgggcctgcaactaccgggaagaccaacatcgcggaggccatagcccacactgtgcccttctacgggtgcgtaaactggaccaatgagaactttcccttcaacgactgtgtcgacaagatggtgatctggtgggaggaggggaagatgaccgccaaggtcgtggagtcggccaaagccattctcggaggaagcaaggtgcgcgtggaccagaaatgcaagtcctcggcccagatagacccgactcccgtgatcgtcacctccaacaccaacatgtgcgccgtgattgacgggaactcaacgaccttcgaacaccagcagccgttgcaagaccggatgttcaaatttgaactcacccgccgtctggatcatgactttgggaaggtcaccaagcaggaagtcaaagactttttccggtgggcaaaggatcacgtggttgaggtggagcatgaattctacgtcaaaaagggtggagccaagaaaagacccgcccccagtgacgcagatataagtgagcccaaacgggtgcgcgagtcagttgcgcagccatcgacgtcagacgcggaagcttcgatcaactacgcagacaggtaccaaaacaaatgttctcgtcacgtgggcatgaatctgatgctgtttccctgcagacaatgcgagagaatgaatcagaattcaaatatctgcttcactcacggacagaaagactgtttagagtgctttcccgtgtcagaatctcaacccgtttctgtcgtcaaaaaggcgtatcagaaactgtgctacattcatcatatcatgggaaaggtgccagacgcttgcactgcctgcgatctggtcaatgtggatttggatgactgcatctttgaacaataaatgatttaaatcaggtatggctgccgatggttatcttccagattggctcgaggacactctctctgaaggaataagacagtggtggaagctcaaacctggcccaccaccaccaaagcccgcagagcggcataaggacgacagcaggggtcttgtgcttcctgggtacaagtacctcggacccttcaacggactcgacaagggagagccggtcaacgaggcagacgccgcggccctcgagcacgacaaagcctacgaccggcagctcgacagcggagacaacccgtacctcaagtacaaccacgccgacgcggagtttcaggagcgccttaaagaagatacgtcttttgggggcaacctcggacgagcagtcttccaggcgaaaaagagggttcttgaacctctgggcctggttgaggaacctgttaagacggctccgggaaaaaagaggccggtagagcactctcctgtggagccagactcctcctcgggaaccggaaaggcgggccagcagcctgcaagaaaaagattgaattttggtcagactggagacgcagactcagtacctgacccccagcctctcggacagccaccagcagccccctctggtctgggaactaatacgatggctacaggcagtggcgcaccaatggcagacaataacgagggcgccgacggagtgggtaattcctccggaaattggcattgcgattccacatggatgggcgacagagtcatcaccaccagcacccgaacctgggccctgcccacctacaacaaccacctctacaaacaaatttccagccaatcaggagcctcgaacgacaatcactactttggctacagcaccccttgggggtattttgacttcaacagattccactgccacttttcaccacgtgactggcaaagactcatcaacaacaactggggattccgacccaagagactcaacttcaagctctttaacattcaagtcaaagaggtcacgcagaatgacggtacgacgacgattgccaataaccttaccagcacggttcaggtgtttactgactcggagtaccagctcccgtacgtcctcggctcggcgcatcaaggatgcctcccgccgttcccagcagacgtcttcatggtgccacagtatggatacctcaccctgaacaacgggagtcaggcagtaggacgctcttcattttactgcctggagtactttccttctcagatgctgcgtaccggaaacaactttaccttcagctacacttttgaggacgttcctttccacagcagctacgctcacagccagagtctggaccgtctcatgaatcctctcatcgaccagtacctgtattacttgagcagaacaaacactccaagtggaaccaccacgcagtcaaggcttcagttttctcaggccggagcgagtgacattcgggaccagtctaggaactggcttcctggaccctgttaccgccagcagcgagtatcaaagacatctgcggataacaacaacagtgaatactcgtggactggagctaccaagtaccacctcaatggcagagactctctggtgaatccgggcccggccatggcaagccacaaggacgatgaagaaaagttttttcctcagagcggggttctcatctttgggaagcaaggctcagagaaaacaaatgtggacattgaaaaggtcatgattacagacgaagaggaaatcaggacaaccaatcccgtggctacggagcagtatggttctgtatctaccaacctccagagaggcaacagacaagcagctaccgcagatgtcaacacacaaggcgttcttccaggcatggtctggcaggacagagatgtgtaccttcaggggcccatctgggcaaagattccacacacggacggacattttcacccctctcccctcatgggtggattcggacttaaacaccctcctccacagattctcatcaagaacaccccggtacctgcgaatccttcgaccaccttcagtgcggcaaagtttgcttccttcatcacacagtactccacgggacaggtcagcgtggagatcgagtgggagctgcagaaggaaaacagcaaacgctggaatcccgaaattcagtacacttccaactacaacaagtctgttaatgtggactttactgtggacactaatggcgtgtattcagagcctcgccccattggcaccagatacctgactcgtaatctgtaattgcttgttaatcaataaaccgtttaattcgtttcagttgaactttggtctctgcgtatttctttcttatctagtttccatggctacgtagataagtagcatggcgggttaatcattaactacaaggaacccctagtgatggagttggccactccctctctgcgcgctcgctcgctcactgaggccgggcgaccaaaggtcgcccgacgcccgggctttgcccgggcggcctcagtgagcgagcgagcgcgcagagagggagtggccaa

SEQ ID NO: 24 - protein, 725 aa, Adeno-associated virus-5
MAADGYLPDWLEDTLSEGIRQWWKLKPGPPPPKPAERHKDDSRGLVLPGYKYLGPFNGLDKGEPVNEADAAALEHDKAYDRQLDSGDNPYLKYNHADAEFQERLKEDTSFGGNLGRAVFQAKKRVLEPFGLVEEGAKTAPTGKRIDDHFPKRKKARTEEDSKPSTSSDAEAGPSGSQQLQIPAQPASSLGADTMSAGGGGPLGDNNQGADGVGNASGDWHCDSTWMGDRVVTKSTRTWVLPSYNNHQYREIKSGSVDGSNANAYFGYSTPWGYFDFNRFHSHWSPRDWQRLINNYWGFRPRSLRVKIFNIQVKEVTVQDSTTTIANNLTSTVQVFTDDDYQLPYVVGNGTEGCLPAFPPQVFTLPQYGYATLNRDNTENPTERSSFFCLEYFPSKMLRTGNNFEFTYNFEEVPFHSSFAPSQNLFKLANPLVDQYLYRFVSTNNTGGVQFNKNLAGRYANTYKNWFPGPMGRTQGWNLGSGVNRASVSAFATTNRMELEGASYQVPPQPNGMTNNLQGSNTYALENTMIFNSQPANPGTTATYLEGNMLITSESETQPVNRVAYNVGGQMATNNQSSTTAPTTGTYNLQEIVPGSVWMERDVYLQGPIWAKIPETGAHFHPSPAMGGFGLKHPPPMMLIKNTPVPGNITSFSDVPVSSFITQYSTGQVTVEMEWELKKENSKRWNPEIQYTNNYNDPQFVDFAPDSTGEYRTTRPIGTRYLTRPL

SEQ ID NO: 25 - protein, 644 aa, Artificial Sequence
  source: /note="Description of Artificial Sequence: Synthetic polypeptide"
  MOD_RES (434)..(434): Any amino acid
KAYDQQLKAGDNPYLRYNHADAEFQERLQEDTSFGGNLGRAVFQAKKRVLEPLGLVETPAKTAPGKKRPVDSPDSTSGIGKKGQQPAKKRLNFGQTGDSESVPDPQPIGEPPAGPSGLGSGTMAAGGGAPMADNNEGADGVGNASGNWHCDSTWLGDRVITTSTRTWALPTYNNHLYKQISSQSAGSTNDNVYFGYSTPWGYFDFNRFHCHFSPRDWQRLINNNWGFRPKKLNFKLFNIQVKEVTTNDGVTTIANNLTSTVQVFSDSEYQLPYVLGSAHQGCLPPFPADVFMIPQYGYLTLNNGSQSVGRSSFYCLEYFPSQMLRTGNNFTFSYTFEDVPFHSSYAHSQSLDRLMNPLIDQYLYYLARTQSNAGGTAGNRELQFYQGGPTTMAEQAKNWLPGPCFRQQRVSKTLDQNNNSNFAWTGATKYHLNXRNSLVNPGVAMATHKDDEERFFPSSGVLIFGKTGAANKTTLENVLMTNEEEIRPTNPVATEEYGIVSSNLQAASTAAQTQVVNNQGALPGMVWQNRDVYLQGPIWAKIPHTDGNFHPSPLMGGFGLKHPPPQILIKNTPVPANPPEVFTPAKFASFITQYSTGQVSVEIEWELQKENSKRWNPEIQYTSNFDKQTGVDFAVDSQGVYSEP

SEQ ID NO: 26 - DNA, 1933 bp, Artificial Sequence
  source: /note="Description of Artificial Sequence: Synthetic polynucleotide"
caaggcctacgaccagcagctcaaagcgggtgacaatccgtacctgcggtataaccacgccgacgccgagtttcaggagtgtcttcaagaagatacgtcttttgggggcaacctcgggcgagcagtcttccaggccaaaaagcgggttctcgaacctcttggtctggttgagacgccagctaagacggcacctggaaagaagcgaccggtagactcgccagactccacctcgggcatcggcaagaaaggccagcagcccgcgaaaaagagactcaactttgggcagactggcgactcagagtcagtccccgaccctcaaccaatcggagaaccaccagcaggcccctctggtctgggatctggtacaatggttgcaggcggtggcgcaccaatggctgacaataacgagggcgccgacggagtgggtaatgcctcaggaaattggcattgcgattccacatggctgggcgacagagtcatcaccaccagcacccgaacctgggccctgcccacctacaacaaccacctctacaagcaaatctccagtcagtcagcagggagcaccaacgataacgtctatttcggctacagcaccccctgggggtattttgacttcaacagattccattgccacttctcaccacgtgactggcagcgacttatcaacaacaactggggattccggcccaagaagctcaacttcaagctcttcaacatccaggtcaaggaggtcacgacgaatgacggtgtcacaaccatcgctaataaccttaccagcacggttcaggtcttttcggactcggaatatcaactgccgtacgtcctcggctccgcgcaccagggctgcctgcctccgttcccggcagacgtgttcatgattccgcagtacggatacctgactctgaacaatggcagccaatcggtaggccgttcctccttctactgcctggagtactttccttctcagatgctgagaacgggcaacaacttcacctttagctacaccttcgaggacgtgcctttccacagcagctacgcgcacagccagagtctggaccggctgatgaatcccctcatcgaccagtacctgtactacttggccagaacacagagcaacgcaggaggtactgctggcaatcgggaactgcagttttatcagggcggacctaccaccatggccgaacaagcaaagaactggctgcccggaccttgcttccggcaacagagagtatccaagacgctggatcaaaataacaacagcaactttgcctggactggtgccacaaaataccatttaaatggaagaaattcattggttaatcccggtgtcgccatggcaacccacaaggacgacgaggaacgcttctccccttcgagcggagttctaatttttggcaaaactggagcagctaataaaactacattagaaaacgtgctcatgacaaatgaagaagaaattcgtcctaccaacccggtagctaccgaggaatacgggattgtaagcagcaacttgcaggcggctagcaccgcagcccagacacaagttgttaacaaccagggagccttacctggcatggtctggcagaaccgggacgtgtacctgcaaggtcccatttgggccaagattcctcacacggacggcaactttcacccgtctcctctaatgggtggctttggactgaaacacccgcctccccagatcctgatcaaaaacacgccggtacctgctaatcctccagaagtgtttactcctgccaagtttgcttccttcatcacgcagtacagcaccgggcaagtcagcgttgagatcgagtgggagctgcagaaagagaacagcaagcgctggaacccagagattcagtacacctccaactttgacaaacagactggagtggactttgctgttgacagccagggtgtttactctgagcct

SEQ ID NO: 27 - protein, 644 aa, Artificial Sequence
  source: /note="Description of Artificial Sequence: Synthetic polypeptide"
KAYDQQLKAGDNPYLRYNHADAEFQECLQEDTSFGGNLGRAVFQAKKRVLEPLGLVETPAKTAPGKKRPVDSPDSTSGIGKKGQQPAKKRLNFGQTGDSESVPDPQPIGEPPAGPSGLGSGTMVAGGGAPMADNNEGADGVGNASGNWHCDSTWLGDRVITTSTRTWALPTYNNHLYKQISSQSAGSTNDNVYFGYSTPWGYFDFNRFHCHFSPRDWQRLINNNWGFRPKKLNFKLFNIQVKEVTTNDGVTTIANNLTSTVQVFSDSEYQLPYVLGSAHQGCLPPFPADVFMIPQYGYLTLNNGSQSVGRSSFYCLEYFPSQMLRTGNNFTFSYTFEDVPFHSSYAHSQSLDRLMNPLIDQYLYYLARTQSNAGGTAGNRELQFYQGGPTTMAEQAKNWLPGPCFRQQRVSKTLDQNNNSNFAWTGATKYHLNGRNSLVNPGVAMATHKDDEERFSPSSGVLIFGKTGAANKTTLENVLMTNEEEIRPTNPVATEEYGIVSSNLQAASTAAQTQVVNNQGALPGMVWQNRDVYLQGPIWAKIPHTDGNFHPSPLMGGFGLKHPPPQILIKNTPVPANPPEVFTPAKFASFITQYSTGQVSVEIEWELQKENSKRWNPEIQYTSNFDKQTGVDFAVDSQGVYSEP

SEQ ID NO: 28 - DNA, 1933 bp, Artificial Sequence
  source: /note="Description of Artificial Sequence: Synthetic polynucleotide"
caaggcctacgaccagcagctcaaagcgggtgacaatccgtacctgcggtataaccacgccgacgccgagtttcaggagcgtcttcaagaagatacgtcttttgggggcaacctcgggcgagcagtcttccaggccaaaaagcgggttctcgaacctcttggtctggttgagacgccagctaagacggcacctggaaagaagcgaccggtagactcgccagactccacctcgggcatcggcaagaaaggccagcagcccgcgaaaaagagactcaactttgggcagactggcgactcagagccagtccccgaccctcaaccaatcggagaaccaccagcaggcccctctggtctgggatctggtacaatggctgcaggcggtggcgcaccaatggctgacaataacgagggcgccgacggagtgggtaatgcctcaggaaattggcattgcgattccacacggctgggcgacagagtcatcaccaccagcacccgaacctgggccctgcccacctacaacaaccacctctacaagcaaatctccagtcagtcagcagggagcaccaacgataacgtctatttcggctacagcaccccctgggggtattttgacttcaacagattccattgccacttctcaccacgtgactggcagcgacttatcaacaacaactggggattccggcccaagaagctcaacttcaagctcttcaacatccaggtcaaggaggtcacgacgaatgacggcgtcacaaccatcgctaataaccttaccagcacggttcaggtcttttcggactcggaatatcaactgccgtacgtcctcggctccgcgcaccagggctgcctgcctccgttcccggcagacgtgttcatgattccgcagtacggatacctgactctgaacaatggcagccaatcggtaggccgttcctccttctactgcctggagtactttccttctcagatgctgagaacgggcaacaacttcacctttagctacaccttcgaggacgtgcctttccacagcagctacgcgcacagccagagtctgggccggctgatgaatcccctcatcgaccagtacctgtactacttggccagaacacagagcaacgcaggaggtactgctggcaatcgggaactgcagttttatcagggcggacctaccaccatggccgaacaagcaaagaactggctgcccggaccttgcttccggcaacagagagtatccaagacgctggatcaaaataacaacagcaactttgcctggactggtgccacaaaataccatttaaatggaagaaattcattggttaatcccggtgtcgccatggcaacccacaaggacgacgaggaacgcttcttcccttcgagcggagttctaatttttggcaaaactggagcagctaataaaactacattagaaaacgtgctcatgacaaatgaagaagaaattcgtcctaccaacccggtagctaccgaggaatacgggattgtaagcagcaacttgcaggcggctagcaccgcagcccagacacaagttgttaacaaccagggagccttacctggcatggtctggcagaaccgggacgtgtacctgcaaggtcccatttgggccaagattcctcacacggacggcaactttcacccgtctcctctaatgggtggctttggactgaaacacccgcctccccagatcctgatcaaaaacacaccggtacctgctaatcctccagaagtgtttactcctgccaagtttgcttccttcatcacgcagtacagcaccgggcaagtcagcgttgagatcgaatgggagctgcagaaagagaacagcaagcgctggaacccagagattcagtacacctccaactttgacaaacagactggagtggactttgctgttgacagccagggtgtttactctgagcct

SEQ ID NO: 29 - protein, 644 aa, Artificial Sequence
  source: /note="Description of Artificial Sequence: Synthetic polypeptide"
KAYDQQLKAGDNPYLRYNHADAEFQERLQEDTSFGGNLGRAVFQAKKRVLEPLGLVETPAKTAPGKKRPVDSPDSTSGIGKKGQQPAKKRLNFGQTGDSEPVPDPQPIGEPPAGPSGLGSGTMAAGGGAPMADNNEGADGVGNASGNWHCDSTRLGDRVITTSTRTWALPTYNNHLYKQISSQSAGSTNDNVYFGYSTPWGYFDFNRFHCHFSPRDWQRLINNNWGFRPKKLNFKLFNIQVKEVTTNDGVTTIANNLTSTVQVFSDSEYQLPYVLGSAHQGCLPPFPADVFMIPQYGYLTLNNGSQSVGRSSFYCLEYFPSQMLRTGNNFTFSYTFEDVPFHSSYAHSQSLGRLMNPLIDQYLYYLARTQSNAGGTAGNRELQFYQGGPTTMAEQAKNWLPGPCFRQQRVSKTLDQNNNSNFAWTGATKYHLNGRNSLVNPGVAMATHKDDEERFFPSSGVLIFGKTGAANKTTLENVLMTNEEEIRPTNPVATEEYGIVSSNLQAASTAAQTQVVNNQGALPGMVWQNRDVYLQGPIWAKIPHTDGNFHPSPLMGGFGLKHPPPQILIKNTPVPANPPEVFTPAKFASFITQYSTGQVSVEIEWELQKENSKRWNPEIQYTSNFDKQTGVDFAVDSQGVYSEP

SEQ ID NO: 30 - DNA, 1933 bp, Artificial Sequence; identical to SEQ ID NO: 28
  source: /note="Description of Artificial Sequence: Synthetic polynucleotide"

SEQ ID NO: 31 - protein, 644 aa, Artificial Sequence; identical to SEQ ID NO: 29
  source: /note="Description of Artificial Sequence: Synthetic polypeptide"

SEQ ID NO: 32 - DNA, 1933 bp, Artificial Sequence
  source: /note="Description of Artificial Sequence: Synthetic polynucleotide"
caaggcctacgaccagcagctcaaagcgggtgacaatccgtacctgcggtataaccacgccgacgccgagtttcaggagcgtcttcaagaagatacgtcttttgggggcaacctcgggcgagcagtcttccaggccaaaaagcgggttctcgaacctcttggtctggttgagacgccagctaagacggcacctggaaagaagcgaccggtagactcgccagactccacctcgggcatcggcaagaaaggccagcagcccgcgaaaaagagactcaactttgggcagactggcgactcagagtcagtccccgaccctcaaccaatcggagaaccaccagcaggcccctctggtctgggatctggtacaatggctgcaggcggtggcgcaccaatggctgacaatagcgagggcgccgacggagtgggtaatgcctcaggaaattggcattgcgattccacatggctgggcgacagagtcatcaccaccagcacccgaacctgggccctgcccacctacaacaaccacctctacaagcaaatctccagtcagtcagcagggagcaccaacgataacgtctatttcggctacagcaccccctgggggtattttgacttcaacagattccattgccacttctcaccacgtgactggcagcgacttatcaacaacaactggggattccggcccaagaagctcaacttcaagctcttcaacatccaggtcaaggaggtcacgacgaatgacggtgtcacaaccatcgctaataaccttaccagcacggttcaggtcttttcggactcggaatatcaactgccgtacgtcctcggctccgcgcaccagggctgcctgcctccgttcccggcagacgtgttcatgattccgcagtacggatacctgactctgaacaatggcagccaatcggtaggccgttcctccttctactgcctggagtactttccttctcagatgctgagaacgggcaacaacttcacctttagctacaccttcgaggacgtgcctttccacagcagctacgcgcacagccagagtctggaccggctgatgaatcccctcatcgaccagtacctgtactacttggccagaacacagagcaacgcaggaggtactgctggcaatcgggaactgcagttttatcagggcggacctaccaccatggccgaacaagcaaagaactggctgcccggaccttgcttccggcaacagagagtatccaagacgctggatcaaaataacaacagcaactttgcctggactggtgccacaaaataccatttaaatggaagaaattcattggttaatcccggtgtcgccatggcaacccacaaggacgacgaggaacgcttcttcccttcgagcggagttctaatttttggcaaaactggagcagctaataaaactacattagaaaacgtgctcatgacaaatgaagaagaaattcgtcctaccaacccggtagctaccgaggaatacgggattgtaagcagcaacttgcaggcggctagcaccgcagcccagacacaagttgttaacaaccagggagccttacctggcatggtctggcagaaccgggacgtgtacctgcaaggtcccatttgggccaagattcctcacacggacggcaactttcacccgtctcctctaatgggtggctttggactgaaacacccgcctccccagatcctgatcaaaaacacaccggtacctgctaatcctccagaagtgtttactcctgccaagcttgcttccttcatcacgcagtacagcaccgggcaagtcagcgttgagatcgagtgggagctgcagaaagagaacagcaagcgctggaacccagagattcagtacacctccaactttgacaaacagactggagtggactttgctgttgacagccagggtgtttactctgagcct

SEQ ID NO: 33 - protein, 644 aa, Artificial Sequence
  source: /note="Description of Artificial Sequence: Synthetic polypeptide"
KAYDQQLKAGDNPYLRYNHADAEFQERLQEDTSFGGNLGRAVFQAKKRVLEPLGLVETPAKTAPGKKRPVDSPDSTSGIGKKGQQPAKKRLNFGQTGDSESVPDPQPIGEPPAGPSGLGSGTMAAGGGAPMADNSEGADGVGNASGNWHCDSTWLGDRVITTSTRTWALPTYNNHLYKQISSQSAGSTNDNVYFGYSTPWGYFDFNRFHCHFSPRDWQRLINNNWGFRPKKLNFKLFNIQVKEVTTNDGVTTIANNLTSTVQVFSDSEYQLPYVLGSAHQGCLPPFPADVFMIPQYGYLTLNNGSQSVGRSSFYCLEYFPSQMLRTGNNFTFSYTFEDVPFHSSYAHSQSLDRLMNPLIDQYLYYLARTQSNAGGTAGNRELQFYQGGPTTMAEQAKNWLPGPCFRQQRVSKTLDQNNNSNFAWTGATKYHLNGRNSLVNPGVAMATHKDDEERFFPSSGVLIFGKTGAANKTTLENVLMTNEEEIRPTNPVATEEYGIVSSNLQAASTAAQTQVVNNQGALPGMVWQNRDVYLQGPIWAKIPHTDGNFHPSPLMGGFGLKHPPPQILIKNTPVPANPPEVFTPAKLASFITQYSTGQVSVEIEWELQKENSKRWNPEIQYTSNFDKQTGVDFAVDSQGVYSEP

SEQ ID NO: 34 - DNA, 1933 bp, Artificial Sequence
  source: /note="Description of Artificial Sequence: Synthetic polynucleotide"
caaggcctacgaccagcagctcaaagcgggtgacaatccgtacctgcggtataaccacgccgacgccgagtttcaggagcgtcttcaagaagatacgtcttttgggggcaacctcgggcgagcagtcttccaggccaaaaagcgggttctcgaacctcttggtctggttgagacgccagctaagacggcacctggaaagaagcgaccggtagactcgccagactccacctcgggcatcggcaagaaaggccagcagcccgcgaaaaagagactcaactttgggcagactggcgactcagagtcagtccccgaccctcaaccaatcggagaaccaccagcaggcccctctggtctgggatctggtacaatggctgcaggcggtggcgcaccaatggctgacaataacgagggcgccgacggagtgggtaatgcctcaggaaattggcattgcgattccacatggctgggcgacagagtcatcaccaccagcacccgaacctgggccctgcccacctacaacaaccacctctacaagcaaatctccagtcagtcagcagggagcaccaacgataacgtctatttcggctacagcaccccctgggggtattttgacttcaacagattccattgccacttctcaccacgtgactggcagcgacttatcaacaacaactggggattccggcccaagaagctcaacttcaagctcttcaacatccaggtcaaggaggtcacgacgaatgacggcgtcacaaccatcgctaataaccttaccagcacggttcaggtcttttcggacccggaatatcaactgccgtacgtcctcggctccgcgcaccagggctgcctgcctccgttcccggcagacgtgttcatgattccgcagtacggatacctgactctgaacaatggcagccaatcggtaggccgttcctccttctactgcctggagtactttccttctcagatgctgagaacgggcaacaacttcacctttagctacaccttcgaggacgtgcctttccacagcagctacgcgcacagccagagtctggaccggctgatgaatcccctcatcgaccagtacctgtactacttggccagaacacagagcaacgcaggaggtactgctggcaatcgggaactgcagttttatcagggcggacctaccaccatggccgaacaagcaaagaactggctgcccggaccttgcttccggcaacagagagtatccaagacgctggatcaaaataacaacagcaactttgcctggactggtgccacaaaataccatttaaatggaagaaattcattggttaatcccggtgtcgccatggcaacccacaaggacgacgaggaacgcttcttcccttcgagcggagttctaatttttggcaaaactggagcagctaataaaactacattagaaaacgtgctcatgacaaatgaagaagaaattcgtcctaccaacccggtagctaccgaggaatacgggattgtaagcagcaacttgcaggcggctagcaccgcagcccagacacaagttgttaacaaccagggagccttacctggcatggtctggcagaaccgggacgtgtacctgcaaggtcccatttgggccaagattcctcacacggacggcaactttcacccgtctcctctaatgggtggctttggactgaaacacccgcctccccagatcctgatcaaaaacacaccggtacctgctaatcctccagaagtgtttactcctgccaagattgcttccttcatcacgcagtacagcaccgggcaagtcagcgttgagatcgagtgggagctgcagaaagagaacagcaagcgctggaacccagagattcagtacacctccaactttgacaaacagactggagtggactttgctgttgacagccagggtgtttactctgagcct

SEQ ID NO: 35 - protein, 644 aa, Artificial Sequence
  source: /note="Description of Artificial Sequence: Synthetic polypeptide"
KAYDQQLKAGDNPYLRYNHADAEFQERLQEDTSFGGNLGRAVFQAKKRVLEPLGLVETPAKTAPGKKRPVDSPDSTSGIGKKGQQPAKKRLNFGQTGDSESVPDPQPIGEPPAGPSGLGSGTMAAGGGAPMADNNEGADGVGNASGNWHCDSTWLGDRVITTSTRTWALPTYNNHLYKQISSQSAGSTNDNVYFGYSTPWGYFDFNRFHCHFSPRDWQRLINNNWGFRPKKLNFKLFNIQVKEVTTNDGVTTIANNLTSTVQVFSDPEYQLPYVLGSAHQGCLPPFPADVFMIPQYGYLTLNNGSQSVGRSSFYCLEYFPSQMLRTGNNFTFSYTFEDVPFHSSYAHSQSLDRLMNPLIDQYLYYLARTQSNAGGTAGNRELQFYQGGPTTMAEQAKNWLPGPCFRQQRVSKTLDQNNNSNFAWTGATKYHLNGRNSLVNPGVAMATHKDDEERFFPSSGVLIFGKTGAANKTTLENVLMTNEEEIRPTNPVATEEYGIVSSNLQAASTAAQTQVVNNQGALPGMVWQNRDVYLQGPIWAKIPHTDGNFHPSPLMGGFGLKHPPPQILIKNTPVPANPPEVFTPAKIASFITQYSTGQVSVEIEWELQKENSKRWNPEIQYTSNFDKQTGVDFAVDSQGVYSEP

SEQ ID NO: 36 - protein, 738 aa, Artificial Sequence
  source: /note="Description of Artificial Sequence: Synthetic polypeptide"
MAADGYLPDWLEDNLSEGIREWWALKPGAPKPKANQQKQDDGRGLVLPGYKYLGPFNGLDKGEPVNAADAAALEHDKAYDQQLKAGDNPYLRYNHADAEFQERLQEDTSFGGNLGRAVFQAKKRVLEPLGLVEEGAKTAPGKKRPVEPSPQRSPDSTTGIGKKGQQPAKKRLNFGQTGDSESVPDPQPIGEPPAGPSGLGSGTMAAGGGAPMADNNEGADGVGSSSGNWHCDSTWLGDRVITTSTRTWALPTYNNHLYKQISNGTSGGSTNDNTYFGYSTPWGYFDFNRFHCHFSPRDWQRLINNNWGFRPKRLNFKLFNIQVKEVTQNEGTKTIANNLTSTIQVFTDSEYQLPYVLGSARQGCLPPFPADVFMIPQYGYLTLNNGSQAVGRSSFYCLEYFPSQMLRTGNNFEFSYQFEDVPFHSSYAHSQSLDRLMNPLIDQYLYYLSRTQSTGGTAGTQQLLFSQAGPNNMSAQAKNWLPGPCYRQQRVSTTLSQNNNSNFAWTGATKYHLNGRDSLVNPGVAMATHKDDEERFFPSSGVLMFGKQGAGKGNVDYSSVMLTSEEEIKTTNPVATEQYGVVADNLQQQNAAPIVGAVNSQGALPGMVWQNRDVYLQGPIWAKIPHTDGNFHPSPLMGGFGLKHPPPQILIKNTPVPADPPTTFSQAKLASFITQYSTGQVSVEIEWELQKENSKRWNPEIQYTSNYYKSTNVDFAVNTDGTYSEPRPIGTRYLTRNL

SEQ ID NO: 37 - DNA, 3121 bp, Artificial Sequence
  source: /note="Description of Artificial Sequence: Synthetic polynucleotide"
gaattcgcccttctacggctgcgtcaactggaccaatgagaactttcccttcaacgactgtgtcgacaagatggtgatctggtgggaggaggggaagatgaccgccaaggtcgtggagtcggccaaagccattctcggaggaagcaaggtgcgcgtggaccagaaatgcaagtcctcggcccagatagacccgactcccgtgatcgtcacctccaacaccaacatgtgcgccgtgattgacgggaactcaacgaccttcgaacaccagcagccgttgcaagaccggatgttcaaatttgaactcacccgccgtctggatcatgactttgggaaggtcaccaagcaggaagtcaaagactttttccggtgggcaaaggatcacgtggttgaggtggagcacgaattctacgtcaaaaagggtggagccaagaaaagacccgcccccagtgacgcagatataagtgagcccaaacgggtgcgcgagtcagttgcgcagccatcgacgtcagacgcggaagcttcgatcaactacgcagacaggtaccaaaacaaatgttctcgtcacgcgggcatgaatctgatgctgtttccctgcagacaatgcgagagaatgaatcagaattcaaatatctgcttcactcacggacagaaagactgtttagagtgctttcccgtgtcagaatctcaacccgtttctgtcgtcaaaaaggcgtatcagaaactgtgctacattcatcatatcatgggaaaggtgccagacgcttgcactgcctgcgatctggtcgatgtggatttggatgactgcatctttgaacaataaatgatttaaatcaggtatggctgccgatggttatcttccagattggctcgaggacaacctctctgagggcattcgcgagtggtgggcgctgaaacctggagccccgaagcccaaagccaaccagcaaaagcaggacggcggccggggtctggtgcttcctggctacaagtacctcggacccttcaacggactcgacaagggggagcccgtcaacgcggcggacgcagcggccctcgagcacgacaaggcctacgaccagcagctcaaagcgggtgacaatccgtacctgcggtataaccacgccgacgccgagtttcaggagcgtctgcaagaagatacgtcttttgggggcaacctcgggcgagcagtcttccaggccaagaagcgggttctcgaacctctcggtctggttgaggaaggcgctaagacggctcctggaaagaagagaccggtagagccatcaccccagcgttctccagactcctctacgggcatcggcaagaaaggccagcagcccgcgaaaaagagactcaactttgggcagactggcgactcagagtcagtgcccgaccctcaaccaatcggagaaccccccgcaggcccctctggtctgggatctggtacaatggctgcaggcggtggcgctccaatggcagacaataacgaaggcgccgacggagtgggtagttcctcaggaaattggcattgcgattccacatggctgggcgactgagtcatcaccaccagcacccgaacctgggccctccccacctacaacaaccacctctacaagcaaatctccaacgggacttcgggaggaagcaccaacgacaacacctacttcggctacagcaccccctgggggtattttgactttaacagattccactgccacttctcaccacgtgactggcagcgactcatcaacaacaactggggattccggcccaagagactcaacttcaagctcttcaacatccaggtcaaggaggtcacgcagaatgaaggcaccaagaccatcgccaataaccttaccagcacgattcaggtctttacggactcggaataccagctcccgtacgtcctcggctctgcgcaccagggctgcctgcctccgttcccggcggacgtcttcatgattcctcagtacgggtacctgactctgaacaatggcagtcaggccgtgggccgttcctccttctactgcctggagtactttccttctcaaatgctgagaacgggcaacaactttgagttcagctaccagtttgaggacgtgccttttcacagcagctacgcgcacagccaaagcctggaccggctgatgaaccccctcatcgaccagtacctgtactacctgtctcggactcagtccacgggaggtaccgcaggaactcagcagttgctattttctcaggccgggcctaataacatgtcggctcaggccaaaaactggctacccgggccctgctaccggcagtaacgcgtctccacgacactgtcgcaaaataacaacagcaactttgtctggaccggtgccaccaagtatcatctgaatggcagagactctctggtagatcccggtgtcgctatggcaacccacaaggacgacgaagagcgattttttccgtccagcggagtcataatgtttgggaaacagggagctggaaaagacaacgtggactatagcagcgtcatgctaaccagtgaggaagaaattaaaaccaccaacccagtggccacagaacagtacggcgtggtggccgataacctgcaacagcaaaacgccgctcctattgtaggggccgtcaacagtcaaggagccttacctggcatggtctggcagaaccgggacgtgtacctgcagggtcctacctgggccaagattcctcacacggacggaaactttcatccctcgccgctgatgggaggctttggactgaaacacccgcctcctcagatcctgattaagaatacacctgttcccgcggatcctccaactaccttcagtcaagctaagctggcgtcgttcatcacgcagtacagcaccggacaggtcagcgtggaaattgaatgggagctgcaggaagaaaacagcaaacgctggaacccagagattcaatacacttccaactactacaaatctacaaatgtggactttgctgttaacacagatggcacttattctgagcctcgccccatcggcacccgttacctcacccgtaatctgtaattgcttgttaatcaataaaccggttgattcgtttcagttgaactttggtctctgcgaagggcgaattc

SEQ ID NO: 38 - protein, 738 aa, Artificial Sequence
  source: /note="Description of Artificial Sequence: Synthetic polypeptide"
MAADGYLPDWLEDNLSEGIREWWALKPGAPKPKANQQKQDDGRGLVLPGYKYLGPFNGLDKGEPVNAADAAALEHDKAYDQQLKAGDNPYLRYNHADAEFQERLQEDTSFGGNLGRAVFQAKKRVLEPLGLVEEGAKTAPGKKRPVEPSPQRSPDSSTGIGKKGQQPAKKRLNFGQTGDSESVPDPQPIGEPPAGPSGLGSGTMAAGGGAPMADNNEGADGVGSSSGNWHCDSTWLGDGVITTSTRTWALPTYNNHLYKQISNGTSGGSTNDNTYFGYSTPWGYFDFNRFHCHFSPRDWQRLINNNWGFRPKSLNFKLFNIQVKEVTQNEGTKTIANNLTSTIQVFTDSEYQLPYVLGSAHQGCLPPFPADVFMIPQYGYLTLNNGSQAVGRSSFYCLEYFPSQMLRTGNNFEFSYQFEDVPFHSSYAHSQSLDRLMNPLIDQYLYYLSRTQSTGGTAGTQQLLFSQAGPNNMSAQAKNWLPGPCYRQQRVSTTLSQNDNSNFAWTGATKYHLNGRDSLVNPGVAMATHKDDEERFFPSSGVLMFGKQGAGKDNVDYSSVMLTSEEEIKTTNPVATEQYGVVADNLQQQNAAPIVGAVNSQGALPGMVWQNRDVYLQGPIWAKIPHTDGNFHPSPLMGGFGLKHPPPQILIKNTPVPADPPTTFSQAKLASFITQYSTGQVSVEIEWELQKENSKRWNPEIQYTSNYYKSTNVDFAVNTDGTYSEPRPIGTRYLTRNL

SEQ ID NO: 39 - DNA, 3121 bp, Artificial Sequence
  source: /note="Description of Artificial Sequence: Synthetic polynucleotide"
gaattcgcccttcgcgagaccaaagttcaactgaaacgaatcaaccggtttattgattaacaagcaattacagattacgggtgaggtaacgggtgccgatggggcgaggctcagaataagtgccatctgtgttaacagcaaagtccacatttgtagatttgtagtagttggaagtgtattgaatctctgggttccagcgtttgctgttttctttctgcagctcccattcaatttccacgctgacctgtccggtgctgtactgcgtgatgaacgacgccagcttagcttgactgaaggtagttggaggatccgcgggaacaggtgtattcttaatcaggatctgaggaggcgggtgtttcagtccaaagcctcccatcagcggcgagggatgaaagtttccgtccgtgtgaggaatcttggcccagataggaccctgcaggtacacgtcccggttctgccagaccatgccaggtaaggctccttgactgttgacggcccctacaataggagcggcgttttgctgttgcaggttatcggccaccacgccgtactgttctgtggccactgggttggtggttttaatttcttcctcactggttagcataacgctgctatagtccacgttgtcttttccagctccctgtttcccaaacattaagactccgctggacggaaaaaatcgctcttcgtcgtccttgtgggttgccatagcgacaccgggatttaccagagagtctctgccattcagatgatacttggtggcaccggtccaggcaaagttgctgttgtcattttgcgacagtgtcgtggagacgcgttgctgccggtagcagggcccgggtagccagtttttggcctgagccgacatgttattaggcccggcctgagaaaatagcaactgctgagttcctgcggtacctcccgtggactgagtccgagacaggtagtacaggtactggtcgatgagggggttcatcagccggtccaggctttggctgtgcgcgtagctgctgtgaaaaggcacgtcctcaaactggtagctgaactcaaagttgttgcccgttctcagcatttgagaaggaaagtactccaggcagtagaaggaggaacggcccacggcctgactgccattgttcagagtcaggtacccgtactgaggaatcatgaagacgtccgccgggaacggaggcaggcagccctggtgcgcagagccgaggacgtacgggagctggtattccgagtccgtaaagacctgaatcgtgctggtaaggttattggcgatggtcttggtgccttcattctgcgtgacctccttgacctggatgttgaagagcttgaagttgaggctcttgggccggaatccccagttgttgttgatgagtcgctgccagtcacgtggtgagaagtggcagtggaatctgttaaagtcaaaatacccccagggggtgctgtagccgaagtaggtgttgtcgttggtgcttcctcccgaagtcccgttggagatttgcttgtagaggtggttgttgtaggtggggagggcccaggttcgggtgctggtggtgatgactccgtcgcccagccatgtggaatcgcaatgccaatttcctgaggaactacccactccgtcggcgccttcgttattgtctgccattggagcgccaccgcctgcagccattgtaccagatcccagaccagaggggcctgcggggggttctccgattggttgagggtcgggcactgactctgagtcgccagtctgcccaaagttgagtctctttttcgcgggctgctggcctttcttgccgatgcccgtagaggagtctggagaacgctggggtgatggctctaccggtctcttctttccaggagccgtcttagcgccttcctcaaccagaccgagaggttcgagaacccgcttcttggcctggaagactgctcgcccgaggttgcccccaaaagacgtatcttcttgcagacgctcctgaaactcggcgtcggcgtggttataccgcaggtacggattgtcacccgctttgagctgctggtcgtaggccttgtcgtgctcgagggccgctgcgtccgccgcgttgacgggctcccccttgtcgagtccgttgaagggtccgaggtacttgtagccaggaagcaccagaccccggccgtcgtcctgcttttgctggttggctttgggcttcggggctccaggtttcagcgcccaccactcgcgaatgccctcagagaggttgtcctcgagccaatctggaagataaccatcggcagccatacctgatttaaatcatttattgttcaaagatgcagtcatccaaatccacattgaccagatcgcaggcagtgcaagcgtctggcacctttcccatgatatgatgaatgtagcacagtttctgatacgcctttttgacgacagaaacgggttgagattctgacacgggaaagcactctaaacagtctttctgtccgtgagtgaagcagatatttgaattctgattcattctctcgcattgtctgcagggaaacagcatcagattcatgcccacgtgacgagaacatttgttttggtacctgtctgcgtagttgatcgaagcttccgcgtctgacgtcgatggctgcgcaactgactcgcgcacccgtttgggctcacttatatctgcgtcactgggggcgggtcttttcttggctccaccctttttgacgtagaattcatgctccacctcaaccacgtgatcctttgcccaccggaaaaagtctttgacttcctgcttggtgaccttcccaaagtcatgatccagacggcgggtgagttcaaatttgaacatccggtcttgcaacggctgctggtgttcgaaggtcgttgagttcccgtcaatcacggcgcacatgttggtgttggaggtgacgatcacgggagtcgggtctatctgggccgaggacttgcatttctggtccacgcgcaccttgcttcctccgagaatggctttggccgactccacgaccttggcggtcatcttcccctcctcccaccagatcaccatcttgtcgacacagtcgttgaagggaaagttctcattggtccagttgacgcagccgtagaaagggcgaattc

SEQ ID NO: 40 - DNA, 2211 bp, Artificial Sequence
  source: /note="Description of Artificial Sequence: Synthetic polynucleotide"
atggctgctgacggttatcttccagattggctcgaggacaacctttctgaaggcattcgtgagtggtgggctctgaaacctggagtccctcaacccaaagcgaaccaacaacaccaggacaaccgtcggggtcttgtgcttccgggttacaaatacctcggacccggtaacggactcgacaaaggagagccggtcaacgaggcggacgcggcagccctcgaacacgacaaagcttacgaccagcagctcaaggccggtgacaacccgtacctcaagtacaaccacgccgacgccgagtttcaggagcgtcttcaagaagatacgtcttttgggggcaaccttggcagagcagtcttccaggccaaaaagaggatccttgagcctcttggtctggttgaggaagcagctaaaacggctcctggaaagaagggggctgtagatcagtctcctcaggaaccggactcatcatctggtgttggcaaatcgggcaaacagcctgccagaaaaagactaaatttcggtcagactggagactcagagtcagtcccagaccctcaacctctcggagaaccaccagcagcccccacaagtttgggatctaatacaatggcttcaggcggtggcgcaccaatggcagacaataacgagggtgccgatggagtgggtaattcctcaggaaattggcattgcgattcccaatggctgggcgacagagtcatcaccaccagcaccagaacctgggccctgcccacttacaacaaccatctctacaagcaaatctccagccaatcaggagcttcaaacgacaaccactactttggctacagcaccccttgggggtattttgactttaacagattccactgccacttctcaccacgtgactggcagcgactcattaacaacaactggggattccggcccaagaaactcagcttcaagctcttcaacatccaagttagaggggtcacgcagaacgatggcacgacgactattgccaataaccttaccagcacggttcaagtgtttacggactcggagtatcagctcccgtacgtgctcgggtcggcgcaccaaggctgtctcccgccgtttccagcggacgtcttcatggtccctcagtatggatacctcaccctgaacaacggaagtcaagcggtgggacgctcatccttttactgcctggagtacttcccttcgcagatgctaaggactggaaataacttccaattcagctataccttcgaggatgtaccttttcacagcagctacgctcacagccagagtttggatcgcttgatgaatcctcttattgatcagtatctgtactacctgaacagaacgcaaggaacaacctctggaacaaccaaccaatcacggctgctttttagccaggctgggcctcagtctatgtctttgcaggccagaaattggctacctgggccctgctaccggcaacagagactttcaaagactgctaacgacaacaacaacagtaactttccttggacagcggccagcaaatatcatctcaatggccgcgactcgctggtgaatccaggaccagctatggccagtcacaaggacgatgaagaaaaatttttccctatgcacggcaatctaatatttggcaaagaagggacaacggcaagtaacgcagaattagataatgtaatgattacggatgaagaagagattcgtaccaccaatcctgtggcaacagagcagtatggaactgtggcaaataacttgcagagctcaaatacagctcccacgactggaactgtcaatcatcagggggccttacctggcatggtgtggcaagatcgtgacgtgtaccttcaaggacctatctgggcaaagattcctcacacggatggacactttcatccttctcctctgatgggaggctttggactgaaacatccgcctcctcaaatcatgatcaaaaatactccggtaccggcaaatcctccgacgactttcagcccggccaagtttgcttcatttatcactcagtactccactggacaggtcagcgtggaaattgagtgggagctacagaaagaaaacagcaaacgttggaatccagagattcagtacacttccaactacaacaagtctgttaatgtggactttactgtagacactaatggtgtttatagtgaacctcgccctattggaacccggtatctcacacgaaacttgtga

SEQ ID NO: 41 - protein, 736 aa, Adeno-associated virus 3
MAADGYLPDWLEDNLSEGIREWWALKPGVPQPKANQQHQDNRRGLVLPGYKYLGPGNGLDKGEPVNEADAAALEHDKAYDQQLKAGDNPYLKYNHADAEFQERLQEDTSFGGNLGRAVFQAKKRILEPLGLVEEAAKTAPGKKGAVDQSPQEPDSSSGVGKSGKQPARKRLNFGQTGDSESVPDPQPLGEPPAAPTSLGSNTMASGGGAPMADNNEGADGVGNSSGNWHCDSQWLGDRVITTSTRTWALPTYNNHLYKQISSQSGASNDNHYFGYSTPWGYFDFNRFHCHFSPRDWQRLINNNWGFRPKKLSFKLFNIQVRGVTQNDGTTTIANNLTSTVQVFTDSEYQLPYVLGSAHQGCLPPFPADVFMVPQYGYLTLNNGSQAVGRSSFYCLEYFPSQMLRTGNNFQFSYTFEDVPFHSSYAHSQSLDRLMNPLIDQYLYYLNRTQGTTSGTTNQSRLLFSQAGPQSMSLQARNWLPGPCYRQQRLSKTANDNNNSNFPWTAASKYHLNGRDSLVNPGPAMASHKDDEEKFFPMHGNLIFGKEGTTASNAELDNVMITDEEEIRTTNPVATEQYGTVANNLQSSNTAPTTGTVNHQGALPGMVWQDRDVYLQGPIWAKIPHTDGHFHPSPLMGGFGLKHPPPQIMIKNTPVPANPPTTFSPAKFASFITQYSTGQVSVEIEWELQKENSKRWNPEIQYTSNYNKSVNVDFTVDTNGVYSEPRPIGTRYLTRNL

SEQ ID NO: 42 - DNA, 4726 bp, Adeno-associated virus 3
ttggccactccctctatgcgcactcgctcgctcggtggggcctggcgaccaaaggtcgccagacggacgtgctttgcacgtccggccccaccgagcgagcgagtgcgcatagagggagtggccaactccatcactagaggtatggcagtgacgtaacgcgaagcgcgcgaagcgagaccacgcctaccagctgcgtcagcagtcaggtgacccttttgcgacagtttgcgacaccacgtggccgctgagggtatatattctcgagtgagcgaaccaggagctccattttgaccgcgaaatttgaacgagcagcagccatgccggggttctacgagattgtcctgaaggtcccgagtgacctggacgagcgcctgccgggcatttctaactcgtttgttaactgggtggccgagaaggaatgggacgtgccgccggattctgacatggatccgaatctgattgagcaggcacccctgaccgtggccgaaaagcttcagcgcgagttcctggtggagtggcgccgcgtgagtaaggccccggaggccctcttttttgtccagttcgaaaagggggagacctacttccacctgcacgtgctgattgagaccatcggggtcaaatccatggtggtcggccgctacgtgagccagattaaagagaagctggtgacccgcatctaccgcggggtcgagccgcagcttccgaactggttcgcggtgaccaaaacgcgaaatggcgccgggggcgggaacaaggtggtggacgactgctacatccccaactacctgctccccaagacccagcccgagctccagtgggcgtggactaacatggaccagtatttaagcgcctgtttgaatctcgcggagcgtaaacggctggtggcgcagcatctgacgcacgtgtcgcagacgcaggagcagaacaaagagaatcagaaccccaattctgacgcgccggtcatcaggtcaaaaacctcagccaggtacatggagctggtcgggtggctggtggaccgcgggatcacgtcagaaaagcaatggattcaggaggaccaggcctcgtacatctccttcaacgccgcctccaactcgcggtcccagatcaaggccgcgctggacaatgcctccaagatcatgagcctgacaaagacggctccggactacctggtgggcagcaacccgccggaggacattaccaaaaatcggatctaccaaatcctggagctgaacgggtacgatccgcagtacgcggcctccgtcttcctgggctgggcgcaaaagaagttcgggaagaggaacaccatctggctctttgggccggccacgacgggtaaaaccaacatcgcggaagccatcgcccacgccgtgcccttctacggctgcgtaaactggaccaatgagaactttcccttcaacgattgcgtcgacaagatggtgatctggtgggaggagggcaagatgacggccaaggtcgtggagagcgccaaggccattctgggcggaagcaaggtgcgcgtggaccaaaagtgcaagtcatcggcccagatcgaacccactcccgtgatcgtcacctccaacaccaacatgtgcgccgtgattgacgggaacagcaccaccttcgagcatcagcagccgctgcaggaccggatgtttgaatttgaacttacccgccgtttggaccatgactttgggaaggtcaccaaacaggaagtaaaggactttttccggtgggcttccgatcacgtgactgacgtggctcatgagttctacgtcagaaagggtggagctaagaaacgccccgcctccaatgacgcggatgtaagcgagccaaaacgggagtgcacgtcacttgcgcagccgacaacgtcagacgcggaagcaccggcggactacgcggacaggtaccaaaacaaatgttctcgtcacgtgggcatgaatctgatgctttttccctgtaaaacatgcgagagaatgaatcaaatttccaatgtctgttttacgcatggtcaaagagactgtggggaatgcttccctggaatgtcagaatctcaacccgtttctgtcgtcaaaaagaagacttatcagaaactgtgtccaattcatcatatcctgggaagggcacccgagattgcctgttcggcctgcgatttggccaatgtggacttggatgactgtgtttctgagcaataaatgacttaaaccaggtatggctgctgacggttatcttccagattggctcgaggacaacctttctgaaggcattcgtgagtggtgggctctgaaacctggagtccctcaacccaaagcgaaccaacaacaccaggacaaccgtcggggtcttgtgcttccgggttacaaatacctcggacccggtaacggactcgacaaaggagagccggtcaacgaggcggacgcggcagccctcgaacacgacaaagcttacgaccagcagctcaaggccggtgacaacccgtacctcaagtacaaccacgccgacgccgagtttcaggagcgtcttcaagaagatacgtcttttgggggcaaccttggcagagcagtcttccaggccaaaaagaggatccttgagcctcttggtctggttgaggaagcagctaaaacggctcctggaaagaagggggctgtagatcagtctcctcaggaaccggactcatcatctggtgttggcaaatcgggcaaacagcctgccagaaaaagactaaatttcggtcagactggagactcagagtcagtcccagaccctcaacctctcggagaaccaccagcagcccccacaagtttgggatctaatacaatggcttcaggcggtggcgcaccaatggcagacaataacgagggtgccgatggagtgggtaattcctcaggaaattggcattgcgattcccaatggctgggcgacagagtcatcaccaccagcaccagaacctgggccctgcccacttacaacaaccatctctacaagcaaatctccagccaatcaggagcttcaaacgacaaccactactttggctacagcaccccttgggggtattttgactttaacagattccactgccacttctcaccacgtgactggcagcgactcattaacaacaactggggattccggcccaagaaactcagcttcaagctcttcaacatccaagttagaggggtcacgcagaacgatggcacgacgactattgccaataaccttaccagcacggttcaagtgtttacggactcggagtatcagctcccgtacgtgctcgggtcggcgcaccaaggctgtctcccgccgtttccagcggacgtcttcatggtccctcagtatggatacctcaccctgaacaacggaagtcaagcggtgggacgctcatccttttactgcctggagtacttcccttcgcagatgctaaggactggaaataacttccaattcagctataccttcgaggatgtaccttttcacagcagctacgctcacagccagagtttggatcgcttgatgaatcctcttattgatcagtatctgtactacctgaacagaacgcaaggaacaacctctggaacaaccaaccaatcacggctgctttttagccaggctgggcctcagtctatgtctttgcaggccagaaattggctacctgggccctgctaccggcaacagagactttcaaagactgctaacgacaacaacaacagtaactttccttggacagcggccagcaaatatcatctcaatggccgcgactcgctggtgaatccaggaccagctatggccagtcacaaggacgatgaagaaaaatttttccctatgcacggcaatctaatatttggcaaagaagggacaacggcaagtaacgcagaattagataatgtaatgattacggatgaagaagagattcgtaccaccaatcctgtggcaacagagcagtatggaactgtggcaaataacttgcagagctcaaatacagctcccacgactggaactgtcaatcatcagggggccttacctggcatggtgtggcaagatcgtgacgtgtaccttcaaggacctatctgggcaaagattcctcacacggatggacactttcatccttctcctctgatgggaggctttggactgaaacatccgcctcctcaaatcatgatcaaaaatactccggtaccggcaaatcctccgacgactttcagcccggccaagtttgcttcatttatcactcagtactccactggacaggtcagcgtggaaattgagtgggagctacagaaagaaaacagcaaacgttggaatccagagattcagtacacttccaactacaacaagtctgttaatgtggactttactgtagacactaatggtgtttatagtgaacctcgccctattggaacccggtatctcacacgaaacttgtgaatcctggttaatcaataaaccgtttaattcgtttcagttgaactttggctcttgtgcacttctttatctttatcttgtttccatggctactgcgtagataagcagcggcctgcggcgcttgcgcttcgcggtttacaactgctggttaatatttaactctcgccatacctctagtgatggagttggccactccctctatgcgcactcgctcgctcggtggggcctggcgaccaaaggtcgccagacggacgtgctttgcacgtccggccccaccgagcgagcgagtgcgcatagagggagtggccaa

SEQ ID NO: 43 - protein, 737 aa, Artificial Sequence
  source: /note="Description of Artificial Sequence: Synthetic polypeptide"
MAADGYLPDWLEDNLSEGIREWWDLKPGAPKPKANQQKQDNGRGLVLPGYKYLGPFNGLDKGEPVNAADAAALEHDKAYDQQLNAGDNPYLRYNHADAEFQERLQEDTSFGGNLGRAVFQAKKRVLEPLGLVEEGAKTAPAKKRPVEPSPQRSPDSSTGIGKKGQQPARKRLNFGQTGDSESVPDPQPLGEPPAAPSSVGSGTVAAGGGAPMADNNEGADGVGNASGNWHCDSTWLGDRVITTSTRTWALPTYNNHLYEQISSETAGSTNDNTYFGYSTPWGYFDFNRFHCHFSPRDWQRLINNNWGFRPKKLRFKLFNIQVKEVTTNDGVTTIANNLTSTIQVFSDSEYQLPYVLGSAHQGCLPPFPADVFMIPQYGYLTLNNGSQSVGRSSFYCLEYFPSQMLRTGNNFEFSYSFEDVPFHSSYAHSQSLDRLMNPLIDQYLYYLARTQSDPGGTAGNRELQFYQGGPSTMAEQAKNWLPGPCFRQQRVSKTLDQNNNSNFAWTGATKYHLNGRNSLVNPGVAMATHKDDEDRFFPSSGVLIFGKTGATNKTTLENVLMTNEEEIRPTNPVATEEYGIVSSNLQAANTAAQTQVVNNQGALPGMVWQNRDVYLQGPIWAKIPHTDGNFHPSPLMGGFGLKHPPPQILIKNTPVPANPPEVFTPAKFASFITQYSTGQVSVEIEWELQKENSKRWDPEIQYTSNFEKQTGVDFAVDSQGVYSEPRPIGTRYLTRNL

SEQ ID NO: 44 - DNA, 2211 bp, Artificial Sequence
  source: /note="Description of Artificial Sequence: Synthetic polynucleotide"
atggctgctgacggttatcttccagattggctcgaggacaacctttctgaaggcattcgtgagtggtgggctctgaaacctggagtccctcaacccaaagcgaaccaacaacaccaggacaaccgtcggggtcttgtgcttccgggttacaaatacctcggacccggtaacggactcgacaaaggagagccggtcaacgaggcggacgcggcagccctcgaacacgacaaagcttacgaccagcagctcaaggccggtgacaacccgtacctcaagtacaaccacgccgacgccgagtttcaggagcgtcttcaagaagatacgtcttttgggggcaaccttggcagagcagtcttccaggccaaaaagaggatccttgagcctcttggtctggttgaggaagcagctaaaacggctcctggaaagaagggggctgtagatcagtctcctcaggaaccggactcatcatctggtgttggcaaatcgggcaaacagcctgccagaaaaagactaaatttcggtcagactggagactcagagtcagtcccagaccctcaacctctcggagaaccaccagcagcccccacaagtttgggatctaatacaatggcttcaggcggtggcgcaccaatggcagacaataacgagggtgccgatggagtgggtaattcctcaggaaattggcattgcgattcccaatggctgggcgacagagtcatcaccaccagcaccagaacctgggccctgcccacttacaacaaccatctctacaagcaaatctccagccaatcaggagcttcaaacgacaaccactactttggctacagcaccccttgggggtattttgactttaacagattccactgccacttctcaccacgtgactggcagcgactcattaacaacaactggggattccggcccaagaaactcagcttcaagctcttcaacatccaagttagaggggtcacgcagaacgatggcacgacgactattgccaataaccttaccagcacggttcaagtgtttacggactcggagtatcagctcccgtacgtgctcgggtcggcgcaccaaggctgtctcccgccgtttccagcggacgtcttcatggtccctcagtatggatacctcaccctgaacaacggaagtcaagcggtgggacgctcatccttttactgcctggagtacttcccttcgcagatgctaaggactggaaataacttccaattcagctataccttcgaggatgtaccttttcacagcagctacgctcacagccagagtttggatcgcttgatgaatcctcttattgatcagtatctgtactacctgaacagaacgcaaggaacaacctctggaacaaccaaccaatcacggctgctttttagccaggctgggcctcagtctatgtctttgcaggccagaaattggctacctgggccctgctaccggcaacagagactttcaaagactgctaacgacaacaacaacagtaactttccttggacagcggccagcaaatatcatctcaatggccgcgactcgctggtgaatccaggaccagctatggccagtcacaaggacgatgaagaaaaatttttccctatgcacggcaatctaatatttggcaaagaagggacaacggcaagtaacgcagaattagataatgtaatgattacggatgaagaagagattcgtaccaccaatcctgtggcaacagagcagtatggaactgtggcaaataacttgcagagctcaaatacagctcccacgactggaactgtcaatcatcagggggccttacctggcatggtgtggcaagatcgtgacgtgtaccttcaaggacctatctgggcaaagattcctcacacggatggacactttcatccttctcctctgatgggaggctttggactgaaacatccgcctcctcaaatcatgatcaaaaatactccggtaccggcaaatcctccgacgactttcagcccggccaagtttgcttcatttatcactcagtactccactggacaggtcagcgtggaaattgagtgggagctacagaaagaaaacagcaaacgttggaatccagagattcagtacacttccaactacaacaagtctgttaatgtggactttactgtagacactaatggtgtttatagtgaacctcgccctattggaacccggtatctcacacgaaacttgtaa

SEQ ID NO: 45 - protein, 736 aa, Artificial Sequence; identical to SEQ ID NO: 41
  source: /note="Description of Artificial Sequence: Synthetic polypeptide"

SEQ ID NO: 46 - protein, 736 aa, Adeno-associated virus 3A; identical to SEQ ID NO: 41

SEQ ID NO: 47 - protein, 624 aa, Adeno-associated virus 3A
MPGFYEIVLKVPSDLDERLPGISNSFVNWVAEKEWDVPPDSDMDPNLIEQAPLTVAEKLQREFLVEWRRVSKAPEALFFVQFEKGETYFHLHVLIETIGVKSMVVGRYVSQIKEKLVTRIYRGVEPQLPNWFAVTKTRNGAGGGNKVVDDCYIPNYLLPKTQPELQWAWTNMDQYLSACLNLAERKRLVAQHLTHVSQTQEQNKENQNPNSDAPVIRSKTSARYMELVGWLVDRGITSEKQWIQEDQASYISFNAASNSRSQIKAALDNASKIMSLTKTAPDYLVGSNPPEDITKNRIYQILELNGYDPQYAASVFLGWAQKKFGKRNTIWLFGPATTGKTNIAEAIAHAVPFYGCVNWTNENFPFNDCVDKMVIWWEEGKMTAKVVESAKAILGGSKVRVDQKCKSSAQIEPTPVIVTSNTNMCAVIDGNSTTFEHQQPLQDRMFEFELTRRLDHDFGKVTKQEVKDFFRWASDHVTDVAHEFYVRKGGAKKRPASNDADVSEPKRECTSLAQPTTSDAEAPADYADRYQNKCSRHVGMNLMLFPCKTCERMNQISNVCFTHGQRDCGECFPGMSESQPVSVVKKKTYQKLCPIHHILGRAPEIACSACDLANVDLDDCVSEQ

SEQ ID NO: 48 - protein, 736 aa, Adeno-associated virus 3B
MAADGYLPDWLEDNLSEGIREWWALKPGVPQPKANQQHQDNRRGLVLPGYKYLGPGNGLDKGEPVNEADAAALEHDKAYDQQLKAGDNPYLKYNHADAEFQERLQEDTSFGGNLGRAVFQAKKRILEPLGLVEEAAKTAPGKKRPVDQSPQEPDSSSGVGKSGKQPARKRLNFGQTGDSESVPDPQPLGEPPAAPTSLGSNTMASGGGAPMADNNEGADGVGNSSGNWHCDSQWLGDRVITTSTRTWALPTYNNHLYKQISSQSGASNDNHYFGYSTPWGYFDFNRFHCHFSPRDWQRLINNNWGFRPKKLSFKLFNIQVKEVTQNDGTTTIANNLTSTVQVFTDSEYQLPYVLGSAHQGCLPPFPADVFMVPQYGYLTLNNGSQAVGRSSFYCLEYFPSQMLRTGNNFQFSYTFEDVPFHSSYAHSQSLDRLMNPLIDQYLYYLNRTQGTTSGTTNQSRLLFSQAGPQSMSLQARNWLPGPCYRQQRLSKTANDNNNSNFPWTAASKYHLNGRDSLVNPGPAMASHKDDEEKFFPMHGNLIFGKEGTTASNAELDNVMITDEEEIRTTNPVATEQYGTVANNLQSSNTAPTTRTVNDQGALPGMVWQDRDVYLQGPIWAKIPHTDGHFHPSPLMGGFGLKHPPPQIMIKNTPVPANPPTTFSPAKFASFITQYSTGQVSVEIEWELQKENSKRWNPEIQYTSNYNKSVNVDFTVDTNGVYSEPRPIGTRYLTRNL

SEQ ID NO: 49 - protein, 624 aa, Adeno-associated virus 3B
MPGFYEIVLKVPSDLDEHLPGISNSFVNWVAEKEWELPPDSDMDPNLIEQAPLTVAEKLQREFLVEWRRVSKAPEALFFVQFEKGETYFHLHVLIETIGVKSMVVGRYVSQIKEKLVTRIYRGVEPQLPNWFAVTKTRNGAGGGNKVVDDCYIPNYLLPKTQPELQWAWTNMDQYLSACLNLAERKRLVAQHLTHVSQTQEQNKENQNPNSDAPVIRSKTSARYMELVGWLVDRGITSEKQWIQEDQASYISFNAASNSRSQIKAALDNASKIMSLTKTAPDYLVGSNPPEDITKNRIYQILELNGYDPQYAASVFLGWAQKKFGKRNTIWLFGPATTGKTNIAEAIAHAVPFYGCVNWTNENFPFNDCVDKMVIWWEEGKMTAKVVESAKAILGGSKVRVDQKCKSSAQIEPTPVIVTSNTNMCAVIDGNSTTFEHQQPLQDRMFKFELTRRLDHDFGKVTKQEVKDFFRWASDHVTDVAHEFYVRKGGAKKRPASNDADVSEPKRQCTSLAQPTTSDAEAPADYADRYQNKCSRHVGMNLMLFPCKTCERMNQISNVCFTHGQRDCGECFPGMSESQPVSVVKKKTYQKLCPIHHILGRAPEIACSACDLANVDLDDCVSEQ

SEQ ID NO: 50 - DNA, 4722 bp, Adeno-associated virus 3B
tggccactccctctatgcgcactcgctcgctcggtggggcctggcgaccaaaggtcgccagacggacgtgctttgcacgtccggccccaccgagcgagcgagtgcgcatagagggagtggccaactccatcactagaggtatggcagtgacgtaacgcgaagcgcgcgaagcgagaccacgcctaccagctgcgtcagcagtcaggtgacccttttgcgacagtttgcgacaccacgtggccgctgagggtatatattctcgagtgagcgaaccaggagctccattttgaccgcgaaatttgaacgagcagcagccatgccggggttctacgagattgtcctgaaggtcccgagtgacctggacgagcacctgccgggcatttctaactcgtttgttaactgggtggccgagaaggaatgggagctgccgccggattctgacatggatccgaatctgattgagcaggcacccctgaccgtggccgaaaagcttcagcgcgagttcctggtggagtggcgccgcgtgagtaaggccccggaggccctcttttttgtccagttcgaaaagggggagacctacttccacctgcacgtgctgattgagaccatcggggtcaaatccatggtggtcggccgctacgtgagccagattaaagagaagctggtgacccgcatctaccgcggggtcgagccgcagcttccgaactggttcgcggtgaccaaaacgcgaaatggcgccgggggcgggaacaaggtggtggacgactgctacatccccaactacctgctccccaagacccagcccgagctccagtgggcgtggactaacatggaccagtatttaagcgcctgtttgaatctcgcggagcgtaaacggctggtggcgcagcatctgacgcacgtgtcgcagacgcaggagcagaacaaagagaatcagaaccccaattctgacgcgccggtcatcaggtcaaaaacctcagccaggtacatggagctggtcgggtggctggtggaccgcgggatcacgtcagaaaagcaatggattcaggaggaccaggcctcgtacatctccttcaacgccgcctccaactcgcggtcccagatcaaggccgcgctggacaatgcctccaagatcatgagcctgacaaagacggctccggactacctggtgggcagcaacccgccggaggacattaccaaaaatcggatctaccaaatcctggagctgaacgggtacgatccgcagtacgcggcctccgtcttcctgggctgggcgcaaaagaagttcgggaagaggaacaccatctggctctttgggccggccacgacgggtaaaaccaacatcgcggaagccatcgcccacgccgtgcccttctacggctgcgtaaactggaccaatgagaactttcccttcaacgattgcgtcgacaagatggtgatctggtgggaggagggcaagatgacggccaaggtcgtggagagcgccaaggccattctgggcggaagcaaggtgcgcgtggaccaaaagtgcaagtcatcggcccagatcgaacccactcccgtgatcgtcacctccaacaccaacatgtgcgccgtgattgacgggaacagcaccaccttcgagcatcagcagccgctgcaggaccggatgtttaaatttgaacttacccgccgtttggaccatgactttgggaaggtcaccaaacaggaagtaaaggactttttccggtgggcttccgatcacgtgactgacgtggctcatgagttctacgtcagaaagggtggagctaagaaacgccccgcctccaatgacgcggatgtaagcgagccaaaacggcagtgcacgtcacttgcgcagccgacaacgtcagacgcggaagcaccggcggactacgcggacaggtaccaaaacaaatgttctcgtcacgtgggcatgaatctgatgctttttccctgtaaaacatgcgagagaatgaatcaaatttccaatgtctgttttacgcatggtcaaagagactgtggggaatgcttccctggaatgtcagaatctcaacccgtttctgtcgtcaaaaagaagacttatcagaaactgtgtccaattcatcatatcctgggaagggcacccgagattgcctgttcggcctgcgatttggccaatgtggacttggatgactgtgtttctgagcaataaatgacttaaaccaggtatggctgctgacggttatcttccagattggctcgaggacaacctttctgaaggcattcgtgagtggtgggctctgaaacctggagtccctcaacccaaagcgaaccaacaacaccaggacaaccgtcggggtcttgtgcttccgggttacaaatacctcggacccggtaacggactcgacaaaggagagccggtcaacgaggcggacgcggcagccctcgaacacgacaaagcttacgaccagcagctcaaggccggtgacaacccgtacctcaagtacaaccacgccgacgccgagtttcaggagcgtcttcaagaagatacgtcttttgggggcaaccttggcagagcagtcttccaggccaaaaagaggatccttgagcctcttggtctggttgaggaagcagctaaaacggctcctggaaagaagaggcctgtagatcagtctcctcaggaaccggactcatcatctggtgttggcaaatcgggcaaacagcctgccagaaaaagactaaatttcggtcagactggcgactcagagtcagtcccagaccctcaacctctcggagaaccaccagcagcccccacaagtttgggatctaatacaatggcttcaggcggtggcgcaccaatggcagacaataacgagggtgccgatggagtgggtaattcctcaggaaattggcattgcgattcccaatggctgggcgacagagtcatcaccaccagcaccagaacctgggccctgcccacttacaacaaccatctctacaagcaaatctccagccaatcaggagcttcaaacgacaaccactactttggctacagcaccccttgggggtattttgactttaacagattccactgccacttctcaccacgtgactggcagcgactcattaacaacaactggggattccggcccaagaaactcagcttcaagctcttcaacatccaagttaaagaggtcacgcagaacgatggcacgacgactattgccaataaccttaccagcacggttcaagtgtttacggactcggagtatcagctcccgtacgtgctcgggtcggcgcaccaaggctgtctcccgccgtttccagcggacgtcttcatggtccctcagtatggatacctcaccctgaacaacggaagtcaagcggtgggacgctcatccttttactgcctggagtacttcccttcgcagatgctaaggactggaaataacttccaattcagctataccttcgaggatgtaccttttcacagcagctacgctcacagccagagtttggatcgcttgatgaatcctcttattgatcagtatctgtactacctgaacagaacgcaaggaacaacctctggaacaaccaaccaatcacggctgctttttagccaggctgggcctcagtctatgtctttgcaggccagaaattggctacctgggccctgctaccggcaacagagactttcaaagactgctaacgacaacaacaacagtaactttccttggacagcggccagcaaatatcatctcaatggccgcgactcgctggtgaatccaggaccagctatggccagtcacaaggacgatgaagaaaaatttttccctatgcacggcaatctaatatttggcaaagaagggacaacggcaagtaacgcagaattagataatgtaatgattacggatgaagaagagattcgtaccaccaatcctgtggcaacagagcagtatggaactgtggcaaataacttgcagagctcaaatacagctcccacgactagaactgtcaatgatcagggggccttacctggcatggtgtggcaagatcgtgacgtgtaccttcaaggacctatctgggcaaagattcctcacacggatggacactttcatccttctcctctgatgggaggctttggactgaaacatccgcctcctcaaatcatgatcaaaaatactccggtaccggcaaatcctccgacgactttcagcccggccaagtttgcttcatttatcactcagtactccactggacaggtcagcgtggaaattgagtgggagctacagaaagaaaacagcaaacgttggaatccagagattcagtacacttccaactacaacaagtctgttaatgtggactttactgtagacactaatggtgtttatagtgaacctcgccctattggaacccggtatctcacacgaaacttgtaatcctggttaatcaataaaccgtttaattcgtttcagttgaactttggctcttgtgcacttcttatcttatcttgtttccatggctactgcgtagataagcagcggcctgcggcgcttgcgcttcgcggtttacaactgctggttaatatttaactctcgccatacctctagtgatggagttggccactccctctatgcgcactcgctcgctcggtggggccggacgtgcaaagcacgtccgtctggcgacctttggtcgccaggccccaccgagcgagcgagtgcgcatagagggagtggccaa

SEQ ID NO: 51 - DNA, 1800 bp, Adeno-associated virus 4
  modified_base (342)..(342): a, c, t, g, unknown or other
acggctcctggaaagaagagaccgttgattgaatccccccagcagcccgactcctccacgggtatcggcaaaaaaggcaagcagccggctaaaaagaagctcgttttcgaagacgaaactggagcaggcgacggaccccctgagggatcaacttccggagccatgtctgatgacagtgagatgcgtgcagcagctggcggagctgcagtcgagggsggacaaggtgccgatggagtgggtaatgcctcgggtgattggcattgcgattccacctggtctgagggccacgtcacgaccaccagcaccagaacctgggtcttgcccacctacaacaaccacctntacaagcgactcggagagagcctgcagtccaacacctacaacggattctccaccccctggggatactttgacttcaaccgcttccactgccacttctcaccacgtgactggcagcgactcatcaacaacaactggggcatgcgacccaaagccatgcgggtcaaaatcttcaacatccaggtcaaggaggtcacgacgtcgaacggcgagacaacggtggctaataaccttaccagcacggttcagatctttgcggactcgtcgtacgaactgccgtacgtgatggatgcgggtcaagagggcagcctgcctccttttcccaacgacgtctttatggtgccccagtacggctactgtggactggtgaccggcaacacttcgcagcaacagactgacagaaatgccttctactgcctggagtactttccttcgcagatgctgcggactggcaacaactttgaaattacgtacagttttgagaaggtgcctttccactcgatgtacgcgcacagccagagcctggaccggctgatgaaccctctcatcgaccagtacctgtggggactgcaatcgaccaccaccggaaccaccctgaatgccgggactgccaccaccaactttaccaagctgcggcctaccaacttttccaactttaaaaagaactggctgcccgggccttcaatcaagcagcagggcttctcaaagactgccaatcaaaactacaagatccctgccaccgggtcagacagtctcatcaaatacgagacgcacagcactctggacggaagatggagtgccctgacccccggacctccaatggccacggctggacctgcggacagcaagttcagcaacagccagctcatctttgcggggcctaaacagaacggcaacacggccaccgtacccgggactctgatcttcacctctgaggaggagctggcagccaccaacgccaccgatacggacatgtggggcaacctacctggcggtgaccagagcaacagcaacctgccgaccgtggacagactgacagccttgggagccgtgcctggaatggtctggcaaaacagagacatttactaccagggtcccatttgggccaagattcctcataccgatggacactttcacccctcaccgctgattggtgggtttgggctgaaacacccgcctcctcaaatttttatcaagaacaccccggtacctgcgaatcctgcaacgaccttcagctctactccggtaaactccttcattactcagtacagcactggccaggtgtcggtgcagattgactgggagatccagaaggagcggtccaaacgctggaaccccgaggtccagtttacctccaactacggacagcaaaactctctgttgtgggctcccgatgcggctgggaaatacactgagcctagggctatcggtacccgctacctcacccaccacctgtaataa

SEQ ID NO: 52 - DNA, 2208 bp, Adeno-associated virus 4
  modified_base (750)..(750): a, c, t, g, unknown or other
atgactgacggttaccttccagattggctagaggacaacctctctgaaggcgttcgagagtggtgggcgctgcaacctggagcccctaaacccaaggcaaatcaacaacatcaggacaacgctcggggtcttgtgcttccgggttacaaatacctcggacccggcaacggactcgacaagggggaacccgtcaacgcagcggacgcggcagccctcgagcacgacaaggcctacgaccagcagctcaaggccggtgacaacccctacctcaagtacaaccacgccgacgcggagttccagcagcggcttcagggcgacacatcgtttgggggcaacctcggcagagcagtcttccaggccaaaaagagggttcttgaacctcttggtctggttgagcaagcgggtgagacggctcctggaaagaagagaccgttgattgaatccccccagcagcccgactcctccacgggtatcggcaaaaaaggcaagcagccggctaaaaagaagctcgttttcgaagacgaaactggagcaggcgacggaccccctgagggatcaacttccggagccatgtctgatgacagtgagatgcgtgcagcagctggcggagctgcagtcgagggsggacaaggtgccgatggagtgggtaatgcctcgggtgattggcattgcgattccacctggtctgagggccacgtcacgaccaccagcaccagaacctgggtcttgcccacctacaacaaccacctntacaagcgactcggagagagcctgcagtccaacacctacaacggattctccaccccctggggatactttgacttcaaccgcttccactgccacttctcaccacgtgactggcagcgactcatcaacaacaactggggcatgcgacccaaagccatgcgggtcaaaatcttcaacatccaggtcaaggaggtcacgacgtcgaacggcgagacaacggtggctaataaccttaccagcacggttcagatctttgcggactcgtcgtacgaactgccgtacgtgatggatgcgggtcaagagggcagcctgcctccttttcccaacgacgtctttatggtgccccagtacggctactgtggactggtgaccggcaacacttcgcagcaacagactgacagaaatgccttctactgcctggagtactttccttcgcagatgctgcggactggcaacaactttgaaattacgtacagttttgagaaggtgcctttccactcgatgtacgcgcacagccagagcctggaccggctgatgaaccctctcatcgaccagtacctgtggggactgcaatcgaccaccaccggaaccaccctgaatgccgggactgccaccaccaactttaccaagctgcggcctaccaacttttccaactttaaaaagaactggctgcccgggccttcaatcaagcagcagggcttctcaaagactgccaatcaaaactacaagatccctgccaccgggtcagacagtctcatcaaatacgagacgcacagcactctggacggaagatggagtgccctgacccccggacctccaatggccacggctggacctgcggacagcaagttcagcaacagccagctcatctttgcggggcctaaacagaacggcaacacggccaccgtacccgggactctgatcttcacctctgaggaggagctggcagccaccaacgccaccgatacggacatgtggggcaacctacctggcggtgaccagagcaacagcaacctgccgaccgtggacagactgacagccttgggagccgtgcctggaatggtctggcaaaacagagacatttactaccagggtcccatttgggccaagattcctcataccgatggacactttcacccctcaccgctgattggtgggtttgggctgaaacacccgcctcctcaaatttttatcaagaacaccccggtacctgcgaatcctgcaacgaccttcagctctactccggtaaactccttcattactcagtacagcactggccaggtgtcggtgcagattgactgggagatccagaaggagcggtccaaacgctggaaccccgaggtccagtttacctccaactacggacagcaaaactctctgttgtgggctcccgatgcggctgggaaatacactgagcctagggctatcggtacccgctacctcacccaccacctgtaataa

SEQ ID NO: 53 - DNA, 1872 bp, Adeno-associated virus 4
atgccggggttctacgagatcgtgctgaaggtgcccagcgacctggacgagcacctgcccggcatttctgactcttttgtgagctgggtggccgagaaggaatgggagctgccgccggattctgacatggacttgaatctgattgagcaggcacccctgaccgtggccgaaaagctgcaacgcgagttcctggtcgagtggcgccgcgtgagtaaggccccggaggccctcttctttgtccagttcgagaagggggacagctacttccacctgcacatcctggtggagaccgtgggcgtcaaatccatggtggtgggccgctacgtgagccagattaaagagaagctggtgacccgcatctaccgcggggtcgagccgcagcttccgaactggttcgcggtgaccaagacgcgtaatggcgccggaggcgggaacaaggtggtggacgactgctacatccccaactacctgctccccaagacccagcccgagctccagtgggcgtggactaacatggaccagtatataagcgcctgtttgaatctcgcggagcgtaaacggctggtggcgcagcatctgacgcacgtgtcgcagacgcaggagcagaacaaggaaaaccagaaccccaattctgacgcgccggtcatcaggtcaaaaacctccgccaggtacatggagctggtcgggtggctggtggaccgcgggatcacgtcagaaaagcaatggatccaggaggaccaggcgtcctacatctccttcaacgccgcctccaactcgcggtcacaaatcaaggccgcgctggacaatgcctccaaaatcatgagcctgacaaagacggctccggactacctggtgggccagaacccgccggaggacatttccagcaaccgcatctaccgaatcctcgagatgaacgggtacgatccgcagtacgcggcctccgtcttcctgggctgggcgcaaaagaagttcgggaagaggaacaccatctggctctttgggccggccacgacgggtaaaaccaacatcgcggaagccatcgcccacgccgtgcccttctacggctgcgtgaactggaccaatgagaactttccgttcaacgattgcgtcgacaagatggtgatctggtgggaggagggcaagatgacggccaaggtcgtagagagcgccaaggccatcctgggcggaagcaaggtgcgcgtggaccaaaagtgcaagtcatcggcccagatcgacccaactcccgtgatcgtcacctccaacaccaacatgtgcgcggtcatcgacggaaactcgaccaccttcgagcaccaacaaccactccaggaccggatgttcaagttcgagctcaccaagcgcctggagcacgactttggcaaggtcaccaagcaggaagtcaaagactttttccggtgggcgtcagatcacgtgaccgaggtgactcacgagttttacgtcagaaagggtggagctagaaagaggcccgcccccaatgacgcagatataagtgagcccaagcgggcctgtccgtcagttgcgcagccatcgacgtcagacgcggaagctccggtggactacgcggacaggtaccaaaacaaatgttctcgtcacgtgggtatgaatctgatgctttttccctgccggcaatgcgagagaatgaatcagaatgtggacatttgcttcacgcacggggtcatggactgtgccgagtgcttccccgtgtcagaatctcaacccgtgtctgtcgtcagaaagcggacgtatcagaaactgtgtccgattcatcacatcatggggagggcgcccgaggtggcctgctcggcctgcgaactggccaatgtggacttggatgactgtgacatggaacaataa

SEQ ID NO: 54 - DNA, 1611 bp, Adeno-associated virus 4
atgccggggttctacgagatcgtgctgaaggtgcccagcgacctggacgagcacctgcccggcatttctgactcttttgtgagctgggtggccgagaaggaatgggagctgccgccggattctgacatggacttgaatctgattgagcaggcacccctgaccgtggccgaaaagctgcaacgcgagttcctggtcgagtggcgccgcgtgagtaaggccccggaggccctcttctttgtccagttcgagaagggggacagctacttccacctgcacatcctggtggagaccgtgggcgtcaaatccatggtggtgggccgctacgtgagccagattaaagagaagctggtgacccgcatctaccgcggggtcgagccgcagcttccgaactggttcgcggtgaccaagacgcgtaatggcgccggaggcgggaacaaggtggtggacgactgctacatccccaactacctgctccccaagacccagcccgagctccagtgggcgtggactaacatggaccagtatataagcgcctgtttgaatctcgcggagcgtaaacggctggtggcgcagcatctgacgcacgtgtcgcagacgcaggagcagaacaaggaaaaccagaaccccaattctgacgcgccggtcatcaggtcaaaaacctccgccaggtacatggagctggtcgggtggctggtggaccgcgggatcacgtcagaaaagcaatggatccaggaggaccaggcgtcctacatctccttcaacgccgcctccaactcgcggtcacaaatcaaggccgcgctggacaatgcctccaaaatcatgagcctgacaaagacggctccggactacctggtgggccagaacccgccggaggacatttccagcaaccgcatctaccgaatcctcgagatgaacgggtacgatccgcagtacgcggcctccgtcttcctgggctgggcgcaaaagaagttcgggaagaggaacaccatctggctctttgggccggccacgacgggtaaaaccaacatcgcggaagccatcgcccacgccgtgcccttctacggctgcgtgaactggaccaatgagaactttccgttcaacgattgcgtcgacaagatggtgatctggtgggaggagggcaagatgacggccaaggtcgtagagagcgccaaggccatcctgggcggaagcaaggtgcgcgtggaccaaaagtgcaagtcatcggcccagatcgacccaactcccgtgatcgtcacctccaacaccaacatgtgcgcggtcatcgacggaaactcgaccaccttcgagcaccaacaaccactccaggaccggatgttcaagttcgagctcaccaagcgcctggagcacgactttggcaaggtcaccaagcaggaagtcaaagactttttccggtgggcgtcagatcacgtgaccgaggtgactcacgagttttacgtcagaaagggtggagctagaaagaggcccgcccccaatgacgcagatataagtgagcccaagcgggcctgtccgtcagttgcgcagccatcgacgtcagacgcggaagctccggtggactacgcggacagattggctagaggacaacctctctga

SEQ ID NO: 55 - DNA, 1872 bp, Adeno-associated virus 4; identical to SEQ ID NO: 53

SEQ ID NO: 56 - DNA, 1617 bp, Adeno-associated virus 4
  modified_base (162)..(162): a, c, t, g, unknown or other
atgcgtgcagcagctggcggagctgcagtcgagggsggacaaggtgccgatggagtgggtaatgcctcgggtgattggcattgcgattccacctggtctgagggccacgtcacgaccaccagcaccagaacctgggtcttgcccacctacaacaaccacctntacaagcgactcggagagagcctgcagtccaacacctacaacggattctccaccccctggggatactttgacttcaaccgcttccactgccacttctcaccacgtgactggcagcgactcatcaacaacaactggggcatgcgacccaaagccatgcgggtcaaaatcttcaacatccaggtcaaggaggtcacgacgtcgaacggcgagacaacggtggctaataaccttaccagcacggttcagatctttgcggactcgtcgtacgaactgccgtacgtgatggatgcgggtcaagagggcagcctgcctccttttcccaacgacgtctttatggtgccccagtacggctactgtggactggtgaccggcaacacttcgcagcaacagactgacagaaatgccttctactgcctggagtactttccttcgcagatgctgcggactggcaacaactttgaaattacgtacagttttgagaaggtgcctttccactcgatgtacgcgcacagccagagcctggaccggctgatgaaccctctcatcgaccagtacctgtggggactgcaatcgaccaccaccggaaccaccctgaatgccgggactgccaccaccaactttaccaagctgcggcctaccaacttttccaactttaaaaagaactggctgcccgggccttcaatcaagcagcagggcttctcaaagactgccaatcaaaactacaagatccctgccaccgggtcagacagtctcatcaaatacgagacgcacagcactctggacggaagatggagtgccctgacccccggacctccaatggccacggctggacctgcggacagcaagttcagcaacagccagctcatctttgcggggcctaaacagaacggcaacacggccaccgtacccgggactctgatcttcacctctgaggaggagctggcagccaccaacgccaccgatacggacatgtggggcaacctacctggcggtgaccagagcaacagcaacctgccgaccgtggacagactgacagccttgggagccgtgcctggaatggtctggcaaaacagagacatttactaccagggtcccatttgggccaagattcctcataccgatggacactttcacccctcaccgctgattggtgggtttgggctgaaacacccgcctcctcaaatttttatcaagaacaccccggtacctgcgaatcctgcaacgaccttcagctctactccggtaaactccttcattactcagtacagcactggccaggtgtcggtgcagattgactgggagatccagaaggagcggtccaaacgctggaaccccgaggtccagtttacctccaactacggacagcaaaactctctgttgtgggctcccgatgcggctgggaaatacactgagcctagggctatcggtacccgctacctcacccaccacctgtaa

SEQ ID NO: 57 - DNA, 939 bp, Adeno-associated virus 4
atggagctggtcgggtggctggtggaccgcgggatcacgtcagaaaagcaatggatccaggaggaccaggcgtcctacatctccttcaacgccgcctccaactcgcggtcacaaatcaaggccgcgctggacaatgcctccaaaatcatgagcctgacaaagacggctccggactacctggtgggccagaacccgccggaggacatttccagcaaccgcatctaccgaatcctcgagatgaacgggtacgatccgcagtacgcggcctccgtcttcctgggctgggcgcaaaagaagttcgggaagaggaacaccatctggctctttgggccggccacgacgggtaaaaccaacatcgcggaagccatcgcccacgccgtgcccttctacggctgcgtgaactggaccaatgagaactttccgttcaacgattgcgtcgacaagatggtgatctggtgggaggagggcaagatgacggccaaggtcgtagagagcgccaaggccatcctgggcggaagcaaggtgcgcgtggaccaaaagtgcaagtcatcggcccagatcgacccaactcccgtgatcgtcacctccaacaccaacatgtgcgcggtcatcgacggaaactcgaccaccttcgagcaccaacaaccactccaggaccggatgttcaagttcgagctcaccaagcgcctggagcacgactttggcaaggtcaccaagcaggaagtcaaagactttttccggtgggcgtcagatcacgtgaccgaggtgactcacgagttttacgtcagaaagggtggagctagaaagaggcccgcccccaatgacgcagatataagtgagcccaagcgggcctgtccgtcagttgcgcagccatcgacgtcagacgcggaagctccggtggactacgcggacagattggctagaggacaacctctctga

SEQ ID NO: 58 - DNA, 1197 bp, Adeno-associated virus 4
atggagctggtcgggtggctggtggaccgcgggatcacgtcagaaaagcaatggatccaggaggaccaggcgtcctacatctccttcaacgccgcctccaactcgcggtcacaaatcaaggccgcgctggacaatgcctccaaaatcatgagcctgacaaagacggctccggactacctggtgggccagaacccgccggaggacatttccagcaaccgcatctaccgaatcctcgagatgaacgggtacgatccgcagtacgcggcctccgtcttcctgggctgggcgcaaaagaagttcgggaagaggaacaccatctggctctttgggccggccacgacgggtaaaaccaacatcgcggaagccatcgcccacgccgtgcccttctacggctgcgtgaactggaccaatgagaactttccgttcaacgattgcgtcgacaagatggtgatctggtgggaggagggcaagatgacggccaaggtcgtagagagcgccaaggccatcctgggcggaagcaaggtgcgcgtggaccaaaagtgcaagtcatcggcccagatcgacccaactcccgtgatcgtcacctccaacaccaacatgtgcgcggtcatcgacggaaactcgaccaccttcgagcaccaacaaccactccaggaccggatgttcaagttcgagctcaccaagcgcctggagcacgactttggcaaggtcaccaagcaggaagtcaaagactttttccggtgggcgtcagatcacgtgaccgaggtgactcacgagttttacgtcagaaagggtggagctagaaagaggcccgcccccaatgacgcagatataagtgagcccaagcgggcctgtccgtcagttgcgcagccatcgacgtcagacgcggaagctccggtggactacgcggacaggtaccaaaacaaatgttctcgtcacgtgggtatgaatctgatgctttttccctgccggcaatgcgagagaatgaatcagaatgtggacatttgcttcacgcacggggtcatggactgtgccgagtgcttccccgtgtcagaatctcaacccgtgtctgtcgtcagaaagcggacgtatcagaaactgtgtccgattcatcacatcatggggagggcgcccgaggtggcctgctcggcctgcgaactggccaatgtggacttggatgactgtgacatggaacaa

SEQ ID NO: 59 - DNA, 245 bp, Adeno-associated virus 4
ctccatcatctaggtttgcccactgacgtcaatgtgacgtcctagggttagggaggtccctgtattagcagtcacgtgagtgtcgtatttcgcggagcgtagcggagcgcataccaagctgccacgtcacagccacgtggtccgtttgcgacagtttgcgacaccatgtggtcaggagggtatataaccgcgagtgagccagcgaggagctccattttgcccgcgaattttgaacgagcagcagc

SEQ ID NO: 60 - protein, 313 aa, Adeno-associated virus 4
  MOD_RES (313)..(313): Any amino acid
MELVGWLVDRGITSEKQWIQEDQASYISFNAASNSRSQIKAALDNASKIMSLTKTAPDYLVGQNPPEDISSNRIYRILEMNGYDPQYAASVFLGWAQKKFGKRNTIWLFGPATTGKTNIAEAIAHAVPFYGCVNWTNENFPFNDCVDKMVIWWEEGKMTAKVVESAKAILGGSKVRVDQKCKSSAQIDPTPVIVTSNTNMCAVIDGNSTTFEHQQPLQDRMFKFELTKRLEHDFGKVTKQEVKDFFRWASDHVTEVTHEFYVRKGGARKRPAPNDADISEPKRACPSVAQPSTSDAEAPVDYADRLARGQPLX

SEQ ID NO: 61 - protein, 399 aa, Adeno-associated virus 4
MELVGWLVDRGITSEKQWIQEDQASYISFNAASNSRSQIKAALDNASKIMSLTKTAPDYLVGQNPPEDISSNRIYRILEMNGYDPQYAASVFLGWAQKKFGKRNTIWLFGPATTGKTNIAEAIAHAVPFYGCVNWTNENFPFNDCVDKMVIWWEEGKMTAKVVESAKAILGGSKVRVDQKCKSSAQIDPTPVIVTSNTNMCAVIDGNSTTFEHQQPLQDRMFKFELTKRLEHDFGKVTKQEVKDFFRWASDHVTEVTHEFYVRKGGARKRPAPNDADISEPKRACPSVAQPSTSDAEAPVDYADRYQNKCSRHVGMNLMLFPCRQCERMNQNVDICFTHGVMDCAECFPVSESQPVSVVRKRTYQKLCPIHHIMGRAPEVACSACELANVDLDDCDMEQ

SEQ ID NO: 62 - protein, 623 aa, Adeno-associated virus 4
MPGFYEIVLKVPSDLDEHLPGISDSFVSWVAEKEWELPPDSDMDLNLIEQAPLTVAEKLQREFLVEWRRVSKAPEALFFVQFEKGDSYFHLHILVETVGVKSMVVGRYVSQIKEKLVTRIYRGVEPQLPNWFAVTKTRNGAGGGNKVVDDCYIPNYLLPKTQPELQWAWTNMDQYISACLNLAERKRLVAQHLTHVSQTQEQNKENQNPNSDAPVIRSKTSARYMELVGWLVDRGITSEKQWIQEDQASYISFNAASNSRSQIKAALDNASKIMSLTKTAPDYLVGQNPPEDISSNRIYRILEMNGYDPQYAASVFLGWAQKKFGKRNTIWLFGPATTGKTNIAEAIAHAVPFYGCVNWTNENFPFNDCVDKMVIWWEEGKMTAKVVESAKAILGGSKVRVDQKCKSSAQIDPTPVIVTSNTNMCAVIDGNSTTFEHQQPLQDRMFKFELTKRLEHDFGKVTKQEVKDFFRWASDHVTEVTHEFYVRKGGARKRPAPNDADISEPKRACPSVAQPSTSDAEAPVDYADRYQNKCSRHVGMNLMLFPCRQCERMNQNVDICFTHGVMDCAECFPVSESQPVSVVRKRTYQKLCPIHHIMGRAPEVACSACELANVDLDDCDMEQ

SEQ ID NO: 63 - protein, 537 aa, Adeno-associated virus 4
  MOD_RES (537)..(537): Any amino acid
MPGFYEIVLKVPSDLDEHLPGISDSFVSWVAEKEWELPPDSDMDLNLIEQAPLTVAEKLQREFLVEWRRVSKAPEALFFVQFEKGDSYFHLHILVETVGVKSMVVGRYVSQIKEKLVTRIYRGVEPQLPNWFAVTKTRNGAGGGNKVVDDCYIPNYLLPKTQPELQWAWTNMDQYISACLNLAERKRLVAQHLTHVSQTQEQNKENQNPNSDAPVIRSKTSARYMELVGWLVDRGITSEKQWIQEDQASYISFNAASNSRSQIKAALDNASKIMSLTKTAPDYLVGQNPPEDISSNRIYRILEMNGYDPQYAASVFLGWAQKKFGKRNTIWLFGPATTGKTNIAEAIAHAVPFYGCVNWTNENFPFNDCVDKMVIWWEEGKMTAKVVESAKAILGGSKVRVDQKCKSSAQIDPTPVIVTSNTNMCAVIDGNSTTFEHQQPLQDRMFKFELTKRLEHDFGKVTKQEVKDFFRWASDHVTEVTHEFYVRKGGARKRPAPNDADISEPKRACPSVAQPSTSDAEAPVDYADRLARGQPLX

SEQ ID NO: 64 - protein, 623 aa, Adeno-associated virus 4; identical to SEQ ID NO: 62

SEQ ID NO: 65 - protein, 544 aa, Adeno-associated virus 4
MSDDSEMRAAAGGAAVEGGQGADGVGNASGDWHCDSTWSEGHVTTTSTRTWVLPTYNNHLYKRLGESLQSNTYNGFSTPWGYFDFNRFHCHFSPRDWQRLINNNWGMRPKAMRVKIFNIQVKEVTTSNGETTVANNLTSTVQIFADSSYELPYVMDAGQEGSLPPFPNDVFMVPQYGYCGLVTGNTSQQQTDRNAFYCLEYFPSQMLRTGNNFEITYSFEKVPFHSMYAHSQSLDRLMNPLIDQYLWGLQSTTTGTTLNAGTATTNFTKLRPTNFSNFKKNWLPGPSIKQQGFSKTANQNYKIPATGSDSLIKYETHSTLDGRWSALTPGPPMATAGPADSKFSNSQLIFAGPKQNGNTATVPGTLIFTSEEELAATNATDTDMWGNLPGGDQSNSNLPTVDRLTALGAVPGMVWQNRDIYYQGPIWAKIPHTDGHFHPSPLIGGFGLKHPPPQIFIKNTPVPANPATTFSSTPVNSFITQYSTGQVSVQIDWEIQKERSKRWNPEVQFTSNYGQQNSLLWAPDAAGKYTEPRAIGTRYLTHHL

SEQ ID NO: 66 - protein, 734 aa, Adeno-associated virus 4
MTDGYLPDWLEDNLSEGVREWWALQPGAPKPKANQQHQDNARGLVLPGYKYLGPGNGLDKGEPVNAADAAALEHDKAYDQQLKAGDNPYLKYNHADAEFQQRLQGDTSFGGNLGRAVFQAKKRVLEPLGLVEQAGETAPGKKRPLIESPQQPDSSTGIGKKGKQPAKKKLVFEDETGAGDGPPEGSTSGAMSDDSEMRAAAGGAAVEGGQGADGVGNASGDWHCDSTWSEGHVTTTSTRTWVLPTYNNHLYKRLGESLQSNTYNGFSTPWGYFDFNRFHCHFSPRDWQRLINNNWGMRPKAMRVKIFNIQVKEVTTSNGETTVANNLTSTVQIFADSSYELPYVMDAGQEGSLPPFPNDVFMVPQYGYCGLVTGNTSQQQTDRNAFYCLEYFPSQMLRTGNNFEITYSFEKVPFHSMYAHSQSLDRLMNPLIDQYLWGLQSTTTGTTLNAGTATTNFTKLRPTNFSNFKKNWLPGPSIKQQGFSKTANQNYKIPATGSDSLIKYETHSTLDGRWSALTPGPPMATAGPADSKFSNSQLIFAGPKQNGNTATVPGTLIFTSEEELAATNATDTDMWGNLPGGDQSNSNLPTVDRLTALGAVPGMVWQNRDIYYQGPIWAKIPHTDGHFHPSPLIGGFGLKHPPPQIFIKNTPVPANPATTFSSTPVNSFITQYSTGQVSVQIDWEIQKERSKRWNPEVQFTSNYGQQNSLLWAPDAAGKYTEPRAIGTRYLTHHL

SEQ ID NO: 67 - protein, 598 aa, Adeno-associated virus 4
TAPGKKRPLIESPQQPDSSTGIGKKGKQPAKKKLVFEDETGAGDGPPEGSTSGAMSDDSEMRAAAGGAAVEGGQGADGVGNASGDWHCDSTWSEGHVTTTSTRTWVLPTYNNHLYKRLGESLQSNTYNGFSTPWGYFDFNRFHCHFSPRDWQRLINNNWGMRPKAMRVKIFNIQVKEVTTSNGETTVANNLTSTVQIFADSSYELPYVMDAGQEGSLPPFPNDVFMVPQYGYCGLVTGNTSQQQTDRNAFYCLEYFPSQMLRTGNNFEITYSFEKVPFHSMYAHSQSLDRLMNPLIDQYLWGLQSTTTGTTLNAGTATTNFTKLRPTNFSNFKKNWLPGPSIKQQGFSKTANQNYKIPATGSDSLIKYETHSTLDGRWSALTPGPPMATAGPADSKFSNSQLIFAGPKQNGNTATVPGTLIFTSEEELAATNATDTDMWGNLPGGDQSNSNLPTVDRLTALGAVPGMVWQNRDIYYQGPIWAKIPHTDGHFHPSPLIGGFGLKHPPPQIFIKNTPVPANPATTFSSTPVNSFITQYSTGQVSVQIDWEIQKERSKRWNPEVQFTSNYGQQNSLLWAPDAAGKYTEPRAIGTRYLTHHL

SEQ ID NO: 68 - DNA, 129 bp, Adeno-associated virus 4
ttggccactccctctatgcgcgctcgctcactcactcggccctgcggccagaggccggcagtctggagacctttggtgtccagggcagggccgagtgagtgagcgagcgcgcatagagggagtggccaa

SEQ ID NO: 69 - DNA, 125 bp, Adeno-associated virus 4
ttggccactccctctatgcgcgctcgctcactcactcggccctggagaccaaaggtctccagactgccggcctctggccggcagggccgagtgagtgagcgagcgcgcatagagggagtggccaa

SEQ ID NO: 70 - DNA, 4768 bp, Adeno-associated virus 4
  modified_base (3009)..(3009): a, c, t, g, unknown or other
ttggccactccctctatgcgcgctcgctcactcactcggccctggagaccaaaggtctccagactgccggcctctggccggcagggccgagtgagtgagcgagcgcgcatagagggagtggccaactccatcatctaggtttgcccactgacgtcaatgtgacgtcctagggttagggaggtccctgtattagcagtcacgtgagtgtcgtatttcgcggagcgtagcggagcgcataccaagctgccacgtcacagccacgtggtccgtttgcgacagtttgcgacaccatgtggtcaggagggtatataaccgcgagtgagccagcgaggagctccattttgcccgcgaattttgaacgagcagcagccatgccggggttctacgagatcgtgctgaaggtgcccagcgacctggacgagcacctgcccggcatttctgactcttttgtgagctgggtggccgagaaggaatgggagctgccgccggattctgacatggacttgaatctgattgagcaggcacccctgaccgtggccgaaaagctgcaacgcgagttcctggtcgagtggcgccgcgtgagtaaggccccggaggccctcttctttgtccagttcgagaagggggacagctacttccacctgcacatcctggtggagaccgtgggcgtcaaatccatggtggtgggccgctacgtgagccagattaaagagaagctggtgacccgcatctaccgcggggtcgagccgcagcttccgaactggttcgcggtgaccaagacgcgtaatggcgccggaggcgggaacaaggtggtggacgactgctacatccccaactacctgctccccaagacccagcccgagctccagtgggcgtggactaacatggaccagtatataagcgcctgtttgaatctcgcggagcgtaaacggctggtggcgcagcatctgacgcacgtgtcgcagacgcaggagcagaacaaggaaaaccagaaccccaattctgacgcgccggtcatcaggtcaaaaacctccgccaggtacatggagctggtcgggtggctggtggaccgcgggatcacgtcagaaaagcaatggatccaggaggaccaggcgtcctacatctccttcaacgccgcctccaactcgcggtcacaaatcaaggccgcgctggacaatgcctccaaaatcatgagcctgacaaagacggctccggactacctggtgggccagaacccgccggaggacatttccagcaaccgcatctaccgaatcctcgagatgaacgggtacgatccgcagtacgcggcctccgtcttcctgggctgggcgcaaaagaagttcgggaagaggaacaccatctggctctttgggccggccacgacgggtaaaaccaacatcgcggaagccatcgcccacgccgtgcccttctacggctgcgtgaactggaccaatgagaactttccgttcaacgattgcgtcgacaagatggtgatctggtgggaggagggcaagatgacggccaaggtcgtagagagcgccaaggccatcctgggcggaagcaaggtgcgcgtggaccaaaagtgcaagtcatcggcccagatcgacccaactcccgtgatcgtcacctccaacaccaacatgtgcgcggtcatcgacggaaactcgaccaccttcgagcaccaacaaccactccaggaccggatgttcaagttcgagctcaccaagcgcctggagcacgactttggcaaggtcaccaagcaggaagtcaaagactttttccggtgggcgtcagatcacgtgaccgaggtgactcacgagttttacgtcagaaagggtggagctagaaagaggcccgcccccaatgacgcagatataagtgagcccaagcgggcctgtccgtcagttgcgcagccatcgacgtcagacgcggaagctccggtggactacgcggacaggtaccaaaacaaatgttctcgtcacgtgggtatgaatctgatgctttttccctgccggcaatgcgagagaatgaatcagaatgtggacatttgcttcacgcacggggtcatggactgtgccgagtgcttccccgtgtcagaatctcaacccgtgtctgtcgtcagaaagcggacgtatcagaaactgtgtccgattcatcacatcatggggagggcgcccgaggtggcctgctcggcctgcgaactggccaatgtggacttggatgactgtgacatggaacaataaatgactcaaaccagatatgactgacggttaccttccagattggctagaggacaacctctctgaaggcgttcgagagtggtgggcgctgcaacctggagcccctaaacccaaggcaaatcaacaacatcaggacaacgctcggggtcttgtgcttccgggttacaaatacctcggacccggcaacggactcgacaagggggaacccgtcaacgcagcggacgcggcagccctcgagcacgacaaggcctacgaccagcagctcaaggccggtgacaacccctacctcaagtacaaccacgccgacgcggagttccagcagcggcttcagggcgacacaccgtttgggggcaacctcggcagagcagtcttccaggccaaaaagagggttcttgaacctcttggtctggttgagcaagcgggtgagacggctcctggaaagaagagaccgttgattgaatccccccagcagcccgactcctccacgggtatcggcaaaaaaggcaagcagccggctaaaaagaagctcgttttcgaagacgaaactggagcaggcgacggaccccctgagggatcaacttccggagccatgtctgatgacagtgagatgcgtgcagcagctggcggagctgcagtcgagggsggacaaggtgccgatggagtgggtaatgcctcgggtgattggcattgcgattccacctggtctgagggccacgtcacgaccaccagcaccagaacctgggtcttgcccacctacaacaaccacctntacaagcgactcggagagagcctgcagtccaacacctacaacggattctccaccccctggggatactttgacttcaaccgcttccactgccacttctcaccacgtgactggcagcgactcatcaacaacaactggggcatgcgacccaaagccatgcgggtcaaaatcttcaacatccaggtcaaggaggtcacgacgtcgaacggcgagacaacggtggctaataaccttaccagcacggttcagatctttgcggactcgtcgtacgaactgccgtacgtgatggatgcgggtcaagagggcagcctgcctccttttcccaacgacgtctttatggtgccccagtacggctactgtggactggtgaccggcaacacttcgcagcaacagactgacagaaatgccttctactgcctggagtactttccttcgcagatgctgcggactggcaacaactttgaaattacgtacagttttgagaaggtgcctttccactcgatgtacgcgcacagccagagcctggaccggctgatgaaccctctcatcgaccagtacctgtggggactgcaatcgaccaccaccggaaccaccctgaatgccgggactgccaccaccaactttaccaagctgcggcctaccaacttttccaactttaaaaagaactggctgcccgggccttcaatcaagcagcagggcttctcaaagactgccaatcaaaactacaagatccctgccaccgggtcagacagtctcatcaaatacgagacgcacagcactctggacggaagatggagtgccctgacccccggacctccaatggccacggctggacctgcggacagcaagttcagcaacagccagctcatctttgcggggcctaaacagaacggcaacacggccaccgtacccgggactctgatcttcacctctgaggaggagctggcagccaccaacgccaccgatacggacatgtggggcaacctacctggcggtgaccagagcaacagcaacctgccgaccgtggacagactgacagccttgggagccgtgcctggaatggtctggcaaaacagagacatttactaccagggtcccatttgggccaagattcctcataccgatggacactttcacccctcaccgctgattggtgggtttgggctgaaacacccgcctcctcaaatttttatcaagaacaccccggtacctgcgaatcctgcaacgaccttcagctctactccggtaaactccttcattactcagtacagcactggccaggtgtcggtgcagattgactgggagatccagaaggagcggtccaaacgctggaaccccgaggtccagtttacctccaactacggacagcaaaactctctgttgtgggctcccgatgcggctgggaaatacactgagcctagggctatcggtacccgctacctcacccaccacctgtaataacctgttaatcaataaaccggtttattcgtttcagttgaactttggtctccgtgtccttcttatcttatctcgtttccatggctactgcgtacataagcagcggcctgcggcgcttgcgcttcgcggtttacaactgccggttaatcagtaacttctggcaaaccatgatgatggagttggccactccctctatgcgcgctcgctcactcactcggccctggagaccaaaggtctccagactgccggcctctggccggcagggccgagtgagtgagcgagcgcgcatagagggagtggccaa

SEQ ID NO: 71 - DNA, 3098 bp, Adeno-associated virus
gaattcgccctttctacggctgcgtcaactggaccaatgagaactttcccttcaacgattgcgtcgacaagatggtgatctggtgggaggagggcaagatgacggccaaggtcgtggagtccgccaaggccattctcggcggcagcaaggtgcgcgtggaccaaaagtgcaagtcttccgcccagatcgatcccacccccgtgatcgtcacttccaacaccaacatgtgcgctgtgattgacgggaacagcaccaccttcgagcaccagcagccgttacaagaccggatgttcaaatttgaactcacccgccgtctggagcacgactttggcaaggtgacaaagcaggaagtcaaagagttcttccgctgggcgcaggatcacgtgaccgaggtggcgcatgagttctacgtcagaaagggtggagccaacaagagacccgcccccgatgacgcggataaaagcgagcccaagcgggcctgcccctcagtcgcggatccatcgacgtcagacgcggaaggagctccggtggactttgccgacaggtaccaaaacaaatgttctcgtcacgcgggcatgcttcagatgctgtttccctgcaagacatgcgagagaatgaatcagaatttcaacatttgcttcacgcacgggaccagagactgttcagaatgtttccccggcgtgtcagaatctcaaccggtcgtcagaaagaggacgtatcggaaactctgtgccattcatcatctgctggggcgggctcccgagattgcttgctcggcctgcgatctggtcaacgtggacctggatgaccgtgtttctgagcaataaatgacttaaaccaggtatggctgccgatggttatcttccagattggctcgaggacaacctctctgagggcattcgcgagtggtgggacttgaaacctggagccccgaaacccaaagccaaccagcaaaagcaggacgacggccggggtctggtgcttcctggctacaagtacctcggacccttcaacggactcgacaagggagagccggtcaacgaggcagacgccgcggccctcgagcacgacaaggcctacgacaagcagctcgagcagggggacaacccgtacctcaagtacaaccacgccgacgccgagtttcaggagcgtcttcaagaagatacgtcttttgggggcaacctcgggcgagcagtcttccaggccaagaagcgggttctcgaacctctcggtctggttgaggaaggcgctaagacggctcctggaaagaagagacccatagaatcccccgactcctccacgggcatcggcaagaaaggccagcagcccgctaaaaagaagctcaactttgggcagactggcgactcagagtcagtgcccgacccccaacctctcggagaacctcccgccgcgccctcaggtctgggatctggtacaatggctgcaggcggtggcgcaccaatggcagacaataacgaaggcgccgacggagtgggtaatgcctccggaaattggcattgcgattccacatggctgggcgacagagtcatcaccaccagcacccgcacctgggccctgcccacctacaacaaccacctctacaagcagatatcaagtcagagcggggctaccaacgacaaccacttcttcggctacagcaccccctggggctattttgacttcaacagattccactgccacttctcaccacgtgactggcagcgactcatcaacaacaactggggattccggcccagaaagctgcggttcaagttgttcaacatccaggtcaaggaggtcacgacgaacgacggcgttacgaccatcgctaataaccttaccagcacgattcaggtcttctcggactcggagtaccaactgccgtacgtcctcggctctgcgcaccagggctgcctccctccgttccctgcggacgtgttcatgattcctcagtacggatatctgactctaaacaacggcagtcagtctgtgggacgttcctccttctactgcctggagtactttccttctcagatgctgagaacgggcaataactttgaattcagctacacctttgaggaagtgcctttccacagcagctatgcgcacagccagagcctggaccggctgatgaatcccctcatcgaccagtacctgtactacctggcccggacccagagcactacggggtccacaagggagctgcagttccatcaggctgggcccaacaccatggccgagcaatcaaagaactggctgcccggaccctgttatcggcagcagagactgtcaaaaaacatagacagcaacaacaacagtaactttgcctggaccggggccactaaataccatctgaatggtagaaattcattaaccaacccgggcgtagccatggccaccaacaaggacgacgaggaccagttctttcccatcaacggagtgctggtttttggcgaaacgggggctgccaacaagacaacgctggaaaacgtgctaatgaccagcgaggaggagatcaaaaccaccaatcccgtggctacagaagaatacggtgtggtctccagcaacctgcaatcgtctacggccggaccccagacacagactgtcaacagccagggggctctgcccggcatggtctggcagaaccgggacgtgtacctgcagggtcccatctgggccaaaattcctcacacggacggcaactttcacccgtctcccctgatgggcggatttggactcaaacacccgcctcctcaaattctcatcaaaaacaccccggtacctgctaatcctccagaggtgtttactcctgccaagtttgcctcatttatcacgcagtacagcaccggccaggtcagcgtggagatcgagtgggaactgcagaaagaaaacagcaaacgctggaatccagagattcagtacacctcaaattatgccaagtctaataatgtggaatttgctgtcaacaacgaaggggtttatactgagcctcgccccattggcacccgttacctcacccgtaacctgtaattgcctgttaatcaataaaccggttaattcgtttcagttgaactttggtctctgcgaagggcgaattc

SEQ ID NO: 72 - protein, 728 aa, Artificial Sequence
  source: /note="Description of Artificial Sequence: Synthetic polypeptide"
MAADGYLPDWLEDNLSEGIREWWDLKPGAPKPKANQQKQDDGRGLVLPGYKYLGPFNGLDKGEPVNEADAAALEHDKAYDKQLEQGDNPYLKYNHADAEFQERLQEDTSFGGNLGRAVFQAKKRVLEPLGLVEEGAKTAPGKKRPIESPDSSTGIGKKGQQPAKKKLNFGQTGDSESVPDPQPLGEPPAAPSGLGSGTMAAGGGAPMADNNEGADGVGNASGNWHCDSTWLGDRVITTSTRTWALPTYNNHLYKQISSQSGATNDNHFFGYSTPWGYFDFNRFHCHFSPRDWQRLINNNWGFRPRKLRFKLFNIQVKEVTTNDGVTTIANNLTSTIQVFSDSEYQLPYVLGSAHQGCLPPFPADVFMIPQYGYLTLNNGSQSVGRSSFYCLEYFPSQMLRTGNNFEFSYTFEEVPFHSSYAHSQSLDRLMNPLIDQYLYYLARTQSTTGSTRELQFHQAGPNTMAEQSKNWLPGPCYRQQRLSKNIDSNNNSNFAWTGATKYHLNGRNSLTNPGVAMATNKDDEDQFFPINGVLVFGETGAANKTTLENVLMTSEEEIKTTNPVATEEYGVVSSNLQSSTAGPQTQTVNSQGALPGMVWQNRDVYLQGPIWAKIPHTDGNFHPSPLMGGFGLKHPPPQILIKNTPVPANPPEVFTPAKFASFITQYSTGQVSVEIEWELQKENSKRWNPEIQYTSNYAKSNNVEFAVNNEGVYTEPRPIGTRYLTRNL

SEQ ID NO: 73 - DNA, 2495 bp, Artificial Sequence
  source: /note="Description of Artificial Sequence: Synthetic polynucleotide"
gaattcgccctttctacggctgcgtcaactagaccaatgagaactttcccttcaacgattgcgtcgacaagatggtgatctggtgggaggagggcaagatgacggccaaggtcgtggagtccgccaaggccattcatcatctgctggggcgggctcccgagattgcttgctcggcctgcgatctggtcaacgtggacctggatgactgtgtttctgagcaataaatgacttaaaccaggtatggctgccgatggttatcttccagattggctcgaggacaacctctctgagggcattcgcgagtggtgggacttgaaacctggagccccgaaacccaaagccaaccagcaaaagcaggacgacggccggggtctggtgcttcctggctacaagtacctcggacccttcaacggactcgacaagggagagccggtcaacgaggcagacgccgcggccctcgagcacgacaaggcctacgacaagcagctcgagcagggggacaacccgtacctcaagtacaaccacgccgacgccgagtttcaggagcgtcttcaagaagatacgtcttttgggggcaacctcgggcgagcagtcttccaggccaagaagcgggttctcgaacctctcggtctggttgaggaaggcgctaagacggctcctggaaagaagagacccatagaatcccccgactcctccacgggcatcggcaagaaaggccagcagcccgctaaaaagaagctcaactttgggcagactggcgactcagagtcagtgcccgaccctcaaccaatcggagaaccccccgcaggcccctctggtctgggatctggtacaatggctgcaggcggtggcgctccaatggcagacaataacgaaggcgccgacggagtgggtaatgcctccggaaattggcattgcgattccacatggctgggcgacagagtcatcaccaccagcacccgcacctgggccctgcccacctacaacaaccacctctacaagcagatatcaagtcagagcggggctaccaacgacaaccacttcttcggctacagcaccccctggggctattttgacttcaacagattccactgccacttctcaccacgtgactggcagcgactcatcaacaacaactggggattccggcccagaaagctgcggttcaagttgttcaacatccaggtcaaggaggtcacgacgaacgacggcgttacgaccatcgctaataaccttaccagcacgattcaggtcttctcggactcggagtaccaactgccgtacgtcctcggctctgcgcaccagggctgcctccctccgttccctgcggacgtgttcatgattcctcagtacggatatctgactctaaacaacggcagtcagtctgtgggacgttcctccttctactgcctggagtactttccttctcagatgctgagaacgggcaataactttgaattcagctacacctttgaggaagtgcctttccacagcagctatgcgcacagccagagcctggaccggctgatgaatcccctcatcgaccagtacctgtactacctggcccggacccagagcactacggggtccacaagggagctgcagttccatcaggctgggcccaacaccatggccgagcaatcaaagaactggctgcccggaccctgttatcggcagcagagactgtcaaaaaacatagacagcaacaacaccagtaactttgcctggaccggggccactaaataccatctgaatggtagaaattcattaaccaacccgggcgtagccatggccaccaacaaggacgacgaggaccagttctttcccatcaacggagtgctggtttttggcaaaacgggggctgccaacaagacaacgctggaaaacgtgctaatgaccagcgaggaggagatcaaaaccaccaatcccgtggctacagaacagtacggtgtggtctccagcaacctgcaatcgtctacggccggaccccagacacagactgtcaacagccagggggctctgcccggcatggtctggcagaaccgggacgtgtacctgcagggtcccatctgggccaaaattcctcacacggacggcaactttcacccgtctcccctgatgggcggatttggactcaaacacccgcctcctcaaattctcatcaaaaacaccccggtacctgctaatcctccagaggtgtttactcctgccaagtttgcctcatttatcacgcagtacagcaccggccaggtcagcgtggagatcgagtgggaactgcagaaagaaaacagcaaacgctggaatccagagattcagtacacctcaaattatgccaagtctaataatgtggaatttgctgtcaacaacgaaggggtttatactgagcctcgccccattggcacccgttacctcacccgtaacctgtaattgcctgttaatcaataaaccggttaattcgtttcagttgaactttggtctctgcgaagggcgaattc

SEQ ID NO: 74 - protein, 728 aa, Artificial Sequence
  source: /note="Description of Artificial Sequence: Synthetic polypeptide"
MAADGYLPDWLEDNLSEGIREWWDLKPGAPKPKANQQKQDDGRGLVLPGYKYLGPFNGLDKGEPVNEADAAALEHDKAYDKQLEQGDNPYLKYNHADAEFQERLQEDTSFGGNLGRAVFQAKKRVLEPLGLVEEGAKTAPGKKRPIESPDSSTGIGKKGQQPAKKKLNFGQTGDSESVPDPQPIGEPPAGPSGLGSGTMAAGGGAPMADNNEGADGVGNASGNWHCDSTWLGDRVITTSTRTWALPTYNNHLYKQISSQSGATNDNHFFGYSTPWGYFDFNRFHCHFSPRDWQRLINNNWGFRPRKLRFKLFNIQVKEVTTNDGVTTIANNLTSTIQVFSDSEYQLPYVLGSAHQGCLPPFPADVFMIPQYGYLTLNNGSQSVGRSSFYCLEYFPSQMLRTGNNFEFSYTFEEVPFHSSYAHSQSLDRLMNPLIDQYLYYLARTQSTTGSTRELQFHQAGPNTMAEQSKNWLPGPCYRQQRLSKNIDSNNTSNFAWTGATKYHLNGRNSLTNPGVAMATNKDDEDQFFPINGVLVFGKTGAANKTTLENVLMTSEEEIKTTNPVATEQYGVVSSNLQSSTAGPQTQTVNSQGALPGMVWQNRDVYLQGPIWAKIPHTDGNFHPSPLMGGFGLKHPPPQILIKNTPVPANPPEVFTPAKFASFITQYSTGQVSVEIEWELQKENSKRWNPEIQYTSNYAKSNNVEFAVNNEGVYTEPRPIGTRYLTRNL

SEQ ID NO: 75 - DNA, 2504 bp, Artificial Sequence
  source: /note="Description of Artificial Sequence: Synthetic polynucleotide"
gaattcgccctttctacggctgcgtcaactggaccaatgagaactttcccttcaacgattgcgtcgacaagatggtgatctggtgggaggagggcaagatgacggccaaggtcgtggagtccgccaaggccattcatcatctgctggggcgggctcccgagattgcttgctcggcctgcgatctggtcaacgtggacctggatgactgtgtttctgagcaataaatgacttaaaccaggtatggctgccgatggttatcttccagattggctcgaggacaacctctctgagggcattcgcgagtggtgggacttgaaacctggagccccgaaacccaaagccaaccagcaaaagcaggacgacggccggggtctggtgcttcctggctacaagtacctcggacccttcaacggactcgacaagggagagccggtcaacgaggcagacgccgcggccctcgagcacgacaaggcctacgacaagcagctcgagcagggggacaacccgtacctcaagtacaaccacgccgacgccgagtttcaggagcgtcttcaagaagatacgtcttttgggggcaacctcgggcgagcagtcttccaggccaagaagcgggttctcgaacctctcggtctggttgaggaaggcgctaagacggctcctggaaagaagagacccatagaatcccccgactcctccacgggcatcggcaagaaaggccagcagcccgctaaaaagaagctcaactttgggcagactggcgactcagagtcagtgcccgaccctcaaccaatcggagaaccccccgcaggcccctctggtctgggatctggtacaatggctgcaggcggtggcgctccaatggcagacaataacgaaggcgccgacggagtgggtaatgcctccggaaattggcattgcgattccacatggctgggcgacagagtcatcaccaccagcacccgcacctgggccctgcccacctacaacaaccacctctacaagcagatatcaagtcagagcggggctaccaacgacaaccacttcttcggctacagcaccccctggggctattttgacttcaacagattccactgccacttctcatcacgtgactggcagcgactcatcaacaacaactggggattccggcccaagagactcaacttcaagctcttcaacatccaggtcaaggaggtcacgcagaatgaaggcaccaagaccatcgccaataaccttaccagcacgattcaggtctttacggactcggaataccggctcccgtacgtcctcggctctgcgcaccagggctgcctgcctccgttcccggcggacgtcttcatgattcctcagtacgggtacctgactctgaacaacggcagtcaggccgtgggccgttcctccttctactgcctggagtactttccttctcaaatgctgagaacgggcaacaactttgagttcagctaccagtttgaggacgtgccttttcacagcagctacgcgcacagccaaagcctggaccggctgatgaaccccctcatcgaccagtacctgtactacctgtctcggactcagtccacgggaggtaccgcaggaactcagcagttgctattttctcaggccgggcctaataacatgtcggctcaggccaaaaactggctacccgggccctgctaccggcagcaacgcgtctccacgacactgtcgcaaaataacaacagcaactttgcttggaccggtgccaccaagtatcatctgaatggcagagactctctggtaaatcccggtgtcgctatggcaacgcacaaggacgacgaagagcgattttttccatccagcggagtcttgatgtttgggaaacagggagctggaaaagacaacgtggactatagcagcgttatgctaaccagtgaggaagaaatcaaaaccaccaacccagtggccacagaacagtacggcgtggtggccgataacctgcaacagcaaaacgccgctcctattgtaggggccgtcaacagtcaaggagccttacctggcatggtctggcagaaccgggacgtgtacctgcagggtcctatctgggccaagattcctcacacggacggcaactttcatccttcgccgctgatgggaggctttggactgaaacacccgcctcctcagatcctgattaagaatacacctgttcccgcggatcctccaactaccttcagtcaagccaagccggcgtcgttcatcacgcagtacagcaccggacaggtcagcgtggaaattgaatgggagctgcagaaagagaacagcaagcgctggaacccagagattcagtatacttccaactactacaaatctacaaatgtggactttgctgtcaatactgagggtacttattcagagcctcgccccattggcacccgttacctcacccgtaacctgtaattgcctgttaatcaataaaccggttaattcgtttcagttgaactttggtctctgcgaagggcgaattc

SEQ ID NO: 76 - protein, 731 aa, Artificial Sequence
  source: /note="Description of Artificial Sequence: Synthetic polypeptide"
MAADGYLPDWLEDNLSEGIREWWDLKPGAPKPKANQQKQDDGRGLVLPGYKYLGPFNGLDKGEPVNEADAAALEHDKAYDKQLEQGDNPYLKYNHADAEFQERLQEDTSFGGNLGRAVFQAKKRVLEPLGLVEEGAKTAPGKKRPIESPDSSTGIGKKGQQPAKKKLNFGQTGDSESVPDPQPIGEPPAGPSGLGSGTMAAGGGAPMADNNEGADGVGNASGNWHCDSTWLGDRVITTSTRTWALPTYNNHLYKQISSQSGATNDNHFFGYSTPWGYFDFNRFHCHFSSRDWQRLINNNWGFRPKRLNFKLFNIQVKEVTQNEGTKTIANNLTSTIQVFTDSEYRLPYVLGSAHQGCLPPFPADVFMIPQYGYLTLNNGSQAVGRSSFYCLEYFPSQMLRTGNNFEFSYQFEDVPFHSSYAHSQSLDRLMNPLIDQYLYYLSRTQSTGGTAGTQQLLFSQAGPNNMSAQAKNWLPGPCYRQQRVSTTLSQNNNSNFAWTGATKYHLNGRDSLVNPGVAMATHKDDEERFFPSSGVLMFGKQGAGKDNVDYSSVMLTSEEEIKTTNPVATEQYGVVADNLQQQNAAPIVGAVNSQGALPGMVWQNRDVYLQGPIWAKIPHTDGNFHPSPLMGGFGLKHPPPQILIKNTPVPADPPTTFSQAKPASFITQYSTGQVSVEIEWELQKENSKRWNPEIQYTSNYYKSTNVDFAVNTEGTYSEPRPIGTRYLTRNL

SEQ ID NO: 77 - DNA, 3128 bp, Artificial Sequence
  source: /note="Description of Artificial Sequence: Synthetic polynucleotide"
gaattcgccctttctacggctgcgtcaactggaccaatgagaactttcccttcaacgattgcgtcgacaagatggtgatctggtgggaggagggcaagatgacggccaaggtcgtggagtccgccaaggccattctcggcggcagcaaggtgcgcgtggaccaaaagtgcaagtcttccgcccagatcgatcccacccccgtgatcgtcacttccaacaccaacatgtgcgccgtgattgacgggaacagcaccaccttcgagcaccagcagccgttacaagaccggatgttcaaatttgaactcacccgccgtctggagcacgactttggcaaggtgacaaagcaggaagtcaaagagttcttccgctgggcgcaggatcacgtgaccgaggtggcgcatgagttctacgtcagaaagggtggagccaacaagagacccgcccccgatgacgcggataaaagcgagcccaagcgggcctgcccctcagtcgcggatccatcgacgtcagacgcggaaggagctccggtggactttgccgacaggtaccaaaacaaatgttctcgtcacgcgggcatgcttcagatgctgtttccctgcaagacatgcgagagaatgaatcagaatttcaacatttgcttcacgcacgggaccagagactgttcagaatgtttccccggcgtgtcagaatctcaaccggtcgtcagaaagaggacgtatcggaaactctgtgccattcatcatctgctagggcgggctcccgagattgcttgctcggcctgcgatctggtcaacgtggacctggatgactgtgtttctgagcaataaatgacttaaaccaggtatggctgccgatggttatcttccagattggctcgaggacaacctctctgagggcattcgcgagtggtgggacttgaaacctggagccccgaaacccaaagccaaccagcaaaagcaggacgacggccggggtctggtgcttcctggctacaagtacctcggacccttcaacggactcgacaagggggagcccgtcaacgcggcggacgcagcggccctcgagcacgacaaggcctacgaccagcagctcaaagcgggtgacaatccgtacctgcggtataaccacgccgacgccgagtttcaggagcgtctgcaagaagatacgtcttttgggggcaacctcgggcgagcagtcttccaggccaagaagcgggttctcgaacctctcggtctggttgaggaaggcgctaagacggctcctggaaagaagagaccggtagagccatcaccccagcgttctccagactcctctacgggcatcggcaagacaggccagcagcccgcgaaaaagagactcaactttgggcagactggcgactcagagtcagtgcccgaccctcaaccaatcggagaaccccccgcaggcccctctggtctgggatctggtacaatggctgcaggcggtggcgctccaatggcagacaataacgaaggcgccgacggagtgggtagttcctcaggaaattggcattgcgattccacatggctgggcgacagagtcatcaccaccagcacccgaacctgggccctccccacctacaacaaccacctctacaagcaaatctccaacgggacatcgggaggaagcaccaacgacaacacctacttcggctacagcaccccctgggggtattttgactttaacagattccactgccacttctcaccacgtgactggcagcgactcatcaacaacaactggggattccggcccaagagactcaacttcaagctcttcaacatccaggtcaaggaggtcacgcagaatgaaggcaccaagaccatcgccaataaccttaccagcacgattcaggtctttacggactcggaataccagctcccgtacgtcctcggctctgcgcaccagggctgcctgcctccgttcccggcggacgtcttcatgattcctcagtacgggtacctgactctgaacaacggcagtcaggccgtgggccgttcctccttctactgcctggagtactttccttctcaaatgctgagaacgggcaacaactttgagttcagctaccagtttgaggacgtgccttttcacagcagctacgcgcacagccaaagcctggaccggctgatgaaccccctcatcgaccagtacctgtactacctgtctcggactcagtccacgggaggtaccgcaggaactcagcagttgctattttctcaggccgggcctaataacatgtcggctcaggccaaaaactggctacccgggccctgctaccggcagcaacgcgtctccacgacactgtcgcaaaataacaacagcaactttgcttggaccggtgccaccaagtatcatctgaatggcagagactctctggtaaatcccggtgtcgctatggcaacgcacaaggacgacgaagagcgattttttccatccagcggagtcttgatgtttgggaaacagggagctggaaaagacaacgtggactatagcagcgttatgctaaccagtgaggaagaaatcaaaaccaccaacccagtggccacagaacagtacggcgtggtggccgataacctgcaacagcaaaacgccgctcctattgtaggggccgtcaacagtcaaggagccttacctggcatggtctggcagaaccgggacgtgtacctgcagggtcctatctgggccaagattcctcacacggacggcaactttcatccttcgccgctgatgggaggctttggactgaaacacccgcctcctcagatcctgattaagaatacacctgttcccgcggatcctccaactaccttcagtcaagccaagctggcgtcgttcatcacgcagtacagcaccggacaggtcagcgtggaaattgaatgggagctgcagaaagagaacagcaagcgctggaacccagagattcagtatacttccaactactacaaatctacaaatgtggactttgctgtcaatactgagggtacttattcagagcctcgccccattggcacccgttacctcacccgtaacctgtaattgcctgttaatcaataaaccggctaattcgtttcagttgaactttggtctctgcgaagggcgaattc

SEQ ID NO: 78 - protein, 738 aa, Artificial Sequence
  source: /note="Description of Artificial Sequence: Synthetic polypeptide"
MAADGYLPDWLEDNLSEGIREWWDLKPGAPKPKANQQKQDDGRGLVLPGYKYLGPFNGLDKGEPVNAADAAALEHDKAYDQQLKAGDNPYLRYNHADAEFQERLQEDTSFGGNLGRAVFQAKKRVLEPLGLVEEGAKTAPGKKRPVEPSPQRSPDSSTGIGKTGQQPAKKRLNFGQTGDSESVPDPQPIGEPPAGPSGLGSGTMAAGGGAPMADNNEGADGVGSSSGNWHCDSTWLGDRVITTSTRTWALPTYNNHLYKQISNGTSGGSTNDNTYFGYSTPWGYFDFNRFHCHFSPRDWQRLINNNWGFRPKRLNFKLFNIQVKEVTQNEGTKTIANNLTSTIQVFTDSEYQLPYVLGSAHQGCLPPFPADVFMIPQYGYLTLNNGSQAVGRSSFYCLEYFPSQMLRTGNNFEFSYQFEDVPFHSSYAHSQSLDRLMNPLIDQYLYYLSRTQSTGGTAGTQQLLFSQAGPNNMSAQAKNWLPGPCYRQQRVSTTLSQNNNSNFAWTGATKYHLNGRDSLVNPGVAMATHKDDEERFFPSSGVLMFGKQGAGKDNVDYSSVMLTSEEEIKTTNPVATEQYGVVADNLQQQNAAPIVGAVNSQGALPGMVWQNRDVYLQGPIWAKIPHTDGNFHPSPLMGGFGLKHPPPQILIKNTPVPADPPTTFSQAKLASFITQYSTGQVSVEIEWELQKENSKRWNPEIQYTSNYYKSTNVDFAVNTEGTYSEPRPIGTRYLTRNL

SEQ ID NO: 79 - DNA, 3084 bp, Artificial Sequence
  source: /note="Description of Artificial Sequence: Synthetic polynucleotide"
gaattcgccctttctacggctgcatcaactggaccaatgagaactttcccttcaacgattgcgtcgacaagatggtgatctggtgggaggagggcaagatgacggccaaggtcgtggagtccgccaaggccattctcggcggcagcaaggtgcgcgtggaccaaaagtgcaagtcgtccgcccagatcgaccccacccccgtgatcgtcacctccaacaccaacatgtgcgccgtgattgacgggaacagcaccaccttcgagcaccagcagccgttgcaggaccggatgttcaagttcgaactcacccgccgtctggagcacgactttggcaaggtgaccaagcaggaagtcaaagagttcttccgctgggcgcaggatcacgtgaccgaggtggcgcatgagttctacgtcagaaagggcggagccagcaaaagacccgcccccgatgacgcggatataagcgagcccaagcgggcctgcccctcagtcgcggatccatcgacgtcagacgcggaaggagctccggtggactttgccgacaggtaccaaaacaaatgttctcgtcacgcgggcatgcttcagatgctgtttccctgcaaaacgtgcgagaaaatgaatcagaatttcaacatttgcttcacgcacggggtcagagactgctcagaatgtttccccggtgcatcagaatctcaaccggtcgtcagaaaaaaaacgtatcagaaactgtgtgccattcatcatctgctggggcgggcacccgagattgcttgctcggcctgcgatctggtcaacgtggacctggacgactgtgtttctgagcaataaatgacttaaaccaggtatggctgccgatggttatcttccagattggcttgaggacaacctctctgagggcattcgcgagtggtgggacctgaaacctggagccccgaaacccaaagccaaccagcaaaagcaggacgacggccggggtctggtgcttcctggctacaagtacctcggacccttcaacggactcgacaagggggagcccgtcaacgcggcggacgcagcggccctcgagcacgacaaggcctacgaccagcagctcaaagcgggtgacaatccgtacctgcggtataaccacgccgacgccgagtttcaggagcgtctgcaagaagatacgtcttttgggggcaacctcgggcgagcagtcttccaggccaagaagcgggttctcgaacctctcggtctggttgaggaaggcgctaagacggctcctggaaagaagagaccggtagagccatcacctcagcgttcccccgactcctccacgggcatcggcaagaaaggccaccagcccgcgagaaagagactgaactttgggcagactggcgactcggagtcagtccccgaccctcaaccaatcggagaaccaccagcaggcccctctggtctgggatctggtacaatggctgcaggcggtggcgctccaatggcagacaataacgaaggcgccgacggagtgggtagttcctcaggaaattggcattgcgattccacatggctgggcgacagagtcatcaccaccagcacccgaacctgggccctgcccacctacaacaaccatctctacaagcaaatctccaacgggacatcgggaggaagcactaacgacaacacctactttggctacagcaccccctgggggtattttgacttcaacagattccactgccacttctcaccacgtgactggcagcgactcatcaacaataactggggattccggcccaagagactcaacttcaagctcttcaacatccaggtcaaggaggtcacgcagaatgaaggcaccaagaccatcgccaataaccttaccagcacgattcaggtgtttacggactcggaataccagctcccgtacgtccccggctctgcgcaccagggctgcctccctccgttcccggcggacgtcttcatgattcctcagtacgggtatctgaccctaaacaatggcagtcaggctgtgggccgttcctccttctactgcctggaatacttcccttctcaaatgctgaggacgggcaacaactttgaattcagctacaccttcgaggacgtgcctttccacagcagctacgcgcacagccagagcctggaccggctgatgaaccctctcatcgaccagtacctgtattacttatccagaactcagtccacaggaggaactcaaggtactcagcaattgttattttctcaagccgggcccgcaaacatgtcggctcaggccaagaactggctacctggaccgtgttaccgtcagcaacgagtttccacgacactgtcgcaaaacaacaacagcaattttgcttggaccggtgccaccaagtatcacctgaatggcagagactccctggttaatcccggcgttgccatggctacccacaaggacgacgaggagcgcttcttcccgtcaagcggagttctaatgtttggcaagcagggggctggaaaagacaatgtggactacagcagcgtgatgctcaccagcgaagaagaaattaaaactactaacccagtggctacagagcagtatggtgtggtggcagacaacctgcagcagaccaacggagctcccattgtgggaactgtcaacagccagggggccttacctggtatggtctggcaaaaccgggacgtgtacctgcagggccccatctgggccaaaattcctcacacggacggcaactttcatccttcgccgctgatgggaggctttggactgaaacacccgcctcctcagatcctggtgaaaaacactcctgttcctgcggatcctccgaccaccttcagccaggccaagctggcttcttttatcacgcagtacagcaccggacaggtcagcgtggaaatcgaatgggagctgcagaaagaaaacagcaagcgctggaacccagagattcagtatacttccaactactacaaatctacaaatgtggactttgctgtcaatactgagggtacttattcagagcctcgccccattggcactcgttatctcacccgtaatctgtaattgcttgttaatcaataaaccggt

SEQ ID NO: 80 - protein, 738 aa, Artificial Sequence
  source: /note="Description of Artificial Sequence: Synthetic polypeptide"
MAADGYLPDWLEDNLSEGIREWWDLKPGAPKPKANQQKQDDGRGLVLPGYKYLGPFNGLDKGEPVNAADAAALEHDKAYDQQLKAGDNPYLRYNHADAEFQERLQEDTSFGGNLGRAVFQAKKRVLEPLGLVEEGAKTAPGKKRPVEPSPQRSPDSSTGIGKKGHQPARKRLNFGQTGDSESVPDPQPIGEPPAGPSGLGSGTMAAGGGAPMADNNEGADGVGSSSGNWHCDSTWLGDRVITTSTRTWALPTYNNHLYKQISNGTSGGSTNDNTYFGYSTPWGYFDFNRFHCHFSPRDWQRLINNNWGFRPKRLNFKLFNIQVKEVTQNEGTKTIANNLTSTIQVFTDSEYQLPYVPGSAHQGCLPPFPADVFMIPQYGYLTLNNGSQAVGRSSFYCLEYFPSQMLRTGNNFEFSYTFEDVPFHSSYAHSQSLDRLMNPLIDQYLYYLSRTQSTGGTQGTQQLLFSQAGPANMSAQAKNWLPGPCYRQQRVSTTLSQNNNSNFAWTGATKYHLNGRDSLVNPGVAMATHKDDEERFFPSSGVLMFGKQGAGKDNVDYSSVMLTSEEEIKTTNPVATEQYGVVADNLQQTNGAPIVGTVNSQGALPGMVWQNRDVYLQGPIWAKIPHTDGNFHPSPLMGGFGLKHPPPQILVKNTPVPADPPTTFSQAKLASFITQYSTGQVSVEIEWELQKENSKRWNPEIQYTSNYYKSTNVDFAVNTEGTYSEPRPIGTRYLTRNL

SEQ ID NO: 81 - DNA, 3123 bp, Artificial Sequence
  source: /note="Description of Artificial Sequence: Synthetic polynucleotide"
gaattcgcccttggctgcgtcaactggaccaatgagaactttcccttcaacgattgcgtcgacaagatggtgatctggtgggaggagggcaagatgacggccaaggtcgtggagtccgccaaggccattctcggcggcagcaaggtgcgcgtggaccaaaagtgcaagtcgtccgcccagatcgaccccacccccgtgatcgtcacctccaacaccaacatgtgcgccgtgattgacgggaacagcaccaccttcgagcaccagcagccgttgcaggaccggatgttcaagttcgaactcacccgccgtctggagcacgactttggcaaggtgaccaagcaggaagtcaaagagttcttccgctgggcgcaggatcacgtgaccgaggtggcgcatgagttctacgtcagaaagggcggagccagcaaaagacccgcccccgatgacgcggatataagcgagcccaagcgggcctgcccctcagtcgcggatccatcgacgtcagacgcggaaggagctccggtggactttgccgacaggtaccaaaacaaatgttctcgtcacgcgggcatgctccagatgctgtttccctgcaaaacgtgcgagagaatgaatcagaatttcaacatttgcttcacgcacggggtcagagactgctcagaatgtttccccggtgcatcagaatctcaaccggtcgtcagaaaaaaaacgtatcagaaactgtgtgccattcatcatctgctggggcgggcacccgagattgcttgctcggcctgcgatctggtcaacgtggacctggacgactgtgtttctgagcaataaatgacttaaaccaggtatggctgccgatggttatcttccagattggcttgaggacaacctctctgagggcattcgcgagtggtgggacctgaaacctggagccccgaaacccaaagccaaccagcaaaagcaggacgacggccggggtctggtgcttcctggctacaagtacctcggacccttcaacggactcgacaagggggagcccgtcaacgcggcggacgcagcggccctcgagcacgacaaggcctacgaccagcagctcaaagcgggtgacaatccgtacctgcggtataaccacgccgacgccgagtttcaggagcgtctgcaagaagatacgtcttttgggggcaacctcgggcgagcagtcttccaggccaagaagcgggttctcgaacctctcggtctggttgaggaaggcgctaagacggctcctggaaagaagagaccggtagagccatcacctcagcgttcccccgactcctccacgggcatcggcaagaaaggccaccagcccgcgagaaagagactgaactttgggcagactggcgactcggagtcagtccccgaccctcaaccaatcggagaaccaccagcaggcccctctggtctgggatctggtacaatggctgcaggcggtggcgctccaatggcagacaataacgaaggcgccgacggagtgggtagttcctcaggaaattggcattgcgattccacatggctgggcgacagagtcatcaccaccagcacccgaacctgggccctgcccacctacaacaaccatctctacaagcaaatctccaacgggacatcgggaggaagcactaacgacaacacctactttggctacagcaccccctgggggtattttgacttcaacagattccactgccacttctcaccacgtgactggcagcgactcatcaacaataactggggattccggcccaagagactcaacttcaagctcttcaacatccaggtcaaggaggtcacgcagaatgaaggcaccaagaccatcgccaataaccttaccagcacgattcaggtgtttacggactcggaataccagctcccgtacgtcctcggctctgcgcaccagggctgcctccctccgttcccggcggacgtcttcatgattcctcagtacgggtatctgaccctaaacaatggcagtcaggctgtgggccgttcctccttctactgcctggaatacttcccttctcaaatgctgaggacgggcaacaactttgaattcagctacaccttcgaggacgtgcctttccacagcagctacgcgcacagccagagcctggaccggctgatgaaccctctcatcgaccagtacctgtattacttatccagaactcagtccacaggaggaactcaaggtactcagcaattgttattttctcaagccgggcccgcaaacatgtcggctcaggccaagaactggctacctggaccgtgttaccgtcagcaacgagtttccacgacactgtcgcaaaacaacaacagcaattttgcttggaccggtgccaccaagtatcacctgaatggcagagactccctggttaatcccggcgttgccatggctacccacaaggacgacgaggagcgcttcttcccgtcaagcggagttctaatgtttggcaagcagggggctggaaaagacaatgtggactacagcagcgtgatgctcaccagcgaagaagaaattaaaactactaacccagtggctacagagcagtatggtgtggtggcagacaacctgcagcagaccaacggagctcccattgtgggaactgtcaacagccagggggccttacctggtatggtctggcaaaaccgggacgtgtacctgcagggccccatctgggccaaaattcctcacacggacggcaactttcatccttcgccgctgatgggaggctttggactgaaacacccgcctcctcagatcctggtgaaaaacactcctgttcctgcggatcctccgaccaccttcagccaggccaagctggcttcttttatcacgcagtacagcaccggacaggtcagcgtggaaatcgaatgggagctgcagaaagaaaacagcaagcgctggaacccagagattcagtatacttccaactactacaaatctacaaatgtggactttgctgtcaatactgagggtacttattcagagcctcgccccattggcactcgttatctcacccgtaatctgtaattgcttgttaatcaataaaccggttaattcgtttcagttgaactttggtctctgcgaagggcgaattc

SEQ ID NO: 82 - protein, 738 aa, Artificial Sequence
  source: /note="Description of Artificial Sequence: Synthetic polypeptide"
MAADGYLPDWLEDNLSEGIREWWDLKPGAPKPKANQQKQDDGRGLVLPGYKYLGPFNGLDKGEPVNAADAAALEHDKAYDQQLKAGDNPYLRYNHADAEFQERLQEDTSFGGNLGRAVFQAKKRVLEPLGLVEEGAKTAPGKKRPVEPSPQRSPDSSTGIGKKGHQPARKRLNFGQTGDSESVPDPQPIGEPPAGPSGLGSGTMAAGGGAPMADNNEGADGVGSSSGNWHCDSTWLGDRVITTSTRTWALPTYNNHLYKQISNGTSGGSTNDNTYFGYSTPWGYFDFNRFHCHFSPRDWQRLINNNWGFRPKRLNFKLFNIQVKEVTQNEGTKTIANNLTSTIQVFTDSEYQLPYVLGSAHQGCLPPFPADVFMIPQYGYLTLNNGSQAVGRSSFYCLEYFPSQMLRTGNNFEFSYTFEDVPFHSSYAHSQSLDRLMNPLIDQYLYYLSRTQSTGGTQGTQQLLFSQAGPANMSAQAKNWLPGPCYRQQRVSTTLSQNNNSNFAWTGATKYHLNGRDSLVNPGVAMATHKDDEERFFPSSGVLMFGKQGAGKDNVDYSSVMLTSEEEIKTTNPVATEQYGVVADNLQQTNGAPIVGTVNSQGALPGMVWQNRDVYLQGPIWAKIPHTDGNFHPSPLMGGFGLKHPPPQILVKNTPVPADPPTTFSQAKLASFITQYSTGQVSVEIEWELQKENSKRWNPEIQYTSNYYKSTNVDFAVNTEGTYSEPRPIGTRYLTRNL

SEQ ID NO: 83 - DNA, 3122 bp, Artificial Sequence
  source: /note="Description of Artificial Sequence: Synthetic polynucleotide"
gaattcgccctttctacggctgcgtcaactggaccaatgagaactttcccttcaacgattgcgtcgacaagatggtgatctggtgggaggagggcaagatgacggccaaggtcgtggagtccgccaaggccattctcggcggcagcaaggtgcgtgtggaccaaaagtgcaagtcttccgcccagatcgatcccacccccgtgatcgtcacctccaacaccaacatgtgcgccgtgattgacgggaacagcgccaccttcgagcaccagcagccgttgcaggaccggatgttcaaatttgaactcacccgccgtctggagcatgactttggcaaggtgacgaagcaggaagtcaaagagttcttccgctgggcgcaggatcacgtgaccgaggtggcgcatgagttccacgtcagaaagggtggagccaacaagagacccgcccccgatgacgcggatataagcgagcccaagcgggcctgcccctcagtcgcggatccatcgacgtcagacgcggaaggagctccggtggactttgccgacaggtaccaaaacaaatgttctcgtcacgcgggcatgcttcagatgctgtttccctgcaagacatgcgagagaatgaatcagaatttcaacatttgcttcacgcacgggaccagagactgttcagaatgtttccccggcgtgtcagaatctcaaccggtcgtcagaaagaggacgtatcggaaactctgtgcgattcatcatctgctggggcgggctcccgagattgcttgctcggcctgcgatctggtcaacgtggacctggatgactgtgtttctgagcaataaatgacttaaaccaggtatggctgccgatggttatcttccagattggctcgaggacaacctctctgagggcattcgcgagtggtgggacttgaaacctggagccccgaaacccaaagccaaccagcaaaagcaggacgacggccggggtctggtgcttcctggctacaagtacctcggacccttcaacggactcgacaagggggagcccgtcaacgcggcggacgcagcggccctcgagcacgacaaagcctacgaccagcagctcaaagcgggtgacaatccgtacctgcggtataatcacgccgacgccgagtttcaggagcgtctgcaagaagatacgtcttttgggggcaacctcgggcgagcagtcttccaggccaagaagcgggttctcgaacctctcggtctggttgaggaaggcgctaagacggctcctggaaagaagagactggtagagcagtcgccacaagagccagactcctcctcgggcatcggcaagacaggccagcagcccgctaaaaagagactcaattttggtcagactggcgactcagagtcagtccccgacccacaacctctcggagaacctccagcagccccctcaggtctgggacctaatacaatggcttcaggcggtggcgctccaatggcagacaataacgaaggcgccgacggagtgggtaattcctcgggaaattggcattgcgattccacatggctgggggacagagtcatcaccaccagcacccgaacctgggccctgcccacctacaacaaccacctctacaagcaaatctccaacggcacctcgggaggaagcaccaacgacaacacctattttggctacagcaccccctgggggtattttgacttcaacagattccactgtcacttttcaccacgtgactggcaacgactcatcaacaacaattggggattccggcccaaaagactcaacttcaagctgttcaacatccaggtcaaggaagtcacgacgaacgaaggcaccaagaccatcgccaataatctcaccagcaccgtgcaggtctttacggactcggagtaccagttaccgtacgtgctaggatccgctcaccagggatgtctgcctccgttcccggcggacgtcttcacggttcctcagtacggctatttaactttaaacaatggaagccaagccctgggacgttcctccttctactgtctggagtatttcccatcgcagatgctgagaaccggcaacaactttcagttcagctacaccttcgaggacgtgcctttccacagcagctacgcgcacagccagagcctggacaggctgatgaatcccctcatcgaccagtacctgtactacctggtcagaacgcaaacgactggaactggagggacgcagactctggcattcagccaagcgggtcctagctcaatggccaaccaggctagaaattgggtgcccggaccttgctaccggcagcagcgcgtctccacgacaaccaaccagaacaacaacagcaactttgcctggacgggagctgccaagtttaagctgaacggccgagactctctaatgaatccgggcgtggcaatggcttcccacaaggatgacgacgaccgcttcttcccttcgagcggggtcctgatttttggcaagcaaggagccgggaacgatggagtggattacagccaagtgctgattacagatgaggaagaaatcaaggctaccaaccccgtggccacagaagaatatggagcagtggccatcaacaaccaggccgccaatacgcaggcgcagaccggactcgtgcacaaccagggggtgattcccggcatggtgtggcagaatagagacgtgtacctgcagggtcccatctgggccaaaattcctcacacggacggcaactttcacccgtctcccctgatgggcggctttggactgaagcacccgcctcctcaaattctcatcaagaacacaccggttccagcggacccgccgcttaccttcaaccaggccaagctgaactctttcatcacgcagtacagcaccggacaggtcagcgtggaaatcgagtgggagctgcagaaagaaaacagcaaacgctggaatccagagattcaatacacttccaactactacaaatctacaaatgtggactttgctgtcaacacggaaggagtttatagcgagcctcgccccattggcacccgttacctcacccgcaacctgtaattacatgttaatcaataaaccggttaattcgtttcagttgaactttggtctctgcgaagggcgaattc

SEQ ID NO: 84 - protein, 736 aa, Artificial Sequence
  source: /note="Description of Artificial Sequence: Synthetic polypeptide"
MAADGYLPDWLEDNLSEGIREWWDLKPGAPKPKANQQKQDDGRGLVLPGYKYLGPFNGLDKGEPVNAADAAALEHDKAYDQQLKAGDNPYLRYNHADAEFQERLQEDTSFGGNLGRAVFQAKKRVLEPLGLVEEGAKTAPGKKRLVEQSPQEPDSSSGIGKTGQQPAKKRLNFGQTGDSESVPDPQPLGEPPAAPSGLGPNTMASGGGAPMADNNEGADGVGNSSGNWHCDSTWLGDRVITTSTRTWALPTYNNHLYKQISNGTSGGSTNDNTYFGYSTPWGYFDFNRFHCHFSPRDWQRLINNNWGFRPKRLNFKLFNIQVKEVTTNEGTKTIANNLTSTVQVFTDSEYQLPYVLGSAHQGCLPPFPADVFTVPQYGYLTLNNGSQALGRSSFYCLEYFPSQMLRTGNNFQFSYTFEDVPFHSSYAHSQSLDRLMNPLIDQYLYYLVRTQTTGTGGTQTLAFSQAGPSSMANQARNWVPGPCYRQQRVSTTTNQNNNSNFAWTGAAKFKLNGRDSLMNPGVAMASHKDDDDRFFPSSGVLIFGKQGAGNDGVDYSQVLITDEEEIKATNPVATEEYGAVAINNQAANTQAQTGLVHNQGVIPGMVWQNRDVYLQGPIWAKIPHTDGNFHPSPLMGGFGLKHPPPQILIKNTPVPADPPLTFNQAKLNSFITQYSTGQVSVEIEWELQKENSKRWNPEIQYTSNYYKSTNVDFAVNTEGVYSEPRPIGTRYLTRNL

SEQ ID NO: 85 - DNA, 3117 bp, Artificial Sequence
  source: /note="Description of Artificial Sequence: Synthetic polynucleotide"
gaattcgcccttggctgcgtcaactggaccaatgagaactttcccttcaacgattgcgtcgacaagatggtgatctggtgggaggagggcaagatgacggccaaggtcgtggagtccgccaaggccattctcggcggcagcaaggtgcgtgtggaccaaaagtgcaagtcttccgcccagatcgatcccacccccgtgatcgtcacctccaacaccaacatgtgcgccgtgattgacgggaacagcaccaccttcgagcaccagcagccgttgcaggaccggatgttcaaatttgaactcacccgccgtctggagcatgactttggcaaggtgacgaagcaggaagtcaaagagttcttccgctgggcgcaggatcacgtgaccgaggtggcgcatgagttccacgtcagaaagggtggagccaacaagagacccgcccccgatgacgcggatataagcgagcccaagcgggcctgcccctcagtcgcggatccatcgacgtcagacgcggaaggagctccggtggactttgccgacaggtaccaaaacaaatgttctcgtcacgcgggcatgcttcagatgctgtttccctgcaagacatgcgagagaatgaatcagaatttcaacatttgcttcacgcacgggaccagagactgttcagaatgtttccccggcgtgtcagaatctcaaccggtcgtcagaaagaggacgtatcggaaactctgtgcgattcatcatctgctggggcgggctcccgagattgcttgctcggcctgcgatctggtcaacgtggacctggatgactgtgtttctgagcaataaatgacttaaaccaggtatggctgccgatggttatcttccagattggctcgaggacaacctctctgagggcattcgcgagtggtgggacttgaaacctggagccccgaaacccaaagccaaccagcaaaagcaggacgacggccggggtctggtgcttcctggctacaagtacctcggacccttcaacggactcgacaagggggagcccgtcaacgcggcggacgcagcggccctcgagcacgacaaagcctacgaccagcagctcaaagcgggtgacaatccgtacctgcggtataatcacgccgacgccgagtttcaggagcgtctgcaagaagatacgtcttttgggggcaacctcgggcgagcagtcttccaggccaagaagcgggttctcgaacctctcggtctggttgaggaaggcgctaagacggctcctggaaagaagagaccggtagagcagtcgccacaagagccagactcctcctcgggcatcggcaagacaggccagcagcccgctaaaaagagactcaattttggtcagactggcgactcagagtcagtccccgacccacaacctctcggagaacctccagcagccccctcaggtctgggacctaatacaatggcttcaggcggtggcgctccaatggcagacaataacgaaggcgccgacggagtgggtaattcctcgggaaattggcattgcgattccacatggctgggggacagagtcatcaccaccagcacccgaacctgggccctgcccacctacaacaaccacctctacaagcaaatctccaacggcacctcgggaggaagcaccaacgacaacacctattttggctacagcaccccctgggggtattttgacttcaacagattccactgtcacttttcaccacgtgactggcaacgactcatcaacaacaattggggattccggcccaaaagactcaacttcaagctgttcaacatccaggtcaaggaagtcacgacgaacgaaggcaccaagaccatcgccaataatctcaccagcaccgtgcgggtctttacggactcggagtaccagttaccgtacgtgctaggatccgctcaccagggatgtctgcctccgttcccggcggacgtcttcatggttcctcagtacggctatttaactttaaacaatggaagccaagccctgggacgttcctccttctactgtctggagtatttcccatcgcagatgctgagaaccggcaacaactttcagttcagctacaccttcgaggacgtgcctttccacagcagctacgcgcacagccagagcctggacaggctgatgaatcccctcatcgaccagtacctgtactacctggtcagaacgcaaacgactggaactggagggacgcagactctggcattcagccaagcgggtcctagctcaatggccaaccaggctagaaattgggtgcccggaccttgctaccggcagcagcgcgtctccacgacaaccaaccagagcaacaacagcaactttgcctggacgggagctgccaagtttaagctgaacggccgagactctctaatgaatccgggcgtggcaatggcttcccacaaggatgacgacgaccgcttcttcccttcgagcggggtcctgatttttggcaagcaaggagccgggaacgatggagtggattacagccaagtgctgattacagatgaggaagaaatcaaggctaccaaccccgtggccacagaagaatatggagcagtggccatcaacaaccaggccgccaatacgcaggcgcagaccggactcgtgcacaaccagggggtgattcccggcatggtgtggcagaatagagacgtgtacctgcagggtcccatctgggccaaaattcctcacacggacggcaactttcacccgtctcccctgatgggcggctttggactgaagcacccgcctcctcaaattctcatcaagaacacaccggttccagcggacccgccgcttaccttcaaccaggccaagctgaactctttcatcacgcagtacagcaccggacaggtcagcgtggaaatcgagtgggagctgcagaaagaaaacagcaaacgctggaatccagagattcaatacacttccaactactacaaatctacaaatgtggactttgctgtcaacacggaaggagtttatagcgagcctcgccccattggcacccgttacctcacccgcaacctgtaattacatgttaatcaataaaccggttaattcgtttcagttgaactttggtctctgcgaagggcgaattc

SEQ ID NO: 86 - protein, 736 aa, Artificial Sequence
  source: /note="Description of Artificial Sequence: Synthetic polypeptide"
MAADGYLPDWLEDNLSEGIREWWDLKPGAPKPKANQQKQDDGRGLVLPGYKYLGPFNGLDKGEPVNAADAAALEHDKAYDQQLKAGDNPYLRYNHADAEFQERLQEDTSFGGNLGRAVFQAKKRVLEPLGLVEEGAKTAPGKKRPVEQSPQEPDSSSGIGKTGQQPAKKRLNFGQTGDSESVPDPQPLGEPPAAPSGLGPNTMASGGGAPMADNNEGADGVGNSSGNWHCDSTWLGDRVITTSTRTWALPTYNNHLYKQISNGTSGGSTNDNTYFGYSTPWGYFDFNRFHCHFSPRDWQRLINNNWGFRPKRLNFKLFNIQVKEVTTNEGTKTIANNLTSTVRVFTDSEYQLPYVLGSAHQGCLPPFPADVFMVPQYGYLTLNNGSQALGRSSFYCLEYFPSQMLRTGNNFQFSYTFEDVPFHSSYAHSQSLDRLMNPLIDQYLYYLVRTQTTGTGGTQTLAFSQAGPSSMANQARNWVPGPCYRQQRVSTTTNQSNNSNFAWTGAAKFKLNGRDSLMNPGVAMASHKDDDDRFFPSSGVLIFGKQGAGNDGVDYSQVLITDEEEIKATNPVATEEYGAVAINNQAANTQAQTGLVHNQGVIPGMVWQNRDVYLQGPIWAKIPHTDGNFHPSPLMGGFGLKHPPPQILIKNTPVPADPPLTFNQAKLNSFITQYSTGQVSVEIEWELQKENSKRWNPEIQYTSNYYKSTNVDFAVNTEGVYSEPRPIGTRYLTRNL

SEQ ID NO: 87 - DNA, 3121 bp, Artificial Sequence
  source: /note="Description of Artificial Sequence: Synthetic polynucleotide"
gaattcgcccttctacggctgcgtcaactggaccaatgagaactttcccttcaacgattgcgtcgacaagatggtgatctggtgggaggagggcaagatgacggccaaggtcgtggagtccgccaaggccattctcggcggcagcaaggtgcgtgtggaccaaaagtgcaagtcttccgcccagatcgatcccacccccgtgatcgtcacctccaacaccaacatgtgcgccgtgattgacgggaacagcaccaccttcgagcaccagcagccgttgcaggaccggatgttcaaatttgaactcacccgccgtctggagcatgactttggcaaggtgacgaagcaggaagtcaaagagttcttccgctgggcgcaggatcacgtgaccgaggtggcgcatgagttccacgtcagaaagggtggcgccaacaagagacccgcccccgatgacgcggatataagcgagcccaagcgggcctgcccctcagtcgcggatccatcgacgtcagacgcggaaggagctccggtggactttgccgacaggtaccaaaacaaatgttctcgtcacgcgggcatgcttcagatgctgtttccctgcaagacatgcgagagaatgaatcagaatttcaacatttgcttcacgcacgggaccagagactgttcagaatgtttccccggcgtgtcagaatctcaaccggtcgtcagaaagaggacgtatcggaaactctgtgcgattcatcatctgctggggcgggctcccgagattgcttgctcggcctgcgatctggtcaacgtggacctggatgactgtgtttctgagcaataaatgacttaaaccaggtatggctgccgatggttatcttccagattggctcgaggacaacctctctgagggcattcgcgagtggtgggacttgaaacctggagccccgaaacccaaagccaaccagcaaaagcaggacgacggccggggtctggtgcttcctggctacaagtacctcggacccttcaacggactcgacaagggggagcccgtcaacgcggcggacgcagcggccctcgagcacgacaaagcctacgaccagcagctcaaagcgggtgacaatccgtacctgcggtataatcacgccgacgccgagtttcaggagcgtctgcaagaagatacgtcctttgggggcaacctcgggcgagcagtcttccaggccaagaagcgggttctcgaacctctcggtctggttgaggaaggcgctaagacggctcctggaaagaagagaccggtagagcagtcgccacaagagccagactcctcctcgggcatcggcaagacaggccagcagcccgctaaaaagagactcaattttggtcagactggcgactcagagtcagtccccgacccacaacctctcggagaacctccagcagccccctcaggtctgggacctaatacaatggcttcaggcggtggcgctccaatggcagacaataacgaaggcgccgacggagtgggtaattcctcgggaaattggcattgcgattccacatggctgggggacagagtcatcaccaccagcacccgaacctgggccctgcccacctacaacaaccacctctacaagcaaatctccaacggcacctcgggaggaagcaccaacgacaacacctattttggctacagcaccccctgggggtattttgacttcaacagattccactgtcacttttcaccacgtgactggcaacgactcatcaacaacaattggggattccggcccaaaagactcaacttcaagctgttcaacatccaggtcaaggaagtcacgacgaacgaaggcaccaagaccatcgccaataatctcaccagcaccgtgcaggtctttacggacttggagtaccagttaccgtacgtgctaggatccgctcaccagggatgtctgcctccgttcccggcggacgtcttcatggttcctcagtacggctatttaactttaaacaatggaagccaagccctgggacgttcctccttctactgtctggagtatttcccatcgcagatgccgagaaccggcaacaactttcagttcagctacaccttcgaggacgtgcctttccacagcagctacgcgcacagccagagcctggacaggctgatgaatcccctcatcgaccagtacctgtactacctggtcagaacgcaaacgactggaactggagggacgcagactctggcattcagccaagcgggtcctagctcaatggccaaccaggctagaaattgggtgcccggaccttgctaccggcagcagcgcgtctccacgacaaccaaccagaacaacaacagcaactttgcctggacgggagctgccaagtttaagctgaacggccgagactctctaatgaatccgggcgtggcaatggcttcccacaaggatgacgacgaccgcttcttcccttcgagcggggtcctgatttttggcaagcaaggagccgggaacgatggagtggattacagccaagtgctgattacagatgaggaagaaatcaaggctaccaaccccgtggccacagaagaatatggagcagtggccatcaacaaccaggccgccaatacgcaggcgcagaccggactcgtgcacaaccagggggtgattcccggcatggtgtggcagaatagagacgtgtacctgcagggtcccatctgggccaaaattcctcacacggacggcaactttcacccgtctcccctgatgggcggctttggactgaagcacccgcctcctcaaattctcatcaagaacacaccggttccagcggacccgccgcttaccttcaaccaggccaagctgaactctttcatcacgcagtacagcaccggacaggtcagcgtggaaatcgagtgggagctgcagaaagaaaacagcaaacgctggaatccagagattcaatacacttccaactactacaaatctacaaatgtggactttgctgtcaacacggaaggagtttatagcgagcctcgccccattggcacccgttacctcacccgcaacctgtaattacatgttaatcaataaaccggttaattcgtttcagttgaactttggtctctgcgaagggcgaattc

SEQ ID NO: 88 - protein, 736 aa, Artificial Sequence
  source: /note="Description of Artificial Sequence: Synthetic polypeptide"
MAADGYLPDWLEDNLSEGIREWWDLKPGAPKPKANQQKQDDGRGLVLPGYKYLGPFNGLDKGEPVNAADAAALEHDKAYDQQLKAGDNPYLRYNHADAEFQERLQEDTSFGGNLGRAVFQAKKRVLEPLGLVEEGAKTAPGKKRPVEQSPQEPDSSSGIGKTGQQPAKKRLNFGQTGDSESVPDPQPLGEPPAAPSGLGPNTMASGGGAPMADNNEGADGVGNSSGNWHCDSTWLGDRVITTSTRTWALPTYNNHLYKQISNGTSGGSTNDNTYFGYSTPWGYFDFNRFHCHFSPRDWQRLINNNWGFRPKRLNFKLFNIQVKEVTTNEGTKTIANNLTSTVQVFTDLEYQLPYVLGSAHQGCLPPFPADVFMVPQYGYLTLNNGSQALGRSSFYCLEYFPSQMPRTGNNFQFSYTFEDVPFHSSYAHSQSLDRLMNPLIDQYLYYLVRTQTTGTGGTQTLAFSQAGPSSMANQARNWVPGPCYRQQRVSTTTNQNNNSNFAWTGAAKFKLNGRDSLMNPGVAMASHKDDDDRFFPSSGVLIFGKQGAGNDGVDYSQVLITDEEEIKATNPVATEEYGAVAINNQAANTQAQTGLVHNQGVIPGMVWQNRDVYLQGPIWAKIPHTDGNFHPSPLMGGFGLKHPPPQILIKNTPVPADPPLTFNQAKLNSFITQYSTGQVSVEIEWELQKENSKRWNPEIQYTSNYYKSTNVDFAVNTEGVYSEPRPIGTRYLTRNL

SEQ ID NO: 89 - DNA, 3122 bp, Artificial Sequence
  source: /note="Description of Artificial Sequence: Synthetic polynucleotide"
gaattcgccctttctacggctgcgtcaactggaccaatgagaactttcccttcaacgattgcgtcgacaagatggtgatctggtgggaggagggcaagatgacggccaaggtcgtggagtccgccaaggccattctcggcggcagcaaggtgcgtgtggaccaaaagtgcaagtcttccgcccagatcgatcccacccccgtgatcgtcacctccaacaccaacatgtgcgccgtgattgacgggaacagcaccaccttcgagcaccagcagccgttgcaggaccggatgttcaaatttgaactcacccgccgtctggagcatgactttggcaaggtgacgaagcaggaagtcaaagggttcttccgctgggcgcaggatcacgtgaccgaggtggcgcatgagttccacgtgcgagcccaagcgggcctgcccctcagtcgcggatccatcgacgtcagaccagaaagggtggagccaacaagagacccgcccccgatgacgcggatataagcggaaggagctccggtggactttgccgacaggtaccaaaacaaatgttctcgtcacgcgggcatgcttcagatgctgtttccctgcaagacatgcgagagaatgaatcagaatttcaacatttgcttcacgcacgggaccagagactgttcagaatgtttccccggcgtgtcagaatctcaaccggtcgtcagaaagaggacgtatcggaaactctgtgcgattcatcatctgctggggcgggctcccgagattgcttgctcggcctgcgatctggtcaacgtggacctggatgactgtgtttctgagcaataaatgacttaaaccaggtatggctgccgatggttatcttccagattggctcgaggacaacctctctgagggcattcgcgagtggtgggacttgaaacctggagccccgaaacccaaagccaaccagcaaaagcaggacgacggccggggtctggtgcttcctggctacaagtacctcggacccttcaacggactcgacaagggggagcccgtcaacgcggcggacgcagcggccctcgagcacgacaaagcctacgaccagcagctcaaagcgggtgacaatccgtacctgcggtataatcacgccgacgccgagtttcaggagcgtctgcaagaagatacgtcttttgggggcaacctcgggcgagcagtcttccaggccaagaagcgggttctcgaacctctcggtctggttgaggaaggcgctaagacggctcctggaaagaagagaccggtagagcagtcgccacaagagccagactcctcctcgggcatcggcaagacaggccagcagcccgctaaaaagagactcaattttggtcagactggcgactcagagtcagtccccgacccacaacctctcggagaacctccagcagccccctcaggtctgggacctaatacaatggcttcaggcggtggcgctccaatggcagacaataacgaaggcgccgacggagtgggtaattcctcgggaaattggcattgcgattccacatggctgggggacagagtcatcaccaccagcacccgaacctgggccctgcccacctacaacaaccacctctacaagcaaatctccaacggcacctcgggaggaagcaccaacgacaacacctattttggctacagcaccccctgggggtattttgacttcaacagattccactgtcacttttcaccacgtgactggcaacgactcatcaacaacaattggggattccggcccaaaagactcaacttcaagctgttcaacatccaggtcaaggaagtcacgacgaacgaaggcaccaagaccatcgccaataatctcaccagcaccgtgcaggtctttacggactcggagtaccagttaccgtacgtgctaggatccgctcaccagggatgtctgcctccgttcccggcggacgtcttcatggttcctcagtacggctatttaactttaaacaatggaagccaagccctgggacgttcctccttctactgtctggagtatttcccatcgcagatgctgagaaccggcaacaactttcagttcagctacaccttcgaggacgtgcctttccacagcagctacgcgcacagccagagcctggacaggctgatgaatcccctcatcgaccagtacctgtactacctggtcagaacgcaaacgactggaactggagggacgcagactctggcattcagccaagcgggtcctagctcaatggccaaccaggctagaaattgggtgcccggaccttgctaccggcagcagcgcgtctccacgacaaccaaccagaacaacaacagcaactttgcctggacgggagctgccaagtttaagctgaacggccgagactctctaatgaatccgggcgtggcaatggcttcccacaaggatgacgacgaccgcttcttcccttcgagcggggtcctgatttttggcaagcaaggagccgggaacgatggagtggattacagccaagtgctgattacagatgaggaagaaatcaaggctaccaaccccgtggccacagaagaatatggagcagtggccatcaacaaccaggccgccaatacgcaggcgcagaccggactcgtgcacaaccagggggtgattcccggcatggtgtggcagaatagagacgtgtacctgcagggtcccatctgggccaaaattcctcacacggacggcaactttcacccgtctcccctgatgggcggctttggactgaagcacccgcctcctcaaattctcatcaagaacacaccggttccagcggacccgccgcttaccttcaaccaggccaagctgaactctttcatcacgcagtacagcaccggacaggtcagcgtggaaatcgagtgggagctgcagaaagaaaacagcaaacgctggaatccagagattcaatacacttccaactactacaaatctacaaatgtggactttgctgtcaacacggagggggtttatagcgagcctcgccccattggcacccgttacctcacccgcaacctgtaattacatgttaatcaataaaccggttaattcgtttcagttgaactttggtctctgcgaagggcgaattc

SEQ ID NO: 90 - protein, 736 aa, Artificial Sequence
  source: /note="Description of Artificial Sequence: Synthetic polypeptide"
MAADGYLPDWLEDNLSEGIREWWDLKPGAPKPKANQQKQDDGRGLVLPGYKYLGPFNGLDKGEPVNAADAAALEHDKAYDQQLKAGDNPYLRYNHADAEFQERLQEDTSFGGNLGRAVFQAKKRVLEPLGLVEEGAKTAPGKKRPVEQSPQEPDSSSGIGKTGQQPAKKRLNFGQTGDSESVPDPQPLGEPPAAPSGLGPNTMASGGGAPMADNNEGADGVGNSSGNWHCDSTWLGDRVITTSTRTWALPTYNNHLYKQISNGTSGGSTNDNTYFGYSTPWGYFDFNRFHCHFSPRDWQRLINNNWGFRPKRLNFKLFNIQVKEVTTNEGTKTIANNLTSTVQVFTDSEYQLPYVLGSAHQGCLPPFPADVFMVPQYGYLTLNNGSQALGRSSFYCLEYFPSQMLRTGNNFQFSYTFEDVPFHSSYAHSQSLDRLMNPLIDQYLYYLVRTQTTGTGGTQTLAFSQAGPSSMANQARNWVPGPCYRQQRVSTTTNQNNNSNFAWTGAAKFKLNGRDSLMNPGVAMASHKDDDDRFFPSSGVLIFGKQGAGNDGVDYSQVLITDEEEIKATNPVATEEYGAVAINNQAANTQAQTGLVHNQGVIPGMVWQNRDVYLQGPIWAKIPHTDGNFHPSPLMGGFGLKHPPPQILIKNTPVPADPPLTFNQAKLNSFITQYSTGQVSVEIEWELQKENSKRWNPEIQYTSNYYKSTNVDFAVNTEGVYSEPRPIGTRYLTRNL

SEQ ID NO: 91 - DNA, 2370 bp, Artificial Sequence
  source: /note="Description of Artificial Sequence: Synthetic polynucleotide"
gaattcgccctttctacggctgcgtcaactggaccaatgagaactttcccttcaacgattgcgtcgacaagatggtgatctggtgggaggagggcaagatgacggccaaggtcgtggagtccgccaaggccattctcggcggcagcaaggtgcgcgtggaccaaaagtgcaagtcgtccgcccagatcgaccccacccccgtgatcgtcacctccaacaccaacatgtgcgccgtgattgacgggaacagcaccaccttcgagcaccagcagccgttgcaggaccggatgttcaagttcgaactcacccgccgtctggagcacgactttggcaaggtgaccaagcaggaagtcaaagagttcttccgctgggcgcaggatcacgtgaccgaggtggcgcatgagttctacgtcagaaagggcggagccagcaaaagacccgcccccgatgacgcggatataagcgagcccaagcgggcctgcccctcagtcgcggatccatcgacgtcagacgcggaaggagctccggtggactttgccgacaggtaccaaaacaaatgttctcgtcacgcgggcatgcttcagacgctgtttccctgcaaaacgtgcgagagaatgaatcagaatttcaacatttgcttcacgcacggggtcagagactgctcagaatgtttccccggtgcatcagaatctcaaccggtcgtcagaaaaaaaacgtatcagaaactgtgtgccattcatcatctgctggggcgggcacccgagattgcttgctcggcctgcgatctggtcaacgtggacctggacgactgtgtttctgagcaataaatgacttaaaccaggtatggctgccgatggttatcttccagattggcttgaggacaacctctctgagggcattcgcgagtggtgggacctgaaacctggagccccgaaacccaaagccaaccagcaaaagcaggacgacggccggggtctggtgcttcctggctacaagtacctcggacccttcaacggactcgacaagggggagcccgtcaacgcggcggacgcagcggccctcgagcacgacaaggcctacgaccagcagctcaaagcgggtgacaatccgtacctgcggtataaccacgccgacgccgagtttcaggagcgtctgcaagaagatacgtcttttgggggcaacctcgggcgagcagtcttccaggccaagaagcgggttctcgaacctctcggtctggttgaggaaggcgctaagacggctcctggaaagaagagaccggtagagccatcacctcagcgttcccccgactcctccacgggcatcggcaagaaaggccaccagcccgcgagaaagagactgaactttgggcagactggcgactcggagtcagtccccgaccctcaaccaatcggagaaccaccagcaggcccctctggtctgggatctggtacaatggctgcaggcggtggcgctccaatggcagacaataacgaaggcgccgacggagtgggtagttcctcaggaaattggcattgcgattccacatggctgggcgacagagtcatcaccaccagcacccgaacctgggccctgcccacctacaacaaccatctctacaagcaaatctccaacgggacatcgggaggaagcactaacgacaacacctactttggctacagcaccccctgggggtattttgacttcaacagattccactgccacttctcaccacgtgactggcagcgactcatcaacaataactggggattccggcccaagagactcaacttcaagctcttcaacatccaggtcaaggaggtcacgcagaatgaaggcaccaagaccatcgccaataaccttaccagcacgattcaggtgtttacggactcggaataccagctcccgtacgtcctcggctctgcgcaccagggctgcctccctccgttcccggcggacgtcttcatgattcctcagtacgggtatctgaccctaaacaatggcagtcaggctgtgggccgttcctccttctactgcctggaatacttcccttctcaaatgctgaggacgggcaacaactttgaattcagctacaccttcgaggacgtgcctttccacagcagctacgcgcacagccagagcctggaccggctgatgaaccctctcatcgaccagtacctgtattacttatccagaactcagtccacaggaggaactcaaggtactcagcaattgttattttctcaagccgggcccgcaaacatgtyggctcaggccaagaactggctacctggaccgtgttaccgtcagcaacgagtttccacgacactgtcgcaaaacaacaacagcaattttgctggaccggtgccacca

SEQ ID NO: 92 - protein, 738 aa, Artificial Sequence; identical to SEQ ID NO: 82
  source: /note="Description of Artificial Sequence: Synthetic polypeptide"

SEQ ID NO: 93 - DNA, 2205 bp, Artificial Sequence
  source: /note="Description of Artificial Sequence: Synthetic polynucleotide"
atgactgacggttaccttccagattggctagaggacaacctctctgaaggcgttcgagagtggtgggcgctgcaacctggagcccctaaacccaaggcaaatcaacaacatcaggacaacgctcggggtcttgtgcttccgggttacaaatacctcggacccggcaacggactcgacaagggggaacccgtcaacgcagcggacgcggcagccctcgagcacgacaaggcctacgaccagcagctcaaggccggtgacaacccctacctcaagtacaaccacgccgacgcggagttccagcagcggcttcagggcgacacatcgtttgggggcaacctcggcagagcagtcttccaggccaaaaagagggttcttgaacctcttggtctggttgagcaagcgggtgagacggctcctggaaagaagagaccgttgattgaatccccccagcagcccgactcctccacgggtatcggcaaaaaaggcaagcagccggctaaaaagaagctcgttttcgaagacgaaactggagcaggcgacggaccccctgagggatcaacttccggagccatgtctgatgacagtgagatgcgtgcagcagctggcggagctgcagtcgagggcggacaaggtgccgatggagtgggtaatgcctcgggtgattggcattgcgattccacctggtctgagggccacgtcacgaccaccagcaccagaacctgggtcttgcccacctacaacaaccacctctacaagcgactcggagagagcctgcagtccaacacctacaacggattctccaccccctggggatactttgacttcaaccgcttccactgccacttctcaccacgtgactggcagcgactcatcaacaacaactggggcatgcgacccaaagccatgcgggtcaaaatcttcaacatccaggtcaaggaggtcacgacgtcgaacggcgagacaacggtggctaataaccttaccagcacggttcagatctttgcggactcgtcgtacgaactgccgtacgtgatggatgcgggtcaagagggcagcctgcctccttttcccaacgacgtctttatggtgccccagtacggctactgtggactggtgaccggcaacacttcgcagcaacagactgacagaaatgccttctactgcctggagtactttccttcgcagatgctgcggactggcaacaactttgaaattacgtacagttttgagaaggtgcctttccactcgatgtacgcgcacagccagagcctggaccggctgatgaaccctctcatcgaccagtacctgtggggactgcaatcgaccaccaccggaaccaccctgaatgccgggactgccaccaccaactttaccaagctgcggcctaccaacttttccaactttaaaaagaactggctgcccgggccttcaatcaagcagcagggcttctcaaagactgccaatcaaaactacaagatccctgccaccgggtcagacagtctcatcaaatacgagacgcacagcactctggacggaagatggagtgccctgacccccggacctccaatggccacggctggacctgcggacagcaagttcagcaacagccagctcatctttgcggggcctaaacagaacggcaacacggccaccgtacccgggactctgatcttcacctctgaggaggagctggcagccaccaacgccaccgatacggacatgtggggcaacctacctggcggtgaccagagcaacagcaacctgccgaccgtggacagactgacagccttgggagccgtgcctggaatggtctggcaaaacagagacatttactaccagggtcccatttgggccaagattcctcataccgatggacactttcacccctcaccgctgattggtgggtttgggctgaaacacccgcctcctcaaatttttatcaagaacaccccggtacctgcgaatcctgcaacgaccttcagctctactccggtaaactccttcattactcagtacagcactggccaggtgtcggtgcagattgactgggagatccagaaggagcggtccaaacgctggaaccccgaggtccagtttacctccaactacggacagcaaaactctctgttgtgggctcccgatgcggctgggaaatacactgagcctagggctatcggtacccgctacctcacccaccacctgtaa

SEQ ID NO: 94 - protein, 734 aa, Artificial Sequence; identical to SEQ ID NO: 66
  source: /note="Description of Artificial Sequence: Synthetic polypeptide"

SEQ ID NO: 95 - DNA, 3128 bp, Artificial Sequence
  source: /note="Description of Artificial Sequence: Synthetic polynucleotide"
gaattcgccctttctacggctgcgtcaactggaccaatgagaactttcccttcaacgattgcgtcgacaagatgttgatctggtgggaggagggcaagatgacggccaaggtcgtggagtccgccaaggccattctcggcggcagcaaagtgcgcgtggaccaaaagtgcaagccgtccgcccagatcgaccccacccccgtgatcgtcacctccaacaccaacatgtgcgccgtgattgacgggaacagcaccaccttcgagcaccagcagccgttgcgggaccggatgttcaagtttgaactcacccgccgtctggagcacgactttggcaaggtgacaaagcaggaagtcagagagttcttccgctgggcgcaggatcacgtgaccgaggtggcgcacgagttctacgtcagaaagggtggagccaacaagagacccgcccccgatgacgcggataaaagcgagcccaagcgggcctgcccctcagtcgcggatccatcgacgtcagacgcggaaggagctccggtggactttgccgacaggtaccaaaacaaatgttctcgtcacgcgggcatgcttcagatgctgtttccctgcaaaacatgcgagagaatgaatcagaatttcaacatttgcttcacgcacgggaccagagactgttcagaatgtttccccggcgtgtcagaatctcaaccggtcgtcagaaaaaagacgtatcggaaactctgtgcgattcatcatctgctggggcgggcacccgagattgcttgctcggcctgcgatctggtcaacgtggacctagatgactgtgtttctgagcaataaatgacttaaaccaggtatggctgccgatggttatcttccagattggctcgaggacaacctctctgagggcattcgcgagtggtgggacttgaaacctggagccccgaaacccaaagccaaccagcaaaagcaggacgacggccggggtctggtgcttcctggctacaagtacctcggacccttcaacggactcgacaagggggagcccgtcaacgcggcggacgcagcggccctcgagcacgacaaggcctacgaccagcagctcaaagcgggtgacaatccgtacctgcggtataaccacgccgacgccgagtttcaggagcgtctgcaagaagatacgtcttttgggggcaacctcgggcgagcagtcttccaggccaagaagcgggttctcgaacctctcggtctggttgaggaaggcgctaagacggctcctggaaagaagagaccggtagagccatcaccccagcgttctccagactcctctacgggcatcggcaagaaaggccagcagcccgcgaaaaagagactcaactttgggcagactggcgactcagagtcagtgcccgaccctcaaccaatcggagaaccccccgcaggcccctctggtctgggatctggtacaatggctgcaggcggtggcgctccaatggcagacaataacgaaggcgccgacggagtgggtagttcctcaggaaattggcattgcgattccacatggctgggcgacagagtcatcaccaccagcacccgaacctgggccctccccacctacaacaaccacctctacaagcaaatctccaacgggacttcgggaggaagcaccaacgacaacacctacttcggctacagcaccccctgggggtattttgactttaacagattccactgccacttctcaccacgtgactggcagcgactcatcaacaacaactggggattccggcccaagagactcaacttcaagctcttcaacatccaggtcaaggaggtcacgcagaatgaaggcaccaagaccatcgccaataaccttaccagcacgattcaggtctttacggactcggaataccagctcccgtacgtcctcggctctgcgcaccagggctgcctgcctccgttcccggcggacgtcttcatgattcctcagtacgggtacctgactctgaacaatggcagtcaggccgtgggccgttcctccttctactgcctggagtactttccttctcaaatgctgagaacgggcaacaactttgagttcagctaccagtttgaggacgtgccttttcacagcagctacgcgcacagccaaagcctggaccggctgatgaaccccctcatcgaccagtacctgtactacctgtctcggactcagtccacgggaggtaccgcaggaactcagcagttgctattttctcaggccgggcctaataacatgtcggctcaggccaaaaactggctacccgggccctgctaccggcagcaacgcgtctccacgacactgtcgcaaaataacaacagcaactgtaaatcccggtgtcgctatggcaacccacaaggacgacgaagagcgattttgcctggaccggtgccaccaagtatcatctgaatggcagagactctctgttttccgtccagcggagtcttaatgtttgggaaacagggagctggaaaagacaacgtggactatagcagcgttatgctaaccagtgaggaagaaattaaaaccaccaacccagtggccacggaacagtacggcgtggtggccgataacctgcaacagcaaaacgccgctcctattgtaggggccgtcaacagtcaaggagccttacctggcatggtctggcagaaccgggacgtgtacctgcagggtcctatctgggccaagattcctcacacggacggaaactttcatccctcgccgctgatgggaggctttggactgaaacacccgcctcctcagatcctgattaagaatacacctgttcccgcggatcctccaactaccttcagtcaagctaagctggcgtcgttcatcacgcagtacagcaccggacaggtcagcgtggaaattgaatgggagctgcagaaagaaaacagcaaacgctggaacccagagattcaatacacttccaactactacaaatctacaaatgtggacttcgctgttaacacagatggcacttattctgagcctcgccccattggcacccgttacctcacccgtaatctgtaattgctcgttaatcaataaaccggttgattcgtttcagttgaactttggtctctgcgaagggcgaattc

SEQ ID NO: 96 - protein, 738 aa, Artificial Sequence; identical to SEQ ID NO: 16
  source: /note="Description of Artificial Sequence: Synthetic polypeptide"

SEQ ID NO: 97 - DNA, 3128 bp, Artificial Sequence
  source: /note="Description of Artificial Sequence: Synthetic polynucleotide"
gaattcgccctttctacggctgcgtcaactggaccaatgagaactttcccttcaacgattgcgtcgacaagatggtgatctggtgggaggagggcaagatgacggccaaggtcgtggagtccgccaaggccattctcggcggcagcaaagtgcgcgtggaccaaaagtgcaagtcgtccgcccagatcgaccccacccccgtgatcgtcacctccaacaccaacatgtgcgccgtgattgacgggaacagcaccaccttcgagcaccagcagccgttgcaggaccggatgttcaagtttgaactcacccgccgtctggagcacgactttggcaaggtgacaaagcaggaagtcagagagttcttccgctgggcgcaggatcacgtgaccgaggtggcgcacgagttctacgtcagaaagggtggagccaacaagagacccgcccccgatgacgcggataaaagcgagcccaagcgggcctgcccctcagtcgcggatccatcgacgtcagacgcggaaggagctccggtggactttgccgacaggtaccaaaacaaatgttctcgtcacgcgggcatgcttcagatgctgtttccctgcaaaacatgcgagagaatgaatcagaatttcaacatttgcttcacgcacgggaccagagactgttcagaatgtttccccggcgtgtcagaatctcaaccggttgtcagaaaaaagacgtatcggaaactctgtgcgattcatcatctgctggggcgggcacccgagattgcttgctcggcctgcgatctggtcaacgtggacctagatgactgtgtttctgagcaataaatgacttaaaccaggtatggctgccgatggttatcttccagattggctcgaggacaacctctctgagggcattcgcgagtggtgggacttgaaacctggagccccgaaacccaaagccaaccagcaaaagcaggacgacggccggggtctggtgcttcctggctacaagtacctcggacccttcaacggactcgacaagggggagcccgtcaacgcggcggacgcagcggccctcgagcacgacaaggcctacgaccagcagctcaaagcgggtgacaatccgtacctgcggtataaccacgccgacgccgagtttcaggagcgtctgcaagaagatacgtcttttgggggcaacctcgggcgagcagtcttccaggccaagaagcgggttctcgaacctctcggtctggttgaggaaggcgctaagacggctcctggaaagaagagaccggtagagccatcaccccagcgttctccagactcctctacgggcatcggcaagaaaggccagcagcccgcgaaaaagagactcaactttgggcagactggcgactcagagtcagtgcccgaccctcaaccaatcggagaaccccccgcaggcccctctggtctgggatctggtacaatggctgcaggcggtggcgctccaatggcagacaataacgaaggcgccgacggagtgggtagttcctcaggaaattggcattgcgattccacatggctgggcgacagagtcatcaccaccagcacccgaacctgggccctccccacctacaacaaccacctctacaagcaaatctccaacgggacttcgggaggaagcaccaacgacaacacctacttcggctacagcaccccctgggggtattttgactttaacagattccactgccacttctcaccacgtgactggcagcgactcatcaacaacaactggggattccggcccaagagacccaacttcaagctcttcaacatccaggtcaaggaggtcacgcagaatgaaggcaccaagaccatcgccaataaccttaccagcacgattcaggtctttacggactcggaataccagctcccgtacgtcctcggctctgcgcaccagggctgcctgcctccgttcccggcggacgtcttcatgattcctcagtacgggtacctgactctgaacaatggcagtcaggccgtgggccgttcctccttctactgcctggagtactttccttctcaaatgctgagaacgggcaacaactttgagttcagctaccagtttgaggacgtgccttttcacagcagctacgcgcacagccaaagcctggaccggctgatgaaccccctcatcgaccagtacctgtactacctgtctcggactcagtccacgggaggtaccgcaggaactcagcagttgctattttctcaggccgggcctaataacatgtcggctcaggccaaaaactggctacccgggccctgctaccggcagcaacgcgtctccacgacactgtcgcaaaataacaacagcaactttgcctggaccggtgccaccaagtatcatctgaatggcagagactctctggtaaatcccggtgtcgctatggcaacccacaaggacgacgaagagcgattttttccgtccagcggagtcttaatgtttgggaaacagggagctggaaaagacaacgtggactatagcagcgttatgctaaccagtgaggaagaaattaaaaccaccaacccagtggccacagaacagtacggcgtggtggccgataacctgcaacagcaaaacgccgctcctattgtaggggccgtcaacagtcaaggagccttacctggcatggtctggcagaaccgggacgtgtacctgcagggtcctatctgggccaagattcctcacacggacggaaactttcatccctcgccgctgatgggaggctttggactgaaacacccgcctcctcagatcctgattaagaatacacctgttcccgcggatcctccaactaccttcagtcaagctaagctggcgtcgttcatcacgcagtacagcaccggacaggtcagcgtggaaattgaatgggagctgcagaaagaaaacagcaaacgctggaacccagagattcaatacacttccaactactacaaatctacaaatgtggactttgctgttaacacagatggcacttattctgagcctcgccccattggcacccgttacctcacccgtaatctgtaattgcttgttaatcaataaaccggttgattcgtttcagttgaactttggtctctgcgaagggcgaattc

SEQ ID NO: 98 - protein, 738 aa, Artificial Sequence
  source: /note="Description of Artificial Sequence: Synthetic polypeptide"
MAADGYLPDWLEDNLSEGIREWWDLKPGAPKPKANQQKQDDGRGLVLPGYKYLGPFNGLDKGEPVNAADAAALEHDKAYDQQLKAGDNPYLRYNHADAEFQERLQEDTSFGGNLGRAVFQAKKRVLEPLGLVEEGAKTAPGKKRPVEPSPQRSPDSSTGIGKKGQQPAKKRLNFGQTGDSESVPDPQPIGEPPAGPSGLGSGTMAAGGGAPMADNNEGADGVGSSSGNWHCDSTWLGDRVITTSTRTWALPTYNNHLYKQISNGTSGGSTNDNTYFGYSTPWGYFDFNRFHCHFSPRDWQRLINNNWGFRPKRPNFKLFNIQVKEVTQNEGTKTIANNLTSTIQVFTDSEYQLPYVLGSAHQGCLPPFPADVFMIPQYGYLTLNNGSQAVGRSSFYCLEYFPSQMLRTGNNFEFSYQFEDVPFHSSYAHSQSLDRLMNPLIDQYLYYLSRTQSTGGTAGTQQLLFSQAGPNNMSAQAKNWLPGPCYRQQRVSTTLSQNNNSNFAWTGATKYHLNGRDSLVNPGVAMATHKDDEERFFPSSGVLMFGKQGAGKDNVDYSSVMLTSEEEIKTTNPVATEQYGVVADNLQQQNAAPIVGAVNSQGALPGMVWQNRDVYLQGPIWAKIPHTDGNFHPSPLMGGFGLKHPPPQILIKNTPVPADPPTTFSQAKLASFITQYSTGQVSVEIEWELQKENSKRWNPEIQYTSNYYKSTNVDFAVNTDGTYSEPRPIGTRYLTRNL

SEQ ID NO: 99 - protein, 738 aa, Artificial Sequence
  source: /note="Description of Artificial Sequence: Synthetic polypeptide"
MAADGYLPDWLEDNLSEGIREWWDLKPGAPKPKANQQKQDDGRGLVLPGYKYLGPFNGLDKGEPVNAADAAALEHDKAYDQQLKAGDNPYLRYNHADAEFQERLQEDTSFGGNLGRAVFQAKKRVLEPLGLVEEAAKTAPGKKRPVEPSPQRSPDSSTGIGKKGQQPAKKRLNFGQTGDSESVPDPQPIGEPPAGPSGLGSGTMAAGGGAPMADNNEGADGVGSSSGNWHCDSTWLGDRVITTSTRTWALPTYNNHLYKQISNGTSGGSTNDNTYFGYSTPWGYFDFNRFHCHFSPRDWQRLINNNWGFRPKRLSFKLFNIQVKEVTQNEGTKTIANNLTSTIQVFTDSEYQLPYVLGSAHQGCLPPFPADVFMIPQYGYLTLNNGSQAVGRSSFYCLEYFPSQMLRTGNNFEFSYTFEDVPFHSSYAHSQSLDRLMNPLIDQYLYYLSRTQSTGGTQGTQQLLFSQAGPANMSAQAKNWLPGPCYRQQRVSTTLSQNNNSNFAWTGATKYHLNGRDSLVNPGVAMATHKDDEERFFPSSGVLMFGKQGAGRDNVDYSSVMLTSEEEIKTTNPVATEQYGVVADNLQQTNTGPIVGNVNSQGALPGMVWQNRDVYLQGPIWAKIPHTDGNFHPSPLMGGFGLKHPPPQILIKNTPVPADPPTTFSQAKLASFITQYSTGQVSVEIEWELQKENSKRWNPEIQYTSNYYKSTNVDFAVNTEGTYSEPRPIGTRYLTRNL

SEQ ID NO: 100 - DNA, 2172 bp, Artificial Sequence
  source: /note="Description of Artificial Sequence: Synthetic polynucleotide"
atgtcttttgttgatcaccctccagattggttggaagaagttggtgaaggtcttcgcgagtttttgggccttgaagcgggcccaccgaaaccaaaacccaatcagcagcatcaagatcaagcccgtggtcttgtgctgcctggttataactatctcggacccggaaacggtctcgatcgaggagagcctgtcaacagggcagacgaggtcgcgcgagagcacgacatctcgtacaacgagcagcttgaggcgggagacaacccctacctcaagtacaaccacgcggacgccgagtttcaggagaagctcgccgacgacacatccttcgggggaaacctcggaaaggcagtctttcaggccaagaaaagggttctcgaaccttttggcctggttgaagagggtgctaagacggcccctaccggaaagcggatagacgaccactttccaaaaagaaagaaggctcggaccgaagaggactccaagccttccacctcgtcagacgccgaagctggacccagcggatcccagcagctgcaaatcccagcccaaccagcctcaagtttgggagctgatacaatgtctgcgggaggtggcggcccattgggcgacaataaccaaggtgccgatggagtgggcaatgcctcgggagattggcattgcgattccacgtggatgggggacagagtcgtcaccaagtccacccgaacctgggtgctgcccagctacaacaaccaccagtaccgagagatcaaaagcggctccgtcgacggaagcaacgccaacgcctactttggatacagcaccccctgggggtactttgactttaaccgcttccacagccactggagcccccgagactggcaaagactcatcaacaactactggggcttcagaccccggtccctcagagtcaaaatcttcaacattcaagtcaaagaggtcacggtgcaggactccaccaccaccatcgccaacaacctcacctccaccgtccaagtgtttacggacgacgactaccagctgccctacgtcgtcggcaacgggaccgagggatgcctgccggccttccctccgcaggtctttacgctgccgcagtacggttacgcgacgctgaaccgcgacaacacagaaaatcccaccgagaggagcagcttcttctgcctagagtactttcccagcaagatgctgagaacgggcaacaactttgagtttacctacaactttgaggaggtgcccttccactccagcttcgctcccagtcagaacctgttcaagctggccaacccgctggtggaccagtacttgtaccgcttcgtgagcacaaataacactggcggagtccagttcaacaagaacctggccgggagatacgccaacacctacaaaaactggttcccggggcccatgggccgaacccagggctggaacctgggctccggggtcaaccgcgccagtgtcagcgccttcgccacgaccaataggatggagctcgagggcgcgagttaccaggtgcccccgcagccgaacggcatgaccaacaacctccagggcagcaacacctatgccctggagaacactatgatcttcaacagccagccggcgaacccgggcaccaccgccacgtacctcgagggcaacatgctcatcaccagcgagagcgagacgcagccggtgaaccgcgtggcgtacaacgtcggcgggcagatggccaccaacaaccagagctccaccactgcccccgcgaccggcacgtacaacctccaggaaatcgtgcccggcagcgtgtggatggagagggacgtgtacctccaaggacccatctgggccaagatcccagagacgggggcgcactttcacccctctccggccatgggcggattcggactcaaacacccaccgcccatgatgctcatcaagaacacgcctgtgcccggaaatatcaccagcttctcggacgtgcccgtcagcagcttcatcacccagtacagcaccgggcaggtcaccgtggagatggagtgggagctcaagaaggaaaactccaagaggtggaacccagagatccagtacacaaacaactacaacgacccccagtttgtggactttgccccggacagcaccggggaatacagaaccaccagacctatcggaacccgataccttacccgacccctt

SEQ ID NO: 101 - protein, 720 aa, Artificial Sequence
  source: /note="Description of Artificial Sequence: Synthetic polypeptide"
MSFVDHPPDWLEEVGEGLREFLGLEAGPPKPKPNQQHQDQARGLVLPGYNYLGPGNGLDRGEPVNRADEVAREHDISYNEQLEAGDNPYLKYNHADAEFQEKLADDTSFGGNLGKAVFQAKKRVLEPFGLVEEGAKTAPTGKRIDDHFPKRKKARTEEDSKPSTSSDAEAGPSGSQQLQIPAQPASSLGADTMSAGGGGPLGDNNQGADGVGNASGDWHCDSTWMGDRVVTKSTRTWVLPSYNNHQYREIKSGSVDGSNANAYFGYSTPWGYFDFNRFHSHWSPRDWQRLINNYWGFRPRSLRVKIFNIQVKEVTVQDSTTTIANNLTSTVQVFTDDDYQLPYVVGNGTEGCLPAFPPQVFTLPQYGYATLNRDNTENPTERSSFFCLEYFPSKMLRTGNNFEFTYNFEEVPFHSSFAPSQNLFKLANPLVDQYLYRFVSTNNTGGVQFNKNLAGRYANTYKNWFPGPMGRTQGWNLGSGVNRASVSAFATTNRMELEGASYQVPPQPNGMTNNLQGSNTYALENTMIFNSQPANPGTTATYLEGNMLITSESETQPVNRVAYNVGGQMATNNQSSTTAPATGTYNLQEIVPGSVWMERDVYLQGPIWAKIPETGAHFHPSPAMGGFGLKHPPPMMLIKNTPVPGNITSFSDVPVSSFITQYSTGQVTVEMEWELKKENSKRWNPEIQYTNNYNDPQFVDFAPDSTGEYRTTRPIGTRYL

SEQ ID NO: 102 - protein, 724 aa, Adeno-associated virus 5
MSFVDHPPDWLEEVGEGLREFLGLEAGPPKPKPNQQHQDQARGLVLPGYNYLGPGNGLDRGEPVNRADEVAREHDISYNEQLEAGDNPYLKYNHADAEFQEKLADDTSFGGNLGKAVFQAKKRVLEPFGLVEEGAKTAPTGKRIDDHFPKRKKARTEEDSKPSTSSDAEAGPSGSQQLQIPAQPASSLGADTMSAGGGGPLGDNNQGADGVGNASGDWHCDSTWMGDRVVTKSTRTWVLPSYNNHQYREIKSGSVDGSNANAYFGYSTPWGYFDFNRFHSHWSPRDWQRLINNYWGFRPRSLRVKIFNIQVKEVTVQDSTTTIANNLTSTVQVFTDDDYQLPYVVGNGTEGCLPAFPPQVFTLPQYGYATLNRDNTENPTERSSFFCLEYFPSKMLRTGNNFEFTYNFEEVPFHSSFAPSQNLFKLANPLVDQYLYRFVSTNNTGGVQFNKNLAGRYANTYKNWFPGPMGRTQGWNLGSGVNRASVSAFATTNRMELEGASYQVPPQPNGMTNNLQGSNTYALENTMIFNSQPANPGTTATYLEGNMLITSESETQPVNRVAYNVGGQMATNNQSSTTAPATGTYNLQEIVPGSVWMERDVYLQGPIWAKIPETGAHFHPSPAMGGFGLKHPPPMMLIKNTPVPGNITSFSDVPVSSFITQYSTGQVTVEMEWELKKENSKRWNPEIQYTNNYNDPQFVDFAPDSTGEYRTTRPIGTRYLTRPL

SEQ ID NO: 103 - DNA, 2175 bp, Adeno-associated virus 5
atgtcttttgttgatcaccctccagattggttggaagaagttggtgaaggtcttcgcgagtttttgggccttgaagcgggcccaccgaaaccaaaacccaatcagcagcatcaagatcaagcccgtggtcttgtgctgcctggttataactatctcggacccggaaacggtctcgatcgaggagagcctgtcaacagggcagacgaggtcgcgcgagagcacgacatctcgtacaacgagcagcttgaggcgggagacaacccctacctcaagtacaaccacgcggacgccgagtttcaggagaagctcgccgacgacacatccttcgggggaaacctcggaaaggcagtctttcaggccaagaaaagggttctcgaaccttttggcctggttgaagagggtgctaagacggcccctaccggaaagcggatagacgaccactttccaaaaagaaagaaggctcggaccgaagaggactccaagccttccacctcgtcagacgccgaagctggacccagcggatcccagcagctgcaaatcccagcccaaccagcctcaagtttgggagctgatacaatgtctgcgggaggtggcggcccattgggcgacaataaccaaggtgccgatggagtgggcaatgcctcgggagattggcattgcgattccacgtggatgggggacagagtcgtcaccaagtccacccgaacctgggtgctgcccagctacaacaaccaccagtaccgagagatcaaaagcggctccgtcgacggaagcaacgccaacgcctactttggatacagcaccccctgggggtactttgactttaaccgcttccacagccactggagcccccgagactggcaaagactcatcaacaactactggggcttcagaccccggtccctcagagtcaaaatcttcaacattcaagtcaaagaggtcacggtgcaggactccaccaccaccatcgccaacaacctcacctccaccgtccaagtgtttacggacgacgactaccagctgccctacgtcgtcggcaacgggaccgagggatgcctgccggccttccctccgcaggtctttacgctgccgcagtacggttacgcgacgctgaaccgcgacaacacagaaaatcccaccgagaggagcagcttcttctgcctagagtactttcccagcaagatgctgagaacgggcaacaactttgagtttacctacaactttgaggaggtgcccttccactccagcttcgctcccagtcagaacctgttcaagctggccaacccgctggtggaccagtacttgtaccgcttcgtgagcacaaataacactggcggagtccagttcaacaagaacctggccgggagatacgccaacacctacaaaaactggttcccggggcccatgggccgaacccagggctggaacctgggctccggggtcaaccgcgccagtgtcagcgccttcgccacgaccaataggatggagctcgagggcgcgagttaccaggtgcccccgcagccgaacggcatgaccaacaacctccagggcagcaacacctatgccctggagaacactatgatcttcaacagccagccggcgaacccgggcaccaccgccacgtacctcgagggcaacatgctcatcaccagcgagagcgagacgcagccggtgaaccgcgtggcgtacaacgtcggcgggcagatggccaccaacaaccagagctccaccactgcccccgcgaccggcacgtacaacctccaggaaatcgtgcccggcagcgtgtggatggagagggacgtgtacctccaaggacccatctgggccaagatcccagagacgggggcgcactttcacccctctccggccatgggcggattcggactcaaacacccaccgcccatgatgctcatcaagaacacgcctgtgcccggaaatatcaccagcttctcggacgtgcccgtcagcagcttcatcacccagtacagcaccgggcaggtcaccgtggagatggagtgggagctcaagaaggaaaactccaagaggtggaacccagagatccagtacacaaacaactacaacgacccccagtttgtggactttgccccggacagcaccggggaatacagaaccaccagacctatcggaacccgataccttacccgacccctttaa

SEQ ID NO: 104 - DNA, 2208 bp, Artificial Sequence
  source: /note="Description of Artificial Sequence: Synthetic polynucleotide"
atggctgccgatggttatcttccagattggctcgaggacaacctctctgagggcattcgcgagtggtgggacttgaaacctggagccccgaaacccaaagccaaccagcaaaagcaggacgacggccggggtctggtgcttcctggctacaagtacctcggacccttcaacggactcgacaagggggagcccgtcaacgcggcggatgcagcggccctcgagcacgacaaggcctacgaccagcagctcaaagcgggtgacaatccgtacctgcggtataaccacgccgacgccgagtttcaggagcgtctgcaagaagatacgtcttttgggggcaacctcgggcgagcagtcttccaggccaagaagagggttctcgaaccttttggtctggttgaggaaggtgctaagacggctcctggaaagaaacgtccggtagagcagtcgccacaagagccagactcctcctcgggcattggcaagacaggccagcagcccgctaaaaagagactcaattttggtcagactggcgactcagagtcagtccccgacccacaacctctcggagaacctccagcaacccccgctgctgtgggacctactacaatggcttcaggcggtggcgcaccaatggcagacaataacgaaggcgccgacggagtgggtaatgcctcaggaaattggcattgcgattccacatggctgggcgacagagtcatcaccaccagcacccgaacatgggccttgcccacctataacaaccacctctacaagcaaatctccagtgcttcaacgggggccagcaacgacaaccactacttcggctacagcaccccctgggggtattttgatttcaacagattccactgccatttctcaccacgtgactggcagcgactcatcaacaacaattggggattccggcccaagagactcaacttcaagctcttcaacatccaagtcaaggaggtcacgacgaatgatggcgtcacgaccatcgctaataaccttaccagcacggttcaagtcttctcggactcggagtaccagttgccgtacgtcctcggctctgcgcaccagggctgcctccctccgttcccggcggacgtgttcatgattccgcagtacggctacctaacgctcaacaatggcagccaggcagtgggacggtcatccttttactgcctggaatatttcccatcgcagatgctgagaacgggcaataactttaccttcagctacaccttcgaggacgtgcctttccacagcagctacgcgcacagccagagcctggaccggctgatgaatcctctcatcgaccagtacctgtattacctgaacagaactcagaatcagtccggaagtgcccaaaacaaggacttgctgtttagccgggggtctccagctggcatgtctgttcagcccaaaaactggctacctggaccctgttaccggcagcagcgcgtttctaaaacaaaaacagacaacaacaacagcaactttacctggactggtgcttcaaaatataaccttaatgggcgtgaatctataatcaaccctggcactgctatggcctcacacaaagacgacaaagacaagttctttcccatgagcggtgtcatgatttttggaaaggagagcgccggagcttcaaacactgcattggacaatgtcatgatcacagacgaagaggaaatcaaagccactaaccccgtggccaccgaaagatttgggactgtggcagtcaatctccagagcagcagcacagaccctgcgaccggagatgtgcatgttatgggagccttacctggaatggtgtggcaagacagagacgtatacctgcagggtcctatttgggccaaaattcctcacacggatggacactttcacccgtctcctctcatgggcggctttggacttaagcacccgcctcctcagatcctcatcaaaaacacgcctgttcctgcgaatcctccggcagagttttcggctacaaagtttgcttcattcatcacccagtattccacaggacaagtgagcgtggagattgaatgggagctgcagaaagaaaacagcaaacgctggaatcccgaagtgcagtatacatctaactatgcaaaatctgccaacgttgatttcactgtggacaacaatggactttatactgagcctcgccccattggcacccgttacctcacccgtcccctg

SEQ ID NO: 105 - protein, 736 aa, Adeno-associated virus 6
MAADGYLPDWLEDNLSEGIREWWDLKPGAPKPKANQQKQDDGRGLVLPGYKYLGPFNGLDKGEPVNAADAAALEHDKAYDQQLKAGDNPYLRYNHADAEFQERLQEDTSFGGNLGRAVFQAKKRVLEPFGLVEEGAKTAPGKKRPVEQSPQEPDSSSGIGKTGQQPAKKRLNFGQTGDSESVPDPQPLGEPPATPAAVGPTTMASGGGAPMADNNEGADGVGNASGNWHCDSTWLGDRVITTSTRTWALPTYNNHLYKQISSASTGASNDNHYFGYSTPWGYFDFNRFHCHFSPRDWQRLINNNWGFRPKRLNFKLFNIQVKEVTTNDGVTTIANNLTSTVQVFSDSEYQLPYVLGSAHQGCLPPFPADVFMIPQYGYLTLNNGSQAVGRSSFYCLEYFPSQMLRTGNNFTFSYTFEDVPFHSSYAHSQSLDRLMNPLIDQYLYYLNRTQNQSGSAQNKDLLFSRGSPAGMSVQPKNWLPGPCYRQQRVSKTKTDNNNSNFTWTGASKYNLNGRESIINPGTAMASHKDDKDKFFPMSGVMIFGKESAGASNTALDNVMITDEEEIKATNPVATERFGTVAVNLQSSSTDPATGDVHVMGALPGMVWQDRDVYLQGPIWAKIPHTDGHFHPSPLMGGFGLKHPPPQILIKNTPVPANPPAEFSATKFASFITQYSTGQVSVEIEWELQKENSKRWNPEVQYTSNYAKSANVDFTVDNNGLYTEPRPIGTRYLTRPL

SEQ ID NO: 106 - protein, 623 aa, Adeno-associated virus 6
MPGFYEIVIKVPSDLDEHLPGISDSFVNWVAEKEWELPPDSDMDLNLIEQAPLTVAEKLQRDFLVQWRRVSKAPEALFFVQFEKGESYFHLHILVETTGVKSMVLGRFLSQIRDKLVQTIYRGIEPTLPNWFAVTKTRNGAGGGNKVVDECYIPNYLLPKTQPELQWAWTNMEEYISACLNLAERKRLVAHDLTHVSQTQEQNKENLNPNSDAPVIRSKTSARYMELVGWLVDRGITSEKQWIQEDQASYISFNAASNSRSQIKAALDNAGKIMALTKSAPDYLVGPAPPADIKTNRIYRILELNGYDPAYAGSVFLGWAQKRFGKRNTIWLFGPATTGKTNIAEAIAHAVPFYGCVNWTNENFPFNDCVDKMVIWWEEGKMTAKVVESAKAILGGSKVRVDQKCKSSAQIDPTPVIVTSNTNMCAVIDGNSTTFEHQQPLQDRMFKFELTRRLEHDFGKVTKQEVKEFFRWAQDHVTEVAHEFYVRKGGANKRPAPDDADKSEPKRACPSVADPSTSDAEGAPVDFADRYQNKCSRHAGMLQMLFPCKTCERMNQNFNICFTHGTRDCSECFPGVSESQPVVRKRTYRKLCAIHHLLGRAPEIACSACDLVNVDLDDCVSEQ

SEQ ID NO: 107 - DNA, 4683 bp, Adeno-associated virus 6
ttggccactccctctctgcgcgctcgctcgctcactgaggccgggcgaccaaaggtcgcccgacgcccgggctttgcccgggcggcctcagtgagcgagcgagcgcgcagagagggagtggccaactccatcactaggggttcctggaggggtggagtcgtgacgtgaattacgtcatagggttagggaggtcctgtattagaggtcacgtgagtgttttgcgacattttgcgacaccatgtggtcacgctgggtatttaagcccgagtgagcacgcagggtctccattttgaagcgggaggtttgaacgcgcagcgccatgccggggttttacgagattgtgattaaggtccccagcgaccttgacgagcatctgcccggcatttctgacagctttgtgaactgggtggccgagaaggaatgggagttgccgccagattctgacatggatctgaatctgattgagcaggcacccctgaccgtggccgagaagctgcagcgcgacttcctggtccagtggcgccgcgtgagtaaggccccggaggccctcttctttgttcagttcgagaagggcgagtcctacttccacctccatattctggtggagaccacgggggtcaaatccatggtgctgggccgcttcctgagtcagattagggacaagctggtgcagaccatctaccgcgggatcgagccgaccctgcccaactggttcgcggtgaccaagacgcgtaatggcgccggaggggggaacaaggtggtggacgagtgctacatccccaactacctcctgcccaagactcagcccgagctgcagtgggcgtggactaacatggaggagtatataagcgcgtgtttaaacctggccgagcgcaaacggctcgtggcgcacgacctgacccacgtcagccagacccaggagcagaacaaggagaatctgaaccccaattctgacgcgcctgtcatccggtcaaaaacctccgcacgctacatggagctggtcgggtggctggtggaccggggcatcacctccgagaagcagtggatccaggaggaccaggcctcgtacatctccttcaacgccgcctccaactcgcggtcccagatcaaggccgctctggacaatgccggcaagatcatggcgctgaccaaatccgcgcccgactacctggtaggccccgctccgcccgccgacattaaaaccaaccgcatttaccgcatcctggagctgaacggctacgaccctgcctacgccggctccgtctttctcggctgggcccagaaaaggttcggaaaacgcaacaccatctggctgtttgggccggccaccacgggcaagaccaacatcgcggaagccatcgcccacgccgtgcccttctacggctgcgtcaactggaccaatgagaactttcccttcaacgattgcgtcgacaagatggtgatctggtgggaggagggcaagatgacggccaaggtcgtggagtccgccaaggccattctcggcggcagcaaggtgcgcgtggaccaaaagtgcaagtcgtccgcccagatcgatcccacccccgtgatcgtcacctccaacaccaacatgtgcgccgtgattgacgggaacagcaccaccttcgagcaccagcagccgttgcaggaccggatgttcaaatttgaactcacccgccgtctggagcatgactttggcaaggtgacaaagcaggaagtcaaagagttcttccgctgggcgcaggatcacgtgaccgaggtggcgcatgagttctacgtcagaaagggtggagccaacaagagacccgcccccgatgacgcggataaaagcgagcccaagcgggcctgcccctcagtcgcggatccatcgacgtcagacgcggaaggagctccggtggactttgccgacaggtaccaaaacaaatgttctcgtcacgcgggcatgcttcagatgctgtttccctgcaaaacatgcgagagaatgaatcagaatttcaacatttgcttcacgcacgggaccagagactgttcagaatgtttccccggcgtgtcagaatctcaaccggtcgtcagaaagaggacgtatcggaaactctgtgccattcatcatctgctggggcgggctcccgagattgcttgctcggcctgcgatctggtcaacgtggatctggatgactgtgtttctgagcaataaatgacttaaaccaggtatggctgccgatggttatcttccagattggctcgaggacaacctctctgagggcattcgcgagtggtgggacttgaaacctggagccccgaaacccaaagccaaccagcaaaagcaggacgacggccggggtctggtgcttcctggctacaagtacctcggacccttcaacggactcgacaagggggagcccgtcaacgcggcggatgcagcggccctcgagcacgacaaggcctacgaccagcagctcaaagcgggtgacaatccgtacctgcggtataaccacgccgacgccgagtttcaggagcgtctgcaagaagatacgtcttttgggggcaacctcgggcgagcagtcttccaggccaagaagagggttctcgaaccttttggtctggttgaggaaggtgctaagacggctcctggaaagaaacgtccggtagagcagtcgccacaagagccagactcctcctcgggcattggcaagacaggccagcagcccgctaaaaagagactcaattttggtcagactggcgactcagagtcagtccccgacccacaacctctcggagaacctccagcaacccccgctgctgtgggacctactacaatggcttcaggcggtggcgcaccaatggcagacaataacgaaggcgccgacggagtgggtaatgcctcaggaaattggcattgcgattccacatggctgggcgacagagtcatcaccaccagcacccgaacatgggccttgcccacctataacaaccacctctacaagcaaatctccagtgcttcaacgggggccagcaacgacaaccactacttcggctacagcaccccctgggggtattttgatttcaacagattccactgccatttctcaccacgtgactggcagcgactcatcaacaacaattggggattccggcccaagagactcaacttcaagctcttcaacatccaagtcaaggaggtcacgacgaatgatggcgtcacgaccatcgctaataaccttaccagcacggttcaagtcttctcggactcggagtaccagttgccgtacgtcctcggctctgcgcaccagggctgcctccctccgttcccggcggacgtgttcatgattccgcagtacggctacctaacgctcaacaatggcagccaggcagtgggacggtcatccttttactgcctggaatatttcccatcgcagatgctgagaacgggcaataactttaccttcagctacaccttcgaggacgtgcctttccacagcagctacgcgcacagccagagcctggaccggctgatgaatcctctcatcgaccagtacctgtattacctgaacagaactcagaatcagtccggaagtgcccaaaacaaggacttgctgtttagccgggggtctccagctggcatgtctgttcagcccaaaaactggctacctggaccctgttaccggcagcagcgcgtttctaaaacaaaaacagacaacaacaacagcaactttacctggactggtgcttcaaaatataaccttaatgggcgtgaatctataatcaaccctggcactgctatggcctcacacaaagacgacaaagacaagttctttcccatgagcggtgtcatgatttttggaaaggagagcgccggagcttcaaacactgcattggacaatgtcatgatcacagacgaagaggaaatcaaagccactaaccccgtggccaccgaaagatttgggactgtggcagtcaatctccagagcagcagcacagaccctgcgaccggagatgtgcatgttatgggagccttacctggaatggtgtggcaagacagagacgtatacctgcagggtcctatttgggccaaaattcctcacacggatggacactttcacccgtctcctctcatgggcggctttggacttaagcacccgcctcctcagatcctcatcaaaaacacgcctgttcctgcgaatcctccggcagagttttcggctacaaagtttgcttcattcatcacccagtattccacaggacaagtgagcgtggagattgaatgggagctgcagaaagaaaacagcaaacgctggaatcccgaagtgcagtatacatctaactatgcaaaatctgccaacgttgatttcactgtggacaacaatggactttatactgagcctcgccccattggcacccgttacctcacccgtcccctgtaattgtgtgttaatcaataaaccggttaattcgtgtcagttgaactttggtctcatgtcgttattatcttatctggtcaccatagcaaccggttacacattaactgcttagttgcgcttcgcgaatacccctagtgatggagttgcccactccctctatgcgcgctcgctcgctcggtggggccggcagagcagagctctgccgtctgcggacctttggtccgcaggccccaccgagcgagcgagcgcgcatagagggagtgggcaa

SEQ ID NO: 108 - DNA, 2211 bp, Artificial Sequence
  source: /note="Description of Artificial Sequence: Synthetic polynucleotide"
atggctgccgatggttatcttccagattggctcgaggacaacctctctgagggcattcgcgagtggtgggacttgaaacctggagccccgaaacccaaagccaaccagcaaaagcaggacgacggccggggtctggtgcttcctggctacaagtacctcggacccttcaacggactcgacaagggggagcccgtcaacgcggcggatgcagcggccctcgagcacgacaaggcctacgaccagcagctcaaagcgggtgacaatccgtacctgcggtataaccacgccgacgccgagtttcaggagcgtctgcaagaagatacgtcttttgggggcaacctcgggcgagcagtcttccaggccaagaagagggttctcgaaccttttggtctggttgaggaaggtgctaagacggctcctggaaagaaacgtccggtagagcagtcgccacaagagccagactcctcctcgggcattggcaagacaggccagcagcccgctaaaaagagactcaattttggtcagactggcgactcagagtcagtccccgacccacaacctctcggagaacctccagcaacccccgctgctgtgggacctactacaatggcttcaggcggtggcgcaccaatggcagacaataacgaaggcgccgacggagtgggtaatgcctcaggaaattggcattgcgattccacatggctgggcgacagagtcatcaccaccagcacccgaacatgggccttgcccacctataacaaccacctctacaagcaaatctccagtgcttcaacgggggccagcaacgacaaccactacttcggctacagcaccccctgggggtattttgatttcaacagattccactgccatttctcaccacgtgactggcagcgactcatcaacaacaattggggattccggcccaagagactcaacttcaagctcttcaacatccaagtcaaggaggtcacgacgaatgatggcgtcacgaccatcgctaataaccttaccagcacggttcaagtcttctcggactcggagtaccagttgccgtacgtcctcggctctgcgcaccagggctgcctccctccgttcccggcggacgtgttcatgattccgcagtacggctacctaacgctcaacaatggcagccaggcagtgggacggtcatccttttactgcctggaatatttcccatcgcagatgctgagaacgggcaataactttaccttcagctacaccttcgaggacgtgcctttccacagcagctacgcgcacagccagagcctggaccggctgatgaatcctctcatcgaccagtacctgtattacctgaacagaactcagaatcagtccggaagtgcccaaaacaaggacttgctgtttagccgggggtctccagctggcatgtctgttcagcccaaaaactggctacctggaccctgttaccggcagcagcgcgtttctaaaacaaaaacagacaacaacaacagcaactttacctggactggtgcttcaaaatataaccttaatgggcgtgaatctataatcaaccctggcactgctatggcctcacacaaagacgacaaagacaagttctttcccatgagcggtgtcatgatttttggaaaggagagcgccggagcttcaaacactgcattggacaatgtcatgatcacagacgaagaggaaatcaaagccactaaccccgtggccaccgaaagatttgggactgtggcagtcaatctccagagcagcagcacagaccctgcgaccggagatgtgcatgttatgggagccttacctggaatggtgtggcaagacagagacgtatacctgcagggtcctatttgggccaaaattcctcacacggatggacactttcacccgtctcctctcatgggcggctttggacttaagcacccgcctcctcagatcctcatcaaaaacacgcctgttcctgcgaatcctccggcagagttttcggctacaaagtttgcttcattcatcacccagtattccacaggacaagtgagcgtggagattgaatgggagctgcagaaagaaaacagcaaacgctggaatcccgaagtgcagtatacatctaactatgcaaaatctgccaacgttgatttcactgtggacaacaatggactttatactgagcctcgccccattggcacccgttacctcacccgtcccctgtaa

SEQ ID NO: 109 - protein, 736 aa, Artificial Sequence; identical to SEQ ID NO: 105
  source: /note="Description of Artificial Sequence: Synthetic polypeptide"

SEQ ID NO: 110 - protein, 736 aa, Artificial Sequence
  source: /note="Description of Artificial Sequence: Synthetic polypeptide"
MAADGYLPDWLEDNLSEGIREWWDLKPGAPKPKANQQKQDDGRGLVLPGYKYLGPFNGLDKGEPVNAADAAALEHDKAYDQQLKAGDNPYLRYNHADAEFQERLQEDTSFGGNLGRAVFQAKKRVLEPFGLVEEGAKTAPGKKRPVEQSPQEPDSSSGIGKTGQQPAKKRLNFGQTGDSESVPDPQPLGEPPATPAAVGPTTMASGGGAPMADNNEGADGVGNASGNWHCDSTWLGDRVITTSTRTWALPTYNNHLYKQISSASTGASNDNHYFGYSTPWGYFDFNRFHCHFSPRDWQRLINNNWGFRPKRLNFKLFNIQVKEVTTNDGVTTIANNLTSTVQVFSDSEYQLPYVLGSAHQGCLPPFPADVFMIPQYGYLTLNNGSQAVGRSSFYCLEYFPSQMLRTGNNFTFSYTFEDVPFHSSYAHSQSLDRLMNPLIDQYLYYLNRTQNQSGSAQNKDLLFSRGSPAGMSVQPKNWLPGPCYRQQRVSKTKTDNNNSNFTWTGASKYNLNGRESIINPGTAMASHKDDEDKFFPMSGVMIFGKESAGASNTALDNVMITDEEEIKATNPVATERFGTVAVNLQSSSTDPATGDVHVMGALPGMVWQDRDVYLQGPIWAKIPHTDGHFHPSPLMGGFGLKHPPPQILIKNTPVPANPPAEFSATKFASFITQYSTGQVSVEIEWELQKENSKRWNPEVQYTSNYAKSANVDFTVDNNGLYTEPRPIGTRYLTRPL

SEQ ID NO: 111 - protein, 736 aa, Artificial Sequence
  source: /note="Description of Artificial Sequence: Synthetic polypeptide"
MAADGYLPDWLEDNLSEGIREWWDLKPGAPKPKANQQKQDDGRGLVLPGYKYLGPFNGLDKGEPVNAADAAALEHDKAYDQQLKAGDNPYLRYNHADAEFQERLQEDTSFGGNLGRAVFQAKKRVLEPLGLVEEGAKTAPGKKRPVEQSPQEPDSSSGIGKTGQQPAKKRLNFGQTGDSESVPDPQPLGEPPATPAAVGPTTMASGGGAPMADNNEGADGVGNASGNWHCDSTWLGDRVITTSTRTWALPTYNNHLYKQISSASTGASNDNHYFGYSTPWGYFDFNRFHCHFSPRDWQRLINNNWGFRPKRLNFKLFNIQVKEVTTNDGVTTIANNLTSTVQVFSDSEYQLPYVLGSAHQGCLPPFPADVFMIPQYGYLTLNNGSQAVGRSSFYCLEYFPSQMLRTGNNFTFSYTFEDVPFHSSYAHSQSLDRLMNPLIDQYLYYLNRTQNQSGSAQNKDLLFSRGSPAGMSVQPKNWLPGPCYRQQRVSKTKTDNNNSNFTWTGASKYNLNGRESIINPGTAMASHKDDEDKFFPMSGVMIFGKESAGASNTALDNVMITDEEEIKATNPVATERFGTVAVNLQSSSTDPATGDVHVMGALPGMVWQDRDVYLQGPIWAKIPHTDGHFHPSPLMGGFGLKHPPPQILIKNTPVPANPPAEFSATKFASFITQYSTGQVSVEIEWELQKENSKRWNPEVQYTSNYAKSANVDFTVDNNGLYTEPRPIGTRYLTRPL

SEQ ID NO: 112 - protein, 736 aa, Artificial Sequence
  source: /note="Description of Artificial Sequence: Synthetic polypeptide"
MAADGYLPDWLEDNLSEGIREWWDLKPGAPKPKANQQKQDDGRGLVLPGYKYLGPFNGLDKGEPVNAADAAALEHDKAYDQQLKAGDNPYLRYNHADAEFQERLQEDTSFGGNLGRAVFQAKKRVLEPLGLVEEGAKTAPGKKRPVEQSPQEPDSSSGIGKTGQQPAKKRLNFGQTGDSESVPDPQPLGEPPATPAAVGPTTMASGGGAPMADNNEGADGVGNASGNWHCDSTWLGDRVITTSTRTWALPTYNNHLYKQISSASTGASNDNHYFGYSTPWGYFDFNRFHCHFSPRDWQRLINNNWGFRPKRLNFKLFNIQVKEVTTNDGVTTIANNLTSTVQVFSDSEYQLPYVLGSAHQGCLPPFPADVFMIPQYGYLTLNNGSQAVGRSSFYCLEYFPSQMLRTGNNFTFSYTFEDVPFHSSYAHSQSLDRLMNPLIDQYLYYLNRTQNQSGSAQNKDLLFSRGSPAGMSVQPKNWLPGPCYRQQRVSKTKTDNNNSNFTWTGASKYNLNGRESIINPGTAMASHKDDKDKFFPMSGVMIFGKESAGASNTALDNVMITDEEEIKATNPVATERFGTVAVNLQSSSTDPATGDVHVMGALPGMVWQDRDVYLQGPIWAKIPHTDGHFHPSPLMGGFGLKHPPPQILIKNTPVPANPPAEFSATKFASFITQYSTGQVSVEIEWELQKENSKRWNPEVQYTSNYAKSANVDFTVDNNGLYTEPRPIGTRYLTRPL

SEQ ID NO: 113 - DNA, 2214 bp, Artificial Sequence
  source: /note="Description of Artificial Sequence: Synthetic polynucleotide"
atggctgccgatggttatcttccagattggctcgaggacaacctctctgagggcattcgcgagtggtgggacctgaaacctggagccccgaaacccaaagccaaccagcaaaagcaggacaacggccggggtctggtgcttcctggctacaagtacctcggacccttcaacggactcgacaagggggagcccgtcaacgcggcggacgcagcggccctcgagcacgacaaggcctacgaccagcagctcaaagcgggtgacaatccgtacctgcggtataaccacgccgacgccgagtttcaggagcgtctgcaagaagatacgtcatttgggggcaacctcgggcgagcagtcttccaggccaagaagcgggttctcgaacctctcggtctggttgaggaaggcgctaagacggctcctgcaaagaagagaccggtagagccgtcacctcagcgttcccccgactcctccacgggcatcggcaagaaaggccagcagcccgccagaaagagactcaatttcggtcagactggcgactcagagtcagtccccgaccctcaacctctcggagaacctccagcagcgccctctagtgtgggatctggtacagtggctgcaggcggtggcgcaccaatggcagacaataacgaaggtgccgacggagtgggtaatgcctcaggaaattggcattgcgattccacatggctgggcgacagagtcattaccaccagcacccgaacctgggccctgcccacctacaacaaccacctctacaagcaaatctccagtgaaactgcaggtagtaccaacgacaacacctacttcggctacagcaccccctgggggtattttgactttaacagattccactgccacttctcaccacgtgactggcagcgactcatcaacaacaactggggattccggcccaagaagctgcggttcaagctcttcaacatccaggtcaaggaggtcacgacgaatgacggcgttacgaccatcgctaataaccttaccagcacgattcaggtattctcggactcggaataccagctgccgtacgtcctcggctctgcgcaccagggctgcctgcctccgttcccggcggacgtcttcatgattcctcagtacggctacctgactctcaacaatggcagtcagtctgtgggacgttcctccttctactgcctggagtacttcccctctcagatgctgagaacgggcaacaactttgagttcagctacagcttcgaggacgtgcctttccacagcagctacgcacacagccagagcctggaccggctgatgaatcccctcatcgaccagtacttgtactacctggccagaacacagagtaacccaggaggcacagctggcaatcgggaactgcagttttaccagggcgggccttcaactatggccgaacaagccaagaattggttacctggaccttgcttccggcaacaaagagtctccaaaacgctggatcaaaacaacaacagcaactttgcttggactggtgccaccaaatatcacctgaacggcagaaactcgttggttaatcccggcgtcgccatggcaactcacaaggacgacgaggaccgctttttcccatccagcggagtcctgatttttggaaaaactggagcaactaacaaaactacattggaaaatgtgttaatgacaaatgaagaagaaattcgtcctactaatcctgtagccacggaagaatacgggatagtcagcagcaacttacaagcggctaatactgcagcccagacacaagttgtcaacaaccagggagccttacctggcatggtctggcagaaccgggacgtgtacctgcagggtcccatctgggccaagattcctcacacggatggcaactttcacccgtctcctttgatgggcggctttggacttaaacatccgcctcctcagatcctgatcaagaacactcccgttcccgctaatcctccggaggtgtttactcctgccaagtttgcttcgttcatcacacagtacagcaccggacaagtcagcgtggaaatcgagtgggagctgcagaaggaaaacagcaagcgctggaacccggagattcagtacacctccaactttgaaaagcagactggtgtggactttgccgttgacagccagggtgtttactctgagcctcgccctattggcactcgttacctcacccgtaatctgtaa

SEQ ID NO: 114 - protein, 738 aa, Artificial Sequence
  source: /note="Description of Artificial Sequence: Synthetic polypeptide"
MAADGYLPDWLEDNLSEGIREWWALKPGAPKPKANQQKQDDGRGLVLPGYKYLGPFNGLDKGEPVNAADAAALEHDKAYDQQLQAGDNPYLRYNHADAEFQERLQEDTSFGGNLGRAVFQAKKRVLEPLGLVEEGAKTAPGKKRPVEPSPQRSPDSSTGIGKKGQQPARKRLNFGQTGDSESVPDPQPLGEPPAAPSGVGPNTMAAGGGAPMADNNEGADGVGSSSGNWHCDSTWLGDRVITTSTRTWALPTYNNHLYKQISNGTSGGATNDNTYFGYSTPWGYFDFNRFHCHFSPRDWQRLINNNWGFRPKRLSFKLFNIQVKEVTQNEGTKTIANNLTSTIQVFTDSEYQLPYVLGSAHQGCLPPFPADVFMIPQYGYLTLNNGSQAVGRSSFYCLEYFPSQMLRTGNNFQFTYTFEDVPFHSSYAHSQSLDRLMNPLIDQYLYYLSRTQTTGGTANTQTLGFSQGGPNTMANQAKNWLPGPCYRQQRVSTTTGQNNNSNFAWTAGTKYHLNGRNSLANPGIAMATHKDDEERFFPSNGILIFGKQNAARDNADYSDVMLTSEEEIKTTNPVATEEYGIVADNLQQQNTAPQIGTVNSQGALPGMVWQNRDVYLQGPIWAKIPHTDGNFHPSPLMGGFGLKHPPPQILIKNTPVPADPPTTFNQSKLNSFITQYSTGQVSVEIEWELQKENSKRWNPEIQYTSNYYKSTSVDFAVNTEGVYSEPRPIGTRYLTRNL

SEQ ID NO: 115 - protein, 737 aa, Adeno-associated virus 7
MAADGYLPDWLEDNLSEGIREWWDLKPGAPKPKANQQKQDNGRGLVLPGYKYLGPFNGLDKGEPVNAADAAALEHDKAYDQQLKAGDNPYLRYNHADAEFQERLQEDTSFGGNLGRAVFQAKKRVLEPLGLVEEGAKTAPAKKRPVEPSPQRSPDSSTGIGKKGQQPARKRLNFGQTGDSESVPDPQPLGEPPAAPSSVGSGTVAAGGGAPMADNNEGADGVGNASGNWHCDSTWLGDRVITTSTRTWALPTYNNHLYKQISSETAGSTNDNTYFGYSTPWGYFDFNRFHCHFSPRDWQRLINNNWGFRPKKLRFKLFNIQVKEVTTNDGVTTIANNLTSTIQVFSDSEYQLPYVLGSAHQGCLPPFPADVFMIPQYGYLTLNNGSQSVGRSSFYCLEYFPSQMLRTGNNFEFSYSFEDVPFHSSYAHSQSLDRLMNPLIDQYLYYLARTQSNPGGTAGNRELQFYQGGPSTMAEQAKNWLPGPCFRQQRVSKTLDQNNNSNFAWTGATKYHLNGRNSLVNPGVAMATHKDDEDRFFPSSGVLIFGKTGATNKTTLENVLMTNEEEIRPTNPVATEEYGIVSSNLQAANTAAQTQVVNNQGALPGMVWQNRDVYLQGPIWAKIPHTDGNFHPSPLMGGFGLKHPPPQILIKNTPVPANPPEVFTPAKFASFITQYSTGQVSVEIEWELQKENSKRWNPEIQYTSNFEKQTGVDFAVDSQGVYSEPRPIGTRYLTRNL

SEQ ID NO: 116 - protein, 623 aa, Adeno-associated virus 7
MPGFYEIVIKVPSDLDEHLPGISDSFVNWVAEKEWELPPDSDMDLNLIEQAPLTVAEKLQRDFLVQWRRVSKAPEALFFVQFEKGESYFHLHVLVETTGVKSMVLGRFLSQIREKLVQTIYRGVEPTLPNWFAVTKTRNGAGGGNKVVDECYIPNYLLPKTQPELQWAWTNMEEYISACLNLAERKRLVAQHLTHVSQTQEQNKENLNPNSDAPVIRSKTSARYMELVGWLVDRGITSEKQWIQEDQASYISFNAASNSRSQIKAALDNAGKIMALTKSAPDYLVGPSLPADIKTNRIYRILELNGYDPAYAGSVFLGWAQKKFGKRNTIWLFGPATTGKTNIAEAIAHAVPFYGCVNWTNENFPFNDCVDKMVIWWEEGKMTAKVVESAKAILGGSKVRVDQKCKSSAQIDPTPVIVTSNTNMCAVIDGNSTTFEHQQPLQDRMFKFELTRRLEHDFGKVTKQEVKEFFRWASDHVTEVAHEFYVRKGGASKRPAPDDADISEPKRACPSVADPSTSDAEGAPVDFADRYQNKCSRHAGMIQMLFPCKTCERMNQNFNICFTHGVRDCLECFPGVSESQPVVRKKTYRKLCAIHHLLGRAPEIACSACDLVNVDLDDCVSEQ

SEQ ID NO: 117 - DNA, 4721 bp, Adeno-associated virus 7
ttggccactccctctatgcgcgctcgctcgctcggtggggcctgcggaccaaaggtccgcagacggcagagctctgctctgccggccccaccgagcgagcgagcgcgcatagagggagtggccaactccatcactaggggtaccgcgaagcgcctcccacgctgccgcgtcagcgctgacgtaaatcacgtcataggggagtggtcctgtattagctgtcacgtgagtgcttttgcgacattttgcgacaccacgtggccatttgaggtatatatggccgagtgagcgagcaggatctccattttgaccgcgaaatttgaacgagcagcagccatgccgggtttctacgagatcgtgatcaaggtgccgagcgacctggacgagcacctgccgggcatttctgactcgtttgtgaactgggtggccgagaaggaatgggagctgcccccggattctgacatggatctgaatctgatcgagcaggcacccctgaccgtggccgagaagctgcagcgcgacttcctggtccaatggcgccgcgtgagtaaggccccggaggccctgttctttgttcagttcgagaagggcgagagctacttccaccttcacgttctggtggagaccacgggggtcaagtccatggtgctaggccgcttcctgagtcagattcgggagaagctggtccagaccatctaccgcggggtcgagcccacgctgcccaactggttcgcggtgaccaagacgcgtaatggcgccggcggggggaacaaggtggtggacgagtgctacatccccaactacctcctgcccaagacccagcccgagctgcagtgggcgtggactaacatggaggagtatataagcgcgtgtttgaacctggccgaacgcaaacggctcgtggcgcagcacctgacccacgtcagccagacgcaggagcagaacaaggagaatctgaaccccaattctgacgcgcccgtgatcaggtcaaaaacctccgcgcgctacatggagctggtcgggtggctggtggaccggggcatcacctccgagaagcagtggatccaggaggaccaggcctcgtacatctccttcaacgccgcctccaactcgcggtcccagatcaaggccgcgctggacaatgccggcaagatcatggcgctgaccaaatccgcgcccgactacctggtggggccctcgctgcccgcggacattaaaaccaaccgcatctaccgcatcctggagctgaacgggtacgatcctgcctacgccggctccgtctttctcggctgggcccagaaaaagttcgggaagcgcaacaccatctggctgtttgggcccgccaccaccggcaagaccaacattgcggaagccatcgcccacgccgtgcccttctacggctgcgtcaactggaccaatgagaactttcccttcaacgattgcgtcgacaagatggtgatctggtgggaggagggcaagatgacggccaaggtcgtggagtccgccaaggccattctcggcggcagcaaggtgcgcgtggaccaaaagtgcaagtcgtccgcccagatcgaccccacccccgtgatcgtcacctccaacaccaacatgtgcgccgtgattgacgggaacagcaccaccttcgagcaccagcagccgttgcaggaccggatgttcaaatttgaactcacccgccgtctggagcacgactttggcaaggtgacgaagcaggaagtcaaagagttcttccgctgggccagtgatcacgtgaccgaggtggcgcatgagttctacgtcagaaagggcggagccagcaaaagacccgcccccgatgacgcggatataagcgagcccaagcgggcctgcccctcagtcgcggatccatcgacgtcagacgcggaaggagctccggtggactttgccgacaggtaccaaaacaaatgttctcgtcacgcgggcatgattcagatgctgtttccctgcaaaacgtgcgagagaatgaatcagaatttcaacatttgcttcacacacggggtcagagactgtttagagtgtttccccggcgtgtcagaatctcaaccggtcgtcagaaaaaagacgtatcggaaactctgcgcgattcatcatctgctggggcgggcgcccgagattgcttgctcggcctgcgacctggtcaacgtggacctggacgactgcgtttctgagcaataaatgacttaaaccaggtatggctgccgatggttatcttccagattggctcgaggacaacctctctgagggcattcgcgagtggtgggacctgaaacctggagccccgaaacccaaagccaaccagcaaaagcaggacaacggccggggtctggtgcttcctggctacaagtacctcggacccttcaacggactcgacaagggggagcccgtcaacgcggcggacgcagcggccctcgagcacgacaaggcctacgaccagcagctcaaagcgggtgacaatccgtacctgcggtataaccacgccgacgccgagtttcaggagcgtctgcaagaagatacgtcatttgggggcaacctcgggcgagcagtcttccaggccaagaagcgggttctcgaacctctcggtctggttgaggaaggcgctaagacggctcctgcaaagaagagaccggtagagccgtcacctcagcgttcccccgactcctccacgggcatcggcaagaaaggccagcagcccgccagaaagagactcaatttcggtcagactggcgactcagagtcagtccccgaccctcaacctctcggagaacctccagcagcgccctctagtgtgggatctggtacagtggctgcaggcggtggcgcaccaatggcagacaataacgaaggtgccgacggagtgggtaatgcctcaggaaattggcattgcgattccacatggctgggcgacagagtcattaccaccagcacccgaacctgggccctgcccacctacaacaaccacctctacaagcaaatctccagtgaaactgcaggtagtaccaacgacaacacctacttcggctacagcaccccctgggggtattttgactttaacagattccactgccacttctcaccacgtgactggcagcgactcatcaacaacaactggggattccggcccaagaagctgcggttcaagctcttcaacatccaggtcaaggaggtcacgacgaatgacggcgttacgaccatcgctaataaccttaccagcacgattcaggtattctcggactcggaataccagctgccgtacgtcctcggctctgcgcaccagggctgcctgcctccgttcccggcggacgtcttcatgattcctcagtacggctacctgactctcaacaatggcagtcagtctgtgggacgttcctccttctactgcctggagtacttcccctctcagatgctgagaacgggcaacaactttgagttcagctacagcttcgaggacgtgcctttccacagcagctacgcacacagccagagcctggaccggctgatgaatcccctcatcgaccagtacttgtactacctggccagaacacagagtaacccaggaggcacagctggcaatcgggaactgcagttttaccagggcgggccttcaactatggccgaacaagccaagaattggttacctggaccttgcttccggcaacaaagagtctccaaaacgctggatcaaaacaacaacagcaactttgcttggactggtgccaccaaatatcacctgaacggcagaaactcgttggttaatcccggcgtcgccatggcaactcacaaggacgacgaggaccgctttttcccatccagcggagtcctgatttttggaaaaactggagcaactaacaaaactacattggaaaatgtgttaatgacaaatgaagaagaaattcgtcctactaatcctgtagccacggaagaatacgggatagtcagcagcaacttacaagcggctaatactgcagcccagacacaagttgtcaacaaccagggagccttacctggcatggtctggcagaaccgggacgtgtacctgcagggtcccatctgggccaagattcctcacacggatggcaactttcacccgtctcctttgatgggcggctttggacttaaacatccgcctcctcagatcctgatcaagaacactcccgttcccgctaatcctccggaggtgtttactcctgccaagtttgcttcgttcatcacacagtacagcaccggacaagtcagcgtggaaatcgagtgggagctgcagaaggaaaacagcaagcgctggaacccggagattcagtacacctccaactttgaaaagcagactggtgtggactttgccgttgacagccagggtgtttactctgagcctcgccctattggcactcgttacctcacccgtaatctgtaattgcatgttaatcaataaaccggttgattcgtttcagttgaactttggtctcctgtgcttcttatcttatcggtttccatagcaactggttacacattaactgcttgggtgcgcttcacgataagaacactgacgtcaccgcggtacccctagtgatggagttggccactccctctatgcgcgctcgctcgctcggtggggcctgcggaccaaaggtccgcagacggcagagctctgctctgccggccccaccgagcgagcgagcgcgcatagagggagtggccaa

SEQ ID NO: 118 - DNA, 2214 bp, Artificial Sequence; identical to SEQ ID NO: 113
  source: /note="Description of Artificial Sequence: Synthetic polynucleotide"

SEQ ID NO: 119 - protein, 737 aa, Artificial Sequence; identical to SEQ ID NO: 115
  source: /note="Description of Artificial Sequence: Synthetic polypeptide"

SEQ ID NO: 120 - DNA, 2217 bp, Artificial Sequence
  source: /note="Description of Artificial Sequence: Synthetic polynucleotide"
atggctgccgatggttatcttccagattggctcgaggacaacctctctgagggcattcgcgagtggtgggcgctgaaacctggagccccgaagcccaaagccaaccagcaaaagcaggacgacggccggggtctggtgcttcctggctacaagtacctcggacccttcaacggactcgacaagggggagcccgtcaacgcggcggacgcagcggccctcgagcacgacaaggcctacgaccagcagctgcaggcgggtgacaatccgtacctgcggtataaccacgccgacgccgagtttcaggagcgtctgcaagaagatacgtcttttgggggcaacctcgggcgagcagtcttccaggccaagaagcgggttctcgaacctctcggtctggttgaggaaggcgctaagacggctcctggaaagaagagaccggtagagccatcaccccagcgttctccagactcctctacgggcatcggcaagaaaggccaacagcccgccagaaaaagactcaattttggtcagactggcgactcagagtcagttccagaccctcaacctctcggagaacctccagcagcgccctctggtgtgggacctaatacaatggctgcaggcggtggcgcaccaatggcagacaataacgaaggcgccgacggagtgggtagttcctcgggaaattggcattgcgattccacatggctgggcgacagagtcatcaccaccagcacccgaacctgggccctgcccacctacaacaaccacctctacaagcaaatctccaacgggacatcgggaggagccaccaacgacaacacctacttcggctacagcaccccctgggggtattttgactttaacagattccactgccacttttcaccacgtgactggcagcgactcatcaacaacaactggggattccggcccaagagactcagcttcaagctcttcaacatccaggtcaaggaggtcacgcagaatgaaggcaccaagaccatcgccaataacctcaccagcaccatccaggtgtttacggactcggagtaccagctgccgtacgttctcggctctgcccaccagggctgcctgcctccgttcccggcggacgtgttcatgattccccagtacggctacctaacactcaacaacggtagtcaggccgtgggacgctcctccttctactgcctggaatactttccttcgcagatgctgagaaccggcaacaacttccagtttacttacaccttcgaggacgtgcctttccacagcagctacgcccacagccagagcttggaccggctgatgaatcctctgattgaccagtacctgtactacttgtctcggactcaaacaacaggaggcacggcaaatacgcagactctgggcttcagccaaggtgggcctaatacaatggccaatcaggcaaagaactggctgccaggaccctgttaccgccaacaacgcgtctcaacgacaaccgggcaaaacaacaatagcaactttgcctggactgctgggaccaaataccatctgaatggaagaaattcattggctaatcctggcatcgctatggcaacacacaaagacgacgaggagcgtttttttcccagtaacgggatcctgatttttggcaaacaaaatgctgccagagacaatgcggattacagcgatgtcatgctcaccagcgaggaagaaatcaaaaccactaaccctgtggctacagaggaatacggtatcgtggcagataacttgcagcagcaaaacacggctcctcaaattggaactgtcaacagccagggggccttacccggtatggtctggcagaaccgggacgtgtacctgcagggtcccatctgggccaagattcctcacacggacggcaacttccacccgtctccgctgatgggcggctttggcctgaaacatcctccgcctcagatcctgatcaagaacacgcctgtacctgcggatcctccgaccaccttcaaccagtcaaagctgaactctttcatcacgcaatacagcaccggacaggtcagcgtggaaattgaatgggagctgcagaaggaaaacagcaagcgctggaaccccgagatccagtacacctccaactactacaaatctacaagtgtggactttgctgttaatacagaaggcgtgtactctgaaccccgccccattggcacccgttacctcacccgtaatctgtaa

SEQ ID NO: 121 - DNA, 2213 bp, Adeno-associated virus 8
atggctgccgatggttatcttccagattggctcgaggacaacctctctgagggcattcgcgagtggtgggcgctgaaacctggagccccgaagcccaaagccaaccagcaaaagcaggacgacggccggggtctggtgcttcctggctacaagtacctcggacccttcaacggactcgacaagggggagcccgtcaacgcggcggacgcagcggccctcgagcacgacaaggcctacgaccagcagctgcaggcgggtgacaatccgtacctgcggtataaccacgccgacgccgagtttcaggagcgtctgcaagaagatacgtcttttgggggcaacctcgggcgagcagtcttccaggccaagaagcgggttctcgaacctctcggtctggttgaggaaggcgctaagacggctcctggaaagaagagaccggtagagccatcaccccagcgttctccagactcctctacgggcatcggcaagaaaggccaacagcccgccagaaaaagactcaattttggtcagactggcgactcagagtcagttccagaccctcaacctctcggagaacctccagcagcgccctctggtgtgggacctaatacaatggctgcaggcggtggcgcaccaatggcagacaataacgaaggcgccgacggagtgggtagttcctcgggaaattggcattgcgattccacatggctgggcgacagagtcatcaccaccagcacccgaacctgggccctgcccacctacaacaaccacctctacaagcaaatctccaacgggacatcgggaggagccaccaacgacaacacctacttcggctacagcaccccctgggggtattttgactttaacagattccactgccacttttcaccacgtgactggcagcgactcatcaacaacaactggggattccggcccaagagactcagcttcaagctcttcaacatccaggtcaaggaggtcacgcagaatgaaggcaccaagaccatcgccaataacctcaccagcaccatccaggtgtttacggactcggagtaccagctgccgtacgttctcggctctgcccaccagggctgcctgcctccgttcccggcggacgtgttcatgattccccagtacggctacctaacactcaacaacggtagtcaggccgtgggacgctcctccttctactgcctggaatactttccttcgcagatgctgagaaccggcaacaacttccagtttacttacaccttcgaggacgtgcctttccacagcagctacgcccacagccagagcttggaccggctgatgaatcctctgattgaccagtacctgtactacttgtctcggactcaaacaacaggaggcacggcaaatacgcagactctgggcttcagccaaggtgggcctaatacaatggccaatcaggcaaagaactggctgccaggaccctgttaccgccaacaacgcgtctcaacgacaaccgggcaaaacaacaatagcaactttgcctggactgctgggaccaaataccatctgaatggaagaaattcattggctaatcctggcatcgctatggcaacacacaaagacgacgaggagcgtttttttcccagtaacgggatcctgatttttggcaaacaaaatgctgccagagacaatgcggattacagcgatgtcatgctcaccagcgaggaagaaatcaaaaccactaaccctgtggctacagaggaatacggtatcgtggcagataacttgcagcagcaaaacacggctcctcaaattggaactgtcaacagccagggggccttacccggtatggtctggcagaaccgggacgtgtacctgcagggtcccatctgggccaagattcctcacacggacggcaacttccacccgtctccgctgatgggcggctttggcctgaaacatcctccgcctcagatcctgatcaagaacacgcctgtacctgcggatcctccgaccaccttcaaccagtcaaagctgaactctttcatcacgcaatacagcaccggacaggtcagcgtggaaattgaatgggagctgcagaaggaaaacagcaagcgctggaaccccgagatccagtacacctccaactactacaaatctacaagtgtggactttgctgtaatacagaaggcgtgtactctgaaccccgccccattggcacccgttacctcacccgtaatctg

SEQ ID NO: 122 - DNA, 4393 bp, Adeno-associated virus 8
cagagagggagtggccaactccatcactaggggtagcgcgaagcgcctcccacgctgccgcgtcagcgctgacgtaaattacgtcataggggagtggtcctgtattagctgtcacgtgagtgcttttgcggcattttgcgacaccacgtggccatttgaggtatatatggccgagtgagcgagcaggatctccattttgaccgcgaaatttgaacgagcagcagccatgccgggcttctacgagatcgtgatcaaggtgccgagcgacctggacgagcacctgccgggcatttctgactcgtttgtgaactgggtggccgagaaggaatgggagctgcccccggattctgacatggatcggaatctgatcgagcaggcacccctgaccgtggccgagaagctgcagcgcgacttcctggtccaatggcgccgcgtgagtaaggccccggaggccctcttctttgttcagttcgagaagggcgagagctactttcacctgcacgttctggtcgagaccacgggggtcaagtccatggtgctaggccgcttcctgagtcagattcgggaaaagcttggtccagaccatctacccgcggggtcgagccccaccttgcccaactggttcgcggtgaccaaagacgcggtaatggcgccggcgggggggaacaaggtggtggacgagtgctacatccccaactacctcctgcccaagactcagcccgagctgcagtgggcgtggactaacatggaggagtatataagcgcgtgcttgaacctggccgagcgcaaacggctcgtggcgcagcacctgacccacgtcagccagacgcaggagcagaacaaggagaatctgaaccccaattctgacgcgcccgtgatcaggtcaaaaacctccgcgcgctatatggagctggtcgggtggctggtggaccggggcatcacctccgagaagcagtggatccaggaggaccaggcctcgtacatctccttcaacgccgcctccaactcgcggtcccagatcaaggccgcgctggacaatgccggcaagatcatggcgctgaccaaatccgcgcccgactacctggtggggccctcgctgcccgcggacattacccagaaccgcatctaccgcatcctcgctctcaacggctacgaccctgcctacgccggctccgtctttctcggctgggctcagaaaaagttcgggaaacgcaacaccatctggctgtttggacccgccaccaccggcaagaccaacattgcggaagccatcgcccacgccgtgcccttctacggctgcgtcaactggaccaatgagaactttcccttcaatgattgcgtcgacaagatggtgatctggtgggaggagggcaagatgacggccaaggtcgtggagtccgccaaggccattctcggcggcagcaaggtgcgcgtggaccaaaagtgcaagtcgtccgcccagatcgaccccacccccgtgatcgtcacctccaacaccaacatgtgcgccgtgattgacgggaacagcaccaccttcgagcaccagcagcctctccaggaccggatgtttaagttcgaactcacccgccgtctggagcacgactttggcaaggtgacaaagcaggaagtcaaagagttcttccgctgggccagtgatcacgtgaccgaggtggcgcatgagttttacgtcagaaagggcggagccagcaaaagacccgcccccgatgacgcggataaaagcgagcccaagcgggcctgcccctcagtcgcggatccatcgacgtcagacgcggaaggagctccggtggactttgccgacaggtaccaaaacaaatgttctcgtcacgcgggcatgcttcagatgctgtttccctgcaaaacgtgcgagagaatgaatcagaatttcaacatttgcttcacacacggggtcagagactgctcagagtgtttccccggcgtgtcagaatctcaaccggtcgtcagaaagaggacgtatcggaaactctgtgcgattcatcatctgctggggcgggctcccgagattgcttgctcggcctgcgatctggtcaacgtggacctggatgactgtgtttctgagcaataaatgacttaaaccaggtatggctgccgatggttatcttccagattggctcgaggacaacctctctgagggcattcgcgagtggtgggcgctgaaacctggagccccgaagcccaaagccaaccagcaaaagcaggacgacggccggggtctggtgcttcctggctacaagtacctcggacccttcaacggactcgacaagggggagcccgtcaacgcggcggacgcagcggccctcgagcacgacaaggcctacgaccagcagctgcaggcgggtgacaatccgtacctgcggtataaccacgccgacgccgagtttcaggagcgtctgcaagaagatacgtcttttgggggcaacctcgggcgagcagtcttccaggccaagaagcgggttctcgaacctctcggtctggttgaggaaggcgctaagacggctcctggaaagaagagaccggtagagccatcaccccagcgttctccagactcctctacgggcatcggcaagaaaggccaacagcccgccagaaaaagactcaattttggtcagactggcgactcagagtcagttccagaccctcaacctctcggagaacctccagcagcgccctctggtgtgggacctaatacaatggctgcaggcggtggcgcaccaatggcagacaataacgaaggcgccgacggagtgggtagttcctcgggaaattggcattgcgattccacatggctgggcgacagagtcatcaccaccagcacccgaacctgggccctgcccacctacaacaaccacctctacaagcaaatctccaacgggacatcgggaggagccaccaacgacaacacctacttcggctacagcaccccctgggggtattttgactttaacagattccactgccacttttcaccacgtgactggcagcgactcatcaacaacaactggggattccggcccaagagactcagcttcaagctcttcaacatccaggtcaaggaggtcacgcagaatgaaggcaccaagaccatcgccaataacctcaccagcaccatccaggtgtttacggactcggagtaccagctgccgtacgttctcggctctgcccaccagggctgcctgcctccgttcccggcggacgtgttcatgattccccagtacggctacctaacactcaacaacggtagtcaggccgtgggacgctcctccttctactgcctggaatactttccttcgcagatgctgagaaccggcaacaacttccagtttacttacaccttcgaggacgtgcctttccacagcagctacgcccacagccagagcttggaccggctgatgaatcctctgattgaccagtacctgtactacttgtctcggactcaaacaacaggaggcacggcaaatacgcagactctgggcttcagccaaggtgggcctaatacaatggccaatcaggcaaagaactggctgccaggaccctgttaccgccaacaacgcgtctcaacgacaaccgggcaaaacaacaatagcaactttgcctggactgctgggaccaaataccatctgaatggaagaaattcattggctaatcctggcatcgctatggcaacacacaaagacgacgaggagcgtttttttcccagtaacgggatcctgatttttggcaaacaaaatgctgccagagacaatgcggattacagcgatgtcatgctcaccagcgaggaagaaatcaaaaccactaaccctgtggctacagaggaatacggtatcgtggcagataacttgcagcagcaaaacacggctcctcaaattggaactgtcaacagccagggggccttacccggtatggtctggcagaaccgggacgtgtacctgcagggtcccatctgggccaagattcctcacacggacggcaacttccacccgtctccgctgatgggcggctttggcctgaaacatcctccgcctcagatcctgatcaagaacacgcctgtacctgcggatcctccgaccaccttcaaccagtcaaagctgaactctttcatcacgcaatacagcaccggacaggtcagcgtggaaattgaatgggagctgcagaaggaaaacagcaagcgctggaaccccgagatccagtacacctccaactactacaaatctacaagtgtggactttgctgttaatacagaaggcgtgtactctgaaccccgccccattggcacccgttacctcacccgtaatctgtaattgcctgttaatcaataaaccggttgattcgtttcagttgaactttggtctctgcg

SEQ ID NO: 123 - protein, 738 aa, Adeno-associated virus 8; identical to SEQ ID NO: 114

SEQ ID NO: 124 - protein, 737 aa, Adeno-associated virus 8
MAADGYLPDWLEDNLSEGIREWWALKPGAPKPKANQQKQDDGRGLVLPGYKYLGPFNGLDKGEPVNAADAAALEHDKAYDQQLQAGDNPYLRYNHADAEFQERLQEDTSFGGNLGRAVFQAKKRVLEPLGLVEEGAKTAPGKKRPVEPSPQRSPDSSTGIGKKGQQPARKRLNFGQTGDSESVPDPQPLGEPPAAPSGVGPNTMAAGGGAPMADNNEGADGVGSSSGNWHCDSTWLGDRVITTSTRTWALPTYNNHLYKQISNGTSGGATNDNTYFGYSTPWGYFDFNRFHCHFSPRDWQRLINNNWGFRPKRLSFKLFNIQVKEVTQNEGTKTIANNLTSTIQVFTDSEYQLPYVLGSAHQGCLPPFPADVFMIPQYGYLTLNNGSQAVGRSSFYCLEYFPSQMLRTGNNFQFTYTFEDVPFHSSYAHSQSLDRLMNPLIDQYLYYLSRTQTTGGTANTQTLGFSQGGPNTMANQAKNWLPGPCYRQQRVSTTTGQNNNSNFAWTAGTKYHLNGRNSLANPGIAMATHKDDEERFFPSNGILIFGKQNAARDNADYSDVMLTSEEEIKTTNPVATEEYGIVADNLQQQNTAPQIGTVNSQGALPGMVWQNRDVYLQGPIWAKIPHTDGNFHPSPLMGGFGLKHPPPQILIKNTPVPADPPTTFNQSKLNSFITQYSTGQVSVEIEWELQKENSKRWNPEIQYTSNYYKSTSVDFAVIQKACTLNPAPLAPVTSPVI

SEQ ID NO: 125 - DNA, 2217 bp, Artificial Sequence; identical to SEQ ID NO: 120
  source: /note="Description of Artificial Sequence: Synthetic polynucleotide"

SEQ ID NO: 126 - DNA, 2214 bp, Artificial Sequence
  source: /note="Description of Artificial Sequence: Synthetic polynucleotide"
atggctgccgatggttatcttccagattggctcgaggacaacctctctgagggcattcgcgagtggtgggcgctgaaacctggagccccgaagcccaaagccaaccagcaaaagcaggacgacggccggggtctggtgcttcctggctacaagtacctcggacccttcaacggactcgacaagggggagcccgtcaacgcggcggacgcagcggccctcgagcacgacaaggcctacgaccagcagctgcaggcgggtgacaatccgtacctgcggtataaccacgccgacgccgagtttcaggagcgtctgcaagaagatacgtcttttgggggcaacctcgggcgagcagtcttccaggccaagaagcgggttctcgaacctctcggtctggttgaggaaggcgctaagacggctcctggaaagaagagaccggtagagccatcaccccagcgttctccagactcctctacgggcatcggcaagaaaggccaacagcccgccagaaaaagactcaattttggtcagactggcgactcagagtcagttccagaccctcaacctctcggagaacctccagcagcgccctctggtgtgggacctaatacaatggctgcaggcggtggcgcaccaatggcagacaataacgaaggcgccgacggagtgggtagttcctcgggaaattggcattgcgattccacatggctgggcgacagagtcatcaccaccagcacccgaacctgggccctgcccacctacaacaaccacctctacaagcaaatctccaacgggacatcgggaggagccaccaacgacaacacctacttcggctacagcaccccctgggggtattttgactttaacagattccactgccacttttcaccacgtgactggcagcgactcatcaacaacaactggggattccggcccaagagactcagcttcaagctcttcaacatccaggtcaaggaggtcacgcagaatgaaggcaccaagaccatcgccaataacctcaccagcaccatccaggtgtttacggactcggagtaccagctgccgtacgttctcggctctgcccaccagggctgcctgcctccgttcccggcggacgtgttcatgattccccagtacggctacctaacactcaacaacggtagtcaggccgtgggacgctcctccttctactgcctggaatactttccttcgcagatgctgagaaccggcaacaacttccagtttacttacaccttcgaggacgtgcctttccacagcagctacgcccacagccagagcttggaccggctgatgaatcctctgattgaccagtacctgtactacttgtctcggactcaaacaacaggaggcacggcaaatacgcagactctgggcttcagccaaggtgggcctaatacaatggccaatcaggcaaagaactggctgccaggaccctgttaccgccaacaacgcgtctcaacgacaaccgggcaaaacaacaatagcaactttgcctggactgctgggaccaaataccatctgaatggaagaaattcattggctaatcctggcatcgctatggcaacacacaaagacgacgaggagcgtttttttcccagtaacgggatcctgatttttggcaaacaaaatgctgccagagacaatgcggattacagcgatgtcatgctcaccagcgaggaagaaatcaaaaccactaaccctgtggctacagaggaatacggtatcgtggcagataacttgcctgagcggacggcgatgagtcttccgggaactgtcaacagccagggggccttacccggtatggtctggcagaaccgggacgtgtacctgcagggtcccatctgggccaagattcctcacacggacggcaacttccacccgtctccgctgatgggcggctttggcctgaaacatcctccgcctcagatcctgatcaagaacacgcctgtacctgcggatcctccgaccaccttcaaccagtcaaagctgaactctttcatcacgcaatacagcaccggacaggtcagcgtggaaattgaatgggagctgcagaaggaaaacagcaagcgctggaaccccgagatccagtacacctccaactactacaaatctacaagtgtggactttgctgttaatacagaaggcgtgtactctgaaccccgccccattggcacccgttacctcacccgtaatctg

SEQ ID NO: 127 - protein, 738 aa, Artificial Sequence
  source: /note="Description of Artificial Sequence: Synthetic polypeptide"
MAADGYLPDWLEDNLSEGIREWWALKPGAPKPKANQQKQDDGRGLVLPGYKYLGPFNGLDKGEPVNAADAAALEHDKAYDQQLQAGDNPYLRYNHADAEFQERLQEDTSFGGNLGRAVFQAKKRVLEPLGLVEEGAKTAPGKKRPVEPSPQRSPDSSTGIGKKGQQPARKRLNFGQTGDSESVPDPQPLGEPPAAPSGVGPNTMAAGGGAPMADNNEGADGVGSSSGNWHCDSTWLGDRVITTSTRTWALPTYNNHLYKQISNGTSGGATNDNTYFGYSTPWGYFDFNRFHCHFSPRDWQRLINNNWGFRPKRLSFKLFNIQVKEVTQNEGTKTIANNLTSTIQVFTDSEYQLPYVLGSAHQGCLPPFPADVFMIPQYGYLTLNNGSQAVGRSSFYCLEYFPSQMLRTGNNFQFTYTFEDVPFHSSYAHSQSLDRLMNPLIDQYLYYLSRTQTTGGTANTQTLGFSQGGPNTMANQAKNWLPGPCYRQQRVSTTTGQNNNSNFAWTAGTKYHLNGRNSLANPGIAMATHKDDEERFFPSNGILIFGKQNAARDNADYSDVMLTSEEEIKTTNPVATEEYGIVADNLPERTAMSLPGTVNSQGALPGMVWQNRDVYLQGPIWAKIPHTDGNFHPSPLMGGFGLKHPPPQILIKNTPVPADPPTTFNQSKLNSFITQYSTGQVSVEIEWELQKENSKRWNPEIQYTSNYYKSTSVDFAVNTEGVYSEPRPIGTRYLTRNL

SEQ ID NO: 128 - DNA, 2214 bp, Artificial Sequence
  source: /note="Description of Artificial Sequence: Synthetic polynucleotide"
atggctgccgatggttatcttccagattggctcgaggacaacctctctgagggcattcgcgagtggtgggcgctgaaacctggagccccgaagcccaaagccaaccagcaaaagcaggacgacggccggggtctggtgcttcctggctacaagtacctcggacccttcaacggactcgacaagggggagcccgtcaacgcggcggacgcagcggccctcgagcacgacaaggcctacgaccagcagctgcaggcgggtgacaatccgtacctgcggtataaccacgccgacgccgagtttcaggagcgtctgcaagaagatacgtcttttgggggcaacctcgggcgagcagtcttccaggccaagaagcgggttctcgaacctctcggtctggttgaggaaggcgctaagacggctcctggaaagaagagaccggtagagccatcaccccagcgttctccagactcctctacgggcatcggcaagaaaggccaacagcccgccagaaaaagactcaattttggtcagactggcgactcagagtcagttccagaccctcaacctctcggagaacctccagcagcgccctctggtgtgggacctaatacaatggctgcaggcggtggcgcaccaatggcagacaataacgaaggcgccgacggagtgggtagttcctcgggaaattggcattgcgattccacatggctgggcgacagagtcatcaccaccagcacccgaacctgggccctgcccacctacaacaaccacctctacaagcaaatctccaacgggacatcgggaggagccaccaacgacaacacctacttcggctacagcaccccctgggggtattttgactttaacagattccactgccacttttcaccacgtgactggcagcgactcatcaacaacaactggggattccggcccaagagactcagcttcaagctcttcaacatccaggtcaaggaggtcacgcagaatgaaggcaccaagaccatcgccaataacctcaccagcaccatccaggtgtttacggactcggagtaccagctgccgtacgttctcggctctgcccaccagggctgcctgcctccgttcccggcggacgtgttcatgattccccagtacggctacctaacactcaacaacggtagtcaggccgtgggacgctcctccttctactgcctggaatactttccttcgcagatgctgagaaccggcaacaacttccagtttacttacaccttcgaggacgtgcctttccacagcagctacgcccacagccagagcttggaccggctgatgaatcctctgattgaccagtacctgtactacttgtctcggactcaaacaacaggaggcacggcaaatacgcagactctgggcttcagccaaggtgggcctaatacaatggccaatcaggcaaagaactggctgccaggaccctgttaccgccaacaacgcgtctcaacgacaaccgggcaaaacaacaatagcaactttgcctggactgctgggaccaaataccatctgaatggaagaaattcattggctaatcctggcatcgctatggcaacacacaaagacgacgaggagcgtttttttcccagtaacgggatcctgatttttggcaaacaaaatgctgccagagacaatgcggattacagcgatgtcatgctcaccagcgaggaagaaatcaaaaccactaaccctgtggctacagaggaatacggtatcgtggcagataacttgagttttagtcgtgcggttctttgtgatggaactgtcaacagccagggggccttacccggtatggtctggcagaaccgggacgtgtacctgcagggtcccatctgggccaagattcctcacacggacggcaacttccacccgtctccgctgatgggcggctttggcctgaaacatcctccgcctcagatcctgatcaagaacacgcctgtacctgcggatcctccgaccaccttcaaccagtcaaagctgaactctttcatcacgcaatacagcaccggacaggtcagcgtggaaattgaatgggagctgcagaaggaaaacagcaagcgctggaaccccgagatccagtacacctccaactactacaaatctacaagtgtggactttgctgttaatacagaaggcgtgtactctgaaccccgccccattggcacccgttacctcacccgtaatctg

SEQ ID NO: 129 - protein, 738 aa, Artificial Sequence
  source: /note="Description of Artificial Sequence: Synthetic polypeptide"
MAADGYLPDWLEDNLSEGIREWWALKPGAPKPKANQQKQDDGRGLVLPGYKYLGPFNGLDKGEPVNAADAAALEHDKAYDQQLQAGDNPYLRYNHADAEFQERLQEDTSFGGNLGRAVFQAKKRVLEPLGLVEEGAKTAPGKKRPVEPSPQRSPDSSTGIGKKGQQPARKRLNFGQTGDSESVPDPQPLGEPPAAPSGVGPNTMAAGGGAPMADNNEGADGVGSSSGNWHCDSTWLGDRVITTSTRTWALPTYNNHLYKQISNGTSGGATNDNTYFGYSTPWGYFDFNRFHCHFSPRDWQRLINNNWGFRPKRLSFKLFNIQVKEVTQNEGTKTIANNLTSTIQVFTDSEYQLPYVLGSAHQGCLPPFPADVFMIPQYGYLTLNNGSQAVGRSSFYCLEYFPSQMLRTGNNFQFTYTFEDVPFHSSYAHSQSLDRLMNPLIDQYLYYLSRTQTTGGTANTQTLGFSQGGPNTMANQAKNWLPGPCYRQQRVSTTTGQNNNSNFAWTAGTKYHLNGRNSLANPGIAMATHKDDEERFFPSNGILIFGKQNAARDNADYSDVMLTSEEEIKTTNPVATEEYGIVADNLSFSRAVLCDGTVNSQGALPGMVWQNRDVYLQGPIWAKIPHTDGNFHPSPLMGGFGLKHPPPQILIKNTPVPADPPTTFNQSKLNSFITQYSTGQVSVEIEWELQKENSKRWNPEIQYTSNYYKSTSVDFAVNTEGVYSEPRPIGTRYLTRNL

SEQ ID NO: 130 - DNA, 4385 bp, Adeno-associated virus 9
cagagagggagtggccaactccatcactaggggtaatcgcgaagcgcctcccacgctgccgcgtcagcgctgacgtagattacgtcataggggagtggtcctgtattagctgtcacgtgagtgcttttgcgacattttgcgacaccacatggccatttgaggtatatatggccgagtgagcgagcaggatctccattttgaccgcgaaatttgaacgagcagcagccatgccgggcttctacgagattgtgatcaaggtgccgagcgacctggacgagcacctgccgggcatttctgactcttttgtgaactgggtggccgagaaggaatgggagctgcccccggattctgacatggatcggaatctgatcgagcaggcacccctgaccgtggccgagaagctgcagcgcgacttcctggtccaatggcgccgcgtgagtaaggccccggaggccctcttctttgttcagttcgagaagggcgagagctactttcacctgcacgttctggtcgagaccacgggggtcaagtccatggtgctaggccgcttcctgagtcagattcgggagaagctggtccagaccatctaccgcgggatcgagccgaccctgcccaactggttcgcggtgaccaagacgcgtaatggcgccggcggggggaacaaggtggtggacgagtgctacatccccaactacctcctgcccaagactcagcccgagctgcagtgggcgtggactaacatggaggagtatataagcgcgtgcttgaacctggccgagcgcaaacggctcgtggcgcagcacctgacccacgtcagccagacgcaggagcagaacaaggagaatctgaaccccaattctgacgcgcccgtgatcaggtcaaaaacctccgcgcgctacatggagctggtcgggtggctggtggaccggggcatcacctccgagaagcagtggatccaggaggaccaggcctcgtacatctccttcaacgccgcctccaactcgcggtcccagatcaaggccgcgctggacaatgccggcaagatcatggcgctgaccaaatccgcgcccgactacctggtaggcccttcacttccggtggacattacgcagaaccgcatctaccgcatcctgcagctcaacggctacgaccctgcctacgccggctccgtctttctcggctgggcacaaaagaagttcgggaaacgcaacaccatctggctgtttgggccggccaccacgggaaagaccaacatcgcagaagccattgcccacgccgtgcccttctacggctgcgtcaactggaccaatgagaactttcccttcaacgattgcgtcgacaagatggtgatctggtgggaggagggcaagatgacggccaaggtcgtggagtccgccaaggccattctcggcggcagcaaggtgcgcgtggaccaaaagtgcaagtcgtccgcccagatcgaccccactcccgtgatcgtcacctccaacaccaacatgtgcgccgtgattgacgggaacagcaccaccttcgagcaccagcagcctctccaggaccggatgtttaagttcgaactcacccgccgtctggagcacgactttggcaaggtgacaaagcaggaagtcaaagagttcttccgctgggccagtgatcacgtgaccgaggtggcgcatgagttttacgtcagaaagggcggagccagcaaaagacccgcccccgatgacgcggataaaagcgagcccaagcgggcctgcccctcagtcgcggatccatcgacgtcagacgcggaaggagctccggtggactttgccgacaggtaccaaaacaaatgttctcgtcacgcgggcatgcttcagatgctgcttccctgcaaaacgtgcgagagaatgaatcagaatttcaacatttgcttcacacacggggtcagagactgctcagagtgtttccccggcgtgtcagaatctcaaccggtcgtcagaaagaggacgtatcggaaactctgtgcgattcatcatctgctggggcgggctcccgagattgcttgctcggcctgcgatctggtcaacgtggacctggatgactgtgtttctgagcaataaatgacttaaaccaggtatggctgccgatggttatcttccagattggctcgaggacaacctctctgagggcattcgcgagtggtgggcgctgaaacctggagccccgaagcccaaagccaaccagcaaaagcaggacgacggccggggtctggtgcttcctggctacaagtacctcggacccttcaacggactcgacaagggggagcccgtcaacgcggcggacgcagcggccctcgagcacggcaaggcctacgaccagcagctgcaggcgggtgacaatccgtacctgcggtataaccacgccgacgccgagtttcaggagcgtctgcaagaagatacgtcttttgggggcaacctcgggcgagcagtcttccaggccaagaagcgggttctcgaacctctcggtctggttgaggaaggcgctaagacggctcctggaaagaagagaccggtagagccatcaccccagcgttctccagactcctctacgggcatcggcaagaaaggccaacagcccgccagaaaaagactcaattttggtcagactggcgactcagagtcagttccagaccctcaacctctcggagaacctccagcagcgccctctggtgtgggacctaatacaatggctgcaggcggtggcgcaccaatggcagacaataacgaaggcgccgacggagtgggtaattcctcgggaaattggcattgcgattccacatggctgggggacagagtcatcaccaccagcacccgaacctgggcattgcccacctacaacaaccacctctacaagcaaatctccaatggaacatcgggaggaagcaccaacgacaacacctactttggctacagcaccccctgggggtattttgacttcaacagattccactgccacttctcaccacgtgactggcagcgactcatcaacaacaactggggattccggccaaagagactcaacttcaagctgttcaacatccaggtcaaggaggttacgacgaacgaaggcaccaagaccatcgccaataaccttaccagcaccgtccaggtctttacggactcggagtaccagctaccgtacgtcctaggctctgcccaccaaggatgcctgccaccgtttcctgcagacgtcttcatggttcctcagtacggctacctgacgctcaacaatggaagtcaagcgttaggacgttcttctttctactgtctggaatacttcccttctcagatgctgagaaccggcaacaactttcagttcagctacactttcgaggacgtgcctttccacagcagctacgcacacagccagagtctagatcgactgatgaaccccctcatcgaccagtacctatactacctggtcagaacacagacaactggaactgggggaactcaaactttggcattcagccaagcaggccctagctcaatggccaatcaggctagaaactgggtacccgggccttgctaccgtcagcagcgcgtctccacaaccaccaaccaaaataacaacagcaactttgcgtggacgggagctgctaaattcaagctgaacgggagagactcgctaatgaatcctggcgtggctatggcatcgcacaaagacgacgaggaccgcttctttccatcaagtggcgttctcatatttggcaagcaaggagccgggaacgatggagtcgactacagccaggtgctgattacagatgaggaagaaattaaagccaccaaccctgtagccacagaggaatacggagcagtggccatcaacaaccaggccgctaacacgcaggcgcaaactggacttgtgcataaccagggagttattcctggtatggtctggcagaaccgggacgtgtacctgcagggccctatttgggctaaaatacctcacacagatggcaactttcacccgtctcctctgatgggtggatttggactgaaacacccacctccacagattctaattaaaaatacaccagtgccggcagatcctcctcttaccttcaatcaagccaagctgaactctttcatcacgcagtacagcacgggacaagtcagcgtggaaatcgagtgggagctgcagaaagaaaacagcaagcgctggaatccagagatccagtatacttcaaactactacaaatctacaaatgtggactttgctgtcaataccaaaggtgtttactctgagcctcgccccattggtactcgttacctcacccgtaatttgtaattgcctgttaatcaataaaccggttaattcgtttcagttgaactttggtctctgcg

SEQ ID NO: 131 - DNA, 4382 bp, Adeno-associated virus 9
cagagagggagtggccaactccatcactaggggtaatcgcgaagcgcctcccacgctgccgcgtcagcgctgacgtagattacgtcataggggagtggtcctgtattagctgtcacgtgagtgcttttgcgacattttgcgacaccacatggccatttgaggtatatatggccgagtgagcgagcaggatctccattttgaccgcgaaatttgaacgagcagcagccatgccgggcttctacgagattgtgatcaaggtgccgagcgacctggacgagcacctgccgggcatttctgactcttttgtgaactgggtggccgagaaggaatgggagctgcccccggattctgacatggatcggaatctgatcgagcaggcacccctgaccgtggccgagaagctgtagcgcgacttcctggtccaatggcgccgcgtgagtaaggccccggaggccctcttctttgttcagttcgagaagggcgagagctactttcacctgcacgttctggtcgagaccacgggggtcaagtccatggtgctaggccgcttcctgagtcagattcgggagaagctggtccagaccatctaccgcgggatcgagccgaccctgcccaactggttcgcggtgaccaagacgcgtaatggcgccggcggggggaacaaggtggtggacgagtgctacatccccaactacctcctgcccaagactcagcccgagctgcagtgggcgtggactaacatggaggagtatataagcgcgtgcttgaacctggccgagcgcaaacggctcgtggcgcagcacctgacccacgtcagccagacgcaggagcagaacaaggagaatctgaaccccaattctgacgcgcccgtgatcaggtcaaaaacctccgcgcgctacatggagctggtcgggtggctggtggaccggggcatcacctccgagaagcagtggatccaggaggaccaggcctcgtacatctccttcaacgccgcctccaactcgcggtcccagatcaaggccgcgctggacaatgccggcaagatcatggcgctgaccaaatccgcgcccgactacctggtaggcccttcacttccggtggacattacgcagaaccgcatctaccgcatcctgcagctcaacggctacgaccctgcctacgccggctccgtctttctcggctgggcacaaaagaagttcgggaaacgcaacaccatctggctgtttgggccggccaccacgggaaagaccaacatcgcagaagccattgcccacgccgtgcccttctacggctgcgtcaactggaccaatgagaactttcccttcaacgattgcgtcgacaagatggtgatctggtgggaggagggcaagatgacggccaaggtcgtggagtccgccaaggccattctcggcggcagcaaggtgcgcgtggaccaaaagtgcaagtcgtccgcccagatcgaccccactcccgtgatcgtcacctccaacaccaacatgtgcgccgtgattgacgggaacagcaccaccttcgagcaccagcagcctctccaggaccggatgtttaagttcgaactcacccgccgtctggagcacgactttggcaaggtgacaaagcaggaagtcaaagagttcttccgctgggccagtgatcacgtgaccgaggtggcgcatgagttttacgtcagaaagggcggagccagcaaaagacccgcccccgatgacgcggataaaagcgagcccaagcgggcctgcccctcagtcgcggatccatcgacgtcagacgcggaaggagctccggtggactttgccgacaggtaccaaaacaaatgttctcgtcacgcgggcatgcttcagatgctgcttccctgcaaaacgtgcgagagaatgaatcagaatttcaacatttgcttcacacacggggtcagagactgctcagagtgtttccccggcgtgtcagaatctcaaccggtcgtcagaaagaggacgtatcggaaactctgtgcgattcatcatctgctggggcgggctcccgagattgcttgctcggcctgcgatctggtcaacgtggacctggatgactgtgtttctgagcaataaatgacttaaaccaggtatggctgccgatggttatcttccagattggctcgaggacaacctctctgagggcattcgcgagtggtgggacctgaaacctggagccccgaaacccaaagccaaccagcaaaagcaggacgacggccggggtctggtgcttcctggctacaagtacctcggacccttcaacggactcgacaagggggagcccgtcaacgcggcggacgcagcggccctcgagcacgacaaggcctacgaccagcagctcaaagcgggtgacaatccgtacctgcggtataaccacgccgacgccgagtttcaggagcgtctgcaagaagatacgtcttttgggggcaacctcgggcgagcagtcttccaggccaagaagcgggttctcgaacctctcggtctggttgaggaaggcgctaagacggctcctggaaagaagagaccggtagagcagtcaccccaagaaccagactcatcctcgggcatcggcaaatcaggccagcagcccgctaaaaagagactcaattttggtcagactggcgactcagagtcagtccccgacccacaacctctcggagaacctccagaagccccctcaggtctgggacctaatacaatggcttcaggcggtggcgctccaatggcagacaataacgaaggcgccgacggagtgggtaattcctcgggaaattggcattgcgattccacatggctgggggacagagtcatcaccaccagcacccgaacctgggcattgcccacctacaacaaccacctctacaagcaaatctccaatggaacatcgggaggaagcaccaacgacaacacctactttggctacagcaccccctgggggtattttgacttcaacagattccactgccacttctcaccacgtgactggcagcgactcatcaacaacaactggggattccggccaaagagactcaacttcaagctgttcaacatccaggtcaaggaggttacgacgaacgaaggcaccaagaccatcgccaataaccttaccagcaccgtccaggtctttacggactcggagtaccagctaccgtacgtcctaggctctgcccaccaaggatgcctgccaccgtttcctgcagacgtcttcatggttcctcagtacggctacctgacgctcaacaatggaagtcaagcgttaggacgttcttctttctactgtctggaatacttcccttctcagatgctgagaaccggcaacaactttcagttcagctacactttcgaggacgtgcctttccacagcagctacgcacacagccagagtctagatcgactgatgaaccccctcatcgaccagtacctatactacctggtcagaacacagacaactggaactgggggaactcaaactttggcattcagccaagcaggccctagctcaatggccaatcaggctagaaactgggtacccgggccttgctaccgtcagcagcgcgtctccacaaccaccaaccaaaataacaacagcaactttgcgtggacgggagctgctaaattcaagctgaacgggagagactcgctaatgaatcctggcgtggctatggcatcgcacaaagacgacgaggaccgcttctttccatcaagtggcgttctcatatttggcaagcaaggagccgggaacgatggagtcgactacagccaggtgctgattacagatgaggaagaaattaaagccaccaaccctgtagccacagaggaatacggagcagtggccatcaacaaccaggccgctaacacgcaggcgcaaactggacttgtgcataaccagggagttattcctggtatggtctggcagaaccgggacgtgtacctgcagggccctatttgggctaaaatacctcacacagatggcaactttcacccgtctcctctgatgggtggatttggactgaaacacccacctccacagattctaattaaaaatacaccagtgccggcagatcctcctcttaccttcaatcaagccaagctgaactctttcatcacgcagtacagcacgggacaagtcagcgtggaaatcgagtgggagctgcagaaagaaaacagcaagcgctggaatccagagatccagtatacttcaaactactacaaatctacaaatgtggactttgctgtcaataccgaaggtgtttactctgagcctcgccccattggtactcgttacctcacccgtaatttgtaattgcctgttaatcaataaaccggttaattcgtttcagttgaactttggtctctgcg

SEQ ID NO: 132 - protein, 736 aa, Adeno-associated virus 9
MAADGYLPDWLEDNLSEGIREWWALKPGAPQPKANQQHQDNARGLVLPGYKYLGPGNGLDKGEPVNAADAAALEHDKAYDQQLKAGDNPYLKYNHADAEFQERLKEDTSFGGNLGRAVFQAKKRLLEPLGLVEEAAKTAPGKKRPVEQSPQEPDSSAGIGKSGAQPAKKRLNFGQTGDTESVPDPQPIGEPPAAPSGVGSLTMASGGGAPVADNNEGADGVGSSSGNWHCDSQWLGDRVITTSTRTWALPTYNNHLYKQISNSTSGGSSNDNAYFGYSTPWGYFDFNRFHCHFSPRDWQRLINNNWGFRPKRLNFKLFNIQVKEVTDNNGVKTIANNLTSTVQVFTDSDYQLPYVLGSAHEGCLPPFPADVFMIPQYGYLTLNDGSQAVGRSSFYCLEYFPSQMLRTGNNFQFSYEFENVPFHSSYAHSQSLDRLMNPLIDQYLYYLSKTINGSGQNQQTLKFSVAGPSNMAVQGRNYIPGPSYRQQRVSTTVTQNNNSEFAWPGASSWALNGRNSLMNPGPAMASHKEGEDRFFPLSGSLIFGKQGTGRDNVDADKVMITNEEEIKTTNPVATESYGQVATNHQSAQAQAQTGWVQNQGILPGMVWQDRDVYLQGPIWAKIPHTDGNFHPSPLMGGFGMKHPPPQILIKNTPVPADPPTAFNKDKLNSFITQYSTGQVSVEIEWELQKENSKRWNPEIQYTSNYYKSNNVEFAVNTEGVYSEPRPIGTRYLTRNL

SEQ ID NO: 133 - protein, 736 aa, Adeno-associated virus 9
MAADGYLPDWLEDNLSEGIREWWDLKPGAPKPKANQQKQDDGRGLVLPGYKYLGPFNGLDKGEPVNAADAAALEHDKAYDQQLKAGDNPYLRYNHADAEFQERLQEDTSFGGNLGRAVFQAKKRVLEPLGLVEEGAKTAPGKKRPVEQSPQEPDSSSGIGKSGQQPAKKRLNFGQTGDSESVPDPQPLGEPPEAPSGLGPNTMASGGGAPMADNNEGADGVGNSSGNWHCDSTWLGDRVITTSTRTWALPTYNNHLYKQISNGTSGGSTNDNTYFGYSTPWGYFDFNRFHCHFSPRDWQRLINNNWGFRPKRLNFKLFNIQVKEVTTNEGTKTIANNLTSTVQVFTDSEYQLPYVLGSAHQGCLPPFPADVFMVPQYGYLTLNNGSQALGRSSFYCLEYFPSQMLRTGNNFQFSYTFEDVPFHSSYAHSQSLDRLMNPLIDQYLYYLVRTQTTGTGGTQTLAFSQAGPSSMANQARNWVPGPCYRQQRVSTTTNQNNNSNFAWTGAAKFKLNGRDSLMNPGVAMASHKDDEDRFFPSSGVLIFGKQGAGNDGVDYSQVLITDEEEIKATNPVATEEYGAVAINNQAANTQAQTGLVHNQGVIPGMVWQNRDVYLQGPIWAKIPHTDGNFHPSPLMGGFGLKHPPPQILIKNTPVPADPPLTFNQAKLNSFITQYSTGQVSVEIEWELQKENSKRWNPEIQYTSNYYKSTNVDFAVNTEGVYSEPRPIGTRYLTRNL

SEQ ID NO: 134 - protein, 623 aa, Adeno-associated virus 9
MPGFYEIVIKVPSDLDEHLPGISDSFVNWVAEKEWELPPDSDMDRNLIEQAPLTVAEKLQRDFLVQWRRVSKAPEALFFVQFEKGESYFHLHVLVETTGVKSMVLGRFLSQIREKLVQTIYRGIEPTLPNWFAVTKTRNGAGGGNKVVDECYIPNYLLPKTQPELQWAWTNMEEYISACLNLAERKRLVAQHLTHVSQTQEQNKENLNPNSDAPVIRSKTSARYMELVGWLVDRGITSEKQWIQEDQASYISFNAASNSRSQIKAALDNAGKIMALTKSAPDYLVGPSLPVDITQNRIYRILQLNGYDPAYAGSVFLGWAQKKFGKRNTIWLFGPATTGKTNIAEAIAHAVPFYGCVNWTNENFPFNDCVDKMVIWWEEGKMTAKVVESAKAILGGSKVRVDQKCKSSAQIDPTPVIVTSNTNMCAVIDGNSTTFEHQQPLQDRMFKFELTRRLEHDFGKVTKQEVKEFFRWASDHVTEVAHEFYVRKGGASKRPAPDDADKSEPKRACPSVADPSTSDAEGAPVDFADRYQNKCSRHAGMLQMLLPCKTCERMNQNFNICFTHGVRDCSECFPGVSESQPVVRKRTYRKLCAIHHLLGRAPEIACSACDLVNVDLDDCVSEQ

SEQ ID NO: 135 - DNA, 2211 bp, Artificial Sequence
  source: /note="Description of Artificial Sequence: Synthetic polynucleotide"
atggctgccgatggttatcttccagattggctcgaggacaaccttagtgaaggaattcgcgagtggtgggctttgaaacctggagcccctcaacccaaggcaaatcaacaacatcaagacaacgctcgaggtcttgtgcttccgggttacaaataccttggacccggcaacggactcgacaagggggagccggtcaacgcagcagacgcggcggccctcgagcacgacaaggcctacgaccagcagctcaaggccggagacaacccgtacctcaagtacaaccacgccgacgccgagttccaggagcggctcaaagaagatacgtcttttgggggcaacctcgggcgagcagtcttccaggccaaaaagaggcttcttgaacctcttggtctggttgaggaagcggctaagacggctcctggaaagaagaggcctgtagagcagtctcctcaggaaccggactcctccgcgggtattggcaaatcgggtgcacagcccgctaaaaagagactcaatttcggtcagactggcgacacagagtcagtcccagaccctcaaccaatcggagaacctcccgcagccccctcaggtgtgggatctcttacaatggcttcaggtggtggcgcaccagtggcagacaataacgaaggtgccgatggagtgggtagttcctcgggaaattggcattgcgattcccaatggctgggggacagagtcatcaccaccagcacccgaacctgggccctgcccacctacaacaatcacctctacaagcaaatctccaacagcacatctggaggatcttcaaatgacaacgcctacttcggctacagcaccccctgggggtattttgacttcaacagattccactgccacttctcaccacgtgactggcagcgactcatcaacaacaactggggattccggcctaagcgactcaacttcaagctcttcaacattcaggtcaaagaggttacggacaacaatggagtcaagaccatcgccaataaccttaccagcacggtccaggtcttcacggactcagactatcagctcccgtacgtgctcgggtcggctcacgagggctgcctcccgccgttcccagcggacgttttcatgattcctcagtacgggtatctgacgcttaatgatggaagccaggccgtgggtcgttcgtccttttactgcctggaatatttcccgtcgcaaatgctaagaacgggtaacaacttccagttcagctacgagtttgagaacgtacctttccatagcagctacgctcacagccaaagcctggaccgactaatgaatccactcatcgaccaatacttgtactatctctcaaagactattaacggttctggacagaatcaacaaacgctaaaattcagtgtggccggacccagcaacatggctgtccagggaagaaactacatacctggacccagctaccgacaacaacgtgtctcaaccactgtgactcaaaacaacaacagcgaatttgcttggcctggagcttcttcttgggctctcaatggacgtaatagcttgatgaatcctggacctgctatggccagccacaaagaaggagaggaccgtttctttcctttgtctggatctttaatttttggcaaacaaggaactggaagagacaacgtggatgcggacaaagtcatgataaccaacgaagaagaaattaaaactactaacccggtagcaacggagtcctatggacaagtggccacaaaccaccagagtgcccaagcacaggcgcagaccggctgggttcaaaaccaaggaatacttccgggtatggtttggcaggacagagatgtgtacctgcaaggacccatttgggccaaaattcctcacacggacggcaactttcacccttctccgctgatgggagggtttggaatgaagcacccgcctcctcagatcctcatcaaaaacacacctgtacctgcggatcctccaacggccttcaacaaggacaagctgaactctttcatcacccagtattctactggccaagtcagcgtggagatcgagtgggagctgcagaaggaaaacagcaagcgctggaacccggagatccagtacacttccaactattacaagtctaataatgttgaatttgctgttaatactgaaggtgtatatagtgaaccccgccccattggcaccagatacctgactcgtaatctgtaa

SEQ ID NO: 136 - protein, 736 aa, Artificial Sequence; identical to SEQ ID NO: 132
  source: /note="Description of Artificial Sequence: Synthetic polypeptide"

SEQ ID NO: 137 - DNA, 2460 bp, Artificial Sequence
  source: /note="Description of Artificial Sequence: Synthetic polynucleotide"
ggtaattcctccggaaattggcattgcgattccacatggctgggcgaccgagtcattaccaccagcacccggacttgggccctgcccacctacaacaaccacctctacaagcaaatctccagccaatcgggtgccaccaacgacaaccactacttcggctacagcaccccttgggggtattttgatttcaacagattccactgccatttctcaccacgtgactggcagcgactcatcaacaacaactggggattcatggctgccgatggttatcttccagattggctcgaggacactctctctgaaggaatcagacagtggtggaagctcaaacctggcccaccaccgccgaaacctaaccaacaacaccgggacgacagtaggggtcttgtgcttcctgggtacaagtacctcggacccttcaacggactcgacaaaggagagccggtcaacgaggcagacgccgcggccctcgagcacgacaaagcctacgaccaccagctcaagcaaggggacaacccgtacctcaaatacaaccacgcggacgctgaatttcaggagcgtcttcaagaagatacgtctttcgggggcaacctcgggcgagcagtcttccaggccaaaaagagggtactcgagcctcttggtctggttgaggaagctgttaagacggctcctggaaaaaagagacctatagagcagtctcctgcagaaccggactcttcctcgggcatcggcaaatcaggccagcagcccgctaagaaaagactcaattttggtcagactggcgacacagagtcagtcccagaccctcaaccaatcggagaaccccccgcagccccctctggtgtgggatctaatacaatggcttcaggcggtggggcaccaatggcagacaataacgaaggcgccgacggagtgggtaattcctcgggaaattggcattgcgattccacatggatgggcgacagagttatcaccaccagcacaagaacctgggccctccccacctacaataatcacctctacaagcaaatctccagcgaatcgggagccaccaacgacaaccactacttcggctacagcaccccctgggggtattttgactttaacagattccactgtcacttctcaccacgtgactggcagcgactcatcaacaacaactggggatttagacccaagaaactcaatttcaagctcttcaacatccaagtcaaggaggtcacgcagaatgatggaaccacgaccatcgccaataaccttaccagcacggtgcaggtcttcacagactctgagtaccagctgccctacgtcctcggttcggctcaccagggctgccttccgccgttcccagcagacgtcttcatgattcctcagtacggctacttgactctgaacaatggcagccaagcggtaggacgttcttcattctactgtctagagtattttccctctcagatgctgaggacgggaaacaacttcaccttcagctacacttttgaagacgtgcctttccacagcagctacgcgcacagccagagtctggatcggctgatgaatcctctcattgaccagtacctgtattacctgagcaaaactcagggtacaagtggaacaacgcagcaatcgagactgcagttcagccaagctgggcctagctccatggctcagcaggccaaaaactggctaccgggacccagctaccgacagcagcgaatgtctaagacggctaatgacaacaacaacagtgaatttgcttggactgcagccaccaaatattacctgaatggaagaaattctctggtcaatcccgggcccccaatggccagtcacaaggacgatgaggaaaagtatttccccatgcacggaaatctcatctttggaaaacaaggcacaggaactaccaatgtggacattgaatcagtgcttattacagacgaagaagaaatcagaacaactaatcctgtggctacagaacaatacggacaggttgccaccaaccatcagagtcagaacaccacagcttcctatggaagtgtggacagccagggaatcttacctggaatggtgtggcaggaccgcgatgtctatcttcaaggtcccatttgggccaaaactcctcacacggacggacactttcatccttctccgctcatgggaggctttggactgaaacaccctcctccccagatcctgatcaaaaacacacctgtgccagcgaatcccgcgaccactttcactcctggaaagtttgcttcgttcattacccagtattccaccggacaggtcagcgtggaaatagagtgggagctgcagaaagaaaacagcaaacgctggaacccagaaattcagtacacctccaactacaacaagtcggtgaatgtggagtttaccgtggacgcaaacggtgtttattctgaaccccgccctattggcactcgttaccttacccggaacttg

SEQ ID NO: 138 - DNA, 3123 bp, Artificial Sequence
  source: /note="Description of Artificial Sequence: Synthetic polynucleotide"
gaattcgccctttctacggctgcgtcaactggaccaatgaaaactttcccttcaacgattgcgtcgacaagatggtgatctggtgggaggagggaaagatgaccgccaaggtcgtggaatctgccaaagccattctgggtggaggcaaggttcgtgtggaccagaaatgcaagtcttcggcccagatcgacccgactccggtgattgtcacctctaacaccaacatgtgcgccgtgattgacggaaactcgaccaccttcgagcaccagcagccgttgcaagaccggatgttcaaatttgaacttacccgccgtttggatcatgactttgggaaggtcaccaagcaggaagtcaaagactttttccggtgggctcaagatcacgtgactgaggtggagcatgagttctacgtcaaaaagggtggagccaagaaaaggcccgcccccgatgatgtatatataaatgagcccaagcgggcgcgcgagtcagttgcgcagccatcgacgtcagacgcggaagcttcgataaactacgcggacaggtaccaaaacaaatgttctcgtcacgtgggcatgaatctgatgctgtttccctgtcgacaatgcgaaagaatgaatcagaattcaaatatctgcttcacacacgggcaaaaagactgtttggaatgctttcccgtgtcagaatctcaacccgtttctgtcgtcagaaaaacgtatcagaaactttgttacattcatcatatcatgggaaaagtaccagacgcctgcactgcctgcgacctggtaaatgtggacttggatgactgtatttctgagcaataaatgacttaaatcaggtatggctgctgacggttatcttccagattggctcgaggacactctctctgaaggaatcagacagtggtggaagctcaaacctggcccaccaccgccgaaacctaaccaacaacaccgggacgacagtaggggtcttgtgcttcctgggtacaagtacctcggacccttcaacggactcgacaaaggagagccggtcaacgaggcagacgccgcggccctcgagcacgacaaagcctacgaccaccagctcaagcaaggggacaacccgtacctcaaatacaaccacgcggacgctgaatttcaggagcgtcttcaagaagatacgtctttcgggggcaacctcgggcgagcagtcttccaggccaaaaagagggtactcgagcctcttggtctggttgaggaagctgttaagacggctcctggaaaaaagagacctatagagcagtctcctgcagaaccggactcttcctcgggcatcggcaaatcaggccagcagcccgctaagaaaagactcaattttggtcagactggcgacacagagtcagtcccaggccctcaaccaatcggagaaccccccgcagccccctctggtgtgggatctaatacaatggcttcaggcggtggggcaccaatggcagacaataacgaaggcgccgacggagtgggtaattcctcgggaaattggcattgcgattccacatggatgggcgacagagttatcaccaccagcacaagaacctgggccctccccacctacaataatcacctctacaagcaaatctccagcgaatcgggagccaccaacgacaaccactacttcggctacagcaccccctgggggtattttgactttaacagattccactgtcacttctcaccacgtgactggcagcgactcatcaacaacaactggggatttagacccaagaaactcaatttcaagctcttcaacatccaagtcaaggaggtcacgcagaatgatggaaccacgaccatcgccaataaccttaccagcgcggtgcaggtcttcacagactctgagtaccagctgccctacgtcctcggttcggctcaccagggctgccttccgccgttcccagcagacgtcttcatgattcctcagtacggctacttgactctgaacaatggcagccaagcggtaggacgttcttcattctactgtctagagtattttccctctcagatgctgaggacgggaaacaacttcaccttcagctacacttttgaagacgtgcctttccacagcagctacgcgcacagccagagtctggatcggctgatgaatcctctcattgaccagtacctgtattacctgagcaaaactcagggtacaagtggaacaacgcagcaatcgagactgcagttcagccaagctgggcctagctccatggctcagcaggccaaaaactggctaccgggacccagctaccgacagcagcgaatgtctaagacggctaatgacaacaacaacagtgaatttgcttggactgcagccaccaaatattacctgaatggaagaaattctctggtcaatcccgggcccccagtggccagtcacaaggacgatgaggaaaagtatttccccatgcacggaaatctcatctttggaaaacaaggcacaggaactaccaatgtggacattgaatcagtgcttattacagacgaagaagaaatcagaacaactaatcctgtggctacagaacaatacggacaggttgccaccaaccatcagagtcagaacaccacagcttcctatggaagtgtggacagccagggaatcttacctggaatggtgtggcaggaccgcgatgtctatcttcaaggtcccatttgggccaaaactcctcacacggacggacactttcatccttctccgctcatgggaggctttggactgaaacaccctcctccccagatcctgatcaaaaacacacctgtgccagcgaatcccgcgaccactttcactcctggaaagtttgcttcgttcattacccagtattccacctgacaggtcagcgtggaaatagagtgggagctgcagaaagaaaacagcaaacgctggaacccagaaattcagtacacctccaactacaacaagtcggtgaatgtggagtttaccgtggacgcaaacggtgtttattctgaaccccgccctattggcactcgttaccttacccggaacttgtaatttcctgttaatgaataagccgatttatgcgtttcagttgaactttggtctctgcgaagggcgaattcgtttaaacct

SEQ ID NO: 139 - protein, 735 aa, Artificial Sequence
  source: /note="Description of Artificial Sequence: Synthetic polypeptide"
MAADGYLPDWLEDTLSEGIRQWWKLKPGPPPPKPNQQHRDDSRGLVLPGYKYLGPFNGLDKGEPVNEADAAALEHDKAYDHQLKQGDNPYLKYNHADAEFQERLQEDTSFGGNLGRAVFQAKKRVLEPLGLVEEAVKTAPGKKRPIEQSPAEPDSSSGIGKSGQQPAKKRLNFGQTGDTESVPGPQPIGEPPAAPSGVGSNTMASGGGAPMADNNEGADGVGNSSGNWHCDSTWMGDRVITTSTRTWALPTYNNHLYKQISSESGATNDNHYFGYSTPWGYFDFNRFHCHFSPRDWQRLINNNWGFRPKKLNFKLFNIQVKEVTQNDGTTTIANNLTSAVQVFTDSEYQLPYVLGSAHQGCLPPFPADVFMIPQYGYLTLNNGSQAVGRSSFYCLEYFPSQMLRTGNNFTFSYTFEDVPFHSSYAHSQSLDRLMNPLIDQYLYYLSKTQGTSGTTQQSRLQFSQAGPSSMAQQAKNWLPGPSYRQQRMSKTANDNNNSEFAWTAATKYYLNGRNSLVNPGPPVASHKDDEEKYFPMHGNLIFGKQGTGTTNVDIESVLITDEEEIRTTNPVATEQYGQVATNHQSQNTTASYGSVDSQGILPGMVWQDRDVYLQGPIWAKTPHTDGHFHPSPLMGGFGLKHPPPQILIKNTPVPANPATTFTPGKFASFITQYSTGQVSVEIEWELQKENSKRWNPEIQYTSNYNKSVNVEFTVDANGVYSEPRPIGTRYLTRNL

SEQ ID NO: 140 - DNA, 3123 bp, Artificial Sequence
  source: /note="Description of Artificial Sequence: Synthetic polynucleotide"
gaattcgccctttctacggctgcgtcaactggaccaatgaaaactttcccttcaacgattgcgtcgacaagatggtgatctggtgggaggagggaaagatgaccgccaaggtcgtggaatctgccaaagccattctgggtggaagcaaggttcgtgtggaccagaaatgcaagtcttcggcccagatcgacccgactccggtgattgtcacctctaacaccaacatgtgcgccgtgattgacggaaactcgaccaccttcgagcaccagcagccgttgcaagaccggatgttcaaatttgaacttacccgccgtttggatcatgactttgggaaggtcaccaagcaggaagtcaaagactttttccggtgggctcaagatcacgtgactgaggtggagcatgagttctacgtcaaaaagggtggagccaagaaaaggcccgcccccgatgatgtatatataaatgagcccaagcgggcgcgcgagtcagttgcgcagccatcgacgtcagacgcggaagcttcgataaactacgcgggcaggtaccaaaacaaatgttctcgtcacgtgggcatgaatctgatgctgtttccctgtcgacaatgcgaaagaatgaatcagaattcaaatatctgcttcacacacgggcaaaaagactgtttggaatgctttcccgtgtcagaatctcaacccgtttctgtcgtcagaaaaacgtatcagaaactttgttacattcatcatatcatgggaaaagaaccagacgcctgcactgcctgcgacctggtaaatgtggacttggatgactgtatttctgagcaataaatgacttaaatcaggtatggctgctgacggttatcttccagattggctcgaggacactctctctgaaggaatcagacagtggtggaagctcaaacctggcccaccaccgccgaaacctaaccaacaacaccgggacgacagtaggggtcttgtgcttcctgggtacaagtacctcggacccttcaacggactcgacaaaggagagccggtcaacgaggcagacgccgcggccctcgagcacgacaaagcctacgaccaccagctcaagcaaggggacaacccgtacctcaaatacaaccacgcggacgctgaatttcaggagcgtcttcaagaagatacgtctttcgggggcaacctcgggcgagcagtcttccaggccaaaaagagggtactcgagcctcttggtctggttgaggaagctgttaagacggctcctggaaaaaagagacctatagagcagtctcctgcagaaccggactcttcctcgggcatcggcgaatcaggccagcagcccgctaagaaaagactcaattttggtcagactggcgacacagagtcagtcccagaccctcaaccaatcggagaaccccccgcagccccctctggtgtgggatctaatacaatggcttcaggcggtggggcaccaatggcagacgataacgaaggcgccgacggagtgggtaattcctcgggaaattggcattgcgattccacatggatgggcgacagagttatcaccaccagcacaagaacctgggccctccccacctacaataatcacctctacaagcaaatctccagcgaatcgggagccaccaacgacaaccactacttcggctacagcaccccctgggggtattttgactttaacagattccactgtcacttctcaccacgtgactggcagcgactcatcaacaacaactggggatttagacccaagaaactcaatttcaagctcttcaacatccaagtcaaggaggtcacgcagaatgatggaaccacgaccatcgccaataaccttaccagcacggtgcaggtcttcacagactctgagtaccagctgccctacgtcctcggttcggctcaccagggctgccttccgccgttcccagcagacgtcttcatgattcctcagtacggctacttgactctgaacaatggcagccaagcggtaggacgttcttcattctactgtctagagtattttccctctcagatgctgaggacgggaaacaacttcaccttcagctacacttttgaagacgtgcctttccacagcagctacgcgcacagccagagtctggatcggctgatgaatcctctcattgaccagtacctgtattacctgagcaaaactcagggtacaagtggaacaacgcagcaatcgagactgcagttcagccaagctgggcctagctccatggctcagcaggccaaaaactggctaccgggacccagctaccgacagcagcgaatgtctaagacggctaatgacaacaacaacagtgaatttgcttggactgcagccaccaaatattacctgaatggaagaaattctctggtcaatcccgggcccccaatggccagtcacaaggacgatgaggaaaagtatttccccatgcacggaaatctcatctttggaaaacaaggcacaggaactaccaatgtggacattgaatcagtgcttattacagacgaagaagaaatcagaacaactaatcctgtggctacagaacaatacggacaggttgccaccaaccatcagagtcaggacaccacagcttcctatggaagtgtggacagccagggaatcttacctggaatggtgtggcaggaccgcgatgtctatcttcaaggtcccatttgggccaaaactcctcacacggacggacactttcatccttctccgctcatgggaggctttggactgaaacaccctcctccccagatcctgatcaaaaacacacctgtgccagcgaatcccgcgaccactttcactcctggaaagtttgcttcgttcattacccagtattccaccggacaggtcagcgtggaaatagagtgggagctgcagaaagaaaacagcaaacgctggaacccagaaattcagtacacctccaactacaacaagtcggtgaatgtggagtttaccgtggacgcaaacggtgtttattctgaaccccgccctattggcactcgttaccttacccggaacttgtaatttcctgttaatgaataaaccgatttatgcgtttcagttgaactttggtctctgcgaagggcgaattcgcggccgcta

SEQ ID NO: 141 - protein, 735 aa, Artificial Sequence
  source: /note="Description of Artificial Sequence: Synthetic polypeptide"
MAADGYLPDWLEDTLSEGIRQWWKLKPGPPPPKPNQQHRDDSRGLVLPGYKYLGPFNGLDKGEPVNEADAAALEHDKAYDHQLKQGDNPYLKYNHADAEFQERLQEDTSFGGNLGRAVFQAKKRVLEPLGLVEEAVKTAPGKKRPIEQSPAEPDSSSGIGESGQQPAKKRLNFGQTGDTESVPDPQPIGEPPAAPSGVGSNTMASGGGAPMADDNEGADGVGNSSGNWHCDSTWMGDRVITTSTRTWALPTYNNHLYKQISSESGATNDNHYFGYSTPWGYFDFNRFHCHFSPRDWQRLINNNWGFRPKKLNFKLFNIQVKEVTQNDGTTTIANNLTSTVQVFTDSEYQLPYVLGSAHQGCLPPFPADVFMIPQYGYLTLNNGSQAVGRSSFYCLEYFPSQMLRTGNNFTFSYTFEDVPFHSSYAHSQSLDRLMNPLIDQYLYYLSKTQGTSGTTQQSRLQFSQAGPSSMAQQAKNWLPGPSYRQQRMSKTANDNNNSEFAWTAATKYYLNGRNSLVNPGPPMASHKDDEEKYFPMHGNLIFGKQGTGTTNVDIESVLITDEEEIRTTNPVATEQYGQVATNHQSQDTTASYGSVDSQGILPGMVWQDRDVYLQGPIWAKTPHTDGHFHPSPLMGGFGLKHPPPQILIKNTPVPANPATTFTPGKFASFITQYSTGQVSVEIEWELQKENSKRWNPEIQYTSNYNKSVNVEFTVDANGVYSEPRPIGTRYLTRNL

SEQ ID NO: 142 - DNA, 3113 bp, Artificial Sequence
  source: /note="Description of Artificial Sequence: Synthetic polynucleotide"
gaattcgccctttctacggctgcgtcaactggaccaatgaaaactttcccttcaacgattgcgtcgacaagatggtgatctggtgggaggagggaaagatgaccgccaaggtcgtggaatctgccaaagccattctgggtggaagcaaggttcgtgtggaccagaaatgcaagtcttcggcccagatcgacccgactccggtgattgtcacctctaacaccaacatgtgcgccgtgattgacggaaactcgaccaccttcgagcaccagcagccgttgcaagaccggatgttcaaatttgaacttacccgccgtttggatcatgactttgggaaggtcaccaagcaggaagtcaaagactttttccggtgggctcaagatcacgtgactgaggtggagcatgagttctacgtcaaaaagggtggagccaagaaaaggcccgcccccgatgatgtatatataaatgagcccaagcgggcgcgcgagtcagttgcgcagccatcgacgtcagacgcggaagcttcgataaactacgcggacaggtaccaaaacaaatgttctcgtcacgtgggcatgaatctgatgctgtttccctgtcgacaatgcgaaagaatgaatcagaattcaaatatctgcttcacacacgggcaaaaagactgtttggaatgctttcccgtgtcagaatctcaacccgttcctgtcgtcagaaaaacgtatcagaaactttgttacattcatcatatcatgggaaaagtaccagacgcctgcactgcctgcgacctggtaaatgtggacttggatgactgtatttctgagcaataaatgacttaaatcaggtatggctgctgacggttatcttccagattggctcgaggacactctctctgaaggaatcagacagtggtggaagctcaaacctggcccaccaccgccgaaacctaaccaacaacaccgggacgacagtaggggtcttgtgcttcctgggtacaagtacctcggacccttcaacggactcgacaaaggagagccggtcaacgaggcagacgccgcggccctcgagcacgacaaagcctacgaccaccagctcaagcaaggggacaacccgtacctcaaatacaaccacgcggacgctgaatttcaggagcgtcttcaagaagatacgtctttcgggggcaacctcgggcgagcagtcttccaggccaaaaagagggtactcgagcctcttggtctggttgaggaagctgttaagacggctcctggaaaaaagagacctatagagcagtctcctgcagaaccggactcttcctcgggcatcggcaaatcaggccagcagcccgctaagaaaagactcaattttggtcagactggcgacacagagtcagtcccagaccctcaaccaatcggagaaccccccgcagccccctctggtgtgggatctaatacaatggcttcaggcggtggggcaccaatggcagacaataacgaaggcgccgacggagtgggtaattcctcgggaaattggcattgcgattccacatggatgggcgacagagttatcaccaccagcacaagaacctgggccctccccacctacaataatcacctctacaagcaaatctccagcgaatcgggagccaccaacgacaaccactacttcggctacagcaccccctgggggtattttgactttaacagattccactgtcacttctcaccacgtgactggcagcgactcatcaataacaactggggatttagacccaagaaactcaatttcaagctcttcaacatccaagtcaaggaggtcacgcagaatgatggaaccacgaccatcgccaataaccttaccagcacggtgcaggtcttcacagactctgagtaccagctgccctacgtcctcggttcggctcaccagggctgccttccgccgttcccagcagacgtcttcatgattcctcagtacggctacttgactctgaacaatggcagccaagcggtaggacgttcttcattctactgtctagagtattttccctctcagatgctgaggacgggaaacaacttcaccttcagctacacttttgaagacgtgcctttccacagcagctacgcgcacagccagagtctggatcggctgatgaatcctctcattgaccagtacctgtattacctgagcaaaactcagggtacaagtggaacaacgcagcaatcgagactgcagttcaaccaagctgggcctagctccatggctcagcaggccaaaaactggctaccgggacccagctaccgacagcagcgaatgtctaagacggctaatgacaacaacaacagtgaatttgcttggactgcagccaccaaatattacccgaatggaagaaattctctggtcaatcccgggcccccaatggccagtcacaaggacgatgaggaaaagtatttccccatgcacggaaatctcatctttggaaaacaaggcacaggaactaccaatgtggacattgaatcagtgcttattacagacgaagaagaaatcagaacgactaatcctgtggctacagaacaatacggacaggttgccaccaaccgtcagagtcagaacaccacagcttcctatggaagtgtggacagccagggaatcttacctggaatggtgtggcaggaccgcgatgtctatcttcaaggtcccatttgggccaaaactcctcacacggacggacactttcatccttctccgctcatgggaggctttggactgaaacaccctcctccccagatcctgatcaaaaacacacctgtgccagcgaatcccgcgaccactttcactcctggaaagtttgcttcgttcattacccagtattccaccggacaggtcagcgtggaaatagagtgggagctgcagaaagaaaacagcaaacgctggaacccggaaattcagtacacctccaactacaacaagtcggtgaatgtggagtttaccgtggacgcaaacggtgtttattctgaaccccgccctattggcactcgttaccttacccggaacttgtaatttcctgttaatgaataaaccgatttatgcgtttcagttgaactttggtctctgcgaagggcgaattc

SEQ ID NO: 143 - protein, 735 aa, Artificial Sequence
  source: /note="Description of Artificial Sequence: Synthetic polypeptide"
MAADGYLPDWLEDTLSEGIRQWWKLKPGPPPPKPNQQHRDDSRGLVLPGYKYLGPFNGLDKGEPVNEADAAALEHDKAYDHQLKQGDNPYLKYNHADAEFQERLQEDTSFGGNLGRAVFQAKKRVLEPLGLVEEAVKTAPGKKRPIEQSPAEPDSSSGIGKSGQQPAKKRLNFGQTGDTESVPDPQPIGEPPAAPSGVGSNTMASGGGAPMADNNEGADGVGNSSGNWHCDSTWMGDRVITTSTRTWALPTYNNHLYKQISSESGATNDNHYFGYSTPWGYFDFNRFHCHFSPRDWQRLINNNWGFRPKKLNFKLFNIQVKEVTQNDGTTTIANNLTSTVQVFTDSEYQLPYVLGSAHQGCLPPFPADVFMIPQYGYLTLNNGSQAVGRSSFYCLEYFPSQMLRTGNNFTFSYTFEDVPFHSSYAHSQSLDRLMNPLIDQYLYYLSKTQGTSGTTQQSRLQFNQAGPSSMAQQAKNWLPGPSYRQQRMSKTANDNNNSEFAWTAATKYYPNGRNSLVNPGPPMASHKDDEEKYFPMHGNLIFGKQGTGTTNVDIESVLITDEEEIRTTNPVATEQYGQVATNRQSQNTTASYGSVDSQGILPGMVWQDRDVYLQGPIWAKTPHTDGHFHPSPLMGGFGLKHPPPQILIKNTPVPANPATTFTPGKFASFITQYSTGQVSVEIEWELQKENSKRWNPEIQYTSNYNKSVNVEFTVDANGVYSEPRPIGTRYLTRNL

SEQ ID NO: 144 - DNA, 3122 bp, Artificial Sequence
  source: /note="Description of Artificial Sequence: Synthetic polynucleotide"
agcggccgcgaattcgccctttctacggctgcgtcaactggaccaatgaaaactttcccttcaacgattgcgtcgacaagatggtgatctggtgggaggagggaaagatgaccgccaaggtcgtggaatctgccaaagccattctgggtggaagcaaggttcgtgtggaccagaaatgcaggtcttcggcccagatcgacccgactccggtgattgtcacctctaacaccaacatgtgcgccgtgattgacggaaactcgaccaccttcgagcaccagcagccgttgcaagaccggatgttcaaatttgaacttacccgccgtttggatcatgactttgggaaggtcaccaagcaggaagtcaaagactttttccggtgggctcaagatcacgtgactgaggtggagcatgagttctacgtcaaaaagggtggagccaagaaaaggcccgcccccgatgatgtatatataaatgagcccaagcgggcgcgcgagtcagttgcgcagccatcgacgtcagacgcggaagcttcgataaactacgcggacaggtaccaaaacaaatgttctcgtcacgtgggcatgaatctgatgctgtttccctgtcgacaatgcgaaagaatgaatcagaattcaaatatctgcttcacacacgggcaaaaagactgtttggaatgctttcccgtgtcagaatctcaacccgtttctgtcgtcagaaaaacgtatcagaaactttgttacattcatcatatcatgggaaaagtaccagacgcctgcactgcctgcgacctggtaaatgtggacttggatgactgtatttctgagcaataaatgacttaaatcaggtatggctgctgacggttatcttccagattggctcgaggacactctctctgaaggaatcagacagtggtggaagctcaaacctggcccaccaccgccgaaacctaaccaacaacaccgggacgacagtaggggtcttgtgcttcctgggtacaagtacctcggacccttcaacggactcgacaaaggagagccggtcaacgaggcagacgccgcggccctcgagcacgacaaagcctacgaccaccagctcaagcaaggggacaacccgtacctcaaatacaaccacgcggacgctgaatttcaggagcgtcttcaagaagatacgtctttcgggggcaacctcgggcgagcagtcttccaggccaaaaagagggtactcgagcctcttggtctggttgaggaagctgttaagacggctcctggaaaaaagagacctatagagcagtctcctgcagaaccggactcttcctcgggcatcggcaaatcaggccagcagcccgctaagaaaagactcaattttggtcagactggcgacacagagtcagtcccagaccctcaaccaatcggagaaccccccgcagccccctctggtgtgggatctaatacaatggcttcaggcggtggggcaccaatggcagacaataacgaaggcgccgacggagtgggtaattcctcgggaaattggcattgcgattccacatggatgggcgacagagttatcaccaccagcacaagaacctgggccctccccacctacaataatcgcctctacaagcaaatctccagcgaatcgggagccaccaacgacaaccactacttcggctacagcaccccctgggggtattttgactttaacagattccactgtcacttctcaccacgtgactggcagcgactcatcaacaacaactggggatttagacccaagaaactcaatttcaagctcttcaacatccaagtcaaggaggtcacgcagaatgatggaaccacgaccatcgccaataaccttaccagcacggtgcaggtcttcacagactctgagtaccagctgccctacgtcctcggttcggctcaccagggctgccttccgccgttcccagcagacgtcttcatgattcctcagtacggctacttgactctgaacaatggcagccaagcggtaggacgttcttcattctactgtctagagtattttccctctcagatgctgaggacgggaaacaacttcaccttcagctacacttttgaagacgtgcctttccacagcagctacgcgcacagccagagtctggatcggctgatgaatcctctcattgaccagtacctgtattacctgagcaaaactcagggtacaagtggaacaacgcagcaatcgagactgcagttcagccaagctgggcctagctccatggctcagcaggccaaaaactggctaccgggacccagctaccgacagcagcgaatgtctaagacggctaatgacaacaacaacagtgaatttgcttggactgcagccaccaaatattacctgaatggaagaaattctctggtcaatcccgggcccccaatggccagtcacaaggacgatgaggaaaagtatttccccatgcacggaaatctcatctttggaaaacaaggcacaggaactaccaatgtggacattgaatcagtgcttattacagacgaagaagaaatcagaacaactaatcctgtggctacagaacaatacggacaggttgccaccaaccatcagagtcagaacaccacagcttcctatggaagtgtggacagccagggaatcttacctggaatggtgtggcaggaccgcgatgtctatcttcaaggtcccatttgggccaaaactcctcacacggacggacactttcatccttctccgctcatgggaggctttggactgaaacaccctcctccccagatcctgatcaaaaacacacctgtgccagcgaatcccgcgaccactttcactcctggaaagtttgcttcgttcattacccagtattccaccggacaggtcagcgtggaaatagagtgggagctgcagaaagaaaacagcaaacgctggaacccagaaattcagtacacctccaactacaacaagtcggtgaatgtggagtttaccgtggacgcaaacggtgtttattctgaaccccgccctattggcactcgttaccttacccggaacttgtaatttcctgttaatgaataaaccgatttatgcgtttcagttgaactttggtctctgcgaagggcgaattc

SEQ ID NO: 145 - protein, 735 aa, Artificial Sequence
  source: /note="Description of Artificial Sequence: Synthetic polypeptide"
MAADGYLPDWLEDTLSEGIRQWWKLKPGPPPPKPNQQHRDDSRGLVLPGYKYLGPFNGLDKGEPVNEADAAALEHDKAYDHQLKQGDNPYLKYNHADAEFQERLQEDTSFGGNLGRAVFQAKKRVLEPLGLVEEAVKTAPGKKRPIEQSPAEPDSSSGIGKSGQQPAKKRLNFGQTGDTESVPDPQPIGEPPAAPSGVGSNTMASGGGAPMADNNEGADGVGNSSGNWHCDSTWMGDRVITTSTRTWALPTYNNRLYKQISSESGATNDNHYFGYSTPWGYFDFNRFHCHFSPRDWQRLINNNWGFRPKKLNFKLFNIQVKEVTQNDGTTTIANNLTSTVQVFTDSEYQLPYVLGSAHQGCLPPFPADVFMIPQYGYLTLNNGSQAVGRSSFYCLEYFPSQMLRTGNNFTFSYTFEDVPFHSSYAHSQSLDRLMNPLIDQYLYYLSKTQGTSGTTQQSRLQFSQAGPSSMAQQAKNWLPGPSYRQQRMSKTANDNNNSEFAWTAATKYYLNGRNSLVNPGPPMASHKDDEEKYFPMHGNLIFGKQGTGTTNVDIESVLITDEEEIRTTNPVATEQYGQVATNHQSQNTTASYGSVDSQGILPGMVWQDRDVYLQGPIWAKTPHTDGHFHPSPLMGGFGLKHPPPQILIKNTPVPANPATTFTPGKFASFITQYSTGQVSVEIEWELQKENSKRWNPEIQYTSNYNKSVNVEFTVDANGVYSEPRPIGTRYLTRNL

SEQ ID NO: 146 - DNA, 3121 bp, Artificial Sequence
  source: /note="Description of Artificial Sequence: Synthetic polynucleotide"
gaattcgcccttcgcagagaccaaagttcaactgaaacgaatcaaccggtttattgattaacaagcaattacagattacgggtgaggtaacgggtgccgatggggcgaggctcagaataagtgccatctgtgttaacagcaaagtccacatttgtagatttgtagtagttggaagtgtattgaatctctgggttccagcgtttgctgttttctttctgcagctcccattcaatttccacgctgacctgtccggtgctgtactgcgtgatgaacgacgccagcttagcttgactgaaggtagttggaggatccgcgggaacaggtgtattcttaatcaggatctgaggaggcgggtgtttcagtccaaagccccccatcagcggcgagggatgaaagtttccgtccgtgtgaggaatcttggcccagataggaccctgcaggtacacgtcccggttctgccagaccatgccaggtaaggctccttgactgttgacggcccctacaataggagcggcgttttgctgttgcaggttatcggccaccacgccgtactgttctgtggccactgggttggtggttttaatttcttcctcactggttagcataacgctgctatagtccacgttgccttttccagctccctgtttcccaaacattaagactccgctggacggaaaaaatcgctcttcgtcgtccttgtgggttgccatagcgacaccgggatttaccagagagtctctgccattcagatgatacttggtggcaccggtccaggcaaagttgctgttgttattttgcgacagtgtcgtggagacgcgttgctgccggtagcagggcccgggtagccagtttttggcctgagccgacatgttattaggcccggcctgagaaaatagcaactgctgagttcctgcggtacctcccgtggactgagtccgagacaggtagtacaggtactggtcgatgagggggttcatcagccggtccaggctttggctgtgcgcgtagctgctgtgaaaaggcacgtcctcaaactggtagctgaactcaaagttgttgcccgttctcagcatttgagaaggaaagtactccaggcagtagaaggaggaacggcccacggcctgactgccattgttcagagtcaggtacccgtactgaggaatcatgaagacgtccgccgggaacggaggcaggcagccctggcgcgcagagccgaggacgtacgggagctggtattccgagtccgtaaagacctgaatcgtgctggtaaggttattggcgatggtcttggtgccttcattctgcgtgacctccttgacctggatgttgaagagcttgaagttgagtctcttgggccggaatccccagttgttgttgatgagtcgctgccagtcacgtggtgagaagtggcagtggaatctgttaaagtcaaaatacccccagggggtgctgtagccgaagtaggtgttgtcgttggtgcttcctcccgaagtcccgttggagatttgcttgtagaggtggttgttgtaggtggggagggcccaggttcgggtgctggtggtgatgactctgtcgcccagccatgtggaatcgcaatgccaatttcctgaggaactacccactccgtcggcgccttcgttattgtctgccattggagcgccaccgcctgcagccattgtaccagatcccagaccagaggggcctgcggggggttctccgattggttgagggtcgggcactgactctgagtcgccagtctgcccaaagttgagtctctttttcgcgggctgctggcctttcttgccgatgcccgtagtggagtctggagaacgctggggtgatggctctaccggtctcttctttccaggagccgtcttagcgccttcctcaaccagaccgagaggttcgagaacccgcttcttggcctggaagactgctcgtccgaggttgcccccaaaagacgtatcttcttgcagacgctcctgaaactcggcgtcggcgtggttataccgcaggtacggattgtcacccgctttgagctgctggtcgtaggccttgtcgtgctcgagggccgctgcgtccgccgcgttgacgggctcccccttgtcgagtccgttgaagggtccgaggtacttgtagccaggaagcaccagaccccggccgtcgtcctgcttttgctggttggctttgggcttcggggctccaggtttcagcgcccaccactcgcgaatgccctcagagaggttgtcctcgagccaatctggaagataaccatcggcagccatacctgatctaaatcatttattgttcaaagatgcagtcatccaaatccacattgaccagatcgcaggcagtgcaagcgtctggcacctttcccatgatatgatgaatgtagcacagtttctgatacgcctttttgacgacagaaacgggttgagattctgacacgggaaagcactctaaacagtctttctgtccgtgagtgaagcagatatttgaattctgattcattctctcgcattgtctgcagggaaacagcatcagattcatgcccacgtgacgagaacatttgttttggtacctgtccgcgtagttgatcgaagcttccgcgtctgacgtcgatggctgcgcaactgactcgcgcacccgtttgggctcacttatatctgcgtcactgggggcgggtcttttcttggctccaccctttttgacgtagaattcatgctccacctcaaccacgtgatcctttgcccaccggaaaaagtctttgacttcctgcttggtgaccttcccaaagtcatgatccagacggcgggtgagttcaaatttgaacatccggtcttgcaacggctgctggtgttcgaaggtcgttgagttcccgtcaatcacggcgcacatgttggtgttggaggtgacgatcacgggagtcgggtctatctgggccgaggacttgcatttctggtccacgcgcaccttgcttcctccgagaatggctttggccgactccacgaccttggcggtcatcttcccctcctcccaccagatcaccatcttgtcgacacagtcgttgaagggaaagttctcattggtccagttgacgcagccgtagaagggcgaattc

SEQ ID NO: 147 - protein, 733 aa, Artificial Sequence
  source: /note="Description of Artificial Sequence: Synthetic polypeptide"
MAADGYLPDWLEDNLSEGIREWWDLKPGAPKLKANQQKQDDGRGLVLPGYKYLGPFHGLDKGEPVNAADAAALEHDKAYDQQLKAGDNPYLRYNHADAEFQERLQEDTSFGGNLGRAVFQAKKRVLEPLGLVEEGAKTAPGKKRPLESPQEPDSSSGIGKKGKQPAKKRLNFEEDTGAGDGPPEGSDTSAMSSDIEMRAAPGGNAVDAGQGSDGVGNASGDWHCDSTWSEGKVTTTSTRTWVLPTYNNHLYLRLGTTSNSNTYNGFSTPWGYFDFNRFHCHFSPRDWQRLINNNWGLRPKAMRVKIFNIQVKEVTTSNGETTVANNLTSTVQIFADSSYELPYVMDAGQEGSLPPFPNDVFMVPQYGYCGIVTGENQNQTDRNAFYCLEYFPSQMLRTGNNFEMAYNFEKVPFHSMYAHSQSLDRLMNPLLDQYLWHLQSTTSGETLNQGNAATTFGKIRSGDFAFYRKNWLPGPCVKQQRFSKTASQNYKIPASGGNALLKYDTHYTLNNRWSNIAPGPPMATAGPSDGDFSNAQLIFPGPSVTGNTTTSANNLLFTSEGEIAATNPRDTDMFGQIADNNQNATTAPITGNVTAMGVLPGMVWQNRDIYYQGPIWAKIPHADGHFHPSPLIGGFGLKHPPPQIFIKNTPVPANPATTFTAARVDSFITQYSTGQVAVQIEWEIEKERSKRRNPEVQFTSNYGNQSSMLWAPDTTGKYTEPRVIGSRYLTNHL

SEQ ID NO: 148 - protein, 735 aa, Artificial Sequence
  source: /note="Description of Artificial Sequence: Synthetic polypeptide"
MAADGYLPDWLEDTLSEGIRQWWKLKPGPPPPKPNQQHRDDSRGLVLPGYKYLGPFNGLDKGEPVNEADAAALEHDKAYDHQLKQGDNPYLKYNHADAEFQERLQEDTSFGGNLGRAVFQAKKRVLEPLGLVEEAVKTAPGKKRPIEQSPAEPDSSSGIGKSGQQPAKKRLNFGQTGDTESVPDPQPIGEPPAAPSGVGSNTMASGGGAPMADNNEGADGVGNSSGNWHCDSTWMGDRVITTSTRTWALPTYNNHLYKQISSESGATNDNHYFGYSTPWGYFDFNRFHCHFSPRDWQRLINNNWGFRPKKLNFKLFNIQVKEVTQNDGTTTIANNLTSTVQVFTDSEYQLPYVLGSAHQGCLPPFPADVFMIPQYGYLTLNNGSQAVGRSSFYCLEYFPSQMLRTGNNFTFSYTFEDVPFHSSYAHSQSLDRLMNPLIDQYLYYLSKTQGTSGTTQQSRLQFSQAGPSSMAQQAKNWLPGPSYRQQRMSKTANDNNNSEFAWTAATKYYLNGRNSLVNPGPPMASHKDDEEKYFPMHGNLIFGKQGTGTTNVDIESVLITDEEEIRTTNPVATEQYGQVATNHQSQNTTASYGSVDSQGILPGMVWQDRDVYLQGPIWAKIPHTDGHFHPSPLMGGFGLKHPPPQILIKNTPVPANPATTFTPGKFASFITQYSTGQVSVEIEWELQKENSKRWNPEIQYTSNYNKSVNVEFTVDANGVYSEPRPIGTRYLTRNL

SEQ ID NO: 149 - DNA, 3127 bp, Artificial Sequence
  source: /note="Description of Artificial Sequence: Synthetic polynucleotide"
gcggccgcgaattcgcccttcgcagagaccaaagttcaactgaaacgaatcaaccggtttattgattaacatgcaattacagattacgggtgaggtaacgagtgccaatagggcgaggctcagagtaaacaccctggctgtcaacggcaaagtccacaccagtctgcttttcaaagttggaggtgtactgaatctccgggtcccagcgcttgctgttttccttctgcagctcccactcgatttccacgctgacttgtccggtgctgtactgtgtgatgaacgaagcaaacttggcaggagtaaacacctccggaggattagcgggaacgggagtgttcttgatcaggatctgaggaggcggatgtttaagtccaaagccgcccatcaaaggagacgggtgaaagttgccatccgtgtgaggaatcttggcccagatgggaccctgcaggtacacgtcccggttctgccagaccatgccaggtaaggctccctggttgttgacaacttgtgtctgggctgcagtattagccgcttgtaagttgctgctgactatcccgtattcttccgtggctacaggattagtaggacgaatttcttcttcatttgtcattaacacattttccaatgtagttttgttagttgctccagtttttccaaaaatcaggactccgctggatgggaaaaagcggtcctcgtcgtccttgtgagttgccatggcgacgccgggattaaccaacgagtttctgccgttcaggtgatatttggtggcaccagtccaagcaaagttgctgttgttgttttgatccagcgttttggagaccctttgttgccggaagcagggtccaggtaaccaattcttggcttgttcggccatagttgaaggcccgccctggtaaaactgcagttcccgattgccagctgtgcctcctgggtcactctgtgttctggccaggtagtacaagtactggtcgatgaggggattcatcagccggtccaggctctggctgtgtgcgtagctgctgtggaaaggcacgtcctcgaagctgtagctgaactcaaagttgttgcccgttctcagcatctgagaggggaagtactccaggcagtagaaggaggaacgtcccacagactgactgccattgttgagagtcaggtagccgtactgaggaatcatgaagacgtccgccgggaacggaggcaggcagccctggtgcgcagagccgaggacgtacggcagctggtattccgagtccgagaatacctgaatcgtgctggtaaggttattagcgatggtcgtaacgccgtcattcgtcgtgacctccttgacctggatgttgaagagcttgaaccgcagcttcttgggccggaatccccagttgttgttgatgagtcgctgccagtcacgtggtgagaagtggcagtggaatctgttaaagtcaaaatacccccagggggtgctgtagccgaagtaggtgttgtcgttggtactacctgcagtttcactggagatttgctcgtagaggtggttgttgtaggtgggcagggcccaggttcgggtgctggtggtaatgactctgtcgcccagccatgtggaatcgcaatgccaatttcctgaggcattacccactccgtcggcaccttcgttattgtctgccattggtgcgccaccgcctgcagccactgtaccagatcccacactagagggcgctgctggaggttctccgagaggttgagggtcggggactgactctgagtcgccagtctgaccgaaattgagtctctttctggcgggctgctggcccttcttgccgatgcccgtggaggagtcgggggaacgctgaggtgacggctctaccggtctcttctttgcaggagccgtcttagcgccttcctcaaccagaccgagaggttcgagaacccgcttcttggcctggaagactgctcgcccgaggttgcccccaaatgacgtatcttcttgcagacgctcctgaaactcggcgtcggcgtggttataccgcaggtacgggttgtcacccgcattgagctgctggtcgtaggccttgtcgtgctcgagggccgctgcgtccgccgcgttgacgggctcccccttgtcgagtccgttgaagggtccgaggtacttgtagccaggaagcaccagaccccggccgttgtcctgcttttgctggttggctttgggtttcggggctccaggtttcaggtcccaccactcgcgaatgccctcagagaggttgtcctcgagccaatctggaagataaccatcggcagccatacctgatttaaatcatttattgttcaaagatgcagtcatccaaatccacattgaccagatcgcaggcagtgcaagcgtctggcacctttcccatgatatgatgaatgtagcacagtttctgatacgcctttttgacgacagaaacgggtttagattctgacacgggaaagcactctaaacagtctttctgtccgtgagtgaagcagatatttgaattctgattcattctctcgcattgtctgcagggaaacagcatcagattcatgcccacgtgacgagaacatttgttttggtacctgtctgcgtagttgatcgaagcttccgcgtctgacgtcgatggctgcgcaactgactcgcgcacccgtttgggctcacttatatctgcgtcactgggggcgggtcttttcttggctccaccctttttgacgtagaattcatgctccacctcaaccacgtaatcctttgcccaccggaaaaagtctttgacttcctgcttggtgaccttcccaaagtcatgatccagacggcgggtgagttcaaatttgaacatccggtcttgcaacggctgctggtgttcgaaggtcgttgagttcccgtcgatcacggcgcacatgttggtgttggagatgacgatcgcgggagtcgggtctatctgggccgaggacttgcatttctggtccacgcgcaccttgcttcctccgagaatggctttggccgactccacgaccttggcggtcatcttcccctcctcccaccagatcaccatcttgtcgacacagtcgttgaagggaaagttctcattggtccagttgacgcagccgtagaaagggcgaattc

SEQ ID NO: 150 - protein, 728 aa, Artificial Sequence
  source: /note="Description of Artificial Sequence: Synthetic polypeptide"
MAADGYLPDWLEDNLSEGIREWWDLKPGAPKPKANQQKQDDGRGLVLPGYKYLRPFNGLDKGEPVNEADAAALEHDKAYDKQLEQGDNPYLKYNHADAEFQERLQEDTSFGGNLGRAVFQAKKRVLEPLGLVEEVAKTAPGKKRPIESPDSSTGIGKKGQQPAKKKLNFGQTGDSESVPDPQPLGEPPAAPSGLGSGTMAAGGGAPMADNNEGADGVGNASGNWHCDSTWLGDRVITTSTRTWALPTYNNHLYKQISSQSGATNDNHFFSYSTPWGYFDFNRFHCHFSPRDWQRLINNNWGFRPRKLRFKLFNIQVKEVTTNDGVTTIANNLTSTIQVFSDSEYQLPYVLGSAHQGCLPPFPADVFMIPQYGYLTLNNGSQSVGRSSFYCLEYFPSQMLRTGNNFEFSYTFEEVPFHSSYVHSQSLDRLMNPLIDQYLYYLARTQSTTGSTRELQFHQAGPNTMAEQSKNWLPGPCYRQQRLSKNIDSNNNSNFAWTGATKYHLNGRNSLTNPGVAMATNKDDEDQFFPINGVLVFGKTGAANKTTLENVLMTSEEEIKTTNPVATEEYGVVSSNLQSSTAGPQTQTVNSQGALPGMVWQNRDVCLQGPIWAKIPHTDGNFHPSPLMGGFGLKHPPPQILIKNTPVPANPPEVFTPAKFASFITQYSTGQVSVEIEWELQKENSKRWNPEIQYTSNYAKSNNVEFAVNNEGVYTEPRPIGTRYLTRNL

SEQ ID NO: 151 - DNA, 3106 bp, Artificial Sequence
  source: /note="Description of Artificial Sequence: Synthetic polynucleotide"
gcggccgcgaattcgcccttcgcagagaccaaagttcaactgaaacgaatcaaccggtttattgattaacaagtaattacaggttacgggtgaggtaacgggtgccaatggggcgaggctcagtataaaccccttcgttgttgacagcaaattccacattattagacttggcataatttgaggtgtactgaatctctggattccagcgtttgctgttttctttctgcagttcccactcgatctccacgctgacctggccggtgctgtactgcgtgataaatgaggcaaacttggcaggagtaaacacctctggaggattagcaggtaccggggtgtttttgatgagaatttgaggaggcgggtgtttgagtccaaatccgcccatcaggggagacgggtgaaagttgccgtccgtgtgaggaattttggcccagatgggaccctgcaggcacacgtcccggttctgccagaccatgccgggcagagccccctggctgttgacagtctgtgtctggggtccggccgtagacgattgcaggttgctggagaccacaccgtattcttctgtagccacgggattggtggttttgatctcctcctcgctggtcattagcacgttttccagcgttgtcttgttggcagcccccgttttgccaaaaaccagcactccgttgatgggaaagaactggtcctcgtcgtccttgttggtggccatggctacgcccgggttggttaatgaatttctaccattcagatggtatttagtggccccggtccaggcaaagttactgttgttgttgctgtctatgttttttgacagtctctgctgccgataacagggtccgggcagccagttctttgattgctcggccatggtgttgggcccagcctgatggaactgcagctcccttgtggaccccgtagtgctctgggtccgggccaggtagtacaggtactggtcgatgaggggattcatcagccggtctaggctctggctgtgcacatagctgctgtggaaaggcacttcctcaaaggtgtagctgaattcaaagttattgcccgttctcagcatctgagaaggaaagtactccaggcagtagaaggaggaacgtcccacagactgactgccgttgtttagagtcagatatccgtactgaggaatcatgaacacgtccgcagggaacggagggaggcagccctggtgcgcagagccgaggacgtacggcagttggtactccgagtccgagaagacctgaatcgtgctggtaaggttattagcgatggtcgtaacgccgtcgttcgtcgtgacctccttgacctggatgttgaacaacttgaaccgcagctttctgggccggaatccccagttgttgttgatgagtcgctgccagtcacgtggtgagaagtggcagtggaatctgttgaagtcaaaatagccccagggggtgctgtagctgaagaagtggttgtcgttggtagccccgctctgacttgatatctgcttgtagaggtggttgttgtaggtgggcagggcccaggtgcgggtgctggtggtgatgactctgtcgcccagccatgtggaatcgcaatgccaatttccggaggcattacccactccgtcggcgccttcgttattgtctgccattggtgcgccaccgcctgcagccattgtaccagatcccagacctgagggcgcggcgggaggttctccgagaggttgggggtcgggcactgactctgagtcgccagtctgcccaaagttgagcttctttttagcgggctgctggcctttcttgccgatgcccgtggaggagtcgggggattctatgggtctcttctttccaggagccgtcttagcgacttcctcaaccagaccgagaggttcgagaacccgcttcttggcctggaagactgctcgcccgaggttgcccccaaaagacgtatcttcttgaagacgctcctgaaactcggcgtcggcgtggttgtacttgaggtacgggttgtccccctgctcgagctgcttgtcgtaggccttgtcgtgctcgagggccgcggcgtctgcctcgttgaccggctctcccttgtcgagtccgttgaagggtctgaggtacttgtagccaggaagcaccagaccccggccgtcgtcctgcttttgctggttggctttgggtttcggggctccaggtttcaagtcccaccactcgcgaatgccctcagagaggttgtcctcgagccaatctggaagataaccatcggcagccatacctggtttaagtcatttattgctcagaaacacagtcatccaggtccacgttgaccagatcgcaggccgagcaagcaatctcgggagcccgccccagcagatgatgaatggcacagagtttccgatacgtcctctttctgacgaccggttgagattctgacacgccggggaaacattctgaacagtctctggtcccgtgcgtgaagcaaatgttgaaattctgattcactctctcgcatgtcttgcagggaaacagcatctgaagcatgcccgcgtgacgagaacatttgttttggtacctgtcggcaaagtccaccggagctccttccgcgtctgacgtcgatggattcgcgactgaggggcaggcccgcttgggctcgcttttatccgcgtcatcgggggcgggtctcttgttggccccaccctttctgacgtagaacccatgcgccacctcggtcacgtgatcctgcgcccagcggaagaaccttttgacttcctgctttgtcaccttgccaaagttatgctccagacggcgggtgggttcaaatttgaacatccggtcctgcaacggctgctggtgctcgaaggtggcgctgttcccgtcaatcacggcgcacatgttggtgttggaggtgacggtcacgggggtggggtcgatctgggcggacgacttgcacttttggtccacgcgcaccttgctgccgccgagaatggccttggcggactccacgaccttggccgtcatcttgccctcctcccaccagatcaccatcttgtcggcgcaatcgttgaagggaaagttctcattggtccagttgacgcagccgtagaaagggcgaattc

SEQ ID NO: 152 - protein, 728 aa, Artificial Sequence
  source: /note="Description of Artificial Sequence: Synthetic polypeptide"
MAADGYLPDWLEDNLSEGIREWWDLKPGAPKPKANQQKQDDGRGLVLPGYKYLGPFNGLDKGEPVNEADAAALEHDKAYDKQLEQGDNPYLKYNHADAEFQERLQEDTSFGGNLGRAVFQAKKRVLEPLGLVEEGAKTASGKKRPIESPDSSTGIGKKGQQPAKKKLNFGQTGDSESVPDPQPLGEPPAAPSGLGSGTMAAGGGAPMADNNEGADGVGNASGNWHCDSTWLGDRVITTSTRTWALPTYNNHLYKQISSQSGATNDNHFFGYSTPWGYFDFNRFHCHFSPRDWQRLINNNWGFRPRKLRFKLFNIQVKEVTTNDGVTTIANNLTSTIQVFSDSEYQLPYVLGSAHQGCLPPFPADVFMIPQYGYLTLNNGSQSVGRSSFCCLEYFPSQMLRTGNNFEFSYTFEEVPFHSSYAHSQSLDRLMNPLIDQYLYYLARTQSTTGSTRELQFHQAGPNTVAEQSKNWLPGPCYRQQRLSKNIDSNNNSNFAWTGATKYHLNGRNSLTNPGVAMATNKDDEDQFLPINGVLVFGKTGAANKTTLENVLMTSEEEIKTTNPVATEEYGVVSSNLQSSTAGPRTQTVNSQGALPGMVWQNRDVYLQGPIWAEIPHTDGNFHPSPLMGGFGLKHPPPQILIKNTPVPANPPEVFTPAKFASFITQYSTGQVSVEIEWELQKENSKRWNPEIQYTSNYAKSNNVEFAVNNEGVYTEPRPIGTRYLTRNL

SEQ ID NO: 153 - DNA, 3102 bp, Artificial Sequence
  source: /note="Description of Artificial Sequence: Synthetic polynucleotide"
gcggccgcgaattcgcccttcgcagagaccaaagttcaactgaaacgaatcaaccggtttattgattaacaagtaattacaggttacgggtgaggtaacgggtgccaatggggcgaggctcagtataaaccccttcgttgttgacagcaaattccacattattagacttggcataatttgaggtgtactgaatctctggattccagcgtttgctgttttctttctgcagttcccactcgatctccacgctgacctggccggtgctgtactgcgtgataaatgaggcaaacttggcaggagtaaacacctctggaggattagcaggtaccggggtgtttttgatgagaatttgaggaggcgggtgtttgagtccaaatccgcccatcaggggagacgggtgaaagttgccgtccgtgtgaggaatttcggcccagatgggaccctgcaggtacacgtcccggttctgccagaccatgccgggcagagccccctggctgttgacagtctgtgtccggggtccggccgtagacgattgcaggttgctggagaccacaccgtattcttctgtagccacgggattggtggttttgatctcctcctcgctggtcattagcacgttttccagcgttgtcttgttggcagcccccgttttgccaaaaaccagcactccgttgatgggaaggaactggtcctcgtcgtccttgttggtggccatggctacgcccgggttggttaatgaatttctaccattcagatggtatttagtggccccggtccaggcaaagttactgttgttgttgctgtctatgttttttgacagtctctgctgccgataacagggtccgggcagccagttctttgattgctcggccacggtgttgggcccagcctgatggaactgcagctcccttgtggaccccgtagtgctctgggtccgggccaggtagtacaggtactggtcgatgaggggattcatcagccggtccaggctctggctgtgcgcatagctgctgtggaaaggcacttcctcaaaggtgtagctgaattcaaagttattgcccgttctcagcatctgagaaggaaagtactccaggcagcagaaggaggaacgtcccacagactgactgccgttgtttagagtcagatatccgtactgaggaatcatgaacacgtccgcagggaacggagggaggcagccctggtgcgcagagccgaggacgtacggcagttggtactccgagtccgagaagacctgaatcgtgctggtaaggttattagcgatggtcgtaacgccgtcgttcgtcgtgacctccttgacctggatgttgaacaacttgaaccgcagctttctgggccggaatccccagttgttgttgatgagtcgctgccagtcacgtggtgagaagtggcagtggaatctgttgaagtcaaaatagccccagggggtgctgtagccgaagaagtggttgtcgttggtagccccgctctgacttgatatctgcttgtagaggtggttgttgtaggtgggcagggcccaggtgcgggtgctggtggtgatgactctgtcgcccagccatgtggaatcgcaatgccaatttccggaggcattacccactccgtcggcgccttcgttattgtctgccattggtgcgccaccgcctgcagccattgtaccagatcccagacctgagggcgcggcgggaggttctccgagaggttgggggtcgggcactgactctgagtcgccagtctgcccaaagttgagcttctttttagcgggctgctggcctttcttgccgatgcccgtggaggagtcgggggattctatgggtctcttctttccggaagccgtcttagcgccttcctcaaccagaccgagaggttcgagaacccgcttcttggcctggaagactgctcgcccgaggttgcccccaaaagacgtatcttcttgaagacgctcctgaaactcggcgtcggcgtggttgtacttgaggtacgggttgtccccctgctcgagctgcttgtcgtaggccttgtcgtgctcgagggccgcggcgtctgcctcgttgaccggctctcccttgtcgagtccgttgaagggtccgaggtacttgtagccaggaagcaccagaccccggccgtcgtcctgcttttgctggttggctttgggtttcggggctccaggtttcaagtcccaccactcgcgaatgccctcagagaggttgtcctcgagccaatctggaagataaccatcggcagccatacctggtttaagtcatttattgctcagaaacacagtcatccaggtccacgttgaccagatcgcaggccgagcaagcaatctcgggagcccgccccagcagatgatgaatggcacagagtttccgatacgtcctctttctgacgaccggttgagattctgacacgccggggaaacattctgaacagtctctggtcccgtgcgtgaagcaaatgttgaaattctgattcattctctcgcatgtcttgcagggaaacagcatctgaagcatgcccgcgtgacgagaacatttgttttggtacctgtcggcaaagtccaccggagctccttccgcgtctgacgtcgatggatccgcgactgaggggcaagcccgcttgggctcgcttttatccgcgtcatcgggggcgggtctcttgttggctccaccctttctgacgtagaactcatgcgccacctcggtcacgtgatcctgcgcccagcggaagaactctttgacttcctgctttgtcaccttgccaaagtcatgctccagacggcgggtgagttcaaatttgaacatccggtcttgtaacggctgctggtgctcgaaggtggtgctgttcccgtcaatcacggcgcacatgttggtgttggaagtgacgatcacgggggtgggatcgatctgggcggacgacttgcacttttggtccacgcgcaccttgctgccgccgagaatggccttggcggactccacgaccttggccgtcatcttgccctcctcccaccagatcaccatcttgtcgacgcaatcgttgaagggaaagttctcattggtccagttgacgcagccgaagggcgaattc

SEQ ID NO: 154 - protein, 728 aa, Artificial Sequence
  source: /note="Description of Artificial Sequence: Synthetic polypeptide"
MAADGYLPDWLEDNLSEGIREWWDLKPGAPKPKANQQKQDDGRGLVLPGYRYLGPFNGLDKGEPVNEADAAALEHDKAYDKQLEQGDNPYLKYNHADAEFQERLQEDTSFGGNLGRAVFQAKKRVLEPLGLVEEGAKTAPGKKRPIESPDSSTGIGKNGQPPAKKKLNFGQTGDSESVPDPQPLGEPPAAPSGLGSGTMAAGGGAPMADNNEGADGVGNASGNWHCDSTWLGDRVITTSTRTWALPTYNNHLYKQISSQSGATNDNHFFGYSTPWGYFDFNRFHCHFSPRDWQRLINNNWGFRPRKLRFKLFNIQVKEVTTNDGVTTIANNLTSTIQVFSDSEYQLPYVLGSAHQGCLPPFPADVFMIPQYGYLTLNNGSQSVGRSSFYCLEYFPSQMLRTGNNFEFSYTFEEVPFHSSYAHSQSLDRLMNPLIDQYLYYLARTQSTTGSTRELQFHQAGPNTMAEQSKNWLPGPCYRQQRLSKNIDSNNNSNFAWTGATKYHLNGRNSLTNPGVAMATNKDDEDQFFPINGVLVFGKTGAANKTTLENVLMTSEEEIKTTNPVATEEYGVVSSNLQSSTAGPQTQTVNSQGALPGMVWQNRDVYLQGPIWAKIPHTDGNFHPSPLMGGFGLKHPPPQILIKNTPVPANPPEVFTPAKFASFITQYSTGQVSVEIEWELQKENSKRWNPEIQYTSNYAKSNNVEFAVNNEGVYTEPRPIGTRYLTRNL

SEQ ID NO: 155 - protein, 728 aa, Artificial Sequence
  source: /note="Description of Artificial Sequence: Synthetic polypeptide"
MAADGYLPDWLEGNLSEGIREWWDLKPGAPKPKANQQKQDDGRGLVLPGYRYLGPFNGLDKGEPVNEADAAALEHDKAYDKQLEQGDNPYLKYNHADAEFQERLQEDTSFGGNLGRAVFQAKKRVLEPLGLVEEGAKTAPGKKRPIESPDSSTGIGKNGQPPAKKKLNFGQTGDSESVPDPQPLGEPPAAPSGLGSGTMAAGGGAPMADNNEGADGVGNASGNWHCDSTWLGDRVITTSTRTWALPTYNNHLYKQISSQSGATNDNHFFGYSTPWGYFDFNRFHCHFSPRDWQRLINNNWGFRPRKLRFKLFNIQVKEVTTNDGVTTIANNLTSTIQVFSDSEYQLPYVLGSAHQGCLPPFPADVFMIPQYGYLTLNNGSQSVGRSSFYCLEYFPSQMLRTGDNFEFSYTFEEVPFHSSYAHSQSLDRLMNPLIDQYLYYLARTQSTTGSTRELQFHQAGPNTMAEQSKNWLPGPCYRQQRLSKNIDSNNNSNFAWTGATKYHLNGRNSLTNPGVAMATNKDDEDQFFPINGVLVFGKTGAANKTTLENVLMTSEEEIKTTNPVATEEYGVVSSNLQSSTAGPQTQTVNSQGALPGMVWQNRDVYLQGPIWAKIPHTDGNFHPSPLMGGFGLKHPPPQILIKNTPVPANPPEVFTPAKFASFITQYSTGQVSVEIEWELQKENSKRWNPEIQYTSNYAKSNNVEFAVNNEGVYTEPRPIGTRYLTRNL

SEQ ID NO: 156 - DNA, 3106 bp, Artificial Sequence
  source: /note="Description of Artificial Sequence: Synthetic polynucleotide"
gcggccgcgaattcgcccttcgcagagaccaaagttcaactgaaacgaatcagccggtttattgattaacaagtaattacaggttacgggtgaggtaacgggtgccaatggggcgaggctcagtataaaccccttcgttgttgacagcaaattccacattattagacttggcataatttgaggtgtactgaatctctggattccagcgtttgctgttttctttctgcagttcccactcgatctccacgctgacctggccggtgctgtactgcgtgataaatgaggcaaacttggcaggagtaaacacctctggaggattagcaggtaccggggtgtttttgatgagaatttgaggaggcgggtgtttgagtccaaatccgcccatcaggggagacgggtgaaagttgccgtccgtgtgaggaattttggcccagatgggaccctgcaggtacacgtcccggttctgccagaccatgccgggcagagccccctggctgttgacagtctgtgtctggggtccggccgtagacgattgcaggttgctggagaccacaccgtattcttctgtagccacgggattggtggttttgatctcctcctcgctggtcattagcacgttttccagcgttgtcttgttggcagcccccgttttgccaaaaaccagcactccgttgatgggaaagaactggtcctcgtcgtccttgttggtggccatggctacgcccgggttggttaatgaatttctaccattcagatggtatttagtggccccggtccaggcaaagttactgttgttgttgctgtctatgttttttgacagtctctgctgccgataacagggtccgggcagccagttctttgattgctcggccatggtgttgggcccagcctgatggaactgcagctcccttgtggaccccgtagtgctctgggtccgggccaggtagtacaggtactggtcgatgaggggattcatcagccggtccaggctctggctgtgcgcatagctgctgtggaaaggcacttcctcaaaggtgtagctgaattcaaagttatcgcccgttctcagcatctgagaaggaaagtactccaggcagtagaaggaggaacgtcccacagactgactgccgttgtttagagtcagatatccgtactgaggaatcatgaacacgtccgcagggaacggagggaggcagccctggtgcgcagagccgaggacgtacggcagttggtactccgagtccgagaagacctgaatcgtgctggtaaggttattagcgatggtcgtaacgccgtcgttcgtcgtgacctccttgacctggatgttgaacaacttgaaccgcagctttctgggccggaatccccagttgttgttgatgagtcgctgccagtcacgtggtgagaagtggcagtggaatctgttgaagtcaaaatagccccagggggtgctgtagccgaagaagtggttgtcgttggtagccccgctctgacttgatatctgcttgtagaggtggttgttgtaggtgggcagggcccaggtgcgggtgctggtggtgatgactctgtcgcccagccatgtggaatcgcaatgccaatttccggaggcattacccactccgtcggcgccttcgttattgtctgccattggtgcgccaccgcctgcagccattgtaccagatcccagacctgagggcgcggcgggaggttctccgagaggttgggggtcgggcactgactctgagtcgccagtctgcccaaagttgagcttctttttagcgggcggctggccgttcttgccgatgcccgtggaggagtcgggggattctatgggtctcttctttccaggagccgtcttagcgccttcctcaaccagaccgagaggttcgagaacccgcttcttggcctggaagactgctcgcccgaggttgcccccaaaagacgtatcttcttgaagacgctcctgaaactcggcgtcggcgtggttgtacttgaggtacgggttgtccccctgctcgagctgcttgtcgtaggccttgtcgtgctcgagggccgcggcgtctgcctcgttgaccggctctcccttgtcgagtccgttgaagggtccgaggtacctgtagccaggaagcaccagaccccggccgtcgtcctgcttttgctggttggctttgggtttcggggctccaggtttcaagtcccaccactcgcgaatgccctcagagaggttgccctcgagccaatctggaagataaccatcggcagccatacctggtttaagtcatttattgctcagaaacacagtcatccaggtccacgttggccagatcgcaggccgagcaagcaatctcgggagcccgccccagcagatgatgaatggcacagagtttccgatacgtcctctttctgacgaccggttgagattctgacacgccggggaaacattctgaacagtctctggtcccgtgcgtgaagcaaatgttgaaattctgattcattctctcgcatgtcttgcaggggaacagcatctgaagcatgcccgcgtgacgagaacatttgttttggtacctgtcggcaaagtccaccggagctccttccgcgtctgacgtcgatggatccgcgactgaggggcaggcccgcttgggctcgcttttatccgcgtcatcgggggcgggtctcttgttggctccaccctttctgacgtagaactcatacgccacctcggtcacgtgatcctgcgcccagcggaagaactctttgacttcctgctttgtcaccttgccaaagtcatgctccagacggcgggtgagttcaaatttgaacatccggtcttgtaacggctgctggtgctcgaaggtggtgctgttcccgtcaatcacggcgcacatgttggtgttggaagtgacgatcacgggggtgggatcgatctgggcggacgacttgcacttttggtccacgcgcaccttgctgccgccgagaatggccttggcggactccacgaccttggccgtcatcctgccctcctcccaccagatcaccatcttgtcgacgcaatcgttgaagggaaagttctcattggtccagttgacgcagccgtagaaagggcgaattc

SEQ ID NO: 157 - protein, 728 aa, Artificial Sequence
  source: /note="Description of Artificial Sequence: Synthetic polypeptide"
MAADGYLPDWLEDNLSEGIREWWDLKPGAPKPKANQQKQDDGRGLVLPGYKYLGPFNGLDKGEPVNEADAAALEHDKAYDKQLEQGDNPYLKYNHADAEFQERLQEDTSFGGNLGRAVFQAKKRVLEPLGLVEEGAKTAPGKKRPIESPDSSTGIGKKGQQPAKKKLNFGQTGDSESVPDPQPLGEPPAAPSGLGSGTMAAGGGAPMADNNEGADGVGNASGNWHCDSTWLGDRVITTSTRTWALPTYNNHLYKQISSQSGATNDNHFFGYSTPWGYFDFNRFHCHFSPRDWQRLINNNWGFRPRKLRFKLFNIQVKEVTTNDGVTTIANNLTSTIQVFSDSEYQLPYVLGSAHQGCLPPFPADVFMIPQYGYLTLNNGSQSMGRSSFYCLEYFPSQMLRTGNNFEFSYTFEEVPFHSSYAHSQSLDRLMNPLIDQYLYYLARTQSTTGSTRELQFHQAGPNTMAEQSKNWLPGPCYRQQRLSKNIDSNNNSNFAWTGATKYHLNGRNSLTNPGVAMATNKDDEGQFFPINGVLVFGKTGAANKTTLENVLMTSEEEIKTTNPVATEEYGVVSSNLQSSTAGPQTQTVNSQGALPGMVWQNRDVYLQGPIWAKIPHTDGNFHPSPLMGGFGLKHPPPQILIKNTPVPANPPGVFTPALFASFITQYSTGQVSVEIEWELQKENSKRWNPEIQYTSNYAKSNNVEFAVNNEGVYTEPRPIGTRYLTRNL

SEQ ID NO: 158 - DNA, 3098 bp, Artificial Sequence
  source: /note="Description of Artificial Sequence: Synthetic polynucleotide"
gaattcgcccttcgcagagaccaaagttcaactgaaacgaatcaaccggtttattgattaacaagtaattacaggttacgggtgaggtaacgggtgccaatggggcgaggctcagtataaaccccttcgttgttgacagcaaattccacattattagacttggcataatttgaggtgtactgaatctctggattccagcgtttgctgttttctttctgcagttcccactcgatctccacgctgacctggccggtgctgtactgcgtgataaatgaggcaaactaggcaggagtaaacacccctggaggattagcaggtaccggggtgtttttgatgagaatttgaggaggcgggtgtttgagtccaaatccgcccatcaggggagacgggtgaaagttgccgtccgtgtgaggaattttggcccagatgggaccctgcaggtacacgtcccggttctgccagaccatgccgggcagagccccctggctgttgacagtctgtgtctggggtccggccgtagacgattgcaggttgctggagaccacaccgtattcttctgtagccacgggattggtggttttgatctcctcctcgctggtcattagcacgttttccagcgttgtcttgttggcagcccccgttttgccaaaaaccagcactccgttgatgggaaagaactggccctcgtcgtccttgttggtggccatggctacgcccgggttggttaatgaatttctaccattcagatggtatttagtggccccggtccaggcaaagttactgttgttgttgctgtctatgttttttgacagtctctgctgccgataacagggtccgggcagccagttctttgattgctcggccatggtgttgggcccagcctgatggaactgcagctcccttgtggaccccgtagtgctctgggtccgggccaggtagtacaggtactggtcgatgaggggattcatcagccggtccaggctctggctgtgcgcatagctgctgtggaaaggcacttcctcaaaggtgtagctgaattcaaagttattgcccgttctcagcatctgagaaggaaagtactccaggcagtagaaggaggaacgtcccatagactgactgccgttgtttagagtcagatatccgtactgaggaatcatgaacacgtccgcagggaacggagggaggcagccctggtgcgcagagccgaggacgtacggcagttggtactccgagtccgagaagacctgaatcgtgctggtaaggttattagcgatggtcgtaacgccgtcgttcgtcgtgacctccttgacctggatgttgaacaacttgaaccgcagctttctgggccggaatccccagttgttgttgatgagtcgctgccagtcacgtggtgagaagtggcagtggaatctgttgaagtcaaaatagccccagggggtgctgtagccgaagaagtggttgtcgttggtagccccgctctgacttgatatctgcttgtagaggtggttgttgtaggtgggcagggcccaggtgcgggtgctggtggtgatgactctgtcgcccagccatgtggaatcgcaatgccaatttccggaggcattacccactccgtcggcgccttcgttattgtctgccattggtgcgccaccgcctgcagccattgtaccagatcccagacctgagggcgcggcgggaggttctccgagaggttgggggtcgggcactgactctgagtcgccagtctgcccaaagttgagcttctttttagcgggctgctggcctttcttgccgatgcccgtggaggagtcgggggattctatgggtctcttctttccaggagccgtcttagcgccttcctcaaccagaccgagaggttcgagaacccgcttcttggcctggaagactgctcgcccgaggttgcccccaaaagacgtatcttcttgaagacgctcctgaaactcagcgtcggcgtggttgtacttgaggtacgggttgtccccctgctcgagctgcttgtcgtaggccttgtcgtgctcgagggccgcggcgtctgcctcgttgaccggctctcccttgtcgagtccgttgaagggtccgaggtacttgtagccaggaagcaccagaccccggccgtcgtcctgcttttgctggttggctttgggtttcggggctccaggtttcaagtcccaccactcgcgaatgccctcagagaggttgtcctcgagccaatctggaagataaccatcggcagccatacctggtttaagtcatttattgctcagaaacacagtcatccaggtccacgttgaccagatcgcaggccgagcaagcaatctcgggagcccgccccagcagatgatgaatggcacagagtttccgatacgtcctctttctgacgaccggttgagattctgacacgccggggaaacattctgaacagtctctggtcccgtgcgtgaagcaaatgttgaaattctgattcattctctcgcatgtcttgcagggaaacagcatctgaagcatgcccgcgtgacgagaacatttgttttggtacctgtcggcaaagtccaccggagctccttccgcgtctgacgtcgatggatccgcgactgaggggcaggcccgcttgggctcgcttttatccgcgtcatcgggggcgggcctcttgttggctccaccctttctgacgtagaactcatgcgccacctcggtcacgtgatcctgcgcccagcggaagaactctttgacttcctgctttgtcaccttgccaaagtcctgctccagacggcgggtgagttcaaatttgaacatccggtcttgtaacggctgctggtgctcgaaggtggtgctgttcccgtcaatcacggcgcacatgttggtgttggaagtgacgatcacgggggtgggatcgatctgggcggacgacttgcacttttggtccacgcgcaccttgctgccgccgagaatggccttggcggactccacgaccttggccgtcatcttgccctcctcccaccagatcaccatcttgtcgacgcaatcgttgaagggaaagttctcattggtccagttgacgcagccgtagaaagggcgaattc

SEQ ID NO: 159 - DNA, 2187 bp, Artificial Sequence
  source: /note="Description of Artificial Sequence: Synthetic polynucleotide"
atggctgccgatggttatcttccagattggctcgagggcaacctctctgagggcattcgcgagtggtgggacttgaaacctggagccccgaaacccaaagccaaccagcaaaagcaggacgacggccggggtctggtgcttcctggctacaggtacctcggacccttcaacggactcgacaagggagagccggtcaacgaggcagacgccgcggccctcgagcacgacaaggcctacgacaagcagctcgagcagggggacaacccgtacctcaagtacaaccacgccgacgccgagtttcaggagcgtcttcaagaagatacgtcttttgggggcaacctcgggcgagcagtcttccaggccaagaagcgggttctcgaacctctcggtctggttgaggaaggcgctaagacggctcctggaaagaagagacccatagaatcccccgactcctccacgggcatcggcaagaacggccagccgcccgctaaaaagaagctcaactttgggcagactggcgactcagagtcagtgcccgacccccaacctctcggagaacctcccgccgcgccctcaggtctgggatctggtacaatggctgcaggcggtggcgcaccaatggcagacaataacgaaggcgccgacggagtgggtaatgcctccggaaattggcattgcgattccacatggctgggcgacagagtcatcaccaccagcacccgcacctgggccctgcccacctacaacaaccacctctacaagcagatatcaagtcagagcggggctaccaacgacaaccacttcttcggctacagcaccccctggggctattttgacttcaacagattccactgccacttctcaccacgtgactggcagcgactcatcaacaacaactggggattccggcccagaaagctgcggttcaagttgttcaacatccaggtcaaggaggtcacgacgaacgacggcgttacgaccatcgctaataaccttaccagcacgattcaggtcttctcggactcggagtaccaactgccgtacgtcctcggctctgcgcaccagggctgcctccctccgttccctgcggacgtgttcatgattcctcagtacggatatctgactctaaacaacggcagtcagtctgtgggacgttcctccttctactgcctggagtactttccttctcagatgctgagaacgggcgataactttgaattcagctacacctttgaggaagtgcctttccacagcagctatgcgcacagccagagcctggaccggctgatgaatcccctcatcgaccagtacctgtactacctggcccggacccagagcactacggggtccacaagggagctgcagttccatcaggctgggcccaacaccatggccgagcaatcaaagaactggctgcccggaccctgttatcggcagcagagactgtcaaaaaacatagacagcaacaacaacagtaactttgcctggaccggggccactaaataccatctgaatggtagaaattcattaaccaacccgggcgtagccatggccaccaacaaggacgacgaggaccagttctttcccatcaacggagtgctggtttttggcaaaacgggggctgccaacaagacaacgctggaaaacgtgctaatgaccagcgaggaggagatcaaaaccaccaatcccgtggctacagaagaatacggtgtggtctccagcaacctgcaatcgtctacggccggaccccagacacagactgtcaacagccagggggctctgcccggcatggtctggcagaaccgggacgtgtacctgcagggtcccatctgggccaaaattcctcacacggacggcaactttcacccgtctcccctgatgggcggatttggactcaaacacccgcctcctcaaattctcatcaaaaacaccccggtacctgctaatcctccagaggtgtttactcctgccaagtttgcctcatttatcacgcagtacagcaccggccaggtcagcgtggagatcgagtgggaactgcagaaagaaaacagcaaacgctggaatccagagattcagtacacctcaaattatgccaagtctaataatgtggaatttgctgtcaacaacgaaggggtttatactgagcctcgccccattggcacccgttacctcacccgtaacctgtaa

SEQ ID NO: 160 - protein, 728 aa, Artificial Sequence; identical to SEQ ID NO: 155
  source: /note="Description of Artificial Sequence: Synthetic polypeptide"

SEQ ID NO: 161 - protein, 728 aa, Artificial Sequence
  source: /note="Description of Artificial Sequence: Synthetic polypeptide"
MAADGYLPDWLEDNLSEGIREWWDLKPGAPKPKANQQKQDDGRGLVLPGYRYLGPFNGLDKGEPVNEADAAALEHDKAYDKQLEQGDNPYLKYNHADAEFQERLQEDTSFGGNLGRAVFQAKKRVLEPLGLVEEGAKTAPGKKRPIESPDSSTGIGKNGQPPAKKKLNFGQTGDSESVPDPQPLGEPPAAPSGLGSGTMAAGGGAPMADNNEGADGVGNASGNWHCDSTWLGDRVITTSTRTWALPTYNNHLYKQISSQSGATNDNHFFGYSTPWGYFDFNRFHCHFSPRDWQRLINNNWGFRPRKLRFKLFNIQVKEVTTNDGVTTIANNLTSTIQVFSDSEYQLPYVLGSAHQGCLPPFPADVFMIPQYGYLTLNNGSQSVGRSSFYCLEYFPSQMLRTGDNFEFSYTFEEVPFHSSYAHSQSLDRLMNPLIDQYLYYLARTQSTTGSTRELQFHQAGPNTMAEQSKNWLPGPCYRQQRLSKNIDSNNNSNFAWTGATKYHLNGRNSLTNPGVAMATNKDDEDQFFPINGVLVFGKTGAANKTTLENVLMTSEEEIKTTNPVATEEYGVVSSNLQSSTAGPQTQTVNSQGALPGMVWQNRDVYLQGPIWAKIPHTDGNFHPSPLMGGFGLKHPPPQILIKNTPVPANPPEVFTPAKFASFITQYSTGQVSVEIEWELQKENSKRWNPEIQYTSNYAKSNNVEFAVNNEGVYTEPRPIGTRYLTRNL

SEQ ID NO: 162 - protein, 728 aa, Artificial Sequence; identical to SEQ ID NO: 154
  source: /note="Description of Artificial Sequence: Synthetic polypeptide"

SEQ ID NO: 163 - protein, 728 aa, Artificial Sequence
  source: /note="Description of Artificial Sequence: Synthetic polypeptide"
MAADGYLPDWLEDNLSEGIREWWDLKPGAPKPKANQQKQDDGRGLVLPGYKYLGPFNGLDKGEPVNEADAAALEHDKAYDKQLEQGDNPYLKYNHADAEFQERLQEDTSFGGNLGRAVFQAKKRVLEPLGLVEEGAKTAPGKKRPIESPDSSTGIGKNGQPPAKKKLNFGQTGDSESVPDPQPLGEPPAAPSGLGSGTMAAGGGAPMADNNEGADGVGNASGNWHCDSTWLGDRVITTSTRTWALPTYNNHLYKQISSQSGATNDNHFFGYSTPWGYFDFNRFHCHFSPRDWQRLINNNWGFRPRKLRFKLFNIQVKEVTTNDGVTTIANNLTSTIQVFSDSEYQLPYVLGSAHQGCLPPFPADVFMIPQYGYLTLNNGSQSVGRSSFYCLEYFPSQMLRTGNNFEFSYTFEEVPFHSSYAHSQSLDRLMNPLIDQYLYYLARTQSTTGSTRELQFHQAGPNTMAEQSKNWLPGPCYRQQRLSKNIDSNNNSNFAWTGATKYHLNGRNSLTNPGVAMATNKDDEDQFFPINGVLVFGKTGAANKTTLENVLMTSEEEIKTTNPVATEEYGVVSSNLQSSTAGPQTQTVNSQGALPGMVWQNRDVYLQGPIWAKIPHTDGNFHPSPLMGGFGLKHPPPQILIKNTPVPANPPEVFTPAKFASFITQYSTGQVSVEIEWELQKENSKRWNPEIQYTSNYAKSNNVEFAVNNEGVYTEPRPIGTRYLTRNL

SEQ ID NO: 164 - protein, 728 aa, Artificial Sequence
  source: /note="Description of Artificial Sequence: Synthetic polypeptide"
MAADGYLPDWLEDNLSEGIREWWDLKPGAPKPKANQQKQDDGRGLVLPGYKYLGPFNGLDKGEPVNEADAAALEHDKAYDKQLEQGDNPYLKYNHADAEFQERLQEDTSFGGNLGRAVFQAKKRVLEPLGLVEEGAKTAPGKKRPIESPDSSTGIGKKGQQPAKKKLNFGQTGDSESVPDPQPLGEPPAAPSGLGSGTMAAGGGAPMADNNEGADGVGNASGNWHCDSTWLGDRVITTSTRTWALPTYNNHLYKQISSQSGATNDNHFFGYSTPWGYFDFNRFHCHFSPRDWQRLINNNWGFRPRKLRFKLFNIQVKEVTTNDGVTTIANNLTSTIQVFSDSEYQLPYVLGSAHQGCLPPFPADVFMIPQYGYLTLNNGSQSVGRSSFYCLEYFPSQMLRTGNNFEFSYTFEEVPFHSSYAHSQSLDRLMNPLIDQYLYYLARTQSTTGSTRELQFHQAGPNTMAEQSKNWLPGPCYRQQRLSKNIDSNNNSNFAWTGATKYHLNGRNSLTNPGVAMATNKDDEDQFFPINGVLVFGKTGAANKTTLENVLMTSEEEIKTTNPVATEEYGVVSSNLQSSTAGPQTQTVNSQGALPGMVWQNRDVYLQGPIWAKIPHTDGNFHPSPLMGGFGLKHPPPQILIKNTPVPANPPEVFTPAKFASFITQYSTGQVSVEIEWELQKENSKRWNPEIQYTSNYAKSNNVEFAVNNEGVYTEPRPIGTRYLTRNL

SEQ ID NO: 165 - DNA, 2215 bp, Artificial Sequence
  source: /note="Description of Artificial Sequence: Synthetic polynucleotide"
atggctgccgatggttatcttccagattggctcgaggacactctctctgaaggaataagacagtggtggaagctcaaacctggcccaccaccaccaaagcccgcagagcggcataaggacgacagcaggggtcttgtgcttcctgggtacaagtacctcggacccttcaacggactcgacaagggagagccggtcaacgaggcagacgccgcggccctcgagcacgacaaagcctacgaccggcagctcgacagcggagacaacccgtacctcaagtacaaccacgccgacgccgagttccaggagcggctcaaagaagatacgtcttttgggggcaacctcgggcgagcagtcttccaggccaaaaagaggcttcttgaacctcttggtctggttgaggaagcggctaagacggctcctggaaagaagaggcctgtagagcactctcctgtggagccagactcctcctcgggaaccggaaaggcgggccagcagcctgcaagaaaaagattgaattttggtcagactggagacgcagactcagtcccagaccctcaaccaatcggagaacctcccgcagccccctcaggtgtgggatctcttacaatggctgcaggcggtggcgcaccaatggcagacaataacgagggcgccgacggagtgggtaattcctcgggaaattggcattgcgattccacatggatgggcgacagagtcatcaccaccagcacccgaacctgggccctgcccacctacaacaaccacctctacaagcaaatctccaacagcacatctggaggatcttcaaatgacaacgcctacttcggctacagcaccccctgggggtattttgactttaacagattccactgccacttttcaccacgtgactggcagcgactcatcaacaacaactggggattccggcccaagagactcagcttcaagctcttcaacatccaggtcaaggaggtcacgcagaatgaaggcaccaagaccatcgccaataacctcaccagcaccatccaggtgtttacggactcggagtaccagctgccgtacgttctcggctctgcccaccagggctgcctgcctccgttcccggcggacgtgttcatgattccccagtacggctacctaacactcaacaacggtagtcaggccgtgggacgctcctccttctactgcctggaatactttccttcgcagatgctgagaaccggcaacaacttccagtttacttacaccttcgaggacgtgcctttccacagcagctacgcccacagccagagcttggaccggctgatgaatcctctgattgaccagtacctgtactacttgtctcggactcaaacaacaggaggcacgacaaatacgcagactctgggcttcagccaaggtgggcctaatacaatggccaatcaggcaaagaactggctgccaggaccctgttaccgccagcagcgagtatcaaagacatctgcggataacaacaacagtgaatactcgtggactggagctaccaagtaccacctcaatggcagagactctctggtgaatccgggcccggccatggcaagccacaaggacgatgaagaaaagtttttttcctcagagcggggttctcatctttgggaagcaaggctcagagaaaacaaatgtggacattgaaaaggtcatgattacagacgaagaggaaatcaggacaaccaatcccgtggctacggagcagtatggttctgtatctaccaacctccagagaggcaacagacaagcagctaccgcagatgtcaacacacaaggcgttcttccaggcatggtctggcaggacagagatgtgtaccttcaggggcccatctgggcaaagattccacacacggacggacattttcacccctctcccctcatgggtggattcggacttaaacaccctccgcctcagatcctgatcaagaacacgcctgtacctgcggatcctccgaccaccttcaaccagtcaaagctgaactctttcatcacccagtattctactggccaagtcagcgtggagatcgagtgggagctgcagaaggaaaacagcaagcgctggaaccccgagatccagtacacctccaactactacaaatctacaagtgtggactttgctgttaatacagaaggcgtgtactctgaaccccgccccattggcacccgttacctcacccgtaatctgtaa

SEQ ID NO: 166 - protein, 737 aa, Artificial Sequence
  source: /note="Description of Artificial Sequence: Synthetic polypeptide"
MAADGYLPDWLEDTLSEGIRQWWKLKPGPPPPKPAERHKDDSRGLVLPGYKYLGPFNGLDKGEPVNEADAAALEHDKAYDRQLDSGDNPYLKYNHADAEFQERLKEDTSFGGNLGRAVFQAKKRLLEPLGLVEEAAKTAPGKKRPVEHSPVEPDSSSGTGKAGQQPARKRLNFGQTGDADSVPDPQPIGEPPAAPSGVGSLTMAAGGGAPMADNNEGADGVGNSSGNWHCDSTWMGDRVITTSTRTWALPTYNNHLYKQISNSTSGGSSNDNAYFGYSTPWGYFDFNRFHCHFSPRDWQRLINNNWGFRPKRLSFKLFNIQVKEVTQNEGTKTIANNLTSTIQVFTDSEYQLPYVLGSAHQGCLPPFPADVFMIPQYGYLTLNNGSQAVGRSSFYCLEYFPSQMLKTGNNFQFTYTFEDVPFHSSYAHSQSLDRLMNPLIDQYLYYLSRTQTTGGTTNTQTLGFSQGGPNTMANQAKNWLPGPCYRQQRVSKTSADNNNSEYSWTGATKYHLNGRDSLVNPGPAMASHKDDEEKFFPQSGVLIFGKQGSEKTNVDIEKVMITDEEEIRTTNPVATEQYGSVSTNLQRGNRQAATADVNTQGVLPGMVWQDRDVYLQGPIWAKIPHTDGHFHPSPLMGGFGLKHPPPQILIKNTPVPADPPTTFNQSKLNSFITQYSTGQVSVEIEWELQKENSKRWNPEIQYTSNYYKSTSVDFAVNTEGVYSEPRPIGTRYLTRNL

SEQ ID NO: 167 - protein, 737 aa, Artificial Sequence
  source: /note="Description of Artificial Sequence: Synthetic polypeptide"
MAADGYLPDWLEDTLSEGIRQWWKLKPGPPPPKPAERHKDDSRGLVLPGYKYLGPFNGLDKGEPVNEADAAALEHDKAYDRQLDSGDNPYLKYNHADAEFQERLKEDTSFGGNLGRAVFQAKKRLLEPLGLVEEAAKTAPGKKRPVEHSPVEPDSSSGTGKAGQQPARKRLNFGQTGDADSVPDPQPIGEPPAAPSGVGSLTMAAGGGAPMADNNEGADGVGNSSGNWHCDSTWMGDRVITTSTRTWALPTYNNHLYKQISNSTSGGSSNDNAYFGYSTPWGYFDFNRFHCHFSPRDWQRLINNNWGFRPKRLSFKLFNIQVKEVTQNEGTKTIANNLTSTIQVFTDSEYQLPYVLGSAHQGCLPPFPADVFMIPQYGYLTLNNGSQAVGRSSFYCLEYFPSQMLKTGNNFQFTYTFEDVPFHSSYAHSQSLDRLMNPLIDQYLYYLSRTQTTGGTTNTQTLGFSQGGPNTMANQAKNWLPGPCYRQQRVSKTSADNNNSEYSWTGATKYHLNGRDSLVNPGPAMASHKDDEEKFFPQSGVLIFGKQGSEKTNVDIEKVMITDEEEIRTTNPVATEQYGSVSTNLQQGNTQAATADVNTQGVLPGMVWQDRDVYLQGPIWAKIPHTDGHFHPSPLMGGFGLKHPPPQILIKNTPVPADPPTTFNQSKLNSFITQYSTGQVSVEIEWELQKENSKRWNPEIQYTSNYYKSTSVDFAVNTEGVYSEPRPIGTRYLTRNL

SEQ ID NO: 168 - protein, 737 aa, Artificial Sequence
  source: /note="Description of Artificial Sequence: Synthetic polypeptide"
MAADGYLPDWLEDTLSEGIRQWWKLKPGPPPPKPAERHKDDSRGLVLPGYKYLGPFNGLDKGEPVNEADAAALEHDKAYDRQLDSGDNPYLKYNHADAEFQERLKEDTSFGGNLGRAVFQAKKRLLEPLGLVEEAAKTAPGKKRPVEHSPVEPDSSSGTGKAGQQPARKRLNFGQTGDADSVPDPQPIGEPPAAPSGVGSLTMAAGGGAPMADNNEGADGVGNSSGNWHCDSTWMGDRVITTSTRTWALPTYNNHLYKQISNSTSGGSSNDNAYFGYSTPWGYFDFNRFHCHFSPRDWQRLINNNWGFRPKRLSFKLFNIQVKEVTQNEGTKTIANNLTSTIQVFTDSEYQLPYVLGSAHQGCLPPFPADVFMIPQYGYLTLNNGSQAVGRSSFYCLEYFPSQMLRTGNNFQFTYTFEDVPFHSSYAHSQSLDRLMNPLIDQYLYYLSRTQTTGGTTNTQTLGFSQGGPNTMANQAKNWLPGPCYRQQRVSKTSADNNNSEYSWTGATKYHLNGRDSLVNPGPAMASHKDDEEKFFPQSGVLIFGKQGSEKTNVDIEKVMITDEEEIRTTNPVATEQYGSVSTNLQQGNTQAATADVNTQGVLPGMVWQDRDVYLQGPIWAKIPHTDGHFHPSPLMGGFGLKHPPPQILIKNTPVPADPPTTFNQSKLNSFITQYSTGQVSVEIEWELQKENSKRWNPEIQYTSNYYKSTSVDFAVNTEGVYSEPRPIGTRYLTRNL

SEQ ID NO: 169 - protein, 729 aa, Artificial Sequence
  source: /note="Description of Artificial Sequence: Synthetic polypeptide"
MAADGYLPDWLEDNLSEGIREWWDLKPGAPKPKANQQKQDDGRGLVLPGYKYLGPFNGLDKGEPVNAADAAALEHDKAYDQQLKAGDNPYLRYNHADAEFQERLQEDTSFGGNLGRAVFQAKKRVLEPLGLVEEGAKTAPGKKRPIDSPDSSTGIGKKGQQPAKKKLNFGQTGDSESVPDPQPLGEPPAAPSSVGSGTMAAGGGAPTADNNEGADGVGNASGNWHCDSTWLGDRVITTSTRTWALPTYNNHLYKQISSSSSGATNDNHYFGYSTPWGYFDFNRFHCHFSPRDWQRLINNNWGFRPKKLRFKLFNIQVKEVTTNDGVTTIANNLTSTVQVFSDSEYQLPYVLGSAHQGCLPPFPADVFMIPQYGYLTLNNGSQSVGRSSFYCLEYFPSQMLRTGNNFEFSYSFEDVPFHSSYAHSQSLDRLMNPLIDQYLYYLARTQSTTGSTRELQFHQAGPNTMAEQSKNWLPGPCYRQQRLSKNLDFNNNSNFAWTAATKYHLNGRNSLTNPGIPMATNKDDEDQFFPINGVLVFGKTGAANKTTLENVLMTSEEEIKTTNPVATEEYGVVSSNLQSSTAGPQSQTINSQGALPGMVWQNRDVYLQGPIWAKIPHTDGNFHPSPLMGGFGLEHPPPQILIKNTPVPANPPEVFTPAKFASFITQYSTGQVSVEIEWELQKENSKRWNPEIQYTSNYAKSNNVEFAVNPDGVYTEPRPIGTRYLTRNL

SEQ ID NO: 170 - DNA, 3075 bp, Artificial Sequence
  source: /note="Description of Artificial Sequence: Synthetic polynucleotide"
tgagaactttcctttcaacgattgcgtcggacaagatggtgatctggtgggaggaggggaagatgaccgccaaggtcgtggagtcggccaaagccattcttggaggaagcaaggtgcgtgtggaccagaaatgcaagtcctcggcccagatagacccgactcccgtgatcgtcacctccaacaccaacatgtgcgccgtgattgacgggaactcaacgaccttcgagcaccagcagccgttgcaagaccggatgttcaaatttgaacttacccgccgtctggatcatgactttggaaaggtcaccaagcaggaagtgaaagactttttccggtgggcaaaggatcacgtggttgaggtggagcatgaattctacgtcaaaaagggtggagctaagaaaagacccgcccccagtgacgcagatataagtgagcccaaacgggcgcgcgagtcagttgcgcagccatcaacgtcagacgcggaagcttcgatcaactacgcggacaggtaccaaaaacaaatgttctcgtcacgtgggcatgaatctgatgctgtttccctgcagacaatgcgagagaatgaatcagaattcaaatatctgcttcactcacggacagaaagactgtttagagtgctttcccgtgtcagaatctcaacccgtttctgtcgtcaaaaaggcgtatcagaaactgtgctacattcatcatatcatgggaaaggtgccagacgcttgcactgcctgcgatctggtcaatgtggatttggatgactgcatctctgaacaataaatgatttaaatcaggtatggctgccgatggttatcctccagattggctcgaggacactctctctgaagggataagacagtggtggaagctcaaacctggcccaccaccaccaaagcccgcagagcggcataaggacgacagcaggggtcttgtgcttcctgggtacaagtacctcggacccttcaacggactcgacaagggggagccggtcaacgaggcagacgccgcggccctcgagcacgacaaggcctacgaccggcagctcgacagcggagacaacccgtacctcaagtacaaccacgccgacgcagagtttcaggagcgccttaaagaagatacgtcttttgggggcaacctcggacgagcagtcttccaggcgaaaaagagggttcttgaacctctgggcctggttgaggaacctgttaagacggctccgggaaaaaagaggccggtagagcactctcctgtggagccagactcctcctcgggaaccggaaaagcgggccagcggcctgcaagaaaaagattaaattttggtcagactggagacgcagactccgtacctgacccccagcctctcggacagccaccagcagccccctctggtctgggatctactacaatggctacaggcagtggcgcaccaatggcagacaataacgagggtgccgatggagtgggtaattcctcaggaaattggcattgcgattcccaatggctgggcgacagagtcatcaccaccagcacccgaacctgggccctgcccacatacaacaaccacctctacaagcaaatctccagccaatcaggagccagcaacgacaaccactactttggctacagcaccccctgggggtattttgacttcaacagattccactgccacttttcaccacgtgactggcaaagactcatcaacaacaactggggattccggcccaaaagactcaacttcaagctctttaatattcaagtcaaagaggtcacgcagaatgacggtacgacgacgattgccaataaccttaccagcacggttcaggtgtttactgactcggagtaccagctcccgtacgtcctgggctcggcgcatcaaggatgcctcccgccgtttccagcggacgtcttcatggtcccacagtatggatacctcaccctgaacaacgggagtcaggcggtaggacgctcttccttttactgcctggagtactttccttctcagatgctgcgtactggaaacaactttcagttcagctacacttttgaagacgtgcctttccacagcagctacgctcacagccagagtctggatcggctgatgaatcctctgatcgaccagtacctgtattatctgaacaagacacaaacaaatagtggaactcttcagcagtctcggctactgtttagccaagctggaccaaccaacatgtctcttcaagctaaaaactggctgcctggaccttgctacagacagcagcgtctgtcaaaacaggcaaacgacaacaacaacagcaactttccctggactgcagctacaaagtatcatctaaatggccgggactcgttggttaatccaggaccagctatggccagtcacaaggatgacgaagaaaagtttttccccatgcatggaaccctgatatttggtaaacaaggaacaaatgccaacgacgcggatttggaaaatgtcatgattacagatgaagaagaaatcagggccaccaatcccgtggctacggagcagtacgggactgtgtcaaataatttgcaaaactcaaacactggtccaactactggaactgtcaatcgccaaggagcgttacctggtatggtgtggcaggatcgagacgtgtacctgcagggacccatttgggccaagattcctcacaccgatggacactttcatccttctccactgatgggaggttttggactcaaacacccgcctcctcagatcatgatcaaaaacactcccgttccagccaatcctcccacaaacttcagttctgccaagtttgcttctttcatcacacagtattccacgggacaggtcagcgtggagatcgagtgggagctgcagaaggagaacagcaaacgctggaatcccgaaattcagtacacttccaactacaacaagtctgttaatgtggactttactgtggacactaatggtgtgtattcagagcctcgccccattggcaccagatacctgactcgtaatctgtaattgcttgttaatcaataaaccgtttaattcgtttcagttgaactttggtctctgcgaagggcgaa

SEQ ID NO: 171 - DNA, 3142 bp, Artificial Sequence
  source: /note="Description of Artificial Sequence: Synthetic polynucleotide"
aaaacgacgggccagtgattgtaatacgactcactatagggcgaaattgaaattagcggccgcgaattcgcctttcgcagagaccaaagttcaactgaaacgaattaaacggtttattgattaacaagcaattacagattacgagtcaggtatctggtgccaatggggcgaggctctgaatacacaccattagtgtccacagtaaagtccacattaacagacttgttgtagttggaagtgtactgaatttcgggattccagcgtttgctgttctccttctgcagctcccactcgatctccacgctgacctgtcccgtggaatactgtgtgatgaaagaagcaaacttggcagaactgaagtttgtgggaggattggctggaacgggagtgtttttgatcatgatctgaggaggcgggtgtttgagtccaaaacctcccatcagtggagaaggatgaaagtgtccatcggtgtgaggaatcttggcccaaatgggtccctgcaggtacacgtctcgatcctgccacaccataccaggtaacgctccttggtgattgacagttccagtagttggaccagtgtttgagttttgcaaattatttgacacagtcccgtactgctccgtagccacgggattggtggccctgatttcttcttcatctgtaatcatgacattttccaaatccgcgtcgttggcatttgttccttgtttaccaaatatcagggttccatgcatggggaaaaacttttcttcgtcatccttgtgactggccatagctggtcctggattaaccaacgagtcccggccatttagatgatactttgtagctgcagtccagggaaagttgctgttgttgttgtcgtttgcctgttttgacagacgctgctgtctgtagcaaggtccaggcagccagtttttagcttgaagagacatgttggttggtccagcttggctaaacagtagccgagactgctgaagagttccactatttgtttgtgtcttgttcagataatacaggtactggtcgatcagaggattcatcagccgatccagactctggctgtgagcgtagctgctgtggaaaggcacgtcttcaaaagtgtagctgaactgaaagttgtttccagtacgcagcatctgagaaggaaagtactccaggcagtaaaaggaagagcgtcctaccgcctgactcccgttgttcagggtgaggtatccatactgtgggaccatgaagacgtccgctggaaacggcgggaggcatccttgatgcgccgagcccaggacgtacgggagctggtactccgagtcagtaaacacctgaaccgtgctggtaaggttattggcaatcgtcgtcgtaccgtcattctgcgtgacctctttgacttgaatattaaagagcttgaagttgagtcttttgggccggaatccccggttgttgttgacgagtctttgccagtcacgtggtgaaaagtggcagtggaatctgttgaagtcaaaatacccccagggggtgctgtagccaaagtagtggttgtcgttgctggctcctgattggctggagatttgcttgtagaggtggttgttgtatgtgggcagggcccaggttcgggtgctggtggtgatgactctgtcgcccagccattgggaatcgcaatgccaatttcctgaggaattacccactccatcggcaccctcgttattgtctgccattggtgcgccactgcctgtagccattgtagtagatcccagaccagagggggctgctggtggctgtccgagaggctgggggtcaggtacggagtctgcgtctccagtctgaccaaaatttaatctttttcttgcaggctgctggcccgcttttccggttcccgaggaggagtctggctccacaggagagtgctctaccggcctcttttttcccggagccgtcttaacaggctcctcaaccaggcccagaggttcaagaaccctctttttcgcctggaagactgctcgtccgaggttgcccccaaaagacgtatcttctttaaggcgctcctgaaactctgcgtcggcgtggttgtacttgaggtacgggttgtctccgctgtcgagctgccggtcgtaggccttgtcgtgctcgagggccgcggcgtctgcctcgttgaccggctcccccttgtcgagtccgttgaagggtccgaggtacttgtacccaggaagcacaagacccctgctgtcgtccttatgccgctctgcgggctttggtggtggtgggccaggtttgagcttccaccactgtcttattccttcagagagagtgtcctcgagccaatctggaagataaccatcggcagccatacctgatttaaatcatttattgttcagagatgcagtcatccaaatccacattgaccagatcgcaggcagtgcaagcgtctggcacctttcccatgatatgatgaatgtagcacagtttctgatacgcctttttgacgacagaaacgggttgagattctgacacgggaaagcactctaaacagtctttctgtccgtgagtgaagcagatatttgaattctgattcattctctcgcattgtctgcagggaaacagcatcagattcatgcccacgtgacgagaacatttgttttggtacctgtccgcgtagttgatcgaagcttccgcgtctgacgtcgatggctgcgcaactgactcgcgcgcccgtttgggctcacttatatctgcgtcactgggggcgggtcttttcttagctccaccctttttgacgtagaattcatgctccacctcaaccacgtgatcctttgcccaccggaaaaagtctttcacttcctgcttggtgacctttccaaagtcatgatccagacggcgggtaagttcaaatttgaacatccggtcttgcaacggctgctggtgctcgaaggtcgttgagttcccgtcaatcacggcgcacatgttggtgttggaggtgacgatcacgggagtcgggtctatctgggccgaggacttgcatttctggtccacacgcaccttgcttcctccaagaatggctttggccgactccacgaccttggcggtcatcttcccctcctcccaccagatcaccatcttgtcgacgcaatggtaaaaggaaagttctcattgg

SEQ ID NO: 172 - protein, 735 aa, Adeno-associated virus-2
MAADGYLPDWLEDTLSEGIRQWWKLKPGPPPPKPAERHKDDSRGLVLPGYKYLGPFNGLDKGEPVNEADAAALEHDKAYDRQLDSGDNPYLKYNHADAEFQERLKEDTSFGGNLGRAVFQAKKRVLEPLGLVEEPVKTAPGKKRPVEHSPVEPDSSSGTGKAGQQPARKRLNFGQTGDADSVPDPQPLGEPPATPAAVGPTTMASGGGAPMADNNEGADGVGNASGNWHCDSTWLGDRVITTSTRTWALPTYNNHLYKQISSASTGASNDNHYFGYSTPWGYFDFNRFHCHFSPRDWQRLINNNWGFRPKRLNFKLFNIQVKEVTQNDGTTTIANNLTSTVQVFTDSEYQLPYVLGSAHQGCLPPFPADVFMIPQYGYLTLNNGSQAVGRSSFYCLEYFPSQMLRTGNNFTFSYTFEDVPFHSSYAHSQSLDRLMNPLIDQYLYYLNRTQNQSGSAQDKALLFSRGSPAGMSVQPKNWLPGPCYRQQRVSKTKTDNNNSNFTWTGASKYNLNGRESIINPGTAMASHKDDKDKFFPMSGVMIFGKESAGASNTALDNVMITDEEEIKATNPVATERFGTVAVNFQSSSTDPATGDVHVMGALPGMVWQDRDVYLQGPIWAKIPHTDGHFHPSPLMGGFGLKHPPPQILIKNTPVPANPPAEFSATKFASFITQYSTGQVSVEIEWELQKENSKRWNPEVQYTSNYAKSANVDFTVDNNGLYTEPRPIGTRYLTRP

SEQ ID NO: 173 - protein, 740 aa, Adeno-associated virus-2
MAADGYLPDWLEDTLSEGIRQWWKLKPGPPPPKPAERHKDDSRGLVLPGYKYLGPFNGLDKGEPVNAADAAALEHDKAYDRQLDSGDNPYLKYNHADAEFQERLKEDTSFGGNLGRAVFQAKKRVLEPLGLVEEPVKTAPGKKRPVEHSPVEPDSSSGTGKAGQQPARKRLNFGQTGDADSVPDPQPLGQPPAAPSGLGTNTMATGSGAPMADNNEGADGVGNSSGNWHCDSTWMGDRVITTSTRTWALPTYNNHLYKQISSQSGASNDNHYFGYSTPWGYFDFNRFHCHFSPRDWQRLINNNWGFRPKRLNFKLFNIQVKEVTQNDGTTTIANNLTSTVQVFTDSEYQLPYVLGSAHQGCLPPFPADVFMVPQYGYLTLNNGSQAVGRSSFYCLEYFPSQMLRTGNNFTFSYTFEDVPFHSSYAHSQSLDRLMNPLIDQYLYYLSRTNTPSGTTTQSGLQFSQAGASDIRDQSRNWLPGPCYRQQRVSKTSADNNNSEYSWTGATKYHLNGRDSLVNPGPAMASHKDDEEKFFPQSGVLIFGKQGSEKTNVDIEKVMITDEEEIRTTNPVATEQYGSVSTNLQRGNRQAATADVNTQGVLPGMVWQDRDVYLQGPIWAKIPHTDGHFHPSPLMGGFGLKHPPPQILIKNTPVPANPSTTFSAAKFASFITQYSTGQVSVEIEWELQKENSKRWNPEIQYTSNYNKSVNVDFTVDTNGVYSEPRPIGTRYLTRNLLLAAA

SEQ ID NO: 174 - protein, 734 aa, Adeno-associated virus-2
MAADGYLPDWLEDTLSEGIRQWWKLKPGPPPPKPAERHKDDSRGLVLPGYKYLGPFNGLDKGEPVNEADAAALEHDKAYDRQLDSGDNPYLKYNHADAEFQERLKEDTSFGGNLGRAVFQAKKRVLEPLGLVEEPVKTAPGKKRPVEHSPVEPDSSSGTGKAGQQPARKRLNFGQTGDADSVPDPQPLGQPPAAPSGLGTNTMATGSGAPMADNNEGADGVGNSSGNWHCDSTWMGDRVITTSTRTWALPTYNNHLYKQISSQSGASNDNHYFGYSTPWGYFDFNRFHCHFSPRDWQRLINNNWGFRPKRLNFKLFNIQVKEVTQNDGTTTIANNLTSTVQVFTDSEYQLPYVLGSAHQGCLPPFPADVFMVPQYGYLTLNNGSQAVGRSSFYCLEYFPSQMLRTGNNFTFSYTFEDVPFHSSYAHSQSLDRLMNPLIDQYLYYLSRTNTPSGTTTQSGLQFSQAGASDIRDQSRNWLPGPCYRQQRVSKTSADNNNSEYSWTGATMYHLNGRDSLVNPGPAMASHKDDEEKFFPQSGVLIFGKQGSEKTNVDIEKVMITDEEEIRTTNPVATEQYGSVSTNLQRGNRQAATADVNTQGVLPGMVWQDRDVYLQGPIWAKIPHTDGHFHPSPLMGGFGLKHPPPQILIKNTPVPANPSTTFSAAKFASFITQYSTGQVSVEIEWELQKENSKRWNPEIQYTSNYNKSINVDFTVDTNGVYSEPRPIGTRYLTRN

SEQ ID NO: 175 - protein, 734 aa, Adeno-associated virus-2
MAADGYLPDWLEDTLSEGIRQWWKLKPGPPPPKPAERHKDDSRGLVLPGYKYLGPFNGLDKGEPVNEADAAALEHDKAYDRQLDSGDNPYLKYNHADAEFQERLKEDTSFGGNLGRAVFQAKKRVLEPLGLVEEPVKTAPGKKRPVEHSPVEPDSSSGTGKAGQQPARKRLNFGQTGDADSVPDPQPLGQPPAAPSGLGTNTMATGSGAPMADNNEGADGVGNSSGNWHCDSTWMGDRVITTSTRTWALPTYNNHLYKQISSQSGASNDNHYFGYSTPWGYFDFNRFHCHFSPRDWQRLINNNWGFRPKRLNFKLFNIQVKEVTQNDGTTTIANNLTSTVQVFTDSEYQLPYVLGSAHQGCLPPFPADVFMVPQYGYLTLNNGSQAVGRSSFYCLEYFPSQMLRTGNNFTFSYTFEDVPFHSSYAHSQSLDRLMNPLIDQYLYYLSRTNTPSGTTTQSGLQFSQAGASDIRDQSRNWLPGPCYRQQRVSKTSADNNNSEYSWTGATKYHLNGRDSLVNPGPAMASHKDDEEKFFPQSGVLIFGKQGSEKTNVDIEKVMITDEEEIRTTNPVATEQYGSVSTNLQRGNRQAATADVNTQGVLPGMVWQDRDVYLQGPIWAKIPHTDGHFHPSPLMGGFGLKHPPPQILIKNTPVPANPSTTFSEAKFASFITQYSTGQVSVEIEWELQKENSKRWNPEIQYTSNYNKSVNVDFTVDTNGVYSEPRPIGTRYLTRN

SEQ ID NO: 176 - protein, 739 aa, Adeno-associated virus-2
MAADGYLPDWLEDTLSEGIRQWWKLKPGPPPPKPAERHKDDSRGLVLPGYKYLGPFNGLDKGEPVNEADAAALEHDKAYDRQLDSGDNPYLKYNHADAEFQERLKEDTSFGGNLGRAVFQAKKRVLEPLGLVEEPVKTAPGKKRPVEHSPVEPDSSSGTGKAGQQPARKRLNFGQTGDADSVPDPQPLGQPPAAPSGLGTNTMATGSGAPMADNNEGADGVGNSSGNWHCDSTWMGDRVITTSTRTWALPTYNNHLYKQISSQSGASNDNHYFGYSTPWGYFDFNRFHCHFSPRDWQRLINNNWGFRPKRLNFKLFNIQVKEVTQNDGTTTIANNLTSTVQVFTDSEYQLPYVLGSAHQGCLPPFPADVFMVPQYGYLTLNNGSQAVGRSSFYCLEYFPSQMLRTGNNFTFSYTFEDVPFHSSYAHSQSLDRLMNPLIDQYLYYLSRTNTPSGTTTQSGLQFSQAGASDIRDQSRNWLPGPCYRQQRVSKTSADNNNSEYSWTGATKYHLNGRDSLVNPGPAMASHKDDEEKFFPQSGVLIFGKQGSEKTNVDIEKVMITDEEEIRTTNPVATEQYGSVSTNLQRGNRQAATADVNTQGVLPGMVWQDRDVYLQGPIWAKIPHTDGHFHPSPLMGGFGLKHPPPQILIKNTPVPANPSTTFSAAKFASFITQYSTGQVSVEIEWELQKENSKRWNPEIQYTSNYNKSVNVDFTVDTNGVYSEPRPIGTRYLTRNLLLAA

SEQ ID NO: 177 - protein, 725 aa, Adeno-associated virus-2
MAADGYLPDWLEDTLSEGIRQWWKLKPGPPPPKPAERHKDDSRGLVLPGYKYLGPFNGLDKGEPVNEADAAALEHDKAYDRQLDSGDNPYLKYNHADAEFQERLKEDTSFGGNLGRAVFQAKKRVLEPLGLVEEPVKTAPGKKRPVEHSPVEPDSSSGTGKAGQQPARKRLNFGQTGDADSVPDPQPLGQPPAAPSGLGTNTMATGSGAPMADNNEGADGVGNSSGNWHCDSTWMGDRVITTSTRTWALPTYNNHLYKQISSQSGASNDNHYFGYSTPWGYFDFNRFHCHFSPRDWQRLINNNWGFRPKRLNFKLFNIQVKEVTQNDGTTTIANNLTSTVQVFTDSEYQLPYVLGSAHQGCLPPFPADVFMVPQYGYLTLNNGSQAVGRSSFYCLEYFPSQMLRTGNNFTFSYTFEDVPFHSSYAHSQSLDRLMNPLIDQYLYYLSRTNTPSGTTTQSGLQFSQAGASDIRDQSRNWLPGPCYRQQRVSKTSADNNNSEYSWTGATKYHLNGRDSLVNPGPAMASHKDDEEKFFPQSGVLIFGKQGSEKTNVDIEKVMITDEEEIRTTNPVATEQYGSVSTNLQRGNRQAATADVNTQGVLPGMVWQDRDVYLQGPIWAKIPHTDGHFHPSPLMGGFGLKHPPPQILIKNTPVPANPSTTFSAAKFASFITQYSTGQVSVEIEWELQKENSKRWNPEIQYTSNYNKSVNVDFTVDTNGVYSEPRP

SEQ ID NO: 178 - protein, 707 aa, Adeno-associated virus-2
MAADGYLPDWLEDTLSEGIRQWWKLKPGPPPPKPAERHKDDSRGLVLPGYKYLGPFNGLDKGEPVNEADAAALEHDKAYDRQLDSGDNPYLKYNHADAEFQERLKEDTSFGGNLGRAVFQAKKRVLEPLGLVEEPVKTAPGKKRPVEHSPVEPDSSSGTGKAGQQPARKRLNFGQTGDADSVPDPQPLGQPPAAPSGLGTNTMATGSGAPMADNNEGADGVGNSSGNWHCDSTWMGDRVITTSTRTWALPTYNNHLYKQISSQSGASNDNHYFGYSTPWGYFDFNRFHCHFSPRDWQRLINNNWGFRPKRLNFKLFNIQVKEVTQNDGTTTIANNLTSTVQVFTDSEYQLPYVLGSAHQGCLPPFPADVFMVPQYGYLTLNNGSQAVGRSSFYCLEYFPSQMLRTGNNFTFSYTFEDVPFHSSYAHSQSLDRLMNPLIDQYLYYLSRTNTPSGTTTQSGLQFSQAGASDIRDQSRNWLPGPCYRQQRVSKTSADNNNSEYSWTGATKYHLNGRDSLVNPGPAMASHKDDEEKFFPQSGVLIFGKQGSEKTNVDIEKVMITDEEEIRTTNPVATEQYGSCIYQPPERQQTSSYRRCQHTRRSSRHGLAGQRCVPSGAHLGKDSTHGRTFSPLSPHGWIRTTPSSTDSHQEHPGTCESFDHLQCGKVCFLHHTVLHGTGQRGDRVRAAEGKQQTLESRNSVHFQLQQVC

SEQ ID NO: 179 - protein, 739 aa, Adeno-associated virus-2; identical to SEQ ID NO: 176

SEQ ID NO: 180 - protein, 737 aa, Adeno-associated virus-2
MASDGYLPDWLEDNLSEGIREWWDLKPGAPKPKANQQKQDDGRGLVLPGYKYLGPFNGLDKGEPVNAADAAALEHDKAYDQQLKAGDNPYLRYNHADAEFQERLQEDTSFGGNLGRAVFQAKKRVLEPFGLVEEGAKTAPGKKRPVEQSPQEPDSSSGIGKTGQQPAKKRLNFGQTGDSESVPDPQPLGEPPATPAAVGPTTMASGGGAPMADNNEGADGVGNASGNWHCDSTWLGDRVITTSTRTWALPTYNNHLYKQISSASTGASNDNHYFGYSTPWGYFDFNRFHCHFSPRDWQRLINNNWGFRPKRLNFKLFNIQVKEVTTNDGTTTIANNLTSTVQVFTDSEYQLPYVLGSAHQGCLPPFPADVFMVPQYGYLTLNNGSQAVGRSSFYCLEYFPSQMLRTGNNFTFSYTFEDVPFHSSYAHSQSLDRLMNPLIDQYLYYLSRTNTPSGTTTQSGLQFSQAGASDIRDQSRNWLPGPCYRQQRVSKTSADNNNSEYSWTGATKYHLNGRDSLVNPGPAMASHKDDEEKFFPQSGVLIFGKQGSEKTNVDIEKVMITDEEEIRTTNPVATEQYGSVSTNLQRGNRQAATADVNTQGVLPGMVWQDRDVYLQGPIWAKIPHTDGHFHPSPLMGGFGLKHHPPQILIKNTPVPANPSTTFSAAKFASFITQYSTGQVSVEIEWELQKENSKRWNPEIQYTSNYNKSVNVDFTVDTNGVYSEPRPIGTRYLTRNLL

SEQ ID NO: 181 - protein, 741 aa, Adeno-associated virus-2
MAADGYLPDWLEDTLSEGIREWWALKPGAPKPKANQQKQDDGRGLVLPGYKYLGPFNGLDKGEPVNEADAAALEHDKAYDQQLQAGDNPYLRYNHADAEFQERLQEDTSFGGNLGRAVFQAKKRVLEPLGLVEEPVKTAPGKKRPVEHSPVEPDSSSGTGKSGQQPARKRLNFGQTGDADSVPDPQPLGQPPAAPSGLGTNTMATGSGAPMADNNEGADGVGNSSGNWHCDSTWMGDRVITTSTRTWALPTYNNHLYKQISSQSGASNDNHYFGYSTPWGYFDFNRFHCHFSPRDWQRLINNNWGFRPKRLNFKLFNIQVKEVTQNDGTTTIANNLTSTVQVFTDSEYQLPYVLGSAHQGCLPPFPADVFMVPQYGYLTLNNGSQAVGRSSFYCLEYFPSQMLRTGNNFTFSYTFEDVPFHSSYAHSQSLDRLMNPLIDQYLYYLSRTNTPSGTTTQSGLQFSQAGASDIRDQSRNWLPGPCYRQQRVSKTSADNNNSEYSWTGATKYHLNGRDSLVNPGPAMASHKDDEEKFFPQSGVLIFGKQGSEKTNVDIEKVMITDEEEIRTTNPVATEQYGSVSTNLQRGNLANHNNTTNARQAATADVNTQGVLPGMVWQDRDVYLQGPIWAKIPHTDGHFHPSPLMGGFGLKHPPPQILIKNTPVPANPSTTFSAAKFASFITQYSTGQVSVEIEWELQKENSKRWNPEIQYTSNYNKSINVDFTVDTNGVYSEPRPIGTRYL

SEQ ID NO: 182 - protein, 730 aa, Adeno-associated virus-2
MASDGYLPDWLEDNLSEGIREWWDLKPGAPKPKANQQKQDDGRGLVLPGYKYLGPFNGLDKGEPVNAADAAALEHDKAYDQQLKAGDNPYLRYNHADAEFQERLQEDTSFGGNLGRAVFQAKKRVLEPFGLVEEGAKTAPGKKRPVEQSPQEPDSSSGIGKTGQQPAKKRLNFGQTGDSESVPDPQPLGEPPATPAAVGPTTMASGGGAPMADNNEGADGVGNASGNWHCDSTWLGDRVITTSTRTWALPTYNNHLYKQISSASTGASNDNHYFGYSTPWGYFDFNRFHCHFSPRDWQRLINNNWGFRPKRLNFKLFNIQVKEVTTNDGVTTIANNLTSTVQVFSDSEYQLPYVLGSAHQGCLPPFPADVFMIPQYGYLTLNNGSQAVGRSSFYCLEYFPSQMLRTGNNFTFSYTFEDVPFHSSYAHSQSLDRLMNPLIDQYLYYLNRTQNQSGSAQNNDLLFSRGSPAGMSVQPKNWLPGPCYRQQRVSKTKTDNNNSNFTWTGASKYNLNGRESIINPGTAMASHKDDKDKFFPMSGVMIFGKESAGASNTALDNVMITDEEEIKATNPVATERFGTVAVNLQSSSTDPATGDVHVMGALPGMVWQDRDVYLQGPIWAKIPHTDGHFHPSPLMGGFGLKNPPPQILIKNTPVPANPPAEFSATKFASFITQYSTGQVSVEIEWELQKENSKRWNPEVQYTSNYAKSANVDFTVDNNGLYTEPRPIGTR

SEQ ID NO: 183 - protein, 735 aa, Adeno-associated virus-2
  MOD_RES (239)..(239): Any amino acid
MASDGYLPDWLEDNLSEGIREWWDLKPGAPKPKANQQKQDDGRGLVLPGYKYLGPFNGLDKGEPVNAADAAALEHDKAYDQQLKAGDNPYLRYNHADAEFQERLQEDTSFGGNLGRAVFQAKKRVLEPFGLVEEGAKTAPGKKRPVEQSPQEPDSSSGIGKTGQQPAKKRLNFGQTGDSESVPDPQPLGEPPATPAAVGPTTMASGGGAPMADNNEGADGVGNASGNWHCDSTWLGDRXITTSTRTWALPTYNNHLYKQISSASTGASNDNHYFGYSTPWGYFDFNRFHCHFSPRDWQRLINNNWGFRPKRLNFKLFNIQVKEVTTNDGVTTIANNLTSTVQVFSDSEYQLPYVLGSAHQGCLPPFPADVFMIPQYGYLTLNNGSQAVGRSSFYCLEYFPSQMLRTGNNFTFSYTFEDVPFHSSYAHSQSLDRLMNPLIDQYLYYLNRTQNQSGSAQNNDLLFSRGSPAGMSVQPKNWLPGPCYRQQRVSKTKTDNNNSNFTWTGASKYNLNGRESIINPGTAMASHKDDKDKFFPMSGVMIFGKESAGASNTALDNVMITDEEEIKATNPVATERFGTVAVNLQSSSTDPATGDVHVMGALPGMVWQDRDVYLQGPIWAKIPHTDGHFHPSPLMGGFGLKNPPPQILIKNTPVPANPPAEFSATKFASFITQYSTGQVSVEIEWELQKENSKRWNPEVQYTSNYAKSANVDFTVDNNGLYTEPRPIGTRYLTRP

SEQ ID NO: 184 - protein, 733 aa, Adeno-associated virus-2
MASDGYLPDWLEDNLSEGIREWWDLKPGAPKPKANQQKQDDGRGLVLPGYKYLGPFNGLDKGEPVNAADAAALEHDKAYDQQLKAGDNPYLRYNHADAEFQERLQEDTSFGGNLGRAVFLAKKRVLEPFGLVEEGAKTAPGKKRPVEQSPQEPDSSSGIGKTGQQPAKKRLNFGQTGDSESVPDPQPLGEPPATPAAVGPTTMASGGGAPMADNNEGADGVGNASGNWHCDSTWLGDRVITTSTRTWALPTYNNHLYKQISSASTGASNDNHYFGYSTPWGYFDFNRFHCHFSPRDWQRLINNNWGFRPKRLNFKLFNIQVKEVTTNDGVTTIANNLTSTVQVFSDSEYQLPYVLGSAHQGCLPPFPADVFMIPQYGYLTLNNGSQAVGRSSFYCLEYFPSQMLRTGNNFTFSYTFEDVPFHSSYAHSQSLDRLMNPLIDQYLYYLNRTQNQSGSAQNNDLLFSRGSPAGMSVQPKNWLPGPCYRQQRVSKTKTDNNNSNFTWTGASKYNLNGRESIINPGTAMASHKDDKDKFFPMSGVMIFGKESAGASNTALDNVMITDEEEIKATNPVATERFGTVAVNLQSSSTDPATGDVHVMGALPGMVWQDRDVYLQGPIWAKIPHTDGHFHPSPLMGGFGLKNPPPQILIKNTPVPANPPAEFSATKFASFITQYSTGQVSVEIEWELQKENSKRWNPEVQYTSNYAKSANVDFTVDNNGLYTEPRPIGTRYLT

SEQ ID NO: 185 - protein, 734 aa, Adeno-associated virus-2
MAADGYLPDWLEDTLSEGIRQWWKLKPGPPPPKPAERHKDDSRGLVLPGCKYLGPFNGLDKGEPVNEADAAALEHDKAYDRQLDSGDNPYLKYNHADAEFQERLKEDTSFGGNLGRAVFQAKKRVLEPLGLVEEPVKTAPGKKRPVEHSPVEPDSSSGTGKAGQQPARKRLNFGQTGDADSVPDPQPLGQPPAAPSGLGTNTMATGSGAPMADNNEGADGVGNSSGNWHCDSTWMGDRVITTSTRTWALPTYNNHLYKQISSQSGASNDNHYFGYSTPWGYFDFNRFHCHFSPRDWQRLINNNWGFRPKRLNFKLFNIQVKEVTQNDGTTTIANNLTSTVQVFSDSEYQLPYVLGSAHQGCLPPFPADVFMIPQYGYLTLNNGSQAVGRSSFYCLEYFPSQMLRTGNNFTFNYTFEDVPFHSSYAHSQSLDRLMNPLIDQYLYYLNRTQNQSGSAQNNDLLFSRGSPAGMSVQPKNWLPGPCYRQQRVSKTKTDNNNSNFTWTGASKYNLNGRESIINPGTAMASHKDDKDKFFPMSGVMIFGKESAGASNTALDNVMITDEEEIKATNPVATERFGTVAVNLQSSSTDPATGDVHVMGALPGMVWQDRDVYLQGPIWAKIPHTDGHFHPSPLMGGFGLKNPPPQILIKNTPVPANPPAEFSATKFASFITQYSTGQVSVEIEWELQKENSKRWNPEVQYTSNYAKSANVDFTVDNNGLYTEPRPIGTRYLTRP

SEQ ID NO: 186 - protein, 734 aa, Adeno-associated virus-2
MAADGYLPDWLEDTLSEGIRQWWKLKPGPPPPKPAERHKDDSRGLVLPGYKYLGPFNGLDKGEPVNEADAAALEHDKAYDRQLDSGDNPYLKYNHADAEFQERLKEDTSFGGNLGRAVFQAKKRVLEPLGLVEEPVKTAPGKKRPVEHSPVEPDSSSGTGKAGQQPARKRLNFGQTGDADSVPDPQPLGQPPAAPSGLGTNTMATGSGAPMADNNEGADGVGNSSGNWHCDSTWMGDRVITTSTRTWALSTYNNHLYKQISSQSGASNDNHYFGYSTPWGYFDFNRFHCHFSPRDWQRLINNNWGFRPKRLNFKLFNIQVKEVTQNDGTTTIANNLTSTVQVFTDSEYQLPYVLGSAHQGCLPPFPADVFMVPQYGYLTLNNGSQAVGRSSFYCLEYFPSQMLRTGNNFTFSYTFEDVPFHSSYAHSQSLDRLMNPLIDQYLYYLSRTNTPSGTTTQSRLQFSQAGASDIRDQSRNWLPGPCYRQQRVSKTSADNNNSEYSWTGATKYHLNGRDSLVNPGPAMASHKDDEEKFFPQSGVLIFGKQGSEKTNVDIEKVMITDEEEIRTTNPVATEQYGSVSTNLQRGNRQAATADVNTQGVLPGMVWQDRDVYLQGPIWAKIPHTDGHFHPSPLMGGFGLKHPPPQILIKNTPVPANPSTTFSAAKFASFITQYSTGQVSVEIEWELQKENSKRWNPEIQYTSNYNKSINVDFTVDTNGVYSEPRPIGTRYLTRN

SEQ ID NO: 187 - protein, 738 aa, Adeno-associated virus-2
MAADGYLPDWLEDTLSEGIRQWWKLKPGPPPPKPAERHKDDSRGLVLPGYKYLGPFNGLDKGEPVNEADAAALEHDKAYDRQLDGGDNPYLKYNHADAEFQERLKEDTSFGGNLGRAVFQAKKRVLEPLGLVEEPVKTAPGKKRPVEHSPVEPDSSSGTGKAGQQPARKRLNFGQTGDADSVPDPQPLGQPPAAPSGLGTNTMATGSGAPMADNNEGADGVGNSSGNWHCDSTWMGDRVITTSTRTWALPTYNNHLYKQISSQSGASNDNHYFGYSTPWGYFDFNRFHCHFSPRDWQRLINNNWGFRPKRLNFKLFNIQVKEVTQNDGTTTIANNLTSTVQVFTDSEYQLPYVLGSAHQGCLPPFPADVFMVPQYGYLTLNNGSQAVGRSSFYCLEYFPSQMLRTGNNFTFSYTFEDVPFHSSYAHSQSLDRLMNPLIDQYLYYLSRTNTPSGTTTQSGLQFSQAGASDIRDQSRNWLPGPCYRQQRVSKTSADNNNSEYSWTGATKYHLNGRDSLVNPGPAMASHKDDEEKFFPQSGVLIFGKQGSEKTNVDIEKVMITDEEEIRTTNPVATEQYGSVSTNLQRGNRQAATADVNTQGVLPGMVWQDRDVYLQGPIWAKIPHTDGHFHPSPLMGGFGLKHPPPQILIKNTPVPANPSTTFSAAKFASFITQYSTGQVSVEIEWELQKENSKRWNPEIQYTSNYNKSVNVDFTVDTNGVYSEPRPIGTRYLTRNLLRP

SEQ ID NO: 188 - DNA, 2208 bp, Artificial Sequence
  source: /note="Description of Artificial Sequence: Synthetic polynucleotide"
atggctgccgatggttatcttccagattggctcgaggacactctctctgaaggaataagacagtggtggaagctcaaacctggcccaccaccaccaaagcccgcagagcggcataaggacgacagcaggggtcttgtgcttcctgggtacaagtacctcggacccttcaacggactcgacaagggggagccggtcaacgaggcagacgccgcggccctcgagcacgacaaggcctacgaccggcagctcgacagcggagacaacccgtacctcaagtacaaccacgccgacgcagagtttcaggagcgccttaaagaagatacgtcttttgggggcaacctcggacgagcagtcttccaggcgaaaaagagggttcttgaacctctgggcctggttgaggaacctgttaagacggctccgggaaaaaagaggccggtagagcactctcctgtggagccagactcctcctcgggaaccggaaaagcgggccagcagcctgcaagaaaaagattaaattttggtcagactggagacgcagactccgtacctgacccccagcctctcggacagccaccagcagccccctctggtctgggatctactacaatggctacaggcagtggcgcaccaatggcagacaataacgagggtgccgatggagtgggtaattcctcaggaaattggcattgcgattcccaatggctgggcgacagagtcatcaccaccagcacccgaacctgggccctgcccacatacaacaaccacctctacaagcaaatctccagccaatcaggagccagcaacgacaaccactactttggctacagcaccccctgggggtattttgacttcaacagattccactgccacttttcaccacgtgactggcaaagactcatcaacaacaactggggattccggcccaaaagactcaacttcaagctctttaatattcaagtcaaagaggtcacgcagaatggcggtacgacgacgattgccaataaccttaccagcacggttcaggtgtttactgactcggagtaccagctcccgtacgtcctgggctcggcgcatcaaggatgcctcccgccgtttccagcggacgtcttcatggtcccacagtatggatacctcaccctgaacaacgggagtcaggcggtaggacgctcttccttttactgcctggagtactttccttctcagatgctgcgtactggaaacaactttcagttcagctacacttttgaagacgtgcctttccacagcagctacgctcacagccagagtctggatcggctgatgaatcctctgatcgaccagtacctgtattatctgaacaagacacaaacaaatagtggaactcttcagcagtctcggctactgtttagccaagctggaccaaccaacatgtctcttcaagctaaaaactggctgcctggaccttgctacagacagcagcgtctgtcaaaacaggcaaacggcaacaacaacagcaactttccctggactgcagctacaaagtatcatctaaatggccgggactcgttggttaatccaggaccagctatggccagtcacaaggatgacgaagaaaagtttttccccatgcatggaaccctgatatttggtaaacaaggaacaaatgccaacgacgcggatttggaaaatgtcatgattacagatgaagaagaaatcagggccaccaatcccgtggctacggagcagtacgggactgtgtcaaataatttgcaaaactcaaacactggtccaactactggaactgtcaatcaccaaggagcgttacctggtatggtgtggcaggatcgagacgtgtacctgcagggacccatttgggccaagattcctcacaccgatggacactttcatccttctccactgacgggaggttttggactcaaacacccgcctcctcagatcatgatcaaaaacactcccgttccagccaatcctcccacaaacttcagttctgccaagtttgcttctttcatcacacagtattccacgggacaggtcagcgtggagatcgagtgggagctgcagaaggagaacagcaaacgctggaatcccgaaattcagtacacttccaactacaacaagtctgttaatgtggactttactgtggacactaatggtgtgtattcagagcctcgccccattggcaccagatacctgactcgtaatctgtaa

SEQ ID NO: 189 - protein, 735 aa, Artificial Sequence
  source: /note="Description of Artificial Sequence: Synthetic polypeptide"
MAADGYLPDWLEDTLSEGIRQWWKLKPGPPPPKPAERHKDDSRGLVLPGYKYLGPFNGLDKGEPVNEADAAALEHDKAYDRQLDSGDNPYLKYNHADAEFQERLKEDTSFGGNLGRAVFQAKKRVLEPLGLVEEPVKTAPGKKRPVEHSPVEPDSSSGTGKAGQQPARKRLNFGQTGDADSVPDPQPLGQPPAAPSGLGSTTMATGSGAPMADNNEGADGVGNSSGNWHCDSQWLGDRVITTSTRTWALPTYNNHLYKQISSQSGASNDNHYFGYSTPWGYFDFNRFHCHFSPRDWQRLINNNWGFRPKRLNFKLFNIQVKEVTQNGGTTTIANNLTSTVQVFTDSEYQLPYVLGSAHQGCLPPFPADVFMVPQYGYLTLNNGSQAVGRSSFYCLEYFPSQMLRTGNNFQFSYTFEDVPFHSSYAHSQSLDRLMNPLIDQYLYYLNKTQTNSGTLQQSRLLFSQAGPTNMSLQAKNWLPGPCYRQQRLSKQANGNNNSNFPWTAATKYHLNGRDSLVNPGPAMASHKDDEEKFFPMHGTLIFGKQGTNANDADLENVMITDEEEIRATNPVATEQYGTVSNNLQNSNTGPTTGTVNHQGALPGMVWQDRDVYLQGPIWAKIPHTDGHFHPSPLTGGFGLKHPPPQIMIKNTPVPANPPTNFSSAKFASFITQYSTGQVSVEIEWELQKENSKRWNPEIQYTSNYNKSVNVDFTVDTNGVYSEPRPIGTRYLTRNL

SEQ ID NO: 190 - DNA, 2208 bp, Artificial Sequence
  source: /note="Description of Artificial Sequence: Synthetic polynucleotide"
atggctgccgatggttatcttccagattggctcgaggacactctctctgaaggaataagacagtggtggaagctcaaacctggcccaccaccaccaaagctcgcagagcggcatcaggacgacagcaggggtcttgtgcttcctgggtacaagtacctcggacccttcaacggactcgacaaaggagagccggtcaacgaggcagacgccgcggccctcgagcacgacaaggcctacgaccggcagctcgacagcggagacaacccgtacctcaagtacaaccacgccgacgcggagtttcaggagcgtcttaaagaagatacgtcttttgggggcaacctcggacgagcagtcttccaggcgaaaaagagggttcttgaacctctgggcctggttgaggaacctgttaagacggctccgggaaaaaagaggccggtagagcactctcctgtggagccagactcctcctcgggaaccggaaaggcgggccatcagcctgcgagaaagagattgaattttggtcagactggagacgcagactccgtacctgacccccagcctctcggacagccaccagcagcccccacaagtctgggatctactacaatggctacaggcagtggcgcaccaatggcagacaataacgagggtgccgatggagtgggtaattcctcaggaaattggcattgcgattcccaatggctgggcgacagagtcatcaccaccagcacccgaacctgggccctgcccacctacaacaaccacctctacaagcaaatctccagccaatcaggagcctcgaacgacaaccactactttggctacagcaccccctgggggtattttgacttcaacagattccactgtcacttctccccacgtgattggcaaagactcatcaacaacaactggggattccgacccaagagactcaacttcaagctctttaacattcaagtcaaagaggtcacgcagaatgacggtacgacgacgattgccaataaccttaccagcacggttcaggtgtttactgactcggagtaccagctcccgtacgtcctcggctcggcgcatcaaggatgcctcccgccgtttccagcggacgtcttcacggtcccacagtatggatacctcaccctgaacaacgggagtcaggcggtaggacgctcttccttttactgcctggagtactttccttctcagatgctgcgtactggaaacaaccttaccttcagctacacctttgaggacgttcctttccacagcagctacgctcacagccagagtttggaccggctgatgaatcctctgatcgaccagtatctatattatctgaacaggacacaatcaaatagtggaactcttcagcagtctaggctactgtttagccaagctggacccaccagcatgtctcttcaagctaaaaactggctgcctggaccttgctacagacagcagcgtctttcaaagcaggcaaacgacaacaacaacagcaactttccctggactgcggctacaaagtatcatctaaatggccgggactcgttggttaatccaggaccagctatggccagccacaaagacgatgaagaaaagtttttccccatgcatggaaccctgatatttggtaaacaaggaacaaatgctaacgacgcggatttggagcatgttatgattacagatgaagaagaaatcaggaccaccaatcctgtggctacagagcagtacggaaacgtgtcaaataatttgcaaaactcaaatactggtccaactacagaaaatgtcaatcaccagggagcgttacctggtatggtgtggcaggatcgagacgtgtacctgcagggacccatttgggccaagattcctcacaccgacggacactttcacccttctccactgatgggaggttttggactcaaacacccgcctcctcaaatcatgatcaaaaacactcccgttccagccaatcctcccacaaactacagttctgccaagtttgcttctttcatcacacagtattccacgggccaggtcagcgtggagattgagtgggagctgcggaaggagaacagcaaacgctggaaccccgagatccagtatacttccaactacaacaaatctgttaatgtggactttactgtggacactaatggtgtgtattcagagcctcgccccattggcaccagatacctgactcgtaatctgtaa

SEQ ID NO: 191 - protein, 735 aa, Artificial Sequence
  source: /note="Description of Artificial Sequence: Synthetic polypeptide"
MAADGYLPDWLEDTLSEGIRQWWKLKPGPPPPKLAERHQDDSRGLVLPGYKYLGPFNGLDKGEPVNEADAAALEHDKAYDRQLDSGDNPYLKYNHADAEFQERLKEDTSFGGNLGRAVFQAKKRVLEPLGLVEEPVKTAPGKKRPVEHSPVEPDSSSGTGKAGHQPARKRLNFGQTGDADSVPDPQPLGQPPAAPTSLGSTTMATGSGAPMADNNEGADGVGNSSGNWHCDSQWLGDRVITTSTRTWALPTYNNHLYKQISSQSGASNDNHYFGYSTPWGYFDFNRFHCHFSPRDWQRLINNNWGFRPKRLNFKLFNIQVKEVTQNDGTTTIANNLTSTVQVFTDSEYQLPYVLGSAHQGCLPPFPADVFTVPQYGYLTLNNGSQAVGRSSFYCLEYFPSQMLRTGNNLTFSYTFEDVPFHSSYAHSQSLDRLMNPLIDQYLYYLNRTQSNSGTLQQSRLLFSQAGPTSMSLQAKNWLPGPCYRQQRLSKQANDNNNSNFPWTAATKYHLNGRDSLVNPGPAMASHKDDEEKFFPMHGTLIFGKQGTNANDADLEHVMITDEEEIRTTNPVATEQYGNVSNNLQNSNTGPTTENVNHQGALPGMVWQDRDVYLQGPIWAKIPHTDGHFHPSPLMGGFGLKHPPPQIMIKNTPVPANPPTNYSSAKFASFITQYSTGQVSVEIEWELRKENSKRWNPEIQYTSNYNKSVNVDFTVDTNGVYSEPRPIGTRYLTRNL

SEQ ID NO: 192 - DNA, 2208 bp, Artificial Sequence
  source: /note="Description of Artificial Sequence: Synthetic polynucleotide"
atggctgccgatggttatcttccagattggctcgaggacactctctctgaaggaataagacagtggtggaagctcaaacctggcccaccaccaccaaagcccgcagagcggcatcaggacgacagcaggggtcttgtgcttcctgggtacaagtacctcggacccttcaacggactcgacaaaggagagccggtcaacgaggcagacgccgcggccctcgagcacgacaaggcctacgaccggcagctcgacagcggagacaacccgtacctcaagtacaaccacgccgacgcggagtttcaggagcgtcttaaagaagatacgtcttttgggggcaacctcggacgagcagtcttccaggcgaaaaagagggttcttgaacctctgggcctggttgaggaacctgttaagacggctccgggaaaaaagaggccggtagagcactctcctgtggagccagactcctcctcgggaaccggaaaagcgggccatcagcctgcgagaaagagattgaattttggtcagactggagacgcagactccgtacctgacccccagcctctcggacagccaccagcagcccccacaagtttgggatctactacaatggctacaggcagtggcgcaccaatggcagacaataacgagggtgccgatggagtgggtaattcctcaggaaattggcattgcgattcccaatggctgggcgacagagtcatcaccaccagcacccgaacctgggccctgcccacctacaacaaccacctctacaagcaaatctccagccaatcaggagcctcgaacgacaaccactactttggctacagcaccccctgggggtattttgacttcaacagattccactgtcacttctccccacgtgattggcaaagactcatcaacaacaactggggattccgacccaagagactcaacttcaagctctttaacattcaagtcaaggaggtcacgcagaatgacggtacgacgacgattgccaataaccttaccagcacggttcaggtgtttactgactcggagtaccagctcccgtacgtcctcggctcggcgcatcaaggatgcctcccgccgtttccagcggacgtcttcatggtcccacagtatggatacctcaccctgaacaacgggagtcaggcggtaggacgctcttccttttactgcctggagtactttccttctcagatgctgcgtactggaaacaactttaccttcagctacacctttgaggacgttcctttccacagcagctacgctcacagccagagtttggaccggctgatgaatcctctgatcgaccagtatctatattatctgaacaggacacaatcaaatagtggaactcttcagcagtctaggctactgtttagccaagctggacccaccagcatgtctcttcaagctaaaaactggctgcctggaccttgctacagacagcagcgtctttcaaagcaggcaaacgacaacaacaacagcaactttccctggactgcggctacaaagtatcgtctaaatggccgggactcgttggttaatccaggaccagctatggccagccacaaagacgatgaagaaaagtttttccccatgcatggaaccctgatatttggtaaacaaggaacaaatgctaacgacgcggatttggagcatgttatgattacagatgaagaagaaatcaggaccaccaatcctgtggctacagagcagtacggaaacgtgtcaaataatttgcaaaactcaaatactggtccaactacagaaaatgtcaatcaccagggagcgttacctggtatggtgtggcaggatcgagacgtgtacctgcagggacccatttgggccaagattcctcacaccgacggacactttcacccttctccactgatgggaggttttggactcaaacacccgcctcctcaaatcatgatcaaaaacactcccgttccagccaatcctcccacaaacttcagttctgccaagtttgcttctttcatcacacagtattccacgggccaggtcagcgtggagattgagtgggagctgcagaaggagaacagcaaacgctggaaccccgagatccagtatacttccaactacaacaaatctgttaatgtggactttactgtggacactaatggtgtgtattcagagcctcgccccattggcaccagatacctgactcgtaatctgtaa

SEQ ID NO: 193 - protein, 735 aa, Artificial Sequence
  source: /note="Description of Artificial Sequence: Synthetic polypeptide"
MAADGYLPDWLEDTLSEGIRQWWKLKPGPPPPKPAERHQDDSRGLVLPGYKYLGPFNGLDKGEPVNEADAAALEHDKAYDRQLDSGDNPYLKYNHADAEFQERLKEDTSFGGNLGRAVFQAKKRVLEPLGLVEEPVKTAPGKKRPVEHSPVEPDSSSGTGKAGHQPARKRLNFGQTGDADSVPDPQPLGQPPAAPTSLGSTTMATGSGAPMADNNEGADGVGNSSGNWHCDSQWLGDRVITTSTRTWALPTYNNHLYKQISSQSGASNDNHYFGYSTPWGYFDFNRFHCHFSPRDWQRLINNNWGFRPKRLNFKLFNIQVKEVTQNDGTTTIANNLTSTVQVFTDSEYQLPYVLGSAHQGCLPPFPADVFMVPQYGYLTLNNGSQAVGRSSFYCLEYFPSQMLRTGNNFTFSYTFEDVPFHSSYAHSQSLDRLMNPLIDQYLYYLNRTQSNSGTLQQSRLLFSQAGPTSMSLQAKNWLPGPCYRQQRLSKQANDNNNSNFPWTAATKYRLNGRDSLVNPGPAMASHKDDEEKFFPMHGTLIFGKQGTNANDADLEHVMITDEEEIRTTNPVATEQYGNVSNNLQNSNTGPTTENVNHQGALPGMVWQDRDVYLQGPIWAKIPHTDGHFHPSPLMGGFGLKHPPPQIMIKNTPVPANPPTNFSSAKFASFITQYSTGQVSVEIEWELQKENSKRWNPEIQYTSNYNKSVNVDFTVDTNGVYSEPRPIGTRYLTRNL

SEQ ID NO: 194 - DNA, 2208 bp, Artificial Sequence
  source: /note="Description of Artificial Sequence: Synthetic polynucleotide"
atggctgccgatggttatcttccagattggctcgaggacactctctctgaaggaataagacagtggtggaagctcaaacctggcccaccaccaccaaagcccgcagagcggcatcaggacgacagcaggggtcttgtgcttcctgggtacaagtacctcggacccttcaacggactcgacaaaggagagccggtcaacgaggcagacgccgcggccctcgagcacgacaaggcctacgaccggcagctcgacagcggagacaacccgtacctcaagtacaaccacgccgacgcggagtttcaggagcgtcttaaagaagatacgtcttttgggggcaacctcggacgagcagtcttccaggcgaaaaagagggttcttgaacctctgggcctggttgaggaacctgttaagacggctccgggaaaaaagaggccggtagagcactctcctgtggagccagactcctcctcgggaaccggaaaagcgggccatcagcctgcgagaaagagattgaattttggtcagactggagacgcagactccgtacctgacccccagcctctcggacagccaccagcagcccccacaagtttgggatctactacaatggctacaggcagtggcgcaccaatggcagacaataacgagggtgccgatggagtgggtaattcctcaggaaattggcattgcgattcccaatggctgggcgacagagtcatcaccaccagcacccgaacctgggccctgcccacctacaacaaccacctctacaagcaaatctccagccaatcaggagcctcgaacgacaaccactactttggctacagcaccccctgggggtattttgacttcaacagattccactgtcacttctccccacgtgattggcaaagactcatcaacaacaactggggattccgacccaagagactcaacttcaagctctttaacattcaagtcaaagaggtcacgcagaatgacggtacgacgacgattgccaataaccttaccagcacggttcaggtgtttactgactcggagtaccagctcccgtacgtcctcggctcggcgcatcaaggatgcctcccgccgtttccagcggacgtcttcatggtcccacagtatggatacctcaccctgaacaacgggagtcaggcggtaggacgcccttccttttactgcctggagtactttccttctcagatgctgcgtactggaaacaactttaccttcagctacacctttgaggacgttcctttccacagcagctacgctcacagccagagtttggaccggctgatgaatcctctgatcgaccagtatctatattatctgaacaggacacaatcaaatagtggaactcttcagcagtctaggctactgtttagccaagctggacccaccagcatgtctcttcaagctaaaaactggctgcctggaccttgctacagacagcagcgtctttcaaagcaggcaaacgacaacaacaacagcaactttccctggactgcggctacaaagtatcatctaaatggccgggactcgttggttaatccaggaccagctatggccagccacaaagacgatgaagaaaagtttttccccatgcatgggaccctgatatttggtaaacaaggaacaaatgctaacgacgcggatttggagcatgttatgattacagatgaagaagaaatcaggaccaccaatcctgtggctacagagcagtacggaaacgtgtcaaataatttgcaaaactcaaatactggtccaactacagaaaatgtcaatcaccagggagcgttacctggtatggtgtggcaggatcgagacgtgtacctgcagggacccatttgggccaagattcctcacaccgacggacactttcacccttctccactgatgggaggttttggactcaaacacccgcctcctcaaatcatgatcaaaaacactcccgttccagccaatcctcccacaaacttcagttctgccaagtttgcttctttcatcacacagtattccacgggccaggtcagcgtggagattgagtgggagctgcagaaggagaacagcaaacgctggaaccccgagatccagtatacttccaactacaacaaatctgttaatgtggactttactgtggacactaatggtgtgtattcagagcctcgccccattggcaccagatacctgactcgtaatctgtaa

SEQ ID NO: 195 - protein, 735 aa, Artificial Sequence
  source: /note="Description of Artificial Sequence: Synthetic polypeptide"
MAADGYLPDWLEDTLSEGIRQWWKLKPGPPPPKPAERHQDDSRGLVLPGYKYLGPFNGLDKGEPVNEADAAALEHDKAYDRQLDSGDNPYLKYNHADAEFQERLKEDTSFGGNLGRAVFQAKKRVLEPLGLVEEPVKTAPGKKRPVEHSPVEPDSSSGTGKAGHQPARKRLNFGQTGDADSVPDPQPLGQPPAAPTSLGSTTMATGSGAPMADNNEGADGVGNSSGNWHCDSQWLGDRVITTSTRTWALPTYNNHLYKQISSQSGASNDNHYFGYSTPWGYFDFNRFHCHFSPRDWQRLINNNWGFRPKRLNFKLFNIQVKEVTQNDGTTTIANNLTSTVQVFTDSEYQLPYVLGSAHQGCLPPFPADVFMVPQYGYLTLNNGSQAVGRPSFYCLEYFPSQMLRTGNNFTFSYTFEDVPFHSSYAHSQSLDRLMNPLIDQYLYYLNRTQSNSGTLQQSRLLFSQAGPTSMSLQAKNWLPGPCYRQQRLSKQANDNNNSNFPWTAATKYHLNGRDSLVNPGPAMASHKDDEEKFFPMHGTLIFGKQGTNANDADLEHVMITDEEEIRTTNPVATEQYGNVSNNLQNSNTGPTTENVNHQGALPGMVWQDRDVYLQGPIWAKIPHTDGHFHPSPLMGGFGLKHPPPQIMIKNTPVPANPPTNFSSAKFASFITQYSTGQVSVEIEWELQKENSKRWNPEIQYTSNYNKSVNVDFTVDTNGVYSEPRPIGTRYLTRNL

SEQ ID NO: 196 - DNA, 2208 bp, Artificial Sequence
  source: /note="Description of Artificial Sequence: Synthetic polynucleotide"
atggctgccgatggttatcttccagattggctcgaggacactctctctgaaggaataagacagtggtggaagctcaaacctggcccaccaccaccaaagcccgcagagcggcataaggacgacagcaggggtcttgtgcttcctgggtacaagtacctcggacccttcaacggactcgacaagggagagccggtcaacgaggcagacgccgcggccctcgagcacgacaaggcctacgaccggcagctcgacagcggagacaacccgtacctcaagtacaaccacgccgacgcggagtttcaggagcgccttaaagaagatacgtcttttgggggcaacctcggacgagcagtcttccaggcaaaaaagagggttcttgaacctctgggcctggttgaggagcctgttaaaacggctccgggaaaaaagaggccggtagagcactctcctgcggagccagactcctcctcgggaaccggaaaagcgggccagcagcctgcaagaaaaagattgaatttcggtcagactggagacgcagactccgtacctgacccccagcctctcggacagccaccagcagccccctctggtctgggaactaatacgatggcttcaggcagtggcgcaccaatggcagacaataacgagggcgccgacggagtgggtaattcctcgggaaattggcattgcgattccacatggatgggcgacagagtcatcaccaccagcacccgaacttgggccctgcccacctacaacaaccatctctacaagcaaatctccagccaatcaggagccagcaacgacaaccactactttggctacagcaccccttgggggtattttgacttcaacagattccactgccacttttcaccacgtgactggcaaagactcatcaacaacaactggggattccggcccaagagactcaacttcaagctctttaacattcaagtcaaagaggtcacgcagaatgacggtacgacgacgattgccaataaccttaccagcacggttcaggtgtttactgactcggagtaccagctcccgtacgtcctcggctcggcgcatcaaggatgcctcccgccgttcccagcagacgtcttcatggtgccacagtatggatacctcaccctgaacaacgggagtcaggcagtaggacgctcttcattttactgcctggagtactttccttctcagatgctgcgtaccggaaacaactttaccttcagctacacctttgaggacgttcctttccacagcagctacgctcacagccagagtttggaccgtctcatgaatcctctcatcgaccagtacctgtattacttgagcagaacaaacactccaagcggaaccaccacgcagtccaggcttcagttttctcaggccggagcaagtgacattcgggaccagtctaggaactggcttcctggaccctgttaccgccagcagcgagtatcaaagacatctgcggataacaacaacagtgaatactcgtggactggagctaccaagtaccacctcaatggcagagactctctggtgaatccgggcccggccatggccagccacaaggacgatgaagaaaagttttttcctcagagcggggttctcatctttgggaagcaaggctcagagaaaacaaatgtggacattgaaaaggtcatgattacagacgaagaggaaatcaggaccaccaatcccgtggctacggagcagtatggttctgtatctaccaacctgcagggcggcaacacacaagcagctaccgcagatgtcaacacacaaggcgttcttccaggcatggtctggcaggacagagacgtgtacctgcaggggcccatctgggcaaagattccacacacggacggacattttcacccctctcccctcatgggcggattcggacttaaacaccctcctccacagattctcatcaagaacaccccggtacctgcgaatccttcgaccaccttcagtgcggcaaagtttgcttctttcatcacacagtattccacggggcaggtcagcgtggagatcgagtgggagctgcagaaggagaacagcaaacgctggaatcccgagatccagtacacttccaactacaacaaatctgttaatgtggactttactgttgacactaatggcgtgtattcagagcctcgccccattggcaccagatacctgactcgtaatctgtaa

SEQ ID NO: 197 - protein, 735 aa, Artificial Sequence
  source: /note="Description of Artificial Sequence: Synthetic polypeptide"
MAADGYLPDWLEDTLSEGIRQWWKLKPGPPPPKPAERHKDDSRGLVLPGYKYLGPFNGLDKGEPVNEADAAALEHDKAYDRQLDSGDNPYLKYNHADAEFQERLKEDTSFGGNLGRAVFQAKKRVLEPLGLVEEPVKTAPGKKRPVEHSPAEPDSSSGTGKAGQQPARKRLNFGQTGDADSVPDPQPLGQPPAAPSGLGTNTMASGSGAPMADNNEGADGVGNSSGNWHCDSTWMGDRVITTSTRTWALPTYNNHLYKQISSQSGASNDNHYFGYSTPWGYFDFNRFHCHFSPRDWQRLINNNWGFRPKRLNFKLFNIQVKEVTQNDGTTTIANNLTSTVQVFTDSEYQLPYVLGSAHQGCLPPFPADVFMVPQYGYLTLNNGSQAVGRSSFYCLEYFPSQMLRTGNNFTFSYTFEDVPFHSSYAHSQSLDRLMNPLIDQYLYYLSRTNTPSGTTTQSRLQFSQAGASDIRDQSRNWLPGPCYRQQRVSKTSADNNNSEYSWTGATKYHLNGRDSLVNPGPAMASHKDDEEKFFPQSGVLIFGKQGSEKTNVDIEKVMITDEEEIRTTNPVATEQYGSVSTNLQGGNTQAATADVNTQGVLPGMVWQDRDVYLQGPIWAKIPHTDGHFHPSPLMGGFGLKHPPPQILIKNTPVPANPSTTFSAAKFASFITQYSTGQVSVEIEWELQKENSKRWNPEIQYTSNYNKSVNVDFTVDTNGVYSEPRPIGTRYLTRNL

SEQ ID NO: 198 - DNA, 3161 bp, Artificial Sequence
  source: /note="Description of Artificial Sequence: Synthetic polynucleotide"
gattgaatttagcggccgcgaattcgcccttgctgcgtcaactggaccaatgagaactttccattcaatgattgcgtcgacaagatggtgatctggtgggaggagggaaagatgaccgccaaggtcatggagtcggccaaagccattctcggaggaagcaaggtgcgcgtggaccagaaatgtaagtcctcggcccagatagacccgactcccgtgattgtcacctccaacaccaacatgtgcgccgtgattgacgggaactcaacgaccttcgagcaccagcagccgttgcaagaccggatgttcaaatttgaactcacccgccgtctggatcatgactttgggaaggtcaccaagcaggaagtcaaagactttttccggtgggcaaaggatcacgtggttgaggtggagcatgaattctacgtcaaaaagggtggagccaagaaaagacccgcccccagtgacgcagatataagtgagcccaaacgggcgcgcgggtcagttgcgcagccatcgacgtcagacgcggaagcttcgatcaactacgcggacaggtaccaaaacaaatgttctcgtcacgtgggcatgaatctgatgctgtttccctgcagacaatgcgagagaatgaatcaaaattcaaatatctgcttcactcacggacagaaggactgtttagagtgctttcccgtgtcagaatctcaacccgtttctgtcgtcaaaaaggcgtatcagaaactttgctacattcatcatatcatgggaaaggtgccagacgcttgcactgcctgcgatctggtcaatgtggatttggatgactgcatctctgaacaataaatgatttaaatcaggtatggctgccgatggttatcttccagattggctcaaggacactctctctgaaggaataagacagtggtggaagctcaaacctggcccaccaccaccaaagcccgcagagcggcataaggacgacagcgggggtcttgtgcttcctgggtacaagtacctcggacccttcaacggactcgacaagggagagccggtcaacgaggcagacgccgcggccctcgagtacgacaaggcctacgaccggcagctcgacagcggagacaacccgtacctcaagtacaaccacgccgacgcggagtttcaggagcgccttaaagaagatacgtcttttgggggcaacctcggacgagcagtcttccaggcgaaaaagagggttcttgaacctctgggcctggttgaggaacctgttaagacggctccgggaaaaaagaggccggtagagcactctcctgtggagccagactcctcctcgggaacaggaaaagcgggccagcagcctgcgagaaagagattgaattttggtcagactggagacgcagactccgtacctgacccccagcctctcggacagccaccagcagccccctctggtctgggaactaatacgatggctacaggcagtggcgcaccaatggcagacaataacgagggcgccgacggagtgggtaattcctcgggaagttggcattgcgattccacatggatgggcgacagagtcatcaccaccagcacccgaacctgggctctgcccacctacaacaaccatctgtacaagcagatctccagccaatcaggagccagcaacgacaaccactactttggctacagcaccccttgggggtattttgacttcaacagattccactgccacttttcaccacgtgactggcaaagactcatcaacaacaactggggattccggcccaagagactcaacttcaagctctttaacattcaagtcaaggaggtcacgcagaatgacggtacgacgacgattgccaataaccttaccagcacggttcaggtgtttactgactcggagtaccagctcccgtacgtccccggctcggcgcatcaaggatgcctcccgccgttcccagcagacgtcttcatggtgccacagtatggatacctcaccctgaacaacgggagtcaggcagtaggacgctcttcattttactgcctggagtactttccttctcagatgcttcgtaccggaaacaactttaccttcagctacacctttgaggatgttcctttccacagcagctacgctcacagccagagtttggaccgtctcatgaatcctctcatcgaccagtacctgtattacttgagcagaacaaacactccaagcggaaccaccacgcagtccaggcttcagttttctcaggccggagcaagtgacattcgggaccagtctaggaactggcttcctggaccctgttaccgccagcagcgagtatcaaagacagctgcggacaacaacaacagtgaatactcgtggactggagctaccaagtaccacctcaatggcagagactctctggtgaatccgggcccggccatggccagccacaaggacgatgaagaaaagttttttcctcaaagcggggttctcatctttgggaagcaaggctcagagaaaacaaatgtggacattgaaaaggtcatgattacagacgaagaggaaatcagaaccaccaatcccgtggccacggagcagtatggttctgtatctaccaacctccagagcggcaacacacaagcagctactgcagatgtcaacacacaaggcgttcttccaggcatggtctggcaggacagagacgtgcacctgcaggggcctatctgggcaaagattccacacacggacggacattttcacccctctcccctcatgggcggatttggacttaaacaccctcctccacagattctcatcaagaacaccccggtacctgcaaatccttcgaccaccttcagtgcggcaaagtttgcttccttcatcacacagtattccacagggcaggtcagcgtggagatcgagtgggagctgcagaaggagaacagcaaacgctggaaccccgagatccagtacacttccaactacaacaaatctgttaatgtggactttactgtggacactaatggtgtgtattcagagcctcgccccattggcaccagatacctgactcgtaatctgtaattgcttgttaatcaataaaccgtttaattcgtttcagttgaactttggtctctgcgaagggcgaattcgtttaaaccctgcaggactagtccctttagtgagg

SEQ ID NO: 199 - DNA, 3162 bp, Artificial Sequence
  source: /note="Description of Artificial Sequence: Synthetic polynucleotide"
gaattgaatttagcggccgcgaattcgcccttcgcagagaccaaagttcaactgaaacgaattaaacggtttattgattaacaagcaattacagattacgagtcaggtatctggtgccaatggggcgaggctctgaatacacgccattagtgtccacagtaaagtccacattaacagacttgttgtagttggaagtgtactgaatttcgggattccagcgtttgctgttttccttctgcagctcccactcgatctccacgctgacctgtcccgtggagtactgtgtgatgaaggaagcaaactttgccgcactgaaggtggtcgaaggattcgcaggtaccggggtgttcttgatgagaatctgtggaggagggtgtttaagtccgaatccacccatgaggggagaggggtgaaaatgtccgtccgtgtgtggaatctttgcccagatgggcccctgaaggtacacatctctgtcctgccagaccatgcctggaagaacgccttgtgtgttgacatctgcggtagctgcttgtctgttgcctctctggaggttggtagatacagaaccgtactgctccgtagccacgggattggttgtcctgatttcctcttcgtctgtaatcatgaccttttcaatgtccacatttgttttctctgagccttgcttcccaaagatgagaaccccgctctgaggaaaaaacttttcttcattgtccttgtggcttgccatggccgggcccggattcaccagagagtctctgccattgaggtggtacttggtagctccagtccacgagtattcactgttgttgttatccgcagatgtctttgatactcgctgctggcggtaacagggtccaggaagccagttcctagactggtcccgaatgtcactcgctccggcctgagaaaactgaagccttgactgcgtggtggttccacttggagtgtttgttgtgctcaagtaatacaggtactggtcgatgagaggattcatgagacggtccagactctggctgtgagcgtagccgctgtggaaaggaacgtcctcaaaagtgtagctgaaggtaaagttgtttccggtacgcagcatctgagaaggaaagtactccaggcagtaaaatgaagagcgtcctactgcctgactcccgttgttcagggtgaggtatccatactgtggcaccatgaagacgtctgctgggaacggcgggaggcatccttgatgcgccgagccgaggacgtacgggagctggtactccgagtcagtaaacacctgaaccgtgctggtaaggttattggcaatcgtcgtcgtaccgtcattctgcgtgacctctttgacttgaatgttaaagagcttgaagttgagtctcttgggtcggaatccccagttgttgttgatgagtctttgccagtcacgtggtgaaaagtggcagtggaatctgttgaagtcaaaatacccccaaggggtgctgtagccaaagtagtgattgtcgttcgaggctcctgattggctggaaatttgtttgtagaggtggttgttgtaggtgggcagggcccaggttcgggtgctggtggtgatgactctgtcgcccatccatgtggaatcgcaatgccaatttcccgaggaattacccactccgtcggcgccctcgttattgtctgccattggtgcgccactgcctgtagccatcgtattagttcccagaccagagggggctgctggtggctgtccgagaggctgggggtcaggtactgagtctgcgtctccagtctgaccaaaattcaatctttttcttgcaggctgctggcccgcctttccggttcccgaggaggagtctggctccacaggagagtgctctaccggcctcttttttcctggagccgtcttgacaggttccccaaccaggcccagaggttcaagaaccctctttttcgcctggaagactgctcgtccgaggttgcccccaaaagacgtatcttctttaaggcgctcctgaaactccgcgtcggcgtggttgtacttgaggtacgggttgtctccgctgtcgagctgccggtcgtaggctttgtcgtgctcgagggccgcggcgtctgcctcgttgaccggctctcccttgtcgagtccgttgaagggtccgaggtacttgtacccaggaagcacaagacccctgctgtcgtccttatgccgctctgcgggctttggtggtggtgggccaggtttgagcttccaccactgtcttattccttcagagagagtgtcctcgagccaatctggaagataaccatcggcagccatacctgatttaaatcatttattgttcaaagatgcagtcatccaaatccacattgaccagatcgcaggcagtgcaagcgtctggcacctttcccatgatatgatgaatgtagcacagtttctgatacgcctttttgacgacagaaacgggttgagattctgacacgggaaagcactctaaacagtctttctgtccgtgagtgaagcagatatttgaattctgattcattctctcgcattgtctgcagggaaacagcatcagattcatgcccacgtgacgagaacatttgttttggtacctgtctgcgtagttgatcgaagcttccgcgtctgacgtcgatggctgcgcaactgactcgcgcacccgtttgggctcacttatatctgcgtcactgggggcgggtcttttcttggctccaccctttttgacgtagaattcatgctccacctcaaccacgtgatcctttgcccaccggaaaaagtctttgacttcctgcttggtgaccttcccaaagtcatgatccagacggcgggtgagttcaaatttgaacatccggtcttgcaacggctgctggtgttcgaaggtcgttgagttcccgtcaatcacggcgcacatgttggtgttggaggtgacgatcacgggagtcgggtctatctgggccgaggacttgcatttctggtccacgcgcaccttgcttcctccgagaatggctttggccgactccacgaccttggcggtcatcttcccctcctcccaccagatcaccatcttgtcgacacagtcgttgaagggaaagttctcattggtccagttgacgcagcaagggcgaattcgtttaaacctgcaggactagtccctttagtgaggg

SEQ ID NO: 200 - DNA, 3164 bp, Artificial Sequence
  source: /note="Description of Artificial Sequence: Synthetic polynucleotide"
gcgaattgaatttagcggccgcgaattcgcccttcgcagagaccaaagttcaactgaaacgaattaaacggtttattgattaacaagcaattacaaattacgagtcaggtatctggtgccaatggggcgaggctctgaatacacgccattagtgtccacagtaaagtccacattaacagacttgttgtagttggaagtgtactgaatttcgggattccagcgtttgctgttttccttctgcagctcccactcgatctccacgctgacctgtcccgtggagtactgtgtgatgaaggaagcaaactttgccgcactgaaggtggtcgaaggattcgcaggtaccggggtgttcttgatgagaatctgtggaggagggtgtttaggtccgaatccacccatgaggggagaggggtgaaaatgtccgtccgtgtgtggaatctttgcccagatgggcccctgaaggtacacatctctgtcctgccagaccatgcctggaagaacgccttgtgtgttgacatctgcggtagctgcttgtctgttgcctctctggaggttggtagatacagaaccatactgctccgtagccacgggattggttgtcctgatttcctcttcgtctgtaatcatgaccttttcaatgtccacatttgttttctctgagccttgcttcccaaagatgagaaccccgctctgaggaaaaaacttttcttcattgtccttgtggcttgccatggccgggcccggattcaccagagagtctctgccattgaggtggtacttggtagctccagtccacgagtattcactgttgttgttatccgcagatgtctttgatactcgctgctggcggtaacagggtccaggaagccagttcctagactggtcccgaatgtcactcgctccggcctgagaaaactgaagccttgactgcgtggtggttccacttggagtgtttgttgtgctcaagtaatacaggtactggtcgatgagaggattcatgagacggtccagactctggctgtgagcgtagctgctgtggaaaggaacgtcctcaaaagtgtagctgaaggtaaagttgtttccggtacgcagcatctgagaaggaaagtactccgggcagtaaaatgaagagcgtcctactgcctgactcccgttgctcagggtgaggtatccatactgtggcaccatgaagacgtctgctgggaacggcgggaggcatccttgatgcgccgagccgaggacgtacgggagctggtactccgagtcagtaaacacctgaaccgtgctggtaaggttattggcaatcgtcgtcgtaccgtcattctgcgtgacctctttgacttgaatgttaaagagcttgaagttgagtctcttgggtcggaatccccagttgttgttgatgagtctttgccagtcacgtggtgaaaagtggcagtggaatctgttgaagtcaaaatacccccaaggggtgctgtagccaaagtagtgattgtcgttcgaggctcctgattggctggaaatttgtctgtagaggtggttgttgtaggtgggcagggcccaggttcgggtgctggtggtgatgactctgtcgcccatccatgtggaatcgcaatgccgatttcccgaggaattacccactccgtcggcgccctcgttattgtctgccattggtgcgccactgcctgtagccatcgtattagttcccagaccagagggggctgctggtggctgtccgagaggctgggggtcaggtactgagtctgcgtctccagtctgaccaaaattcaatctttttcttgcaggctgctggcccgcctttccggttcccgaggaggagtctggctccacaggagagtgctctaccggcctcttttttcccggagccgtcttaacaggttccccaaccaggcccagaggttcaagaaccctctttttcgcctggaagactgctcgtccgaggttgcccccaaaagacgtatcttctttaaggcgctcctgaaactccgcgtcggcgtggttgtacttgaggtacgggttgtctccgctgtcgagctgccggtcgtaggctttgtcgtgctcgagggccgcggcgtctgcctcgttgaccggctctcccttgtcgagtccgttgaagggtccgaggtacttgtacccaggaagcacaagacccctgctgtcgtccttatgccgctctgcgggctttggtggtggtgggccaggtttgagcttccaccactgtcttattccttcagagagagtgtcctcgagccaatctggaagataaccatcggcagccatacctgatttaaatcatttattgttcaaagatgcagtcatccaaatccacattgaccagatcgcaggcagtgcaagcgtctggcacctttcccatgatatgatgaatgtagcacagtttctgatacgcctttttgacgacagaaacgggttgagattctgacacgggaaagcactctaaacagtctttctgtccgtgagtgaagcagatatttgaattctgattcattctctcgcattgtctgcagggaaacagcatcagattcatgcccacgtgacgagaacatttgttttggtacctgtctgcgtagttgatcgaagcttccgcgtctgacgtcgatggctgcgcaactgactcgcgcacccgtttgggcccacttatatctgcgtcactgggggcgggtcttttcttggctccaccctttttgacgtagaattcatgctccacctcaaccacgtgatcctttgcccaccggaaaaagtctttgacttcctgcttggtgaccttcccaaagtcatgatccagacggcgggtgagttcaaatttgaacatccggtcttgcaacggctgctggtgttcgaaggtcgttgagttcccgtcaatcacggcgcacatgttggtgttggaggtgacgatcacgggagtcgggtctatctgggccgaggacttgcatttctggtccacgcgcaccttgcttcctccgagaatggctttggccgactccacgaccttggcggtcatcttcccctcctcccaccagatcaccatcttgtcgacacagtcgttgaagggaaagttctcattggtccagttgacgcagcaagggcgaattcgtttaaacctgcaggactagtccctttagtgaggg

SEQ ID NO: 201 - DNA, 3163 bp, Artificial Sequence
  source: /note="Description of Artificial Sequence: Synthetic polynucleotide"
accctcactaaagggactagtcctgcaggtttaaacgaattcgcccttgctgcgtcaactggagcaatgagaactttcccttcaacgactgtgtcgacaagatggtgatttggtgggaggaggggaagatgaccgccaaggtcgtggagtcggccaaagccattctcggaggaagcaaggtgcgcgtggaccagaaatgcaagtcctcggcccagatagatccgactcccgtgatcgtcacctccaacaccaacatgtgcgccgtgattgacgggaactcaacgaccttcgaacaccagcagccgttgcaagaccggatgttcaaatttgaactcacccgccgtctggatcatgactttgggaaggtcaccaagcaggaagtcaaagactttttccggtgggcaaaggatcacgtggttgaggtggagcatggattctacgtcaaaaagggtggagccaagaaaagacccgcccctagtgacgcagatataagtgagcccaaacgggtgcgcgagtcagttgcgcagccatcgacgtcggacgcggaagcttcgatcaactacgcggacaggtaccaaaacaaatgttctcgtcacgtgggcatgaatctgatgctgtttccctgcagacaatgcgagagaatgaatcaaaattcaaatatctgcttcactcacggacagaaagactgtttagagtgctttcccgtgtcagaatctcaacctgtttctgtcgtcaaaaaggcgtatcagaaactgcgctacattcatcatatcatgggaaaggtgccagacgcttgcactgcctgcgatctggtcaatgtggatttggatgactgcatctctgaacaataaatgatttaaatcaggtatggctgccgatggttatcttccagattggctcgaggacactctctctgaaggaataagacagtggtggaagctcaaacctggcccaccaccaccaaagcccgcagagcggcataaggacgacagcaggggtcttgtgcttcctgggtacaagtacctcggacccttcaacggactcgacaagggagagccggtcaacgaggcagacgccgcggccctcgagcacgacaaggcctacgaccggcagctcgacagcggagacaacccgtacctcaagtacaaccacgccgacgcggagtttcaggagcgtcttaaagaagatacgtcttttgggggcaacctcggacgagcagtcttccaggcgaaaaagagggttcttgaacctctgggcctggttgaggaacctgttaagacggctccgggaaaaaagaggccggtagagcactctcctgcggagccagactcctcctcgggaaccggaaaagcgggccagcagcctgcaagaaaaagactgaatttcggtcagactggagacgcagactccgtacctgacccccagcctctcggacagccaccagcagcccccacaagtttgggatctactacaatggctacaggcagtggcgcaccaatggcagacaataacgagggtgccgatggagtgggtaattcctcaggaaattggcattgcgattcccaatggctgggcgacagagtcatcaccaccagcacccgaacctgggccctgcccacctacaacaaccacctttacaagcaaatctccagccaatcaggagcctcaaacgacaaccactactttggctacagcaccccctgggggtattttgacttcaacagattccactgccacttttcaccacgtgactggcaaagactcatcaacaacaactggggattccgacccaagagactcaacttcaagctctttaacattcaagtcaaagaggtcacgcagaatgacggtacgacgacgattgccaataaccttaccagcacggttcaggtgtttactgactcggagtaccagctcccgtacgtcctcggctcggcgcatcaaggatgcctcccgccgtttccagcggacgtcttcatggtcccacagtatggatacctcaccctgaacaacgggagtcaggcggtaggacgctcttccttttactgcctggagtgctttccttctcagatgctgcgtactggaaacaactttcagttcagctacacttttgaagacgtgcctttccacagcagctacgctcacagccagagtttggatcggctgatgaatcctctgatcgaccagtacctgtattatctaaacagaacacaaacagctagtggaactcagcagtctcggctactgtttagccaagctggacccacaagcatgtctcttcaagctaaaaactggctgcctggaccgtgttatcgccagcagcgtttgtcaaagcaggcaaacgacaacaacaacagcaactttccctggactggagctaccaagtaccacctcaatggcagagactctttggtgaacccgggcccggccatggccagccacaaggacgatgaagaaaagtttttccccatgcatggaaccctaatatttggtaaagaaggaacaaatgctaccaacgcggaattggaaaatgtcatgattacagatgaagaggaaatcaggaccaccaatcccgtggctacagagcagtacggatatgtgtcaaataatttgcaaaactcaaatactgctgcaagtactgaaactgtgaatcaccaaggagcattacctggtatggtgtggcaggatcgagacgtgtacctgcagggacccatttgggccaagattcctcacaccgatggacactttcatccttctccactgatgggaggttttggactcaaacacccgcctcctcagattatgatcaaaaacactcccgttccagccaatcctcccacaaacttcagttctgccaagtttgcttccttcatcacacagtattccacgggacaggtcagcgtggagatcgagtgggagctgcagaaggagaacagcaaacgctggaatcccgaaattcagtacacttccaactacaacaaatctgttaatgtggactttactgtggacactaatggtgtgtattcagagcctcgccccattggcaccagatacctgactcgtaatctgtaattgcttgttaatcaataaaccgtttaattcgtttcagttgaactttggtctctgcgaagggcgaattcgcggccgctaaattcaattcgcc

SEQ ID NO: 202 - protein, 735 aa, Artificial Sequence
  source: /note="Description of Artificial Sequence: Synthetic polypeptide"
MAADGYLPDWLEDTLSEGIRQWWKLKPGPPPPKPAERHKDDSRGLVLPGYKYLGPFNGLYKGEPVDEADAAALEHDKAYDRQLDSGDNPYLKYNHADAEFQERLKEDTSFGGNLGRAVFQAKKRVLEPLGLVGEPVKTAPGKKRPVEHSPVEPDSSSGTGKAGNQPARKRLNFGQTGDADSVPDPQPLGQPPAAPSGLGSTTMATGSGAPVADNNEGADGVGNSSGNWHCDSQWLGDRVITTSTRTWALPTYNNHLYKQISSQSGASNDNHYFGYSTPWGYFDFNRFHCHFSPRDRQRLINNNWGFRPKRLNFKLFNIQVKEVTQNDGTTTIANNLTSTVQVFTDSGYQLPYVLGLAHQGCLPPFPADVFMVPQYGYLTLNNGSQAVGRSSFYCLEYFPSQMLRTGNNFQFSYTFEDVPFHSSYAHSQSLDRLMNPLIDQYLYYLNKTQSNSGTLQQSRLLFSQAGPTSMSLQAKNWLPGPCYRQQRLSKQANDNNNSNFPWTAATKYHLNGRDSLVNPGPAMASHKDDEEKFFPMHGTLIFGKQGTNANDADLDNVMITDEEEIRTTNPVATEQYGYVSNNLQNSNTGPTTGTVNHQGALPGMVWQDRDVYLQGPIWAKIPHTDGHFHPSPLMGGFGLKHPPPQIMIKNTPVPANPPTNFSSAKFASFITQYSTGQVSVEIEWELQKEDSKRWNPEIQYTSNYNKPVNVDFTVDTNGVYSEPRPIGTRYLTRNL

SEQ ID NO: 203 - DNA, 2208 bp, Artificial Sequence
  source: /note="Description of Artificial Sequence: Synthetic polynucleotide"
atggctgccgatggttatcttccagattggctcgaggacactctctctgaaggaataagacagtggtggaagctcaaacctggcccaccaccaccaaagcccgcagagcggcataaggacgacagcaggggtcttgtgcttcctgggtacaagtacctcggacccttcaacggactctacaagggagagccggtcgacgaggcagacgccgcggccctcgagcacgacaaggcctacgaccggcagctcgacagcggagacaacccgtacctcaagtacaaccacgccgacgcggagtttcaggagcgccttaaagaagatacgtcttttgggggcaacctcggacgagcagtcttccaggccaaaaagagggttcttgaacctctgggcttggttggggagcctgttaaaacggctccgggaaaaaagaggccggtagagcactctcctgtggagccagactcctcctcgggaaccggaaaagcgggcaaccagcctgcaagaaaaagattgaattttggtcagactggagacgcagactccgtacctgacccccagcctctcggacagccaccagcagccccctctggtctgggatctactacaatggctacaggcagtggcgcaccagtggcagacaataacgagggtgccgatggagtgggtaattcctcaggaaattggcattgcgattcccaatggctgggcgacagagtcatcaccaccagcacccgaacctgggctctgcccacctacaataaccacctctacaagcaaatctccagccaatcaggagcctcaaacgacaaccactactttggctacagcaccccctgggggtattttgacttcaacagattccactgccacttttcaccacgtgaccggcaaagactcatcaacaacaactggggattccgaccaaaaagactcaacttcaagctctttaacattcaagtcaaagaggtcacgcagaatgacggtacgacgacgattgccaataaccttaccagcacggttcaggtgtttactgactcggggtaccagctcccgtacgtcctcggcttggcgcatcaaggatgcctcccgccgttcccagcagacgtcttcatggtgccacagtatggatacctcaccctgaacaacgggagtcaggcggtaggacgctcttccttttactgcctggagtactttccttctcagatgctgcgtactggaaacaactttcagttcagctacacctttgaagacgttcctttccacagcagctacgctcacagccagagtctggatcggctgatgaatcctctgatcgaccagtacctgtattatctgaacaagacacaatcaaatagtggaactcttcagcagtctcggctactgtttagccaagctggacccaccagcatgtctcttcaagctaaaaactggctgcctggaccttgctacagacagcagcgtctgtcaaagcaggcaaacgacaacaacaacagcaactttccctggactgcggctacaaagtatcatctaaatggccgggactcgttggttaatccaggaccagctatggccagccacaaagacgatgaagaaaagtttttccccatgcatggaaccctgatatttggtaaacaaggaacaaatgctaacgacgcggatttggacaatgtcatgattacagatgaagaagaaatccgcaccaccaatcccgtggctacggagcagtacggatatgtgtcaaataatttgcaaaactcaaatactggtccaactactggaactgtcaatcaccaaggagcgttacctggtatggtgtggcaggatcgagacgtgtacctgcagggacccatttgggccaagattcctcacaccgatggacactttcatccttctccacttatgggaggttttggactcaaacacccacctcctcagatcatgattaaaaacactcccgttccagccaatcctcccacaaacttcagttctgccaagtttgcttctttcatcacacagtattccacgggacaagtcagcgtggagatcgagtgggagctgcagaaggaggacagcaaacgctggaaccccgagatccagtacacttccaactataacaaacctgttaatgtggactttactgtggacactaatggtgtgtattcagagcctcgccccattggcaccagatacctgactcgtaatctgtaa

SEQ ID NO: 204 - DNA, 3161 bp, Artificial Sequence
  source: /note="Description of Artificial Sequence: Synthetic polynucleotide"
cgaattgatttagcggccgcgaattcgcccttcgcagagaccaaagttcaactgaaacgaattaaacggtttattgattaacaagcaattacagattacgagtcaggtatctggtgccaatggggcgaggctctgaatacacaccattagtgtccacagtaaagtccacattaacagatttgttgtagttggaagtgtactggatctcgggattccagcgtttgctgttctccttctgtagctcccactcgatctccacgctgacccgccccgtggaatactgtgtgatgaaggaagcaaactttgccgcactgaaggtggtcgaaggattcgcaggtaccggggtgtttttgatgagaatctgtggaggagggtgtttaagtccgaatccgcccatgaggggagaggggtgaaaatgtccgtccgtgtgcggaatctttgcccagataggcccctgcaggtacacgtctctgtcctgccagaccatgcctggaagaacgccttgtgtgttgacatctgcagtagatgcttgtgtgttgccgctctggaggttggtagatacagaaccatactgctccgtggccacgggattggtggttctgatttcctcttcgtctgtaatcatgaccttttcaatgtccacatttgttttctctgatccttgttttccaaagatgagaaccccgctctgaggaaaaaacttttcttcatcgtccttgtggctggccattgccgggcccggattcaccagagagtctctgccattgaggtggtacttggtagctccaatccacgagtattcactgttgttgttgtccgcagatgtctttgatactcgctgctggcggtaacagggtccaggaagccagttcctagactgatcccgaatgtcactcgctccggcctgagaaaactgaagcctggactgcgtggtggttccgcttggagtgtttgttctgctcaagtaatacaggtactggtcgatgagaggattcatgagacggtccaaactctggctgtgagcgtagctgctgtggaaaggaacatcctcaaaggtgtagctgaaggtaaagttgtttccggtacgcagcatctgagaagggaagtactccaggcagtaaaatgaagagcgtcctactgcctgactcccgttgttcagggtgaggtatccatactgtggcaccatgaagacgtctgctgggaacggcgggaggcatccttgatgcgccgagccgaggacgtacgggagctggtactccgagtcagtaaacacctgaaccgtgctggtaaggttattggcaatcgtcgtcgtaccatcattctgcgtgacctctctgacttgaatgttaaagagcttgaagttgagtctcttgggccggaatccccagttgttgttgatgagtctttgccagtcacgtggtgaaaagtggcagtggaatctgttgaagtcaaaatacccccaaggggtgctgtagccaaagtagtggttgtcgttgctggctcctgattggctggaaatctgcttgtacagatggttgttgtaggtgggcagagcccaggttcgggtgctggtggtgatgactctgtcgcccatccatgtggaatcgcaatgccaatttcccgaggaattacccactccgtcggcgccatcgttattgtctgccattggtgcgccactgcctgtagccatcgtattagttcccagaccagagggggctgctggtggctgtccgagaggctgggggtcaggtacggagtctgcgtctccagtctgaccgaaattcaatctctttcttgcaggctggttgcccgcttttccggttcccgaggaggagtctggctccacaggagagtgctctaccggcctcttttttcccggagccgtcttaacaggctcctcaaccaggcccagaggttcaagaaccctcttttttgcctggaagactgctcgtccgaggttgcccccaaaagacgtatcttctttaaggcgctcctgaaactccgcgtcggcgtggtcgtacttgaggtacgggttgtctccgctgtcgagctgccggtcgtaggccttgtcgtgctcgagggccgcggcgtctgcctcgttgaccggctctcccttgtcgagtccgttgaagggtccgaggtacttgtacccaggaagcacaagacccctgctgtcgtccttatgccgctctgcgggctttggtggtggtgggccaggtttgagcttccaccactgtcttattccttcagagagagtgtcctcgagccaatctggaagataaccatcggcagccatacctgatttaaatcatttattgttcagagatgcagtcatccaaatccacattgaccagatcgcaggcagtgcaagcgtctggcacctttcccatgatatgatgaatgtagcaaagtttctgatacgcctttttgacgacagaaacgggttgagattctgacacgggaaagcactctaaacagtctttctgtccgtgagtgaagcagatatttgaattctgattcattctctcgcattgtctgcagggaaacagcatcagattcatgcccacgtgacgagaacatttgttttggtacctgtccgcgtagttgatcgaagcttccgcgtctgacgtcgatggctgcgcaactgactcgcgcgcccgtttgggctcacttatatctgcgtcactgggggcgggtcttttcttggctccaccctttttgacgtagaattcatgctccacctcaaccacgtgatcctttgcccaccggaaaaagtctttcacttcctgcttggtgaccttcccaaagtcatgatccagacggcgggttagttcaaatttgaacatccggtcttgcaacggctgctggtgttcgaaggtcgttgagttcccgtcaatcacggcgcacatgttggtgttggaggtggcgatcacgggagtcgggtctatctgggccgaggacttgcacttttggtccacgcgcaccttgcttcctccgagaatggcttcggccgattccacgaccttggcggtcatctttccctcctcccaccagatcaccatcttgtcgacacagtcgttgaagggaaagttctcattggtccagttgacgcagcaagggcgaattcgtttaaacctgcaggaactagtcccttagtgagg

SEQ ID NO: 205 - protein, 735 aa, Artificial Sequence
  source: /note="Description of Artificial Sequence: Synthetic polypeptide"
MAADGYLPDWLEDTLSEGIRQWWKLKPGPPPPKPAERHKDDSRGLVLPGYKYLGPFNGLYKGEPVNEADAAALEHDKAYDRQLDSGDNPYLKYNHAGAEFQERLKEDTSFGGNLGRAVFQAKKRVLEPLGLVEEPVKTAPGKKRPVEHSPVEPDSSSGTGKAGNQPARKRLNFGQTGDADSVPDPQPLGQPPAAPSGLGSTTMATGSGAPVADNNEGADGVGNSSGNWHCDSQWLGDRVITTSTRTWALPTYNNHLYKQISSQSGASNDNHYFGYSTPWGYFDFNRFHCHFSPRDWQRLINNNWGFRPKRLNFKLFNIQVKEVTQNDGTTTIANNLTSTVQVFTDSEYQLPYVLGSAHQGCLPPFPADVFMVPQYGYLTLNNGSQAVGRSSFYCLEYFPSQMLRTGNNFQFSYTFEDVPFHSSYAHSQSLDRLMNPLIDQYLYYLNKTQSNSGTLQQSRLLFSQAGPTSMSLQAKNWLPGPCYRQQRLSKQANDNNNSNFPWTAATKYHLNGRDSLVNPGPAMASHKDDEEKFFPMHGTLIFGKQGTNANDADLDNVMITDEEEIRTTNPVATEQYGYVSNNLQDSNTGPTTGTVNHQGALPGMVWQDRDVYLQGPIWAKIPHTDGHFHPSPLMGGFGLKHPPPQIMIKNTPVPANPPTNFSSAKFASFITQYSTGQVSVEIEWELQKENSKRWNPEIQYTSNYNKSVNVDFTVDTNGVYSEPRPIGTRYLTRNL

SEQ ID NO: 206 - DNA, 2208 bp, Artificial Sequence
  source: /note="Description of Artificial Sequence: Synthetic polynucleotide"
atggctgccgatggttatcttccagattggctcgaggacactctctctgaaggaataagacagtggtggaagctcaaacctggcccaccaccgccaaagcccgcagagcggcataaggacgacagcaggggtcttgtgcttcctgggtacaagtacctcggacccttcaacggactctacaagggagagccggtcaacgaggcagacgccgcggccctcgagcacgacaaggcctacgaccggcagctcgacagcggagacaacccgtacctcaagtacaaccacgccggcgcggagtttcaggagcgccttaaagaagatacgtcttttgggggcaacctcggacgagcagtcttccaggccaaaaagagggttcttgaacctctgggcttggttgaggagcctgttaaaacggctccgggaaaaaagaggccggtagagcactctcctgtggagccagactcctcctcgggaaccggaaaagcgggcaaccagcctgcaagaaaaagattgaattttggtcagactggagacgcagactccgtacctgacccccagcctctcggacagccaccagcagccccctctggtctgggatctactacaatggctacaggcagtggcgcaccagtggcagacaataacgagggtgccgatggagtgggtaattcctcaggaaattggcattgcgattcccaatggctgggcgacagagtcatcaccaccagcacccgaacctgggctctgcccacctacaacaaccacctctacaagcaaatctccagccaatcaggagcctcaaacgacaaccactactttggctacagcaccccctgggggtattttgacttcaacagattccactgccacttttcaccacgtgactggcaaagactcatcaacaacaactggggattccgaccaaagagactcaacttcaagctctttaacattcaagtcaaagaggtcacgcagaatgacggtacgacgacgattgccaataaccttaccagcacggttcaggtgtttactgactcggagtaccagctcccgtacgtcctcggctcggcgcatcaaggatgcctcccgccgttcccagcagacgtcttcatggtgccacagtatggatacctcaccctgaacaacgggagtcaggcggtaggacgctcttccttttactgcctggagtactttccttctcagatgctgcgtactggaaacaactttcagttcagctacacctttgaagacgttcctttccacagcagctacgctcacagccagagtctggatcggctgatgaatcctctgatcgaccagtacctgtattatctgaacaagacacaatcaaatagtggaacccttcagcagtctcggctactgtttagccaagctggacccaccagcatgtctcttcaagctaaaaactggctgcctggaccttgctacagacagcagcgtctgtcaaagcaggcaaacgacaacaacaacagcaactttccctggactgcggctacaaagtatcatctaaatggccgggactcgttggttaatccaggaccagctatggccagccacaaagacgatgaagaaaagtttttccccatgcatggaaccctgatatttggtaaacaaggaacaaatgctaacgacgcggatttggacaatgtcatgattacagatgaagaagaaatccgcaccaccaatcccgtggctacggagcagtacggatatgtgtcaaataatttgcaagactcaaatactggtccaactactggaactgtcaatcaccaaggagcgttacctggtatggtgtggcaggatcgagacgtgtacctgcagggacccatttgggccaagattcctcacaccgatggacactttcatccttctccacttatgggaggttttggactcaaacacccacctcctcagatcatgattaaaaacactcccgttccagccaatcctcccacaaacttcagttctgccaagtttgcttctttcatcacacagtattccacgggacaagtcagcgtagagatcgagtgggagctgcagaaggagaacagcaaacgctggaaccccgagatccagtacacttccaactataacaaatctgttaatgtggactttactgtggacactaatggtgtgtattcagagcctcgccccattggcaccagatacctgactcgtaatctgtaa

SEQ ID NO: 207 - protein, 738 aa, Artificial Sequence
  source: /note="Description of Artificial Sequence: Synthetic polypeptide"
MAADGYLPDWLEDNLSEGIREWWDLKPGAPKPKANQQKQDDGRGLVLPGCKYLGPFNGLDKGEPVNAADAAALEHDKAYDQQLKAGDNPYLRYNHADAEFQERLQEDTSFGGNLGRAVFQAKKRVLEPLGLVEEGAKTAPGKKRPVEPSPQRSPDSSTGIGKTGQQPAKKRLNFGQTGDSESVPDPQPIGEPPAGPSGLGSGTMAAGGGAPMADNNEGADGVGSSSGNWHCDSTWLGDRVITTSTRTWALPTYNNHLYKQISNGTSGGSTNDNTYFGYSTPWGYFDFNRFHCHFSPRDWQRLINNNWGFRPKRLNFKLFNIQVKEVTQNEGTKTIANNLTSTIQVFTDSEYQLPYVLGSAHQGCPPPFPADVFMIPQYGYLTLNNGSQAVGRSSFYCLEYFPSQMRRTGNNFEFSYQFEDVPFHSSYAHSQSLDRLMNPLIDQYLYYLSRTQSTGGTAGTQQLLFSQAGPNNMSAQAKNWLPGPCYRQQRVSTTLSQNNNSNFAWTGATKYHLNGRDSLVNPGVAMATHKDDEERFFPSSGVLMFGKQGAGKDNVDYSSVMLTSEEEIKTTNPVATEQYGVVADNLQQQNAAPIVGAVNSQGALPGMVWQNRDVYLQGPIWAKIPHTDGNFHPSPLMGGFGLKHPPPQILIKNTPVPADPPTTFSQAKLASFITQYSTGQVSVEIEWELQKENSKRWNPEIQYTSNYNKSVNVDFTVDTNGVYSEPRPIGTRYLTRNL

SEQ ID NO: 208 - DNA, 2217 bp, Artificial Sequence
  source: /note="Description of Artificial Sequence: Synthetic polynucleotide"
atggctgccgatggttatcttccagattggctcgaggacaacctctctgagggcattcgcgagtggtgggacttgaaacctggagccccgaaacccaaagccaaccagcaaaagcaggacgacggccggggtctggtgcttcctggctgcaagtacctcggacccttcaacggactcgacaagggggagcccgtcaacgcggcggacgcagcggccctcgagcacgacaaggcctacgaccagcagctcaaagcgggtgacaatccgtacctgcggtataaccacgccgacgccgagtttcaggagcgtctgcaagaagatacgtcttttgggggcaacctcgggcgagcagtcttccaggccaagaagcgggttctcgaacctctcggtctggttgaggaaggcgctaagacggctcctggaaagaagagaccggtagagccatcaccccagcgttctccagactcctctacgggcatcggcaagacaggccagcagcccgcgaaaaagagactcaactttgggcagactggcgactcagagtcagtgcccgaccctcaaccaatcggagaaccccccgcaggcccctctggtctgggatctggtacaatggctgcaggcggtggcgctccaatggcagacaataacgaaggcgccgacggagtgggtagttcctcaggaaattggcattgcgattccacatggctgggcgacagagtcatcaccaccagcacccgaacctgggccctccccacctacaacaaccacctctacaagcaaatctccaacgggacatcgggaggaagcaccaacgacaacacctacttcggctacagcaccccctgggggtattttgactttaacagattccactgccacttctcaccacgtgactggcagcgactcatcaacaacaactggggattccggcccaagagactcaacttcaagctcttcaacatccaggtcaaggaggtcacgcagaatgaaggcaccaagaccatcgccaataaccttaccagcacgattcaggtctttacggactcggaataccagctcccgtacgtcctcggctctgcgcaccagggctgcccgcctccgttcccggcggacgtcttcatgattcctcagtacgggtacctgactctgaacaacggcagtcaggccgtgggccgttcctccttctactgcctggagtactttccttctcaaatgcggagaacgggcaacaactttgagttcagctaccagtttgaggacgtgccttttcacagcagctacgcgcatagccaaagcctggaccggctgatgaaccccctcatcgaccagtacctgtactacctgtctcggactcagtccacgggaggtaccgcaggaactcagcagttgctattttctcaggccgggcctaataacatgtcggctcaggccaaaaactggctacccgggccctgctaccggcagcaacgcgtctccacgacactgtcgcaaaataacaacagcaactttgcttggaccggtgccaccaagtatcatctgaatggcagagactctctggtaaatcccggtgtcgctatggcaacgcacaaggacgacgaagagcgattttttccatccagcggagtcttgatgtttgggaaacagggagctggaaaagacaacgtggactatagcagcgttatgctaaccagtgaggaagaaatcaaaaccaccaacccagtggccacagaacagtacggcgtggtggccgataacctgcaacagcaaaacgccgctcctattgtaggggccgtcaacagtcaaggagccttacctggcatggtctggcagaaccgggacgtgtacctgcagggtcctatctgggccaagattcctcacacggacggcaactttcatccttcgccgctgatgggaggctttggactgaaacacccgcctcctcagatcctgattaagaatacacctgttcccgcggatcctccaactaccttcagtcaagccaagctggcgtcgttcatcacgcagtacagcaccggacaggtcagcgtggaaattgaatgggagctgcagaaagagaacagcaagcgctggaacccagagattcagtatacttccaactataacaaatctgttaatgtggactttactgtggacactaatggtgtgtattcagagcctcgccccattggcaccagatacctgactcgtaatctgtaa

SEQ ID NO: 209 - DNA, 3167 bp, Artificial Sequence
  source: /note="Description of Artificial Sequence: Synthetic polynucleotide"
attgaatttagcggccgcgaattcgcccttcgcagagaccaaagttcaactgaaacgaattaaacggtttattgattaacaagcaattacagattacgagtcaggtacctggtgccaatggggcgaggctctgaatacacaccattagtgtccacagtaaagtccacattaacagatttgttgtagttggaagtgtactgaatctcgggattccagcgtttgctgttctccttctgcagctcccactcgatctccacgctgacctgccccgtggagtactgtgtaatgaaggaagcaaactttgccgcactgaaggtagtcgaaggattcgcaggtaccggggtgttcttgatgagaatctgcgggggagggtgtttaagtccgaatccgcccatgaggggagaggggtgaaaatgtccgtccgtgtgtggaatctttgcccagatgggcccctgcaggtacacgtctctgtcctgccacaccatgcctggaagaacgccttgtgtgttgacatctgaggtagctgcttgtgtgttgccgctctggaggttggtagatacagaaccatactgctccgtagccacgggattggtggtcctgatttcctcttcgtctgtaatcatgaccttttcaatgtccacattagtttttcccgagtcttgttttccaaagatgagaaccccgctctgaggaaaaaacttttcttcatcgtccttgtggctggccatggccgggcccggattcaccagagagtctcttccattaaggtggtacttggtagctccagtccacgagtattcactgttgttgttatccgcagatgtctttgatactcgctgctggcggtaacagggtccaggaagccagttcctagactggtcccgaatgtcacttgctccggcctgagaaaactgaagccttgactgcgtggtggttccgcttggagtgtttgttctgctcaagtaatacaggtactggtcgatgagaggattcatgagacggtccaaactctggctgtgggcgtagctgctgtggaaaggaacgtcctcaaaggtgtagctgaaggtaaagttgtttccggtacgcagcatctgagaaggaaagtactccaggcagtaaaatgaagagcgtcctactgcctgactcccgttgttcagggtgaggtatccatactgtggcaccatgaagacgtctgctgggaacggcgggaggcatccttgatgcgccgagccgaggacgtacgggagctggtactccgagtcagtaaacacctgaaccgtgctggtaaggttattggcaatcgtcgtcgtaccgtcattctgcgtgacctccttgacttgaatgttaaagagcttgaagttgagtcttttgggccggaatccccaattgttgttgatgagtctttgccagtcacgtggcgaaaagtggcagtggaatctgttgaagtcaaaatacccccaaggggtgctgtagccaaagtagtggttgtcgtttgaggctcctgattggctggaaatctgcttgtagaggtggttgttgtaggtgggcagagcccaggtgcgggtgctggtggtgatgactctgtcgcccatccatgtggaatcgcaatgccaatttcccgaggaattacccactccgtcggcgccctcgttattgtctgccattggtgcgccactgcctgtagccatcgtattagttcccagaccagagggggctgctggtggctgtccgagaggctgggggtcaggtacggagtctgcgtctccagtctgaccgaaattcaatctctttcttgcaggctgctggcccgcttttccggttcccgaggaggagtctggctccgcaggagagtgctctaccggcctcttttttcccggagccgtcttaacaggttcctcaaccaggcccagaggttcaagaaccctctttttcgcctggaagactgctcgtccgaggttgcccccaaaagacgtatcttctttaagacgctcctggaactccgcgtcggcgtggttgtacttggggtacgggttgtctccgctgtcgagctgccggtcgtaggccttgtcgtgctcgagggccgcggcgtctgcctcgttgaccggctctcccttgtcgagtccgttgaagggtccaaggtacttgtacccaggaagcacaagacccctgctgtcgtccttatgccgctctgcgggctttggtggtggtgggccaggtttgagcttccaccactgtcttattccttcagagagagtgtcctcgagccaatctggaagataaccatcggcagccatacctgatttaaatcatttattgttcagagatgcagtcatccaaatccacattgaccagatcgcaagcagtgcaagcgtctggcacctttcccatgatatgatgaatgtagcacagtttctgatacgcctttttgacgacagaaacgggttgagattctgacacgggaaagcactctaaacagtctttctgtccgtgagtgaagcagatatttgaattctgattcattctctcgcattgtctgcagggaaacagcatcagattcatgcccacgtgacgagaacatttgttttggtacctgtccgcgtagttgattgaagcttccgcgtctgacgtcgatggctgcgcaactgactcgcgcgcccgtttgggctcacttatatctgcgtcactgggggcgggtctttttttggctccaccctttttgacgtagaattcatgctctacctcaaccacgtgatcctttgcccaccggaaaaagtctttgacttcctgcttggtgaccttcccaaagtcatgatccagacggcgggtgagttcaaatttgaacatccggtcttgcaacggctgctggtgttcgaaggtcgttgagttcccgtcaatcactgcgcacatgttggtgttggaggtgacaatcacgggagtcgggtctatctgggccgaggacttgcatttctggtccacgcgcaccttgcttcctccgagaatggctttggccgactccacgaccttggcggtcatcttcccctcctcccaccagatcaccatcttgtcgacgcaatcattgaaaggaaagttctcattggtccagttgacgcagccgtagaaagggcgaattcgtttaaacctgcaggactagtccctttagtgagggt

SEQ ID NO: 210 - DNA, 3161 bp, Artificial Sequence
  source: /note="Description of Artificial Sequence: Synthetic polynucleotide"
aattgaatttagcggccgcgaattcgcccttcgcagagaccaaagttcaactgaaacgaattaaacggtttattgattaacaagcaattacagattacgagtcaggtatctggtgccaatggggcgaggctctgaatacacaccattagtgtccacagtaaagtccacattaacagatttgttgtagttggaagtgtactgaatctcgggattccagcgtttgctgttctccttctgcagctcccactcgatctccacgctgacctgccccgtggagtactgtgtaatgaaggaagcaaactttgccgcactgaaggtagtcgaaggattcgcaggtaccggggtgttcttgatgagaatctgcgggggagggtgtttaagtccgaatccgcccatgaggggagaggggtgaaaatgtccgtccgtgtgtggaatctttgcccagatgggcccctgcaggtacacgtctctgtcctgccacaccatgcctggaagaacgccttgtgtgttgacatctgaggtagctgcttgtgtgttgccgctctggaggttggtagatacagaaccatactgctccgtagccacgggattggtggtcctgatttcctcttcgtctgtaatcatgaccttttcaatgtccacattagtttttcccgagtcttgttttccaaagatgagaaccccgctctgaggaaaaaacttttcttcatcgtccttgtggctggccatggccgggcccggattcaccagagagtctcttccattaaggtggtacttggtagctccagtccacgagtattcactgttgttgttatccgcagatgtctttgatactcgctgctggcggtaacagggtccaggaagccagttcctagactggtcccgaatgtcacttgctccggcctgagaaaactgaagccttgactgcgtggtggttccgcttggagtgtttgttctgctcaagtaatacaggtactggtcgacgagaggattcatgagacggtccaaactctggctgtgggcgtagctgctgtggaaaggaacgtcctcaaaggtgtagctgaaggtaaagttgtttccggtacgcagcatctgagaaggaaagtactccaggcagtaaaatgaagagcgtcctactgcctgactcccgttgttcagggtgaggtatccatactgtggcaccatgaagacgtctgctgggaacggcgggaggcatccttgatgcgccgagccgaggacgtacgggagctggtactccgagtcagtaaacacctgaaccgtgctggtaaggttattggcaatcgtcgtcgtaccgtcattctgcgtgacctccttgacttgaatgttaaagagcttgaagttgagtcttttgggccgggatccccaattgttgttgatgagtctttgccagtcacgtggcgaaaagtggcagtggaatctgttgaagtcaaaatacccccaaggggtgctgtagccaaagtagtggttgtcgtttgaggctcctgattggctggaaatctgcctgtagaggtggttgttgtaggtgggcagagcccaggtgcgggtgctggtggtgatgactctgtcgcccatccatgtggaatcgcaatgccaatttcccgaggaattacccactccgtcggcgccctcgttattgtctgccattggtgcgccactgcctgtagccatcgtattagttcccagaccagagggggctgctggtggctgtccgagaggctgggggtcaggtacggagtctgcgtctccagtctgaccgaaattcaatctccttcttgcaggctgctggcccgcttttccggttcccgaggaggagtctggctccgcaagagagtgctctaccggcctcttttttcccggagccgtcttaacaggttcctcaaccaggcccagaggttcaagaaccctctttttcgcctggaagactgctcgtccgaggttgcccccaaaagacgtatcttctttaagacgctcctggaactccgcgtcggcgtggttgtacttgaggtacgggttgtctccgccgtcgagctgccggtcgtaggccttgtcgtgctcgagggccgcggcgtctgcctcgttgaccggctctcccttgtcgagtccgttgaagggtccaaggtacttgtacccaggaagcacaagacccctgctgtcgtccttatgccgctctgcgggctttggtggtggtgggccaggtttgagcttccaccactgtcttattccttcagagagagtgtcctcgagccaatctggaagataaccatcggcagccatacctgatttaaatcatttattgttcagagatgcagtcatccaaatccacattgaccagatcgcaagcagtgcaagcgtctggcacctttcccatgatatgatgaatgtagcacagtttctgatacgcctttttgacgacagaaacgggttgagattctgacacgggaaagcactctaaacagtctttctgtccgtgagtgaagcagatatttgaattctgattcattctctcgcattgtctgcagggaaacagcatcagattcatgcccacgtgacgagaacatttgttttggtacctgtccgcgtagttgattgaagcttccgcgtctgacgtcgatggctgcgcaactgactcgcgcgcccgtttgggctcacttatatctgcgtcactgggggcgggtctttttttggctccaccctttttgacgtagaattcatgctctacctcaaccacgtgatcctttgcccaccggaaaaagtctttgacttcctgcttggtgaccttcccaaagtcatgatccagacggcgggtgagttcaaatttgaacatccggtcttgcaacggctgctggtgttcgaaggtcgttgagttcccgtcaatcactgcgcacatgttggtgttggaggtgacaatcacgggagtcgggtctatctgggccgaggacttgcatttctggtccacgcgcaccttgcttcctccgagaatggctttggccgactccacgaccttggcggtcatcttcccctcctcccaccagatcaccatcttgtcgacgcaatcattgaaaggaaagttctcattggtccagttgacgcagcaagggcgaattcgtttaaacctgcaggactagtccctttagtgaggg

SEQ ID NO: 211 - DNA, 3172 bp, Artificial Sequence
  source: /note="Description of Artificial Sequence: Synthetic polynucleotide"
gattgaatttagcggccgcgaattcgcccttgctgcgtcaactggaccaatgagaactttcccttcaacgattgcgtcgacaagatggtgatctggtgggaggagggcaagatgaccgccaaggtcgtggagtccgccaaggccattctgggtggaagcaaggtgcgcgtggaccaaaagtgcaagtcatcggcccagatcgaccccacgcccgtgatcgtcacctccaacaccaacatgtgcgccgtgatcgacgggaacagcaccaccttcgagcaccagcagcccctgcaggaccgcatgttcaagttcgagctcacccgccgtctggagcacgactttggcaaggtgaccaagcaggaagtcaaagagttcttccgctgggctcaggatcacgtgactgaggtggcgcatgagttctacgtcagaaagggcggagccaccaaaagacccgcccccagtgacgcggatataagcgagcccaagcgggcctgcccctcagttgcggagccatcgacgtcagacgcggaagcaccggtggactttgcggacaggtaccaaaacaaatgttctcgtcacgcgggcatgcttcagatgctgtttccctgcaagacatgcgagagaatgaatcagaatttcaacgtctgcttcacgcacggggtcagagactgctcagagtgcttccccggcgcgtcggaatctcaacccgtcgtcagaaaaaagacgtatcagaaactgtgcgcgattcatcatctgctggggcgggcacccgagattgcgtgttcggcctgcgatctcgtcaacgtggacttggatgactgtgtttctgagcaataaatgacttaaaccaggtatggctgctgacggttatcttccagattggctcgaggacaacctctctgagggcattcgcgagtggtgggacctgaaacctggagcccccaagcccaaggccaaccagcagaagcaggacgacggccggggtctggtgcttcctggctacaagtacctcggacccttcaacggactcgacaagggggagcccgtcaacgcggcggacgcagcggccctcgagcacgacaaggcctacgaccagcagctcaaagcgggtgacaatccgtacctgcggtataaccacgccgacgccgagtttcaggagcgtctgcaagaagatacgtcttttgggggcaacctcgggcgagcagtcttccaggccaagaagcgggttctcgaacctctcggtctggttgaggaagctgctaagacggctcctggaaagaagagaccggtagaaccgtcacctcagcgttcccccgactcctccgcgggcatcggcaagaaaggccagcagcccgctaaaaagagactgaactttggtcagactggcgactcagagtcagtccccgaccctcaaccaatcggagaaccaccagcaggcccctctggtctgggatctggtacaatggctgcaggcggtggcgctccaatggcagacaataacgaaggcgccgacggagtgggtagttcctcaggaaattggcattgcgattccacatggctgggcgacagagtcatcaccaccagcacccgaacctgggccctgcccacctacaacaaccacctctacaagcaaatatccaatgggacatcgggaggaagcaccaacgacaacacctacttcggctacagcaccccctgggggtattttgacttcaacagattccactgccacttctcaccacgtgactggcagcgactcatcaacaacaactggggattccggccaaaaagactcagcttcaagctcttcaacatccaggtcaaggaggtcacgcagaatgaaggcaccgagaccatcgccaataaccttaccagcacgattcaggtatttacggactcggaataccagctgccgtacgtcctcggctccgcgcaccagggctgcctgcctccgttcccggcggacgtcttcatgattccccagtacggctaccttacactgaacaatggaagtcaagccgtaggccgttcctccttctactgcctggaatattttccatctcaaatgctgcgaactggaaacaattttgaattcagctacaccttcgaggacgtgcctttccacagcagctgcgcacacagccagagctcggaccgactgatgaatcctctcatcgaccagtacctgtactacttatccagaactcggtccacaggaggaactcaaggtacccagcaattgttattttctcaagctgggcctgcaaacatgtcggctcaggctaagaactggctacctggaccttgctaccggcagcagcgagtctctacgacactgtcgcaaaacaacaacagcaactttgcttggactggtgccaccaaatatcacctgaacggaagagactctttggtaaatcccggtgtcgccatggcaacccacaaggacgacgaggaacgcttcttcccgtcgagtggagtcctgatgtttggaaaacagggtgctggaagagacaatgtggactacagcagcgttatgctaaccagcgaagaagaaattaaaaccactaaccctgtagccacagaacaatacggtgtggtggctgacaacttgcagcaaaccaatacagggcctattgtgggaaatgtcaacagccaaggagccttacctggcatggtctggcagaaccgagacgtgtacctgcagggtcccatctgggccaagattcctcacacggacggcaacttccacccttcaccgctaatgggaggatttggactgaagcacccacctcctcagatcctgatcaagaacacgccggtacctgcggatcctccaacaacgttcagccaggcgaaattggcttccttcattacgcagtacagcaccggacaggtcagcgtggaaatcgagtgggagctgcagaaggagaacagcaaacgctggaacccagagattcagtacacttcaaactactacaaatctacaaatgtggactttgctgtcaatacagagggaacttattctgagcctcgccccattggtactcgttacctcacccgtaatctgtaattgctggttaatcaataaaccgtttgattcgtttcagttgaactttggtctctgcgaagggcgaattcgtttaaacctgcaggactagtccctttagtgagg

SEQ ID NO: 212 - DNA, 3172 bp, Artificial Sequence
  source: /note="Description of Artificial Sequence: Synthetic polynucleotide"
gattgaatttagcggccgcgaattcgcccttgctgcgtcaactggaccaatgagaactttcccttcaacgattgcgtcgacaagatggtgatctggtgggaggagggcaagatgaccgccaaggtcgtggagtccgccaaggccattctgggtggaagcaaggtgcgcgtggaccaaaagtgcaagtcatcggcccagatcgaccccacgcccgtgatcgtcacctccaacaccaacatgtgcgccgtgatcggcgggaacagcaccaccttcgagcaccagcagcccctgcaggaccgcatgttcaagttcgagctcacccgccgtctggagcacgactttggcaaggtgaccaagcaggaagtcaaagagttcttccgctgggctcaggatcacgtgactgaggtggcgcatgagttctacgtcagaaagggcggagccaccaaaagacccgcccccagtgacgcggatataagcgagcccaagcgggcctgcccctcagttgcggagccatcgacgtcagacgcggaagcaccggtggactttgcggacaggtaccaaaacaaatgttctcgtcacgcgggcatgcttcagatgctgtttccctgcaagacatgcgagagaatgaatcagaatttcaacgtctgcttcacgcacggggtcagagactgctcagagtgcctccccggcgcgtcagaatctcaacccgtcgtcagaaaaaagacgtatcagaaactgtgcgcgattcatcatctgctggggcgggcacccgagattgcgtgttcggcctgcgatctcgtcaacgtggacttggatgactgtgtttctgagcaataaatgacttaaaccaggtatggctgctgacggttatcttccagattggctcgaggacaacctctctgagggcattcgcgagtggtgggacctgaaacctggagcccccaagcccaaggccaaccagcagaagcaggacgacggccggggtctggtgcttcttggctacaagtacctcggacccttcaacggactcgacaagggggagcccgtcaatgcggcggacgcagcggccctcgagcacgacaaggcctacgaccagcagctcaaagcgggtgacaatccgtacctgcggtataaccacgccgacgccgagtttcaggagcgtctgcaagaagatacgtcttttgggggcaacctcgggcgagcagtcttccaggccaagaagcgggttctcgaacctctcggtctggttgaggaagctgctaagacggctcctggaaagaagagaccggtagaaccgtcacctcagcgttcccccgactcctccacgggcatcggcaagaaaggccagcagcccgctaaaaagagactgaactttggtcagactggcgactcagagtcagtccccgaccctcaaccaatcggagaaccaccagcaggcccctctggtctgggatctggtacaatggctgcaggcggtggcgctccaatggcagacaataacgaaggcgccgacggagtgggtagttcctcaggaaattggcattgcgattccacatggctgggcgacagagtcatcaccaccagcacccgaacctgggccctgcccacctacaacaaccacctctacaagcaaatatccaatgggacatcgggaggaagcaccaacgacaacacctacttcggctacagcaccccctgggggtattttgacttcaacagattccactgccacttctcaccacgtgactggcagcgactcatcaacaacaactggggattccggccaaaaagactcagcttcaagctcttcaacatccaggtcaaggaggtcacgcagaatgaaggcaccaagaccatcgccaataaccttaccagcacgattcaggtatttacggactcggaataccagctgccgtacgtcctcggctccgcgcaccagggctgcctgcctccgttcccggcggacgtcttcatgattccccagtacggctaccttacactgaacaatggaagtcaagccgtaggccgttcctccttctactgcctggaatattttccatctcaaatgctgcgaactggaaacaattttgaattcagctacaccttcgaggacgtgcctttccacagcggctacgcacacagccagagcttggaccgactgatgaatcctctcatcgaccagtacctgtactacttatccagaactcagtccacaggaggaactcaaggtacccagcaattgttattttctcaagctgggcctgcaaacatgtcggctcaggctaagaactggctacctggaccttgctaccggcagcagcgagtctctacgacactgtcgcaaaacaacaacagcaactttgcttggactggtgccaccaaatatcacctgaacggaagagactctttggtaaatcccggtgtcgccatggcaacccacaaggacgacgaggaacgcttcttcccgtcgagtggagtcctgatgtttggaaaacagggtgctggaagagacaatgtggactacagcagcgttatgctaaccagcgaagaagaaattaaaaccactaaccctgtagccacagaacaatacggtgtggtggctgacaacttgcagcaaaccaatacagggcctattgtgggaaatgtcaacagccaaggagccttacctggcatggtctggcagaaccgagacgtgtacctgcagggtcccatctgggccaagattcctcacacggacggcaacttccacccttcaccgctaatgggaggatttggactgaagcacccacctcctcagatcctgatcaagaacacgccggtacctgcggatcctccaacgacgttcagccaggcgaaattggcttccttcattacgcagtacagcaccggacaggtcagcgtggaaatcgagtgggagctgcagaaggagaacagcaaacgctggaacccagagattcagtacacttcaaactactacaaatctacaaatgtggactttgctgtcaatacagagggaacttattctgagcctcgccccattggtactcgttacctcacccgtaatctgtaattgctggttaatcaataaaccgtttgattcgtttcagttgaactttggtctctgcgaagggcgaattcgtttaaacctgcaggactagtccctttagtgagg

SEQ ID NO: 213 - DNA, 2208 bp, Artificial Sequence
  source: /note="Description of Artificial Sequence: Synthetic polynucleotide"
atggctgccgatggttatcttccagattggctcgaggacactctctctgaaggaataagacagtggtggaagctcaaacctggcccaccaccaccaaagcccgcagagcggcataaggacgacagcaggggtcttgtgcttcctgggtacaagtacctcggacccttcaacggactcgacaagggagagccggtcaacgaggcagacgccgcggccctcgagcacgacaaggcctacgaccggcagctcgaaagcggagacaacccgtacctcaagtacaaccacgccgacgcggagtttcaggagcgtcttaaagaagatacgtcttttgggggcaacctcggacgagcagtcttccaggcgaaaaagagggttcttgaacctctgggcctggttgaggagcctgttaaaacggctccgggaaaaaagaggccggtagagcactctcctgtggagccagactcctcctcgggaaccggaaaagcgggccagcagcctgcgagaaaaagattgaattttggtcagactggagacgcagactccgtacctgacccccagcctctcggacagccaccagcagccccctctggtctgggatctactacaatggcttcaggcagtggcgcaccagtggcagacaataacgagggtgccgatggagtgggtaattcctcaggaaattggcattgcgattcccaatggctgggcgacagagtcatcaccaccagcacccgaacctgggccctgcccacctacaacaaccacctctacaagcaaatctccagccaatcaggagcctcaaacgacaaccactactttggctacagcaccccctgggggtattttgacttcaacagattccactgccacttttcaccacgtgactggcaaagactcatcaacaacagctggggattccgacccaaaagactcaacttcaagctctttaacattcaagtcaaagaggtcacgcagaatgacggtacgacgacgattgccaataaccttaccagcacggttcaagtgtttaccgactcggagtaccagctcccgtacgtcctcggctcggcgcatcaaggatgcctcccgccgttcccagcagacgtctttatggtcccacagtatggatacctcaccctgaacaacgggagtcaggcggtaggacgctcttccttttactgcctggagtactttccttctcagatgctgcgtactggaaacaactttcagttcagctacacctttgaagacgttcccttccacagcagctacgctcacagccagagtctggatcggctgctgaatcctctgatcgaccagtacctatattatctgaacaagacacaatcaaatagtggaactcttcagcagtctcggctactgtttagccaagctggacccaccagcatgtctcttcaagctaaaaactggctgcctggaccttgctacagacagcagcgtctgtcaaagcaggcaaacgacaacaacaacagcaactttccctggactgcggctacaaagtatcatctaaatggccgggactcgttggttaatccaggaccagctatggccagccacaaagacgatgaagaaaagtttttccccatgcatggaaccctgatatttggtaaacaaggaacaaatgctaacgacgcggatttggacaatgtcatgattacagatgaagaagaaatccgcaccaccaatcccgtggctacggagcagtacggatatgtgtcaaataatttgcaaaactcaaatactggtccaactactggaactgtcaatcaccaaggagcgttacctggtatggtgtggcaggatcgagacgtgtacctgcagggacccatttgggccaagattcctcacacggacgggcactttcatccttctccactaatgggaggttttgggctcaaacacccgcctcctcagatcatgatcaaaaacactcccgttccagccaatcctcctacaaacttcagttcttccaagtttgcttctttcatcacacagtattccacggggcaggtcagcgtggagatcgagtgggagctgcagaaggagaacagcaaacgctggaatcccgaaattcagtatacttccaactacaacaaatctgttaatgtggactttactgtggacactaatggtgtgtattcagagcctcgccccattggcaccagatacccgactcgtaatctgtaa

SEQ ID NO: 214 - protein, 735 aa, Artificial Sequence
  source: /note="Description of Artificial Sequence: Synthetic polypeptide"
MAADGYLPDWLEDTLSEGIRQWWKLKPGPPPPKPAERHKDDSRGLVLPGYKYLGPFNGLDKGEPVNEADAAALEHDKAYDRQLESGDNPYLKYNHADAEFQERLKEDTSFGGNLGRAVFQAKKRVLEPLGLVEEPVKTAPGKKRPVEHSPVEPDSSSGTGKAGQQPARKRLNFGQTGDADSVPDPQPLGQPPAAPSGLGSTTMASGSGAPVADNNEGADGVGNSSGNWHCDSQWLGDRVITTSTRTWALPTYNNHLYKQISSQSGASNDNHYFGYSTPWGYFDFNRFHCHFSPRDWQRLINNSWGFRPKRLNFKLFNIQVKEVTQNDGTTTIANNLTSTVQVFTDSEYQLPYVLGSAHQGCLPPFPADVFMVPQYGYLTLNNGSQAVGRSSFYCLEYFPSQMLRTGNNFQFSYTFEDVPFHSSYAHSQSLDRLLNPLIDQYLYYLNKTQSNSGTLQQSRLLFSQAGPTSMSLQAKNWLPGPCYRQQRLSKQANDNNNSNFPWTAATKYHLNGRDSLVNPGPAMASHKDDEEKFFPMHGTLIFGKQGTNANDADLDNVMITDEEEIRTTNPVATEQYGYVSNNLQNSNTGPTTGTVNHQGALPGMVWQDRDVYLQGPIWAKIPHTDGHFHPSPLMGGFGLKHPPPQIMIKNTPVPANPPTNFSSSKFASFITQYSTGQVSVEIEWELQKENSKRWNPEIQYTSNYNKSVNVDFTVDTNGVYSEPRPIGTRYPTRNL

SEQ ID NO: 215 - DNA, 2208 bp, Artificial Sequence
  source: /note="Description of Artificial Sequence: Synthetic polynucleotide"
atggctgccgatggttatcttccagattggctcgaggacactctctctgaaggaataagacagtggtggaagctcaaacctggcccaccaccaccaaagcccgcagagcggcataaggacgacagcaggggtcttgtgcttcctgggtacaagtacctcggacccttcaacggactcgacaagggagagccggtcaacgaggcagacgccgcggccctcgagcacgacaaggcctacgaccggcagctcgacagcggagacaacccgtacctcaagtacaaccacgccgacgcggagtttcaggagcgtcttaaagaagatacgtcttttgggggcaacctcggacgagcagtcttccaggccaaaaagaggattcttgaacctctgggcctggttgaggaacctgttaagacggctccgggagaaaagaggccggtagagcactctcctgcggagccagactcctcctcgggaaccggaaaagcgggccagcagcctgcaagaaagagattgaattttggccagactggagacgcagactcagtacctgacccccagcctctcggacagccaccagcagccccctctggtctgggaactaatacgatggcttcaggcagtggcgcaccaatggcagacaataacgagggcgccgacggagtgggtaattcctcgggaaattggtattgcgattccacatggatgggcgacagagtcatcaccaccagcacccgcacctgggccctgcccacctacaacaaccatctgtacaagcaaatctccagccagtctggagccagcaacgacaaccactactttggctacagcaccccctgggggtattttgacttcaacagattccactgccacttctccccacgtgactggcaaagactcatcaacaacaactggggattccggcccaagagactcagcttcaagctctttaacattcaagtcaaagaggtcacgcagaatgacggtacgacgacgattgccaataaccttaccagcacggttcaggtgtttactgactcggagtaccagctcccgtacgtcctcggctcggcgcatcaaggatgcctcccgccgttcccagcagacgtcttcatggtgccacagtatggatacctcaccctgaacaacggcagtcaggcggtaggacgctcttccttttactgcctggagtactttccttctcagatgcttcgtaccggaaacaactttaccttcagctacacctttgaagacgttcctttccatagcagctacgctcacagccaaagtctggaccgtctcatgaatcctctcatcgaccagtacctgtattacttgagcagaacaaacactccaagcggaaccaccacgatgtccaggcttcagttttctcaggccggagcaagtgacattcgggaccagtctagaaactggcttcctggaccctgttaccgccagcagcgagtatcaaagacagctgcggacaacaacaacagtgattactcgtggactggagctaccaagtaccacctcaatggaagagactctctggtgaatccgggcccagctatggccagccacaaggacgatgaagaaaaatattttcctcagagcggggttctcatctttggaaaacaagactcgggaaaaactaatgtggacattgaaaaggttatgattacagacgaagaggaaatcaggaccaccaatcccgtggctacggagcagtatggttctgtatctaccaacctccagagcggcaacacacaagcagctacctcagatgtcaacacacaaggcgttcttccaggcatggtctggcaggacagagacgtgtacctgcaggggcccatctgggcaaagattccacacacggacggacattttcacccctctcccctcgtgggcggattcggacttaaacaccctcctccacaaattctcatcaagaacaccccggtacctgcgaatccttcgaccactttcagtgcggcaaagtttgcttccttcatcacacagtactccacggggcaggtcagcgtggagatcgagtgggagctgcagaaggagaacagcaaacgctggaatcccgaaattcagtacacttccaactacaacaaatctgttaatgtggactttactgtggacactaatggtgtgtattcagagcctcgccccattggcaccagatacctgactcgtaatctgtaa

SEQ ID NO: 216 - protein, 735 aa, Artificial Sequence
  source: /note="Description of Artificial Sequence: Synthetic polypeptide"
MAADGYLPDWLEDTLSEGIRQWWKLKPGPPPPKPAERHKDDSRGLVLPGYKYLGPFNGLDKGEPVNEADAAALEHDKAYDRQLDSGDNPYLKYNHADAEFQERLKEDTSFGGNLGRAVFQAKKRILEPLGLVEEPVKTAPGEKRPVEHSPAEPDSSSGTGKAGQQPARKRLNFGQTGDADSVPDPQPLGQPPAAPSGLGTNTMASGSGAPMADNNEGADGVGNSSGNWYCDSTWMGDRVITTSTRTWALPTYNNHLYKQISSQSGASNDNHYFGYSTPWGYFDFNRFHCHFSPRDWQRLINNNWGFRPKRLSFKLFNIQVKEVTQNDGTTTIANNLTSTVQVFTDSEYQLPYVLGSAHQGCLPPFPADVFMVPQYGYLTLNNGSQAVGRSSFYCLEYFPSQMLRTGNNFTFSYTFEDVPFHSSYAHSQSLDRLMNPLIDQYLYYLSRTNTPSGTTTMSRLQFSQAGASDIRDQSRNWLPGPCYRQQRVSKTAADNNNSDYSWTGATKYHLNGRDSLVNPGPAMASHKDDEEKYFPQSGVLIFGKQDSGKTNVDIEKVMITDEEEIRTTNPVATEQYGSVSTNLQSGNTQAATSDVNTQGVLPGMVWQDRDVYLQGPIWAKIPHTDGHFHPSPLVGGFGLKHPPPQILIKNTPVPANPSTTFSAAKFASFITQYSTGQVSVEIEWELQKENSKRWNPEIQYTSNYNKSVNVDFTVDTNGVYSEPRPIGTRYLTRNL

SEQ ID NO: 217 - DNA, 2209 bp, Artificial Sequence
  source: /note="Description of Artificial Sequence: Synthetic polynucleotide"
atggctgccgatggttatcctccagattggctcgaggacactctctctgaagggataagacagtggtggaagctcaaacctggcccaccaccaccaaagcccgcagagcggcataaggacgacagcaggggtcttgtgcttcctgggtacaagtacctcggacccttcaacggactcgacaagggggagccggtcaacgaggcagacgccgcggccctcgagcacgacaaggcctacgaccggcagctcgacagcggagacaacccgtacctcaagtacaaccacgccgacgcagagtttcaggagcgccttaaagaagatacgtcttttgggggcaacctcggacgagcagtcttccaggcgaaaaagagggttcttgaacctctgggcctggttgaggaacctgttaagacggctccgggaaaaaagaggccggtagagcactctcctgtggagccagactcctcctcgggaaccggaaaagcgggccagcggcctgcaagaaaaagattaaattttggtcagactggagacgcagactccgtacctgacccccagcctctcggacagccaccagcagccccctctggtctgggatctactacaatggctacaggcagtggcgcaccaatggcagacaataacgagggtgccgatggagtgggtaattcctcaggaaattggcattgcgattcccaatggctgggcgacagagtcatcaccaccagcacccgaacctgggccctgcccacatacaacaaccacctctacaagcaaatctccagccaatcaggagccagcaacgacaaccactactttggctacagcaccccctgggggtattttgacttcaacagattccactgccacttttcaccacgtgactggcaaagactcatcaacaacaactggggattccggcccaaaagactcaacttcaagctctttaatattcaagtcaaagaggtcacgcagaatgacggtacgacgacgattgccaataaccttaccagcacggttcaggtgtttactgactcggagtaccagctcccgtacgtcctgggctcggcgcatcaaggatgcctcccgccgtttccagcggacgtcttcatggtcccacagtatggatacctcaccctgaacaacgggagtcaggcggtaggacgctcttccttttactgcctggagtactttccttctcagatgctgcgtactggaaacaactttcagttcagctacacttttgaagacgtgcctttccacagcagctacgctcacagccagagtctggatcggctgatgaatcctctgatcgaccagtacctgtattatctgaacaagacacaaacaaatagtggaactcttcagcagtctcggctactgtttagccaagctggaccaaccaacatgtctcttcaagctaaaaactggctgcctggaccttgctacagacagcagcgtctgtcaaaacaggcaaacgacaacaacaacagcaactttccctggactgcagctacaaagtatcatctaaatggccgggactcgttggttaatccaggaccagctatggccagtcacaaggatgacgaagaaaagtttttccccatgcatggaaccctgatatttggtaaacaaggaacaaatgccaacgacgcggatttggaaaatgtcatgattacagatgaagaagaaatcagggccaccaatcccgtggctacggagcagtacgggactgtgtcaaataatttgcaaaactcaaacactggtccaactactggaactgtcaatcgccaaggagcgttacctggtatggtgtggcaggatcgagacgtgtacctgcagggacccatttgggccaagattcctcacaccgatggacactttcatccttctccactgatgggaggttttggactcaaacacccgcctcctcagatcatgatcaaaaacactcccgttccagccaatcctcccacaaacttcagttctgccaagtttgcttctttcatcacacagtattccacgggacaggtcagcgtggagatcgagtgggagctgcagaaggagaacagcaaacgctggaatcccgaaattcagtacacttccaactacaacaagtctgttaatgtggactttactgtggacactaatggtgtgtattcagagcctcgccccattggcaccagatacctgactcgtaatctgtaat

SEQ ID NO: 218 - protein, 735 aa, Artificial Sequence
  source: /note="Description of Artificial Sequence: Synthetic polypeptide"
MAADGYPPDWLEDTLSEGIRQWWKLKPGPPPPKPAERHKDDSRGLVLPGYKYLGPFNGLDKGEPVNEADAAALEHDKAYDRQLDSGDNPYLKYNHADAEFQERLKEDTSFGGNLGRAVFQAKKRVLEPLGLVEEPVKTAPGKKRPVEHSPVEPDSSSGTGKAGQRPARKRLNFGQTGDADSVPDPQPLGQPPAAPSGLGSTTMATGSGAPMADNNEGADGVGNSSGNWHCDSQWLGDRVITTSTRTWALPTYNNHLYKQISSQSGASNDNHYFGYSTPWGYFDFNRFHCHFSPRDWQRLINNNWGFRPKRLNFKLFNIQVKEVTQNDGTTTIANNLTSTVQVFTDSEYQLPYVLGSAHQGCLPPFPADVFMVPQYGYLTLNNGSQAVGRSSFYCLEYFPSQMLRTGNNFQFSYTFEDVPFHSSYAHSQSLDRLMNPLIDQYLYYLNKTQTNSGTLQQSRLLFSQAGPTNMSLQAKNWLPGPCYRQQRLSKQANDNNNSNFPWTAATKYHLNGRDSLVNPGPAMASHKDDEEKFFPMHGTLIFGKQGTNANDADLENVMITDEEEIRATNPVATEQYGTVSNNLQNSNTGPTTGTVNRQGALPGMVWQDRDVYLQGPIWAKIPHTDGHFHPSPLMGGFGLKHPPPQIMIKNTPVPANPPTNFSSAKFASFITQYSTGQVSVEIEWELQKENSKRWNPEIQYTSNYNKSVNVDFTVDTNGVYSEPRPIGTRYLTRNL

SEQ ID NO: 219 - DNA, 2208 bp, Artificial Sequence
  source: /note="Description of Artificial Sequence: Synthetic polynucleotide"
atggctgccgatggttatcttccagattggctcgaggacactctctctgaaggaataagacagtggtggaagctcaaacctggcccaccaccaccaaagcccgcagagcggcataaggacgacagcaggggtcttgtgcttcctgggtacaggtacctcggacccttcaacggactcgacaagggagagccggtcaacgaggcagacgccgcggccctcgagcacgacaaggcctacgaccggcagctcgacagcggagacaacccgtacctcaagtacaaccacgtcgacgcggagtttcaggagcgtcttaaagaagatacgtcttttgggggcaacctcggacgagcagtcttccaggccaaaaagaggattcttgaacctctgggcctggttgaggaacctgttaaggcggctccgggagaaaagaggccggtagagcactctcctgcggagccagactcctcctcgggaaccggaaaagcgggccagcagcctgcaagaaagagattgaattttggtcagactggagacgcagactcagtacctgacccccagcctctcggacagccaccagcagccccctctggtctgggaactaatacgatggcttcaggcagtggcgcaccaatggcagacaataacgagggcgccgacggagtgggtaattcctcgggaaattggcattgcgattccacatggatgggcgacagagtcatcaccaccagcacccgcacctgggccctgcccacctacaacaaccatctgtacaagcaaatctccagccagtctggagccagcaacgacaaccactactttggctacagcaccccctgggggcattttgacttcaacagattccactgccacttctccccacgtgactggcaaagactcatcaacaacaactggggattccggcccaagagactcagcttcaagctctttaacattcaagtcaaagaggtcacgcagaatgacggtacgacgacgattgccaataaccttaccagcacggttcaggtgtttactgactcggagtaccagctcccgtacgtcctcggctcggcgcatcaaggatgcctcccgccgttcccagcagacgtcttcatggtgccacagtatggatacctcaccctgaacaacggcagtcaggcggtaggacgctcttccttttactgcctggagtactttccttctcagatgcttcgtaccggaaacaactttaccttcagctacacctttgaagacgttcctttccatagcagctacgctcacagccaaagtctggaccgtctcatgaatcctctcatcgaccagtacctgtattacttgagcagaacaaacactccaagcggaaccaccacgatgtccaggcttcagttttctcaggccggagcaagtgacattcgggaccagtctagaaactggcttcctggaccctgttaccgccagcagcgagtatcaaagacagctgcggacaacaacaacagtgattactcgtggactggagctaccaagtaccacctcaatggaagagactctctggtgaatccgggcccagctatggccagccacaaggacgatgaagaaaaatattttcctcagagcggggttctcatctttggaaaacaagactcgggaaaaactaatgtggacattgaaaaggttatgattacagacgaagaggaaatcaggaccaccaatcccgtggctacggagcagtatggttctgtatctaccaacctccagagcggcaacacacaagcagctacctcagatgtcaacacacaaggcgttcttccaggcatggtctggcaggacagagacgtgtacctgcaggggcccatctgggcaaagattccacacacggacggacattttcacccctctccccccatgggcggattcggacttaaacaccctcctccacaaattctcatcaagaacaccccggtacctgcgaatccttcgaccactttcagtgcggcaaagtttgcttccttcatcacacagtactccacggggcaggtcagcgtggagatcgagtgggagctgcagaaggagaacagcaaacgctggaatcccgaaattcagtacacttccaactacaacaaatctgttaatgtggactttactgtggacactaatggtgtgtattcagagcctcgccccattggcgccagatacctgactcgtaatctgtaa

SEQ ID NO: 220 - protein, 735 aa, Artificial Sequence
  source: /note="Description of Artificial Sequence: Synthetic polypeptide"
MAADGYLPDWLEDTLSEGIRQWWKLKPGPPPPKPAERHKDDSRGLVLPGYRYLGPFNGLDKGEPVNEADAAALEHDKAYDRQLDSGDNPYLKYNHVDAEFQERLKEDTSFGGNLGRAVFQAKKRILEPLGLVEEPVKAAPGEKRPVEHSPAEPDSSSGTGKAGQQPARKRLNFGQTGDADSVPDPQPLGQPPAAPSGLGTNTMASGSGAPMADNNEGADGVGNSSGNWHCDSTWMGDRVITTSTRTWALPTYNNHLYKQISSQSGASNDNHYFGYSTPWGHFDFNRFHCHFSPRDWQRLINNNWGFRPKRLSFKLFNIQVKEVTQNDGTTTIANNLTSTVQVFTDSEYQLPYVLGSAHQGCLPPFPADVFMVPQYGYLTLNNGSQAVGRSSFYCLEYFPSQMLRTGNNFTFSYTFEDVPFHSSYAHSQSLDRLMNPLIDQYLYYLSRTNTPSGTTTMSRLQFSQAGASDIRDQSRNWLPGPCYRQQRVSKTAADNNNSDYSWTGATKYHLNGRDSLVNPGPAMASHKDDEEKYFPQSGVLIFGKQDSGKTNVDIEKVMITDEEEIRTTNPVATEQYGSVSTNLQSGNTQAATSDVNTQGVLPGMVWQDRDVYLQGPIWAKIPHTDGHFHPSPPMGGFGLKHPPPQILIKNTPVPANPSTTFSAAKFASFITQYSTGQVSVEIEWELQKENSKRWNPEIQYTSNYNKSVNVDFTVDTNGVYSEPRPIGARYLTRNL

SEQ ID NO: 221 - DNA, 2208 bp, Artificial Sequence
  source: /note="Description of Artificial Sequence: Synthetic polynucleotide"
atggctgccgatggttatcttccagattggctcgaggacaccctctctgaaggaataagacagtggtggaagctcaaacctggcccaccaccaccaaagcccgcagagcggcataaggacgacagcaggggtcttgtgcttcctgggtacaagtacctcggacccttcaacggactcgacaagggagagccggtcaacgaggcagacgccgcggccctcgagcacgacaaggcctacgaccggcagctcgacagcggagataacccgtacctcaagtacaaccacgccgacgcggagtttcaggagcgccttaaagaggatacgtcttttgggggcaacctcggacgagcagtcttccaggccaaaaagaggattcttgaacctctgggcctggttgaggaacctgttaagacggctccgggaaaaaagaggccggtagagcactctcctgcggagccagactcctcctcgggaaccggaaaagcgggccagcagcctgcaagaaagagattgaattttggtcagactggagacgcagactcagtacctgacccccggcctctcggacagccaccagcagccccctctggtctgggaactaatacgatggcttcaggcagtggcgcaccaatggcagacaataacgagggcgccgacggagtgggtaattcctcgggaaattggcattgcgattccacatggatgggcgacagagtcatcaccaccagcacccgcacctgggccctgcccacctacaacaaccatctgtacaagcaaatctccagccagtctggagccagcaacgacaaccactactttggctacagcaccccctgggggtattttgacttcaacagattccactgccacttctccccacgtgactggcaaagactcatcaacaacaactggggattccggcccaagagactcagcttcaagctctttaacattcaagtcaaagaggtcacgcagaatgacggtacgacgacgattgccaataaccttaccagcacggttcaggtgtttactgactcggagtaccagctcccgtacgtcctcggctcggcgcatcaaggatgcctcccgccgttcccagcagacgtcttcatggtgccacagtatggatacctcaccctgaacaacggcagtcaggcggtaggacgctcttccttttactgcctggagtactttccttctcagatgcttcgtaccggaaacaactttaccttcagctacacctttgaagacgttcctttccatagcagctacgctcacagccaaagtctggaccgtctcatgaatcctctcatcgaccagtacctgtattacttgagcagaacaaacactccaagcggaaccaccacgatgtccaggcttcagttttctcaggccggagcaagtgacattcgggaccagtctagaaactggcttcctggaccctgttaccgccagcagcgagtatcaaagacagctgcggacaacaacaacagtgattactcgtggactggagctaccaagtaccacctcaatggaagagactctctggtgaatccgggcccagctatggccagccacaaggacgatgaagaaaaatattttcctcagagcggggttctcatctttggaaaacaagactcgggaaaaactaatgtggacattgaaaaggttatgattacagacgaagaggaaatcaggaccaccaatcccgtggctacggagcagtatggttctgtatctaccaacctccagagcggcaacacacaagcagctacctcagatgtcaacacacaaggcgttcttccaggcatggtctggcaggacagagacgtgtacctgcaggggcccatctgggcaaagattccacacacggacggacattttcacccctctcccctcatgggcggattcggacttaaacaccctcctccacaaattctcatcaagaacaccccggtacctgcgaatccttcgaccactttcagtgcggcaaagtttgcttccttcatcacacagtactccacggggcaggtcagcgtggagatcgagtgggagctgcagaaggagaacagcaaacgctggaatcccgaaattcagtacacttccaactacaacaaatctgttaatgtggactttactgtggacactaatggtgtgtattcagagcctcgccccattggcaccagatacctgactcgtaatctgtaa

SEQ ID NO: 222 - protein, 735 aa, Artificial Sequence
  source: /note="Description of Artificial Sequence: Synthetic polypeptide"
MAADGYLPDWLEDTLSEGIRQWWKLKPGPPPPKPAERHKDDSRGLVLPGYKYLGPFNGLDKGEPVNEADAAALEHDKAYDRQLDSGDNPYLKYNHADAEFQERLKEDTSFGGNLGRAVFQAKKRILEPLGLVEEPVKTAPGKKRPVEHSPAEPDSSSGTGKAGQQPARKRLNFGQTGDADSVPDPRPLGQPPAAPSGLGTNTMASGSGAPMADNNEGADGVGNSSGNWHCDSTWMGDRVITTSTRTWALPTYNNHLYKQISSQSGASNDNHYFGYSTPWGYFDFNRFHCHFSPRDWQRLINNNWGFRPKRLSFKLFNIQVKEVTQNDGTTTIANNLTSTVQVFTDSEYQLPYVLGSAHQGCLPPFPADVFMVPQYGYLTLNNGSQAVGRSSFYCLEYFPSQMLRTGNNFTFSYTFEDVPFHSSYAHSQSLDRLMNPLIDQYLYYLSRTNTPSGTTTMSRLQFSQAGASDIRDQSRNWLPGPCYRQQRVSKTAADNNNSDYSWTGATKYHLNGRDSLVNPGPAMASHKDDEEKYFPQSGVLIFGKQDSGKTNVDIEKVMITDEEEIRTTNPVATEQYGSVSTNLQSGNTQAATSDVNTQGVLPGMVWQDRDVYLQGPIWAKIPHTDGHFHPSPLMGGFGLKHPPPQILIKNTPVPANPSTTFSAAKFASFITQYSTGQVSVEIEWELQKENSKRWNPEIQYTSNYNKSVNVDFTVDTNGVYSEPRPIGTRYLTRNL

SEQ ID NO: 223 - DNA, 2208 bp, Artificial Sequence
  source: /note="Description of Artificial Sequence: Synthetic polynucleotide"
atggctgccgatggttatcttccagattggctcgaggacactctctctgaaggaataagacagtggtggaagctcaaacctggcccaccaccaccaaagcccgcagagcggcataaggacgacagcaggggtcttgtgcttcctgggtacaagtacctcggacccttcaacggactcgacaagggagagccggtcaacgaggcagacgccgcggccctcgagcacgacaaggcctacgaccggcagctcgacagcggagacaacccgtacctcaagtacaaccacgccgacgcggagtttcaggagcgccttaaaggagatacgtcttttgggggcaacctcggacgagcagtcttccaggccaaaaagaggattcttgaacctctgggcctggttgaggaacctgttaagacggctccgggaaaaaagaggccggtagagcactctcctgcggagccagactcctcctcgggaaccggaaaagcgggccagcagcctgcaagaaagagattgaattttggtcagactggagacgcagactcagtacctgacccccagcctctcggacagccaccagcagccccctctggtctgggaactaatacgatggcttcaggcagtggcgcaccaatggcagacaataacgagggcgccgacggagtgggtaattcctcgggaaattggcattgcgattccacatggatgggcggcagagtcatcaccaccagcacccgcacctgggccctgcccacctacaacaaccatctgtacaagcaaatctccagccagtctggagccagcaacgacaaccactactttggctacagcaccccctgggggtattttgacttcaacagattccactgccacttctccccacgtgactggcaaagactcatcaacaacaactggggattccggcccaagagactcagcttcaagctctttaacattcaagtcaaagaggtcacgcagaatgacggtacgacgacgattgccaataaccttaccagcacggttcaggtgtttactgactcggagtaccagctcccgtacgtcctcggctcggcgcatcaaggatgcctcccgccgttcccagcagacgtcttcatggtgccacagtatggatacctcaccctgaacaacggcagtcaggcggtaggacgctcttccttttactgcctggagtactttccttctcagacgcttcgtaccggaaacaactttaccttcagctacacctttgaagacgttcctttccatagcagctacgctcacagccaaagtctggaccgtctcatgaatcctctcatcgaccagtacctgtattacttgagcagaacaaacactccaagcggaaccaccacgatgtccaggcttcagttttctcaggccggagcaagtgacattcgggaccagtctagaaactggcttcctggaccctgttaccgccagcagcgagtatcaaagacagctgcggacaacaacaacagtgattactcgtggactggagctaccaagtaccacctcaatggaagagactctctggtgaatccgggcccagctatggccagccacaaggacgatgaagaaaaatattttcctcagagcggggttctcatctttggaaaacaagactcgggaaaaactaatgtggacattgaaaaggttatgattacagacgaagaggaaatcaggaccaccaatcccgtggctacggagcagtatggttctgtatctaccaacctccagagcggcaacacacaagcagctacctcagatgtcaacacacaaggcgttcttccaggcatggtctggcaggacagagacgtgtacctgcaggggcccatctgggcaaagattccacacacggacggacattttcacccctctcccctcatgggcggattcggacttaaacaccctcctccacaaattctcatcaagaacaccccggtacctgcgaatccttcgaccactttcagtgcggcaaagtttgcttccttcatcacacagtactccacggggcaggtcagcgtggagatcgagtgggagctgcagaaggagaacagcaaacgctggaatcccgaaattcagtacacttccaactacaacaaatctgttaatgtggactttactgtggacactaatggtgtgtattcagagcctcgccccattggcaccagatacctgactcgtaatctgtaa

SEQ ID NO: 224 - protein, 735 aa, Artificial Sequence
  source: /note="Description of Artificial Sequence: Synthetic polypeptide"
MAADGYLPDWLEDTLSEGIRQWWKLKPGPPPPKPAERHKDDSRGLVLPGYKYLGPFNGLDKGEPVNEADAAALEHDKAYDRQLDSGDNPYLKYNHADAEFQERLKGDTSFGGNLGRAVFQAKKRILEPLGLVEEPVKTAPGKKRPVEHSPAEPDSSSGTGKAGQQPARKRLNFGQTGDADSVPDPQPLGQPPAAPSGLGTNTMASGSGAPMADNNEGADGVGNSSGNWHCDSTWMGGRVITTSTRTWALPTYNNHLYKQISSQSGASNDNHYFGYSTPWGYFDFNRFHCHFSPRDWQRLINNNWGFRPKRLSFKLFNIQVKEVTQNDGTTTIANNLTSTVQVFTDSEYQLPYVLGSAHQGCLPPFPADVFMVPQYGYLTLNNGSQAVGRSSFYCLEYFPSQTLRTGNNFTFSYTFEDVPFHSSYAHSQSLDRLMNPLIDQYLYYLSRTNTPSGTTTMSRLQFSQAGASDIRDQSRNWLPGPCYRQQRVSKTAADNNNSDYSWTGATKYHLNGRDSLVNPGPAMASHKDDEEKYFPQSGVLIFGKQDSGKTNVDIEKVMITDEEEIRTTNPVATEQYGSVSTNLQSGNTQAATSDVNTQGVLPGMVWQDRDVYLQGPIWAKIPHTDGHFHPSPLMGGFGLKHPPPQILIKNTPVPANPSTTFSAAKFASFITQYSTGQVSVEIEWELQKENSKRWNPEIQYTSNYNKSVNVDFTVDTNGVYSEPRPIGTRYLTRNL

SEQ ID NO: 225 - DNA, 2208 bp, Artificial Sequence
  source: /note="Description of Artificial Sequence: Synthetic polynucleotide"
atggctgccgatggttatcttccagattggctcgaggacactctctctgaaggaataagacagtggtggaagctcaaacctggcccaccaccaccaaagcccgcagagcggcataaggacgacagcaggggtcttgtgcttcctgggtacaagtacctcggacccttcaacggactcgacaagggagagccggtcaacgaggcagacgccgcggccctcgagcacgacaaggcctacgaccggcagctcgacagcggagacaacccgtacctcaagtacaaccacgccgacgcggagtttcaggagcgtcttaaagaagatacgtcttttgggggcaacctcggacgagcagtcttccaggccaaaaagaggattcttgaacctctgggcctggttgaggaacctgttaagacggctccgggaaaaaagaggccggtagagcactctcctgcggagccagactcctcctcgggaaccggaaaagcgggccagcagcctgcaagaaagagattgaattttggtcagactggagacgcagactcagtacctgacccccagcctctcggacagccaccagcagccccctctggtctgggaactaatacgatggcttcaggcagtggcgcaccaatggcagacaataacgagggcgccgacggagtgggtaattcctcgggaaattggcattgcgattccacatggatgggcgacagagtcatcaccaccagcacccgcacctgggccctgcccacctgcaacaaccatctgtacaagcaaatctccagccagtctggagccagcaacgacaaccactactttggctacagcaccccctgggggtattttgacttcaacagattccactgccacttctccccacgtgactggcaaagactcatcaacaacaactggggattccggcccaagagactcagcttcaagctctttaacattcaagtcaaagaggtcacgcagaatgacggtacgacgacgattgccaataaccttaccagcacggttcaggtgtttactgactcggagtaccagctcccgtacgtcctcggctcggcgcatcaaggatgcctcccgccgttcccagcagacgtcttcatggtgccacagtatggatacctcaccctgaacaacggcagtcaggcggtaggacgctcttccttttactgcctggagtattttccttctcagatgcttcgtaccggaaacaactttaccttcagctacacctttgaagacgttcctttccatagcagctacgctcacagccaaagtctggaccgtctcatgaatcctctcatcgaccagtacctgtattacttgagcagaacaaacactccaagcggaaccaccacgatgtccaggcttcagttttctcaggccggagcaagtgacattcgggaccagtctagaaactggcttcctggaccctgttaccgccagcagcgagtatcaaagacagctgcggacaacaacaacagtgattactcgtggactggagctaccaagtaccacctcaatggaagagactctctggtgaatccgggcccagctatggccagccacaaggacgatgaagaaaaatattttcctcagagcggggttctcatctttggaaaacaagactcgggaaaaactaatgtggacattgaaaaggttatgattacagacgaagaggaaatcaggaccaccaatcccgtggctacggagcagtatggttctgtatctacctacctccagagcggcaacacacaagcagctacctcagatgtcaacacacaaggcgttcttccaggcatggtctggcaggacagagacgtgtacctgcgggggcccatctgggcaaagattccacacacggacggacattttcacccctctcccctcatgggcggatttggacttaaacaccctcctccacaaattctcatcaagaacaccccggtacctgcgaatccttcgaccactttcagtgcggcaaagtttgcttccttcatcacacagtactccacggggcaggtcagcgtggagatcgagtgggagctgcagaaggagaacagcaaacgctggaatcccgaaattcagtacacttccaactacaacaaatctgttaatgtggactttactgtggacactaatggtgtgtattcagagcctcgccccattggcaccagatacctgactcgtaatctgtaa

SEQ ID NO: 226 - protein, 735 aa, Artificial Sequence
  source: /note="Description of Artificial Sequence: Synthetic polypeptide"
MAADGYLPDWLEDTLSEGIRQWWKLKPGPPPPKPAERHKDDSRGLVLPGYKYLGPFNGLDKGEPVNEADAAALEHDKAYDRQLDSGDNPYLKYNHADAEFQERLKEDTSFGGNLGRAVFQAKKRILEPLGLVEEPVKTAPGKKRPVEHSPAEPDSSSGTGKAGQQPARKRLNFGQTGDADSVPDPQPLGQPPAAPSGLGTNTMASGSGAPMADNNEGADGVGNSSGNWHCDSTWMGDRVITTSTRTWALPTCNNHLYKQISSQSGASNDNHYFGYSTPWGYFDFNRFHCHFSPRDWQRLINNNWGFRPKRLSFKLFNIQVKEVTQNDGTTTIANNLTSTVQVFTDSEYQLPYVLGSAHQGCLPPFPADVFMVPQYGYLTLNNGSQAVGRSSFYCLEYFPSQMLRTGNNFTFSYTFEDVPFHSSYAHSQSLDRLMNPLIDQYLYYLSRTNTPSGTTTMSRLQFSQAGASDIRDQSRNWLPGPCYRQQRVSKTAADNNNSDYSWTGATKYHLNGRDSLVNPGPAMASHKDDEEKYFPQSGVLIFGKQDSGKTNVDIEKVMITDEEEIRTTNPVATEQYGSVSTYLQSGNTQAATSDVNTQGVLPGMVWQDRDVYLRGPIWAKIPHTDGHFHPSPLMGGFGLKHPPPQILIKNTPVPANPSTTFSAAKFASFITQYSTGQVSVEIEWELQKENSKRWNPEIQYTSNYNKSVNVDFTVDTNGVYSEPRPIGTRYLTRNL

SEQ ID NO: 227 - DNA, 2208 bp, Artificial Sequence; identical to SEQ ID NO: 221
  source: /note="Description of Artificial Sequence: Synthetic polynucleotide"

SEQ ID NO: 228 - protein, 735 aa, Artificial Sequence; identical to SEQ ID NO: 222
  source: /note="Description of Artificial Sequence: Synthetic polypeptide"

SEQ ID NO: 229 - DNA, 2208 bp, Artificial Sequence
  source: /note="Description of Artificial Sequence: Synthetic polynucleotide"
atggctgccgatggttatcttccagattggctcgaggacactctctctgaaggaataagacagtggtggaagctcaaacctggcccaccaccaccaaagcccgcagagcggcataaggacggcagcaggggtcttgtgcttcctgggtacaagtacctcggacccttcaacggactcgacaagggagagccggtcaacgaggcagacgccgcggccctcgagcacgacaaggcctacgaccggcagctcaacagcggagacaacccgtacctcaagtacaaccacgccgacgcggagtttcaggagcgccttaaagaagatacgtcttttgggggcaacctcggacgagcagtcttccaggcaaaaaagagggttcttgaacctctgggcctggttgaggagcctgttaaaacggctccgggaaaaaagagaccggtagagcactctcctgcggagccagactcctcctcgggaaccggaaaagcgggccagcagcctgcaagaaagagattgaattttggtcagactggagacgcagactccgtacctgacccccagcctctcggacagccaccagcagccccctctggtctgggatctactacaatggctacaggcagtggcgcaccaatggcagacaataacgagggtgccgatggagtgggtaattcctcaggaaattggcattgcgattcccaatggctgggcgacagagtcatcaccacaagcactcgaacctgggccctgcccacctacaacaaccacctctacaagcaaatctccagccaatcaggagcctcaaacgacaaccactattttggctacagcaccccttgggggtattttgacttcaacagattccactgccacttttcaccacgtgactggcaaagactcatcaacaacaactggggattccgacccaagagactcaacttcaagctctttaacattcaagtcaaagaggtcacgcagaatgacggtacgacgacgattgccaataaccttaccagcacggttcaggtgtttactgactcggagtaccagctcccgtacgtcctcggctcggcgcatcaaggatgcctcccgccgttcccagcggacgtcttcatggtcccacagtatggatacctcaccctgaacaacgggagtcaggcggtaggacgctctcccttttactgcctggagtactttccttctcagatgctgcgtactggaaacaactttcagttcagctacacttttgaagacgtgcctttccacagcagctacgctcacagccagagtctggatcggctgatgaatcctctgatcgaccagtacctgtattatctgaacaagacacaaacaaatagtggaactcttcagcagtctcggctactgtttagccaagctggacccaccaacatgtctcttcaagctaaaaactggctgcctggaccttgctacagacagcagcgtctgtcaaagcaggcaaacgacaacaacaacagcaactttccctggactgcagctacaaagtatcatctaaatggccgggactcgttggttaatccaggaccagctatggccagtcacaaggatgacgaagaaaagtttttccccatgcatggaaccctgatatttggtaaacaaggaacaaatgccaacgacgcggatttggaaaatgtcatgattacagatgaagaagaaatcaggaccaccaatcccgtggctacggagcagtacgggactgtgtcaaataatttgcaaaactcaaacactggtccaactactggaactgtcaatcaccaaggagcgttacctggtatggtgtggcaggatcgagatgtgtaccttcagggacccatttgggccaagattcctcacaccgatggacactttcatccttctccactgatgggaggttttggactcaaacacccgcctcctcagattatgatcaaaaacactcccgttccagccaatcctcctacaaacttcagttctgccaagtttgcttctttcatcacacagtattccacggggcaggtcagcgtggagatcgagtgggagctgcagaaggagaacagcaaacgctggaatcccgaaattcagtacacttccaactacaacaaatctgttaatgtggactttactgtggacaataatggcgtgtactcagagcctcgccccattggcaccagatacctgactcgtaatctgtaa

SEQ ID NO: 230 - protein, 735 aa, Artificial Sequence
  source: /note="Description of Artificial Sequence: Synthetic polypeptide"
MAADGYLPDWLEDTLSEGIRQWWKLKPGPPPPKPAERHKDGSRGLVLPGYKYLGPFNGLDKGEPVNEADAAALEHDKAYDRQLNSGDNPYLKYNHADAEFQERLKEDTSFGGNLGRAVFQAKKRVLEPLGLVEEPVKTAPGKKRPVEHSPAEPDSSSGTGKAGQQPARKRLNFGQTGDADSVPDPQPLGQPPAAPSGLGSTTMATGSGAPMADNNEGADGVGNSSGNWHCDSQWLGDRVITTSTRTWALPTYNNHLYKQISSQSGASNDNHYFGYSTPWGYFDFNRFHCHFSPRDWQRLINNNWGFRPKRLNFKLFNIQVKEVTQNDGTTTIANNLTSTVQVFTDSEYQLPYVLGSAHQGCLPPFPADVFMVPQYGYLTLNNGSQAVGRSPFYCLEYFPSQMLRTGNNFQFSYTFEDVPFHSSYAHSQSLDRLMNPLIDQYLYYLNKTQTNSGTLQQSRLLFSQAGPTNMSLQAKNWLPGPCYRQQRLSKQANDNNNSNFPWTAATKYHLNGRDSLVNPGPAMASHKDDEEKFFPMHGTLIFGKQGTNANDADLENVMITDEEEIRTTNPVATEQYGTVSNNLQNSNTGPTTGTVNHQGALPGMVWQDRDVYLQGPIWAKIPHTDGHFHPSPLMGGFGLKHPPPQIMIKNTPVPANPPTNFSSAKFASFITQYSTGQVSVEIEWELQKENSKRWNPEIQYTSNYNKSVNVDFTVDNNGVYSEPRPIGTRYLTRNL

SEQ ID NO: 231 - DNA, 2208 bp, Artificial Sequence
  source: /note="Description of Artificial Sequence: Synthetic polynucleotide"
atggctgccgatggttatcttccagattggctcgaggacactctctctgaaggaataagacagtggtggaagctcaaacctggcccaccaccaccaaagcccgcagagcggcataaggacgacagcaggggtcttgtgcttcctgggtacaagtacctcggacccttcaacggactcgacaagggagagccggtcaacgaggcagacgccgcggccctcgagcacgacaaggcctacgaccggcagctcgacagcggagacaacccgtacctcaagtacaaccacgccgacgcggagtttcaggagcgtcttaaagaagatacgtcttttgggggcaacctcggacgagcagtcttccaggccaaaaagaggattcttgaacctctgggcctggttgaggaacctgttaagacggctccgggaaaaaagaggccggtagagcactctcctgcggagccagactcctcctcgggaaccggaaaagcgggccagcagcctgcaagaaagagattgaattttggtcagactggagacgcagactcagtacctgacccccagcctctcggacagccaccagcagccccctctggtctgggaactaatacgatggcttcaggcagtggcgcaccaatggcagacaataacgagggcgccgacggagtgggtaattcctcgggaaattggcattgcgattccacatggatgggcgacagagtcatcaccaccagcacccgcacctgggccctgcccacctacaacaaccatctgtacaagcaaatctccagccagtctggagccagcaacgacaaccactactttggctacagcaccccctgggggtattttgacttcaacagattccactgccacttctccccacgtgactggcaaagactcatcaacaacaactggggattccggcccaagagactcagcttcaagctctttaacattcaagtcaaagaggtcacgcagaatgacggtacgacgacgattgccaataaccttaccagcacggttcaggtgtttactgactcggagtaccagctcccgtacgtcctcggctcggcgcatcaaggatgcctcccgccgttcccagcagacgtcttcatggtgccacagtatggatacctcaccctgaacaacggcagtcaggcggtaggacgctcttccttttactgcctggagtactttccttctcagatgcttcgtaccggaaacaactttaccttcagctacacctttgaagacgttcctttccatagcagctacgctcacagccaaagtctggaccgtctcatgaatcctctcatcgaccagtacctgtattacttgagcagaacaaacactccaagcggaaccaccacgatgtccaggcttcagttttctcaggccggagcaagtgacattcgggaccagtctagaaactggcttcctggaccctgttaccgccagcagcgagtatcaaagacagctgcggacaacaacaacagtgattactcgtggactggagctaccaagtaccacctcaatggaagagactctctggtgaatccgggcccagctatggccagccacaaggacgatgaagaaaaatattttcctcagagcggggttctcatctttggaaaacaagactcgggaaaaactaatgtggacattgaaaaggttatgattacagacgaagaggaaatcaggaccaccaatcccgtggctacggagcagtatggttctgtatctaccaacctccagagcggcaacacacaagcagctacctcagatgtcaacacacaaggcgttcttccaggcatggtctggcaggacagagacgtgtacctgcaggggcccatctgggcaaagattccacacacggacggacattttcacccctctcccctcatgggcggattcggacttaaacaccctcctccacaaattctcatcaagaacaccccggtacctgcgaatccttcgaccactttcagtgcggcaaagtttgcttccttcatcacacagtactccacggggcaggtcagcgtggagatcgagtgggagctgcagaaggagaacagcaaacgctggaatcccgaaattcagtacacttccaactacaacaaatctgttaatgtggactttactgtggacactaatggtgtgtattcagagcctcgccccattggcaccagatacctgactcgtaatctgtaa

SEQ ID NO: 232 - protein, 735 aa, Artificial Sequence
  source: /note="Description of Artificial Sequence: Synthetic polypeptide"
MAADGYLPDWLEDTLSEGIRQWWKLKPGPPPPKPAERHKDDSRGLVLPGYKYLGPFNGLDKGEPVNEADAAALEHDKAYDRQLDSGDNPYLKYNHADAEFQERLKEDTSFGGNLGRAVFQAKKRILEPLGLVEEPVKTAPGKKRPVEHSPAEPDSSSGTGKAGQQPARKRLNFGQTGDADSVPDPQPLGQPPAAPSGLGTNTMASGSGAPMADNNEGADGVGNSSGNWHCDSTWMGDRVITTSTRTWALPTYNNHLYKQISSQSGASNDNHYFGYSTPWGYFDFNRFHCHFSPRDWQRLINNNWGFRPKRLSFKLFNIQVKEVTQNDGTTTIANNLTSTVQVFTDSEYQLPYVLGSAHQGCLPPFPADVFMVPQYGYLTLNNGSQAVGRSSFYCLEYFPSQMLRTGNNFTFSYTFEDVPFHSSYAHSQSLDRLMNPLIDQYLYYLSRTNTPSGTTTMSRLQFSQAGASDIRDQSRNWLPGPCYRQQRVSKTAADNNNSDYSWTGATKYHLNGRDSLVNPGPAMASHKDDEEKYFPQSGVLIFGKQDSGKTNVDIEKVMITDEEEIRTTNPVATEQYGSVSTNLQSGNTQAATSDVNTQGVLPGMVWQDRDVYLQGPIWAKIPHTDGHFHPSPLMGGFGLKHPPPQILIKNTPVPANPSTTFSAAKFASFITQYSTGQVSVEIEWELQKENSKRWNPEIQYTSNYNKSVNVDFTVDTNGVYSEPRPIGTRYLTRNL

SEQ ID NO: 233 - DNA, 2208 bp, Artificial Sequence
  source: /note="Description of Artificial Sequence: Synthetic polynucleotide"
atggctgccgatggttatcttccagattggctcgaggacactctctctgaaggaataagacagtggtggaagctcaaacctggcccaccaccaccaaagcccgcagagcggcataaggacgacagcaggggtcttgtgcttcctgggtacaagtacctcggacccttcaacggactcgacaagggagagccggtcaacgaggcagacgccgcggccctcgagcacgacaaggcctacgaccggcagctcgacagcggagacaacccgtacctcaagtacaaccacgccgacgcggagtttcaggagcgtcttaaagaagatacgtcttttgggggcaacctcggacgagcagtcttccaggccaaaaagaggattcttgaacctctgggcctggttgaggaacctgttaagacggctccgggaaaaaagaggccggtagagcactctcctgcggagccagactcctcctcgggaaccggaaaagcgggccagcagcctgcaagaaagagattgaattttggtcagactggagacgcagactcagtacctgacccccagcctctcggacagccaccagcagccccctctggtctgggaactaatacgatggcttcaggcagtggcgcaccaatggcagacaataacgagggcgccgacggagtgggtaattcctcgggaaattggcattgcgattccacatggatgggcgacagagtcatcaccaccagcacccgcacctgggccctgcccacctacaacaaccatctgtacaagcaaatctccagccagtctggagccagcaacgacaaccactactttggctacagcaccccctgggggtatttcgacttcaacagattccactgccacttctccccacgtgactggcaaagactcatcaacaacaactggggattccggcccaagagactcagcttcaagctctttaacattcaagtcaaagaggtcacgcagaatgacggtacgacgacgattgccaataaccttaccagcacggttcaggtgtttactgactcggggtaccagctcccgtacgtcctcggctcggcgcatcaaggatgccttccgccgttcccagcagacgtcttcatggtgccacagtatggatacctcaccctgaacaacggcagtcaggcggtaggacgctcttccttttactgcctggagtactttccttctcagatgcttcgtaccggaaacaactttaccttcagctacacctttgaagacgttcctttccatagcagctacgctcacggccaaagtctggaccgtctcatgaatcctctcatcgaccagtacctgtattacttgagcagaacaaacactccaagcggaaccaccacgatgtccaggcttcagttttctcaggccggagcaagtgacgttcgggaccagtctagaaactggcttcctggaccctgttaccgccagcagcgagtatcaaagacagctgcggacaacaacaacagtgattactcgtggactggagctaccaagtaccacctcaatggaagagactctctggtgaatccgggcccagctatggccagccacaaggacgatgaagaaaaatattttcctcagagcggggttctcgtctttggaaaacaagactcgggaaaaactaatgtggacattgaaaaggttatgattacagacgaagaggaaatcaggaccaccaatcccgcggctacggagcagtatggttctgtatctaccaacctccagagcggcaacacacaagcagctacctcagatgtcaacacacaaggcgttcttccaggcatggtctggcaggacagagacgtgtacctgcaggggcccatctgggcaaagattccacacacggacggacattttcacccctctcccctcatgggcggattcggacttaaacaccctcctccacaaattctcatcaagaacaccccggtacctgcgaatccttcgaccactttcagtgcggcaaagtttgtttccttcatcacacagtactccacggggcaggtcagcgtggagatcgagtgggagctgcagaaggagaacagcaaacgctggaatcccgaaattcagtacacttccaactacaacaaatctgttaatgtggactttactgtggacactaatggtgtgtattcagagcctcgccccattggcaccagatacctgactcgtaatctgtaa

SEQ ID NO: 234 - protein, 735 aa, Artificial Sequence
  source: /note="Description of Artificial Sequence: Synthetic polypeptide"
MAADGYLPDWLEDTLSEGIRQWWKLKPGPPPPKPAERHKDDSRGLVLPGYKYLGPFNGLDKGEPVNEADAAALEHDKAYDRQLDSGDNPYLKYNHADAEFQERLKEDTSFGGNLGRAVFQAKKRILEPLGLVEEPVKTAPGKKRPVEHSPAEPDSSSGTGKAGQQPARKRLNFGQTGDADSVPDPQPLGQPPAAPSGLGTNTMASGSGAPMADNNEGADGVGNSSGNWHCDSTWMGDRVITTSTRTWALPTYNNHLYKQISSQSGASNDNHYFGYSTPWGYFDFNRFHCHFSPRDWQRLINNNWGFRPKRLSFKLFNIQVKEVTQNDGTTTIANNLTSTVQVFTDSGYQLPYVLGSAHQGCLPPFPADVFMVPQYGYLTLNNGSQAVGRSSFYCLEYFPSQMLRTGNNFTFSYTFEDVPFHSSYAHGQSLDRLMNPLIDQYLYYLSRTNTPSGTTTMSRLQFSQAGASDVRDQSRNWLPGPCYRQQRVSKTAADNNNSDYSWTGATKYHLNGRDSLVNPGPAMASHKDDEEKYFPQSGVLVFGKQDSGKTNVDIEKVMITDEEEIRTTNPAATEQYGSVSTNLQSGNTQAATSDVNTQGVLPGMVWQDRDVYLQGPIWAKIPHTDGHFHPSPLMGGFGLKHPPPQILIKNTPVPANPSTTFSAAKFVSFITQYSTGQVSVEIEWELQKENSKRWNPEIQYTSNYNKSVNVDFTVDTNGVYSEPRPIGTRYLTRNL

SEQ ID NO: 235 - DNA, 2208 bp, Artificial Sequence
  source: /note="Description of Artificial Sequence: Synthetic polynucleotide"
atggctgccgatggttatcttccagattggctcgaggacactctctctgaaggaataagacagtggtggaaactcaaacctggcccaccaccaccaaagcccgcagagcggcataaggacgacagcaggggtcttgtgcttcctgggtacaagtacctcggacccttcaacggactcgacaagggagagccggtcaacgaggcagacgccgcggccctcgagcacgacaaggcctacgaccggcagctcgacagcggagacaacccgtacctcaagtacaaccacgccgacgcggagtttcaggagcgccttaaagaagatacgtcttttgggggcaacctcggacgagcagtcttccaggcaaaaaagagggttctggaacctctgagcctggttgaggagcctgttaagacggctccgggaaaaaagaggccggtagagcactctcccgcagagccagattcctcctccggaactggaaagtcgggcaaccagcctgcaagaaagagattgaatttcggtcagactggagactcagactccgtacctgacccccagcctctcggacagccaccagcagccccctctggtctgggaactaatacgatggctacaggcagtggcgcaccaatggcagacaataacgagggcgccgacggagtgggtaattcctcgggaaattggcattgcgattccacatggatgggcgacagagtcatcaccaccagcacccgaacctgggccctgcccacctacaacaaccatctgtacaagcaaatatccagccagtctggagccagcaacgacaatcactactttggctacagcaccccctgggggtattttgacttcaacagattccactgccacttttcaccacgtgactggcaaagactcatcaacaacaactggggattccgacccaagagactcaacttcaagctctttaacattcaagtcaaagaggtcacgcagaatgacggtacgacgacgattgccaataaccttaccagcacggttcaggtgtttactgactcggagtaccagctcccgtacgtcctcggctcggcgcatcaaggatgcctcccgccgttcccagcagacgtcttcatggtgccacagtatggatacctcaccctgaacaacgggagtcaggcagtaggacgctcttcattttactgcctagagtactttccttctcagatgctgcgtaccggaaacaactttaccttcagctacacctttgaggacgttcctttccacagcagctacgctcacagccagagtttggaccgtctcatgaatcctctcatcgaccagtacctgtattacttgagcagaacaaacactccaagcggaaccaccacgcagtccaggcttcagttttctcaggccggagcgagtgacattcaggaccagtctaggaactggcttcctggaccctgttaccgtcagcagcgagtatcaaagacatctgcggataacaacaacagtgaatactcgtggactggagctaccaagtaccacctcaatggcagagactctctggtgaatccgggcccggccatggccagccacaaagacgatgaagaaaagttttttcctcagagcggggttcttatctttgggaagcaaggctcagagaaaacaaatgtggatattgaaaaggtcatgattacagacgaagaggaaatcaggaccaccaatcccgtggctacggagcagtatggttctgtatctaccaacctccagagcggcaacacacaagcagctaccgcagatgtcaacacacaaggcgttcttccaggcatggtcgggcaagacagagacgtgtacctgcaggggcctacttgggcaaagattccacacacggacggacattttcacccctctcccctcatgggcggatttggacttaaacaccctcctccacagattctcatcaagaacaccccggtacctgcgaatccttcgaccaccttcagtgcggcaaagtttgcttccttcattacacagtactccacggggcaggtcagcgtggagatcgagtgggagctgcagaaggagaacagcaaacgctggaatcccgagatccagtacacttccaactacaacaagtctgttaatgtggactttactgtggacactaatggcgtgtattcagagcctcgccccattggcaccagatacctgactcgtaatctgtaa

SEQ ID NO: 236 - protein, 735 aa, Artificial Sequence
  source: /note="Description of Artificial Sequence: Synthetic polypeptide"
MAADGYLPDWLEDTLSEGIRQWWKLKPGPPPPKPAERHKDDSRGLVLPGYKYLGPFNGLDKGEPVNEADAAALEHDKAYDRQLDSGDNPYLKYNHADAEFQERLKEDTSFGGNLGRAVFQAKKRVLEPLSLVEEPVKTAPGKKRPVEHSPAEPDSSSGTGKSGNQPARKRLNFGQTGDSDSVPDPQPLGQPPAAPSGLGTNTMATGSGAPMADNNEGADGVGNSSGNWHCDSTWMGDRVITTSTRTWALPTYNNHLYKQISSQSGASNDNHYFGYSTPWGYFDFNRFHCHFSPRDWQRLINNNWGFRPKRLNFKLFNIQVKEVTQNDGTTTIANNLTSTVQVFTDSEYQLPYVLGSAHQGCLPPFPADVFMVPQYGYLTLNNGSQAVGRSSFYCLEYFPSQMLRTGNNFTFSYTFEDVPFHSSYAHSQSLDRLMNPLIDQYLYYLSRTNTPSGTTTQSRLQFSQAGASDIQDQSRNWLPGPCYRQQRVSKTSADNNNSEYSWTGATKYHLNGRDSLVNPGPAMASHKDDEEKFFPQSGVLIFGKQGSEKTNVDIEKVMITDEEEIRTTNPVATEQYGSVSTNLQSGNTQAATADVNTQGVLPGMVGQDRDVYLQGPTWAKIPHTDGHFHPSPLMGGFGLKHPPPQILIKNTPVPANPSTTFSAAKFASFITQYSTGQVSVEIEWELQKENSKRWNPEIQYTSNYNKSVNVDFTVDTNGVYSEPRPIGTRYLTRNL

SEQ ID NO: 237 - DNA, 2208 bp, Artificial Sequence
  source: /note="Description of Artificial Sequence: Synthetic polynucleotide"
atggctgccgatggttatcttccagattggctcgaggacactctctctgaaggaataagacagtggtggaagctcaaacctggcccaccaccaccaaagcccgcagagcggcataaggacgacagcaggggtcttgtgcttcctgggtacaagtacctcggacccttcaacggactcgacaagggagagccggtcaacgaggcagacgccgcggccctcgagcacgacaaggcctacgaccggcagctcgacagcggagacaacccgtacctcaagtacaaccacgccgacgcagagtttcaggagcgccttaaagaagatacgtcttttgggggcaacctcggacgagcagtcttccaggcaaaaaagagggttctggaacctctgggcctggttgaggagcctgttaagacggctccgggaaaaaagaggccggtagagcactctcctgcagagccagattcctcctccggaactggaaagtcgggcaaccagcctgcaagaaagagattgaatttcggtcagactggagactcagactccgtacctgacccccagcctctcggacagccaccagcagccccctctggtctgggaactaatacgatggctacaggcagtggcgcaccaatggcagacaataacgagggcgccgacggagtgggtaattcctcgggaaattggcattgcgattccacatggatgggcgacagagtcatcaccaccagcacccgaacctgggccctgcccacctacaacaaccatctgtacaagcaaatatccagccagtctggagccagcaacgacaatcactactttggctacagcaccccctgggggtattttgacttcaacagattccactgccacttttcaccacgtgactggcaaagactcatcaacaacaactggggattccgacccaagagactcaacttcaagctctttaacattcaagtcaaagaggtcacgcagaatgacggtacgacgacgattgccaataaccttaccagcacggttcaggtgtttactgactcggagtaccagctcccgtacgtcctcggctcggcgcatcaaggatgcctcccgccgttcccagcagacgtcttcatggtgccacagtatggatacctcaccctgaacaacgggagtcaggcagtaggacgctcttcattttactgcctagggtactttccttctcagatgctgcgtaccggaaacaactttaccttcagctacacctttgaggacgttcctttccacagcagctacgctcacagccagagtttggaccgtctcatgaatcctctcatcgaccagtacctgtattacttgagcagaacaaacactccaagcggaaccaccacgcagtccaggcttcagttttctcaggccggagcgagtgacattcgggaccagtctaggaactggcttcctggaccctgttaccgtcagcagcgagtatcaaagacatctgcggataacaacaacagtgaatactcgtggactggagctaccaagtaccacctcaatggcagagactctctggtgaatccgggcccggccatggccagccacaaagacgatgaagaaaagttttttcctcagagcggggttcttatctttgggaagcaaggcccagagaaaacaaatgtggatattgaaaaggtcatgattacagacgaagaggaaatcaggaccaccaatcccgtggctacggagcagtatggttctgtatctaccaacctccagagcggcaacacacaagcagctaccgcagatgtcaacacacaaggcgttcttccaggcatggtctggcaagacagagacgtgtacctgcaggggcctatttgggcaaagattccacacacggacggacattttcacccctctcccctcatgggcggatttggacttaaacaccctcctccacagattctcatcaagaacaccccggtacctgcgaatccttcgaccaccttcagtgcggcaaagtttgcttccttcattacacagtactccacggggcaggtcagcgtggagatcgagtgggagctgcagaaggagaacagcaaacgctggaatcccgagatccagtacacttccaactacaacaagtctgttaatgtggactttactgtggacactaatggcgtgtattcagagcctcgccccattggcaccagatacctgactcgtaatctgtaa

SEQ ID NO: 238 - protein, 735 aa, Artificial Sequence
  source: /note="Description of Artificial Sequence: Synthetic polypeptide"
MAADGYLPDWLEDTLSEGIRQWWKLKPGPPPPKPAERHKDDSRGLVLPGYKYLGPFNGLDKGEPVNEADAAALEHDKAYDRQLDSGDNPYLKYNHADAEFQERLKEDTSFGGNLGRAVFQAKKRVLEPLGLVEEPVKTAPGKKRPVEHSPAEPDSSSGTGKSGNQPARKRLNFGQTGDSDSVPDPQPLGQPPAAPSGLGTNTMATGSGAPMADNNEGADGVGNSSGNWHCDSTWMGDRVITTSTRTWALPTYNNHLYKQISSQSGASNDNHYFGYSTPWGYFDFNRFHCHFSPRDWQRLINNNWGFRPKRLNFKLFNIQVKEVTQNDGTTTIANNLTSTVQVFTDSEYQLPYVLGSAHQGCLPPFPADVFMVPQYGYLTLNNGSQAVGRSSFYCLGYFPSQMLRTGNNFTFSYTFEDVPFHSSYAHSQSLDRLMNPLIDQYLYYLSRTNTPSGTTTQSRLQFSQAGASDIRDQSRNWLPGPCYRQQRVSKTSADNNNSEYSWTGATKYHLNGRDSLVNPGPAMASHKDDEEKFFPQSGVLIFGKQGPEKTNVDIEKVMITDEEEIRTTNPVATEQYGSVSTNLQSGNTQAATADVNTQGVLPGMVWQDRDVYLQGPIWAKIPHTDGHFHPSPLMGGFGLKHPPPQILIKNTPVPANPSTTFSAAKFASFITQYSTGQVSVEIEWELQKENSKRWNPEIQYTSNYNKSVNVDFTVDTNGVYSEPRPIGTRYLTRNL

SEQ ID NO: 239 - protein, 735 aa, Artificial Sequence
  source: /note="Description of Artificial Sequence: Synthetic polypeptide"
MAADGYLPDWLEDTLSEGIRQWWKLKPGPPPPKPAERHKDDSRGLVLPGYKYLGPFNGLDKGEPVNEADAAALEHDKAYDRQLDSGDNPYLKYNHADAEFQERLKEDTSFGGNLGRAVFQAKKRVLEPLGLVEEPVKTAPGKKRPVEHSPAEPDSSSGTGKSGNQPARKRLNFGQTGDSDSVPDPQPLGQPPAAPSGLGTNTMATGSGAPMADNNEGADGVGNSSGNWHCDSTWMGDRVITTSTRTWALPTYNNHLYKQISSQSGASNDNHYFGYSTPWGYFDFNRFHCHFSPRDWQRLINNNWGFRPKRLNFKLFNIQVKEVTQNDGTTTIANNLTSTVQVFTDSEYQLPYVLGSAHQGCLPPFPADVFMVPQYGYLTLNNGSQAVGRSSFYCLEYFPSQMLRTGNNFTFSYTFEDVPFHSSYAHSQSLDRLMNPLIDQYLYYLSRTNTPSGTTTQSRLQFSQAGASDIRDQSRNWLPGPCYRQQRVSKTSADNNNSEYSWTGATKYHLNGRDSLVNPGPAMASHKDDEEKFFPQSGVLIFGKQGPEKTNVDIEKVMITDEEEIRTTNPVATEQYGSVSTNLQSGNTQAATADVNTQGVLPGMVWQDRDVYLQGPIWAKIPHTDGHFHPSPLMGGFGLKHPPPQILIKNTPVPANPSTTFSAAKFASFITQYSTGQVSVEIEWELQKENSKRWNPEIQYTSNYNKSVNVDFTVDTNGVYSEPRPIGTRYLTRNL

SEQ ID NO: 240 - protein, 735 aa, Artificial Sequence; identical to SEQ ID NO: 239
  source: /note="Description of Artificial Sequence: Synthetic polypeptide"

SEQ ID NO: 241 - DNA, 2211 bp, Artificial Sequence
  source: /note="Description of Artificial Sequence: Synthetic polynucleotide"
atggctgccgatggttatcttccagattggctcgaggacactctctctgaaggaataagacagtggtggaagctcaaacctggcccaccaccaccaaagcccgcagagcggcataaggacgacagcaggggtcttgtgcttcctgggtacaagtacctcggacccttcaacggactcgacaagggggagccggtcaacgaggcagacgccgcggccctcgagcacgacaaggcctacgaccggcagctcgacagcggagacaacccgtacctcaagtacaaccacgccgacgcagagtttcaggagcgccttaaagaagatacgtcttttgggggcaacctcggacgagcagtcttccaggcgaaaaagagggttcttgaacctctgcggcctggtttgaggaaacctgttaagacggctccgggaaaaaagaggccggtagagcactctcctgtggagccagactcctcctcgggaaccggaaaagcgggccagcagcctgcaagaaaaagattaaattttggtcagactggagacgcagactccgtacctgacccccagcctctcggacagccaccagcagccccctctggtctgggatctactacaatggctacaggcagtggcgcaccaatggcagacaataacgagggtgccgatggagtgggtaattcctcaggaaattggcattgcgattcccaatggctggacgacagagtcatcgccaccagcacccgaacctgggccctgcccacatacaacaaccacctctacaagcaaatctccagccaatcaggagcctgcaacgacaaccactactttggctacagcaccccctgggggtattttgacttcaacagattccactgccacttttcaccacgtgactggcaaagactcatcaacagcaactggggattccggcccaaaagactcaacttcaagctctttaatattcaagtcaaagaggtcacgcagaatgacggtacgacgacgattgccaataaccttaccagcacggttcaggtgtttactgactcggagtaccagctcccgtacgtcccgggctcggcgcatcaaggatgcctcccgccgtttccagcggacgtcttcatggtcccacagtatggatacctcaccctgaacaacgggagtcaggcggtaggacgctcttccttttactgcctggagtactttccttctcagatgctgcgtactggaaacaactttcagttcagctacacttttgaagacgtgcctttccacagcagctacgctcactgccagagtctggatcggctgatgaatcctctgatcgaccagtacctgtattatctgaacaagacacaaacaaatagtggaactcttcagcagtctcggctactgtttagccaagctggaccaaccaacatgtctcttcaagctaaaaactggctgcctggaccttgctacagacagcagcgtctgtcaaaacaggcaaacgacaataacaactgcaactttccctggactgcagctacaaagtatcatctaaatggccgggactcgttggttaatccaggaccagctatggccagtcacaaggatgacgaagaaaagtttttccccatgcatggaaccctgatatttggtaaacaaggaacaaatgccaacgacgcggatttggaaaatgtcatgattacagatgaagaagaaatcaggcccaccaatcccgtggctacggagcagtacgggactgtgtcaaataatttgcaaaactcaaacactggtccaactacaggaactgtcaatcaccaaggagcgttacctggtatggtgtggcaggatcgagacgtgtacctgcagggacccatttgggccaagattcctcacaccgatggacactttcatccttctccactgatgggaggttttggactcaaacacccgcctcctcagatcatgatcaaaagcactcccgttccagccaatcctcccacaaacttcagttctgccaagtttgcttcttccatcacacagtattccacgggacaggtcagcgtggagatcgagtgggagctgcagaaggagaacagcaaacgctggaatcccgaaattcagtacacttccaactacaacaagtctgttaatgtggactttactgtggacactaatggtgtgtattcagagcctcgccccattggcaccagatacctgactcgtaatctgtaa

SEQ ID NO: 242 - protein, 736 aa, Artificial Sequence
  source: /note="Description of Artificial Sequence: Synthetic polypeptide"
MAADGYLPDWLEDTLSEGIRQWWKLKPGPPPPKPAERHKDDSRGLVLPGYKYLGPFNGLDKGEPVNEADAAALEHDKAYDRQLDSGDNPYLKYNHADAEFQERLKEDTSFGGNLGRAVFQAKKRVLEPLRPGLRKPVKTAPGKKRPVEHSPVEPDSSSGTGKAGQQPARKRLNFGQTGDADSVPDPQPLGQPPAAPSGLGSTTMATGSGAPMADNNEGADGVGNSSGNWHCDSQWLDDRVIATSTRTWALPTYNNHLYKQISSQSGACNDNHYFGYSTPWGYFDFNRFHCHFSPRDWQRLINSNWGFRPKRLNFKLFNIQVKEVTQNDGTTTIANNLTSTVQVFTDSEYQLPYVPGSAHQGCLPPFPADVFMVPQYGYLTLNNGSQAVGRSSFYCLEYFPSQMLRTGNNFQFSYTFEDVPFHSSYAHCQSLDRLMNPLIDQYLYYLNKTQTNSGTLQQSRLLFSQAGPTNMSLQAKNWLPGPCYRQQRLSKQANDNNNCNFPWTAATKYHLNGRDSLVNPGPAMASHKDDEEKFFPMHGTLIFGKQGTNANDADLENVMITDEEEIRPTNPVATEQYGTVSNNLQNSNTGPTTGTVNHQGALPGMVWQDRDVYLQGPIWAKIPHTDGHFHPSPLMGGFGLKHPPPQIMIKSTPVPANPPTNFSSAKFASSITQYSTGQVSVEIEWELQKENSKRWNPEIQYTSNYNKSVNVDFTVDTNGVYSEPRPIGTRYLTRNL

SEQ ID NO: 243 - DNA, 2208 bp, Artificial Sequence
  source: /note="Description of Artificial Sequence: Synthetic polynucleotide"
atggctgccgatggttatcttccagattggctcgaggacactctctctgaaggaataagacagtggtggaagctcaaacctggcccaccaccaccaaagcccgcagagcggcataaggacgacagcaggggtcttgtgcttcctgggtacaagtacctcggacccttcaacggactcgacaagggagagccggtcaacgaggcagacgccgcggccctcgagcacgacaaggcctacgaccggcagctcgacagcggagacaacccgtacctcaagtacaaccacgccgacgcggagtttcaggagcgccttaaagaggatacgtcttttgggggcaacctcggacgagcagtcttccaggcaaaaaagagggttctggaacctctgggcctggttgaggagcctgttaagacggctccgggaaaaaagaggccggtagagcactctcctgcagagccagattcctcctccggaactggaaagtcgggcaaccagcctgcaagaaagagattgaatttcggtcagactggagactcagactccgtacctgacccccagcctctcggacagccaccagcagccccctctggtctgggaactaatacgatggctacaggcagtggcgcaccaatggcagacaataacgagggcgccgacggagtgggtaattcctcgggaaattggcattgcgattccacatggatgggcgacagagtcatcaccaccagcacccgaacctgggccctgcccacctacaacaaccatctgtacaagcaaatatccagccagtctggagccagcaacgacaatcactactttggctacagcaccccctgggggtattttgacttcaacagattccactgccacttttcaccacgtgactggcaaagactcatcaacaacaactggggattccgacccaagagactcaacttcaagctctttaacattcaagtcaaagaggtcacgcagaatgacggtacgacgacgattgccaataaccttaccagcacggttcaggtgtttactgactcggagtaccagctcccgtacgtcctcggctcggcgcatcaaggatgcctcccgccgttcccagcagacgtcttcatggtgccacagtatggatacctcaccctgaacaacgggagtcaggcagtaggacgctcttcattttactgcctagagtactttccttctcagatgctgcgtaccggaaacagctttaccttcagctacacctttgaggacgttcctttccacagcagctacgctcacagccagagtttggaccgtctcatgaatcctctcatcgaccagtacctgtattacttgagcagaacaaacactccaagcggaaccaccacgcagtccaggcttcagttttctcaggccggagcgagtgacattcgggaccagtctaggaactggcttcctggaccctgttaccgtcagcagcgagtatcaaagacatctgcggataacaacaacagtgaatactcgtggactggagctaccaagtaccacctcaatggcagagactctctggtgaatccgggcccggccatggccagccacaaagacgatgaagaaaagttctttcctcagagcggggttcttatctttgggaagcaaggctcagagaaaacaaatgtggatattgaaaaggtcatgattacagacgaagaggaaatcaggaccaccaatcccgtggctacggagcagtatggttctgtatctaccaacctccagagcggcaacacacaagcagctaccgcagatgtcaacacacaaggcgttcttccaggcatggtctggcaagacagagacgtgtacctgcaggggcctatttgggcaaagattccacacacggacggacattttcacccctctcccctcatgggcggatttggacttaaacaccctcctccacagattctcatcaagaacaccccggtacctgcgaatccttcgaccaccttcagtgcggcaaagtttgcttccttcattacacagtactccacggggcaggtcagcgtggagatcgagtgggagctgcagaaggagaacagcaaacgctggaatcccgagatccagtacacttccaactacaacaagtctgttaatgtggactttactgtggacactaatggcgtgtattcagagcctcgccccattggcaccagatacctgactcgtaatctgtaa

SEQ ID NO: 244 - protein, 735 aa, Artificial Sequence
  source: /note="Description of Artificial Sequence: Synthetic polypeptide"
MAADGYLPDWLEDTLSEGIRQWWKLKPGPPPPKPAERHKDDSRGLVLPGYKYLGPFNGLDKGEPVNEADAAALEHDKAYDRQLDSGDNPYLKYNHADAEFQERLKEDTSFGGNLGRAVFQAKKRVLEPLGLVEEPVKTAPGKKRPVEHSPAEPDSSSGTGKSGNQPARKRLNFGQTGDSDSVPDPQPLGQPPAAPSGLGTNTMATGSGAPMADNNEGADGVGNSSGNWHCDSTWMGDRVITTSTRTWALPTYNNHLYKQISSQSGASNDNHYFGYSTPWGYFDFNRFHCHFSPRDWQRLINNNWGFRPKRLNFKLFNIQVKEVTQNDGTTTIANNLTSTVQVFTDSEYQLPYVLGSAHQGCLPPFPADVFMVPQYGYLTLNNGSQAVGRSSFYCLEYFPSQMLRTGNSFTFSYTFEDVPFHSSYAHSQSLDRLMNPLIDQYLYYLSRTNTPSGTTTQSRLQFSQAGASDIRDQSRNWLPGPCYRQQRVSKTSADNNNSEYSWTGATKYHLNGRDSLVNPGPAMASHKDDEEKFFPQSGVLIFGKQGSEKTNVDIEKVMITDEEEIRTTNPVATEQYGSVSTNLQSGNTQAATADVNTQGVLPGMVWQDRDVYLQGPIWAKIPHTDGHFHPSPLMGGFGLKHPPPQILIKNTPVPANPSTTFSAAKFASFITQYSTGQVSVEIEWELQKENSKRWNPEIQYTSNYNKSVNVDFTVDTNGVYSEPRPIGTRYLTRNL

SEQ ID NO: 245 - DNA, 2211 bp, Artificial Sequence; identical to SEQ ID NO: 135
  source: /note="Description of Artificial Sequence: Synthetic polynucleotide"

SEQ ID NO: 246 - protein, 736 aa, Artificial Sequence
  source: /note="Description of Artificial Sequence: Synthetic polypeptide"
MAADGYLPDWLEDTLSEGIRQWWKLKPGPPPPKPAERHKDDSRGLVLPGYKYLGPGNGLDKGEPVNAADAAALEHDKAYDQQLKAGDNPYLKYNHADAEFQERLKEDTSFGGNLGRAVFQAKKRLLEPLGLVEEAAKTAPGKKRPVEQSPQEPDSSAGIGKSGSQPAKKKLNFGQTGDTESVPDPQPIGEPPAAPSGVGSLTMASGGGAPVADNNEGADGVGSSSGNWHCDSQWLGDRVITTSTRTWALPTYNNHLYKQISNSTSGGSSNDNAYFGYSTPWGYFDFNRFHCHFSPRDWQRLINNNWGFRPKRLNFKLFNIQVKEVTDNNGVKTIANNLTSTVQVFTDSDYQLPYVLGSAHEGCLPPFPADVFMIPQYGYLTLNDGGQAVGRSSFYCLEYFPSQMLRTGNNFQFSYEFENVPFHSSYAHSQSLDRLMNPLIDQYLYYLSKTINGSGQNQQTLKFSVAGPSNMAVQGRNYIPGPSYRQQRVSTTVTQNNNSEFAWPGASSWALNGRNSLMNPGPAMASHKEGEDRFFPLSGSLIFGKQGTGRDNVDADKVMITNEEEIKTTNPVATESYGQVATNHQSAQAQAQTGWVQNQGILPGMVWQDRDVYLQGPIWAKIPHTDGNFHPSPLMGGFGMKHPPPQILIKNTPVPADPPTAFNKDKLNSFITQYSTGQVSVEIEWELQKENSKRWNPEIQYTSNYYKSNNVEFAVSTEGVYSEPRPIGTRYLTRNL

SEQ ID NO: 247 - DNA, 2211 bp, Artificial Sequence
  source: /note="Description of Artificial Sequence: Synthetic polynucleotide"
atggctgccgatggttatcttccagattggctcgaggacactctctctgaaggaataagacagtggtggaagctcaaacctggcccaccaccaccaaagcccgcagagcggcataaggacgacagcaggggtcttgtgcttcctgggtacaagtacctcggacccggcaacggactcgacaagggggagccggtcaacgcagcagacgcggcggccctcgagcacgacaaggcctacgaccagcagctcaaggccggagacaacccgtacctcaagtacaaccacgccgacgccgagttccaggagcggctcaaagaagatacgtcttttgggggcaacctcgggcgagcagtcttccaggccaaaaagaggcttcttgaacctcttggtctggttgaggaagcggctaagacggctcctggaaagaagaggcctgtagagcagtctcctcaggaaccggactcctccgcgggtattggcaaatcgggttcacagcccgctaaaaagaaactcaatttcggtcagactggcgacacagagtcagtccccgaccctcaaccaatcggagaacctcccgcagccccctcaggtgtgggatctcttacaatggcttcaggtggtggcgcaccagtggcagacaataacgaaggtgccgatggagtgggtagttcctcgggaaattggcattgcgattcccaatggctgggggacagagtcatcaccaccagcacccgaacctgggccctgcccacctacaacaatcacctctacaagcaaatctccaacagcacatctggaggatcttcaaatgacaacgcctacttcggctacagcaccccctgggggtattttgacttcaacagattccactgccacttctcaccacgtgactggcagcgactcatcaacaacaactggggattccggcctaagcgactcaacttcaagctcttcaacattcaggtcaaagaggttacggacaacaatggagtcaagaccatcgccaataaccttaccagcacggtccaggtcttcacggactcagactatcagctcccgtacgtgctcgggtcggctcacgagggctgcctcccgccgttcccagcggacgttttcatgattcctcagtacgggtatctgacgcttaatgatgggagccaggccgtgggtcgttcgtccttttactgcctggaatatttcccgtcgcaaatgctaagaacgggtaacaacttccagttcagctacgagtttgagaacgtacctttccatagcagctacgctcacagccaaagcctggaccgactaatgaatccactcatcgaccaatacttgtactatctctcaaagactattaacggttctggacagaatcaacaaacgctaaaattcagcgtggccggacccagcaacatggctgtccagggaagaaactacatacctggacccagctaccgacaacaacgtgtctcaaccactgtgactcaaaacaacaacagcgaatttgcttggcctggagcttcttcttgggctctcaatggacgtaatagcttgatgaatcctggacctgctatggccagccacaaagaaggagaggaccgtttctttcctttgtctggatctttaatttttggcaaacaaggaactggaagagacaacgtggatgcggacaaagtcatgataaccaacgaagaagaaattaaaactactaacccggtagcaacggagtcctatggacaagtggccacaaaccaccagagtgcccaagcacaggcgcagaccggctgggttcaaaaccaaggaatacttccgggtatggtttggcaggacagagatgtgtacctgcaaggacccatttgggccaaaattcctcacacggacggcaactttcacccttctccgctaatgggagggtttggaatgaagcacccgcctcctcagatcctcatcaaaaacacacctgtacctgcggatcctccaacggctttcaataaggacaagctgaactctttcatcacccagtattctactggccaagtcagcgtggagattgagtgggagctgcagaaggaaaacagcaagcgctggaacccggagatccagtacacttccaactattacaagtctaataatgttgaatttgctgttaatactgaaggtgtatatagtgaaccccgccccattggcaccagatacctgactcgtaatctgtaa

SEQ ID NO: 248 - protein, 736 aa, Artificial Sequence
  source: /note="Description of Artificial Sequence: Synthetic polypeptide"
MAADGYLPDWLEDTLSEGIRQWWKLKPGPPPPKPAERHKDDSRGLVLPGYKYLGPGNGLDKGEPVNAADAAALEHDKAYDQQLKAGDNPYLKYNHADAEFQERLKEDTSFGGNLGRAVFQAKKRLLEPLGLVEEAAKTAPGKKRPVEQSPQEPDSSAGIGKSGSQPAKKKLNFGQTGDTESVPDPQPIGEPPAAPSGVGSLTMASGGGAPVADNNEGADGVGSSSGNWHCDSQWLGDRVITTSTRTWALPTYNNHLYKQISNSTSGGSSNDNAYFGYSTPWGYFDFNRFHCHFSPRDWQRLINNNWGFRPKRLNFKLFNIQVKEVTDNNGVKTIANNLTSTVQVFTDSDYQLPYVLGSAHEGCLPPFPADVFMIPQYGYLTLNDGSQAVGRSSFYCLEYFPSQMLRTGNNFQFSYEFENVPFHSSYAHSQSLDRLMNPLIDQYLYYLSKTINGSGQNQQTLKFSVAGPSNMAVQGRNYIPGPSYRQQRVSTTVTQNNNSEFAWPGASSWALNGRNSLMNPGPAMASHKEGEDRFFPLSGSLIFGKQGTGRDNVDADKVMITNEEEIKTTNPVATESYGQVATNHQSAQAQAQTGWVQNQGILPGMVWQDRDVYLQGPIWAKIPHTDGNFHPSPLMGGFGMKHPPPQILIKNTPVPADPPTAFNKDKLNSFITQYSTGQVSVEIEWELQKENSKRWNPEIQYTSNYYKSNNVEFAVNTEGVYSEPRPIGTRYLTRNL

SEQ ID NO: 249 - DNA, 2208 bp, Artificial Sequence
  source: /note="Description of Artificial Sequence: Synthetic polynucleotide"
atggctgccgatggttatcttccagattggctcgaggacactctctctgaaggaataagacagcggtggaagctcaaacctggcccaccaccaccagagcccgcagagcggcataaggacgacagcaggggtcttgtgcttcctgggtacaagtacctcggacccttcaacggactcgacaagggagagccggtcaacgaggcagacgccgcggccctcgagcacgacaaagcctacgaccggcagctcgacagcggagacaacccgtacctcaagtacaaccacgccgacgcggagtttcaggagcgccttaaagaagatacgtcttttgggggcaacctcggacgagcagtcttccaggcgaaaaagagggtacttgaacctctgggcctggttgaggaacctgttaagacggctccgggaaaaaagaggccggtagagcactctcctgtggagccagactcctcctcgggaaccggaaaggcgggccagcagcctgcaagaaaaagattgaattttggtcagactggagacgcagactcagtacctgacccccagcctctcggacagccaccagcagccccctctggtctgggaactaatacgatggctacaggcagtggcgcaccaatggcagacaataacgagggcgccgacggagtgggtaattcctcgggaaattggcattgcgattccacatggatgggcgacagagtcatcaccaccagcacccgaacctgggccctgcccacctacaacaaccacctctacaaacaaatttccagccaatcaggagcctcgaacgacaatcactactttggctacagcaccccttgggggtattttgacttcaacagattccactgccacttttcaccacgtgactggcaaagactcatcaacaacaactggggattccgacccaagagactcaacttcaagctctttaacattcaagtcaaagaggtcacgcagaatgacggtacgacgacgattgccaataaccttaccggcacggttcaggtgtttactgactcggagtaccagctcccgtacgtcctcggctcggcgcatcaaggatgcctcccgccgttcccagcagacgtcttcatggtgccacagtatggatacctcaccctgaacaacgggagtcaggcagtaggacgctcttcattttactgcctggagtactttccttctcagatgctgcgtaccggaaacaactttaccttcagctacacttttgaggacgttcctttccacagcagctacgctcacagccagagtctgggccgtctcatgaatcctctcatcgaccagtacctgtattacttgagcagaacaaacactccaagtggaaccaccacgcagtcaaggcttcagttttctcaggccggagcgagtgacattcgggaccagtctaggaactggcttcctggaccctgttaccgccagcagcgagtatcaaagacatctgcggataacaacaacagtgaatactcgtggactggagctaccaagtaccacctcaatggcagagactctctggtgaatccgggcccggccatggcaagccacaaggacgatgaagaaaagttttttcctcagagcggggttctcatctttgggaagcaaggctcagagaaaacaaatgtggacattgaaaaggtcatgattacagacgaagaggaaatcaggacaaccaatcccgtggctacggagcagtatggttctgtatctaccaacctccagagaggcaacagacaagcagctaccgcagatgtcaacacacaaggcgttcttccaggcatggtctggcaggacagagatgtgtaccttcaggggcccatctgggcaaagattccacacacggacggacattttcacccctctcccctcatgggtggattcggacttaaacaccctcctccacagattctcatcaagaacaccccggtacctgcgaatccttcgaccaccttcagtgcggcaaagtttgcttccttcatcacacagtactccacgggacaggtcagcgtggagatcgagtgggagctgcagaaggaaaacagcaaacgctggaatcccgaaattcagtacacttccaactacaacaagtctgttaatgtggactttactgtggacactaatggcgtgtattcagagcctcgccccattggcaccagatacctgactcgtaatctgtaa

SEQ ID NO: 250 - protein, 735 aa, Artificial Sequence
  source: /note="Description of Artificial Sequence: Synthetic polypeptide"
MAADGYLPDWLEDTLSEGIRQRWKLKPGPPPPEPAERHKDDSRGLVLPGYKYLGPFNGLDKGEPVNEADAAALEHDKAYDRQLDSGDNPYLKYNHADAEFQERLKEDTSFGGNLGRAVFQAKKRVLEPLGLVEEPVKTAPGKKRPVEHSPVEPDSSSGTGKAGQQPARKRLNFGQTGDADSVPDPQPLGQPPAAPSGLGTNTMATGSGAPMADNNEGADGVGNSSGNWHCDSTWMGDRVITTSTRTWALPTYNNHLYKQISSQSGASNDNHYFGYSTPWGYFDFNRFHCHFSPRDWQRLINNNWGFRPKRLNFKLFNIQVKEVTQNDGTTTIANNLTGTVQVFTDSEYQLPYVLGSAHQGCLPPFPADVFMVPQYGYLTLNNGSQAVGRSSFYCLEYFPSQMLRTGNNFTFSYTFEDVPFHSSYAHSQSLGRLMNPLIDQYLYYLSRTNTPSGTTTQSRLQFSQAGASDIRDQSRNWLPGPCYRQQRVSKTSADNNNSEYSWTGATKYHLNGRDSLVNPGPAMASHKDDEEKFFPQSGVLIFGKQGSEKTNVDIEKVMITDEEEIRTTNPVATEQYGSVSTNLQRGNRQAATADVNTQGVLPGMVWQDRDVYLQGPIWAKIPHTDGHFHPSPLMGGFGLKHPPPQILIKNTPVPANPSTTFSAAKFASFITQYSTGQVSVEIEWELQKENSKRWNPEIQYTSNYNKSVNVDFTVDTNGVYSEPRPIGTRYLTRNL

SEQ ID NO: 251 - DNA, 2208 bp, Artificial Sequence
  source: /note="Description of Artificial Sequence: Synthetic polynucleotide"
atggctgccgatggttatcttccagattggctcgaggacactctctctgaaggaataagacagcggtggaagctcaaacctggcccaccaccaccagagcccgcagagcggcataaggacgacagcaggggtcttgtgcttcctgggtacaagtacctcggacccttcaacggactcgacaagggagagccggtcaacgaggcagacgccgcggccctcgagcacgacaaagcctacgaccggcagctcgacagcggagacaacccgtacctcaagtacaaccacgccgacgcggagtttcaggagcgccttaaagaagatacgtcctttgggggcaacctcggacgagcagtcttccaggcgaaaaagagggtacttgaacctctgggcctggttgaggaacctgttaagacggctccgggaaaaaagaggccggtagagcactctcctgtggagccagactcctcctcgggaaccggaaaggcgggccagcagcctgcaagaaaaagattgaattttggtcagactggagacgcagactcagtacctgacccccagcctctcggacagccaccagcagccccctctggtctgggaactaatacgatggctacaggcagtggcgcaccaatggcagacaataacgagggcgccgacggagtgggtaattcctcgggaaattggcattgcgattccacatggatgggcgacagagtcatcaccaccagcacccgaacctgggccctgcccacctacaacaaccacctctacaaacaaatttccagccaatcaggagcctcgaacgacaatcactactttggctacagcaccccttgggggtattttgacttcaacagattccactgccacttttcaccacgtgactggcaaagactcatcaacaacaactggggattccgacccaagagactcaacttcaagctctttaacattcaagtcaaagaggtcacgcagaatgacggtacgacgacgattgccaataaccttaccagcacggttcaggtgtttactgactcggagtaccagctcccgtacgtcctcggctcggcgcatcaaggatgcctcccgccgttcccagcagacgtcttcatggtgccacagtatggatacctcaccctgaacaacgagagtcaggcagtaggacgctcttcattttactgcctggagtactttccttctcagatgctgcgtaccggaaacaactttaccttcagctacacttttgaggacgttcctttccacagcagctacgctcacagccagagtctgggccgtctcatgaatcctctcatcgaccagtacctgtattacttgagcagaacaaacactccaagtggaaccaccacgcagtcaaggcttcagttttctcaggccggagcgagtgacattcgggaccagtctaggaactggcttcctggaccctgttaccgccagcagcgagtatcaaagacatctgcggataacaacaacagtgaatactcgtggactggagctaccaagtaccacctcaatggcagagactctctggtgaatccgggcccggccatggcaagccacaaggacgatgaagaaaagttttttcctcagagcggggttctcatctttgggaagcaaggctcagagaaaacaaatgtggacattgaaaaggtcatgattacagacgaagaggaaatcaggacaaccaatcccgtggctacggagcagtatggttctgtatctaccaacctccagagaggcaacagacaagcagctaccgcagatgtcaacacacaaggcgttcttccaggcatggtctggcaggacagagatgtgtaccttcaggggcccatctgggcaaagattccacacacggacggacattttcacccctctcccctcatgggtggattcggacttaaacaccctcctccacagattctcatcaagaacaccccggtacctgcgaatccttcgaccaccttcagtgcggcaaagtttgcttccttcatcacacagtactccacgggacaggtcagcgtggagatcgagtgggagctgcagaaggaaaacagcaaacgctggaatcccgaaattcagtacacttccaactacaacaagtctgttaatgtggactttactgtggacactaatggcgtgtattcagagcctcgccccattggcaccagatacctgactcgtaatctgtaa

SEQ ID NO: 252 - protein, 735 aa, Artificial Sequence
  source: /note="Description of Artificial Sequence: Synthetic polypeptide"
MAADGYLPDWLEDTLSEGIRQRWKLKPGPPPPEPAERHKDDSRGLVLPGYKYLGPFNGLDKGEPVNEADAAALEHDKAYDRQLDSGDNPYLKYNHADAEFQERLKEDTSFGGNLGRAVFQAKKRVLEPLGLVEEPVKTAPGKKRPVEHSPVEPDSSSGTGKAGQQPARKRLNFGQTGDADSVPDPQPLGQPPAAPSGLGTNTMATGSGAPMADNNEGADGVGNSSGNWHCDSTWMGDRVITTSTRTWALPTYNNHLYKQISSQSGASNDNHYFGYSTPWGYFDFNRFHCHFSPRDWQRLINNNWGFRPKRLNFKLFNIQVKEVTQNDGTTTIANNLTSTVQVFTDSEYQLPYVLGSAHQGCLPPFPADVFMVPQYGYLTLNNESQAVGRSSFYCLEYFPSQMLRTGNNFTFSYTFEDVPFHSSYAHSQSLGRLMNPLIDQYLYYLSRTNTPSGTTTQSRLQFSQAGASDIRDQSRNWLPGPCYRQQRVSKTSADNNNSEYSWTGATKYHLNGRDSLVNPGPAMASHKDDEEKFFPQSGVLIFGKQGSEKTNVDIEKVMITDEEEIRTTNPVATEQYGSVSTNLQRGNRQAATADVNTQGVLPGMVWQDRDVYLQGPIWAKIPHTDGHFHPSPLMGGFGLKHPPPQILIKNTPVPANPSTTFSAAKFASFITQYSTGQVSVEIEWELQKENSKRWNPEIQYTSNYNKSVNVDFTVDTNGVYSEPRPIGTRYLTRNL

SEQ ID NO: 253 - DNA, 2208 bp, Artificial Sequence
  source: /note="Description of Artificial Sequence: Synthetic polynucleotide"
atggctgccgatggttatcttccagattggctcgaggacactctctctgaaggaataagacagcggtggaagctcaaacctggcccaccaccaccagagcccgcagagcggcataaggacgacagcaggggtcttgtgcttcctgggtacaagtacctcggacccttcaacggactcgacaagggagagccggtcaacgaggcagacgccgcggccctcgagcacgacaaagcctacgaccggcagctcgacagcggagacaacccgtacctcaagtacaaccacgccgacgcggagtttcaggagcgccttaaagaagatacgtcttttgggggcaacctcggacgagcagtcttccaggcgaaaaagagggtacttgaacctctgggcctggttgaggaacctgttaagacggctccgggaaaaaagaggccggtagagcactctcctgtggagccagactcctcctcgggaaccggaaaggcgggccagcagcctgcaagaaaaagattgaattttggtcagactggagacgcagactcagtacctgacccccagcctctcggacagccaccagcagccccctctggtctgggaactaatacgatggctacaggcagtggcgcaccaatggcagacaataacgagggcgccgacggagtgggtaattcctcgggaaattggcattgcgattccacatggatgggcgacagagtcatcaccaccagcacccgaacctgggccctgcccacctacaacaaccacctctacaaacaaatttccagccaatcaggagcctcgaacgacaatcactactttggctacagcaccccttgggggtattttgacttcaacagattccactgccacttttcaccacgtgactggcaaagactcatcaacaacaactggggattccgacccaagagactcaacttcaagctctttaacattcaagtcaaagaggtcacgcagaatgacggtacgacgacgattgccaataaccttaccagcacggttcaggtgtttactgactcggagtaccagctcccgtacgtcctcggctcggcgcatcaaggatgcctcccgccgttcccagcagacgtcttcatggtaccacagtatggatacctcaccctgaacaacgggagtcaggcagtaggacgctcttcattttactgcctggagtactttccttctcagatgctgcgtaccggaaacaactttaccttcagctacacttttgaggacgttcctttccacagcagctacgctcacagccagagtctgggccgtctcatgaatcctctcatcgaccagtacctgtattacttgagcagaacaaacactccaagtggaaccaccacgcagtcaaggcttcagttttctcaggccggagcgagtgacattcgggaccagtctaggaactggcttcctggaccctgttaccgccagcagcgagtatcaaagacatctgcggataacaacaacagtgaatactcgtggactggagctaccaagtaccacctcaatggcagagactctctggtgaatccgggcccggccatggcaagccacaaggacgatgaagaaaagttttttcctcagagcggggttctcatctttgggaagcaaggctcagagaaaacaaatgtggacattgaaaaggtcatgattacagacgaagaggaaatcaggacaaccaatcccgtggctacggagcagtatggttctgtatctaccaacctccagagaggcaacagacaagcagctaccgcagatgtcaacacacaaggcgttcttccaggcatggtctggcaggacagagatgtgtaccttcaggggcccatctgggcaaagattccacacacggacggacattttcacccctctcccctcatgggtggattcggacttaaacaccctcctccacagattctcatcaagaacaccccggtacctgcgaatccttcgaccaccttcagtgcggcaaagtttgcttccttcatcacacagtactccacgggacaggtcagcgtggagatcgagtgggagctgcagaaggaaaacagcaaacgctggaatcccgaaattcagtacacttccaactacaacaagtctgttaatgtggactttactgtggacactaatggcgtgtattcagagcctcgccccattggcaccagatacctgactcgtaatctgtaa

SEQ ID NO: 254 - protein, 735 aa, Artificial Sequence
  source: /note="Description of Artificial Sequence: Synthetic polypeptide"
MAADGYLPDWLEDTLSEGIRQRWKLKPGPPPPEPAERHKDDSRGLVLPGYKYLGPFNGLDKGEPVNEADAAALEHDKAYDRQLDSGDNPYLKYNHADAEFQERLKEDTSFGGNLGRAVFQAKKRVLEPLGLVEEPVKTAPGKKRPVEHSPVEPDSSSGTGKAGQQPARKRLNFGQTGDADSVPDPQPLGQPPAAPSGLGTNTMATGSGAPMADNNEGADGVGNSSGNWHCDSTWMGDRVITTSTRTWALPTYNNHLYKQISSQSGASNDNHYFGYSTPWGYFDFNRFHCHFSPRDWQRLINNNWGFRPKRLNFKLFNIQVKEVTQNDGTTTIANNLTSTVQVFTDSEYQLPYVLGSAHQGCLPPFPADVFMVPQYGYLTLNNGSQAVGRSSFYCLEYFPSQMLRTGNNFTFSYTFEDVPFHSSYAHSQSLGRLMNPLIDQYLYYLSRTNTPSGTTTQSRLQFSQAGASDIRDQSRNWLPGPCYRQQRVSKTSADNNNSEYSWTGATKYHLNGRDSLVNPGPAMASHKDDEEKFFPQSGVLIFGKQGSEKTNVDIEKVMITDEEEIRTTNPVATEQYGSVSTNLQRGNRQAATADVNTQGVLPGMVWQDRDVYLQGPIWAKIPHTDGHFHPSPLMGGFGLKHPPPQILIKNTPVPANPSTTFSAAKFASFITQYSTGQVSVEIEWELQKENSKRWNPEIQYTSNYNKSVNVDFTVDTNGVYSEPRPIGTRYLTRNL

SEQ ID NO: 255 - DNA, 2208 bp, Artificial Sequence
  source: /note="Description of Artificial Sequence: Synthetic polynucleotide"
atggctgccgatggttatcttccagattggctcgaggacactctctctgaaggaataagacagcggtggaagctcaaacctggcccaccaccaccagagcccgcagagcggcataaggacgacagcaggggtcttgtgcttcctgggtacaagtacctcggacccttcaacggactcgacaagggagagccggtcaacgaggcagacgccgcggccctcgagcacgacaaagcctacgaccggcagctcgacagcggagacaacccgtacctcaagtacaaccacgccgacgcggagtttcaggagcgccttaaagaagatacgtcttttgggggcaacctcggacgagcagtcttccaggcgaaaaagagggtactcgaacctctgggcctggttgaggaacctgttaagacggctccgggaaaaaagaggccggtagagcactctcctgtggagccagactcctcctcgggaaccggaaaggcgggccagcagcctgcaagaaaaagattgaattttggtcagactggagacgcagactcagtacctgacccccagcctctcggacagccaccagcagccccctctggtctgggaactaatacgatggctacaggcagtggcgcaccaatggcagacaataacgagggcgccgacggagtgggtaattcctcgggaaattggcattgcgattccacatggatgggcgacagagtcatcaccaccagcacccgaacctgggccctgcccacctacaacaaccacctctacaaacaaatttccagccaatcaggagcctcgaacgacaatcactactttggctacagcaccccttgggggtattttgacttcaacagattccactgccacttttcaccacgtgactggcaaagactcatcaacaacaactggggattccgacccaagagactcaacttcaagctctttaacattcaagtcaaagaggtcacgcagaatgacggtacgacgacgattgccaataaccttaccagcacggttcaggtgtttactgactcggagtaccagctcccgtacgtcctcggctcggcgcatcaaggatgcctcccgccgttcccagcagacgtcttcatggtgccacagtatggatacctcaccctgaacaacgggagtcaggcagcaggacgctcttcattttactgcctggagtactttccttctcagatgctgcgtaccggaaacaactttaccttcagctacacttttgaggacgttcctttccacagcagctacgctcacagccagagtctgggccgtctcatgaatcctctcatcgaccagtacctgtattacttgagcagaacaaacactccaagtggaaccaccacgcagtcaaggcttcagttttctcaggccggagcgagtgacattcgggaccagtctaggaactggcttcctggaccctgttaccgccagcagcgagtatcaaagacatctgcggataacaacaacagtgaatactcgtggactggagctaccaagtaccacctcaatggcagagactctctggtgaatccgggcccggccatggcaagccacaaggacgatgaagaaaagttttttcctcagagcggggttctcatctttgggaagcaaggctcagagaaaacaaatgtggacattgaaaaggtcatgattacagacgaagaggaaatcaggacaaccaatcccgtggctacggagcagtatggttctgtatctaccaacctccagagaggcaacagacaagcagctaccgcagatgtcaacacacaaggcgttcttccaggcatggtctggcaggacagagatgtgtaccttcaggggcccatctgggcaaagattccacacacggacggacattttcacccctctcccctcatgggtggattcggacttaaacaccctcctccacagattctcatcaagaacaccccggtacctgcgaatccttcgaccaccttcagtgcggcaaagtttgcttccttcatcacacagtactccacgggacaggtcagcgtggagatcgagtgggagctgcagaaggaaaacagcaaacgctggaatcccgaaattcagtacacttccaactacaacaagtccgttaatgtggactttactgtggacactaatggcgtgtattcagagcctcgccccattggcaccagatacctgactcgtaatctgtaa

SEQ ID NO: 256 - protein, 735 aa, Artificial Sequence
  source: /note="Description of Artificial Sequence: Synthetic polypeptide"
MAADGYLPDWLEDTLSEGIRQRWKLKPGPPPPEPAERHKDDSRGLVLPGYKYLGPFNGLDKGEPVNEADAAALEHDKAYDRQLDSGDNPYLKYNHADAEFQERLKEDTSFGGNLGRAVFQAKKRVLEPLGLVEEPVKTAPGKKRPVEHSPVEPDSSSGTGKAGQQPARKRLNFGQTGDADSVPDPQPLGQPPAAPSGLGTNTMATGSGAPMADNNEGADGVGNSSGNWHCDSTWMGDRVITTSTRTWALPTYNNHLYKQISSQSGASNDNHYFGYSTPWGYFDFNRFHCHFSPRDWQRLINNNWGFRPKRLNFKLFNIQVKEVTQNDGTTTIANNLTSTVQVFTDSEYQLPYVLGSAHQGCLPPFPADVFMVPQYGYLTLNNGSQAAGRSSFYCLEYFPSQMLRTGNNFTFSYTFEDVPFHSSYAHSQSLGRLMNPLIDQYLYYLSRTNTPSGTTTQSRLQFSQAGASDIRDQSRNWLPGPCYRQQRVSKTSADNNNSEYSWTGATKYHLNGRDSLVNPGPAMASHKDDEEKFFPQSGVLIFGKQGSEKTNVDIEKVMITDEEEIRTTNPVATEQYGSVSTNLQRGNRQAATADVNTQGVLPGMVWQDRDVYLQGPIWAKIPHTDGHFHPSPLMGGFGLKHPPPQILIKNTPVPANPSTTFSAAKFASFITQYSTGQVSVEIEWELQKENSKRWNPEIQYTSNYNKSVNVDFTVDTNGVYSEPRPIGTRYLTRNL

SEQ ID NO: 257 - protein, 738 aa, Artificial Sequence; identical to SEQ ID NO: 99
  source: /note="Description of Artificial Sequence: Synthetic polypeptide"

SEQ ID NO: 258 - DNA, 2217 bp, Artificial Sequence
  source: /note="Description of Artificial Sequence: Synthetic polynucleotide"
atggctgctgacggttatcttccagattggctcgaggacaacctctctgagggcattcgcgagtggtgggacctgaaacctggagcccccaagcccaaggccaaccagcagaagcaggacgacggccggggtctggtgcttcctggctacaagtacctcggacccttcaacggactcgacaagggggagcccgtcaacgcggcggacgcagcggccctcgagcacgacaaggcctacgaccagcagctcaaagcgggtgacaatccgtacctgcggtataaccacgccgacgccgagtttcaggagcgtctgcaagaagatacgtcttttgggggcaacctcgggcgagcagtcttccaggccaagaagcgggttctcgaacctctcggtctggttgaggaagctgctaagacggctcctggaaagaagagaccggtagaaccgtcacctcagcgttcccccgactcctccacgggcatcggcaagaaaggccagcagcccgctaaaaagagactgaactttggtcagactggcgactcagagtcagtccccgaccctcaaccaatcggagaaccaccagcaggcccctctggtctgggatctggtacaatggctgcaggcggtggcgctccaatggcagacaataacgaaggcgccgacggagtgggtagttcctcaggaaattggcattgcgattccacatggctgggcgacagagtcatcaccaccagcacccgaacctgggccctgcccacctacaacaaccacctctacaagcaaatatccaatgggacatcgggaggaagcaccaacgacaacacctacttcggctacagcaccccctgggggtattttgacttcaacagattccactgccacttctcaccacgtgactggcagcgactcatcaacaacaactggggattccggccaaaaagactcagcttcaagctcttcaacatccaggtcaaggaggtcacgcagaatgaaggcaccaagaccatcgccaataaccttaccagcacgattcaggtatttacggactcggaataccagctgccgtacgtcctcggctccgcgcaccagggctgcctgcctccgttcccggcggacgtcttcatgattccccagtacggctaccttacactgaacaatggaagtcaagccgtaggccgttcctccttctactgcctggaatattttccatctcaaatgctgcgaactggaaacaattttgaattcagctacaccttcgaggacgtgcctttccacagcagctacgcacacagccagagcttggaccgactgatgaatcctctcatcgaccagtacctgtactacttatccagaactcagtccacaggaggaactcaaggtacccagcaattgttattttctcaagctgggcctgcaaacatgtcggctcaggctaagaactggctacctggaccttgctaccggcagcagcgagtctctacgacactgtcgcaaaacaacaacagcaactttgcttggactggtgccaccaaatatcacctgaacggaagagactctttggtaaatcccggtgtcgccatggcaacccacaaggacgacgaggaacgcttcttcccgtcgagtggagtcctgatgttcggaaaacagggtgctggaagagacaatgtggactacagcagcgttatgctaaccagcgaagaagaaattaaaaccactaaccccgtagccacagaacaatacggtgtggtggctgacaacttgcagcaaaccaatacagggcctattgtgggaaatgtcaacagccaaggagccttacctggcatggtctggcagaaccgagacgtgtacctgcagggtcccatctgggccaagattcctcacacggacggcaacttccacccttcaccgctaatgggaggatttggactgaagcacccacctcctcagatcctgatcaagaacacgccggtacctgcggatcctccaacaacgttcagccaggcgaaattggcttccttcattacgcagtacagcaccggacaggtcagcgtggaaatcgagtgggagctgcagaaggagaacagcaaacgctggaacccagagattcagtacacttcaaactactacaaatctacaaatgtggactttgctgtcaatacagagggaacttattctgagcctcgccccattggtactcgttacctcacccgtaatctgtaa

SEQ ID NO: 259 - protein, 738 aa, Artificial Sequence
  source: /note="Description of Artificial Sequence: Synthetic polypeptide"
MAADGYLPDWLEDNLSEGIREWWDLKPGAPKPKANQQKQDDGRGLVLPGYKYLGPFNGLDKGEPVNAADAAALEHDKAYDQQLKAGDNPYLRYNHADAEFQERLQEDTSFGGNLGRAVFQAKKRVLEPLGLVEEAAKTAPGKKRPVEPSPQRSPDSSTGIGKKGQQPAKKRLNFGQTGDSESVPDPQPIGEPPAGPSGLGSGTMAAGGGAPMADNNEGADGVGSSSGNWHCDSTWLGDRVITTSTRTWALPTYNNHLYKQISNGTSGGSTNDNTYFGYSTPWGYFDFNRFHCHFSPRDWQRLINNNWGFRPKRLSFKLFNIQVKEVTQNEGTKTIANNLTSTIQVFTDSEYQLPYVLGSAHQGCLPPFPADVFMIPQYGYLTLNNGSQAVGRSSFYCLEYFPSQMLRTGNNFEFSYTFEDVPFHSSYAHSQSLDRLMNPLIDQYLYYLSRTQSTGGTQGTQQLLFSQAGPANMSAQAKNWLPGPCYRQQRVSTTLSQNNNSNFAWTGATKYHLNGRDSLVNPGVAMATHKDDEERFFPSSGVLMFGKQGAGRDNVDYSSVMLTSEEEIKTTNPVATEQYGVVADNLQQTNTGPIVGNVNSQGALPGMVWQNRDVYLQGPIWAKIPHTDGNCHPSPLMGGFGLKHPPPQILIKNTPVPADPPTTFSQAKLASFITQYSTGQVSVEIEWELQKENSKRWNPEIQYTSNYYKSTNVDFAVNTEGTYSEPRPIGTRYLTRNL

SEQ ID NO: 260 - protein, 738 aa, Artificial Sequence
  source: /note="Description of Artificial Sequence: Synthetic polypeptide"
MAADGYLPDWLEDNLSEGIREWWDLKPGAPKPKANQQKQDDGRGLVLPGYKYLGPFNGLDKGEPVNAADAAALEHDKAYDQQLKAGDNPYLRYNHADAEFQERLQEDTSFGGNLGRAVFQAKKRVLEPLGLVEEGAKTAPGKKRPVEPSPQRSPDSSTGIGKKGQQPARKRLNFGRTGDSESVPDPQPIGEPPAAPSSVGSGTMAAGGGAPMADNNEGADGVGSSSGNWHCDSTWLGDRVITTSTRTWALPTYNNHLYKQISNGTSGGSTNDNTYFGYSTPWGYLDFNRFHCHFSPRDWQRLINNNWGFRPKRLSFKLFNIQVKEVTQNEGTKTIANNLASTIQVFTDSEYQPPYVLGSAHQGCLPPFPADVFMIPQYGYLTLNNGSQAVGRSSFYCLEYFPSQMLRTGNNFSFSYTFEDVPFHSSYAHSQSLDRLMNPLIDQYLYYLSRTQSTGGTAGTQQLLFSRAGPSNMSAQARNWLPGPCYRQQRVSTTLSQNNNSNFAWTGATKYHLNGRDSLVNPGVAMATNKDDEDRFFPSSGILMFGKQGAGKDNVDYSNVMLTSEEEIKTTNPVATEQYGVVADNLQQQNTAPTVGAVNSQGALPGMVWQNRDVYLQGPIWAKIPHTDGNFHPSPLMGGFGLKHPPPQILIKNTPVPADPPTAFNQAKLNSFIAQYSTGQVSVEIEWELQKENSKRWNPEIQYTSNYYKSTNADFAVNTEGVYSEPRPIGTRYLTRNL

SEQ ID NO: 261 - DNA, 2217 bp, Artificial Sequence
  source: /note="Description of Artificial Sequence: Synthetic polynucleotide"
atggctgccgatggttatcttccagattggctcgaggacaacctctctgagggcattcgcgagtggtgggacctgaaacctggagccccgaaacccaaagccaaccagcaaaagcaggacgacggccggggtctggtgcttcctggctacaagtacctcggacccttcaacggactcgacaagggggagcccgtcaacgcggcggacgcagcggccctcgagcacgacaaggcctacgaccagcagctcaaagcgggtgacaatccgtacctgcggtataatcacgccgacgccgagtttcaggagcgtctgcaagaagatacgtcttttgggggcaacctcgggcgagcagtcttccaggccaagaagcgggttctcgaacctctcggtctggttgaggaaggcgctaagacggctcctggaaagaagagaccggtagagccgtcaccacagcgttcccccgactcctccacgggcatcggcaagaaaggccagcagcccgccagaaagagactcaatttcggtcggactggcgactcagagtcagtccccgaccctcaacctatcggagaacctccagcagcgccctctagtgtgggatctggtacaatggctgcaggcggtggcgcaccaatggcagacaataacgaaggtgccgacggagtgggtagttcctcgggaaattggcattgcgattccacatggctgggcgacagagttatcaccaccagcacccgaacctgggccctgcccacctacaacaaccacctctacaagcaaatctccaacgggacctcgggaggcagcaccaacgacaacacctactttggctacagcaccccctgggggtatcttgactttaacagattccactgccacttctcaccacgtgactggcagcgactcatcaacaacaactggggattccggcccaagagactcagcttcaagctcttcaacatccaggtcaaagaggtcacgcagaatgaaggcaccaagaccatcgccaataacctcgccagcaccatccaggtgtttacggactcggaataccagccgccgtacgtcctcggctctgcccaccagggctgcctgcctccgttcccggcggacgtcttcatgattcctcagtacggctacctgactctcaacaacggtagtcaggccgtgggacgttcctccttctactgcctggagtacttcccctctcagatgctgagaacgggcaacaacttttccttcagctacactttcgaggacgtgcctttccacagcagctacgcgcacagccagagtttggacaggctgatgaatcctctcatcgaccagtacctgtactacctgtcaagaacccagtctacgggaggcacagcgggaacccagcagttgctgttttctcgggccgggcctagcaacatgtcggctcaggccagaaactggctgcctggaccctgctacagacagcagcgcgtctccacgacactgtcgcaaaacaacaacagcaactttgcctggactggtgccaccaagtatcatctgaacggcagagactctctggtgaatccgggcgtcgccatggcaaccaacaaggacgacgaggaccgcttcttcccatccagcggcatcctcatgtttggcaagcagggagctggaaaagacaacgtggactatagcaacgtgatgctaaccagcgaggaagaaatcaagaccaccaaccccgtggccacagaacagtatggcgtggtggctgataacctacagcagcaaaacaccgctcctactgtgggggccgtcaacagccagggagccttacctggcatggtctggcagaaccgggacgtgtacctgcagggtcctatttgggccaagattcctcacacagatggcaactttcacccgtctcctttaatgggcggctttggacttaaacatccgcctcctcagatcctcatcaaaaacactcctgttcctgcggatcctccaacagcgttcaaccaggccaagctgaattctttcatcgcgcagtacagcaccggacaagtcagcgtggagatcgagtgggagctgcagaaggagaacagcaagcgctggaacccagagattcagtatacttccaactactacaaatctacaaatgcggactttgctgttaatactgagggtgtttactctgagcctcgccccattggcactcgttacctcacccgtaatctgtaa

SEQ ID NO: 262 - DNA, 2208 bp, Artificial Sequence
  source: /note="Description of Artificial Sequence: Synthetic polynucleotide"
atggctgccgatggttatcttccagattggctcgaggacactctctctgaaggaataagacagtggtggaagctcaaacctggcccaccaccaccaaagcccgcagagcggcataaggacgacagcaggggtcttgtgcttcctgggtacaagtacctcggacccttcaacggactcgacaagggggagccggtcaacgaggcagacgccgcggccctcgagcacgacaaggcctacgaccggcagctcgacagcggagacaacccgtacctcaagtacaaccacgccgacgcagagtttcaggagcgccttaaagaagatacgtcttttgggggcaacctcggacgagcagtcttccaggcgaaaaagagggttcttgaacctctgggcctggttgaggagcctgttaagacggctccgggaaaaaagaggccggtagagcactctcctgtggagccagactcctcctcgggaaccggaaaagcgggccagcagcctgcaagaaaaagattaaattttggtcagactggagacgcagactccgtacctgacccccagcctctcggacagccaccagcagccccctctggtctgggatctactacaatggctacaggcagtggcgcaccaatggcagacaataacgagggtgccgatggagtgggtaattcctcaggaaattggcattgcgattcccaatggctgggcgacagagtcatcaccaccagcacccgaacctgggccctgcccacatacaacaaccacctctacaagcaaatctccagccaatcaggagccagcaacgacaaccactactttggctacagcaccccctgggggtattttgacttcaacagattccactgccacttttcaccacgtgactggcaaagactcgtcaacaacaaccggggattccggcccaaaagactcaacttcaagctctttaatattcaagtcaaagaggtcacgcagaatgacggtacgacgacgattgccaataaccttaccagcacggttcaggtgtttactgactcggagtaccagctcccgtacgtcctgggctcggcgcatcaaggatgcctcccgccgtttccagcggacgtcttcatggtcccacagtatggatacctcaccctgaacaacgggagtcaggcggtaggacgctcttccttttactgcctggagtactttccttctcagatgctgcgtactggaaacaactttcagttcagctacacttttgaagacgtgcctttccacagcagctacgctcacagccagagtctggatcggctgatgaatcctctgatcgaccagtacctgtattatctgaacaagacacaaacaaatagtggaactcttcagcagtctcggctactgtttagccaagctggaccaaccaacatgtctcttcaagctaaaaactggctgcctggaccttgctacagacagcagcgtctgtcaaaacaggcaaacgacaacaacaacagcaactttccctggactgcagctacaaagtatcatctaaatggccgggactcgttggttaatccaggaccagctatggccagtcacaaggatgacgaagaaaagtttttccccatgcatggaaccctgatatttggtaaacaaggaacaaatgccaacgacgcggatttggaaaatgtcatgattacagatgaagaagaaatcagggccaccaatcccgtggctacggagcagtacgggactgtgtcaaataatttgcaaaactcaaacactggtccaactactggaactgtcaatcaccaaggagcgttacctggtatggtgtggcaggatcgagacgtgtacctgcagggacccatttgggccaagattcctcacaccgatggacactttcatccttctccactgatgggaggttttggactcaaacacccgcctcctcagatcatgatcaaaaacactcccgttccagccaatcctcccacaaacttcagttctgccaagtttgcttctttcatcacacagtattccacgggacaggtcagcgtggagatcgagtgggagctgcagaaggagaacagcaaacgctggaatcccgaaattcagtacacttccaactacaacaagtctgttaatgtggactttactgtggacactaatggtgtgtattcagagcctcgccccattggcaccagatacctgactcgtaatctgtaa

SEQ ID NO: 263 - protein, 735 aa, Artificial Sequence
  source: /note="Description of Artificial Sequence: Synthetic polypeptide"
MAADGYLPDWLEDTLSEGIRQWWKLKPGPPPPKPAERHKDDSRGLVLPGYKYLGPFNGLDKGEPVNEADAAALEHDKAYDRQLDSGDNPYLKYNHADAEFQERLKEDTSFGGNLGRAVFQAKKRVLEPLGLVEEPVKTAPGKKRPVEHSPVEPDSSSGTGKAGQQPARKRLNFGQTGDADSVPDPQPLGQPPAAPSGLGSTTMATGSGAPMADNNEGADGVGNSSGNWHCDSQWLGDRVITTSTRTWALPTYNNHLYKQISSQSGASNDNHYFGYSTPWGYFDFNRFHCHFSPRDWQRLVNNNRGFRPKRLNFKLFNIQVKEVTQNDGTTTIANNLTSTVQVFTDSEYQLPYVLGSAHQGCLPPFPADVFMVPQYGYLTLNNGSQAVGRSSFYCLEYFPSQMLRTGNNFQFSYTFEDVPFHSSYAHSQSLDRLMNPLIDQYLYYLNKTQTNSGTLQQSRLLFSQAGPTNMSLQAKNWLPGPCYRQQRLSKQANDNNNSNFPWTAATKYHLNGRDSLVNPGPAMASHKDDEEKFFPMHGTLIFGKQGTNANDADLENVMITDEEEIRATNPVATEQYGTVSNNLQNSNTGPTTGTVNHQGALPGMVWQDRDVYLQGPIWAKIPHTDGHFHPSPLMGGFGLKHPPPQIMIKNTPVPANPPTNFSSAKFASFITQYSTGQVSVEIEWELQKENSKRWNPEIQYTSNYNKSVNVDFTVDTNGVYSEPRPIGTRYLTRNL

SEQ ID NO: 264 - protein, 738 aa, Artificial Sequence
  source: /note="Description of Artificial Sequence: Synthetic polypeptide"
MAADGYLPDWLEDNLSEGIREWWDLKPGAPKPKANQQKQDDGRGLVLPGYKYLGPFNGLDKGEPVNAADAAALEHDKAYDQQLKAGDNPYLRYNHADAEFQERLQEDTSFGGNLGRAVFQAKKRVLEPLGLVEEAAKTAPGKKRPVEPSPQRSPDSSTGIGKKGQQPAKKRLSFGQTGDSESVPDPQPIGEPPAGPSGLGSGTMAAGGGAPMADNNEGADGVGSSSGNWHCDSTWLGDRVITTSTRTWALPTYNNHLYKQISNGTSGGSTNDNTYFGYSTPWGYFDFNRFHCHFSPRDWQRLINNNWGFRPKRLSFKLFNIQVKEVTQNEGTKTIANNLTSTIQVFTDSEYQLPYVLGSAHQGCLPPFPADVFMIPQYGYLTLNNGSQAVGRSSFYCLEYFPSQMLRTGNNSEFSYTFEDVPFHSSYAHSQSLDRLMNPLIDQYLYYLSRTQSTGGTQGTQQLLFSQAGPANMSAQAKNWLPGPCYRQQRVSTTLSQNNNSNFAWTGATKYHLNGRDSLVNPGVAMATHKDDEERFFPSSGVLMFGKQGAGRDNVDYSSVMLTSEEEIKTTNPVATEQYGVVADNLQQTNTGPIVGNVNSQGALPGMVWQNRDVYLQGPIWAKIPHTDGNFHPSPLMGGFGLKHPPPQILIKNTPVPADPPTTFSQAKLASFITQYSTGQVSVEIEWELQKENSKRWNPEIQYTSNYYKSTNVDFAVNTEGTYSEPRPIGTRYLTRNL

SEQ ID NO: 265 - DNA, 2217 bp, Artificial Sequence
  source: /note="Description of Artificial Sequence: Synthetic polynucleotide"
atggctgctgacggttatcttccagattggctcgaggacaacctctctgagggcattcgcgagtggtgggacctgaaacctggagcccccaagcccaaggccaaccagcagaagcaggacgacggccggggtctggtgcttcctggctacaagtacctcggacccttcaacggactcgacaagggggagcccgtcaacgcggcggacgcagcggccctcgagcacgacaaggcctacgaccagcagctcaaagcgggtgacaatccgtacctgcggtataaccacgccgacgccgagtttcaggagcgtctgcaagaagatacgtcttttgggggcaacctcgggcgagcagtcttccaggccaagaagcgggttctcgaacctctcggtctggttgaggaagctgctaagacggctcctggaaagaagagaccggtagaaccgtcacctcagcgttcccccgactcctccacgggcatcggcaagaaaggccagcagcccgctaaaaagagactgagctttggtcagactggcgactcagagtcagtccccgaccctcaaccaatcggagaaccaccagcaggcccctctggtctgggatctggtacaatggctgcaggcggtggcgctccaatggcagacaataacgaaggcgccgacggagtgggtagttcctcaggaaattggcattgcgattccacatggctgggcgacagagtcatcaccaccagcacccgaacctgggccctgcccacctacaacaaccacctctacaagcaaatatccaatgggacatcgggaggaagcaccaacgacaacacctacttcggctacagcaccccctgggggtattttgacttcaacagattccactgccacttctcaccacgtgactggcagcgactcatcaacaacaactggggattccggccaaaaagactcagcttcaagctcttcaacatccaggtcaaggaggtcacgcagaatgaaggcaccaagaccatcgccaataaccttaccagcacgattcaggtatttacggactcggaataccagctgccgtacgtcctcggctccgcgcaccagggctgcctgcctccgttcccggcggacgtcttcatgattccccagtacggctaccttacactgaacaatggaagtcaagccgtaggccgttcctccttctactgcctggaatattttccatctcaaatgctgcgaactggaaacaattctgaattcagctacaccttcgaggacgtgcctttccacagcagctacgcacacagccagagcttggaccgactgatgaatcctctcatcgaccagtacctgtactacttatccagaactcagtccacaggaggaactcaaggtacccagcaattgttattttctcaagctgggcctgcaaacatgtcggctcaggctaagaactggctacctggaccttgctaccggcagcagcgagtctctacgacactgtcgcaaaacaacaacagcaactttgcttggactggtgccaccaaatatcacctgaacggaagagactctttggtaaatcccggtgtcgccatggcaacccacaaggacgacgaggaacgcttcttcccgtcgagtggagtcctgatgtttggaaaacagggtgctggaagagacaatgtggactacagcagcgttatgctaaccagcgaagaagaaattaaaaccactaaccctgtagccacagaacaatacggtgtggtggctgacaacttgcagcaaaccaatacagggcctattgtgggaaatgtcaacagccaaggagccttacctggcatggtctggcagaaccgagacgtgtacctgcagggtcccatctgggccaagattcctcacacggacggcaacttccacccttcaccgctaatgggaggatttggactgaagcacccacctcctcagatcctgatcaagaacacgccggtacctgcggatcctccaacaacgttcagccaggcgaaattggcttccttcattacgcagtacagcaccggacaggtcagcgtggaaatcgagtgggagctgcagaaggagaacagcaaacgctggaacccagagattcagtacacttcaaactactacaaatctacaaatgtggactttgctgtcaatacagagggaacttattctgagcctcgccccattggtactcgttacctcacccgtaatctgtaa

SEQ ID NO: 266 - protein, 738 aa, Artificial Sequence
  source: /note="Description of Artificial Sequence: Synthetic polypeptide"
MAADGYLPDWLEDNLSEGIREWWDLKPGAPKPKANQQKQDDGRGLVLPGYKYLGPFNGLDKGEPVNAADAAALEHDKAYDQQLKAGDNPYLRYNHADAEFQERLQEDTSFGGNLGRAVFQAKKRVLEPLGPVEEAAKTAPGKKRPVEPPPQRSPDSSTGIGKKGQQPAKKRLNFGQTGDSESVPDPQPIGEPPAGPSGLGSGTMAAGGGAPMADNNEGADGVGSSSGNWHCDSTWLGDRVITTSTRTWALPTYNNHLYKQISNGTSGGSTNDNTYFGYSTPWGYFDFNRFHCHFSPRDWQRLINNNWGFRPKRLSFKLFNIQVKEVTQNEGTKTVANNLTSTIQVFTDSEYQLPYVLGSAHQGCLPPFPADVFMIPQYGYLTLNNGSQAVGRSSFYCLEYFPSQMLRTGNNFEFSYTFEDVPFHSSYAHSQSLDRLMNPLIDQYLYYLSRTQSTGGTQGTQQLLFSQAGPANMSAQAKNWLPGPCYRQQRVSTTLSQNNNSNFAWTGATKYHLNGRDSLVNPGVAMATHKDDEERFFPSSGVLMFGKQGAGRDNVDYSSVMLTSEEEIKTTNPVATEQYGVVADNLQQTNTGPIVGNVNSQGALPGMVWQNRDVYLQGPIWAKIPHTDGNFHPSPLMGGFGLKHPPPQILIKNTPVPADPPTTFSQAKLASFITQYSTGQVSVEIEWELQKENSKRWNPEIQYTSNYYKSTNVDFAVNTEGTYSEPRPIGTRYLTRNL

SEQ ID NO: 267 - DNA, 2217 bp, Artificial Sequence
  source: /note="Description of Artificial Sequence: Synthetic polynucleotide"
atggctgctgacggttatcttccagattggctcgaggacaacctctctgagggcattcgcgagtggtgggacctgaaacctggagcccccaagcccaaggccaaccagcagaagcaggacgacggccggggtctggtgcttcctggctacaagtacctcggacccttcaacggactcgacaagggggagcccgtcaacgcggcggacgcagcggccctcgagcacgacaaggcctacgaccagcagctcaaagcgggtgacaatccgtacctgcggtataaccacgccgacgccgagtttcaggagcgtctacaagaagatacgtcttttgggggcaacctcgggcgagcagtcttccaggccaagaagcgggttctcgaacctctcggtccggttgaggaagctgctaagacggctcctggaaagaagagaccggtagaaccgccacctcagcgttcccccgactcctccacgggcatcggcaagaaaggccagcagcccgctaaaaagagactgaactttggtcagactggcgactcagagtcagtccccgaccctcaaccaatcggagaaccaccagcaggcccctctggtctgggatctggtacaatggctgcaggcggtggcgctccaatggcagacaataacgaaggcgccgacggagtgggtagttcctcaggaaattggcattgcgattccacatggctgggcgacagagtcatcaccaccagcacccgaacctgggccctgcccacctacaacaaccacctctacaagcaaatatccaatgggacatcgggaggaagcaccaacgacaacacctacttcggctacagcaccccctgggggtattttgacttcaacagattccactgccacttctcaccacgtgactggcagcgactcatcaacaacaactggggattccggccaaaaagactcagcttcaagctcttcaacatccaggtcaaggaggtcacgcagaatgaaggcaccaagaccgtcgccaataaccttaccagcacgattcaggtatttacggactcggaataccagctgccgtacgtcctcggctccgcgcaccagggctgcctgcctccgttcccggcggacgtcttcatgattccccagtacggctaccttacactgaacaatggaagtcaagccgtaggccgttcctccttctactgcctggaatattttccatctcaaatgctgcgaactggaaacaattttgaattcagctacaccttcgaggacgtgcctttccacagcagctacgcacacagccagagcttggaccgactgatgaatcctctcatcgaccagtacctgtactacttatccagaactcagtccacaggaggaactcaaggtacccagcaattgttattttctcaagctgggcctgcaaacatgtcggctcaggctaagaactggctacctggaccttgctaccggcagcagcgagtctctacgacactgtcgcaaaacaacaacagcaactttgcttggactggtgccaccaaatatcacctgaacggaagagactctttggtaaatcccggtgtcgccatggcaacccacaaggacgacgaggaacgcttcttcccgtcgagtggagtcctgatgtttggaaaacagggtgctggaagagacaatgtggactacagcagcgttatgctaaccagcgaagaagaaattaaaaccactaaccctgtagccacagaacaatacggtgtggtggctgacaacttgcagcaaaccaatacagggcctattgtgggaaatgtcaacagccaaggagccttacctggcatggtctggcagaaccgagacgtgtacctgcagggtcccatctgggccaagattcctcacacggacggcaacttccacccttcaccgctaatgggaggatttggactgaagcacccacctcctcagatcctgatcaagaacacgccggtacctgcggatcctccaacaacgttcagccaggcgaaattggcttccttcattacgcagtacagcaccggacaggtcagcgtggaaatcgagtgggagctgcagaaggagaacagcaaacgttggaacccagagattcagtacacttcaaactactacaaatctacaaatgtggactttgctgtcaatacagagggaacttattctgagcctcgccccattggtactcgttacctcacccgtaatctgtaa

SEQ ID NO: 268 - protein, 738 aa, Artificial Sequence
  source: /note="Description of Artificial Sequence: Synthetic polypeptide"
MAADGYLPDWLEDNLSEGIREWWDLKPGAPKPKANQQKQDDGRGLVLPGYKYLGPFNGLDKGEPVNAADAAALEHDKAYDQQLKAGDNPYLRYNHADAEFQERLQEDTSFGGNLGRAVFQAKKRVLEPLGLVEEAAKTAPGKKRPVEPSPQRSPDSSTGIGKKGQQPAKKRLNFGQTGDSESVPDPQPIGEPPAGPSGLGSGTMAAGGGAPMADNNEGADGVGSSSGNWHCDSTWLGDRVITTSTRTWALPTYNNHLYKQISNGTSGGSTNDNTYFGYSTPWGYFDFNRFHCHFSPRDWQRLINNNWGFRPKRLSFKLFNIQVKEVTQNEGTKTIANNLTSTIQVFTDSEYQLPYVLGSAHQGCLPPFPADVFMIPQYGYLTLNNGSQAVGRSSFYCLEYFPSQMLRTGNNFEFSYTFEDVPFHSSYAHSQSLDRLMNPLIDQYLYYLSRTQSTGGTQGTQQLLFSQAGPANMSAQAKNWLPGPCYRQQRVSTTLSQSNNSNFAWTGATKYHLNGRDSLVNPGVAMATHKDDEERFFPSSGVLMFGKQGAGRDNVDYSSVMLTSEEEIKTTNPVATEQYGVVADNLQQTNTGPIVGNVNSQGALPGMVWQNRDVYLQGPIWAKIPHTDGNFHPSPLMGGLGLKHPPPQILIKNTPVPADPPTTFSQAKLASFITQYSTGQVSVEIEWELQKENSKRWNPEIQYTSNYYKSTNVDFAVNTEGTYSEPRPIGTRYLTRNL

SEQ ID NO: 269 - DNA, 2217 bp, Artificial Sequence
  source: /note="Description of Artificial Sequence: Synthetic polynucleotide"
atggctgctgacggttatcttccagattggctcgaggacaacctctctgagggcattcgcgagtggtgggacctgaaacctggagcccccaagcccaaggccaaccagcagaagcaggacgacggccggggtctggtgcttcctggctacaagtacctcggacccttcaacggactcgacaagggggagcccgtcaacgcggcggacgcagcggccctcgagcacgacaaggcctacgaccagcagctcaaagcgggtgacaatccgtacctgcggtataaccacgccgacgccgagtttcaggagcgtctgcaagaagatacgtcttttgggggcaacctcgggcgagcagtcttccaggccaagaagcgggttctcgaacctctcggtctggttgaggaagcggctaagacggctcctggaaagaagagaccggtagaaccgtcacctcagcgttcccccgactcctccacgggcatcggcaagaaaggccagcagcccgctaaaaagagactgaactttggtcagactggcgactcagagtcagtccccgaccctcaaccaatcggagaaccaccagcaggcccctctggtctgggatctggtacaatggctgcaggcggtggcgctccaatggcagacaataacgaaggcgccgacggagtgggtagttcctcaggaaattggcattgcgattccacatggctgggcgacagagtcatcaccaccagcacccgaacctgggccctgcccacctacaacaaccacctctacaagcaaatatccaatgggacatcgggaggaagcaccaacgacaacacctacttcggctacagcaccccctgggggtattttgacttcaacagattccactgccacttctcaccacgtgactggcagcgactcatcaacaacaactggggattccggccaaaaagactcagcttcaagctcttcaacatccaggtcaaggaggtcacgcagaatgaaggcaccaagaccatcgccaataaccttaccagcacgattcaggtatttacggactcggaataccagctgccgtacgtcctcggctccgcgcaccagggctgcctgcctccgttcccggcggacgtcttcatgattccccagtacggctaccttacactgaacaatggaagtcaagccgtaggccgttcctccttctactgcctggaatattttccatctcaaatgctgcgaactggaaacaattttgaattcagctacaccttcgaggacgtgcctttccacagcagctacgcacacagccagagcttggaccgactgatgaatcctctcatcgaccagtacctgtactacttatccagaactcagtccacaggaggaactcaaggtacccagcaattgttattttctcaagctgggcctgcaaacatgtcggctcaggctaagaactggctacctggaccttgctaccggcagcagcgagtctctacgacactgtcgcaaagcaacaacagcaactttgcttggactggtgccaccaaatatcacctgaacggaagagactctttggtaaatcccggtgtcgccatggcaacccacaaggacgacgaggaacgcttcttcccgtcgagtggagtcctgatgtttggaaaacagggtgctggaagagacaatgtggactacagcagcgttatgctaaccagcgaagaagaaattaaaaccactaaccctgtagccacagaacaatacggtgtggtggctgacaacttgcagcaaaccaatacagggcctattgtgggaaatgtcaacagccaaggagccttacctggcatggtctggcagaaccgagacgtgtacctgcagggtcccatctgggccaagattcctcacacggacggcaacttccacccttcaccgctaatgggaggacttggactgaagcacccacctcctcagatcctgatcaagaacacgccggtacctgcggatcctccaacaacgttcagccaggcgaaattggcttccttcattacgcagtacagcaccggacaggtcagcgtggaaatcgagtgggagctgcagaaggagaacagcaaacgctggaacccagagattcagtacacttcaaactactacaaatctacaaatgtggactttgctgtcaatacagagggaacttattctgagcctcgccccattggtactcgttacctcacccgtaatctgtaa

SEQ ID NO: 270 - protein, 737 aa, Artificial Sequence
  source: /note="Description of Artificial Sequence: Synthetic polypeptide"
MAADGYLPDWLEDNLSEGIREWWDLKPGAPKPKANQQKQDDGRGLVLPGYKYLGPFNGLDKGEPVNAADAAALEHDKAYDQQLKAGDNPYPRYNHADAEFQERLQEDTPFGGNLGRAVFQAKKRVLEPLGLVEEAAKTAPGKKRPVEPSPQRSPDSSTGIGKKGQQPAKKRLNFGQTGDSESVPDPQPIGEPPAGPSGLGSGTMAAGGGAPMADNNEGADGVGNASGNWHCDSTWLGDRVITTSTRTWALPTYNNHLYKQISSASTGASNDNHYFGYSTPWGYFDFNRFHCHFSPRDWQRLINNNWGFRPKRLNFKLFNIQVKEVTTNDGVTTIANNLTSTVQVFSDSEYQLPYVLGSAHQGCLPPFPADVFMIPQYGYLTLNNGSQAVGRSSFYCLEYFPSQMLRTGNNFTFSYTFEEVPLHSSYAHSQSLDRLMNPLIVQYLYYLNRTQNQSGSAQNKDLLFSRGSPAGMSVQPKNWLPGPCYRQQRVSKTKTDNNNSNFTWTGASKYNLNGRESIINPGTAMASHKDDEDKFFPMSGVMIFGKESAGASNTALDNVMITDEEEIKATNPVATERFGTVAVNFQSSSTDPATGDVHAMGALPGMVWQDRDVYLQGPIWAKIPHTDGHFHPSPLMGGFGLKNPPPQILIKNTPVPANPPAEFSATKFASFITQYSTGQVSVEIEWELQKENSKRWNPEVQYTSNYAKSASVDFTVDNNGLYTEPRPIGTRYLTRPL

SEQ ID NO: 271 - protein, 737 aa, Artificial Sequence
  source: /note="Description of Artificial Sequence: Synthetic polypeptide"
MAADGYLPDWLEDNLSEGIREWWDLKPGAPKPKANQQKQDDGRGLVLPGYKYLGPFNGLDKGEPVNAADAAALEHDKAYDQQLKAGDNPYPRYNHADAEFQERLQEDTSFGGNLGRAVFQAKKRVLEPLGLVEEAAKTAPGKKRPVEPSPQRSPDSSTGIGKKGQQPAKKRLNFGQTGDSESVPDPQPIGEPPAGPSGLGSGTMAAGGGAPMADNNEGADGVGNASGNWHCDSTWLGDRVITTSTRTWALPTYNNHLYKQISSASTGASNDNHYFGYSTPWGYFDFNRFHCHFSPRDWQRLINNNWGFRPKRLNFKLFNIQVKEVTTNDGVTTIANNLTSTVQVFSDSEYQLPYVLGSAHQGCLPPFPADVFMIPQYGYLTLNNGSQAVGRSSFYCLEYFPSQMLRTGNNFTFSYTFEEVPLHSSYAHSQSLDRLMNPLIDQYLYYLNRTQNQSGSAQNKDLLFSRGSPAGMSVQPKNWLPGPCYRQQRVSKTKTDNNNSNFTWTGASKYNLNGRESIINPGTAMASHKDDEDKFFPMSGVMIFGKESAGASNTALDNVMITDEEEIKATNPVATERFGTVAVNFQSSSTDPATGDVHAMGALPGMVWQDRDVYLQGPIWAKIPHTDGHFHPSPLMGGFGLKNPPPQILIKNTPVPANPPAEFSATKFASFITQYSTGQVSVEIEWELQKENSKRWNPEVQYTSNYAKSASVDFTVDNNGLYTEPRPIGTRYLTRPL

SEQ ID NO: 272 - DNA, 2214 bp, Artificial Sequence
  source: /note="Description of Artificial Sequence: Synthetic polynucleotide"
atggctgctgacggttatcttccagattggctcgaggacaacctctctgagggcattcgcgagtggtgggacctgaaacctggagcccccaagcccaaggccaaccagcagaagcaggacgacggccggggtctggtgcttcctggctacaagtacctcggacccttcaacggactcgacaagggggagcccgtcaacgcggcggacgcagcggccctcgagcacgacaaggcctacgaccagcagctcaaagcgggtgacaatccgtacccgcggtataaccacgccgacgccgagtttcaggagcgtctgcaagaagatacgccttttgggggcaacctcgggcgagcagtcttccaggccaagaagcgggttctcgaacctctcggtctggttgaggaagctgctaagacggctcctggaaagaagagaccggtagaaccgtcacctcagcgttcccccgactcctccacgggcatcggcaagaaaggccagcagcccgctaaaaagagactgaactttggtcagactggcgactcagagtcagtccccgaccctcaaccaatcggagaaccaccagcaggcccctctggtctgggatctggtacaatggctgcaggcggtggcgctccaatggcagacaataacgaaggcgccgacggagtgggtaatgcctcaggaaattggcattgcgattccacatggctgggcgacagagtcatcaccaccagcacccgcacctgggccttgcccacctacaataaccacctctacaagcaaatctccagtgcttcaacgggggccagcaacgacaaccactacttcggctacagcaccccctgggggtattttgatttcaacagattccactgccacttttcaccacgtgactggcagcgactcatcaacaacaattggggattccggcccaagagactcaacttcaaactcttcaacatccaagtcaaggaggtcacgacgaatgatggcgtcacaaccatcgctaataaccttaccagcacggttcaagtcttctcggactcggagtaccagcttccgtacgtcctcggctctgcgcaccagggctgcctccctccgttcccggcggacgtgttcatgattccgcaatacggctacctgacgctcaacaatggcagccaagccgtgggacgttcatccttttactgcctggaatatttcccttctcagatgctgagaacgggcaacaactttaccttcagctacacctttgaggaagtgcctctccacagcagctacgcgcacagccagagcctggaccggctgatgaatcctctcatcgtccaatacctgtattacctgaacagaactcaaaatcagtccggaagtgcccaaaacaaggacttgctgttcagccgtgggtctccagctggcatgtctgttcagcccaaaaactggctacctggaccctgttatcggcagcagcgcgtttctaaaacaaaaacagacaacaacaacagcaattttacctggactggtgcttcaaaatataacctcaatgggcgtgaatccatcatcaaccctggcactgctatggcctcacacaaagacgacgaagacaagttctttcccatgagcggtgtcatgatttttggaaaagagagcgccggagcttcaaacactgcattggacaatgtcatgattacagacgaagaggaaattaaagccactaaccctgtggccaccgaaagatttgggaccgtggcagtcaatttccagagcagcagcacagaccctgcgaccggagatgtgcatgctatgggagcattacctggcatggtgtggcaagatagagacgtgtacctgcagggtcccatttgggccaaaattcctcacacagatggacactttcacccgtctcctcttatgggcggctttggactcaagaacccgcctcctcagatcctcatcaaaaacacgcctgttcctgcgaatcctccggcggagttttcagctacaaagtttgcttcattcatcacccaatactccacaggacaagtgagtgtggaaattgaatgggagctgcagaaagaaaacagcaagcgctggaatcccgaagtgcagtacacatccaattatgcaaaatctgccagcgttgattttactgtggacaacaatggactttatactgagcctcgccccattggcacccgttaccttacccgtcccctgtaa

SEQ ID NO: 273 - protein, 736 aa, Artificial Sequence
  source: /note="Description of Artificial Sequence: Synthetic polypeptide"
MAADGYLPDWLEDTLSEGIRQWWKLRPGPPPPKPAERHKDDSRGLVLPGYKYLGPFNGLDKGEPVNEADAAALEHDKAYDRQLDSGDNPYLKYNHADAEFQERLKEDTSFGGNLGRAVFQAKKRVLEPLGLVEEGAETAPGKKRPVEQSPQGPDSSSGIGKTGQQPAKKRLNFGQTGDSESVPDPQPLGEPPATPAAVGPTTMASGGGAPMADNNEGADGVGNASGNWHCDSTWLGDRVITTSTRTWALPTYNNHLYKQISSASTGASNDNHYFGYSTPWGYFDFNRFHCHFSPRDWQRLINNNWGFRPKRLNFKLFNIQVKEVTTNDGVTTIANNLTSTVQVFSDSEYQLPYVLGSAHQGCLPPFPADVFMIPQYGYLTLNNGSQAVGRSSFYCLEYFPSQMLRTGNNFTFSYTFEEVPFHSSYAHSQSLDRLMNPLIDQYLYYPNRTQNQSGSAQNKDLLFSRGSPAGMSVQPKNWLPGPCYRQQRVSKTKTDNNNSNFTWTGASKYNLNGRESIINPGTAMASHKDDEDKFFPMSGVMIFGKESAGASNTALDNVMITDEEEIKATNPVATERFGTVAVNFQSSSTDPATGDVHAMGALPGMVWQGRDVYLQGPIWAKIPHTDGHFHPSPLMGGFGLKNPPPQILIKNTPVPANPPAEFSATKFASFITQYSTGQVSVEIEWELQKENSKRWNPEVQYTSNYAKSANVDFTVDNNGLYTEPRPIGTRYLTRPL

SEQ ID NO: 274 - DNA, 2211 bp, Artificial Sequence
  source: /note="Description of Artificial Sequence: Synthetic polynucleotide"
atggctgccgatggttatcttccagattggctcgaggacactctctctgaaggaataagacagtggtggaagctcagacctggcccaccaccaccaaagcccgcagagcggcataaggacgacagcaggggtcttgtgcttcctgggtacaagtacctcggacccttcaacggactcgacaagggagagccggtcaacgaggcagacgccgcggccctcgagcacgacaaagcctacgaccggcagctcgacagcggagacaacccgtacctcaagtacaaccacgccgacgcggagtttcaggagcgccttaaagaagatacgtcttttgggggcaacctcgggcgagcagtcttccaggccaagaagcgggttctcgaacctctcggtctggttgaggaaggcgctgagacggctcctggaaagaaacgtccggtagagcagtcgccacaagggccagactcctcctcgggcatcggcaagacaggccagcagcccgctaaaaagagactcaattttggtcagactggcgactcagagtcagtccccgatccacaacctctcggagaacctccagcaacccccgctgctgtgggacctactacaatggcttcaggcggtggcgcaccaatggcagacaataacgaaggcgccgacggagtgggtaatgcctcaggaaattggcattgcgattccacatggctgggcgacagagtcatcaccaccagcacccgcacctgggccttgcccacctacaataaccacctctacaagcaaatctccagtgcttcaacgggggccagcaacgacaaccactacttcggctacagcaccccctgggggtattttgatttcaacagattccactgccacttttcaccacgtgactggcagcgactcatcaacaacaattggggattccggcccaagagactcaacttcaaactcttcaacatccaagtcaaggaggtcacgacgaatgatggcgtcacaaccatcgctaataaccttaccagcacggttcaagtcttctcggactcggagtaccagcttccgtacgtcctcggctctgcgcaccagggctgcctccctccgttcccggcggacgtgttcatgattccgcaatacggctacctgacgctcaacaatggcagccaagccgtgggacgttcatccttttactgcctggaatatttcccttctcagatgctgagaacgggcaacaactttaccttcagctacacctttgaggaagtgcctttccacagcagctacgcgcacagccagagcctggaccggctgatgaatcctctcatcgaccaatacctgtattacccgaacagaactcaaaatcagtccggaagtgcccaaaacaaggacttgctgtttagccgtgggtctccagctggcatgtctgttcagcccaaaaactggctacctggaccctgttatcggcagcagcgcgtttctaaaacaaaaacagacaacaacaacagcaattttacctggactggtgcttcaaaatataacctcaatgggcgtgaatccatcatcaaccctggcactgctatggcctcacacaaagacgacgaagacaagttctttcccatgagcggtgtcatgatttttggaaaagagagcgccggagcttcaaacactgcattggacaatgtcatgattacagacgaagaggaaattaaagccactaaccctgtggccaccgaaagatttgggaccgtggcagtcaatttccagagcagcagcacagaccctgcgaccggagatgtgcatgctatgggagcattacctggcatggtgtggcaaggtagagacgtgtacctgcagggtcccatttgggccaaaattcctcacacagatggacactttcacccgtctcctcttatgggcggctttggactcaagaacccgcctcctcagatcctcatcaaaaacacgcctgttcctgcgaatcctccggcggagttttcagctacaaagtttgcttcattcatcacccaatactccacaggacaagtgagtgtggaaattgaatgggagctgcagaaagaaaacagcaagcgctggaatcccgaagtgcagtacacatccaattatgcaaaatctgccaacgttgattttactgtggacaacaatggactttatactgagcctcgccccattggcacccgttaccttacccgtcccctgtaa

SEQ ID NO: 275 - protein, 736 aa, Artificial Sequence
  source: /note="Description of Artificial Sequence: Synthetic polypeptide"
MAADGYLPDWLEDTLSEGIRQWWKLRPGPPPPKPAERHKDDSRGLVLPGYKYLGPFNGLDKGEPVNEADAAALEHDKAYDRQLDSGDNPYLKYNHADAEFQERLKEDTSFGGNLGRAVFQAKKRVLEPLGLVEEGAKTAPGKKRPVEQSPQGPDSSSGIGKTGQQPAKKRLNFGQTGDSESVPDPQPLGEPPATPAAVGPTTMASGGGAPMADNNEGADGVGNASGNWHCDSTWLGDRVITTSTRTWALPTYNNHLYKQISSASTGASNDNHYFGYSTPWGYFDFNRFHCHFSPRDWQRLINNNWGFRPKRLNFKLFNIQVKEVTTNDGVTTIANNLTSTVQVFSDSEYQLPYVLGSAHQGCLPPFPADVFMIPQYGYLTLNNGSQAVGRSSFYCLEYFPSQMLRTGNNFTFSYTFEEVPFHSSYAHSQSLDRLMNPLIDQYLYYPNRTQNQSGSAQNKDLLFSRGSPAGMSVQPKNWLPGPCYRQQRVSKTKTDNNNSNFTWTGASKYNLNGRESIINPGTAMASHKDDEDKFFPMSGVMIFGKESAGASNTALDNVMITDEEEIKATNPVATERFGTVAVNFQSSSTDPATGDVHAMGALPGMVWQGRDVYLQGPIWAKIPHTDGHFHPSPLMGGFGLKNPPPQILIKNTPVPANPPAEFSATKFASFITQYSTGQVSVEIEWELQKENSKRWNPEVQYTSNYAKSANVDFTVDNNGLYTEPRPIGTRYLTRPL

SEQ ID NO: 276 - protein, 736 aa, Artificial Sequence
  source: /note="Description of Artificial Sequence: Synthetic polypeptide"
MAADGYLPDWLEDTLSEGIRQWWKLRPGPPPPKPAERHKDDSRGLVLPGYKYLGPFNGLDKGEPVNEADAAALEHDKAYDRQLDSGDNPYLKYNHADAEFQERLKEDTSFGGNLGRAVFQAKKRVLEPLGLVEEGAKTAPGKKRPVEQSPQGPDSSSGIGKTGQQPAKKRLNFGQTGDSESVPDPQPLGEPPATPAAVGPTTMASGGGAPMADNNEGADGVGNASGNWHCDSTWLGDRVITTSTRTWALPTYNNHLYKQISSASTGASNDNHYFGYSTPWGYFDFNRFHCHFSPRDWQRLINNNWGFRPKRLNFKLFNIQVKEVTTNDGVTTIANNLTSTVQVFSDSEYQLPYVLGSAHQGCLPPFPADVFMIPQYGYLTLNNGSQAVGRSSFYCLEYFPSQMLRTGNNFTFSYTFEEVPFHSSYAHSQSLDRLMNPLIDQYLYYLNRTQNQSGSAQNKDLLFSRGSPAGMSVQPKNWLPGPCYRQQRVSKTKTDNNNSNFTWTGASKYNLNGRESIINPGTAMASHKDDEDKFFPMSGVMIFGKESAGASNTALDNVMITDEEEIKATNPVATERFGTVAVNFQSSSTDPATGDVHAMGALPGMVWQGRDVYLQGPIWAKIPHTDGHFHPSPLMGGFGLKNPPPQILIKNTPVPANPPAEFSATKFASFITQYSTGQVSVEIEWELQKENSKRWNPEVQYTSNYAKSANVDFTVDNNGLYTEPRPIGTRYLTRPL

SEQ ID NO: 277 - protein, 736 aa, Artificial Sequence
  source: /note="Description of Artificial Sequence: Synthetic polypeptide"
MAADGYLPDWLEDTLSEGIRQWWKLRPGPPPPKPAERHKDDSRGLVLPGYKYLGPFNGLDKGEPVNEADAAALEHDKAYDRQLDSGDNPYLKYNHADAEFQERLKEDTSFGGNLGRAVFQAKKRVLEPLGLVEEGAKTAPGKKRPVEQSPQGPDSSSGIGKTGQQPAKKRLNFGQTGDSESVPDPQPLGEPPATPAAVGPTTMASGGGAPMADNNEGADGVGNASGNWHCDSTWLGDRVITTSTRTWALPTYNNHLYKQISSASTGASNDNHYFGYSTPWGYFDFNRFHCHFSPRDWQRLINNNWGFRPKRLNFKLFNIQVKEVTTNDGVTTIANNLTSTVQVFSDSEYQLPYVLGSAHQGCLPPFPADVFMIPQYGYLTLNNGSQAVGRSSFYCLEYFPSQMLRTGNNFTFSYTFEEVPFHSSYAHSQSLDRLMNPLIDQYLYYLNRTQNQSGSAQNKDLLFSRGSPAGMSVQPKNWLPGPCYRQQRVSKTKTDNNNSNFTWTGASKYNLNGRESIINPGTAMASHKDDEDKFFPMSGVMIFGKESAGASNTALDNVMITDEEEIKATNPVATERFGTVAVNFQSSSTDPATGDVHAMGALPGMVWQDRDVYLQGPIWAKIPHTDGHFHPSPLMGGFGLKNPPPQILIKNTPVPANPPAEFSATKFASFITQYSTGQVSVEIEWELQKENSKRWNPEVQYTSNYAKSANVDFTVDNNGLYTEPRPIGTRYLTRPL

SEQ ID NO: 278 - DNA, 2208 bp, Artificial Sequence
  source: /note="Description of Artificial Sequence: Synthetic polynucleotide"
atggctgccgatggctatcttccagattggctcgaggacactctctctgaaggaataagacagtggtggaagctcaaacctggcccaccaccaccaaagcccgcagagcggcatagggacgacagcaggggtcttgtgcttcctgggtacaagtacctcggacccttcaacggactcgacaagggagagccggtcaacgaggcagacgccgcggccctcgagcacgacaaagcctacgaccggcagctcgacagcggagacaacccgtacctcaagtacaaccacgccgacgcggagtttcaggagcgccttaaagaagatacgtcttttgggggcaacctcggacgagcagtcttccaggcgaaaaagagggttcttgaacctctgggcctggttgaggaacctgttaagacggctccgggaaaaaagaggccggtagagcactctcctgtggagccagactcctcctcgggaaccggaaaggcgggccagcagcctgcaagaaaaagattgaattttggtcagactggagacgcagactcagtacctgacccccagcctctcggacagccaccagcagccccctctggtctgggaactaatacgatggctacaggcagtggcgcaccaatggcagacaataacgagggcgccgacggagtgggtaattcctcgggaaattggcattgcgattccacatggatgggcgacagagtcatcaccaccagcacccgaacctgggccctgcccacctacaacaaccacctctacaaacaaatttccagccaatcaggagcctcgaacgacaatcactactttggctacagcaccccttgggggtattttgacttcaacagattccactgccacttttcaccacgtgactggcaaagactcatcaacaacaactggggattccgacccaagagactcaacttcaagctctttaacattcaagtcaaagaggtcacgcagaatgacggtacgacgacgattgccaataaccttaccagcacggttcaggtgtttactgactcggggtaccagctcccgtacgtcctcggctcggcgcatcaaggatgcctcccgccgttcccagcagacgtcttcatggtgccacagtatggataccccaccctgaacaacgggagtcaggcagtaggacgctcttcattttactgcctggagtactttccttctcagatgctgcgtaccggaaacaactttaccttcagctacacttttgaggacgttcctttccacagcagctacgctcacagccagagtctggaccgtctcatgaatcctctcatcgaccagtacctgtattacttgagcacaacaaacactccaagtggaaccaccacgcagtcaaggcttcagttttctcaggccggagcgagtgacattcgggaccagtctaggaactggcttcctggaccctgttaccgccagcagcgagtatcaaagacatctgcggataacaacaacagtgaatactcgtggactggagctaccaagtaccacctcaatggcagagactctctggtgaatccgggcccggccgtggcaagccacaaggacgatgaagaaaagttttttcctcagagcggggttctcatctttgggaagcaaggctcagagaaaacaaatgtggacattgaaaaggtcatgattacagacgaagaggaaatcaggacaaccaatcccgtggctacggagcagtatggttctgtatctaccaacctccagagaggcaacagacaagcagctaccgcagatgtcaacacacaaggcgttcttccaggcatggtctggcaggacagagatgtgtaccttcaggggcccatctgggcaaagattccacacacggacggacattttcacccctctcccctcatgggtggattcggacttaaacaccctcctccacagattctcatcaagaacaccccggtacctgcgaatccttcgaccaccttcagtgcggcaaagtttgcttccttcatcacacagtactccacgggacaggtcagcgtggagatcgagtgggagctgcagaaggaaaacagcaaacgctggaatcccgaaattcagtacacttccaactacaacaagtctgttaatgtggactttactgtggacactaatggcgtgtattcagagcctcgccccattggcaccagatacctgactcgtaatctgtaa

SEQ ID NO: 279 - protein, 735 aa, Artificial Sequence
  source: /note="Description of Artificial Sequence: Synthetic polypeptide"
MAADGYLPDWLEDTLSEGIRQWWKLKPGPPPPKPAERHRDDSRGLVLPGYKYLGPFNGLDKGEPVNEADAAALEHDKAYDRQLDSGDNPYLKYNHADAEFQERLKEDTSFGGNLGRAVFQAKKRVLEPLGLVEEPVKTAPGKKRPVEHSPVEPDSSSGTGKAGQQPARKRLNFGQTGDADSVPDPQPLGQPPAAPSGLGTNTMATGSGAPMADNNEGADGVGNSSGNWHCDSTWMGDRVITTSTRTWALPTYNNHLYKQISSQSGASNDNHYFGYSTPWGYFDFNRFHCHFSPRDWQRLINNNWGFRPKRLNFKLFNIQVKEVTQNDGTTTIANNLTSTVQVFTDSGYQLPYVLGSAHQGCLPPFPADVFMVPQYGYPTLNNGSQAVGRSSFYCLEYFPSQMLRTGNNFTFSYTFEDVPFHSSYAHSQSLDRLMNPLIDQYLYYLSTTNTPSGTTTQSRLQFSQAGASDIRDQSRNWLPGPCYRQQRVSKTSADNNNSEYSWTGATKYHLNGRDSLVNPGPAVASHKDDEEKFFPQSGVLIFGKQGSEKTNVDIEKVMITDEEEIRTTNPVATEQYGSVSTNLQRGNRQAATADVNTQGVLPGMVWQDRDVYLQGPIWAKIPHTDGHFHPSPLMGGFGLKHPPPQILIKNTPVPANPSTTFSAAKFASFITQYSTGQVSVEIEWELQKENSKRWNPEIQYTSNYNKSVNVDFTVDTNGVYSEPRPIGTRYLTRNL

SEQ ID NO: 280 - DNA, 2211 bp, Artificial Sequence
  source: /note="Description of Artificial Sequence: Synthetic polynucleotide"
atggctgccgacggttatcttccagattggctcgaggacactctctctgaaggaataagacagtggtggaagctcaaacctggcccaccaccaccaaagcccgcagagcggcataaggacgacagcaggggtcttgtgcttcctgggtacaagtacctcggacccttcaacggactcgacaagggagagccggtcaacgaggcagacgccgcggccctcgagcacgacaaagcctacgaccggcagctcgacagcggagacaacccgtacctcaagtacaaccacgccgacgcggagtttcaggagcgccttaaagaagatacgtcttttgggggcaacctcgggcgggcagtcttccaggccaagaagcgggttctcgaacctctcggtctggttgaggaaggcgctaagacggctcctggaaagaaacgtccggtagagcagtcgccacaagagccagactccccctcgggcatcggcaagacaggccagcagcccgctaaaaagagactcaattttggtcagactggcgactcagagtcagtccccgatccacaacctctcggagaacctccagcaacccccgctgctgtgggacctactacaatggcttcaggcggtggcgcaccaatggcagacaataacgaaggcgccgacggagtgggtaatgcctcaggaaattggcactgcgattccacatggctgggcgacagagtcatcaccaccagcacccgcacctgggccttgcccacctacaataaccacctctacaagcaaatctccagtgcttcaacgggggccagcaacgacaaccactacttcggctacagcaccccctgggggtattttgatttcaacagattccactgccacttttcaccacgtgactggcagcgactcatcaacaacaattggggattccggcccaagagactcaacttcaaactcttcaacatccaagtcaaggaggtcacgacgaatgatggcgtcacaaccatcgctaataaccttaccagcacggttcaagtcttctcggactcggagtaccagcttccgtacgtcctcggctctgcgcaccagggccgcctccctccgttcccggcggacgtgttcatgattccgcaatacggctacctgacgctcaacaatggcagccaagccgtgggacgttcatcctcttactgcctggaatatttcccttctcagatgctgagaacgggcaacaactttaccttcagctacacctttgaggaagtgcctctccacagcagctgcgcgcacagccagagcctggaccggctgatgaatcctctcatcgaccaatacctgtattacctgaacagaactcaaaatcagtccggaagtgcccaaaacagggacttgctgttcagccgtgggtctccagctggcatgtctgttcagcccaaaaactggctacctggaccctgttatcggcagcagcgcgtttctaaaacaaaaacagacaacaacaacagcaattttacctggactggtgcttcaaaatataacctcaatgggcgtgaatccatcatcaaccctggcactgctatggcctcacacaaagacgacgaagacaagttctttcccatgagcggtgtcatgatttttggaaaagagagcgccggagcttcaaacactgcattggacaatgtcatgattacagacgaagaggaaattaaagccactaaccctgtggccaccgaaagatttgggaccgtggcagtcaatttccagagcagcagcacagaccctgcgaccggagatgtgcatgctatgggagcattacctggcatggtgtggcaagatagagacgtgtacctgcagggtcccatttgggccaaaattcctcacacagatggacactttcacccgtctcctcttatgggcggctttggactcaagaacccgcctcctcagatcctcatcaaaaacacgcctgttcctgcgaatcctccggcggagttttcagctacaaagtttgcttcattcatcacccaatactccgcaggacaagtgagtgtggaaattgaatgggagctgcagaaagaaaacagcaagcgctggaatcccgaagtgcagtacacatccaattatgcaaaatctgccaacgttgattttactgtggacaacaatggactttatactgagcctcgccccattggcacccgttaccttacccgtcccctgtaa

SEQ ID NO: 281 - protein, 736 aa, Artificial Sequence
  source: /note="Description of Artificial Sequence: Synthetic polypeptide"
MAADGYLPDWLEDTLSEGIRQWWKLKPGPPPPKPAERHKDDSRGLVLPGYKYLGPFNGLDKGEPVNEADAAALEHDKAYDRQLDSGDNPYLKYNHADAEFQERLKEDTSFGGNLGRAVFQAKKRVLEPLGLVEEGAKTAPGKKRPVEQSPQEPDSPSGIGKTGQQPAKKRLNFGQTGDSESVPDPQPLGEPPATPAAVGPTTMASGGGAPMADNNEGADGVGNASGNWHCDSTWLGDRVITTSTRTWALPTYNNHLYKQISSASTGASNDNHYFGYSTPWGYFDFNRFHCHFSPRDWQRLINNNWGFRPKRLNFKLFNIQVKEVTTNDGVTTIANNLTSTVQVFSDSEYQLPYVLGSAHQGRLPPFPADVFMIPQYGYLTLNNGSQAVGRSSSYCLEYFPSQMLRTGNNFTFSYTFEEVPLHSSCAHSQSLDRLMNPLIDQYLYYLNRTQNQSGSAQNRDLLFSRGSPAGMSVQPKNWLPGPCYRQQRVSKTKTDNNNSNFTWTGASKYNLNGRESIINPGTAMASHKDDEDKFFPMSGVMIFGKESAGASNTALDNVMITDEEEIKATNPVATERFGTVAVNFQSSSTDPATGDVHAMGALPGMVWQDRDVYLQGPIWAKIPHTDGHFHPSPLMGGFGLKNPPPQILIKNTPVPANPPAEFSATKFASFITQYSAGQVSVEIEWELQKENSKRWNPEVQYTSNYAKSANVDFTVDNNGLYTEPRPIGTRYLTRPL

SEQ ID NO: 282 - protein, 736 aa, Artificial Sequence
  source: /note="Description of Artificial Sequence: Synthetic polypeptide"
MAADGYLPDWLEDTLSEGIRQWWKLKPGPPPPKPAERHKDDSRGLVLPGYKYLGPFNGLDKGEPVNEADAAALEHDKAYDRQLDSGDNPYLKYNHADAEFQERLKEDTSFGGNLGRAVFQAKKRVLEPLGLVEEGAKTAPGKKRPVEQSPQEPDSSSGIGKTGQQPAKKRLNFGQTGDSESVPDPQPLGEPPATPAAVGPTTMASGGGAPMADNNEGADGVGNASGNWHCDSTWLGDRVITTSTRTWALPTYNNHLYKQISSASTGASNDNHYFGYSTPWGYFDFNRFHCHFSPRDWQRLINNNWGFRPKRLNFKLFNIQVKEVTTNDGVTTIANNLTSTVQVFSDSEYQLPYVLGSAHQGCLPPFPADVFMIPQYGYLTLNNGSQAVGRSSFYCLEYFPSQMLRTGNNFTFSYTFEEVPLHSSCAHSQSLDRLMNPLIDQYLYYLNRTQNQSGSAQNRDLLFSRGSPAGMSVQPKNWLPGPCYRQQRVSKTKTDNNNSNFTWTGASKYNLNGRESIINPGTAMASHKDDEDKFFPMSGVMIFGKESAGASNTALDNVMITDEEEIKATNPVATERFGTVAVNFQSSSTDPATGDVHAMGALPGMVWQDRDVYLQGPIWAKIPHTDGHFHPSPLMGGFGLKNPPPQILIKNTPVPANPPAEFSATKFASFITQYSTGQVSVEIEWELQKENSKRWNPEVQYTSNYAKSANVDFTVDNNGLYTEPRPIGTRYLTRPL

SEQ ID NO: 283 - DNA, 2208 bp, Artificial Sequence
  source: /note="Description of Artificial Sequence: Synthetic polynucleotide"
atggctgccgatggctatcttccagattggctcgaggacactctctctgaaggaataagacagtggtggaagctcaaacctggcccaccaccaccaaagcccgcagagcggcatagggacgacagcaggggtcttgtgcttcctgggtacaagtacctcggacccttcaacggactcgacaagggagagccggtcaacgaggcagacgccgcggccctcgagcacgacaaagcctacgaccggcagctcgacagcggagacaacccgtacctcaagtacaaccacgccgacgcggagtttcaggagcgccttaaagaagatacgtcttttgggggcaacctcggacgagcagtcttccaggcgaaaaagagggttcttgaacctctgggcctggttggggaacctgttaagacggctccgggaaaaaagaggccggtagagcactctcctgtggagccagactcctcctcgggaaccggaaaggcgggccagcagcctgcaagaaaaagattgaattttggtcagactggagacgcagactcagtacctgacccccagcctctcggacagccaccagcagccccctctggtctgggaactaatacgatggctacaggcagtggcgcaccaatggcagacaataacgagggcgccgacggagtgggtaattcctcgggaaattggcattgcgattccacatggatgggcgacagagtcatcaccaccagcacccgaacctgggccctgcccacctacaacaaccacctctacaaacaaatttccagccaatcaggagcctcgaacgacagtcactactttggctacagcaccccttgggggtattttgacttcaacagattccactgccacttttcaccacgtgactggcaaagactcatcaacaacaactggggattccgacccaagagactcaacttcaagctctttaacattcaagtcaaagaggtcacgcagaatgacggtacgacgacgattgccaataaccttaccagcacggttcaggtgtttactgactcggagtaccagctcccgtacgtcctcggctcggcgcatcaaggatgcctcccgccgttcccagcagacgtcttcatggtgccacagtatggatacctcaccctgaacaacgggagtcaggcagtaggacgctcttcattttactgcctggagtactttccttctcagatgctgcgtaccggaaacaactttaccttcagctacacttttgaggacgttcctttccacagcagctacgctcacagccagagtctggaccgtctcatgaatcctctcatcgaccagtacctgtattacttgagcacaacaaacactccaagtggaaccaccacgcagtcaaggctccagttttctcaggccggagcgagtgacattcgggaccagtctaggaactggcttcctggaccctgttaccgccagcagcgagtatcaaagacatctgcggataacaacaacagtgaatactcgtggactggagctaccaagtaccacctcaatggcagagactctctggtgaatccgggcccggccatggcaagccacaaggacaatgaagaaaagttttttcctcagagcggggttctcatctttgggaagcaaggctcagagaaaacaaatgtggacattgaaaaggtcatgattacagacgaagaggaaatcaggacaaccaatcccgtggctacggagcagtatggttctgtatctaccaacctccagagaggcaacagacaagcagctaccgcagatgtcaacacacaaggcgttcttccaggcatggtctggcaggacagagatgtgtaccttcaggggcccatctgggcaaagattccacacacggacggacattttcacccctctcccctcatgggtggattcggacttaaacaccctcctccacagattctcatcaagaacaccccggtacctgcgaatccttcgaccaccttcagtgcggcaaagtttgcttccttcatcacacagtactccacgggacaggtcagcgtggagatcgagtgggagctgcagaaggaaaacagcaaacgctggaatcccgaaattcagtacacttccaactacaacaagtctgttaatgtggactttactgtggacactaatggcgtgtattcagagcctcgccccattggcaccagatacctgactcgtaatctgtaa

SEQ ID NO: 284 - protein, 735 aa, Artificial Sequence
  source: /note="Description of Artificial Sequence: Synthetic polypeptide"
MAADGYLPDWLEDTLSEGIRQWWKLKPGPPPPKPAERHRDDSRGLVLPGYKYLGPFNGLDKGEPVNEADAAALEHDKAYDRQLDSGDNPYLKYNHADAEFQERLKEDTSFGGNLGRAVFQAKKRVLEPLGLVGEPVKTAPGKKRPVEHSPVEPDSSSGTGKAGQQPARKRLNFGQTGDADSVPDPQPLGQPPAAPSGLGTNTMATGSGAPMADNNEGADGVGNSSGNWHCDSTWMGDRVITTSTRTWALPTYNNHLYKQISSQSGASNDSHYFGYSTPWGYFDFNRFHCHFSPRDWQRLINNNWGFRPKRLNFKLFNIQVKEVTQNDGTTTIANNLTSTVQVFTDSEYQLPYVLGSAHQGCLPPFPADVFMVPQYGYLTLNNGSQAVGRSSFYCLEYFPSQMLRTGNNFTFSYTFEDVPFHSSYAHSQSLDRLMNPLIDQYLYYLSTTNTPSGTTTQSRLQFSQAGASDIRDQSRNWLPGPCYRQQRVSKTSADNNNSEYSWTGATKYHLNGRDSLVNPGPAMASHKDNEEKFFPQSGVLIFGKQGSEKTNVDIEKVMITDEEEIRTTNPVATEQYGSVSTNLQRGNRQAATADVNTQGVLPGMVWQDRDVYLQGPIWAKIPHTDGHFHPSPLMGGFGLKHPPPQILIKNTPVPANPSTTFSAAKFASFITQYSTGQVSVEIEWELQKENSKRWNPEIQYTSNYNKSVNVDFTVDTNGVYSEPRPIGTRYLTRNL

SEQ ID NO: 285 - protein, 737 aa, Artificial Sequence
  source: /note="Description of Artificial Sequence: Synthetic polypeptide"
RMAADGYLPDWLEDNLSEGIREWWDLKPGAPKPKANQQKQDDGRGLVLPGYKYLGPFNGLDKGEPVNAADAAALEHDKAYDQQLKAGDNPYLRYNHADAEFQERLQEDTSFGGNLGRAVFQAKKRVLEPLGLVEEGAKTAPGKKRPVEQSPQEPDSSSGIGKTGQQPAKKRLNFGQTGDSESVPDPQPLGEPPATPAAVGPTTMASGGGAPMADNNEGADGVGNASGNWHCDSTWLGDRVITTSTRTWALPTYNNHLYKQISSTSTGASNDNHYFGYGTPWGYFDFNRFHCHFSPRDWQRLINNNWGFRPKRLNFKLFNIQVEEVTTNDGVTTIANNLTSTVQVFSDSEYQLPYVLGSAHQGCLPPFPADVFMIPQYGYLTLNNGSQAVGRSSFYCLEYFPSQMLRTGNNFTFSYTFEEVPFHSSYAHSQSLDRLMNPLIDQYLYYLNRTQNQSGSAQNKDLLFSRGSPAGMSVQPKNWLPGPCYRQQRVSKTKTDNNNSNFTWTGASKYNLNGRESIINPGTAVASHKDDEDKFFPMSGVMIFGKESAGASSTALDNVMITDEEEIKATNPVATERFGTVAVNFQSSSTDPATGDVHAMGALPGMVWQDRDVYLQGPIWAKIPHTDGHFHPSPLMGGFGLKNPPPQILIKNTPVPANPPAEFSATKFASFITQYSTGQVSVEIEWELQKENSKRWNPEVQYTSNYAKSANVDFTVDNNGLYTEPRPIGTRYLTRPL

SEQ ID NO: 286 - protein, 736 aa, Artificial Sequence
  source: /note="Description of Artificial Sequence: Synthetic polypeptide"
MAADGYLPDWLEDNLSEGIREWWDLKPGAPKPKANQQKQDDGRGLVLPGYKYLGPFNGLDKGEPVNAADAAALEHDKAYDQQLKAGDNPYLRYNHADAEFQERLQEDTSFGGNLGRAVFQAKKRVLEPLGLVEEGAKTAPGKKRPVEQSPQEPDSSSGIGKTGQQPAKKRLNFGQTGDSESVPDPQPLGEPPATPAAVGPTTMASGGGAPMADNNEGADGVGNASGNWHCDSTWLGDRVITTSTRTWALPTYNNHLYKQISSTSTGASNDNHYFGYGTPWGYFDFNRFHCHFSPRDWQRLINNNWGFRPKRLNFKLFNIQVEEVTTNDGVTTIANNLTSTVQVFSDSEYQLPYVLGSAHQGCLPPFPADVFMIPQYGYLTLNNGSQAVGRSSFYCLEYFPSQMLRTGNNFTFSYTFEEVPFHSSYAHSQSLDRLMNPLIDQYLYYLNRTQNQSGSAQNKDLLFSRGSPAGMSVQPKNWLPGPCYRQQRVSKTKTDNNNSNFTWTGASKYNLNGRESIINPGTAVASHKDDEDKFFPMSGVMIFGKESAGASSTALDNVMITDEEEIKATNPVATERFGTVAVNFQSSSTDPATGDVHAMGALPGMVWQDRDVYLQGPIWAKIPHTDGHFHPSPLMGGFGLKNPPPQILIKNTPVPANPPAEFSATKFASFITQYSTGQVSVEIEWELQKENSKRWNPEVQYTSNYAKSANVDFTVDNNGLYTEPRPIGTRYLTRPL

SEQ ID NO: 287 - DNA, 2211 bp, Artificial Sequence
  source: /note="Description of Artificial Sequence: Synthetic polynucleotide"
atggctgccgatggttatcttccagattggctcgaggacaacctctctgagggcattcgcgagtggtgggacttgaaacctggagccccgaagcccaaagccaaccagcaaaagcaggacgacggccggggtctggtgcttcctggctacaagtacctcggacccttcaacggactcgacaagggggagcccgtcaacgcggcggacgcagcggccctcgagcacgacaaggcctacgaccagcagctcaaagcgggtgacaatccgtacctgcggtataaccacgccgacgccgagtttcaggagcgtctgcaagaagatacgtcttttgggggcaacctcgggcgagcagtcttccaggccaagaagcgggttctcgaacctctcggtctggttgaggaaggcgctaagacggctcctggaaagaaacgtccggtagagcagtcgccacaagagccagactcctcctcgggcatcggcaagacaggccagcagcccgctaaaaagagactcaattttggccagactggcgactcagagtcagtccccgatccacaacctctcggagaacctccagcaacccccgctgctgtgggacctactacaatggcttcaggcggtggcgcaccaatggcagacaataacgaaggcgccgacggagtgggtaatgcctcaggaaattggcattgcgattccacatggctgggcgacagagtcatcaccaccagcacccgcacctgggccttgcccacctacaataaccacctctacaagcaaatctccagtacttcaacgggggccagcaacgacaaccactacttcggctacggcaccccctgggggtattttgatttcaacagattccactgccacttttcaccacgtgactggcagcgactcatcaacaacaattggggattccggcccaagagactcaacttcaaactcttcaacatccaagtcgaggaggtcacgacgaatgatggcgtcacaaccatcgctaataaccttaccagcacggttcaagtcttctcggactcggagtaccagcttccgtacgtcctcggctctgcgcaccagggctgcctccctccgttcccggcggacgtgttcatgattccgcaatacggctacctgacgctcaacaatggcagccaagccgtgggacgttcatccttttactgcctggaatatttcccttctcagatgctgagaacgggcaacaactttaccttcagctacacctttgaggaagtgcctttccacagcagctacgcgcacagccagagcctggaccggctgatgaatcctctcatcgaccaatacctgtattacctgaacagaacacaaaatcagtccggaagtgcccaaaacaaggacttgctgtttagccgtgggtctccagctggcatgtctgttcagcccaaaaactggctacctggaccctgttatcggcagcagcgcgtttctaaaacaaaaacagacaacaacaacagcaattttacctggactggtgcttcaaaatataacctcaatgggcgtgaatccatcatcaaccctggcaccgctgtggcctcacacaaagacgacgaagacaagttctttcccatgagcggtgtcatgatttttggaaaagagagcgccggagcttcaagcactgcattggacaatgtcatgattacagacgaagaggaaattaaagccactaaccctgtggccaccgaaagatttgggaccgtggcagtcaatttccagagcagcagcacagaccctgcgaccggagatgtgcatgctatgggagcattacctggcatggtgtggcaagatagagacgtgtacctgcagggtcccatttgggccaaaattcctcacacagatggacactttcacccgtctcctcttatgggcggctttggactcaagaacccgcctcctcagatcctcatcaaaaacacgcctgttcctgcgaatcctccggcggagttttcagctacaaagtttgcttcattcatcacccaatactccacaggacaagtgagtgtggaaattgaatgggagctgcagaaagaaaacagcaagcgctggaatcccgaagtgcagtacacatccaattatgcaaaatctgccaacgttgattttactgtggacaacaatggactttatactgagcctcgccccattggcacccgttaccttacccgtcccctgtaa

SEQ ID NO: 288 - protein, 737 aa, Artificial Sequence
  source: /note="Description of Artificial Sequence: Synthetic polypeptide"
RMAADGYLPDWLEDNLSEGIREWWDLKPGAPKPKANQQKQDDGRGLVLPGYKYLGPFNGLDKGEPVNAADAAALEHDKAYDQQLKAGDNPYLRYNHADAEFQERLQEDTSFGGNLGRAVFQAKKRVLEPLGLVEEGAKTAPGKKRPVEQSPQEPDSSSGIGKTGQQPAKKRLNFGQTGDSESVPDPQPLGEPPATPAAVGPTTMASGGGAPMADNNEGADGVGNASGNWHCDSTWLGDRVITTSTRTWALPTYNNHLYKQISSTSTGASNDNHYFGYSTPWGYFDFNRFHCHFSPRDWQRLINNNWGFRPKRLNFKLFNIQVEEVTTNDGVTTIANNLTSTVQVFSDSEYQLPYVLGSAHQGCLPPFPADVFMIPQYGYLTLNNGSQAVGRSSFYCLEYFPSQMLRTGNNFTFSYTFEEVPFHSSYAHSQSLDRLMNPLIDQYLYYLNRTQNQSGSAQNKDLLFSRGSPAGMSVQPKNWLPGPCYRQQRVSKTKTDNNNSNFTWTGASKYNLNGRESIINPGTAVASHKDDEDKFFPMSGVMIFGKESAGASSTALDNVMITDEEEIKATNPVATERFGTVAVNFQSSSTDPATGDVHAMGALPGMVWQDRDVYLQGPIWAKIPHTDGHFHPSPLMGGFGLKNPPPQILIKNTPVPANPPAEFSATKFASFITQYSTGQVSVEIEWELQKENSKRWNPEVQYTSNYAKSANVDFTVDNNGLYTEPRPIGTRYLTRPL

SEQ ID NO: 289 - protein, 737 aa, Artificial Sequence
  source: /note="Description of Artificial Sequence: Synthetic polypeptide"
RMAADGYLPDWLEDNLSEGIREWWDLKPGAPKPKANQQKQDDGRGLVLPGYKYLGPFNGLDKGEPVNAADAAALEHDKAYDQQLKAGDNPYLRYNHADAEFQERLQEDTSFGGNLGRAVFQAKKRVLEPLGLVEEGAKTAPGKKRPVEQSPQEPDSSSGIGKTGQQPAKKRLNFGQTGDSESVPDPQPLGEPPATPAAVGPTTMASGGGAPMADNNEGADGVGNASGNWHCDSTWLGDRVITTSTRTWALPTYNNHLYKQISSTSTGASNDNHYFGYSTPWGYFDFNRFHCHFSPRDWQRLINNNWGFRPKRLNFKLFNIQVKEVTTNDGVTTIANNLTSTVQVFSDSEYQLPYVLGSAHQGCLPPFPADVFMIPQYGYLTLNNGSQAVGRSSFYCLEYFPSQMLRTGNNFTFSYTFEEVPFHSSYAHSQSLDRLMNPLIDQYLYYLNRTQNQSGSAQNKDLLFSRGSPAGMSVQPKNWLPGPCYRQQRVSKTKTDNNNSNFTWTGASKYNLNGRESIINPGTAVASHKDDEDKFFPMSGVMIFGKESAGASSTALDNVMITDEEEIKATNPVATERFGTVAVNFQSSSTDPATGDVHAMGALPGMVWQDRDVYLQGPIWAKIPHTDGHFHPSPLMGGFGLKNPPPQILIKNTPVPANPPAEFSATKFASFITQYSTGQVSVEIEWELQKENSKRWNPEVQYTSNYAKSANVDFTVDNNGLYTEPRPIGTRYLTRPL

SEQ ID NO: 290 - protein, 737 aa, Artificial Sequence
  source: /note="Description of Artificial Sequence: Synthetic polypeptide"
RMAADGYLPDWLEDNLSEGIREWWDLKPGAPKPKANQQKQDDGRGLVLPGYKYLGPFNGLDKGEPVNAADAAALEHDKAYDQQLKAGDNPYLRYNHADAEFQERLQEDTSFGGNLGRAVFQAKKRVLEPLGLVEEGAKTAPGKKRPVEQSPQEPDSSSGIGKTGQQPAKKRLNFGQTGDSESVPDPQPLGEPPATPAAVGPTTMASGGGAPMADNNEGADGVGNASGNWHCDSTWLGDRVITTSTRTWALPTYNNHLYKQISSTSTGASNDNHYFGYSTPWGYFDFNRFHCHFSPRDWQRLINNNWGFRPKRLNFKLFNIQVKEVTTNDGVTTIANNLTSTVQVFSDSEYQLPYVLGSAHQGCLPPFPADVFMIPQYGYLTLNNGSQAVGRSSFYCLEYFPSQMLRTGNNFTFSYTFEEVPFHSSYAHSQSLDRLMNPLIDQYLYYLNRTQNQSGSAQNKDLLFSRGSPAGMSVQPKNWLPGPCYRQQRVSKTKTDNNNSNFTWTGASKYNLNGRESIINPGTAVASHKDDEDKFFPMSGVMIFGKESAGANSTALDNVMITDEEEIKATNPVATERFGTVAVNFQSSSTDPATGDVHAMGALPGMVWQDRDVYLQGPIWAKIPHTDGHFHPSPLMGGFGLKNPPPQILIKNTPVPANPPAEFSATKFASFITQYSTGQVSVEIEWELQKENSKRWNPEVQYTSNYAKSANVDFTVDNNGLYTEPRPIGTRYLTRPL

SEQ ID NO: 291 - DNA, 2208 bp, Artificial Sequence
  source: /note="Description of Artificial Sequence: Synthetic polynucleotide"
atggctgccgatggttatcttccagattggctcaaggacactctctctgaaggaataagacagtggtggaagctcaaacctggcccaccaccaccaaagcccgcagagcggcataaggacgacagcgggggtcttgtgcttcctgggtacaagtacctcggacccttcaacggactcgacaagggagagccggtcaacgaggcagacgccgcggccctcgagtacgacaaggcctacgaccggcagctcgacagcggagacaacccgtacctcaagtacaaccacgccgacgcggagtttcaggagcgccttaaagaagatacgtcttttgggggcaacctcggacgagcagtcttccaggcgaaaaagagggttcttgaacctctgggcctggttgaggaacctgttaagacggctccgggaaaaaagaggccggtagagcactctcctgtggagccagactcctcctcgggaacaggaaaagcgggccagcagcctgcgagaaagagattgaattttggtcagactggagacgcagactccgtacctgacccccagcctctcggacagccaccagcagccccctctggtctgggaactaatacgatggctacaggcagtggcgcaccaatggcagacaataacgagggcgccgacggagtgggtaattcctcgggaagttggcattgcgattccacatggatgggcgacagagtcatcaccaccagcacccgaacctgggctctgcccacctacaacaaccatctgtacaagcagatctccagccaatcaggagccagcaacgacaaccactactttggctacagcaccccttgggggtattttgacttcaacagattccactgccacttttcaccacgtgactggcaaagactcatcaacaacaactggggattccggcccaagagactcaacttcaagctctttaacattcaagtcaaggaggtcacgcagaatgacggtacgacgacgattgccaataaccttaccagcacggttcaggtgtttactgactcggagtaccagctcccgtacgtccccggctcggcgcatcaaggatgcctcccgccgttcccagcagacgtcttcatggtgccacagtatggatacctcaccctgaacaacgggagtcaggcagtaggacgctcttcattttactgcctggagtactttccttctcagatgcttcgtaccggaaacaactttaccttcagctacacctttgaggatgttcctttccacagcagctacgctcacagccagagtttggaccgtctcatgaatcctctcatcgaccagtacctgtattacttgagcagaacaaacactccaagcggaaccaccacgcagtccaggcttcagttttctcaggccggagcaagtgacattcgggaccagtctaggaactggcttcctggaccctgttaccgccagcagcgagtatcaaagacagctgcggacaacaacaacagtgaatactcgtggactggagctaccaagtaccacctcaatggcagagactctctggtgaatccgggcccggccatggccagccacaaggacgatgaagaaaagttttttcctcaaagcggggttctcatctttgggaagcaaggctcagagaaaacaaatgtggacattgaaaaggtcatgattacagacgaagaggaaatcagaaccaccaatcccgtggccacggagcagtatggttctgtatctaccaacctccagagcggcaacacacaagcagctactgcagatgtcaacacacaaggcgttcttccaggcatggtctggcaggacagagacgtgcacctgcaggggcctatctgggcaaagattccacacacggacggacattttcacccctctcccctcatgggcggatttggacttaaacaccctcctccacagattctcatcaagaacaccccggtacctgcaaatccttcgaccaccttcagtgcggcaaagtttgcttccttcatcacacagtattccacagggcaggtcagcgtggagatcgagtgggagctgcagaaggagaacagcaaacgctggaaccccgagatccagtacacttccaactacaacaaatctgttaatgtggactttactgtggacactaatggtgtgtattcagagcctcgccccattggcaccagatacctgactcgtaatctgtaa

SEQ ID NO: 292 - protein, 735 aa, Artificial Sequence
  source: /note="Description of Artificial Sequence: Synthetic polypeptide"
MAADGYLPDWLKDTLSEGIRQWWKLKPGPPPPKPAERHKDDSGGLVLPGYKYLGPFNGLDKGEPVNEADAAALEYDKAYDRQLDSGDNPYLKYNHADAEFQERLKEDTSFGGNLGRAVFQAKKRVLEPLGLVEEPVKTAPGKKRPVEHSPVEPDSSSGTGKAGQQPARKRLNFGQTGDADSVPDPQPLGQPPAAPSGLGTNTMATGSGAPMADNNEGADGVGNSSGSWHCDSTWMGDRVITTSTRTWALPTYNNHLYKQISSQSGASNDNHYFGYSTPWGYFDFNRFHCHFSPRDWQRLINNNWGFRPKRLNFKLFNIQVKEVTQNDGTTTIANNLTSTVQVFTDSEYQLPYVPGSAHQGCLPPFPADVFMVPQYGYLTLNNGSQAVGRSSFYCLEYFPSQMLRTGNNFTFSYTFEDVPFHSSYAHSQSLDRLMNPLIDQYLYYLSRTNTPSGTTTQSRLQFSQAGASDIRDQSRNWLPGPCYRQQRVSKTAADNNNSEYSWTGATKYHLNGRDSLVNPGPAMASHKDDEEKFFPQSGVLIFGKQGSEKTNVDIEKVMITDEEEIRTTNPVATEQYGSVSTNLQSGNTQAATADVNTQGVLPGMVWQDRDVHLQGPIWAKIPHTDGHFHPSPLMGGFGLKHPPPQILIKNTPVPANPSTTFSAAKFASFITQYSTGQVSVEIEWELQKENSKRWNPEIQYTSNYNKSVNVDFTVDTNGVYSEPRPIGTRYLTRNL

SEQ ID NO: 293 - DNA, 2208 bp, Artificial Sequence
  source: /note="Description of Artificial Sequence: Synthetic polynucleotide"
atggctgccgatggttatcttccagattggctcgaggacactctctctgaaggaataagacagtggtggaagctcaaacctggcccaccaccaccaaagcccgcagagcggcataaggacgacagcaggggtcttgtgcttcctgggtacaagtacctcggacccttcaacggactcgacaagggggagccggtcaacgaggcagacgccgcggccctcgagcacgacaaggcctacgaccggcagctcgacagcggagacaacccgtacctcaagtacaaccacgccgacgcagagtttcaggagcgccttaaagaagatacgtcttttgggggcaacctcggacgagcagtcttccaggcgaaaaagagggttcttgaacctctgggcctggttgaggaacctgttaagacggctccgggaaaaaagaggccggtagagcactctcctgtggagccagactcctcctcgggaaccggaaaagcgggccagcagcctgcaagaaaaagattaaattttggtcagactggagacgcagactccgtacctgacccccagcctctcggacagccaccagcagccccctctggtctgggatctactacaatggctacaggcagtggcgcaccaatggcagacaataacgagggtgccgatggagtgggtaattcctcaggaaattggcattgcgattcccaatggctgggcgacagagtcatcaccaccagcacccgaacctgggccctgcccacatacaacaaccacctctacaagcaaatctccagccaatcaggagccagcaacgacaaccactactttggctacagcaccccctgggggtattttgacttcaacagattccactgccacttttcaccacgtgactggcaaagactcatcaacaacaactggggattccggcccaaaagactcaacttcaagctctttaatattcaagtcaaagaggtcacgcagaatgacggtacgacgacgattgccaataaccttaccagcacggttcaggtgtttactgactcggagtaccagctcccgtacgtcctgggctcggcgcatcaaggatgcctcccgccgtttccagcggacgtcttcatggtcccacagtatggatacctcaccctgaacaacgggagtcaggcggtaggacgctcttccttttactgcctggagtactttccttctcagatgctgcgtactggaaacaactttcagttcagctacacttttgaagacgtgcctttccacagcagctacgctcacagccagagtctggatcggctgatgaatcctctgatcgaccagtacctgtattatctgaacaagacacaaacaaatagtggaactcttcagcagtctcggctactgtttagccaagctggaccaaccaacatgtctcttcaagctaaaaactggctgcctggaccttgctacagacagcagcgtctgtcaaaacaggcaaacgacaacaacaacagcaactttccctggactgcagctacaaagtatcatctaaatggccgggactcgttggttaatccaggaccagctatggccagtcgcaaggatgacgaagaaaagtttttccccatgcatggaaccctgatatttggtaaacaaggaacaaatgccaacgacgcggatttggaaaatgtcatgattacagatgaagaagaaatcagggccaccaatcccgtggctacggagcagtacgggactgtgtcaaataatttgcaaaactcaaacactggtccaactactggaactgtcaatcaccaaggagcgttacctggtatggtgtggcaggatcgagacgtgtacctgcagggacccatttgggccaagattcctcacaccgatggacactttcatccttctccactgatgggaggttttggactcaaacacccgcctcctcagatcatgatcaaaaacactcccgttccagccaatcctcccacaaacttcagttctgccaagtttgcttctttcatcacacagtattccacgggacaggtcagcgtggagatcgagtgggagctgcagaaggagaacagcaaacgctggaatcccgaaattcagtacacttccaactacaacaagtctgttaatgtggactttactgtggacactaatggtgtgtattcagagcctcgccccattggcaccagatacctgactcgtaatctgtaa

SEQ ID NO: 294 - protein, 735 aa, Artificial Sequence
  source: /note="Description of Artificial Sequence: Synthetic polypeptide"
MAADGYLPDWLEDTLSEGIRQWWKLKPGPPPPKPAERHKDDSRGLVLPGYKYLGPFNGLDKGEPVNEADAAALEHDKAYDRQLDSGDNPYLKYNHADAEFQERLKEDTSFGGNLGRAVFQAKKRVLEPLGLVEEPVKTAPGKKRPVEHSPVEPDSSSGTGKAGQQPARKRLNFGQTGDADSVPDPQPLGQPPAAPSGLGSTTMATGSGAPMADNNEGADGVGNSSGNWHCDSQWLGDRVITTSTRTWALPTYNNHLYKQISSQSGASNDNHYFGYSTPWGYFDFNRFHCHFSPRDWQRLINNNWGFRPKRLNFKLFNIQVKEVTQNDGTTTIANNLTSTVQVFTDSEYQLPYVLGSAHQGCLPPFPADVFMVPQYGYLTLNNGSQAVGRSSFYCLEYFPSQMLRTGNNFQFSYTFEDVPFHSSYAHSQSLDRLMNPLIDQYLYYLNKTQTNSGTLQQSRLLFSQAGPTNMSLQAKNWLPGPCYRQQRLSKQANDNNNSNFPWTAATKYHLNGRDSLVNPGPAMASRKDDEEKFFPMHGTLIFGKQGTNANDADLENVMITDEEEIRATNPVATEQYGTVSNNLQNSNTGPTTGTVNHQGALPGMVWQDRDVYLQGPIWAKIPHTDGHFHPSPLMGGFGLKHPPPQIMIKNTPVPANPPTNFSSAKFASFITQYSTGQVSVEIEWELQKENSKRWNPEIQYTSNYNKSVNVDFTVDTNGVYSEPRPIGTRYLTRNL

SEQ ID NO: 295 - DNA, 2208 bp, Artificial Sequence
  source: /note="Description of Artificial Sequence: Synthetic polynucleotide"
atggctgccgatggttatcttccagattggctcgaggacactctctctgaaggaataagacagtggtggaagctcaaacctggcccaccaccaccaaagcccgcagagcggcataaggacgacagcaggggtcttgtgcttcctgggtacaagtacctcggacccttcaacggactcgacaagggagagccggtcaacgaggcagacgccgcggccctcgagcacgacaaagcctacgaccggcagctcgacagcggagacaacccgtacctcaagtacaaccacgccgacgcggagtttcaggagcgccttaaagaagatacgtcttttgggggcaacctcggacgagcagtcttccaggcgaaaaagagggttcttgaacctctgggcctggttggggaacctgtcaagacggctccaggaaaaaagaggccggtagagcactctcctgtggagccagactcctcctcgggaaccggaaaggcgggccagcagcctgcaagaaaaagattgaattttggtcagactggagacgcagactcagtacctgacccccagcctctcggacagccaccagcagccccctctggtctgggaactaatacgatggctacaggcagtggcgcaccaatggcagacaataacgagggcgccgacggagtgggtaattcctcgggaaattggcattgcgattccacatggatgggcgacagagtcatcaccaccagcacccgaacctgggccctgcccacctacaacaaccacctctacaaacaaatttccagccaatcaggagcctcgaacgacaatcactactttggctacagcaccccttgggggtattttgacttcaacagattccactgccacttttcaccacgtgactggcaaagactcatcaacaacaactggggattccgacccaagagactcaacttcaagctctttaacattcaagtcaaagaggtcacgcagaatgacggtacgacgacgattgccaataaccttaccagcacggttcaggtgtttactgactcggagtaccagctcccgtacgtcctcggctcggcgcatcaaggatgcctcccgccgttcccagcagacgtcttcatggtgccacagtatggatacctcaccctgaacaacgggagtcaggcagtaggacgctcttcattttactgcctggagtactttccttctcagatgctgcgtaccggaaacaactttaccttcagctacacttttgaggacgttcctttccacagcggctacgctcacagccagagtctggaccgtctcatgaatcctctcatcgaccagtacctgtattacttgagcacaacaaacactccaagtggaaccaccacgcagtcaaggcttcagttttctcaggccggagcgagtgacattcgggaccagtctaggaactggcttcctggaccctgttaccgccagcagcgagtatcaaagacatctgcggataacaacaacagtgaatactcgtggactggagctaccaagtaccacctcaatggcagagactctctggtgaatccgggcccggccatggcaagccacaaggacaatgaagaaaagttttttcctcagagcggggttctcatctttgggaagcaaggctcagagaaaacaaatgtggacattgaaaaggtcatgattacagacgaagaggaaatcaggacaaccaatcccgtggctacggagcagtacggttctgtatctaccaacctccagagaggcaacagacaagcagctaccgcagatgtcaacacacaaggcgttcttccaggcatggtctggcaggacagagatgtgtaccttcaggggcccatctgggcaaagattccacacacggacggacattttcacccctctcccctcatgggtggattcggacttaaacaccctcctccacagattctcatcaagaacaccccggtacctgcgaatccttcgaccaccttcagtgcggcaaagtttgcttccttcatcacacagtactccacgggacaggtcagcgtggagatcgagtgggagctgcagaaggaaaacagcaaacgctggaatcccgaaattcagtacacttccaactacaacaagtctgttaatgtggactttactgtggacactaatggcgtgtattcagagcctcgccccattggcaccagatacctgactcgtaatctgtaa

SEQ ID NO: 296 - protein, 735 aa, Artificial Sequence
  source: /note="Description of Artificial Sequence: Synthetic polypeptide"
MAADGYLPDWLEDTLSEGIRQWWKLKPGPPPPKPAERHKDDSRGLVLPGYKYLGPFNGLDKGEPVNEADAAALEHDKAYDRQLDSGDNPYLKYNHADAEFQERLKEDTSFGGNLGRAVFQAKKRVLEPLGLVGEPVKTAPGKKRPVEHSPVEPDSSSGTGKAGQQPARKRLNFGQTGDADSVPDPQPLGQPPAAPSGLGTNTMATGSGAPMADNNEGADGVGNSSGNWHCDSTWMGDRVITTSTRTWALPTYNNHLYKQISSQSGASNDNHYFGYSTPWGYFDFNRFHCHFSPRDWQRLINNNWGFRPKRLNFKLFNIQVKEVTQNDGTTTIANNLTSTVQVFTDSEYQLPYVLGSAHQGCLPPFPADVFMVPQYGYLTLNNGSQAVGRSSFYCLEYFPSQMLRTGNNFTFSYTFEDVPFHSGYAHSQSLDRLMNPLIDQYLYYLSTTNTPSGTTTQSRLQFSQAGASDIRDQSRNWLPGPCYRQQRVSKTSADNNNSEYSWTGATKYHLNGRDSLVNPGPAMASHKDNEEKFFPQSGVLIFGKQGSEKTNVDIEKVMITDEEEIRTTNPVATEQYGSVSTNLQRGNRQAATADVNTQGVLPGMVWQDRDVYLQGPIWAKIPHTDGHFHPSPLMGGFGLKHPPPQILIKNTPVPANPSTTFSAAKFASFITQYSTGQVSVEIEWELQKENSKRWNPEIQYTSNYNKSVNVDFTVDTNGVYSEPRPIGTRYLTRNL

SEQ ID NO: 297 - DNA, 2208 bp, Artificial Sequence
  source: /note="Description of Artificial Sequence: Synthetic polynucleotide"
atggctgccgatggttatcttccagattggctcgaggacactctctctgaaggaataagacagtggtggaagctcaaacctggcccaccaccaccaaagcccgcagagcggcataaggacgacagcaggggtcttgtgcttcctgggtacaagtacctcggacccttcaacggactcgacaagggagagccggtcaacgaggcagacgccgcggccctcgagcacgacaaagcctacgaccggcagctcgacagcggagacaacccgtacctcaagtacaaccacgccgacgcggagtttcaggagcgccttaaagaagatacgtcttttgggggcaacctcggacgagcagtcttccaggcgaaaaagagggttcttgaacctctgggcctggttggggaacctgttaagacggctccgggaaaaaagaggccggtagagcactctcctgtggagccagactcctcctcgggaaccggaaaggcgggccagcagcctgcaagaaaaagattgaattttggtcagactggagacgcagactcagtacctgacccccagcctctcggacagccaccagcagccccctctggtctgggaactaatacgatggctacaggcagtggcgcaccaatggcagacaataacgagggcgccgacggagtgggtaattcctcgggaaatcggcattgcgattccacatggatgggcgacagagtcatcaccaccagcacccgaacctgggccctgcccacctacaacaaccacctctacagacaaatttccagccaatcaggagcctcgaacgacaatcactactttggctacagcaccccttgggggtattttgacttcaacagattccactgccacttttcaccacgtgactggcaaagactcatcaacaacaactggggattccgacccaagagactcaacttcaagctctttaacattcaagtcaaagaggtcacgcagaatgacggtacgacgacgattgccaataaccttaccagcacggttcaggtgtttactgactcggagtaccagctcccgtacgtcctcggctcggcgcatcaaggatgcctcccgccgttcccagcagacgtcttcatggtgccacagtatggatacctcaccctgagcaacgggagtcaggcagtaggacgctcttcattttactgcccggagtactttccttctcagatgctgcgtaccggaaacaactttaccttcagctacacttttgaggacgttcctttccacagcagctacgctcacagccagagtctggaccgtctcatgaatcctctcatcgaccagtacctgtattacttgagcacaacaaacactccaagtggaaccaccacgcagtcaaggcttcagttttctcaggccggagcgagtgacattcgggaccagtctaggaactggcttcctggaccctgttaccgccagcagcgagtatcaaagacatctgcggataacaacaacagtgaatactcgtggactggagctaccaagtaccacctcaatggcagagactctctggtgaatccgggcccggccatggcaagccacaaggacaatgaagaaaagttttttcctcagagcggggttctcatctttgggaagcaaggctcagagaaaacaaatgtggacattgaaaaggtcatgattacagacgaagaggaaatcaggacaaccaatcccgtggctacggagcagtatggttctgtatctaccaacctccagagaggcaacagacaagcagctaccgcagatgtcaacacacaaggcgttcttccaggcatggtctggcaggacagagatgtgtaccttcaggggcccatctgggcaaagattccacacacggacggacattttcacccctctcccctcatgggtggattcggacctaaacaccctcctccacagattctcatcaagaacaccccggtacctgcgaatccttcgaccaccttcagtgcggcaaagtttgcttccttcatcacacagtactccacgggacaggtcagcgtggagatcgagtgggagctgcagaaggaaaacagcaaacgctggaatcccgaaattcagtacacttccaactacaacaagtctgttaatgtggactttactgtggacactaatggcgtgtattcagagcctcgccccattggcaccagatacctgactcgtaatttgtaa

SEQ ID NO: 298 - protein, 735 aa, Artificial Sequence
  source: /note="Description of Artificial Sequence: Synthetic polypeptide"
MAADGYLPDWLEDTLSEGIRQWWKLKPGPPPPKPAERHKDDSRGLVLPGYKYLGPFNGLDKGEPVNEADAAALEHDKAYDRQLDSGDNPYLKYNHADAEFQERLKEDTSFGGNLGRAVFQAKKRVLEPLGLVGEPVKTAPGKKRPVEHSPVEPDSSSGTGKAGQQPARKRLNFGQTGDADSVPDPQPLGQPPAAPSGLGTNTMATGSGAPMADNNEGADGVGNSSGNRHCDSTWMGDRVITTSTRTWALPTYNNHLYRQISSQSGASNDNHYFGYSTPWGYFDFNRFHCHFSPRDWQRLINNNWGFRPKRLNFKLFNIQVKEVTQNDGTTTIANNLTSTVQVFTDSEYQLPYVLGSAHQGCLPPFPADVFMVPQYGYLTLSNGSQAVGRSSFYCPEYFPSQMLRTGNNFTFSYTFEDVPFHSSYAHSQSLDRLMNPLIDQYLYYLSTTNTPSGTTTQSRLQFSQAGASDIRDQSRNWLPGPCYRQQRVSKTSADNNNSEYSWTGATKYHLNGRDSLVNPGPAMASHKDNEEKFFPQSGVLIFGKQGSEKTNVDIEKVMITDEEEIRTTNPVATEQYGSVSTNLQRGNRQAATADVNTQGVLPGMVWQDRDVYLQGPIWAKIPHTDGHFHPSPLMGGFGPKHPPPQILIKNTPVPANPSTTFSAAKFASFITQYSTGQVSVEIEWELQKENSKRWNPEIQYTSNYNKSVNVDFTVDTNGVYSEPRPIGTRYLTRNL

SEQ ID NO: 299 - DNA, 2205 bp, Artificial Sequence
  source: /note="Description of Artificial Sequence: Synthetic polynucleotide"
atggctgccgatggttatcttccagattggctcgaggacactctctctgaaggaataagacagtggtggaagctcaaacctggcccaccaccaccaaagcccgcagagcggcataaggacgacagcaggggtcttgtgcttcctgggtacaagtacctcggacccttcaacggactcgacaagggagagccggtcaacgaggcagacgccgcggccctcgagcacgacaaggcctacgaccggcagctcgacagcggagacaacccgtacctcaagtacaaccacgccgacgcggagtttcaggagcgtcttaaagaagatacgtcttttgggggcaacctcggacgagcagtcttccaggcgaaaaagagggttcttgaacctctgggcctggttgaggaacctgttaagacggctccgggaaaaaagaggccggtagagcactctcctgcggagccagactcctcctcgggaaccggaaaagcgggccagcagcctgcaagaaaaagactgaatttcggtcagactggagacgcagactccgtacctgacccccagcctctcagacagccaccagcagcccccacaagtttgggatctactacaatggctacaggcagtggcgcaccaatggcagacaataacgagggtgccgatggagtgggtaattcctcaggaaattggcattgcgattcccaatggctgggcgacagagtcatcaccaccagcacccgaacctgggccctgcccacctacaacaaccacctttacaagcaaatctccagccaatcaggagcctcaaacgacaaccactactttggctacagcaccccctgggggtattttgacttcaacagattccactgccacttttcaccacgtgactggcaaagactcatcaacaacaactggggattccgacccaagagactcaacttcaagctctttaacattcaagtcaaagaggtcacgcagaatgacggtacgacgacgattgccaataaccttaccagcacggttcaggtgtttactgactcggagtaccagctcccgtacgtcctcggctcggcgcatcaaggatgcctcccgccgtttccagcggacgtcttcatggtcccacagtatggatacctcaccctgaacaacgggagtcaggcggtaggacgctcttccttttactgcctggagtactttccttctcagatgctgcgtactggaaacaactttcagttcagctacacttttgaagacgtgcctttccacagcagctacgctcacagccagagtttggatcggctgatgaatcctctgatcgaccagtacctgtattatctaaacagaacacaaacagctagtggaactcagcagtctcggctactgtttagccaagctggacccacaagcatgtctcttcaagctaaaaactggctgcctggaccgtgttatcgccagcagcgtttgtcaaagcaggcaaacgacaacaacaacagcaactttccctggactggagctaccaagtactacctcaatggcagagactctttggtgaacccgggcccggccatggccagccacaaggacgatgaagaaaagtttttccccatgcatggaaccctaatatttggtaaagaaggaacaaatgctaccaacgcggaattggaaaatgtcatgattacagatgaagaggaaatcaggaccaccaatcccgtggctacagagcagtacggatatgtgtcaaataatttgcaaaactcaaatactgctgcaagtactgaaactgtgaatcaccaaggagcattacctggtatggtgtggcaggatcgagacgtgtacctgcagggacccatttgggccaagattcctcacaccgatggacactttcatccttctccactgatgggaggttttggactcaaacacccgcctcctcagattatgatcaaaaacactcccgttccagccaatcctcccacaaacttcagttctgccaagtttgcttccttcatcacacagtattccacgggacaggtcagcgtggagatcgagtgggagctgcagaaggagaacagcaaacgctggaatcccgaaattcagtacacttccaactacaacaaatctgttaatgtggactttactgtggacactaatggtgtgtattcagagcctcgccccattggcaccagatacctgactcgtaatctgtaa

SEQ ID NO: 300 - protein, 734 aa, Artificial Sequence
  source: /note="Description of Artificial Sequence: Synthetic polypeptide"
MAADGYLPDWLEDTLSEGIRQWWKLKPGPPPPKPAERHKDDSRGLVLPGYKYLGPFNGLDKGEPVNEADAAALEHDKAYDRQLDSGDNPYLKYNHADAEFQERLKEDTSFGGNLGRAVFQAKKRVLEPLGLVEEPVKTAPGKKRPVEHSPAEPDSSSGTGKAGQQPARKRLNFGQTGDADSVPDPQPLRQPPAAPTSLGSTTMATGSGAPMADNNEGADGVGNSSGNWHCDSQWLGDRVITTSTRTWALPTYNNHLYKQISSQSGASNDNHYFGYSTPWGYFDFNRFHCHFSPRDWQRLINNNWGFRPKRLNFKLFNIQVKEVTQNDGTTTIANNLTSTVQVFTDSEYQLPYVLGSAHQGCLPPFPADVFMVPQYGYLTLNNGSQAVGRSSFYCLEYFPSQMLRTGNNFQFSYTFEDVPFHSSYAHSQSLDRLMNPLIDQYLYYLNRTQTASGTQQSRLLFSQAGPTSMSLQAKNWLPGPCYRQQRLSKQANDNNNSNFPWTGATKYYLNGRDSLVNPGPAMASHKDDEEKFFPMHGTLIFGKEGTNATNAELENVMITDEEEIRTTNPVATEQYGYVSNNLQNSNTAASTETVNHQGALPGMVWQDRDVYLQGPIWAKIPHTDGHFHPSPLMGGFGLKHPPPQIMIKNTPVPANPPTNFSSAKFASFITQYSTGQVSVEIEWELQKENSKRWNPEIQYTSNYNKSVNVDFTVDTNGVYSEPRPIGTRYLTRNL

SEQ ID NO: 301 - DNA, 3160 bp, Artificial Sequence
  source: /note="Description of Artificial Sequence: Synthetic polynucleotide"
acccttcactaaagggactagtcctgcaggtttaaacgaattcgcccttgctgcgtcaactggaccaatgagaactttcccttcaacgactgtgtcgacaagatggtgatttggtgggaggaggggaagatgaccgccaaggtcgtggagtcggccaaagccattctcggaggaagcaaggtgcgcgtggaccagaaatgcaagtcctcggcccagatagatccgactcccgtgatcgtcacctccaacaccaacatgtgcgccgtgattgacgggaactcaacgaccttcgaacaccagcagccgttgcaagaccggatgttcaaatttgaactcacccgccgtctggatcatgactttgggaaggtcaccaagcgggaagtcaaagactttttccggtgggcaaaggatcacgtggttgaggtggagcatgaattctacgtcaaaaagggtggagccaagaaaagacccgcccctagtgacgcagatataagtgagcccaaacgggtgcgcgagtcagttgcgcagccatcgacgtcagacgcggaagcttcgatcaactacgcggacaggtaccaaaacaaatgttctcgtcacgtgggcatgaatctgatgctgtttccctgcagacaatgcgagagaatgaatcaaaattcaaatatctgcttcactcacggacagaaagactgtttagagtgctttcccgtgtcagaatctcaacctgtttctgtcgtcaaaaaggcgtatcagaaactgtgctacattcatcatatcatgggaaaggtgccagacgcttgcactgcctgcgatctggtcaatgtggatttggatgactgcatctctgaacaataaatgatttaaatcaggtatggctgccgatggttatcttccagattggctcgaggacactctctctgaaggaataagacagtggtggaagctcaaacctggcccaccaccaccaaagcccgcagagcggcataaggacgacagcaggggtcttgtgcttcctgggtacaagtacctcggacccttcaacggactcgacaagggagagccggtcaacgaggcagacgccgcggccctcgagcacgacaaggcctacgaccggcagctcgacagcggagacaacccgtacctcaagtacaaccacgccgacgcggagtttcaggagcgtcttaaagaagatacgtcttttgggggcaacctcggacgagcagtcttccaggcgaaaaagagggttcttgaacctctgggcctggttgaggaacctgttaagacggctccgggaaaaaagaggccggtagagcactctcctgcggagccagactcctcctcgggaaccggaaaagcgggccagcagcctgcaagaaaaagactgaatttcggtcagactggagacgcagactccgtacctgacccccagcctctcagacagccaccagcagcccccacaagtttgggatctactacaatggctacaggcagtggcgcaccaatggcagacaataacgagggtgccgatggagtgggtaattcctcaggaaattggcattgcgattcccaatggctgggcgacagagtcatcaccaccagcacccgaacctgggccctgcccacctacaacaaccacctttacaagcaaatctccagccaatcaggagcctcaaacgacaaccactactttggctacagcaccccctgggggtattttgacttcaacagattccactgccacttttcaccacgtgactggcaaagactcatcaacaacaactggggattccgacccaagagactcaacttcaagctctttaacattcaagtcaaagaggtcacgcagaatgacggtacgacgacgattgccaataaccttaccagcacggttcaggtgtttactgactcggagtaccagctcccgtacgtcctcggctcggcgcatcaaggatgcctcccgccgtttccagcggacgtcttcatggtcccacagtatggatacctcaccctgaacaacgggagtcaggcggtaggacgctcttccttttactgcctggagtactttccttctcagatgctgcgtactggaaacaactttcagttcagctacacttttgaagacgtgcctttccacagcagctacgctcacagccagagtttggatcggctgatgaatcctctgatcgaccagtacctgtattatctaaacagaacacaaacagctagtggaactcagcagtctcggctactgtttagccaagctggacccacaagcatgtctcttcaagctaaaaactggctgcctggaccgtgttatcgccagcagcgtttgtcaaagcaggcaaacgacaacaacaacagcaactttccctggactggagctaccaagtactacctcaatggcagagactctttggtgaacccgggcccggccatggccagccacaaggacgatgaagaaaagtttttccccatgcatggaaccctaatatttggtaaagaaggaacaaatgctaccaacgcggaattggaaaatgtcatgattacagatgaagaggaaatcaggaccaccaatcccgtggctacagagcagtacggatatgtgtcaaataatttgcaaaactcaaatactgctgcaagtactgaaactgtgaatcaccaaggagcattacctggtatggtgtggcaggatcgagacgtgtacctgcagggacccatttgggccaagattcctcacaccgatggacactttcatccttctccactgatgggaggttttggactcaaacacccgcctcctcagattatgatcaaaaacactcccgttccagccaatcctcccacaaacttcagttctgccaagtttgcttccttcatcacacagtattccacgggacaggtcagcgtggagatcgagtgggagctgcagaaggagaacagcaaacgctggaatcccgaaattcagtacacttccaactacaacaaatctgttaatgtggactttactgtggacactaatggtgtgtattcagagcctcgccccattggcaccagatacctgactcgtaatctgtaattgcttgttaatcaataaaccgtttaattcgtttcagttgaactttggtctctgcgaagggcgaattcgcggccgctaaatcaatcg

SEQ ID NO: 302 - protein, 734 aa, Artificial Sequence
  source: /note="Description of Artificial Sequence: Synthetic polypeptide"
MAADGYLPDWLEDTLSEGIRQWWKLKPGPPPPKPAERHKDDSRGLVLPGYKYLGPFNGLDKGEPVNEADAAALEHDKAYDRQLDSGDNPYLKYNHADAEFQERLKEDTSFGGNLGRAVFQAKKRVLEPLGLVEEPVKTAPGKKRPVEHSPAEPDSSSGTGKAGQQPARKRLNFGQTGDADSVPDPQPLGQPPAAPTSLGSTTMATGSGAPMADNNEGADGVGNSSGNWHCDSQWLGDRVITTSTRTWALPTYNNHLYKQISSQSGASNDNHYFGYSTPWGYFDFNRFHCRFSPRDWQRLINNNWGFRPKRLNFKLFNIQVKEVTQNDGTTTIANNLTSTVQVFTDSEYQLPYVLGSAHQGCLPPFPADVFMVPQYGYLTLNNGSQAVGRSSFYCLEYFPSQMLRTGNNFQFSYTFEDVPFHSSYAHSQGLDRLMNPLIDQYLYYLNRTQTASGTQQSRLLFSQAGPTSMSLQAKNWLPGPCYRQQRLSKQANDNNNSNFPWTGATKYHLNGGDSLVNPGPAMASHKDDEEKFFPMHGTLIFGKEGTNATNAELENVMITDEEEIRTTNPVATEQYGYVSNNLQNSNTAASTETVNHQGALPGMVWQDRDVYLRGPIWAKIPHADGHFHPSPLMGGFGLKHPPPQIMIKNTPVPANPPTNFSSAKFASFITQYSTGQVSVEIEWELQKENSKRWNPEIQYTSNYNKSVNVDFTVDTNGVYSEPRPIGTRYLTRNL

SEQ ID NO: 303 - DNA, 3157 bp, Artificial Sequence
  source: /note="Description of Artificial Sequence: Synthetic polynucleotide"
ctcactaagggactagtcctgcaggtttaaacgaattcgcccttgctgcgtcaactggaccaatgagaactttcccttcaacgactgtgtcgacaagatggtgatttggtgggaggaggggaagatgaccgccaaggtcgtggagtcggccaaagccactctcggaggaagcaaggtgcgcgtggaccagaaacgcaagtcctcggcccagatagatccgactcccgtgatcgtcacctccaacaccaacatgtgcgccgtgattgacgggaactcaacgaccttcgaacaccagcagccgttgcaagaccgaatgttcaaatttgaactcacccgccgtctggatcatgacttcgggaaggtcaccaagcaggaagtcaaagactttttccggtgggcaaaggatcacgtggttgaggtggagcatgaattctacgtcaaaaagggtggagccaagaaaagacccgcccctagtgacgcagatataagtgagcccaaacgggtgcgcgagtcagttgcgcagccatcgacgtcagacgcggaagcttcgatcaactacgcggacaggtaccaaaacaaatgttctcgtcacgtgggcatgaatctgatgctgtttccctgcagacaatgcgagagaatgaatcaaaattcaaatatctgcttcactcacggacagaaagactgtttagagtgctttcccgtgtcagaatctcaacctgtttctgtcgtcaaaaaggcgtatcagaaactgtgctacattcatcatatcatgggaaaggtgccagacgcttgcactgcctgcgatctggtcaatgtggatttggatgactgcatctctgaacaataaatgatttaaatcaggtatggctgccgatggttatcttccagattggctcgaggacactctctctgaaggaataagacagtggtggaagctcaaacctggcccaccaccaccaaagcccgcagagcggcataaggacgacagcaggggtcttgtgcttcctgggtacaagtacctcggacccttcaacggactcgacaagggagagccggtcaacgaggcagacgccgcggctctcgagcacgacaaggcctacgaccggcagctcgacagcggagacaacccgtacctcaagtacaaccacgccgacgcggagtttcaggagcgtcttaaagaagatacgtcttttgggggcaacctcggacgagcagtcttccaggcgaaaaagagggttcttgaacctctgggcctggttgaggaacctgttaagacggctccgggaaaaaagaggccggtagagcactctcctgcggagccagactcctcctcgggaaccggaaaagcgggccagcagcctgcaagaaaaagactgaatttcggtcagactggagacgcagactccgtacctgacccccagcctctcggacagccaccagcagcccccacaagtttgggatctactacaatggctacaggcagtggcgcaccaatggcagacaataacgagggtgccgatggagtgggtaattcctcaggaaattggcattgcgattcccaatggctgggcgacagagtcatcaccaccagcacccgaacctgggccctgcccacctacaacaaccacctttacaagcaaatctccagccaatcaggagcctcaaacgacaaccactactttggctacagcaccccctgggggtattttgacttcaacagattccactgccgcttttcaccacgtgactggcaaagactcatcaacaacaactggggattccgacccaagagactcaacttcaagctctttaacattcaagtcaaagaggtcacgcagaatgacggtacgacgacgattgccaataaccttaccagcacggttcaggtgtttactgactcggagtaccagctcccgtacgtcctcggctcggcgcatcaaggatgcctcccgccgtttccagcggacgtcttcatggtcccacagtatggatacctcaccctgaacaacgggagtcaggcggtaggacgctcttccttttactgcctggagtactttccttctcagatgctgcgtactggaaacaactttcagttcagctacacttttgaagacgtgcctttccacagcagctacgctcacagccagggtttggatcggctgatgaatcctctgatcgaccagtacctgtattatctaaacagaacacaaacagctagtggaactcagcagtctcggctactgtttagccaagctggacccacaagcatgtctcttcaagctaaaaactggctgcctggaccgtgttatcgccagcagcgtttgtcaaagcaggcaaacgacaacaacaacagcaactttccctggactggagctaccaagtaccacctcaatggcggagactctttggtgaacccgggcccggccatggccagccacaaggacgatgaagaaaagtttttccccatgcatggaaccctaatatttggtaaagaaggaacaaatgctaccaacgcggaattggaaaatgtcatgattacagatgaagaggaaatcaggaccaccaatcccgtggctacagagcagtacggatatgtgtcaaataatttgcaaaactcaaatactgctgcaagtactgaaactgtgaatcaccaaggagcattacctggtatggtgtggcaggatcgagacgtgtacctgcggggacccatttgggccaagattcctcacgccgatggacactttcatccttctccactgatgggaggttttggactcaaacacccgcctcctcagattatgatcaaaaacactcccgttccagccaatcctcccacaaacttcagttctgccaagtttgcttccttcatcacacagtattccacgggacaggtcagcgtggagatcgagtgggagctgcagaaggagaacagcaaacgctggaatcccgaaattcagtacacttccaactacaacaaatctgttaatgtggactttactgtggacactaatggtgtgtattcagagcctcgccccattggcaccagatacctgactcgtaatctgtaattgcttgttaatcaataaaccgtttaattcgtttcagttgaactttggtctctgcgaagggcgaattcgcggccgctaaattcaattcg

SEQ ID NO: 304 - protein, 734 aa, Artificial Sequence
  source: /note="Description of Artificial Sequence: Synthetic polypeptide"
MAADGYLPDWLEDTLSEGIRQWWKLKPGPPPPKPAERHKDDSRGLVLPGYKYLGPFNGLDKGEPVNEADAAALEHDKAYDRQLDSGDNPYLKYNHADAEFQERLKEDTSFGGNLGRAVFQAKKRVLEPLGLVEEPVKTAPGKKRPVEHSPAEPDSSSGTGKAGQQPARKRLNFGQTGDADSVPDPQPLGQPPAAPTSLGSTTMATGSGAPMADNNEGADGVGNSSGNWHCDSQWLGDRVITTSTRTWALPTYNNHLYKQISSQSGASNDNHYFGYSTPWGYFDFNRFHCHFSPRDWQRLINNNWGFRPKRLNFKLFNIQVKEVTQNDGTTTIANNLTSTVQVFTDSEYQLPYVLGSAHQGCLPPFPADVFMVPQYGYLTLNNGSQAVGRSSFYCLECFPSQMLRTGNNFQFSYTFEDVPFHSSYAHSQSLDRLMNPLIDQYLYYLNRTQTASGTQQSRLLFSQAGPTSMSLQAKNWLPGPCYRQQRLSKQANDNNNSNFPWTGATKYHLNGRDSLVNPGPAMASHKDDEEKFFPMHGTLIFGKEGTNATNAELENVMITDEEEIRTTNPVATEQYGYVSNNLQNSNTAASTETVNHQGALPGMVWQDRDVYLQGPIWAKIPHTDGHFHPSPLMGGFGLKHPPPQIMIKNTPVPANPPTNFSSAKFASFITQYSTGQVSVEIEWELQKENSKRWNPEIQYTSNYNKSVNVDFTVDTNGVYSEPRPIGTRYLTRNL

SEQ ID NO: 305 - DNA, 2208 bp, Artificial Sequence
  source: /note="Description of Artificial Sequence: Synthetic polynucleotide"
atggctgccgatggttatcttccagattggctcgaggacactctctctgaaggaataagacagtggtggaagctcaaacctggcccaccaccaccaaagcccgcagagcggcataaggacgacagcaggggtcttgtgcttcctggatacaagtacctcggacccttcaacggactcgacaagggagagccggtcaacgaggcagacgccgcggccctcgagcacgacaaggcctacgaccggcagctcgacagcggagacaacccgtacctcaagtacaaccacgccgacgcggagtttcaggagcgccttaaagaagatacgtcttttgggggcaacctcggacgagcagtcttccaggcgaaaaagagggttcttgaacctctgggcctggttgaggaacctgttaagacggctccgggaaaaaagaggccggtagagcactctcctgtggagccagactcctcctcgggaaccggaaaagcgggcaaccagcctgcaagaaaaagattgaatttcggtcagactggagacgcagactccgtacctgacccccagcctctcggacagccaccagcatccccctctggtctgggaactaatacgatggctacaggcagtggcgcaccaatggcagacaataacgagggcgccgacggagtgggtaattcctcgggaaattggcattgcgattccacatggatgggcgacagagtcgtcaccaccagcacccgcacctgggccctgcccacctacaacaaccacctctacaagcagatttccagccaatcaggagccagcaacgacaaccactactttggctacagcaccccttgggggtattttgacttcaacagattccactgccacttttcgccacgcgactggcagagactcatcaacaacaactggggattccggcccaaaagactcaacttcaagctgtttaacattcaagtcaaggaggtcacgcagaatgacggtacgacgacgattgccaataaccttaccagcacggttcaggtgtttactgacttggagtaccagctcccgtacgtcctcggctcggcgcatcaaggatgcctcccgccgttcccagcagacgtcttcatggtgccacagtatggatacctcaccctgaacaacgggagtcaggcggtaggacgctcttccttttactgcctggagtactttccttctcagatgcttcgcaccggaaacaactttaccttcagctacacttttgaagacgttcctttccacagcagctacgctcacagtcaaagtctggaccgtctcatgaatcctctcatcgaccagtacctgtattacttgagcagaacaaacactccaagcggaaccactacgcagtccaggcttcagttttctcaggccggagcgagtgacattcgggaccagtctaggaactggcttcctggaccctgttaccgccagcagcgagtatcaaagacagctgcggataacaacaacagtgaatactcgtggactggagctaccaagtaccacctcaatggcagagactctctggtgaatccgggcccggccatggccagccacaaggacgatgaagaaaagttttttcctcaaagcggggttctcatctttgggaagcaaggctcagagaaaacaaatgtggacattgaaaaggtcatgattacagacgaagaggaaatcaggaccaccaatcccgtggctacggagcagtatggttctgtatctaccaacctccagagcggcaacacacaagcagctacctcagatgtcaacacacaaggcgttcttccaggcatggtctggcaggacagagacgtgtacctgcaggggcccatctgggcaaaaattccacacacggacggacattttcacccctctcccctcatgggcggatttggacttaaacaccctcctccacagattctcattaagaataccccggtacctgcgaatccttcgaccaccttcagcgcggcaaagtttgcttccttcatcacacagtattccacggggcaggtcagcgtggagatcgagtgggagctgcagaaggagaacagcaaacgctggaatcccgaaattcagtacacttccaactacaacaaatctgttaatgtggactttactgtggacactaatggggtgtattcagagcctcgccctattggcaccagatacctgactcgtaatctgtaa

SEQ ID NO: 306 - DNA, 3159 bp, Artificial Sequence
  source: /note="Description of Artificial Sequence: Synthetic polynucleotide"
gattgatttagcggccgcgaattcgcccttgctgcgtcaactggaccaatgagaactttcccttcaacgattgcgtcgacaagatggtgatctggtgggaggagggaaagatgaccgccaaggtcgtggagtcggccaaagccattctcggaggaagcaaggtgcgtgtggaccaaaagtgcaagtcttcggcccagatcgacccgactcccgtgatcgtcacctccaacaccaacatgtgcgccgtgattgatggaaactcaacgaccttcgagcaccagcagccgttgcaagaccggatgttcaaatttgaacttacccgccgtctggatcatgactttggaaaggtcaccaagcaggaagtgaaagactttttccggtgggcaaaggatcacgtggttgaggtggagcatgagttctacgtcaaaaagggtggagccaaaaaaagacccgcccccagtgacgcagatataagtgagcccaaacgggcgcgcgagtcagttgcgcagccatcgacgtcagacgcggaagcttcgatcaactacgcggacaggtaccaaaacaaatgttctcgtcacgtgggcatgaatctgatgctgtttccctgcagacaatgcgagagaatgaatcagaattcaaatatctgcttcactcacggacagaaagactgtccatagtgctttcccgtgtcagaatctcaacccgtttctgtcgtcaaaaaggcgtatcagaaactgtgctacattcatcacatcatgggaaaggtgccagacgcttgcactgcttgcgacctggtcaatgtggatttggatgactgcatctctgaacaataaatgatttaaatcaggtatggctgccgatggttatcttccagattggctcgaggacactctctctgaaggaataagacagtggtggaagctcaaacctggcccaccaccaccaaagcccgcagagcggcataaggacgacagcaggggtcttgtgcttcctggatacaagtacctcggacccttcaacggactcgacaagggagagccggtcaacgaggcagacgccgcggccctcgagcacgacaaggcctacgaccggcagctcgacagcggagacaacccgtacctcaagtacaaccacgccgacgcggagtttcaggagcgccttaaagaagatacgtcttttgggggcaacctcggacgagcagtcttccaggcgaaaaagagggttcttgaacctctgggcctggttgaggaacctgttaagacggctccgggaaaaaagaggccggtagagcactctcctgtggagccagactcctcctcgggaaccggaaaagcgggcaaccagcctgcaagaaaaagattgaatttcggtcagactggagacgcagactccgtacctgacccccagcctctcggacagccaccagcatccccctctggtctgggaactaatacgatggctacaggcagtggcgcaccaatggcagacaataacgagggcgccgacggagtgggtaattcctcgggaaattggcattgcgattccacatggatgggcgacagagtcgtcaccaccagcacccgcacctgggccctgcccacctacaacaaccacctctacaagcagatttccagccaatcaggagccagcaacgacaaccactactttggctacagcaccccttgggggtattttgacttcaacagattccactgccacttttcgccacgcgactggcagagactcatcaacaacaactggggattccggcccaaaagactcaacttcaagctgtttaacattcaagtcaaggaggtcacgcagaatgacggtacgacgacgattgccaataaccttaccagcacggttcaggtgtttactgacttggagtaccagctcccgtacgtcctcggctcggcgcatcaaggatgcctcccgccgttcccagcagacgtcttcatggtgccacagtatggatacctcaccctgaacaacgggagtcaggcggtaggacgctcttccttttactgcctggagtactttccttctcagatgcttcgcaccggaaacaactttaccttcagctacacttttgaagacgttcctttccacagcagctacgctcacagtcaaagtctggaccgtctcatgaatcctctcatcgaccagtacctgtattacttgagcagaacaaacactccaagcggaaccactacgcagtccaggcttcagttttctcaggccggagcgagtgacattcgggaccagtctaggaactggcttcctggaccctgttaccgccagcagcgagtatcaaagacagctgcggataacaacaacagtgaatactcgtggactggagctaccaagtaccacctcaatggcagagactctctggtgaatccgggcccggccatggccagccacaaggacgatgaagaaaagttttttcctcaaagcggggttctcatctttgggaagcaaggctcagagaaaacaaatgtggacattgaaaaggtcatgattacagacgaagaggaaatcaggaccaccaatcccgtggctacggagcagtatggttctgtatctaccaacctccagagcggcaacacacaagcagctacctcagatgtcaacacacaaggcgttcttccaggcatggtctggcaggacagagacgtgtacctgcaggggcccatctgggcaaaaattccacacacggacggacattttcacccctctcccctcatgggcggatttggacttaaacaccctcctccacagattctcattaagaataccccggtacctgcgaatccttcgaccaccttcagcgcggcaaagtttgcttccttcatcacacagtattccacggggcaggtcagcgtggagatcgagtgggagctgcagaaggagaacagcaaacgctggaatcccgaaattcagtacacttccaactacaacaaatctgttaatgtggactttactgtggacactaatggggtgtattcagagcctcgccctattggcaccagatacctgactcgtaatctgtaattgcttgttaatcaataaaccgtttaattcgtttcagttgaactttggtctctgcgaagggcgaattcgtttaaacctgcaggactagtccctttagtgagg

SEQ ID NO: 307 - protein, 735 aa, Artificial Sequence
  source: /note="Description of Artificial Sequence: Synthetic polypeptide"
MAADGYLPDWLEDTLSEGIRQWWKLKPGPPPPKPAERHKDDSRGLVLPGYKYLGPFNGLDKGEPVNEADAAALEHDKAYDRQLDSGDNPYLKYNHADAEFQERLKEDTSFGGNLGRAVFQAKKRVLEPLGLVEEPVKTAPGKKRPVEHSPVEPDSSSGTGKAGNQPARKRLNFGQTGDADSVPDPQPLGQPPASPSGLGTNTMATGSGAPMADNNEGADGVGNSSGNWHCDSTWMGDRVVTTSTRTWALPTYNNHLYKQISSQSGASNDNHYFGYSTPWGYFDFNRFHCHFSPRDWQRLINNNWGFRPKRLNFKLFNIQVKEVTQNDGTTTIANNLTSTVQVFTDLEYQLPYVLGSAHQGCLPPFPADVFMVPQYGYLTLNNGSQAVGRSSFYCLEYFPSQMLRTGNNFTFSYTFEDVPFHSSYAHSQSLDRLMNPLIDQYLYYLSRTNTPSGTTTQSRLQFSQAGASDIRDQSRNWLPGPCYRQQRVSKTAADNNNSEYSWTGATKYHLNGRDSLVNPGPAMASHKDDEEKFFPQSGVLIFGKQGSEKTNVDIEKVMITDEEEIRTTNPVATEQYGSVSTNLQSGNTQAATSDVNTQGVLPGMVWQDRDVYLQGPIWAKIPHTDGHFHPSPLMGGFGLKHPPPQILIKNTPVPANPSTTFSAAKFASFITQYSTGQVSVEIEWELQKENSKRWNPEIQYTSNYNKSVNVDFTVDTNGVYSEPRPIGTRYLTRNL

SEQ ID NO: 308 - DNA, 2205 bp, Artificial Sequence
  source: /note="Description of Artificial Sequence: Synthetic polynucleotide"
atggctgccgatggttatcttccagattggctcgaggacactctctctgaaggaataagacagtggtggaagctcaaacctggcccaccaccaaagcccgcagagcggcataaggacgacagcaggggtcttgtgcttcctggatacaagtacctcggacccttcaacggactcgacaagggagagccggtcaacgaggcagacgccgcggccctcgagcacgacaaggcctacgaccggcagctcgacagcggagacaacccgtacctcaagtacaaccacgccgacgcggagtttcaggagcgccttaaagaagatacgtcttttgggggcaacctcggacgagcagtcttccaggcgaaaaagagggttcttgaacctctgggcctggttgaggaacctgttaagacggctccgggaaaaaagaggcccgtagagcactctcctgtggagccagactcctcctcgggaaccggaaaagcgggcaaccagcctgcaagaaaaagattgaatttcggtcagactggagacgcagactccgtacctgacccccagcctctcggacagccaccagcagccccctctggtctgggaactaatacgatggctacaggcagtggcgcaccaatggcagacaataacgagggcgccgacggagtgggtaattcctcgggagattggcattgcgattccacatggatgggcgacagagtcatcaccaccagcacccgcacctgggccctgcccacctacaacaaccacctctacaagcagatttccagccaatcaggagccagcaatgacaaccactactttggctacagcaccccttgggggtattttgacttcaacagattccactgccacttttcgccacgcgactggcagagactcatcaacaacaactggggattccggcccaaaagactcaacctcaagctgtttaacattcaagtcaaggaggtcacgcagaatgacggtacgacgacgattgccaataaccttaccagcacggttcaggtgtttactgacttggagtaccagctcccgtacgtcctcggctcggcgcatcaaggatgcctcccgccgttcccagcagacgtcttcatggtgccacagtatggatacctcaccctgaacaacgggagtcaggcggtaggacgctcttccttttactgcctggagtactttccttctcagatgcttcgtaccggaaacaactttaccttcagctacacttttgaagacgttcctttccacagcagctacgctcacagtcaaagtctggaccgtctcatgaatcctctcatcgaccagtacctgtattacttgagcagaacaaacactccaagcggaaccactacgcagtccaggcttcagttttctcaggccggagcgagtgacattcgggaccagtctaggaactggcttcctggaccctgttaccgccagcagcgagtatcaaagacagctgcggataacaacaacggtgaatactcgtggactggagctaccaagtaccacctcaatggcagagactctctggtgaatccgggcccggccatggccagccacaaggacgatgaagaaaagttttttcctcaaagcggggttctcatctttgggaagcaaggctcagagaaaacaaatgtggacattgaaaaggtcatgattacagacgaagaggaaatcaggaccaccaatcccgtggctacggagcagtatggttctgtatctaccaacctccagagcggcaacacacgagcagctacctcagatgtcaacacacaaggcgttcttccaggcatggtctggcaggacagagacgtgtacctgcaggggcccatctgggcaaaaattccacacacggacggacattttcacccctctcccctcatgggcggatttggacttaaacaccctcctccacagattctcattaagaataccccggtacctgcgaatccttcgaccaccttcagcgcggcaaagtttgcttccttcatcacacagtattccacggggcaggtcagcgtggagatcgagtgggagctgcagaaggagaacagcaaacgctggaatcccgaaattcagtacacttccaactacaacaaatctgttaatgtggactttactgtggacactaatggggtgtattcagagcctcgccctattggcaccagatacctgactcgtaatctgtaa

SEQ ID NO: 309 - DNA, 3156 bp, Artificial Sequence
  source: /note="Description of Artificial Sequence: Synthetic polynucleotide"
cgattgaatttagcggccgcgaattcgcccttgctgcgtcaacggaccaatgagaactttcccttcaacgattgcgtcgacaagatggtgatctggtgggaggagggaaagatgaccgccaaggtcgtggagtcggccaaagccattctcggaggaagcaaggtgcgtgtggaccaaaagtgcaagtcttcggcccagatcgacccgactcccgtgatcgtcacctccaacaccaacatgtgcgccgtgattgatggaaactcaacgaccttcgagcaccagcagccgttgcaagaccggatgttcaaatttgaacttacccgccgtctggatcatgactttggaaaggtcaccaagcaggaagtgaaagactttttccggtgggcaaaggatcacgtggttgaggtggagcatgagttctacgtcaaaaagggtggagccaaaaaaagacccgcccccagtgacgcagatataagtgagcccaaacgggcgcgcgagtcagttgcgcagccatcgacgtcagacgcggaagcttcgatcaactacgcggacaggtaccaaaacaaatgttctcgtcacgtgggcatgaatctgatgctgtttccctgcagacaatgcgagcgaatgaatcagaattcaaatatctgcttcactcacggacagaaagactgtttagagtgctttcccgtgtcagaatctcaacccgtttctgtcgtcaaaaaggcgtatcagaaactgtgctacattcatcacatcatgggaaaggtgccagacgcttgcactgcttgcgacctggtcaatgtggatttggatgactgcatctctgaacaataaatgatttaaatcaggtatggctgccgatggttatcttccagattggctcgaggacactctctctgaaggaataagacagtggtggaagctcaaacctggcccaccaccaaagcccgcagagcggcataaggacgacagcaggggtcttgtgcttcctggatacaagtacctcggacccttcaacggactcgacaagggagagccggtcaacgaggcagacgccgcggccctcgagcacgacaaggcctacgaccggcagctcgacagcggagacaacccgtacctcaagtacaaccacgccgacgcggagtttcaggagcgccttaaagaagatacgtcttttgggggcaacctcggacgagcagtcttccaggcgaaaaagagggttcttgaacctctgggcctggttgaggaacctgttaagacggctccgggaaaaaagaggcccgtagagcactctcctgtggagccagactcctcctcgggaaccggaaaagcgggcaaccagcctgcaagaaaaagattgaatttcggtcagactggagacgcagactccgtacctgacccccagcctctcggacagccaccagcagccccctctggtctgggaactaatacgatggctacaggcagtggcgcaccaatggcagacaataacgagggcgccgacggagtgggtaattcctcgggagattggcattgcgattccacatggatgggcgacagagtcatcaccaccagcacccgcacctgggccctgcccacctacaacaaccacctctacaagcagatttccagccaatcaggagccagcaatgacaaccactactttggctacagcaccccttgggggtattttgacttcaacagattccactgccacttttcgccacgcgactggcagagactcatcaacaacaactggggattccggcccaaaagactcaacctcaagctgtttaacattcaagtcaaggaggtcacgcagaatgacggtacgacgacgattgccaataaccttaccagcacggttcaggtgtttactgacttggagtaccagctcccgtacgtcctcggctcggcgcatcaaggatgcctcccgccgttcccagcagacgtcttcatggtgccacagtatggatacctcaccctgaacaacgggagtcaggcggtaggacgctcttccttttactgcctggagtactttccttctcagatgcttcgtaccggaaacaactttaccttcagctacacttttgaagacgttcctttccacagcagctacgctcacagtcaaagtctggaccgtctcatgaatcctctcatcgaccagtacctgtattacttgagcagaacaaacactccaagcggaaccactacgcagtccaggcttcagttttctcaggccggagcgagtgacattcgggaccagtctaggaactggcttcctggaccctgttaccgccagcagcgagtatcaaagacagctgcggataacaacaacggtgaatactcgtggactggagctaccaagtaccacctcaatggcagagactctctggtgaatccgggcccggccatggccagccacaaggacgatgaagaaaagttttttcctcaaagcggggttctcatctttgggaagcaaggctcagagaaaacaaatgtggacattgaaaaggtcatgattacagacgaagaggaaatcaggaccaccaatcccgtggctacggagcagtatggttctgtatctaccaacctccagagcggcaacacacgagcagctacctcagatgtcaacacacaaggcgttcttccaggcatggtctggcaggacagagacgtgtacctgcaggggcccatctgggcaaaaattccacacacggacggacattttcacccctctcccctcatgggcggatttggacttaaacaccctcctccacagattctcattaagaataccccggtacctgcgaatccttcgaccaccttcagcgcggcaaagtttgcttccttcatcacacagtattccacggggcaggtcagcgtggagatcgagtgggagctgcagaaggagaacagcaaacgctggaatcccgaaattcagtacacttccaactacaacaaatctgttaatgtggactttactgtggacactaatggggtgtattcagagcctcgccctattggcaccagatacctgactcgtaatctgtaattgcttgttaatcaataaaccgtttaattcgtttcagttgaactttggtctctgcgaagggcgaattcgtttaaacctgcaggactagtccctttagtgag

SEQ ID NO: 310 - protein, 734 aa, Artificial Sequence
  source: /note="Description of Artificial Sequence: Synthetic polypeptide"
MAADGYLPDWLEDTLSEGIRQWWKLKPGPPPKPAERHKDDSRGLVLPGYKYLGPFNGLDKGEPVNEADAAALEHDKAYDRQLDSGDNPYLKYNHADAEFQERLKEDTSFGGNLGRAVFQAKKRVLEPLGLVEEPVKTAPGKKRPVEHSPVEPDSSSGTGKAGNQPARKRLNFGQTGDADSVPDPQPLGQPPAAPSGLGTNTMATGSGAPMADNNEGADGVGNSSGDWHCDSTWMGDRVITTSTRTWALPTYNNHLYKQISSQSGASNDNHYFGYSTPWGYFDFNRFHCHFSPRDWQRLINNNWGFRPKRLNLKLFNIQVKEVTQNDGTTTIANNLTSTVQVFTDLEYQLPYVLGSAHQGCLPPFPADVFMVPQYGYLTLNNGSQAVGRSSFYCLEYFPSQMLRTGNNFTFSYTFEDVPFHSSYAHSQSLDRLMNPLIDQYLYYLSRTNTPSGTTTQSRLQFSQAGASDIRDQSRNWLPGPCYRQQRVSKTAADNNNGEYSWTGATKYHLNGRDSLVNPGPAMASHKDDEEKFFPQSGVLIFGKQGSEKTNVDIEKVMITDEEEIRTTNPVATEQYGSVSTNLQSGNTRAATSDVNTQGVLPGMVWQDRDVYLQGPIWAKIPHTDGHFHPSPLMGGFGLKHPPPQILIKNTPVPANPSTTFSAAKFASFITQYSTGQVSVEIEWELQKENSKRWNPEIQYTSNYNKSVNVDFTVDTNGVYSEPRPIGTRYLTRNL

SEQ ID NO: 311 - DNA, 2208 bp, Artificial Sequence
  source: /note="Description of Artificial Sequence: Synthetic polynucleotide"
atggctgccgatggttatcttccagattggctcgaggacactctctctgaaggaataagacagtggtggaagctcaaacctggcccaccaccaccaaagcccgcagagcggcataaggacgacagcaggggtcttgtgcttcctgggtacaagtacctcggacccttcaacggactcgacaagggagagccggtcaacgaggcagacgccgcggccctcgagcacgacaaggcctacgaccggcagctcgacagcggagacaacccgtacctcaagtacgaccacgccgacgcggagtttcaggagcgccttaaagaagatacgtcttttgggggcaacctcggacgagcagtcttccaggcaaaaaagagggttcttgaacctctgggcctggttgaggagcctgttaagacggctccgggaaaaaagaggccggtagagcactctcctgtggagccagactcctcctcgggaaccggaaaagcgggcaaccagcctgcaagaaagagattgaatttcggtcagactggagacgcagactccgtacctgacccccagcctctcggacagccaccagcagccccctctggtctgggaactaatacgatggctacaggcagtggcgcaccaatggcagacaataacgatggcgccgacggagtgggtaattcctcgggaaattggcattgcgattccacatggatgggcgacagagtcatcaccaccagcacccgaacctgggctctgcccacctacaacaaccatctgtacaagcagatttccagccaatcaggagccagcaacgacaaccactactttggctacagcaccccttgggggtattttgacttcaacagattccactgccacttttcaccacgtgactggcaaagactcatcaacaacaactggggattccggcccaagagactcaacttcaagctctttaacattcaagtcagagaggtcacgcagaatgatggtacgacgacgattgccaataaccttaccagcacggttcaggtgtttactgactcggagtaccagctcccgtacgtcctcggctcggcgcatcaaggatgcctcccgccgttcccagcagacgtcttcatggtgccacagtatggatacctcaccctgaacaacgggagtcaggcagtaggacgctcttcattttactgcctggagtacttcccttctcagatgctgcgtaccggaaacaactttaccttcagctacacctttgaggatgttcctttccacagcagctacgctcacagccagagtttggaccgtctcatgaatcctctcatcgaccagtacctgtattacttgagcagaacaaacactccaagcggaaccaccacgcagtccaggcttcagttttctcaggccggagcgagtgacattcgggatcagtctaggaactggcttcctggaccctgttaccgccagcagcgagtatcaaagacatctgcggacaacaacaacagtgaatactcgtggattggagctaccaagtaccacctcaatggcagagactctctggtgaatccgggcccggcaatggccagccacaaggacgatgaagaaaagttttttcctcagagcggggttctcatctttggaaaacaaggatcagagaaaacaaatgtggacattgaaaaggtcatgattacagacgaagaggaaatcagaaccaccaatcccgtggccacggagcagtatggttctgtatctaccaacctccagagcggcaacacacaagcatctactgcagatgtcaacacacaaggcgttcttccaggcatggtctggcaggacagagacgtgtacctgcaggggcctatctgggcaaagattccgcacacggacggacattttcacccctctcccctcatgggcggattcggacttaaacaccctcctccacagattctcatcaaaaacaccccggtacctgcgaatccttcgaccaccttcagtgcggcaaagtttgcttccttcatcacacagtattccacggggcgggtcagcgtggagatcgagtgggagctacagaaggagaacagcaaacgctggaatcccgagatccagtacacttccaactacaacaaatctgttaatgtggactttactgtggacactaatggtgtgtattcagagcctcgccccattggcaccagatacctgactcgtaatctgtaa

SEQ ID NO: 312 - protein, 735 aa, Artificial Sequence
  source: /note="Description of Artificial Sequence: Synthetic polypeptide"
MAADGYLPDWLEDTLSEGIRQWWKLKPGPPPPKPAERHKDDSRGLVLPGYKYLGPFNGLDKGEPVNEADAAALEHDKAYDRQLDSGDNPYLKYDHADAEFQERLKEDTSFGGNLGRAVFQAKKRVLEPLGLVEEPVKTAPGKKRPVEHSPVEPDSSSGTGKAGNQPARKRLNFGQTGDADSVPDPQPLGQPPAAPSGLGTNTMATGSGAPMADNNDGADGVGNSSGNWHCDSTWMGDRVITTSTRTWALPTYNNHLYKQISSQSGASNDNHYFGYSTPWGYFDFNRFHCHFSPRDWQRLINNNWGFRPKRLNFKLFNIQVREVTQNDGTTTIANNLTSTVQVFTDSEYQLPYVLGSAHQGCLPPFPADVFMVPQYGYLTLNNGSQAVGRSSFYCLEYFPSQMLRTGNNFTFSYTFEDVPFHSSYAHSQSLDRLMNPLIDQYLYYLSRTNTPSGTTTQSRLQFSQAGASDIRDQSRNWLPGPCYRQQRVSKTSADNNNSEYSWIGATKYHLNGRDSLVNPGPAMASHKDDEEKFFPQSGVLIFGKQGSEKTNVDIEKVMITDEEEIRTTNPVATEQYGSVSTNLQSGNTQASTADVNTQGVLPGMVWQDRDVYLQGPIWAKIPHTDGHFHPSPLMGGFGLKHPPPQILIKNTPVPANPSTTFSAAKFASFITQYSTGRVSVEIEWELQKENSKRWNPEIQYTSNYNKSVNVDFTVDTNGVYSEPRPIGTRYLTRNL

SEQ ID NO: 313 - DNA, 2217 bp, Artificial Sequence
  source: /note="Description of Artificial Sequence: Synthetic polynucleotide"
atggctgccgatggttatcttccagattggctcgaggacaacctctctgagggcattcgcgagtggtgggacttgaaacctggagccccgaaacccaaagccaaccagcaaaagcaggacgacggccggggtctggtgcttcctggctacaagtacctcggacccttcaacggactcgacaagggggagcccgtcaacgcggcggacgcagcggccctcgagcacgacaaggcctacgaccagcagctcaaagcgggtgacaatccgtacctgcggtataaccacgccgacgccgagtttcaggagcgtctgcaagaagatacgtcttttgggggcaacctcgggcgagcagtcttccaggccaagaagcgggttctcgaacctctcggtctggttgaggaaggcgctaagacggctcctggaaagaagagaccggtagagccatcaccccagcgttctccagactcctctacgggcatcggcaagacaggccagcagcccgcgaaaaagagactcaactttgggcagactggcgactcagagtcagtgcccgaccctcaaccaatcggagaaccccccgcaggcccctctggtctgggatctggtacaatggctgcaggcggtggcgctccaatggcagacaataacgaaggcgccgacggagtgggtagttcctcaggaaattggcattgcgattccgcatggctgggcgacagagtcatcaccaccagcacccgaccctgggccctccccacctacaacaaccacctctacaagcaaatctccaacgggacatcgggaggaagcaccaacgacaacacctacttcggctacagcaccccctgggggtattttgactttaacagattccactgccacttctcaccacgtgactggcagcgactcatcaacaacaactggggattccggcccaagagactcaacttcaagctcttcaacatccaggtcaaggaggtcacgcagaatgaaggcaccaagaccatcgccaataaccttaccagcacgattcaggtctttacggactcggaataccagctcccgtacgtcctcggctctgcgcaccagggctgcccgcctccgttcccggcggacgtcttcatgattcctcagtacgggtacctgactctgaacaacggcagtcaggccgtgggccgttcctccttctactgcctggagtactttccttctcaaatgcggagaacgggcaacaactttgagttcagctaccagtttgaggacgtgccttttcacagcagctacgcgcatagccaaagcctggaccggctgatgaaccccctcatcgaccagtacctgtactacctgtctcggactcagtccacgggaggtaccgcaggaactcagcagttgctattttctcaggccgggcctaataacatgtcggctcaggccaaaaactggctacccgggccctgctaccggcagcaacgcgtctccacgacactgtcgcaaaataacaacagcaactttgcttggaccggtgccaccaagtatcatctgaatggcagagactctctggtaaatcccggtgtcgctatggcaacgcacaaggacgacgaagagcgattttttccatccagcggagtcttgatgtttgggaaacagggagctggaaaagacaacgtggactatagcagcgttatgctaaccagtgaggaagaaatcaaaaccaccaacccagtggccacagaacagtacggcgtggtggccgataacctgcaacagcaaaacgccgctcctattgtaggggccgtcaacagtcaaggagccttacctggcatggtctggcagaaccgggacgtgtacctgcagggtcctatctgggccaagattcctcacacggacggcaactttcatccttcgccgctgatgggaggctttggactgaaacacccgcctcctcagatcctgattaagaatacacctgttcccgcggatcctccaactaccttcagtcaagccaagctggcgtcgttcatcacgcagtacagcaccggacaggtcagcgtggaaattgaatgggagctgcagaaagagaacagcaagcgctggaacccagagattcagtatacttccaactactacaaatctacaaatgtggactttgctgtcaatactgagggtacttattcagagcctcgccccattggcacccgttacctcacccgtaacctgtaa

SEQ ID NO: 314 - protein, 738 aa, Artificial Sequence
  source: /note="Description of Artificial Sequence: Synthetic polypeptide"
MAADGYLPDWLEDNLSEGIREWWDLKPGAPKPKANQQKQDDGRGLVLPGYKYLGPFNGLDKGEPVNAADAAALEHDKAYDQQLKAGDNPYLRYNHADAEFQERLQEDTSFGGNLGRAVFQAKKRVLEPLGLVEEGAKTAPGKKRPVEPSPQRSPDSSTGIGKTGQQPAKKRLNFGQTGDSESVPDPQPIGEPPAGPSGLGSGTMAAGGGAPMADNNEGADGVGSSSGNWHCDSAWLGDRVITTSTRPWALPTYNNHLYKQISNGTSGGSTNDNTYFGYSTPWGYFDFNRFHCHFSPRDWQRLINNNWGFRPKRLNFKLFNIQVKEVTQNEGTKTIANNLTSTIQVFTDSEYQLPYVLGSAHQGCPPPFPADVFMIPQYGYLTLNNGSQAVGRSSFYCLEYFPSQMRRTGNNFEFSYQFEDVPFHSSYAHSQSLDRLMNPLIDQYLYYLSRTQSTGGTAGTQQLLFSQAGPNNMSAQAKNWLPGPCYRQQRVSTTLSQNNNSNFAWTGATKYHLNGRDSLVNPGVAMATHKDDEERFFPSSGVLMFGKQGAGKDNVDYSSVMLTSEEEIKTTNPVATEQYGVVADNLQQQNAAPIVGAVNSQGALPGMVWQNRDVYLQGPIWAKIPHTDGNFHPSPLMGGFGLKHPPPQILIKNTPVPADPPTTFSQAKLASFITQYSTGQVSVEIEWELQKENSKRWNPEIQYTSNYYKSTNVDFAVNTEGTYSEPRPIGTRYLTRNL

SEQ ID NO: 315 - protein, 735 aa, Artificial Sequence
  source: /note="Description of Artificial Sequence: Synthetic polypeptide"
MAADGYLPDWLEDTLSEGIRQWWKLKPGPPPPKPAERHKDDSRGLVLPGYKYLGPFNGLDKGEPVNEADAAALEHDKAYDRQLDSGDNPYLKYNHADAEFQERLKEDTSFGGNLGRAVFQAKKRVLEPLGLVEEPVKTAPGKKRPVEHSPVEPDSSSGTGKAGQQPARKRLNFGQTGDADSVPDPQPLGQPPAAPSGLGSTTMATGSGAPMADNNEGADGVGNSSGNWHCDSQWLGDRVITTSTRTWALPTYNNHLYKQISSQSGASNDNHYFGYSTPWGYFDFNRFHCHFSPRDWQRLINNNWGFRPKRLNFKLFNIQVKEVTQNDGTTTIANNLTSTVQVFTDSEYQLPYVLGSAHQGCLPPFPADVFMVPQYGYLTLNNGSQAVGRSSFYCLEYFPSQMLRTGNNFQFSYTFEDVPFHSSYAHSQSLDRLMNPLVDQYLYYLNKTQTNSGTLQQSRLLFSQAGPTNMSLQAKNWLPGPCYRQQRLSKQANDNNNSNFPWTAATKYHLNGRDSLVNPGPAMASHKDDEEKFFPMHGTLIFGKQGTNANDADLENVMITDEEEIRTTNPVATEQYGTVSNNLQNSNTGPTTGTVNHQGALPGMVWQDRDVYLQGPIWAKIPHTDGHFHPSPLMGGFGLKHPPPQIMIKNTPVPANPPTNFSSAKFASFITQYSTGQVSVEIEWELQKENSKRWNPEIQYTSNYNKSVNVDFTVDTNGVYSEPRPIGTRYLTRNL

SEQ ID NO: 316 - DNA, 3158 bp, Artificial Sequence
  source: /note="Description of Artificial Sequence: Synthetic polynucleotide"
gattgaatttagcggccgcgaattcgcccttgctgcgtcaactggaccaatgagaactttcctttcaatgattgcgtcgacaagatggtgatctggtgggaggagggaaagatgaccgccaaggtcgtggagtcggccaaagccattctcggaggaagcaaggtgcgcgcggaccagaaatgcaagtcctcggcccagatagacccgactcccgtgattgtcacctccaacaccaacatgtgcgccgtgattgacgggaactcaacgaccttcgaacaccagcagccgttgcaagaccggatgttcaaatttgaactcacccgccgtctggatcatgactttgggaaggtcaccaagcaggaagtcaaagactttttccggtgggcaaaggatcacgtggttgaggtggagcatgaattctacgtcaaaaagggtggagctaagaaaagacccgcccccagtgacgcagatataagtgagcccaaacgggcgcgcgagtcagttgcgcagccatcgacgtcagacgcggaagcttcgatcaactacgcgggcaggtaccaaaacaaatgttctcgtcacgtgggcatgaatctgatgctgtttccctgcagacaatgcgagagaatgaatcagaattcaaatatctgcttcactcacggacagaaagactgtttagagtgctttcccgtgtcagaatctcaacccgtttctgtcgtcaaaaaggcgtatcagaaactttgctacattcatcatatcatgggaaaggtgccagacgcttgcactgcctgcgatctggtcaatgtggatttggatgactgcatctctgaacaataaatgatttaaatcaggtatggctgccgatggttatcttccagattggctcgaggacactctctctgaaggaataagacagtggtggaagctcaaacctggcccaccaccaccaaagcccgcagagcggcataaggacgacagcaggggtcttgtgcttcctgggtacaagtacctcggacccttcaacggactcgacaagggggagccggtcaacgaggcagacgccgcggccctcgagcacgacaaggcctacgaccggcagctcgacagcggagacaacccgtacctcaagtacaaccacgccgacgcggagtttcaggagcgccttaaagaagatacgtcttttgggggcaacctcggacgagcagtcttccaggcaaaaaagagggttcttgaacctctgggcctggttgaggaacctgttaaaacggctccgggaaaaaagaggccggtagagcactctcctgtggagccagactcctcctcgggaaccggaaaagcgggccagcagcctgcaagaaaaagattgaatttcggtcagactggagacgcagactccgtacctgacccccagcctctcggacagccaccagcagccccctctggtctgggatctactacaatggctacaggcagtggcgcaccaatggcagacaataacgagggtgccgatggagtgggtaattcctcgggaaattggcattgcgattcccaatggctgggcgacagagtcatcaccaccagcacccgcacctgggccctgcccacctacaacaaccacctctacaagcaaatctccagccaatcaggagcctcaaacgacaaccactactttggctacagcaccccctgggggtattttgacttcaacagattccactgccacttttcaccacgtgactggcaaagactcatcaacaacaactggggattccgacccaagagactcaacttcaagctctttaacattcaagtcaaagaggtcacgcagaatgacggtacgacgacgattgccaataaccttaccagcacggttcaggtgtttactgactcggagtaccagctcccgtacgtcctcggctcggcgcatcaaggatgcctcccgccgtttccagcggacgtcttcatggtcccacagtatggatacctcaccctgaacaacgggagtcaggcagtaggacgctcttcattttactgcctggagtactttccttctcagatgctgcgtaccggaaacaactttcaattcagctacacttttgaagacgtgcctttccacagcagctacgctcacagccagagtctggatcggctgatgaatcctctggtcgaccagtacctgtattatctgaacaagacacaaacaaatagtggaactcttcagcagtctcggctactgtttagccaagctggacccaccaacatgtctcttcaagctaaaaactggctgcctggaccttgctacagacagcagcgtctgtcaaagcaggcaaacgacaacaacaacagcaactttccctggactgcagctacaaagtatcatctaaatggccgggactcgttggttaatccaggaccagctatggccagtcacaaggatgacgaagaaaagtttttccccatgcatggaacccttatatttggtaaacaaggaacaaatgccaacgacgcggatttggaaaatgtcatgattacagatgaagaagaaatcaggaccaccaatcccgtggctacggagcagtacggaactgtatcaaataatttgcaaaactcaaacactggtccaactactggaactgtcaatcaccaaggagcgttacctggtatggtgtggcaggatcgagacgtgtacctgcagggacccatttgggccaagattcctcacaccgatggacactttcatccttctccactgatgggaggttttggactcaaacacccacctcctcaaatcatgatcaaaaacactcccgttccagccaatcctcccacaaacttcagttctgccaagtttgcttctttcatcacacagtattccacggggcaggtcagcgtggagatcgagtgggagctgcagaaggagaacagcaaacgctggaatcccgaaattcagtacacttccaactacaacaaatctgttaatgtggactttactgtggacactaatggtgtgtattcagagcctcgccccattggcaccagatacctgactcgtaatctgtaattgcttgttaatcaataaaccgtttaattcgtttcagttgaactttggtctctgcgaagggcgaattcgtttaaacctgcaggactagtccctttagtga

SEQ ID NO: 317 - protein, 735 aa, Artificial Sequence
  source: /note="Description of Artificial Sequence: Synthetic polypeptide"
MAADGYLPDWLEDTLSEGIRQWWKLKPGPPPPKPAERHKDDSRGLVLPGYKYLGPFNGLDKGEPVNEADAAALEHDKAYDRQLDSGDNPYLKYNHADAEFQERLKEDTSFGGNLGRAVFQAKKRVLEPLGLVEEPVKTAPGKKRPVEHPPVEPDSSSGTGKAGQQPARKRLNFGQTGDADSVPDPQPLGQPPAAPSGLGSTTMATGSGAPMADNNEGADGVGNSSGNWHCDSQWLGDRVITTSTRTWALPTYNNHLYKQISSQSGASNDNHYFGYSTPWGYFDFNRFHCHFSPRDWQRLINNNWGFRPKRLNFKLFNIQVKEVTQNDGTTTIANNLTSTVQVFTDSEYQLPYVLGSAHQGCLPPFPADVFMVPQYGYLTLNNGSQAVGRSSFYCLEYFPSQMLRTGNNFQFSYTFEDVPFHSSYAHSQSLDRLMNPLIDQYLYYLNKTQTNSGTLQQSRLLFSQAGPTNMSLQAKNRLPGPCYRQQRLSKQANDNNNSNFPWTAATKYHLNGRDSLVNPGPAMASHKDDEEKFFPMHGTLIFGKQGTNANDADLENVMITDEEEIRTTNPVATEQYGTVSNNLQNSNTGPTTGTVNHQGALPGMVWQDRDVYLQGPIWAKIPHTDGHFHPSPLVGGFGLKHPPPQIMIKNTPVPANPPTNFSSAKFASFITQYSTGQVSVEIEWELQKENSKRWNPEIQYTSNYNKSVNVDFTVDTNGVYSEPRPIGTRYLTRNL

SEQ ID NO: 318 - DNA, 3159 bp, Artificial Sequence
  source: /note="Description of Artificial Sequence: Synthetic polynucleotide"
gattgaatttagcggccgcgaattcgcccttgctgcgtcaactggaccaatgagaactttcctttcaatgattgcgtcgacaagatggtgatctggtgggaggagggaaagatgaccgccaaggtcgtggagtcggccaaagccattctcggaggaagcaaggtgcgcgtggaccagaaatgcaagtcctcggcccagatagacccgactcccgtgattgtcacctccaacaccgacatgtgcgccgtgattgacgggaactcaacgaccttcgaacaccagcagccgttgcaagaccggatgttcaaatttgaactcacccgccgtctggatcatgactttgggaaggtcaccaagcaggaagtcaaagactttttccggtgggcaaaggatcacgtggttgaggtggagcatgaattctacgtcaaaaagggtggagctaagaaaagacccgcccccagtgacgcagatataagtgagcccaaacgggcgcgcgagtcagttgcgcagccatcgacgtcagacgcggaagcttcgatcaactacgcggacaggtaccaaaacaaatgttctcgtcacgtgggcatgaatctgatgctgtttccctgcagacaatgcgagagaatgaatcagaattcaaatatctgcttcactcacggacagaaagactgtttagagtgctttcccgtgtcagaatctcaacccgtttctgtcgtcaaaaaggcgtatcagaaactttgctacattcatcatatcatgggaaaggtgccagacgcttgcactgcctgcgatctggtcaatgtggatttggatgactgcatctctgaacaataaatgatttaaatcaggtatggctgccgatggttatcttccagattggctcgaggacactctctctgaaggaataagacagtggtggaagctcaaacctggcccaccaccaccaaagcccgcagagcggcataaggacgacagcaggggtcttgtgcttcctgggtacaagtacctcggacccttcaacggactcgacaagggggagccggtcaacgaggcagacgccgcggccctcgagcacgacaaggcctacgaccggcagctcgacagcggagacaacccgtacctcaagtacaaccacgccgacgcggagtttcaggagcgccttaaagaagatacgtcttttgggggcaacctcggacgagcagtcttccaggcaaaaaagagggttcttgaacctctgggcctggttgaggaacctgttaaaacggctccgggaaaaaagaggccggtagagcaccctcctgtggagccagactcctcctcgggaaccggaaaagcgggccagcagcctgcaagaaaaagattgaatttcggtcagactggagacgcagactccgtacctgacccccagcctctcggacagccaccagcagccccctctggtctgggatctactacaatggctacaggcagtggcgcaccaatggcagacaataacgagggtgccgatggagtgggtaattcctcgggaaattggcattgcgattcccaatggctgggcgacagagtcatcaccaccagcacccgcacctgggccctgcccacctacaacaaccacctctacaagcaaatctccagccaatcaggagcctcaaacgacaaccactactttggctacagcaccccctgggggtattttgacttcaacagattccactgccacttttcaccacgtgactggcaaagactcatcaacaacaactggggattccgacccaagagactcaacttcaagctctttaacattcaagtcaaagaggtcacgcagaatgacggtacgacgacgattgccaataaccttaccagcacggttcaggtgtttactgactcggagtaccagctcccgtacgtcctcggctcggcgcatcaaggatgcctcccgccgtttccagcggacgtcttcatggtcccacagtatggatacctcaccctgaacaacgggagtcaggcagtaggacgctcttcattttactgcctggagtactttccttctcagatgctgcgtaccggaaacaactttcagttcagctacacttttgaagacgtgcctttccacagcagctacgctcacagccagagtctggatcggctgatgaatcctctgatcgaccagtacctgtattatctgaacaagacacaaacaaatagtggaactcttcagcagtctcggctactgtttagccaagctggacccaccaacatgtctcttcaagctaaaaaccggctgcctggaccttgctacagacagcagcgtctgtcaaagcaggcaaacgacaacaacaacagcaactttccctggaccgcagctacaaagtatcatctaaatggccgggactcgttggttaatccaggaccagctatggccagtcacaaggatgacgaagaaaagtttttccccatgcatggaacccttatatttggtaaacaaggaacaaatgccaacgacgcggatttggaaaatgtcatgattacagatgaagaagaaatcaggaccaccaatcccgtggctacggagcagtacggaactgtatcaaataatttgcaaaactcaaacactggtccaactactggaactgtcaatcaccaaggagcgttacctggtatggtgtggcaggatcgagacgtgtacctgcagggacccatttgggccaagattcctcacaccgatggacactttcatccttctccactggtgggaggttttggactcaaacacccacctcctcaaatcatgatcaaaaacactcccgttccagccaatcctcccacaaacttcagttctgccaagtttgcttctttcatcacacagtattccacggggcaggtcagcgtggagatcgagtgggagctgcagaaggagaacagcaaacgctggaatcccgaaattcagtacacttccaactacaacaaatctgttaatgtggactttactgtggacactaatggtgtgtattcagagcctcgccccattggcaccagatacctgactcgtaatctgtaattgcttgttaatcaataaaccgtttaattcgtttcagttgaactttggtctctgcgaagggcgaattcgtttaaacctgcaggactagtccctttagtgag

SEQ ID NO: 319 - DNA, 2208 bp, Artificial Sequence
  source: /note="Description of Artificial Sequence: Synthetic polynucleotide"
atggctgccgatggttatcttccagattggctcgaggacactctctctgaaggaataagacagtggtggaagctcaaacctggcccaccaccaccaaagcccgcagagcggcataaggacgacagcaggggtcttgtgcttcctgggtacaagtaccttggacccttcaacggactcgacaagggagagccggtcaacgaggcagacgccgcggccctcgagcacgacaaggcctacgaccggcagctcgacagcggagacaacccgtaccccaagtacaaccacgccgacgcggagttccaggagcgtcttaaagaagatacgtcttttgggggcaacctcggacgagcagtcttccaggcgaaaaagagggttcttgaacctctgggcctggttgaggaacctgttaagacggctccgggaaaaaagaggccggtagagcactctcctgcggagccagactcctcctcgggaaccggaaaagcgggccagcagcctgcaagaaagagattgaatttcggtcagactggagacgcagactccgtacctgacccccagcctctcggacagccaccagcagccccctctggtctgggaactaatacgatggctacaggcagtggcgcaccaatggcagacaataacgagggcgccgacggagtgggtaattcctcgggaaattggcattgcgattccacatggatgggcgacagagtcatcaccaccagcacccgcacctgggctctgcccacctacaacaaccacctctacaagcagatttccagccaatcaggagcctcaaacgacaaccactactttggctacagcaccccttgggggtattttgacttcaacagattccactgccacttttcgccacgtgactggcaaagactcatcaacaacaattggggattccggcccaaaagactcaacttcaagctctttaacattcaagtcaaggaggtcacgcagaatgacggtacgacgacgattgccaataaccttaccagcacggttcaggtgtttactgactcggagtaccagctcccgtacgtcctcggctcggcgcatcaaggatgcctcccgccgttcccagcagacgtcttcatggtgccacagtatggatacctcaccctgaacaacgggagtcaggcagtaggacgctcttcattttactgcctggagtactttccttctcagatgctgcgtaccggaaacaactttaccttcagctacacctttgaggacgttcctttccacagcagctacgcccacagccagagtttggaccgtctcatgaatcctctcatcgaccagtacctgtattacttgagcagaacaaacactccaagcggaaccaccacgcagtcaaggcttcagttttctcaggccggagcaagtgacattcgggaccagtctaggaactggcttcctggaccctgttaccgccagcagcgagtatcaaagacatctgcggataacaacaacagtgaatactcgtggactggagctaccaagtaccaccttaatggaagagactctctggtgaatccgggcccggccatggccagccacaaggacgatgaagaaaagttttttcctcagagcggggttctcatctttggaaaacaagactcgggaaaaactaatgtggacattgaaaaggtcatgattacagacgaagaggaaatcaggaccaccaatcccgtggctacggagcagtatggttctgtatctaccaacctccagagcggcaacacacaagcagctacctcagatgtcaacacacaaggcgttcttccaggcatggtgtggcaggacagagacgtgtacctgcaggggcccatctgggcaaagattccacacacggacggacattttcacccctctcccctcatgggcggattcggacttaaacaccctcccccgcagattctcatcaagaacaccccggtacctgcgaatccttcgactaccttcagtgcggcaaagtttgcttccttcattacacagtactccacggggcaggtcagcgtggagatcgagtgggagctgcagaaggagaacagcaaacgctggaatcccgagattcagtacacttccaactacaacaaatctgttaatgtggactttactgtggacactaatggtgtgtattcagagcctcgccccattggcaccaggtacctgactcgtaatctgtaa

SEQ ID NO: 320 - protein, 735 aa, Artificial Sequence
  source: /note="Description of Artificial Sequence: Synthetic polypeptide"
MAADGYLPDWLEDTLSEGIRQWWKLKPGPPPPKPAERHKDDSRGLVLPGYKYLGPFNGLDKGEPVNEADAAALEHDKAYDRQLDSGDNPYPKYNHADAEFQERLKEDTSFGGNLGRAVFQAKKRVLEPLGLVEEPVKTAPGKKRPVEHSPAEPDSSSGTGKAGQQPARKRLNFGQTGDADSVPDPQPLGQPPAAPSGLGTNTMATGSGAPMADNNEGADGVGNSSGNWHCDSTWMGDRVITTSTRTWALPTYNNHLYKQISSQSGASNDNHYFGYSTPWGYFDFNRFHCHFSPRDWQRLINNNWGFRPKRLNFKLFNIQVKEVTQNDGTTTIANNLTSTVQVFTDSEYQLPYVLGSAHQGCLPPFPADVFMVPQYGYLTLNNGSQAVGRSSFYCLEYFPSQMLRTGNNFTFSYTFEDVPFHSSYAHSQSLDRLMNPLIDQYLYYLSRTNTPSGTTTQSRLQFSQAGASDIRDQSRNWLPGPCYRQQRVSKTSADNNNSEYSWTGATKYHLNGRDSLVNPGPAMASHKDDEEKFFPQSGVLIFGKQDSGKTNVDIEKVMITDEEEIRTTNPVATEQYGSVSTNLQSGNTQAATSDVNTQGVLPGMVWQDRDVYLQGPIWAKIPHTDGHFHPSPLMGGFGLKHPPPQILIKNTPVPANPSTTFSAAKFASFITQYSTGQVSVEIEWELQKENSKRWNPEIQYTSNYNKSVNVDFTVDTNGVYSEPRPIGTRYLTRNL

SEQ ID NO: 321 - DNA, 2208 bp, Artificial Sequence
  source: /note="Description of Artificial Sequence: Synthetic polynucleotide"
atggctgccgatggttatcttccagattggctcgaggacactctctctgaaggaataagacagtggtggaagctcaaacctggcccaccaccaccaaagcccgcagagcggcataaggacgacagcaggggtcttgtgcttcctgggtacaagtaccttggacccttcaacggactcgacaagggagagccggtcaacgaggcagacgccgcggccctcgagcacgacaaggcctacgaccggcagctcgacggcggagacaacccgtacctcaagtacaaccacgccgacgcggagttccaggagcgtcttaaagaagatacgtcttttgggggcaacctcggacgagcagtcttccaggcgaaaaagagggttcttgaacctctgggcctggttgaggaacctgttaagacggctccgggaaaaaagaggccggtagagcactctcttgcggagccagactcctcctcgggaaccggaaaagcgggccagcagcctgcaagaaggagattgaatttcggtcagactggagacgcagactccgtacctgacccccagcctctcggacagccaccagcagccccctctggtctgggaactaatacgatggctacaggcagtggcgcaccaatggcagacaataacgagggcgccgacggagtgggtaattcctcgggaaattggcattgcgattccacatggatgggcgacagagtcatcaccaccagcacccgcacctgggctctgcccacctacaacaaccacctctacaggcagatttccagccaatcaggagcctcaaacgacaaccactactttggctacagcaccccttgggggtattttgacttcaacagattccactgccacttttcgccacgtgactggcaaagactcatcaacaacaattggggatcccggcccaaaagactcaacttcaagctctttaacattcaagtcaaggaggtcacgcagaatgacggtacgacgacgattgccaataaccttaccagcacggttcaggtgtttactgactcggagtaccagctcccgtacgtcctcggctcggcgcatcaaggatgcctcccgccgttcccagcagacgtcttcatggtgccacagtatggatacctcaccctgaacaacgggagtcaggcagtaggacgctcttcattttactgcctggagtactttccttctcagatgctgcgtaccggaaacaactttaccttcagctacacctttgaggacgttcctttccacagcagctacgcccacagccagagtttggaccgtctcatgaatcctctcgtcgaccagtacctgtattacttgagcagaacaaacactccaagcggaaccaccacgcagtcaaggcttcagttttctcaggccggagcaagtgacattcgggaccagtctaggaactggcttcctggaccctgttaccgccagcagcgagtatcaaagacatctgcggataacaacaacagtgaatactcgtggactggagctaccaagtaccaccttaatggaagagactctctggtgaatccgggcccggccatggccagccacaaggacgatgaagaaaagttttttcctcagagcggggttctcatctttggaaaacaagactcgggaaaaactaatgtggacattgaaaaggtcatgattacagacgaagaggaaatcaggaccaccaatcccgtggctacggagcagtatggttctgtatctaccaacctccagagcggcaacacacaagcagctacctcagatgtcaacacacaaggcgttcttccaggcatggtgtggcaggacagagacgtgtacctgcaggggcccatctgggcaaagattccacacacggacggacattttcacccctctcccctcatgggcggattcggacttaaacaccctcccccgcagattctcatcaagaacaccccggtacctgcgaatccttcgactaccttcagtgcggcaaagtttgcttccttcattacacagtactccacggggcaggtcagcgtggagatcgagtgggagctgcagaaggagaacagcaaacgctggaatcccgagattcagtacacttccaactacaacaaatctgttaatgtggactttactgtggacactaatggtgtgtattcagagcctcgccccattggcaccagatacctgactcgtaatctgtaa

SEQ ID NO: 322 - protein, 735 aa, Artificial Sequence
  source: /note="Description of Artificial Sequence: Synthetic polypeptide"
MAADGYLPDWLEDTLSEGIRQWWKLKPGPPPPKPAERHKDDSRGLVLPGYKYLGPFNGLDKGEPVNEADAAALEHDKAYDRQLDGGDNPYLKYNHADAEFQERLKEDTSFGGNLGRAVFQAKKRVLEPLGLVEEPVKTAPGKKRPVEHSLAEPDSSSGTGKAGQQPARRRLNFGQTGDADSVPDPQPLGQPPAAPSGLGTNTMATGSGAPMADNNEGADGVGNSSGNWHCDSTWMGDRVITTSTRTWALPTYNNHLYRQISSQSGASNDNHYFGYSTPWGYFDFNRFHCHFSPRDWQRLINNNWGSRPKRLNFKLFNIQVKEVTQNDGTTTIANNLTSTVQVFTDSEYQLPYVLGSAHQGCLPPFPADVFMVPQYGYLTLNNGSQAVGRSSFYCLEYFPSQMLRTGNNFTFSYTFEDVPFHSSYAHSQSLDRLMNPLVDQYLYYLSRTNTPSGTTTQSRLQFSQAGASDIRDQSRNWLPGPCYRQQRVSKTSADNNNSEYSWTGATKYHLNGRDSLVNPGPAMASHKDDEEKFFPQSGVLIFGKQDSGKTNVDIEKVMITDEEEIRTTNPVATEQYGSVSTNLQSGNTQAATSDVNTQGVLPGMVWQDRDVYLQGPIWAKIPHTDGHFHPSPLMGGFGLKHPPPQILIKNTPVPANPSTTFSAAKFASFITQYSTGQVSVEIEWELQKENSKRWNPEIQYTSNYNKSVNVDFTVDTNGVYSEPRPIGTRYLTRNL

SEQ ID NO: 323 - protein, 738 aa, Artificial Sequence
  source: /note="Description of Artificial Sequence: Synthetic polypeptide"
MAADGYLPDWLEDNLSEGIREWWDLKPGAPKPKANQQKQDDGRGLVLPGYKYLGPFNGLDKGEPVNAADAAALEHDKAYDQQLKAGDNPYLRYNHADAEFQERLQEDTSFGGNLGRAVFQAKKRVLEPLGLVEEAAKTAPGKKRPVEPSPQRSPDSSAGIGKKGQQPAKKRLNFGQTGDSESVPDPQPIGEPPAGPSGLGSGTMAAGGGAPMADNNEGADGVGSSSGNWHCDSTWLGDRVITTSTRTWALPTYNNHLYKQISNGTSGGSTNDNTYFGYSTPWGYFDFNRFHCHFSPRDWQRLINNNWGFRPKRLSFKLFNIQVKEVTQNEGTETIANNLTSTIQVFTDSEYQLPYVLGSAHQGCLPPFPADVFMIPQYGYLTLNNGSQAVGRSSFYCLEYFPSQMLRTGNNFEFSYTFEDVPFHSSCAHSQSSDRLMNPLIDQYLYYLSRTRSTGGTQGTQQLLFSQAGPANMSAQAKNWLPGPCYRQQRVSTTLSQNNNSNFAWTGATKYHLNGRDSLVNPGVAMATHKDDEERFFPSSGVLMFGKQGAGRDNVDYSSVMLTSEEEIKTTNPVATEQYGVVADNLQQTNTGPIVGNVNSQGALPGMVWQNRDVYLQGPIWAKIPHTDGNFHPSPLMGGFGLKHPPPQILIKNTPVPADPPTTFSQAKLASFITQYSTGQVSVEIEWELQKENSKRWNPEIQYTSNYYKSTNVDFAVNTEGTYSEPRPIGTRYLTRNL

SEQ ID NO: 324 - DNA, 2217 bp, Artificial Sequence
  source: /note="Description of Artificial Sequence: Synthetic polynucleotide"
atggctgctgacggttatcttccagattggctcgaggacaacctctctgagggcattcgcgagtggtgggacctgaaacctggagcccccaagcccaaggccaaccagcagaagcaggacgacggccggggtctggtgcttcttggctacaagtacctcggacccttcaacggactcgacaagggggagcccgtcaatgcggcggacgcagcggccctcgagcacgacaaggcctacgaccagcagctcaaagcgggtgacaatccgtacctgcggtataaccacgccgacgccgagtttcaggagcgtctgcaagaagatacgtcttttgggggcaacctcgggcgagcagtcttccaggccaagaagcgggttctcgaacctctcggtctggttgaggaagctgctaagacggctcctggaaagaagagaccggtagaaccgtcacctcagcgttcccccgactcctccacgggcatcggcaagaaaggccagcagcccgctaaaaagagactgaactttggtcagactggcgactcagagtcagtccccgaccctcaaccaatcggagaaccaccagcaggcccctctggtctgggatctggtacaatggctgcaggcggtggcgctccaatggcagacaataacgaaggcgccgacggagtgggtagttcctcaggaaattggcattgcgattccacatggctgggcgacagagtcatcaccaccagcacccgaacctgggccctgcccacctacaacaaccacctctacaagcaaatatccaatgggacatcgggaggaagcaccaacgacaacacctacttcggctacagcaccccctgggggtattttgacttcaacagattccactgccacttctcaccacgtgactggcagcgactcatcaacaacaactggggattccggccaaaaagactcagcttcaagctcttcaacatccaggtcaaggaggtcacgcagaatgaaggcaccaagaccatcgccaataaccttaccagcacgattcaggtatttacggactcggaataccagctgccgtacgtcctcggctccgcgcaccagggctgcctgcctccgttcccggcggacgtcttcatgattccccagtacggctaccttacactgaacaatggaagtcaagccgtaggccgttcctccttctactgcctggaatattttccatctcaaatgctgcgaactggaaacaattttgaattcagctacaccttcgaggacgtgcctttccacagcggctacgcacacagccagagcttggaccgactgatgaatcctctcatcgaccagtacctgtactacttatccagaactcagtccacaggaggaactcaaggtacccagcaattgttattttctcaagctgggcctgcaaacatgtcggctcaggctaagaactggctacctggaccttgctaccggcagcagcgagtctctacgacactgtcgcaaaacaacaacagcaactttgcttggactggtgccaccaaatatcacctgaacggaagagactctttggtaaatcccggtgtcgccatggcaacccacaaggacgacgaggaacgcttcttcccgtcgagtggagtcctgatgtttggaaaacagggtgctggaagagacaatgtggactacagcagcgttatgctaaccagcgaagaagaaattaaaaccactaaccctgtagccacagaacaatacggtgtggtggctgacaacttgcagcaaaccaatacagggcctattgtgggaaatgtcaacagccaaggagccttacctggcatggtctggcagaaccgagacgtgtacctgcagggtcccatctgggccaagattcctcacacggacggcaacttccacccttcaccgctaatgggaggatttggactgaagcacccacctcctcagatcctgatcaagaacacgccggtacctgcggatcctccaacgacgttcagccaggcgaaattggcttccttcattacgcagtacagcaccggacaggtcagcgtggaaatcgagtgggagctgcagaaggagaacagcaaacgctggaacccagagattcagtacacttcaaactactacaaatctacaaatgtggactttgctgtcaatacagagggaacttattctgagcctcgccccattggtactcgttacctcacccgtaatctgtaa

SEQ ID NO: 325 - protein, 738 aa, Artificial Sequence
  source: /note="Description of Artificial Sequence: Synthetic polypeptide"
MAADGYLPDWLEDNLSEGIREWWDLKPGAPKPKANQQKQDDGRGLVLLGYKYLGPFNGLDKGEPVNAADAAALEHDKAYDQQLKAGDNPYLRYNHADAEFQERLQEDTSFGGNLGRAVFQAKKRVLEPLGLVEEAAKTAPGKKRPVEPSPQRSPDSSTGIGKKGQQPAKKRLNFGQTGDSESVPDPQPIGEPPAGPSGLGSGTMAAGGGAPMADNNEGADGVGSSSGNWHCDSTWLGDRVITTSTRTWALPTYNNHLYKQISNGTSGGSTNDNTYFGYSTPWGYFDFNRFHCHFSPRDWQRLINNNWGFRPKRLSFKLFNIQVKEVTQNEGTKTIANNLTSTIQVFTDSEYQLPYVLGSAHQGCLPPFPADVFMIPQYGYLTLNNGSQAVGRSSFYCLEYFPSQMLRTGNNFEFSYTFEDVPFHSGYAHSQSLDRLMNPLIDQYLYYLSRTQSTGGTQGTQQLLFSQAGPANMSAQAKNWLPGPCYRQQRVSTTLSQNNNSNFAWTGATKYHLNGRDSLVNPGVAMATHKDDEERFFPSSGVLMFGKQGAGRDNVDYSSVMLTSEEEIKTTNPVATEQYGVVADNLQQTNTGPIVGNVNSQGALPGMVWQNRDVYLQGPIWAKIPHTDGNFHPSPLMGGFGLKHPPPQILIKNTPVPADPPTTFSQAKLASFITQYSTGQVSVEIEWELQKENSKRWNPEIQYTSNYYKSTNVDFAVNTEGTYSEPRPIGTRYLTRNL

SEQ ID NO: 326 - protein, 735 aa, Artificial Sequence
  source: /note="Description of Artificial Sequence: Synthetic polypeptide"
MAADGYLPDWLEDTLSEGIRQWWKLKPGPPPPKPAERHKDDSRGLVLPGYKYLGPFNGLDKGEPVNEADAAALEHDKAYDRQLDSGDNPYLKYNHADAEFQERLKEDTSFGGNLGRAVFQAKKRVLEPLGLVEPPVKTAPGKKRPVEHSPAEPDSSSGTGKAGQQPARKRLNFGQTGDADSVPDPQPLGQPPAAPSGLGSTTMATGSGAPMADNNEGADGVGNSSGNWHCDSQWLGDRVITTSTRTWALPTYNNHLYKQISSQSGASNDNHYFGYSTPWGYFDFNRFHCHFSPRDWQRLINNNWGFRPKRLNFKLFNIQVKEVTQNDGTTTIANNLTSTVQVFTDSEYQLPYVLGSAHQGCLPPFPADVFMVPQYGYLTLNNGSQAVGRSSFYCLEYFPSQMLRTGNNFQFSYTFEDVPFHSSYAHSQSLDRLMNPLIDQYLYYLNKTQSNSGTLQQSRLLFSQAGPTSMSLQAKNWLPGPCYRQQRLSKQANDNNNSNFPWTAATKYHLNGRDSLVNPGPAMASHKDDEEKFFPMHGTLIFGKQGTNANDADLDNVMITDEEEIRTTNPVATEQYGYVSNNLQNSNTGPTTGTVNHQGALPGMVWQDRDVYLQGPIWAKIPHTDGHFHPSPLMGGFGLKHPPPQIMIKNTPVPANPPTNFSSAKFASFITQYSTGQVSVEIEWELQKENSKRWNPEIQYTSNYNKSVNVDFTVDTNGVYSEPRPIGTRYLTRNL

SEQ ID NO: 327 - protein, 735 aa, Artificial Sequence
  source: /note="Description of Artificial Sequence: Synthetic polypeptide"
MAADGYLPDWLEDTLSEGIRQWWKLKPGPPPPKPAERHKDDSRGLVLPGYKYLGPFNGLDKGEPVNEADAAALEHDKAYDRQLDSGDNPYLKYNHADAEFQERLKEDTSFGGNLGRAVFQAKKRVLEPLGLVEGPVKTAPGKKRPVEHSPAEPDSSSGTGKAGQQPARKRLNFGQTGDADSVPDPQPLGQPPAAPSGLGSTTMATGSGAPMADNNEGADGVGNSSGNWHCDSQWLGDRVITTSTRTWALPTYNNHLYKQISSQSGASNDNHYFGYSTPWGYFDFNRFHCHFSPRDWQRLINNNWGFRPKRLNFKLFNIQVKEVTQNDGTTTIANNLTSTVQVFTDSEYQLPYVLGSAHQGCLPPFPADVFMVPQYGYLTLNNGSQAVGRSSFYCLEYFPSQMLRTGNNFQFSYTFEDVPFHSSYAHSQSLDRLMNPLIDQYLYYLNKTQSNSGTLQQSRLLFSQAGPTSMSLQAKNWLPGPCYRQQRLSKQANDNNNSNFPWTAATKYHLNGRDSLVNPGPAMASHKDDEEKFFPMHGTLIFGKQGTNANDADLDNVMITDEEEIRTTNPVATEQYGYVSNNLQNSNTGPTTGTVNHQGALPGMVWQDRDVYLQGPIWAKIPHTDGHFHPSPLMGGFGLKHPPPQIMIKNTPVPANPPTNFSSAKFASFITQYSTGQVSVEIEWELQKENSKRWNPEIQYTSNYNKSVNVDFTVDTNGVYSEPRPIGTRYLTRNL

SEQ ID NO: 328 - DNA, 2208 bp, Artificial Sequence
  source: /note="Description of Artificial Sequence: Synthetic polynucleotide"
atggctgccgatggttatcttccagattggctcgaggacactctctctgaaggaataagacagtggtggaagctcaaacctggcccaccaccaccaaagcccgcagagcggcataaggacgacagcaggggtcttgtgcttcctgggtacaagtacctcggacccttcaacggactcgacaagggggagccggtcaacgaggcagacgccgcggccctcgagcacgacaaggcctacgaccggcagctcgacagcggagacaacccgtacctcaagtacaaccacgccgacgcggagtttcaggagcgtcttaaagaagatacgtcttttgggggcaacctcggacgagcagtcttccaggcgaaaaagagggttcttgaacctctgggcctggttgagggacctgttaagacggctccgggaaaaaagaggccggtagagcactctcctgcggagccagactcctcctcgggaaccggaaaagcgggccagcagcctgcaagaaaaagattgaattttggtcagactggagacgcagactccgtacctgacccccagcctctcggacagccaccagcagccccctctggtttgggatctactacaatggctacaggcagtggcgcaccaatggcagacaataacgagggtgccgatggagtgggtaattcctcaggaaattggcattgcgattcccaatggctgggcgacagagtcatcaccaccagcacccgaacctgggccctgcccacctacaacaaccacctctacaagcaaatctcaagccaatcaggagcctcaaacgacaaccactactttggctacagcaccccttgggggtattttgacttcaacagattccactgccacttttcaccacgtgactggcaaagactcatcaacaacaactggggattccgacccaagagactcaacttcaagctctttaacattcaagtcaaagaggtcacgcagaatgacggtacgacgacgattgccaataaccttaccagcacggttcaggtgtttactgactcggagtaccagctcccgtacgtcctcgggtcggcgcatcaaggatgcctcccgccgtttccagcggacgtcttcatggtcccacagtatggatacctcaccctgaacaacgggagtcaggcggtaggacgctcttccttttactgcctggagtactttccttctcagatgcttcgtactggaaacaactttcagttcagctacacctttgaagacgttcctttccacagcagctacgctcacagccagagtctggatcggctgatgaatcctctgatcgaccagtacctgtattatctgaacaaaacacaatcaaatagtggaactcttcagcagtctcggctactgtttagtcaagctggacccaccagcatgtctcttcaagctaaaaactggctacctggaccttgctacagacagcagcgtctgtcaaagcaggcaaacgacaacaacaacagcaactttccctggactgcggctacaaagtatcacctaaatggccgggactcgttggttaatccaggaccagctatggccagtcacaaagacgatgaagaaaagtttttccccatgcatggaaccctgatatttggtaaacaaggaacaaatgctaacgacgcggatttggacaatgtcatgattacagatgaagaagaaatccgcaccaccaatcccgtggctacggagcagtacggatatgtgtcaaataatttgcaaaactcaaatactggtccaactactggaactgtcaatcaccaaggagcgttacctggcatggtgtggcaggatcgagacgtgtacctgcagggacccatttgggccaagattcctcacaccgatggacactttcatccttctccactgatgggaggttttgggctcaaacacccgcctcctcagatcatgatcaaaaacactcccgttccagccaatcctcccacaaacttcagttctgccaagtttgcttctttcatcacacagtattccacggggcaggtcagcgtggagatcgagtgggagctgcagaaagagaacagcaaacgctggaatcccgaaattcagtacacttccaactacaacaaatctgttaatgtggactttactgtggacactaatggcgtgtattcagagcctcgccccattggcaccagatacctgactcgtaatctgtaa

SEQ ID NO: 329 - DNA, 2211 bp, Artificial Sequence; identical to SEQ ID NO: 10
  source: /note="Description of Artificial Sequence: Synthetic polynucleotide"

SEQ ID NO: 330 - DNA, 2208 bp, Artificial Sequence
  source: /note="Description of Artificial Sequence: Synthetic polynucleotide"
atggctgccgatggttatcttccagattggctcgaggacactctctctgaaggaacaagacagtggtggaagctcaaacctggcccaccaccaccaaagcccgcagagcggcataaggacgacagcaggggtcttgtgcttcctgggtacaagtacctcggacccttcaacggactcgacaagggggagccggtcaacgaggcagacgccgcggccctcgagcacgacaaggcctacgaccggcagctcgacagcggagacaacccgtacctcaagtacaaccacgccgacgcggagtttcaggagcgtcttaaagaagatacgtcttttgggggcaacctcggacgagcagtcttccaggcgaaaaagagggttcttgaacctctgggcctggttgaggaacctgttaagacggctccgggaaaaaagaggccggtagagcactctcctgcggagccagactcctcctcgggaaccggaaaagcgggccagcagcctgcaagaaaaagattgaattttggtcagactggagacgcagactccgtacctgacccccagcctctcggacagccaccagcagccccctctggtttgggatctactacaatggctacaggcagtggcgcaccaatggcagacaataacgagggtgccgatggagtgggtaattcctcaggaaattggcattgcgattcccaatggctgggcgacagagtcatcaccaccagcacccgaacctgggccctgcccacctacaacaaccacctctacaagcaaatctcaagccaatcaggagcctcaaacgacaaccactactttggctacagcaccccttgggggtattttgacttcaacagattccactgccacttttcaccacgtgactggcaaagactcatcaacaacaactggggattccgacccaagagactcaacttcaagctctttaacattcaagtcaaagaggtcacgcagaatgacggtacgacgacgattgccaataaccttaccagcacggttcaggtgtttactgactcggagtaccagctcccgtacgtcctcgggtcggcgcatcaaggatgcctcccgccgtttccagcggacgtcttcatggtcccacagtatggatacctcaccctgaacaacgggagtcaggcggtaggacgctcttccttttactgcctggagtactttccttctcagatgcttcgtactggaaacaactttcagttcagctacacctttgaagacgttcctttccacagcagctacgctcacagccagagtctggatcggctgatgaatcctctgatcgaccagtacctgtattatctgaacaaaacacaatcaaatagtggaactcttcagcagtctcggctactgtttagtcaagctggacccaccagcatgtctcttcaagctaaaaactggctacctggaccttgctacagacagcagcgtctgtcaaagcaggcaaacgacaacaacaacagcaactttccctggactgcggctacaaagtaccacctaaatggccgggactcgttggttaatccaggaccagctatggccagtcacaaagacgatgaagaaaagtttttccccatgcatggaaccctgatatttggtaaacaaggaacaaatgctaacgacgcggatttggacaatgtcatgattacagatgaagaagaaatccgcaccaccaatcccgtggctacggagcagtacggatatgtgtcaaataatttgcaaaactcaaatactggtccaactactggaactgtcaatcaccaaggagcgttacctggcatggtgtggcaggatcgagacgtgtacctgcagggacccatttgggccaagattcctcacaccgatggacactttcatccttctccactgatgggaggttttgggctcaaacacccgcctcctcagatcatgatcaaaaacactcccgttccagccaatcctcccacaaacttcagttctgccaagtttgcttctttcatcacacagtattccacggggcaggtcagcgtggagatcgagtgggagctgcagaaagagaacagcaaacgctggaatcccgaaattcagtacacttccaactacaacaaatctgttaatgtggactttactgtggacactaatggcgtgtattcagagcctcgccccattggcaccagatacctgactcgtaatctgtaa

SEQ ID NO: 331 - DNA, 2217 bp, Artificial Sequence
  source: /note="Description of Artificial Sequence: Synthetic polynucleotide"
atggctgctgacggttatcttccagattggctcgaggacaacctctctgagggcattcgcgagtggtgggacctgaaacctggagcccccaagcccaaggccaaccagcagaagcaggacgacggccggggtctggtgcttcctggctacaagtacctcggacccttcaacggactcgacaagggggagcccgtcaacgcggcggacgcagcggccctcgagcacgacaaggcctacgaccagcagctcaaagcgggtgacaatccgtacctgcggtataaccacgccgacgccgagtttcaggagcgtctgcaagaagatacgtcttttgggggcaacctcgggcgagcagtcttccaggccaagaagcgggttctcgaacctctcggtctggttgaggaagctgctaagacggctcctggaaagaagagaccggtagaaccgtcacctcagcgttcccccgactcctccacgggcatcggcaagaaaggccagcagcccgctaaaaagagactgaactttggtcagactggcgactcagagtcagtccccgaccctcaaccaatcggagaaccacctgcaggcccctctggtctgggatctggtacaatggctgcaggcggtggcgctccaatggcagacaataacgaaggcgccgacggagtgggtagttcctcaggaaattggcattgcgattccacatggctgggcgacagagtcatcaccaccagcacccgaacctgggccctgcccacctacaacaaccacctctacaagcaaatatccaatgggacatcgggagggagcaccaacgacaacacctacttcggctacagcaccccctgggggtattttgacttcaacagattccactgccacttctcaccacgtgactggcagcgactcatcaacaacaactggggattccggccaaaaagactcagcttcaagctcttcaacatccaggtcaaggaggtcacgcagaatgaaggcaccaagaccatcgccaataaccttaccagcacgattcaggtatttacggactcggaataccagctgccgtacgtcctcggctccgcgcaccagggctgcctgcctccgttcccggcggacgtcttcatgattccccagtacggctaccttacactgaacaatggaagtcaagccgtaggccgttcctccttctactgcctggaatattttccatctcaaatgctgcgaactggaaacaattttgaattcagctacaccttcgaggacgtgcctttccacagcagctacgcacacagccagagcttggaccgactgatgaatcctctcatcgaccagtacctgtactacttatccagaactcagtccacaggaggaactcaaggtacccagcaattgttattttctcaagctgggcctgcaaacatgtcggctcaggctaagaactggctacctggaccttgctaccggcagcagcgagtctctacgacactgtcgcaaaacaacaacagcaactttgcttggactggtgccaccaaatatcacctgaacggaagagactctttggtaaatcccggtgtcgccatggcaacccacaaggacgacgaggaacgcttcttcccgtcgagtggagtcctgatgtttggaaaacagggtgctggaagagacaatgtggactacagcagcgttatgctaaccagcgaagaagaaattaaaaccactaaccctgtagccacagaacaatacggtgtggtggctgacaacttgcagcaaaccaatacagggcctattgtgggaaatgtcaacagccaaggagccttacctggcatggtctggcagaaccgagacgtgtacctgcagggtcccatctgggccaagattcctcacacggacggcaactgccacccttcaccgctaatgggaggatttggactgaagcacccacctcctcagatcctgatcaagaacacgccggtacctgcggatcctccaacaacgttcagccaggcgaaattggcttccttcattacgcagtacagcaccggacaggtcagcgtggaaatcgagtgggagctgcagaaggagaacagcaaacgctggaacccagagattcagtacacttcaaactactacaaatctacaaatgtggactttgctgtcaatacagagggaacttattctgagcctcgccccattggtactcgttacctcacccgtaatctgtaa

SEQ ID NO: 332 - protein, 735 aa, Artificial Sequence
  source: /note="Description of Artificial Sequence: Synthetic polypeptide"
MAADGYLPDWLEDTLSEGTRQWWKLKPGPPPPKPAERHKDDSRGLVLPGYKYLGPFNGLDKGEPVNEADAAALEHDKAYDRQLDSGDNPYLKYNHADAEFQERLKEDTSFGGNLGRAVFQAKKRVLEPLGLVEEPVKTAPGKKRPVEHSPAEPDSSSGTGKAGQQPARKRLNFGQTGDADSVPDPQPLGQPPAAPSGLGSTTMATGSGAPMADNNEGADGVGNSSGNWHCDSQWLGDRVITTSTRTWALPTYNNHLYKQISSQSGASNDNHYFGYSTPWGYFDFNRFHCHFSPRDWQRLINNNWGFRPKRLNFKLFNIQVKEVTQNDGTTTIANNLTSTVQVFTDSEYQLPYVLGSAHQGCLPPFPADVFMVPQYGYLTLNNGSQAVGRSSFYCLEYFPSQMLRTGNNFQFSYTFEDVPFHSSYAHSQSLDRLMNPLIDQYLYYLNKTQSNSGTLQQSRLLFSQAGPTSMSLQAKNWLPGPCYRQQRLSKQANDNNNSNFPWTAATKYHLNGRDSLVNPGPAMASHKDDEEKFFPMHGTLIFGKQGTNANDADLDNVMITDEEEIRTTNPVATEQYGYVSNNLQNSNTGPTTGTVNHQGALPGMVWQDRDVYLQGPIWAKIPHTDGHFHPSPLMGGFGLKHPPPQIMIKNTPVPANPPTNFSSAKFASFITQYSTGQVSVEIEWELQKENSKRWNPEIQYTSNYNKSVNVDFTVDTNGVYSEPRPIGTRYLTRNL

SEQ ID NO: 333 - DNA, 2208 bp, Artificial Sequence
  source: /note="Description of Artificial Sequence: Synthetic polynucleotide"
atggctgccgatggttatcttccagattggctcgaggacactctctctgaaggaataagacagtggtggaagctcaaacctggcccaccaccaccaaagcccgcagagcggcatcaggacaacagcaggggtcttgtgcttcctgggtacaagtacctcggaccctccaacggactcgacaaaggagagccggtcaacgaggcagacgccgcggccctcgagcacgacaaggcctacgaccggcagctcgacagcggagacaacccgtacctcaagtacaaccacgccgacgcggagtttcaggagcgtcttaaagaagatacgtcttttgggggcaacctcggacgagcagtcttccaggcgaaaaagagggttcttgaacctctgggcctggttgaggaacctgttaagacggctccgggaaaaaagaggccggtagagcactctcctgtggagccagactcctcctcgggaaccggaaaagcgggccatcagcctgcgagaaagagattgaattttggtcagactggagacgcagactccgtacctgacccccagcctctcggacagccaccagcagcccccacaagtttgggatctactacaatggctacaggcagtggcgcaccaatggcagacaataacgagggtgccgatggagtgggtaattcctcaggaaattggcattgcgattcccaatggctgggcgacagagtcatcaccaccagcacccgaacctgggccctgcccacctacaacaaccacctctacaagcaaatctccagccaatcaggagcctcgaacgacaaccactactttggctgcagcaccccctgggggtattttgacttcaacagattccactgtcacttctccccacgtgattggcaaagactcatcaacaacaactggggattccgacccaagagactcaacttcaagctctttaacattcaagtcaaagaggtcacgcagaatgacggtacgacgacgattgccaataaccttaccagcacggttcaggtgtttactgactcggagtacccgctcccgtacgtcctcggctcggcgcatcaaggatgcctcccgccgtttccagcggacgtcttcatggtcccacagtatggatacctcaccctgaacaacgggagtcaggcggtaggacgctcttccttttactgcctggagtactttccttctcagatgctgcgtaccggaaacaactttaccttcagctacacctttgaggacgttcctttccacagcagctacgctcacagccagagtttggaccggctgatgaatcctctgatcgaccagtatctatattatctgaacaggacacaatcaaatagtggaactcttcagcagtctaggctactgtttagccaagctggacccaccagcatgtctcttcaagctaaaaactggctgcctggaccttgctacagacagcagcgtctttcaaagcaggcaaacgacaacaacaacagcaactttccctggactgcggctacaaagtatcatctaaatggccgggactcgttggttaatccaggaccagctatggccagccacaaagacgatgaagaaaagtttttccccatgcatggaaccctgatatttggtaaacaaggaacaaatgctaacgacgcggatttggagcatgttatgattacagatgaagaagaaatcaggaccaccaatcctgtggctacagagcagtacggaaacgtgtcaaataatttgcaaaactcaaatactggtccaactacagaaaatgtcaatcaccagggagcgttacctggtatggtgtggcaggatcgagacgtgtacctgcagggacccatttgggccaagattcctcacaccgacggacactttcacccttctccactgatgggaggttttggactcaaacacccgcctcctcaaatcatgatcaaaaacactcccgttccagccaatcctcccacaaacttcagttctgccaagtttgcttctttcatcacacagtattccacgggccaggtcagcgtggagattgagtgggagctgcagaaggagaacagcaaacgctggaaccccgagatccagtatacttccaactacaacaaatctgttaatgtggactttactgtggacactaatggtgtgtattcagagccttgccccattggcaccagatacctgactcgtaatctgtaa

SEQ ID NO: 334 - protein, 735 aa, Artificial Sequence
  source: /note="Description of Artificial Sequence: Synthetic polypeptide"
MAADGYLPDWLEDTLSEGIRQWWKLKPGPPPPKPAERHQDNSRGLVLPGYKYLGPSNGLDKGEPVNEADAAALEHDKAYDRQLDSGDNPYLKYNHADAEFQERLKEDTSFGGNLGRAVFQAKKRVLEPLGLVEEPVKTAPGKKRPVEHSPVEPDSSSGTGKAGHQPARKRLNFGQTGDADSVPDPQPLGQPPAAPTSLGSTTMATGSGAPMADNNEGADGVGNSSGNWHCDSQWLGDRVITTSTRTWALPTYNNHLYKQISSQSGASNDNHYFGCSTPWGYFDFNRFHCHFSPRDWQRLINNNWGFRPKRLNFKLFNIQVKEVTQNDGTTTIANNLTSTVQVFTDSEYPLPYVLGSAHQGCLPPFPADVFMVPQYGYLTLNNGSQAVGRSSFYCLEYFPSQMLRTGNNFTFSYTFEDVPFHSSYAHSQSLDRLMNPLIDQYLYYLNRTQSNSGTLQQSRLLFSQAGPTSMSLQAKNWLPGPCYRQQRLSKQANDNNNSNFPWTAATKYHLNGRDSLVNPGPAMASHKDDEEKFFPMHGTLIFGKQGTNANDADLEHVMITDEEEIRTTNPVATEQYGNVSNNLQNSNTGPTTENVNHQGALPGMVWQDRDVYLQGPIWAKIPHTDGHFHPSPLMGGFGLKHPPPQIMIKNTPVPANPPTNFSSAKFASFITQYSTGQVSVEIEWELQKENSKRWNPEIQYTSNYNKSVNVDFTVDTNGVYSEPCPIGTRYLTRNL

SEQ ID NO: 335 - DNA, 2214 bp, Artificial Sequence
  source: /note="Description of Artificial Sequence: Synthetic polynucleotide"
atggctgccgatggttatcttccagattggctcgaggacaaccttagtgaaggaattcgcgagtggtgggctttgaaacctggagcccctcaacccaaggcaaatcaacaacatcaagacaacgctcgaggtcttgtgcttccgggttacaaataccttggacccggcaacggactcgacaagggggagccggtcaacgcagcagacgcggcggccctcgagcacgacaaggcctacgaccagcagctgcaggcgggtgacaatccgtacctgcggtataaccacgccgacgccgagtttcaggagcgtctgcaagaagatacgtcttttgggggcaaccttggcagagcagtcttccaggccaaaaagaggatccttgagcctcttggtctggttgaggaagcagctaaaacggctcctggaaagaagaggcctgtagatcagtctcctcaggaaccggactcatcatctggtgttggcaaatcgggcaaacagcctgccagaaaaagactaaatttcggtcagactggcgactcagagtcagtcccagaccctcaacctctcggagaaccaccagcagcccccacaagtttgggatctaatacaatggcttcaggcggtggcgcaccaatggcagacaataacgagggtgccgatggggtgggtagttcctcgggaaattggcattgcgattcccaatggctgggggacagagtcatcaccaccagcacccgaacctgggccctgcccacctacaacaatcacctctacaagcaaatctccaacgggacatcgggaggagccaccaacgacaacacctacttcggctacagcaccccctgggggtattttgactttaacagattccactgccacttttcaccacgtgactggcagcgactcatcaacaacaactggggattccggcccaagagactcagcttcaagctcttcaacatccaggtcaaggaggtcacgcagaatgaaggcaccaagaccatcgccaataacctcaccagcaccatccaggtgtttacggactcggagtaccagctgccgtacgttctcggctctgcgcaccagggctgcctccctccgttcccggcggacgtgttcatgattccgcaatacggctacctgacgctcaacaatggcagccaagccgtgggacgttcatccttttactgcctggaatatttcccttctcagatgctgagaacgggcaacaactttaccttcagctacacctttgaggaagtgcctttccacagcagctacgcgcacagccagagcttggaccggctgatgaatcctctgattgaccagtacctgtactacttgtctcggactcaaacaacaggaggcacggcaaatacgcagactctgggcttcagccaaggtgggcctaatacaatggccaatcaggcaaagaactggctgccaggaccctgttaccgccaacaacgcgtctcaacgacaaccgggcaaaacaacaatagcaactttgcctggactgctgggaccaaataccatctgaatggaagaaattcattggctaatcctggcatcgctatggcaacacacaaagacgacgaggagcgtttttttcccagtaacgggatcctgatttttggcaaacaaaatgctgccagagacaatgcggattacagcgatgtcatgctcaccagcgaggaagaaatcaaaaccactaaccctgtggctacagaggaatacggtatcgtggcagataacttgcagcagcaaaacacggctcctcaaattggaactgtcaacagccagggggccttacccggtatggtctggcagaaccgggacgtgtacctgcagggtcccatctgggccaagattcctcacacggacggcaacttccacccgtctccgctgatgggcggctttggcctgaaacatcctccgcctcagatcctgatcaagaacacgcctgtacctgcggatcctccgaccaccttcaaccagtcaaagctgaactctttcatcacgcaatacagcaccggacaggtcagcgtggagatcgagtgggagctgcagaaggaaaacagcaagcgctggaacccggagatccagtacacttccaactattacaagtctaataatgttgaatttgctgttaatactgaaggtgtatatagtgaaccccgccccattggcaccagatacctgactcgtaatctgtaa

SEQ ID NO: 336 - protein, 737 aa, Artificial Sequence
  source: /note="Description of Artificial Sequence: Synthetic polypeptide"
MAADGYLPDWLEDNLSEGIREWWALKPGAPQPKANQQHQDNARGLVLPGYKYLGPGNGLDKGEPVNAADAAALEHDKAYDQQLQAGDNPYLRYNHADAEFQERLQEDTSFGGNLGRAVFQAKKRILEPLGLVEEAAKTAPGKKRPVDQSPQEPDSSSGVGKSGKQPARKRLNFGQTGDSESVPDPQPLGEPPAAPTSLGSNTMASGGGAPMADNNEGADGVGSSSGNWHCDSQWLGDRVITTSTRTWALPTYNNHLYKQISNGTSGGATNDNTYFGYSTPWGYFDFNRFHCHFSPRDWQRLINNNWGFRPKRLSFKLFNIQVKEVTQNEGTKTIANNLTSTIQVFTDSEYQLPYVLGSAHQGCLPPFPADVFMIPQYGYLTLNNGSQAVGRSSFYCLEYFPSQMLRTGNNFTFSYTFEEVPFHSSYAHSQSLDRLMNPLIDQYLYYLSRTQTTGGTANTQTLGFSQGGPNTMANQAKNWLPGPCYRQQRVSTTTGQNNNSNFAWTAGTKYHLNGRNSLANPGIAMATHKDDEERFFPSNGILIFGKQNAARDNADYSDVMLTSEEEIKTTNPVATEEYGIVADNLQQQNTAPQIGTVNSQGALPGMVWQNRDVYLQGPIWAKIPHTDGNFHPSPLMGGFGLKHPPPQILIKNTPVPADPPTTFNQSKLNSFITQYSTGQVSVEIEWELQKENSKRWNPEIQYTSNYYKSNNVEFAVNTEGVYSEPRPIGTRYLTRNL

SEQ ID NO: 337 - DNA, 2211 bp, Artificial Sequence
  source: /note="Description of Artificial Sequence: Synthetic polynucleotide"
atggctgccgatggttatcttccagattggctcgaggacaacctctctgagggcattcgcgagtggtgggacttgaaacctggagccccgaagcccaaagccaaccagcaaaagcaggacgacggccggggtctggtgcttcctggctacaagtacctcggacccttcaacggactcgacaagggggagcccgtcaacgcggcggacgcagcggccctcgagcacgacaaggcctacgaccagcagctcaaagcgggtgacaatccgtacctgcggtataaccacgccgacgccgagtttcaggagcgtctgcaagaagatacgtcttttgggggcaacctcgggcgagcagtcttccaggccaagaagcgggttctcgaacctctcggtctggttgaggaaggcgctaagacggctcctggaaagaaacgtccggtagagcagtcgccacaagagccagactcctcctcgggcatcggcaagacaggccagcagcccgctaaaaagagactcaattttggtcagactggcgactcagagtcagtccccgacccacaacctctcggagaacctccagcaacccccgctgctgtgggacctactacaatggcttcaggcggtggcgcaccaatggcagacaataacgaaggcgccgacggagtgggtaatgcctcaggaaattggcattgcgattccacatggctgggcgacagagtcatcaccaccagcacccgaacatgggccttgcccacctataacaaccacctctacaagcaaatctccagtgcttcaacgggggccagcaacgacaaccactacttcggctacagcaccccctgggggtattttgatttcaacagattccactgccatttctcaccacgtgactggcagcgactcatcaacaacaattggggattccggcccaagagactcaacttcaagctcttcaacatccaagtcaaggaggtcacgacgaatgatggcgtcacgaccatcgctaataaccttaccagcacggttcaagtcttctcggactcggagtaccagctgccgtacgttctcggctctgcccaccagggctgcctgcctccgttcccggcggacgtgttcatgattccccagtacggctacctaacactcaacaacggtagtcaggccgtgggacgctcctccttctactgcctggaatactttccttcgcagatgctgagaaccggcaacaacttccagtttacttacaccttcgaggacgtgcctttccacagcagctacgcccacagccagagcttggaccggctgatgaatcctctgattgaccagtacctgtactacttgtctcggactcaaacaacaggaggcacggcaaatacgcagactctgggcttcagccaaggtgggcctaatacaatggccaatcaggcaaagaactggctgccaggaccctgttaccgccaacaacgcgtctcaacgacaaccgggcaaaacaacaatagcaattttacctggactggtgcttcaaaatataacctcaatgggcgtgaatccatcatcaaccctggcactgctatggcctcacacaaagacgacgaagacaagttctttcccatgagcggtgtcatgatttttggaaaagagagcgccggagcttcaaacactgcattggacaatgtcatgattacagacgaagaggaaattaaagccactaaccctgtggccaccgaaagatttgggaccgtggcagtcaatttccagagcagcagcacagaccctgcgaccggagatgtgcatgctatgggagcattacctggcatggtgtggcaagatagagacgtgtacctgcagggtcccatttgggccaaaattcctcacacagatggacactttcacccgtctcctcttatgggcggctttggactcaagaacccgcctcctcagatcctcatcaaaaacacgcctgttcctgcgaatcctccggcggagttttcagctacaaagtttgcttcattcatcacccaatactccacaggacaagtgagtgtggaaattgaatgggagctgcagaaagaaaacagcaagcgctggaatcccgaagtgcagtacacatccaattatgcaaaatctgccaacgttgattttactgtggacaacaatggactttatactgagcctcgccccattggcacccgttacctcacccgtcccctgtaa

SEQ ID NO: 338 - protein, 736 aa, Artificial Sequence
  source: /note="Description of Artificial Sequence: Synthetic polypeptide"
MAADGYLPDWLEDNLSEGIREWWDLKPGAPKPKANQQKQDDGRGLVLPGYKYLGPFNGLDKGEPVNAADAAALEHDKAYDQQLKAGDNPYLRYNHADAEFQERLQEDTSFGGNLGRAVFQAKKRVLEPLGLVEEGAKTAPGKKRPVEQSPQEPDSSSGIGKTGQQPAKKRLNFGQTGDSESVPDPQPLGEPPATPAAVGPTTMASGGGAPMADNNEGADGVGNASGNWHCDSTWLGDRVITTSTRTWALPTYNNHLYKQISSASTGASNDNHYFGYSTPWGYFDFNRFHCHFSPRDWQRLINNNWGFRPKRLNFKLFNIQVKEVTTNDGVTTIANNLTSTVQVFSDSEYQLPYVLGSAHQGCLPPFPADVFMIPQYGYLTLNNGSQAVGRSSFYCLEYFPSQMLRTGNNFQFTYTFEDVPFHSSYAHSQSLDRLMNPLIDQYLYYLSRTQTTGGTANTQTLGFSQGGPNTMANQAKNWLPGPCYRQQRVSTTTGQNNNSNFTWTGASKYNLNGRESIINPGTAMASHKDDEDKFFPMSGVMIFGKESAGASNTALDNVMITDEEEIKATNPVATERFGTVAVNFQSSSTDPATGDVHAMGALPGMVWQDRDVYLQGPIWAKIPHTDGHFHPSPLMGGFGLKNPPPQILIKNTPVPANPPAEFSATKFASFITQYSTGQVSVEIEWELQKENSKRWNPEVQYTSNYAKSANVDFTVDNNGLYTEPRPIGTRYLTRPL

SEQ ID NO: 339 - DNA, 2211 bp, Artificial Sequence
  source: /note="Description of Artificial Sequence: Synthetic polynucleotide"
atggctgctgacggttatcttccagattggctcgaggacaacctttctgaaggcattcgagagtggtgggcgctgcaacctggagcccctaaacccaaggcaaatcaacaacatcaggacaacgctcggggtcttgtgcttccgggttacaaatacctcggacccggcaacggactcgacaagggggaacccgtcaacgcagcggacgcggcagccctcgagcacgacaaggcctacgaccagcagctcaaggccggtgacaacccctacctcaagtacaaccacgccgacgccgagttccaggagcggctcaaagaagatacgtcttttgggggcaacctcgggcgagcagtcttccaggccaaaaagaggcttcttgaacctcttggtctggttgaggaagcggctaagacggctcctggaaagaagaggcctgtagatcagtctcctcaggaaccggactcatcatctggtgttggcaaatcgggcaaacagcctgccagaaaaagactaaatttcggtcagactggcgactcagagtcagtcccagaccctcaacctctcggagaaccaccagcagcccccacaagtttgggatctaatacaatggcttcaggcggtggcgcaccaatggcagacaataacgagggtgccgatggagtgggtaattcctcaggaaattggcattgcgattcccaatggctgggcgacagagtcatcaccaccagcaccagaacctgggccctgcccacttacaacaaccatctctacaagcaaatctccagccaatcaggagcttcaaacgacaaccactactttggctacagcaccccttgggggtattttgactttaacagattccactgccacttctcaccacgtgactggcagcgactcattaacaacaactggggattccggcccaagaaactcagcttcaagctcttcaacatccaagttaaagaggtcacgcagaacgatggcacgacgactattgccaataaccttaccagcacggttcaagtgtttacggactcggagtatcagctcccgtacgtgctcgggtcggcgcaccaaggctgtctcccgccgtttccagcggacgtcttcatggtccctcagtatggatacctcaccctgaacaacggaagtcaagcggtgggacgctcatccttttactgcctggagtacttcccttcgcagatgctaaggactggaaataacttccaattcagctataccttcgaggatgtaccttttcacagcagctacgctcacagccagagtttggatcgcttgatgaatcctcttattgatcagtatctgtactacctgaacagaacgcaaggaacaacctctggaacaaccaaccaatcacggctgctttttagccaggctgggcctcagtctatgtctttgcaggccagaaattggctacctgggccctgctaccggcaacagagactttcaaagactgctaacgacaacaacaacagtaactttccttggacagcggccagcaaatatcatctcaatggccgcgactcgctggtgaatccaggaccagctatggccagtcacaaggacgatgaagaaaaatttttccctatgcacggcaatctaatatttggcaaagaagggacaacggcaagtaacgcagaattagataatgtaatgattacggatgaagaagagattcgtaccaccaatcctgtggcaacagagcagtatggaactgtggcaaataacttgcagagctcaaatacagctcccacgactagaactgtcaatgatcagggggccttacctggcatggtgtggcaagatcgtgacgtgtaccttcaaggacctatctgggcaaagattcctcacacggatggacactttcatccttctcctctgatgggaggctttggactgaaacatccgcctcctcaaatcatgatcaaaaatactccggtaccggcaaatcctccgacgactttcagcccggccaagtttgcttcatttatcactcagtactccactggacaggtcagcgtggaaattgagtgggagctacagaaagaaaacagcaaacgttggaatccagagattcagtacacttccaactacaacaagtctgttaatgtggactttactgtagacactaatggtgtttatagtgaacctcgccccattggcacccgttaccttacccgtcccctgtaa

SEQ ID NO: 340 - protein, 736 aa, Artificial Sequence
  source: /note="Description of Artificial Sequence: Synthetic polypeptide"
MAADGYLPDWLEDNLSEGIREWWALQPGAPKPKANQQHQDNARGLVLPGYKYLGPGNGLDKGEPVNAADAAALEHDKAYDQQLKAGDNPYLKYNHADAEFQERLKEDTSFGGNLGRAVFQAKKRLLEPLGLVEEAAKTAPGKKRPVDQSPQEPDSSSGVGKSGKQPARKRLNFGQTGDSESVPDPQPLGEPPAAPTSLGSNTMASGGGAPMADNNEGADGVGNSSGNWHCDSQWLGDRVITTSTRTWALPTYNNHLYKQISSQSGASNDNHYFGYSTPWGYFDFNRFHCHFSPRDWQRLINNNWGFRPKKLSFKLFNIQVKEVTQNDGTTTIANNLTSTVQVFTDSEYQLPYVLGSAHQGCLPPFPADVFMVPQYGYLTLNNGSQAVGRSSFYCLEYFPSQMLRTGNNFQFSYTFEDVPFHSSYAHSQSLDRLMNPLIDQYLYYLNRTQGTTSGTTNQSRLLFSQAGPQSMSLQARNWLPGPCYRQQRLSKTANDNNNSNFPWTAASKYHLNGRDSLVNPGPAMASHKDDEEKFFPMHGNLIFGKEGTTASNAELDNVMITDEEEIRTTNPVATEQYGTVANNLQSSNTAPTTRTVNDQGALPGMVWQDRDVYLQGPIWAKIPHTDGHFHPSPLMGGFGLKHPPPQIMIKNTPVPANPPTTFSPAKFASFITQYSTGQVSVEIEWELQKENSKRWNPEIQYTSNYNKSVNVDFTVDTNGVYSEPRPIGTRYLTRPL

SEQ ID NO: 341 - DNA, 2211 bp, Artificial Sequence
  source: /note="Description of Artificial Sequence: Synthetic polynucleotide"
atggctgccgatggttatcttccagattggctcgaggacaaccttagtgaaggaattcgcgagtggtgggctttgaaacctggagcccctcaacccaaggcaaatcaacaacatcaagacaacgctcgaggtcttgtgcttccgggttacaaataccttggacccggcaacggactcgacaagggggagccggtcaacgcagcagacgcggcggccctcgagcacgacaaggcctacgaccagcagctcaaggccggagacaacccgtacctcaagtacaaccacgccgacgccgagttccaggagcggctcaaagaagatacgtcttttgggggcaacctcgggcgagcagtcttccaggccaaaaagaggcttcttgaacctcttggtctggttgaggaagcggctaagacggctcctggaaagaagagaccggtagagccatcaccccagcgttctccagactcctctacgggcatcggcaagaaaggccaacagcccgctaaaaagagactcaattttggtcagactggcgactcagagtcagtccccgacccacaacctctcggagaacctccagcaacccccgctgctgtgggacctactacaatggcttcaggcggtggcgcaccaatggcagacaataacgagggtgccgatggagtgggtaattcctcaggaaattggcattgcgattcccaatggctgggcgacagagtcatcaccaccagcaccagaacctgggccctgcccacttacaacaaccatctctacaagcaaatctccagccaatcaggagcttcaaacgacaaccactactttggctacagcaccccttgggggtattttgactttaacagattccactgccacttttcaccacgtgactggcaaagactcatcaacaacaactggggattccgacccaagagactcaacttcaagctcttcaacatccaagtcaaggaggtcacgacgaatgatggcgtcacgaccatcgctaataaccttaccagcacggttcaagtcttctcggactcggagtaccagttgccgtacgtcctcggctctgcgcaccagggctgcctccctccgttcccggcggacgtgttcatgattccgcagtacggctacctaacgctcaacaatggcagccaagccgtgggacgttcatccttttactgcctggaatatttcccttctcagatgctgagaacgggcaacaactttaccttcagctacacttttgaggacgttcctttccacagcagctacgctcacagccagagtctggaccgtctcatgaatcctctcatcgaccagtacctgtattacttgagcagaacaaacactccaagtggaaccaccacgcagtcaaggcttcagttttctcaggccggagcgagtgacattcgggaccagtctaggaactggcttcctggaccctgttaccgccagcagcgcgtttctaaaacaaaaacagacaacaacaacagcaattttacctggactggtgcttcaaaatataaccttaatgggcgtgaatctataatcaaccctggcactgctatggcctcacacaaagacgacgaagacaagttctttcccatgagcggtgtcatgatttttggaaaagagagcgccggagcttcaaacactgcattggacaatgtcatgattacagacgaagaggaaattaaagccactaaccctgtggccaccgaaagatttgggaccgtggcagtcaatttccagagcagcagcacagaccctgcgaccggagatgtgcatgttatgggagccttacctggaatggtgtggcaagacagagacgtatacctgcagggtcctatttgggccaaaattcctcacacggatggacactttcacccgtctcctcttatgggcggctttggactcaagaacccgcctcctcagatcctcatcaaaaacacgcctgttcctgcgaatcctccggcggagttttcagctacaaagtttgcttcattcatcacccaatactccacaggacaagtgagtgtggaaattgaatgggagctgcagaaagaaaacagcaagcgctggaatcccgaagtgcagtacacatccaattatgcaaaatctgccaacgttgattttactgtggacaacaatggactttatactgagcctcgccccattggcacccgttaccttacccgtcccctgtaa

SEQ ID NO: 342 - protein, 736 aa, Artificial Sequence
  source: /note="Description of Artificial Sequence: Synthetic polypeptide"
MAADGYLPDWLEDNLSEGIREWWALKPGAPQPKANQQHQDNARGLVLPGYKYLGPGNGLDKGEPVNAADAAALEHDKAYDQQLKAGDNPYLKYNHADAEFQERLKEDTSFGGNLGRAVFQAKKRLLEPLGLVEEAAKTAPGKKRPVEPSPQRSPDSSTGIGKKGQQPAKKRLNFGQTGDSESVPDPQPLGEPPATPAAVGPTTMASGGGAPMADNNEGADGVGNSSGNWHCDSQWLGDRVITTSTRTWALPTYNNHLYKQISSQSGASNDNHYFGYSTPWGYFDFNRFHCHFSPRDWQRLINNNWGFRPKRLNFKLFNIQVKEVTTNDGVTTIANNLTSTVQVFSDSEYQLPYVLGSAHQGCLPPFPADVFMIPQYGYLTLNNGSQAVGRSSFYCLEYFPSQMLRTGNNFTFSYTFEDVPFHSSYAHSQSLDRLMNPLIDQYLYYLSRTNTPSGTTTQSRLQFSQAGASDIRDQSRNWLPGPCYRQQRVSKTKTDNNNSNFTWTGASKYNLNGRESIINPGTAMASHKDDEDKFFPMSGVMIFGKESAGASNTALDNVMITDEEEIKATNPVATERFGTVAVNFQSSSTDPATGDVHVMGALPGMVWQDRDVYLQGPIWAKIPHTDGHFHPSPLMGGFGLKNPPPQILIKNTPVPANPPAEFSATKFASFITQYSTGQVSVEIEWELQKENSKRWNPEVQYTSNYAKSANVDFTVDNNGLYTEPRPIGTRYLTRPL

SEQ ID NO: 343 - DNA, 2211 bp, Artificial Sequence
  source: /note="Description of Artificial Sequence: Synthetic polynucleotide"
atggctgccgatggttatcttccagattggctcgaggacaacctctctgagggcattcgcgagtggtgggacttgaaacctggagcccctaaacccaaggcaaatcaacaacatcaggacaacgctcgaggtcttgtgcttccgggttacaaataccttggacccggcaacggactcgacaagggggagccggtcaacgcagcagacgcggcggccctcgagcacgacaaggcctacgaccagcagctcaaggccggagacaacccgtacctcaagtacaaccacgccgacgccgagttccaggagcggctcaaagaagatacgtcttttgggggcaacctcgggcgagcagtcttccaggccaaaaagaggcttcttgaacctcttggtctggttgaggaagcggctaagacggctcctggaaagaagagaccggtagagccatcaccccagcgttctccagactcctctacgggcatcggcaagaaaggccaacagcccgctaaaaagagactcaattttggtcagactggcgactcagagtcagtccccgacccacaacctctcggagaacctccagcaacccccgctgctgtgggacctactacaatggcttcaggcggtggcgcaccaatggcagacaataacgagggtgccgatggagtgggtaattcctcaggaaattggcattgcgattcccaatggctgggcgacagagtcatcaccaccagcaccagaacctgggccctgcccacttacaacaaccatctctacaagcaaatctccagccaatcaggagcttcaaacgacaaccactactttggctacagcaccccttgggggtattttgactttaacagattccactgccacttttcaccacgtgactggcaaagactcatcaacaacaactggggattccgacccaagagactcaacttcaagctcttcaacatccaagtcaaggaggtcacgacgaatgatggcgtcacgaccatcgctaataaccttaccagcacggttcaagtcttctcggactcggagtaccagttgccgtacgtcctcggctctgcgcaccagggctgcctccctccgttcccggcggacgtgttcatgattccgcagtacggctacctaacgctcaacaatggcagccaagccgtgggacgttcatccttttactgcctggaatatttcccttctcagatgctgagaacgggcaacaactttaccttcagctacacttttgaggacgttcctttccacagcagctacgctcacagccagagtctggaccgtctcatgaatcccctcatcgaccagtacctgtattacttgagcagaacaaacactccaagtggaaccaccacgcagtcaaggcttcagttttctcaggccggagcgagtgacattcgggaccagtctaggaactggcttcctggaccctgttaccggcagcagcgcgtttctaaaacaaaaacagacaacaacaacagcaactttacctggactggtgcttcaaaatataaccttaatgggcgtgaatctataatcaaccctggcactgctatggcctcacacaaagacgacgaagacaagttctttcccatgagcggtgtcatgatttttggaaaggagagcgccggagcttcaaacactgcattggacaatgtcatgatcacagacgaagaggaaatcaaagccactaaccccgtggccaccgaaagatttgggactgtggcagtcaatctccagagcagcagcacagaccctgcgaccggagatgtgcatgttatgggagccttacctggaatggtgtggcaagacagagacgtgtacctgcagggtcctatttgggccaaaattcctcacacggatggacactttcacccgtctcctctcatgggcggctttggacttaagcacccgcctcctcagatcctcatcaaaaacacgcctgttcctgcgaatcctccggcagagttttcggctacaaagtttgcttcattcatcacccagtattccacaggacaagtgagtgtggaaattgaatgggagctgcagaaagaaaacagcaagcgctggaatcccgaagtgcagtacacatccaattatgcaaaatctgccaacgttgattttactgtggacaacaatggactttatactgagcctcgccccattggcacccgttacctcacccgtcccctgtaa

SEQ ID NO: 344 - protein, 736 aa, Artificial Sequence
  source: /note="Description of Artificial Sequence: Synthetic polypeptide"
MAADGYLPDWLEDNLSEGIREWWDLKPGAPKPKANQQHQDNARGLVLPGYKYLGPGNGLDKGEPVNAADAAALEHDKAYDQQLKAGDNPYLKYNHADAEFQERLKEDTSFGGNLGRAVFQAKKRLLEPLGLVEEAAKTAPGKKRPVEPSPQRSPDSSTGIGKKGQQPAKKRLNFGQTGDSESVPDPQPLGEPPATPAAVGPTTMASGGGAPMADNNEGADGVGNSSGNWHCDSQWLGDRVITTSTRTWALPTYNNHLYKQISSQSGASNDNHYFGYSTPWGYFDFNRFHCHFSPRDWQRLINNNWGFRPKRLNFKLFNIQVKEVTTNDGVTTIANNLTSTVQVFSDSEYQLPYVLGSAHQGCLPPFPADVFMIPQYGYLTLNNGSQAVGRSSFYCLEYFPSQMLRTGNNFTFSYTFEDVPFHSSYAHSQSLDRLMNPLIDQYLYYLSRTNTPSGTTTQSRLQFSQAGASDIRDQSRNWLPGPCYRQQRVSKTKTDNNNSNFTWTGASKYNLNGRESIINPGTAMASHKDDEDKFFPMSGVMIFGKESAGASNTALDNVMITDEEEIKATNPVATERFGTVAVNLQSSSTDPATGDVHVMGALPGMVWQDRDVYLQGPIWAKIPHTDGHFHPSPLMGGFGLKHPPPQILIKNTPVPANPPAEFSATKFASFITQYSTGQVSVEIEWELQKENSKRWNPEVQYTSNYAKSANVDFTVDNNGLYTEPRPIGTRYLTRPL

SEQ ID NO: 345 - DNA, 2214 bp, Artificial Sequence
  source: /note="Description of Artificial Sequence: Synthetic polynucleotide"
atggctgccgatggttatcttccagattggctcgaggacaaccttagtgaaggaattcgcgagtggtgggctttgaaacctggagcccctcaacccaaggcaaatcaacaacatcaagacaacgctcgaggtcttgtgcttccgggttacaaataccttggacccggcaacggactcgacaagggggagccggtcaacgcagcagacgcggcggccctcgagcacgacaaggcctacgaccagcagctgcaggcgggtgacaatccgtacctgcggtataaccacgccgacgccgagtttcaggagcgtctgcaagaagatacgtcttttgggggcaaccttggcagagcagtcttccaggccaaaaagaggatccttgagcctcttggtctggttgaggaagcagctaaaacggctcctggaaagaagaggcctgtagatcagtctcctcaggaaccggactcatcatctggtgttggcaaatcgggcaaacagcctgccagaaaaagactaaatttcggtcagactggcgactcagagtcagtcccagaccctcaacctctcggagaaccaccagcagcccccacaagtttgggatctaatacaatggcttcaggcggtggcgcaccaatggcagacaataacgagggtgccgatggggtgggtagttcctcgggaaattggcattgcgattcccaatgactgggggacagagtcatcaccaccagcacccgaacctgggccctgcccacctacaacaatcacctctacaagcaaatctccaacgggacatcgggaggagccaccaacgacaacacctacttcggctacagcaccccctgggggtattttgactttaacagattccactgccacttttcaccacgtgactggcagcgactcatcaacaacaactggggattccggcccaagagactcagcttcaagctcttcaacatccaggtcaaggaggtcacgcagaatgaaggcaccaagaccatcgccaataacctcaccagcaccatccaggtgtttacggactcggagtaccagctgccgtacgttctcggctctgcgcaccagggctgcctccctccgttcccggcggacgtgttcatgattccgcaatacggctacctgacgctcaacaatggcagccaagccgtgggacgttcatccttttactgcctggaatatttcccttctcagatgctgagaacgggcaacaactttaccttcagctacacctttgaggaagtgcctttccacagcagctacgcgcacagccagagcttggaccggctgatgaatcctctgattgaccagtacctgtactacttgtctcggactcaaacaacaggaggcacggcaaatacgcagactctgggcttcagccaaggtgggcctaatacaatggccaatcaggcaaagaactggctgccaggaccctgttaccgccaacaacgcgtctcaacgacaaccgggcaaaacaacaatagcaactttgcctggactgctgggaccaaataccatctgaatggaagaaattcattggctaatcctggcatcgctatggcaacacacaaagacgacgaggagcgtttttttcccagtaacgggatcctgatttttggcaaacaaaatgctgccagagacaatgcggattacagcgatgtcatgctcaccagcgaggaagaaatcaaaaccactaaccctgtggctacagaggaatacggtatcgtggcagataacttgcagcagcaaaacacggctcctcaaattggaactgtcaacagccagggggccttacccggtatggtctggcagaaccgggacgtgtacctgcagggtcccatctgggccaagattcctcacacggacggcaacttccacccgtctccgctgatgggcggctttggcctgaaacatcctccgcctcagatcctgatcaagaacacgcctgtacctgcggatcctccgaccaccttcaaccagtcaaagctgaactctttcatcacgcaatacagcaccggacaggtcagcgtggagatcgagtgggagctgcagaaggaaaacagcaagcgctggaacccggagatccagtacacttccaactattacaagtctaataatgttgaatttgctgttaatactgaaggtgtatatagtgaaccccgccccattggcaccagatacctgactcgtaatctgtaa

SEQ ID NO: 346 - protein, 736 aa, Artificial Sequence
  source: /note="Description of Artificial Sequence: Synthetic polypeptide"
MAADGYLPDWLEDNLSEGIREWWALKPGAPQPKANQQHQDNARGLVLPGYKYLGPGNGLDKGEPVNAADAAALEHDKAYDQQLQAGDNPYLRYNHADAEFQERLQEDTSFGGNLGRAVFQAKKRILEPLGLVEEAAKTAPGKKRPVDQSPQEPDSSSGVGKSGKQPARKRLNFGQTGDSESVPDPQPLGEPPAAPTSLGSNTMASGGGAPMADNNEGADGVGSSSGNWHCDSQLGDRVITTSTRTWALPTYNNHLYKQISNGTSGGATNDNTYFGYSTPWGYFDFNRFHCHFSPRDWQRLINNNWGFRPKRLSFKLFNIQVKEVTQNEGTKTIANNLTSTIQVFTDSEYQLPYVLGSAHQGCLPPFPADVFMIPQYGYLTLNNGSQAVGRSSFYCLEYFPSQMLRTGNNFTFSYTFEEVPFHSSYAHSQSLDRLMNPLIDQYLYYLSRTQTTGGTANTQTLGFSQGGPNTMANQAKNWLPGPCYRQQRVSTTTGQNNNSNFAWTAGTKYHLNGRNSLANPGIAMATHKDDEERFFPSNGILIFGKQNAARDNADYSDVMLTSEEEIKTTNPVATEEYGIVADNLQQQNTAPQIGTVNSQGALPGMVWQNRDVYLQGPIWAKIPHTDGNFHPSPLMGGFGLKHPPPQILIKNTPVPADPPTTFNQSKLNSFITQYSTGQVSVEIEWELQKENSKRWNPEIQYTSNYYKSNNVEFAVNTEGVYSEPRPIGTRYLTRNL

SEQ ID NO: 347 - DNA, 2214 bp, Artificial Sequence
  source: /note="Description of Artificial Sequence: Synthetic polynucleotide"
atggctgccgatggttatcttccagattggctcgaggacaaccttagtgaaggaattcgcgagtggtgggctttgaaacctggagcccctcaacccaaggcaaatcaacaacatcaagacaacgctcgaggtcttgtgcttccgggttacaaataccttggacccggcaacggactcgacaagggggagccggtcaacgcagcagacgcggcggccctcgagcacgacaaggcctacgaccagcagctgcaggcgggtgacaatccgtacctgcggtataaccacgccgacgccgagtttcaggagcgtctgcaagaagatacgtcttttgggggcaaccttggcagagcagtcttccaggccaaaaagaggatccttgagcctcttggtctggttgaggaagcagctaaaacggctcctggaaagaagaggcctgtagatcagtctcctcaggaaccggactcatcatctggtgttggcaaatcgggcaaacagcctgccagaaaaagactaaatttcggtcagactggcgactcagagtcagtcccagaccctcaacctctcggagaaccaccagcagcccccacaagtttgggatctaatacaatggcttcaggcggtggcgcaccaatggcagacaataacgagggtgccgatggggtgggtagttcctcgggaaattggcattgcgattcccaatggctgggggacagagtcatcaccaccagcacccgaacctgggccctgcccacctacaacaatcacctctacaagcaaatctccaacgggacatcgggaggagccaccaacgacaacacctacttcggctacagcaccccctgggggtattttgactttaacagattccactgccacttttcaccacgtgactggcagcgactcatcaacaacaactggggattccggcccaagagactcagcttcaagctcttcaacatccaggtcaaggaggtcacgcagaatgaaggcaccaagaccatcgccaataacctcaccagcaccatccaggtgtttacggactcggagtaccagctgccgtacgttctcggctctgcgcaccagggctgcctccctccgttcccggcggacgtgttcatgattccgcaatacggctacctgacgctcaacaatggcagccaagccgtgggacgttcatccttttactgcctggaatatttcccttctcagatgctgagaacgggcaacaactttaccttcagctacacctttgaggaagtgccttttcacagcagctacgcgcacagccagagcttggaccggctgatgaatcctctgattgaccagtacctgtactacttgtctcggactcaaacaacaggaggcacggcaaatacgcagactctgggcttcagccaaggtgggcctaatacaatggccaatcaggcaaagaactggctgccaggaccctgttaccgccaacaacgcgtctcaacgacaaccgggcaaaacaacaatagcaactttgcctggactgctgggaccaaataccatctgaatggaagaaattcattggctaatcctggcatcgctatggcaacacacaaagacgacgaggagcgtttttttcccagtaacgggatcctgatttttggcaaacaaaatgctgccagagacaatgcggattacagcgatgtcatgctcaccagcgaggaagaaatcaaaaccactaaccctgtggctacagaggaatacggtatcgtggcagataacttgcagcagcaaaacacggctcctcaaattggaactgtcaacagccagggggccttacccggtatggtctggcagaaccgggacgtgtacctgcagggtcccatctgggccaagattcctcacacggacggcaacttccacccgtctccgctgatgggcggctttggcctgaaacatcctccgcctcagatcctgatcaagaacacgcctgtacctgcggatcctccgaccaccttcaaccagtcaaagctgaactctttcatcacgcaatacagcaccggacaggtcagcgtggagatcgagtgggagctgcagaaggaaaacagcaagcgctggaacccggagatccagtacacttccaactattacaagtctaataatgttgaatttgctgttaatactgaaggtgtatatagtgaaccccgccccattggcaccagatacctgactcgtaatctgtaa

SEQ ID NO: 348 - protein, 737 aa, Artificial Sequence; identical to SEQ ID NO: 336
  source: /note="Description of Artificial Sequence: Synthetic polypeptide"

SEQ ID NO: 349 - DNA, 2211 bp, Artificial Sequence
  source: /note="Description of Artificial Sequence: Synthetic polynucleotide"
atggctgccgatggttatcttccagattggctcgaggacaacctctctgagggcattcgcgagtggtgggacttgaaacctggagcccctaaacccaaggcaaatcaacaacatcaggacaacgctcgaggtcttgtgcttccgggttacaaataccttggacccggcaacggactcgacaagggggagccggtcaacgcagcagacgcggcggccctcgagcacgacaaggcctacgaccagcagctcaaggccggagacaacccgtacctcaagtacaaccacgccgacgccgagttccaggagcggctcaaagaagatacgtcttttgggggcaacctcgggcgagcagtcttccaggccaaaaagaggcttcttgaacctcttggtctggttgaggaagcggctaagacggctcctggaaagaagagaccggtagagccatcaccccagcgttctccagactcctctacgggcatcggcaagaaaggccaacagcccgctaaaaagagactcaattttggtcagactggcgactcagagtcagtccccgacccacaacctctcggagaacctccagcaacccccgctgctgtgggacctactacaatggcttcaggcggtggcgcaccaatggcagacaataacgagggtgccgatggagtgggtaattcctcaggaaattggcattgcgattcccaatggctgggcgacagagtcatcaccaccagcaccagaacctgggccctgcccacttacaacaaccatctctacaagcaaatctccagccaatcaggagcttcaaacgacaaccactactttggctacagcaccccttgggggtattttgactttaacagattccactgccacttttcaccacgtgactggcaaagactcatcaacaacaactggggattccgacccaagagactcaacttcaagctcttcaacatccaagtcaaggaggtcacgacgaatgatggcgtcacgaccatcgctaataaccttaccagcacggttcaagtcttctcggactcggagtaccagttgccgtacgtcctcggctctgcgcaccagggctgcctccctccgttcccggcggacgtgttcatgattccgcagtacggctacctaacgctcaacaatggcagccaagccgtgggacgttcatccttttactgcctggaatatttcccttctcagatgctgagaacgggcaacaactttaccttcagctacacttttgaggacgttcctttccacagcagctacgctcacagccagagtctggaccgtctcatgaatcctctcatcgaccagtacctgtattacttgagcagaacaaacactccaagtggaaccaccacgcagtcaaggcttcagttttctcaggccggagcgagtgacattcgggaccagtctaggaactggcttcctggaccctgttaccgccagcagcgcgtttctaaaacaaaaacagacaacaacaacagcaattttacctggactggtgcttcaaaatataaccttaatgggcgtgaatctataatcaaccctggcactgctatggcctcacacaaagacgacgaagacaagttctttcccatgagcggtgtcatgatttttggaaaagagagcgccggagcttcaaacactgcattggacaatgtcatgattacagacgaagaggaaattaaagccactaaccctgtggccaccgaaagatttgggaccgtggcagtcaatttccagagcagcagcacagaccctgcgaccggagatgtgcatgctatgggagcattacctggcatggtgtggcaagatagagacgtgtacctgcagggtcccatttgggccaaaattcctcacacagatggacactttcacccgtctcctcttatgggcggctttggactcaagaacccgcctcctcagatcctcatcaaaaacacgcctgttcctgcgaatcctccggcggagttttcagctacaaagtttgcttcattcatcacccaatactccacaggacaagtgagtgtggaaattgaatgggagctgcagaaagaaaacagcaagcgctggaatcccgaagtgcagtacacatccaattatgcaaaatctgccaacgttgattttactgtggacaacaatggactttatactgagcctcgccccattggcacccgttaccttacccgtcccctgtaa

SEQ ID NO: 350 - protein, 736 aa, Artificial Sequence
  source: /note="Description of Artificial Sequence: Synthetic polypeptide"
MAADGYLPDWLEDNLSEGIREWWDLKPGAPKPKANQQHQDNARGLVLPGYKYLGPGNGLDKGEPVNAADAAALEHDKAYDQQLKAGDNPYLKYNHADAEFQERLKEDTSFGGNLGRAVFQAKKRLLEPLGLVEEAAKTAPGKKRPVEPSPQRSPDSSTGIGKKGQQPAKKRLNFGQTGDSESVPDPQPLGEPPATPAAVGPTTMASGGGAPMADNNEGADGVGNSSGNWHCDSQWLGDRVITTSTRTWALPTYNNHLYKQISSQSGASNDNHYFGYSTPWGYFDFNRFHCHFSPRDWQRLINNNWGFRPKRLNFKLFNIQVKEVTTNDGVTTIANNLTSTVQVFSDSEYQLPYVLGSAHQGCLPPFPADVFMIPQYGYLTLNNGSQAVGRSSFYCLEYFPSQMLRTGNNFTFSYTFEDVPFHSSYAHSQSLDRLMNPLIDQYLYYLSRTNTPSGTTTQSRLQFSQAGASDIRDQSRNWLPGPCYRQQRVSKTKTDNNNSNFTWTGASKYNLNGRESIINPGTAMASHKDDEDKFFPMSGVMIFGKESAGASNTALDNVMITDEEEIKATNPVATERFGTVAVNFQSSSTDPATGDVHAMGALPGMVWQDRDVYLQGPIWAKIPHTDGHFHPSPLMGGFGLKNPPPQILIKNTPVPANPPAEFSATKFASFITQYSTGQVSVEIEWELQKENSKRWNPEVQYTSNYAKSANVDFTVDNNGLYTEPRPIGTRYLTRPL

SEQ ID NO: 351 - DNA, 2211 bp, Artificial Sequence
  source: /note="Description of Artificial Sequence: Synthetic polynucleotide"
atggctgccgatggttatcttccagattggctcgaggacaaccttagtgaaggaattcgcgagtggtgggcgctgaaacctggagccccgaagcccaaagccaaccagcaaaagcaggacgacggccggggtctggtgcttccgggttacaaatacctcggacccggtaacggactcgacaaaggagagccggtcaacgaggcggacgcggcagccctcgagcacgacaaggcctacgaccagcagctcaaagcgggtgacaatccgtacctgcggtataaccacgccgacgccgagtttcaggagcgtctgcaagaagatacgtcttttgggggcaacctcgggcgagcagtcttccaggccaagaagcgggttctcgaacctctcggtctggttgaggaaggcgctaagacggctcccggaaagaaacgtccggtagagcagtcgccacaagagccagactcctctacgggcatcggcaagaaaggccaacagcccgccagaaaaagactcaatttcggtcagactggcgactcagagtcagttccagaccctcaacctctcggagaacctccagcagcgccctctggtgtgggacctactacaatggcttcaggcggtggcgcaccaatggcagacaataacgaaggcgccgacggagtgggtaatgcctcaggaaattggcattgcgattccacatggctgggcgacagagtcatcaccaccagcacccgaacatgggccttgcccacctataacaaccacctctacaagcaaatctccagtgcttcaacgggggccagcaacgacaacacctacttcggctacagcaccccctgggggtattttgatttcaacagattccactgccatttctcaccacgtgactggcagcgactcatcaacaacaattggggattccggcccaagagactcaacttcaaactcttcaacatccaagtcaaggaggtcacgacgaatgatggcgtcacgaccatcgctaataaccttaccagcacggttcaagtcttctcggactcggagtaccagttgccgtacgtcctcggctctgcgcaccagggctgcctccctccgttcccggcggacgtgttcatgattccgcagtacggctacctaacgctcaacaatggcagccaggcagtgggacggtcatccttttactgcctggaatatttcccatcgcagatgctgagaacgggcaataactttaccttcagctacaccttcgaggacgtgcctttccacagcagctacgcgcacagccagagcctggaccggctgatgaatcctctcatcgaccagtacctgtattacctgaacagaactcagaatcagtccggaagtgcccaaaacaaggacttgctgtttagccgggggtctccagctggcatgtctgttcagcccaaaaactggctacctggaccctgttatcggcagcagcgcgtttctaaaacaaaaacagacaacaacaacagcaattttacctggactggtgcttcaaaatataacctcaatgggcgtgaatccatcatcaaccctggcactgctatggcctcacacaaagacgacgaagacaagttctttcccatgagcggtgtcatgatttttggaaaagagagcgccggagcttcaaacactgcattggacaatgtcatgattacagacgaagaggaaattaaagccactaaccctgtggccaccgaaagatttgggaccgtggcagtcaatttccagagcagcagcacagaccctgcgaccggagatgtgcatgttatgggagccttacctggaatggtgtggcaagacagagacgtatacctgcagggtcctatttgggccaaaattcctcacacagatggacactttcacccgtctcctcttatgggcggctttggactcaagaacccgcctcctcagatcctcatcaaaaacacgcctgttcctgcgaatcctccggcagagttttcggctacaaagtttgcttcattcatcacccagtattccacaggacaagtgagcgtggagattgaatgggagctgcagaaagaaaacagcaaacgctggaatcccgaagtgcagtatacatctaactatgcaaaatctgccaacgttgatttcactgtggacaacaatggactttatactgagcctcgccccattggcacccgttacctcacccgtcccctgtaa

SEQ ID NO: 352 - protein, 736 aa, Artificial Sequence
  source: /note="Description of Artificial Sequence: Synthetic polypeptide"
MAADGYLPDWLEDNLSEGIREWWALKPGAPKPKANQQKQDDGRGLVLPGYKYLGPGNGLDKGEPVNEADAAALEHDKAYDQQLKAGDNPYLRYNHADAEFQERLQEDTSFGGNLGRAVFQAKKRVLEPLGLVEEGAKTAPGKKRPVEQSPQEPDSSTGIGKKGQQPARKRLNFGQTGDSESVPDPQPLGEPPAAPSGVGPTTMASGGGAPMADNNEGADGVGNASGNWHCDSTWLGDRVITTSTRTWALPTYNNHLYKQISSASTGASNDNTYFGYSTPWGYFDFNRFHCHFSPRDWQRLINNNWGFRPKRLNFKLFNIQVKEVTTNDGVTTIANNLTSTVQVFSDSEYQLPYVLGSAHQGCLPPFPADVFMIPQYGYLTLNNGSQAVGRSSFYCLEYFPSQMLRTGNNFTFSYTFEDVPFHSSYAHSQSLDRLMNPLIDQYLYYLNRTQNQSGSAQNKDLLFSRGSPAGMSVQPKNWLPGPCYRQQRVSKTKTDNNNSNFTWTGASKYNLNGRESIINPGTAMASHKDDEDKFFPMSGVMIFGKESAGASNTALDNVMITDEEEIKATNPVATERFGTVAVNFQSSSTDPATGDVHVMGALPGMVWQDRDVYLQGPIWAKIPHTDGHFHPSPLMGGFGLKNPPPQILIKNTPVPANPPAEFSATKFASFITQYSTGQVSVEIEWELQKENSKRWNPEVQYTSNYAKSANVDFTVDNNGLYTEPRPIGTRYLTRPL

SEQ ID NO: 353 - DNA, 2205 bp, Artificial Sequence
  source: /note="Description of Artificial Sequence: Synthetic polynucleotide"
atggctgctgacggttatcttccagattggctcgaggacaacctttctgaaggcattcgtgagtggtgggctctgaaacctggagtccctcaacccaaagcgaaccaacaacaccaggacaaccgtcggggtcttgtgcttccgggttacaaatacctcggacccggtaacggactcgacaaaggagagccggtcaacgaggcggacgcggcagccctcgaacacgacaaggcctacgaccagcagctcaaggccggagacaacccgtacctcaagtacaaccacgccgacgccgagttccaggagcggctcaaagaagatacgtcttttgggggcaacctcgggcgagcagtcttccaggccaaaaagaggcttcttgaacctcttggtctggttgaggaagcggctaagacggctcctggaaagaagaggcctgtagagcagtctcctcaggaaccggactcctccgcgggtattggcaaatcgggtgcacagcccgctaaaaagagactcaatttcggtcagactggcgacacagagtcagtcccagaccctcaaccaatcggagaacctcccgcagccccctcaggtgtgggatctcttacaatggcttcaggtggtggcgcaccagtggcagacaataacgaaggtgccgatggagtgggtagttcctcgggaaattggcattgcgattcccaatggctgggggacagagtcatcaccaccagcacccgaacctgggccctgcccacctacaacaaccacctctacaaacaaatttccagccaatcaggagcctcgaacgacaatcactactttggctacagcaccccttgggggtattttgacttcaacagattccactgccacttttcaccacgtgactggcagcgactcatcaacaacaactggggattccggcccaagagactcagcttcaagctcttcaacatccaggtcaaagaggttacggacaacaatggagtcaagaccatcgccaataaccttaccagcacggtccaggtcttcacggactcagactatcagctcccgtacgtgctcgggtcggctcacgagggctgcctcccgccgttcccagcggacgttttcatgattcctcagtacgggtatctgacgcttaatgatggaagccaggccgtgggtcgttcgtccttttactgcctggaatatttcccgtcgcaaatgctaagaacgggtaacaacttccagttcagctacgagtttgagaacgtacctttccatagcagctacgctcacagccaaagcctggaccgactaatgaatccactcatcgaccaatacttgtactatctctcaaagactattaacggttctggacagaatcaacaaacgctaaaattcagtgtggccggacccagcaacatggctgtccagggaagaaactacatacctggacccagctaccgacaacaacgtgtctcaaccactgtgactcaaaacaacaacagcgaatttgcttggcctggagcttcttcttgggctctcaatggacgtaatagcttgatgaatcctggacctgctatggccagccacaaagaaggagaggaccgtttctttcctttgtctggatctttaatttttggcaaacaaggaactggaagagacaacgtggatgcggacaaagtcatgataaccaacgaagaagaaattaaaactactaacccggtagcaacggagtcctatggacaagtggccacaaaccaccagagtgcccaagcacaggcgcagaccggctgggttcaaaaccaaggaatacttccgggtatggtttggcaggacagagatgtgtacctgcaaggacccatctgggccaagattcctcacacggacggcaacttccacccgtctccgctgatgggcggctttggcctgaaacatcctccgcctcagatcctgatcaagaacacgcctgtacctgcggatcctccgaccaccttcaaccagtcaaagctgaactctttcatcacgcaatacagcaccggacaggtcagcgtggaaattgaatgggagctgcagaaggaaaacagcaagcgctggaatcccgaagtgcagtatacatctaactatgcaaaatctgccaacgttgatttcactgtggacaacaatggactttatactgagcctcgccccattggcacccgttacctcacccgtcccctgtaa

SEQ ID NO: 354 - protein, 734 aa, Artificial Sequence
  source: /note="Description of Artificial Sequence: Synthetic polypeptide"
MAADGYLPDWLEDNLSEGIREWWALKPGVPQPKANQQHQDNRRGLVLPGYKYLGPGNGLDKGEPVNEADAAALEHDKAYDQQLKAGDNPYLKYNHADAEFQERLKEDTSFGGNLGRAVFQAKKRLLEPLGLVEEAAKTAPGKKRPVEQSPQEPDSSAGIGKSGAQPAKKRLNFGQTGDTESVPDPQPIGEPPAAPSGVGSLTMASGGGAPVADNNEGADGVGSSSGNWHCDSQWLGDRVITTSTRTWALPTYNNHLYKQISSQSGASNDNHYFGYSTPWGYFDFNRFHCHFSPRDWQRLINNNWGFRPKRLSFKLFNIQVKEVTDNNGVKTIANNLTSTVQVFTDSDYQLPYVLGSAHEGCLPPFPADVFMIPQYGYLTLNDGSQAVGRSSFYCLEYFPSQMLRTGNNFQFSYEFENVPFHSSYAHSQSLDRLMNPLIDQYLYYLSKTINGSGQNQQTLKFSVAGPSNMAVQGRNYIPGPSYRQQRVSTTVTQNNNSEFAWPGASSWALNGRNSLMNPGPAMASHKEGEDRFFPLSGSLIFGKQGTGRDNVDADKVMITNEEEIKTTNPVATESYGQVATNHQSAQAQAQTGWVQNQGILPGMVWQDRDVYLQGPIWAKIPHTDGNFHPSPLMGGFGLKHPPPQILIKNTPVPADPPTTFNQSKLNSFITQYSTGQVSVEIEWELQKENSKRWNPEVQYTSNYAKSANVDFTVDNNGLYTEPRPIGTRYLTRPL

SEQ ID NO: 355 - DNA, 2211 bp, Artificial Sequence
  source: /note="Description of Artificial Sequence: Synthetic polynucleotide"
atggctgccgatggttatcttccagattggctcgaggacaacctctctgagggcattcgcgagtggtgggcgctgaaacctggagccccgaagcccaaagccaaccagcaaaagcaggacgacggccggggtctggtgcttcctggctacaagtacctcggacccttcaacggactcgacaagggggagcccgtcaacgcggcggacgcagcggccctcgagcacgacaaggcctacgaccagcagctgcaggcgggtgacaatccgtacctgcggtataaccacgccgacgccgagtttcaggagcgtctgcaagaagatacgtcttttgggggcaacctcgggcgagcagtcttccaggccaagaagtgggttctcgaacctctcggtctggttgaggaaggcgctaagacggctcctggaaagaaacgtccggtagagcagtcgccacaagagccagactcctcctcgggcatcggcaagacaggccagcagcccgctaaaaagagactcaattttggtcagactggcgactcagagtcagtccccgacccacaacctctcggagaacctccagcaacccccgctgctgtgggacctactacaatggcttcaggcggtggcgcaccaatggcagacaataacgaaggcgccgacggagtgggtaatgcctcaggaaattggcattgcgattccacatggctgggcgacagagtcatcaccaccagcacccgcacctgggccttgcccacctacaataaccacctctacaagcaaatctccagtgcttcaacgggggccagcaacgacaaccactacttcggctacagcaccccctgggggtattttgatttcaacagattccactgccatttctcaccacgtgactggcagcgactcatcaacaacaattggggattccggcccaagagactcaacttcaagctcttcaacatccaagtcaaggaggtcacgacgaatgatggcgtcacaaccatcgctaataaccttaccagcacggttcaagtcttctcggactcggagtaccagcttccgtacgtcctcggctctgcgcaccagggctgcctccctccgttcccggcggacgtgttcatgattccgcaatacggctacctgacgctcaacaatggcagccaagccgtgggacgttcatccttttactgcctggaatatttcccttctcagatgctgagaacgggcaacaactttaccttcagctacacctttgaggaagtgcctttccacagcagctacgcgcacagccagagcctggaccggctgatgaatcctctcatcgaccaatacctgtattacctgaacagaactcaaaatcagtccggaagtgcccaaaacaaggacttgctgtttagccgtgggtctccagctggcatgtctgttcagcccaaaaactggctacctggaccctgttatcggcagcagcgcgtttctaaaacaaaaacagacaacaacaacagcaattttacctggactggtgcttcaaaatataacctcaatgggcgtgaatccatcatcaaccctggcactgctatggcctcacacaaagacgacgaagacaagttctttcccatgagcggtgtcatgatttttggaaaggagagcgccggagcttcaaacactgcattggacaatgtcatgatcaccgacgaagaggaaatcaaagccactaaccccgtggccaccgaaagatttgggactgtggcagtcaatctccagagcagcagcacagaccctgcgaccggagatgtgcatgttatgggagccttacctggcatggtgtggcaagatagagacgtgtacctgcagggtcccatttgggccaaaattcctcacacagatggacactttcacccgtctcctcttatgggcggctttggactcaagaacccgcctcctcagatcctcatcaaaaacacgcctgttcctgcgaatcctccggcggagttttcagctacaaagtttgcttcattcatcacccaatactccacaggacaagtgagtgtggaaattgaatgggagctgcagaaagaaaacagcaagcgctggaatcccgaagtgcagtacacatccaattatgcaaaatctgccaacgttgattttactgtggacaacaatggactttatactgagcctcgccccattggcacccgttacctcacccgtcccctgtaa

SEQ ID NO: 356 - protein, 736 aa, Artificial Sequence
  source: /note="Description of Artificial Sequence: Synthetic polypeptide"
MAADGYLPDWLEDNLSEGIREWWALKPGAPKPKANQQKQDDGRGLVLPGYKYLGPFNGLDKGEPVNAADAAALEHDKAYDQQLQAGDNPYLRYNHADAEFQERLQEDTSFGGNLGRAVFQAKKWVLEPLGLVEEGAKTAPGKKRPVEQSPQEPDSSSGIGKTGQQPAKKRLNFGQTGDSESVPDPQPLGEPPATPAAVGPTTMASGGGAPMADNNEGADGVGNASGNWHCDSTWLGDRVITTSTRTWALPTYNNHLYKQISSASTGASNDNHYFGYSTPWGYFDFNRFHCHFSPRDWQRLINNNWGFRPKRLNFKLFNIQVKEVTTNDGVTTIANNLTSTVQVFSDSEYQLPYVLGSAHQGCLPPFPADVFMIPQYGYLTLNNGSQAVGRSSFYCLEYFPSQMLRTGNNFTFSYTFEEVPFHSSYAHSQSLDRLMNPLIDQYLYYLNRTQNQSGSAQNKDLLFSRGSPAGMSVQPKNWLPGPCYRQQRVSKTKTDNNNSNFTWTGASKYNLNGRESIINPGTAMASHKDDEDKFFPMSGVMIFGKESAGASNTALDNVMITDEEEIKATNPVATERFGTVAVNLQSSSTDPATGDVHVMGALPGMVWQDRDVYLQGPIWAKIPHTDGHFHPSPLMGGFGLKNPPPQILIKNTPVPANPPAEFSATKFASFITQYSTGQVSVEIEWELQKENSKRWNPEVQYTSNYAKSANVDFTVDNNGLYTEPRPIGTRYLTRPL

SEQ ID NO: 357 - DNA, 2214 bp, Artificial Sequence
  source: /note="Description of Artificial Sequence: Synthetic polynucleotide"
atggctgccgatggttatcttccagattggctcgaggacaaccttagtgaaggaattcgcgagtggtgggctttgaaacctggagcccctcaacccaaggcaaatcaacaacatcaagacaacgctcgaggtcttgtgcttccgggttacaaataccttggacccggcaacggactcgacaagggggagccggtcaacgcagcagacgcggcggccctcgagcacgacaaggcctacgaccagcagctgcaggcgggtgacaatccgtacctgcggtataaccacgccgacgccgagtttcaggagcgtctgcaagaagatacgtcttttgggggcaaccttggcagagcagtcttccaggccaaaaagaggatccttgagcctcttggtctggttgaggaagcagctaaaacggctcctggaaagaagaggcctgtagatcagtctcctcaggaaccggactcatcatctggtgttggcaaatcgggcaaacagcctgccagaaaaagactaaatttcggtcagactggcgactcagagtcagtcccagaccctcaacctctcggagaaccaccagcagcccccacaagtttgggatctaatacaatggcttcaggcggtggcgcaccaatggcagacaataacgagggtgccgatggggtgggtagttcctcgggaaattggcattgcgattcccaatggctgggggacagagtcatcaccaccagcacccgaacctgggccctgcccacctacaacaatcacctctacaagcaaatctccaacgggacatcgggaggagccaccaacgacaacacctacttcggctacagcaccccctgggggtattttgactttaacagattccactgccacttttcaccacgtgactggcagcgactcatcaacaacaactggggattccggcccaagagactcagcttcaagctcttcaacatccaggtcaaggaggtcacgcagaatgaaggcaccaagaccatcgccaataacctcaccagcaccatccaggtgtttacggactcggagtaccagctgccgtacgttctcggctcggcgcaccagggctgcctccctccgttcccggcggacgtcttcatggtgccacagtatggatacctgacgctcaacaatggcagccaagccgtgggacgttcatccttttactgcctggaatatttcccttctcagatgctgagaacgggcaacaactttaccttcagctacacctttgaggaagtgcctttccacagcagctacgcgcacagccagagcttggaccggctgatgaatcctctgattgaccagtacctgtactacttgtctcggactcaaacaacaggaggcacggcaaatacgcagactctgggcttcagccaaggtgggcctaatacaatggccaatcaggcaaagaactggctgccaggaccctgttaccgccaacaacgcgtctcaacgacaaccgggcaaaacaacaatagcaactttgcctggactgctgggaccaaataccatctgaatggaagaaattcattggctaatcctggcatcgctatggcaacacacaaagacgacgaggagcgtttttttcccagtaacgggatcctgatttttggcaaacaaaatgctgccagagacaatgcggattacagcgatgtcatgctcaccagcgaggaagaaatcaaaaccactaaccctgtggctacagaggaatacggtatcgtggcagataacttgcagcagcaaaacacggctcctcaaattggaactgtcaacagccagggggacttacccggtatggtctggcagaaccgggacgtgtacctgcagggtcccatctgggccaagattcctcacacggacggcaacttccacccgtctccgctgatgggcggctttggcctgaaacatcctccgcctcagatcctgatcaagaacacgcctgtacctgcggatcctccgaccaccttcaaccagtcaaagctgaactctttcatcacgcaatacagcaccggacaggtcagcgtggagatcgagtgggagctgcagaaggaaaacagcaagcgctggaacccggagatccagtacacttccaactattacaagtctaataatgttgaatttgctgttaatactgaaggtgtatatagtgaaccccgccccattggcaccagatacctgactcgtaatctgtaa

SEQ ID NO: 358 - protein, 737 aa, Artificial Sequence
  source: /note="Description of Artificial Sequence: Synthetic polypeptide"
MAADGYLPDWLEDNLSEGIREWWALKPGAPQPKANQQHQDNARGLVLPGYKYLGPGNGLDKGEPVNAADAAALEHDKAYDQQLQAGDNPYLRYNHADAEFQERLQEDTSFGGNLGRAVFQAKKRILEPLGLVEEAAKTAPGKKRPVDQSPQEPDSSSGVGKSGKQPARKRLNFGQTGDSESVPDPQPLGEPPAAPTSLGSNTMASGGGAPMADNNEGADGVGSSSGNWHCDSQWLGDRVITTSTRTWALPTYNNHLYKQISNGTSGGATNDNTYFGYSTPWGYFDFNRFHCHFSPRDWQRLINNNWGFRPKRLSFKLFNIQVKEVTQNEGTKTIANNLTSTIQVFTDSEYQLPYVLGSAHQGCLPPFPADVFMVPQYGYLTLNNGSQAVGRSSFYCLEYFPSQMLRTGNNFTFSYTFEEVPFHSSYAHSQSLDRLMNPLIDQYLYYLSRTQTTGGTANTQTLGFSQGGPNTMANQAKNWLPGPCYRQQRVSTTTGQNNNSNFAWTAGTKYHLNGRNSLANPGIAMATHKDDEERFFPSNGILIFGKQNAARDNADYSDVMLTSEEEIKTTNPVATEEYGIVADNLQQQNTAPQIGTVNSQGDLPGMVWQNRDVYLQGPIWAKIPHTDGNFHPSPLMGGFGLKHPPPQILIKNTPVPADPPTTFNQSKLNSFITQYSTGQVSVEIEWELQKENSKRWNPEIQYTSNYYKSNNVEFAVNTEGVYSEPRPIGTRYLTRNL

SEQ ID NO: 359 - DNA, 2205 bp, Artificial Sequence
  source: /note="Description of Artificial Sequence: Synthetic polynucleotide"
atggctgctgacggttatcttccagattggctcgaggacaacctttctgaaggcattcgtgagtggtgggctctgaaacctggagtccctcaacccaaagcgaaccaacaacaccaggacaactgtcggggtcttgtgcttccgggttacaaatacctcggacccggtaacggactcgacaaaggagagccggtcaacgaggcggacgcggcagccctcgaacacgacaaggcctacgaccagcagctcaaggccggagacaacccgtacctcaagtacaaccacgccgacgccgagttccaggagcggctcaaagaagatacgtcttttgggggcaacctcgggcgagcagtcttccagaccaaaaagaggcttcttgaacctcttggtctggttgaggaagcggctaagacggctcctggaaagaagaggcctgtagagcagtctcctcaggaaccggactcctccgcgggtattggcaaatcgggtgcacagcccgctaaaaagagactcaatttcggtcagactggcgacacagagtcagtcccagaccctcaaccaatcggagaacctcccgcagccccctcaggtgtgggatctcttacaatggcttcaggtggtggcgcaccagtggcagacaataacgaaggtgccgatggagtgggtagttcctcgggaaattggcattgcgattcccaatggctgggggacagagtcatcaccaccagcacccgaacctgggccctgcccacctacaacaaccacctctacaaacaaatttccagccaatcaggagcctcgaacgacaatcactactttggctacagcaccccttgggggtattttgacttcaacagattccactgccacttttcaccacgtgactggcagcgactcatcaacaacaactggggattccggcccaagagactcagcttcaagctcttcaacatccaggtcaaagaggttacggacaacaatggagtcaagaccatcgccaataaccttaccagcacggtccaggtcttcacggactcagactatcagctcccgtacgtgctcgggtcggctcacgagggctgcctcccgccgttcccagcggacgttttcatgattcctcagtacgggtatctgacgcttaatgatggaagccaggccgtgggtcgttcgtccttttactgcctggaatatttcccgtcgcaaatgctaagaacgggtaacaacttccagttcagctacgagtttgagaacgtacctttccatagcagctacgctcacagccaaagcctggaccgactaatgaatccactcatcgaccaatacttgtactatctctcaaagactattaacggttctggacagaatcaacaaacgctaaaattcagtgtggccggacccagcaacatggctgtccagggaagaaactacatacctggacccagctaccgacaacaacgtgtctcaaccactgtgactcaaaacaacaacagcgaatttgcttggcctggagcttcttcttgggctctcaatggacgtaatagcttgatgaatcctggacctgctatggccagccacaaagaaggagaggaccgtttctttcctttgtctggatctttaatttttggcaaacaaggaactggaagagacaacgtggatgcggacaaagtcatgataaccaacgaagaagaaattaaaactactaacccggtagcaacggagtcctatggacaagtggccacaaaccaccagagtgcccaagcacaggcgcagaccggctgggttcaaaaccaaggaatacttccgggtatggtttggcaggacagagatgtgtacctgcaaggacccatctgggccaagattcctcacacggacggcaacttccacccgtctccgctgatgggcggctttggcctgaaacatcctccgcctcagatcctgatcaagaacacgcctgttcctgcgaatcctccggcggagttttcagctacaaagtttgcttcattcatcacccagtactccacaggacaagtgagtgtggaaattgaatgggagctgcagaaagaaaacagcaagcgctggaatcccgaagtgcagtacacatccaattatgcaaaatctgccaacgttgattttactgtggacaacaatggactttatactgagcctcgccccattggcacccgttaccttaccaaacctctgtaa

SEQ ID NO: 360 - protein, 734 aa, Artificial Sequence
  source: /note="Description of Artificial Sequence: Synthetic polypeptide"
MAADGYLPDWLEDNLSEGIREWWALKPGVPQPKANQQHQDNCRGLVLPGYKYLGPGNGLDKGEPVNEADAAALEHDKAYDQQLKAGDNPYLKYNHADAEFQERLKEDTSFGGNLGRAVFQTKKRLLEPLGLVEEAAKTAPGKKRPVEQSPQEPDSSAGIGKSGAQPAKKRLNFGQTGDTESVPDPQPIGEPPAAPSGVGSLTMASGGGAPVADNNEGADGVGSSSGNWHCDSQWLGDRVITTSTRTWALPTYNNHLYKQISSQSGASNDNHYFGYSTPWGYFDFNRFHCHFSPRDWQRLINNNWGFRPKRLSFKLFNIQVKEVTDNNGVKTIANNLTSTVQVFTDSDYQLPYVLGSAHEGCLPPFPADVFMIPQYGYLTLNDGSQAVGRSSFYCLEYFPSQMLRTGNNFQFSYEFENVPFHSSYAHSQSLDRLMNPLIDQYLYYLSKTINGSGQNQQTLKFSVAGPSNMAVQGRNYIPGPSYRQQRVSTTVTQNNNSEFAWPGASSWALNGRNSLMNPGPAMASHKEGEDRFFPLSGSLIFGKQGTGRDNVDADKVMITNEEEIKTTNPVATESYGQVATNHQSAQAQAQTGWVQNQGILPGMVWQDRDVYLQGPIWAKIPHTDGNFHPSPLMGGFGLKHPPPQILIKNTPVPANPPAEFSATKFASFITQYSTGQVSVEIEWELQKENSKRWNPEVQYTSNYAKSANVDFTVDNNGLYTEPRPIGTRYLTKPL

SEQ ID NO: 361 - DNA, 2211 bp, Artificial Sequence
  source: /note="Description of Artificial Sequence: Synthetic polynucleotide"
atggctgccgatggttatcttccagattggctcgaggacaacctctctgagggcattcgcgagtggtgggacttgaaacctggagcccctaaacccaaggcaaatcaacaacatcaggacaacgctcgaggtcttgtgcttccgggttacaaataccttggacccggcaacggactcgacaagggggagccggtcaacgcagcagacgcggcggccctcgagcacgacaaggcctacgaccagcagctcaaggccggagacaacccgtacctcaagtacaaccacgccgacgccgagttccaggagcggctcaaagaagatacgtcttttgggggcaacctcgggcgagcagtcttccaggccaaaaagaggcttcttgaacctcttggtctggttgaggaagcggctaagacggctcctggaaagaagagaccggtagagccatcaccccagcgttctccagactcctctacgggcatcggcaagaaaggccaacagcccgctaaaaagagactcaattttggtcagactggcgactcagagtcagtccccgacccacaacctctcggagaacctccagcaacccccgctgctgtgggacctactacaatggcttcaggcggtggcgcaccaatggcagacaataacgagggtgccgatggagtgggtaattcctcaggaaattggcattgcgattcccaatggctgggcgacagagtcatcaccaccagcaccagaacctgggccctgcccacttacaacaaccatctctacaagcaaatctccagccaatcaggagcttcaaacgacaaccactactttggctacagcaccccttgggggtattttgactttaacagattccactgccacttttcaccacgtgactggcaaagactcatcaacaacaactggggattccgacccaagagactcaacttcaagctcttcaacatccaagtcaaggaggtcacgacgaatgatggcgtcacgaccatcgctaataaccttaccagcacggttcaagtcttctcggactcggagtaccagttgccgtacgtcctcggctctgcgcaccagggctgcctccctccgttcccggcggacgtgttcatgattccgcagtacggctacctaacgctcaacaatggcagccaagccgtgggacgttcatccttttactgcctggaatatttcccttctcagatgctgagaacgggcaacaactttaccttcagctacacttttgaggacgttcctttccacagcagctacgctcacagccagagtctggaccgtctcatgaatcctctcatcgaccagtacctgtattacttgagcagaacaaacactccaagtggaaccaccacgcagtcaaggcttcagttttctcaggccggagcgagtgacattcgggaccagtctaggaactggcttcctggaccctgttaccgccagcagcgcgtttctaaaacaaaaacagacaacaacaacagcaattttacctggactggtgcttcaaaatataaccttaatgggcgtgaatctataatcaaccctggcactgctatggcctcacacaaagacgacgaagacaagttctttcccatgagcggtgtcatgatttttggaaaagagagcgccggagcttcaaacactgcattggacaatgtcatgatcacagacgaagaggaaatcaaagccactaaccccgtggccaccgaaagatttgggactgtggcagtcaatctccagagcagcagcacagaccctgcgaccggagatgtgcatgttatgggagcattacctggcatggtgtggcaagatagagacgtgtacctgcagggtcccatttgggccaaaattcctcacacagatggacactttcacccgtctcctcttatgggcggctttggactcaagaacccgcctcctcagatcctcatcaaaaacacgcctgttcctgcgaatcctccggcggagttttcagctacaaagtttgcttcattcatcacccaatactccacaggacaagtgagtgtggaaattgaatgggagctgcagaaagaaaacagcaagcgctggaatcccgaagtgcagtacacatccaattatgcaaaatctgccaacgttgattttactgtggacaacaatggactttatactgagcctcgccccattggcacccgttaccttacccgtcccctgtaa

SEQ ID NO: 362 - protein, 736 aa, Artificial Sequence
  source: /note="Description of Artificial Sequence: Synthetic polypeptide"
MAADGYLPDWLEDNLSEGIREWWDLKPGAPKPKANQQHQDNARGLVLPGYKYLGPGNGLDKGEPVNAADAAALEHDKAYDQQLKAGDNPYLKYNHADAEFQERLKEDTSFGGNLGRAVFQAKKRLLEPLGLVEEAAKTAPGKKRPVEPSPQRSPDSSTGIGKKGQQPAKKRLNFGQTGDSESVPDPQPLGEPPATPAAVGPTTMASGGGAPMADNNEGADGVGNSSGNWHCDSQWLGDRVITTSTRTWALPTYNNHLYKQISSQSGASNDNHYFGYSTPWGYFDFNRFHCHFSPRDWQRLINNNWGFRPKRLNFKLFNIQVKEVTTNDGVTTIANNLTSTVQVFSDSEYQLPYVLGSAHQGCLPPFPADVFMIPQYGYLTLNNGSQAVGRSSFYCLEYFPSQMLRTGNNFTFSYTFEDVPFHSSYAHSQSLDRLMNPLIDQYLYYLSRTNTPSGTTTQSRLQFSQAGASDIRDQSRNWLPGPCYRQQRVSKTKTDNNNSNFTWTGASKYNLNGRESIINPGTAMASHKDDEDKFFPMSGVMIFGKESAGASNTALDNVMITDEEEIKATNPVATERFGTVAVNLQSSSTDPATGDVHVMGALPGMVWQDRDVYLQGPIWAKIPHTDGHFHPSPLMGGFGLKNPPPQILIKNTPVPANPPAEFSATKFASFITQYSTGQVSVEIEWELQKENSKRWNPEVQYTSNYAKSANVDFTVDNNGLYTEPRPIGTRYLTRPL

SEQ ID NO: 363 - DNA, 2214 bp, Artificial Sequence; identical to SEQ ID NO: 335
  source: /note="Description of Artificial Sequence: Synthetic polynucleotide"

SEQ ID NO: 364 - protein, 737 aa, Artificial Sequence; identical to SEQ ID NO: 336
  source: /note="Description of Artificial Sequence: Synthetic polypeptide"

SEQ ID NO: 365 - DNA, 2205 bp, Artificial Sequence
  source: /note="Description of Artificial Sequence: Synthetic polynucleotide"
atggctgctgacggttatcttccagattggctcgaggacaacctttctgaaggcattcgtgagtggtgggctctgaaacctggagtccctcaacccaaagcgaaccaacaacaccaggacaaccgtcggggtcttgtgcttccgggttacaaatacctcggacccggtaacggactcgacaaaggagagccggtcaacgaggcggacgcggcagccctcgaacacgacaaggcctacgaccagcagctcaaggccggagacaacccgtacctcaagtacaaccacgccgacgccgagttccaggagcggctcaaagaagatacgtcttttgggggcaacctcgggcgagcagtcttccaggccaaaaagaggcttcttgaacctcttggtctggttgaggaagcggctaagacggctcctggaaagaagaggcctgtagagcagtctcctcaggaaccggactcctccgcgggtattggcaaatcgggtgcacagcccgctaaaaagagactcaatttcggtcagactggcgacacagagtcagtcccagaccctcaaccaatcggagaacctcccgcagccccctcaggtgtgggatctcttacaatggcttcaggtggtggcgcaccagtggcagacaataacgaaggtgccgatggagtgggtagttcctcgggaaattggcattgcgattcccaatggctgggggacagagtcatcaccaccagcacccgaacctgggccctgcccacctacaacaaccacctctacaaacaaatttccagccaatcaggagcctcgaacgacaatcactactttggctacagcaccccttgggggtattttgacttcaacagattccactgccacttttcaccacgtgactggcagcgactcatcaacaacaactggggattccggcccaagagactcagcttcaagctcttcaacatccaggtcaaagaggttacggacaacaatggagtcaagaccatcgccaataaccttaccagcacggtccaggtcttcacggactcagactatcagctcccgtacgtgctcgggtcggctcacgagggctgcctcccgccgttcccagcggacgttttcatgattcctcagtacgggtatctgacgcttaatgatggaagccaggccgtgggtcgttcgtccttttactgcctggaatatttcccgtcgcaaatgctaagaacgggtaacaacttccagttcagctacgagtttgagaacgtacctttccatagcagctacgctcacagccaaagcctggaccgactaatgaatccactcatcgaccaatacttgtactatctctcaaagactattaacggttctggacagaatcaacaaacgctaaaattcagtgtggccggacccagcaacatggctgtccagggaagaaactacatacctggacccagctaccgacaacaacgtgtctcaaccactgtgactcaaaacaacaacagcgaatttgcttggcctggagcttcttcttgggctctcaatggacgtaatagcttgatgaatcctggacctgctatggccagccacaaagaaggagaggaccgtttctttcctttgtctggatctttaatttttggcaaacaaggaactggaagagacaacgtggatgcggacaaagtcatgataaccaacgaagaagaaattaaaactactaacccggtagcaacggagtcctatggacaagtggccacaaaccaccagagtgcccaagcacaggcgcagaccggctgggttcaaaaccaaggaatacttccgggtatggtttggcaggacagagatgtgtacctgcaaggacccatttgggccaaaattcctcacacggacggcaactttcacccttctccgctgatgggagggtttggaatgaaacacccgcctcctcagatcctcatcaaaaacacacctgtacctgcggatcctccaacggccttcaacaaggacaagctgaactctttcatcacccagtattctactggccaagtcagcgtggagatcgagtgggagctgcagaaggaaaacagcaagcgctggaaccccgagatccagtacacctccaactactacaaatctacaagtgtggactttgctgttaatacagaaggcgtgtactctgaaccccgccccattggcacccgttacctcacccgtaatctgtaa

SEQ ID NO: 366 - protein, 734 aa, Artificial Sequence
  source: /note="Description of Artificial Sequence: Synthetic polypeptide"
MAADGYLPDWLEDNLSEGIREWWALKPGVPQPKANQQHQDNRRGLVLPGYKYLGPGNGLDKGEPVNEADAAALEHDKAYDQQLKAGDNPYLKYNHADAEFQERLKEDTSFGGNLGRAVFQAKKRLLEPLGLVEEAAKTAPGKKRPVEQSPQEPDSSAGIGKSGAQPAKKRLNFGQTGDTESVPDPQPIGEPPAAPSGVGSLTMASGGGAPVADNNEGADGVGSSSGNWHCDSQWLGDRVITTSTRTWALPTYNNHLYKQISSQSGASNDNHYFGYSTPWGYFDFNRFHCHFSPRDWQRLINNNWGFRPKRLSFKLFNIQVKEVTDNNGVKTIANNLTSTVQVFTDSDYQLPYVLGSAHEGCLPPFPADVFMIPQYGYLTLNDGSQAVGRSSFYCLEYFPSQMLRTGNNFQFSYEFENVPFHSSYAHSQSLDRLMNPLIDQYLYYLSKTINGSGQNQQTLKFSVAGPSNMAVQGRNYIPGPSYRQQRVSTTVTQNNNSEFAWPGASSWALNGRNSLMNPGPAMASHKEGEDRFFPLSGSLIFGKQGTGRDNVDADKVMITNEEEIKTTNPVATESYGQVATNHQSAQAQAQTGWVQNQGILPGMVWQDRDVYLQGPIWAKIPHTDGNFHPSPLMGGFGMKHPPPQILIKNTPVPADPPTAFNKDKLNSFITQYSTGQVSVEIEWELQKENSKRWNPEIQYTSNYYKSTSVDFAVNTEGVYSEPRPIGTRYLTRNL

(The sequence listing continues in the following parts.)
